United States Patent Application Publication US 2007/0042381 A1 - sequence listing, part 4

SEQ ID NO: 130489 - RNA, 22 nt, Human
acagggcagagggcaguuggua

SEQ ID NO: 130490 - RNA, 22 nt, Human
ugagcccuaagggucaagcagg

SEQ ID NO: 130491 - RNA, 22 nt, Human
acagccugcugccugcuucuug

SEQ ID NO: 130492 - RNA, 22 nt, Human
ggcucaggggccaggccugucc

SEQ ID NO: 130493 - RNA, 22 nt, Human
aaggaagggaaauagugauguc

SEQ ID NO: 130494 - RNA, 22 nt, Human
aaugauuuccccuacacagaag

SEQ ID NO: 130495 - RNA, 22 nt, Human
uggcucugaccagguagaggag

SEQ ID NO: 130496 - RNA, 22 nt, Human
gggcagcugcagggauggugac

SEQ ID NO: 130497 - RNA, 22 nt, Human
uuuaucuguccuuugccaguga

SEQ ID NO: 130498 - RNA, 22 nt, Human
agcacaggaccaaggaagcugu

SEQ ID NO: 130499 - RNA, 22 nt, Human
ggguccaggucuucaggcagag

SEQ ID NO: 130500 - RNA, 21 nt, Human
ccugcagcaccagaaggagau

SEQ ID NO: 130501 - RNA, 22 nt, Human
ucacauucucagcaucuauaca

SEQ ID NO: 130502 - RNA, 22 nt, Human
agcagcauacacaucauguuga

SEQ ID NO: 130503 - RNA, 20 nt, Human
aggaagccaaaggcugucuu

SEQ ID NO: 130504 - RNA, 22 nt, Human
ccugcccuagagaugacacaau

SEQ ID NO: 130505 - RNA, 19 nt, Human
uuugaaagaguuuuauugg

SEQ ID NO: 130506 - RNA, 20 nt, Human
gaguauauuucuuccuuugc

SEQ ID NO: 130507 - RNA, 22 nt, Human
aggacuuagaacauuauguacu

SEQ ID NO: 130508 - RNA, 22 nt, Human
gagaagccgagucagcugagcc

SEQ ID NO: 130509 - RNA, 22 nt, Human
gaugcacuuucuuuucaacagu

SEQ ID NO: 130510 - RNA, 22 nt, Human
aucuguguccuuauaagagaca

SEQ ID NO: 130511 - RNA, 22 nt, Human
agccacagcccacaggacucuu

SEQ ID NO: 130512 - RNA, 22 nt, Human
auaguuugaaggcuguucuacu

SEQ ID NO: 130513 - RNA, 22 nt, Human
gcaggccucuguugagggccuu

SEQ ID NO: 130514 - RNA, 22 nt, Human
auucuccagcucacuguccaua

SEQ ID NO: 130515 - RNA, 22 nt, Human
cucaccaggaacagcugcggag

SEQ ID NO: 130516 - RNA, 22 nt, Human
cagggacagccuugggguggcg

SEQ ID NO: 130517 - RNA, 22 nt, Human
ugugugcauucacaugcaugcc

SEQ ID NO: 130518 - RNA, 22 nt, Human
caggccugucugcacaugaggc

SEQ ID NO: 130519 - RNA, 22 nt, Human
cucuuaguaaugccaugaagca

SEQ ID NO: 130520 - RNA, 22 nt, Human
aagucacagcuaaauagcuaag

SEQ ID NO: 130521 - RNA, 22 nt, Human
ucaagagaagugcuccacagua

SEQ ID NO: 130522 - RNA, 22 nt, Human
aagacccacaaggcugaauguu

SEQ ID NO: 130523 - RNA, 22 nt, Human
uucaggauuauacucucuuccc

SEQ ID NO: 130524 - RNA, 22 nt, Human
uggaggcauuuuagguugucac

SEQ ID NO: 130525 - RNA, 22 nt, Human
uggaagcagugauucuugucug

SEQ ID NO: 130526 - RNA, 20 nt, Human
aggagaugauccagagucag

SEQ ID NO: 130527 - RNA, 22 nt, Human
cucuucuuauggccguggcuga

SEQ ID NO: 130528 - RNA, 22 nt, Human
uauuugcuccuuaggcauauuu

SEQ ID NO: 130529 - RNA, 22 nt, Human
uguagugugacauaggugucca

SEQ ID NO: 130530 - RNA, 22 nt, Human
cucacugcccugaaguuggguu

SEQ ID NO: 130531 - RNA, 22 nt, Human
ucucuuccaguaagagucuuua

SEQ ID NO: 130532 - RNA, 22 nt, Human
gccaggcagccacccucugcga

SEQ ID NO: 130533 - RNA, 22 nt, Human
auuuucuauucugcugguuuag

SEQ ID NO: 130534 - RNA, 22 nt, Human
gagcucagcccaaagagcagug

SEQ ID NO: 130535 - RNA, 22 nt, Human
caggucccgccccgggcugacc

SEQ ID NO: 130536 - RNA, 22 nt, Human
ggagcugggguuggcaucuucc

SEQ ID NO: 130537 - RNA, 20 nt, Human
gacaggagaguuagguaggu

SEQ ID NO: 130538 - RNA, 22 nt, Human
ucugucucaaguucuugcacuc

SEQ ID NO: 130539 - RNA, 22 nt, Human
acaauguguuuuuauacauuug

SEQ ID NO: 130540 - RNA, 22 nt, Human
acauuucucccugcaugccugc

SEQ ID NO: 130541 - RNA, 18 nt, Human
ucacagugcucuugccua

SEQ ID NO: 130542 - RNA, 22 nt, Human
gguggggucacgacagagggaa

SEQ ID NO: 130543 - RNA, 22 nt, Human
ucuggcccagccccugagguca

SEQ ID NO: 130544 - RNA, 22 nt, Human
gcagcuuuguggagaggcccau

SEQ ID NO: 130545 - RNA, 22 nt, Human
aggaggccgauuucagaggucg

SEQ ID NO: 130546 - RNA, 22 nt, Human
ggcaaaaaccacaauuacuuuu

SEQ ID NO: 130547 - RNA, 22 nt, Human
gcagcagagcuuuguccuggcu

SEQ ID NO: 130548 - RNA, 22 nt, Human
auggccuggccagagcucugcu

SEQ ID NO: 130549 - RNA, 22 nt, Human
gugcauuugugcaugcacaugu

SEQ ID NO: 130550 - RNA, 22 nt, Human
gagcucuguguagccugagggu

SEQ ID NO: 130551 - RNA, 22 nt, Human
uggcucugagacacaggcucuc

SEQ ID NO: 130552 - RNA, 22 nt, Human
gagaccaggaaguacagcagcc

SEQ ID NO: 130553 - RNA, 22 nt, Human
gcucugcugagauaucugggag

SEQ ID NO: 130554 - RNA, 22 nt, Human
ucccuggcuguguucaggugcg

SEQ ID NO: 130555 - RNA, 22 nt, Human
cugccacuagcuuucacaucuu

SEQ ID NO: 130556 - RNA, 22 nt, Human
cugccuggaaggagcaagggga

SEQ ID NO: 130557 - RNA, 22 nt, Human
ugcuugagacacauaugaauuu

SEQ ID NO: 130558 - RNA, 22 nt, Human
uucuccgcuaaguucucugcag

SEQ ID NO: 130559 - RNA, 22 nt, Human
uggcuggggccugaauccugca

SEQ ID NO: 130560 - RNA, 22 nt, Human
uauguacauggagagcaauuga

SEQ ID NO: 130561 - RNA, 20 nt, Human
cagcuuggaugagaggcuga

SEQ ID NO: 130562 - RNA, 22 nt, Human
cuuagaaaucgaacucagguua

SEQ ID NO: 130563 - RNA, 20 nt, Human
ucagugauuuugaagaggaa

SEQ ID NO: 130564 - RNA, 22 nt, Human
caaaugaagaaccuucucaccu

SEQ ID NO: 130565 - RNA, 23 nt, Human
cccagcuuucccacugccgagag

SEQ ID NO: 130566 - RNA, 22 nt, Human
caggagcugggucuggaagcag

SEQ ID NO: 130567 - RNA, 22 nt, Human
ucuucuuugaaucauagugacc

SEQ ID NO: 130568 - RNA, 22 nt, Human
ucauugcagacuaacaaucuca

SEQ ID NO: 130569 - RNA, 22 nt, Human
ccaggcccugcuccucacacca

SEQ ID NO: 130570 - RNA, 22 nt, Human
gggcuggaucuccugcaggcag

SEQ ID NO: 130571 - RNA, 22 nt, Human
ucacugggagaugugggaaggg

SEQ ID NO: 130572 - RNA, 22 nt, Human
ggccgggcaggucucagccagc

SEQ ID NO: 130573 - RNA, 21 nt, Human
cugugcuucuuccuaagccag

SEQ ID NO: 130574 - RNA, 22 nt, Human
cagcaugcaaguccagaugugg

SEQ ID NO: 130575 - RNA, 22 nt, Human
uaaaugugcacuuuacuuuuca

SEQ ID NO: 130576 - RNA, 22 nt, Human
caggaugugaggaggccauuug

SEQ ID NO: 130577 - RNA, 22 nt, Human
auugaaagcacaaagaacaagu

SEQ ID NO: 130578 - RNA, 22 nt, Human
uuuccucuuccgagggggaggc

SEQ ID NO: 130579 - RNA, 23 nt, Human
ugucauugugacuacagaaccag

SEQ ID NO: 130580 - RNA, 22 nt, Human
uagcugccuaugugauaagaga

SEQ ID NO: 130581 - RNA, 20 nt, Human
ugcugcaguuucaugggacu

SEQ ID NO: 130582 - RNA, 22 nt, Human
uccagcagguccgagacaaguu

SEQ ID NO: 130583 - RNA, 22 nt, Human
uuuacaauugguuuucucuaau

SEQ ID NO: 130584 - RNA, 22 nt, Human
ucucucugccaacucacagcca

SEQ ID NO: 130585 - RNA, 22 nt, Human
aguuggagugaacaugagauug

SEQ ID NO: 130586 - RNA, 22 nt, Human
guuauaaaugacugcaaaaguu

SEQ ID NO: 130587 - RNA, 22 nt, Human
agagcuguuuggacaucugagu

SEQ ID NO: 130588 - RNA, 22 nt, Human
aaucuggcucagaagaagauga

SEQ ID NO: 130589 - RNA, 22 nt, Human
uagcacaucuggcgcuuauagg

SEQ ID NO: 130590 - RNA, 22 nt, Human
agauuucagaugcucggcaguu

SEQ ID NO: 130591 - RNA, 22 nt, Human
gcugggagccguaccugucacg

SEQ ID NO: 130592 - RNA, 22 nt, Human
aacugcauucagaaagcucacu

SEQ ID NO: 130593 - RNA, 22 nt, Human
uuucucacccaagaguuauuuu

SEQ ID NO: 130594 - RNA, 19 nt, Human
cauauuuuugggcuggcau

SEQ ID NO: 130595 - RNA, 20 nt, Human
gcugccagugccugaugcuu

SEQ ID NO: 130596 - RNA, 22 nt, Human
gcccagccuccaagcuccaagg

SEQ ID NO: 130597 - RNA, 19 nt, Human
ugggcuuccccagggcaga

SEQ ID NO: 130598 - RNA, 22 nt, Human
ccaaggagaaaugcugugcuuu

SEQ ID NO: 130599 - RNA, 22 nt, Human
augcaguaaaauaggagguaau

SEQ ID NO: 130600 - RNA, 18 nt, Human
aauuuccauaugaauugc

SEQ ID NO: 130601 - RNA, 22 nt, Human
uggcucaguuucaguccugguu

SEQ ID NO: 130602 - RNA, 22 nt, Human
ugccuggaugugcuggccucac

SEQ ID NO: 130603 - RNA, 23 nt, Human
aggaggaaaaguuaucugcugag

SEQ ID NO: 130604 - RNA, 19 nt, Human
cugagcagcggcagcacuu

SEQ ID NO: 130605 - RNA, 22 nt, Human
gcuauguguguuuugcugcagc

SEQ ID NO: 130606 - RNA, 22 nt, Human
agucugcacucagguggagguc

SEQ ID NO: 130607 - RNA, 22 nt, Human
ggaccagagcucgggcuucuca

SEQ ID NO: 130608 - RNA, 22 nt, Human
uacauuaacuuacguccacaug

SEQ ID NO: 130609 - RNA, 22 nt, Human
cagggcuguuagcugcugcucu

SEQ ID NO: 130610 - RNA, 22 nt, Human
ugccaggagagugcaugcaggg

SEQ ID NO: 130611 - RNA, 22 nt, Human
aggcugugaggggcccgcaugc

SEQ ID NO: 130612 - RNA, 22 nt, Human
guaucuuuuacaccaggaaauu

SEQ ID NO: 130613 - RNA, 22 nt, Human
caguacuuugaagauauuuuag

SEQ ID NO: 130614 - RNA, 22 nt, Human
agcugagccagcagcaacagga

SEQ ID NO: 130615 - RNA, 22 nt, Human
agcagcuguacuuucaucuguu

SEQ ID NO: 130616 - RNA, 22 nt, Human
ggcucuggagcacagacgucug

SEQ ID NO: 130617 - RNA, 22 nt, Human
guguguguaucugccuaucaca

SEQ ID NO: 130618 - RNA, 22 nt, Human
ucuuauacagaagauguuuaau

SEQ ID NO: 130619 - RNA, 22 nt, Human
ucauuuucccacugaagcuguc

SEQ ID NO: 130620 - RNA, 22 nt, Human
ugggcagacauugaguuuguuc

SEQ ID NO: 130621 - RNA, 22 nt, Human
uuuuuuauaucaacugaagucu

SEQ ID NO: 130622 - RNA, 22 nt, Human
augacacaauuuuagagcugaa

SEQ ID NO: 130623 - RNA, 22 nt, Human
ggcccugggcagaggagugggc

SEQ ID NO: 130624 - RNA, 22 nt, Human
gugccuguaaguuguaugggcu

SEQ ID NO: 130625 - RNA, 22 nt, Human
gaugugagugguagcugggauu

SEQ ID NO: 130626 - RNA, 22 nt, Human
cagcaggaagguuuccccugca

SEQ ID NO: 130627 - RNA, 22 nt, Human
agugaaaugauaguguaaauac

SEQ ID NO: 130628 - RNA, 22 nt, Human
ucauuucaaguucugacagcua

SEQ ID NO: 130629 - RNA, 22 nt, Human
uagcugucaccagaaauggcca

SEQ ID NO: 130630 - RNA, 22 nt, Human
aaggccugaacaugaggagaug

SEQ ID NO: 130631 - RNA, 22 nt, Human
gcagagcaguacucucuugacu

SEQ ID NO: 130632 - RNA, 23 nt, Human
aaauuauugcucuucaauugccu

SEQ ID NO: 130633 - RNA, 22 nt, Human
gagccauacaaccuauaaagug

SEQ ID NO: 130634 - RNA, 23 nt, Human
cauggcagcaagagcucauggcc

SEQ ID NO: 130635 - RNA, 22 nt, Human
ugguccugccccgugcacagag

SEQ ID NO: 130636 - RNA, 22 nt, Human
uaaggccaaggggccauagucu

SEQ ID NO: 130637 - RNA, 22 nt, Human
uccauguggccagacacuggca

SEQ ID NO: 130638 - RNA, 22 nt, Human
gcuggaggaucacuugagccca

SEQ ID NO: 130639 - RNA, 22 nt, Human
ggugcagaucuuucucuucagg

SEQ ID NO: 130640 - RNA, 22 nt, Human
uuuccucugucaugacagcuga

SEQ ID NO: 130641 - RNA, 22 nt, Human
agggaggauaguagucaguuua

SEQ ID NO: 130642 - RNA, 22 nt, Human
gcagccaccucccauggcgggg

SEQ ID NO: 130643 - RNA, 22 nt, Human
cacaauuuguuuuaucaguauu

SEQ ID NO: 130644 - RNA, 22 nt, Human
auaauuuacuaagcucuaccuu

SEQ ID NO: 130645 - RNA, 16 nt, Human
ccaccugcagcucuca

SEQ ID NO: 130646 - RNA, 22 nt, Human
ccugugucagccccugccucca

SEQ ID NO: 130647 - RNA, 22 nt, Human
uuugcaaagaaauuauugcugu

SEQ ID NO: 130648 - RNA, 22 nt, Human
gcugggagccccgagccagcgc

SEQ ID NO: 130649 - RNA, 22 nt, Human
uaagacacaugcguacaagaua

SEQ ID NO: 130650 - RNA, 22 nt, Human
aucaggaucaugcuggguggga

SEQ ID NO: 130651 - RNA, 22 nt, Human
ucuuuagaaacuuuucuucaug

SEQ ID NO: 130652 - RNA, 22 nt, Human
uaggaaaagucuagauugauga

SEQ ID NO: 130653 - RNA, 22 nt, Human
cuuugcaaacgauuaccacaug

SEQ ID NO: 130654 - RNA, 22 nt, Human
cccuggggcugagggauggccg

SEQ ID NO: 130655 - RNA, 22 nt, Human
aggaccuguagggccugcaucc

SEQ ID NO: 130656 - RNA, 22 nt, Human
aauggccagcaacaggagugaa

SEQ ID NO: 130657 - RNA, 22 nt, Human
uccucugccaaagggaguugcc

SEQ ID NO: 130658 - RNA, 22 nt, Human
uauuucagcccuacuacuuggc

SEQ ID NO: 130659 - RNA, 23 nt, Human
ucuggcuccauccuuggggaucc

SEQ ID NO: 130660 - RNA, 22 nt, Human
uuuaucugugggaguuguuugg

SEQ ID NO: 130661 - RNA, 22 nt, Human
cucccugguguccccuccagga

SEQ ID NO: 130662 - RNA, 22 nt, Human
aaaggucagcugccaucguucu

SEQ ID NO: 130663 - RNA, 22 nt, Human
uggaggcaucagagugcuuggc

SEQ ID NO: 130664 - RNA, 22 nt, Human
uuauguacucugcaauguuuga

SEQ ID NO: 130665 - RNA, 22 nt, Human
cuuuacagaaagagaacucugg

SEQ ID NO: 130666 - RNA, 22 nt, Human
acccuuucuuacucacacgcuc

SEQ ID NO: 130667 - RNA, 22 nt, Human
aagagcugcaucuaagccauga

SEQ ID NO: 130668 - RNA, 22 nt, Human
augcacgccccacacuggugug

SEQ ID NO: 130669 - RNA, 22 nt, Human
uccugcagccacugcaggcaga

SEQ ID NO: 130670 - RNA, 22 nt, Human
agugugggugagggaggcccuc

SEQ ID NO: 130671 - RNA, 22 nt, Human
ucuuagcauuucauaacaacug

SEQ ID NO: 130672 - RNA, 22 nt, Human
aggucacauggauaaugaucag

SEQ ID NO: 130673 - RNA, 22 nt, Human
ucucagaguuuuuuuccaggac

SEQ ID NO: 130674 - RNA, 22 nt, Human
uugcaucuaccauaucaaagau

SEQ ID NO: 130675 - RNA, 22 nt, Human
ucacugucugaaagaaauggcc

SEQ ID NO: 130676 - RNA, 22 nt, Human
gcuguguggcaaagggauuaca

SEQ ID NO: 130677 - RNA, 22 nt, Human
uauuuugcuuuagcugacuguu

SEQ ID NO: 130678 - RNA, 22 nt, Human
cagagagaggccacugcuauua

SEQ ID NO: 130679 - RNA, 22 nt, Human
agcaggcuuguuaugucugaga

SEQ ID NO: 130680 - RNA, 22 nt, Human
ucagcagaggggaaggcaucug

SEQ ID NO: 130681 - RNA, 22 nt, Human
gcccaggccggagagcagugcu

SEQ ID NO: 130682 - RNA, 22 nt, Human
cacauuucuaggaaauuaaaug

SEQ ID NO: 130683 - RNA, 22 nt, Human
cucaggaucgcuugcccuaggg

SEQ ID NO: 130684 - RNA, 22 nt, Human
gccaccaggagcccaguccaaa

SEQ ID NO: 130685 - RNA, 22 nt, Human
cuucugugguaaacuuuguugu

SEQ ID NO: 130686 - RNA, 22 nt, Human
uagaagcaguaauagaaauagg

SEQ ID NO: 130687 - RNA, 22 nt, Human
cccagcaucuccaggcauggcc

SEQ ID NO: 130688 - RNA, 22 nt, Human
acagaaauuagcagugaguuua

SEQ ID NO: 130689 - RNA, 22 nt, Human
ccagcucugcagggccuggggu

SEQ ID NO: 130690 - RNA, 22 nt, Human
gccuggaggaauguagcugagg

SEQ ID NO: 130691 - RNA, 22 nt, Human
ucauggcacuuagcacaguccu

SEQ ID NO: 130692 - RNA, 22 nt, Human
cagaagaauggugucugagcuc

SEQ ID NO: 130693 - RNA, 22 nt, Human
augugcauuaaaugucaauguu

SEQ ID NO: 130694 - RNA, 22 nt, Human
guuuauaaggcccaauauuucu

SEQ ID NO: 130695 - RNA, 22 nt, Human
ggcugccucaaagcucaagcuc

SEQ ID NO: 130696 - RNA, 22 nt, Human
ugcaguggaggccgugagacag

SEQ ID NO: 130697 - RNA, 22 nt, Human
agggcagagaaauguaguugag

SEQ ID NO: 130698 - RNA, 21 nt, Human
ggcuccugcuuugugaggggc

SEQ ID NO: 130699 - RNA, 22 nt, Human
aaaguauauuuacuuacuguga

SEQ ID NO: 130700 - RNA, 22 nt, Human
cacugucuuuugugaagacaau

SEQ ID NO: 130701 - RNA, 22 nt, Human
ggauggcagucugcaugagaaa

SEQ ID NO: 130702 - RNA, 22 nt, Human
gcucaggaccgaggggugggaa

SEQ ID NO: 130703 - RNA, 22 nt, Human
aucugccuccaaguccaugugu

SEQ ID NO: 130704 - RNA, 22 nt, Human
agauggaguuaguaccagaguc

SEQ ID NO: 130705 - RNA, 22 nt, Human
guguggcuuucuggguuuaauu

SEQ ID NO: 130706 - RNA, 22 nt, Human
ugugcuucugcagagacuauuu

SEQ ID NO: 130707 - RNA, 22 nt, Human
uaaauguguuagucaugguuuu

SEQ ID NO: 130708 - RNA, 22 nt, Human
gcagcuggucuggccuagagua

SEQ ID NO: 130709 - RNA, 22 nt, Human
cucaugauguagcgaaugagaa

SEQ ID NO: 130710 - RNA, 22 nt, Human
uuccagggcuaauuccugugga

SEQ ID NO: 130711 - RNA, 22 nt, Human
uaacuuguguuacauuacucuu

SEQ ID NO: 130712 - RNA, 22 nt, Human
gccugcagauauauaggauggu

SEQ ID NO: 130713 - RNA, 22 nt, Human
uugaaggacaucuuguuucuag

SEQ ID NO: 130714 - RNA, 22 nt, Human
ucugucuuagcaucuuugcuca

SEQ ID NO: 130715 - RNA, 22 nt, Human
cauucucaauaguagaugagua

SEQ ID NO: 130716 - RNA, 21 nt, Human
cugugcuuuuuaagugugaug

SEQ ID NO: 130717 - RNA, 22 nt, Human
auguguauacuugugcuuacuc

SEQ ID NO: 130718 - RNA, 22 nt, Human
acagagguguguguaggacagu

SEQ ID NO: 130719 - RNA, 20 nt, Human
agaagcugauacugauggaa

SEQ ID NO: 130720 - RNA, 22 nt, Human
cauggaaggcaaaagacacaga

SEQ ID NO: 130721 - RNA, 22 nt, Human
cuggccuggucuggccucucca

SEQ ID NO: 130722 - RNA, 22 nt, Human
uuguuuuggagaugagcuaaaa

SEQ ID NO: 130723 - RNA, 22 nt, Human
uguccucagauaugucuacucu

SEQ ID NO: 130724 - RNA, 22 nt, Human
accuuucacgguaucagacauc

SEQ ID NO: 130725 - RNA, 22 nt, Human
uguacaguacauguguagugau

SEQ ID NO: 130726 - RNA, 22 nt, Human
cuagagaggcagauguccugug

SEQ ID NO: 130727 - RNA, 22 nt, Human
uggccuggugcucaggcaguag

SEQ ID NO: 130728 - RNA, 22 nt, Human
uugcagcuucuaccacuguuuc

SEQ ID NO: 130729 - RNA, 22 nt, Human
uguuaacaucuuggacucguga

SEQ ID NO: 130730 - RNA, 22 nt, Human
auagacuugguuaguaaauuug

SEQ ID NO: 130731 - RNA, 22 nt, Human
ggguggaguagaaagaugaauu

SEQ ID NO: 130732 - RNA, 22 nt, Human
uacaguagaauuuuuaguaacu

SEQ ID NO: 130733 - RNA, 22 nt, Human
acaguaaauaaugcauguugau

SEQ ID NO: 130734 - RNA, 22 nt, Human
ugguuuauuucucugaaagguu

SEQ ID NO: 130735 - RNA, 22 nt, Human
uuuguaaagucuguucugaguu

SEQ ID NO: 130736 - RNA, 22 nt, Human
uuccugagggacuuuugagauu

SEQ ID NO: 130737 - RNA, 22 nt, Human
agggcugccugcucugcauuga

SEQ ID NO: 130738 - RNA, 22 nt, Human
ggauccuucuuugaccucacag

SEQ ID NO: 130739 - RNA, 19 nt, Human
gagguggguccccgcagcc

SEQ ID NO: 130740 - RNA, 22 nt, Human
aacagugagaagguggacagga

SEQ ID NO: 130741 - RNA, 22 nt, Human
uggcucugggaaucuguugcuu

SEQ ID NO: 130742 - RNA, 22 nt, Human
cagaauaugacaagauuuuccu

SEQ ID NO: 130743 - RNA, 20 nt, Human
agcagcuguguuuucauccu

SEQ ID NO: 130744 - RNA, 22 nt, Human
gcguguaugcaggucugugcag

SEQ ID NO: 130745 - RNA, 22 nt, Human
aagcagccuggacuugggcugg

SEQ ID NO: 130746 - RNA, 22 nt, Human
uggcucagccauucguguugcc

SEQ ID NO: 130747 - RNA, 22 nt, Human
cuggguggaaagugcugagaau

SEQ ID NO: 130748 - RNA, 22 nt, Human
agaaauguauucuguauguuuu

SEQ ID NO: 130749 - RNA, 22 nt, Human
aaguugaagcaugaaccaaggu

SEQ ID NO: 130750 - RNA, 22 nt, Human
uuagccaugcccuagaagagga

SEQ ID NO: 130751 - RNA, 22 nt, Human
gcguggcuuagagugggguacc

SEQ ID NO: 130752 - RNA, 22 nt, Human
aagagggcugcaaucuuauugc

SEQ ID NO: 130753 - RNA, 23 nt, Human
ugaguguggggacagugguuugc

SEQ ID NO: 130754 - RNA, 22 nt, Human
ucucuggguuuuuguccuguac

SEQ ID NO: 130755 - RNA, 22 nt, Human
acuuucugcaguguuggaaaug

SEQ ID NO: 130756 - RNA, 22 nt, Human
acuuguuucaacuguacucuca

SEQ ID NO: 130757 - RNA, 22 nt, Human
ggcuggcaagugucugcucaug

SEQ ID NO: 130758 - RNA, 22 nt, Human
ugugaagcuggauccuggagcu

SEQ ID NO: 130759 - RNA, 22 nt, Human
uucuucuuucccccugugguac

SEQ ID NO: 130760 - RNA, 22 nt, Human
aaaagucagucucuccuagcuc

SEQ ID NO: 130761 - RNA, 22 nt, Human
cugcugugcaggugccuaugau

SEQ ID NO: 130762 - RNA, 22 nt, Human
uaacagaauuugcuaaacuccg

SEQ ID NO: 130763 - RNA, 22 nt, Human
cagcacugcuucgcagccaggg

SEQ ID NO: 130764 - RNA, 22 nt, Human
agucccagcucugccacuuacu

SEQ ID NO: 130765 - RNA, 18 nt, Human
agcuggggccucuggucc

SEQ ID NO: 130766 - RNA, 22 nt, Human
auacaguauaacuaauaaaccc

SEQ ID NO: 130767 - RNA, 19 nt, Human
auacagauguauccaugau

SEQ ID NO: 130768 - RNA, 22 nt, Human
ccagcuggagcucgcagauagg

SEQ ID NO: 130769 - RNA, 22 nt, Human
cuuucuuucgaagacgugauua

SEQ ID NO: 130770 - RNA, 22 nt, Human
uguguuccugccuggcucuggu

SEQ ID NO: 130771 - RNA, 22 nt, Human
uguuuguaucucucucuguggc

SEQ ID NO: 130772 - RNA, 22 nt, Human
cacagugcaugaugggcagaag

SEQ ID NO: 130773 - RNA, 22 nt, Human
gaacagcccuguuaagucuguu

SEQ ID NO: 130774 - RNA, 21 nt, Human
guauugcagaguuaugugcuc

SEQ ID NO: 130775 - RNA, 22 nt, Human
ucaguguagcagacuuguagcc

SEQ ID NO: 130776 - RNA, 22 nt, Human
uccagugguaguaaagaggucu

SEQ ID NO: 130777 - RNA, 22 nt, Human
gcaggaugccagggcagcagcg

SEQ ID NO: 130778 - RNA, 22 nt, Human
uucuucucggcugucagauagu

SEQ ID NO: 130779 - RNA, 22 nt, Human
uaugcacacauuagcacagggu

SEQ ID NO: 130780 - RNA, 20 nt, Human
ucugcucagcccucaguggc

SEQ ID NO: 130781 - RNA, 22 nt, Human
uggccuggaaaaaugcagaugg

SEQ ID NO: 130782 - RNA, 22 nt, Human
gccugggugaauuugauccuaa

SEQ ID NO: 130783 - RNA, 22 nt, Human
agauacauagcugugagcacac

SEQ ID NO: 130784 - RNA, 22 nt, Human
ccagagcuucggggcggcugua

SEQ ID NO: 130785 - RNA, 22 nt, Human
cagccagagaaagggcacugcc

SEQ ID NO: 130786 - RNA, 22 nt, Human
ucagccacuacccaccuuaaca

SEQ ID NO: 130787 - RNA, 22 nt, Human
augagcugugggauuccagagg

SEQ ID NO: 130788 - RNA, 20 nt, Human
aggagaaauucgggacaccu

SEQ ID NO: 130789 - RNA, 22 nt, Human
uuuccaauaaagugucauuguu

SEQ ID NO: 130790 - RNA, 22 nt, Human
acuggcagagguuggacaccau

SEQ ID NO: 130791 - RNA, 22 nt, Human
acagggcagaaauguugcaucu

SEQ ID NO: 130792 - RNA, 22 nt, Human
cagaagcauugacuccuugcuc

SEQ ID NO: 130793 - RNA, 22 nt, Human
cagcaugacagucugcagcaga

SEQ ID NO: 130794 - RNA, 22 nt, Human
ugucuuuucuacuguaagcaua

SEQ ID NO: 130795 - RNA, 22 nt, Human
uauacagaaccgccugaagucu

SEQ ID NO: 130796 - RNA, 22 nt, Human
ucugggcuugguuagggcuguu

SEQ ID NO: 130797 - RNA, 22 nt, Human
agaaaucaugacuaagagcagu

SEQ ID NO: 130798 - RNA, 22 nt, Human
aaguuauaucaucucauugacg

SEQ ID NO: 130799 - RNA, 22 nt, Human
ggcagagacuggguuggcagag

SEQ ID NO: 130800 - RNA, 22 nt, Human
auucuuauuauaguaaaacagu

SEQ ID NO: 130801 - RNA, 22 nt, Human
uuuuccuaguaggccuauuaga

SEQ ID NO: 130802 - RNA, 22 nt, Human
uccaggagaggccugaccaggu

SEQ ID NO: 130803 - RNA, 22 nt, Human
cugucauugagccugucagggc

SEQ ID NO: 130804 - RNA, 22 nt, Human
ugcagccaucuuucuuggagga

SEQ ID NO: 130805 - RNA, 19 nt, Human
ucauuguugguuugucggg

SEQ ID NO: 130806 - RNA, 22 nt, Human
gggccccuuguaucucuggcuc

SEQ ID NO: 130807 - RNA, 22 nt, Human
aggaggcuguggagcacuccau

SEQ ID NO: 130808 - RNA, 22 nt, Human
ccuuccuggcuguccgccugau

SEQ ID NO: 130809 - RNA, 22 nt, Human
uuccaguugguagaauguaagg

SEQ ID NO: 130810 - RNA, 22 nt, Human
ucuggcucaggucagacaggga

SEQ ID NO: 130811 - RNA, 22 nt, Human
ugccuggguguaaagggccaac

SEQ ID NO: 130812 - RNA, 22 nt, Human
ucucugugacugcagcuuugca

SEQ ID NO: 130813 - RNA, 22 nt, Human
uuggcugugaaagcuucucaaa

SEQ ID NO: 130814 - RNA, 22 nt, Human
auguauguuuucaguuguauua

SEQ ID NO: 130815 - RNA, 22 nt, Human
uaacaguagccuuauguggucu

SEQ ID NO: 130816 - RNA, 22 nt, Human
acguauauugaaauaucaugag

SEQ ID NO: 130817 - RNA, 22 nt, Human
ggcugccucuggaagcuggaga

SEQ ID NO: 130818 - RNA, 22 nt, Human
ugccaggcauauggccucuuug

SEQ ID NO: 130819 - RNA, 22 nt, Human
gagguagccacagauagagacu

SEQ ID NO: 130820 - RNA, 22 nt, Human
ccugucagcugauggcuaugua

SEQ ID NO: 130821 - RNA, 22 nt, Human
guucuucagcauuagaagucau

SEQ ID NO: 130822 - RNA, 22 nt, Human
uagcugccauugcuccaggaag

SEQ ID NO: 130823 - RNA, 22 nt, Human
ucucugugucucauguuccuau

SEQ ID NO: 130824 - RNA, 22 nt, Human
uccagggaccucccugagagcu

SEQ ID NO: 130825 - RNA, 22 nt, Human
guggggggacguuggucacuuu

SEQ ID NO: 130826 - RNA, 21 nt, Human
gccaccccuggcacaggugcu

SEQ ID NO: 130827 - RNA, 22 nt, Human
cccucccagaugggcuugaggu

SEQ ID NO: 130828 - RNA, 22 nt, Human
cugucaguaggcucccaucauu

SEQ ID NO: 130829 - RNA, 22 nt, Human
gcaggcaguuugcuuuucccuc

SEQ ID NO: 130830 - RNA, 20 nt, Human
ucucccaggcucagggaaga

SEQ ID NO: 130831 - RNA, 22 nt, Human
gcugugagaaacagggaguguc

SEQ ID NO: 130832 - RNA, 22 nt, Human
aggcuccuaucgcuuucagcaa

SEQ ID NO: 130833 - RNA, 22 nt, Human
cacccaggcagguggcugagaa

SEQ ID NO: 130834 - RNA, 22 nt, Human
ucauuuguaccauuuuuuaaga

SEQ ID NO: 130835 - RNA, 22 nt, Human
gaagcagcuaggaucuucauuu

SEQ ID NO: 130836 - RNA, 22 nt, Human
ugcugcucaaugagaugccauc

SEQ ID NO: 130837 - RNA, 22 nt, Human
caguggcaugguugacugcagu

SEQ ID NO: 130838 - RNA, 22 nt, Human
gccuucccacccugcgaggcug

SEQ ID NO: 130839 - RNA, 22 nt, Human
agccagggacgcugcaggcuac

SEQ ID NO: 130840 - RNA, 22 nt, Human
cagcaggauaugguggagagag

SEQ ID NO: 130841 - RNA, 22 nt, Human
agccaucauuucugucacuggc

SEQ ID NO: 130842 - RNA, 22 nt, Human
ucucagagagaugaaacuucca

SEQ ID NO: 130843 - RNA, 22 nt, Human
aaaaacugcaauuacuuuuguc

SEQ ID NO: 130844 - RNA, 22 nt, Human
agggccugggauguccuccuag

SEQ ID NO: 130845 - RNA, 22 nt, Human
ucuccucaccaccagcagcaga

SEQ ID NO: 130846 - RNA, 22 nt, Human
gccuaggagacaagcgugaaag

SEQ ID NO: 130847 - RNA, 19 nt, Human
agcagcuggagguggagug

SEQ ID NO: 130848 - RNA, 22 nt, Human
guuuagaauucuaacuuuaagg

SEQ ID NO: 130849 - RNA, 22 nt, Human
ugguaauuaauuugauagguuc

SEQ ID NO: 130850 - RNA, 22 nt, Human
uaacuuuugugaucugucgauu

SEQ ID NO: 130851 - RNA, 22 nt, Human
gaagaacaccugcugcccagug

SEQ ID NO: 130852 - RNA, 22 nt, Human
uuuaacuggucuccugcugcuu

SEQ ID NO: 130853 - RNA, 22 nt, Human
cauuucuguucucuuccuguac

SEQ ID NO: 130854 - RNA, 22 nt, Human
aguuacaaccaugacacaagca

SEQ ID NO: 130855 - RNA, 20 nt, Human
uguuccaugacuauuuggau

SEQ ID NO: 130856 - RNA, 23 nt, Human
ggggccugcaccggucugcgcgg

SEQ ID NO: 130857 - RNA, 22 nt, Human
ugggcugcuuccucagcugaga

SEQ ID NO: 130858 - RNA, 22 nt, Human
aggggcugacuggaaagugcca

SEQ ID NO: 130859 - RNA, 22 nt, Human
gacagacauuuccugauccaau

SEQ ID NO: 130860 - RNA, 22 nt, Human
ggacacaagcuccggggcugca

SEQ ID NO: 130861 - RNA, 22 nt, Human
uauguucuaggaaugguugaug

SEQ ID NO: 130862 - RNA, 22 nt, Human
aagcugcagacccccugucuca

SEQ ID NO: 130863 - RNA, 22 nt, Human
gaugggaggaaccugggucccu

SEQ ID NO: 130864 - RNA, 17 nt, Human
uuccccugaccaagccu

SEQ ID NO: 130865 - RNA, 22 nt, Human
uucuaacucuguuauguguuuc

SEQ ID NO: 130866 - RNA, 22 nt, Human
uguggcuguugaggaccccaag

SEQ ID NO: 130867 - RNA, 22 nt, Human
cuggcccagagagcagagcuua

SEQ ID NO: 130868 - RNA, 22 nt, Human
uggucucugacucugaagaccc

SEQ ID NO: 130869 - RNA, 22 nt, Human
aagacauugucauuuuauaauu

SEQ ID NO: 130870 - RNA, 22 nt, Human
cucacagguaccagcacccucc

SEQ ID NO: 130871 - RNA, 22 nt, Human
gcacccagggacuuggcuggcc

SEQ ID NO: 130872 - RNA, 22 nt, Human
gagggcugaugcuuacuuauuu

SEQ ID NO: 130873 - RNA, 22 nt, Human
cucacugugccuuuucccaaac

SEQ ID NO: 130874 - RNA, 22 nt, Human
uauuuccaagcugaauccaaug

SEQ ID NO: 130875 - RNA, 22 nt, Human
ccucuguccuggggaguggagc

SEQ ID NO: 130876 - RNA, 23 nt, Human
ccuggcagcaaacgaggagguua

SEQ ID NO: 130877 - RNA, 22 nt, Human
cagcagagacgguaagcagaac

SEQ ID NO: 130878 - RNA, 22 nt, Human
acugucuguccugcucuccgug

SEQ ID NO: 130879 - RNA, 22 nt, Human
uucugaggcacuggcucuccca

SEQ ID NO: 130880 - RNA, 22 nt, Human
gcugccugguuucucagcugca

SEQ ID NO: 130881 - RNA, 22 nt, Human
uuuagaguccaaguucuucacu

SEQ ID NO: 130882 - RNA, 22 nt, Human
uaauuuauuucaacugccaagg

SEQ ID NO: 130883 - RNA, 22 nt, Human
ugcugggcuaggguggagcucu

SEQ ID NO: 130884 - RNA, 22 nt, Human
ugagaggcagaauggugccugc

SEQ ID NO: 130885 - RNA, 19 nt, Human
agcuuccauauucucuagu

SEQ ID NO: 130886 - RNA, 21 nt, Human
gccagagcaguacaaugaggu

SEQ ID NO: 130887 - RNA, 18 nt, Human
acccucuggcuucugagc

SEQ ID NO: 130888 - RNA, 22 nt, Human
ugucucagaguaucccugaacu

SEQ ID NO: 130889 - RNA, 21 nt, Human
gagugcaggucugaugccauc

SEQ ID NO: 130890 - RNA, 21 nt, Human
ucucugggcccuccugugggg

SEQ ID NO: 130891 - RNA, 23 nt, Human
uuucaaauuacucugcagaugac

SEQ ID NO: 130892 - RNA, 22 nt, Human
cuugccuucuguuccuauagaa

SEQ ID NO: 130893 - RNA, 22 nt, Human
auuuugaaaagcauuugaguaa

SEQ ID NO: 130894 - RNA, 22 nt, Human
gagggguguggagccaucaguu

SEQ ID NO: 130895 - RNA, 20 nt, Human
cacaggccuugugagcagac

SEQ ID NO: 130896 - RNA, 22 nt, Human
uggggugggcaugcgcuguccu

SEQ ID NO: 130897 - RNA, 22 nt, Human
ggagcugcuuugaucugaagaa

SEQ ID NO: 130898 - RNA, 22 nt, Human
acuggaagccaguugacaauca

SEQ ID NO: 130899 - RNA, 22 nt, Human
aggcugugaugagccucaugga

SEQ ID NO: 130900 - RNA, 22 nt, Human
auuguacaugcagugagucauc

SEQ ID NO: 130901 - RNA, 23 nt, Human
ccucccaccuauuucacuuucuu

SEQ ID NO: 130902 - RNA, 23 nt, Human
cauguacagaguuugauaaagug

SEQ ID NO: 130903 - RNA, 22 nt, Human
aagacagagggaagcaaugaug

SEQ ID NO: 130904 - RNA, 22 nt, Human
caaaucuauauguugauauucu

SEQ ID NO: 130905 - RNA, 22 nt, Human
uuuacagcagcaugauuuauaa

SEQ ID NO: 130906 - RNA, 22 nt, Human
aacuucuugguccugagcuguu

SEQ ID NO: 130907 - RNA, 22 nt, Human
uggcucaguuugggggauugaa

SEQ ID NO: 130908 - RNA, 22 nt, Human
ccuccagggcagacggggagca

SEQ ID NO: 130909 - RNA, 22 nt, Human
cacuguguaagaagaugggcuu

SEQ ID NO: 130910 - RNA, 23 nt, Human
cuuuccuuucuuugacacccagc

SEQ ID NO: 130911 - RNA, 22 nt, Human
agguggguccuggcucugccau

SEQ ID NO: 130912 - RNA, 22 nt, Human
agagaaaacucauugagguguc

SEQ ID NO: 130913 - RNA, 22 nt, Human
agacccagaaagcagcugcauu

SEQ ID NO: 130914 - RNA, 22 nt, Human
cugggaguugacgaggcuugua

SEQ ID NO: 130915 - RNA, 22 nt, Human
cucacugcaaguuccaccuacc

SEQ ID NO: 130916 - RNA, 22 nt, Human
aaaugcacagguuuuaaauccu

SEQ ID NO: 130917 - RNA, 22 nt, Human
aaucaguuguccaaaguucaca

SEQ ID NO: 130918 - RNA, 22 nt, Human
ggccugcuuuccgagccugcag

SEQ ID NO: 130919 - RNA, 22 nt, Human
acagaauuaaugaaaauuacaa

SEQ ID NO: 130920 - RNA, 22 nt, Human
uucagcagugcagacacccagu

SEQ ID NO: 130921 - RNA, 22 nt, Human
uuaaacagguuuuugaauggcc

SEQ ID NO: 130922 - RNA, 22 nt, Human
uccuugaauggacauuacacug

SEQ ID NO: 130923 - RNA, 22 nt, Human
aggcagagcuggguuuugaaau

SEQ ID NO: 130924 - RNA, 22 nt, Human
ucccagggacucucugccuucc

SEQ ID NO: 130925 - RNA, 22 nt, Human
aagcugcccaagacugaagcau

SEQ ID NO: 130926 - RNA, 22 nt, Human
gagcuguccuaccaggaguccu

SEQ ID NO: 130927 - RNA, 22 nt, Human
uucauguguauggaacauuuuu

SEQ ID NO: 130928 - RNA, 22 nt, Human
ugucuuuaagcaaacaguguuu

SEQ ID NO: 130929 - RNA, 22 nt, Human
aggggacacggcuucuccaggg

SEQ ID NO: 130930 - RNA, 22 nt, Human
uuuauguaaguggaaugaugcc

SEQ ID NO: 130931 - RNA, 22 nt, Human
ugcucuguugugcaugugggau

SEQ ID NO: 130932 - RNA, 22 nt, Human
gugucccagcagcacauuggcu

SEQ ID NO: 130933 - RNA, 22 nt, Human
uauauucuuucaccuucuuccu

SEQ ID NO: 130934 - RNA, 22 nt, Human
uuguaugcugaugacaccaccu

SEQ ID NO: 130935 - RNA, 22 nt, Human
uuauuauagauuaugcaagauu

SEQ ID NO: 130936 - RNA, 22 nt, Human
gugucacaagagcccaggaaac

SEQ ID NO: 130937 - RNA, 23 nt, Human
uguaacuucuuaaauucuucacu

SEQ ID NO: 130938 - RNA, 22 nt, Human
aaugcacauguuguaauaaaua

SEQ ID NO: 130939 - RNA, 22 nt, Human
ugugacuguggacuuuuguggg

SEQ ID NO: 130940 - RNA, 22 nt, Human
aaacuguaaacacagcaguaca

SEQ ID NO: 130941 - RNA, 19 nt, Human
guuuuucccagacgaggca

SEQ ID NO: 130942 - RNA, 22 nt, Human
gggcagagacucagaaacagaa

SEQ ID NO: 130943 - RNA, 22 nt, Human
acugaaggaagcgggcaggggu

SEQ ID NO: 130944 - RNA, 22 nt, Human
gaaugugugacucuauugagca

SEQ ID NO: 130945 - RNA, 22 nt, Human
agcaggaguguccccuggcugu

SEQ ID NO: 130946 - RNA, 20 nt, Human
gaguuccccauuucuccugg

SEQ ID NO: 130947 - RNA, 22 nt, Human
uugaacauuggcaauuucauau

SEQ ID NO: 130948 - RNA, 22 nt, Human
ucugccagugguuuggcccuga

SEQ ID NO: 130949 - RNA, 22 nt, Human
cugcagcuuuggaaaccuguuu

SEQ ID NO: 130950 - RNA, 22 nt, Human
acuuuugaggacuuuauuguau

SEQ ID NO: 130951 - RNA, 21 nt, Human
gauugaaaccauggcagugag

SEQ ID NO: 130952 - RNA, 22 nt, Human
gauuucaaaaguagauccauca

SEQ ID NO: 130953 - RNA, 22 nt, Human
ucagugugucucugcauuuggg

SEQ ID NO: 130954 - RNA, 22 nt, Human
aacaguaucuuuuaucagaaau

SEQ ID NO: 130955 - RNA, 22 nt, Human
cugcccuggcagccuaccaugg

SEQ ID NO: 130956 - RNA, 22 nt, Human
ggcagcugaccuagcaccaucc

SEQ ID NO: 130957 - RNA, 22 nt, Human
gacccugccaugagugacaggg

SEQ ID NO: 130958 - RNA, 22 nt, Human
ugugccuggaucucugugacaa

SEQ ID NO: 130959 - RNA, 22 nt, Human
agcuguguguuuccacugagcu

SEQ ID NO: 130960 - RNA, 19 nt, Human
uaacucuuuccuuuucccc

SEQ ID NO: 130961 - RNA, 22 nt, Human
agagaaggucacuaaggaccca

SEQ ID NO: 130962 - RNA, 22 nt, Human
uaaaugugucuuuuuaaggccu

SEQ ID NO: 130963 - RNA, 22 nt, Human
ggacuggccggcgcugaggccc

SEQ ID NO: 130964 - RNA, 22 nt, Human
ugcugccaccccucaccagagc

SEQ ID NO: 130965 - RNA, 22 nt, Human
acguuuucagugacugugcuuc

SEQ ID NO: 130966 - RNA, 22 nt, Human
uccucugccccagaugaaauuu

SEQ ID NO: 130967 - RNA, 22 nt, Human
aggggcuggaguucgagguuac

SEQ ID NO: 130968 - RNA, 22 nt, Human
gaacuguaguuaauacuacaca

SEQ ID NO: 130969 - RNA, 22 nt, Human
cucuucuuggcccccaugaggg

SEQ ID NO: 130970 - RNA, 22 nt, Human
caggcuggagugcaguugugca

SEQ ID NO: 130971 - RNA, 22 nt, Human
cugggcuucucccccuggcaga

SEQ ID NO: 130972 - RNA, 22 nt, Human
cuggcaggucucgcugacgugu

SEQ ID NO: 130973 - RNA, 22 nt, Human
gggggcuggacuuucccacaca

SEQ ID NO: 130974 - RNA, 22 nt, Human
gcugccacucugagcuugcuuc

SEQ ID NO: 130975 - RNA, 22 nt, Human
aaggcacuuuuccugagaugau

SEQ ID NO: 130976 - RNA, 20 nt, Human
uuugucuguuaaguguuucu

SEQ ID NO: 130977 - RNA, 22 nt, Human
caaagugcugagauuacaggua

SEQ ID NO: 130978 - RNA, 22 nt, Human
uuauacauguguuuugagauga

SEQ ID NO: 130979 - RNA, 22 nt, Human
gaggcagcuuggggcugugggu

SEQ ID NO: 130980 - RNA, 22 nt, Human
cacugcagcaccaugcagggcu

SEQ ID NO: 130981 - RNA, 22 nt, Human
cacagaaguuucauagucucga

SEQ ID NO: 130982 - RNA, 22 nt, Human
auauaaaguguuuagaaagcug

SEQ ID NO: 130983 - RNA, 22 nt, Human
agaccauagggaccucagguug

SEQ ID NO: 130984 - RNA, 22 nt, Human
aaaaauaggucaaccguguaug

SEQ ID NO: 130985 - RNA, 22 nt, Human
ggagccugugcccaagcccaga

SEQ ID NO: 130986 - RNA, 22 nt, Human
uuucuuguaaaagcugugggaa

SEQ ID NO: 130987 - RNA, 22 nt, Human
gaccagagaaaggcacuggaag

SEQ ID NO: 130988 - RNA, 22 nt, Human
cugccuggucucaggcaugggg

SEQ ID NO: 130989 - RNA, 22 nt, Human
cuuucacagccuucguucugaa

SEQ ID NO: 130990 - RNA, 22 nt, Human
uuuauuguuguuagucauaagu

SEQ ID NO: 130991 - RNA, 22 nt, Human
guggcugcuaagucuccuuccu

SEQ ID NO: 130992 - RNA, 22 nt, Human
gggcagagguucaacuucaaca

SEQ ID NO: 130993 - RNA, 22 nt, Human
augcaagauguauagaagacuu

SEQ ID NO: 130994 - RNA, 22 nt, Human
aggagcugacuuguaaagcauu

SEQ ID NO: 130995 - RNA, 22 nt, Human
agaggcugaaugaugucaucau

SEQ ID NO: 130996 - RNA, 20 nt, Human
ggcucugcuugugagcagcc

SEQ ID NO: 130997 - RNA, 23 nt, Human
uguaaaaugggguaguguuacca

SEQ ID NO: 130998 - RNA, 22 nt, Human
gagccaggucgggccgcggcga

SEQ ID NO: 130999 - RNA, 22 nt, Human
ugggcagacugagcccuguccc

SEQ ID NO: 131000 - RNA, 22 nt, Human
ccaggcugcagucaaggggcau

SEQ ID NO: 131001 - RNA, 22 nt, Human
uccucaggauguggaguagaau

SEQ ID NO: 131002 - RNA, 21 nt, Human
uaucuacuggugucuuucaga

SEQ ID NO: 131003 - RNA, 22 nt, Human
ucuggcucuguguccucaccca

SEQ ID NO: 131004 - RNA, 22 nt, Human
agaaggaguguacaggucaugc

SEQ ID NO: 131005 - RNA, 22 nt, Human
auugaaagauauacuguucuca

SEQ ID NO: 131006 - RNA, 22 nt, Human
uguaucaaaccaaauuaauucu

SEQ ID NO: 131007 - RNA, 22 nt, Human
gggcuguguaaugugcucuuuu

SEQ ID NO: 131008 - RNA, 22 nt, Human
ccuggagcacucucccuggcug

SEQ ID NO: 131009 - RNA, 22 nt, Human
aaauauagugacacuuauaguc

SEQ ID NO: 131010 - RNA, 22 nt, Human
uagcagugccaggauuuugcug

SEQ ID NO: 131011 - RNA, 23 nt, Human
aaggccagaauuucaauggugcc

SEQ ID NO: 131012 - RNA, 22 nt, Human
uugugaguagugccgcaauaaa

SEQ ID NO: 131013 - RNA, 22 nt, Human
agaccaagugcaggugccacua

SEQ ID NO: 131014 - RNA, 22 nt, Human
guggcagcugguaugcagacag

SEQ ID NO: 131015 - RNA, 17 nt, Human
cacaggugugguuugag

SEQ ID NO: 131016 - RNA, 22 nt, Human
ccucugccaccucccacgaggc

SEQ ID NO: 131017 - RNA, 22 nt, Human
aguaaacauaauuuaccuguag

SEQ ID NO: 131018 - RNA, 22 nt, Human
ccuccaggcugaauaucuagaa

SEQ ID NO: 131019 - RNA, 22 nt, Human
cuggcugcaggaugaggcugcc

SEQ ID NO: 131020 - RNA, 22 nt, Human
ggguggggcccaggaaaucuau

SEQ ID NO: 131021 - RNA, 22 nt, Human
uaaauguauaggcacuaaaccu

SEQ ID NO: 131022 - RNA, 21 nt, Human
gauuugcagaaacuagacagg

SEQ ID NO: 131023 - RNA, 22 nt, Human
aaauuagucgguuuaggaauuu

SEQ ID NO: 131024 - RNA, 22 nt, Human
uuggcuucucuuaacccuaaag

SEQ ID NO: 131025 - RNA, 22 nt, Human
uuccaugagcucugaguucaca

SEQ ID NO: 131026 - RNA, 22 nt, Human
uacagaaaaacuggcauugaag

SEQ ID NO: 131027 - RNA, 22 nt, Human
ucccugcucagcucaccuggca

SEQ ID NO: 131028 - RNA, 22 nt, Human
ccuaugccugucacucugcgcu

SEQ ID NO: 131029 - RNA, 22 nt, Human
cuuaaauuggaugaguuaaguu

SEQ ID NO: 131030 - RNA, 22 nt, Human
cagccagcuucagauccaagcc

SEQ ID NO: 131031 - RNA, 22 nt, Human
agacuucucaguuuuauuagua

SEQ ID NO: 131032 - RNA, 22 nt, Human
cuuauaguaugauguugagaau

SEQ ID NO: 131033 - RNA, 22 nt, Human
cagggagaaaucuccaggaggu

SEQ ID NO: 131034 - RNA, 22 nt, Human
ucagaacagaagcuggcuauaa

SEQ ID NO: 131035 - RNA, 22 nt, Human
guggccguguaacuugaguaca

SEQ ID NO: 131036 - RNA, 22 nt, Human
ggauggagguucucagaugcuc

SEQ ID NO: 131037 - RNA, 22 nt, Human
uucuaugucagugugcucugug

SEQ ID NO: 131038 - RNA, 22 nt, Human
gacuucuauuaauaccucuacu

SEQ ID NO: 131039 - RNA, 22 nt, Human
gaggaaugucagcacaggccuc

SEQ ID NO: 131040 - RNA, 22 nt, Human
gggccugugcacaguucuguua

SEQ ID NO: 131041 - RNA, 22 nt, Human
agggcaguucaacuucauagug

SEQ ID NO: 131042 - RNA, 22 nt, Human
cucauggauauaagaacuguuu

SEQ ID NO: 131043 - RNA, 22 nt, Human
gcugcagccaaauucauuguca

SEQ ID NO: 131044 - RNA, 17 nt, Human
ucagagggaugagcagg

SEQ ID NO: 131045 - RNA, 17 nt, Human
guccugggaggagagag

SEQ ID NO: 131046 - RNA, 22 nt, Human
ugccugucuccucugcagggug

SEQ ID NO: 131047 - RNA, 22 nt, Human
ggcacugaucugauuucccucc

SEQ ID NO: 131048 - RNA, 22 nt, Human
ggcuuccuggagaaggucugag

SEQ ID NO: 131049 - RNA, 22 nt, Human
gggagggaggugaugcuuggcu

SEQ ID NO: 131050 - RNA, 22 nt, Human
acuccuggggcugccaucacag

SEQ ID NO: 131051 - RNA, 22 nt, Human
gaugggggccagggccugcuuu

SEQ ID NO: 131052 - RNA, 22 nt, Human
ugcagccaauucauucauucuu

SEQ ID NO: 131053 - RNA, 22 nt, Human
ugucucugaggugagggucagc

SEQ ID NO: 131054 - RNA, 22 nt, Human
agccaggaaccagcuacagucu

SEQ ID NO: 131055 - RNA, 22 nt, Human
ucugugugugccuguuaauauu

SEQ ID NO: 131056 - RNA, 22 nt, Human
uggcagagaacacacaugauuc

SEQ ID NO: 131057 - RNA, 22 nt, Human
guccaugacugugacucacaug

SEQ ID NO: 131058 - RNA, 22 nt, Human
gcucuguccagcgugcacagaa

SEQ ID NO: 131059 - RNA, 22 nt, Human
ucagccuggcaggauggccugg

SEQ ID NO: 131060 - RNA, 22 nt, Human
ugauuuccuaggucuggagaag

SEQ ID NO: 131061 - RNA, 22 nt, Human
uucagagccacuucaagucuaa

SEQ ID NO: 131062 - RNA, 22 nt, Human
gcuggcucagggacuagaguuu

SEQ ID NO: 131063 - RNA, 22 nt, Human
uauauuuuagacacccucacgc

SEQ ID NO: 131064 - RNA, 22 nt, Human
uuuucagaggccuaagagguuu

SEQ ID NO: 131065 - RNA, 22 nt, Human
cauucuuacacaauauuuuaau

SEQ ID NO: 131066 - RNA, 20 nt, Human
auacaaagagauugauguau

SEQ ID NO: 131067 - RNA, 22 nt, Human
cugccuccugccgugcagcuuc

SEQ ID NO: 131068 - RNA, 22 nt, Human
uuauuucauugauuucuaagac

SEQ ID NO: 131069 - RNA, 22 nt, Human
gugugccaggaacuggcugcug

SEQ ID NO: 131070 - RNA, 21 nt, Human
agaaaaguagaguuuucagag

SEQ ID NO: 131071 - RNA, 22 nt, Human
uggcuuucucccccagcuucuc

SEQ ID NO: 131072 - RNA, 22 nt, Human
gcacccaggcuugggcagcaac

SEQ ID NO: 131073 - RNA, 22 nt, Human
ugucccucugaggcuucccugg

SEQ ID NO: 131074 - RNA, 17 nt, Human
ccucacagggaccagac

SEQ ID NO: 131075 - RNA, 22 nt, Human
uugaagcagcucaggaggcuua

SEQ ID NO: 131076 - RNA, 22 nt, Human
ugaggcaggagguugagaacug

SEQ ID NO: 131077 - RNA, 22 nt, Human
aaggccagcuuguagggcuggu

SEQ ID NO: 131078 - RNA, 22 nt, Human
ucccagcagggccgaccagccu

SEQ ID NO: 131079 - RNA, 22 nt, Human
ucaggaugguguggaggaaaua

SEQ ID NO: 131080 - RNA, 22 nt, Human
ugcagcucugaacagucaugaa

SEQ ID NO: 131081 - RNA, 22 nt, Human
guggccuggauagacuccaucu

SEQ ID NO: 131082 - RNA, 22 nt, Human
aaucuggcauuugagaguagga

SEQ ID NO: 131083 - RNA, 22 nt, Human
uggcuggcgccgggcuagccac

SEQ ID NO: 131084 - RNA, 22 nt, Human
ccaggaaugaaauguagauaaa

SEQ ID NO: 131085 - RNA, 18 nt, Human
gggcaucauucacaaagu

SEQ ID NO: 131086 - RNA, 22 nt, Human
uacauuguuuuuucuugccauc

SEQ ID NO: 131087 - RNA, 22 nt, Human
uuugcauuucucguaaggaaac

SEQ ID NO: 131088 - RNA, 22 nt, Human
agcagcugcagggagggucugc

SEQ ID NO: 131089 - RNA, 22 nt, Human
uuauuuaauuuucucacucaga

SEQ ID NO: 131090 - RNA, 17 nt, Human
ugcauuguaggcuagcc

SEQ ID NO: 131091 - RNA, 22 nt, Human
ucugggaaaugcuguuccuugu

SEQ ID NO: 131092 - RNA, 22 nt, Human
acagagcauuugggacagagag

SEQ ID NO: 131093 - RNA, 22 nt, Human
acagguggcauaggcaguuuga

SEQ ID NO: 131094 - RNA, 22 nt, Human
uggcucugucaaacugcacaca

SEQ ID NO: 131095 - RNA, 19 nt, Human
acagagcucucugcuucug

SEQ ID NO: 131096 - RNA, 22 nt, Human
ccuguguggaaaccgcaugacg

SEQ ID NO: 131097 - RNA, 22 nt, Human
gugcagggagcccagaaggucc

SEQ ID NO: 131098 - RNA, 22 nt, Human
aggagagagcugagcuuugcug

SEQ ID NO: 131099 - RNA, 22 nt, Human
auuuucucacaaugcagaagga

SEQ ID NO: 131100 - RNA, 22 nt, Human
ucugcugcacaaauucaucucu

SEQ ID NO: 131101 - RNA, 22 nt, Human
aguucucaagacaauuaccugu

SEQ ID NO: 131102 - RNA, 22 nt, Human
ggccagggccuggggacugucc

SEQ ID NO: 131103 - RNA, 22 nt, Human
ugguccaggguguaguacagag

SEQ ID NO: 131104 - RNA, 22 nt, Human
uuaguaauguguuaauaugaau

SEQ ID NO: 131105 - RNA, 22 nt, Human
uagaaacugauagucuugugcu

SEQ ID NO: 131106 - RNA, 22 nt, Human
gcaguggcuaagcucgcaugca

SEQ ID NO: 131107 - RNA, 19 nt, Human
ggcugccuuuccuuaccag

SEQ ID NO: 131108 - RNA, 22 nt, Human
aucaguuucugugaagaacaca

SEQ ID NO: 131109 - RNA, 22 nt, Human
caggggcuguuugccucaggcc

SEQ ID NO: 131110 - RNA, 22 nt, Human
ucaguauagcuucuaaacuaac

SEQ ID NO: 131111 - RNA, 20 nt, Human
gcugaggucauuaugccuca

SEQ ID NO: 131112 - RNA, 22 nt, Human
aucuagaaguggcaugaauuac

SEQ ID NO: 131113 - RNA, 22 nt, Human
uguguguauaauaaugucugca

SEQ ID NO: 131114 - RNA, 22 nt, Human
ucagccucucugaguccagacc

SEQ ID NO: 131115 - RNA, 22 nt, Human
agcugcagucaagcugggccac

SEQ ID NO: 131116 - RNA, 22 nt, Human
cagaggccuuucuacagugaua

SEQ ID NO: 131117 - RNA, 22 nt, Human
uucuacaugguugcucagaggg

SEQ ID NO: 131118 - RNA, 21 nt, Human
guggccugauuaugaaugggu

SEQ ID NO: 131119 - RNA, 22 nt, Human
agggucugacaaugugacuuag

SEQ ID NO: 131120 - RNA, 22 nt, Human
gaaggccuagggaugcucugcg

SEQ ID NO: 131121 - RNA, 22 nt, Human
acucccagguugccuggcaggc

SEQ ID NO: 131122 - RNA, 22 nt, Human
agcugcugugugcucaggcagg

SEQ ID NO: 131123 - RNA, 22 nt, Human
uggcaucucaaacaggcagauu

SEQ ID NO: 131124 - RNA, 22 nt, Human
aguccuucaagaaaucuggaaa

SEQ ID NO: 131125 - RNA, 18 nt, Human
aagccagagaccacugcc

SEQ ID NO: 131126 - RNA, 22 nt, Human
agcaggugacccaagcaggcug

SEQ ID NO: 131127 - RNA, 22 nt, Human
ggagccagcagggugacacuga

SEQ ID NO: 131128 - RNA, 22 nt, Human
gcaguggcuaggagucuggcgu

SEQ ID NO: 131129 - RNA, 22 nt, Human
aaacuuuuuauucuaaugucua

SEQ ID NO: 131130 - RNA, 22 nt, Human
uaagaacaguagaacaguaggu

SEQ ID NO: 131131 - RNA, 22 nt, Human
ugccagcccaccuuggggccuc

SEQ ID NO: 131132 - RNA, 21 nt, Human
gcagccagacgggauucaguu

SEQ ID NO: 131133 - RNA, 22 nt, Human
cagucccuaguggagcucacag

SEQ ID NO: 131134 - RNA, 22 nt, Human
cucucuuuuucgugugccgaag

SEQ ID NO: 131135 - RNA, 22 nt, Human
cccaggaggccaagguugcagu

SEQ ID NO: 131136 - RNA, 22 nt, Human
cacugcucgcugcagcauggcc

SEQ ID NO: 131137 - RNA, 22 nt, Human
uauuuugacuauuaaaccaaca

SEQ ID NO: 131138 - RNA, 22 nt, Human
ggauccuuaacuaucacaguga

SEQ ID NO: 131139 - RNA, 23 nt, Human
cccagcgcugagcccugcaggca

SEQ ID NO: 131140 - RNA, 22 nt, Human
augugugguacagucccguuua

SEQ ID NO: 131141 - RNA, 22 nt, Human
caggagcuacucagguuggguu

SEQ ID NO: 131142 - RNA, 22 nt, Human
agggugccugcugcagguucag

SEQ ID NO: 131143 - RNA, 22 nt, Human
aauaguguuguucacucaggag

SEQ ID NO: 131144 - RNA, 20 nt, Human
ugcagggcucugcuucucuc

SEQ ID NO: 131145 - RNA, 22 nt, Human
guguagcuuuggagugggaggc

SEQ ID NO: 131146 - RNA, 22 nt, Human
uuuaacuugaucaguagagcau

SEQ ID NO: 131147 - RNA, 22 nt, Human
ggcagcaguaggagcuaaucuu

SEQ ID NO: 131148 - RNA, 22 nt, Human
ccugugugguagccagcggugc

SEQ ID NO: 131149 - RNA, 22 nt, Human
ugggccacaagccaugggacca

SEQ ID NO: 131150 - RNA, 23 nt, Human
gccucagagaaacagcugcacac

SEQ ID NO: 131151 - RNA, 22 nt, Human
gacagagugcagggcuagaaga

SEQ ID NO: 131152 - RNA, 20 nt, Human
ugcuguaagauuagagagcu

SEQ ID NO: 131153 - RNA, 22 nt, Human
gaggucagucagaccaggguuu

SEQ ID NO: 131154 - RNA, 17 nt, Human
cauguguaugugggagu

SEQ ID NO: 131155 - RNA, 23 nt, Human
agccacuucuaucuugcuccugg

SEQ ID NO: 131156 - RNA, 20 nt, Human
ccaccuggccaaggcugugc

SEQ ID NO: 131157 - RNA, 22 nt, Human
uuuccuaguucuaagaaaugua

SEQ ID NO: 131158 - RNA, 22 nt, Human
cgccaggcuugguagcucaugc

SEQ ID NO: 131159 - RNA, 22 nt, Human
gucauauacacugcauguaauc

SEQ ID NO: 131160 - RNA, 22 nt, Human
gaugugggguugagggaccagc

SEQ ID NO: 131161 - RNA, 22 nt, Human
ucuuuuggaaaugaugugcagg

SEQ ID NO: 131162 - RNA, 22 nt, Human
gccuggagugcaguggcgugau

SEQ ID NO: 131163 - RNA, 22 nt, Human
cagcaggacguccaagugcuau

SEQ ID NO: 131164 - RNA, 22 nt, Human
gcugguuagaaaacagagcuca

SEQ ID NO: 131165 - RNA, 22 nt, Human
ggcuggcacugaggagagcucu

SEQ ID NO: 131166 - RNA, 22 nt, Human
gagcugccaagauuacaaucag

SEQ ID NO: 131167 - RNA, 22 nt, Human
accagagcagacuacuggaggu

SEQ ID NO: 131168 - RNA, 22 nt, Human
gcugucugucucugugacuuaa

SEQ ID NO: 131169 - RNA, 22 nt, Human
acauuucucagggaguuuugcu

SEQ ID NO: 131170 - RNA, 22 nt, Human
uuuguaugaacugguauguagg

SEQ ID NO: 131171 - RNA, 22 nt, Human
uaugcacagaaguuugcugaau

SEQ ID NO: 131172 - RNA, 22 nt, Human
cucaggauccaucuccugcccu

SEQ ID NO: 131173 - RNA, 22 nt, Human
augcacagcagugaguucagug

SEQ ID NO: 131174 - RNA, 22 nt, Human
ggccagaaguuggaaaagagcc

SEQ ID NO: 131175 - RNA, 22 nt, Human
uauauucugauuccaucugugu

SEQ ID NO: 131176 - RNA, 22 nt, Human
auauaauacaaccugcuaagug

SEQ ID NO: 131177 - RNA, 22 nt, Human
aaguucaaguaguguuacaugg

SEQ ID NO: 131178 - RNA, 22 nt, Human
auguguauauuuggugucaaua

SEQ ID NO: 131179 - RNA, 22 nt, Human
uggcucaggccuacgacgccuu

SEQ ID NO: 131180 - RNA, 22 nt, Human
aaaacucugcaguuaguuucua

SEQ ID NO: 131181 - RNA, 22 nt, Human
ggucagggggaucugugaggua

SEQ ID NO: 131182 - RNA, 22 nt, Human
agcugcucuuugaaggacacuu

SEQ ID NO: 131183 - RNA, 23 nt, Human
uggcaccaggcauucuaggggua

SEQ ID NO: 131184 - RNA, 22 nt, Human
aaaaagguugauccagauuagg

SEQ ID NO: 131185 - RNA, 22 nt, Human
acuuucucccacccacccgucu

SEQ ID NO: 131186 - RNA, 22 nt, Human
uguauguaaaguuuguaauaga

SEQ ID NO: 131187 - RNA, 22 nt, Human
aguggcuggagccccaggcugg

SEQ ID NO: 131188 - RNA, 22 nt, Human
gccgaagcugccgucugguccu

SEQ ID NO: 131189 - RNA, 22 nt, Human
uuaagauagaacccaguagucu

SEQ ID NO: 131190 - RNA, 16 nt, Human
gagggcagaggcggaa

SEQ ID NO: 131191 - RNA, 22 nt, Human
auucuucacaaauauauagaag

SEQ ID NO: 131192 - RNA, 22 nt, Human
gaaucucaguggaagcaggaag

SEQ ID NO: 131193 - RNA, 22 nt, Human
uaagcauucaaugcuuagcacu

SEQ ID NO: 131194 - RNA, 22 nt, Human
ucacugcaaucucugccuucca

SEQ ID NO: 131195 - RNA, 22 nt, Human
uucacaggcuuggagguggggg

SEQ ID NO: 131196 - RNA, 22 nt, Human
ccucccucuguuagagcugucu

SEQ ID NO: 131197 - RNA, 22 nt, Human
acaguauuugcgauacugauga

SEQ ID NO: 131198 - RNA, 22 nt, Human
cacucaggcugugucaggagga

SEQ ID NO: 131199 - RNA, 22 nt, Human
agaccacagucaggcuccuggu

SEQ ID NO: 131200 - RNA, 18 nt, Human
caggagcaggaguugaac

SEQ ID NO: 131201 - RNA, 22 nt, Human
auacaguaaccacauucuauag

SEQ ID NO: 131202 - RNA, 22 nt, Human
aggccucacucucagagcuucu

SEQ ID NO: 131203 - RNA, 22 nt, Human
agcaaagucaguggaaccaucc

SEQ ID NO: 131204 - RNA, 22 nt, Human
ggagccugugggaugagaugug

SEQ ID NO: 131205 - RNA, 22 nt, Human
cauguacaaaaggcaaaugccu

SEQ ID NO: 131206 - RNA, 22 nt, Human
gcuggccucaucacugacuucu

SEQ ID NO: 131207 - RNA, 22 nt, Human
uucuaacuaaagucuuuguuuu

SEQ ID NO: 131208 - RNA, 22 nt, Human
gccucugcaucuucgccgcacu

SEQ ID NO: 131209 - RNA, 22 nt, Human
gugucauggaaaauugcaaugg

SEQ ID NO: 131210 - RNA, 22 nt, Human
ggagcuggcuacagagaacucc

SEQ ID NO: 131211 - RNA, 22 nt, Human
ucugucacaauuugcuuacucu

SEQ ID NO: 131212 - RNA, 22 nt, Human
gcucccugccuacacggaccuu

SEQ ID NO: 131213 - RNA, 22 nt, Human
cagcucucuaaggucuugcuuu

SEQ ID NO: 131214 - RNA, 22 nt, Human
uaaaucaguuucucuuauuggu

SEQ ID NO: 131215 - RNA, 22 nt, Human
aauguguauaugaacauacagg

SEQ ID NO: 131216 - RNA, 22 nt, Human
auggacagugugucuguuucca

SEQ ID NO: 131217 - RNA, 23 nt, Human
ucugucaccuauggcugcucuuc

SEQ ID NO: 131218 - RNA, 22 nt, Human
agagcugagaauguggcuuccu

SEQ ID NO: 131219 - RNA, 22 nt, Human
cuguggcucugcagucccaaca

SEQ ID NO: 131220 - RNA, 22 nt, Human
ugagccagauaagggcucacgc

SEQ ID NO: 131221 - RNA, 22 nt, Human
acauaccauacauggugagaug

SEQ ID NO: 131222 - RNA, 20 nt, Human
uauuuguauuugggaaaguu

SEQ ID NO: 131223 - RNA, 22 nt, Human
cagcucuggcgucagggagcga

SEQ ID NO: 131224 - RNA, 22 nt, Human
augucuuuauaaauguauaaug

SEQ ID NO: 131225 - RNA, 22 nt, Human
ugggcuggugagggaucauuua

SEQ ID NO: 131226 - RNA, 22 nt, Human
ucucagagcuucaguuauuuuc

SEQ ID NO: 131227 - RNA, 22 nt, Human
ugccacacagcuguaugaggga

SEQ ID NO: 131228 - RNA, 22 nt, Human
uggggcuggcacagucucuauu

SEQ ID NO: 131229 - RNA, 22 nt, Human
agcugguguccuccuggagcug

SEQ ID NO: 131230 - RNA, 22 nt, Human
acagaaagaagguguauuugag

SEQ ID NO: 131231 - RNA, 18 nt, Human
ugucucuccuuucugugu

SEQ ID NO: 131232 - RNA, 23 nt, Human
aucuguguguggguagggaugau

SEQ ID NO: 131233 - RNA, 22 nt, Human
gcuuuacaugagaugaggacaa

SEQ ID NO: 131234 - RNA, 22 nt, Human
agcugccagcaucccggaaggg

SEQ ID NO: 131235 - RNA, 22 nt, Human
agucucagcuacuugggaggcu

SEQ ID NO: 131236 - RNA, 22 nt, Human
agagccugaggaugucccagcu

SEQ ID NO: 131237 - RNA, 22 nt, Human
uugacagcaaagauugugccua

SEQ ID NO: 131238 - RNA, 22 nt, Human
cccucugcugccuggcuggguc

SEQ ID NO: 131239 - RNA, 22 nt, Human
caauacuuccuuguuagaggca

SEQ ID NO: 131240 - RNA, 22 nt, Human
cagugccaugucugagccccua

SEQ ID NO: 131241 - RNA, 22 nt, Human
ugagugaggaagcgguggagga

SEQ ID NO: 131242 - RNA, 22 nt, Human
auuuucugagcacgugacagca

SEQ ID NO: 131243 - RNA, 22 nt, Human
cagcaucuaaucuucaugccgg

SEQ ID NO: 131244 - RNA, 22 nt, Human
ucugaggcccugcaggcagugu

SEQ ID NO: 131245 - RNA, 22 nt, Human
uuuuuccuuagggguuacucac

SEQ ID NO: 131246 - RNA, 22 nt, Human
gcucuuccauuucucuugaacu

SEQ ID NO: 131247 - RNA, 22 nt, Human
uugaagcagagaaauacuugaa

SEQ ID NO: 131248 - RNA, 22 nt, Human
ccuccugggccuugcucuguga

SEQ ID NO: 131249 - RNA, 22 nt, Human
aauuuucugguguguaaugaag

SEQ ID NO: 131250 - RNA, 22 nt, Human
uacagugauuucuacugguguu

SEQ ID NO: 131251 - RNA, 21 nt, Human
ggugucaguuuuggucauuag

SEQ ID NO: 131252 - RNA, 22 nt, Human
cacaggagagcugggaggugcc

SEQ ID NO: 131253 - RNA, 22 nt, Human
uccuggagagugggcgagcaca

SEQ ID NO: 131254 - RNA, 22 nt, Human
cuggcucauccagguguugcuc

SEQ ID NO: 131255 - RNA, 20 nt, Human
aagagcugacucacaguggu

SEQ ID NO: 131256 - RNA, 18 nt, Human
caguuuuuauaucuggca

SEQ ID NO: 131257 - RNA, 22 nt, Human
agauacaugucaagagacuuau

SEQ ID NO: 131258 - RNA, 22 nt, Human
uguggcugucuguucuccuagg

SEQ ID NO: 131259 - RNA, 22 nt, Human
ggagccaguauuuaguggucuu

SEQ ID NO: 131260 - RNA, 22 nt, Human
uuuauuauucucuggagaaugu

SEQ ID NO: 131261 - RNA, 22 nt, Human
gcagccagccccucugaccucu

SEQ ID NO: 131262 - RNA, 18 nt, Human
uucaccagugugaugggu

SEQ ID NO: 131263 - RNA, 22 nt, Human
uggcuggcaaggcuggagucag

SEQ ID NO: 131264 - RNA, 22 nt, Human
cacaggcucuucucacuugauu

SEQ ID NO: 131265 - RNA, 22 nt, Human
gccagcucccaagugagccccu

SEQ ID NO: 131266 - RNA, 22 nt, Human
agugugucugaucacuugugag

SEQ ID NO: 131267 - RNA, 22 nt, Human
ggcaggagaaaggucucuucuu

SEQ ID NO: 131268 - RNA, 22 nt, Human
cugaggcuuugugugcaugccu

SEQ ID NO: 131269 - RNA, 22 nt, Human
ggcuucugaaaucucugugcgu

SEQ ID NO: 131270 - RNA, 22 nt, Human
gcucucuuuaaacugcauggcu

SEQ ID NO: 131271 - RNA, 22 nt, Human
agcagcucaaagccugcaagga

SEQ ID NO: 131272 - RNA, 22 nt, Human
uggccugguuguugcugccguu

SEQ ID NO: 131273 - RNA, 22 nt, Human
cuuauguaaacuacagauaaua

SEQ ID NO: 131274 - RNA, 20 nt, Human
aucaggauucuugcuuuguu

SEQ ID NO: 131275 - RNA, 22 nt, Human
gccagagcacaggcugguagua

SEQ ID NO: 131276 - RNA, 22 nt, Human
uuguguccugauuugacacaau

SEQ ID NO: 131277 - RNA, 22 nt, Human
cagccagcuggcacugugagua

SEQ ID NO: 131278 - RNA, 22 nt, Human
ucagaagacuacuaggacacau

SEQ ID NO: 131279 - RNA, 19 nt, Human
guguauguaaguugugagg

SEQ ID NO: 131280 - RNA, 22 nt, Human
uaaagguacgaagugagggauu

SEQ ID NO: 131281 - RNA, 22 nt, Human
cugaugcuauaagccacagugg

SEQ ID NO: 131282 - RNA, 22 nt, Human
cagcuucucagaaagcugaggu

SEQ ID NO: 131283 - RNA, 22 nt, Human
acaaauaugguacucggagaaa

SEQ ID NO: 131284 - RNA, 22 nt, Human
uggaaggcaacggagugagcug

SEQ ID NO: 131285 - RNA, 22 nt, Human
ucugccugccagucugguccuc

SEQ ID NO: 131286 - RNA, 22 nt, Human
uuugacaggacuaacauauggc

SEQ ID NO: 131287 - RNA, 19 nt, Human
gcaggguguugacuguccc

SEQ ID NO: 131288 - RNA, 22 nt, Human
ugggcugcagagcccggccuuc

SEQ ID NO: 131289 - RNA, 22 nt, Human
cuucucaaaguugugaaucagg

SEQ ID NO: 131290 - RNA, 22 nt, Human
ucagagugugacuuggucauga

SEQ ID NO: 131291 - RNA, 22 nt, Human
gaggagagagggacugucugca

SEQ ID NO: 131292 - RNA, 22 nt, Human
agcagagccugggcuaggggug

SEQ ID NO: 131293 - RNA, 22 nt, Human
uaaauuauggcuggcagagcag

SEQ ID NO: 131294 - RNA, 17 nt, Human
ggcugcugugcuggugc

SEQ ID NO: 131295 - RNA, 22 nt, Human
gcagcugggccccagccucucc

SEQ ID NO: 131296 - RNA, 22 nt, Human
cccaagggagugccuggucaac

SEQ ID NO: 131297 - RNA, 19 nt, Human
cuucuucuuggcagccaag

SEQ ID NO: 131298 - RNA, 22 nt, Human
ucaaaugcucuuugcagagagg

SEQ ID NO: 131299 - RNA, 20 nt, Human
auucucugcucaaguggcac

SEQ ID NO: 131300 - RNA, 22 nt, Human
auaaauaucacuguugucccuc

SEQ ID NO: 131301 - RNA, 22 nt, Human
uauguguauugagcauuguuac

SEQ ID NO: 131302 - RNA, 22 nt, Human
agggccaggaacaccugaaggg

SEQ ID NO: 131303 - RNA, 22 nt, Human
uuuguuaauucuuauguuagag

SEQ ID NO: 131304 - RNA, 22 nt, Human
cuggccugagaaugcuacccuu

SEQ ID NO: 131305 - RNA, 22 nt, Human
cccagggagguagcaggagaaa

SEQ ID NO: 131306 - RNA, 23 nt, Human
ucuccagugucucuucauugagu

SEQ ID NO: 131307 - RNA, 22 nt, Human
agauuucccacuccauguauug

SEQ ID NO: 131308 - RNA, 22 nt, Human
uacucucuggaaauuauaguga

SEQ ID NO: 131309 - RNA, 22 nt, Human
aggcaguuguugcugagcagcu

SEQ ID NO: 131310 - RNA, 22 nt, Human
ugauuuccacagucaggggugc

SEQ ID NO: 131311 - RNA, 22 nt, Human
uucaggagcuggcugcgaagga

SEQ ID NO: 131312 - RNA, 23 nt, Human
cugaggccugcugcguucagguu

SEQ ID NO: 131313 - RNA, 22 nt, Human
cucaggacccgguccagguggg

SEQ ID NO: 131314 - RNA, 22 nt, Human
auguguguaugugccuauaucu

SEQ ID NO: 131315 - RNA, 22 nt, Human
agcagcauucucugguaugggg

SEQ ID NO: 131316 - RNA, 21 nt, Human
agaaaaaccagcauguuuuca

SEQ ID NO: 131317 - RNA, 22 nt, Human
ccucuucugagugagacucccu

SEQ ID NO: 131318 - RNA, 22 nt, Human
uggagcaggcaucuuucucucu

SEQ ID NO: 131319 - RNA, 22 nt, Human
ccugccuguacuagagacccag

SEQ ID NO: 131320 - RNA, 23 nt, Human
aaugauuucaugaugauagcagc

SEQ ID NO: 131321 - RNA, 22 nt, Human
cucugggcaggaccaguggacc

SEQ ID NO: 131322 - RNA, 22 nt, Human
ccugugccauccugagcauccc

SEQ ID NO: 131323 - RNA, 22 nt, Human
ugccagggugucaggagagcua

SEQ ID NO: 131324 - RNA, 22 nt, Human
auaaaaacugacccauccuuug

SEQ ID NO: 131325 - RNA, 22 nt, Human
ucucugggaaugggccugggua

SEQ ID NO: 131326 - RNA, 22 nt, Human
gcugaaggaggcucugguacua

SEQ ID NO: 131327 - RNA, 22 nt, Human
gcagcugauggaaguccuauug

SEQ ID NO: 131328 - RNA, 22 nt, Human
ucccacacagcccgcucaccgg

SEQ ID NO: 131329 - RNA, 22 nt, Human
gcugcagcucgccuuccggccu

SEQ ID NO: 131330 - RNA, 22 nt, Human
gcagagcugggucuguauccaa

SEQ ID NO: 131331 - RNA, 22 nt, Human
cagaguggcacucugcuggaug

SEQ ID NO: 131332 - RNA, 21 nt, Human
agcagagugcuuugacuuugu

SEQ ID NO: 131333 - RNA, 22 nt, Human
cuuugcauacaauuuuuagaaa

SEQ ID NO: 131334 - RNA, 22 nt, Human
ucugagcuuuuauuaucaaccu

SEQ ID NO: 131335 - RNA, 22 nt, Human
agggcccucuggcaggccaggc

SEQ ID NO: 131336 - RNA, 22 nt, Human
ugccucagaguugucccuacca

SEQ ID NO: 131337 - RNA, 22 nt, Human
acagagagaaacaaucagcagc

SEQ ID NO: 131338 - RNA, 22 nt, Human
aagggacuuugucagcuuucca

SEQ ID NO: 131339 - RNA, 22 nt, Human
uggagcagccaugaugacagag

SEQ ID NO: 131340 - RNA, 22 nt, Human
agcucuccacacauaggacuag

SEQ ID NO: 131341 - RNA, 22 nt, Human
agucuucagagaaauuaacucu

SEQ ID NO: 131342 - RNA, 22 nt, Human
caccagggcucugagcucugaa

SEQ ID NO: 131343 - RNA, 22 nt, Human
acaaagguggaccauguggcuu

SEQ ID NO: 131344 - RNA, 22 nt, Human
gcugagggcauguguggcgacu

SEQ ID NO: 131345 - RNA, 22 nt, Human
augaagcugaccuugucuugcu

SEQ ID NO: 131346 - RNA, 22 nt, Human
aggcacuguggaagacaugguu

SEQ ID NO: 131347 - RNA, 18 nt, Human
ccagguggugacagagau

SEQ ID NO: 131348 - RNA, 22 nt, Human
uuaugggagcaauuggggaggu

SEQ ID NO: 131349 - RNA, 22 nt, Human
cuucuugcugggggccucagug

SEQ ID NO: 131350 - RNA, 22 nt, Human
gaaagagaaccugggccuagau

SEQ ID NO: 131351 - RNA, 22 nt, Human
uuucucucuauuuagacaggua

SEQ ID NO: 131352 - RNA, 22 nt, Human
uagaaaugcccagauucugcua

SEQ ID NO: 131353 - RNA, 22 nt, Human
acuggcagcuguaggaugcaug

SEQ ID NO: 131354 - RNA, 22 nt, Human
cucuggaaaaccacuagcagga

SEQ ID NO: 131355 - RNA, 22 nt, Human
uguaggcugaagaugaagugga

SEQ ID NO: 131356 - RNA, 22 nt, Human
ggccagaggccauccuccugcu

SEQ ID NO: 131357 - RNA, 23 nt, Human
uguaacuuugggcauguugcuuc

SEQ ID NO: 131358 - RNA, 17 nt, Human
gcucccugaggacagcu

SEQ ID NO: 131359 - RNA, 22 nt, Human
ccagggcagcgccccuccacgc

SEQ ID NO: 131360 - RNA, 22 nt, Human
cucuccuugcagauggcugccu

SEQ ID NO: 131361 - RNA, 22 nt, Human
acagggcagagaggcaggcuug

SEQ ID NO: 131362 - RNA, 22 nt, Human
caagaacauugugaucacuuca

SEQ ID NO: 131363 - RNA, 22 nt, Human
uuggcucaggaccccugugacu

SEQ ID NO: 131364 - RNA, 22 nt, Human
cagcuucugagcaagccagggg

SEQ ID NO: 131365 - RNA, 22 nt, Human
cccuuccucccaggcuucugug

SEQ ID NO: 131366 - RNA, 22 nt, Human
caaagugcuaggauuacaggcc

SEQ ID NO: 131367 - RNA, 22 nt, Human
ugaaggccacuuccugugagcu

SEQ ID NO: 131368 - RNA, 22 nt, Human
agaccgagaaguucuccaggcc

SEQ ID NO: 131369 - RNA, 22 nt, Human
ucugugugcccaccugacaccu

SEQ ID NO: 131370 - RNA, 22 nt, Human
gucccaggcagagucaggaggg

SEQ ID NO: 131371 - RNA, 22 nt, Human
cuaaucaucuuucucuuaaagc

SEQ ID NO: 131372 - RNA, 22 nt, Human
uacuuccuguuuccaugucugu

SEQ ID NO: 131373 - RNA, 22 nt, Human
ccugucauacuaacguaguggg

SEQ ID NO: 131374 - RNA, 22 nt, Human
cccaggaggucgaagcugcagu

SEQ ID NO: 131375 - RNA, 22 nt, Human
cccagaaggucgaggcugcagu

SEQ ID NO: 131376 - RNA, 21 nt, Human
cugaggcagcacagcuaguca

SEQ ID NO: 131377 - RNA, 22 nt, Human
cuagaaauacaggcacgugcca

SEQ ID NO: 131378 - RNA, 21 nt, Human
ggcagccucuguggaagggga

SEQ ID NO: 131379 - RNA, 22 nt, Human
guuagaaacacauucuuauuga

SEQ ID NO: 131380 - RNA, 22 nt, Human
gcagggccuuagcagcggcugc

SEQ ID NO: 131381 - RNA, 22 nt, Human
ggaggcucccacgcagcucaca

SEQ ID NO: 131382 - RNA, 22 nt, Human
uucugugauugacauguggcuu

SEQ ID NO: 131383 - RNA, 20 nt, Human
gcugcucuccacggucugca

SEQ ID NO: 131384 - RNA, 21 nt, Human
acagcaagccuuccuuucagg

SEQ ID NO: 131385 - RNA, 22 nt, Human
ugucuucaucuccaugcacaga

SEQ ID NO: 131386 - RNA, 22 nt, Human
ucucucucagccauuacagaac

SEQ ID NO: 131387 - RNA, 21 nt, Human
ggugggcacaggagagcagag

SEQ ID NO: 131388 - RNA, 22 nt, Human
uacuuuuccagggcuggcugag

SEQ ID NO: 131389 - RNA, 21 nt, Human
ggauggauagggaagagauuu

SEQ ID NO: 131390 - RNA, 19 nt, Human
acacagggaucagaggguu

SEQ ID NO: 131391 - RNA, 20 nt, Human
gguagcagcugcugucaucc

SEQ ID NO: 131392 - RNA, 22 nt, Human
augcuuuuccaggagaaauaua

SEQ ID NO: 131393 - RNA, 22 nt, Human
cagcuggcagaaccugcaucca

SEQ ID NO: 131394 - RNA, 22 nt, Human
ugcaauaaagugcuauaaaucc

SEQ ID NO: 131395 - RNA, 22 nt, Human
uuucacagagaauauugccuug

SEQ ID NO: 131396 - RNA, 18 nt, Human
gaaaugugauucuagggc

SEQ ID NO: 131397 - RNA, 22 nt, Human
cacugcaguuccccagugcgca

SEQ ID NO: 131398 - RNA, 22 nt, Human
aaggcacugcuuugcugcgccc

SEQ ID NO: 131399 - RNA, 22 nt, Human
uguaucaaggguuuauguaagc

SEQ ID NO: 131400 - RNA, 22 nt, Human
gaaaugugggucaugacccauu

SEQ ID NO: 131401 - RNA, 22 nt, Human
ugugccaggcacuugcccaggc

SEQ ID NO: 131402 - RNA, 22 nt, Human
acuuauuuauucauucagcuca

SEQ ID NO: 131403 - RNA, 22 nt, Human
uccugccucuccaugcuaacua

SEQ ID NO: 131404 - RNA, 22 nt, Human
uuuaaaauuuagaccucuccac

SEQ ID NO: 131405 - RNA, 22 nt, Human
uacaaaguuuucuuggauugag

SEQ ID NO: 131406 - RNA, 20 nt, Human
ugggccugagccugugggcu

SEQ ID NO: 131407 - RNA, 22 nt, Human
aguguguagcacaugguaagca

SEQ ID NO: 131408 - RNA, 22 nt, Human
auuaaauuaaguggcuaauuua

SEQ ID NO: 131409 - RNA, 22 nt, Human
uuguaacagcuguuuauauagu

SEQ ID NO: 131410 - RNA, 19 nt, Human
acaaaugauguugcacuga

SEQ ID NO: 131411 - RNA, 22 nt, Human
uauuuuaucugccagaguggag

SEQ ID NO: 131412 - RNA, 22 nt, Human
ugcugccuuugggaccuggccu

SEQ ID NO: 131413 - RNA, 22 nt, Human
ugagaaagugggugccuagcaa

SEQ ID NO: 131414 - RNA, 22 nt, Human
cagggcagggccacacccccug

SEQ ID NO: 131415 - RNA, 22 nt, Human
ccucagaugucuuaaggcacug

SEQ ID NO: 131416 - RNA, 22 nt, Human
ucagugugauuaggcuaucuga

SEQ ID NO: 131417 - RNA, 22 nt, Human
caaagggcucuagacucagcag

SEQ ID NO: 131418 - RNA, 22 nt, Human
agggcagaaauauugauacugu

SEQ ID NO: 131419 - RNA, 22 nt, Human
uaagaacaagauguuccuguuu

SEQ ID NO: 131420 - RNA, 22 nt, Human
ccagcugggauuaagggaaaau

SEQ ID NO: 131421 - RNA, 21 nt, Human
ggacuuacauagguaaggggu

SEQ ID NO: 131422 - RNA, 22 nt, Human
uuugcauuuugauaagaucacu

SEQ ID NO: 131423 - RNA, 22 nt, Human
uugagaagaggcuuuguaggaa

SEQ ID NO: 131424 - RNA, 21 nt, Human
uccuccuucaaguccuggccu

SEQ ID NO: 131425 - RNA, 22 nt, Human
cucagugugaaugcucaguaaa

SEQ ID NO: 131426 - RNA, 22 nt, Human
cuggcugugcuggaguugagga

SEQ ID NO: 131427 - RNA, 22 nt, Human
caucucuucauuagcauuauug

SEQ ID NO: 131428 - RNA, 22 nt, Human
gcacugaaauuauaugcauuug

SEQ ID NO: 131429 - RNA, 22 nt, Human
ugaaaucuuauacuuugguagu

SEQ ID NO: 131430 - RNA, 22 nt, Human
cagggcaguaacgggaacaucu

SEQ ID NO: 131431 - RNA, 22 nt, Human
gagagaagaauguuccgaggcc

SEQ ID NO: 131432 - RNA, 22 nt, Human
ucuuuagcuagaaauacucuaa

SEQ ID NO: 131433 - RNA, 22 nt, Human
ggccagaaaguuaagcuguggc

SEQ ID NO: 131434 - RNA, 23 nt, Human
acaguuauagcugugaauaacau

SEQ ID NO: 131435 - RNA, 22 nt, Human
ugcugccacauuuaaagagggg

SEQ ID NO: 131436 - RNA, 22 nt, Human
uucuuaaagaggcaaaacacag

SEQ ID NO: 131437 - RNA, 22 nt, Human
guguacugcaaaugcugcugcc

SEQ ID NO: 131438 - RNA, 22 nt, Human
ucugcaggaaaaaagugccugg

SEQ ID NO: 131439 - RNA, 22 nt, Human
uuagauauguuuuugcuaaugc

SEQ ID NO: 131440 - RNA, 22 nt, Human
ucuuaaagagcgcaauuugagg

SEQ ID NO: 131441 - RNA, 19 nt, Human
uuagccauccacagugaaa

SEQ ID NO: 131442 - RNA, 23 nt, Human
auuuacagcugugugagcaaguu

SEQ ID NO: 131443 - RNA, 22 nt, Human
uggcccugcuggccaaaggcua

SEQ ID NO: 131444 - RNA, 22 nt, Human
guagaagugaugucauguuaua

SEQ ID NO: 131445 - RNA, 22 nt, Human
aucugccugagucuagguuuuc

SEQ ID NO: 131446 - RNA, 20 nt, Human
uaagaacaagacuaggaagc

SEQ ID NO: 131447 - RNA, 22 nt, Human
uuuauaguagcaugauuuauaa

SEQ ID NO: 131448 - RNA, 22 nt, Human
ggcagagcugcaugagcacuca

SEQ ID NO: 131449 - RNA, 22 nt, Human
aggcuauuuccacucuucucau

SEQ ID NO: 131450 - RNA, 19 nt, Human
gcuggcagauguggccgug

SEQ ID NO: 131451 - RNA, 19 nt, Human
uggggcuguguuuugaccc

SEQ ID NO: 131452 - RNA, 22 nt, Human
uuuccucuccaccaggaggucu

SEQ ID NO: 131453 - RNA, 22 nt, Human
uuucacucagcucucauugucu

SEQ ID NO: 131454 - RNA, 22 nt, Human
cuucuguggauguuggaugcau

SEQ ID NO: 131455 - RNA, 22 nt, Human
gauauuuuuaggugaugcaggc

SEQ ID NO: 131456 - RNA, 22 nt, Human
cacagcugcccuacuccaugug

SEQ ID NO: 131457 - RNA, 22 nt, Human
agcugagcucaggcugauguaa

SEQ ID NO: 131458 - RNA, 22 nt, Human
uucaggaugcagagguuguagu

SEQ ID NO: 131459 - RNA, 22 nt, Human
uguguauaagugagaaugcugu

SEQ ID NO: 131460 - RNA, 22 nt, Human
ggccucuggcaggcaggcccuc

SEQ ID NO: 131461 - RNA, 22 nt, Human
cugagccaaccacagcaggagc

SEQ ID NO: 131462 - RNA, 22 nt, Human
gcagcuggugcaaaugucacuc

SEQ ID NO: 131463 - RNA, 22 nt, Human
gugcagguguuuuggcugccag

SEQ ID NO: 131464 - RNA, 22 nt, Human
acguguguuggucagggggccc

SEQ ID NO: 131465 - RNA, 22 nt, Human
ugugugcucuaaugccuaguac

SEQ ID NO: 131466 - RNA, 22 nt, Human
aaucagaauuuauugaaucuuu

SEQ ID NO: 131467 - RNA, 22 nt, Human
accaggcugugaagugagacua

SEQ ID NO: 131468 - RNA, 22 nt, Human
ccuuugggugaauuccucucuu

SEQ ID NO: 131469 - RNA, 22 nt, Human
ugugugauugcacuuauaugag

SEQ ID NO: 131470 - RNA, 22 nt, Human
uuagcucagaaaauuuaaacuu

SEQ ID NO: 131471 - RNA, 22 nt, Human
ccagacuguggaguuccuggug

SEQ ID NO: 131472 - RNA, 22 nt, Human
gcagcauugugagguccugccc

SEQ ID NO: 131473 - RNA, 22 nt, Human
gaggggcagagguagagaacaa

SEQ ID NO: 131474 - RNA, 22 nt, Human
acacaguaccccaaggcugggc

SEQ ID NO: 131475 - RNA, 22 nt, Human
aaaaagauguccugaaguuuag

SEQ ID NO: 131476 - RNA, 23 nt, Human
gccucugcagccuaguuaguguc

SEQ ID NO: 131477 - RNA, 22 nt, Human
gccugguggugugcucaagugg

SEQ ID NO: 131478 - RNA, 22 nt, Human
ggguguguuccuaaggaaacca

SEQ ID NO: 131479 - RNA, 22 nt, Human
uaugcacaccuggguccuuguc

SEQ ID NO: 131480 - RNA, 21 nt, Human
agucccaggggugagugaugu

SEQ ID NO: 131481 - RNA, 22 nt, Human
cagguccccuccccuaccaggc

SEQ ID NO: 131482 - RNA, 22 nt, Human
gcagcugagcgugaggaagagu

SEQ ID NO: 131483 - RNA, 22 nt, Human
caaagguauaaguuaauauaca

SEQ ID NO: 131484 - RNA, 22 nt, Human
cucugggcaaguaugauagaaa

SEQ ID NO: 131485 - RNA, 22 nt, Human
acagacagggcaccugccuccu

SEQ ID NO: 131486 - RNA, 22 nt, Human
acacagggcagagagcuggcuc

SEQ ID NO: 131487 - RNA, 22 nt, Human
agggcagccugagugcuggccc

SEQ ID NO: 131488 - RNA, 22 nt, Human
uccugcugagcgucugucauuu

SEQ ID NO: 131489 - RNA, 17 nt, Human
ugugcgcuugugugagg

SEQ ID NO: 131490 - RNA, 22 nt, Human
aggccugcagcaggagcaaacc

SEQ ID NO: 131491 - RNA, 22 nt, Human
ggcuucaccaggugcaugcaug

SEQ ID NO: 131492 - RNA, 17 nt, Human
aaaauucuguaaagagg

SEQ ID NO: 131493 - RNA, 22 nt, Human
cuagucacucagcacugacaaa

SEQ ID NO: 131494 - RNA, 19 nt, Human
gucacauuugucucccagg

SEQ ID NO: 131495 - RNA, 22 nt, Human
gcacugcaucuacuggcaagua

SEQ ID NO: 131496 - RNA, 22 nt, Human
cuggcucaggguggucuggguc

SEQ ID NO: 131497 - RNA, 22 nt, Human
cugcucuggcuguguacuucag

SEQ ID NO: 131498 - RNA, 22 nt, Human
cacugugucuggagugagcugg

SEQ ID NO: 131499 - RNA, 20 nt, Human
ccugucugcaauggagguca

SEQ ID NO: 131500 - RNA, 22 nt, Human
cccaugagaccugguuuaaggc

SEQ ID NO: 131501 - RNA, 22 nt, Human
ucucuguucauggcacuauguc

SEQ ID NO: 131502 - RNA, 22 nt, Human
cuggagccagccagggcccucu

SEQ ID NO: 131503 - RNA, 22 nt, Human
aggcugggaaaccugaaguugu

SEQ ID NO: 131504 - RNA, 22 nt, Human
caggagacaauggcuguggggc

SEQ ID NO: 131505 - RNA, 20 nt, Human
gcagcugcccccagucccug

SEQ ID NO: 131506 - RNA, 21 nt, Human
agacagagugcagucuacaua

SEQ ID NO: 131507 - RNA, 22 nt, Human
cuuuacagccuccagaaggaac

SEQ ID NO: 131508 - RNA, 22 nt, Human
caagcuccuuacauccacaggg

SEQ ID NO: 131509 - RNA, 22 nt, Human
caggccucagagaguggcgggg

SEQ ID NO: 131510 - RNA, 22 nt, Human
agcagagcuauucuugugcaau

SEQ ID NO: 131511 - RNA, 22 nt, Human
gggcugggauugcuugcuguga

SEQ ID NO: 131512 - RNA, 22 nt, Human
ugucugagugugccugggcauu

SEQ ID NO: 131513 - RNA, 22 nt, Human
ggcuccuguccccucagcugcu

SEQ ID NO: 131514 - RNA, 22 nt, Human
cugggguggaggagcuccccug

SEQ ID NO: 131515 - RNA, 23 nt, Human
ccagcccuccaccagcucuaggc

SEQ ID NO: 131516 - RNA, 22 nt, Human
gccuggagugguccugcugccc

SEQ ID NO: 131517 - RNA, 22 nt, Human
cugagucucccggcaguggagg

SEQ ID NO: 131518 - RNA, 23 nt, Human
gggagccauggguggucauggag

SEQ ID NO: 131519 - RNA, 22 nt, Human
ugaacgcagguccacauggcuc

SEQ ID NO: 131520 - RNA, 19 nt, Human
gcaggcaguggcauucgga

SEQ ID NO: 131521 - RNA, 21 nt, Human
aaaguucaugcuuuaauauuc

SEQ ID NO: 131522 - RNA, 22 nt, Human
guaguucugcagugucaccuga

SEQ ID NO: 131523 - RNA, 20 nt, Human
aguguaugaacagaugcggg

SEQ ID NO: 131524 - RNA, 22 nt, Human
aagcagaugggacuccaaggca

SEQ ID NO: 131525 - RNA, 22 nt, Human
ggcugccugcuccuccugcacg

SEQ ID NO: 131526 - RNA, 22 nt, Human
aagcugccagcugagcugaggc

SEQ ID NO: 131527 - RNA, 22 nt, Human
acuguguguuugucuagcacag

SEQ ID NO: 131528 - RNA, 22 nt, Human
cagguggguguaugaaugcaaa

SEQ ID NO: 131529 - RNA, 22 nt, Human
agaaauguggaucguuuuaaaa

SEQ ID NO: 131530 - RNA, 22 nt, Human
ucucucuugucaccccaucugc

SEQ ID NO: 131531 - RNA, 22 nt, Human
agcugccaucugaagaacugca

SEQ ID NO: 131532 - RNA, 22 nt, Human
uuguauuucuccacuuucuguu

SEQ ID NO: 131533 - RNA, 22 nt, Human
ggccucugcaacuggcuguggc

SEQ ID NO: 131534 - RNA, 22 nt, Human
cuggugggagcagcaggcagcu

SEQ ID NO: 131535 - RNA, 22 nt, Human
acuccugggugcugaccagcgu

SEQ ID NO: 131536 - RNA, 22 nt, Human
caggcuugcugcuagagcacuu

SEQ ID NO: 131537 - RNA, 22 nt, Human
cuguccuaugaguacucacuag

SEQ ID NO: 131538 - RNA, 22 nt, Human
gcugugcuggaaggggaccugc

SEQ ID NO: 131539 - RNA, 22 nt, Human
auguggcuguggacaccuuuca

SEQ ID NO: 131540 - RNA, 21 nt, Human
uucuucaaagaagaaggcaca

SEQ ID NO: 131541 - RNA, 22 nt, Human
ugucccagauacuggacauaga

SEQ ID NO: 131542 - RNA, 22 nt, Human
ucuucugugaucuauguguuuu

SEQ ID NO: 131543 - RNA, 22 nt, Human
aguccaggaguugggugacauu

SEQ ID NO: 131544 - RNA, 22 nt, Human
uuucaguuuuugcucgauguau

SEQ ID NO: 131545 - RNA, 22 nt, Human
gucuucuuuucagucugcuugu

SEQ ID NO: 131546 - RNA, 22 nt, Human
uucuuuaaaauagugagaaaga

SEQ ID NO: 131547 - RNA, 21 nt, Human
gccuguguaaauugaguuucc

SEQ ID NO: 131548 - RNA, 22 nt, Human
cagucccacaagaucuccacaa

SEQ ID NO: 131549 - RNA, 22 nt, Human
cuuauuuaugucugucucuaau

SEQ ID NO: 131550 - RNA, 22 nt, Human
cuucuucauaggcaguccuguu

SEQ ID NO: 131551 - RNA, 22 nt, Human
gaaaggugccccauaggcagga

SEQ ID NO: 131552 - RNA, 22 nt, Human
ucaaguguaguggugucagguc

SEQ ID NO: 131553 - RNA, 22 nt, Human
gcugugagcacugcugggugga

SEQ ID NO: 131554 - RNA, 22 nt, Human
gagcuuccugaugccgaccagu

SEQ ID NO: 131555 - RNA, 22 nt, Human
ugcaagcacucaaugcaaacag

SEQ ID NO: 131556 - RNA, 19 nt, Human
uccccagcaccucugaguc

SEQ ID NO: 131557 - RNA, 22 nt, Human
agacccugcaccucucgugggc

SEQ ID NO: 131558 - RNA, 22 nt, Human
agggaauguagcaagaugccaa

SEQ ID NO: 131559 - RNA, 22 nt, Human
gaggccuggguuggaggugcau

SEQ ID NO: 131560 - RNA, 22 nt, Human
ucucuucuuguguuuuccugcc

SEQ ID NO: 131561 - RNA, 22 nt, Human
aguuuagaguucaaauuaguuc

SEQ ID NO: 131562 - RNA, 22 nt, Human
aagccagccagugccagucuua

SEQ ID NO: 131563 - RNA, 22 nt, Human
gacaggaggcagagcucaggug

SEQ ID NO: 131564 - RNA, 19 nt, Human
acuuucuccaggaccuguu

SEQ ID NO: 131565 - RNA, 22 nt, Human
ggagccuguuaguugagugcuc

SEQ ID NO: 131566 - RNA, 22 nt, Human
acugggaguucuccaugucccu

SEQ ID NO: 131567 - RNA, 22 nt, Human
ugcagaagauggucugagcacc

SEQ ID NO: 131568 - RNA, 22 nt, Human
ucuggagcaacagagcaggaca

SEQ ID NO: 131569 - RNA, 22 nt, Human
aggagucacucagggcuucauc

SEQ ID NO: 131570 - RNA, 22 nt, Human
aagggcagagggaaucccacau

SEQ ID NO: 131571 - RNA, 22 nt, Human
auguggcuuaguuaggugcccc

SEQ ID NO: 131572 - RNA, 22 nt, Human
auuugagaugguaaauaacuuu

SEQ ID NO: 131573 - RNA, 22 nt, Human
uuucuaaaugguggcugcauug

SEQ ID NO: 131574 - RNA, 22 nt, Human
augcugugccuucucugugcca

SEQ ID NO: 131575 - RNA, 22 nt, Human
ggcacugacugugcagcgcacc

SEQ ID NO: 131576 - RNA, 22 nt, Human
auaguauuuaauaguuagcuca

SEQ ID NO: 131577 - RNA, 21 nt, Human
ugcaggcaggcagagaugcug

SEQ ID NO: 131578 - RNA, 22 nt, Human
cagugcagaacacauggaaaau

SEQ ID NO: 131579 - RNA, 22 nt, Human
cagcuggcaaguggagcagggu

SEQ ID NO: 131580 - RNA, 22 nt, Human
gcacccaggccggcgacugcag

SEQ ID NO: 131581 - RNA, 22 nt, Human
uuuucugccugcguguuuagga

SEQ ID NO: 131582 - RNA, 21 nt, Human
acagcagacaggcuuaggacc

SEQ ID NO: 131583 - RNA, 22 nt, Human
augugugugugcgcgcgcagga

SEQ ID NO: 131584 - RNA, 22 nt, Human
agugaaaucagguuuugacugc

SEQ ID NO: 131585 - RNA, 22 nt, Human
uccagaggcuccaaagggagau

SEQ ID NO: 131586 - RNA, 17 nt, Human
ccuuucucuuucaucuc

SEQ ID NO: 131587 - RNA, 22 nt, Human
agaaaugcauuagcacauauag

SEQ ID NO: 131588 - RNA, 22 nt, Human
uggccucaagucugagggccuu

SEQ ID NO: 131589 - RNA, 22 nt, Human
uguaauggaagugggauugcau

SEQ ID NO: 131590 - RNA, 22 nt, Human
ucucaggaagugauauugagac

SEQ ID NO: 131591 - RNA, 22 nt, Human
ccugucugcaugagugagcaua

SEQ ID NO: 131592 - RNA, 22 nt, Human
gcaggggcuacucugagcuucc

SEQ ID NO: 131593 - RNA, 22 nt, Human
ccuucugcucccuggccagggc

SEQ ID NO: 131594 - RNA, 22 nt, Human
acauuguagacuuuucauaugu

SEQ ID NO: 131595 - RNA, 22 nt, Human
uagucaaaccucagaauacccc

SEQ ID NO: 131596 - RNA, 21 nt, Human
agaaaauggcguuuuagauuu

SEQ ID NO: 131597 - RNA, 22 nt, Human
guuuuuccugcugacuuggguc

SEQ ID NO: 131598 - RNA, 22 nt, Human
uggcucagaaggcugccuucac

SEQ ID NO: 131599 - RNA, 22 nt, Human
gcaagcugcuuaagcucauugu

SEQ ID NO: 131600 - RNA, 22 nt, Human
acucaggagggaucagcuauca

SEQ ID NO: 131601 - RNA, 22 nt, Human
uguggguguucucacuuagaua

SEQ ID NO: 131602 - RNA, 21 nt, Human
ggggcagagcuaggcccugca

SEQ ID NO: 131603 - RNA, 22 nt, Human
gccuggagggucccucucugga

SEQ ID NO: 131604 - RNA, 22 nt, Human
uuuagcagaucuauguauguga

SEQ ID NO: 131605 - RNA, 22 nt, Human
cucaaggaaagucuggagaaga

SEQ ID NO: 131606 - RNA, 22 nt, Human
aggacccugagcgggcaugccg

SEQ ID NO: 131607 - RNA, 22 nt, Human
ucagcagggcugugguguggcu

SEQ ID NO: 131608 - RNA, 22 nt, Human
acaggggauugauuggaagucu

SEQ ID NO: 131609 - RNA, 22 nt, Human
cagugcaguugguggcaggggu

SEQ ID NO: 131610 - RNA, 22 nt, Human
cauggcccucuucuggagcaau

SEQ ID NO: 131611 - RNA, 22 nt, Human
gaagcagcuggugagauggagc

SEQ ID NO: 131612 - RNA, 22 nt, Human
gggggcuguccugugcauugua

SEQ ID NO: 131613 - RNA, 22 nt, Human
cggcuggggcuguccccaugac

SEQ ID NO: 131614 - RNA, 22 nt, Human
uucaagaucgaguuuaaaguga

SEQ ID NO: 131615 - RNA, 22 nt, Human
cagcuggcguggagugauugca

SEQ ID NO: 131616 - RNA, 23 nt, Human
ggaaagagaggaguugugcauag

SEQ ID NO: 131617 - RNA, 22 nt, Human
agcugccagggacugggcaugg

SEQ ID NO: 131618 - RNA, 22 nt, Human
aggcucagagaugaguaagcac

SEQ ID NO: 131619 - RNA, 22 nt, Human
uagcagcucacagccucccauu

SEQ ID NO: 131620 - RNA, 22 nt, Human
agauguaguagugggucuuuua

SEQ ID NO: 131621 - RNA, 21 nt, Human
auacacauacacauaaaugug

SEQ ID NO: 131622 - RNA, 22 nt, Human
ucugcaggacugaggccuguuu

SEQ ID NO: 131623 - RNA, 22 nt, Human
accaaggaagaaucuauuugag

SEQ ID NO: 131624 - RNA, 22 nt, Human
ggcuguguuucuguuugacauu

SEQ ID NO: 131625 - RNA, 22 nt, Human
cugcccaguuugggagccuuuc

SEQ ID NO: 131626 - RNA, 22 nt, Human
caguguaucauuagugugauga

SEQ ID NO: 131627 - RNA, 20 nt, Human
agggucaguagcacagagcu

SEQ ID NO: 131628 - RNA, 22 nt, Human
cagcagggcccccgggugcgcc

SEQ ID NO: 131629 - RNA, 22 nt, Human
ucauucuccucuggaaaaggca

SEQ ID NO: 131630 - RNA, 22 nt, Human
ggccucugggguccugagccca

SEQ ID NO: 131631 - RNA, 22 nt, Human
agaagugccauacuguggucca

SEQ ID NO: 131632 - RNA, 22 nt, Human
ucucuucuagcuucuugugguu

SEQ ID NO: 131633 - RNA, 22 nt, Human
ggccucugguucacagggagga

SEQ ID NO: 131634 - RNA, 22 nt, Human
uggaggaugccuggggaggccu

SEQ ID NO: 131635 - RNA, 22 nt, Human
aguggcugagugacugugacuc

SEQ ID NO: 131636 - RNA, 22 nt, Human
ucaggcacugcuuucugauaug

SEQ ID NO: 131637 - RNA, 22 nt, Human
gaaaggagggaaacagagcggu

SEQ ID NO: 131638 - RNA, 22 nt, Human
acauuucuuugcuagacagcag

SEQ ID NO: 131639 - RNA, 22 nt, Human
auauguguauuugguuagccua

SEQ ID NO: 131640 - RNA, 22 nt, Human
ugcaccauacccauuccccucu

SEQ ID NO: 131641 - RNA, 22 nt, Human
cuugcuucauuagugucuuagu

SEQ ID NO: 131642 - RNA, 22 nt, Human
uagaaacucaggauacucuucc

SEQ ID NO: 131643 - RNA, 22 nt, Human
ccagguggaggugugagguccu

SEQ ID NO: 131644 - RNA, 22 nt, Human
caggaaagagcugccaggcagg

SEQ ID NO: 131645 - RNA, 22 nt, Human
ucuuuuauagugaauuuucuug

SEQ ID NO: 131646 - RNA, 22 nt, Human
guccuggggaauacagaagccg

SEQ ID NO: 131647 - RNA, 22 nt, Human
ugucucugccagcuagcagaau

SEQ ID NO: 131648 - RNA, 22 nt, Human
aaaguguaaaagcauguuaggg

SEQ ID NO: 131649 - RNA, 20 nt, Human
gaagcagcuucauguagaca

SEQ ID NO: 131650 - RNA, 22 nt, Human
cucaggauuaaggaaucuaaau

SEQ ID NO: 131651 - RNA, 22 nt, Human
uucuuugaguuaguacagucca

SEQ ID NO: 131652 - RNA, 22 nt, Human
ugucucaguucccuucucugga

SEQ ID NO: 131653 - RNA, 22 nt, Human
aaugaugguauugaugagcuaa

SEQ ID NO: 131654 - RNA, 19 nt, Human
uucacauuggaagaaguag

SEQ ID NO: 131655 - RNA, 22 nt, Human
caguggggaggccaggauagaa

SEQ ID NO: 131656 - RNA, 22 nt, Human
uggccguguuagauguuuggcu

SEQ ID NO: 131657 - RNA, 22 nt, Human
ucaggagauggucuuuauaggc

SEQ ID NO: 131658 - RNA, 23 nt, Human
aggcacugaaugugucagugagu

SEQ ID NO: 131659 - RNA, 22 nt, Human
ucuggcucaaaauacguacucu

SEQ ID NO: 131660 - RNA, 22 nt, Human
uccuuugacuucuugcagucca

SEQ ID NO: 131661 - RNA, 22 nt, Human
uggaguuccuuugaaaggcucu

SEQ ID NO: 131662 - RNA, 22 nt, Human
ccagggugagugucauggguua

SEQ ID NO: 131663 - RNA, 22 nt, Human
cacaggugcuccucggggagcu

SEQ ID NO: 131664 - RNA, 21 nt, Human
gcaaauguucaggaaaaaaga

SEQ ID NO: 131665 - RNA, 22 nt, Human
ugagacaguucugcagcugggu

SEQ ID NO: 131666 - RNA, 22 nt, Human
gaaggagcuaaagggagcccug

SEQ ID NO: 131667 - RNA, 22 nt, Human
gagggcugaagauuguggcccc

SEQ ID NO: 131668 - RNA, 18 nt, Human
acagcagguuucauucuu

SEQ ID NO: 131669 - RNA, 22 nt, Human
auaucaaacgaaguuauuuuaa

SEQ ID NO: 131670 - RNA, 22 nt, Human
ucccagagcaguacuccaggag

SEQ ID NO: 131671 - RNA, 22 nt, Human
ucccaguguggcaggccaugga

SEQ ID NO: 131672 - RNA, 22 nt, Human
cuguggaaggccuguccugaaa

SEQ ID NO: 131673 - RNA, 22 nt, Human
ugcgauguaugcaguauuuguu

SEQ ID NO: 131674 - RNA, 22 nt, Human
cagggugccuguccucagcaaa

SEQ ID NO: 131675 - RNA, 22 nt, Human
auucucuggucauugagcauau

SEQ ID NO: 131676 - RNA, 22 nt, Human
aucauuucccuuuagaucacaa

SEQ ID NO: 131677 - RNA, 22 nt, Human
gcuuccuggagggagagagcug

SEQ ID NO: 131678 - RNA, 22 nt, Human
uuuccucuaaacgcauuugcuu

SEQ ID NO: 131679 - RNA, 22 nt, Human
agucuccuuggccucaaugccu

SEQ ID NO: 131680 - RNA, 22 nt, Human
cagaaggcuggcagauugagau

SEQ ID NO: 131681 - RNA, 22 nt, Human
augcagcaguuuacaaagcaau

SEQ ID NO: 131682 - RNA, 22 nt, Human
uggcugcuuguuuuagugaggc

SEQ ID NO: 131683 - RNA, 22 nt, Human
ccuggcagcauugguagagauu

SEQ ID NO: 131684 - RNA, 22 nt, Human
uggcugaauaaaauaugguguu

SEQ ID NO: 131685 - RNA, 22 nt, Human
uagaucugauacaauucaucug

SEQ ID NO: 131686 - RNA, 22 nt, Human
gggcugcuuuuaagggucucag

SEQ ID NO: 131687 - RNA, 22 nt, Human
ggcuucuguccucuggaucugu

SEQ ID NO: 131688 - RNA, 22 nt, Human
aagagcuggauugugcugcaga

SEQ ID NO: 131689 - RNA, 22 nt, Human
ucaucaaagucaaagaaugacu

SEQ ID NO: 131690 - RNA, 22 nt, Human
caguacuuugcaucauuccacu

SEQ ID NO: 131691 - RNA, 22 nt, Human
agcugccuguccuaggccauca

SEQ ID NO: 131692 - RNA, 20 nt, Human
ucuguguuucagcugcuuga

SEQ ID NO: 131693 - RNA, 18 nt, Human
uggagccagcucuaggau

SEQ ID NO: 131694 - RNA, 22 nt, Human
agggugcagaaggagccuagga

SEQ ID NO: 131695 - RNA, 22 nt, Human
uaucuuugcaaauaucucuaag

SEQ ID NO: 131696 - RNA, 19 nt, Human
ggucucagugcagcugcag

SEQ ID NO: 131697 - RNA, 22 nt, Human
uggaaagaugaagauguuuaag

SEQ ID NO: 131698 - RNA, 22 nt, Human
ucuuuacaagucacauuuucug

SEQ ID NO: 131699 - RNA, 22 nt, Human
gaggcaggcccugaaugaguca

SEQ ID NO: 131700 - RNA, 23 nt, Human
uuucuucagaagccuugcgaggc

SEQ ID NO: 131701 - RNA, 22 nt, Human
ucuucauuccguagauauuuau

SEQ ID NO: 131702 - RNA, 22 nt, Human
cuacuucugugaugaaacuaca

SEQ ID NO: 131703 - RNA, 22 nt, Human
guuuuuauuguguaaauguggg

SEQ ID NO: 131704 - RNA, 22 nt, Human
uuacaguagcuuuauuuggagu

SEQ ID NO: 131705 - RNA, 22 nt, Human
uggggugguaauacaccguucu

SEQ ID NO: 131706 - RNA, 22 nt, Human
uucaagucaaggaaagaggucu

SEQ ID NO: 131707 - RNA, 22 nt, Human
uccagccaccaccuugauugcc

SEQ ID NO: 131708 - RNA, 22 nt, Human
ugcuggaggaguuuacuguggc

SEQ ID NO: 131709 - RNA, 22 nt, Human
acuucuugggacccuggcaccg

SEQ ID NO: 131710 - RNA, 22 nt, Human
uggagcugacucacaccagcua

SEQ ID NO: 131711 - RNA, 22 nt, Human
gauuuccuagacauggggcaga

SEQ ID NO: 131712 - RNA, 22 nt, Human
ugcucacagcccagaacauaau

SEQ ID NO: 131713 - RNA, 20 nt, Human
auguuucucugucgugauuu

SEQ ID NO: 131714 - RNA, 22 nt, Human
auuucccaugugaaucaauugg

SEQ ID NO: 131715 - RNA, 22 nt, Human
ccugagguggcugcagcacugc

SEQ ID NO: 131716 - RNA, 22 nt, Human
caggccagugugcuucccaggc

SEQ ID NO: 131717 - RNA, 23 nt, Human
cagguggcuccacgagggguggg

SEQ ID NO: 131718 - RNA, 22 nt, Human
uuucacaaaugucuuuaacuug

SEQ ID NO: 131719 - RNA, 22 nt, Human
ugcccuguuaucuuggaagagu

SEQ ID NO: 131720 - RNA, 22 nt, Human
agggccagcacuccuggcagga

SEQ ID NO: 131721 - RNA, 17 nt, Human
uuguguguaguucugau

SEQ ID NO: 131722 - RNA, 22 nt, Human
cagagcugcgcuuuuuccuggu

SEQ ID NO: 131723 - RNA, 22 nt, Human
ugugacagaucuuuaaauaaug

SEQ ID NO: 131724 - RNA, 22 nt, Human
uucacaggugacuggggauaac

SEQ ID NO: 131725 - RNA, 19 nt, Human
ugaggccaaggucacagau

SEQ ID NO: 131726 - RNA, 22 nt, Human
ucuuuauuuaagucuguuguaa

SEQ ID NO: 131727 - RNA, 22 nt, Human
caguuuuuagauuaguuggugg

SEQ ID NO: 131728 - RNA, 22 nt, Human
ugcaugcagcuggugauaagaa

SEQ ID NO: 131729 - RNA, 22 nt, Human
auauuuuccgaacuugagguag

SEQ ID NO: 131730 - RNA, 18 nt, Human
cgauguguaugugauuug

SEQ ID NO: 131731 - RNA, 22 nt, Human
agggucugacuccucuggcaag

SEQ ID NO: 131732 - RNA, 22 nt, Human
ugggauggagccugaguauagu

SEQ ID NO: 131733 - RNA, 20 nt, Human
uccuggccuucucgggcagu

SEQ ID NO: 131734 - RNA, 22 nt, Human
gcugagguggcugccuuaguaa

SEQ ID NO: 131735 - RNA, 22 nt, Human
gcuggaccaggugugcacaggc

SEQ ID NO: 131736 - RNA, 22 nt, Human
aaaugugcuugugaucagcugu

SEQ ID NO: 131737 - RNA, 22 nt, Human
gagaaagauguaggcugggagg

SEQ ID NO: 131738 - RNA, 22 nt, Human
cuggugcaggaaggagcuggca

SEQ ID NO: 131739 - RNA, 22 nt, Human
ccaggccuggccaggggaugcc

SEQ ID NO: 131740 - RNA, 22 nt, Human
guguguggcauguccuauuuug

SEQ ID NO: 131741 - RNA, 22 nt, Human
cuguggcugaacucugaagagg

SEQ ID NO: 131742 - RNA, 22 nt, Human
cucucugaggcaggccuguggg

SEQ ID NO: 131743 - RNA, 22 nt, Human
ugggcugcugagaaugagagag

SEQ ID NO: 131744 - RNA, 22 nt, Human
agggccuggcuucacuuucuca

SEQ ID NO: 131745 - RNA, 20 nt, Human
aggcucagcugagcucuugg

SEQ ID NO: 131746 - RNA, 22 nt, Human
caggggacauuaaagcuccaua

SEQ ID NO: 131747 - RNA, 22 nt, Human
uuggagcccugaggaucuggau

SEQ ID NO: 131748 - RNA, 22 nt, Human
cucugugugguccucuguauug

SEQ ID NO: 131749 - RNA, 22 nt, Human
agcugccaaguuucucaguuua

SEQ ID NO: 131750 - RNA, 22 nt, Human
guucauuuaugauguaacaugu

SEQ ID NO: 131751 - RNA, 22 nt, Human
uucauucuuugaaucugaggua

SEQ ID NO: 131752 - RNA, 22 nt, Human
ugggugugaagucuguuggccu

SEQ ID NO: 131753 - RNA, 19 nt, Human
uaaaaugucuguggucagu

SEQ ID NO: 131754 - RNA, 22 nt, Human
ggcugccuggaccuccucuuuc

SEQ ID NO: 131755 - RNA, 22 nt, Human
gcagcugcuguggcaucaagcu

SEQ ID NO: 131756 - RNA, 22 nt, Human
aaaucagucccucuuggaauuu

SEQ ID NO: 131757 - RNA, 22 nt, Human
agcagccagaaauccagaggug

SEQ ID NO: 131758 - RNA, 23 nt, Human
ugaugggaaggaacgacuaccac

SEQ ID NO: 131759 - RNA, 22 nt, Human
ucccagagauuuccucuccuuc

SEQ ID NO: 131760 - RNA, 22 nt, Human
guaagagcacugucuccugcug

SEQ ID NO: 131761 - RNA, 23 nt, Human
ucguugaauagcaauagcacaac

SEQ ID NO: 131762 - RNA, 22 nt, Human
auguuauuuuggaaaauacaaa

SEQ ID NO: 131763 - RNA, 22 nt, Human
agcaggaguuugaugcuuuuau

SEQ ID NO: 131764 - RNA, 22 nt, Human
ucaguguaaguuauguagaugu

SEQ ID NO: 131765 - RNA, 22 nt, Human
guaagggauuugaacauagguu

SEQ ID NO: 131766 - RNA, 22 nt, Human
cucuguccuaugcuugauagaa

SEQ ID NO: 131767 - RNA, 22 nt, Human
gaaauguguuguucauuucuaa

SEQ ID NO: 131768 - RNA, 22 nt, Human
agcugggaggugggcagugaga

SEQ ID NO: 131769 - RNA, 22 nt, Human
cugcucuguuucuuagcugggu

SEQ ID NO: 131770 - RNA, 22 nt, Human
agccuccuggaguuucugggau

SEQ ID NO: 131771 - RNA, 22 nt, Human
gcagggcucaacaggacacccc

SEQ ID NO: 131772 - RNA, 22 nt, Human
ggccaccuuccaguugccugca

SEQ ID NO: 131773 - RNA, 22 nt, Human
cugcagugaaaucaggaagcaa

SEQ ID NO: 131774 - RNA, 22 nt, Human
uuauuuugccacaggugaccuu

SEQ ID NO: 131775 - RNA, 22 nt, Human
cacaugggugugccuggaggaa

SEQ ID NO: 131776 - RNA, 22 nt, Human
ccagcuccagguagaugggcag

SEQ ID NO: 131777 - RNA, 22 nt, Human
ugggcagaguugugaugaacug

SEQ ID NO: 131778 - RNA, 22 nt, Human
gcugccuggagcucagccugcc

SEQ ID NO: 131779 - RNA, 22 nt, Human
aaugcaguuucauuuguagaau

SEQ ID NO: 131780 - RNA, 22 nt, Human
cgccugggaguccacaccugcu

SEQ ID NO: 131781 - RNA, 21 nt, Human
aaagagguuaauauuguaagu

SEQ ID NO: 131782 - RNA, 22 nt, Human
caggauauuaguuuucuuguua

SEQ ID NO: 131783 - RNA, 22 nt, Human
ucauuugugugagugauuugac

SEQ ID NO: 131784 - RNA, 22 nt, Human
ugcaggagaaaguacggagcgu

SEQ ID NO: 131785 - RNA, 22 nt, Human
ggcagucagugugguucauaaa

SEQ ID NO: 131786 - RNA, 22 nt, Human
cuacauuuggagaguauaggaa

SEQ ID NO: 131787 - RNA, 20 nt, Human
gcucccugguagaaauguuu

SEQ ID NO: 131788 - RNA, 22 nt, Human
guguaaggccccagguucuuua

SEQ ID NO: 131789 - RNA, 22 nt, Human
uauucaaaguaccuucauugcc

SEQ ID NO: 131790 - RNA, 22 nt, Human
ucccagauuguugauggcuuaa

SEQ ID NO: 131791 - RNA, 22 nt, Human
ugccuggauucgguuguuguca

SEQ ID NO: 131792 - RNA, 22 nt, Human
uuuuucagccaugaauuacacu

SEQ ID NO: 131793 - RNA, 22 nt, Human
gggugcaggcagcccaggcagg

SEQ ID NO: 131794 - RNA, 22 nt, Human
uguacauuuagagcucaauaga

SEQ ID NO: 131795 - RNA, 22 nt, Human
uaaggcacacaguugcugcaug

SEQ ID NO: 131796 - RNA, 17 nt, Human
cucacggaggaugaauc

SEQ ID NO: 131797 - RNA, 22 nt, Human
auucuucauguugaagcuguca

SEQ ID NO: 131798 - RNA, 22 nt, Human
uggcugucagcugccuggugcg

SEQ ID NO: 131799 - RNA, 22 nt, Human
uguacaguauugguguuaguag

SEQ ID NO: 131800 - RNA, 22 nt, Human
ucacagacacagggagaagcau

SEQ ID NO: 131801 - RNA, 22 nt, Human
acucugccaucccaggugcugu

SEQ ID NO: 131802 - RNA, 22 nt, Human
uacauauacugagugauuugcu

SEQ ID NO: 131803 - RNA, 22 nt, Human
caguguacuuggaauguaacag

SEQ ID NO: 131804 - RNA, 22 nt, Human
gcccucuggcagccuuggcugg

SEQ ID NO: 131805 - RNA, 22 nt, Human
uacuaaauaguuuaauuccuca

SEQ ID NO: 131806 - RNA, 20 nt, Human
uugcauuggaugugcaggug

SEQ ID NO: 131807 - RNA, 22 nt, Human
ucucaucugccauuugcaggag

SEQ ID NO: 131808 - RNA, 22 nt, Human
uacuuugucauucuaaccuucc

SEQ ID NO: 131809 - RNA, 20 nt, Human
ugcuuccuggccacugcggg

SEQ ID NO: 131810 - RNA, 22 nt, Human
cugggcugcaguuccugguccu

SEQ ID NO: 131811 - RNA, 22 nt, Human
caggcagcugcuggguucagcc

SEQ ID NO: 131812 - RNA, 22 nt, Human
cuggcuccauccuugagcucug

SEQ ID NO: 131813 - RNA, 19 nt, Human
acacagggcuagaguuaca

SEQ ID NO: 131814 - RNA, 22 nt, Human
cagggcuggcucaugaaaaguu

SEQ ID NO: 131815 - RNA, 22 nt, Human
ucuguagcaagugagaggcauu

SEQ ID NO: 131816 - RNA, 22 nt, Human
cguguaugauaaauguuaauaa

SEQ ID NO: 131817 - RNA, 22 nt, Human
uguguguuggcuggagagggcu

SEQ ID NO: 131818 - RNA, 23 nt, Human
uggccucuccccaccuggcagaa

SEQ ID NO: 131819 - RNA, 22 nt, Human
ucugagagucucugaggcagau

SEQ ID NO: 131820 - RNA, 22 nt, Human
aauacaaucaaauucacuagca

SEQ ID NO: 131821 - RNA, 22 nt, Human
ugucaccaguuccaggaaauaa

SEQ ID NO: 131822 - RNA, 22 nt, Human
cccaggcugauguucagcgggu

SEQ ID NO: 131823 - RNA, 22 nt, Human
cagggccagccauccugcuggg

SEQ ID NO: 131824 - RNA, 22 nt, Human
uacaguuacuguuauaugugcu

SEQ ID NO: 131825 - RNA, 22 nt, Human
ggugccaggcuguagucagggu

SEQ ID NO: 131826 - RNA, 20 nt, Human
ggcugugcccuuccguggcc

SEQ ID NO: 131827 - RNA, 22 nt, Human
augauacaagcaaaacuaauca

SEQ ID NO: 131828 - RNA, 22 nt, Human
cacaaaaguaggaggcaggcgg

SEQ ID NO: 131829 - RNA, 19 nt, Human
ucauaaggagagaggaaau

SEQ ID NO: 131830 - RNA, 22 nt, Human
ucucaagcuuguugguauguuu

SEQ ID NO: 131831 - RNA, 22 nt, Human
uuagccauggacugaauugacu

SEQ ID NO: 131832 - RNA, 22 nt, Human
uuacuuuccagcucuagcuuca

SEQ ID NO: 131833 - RNA, 22 nt, Human
uuucucucuacaguacuuucau

SEQ ID NO: 131834 - RNA, 22 nt, Human
uauguggccauucuguuugugu

SEQ ID NO: 131835 - RNA, 22 nt, Human
guggaggacaaaagaagccuuu

SEQ ID NO: 131836 - RNA, 22 nt, Human
ggagagugggagcaacuguugc

SEQ ID NO: 131837 - RNA, 22 nt, Human
agugaaaugauucugagcaaga

SEQ ID NO: 131838 - RNA, 22 nt, Human
uaagaacauuuucggaaagaua

SEQ ID NO: 131839 - RNA, 22 nt, Human
gccugaugagcuuccagcugag

SEQ ID NO: 131840 - RNA, 22 nt, Human
ccuggaugauccaugucaugga

SEQ ID NO: 131841 - RNA, 19 nt, Human
ugucacugucauggcccag

SEQ ID NO: 131842 - RNA, 20 nt, Human
uuucuugucggcuguugcug

SEQ ID NO: 131843 - RNA, 22 nt, Human
augcaguaaauguuaagaaaaa

SEQ ID NO: 131844 - RNA, 23 nt, Human
aggaggccugaaacugaggcuga

SEQ ID NO: 131845 - RNA, 22 nt, Human
gugcaugcaguaaguguuuuaa

SEQ ID NO: 131846 - RNA, 22 nt, Human
cagcagugaugugugaggguuc

SEQ ID NO: 131847 - RNA, 22 nt, Human
auugaaagagaauguagcucuu

SEQ ID NO: 131848 - RNA, 22 nt, Human
aacuuucuuggaugucucaaca

SEQ ID NO: 131849 - RNA, 22 nt, Human
ucagagagugcaaaauauagcu

SEQ ID NO: 131850 - RNA, 22 nt, Human
gggcugcugccaccagguggau

SEQ ID NO: 131851 - RNA, 22 nt, Human
ucauuuguggaagugauugugg

SEQ ID NO: 131852 - RNA, 21 nt, Human
uuagcuuucuagaaucuuugu

SEQ ID NO: 131853 - RNA, 23 nt, Human
uuugacagcgugguuucuguggg

SEQ ID NO: 131854 - RNA, 22 nt, Human
cagguggggcagcugugggagc

SEQ ID NO: 131855 - RNA, 22 nt, Human
ugcacagagagaugagacacgu

SEQ ID NO: 131856 - RNA, 22 nt, Human
aguaucaaggaucuccagcacc

SEQ ID NO: 131857 - RNA, 22 nt, Human
aagaacauguuaaaagauucac

SEQ ID NO: 131858 - RNA, 22 nt, Human
ugggcuggagcuuguugcuucc

SEQ ID NO: 131859 - RNA, 22 nt, Human
uggccugacugucaggcuguau

SEQ ID NO: 131860 - RNA, 22 nt, Human
uggguagaggaauugggcuacc

SEQ ID NO: 131861 - RNA, 22 nt, Human
ucuucucuccugcuuggcagaa

SEQ ID NO: 131862 - RNA, 22 nt, Human
uaagacaugguugaucuagugu

SEQ ID NO: 131863 - RNA, 22 nt, Human
aggccuguuccaggccccuuuu

SEQ ID NO: 131864 - RNA, 22 nt, Human
ucuggaaguuagaggaggaaag

SEQ ID NO: 131865 - RNA, 22 nt, Human
agaggcuccuucacucuggcac

SEQ ID NO: 131866 - RNA, 22 nt, Human
gagcagcuuaugucaagccaga

SEQ ID NO: 131867 - RNA, 22 nt, Human
aagauuuaccacuuuauucaag

SEQ ID NO: 131868 - RNA, 22 nt, Human
ccucagggaaugggaggcuggg

SEQ ID NO: 131869 - RNA, 22 nt, Human
aguggcagaagucacuggguag

SEQ ID NO: 131870 - RNA, 22 nt, Human
ggcugcagggcagcuggugugg

SEQ ID NO: 131871 - RNA, 22 nt, Human
agccuggauccauguggcuacc

SEQ ID NO: 131872 - RNA, 22 nt, Human
gauuucaaggaguuuucacagu

SEQ ID NO: 131873 - RNA, 22 nt, Human
gccuggagcucggcugagggcg

SEQ ID NO: 131874 - RNA, 21 nt, Human
aggagggcacaaggccaggaa

SEQ ID NO: 131875 - RNA, 22 nt, Human
cauucacucagcgaugccagua

SEQ ID NO: 131876 - RNA, 22 nt, Human
gcaggggcaggagaucucaggc

SEQ ID NO: 131877 - RNA, 23 nt, Human
gccucugcucugcguuggggacu

SEQ ID NO: 131878 - RNA, 22 nt, Human
ucugccugagggagcugaggaa

SEQ ID NO: 131879 - RNA, 22 nt, Human
aagaaauguagagccuaguaaa

SEQ ID NO: 131880 - RNA, 22 nt, Human
ucaggauccauagacucccaaa

SEQ ID NO: 131881 - RNA, 22 nt, Human
ucuggagcuuccucauuuacag

SEQ ID NO: 131882 - RNA, 22 nt, Human
uucaagaugacccagucacacg

SEQ ID NO: 131883 - RNA, 22 nt, Human
cacuggggugggccugguagag

SEQ ID NO: 131884 - RNA, 22 nt, Human
guuugcauuucuugaacuauau

SEQ ID NO: 131885 - RNA, 22 nt, Human
agucccagugagaugagccacg

SEQ ID NO: 131886 - RNA, 22 nt, Human
ggccugcuccgggggcugagcu

SEQ ID NO: 131887 - RNA, 22 nt, Human
aagguacagaaauuaacaagga

SEQ ID NO: 131888 - RNA, 22 nt, Human
uagcugccuagacagcuauagc

SEQ ID NO: 131889 - RNA, 18 nt, Human
cugcugcaggcacucagg

SEQ ID NO: 131890 - RNA, 20 nt, Human
cuguagggugcagcaggcuc

SEQ ID NO: 131891 - RNA, 22 nt, Human
ucugcagcuugcacaggcaggc

SEQ ID NO: 131892 - RNA, 22 nt, Human
agcaccugcuaugugucaggga

SEQ ID NO: 131893 - RNA, 22 nt, Human
gucccagagagcacuaguccau

SEQ ID NO: 131894 - RNA, 22 nt, Human
aagaacagauucagccugaacu

SEQ ID NO: 131895 - RNA, 22 nt, Human
agcuguucccucacugcaguca

SEQ ID NO: 131896 - RNA, 22 nt, Human
cagccaucaguaaagacagcuu

SEQ ID NO: 131897 - RNA, 22 nt, Human
ucagggugaaccaggcaggaau

SEQ ID NO: 131898 - RNA, 22 nt, Human
agccacagggggugagggacaa

SEQ ID NO: 131899 - RNA, 22 nt, Human
cgggcagaucacacagggcuug

SEQ ID NO: 131900 - RNA, 22 nt, Human
aggcugccucgugagcucgcug

SEQ ID NO: 131901 - RNA, 23 nt, Human
uugacaguaggugguuuucauug

SEQ ID NO: 131902 - RNA, 22 nt, Human
aaugcacaugucuuggccucac

SEQ ID NO: 131903 - RNA, 22 nt, Human
ucucaggguuuccugggggcug

SEQ ID NO: 131904 - RNA, 22 nt, Human
uguguuauugccacugaagacc

SEQ ID NO: 131905 - RNA, 22 nt, Human
uggcacugagcagccgcggcag

SEQ ID NO: 131906 - RNA, 22 nt, Human
uggaggagggcuggugucugua

SEQ ID NO: 131907 - RNA, 22 nt, Human
uugacuuuauguguauguuuac

SEQ ID NO: 131908 - RNA, 22 nt, Human
uuuagaaguucacacauuuaaa

SEQ ID NO: 131909 - RNA, 22 nt, Human
uggcucagaugcucuuccagug

SEQ ID NO: 131910 - RNA, 17 nt, Human
uccuggcucugccacug

SEQ ID NO: 131911 - RNA, 22 nt, Human
gagaggcugaaaucacaggagc

SEQ ID NO: 131912 - RNA, 22 nt, Human
ugucaguguauacauacaguau

SEQ ID NO: 131913 - RNA, 22 nt, Human
cagggguggcugcagcagaggu

SEQ ID NO: 131914 - RNA, 22 nt, Human
aaugcacagcuaaagugguucc

SEQ ID NO: 131915 - RNA, 22 nt, Human
uguguuugggggagaugcauuu

SEQ ID NO: 131916 - RNA, 22 nt, Human
cugugcuggagaugggccagag

SEQ ID NO: 131917 - RNA, 22 nt, Human
aggcagccagauggcagccugc

SEQ ID NO: 131918 - RNA, 22 nt, Human
auguucuuucagccagugcauc

SEQ ID NO: 131919 - RNA, 22 nt, Human
cacaggcuugucagcaugaggc

SEQ ID NO: 131920 - RNA, 22 nt, Human
cuacaguacuggaugcucagcc

SEQ ID NO: 131921 - RNA, 22 nt, Human
agaaaugugagccccuuaucaa

SEQ ID NO: 131922 - RNA, 20 nt, Human
ugugugaauuagggcauguu

SEQ ID NO: 131923 - RNA, 22 nt, Human
uguccugcaacugaaggagaag

SEQ ID NO: 131924 - RNA, 22 nt, Human
cacagacccagaagggaugaag

SEQ ID NO: 131925 - RNA, 22 nt, Human
acaguguccuuguggucccugu

SEQ ID NO: 131926 - RNA, 20 nt, Human
cugagcgucuaagaggugag

SEQ ID NO: 131927 - RNA, 22 nt, Human
cauuuguuaauuacuauuaucu

SEQ ID NO: 131928 - RNA, 22 nt, Human
agcagggcuucugugccugugc

SEQ ID NO: 131929 - RNA, 22 nt, Human
ugugggcaggcccgggucugag

SEQ ID NO: 131930 - RNA, 22 nt, Human
agauguguuucuaguuccugca

SEQ ID NO: 131931 - RNA, 22 nt, Human
ugaaccagagucuccagugguu

SEQ ID NO: 131932 - RNA, 22 nt, Human
cagcaguguggaagcugagggg

SEQ ID NO: 131933 - RNA, 22 nt, Human
cucucucuucuuuguaggggcc

SEQ ID NO: 131934 - RNA, 22 nt, Human
aaagccuucaaguagauguaag

SEQ ID NO: 131935 - RNA, 17 nt, Human
gaaagguccuagaaauc

SEQ ID NO: 131936 - RNA, 22 nt, Human
cuggcccagucucagaguguca

SEQ ID NO: 131937 - RNA, 22 nt, Human
uguuuauaccuugguauaacca

SEQ ID NO: 131938 - RNA, 22 nt, Human
gaaaucugcggugaggccugag

SEQ ID NO: 131939 - RNA, 22 nt, Human
accuugaugccuuuccaagaug

SEQ ID NO: 131940 - RNA, 20 nt, Human
gagauggcuaagugcugaac

SEQ ID NO: 131941 - RNA, 22 nt, Human
aggcacaggccucagcacccag

SEQ ID NO: 131942 - RNA, 22 nt, Human
auuuaaauuuucugauggagag

SEQ ID NO: 131943 - RNA, 23 nt, Human
gccuucagcucgggaaggcuccc

SEQ ID NO: 131944 - RNA, 22 nt, Human
cuugcacacauguacaugugua

SEQ ID NO: 131945 - RNA, 22 nt, Human
ccuggcagguggagguugcagu

SEQ ID NO: 131946 - RNA, 22 nt, Human
uuccuguauuuugcgaauuuuc

SEQ ID NO: 131947 - RNA, 22 nt, Human
cucagcccagcccaggaccagg

SEQ ID NO: 131948 - RNA, 22 nt, Human
ucucagagaacaguuggugcuu

SEQ ID NO: 131949 - RNA, 22 nt, Human
uauucacaaaaugagguccuca

SEQ ID NO: 131950 - RNA, 22 nt, Human
aacaaaugaccugauuucuucc

SEQ ID NO: 131951 - RNA, 22 nt, Human
auguuacagaaagcaaagauga

SEQ ID NO: 131952 - RNA, 22 nt, Human
ugcuguggcaguuuauguauag

SEQ ID NO: 131953 - RNA, 22 nt, Human
cucaccacagagccuguccagc

SEQ ID NO: 131954 - RNA, 22 nt, Human
ugagaguauuuuggcauuauca

SEQ ID NO: 131955 - RNA, 22 nt, Human
ugcaggcuguaaucugaggcua

SEQ ID NO: 131956 - RNA, 22 nt, Human
ucagaaaugaucguuauucauu

SEQ ID NO: 131957 - RNA, 22 nt, Human
uacauuuauaaggcuucucugu

SEQ ID NO: 131958 - RNA, 22 nt, Human
gcagccugaugaucuggguugu

SEQ ID NO: 131959 - RNA, 22 nt, Human
uccaugaguuugaggaaaagag

SEQ ID NO: 131960 - RNA, 22 nt, Human
ucagggacuuacaaaccagaag

SEQ ID NO: 131961 - RNA, 22 nt, Human
acccagagccagggucaggagc

SEQ ID NO: 131962 - RNA, 22 nt, Human
ugcguugcgcuccugcagcagg

SEQ ID NO: 131963 - RNA, 22 nt, Human
ggcugcagguugguuggcagcu

SEQ ID NO: 131964 - RNA, 22 nt, Human
aagauuauuuaagacaggaacc

SEQ ID NO: 131965 - RNA, 22 nt, Human
ccaggaggcagaaguugcagug

SEQ ID NO: 131966 - RNA, 22 nt, Human
aguuauauuccauagauucaga

SEQ ID NO: 131967 - RNA, 17 nt, Human
uggacccuugggccucc

SEQ ID NO: 131968 - RNA, 22 nt, Human
auggcugugcagagauugggaa

SEQ ID NO: 131969 - RNA, 22 nt, Human
cugugaggcccugggugcugga

SEQ ID NO: 131970 - RNA, 22 nt, Human
agcugugugguuugggcaaauu

SEQ ID NO: 131971 - RNA, 19 nt, Human
caauauauagugaguggau

SEQ ID NO: 131972 - RNA, 22 nt, Human
agggaugguggagguugcaagu

SEQ ID NO: 131973 - RNA, 22 nt, Human
gccuggcacauugcaguggauu

SEQ ID NO: 131974 - RNA, 23 nt, Human
ugcagagggacugaagccagcuu

SEQ ID NO: 131975 - RNA, 20 nt, Human
ggcugcugugggcagagagg

SEQ ID NO: 131976 - RNA, 22 nt, Human
gcucucuuucacagagguagga

SEQ ID NO: 131977 - RNA, 17 nt, Human
agccccucagcgucacc

SEQ ID NO: 131978 - RNA, 22 nt, Human
ggggacugccuuccacagacac

SEQ ID NO: 131979 - RNA, 22 nt, Human
aaggucauggcaaauuacuuuu

SEQ ID NO: 131980 - RNA, 22 nt, Human
gucugagaaucuugcauaucau

SEQ ID NO: 131981 - RNA, 22 nt, Human
ugccugggggacuaaggccaaa

SEQ ID NO: 131982 - RNA, 22 nt, Human
aggccagaaaugucagggagug

SEQ ID NO: 131983 - RNA, 22 nt, Human
accgaaggaaacuggaaccguu

SEQ ID NO: 131984 - RNA, 22 nt, Human
gcugccugcucggcuccuggga

SEQ ID NO: 131985 - RNA, 20 nt, Human
gccuguccugagugucaugg

SEQ ID NO: 131986 - RNA, 22 nt, Human
cuacaguagaguaggccucuga

SEQ ID NO: 131987 - RNA, 22 nt, Human
uugggugcugucauggggcacg

SEQ ID NO: 131988 - RNA, 19 nt, Human
caggagagcaugcacuuug

SEQ ID NO: 131989 - RNA, 22 nt, Human
accaggaggccuggagcacaaa

SEQ ID NO: 131990 - RNA, 22 nt, Human
cccucugccucugaguaggaca

SEQ ID NO: 131991 - RNA, 22 nt, Human
cuucugugaaugaaguguggga

SEQ ID NO: 131992 - RNA, 22 nt, Human
uauuuccaaaagccuauuauga

SEQ ID NO: 131993 - RNA, 17 nt, Human
acucaggaucugggagu

SEQ ID NO: 131994 - RNA, 22 nt, Human
aguguggcaggaaugacuagaa

SEQ ID NO: 131995 - RNA, 22 nt, Human
uuuggcugagaaguugugcuuu

SEQ ID NO: 131996 - RNA, 20 nt, Human
agcuggagaagggcccuucc

SEQ ID NO: 131997 - RNA, 17 nt, Human
gccuggcccagccuggc

SEQ ID NO: 131998 - RNA, 22 nt, Human
ggcuguguccccaccugagcag

SEQ ID NO: 131999 - RNA, 22 nt, Human
gccacagggcagaugcgcagag

SEQ ID NO: 132000 - RNA, 22 nt, Human
aaggagcuuguucgccuuccuc

SEQ ID NO: 132001 - RNA, 22 nt, Human
uccuugaauccuagcauccuau

SEQ ID NO: 132002 - RNA, 22 nt, Human
aggcacugguccauuuucugca

SEQ ID NO: 132003 - RNA, 22 nt, Human
uugaaucauuacaauagauaag

SEQ ID NO: 132004 - RNA, 22 nt, Human
cuuaaagaugucaaggcuguuu

SEQ ID NO: 132005 - RNA, 22 nt, Human
uauuucuugaguggucaguuuc

SEQ ID NO: 132006 - RNA, 22 nt, Human
uauaauuuuucuguggccaguu

SEQ ID NO: 132007 - RNA, 22 nt, Human
ugcuccuuccucauccugugca

SEQ ID NO: 132008 - RNA, 22 nt, Human
ucuguguccugcuagcugucuu

SEQ ID NO: 132009 - RNA, 22 nt, Human
acauuucuaucauccuguaaug

SEQ ID NO: 132010 - RNA, 22 nt, Human
agaagucauuuauguuagauga

SEQ ID NO: 132011 - RNA, 22 nt, Human
gagucacauuaauuuaauuuua

SEQ ID NO: 132012 - RNA, 22 nt, Human
uuuauuauguacaggcacuaua

SEQ ID NO: 132013 - RNA, 22 nt, Human
guggccuggaugagcuucgaca

SEQ ID NO: 132014 - RNA, 22 nt, Human
cuuggcagauccaaaaaugaca

SEQ ID NO: 132015 - RNA, 22 nt, Human
ccccagccagcaggaccucuga

SEQ ID NO: 132016 - RNA, 20 nt, Human
uuccagagaucugcauuuua

SEQ ID NO: 132017 - RNA, 20 nt, Human
cagagcuguuauggaugaug

SEQ ID NO: 132018 - RNA, 22 nt, Human
caaaggagguaaugggugugag

SEQ ID NO: 132019 - RNA, 22 nt, Human
guaacagaaagucaugcucauu

SEQ ID NO: 132020 - RNA, 22 nt, Human
gaggccuguagucauggaugua

SEQ ID NO: 132021 - RNA, 22 nt, Human
cacaggagguuaggaagugguc

SEQ ID NO: 132022 - RNA, 22 nt, Human
gagcugagccuggguggaccgc

SEQ ID NO: 132023 - RNA, 22 nt, Human
uguguccuucugggagucccag

SEQ ID NO: 132024 - RNA, 22 nt, Human
uucuucaauuauuggaaagaaa

SEQ ID NO: 132025 - RNA, 22 nt, Human
ucacuuuugaucccuaugcagu

SEQ ID NO: 132026 - RNA, 21 nt, Human
uggagcugaauuuuuggcauc

SEQ ID NO: 132027 - RNA, 18 nt, Human
ucauuuguuuugcaugaa

SEQ ID NO: 132028 - RNA, 22 nt, Human
ucagggcaaagggcagaguuug

SEQ ID NO: 132029 - RNA, 22 nt, Human
auggccuggggagcaugggaag

SEQ ID NO: 132030 - RNA, 22 nt, Human
uauguguaggaggaggacaggg

SEQ ID NO: 132031 - RNA, 23 nt, Human
uguguguguauucuacgcaaggu

SEQ ID NO: 132032 - RNA, 22 nt, Human
uugaaagaagaagcugcgaugu

SEQ ID NO: 132033 - RNA, 22 nt, Human
ucagggcaucaucaugaauaua

SEQ ID NO: 132034 - RNA, 22 nt, Human
aaaauaucagcaaagggugaca

SEQ ID NO: 132035 - RNA, 20 nt, Human
gcuuuuucuaauagcagucc

SEQ ID NO: 132036 - RNA, 22 nt, Human
caguauuuauggcuugaguauu

SEQ ID NO: 132037 - RNA, 22 nt, Human
uagcagggccaggcugggaacc

SEQ ID NO: 132038 - RNA, 22 nt, Human
accuuaaaacugacacauggag

SEQ ID NO: 132039 - RNA, 22 nt, Human
uucaggauccccaccgcguuua

SEQ ID NO: 132040 - RNA, 22 nt, Human
uucucucuuccaguucccacuu

SEQ ID NO: 132041 - RNA, 22 nt, Human
agggguggagaguguugccagu

SEQ ID NO: 132042 - RNA, 22 nt, Human
agcugagagguggcaagcugua

SEQ ID NO: 132043 - RNA, 22 nt, Human
ucugagggcuugaggggaagua

SEQ ID NO: 132044 - RNA, 22 nt, Human
cucuggagcgcugcuucccgcg

SEQ ID NO: 132045 - RNA, 23 nt, Human
ucuggcucuaugugacagcucuc

SEQ ID NO: 132046 - RNA, 22 nt, Human
uccagggaugguaaugagcagu

SEQ ID NO: 132047 - RNA, 22 nt, Human
ccagucugaggccuggugaggg

SEQ ID NO: 132048 - RNA, 22 nt, Human
ucucagggccccaaaggcuagu

SEQ ID NO: 132049 - RNA, 22 nt, Human
auucagcauaaucaguagcuug

SEQ ID NO: 132050 - RNA, 22 nt, Human
ggcugcugaguuggccaggaga

SEQ ID NO: 132051 - RNA, 22 nt, Human
ugcucugguaacucacuuccau

SEQ ID NO: 132052 - RNA, 22 nt, Human
ugaaagaacuagcaucuucaag

SEQ ID NO: 132053 - RNA, 21 nt, Human
aaaggccauaaucacggagca

SEQ ID NO: 132054 - RNA, 22 nt, Human
auguaaggcugccuaugacacu

SEQ ID NO: 132055 - RNA, 22 nt, Human
caucacuguccaaaguucaguu

SEQ ID NO: 132056 - RNA, 22 nt, Human
gauauauuuuccauggucugca

SEQ ID NO: 132057 - RNA, 22 nt, Human
agcaggaaggucugugugaguc

SEQ ID NO: 132058 - RNA, 22 nt, Human
uugcuucaguagcucuuuaaag

SEQ ID NO: 132059 - RNA, 22 nt, Human
acagcuaucugacuuugacuca

SEQ ID NO: 132060 - RNA, 22 nt, Human
acauucaugucccacuucuagc

SEQ ID NO: 132061 - RNA, 22 nt, Human
ugggcagaaugugggauccaga

SEQ ID NO: 132062 - RNA, 22 nt, Human
uacaacauuguguugcuucaua

SEQ ID NO: 132063 - RNA, 22 nt, Human
gucaugccagcggagcucggga

SEQ ID NO: 132064 - RNA, 22 nt, Human
gccaagagaaugugagagaaau

SEQ ID NO: 132065 - RNA, 22 nt, Human
cagcauuggguuaccuuuguuu

SEQ ID NO: 132066 - RNA, 22 nt, Human
agagcugcaccuaugcagaccu

SEQ ID NO: 132067 - RNA, 22 nt, Human
uccagccuaauguucuucccac

SEQ ID NO: 132068 - RNA, 22 nt, Human
gagggcagaaaauuaugcggug

SEQ ID NO: 132069 - RNA, 22 nt, Human
cuggcucaggaaaguugcugcu

SEQ ID NO: 132070 - RNA, 22 nt, Human
ugaagaugucagcagggguggu

SEQ ID NO: 132071 - RNA, 22 nt, Human
ggcugcugcccaccccugcaug

SEQ ID NO: 132072 - RNA, 22 nt, Human
gaaggaagucauuagugcagac

SEQ ID NO: 132073 - RNA, 22 nt, Human
ugucucagauacgccaucaagg

SEQ ID NO: 132074 - RNA, 22 nt, Human
uggcacugggacagaugcucuc

SEQ ID NO: 132075 - RNA, 22 nt, Human
cagcagcccacgcgugcugucc

SEQ ID NO: 132076 - RNA, 22 nt, Human
cugcagaggccucgccuccucu

SEQ ID NO: 132077 - RNA, 18 nt, Human
ccugccagucuggagcag

SEQ ID NO: 132078 - RNA, 22 nt, Human
guuauacauauguguuaacaaa

SEQ ID NO: 132079 - RNA, 22 nt, Human
uuuucuuacugucugugauccu

SEQ ID NO: 132080 - RNA, 22 nt, Human
uugucucuaagugugaucuuca

SEQ ID NO: 132081 - RNA, 22 nt, Human
ucuuuaagggauguucugcuuu

SEQ ID NO: 132082 - RNA, 22 nt, Human
gucucucucccaagauuggcua

SEQ ID NO: 132083 - RNA, 22 nt, Human
gaaugcacuuccaacaucuauu

SEQ ID NO: 132084 - RNA, 22 nt, Human
aagggcugccagggggugccag

SEQ ID NO: 132085 - RNA, 22 nt, Human
gagcugccuguugcauagcaac

SEQ ID NO: 132086 - RNA, 22 nt, Human
gaagagcuuaguuguccuagaa

SEQ ID NO: 132087 - RNA, 22 nt, Human
acagaaggcggggacaaggcgg

SEQ ID NO: 132088 - RNA, 22 nt, Human
cagcagagguuggaacaguucu

SEQ ID NO: 132089 - RNA, 22 nt, Human
ucagaagaagagacuccacagc

SEQ ID NO: 132090 - RNA, 22 nt, Human
cuggccuucagacucggacuga

SEQ ID NO: 132091 - RNA, 22 nt, Human
aagguacaccaaaguucaaguu

SEQ ID NO: 132092 - RNA, 22 nt, Human
auugcaccuuggguuuugaaag

SEQ ID NO: 132093 - RNA, 22 nt, Human
ggugcagaggagccagcugggg

SEQ ID NO: 132094 - RNA, 22 nt, Human
acagcuugcaauggcuuucaac

SEQ ID NO: 132095 - RNA, 20 nt, Human
gcucugugguuugagucucc

SEQ ID NO: 132096 - RNA, 22 nt, Human
aggggagcuaacaccagagccc

SEQ ID NO: 132097 - RNA, 22 nt, Human
ugagcuucaaaauaugugaauc

SEQ ID NO: 132098 - RNA, 22 nt, Human
cugcaggcucgaagacacggau

SEQ ID NO: 132099 - RNA, 22 nt, Human
auaacagauacucucugugagg

SEQ ID NO: 132100 - RNA, 22 nt, Human
gauggcagguaguggucucauc

SEQ ID NO: 132101 - RNA, 22 nt, Human
aacagaauugcugcugccaaug

SEQ ID NO: 132102 - RNA, 22 nt, Human
aaugaacaucaaaugccuacca

SEQ ID NO: 132103 - RNA, 22 nt, Human
gccaggcugaggcucuggaaga

SEQ ID NO: 132104 - RNA, 22 nt, Human
ccagggugaccagcuggccuag

SEQ ID NO: 132105 - RNA, 21 nt, Human
uuagaaagcucacuacaguua

SEQ ID NO: 132106 - RNA, 18 nt, Human
agggucagugucacuggc

SEQ ID NO: 132107 - RNA, 22 nt, Human
gaggggcugcccuggugucagg

SEQ ID NO: 132108 - RNA, 22 nt, Human
uaaggcacgcauaagagggggc

SEQ ID NO: 132109 - RNA, 22 nt, Human
gaagcccaggcuuccuuggcuu

SEQ ID NO: 132110 - RNA, 22 nt, Human
uucauucauuacgugccaggca

SEQ ID NO: 132111 - RNA, 21 nt, Human
ucagcagcaucugccuagagu

SEQ ID NO: 132112 - RNA, 22 nt, Human
gauuucuguaacacuucagaua

SEQ ID NO: 132113 - RNA, 22 nt, Human
ugagccagaguggagugugccu

SEQ ID NO: 132114 - RNA, 22 nt, Human
aagaauguucuuguagucauga

SEQ ID NO: 132115 - RNA, 22 nt, Human
ucaaggugcugugcugugcuag

SEQ ID NO: 132116 - RNA, 22 nt, Human
cagucccaugagcccagaacau

SEQ ID NO: 132117 - RNA, 22 nt, Human
acauuucucaucuaguagagua

SEQ ID NO: 132118 - RNA, 22 nt, Human
cacagcuucuccuugauaucgc

SEQ ID NO: 132119 - RNA, 22 nt, Human
guauuuucaugauuucagacca

SEQ ID NO: 132120 - RNA, 22 nt, Human
uugcaggggaaggagcagagcu

SEQ ID NO: 132121 - RNA, 22 nt, Human
gcugucacucaccaggccugca

SEQ ID NO: 132122 - RNA, 22 nt, Human
ccagcuggucugugcucauguu

SEQ ID NO: 132123 - RNA, 22 nt, Human
cuucccagacgggguggcagcc

SEQ ID NO: 132124 - RNA, 22 nt, Human
guucaaagcuccugguacagua

SEQ ID NO: 132125 - RNA, 18 nt, Human
cagggcuguggggucacu

SEQ ID NO: 132126 - RNA, 22 nt, Human
ccaggaagcggugagggcugcc

SEQ ID NO: 132127 - RNA, 22 nt, Human
ucacugaagacugggcucuaaa

SEQ ID NO: 132128 - RNA, 22 nt, Human
ucugucacccagagugcagugg

SEQ ID NO: 132129 - RNA, 22 nt, Human
acgcagaagggccuggcgugcc

SEQ ID NO: 132130 - RNA, 22 nt, Human
ugccugcucuuaccacucuccc

SEQ ID NO: 132131 - RNA, 22 nt, Human
aggucacccguuugacuaucca

SEQ ID NO: 132132 - RNA, 22 nt, Human
acauuguauaaugauuaucaca

SEQ ID NO: 132133 - RNA, 22 nt, Human
agccugagagccaagcugugca

SEQ ID NO: 132134 - RNA, 22 nt, Human
ugucucuucugccuccagcugu

SEQ ID NO: 132135 - RNA, 22 nt, Human
uugucuuaaauggauggacaau

SEQ ID NO: 132136 - RNA, 22 nt, Human
ucugaggcauacccaggccccc

SEQ ID NO: 132137 - RNA, 22 nt, Human
guuugaaaaaagcaguauguaa

SEQ ID NO: 132138 - RNA, 22 nt, Human
agagccugcaucaggcuugggg

SEQ ID NO: 132139 - RNA, 21 nt, Human
uccacaaguuagaaggaaauu

SEQ ID NO: 132140 - RNA, 22 nt, Human
uguauacaugucugugugcaca

SEQ ID NO: 132141 - RNA, 22 nt, Human
acuuccugggcaugcagagucc

SEQ ID NO: 132142 - RNA, 22 nt, Human
cugccugugugugccugcagaa

SEQ ID NO: 132143 - RNA, 22 nt, Human
uaguacuuaucucugucauugu

SEQ ID NO: 132144 - RNA, 21 nt, Human
ucuggagcccuaagcugagaa

SEQ ID NO: 132145 - RNA, 22 nt, Human
ucuucaauuagauuuaccaauu

SEQ ID NO: 132146 - RNA, 21 nt, Human
augacagaugcugcagaucgu

SEQ ID NO: 132147 - RNA, 22 nt, Human
guuuuauaauugcuucauaaga

SEQ ID NO: 132148 - RNA, 22 nt, Human
ugcauuguuugauaggugaauu

SEQ ID NO: 132149 - RNA, 22 nt, Human
ucugugauagguggcauaguga

SEQ ID NO: 132150 - RNA, 22 nt, Human
uuucuagucucgaucucuuaau

SEQ ID NO: 132151 - RNA, 22 nt, Human
cacagggcagguacucucagag

SEQ ID NO: 132152 - RNA, 22 nt, Human
ggcuuggaccagucacaguggu

SEQ ID NO: 132153 - RNA, 22 nt, Human
augcugagacuggagcagcugg

SEQ ID NO: 132154 - RNA, 22 nt, Human
uccugcagagccgcccucaggu

SEQ ID NO: 132155 - RNA, 22 nt, Human
ucuacuguagugaugcugcagu

SEQ ID NO: 132156 - RNA, 22 nt, Human
cuauugaaaguguacaauucaa

SEQ ID NO: 132157 - RNA, 22 nt, Human
ucaguauaauugcuggcacuga

SEQ ID NO: 132158 - RNA, 22 nt, Human
gcauuuaaauuugaacuucaga

SEQ ID NO: 132159 - RNA, 22 nt, Human
gguggcagaggugcaucagccc

SEQ ID NO: 132160 - RNA, 19 nt, Human
agaaaucucgagauuuguu

SEQ ID NO: 132161 - RNA, 22 nt, Human
ggcagcucacugauuagcaauu

SEQ ID NO: 132162 - RNA, 22 nt, Human
aguaaaaucuuaagcacagugg

SEQ ID NO: 132163 - RNA, 22 nt, Human
cugggcaggagggcucuaugga

SEQ ID NO: 132164 - RNA, 22 nt, Human
caggccuggcugcagcucgccu

SEQ ID NO: 132165 - RNA, 22 nt, Human
augggcagcagcugccauucau

SEQ ID NO: 132166 - RNA, 22 nt, Human
acagcuguggccacuugcaucc

SEQ ID NO: 132167 - RNA, 20 nt, Human
gagagcuggggaugaggcug

SEQ ID NO: 132168 - RNA, 22 nt, Human
acagaaugcguagugcauguug

SEQ ID NO: 132169 - RNA, 20 nt, Human
ucucuuuuagcuuacagcug

SEQ ID NO: 132170 - RNA, 22 nt, Human
aggugaguugguaggaaguuug

SEQ ID NO: 132171 - RNA, 22 nt, Human
gcucaggagcugacagccucaa

SEQ ID NO: 132172 - RNA, 22 nt, Human
uucaaacaguguagaauauaug

SEQ ID NO: 132173 - RNA, 22 nt, Human
gcuggccugaccugaggcuggg

SEQ ID NO: 132174 - RNA, 22 nt, Human
cugagccagcuggcaugugcua

SEQ ID NO: 132175 - RNA, 21 nt, Human
uagaaaucagcuggugccucu

SEQ ID NO: 132176 - RNA, 22 nt, Human
aggcugugauuccaccacucuc

SEQ ID NO: 132177 - RNA, 17 nt, Human
aggaaacauuuucuuuc

SEQ ID NO: 132178 - RNA, 19 nt, Human
cugagagaugcuucacaca

SEQ ID NO: 132179 - RNA, 22 nt, Human
ucacagggauggaauagaaaua

SEQ ID NO: 132180 - RNA, 22 nt, Human
uggccugggucacaccaggguc

SEQ ID NO: 132181 - RNA, 22 nt, Human
cuauauuucuuggcuuuaaaca

SEQ ID NO: 132182 - RNA, 22 nt, Human
cuguggcuuuuccggggagccu

SEQ ID NO: 132183 - RNA, 20 nt, Human
gauuucaaagcagaguggcc

SEQ ID NO: 132184 - RNA, 20 nt, Human
gcugccuuguccugcuuggu

SEQ ID NO: 132185 - RNA, 22 nt, Human
auacuuucugaccaauuaauug

SEQ ID NO: 132186 - RNA, 22 nt, Human
cacagcagaaaguguaggagga

SEQ ID NO: 132187 - RNA, 19 nt, Human
gcacacccugcaccaccau

SEQ ID NO: 132188 - RNA, 22 nt, Human
ccugggcuugcaucugugcugg

SEQ ID NO: 132189 - RNA, 22 nt, Human
cucccugggcagauguggcucu

SEQ ID NO: 132190 - RNA, 22 nt, Human
cccagcucucucaguucugcuu

SEQ ID NO: 132191 - RNA, 22 nt, Human
gaggggcuggguagggcaaccc

SEQ ID NO: 132192 - RNA, 22 nt, Human
aagaaucauccugcaagagucu

SEQ ID NO: 132193 - RNA, 22 nt, Human
auugacaauuagcccuuaggug

SEQ ID NO: 132194 - RNA, 22 nt, Human
ggaggccaaggaggagcuugcc

SEQ ID NO: 132195 - RNA, 19 nt, Human
cucuggccucuggaugcug

SEQ ID NO: 132196 - RNA, 22 nt, Human
aucuuucaaucaggaaaaaucu

SEQ ID NO: 132197 - RNA, 22 nt, Human
uggaggccagagguacugggac

SEQ ID NO: 132198 - RNA, 22 nt, Human
guccucagagugggcagguccu

SEQ ID NO: 132199 - RNA, 22 nt, Human
uuuacagcuucuauacuaugug

SEQ ID NO: 132200 - RNA, 22 nt, Human
gccagcaguccugcugugugcc

SEQ ID NO: 132201 - RNA, 22 nt, Human
aagugaagaaauacaugagaau

SEQ ID NO: 132202 - RNA, 22 nt, Human
gucagugucuuaacagagauua

SEQ ID NO: 132203 - RNA, 22 nt, Human
gcaggggcugcugggaacucgg

SEQ ID NO: 132204 - RNA, 22 nt, Human
cccaggaggcagaaguugcagu

SEQ ID NO: 132205 - RNA, 22 nt, Human
uauuuucaccuucucuggauau

SEQ ID NO: 132206 - RNA, 22 nt, Human
ggaggaugagcuacgaggagcu

SEQ ID NO: 132207 - RNA, 23 nt, Human
ugauuuccagugagucaguggga

SEQ ID NO: 132208 - RNA, 22 nt, Human
aaaucaguaaauguucauuaac

SEQ ID NO: 132209 - RNA, 22 nt, Human
caggaaagguagucacaaugua

SEQ ID NO: 132210 - RNA, 22 nt, Human
ggcaaaguuuucaucucauaac

SEQ ID NO: 132211 - RNA, 22 nt, Human
uauguucuuagaagaggcagca

SEQ ID NO: 132212 - RNA, 22 nt, Human
gugucaugcacacucaguguug

SEQ ID NO: 132213 - RNA, 22 nt, Human
uaaaugugaccuucauuuuaua

SEQ ID NO: 132214 - RNA, 22 nt, Human
cugagcugguggaagcaugcag

SEQ ID NO: 132215 - RNA, 22 nt, Human
cucaggauagauuguccucuca

SEQ ID NO: 132216 - RNA, 22 nt, Human
auauucacugagcauaaagcca

SEQ ID NO: 132217 - RNA, 22 nt, Human
cugcugugacagcugccguguu

SEQ ID NO: 132218 - RNA, 22 nt, Human
aggaggccgcugaugggcuccc

SEQ ID NO: 132219 - RNA, 22 nt, Human
caguacuuaguucucaugguuu

SEQ ID NO: 132220 - RNA, 22 nt, Human
uguaugcagggcuuguaugcag

SEQ ID NO: 132221 - RNA, 22 nt, Human
uggcccuguggaggucagugag

SEQ ID NO: 132222 - RNA, 22 nt, Human
cccccagccagcagugcucagc

SEQ ID NO: 132223 - RNA, 20 nt, Human
ggggcccaagcccucuugcc

SEQ ID NO: 132224 - RNA, 22 nt, Human
gcugagggcuguaacagcagag

SEQ ID NO: 132225 - RNA, 22 nt, Human
ugacagcauaacacuggucuug

SEQ ID NO: 132226 - RNA, 20 nt, Human
gcucccagccugcagucccc

SEQ ID NO: 132227 - RNA, 22 nt, Human
cuccuucccuucaaguguuccu

SEQ ID NO: 132228 - RNA, 22 nt, Human
cagcagcaaaucuagaagagga

SEQ ID NO: 132229 - RNA, 22 nt, Human
auuucucuuagcaagacauuac

SEQ ID NO: 132230 - RNA, 22 nt, Human
ccuggcuccugccucugcaggg

SEQ ID NO: 132231 - RNA, 17 nt, Human
gagugcugguggagcuc

SEQ ID NO: 132232 - RNA, 22 nt, Human
ccugcagguaaggcuaacugcc

SEQ ID NO: 132233 - RNA, 22 nt, Human
uuggaaagcaagcuggacauac

SEQ ID NO: 132234 - RNA, 22 nt, Human
auuucucugccucagcuucugc

SEQ ID NO: 132235 - RNA, 22 nt, Human
ugucauugaggaaaacuaggug

SEQ ID NO: 132236 - RNA, 22 nt, Human
agaggcaggagguugacuugag

SEQ ID NO: 132237 - RNA, 22 nt, Human
cacagaggaaaggcaguuggua

SEQ ID NO: 132238 - RNA, 22 nt, Human
uauuuaucgagugucuacuaug

SEQ ID NO: 132239 - RNA, 22 nt, Human
gccacccccaaguagguggucu

SEQ ID NO: 132240 - RNA, 22 nt, Human
uguucuugagccuuuagaccua

SEQ ID NO: 132241 - RNA, 22 nt, Human
gucacacucagaaugacuagag

SEQ ID NO: 132242 - RNA, 22 nt, Human
gcaggcuccaggccggccccuu

SEQ ID NO: 132243 - RNA, 22 nt, Human
uagcaguacugggcauguguuu

SEQ ID NO: 132244 - RNA, 22 nt, Human
agcagcauggagaaaccguuca

SEQ ID NO: 132245 - RNA, 22 nt, Human
gagccugggacugggggucaug

SEQ ID NO: 132246 - RNA, 22 nt, Human
uuuacauuucccucugucaguu

SEQ ID NO: 132247 - RNA, 22 nt, Human
ugagugccugaacauagaguag

SEQ ID NO: 132248 - RNA, 19 nt, Human
uggcaucuguaaaauggug

SEQ ID NO: 132249 - RNA, 22 nt, Human
agcuuccugaugcaagagggcu

SEQ ID NO: 132250 - RNA, 22 nt, Human
guguugcucuguuuggggguug

SEQ ID NO: 132251 - RNA, 22 nt, Human
cagagcuguuacuauucaugaa

SEQ ID NO: 132252 - RNA, 22 nt, Human
auggcugugguaucagacgcag

SEQ ID NO: 132253 - RNA, 22 nt, Human
guuauauauaguauuucucuga

SEQ ID NO: 132254 - RNA, 22 nt, Human
uuucuucagagagagcuuuccc

SEQ ID NO: 132255 - RNA, 22 nt, Human
cuggcucagacagcugugcagu

SEQ ID NO: 132256 - RNA, 22 nt, Human
ccaaggagcaaguuuacaccug

SEQ ID NO: 132257 - RNA, 22 nt, Human
cucuccuggggagcacacacac

SEQ ID NO: 132258 - RNA, 22 nt, Human
gcagcuggagccagccagacac

SEQ ID NO: 132259 - RNA, 22 nt, Human
uuauguucagcaucugcuuuau

SEQ ID NO: 132260 - RNA, 22 nt, Human
ugggccugaguuugggaacugg

SEQ ID NO: 132261 - RNA, 22 nt, Human
aucuagaaaguguugaagauca

SEQ ID NO: 132262 - RNA, 22 nt, Human
aucuggcucucucauuuacaaa

SEQ ID NO: 132263 - RNA, 22 nt, Human
aggcccugcccagagcuccucg

SEQ ID NO: 132264 - RNA, 22 nt, Human
uguccucacaggaaugaacuuu

SEQ ID NO: 132265 - RNA, 22 nt, Human
auguagcaugaggcacugugcc

SEQ ID NO: 132266 - RNA, 22 nt, Human
aaacagcugucauuguuuuaaa

SEQ ID NO: 132267 - RNA, 22 nt, Human
ugcaguguuccuguggguuuau

SEQ ID NO: 132268 - RNA, 22 nt, Human
gagagcuggguucaaguagcug

SEQ ID NO: 132269 - RNA, 22 nt, Human
uuuuucuggauaacuguaucuc

SEQ ID NO: 132270 - RNA, 23 nt, Human
uggcucugugucacauacaggau

SEQ ID NO: 132271 - RNA, 22 nt, Human
uugcugaaaucuaugacauccu

SEQ ID NO: 132272 - RNA, 22 nt, Human
ucucccacugcaagcccaggcu

SEQ ID NO: 132273 - RNA, 22 nt, Human
ugagcuggucuugaguguagcu

SEQ ID NO: 132274 - RNA, 22 nt, Human
ugcaugcguuaguuggcguguu

SEQ ID NO: 132275 - RNA, 22 nt, Human
uaguguguaugguaaugaugaa

SEQ ID NO: 132276 - RNA, 22 nt, Human
uguacagucaugcuuucuguuc

SEQ ID NO: 132277 - RNA, 22 nt, Human
cuggagcucuguguguuccuga

SEQ ID NO: 132278 - RNA, 22 nt, Human
acagguggggaggcugagguuc

SEQ ID NO: 132279 - RNA, 17 nt, Human
guccuacccauggucua

SEQ ID NO: 132280 - RNA, 22 nt, Human
cagcugaacauguagagcaucu

SEQ ID NO: 132281 - RNA, 22 nt, Human
ggcagcagggcugucucccuac

SEQ ID NO: 132282 - RNA, 22 nt, Human
ucccaggcuaggccucugcguu

SEQ ID NO: 132283 - RNA, 21 nt, Human
aggugggagaccauguagguc

SEQ ID NO: 132284 - RNA, 22 nt, Human
ugacaguauacuugugauggga

SEQ ID NO: 132285 - RNA, 22 nt, Human
agagcccucuucacugccccuu

SEQ ID NO: 132286 - RNA, 22 nt, Human
gcagugugucuggaguacaugg

SEQ ID NO: 132287 - RNA, 22 nt, Human
uuucuggcagcgggacaggggu

SEQ ID NO: 132288 - RNA, 22 nt, Human
aagggcugaaagaccuugggca

SEQ ID NO: 132289 - RNA, 22 nt, Human
guaacuuuggauuuaggguacc

SEQ ID NO: 132290 - RNA, 22 nt, Human
auagucuuagucuauaguuuug

SEQ ID NO: 132291 - RNA, 22 nt, Human
ugcuggaggggccugaccagga

SEQ ID NO: 132292 - RNA, 22 nt, Human
gcucccacgcaauucuuuucag

SEQ ID NO: 132293 - RNA, 22 nt, Human
uucaggauggaguaccuuuuau

SEQ ID NO: 132294 - RNA, 22 nt, Human
cacagcuuguuuagugacucac

SEQ ID NO: 132295 - RNA, 22 nt, Human
cucuuccuacagucugcuaugc

SEQ ID NO: 132296 - RNA, 22 nt, Human
agggaguguaaauggugcucag

SEQ ID NO: 132297 - RNA, 22 nt, Human
aguggcuggcauaggaacagac

SEQ ID NO: 132298 - RNA, 22 nt, Human
uggcuggcuuguucacugacug

SEQ ID NO: 132299 - RNA, 22 nt, Human
ugggaguguucuuggcuugcuu

SEQ ID NO: 132300 - RNA, 22 nt, Human
uucagaaguagcuaagcaguca

SEQ ID NO: 132301 - RNA, 22 nt, Human
aacuguuucagaaauauuguug

SEQ ID NO: 132302 - RNA, 22 nt, Human
gccuggaguagcauggcaagcc

SEQ ID NO: 132303 - RNA, 22 nt, Human
acugugugaggcugggugaguc

SEQ ID NO: 132304 - RNA, 22 nt, Human
aagauuucucuccuggaaagca

SEQ ID NO: 132305 - RNA, 20 nt, Human
aggcucagagcaguaguaca

SEQ ID NO: 132306 - RNA, 22 nt, Human
uucaggaucaaguugccaguag

SEQ ID NO: 132307 - RNA, 22 nt, Human
aggugcagcaugaguccaacgg

SEQ ID NO: 132308 - RNA, 22 nt, Human
augggaugcauggcuguggcca

SEQ ID NO: 132309 - RNA, 22 nt, Human
gcaggagagucugugccagguu

SEQ ID NO: 132310 - RNA, 22 nt, Human
uacaauaugugaacuuuggugu

SEQ ID NO: 132311 - RNA, 22 nt, Human
uggccuggugucugcgaggccu

SEQ ID NO: 132312 - RNA, 17 nt, Human
uauggcuguguuugugc

SEQ ID NO: 132313 - RNA, 18 nt, Human
ggcugugcguggaggcug

SEQ ID NO: 132314 - RNA, 23 nt, Human
cagggccaggcagcagcugucac

SEQ ID NO: 132315 - RNA, 22 nt, Human
aucuuuucuguuugcuaugucu

SEQ ID NO: 132316 - RNA, 22 nt, Human
cccugcagccggccagcucauu

SEQ ID NO: 132317 - RNA, 22 nt, Human
caggcccugggcaggaucagcc

SEQ ID NO: 132318 - RNA, 22 nt, Human
cuuucucuugagcaagagcugu

SEQ ID NO: 132319 - RNA, 22 nt, Human
ggcucuggaaaguguccuugau

SEQ ID NO: 132320 - RNA, 17 nt, Human
acacagggagagggagc

SEQ ID NO: 132321 - RNA, 22 nt, Human
cugcaucaguggauaugauggu

SEQ ID NO: 132322 - RNA, 22 nt, Human
guccucuguuagaaaugugcuu

SEQ ID NO: 132323 - RNA, 22 nt, Human
agugaaauacugucguuuuuag

SEQ ID NO: 132324 - RNA, 22 nt, Human
gggggcucugacucccucagcu

SEQ ID NO: 132325 - RNA, 23 nt, Human
aggugcagcccuggaccugcccc

SEQ ID NO: 132326 - RNA, 22 nt, Human
augugacaauauuuggucuuau

SEQ ID NO: 132327 - RNA, 22 nt, Human
cccagccugucuuucccaauga

SEQ ID NO: 132328 - RNA, 22 nt, Human
gccucugcugcaagccugguug

SEQ ID NO: 132329 - RNA, 22 nt, Human
ccucagggaggccucuguggcu

SEQ ID NO: 132330 - RNA, 22 nt, Human
aguaaugugccugaaauacuug

SEQ ID NO: 132331 - RNA, 22 nt, Human
gagcuggugaucagcuggagga

SEQ ID NO: 132332 - RNA, 22 nt, Human
agaaugcaagauaaacuuuauu

SEQ ID NO: 132333 - RNA, 22 nt, Human
guguggcugccagccaagaggc

SEQ ID NO: 132334 - RNA, 22 nt, Human
ugagcugggcugggcugagcug

SEQ ID NO: 132335 - RNA, 22 nt, Human
gcccagaaguugaggcugcagu

SEQ ID NO: 132336 - RNA, 22 nt, Human
ucagaagcauguggggagccug

SEQ ID NO: 132337 - RNA, 22 nt, Human
gcagcuguggguuccaagucua

SEQ ID NO: 132338 - RNA, 22 nt, Human
aaggcugaggagggccugcagg

SEQ ID NO: 132339 - RNA, 22 nt, Human
caagaugaaacuacagggagga

SEQ ID NO: 132340 - RNA, 22 nt, Human
aaaacaguuuaggcaucacagu

SEQ ID NO: 132341 - RNA, 22 nt, Human
uccguauuugacuauugcaccg

SEQ ID NO: 132342 - RNA, 22 nt, Human
caggccaggcugcauuugcccc

SEQ ID NO: 132343 - RNA, 22 nt, Human
gggccuccggggugagcugugg

SEQ ID NO: 132344 - RNA, 22 nt, Human
ccugucugcagauaucucaggu

SEQ ID NO: 132345 - RNA, 22 nt, Human
uggcuaugacuucguacugucu

SEQ ID NO: 132346 - RNA, 18 nt, Human
cagucccaaaccuuagga

SEQ ID NO: 132347 - RNA, 22 nt, Human
gagcucagauucuggugucaga

SEQ ID NO: 132348 - RNA, 22 nt, Human
accucccagcucugagcuuggg

SEQ ID NO: 132349 - RNA, 22 nt, Human
caggcacuagcagaaugaggcu

SEQ ID NO: 132350 - RNA, 22 nt, Human
cugcugggaaggucugcucagu

SEQ ID NO: 132351 - RNA, 22 nt, Human
auguggcuaguggacacaguau

SEQ ID NO: 132352 - RNA, 22 nt, Human
ugcagcaggcacaggacggaag

SEQ ID NO: 132353 - RNA, 22 nt, Human
ucuuugugccaugcagugaggc

SEQ ID NO: 132354 - RNA, 22 nt, Human
uuaaaauagccagugccccucu

SEQ ID NO: 132355 - RNA, 22 nt, Human
agucccagugagaugaaccagg

SEQ ID NO: 132356 - RNA, 22 nt, Human
ccucagcugcuucccuggagcc

SEQ ID NO: 132357 - RNA, 22 nt, Human
aacuagaaaacaagaugcugau

SEQ ID NO: 132358 - RNA, 22 nt, Human
uuggcugucacugucaguucag

SEQ ID NO: 132359 - RNA, 22 nt, Human
ggcagauggaagaggcuggguc

SEQ ID NO: 132360 - RNA, 22 nt, Human
cuccucacacccacugcaacca

SEQ ID NO: 132361 - RNA, 22 nt, Human
aaggaguuuggguagucauaca

SEQ ID NO: 132362 - RNA, 22 nt, Human
uaagauaugguaggaaguuugg

SEQ ID NO: 132363 - RNA, 22 nt, Human
caggggcugagaaggaacgucc

SEQ ID NO: 132364 - RNA, 22 nt, Human
ugagcccagucugucugacaug

SEQ ID NO: 132365 - RNA, 22 nt, Human
uacaguauauacuguguguaga

SEQ ID NO: 132366 - RNA, 22 nt, Human
uccuuucccuuuccauccuggc

SEQ ID NO: 132367 - RNA, 21 nt, Human
uccuucaguucugcacuuucu

SEQ ID NO: 132368 - RNA, 22 nt, Human
gggugggguguaucggauccua

SEQ ID NO: 132369 - RNA, 22 nt, Human
auuacaguuaauuuaccuucuu

SEQ ID NO: 132370 - RNA, 22 nt, Human
uaaauguguguagccaucugug

SEQ ID NO: 132371 - RNA, 22 nt, Human
uguggcugggcuaauaggcaaa

SEQ ID NO: 132372 - RNA, 22 nt, Human
ugccaaggguaugggcaagaua

SEQ ID NO: 132373 - RNA, 18 nt, Human
gcugucugaggucugagg

SEQ ID NO: 132374 - RNA, 22 nt, Human
cuggcugcuuguagacucgacu

SEQ ID NO: 132375 - RNA, 22 nt, Human
cuggccucauagccaagcugug

SEQ ID NO: 132376 - RNA, 21 nt, Human
auccuugaucagaagagugcu

SEQ ID NO: 132377 - RNA, 22 nt, Human
cccagcucaucaggagccgccc

SEQ ID NO: 132378 - RNA, 22 nt, Human
gguggguuuggaagagcaggcu

SEQ ID NO: 132379 - RNA, 22 nt, Human
caugugugagugagcagucuuc

SEQ ID NO: 132380 - RNA, 19 nt, Human
ccuggcccugcugcgcggg

SEQ ID NO: 132381 - RNA, 22 nt, Human
ggcuccugggaugggacugagc

SEQ ID NO: 132382 - RNA, 22 nt, Human
aguuucucuuaaucuaguaucu

SEQ ID NO: 132383 - RNA, 22 nt, Human
uguagcucuccagccagcaagg

SEQ ID NO: 132384 - RNA, 22 nt, Human
ggcaugggccgaggugccuccu

SEQ ID NO: 132385 - RNA, 22 nt, Human
uguguguaaggaagcuuuaugg

SEQ ID NO: 132386 - RNA, 22 nt, Human
gcuggccuugugucugaggaag

SEQ ID NO: 132387 - RNA, 22 nt, Human
agagcagugcugaagaguaggg

SEQ ID NO: 132388 - RNA, 22 nt, Human
ggccucggcccacugcugcggu

SEQ ID NO: 132389 - RNA, 22 nt, Human
aaggucauuuuuuccucuguug

SEQ ID NO: 132390 - RNA, 22 nt, Human
guagccauuggcaaugaagccu

SEQ ID NO: 132391 - RNA, 22 nt, Human
ucaggccacuucacaggugauu

SEQ ID NO: 132392 - RNA, 22 nt, Human
ugccucugguuaucugguaccu

SEQ ID NO: 132393 - RNA, 22 nt, Human
gugcugugugauccaugcuggc

SEQ ID NO: 132394 - RNA, 22 nt, Human
guguguacaaauuucauguaaa

SEQ ID NO: 132395 - RNA, 22 nt, Human
ucugggcucuuaguguacccuc

SEQ ID NO: 132396 - RNA, 22 nt, Human
gcauuccugagaaugcagagug

SEQ ID NO: 132397 - RNA, 18 nt, Human
ucugggcuucccgaggcu

SEQ ID NO: 132398 - RNA, 22 nt, Human
uuuugaaagaguccugcuacag

SEQ ID NO: 132399 - RNA, 20 nt, Human
acuuucucgguuucucaccu

SEQ ID NO: 132400 - RNA, 22 nt, Human
ugauuuccccagucuugcugcu

SEQ ID NO: 132401 - RNA, 22 nt, Human
uguuacuuaucucacgugaugc

SEQ ID NO: 132402 - RNA, 22 nt, Human
cugggagagaagcgaagcuggg

SEQ ID NO: 132403 - RNA, 21 nt, Human
agcaggaggcagucacagcuc

SEQ ID NO: 132404 - RNA, 22 nt, Human
uuguuuugcuaaagggucauca

SEQ ID NO: 132405 - RNA, 21 nt, Human
ccugagggugguugugaagau

SEQ ID NO: 132406 - RNA, 22 nt, Human
cucucugguuucagcgaagggg

SEQ ID NO: 132407 - RNA, 22 nt, Human
gggaucagcaagccacugcacc

SEQ ID NO: 132408 - RNA, 22 nt, Human
agcacagaguugcagagagcgu

SEQ ID NO: 132409 - RNA, 22 nt, Human
caagagcuggagaggcagucua

SEQ ID NO: 132410 - RNA, 22 nt, Human
ccagggucuuggagaggagugc

SEQ ID NO: 132411 - RNA, 22 nt, Human
cuguggagcuuguggcaguggg

SEQ ID NO: 132412 - RNA, 17 nt, Human
agaggcagauacuugga

SEQ ID NO: 132413 - RNA, 22 nt, Human
uuacaaagagugccagagugug

SEQ ID NO: 132414 - RNA, 22 nt, Human
ggagcuguaacgagccauugcu

SEQ ID NO: 132415 - RNA, 22 nt, Human
cagcaggcagccauuucacugu

SEQ ID NO: 132416 - RNA, 22 nt, Human
caggggcucugagauugucuaa

SEQ ID NO: 132417 - RNA, 22 nt, Human
aucaauucuuaggaaaauagcu

SEQ ID NO: 132418 - RNA, 22 nt, Human
auggaaagcuaagccauuuacc

SEQ ID NO: 132419 - RNA, 22 nt, Human
ucugaaggugcuagagaaagcu

SEQ ID NO: 132420 - RNA, 22 nt, Human
gccugagcuacuagggagucug

SEQ ID NO: 132421 - RNA, 22 nt, Human
ggcagggaggaggugaaaguga

SEQ ID NO: 132422 - RNA, 22 nt, Human
uguguguuaucuuaguucaucu

SEQ ID NO: 132423 - RNA, 22 nt, Human
caggguggcccuguggucucau

SEQ ID NO: 132424 - RNA, 22 nt, Human
uuuuuauaacucuuuugugaca

SEQ ID NO: 132425 - RNA, 22 nt, Human
gcuuuguguagaaggaggaugg

SEQ ID NO: 132426 - RNA, 22 nt, Human
ccucaggggugcccacagcugc

SEQ ID NO: 132427 - RNA, 22 nt, Human
aaggguggauuucugagcucua

SEQ ID NO: 132428 - RNA, 22 nt, Human
uacaaaguuugagaaugcuuuc

SEQ ID NO: 132429 - RNA, 22 nt, Human
ucagcagggagaggagaaugca

SEQ ID NO: 132430 - RNA, 22 nt, Human
ggguaauuggggccuugcagug

SEQ ID NO: 132431 - RNA, 22 nt, Human
caguaauaagcuggagggugug

SEQ ID NO: 132432 - RNA, 22 nt, Human
acugcuuuucagagucugccug

SEQ ID NO: 132433 - RNA, 22 nt, Human
acucuugucucaacuuuuguau

SEQ ID NO: 132434 - RNA, 22 nt, Human
gugugugccaacuuuaugugca

SEQ ID NO: 132435 - RNA, 22 nt, Human
ggaaagaggauaguggguaggu

SEQ ID NO: 132436 - RNA, 22 nt, Human
gaggaccacagaugagccugca

SEQ ID NO: 132437 - RNA, 22 nt, Human
auuucaaggcuauuaauauaaa

SEQ ID NO: 132438 - RNA, 22 nt, Human
gggcuggggcucaauaauuugu

SEQ ID NO: 132439 - RNA, 22 nt, Human
gccugccugcugucaucugccu

SEQ ID NO: 132440 - RNA, 22 nt, Human
cucccagagagcaggugggccg

SEQ ID NO: 132441 - RNA, 22 nt, Human
gcaggcagagguggaggagaca

SEQ ID NO: 132442 - RNA, 19 nt, Human
ggcugcugguuacagaggc

SEQ ID NO: 132443 - RNA, 19 nt, Human
uggcauugguccagauaaa

SEQ ID NO: 132444 - RNA, 22 nt, Human
accaaggagccacauacaaccu

SEQ ID NO: 132445 - RNA, 22 nt, Human
ucaggggacuuaggagagaagu

SEQ ID NO: 132446 - RNA, 17 nt, Human
cucagaguugcuuuguc

SEQ ID NO: 132447 - RNA, 21 nt, Human
gggaaauuaggauugcucauc

SEQ ID NO: 132448 - RNA, 22 nt, Human
gcagugcuaaguagcuggccca

SEQ ID NO: 132449 - RNA, 22 nt, Human
agcagcugaccagugaguccug

SEQ ID NO: 132450 - RNA, 22 nt, Human
aaaugucuaucuggcauauucc

SEQ ID NO: 132451 - RNA, 22 nt, Human
guggcaggucccauuggagcag

SEQ ID NO: 132452 - RNA, 22 nt, Human
ucuacuuuauaaguauauaagu

SEQ ID NO: 132453 - RNA, 22 nt, Human
ugaaagguuaaaaguaguauug

SEQ ID NO: 132454 - RNA, 22 nt, Human
aagaauguucauuaaacuguug

SEQ ID NO: 132455 - RNA, 22 nt, Human
uggccuggggaagaccaugggc

SEQ ID NO: 132456 - RNA, 22 nt, Human
uggcagcacuagguacugagcu

SEQ ID NO: 132457 - RNA, 22 nt, Human
uaucucuuuauugacaauaaaa

SEQ ID NO: 132458 - RNA, 22 nt, Human
ucugugucguucugugcucugg

SEQ ID NO: 132459 - RNA, 22 nt, Human
gccucugcacuguggcacacca

SEQ ID NO: 132460 - RNA, 22 nt, Human
uuucacagguacaaacacuccu

SEQ ID NO: 132461 - RNA, 22 nt, Human
ugauuucccuguagccucugaa

SEQ ID NO: 132462 - RNA, 22 nt, Human
ugucucugaacagcuuacuaaa

SEQ ID NO: 132463 - RNA, 22 nt, Human
caggccacaaguuggguucaag

SEQ ID NO: 132464 - RNA, 22 nt, Human
gcugggagaggcccugaaguga

SEQ ID NO: 132465 - RNA, 22 nt, Human
ggcagugaaaaaguauguuucc

SEQ ID NO: 132466 - RNA, 22 nt, Human
auugacaagugagcugggcugc

SEQ ID NO: 132467 - RNA, 22 nt, Human
gcucugcucuugacuuaccagg

SEQ ID NO: 132468 - RNA, 22 nt, Human
uuuuuccaccguacuuccugag

SEQ ID NO: 132469 - RNA, 22 nt, Human
uaacagaaauaguaggugaggg

SEQ ID NO: 132470 - RNA, 22 nt, Human
gggcugacucugcacugagcca

SEQ ID NO: 132471 - RNA, 22 nt, Human
ucaggcugagaaaaucuggacc

SEQ ID NO: 132472 - RNA, 22 nt, Human
gaggacaggagacucacuguuu

SEQ ID NO: 132473 - RNA, 22 nt, Human
agagcuuauaucuuggccaucc

SEQ ID NO: 132474 - RNA, 22 nt, Human
caaggagaguaauugaaugaga

SEQ ID NO: 132475 - RNA, 22 nt, Human
ucuggcucucucaucacccaau

SEQ ID NO: 132476 - RNA, 22 nt, Human
gcugucugcaagccaggaaaug

SEQ ID NO: 132477 - RNA, 22 nt, Human
uuacugaaaauucuucaggauu

SEQ ID NO: 132478 - RNA, 22 nt, Human
gugauuucagguuuuucauacu

SEQ ID NO: 132479 - RNA, 22 nt, Human
ugaugguugauuauaaaucagu

SEQ ID NO: 132480 - RNA, 23 nt, Human
uugugggcagauuccauggggag

SEQ ID NO: 132481 - RNA, 22 nt, Human
uggcuggcuagugggcaggauu

SEQ ID NO: 132482 - RNA, 22 nt, Human
uucuaacucaaagcuucuuuca

SEQ ID NO: 132483 - RNA, 18 nt, Human
auguggcuagugcuacug

SEQ ID NO: 132484 - RNA, 20 nt, Human
ucugugugccaucaccuaac

SEQ ID NO: 132485 - RNA, 22 nt, Human
ccugcagacacuuguccagcaa

SEQ ID NO: 132486 - RNA, 22 nt, Human
aguguauucagaauguagcaaa

SEQ ID NO: 132487 - RNA, 20 nt, Human
uuuuccagaaaguaucauug

SEQ ID NO: 132488 - RNA, 23 nt, Human
acagggcauugcuggccucgagg

SEQ ID NO: 132489 - RNA, 22 nt, Human
ggccacuccgcugcuacuggaa

SEQ ID NO: 132490 - RNA, 18 nt, Human
ugaauagggguuugcaga

SEQ ID NO: 132491 - RNA, 22 nt, Human
gucauugcaguggcaaaucaca

SEQ ID NO: 132492 - RNA, 22 nt, Human
gcauaauauacaugcuugaucc

SEQ ID NO: 132493 - RNA, 22 nt, Human
cccuggagggcagacagaugcc

SEQ ID NO: 132494 - RNA, 22 nt, Human
ccagcuccaggacugggagcug

SEQ ID NO: 132495 - RNA, 20 nt, Human
gacauucauaguuauuacca

SEQ ID NO: 132496 - RNA, 22 nt, Human
uucaagauggcugcaaauacuu

SEQ ID NO: 132497 - RNA, 22 nt, Human
ucuuccucucuaauugaucaga

SEQ ID NO: 132498 - RNA, 21 nt, Human
auacauucuauuaagcauuua

SEQ ID NO: 132499 - RNA, 22 nt, Human
auucuucacuguuucagaauga

SEQ ID NO: 132500 - RNA, 22 nt, Human
uuuuacuucauuccugacuuca

SEQ ID NO: 132501 - RNA, 22 nt, Human
ggagacaguauggcuuguagcu

SEQ ID NO: 132502 - RNA, 19 nt, Human
gggcuccuugggccucucu

SEQ ID NO: 132503 - RNA, 22 nt, Human
uccagccaagggagguuacuag

SEQ ID NO: 132504 - RNA, 22 nt, Human
agggaucaaaaaauguacaugc

SEQ ID NO: 132505 - RNA, 22 nt, Human
uggcugcuagccagagcuucag

SEQ ID NO: 132506 - RNA, 22 nt, Human
uauaucuuauaugugcagguac

SEQ ID NO: 132507 - RNA, 20 nt, Human
ugaagcagccuugauucugu

SEQ ID NO: 132508 - RNA, 22 nt, Human
uuacaguaaucgaguguugugg

SEQ ID NO: 132509 - RNA, 22 nt, Human
aaaugguaagacaacacauuau

SEQ ID NO: 132510 - RNA, 22 nt, Human
uuuuccucaggaaugcuaagcu

SEQ ID NO: 132511 - RNA, 22 nt, Human
ccugugcauccgguggucauug

SEQ ID NO: 132512 - RNA, 22 nt, Human
uuugaguugcuuauuuaauagg

SEQ ID NO: 132513 - RNA, 22 nt, Human
cuuauuuuaagucaguuugggu

SEQ ID NO: 132514 - RNA, 22 nt, Human
cagaguacugggagaacagaag

SEQ ID NO: 132515 - RNA, 22 nt, Human
aaaaaugaaacggcugguuggc

SEQ ID NO: 132516 - RNA, 22 nt, Human
uucucuggaacugaaacaagau

SEQ ID NO: 132517 - RNA, 19 nt, Human
caggaugaucccaugacac

SEQ ID NO: 132518 - RNA, 22 nt, Human
acaggugguaaaauggacuguc

SEQ ID NO: 132519 - RNA, 22 nt, Human
gccuaauaugcaaaauugauac

SEQ ID NO: 132520 - RNA, 22 nt, Human
uuuuccucuguauuugaaaugc

SEQ ID NO: 132521 - RNA, 22 nt, Human
ucagagugguagccuauuuucu

SEQ ID NO: 132522 - RNA, 22 nt, Human
gauuuccucacuaacauccauc

SEQ ID NO: 132523 - RNA, 22 nt, Human
aguaaaaauugaggugcaaaau

SEQ ID NO: 132524 - RNA, 22 nt, Human
uuguaacacuuuucuauuaaua

SEQ ID NO: 132525 - RNA, 22 nt, Human
aucaguuuguauaugaaacacu

SEQ ID NO: 132526 - RNA, 22 nt, Human
aaaggucagacuuaggcugggc

SEQ ID NO: 132527 - RNA, 22 nt, Human
ccaggcuggagugcaauggugc

SEQ ID NO: 132528 - RNA, 22 nt, Human
uuuuacaggucauagguauagu

SEQ ID NO: 132529 - RNA, 22 nt, Human
ggcccuguuagagcucccacaa

SEQ ID NO: 132530 - RNA, 22 nt, Human
acuuuuugcuggucucuuccau

SEQ ID NO: 132531 - RNA, 22 nt, Human
ggcugcagcggauuggggauug

SEQ ID NO: 132532 - RNA, 22 nt, Human
uucaagguaugguagcugguca

SEQ ID NO: 132533 - RNA, 22 nt, Human
ucuggcuccacuuucuucauuu

SEQ ID NO: 132534 - RNA, 22 nt, Human
cuguuuauaaauagaggggagu

SEQ ID NO: 132535 - RNA, 22 nt, Human
agagcaggcauaaagcuuugaa

SEQ ID NO: 132536 - RNA, 22 nt, Human
aaaugaacaguugcauucucug

SEQ ID NO: 132537 - RNA, 20 nt, Human
uggcugugggcaucuguuuc

SEQ ID NO: 132538 - RNA, 22 nt, Human
aguguuguaugggaugacugcu

SEQ ID NO: 132539 - RNA, 22 nt, Human
ggcugcugggucaugaugcaga

SEQ ID NO: 132540 - RNA, 22 nt, Human
guugaaaguagaugcuauuugg

SEQ ID NO: 132541 - RNA, 22 nt, Human
uacuuuggauccuuacaauagc

SEQ ID NO: 132542 - RNA, 22 nt, Human
acaguacaggacgaguuuuccu

SEQ ID NO: 132543 - RNA, 22 nt, Human
cuuccugcaggacagccaucug

SEQ ID NO: 132544 - RNA, 22 nt, Human
gcagggcucauucuaguacaau

SEQ ID NO: 132545 - RNA, 20 nt, Human
agcagcauuguucuagagca

SEQ ID NO: 132546 - RNA, 21 nt, Human
auuuucucuggaugaugguca

SEQ ID NO: 132547 - RNA, 22 nt, Human
cagguaagagacggauuggccc

SEQ ID NO: 132548 - RNA, 22 nt, Human
aaagcugcugccaaucaggcuu

SEQ ID NO: 132549 - RNA, 22 nt, Human
uuucuaucuaggguuagaguga

SEQ ID NO: 132550 - RNA, 22 nt, Human
acucuuuaacagacuuugaucu

SEQ ID NO: 132551 - RNA, 22 nt, Human
ccucuuugugccugcaggcugc

SEQ ID NO: 132552 - RNA, 22 nt, Human
ucagaaauguaagcugaugacu

SEQ ID NO: 132553 - RNA, 22 nt, Human
ugguccugagcaccagccugac

SEQ ID NO: 132554 - RNA, 22 nt, Human
caggguuucaccauguuagcag

SEQ ID NO: 132555 - RNA, 22 nt, Human
auguguguacacacgugacucu

SEQ ID NO: 132556 - RNA, 22 nt, Human
cccaggucugugccagcucuga

SEQ ID NO: 132557 - RNA, 21 nt, Human
ggucuuccaaauaaggagaaa

SEQ ID NO: 132558 - RNA, 22 nt, Human
agcugccauccuguucagcacc

SEQ ID NO: 132559 - RNA, 22 nt, Human
cucugugucugaguuauggucu

SEQ ID NO: 132560 - RNA, 22 nt, Human
gucccauaaguagugcaacuug

SEQ ID NO: 132561 - RNA, 20 nt, Human
uacugggcaagcccacagac

SEQ ID NO: 132562 - RNA, 22 nt, Human
auaguuuuauagauauugugua

SEQ ID NO: 132563 - RNA, 22 nt, Human
uugaaaggcacaggcaccuggg

SEQ ID NO: 132564 - RNA, 22 nt, Human
agggcagcacagcugugcuccu

SEQ ID NO: 132565 - RNA, 22 nt, Human
ccagcuucucucugaugcagcu

SEQ ID NO: 132566 - RNA, 22 nt, Human
guuugcauggaagacagugagu

SEQ ID NO: 132567 - RNA, 22 nt, Human
aguuuuucugcuggucucacua

SEQ ID NO: 132568 - RNA, 22 nt, Human
aggcccugaagucggccccuca

SEQ ID NO: 132569 - RNA, 20 nt, Human
acccagcucugugcccuggg

SEQ ID NO: 132570 - RNA, 18 nt, Human
aguaguggguuuagcuuc

SEQ ID NO: 132571 - RNA, 22 nt, Human
guguguggacgucugagcccag

SEQ ID NO: 132572 - RNA, 22 nt, Human
aaaugcagauuuugaugcagca

SEQ ID NO: 132573 - RNA, 22 nt, Human
agagguagagguugcagugagc

SEQ ID NO: 132574 - RNA, 20 nt, Human
cauuuguuagcuuucuacug

SEQ ID NO: 132575 - RNA, 22 nt, Human
aaagauuugaguucugcuuaua

SEQ ID NO: 132576 - RNA, 22 nt, Human
cauguauauuucuguaugugca

SEQ ID NO: 132577 - RNA, 22 nt, Human
cacugggcaauucugagccuaa

SEQ ID NO: 132578 - RNA, 22 nt, Human
ccuggcagacugugagggcagg

SEQ ID NO: 132579 - RNA, 20 nt, Human
ccuggagccuggaaggaguc

SEQ ID NO: 132580 - RNA, 22 nt, Human
gcuggccugcugggcaccaccg

SEQ ID NO: 132581 - RNA, 22 nt, Human
cagguauaacgugcauguugua

SEQ ID NO: 132582 - RNA, 22 nt, Human
augucccaagauacagcuagag

SEQ ID NO: 132583 - RNA, 22 nt, Human
auuuuccuccaugugagcaguu

SEQ ID NO: 132584 - RNA, 22 nt, Human
ggagucccagcaaagccuuccc

SEQ ID NO: 132585 - RNA, 22 nt, Human
agaggagugggaagcagugcaa

SEQ ID NO: 132586 - RNA, 19 nt, Human
agugucaucagcuacucag

SEQ ID NO: 132587 - RNA, 22 nt, Human
ugugccauuucuauucugcagc

SEQ ID NO: 132588 - RNA, 22 nt, Human
gccuggcaggggccugggagug

SEQ ID NO: 132589 - RNA, 22 nt, Human
uggcaccugaacuuagaggugu

SEQ ID NO: 132590 - RNA, 21 nt, Human
cccuguguuccacagcagaca

SEQ ID NO: 132591 - RNA, 22 nt, Human
uggggccugagguggagcugca

SEQ ID NO: 132592 - RNA, 22 nt, Human
aggccagcaagaaagagagucu

SEQ ID NO: 132593 - RNA, 22 nt, Human
aucuggcucauucagggaacgg

SEQ ID NO: 132594 - RNA, 22 nt, Human
agagugaucagauaucaggugu

SEQ ID NO: 132595 - RNA, 22 nt, Human
gagcagaugugugccaggaugc

SEQ ID NO: 132596 - RNA, 22 nt, Human
uggcucagagagggagugugga

SEQ ID NO: 132597 - RNA, 21 nt, Human
uugaaaguaaauucagcagcu

SEQ ID NO: 132598 - RNA, 22 nt, Human
guucuucaguaaaauuaaaugu

SEQ ID NO: 132599 - RNA, 22 nt, Human
ucaggcaguagaauugcuugaa

SEQ ID NO: 132600 - RNA, 22 nt, Human
ggucccaggagaauaggugcaa

SEQ ID NO: 132601 - RNA, 22 nt, Human
cuagaaauauuuuacagucaag

SEQ ID NO: 132602 - RNA, 22 nt, Human
ccagggcauguaacuaauggug

SEQ ID NO: 132603 - RNA, 22 nt, Human
cugagccagagggagucggguc

SEQ ID NO: 132604 - RNA, 22 nt, Human
gcugcuucucugauggagucca

SEQ ID NO: 132605 - RNA, 22 nt, Human
aagggcugaaugaaggguugaa

SEQ ID NO: 132606 - RNA, 22 nt, Human
aaaaguucccugguuagaaaag

SEQ ID NO: 132607 - RNA, 22 nt, Human
gugucccacucuggaggugaag

SEQ ID NO: 132608 - RNA, 22 nt, Human
ucuauuacuuaccacuaauuca

SEQ ID NO: 132609 - RNA, 22 nt, Human
cugugucuuuccuacuuugugg

SEQ ID NO: 132610 - RNA, 22 nt, Human
gaguuauuggguggaaagguag

SEQ ID NO: 132611 - RNA, 22 nt, Human
gagaagcaauuuccaacugugc

SEQ ID NO: 132612 - RNA, 22 nt, Human
cugucugugaccucugcauguc

SEQ ID NO: 132613 - RNA, 22 nt, Human
agccccucuguggcucugccuc

SEQ ID NO: 132614 - RNA, 22 nt, Human
agagcugaaaaagcugacccgg

SEQ ID NO: 132615 - RNA, 19 nt, Human
gcaggcacagcccugggug

SEQ ID NO: 132616 - RNA, 20 nt, Human
ccagucccugagcaccaggg

SEQ ID NO: 132617 - RNA, 22 nt, Human
aggcuguguccucauuuuauau

SEQ ID NO: 132618 - RNA, 22 nt, Human
acagucuugcuguauggucagg

SEQ ID NO: 132619 - RNA, 22 nt, Human
aggguccugggugcaguugcuu

SEQ ID NO: 132620 - RNA, 22 nt, Human
agguggguaucaugagagauua

SEQ ID NO: 132621 - RNA, 22 nt, Human
cuggccuggcaggggaccucua

SEQ ID NO: 132622 - RNA, 17 nt, Human
acagagguuauacagac

SEQ ID NO: 132623 - RNA, 22 nt, Human
gccaugccugugucuccaggcc

SEQ ID NO: 132624 - RNA, 22 nt, Human
cuggagaggccccaagauauuu

SEQ ID NO: 132625 - RNA, 22 nt, Human
auugacaaggaaacuauaccag

SEQ ID NO: 132626 - RNA, 22 nt, Human
ccucaggcuuacgggcaaugga

SEQ ID NO: 132627 - RNA, 22 nt, Human
uaggaaaaauacagaauuauau

SEQ ID NO: 132628 - RNA, 22 nt, Human
guguguccaggcgggagucaag

SEQ ID NO: 132629 - RNA, 22 nt, Human
cuccugggcucaagugauccuc

SEQ ID NO: 132630 - RNA, 22 nt, Human
caggaaugaggucguaaguguc

SEQ ID NO: 132631 - RNA, 22 nt, Human
ccaggcugggcuacaaguugag

SEQ ID NO: 132632 - RNA, 22 nt, Human
aauauaauuuuauuccuagagu

SEQ ID NO: 132633 - RNA, 22 nt, Human
aaguccaucucugccccacaca

SEQ ID NO: 132634 - RNA, 22 nt, Human
guaaaucccauccuuucucugg

SEQ ID NO: 132635 - RNA, 22 nt, Human
cagcaggcguugggagaaagac

SEQ ID NO: 132636 - RNA, 22 nt, Human
acagcuguggggacucuugccc

SEQ ID NO: 132637 - RNA, 22 nt, Human
caaauaguuuuucauguauuau

SEQ ID NO: 132638 - RNA, 22 nt, Human
cucugugcccuacugcucagcu

SEQ ID NO: 132639 - RNA, 22 nt, Human
uaauuuaauuccauggauucua

SEQ ID NO: 132640 - RNA, 22 nt, Human
aauaucagcacuuuugugguau

SEQ ID NO: 132641 - RNA, 22 nt, Human
cugugcuugcggguguggagcc

SEQ ID NO: 132642 - RNA, 22 nt, Human
uguguguggggaggcagcagau

SEQ ID NO: 132643 - RNA, 22 nt, Human
ucccacugugaauccaaggccu

SEQ ID NO: 132644 - RNA, 22 nt, Human
aggcuguggugaugauuggguc

SEQ ID NO: 132645 - RNA, 22 nt, Human
aguguaugucaaguauauacac

SEQ ID NO: 132646 - RNA, 22 nt, Human
acagaauauugguuacuguugc

SEQ ID NO: 132647 - RNA, 22 nt, Human
uuucacauacaguguauaguag

SEQ ID NO: 132648 - RNA, 22 nt, Human
ggacuggacucucaggcucaca

SEQ ID NO: 132649 - RNA, 22 nt, Human
ucaggccacggcucacugagac

SEQ ID NO: 132650 - RNA, 22 nt, Human
cucugcagaauuugagcugcuc

SEQ ID NO: 132651 - RNA, 18 nt, Human
ccagcaugccagaggcug

SEQ ID NO: 132652 - RNA, 22 nt, Human
uggcugugggauaugugacuga

SEQ ID NO: 132653 - RNA, 22 nt, Human
cuuuuucacuguguccucacac

SEQ ID NO: 132654 - RNA, 22 nt, Human
ucugggcugggagcguguggac

SEQ ID NO: 132655 - RNA, 22 nt, Human
ucugaagaacugaguaaacaug

SEQ ID NO: 132656 - RNA, 22 nt, Human
uggcagagucucuccuuuccag

SEQ ID NO: 132657 - RNA, 22 nt, Human
uguguggccuccauaggguacu

SEQ ID NO: 132658 - RNA, 22 nt, Human
cucuccucagaacaggcccucu

SEQ ID NO: 132659 - RNA, 22 nt, Human
ggccugcacagagguggcucua

SEQ ID NO: 132660 - RNA, 22 nt, Human
uggaagggggaagacagcucug

SEQ ID NO: 132661 - RNA, 22 nt, Human
aggcucagcugguggugaucgc

SEQ ID NO: 132662 - RNA, 22 nt, Human
cauuucugucacguucuuuuau

SEQ ID NO: 132663 - RNA, 22 nt, Human
gccaggcagcugggagggugcc

SEQ ID NO: 132664 - RNA, 22 nt, Human
guguauggacacaugucauguu

SEQ ID NO: 132665 - RNA, 22 nt, Human
ggccucugccucaucugggcac

SEQ ID NO: 132666 - RNA, 22 nt, Human
ucacauuuuaucuauuuuaagu

SEQ ID NO: 132667 - RNA, 22 nt, Human
uagauaaauuagaaaguuuacu

SEQ ID NO: 132668 - RNA, 22 nt, Human
ccacacagucaguuuccaagaa

SEQ ID NO: 132669 - RNA, 23 nt, Human
aguguuccaguugguugagagug

SEQ ID NO: 132670 - RNA, 22 nt, Human
uuucauggcuaggacuagagug

SEQ ID NO: 132671 - RNA, 22 nt, Human
uccaugucuucaugugucuaac

SEQ ID NO: 132672 - RNA, 22 nt, Human
gggcucagccccauugaaccag

SEQ ID NO: 132673 - RNA, 22 nt, Human
uguuuuaaucucccauugcucu

SEQ ID NO: 132674 - RNA, 22 nt, Human
aaaggccacuugaaggauuuuu

SEQ ID NO: 132675 - RNA, 22 nt, Human
aucaguuuuguucacuacuaua

SEQ ID NO: 132676 - RNA, 22 nt, Human
aauggccagcugggagaguuga

SEQ ID NO: 132677 - RNA, 23 nt, Human
auguggcuagugagaccaagaaa

SEQ ID NO: 132678 - RNA, 22 nt, Human
aacaaaugauaccaguucucaa

SEQ ID NO: 132679 - RNA, 22 nt, Human
gccuccccugcaauuguccuug

SEQ ID NO: 132680 - RNA, 22 nt, Human
uguguagcucauauuaguguua

SEQ ID NO: 132681 - RNA, 22 nt, Human
ccugccugucccucaguccaca

SEQ ID NO: 132682 - RNA, 22 nt, Human
auggaguucuuuaaauucacag

SEQ ID NO: 132683 - RNA, 22 nt, Human
guucauauuacuuugagugcag

SEQ ID NO: 132684 - RNA, 22 nt, Human
gacagggcgagacucagucuca

SEQ ID NO: 132685 - RNA, 22 nt, Human
aaaggucauugaaaaggaggaa

SEQ ID NO: 132686 - RNA, 22 nt, Human
acaucucaugaaugauaaauca

SEQ ID NO: 132687 - RNA, 22 nt, Human
acuuuugguucuguaacuguga

SEQ ID NO: 132688 - RNA, 22 nt, Human
cugggaggauucauugagguga

SEQ ID NO: 132689 - RNA, 22 nt, Human
ccuggcugccgagugugcagcg

SEQ ID NO: 132690 - RNA, 22 nt, Human
ccacugggcguuucuguccaau

SEQ ID NO: 132691 - RNA, 22 nt, Human
uggcagaguuggagguggaaga

SEQ ID NO: 132692 - RNA, 22 nt, Human
ccagcaggagacuagcaacaua

SEQ ID NO: 132693 - RNA, 22 nt, Human
acagagccuccaggagugcugg

SEQ ID NO: 132694 - RNA, 22 nt, Human
cccuggaggcggauguugcagu

SEQ ID NO: 132695 - RNA, 22 nt, Human
cugccucuggccucaggcccag

SEQ ID NO: 132696 - RNA, 22 nt, Human
aaggcacucagccuugggacag

SEQ ID NO: 132697 - RNA, 22 nt, Human
uagagcuggccgggacagcugg

SEQ ID NO: 132698 - RNA, 22 nt, Human
cacauugaaaugacccaauaau

SEQ ID NO: 132699 - RNA, 22 nt, Human
gaaggcugaugacagauucugc

SEQ ID NO: 132700 - RNA, 22 nt, Human
caggccucaggggcucaggcug

SEQ ID NO: 132701 - RNA, 22 nt, Human
cuuagaaauaaugguuucaguu

SEQ ID NO: 132702 - RNA, 19 nt, Human
aucugccuuagugcugcug

SEQ ID NO: 132703 - RNA, 19 nt, Human
ggcugucucggcccagcca

SEQ ID NO: 132704 - RNA, 22 nt, Human
uuuucucuacaaaauaaccagc

SEQ ID NO: 132705 - RNA, 22 nt, Human
ggcuagaacuuuacacuuugca

SEQ ID NO: 132706 - RNA, 20 nt, Human
aaaguguaagcauauaauua

SEQ ID NO: 132707 - RNA, 22 nt, Human
cagagacauuaagugccaugau

SEQ ID NO: 132708 - RNA, 22 nt, Human
acacauuucuaaauuuuuaccg

SEQ ID NO: 132709 - RNA, 22 nt, Human
uaucucuugucuguuuugcaaa

SEQ ID NO: 132710 - RNA, 18 nt, Human
ugaacuuuggugucucuc

SEQ ID NO: 132711 - RNA, 22 nt, Human
acauauauuacuaguaaagaca

SEQ ID NO: 132712 - RNA, 22 nt, Human
cgcagaagagguugucuagucc

SEQ ID NO: 132713 - RNA, 23 nt, Human
uugcacauuggagcuggucuucu

SEQ ID NO: 132714 - RNA, 22 nt, Human
caaaaugugagucccaccucaa

SEQ ID NO: 132715 - RNA, 22 nt, Human
agcugcugagagucugccgggc

SEQ ID NO: 132716 - RNA, 22 nt, Human
ugggcuguggagcaccuuugca

SEQ ID NO: 132717 - RNA, 22 nt, Human
gagucacaaagccuuucuuauu

SEQ ID NO: 132718 - RNA, 22 nt, Human
cagacagacagccguggccacc

SEQ ID NO: 132719 - RNA, 21 nt, Human
auuauuauuucuguguccagc

SEQ ID NO: 132720 - RNA, 22 nt, Human
gcuggcugaguucugucgucug

SEQ ID NO: 132721 - RNA, 22 nt, Human
ucagagcuuaucucuugcugga

SEQ ID NO: 132722 - RNA, 22 nt, Human
aaaguuuuagaacuaggaagca

SEQ ID NO: 132723 - RNA, 22 nt, Human
ggaucauuaacacauccaucac

SEQ ID NO: 132724 - RNA, 22 nt, Human
uuggaaggcccugccuagcagg

SEQ ID NO: 132725 - RNA, 22 nt, Human
auguguaucuaagguguucuau

SEQ ID NO: 132726 - RNA, 22 nt, Human
agccacgucccugucaggguca

SEQ ID NO: 132727 - RNA, 22 nt, Human
uauuugucaccuauggcugucc

SEQ ID NO: 132728 - RNA, 23 nt, Human
gccugggacucaggaggagcuca

SEQ ID NO: 132729 - RNA, 22 nt, Human
caaaugcauagaaagaugaaac

SEQ ID NO: 132730 - RNA, 22 nt, Human
cuuuuauuuugaauuaagggcu

SEQ ID NO: 132731 - RNA, 22 nt, Human
ucuguguauuugugaccuguau

SEQ ID NO: 132732 - RNA, 18 nt, Human
gggcccuggcguccgccc

SEQ ID NO: 132733 - RNA, 22 nt, Human
auuucucugcaguguucggaau

SEQ ID NO: 132734 - RNA, 22 nt, Human
ucaggggcugugcauuucccag

SEQ ID NO: 132735 - RNA, 22 nt, Human
ugcauuaugcuacccagaagcu

SEQ ID NO: 132736 - RNA, 22 nt, Human
aaguguguauuguuuaugcugc

SEQ ID NO: 132737 - RNA, 22 nt, Human
caucacuguccucagcauucca

SEQ ID NO: 132738 - RNA, 22 nt, Human
ugggcacaggggaauggaugaa

SEQ ID NO: 132739 - RNA, 22 nt, Human
uagcagcuuccagagagggcag

SEQ ID NO: 132740 - RNA, 22 nt, Human
cuggagcccaggccuggugucu

SEQ ID NO: 132741 - RNA, 22 nt, Human
ccuggcagaauauuaaagugca

SEQ ID NO: 132742 - RNA, 21 nt, Human
ugauuuccagaaaauuggccc

SEQ ID NO: 132743 - RNA, 22 nt, Human
agggcugcuccuccuucaggcc

SEQ ID NO: 132744 - RNA, 17 nt, Human
gccucugcuugugucau

SEQ ID NO: 132745 - RNA, 22 nt, Human
cugaggcuuggaggggucuggu

SEQ ID NO: 132746 - RNA, 22 nt, Human
ugcuuuauguuaucagaagggu

SEQ ID NO: 132747 - RNA, 22 nt, Human
cucaggauucucgacacucaca

SEQ ID NO: 132748 - RNA, 22 nt, Human
auucuucauuuacuguuacuug

SEQ ID NO: 132749 - RNA, 22 nt, Human
gauuuucuugggaaacaaugag

SEQ ID NO: 132750 - RNA, 22 nt, Human
agccacagcaacaagugcaauu

SEQ ID NO: 132751 - RNA, 22 nt, Human
aacaaauguguggcaguguggg

SEQ ID NO: 132752 - RNA, 22 nt, Human
aaauugugagcuauagaucuag

SEQ ID NO: 132753 - RNA, 22 nt, Human
aggcucugcagugcuggaggac

SEQ ID NO: 132754 - RNA, 22 nt, Human
cagggccugccugguuccugga

SEQ ID NO: 132755 - RNA, 22 nt, Human
ugggccuggcccuguggaggag

SEQ ID NO: 132756 - RNA, 22 nt, Human
ggcugccacgucgaggguccaa

SEQ ID NO: 132757 - RNA, 17 nt, Human
cuggagccaagagggcc

SEQ ID NO: 132758 - RNA, 22 nt, Human
ugaaggagcucaaugaugaugc

SEQ ID NO: 132759 - RNA, 22 nt, Human
caggccugcaggaaaggcuccc

SEQ ID NO: 132760 - RNA, 22 nt, Human
uuggaauucaaguuguagcuua

SEQ ID NO: 132761 - RNA, 22 nt, Human
agggacuggcucucugagcagg

SEQ ID NO: 132762 - RNA, 22 nt, Human
agcauugccugccuauugcuaa

SEQ ID NO: 132763 - RNA, 18 nt, Human
caugggugacagguggau

SEQ ID NO: 132764 - RNA, 22 nt, Human
ccaggagccacucaggcccaca

SEQ ID NO: 132765 - RNA, 22 nt, Human
aggagcagaacuguuguggagg

SEQ ID NO: 132766 - RNA, 22 nt, Human
cuggcagcuuccuuugcaucug

SEQ ID NO: 132767 - RNA, 22 nt, Human
gggagggauuaguucugccugg

SEQ ID NO: 132768 - RNA, 22 nt, Human
auuauguagguuaggugguugu

SEQ ID NO: 132769 - RNA, 22 nt, Human
aguaauaauuuauauuagggag

SEQ ID NO: 132770 - RNA, 23 nt, Human
gccagccuugcucuccugcagcc

SEQ ID NO: 132771 - RNA, 22 nt, Human
uaguccauuuucacacugcuga

SEQ ID NO: 132772 - RNA, 22 nt, Human
cugcagagcaaguaacauccuc

SEQ ID NO: 132773 - RNA, 22 nt, Human
cccuggagugccggaaucaaga

SEQ ID NO: 132774 - RNA, 22 nt, Human
guaggcagucucucaggugauc

SEQ ID NO: 132775 - RNA, 22 nt, Human
cagugugugacucuggggguac

SEQ ID NO: 132776 - RNA, 22 nt, Human
ccaggcagcaaauuuucugaau

SEQ ID NO: 132777 - RNA, 22 nt, Human
gcuguucucuguaacaugcauu

SEQ ID NO: 132778 - RNA, 22 nt, Human
aagcacagaaaaggagcaugga

SEQ ID NO: 132779 - RNA, 22 nt, Human
gugaaugccgcagucuguugcu

SEQ ID NO: 132780 - RNA, 22 nt, Human
gaauauuuguaauuacuguuga

SEQ ID NO: 132781 - RNA, 22 nt, Human
uucuuauuucccccuucaucau

SEQ ID NO: 132782 - RNA, 22 nt, Human
agaugcugcuccacaggccagg

SEQ ID NO: 132783 - RNA, 17 nt, Human
ucuuuccugccaugcuc

SEQ ID NO: 132784 - RNA, 22 nt, Human
gcuggccaguguggugaccacc

SEQ ID NO: 132785 - RNA, 22 nt, Human
cuuuacagaauaagaauacugg

SEQ ID NO: 132786 - RNA, 22 nt, Human
uauaacacucagaaagaaucau

SEQ ID NO: 132787 - RNA, 22 nt, Human
aaaauggucucagcuggcacca

SEQ ID NO: 132788 - RNA, 22 nt, Human
ugacagggugauuaugagagcu

SEQ ID NO: 132789 - RNA, 22 nt, Human
aagauuuagggccaguuuacau

SEQ ID NO: 132790 - RNA, 22 nt, Human
cugcuucugggaugauggagua

SEQ ID NO: 132791 - RNA, 22 nt, Human
acuucuucuucagcugggggau

SEQ ID NO: 132792 - RNA, 22 nt, Human
acuggcagccacaacuggcagg

SEQ ID NO: 132793 - RNA, 22 nt, Human
uugaagcauuguggcuuguauu

SEQ ID NO: 132794 - RNA, 22 nt, Human
cucuuuaaaguaaaauuugucu

SEQ ID NO: 132795 - RNA, 22 nt, Human
ggcagcucugcuccacaugagu

SEQ ID NO: 132796 - RNA, 22 nt, Human
auaaacacuucuagggcacaca

SEQ ID NO: 132797 - RNA, 22 nt, Human
gagcuuccauggacgccaucug

SEQ ID NO: 132798 - RNA, 22 nt, Human
cacugcagaucagaggcugaga

SEQ ID NO: 132799 - RNA, 22 nt, Human
ucucagaggugcccuggcaucu

SEQ ID NO: 132800 - RNA, 22 nt, Human
aaaggaagauugagcuuuucca

SEQ ID NO: 132801 - RNA, 22 nt, Human
ggcucaggacugcagcguagag

SEQ ID NO: 132802 - RNA, 22 nt, Human
aagcagcacaguaauauuggug

SEQ ID NO: 132803 - RNA, 22 nt, Human
ccagcagccaccuucucgaaau

SEQ ID NO: 132804 - RNA, 22 nt, Human
gugacugugaacuguuucugau

SEQ ID NO: 132805 - RNA, 22 nt, Human
guaguguguaggcacugugcuc

SEQ ID NO: 132806 - RNA, 22 nt, Human
aguguguaaugccaggggcugc

SEQ ID NO: 132807 - RNA, 23 nt, Human
uuuaacuuuccaauaauucauug

SEQ ID NO: 132808 - RNA, 22 nt, Human
ggcuucugccacgagagggaag

SEQ ID NO: 132809 - RNA, 22 nt, Human
aagggaggccagagguuuugca

SEQ ID NO: 132810 - RNA, 22 nt, Human
ugcagaguaaaagcagaugcua

SEQ ID NO: 132811 - RNA, 22 nt, Human
uacaugcaugucacagaaugaa

SEQ ID NO: 132812 - RNA, 22 nt, Human
augagcuguaagguggcuuccu

SEQ ID NO: 132813 - RNA, 22 nt, Human
ggaggagacccugugucaguuu

SEQ ID NO: 132814 - RNA, 22 nt, Human
gggcugugcugaguaggaggug

SEQ ID NO: 132815 - RNA, 22 nt, Human
gggacagacccaugggccaggu

SEQ ID NO: 132816 - RNA, 22 nt, Human
auuauucuugagguguuuauug

SEQ ID NO: 132817 - RNA, 22 nt, Human
augagacuaccuguaauguggc

SEQ ID NO: 132818 - RNA, 22 nt, Human
aggagucauugagagggguccu

SEQ ID NO: 132819 - RNA, 22 nt, Human
aggcacagagaaugcccuccau

SEQ ID NO: 132820 - RNA, 22 nt, Human
cucuguuucucagccuauuucc

SEQ ID NO: 132821 - RNA, 22 nt, Human
uucuggaggccccuuccuucuc

SEQ ID NO: 132822 - RNA, 22 nt, Human
ggccucacccaucggugccuuu

SEQ ID NO: 132823 - RNA, 22 nt, Human
uuugaacuucuaccugucauau

SEQ ID NO: 132824 - RNA, 22 nt, Human
ggguggcugacuguuuugugga

SEQ ID NO: 132825 - RNA, 19 nt, Human
caggaaugagguaauggcu

SEQ ID NO: 132826 - RNA, 22 nt, Human
gaauuguacgcuuuacauaggu

SEQ ID NO: 132827 - RNA, 22 nt, Human
gggagcugagcuggaagagaau

SEQ ID NO: 132828 - RNA, 22 nt, Human
ccacccuuggguucggaggccg

SEQ ID NO: 132829 - RNA, 22 nt, Human
aguuucucuagagucuuugaaa

SEQ ID NO: 132830 - RNA, 22 nt, Human
ucccagagcccaaguuggagag

SEQ ID NO: 132831 - RNA, 22 nt, Human
caccagggacaaugcuaggggu

SEQ ID NO: 132832 - RNA, 22 nt, Human
ugcugugucuuucugugaaaag

SEQ ID NO: 132833 - RNA, 22 nt, Human
uucaagaugccagggacgcggc

SEQ ID NO: 132834 - RNA, 22 nt, Human
uggcucagaguucaucuuuuag

SEQ ID NO: 132835 - RNA, 20 nt, Human
uguguauaaauauauguuuc

SEQ ID NO: 132836 - RNA, 22 nt, Human
uccuucaggguugaggccgacu

SEQ ID NO: 132837 - RNA, 22 nt, Human
gcccugucggaacugcgaccuc

SEQ ID NO: 132838 - RNA, 22 nt, Human
ugggccuguugggguugaguua

SEQ ID NO: 132839 - RNA, 22 nt, Human
aaauuauuacaagcuaguuggc

SEQ ID NO: 132840 - RNA, 22 nt, Human
gcugucuccauagcuguguguc

SEQ ID NO: 132841 - RNA, 22 nt, Human
caagggcuucaaguggccaaga

SEQ ID NO: 132842 - RNA, 22 nt, Human
ucugccuggguguggagcagag

SEQ ID NO: 132843 - RNA, 22 nt, Human
cugccugugcaugcagucagaa

SEQ ID NO: 132844 - RNA, 22 nt, Human
ucaccagucuuucuuaccauug

SEQ ID NO: 132845 - RNA, 22 nt, Human
uucuucaguguagcaacuguau

SEQ ID NO: 132846 - RNA, 22 nt, Human
uaaugucaaggugauagauuug

SEQ ID NO: 132847 - RNA, 22 nt, Human
gggcagagagcuggaacuccuu

SEQ ID NO: 132848 - RNA, 22 nt, Human
uucaauucuaaacuaauauucu

SEQ ID NO: 132849 - RNA, 22 nt, Human
ucugcuguaaagaauuucugcc

SEQ ID NO: 132850 - RNA, 22 nt, Human
gcugucugagaacaugguggaa

SEQ ID NO: 132851 - RNA, 22 nt, Human
acagauauguuggguucuuguu

SEQ ID NO: 132852 - RNA, 22 nt, Human
ucuggagcuggcagggcccugg

SEQ ID NO: 132853 - RNA, 22 nt, Human
acacugcucacuucuucccuug

SEQ ID NO: 132854 - RNA, 22 nt, Human
ugucccaguucccaggguugcu

SEQ ID NO: 132855 - RNA, 22 nt, Human
gcagugugaccgagcuugcuuc

SEQ ID NO: 132856 - RNA, 22 nt, Human
uuauagaaggagcauucacuua

SEQ ID NO: 132857 - RNA, 23 nt, Human
uggcagcuguguaagagaaagca

SEQ ID NO: 132858 - RNA, 22 nt, Human
uuauuuaaaagugguaagauuc

SEQ ID NO: 132859 - RNA, 22 nt, Human
ucagagagccucaggcacugcc

SEQ ID NO: 132860 - RNA, 22 nt, Human
uacagguagcaaaaccuuuccu

SEQ ID NO: 132861 - RNA, 22 nt, Human
cauugacaguucuuuaaguugc

SEQ ID NO: 132862 - RNA, 20 nt, Human
agcugaggcaccugagguua

SEQ ID NO: 132863 - RNA, 22 nt, Human
aagaaauauugggccuuauaaa

SEQ ID NO: 132864 - RNA, 22 nt, Human
ugccaggcccagcuccagagcu

SEQ ID NO: 132865 - RNA, 22 nt, Human
cugaagccacgauagcuuccua

SEQ ID NO: 132866 - RNA, 22 nt, Human
aggucaccauggcaugcuccac

SEQ ID NO: 132867 - RNA, 20 nt, Human
uggcuccugcgguggaacca

SEQ ID NO: 132868 - RNA, 22 nt, Human
agucccagugacuuggccagaa

SEQ ID NO: 132869 - RNA, 22 nt, Human
cuccagggagcuuggaaagacc

SEQ ID NO: 132870 - RNA, 22 nt, Human
cucuuuucaaaauuucacugca

SEQ ID NO: 132871 - RNA, 22 nt, Human
gggaugucacugugccuggcac

SEQ ID NO: 132872 - RNA, 22 nt, Human
cuggcucaugugaugagggcaa

SEQ ID NO: 132873 - RNA, 22 nt, Human
ggcugagcacuuuaggcaggag

SEQ ID NO: 132874 - RNA, 22 nt, Human
aaaaucaguacacuuuauuuug

SEQ ID NO: 132875 - RNA, 22 nt, Human
gcugagaggcacuaucuccgga

SEQ ID NO: 132876 - RNA, 22 nt, Human
gcaggcugaugacuggaguugg

SEQ ID NO: 132877 - RNA, 22 nt, Human
auuucuuccucugucaguaacu

SEQ ID NO: 132878 - RNA, 22 nt, Human
uacuuuucuguguggcagucac

SEQ ID NO: 132879 - RNA, 22 nt, Human
cugcccugucuuuuucugauga

SEQ ID NO: 132880 - RNA, 22 nt, Human
gccaggcugcuggcugcugucc

SEQ ID NO: 132881 - RNA, 22 nt, Human
ucaggcaggcagagggcaaaug

SEQ ID NO: 132882 - RNA, 22 nt, Human
uacaugcuccacuuucuccugu

SEQ ID NO: 132883 - RNA, 23 nt, Human
gacagagugagaccuugucuuac

SEQ ID NO: 132884 - RNA, 19 nt, Human
ucugucacuggggguauuc

SEQ ID NO: 132885 - RNA, 22 nt, Human
ggggcagagucuggacuguugu

SEQ ID NO: 132886 - RNA, 22 nt, Human
ggagugucagaaacaguguccu

SEQ ID NO: 132887 - RNA, 22 nt, Human
gaucauuuugaugcccuuuuag

SEQ ID NO: 132888 - RNA, 21 nt, Human
gauuucacuuaccuucauuua

SEQ ID NO: 132889 - RNA, 22 nt, Human
agugucauuuuguccaucuucu

SEQ ID NO: 132890 - RNA, 22 nt, Human
ugugccagccucuggcuguguc

SEQ ID NO: 132891 - RNA, 22 nt, Human
cuuuuuccagcuucaggguggg

SEQ ID NO: 132892 - RNA, 22 nt, Human
cuuuuuaucucuuaaugauguu

SEQ ID NO: 132893 - RNA, 22 nt, Human
uguguauaaacaagagucugug

SEQ ID NO: 132894 - RNA, 22 nt, Human
ucucuucugaaaccugucuuua

SEQ ID NO: 132895 - RNA, 22 nt, Human
aaaugcagguucuugagccaag

SEQ ID NO: 132896 - RNA, 22 nt, Human
ggcaggcaggagcgugcuuggg

SEQ ID NO: 132897 - RNA, 23 nt, Human
aucaaaguggaaaucaauuaucu

SEQ ID NO: 132898 - RNA, 21 nt, Human
uguauacacacauauauguac

SEQ ID NO: 132899 - RNA, 22 nt, Human
ccugccagcauggcuuaucucc

SEQ ID NO: 132900 - RNA, 22 nt, Human
ucaacacuauccaggcaaucuu

SEQ ID NO: 132901 - RNA, 22 nt, Human
gccugaagaacagcugugagga

SEQ ID NO: 132902 - RNA, 22 nt, Human
ucucucauagagaaaaauauau

SEQ ID NO: 132903 - RNA, 22 nt, Human
aauguacaaaagucagccaacu

SEQ ID NO: 132904 - RNA, 17 nt, Human
agaaagaggauccacag

SEQ ID NO: 132905 - RNA, 22 nt, Human
aagggaggaggauuuauuguac

SEQ ID NO: 132906 - RNA, 22 nt, Human
agccugagccccauccagcuga

SEQ ID NO: 132907 - RNA, 22 nt, Human
ggcuucucucccccagcuccac

SEQ ID NO: 132908 - RNA, 22 nt, Human
uaaggccagccagcaaaucugu

SEQ ID NO: 132909 - RNA, 22 nt, Human
uuuuacaggugugagccaccau

SEQ ID NO: 132910 - RNA, 22 nt, Human
gucccugggaugcccuucuggg

SEQ ID NO: 132911 - RNA, 22 nt, Human
aucaggaugacuauaaggcugc

SEQ ID NO: 132912 - RNA, 22 nt, Human
uugagaagaauguguugaguuu

SEQ ID NO: 132913 - RNA, 22 nt, Human
ugaaagcuguccacuaggcugu

SEQ ID NO: 132914 - RNA, 22 nt, Human
uggaagcaucacuucuugccug

SEQ ID NO: 132915 - RNA, 22 nt, Human
uggcagcagccauggaaggccc

SEQ ID NO: 132916 - RNA, 22 nt, Human
uguguggcguugcguggcuagg

SEQ ID NO: 132917 - RNA, 22 nt, Human
uggcucugaucagauguccagu

SEQ ID NO: 132918 - RNA, 22 nt, Human
gggagggaucugcuaggcaaug

SEQ ID NO: 132919 - RNA, 22 nt, Human
auaguaacuggcauguuuauga

SEQ ID NO: 132920 - RNA, 22 nt, Human
ucuggcugaaaggggcugugcc

SEQ ID NO: 132921 - RNA, 22 nt, Human
agggagacacaugaggaaguca

SEQ ID NO: 132922 - RNA, 20 nt, Human
ucagugauuaucucugagug

SEQ ID NO: 132923 - RNA, 22 nt, Human
gagcugccggcccacaguacua

SEQ ID NO: 132924 - RNA, 22 nt, Human
cuguauuucccacauucucuau

SEQ ID NO: 132925 - RNA, 22 nt, Human
ggcugcucuucuuggcgaccuc

SEQ ID NO: 132926 - RNA, 22 nt, Human
cauaccuuucucaagcacaugu

SEQ ID NO: 132927 - RNA, 22 nt, Human
uuagaaaucugcugccaugcaa

SEQ ID NO: 132928 - RNA, 22 nt, Human
aucaguuugauaauaaggcuug

SEQ ID NO: 132929 - RNA, 22 nt, Human
uagacuuuuaagucccucuuua

SEQ ID NO: 132930 - RNA, 22 nt, Human
ucucucagaggccaggguccug

SEQ ID NO: 132931 - RNA, 22 nt, Human
cucuggagguggagguugcagu

SEQ ID NO: 132932 - RNA, 22 nt, Human
uggcucagcuuacuuuugaggg

SEQ ID NO: 132933 - RNA, 22 nt, Human
gcuggagccauuggcuuggccu

SEQ ID NO: 132934 - RNA, 22 nt, Human
uauguuucuuccuuuucauaca

SEQ ID NO: 132935 - RNA, 22 nt, Human
gacccagcuuaagucacauguu

SEQ ID NO: 132936 - RNA, 21 nt, Human
ucuguacaucauugagucccc

SEQ ID NO: 132937 - RNA, 22 nt, Human
augcaguaaauguucuaguuug

SEQ ID NO: 132938 - RNA, 22 nt, Human
auguacaguggaaacuaacaaa

SEQ ID NO: 132939 - RNA, 23 nt, Human
aguuccagaaaaaugcucaagca

SEQ ID NO: 132940 - RNA, 22 nt, Human
uaccaguaauguaacuuugcaa

SEQ ID NO: 132941 - RNA, 21 nt, Human
gcagccacagccaccaagcua

SEQ ID NO: 132942 - RNA, 17 nt, Human
agugacuuggaaagagc

SEQ ID NO: 132943 - RNA, 22 nt, Human
aauuagagaucaguucuuugac

SEQ ID NO: 132944 - RNA, 22 nt, Human
cuccccagguucaggagguggg

SEQ ID NO: 132945 - RNA, 22 nt, Human
cugagccauaagggaggcuggg

SEQ ID NO: 132946 - RNA, 22 nt, Human
agucauauggcuauuuaguggg

SEQ ID NO: 132947 - RNA, 22 nt, Human
uccuggagaauccugccaccug

SEQ ID NO: 132948 - RNA, 22 nt, Human
agagucugaggcagcugcagcc

SEQ ID NO: 132949 - RNA, 22 nt, Human
uggcuaggcuccaagagcugga

SEQ ID NO: 132950 - RNA, 22 nt, Human
guugaaugaaucauucuaugua

SEQ ID NO: 132951 - RNA, 22 nt, Human
ccagccaggcuggcuguggagg

SEQ ID NO: 132952 - RNA, 19 nt, Human
aggcagaggcuuggcuagc

SEQ ID NO: 132953 - RNA, 22 nt, Human
uucauucccaagaguaaacaua

SEQ ID NO: 132954 - RNA, 22 nt, Human
acacaaugcauauuuuuccaga

SEQ ID NO: 132955 - RNA, 22 nt, Human
agaccaagaaaggaugaggauc

SEQ ID NO: 132956 - RNA, 20 nt, Human
guucucacugaucugcaggg

SEQ ID NO: 132957 - RNA, 22 nt, Human
cuuauuauaaaauccuguuuga

SEQ ID NO: 132958 - RNA, 22 nt, Human
uccagcagcccgaaggcccauc

SEQ ID NO: 132959 - RNA, 22 nt, Human
cugccucucaggucccugagau

SEQ ID NO: 132960 - RNA, 22 nt, Human
auccaugauuaguaggauaaag

SEQ ID NO: 132961 - RNA, 22 nt, Human
uggcugugucaucauagcugug

SEQ ID NO: 132962 - RNA, 22 nt, Human
cagcuccccaugguuccugaag

SEQ ID NO: 132963 - RNA, 22 nt, Human
guccugggaaggaagccaggga

SEQ ID NO: 132964 - RNA, 22 nt, Human
gcucugggugaacuuggagcaa

SEQ ID NO: 132965 - RNA, 22 nt, Human
ugugugcagccucugucuuugg

SEQ ID NO: 132966 - RNA, 22 nt, Human
gauuuucugagccuucaaauuu

SEQ ID NO: 132967 - RNA, 23 nt, Human
uggagcugacagucagagggagg

SEQ ID NO: 132968 - RNA, 22 nt, Human
gggccuggugcuucugacuccu

SEQ ID NO: 132969 - RNA, 22 nt, Human
uuucuagaggcuccaggggagu

SEQ ID NO: 132970 - RNA, 22 nt, Human
ccaaggaggccccaggucagcu

SEQ ID NO: 132971 - RNA, 22 nt, Human
ugcuguguuacugagauccggc

SEQ ID NO: 132972 - RNA, 22 nt, Human
cacguuuuaugacagaagaagc

SEQ ID NO: 132973 - RNA, 22 nt, Human
ucauuuuucacacagggucacc

SEQ ID NO: 132974 - RNA, 21 nt, Human
ccuggcagaagccugauaugc

SEQ ID NO: 132975 - RNA, 22 nt, Human
gcucuggacccuggaguggcug

SEQ ID NO: 132976 - RNA, 22 nt, Human
ccagaggugcugggagaggucu

SEQ ID NO: 132977 - RNA, 22 nt, Human
uucucacuauguauguagauug

SEQ ID NO: 132978 - RNA, 22 nt, Human
uaguuucuaaagcuuccuaggu

SEQ ID NO: 132979 - RNA, 21 nt, Human
gcaggggauagaaauggucug

SEQ ID NO: 132980 - RNA, 22 nt, Human
cucaucugauaaaucacucuua

SEQ ID NO: 132981 - RNA, 22 nt, Human
auuaaauuggaucugcauaguu

SEQ ID NO: 132982 - RNA, 22 nt, Human
cagcuggaugggagaccauguu

SEQ ID NO: 132983 - RNA, 22 nt, Human
gcuggccucuacaggccggcca

SEQ ID NO: 132984 - RNA, 22 nt, Human
ugggcagaaggaagagccaccu

SEQ ID NO: 132985 - RNA, 22 nt, Human
aguggcuguuuauaggugggua

SEQ ID NO: 132986 - RNA, 22 nt, Human
ggugccaggcucccagcucagg

SEQ ID NO: 132987 - RNA, 22 nt, Human
aaaggugacugcagcagcuauu

SEQ ID NO: 132988 - RNA, 22 nt, Human
uggccagcccuucagccaugcc

SEQ ID NO: 132989 - RNA, 22 nt, Human
ucaaaguaaaaguauagaguuu

SEQ ID NO: 132990 - RNA, 22 nt, Human
auuacaguggacagcuaugcac

SEQ ID NO: 132991 - RNA, 22 nt, Human
aagcaaagaguuuaguggguga

SEQ ID NO: 132992 - RNA, 22 nt, Human
gguuauauaauucagugcuuuc

SEQ ID NO: 132993 - RNA, 22 nt, Human
aggggccugguuggccucuguu

SEQ ID NO: 132994 - RNA, 22 nt, Human
aauguuguuuuucugcaugucu

SEQ ID NO: 132995 - RNA, 22 nt, Human
acauuuuuuagagucccacauu

SEQ ID NO: 132996 - RNA, 22 nt, Human
cuaucuuucgauucuagcuuaa

SEQ ID NO: 132997 - RNA, 22 nt, Human
cagccacguagcccuuggccgu

SEQ ID NO: 132998 - RNA, 22 nt, Human
ggaggccaaggcaggcggauca

SEQ ID NO: 132999 - RNA, 18 nt, Human
cguuuuuccgggauugca

SEQ ID NO: 133000 - RNA, 22 nt, Human
aucuacccacugaacacaauau

SEQ ID NO: 133001 - RNA, 22 nt, Human
agccacagucaaccuguccaua

SEQ ID NO: 133002 - RNA, 19 nt, Human
gguguuucuucauuuucca

SEQ ID NO: 133003 - RNA, 22 nt, Human
gcucccugacucaguuccugag

SEQ ID NO: 133004 - RNA, 22 nt, Human
aggcagggucuugcuauguugc

SEQ ID NO: 133005 - RNA, 22 nt, Human
ccagcccuguaaggaugaggca

SEQ ID NO: 133006 - RNA, 22 nt, Human
gcugguuaggugagggugcgcc

SEQ ID NO: 133007 - RNA, 22 nt, Human
acuggcucagaguuccuagaga

SEQ ID NO: 133008 - RNA, 22 nt, Human
ugcuugugacagaacugugucc

SEQ ID NO: 133009 - RNA, 22 nt, Human
uuuccucuucgauuaaguuugg

SEQ ID NO: 133010 - RNA, 22 nt, Human
gcugggagugggcaagaugaga

SEQ ID NO: 133011 - RNA, 23 nt, Human
cuuuuaacuugaucugagaccag

SEQ ID NO: 133012 - RNA, 22 nt, Human
caggcugaggcaguaggguuug

SEQ ID NO: 133013 - RNA, 22 nt, Human
agggacagaugaaugacugagu

SEQ ID NO: 133014 - RNA, 22 nt, Human
agagacagaggcaauauagcuu

SEQ ID NO: 133015 - RNA, 22 nt, Human
uauguacauaacaugaaaugca

SEQ ID NO: 133016 - RNA, 22 nt, Human
ggaagggcaaaagagaugaacu

SEQ ID NO: 133017 - RNA, 22 nt, Human
auauucuuccaaaacaucauuu

SEQ ID NO: 133018 - RNA, 22 nt, Human
agcuggccuguuagagcugagu

SEQ ID NO: 133019 - RNA, 18 nt, Human
guuggcugcuguggcugg

SEQ ID NO: 133020 - RNA, 22 nt, Human
gcagggcuauuggaaggagaug

SEQ ID NO: 133021 - RNA, 22 nt, Human
cacucuccagcacaccccauuu

SEQ ID NO: 133022 - RNA, 22 nt, Human
aaguuguauauaccgcuuuaag

SEQ ID NO: 133023 - RNA, 22 nt, Human
accaaggagacaaagguguauu

SEQ ID NO: 133024 - RNA, 22 nt, Human
ugucucugagaugacucccacc

SEQ ID NO: 133025 - RNA, 22 nt, Human
uguggcuggauugauuuuaccu

SEQ ID NO: 133026 - RNA, 22 nt, Human
cuauuuucccauaugguugaca

SEQ ID NO: 133027 - RNA, 22 nt, Human
uguacauugucacucaucaagu

SEQ ID NO: 133028 - RNA, 19 nt, Human
ucccuggcgccucucgggc

SEQ ID NO: 133029 - RNA, 22 nt, Human
ggccaggaagggaagaucagca

SEQ ID NO: 133030 - RNA, 18 nt, Human
ucuuggaguaaugaucaa

SEQ ID NO: 133031 - RNA, 22 nt, Human
agcugccaucagccuuuggaug

SEQ ID NO: 133032 - RNA, 22 nt, Human
gauuucaccugaucuugucauc

SEQ ID NO: 133033 - RNA, 22 nt, Human
agccucugguccucccucagcu

SEQ ID NO: 133034 - RNA, 22 nt, Human
caguauguacucuuaucaugua

SEQ ID NO: 133035 - RNA, 22 nt, Human
cucuggagcaccgggcuaucca

SEQ ID NO: 133036 - RNA, 22 nt, Human
uuugugugaaaauauuuaaguu

SEQ ID NO: 133037 - RNA, 22 nt, Human
auacaucuuccuuuuaaaaugc

SEQ ID NO: 133038 - RNA, 22 nt, Human
uguagaaagaauauguuucaua

SEQ ID NO: 133039 - RNA, 22 nt, Human
cugcagggcagggccuccuggc

SEQ ID NO: 133040 - RNA, 22 nt, Human
acagaauuaucaggaaauguua

SEQ ID NO: 133041 - RNA, 22 nt, Human
ucugugugauuucagggaaguc

SEQ ID NO: 133042 - RNA, 23 nt, Human
aacaccaaggcucagagagauaa

SEQ ID NO: 133043 - RNA, 22 nt, Human
gcagcauuucucaaaggguggu

SEQ ID NO: 133044 - RNA, 22 nt, Human
ggagcugcuccuucagccaagu

SEQ ID NO: 133045 - RNA, 22 nt, Human
acuccugguuuguguccuggcu

SEQ ID NO: 133046 - RNA, 22 nt, Human
aaaguuuccugcuaagugcuau

SEQ ID NO: 133047 - RNA, 22 nt, Human
gcaaggcugagcacauuugcau

SEQ ID NO: 133048 - RNA, 22 nt, Human
acagggcauuuccucuaugugu

SEQ ID NO: 133049 - RNA, 22 nt, Human
gaggaaaauggaguguaauuaa

SEQ ID NO: 133050 - RNA, 22 nt, Human
gccugccuuugugaggaagcgg

SEQ ID NO: 133051 - RNA, 22 nt, Human
auuuucucacaauccuaugggg

SEQ ID NO: 133052 - RNA, 22 nt, Human
ccaggccugauugggaaucuug

SEQ ID NO: 133053 - RNA, 22 nt, Human
auuuuuccaauuaggauaaaga

SEQ ID NO: 133054 - RNA, 22 nt, Human
ccucugcagcagagagccagag

SEQ ID NO: 133055 - RNA, 17 nt, Human
aggccagaugaggcaag

SEQ ID NO: 133056 - RNA, 22 nt, Human
aggcuccuugcucacaggcuca

SEQ ID NO: 133057 - RNA, 22 nt, Human
cacaagagagugcgcguugcaa

SEQ ID NO: 133058 - RNA, 22 nt, Human
uuuucugcggugugaauggccu

SEQ ID NO: 133059 - RNA, 22 nt, Human
ccucagagguguggcaucucug

SEQ ID NO: 133060 - RNA, 22 nt, Human
agagcagauggccagggggccu

SEQ ID NO: 133061 - RNA, 22 nt, Human
ucaugucaguuucuucuauaaa

SEQ ID NO: 133062 - RNA, 22 nt, Human
auacaaguugugauaauguaaa

SEQ ID NO: 133063 - RNA, 23 nt, Human
ggcucugugcugggccugcagga

SEQ ID NO: 133064 - RNA, 22 nt, Human
agcugcuaugacaacaccagcc

SEQ ID NO: 133065 - RNA, 22 nt, Human
cuggcuucugggccagggcaga

SEQ ID NO: 133066 - RNA, 22 nt, Human
ggagauagacuuggugagccac

SEQ ID NO: 133067 - RNA, 22 nt, Human
augaguaagaccauaauuuuug

SEQ ID NO: 133068 - RNA, 22 nt, Human
cagcaggauagguuucuuugga

SEQ ID NO: 133069 - RNA, 22 nt, Human
ugucccaguuuaucugggacug

SEQ ID NO: 133070 - RNA, 22 nt, Human
cccagcccagcguucgaggggu

SEQ ID NO: 133071 - RNA, 22 nt, Human
gucacaggccuggaugaggggc

SEQ ID NO: 133072 - RNA, 20 nt, Human
ccagcugagccaaggggaga

SEQ ID NO: 133073 - RNA, 22 nt, Human
auggcugugagcaggcagcuuc

SEQ ID NO: 133074 - RNA, 22 nt, Human
aggugauguccacagcuugcag

SEQ ID NO: 133075 - RNA, 22 nt, Human
ucucaucucggaucagaaguga

SEQ ID NO: 133076 - RNA, 20 nt, Human
ugauauuucuggaaguggag

SEQ ID NO: 133077 - RNA, 22 nt, Human
aguggcugauuacaaacugagu

SEQ ID NO: 133078 - RNA, 21 nt, Human
cuugaaagguagagucuacag

SEQ ID NO: 133079 - RNA, 22 nt, Human
ccugccucaucaacuugucgug

SEQ ID NO: 133080 - RNA, 22 nt, Human
aguuuuaugcaguguucugaua

SEQ ID NO: 133081 - RNA, 22 nt, Human
aaaugaccagaauacaggcuuc

SEQ ID NO: 133082 - RNA, 22 nt, Human
gcagcugcagguggucccaugc

SEQ ID NO: 133083 - RNA, 22 nt, Human
uggcuccuucauucuccugcca

SEQ ID NO: 133084 - RNA, 22 nt, Human
uuuggacuuagccugcagaauu

SEQ ID NO: 133085 - RNA, 22 nt, Human
cugggcugagccugggcugugu

SEQ ID NO: 133086 - RNA, 22 nt, Human
uccagccuaggggaacagcugc

SEQ ID NO: 133087 - RNA, 22 nt, Human
cucuuugccuaacuguuuucaa

SEQ ID NO: 133088 - RNA, 22 nt, Human
ggcugccaggagaagcucagug

SEQ ID NO: 133089 - RNA, 23 nt, Human
cucucucuaccaugugaggacac

SEQ ID NO: 133090 - RNA, 22 nt, Human
cuuguccuuuacuugagacuca

SEQ ID NO: 133091 - RNA, 21 nt, Human
uuagcaguuguugauuuccag

SEQ ID NO: 133092 - RNA, 22 nt, Human
cuuuauguccuugaagaguugu

SEQ ID NO: 133093 - RNA, 22 nt, Human
gcaaggaccuuugagcgugcca

SEQ ID NO: 133094 - RNA, 22 nt, Human
ccacacugaaccucagugucuu

SEQ ID NO: 133095 - RNA, 22 nt, Human
gcauccagagguagccacugug

SEQ ID NO: 133096 - RNA, 18 nt, Human
uuaaguuuuacugcuuua

SEQ ID NO: 133097 - RNA, 23 nt, Human
uagggcagcugggagggacaugc

SEQ ID NO: 133098 - RNA, 22 nt, Human
gucccuggaauggacucugcgc

SEQ ID NO: 133099 - RNA, 17 nt, Human
ugaaggaaggaugaugu

SEQ ID NO: 133100 - RNA, 22 nt, Human
uuucacaucagagguagauuag

SEQ ID NO: 133101 - RNA, 21 nt, Human
aagaagcaauuuauuggaagg

SEQ ID NO: 133102 - RNA, 22 nt, Human
ucuaacuuguauguauaguuuu

SEQ ID NO: 133103 - RNA, 19 nt, Human
cacagggcaggucucaugu

SEQ ID NO: 133104 - RNA, 22 nt, Human
cagaguguuucuuugggugggu

SEQ ID NO: 133105 - RNA, 22 nt, Human
ugcuggaauaauuucauguuaa

SEQ ID NO: 133106 - RNA, 19 nt, Human
ggaagagaggaaaggugga

SEQ ID NO: 133107 - RNA, 23 nt, Human
agcuguguggccuugggcaaguu

SEQ ID NO: 133108 - RNA, 22 nt, Human
uccuggaguauuucuguggugu

SEQ ID NO: 133109 - RNA, 19 nt, Human
ugagagugaggaaggcuuc

SEQ ID NO: 133110 - RNA, 22 nt, Human
ucugucugcucauuuaccucag

SEQ ID NO: 133111 - RNA, 22 nt, Human
cucugugucagcugggugugca

SEQ ID NO: 133112 - RNA, 21 nt, Human
ccuggcuucagggugcacugg

SEQ ID NO: 133113 - RNA, 22 nt, Human
gccaggcuccccggaucccugg

SEQ ID NO: 133114 - RNA, 22 nt, Human
ggagcagagcauuucacagccu

SEQ ID NO: 133115 - RNA, 22 nt, Human
uugaaaguuuauggagucugca

SEQ ID NO: 133116 - RNA, 22 nt, Human
ucuggagaacuugcaagaggau

SEQ ID NO: 133117 - RNA, 22 nt, Human
ucagggcagaauccaaagaauu

SEQ ID NO: 133118 - RNA, 22 nt, Human
cacaagacuuauuuguguagaa

SEQ ID NO: 133119 - RNA, 22 nt, Human
ggcagccauacucagaccuggg

SEQ ID NO: 133120 - RNA, 21 nt, Human
gcugcugccccuagugaggcc

SEQ ID NO: 133121 - RNA, 22 nt, Human
agccuggaggaggaguugagca

SEQ ID NO: 133122 - RNA, 20 nt, Human
gugccuggagaagaggcugu

SEQ ID NO: 133123 - RNA, 22 nt, Human
aggcugggcuccgcccaacucc

SEQ ID NO: 133124 - RNA, 22 nt, Human
uacaggaggauuaucaaaggau

SEQ ID NO: 133125 - RNA, 22 nt, Human
gaggcagcaaaauauaucauaa

SEQ ID NO: 133126 - RNA, 22 nt, Human
aguauguugacuuauucuugga

SEQ ID NO: 133127 - RNA, 23 nt, Human
aguguguauugcugagggcagcu

SEQ ID NO: 133128 - RNA, 22 nt, Human
acauuucucuuagaguuggacu

SEQ ID NO: 133129 - RNA, 22 nt, Human
ggagccugcgggagcucccauu

SEQ ID NO: 133130 - RNA, 22 nt, Human
aguucuucauaaccuuacugug

SEQ ID NO: 133131 - RNA, 22 nt, Human
gugugagccaugauguguccag

SEQ ID NO: 133132 - RNA, 23 nt, Human
uggagaugccccacucccugucu

SEQ ID NO: 133133 - RNA, 22 nt, Human
aggucacacuuggaucauagaa

SEQ ID NO: 133134 - RNA, 22 nt, Human
aagaggaacugggggcugaguc

SEQ ID NO: 133135 - RNA, 22 nt, Human
uauuuccuguggauacuuuuag

SEQ ID NO: 133136 - RNA, 22 nt, Human
uuacauguggagucugauugca

SEQ ID NO: 133137 - RNA, 22 nt, Human
ggccuggcucuugcccagccug

SEQ ID NO: 133138 - RNA, 22 nt, Human
ugccugggaaccaauccuggcu

SEQ ID NO: 133139 - RNA, 22 nt, Human
ugucaugcccaggagcaaggua

SEQ ID NO: 133140 - RNA, 19 nt, Human
augucccaccgccccugag

SEQ ID NO: 133141 - RNA, 19 nt, Human
agcuccugggcucugggcc

SEQ ID NO: 133142 - RNA, 22 nt, Human
gaaucacgguauucugcacggg

SEQ ID NO: 133143 - RNA, 22 nt, Human
gccuggagaaaggaagguggga

SEQ ID NO: 133144 - RNA, 22 nt, Human
gucuggggaagucagggcauca

SEQ ID NO: 133145 - RNA, 22 nt, Human
aguguguccagaaaucuguauu

SEQ ID NO: 133146 - RNA, 22 nt, Human
cagggccaagcugcagcaucug

SEQ ID NO: 133147 - RNA, 22 nt, Human
uagcagcucugauucugggccc

SEQ ID NO: 133148 - RNA, 18 nt, Human
agcuggcccuggcugccg

SEQ ID NO: 133149 - RNA, 20 nt, Human
cuaucuccuggcgugccuuc

SEQ ID NO: 133150 - RNA, 22 nt, Human
ucuuuccauggccacacagucu

SEQ ID NO: 133151 - RNA, 22 nt, Human
ggaguucacugugcaggcucug

SEQ ID NO: 133152 - RNA, 22 nt, Human
guuaucaugcuucaucaucacu

SEQ ID NO: 133153 - RNA, 22 nt, Human
acuuggagagcauugcugggga

SEQ ID NO: 133154 - RNA, 22 nt, Human
ggcugccuccucgagacaggau

SEQ ID NO: 133155 - RNA, 22 nt, Human
gugauuccuauuaguacaugca

SEQ ID NO: 133156 - RNA, 17 nt, Human
gggcagggacuccuggg

SEQ ID NO: 133157 - RNA, 22 nt, Human
uaagcauaacuaaaaaugauuu

SEQ ID NO: 133158 - RNA, 22 nt, Human
uuacaguguuacuugaugucca

SEQ ID NO: 133159 - RNA, 22 nt, Human
uuuccagugauugcugcucuca

SEQ ID NO: 133160 - RNA, 22 nt, Human
uuuguaaaggccugaauuucag

SEQ ID NO: 133161 - RNA, 22 nt, Human
gugccuggcaugcgccggugcu

SEQ ID NO: 133162 - RNA, 20 nt, Human
agugugcauuuagagucugc

SEQ ID NO: 133163 - RNA, 22 nt, Human
ugcucccagggacucuggcugg

SEQ ID NO: 133164 - RNA, 22 nt, Human
gcuggccuccugcuagauggaa

SEQ ID NO: 133165 - RNA, 22 nt, Human
auguguauuacccuuucauucc

SEQ ID NO: 133166 - RNA, 22 nt, Human
gcaaaugaguuguaacauaaaa

SEQ ID NO: 133167 - RNA, 22 nt, Human
ucuuuucuggacucugcaugga

SEQ ID NO: 133168 - RNA, 22 nt, Human
uuuacaguauaguaggacucau

SEQ ID NO: 133169 - RNA, 22 nt, Human
uguacuuccccaaugacagcac

SEQ ID NO: 133170 - RNA, 22 nt, Human
agcaugaagacuucagagcuag

SEQ ID NO: 133171 - RNA, 22 nt, Human
ccaggcagagggauccccaucc

SEQ ID NO: 133172 - RNA, 22 nt, Human
cagacagaccugcaagggcaca

SEQ ID NO: 133173 - RNA, 22 nt, Human
uucuccuuccugguuuucaggc

SEQ ID NO: 133174 - RNA, 22 nt, Human
augagcugggccauccagugau

SEQ ID NO: 133175 - RNA, 18 nt, Human
gggcacuggggacuggag

SEQ ID NO: 133176 - RNA, 22 nt, Human
uuucacagcagaauuucugagg

SEQ ID NO: 133177 - RNA, 22 nt, Human
gagggcagugaauuuugaagcu

SEQ ID NO: 133178 - RNA, 22 nt, Human
ggcagcuggguuggccagaaac

SEQ ID NO: 133179 - RNA, 22 nt, Human
uguggcucggccagcugcugaa

SEQ ID NO: 133180 - RNA, 22 nt, Human
uaaggccaauuaacaaccaggg

SEQ ID NO: 133181 - RNA, 22 nt, Human
ucccagaaaaaggaggcuauga

SEQ ID NO: 133182 - RNA, 19 nt, Human
auagucuuuccaauuauac

SEQ ID NO: 133183 - RNA, 22 nt, Human
caagagcuggguggcaagcuag

SEQ ID NO: 133184 - RNA, 22 nt, Human
uggcucuggauuaaucuaggaa

SEQ ID NO: 133185 - RNA, 22 nt, Human
gcacacccucucaccagcacug

SEQ ID NO: 133186 - RNA, 22 nt, Human
gcagacuguaucaaugucagua

SEQ ID NO: 133187 - RNA, 22 nt, Human
caggagccccaggcugacaaua

SEQ ID NO: 133188 - RNA, 22 nt, Human
uaugcauagguaucuauacuca

SEQ ID NO: 133189 - RNA, 22 nt, Human
uguuuauuacaguucuuggaau

SEQ ID NO: 133190 - RNA, 22 nt, Human
caaagcucaugcucuuagccau

SEQ ID NO: 133191 - RNA, 22 nt, Human
cugggaggcaccgcgucgugcu

SEQ ID NO: 133192 - RNA, 22 nt, Human
aaggccagacaggaccacaucu

SEQ ID NO: 133193 - RNA, 22 nt, Human
ugacacagauuagagacauacc

SEQ ID NO: 133194 - RNA, 22 nt, Human
uaauuucuaauucauuuucagu

SEQ ID NO: 133195 - RNA, 22 nt, Human
aggugagugugacugcaagaga

SEQ ID NO: 133196 - RNA, 22 nt, Human
gucugaggaagaugcaggggga

SEQ ID NO: 133197 - RNA, 22 nt, Human
aggacccagaggcagaggacgu

SEQ ID NO: 133198 - RNA, 22 nt, Human
uccugcaggccuguucccagua

SEQ ID NO: 133199 - RNA, 22 nt, Human
gcugagguggagauugcaguga

SEQ ID NO: 133200 - RNA, 22 nt, Human
agucccagcucagaaccacuag

SEQ ID NO: 133201 - RNA, 22 nt, Human
cuguggcuaugguguacauacu

SEQ ID NO: 133202 - RNA, 22 nt, Human
gcuggcuguuggagguaccugc

SEQ ID NO: 133203 - RNA, 22 nt, Human
gagcagugaagacagaaguaca

SEQ ID NO: 133204 - RNA, 22 nt, Human
agauuucagguuggggcagaag

SEQ ID NO: 133205 - RNA, 22 nt, Human
ggagccuguggccgucacgacu

SEQ ID NO: 133206 - RNA, 22 nt, Human
ccugugcccucagccuggcucu

SEQ ID NO: 133207 - RNA, 22 nt, Human
uacauuugcuuugauuuucagc

SEQ ID NO: 133208 - RNA, 19 nt, Human
gggcuuggggcugaagccu

SEQ ID NO: 133209 - RNA, 22 nt, Human
cgaugguucuggcugcuuguau

SEQ ID NO: 133210 - RNA, 22 nt, Human
cucaggauggaagccuacagga

SEQ ID NO: 133211 - RNA, 22 nt, Human
uaguauauuaauucucacgguu

SEQ ID NO: 133212 - RNA, 22 nt, Human
uucaagaucuggguuuucagcu

SEQ ID NO: 133213 - RNA, 22 nt, Human
guguguguguaaaaauccagag

SEQ ID NO: 133214 - RNA, 22 nt, Human
ccagcucuggcuucuugcuggg

SEQ ID NO: 133215 - RNA, 22 nt, Human
caggggcuagcacuuaauguuu

SEQ ID NO: 133216 - RNA, 18 nt, Human
uuccaugauuccuuucac

SEQ ID NO: 133217 - RNA, 22 nt, Human
guuuguguaacaugaugaugau

SEQ ID NO: 133218 - RNA, 22 nt, Human
ggugucccaggccagcugugug

SEQ ID NO: 133219 - RNA, 22 nt, Human
cagcucccgccaucgggaggca

SEQ ID NO: 133220 - RNA, 22 nt, Human
caaggccacugcucagguuucc

SEQ ID NO: 133221 - RNA, 22 nt, Human
auguggcugucacagcauaaug

SEQ ID NO: 133222 - RNA, 22 nt, Human
ccugcugggccugagcaaugag

SEQ ID NO: 133223 - RNA, 22 nt, Human
aguuugaaauguuggcaauauu

SEQ ID NO: 133224 - RNA, 22 nt, Human
aggucauuuuugccuucuauuu

SEQ ID NO: 133225 - RNA, 20 nt, Human
gucagaggacccuagagcga

SEQ ID NO: 133226 - RNA, 23 nt, Human
uccuuccuuugagaggcuccauc

SEQ ID NO: 133227 - RNA, 22 nt, Human
auugaaagauaggcuacugugg

SEQ ID NO: 133228 - RNA, 22 nt, Human
guccagggcuaaaucagguucc

SEQ ID NO: 133229 - RNA, 22 nt, Human
ugccuggguccaggccaagccu

SEQ ID NO: 133230 - RNA, 22 nt, Human
ugccugaggagucagggcaggu

SEQ ID NO: 133231 - RNA, 22 nt, Human
ucauacaucuguccuggagcuc

SEQ ID NO: 133232 - RNA, 22 nt, Human
augucuuucucacagccaguuc

SEQ ID NO: 133233 - RNA, 22 nt, Human
gccuccugagaagccacaggcu

SEQ ID NO: 133234 - RNA, 22 nt, Human
uagucuuuuuaauaaauaaugc

SEQ ID NO: 133235 - RNA, 22 nt, Human
cagugcuccugauguacccuug

SEQ ID NO: 133236 - RNA, 22 nt, Human
ccucccuuggccauagccagcc

SEQ ID NO: 133237 - RNA, 22 nt, Human
cauugcccaguaggaucaccag

SEQ ID NO: 133238 - RNA, 22 nt, Human
gcugugugacugagagccuggc

SEQ ID NO: 133239 - RNA, 22 nt, Human
aucuguguguucaggaaguccu

SEQ ID NO: 133240 - RNA, 22 nt, Human
gcccagcacuaaaagcuuugcu

SEQ ID NO: 133241 - RNA, 22 nt, Human
cccugggcagucugcacuucag

SEQ ID NO: 133242 - RNA, 21 nt, Human
agcuuccugcagugggagguc

SEQ ID NO: 133243 - RNA, 22 nt, Human
cuggcucuaucuccaaggcugg

SEQ ID NO: 133244 - RNA, 22 nt, Human
uggugaagucagcggagcccgg

SEQ ID NO: 133245 - RNA, 22 nt, Human
agguaggguuaauggagauaua

SEQ ID NO: 133246 - RNA, 22 nt, Human
cauuuucucaaugaacccucuu

SEQ ID NO: 133247 - RNA, 22 nt, Human
aguguuccacacaucuggggaa

SEQ ID NO: 133248 - RNA, 22 nt, Human
gccuguccuggaugcucugcaa

SEQ ID NO: 133249 - RNA, 22 nt, Human
gcgugugugauaugccucugca

SEQ ID NO: 133250 - RNA, 22 nt, Human
cugugugcugaaaugcagugag

SEQ ID NO: 133251 - RNA, 22 nt, Human
caccuggcuggaagugcuccgg

SEQ ID NO: 133252 - RNA, 22 nt, Human
aguuuauuguauaugguaguuu

SEQ ID NO: 133253 - RNA, 22 nt, Human
gcugggcuugguuucccugcuu

SEQ ID NO: 133254 - RNA, 22 nt, Human
guguggcugaaaucaaggcagg

SEQ ID NO: 133255 - RNA, 22 nt, Human
ccaggcuggauuuugcaguuca

SEQ ID NO: 133256 - RNA, 22 nt, Human
cagucucucugaaguauuaaga

SEQ ID NO: 133257 - RNA, 19 nt, Human
ugaguucugugguucucaa

SEQ ID NO: 133258 - RNA, 22 nt, Human
guggccuggaguuugauguagg

SEQ ID NO: 133259 - RNA, 22 nt, Human
aguggggaagagcaugggcccu

SEQ ID NO: 133260 - RNA, 22 nt, Human
ucuggccagugaaaugcagaau

SEQ ID NO: 133261 - RNA, 22 nt, Human
cuauauuuggugagggaugucu

SEQ ID NO: 133262 - RNA, 22 nt, Human
agccuggaggccaggagacagu

SEQ ID NO: 133263 - RNA, 22 nt, Human
gagagaagaaagccaugguccu

SEQ ID NO: 133264 - RNA, 22 nt, Human
aggcugcuucagcugcagggag

SEQ ID NO: 133265 - RNA, 22 nt, Human
ggaaagaccugagauaggaaua

SEQ ID NO: 133266 - RNA, 19 nt, Human
ucaucucacagggccuggc

SEQ ID NO: 133267 - RNA, 22 nt, Human
cauaauaucuccgauuacuugc

SEQ ID NO: 133268 - RNA, 21 nt, Human
agcagcagaucuggugagggc

SEQ ID NO: 133269 - RNA, 22 nt, Human
gggcagcucucacagcagccaa

SEQ ID NO: 133270 - RNA, 22 nt, Human
aaggcacugacugugcagggga

SEQ ID NO: 133271 - RNA, 22 nt, Human
cucucugaggaaggagcaucug

SEQ ID NO: 133272 - RNA, 22 nt, Human
cccuccagcucaaagcaaccgg

SEQ ID NO: 133273 - RNA, 22 nt, Human
gaaggcuugcagcucuguggca

SEQ ID NO: 133274 - RNA, 23 nt, Human
uccuucagagccucccuccaagc

SEQ ID NO: 133275 - RNA, 22 nt, Human
gcucaggaucccaggggugugc

SEQ ID NO: 133276 - RNA, 22 nt, Human
cagcugaguuuccaagucugcc

SEQ ID NO: 133277 - RNA, 22 nt, Human
cucuuuccucagccacagucua

SEQ ID NO: 133278 - RNA, 22 nt, Human
aucagcaaguccuguuaauucu

SEQ ID NO: 133279 - RNA, 22 nt, Human
aggccagguggucaugcuugcu

SEQ ID NO: 133280 - RNA, 22 nt, Human
aaggcugaguaaaacagagaac

SEQ ID NO: 133281 - RNA, 22 nt, Human
aaaucuaggcucauccuggucc

SEQ ID NO: 133282 - RNA, 22 nt, Human
cuggagcuaauaauccaucuga

SEQ ID NO: 133283 - RNA, 22 nt, Human
cugcagagcuaggcugagugaa

SEQ ID NO: 133284 - RNA, 22 nt, Human
agggggcaggagagaccugcug

SEQ ID NO: 133285 - RNA, 17 nt, Human
gaacuuuuauuaaauuc

SEQ ID NO: 133286 - RNA, 22 nt, Human
cagugccucuuaagugucaccc

SEQ ID NO: 133287 - RNA, 21 nt, Human
gucagcagauccagcacuugu

SEQ ID NO: 133288 - RNA, 22 nt, Human
gcugccacauuuucaggacuaa

SEQ ID NO: 133289 - RNA, 22 nt, Human
cagacacagauaugcauauggc

SEQ ID NO: 133290 - RNA, 23 nt, Human
uuacagcuaacugcuguuauuag

SEQ ID NO: 133291 - RNA, 18 nt, Human
aaugcacacauuuacucc

SEQ ID NO: 133292 - RNA, 21 nt, Human
ugccagggauuuacagagccu

SEQ ID NO: 133293 - RNA, 22 nt, Human
agccaagcacucaacuccugga

SEQ ID NO: 133294 - RNA, 22 nt, Human
aggcacugagaggcuguguugc

SEQ ID NO: 133295 - RNA, 22 nt, Human
ugguccagacauuucugaggua

SEQ ID NO: 133296 - RNA, 22 nt, Human
gggacuguaaauucauauggcc

SEQ ID NO: 133297 - RNA, 19 nt, Human
ugccuggcaccagcuccac

SEQ ID NO: 133298 - RNA, 22 nt, Human
aaaugcuguaacugauauucug

SEQ ID NO: 133299 - RNA, 22 nt, Human
gccugugcuuaacugacgugag

SEQ ID NO: 133300 - RNA, 22 nt, Human
guuugcauaaaguggaugcagg

SEQ ID NO: 133301 - RNA, 19 nt, Human
uguguguauuucaguucuu

SEQ ID NO: 133302 - RNA, 22 nt, Human
gguuggaggugggaauagcuag

SEQ ID NO: 133303 - RNA, 22 nt, Human
uucuucaugcuguugcugcuug

SEQ ID NO: 133304 - RNA, 22 nt, Human
cagggugggcacccagccucca

SEQ ID NO: 133305 - RNA, 22 nt, Human
cuuuacaggaaaagguggcugu

SEQ ID NO: 133306 - RNA, 22 nt, Human
uauacaguuugaguucuugcau

SEQ ID NO: 133307 - RNA, 22 nt, Human
acagaggccccgugggagagcc

SEQ ID NO: 133308 - RNA, 22 nt, Human
guguccagagaaacucacagcu

SEQ ID NO: 133309 - RNA, 22 nt, Human
gcagggugugucucauacaguu

SEQ ID NO: 133310 - RNA, 22 nt, Human
ucuucagacccuuagcugugau

SEQ ID NO: 133311 - RNA, 22 nt, Human
cugggcacacagugacucugca

SEQ ID NO: 133312 - RNA, 22 nt, Human
gaggaguggaguugcuggguug

SEQ ID NO: 133313 - RNA, 22 nt, Human
gucaggaugcuauuguuauuaa

SEQ ID NO: 133314 - RNA, 21 nt, Human
auuaacuuguuaaccuaaagu

SEQ ID NO: 133315 - RNA, 22 nt, Human
acucucagaggguggcagcaau

SEQ ID NO: 133316 - RNA, 22 nt, Human
agcucccagcagagcuggccac

SEQ ID NO: 133317 - RNA, 22 nt, Human
cacagggcagagaccugggugc

SEQ ID NO: 133318 - RNA, 22 nt, Human
aaguuacuggcaagggcugcag

SEQ ID NO: 133319 - RNA, 19 nt, Human
gcucugagaggggcauggg

SEQ ID NO: 133320 - RNA, 22 nt, Human
uuucuucuguuuguaguuacac

SEQ ID NO: 133321 - RNA, 22 nt, Human
aguuuaugaaacacagauuuga

SEQ ID NO: 133322 - RNA, 22 nt, Human
ggggcuggcucacuaagagacu

SEQ ID NO: 133323 - RNA, 22 nt, Human
cagcagcagccccaggaagguu

SEQ ID NO: 133324 - RNA, 22 nt, Human
uugagggucuggaucugcugcu

SEQ ID NO: 133325 - RNA, 20 nt, Human
ugcuugucaugcacucaggc

SEQ ID NO: 133326 - RNA, 22 nt, Human
aaaucuggccccuugccuauuu

SEQ ID NO: 133327 - RNA, 22 nt, Human
gagugguaggcaguguuaggaa

SEQ ID NO: 133328 - RNA, 22 nt, Human
cucccaagggguaagggagcug

SEQ ID NO: 133329 - RNA, 21 nt, Human
ugcuggccucaagggugacuu

SEQ ID NO: 133330 - RNA, 22 nt, Human
ugaguaauaaacugucuugcuc

SEQ ID NO: 133331 - RNA, 22 nt, Human
guaugugugcaaauguaaauau

SEQ ID NO: 133332 - RNA, 22 nt, Human
ggugggcaacauuuggccugag

SEQ ID NO: 133333 - RNA, 18 nt, Human
guaggucaguaccaagca

SEQ ID NO: 133334 - RNA, 22 nt, Human
acauacuaugaauacauguguc

SEQ ID NO: 133335 - RNA, 22 nt, Human
gggaggugauggcaagcagcgg

SEQ ID NO: 133336 - RNA, 22 nt, Human
ccugggcaucucaugcaccugc

SEQ ID NO: 133337 - RNA, 22 nt, Human
ucucaccauggugcuugcuuau

SEQ ID NO: 133338 - RNA, 22 nt, Human
cagcaggauuugaaaggaagag

SEQ ID NO: 133339 - RNA, 22 nt, Human
ggggcagaaguagugccccuga

SEQ ID NO: 133340 - RNA, 23 nt, Human
agccucuuuucuccugcccugca

SEQ ID NO: 133341 - RNA, 18 nt, Human
uggcagcaggaagccauu

SEQ ID NO: 133342 - RNA, 21 nt, Human
ucauuugugaucugauuucca

SEQ ID NO: 133343 - RNA, 22 nt, Human
cauggcagagaaggggaacugg

SEQ ID NO: 133344 - RNA, 22 nt, Human
uagcugcugcagcacagggagg

SEQ ID NO: 133345 - RNA, 22 nt, Human
uggcuccuaucaaggagugggu

SEQ ID NO: 133346 - RNA, 22 nt, Human
gcucccucugcucaggcacuug

SEQ ID NO: 133347 - RNA, 22 nt, Human
cagucucagaggugggaguggg

SEQ ID NO: 133348 - RNA, 22 nt, Human
aggccugaaguguggagugggg

SEQ ID NO: 133349 - RNA, 22 nt, Human
ucagagccccuccgcuguccca

SEQ ID NO: 133350 - RNA, 18 nt, Human
acugugugaauuagcucc

SEQ ID NO: 133351 - RNA, 21 nt, Human
agagaauugccuuagauguuc

SEQ ID NO: 133352 - RNA, 22 nt, Human
gccugucugcgucacgcuuauu

SEQ ID NO: 133353 - RNA, 22 nt, Human
uggguggaauaaaucaguucug

SEQ ID NO: 133354 - RNA, 22 nt, Human
cucaggauguacuacagaaggc

SEQ ID NO: 133355 - RNA, 22 nt, Human
ugcuggcccuggcucagggaac

SEQ ID NO: 133356 - RNA, 22 nt, Human
gcucucugccauaugaggauac

SEQ ID NO: 133357 - RNA, 22 nt, Human
cucucaggcuugggucguggca

SEQ ID NO: 133358 - RNA, 22 nt, Human
gaggggcucuugggcaugaagg

SEQ ID NO: 133359 - RNA, 22 nt, Human
ugggcagaggcucugaagucca

SEQ ID NO: 133360 - RNA, 22 nt, Human
aaggagaguacaggaguuggua

SEQ ID NO: 133361 - RNA, 22 nt, Human
aggagcugcauggauaccuggu

SEQ ID NO: 133362 - RNA, 22 nt, Human
ugcccuguuccugccuccagcu

SEQ ID NO: 133363 - RNA, 22 nt, Human
aguggcaggcggagauguagga

SEQ ID NO: 133364 - RNA, 22 nt, Human
cagcuugggucaggugccugcu

SEQ ID NO: 133365 - RNA, 22 nt, Human
caguuucuuaucuucaaaauug

SEQ ID NO: 133366 - RNA, 22 nt, Human
gagcugucucuauaugaaugcu

SEQ ID NO: 133367 - RNA, 22 nt, Human
aggggaggagcuuuucuugccu

SEQ ID NO: 133368 - RNA, 22 nt, Human
ccugggugucaugggcagcugg

SEQ ID NO: 133369 - RNA, 22 nt, Human
ucugucugcaccuaagcacagu

SEQ ID NO: 133370 - RNA, 22 nt, Human
cacagggccuugugugacugca

SEQ ID NO: 133371 - RNA, 22 nt, Human
uucuggagaucugccuauggga

SEQ ID NO: 133372 - RNA, 22 nt, Human
uuagcaguucauugauuaucgu

SEQ ID NO: 133373 - RNA, 22 nt, Human
gggcguggauggucagugcagg

SEQ ID NO: 133374 - RNA, 22 nt, Human
caggugggcuugggagaacacu

SEQ ID NO: 133375 - RNA, 22 nt, Human
gccuucagcggccgcucgcugc

SEQ ID NO: 133376 - RNA, 22 nt, Human
cuuccuggccauugccauggca

SEQ ID NO: 133377 - RNA, 22 nt, Human
gcugucagaaggugaaggguaa

SEQ ID NO: 133378 - RNA, 22 nt, Human
caugucuguguacacaugcaca

SEQ ID NO: 133379 - RNA, 20 nt, Human
acuggagccaucucagccua

SEQ ID NO: 133380 - RNA, 22 nt, Human
ucccacucccaggcaggccucu

SEQ ID NO: 133381 - RNA, 16 nt, Human
auuuccagauuaugca

SEQ ID NO: 133382 - RNA, 22 nt, Human
gcugauccuuuuaugucuagcu

SEQ ID NO: 133383 - RNA, 22 nt, Human
uucaagaucuuccaaaggauac

SEQ ID NO: 133384 - RNA, 22 nt, Human
auuauguaacugugguucagca

SEQ ID NO: 133385 - RNA, 22 nt, Human
ggagggcucaauugacuccuga

SEQ ID NO: 133386 - RNA, 22 nt, Human
ccuccagcugccucagucucuu

SEQ ID NO: 133387 - RNA, 22 nt, Human
cuuuacagcuuagugguaugga

SEQ ID NO: 133388 - RNA, 22 nt, Human
ggucucagaucuuuauuaaggc

SEQ ID NO: 133389 - RNA, 22 nt, Human
guguggcugugggagauguuca

SEQ ID NO: 133390 - RNA, 22 nt, Human
ugagcuggucacuccuucugaa

SEQ ID NO: 133391 - RNA, 22 nt, Human
caaggccauauugccuguaugu

SEQ ID NO: 133392 - RNA, 22 nt, Human
aaauaauuauagcgagucuauc

SEQ ID NO: 133393 - RNA, 22 nt, Human
uggcucugcaccucaguguacc

SEQ ID NO: 133394 - RNA, 22 nt, Human
uuguguguagacucagccauug

SEQ ID NO: 133395 - RNA, 22 nt, Human
aguggcugucuuccaaaaucug

SEQ ID NO: 133396 - RNA, 22 nt, Human
cugggcacaaguggcccuggau

SEQ ID NO: 133397 - RNA, 22 nt, Human
aggagccaugagugacaucaca

SEQ ID NO: 133398 - RNA, 22 nt, Human
guguacauagaauugugcuuug

SEQ ID NO: 133399 - RNA, 22 nt, Human
cagcaauaguguguuuguuuca

SEQ ID NO: 133400 - RNA, 23 nt, Human
gccaggcuccggucuguggccac

SEQ ID NO: 133401 - RNA, 22 nt, Human
aaaugcauuuuuaauuagaccc

SEQ ID NO: 133402 - RNA, 22 nt, Human
agucccagaucuccauucgguc

SEQ ID NO: 133403 - RNA, 22 nt, Human
uuuccucuccggggccuccagg

SEQ ID NO: 133404 - RNA, 22 nt, Human
agccuucaguaaauccacugug

SEQ ID NO: 133405 - RNA, 22 nt, Human
aguggcugcuucugguugcucc

SEQ ID NO: 133406 - RNA, 22 nt, Human
ggagcagagcugggcuuggcug

SEQ ID NO: 133407 - RNA, 22 nt, Human
ucagaagagcuggugcugccug

SEQ ID NO: 133408 - RNA, 19 nt, Human
ggcuccuguggcugcagcc

SEQ ID NO: 133409 - RNA, 22 nt, Human
gcugagcugggacaguccuggg

SEQ ID NO: 133410 - RNA, 20 nt, Human
uauuuagauucaaguaugga

SEQ ID NO: 133411 - RNA, 22 nt, Human
uagcuaucuguguccagaucca

SEQ ID NO: 133412 - RNA, 22 nt, Human
gagcugccagacaugggaauga

SEQ ID NO: 133413 - RNA, 22 nt, Human
ugaagcagcaaaugaugggaga

SEQ ID NO: 133414 - RNA, 18 nt, Human
auguuucucuuggcucug

SEQ ID NO: 133415 - RNA, 22 nt, Human
ucccagccauuccuuuaggugu

SEQ ID NO: 133416 - RNA, 22 nt, Human
cugugcugcagacgcaguagcu

SEQ ID NO: 133417 - RNA, 22 nt, Human
ugggaauggaugcuaagugcua

SEQ ID NO: 133418 - RNA, 22 nt, Human
agcuggagaauguggaugaucc

SEQ ID NO: 133419 - RNA, 22 nt, Human
gcagcugguuaaugggagaauu

SEQ ID NO: 133420 - RNA, 22 nt, Human
ggccuuggugcucuguguugca

SEQ ID NO: 133421 - RNA, 22 nt, Human
aguguguacauaauuguacgcc

SEQ ID NO: 133422 - RNA, 22 nt, Human
cccaggcagucuggcucuaaag

SEQ ID NO: 133423 - RNA, 22 nt, Human
uuauccuggauuauauauguga

SEQ ID NO: 133424 - RNA, 22 nt, Human
ugccagugggugugcagagacu

SEQ ID NO: 133425 - RNA, 22 nt, Human
uuuuucaagacaaccugcaugu

SEQ ID NO: 133426 - RNA, 22 nt, Human
ucuuugcagaauuuaacuuugc

SEQ ID NO: 133427 - RNA, 22 nt, Human
uguccucuuccagugcuccuuc

SEQ ID NO: 133428 - RNA, 22 nt, Human
cuggagagaccgaaagaggcug

SEQ ID NO: 133429 - RNA, 22 nt, Human
ccucccaccguaucucaguggc

SEQ ID NO: 133430 - RNA, 22 nt, Human
gaggccugcagcguggucccug

SEQ ID NO: 133431 - RNA, 22 nt, Human
cuuuagcaacgaugaugauauu

SEQ ID NO: 133432 - RNA, 22 nt, Human
ccccaccugugcgucugccgca

SEQ ID NO: 133433 - RNA, 22 nt, Human
uggcucugucgccguuuggaau

SEQ ID NO: 133434 - RNA, 22 nt, Human
ucagcugccucucccuggaaga

SEQ ID NO: 133435 - RNA, 22 nt, Human
gaucuucucuuuaguagaaaca

SEQ ID NO: 133436 - RNA, 22 nt, Human
acuggcaguggcagcagaaaga

SEQ ID NO: 133437 - RNA, 22 nt, Human
uccaagggcagccauagaacuu

SEQ ID NO: 133438 - RNA, 22 nt, Human
ugccagcacaaguuaagagauc

SEQ ID NO: 133439 - RNA, 22 nt, Human
cacugcauggaugauggcugua

SEQ ID NO: 133440 - RNA, 23 nt, Human
gccugccugaccugugcaaaguc

SEQ ID NO: 133441 - RNA, 22 nt, Human
agugaaauuuguuuagauaggu

SEQ ID NO: 133442 - RNA, 22 nt, Human
uuugcagucuggccugcuuugg

SEQ ID NO: 133443 - RNA, 22 nt, Human
cugaggaugguguggucuucuc

SEQ ID NO: 133444 - RNA, 22 nt, Human
ggcagcuggccuccucgcccac

SEQ ID NO: 133445 - RNA, 22 nt, Human
cccagcacaggcaauuccauac

SEQ ID NO: 133446 - RNA, 22 nt, Human
cucucuggcuuggcacggagau

SEQ ID NO: 133447 - RNA, 22 nt, Human
acaguguagaauccuguacuua

SEQ ID NO: 133448 - RNA, 22 nt, Human
uaaugcacaugacugaacuauu

SEQ ID NO: 133449 - RNA, 22 nt, Human
cuguggcuguauuuggccagag

SEQ ID NO: 133450 - RNA, 22 nt, Human
cucucugggggccaugccaaga

SEQ ID NO: 133451 - RNA, 22 nt, Human
cagccccucccucaggcaggug

SEQ ID NO: 133452 - RNA, 22 nt, Human
agacaggacacaagcugcauaa

SEQ ID NO: 133453 - RNA, 22 nt, Human
gucuucaacaauaacuaccacu

SEQ ID NO: 133454 - RNA, 22 nt, Human
guugggaaggcaagaaguagaa

SEQ ID NO: 133455 - RNA, 22 nt, Human
cugcugcauuccucuuuaugag

SEQ ID NO: 133456 - RNA, 22 nt, Human
accuggcaugaagcaugccuua

SEQ ID NO: 133457 - RNA, 22 nt, Human
aguaacaagugccaacguuaga

SEQ ID NO: 133458 - RNA, 22 nt, Human
uaauuuuccacucuguuuaucu

SEQ ID NO: 133459 - RNA, 22 nt, Human
gcuuuacagagaaaguuugccu

SEQ ID NO: 133460 - RNA, 22 nt, Human
cccauuuaucccaagguuacuc

SEQ ID NO: 133461 - RNA, 22 nt, Human
ccaggggcuggugcugagcugg

SEQ ID NO: 133462 - RNA, 22 nt, Human
agccuguccagaggacagggcu

SEQ ID NO: 133463 - RNA, 22 nt, Human
acccaggccugagagacaggag

SEQ ID NO: 133464 - RNA, 22 nt, Human
ucacugcucucuaagcaucgcc

SEQ ID NO: 133465 - RNA, 22 nt, Human
aggcucagcaucugauucauau

SEQ ID NO: 133466 - RNA, 22 nt, Human
gagccagcugagcugcacuguc

SEQ ID NO: 133467 - RNA, 22 nt, Human
ccagccuggacugggucuugug

SEQ ID NO: 133468 - RNA, 22 nt, Human
uucuuucugaauacaguugagu

SEQ ID NO: 133469 - RNA, 22 nt, Human
caggccugacccugagcuucac

SEQ ID NO: 133470 - RNA, 22 nt, Human
cagcaggacccaggaauccugc

SEQ ID NO: 133471 - RNA, 22 nt, Human
cagaaauguucuaaugauucag

SEQ ID NO: 133472 - RNA, 22 nt, Human
ccuucuucuguguggcccaaga

SEQ ID NO: 133473 - RNA, 22 nt, Human
uccauuuucaucucauguauaa

SEQ ID NO: 133474 - RNA, 22 nt, Human
ggcccugggaugcucagcagug

SEQ ID NO: 133475 - RNA, 22 nt, Human
uggcaguggcuuugcuggugga

SEQ ID NO: 133476 - RNA, 22 nt, Human
cacagaauaaauugguaucaga

SEQ ID NO: 133477 - RNA, 22 nt, Human
gagacugauggggcucccagaa

SEQ ID NO: 133478 - RNA, 22 nt, Human
uaauuccaaguugagacaugca

SEQ ID NO: 133479 - RNA, 22 nt, Human
acugucucucuagcaguucagg

SEQ ID NO: 133480 - RNA, 22 nt, Human
uagagcuggaauuugcagcaag

SEQ ID NO: 133481 - RNA, 22 nt, Human
uuuacacugccauucugaauac

SEQ ID NO: 133482 - RNA, 22 nt, Human
aagagcuggcccaaucugagca

SEQ ID NO: 133483 - RNA, 22 nt, Human
ucagacaguuugcagugugccu

SEQ ID NO: 133484 - RNA, 22 nt, Human
uugcaaaagccgaggcacucca

SEQ ID NO: 133485 - RNA, 22 nt, Human
cugggacacccaaggaaagagc

SEQ ID NO: 133486 - RNA, 22 nt, Human
guggagacgggacagaagcuaa

SEQ ID NO: 133487 - RNA, 22 nt, Human
ucucuguacaguacaugccgug

SEQ ID NO: 133488 - RNA, 22 nt, Human
cucuccagaucugcugagccag

SEQ ID NO: 133489 - RNA, 22 nt, Human
acuguuuucuuagcucccugcu

SEQ ID NO: 133490 - RNA, 22 nt, Human
uagagcugauaaugaggccaag

SEQ ID NO: 133491 - RNA, 23 nt, Human
uggcuggcagaaacugaagcaug

SEQ ID NO: 133492 - RNA, 22 nt, Human
auucauuuagguauucacuuac

SEQ ID NO: 133493 - RNA, 22 nt, Human
cacuggcaugugaggcgguggc

SEQ ID NO: 133494 - RNA, 18 nt, Human
uggcucagauggcuuuaa

SEQ ID NO: 133495 - RNA, 22 nt, Human
cagagggcucuuggcugccugc

SEQ ID NO: 133496 - RNA, 22 nt, Human
auucuucaucagagaugcacua

SEQ ID NO: 133497 - RNA, 22 nt, Human
uuuuaaucaugcuucuaugucc

SEQ ID NO: 133498 - RNA, 20 nt, Human
gugugaagcccucaggagga

SEQ ID NO: 133499 - RNA, 22 nt, Human
uucugggagagaaagggccuug

SEQ ID NO: 133500 - RNA, 22 nt, Human
gggagcugagggaccucugugg

SEQ ID NO: 133501 - RNA, 22 nt, Human
cgagaguggacagggcgcagcu

SEQ ID NO: 133502 - RNA, 22 nt, Human
ucucaggacuuugggaagcuca

SEQ ID NO: 133503 - RNA, 21 nt, Human
ucuuguccuugcucucccacu

SEQ ID NO: 133504 - RNA, 22 nt, Human
gggcuggaggugagcaggacag

SEQ ID NO: 133505 - RNA, 22 nt, Human
aaaaucugcuuccuuuuacaga

SEQ ID NO: 133506 - RNA, 21 nt, Human
gggagcuggaaacugggugac

SEQ ID NO: 133507 - RNA, 22 nt, Human
ccuuuacaguagcccuuuugaa

SEQ ID NO: 133508 - RNA, 22 nt, Human
ugaaaucuucacuaagucucuu

SEQ ID NO: 133509 - RNA, 22 nt, Human
acagaaauugggcaaauggaag

SEQ ID NO: 133510 - RNA, 22 nt, Human
ggugcucaagagggcauccucu

SEQ ID NO: 133511 - RNA, 22 nt, Human
gugguuguuuaggucguggauc

SEQ ID NO: 133512 - RNA, 22 nt, Human
ggcugcaguuugucuuuugcuu

SEQ ID NO: 133513 - RNA, 22 nt, Human
agaggcuggauugagcauagac

SEQ ID NO: 133514 - RNA, 22 nt, Human
augcucuggaguacgugaaauu

SEQ ID NO: 133515 - RNA, 20 nt, Human
cccugcagccaugggagugg

SEQ ID NO: 133516 - RNA, 20 nt, Human
cuucuucagccuaugcuuca

SEQ ID NO: 133517 - RNA, 22 nt, Human
uaaauuguuuucuagaaguugu

SEQ ID NO: 133518 - RNA, 22 nt, Human
uagcugccagaccauucuuacu

SEQ ID NO: 133519 - RNA, 22 nt, Human
guuacagugcauguggcuucug

SEQ ID NO: 133520 - RNA, 23 nt, Human
uuuauauuccuaaugucuugagc

SEQ ID NO: 133521 - RNA, 22 nt, Human
gaucuucuagcagaaguaauuu

SEQ ID NO: 133522 - RNA, 22 nt, Human
uguacauagaucuugaaaauua

SEQ ID NO: 133523 - RNA, 22 nt, Human
gggcagccucggugccugcugc

SEQ ID NO: 133524 - RNA, 22 nt, Human
ccagcagacacacaggcguggg

SEQ ID NO: 133525 - RNA, 22 nt, Human
aaagacugguguguuacauaua

SEQ ID NO: 133526 - RNA, 22 nt, Human
ugucccaggccucauguugcca

SEQ ID NO: 133527 - RNA, 22 nt, Human
ugcuggcugggcugcuggagac

SEQ ID NO: 133528 - RNA, 22 nt, Human
caagauggagaagcagcaaggg

SEQ ID NO: 133529 - RNA, 19 nt, Human
ggaaacaggggccagagga

SEQ ID NO: 133530 - RNA, 22 nt, Human
cugcccagaagcuuagagcuua

SEQ ID NO: 133531 - RNA, 22 nt, Human
caaaagauacuugcaucuaacu

SEQ ID NO: 133532 - RNA, 22 nt, Human
cagagggagcccuccaggagca

SEQ ID NO: 133533 - RNA, 22 nt, Human
uuucauguuuucuuaaauggca

SEQ ID NO: 133534 - RNA, 22 nt, Human
cacuuaagcaguuaauuuaucu

SEQ ID NO: 133535 - RNA, 22 nt, Human
ucagucuuugcuuaugacaaua

SEQ ID NO: 133536 - RNA, 22 nt, Human
auaaggcagaaaugauucuagu

SEQ ID NO: 133537 - RNA, 22 nt, Human
ugaggccagucucaucacaggc

SEQ ID NO: 133538 - RNA, 22 nt, Human
uuugcaauuugugcugcaaaug

SEQ ID NO: 133539 - RNA, 22 nt, Human
guuuuguugcugcagagcucaa

SEQ ID NO: 133540 - RNA, 22 nt, Human
uggagcugggaguccugggcug

SEQ ID NO: 133541 - RNA, 22 nt, Human
cccugagagugagugccaccuu

SEQ ID NO: 133542 - RNA, 22 nt, Human
uccagccaugcaugacaaucac

SEQ ID NO: 133543 - RNA, 22 nt, Human
auuguucuguagugacauguag

SEQ ID NO: 133544 - RNA, 22 nt, Human
ugggcagacuaaggucaaagcu

SEQ ID NO: 133545 - RNA, 22 nt, Human
uucucccugguauuuacuuagu

SEQ ID NO: 133546 - RNA, 22 nt, Human
gcuggcuguaucaccuggccag

SEQ ID NO: 133547 - RNA, 22 nt, Human
uggcucagugaagagauaacuu

SEQ ID NO: 133548 - RNA, 22 nt, Human
acaggcugcugagccauuugcu

SEQ ID NO: 133549 - RNA, 22 nt, Human
cugugucuucacauuugugugc

SEQ ID NO: 133550 - RNA, 22 nt, Human
uugaggagucaggggcacggaa

SEQ ID NO: 133551 - RNA, 22 nt, Human
cuucuccucugaguccugggag

SEQ ID NO: 133552 - RNA, 22 nt, Human
agaagcagacucugaggcaagg

SEQ ID NO: 133553 - RNA, 22 nt, Human
aucaguuuaacugucaagagcc

SEQ ID NO: 133554 - RNA, 22 nt, Human
agcugcuacugcucugccagag

SEQ ID NO: 133555 - RNA, 22 nt, Human
agccagaggccagccugccuca

SEQ ID NO: 133556 - RNA, 22 nt, Human
aacaguauggaagccauuagga

SEQ ID NO: 133557 - RNA, 22 nt, Human
auguguauuuauuuggggcuua

SEQ ID NO: 133558 - RNA, 22 nt, Human
aauguauaaaguguuaauaacu

SEQ ID NO: 133559 - RNA, 22 nt, Human
gccuggugaaaggcagagagcg

SEQ ID NO: 133560 - RNA, 22 nt, Human
cggggacacacuggcagcuccu

SEQ ID NO: 133561 - RNA, 20 nt, Human
ccacaggaguccagucgacc

SEQ ID NO: 133562 - RNA, 20 nt, Human
uagauuucauacuucucuuu

SEQ ID NO: 133563 - RNA, 22 nt, Human
cuggagccggcgagccccagcc

SEQ ID NO: 133564 - RNA, 22 nt, Human
uagccucuggaauccuuucucu

SEQ ID NO: 133565 - RNA, 22 nt, Human
agaggccggccgagcccauggg

SEQ ID NO: 133566 - RNA, 22 nt, Human
gcagagcucaagguguucagcu

SEQ ID NO: 133567 - RNA, 22 nt, Human
auucuucauaccuacugagguu

SEQ ID NO: 133568 - RNA, 22 nt, Human
uggcccugacuuggaggccuga

SEQ ID NO: 133569 - RNA, 22 nt, Human
uuuagcagagcauaugauaucc

SEQ ID NO: 133570 - RNA, 22 nt, Human
gcaaugauauugaagugaugaa

SEQ ID NO: 133571 - RNA, 22 nt, Human
ggcugcaggcagaggcugucug

SEQ ID NO: 133572 - RNA, 22 nt, Human
aauuuggcagugucuugaagua

SEQ ID NO: 133573 - RNA, 22 nt, Human
ugucauguguucuuaaauacau

SEQ ID NO: 133574 - RNA, 22 nt, Human
ucaggcagagcuguggagcucu

SEQ ID NO: 133575 - RNA, 21 nt, Human
acucaggagacuaacuauguc

SEQ ID NO: 133576 - RNA, 22 nt, Human
uggcagagagacucuccuugau

SEQ ID NO: 133577 - RNA, 22 nt, Human
cccaggcugaugggaugggcca

SEQ ID NO: 133578 - RNA, 22 nt, Human
gacagaguuguugauguaugcu

SEQ ID NO: 133579 - RNA, 22 nt, Human
aggcacugacucaagggagcca

SEQ ID NO: 133580 - RNA, 22 nt, Human
auccugggaagcugacauugaa

SEQ ID NO: 133581 - RNA, 22 nt, Human
aaugcacacauuugguacugaa

SEQ ID NO: 133582 - RNA, 22 nt, Human
acagcagcauaaacugacuaag

SEQ ID NO: 133583 - RNA, 22 nt, Human
gaaagaggaaggagauguauua

SEQ ID NO: 133584 - RNA, 22 nt, Human
auacuuuuaauuccuucugagu

SEQ ID NO: 133585 - RNA, 22 nt, Human
uuauccaagcagaagcugcaca

SEQ ID NO: 133586 - RNA, 22 nt, Human
aagcagaaaaacugagcuccaa

SEQ ID NO: 133587 - RNA, 22 nt, Human
cacaaaugguuguagacauuaa

SEQ ID NO: 133588 - RNA, 22 nt, Human
gaggguccccaugcagagcuca

SEQ ID NO: 133589 - RNA, 22 nt, Human
guucucucugcuuccaagaugg

SEQ ID NO: 133590 - RNA, 22 nt, Human
gccucugcaauuacauugugcc

SEQ ID NO: 133591 - RNA, 22 nt, Human
agcugguucauucauucauggu

SEQ ID NO: 133592 - RNA, 22 nt, Human
guggccugccagcagauggcgc

SEQ ID NO: 133593 - RNA, 22 nt, Human
ugccuugguucucuacuuggag

SEQ ID NO: 133594 - RNA, 22 nt, Human
cacugaagccacuggaagagga

SEQ ID NO: 133595 - RNA, 22 nt, Human
acaaagucaaauugcagccgcc

SEQ ID NO: 133596 - RNA, 22 nt, Human
auuauuauuguugauguuaggg

SEQ ID NO: 133597 - RNA, 22 nt, Human
cuauugaauagcccaaaucauu

SEQ ID NO: 133598 - RNA, 22 nt, Human
cuggccagaguuggagggugug

SEQ ID NO: 133599 - RNA, 22 nt, Human
guguaauugaaauugagaacca

SEQ ID NO: 133600 - RNA, 22 nt, Human
ucugcagcuucuugccagagag

SEQ ID NO: 133601 - RNA, 18 nt, Human
ucaagacaucaugaaaua

SEQ ID NO: 133602 - RNA, 22 nt, Human
ucucuucuugauuuucacugga

SEQ ID NO: 133603 - RNA, 22 nt, Human
cugcaggcugagcgccugccgg

SEQ ID NO: 133604 - RNA, 22 nt, Human
uaacagaaguuguucauugugg

SEQ ID NO: 133605 - RNA, 22 nt, Human
gccacacuuauucucaugcaca

SEQ ID NO: 133606 - RNA, 21 nt, Human
acaguauauuagauauuugaa

SEQ ID NO: 133607 - RNA, 22 nt, Human
uguguguacucuccaguccuga

SEQ ID NO: 133608 - RNA, 22 nt, Human
gaaggccaagaggcuccaagau

SEQ ID NO: 133609 - RNA, 21 nt, Human
augucaaaugcuuuauuuuau

SEQ ID NO: 133610 - RNA, 22 nt, Human
uuacaauaguuccuucuuuugu

SEQ ID NO: 133611 - RNA, 22 nt, Human
gaggccaaguuggagaccaggu

SEQ ID NO: 133612 - RNA, 22 nt, Human
aucaguuuggugcuuucaguga

SEQ ID NO: 133613 - RNA, 22 nt, Human
uccucaggagagcuccuaugcc

SEQ ID NO: 133614 - RNA, 22 nt, Human
acaguauauauagucuaaaagc

SEQ ID NO: 133615 - RNA, 22 nt, Human
cugugugccuccugugaucagg

SEQ ID NO: 133616 - RNA, 22 nt, Human
uagauuucgcugcaucucaauc

SEQ ID NO: 133617 - RNA, 22 nt, Human
gcagggaggaagagaugcuucc

SEQ ID NO: 133618 - RNA, 22 nt, Human
ucagagaguuacacaaauuguu

SEQ ID NO: 133619 - RNA, 19 nt, Human
uggcuucuguuuucauguu

SEQ ID NO: 133620 - RNA, 19 nt, Human
uccugggcugggccagguc

SEQ ID NO: 133621 - RNA, 22 nt, Human
gccuggucucuuucaugucagu

SEQ ID NO: 133622 - RNA, 22 nt, Human
guguggcuaggauggcuuugcu

SEQ ID NO: 133623 - RNA, 22 nt, Human
cacugugucagaguaugaugau

SEQ ID NO: 133624 - RNA, 22 nt, Human
gcuuuacaaguggugcagauua

SEQ ID NO: 133625 - RNA, 22 nt, Human
uugugaaacauucauggauuug

SEQ ID NO: 133626 - RNA, 22 nt, Human
gccuucugcgcucgugucuccg

SEQ ID NO: 133627 - RNA, 22 nt, Human
auuuuucucucacacuuaccag

SEQ ID NO: 133628 - RNA, 22 nt, Human
gaggcccaguccugcaagcacg

SEQ ID NO: 133629 - RNA, 22 nt, Human
ucugagcauugaauuuucuucc

SEQ ID NO: 133630 - RNA, 22 nt, Human
cacugaagguaggaccaaggcu

SEQ ID NO: 133631 - RNA, 22 nt, Human
cucagaguccauaguuuacagu

SEQ ID NO: 133632 - RNA, 22 nt, Human
uuugcaaauaccaugaaacuug

SEQ ID NO: 133633 - RNA, 22 nt, Human
uguauuagaucugagaacuucu

SEQ ID NO: 133634 - RNA, 22 nt, Human
gucccaggcuuauguggagcuu

SEQ ID NO: 133635 - RNA, 23 nt, Human
cagggcugggcuugguguuaggc

SEQ ID NO: 133636 - RNA, 22 nt, Human
aguuuucuuucaucuaucagca

SEQ ID NO: 133637 - RNA, 22 nt, Human
cuguggcucaauugccuacuga

SEQ ID NO: 133638 - RNA, 22 nt, Human
ggggcagaaagcccacagagug

SEQ ID NO: 133639 - RNA, 23 nt, Human
uggcccugugcaugcugcuuccc

SEQ ID NO: 133640 - RNA, 21 nt, Human
ucuuuccugcccaguugcccu

SEQ ID NO: 133641 - RNA, 22 nt, Human
ccagagucuaugaguccucauu

SEQ ID NO: 133642 - RNA, 21 nt, Human
gcugcaucaaucuacccaggg

SEQ ID NO: 133643 - RNA, 22 nt, Human
acuuccugcagcuucucagccc

SEQ ID NO: 133644 - RNA, 22 nt, Human
cacuggugacuucugagcugga

SEQ ID NO: 133645 - RNA, 22 nt, Human
uacaguauuaugagugauugaa

SEQ ID NO: 133646 - RNA, 23 nt, Human
uggcagugaucaaaagcuuacau

SEQ ID NO: 133647 - RNA, 23 nt, Human
acuuuucaauuagcuaugcuuaa

SEQ ID NO: 133648 - RNA, 22 nt, Human
gcaggaaagguugagacuuugc

SEQ ID NO: 133649 - RNA, 20 nt, Human
uuuaucugugggaguggaga

SEQ ID NO: 133650 - RNA, 22 nt, Human
agaauucucuuccauugaaaca

SEQ ID NO: 133651 - RNA, 20 nt, Human
uuuuuccuucucuacaggca

SEQ ID NO: 133652 - RNA, 17 nt, Human
gcagccagugcagcagg

SEQ ID NO: 133653 - RNA, 22 nt, Human
auguggcuagugcagaugaaua

SEQ ID NO: 133654 - RNA, 22 nt, Human
uaugagcuuccaguguugcaug

SEQ ID NO: 133655 - RNA, 22 nt, Human
uucucucuuacugccaugcugu

SEQ ID NO: 133656 - RNA, 22 nt, Human
guuuuauaggcuguugcuauau

SEQ ID NO: 133657 - RNA, 22 nt, Human
ggcugcuuuaucggcugcugaa

SEQ ID NO: 133658 - RNA, 22 nt, Human
ucuggccaacaaaaacuaaguc

SEQ ID NO: 133659 - RNA, 22 nt, Human
uucacagauguauuggaacucc

SEQ ID NO: 133660 - RNA, 22 nt, Human
cugggagguggagguugcauug

SEQ ID NO: 133661 - RNA, 21 nt, Human
uaaggccaagucuauuucugu

SEQ ID NO: 133662 - RNA, 22 nt, Human
ugucaccaugccagcuucugcc

SEQ ID NO: 133663 - RNA, 22 nt, Human
uuaaguauauccauuugacugg

SEQ ID NO: 133664 - RNA, 22 nt, Human
ugugucugcccuuaguacaucu

SEQ ID NO: 133665 - RNA, 22 nt, Human
cucuggccugcuuccucaggua

SEQ ID NO: 133666 - RNA, 22 nt, Human
ugaaaucuuuaguuucuguccc

SEQ ID NO: 133667 - RNA, 22 nt, Human
cuguaauucacuagggucagcg

SEQ ID NO: 133668 - RNA, 22 nt, Human
ccugaagaugcuguggccuggu

SEQ ID NO: 133669 - RNA, 21 nt, Human
cuguggaagggaacuagaggg

SEQ ID NO: 133670 - RNA, 22 nt, Human
agagggcauuaacucugucuug

SEQ ID NO: 133671 - RNA, 22 nt, Human
ugaccaaagaguugcuuguauu

SEQ ID NO: 133672 - RNA, 19 nt, Human
uuugaaaggauuguuauuu

SEQ ID NO: 133673 - RNA, 22 nt, Human
guccaugauucuguguaguaga

SEQ ID NO: 133674 - RNA, 22 nt, Human
uuauuugugaaucauuuaucua

SEQ ID NO: 133675 - RNA, 22 nt, Human
gugggaugcaguggugaguggc

SEQ ID NO: 133676 - RNA, 22 nt, Human
ucagcuggcaguucagaggcug

SEQ ID NO: 133677 - RNA, 22 nt, Human
ugucugguggguugacaggcag

SEQ ID NO: 133678 - RNA, 22 nt, Human
guacuuccguggacuaauuguu

SEQ ID NO: 133679 - RNA, 22 nt, Human
gcccacagcucguuccucuccu

SEQ ID NO: 133680 - RNA, 22 nt, Human
ggugggcagcucuuggcaggca

SEQ ID NO: 133681 - RNA, 23 nt, Human
ccacuagcaccuguucaacuucu

SEQ ID NO: 133682 - RNA, 22 nt, Human
ggcuucauggaggaggugaguc

SEQ ID NO: 133683 - RNA, 22 nt, Human
accaucagucacauguagagaa

SEQ ID NO: 133684 - RNA, 22 nt, Human
cccagcuccuuacagggccgaa

SEQ ID NO: 133685 - RNA, 22 nt, Human
uuacaaagaguguucuuuucca

SEQ ID NO: 133686 - RNA, 20 nt, Human
ugugaaagcaguagaaugac

SEQ ID NO: 133687 - RNA, 21 nt, Human
agcugagcccagaagacuggu

SEQ ID NO: 133688 - RNA, 22 nt, Human
gcuggagccaagcugcucuugg

SEQ ID NO: 133689 - RNA, 22 nt, Human
ccauuguaguaucuguuuuagu

SEQ ID NO: 133690 - RNA, 22 nt, Human
auugucuucuggucuuaucuuu

SEQ ID NO: 133691 - RNA, 22 nt, Human
acugugcaaugaguaauaaacu

SEQ ID NO: 133692 - RNA, 22 nt, Human
uucugcugguguuuugugaggc

SEQ ID NO: 133693 - RNA, 22 nt, Human
aaaugcaccuugcugugagacu

SEQ ID NO: 133694 - RNA, 22 nt, Human
uauuugcugacagugcuggagc

SEQ ID NO: 133695 - RNA, 22 nt, Human
cucacuguccaacaggcuuuac

SEQ ID NO: 133696 - RNA, 22 nt, Human
acuuccugcaaucguccacucc

SEQ ID NO: 133697 - RNA, 22 nt, Human
acuuuacagaugguuuccugac

SEQ ID NO: 133698 - RNA, 22 nt, Human
gaaaggcaguacagcugagccu

SEQ ID NO: 133699 - RNA, 22 nt, Human
gggguggauuccuacaggucca

SEQ ID NO: 133700 - RNA, 22 nt, Human
ucacuguauuugcugaugcaua

SEQ ID NO: 133701 - RNA, 22 nt, Human
cagaguccuggacacagagaca

SEQ ID NO: 133702 - RNA, 22 nt, Human
auguaguguagagauuagucuc

SEQ ID NO: 133703 - RNA, 22 nt, Human
ucuucagauaaagggagaguau

SEQ ID NO: 133704 - RNA, 22 nt, Human
cauuuagagucuugcaauuuua

SEQ ID NO: 133705 - RNA, 22 nt, Human
guguguguacucuguauauaaa

SEQ ID NO: 133706 - RNA, 20 nt, Human
agauuauuccuaagauuucu

SEQ ID NO: 133707 - RNA, 22 nt, Human
augcauguaacaguguuaugaa

SEQ ID NO: 133708 - RNA, 22 nt, Human
uguuugugguuauaauaaguau

SEQ ID NO: 133709 - RNA, 22 nt, Human
uuuccagguauuaauacuguau

SEQ ID NO: 133710 - RNA, 22 nt, Human
cuggaugcuuccucucugcuag

SEQ ID NO: 133711 - RNA, 22 nt, Human
ucuugccucuuccccuuuccau

SEQ ID NO: 133712 - RNA, 22 nt, Human
ucauugcaguugaguuguguua

SEQ ID NO: 133713 - RNA, 22 nt, Human
ucucucuucaacccuuaacuag

SEQ ID NO: 133714 - RNA, 22 nt, Human
aggcuucccagcugagcucagc

SEQ ID NO: 133715 - RNA, 22 nt, Human
acagccaggaauucuggagaag

SEQ ID NO: 133716 - RNA, 22 nt, Human
cuccuguauguugggcuucaca

SEQ ID NO: 133717 - RNA, 22 nt, Human
uuaugcuaaaugaaucaaguca

SEQ ID NO: 133718 - RNA, 22 nt, Human
uuucucugggcuguuggcagcc

SEQ ID NO: 133719 - RNA, 22 nt, Human
agggccuggcgcguggccgccg

SEQ ID NO: 133720 - RNA, 22 nt, Human
gggagggaaggaccuuaugaau

SEQ ID NO: 133721 - RNA, 18 nt, Human
ggcugccuguuccugaag

SEQ ID NO: 133722 - RNA, 22 nt, Human
ccugcagcuccggauuucuggg

SEQ ID NO: 133723 - RNA, 22 nt, Human
aguggcugccaagagcaaugcu

SEQ ID NO: 133724 - RNA, 22 nt, Human
auaucuuuguuuuugccaagau

SEQ ID NO: 133725 - RNA, 22 nt, Human
guuagaaagugucugcuugggu

SEQ ID NO: 133726 - RNA, 23 nt, Human
ugugcgugaugcuuuguugaagg

SEQ ID NO: 133727 - RNA, 22 nt, Human
uccugggcugcagggaagagca

SEQ ID NO: 133728 - RNA, 22 nt, Human
auguggcuaguggcuaugaucu

SEQ ID NO: 133729 - RNA, 22 nt, Human
aagcuuuucucuguauuaccug

SEQ ID NO: 133730 - RNA, 22 nt, Human
cuguggcuucugcuugggccuc

SEQ ID NO: 133731 - RNA, 22 nt, Human
uggugcaagucucugaggaggg

SEQ ID NO: 133732 - RNA, 22 nt, Human
cucagaauuuagggcucugagg

SEQ ID NO: 133733 - RNA, 22 nt, Human
ggcagcaggcgacuucccuauu

SEQ ID NO: 133734 - RNA, 22 nt, Human
cagcaggaaagacaucugagca

SEQ ID NO: 133735 - RNA, 22 nt, Human
cuuaaauucuuaaugcccucau

SEQ ID NO: 133736 - RNA, 22 nt, Human
cccuguccuuggcugugaggcu

SEQ ID NO: 133737 - RNA, 21 nt, Human
agagagaaggccauauggucc

SEQ ID NO: 133738 - RNA, 22 nt, Human
uguuacagugacuaauguuuua

SEQ ID NO: 133739 - RNA, 22 nt, Human
cugagagccuccuguuggcuag

SEQ ID NO: 133740 - RNA, 22 nt, Human
uugaggaguguuuagggugagg

SEQ ID NO: 133741 - RNA, 22 nt, Human
cucugggcaaguuucuucauga

SEQ ID NO: 133742 - RNA, 21 nt, Human
cagugcucaaucugacagugg

SEQ ID NO: 133743 - RNA, 20 nt, Human
ugaaaggugggaauuguggg

SEQ ID NO: 133744 - RNA, 22 nt, Human
gggcugggauggcuugaagauu

SEQ ID NO: 133745 - RNA, 22 nt, Human
caggcugggaacgccacccgcu

SEQ ID NO: 133746 - RNA, 22 nt, Human
uugaagagugccuuccagacau

SEQ ID NO: 133747 - RNA, 22 nt, Human
gcugugugaaaacugggccugg

SEQ ID NO: 133748 - RNA, 22 nt, Human
gcucucugaggugcuggcagag

SEQ ID NO: 133749 - RNA, 22 nt, Human
uguguuuacuucuaugcaguuu

SEQ ID NO: 133750 - RNA, 22 nt, Human
guucucucagcgauagugaugg

SEQ ID NO: 133751 - RNA, 22 nt, Human
cagcuccugcagcugcugccgu

SEQ ID NO: 133752 - RNA, 22 nt, Human
cagcaguguacaaggugucaga

SEQ ID NO: 133753 - RNA, 22 nt, Human
ucagggcaaugucccucagaag

SEQ ID NO: 133754 - RNA, 21 nt, Human
uuuuuucuugcgugaggccug

SEQ ID NO: 133755 - RNA, 19 nt, Human
guggccugcgcugggugcg

SEQ ID NO: 133756 - RNA, 22 nt, Human
cuggagagauccuccugaaaaa

SEQ ID NO: 133757 - RNA, 21 nt, Human
agcagaggggacauguuugau

SEQ ID NO: 133758 - RNA, 21 nt, Human
cugcucugacagugaggccag

SEQ ID NO: 133759 - RNA, 22 nt, Human
ccaggcugcuguugguguccgc

SEQ ID NO: 133760 - RNA, 18 nt, Human
ugugguggagcugccuuc

SEQ ID NO: 133761 - RNA, 22 nt, Human
ccugggcagguguggcuucccc

SEQ ID NO: 133762 - RNA, 19 nt, Human
ugugacugguugucucgcu

SEQ ID NO: 133763 - RNA, 23 nt, Human
ucagagaaguuguaggcugggga

SEQ ID NO: 133764 - RNA, 22 nt, Human
acagcuggaggccccauugucc

SEQ ID NO: 133765 - RNA, 22 nt, Human
uccagcagaaaagagguaggga

SEQ ID NO: 133766 - RNA, 22 nt, Human
ugcagcuccucuggcugccuga

SEQ ID NO: 133767 - RNA, 22 nt, Human
gguguggcugugaguuuuugau

SEQ ID NO: 133768 - RNA, 22 nt, Human
ccugccugcuuucugcuuugca

SEQ ID NO: 133769 - RNA, 22 nt, Human
uucagcaagaccaccauguacc

SEQ ID NO: 133770 - RNA, 22 nt, Human
uuguuuucacagcuuugcccgg

SEQ ID NO: 133771 - RNA, 22 nt, Human
cugagggccuuggcuccugccc

SEQ ID NO: 133772 - RNA, 22 nt, Human
cauuacaugguccaggauauau

SEQ ID NO: 133773 - RNA, 22 nt, Human
ugagauguaagguaugcuuacu

SEQ ID NO: 133774 - RNA, 22 nt, Human
uauugaaaugaaugacagugau

SEQ ID NO: 133775 - RNA, 22 nt, Human
uucuggaguauuccuggcaccu

SEQ ID NO: 133776 - RNA, 22 nt, Human
ggccccuggcaccaggcugauu

SEQ ID NO: 133777 - RNA, 20 nt, Human
ccugggguacacuggcaugu

SEQ ID NO: 133778 - RNA, 22 nt, Human
acuuucucaaaucagacuuuaa

SEQ ID NO: 133779 - RNA, 22 nt, Human
agagcuggcugguagcccugau

SEQ ID NO: 133780 - RNA, 22 nt, Human
aucaggaucugcaucauaagaa

SEQ ID NO: 133781 - RNA, 22 nt, Human
caccugagugucaguauucuca

SEQ ID NO: 133782 - RNA, 22 nt, Human
ucacaaauauuuuaacaguagg

SEQ ID NO: 133783 - RNA, 22 nt, Human
guaugcuuauuccuuguuguga

SEQ ID NO: 133784 - RNA, 22 nt, Human
cuguggcugccucaccuacagg

SEQ ID NO: 133785 - RNA, 22 nt, Human
uuucccucucaucucuauuauu

SEQ ID NO: 133786 - RNA, 23 nt, Human
ugccucugccucccuagucugca

SEQ ID NO: 133787 - RNA, 22 nt, Human
ugcuuagacgucaaguacagcc

SEQ ID NO: 133788 - RNA, 22 nt, Human
caugaagcauguuuugucauga

SEQ ID NO: 133789 - RNA, 22 nt, Human
aaagaauuuguacacccuacua

SEQ ID NO: 133790 - RNA, 22 nt, Human
ggucauugucagagccuguacu

SEQ ID NO: 133791 - RNA, 22 nt, Human
auuucuucaggucagaaauaga

SEQ ID NO: 133792 - RNA, 22 nt, Human
augccagucaaagaagaugaca

SEQ ID NO: 133793 - RNA, 22 nt, Human
gcagcuguguaaugagcccaca

SEQ ID NO: 133794 - RNA, 22 nt, Human
gagacaaaaguuggagugcaag

SEQ ID NO: 133795 - RNA, 22 nt, Human
uuuguuuucaaugugucauuca

SEQ ID NO: 133796 - RNA, 19 nt, Human
cagcugcaccgugaccauc

SEQ ID NO: 133797 - RNA, 22 nt, Human
cuuuacauccuguuucccguuu

SEQ ID NO: 133798 - RNA, 22 nt, Human
auauuucaugggguuccauacu

SEQ ID NO: 133799 - RNA, 22 nt, Human
aaaugcagauugucauucagga

SEQ ID NO: 133800 - RNA, 22 nt, Human
ucuuucucucuaaucaagcaca

SEQ ID NO: 133801 - RNA, 22 nt, Human
acgaguauguuuguauuuucuu

SEQ ID NO: 133802 - RNA, 22 nt, Human
acuacuuugggccauuuguuua

SEQ ID NO: 133803 - RNA, 22 nt, Human
ucagaggucacacagcaaguuu

SEQ ID NO: 133804 - RNA, 23 nt, Human
ucugauguucucuuaugcuguag

SEQ ID NO: 133805 - RNA, 22 nt, Human
cacagcuuccauuagaaugaga

SEQ ID NO: 133806 - RNA, 22 nt, Human
agucccagacuccaguuuucug

SEQ ID NO: 133807 - RNA, 22 nt, Human
aagaagaugguuaacuuucagu

SEQ ID NO: 133808 - RNA, 22 nt, Human
ugauauuuuucacuggccucug

SEQ ID NO: 133809 - RNA, 22 nt, Human
gagccuggggacccuccugagu

SEQ ID NO: 133810 - RNA, 22 nt, Human
aggaaagcucccaguagggcuc

SEQ ID NO: 133811 - RNA, 21 nt, Human
aaacugaccuugccugagaca

SEQ ID NO: 133812 - RNA, 22 nt, Human
gcucugugaaggguguugcuca

SEQ ID NO: 133813 - RNA, 22 nt, Human
cagaaguaagauuacugugagu

SEQ ID NO: 133814 - RNA, 22 nt, Human
aggcuuccgaguagcugggacu

SEQ ID NO: 133815 - RNA, 22 nt, Human
ucuuucagccacuuaccugucu

SEQ ID NO: 133816 - RNA, 22 nt, Human
caccagcuuugcccacugccca

SEQ ID NO: 133817 - RNA, 23 nt, Human
uggcucugagcuuccugguggcc

SEQ ID NO: 133818 - RNA, 22 nt, Human
uggcccugacagguccugggca

SEQ ID NO: 133819 - RNA, 22 nt, Human
gucuucuuguguugccugucuu

SEQ ID NO: 133820 - RNA, 22 nt, Human
aaccaggacaauuugaauagaa

SEQ ID NO: 133821 - RNA, 22 nt, Human
acauucuuaacaguuaaaaacu

SEQ ID NO: 133822 - RNA, 22 nt, Human
uauguuauuuucauacaacaga

SEQ ID NO: 133823 - RNA, 22 nt, Human
uuucuuuaucauagcaucuuug

SEQ ID NO: 133824 - RNA, 22 nt, Human
ggcagaggagcuggaaacaugg

SEQ ID NO: 133825 - RNA, 22 nt, Human
guuugauucaagaacaaagagu

SEQ ID NO: 133826 - RNA, 22 nt, Human
uuaacuucaacacucucuugua

SEQ ID NO: 133827 - RNA, 22 nt, Human
gaaaagggcaagagagagggca

SEQ ID NO: 133828 - RNA, 22 nt, Human
uguacaguguagucaugagguu

SEQ ID NO: 133829 - RNA, 22 nt, Human
gcucacugcaaccucugcuucc

SEQ ID NO: 133830 - RNA, 22 nt, Human
gagcugcuucugugugccgggu

SEQ ID NO: 133831 - RNA, 22 nt, Human
cagaguguaucuguguaagcau

SEQ ID NO: 133832 - RNA, 22 nt, Human
aaagaugucauacacauuaaga

SEQ ID NO: 133833 - RNA, 22 nt, Human
caguagcacuagauaugugugg

SEQ ID NO: 133834 - RNA, 22 nt, Human
cucagagaagucuuugcuaaac

SEQ ID NO: 133835 - RNA, 22 nt, Human
ucugcaucauuuuucagagccg

SEQ ID NO: 133836 - RNA, 18 nt, Human
gcccagaggucugggccc

SEQ ID NO: 133837 - RNA, 22 nt, Human
ccuucagaccuagacaggaauc

SEQ ID NO: 133838 - RNA, 22 nt, Human
gcucuggagauggagccuugag

SEQ ID NO: 133839 - RNA, 23 nt, Human
cucccuggaguuucuggaagaug

SEQ ID NO: 133840 - RNA, 22 nt, Human
ucugugugguaguuucagugaa

SEQ ID NO: 133841 - RNA, 22 nt, Human
aggaggugacagccugcaucug

SEQ ID NO: 133842 - RNA, 20 nt, Human
cagagaccugucuucacaga

SEQ ID NO: 133843 - RNA, 22 nt, Human
gagagcccugcuccuaucccag

SEQ ID NO: 133844 - RNA, 22 nt, Human
cacagccugcugcacucaagaa

SEQ ID NO: 133845 - RNA, 23 nt, Human
uuugcaaauuggacacaaccaca

SEQ ID NO: 133846 - RNA, 22 nt, Human
acuuuuuacaggguguauacca

SEQ ID NO: 133847 - RNA, 22 nt, Human
caguggccugagccaggcuucc

SEQ ID NO: 133848 - RNA, 22 nt, Human
uuauuuucagcuaggaaagcca

SEQ ID NO: 133849 - RNA, 18 nt, Human
cagaagcaggcagugcag

SEQ ID NO: 133850 - RNA, 22 nt, Human
gcuuggaaguaggauugggaga

SEQ ID NO: 133851 - RNA, 22 nt, Human
uuuuaucuucauuccuaucuac

SEQ ID NO: 133852 - RNA, 22 nt, Human
auuuccauacacccauuucuga

SEQ ID NO: 133853 - RNA, 22 nt, Human
gcugugauugucagucuucaau

SEQ ID NO: 133854 - RNA, 22 nt, Human
cagggccuuauccugccauuga

SEQ ID NO: 133855 - RNA, 22 nt, Human
auggaaagggaagcaaggaaca

SEQ ID NO: 133856 - RNA, 22 nt, Human
cagcccuguccagcagagggug

SEQ ID NO: 133857 - RNA, 22 nt, Human
uccucucagugugguuguggga

SEQ ID NO: 133858 - RNA, 22 nt, Human
gcugucaccaaagcaggcacug

SEQ ID NO: 133859 - RNA, 22 nt, Human
cacugcaggucugagauggggg

SEQ ID NO: 133860 - RNA, 22 nt, Human
ggccagagagccgcuguuagga

SEQ ID NO: 133861 - RNA, 22 nt, Human
agcaucuggucaugagugagaa

SEQ ID NO: 133862 - RNA, 20 nt, Human
uuucagugguuugugccuag

SEQ ID NO: 133863 - RNA, 22 nt, Human
ccucugaggucauggacuuggc

SEQ ID NO: 133864 - RNA, 21 nt, Human
gcagacugcccugcugucccc

SEQ ID NO: 133865 - RNA, 22 nt, Human
uuagucaauagugaauauagag

SEQ ID NO: 133866 - RNA, 23 nt, Human
cugugugugccgaggguggccac

SEQ ID NO: 133867 - RNA, 22 nt, Human
aaguuugagaagcuuauagaua

SEQ ID NO: 133868 - RNA, 22 nt, Human
ugcugucugauucagggugauu

SEQ ID NO: 133869 - RNA, 22 nt, Human
gcagcauugcacuuuuguucuu

SEQ ID NO: 133870 - RNA, 22 nt, Human
uacacauguuuggcaaguaugu

SEQ ID NO: 133871 - RNA, 22 nt, Human
agaguguuauuugcucuguauu

SEQ ID NO: 133872 - RNA, 19 nt, Human
agguggucuaggcuggaga

SEQ ID NO: 133873 - RNA, 20 nt, Human
guugaaaguaauaugaugcu

SEQ ID NO: 133874 - RNA, 22 nt, Human
uagagcuguaucaaagagccuu

SEQ ID NO: 133875 - RNA, 22 nt, Human
gcucaagggaugggagugggug

SEQ ID NO: 133876 - RNA, 22 nt, Human
uuugcauuucuaaugagcuccg

SEQ ID NO: 133877 - RNA, 22 nt, Human
gcuggccugucuagagccuuac

SEQ ID NO: 133878 - RNA, 22 nt, Human
gggcuggcaucaguugccgaga

SEQ ID NO: 133879 - RNA, 22 nt, Human
uggcugaaggaagauucuucua

SEQ ID NO: 133880 - RNA, 22 nt, Human
guggugcaggccagcaggggcg

SEQ ID NO: 133881 - RNA, 22 nt, Human
aggcacugaaagguggccagag

SEQ ID NO: 133882 - RNA, 22 nt, Human
cccucuacagggaagcgcuuuc

SEQ ID NO: 133883 - RNA, 21 nt, Human
uagagaaaagaagcuguuccu

SEQ ID NO: 133884 - RNA, 22 nt, Human
gagugugggcacgggggccuug

SEQ ID NO: 133885 - RNA, 22 nt, Human
cacagggccacuuucccaguaa

SEQ ID NO: 133886 - RNA, 22 nt, Human
ucuuuccuacuuuauugugaac

SEQ ID NO: 133887 - RNA, 19 nt, Human
acccucucagugccugagg

SEQ ID NO: 133888 - RNA, 19 nt, Human
aucuuacagagcagaguac

SEQ ID NO: 133889 - RNA, 22 nt, Human
uucacagugguagugcauuuag

SEQ ID NO: 133890 - RNA, 22 nt, Human
gccagggaggcuguaggguccu

SEQ ID NO: 133891 - RNA, 22 nt, Human
cuggagccuagguugaccuggg

SEQ ID NO: 133892 - RNA, 22 nt, Human
cuugaaagcacuuaguaaauua

SEQ ID NO: 133893 - RNA, 22 nt, Human
ugucuguacaaauuuucugugu

SEQ ID NO: 133894 - RNA, 22 nt, Human
ccagggcauccucacaucgcag

SEQ ID NO: 133895 - RNA, 22 nt, Human
ucugucugagggagugacauuu

SEQ ID NO: 133896 - RNA, 22 nt, Human
gaggcucagagggagcaugguc

SEQ ID NO: 133897 - RNA, 22 nt, Human
ggucccagaauugguuagcaca

SEQ ID NO: 133898 - RNA, 22 nt, Human
gcucugagccgggggccugucc

SEQ ID NO: 133899 - RNA, 22 nt, Human
ucaguuuuaagguuugagaauu

SEQ ID NO: 133900 - RNA, 22 nt, Human
auuuucaucauggguuuaacau

SEQ ID NO: 133901 - RNA, 22 nt, Human
ugguaaagaaggcuagaucuga

SEQ ID NO: 133902 - RNA, 22 nt, Human
agcagcuguggaaaaguaacua

SEQ ID NO: 133903 - RNA, 22 nt, Human
cuggcuggccggagcgaggcgg

SEQ ID NO: 133904 - RNA, 22 nt, Human
cugaggaagacagcagcugugu

SEQ ID NO: 133905 - RNA, 22 nt, Human
agcugcaggcccaugcucaguc

SEQ ID NO: 133906 - RNA, 22 nt, Human
uugcagcuucgagucuaucugu

SEQ ID NO: 133907 - RNA, 22 nt, Human
uuuugaaagccagguuuguaug

SEQ ID NO: 133908 - RNA, 22 nt, Human
uccagggcugacuugggagagg

SEQ ID NO: 133909 - RNA, 22 nt, Human
uauguguauaucuguaugugca

SEQ ID NO: 133910 - RNA, 22 nt, Human
cuuuggcaugguccucacuaua

SEQ ID NO: 133911 - RNA, 22 nt, Human
ggaagaagggucauuggcagcc

SEQ ID NO: 133912 - RNA, 22 nt, Human
caucacugacgcugagauucca

SEQ ID NO: 133913 - RNA, 22 nt, Human
gagugcagaugaacagaagauu

SEQ ID NO: 133914 - RNA, 22 nt, Human
cagcugccagcuucucuccauc

SEQ ID NO: 133915 - RNA, 20 nt, Human
uaaggcuguuuuguauuccu

SEQ ID NO: 133916 - RNA, 22 nt, Human
aaguggacuaauacaaggacua

SEQ ID NO: 133917 - RNA, 22 nt, Human
gaggccuggagccgccuaggcg

SEQ ID NO: 133918 - RNA, 22 nt, Human
acauuucucauaggagagccac

SEQ ID NO: 133919 - RNA, 21 nt, Human
aggcacuguuugugguuuggg

SEQ ID NO: 133920 - RNA, 22 nt, Human
uccagccuuucuacucacugag

SEQ ID NO: 133921 - RNA, 22 nt, Human
agacaaagacagcaucucaggu

SEQ ID NO: 133922 - RNA, 22 nt, Human
cacagaagaaucaugcuguguu

SEQ ID NO: 133923 - RNA, 22 nt, Human
caugggaggucugcaaggugcu

SEQ ID NO: 133924 - RNA, 22 nt, Human
gacuguguccaugugcuggauu

SEQ ID NO: 133925 - RNA, 22 nt, Human
agcaccuguggcucaugcucgu

SEQ ID NO: 133926 - RNA, 22 nt, Human
gggccucucccuucucacgcau

SEQ ID NO: 133927 - RNA, 21 nt, Human
ucuguggcagcaugaugaggu

SEQ ID NO: 133928 - RNA, 23 nt, Human
ggagccuggcauaugagacgcau

SEQ ID NO: 133929 - RNA, 22 nt, Human
acaaugcaccagcaucuucacc

SEQ ID NO: 133930 - RNA, 21 nt, Human
cugccuugaaugguacuggga

SEQ ID NO: 133931 - RNA, 22 nt, Human
agcugcuguggggcucggccug

SEQ ID NO: 133932 - RNA, 22 nt, Human
agaauucuguucuucgggugug

SEQ ID NO: 133933 - RNA, 22 nt, Human
cacaggcuuccaguccccagcu

SEQ ID NO: 133934 - RNA, 22 nt, Human
ucauuucuccgaccugcugucc

SEQ ID NO: 133935 - RNA, 22 nt, Human
uugcauugggagugaggagacc

SEQ ID NO: 133936 - RNA, 22 nt, Human
ccagggugaggaggcucccacg

SEQ ID NO: 133937 - RNA, 22 nt, Human
aggauccuuuuucugcuguuug

SEQ ID NO: 133938 - RNA, 22 nt, Human
ccaggcucugucuggucagaag

SEQ ID NO: 133939 - RNA, 22 nt, Human
agcugcucuugggugacuucaa

SEQ ID NO: 133940 - RNA, 22 nt, Human
gcugggagcccuggucugcucc

SEQ ID NO: 133941 - RNA, 22 nt, Human
ggcuggaaguccaagaucaaga

SEQ ID NO: 133942 - RNA, 23 nt, Human
uggggcugauggagacggaccag

SEQ ID NO: 133943 - RNA, 22 nt, Human
uuggcuucuggcagucuggacg

SEQ ID NO: 133944 - RNA, 22 nt, Human
uuuuuauaccaccucucacuua

SEQ ID NO: 133945 - RNA, 22 nt, Human
uacuuuaaaaacugauaauuca

SEQ ID NO: 133946 - RNA, 22 nt, Human
aaaagcucuuucugcuguagau

SEQ ID NO: 133947 - RNA, 22 nt, Human
ucaggggagguugaaucgucuc

SEQ ID NO: 133948 - RNA, 22 nt, Human
gccugcagaacugugaggcaau

SEQ ID NO: 133949 - RNA, 22 nt, Human
agagccuguuuugugggagaug

SEQ ID NO: 133950 - RNA, 22 nt, Human
cucuggacagcaggugcugugg

SEQ ID NO: 133951 - RNA, 22 nt, Human
cuacaguagagaggauguagaa

SEQ ID NO: 133952 - RNA, 22 nt, Human
aacaguauaugaaauguuagga

SEQ ID NO: 133953 - RNA, 22 nt, Human
ucucagagggaaacaugaguga

SEQ ID NO: 133954 - RNA, 22 nt, Human
uccauguguuuuccuguccaca

SEQ ID NO: 133955 - RNA, 22 nt, Human
acuuuacaggcacuucaaguau

SEQ ID NO: 133956 - RNA, 22 nt, Human
aggugccagaugcacagcugaa

SEQ ID NO: 133957 - RNA, 22 nt, Human
ccugccugguguaagucuaagg

SEQ ID NO: 133958 - RNA, 22 nt, Human
uacaguaagaugaaauagcaau

SEQ ID NO: 133959 - RNA, 22 nt, Human
aagacagaccacgugacagggc

SEQ ID NO: 133960 - RNA, 20 nt, Human
ugucauuguuucuaggaccu

SEQ ID NO: 133961 - RNA, 22 nt, Human
gguggcagucuuaagagaucuu

SEQ ID NO: 133962 - RNA, 22 nt, Human
agucuauuuuugguucuucggg

SEQ ID NO: 133963 - RNA, 22 nt, Human
cugagagucagcuucuccuccu

SEQ ID NO: 133964 - RNA, 22 nt, Human
acagaaauauucguggugcuug

SEQ ID NO: 133965 - RNA, 22 nt, Human
gaauacauuggaaaucagaaua

SEQ ID NO: 133966 - RNA, 22 nt, Human
ccaggcaggcgauggugcagug

SEQ ID NO: 133967 - RNA, 22 nt, Human
aggcacuguucccaguuauccu

SEQ ID NO: 133968 - RNA, 22 nt, Human
ucuggcuguguaauauguguag

SEQ ID NO: 133969 - RNA, 21 nt, Human
uaaagaagaugaaugugauca

SEQ ID NO: 133970 - RNA, 22 nt, Human
auguggcuuucaugauuaagca

SEQ ID NO: 133971 - RNA, 22 nt, Human
gcucccaggaugaggagccagg

SEQ ID NO: 133972 - RNA, 19 nt, Human
ucucacaucagcuccuagc

SEQ ID NO: 133973 - RNA, 22 nt, Human
caguugaugggacucauguggg

SEQ ID NO: 133974 - RNA, 22 nt, Human
guguaauuauauaaagaucuac

SEQ ID NO: 133975 - RNA, 22 nt, Human
cgcugccaggauccccugccgg

SEQ ID NO: 133976 - RNA, 22 nt, Human
uugggcugaacccugcagcuga

SEQ ID NO: 133977 - RNA, 22 nt, Human
cagaagcacuaggaggaaacgu

SEQ ID NO: 133978 - RNA, 22 nt, Human
ccugagggaaggaugcuaccca

SEQ ID NO: 133979 - RNA, 22 nt, Human
aguggcugauguaggcaguggg

SEQ ID NO: 133980 - RNA, 22 nt, Human
gagcagcucugggugacccagu

SEQ ID NO: 133981 - RNA, 22 nt, Human
uccuugaaugaauguucucucc

SEQ ID NO: 133982 - RNA, 22 nt, Human
cagagcugauuggauccagaga

SEQ ID NO: 133983 - RNA, 22 nt, Human
uccuuggcagcagggagcauga

SEQ ID NO: 133984 - RNA, 22 nt, Human
cagcuccagcccaggcagcucc

SEQ ID NO: 133985 - RNA, 22 nt, Human
auuuuaucugcuuacuuucagg

SEQ ID NO: 133986 - RNA, 22 nt, Human
uggcucagcauucacuggucuu

SEQ ID NO: 133987 - RNA, 22 nt, Human
cucagagucugcauuucuguca

SEQ ID NO: 133988 - RNA, 22 nt, Human
ccacugaggcaggcaguaucua

SEQ ID NO: 133989 - RNA, 22 nt, Human
aauuaguauugcgauucauuag

SEQ ID NO: 133990 - RNA, 22 nt, Human
ucugcugcugagcacacuccua

SEQ ID NO: 133991 - RNA, 21 nt, Human
ucaaagcacauauuugcacau

SEQ ID NO: 133992 - RNA, 22 nt, Human
ugcagcaggagccaggccuggu

SEQ ID NO: 133993 - RNA, 22 nt, Human
acauacauaugacaacuuuccu

SEQ ID NO: 133994 - RNA, 22 nt, Human
ggcucagaccucccagcuccag

SEQ ID NO: 133995 - RNA, 22 nt, Human
aggcccuggcacugccugggag

SEQ ID NO: 133996 - RNA, 23 nt, Human
acauacauggagauaaagugaug

SEQ ID NO: 133997 - RNA, 22 nt, Human
uccagcucuaacaugcugggcc

SEQ ID NO: 133998 - RNA, 21 nt, Human
ccagaggccucucuuggccac

SEQ ID NO: 133999 - RNA, 22 nt, Human
cucucuggaagggggagcugau

SEQ ID NO: 134000 - RNA, 22 nt, Human
agucucagggccacccggggaa

SEQ ID NO: 134001 - RNA, 22 nt, Human
ugccugucuucaggagugucac

SEQ ID NO: 134002 - RNA, 22 nt, Human
gggcagggguagcauuccaagu

SEQ ID NO: 134003 - RNA, 22 nt, Human
gcagggcucugcuguaguccua

SEQ ID NO: 134004 - RNA, 20 nt, Human
ucugaggcugagcucuacuu

SEQ ID NO: 134005 - RNA, 23 nt, Human
gcagagcugcccuauugccuugg

SEQ ID NO: 134006 - RNA, 22 nt, Human
auugaaagauuuugggcucaug

SEQ ID NO: 134007 - RNA, 17 nt, Human
agauggcaggaggcaga

SEQ ID NO: 134008 - RNA, 22 nt, Human
gcuggcugggucccugagaggc

SEQ ID NO: 134009 - RNA, 22 nt, Human
accugccucagugcagcuggau

SEQ ID NO: 134010 - RNA, 22 nt, Human
agcagggcagugcuucagcucu

SEQ ID NO: 134011 - RNA, 22 nt, Human
gcagggccagguacaagaagca

SEQ ID NO: 134012 - RNA, 22 nt, Human
gugugggugggacaucaucuuu

SEQ ID NO: 134013 - RNA, 22 nt, Human
cagacagcugcuuucuugcugu

SEQ ID NO: 134014 - RNA, 22 nt, Human
guuucucuguaccucuguccca

SEQ ID NO: 134015 - RNA, 22 nt, Human
ugaggcagcaauuguauuguau

SEQ ID NO: 134016 - RNA, 22 nt, Human
guggcuucuggcugggccucag

SEQ ID NO: 134017 - RNA, 22 nt, Human
gcugucuuccuugcuccaaggg

SEQ ID NO: 134018 - RNA, 22 nt, Human
gcugccugccuugccuggagga

SEQ ID NO: 134019 - RNA, 22 nt, Human
cccucugccugcgcccuggugu

SEQ ID NO: 134020 - RNA, 22 nt, Human
gcugcucuugaggggcucacug

SEQ ID NO: 134021 - RNA, 17 nt, Human
gcugccaccuuuggagc

SEQ ID NO: 134022 - RNA, 22 nt, Human
uaaggccaggcuguggucggca

SEQ ID NO: 134023 - RNA, 22 nt, Human
aagccagcauuuucccauuccu

SEQ ID NO: 134024 - RNA, 22 nt, Human
cucuggaggccuaaggaagugg

SEQ ID NO: 134025 - RNA, 22 nt, Human
uagaaaugcaguguacuguguc

SEQ ID NO: 134026 - RNA, 22 nt, Human
gggagcaggagccugccugcca

SEQ ID NO: 134027 - RNA, 21 nt, Human
gcagagccggggcgagaaggc

SEQ ID NO: 134028 - RNA, 22 nt, Human
accugagccuagggagguugag

SEQ ID NO: 134029 - RNA, 22 nt, Human
agcuggggcugcagagaacagg

SEQ ID NO: 134030 - RNA, 22 nt, Human
uggccuguggcuuaaggucugu

SEQ ID NO: 134031 - RNA, 22 nt, Human
uuugacagauccuuaacucagc

SEQ ID NO: 134032 - RNA, 22 nt, Human
gccagcucagaugcaggaagga

SEQ ID NO: 134033 - RNA, 22 nt, Human
uggaaauguauuugggcaugcc

SEQ ID NO: 134034 - RNA, 22 nt, Human
gaagcccauuuguacagcacau

SEQ ID NO: 134035 - RNA, 22 nt, Human
ucuggcucaucucuccagguaa

SEQ ID NO: 134036 - RNA, 22 nt, Human
ucuugggauugcccugcaguuc

SEQ ID NO: 134037 - RNA, 19 nt, Human
gccugggaugggcagaacu

SEQ ID NO: 134038 - RNA, 22 nt, Human
gggagccuugggagugccagcc

SEQ ID NO: 134039 - RNA, 22 nt, Human
auuguauuuccagcuugaaugu

SEQ ID NO: 134040 - RNA, 22 nt, Human
gacagccaugcacuucugcugu

SEQ ID NO: 134041 - RNA, 22 nt, Human
ugucucaggggcauugaaauaa

SEQ ID NO: 134042 - RNA, 22 nt, Human
uuggaggcaaugggaaggaggc

SEQ ID NO: 134043 - RNA, 22 nt, Human
ggccuggcauggggacuaaggg

SEQ ID NO: 134044 - RNA, 22 nt, Human
uuugacagugaugauauauaca

SEQ ID NO: 134045 - RNA, 20 nt, Human
uccugggguaagccaugguc

SEQ ID NO: 134046 - RNA, 22 nt, Human
caguaauagaggcuuugagucu

SEQ ID NO: 134047 - RNA, 22 nt, Human
uaucuauuccaaauaucagcgu

SEQ ID NO: 134048 - RNA, 22 nt, Human
cuggugccuccucccugugcuu

SEQ ID NO: 134049 - RNA, 22 nt, Human
ggagaguggauuccagcuguau

SEQ ID NO: 134050 - RNA, 22 nt, Human
cugccagcucaaagcgcagcua

SEQ ID NO: 134051 - RNA, 17 nt, Human
ucaugcccaacuauuac

SEQ ID NO: 134052 - RNA, 22 nt, Human
ucuggagauaagacagacagau

SEQ ID NO: 134053 - RNA, 22 nt, Human
guccucagggaauguggcgggu

SEQ ID NO: 134054 - RNA, 22 nt, Human
gucugugugcacagcgagugcc

SEQ ID NO: 134055 - RNA, 22 nt, Human
ggccugcugcuaugacuuccug

SEQ ID NO: 134056 - RNA, 22 nt, Human
uuucaauguaugucuuucugag

SEQ ID NO: 134057 - RNA, 22 nt, Human
ccaaaguccauaguuuacauua

SEQ ID NO: 134058 - RNA, 22 nt, Human
cuccucacuuuccagacugggc

SEQ ID NO: 134059 - RNA, 22 nt, Human
cugccuuugcccuugacacugu

SEQ ID NO: 134060 - RNA, 22 nt, Human
agcagccagagaaugaugcagu

SEQ ID NO: 134061 - RNA, 21 nt, Human
ccagagccugcugagcccccu

SEQ ID NO: 134062 - RNA, 22 nt, Human
cuggccagggugcgaucguggu

SEQ ID NO: 134063 - RNA, 22 nt, Human
agggcagagagaugaaugggau

SEQ ID NO: 134064 - RNA, 22 nt, Human
ggcuuggaaaugguaaugagcu

SEQ ID NO: 134065 - RNA, 22 nt, Human
guacaguuuucaguguucacug

SEQ ID NO: 134066 - RNA, 22 nt, Human
ucuggcugcugcgugagugcuu

SEQ ID NO: 134067 - RNA, 22 nt, Human
ccuggccacucagguguggggc

SEQ ID NO: 134068 - RNA, 21 nt, Human
ugcaggaaagugcugcgaccc

SEQ ID NO: 134069 - RNA, 22 nt, Human
agauggguaacuggagucugcu

SEQ ID NO: 134070 - RNA, 22 nt, Human
agcagccaaaugaagauuuuac

SEQ ID NO: 134071 - RNA, 19 nt, Human
uuacaucugcaacacuggu

SEQ ID NO: 134072 - RNA, 22 nt, Human
guuacaguggguuuggggccca

SEQ ID NO: 134073 - RNA, 22 nt, Human
cagcuuggaggaggaucuaaga

SEQ ID NO: 134074 - RNA, 22 nt, Human
aaaaaucacuuuuauaggcagc

SEQ ID NO: 134075 - RNA, 22 nt, Human
cugugucucauccgccucuggc

SEQ ID NO: 134076 - RNA, 22 nt, Human
uauguguguaugacagacagag

SEQ ID NO: 134077 - RNA, 22 nt, Human
cagcuggcagcccuggcccugc

SEQ ID NO: 134078 - RNA, 22 nt, Human
uaugaagacaaugauagcauga

SEQ ID NO: 134079 - RNA, 22 nt, Human
ucuuugcaggccaaauuguuaa

SEQ ID NO: 134080 - RNA, 22 nt, Human
aauauaaugcuguuuuaugcca

SEQ ID NO: 134081 - RNA, 21 nt, Human
auuucagagcacacaaguaaa

SEQ ID NO: 134082 - RNA, 22 nt, Human
cuggccugaggucggcuguagg

SEQ ID NO: 134083 - RNA, 22 nt, Human
uuugacuucugggcauuuuggu

SEQ ID NO: 134084 - RNA, 22 nt, Human
uugaaaguccuucuugaguuac

SEQ ID NO: 134085 - RNA, 22 nt, Human
ccagcugcugugaggaccacag

SEQ ID NO: 134086 - RNA, 22 nt, Human
uugggcuggcagagguggucuu

SEQ ID NO: 134087 - RNA, 22 nt, Human
caggcagcaucagucugcugua

SEQ ID NO: 134088 - RNA, 22 nt, Human
gucuguguuuucaggccuuugu

SEQ ID NO: 134089 - RNA, 22 nt, Human
ggagccagaggcugcugcugug

SEQ ID NO: 134090 - RNA, 22 nt, Human
agggugggcuagacucuucccc

SEQ ID NO: 134091 - RNA, 22 nt, Human
aagcagcagaccugauuuugaa

SEQ ID NO: 134092 - RNA, 22 nt, Human
gugcaugugucuuuauaguagc

SEQ ID NO: 134093 - RNA, 22 nt, Human
gagcagcuccagccgcaugacu

SEQ ID NO: 134094 - RNA, 22 nt, Human
aguccaugguucugacucaucu

SEQ ID NO: 134095 - RNA, 21 nt, Human
ugcuuuaugggaaaaauguca

SEQ ID NO: 134096 - RNA, 22 nt, Human
cugggagggguagccaauccua

SEQ ID NO: 134097 - RNA, 22 nt, Human
uguggcugcaggcgauggagga

SEQ ID NO: 134098 - RNA, 18 nt, Human
cugaggcuggcaggagcc

SEQ ID NO: 134099 - RNA, 22 nt, Human
guuauuuuaucucugagagguu

SEQ ID NO: 134100 - RNA, 22 nt, Human
ugugccuucucaguccugcuca

SEQ ID NO: 134101 - RNA, 21 nt, Human
ucagaguggaagacaguuuga

SEQ ID NO: 134102 - RNA, 22 nt, Human
uagcagagcagggaucagagcc

SEQ ID NO: 134103 - RNA, 20 nt, Human
ugccagggccagcagaggcu

SEQ ID NO: 134104 - RNA, 22 nt, Human
uggccuccccuaacagccucuu

SEQ ID NO: 134105 - RNA, 22 nt, Human
ggucccagcugcucaagaggcu

SEQ ID NO: 134106 - RNA, 22 nt, Human
ggcaggagaauggcgugaacuc

SEQ ID NO: 134107 - RNA, 22 nt, Human
ucugagaggcagaccuuccuaa

SEQ ID NO: 134108 - RNA, 22 nt, Human
uucauucccuuauauuagcauu

SEQ ID NO: 134109 - RNA, 22 nt, Human
gcagugaaacaauaggaucaaa

SEQ ID NO: 134110 - RNA, 22 nt, Human
cggcugugucuucacaggagcc

SEQ ID NO: 134111 - RNA, 22 nt, Human
ucucagggugaggaaagaauuu

SEQ ID NO: 134112 - RNA, 22 nt, Human
agagccugucugccuuucuacc

SEQ ID NO: 134113 - RNA, 18 nt, Human
cccagcccaccauuucuc

SEQ ID NO: 134114 - RNA, 22 nt, Human
augcuuuacaguuuuccaaaca

SEQ ID NO: 134115 - RNA, 21 nt, Human
aucacauuggcuguuauuauu

SEQ ID NO: 134116 - RNA, 20 nt, Human
auccaugagagucuggauuc

SEQ ID NO: 134117 - RNA, 22 nt, Human
ccagcagagcauggggaggaag

SEQ ID NO: 134118 - RNA, 22 nt, Human
gucucuuuuauggugaguugau

SEQ ID NO: 134119 - RNA, 22 nt, Human
ccucagaguaggucucagcugu

SEQ ID NO: 134120 - RNA, 17 nt, Human
ucugccgacugccagcu

SEQ ID NO: 134121 - RNA, 22 nt, Human
ggcaggagggcggacaaugacc

SEQ ID NO: 134122 - RNA, 22 nt, Human
aucaaaguucguaacugauaac

SEQ ID NO: 134123 - RNA, 22 nt, Human
cugggugguucuaacuguugau

SEQ ID NO: 134124 - RNA, 22 nt, Human
uacaguguauguauuuguaggu

SEQ ID NO: 134125 - RNA, 22 nt, Human
uuucuucuugauuuaaacaggg

SEQ ID NO: 134126 - RNA, 22 nt, Human
cucugugugguaugauugucau

SEQ ID NO: 134127 - RNA, 22 nt, Human
uugcagcagggugaauucacuc

SEQ ID NO: 134128 - RNA, 22 nt, Human
gccuggguuccaugaucuccag

SEQ ID NO: 134129 - RNA, 17 nt, Human
uugggagagaaagguau

SEQ ID NO: 134130 - RNA, 22 nt, Human
gugggacucuucuuuggcagug

SEQ ID NO: 134131 - RNA, 22 nt, Human
uuucucugugccauuuccauaa

SEQ ID NO: 134132 - RNA, 22 nt, Human
gaggagggagcuggaagcucuu

SEQ ID NO: 134133 - RNA, 22 nt, Human
uucuuuguggcagugagcuggg

SEQ ID NO: 134134 - RNA, 22 nt, Human
uuaucauugucgcagucuaauu

SEQ ID NO: 134135 - RNA, 22 nt, Human
uuuucuaacaucuaguaauuug

SEQ ID NO: 134136 - RNA, 22 nt, Human
gagcagcuggacaggccucccu

SEQ ID NO: 134137 - RNA, 22 nt, Human
ggccugagcuugggcagcguau

SEQ ID NO: 134138 - RNA, 22 nt, Human
uuucucauggcccuuggcuuuu

SEQ ID NO: 134139 - RNA, 22 nt, Human
cagaaggcuuuguggaguagac

SEQ ID NO: 134140 - RNA, 22 nt, Human
auaauuaauuucaguaaucucc

SEQ ID NO: 134141 - RNA, 22 nt, Human
cccuggcaaaacacucucuuga

SEQ ID NO: 134142 - RNA, 22 nt, Human
uuugcauuccugccugcauuca

SEQ ID NO: 134143 - RNA, 22 nt, Human
gggcagaggcucuggcccaucc

SEQ ID NO: 134144 - RNA, 22 nt, Human
ggcucugcccagaugaagagga

SEQ ID NO: 134145 - RNA, 22 nt, Human
ugaugguuuuauuaauaggacc

SEQ ID NO: 134146 - RNA, 22 nt, Human
cuuuauguccaccagacugcaa

SEQ ID NO: 134147 - RNA, 22 nt, Human
uggccugcagaggcuguggggc

SEQ ID NO: 134148 - RNA, 22 nt, Human
gccuccuggauuuuagugccau

SEQ ID NO: 134149 - RNA, 21 nt, Human
cgcagagcgaacuugcggcgc

SEQ ID NO: 134150 - RNA, 22 nt, Human
uagaaagugaagguuaauuaau

SEQ ID NO: 134151 - RNA, 22 nt, Human
caggcacagaguuauucauuua

SEQ ID NO: 134152 - RNA, 22 nt, Human
ggggcagauggaacagagcaca

SEQ ID NO: 134153 - RNA, 22 nt, Human
ucugccuggaugauggcagggc

SEQ ID NO: 134154 - RNA, 22 nt, Human
ugucaugccauuuaaaauguuu

SEQ ID NO: 134155 - RNA, 22 nt, Human
uuucuaggucuuccauacugcc

SEQ ID NO: 134156 - RNA, 22 nt, Human
acaaagucugaaaccugaggca

SEQ ID NO: 134157 - RNA, 22 nt, Human
cucuuuacucuguguuauuguu

SEQ ID NO: 134158 - RNA, 22 nt, Human
ugucuguggcaauuguggguaa

SEQ ID NO: 134159 - RNA, 20 nt, Human
uaacuuucuaugcuuucagc

SEQ ID NO: 134160 - RNA, 22 nt, Human
cuagaaaaauacuuuauuguga

SEQ ID NO: 134161 - RNA, 22 nt, Human
ggcaggaggaagaguuagcacc

SEQ ID NO: 134162 - RNA, 22 nt, Human
cuggcucccucgcugaggugcu

SEQ ID NO: 134163 - RNA, 22 nt, Human
ugcagggccuucuagaccaugg

SEQ ID NO: 134164 - RNA, 22 nt, Human
ucucaagagggaggcaaucaug

SEQ ID NO: 134165 - RNA, 22 nt, Human
aaaaugugaucuacaaaugcaa

SEQ ID NO: 134166 - RNA, 22 nt, Human
gcagcagagaacacaaugaugg

SEQ ID NO: 134167 - RNA, 17 nt, Human
auccccagcaucuagaa

SEQ ID NO: 134168 - RNA, 22 nt, Human
uucugggacaucuggacaguuu

SEQ ID NO: 134169 - RNA, 22 nt, Human
guuuuccuucucagccauugcc

SEQ ID NO: 134170 - RNA, 22 nt, Human
acacaugcugauaagaauauaa

SEQ ID NO: 134171 - RNA, 22 nt, Human
caaagguaguauauauauuguu

SEQ ID NO: 134172 - RNA, 21 nt, Human
ugcaguauguauuuguaucca

SEQ ID NO: 134173 - RNA, 22 nt, Human
aucauuccacauguaccacuag

SEQ ID NO: 134174 - RNA, 22 nt, Human
cucccuggaggcccagaccugg

SEQ ID NO: 134175 - RNA, 22 nt, Human
augauauuugcaaugugcuugc

SEQ ID NO: 134176 - RNA, 22 nt, Human
agaaaacauuacauaggugugu

SEQ ID NO: 134177 - RNA, 22 nt, Human
cagaauuugaaguaauauucca

SEQ ID NO: 134178 - RNA, 22 nt, Human
ucucugugacagcuggguaugu

SEQ ID NO: 134179 - RNA, 22 nt, Human
auguuacauaguccuuauuugu

SEQ ID NO: 134180 - RNA, 22 nt, Human
ggggcagagcauagcuccaauu

SEQ ID NO: 134181 - RNA, 22 nt, Human
cugggaggugaacagaaaaacu

SEQ ID NO: 134182 - RNA, 20 nt, Human
cagaccugcacccacuucga

SEQ ID NO: 134183 - RNA, 22 nt, Human
ccagcuccaaguuugggcauca

SEQ ID NO: 134184 - RNA, 20 nt, Human
aguaggggaaugcaagagca

SEQ ID NO: 134185 - RNA, 22 nt, Human
acuuguuugaaucucucuagag

SEQ ID NO: 134186 - RNA, 22 nt, Human
gcugugugcugggcauggcacu

SEQ ID NO: 134187 - RNA, 22 nt, Human
agcagccagaaagggcagucga

SEQ ID NO: 134188 - RNA, 19 nt, Human
ucccgcccacugagcgugc

SEQ ID NO: 134189 - RNA, 22 nt, Human
cagucacacaaguggacuuggg

SEQ ID NO: 134190 - RNA, 22 nt, Human
ccugccugacagagaagguuca

SEQ ID NO: 134191 - RNA, 22 nt, Human
uuuucugugauucugagguugg

SEQ ID NO: 134192 - RNA, 22 nt, Human
aguuuguaucaauuugcuuuau

SEQ ID NO: 134193 - RNA, 18 nt, Human
ugucauugccagggaagc

SEQ ID NO: 134194 - RNA, 22 nt, Human
uuacagauuaaaaugcugaggu

SEQ ID NO: 134195 - RNA, 22 nt, Human
ggacagagcccugguggccuaa

SEQ ID NO: 134196 - RNA, 21 nt, Human
ugggaugggucugggaccagc

SEQ ID NO: 134197 - RNA, 22 nt, Human
auguggcuagugcaacugagaa

SEQ ID NO: 134198 - RNA, 22 nt, Human
gaagagcugcucagaacaugau

SEQ ID NO: 134199 - RNA, 22 nt, Human
agggcagagggugccucaccug

SEQ ID NO: 134200 - RNA, 22 nt, Human
acaggggaauuuacugucauua

SEQ ID NO: 134201 - RNA, 19 nt, Human
uacaaguaggcguuuucuc

SEQ ID NO: 134202 - RNA, 22 nt, Human
cuuauguacacacauauauugu

SEQ ID NO: 134203 - RNA, 22 nt, Human
uaacuuuuacuuaccaucugag

SEQ ID NO: 134204 - RNA, 20 nt, Human
caaugcacacagcugcuucu

SEQ ID NO: 134205 - RNA, 22 nt, Human
ugaaggccagcagagugaaggc

SEQ ID NO: 134206 - RNA, 18 nt, Human
gaggccugagaaccaggu

SEQ ID NO: 134207 - RNA, 22 nt, Human
ccugugucuuccccacuggugu

SEQ ID NO: 134208 - RNA, 18 nt, Human
agcugcagaccaggaggu

SEQ ID NO: 134209 - RNA, 22 nt, Human
gcucagggaacuuuuugcaggc

SEQ ID NO: 134210 - RNA, 22 nt, Human
guauuuucaagagcaguaguau

SEQ ID NO: 134211 - RNA, 22 nt, Human
uguaguguggccuaucuuugcc

SEQ ID NO: 134212 - RNA, 22 nt, Human
ggcaaggccuugcccagcauuc

SEQ ID NO: 134213 - RNA, 21 nt, Human
ucacaucuauguuaagcaaac

SEQ ID NO: 134214 - RNA, 22 nt, Human
agcaguggcugaagauguuccu

SEQ ID NO: 134215 - RNA, 22 nt, Human
uucaaugaggauagaacuggau

SEQ ID NO: 134216 - RNA, 22 nt, Human
ccagcuuguuugaagcucguca

SEQ ID NO: 134217 - RNA, 22 nt, Human
cccugccuuguuggagccuaug

SEQ ID NO: 134218 - RNA, 22 nt, Human
ugugugugacucauacuagaac

SEQ ID NO: 134219 - RNA, 22 nt, Human
cagggugccucccgcucgccgg

SEQ ID NO: 134220 - RNA, 22 nt, Human
ucuuugcaaauguuauuaucuu

SEQ ID NO: 134221 - RNA, 22 nt, Human
gccuggcaggccucaugagggg

SEQ ID NO: 134222 - RNA, 22 nt, Human
gcccugucccuuggcuucuagg

SEQ ID NO: 134223 - RNA, 22 nt, Human
cugugugcaacuugcaguuuug

SEQ ID NO: 134224 - RNA, 22 nt, Human
ugcuagaauaccuaccuggagg

SEQ ID NO: 134225 - RNA, 22 nt, Human
cucaggggaccuggcuccgagu

SEQ ID NO: 134226 - RNA, 22 nt, Human
ucugcguggcugcugugagcgu

SEQ ID NO: 134227 - RNA, 22 nt, Human
gccugggugucgaucacuagug

SEQ ID NO: 134228 - RNA, 22 nt, Human
gaaaugugaccuacuuccuugu

SEQ ID NO: 134229 - RNA, 22 nt, Human
ccggggacuuaaagugaaggaa

SEQ ID NO: 134230 - RNA, 22 nt, Human
cuggcugucuucugggagcugu

SEQ ID NO: 134231 - RNA, 22 nt, Human
cuuugaaagcucccaggacuua

SEQ ID NO: 134232 - RNA, 22 nt, Human
gucuuguuugggauguggaugg

SEQ ID NO: 134233 - RNA, 22 nt, Human
ucugcuuuagaauccaguagcu

SEQ ID NO: 134234 - RNA, 22 nt, Human
ucagcugaaguggagaagcaga

SEQ ID NO: 134235 - RNA, 22 nt, Human
uggaggaugccauccaggauac

SEQ ID NO: 134236 - RNA, 23 nt, Human
ugcagccacucaggagcucagug

SEQ ID NO: 134237 - RNA, 22 nt, Human
agacagggucuugaucagagcu

SEQ ID NO: 134238 - RNA, 22 nt, Human
uuggaugaagucuagcuuuagu

SEQ ID NO: 134239 - RNA, 22 nt, Human
acuguguccucauguggcagaa

SEQ ID NO: 134240 - RNA, 22 nt, Human
gauuucuucauucauuagaugg

SEQ ID NO: 134241 - RNA, 23 nt, Human
uggaccugaaccagugccucugu

SEQ ID NO: 134242 - RNA, 22 nt, Human
agauuuagacugccuuaaucau

SEQ ID NO: 134243 - RNA, 22 nt, Human
uuguguauuuuuugauacuaac

SEQ ID NO: 134244 - RNA, 22 nt, Human
agcaguggccuggggcucugug

SEQ ID NO: 134245 - RNA, 22 nt, Human
acagugauugggguaucugcag

SEQ ID NO: 134246 - RNA, 22 nt, Human
auggauaagaacaaauaucuga

SEQ ID NO: 134247 - RNA, 22 nt, Human
ccugguguugugaaguagccgu

SEQ ID NO: 134248 - RNA, 19 nt, Human
aggguccagggagcggcuc

SEQ ID NO: 134249 - RNA, 22 nt, Human
ucccagagcugauaagccuuua

SEQ ID NO: 134250 - RNA, 22 nt, Human
cauguaaaacacucagaacagu

SEQ ID NO: 134251 - RNA, 22 nt, Human
ugaaaguuacaggaaaacagau

SEQ ID NO: 134252 - RNA, 22 nt, Human
gagcuguccgccccugggccga

SEQ ID NO: 134253 - RNA, 22 nt, Human
agcauggggcuccgcaaugaac

SEQ ID NO: 134254 - RNA, 22 nt, Human
gacauucacaguuuccgauggu

SEQ ID NO: 134255 - RNA, 22 nt, Human
uuuuuggguccaggcuguaucu

SEQ ID NO: 134256 - RNA, 22 nt, Human
ucuggagccuuggaugggaaag

SEQ ID NO: 134257 - RNA, 22 nt, Human
gagaggucaucucccaucagca

SEQ ID NO: 134258 - RNA, 22 nt, Human
uuugaaagucaaccuuccaguu

SEQ ID NO: 134259 - RNA, 22 nt, Human
uucuaacuuaacacuccuguga

SEQ ID NO: 134260 - RNA, 22 nt, Human
uaauuucuucaucucugcagcu

SEQ ID NO: 134261 - RNA, 22 nt, Human
uuccaugacaccgagggaaguc

SEQ ID NO: 134262 - RNA, 22 nt, Human
gggccagagcuuggcagcuggg

SEQ ID NO: 134263 - RNA, 22 nt, Human
caaugauguuuagauaaaaucc

SEQ ID NO: 134264 - RNA, 18 nt, Human
ccugagcccugcuuacuu

SEQ ID NO: 134265 - RNA, 22 nt, Human
ucugucaggagauuggcagcug

SEQ ID NO: 134266 - RNA, 22 nt, Human
ggcuucccagcagagggcgcac

SEQ ID NO: 134267 - RNA, 22 nt, Human
uucuuucccaguagaugugaaa

SEQ ID NO: 134268 - RNA, 21 nt, Human
augaagucuaugcuucugugu

SEQ ID NO: 134269 - RNA, 22 nt, Human
ugcccaggguggagugcagcgg

SEQ ID NO: 134270 - RNA, 22 nt, Human
gcuccagguauuugcccuuuua

SEQ ID NO: 134271 - RNA, 22 nt, Human
aguggcugacaacuggguuaac

SEQ ID NO: 134272 - RNA, 22 nt, Human
gcuggcagguccaagauagagc

SEQ ID NO: 134273 - RNA, 22 nt, Human
agagccuugaagaucuggaaaa

SEQ ID NO: 134274 - RNA, 22 nt, Human
acucuuuuauaaagcaucuuga

SEQ ID NO: 134275 - RNA, 22 nt, Human
ggagugggcagcacugcccugu

SEQ ID NO: 134276 - RNA, 22 nt, Human
gcauugucaaaagugguaugac

SEQ ID NO: 134277 - RNA, 22 nt, Human
uagaaaucagcaggcauaugua

SEQ ID NO: 134278 - RNA, 22 nt, Human
guuuuuaucuaauagcaguuau

SEQ ID NO: 134279 - RNA, 22 nt, Human
ggcucagggaaugaggaagaau

SEQ ID NO: 134280 - RNA, 22 nt, Human
agguacaguagacagacaguua

SEQ ID NO: 134281 - RNA, 22 nt, Human
cagcccugcacgcugccuccgc

SEQ ID NO: 134282 - RNA, 22 nt, Human
cgugucaucugagccuugggcg

SEQ ID NO: 134283 - RNA, 22 nt, Human
gcauuuauuucuuuacugcauc

SEQ ID NO: 134284 - RNA, 22 nt, Human
ucccaaagcuacucuucugacu

SEQ ID NO: 134285 - RNA, 22 nt, Human
ugcugcacgauaaauaauuucu

SEQ ID NO: 134286 - RNA, 22 nt, Human
cucaagacugaucgcaguggaa

SEQ ID NO: 134287 - RNA, 22 nt, Human
ucccagaggcuccagucucuau

SEQ ID NO: 134288 - RNA, 22 nt, Human
guuugugucaaugacuucugca

SEQ ID NO: 134289 - RNA, 22 nt, Human
ccaaggcuggagugcaguggcg

SEQ ID NO: 134290 - RNA, 22 nt, Human
uuucacagauauaagauuucac

SEQ ID NO: 134291 - RNA, 22 nt, Human
ucugggaaguccucugucaugc

SEQ ID NO: 134292 - RNA, 22 nt, Human
uguuuaagcugaugagguaucg

SEQ ID NO: 134293 - RNA, 22 nt, Human
gggcugagggguaucucauggg

SEQ ID NO: 134294 - RNA, 22 nt, Human
ugcugcuccugccuggcuccca

SEQ ID NO: 134295 - RNA, 22 nt, Human
gguucacacuuucaugauuuca

SEQ ID NO: 134296 - RNA, 22 nt, Human
ugccugaugcaggaguaucaga

SEQ ID NO: 134297 - RNA, 22 nt, Human
agccaggaaugcaugcucugcu

SEQ ID NO: 134298 - RNA, 21 nt, Human
agugaaaugaaguguaugcuc

SEQ ID NO: 134299 - RNA, 22 nt, Human
ugccacacagucugguagaaua

SEQ ID NO: 134300 - RNA, 22 nt, Human
caaacugagcaucagaaaguuu

SEQ ID NO: 134301 - RNA, 22 nt, Human
aaaaaugcuuggacuuaauaaa

SEQ ID NO: 134302 - RNA, 22 nt, Human
ugcagcugcuugauucaucuug

SEQ ID NO: 134303 - RNA, 22 nt, Human
gugcaugugcauccauguguac

SEQ ID NO: 134304 - RNA, 22 nt, Human
caagcagacaguaggccuagaa

SEQ ID NO: 134305 - RNA, 22 nt, Human
aguguguaagggaucaaagagu

SEQ ID NO: 134306 - RNA, 22 nt, Human
uccucuuucucaacauuaguua

SEQ ID NO: 134307 - RNA, 22 nt, Human
uuucacauaaauauuaugccua

SEQ ID NO: 134308 - RNA, 22 nt, Human
ucucuacagauccuauauagaa

SEQ ID NO: 134309 - RNA, 22 nt, Human
gcugggcugagcuagacuuggc

SEQ ID NO: 134310 - RNA, 22 nt, Human
ucuggcuccaccuccuuuacua

SEQ ID NO: 134311 - RNA, 22 nt, Human
ugcucuggguccugggccuccu

SEQ ID NO: 134312 - RNA, 21 nt, Human
ccagcuccaggaccuuggauc

SEQ ID NO: 134313 - RNA, 22 nt, Human
ugucaccucuuuggcugcagcu

SEQ ID NO: 134314 - RNA, 22 nt, Human
aggcacugugcugaugucuuau

SEQ ID NO: 134315 - RNA, 22 nt, Human
cccccaggcucugacacaggag

SEQ ID NO: 134316 - RNA, 22 nt, Human
uucuacagacuauaacugugau

SEQ ID NO: 134317 - RNA, 22 nt, Human
accucugcuucccggguucaag

SEQ ID NO: 134318 - RNA, 22 nt, Human
cagcauugaucccaggcugugg

SEQ ID NO: 134319 - RNA, 22 nt, Human
agggcagcagcccauggcucug

SEQ ID NO: 134320 - RNA, 22 nt, Human
cugccagccaggccagguaggc

SEQ ID NO: 134321 - RNA, 22 nt, Human
agcucagcuuccucuccaugcu

SEQ ID NO: 134322 - RNA, 22 nt, Human
agcagccauccuuagagaaaga

SEQ ID NO: 134323 - RNA, 17 nt, Human
uucaaugauuaaugcau

SEQ ID NO: 134324 - RNA, 22 nt, Human
cugugugugaacacagcccagc

SEQ ID NO: 134325 - RNA, 22 nt, Human
auaguggugagcugcauuuaug

SEQ ID NO: 134326 - RNA, 22 nt, Human
cagcccugagaaggaggaucuc

SEQ ID NO: 134327 - RNA, 22 nt, Human
aagaauucacugguagagucaa

SEQ ID NO: 134328 - RNA, 22 nt, Human
ccagcccugccagagagagcug

SEQ ID NO: 134329 - RNA, 22 nt, Human
acagagaugcaaguguguauuu

SEQ ID NO: 134330 - RNA, 22 nt, Human
uccucaggcugccuggaagacu

SEQ ID NO: 134331 - RNA, 22 nt, Human
agcagcaucuucuguucuccgc

SEQ ID NO: 134332 - RNA, 22 nt, Human
aguggcugaauauauuuuacua

SEQ ID NO: 134333 - RNA, 22 nt, Human
uauucacaguugauuuacaguu

SEQ ID NO: 134334 - RNA, 22 nt, Human
ggucccugcugaagccuuggug

SEQ ID NO: 134335 - RNA, 22 nt, Human
ucuaaagaagaggguucugcgg

SEQ ID NO: 134336 - RNA, 22 nt, Human
uuacaguuagaaucugaugaaa

SEQ ID NO: 134337 - RNA, 22 nt, Human
ccugagagagaagcgaccuggu

SEQ ID NO: 134338 - RNA, 22 nt, Human
agagcagagggcucugggacaa

SEQ ID NO: 134339 - RNA, 22 nt, Human
ccacacagggggaugaguuauu

SEQ ID NO: 134340 - RNA, 22 nt, Human
gccuggcccagggcucuuguug

SEQ ID NO: 134341 - RNA, 22 nt, Human
uauaucaccaaaaacaguucug

SEQ ID NO: 134342 - RNA, 22 nt, Human
auguagcagaagauguuuuccu

SEQ ID NO: 134343 - RNA, 22 nt, Human
aucucucugcccaggggcugug

SEQ ID NO: 134344 - RNA, 22 nt, Human
aggcugugacagggucauggag

SEQ ID NO: 134345 - RNA, 22 nt, Human
aaacucuggagauguuuaugca

SEQ ID NO: 134346 - RNA, 20 nt, Human
uuagcaguagagugugcuuc

SEQ ID NO: 134347 - RNA, 16 nt, Human
uggaaggggucuccgg

SEQ ID NO: 134348 - RNA, 22 nt, Human
caguguguggauccucccagga

SEQ ID NO: 134349 - RNA, 22 nt, Human
ucacaaaugaggaaaucgagca

SEQ ID NO: 134350 - RNA, 22 nt, Human
caguucuuauuuggccaguguc

SEQ ID NO: 134351 - RNA, 22 nt, Human
uucagaauauuuguuuuacaug

SEQ ID NO: 134352 - RNA, 22 nt, Human
aggccagaugucgggcuagaag

SEQ ID NO: 134353 - RNA, 19 nt, Human
ugucucagugucccuuccu

SEQ ID NO: 134354 - RNA, 22 nt, Human
cugucuccagggcaggugcagg

SEQ ID NO: 134355 - RNA, 22 nt, Human
auguauuucuauguagugaaga

SEQ ID NO: 134356 - RNA, 22 nt, Human
ucauguguguuucauguaugga

SEQ ID NO: 134357 - RNA, 22 nt, Human
gcuguccugggaacaggcacua

SEQ ID NO: 134358 - RNA, 22 nt, Human
gcugccaguguggcaugaugca

SEQ ID NO: 134359 - RNA, 22 nt, Human
cucuucuuuaguccagaccauc

SEQ ID NO: 134360 - RNA, 22 nt, Human
uccagucaucucccuucacauu

SEQ ID NO: 134361 - RNA, 22 nt, Human
aagugggaauagaaaugaaggu

SEQ ID NO: 134362 - RNA, 22 nt, Human
ccagggugggguccaggaacca

SEQ ID NO: 134363 - RNA, 22 nt, Human
cugggccugguagggcuugaaa

SEQ ID NO: 134364 - RNA, 22 nt, Human
cagauggaacacagaaaggaga

SEQ ID NO: 134365 - RNA, 22 nt, Human
uguuuuaaagccauugccuuuc

SEQ ID NO: 134366 - RNA, 22 nt, Human
ccuuuuauacucuguccucugg

SEQ ID NO: 134367 - RNA, 21 nt, Human
ugcauaaagaaauacaaauac

SEQ ID NO: 134368 - RNA, 22 nt, Human
aaaucuguaagcaauugcucag

SEQ ID NO: 134369 - RNA, 22 nt, Human
ucagugugaggucuuccacccg

SEQ ID NO: 134370 - RNA, 22 nt, Human
gaggccugggagccuguccucc

SEQ ID NO: 134371 - RNA, 22 nt, Human
gccucugggcucugccccuggc

SEQ ID NO: 134372 - RNA, 22 nt, Human
cuuuucucuuacauuccacugg

SEQ ID NO: 134373 - RNA, 22 nt, Human
uaauuauuugaagacauuagag

SEQ ID NO: 134374 - RNA, 22 nt, Human
caagagcauuuaguuagcuggu

SEQ ID NO: 134375 - RNA, 19 nt, Human
cucagcuguagcucaugug

SEQ ID NO: 134376 - RNA, 22 nt, Human
cugcugcaggaugggcacucug

SEQ ID NO: 134377 - RNA, 19 nt, Human
gcacugaagaguuggucac

SEQ ID NO: 134378 - RNA, 22 nt, Human
guucucucucuugccugggugg

SEQ ID NO: 134379 - RNA, 22 nt, Human
caagggcucacggucugcuggg

SEQ ID NO: 134380 - RNA, 22 nt, Human
gagagcuguguucauucuacca

SEQ ID NO: 134381 - RNA, 22 nt, Human
ccuggcuuccuggagcucacaa

SEQ ID NO: 134382 - RNA, 22 nt, Human
agacacaggauucugcauuucu

SEQ ID NO: 134383 - RNA, 22 nt, Human
aaaaguuaccucuguaauauaa

SEQ ID NO: 134384 - RNA, 22 nt, Human
gaaggccucacucugcagcaua

SEQ ID NO: 134385 - RNA, 22 nt, Human
acccaggagcaggcugggcagu

SEQ ID NO: 134386 - RNA, 22 nt, Human
ucacaccuguaaucccaggccu

SEQ ID NO: 134387 - RNA, 22 nt, Human
cugcccagaaucacucacucga

SEQ ID NO: 134388 - RNA, 22 nt, Human
ggcagggaaacagcugauccca

SEQ ID NO: 134389 - RNA, 22 nt, Human
auucaguuaaaaacuguacuuc

SEQ ID NO: 134390 - RNA, 17 nt, Human
ugaggccugcaucagug

SEQ ID NO: 134391 - RNA, 22 nt, Human
ccucuggcaacuucacagccca

SEQ ID NO: 134392 - RNA, 22 nt, Human
aguggcuguacuauuuuuucau

SEQ ID NO: 134393 - RNA, 23 nt, Human
uuguacagcccagauuccucuuc

SEQ ID NO: 134394 - RNA, 22 nt, Human
cagcauggggaucacuguaggc

SEQ ID NO: 134395 - RNA, 22 nt, Human
agcagcauguucauuacauuau

SEQ ID NO: 134396 - RNA, 22 nt, Human
acaguagugcucaaucaguguu

SEQ ID NO: 134397 - RNA, 23 nt, Human
uuuggacuugugacucuucuccu

SEQ ID NO: 134398 - RNA, 22 nt, Human
ugagccuggccugcagagacca

SEQ ID NO: 134399 - RNA, 22 nt, Human
cugagcauggccgguccauggu

SEQ ID NO: 134400 - RNA, 22 nt, Human
gcagguguggaguggggugagc

SEQ ID NO: 134401 - RNA, 22 nt, Human
aagauucuacaguagguacauu

SEQ ID NO: 134402 - RNA, 22 nt, Human
auuuggcaacauuaauugaauc

SEQ ID NO: 134403 - RNA, 22 nt, Human
guuguauagagggcaugaaucu

SEQ ID NO: 134404 - RNA, 22 nt, Human
ccaggcagcucugauuuauguc

SEQ ID NO: 134405 - RNA, 22 nt, Human
cucacugugaccucagcagaca

SEQ ID NO: 134406 - RNA, 22 nt, Human
agcagccacagucugggacagg

SEQ ID NO: 134407 - RNA, 22 nt, Human
gaugagcauuguuucauguguu

SEQ ID NO: 134408 - RNA, 22 nt, Human
ucccaggguccucuucuggaau

SEQ ID NO: 134409 - RNA, 22 nt, Human
uuugcaguagacaucuuauuuu

SEQ ID NO: 134410 - RNA, 22 nt, Human
agggcagaggcggacacggaag

SEQ ID NO: 134411 - RNA, 22 nt, Human
uggcagaggaggcucagauuga

SEQ ID NO: 134412 - RNA, 22 nt, Human
ucacaugcuacugagccagacc

SEQ ID NO: 134413 - RNA, 22 nt, Human
agaaagcacucugucuuuuacc

SEQ ID NO: 134414 - RNA, 22 nt, Human
uaguccagccuuggguguagcc

SEQ ID NO: 134415 - RNA, 22 nt, Human
auauuauucuagcucuugugug

SEQ ID NO: 134416 - RNA, 22 nt, Human
uggcugugggaugagagccuca

SEQ ID NO: 134417 - RNA, 22 nt, Human
uaugcacacaggcuuaauucau

SEQ ID NO: 134418 - RNA, 22 nt, Human
guacaguagagccagguucagu

SEQ ID NO: 134419 - RNA, 22 nt, Human
ggguccagcgacagcaggcuca

SEQ ID NO: 134420 - RNA, 18 nt, Human
ucuuccaacacugacacc

SEQ ID NO: 134421 - RNA, 22 nt, Human
gcuccugucuuggggcacuggc

SEQ ID NO: 134422 - RNA, 22 nt, Human
ggaugcugacuuuggagcaugg

SEQ ID NO: 134423 - RNA, 22 nt, Human
cccagccucuguuugcuccucu

SEQ ID NO: 134424 - RNA, 22 nt, Human
ugcagaaggccugacauugcac

SEQ ID NO: 134425 - RNA, 20 nt, Human
ccucaggaugagggugagca

SEQ ID NO: 134426 - RNA, 22 nt, Human
aguuauaaucugcuacugauau

SEQ ID NO: 134427 - RNA, 22 nt, Human
gacauucacagguaaacauucc

SEQ ID NO: 134428 - RNA, 22 nt, Human
acagaguauuggaaaggcagug

SEQ ID NO: 134429 - RNA, 22 nt, Human
caggaggcuccuagggcucugu

SEQ ID NO: 134430 - RNA, 22 nt, Human
aaugucugccagaacugaucau

SEQ ID NO: 134431 - RNA, 18 nt, Human
gagcugccauauuuaguu

SEQ ID NO: 134432 - RNA, 22 nt, Human
gggcuaggcuuggccagcacug

SEQ ID NO: 134433 - RNA, 22 nt, Human
acauuuguaugcguuuuuacug

SEQ ID NO: 134434 - RNA, 22 nt, Human
ggacucuguuuuccugaucacu

SEQ ID NO: 134435 - RNA, 15 nt, Human
cuguggcuaaccuaa

SEQ ID NO: 134436 - RNA, 22 nt, Human
ucagugaucuaaggguauggcc

SEQ ID NO: 134437 - RNA, 22 nt, Human
aauauccacacugugucccugc

SEQ ID NO: 134438 - RNA, 22 nt, Human
cucagcagcagggaagagguca

SEQ ID NO: 134439 - RNA, 22 nt, Human
augccugucucagggucuguuu

SEQ ID NO: 134440 - RNA, 22 nt, Human
gggcugcugcugccagcgacac

SEQ ID NO: 134441 - RNA, 22 nt, Human
uaacagaagaaaacauauugga

SEQ ID NO: 134442 - RNA, 22 nt, Human
gaguuauucuagguccuuugua

SEQ ID NO: 134443 - RNA, 22 nt, Human
cuacugaguccuucagcugcca

SEQ ID NO: 134444 - RNA, 22 nt, Human
uacccaggagaaacagcagggc

SEQ ID NO: 134445 - RNA, 21 nt, Human
uuucacaaaaguaugugacaa

SEQ ID NO: 134446 - RNA, 22 nt, Human
agacaucagcuugugugcaggg

SEQ ID NO: 134447 - RNA, 22 nt, Human
ccaggagcaaagaucacuggga

SEQ ID NO: 134448 - RNA, 22 nt, Human
ucucaggaguagugggauccau

SEQ ID NO: 134449 - RNA, 19 nt, Human
aauacaguguuauagaauu

SEQ ID NO: 134450 - RNA, 22 nt, Human
uucuccaacacaagcaugaugu

SEQ ID NO: 134451 - RNA, 22 nt, Human
agucagugaaaacuagaauguu

SEQ ID NO: 134452 - RNA, 22 nt, Human
uuaacauuguccuuagcagauu

SEQ ID NO: 134453 - RNA, 22 nt, Human
cagcagcugcgugcccaggccg

SEQ ID NO: 134454 - RNA, 22 nt, Human
cugcuccacaccuccauuuccu

SEQ ID NO: 134455 - RNA, 22 nt, Human
ccugggagcuguggaaaggcug

SEQ ID NO: 134456 - RNA, 22 nt, Human
accucugcaaugcaaugucaug

SEQ ID NO: 134457 - RNA, 22 nt, Human
cagcagcaugaauucgagccac

SEQ ID NO: 134458 - RNA, 22 nt, Human
ugaugcugagccugggacugac

SEQ ID NO: 134459 - RNA, 22 nt, Human
cucugcauuuuaacagaugauu

SEQ ID NO: 134460 - RNA, 17 nt, Human
gugcagggaugaaggau

SEQ ID NO: 134461 - RNA, 22 nt, Human
ugcuauaagaauuauauuacuc

SEQ ID NO: 134462 - RNA, 22 nt, Human
ucacaacucuuuccauuuaaua

SEQ ID NO: 134463 - RNA, 21 nt, Human
aaggagccuaggaggcucagg

SEQ ID NO: 134464 - RNA, 22 nt, Human
uccagagggcgauggcuggggg

SEQ ID NO: 134465 - RNA, 22 nt, Human
gcugaagagagaugcguccagc

SEQ ID NO: 134466 - RNA, 22 nt, Human
agugucauaugccacugcaucc

SEQ ID NO: 134467 - RNA, 22 nt, Human
uucauugugauucuuggcuagc

SEQ ID NO: 134468 - RNA, 19 nt, Human
uggcagggagaguuugaag

SEQ ID NO: 134469 - RNA, 21 nt, Human
ccugagccuguuuauccagaa

SEQ ID NO: 134470 - RNA, 22 nt, Human
cugaaaauguuacacaggaaga

SEQ ID NO: 134471 - RNA, 22 nt, Human
ugcauuguaggauguuuagcag

SEQ ID NO: 134472 - RNA, 22 nt, Human
uuugaaaggaaguuaauacuuu

SEQ ID NO: 134473 - RNA, 20 nt, Human
gggguuggcuggcacaggga

SEQ ID NO: 134474 - RNA, 22 nt, Human
cagucucucagcuuucagcugu

SEQ ID NO: 134475 - RNA, 22 nt, Human
uuugacuuugggcucuaacuca

SEQ ID NO: 134476 - RNA, 22 nt, Human
cagcuggcuggucagugcacaa

SEQ ID NO: 134477 - RNA, 20 nt, Human
ucacaggggaccaggagcag

SEQ ID NO: 134478 - RNA, 21 nt, Human
ggcagcugaccgcgcggugca

SEQ ID NO: 134479 - RNA, 22 nt, Human
aguuuucugccucuggaugcgu

SEQ ID NO: 134480 - RNA, 22 nt, Human
aggccuggccugggcggcauug

SEQ ID NO: 134481 - RNA, 22 nt, Human
ucugucacuuuuauuuacugaa

SEQ ID NO: 134482 - RNA, 22 nt, Human
agagccagcaagugaauaguga

SEQ ID NO: 134483 - RNA, 22 nt, Human
uuugaaagacagaauauuuuug

SEQ ID NO: 134484 - RNA, 20 nt, Human
ugugugcuaggacuacagug

SEQ ID NO: 134485 - RNA, 22 nt, Human
ucuuuccuagaggcugaugagu

SEQ ID NO: 134486 - RNA, 22 nt, Human
uuugaacugauaaucuucuguu

SEQ ID NO: 134487 - RNA, 22 nt, Human
uggagaagucaaagugaacagg

SEQ ID NO: 134488 - RNA, 20 nt, Human
agccagaagaaggcuggaga

SEQ ID NO: 134489 - RNA, 22 nt, Human
gggccuggcaugcagccccguu

SEQ ID NO: 134490 - RNA, 22 nt, Human
aguacauuuuucaguggggagu

SEQ ID NO: 134491 - RNA, 22 nt, Human
cagacuugacggcagcugcuuu

SEQ ID NO: 134492 - RNA, 22 nt, Human
uuguauuagcuguaaauuuucu

SEQ ID NO: 134493 - RNA, 21 nt, Human
aggcucagagaucaaacagua

SEQ ID NO: 134494 - RNA, 22 nt, Human
ucagagaaaugaaguagggauu

SEQ ID NO: 134495 - RNA, 22 nt, Human
acaguaauaaguguuggugagg

SEQ ID NO: 134496 - RNA, 22 nt, Human
gcucagagaaucagcagacacc

SEQ ID NO: 134497 - RNA, 22 nt, Human
caggguggaagcuguagagugg

SEQ ID NO: 134498 - RNA, 22 nt, Human
ucgagcucuggagccaaggaug

SEQ ID NO: 134499 - RNA, 22 nt, Human
ucuaaaaaagucuguucacuug

SEQ ID NO: 134500 - RNA, 22 nt, Human
uucuguguugugacauucuaga

SEQ ID NO: 134501 - RNA, 22 nt, Human
gcaggccugacuguagggggca

SEQ ID NO: 134502 - RNA, 22 nt, Human
ucuucagacuccaaauguuuua

SEQ ID NO: 134503 - RNA, 22 nt, Human
caggcaccccaggugagcacug

SEQ ID NO: 134504 - RNA, 22 nt, Human
cuguccugauggugccacuggu

SEQ ID NO: 134505 - RNA, 22 nt, Human
ccagcagcccucuuccaagacu

SEQ ID NO: 134506 - RNA, 22 nt, Human
aaguauauuuagcugagcuugu

SEQ ID NO: 134507 - RNA, 17 nt, Human
acaagcaguggccaugg

SEQ ID NO: 134508 - RNA, 22 nt, Human
uuuaaauuuagaagaaacacug

SEQ ID NO: 134509 - RNA, 22 nt, Human
ugagccuguggggugacaacca

SEQ ID NO: 134510 - RNA, 22 nt, Human
gcucuguguccacagcuggaaa

SEQ ID NO: 134511 - RNA, 19 nt, Human
aggcugugaggggaaggaa

SEQ ID NO: 134512 - RNA, 22 nt, Human
acacagggauauuucagguggu

SEQ ID NO: 134513 - RNA, 22 nt, Human
uggaaugacagagagucugaau

SEQ ID NO: 134514 - RNA, 18 nt, Human
uggacaggguggagaaaa

SEQ ID NO: 134515 - RNA, 22 nt, Human
agcugugugaccuagggcaagc

SEQ ID NO: 134516 - RNA, 22 nt, Human
aauguuaaaaccuucagugcuu

SEQ ID NO: 134517 - RNA, 20 nt, Human
aucagcaacugccacucagu

SEQ ID NO: 134518 - RNA, 23 nt, Human
uaucauuucagcucucugccugg

SEQ ID NO: 134519 - RNA, 22 nt, Human
gccugguggacacugggcauca

SEQ ID NO: 134520 - RNA, 22 nt, Human
uuagaaaucaccucugaagauc

SEQ ID NO: 134521 - RNA, 22 nt, Human
guacauguugguuguuuccagu

SEQ ID NO: 134522 - RNA, 20 nt, Human
gcugccuguuucuguaagua

SEQ ID NO: 134523 - RNA, 22 nt, Human
ccagucagccaagcugcagcgg

SEQ ID NO: 134524 - RNA, 22 nt, Human
acagugaucaguuacugucugu

SEQ ID NO: 134525 - RNA, 22 nt, Human
cugagcuggucuauggacuugg

SEQ ID NO: 134526 - RNA, 20 nt, Human
ccagaagagaugaucaucca

SEQ ID NO: 134527 - RNA, 22 nt, Human
uugucuguccaggcaccccaag

SEQ ID NO: 134528 - RNA, 22 nt, Human
cucucuuucauuggucgccuug

SEQ ID NO: 134529 - RNA, 22 nt, Human
gcugagugaaaguuugcugugu

SEQ ID NO: 134530 - RNA, 22 nt, Human
ugggaccaagucauuucuuuag

SEQ ID NO: 134531 - RNA, 21 nt, Human
acaggcucuggggaugcuggg

SEQ ID NO: 134532 - RNA, 22 nt, Human
uuaguuuucccaucuuuauggu

SEQ ID NO: 134533 - RNA, 23 nt, Human
cccagagcacagccuccagaugc

SEQ ID NO: 134534 - RNA, 22 nt, Human
agggacuuguguccuauguaug

SEQ ID NO: 134535 - RNA, 22 nt, Human
aaagguaguacuucuagaaggg

SEQ ID NO: 134536 - RNA, 22 nt, Human
gugauauuucaagaguggggca

SEQ ID NO: 134537 - RNA, 22 nt, Human
gggcaugguggugcacaccugu

SEQ ID NO: 134538 - RNA, 22 nt, Human
gcuguauuuaacaacuggcuca

SEQ ID NO: 134539 - RNA, 22 nt, Human
aaggcagagggcuggaucagag

SEQ ID NO: 134540 - RNA, 22 nt, Human
aacaguauugguugaacucaag

SEQ ID NO: 134541 - RNA, 22 nt, Human
uuucccagagguaugaauaagu

SEQ ID NO: 134542 - RNA, 23 nt, Human
uccuccuuuugcuugugcuuccc

SEQ ID NO: 134543 - RNA, 22 nt, Human
augcccgauaccuaguuaacuc

SEQ ID NO: 134544 - RNA, 22 nt, Human
cucacuggcaagacuacaggug

SEQ ID NO: 134545 - RNA, 22 nt, Human
agcuggagcuucaagcagguaa

SEQ ID NO: 134546 - RNA, 22 nt, Human
ucuugacaacuauacuacuuac

SEQ ID NO: 134547 - RNA, 22 nt, Human
cagacaugauguaagcagaggc

SEQ ID NO: 134548 - RNA, 22 nt, Human
cucagggggaaucaggucacag

SEQ ID NO: 134549 - RNA, 22 nt, Human
ggcugcugugaccucaggugau

SEQ ID NO: 134550 - RNA, 22 nt, Human
auucucucuucugcugcccgug

SEQ ID NO: 134551 - RNA, 22 nt, Human
ucuuguccuaagagcuggauuc

SEQ ID NO: 134552 - RNA, 22 nt, Human
auugaaagcauggauuuggauu

SEQ ID NO: 134553 - RNA, 22 nt, Human
acagcagccugcagcccugugu

SEQ ID NO: 134554 - RNA, 22 nt, Human
uggcagccacaucucguggauu

SEQ ID NO: 134555 - RNA, 22 nt, Human
gccuggaggggccaggguggua

SEQ ID NO: 134556 - RNA, 22 nt, Human
ugagcccagagcccuuguaggg

SEQ ID NO: 134557 - RNA, 17 nt, Human
aggcugcugggccaggg

SEQ ID NO: 134558 - RNA, 22 nt, Human
agcccaugcaacaggccuagcg

SEQ ID NO: 134559 - RNA, 22 nt, Human
uccuccaggucuaggguggcuu

SEQ ID NO: 134560 - RNA, 22 nt, Human
cagggccaagccccuuuggcug

SEQ ID NO: 134561 - RNA, 22 nt, Human
uccuggagauaauugcagugaa

SEQ ID NO: 134562 - RNA, 22 nt, Human
accccagcucugagccacacca

SEQ ID NO: 134563 - RNA, 22 nt, Human
auuguacuuuuauuacauguag

SEQ ID NO: 134564 - RNA, 22 nt, Human
cugcucugugguccaugagaca

SEQ ID NO: 134565 - RNA, 22 nt, Human
agagcuguggauaguccuggau

SEQ ID NO: 134566 - RNA, 22 nt, Human
agccagggauggcagugcccag

SEQ ID NO: 134567 - RNA, 22 nt, Human
cagcugcccaggccaccuggag

SEQ ID NO: 134568 - RNA, 22 nt, Human
uuugcagugauucuugcaguga

SEQ ID NO: 134569 - RNA, 22 nt, Human
guacaguaguaaaagugaauga

SEQ ID NO: 134570 - RNA, 22 nt, Human
uugcuuuguggugguucuucca

SEQ ID NO: 134571 - RNA, 22 nt, Human
cugccucaugcugccugcagcc

SEQ ID NO: 134572 - RNA, 22 nt, Human
caguauauuuuagagaaguccc

SEQ ID NO: 134573 - RNA, 22 nt, Human
ggcuggcuuucucuccgcaccu

SEQ ID NO: 134574 - RNA, 22 nt, Human
augaggcaaucaugguccaguu

SEQ ID NO: 134575 - RNA, 22 nt, Human
ucacaugaguauuauuuuccaa

SEQ ID NO: 134576 - RNA, 22 nt, Human
ccucugcucugguccaugugcu

SEQ ID NO: 134577 - RNA, 23 nt, Human
aggcccaacucugugagggcugc

SEQ ID NO: 134578 - RNA, 22 nt, Human
uggcuggggccacaguuuuccu

SEQ ID NO: 134579 - RNA, 22 nt, Human
aggugagguuugggagguguca

SEQ ID NO: 134580 - RNA, 22 nt, Human
ugugugacccccagugaagccu

SEQ ID NO: 134581 - RNA, 22 nt, Human
ucuggcucuccagugcucuuag

SEQ ID NO: 134582 - RNA, 22 nt, Human
gugggggcaggcagugcuagga

SEQ ID NO: 134583 - RNA, 21 nt, Human
ccugggagaucagcugccuuc

SEQ ID NO: 134584 - RNA, 22 nt, Human
aucuaggauuugaaugcacagu

SEQ ID NO: 134585 - RNA, 22 nt, Human
aggucccaggcauagcuggucu

SEQ ID NO: 134586 - RNA, 23 nt, Human
ucagaaugcacugaauuuacccu

SEQ ID NO: 134587 - RNA, 20 nt, Human
ugccaugguaacagagugug

SEQ ID NO: 134588 - RNA, 22 nt, Human
aaaugcacaaaguaaguguaau

SEQ ID NO: 134589 - RNA, 22 nt, Human
uccagggaucuuuagagucuuu

SEQ ID NO: 134590 - RNA, 22 nt, Human
agagccagcaacucuagcccug

SEQ ID NO: 134591 - RNA, 19 nt, Human
ugugaaagcuaguguucuu

SEQ ID NO: 134592 - RNA, 22 nt, Human
cuggugagacgguugacaggag

SEQ ID NO: 134593 - RNA, 22 nt, Human
cguggcugguggaccugagggc

SEQ ID NO: 134594 - RNA, 22 nt, Human
acagagcugggugcccccugga

SEQ ID NO: 134595 - RNA, 22 nt, Human
cuggcagcgugagcagcaucca

SEQ ID NO: 134596 - RNA, 22 nt, Human
ugcagcauugcaaagcagucuu

SEQ ID NO: 134597 - RNA, 22 nt, Human
caguguggagggagagagccug

SEQ ID NO: 134598 - RNA, 22 nt, Human
cugagagcagggacuugagcca

SEQ ID NO: 134599 - RNA, 22 nt, Human
uaacagaauagcagaaacagaa

SEQ ID NO: 134600 - RNA, 22 nt, Human
acugugugggccgcucacuggg

SEQ ID NO: 134601 - RNA, 22 nt, Human
ugccuggguucccaccccaaag

SEQ ID NO: 134602 - RNA, 22 nt, Human
aagccagauagaagaacucauu

SEQ ID NO: 134603 - RNA, 22 nt, Human
gcugccugcacagagcugcuuu

SEQ ID NO: 134604 - RNA, 22 nt, Human
gcaggaguguggugggacaucc

SEQ ID NO: 134605 - RNA, 22 nt, Human
auucuucacaccuguuccuguu

SEQ ID NO: 134606 - RNA, 23 nt, Human
agccuucaggcaaugucaguaga

SEQ ID NO: 134607 - RNA, 22 nt, Human
uugggcucaggaguuugagacc

SEQ ID NO: 134608 - RNA, 22 nt, Human
gcagagcuaucuucuggauuug

SEQ ID NO: 134609 - RNA, 20 nt, Human
aggcacuguugucuguaucc

SEQ ID NO: 134610 - RNA, 22 nt, Human
cccugccuucuuggccuuuaaa

SEQ ID NO: 134611 - RNA, 22 nt, Human
ugggccugggcuccuguccucu

SEQ ID NO: 134612 - RNA, 22 nt, Human
aggcugugugcuccuuaugaga

SEQ ID NO: 134613 - RNA, 22 nt, Human
auguguauugagcaccuacugc

SEQ ID NO: 134614 - RNA, 22 nt, Human
cugcucugcaaggcacagugau

SEQ ID NO: 134615 - RNA, 22 nt, Human
ucccagagacagagccuccucc

SEQ ID NO: 134616 - RNA, 22 nt, Human
ucaaaugcacguagagaaaaua

SEQ ID NO: 134617 - RNA, 22 nt, Human
uuuacagugucuuguugacugu

SEQ ID NO: 134618 - RNA, 22 nt, Human
ucuuucaaugagcauucuuucc

SEQ ID NO: 134619 - RNA, 20 nt, Human
ugcuggggacauacagggug

SEQ ID NO: 134620 - RNA, 21 nt, Human
gacaggggaagaagcaaggag

SEQ ID NO: 134621 - RNA, 22 nt, Human
gugcauguuaaugguguacaaa

SEQ ID NO: 134622 - RNA, 22 nt, Human
uagcugucagcaaucaaguggu

SEQ ID NO: 134623 - RNA, 22 nt, Human
cagcugagaccagaaugcaggu

SEQ ID NO: 134624 - RNA, 22 nt, Human
uagucccauuuugagguauuug

SEQ ID NO: 134625 - RNA, 22 nt, Human
uguauuuuuagaccuuuagacc

SEQ ID NO: 134626 - RNA, 22 nt, Human
gaaggaaaggucucaugccuuu

SEQ ID NO: 134627 - RNA, 22 nt, Human
ggcaggugcaccugagccaucu

SEQ ID NO: 134628 - RNA, 22 nt, Human
uucaggauucuuucagacuggg

SEQ ID NO: 134629 - RNA, 21 nt, Human
gaugaagcaaucuuucuguug

SEQ ID NO: 134630 - RNA, 22 nt, Human
gaagcucucaaacucuccccuu

SEQ ID NO: 134631 - RNA, 22 nt, Human
uuuccucuuauacaguguuuau

SEQ ID NO: 134632 - RNA, 22 nt, Human
guuuggcucugggugccugugc

SEQ ID NO: 134633 - RNA, 22 nt, Human
aucacauuguuagcauagacug

SEQ ID NO: 134634 - RNA, 22 nt, Human
ugccaggggaccuagggauguc

SEQ ID NO: 134635 - RNA, 22 nt, Human
accugagcaugccaggagagug

SEQ ID NO: 134636 - RNA, 22 nt, Human
ggccucgcggcuucugguggcu

SEQ ID NO: 134637 - RNA, 22 nt, Human
auucugucuuuuuaaaauaaua

SEQ ID NO: 134638 - RNA, 22 nt, Human
cuucagaacuauaaaaaguacu

SEQ ID NO: 134639 - RNA, 22 nt, Human
uggcucagccuggcccuuucau

SEQ ID NO: 134640 - RNA, 22 nt, Human
ccugggcaacauagugagaccc

SEQ ID NO: 134641 - RNA, 22 nt, Human
agaaaucugacugcugugcaca

SEQ ID NO: 134642 - RNA, 22 nt, Human
aagucauugguagcuugauagg

SEQ ID NO: 134643 - RNA, 22 nt, Human
ugccucugugugcaggugagca

SEQ ID NO: 134644 - RNA, 22 nt, Human
uuucaaugacacaaaagagaaa

SEQ ID NO: 134645 - RNA, 22 nt, Human
augaugugugcugaucaagcuu

SEQ ID NO: 134646 - RNA, 22 nt, Human
uagaaauguugguauuaacauu

SEQ ID NO: 134647 - RNA, 22 nt, Human
aggcucugguuggcaaguaaag

SEQ ID NO: 134648 - RNA, 22 nt, Human
gcuguguaucagaugccacggg

SEQ ID NO: 134649 - RNA, 20 nt, Human
gaggccucagccucagcucc

SEQ ID NO: 134650 - RNA, 22 nt, Human
augaagcuaaacccugcagcca

SEQ ID NO: 134651 - RNA, 22 nt, Human
gccucugcgccucagccgaccu

SEQ ID NO: 134652 - RNA, 19 nt, Human
ucaaugcaugaaaucagcc

SEQ ID NO: 134653 - RNA, 22 nt, Human
uguaugcuuuccaaaaaugcug

SEQ ID NO: 134654 - RNA, 22 nt, Human
aaagacuuggcuuaugauuugc

SEQ ID NO: 134655 - RNA, 22 nt, Human
aucacaggugguaggaaaagaa

SEQ ID NO: 134656 - RNA, 22 nt, Human
ccagccugaaaugccucauccu

SEQ ID NO: 134657 - RNA, 22 nt, Human
augcucugggcaggagcccugg

SEQ ID NO: 134658 - RNA, 19 nt, Human
uuuacaaguucuuuguaug

SEQ ID NO: 134659 - RNA, 23 nt, Human
ccucagcauggcaggagcccagc

SEQ ID NO: 134660 - RNA, 20 nt, Human
uucacagaggacucagguca

SEQ ID NO: 134661 - RNA, 22 nt, Human
cugcccugcuugaugacagcga

SEQ ID NO: 134662 - RNA, 22 nt, Human
aggcucagaggugagcaucugc

SEQ ID NO: 134663 - RNA, 23 nt, Human
aaggucacagaacuuagcaagcc

SEQ ID NO: 134664 - RNA, 22 nt, Human
cagcuucugcuaucgaacaucu

SEQ ID NO: 134665 - RNA, 22 nt, Human
uggcucaggccacuucuuuuau

SEQ ID NO: 134666 - RNA, 22 nt, Human
cucuguguuccggguugcugcu

SEQ ID NO: 134667 - RNA, 22 nt, Human
gagauauguuagaaagcuauug

SEQ ID NO: 134668 - RNA, 22 nt, Human
gcagccacccucaaggcugaau

SEQ ID NO: 134669 - RNA, 22 nt, Human
aagaugauaggacuugcuuaag

SEQ ID NO: 134670 - RNA, 22 nt, Human
accccagcccugcuucugggag

SEQ ID NO: 134671 - RNA, 22 nt, Human
uccagccaugacucggacagug

SEQ ID NO: 134672 - RNA, 22 nt, Human
ggaggccagggacccagucagc

SEQ ID NO: 134673 - RNA, 22 nt, Human
gccugggagggcagcagugugg

SEQ ID NO: 134674 - RNA, 22 nt, Human
ggaguuggugagcaccaggcuu

SEQ ID NO: 134675 - RNA, 21 nt, Human
uguggcaucauugaucuguga

SEQ ID NO: 134676 - RNA, 22 nt, Human
cuaacuuugucaucuucccuuu

SEQ ID NO: 134677 - RNA, 22 nt, Human
cuccucugucuaccacgagggu

SEQ ID NO: 134678 - RNA, 18 nt, Human
uuaagagcugaaagggga

SEQ ID NO: 134679 - RNA, 22 nt, Human
aggggugauuugggacaggaca

SEQ ID NO: 134680 - RNA, 22 nt, Human
uaacagaaacagauaaguguaa

SEQ ID NO: 134681 - RNA, 22 nt, Human
uccuuuccagccucaccucagc

SEQ ID NO: 134682 - RNA, 22 nt, Human
aucuggcugagcgaggcccaca

SEQ ID NO: 134683 - RNA, 22 nt, Human
cuggcugucuuggaggaaggag

SEQ ID NO: 134684 - RNA, 22 nt, Human
caggugcuguccugcacauguc

SEQ ID NO: 134685 - RNA, 22 nt, Human
ugcaguguuuggaugcugaguc

SEQ ID NO: 134686 - RNA, 22 nt, Human
agagcuguucaacguagcaaug

SEQ ID NO: 134687 - RNA, 22 nt, Human
uaaccauauuuuccauuaaguu

SEQ ID NO: 134688 - RNA, 22 nt, Human
ucuuagaaauuccccaguggcu

SEQ ID NO: 134689 - RNA, 22 nt, Human
ugugggugguaaaauacaauga

SEQ ID NO: 134690 - RNA, 20 nt, Human
ugggccuguggcagaagucu

SEQ ID NO: 134691 - RNA, 22 nt, Human
uugcauuguugcaaugaaguau

SEQ ID NO: 134692 - RNA, 22 nt, Human
uaacagaaauagaaaugagagu

SEQ ID NO: 134693 - RNA, 22 nt, Human
cauugcacuccaucuugggcaa

SEQ ID NO: 134694 - RNA, 22 nt, Human
ucagagaaguaagguggggugc

SEQ ID NO: 134695 - RNA, 22 nt, Human
ggccagaggccacagcuguguc

SEQ ID NO: 134696 - RNA, 23 nt, Human
ugcuguccaacagacuggccaug

SEQ ID NO: 134697 - RNA, 17 nt, Human
gcuggcugacccaugcc

SEQ ID NO: 134698 - RNA, 22 nt, Human
cugaggucaauuaaucaacaac

SEQ ID NO: 134699 - RNA, 22 nt, Human
ucacugcucuccaauguggagu

SEQ ID NO: 134700 - RNA, 19 nt, Human
caucuggaugauucuccug

SEQ ID NO: 134701 - RNA, 22 nt, Human
gccuucaggaggguuccagaca

SEQ ID NO: 134702 - RNA, 22 nt, Human
uuuaucugcuaucugcugugcu

SEQ ID NO: 134703 - RNA, 22 nt, Human
ugcagaagaccuuccagggcug

SEQ ID NO: 134704 - RNA, 22 nt, Human
cugugcugagugaugugacuua

SEQ ID NO: 134705 - RNA, 19 nt, Human
uggggccuccugucccugg

SEQ ID NO: 134706 - RNA, 22 nt, Human
auugaaagguuuugagcagaua

SEQ ID NO: 134707 - RNA, 22 nt, Human
aggcacugaaggaagcuugcgc

SEQ ID NO: 134708 - RNA, 22 nt, Human
aaauuauuaugccccucuauaa

SEQ ID NO: 134709 - RNA, 22 nt, Human
acugggccuggauuggcguguc

SEQ ID NO: 134710 - RNA, 22 nt, Human
gccugcuggcuguccauugcag

SEQ ID NO: 134711 - RNA, 22 nt, Human
auuuccucaugaucauaaugca

SEQ ID NO: 134712 - RNA, 22 nt, Human
cuucaagauauuucuagaauca

SEQ ID NO: 134713 - RNA, 20 nt, Human
aaacauucauguacaaguga

SEQ ID NO: 134714 - RNA, 22 nt, Human
ugugugccagccuacgaggagc

SEQ ID NO: 134715 - RNA, 22 nt, Human
aaagagcuaacauugccgagau

SEQ ID NO: 134716 - RNA, 22 nt, Human
ucuccuucgaggcccagcuccc

SEQ ID NO: 134717 - RNA, 17 nt, Human
aagauuucauuagcuga

SEQ ID NO: 134718 - RNA, 22 nt, Human
cuuacagagaagaaaauguagu

SEQ ID NO: 134719 - RNA, 22 nt, Human
uggcccugcuguaucaucugcu

SEQ ID NO: 134720 - RNA, 22 nt, Human
uacaguuacugcauuucuaaua

SEQ ID NO: 134721 - RNA, 17 nt, Human
cucugcagugcauggcu

SEQ ID NO: 134722 - RNA, 22 nt, Human
ccuggcugguggcagcgacaag

SEQ ID NO: 134723 - RNA, 22 nt, Human
ugagccugcaauaagcacagcc

SEQ ID NO: 134724 - RNA, 22 nt, Human
acaguacugcuguucuuguccu

SEQ ID NO: 134725 - RNA, 22 nt, Human
uauuacaguucgaguuucuagg

SEQ ID NO: 134726 - RNA, 22 nt, Human
caggagacuauggcccaaggcc

SEQ ID NO: 134727 - RNA, 22 nt, Human
gugaggugggcuggccagagac

SEQ ID NO: 134728 - RNA, 22 nt, Human
cagagccucagaauccugugga

SEQ ID NO: 134729 - RNA, 22 nt, Human
ggggcacacuuuugguagauau

SEQ ID NO: 134730 - RNA, 22 nt, Human
agcccagguugaggcugcagug

SEQ ID NO: 134731 - RNA, 22 nt, Human
augucuuuggcuuugacauggc

SEQ ID NO: 134732 - RNA, 22 nt, Human
cucaggauuuacuaauuucaag

SEQ ID NO: 134733 - RNA, 22 nt, Human
gugggagcuuuggcaucaggcu

SEQ ID NO: 134734 - RNA, 22 nt, Human
cuucuucaauagcaagcgcaua

SEQ ID NO: 134735 - RNA, 22 nt, Human
gaggggcuugaggcccugaugg

SEQ ID NO: 134736 - RNA, 22 nt, Human
cugaggaguuuggguuguucaa

SEQ ID NO: 134737 - RNA, 22 nt, Human
caugggcucuucuggacugcac

SEQ ID NO: 134738 - RNA, 22 nt, Human
aagggcagaauagagaagaugg

SEQ ID NO: 134739 - RNA, 22 nt, Human
aauucauccaugaacaauucca

SEQ ID NO: 134740 - RNA, 21 nt, Human
uccucugcucucauaccacaa

SEQ ID NO: 134741 - RNA, 22 nt, Human
gcuggccugcaaagcccggcug

SEQ ID NO: 134742 - RNA, 22 nt, Human
cacagaaucugugacuccaaga

SEQ ID NO: 134743 - RNA, 22 nt, Human
uugcucagcacuggagccagcu

SEQ ID NO: 134744 - RNA, 22 nt, Human
uuuccauauucugcgucugcca

SEQ ID NO: 134745 - RNA, 22 nt, Human
cgcuggccauagccuccugugu

SEQ ID NO: 134746 - RNA, 22 nt, Human
caucaucaaaacaaauggaguc

SEQ ID NO: 134747 - RNA, 22 nt, Human
uccaugugccaaggggcagagg

SEQ ID NO: 134748 - RNA, 22 nt, Human
uuucacauuuaggcgugaauug

SEQ ID NO: 134749 - RNA, 22 nt, Human
uggagccuguguuucugcccag

SEQ ID NO: 134750 - RNA, 20 nt, Human
gcccacucuaauccacuguc

SEQ ID NO: 134751 - RNA, 22 nt, Human
uggaaagaaaaacaggccauga

SEQ ID NO: 134752 - RNA, 23 nt, Human
ugucacauuuaguuggcauuguu

SEQ ID NO: 134753 - RNA, 19 nt, Human
augauggucccauucaccu

SEQ ID NO: 134754 - RNA, 22 nt, Human
aaaagguaguugccaaauaagg

SEQ ID NO: 134755 - RNA, 22 nt, Human
agcagccacagcagaucugagu

SEQ ID NO: 134756 - RNA, 23 nt, Human
uuacagaaaguaugcuuuuguuu

SEQ ID NO: 134757 - RNA, 22 nt, Human
ggucagagggugggcugccugu

SEQ ID NO: 134758 - RNA, 17 nt, Human
uuuucucucuuggauuc

SEQ ID NO: 134759 - RNA, 22 nt, Human
uuuuuuaguuaggucagaaugu

SEQ ID NO: 134760 - RNA, 22 nt, Human
auacaguaauugcccugcaaug

SEQ ID NO: 134761 - RNA, 22 nt, Human
cuguccccgcgaguccagagcu

SEQ ID NO: 134762 - RNA, 22 nt, Human
ugggcugcuguuacaggggcug

SEQ ID NO: 134763 - RNA, 22 nt, Human
uaauuuaauuucaugccagccu

SEQ ID NO: 134764 - RNA, 22 nt, Human
uuggcuguuuuauaggucaguu

SEQ ID NO: 134765 - RNA, 22 nt, Human
cuuacaguacuucuaauaugau

SEQ ID NO: 134766 - RNA, 22 nt, Human
cccugccugugggcaucaacau

SEQ ID NO: 134767 - RNA, 22 nt, Human
ugacagcugagccccaggcaag

SEQ ID NO: 134768 - RNA, 19 nt, Human
auggcuguguuccaguaaa

SEQ ID NO: 134769 - RNA, 22 nt, Human
agcucacagaaauccugcagga

SEQ ID NO: 134770 - RNA, 22 nt, Human
ugccagaagugcuuuauaagug

SEQ ID NO: 134771 - RNA, 22 nt, Human
aagggcuggcccugggaagagu

SEQ ID NO: 134772 - RNA, 22 nt, Human
cccugccuacaggguuuucuuu

SEQ ID NO: 134773 - RNA, 22 nt, Human
cuggccugugggcugucuccgg

SEQ ID NO: 134774 - RNA, 22 nt, Human
ggaggaccccagcagcucccca

SEQ ID NO: 134775 - RNA, 21 nt, Human
aagagcuggaucaaggauaag

SEQ ID NO: 134776 - RNA, 22 nt, Human
cccagggauuauaaaggugaaa

SEQ ID NO: 134777 - RNA, 22 nt, Human
uggcacuggaaucguagccuug

SEQ ID NO: 134778 - RNA, 22 nt, Human
gcaggaugaaggcagaggcuga

SEQ ID NO: 134779 - RNA, 22 nt, Human
ggagaggugaauggcugcucua

SEQ ID NO: 134780 - RNA, 22 nt, Human
aggagcugcagauucugccuug

SEQ ID NO: 134781 - RNA, 22 nt, Human
guuauguaucuugauugggugg

SEQ ID NO: 134782 - RNA, 22 nt, Human
gggccacacagaaccuccuggu

SEQ ID NO: 134783 - RNA, 22 nt, Human
aagcugccacacggugaguacu

SEQ ID NO: 134784 - RNA, 22 nt, Human
cuggcuguuucuccuuugucua

SEQ ID NO: 134785 - RNA, 22 nt, Human
cuggcucaguucuugguuuuca

SEQ ID NO: 134786 - RNA, 22 nt, Human
uuccucuuucucugugcuaugu

SEQ ID NO: 134787 - RNA, 22 nt, Human
ucaguggauauuucuguggcug

SEQ ID NO: 134788 - RNA, 22 nt, Human
guggccucaugucuauaaagag

SEQ ID NO: 134789 - RNA, 22 nt, Human
gcucccaccuccagccugaguu

SEQ ID NO: 134790 - RNA, 22 nt, Human
ucuggcucggauuugucuagca

SEQ ID NO: 134791 - RNA, 22 nt, Human
aaaauaacuucuacuauuugca

SEQ ID NO: 134792 - RNA, 22 nt, Human
auccaugaagguacuucucagg

SEQ ID NO: 134793 - RNA, 22 nt, Human
cugagcugggacucaguagcaa

SEQ ID NO: 134794 - RNA, 22 nt, Human
aaaugugugcacaaagacagcu

SEQ ID NO: 134795 - RNA, 22 nt, Human
aggccugagcagaggaguggac

SEQ ID NO: 134796 - RNA, 22 nt, Human
aagaacaacugcuuuaaaagca

SEQ ID NO: 134797 - RNA, 22 nt, Human
ggcaggugugagaucgaggcca

SEQ ID NO: 134798 - RNA, 22 nt, Human
aagcccagaugggagcauuuca

SEQ ID NO: 134799 - RNA, 22 nt, Human
uuuucuguggucagagcuugag

SEQ ID NO: 134800 - RNA, 22 nt, Human
agcaauaugacauugcuacauc

SEQ ID NO: 134801 - RNA, 22 nt, Human
guguguguauauauacacacac

SEQ ID NO: 134802 - RNA, 22 nt, Human
gaagagcuaaaggcacaggcuu

SEQ ID NO: 134803 - RNA, 22 nt, Human
gcugccucuguagcuuuggacc

SEQ ID NO: 134804 - RNA, 22 nt, Human
gcuguuccugcuuagaggucgg

SEQ ID NO: 134805 - RNA, 22 nt, Human
ucccagccuuccuuguggugaa

SEQ ID NO: 134806 - RNA, 22 nt, Human
uagggcagagcuuguacacgau

SEQ ID NO: 134807 - RNA, 22 nt, Human
gggcuggugaggcugcccugca

SEQ ID NO: 134808 - RNA, 22 nt, Human
caggagugaguuggggucuaca

SEQ ID NO: 134809 - RNA, 22 nt, Human
aguguggccaaugaggaugggc

SEQ ID NO: 134810 - RNA, 22 nt, Human
ggcugucucugugacugccacc

SEQ ID NO: 134811 - RNA, 22 nt, Human
cugugccaggcccagcugacuu

SEQ ID NO: 134812 - RNA, 22 nt, Human
ugggugagugggaaaagcccag

SEQ ID NO: 134813 - RNA, 22 nt, Human
cagagccaaaccucagggcccg

SEQ ID NO: 134814 - RNA, 22 nt, Human
cacaggcuccggccuugcagcc

SEQ ID NO: 134815 - RNA, 22 nt, Human
gauuucaaccuaacaguaugac

SEQ ID NO: 134816 - RNA, 22 nt, Human
aggggcugggacagagccaagc

SEQ ID NO: 134817 - RNA, 22 nt, Human
ugcuguuauacuuagcugguua

SEQ ID NO: 134818 - RNA, 22 nt, Human
uggaggagaauuuauggucgaa

SEQ ID NO: 134819 - RNA, 22 nt, Human
cuuuuuuaagguagcuccuccu

SEQ ID NO: 134820 - RNA, 22 nt, Human
ccagggugcucuguggcgucgc

SEQ ID NO: 134821 - RNA, 22 nt, Human
uggcucagaagaaaagguaaac

SEQ ID NO: 134822 - RNA, 22 nt, Human
ccuggugccacuagagaauguc

SEQ ID NO: 134823 - RNA, 22 nt, Human
aguggggagguccaggccaccc

SEQ ID NO: 134824 - RNA, 22 nt, Human
uggucaguugcaucagagaagu

SEQ ID NO: 134825 - RNA, 22 nt, Human
uuagcuuuugagaaugauuucu

SEQ ID NO: 134826 - RNA, 22 nt, Human
uuugacagaaaguuauuauuuu

SEQ ID NO: 134827 - RNA, 22 nt, Human
ccugggcucuauccugacccag

SEQ ID NO: 134828 - RNA, 22 nt, Human
ccccuuccgucucuugaguguc

SEQ ID NO: 134829 - RNA, 22 nt, Human
uggagcaggccggaaguggcuu

SEQ ID NO: 134830 - RNA, 22 nt, Human
uuccucuccucccaccagguga

SEQ ID NO: 134831 - RNA, 22 nt, Human
aaugauggucauggcaacuuuu

SEQ ID NO: 134832 - RNA, 22 nt, Human
aacaugaagguaggaugguuuu

SEQ ID NO: 134833 - RNA, 22 nt, Human
gcugcuguuaugauguuacuuu

SEQ ID NO: 134834 - RNA, 22 nt, Human
ucagguguuagaagaaauuuca

SEQ ID NO: 134835 - RNA, 22 nt, Human
cacagcugccauggcugcacuu

SEQ ID NO: 134836 - RNA, 22 nt, Human
acauuugagaugccuuuuaggu

SEQ ID NO: 134837 - RNA, 22 nt, Human
cuggcagcgguuugcagccugg

SEQ ID NO: 134838 - RNA, 22 nt, Human
ggccuugggcuggcugcaguau

SEQ ID NO: 134839 - RNA, 22 nt, Human
cugggcugcagcgggagcgacg

SEQ ID NO: 134840 - RNA, 22 nt, Human
cagaauuuagcacaauguaugg

SEQ ID NO: 134841 - RNA, 22 nt, Human
ccaugagccaggcugaggaagc

SEQ ID NO: 134842 - RNA, 22 nt, Human
cucaggaugaaagucaugguga

SEQ ID NO: 134843 - RNA, 22 nt, Human
agaguguuucagucuuccuaga

SEQ ID NO: 134844 - RNA, 21 nt, Human
uugcaccaugauaaauucaga

SEQ ID NO: 134845 - RNA, 21 nt, Human
ucaggggcuguguuuuccauc

SEQ ID NO: 134846 - RNA, 22 nt, Human
aggucaaaccacagcucuaggc

SEQ ID NO: 134847 - RNA, 22 nt, Human
gucuccugagccuugacugcaa

SEQ ID NO: 134848 - RNA, 22 nt, Human
uucacauuaucaggauuguuuc

SEQ ID NO: 134849 - RNA, 22 nt, Human
ugucugugaccucuuuggagcc

SEQ ID NO: 134850 - RNA, 22 nt, Human
ugcagggccagacuggguugga

SEQ ID NO: 134851 - RNA, 20 nt, Human
acaggagaucugaggaaagg

SEQ ID NO: 134852 - RNA, 22 nt, Human
acuguuuaaaggcuuccuuucu

SEQ ID NO: 134853 - RNA, 22 nt, Human
cauugaaauauggaaacugaug

SEQ ID NO: 134854 - RNA, 22 nt, Human
ccucacugaagaggugacauuu

SEQ ID NO: 134855 - RNA, 17 nt, Human
uggcucugaggcugaau

SEQ ID NO: 134856 - RNA, 22 nt, Human
uccuucaggccucauucucaua

SEQ ID NO: 134857 - RNA, 22 nt, Human
ggcaggcugcuugggucauguc

SEQ ID NO: 134858 - RNA, 22 nt, Human
agauacaucuugaacuucuaga

SEQ ID NO: 134859 - RNA, 22 nt, Human
agugaaauaaagcugccuaugg

SEQ ID NO: 134860 - RNA, 22 nt, Human
cugcuggccuagcccauccucu

SEQ ID NO: 134861 - RNA, 22 nt, Human
gugcccugaguggguaggagag

SEQ ID NO: 134862 - RNA, 22 nt, Human
acaaagugcacaagaugagaac

SEQ ID NO: 134863 - RNA, 22 nt, Human
gagcucauucauucauugccug

SEQ ID NO: 134864 - RNA, 22 nt, Human
cuccagggcagcauggcagugg

SEQ ID NO: 134865 - RNA, 22 nt, Human
ccugggagugucagacuugcuu

SEQ ID NO: 134866 - RNA, 22 nt, Human
uaaagguaguuuuaaaggugcu

SEQ ID NO: 134867 - RNA, 22 nt, Human
uguuuguggaauauucuuuaag

SEQ ID NO: 134868 - RNA, 22 nt, Human
caguaugucuacuggacaaagu

SEQ ID NO: 134869 - RNA, 22 nt, Human
uaggacaggugaggggcugugg

SEQ ID NO: 134870 - RNA, 22 nt, Human
agggguggccugccuuacuccc

SEQ ID NO: 134871 - RNA, 22 nt, Human
agccuggacagcuacggagaac

SEQ ID NO: 134872 - RNA, 22 nt, Human
acagaaauaacuuuuuauguuu

SEQ ID NO: 134873 - RNA, 22 nt, Human
cugauuccugauucaugcucuu

SEQ ID NO: 134874 - RNA, 22 nt, Human
ucuuaacauauuauuuuagcac

SEQ ID NO: 134875 - RNA, 23 nt, Human
ugcugggcagagcuggugcugag

SEQ ID NO: 134876 - RNA, 22 nt, Human
uugcaucuagggcaacccagag

SEQ ID NO: 134877 - RNA, 22 nt, Human
aggccagaaauuuggaguaugu

SEQ ID NO: 134878 - RNA, 22 nt, Human
ugggccuggagcccuggagagu

SEQ ID NO: 134879 - RNA, 22 nt, Human
ccuuggaggacugcugcuucuu

SEQ ID NO: 134880 - RNA, 22 nt, Human
cccagcccccgagugucuggaa

SEQ ID NO: 134881 - RNA, 22 nt, Human
uggcacugggaugcuacuguua

SEQ ID NO: 134882 - RNA, 22 nt, Human
cuguggcuccagugaaccaaug

SEQ ID NO: 134883 - RNA, 22 nt, Human
uccucaggucaaagcaggagaa

SEQ ID NO: 134884 - RNA, 22 nt, Human
uuucacagcgucuuucucuugc

SEQ ID NO: 134885 - RNA, 22 nt, Human
gugccagggggcacugaacaga

SEQ ID NO: 134886 - RNA, 22 nt, Human
acuuccuguuaugugugccucu

SEQ ID NO: 134887 - RNA, 19 nt, Human
cuugguuaugguaugaugc

SEQ ID NO: 134888 - RNA, 22 nt, Human
uauuucaugugcaccauaauuc

SEQ ID NO: 134889 - RNA, 22 nt, Human
cauugcuguuaauugucucuag

SEQ ID NO: 134890 - RNA, 22 nt, Human
aggagaaggaagugcaucacua

SEQ ID NO: 134891 - RNA, 22 nt, Human
gguuugcaugugauguugggca

SEQ ID NO: 134892 - RNA, 22 nt, Human
aggcuggcuuggcucuccugug

SEQ ID NO: 134893 - RNA, 22 nt, Human
ucccagcagagccagcaagccg

SEQ ID NO: 134894 - RNA, 22 nt, Human
ccagggccucguguucugagug

SEQ ID NO: 134895 - RNA, 23 nt, Human
uuucacagcuuuuauucugcauc

SEQ ID NO: 134896 - RNA, 22 nt, Human
ccacugggggcugcaggcacuc

SEQ ID NO: 134897 - RNA, 17 nt, Human
auuucacuuagcaugag

SEQ ID NO: 134898 - RNA, 22 nt, Human
uucacauuagugguucuauaua

SEQ ID NO: 134899 - RNA, 22 nt, Human
agaggccuaaccaagauguccu

SEQ ID NO: 134900 - RNA, 22 nt, Human
gagggcagagucuaaugaugca

SEQ ID NO: 134901 - RNA, 22 nt, Human
agaauucugacaauagaauugg

SEQ ID NO: 134902 - RNA, 22 nt, Human
ccugucaggguuugccucagaa

SEQ ID NO: 134903 - RNA, 22 nt, Human
ucaguauagcuaaaaguuuguc

SEQ ID NO: 134904 - RNA, 21 nt, Human
ucccagagugcuugggacugc

SEQ ID NO: 134905 - RNA, 22 nt, Human
cagcagcaaggugaggguggag

SEQ ID NO: 134906 - RNA, 22 nt, Human
cucugagcccgcugcagcccca

SEQ ID NO: 134907 - RNA, 22 nt, Human
uagcuuuacaaagugcugcacc

SEQ ID NO: 134908 - RNA, 22 nt, Human
uaaggccaauuacauauguuca

SEQ ID NO: 134909 - RNA, 22 nt, Human
ggucucagacuggcaggcagug

SEQ ID NO: 134910 - RNA, 22 nt, Human
uuugacagcuuguuacaaaguu

SEQ ID NO: 134911 - RNA, 22 nt, Human
cuggguggcagagccugcagug

SEQ ID NO: 134912 - RNA, 22 nt, Human
gauuucaaguaucuugggcgag

SEQ ID NO: 134913 - RNA, 22 nt, Human
cccagcagggucucugugucua

SEQ ID NO: 134914 - RNA, 22 nt, Human
uggaaauggaucugaugagucu

SEQ ID NO: 134915 - RNA, 23 nt, Human
ucagugauguugaaccuagcagu

SEQ ID NO: 134916 - RNA, 20 nt, Human
auguaugcaaaugucuucca

SEQ ID NO: 134917 - RNA, 21 nt, Human
ccaccaggucuucugcucggg

SEQ ID NO: 134918 - RNA, 22 nt, Human
gggcacuguacacugugcaugg

SEQ ID NO: 134919 - RNA, 22 nt, Human
ccaaggcuucccagagaugcuc

SEQ ID NO: 134920 - RNA, 18 nt, Human
cucugcuaaugggcagcu

SEQ ID NO: 134921 - RNA, 22 nt, Human
ugcucugucaagaaaagaugcc

SEQ ID NO: 134922 - RNA, 22 nt, Human
uguuccauaaguggugcuuugu

SEQ ID NO: 134923 - RNA, 22 nt, Human
acugugugcccugacgccaggg

SEQ ID NO: 134924 - RNA, 22 nt, Human
aggcacugugcuucuuauaugu

SEQ ID NO: 134925 - RNA, 22 nt, Human
uccucaggcggugaggaggggc

SEQ ID NO: 134926 - RNA, 22 nt, Human
uucucuuuauguauuuaguggg

SEQ ID NO: 134927 - RNA, 21 nt, Human
ggagauggguaucgccugggc

SEQ ID NO: 134928 - RNA, 17 nt, Human
gccaaaggguuccaauc

SEQ ID NO: 134929 - RNA, 22 nt, Human
gcaggcagucaucuuucauauu

SEQ ID NO: 134930 - RNA, 17 nt, Human
ugaaggccaugaccacg

SEQ ID NO: 134931 - RNA, 22 nt, Human
uggccgggccgggcgccuccac

SEQ ID NO: 134932 - RNA, 22 nt, Human
cuguauuuaguuaaaaugcuaa

SEQ ID NO: 134933 - RNA, 22 nt, Human
aggucauuacaauuaucauuuu

SEQ ID NO: 134934 - RNA, 18 nt, Human
gcccugguggagcuggug

SEQ ID NO: 134935 - RNA, 22 nt, Human
ucauugcaccccagucccagcu

SEQ ID NO: 134936 - RNA, 22 nt, Human
uugugucccccuuugagagcca

SEQ ID NO: 134937 - RNA, 22 nt, Human
gccaggcuggugcaaggauauu

SEQ ID NO: 134938 - RNA, 22 nt, Human
gcaggggcuaaggacacagaga

SEQ ID NO: 134939 - RNA, 22 nt, Human
uagcagggaagaugaucagaau

SEQ ID NO: 134940 - RNA, 22 nt, Human
ccaggccuuucuucuuggucug

SEQ ID NO: 134941 - RNA, 22 nt, Human
uugauacaggccuucuagauga

SEQ ID NO: 134942 - RNA, 22 nt, Human
uccuucagggcugaccacaggc

SEQ ID NO: 134943 - RNA, 22 nt, Human
acaguguauauuguuuaucugg

SEQ ID NO: 134944 - RNA, 22 nt, Human
gucccuaguggaaagacaugau

SEQ ID NO: 134945 - RNA, 22 nt, Human
cuuggcagcuuuuggaggagcc

SEQ ID NO: 134946 - RNA, 22 nt, Human
ugcacagcgggugucugucagg

SEQ ID NO: 134947 - RNA, 22 nt, Human
gagcagcucgagaaggaagcag

SEQ ID NO: 134948 - RNA, 17 nt, Human
aggagucucagaugagc

SEQ ID NO: 134949 - RNA, 22 nt, Human
ucaggaauccagacagggcaca

SEQ ID NO: 134950 - RNA, 22 nt, Human
aguucuuuugugaacauaugcu

SEQ ID NO: 134951 - RNA, 20 nt, Human
cccucugcacauggcugugg

SEQ ID NO: 134952 - RNA, 22 nt, Human
cagggaguuuuuguuccucuag

SEQ ID NO: 134953 - RNA, 22 nt, Human
aacuuuuguccgaucuccugga

SEQ ID NO: 134954 - RNA, 22 nt, Human
uuuucaguuacuguuuauguga

SEQ ID NO: 134955 - RNA, 21 nt, Human
cucaggauggcggccuggugg

SEQ ID NO: 134956 - RNA, 22 nt, Human
ccuggccucagccuagggcuga

SEQ ID NO: 134957 - RNA, 22 nt, Human
aggcugugaagguuaaagacga

SEQ ID NO: 134958 - RNA, 22 nt, Human
cugugucccccucagccaggug

SEQ ID NO: 134959 - RNA, 22 nt, Human
uuaacauacaucaugaacaaug

SEQ ID NO: 134960 - RNA, 22 nt, Human
cacugcuucuggaggaauuugg

SEQ ID NO: 134961 - RNA, 22 nt, Human
aacagaaugcaggggaugcugc

SEQ ID NO: 134962 - RNA, 22 nt, Human
agcccagccggauucccaguuc

SEQ ID NO: 134963 - RNA, 22 nt, Human
uauuaucauugguaauaugguc

SEQ ID NO: 134964 - RNA, 18 nt, Human
agggaucaucacugcagc

SEQ ID NO: 134965 - RNA, 22 nt, Human
aauaaauguuaagauugucuca

SEQ ID NO: 134966 - RNA, 22 nt, Human
aauuuucugaugaugaagcacg

SEQ ID NO: 134967 - RNA, 18 nt, Human
gguggcaggucagaugcc

SEQ ID NO: 134968 - RNA, 21 nt, Human
aagcaggacauaugaugcccu

SEQ ID NO: 134969 - RNA, 22 nt, Human
gcauguguugguuuaugcaugu

SEQ ID NO: 134970 - RNA, 22 nt, Human
uaucuuuauuaugucuaucugc

SEQ ID NO: 134971 - RNA, 22 nt, Human
ugcuggggauccguaccaaccc

SEQ ID NO: 134972 - RNA, 22 nt, Human
cugcaguguucuggaaugcauu

SEQ ID NO: 134973 - RNA, 22 nt, Human
ucccugggccacagcugugagc

SEQ ID NO: 134974 - RNA, 23 nt, Human
ccugggcauuggcugcagcuucu

SEQ ID NO: 134975 - RNA, 22 nt, Human
gccugagacagugugguccaau

SEQ ID NO: 134976 - RNA, 22 nt, Human
cugggcucagaugagaggaagg

SEQ ID NO: 134977 - RNA, 22 nt, Human
agcccugggaggccagcuugua

SEQ ID NO: 134978 - RNA, 22 nt, Human
uaaaaguuuuaguuguacauaa

SEQ ID NO: 134979 - RNA, 22 nt, Human
aggugcagcugacaccaugugg

SEQ ID NO: 134980 - RNA, 17 nt, Human
uccaugagacaugaaga

SEQ ID NO: 134981 - RNA, 22 nt, Human
uggcagcaguggagguagaaag

SEQ ID NO: 134982 - RNA, 22 nt, Human
cuguggcuaggauuauuccuga

SEQ ID NO: 134983 - RNA, 22 nt, Human
cugagauggaguuuugcucuug

SEQ ID NO: 134984 - RNA, 22 nt, Human
ucccagcccagauuugugugac

SEQ ID NO: 134985 - RNA, 22 nt, Human
ccucagcucuucccugugcaca

SEQ ID NO: 134986 - RNA, 22 nt, Human
uggcagggccugaaucuuauac

SEQ ID NO: 134987 - RNA, 22 nt, Human
ccagggcaaaugagaucauagc

SEQ ID NO: 134988 - RNA, 17 nt, Human
accagccucuccugggg

SEQ ID NO: 134989 - RNA, 22 nt, Human
ugacuuuuggaccucacugucc

SEQ ID NO: 134990 - RNA, 22 nt, Human
uaaagguaugucuuaaucaaac

SEQ ID NO: 134991 - RNA, 22 nt, Human
agcagggguaacagaaggaaag

SEQ ID NO: 134992 - RNA, 22 nt, Human
ugcagaggagucagccugggca

SEQ ID NO: 134993 - RNA, 22 nt, Human
uagcagcugugaguaaaagcca

SEQ ID NO: 134994 - RNA, 22 nt, Human
cagggcugguuugucgaagaaa

SEQ ID NO: 134995 - RNA, 22 nt, Human
agguggcuccucccauggcugg

SEQ ID NO: 134996 - RNA, 22 nt, Human
gauuuuauauggcauacugugg

SEQ ID NO: 134997 - RNA, 22 nt, Human
uugacuuuacaguuuucuuagg

SEQ ID NO: 134998 - RNA, 22 nt, Human
uccucaggaugugggguagaau

SEQ ID NO: 134999 - RNA, 22 nt, Human
ugaaggaaugagggaguggguc

SEQ ID NO: 135000 - RNA, 22 nt, Human
ugggggacugcacuggcgucag

SEQ ID NO: 135001 - RNA, 21 nt, Human
accaggcuugugggagggagc

SEQ ID NO: 135002 - RNA, 22 nt, Human
agaaaucacaggaggcagaagg

SEQ ID NO: 135003 - RNA, 22 nt, Human
agaguguaauaagggcaagggc

SEQ ID NO: 135004 - RNA, 22 nt, Human
uguggccuugcagccuggaggu

SEQ ID NO: 135005 - RNA, 20 nt, Human
ccugucuccucuuaccuggc

SEQ ID NO: 135006 - RNA, 22 nt, Human
gcuggccagggcugcucgcgga

SEQ ID NO: 135007 - RNA, 22 nt, Human
auaugccauuagcuagaaauaa

SEQ ID NO: 135008 - RNA, 22 nt, Human
guugaaagagcauggacuugaa

SEQ ID NO: 135009 - RNA, 22 nt, Human
uccuugaagaaugauucuugga

SEQ ID NO: 135010 - RNA, 22 nt, Human
gagcugcugguugcuggugccu

SEQ ID NO: 135011 - RNA, 21 nt, Human
uccugccuuaguccagagcag

SEQ ID NO: 135012 - RNA, 22 nt, Human
aguacuuuacuucuuacaguuu

SEQ ID NO: 135013 - RNA, 22 nt, Human
uauugucuucaacucuacuuuu

SEQ ID NO: 135014 - RNA, 22 nt, Human
uauguuucauucuuuucuggua

SEQ ID NO: 135015 - RNA, 22 nt, Human
cauguguguccaugugacuaag

SEQ ID NO: 135016 - RNA, 22 nt, Human
aaaaauagcuucucuugucccu

SEQ ID NO: 135017 - RNA, 22 nt, Human
aaguuugacagaaguuucuaau

SEQ ID NO: 135018 - RNA, 22 nt, Human
ggaagagagggcugggccucaa

SEQ ID NO: 135019 - RNA, 22 nt, Human
ucaggaugguccuuuaugagaa

SEQ ID NO: 135020 - RNA, 22 nt, Human
ucuuugcaggagcccuuugaac

SEQ ID NO: 135021 - RNA, 22 nt, Human
auuugucuagugguauucacgu

SEQ ID NO: 135022 - RNA, 23 nt, Human
gcagauggccccagagugcugcc

SEQ ID NO: 135023 - RNA, 22 nt, Human
uuuuuaucuacagauucucagc

SEQ ID NO: 135024 - RNA, 22 nt, Human
ccuuuacaucugacuucuuuca

SEQ ID NO: 135025 - RNA, 22 nt, Human
ugcacacaaaugugaacgugcc

SEQ ID NO: 135026 - RNA, 19 nt, Human
cugaggcccauguaccaug

SEQ ID NO: 135027 - RNA, 22 nt, Human
aagcugccagauucagucugcu

SEQ ID NO: 135028 - RNA, 22 nt, Human
cugccugcugccuguggagggu

SEQ ID NO: 135029 - RNA, 22 nt, Human
uucugaaagccaauucauugaa

SEQ ID NO: 135030 - RNA, 22 nt, Human
uucacaguauagguuuccagcg

SEQ ID NO: 135031 - RNA, 22 nt, Human
uucccaguauuaccuucaggaa

SEQ ID NO: 135032 - RNA, 22 nt, Human
ugucucugggugauucaguccu

SEQ ID NO: 135033 - RNA, 22 nt, Human
agucauaauuauaaacaucagu

SEQ ID NO: 135034 - RNA, 22 nt, Human
augauggugggagaugacccag

SEQ ID NO: 135035 - RNA, 22 nt, Human
uuccaugaaauguguuaugcuu

SEQ ID NO: 135036 - RNA, 22 nt, Human
uuauguaccugaauuaguaaag

SEQ ID NO: 135037 - RNA, 22 nt, Human
aauguauuccucaugcaagagu

SEQ ID NO: 135038 - RNA, 22 nt, Human
aaugcacaaaaauuguauguaa

SEQ ID NO: 135039 - RNA, 22 nt, Human
agucccuguacuuuccacugcc

SEQ ID NO: 135040 - RNA, 22 nt, Human
ggagcugucuguagggcacagg

SEQ ID NO: 135041 - RNA, 22 nt, Human
aaugaacaaaauaugcuuugca

SEQ ID NO: 135042 - RNA, 23 nt, Human
acaaaugcccauacaucuaguuc

SEQ ID NO: 135043 - RNA, 22 nt, Human
ggcucaggccagaccacgacuc

SEQ ID NO: 135044 - RNA, 22 nt, Human
uggcugcguuuuccgauguauu

SEQ ID NO: 135045 - RNA, 22 nt, Human
gccagccugugcuuggccaggc

SEQ ID NO: 135046 - RNA, 22 nt, Human
aggcugcagaacagucaggugc

SEQ ID NO: 135047 - RNA, 22 nt, Human
auaugcacacucugcccacaga

SEQ ID NO: 135048 - RNA, 21 nt, Human
cagggcacacagaggauggua

SEQ ID NO: 135049 - RNA, 22 nt, Human
gucuuucuuaauucaagugcuu

SEQ ID NO: 135050 - RNA, 22 nt, Human
cauggcagaaaccugagcugcu

SEQ ID NO: 135051 - RNA, 22 nt, Human
gguguggcaguggaccugugaa

SEQ ID NO: 135052 - RNA, 22 nt, Human
augccuguaaucccagugcuuu

SEQ ID NO: 135053 - RNA, 22 nt, Human
cuacacaguucugccuaauggc

SEQ ID NO: 135054 - RNA, 22 nt, Human
acauuuaaauaccuauguuucu

SEQ ID NO: 135055 - RNA, 17 nt, Human
gcacugaacaauccugu

SEQ ID NO: 135056 - RNA, 22 nt, Human
aguggcugcuaugaucaggaca

SEQ ID NO: 135057 - RNA, 20 nt, Human
cuuagaaauuuuuacccugg

SEQ ID NO: 135058 - RNA, 22 nt, Human
agcaggaaagaaaaaucugugu

SEQ ID NO: 135059 - RNA, 22 nt, Human
ugcucuccggcuuccguggccu

SEQ ID NO: 135060 - RNA, 22 nt, Human
ucaggagggugacaggcccugg

SEQ ID NO: 135061 - RNA, 22 nt, Human
cccagcucaagcagagagcuaa

SEQ ID NO: 135062 - RNA, 22 nt, Human
ugacuucaaaggcucuacuccu

SEQ ID NO: 135063 - RNA, 22 nt, Human
aggcugcaggucugggucaugu

SEQ ID NO: 135064 - RNA, 22 nt, Human
gaaaugcagauucugauucugu

SEQ ID NO: 135065 - RNA, 18 nt, Human
aaagaaggauuggagagc

SEQ ID NO: 135066 - RNA, 22 nt, Human
auugucucugaauuuccagcug

SEQ ID NO: 135067 - RNA, 22 nt, Human
ccagcagcccacaggcgucccu

SEQ ID NO: 135068 - RNA, 22 nt, Human
agcugguucagaaauuagaugg

SEQ ID NO: 135069 - RNA, 20 nt, Human
aguggcugauggaaagaagc

SEQ ID NO: 135070 - RNA, 22 nt, Human
aucucagggcuggagcccugga

SEQ ID NO: 135071 - RNA, 22 nt, Human
uugacaauguccuuugaauuuc

SEQ ID NO: 135072 - RNA, 22 nt, Human
gcagugcugaucccauggcaga

SEQ ID NO: 135073 - RNA, 22 nt, Human
agaaguuaccacauacuucucu

SEQ ID NO: 135074 - RNA, 22 nt, Human
gagauuggauuuaauggccaaa

SEQ ID NO: 135075 - RNA, 22 nt, Human
ccugagcuggaagagcuugugc

SEQ ID NO: 135076 - RNA, 22 nt, Human
cuucccagaccuuagagugcag

SEQ ID NO: 135077 - RNA, 22 nt, Human
ggagcuguugcgcaugcgcucg

SEQ ID NO: 135078 - RNA, 22 nt, Human
uuucaaagaguuguaaauuacu

SEQ ID NO: 135079 - RNA, 22 nt, Human
ucacuguugaccuggaaguggg

SEQ ID NO: 135080 - RNA, 22 nt, Human
auaaaaguaggaccaacuuaca

SEQ ID NO: 135081 - RNA, 19 nt, Human
ugacaggcuguugccuuga

SEQ ID NO: 135082 - RNA, 19 nt, Human
ccugucugucuucagcuag

SEQ ID NO: 135083 - RNA, 22 nt, Human
ccagucacagguguguuuauau

SEQ ID NO: 135084 - RNA, 19 nt, Human
gggcagaauggcaucucag

SEQ ID NO: 135085 - RNA, 22 nt, Human
uuguuuuaucuuucuacagacu

SEQ ID NO: 135086 - RNA, 22 nt, Human
cagagcuggagaaguggauuua

SEQ ID NO: 135087 - RNA, 22 nt, Human
ugguugugcugaguuuagugca

SEQ ID NO: 135088 - RNA, 17 nt, Human
aggcagcucagaacauc

SEQ ID NO: 135089 - RNA, 22 nt, Human
gaccauuuuuacagagcauuca

SEQ ID NO: 135090 - RNA, 22 nt, Human
cacugugucaguuugguuagac

SEQ ID NO: 135091 - RNA, 22 nt, Human
aaggaggaauuucagggugaau

SEQ ID NO: 135092 - RNA, 22 nt, Human
uucaaagugcauguuccucaga

SEQ ID NO: 135093 - RNA, 22 nt, Human
cugagccaaggggacagugaca

SEQ ID NO: 135094 - RNA, 22 nt, Human
cuguggcugcguaggucuggca

SEQ ID NO: 135095 - RNA, 22 nt, Human
ucucagagaagugaugagcaau

SEQ ID NO: 135096 - RNA, 22 nt, Human
uuuaccaagcuuuaauuacaua

SEQ ID NO: 135097 - RNA, 22 nt, Human
aaaugugucaguuucauucucu

SEQ ID NO: 135098 - RNA, 19 nt, Human
ugcucaggccaaggagccc

SEQ ID NO: 135099 - RNA, 22 nt, Human
gagcuuaggccagggacaggga

SEQ ID NO: 135100 - RNA, 22 nt, Human
auucuggauuaucaguccacca

SEQ ID NO: 135101 - RNA, 22 nt, Human
cccagguggcagaagcugcagu

SEQ ID NO: 135102 - RNA, 16 nt, Human
ccuuucucugccuucc

SEQ ID NO: 135103 - RNA, 22 nt, Human
gcaguaaaaaaggauaugugca

SEQ ID NO: 135104 - RNA, 22 nt, Human
aucucccagccacagcauucuu

SEQ ID NO: 135105 - RNA, 20 nt, Human
ccuggcugcauucaggacgg

SEQ ID NO: 135106 - RNA, 22 nt, Human
uugggcaaaguguuucuggagc

SEQ ID NO: 135107 - RNA, 20 nt, Human
gugggcagaugugugcaugg

SEQ ID NO: 135108 - RNA, 22 nt, Human
ucuggcucccagccugcucuca

SEQ ID NO: 135109 - RNA, 22 nt, Human
gagcugugccaaucugucuggg

SEQ ID NO: 135110 - RNA, 22 nt, Human
uuugaaagaaaccagugaguga

SEQ ID NO: 135111 - RNA, 23 nt, Human
gaagcagaugucugaguaggcag

SEQ ID NO: 135112 - RNA, 17 nt, Human
caaggccagcaucuuca

SEQ ID NO: 135113 - RNA, 22 nt, Human
ucucgacagccuggcacagugg

SEQ ID NO: 135114 - RNA, 22 nt, Human
ucagcaauaugauaggcuuugu

SEQ ID NO: 135115 - RNA, 19 nt, Human
agucauauuguucaucuug

SEQ ID NO: 135116 - RNA, 22 nt, Human
gggcucuguccauuccuucaua

SEQ ID NO: 135117 - RNA, 22 nt, Human
gaagcagcaaaucugcaguauc

SEQ ID NO: 135118 - RNA, 22 nt, Human
cacauuucugugagucaauauu

SEQ ID NO: 135119 - RNA, 22 nt, Human
cagcaaaagccagcauaagcuc

SEQ ID NO: 135120 - RNA, 22 nt, Human
auguaugcauagugaguaaaug

SEQ ID NO: 135121 - RNA, 22 nt, Human
cuggcuuucucugugguguuca

SEQ ID NO: 135122 - RNA, 22 nt, Human
uccagucaggcugaauucaagg

SEQ ID NO: 135123 - RNA, 22 nt, Human
ugugccuggcccagugguguca

SEQ ID NO: 135124 - RNA, 22 nt, Human
ugaagccagcuuuggaagacac

SEQ ID NO: 135125 - RNA, 22 nt, Human
gcagagugaggaagagcuucca

SEQ ID NO: 135126 - RNA, 22 nt, Human
ugauuucauaguauauacauga

SEQ ID NO: 135127 - RNA, 22 nt, Human
uucuuacagaguuuacagagcc

SEQ ID NO: 135128 - RNA, 22 nt, Human
gggcagauggggcacaggcuga

SEQ ID NO: 135129 - RNA, 18 nt, Human
cauuaugugguuauagaa

SEQ ID NO: 135130 - RNA, 22 nt, Human
auguggcuauuuuaauguuaau

SEQ ID NO: 135131 - RNA, 23 nt, Human
augcaguauaugucaguaguuua

SEQ ID NO: 135132 - RNA, 22 nt, Human
gggaggucagggugccugcugg

SEQ ID NO: 135133 - RNA, 22 nt, Human
cacagcuggugcacuagcucug

SEQ ID NO: 135134 - RNA, 22 nt, Human
caaaggcaguuacugaaugaag

SEQ ID NO: 135135 - RNA, 22 nt, Human
gucaggaugacaagugcuuuca

SEQ ID NO: 135136 - RNA, 22 nt, Human
acuguguccuauuuccuugaca

SEQ ID NO: 135137 - RNA, 22 nt, Human
gcacugaaugcuuuuacuguaa

SEQ ID NO: 135138 - RNA, 22 nt, Human
cugaggcucaagggcagguggg

SEQ ID NO: 135139 - RNA, 22 nt, Human
agucuucccugugccagagugu

SEQ ID NO: 135140 - RNA, 18 nt, Human
cucucuggucuggauccc

SEQ ID NO: 135141 - RNA, 22 nt, Human
acaaagugaauugcaucgaguu

SEQ ID NO: 135142 - RNA, 22 nt, Human
uccugaggaaaguucaugaaug

SEQ ID NO: 135143 - RNA, 22 nt, Human
cagugucuccagaugcuccaau

SEQ ID NO: 135144 - RNA, 22 nt, Human
uuacaugguuguuggaaaugcu

SEQ ID NO: 135145 - RNA, 20 nt, Human
ucagaugggagugagccauc

SEQ ID NO: 135146 - RNA, 22 nt, Human
cggcagagcuuccugcucagcg

SEQ ID NO: 135147 - RNA, 22 nt, Human
ucuccuccuuuuuucaacauag

SEQ ID NO: 135148 - RNA, 22 nt, Human
cagcccugagagaaccaucuau

SEQ ID NO: 135149 - RNA, 22 nt, Human
ggcagccaugucccagggcuuc

SEQ ID NO: 135150 - RNA, 22 nt, Human
agauacauauagaaaacaucaa

SEQ ID NO: 135151 - RNA, 22 nt, Human
cugcagagcauaaaucugaaua

SEQ ID NO: 135152 - RNA, 22 nt, Human
acagggccauuaucuguucuag

SEQ ID NO: 135153 - RNA, 22 nt, Human
uauguucuaaccuugucuuucc

SEQ ID NO: 135154 - RNA, 22 nt, Human
uuuauaguagcaugauuuauag

SEQ ID NO: 135155 - RNA, 19 nt, Human
accucugcagagauguuua

SEQ ID NO: 135156 - RNA, 18 nt, Human
gguguguaacguguuuuc

SEQ ID NO: 135157 - RNA, 22 nt, Human
agagggaucacccuguuucugg

SEQ ID NO: 135158 - RNA, 22 nt, Human
aguacuuugcacuuugcucaga

SEQ ID NO: 135159 - RNA, 22 nt, Human
gccuggagcucuccacuugggg

SEQ ID NO: 135160 - RNA, 22 nt, Human
ucccagaggaaauggcagcuga

SEQ ID NO: 135161 - RNA, 22 nt, Human
ggcacugagcugccuuggggca

SEQ ID NO: 135162 - RNA, 20 nt, Human
ucagccagcuaacaugggga

SEQ ID NO: 135163 - RNA, 22 nt, Human
ugcucccaggcauucucuguug

SEQ ID NO: 135164 - RNA, 22 nt, Human
uugcugugucauuuguuuaauc

SEQ ID NO: 135165 - RNA, 22 nt, Human
uguguguagaaagggcccuggu

SEQ ID NO: 135166 - RNA, 18 nt, Human
aaauguacuguccauggc

SEQ ID NO: 135167 - RNA, 22 nt, Human
gccaggugcauggcugagucuc

SEQ ID NO: 135168 - RNA, 22 nt, Human
cuucucuucccagggacacagg

SEQ ID NO: 135169 - RNA, 22 nt, Human
agguauaugcuauuacuucugc

SEQ ID NO: 135170 - RNA, 22 nt, Human
aagcagggugucuugacccaug

SEQ ID NO: 135171 - RNA, 22 nt, Human
ucaaauguucccuguacuggcc

SEQ ID NO: 135172 - RNA, 22 nt, Human
gggcuucucuuaugcuaacugg

SEQ ID NO: 135173 - RNA, 22 nt, Human
agcuguccuggcucaggcugug

SEQ ID NO: 135174 - RNA, 22 nt, Human
agagccugcagcugugaagaaa

SEQ ID NO: 135175 - RNA, 22 nt, Human
gagcaggcauucuaguggcuga

SEQ ID NO: 135176 - RNA, 22 nt, Human
uuuguuuagaugguaaaucagu

SEQ ID NO: 135177 - RNA, 22 nt, Human
uugacaguauagcuuuaccuau

SEQ ID NO: 135178 - RNA, 22 nt, Human
uguauauucacugagcaagggg

SEQ ID NO: 135179 - RNA, 22 nt, Human
auaguuugugaaacacagcagu

SEQ ID NO: 135180 - RNA, 22 nt, Human
uacuuuuagccuauuugauucu

SEQ ID NO: 135181 - RNA, 22 nt, Human
uggcagcuccuggggccagcac

SEQ ID NO: 135182 - RNA, 22 nt, Human
ucugaggccccugggcaggaug

SEQ ID NO: 135183 - RNA, 22 nt, Human
ucagugucuugaccugggugug

SEQ ID NO: 135184 - RNA, 22 nt, Human
gcccaugcucucaggcgggccu

SEQ ID NO: 135185 - RNA, 22 nt, Human
gagggacagcuaaagagaaauu

SEQ ID NO: 135186 - RNA, 22 nt, Human
ggaggcaggaaagacagguuca

SEQ ID NO: 135187 - RNA, 22 nt, Human
uuugugaagggaacagaagugu

SEQ ID NO: 135188 - RNA, 22 nt, Human
cacagggcuaaaugaaggguug

SEQ ID NO: 135189 - RNA, 22 nt, Human
uuacaaaguucugaguucaaac

SEQ ID NO: 135190 - RNA, 22 nt, Human
gcauuauuaauagcugcaugag

SEQ ID NO: 135191 - RNA, 22 nt, Human
ccugccagggccuuggaagaaa

SEQ ID NO: 135192 - RNA, 22 nt, Human
gcucacuggccugaagaggacg

SEQ ID NO: 135193 - RNA, 23 nt, Human
ggacagggcccugcccuauggcc

SEQ ID NO: 135194 - RNA, 22 nt, Human
agagaauuuuaaaagccuugaa

SEQ ID NO: 135195 - RNA, 19 nt, Human
uggcuuccaucucucucau

SEQ ID NO: 135196 - RNA, 22 nt, Human
uuaaacagagucugaaauguaa

SEQ ID NO: 135197 - RNA, 22 nt, Human
ccauccuaucugaccuacuugu

SEQ ID NO: 135198 - RNA, 21 nt, Human
ccuccaggugauuccgugcuc

SEQ ID NO: 135199 - RNA, 22 nt, Human
cacauguaguaagcaggcaaug

SEQ ID NO: 135200 - RNA, 22 nt, Human
aaggcagauauaaagacuagag

SEQ ID NO: 135201 - RNA, 22 nt, Human
cacugaaggaaggacuacugca

SEQ ID NO: 135202 - RNA, 22 nt, Human
cugggaaauggcuucgagcuca

SEQ ID NO: 135203 - RNA, 21 nt, Human
cugugucgcucucgcugggag

SEQ ID NO: 135204 - RNA, 22 nt, Human
guucacauccuugugaggauuu

SEQ ID NO: 135205 - RNA, 22 nt, Human
aaaagagguuaaccaggugugu

SEQ ID NO: 135206 - RNA, 22 nt, Human
gcauucuuuuuaggagguuccu

SEQ ID NO: 135207 - RNA, 22 nt, Human
cuggcagcucuacucagagccu

SEQ ID NO: 135208 - RNA, 22 nt, Human
uucccucuccuacucaggaaag

SEQ ID NO: 135209 - RNA, 22 nt, Human
ucagaacaauugggaaccauua

SEQ ID NO: 135210 - RNA, 22 nt, Human
ccugagaccaaguugcagccau

SEQ ID NO: 135211 - RNA, 22 nt, Human
uggcagcacuugaacuugagcc

SEQ ID NO: 135212 - RNA, 22 nt, Human
aucuuuaccaccaaagaaugcu

SEQ ID NO: 135213 - RNA, 22 nt, Human
cagggcagaacauauagauagu

SEQ ID NO: 135214 - RNA, 22 nt, Human
agaaagaacguugguuaucuua

SEQ ID NO: 135215 - RNA, 20 nt, Human
ugaguggccacugggucgca

SEQ ID NO: 135216 - RNA, 23 nt, Human
acuuuagauaaauuaugugcaca

SEQ ID NO: 135217 - RNA, 22 nt, Human
uugcugaaguuaaugcuugcaa

SEQ ID NO: 135218 - RNA, 22 nt, Human
cugcugcucgaccagucccagg

SEQ ID NO: 135219 - RNA, 22 nt, Human
cagggcuccccgcaccgcagcc

SEQ ID NO: 135220 - RNA, 22 nt, Human
agaggcagcagucauacuacag

SEQ ID NO: 135221 - RNA, 22 nt, Human
uuugaaagagcugauacaugaa

SEQ ID NO: 135222 - RNA, 21 nt, Human
gcaaggcuuuuguguuuccca

SEQ ID NO: 135223 - RNA, 20 nt, Human
uguacacaguacuuuacaau

SEQ ID NO: 135224 - RNA, 21 nt, Human
cgggcuggccgggcccucacc

SEQ ID NO: 135225 - RNA, 22 nt, Human
aaagauuucacaucccaagccu

SEQ ID NO: 135226 - RNA, 22 nt, Human
aggaggccccuccuggguugcu

SEQ ID NO: 135227 - RNA, 23 nt, Human
agucucagcuggaaacauguguc

SEQ ID NO: 135228 - RNA, 22 nt, Human
cagagccagcaguggggacagg

SEQ ID NO: 135229 - RNA, 22 nt, Human
uuuucaguaaugucuacauaau

SEQ ID NO: 135230 - RNA, 22 nt, Human
cugguccuccuugccuucagau

SEQ ID NO: 135231 - RNA, 22 nt, Human
cccuggaggaaaaucugaggcu

SEQ ID NO: 135232 - RNA, 22 nt, Human
ugaaaucugucccacuuuagcu

SEQ ID NO: 135233 - RNA, 22 nt, Human
aggauccuuuggccacuucuua

SEQ ID NO: 135234 - RNA, 22 nt, Human
caggaggaacaagagguucugg

SEQ ID NO: 135235 - RNA, 22 nt, Human
ccagcucuuggugcacuuacau

SEQ ID NO: 135236 - RNA, 19 nt, Human
uaugugugcauuugugcau

SEQ ID NO: 135237 - RNA, 22 nt, Human
ucccuggcagcuaagggugguc

SEQ ID NO: 135238 - RNA, 22 nt, Human
auguacaaaaugccacugaauu

SEQ ID NO: 135239 - RNA, 22 nt, Human
ugcuggggucauggggcgcccg

SEQ ID NO: 135240 - RNA, 22 nt, Human
ugcugcauuuaucuucucaaac

SEQ ID NO: 135241 - RNA, 22 nt, Human
ccaggcugugguuuagauagag

SEQ ID NO: 135242 - RNA, 22 nt, Human
ucagagaacacagaggugaugu

SEQ ID NO: 135243 - RNA, 22 nt, Human
ggcugggccagggccuguggac

SEQ ID NO: 135244 - RNA, 20 nt, Human
uauauuuucucuuuggccuu

SEQ ID NO: 135245 - RNA, 22 nt, Human
ucccuggacagccuugccuggg

SEQ ID NO: 135246 - RNA, 22 nt, Human
agcagagccaggucucucugua

SEQ ID NO: 135247 - RNA, 22 nt, Human
uuucaugugcaauuagcaauau

SEQ ID NO: 135248 - RNA, 22 nt, Human
ggcagugguuagaaacaugagc

SEQ ID NO: 135249 - RNA, 22 nt, Human
uucccucucacuuaaagcuugg

SEQ ID NO: 135250 - RNA, 22 nt, Human
cugggcugcaucaaagaggcau

SEQ ID NO: 135251 - RNA, 22 nt, Human
uauuucugaauccaaaagguca

SEQ ID NO: 135252 - RNA, 22 nt, Human
cccauucauccucgcuuccuuc

SEQ ID NO: 135253 - RNA, 22 nt, Human
acuuuguuuccauauuuguagc

SEQ ID NO: 135254 - RNA, 22 nt, Human
cugugcugaggaugcaguuucu

SEQ ID NO: 135255 - RNA, 22 nt, Human
uccuuacaacuuguuauuuuuc

SEQ ID NO: 135256 - RNA, 19 nt, Human
agugaaauggaguauucaa

SEQ ID NO: 135257 - RNA, 22 nt, Human
guuaauaaagguauagaaucag

SEQ ID NO: 135258 - RNA, 22 nt, Human
uucaaugauuuuuagggaucau

SEQ ID NO: 135259 - RNA, 22 nt, Human
ggcugagcucaggggcagcagg

SEQ ID NO: 135260 - RNA, 22 nt, Human
cucaggcccacagcagacccac

SEQ ID NO: 135261 - RNA, 22 nt, Human
auaacagaguugggaagugaaa

SEQ ID NO: 135262 - RNA, 22 nt, Human
cugggagcccgcguccuggugg

SEQ ID NO: 135263 - RNA, 22 nt, Human
aaagauuuaagaauaauuugug

SEQ ID NO: 135264 - RNA, 22 nt, Human
cugggcugcaggaguggggcaa

SEQ ID NO: 135265 - RNA, 22 nt, Human
auguaagguucagaguauguga

SEQ ID NO: 135266 - RNA, 23 nt, Human
auugaugacuugauuacacuuuu

SEQ ID NO: 135267 - RNA, 22 nt, Human
acaguaauauugaugcucguca

SEQ ID NO: 135268 - RNA, 22 nt, Human
ugggacacccucacgccugcac

SEQ ID NO: 135269 - RNA, 22 nt, Human
aacagacaacuccuguggcuca

SEQ ID NO: 135270 - RNA, 23 nt, Human
uggacgccgacuuuggaggcgcu

SEQ ID NO: 135271 - RNA, 22 nt, Human
agagaagagcaaugauaaauuu

SEQ ID NO: 135272 - RNA, 22 nt, Human
ucuggcucccuggagcuccaca

SEQ ID NO: 135273 - RNA, 22 nt, Human
caaugugguggcagaugucagu

SEQ ID NO: 135274 - RNA, 22 nt, Human
acuuuugaacaaacuccucugu

SEQ ID NO: 135275 - RNA, 21 nt, Human
uguguguaugcacacacaugc

SEQ ID NO: 135276 - RNA, 22 nt, Human
uuuaguaaguucacugcaaagc

SEQ ID NO: 135277 - RNA, 22 nt, Human
agaaaucagaacccugaaguuc

SEQ ID NO: 135278 - RNA, 22 nt, Human
ccccuuccacagugcuuccuaa

SEQ ID NO: 135279 - RNA, 22 nt, Human
uucugucuggaaaaggacauag

SEQ ID NO: 135280 - RNA, 22 nt, Human
gcuguguccaggugggggugac

SEQ ID NO: 135281 - RNA, 22 nt, Human
uguaagauauucagcuuauuga

SEQ ID NO: 135282 - RNA, 22 nt, Human
ucucaggggauucacuggcacc

SEQ ID NO: 135283 - RNA, 22 nt, Human
ucagaagcugguguccuuugaa

SEQ ID NO: 135284 - RNA, 22 nt, Human
aaacugaauucccaagggcaug

SEQ ID NO: 135285 - RNA, 22 nt, Human
aggagcagcccacuccuguccu

SEQ ID NO: 135286 - RNA, 22 nt, Human
guaaaauagaauaacguggcua

SEQ ID NO: 135287 - RNA, 22 nt, Human
aggauccuccuuagaaaagacc

SEQ ID NO: 135288 - RNA, 22 nt, Human
agguauagaauugaaaggguuu

SEQ ID NO: 135289 - RNA, 22 nt, Human
cuguggcucauucuugguggca

SEQ ID NO: 135290 - RNA, 22 nt, Human
acaguuuaugguguuuuauaua

SEQ ID NO: 135291 - RNA, 22 nt, Human
augaguucaauuguuucaguca

SEQ ID NO: 135292 - RNA, 22 nt, Human
cuggcuccuccaaggccuggag

SEQ ID NO: 135293 - RNA, 22 nt, Human
agagccagcauuugggcccugc

SEQ ID NO: 135294 - RNA, 22 nt, Human
cagaaccaggaacugauggaga

SEQ ID NO: 135295 - RNA, 22 nt, Human
agcaguauucuccuguggugga

SEQ ID NO: 135296 - RNA, 22 nt, Human
ggccagcagucacagggucaga

SEQ ID NO: 135297 - RNA, 22 nt, Human
ggccucucuccagucagugcag

SEQ ID NO: 135298 - RNA, 22 nt, Human
gagcacagcuggagguagcauu

SEQ ID NO: 135299 - RNA, 22 nt, Human
gccuuugcaccaucagugcaau

SEQ ID NO: 135300 - RNA, 19 nt, Human
ccagcagcuuugauucucu

SEQ ID NO: 135301 - RNA, 20 nt, Human
uaugaguauuacuuucagga

SEQ ID NO: 135302 - RNA, 22 nt, Human
acaguggagaaggcaugaggcu

SEQ ID NO: 135303 - RNA, 17 nt, Human
uuccuggaagucauucc

SEQ ID NO: 135304 - RNA, 20 nt, Human
acugagcugcauggagagga

SEQ ID NO: 135305 - RNA, 22 nt, Human
agcagcugagccccagcuguga

SEQ ID NO: 135306 - RNA, 22 nt, Human
uccuugaacagagggccugggu

SEQ ID NO: 135307 - RNA, 22 nt, Human
augauugaccaucugcugggcu

SEQ ID NO: 135308 - RNA, 22 nt, Human
uggugguuaugcgcuuuguggg

SEQ ID NO: 135309 - RNA, 18 nt, Human
auuguucugugacauguc

SEQ ID NO: 135310 - RNA, 22 nt, Human
uuucuuugagucucaguuugcu

SEQ ID NO: 135311 - RNA, 22 nt, Human
gcuguucccauguggggcucag

SEQ ID NO: 135312 - RNA, 22 nt, Human
cuccugagcucugaggaagcuu

SEQ ID NO: 135313 - RNA, 22 nt, Human
ucuacugugguccuuguaacca

SEQ ID NO: 135314 - RNA, 22 nt, Human
uacuguaugauuucauguauau

SEQ ID NO: 135315 - RNA, 22 nt, Human
gggcugugccucaggugggguc

SEQ ID NO: 135316 - RNA, 22 nt, Human
gugggcuucuguuagggaggcu

SEQ ID NO: 135317 - RNA, 22 nt, Human
ggcucagguuuccuucccagcu

SEQ ID NO: 135318 - RNA, 22 nt, Human
augccaggccccacgcugggca

SEQ ID NO: 135319 - RNA, 22 nt, Human
auuugucucugcacuuuacuca

SEQ ID NO: 135320 - RNA, 22 nt, Human
acacaguauuacaauaggugcu

SEQ ID NO: 135321 - RNA, 22 nt, Human
agccagcuggugggucagcugg

SEQ ID NO: 135322 - RNA, 22 nt, Human
agugugugaccuuuuaauuuaa

SEQ ID NO: 135323 - RNA, 22 nt, Human
ccuggagcaggagcugcagagg

SEQ ID NO: 135324 - RNA, 22 nt, Human
aaagaacaaaugauauaugguu

SEQ ID NO: 135325 - RNA, 22 nt, Human
ggagagcagggaggcugcucug

SEQ ID NO: 135326 - RNA, 22 nt, Human
ucucaggcuaccuugcacaagg

SEQ ID NO: 135327 - RNA, 22 nt, Human
gagggagagugauggaccauug

SEQ ID NO: 135328 - RNA, 22 nt, Human
uuugaaaggagcuuuauccaga

SEQ ID NO: 135329 - RNA, 22 nt, Human
agccucugacugucagcaaggu

SEQ ID NO: 135330 - RNA, 22 nt, Human
uccauuuuagaagaaaauccac

SEQ ID NO: 135331 - RNA, 22 nt, Human
ugggugcuucgucagcucugag

SEQ ID NO: 135332 - RNA, 21 nt, Human
uuacuuuugcaccaaccuaau

SEQ ID NO: 135333 - RNA, 22 nt, Human
agcucccagaaggcccugcgcc

SEQ ID NO: 135334 - RNA, 22 nt, Human
caagagagaugcagcucacuca

SEQ ID NO: 135335 - RNA, 22 nt, Human
ccuggcagcuguuuggcuuggc

SEQ ID NO: 135336 - RNA, 22 nt, Human
agucucagccacacagaccuau

SEQ ID NO: 135337 - RNA, 22 nt, Human
gcugagugauugauauuuuagu

SEQ ID NO: 135338 - RNA, 22 nt, Human
auucucuguggugaugcuggug

SEQ ID NO: 135339 - RNA, 21 nt, Human
gagcauggcuuacaucagcag

SEQ ID NO: 135340 - RNA, 22 nt, Human
guguguguucaauaaauuuaag

SEQ ID NO: 135341 - RNA, 22 nt, Human
augcuuuuaugucacaugguca

SEQ ID NO: 135342 - RNA, 22 nt, Human
ccagaggaggggggucuuucug

SEQ ID NO: 135343 - RNA, 22 nt, Human
uaaggccaaacuauuauaguuc

SEQ ID NO: 135344 - RNA, 22 nt, Human
gcugcucugugacagccuccgg

SEQ ID NO: 135345 - RNA, 22 nt, Human
aaguccaugaucaagauguggc

SEQ ID NO: 135346 - RNA, 22 nt, Human
uggacucaaguccaaguucacg

SEQ ID NO: 135347 - RNA, 22 nt, Human
aaagaacaauguggaaucuccu

SEQ ID NO: 135348 - RNA, 22 nt, Human
ccaggagcaggagcuggacaga

SEQ ID NO: 135349 - RNA, 22 nt, Human
gcugugcuauaucucugagugu

SEQ ID NO: 135350 - RNA, 22 nt, Human
ccugaggcccuggcugugcuga

SEQ ID NO: 135351 - RNA, 22 nt, Human
ccuggggagaagagcuuccccc

SEQ ID NO: 135352 - RNA, 22 nt, Human
uucaggauaguggugaguggca

SEQ ID NO: 135353 - RNA, 22 nt, Human
ugacaugcuuguuuuccuugaa

SEQ ID NO: 135354 - RNA, 22 nt, Human
aucucucuaugcacugaggacu

SEQ ID NO: 135355 - RNA, 22 nt, Human
uacauuauccugucuuuguccu

SEQ ID NO: 135356 - RNA, 17 nt, Human
uauguaguacuuauaaa

SEQ ID NO: 135357 - RNA, 22 nt, Human
caccaggcugaaccagagggga

SEQ ID NO: 135358 - RNA, 22 nt, Human
gaggccagaaugagcugaaugc

SEQ ID NO: 135359 - RNA, 23 nt, Human
aggcuuccuaucuuagagcuggg

SEQ ID NO: 135360 - RNA, 22 nt, Human
cauuuguaguaucuguuuauau

SEQ ID NO: 135361 - RNA, 22 nt, Human
ucucauucauacccuacaugcu

SEQ ID NO: 135362 - RNA, 22 nt, Human
aaaggagacuucagaucuccuu

SEQ ID NO: 135363 - RNA, 22 nt, Human
ccuggauucaagucuuucuuuc

SEQ ID NO: 135364 - RNA, 22 nt, Human
agcucccaauugacuugaacua

SEQ ID NO: 135365 - RNA, 22 nt, Human
aaaugcacacaccaggaaacua

SEQ ID NO: 135366 - RNA, 22 nt, Human
gcaccaggcuuagagccccagg

SEQ ID NO: 135367 - RNA, 22 nt, Human
agccagagcugaugucauucuc

SEQ ID NO: 135368 - RNA, 22 nt, Human
aguggcugcuggaguggagaug

SEQ ID NO: 135369 - RNA, 22 nt, Human
ggaggccaucagggagggcauu

SEQ ID NO: 135370 - RNA, 22 nt, Human
cagaguguugaccauaagccca

SEQ ID NO: 135371 - RNA, 22 nt, Human
gccuggccugaacuaggaggug

SEQ ID NO: 135372 - RNA, 22 nt, Human
ggccugcuauuggugggcagac

SEQ ID NO: 135373 - RNA, 22 nt, Human
gcugccuccugaaagcgcucug

SEQ ID NO: 135374 - RNA, 22 nt, Human
aaggcagccgugugacugcaug

SEQ ID NO: 135375 - RNA, 22 nt, Human
uggcagcaaaaccagaaucaga

SEQ ID NO: 135376 - RNA, 22 nt, Human
aguguguagcauuuggcaggca

SEQ ID NO: 135377 - RNA, 22 nt, Human
ugcaugcauaaauguacacaca

SEQ ID NO: 135378 - RNA, 22 nt, Human
uucuucaaaacaacacuggccu

SEQ ID NO: 135379 - RNA, 22 nt, Human
aucacuguguauguauaugcag

SEQ ID NO: 135380 - RNA, 22 nt, Human
ucacagacaauuguuuuggugu

SEQ ID NO: 135381 - RNA, 22 nt, Human
ccaggugguucaggucaccaua

SEQ ID NO: 135382 - RNA, 22 nt, Human
auguguuggauauuagugggga

SEQ ID NO: 135383 - RNA, 22 nt, Human
cccugagaugccucacccuagu

SEQ ID NO: 135384 - RNA, 21 nt, Human
gccacguuucagucuucucag

SEQ ID NO: 135385 - RNA, 23 nt, Human
ccuccugggcacaggccugaugg

SEQ ID NO: 135386 - RNA, 22 nt, Human
cucaggauuuaaaggggcacuc

SEQ ID NO: 135387 - RNA, 19 nt, Human
uggcagaggcaguuuguac

SEQ ID NO: 135388 - RNA, 22 nt, Human
ugucucugauaaguaguucagu

SEQ ID NO: 135389 - RNA, 22 nt, Human
gcucucuuuccauguggaggau

SEQ ID NO: 135390 - RNA, 22 nt, Human
ucuuuaagaguucauuugcaug

SEQ ID NO: 135391 - RNA, 22 nt, Human
cugguccuugacgcgugggagg

SEQ ID NO: 135392 - RNA, 22 nt, Human
cuugcaggcagggccuccugga

SEQ ID NO: 135393 - RNA, 21 nt, Human
uuagcaaagcaaacacaugcu

SEQ ID NO: 135394 - RNA, 22 nt, Human
uuguaacaaucugucauaaaug

SEQ ID NO: 135395 - RNA, 22 nt, Human
aagguacaaaguauuauuuaaa

SEQ ID NO: 135396 - RNA, 22 nt, Human
gauacauuuuaucuccuaacag

SEQ ID NO: 135397 - RNA, 22 nt, Human
caggggcucugggugaugugag

SEQ ID NO: 135398 - RNA, 22 nt, Human
gacccaggguuucugcacaggg

SEQ ID NO: 135399 - RNA, 22 nt, Human
auccuugagaaaauaaaugacc

SEQ ID NO: 135400 - RNA, 22 nt, Human
guacauuggcaacucucuuaga

SEQ ID NO: 135401 - RNA, 22 nt, Human
ggagcagacauaaccuuacaga

SEQ ID NO: 135402 - RNA, 22 nt, Human
agucaguguucuccggagaggc

SEQ ID NO: 135403 - RNA, 22 nt, Human
cagugucuuauuuguagcucag

SEQ ID NO: 135404 - RNA, 22 nt, Human
ccugugugcacacgaggccaug

SEQ ID NO: 135405 - RNA, 22 nt, Human
uucuauuucuuaaucuuggcug

SEQ ID NO: 135406 - RNA, 19 nt, Human
uccucaggggcucacagac

SEQ ID NO: 135407 - RNA, 22 nt, Human
gggagggaaggaggcgccgugu

SEQ ID NO: 135408 - RNA, 23 nt, Human
uggggccaagugaggaagggucu

SEQ ID NO: 135409 - RNA, 22 nt, Human
gcucccaccuuugcuaucagua

SEQ ID NO: 135410 - RNA, 22 nt, Human
uccucacaagcaagcacaggua

SEQ ID NO: 135411 - RNA, 22 nt, Human
uuuaguuugauguucuacuccu

SEQ ID NO: 135412 - RNA, 22 nt, Human
guggccugucagaagccguggg

SEQ ID NO: 135413 - RNA, 22 nt, Human
cugcucuguuaauuaaacuuug

SEQ ID NO: 135414 - RNA, 22 nt, Human
ccagagcugcauccagcagguu

SEQ ID NO: 135415 - RNA, 22 nt, Human
gggaggcuggcucuggccacag

SEQ ID NO: 135416 - RNA, 22 nt, Human
auaaguucagguaaagaaauca

SEQ ID NO: 135417 - RNA, 22 nt, Human
agaaaucauucccaaacccaua

SEQ ID NO: 135418 - RNA, 22 nt, Human
auaagcauguuagaauauuuga

SEQ ID NO: 135419 - RNA, 22 nt, Human
ugccagaagauucucuaucaga

SEQ ID NO: 135420 - RNA, 22 nt, Human
gccaggcaaauuaaggaaugca

SEQ ID NO: 135421 - RNA, 22 nt, Human
uuaacuguaucauacuguuuca

SEQ ID NO: 135422 - RNA, 23 nt, Human
gccuggagaaaagcugcaguuca

SEQ ID NO: 135423 - RNA, 22 nt, Human
ugugcaguuucuauguugucca

SEQ ID NO: 135424 - RNA, 22 nt, Human
ugcugccaaaugcgagcucugu

SEQ ID NO: 135425 - RNA, 22 nt, Human
cagggcugaaaucaagguguag

SEQ ID NO: 135426 - RNA, 17 nt, Human
cagggcugucugccuag

SEQ ID NO: 135427 - RNA, 22 nt, Human
uacugcaugguggaguggagcu

SEQ ID NO: 135428 - RNA, 22 nt, Human
cgggcagauugggaagguucau

SEQ ID NO: 135429 - RNA, 18 nt, Human
acauacauucugucugca

SEQ ID NO: 135430 - RNA, 22 nt, Human
caugugguucaaguacuccaca

SEQ ID NO: 135431 - RNA, 22 nt, Human
uccuugaagcaacgugcagaca

SEQ ID NO: 135432 - RNA, 22 nt, Human
acagggcaaccucugggagacu

SEQ ID NO: 135433 - RNA, 22 nt, Human
uugaagaggacuuugcagcugu

SEQ ID NO: 135434 - RNA, 22 nt, Human
caguuucuacgaaggucaaccc

SEQ ID NO: 135435 - RNA, 22 nt, Human
uccugggcuguggccccgggca

SEQ ID NO: 135436 - RNA, 22 nt, Human
cugaagcaaaugaaacagcucu

SEQ ID NO: 135437 - RNA, 22 nt, Human
uggcucugucacugugagcuau

SEQ ID NO: 135438 - RNA, 22 nt, Human
ugcucugugguccaagauggcu

SEQ ID NO: 135439 - RNA, 22 nt, Human
agcugggagcagagccacagcc

SEQ ID NO: 135440 - RNA, 22 nt, Human
agggcuggcaucucuaaugcug

SEQ ID NO: 135441 - RNA, 22 nt, Human
cuugaaagucagcagaguggau

SEQ ID NO: 135442 - RNA, 22 nt, Human
uagggcagccuuauagcuccca

SEQ ID NO: 135443 - RNA, 22 nt, Human
uguauauucugccuaaaagcuu

SEQ ID NO: 135444 - RNA, 22 nt, Human
caaagguaaagaucugcugugg

SEQ ID NO: 135445 - RNA, 22 nt, Human
agcuuuauucaugauuucaggg

SEQ ID NO: 135446 - RNA, 22 nt, Human
ugauuuccucuacuagcaauua

SEQ ID NO: 135447 - RNA, 22 nt, Human
agcuuuaugggagcuuagauaa

SEQ ID NO: 135448 - RNA, 21 nt, Human
gcuccuggugcugcguggcgc

SEQ ID NO: 135449 - RNA, 22 nt, Human
gaggccaggagugcuguaaguu

SEQ ID NO: 135450 - RNA, 22 nt, Human
uuauaguaugugcauaugugug

SEQ ID NO: 135451 - RNA, 22 nt, Human
gccagcuggagugagagugggc

SEQ ID NO: 135452 - RNA, 22 nt, Human
ggugcagcugcagccugggagc

SEQ ID NO: 135453 - RNA, 22 nt, Human
ccagggcagggaccacgugucu

SEQ ID NO: 135454 - RNA, 22 nt, Human
aauccagguggcggagguugug

SEQ ID NO: 135455 - RNA, 22 nt, Human
cugggccaucagaggggcugga

SEQ ID NO: 135456 - RNA, 22 nt, Human
agaggcuccuagccacuggcuu

SEQ ID NO: 135457 - RNA, 22 nt, Human
acagucucuccacacugcaggg

SEQ ID NO: 135458 - RNA, 20 nt, Human
ucugucucugagcuagacuu

SEQ ID NO: 135459 - RNA, 22 nt, Human
ccagucugugugccagccugcg

SEQ ID NO: 135460 - RNA, 19 nt, Human
ucacaggcaucuccccaga

SEQ ID NO: 135461 - RNA, 22 nt, Human
auugaaaguccuaucuaaggga

SEQ ID NO: 135462 - RNA, 22 nt, Human
ccuuuacacguaaggcuguuga

SEQ ID NO: 135463 - RNA, 22 nt, Human
gagcccuccauggagccaggca

SEQ ID NO: 135464 - RNA, 22 nt, Human
cucuggcuucuaccuugcaguu

SEQ ID NO: 135465 - RNA, 22 nt, Human
uuaugaaagacauuucuguugg

SEQ ID NO: 135466 - RNA, 22 nt, Human
aucccugcccucauggagcuua

SEQ ID NO: 135467 - RNA, 22 nt, Human
cagguggguacaucacagagac

SEQ ID NO: 135468 - RNA, 22 nt, Human
gaggaugugucuggucugggca

SEQ ID NO: 135469 - RNA, 18 nt, Human
gugcaugcaugcucugcc

SEQ ID NO: 135470 - RNA, 22 nt, Human
uaaagguagcaugaaacugcaa

SEQ ID NO: 135471 - RNA, 22 nt, Human
agggcagaaaucgauuacaccu

SEQ ID NO: 135472 - RNA, 22 nt, Human
uuaucucucacuuuuaaggaca

SEQ ID NO: 135473 - RNA, 22 nt, Human
cugagggcccugaagcuuggca

SEQ ID NO: 135474 - RNA, 22 nt, Human
aggcuuccuggaggaagaggua

SEQ ID NO: 135475 - RNA, 22 nt, Human
agagugaaaagcuagagcagua

SEQ ID NO: 135476 - RNA, 22 nt, Human
gaucauuuacuuguucuggacu

SEQ ID NO: 135477 - RNA, 22 nt, Human
ggagccaguuuagaccucaguu

SEQ ID NO: 135478 - RNA, 22 nt, Human
cucuguccacagguuugucccu

SEQ ID NO: 135479 - RNA, 22 nt, Human
agcugcucccuauccuuuccuu

SEQ ID NO: 135480 - RNA, 22 nt, Human
aggcuucuacguggucccaggg

SEQ ID NO: 135481 - RNA, 22 nt, Human
ucucuggagggcuccaggcggg

SEQ ID NO: 135482 - RNA, 19 nt, Human
caaggccaccauuucuccg

SEQ ID NO: 135483 - RNA, 23 nt, Human
uacauuguggauggaguccuggg

SEQ ID NO: 135484 - RNA, 19 nt, Human
acagcagggauuuuuggag

SEQ ID NO: 135485 - RNA, 22 nt, Human
uggccucuuaggacauccucua

SEQ ID NO: 135486 - RNA, 22 nt, Human
cuuuuuacaaagccugucuucu

SEQ ID NO: 135487 - RNA, 22 nt, Human
ucccagagucagagguggggcc

SEQ ID NO: 135488 - RNA, 22 nt, Human
aggaaaaagaguugcugccuuc

SEQ ID NO: 135489 - RNA, 22 nt, Human
gcccugagacugagcauggguu

SEQ ID NO: 135490 - RNA, 18 nt, Human
ugacucacccugucagug

SEQ ID NO: 135491 - RNA, 22 nt, Human
uugcacagaugagggugaugcu

SEQ ID NO: 135492 - RNA, 22 nt, Human
auguguaaaaagugcuuaauau

SEQ ID NO: 135493 - RNA, 22 nt, Human
aggcuguguuuccccuggagcu

SEQ ID NO: 135494 - RNA, 22 nt, Human
ucucucuuuuuaaucauguaau

SEQ ID NO: 135495 - RNA, 22 nt, Human
auauucucugcugcuuuugugu

SEQ ID NO: 135496 - RNA, 22 nt, Human
ccuucauugcaucuuuaagaga

SEQ ID NO: 135497 - RNA, 22 nt, Human
uuucuaggcacagugucuuccc

SEQ ID NO: 135498 - RNA, 22 nt, Human
gcuggccuucugcagaguucug

SEQ ID NO: 135499 - RNA, 21 nt, Human
ugauccuuucccccauguugc

SEQ ID NO: 135500 - RNA, 22 nt, Human
agagcagauggagcuggaagag

SEQ ID NO: 135501 - RNA, 19 nt, Human
ccaggccuccugggagguc

SEQ ID NO: 135502 - RNA, 22 nt, Human
ugaagcaggcauugacugauga

SEQ ID NO: 135503 - RNA, 22 nt, Human
uuccugaugcacacagucauuu

SEQ ID NO: 135504 - RNA, 22 nt, Human
aagccagguuccauggaggagc

SEQ ID NO: 135505 - RNA, 22 nt, Human
agcagcauggcugacuaaagac

SEQ ID NO: 135506 - RNA, 22 nt, Human
aucaggauucaccccagagcug

SEQ ID NO: 135507 - RNA, 22 nt, Human
acauuucuccuacuuguuauuu

SEQ ID NO: 135508 - RNA, 22 nt, Human
uucuuuccucccagccuuugga

SEQ ID NO: 135509 - RNA, 22 nt, Human
ugaugcuucacgcugaauaugc

SEQ ID NO: 135510 - RNA, 22 nt, Human
ucauugcagcuucagguguuca

SEQ ID NO: 135511 - RNA, 20 nt, Human
ucacuaguaaccaucugcuu

SEQ ID NO: 135512 - RNA, 21 nt, Human
ugugucacuaacuagaggcua

SEQ ID NO: 135513 - RNA, 22 nt, Human
gcugugaguggaguucugugcu

SEQ ID NO: 135514 - RNA, 22 nt, Human
cagggcccaagacacaaugagg

SEQ ID NO: 135515 - RNA, 22 nt, Human
agagaacacgugcaucugcaau

SEQ ID NO: 135516 - RNA, 22 nt, Human
gcucccugcagcugagaguucc

SEQ ID NO: 135517 - RNA, 22 nt, Human
agaagccauugaagcagaccuc

SEQ ID NO: 135518 - RNA, 22 nt, Human
uagaacagaguuccagugauca

SEQ ID NO: 135519 - RNA, 22 nt, Human
acagccuguuugaucuggugcu

SEQ ID NO: 135520 - RNA, 22 nt, Human
cccuccagagcuugaccugcug

SEQ ID NO: 135521 - RNA, 19 nt, Human
ucugugcugggaggcagca

SEQ ID NO: 135522 - RNA, 22 nt, Human
aggcuccuuguucaucauccau

SEQ ID NO: 135523 - RNA, 22 nt, Human
cagguggggcgcccucaggcag

SEQ ID NO: 135524 - RNA, 22 nt, Human
uucuugcaggucacucacugag

SEQ ID NO: 135525 - RNA, 20 nt, Human
ccucaguguccuggacuggg

SEQ ID NO: 135526 - RNA, 22 nt, Human
ucuccaagcagggcugcaaggc

SEQ ID NO: 135527 - RNA, 22 nt, Human
uggagcuggaauuucugggccu

SEQ ID NO: 135528 - RNA, 22 nt, Human
cagccagcugaauguaccauga

SEQ ID NO: 135529 - RNA, 22 nt, Human
uucuucugacacugaugcugua

SEQ ID NO: 135530 - RNA, 22 nt, Human
uuucuucuuucccagugauggg

SEQ ID NO: 135531 - RNA, 22 nt, Human
ccagcaggaaagugacguuuga

SEQ ID NO: 135532 - RNA, 22 nt, Human
cugaggcaugaaugugggcuuu

SEQ ID NO: 135533 - RNA, 22 nt, Human
ugaugaaauguugaggcaguga

SEQ ID NO: 135534 - RNA, 22 nt, Human
uucucuucccacuuucuguauu

SEQ ID NO: 135535 - RNA, 22 nt, Human
uuacacguguguguaucuguau

SEQ ID NO: 135536 - RNA, 22 nt, Human
acagauauaaacuauaguagug

SEQ ID NO: 135537 - RNA, 22 nt, Human
ccuuucucuaucgacccaucgc

SEQ ID NO: 135538 - RNA, 18 nt, Human
auuuugaacaaugcugua

SEQ ID NO: 135539 - RNA, 21 nt, Human
ggcccugguuacgccuccucu

SEQ ID NO: 135540 - RNA, 22 nt, Human
acacauauucauauguacuuac

SEQ ID NO: 135541 - RNA, 22 nt, Human
uggggcugugagacuacaggau

SEQ ID NO: 135542 - RNA, 22 nt, Human
ggcacugagcgggcucugagcg

SEQ ID NO: 135543 - RNA, 22 nt, Human
gccugagauucugcauuucuaa

SEQ ID NO: 135544 - RNA, 22 nt, Human
auaugaagucagacaaacuggg

SEQ ID NO: 135545 - RNA, 22 nt, Human
auucuucaguauguguggauug

SEQ ID NO: 135546 - RNA, 22 nt, Human
agcauuuaugacuaauguaaaa

SEQ ID NO: 135547 - RNA, 22 nt, Human
ccuggagguggagguugcagug

SEQ ID NO: 135548 - RNA, 22 nt, Human
uggccuggcucacagugagauu

SEQ ID NO: 135549 - RNA, 22 nt, Human
aguauaucugcuucuggguccc

SEQ ID NO: 135550 - RNA, 22 nt, Human
gcugaguguaaugauggcagag

SEQ ID NO: 135551 - RNA, 22 nt, Human
uggcucuguuuguuaacuagac

SEQ ID NO: 135552 - RNA, 22 nt, Human
ccaggccuguguuguguggagg

SEQ ID NO: 135553 - RNA, 22 nt, Human
caguagcaggcacucagcacgu

SEQ ID NO: 135554 - RNA, 22 nt, Human
auaaggcagaaauagggaaagu

SEQ ID NO: 135555 - RNA, 22 nt, Human
cuguggcugcgcccugggggag

SEQ ID NO: 135556 - RNA, 22 nt, Human
cucagagcaaugaacaugcaaa

SEQ ID NO: 135557 - RNA, 22 nt, Human
ccugccaggacauugcuugaag

SEQ ID NO: 135558 - RNA, 22 nt, Human
ggcucuggcguccaauggagcg

SEQ ID NO: 135559 - RNA, 22 nt, Human
uuuaagcuguggcauuaauucu

SEQ ID NO: 135560 - RNA, 22 nt, Human
cccaaggccucuccuuggcuug

SEQ ID NO: 135561 - RNA, 22 nt, Human
ugugcuauuugacuguuugcua

SEQ ID NO: 135562 - RNA, 22 nt, Human
ugaaaguugcacauaagagaau

SEQ ID NO: 135563 - RNA, 22 nt, Human
cagacuggccacaucugcacug

SEQ ID NO: 135564 - RNA, 22 nt, Human
caggaacauuuaaccacagggu

SEQ ID NO: 135565 - RNA, 22 nt, Human
cuccuggacauggagcggagga

SEQ ID NO: 135566 - RNA, 22 nt, Human
uaggggugaggccaggcaucag

SEQ ID NO: 135567 - RNA, 23 nt, Human
auggagcugguacuagcuaccuc

SEQ ID NO: 135568 - RNA, 22 nt, Human
acagggccagccugggaccugg

SEQ ID NO: 135569 - RNA, 22 nt, Human
uggagcugagaaguggagcucu

SEQ ID NO: 135570 - RNA, 22 nt, Human
cuggugugauugagcccaggug

SEQ ID NO: 135571 - RNA, 22 nt, Human
aaaugcacagaaaggaugugga

SEQ ID NO: 135572 - RNA, 22 nt, Human
aggggcugcuggguccgccccu

SEQ ID NO: 135573 - RNA, 22 nt, Human
ccuuggagcggucagcacuggu

SEQ ID NO: 135574 - RNA, 18 nt, Human
gccugccuagagcuugcc

SEQ ID NO: 135575 - RNA, 22 nt, Human
ucucucugugacagcuuugcug

SEQ ID NO: 135576 - RNA, 22 nt, Human
ugcagcagguuccaaaggguua

SEQ ID NO: 135577 - RNA, 22 nt, Human
acuuugcacuaaguuacucauu

SEQ ID NO: 135578 - RNA, 22 nt, Human
aaccaggacaauuuugaaagua

SEQ ID NO: 135579 - RNA, 22 nt, Human
agagcagaggcauggccguggg

SEQ ID NO: 135580 - RNA, 22 nt, Human
agcagcauguugggaugugaaa

SEQ ID NO: 135581 - RNA, 22 nt, Human
cagggacaugacuggucucugu

SEQ ID NO: 135582 - RNA, 22 nt, Human
aaggagcucccggcagaccagg

SEQ ID NO: 135583 - RNA, 22 nt, Human
aggcucugugacaaucaagcug

SEQ ID NO: 135584 - RNA, 22 nt, Human
ucuggagcuuguuucagauggu

SEQ ID NO: 135585 - RNA, 22 nt, Human
ugcaagaggaauucuagaagca

SEQ ID NO: 135586 - RNA, 22 nt, Human
ucaggagagaaagaauacaauu

SEQ ID NO: 135587 - RNA, 22 nt, Human
aaugagcuagaccugcuuccuc

SEQ ID NO: 135588 - RNA, 22 nt, Human
ugacaguuaagguauacauuca

SEQ ID NO: 135589 - RNA, 22 nt, Human
aagcuuuucucaguguccuugg

SEQ ID NO: 135590 - RNA, 22 nt, Human
ugcauauuuguaugauguuuag

SEQ ID NO: 135591 - RNA, 22 nt, Human
auacaacuuuaucuguaaugag

SEQ ID NO: 135592 - RNA, 22 nt, Human
aggcugugaguaguucuuguug

SEQ ID NO: 135593 - RNA, 22 nt, Human
ccugggcagggcuggacucuca

SEQ ID NO: 135594 - RNA, 22 nt, Human
uuuaaccucuaauuuaguucuc

SEQ ID NO: 135595 - RNA, 22 nt, Human
ugaagacagaccaaggagaaug

SEQ ID NO: 135596 - RNA, 22 nt, Human
gaggcagcagggcugguuccuu

SEQ ID NO: 135597 - RNA, 22 nt, Human
aagccucaccuuuuagaagcua

SEQ ID NO: 135598 - RNA, 22 nt, Human
uuaaauuuuagaaacagacucu

SEQ ID NO: 135599 - RNA, 22 nt, Human
uaaugcacauagaaguacuuag

SEQ ID NO: 135600 - RNA, 22 nt, Human
ggcugaaguguaguggcucacu

SEQ ID NO: 135601 - RNA, 22 nt, Human
agcagcuccugccaugagugcu

SEQ ID NO: 135602 - RNA, 22 nt, Human
cuguauguuccguuuugucacu

SEQ ID NO: 135603 - RNA, 22 nt, Human
uguauauuguucugucucuuca

SEQ ID NO: 135604 - RNA, 19 nt, Human
aggcucugagcuccuggag

SEQ ID NO: 135605 - RNA, 22 nt, Human
cuggcugugcugacugagaggg

SEQ ID NO: 135606 - RNA, 22 nt, Human
ggagcugggacccugucaucug

SEQ ID NO: 135607 - RNA, 22 nt, Human
ugcccaagcagaggagugauuc

SEQ ID NO: 135608 - RNA, 22 nt, Human
ucucaggguuuguacaagugua

SEQ ID NO: 135609 - RNA, 22 nt, Human
uggcugugaacaaagagaauaa

SEQ ID NO: 135610 - RNA, 22 nt, Human
gcucugugccacaugcaguguu

SEQ ID NO: 135611 - RNA, 22 nt, Human
gggauggggagcuggaaagggg

SEQ ID NO: 135612 - RNA, 22 nt, Human
cagcaggacauggaggaguaaa

SEQ ID NO: 135613 - RNA, 22 nt, Human
auggccugggcccgcuucagau

SEQ ID NO: 135614 - RNA, 22 nt, Human
uuccuuguuuguagcucuggga

SEQ ID NO: 135615 - RNA, 22 nt, Human
ugcucauuggcgaucugaggga

SEQ ID NO: 135616 - RNA, 22 nt, Human
auucucugccauugcgguggau

SEQ ID NO: 135617 - RNA, 22 nt, Human
uggcucaguuccaucaucugga

SEQ ID NO: 135618 - RNA, 22 nt, Human
cagggccuuuuagcaucuucuc

SEQ ID NO: 135619 - RNA, 22 nt, Human
acagucuaaucuuguguucugu

SEQ ID NO: 135620 - RNA, 22 nt, Human
cacagcugaaguagccaugugg

SEQ ID NO: 135621 - RNA, 22 nt, Human
aggccagcuguuacuagagcca

SEQ ID NO: 135622 - RNA, 22 nt, Human
gccagggggucagcaggcacuu

SEQ ID NO: 135623 - RNA, 22 nt, Human
ugggcagaggcagcagaaaccu

SEQ ID NO: 135624 - RNA, 22 nt, Human
acauuucuaguuguucaucucc

SEQ ID NO: 135625 - RNA, 22 nt, Human
ugggagcccaagggagcugccg

SEQ ID NO: 135626 - RNA, 22 nt, Human
ugggcucauggcccagcacugg

SEQ ID NO: 135627 - RNA, 22 nt, Human
ggguuggggcccagcagucugc

SEQ ID NO: 135628 - RNA, 22 nt, Human
agagacaccgcgcaucauggcu

SEQ ID NO: 135629 - RNA, 22 nt, Human
agcucccagagcucgagaguaa

SEQ ID NO: 135630 - RNA, 21 nt, Human
uccucagggccccagagcacu

SEQ ID NO: 135631 - RNA, 22 nt, Human
gggcacuguggggcccaugcug

SEQ ID NO: 135632 - RNA, 22 nt, Human
cuuuccuagauggccaucuuuc

SEQ ID NO: 135633 - RNA, 22 nt, Human
agcugccacauggugucacugu

SEQ ID NO: 135634 - RNA, 22 nt, Human
uggggaggacgggcgccuuccu

SEQ ID NO: 135635 - RNA, 22 nt, Human
ccuuggcccuagccucaggcaa

SEQ ID NO: 135636 - RNA, 22 nt, Human
uguggcucucaugcacucccag

SEQ ID NO: 135637 - RNA, 20 nt, Human
ucagggcaugggacagcccc

SEQ ID NO: 135638 - RNA, 22 nt, Human
caaagucccagcugcuuagaga

SEQ ID NO: 135639 - RNA, 22 nt, Human
gugcucuccuggcugcccugac

SEQ ID NO: 135640 - RNA, 22 nt, Human
cccaaggcugcagugagcauga

SEQ ID NO: 135641 - RNA, 22 nt, Human
ccuggcagcagcacaugccuuc

SEQ ID NO: 135642 - RNA, 22 nt, Human
gagccugagugcugccuccccu

SEQ ID NO: 135643 - RNA, 22 nt, Human
cuccagggaaaggggcguccgc

SEQ ID NO: 135644 - RNA, 20 nt, Human
ugcagaagaacguucugguu

SEQ ID NO: 135645 - RNA, 22 nt, Human
aggugcagaaaaaaguccuuua

SEQ ID NO: 135646 - RNA, 22 nt, Human
acauuauagcuuugaguuugga

SEQ ID NO: 135647 - RNA, 22 nt, Human
aagccaggcugcacuugcuggg

SEQ ID NO: 135648 - RNA, 22 nt, Human
caaggcaggaagccugucuuau

SEQ ID NO: 135649 - RNA, 22 nt, Human
acauuuaaccaaacuguuuaau

SEQ ID NO: 135650 - RNA, 22 nt, Human
cccaggagauggagguugcagu

SEQ ID NO: 135651 - RNA, 22 nt, Human
gguacaaggagugaagguuugg

SEQ ID NO: 135652 - RNA, 22 nt, Human
caggccuggggcuggcuuccag

SEQ ID NO: 135653 - RNA, 22 nt, Human
ccuggccuggcacucccucugc

SEQ ID NO: 135654 - RNA, 17 nt, Human
ugcaugcgucugugaua

SEQ ID NO: 135655 - RNA, 22 nt, Human
ugagcccagagaucugagcuau

SEQ ID NO: 135656 - RNA, 22 nt, Human
ugaaggccagggauuugcagcc

SEQ ID NO: 135657 - RNA, 22 nt, Human
gccggggcuggggagagacaug

SEQ ID NO: 135658 - RNA, 22 nt, Human
caugccaguuuugagaugcacc

SEQ ID NO: 135659 - RNA, 22 nt, Human
uguccucaaggagcuucagucu

SEQ ID NO: 135660 - RNA, 22 nt, Human
acauuucucagguaagucauuu

SEQ ID NO: 135661 - RNA, 22 nt, Human
aucaaaguggaaguuuacuagg

SEQ ID NO: 135662 - RNA, 22 nt, Human
uggcagugccccuugaccagug

SEQ ID NO: 135663 - RNA, 22 nt, Human
ggccugcuucucagugagcuug

SEQ ID NO: 135664 - RNA, 22 nt, Human
aggccugaaggaagaugagcug

SEQ ID NO: 135665 - RNA, 22 nt, Human
agaaaaggcuugaagagguuuu

SEQ ID NO: 135666 - RNA, 22 nt, Human
acagggccucagccagggcaga

SEQ ID NO: 135667 - RNA, 22 nt, Human
gucccuggucuaccguggcuuc

SEQ ID NO: 135668 - RNA, 22 nt, Human
cagggcaguuuuacuucucucu

SEQ ID NO: 135669 - RNA, 22 nt, Human
aguguauugauuggaacagccu

SEQ ID NO: 135670 - RNA, 22 nt, Human
aguaccaugcuuccugacuggu

SEQ ID NO: 135671 - RNA, 17 nt, Human
gccuuccuuccuccaca

SEQ ID NO: 135672 - RNA, 22 nt, Human
caaauaguaugagcaaugauuc

SEQ ID NO: 135673 - RNA, 22 nt, Human
gcugcucucagagcucaugcug

SEQ ID NO: 135674 - RNA, 22 nt, Human
cucuuuaacucccauucugucc

SEQ ID NO: 135675 - RNA, 22 nt, Human
ugcagugccucggcagugcagc

SEQ ID NO: 135676 - RNA, 22 nt, Human
cugugcccuggccaggccucuc

SEQ ID NO: 135677 - RNA, 22 nt, Human
ucacucuuuaucuuuuaugucu

SEQ ID NO: 135678 - RNA, 22 nt, Human
ccccuuccuuccucagacagcc

SEQ ID NO: 135679 - RNA, 19 nt, Human
ugccugucaguagaucuca

SEQ ID NO: 135680 - RNA, 21 nt, Human
acaugcauagagagauuucug

SEQ ID NO: 135681 - RNA, 22 nt, Human
ccucuggguaucuguggaagua

SEQ ID NO: 135682 - RNA, 22 nt, Human
gugaguguuaacccacugcuuc

SEQ ID NO: 135683 - RNA, 22 nt, Human
ggugaaggcacaagagggcaag

SEQ ID NO: 135684 - RNA, 22 nt, Human
uugccuugauucuucucaugug

SEQ ID NO: 135685 - RNA, 22 nt, Human
auucucuggucauugaguauaa

SEQ ID NO: 135686 - RNA, 22 nt, Human
gcagcugaaagggaucucuaca

SEQ ID NO: 135687 - RNA, 22 nt, Human
uuuuacagucagucaaacucag

SEQ ID NO: 135688 - RNA, 22 nt, Human
ucauugucuugauaugauuguc

SEQ ID NO: 135689 - RNA, 22 nt, Human
gccucucucuacccaguaugau

SEQ ID NO: 135690 - RNA, 22 nt, Human
gugugugcaagagguuuauuga

SEQ ID NO: 135691 - RNA, 22 nt, Human
agcugagcuaguaguuccagug

SEQ ID NO: 135692 - RNA, 22 nt, Human
aauuuagauugauaaacaugga

SEQ ID NO: 135693 - RNA, 22 nt, Human
ugggagcaagcuggugcuggag

SEQ ID NO: 135694 - RNA, 22 nt, Human
ugcagcugcuggcccaggugcu

SEQ ID NO: 135695 - RNA, 22 nt, Human
cauugcacuuuggguccaggac

SEQ ID NO: 135696 - RNA, 22 nt, Human
ccuggaaggcaggcauggauug

SEQ ID NO: 135697 - RNA, 22 nt, Human
cugugcugggugugcuuaugau

SEQ ID NO: 135698 - RNA, 22 nt, Human
uacuuuuuagcacagugugugc

SEQ ID NO: 135699 - RNA, 22 nt, Human
gcagccacuaguuuuccuguuu

SEQ ID NO: 135700 - RNA, 22 nt, Human
accaucagucauugucaguggg

SEQ ID NO: 135701 - RNA, 22 nt, Human
ugggccugggagggcagacgcu

SEQ ID NO: 135702 - RNA, 22 nt, Human
ggagcugaugacgucaccaugg

SEQ ID NO: 135703 - RNA, 23 nt, Human
ugcucugggaggcccuggagagc

SEQ ID NO: 135704 - RNA, 21 nt, Human
uuucucaccaugguauggaaa

SEQ ID NO: 135705 - RNA, 22 nt, Human
agagccaggugcugcuguuuga

SEQ ID NO: 135706 - RNA, 22 nt, Human
cuguguccucccgcugcaccca

SEQ ID NO: 135707 - RNA, 22 nt, Human
acucugggccccagguggagcu

SEQ ID NO: 135708 - RNA, 22 nt, Human
aggugccagugcuguggucccc

SEQ ID NO: 135709 - RNA, 22 nt, Human
agaggaugauuuuaaggacacu

SEQ ID NO: 135710 - RNA, 22 nt, Human
auaguacacauccuacaauguu

SEQ ID NO: 135711 - RNA, 22 nt, Human
ucucaucuccauuauagcauca

SEQ ID NO: 135712 - RNA, 22 nt, Human
aaggcugccucugccagaggag

SEQ ID NO: 135713 - RNA, 22 nt, Human
uuuccucuucuggcaggcaggg

SEQ ID NO: 135714 - RNA, 22 nt, Human
cacugccuccccaggcuccaca

SEQ ID NO: 135715 - RNA, 22 nt, Human
aaaguucugggggagaagaacg

SEQ ID NO: 135716 - RNA, 22 nt, Human
cauuuagaaacuguuuuuaaca

SEQ ID NO: 135717 - RNA, 22 nt, Human
cauuuguagcuauuuacuguau

SEQ ID NO: 135718 - RNA, 22 nt, Human
ccuggcucucugcagauccugg

SEQ ID NO: 135719 - RNA, 22 nt, Human
aggcucugaucagguggcugug

SEQ ID NO: 135720 - RNA, 22 nt, Human
cugagcugggaguagagacucu

SEQ ID NO: 135721 - RNA, 22 nt, Human
aguucacauuccgagguacugg

SEQ ID NO: 135722 - RNA, 19 nt, Human
uguguggguuuagaguagu

SEQ ID NO: 135723 - RNA, 22 nt, Human
gagcugugauuggugucucacu

SEQ ID NO: 135724 - RNA, 22 nt, Human
uguauagaguuggaagaugacu

SEQ ID NO: 135725 - RNA, 22 nt, Human
cuaacuuuuacagucauguugc

SEQ ID NO: 135726 - RNA, 22 nt, Human
aacuuauugaacauucucgaau

SEQ ID NO: 135727 - RNA, 22 nt, Human
agaauucuggaguugggaggaa

SEQ ID NO: 135728 - RNA, 22 nt, Human
guugggaagcagauggaugagc

SEQ ID NO: 135729 - RNA, 22 nt, Human
cucagaauuacaucccauuuua

SEQ ID NO: 135730 - RNA, 22 nt, Human
uuugaacaagagcuucacauua

SEQ ID NO: 135731 - RNA, 22 nt, Human
cuuccaaacccaggguaugggc

SEQ ID NO: 135732 - RNA, 22 nt, Human
auuauauugaguauaaccagag

SEQ ID NO: 135733 - RNA, 22 nt, Human
caggguagacaguaggugucug

SEQ ID NO: 135734 - RNA, 22 nt, Human
acagauguacacucauauauaa

SEQ ID NO: 135735 - RNA, 22 nt, Human
cagaggcuaagaugagugggug

SEQ ID NO: 135736 - RNA, 22 nt, Human
uccugggcccaggcugccaggg

SEQ ID NO: 135737 - RNA, 22 nt, Human
acucaggaaaaauguagugaua

SEQ ID NO: 135738 - RNA, 22 nt, Human
uggaguucucaggugagggcuu

SEQ ID NO: 135739 - RNA, 22 nt, Human
ugcaggugaaaauuaugaggau

SEQ ID NO: 135740 - RNA, 22 nt, Human
aggcacaguggcucacaccugu

SEQ ID NO: 135741 - RNA, 22 nt, Human
gagcagcuagauaaagcccuuc

SEQ ID NO: 135742 - RNA, 22 nt, Human
aaguauuucguucugaaaaagu

SEQ ID NO: 135743 - RNA, 22 nt, Human
ugcauugcaguuaacucaguau

SEQ ID NO: 135744 - RNA, 22 nt, Human
agaagccacuggagguugagau

SEQ ID NO: 135745 - RNA, 22 nt, Human
caaaguuuggcucucaugacau

SEQ ID NO: 135746 - RNA, 22 nt, Human
agcugcugcgccucacccuggc

SEQ ID NO: 135747 - RNA, 22 nt, Human
ugaguguauaugaagguuguaa

SEQ ID NO: 135748 - RNA, 22 nt, Human
uguauguauguauguauuuggg

SEQ ID NO: 135749 - RNA, 22 nt, Human
ccagcuccgggaguugcugcug

SEQ ID NO: 135750 - RNA, 22 nt, Human
ugcauauugugaaaauguagau

SEQ ID NO: 135751 - RNA, 22 nt, Human
gacacauagaucuaucucacuc

SEQ ID NO: 135752 - RNA, 22 nt, Human
cacugaguucccugacauuuca

SEQ ID NO: 135753 - RNA, 22 nt, Human
agggcugguauguccaugaaag

SEQ ID NO: 135754 - RNA, 19 nt, Human
ggccccucucacaggaguu

SEQ ID NO: 135755 - RNA, 22 nt, Human
ucauuuguucaucugcucuucu

SEQ ID NO: 135756 - RNA, 22 nt, Human
caggguacagaguuuucuaaac

SEQ ID NO: 135757 - RNA, 22 nt, Human
aggcuguguggauaauauuggg

SEQ ID NO: 135758 - RNA, 22 nt, Human
caggaaccuaaagagacauuac

SEQ ID NO: 135759 - RNA, 22 nt, Human
uucucuuauucuggauaugcag

SEQ ID NO: 135760 - RNA, 22 nt, Human
auauuucuggggguguguuucu

SEQ ID NO: 135761 - RNA, 21 nt, Human
agugugugauaggcaggaaga

SEQ ID NO: 135762 - RNA, 22 nt, Human
acugucugcaaaacucauacuc

SEQ ID NO: 135763 - RNA, 21 nt, Human
ccuucucuugcuucagcuuca

SEQ ID NO: 135764 - RNA, 22 nt, Human
uugagaagaaauaguuugcaau

SEQ ID NO: 135765 - RNA, 22 nt, Human
uggaaggagcuaaggaccuggg

SEQ ID NO: 135766 - RNA, 22 nt, Human
cuggaggcacccuuagagaggc

SEQ ID NO: 135767 - RNA, 21 nt, Human
ggagucauuagucauuuccuu

SEQ ID NO: 135768 - RNA, 22 nt, Human
gcagagcuucuguccuucagga

SEQ ID NO: 135769 - RNA, 20 nt, Human
accaauguuagcuuaguacu

SEQ ID NO: 135770 - RNA, 22 nt, Human
uacugugucuuaggauguggaa

SEQ ID NO: 135771 - RNA, 22 nt, Human
gcagagugagccgaggcugcuc

SEQ ID NO: 135772 - RNA, 22 nt, Human
gcuggccuuugaggaagcugcg

SEQ ID NO: 135773 - RNA, 22 nt, Human
gggagagagagcucauguugaa

SEQ ID NO: 135774 - RNA, 22 nt, Human
cauuguuaccaucuuuuaccua

SEQ ID NO: 135775 - RNA, 22 nt, Human
ccugcucugguuuagucagucu

SEQ ID NO: 135776 - RNA, 22 nt, Human
gaaaucugaaucuucuguuggu

SEQ ID NO: 135777 - RNA, 22 nt, Human
uguauaugagucugaguguaca

SEQ ID NO: 135778 - RNA, 22 nt, Human
ucacaggaaccaucagagaaau

SEQ ID NO: 135779 - RNA, 22 nt, Human
uuuuuaagagauucuccagucu

SEQ ID NO: 135780 - RNA, 22 nt, Human
cuccucccucuuugccacacau

SEQ ID NO: 135781 - RNA, 22 nt, Human
ugugugaaucuauugaauauau

SEQ ID NO: 135782 - RNA, 22 nt, Human
cugugcuggauucugaggcuac

SEQ ID NO: 135783 - RNA, 22 nt, Human
aucauucuauuguugagcugcc

SEQ ID NO: 135784 - RNA, 22 nt, Human
gcucaggacuggaggagcgggg

SEQ ID NO: 135785 - RNA, 22 nt, Human
cagaacauuccaugugcccugc

SEQ ID NO: 135786 - RNA, 22 nt, Human
ugugugugaguccuggcuuucc

SEQ ID NO: 135787 - RNA, 18 nt, Human
uggagcugagugcugugc

SEQ ID NO: 135788 - RNA, 22 nt, Human
ccagugcaggugagcaccaggu

SEQ ID NO: 135789 - RNA, 22 nt, Human
aaugucugcucuacucaggagg

SEQ ID NO: 135790 - RNA, 22 nt, Human
ggcagcugugaagugccucaca

SEQ ID NO: 135791 - RNA, 22 nt, Human
agcagggcagcugaugcgcacg

SEQ ID NO: 135792 - RNA, 22 nt, Human
augucccagcugagagacaacu

SEQ ID NO: 135793 - RNA, 18 nt, Human
gaggauggaaggagaugc

SEQ ID NO: 135794 - RNA, 22 nt, Human
gcccaucaucacuguggaggcu

SEQ ID NO: 135795 - RNA, 22 nt, Human
uuacaaagagaaguuguagaau

SEQ ID NO: 135796 - RNA, 22 nt, Human
gcugucccaugguugcaagaug

SEQ ID NO: 135797 - RNA, 22 nt, Human
ggcucugcgcgguaaagugacu

SEQ ID NO: 135798 - RNA, 22 nt, Human
aagugacacauggcacuucuau

SEQ ID NO: 135799 - RNA, 22 nt, Human
cugucaguucuuccagauagag

SEQ ID NO: 135800 - RNA, 22 nt, Human
ccaggagcagggcuggcugcac

SEQ ID NO: 135801 - RNA, 22 nt, Human
caaauguaaauucuuuugaagc

SEQ ID NO: 135802 - RNA, 21 nt, Human
uuucaauguguucuuuguagu

SEQ ID NO: 135803 - RNA, 22 nt, Human
uuucaguuguccuguuaauagc

SEQ ID NO: 135804 - RNA, 21 nt, Human
uccaggaguggcugggcaggg

SEQ ID NO: 135805 - RNA, 22 nt, Human
ccugggagugugccaucucugu

SEQ ID NO: 135806 - RNA, 22 nt, Human
aaguugaaugcguacgugacau

SEQ ID NO: 135807 - RNA, 22 nt, Human
cugcccugggauggucugugcg

SEQ ID NO: 135808 - RNA, 21 nt, Human
ugaaaucugaugggacaaaug

SEQ ID NO: 135809 - RNA, 22 nt, Human
uacagauacagaucuagauaca

SEQ ID NO: 135810 - RNA, 22 nt, Human
uggggacacagagguucguugg

SEQ ID NO: 135811 - RNA, 22 nt, Human
gccaggcuguuuuuauuacugu

SEQ ID NO: 135812 - RNA, 22 nt, Human
aguguaugcagguuuucaaugu

SEQ ID NO: 135813 - RNA, 22 nt, Human
ucauugcaggcauuccccugcc

SEQ ID NO: 135814 - RNA, 22 nt, Human
ggaugcacgaaggcgccucgga

SEQ ID NO: 135815 - RNA, 22 nt, Human
auuucucucauuguuagcuagg

SEQ ID NO: 135816 - RNA, 22 nt, Human
uaagacaauucuucagucacaa

SEQ ID NO: 135817 - RNA, 23 nt, Human
agcagggccagaauacuugcugu

SEQ ID NO: 135818 - RNA, 22 nt, Human
caaaugugguuucucagcauuc

SEQ ID NO: 135819 - RNA, 22 nt, Human
agcugccacugagggugcacag

SEQ ID NO: 135820 - RNA, 16 nt, Human
guucucucacuguacc

SEQ ID NO: 135821 - RNA, 22 nt, Human
gccacugcacuccagcccaggc

SEQ ID NO: 135822 - RNA, 22 nt, Human
uagaaaucagguuuuuagaaag

SEQ ID NO: 135823 - RNA, 22 nt, Human
aaauguagaccuauagggaccu

SEQ ID NO: 135824 - RNA, 22 nt, Human
ggcugcuggggacgugggagag

SEQ ID NO: 135825 - RNA, 22 nt, Human
aauauuuuaggcuuuccaggcu

SEQ ID NO: 135826 - RNA, 22 nt, Human
uuccucugaaauggcuuggaaa

SEQ ID NO: 135827 - RNA, 22 nt, Human
agacaacaccaaaugcuagugu

SEQ ID NO: 135828 - RNA, 22 nt, Human
ggccucugaggacagccuuggc

SEQ ID NO: 135829 - RNA, 22 nt, Human
cugguucauccccuuccaggaa

SEQ ID NO: 135830 - RNA, 22 nt, Human
ugugccuggucccugagucgag

SEQ ID NO: 135831 - RNA, 22 nt, Human
ccauuugucaccucugcacucc

SEQ ID NO: 135832 - RNA, 22 nt, Human
agggcccaggacagcaucaggg

SEQ ID NO: 135833 - RNA, 22 nt, Human
aguggcagagugcacucaggca

SEQ ID NO: 135834 - RNA, 22 nt, Human
ucaggagucugugcaguuccac

SEQ ID NO: 135835 - RNA, 23 nt, Human
ggccuguguuuugucugaaguac

SEQ ID NO: 135836 - RNA, 22 nt, Human
ggaaaguggugguggaaagagg

SEQ ID NO: 135837 - RNA, 22 nt, Human
ucuuuaagaguaauuauuuugg

SEQ ID NO: 135838 - RNA, 22 nt, Human
gaggcugcccaacuggagugga

SEQ ID NO: 135839 - RNA, 22 nt, Human
agucucugcacaguaagaagca

SEQ ID NO: 135840 - RNA, 20 nt, Human
ccugccugccucggcucauu

SEQ ID NO: 135841 - RNA, 20 nt, Human
aacagggggcugcagagggc

SEQ ID NO: 135842 - RNA, 22 nt, Human
cugagcuuccaguuccuccagg

SEQ ID NO: 135843 - RNA, 22 nt, Human
gcagggcaaugaucccgagagg

SEQ ID NO: 135844 - RNA, 22 nt, Human
uuauuuauggcacuguuggugg

SEQ ID NO: 135845 - RNA, 22 nt, Human
aguauguugaguuuugcuuuag

SEQ ID NO: 135846 - RNA, 22 nt, Human
cugagcugcggcaggcaccugg

SEQ ID NO: 135847 - RNA, 22 nt, Human
uggcugcugcuuggucuucuuc

SEQ ID NO: 135848 - RNA, 22 nt, Human
aucuggcucuuccuggaguucc

SEQ ID NO: 135849 - RNA, 22 nt, Human
aguauauuuugauuguaugugu

SEQ ID NO: 135850 - RNA, 22 nt, Human
cauacauuuugcauauuuacca

SEQ ID NO: 135851 - RNA, 22 nt, Human
agcugugugugaauuuggccua

SEQ ID NO: 135852 - RNA, 22 nt, Human
agccacaggaaacagagacagc

SEQ ID NO: 135853 - RNA, 22 nt, Human
cagcaggaaacuuaaagguaau

SEQ ID NO: 135854 - RNA, 22 nt, Human
ccugaggcuuaaucugucccaa

SEQ ID NO: 135855 - RNA, 22 nt, Human
aggcaagggggcgccaccuucc

SEQ ID NO: 135856 - RNA, 22 nt, Human
cuguguuuuuggucugaucuau

SEQ ID NO: 135857 - RNA, 22 nt, Human
uuuucauuguuccucgagcauu

SEQ ID NO: 135858 - RNA, 19 nt, Human
cucugcuugguccauaugc

SEQ ID NO: 135859 - RNA, 22 nt, Human
gcuggcucccauugguccuucc

SEQ ID NO: 135860 - RNA, 22 nt, Human
auggcuguugugaggaucaaau

SEQ ID NO: 135861 - RNA, 22 nt, Human
ugggacagugugccuugcuccu

SEQ ID NO: 135862 - RNA, 22 nt, Human
ccaggccagcaggcacaccugc

SEQ ID NO: 135863 - RNA, 22 nt, Human
gcagugaaucuggcaagaauuu

SEQ ID NO: 135864 - RNA, 22 nt, Human
cugggcuggagugcaauggcgc

SEQ ID NO: 135865 - RNA, 22 nt, Human
aggggagaguuaaugugaaugu

SEQ ID NO: 135866 - RNA, 22 nt, Human
gccugagauucccggagccgug

SEQ ID NO: 135867 - RNA, 22 nt, Human
gcccuggccuucaucucagaca

SEQ ID NO: 135868 - RNA, 22 nt, Human
ucuggccugggccugccggugc

SEQ ID NO: 135869 - RNA, 22 nt, Human
gccugggagagggauagugcag

SEQ ID NO: 135870 - RNA, 22 nt, Human
agauuucccaaauacuuguuau

SEQ ID NO: 135871 - RNA, 22 nt, Human
aagauacauaaagguagagucu

SEQ ID NO: 135872 - RNA, 22 nt, Human
ugggcugcggauaggccucgga

SEQ ID NO: 135873 - RNA, 22 nt, Human
ugugugaguaaggcugagagag

SEQ ID NO: 135874 - RNA, 22 nt, Human
ggcuuucuagaucuagcucugu

SEQ ID NO: 135875 - RNA, 22 nt, Human
cagaguguggcaucuuccaacu

SEQ ID NO: 135876 - RNA, 22 nt, Human
acuuccugcuaugagcuucugu

SEQ ID NO: 135877 - RNA, 23 nt, Human
uauguauguauguuuguauggaa

SEQ ID NO: 135878 - RNA, 19 nt, Human
uauguguauauguaucugu

SEQ ID NO: 135879 - RNA, 22 nt, Human
ucaaaugcuguauuguaguaau

SEQ ID NO: 135880 - RNA, 22 nt, Human
cucuucuugcuagacugagugc

SEQ ID NO: 135881 - RNA, 22 nt, Human
uccuucagcuacucaguuucca

SEQ ID NO: 135882 - RNA, 22 nt, Human
cuuuacagugcugcuaauggcu

SEQ ID NO: 135883 - RNA, 22 nt, Human
ucacugcaaccucugccuuccg

SEQ ID NO: 135884 - RNA, 17 nt, Human
uuaaaggaugcucucuc

SEQ ID NO: 135885 - RNA, 22 nt, Human
uggccugggccggcagauauac

SEQ ID NO: 135886 - RNA, 22 nt, Human
guuuaugcacuugguuuguguc

SEQ ID NO: 135887 - RNA, 22 nt, Human
acagggccucagcugauucugg

SEQ ID NO: 135888 - RNA, 22 nt, Human
gucaaacaaauuaacauaucca

SEQ ID NO: 135889 - RNA, 22 nt, Human
cugugcaagacuuacuuuaaua

SEQ ID NO: 135890 - RNA, 22 nt, Human
gggcaguggcucacgccuguaa

SEQ ID NO: 135891 - RNA, 22 nt, Human
uuguuuguaugcugagaagaau

SEQ ID NO: 135892 - RNA, 22 nt, Human
uuccauaauaggcuuaagugaa

SEQ ID NO: 135893 - RNA, 22 nt, Human
gcagagacuccacugucuugug

SEQ ID NO: 135894 - RNA, 22 nt, Human
agggcacaucugcugggaaugg

SEQ ID NO: 135895 - RNA, 21 nt, Human
uggcucugaaagagugcugca

SEQ ID NO: 135896 - RNA, 22 nt, Human
cagccugcuagggcaaugccuu

SEQ ID NO: 135897 - RNA, 22 nt, Human
uucacagggcagcagcugagcc

SEQ ID NO: 135898 - RNA, 22 nt, Human
ugugugauuccacuuauauggg

SEQ ID NO: 135899 - RNA, 22 nt, Human
uaaaauguguuucuguaugguu

SEQ ID NO: 135900 - RNA, 22 nt, Human
acagccauagaugcuuauguaa

SEQ ID NO: 135901 - RNA, 22 nt, Human
gugucauuaaccaccaugcaaa

SEQ ID NO: 135902 - RNA, 22 nt, Human
aaauauaauuucugccucaaua

SEQ ID NO: 135903 - RNA, 22 nt, Human
gagggcugauaacaggaauaca

SEQ ID NO: 135904 - RNA, 22 nt, Human
ugcagcuguaacagaggccuca

SEQ ID NO: 135905 - RNA, 22 nt, Human
gugugccaccagucaaggugaa

SEQ ID NO: 135906 - RNA, 22 nt, Human
ccugagaggcccucucacuguc

SEQ ID NO: 135907 - RNA, 22 nt, Human
acuggcaguuugagaaugcauu

SEQ ID NO: 135908 - RNA, 22 nt, Human
aagaagagaaaugugcugcugg

SEQ ID NO: 135909 - RNA, 22 nt, Human
uuucacaggaguccuuucuaua

SEQ ID NO: 135910 - RNA, 22 nt, Human
ccaggguggaggcuggauggag

SEQ ID NO: 135911 - RNA, 22 nt, Human
ggcugcuggauuguguaucugu

SEQ ID NO: 135912 - RNA, 22 nt, Human
auguuuauguugggcuauauuu

SEQ ID NO: 135913 - RNA, 22 nt, Human
uaauauuucuacccugcugccu

SEQ ID NO: 135914 - RNA, 22 nt, Human
ugugugucagucuuguuuaggg

SEQ ID NO: 135915 - RNA, 22 nt, Human
aggcagcaaagaaaugaugcug

SEQ ID NO: 135916 - RNA, 22 nt, Human
guggauggauuuugaggaaugg

SEQ ID NO: 135917 - RNA, 22 nt, Human
aagcagugcgcucaucuaaggg

SEQ ID NO: 135918 - RNA, 22 nt, Human
acaauauuguacccagaaguuu

SEQ ID NO: 135919 - RNA, 22 nt, Human
caccaggcuggagugcagaggu

SEQ ID NO: 135920 - RNA, 22 nt, Human
gggggcuggaauauccaucaac

SEQ ID NO: 135921 - RNA, 22 nt, Human
ccugucuguccucucaugagcc

SEQ ID NO: 135922 - RNA, 22 nt, Human
gccuucugauugcuggacugac

SEQ ID NO: 135923 - RNA, 22 nt, Human
cuuccuguugucacagucugcg

SEQ ID NO: 135924 - RNA, 22 nt, Human
uauguucuuuacaucugugcaa

SEQ ID NO: 135925 - RNA, 22 nt, Human
caaaugauacuguuuuuagucu

SEQ ID NO: 135926 - RNA, 22 nt, Human
uuagagaaauucugguaaugua

SEQ ID NO: 135927 - RNA, 22 nt, Human
auaagaaacauuauucuuucca

SEQ ID NO: 135928 - RNA, 22 nt, Human
ggcagccagagggcagcuggau

SEQ ID NO: 135929 - RNA, 22 nt, Human
caggugccgggaaugcagcaau

SEQ ID NO: 135930 - RNA, 22 nt, Human
aaguucaagucugcaucuuuuu

SEQ ID NO: 135931 - RNA, 22 nt, Human
uccagggaaggugugaggcugg

SEQ ID NO: 135932 - RNA, 22 nt, Human
aaagccuugagauccuauaguu

SEQ ID NO: 135933 - RNA, 22 nt, Human
uuuccuguucuaguuguugcca

SEQ ID NO: 135934 - RNA, 22 nt, Human
auucuucauacagacaaguccu

SEQ ID NO: 135935 - RNA, 22 nt, Human
uggagccugagucagcggaggc

SEQ ID NO: 135936 - RNA, 22 nt, Human
aguauuucuaguugguucuacu

SEQ ID NO: 135937 - RNA, 22 nt, Human
agaaaaggauugauggaucaga

SEQ ID NO: 135938 - RNA, 22 nt, Human
ucaaugaugcugaagguagcgu

SEQ ID NO: 135939 - RNA, 22 nt, Human
ugaagacacauacaagggaaug

SEQ ID NO: 135940 - RNA, 22 nt, Human
cugaagcaaaggaucgagcuaa

SEQ ID NO: 135941 - RNA, 22 nt, Human
uggccuuguguuuuagagaaag

SEQ ID NO: 135942 - RNA, 22 nt, Human
cagcagcucccauccgcugagc

SEQ ID NO: 135943 - RNA, 22 nt, Human
ucugagagguuaagcaauuuga

SEQ ID NO: 135944 - RNA, 22 nt, Human
cccacagguccccaugaacucg

SEQ ID NO: 135945 - RNA, 22 nt, Human
ugcauuucagaagaaaauucgg

SEQ ID NO: 135946 - RNA, 22 nt, Human
ugccugcuaggcccugcugggu

SEQ ID NO: 135947 - RNA, 22 nt, Human
gcagggugaaggucacauagaa

SEQ ID NO: 135948 - RNA, 22 nt, Human
uggcagaguuauggguauuuau

SEQ ID NO: 135949 - RNA, 22 nt, Human
ggcacugggcaccggcugaggg

SEQ ID NO: 135950 - RNA, 22 nt, Human
uggguggcacuucuggggucca

SEQ ID NO: 135951 - RNA, 22 nt, Human
uggcaggggaggugcuugcuua

SEQ ID NO: 135952 - RNA, 22 nt, Human
uuaauuuuaaccuguuuguguc

SEQ ID NO: 135953 - RNA, 22 nt, Human
ucauuauccuaguaucuugaau

SEQ ID NO: 135954 - RNA, 22 nt, Human
ugcccaggaucuggcgaugcuc

SEQ ID NO: 135955 - RNA, 22 nt, Human
gaggcugccccuuccucagcug

SEQ ID NO: 135956 - RNA, 19 nt, Human
gaucuuugccaauuuaagc

SEQ ID NO: 135957 - RNA, 22 nt, Human
agccucucuuuauucccagcua

SEQ ID NO: 135958 - RNA, 22 nt, Human
cagggccagccgcagcauccac

SEQ ID NO: 135959 - RNA, 22 nt, Human
ucuccucuauuucuguauguau

SEQ ID NO: 135960 - RNA, 22 nt, Human
uccuucuuugacaaguggcaga

SEQ ID NO: 135961 - RNA, 22 nt, Human
gaggagagggcugcgggcccac

SEQ ID NO: 135962 - RNA, 22 nt, Human
uuguggcuucuacgcccacagg

SEQ ID NO: 135963 - RNA, 22 nt, Human
uuguuacagcagugauuucaga

SEQ ID NO: 135964 - RNA, 22 nt, Human
caaaguuaugaaugauaagauu

SEQ ID NO: 135965 - RNA, 22 nt, Human
ugaugaaaauaugauucugagg

SEQ ID NO: 135966 - RNA, 22 nt, Human
ucaaaugcggucauggcuuuua

SEQ ID NO: 135967 - RNA, 22 nt, Human
ugcacacaaguuggagaaugaa

SEQ ID NO: 135968 - RNA, 22 nt, Human
caaagccucugauuucacuugu

SEQ ID NO: 135969 - RNA, 22 nt, Human
auaauuuaaauuaguaugugau

SEQ ID NO: 135970 - RNA, 18 nt, Human
uuucacaaccuccagagg

SEQ ID NO: 135971 - RNA, 22 nt, Human
uacccagcuucaagucaggacu

SEQ ID NO: 135972 - RNA, 22 nt, Human
gccaggugggagacagacagca

SEQ ID NO: 135973 - RNA, 22 nt, Human
acaggccugacacacagagggc

SEQ ID NO: 135974 - RNA, 22 nt, Human
ucucccaggugggugccuggag

SEQ ID NO: 135975 - RNA, 22 nt, Human
cuggccuggcagggagggcaug

SEQ ID NO: 135976 - RNA, 22 nt, Human
agggaagaagcugguaguaggu

SEQ ID NO: 135977 - RNA, 22 nt, Human
uguguguguaaaagcauuuaua

SEQ ID NO: 135978 - RNA, 22 nt, Human
cuggccaggcuugggacagaca

SEQ ID NO: 135979 - RNA, 22 nt, Human
aggcugucugaccccagagccc

SEQ ID NO: 135980 - RNA, 19 nt, Human
uagcugccuguuaccucca

SEQ ID NO: 135981 - RNA, 22 nt, Human
uuuaucuuuaggacuuugcaga

SEQ ID NO: 135982 - RNA, 22 nt, Human
caggauggugugagugugagga

SEQ ID NO: 135983 - RNA, 22 nt, Human
uuugaaaggaauuaggaugaca

SEQ ID NO: 135984 - RNA, 22 nt, Human
auccuugacacacuccaguacu

SEQ ID NO: 135985 - RNA, 22 nt, Human
uggccucugcaauggauucacc

SEQ ID NO: 135986 - RNA, 22 nt, Human
aagaaugucguugguauuuuaa

SEQ ID NO: 135987 - RNA, 22 nt, Human
acaaggcugaacagugaagccg

SEQ ID NO: 135988 - RNA, 22 nt, Human
gaggggcuggcuguggucccau

SEQ ID NO: 135989 - RNA, 22 nt, Human
cuggcaggaagaggaaagguca

SEQ ID NO: 135990 - RNA, 22 nt, Human
aagcagccagccaucaugcccg

SEQ ID NO: 135991 - RNA, 22 nt, Human
aggucacacaacugucagaggc

SEQ ID NO: 135992 - RNA, 18 nt, Human
uguaaugcagcggguggc

SEQ ID NO: 135993 - RNA, 22 nt, Human
aggaccuguaccucagcaucua

SEQ ID NO: 135994 - RNA, 22 nt, Human
uauuuugcaaaccugaguuuga

SEQ ID NO: 135995 - RNA, 22 nt, Human
aguguaugugaaacuuuccaaa

SEQ ID NO: 135996 - RNA, 22 nt, Human
ucucuccugcacugaauuaugu

SEQ ID NO: 135997 - RNA, 22 nt, Human
gggcuggcaggaccugggcuga

SEQ ID NO: 135998 - RNA, 22 nt, Human
guaucuuucccaccaaucacaa

SEQ ID NO: 135999 - RNA, 22 nt, Human
gggaaggagguggcuugaagug

SEQ ID NO: 136000 - RNA, 22 nt, Human
ucccugggccuccugcuaugca

SEQ ID NO: 136001 - RNA, 22 nt, Human
ccugcagguccccggaugcgca

SEQ ID NO: 136002 - RNA, 22 nt, Human
ucucagaguuuacggggcugaa

SEQ ID NO: 136003 - RNA, 15 nt, Human
uaacuuuuuugggcu

SEQ ID NO: 136004 - RNA, 22 nt, Human
guggccucugugcuccugccua

SEQ ID NO: 136005 - RNA, 22 nt, Human
ucugccuuggcaaccacagcuu

SEQ ID NO: 136006 - RNA, 22 nt, Human
ucucuuucuuuguaugucuauu

SEQ ID NO: 136007 - RNA, 22 nt, Human
cuucuggggauggagcccagaa

SEQ ID NO: 136008 - RNA, 22 nt, Human
uggcagagagagugcagucgac

SEQ ID NO: 136009 - RNA, 22 nt, Human
accaaggaguuugguauuuuag

SEQ ID NO: 136010 - RNA, 22 nt, Human
uggcagaguucgcugugccuuu

SEQ ID NO: 136011 - RNA, 22 nt, Human
ggggagugacgcagggccauag

SEQ ID NO: 136012 - RNA, 22 nt, Human
ggccugugagcccuugcaugua

SEQ ID NO: 136013 - RNA, 16 nt, Human
uuguggcuuuugcaca

SEQ ID NO: 136014 - RNA, 22 nt, Human
agaguucugcucuucucaguga

SEQ ID NO: 136015 - RNA, 22 nt, Human
ccugaagcaaggguaggcaggu

SEQ ID NO: 136016 - RNA, 22 nt, Human
gccuuugccugcgacguggcug

SEQ ID NO: 136017 - RNA, 22 nt, Human
cacagaggcaaccuucuggggu

SEQ ID NO: 136018 - RNA, 22 nt, Human
agcaguggaccucagugcuauu

SEQ ID NO: 136019 - RNA, 22 nt, Human
acaugauuuuaguaucauaaua

SEQ ID NO: 136020 - RNA, 22 nt, Human
uggagggaacccaggcugcucu

SEQ ID NO: 136021 - RNA, 22 nt, Human
agcagcucuuaacaaagcaugg

SEQ ID NO: 136022 - RNA, 23 nt, Human
ucuccuccuagauacagucaugg

SEQ ID NO: 136023 - RNA, 22 nt, Human
uuugcauuuauaaguuggugga

SEQ ID NO: 136024 - RNA, 22 nt, Human
ucugcguggcgugguucugugc

SEQ ID NO: 136025 - RNA, 22 nt, Human
gcuggggcugggcugaggaaga

SEQ ID NO: 136026 - RNA, 22 nt, Human
cuuuaacaaaugacucuugucu

SEQ ID NO: 136027 - RNA, 22 nt, Human
guggcugguuuccugcaugcaa

SEQ ID NO: 136028 - RNA, 17 nt, Human
agcagcuggguugaucu

SEQ ID NO: 136029 - RNA, 22 nt, Human
uuguguggauaauauuacuuga

SEQ ID NO: 136030 - RNA, 22 nt, Human
ucucccacgguacaggauaaac

SEQ ID NO: 136031 - RNA, 20 nt, Human
accccagccccucuaucuga

SEQ ID NO: 136032 - RNA, 22 nt, Human
agagaacaaauuaaaggugguu

SEQ ID NO: 136033 - RNA, 22 nt, Human
aaucuucuuucuuaacaguaca

SEQ ID NO: 136034 - RNA, 19 nt, Human
ucuggagcugaugcaggug

SEQ ID NO: 136035 - RNA, 22 nt, Human
cuuccucacggugcaacaggaa

SEQ ID NO: 136036 - RNA, 22 nt, Human
cugcagaggguuugagcauccu

SEQ ID NO: 136037 - RNA, 22 nt, Human
ucaccgccuugcccggccgggc

SEQ ID NO: 136038 - RNA, 22 nt, Human
aguuacuugagacguuuaugaa

SEQ ID NO: 136039 - RNA, 22 nt, Human
ugcaggugcguuuucaagccuc

SEQ ID NO: 136040 - RNA, 22 nt, Human
aagggaaaucauauggugcagu

SEQ ID NO: 136041 - RNA, 22 nt, Human
uacagaaaucacaucgcuuuga

SEQ ID NO: 136042 - RNA, 22 nt, Human
uuacauuuggcuauguccucua

SEQ ID NO: 136043 - RNA, 22 nt, Human
augggguggaguccgggcagcg

SEQ ID NO: 136044 - RNA, 22 nt, Human
ucacuuauugcucaucucaugc

SEQ ID NO: 136045 - RNA, 22 nt, Human
cugaaggauguguggugggagu

SEQ ID NO: 136046 - RNA, 22 nt, Human
ggcagaagauaggacagggaau

SEQ ID NO: 136047 - RNA, 22 nt, Human
uggcagcugauuagauggugcc

SEQ ID NO: 136048 - RNA, 23 nt, Human
ccagccucugggucuucauccag

SEQ ID NO: 136049 - RNA, 22 nt, Human
uacagauauauagugugugccu

SEQ ID NO: 136050 - RNA, 22 nt, Human
auacagauguugaauguuauau

SEQ ID NO: 136051 - RNA, 22 nt, Human
gcaggagcuggaaagugauguu

SEQ ID NO: 136052 - RNA, 22 nt, Human
gcucccacugcagcccugagcc

SEQ ID NO: 136053 - RNA, 22 nt, Human
ucacgagaggcacagaauagag

SEQ ID NO: 136054 - RNA, 22 nt, Human
ccacagggauaggaauggggcu

SEQ ID NO: 136055 - RNA, 22 nt, Human
agggcuggcuccguuaccuuga

SEQ ID NO: 136056 - RNA, 22 nt, Human
caacuuuucugugaauuuaagu

SEQ ID NO: 136057 - RNA, 22 nt, Human
gcccagcuccucugcagacccu

SEQ ID NO: 136058 - RNA, 22 nt, Human
caggguccggcugccuggcugu

SEQ ID NO: 136059 - RNA, 20 nt, Human
cagagccaagagcagcaucu

SEQ ID NO: 136060 - RNA, 22 nt, Human
uggggugccgacagggagggca

SEQ ID NO: 136061 - RNA, 22 nt, Human
auuuucagagacaucuggacuu

SEQ ID NO: 136062 - RNA, 22 nt, Human
uacaagagguauauagaaacag

SEQ ID NO: 136063 - RNA, 22 nt, Human
gcuggcagaauuucuucuugcu

SEQ ID NO: 136064 - RNA, 22 nt, Human
cauucauuagaauagauaugua

SEQ ID NO: 136065 - RNA, 22 nt, Human
uggcucagcugucacagccugg

SEQ ID NO: 136066 - RNA, 22 nt, Human
cagugguggaaugaggaauugu

SEQ ID NO: 136067 - RNA, 22 nt, Human
cccagcaguuguuggugcacau

SEQ ID NO: 136068 - RNA, 22 nt, Human
gucaggauuuacaaacuucagu

SEQ ID NO: 136069 - RNA, 22 nt, Human
ucuccucucuuaccugguacaa

SEQ ID NO: 136070 - RNA, 22 nt, Human
aaggcaguacuuuauguccaua

SEQ ID NO: 136071 - RNA, 22 nt, Human
aaggcugcuuuuaacaugcaua

SEQ ID NO: 136072 - RNA, 22 nt, Human
ucugaggcuaagagacagaggc

SEQ ID NO: 136073 - RNA, 22 nt, Human
uaaguuuaaauguacaugaagc

SEQ ID NO: 136074 - RNA, 21 nt, Human
caguuauucuugaugugugug

SEQ ID NO: 136075 - RNA, 22 nt, Human
gggcaggaugcaguuucagaga

SEQ ID NO: 136076 - RNA, 22 nt, Human
uuagauaauguuauuguaauuu

SEQ ID NO: 136077 - RNA, 22 nt, Human
aaguucaagcucugccuaaaau

SEQ ID NO: 136078 - RNA, 22 nt, Human
cuggcucaauaaauauuagcug

SEQ ID NO: 136079 - RNA, 22 nt, Human
uacuguguggugagcugucucc

SEQ ID NO: 136080 - RNA, 23 nt, Human
cuuguuauaagaagacugucugg

SEQ ID NO: 136081 - RNA, 22 nt, Human
uuuuuaagcuccuuugauguca

SEQ ID NO: 136082 - RNA, 22 nt, Human
cagagguagccgagugcaaucg

SEQ ID NO: 136083 - RNA, 22 nt, Human
gugcucaggaagcuguuccugc

SEQ ID NO: 136084 - RNA, 21 nt, Human
uacagaaugcgcuucagucug

SEQ ID NO: 136085 - RNA, 22 nt, Human
ucucaggggccuggaguccugg

SEQ ID NO: 136086 - RNA, 22 nt, Human
uaaacauggauucugaucacag

SEQ ID NO: 136087 - RNA, 22 nt, Human
accaguaugugccuucaguguc

SEQ ID NO: 136088 - RNA, 22 nt, Human
auguguguguauauacacacau

SEQ ID NO: 136089 - RNA, 22 nt, Human
gccuucagcccugacuggccag

SEQ ID NO: 136090 - RNA, 22 nt, Human
uaguaaaaguuuaguugaaagu

SEQ ID NO: 136091 - RNA, 22 nt, Human
agggggugcuacuuccagaguu

SEQ ID NO: 136092 - RNA, 22 nt, Human
ggcaugggagugagcaaccuua

SEQ ID NO: 136093 - RNA, 22 nt, Human
ucucaggaauagaguggcagca

SEQ ID NO: 136094 - RNA, 22 nt, Human
gaggcaggcacuguuaucagca

SEQ ID NO: 136095 - RNA, 22 nt, Human
uuauucucaucucccuacuuag

SEQ ID NO: 136096 - RNA, 22 nt, Human
ugggcuggcccaccacaccucg

SEQ ID NO: 136097 - RNA, 20 nt, Human
gugggcagcaggcauacugg

SEQ ID NO: 136098 - RNA, 22 nt, Human
ugcauuaugcuugugcuguaua

SEQ ID NO: 136099 - RNA, 17 nt, Human
gcuuccugugcugggga

SEQ ID NO: 136100 - RNA, 22 nt, Human
uuaaaguucauuaaaugagcca

SEQ ID NO: 136101 - RNA, 22 nt, Human
gcuuccucgcugggcagaggca

SEQ ID NO: 136102 - RNA, 22 nt, Human
ggcggggguccaggagccugca

SEQ ID NO: 136103 - RNA, 22 nt, Human
uagcugugagcacccaggcugu

SEQ ID NO: 136104 - RNA, 22 nt, Human
acucugaggcaggucagggcag

SEQ ID NO: 136105 - RNA, 22 nt, Human
caggacaguuugcuuugcccug

SEQ ID NO: 136106 - RNA, 22 nt, Human
uggcucagagcagggacucugg

SEQ ID NO: 136107 - RNA, 20 nt, Human
auuccauaguuggcacuuuu

SEQ ID NO: 136108 - RNA, 22 nt, Human
agauuucaauggauauugcaag

SEQ ID NO: 136109 - RNA, 22 nt, Human
uccuugaagcuuguaucuaaua

SEQ ID NO: 136110 - RNA, 22 nt, Human
gggcugugugcccacuucccau

SEQ ID NO: 136111 - RNA, 17 nt, Human
agguggguggaucaccu

SEQ ID NO: 136112 - RNA, 22 nt, Human
agaacagaagggaggaaggccu

SEQ ID NO: 136113 - RNA, 22 nt, Human
uaugagaaaauaaauaucuguu

SEQ ID NO: 136114 - RNA, 22 nt, Human
ucucagagugacaaugagaauu

SEQ ID NO: 136115 - RNA, 22 nt, Human
ucugcuguuuacugugugauau

SEQ ID NO: 136116 - RNA, 22 nt, Human
cuucugugcuucacaguugcca

SEQ ID NO: 136117 - RNA, 22 nt, Human
cagggugcgccacucagaugua

SEQ ID NO: 136118 - RNA, 22 nt, Human
uguggcauacacaugagguggu

SEQ ID NO: 136119 - RNA, 19 nt, Human
auagaaaggguuaaagaca

SEQ ID NO: 136120 - RNA, 22 nt, Human
uuucucuccuccaaaccaaaga

SEQ ID NO: 136121 - RNA, 22 nt, Human
gggcagugguccaggcuacagc

SEQ ID NO: 136122 - RNA, 22 nt, Human
cccagcaggucggugcugccug

SEQ ID NO: 136123 - RNA, 22 nt, Human
ugcuguguuaaauacaagcaug

SEQ ID NO: 136124 - RNA, 22 nt, Human
ccugagagcagcuuccugcuua

SEQ ID NO: 136125 - RNA, 22 nt, Human
caaauguauaaauguacuuucu

SEQ ID NO: 136126 - RNA, 22 nt, Human
ugcuguguggaugugaagaauc

SEQ ID NO: 136127 - RNA, 22 nt, Human
agagccaggcggcugggcaccu

SEQ ID NO: 136128 - RNA, 22 nt, Human
gucccugcaucaccacgggacu

SEQ ID NO: 136129 - RNA, 22 nt, Human
cccuggcaugcaugucccuggc

SEQ ID NO: 136130 - RNA, 22 nt, Human
uguggaaaauuggaacguuccu

SEQ ID NO: 136131 - RNA, 22 nt, Human
guggagaccuccuaggaugugu

SEQ ID NO: 136132 - RNA, 22 nt, Human
ggggugggguuacucauugugc

SEQ ID NO: 136133 - RNA, 22 nt, Human
uucugcuguaguugcaucuguu

SEQ ID NO: 136134 - RNA, 22 nt, Human
ugggcagaaaucaguaucagau

SEQ ID NO: 136135 - RNA, 22 nt, Human
ucuuuacaucacaauuguaugg

SEQ ID NO: 136136 - RNA, 22 nt, Human
cugucucugucuuaacucccag

SEQ ID NO: 136137 - RNA, 22 nt, Human
ccacaaguuucagcacccagag

SEQ ID NO: 136138 - RNA, 20 nt, Human
aggagccauugacugcagca

SEQ ID NO: 136139 - RNA, 22 nt, Human
uccuucagucuucugagccaua

SEQ ID NO: 136140 - RNA, 22 nt, Human
ugggggucaggaugaggccuug

SEQ ID NO: 136141 - RNA, 22 nt, Human
augcuauacucaaagaaauuca

SEQ ID NO: 136142 - RNA, 22 nt, Human
uagaaacacagaucugguguca

SEQ ID NO: 136143 - RNA, 22 nt, Human
gcaggagugacauggaugugga

SEQ ID NO: 136144 - RNA, 22 nt, Human
uaagaagcuucugcuaaugccu

SEQ ID NO: 136145 - RNA, 22 nt, Human
cuguggcuucagcauucagagc

SEQ ID NO: 136146 - RNA, 22 nt, Human
uucucuuuugugaugugagaug

SEQ ID NO: 136147 - RNA, 20 nt, Human
uaugaagauaugugaacagc

SEQ ID NO: 136148 - RNA, 22 nt, Human
uguaugcaccauuguauuaccu

SEQ ID NO: 136149 - RNA, 22 nt, Human
ugcagaggaccauuguccugga

SEQ ID NO: 136150 - RNA, 22 nt, Human
ucugugaacaucacauugacag

SEQ ID NO: 136151 - RNA, 22 nt, Human
cagagcuggagcuugaauggag

SEQ ID NO: 136152 - RNA, 22 nt, Human
ucuguguguugucaggaggauu

SEQ ID NO: 136153 - RNA, 22 nt, Human
aucagcaaaaaugccuucagaa

SEQ ID NO: 136154 - RNA, 22 nt, Human
gcaggagcugcucuccugacga

SEQ ID NO: 136155 - RNA, 22 nt, Human
ccuuuccuuuuuagugugggag

SEQ ID NO: 136156 - RNA, 22 nt, Human
ccagggcuggguuugucggugu

SEQ ID NO: 136157 - RNA, 22 nt, Human
caggggaagaugccaagggaga

SEQ ID NO: 136158 - RNA, 22 nt, Human
ccugcagaccacacucaguccu

SEQ ID NO: 136159 - RNA, 22 nt, Human
ucugucccugagagcucaggag

SEQ ID NO: 136160 - RNA, 22 nt, Human
cuuacauugugugcaugagggg

SEQ ID NO: 136161 - RNA, 22 nt, Human
uccuggagcuuccuucauggua

SEQ ID NO: 136162 - RNA, 22 nt, Human
ugcuugggaauguggagucaga

SEQ ID NO: 136163 - RNA, 22 nt, Human
acccacgaagaugagcggcaug

SEQ ID NO: 136164 - RNA, 22 nt, Human
cuguuuucaaagagagagaaug

SEQ ID NO: 136165 - RNA, 22 nt, Human
ugauuuccaugaagcugaaggc

SEQ ID NO: 136166 - RNA, 22 nt, Human
auccaaaccuggacaugagugg

SEQ ID NO: 136167 - RNA, 22 nt, Human
ccugagagcauuccacacugaa

SEQ ID NO: 136168 - RNA, 22 nt, Human
aucaggauccaccuugagccug

SEQ ID NO: 136169 - RNA, 22 nt, Human
ugcucucucaggccuggcccac

SEQ ID NO: 136170 - RNA, 22 nt, Human
aggaccagccuccaggucucuu

SEQ ID NO: 136171 - RNA, 22 nt, Human
uauugaaauccauuacguucuu

SEQ ID NO: 136172 - RNA, 22 nt, Human
uuugcacuagcauuuguccaug

SEQ ID NO: 136173 - RNA, 20 nt, Human
uugauaggcagcuugucagg

SEQ ID NO: 136174 - RNA, 22 nt, Human
ucacugcaaggaggcuucucaa

SEQ ID NO: 136175 - RNA, 20 nt, Human
agaggcuuccuugggaggag

SEQ ID NO: 136176 - RNA, 22 nt, Human
ggagacagugacuuagagacug

SEQ ID NO: 136177 - RNA, 20 nt, Human
uccagcugggaacagcugau

SEQ ID NO: 136178 - RNA, 22 nt, Human
uucuguguggguagcuccuguu

SEQ ID NO: 136179 - RNA, 22 nt, Human
uuguuuucuccacugcaucuua

SEQ ID NO: 136180 - RNA, 22 nt, Human
guccucagucaguuuggugggg

SEQ ID NO: 136181 - RNA, 22 nt, Human
caggcacucauucagagaggug

SEQ ID NO: 136182 - RNA, 22 nt, Human
cagcugccugucuggaggcaau

SEQ ID NO: 136183 - RNA, 22 nt, Human
uggcugaguaaguugugauaug

SEQ ID NO: 136184 - RNA, 22 nt, Human
ugcugguggagaaaguggaggu

SEQ ID NO: 136185 - RNA, 22 nt, Human
aguuuuuccguggcuacgauaa

SEQ ID NO: 136186 - RNA, 22 nt, Human
auuaaauuggacgcugggggaa

SEQ ID NO: 136187 - RNA, 22 nt, Human
ggccugugucugugccuguccu

SEQ ID NO: 136188 - RNA, 22 nt, Human
aagaguuaagcaacagauacca

SEQ ID NO: 136189 - RNA, 22 nt, Human
cugggcagaauuuuaggauggc

SEQ ID NO: 136190 - RNA, 22 nt, Human
ccagcgcuucccaucagggagg

SEQ ID NO: 136191 - RNA, 22 nt, Human
uuuuauagcugaauaguauucc

SEQ ID NO: 136192 - RNA, 22 nt, Human
gcucccagcauugcugcugaau

SEQ ID NO: 136193 - RNA, 22 nt, Human
gcucucuguuauuaagaucuuu

SEQ ID NO: 136194 - RNA, 22 nt, Human
aagccaggggcugcuuaggaga

SEQ ID NO: 136195 - RNA, 22 nt, Human
agccugucugucuccaaagcug

SEQ ID NO: 136196 - RNA, 22 nt, Human
agguacagcaauauaagagguc

SEQ ID NO: 136197 - RNA, 22 nt, Human
ucacagacauggugagguaaca

SEQ ID NO: 136198 - RNA, 22 nt, Human
ugggcuggcugaggcauucacu

SEQ ID NO: 136199 - RNA, 22 nt, Human
agguacagaugaaagucuaguu

SEQ ID NO: 136200 - RNA, 22 nt, Human
augcagcuucaggauuaugaug

SEQ ID NO: 136201 - RNA, 22 nt, Human
guggccagcaagugcugccucu

SEQ ID NO: 136202 - RNA, 22 nt, Human
cagaaagaccugggcucaagag

SEQ ID NO: 136203 - RNA, 22 nt, Human
uagcagggaaggugugcugagc

SEQ ID NO: 136204 - RNA, 22 nt, Human
augugugugcauuucucucccu

SEQ ID NO: 136205 - RNA, 21 nt, Human
cucaaagaccaaaaguguaga

SEQ ID NO: 136206 - RNA, 19 nt, Human
augagcuggcauuucaggu

SEQ ID NO: 136207 - RNA, 22 nt, Human
uuuccucugagugagcugggag

SEQ ID NO: 136208 - RNA, 18 nt, Human
uccagagcuacuguggug

SEQ ID NO: 136209 - RNA, 22 nt, Human
uggugcugauaauggcaggauu

SEQ ID NO: 136210 - RNA, 22 nt, Human
uacaaagugagcaaccucuuuu

SEQ ID NO: 136211 - RNA, 22 nt, Human
ugugucagaaggcaauggggau

SEQ ID NO: 136212 - RNA, 23 nt, Human
aagcugccagucugaagccuggg

SEQ ID NO: 136213 - RNA, 22 nt, Human
gguggccaggccagcucuggcc

SEQ ID NO: 136214 - RNA, 22 nt, Human
caggauggagggagggcuguua

SEQ ID NO: 136215 - RNA, 22 nt, Human
uguaggauuuucaccagaccuu

SEQ ID NO: 136216 - RNA, 22 nt, Human
uggccuuggacagagcgcuccu

SEQ ID NO: 136217 - RNA, 22 nt, Human
guuuucucaucuccucaauggu

SEQ ID NO: 136218 - RNA, 22 nt, Human
ucacaguaaaagcauggaagag

SEQ ID NO: 136219 - RNA, 22 nt, Human
gugccugugccaggggugugcu

SEQ ID NO: 136220 - RNA, 22 nt, Human
ugagccuggcggaagcagcgug

SEQ ID NO: 136221 - RNA, 22 nt, Human
gcaggagccacuucagggaugc

SEQ ID NO: 136222 - RNA, 22 nt, Human
acuucuggugucauacugcauu

SEQ ID NO: 136223 - RNA, 19 nt, Human
agaggcugucaccuguagc

SEQ ID NO: 136224 - RNA, 22 nt, Human
acaagcaugggcuuugacauca

SEQ ID NO: 136225 - RNA, 22 nt, Human
agacagcaugauacaugaugcu

SEQ ID NO: 136226 - RNA, 22 nt, Human
ccuggagcuuuuccauccugga

SEQ ID NO: 136227 - RNA, 22 nt, Human
ccagcccugccucucagggccc

SEQ ID NO: 136228 - RNA, 22 nt, Human
caguggagagacuuuuacucuu

SEQ ID NO: 136229 - RNA, 22 nt, Human
guggcugcagcggcuguggaga

SEQ ID NO: 136230 - RNA, 22 nt, Human
aacagcagggggaccugcuggu

SEQ ID NO: 136231 - RNA, 22 nt, Human
ucuguccucuuugaagcugcuc

SEQ ID NO: 136232 - RNA, 22 nt, Human
cagggcaggaugcugugauuau

SEQ ID NO: 136233 - RNA, 22 nt, Human
uuccucaugggguuccuucaga

SEQ ID NO: 136234 - RNA, 19 nt, Human
aagggcugggcaccucacu

SEQ ID NO: 136235 - RNA, 22 nt, Human
uuggccuuaaccucucugugcc

SEQ ID NO: 136236 - RNA, 23 nt, Human
auucuucauuaucuucuagaaaa

SEQ ID NO: 136237 - RNA, 22 nt, Human
cuccaggccauggcugcggagg

SEQ ID NO: 136238 - RNA, 22 nt, Human
cacucugagaaguacaagcucc

SEQ ID NO: 136239 - RNA, 22 nt, Human
ccaaggcuccucagcuggucuu

SEQ ID NO: 136240 - RNA, 22 nt, Human
ucccagaggcaguugguaacuu

SEQ ID NO: 136241 - RNA, 22 nt, Human
gacacagagauaggccuguguu

SEQ ID NO: 136242 - RNA, 22 nt, Human
uggccuggggaccugugagacc

SEQ ID NO: 136243 - RNA, 22 nt, Human
uccauuuuguagguaugcuaca

SEQ ID NO: 136244 - RNA, 19 nt, Human
cagcaauaaugccagaugg

SEQ ID NO: 136245 - RNA, 22 nt, Human
gcaagcuggcuguuagaggaug

SEQ ID NO: 136246 - RNA, 22 nt, Human
cagaggaggccaccgcauaggc

SEQ ID NO: 136247 - RNA, 22 nt, Human
auuucuuuucaagagggugcuu

SEQ ID NO: 136248 - RNA, 22 nt, Human
aggcacugcagauuacaggcgc

SEQ ID NO: 136249 - RNA, 22 nt, Human
gcucuccaaacccuguggcuuu

SEQ ID NO: 136250 - RNA, 22 nt, Human
gcugccuuuuaaagccucgcuu

SEQ ID NO: 136251 - RNA, 22 nt, Human
augaagucuagcaagcauugaa

SEQ ID NO: 136252 - RNA, 22 nt, Human
ugagccugcugucgcuggaccc

SEQ ID NO: 136253 - RNA, 21 nt, Human
acagacagggccagugucccc

SEQ ID NO: 136254 - RNA, 23 nt, Human
ccacagagcugccaauuccugug

SEQ ID NO: 136255 - RNA, 22 nt, Human
cucaggaugcaauuccaucaag

SEQ ID NO: 136256 - RNA, 19 nt, Human
uccuccuuacuuccucuug

SEQ ID NO: 136257 - RNA, 19 nt, Human
auuccucaaggacagaaau

SEQ ID NO: 136258 - RNA, 22 nt, Human
agagccugcuguguaagucaca

SEQ ID NO: 136259 - RNA, 21 nt, Human
agcagaacagucgagcacugc

SEQ ID NO: 136260 - RNA, 22 nt, Human
ucuucuacuauaauaauuuucu

SEQ ID NO: 136261 - RNA, 22 nt, Human
gaggccugguagccgagcccca

SEQ ID NO: 136262 - RNA, 22 nt, Human
uauaauccauucauugauuucu

SEQ ID NO: 136263 - RNA, 22 nt, Human
agccuggccacucagggccuga

SEQ ID NO: 136264 - RNA, 22 nt, Human
cugagguggaacagaggugaag

SEQ ID NO: 136265 - RNA, 22 nt, Human
uucaggaugacaccauguccag

SEQ ID NO: 136266 - RNA, 20 nt, Human
ugggcagcacugcuggcugg

SEQ ID NO: 136267 - RNA, 22 nt, Human
agccuggaagaaccugaagucu

SEQ ID NO: 136268 - RNA, 22 nt, Human
ucucagggcagcaaggaagcau

SEQ ID NO: 136269 - RNA, 22 nt, Human
ucucuggccgagagucccuggg

SEQ ID NO: 136270 - RNA, 21 nt, Human
auggagccuaagaguggaggu

SEQ ID NO: 136271 - RNA, 22 nt, Human
cacuggggaaaacaggcuucuu

SEQ ID NO: 136272 - RNA, 19 nt, Human
ugucucugaaagaugagcu

SEQ ID NO: 136273 - RNA, 20 nt, Human
agcccuguuuccuggagaga

SEQ ID NO: 136274 - RNA, 22 nt, Human
ccagcugguguuccuuaggacc

SEQ ID NO: 136275 - RNA, 22 nt, Human
aauaugcauguauacaugugua

SEQ ID NO: 136276 - RNA, 22 nt, Human
ucccaagugucuuggaccaggg

SEQ ID NO: 136277 - RNA, 22 nt, Human
ugugugcuuauagucuaguagu

SEQ ID NO: 136278 - RNA, 22 nt, Human
uagccgcuuaauuauuugguga

SEQ ID NO: 136279 - RNA, 20 nt, Human
ugcucugucuaaaacuuccc

SEQ ID NO: 136280 - RNA, 18 nt, Human
aaaugcuaggcuacauga

SEQ ID NO: 136281 - RNA, 22 nt, Human
cagaggcuguguaggcagacug

SEQ ID NO: 136282 - RNA, 22 nt, Human
ucaaagucauggcaggcucaga

SEQ ID NO: 136283 - RNA, 22 nt, Human
ucuucuuuggaugaaagaauau

SEQ ID NO: 136284 - RNA, 22 nt, Human
uuccuguccgcaauggccuggg

SEQ ID NO: 136285 - RNA, 22 nt, Human
auaaagauuucuuuuucucuac

SEQ ID NO: 136286 - RNA, 23 nt, Human
cugcagucgccggccugggugcc

SEQ ID NO: 136287 - RNA, 22 nt, Human
acccugggcuuggccugcucag

SEQ ID NO: 136288 - RNA, 22 nt, Human
ccagcaugagacgaugaugaag

SEQ ID NO: 136289 - RNA, 19 nt, Human
ccugugugggguagagauc

SEQ ID NO: 136290 - RNA, 22 nt, Human
caggauauaucucuaguguugg

SEQ ID NO: 136291 - RNA, 22 nt, Human
agauggggcucaguguggaggc

SEQ ID NO: 136292 - RNA, 22 nt, Human
acuucaugcagaagagagcugu

SEQ ID NO: 136293 - RNA, 22 nt, Human
ucaggaugagcucauaacuaug

SEQ ID NO: 136294 - RNA, 21 nt, Human
ucugucucuccacugcccugc

SEQ ID NO: 136295 - RNA, 21 nt, Human
agggagcuauuuauaguaagc

SEQ ID NO: 136296 - RNA, 22 nt, Human
uucaagauaauaggaaugaaaa

SEQ ID NO: 136297 - RNA, 23 nt, Human
aguggcuggacagacuuuccugg

SEQ ID NO: 136298 - RNA, 22 nt, Human
auuuguaauuucuuaucugugu

SEQ ID NO: 136299 - RNA, 22 nt, Human
caguaaaugugauuuuucuugu

SEQ ID NO: 136300 - RNA, 23 nt, Human
gagugcagaauagacaugcagug

SEQ ID NO: 136301 - RNA, 22 nt, Human
uuucacauuuuauacuuaagcc

SEQ ID NO: 136302 - RNA, 22 nt, Human
agaaugcuccagagcugaaaga

SEQ ID NO: 136303 - RNA, 22 nt, Human
gccucugcaacuccgccuuggu

SEQ ID NO: 136304 - RNA, 22 nt, Human
agcucugggccaggaacccuaa

SEQ ID NO: 136305 - RNA, 19 nt, Human
auuuacugccuaaaaucuc

SEQ ID NO: 136306 - RNA, 22 nt, Human
ccuggcugcauuuugcuggaug

SEQ ID NO: 136307 - RNA, 22 nt, Human
agaagccauguuuaguaggaug

SEQ ID NO: 136308 - RNA, 22 nt, Human
ccacugucuuuuccaggcugaa

SEQ ID NO: 136309 - RNA, 22 nt, Human
aucagugcuaaagcaaaugccc

SEQ ID NO: 136310 - RNA, 22 nt, Human
uucuuuccccauggaguucgga

SEQ ID NO: 136311 - RNA, 22 nt, Human
uccagggaugccagccauguug

SEQ ID NO: 136312 - RNA, 22 nt, Human
ggucaggggcugcucuacagag

SEQ ID NO: 136313 - RNA, 22 nt, Human
uugaaaggugaacaugaugcac

SEQ ID NO: 136314 - RNA, 22 nt, Human
auucuagaugcuguaaguagca

SEQ ID NO: 136315 - RNA, 22 nt, Human
aacauacagugagcaguggacu

SEQ ID NO: 136316 - RNA, 22 nt, Human
agauguuccagccaaugggaau

SEQ ID NO: 136317 - RNA, 22 nt, Human
agagacaggguuuugucguguu

SEQ ID NO: 136318 - RNA, 22 nt, Human
ucuuuaucaagucuguucuuug

SEQ ID NO: 136319 - RNA, 22 nt, Human
auaagagcuagucuuuuccuug

SEQ ID NO: 136320 - RNA, 22 nt, Human
gggccacauugaagggugggua

SEQ ID NO: 136321 - RNA, 22 nt, Human
ucuuugcaacucccauuuccau

SEQ ID NO: 136322 - RNA, 22 nt, Human
aagauuucuuacuuauugaugc

SEQ ID NO: 136323 - RNA, 22 nt, Human
uaugcauaugaccccaagcuug

SEQ ID NO: 136324 - RNA, 22 nt, Human
gacaucauagggugggaggaaa

SEQ ID NO: 136325 - RNA, 22 nt, Human
auacacauauguguguauaugu

SEQ ID NO: 136326 - RNA, 22 nt, Human
uaccugagcccagugcagcaua

SEQ ID NO: 136327 - RNA, 22 nt, Human
gagggauggugugagaggcuca

SEQ ID NO: 136328 - RNA, 22 nt, Human
uuuucuguaagaggacuuuaau

SEQ ID NO: 136329 - RNA, 20 nt, Human
ggcagagcuaugucuguugc

SEQ ID NO: 136330 - RNA, 22 nt, Human
gccuggagcccaguguggggcu

SEQ ID NO: 136331 - RNA, 22 nt, Human
auacauacauguaugcacauac

SEQ ID NO: 136332 - RNA, 22 nt, Human
aaggagucucagcugggccuga

SEQ ID NO: 136333 - RNA, 22 nt, Human
uucuuauuaugugcucugugaa

SEQ ID NO: 136334 - RNA, 22 nt, Human
caagagcuuuagaaaugcucau

SEQ ID NO: 136335 - RNA, 22 nt, Human
gcagcuggcccugacacgcaga

SEQ ID NO: 136336 - RNA, 22 nt, Human
aggcuccaugcaaaggcuguuu

SEQ ID NO: 136337 - RNA, 22 nt, Human
uucucuuucugcugggcuggaa

SEQ ID NO: 136338 - RNA, 22 nt, Human
uagagcuggaaaacugcaggua

SEQ ID NO: 136339 - RNA, 22 nt, Human
gagccugaauuugaccugcuua

SEQ ID NO: 136340 - RNA, 22 nt, Human
ugcauuaucuuuaauguucuca

SEQ ID NO: 136341 - RNA, 22 nt, Human
ggccuugggaggagggucagaa

SEQ ID NO: 136342 - RNA, 22 nt, Human
ucacugcugcugccaugaugga

SEQ ID NO: 136343 - RNA, 22 nt, Human
cuuaacagagagaaguguugcu

SEQ ID NO: 136344 - RNA, 18 nt, Human
cggcagagugcuucuagc

SEQ ID NO: 136345 - RNA, 22 nt, Human
uacacacaugcauuugccuuau

SEQ ID NO: 136346 - RNA, 22 nt, Human
guaucuuuugguggaaaaauaa

SEQ ID NO: 136347 - RNA, 18 nt, Human
aggcacagagcauacaua

SEQ ID NO: 136348 - RNA, 22 nt, Human
uuacacuuggguguggauuuua

SEQ ID NO: 136349 - RNA, 22 nt, Human
agggauggaagcucgucugcaa

SEQ ID NO: 136350 - RNA, 23 nt, Human
ucaugcccaggcuccagauguca

SEQ ID NO: 136351 - RNA, 22 nt, Human
cacccagccuucacacaggagu

SEQ ID NO: 136352 - RNA, 22 nt, Human
ugaaggaagaauaggcaguguu

SEQ ID NO: 136353 - RNA, 22 nt, Human
gaauacaugauacaugaacugc

SEQ ID NO: 136354 - RNA, 22 nt, Human
auuuuuaugacaaaccauccuc

SEQ ID NO: 136355 - RNA, 22 nt, Human
ucagcugagcuccagcucauag

SEQ ID NO: 136356 - RNA, 22 nt, Human
caaggccacuccagagacuggu

SEQ ID NO: 136357 - RNA, 22 nt, Human
aggcugggaagguaaaguugua

SEQ ID NO: 136358 - RNA, 22 nt, Human
cugucuguacaaauguggggcc

SEQ ID NO: 136359 - RNA, 22 nt, Human
gugugccucccauuagggugua

SEQ ID NO: 136360 - RNA, 22 nt, Human
auucuguauggaaaagcacuau

SEQ ID NO: 136361 - RNA, 22 nt, Human
aaggcagcagugcacgacugau

SEQ ID NO: 136362 - RNA, 22 nt, Human
aggaagccaugguggacgucua

SEQ ID NO: 136363 - RNA, 22 nt, Human
uguggcuuaagaaugccuuuaa

SEQ ID NO: 136364 - RNA, 22 nt, Human
cacagguguaugaauaugucca

SEQ ID NO: 136365 - RNA, 22 nt, Human
ggauguugauugaauggccauu

SEQ ID NO: 136366 - RNA, 22 nt, Human
gcaggguccauggaggcagccc

SEQ ID NO: 136367 - RNA, 23 nt, Human
gucagggcuggggucagagugac

SEQ ID NO: 136368 - RNA, 22 nt, Human
gugauugcccagcaccauuguu

SEQ ID NO: 136369 - RNA, 22 nt, Human
gggaucagaaacauagcccuga

SEQ ID NO: 136370 - RNA, 22 nt, Human
ggcccagcacagugcuuggggg

SEQ ID NO: 136371 - RNA, 22 nt, Human
gaacagaagaggcuggugccac

SEQ ID NO: 136372 - RNA, 22 nt, Human
aauguacaauaagacaaagagg

SEQ ID NO: 136373 - RNA, 22 nt, Human
uggguagagacacagucugggg

SEQ ID NO: 136374 - RNA, 22 nt, Human
uguuugaacugaauaacauagu

SEQ ID NO: 136375 - RNA, 22 nt, Human
gccucccuggcccacagcagcg

SEQ ID NO: 136376 - RNA, 22 nt, Human
gcaaaaaaugcuuguugcuuag

SEQ ID NO: 136377 - RNA, 18 nt, Human
uguguaugucucagggaa

SEQ ID NO: 136378 - RNA, 20 nt, Human
caguagcaauaauuagaagc

SEQ ID NO: 136379 - RNA, 22 nt, Human
gagccuggccuccugccucagc

SEQ ID NO: 136380 - RNA, 22 nt, Human
cuguggcucuccaauggaggga

SEQ ID NO: 136381 - RNA, 22 nt, Human
ucugucuccucugaggugccag

SEQ ID NO: 136382 - RNA, 18 nt, Human
aaggcuucaaagaguaga

SEQ ID NO: 136383 - RNA, 22 nt, Human
cucccucugucuuguccagaaa

SEQ ID NO: 136384 - RNA, 22 nt, Human
uucaggaucacuaaacccucca

SEQ ID NO: 136385 - RNA, 22 nt, Human
ccaggguggcguagaugcuggg

SEQ ID NO: 136386 - RNA, 22 nt, Human
uuguuauaaagacuaaauaugu

SEQ ID NO: 136387 - RNA, 22 nt, Human
ccacccugagccgcaagagcag

SEQ ID NO: 136388 - RNA, 22 nt, Human
ucugggugccacugucuguaca

SEQ ID NO: 136389 - RNA, 22 nt, Human
agggcagagauuaauuaagaca

SEQ ID NO: 136390 - RNA, 22 nt, Human
uauuugaaaguguacaaaaacu

SEQ ID NO: 136391 - RNA, 22 nt, Human
gcugucugggaugucacugcug

SEQ ID NO: 136392 - RNA, 22 nt, Human
gaaggagagagacaucgucccu

SEQ ID NO: 136393 - RNA, 22 nt, Human
uaguauaugucuaugguuguag

SEQ ID NO: 136394 - RNA, 22 nt, Human
aaugcauauguaggcaagcagu

SEQ ID NO: 136395 - RNA, 22 nt, Human
aggacaggauugagcugaacug

SEQ ID NO: 136396 - RNA, 22 nt, Human
ccaggaguuggagguugcagug

SEQ ID NO: 136397 - RNA, 21 nt, Human
accagcaggagaucagaagga

SEQ ID NO: 136398 - RNA, 22 nt, Human
gcugcccucccagggcaagcuu

SEQ ID NO: 136399 - RNA, 22 nt, Human
ggggaugguagaccggugacgu

SEQ ID NO: 136400 - RNA, 22 nt, Human
ucaucacuguaucauugauaga

SEQ ID NO: 136401 - RNA, 22 nt, Human
uucaagaugcacaguggcauuc

SEQ ID NO: 136402 - RNA, 22 nt, Human
uuccaggaauucagcucucagu

SEQ ID NO: 136403 - RNA, 22 nt, Human
cagaggccccagaacuagcucu

SEQ ID NO: 136404 - RNA, 22 nt, Human
ucugugcucuucucaguaucac

SEQ ID NO: 136405 - RNA, 22 nt, Human
aguuuucugaccccugcucuau

SEQ ID NO: 136406 - RNA, 22 nt, Human
ugucccagcacuuugggagucu

SEQ ID NO: 136407 - RNA, 22 nt, Human
ccacuguuuuucaguuaacuuu

SEQ ID NO: 136408 - RNA, 22 nt, Human
gccugucugcagggcugucauu

SEQ ID NO: 136409 - RNA, 21 nt, Human
agcagcugggcaacauggagg

SEQ ID NO: 136410 - RNA, 18 nt, Human
auggucucauacugggag

SEQ ID NO: 136411 - RNA, 22 nt, Human
ugucucugcuuuccuugcaggg

SEQ ID NO: 136412 - RNA, 22 nt, Human
gugucccaggagaggagacaau

SEQ ID NO: 136413 - RNA, 20 nt, Human
gucugaggagcagugggaaa

SEQ ID NO: 136414 - RNA, 22 nt, Human
cagcaggauuggauacaucuca

SEQ ID NO: 136415 - RNA, 22 nt, Human
ugaacagauggcccagcagagg

SEQ ID NO: 136416 - RNA, 22 nt, Human
aaaguuugcaauuuauguuaau

SEQ ID NO: 136417 - RNA, 22 nt, Human
ggccaugguuggggaagacaug

SEQ ID NO: 136418 - RNA, 22 nt, Human
ugggccuggguuccuccugggc

SEQ ID NO: 136419 - RNA, 22 nt, Human
gaagccaacauuccaaguagaa

SEQ ID NO: 136420 - RNA, 22 nt, Human
gcccauggcagaacugugagca

SEQ ID NO: 136421 - RNA, 22 nt, Human
auggcuguguuguuccucugaa

SEQ ID NO: 136422 - RNA, 22 nt, Human
cauuucugcagaauugcucuuc

SEQ ID NO: 136423 - RNA, 22 nt, Human
ucuugacauucaaucauguaua

SEQ ID NO: 136424 - RNA, 22 nt, Human
aauuuccagaucagaugacuca

SEQ ID NO: 136425 - RNA, 21 nt, Human
ccaggcagagcugugaguucu

SEQ ID NO: 136426 - RNA, 22 nt, Human
ucuggcucauaggaaggccauu

SEQ ID NO: 136427 - RNA, 21 nt, Human
ggcagaaguagcauggacggg

SEQ ID NO: 136428 - RNA, 22 nt, Human
uacuuuuuaugauaagaacuga

SEQ ID NO: 136429 - RNA, 22 nt, Human
caguacuuguccucagguguua

SEQ ID NO: 136430 - RNA, 22 nt, Human
guguuguggagcuugucagggg

SEQ ID NO: 136431 - RNA, 22 nt, Human
ucucagagauucagggagaagu

SEQ ID NO: 136432 - RNA, 22 nt, Human
guccacauaggaacccagcuuc

SEQ ID NO: 136433 - RNA, 22 nt, Human
uggccugggcaugaagcaucgu

SEQ ID NO: 136434 - RNA, 22 nt, Human
cugccagcaaugugaccaugcu

SEQ ID NO: 136435 - RNA, 22 nt, Human
gccagccugugggggcucugug

SEQ ID NO: 136436 - RNA, 22 nt, Human
gaggcagaaguugcagugagca

SEQ ID NO: 136437 - RNA, 22 nt, Human
uucaggauaugugauaucugaa

SEQ ID NO: 136438 - RNA, 22 nt, Human
aauuucucaauuguuacaggug

SEQ ID NO: 136439 - RNA, 20 nt, Human
agucccagaucaaauuucug

SEQ ID NO: 136440 - RNA, 22 nt, Human
cccauuuagauaacaguucaaa

SEQ ID NO: 136441 - RNA, 22 nt, Human
uuucaaagaccauuaacuauca

SEQ ID NO: 136442 - RNA, 22 nt, Human
aauaucaguauauuguaucagu

SEQ ID NO: 136443 - RNA, 22 nt, Human
uacaaaugaguuguaugaacca

SEQ ID NO: 136444 - RNA, 22 nt, Human
augcaguacugauacaugccac

SEQ ID NO: 136445 - RNA, 22 nt, Human
uggcugggagcuggaacugggc

SEQ ID NO: 136446 - RNA, 21 nt, Human
uucuucaguuuaauauaaaau

SEQ ID NO: 136447 - RNA, 22 nt, Human
gcacagggcugccaggcggcuu

SEQ ID NO: 136448 - RNA, 22 nt, Human
ugcuggcuggccuggccuggac

SEQ ID NO: 136449 - RNA, 22 nt, Human
ugcuuccuugagcucuccaauc

SEQ ID NO: 136450 - RNA, 22 nt, Human
uucuuacagcccuauuacuaaa

SEQ ID NO: 136451 - RNA, 22 nt, Human
ggcuccuguggcaagacagcuu

SEQ ID NO: 136452 - RNA, 22 nt, Human
ugccuucaaucaggauggucuc

SEQ ID NO: 136453 - RNA, 22 nt, Human
agaugaaaagauaagcagcaau

SEQ ID NO: 136454 - RNA, 22 nt, Human
uucauguauuuaucauguaaau

SEQ ID NO: 136455 - RNA, 22 nt, Human
uuagccauuaauguccugugca

SEQ ID NO: 136456 - RNA, 22 nt, Human
cuggugcuggagccuagucccu

SEQ ID NO: 136457 - RNA, 19 nt, Human
ggugaccaccuggucagug

SEQ ID NO: 136458 - RNA, 22 nt, Human
cuccuuccugguuagcaccuua

SEQ ID NO: 136459 - RNA, 22 nt, Human
auucuaggcuugaaacaugaag

SEQ ID NO: 136460 - RNA, 22 nt, Human
aucaaaguaggcauauguuuuu

SEQ ID NO: 136461 - RNA, 22 nt, Human
cuuccuucugaagcauagaagc

SEQ ID NO: 136462 - RNA, 21 nt, Human
uggccucccacacuuccaugg

SEQ ID NO: 136463 - RNA, 22 nt, Human
cacauuuaaagguugaagcuga

SEQ ID NO: 136464 - RNA, 22 nt, Human
caaugguggugucagaagagau

SEQ ID NO: 136465 - RNA, 22 nt, Human
uucagaaagugaaucuuguuau

SEQ ID NO: 136466 - RNA, 22 nt, Human
acauguguauagccuguauaga

SEQ ID NO: 136467 - RNA, 22 nt, Human
gaggcccuccagcugucagcug

SEQ ID NO: 136468 - RNA, 22 nt, Human
aaugauguauuaguacaacaca

SEQ ID NO: 136469 - RNA, 22 nt, Human
cugugcuuaccugcccagguga

SEQ ID NO: 136470 - RNA, 22 nt, Human
aagaugauagaucugucaaugu

SEQ ID NO: 136471 - RNA, 22 nt, Human
uguuacagaaauauugcuucuu

SEQ ID NO: 136472 - RNA, 22 nt, Human
uucaaugagcccggggccauag

SEQ ID NO: 136473 - RNA, 21 nt, Human
ggagcugcaggagccgaaggc

SEQ ID NO: 136474 - RNA, 22 nt, Human
ucuuuacacaagacaagaauaa

SEQ ID NO: 136475 - RNA, 22 nt, Human
ccaggccucuggcugcuuaguc

SEQ ID NO: 136476 - RNA, 22 nt, Human
ucaguguguaauucuuuguuuc

SEQ ID NO: 136477 - RNA, 17 nt, Human
agcagaagucagaggga

SEQ ID NO: 136478 - RNA, 18 nt, Human
cccagcuccacuucccuc

SEQ ID NO: 136479 - RNA, 22 nt, Human
uuuacaauagggucugaaugaa

SEQ ID NO: 136480 - RNA, 22 nt, Human
ccacagggucagccacucugca

SEQ ID NO: 136481 - RNA, 22 nt, Human
ugcaggccucacaccuggcacc

SEQ ID NO: 136482 - RNA, 22 nt, Human
caggagugagaugcgaucacuu

SEQ ID NO: 136483 - RNA, 20 nt, Human
caggaggcaaggucaagguc

SEQ ID NO: 136484 - RNA, 21 nt, Human
gcagcuggucucagagcuugc

SEQ ID NO: 136485 - RNA, 22 nt, Human
cuauuucugccuaaugaccugu

SEQ ID NO: 136486 - RNA, 22 nt, Human
cacacaggagagugcuggaggu

SEQ ID NO: 136487 - RNA, 22 nt, Human
auguagcagauauuugugcaca

SEQ ID NO: 136488 - RNA, 22 nt, Human
agcugggucuugggccaggaga

SEQ ID NO: 136489 - RNA, 22 nt, Human
uguacauacauagauauacaca

SEQ ID NO: 136490 - RNA, 19 nt, Human
acuguguggaagugugauu

SEQ ID NO: 136491 - RNA, 22 nt, Human
uuacauuagacccacuuucaug

SEQ ID NO: 136492 - RNA, 22 nt, Human
acuuaaaaagaaucuuuucacg

SEQ ID NO: 136493 - RNA, 22 nt, Human
acugaaggguaaugugggagcc

SEQ ID NO: 136494 - RNA, 22 nt, Human
ggugcagaaggaagggagcugg

SEQ ID NO: 136495 - RNA, 22 nt, Human
ucaugcaaggcugaaacauggu

SEQ ID NO: 136496 - RNA, 22 nt, Human
aacauuuaugguagucauugca

SEQ ID NO: 136497 - RNA, 22 nt, Human
uuuauauugggagucguuuuga

SEQ ID NO: 136498 - RNA, 22 nt, Human
uuaacagagaacauagaaguag

SEQ ID NO: 136499 - RNA, 22 nt, Human
accauccugaaaccuucaugcu

SEQ ID NO: 136500 - RNA, 22 nt, Human
uugugucugggggagugacauc

SEQ ID NO: 136501 - RNA, 22 nt, Human
cuguccauuuucgugccuccuu

SEQ ID NO: 136502 - RNA, 22 nt, Human
ggcuccagggaguggagagaag

SEQ ID NO: 136503 - RNA, 22 nt, Human
gugcccugguccccagcauaua

SEQ ID NO: 136504 - RNA, 22 nt, Human
uggagcagagaugggagcccaa

SEQ ID NO: 136505 - RNA, 22 nt, Human
ugagccaguggaagauggcagu

SEQ ID NO: 136506 - RNA, 22 nt, Human
gccaguuccuguggagucagag

SEQ ID NO: 136507 - RNA, 22 nt, Human
uucucugcucucacauacagaa

SEQ ID NO: 136508 - RNA, 22 nt, Human
cagggccuucguaaguguccgg

SEQ ID NO: 136509 - RNA, 20 nt, Human
ggcagcucacuacuuucugu

SEQ ID NO: 136510 - RNA, 22 nt, Human
aaaaguaauugaugcaaucgua

SEQ ID NO: 136511 - RNA, 22 nt, Human
ucuuucuucuuucauaguguga

SEQ ID NO: 136512 - RNA, 22 nt, Human
uuuuaguuuggauuucuaaagc

SEQ ID NO: 136513 - RNA, 19 nt, Human
agucccaggcccgaaagag

SEQ ID NO: 136514 - RNA, 22 nt, Human
cuaacuuuauuugcuaaguaga

SEQ ID NO: 136515 - RNA, 22 nt, Human
gccaccucggcuuucucugcuc

SEQ ID NO: 136516 - RNA, 22 nt, Human
caggaugggugucggccagcac

SEQ ID NO: 136517 - RNA, 22 nt, Human
acuuuggaucugauguaaucag

SEQ ID NO: 136518 - RNA, 22 nt, Human
gguggggcccuggcacugguau

SEQ ID NO: 136519 - RNA, 22 nt, Human
ugagggcugcuuccagagcuag

SEQ ID NO: 136520 - RNA, 23 nt, Human
uccucccaaauuucagccucauu

SEQ ID NO: 136521 - RNA, 22 nt, Human
uucauugugaacacauucugcc

SEQ ID NO: 136522 - RNA, 22 nt, Human
ccucucaucauuaucgcuuugu

SEQ ID NO: 136523 - RNA, 22 nt, Human
ugcuguguucuccugacucacc

SEQ ID NO: 136524 - RNA, 22 nt, Human
gccacaugcaauugcagcacgu

SEQ ID NO: 136525 - RNA, 22 nt, Human
ggcucaggccuguaauccuagc

SEQ ID NO: 136526 - RNA, 22 nt, Human
cagagcugagaauguugaugcu

SEQ ID NO: 136527 - RNA, 22 nt, Human
ccuggccucuccgaguaaccug

SEQ ID NO: 136528 - RNA, 22 nt, Human
uucaaaacagcuagauauugga

SEQ ID NO: 136529 - RNA, 22 nt, Human
ggucaggguauaaucaagugag

SEQ ID NO: 136530 - RNA, 22 nt, Human
ccuuucucuuggauaccgauug

SEQ ID NO: 136531 - RNA, 22 nt, Human
cuggcuguuucaggcagugucc

SEQ ID NO: 136532 - RNA, 22 nt, Human
agaggcuguuacacucccagau

SEQ ID NO: 136533 - RNA, 21 nt, Human
gggccacaccuucugcagacc

SEQ ID NO: 136534 - RNA, 22 nt, Human
agacaaauggaguaugagcaac

SEQ ID NO: 136535 - RNA, 22 nt, Human
gagccagccuucuucugagguc

SEQ ID NO: 136536 - RNA, 22 nt, Human
auaauaacaccugaauaggaaa

SEQ ID NO: 136537 - RNA, 21 nt, Human
uucaaaaugguguguuugucu

SEQ ID NO: 136538 - RNA, 22 nt, Human
uccuucaguucaauuaguccgu

SEQ ID NO: 136539 - RNA, 22 nt, Human
uuacagauacauuucuuuuguu

SEQ ID NO: 136540 - RNA, 20 nt, Human
cucaguguggccugaguguu

SEQ ID NO: 136541 - RNA, 22 nt, Human
uguguauagguugugcuaauag

SEQ ID NO: 136542 - RNA, 22 nt, Human
gaccauuugcuaguaaauugca

SEQ ID NO: 136543 - RNA, 21 nt, Human
ccucugcucgggcaugcguuu

SEQ ID NO: 136544 - RNA, 22 nt, Human
gccagagcaugcacugccugca

SEQ ID NO: 136545 - RNA, 22 nt, Human
ccagcugcgggcaucgagaguu

SEQ ID NO: 136546 - RNA, 22 nt, Human
acagaccaaguuuccagcaggu

SEQ ID NO: 136547 - RNA, 22 nt, Human
ggcugggcuccgggagcaugcg

SEQ ID NO: 136548 - RNA, 22 nt, Human
gucccacaccuugaggggucuu

SEQ ID NO: 136549 - RNA, 22 nt, Human
ucauuguuauguuuugcugucu

SEQ ID NO: 136550 - RNA, 22 nt, Human
gcucagagauguucaguagcuu

SEQ ID NO: 136551 - RNA, 22 nt, Human
uggcagagguauauugggagga

SEQ ID NO: 136552 - RNA, 22 nt, Human
auuuauguaucuguguagauca

SEQ ID NO: 136553 - RNA, 19 nt, Human
guaagggcuaauggacuau

SEQ ID NO: 136554 - RNA, 22 nt, Human
uauguuaaauguuugauguuua

SEQ ID NO: 136555 - RNA, 22 nt, Human
ccugccugucaucgccugcgcc

SEQ ID NO: 136556 - RNA, 22 nt, Human
gaugcagaaaguagacaccauc

SEQ ID NO: 136557 - RNA, 22 nt, Human
guuugcauaucugugaaaugga

SEQ ID NO: 136558 - RNA, 22 nt, Human
acagucuacuugagcuuguaua

SEQ ID NO: 136559 - RNA, 22 nt, Human
ccuggggcucaagauggcgccg

SEQ ID NO: 136560 - RNA, 22 nt, Human
ccagcuggcacuguggcugccc

SEQ ID NO: 136561 - RNA, 22 nt, Human
aggugcuggagucugggcagga

SEQ ID NO: 136562 - RNA, 22 nt, Human
ugucaugccaccguuucccaga

SEQ ID NO: 136563 - RNA, 22 nt, Human
auacagaaaaugaugcagaguu

SEQ ID NO: 136564 - RNA, 22 nt, Human
uggcagcauguuauguaaggaa

SEQ ID NO: 136565 - RNA, 22 nt, Human
gagucaguaauggauaugucau

SEQ ID NO: 136566 - RNA, 22 nt, Human
cuucagaauccagaaucagaau

SEQ ID NO: 136567 - RNA, 22 nt, Human
agaccagcugccucccagggcc

SEQ ID NO: 136568 - RNA, 22 nt, Human
ggguccagacacuccagaggaa

SEQ ID NO: 136569 - RNA, 23 nt, Human
augugugggaggucagagagcca

SEQ ID NO: 136570 - RNA, 20 nt, Human
aggcugggguguuuugccca

SEQ ID NO: 136571 - RNA, 22 nt, Human
acuguacacgugucauuuacag

SEQ ID NO: 136572 - RNA, 18 nt, Human
cucucugggugaggacaa

SEQ ID NO: 136573 - RNA, 20 nt, Human
uacagaaacaggacuuuugg

SEQ ID NO: 136574 - RNA, 22 nt, Human
uccaagaucuacagcaguuuag

SEQ ID NO: 136575 - RNA, 22 nt, Human
ucagggacuaggugcugccuga

SEQ ID NO: 136576 - RNA, 19 nt, Human
cagagcugcuggccucguc

SEQ ID NO: 136577 - RNA, 22 nt, Human
auacaguaagugucccugaaac

SEQ ID NO: 136578 - RNA, 22 nt, Human
ugcuggcccaugaagacgcagu

SEQ ID NO: 136579 - RNA, 22 nt, Human
uuuuuccuaagcaguggagcug

SEQ ID NO: 136580 - RNA, 22 nt, Human
auuugucuucaguagguucuuc

SEQ ID NO: 136581 - RNA, 22 nt, Human
ugcugggcuugaaagcugcuaa

SEQ ID NO: 136582 - RNA, 22 nt, Human
ucuuuaagccaagauauauuua

SEQ ID NO: 136583 - RNA, 21 nt, Human
ucagaacaauuccaugccucc

SEQ ID NO: 136584 - RNA, 22 nt, Human
agauacauugaguuuccuccug

SEQ ID NO: 136585 - RNA, 22 nt, Human
auaccuuuuagacauguaguug

SEQ ID NO: 136586 - RNA, 20 nt, Human
gaaaugugaccucuucugug

SEQ ID NO: 136587 - RNA, 22 nt, Human
gcugggagcaaagccaugcaua

SEQ ID NO: 136588 - RNA, 22 nt, Human
cagcagcuacuuggagcagcag

SEQ ID NO: 136589 - RNA, 22 nt, Human
uuccuauuuccaugaaacacaa

SEQ ID NO: 136590 - RNA, 22 nt, Human
caaagguauucucauuuuggaa

SEQ ID NO: 136591 - RNA, 22 nt, Human
ucuggcucucauacucgccagu

SEQ ID NO: 136592 - RNA, 22 nt, Human
aaaaugaggucaauauccuuuu

SEQ ID NO: 136593 - RNA, 17 nt, Human
ugagacagggcaggccc

SEQ ID NO: 136594 - RNA, 22 nt, Human
uggagcugagagccaggcuggc

SEQ ID NO: 136595 - RNA, 20 nt, Human
aacuuguuuuguuuucuaau

SEQ ID NO: 136596 - RNA, 22 nt, Human
agcuuccuacaaccaucucaga

SEQ ID NO: 136597 - RNA, 22 nt, Human
ggcaaaaaguucccaucagugu

SEQ ID NO: 136598 - RNA, 22 nt, Human
aagaacaguugggaggugagcc

SEQ ID NO: 136599 - RNA, 22 nt, Human
ugagcuuacgugggaacagacu

SEQ ID NO: 136600 - RNA, 22 nt, Human
agguaacacuacuuaguauacu

SEQ ID NO: 136601 - RNA, 22 nt, Human
uuuuuccuagcgauuugucagc

SEQ ID NO: 136602 - RNA, 18 nt, Human
gcagagugcgucucugug

SEQ ID NO: 136603 - RNA, 22 nt, Human
cugaggugcuauggaggauacg

SEQ ID NO: 136604 - RNA, 22 nt, Human
gcacaugagcugcugggauggg

SEQ ID NO: 136605 - RNA, 22 nt, Human
ggagaccagaaggaagcuucga

SEQ ID NO: 136606 - RNA, 22 nt, Human
aguauuuccuggcuuaucugcu

SEQ ID NO: 136607 - RNA, 22 nt, Human
uuugaaaggugucgagaugugu

SEQ ID NO: 136608 - RNA, 21 nt, Human
uucaaaguuugccuaaagauu

SEQ ID NO: 136609 - RNA, 22 nt, Human
cagguggcuucucccuaggcca

SEQ ID NO: 136610 - RNA, 22 nt, Human
uucaacuagauuuauacaauuc

SEQ ID NO: 136611 - RNA, 22 nt, Human
auuuccaggagaaaggauuuua

SEQ ID NO: 136612 - RNA, 22 nt, Human
ucaguucuuuauuucacaguga

SEQ ID NO: 136613 - RNA, 22 nt, Human
cucuuccucucaugcggucaua

SEQ ID NO: 136614 - RNA, 22 nt, Human
ccacagaaaguugucuagagua

SEQ ID NO: 136615 - RNA, 22 nt, Human
cccagcagauggcuaugugcua

SEQ ID NO: 136616 - RNA, 22 nt, Human
ccuggcugaaccaaugaagugg

SEQ ID NO: 136617 - RNA, 23 nt, Human
ucucaagaggaagcagggcucau

SEQ ID NO: 136618 - RNA, 22 nt, Human
acauuucucauucuccccuaac

SEQ ID NO: 136619 - RNA, 22 nt, Human
uuuuauugggaguccucuacug

SEQ ID NO: 136620 - RNA, 22 nt, Human
ccugugugccuggccgcgggag

SEQ ID NO: 136621 - RNA, 22 nt, Human
uacuuccagcaaucugcauauu

SEQ ID NO: 136622 - RNA, 22 nt, Human
auaucuuuguaugguucagcag

SEQ ID NO: 136623 - RNA, 22 nt, Human
ugcagccuugccuccucccagc

SEQ ID NO: 136624 - RNA, 22 nt, Human
uccuucagggggccgccugcac

SEQ ID NO: 136625 - RNA, 22 nt, Human
uggggcucaccuaggcuggaag

SEQ ID NO: 136626 - RNA, 20 nt, Human
uguucacaguaguugcugcu

SEQ ID NO: 136627 - RNA, 17 nt, Human
acagagcacaucaagau

SEQ ID NO: 136628 - RNA, 18 nt, Human
uccugccugugccccagg

SEQ ID NO: 136629 - RNA, 22 nt, Human
agcugccugcuuaugagcucca

SEQ ID NO: 136630 - RNA, 22 nt, Human
uguggcugcaaaggaaggcugc

SEQ ID NO: 136631 - RNA, 22 nt, Human
gugugcaguagagaaagagcag

SEQ ID NO: 136632 - RNA, 22 nt, Human
gacagggcgcccagccuguuuc

SEQ ID NO: 136633 - RNA, 22 nt, Human
guuggccugaauggucaagagg

SEQ ID NO: 136634 - RNA, 22 nt, Human
agcuaggaaauugaggcugaga

SEQ ID NO: 136635 - RNA, 22 nt, Human
cccagagcuccgguccugccca

SEQ ID NO: 136636 - RNA, 22 nt, Human
cugagauggccacugggucuca

SEQ ID NO: 136637 - RNA, 22 nt, Human
gaugcugaagugaagugaucuu

SEQ ID NO: 136638 - RNA, 22 nt, Human
ggccugagcucuggggaggcaa

SEQ ID NO: 136639 - RNA, 22 nt, Human
acagaauaagguuuaucucucc

SEQ ID NO: 136640 - RNA, 22 nt, Human
gaggccuggcucugcccuccug

SEQ ID NO: 136641 - RNA, 22 nt, Human
acuuccuggcugggugaccugg

SEQ ID NO: 136642 - RNA, 22 nt, Human
cugccuuccaaccccagacucc

SEQ ID NO: 136643 - RNA, 22 nt, Human
gcacugcagccucagauggugg

SEQ ID NO: 136644 - RNA, 22 nt, Human
gucuauauauugcuugaauaau

SEQ ID NO: 136645 - RNA, 22 nt, Human
cuggcugugucuuggaggagcu

SEQ ID NO: 136646 - RNA, 22 nt, Human
ucaguuuuuaaaugauauaauu

SEQ ID NO: 136647 - RNA, 22 nt, Human
aucuuucagagcuccaucaggg

SEQ ID NO: 136648 - RNA, 22 nt, Human
gggagcuguaguccagauaccg

SEQ ID NO: 136649 - RNA, 20 nt, Human
uguugauuggugucaucuca

SEQ ID NO: 136650 - RNA, 22 nt, Human
uuucugcuaaucuuuuacugag

SEQ ID NO: 136651 - RNA, 22 nt, Human
ggucccagguugacagggagac

SEQ ID NO: 136652 - RNA, 21 nt, Human
gacaaagugaagcaggcagga

SEQ ID NO: 136653 - RNA, 22 nt, Human
uuuucagugggcaaugauguga

SEQ ID NO: 136654 - RNA, 22 nt, Human
uuuguguauguaugcuuguaca

SEQ ID NO: 136655 - RNA, 22 nt, Human
guggcugcagagccagcaagcu

SEQ ID NO: 136656 - RNA, 22 nt, Human
aaauguguuucgaaaacuggug

SEQ ID NO: 136657 - RNA, 22 nt, Human
uccugccuguuuaccuguacuu

SEQ ID NO: 136658 - RNA, 22 nt, Human
ggcuuccuaauacucccuacac

SEQ ID NO: 136659 - RNA, 22 nt, Human
ugcaggggcuugucugggccug

SEQ ID NO: 136660 - RNA, 22 nt, Human
cagagccugccaccuuucuccc

SEQ ID NO: 136661 - RNA, 22 nt, Human
guguggcuugggugaggcgccu

SEQ ID NO: 136662 - RNA, 22 nt, Human
acugccuuauaugcugugugug

SEQ ID NO: 136663 - RNA, 22 nt, Human
ugaaagggguugaguuacagcu

SEQ ID NO: 136664 - RNA, 22 nt, Human
ugagccaggcucaagugauccu

SEQ ID NO: 136665 - RNA, 22 nt, Human
uuucuuuccauacauauugcua

SEQ ID NO: 136666 - RNA, 22 nt, Human
cauugcacucuggcuggaacgg

SEQ ID NO: 136667 - RNA, 22 nt, Human
uucaaucauuuuuacauagucc

SEQ ID NO: 136668 - RNA, 22 nt, Human
ucucucagcuuugagaccugcu

SEQ ID NO: 136669 - RNA, 22 nt, Human
ucagugucuugggcuugaaugc

SEQ ID NO: 136670 - RNA, 22 nt, Human
accucugcucaagaccccuccg

SEQ ID NO: 136671 - RNA, 22 nt, Human
uaucaucuuguugucaugcagc

SEQ ID NO: 136672 - RNA, 20 nt, Human
auguggcuuuuugaccugcu

SEQ ID NO: 136673 - RNA, 22 nt, Human
ucucccacuggccuuguaugau

SEQ ID NO: 136674 - RNA, 21 nt, Human
aaauuuucuuggcuguagugu

SEQ ID NO: 136675 - RNA, 22 nt, Human
ucaacacucuuuggcacaguua

SEQ ID NO: 136676 - RNA, 22 nt, Human
aaguucaagucuccugaguaua

SEQ ID NO: 136677 - RNA, 22 nt, Human
gcaguggcaugaugugggcuca

SEQ ID NO: 136678 - RNA, 19 nt, Human
cgcaggagccgaggugacc

SEQ ID NO: 136679 - RNA, 22 nt, Human
caggauccuggcugcauggacg

SEQ ID NO: 136680 - RNA, 22 nt, Human
agcagccauagauagcaugcaa

SEQ ID NO: 136681 - RNA, 22 nt, Human
uacauguauguguuaauaucug

SEQ ID NO: 136682 - RNA, 22 nt, Human
gcugccuugaacuuggccuggg

SEQ ID NO: 136683 - RNA, 22 nt, Human
uggggcuguccuuagucugaga

SEQ ID NO: 136684 - RNA, 22 nt, Human
caacagaagguguacuacugaa

SEQ ID NO: 136685 - RNA, 22 nt, Human
agcagagcccuuccauggccuu

SEQ ID NO: 136686 - RNA, 22 nt, Human
cugggcacaggggagcagaguc

SEQ ID NO: 136687 - RNA, 22 nt, Human
cacugaagaugcgacuagugcu

SEQ ID NO: 136688 - RNA, 21 nt, Human
ucacagacuggucagugaggc

SEQ ID NO: 136689 - RNA, 22 nt, Human
uaaggcaccuguccaggcuggg

SEQ ID NO: 136690 - RNA, 22 nt, Human
cagcagagcuuauguuggguca

SEQ ID NO: 136691 - RNA, 22 nt, Human
cucagaguggggcucccugagg

SEQ ID NO: 136692 - RNA, 22 nt, Human
uagagcugcuggacuguaacag

SEQ ID NO: 136693 - RNA, 22 nt, Human
ucacaguaucacacaaggauua

SEQ ID NO: 136694 - RNA, 22 nt, Human
ccugucugaggaggugcucuuu

SEQ ID NO: 136695 - RNA, 22 nt, Human
guggcugcaguaguguaggguc

SEQ ID NO: 136696 - RNA, 22 nt, Human
uagagcauuuagaggggcagga

SEQ ID NO: 136697 - RNA, 22 nt, Human
uugcuauuuugagagucauagu

SEQ ID NO: 136698 - RNA, 22 nt, Human
aagauuuccauuucuagcucau

SEQ ID NO: 136699 - RNA, 19 nt, Human
acuuugcaugugugucuaa

SEQ ID NO: 136700 - RNA, 22 nt, Human
ugugugugggcggaacggcccc

SEQ ID NO: 136701 - RNA, 22 nt, Human
ugucccagguccuagaugacca

SEQ ID NO: 136702 - RNA, 22 nt, Human
auucuuaauugccaugcuguau

SEQ ID NO: 136703 - RNA, 22 nt, Human
acauuguuugagaauacagaug

SEQ ID NO: 136704 - RNA, 22 nt, Human
uggcucagugcauucacaguaa

SEQ ID NO: 136705 - RNA, 22 nt, Human
uuugggaacucuaucauggaaa

SEQ ID NO: 136706 - RNA, 22 nt, Human
gcccucagcuccuggacacaug

SEQ ID NO: 136707 - RNA, 22 nt, Human
uuucucugaguuguuacaaaac

SEQ ID NO: 136708 - RNA, 22 nt, Human
auuuccuagccucucuugcagu

SEQ ID NO: 136709 - RNA, 22 nt, Human
uccauuuucuaaguaucacuua

SEQ ID NO: 136710 - RNA, 22 nt, Human
cuuggcugucuauaggaaagag

SEQ ID NO: 136711 - RNA, 22 nt, Human
uaacucuuccaacacuccuucc

SEQ ID NO: 136712 - RNA, 22 nt, Human
gaaggaaaacagaucugccuga

SEQ ID NO: 136713 - RNA, 22 nt, Human
uuugcuauuuuucugugcagcu

SEQ ID NO: 136714 - RNA, 22 nt, Human
gagagaagggggauaugagccu

SEQ ID NO: 136715 - RNA, 22 nt, Human
gcuguguggcugugccgucacg

SEQ ID NO: 136716 - RNA, 22 nt, Human
cuauuacaaucugcuacuauga

SEQ ID NO: 136717 - RNA, 22 nt, Human
cauugacaucaggcuuggccaa

SEQ ID NO: 136718 - RNA, 22 nt, Human
agcuugccucuuaaucaccuca

SEQ ID NO: 136719 - RNA, 22 nt, Human
gcaggcaggcuuccuugaacug

SEQ ID NO: 136720 - RNA, 22 nt, Human
cuguuaaucugcuugcaugaug

SEQ ID NO: 136721 - RNA, 22 nt, Human
aggccaggcaacauucugaagu

SEQ ID NO: 136722 - RNA, 23 nt, Human
uggcugagguccagguaguuuca

SEQ ID NO: 136723 - RNA, 17 nt, Human
gcugcagcgguaggcag

SEQ ID NO: 136724 - RNA, 22 nt, Human
gagagcugggaaagccguggag

SEQ ID NO: 136725 - RNA, 22 nt, Human
uagaggugacacugagaccaua

SEQ ID NO: 136726 - RNA, 22 nt, Human
agccuccaucccaugcacaaag

SEQ ID NO: 136727 - RNA, 22 nt, Human
augaagucugcacaugcaugug

SEQ ID NO: 136728 - RNA, 22 nt, Human
acuugauuuugaaccuuucuac

SEQ ID NO: 136729 - RNA, 22 nt, Human
cggcuggguagaggugccgggu

SEQ ID NO: 136730 - RNA, 22 nt, Human
uccuggccugucuggaguagcu

SEQ ID NO: 136731 - RNA, 22 nt, Human
uaucugugaaauguguuuguau

SEQ ID NO: 136732 - RNA, 22 nt, Human
cagaggcucuuccucacugccc

SEQ ID NO: 136733 - RNA, 22 nt, Human
gugucgugcuugccauggguac

SEQ ID NO: 136734 - RNA, 22 nt, Human
auugacaagcaguaugucuuag

SEQ ID NO: 136735 - RNA, 23 nt, Human
gccugggacugguagugugaccu

SEQ ID NO: 136736 - RNA, 22 nt, Human
cucccaggggaacuaucaagua

SEQ ID NO: 136737 - RNA, 21 nt, Human
uggcaggcagcuggaagcuug

SEQ ID NO: 136738 - RNA, 22 nt, Human
gcagcaggcuuuucauaccuug

SEQ ID NO: 136739 - RNA, 22 nt, Human
ggaaagagcccagcagugcuug

SEQ ID NO: 136740 - RNA, 22 nt, Human
uagaggugucacuuugggaagu

SEQ ID NO: 136741 - RNA, 22 nt, Human
gccagggcaggggagcaucugc

SEQ ID NO: 136742 - RNA, 22 nt, Human
guggcagcggcccaggccgucu

SEQ ID NO: 136743 - RNA, 21 nt, Human
ucucugggaggacuugugaga

SEQ ID NO: 136744 - RNA, 21 nt, Human
aggcagaaagagcccaggcug

SEQ ID NO: 136745 - RNA, 20 nt, Human
ucauuguguugccaauuccc

SEQ ID NO: 136746 - RNA, 22 nt, Human
uuagauaaauuaagacuuuaca

SEQ ID NO: 136747 - RNA, 22 nt, Human
auguguauuuuguacuauuggg

SEQ ID NO: 136748 - RNA, 22 nt, Human
uacuguauaugcuuguaucuga

SEQ ID NO: 136749 - RNA, 22 nt, Human
uagccaggcgaggucagugucg

SEQ ID NO: 136750 - RNA, 22 nt, Human
ccugcuucagggaugauggcac

SEQ ID NO: 136751 - RNA, 22 nt, Human
ucauugcacuccagccugggca

SEQ ID NO: 136752 - RNA, 22 nt, Human
cucucuguuaugcuuucaugaa

SEQ ID NO: 136753 - RNA, 22 nt, Human
uucauucugcaguucucagcuc

SEQ ID NO: 136754 - RNA, 23 nt, Human
ugagcccaggaggucaaggcugc

SEQ ID NO: 136755 - RNA, 22 nt, Human
cuuguuaucuccguguccuugu

SEQ ID NO: 136756 - RNA, 22 nt, Human
gcucucuggaggccauggacag

SEQ ID NO: 136757 - RNA, 22 nt, Human
gaccugccugagcugccucugc

SEQ ID NO: 136758 - RNA, 22 nt, Human
uaguuacagcaggcaggauaua

SEQ ID NO: 136759 - RNA, 19 nt, Human
gggaaauucacuugcuucc

SEQ ID NO: 136760 - RNA, 22 nt, Human
ucuggcuccacucugugcaugc

SEQ ID NO: 136761 - RNA, 22 nt, Human
guuugcauguguacuuaauugg

SEQ ID NO: 136762 - RNA, 22 nt, Human
guccucuggccuuucccaggac

SEQ ID NO: 136763 - RNA, 22 nt, Human
auacaguagacaaucucaugaa

SEQ ID NO: 136764 - RNA, 22 nt, Human
acccaggagguggaggcugcag

SEQ ID NO: 136765 - RNA, 22 nt, Human
uuguaaauaguaguaagaugcc

SEQ ID NO: 136766 - RNA, 22 nt, Human
cugaaggaagcagguggccugu

SEQ ID NO: 136767 - RNA, 23 nt, Human
aggaacugaggccuagggaggua

SEQ ID NO: 136768 - RNA, 22 nt, Human
agagccugugauugucaucacc

SEQ ID NO: 136769 - RNA, 22 nt, Human
gcuggucacucugggagcugcu

SEQ ID NO: 136770 - RNA, 22 nt, Human
uuugcagcaaggagagagcauu

SEQ ID NO: 136771 - RNA, 22 nt, Human
auuguguaauuuucagcucaua

SEQ ID NO: 136772 - RNA, 22 nt, Human
aaaguggucaccuucucauuuc

SEQ ID NO: 136773 - RNA, 22 nt, Human
auuuacagugugccuacuauau

SEQ ID NO: 136774 - RNA, 22 nt, Human
acuugcauuauauuuaucacaa

SEQ ID NO: 136775 - RNA, 22 nt, Human
auccaugaucaauuuauuacua

SEQ ID NO: 136776 - RNA, 22 nt, Human
uaacauuuaaauuuuucacaua

SEQ ID NO: 136777 - RNA, 22 nt, Human
cugggguggugcaggccucaug

SEQ ID NO: 136778 - RNA, 22 nt, Human
caggcagcagaggaguguggga

SEQ ID NO: 136779 - RNA, 22 nt, Human
gggcauggugaugugcaccugu

SEQ ID NO: 136780 - RNA, 22 nt, Human
agggaggaucugcuccuugucu

SEQ ID NO: 136781 - RNA, 22 nt, Human
cuuuccaggcugaguuugcuug

SEQ ID NO: 136782 - RNA, 22 nt, Human
uaacuguugugcgggucucugg

SEQ ID NO: 136783 - RNA, 22 nt, Human
gagcccagguucugcuuccagc

SEQ ID NO: 136784 - RNA, 22 nt, Human
cacaagucuguggucuccaaca

SEQ ID NO: 136785 - RNA, 22 nt, Human
gugggcaaggucccugccagcu

SEQ ID NO: 136786 - RNA, 22 nt, Human
ccagaagggcuauugcagugac

SEQ ID NO: 136787 - RNA, 22 nt, Human
gcagcccagagcgcaggacccc

SEQ ID NO: 136788 - RNA, 22 nt, Human
augugugugaugggcgccgcca

SEQ ID NO: 136789 - RNA, 22 nt, Human
uugaaauacugcauuguucagu

SEQ ID NO: 136790 - RNA, 22 nt, Human
gccugagcaggcguggaccaug

SEQ ID NO: 136791 - RNA, 22 nt, Human
uugaaaguuaucuagauucuga

SEQ ID NO: 136792 - RNA, 22 nt, Human
aucuuucagggccauuuguauu

SEQ ID NO: 136793 - RNA, 22 nt, Human
gcucugucuucagcacacagua

SEQ ID NO: 136794 - RNA, 22 nt, Human
uaggcagggauuaggguugauu

SEQ ID NO: 136795 - RNA, 22 nt, Human
uacaucauaauaauacuuagaa

SEQ ID NO: 136796 - RNA, 22 nt, Human
cuuacauuaaguaagagauuga

SEQ ID NO: 136797 - RNA, 22 nt, Human
ugccaggcuaaguggaggacuu

SEQ ID NO: 136798 - RNA, 22 nt, Human
uuccaggggcagcagugauggu

SEQ ID NO: 136799 - RNA, 22 nt, Human
agcugagcauuugauccaccuc

SEQ ID NO: 136800 - RNA, 22 nt, Human
cuuccugcauugugccagaguu

SEQ ID NO: 136801 - RNA, 20 nt, Human
aggagcugaauuagaggguu

SEQ ID NO: 136802 - RNA, 22 nt, Human
aaggccaacuaggaugagcuag

SEQ ID NO: 136803 - RNA, 18 nt, Human
ucagcuggggcugcagcc

SEQ ID NO: 136804 - RNA, 22 nt, Human
auuguauuagcacaauacaauu

SEQ ID NO: 136805 - RNA, 22 nt, Human
gcugucugcugggucgcucagg

SEQ ID NO: 136806 - RNA, 22 nt, Human
agccucucugaugugacagcua

SEQ ID NO: 136807 - RNA, 22 nt, Human
ucagcaguuuuauaugcagcuu

SEQ ID NO: 136808 - RNA, 22 nt, Human
cauuucugugacacuuccaucu

SEQ ID NO: 136809 - RNA, 22 nt, Human
cuguuuaucccuuuggucagca

SEQ ID NO: 136810 - RNA, 22 nt, Human
uuucucuggccucaguuuaaca

SEQ ID NO: 136811 - RNA, 22 nt, Human
cagggcagagggaaacuccuuu

SEQ ID NO: 136812 - RNA, 22 nt, Human
auucaguucuaaggucagugcc

SEQ ID NO: 136813 - RNA, 22 nt, Human
uggccugguccuugucaaggca

SEQ ID NO: 136814 - RNA, 22 nt, Human
gcugucaggccaugugggccuu

SEQ ID NO: 136815 - RNA, 22 nt, Human
gcucugagcacugugcggcugg

SEQ ID NO: 136816 - RNA, 22 nt, Human
cuggggugagcagaaacagggg

SEQ ID NO: 136817 - RNA, 20 nt, Human
ccugaggguuuguguucuuu

SEQ ID NO: 136818 - RNA, 22 nt, Human
agggggaggcugugcugcgucu

SEQ ID NO: 136819 - RNA, 22 nt, Human
ucauugcagugauguuguaugu

SEQ ID NO: 136820 - RNA, 22 nt, Human
ggagugaaucacuagaugcaga

SEQ ID NO: 136821 - RNA, 22 nt, Human
cuccagaagacccauccucaug

SEQ ID NO: 136822 - RNA, 22 nt, Human
acuuuuuaguuuccucaaacau

SEQ ID NO: 136823 - RNA, 18 nt, Human
gaacuuuuggcuuugugu

SEQ ID NO: 136824 - RNA, 22 nt, Human
ucaggaguccugccugcagccu

SEQ ID NO: 136825 - RNA, 22 nt, Human
uaaauuaugucacaugacucug

SEQ ID NO: 136826 - RNA, 22 nt, Human
uggcuucaucugcagcacugcc

SEQ ID NO: 136827 - RNA, 22 nt, Human
cuguggcuuucucugccuccuu

SEQ ID NO: 136828 - RNA, 22 nt, Human
cucagcuggcaauucuggcucc

SEQ ID NO: 136829 - RNA, 22 nt, Human
accaucaguacuggaugcugac

SEQ ID NO: 136830 - RNA, 18 nt, Human
guccugagcucugcugua

SEQ ID NO: 136831 - RNA, 22 nt, Human
cccuggugguacggcacuggca

SEQ ID NO: 136832 - RNA, 22 nt, Human
aagggcaggcagagaucauaua

SEQ ID NO: 136833 - RNA, 20 nt, Human
ucucugcuguccacauuugc

SEQ ID NO: 136834 - RNA, 22 nt, Human
auucauucugaccucaagagaa

SEQ ID NO: 136835 - RNA, 21 nt, Human
aaaaugugagcgugaugcuua

SEQ ID NO: 136836 - RNA, 22 nt, Human
aaaaaugcugugguagcugugu

SEQ ID NO: 136837 - RNA, 22 nt, Human
ggccuugggauguggcugcagc

SEQ ID NO: 136838 - RNA, 22 nt, Human
gcugcuuccuuuccugcugacc

SEQ ID NO: 136839 - RNA, 22 nt, Human
uacuuucuuucugauccuuaug

SEQ ID NO: 136840 - RNA, 21 nt, Human
ucacuagugccuucugucauu

SEQ ID NO: 136841 - RNA, 22 nt, Human
cagcugccaugacauguccugc

SEQ ID NO: 136842 - RNA, 22 nt, Human
ucauguaaguauagaaagcagu

SEQ ID NO: 136843 - RNA, 22 nt, Human
cccagcuccuuggaugggcagg

SEQ ID NO: 136844 - RNA, 22 nt, Human
auguggcugguaguugacaacu

SEQ ID NO: 136845 - RNA, 22 nt, Human
ucccagagccaagcuauggaug

SEQ ID NO: 136846 - RNA, 22 nt, Human
ggggcggggcucugagaagcau

SEQ ID NO: 136847 - RNA, 21 nt, Human
uguuuucuaaagggcggauca

SEQ ID NO: 136848 - RNA, 22 nt, Human
aaugaacaggugaaugucagau

SEQ ID NO: 136849 - RNA, 22 nt, Human
gcucccagcaauugaggcagcc

SEQ ID NO: 136850 - RNA, 22 nt, Human
ccaaagucuggagcagcagagc

SEQ ID NO: 136851 - RNA, 22 nt, Human
uguacacugcaggaugcauugc

SEQ ID NO: 136852 - RNA, 22 nt, Human
agucaguguagaaagcccaggc

SEQ ID NO: 136853 - RNA, 22 nt, Human
ugaaagcacucacuucugcucu

SEQ ID NO: 136854 - RNA, 18 nt, Human
gggcauggaugcagcauc

SEQ ID NO: 136855 - RNA, 22 nt, Human
acauuuaggauguuuugagaga

SEQ ID NO: 136856 - RNA, 22 nt, Human
gccuggcaggccugggccagca

SEQ ID NO: 136857 - RNA, 22 nt, Human
agcuggagaugcccagcaccgg

SEQ ID NO: 136858 - RNA, 22 nt, Human
uggcuaugguauugauggguuu

SEQ ID NO: 136859 - RNA, 22 nt, Human
cuggcuuccucaggagcagugg

SEQ ID NO: 136860 - RNA, 22 nt, Human
ugaugggacugccagcugcuga

SEQ ID NO: 136861 - RNA, 22 nt, Human
uccugccugagcguggaggagg

SEQ ID NO: 136862 - RNA, 22 nt, Human
ugcauaaagugccauaguauua

SEQ ID NO: 136863 - RNA, 22 nt, Human
uugaagcauuugcuauagcauu

SEQ ID NO: 136864 - RNA, 22 nt, Human
aucuguguaugugaccuuaucu

SEQ ID NO: 136865 - RNA, 22 nt, Human
cugggcugucaauggcccucug

SEQ ID NO: 136866 - RNA, 23 nt, Human
acagagaucuugacuuguaugga

SEQ ID NO: 136867 - RNA, 22 nt, Human
caguuucugggcguucacaggu

SEQ ID NO: 136868 - RNA, 22 nt, Human
cauuguauugaggauacuuaag

SEQ ID NO: 136869 - RNA, 22 nt, Human
cccagggacagaugggcagcua

SEQ ID NO: 136870 - RNA, 22 nt, Human
guucagggagggacagaugaag

SEQ ID NO: 136871 - RNA, 22 nt, Human
gcaguggcaccgcuggcucugg

SEQ ID NO: 136872 - RNA, 19 nt, Human
uccuuugaauaucaguuga

SEQ ID NO: 136873 - RNA, 22 nt, Human
guuaaauucgaugauggauaaa

SEQ ID NO: 136874 - RNA, 22 nt, Human
uuucuucaauugcuaacaagga

SEQ ID NO: 136875 - RNA, 22 nt, Human
gagagucacugucugcauuucc

SEQ ID NO: 136876 - RNA, 22 nt, Human
ucugucacucccugaugaugaa

SEQ ID NO: 136877 - RNA, 22 nt, Human
cuuuguaucuaaauaucuugaa

SEQ ID NO: 136878 - RNA, 22 nt, Human
ggccugccucacagucagcacc

SEQ ID NO: 136879 - RNA, 22 nt, Human
gcaggcagagaaggaacauuua

SEQ ID NO: 136880 - RNA, 22 nt, Human
agugaccaaucaugguuagauu

SEQ ID NO: 136881 - RNA, 22 nt, Human
ucuguacaaaggcuauuuggag

SEQ ID NO: 136882 - RNA, 22 nt, Human
ccagcagcgauagggugagugc

SEQ ID NO: 136883 - RNA, 21 nt, Human
uggcagggguaguaguacagc

SEQ ID NO: 136884 - RNA, 22 nt, Human
gauuuuauuagcccaaacuuug

SEQ ID NO: 136885 - RNA, 22 nt, Human
ccagcccugucaccaacuggag

SEQ ID NO: 136886 - RNA, 22 nt, Human
auauuuguaaaauucugugucu

SEQ ID NO: 136887 - RNA, 22 nt, Human
uuagaaaugauuucaccucuuu

SEQ ID NO: 136888 - RNA, 22 nt, Human
uagggcaggugaagaaaagcua

SEQ ID NO: 136889 - RNA, 21 nt, Human
uucaguaugcgucaugcuguu

SEQ ID NO: 136890 - RNA, 22 nt, Human
aagcaauaagccagauuuggau

SEQ ID NO: 136891 - RNA, 21 nt, Human
ccccugggagcccugucagua

SEQ ID NO: 136892 - RNA, 22 nt, Human
uuagcugcauuaucaaaguuau

SEQ ID NO: 136893 - RNA, 22 nt, Human
gauuucaaagguucugcaugcc

SEQ ID NO: 136894 - RNA, 22 nt, Human
ugcaguggcgccaucucagcuc

SEQ ID NO: 136895 - RNA, 22 nt, Human
cccagcagaaucugaugagggc

SEQ ID NO: 136896 - RNA, 22 nt, Human
aggaaaaucgagucuggaggca

SEQ ID NO: 136897 - RNA, 22 nt, Human
gcagugccuugcuucucugucu

SEQ ID NO: 136898 - RNA, 20 nt, Human
gccugagcuccgccuccugu

SEQ ID NO: 136899 - RNA, 22 nt, Human
aggcagagagcaguggccgucu

SEQ ID NO: 136900 - RNA, 22 nt, Human
auguuucagauacagaucaaau

SEQ ID NO: 136901 - RNA, 22 nt, Human
uuuacagucuauguugaauuaa

SEQ ID NO: 136902 - RNA, 22 nt, Human
agccacagagguugaugugguu

SEQ ID NO: 136903 - RNA, 22 nt, Human
cccuggaguagcacugggucgc

SEQ ID NO: 136904 - RNA, 22 nt, Human
gaguggagcaaaagagguagau

SEQ ID NO: 136905 - RNA, 20 nt, Human
ggguggaguugcggucugug

SEQ ID NO: 136906 - RNA, 22 nt, Human
ucuucaaguuccaaagugcagg

SEQ ID NO: 136907 - RNA, 22 nt, Human
cugcucuguucccccaucaucu

SEQ ID NO: 136908 - RNA, 22 nt, Human
cccaccccuggacaggugagug

SEQ ID NO: 136909 - RNA, 22 nt, Human
cauuuccagcuccugcaucaug

SEQ ID NO: 136910 - RNA, 22 nt, Human
gcugucuguggugucagcugac

SEQ ID NO: 136911 - RNA, 22 nt, Human
ccugacucuggccaggccagcu

SEQ ID NO: 136912 - RNA, 22 nt, Human
ugugaaagucaaauuaauugaa

SEQ ID NO: 136913 - RNA, 22 nt, Human
ccugggaguggcacucacagca

SEQ ID NO: 136914 - RNA, 22 nt, Human
gccagagcagaauagaguggcc

SEQ ID NO: 136915 - RNA, 22 nt, Human
acuuguuuggucucauguuuaa

SEQ ID NO: 136916 - RNA, 22 nt, Human
ucuuuacauaguguggacuacu

SEQ ID NO: 136917 - RNA, 22 nt, Human
aaaagucugcucucauuucaga

SEQ ID NO: 136918 - RNA, 19 nt, Human
acagaagcauagaaaagga

SEQ ID NO: 136919 - RNA, 22 nt, Human
ucugccuugagguccucagcuc

SEQ ID NO: 136920 - RNA, 22 nt, Human
cucacaggagaaagucaugguc

SEQ ID NO: 136921 - RNA, 22 nt, Human
aguuauuuacuccuuugucucu

SEQ ID NO: 136922 - RNA, 22 nt, Human
gauuauauaauggaagcucuug

SEQ ID NO: 136923 - RNA, 22 nt, Human
ccagagccuaagaucugauccu

SEQ ID NO: 136924 - RNA, 22 nt, Human
cccuuucccuucuggcucaggg

SEQ ID NO: 136925 - RNA, 22 nt, Human
ugaaagcacaaguucuaacagg

SEQ ID NO: 136926 - RNA, 20 nt, Human
ucuguacacucaucuucugc

SEQ ID NO: 136927 - RNA, 22 nt, Human
uccaguggugguuugaagggca

SEQ ID NO: 136928 - RNA, 22 nt, Human
aaucuguucuacucuauucaga

SEQ ID NO: 136929 - RNA, 22 nt, Human
agccuggaguucccaggagaag

SEQ ID NO: 136930 - RNA, 22 nt, Human
cugcccugggaguaccuguccu

SEQ ID NO: 136931 - RNA, 22 nt, Human
cccagcuccaagggacagcgaa

SEQ ID NO: 136932 - RNA, 18 nt, Human
ugaacagaugaguugaag

SEQ ID NO: 136933 - RNA, 22 nt, Human
cagggagaucuuggcuccuggu

SEQ ID NO: 136934 - RNA, 22 nt, Human
uggaggaugagugugggcucug

SEQ ID NO: 136935 - RNA, 22 nt, Human
accugccuauggagccacaugg

SEQ ID NO: 136936 - RNA, 22 nt, Human
aagagcuggauggaaucuggga

SEQ ID NO: 136937 - RNA, 22 nt, Human
uaaaugcaagugcuccugggag

SEQ ID NO: 136938 - RNA, 23 nt, Human
gccucuggagccccagugcucag

SEQ ID NO: 136939 - RNA, 22 nt, Human
uacauuaucuuguuaucuuuca

SEQ ID NO: 136940 - RNA, 22 nt, Human
cugugccuuuguagcugugccu

SEQ ID NO: 136941 - RNA, 22 nt, Human
cugaggucuagacaccccaggg

SEQ ID NO: 136942 - RNA, 22 nt, Human
ucugccuucgcugcucccugaa

SEQ ID NO: 136943 - RNA, 22 nt, Human
agccaacuaggagauuaaggua

SEQ ID NO: 136944 - RNA, 22 nt, Human
uggggcuggggaucuugagccu

SEQ ID NO: 136945 - RNA, 22 nt, Human
uuguggcucuugaggcucucgu

SEQ ID NO: 136946 - RNA, 22 nt, Human
acucucuugggggagagcagag

SEQ ID NO: 136947 - RNA, 22 nt, Human
cuucccacuaguaucacagagc

SEQ ID NO: 136948 - RNA, 22 nt, Human
caguuucucucaauaagcaucg

SEQ ID NO: 136949 - RNA, 22 nt, Human
uuuacacggcauuaucuucaug

SEQ ID NO: 136950 - RNA, 22 nt, Human
gcugccaugguccaggcuccag

SEQ ID NO: 136951 - RNA, 22 nt, Human
aagauggagcacgagcagaagc

SEQ ID NO: 136952 - RNA, 20 nt, Human
aaguauauguccguguacuu

SEQ ID NO: 136953 - RNA, 22 nt, Human
uggagcagcuaagccucugaga

SEQ ID NO: 136954 - RNA, 22 nt, Human
acagagcuguacaugugccaug

SEQ ID NO: 136955 - RNA, 22 nt, Human
cugggcaguuuauucaguucug

SEQ ID NO: 136956 - RNA, 22 nt, Human
ucucagagaaaugugucaccau

SEQ ID NO: 136957 - RNA, 22 nt, Human
ccuggcugcuuucacuauggag

SEQ ID NO: 136958 - RNA, 18 nt, Human
ccuguguguguugcaggc

SEQ ID NO: 136959 - RNA, 22 nt, Human
cacuacuugaaagaauuacaga

SEQ ID NO: 136960 - RNA, 22 nt, Human
uuuuccuauaugcaaagaaugc

SEQ ID NO: 136961 - RNA, 22 nt, Human
ggcagagcuugcagugagccga

SEQ ID NO: 136962 - RNA, 22 nt, Human
uuugacagacauuuacuacauu

SEQ ID NO: 136963 - RNA, 22 nt, Human
uguggcccagaugagugugcua

SEQ ID NO: 136964 - RNA, 22 nt, Human
gugagcagaacagguggcuucu

SEQ ID NO: 136965 - RNA, 22 nt, Human
guccucuguagggcugggccac

SEQ ID NO: 136966 - RNA, 21 nt, Human
gggcuggacaugguggcucau

SEQ ID NO: 136967 - RNA, 22 nt, Human
uaugaguacaaggacucugucu

SEQ ID NO: 136968 - RNA, 20 nt, Human
uuugagaccagucugcccaa

SEQ ID NO: 136969 - RNA, 22 nt, Human
acaaaaauuagcugggcauggu

SEQ ID NO: 136970 - RNA, 22 nt, Human
uucuuucccuuccagcagcucc

SEQ ID NO: 136971 - RNA, 22 nt, Human
cauuuacauuuaagguuaauau

SEQ ID NO: 136972 - RNA, 23 nt, Human
agccagggcacugguggagauug

SEQ ID NO: 136973 - RNA, 22 nt, Human
ugcugccuugaccuccugggcu

SEQ ID NO: 136974 - RNA, 17 nt, Human
aaggccauuuccaccca

SEQ ID NO: 136975 - RNA, 22 nt, Human
cuguggcuggccugucugacau

SEQ ID NO: 136976 - RNA, 22 nt, Human
uauuucagcaagaagaaugugg

SEQ ID NO: 136977 - RNA, 22 nt, Human
gccaggcagcagcgaggauggu

SEQ ID NO: 136978 - RNA, 21 nt, Human
cagaggcugagagggcaaucu

SEQ ID NO: 136979 - RNA, 22 nt, Human
uggcuucugggacuugugagca

SEQ ID NO: 136980 - RNA, 21 nt, Human
aggcccagcuuuccucuugcu

SEQ ID NO: 136981 - RNA, 22 nt, Human
ucucuguggagcaguguguuca

SEQ ID NO: 136982 - RNA, 22 nt, Human
uucacagaugccugaugugugg

SEQ ID NO: 136983 - RNA, 22 nt, Human
accacugggcgggcagccugcu

SEQ ID NO: 136984 - RNA, 22 nt, Human
aaggcacuuuucuaaagaccuu

SEQ ID NO: 136985 - RNA, 22 nt, Human
gagagucuaggaaccucauaua

SEQ ID NO: 136986 - RNA, 22 nt, Human
ucucaggaaauaggauuugagu

SEQ ID NO: 136987 - RNA, 22 nt, Human
cuggcaggagcauucacagagg

SEQ ID NO: 136988 - RNA, 22 nt, Human
ccagagccggauugugaagugc

SEQ ID NO: 136989 - RNA, 22 nt, Human
aaugcuguaaagaugcuaucug

SEQ ID NO: 136990 - RNA, 22 nt, Human
gucuucuuguuuugaaggaaau

SEQ ID NO: 136991 - RNA, 22 nt, Human
aaucuuucccuauuaaaugugg

SEQ ID NO: 136992 - RNA, 22 nt, Human
uuauuauuuuguguacagcaaa

SEQ ID NO: 136993 - RNA, 19 nt, Human
ccugcagggaugagagguu

SEQ ID NO: 136994 - RNA, 17 nt, Human
cguggcugagccauaga

SEQ ID NO: 136995 - RNA, 22 nt, Human
uguggcugugguuuucauaaau

SEQ ID NO: 136996 - RNA, 22 nt, Human
acuuuacauuugaucucucuaa

SEQ ID NO: 136997 - RNA, 22 nt, Human
ccagccuggagggcaguggugg

SEQ ID NO: 136998 - RNA, 22 nt, Human
uuaguaaauaaagucuacuuuc

SEQ ID NO: 136999 - RNA, 22 nt, Human
aguggcuguaucagucaacccu

SEQ ID NO: 137000 - RNA, 22 nt, Human
caaauguguaaggaaguguuag

SEQ ID NO: 137001 - RNA, 22 nt, Human
aggcugccaaagcuucugucuc

SEQ ID NO: 137002 - RNA, 22 nt, Human
cauuccuuaacguggggagucu

SEQ ID NO: 137003 - RNA, 22 nt, Human
ugaaugaguuuggcugcuguuc

SEQ ID NO: 137004 - RNA, 22 nt, Human
ugccucugcugcuguggcauca

SEQ ID NO: 137005 - RNA, 22 nt, Human
gcugugcagucuuuggugugcc

SEQ ID NO: 137006 - RNA, 22 nt, Human
cugcagaggucuugcugauggu

SEQ ID NO: 137007 - RNA, 22 nt, Human
acagaggucauggagaguucuc

SEQ ID NO: 137008 - RNA, 22 nt, Human
aguguauguccugaggggagaa

SEQ ID NO: 137009 - RNA, 22 nt, Human
cugggccagucucggccgcucu

SEQ ID NO: 137010 - RNA, 22 nt, Human
cagagugaaauaggggaucaag

SEQ ID NO: 137011 - RNA, 22 nt, Human
cagcuggggcagccacgugcgg

SEQ ID NO: 137012 - RNA, 22 nt, Human
ucucagagugguggucccucug

SEQ ID NO: 137013 - RNA, 22 nt, Human
guuauguaaucuaacacucagu

SEQ ID NO: 137014 - RNA, 22 nt, Human
ugccaggccucaggagucucca

SEQ ID NO: 137015 - RNA, 22 nt, Human
caguauguuugggagacaugac

SEQ ID NO: 137016 - RNA, 22 nt, Human
cuuucucuguggugaggagggu

SEQ ID NO: 137017 - RNA, 22 nt, Human
uuauuugcugauuucaguuuca

SEQ ID NO: 137018 - RNA, 22 nt, Human
gcugucacacauggccccagcu

SEQ ID NO: 137019 - RNA, 22 nt, Human
uuccugugaagaucugggugcu

SEQ ID NO: 137020 - RNA, 22 nt, Human
cagggccaccguguuugcugcu

SEQ ID NO: 137021 - RNA, 22 nt, Human
uugguuuaggaacuggcuugga

SEQ ID NO: 137022 - RNA, 22 nt, Human
ucugggagcacacgcagugauc

SEQ ID NO: 137023 - RNA, 21 nt, Human
aagcuucccugcucuccaggg

SEQ ID NO: 137024 - RNA, 22 nt, Human
caagccucagaaucuucuccau

SEQ ID NO: 137025 - RNA, 22 nt, Human
caagaaaugggauuugacugcc

SEQ ID NO: 137026 - RNA, 22 nt, Human
cucuggaguuagugaucugggc

SEQ ID NO: 137027 - RNA, 22 nt, Human
uagaaacauauaggauggcagg

SEQ ID NO: 137028 - RNA, 21 nt, Human
cucuggagucaagagcuucca

SEQ ID NO: 137029 - RNA, 22 nt, Human
cugggggcaauggucagagugu

SEQ ID NO: 137030 - RNA, 22 nt, Human
cuucaagauccauagauauugc

SEQ ID NO: 137031 - RNA, 22 nt, Human
ggccugagaaccauggggccaa

SEQ ID NO: 137032 - RNA, 17 nt, Human
agucauauugugcaguu

SEQ ID NO: 137033 - RNA, 22 nt, Human
cucugggcuuguugaccugcac

SEQ ID NO: 137034 - RNA, 22 nt, Human
uuuauuauucuguucucucuac

SEQ ID NO: 137035 - RNA, 22 nt, Human
uggcuguggguggaaggaaacc

SEQ ID NO: 137036 - RNA, 22 nt, Human
uuuuccucugcagagcaguuag

SEQ ID NO: 137037 - RNA, 22 nt, Human
uucucuauguguguuguaguuu

SEQ ID NO: 137038 - RNA, 20 nt, Human
gucaggauuaguaaacucug

SEQ ID NO: 137039 - RNA, 22 nt, Human
ucuggccaggauggcaagacca

SEQ ID NO: 137040 - RNA, 22 nt, Human
gguuggggcgagcuggaggccc

SEQ ID NO: 137041 - RNA, 22 nt, Human
ugccucugugggccuuccuggc

SEQ ID NO: 137042 - RNA, 22 nt, Human
gugggugucaguaucuuuaacg

SEQ ID NO: 137043 - RNA, 22 nt, Human
agccagagagccccagguucua

SEQ ID NO: 137044 - RNA, 21 nt, Human
gggugggaggacacagcaggc

SEQ ID NO: 137045 - RNA, 22 nt, Human
gugaaggacuagcauggagggc

SEQ ID NO: 137046 - RNA, 22 nt, Human
gcacagccacugagugagaacc

SEQ ID NO: 137047 - RNA, 22 nt, Human
uagaguauagcuaacuguauua

SEQ ID NO: 137048 - RNA, 22 nt, Human
ucuccuuugaaaguuaggacug

SEQ ID NO: 137049 - RNA, 22 nt, Human
acugaaggcuuucccaagguca

SEQ ID NO: 137050 - RNA, 22 nt, Human
uggcccugacacgugguacugg

SEQ ID NO: 137051 - RNA, 22 nt, Human
ugucacauaauuuaucuguagg

SEQ ID NO: 137052 - RNA, 20 nt, Human
ucauccaggacaggaguggc

SEQ ID NO: 137053 - RNA, 22 nt, Human
ggcucugcuggauugaggccag

SEQ ID NO: 137054 - RNA, 17 nt, Human
ugagaaguaggcaucau

SEQ ID NO: 137055 - RNA, 22 nt, Human
aaggccugcucagcugucugug

SEQ ID NO: 137056 - RNA, 22 nt, Human
aaaaaugaauucuucaguggca

SEQ ID NO: 137057 - RNA, 22 nt, Human
uggcuuccuggacagaugcggu

SEQ ID NO: 137058 - RNA, 22 nt, Human
uucuuuucuuuaggcauugugu

SEQ ID NO: 137059 - RNA, 22 nt, Human
uuguauuugauugucauaucgu

SEQ ID NO: 137060 - RNA, 22 nt, Human
ucauucuugaucacuaguuagu

SEQ ID NO: 137061 - RNA, 22 nt, Human
cagggccauaucuugugcacca

SEQ ID NO: 137062 - RNA, 22 nt, Human
auaaggcagucccuuaacaagg

SEQ ID NO: 137063 - RNA, 22 nt, Human
ucugggaagcugcgugccuguu

SEQ ID NO: 137064 - RNA, 22 nt, Human
aguaucuucaaguuucuucuag

SEQ ID NO: 137065 - RNA, 22 nt, Human
guggugcauccuugaguaagcu

SEQ ID NO: 137066 - RNA, 22 nt, Human
acauuucuuuucaucucuauau

SEQ ID NO: 137067 - RNA, 22 nt, Human
caagagcucaccggagagcauu

SEQ ID NO: 137068 - RNA, 22 nt, Human
acagaagagcacauuuaguaug

SEQ ID NO: 137069 - RNA, 22 nt, Human
gcccagcacagcuggaagaguc

SEQ ID NO: 137070 - RNA, 22 nt, Human
gugucccagccccacaggccug

SEQ ID NO: 137071 - RNA, 22 nt, Human
guggccugaugccagcccugug

SEQ ID NO: 137072 - RNA, 22 nt, Human
aucaggauguuuggcugucaua

SEQ ID NO: 137073 - RNA, 22 nt, Human
uguauguguauguacauaugca

SEQ ID NO: 137074 - RNA, 22 nt, Human
agagcugaauuuggguggugga

SEQ ID NO: 137075 - RNA, 23 nt, Human
cugcugugaaacaugguuuuggu

SEQ ID NO: 137076 - RNA, 22 nt, Human
ccacucugcugugcuccaugau

SEQ ID NO: 137077 - RNA, 22 nt, Human
uauguagaagcugcucaaagaa

SEQ ID NO: 137078 - RNA, 20 nt, Human
uaacagaaguagaagugggu

SEQ ID NO: 137079 - RNA, 22 nt, Human
aagaaauuaaggaaugcaacga

SEQ ID NO: 137080 - RNA, 21 nt, Human
agagcugggacuugccugaga

SEQ ID NO: 137081 - RNA, 22 nt, Human
gggcuugcugauuugggcagga

SEQ ID NO: 137082 - RNA, 22 nt, Human
cuuucaguuaguaccuaguggc

SEQ ID NO: 137083 - RNA, 20 nt, Human
agcccaggccugugugaguc

SEQ ID NO: 137084 - RNA, 22 nt, Human
aagcugccaccagcccagggca

SEQ ID NO: 137085 - RNA, 22 nt, Human
ugccuguccugaggaugagggu

SEQ ID NO: 137086 - RNA, 22 nt, Human
uacauguauugauuucucuucu

SEQ ID NO: 137087 - RNA, 22 nt, Human
aaaggcuaugagauagaagaua

SEQ ID NO: 137088 - RNA, 22 nt, Human
ccugggaagagcugacaggagg

SEQ ID NO: 137089 - RNA, 22 nt, Human
ggcugguguugagugccuguag

SEQ ID NO: 137090 - RNA, 22 nt, Human
ucaguuuuguauguuguaaguc

SEQ ID NO: 137091 - RNA, 22 nt, Human
aggcugugagaaguccuucagu

SEQ ID NO: 137092 - RNA, 22 nt, Human
ggccucucucccuggcuugcag

SEQ ID NO: 137093 - RNA, 22 nt, Human
aggccuggccuuuauguucaag

SEQ ID NO: 137094 - RNA, 22 nt, Human
ccagaggucuccugcacgggau

SEQ ID NO: 137095 - RNA, 22 nt, Human
agcccuucaaccugccuacucc

SEQ ID NO: 137096 - RNA, 22 nt, Human
ucugagccguauggcuuggcua

SEQ ID NO: 137097 - RNA, 22 nt, Human
cuuccugguuugaagcucgccg

SEQ ID NO: 137098 - RNA, 22 nt, Human
aggcaggcucaggcccaugcuu

SEQ ID NO: 137099 - RNA, 22 nt, Human
gaguuguucaacgugugugaaa

SEQ ID NO: 137100 - RNA, 22 nt, Human
ucagggcaggacaguguaggcc

SEQ ID NO: 137101 - RNA, 22 nt, Human
ucaggaggccaccaggaccugu

SEQ ID NO: 137102 - RNA, 22 nt, Human
aaauuaguacauugcaaagucc

SEQ ID NO: 137103 - RNA, 22 nt, Human
cugcagcuccccugagaucaag

SEQ ID NO: 137104 - RNA, 22 nt, Human
cccccuggcaggcuggccucuc

SEQ ID NO: 137105 - RNA, 22 nt, Human
uauguucuagacuuuugcugug

SEQ ID NO: 137106 - RNA, 22 nt, Human
ccuggagcacagcccaguccca

SEQ ID NO: 137107 - RNA, 22 nt, Human
aguggcagagcugugucuugaa

SEQ ID NO: 137108 - RNA, 22 nt, Human
uacagugaaugaauggcugugc

SEQ ID NO: 137109 - RNA, 22 nt, Human
agaguauaauuagugucuucua

SEQ ID NO: 137110 - RNA, 22 nt, Human
aacucaguguguuucuuaguau

SEQ ID NO: 137111 - RNA, 22 nt, Human
ccaggaggcagagguuacagug

SEQ ID NO: 137112 - RNA, 22 nt, Human
ucacuggggccuuuggucagga

SEQ ID NO: 137113 - RNA, 22 nt, Human
aaaucugggagcagcucggcca

SEQ ID NO: 137114 - RNA, 22 nt, Human
ugucccagacauaaguggacau

SEQ ID NO: 137115 - RNA, 22 nt, Human
acaauguaggauauguacuugu

SEQ ID NO: 137116 - RNA, 21 nt, Human
auguggcucccuuccucagga

SEQ ID NO: 137117 - RNA, 22 nt, Human
ggcaggugcucugugggccugg

SEQ ID NO: 137118 - RNA, 22 nt, Human
cucugagaaagcugugagcuaa

SEQ ID NO: 137119 - RNA, 22 nt, Human
cagccugacaccagcuuugggc

SEQ ID NO: 137120 - RNA, 22 nt, Human
cauugucacccaaagcucauag

SEQ ID NO: 137121 - RNA, 22 nt, Human
aggcucagauucacauuugguu

SEQ ID NO: 137122 - RNA, 22 nt, Human
acacugaaugcuguuuagaaau

SEQ ID NO: 137123 - RNA, 22 nt, Human
ccagggcaucacauccaguguu

SEQ ID NO: 137124 - RNA, 22 nt, Human
uuuuccucugcaauaaaagcag

SEQ ID NO: 137125 - RNA, 22 nt, Human
agggcagcauugccuuucucca

SEQ ID NO: 137126 - RNA, 19 nt, Human
auaaggcaauuggauuugg

SEQ ID NO: 137127 - RNA, 22 nt, Human
agaauguagucuuggagauuua

SEQ ID NO: 137128 - RNA, 22 nt, Human
agccuggauccuaggcucagcu

SEQ ID NO: 137129 - RNA, 22 nt, Human
agcuggaggauaacucacuucu

SEQ ID NO: 137130 - RNA, 22 nt, Human
agcugagcacauucaaacaggu

SEQ ID NO: 137131 - RNA, 22 nt, Human
cccuggagcaucucugcugucu

SEQ ID NO: 137132 - RNA, 22 nt, Human
gauggguggucucagacuugcc

SEQ ID NO: 137133 - RNA, 22 nt, Human
gugcuuccccaagccacagccu

SEQ ID NO: 137134 - RNA, 22 nt, Human
auacauacguacauacguaugu

SEQ ID NO: 137135 - RNA, 22 nt, Human
ggcagcuggggcagugcccugu

SEQ ID NO: 137136 - RNA, 22 nt, Human
ugcagaggagcuggaaggcugg

SEQ ID NO: 137137 - RNA, 22 nt, Human
cuggccugaggccgccuucaga

SEQ ID NO: 137138 - RNA, 17 nt, Human
cagacagauauccuggg

SEQ ID NO: 137139 - RNA, 22 nt, Human
uuucucucuggcccugauuguc

SEQ ID NO: 137140 - RNA, 22 nt, Human
ccagggugggaggcugaaggcg

SEQ ID NO: 137141 - RNA, 19 nt, Human
aggugaugugacucuagaa

SEQ ID NO: 137142 - RNA, 22 nt, Human
acuucuuucacaauguuucuag

SEQ ID NO: 137143 - RNA, 22 nt, Human
guucauuuuacuguaaauagca

SEQ ID NO: 137144 - RNA, 22 nt, Human
cuggguggcuguccagccagcc

SEQ ID NO: 137145 - RNA, 22 nt, Human
auucuccaucaccacuggcacu

SEQ ID NO: 137146 - RNA, 22 nt, Human
cgccucagccguggucaucuuc

SEQ ID NO: 137147 - RNA, 22 nt, Human
cuguaugaggaucagacuggac

SEQ ID NO: 137148 - RNA, 22 nt, Human
gcugcucuccauggccgugagu

SEQ ID NO: 137149 - RNA, 22 nt, Human
acauuucuuagccuaguuccag

SEQ ID NO: 137150 - RNA, 22 nt, Human
ggacaggguaaguacuagugug

SEQ ID NO: 137151 - RNA, 22 nt, Human
gucccucugugucccugcaguc

SEQ ID NO: 137152 - RNA, 22 nt, Human
cagcagaggaaagcaaaucuaa

SEQ ID NO: 137153 - RNA, 22 nt, Human
agaauccugaugaaaaggagag

SEQ ID NO: 137154 - RNA, 22 nt, Human
gcuccagaugaaaggccagagg

SEQ ID NO: 137155 - RNA, 22 nt, Human
cagcugggagcuccauuagaua

SEQ ID NO: 137156 - RNA, 21 nt, Human
acagccugucaucucaugguc

SEQ ID NO: 137157 - RNA, 22 nt, Human
ucugcaggaggcuggcugcagg

SEQ ID NO: 137158 - RNA, 22 nt, Human
cuggggcccaucgagggcugag

SEQ ID NO: 137159 - RNA, 22 nt, Human
augauuuccaguuguugcuaag

SEQ ID NO: 137160 - RNA, 21 nt, Human
ggcugguguuuagcugugaua

SEQ ID NO: 137161 - RNA, 21 nt, Human
cugcucuggggaccggcugug

SEQ ID NO: 137162 - RNA, 22 nt, Human
cagcucugugcaggccugggga

SEQ ID NO: 137163 - RNA, 22 nt, Human
gccaggcauucuagaaguagug

SEQ ID NO: 137164 - RNA, 22 nt, Human
uguacaaugccagggaacacca

SEQ ID NO: 137165 - RNA, 22 nt, Human
cuguguauugaaaaaggguuaa

SEQ ID NO: 137166 - RNA, 22 nt, Human
cacugaaggcuaggauuagaug

SEQ ID NO: 137167 - RNA, 22 nt, Human
aacacaaagaagcugcaggauc

SEQ ID NO: 137168 - RNA, 22 nt, Human
ugagagggcccagagcacacca

SEQ ID NO: 137169 - RNA, 22 nt, Human
augcaucuauucccaagggcag

SEQ ID NO: 137170 - RNA, 22 nt, Human
cagagcuguugcggggcuuggc

SEQ ID NO: 137171 - RNA, 22 nt, Human
gugugugucuccgcggccguag

SEQ ID NO: 137172 - RNA, 22 nt, Human
agcuuccuguugagagagggag

SEQ ID NO: 137173 - RNA, 18 nt, Human
acauuucuccuucugacc

SEQ ID NO: 137174 - RNA, 22 nt, Human
acauguuagaaaugcagaaucu

SEQ ID NO: 137175 - RNA, 22 nt, Human
agaauuuuugauuaucuacucg

SEQ ID NO: 137176 - RNA, 22 nt, Human
uacaguaaccagucuacuuaga

SEQ ID NO: 137177 - RNA, 22 nt, Human
uguuuuaugagccauauaaccu

SEQ ID NO: 137178 - RNA, 22 nt, Human
cugggcagugguggcaucuuug

SEQ ID NO: 137179 - RNA, 22 nt, Human
ugccacagaggugaagcccacu

SEQ ID NO: 137180 - RNA, 22 nt, Human
auaaggaaugauguaucaguuu

SEQ ID NO: 137181 - RNA, 22 nt, Human
aaguaugacauuuaagacaauu

SEQ ID NO: 137182 - RNA, 22 nt, Human
ggaaggaggaugcucuggccuu

SEQ ID NO: 137183 - RNA, 22 nt, Human
ugggcagauguggcucuccuug

SEQ ID NO: 137184 - RNA, 19 nt, Human
ggcagaagguguaggggga

SEQ ID NO: 137185 - RNA, 22 nt, Human
caggggcuguggcacauggugu

SEQ ID NO: 137186 - RNA, 22 nt, Human
ggcagcagcaagguuggagcug

SEQ ID NO: 137187 - RNA, 22 nt, Human
uaccauuucauucuuuccucau

SEQ ID NO: 137188 - RNA, 22 nt, Human
ggcaguggugggaggcucgcuc

SEQ ID NO: 137189 - RNA, 22 nt, Human
ucccuggggauguuggccugcc

SEQ ID NO: 137190 - RNA, 22 nt, Human
gugcuuucugcugcauuccucu

SEQ ID NO: 137191 - RNA, 22 nt, Human
ccaagggcucugacuugccugc

SEQ ID NO: 137192 - RNA, 22 nt, Human
ucauuuguugcuguuaccugag

SEQ ID NO: 137193 - RNA, 22 nt, Human
aaucacaauuacuuuugcacca

SEQ ID NO: 137194 - RNA, 22 nt, Human
aagcacuuagaagagugccugc

SEQ ID NO: 137195 - RNA, 22 nt, Human
acaguagagcauuuguuuugau

SEQ ID NO: 137196 - RNA, 22 nt, Human
ucaggauggcuucugcaucaaa

SEQ ID NO: 137197 - RNA, 22 nt, Human
uggugcugacaguucugagugc

SEQ ID NO: 137198 - RNA, 22 nt, Human
ggaggcucugcuccguguguuc

SEQ ID NO: 137199 - RNA, 22 nt, Human
ggucucaggagacuggagagca

SEQ ID NO: 137200 - RNA, 22 nt, Human
agguggggugagcugcagacua

SEQ ID NO: 137201 - RNA, 22 nt, Human
gaagcagcaaguauaggacagg

SEQ ID NO: 137202 - RNA, 22 nt, Human
uggguagagcaggcuggggcuu

SEQ ID NO: 137203 - RNA, 22 nt, Human
augauacaucuucaugucagug

SEQ ID NO: 137204 - RNA, 22 nt, Human
uguguauuaccauuuuacagcu

SEQ ID NO: 137205 - RNA, 22 nt, Human
cugggagauugcuagagaugca

SEQ ID NO: 137206 - RNA, 22 nt, Human
agaguggggaagguguugagaa

SEQ ID NO: 137207 - RNA, 22 nt, Human
ugucuucagcaaaugccuuucu

SEQ ID NO: 137208 - RNA, 22 nt, Human
ggaggagacaguaaaaagcacg

SEQ ID NO: 137209 - RNA, 22 nt, Human
cuuaaauuuucaucuacaagaa

SEQ ID NO: 137210 - RNA, 22 nt, Human
ugggggagauuagagcuucuua

SEQ ID NO: 137211 - RNA, 22 nt, Human
uccuucaaagcuccuagugagc

SEQ ID NO: 137212 - RNA, 22 nt, Human
uacagauagaauuagugaguua

SEQ ID NO: 137213 - RNA, 22 nt, Human
agagcugcccacacagcagauu

SEQ ID NO: 137214 - RNA, 22 nt, Human
agagcagccugugaugaugcac

SEQ ID NO: 137215 - RNA, 22 nt, Human
ccagccagccuugaucugagua

SEQ ID NO: 137216 - RNA, 23 nt, Human
uaguuauuuucucuguaauuugc

SEQ ID NO: 137217 - RNA, 19 nt, Human
gccagcagaaugaugaggc

SEQ ID NO: 137218 - RNA, 22 nt, Human
agcaggcagccauuuggaaggc

SEQ ID NO: 137219 - RNA, 22 nt, Human
aaacuguauauuuauggcaugu

SEQ ID NO: 137220 - RNA, 22 nt, Human
aaugcuguauaucuuagcuaau

SEQ ID NO: 137221 - RNA, 22 nt, Human
ugaaggccagcucuuuaucagc

SEQ ID NO: 137222 - RNA, 18 nt, Human
cacaggcucccagugagg

SEQ ID NO: 137223 - RNA, 22 nt, Human
caggaggccaacugugggacuu

SEQ ID NO: 137224 - RNA, 22 nt, Human
ccuccaaguuugacucaggaca

SEQ ID NO: 137225 - RNA, 20 nt, Human
uuauguguaccugugcuccc

SEQ ID NO: 137226 - RNA, 22 nt, Human
cagcagggaagcugugcuguuu

SEQ ID NO: 137227 - RNA, 22 nt, Human
ccuggguggcagagguugcagu

SEQ ID NO: 137228 - RNA, 22 nt, Human
uggagcaggugccaggugugug

SEQ ID NO: 137229 - RNA, 22 nt, Human
uggcucuguuuuaugaguacca

SEQ ID NO: 137230 - RNA, 22 nt, Human
ucccugggcaucacguugcuuc

SEQ ID NO: 137231 - RNA, 22 nt, Human
uagggcuauaagagaauaagac

SEQ ID NO: 137232 - RNA, 22 nt, Human
gcagguggauuaucagaagugc

SEQ ID NO: 137233 - RNA, 22 nt, Human
uaugcacaguuacaagaauauc

SEQ ID NO: 137234 - RNA, 22 nt, Human
cuccucugucuggcccugagcc

SEQ ID NO: 137235 - RNA, 22 nt, Human
ggcaucuguccaucucuccagc

SEQ ID NO: 137236 - RNA, 22 nt, Human
gugacugugagucgcugugaca

SEQ ID NO: 137237 - RNA, 21 nt, Human
guggcccugguguggcugcac

SEQ ID NO: 137238 - RNA, 19 nt, Human
uugaaauuguuugauaugg

SEQ ID NO: 137239 - RNA, 22 nt, Human
agaugagggguagaaaggacuu

SEQ ID NO: 137240 - RNA, 22 nt, Human
gcugagcugcuguucauccugc

SEQ ID NO: 137241 - RNA, 22 nt, Human
ugucuucaguaaaauacacuau

SEQ ID NO: 137242 - RNA, 22 nt, Human
ccagcugagaaguguaaaguga

SEQ ID NO: 137243 - RNA, 22 nt, Human
ucuuuccuuagaauaauucuuu

SEQ ID NO: 137244 - RNA, 22 nt, Human
aagcugccauagaacgagaggu

SEQ ID NO: 137245 - RNA, 22 nt, Human
auacaguauuaccuguucagga

SEQ ID NO: 137246 - RNA, 22 nt, Human
ucuuuccuaggugauaugcaau

SEQ ID NO: 137247 - RNA, 22 nt, Human
accguauauguuugcugugccc

SEQ ID NO: 137248 - RNA, 22 nt, Human
aacauacauauuucagugucca

SEQ ID NO: 137249 - RNA, 22 nt, Human
ucuggccugaaaguccaugcuu

SEQ ID NO: 137250 - RNA, 22 nt, Human
agcuuccucaccucagaggucu

SEQ ID NO: 137251 - RNA, 22 nt, Human
ggggcuguuuuuggaauggcug

SEQ ID NO: 137252 - RNA, 22 nt, Human
aagcagccaccucaucuccacu

SEQ ID NO: 137253 - RNA, 22 nt, Human
aucuacagcugucugcacagua

SEQ ID NO: 137254 - RNA, 22 nt, Human
guggagccaggggcuguaggua

SEQ ID NO: 137255 - RNA, 22 nt, Human
cagaauggcuuuuauggcucag

SEQ ID NO: 137256 - RNA, 22 nt, Human
ucccagaguauuagcaauugcu

SEQ ID NO: 137257 - RNA, 18 nt, Human
cucaccauucugcccaau

SEQ ID NO: 137258 - RNA, 22 nt, Human
uugcuuccucgaggccagcgug

SEQ ID NO: 137259 - RNA, 22 nt, Human
ccacaggggucucuguagcuga

SEQ ID NO: 137260 - RNA, 22 nt, Human
aagcaggcauuccagagacaau

SEQ ID NO: 137261 - RNA, 22 nt, Human
ccagcaggcagucauauccuuu

SEQ ID NO: 137262 - RNA, 22 nt, Human
aagcugcccucauucccagugc

SEQ ID NO: 137263 - RNA, 22 nt, Human
guguguggcaaacugggccugc

SEQ ID NO: 137264 - RNA, 20 nt, Human
augugucuguaaacaacucu

SEQ ID NO: 137265 - RNA, 22 nt, Human
gauggcagcagcagccagggau

SEQ ID NO: 137266 - RNA, 22 nt, Human
ggcugccucugaugugcagacg

SEQ ID NO: 137267 - RNA, 22 nt, Human
cuugggagacacaagaagacau

SEQ ID NO: 137268 - RNA, 22 nt, Human
uugacaauugggagauauaaag

SEQ ID NO: 137269 - RNA, 22 nt, Human
uacaggauaucacuucauuucu

SEQ ID NO: 137270 - RNA, 22 nt, Human
ugguuugcccacucgagugauu

SEQ ID NO: 137271 - RNA, 22 nt, Human
caggagcagaggguggucagca

SEQ ID NO: 137272 - RNA, 22 nt, Human
aaauaauugaguuggucaauau

SEQ ID NO: 137273 - RNA, 22 nt, Human
cagccucucuguaucucaggau

SEQ ID NO: 137274 - RNA, 22 nt, Human
agccucugauggcucccaagga

SEQ ID NO: 137275 - RNA, 22 nt, Human
gaggacagugugaucugccagc

SEQ ID NO: 137276 - RNA, 22 nt, Human
uuccauuuauucuuguccagau

SEQ ID NO: 137277 - RNA, 22 nt, Human
ucugaaagaagggcagucuuuu

SEQ ID NO: 137278 - RNA, 22 nt, Human
aggcuucuuagauuggcuggag

SEQ ID NO: 137279 - RNA, 22 nt, Human
gaggagcacaugaggcugaggg

SEQ ID NO: 137280 - RNA, 21 nt, Human
acaguacuugagaucuuuuga

SEQ ID NO: 137281 - RNA, 22 nt, Human
ucugagaggauuccugucccga

SEQ ID NO: 137282 - RNA, 22 nt, Human
ccagucacuggaaaaugggaau

SEQ ID NO: 137283 - RNA, 22 nt, Human
ccacugucagaggggcugugcc

SEQ ID NO: 137284 - RNA, 22 nt, Human
ugcaauaacuacuuuaauguug

SEQ ID NO: 137285 - RNA, 22 nt, Human
uggaccugcuggaugggcaggu

SEQ ID NO: 137286 - RNA, 22 nt, Human
uccagagguauguagagaguau

SEQ ID NO: 137287 - RNA, 22 nt, Human
uugacaagaaucguugccuugg

SEQ ID NO: 137288 - RNA, 22 nt, Human
gaaagaagcuuuagauggcuau

SEQ ID NO: 137289 - RNA, 22 nt, Human
auaaggcagucacuggaauguu

SEQ ID NO: 137290 - RNA, 22 nt, Human
agggccucugacgcccccagcc

SEQ ID NO: 137291 - RNA, 22 nt, Human
gcagagguggcaucugggcucu

SEQ ID NO: 137292 - RNA, 21 nt, Human
acuuuacaauuuacauaguga

SEQ ID NO: 137293 - RNA, 22 nt, Human
auuugcagagcucugaauuuug

SEQ ID NO: 137294 - RNA, 22 nt, Human
auguguauuuccaucgaucagc

SEQ ID NO: 137295 - RNA, 22 nt, Human
uguguacaggccuugcuagacu

SEQ ID NO: 137296 - RNA, 22 nt, Human
aggcugugcucagccaauggga

SEQ ID NO: 137297 - RNA, 22 nt, Human
acaggcagcacuaaucucuggu

SEQ ID NO: 137298 - RNA, 22 nt, Human
acagugauugguuuggggguga

SEQ ID NO: 137299 - RNA, 22 nt, Human
uuagggcuuuucugaauaggcc

SEQ ID NO: 137300 - RNA, 22 nt, Human
cagagacagaaaauggaucuag

SEQ ID NO: 137301 - RNA, 22 nt, Human
gccagggaacccaagggccuca

SEQ ID NO: 137302 - RNA, 22 nt, Human
agucucugccagcuuguccucu

SEQ ID NO: 137303 - RNA, 22 nt, Human
auguuuuauauuuugcagcagu

SEQ ID NO: 137304 - RNA, 22 nt, Human
cuucuuuaccaagagauagagu

SEQ ID NO: 137305 - RNA, 22 nt, Human
acagcaagccagcuugucacug

SEQ ID NO: 137306 - RNA, 22 nt, Human
ucucuguggugggaggcugagu

SEQ ID NO: 137307 - RNA, 22 nt, Human
ugggugaggaugaugaggcagc

SEQ ID NO: 137308 - RNA, 22 nt, Human
ucuggauggucagcucuuccug

SEQ ID NO: 137309 - RNA, 22 nt, Human
gugggugucucaagaauggggg

SEQ ID NO: 137310 - RNA, 22 nt, Human
augucacagucugacucaguga

SEQ ID NO: 137311 - RNA, 22 nt, Human
gugugucagguacugugcuagg

SEQ ID NO: 137312 - RNA, 20 nt, Human
uggagcuguaaucuugucug

SEQ ID NO: 137313 - RNA, 22 nt, Human
ggugugugguuuugauacaguc

SEQ ID NO: 137314 - RNA, 22 nt, Human
ugugccugaguuggcugaguac

SEQ ID NO: 137315 - RNA, 20 nt, Human
agcaggaaugaugcuuucau

SEQ ID NO: 137316 - RNA, 22 nt, Human
ucuuuccuguaacugcuguuca

SEQ ID NO: 137317 - RNA, 22 nt, Human
cccaccaguacagaugguagau

SEQ ID NO: 137318 - RNA, 22 nt, Human
uggccugccugggagcagcagg

SEQ ID NO: 137319 - RNA, 22 nt, Human
aagaguuuucuauaaucuuggc

SEQ ID NO: 137320 - RNA, 22 nt, Human
uuccaaaggaauggggagcuau

SEQ ID NO: 137321 - RNA, 22 nt, Human
uugucugucccagcuugugcau

SEQ ID NO: 137322 - RNA, 22 nt, Human
gcagcuggacccacacggcuua

SEQ ID NO: 137323 - RNA, 22 nt, Human
ucacaugcccuguauuuaccag

SEQ ID NO: 137324 - RNA, 22 nt, Human
ggcagcucugugucugggaagc

SEQ ID NO: 137325 - RNA, 22 nt, Human
cuguccucuguccucagcagga

SEQ ID NO: 137326 - RNA, 19 nt, Human
aggucauugauagugcagg

SEQ ID NO: 137327 - RNA, 22 nt, Human
ugggccacuugaaaguggaugu

SEQ ID NO: 137328 - RNA, 22 nt, Human
aaggagaaaugguagaugugca

SEQ ID NO: 137329 - RNA, 19 nt, Human
cuauacagccucugaggaa

SEQ ID NO: 137330 - RNA, 22 nt, Human
cucucugagugagggacaagcu

SEQ ID NO: 137331 - RNA, 22 nt, Human
gggcucugggaugcucuuagag

SEQ ID NO: 137332 - RNA, 21 nt, Human
ugggcagauggcaguguggcu

SEQ ID NO: 137333 - RNA, 22 nt, Human
ucuggcuggcagugauggugug

SEQ ID NO: 137334 - RNA, 22 nt, Human
gcacagaacagagaaauagcca

SEQ ID NO: 137335 - RNA, 22 nt, Human
uccugcagagacagaggccuca

SEQ ID NO: 137336 - RNA, 21 nt, Human
agcagaggcagaauguaugca

SEQ ID NO: 137337 - RNA, 22 nt, Human
caggaggaaaugugacccugcu

SEQ ID NO: 137338 - RNA, 22 nt, Human
agucacuguucugucaugucaa

SEQ ID NO: 137339 - RNA, 22 nt, Human
ccaggagucaauaaaggaagcu

SEQ ID NO: 137340 - RNA, 20 nt, Human
agcuggccuguccuaggccu

SEQ ID NO: 137341 - RNA, 22 nt, Human
gggacuggaacuacuggugcag

SEQ ID NO: 137342 - RNA, 22 nt, Human
cccagccuggugcacugugggg

SEQ ID NO: 137343 - RNA, 22 nt, Human
uacaguuucuguccuuguggag

SEQ ID NO: 137344 - RNA, 22 nt, Human
uuuccugucuuuugugaaggau

SEQ ID NO: 137345 - RNA, 22 nt, Human
aagacuuucucccaaauccuca

SEQ ID NO: 137346 - RNA, 22 nt, Human
gugccugguuuggggaauguuc

SEQ ID NO: 137347 - RNA, 22 nt, Human
uccugagauucugcauuucuaa

SEQ ID NO: 137348 - RNA, 22 nt, Human
gccugagagucugcauuucuaa

SEQ ID NO: 137349 - RNA, 22 nt, Human
uggcauguggcaauguugggau

SEQ ID NO: 137350 - RNA, 22 nt, Human
cuccauugaacauccucucaga

SEQ ID NO: 137351 - RNA, 22 nt, Human
gcaggguauaauacuuagguga

SEQ ID NO: 137352 - RNA, 22 nt, Human
aguuuauguaaaauuaguaaug

SEQ ID NO: 137353 - RNA, 22 nt, Human
uucaguaugcugaaugauuuuu

SEQ ID NO: 137354 - RNA, 22 nt, Human
gcacacagauuaggaaacagaa

SEQ ID NO: 137355 - RNA, 22 nt, Human
uccaggagagguguggggacug

SEQ ID NO: 137356 - RNA, 22 nt, Human
acugucuuccaggucuggaggu

SEQ ID NO: 137357 - RNA, 22 nt, Human
ucaagcaggguagcaagcuggu

SEQ ID NO: 137358 - RNA, 22 nt, Human
ugccugaguuuaacccucagag

SEQ ID NO: 137359 - RNA, 22 nt, Human
gcugagcuagaaaaggaccaca

SEQ ID NO: 137360 - RNA, 18 nt, Human
agaguguucucagugaaa

SEQ ID NO: 137361 - RNA, 22 nt, Human
uugugaaauguuucaaaauagu

SEQ ID NO: 137362 - RNA, 22 nt, Human
ggcucccugccuguccucaguc

SEQ ID NO: 137363 - RNA, 22 nt, Human
uggagaugaauauguguaccug

SEQ ID NO: 137364 - RNA, 22 nt, Human
aaagucauguaaugauaugauu

SEQ ID NO: 137365 - RNA, 22 nt, Human
ucuuugcauggacauguguuuu

SEQ ID NO: 137366 - RNA, 22 nt, Human
aauaauguugacgauagucuua

SEQ ID NO: 137367 - RNA, 22 nt, Human
cacauaaguggguuccauugca

SEQ ID NO: 137368 - RNA, 22 nt, Human
gaggggcuggcacgauggcugc

SEQ ID NO: 137369 - RNA, 22 nt, Human
ucacaacuugaagcugauuuaa

SEQ ID NO: 137370 - RNA, 22 nt, Human
uagcuuuuauccacugcuuuug

SEQ ID NO: 137371 - RNA, 22 nt, Human
uguguccauucaggcacugacc

SEQ ID NO: 137372 - RNA, 22 nt, Human
uuacagaaucuacucgugguga

SEQ ID NO: 137373 - RNA, 22 nt, Human
ucuucagagugaaagucuguga

SEQ ID NO: 137374 - RNA, 22 nt, Human
uggccuugggcagguggccugc

SEQ ID NO: 137375 - RNA, 22 nt, Human
gccugcagggugaugggcugcc

SEQ ID NO: 137376 - RNA, 22 nt, Human
ugaaaaggagccuuagguaggu

SEQ ID NO: 137377 - RNA, 22 nt, Human
aggaagccuggggcugcccucg

SEQ ID NO: 137378 - RNA, 22 nt, Human
gugcaugcacacaugugugagg

SEQ ID NO: 137379 - RNA, 22 nt, Human
uuguuaaaaugcauauucuggu

SEQ ID NO: 137380 - RNA, 22 nt, Human
uauuucugauugcucaugaggc

SEQ ID NO: 137381 - RNA, 22 nt, Human
ucagcugcucuguugagcugaa

SEQ ID NO: 137382 - RNA, 22 nt, Human
aggugaguuacaggaggagguc

SEQ ID NO: 137383 - RNA, 22 nt, Human
uucuucuucaagugcugcauuc

SEQ ID NO: 137384 - RNA, 22 nt, Human
uaaauucuacaacuucaaagau

SEQ ID NO: 137385 - RNA, 22 nt, Human
cucuuuacugcuacuacaaaga

SEQ ID NO: 137386 - RNA, 22 nt, Human
uaauuuaauccaaguguuacau

SEQ ID NO: 137387 - RNA, 22 nt, Human
acauguauacaauguguaauga

SEQ ID NO: 137388 - RNA, 22 nt, Human
guucuccauucagcuuccugug

SEQ ID NO: 137389 - RNA, 22 nt, Human
augauucagcaauuuuauaucu

SEQ ID NO: 137390 - RNA, 22 nt, Human
cuucuuuagggaucucuugcug

SEQ ID NO: 137391 - RNA, 22 nt, Human
gcaaaugcuaaaguguagagac

SEQ ID NO: 137392 - RNA, 22 nt, Human
ccagaaaaugcagaacauagaa

SEQ ID NO: 137393 - RNA, 22 nt, Human
accucaggauguggacacagaa

SEQ ID NO: 137394 - RNA, 20 nt, Human
uauuucugggcaaccauuua

SEQ ID NO: 137395 - RNA, 22 nt, Human
gaggccacagcuaucagggaca

SEQ ID NO: 137396 - RNA, 22 nt, Human
cccagcucucgcacuuacuagc

SEQ ID NO: 137397 - RNA, 22 nt, Human
uuucuucauagaccuugucuug

SEQ ID NO: 137398 - RNA, 22 nt, Human
uucuguguucugugcaaugagc

SEQ ID NO: 137399 - RNA, 22 nt, Human
uccuugaaaagaaugucuccau

SEQ ID NO: 137400 - RNA, 22 nt, Human
ccucacuggccagccaggggug

SEQ ID NO: 137401 - RNA, 22 nt, Human
gggacuggaguagaggccggug

SEQ ID NO: 137402 - RNA, 22 nt, Human
ggcgugggaaguggggcuucug

SEQ ID NO: 137403 - RNA, 22 nt, Human
ccagagcaauucucacagaacu

SEQ ID NO: 137404 - RNA, 21 nt, Human
uucaaugaaaacaaagugagg

SEQ ID NO: 137405 - RNA, 22 nt, Human
gcuucccacagcuggacugggg

SEQ ID NO: 137406 - RNA, 22 nt, Human
ggcacucagagauucaggcugu

SEQ ID NO: 137407 - RNA, 22 nt, Human
guuuacaguggcuucauuggau

SEQ ID NO: 137408 - RNA, 22 nt, Human
cagaauuuuucgaauguacugu

SEQ ID NO: 137409 - RNA, 22 nt, Human
gagcugugagggacacauugcu

SEQ ID NO: 137410 - RNA, 22 nt, Human
uuguuacacauaauaacauuuu

SEQ ID NO: 137411 - RNA, 22 nt, Human
gauggggaugagaagugagcag

SEQ ID NO: 137412 - RNA, 22 nt, Human
ggcaugggguguauguggcacg

SEQ ID NO: 137413 - RNA, 20 nt, Human
acaggggcagcacaauaaug

SEQ ID NO: 137414 - RNA, 22 nt, Human
agagagcccgggccagggcaca

SEQ ID NO: 137415 - RNA, 22 nt, Human
aaggcugagagucacaguccua

SEQ ID NO: 137416 - RNA, 21 nt, Human
cagagguggccugaccucuga

SEQ ID NO: 137417 - RNA, 22 nt, Human
uggaaggcaugggaacuguucu

SEQ ID NO: 137418 - RNA, 22 nt, Human
agccuccacagaugcaaagggc

SEQ ID NO: 137419 - RNA, 22 nt, Human
ucagagugcagcgggaggcugg

SEQ ID NO: 137420 - RNA, 22 nt, Human
acuccuggggauccauuccuuu

SEQ ID NO: 137421 - RNA, 22 nt, Human
uagggcagccacccaggcugcu

SEQ ID NO: 137422 - RNA, 20 nt, Human
gcuguguagcagugugcagu

SEQ ID NO: 137423 - RNA, 23 nt, Human
guguguggaaagugcaugggccu

SEQ ID NO: 137424 - RNA, 22 nt, Human
aggccugggacgggagccguga

SEQ ID NO: 137425 - RNA, 20 nt, Human
cucugcagcaaggccugggu

SEQ ID NO: 137426 - RNA, 22 nt, Human
ggcagcuuuuaucccugacaga

SEQ ID NO: 137427 - RNA, 22 nt, Human
gccaggcagauaugugagcuua

SEQ ID NO: 137428 - RNA, 22 nt, Human
caaggaaaaagcgagcucgggg

SEQ ID NO: 137429 - RNA, 22 nt, Human
uaguaucuuucuauauuuccca

SEQ ID NO: 137430 - RNA, 22 nt, Human
aguguuccugcucucaggaagc

SEQ ID NO: 137431 - RNA, 19 nt, Human
cugugcaggccgggcugag

SEQ ID NO: 137432 - RNA, 22 nt, Human
uugacagcuauuuugcuuugau

SEQ ID NO: 137433 - RNA, 23 nt, Human
ucccagggaaggugagcgaggcu

SEQ ID NO: 137434 - RNA, 22 nt, Human
ggucucagcaguugcuuugacu

SEQ ID NO: 137435 - RNA, 22 nt, Human
augugcaugcacuuacaugugu

SEQ ID NO: 137436 - RNA, 22 nt, Human
ccagagccucuuaugaagaucg

SEQ ID NO: 137437 - RNA, 22 nt, Human
cugggacagcugagacaggaga

SEQ ID NO: 137438 - RNA, 22 nt, Human
aaucaguuaggguguuaaugag

SEQ ID NO: 137439 - RNA, 22 nt, Human
agggcugcaggcaagauauggc

SEQ ID NO: 137440 - RNA, 22 nt, Human
uucuuucccagaagauauguuu

SEQ ID NO: 137441 - RNA, 22 nt, Human
uccugccucuuuucuuauucca

SEQ ID NO: 137442 - RNA, 22 nt, Human
ucugaggcauaaccuguucugc

SEQ ID NO: 137443 - RNA, 22 nt, Human
uggcucaggagggaucuuugcu

SEQ ID NO: 137444 - RNA, 22 nt, Human
agcagccaaccuuacauucauc

SEQ ID NO: 137445 - RNA, 22 nt, Human
uccucagggcggccuccgucuu

SEQ ID NO: 137446 - RNA, 22 nt, Human
acaguauaaacuccuaaaagcc

SEQ ID NO: 137447 - RNA, 22 nt, Human
uggagccaggagccugggaguc

SEQ ID NO: 137448 - RNA, 22 nt, Human
gucaggauuaaugggaguaugc

SEQ ID NO: 137449 - RNA, 22 nt, Human
gaaggagagggucaaggauaau

SEQ ID NO: 137450 - RNA, 20 nt, Human
augccucuaauuuugcaaac

SEQ ID NO: 137451 - RNA, 22 nt, Human
caagggaguuacugagggcggg

SEQ ID NO: 137452 - RNA, 20 nt, Human
uccaagggcagcagaaucag

SEQ ID NO: 137453 - RNA, 22 nt, Human
agucauauguggcauuuucuaa

SEQ ID NO: 137454 - RNA, 22 nt, Human
uccauaagcagguucuuccuga

SEQ ID NO: 137455 - RNA, 22 nt, Human
cauguguggucuguggcuaucu

SEQ ID NO: 137456 - RNA, 22 nt, Human
gggcuacagacaugcucuaagc

SEQ ID NO: 137457 - RNA, 22 nt, Human
cacagaggacuguagcggggag

SEQ ID NO: 137458 - RNA, 22 nt, Human
aggcagcaugcucugcuucuac

SEQ ID NO: 137459 - RNA, 22 nt, Human
gcucagagauggggaaugaaaa

SEQ ID NO: 137460 - RNA, 23 nt, Human
ucacacagcuggucagguacaga

SEQ ID NO: 137461 - RNA, 22 nt, Human
aauguguguauuucuaggcgag

SEQ ID NO: 137462 - RNA, 22 nt, Human
uugggcugaaguagagggcaga

SEQ ID NO: 137463 - RNA, 22 nt, Human
ugugggcucccccucacucugu

SEQ ID NO: 137464 - RNA, 22 nt, Human
ucagucuucccuccagugcaac

SEQ ID NO: 137465 - RNA, 22 nt, Human
uuguguguuuguagaaaaucca

SEQ ID NO: 137466 - RNA, 22 nt, Human
cucccaggguagggagagacua

SEQ ID NO: 137467 - RNA, 22 nt, Human
uuuccucuuuguaccuugacua

SEQ ID NO: 137468 - RNA, 18 nt, Human
acauuucuaggugaaagc

SEQ ID NO: 137469 - RNA, 22 nt, Human
gcugcuguacuuggggggugcu

SEQ ID NO: 137470 - RNA, 22 nt, Human
caggugccucaggaugagacaa

SEQ ID NO: 137471 - RNA, 22 nt, Human
uucaggauucucucccauuuac

SEQ ID NO: 137472 - RNA, 22 nt, Human
auggcugucacgccacugugag

SEQ ID NO: 137473 - RNA, 22 nt, Human
aaguucaagaucaagguuccag

SEQ ID NO: 137474 - RNA, 22 nt, Human
cuuaacagcaagaucuguguca

SEQ ID NO: 137475 - RNA, 22 nt, Human
cucugagagagcuggugagcac

SEQ ID NO: 137476 - RNA, 22 nt, Human
ucucugguggcuccaucaguag

SEQ ID NO: 137477 - RNA, 22 nt, Human
ugaaguccuagaacuccuggua

SEQ ID NO: 137478 - RNA, 22 nt, Human
gguggcugcaauggcuaacuuc

SEQ ID NO: 137479 - RNA, 22 nt, Human
agagaaaagaguucaggcuuug

SEQ ID NO: 137480 - RNA, 22 nt, Human
gcugcugguccucagagcucau

SEQ ID NO: 137481 - RNA, 22 nt, Human
gauaugaaguggcauugugaag

SEQ ID NO: 137482 - RNA, 20 nt, Human
ugcucaggauggagaggugu

SEQ ID NO: 137483 - RNA, 22 nt, Human
uaucuaaauggaauauuccaga

SEQ ID NO: 137484 - RNA, 22 nt, Human
ugcauggaggaagaugaaugca

SEQ ID NO: 137485 - RNA, 22 nt, Human
uggcuucagacuucugcuacgu

SEQ ID NO: 137486 - RNA, 22 nt, Human
uagggcuauucugaguaauaau

SEQ ID NO: 137487 - RNA, 22 nt, Human
acaguacugaguacugaguugg

SEQ ID NO: 137488 - RNA, 22 nt, Human
gcagagcuguuaauggagcuga

SEQ ID NO: 137489 - RNA, 22 nt, Human
aaacuuuuccugcucuuguccu

SEQ ID NO: 137490 - RNA, 22 nt, Human
cuguggcucaggccuguaagcc

SEQ ID NO: 137491 - RNA, 22 nt, Human
cagcccuggugccaagguuccc

SEQ ID NO: 137492 - RNA, 22 nt, Human
caugugucaaaugauguagcug

SEQ ID NO: 137493 - RNA, 22 nt, Human
cccagaggugcuucagaggugc

SEQ ID NO: 137494 - RNA, 22 nt, Human
gcugccaccguggagaugagug

SEQ ID NO: 137495 - RNA, 22 nt, Human
ggugacugguuuaucuggcagu

SEQ ID NO: 137496 - RNA, 22 nt, Human
uggcugugauuugcacgagaug

SEQ ID NO: 137497 - RNA, 22 nt, Human
ucaaaugcugccuuugugugcc

SEQ ID NO: 137498 - RNA, 19 nt, Human
aggcagcacccaguccuug

SEQ ID NO: 137499 - RNA, 22 nt, Human
cacagggcuucucauggggugc

SEQ ID NO: 137500 - RNA, 22 nt, Human
cugcuuugauuagaagaguaca

SEQ ID NO: 137501 - RNA, 22 nt, Human
cagugcaguuucccagaugcug

SEQ ID NO: 137502 - RNA, 22 nt, Human
augucacagcucccauuccucc

SEQ ID NO: 137503 - RNA, 22 nt, Human
gagccaggcccguacuugcugu

SEQ ID NO: 137504 - RNA, 22 nt, Human
aggcugugaguuuugucucaga

SEQ ID NO: 137505 - RNA, 22 nt, Human
ccuccaggauaagucagggccu

SEQ ID NO: 137506 - RNA, 22 nt, Human
cagcuggcauaccugggcccgg

SEQ ID NO: 137507 - RNA, 22 nt, Human
agucccagaugacccagcuacu

SEQ ID NO: 137508 - RNA, 22 nt, Human
uuuacagaaugucaauuucuau

SEQ ID NO: 137509 - RNA, 22 nt, Human
uuuucaguugugcucucuaguu

SEQ ID NO: 137510 - RNA, 22 nt, Human
gaguauaugacuuucuuuugca

SEQ ID NO: 137511 - RNA, 22 nt, Human
gaggcugcugagagcccuguuu

SEQ ID NO: 137512 - RNA, 22 nt, Human
cuguggcucaaaaucccaugau

SEQ ID NO: 137513 - RNA, 22 nt, Human
uggcagggccuaccccaauauc

SEQ ID NO: 137514 - RNA, 22 nt, Human
ccugggagggcaagugcugaug

SEQ ID NO: 137515 - RNA, 22 nt, Human
gcaggaguuaggcgucguggau

SEQ ID NO: 137516 - RNA, 22 nt, Human
acuaguauucuuggucuuguau

SEQ ID NO: 137517 - RNA, 22 nt, Human
ccagccagucccgcaugaccgc

SEQ ID NO: 137518 - RNA, 22 nt, Human
agguggggaaaccagcgauccc

SEQ ID NO: 137519 - RNA, 22 nt, Human
uuuagaguugaguauucauugg

SEQ ID NO: 137520 - RNA, 22 nt, Human
aaaaccaggcguuuccuauuau

SEQ ID NO: 137521 - RNA, 22 nt, Human
gcaggagagccagcaggcuucc

SEQ ID NO: 137522 - RNA, 17 nt, Human
aggcuggcucacaggga

SEQ ID NO: 137523 - RNA, 22 nt, Human
uaggccagcccuuaguccuguc

SEQ ID NO: 137524 - RNA, 17 nt, Human
ccugggaggaguuauga

SEQ ID NO: 137525 - RNA, 22 nt, Human
augugaaacugaagcauccaua

SEQ ID NO: 137526 - RNA, 22 nt, Human
uaagaaauuuaguuauagaaug

SEQ ID NO: 137527 - RNA, 22 nt, Human
guggcucuaggugagcauggag

SEQ ID NO: 137528 - RNA, 22 nt, Human
cugugugugucugcagcauacu

SEQ ID NO: 137529 - RNA, 22 nt, Human
gcaggcucuucuuucugcccag

SEQ ID NO: 137530 - RNA, 22 nt, Human
uuagucuucuuccuuauauguu

SEQ ID NO: 137531 - RNA, 22 nt, Human
cccaguccuaaagcagacgcca

SEQ ID NO: 137532 - RNA, 22 nt, Human
aauacaguagguaauaguucau

SEQ ID NO: 137533 - RNA, 22 nt, Human
uuauuuugagagaaugugugcu

SEQ ID NO: 137534 - RNA, 22 nt, Human
aaggaagacacagaugaaguga

SEQ ID NO: 137535 - RNA, 22 nt, Human
guccucaguaagagggccucug

SEQ ID NO: 137536 - RNA, 22 nt, Human
cagagccugcucacgucucugu

SEQ ID NO: 137537 - RNA, 22 nt, Human
aauacauauggaauuccauguu

SEQ ID NO: 137538 - RNA, 22 nt, Human
cuguggcuuugugucuauugua

SEQ ID NO: 137539 - RNA, 18 nt, Human
gagguccugcucuagccc

SEQ ID NO: 137540 - RNA, 22 nt, Human
ucauucuuuaccaaguugucac

SEQ ID NO: 137541 - RNA, 22 nt, Human
cagacuuucaaggagugaaggc

SEQ ID NO: 137542 - RNA, 22 nt, Human
gcugcccaguucugcugcugcc

SEQ ID NO: 137543 - RNA, 22 nt, Human
ucugugugggauaguuugagga

SEQ ID NO: 137544 - RNA, 22 nt, Human
cagcuggccugaucccuguggc

SEQ ID NO: 137545 - RNA, 22 nt, Human
gaggccagcgcgcagcacuuuu

SEQ ID NO: 137546 - RNA, 22 nt, Human
uuguaacaggcacucugugcca

SEQ ID NO: 137547 - RNA, 22 nt, Human
uuuucuccagggaacaagguga

SEQ ID NO: 137548 - RNA, 22 nt, Human
guuugucuuaauuaggcaucga

SEQ ID NO: 137549 - RNA, 18 nt, Human
aggcccuggccucgaaca

SEQ ID NO: 137550 - RNA, 22 nt, Human
uucuuauagaagcaaccauugu

SEQ ID NO: 137551 - RNA, 22 nt, Human
ggcuggaaaagacaaagcuauu

SEQ ID NO: 137552 - RNA, 22 nt, Human
aguggcugaagcaucaaaggca

SEQ ID NO: 137553 - RNA, 22 nt, Human
ucacaaauagcuauauuaagga

SEQ ID NO: 137554 - RNA, 20 nt, Human
uccuucaggcagggccuagu

SEQ ID NO: 137555 - RNA, 22 nt, Human
ugugugucauuuaggguggagc

SEQ ID NO: 137556 - RNA, 22 nt, Human
aaaugcauguagaauaauagag

SEQ ID NO: 137557 - RNA, 22 nt, Human
cugggccauggaagucucugcc

SEQ ID NO: 137558 - RNA, 22 nt, Human
cucucugcuguauccuuaggcu

SEQ ID NO: 137559 - RNA, 22 nt, Human
cagugggugaugaguccugggg

SEQ ID NO: 137560 - RNA, 22 nt, Human
ugugugugcaggagagcaggug

SEQ ID NO: 137561 - RNA, 22 nt, Human
uuucaguuuccagcuuugucau

SEQ ID NO: 137562 - RNA, 22 nt, Human
ggaagggccucgggcgugggac

SEQ ID NO: 137563 - RNA, 22 nt, Human
uuauuguuuacuaguuugcaga

SEQ ID NO: 137564 - RNA, 22 nt, Human
cauuacauuucaaaauguuucc

SEQ ID NO: 137565 - RNA, 22 nt, Human
cuggcagguggauggggacucc

SEQ ID NO: 137566 - RNA, 22 nt, Human
agaaaguucacugguauauuuu

SEQ ID NO: 137567 - RNA, 22 nt, Human
aagaaaugcagaaaugugcugg

SEQ ID NO: 137568 - RNA, 22 nt, Human
ccacagagacaggguccuugcu

SEQ ID NO: 137569 - RNA, 22 nt, Human
uuugcauuguuucaaaagugaa

SEQ ID NO: 137570 - RNA, 22 nt, Human
uagaaaucuacuuagacuuucu

SEQ ID NO: 137571 - RNA, 22 nt, Human
ucccagggacaccaagcuguuu

SEQ ID NO: 137572 - RNA, 22 nt, Human
aggaccaguaugagagcaucug

SEQ ID NO: 137573 - RNA, 22 nt, Human
ugcccuuggguaacuugcugau

SEQ ID NO: 137574 - RNA, 22 nt, Human
gaggccacgguuuuccuugggg

SEQ ID NO: 137575 - RNA, 22 nt, Human
gguggagcuguggacaggaagg

SEQ ID NO: 137576 - RNA, 22 nt, Human
cugcaucacagcaggaggcaca

SEQ ID NO: 137577 - RNA, 23 nt, Human
ucugucacuuucugcuguggagu

SEQ ID NO: 137578 - RNA, 22 nt, Human
gucuggaggaggaagaaggcac

SEQ ID NO: 137579 - RNA, 22 nt, Human
aggcugugcaauuaggguaaga

SEQ ID NO: 137580 - RNA, 22 nt, Human
ggcucagguugggucacaugac

SEQ ID NO: 137581 - RNA, 22 nt, Human
gcuggccauggccugcgccauc

SEQ ID NO: 137582 - RNA, 22 nt, Human
cagcaggguagguuguaucagu

SEQ ID NO: 137583 - RNA, 22 nt, Human
caugcacagugauaucugaaga

SEQ ID NO: 137584 - RNA, 18 nt, Human
gggaucaggcugccuagg

SEQ ID NO: 137585 - RNA, 22 nt, Human
uuacaguaugaucaacuuuuca

SEQ ID NO: 137586 - RNA, 22 nt, Human
ccagagcccagcacacggugcu

SEQ ID NO: 137587 - RNA, 20 nt, Human
agucccuuuggucagguauu

SEQ ID NO: 137588 - RNA, 22 nt, Human
gggcacugcuuugcucugucac

SEQ ID NO: 137589 - RNA, 22 nt, Human
uuucuacuaagaaaguugauua

SEQ ID NO: 137590 - RNA, 22 nt, Human
ucuggcuccaggaccgggcaca

SEQ ID NO: 137591 - RNA, 22 nt, Human
cagcagcuucuguugaucagaa

SEQ ID NO: 137592 - RNA, 22 nt, Human
uuuucacacaaggugauaaguu

SEQ ID NO: 137593 - RNA, 22 nt, Human
auucuucacauggauaggaucu

SEQ ID NO: 137594 - RNA, 22 nt, Human
uaugcuguauucuguauguuag

SEQ ID NO: 137595 - RNA, 22 nt, Human
uuucacaacugcuuauuugaga

SEQ ID NO: 137596 - RNA, 16 nt, Human
agcagccagcacugga

SEQ ID NO: 137597 - RNA, 22 nt, Human
agcccagcaaagggagguucag

SEQ ID NO: 137598 - RNA, 22 nt, Human
agaaacagcauuagcaucaauu

SEQ ID NO: 137599 - RNA, 22 nt, Human
uuuucuguauuauugugcuuca

SEQ ID NO: 137600 - RNA, 22 nt, Human
ccucaggguggcaucagaucuu

SEQ ID NO: 137601 - RNA, 22 nt, Human
gcugggcuucucaaugcugccu

SEQ ID NO: 137602 - RNA, 22 nt, Human
uauugucuguccgggucaaagc

SEQ ID NO: 137603 - RNA, 22 nt, Human
ucuggccuacuggaguccauga

SEQ ID NO: 137604 - RNA, 22 nt, Human
aagcaauauacugauaugauua

SEQ ID NO: 137605 - RNA, 22 nt, Human
ugauuuuuagcuauucugaaga

SEQ ID NO: 137606 - RNA, 22 nt, Human
uccuggagccacggagcuuuca

SEQ ID NO: 137607 - RNA, 22 nt, Human
cagcugcccaagccccagaugu

SEQ ID NO: 137608 - RNA, 22 nt, Human
caggaacacaaguucagggaug

SEQ ID NO: 137609 - RNA, 22 nt, Human
cccaggagguggagguugcagu

SEQ ID NO: 137610 - RNA, 22 nt, Human
cagcaggguauacagggaauuu

SEQ ID NO: 137611 - RNA, 22 nt, Human
gaaaugugugacaaguuucaau

SEQ ID NO: 137612 - RNA, 22 nt, Human
ccucacucugcacccugcagca

SEQ ID NO: 137613 - RNA, 23 nt, Human
gcagugugaauccaguguuucag

SEQ ID NO: 137614 - RNA, 22 nt, Human
gcugagagcaguguggccuuaa

SEQ ID NO: 137615 - RNA, 23 nt, Human
agaugaaagcuucccaucacagu

SEQ ID NO: 137616 - RNA, 22 nt, Human
cuguggcuucugggucaguuca

SEQ ID NO: 137617 - RNA, 22 nt, Human
uugauaaaaugauaucuucuuu

SEQ ID NO: 137618 - RNA, 21 nt, Human
ggcacugagccagauggacuc

SEQ ID NO: 137619 - RNA, 22 nt, Human
gccauuuagggaggcaagguga

SEQ ID NO: 137620 - RNA, 22 nt, Human
auaauguagguauguguauuua

SEQ ID NO: 137621 - RNA, 22 nt, Human
ggcucaggaccugggauugcca

SEQ ID NO: 137622 - RNA, 22 nt, Human
ucccagggcagcuguccagaag

SEQ ID NO: 137623 - RNA, 17 nt, Human
uuagcaaaauagcacuu

SEQ ID NO: 137624 - RNA, 22 nt, Human
aagcagcauaauugcuauuuua

SEQ ID NO: 137625 - RNA, 22 nt, Human
auggcugugaaaugguaggugg

SEQ ID NO: 137626 - RNA, 22 nt, Human
gccucugcggagcuguacauca

SEQ ID NO: 137627 - RNA, 22 nt, Human
augggaggaagagaagaugucu

SEQ ID NO: 137628 - RNA, 21 nt, Human
uucacaguggauaacuuucug

SEQ ID NO: 137629 - RNA, 22 nt, Human
gcaguguggccccaguaucacg

SEQ ID NO: 137630 - RNA, 22 nt, Human
ucagcagauggguuguguuggc

SEQ ID NO: 137631 - RNA, 22 nt, Human
auaauuuaauuuucacaguggu

SEQ ID NO: 137632 - RNA, 23 nt, Human
uucugucuugcugucagcuuucu

SEQ ID NO: 137633 - RNA, 22 nt, Human
aacuguuuuucacgugucucau

SEQ ID NO: 137634 - RNA, 22 nt, Human
ccugccagucacuaugucaccu

SEQ ID NO: 137635 - RNA, 22 nt, Human
aggagccccucuucaguccugg

SEQ ID NO: 137636 - RNA, 22 nt, Human
uggagcaggugggaugucguga

SEQ ID NO: 137637 - RNA, 22 nt, Human
uacaguaacuggaauucuucuu

SEQ ID NO: 137638 - RNA, 22 nt, Human
cuguggcuggaauaauaaaugu

SEQ ID NO: 137639 - RNA, 22 nt, Human
agaggugacauaggagaggcuc

SEQ ID NO: 137640 - RNA, 20 nt, Human
aagagcauaguacaggaaga

SEQ ID NO: 137641 - RNA, 22 nt, Human
ggcucugcugguaagaugccuc

SEQ ID NO: 137642 - RNA, 22 nt, Human
ccagcagcagcguccaaggaga

SEQ ID NO: 137643 - RNA, 22 nt, Human
ucugucaccauucagcuugaau

SEQ ID NO: 137644 - RNA, 22 nt, Human
ugcugugcuggcggcagaggcc

SEQ ID NO: 137645 - RNA, 20 nt, Human
ucauugcacauaauggaagc

SEQ ID NO: 137646 - RNA, 22 nt, Human
aggcaugugacccuggacucag

SEQ ID NO: 137647 - RNA, 22 nt, Human
gguggcugcacccuggcuaacu

SEQ ID NO: 137648 - RNA, 22 nt, Human
augaugguaaauucaguauccg

SEQ ID NO: 137649 - RNA, 22 nt, Human
ggcuuggaaauugcaggacaca

SEQ ID NO: 137650 - RNA, 22 nt, Human
auguucaaacuuuuuacacacc

SEQ ID NO: 137651 - RNA, 22 nt, Human
caguccaggccuggaggagcca

SEQ ID NO: 137652 - RNA, 22 nt, Human
aguggcaguagaugagcugguu

SEQ ID NO: 137653 - RNA, 22 nt, Human
ggggagaguccuuuccaguucc

SEQ ID NO: 137654 - RNA, 22 nt, Human
uggcuggacagugggcagugga

SEQ ID NO: 137655 - RNA, 22 nt, Human
gccuggagggauagaaugcaag

SEQ ID NO: 137656 - RNA, 22 nt, Human
guuauguauugggaaauccaag

SEQ ID NO: 137657 - RNA, 22 nt, Human
auguggcuuuuccuggguuccu

SEQ ID NO: 137658 - RNA, 22 nt, Human
aagacauuacuggaaucugacu

SEQ ID NO: 137659 - RNA, 22 nt, Human
aaaugcagcagcuaauugaaaa

SEQ ID NO: 137660 - RNA, 17 nt, Human
ugcauuguuggaaauuu

SEQ ID NO: 137661 - RNA, 22 nt, Human
gcagggagguuugcugaccugg

SEQ ID NO: 137662 - RNA, 22 nt, Human
ucuguggauuuuaguguucaug

SEQ ID NO: 137663 - RNA, 17 nt, Human
cccagcuggcagugccg

SEQ ID NO: 137664 - RNA, 22 nt, Human
ugugugaauagcaguggcuggu

SEQ ID NO: 137665 - RNA, 22 nt, Human
aacagcaugcuggguaacauug

SEQ ID NO: 137666 - RNA, 22 nt, Human
caggggacaguaugguggauga

SEQ ID NO: 137667 - RNA, 22 nt, Human
ugggugggagcgcccugucugg

SEQ ID NO: 137668 - RNA, 22 nt, Human
caggguggaauggaaugcuggc

SEQ ID NO: 137669 - RNA, 22 nt, Human
uggagcagcaucacuuugagcu

SEQ ID NO: 137670 - RNA, 22 nt, Human
ucagggcaaaagggaaaccauu

SEQ ID NO: 137671 - RNA, 22 nt, Human
cugcagaguggagccucggcug

SEQ ID NO: 137672 - RNA, 22 nt, Human
ccugcccagcuucaccucaggc

SEQ ID NO: 137673 - RNA, 19 nt, Human
gcucugugaugcugagggg

SEQ ID NO: 137674 - RNA, 22 nt, Human
caggaucccuggccuccgccca

SEQ ID NO: 137675 - RNA, 22 nt, Human
cagcuuggcuuccgcuuuacug

SEQ ID NO: 137676 - RNA, 22 nt, Human
aaguugagaugucauaggagac

SEQ ID NO: 137677 - RNA, 22 nt, Human
aguuauaugugaaaacacguau

SEQ ID NO: 137678 - RNA, 20 nt, Human
gacaucauguacacauugcc

SEQ ID NO: 137679 - RNA, 23 nt, Human
gagguacagcaccagugaauagg

SEQ ID NO: 137680 - RNA, 22 nt, Human
aagggccuccuggggagccugg

SEQ ID NO: 137681 - RNA, 22 nt, Human
uggggccuggucagagcugcac

SEQ ID NO: 137682 - RNA, 22 nt, Human
augggaggcagcagagcccagc

SEQ ID NO: 137683 - RNA, 22 nt, Human
auguauguuaguguauuaucua

SEQ ID NO: 137684 - RNA, 22 nt, Human
uaaugcaguacugauauaaaca

SEQ ID NO: 137685 - RNA, 22 nt, Human
cuggagccgcauggagcaggga

SEQ ID NO: 137686 - RNA, 22 nt, Human
gucccagaaacauauugcuggu

SEQ ID NO: 137687 - RNA, 22 nt, Human
aggccuggcuuugguuugcuga

SEQ ID NO: 137688 - RNA, 22 nt, Human
gagagcugcagccgagaggggg

SEQ ID NO: 137689 - RNA, 23 nt, Human
uguaggcuguaguuuguaggucc

SEQ ID NO: 137690 - RNA, 22 nt, Human
aaagaacaaauuagcuguuuua

SEQ ID NO: 137691 - RNA, 22 nt, Human
aaagguuaguucuuagaagugc

SEQ ID NO: 137692 - RNA, 22 nt, Human
cuagugugucuaugucuguucc

SEQ ID NO: 137693 - RNA, 22 nt, Human
guuccauaucacagcagacgaa

SEQ ID NO: 137694 - RNA, 22 nt, Human
ggcacagggaggcccuggugug

SEQ ID NO: 137695 - RNA, 22 nt, Human
ugugaaaggggucacagggaaa

SEQ ID NO: 137696 - RNA, 22 nt, Human
uuccauaaugagauucccagcc

SEQ ID NO: 137697 - RNA, 22 nt, Human
auauauuuacucuccuguugca

SEQ ID NO: 137698 - RNA, 22 nt, Human
agguaaagacagugaaagaggg

SEQ ID NO: 137699 - RNA, 22 nt, Human
agcugcuguccuaggcacugua

SEQ ID NO: 137700 - RNA, 22 nt, Human
agaauucuuggugguuagaaua

SEQ ID NO: 137701 - RNA, 22 nt, Human
ugggccugccccaggcuucagc

SEQ ID NO: 137702 - RNA, 20 nt, Human
ucagagucaucaaagauggu

SEQ ID NO: 137703 - RNA, 22 nt, Human
ucaguauccacaaaugcucaaa

SEQ ID NO: 137704 - RNA, 22 nt, Human
uucauuccugagcccauauuua

SEQ ID NO: 137705 - RNA, 22 nt, Human
ggaggcugagaaguccaagauc

SEQ ID NO: 137706 - RNA, 22 nt, Human
aucugccucuucuucauugcga

SEQ ID NO: 137707 - RNA, 22 nt, Human
ccacagagagugucagccuuug

SEQ ID NO: 137708 - RNA, 22 nt, Human
cugcuuugaggggcucuguaua

SEQ ID NO: 137709 - RNA, 22 nt, Human
uggagcaggaagucuauggcug

SEQ ID NO: 137710 - RNA, 22 nt, Human
uuuuauguuccucuuuaugcga

SEQ ID NO: 137711 - RNA, 22 nt, Human
uaguccaguaaaacagcuaacg

SEQ ID NO: 137712 - RNA, 22 nt, Human
agagccagagaccuggguucac

SEQ ID NO: 137713 - RNA, 22 nt, Human
ucugucuccugccagugccucu

SEQ ID NO: 137714 - RNA, 23 nt, Human
gcaggugguucgaacagaaguuu

SEQ ID NO: 137715 - RNA, 22 nt, Human
ucccagagugugggcaucaagg

SEQ ID NO: 137716 - RNA, 22 nt, Human
ggccucugcccucacuccuguc

SEQ ID NO: 137717 - RNA, 22 nt, Human
agcccaagcuaugaggugaccu

SEQ ID NO: 137718 - RNA, 22 nt, Human
gagcugaguuaccuccagauca

SEQ ID NO: 137719 - RNA, 22 nt, Human
gaaggccacggaauggagcugg

SEQ ID NO: 137720 - RNA, 22 nt, Human
aagagguugucugugaugaguu

SEQ ID NO: 137721 - RNA, 22 nt, Human
gcuggcagagacaagaagacua

SEQ ID NO: 137722 - RNA, 22 nt, Human
ucagggcauucaagaggccugg

SEQ ID NO: 137723 - RNA, 22 nt, Human
cucaguuucugacauuaaaauc

SEQ ID NO: 137724 - RNA, 22 nt, Human
cuugaaagauuuggccucugug

SEQ ID NO: 137725 - RNA, 18 nt, Human
cagggccccagaauuauc

SEQ ID NO: 137726 - RNA, 22 nt, Human
cacccaggcuggagugcagggg

SEQ ID NO: 137727 - RNA, 19 nt, Human
agggagaauuccaagagga

SEQ ID NO: 137728 - RNA, 22 nt, Human
gcugcaggggggucuggacuug

SEQ ID NO: 137729 - RNA, 22 nt, Human
agggcugcugcuccgggcccag

SEQ ID NO: 137730 - RNA, 22 nt, Human
ccaggcugccgaggaaagaaag

SEQ ID NO: 137731 - RNA, 22 nt, Human
agcagcauuuaaggauccaagu

SEQ ID NO: 137732 - RNA, 23 nt, Human
uggcagagacccagaaucuacau

SEQ ID NO: 137733 - RNA, 22 nt, Human
auggaaaggcuguggaaacuua

SEQ ID NO: 137734 - RNA, 22 nt, Human
aagccuuccugagugcaaggcc

SEQ ID NO: 137735 - RNA, 22 nt, Human
uaccaguaauugcuugugcugu

SEQ ID NO: 137736 - RNA, 22 nt, Human
acagagccaaaaggacauagua

SEQ ID NO: 137737 - RNA, 22 nt, Human
gcuggccacauugugccguccu

SEQ ID NO: 137738 - RNA, 22 nt, Human
gccagcugguaggcaccuagcc

SEQ ID NO: 137739 - RNA, 22 nt, Human
aggcugugggaguugagagucu

SEQ ID NO: 137740 - RNA, 22 nt, Human
uaaaauguagcuucuaggcugg

SEQ ID NO: 137741 - RNA, 22 nt, Human
agagccugggaauuugcauguu

SEQ ID NO: 137742 - RNA, 22 nt, Human
guacaguaaucccguucuucug

SEQ ID NO: 137743 - RNA, 22 nt, Human
ugcugccagccaggccauggag

SEQ ID NO: 137744 - RNA, 22 nt, Human
gaagaacaagcagugcuuuccu

SEQ ID NO: 137745 - RNA, 22 nt, Human
gucagagagggcacgugcacac

SEQ ID NO: 137746 - RNA, 22 nt, Human
caggccugggcuucggggcuga

SEQ ID NO: 137747 - RNA, 19 nt, Human
uaucuuuaugcaguggugg

SEQ ID NO: 137748 - RNA, 22 nt, Human
aauuuccagaccccauccacag

SEQ ID NO: 137749 - RNA, 22 nt, Human
gggagccaaggagagaggccuu

SEQ ID NO: 137750 - RNA, 22 nt, Human
uuccucucgcucuccggggccc

SEQ ID NO: 137751 - RNA, 18 nt, Human
ggcaugugagugcugagg

SEQ ID NO: 137752 - RNA, 22 nt, Human
uacauucuacuuuuucacuccc

SEQ ID NO: 137753 - RNA, 22 nt, Human
accagagcuuacaugcuagaaa

SEQ ID NO: 137754 - RNA, 22 nt, Human
gcagccagaagacucagaacaa

SEQ ID NO: 137755 - RNA, 22 nt, Human
uccaguaucaaaguccuagucc

SEQ ID NO: 137756 - RNA, 22 nt, Human
gcagggcuguggacacuuuggu

SEQ ID NO: 137757 - RNA, 22 nt, Human
aggcacugcuucuaaguaggaa

SEQ ID NO: 137758 - RNA, 22 nt, Human
caaaugauaccuauuacuaggc

SEQ ID NO: 137759 - RNA, 23 nt, Human
gcugagguacauuuacaggaaga

SEQ ID NO: 137760 - RNA, 22 nt, Human
acacagaaccucauagccucuc

SEQ ID NO: 137761 - RNA, 22 nt, Human
cacccaggcuagagugcagugg

SEQ ID NO: 137762 - RNA, 22 nt, Human
gcagagcuccccaagacaccaa

SEQ ID NO: 137763 - RNA, 22 nt, Human
aguguguaauucagugcccagc

SEQ ID NO: 137764 - RNA, 22 nt, Human
acacagggcaaugcuuugaccu

SEQ ID NO: 137765 - RNA, 22 nt, Human
agggaagagcuugcaagaaacc

SEQ ID NO: 137766 - RNA, 20 nt, Human
uuccuguauacaaagaguuc

SEQ ID NO: 137767 - RNA, 22 nt, Human
guuuuauuuccaugagagaccg

SEQ ID NO: 137768 - RNA, 22 nt, Human
agguggggccaaaugcuacagu

SEQ ID NO: 137769 - RNA, 22 nt, Human
uuccauauguauauagcuguua

SEQ ID NO: 137770 - RNA, 22 nt, Human
gugcauauaugcacauaugugu

SEQ ID NO: 137771 - RNA, 22 nt, Human
uuugcaguguucaucaguauuu

SEQ ID NO: 137772 - RNA, 22 nt, Human
gagagcugggggacuguggaug

SEQ ID NO: 137773 - RNA, 20 nt, Human
aaaaacaguaaugcugaaga

SEQ ID NO: 137774 - RNA, 22 nt, Human
cuggggugugcucagagcaggg

SEQ ID NO: 137775 - RNA, 22 nt, Human
acagcagcgucaacuuaaaauu

SEQ ID NO: 137776 - RNA, 22 nt, Human
cagcuggguuuaguggggugug

SEQ ID NO: 137777 - RNA, 22 nt, Human
ucugcgcugccuugauccuugg

SEQ ID NO: 137778 - RNA, 22 nt, Human
gcagggacagggcagggccuuu

SEQ ID NO: 137779 - RNA, 22 nt, Human
augacagaaggccucccugaca

SEQ ID NO: 137780 - RNA, 22 nt, Human
gaacagaauuaccgaagaucug

SEQ ID NO: 137781 - RNA, 22 nt, Human
ucccagccacagguguagcccu

SEQ ID NO: 137782 - RNA, 22 nt, Human
cccagcucugcagaccugcccu

SEQ ID NO: 137783 - RNA, 20 nt, Human
agugcaagaaagcacagcug

SEQ ID NO: 137784 - RNA, 22 nt, Human
caguaauagauuugagaguggu

SEQ ID NO: 137785 - RNA, 22 nt, Human
aagaauguggguggauaugaug

SEQ ID NO: 137786 - RNA, 22 nt, Human
cagcaauaaugucuacaaaucu

SEQ ID NO: 137787 - RNA, 19 nt, Human
gcuuuuuguugucaaaggu

SEQ ID NO: 137788 - RNA, 22 nt, Human
caguagcauguaauaaagacag

SEQ ID NO: 137789 - RNA, 22 nt, Human
agaggcugcacuugcucaugau

SEQ ID NO: 137790 - RNA, 22 nt, Human
gcagggcugcagagggcacugu

SEQ ID NO: 137791 - RNA, 22 nt, Human
ggagugaguacuggaguagcug

SEQ ID NO: 137792 - RNA, 22 nt, Human
uauauguaagcuauguaagagu

SEQ ID NO: 137793 - RNA, 22 nt, Human
gcuguguguucaauaaugugau

SEQ ID NO: 137794 - RNA, 22 nt, Human
augaaacaguguguauagcaaa

SEQ ID NO: 137795 - RNA, 22 nt, Human
ugcagugguugagagcccagac

SEQ ID NO: 137796 - RNA, 22 nt, Human
uuuguaaauagcaguacucaug

SEQ ID NO: 137797 - RNA, 22 nt, Human
gccuggaggggacagucucugg

SEQ ID NO: 137798 - RNA, 22 nt, Human
caagagcuagacuuugucagga

SEQ ID NO: 137799 - RNA, 22 nt, Human
uauuuguauuucaugcaguaaa

SEQ ID NO: 137800 - RNA, 22 nt, Human
ucucucagggggaaggcugaag

SEQ ID NO: 137801 - RNA, 18 nt, Human
cagcugccagcucaugga

SEQ ID NO: 137802 - RNA, 22 nt, Human
uggugcuguggaggggcagaag

SEQ ID NO: 137803 - RNA, 22 nt, Human
cacauguuuggcaugucaccaa

SEQ ID NO: 137804 - RNA, 22 nt, Human
cuucacagaauaaacucauuau

SEQ ID NO: 137805 - RNA, 22 nt, Human
uaggccagaggagcagcuuugg

SEQ ID NO: 137806 - RNA, 20 nt, Human
aguaugauccacucugcucu

SEQ ID NO: 137807 - RNA, 22 nt, Human
uuucaagcauaacugggaagag

SEQ ID NO: 137808 - RNA, 22 nt, Human
agggaaauuaaugugagcaaug

SEQ ID NO: 137809 - RNA, 22 nt, Human
uucauauauaugcacuacguac

SEQ ID NO: 137810 - RNA, 22 nt, Human
ggaaagagcuaaaagggugaga

SEQ ID NO: 137811 - RNA, 22 nt, Human
aggagggugauccgggcugguc

SEQ ID NO: 137812 - RNA, 22 nt, Human
cauuucugggagacaugcuaga

SEQ ID NO: 137813 - RNA, 22 nt, Human
gggugggguucaggaaucuuca

SEQ ID NO: 137814 - RNA, 22 nt, Human
uuccaugaagggcagccucuca

SEQ ID NO: 137815 - RNA, 20 nt, Human
acagaaagagagaaugucag

SEQ ID NO: 137816 - RNA, 22 nt, Human
cuugaaagaagggucuuuuaau

SEQ ID NO: 137817 - RNA, 22 nt, Human
uagggcagauucgguggaguuu

SEQ ID NO: 137818 - RNA, 22 nt, Human
gcagcuuuuuggaugucaguua

SEQ ID NO: 137819 - RNA, 22 nt, Human
uauauuuaauuaguugcuggau

SEQ ID NO: 137820 - RNA, 22 nt, Human
aaguucaaggcagguccugagg

SEQ ID NO: 137821 - RNA, 22 nt, Human
gcugcccugugguccagcaggu

SEQ ID NO: 137822 - RNA, 22 nt, Human
cugcucuggggaagccagaugu

SEQ ID NO: 137823 - RNA, 23 nt, Human
aguguguaagguacuuugcugcu

SEQ ID NO: 137824 - RNA, 19 nt, Human
ccugggagucagcugaagg

SEQ ID NO: 137825 - RNA, 22 nt, Human
caggaugaagggcaaaggcaag

SEQ ID NO: 137826 - RNA, 22 nt, Human
cugggagaugacucagagcagg

SEQ ID NO: 137827 - RNA, 22 nt, Human
guauacauagaugaugaacaag

SEQ ID NO: 137828 - RNA, 22 nt, Human
caugugugacaaacugccugca

SEQ ID NO: 137829 - RNA, 22 nt, Human
ggugcccaccugucuuccugga

SEQ ID NO: 137830 - RNA, 23 nt, Human
ggccucuguguucugcccacaug

SEQ ID NO: 137831 - RNA, 22 nt, Human
agaauuagucacaauuauagga

SEQ ID NO: 137832 - RNA, 22 nt, Human
ugggaggacuugugggcuucau

SEQ ID NO: 137833 - RNA, 22 nt, Human
cagaccucaguccucaguagga

SEQ ID NO: 137834 - RNA, 22 nt, Human
guuacagugagaagauagccua

SEQ ID NO: 137835 - RNA, 22 nt, Human
ugcuaucucuauauccauuuau

SEQ ID NO: 137836 - RNA, 22 nt, Human
agcuguguaagucauguaggug

SEQ ID NO: 137837 - RNA, 22 nt, Human
aagcugaggcccauggcaaggu

SEQ ID NO: 137838 - RNA, 22 nt, Human
uagccuucucaagacaaaguug

SEQ ID NO: 137839 - RNA, 22 nt, Human
uggcuggcccugggagugcaga

SEQ ID NO: 137840 - RNA, 22 nt, Human
aagcaucucuauguggagagug

SEQ ID NO: 137841 - RNA, 22 nt, Human
cucuggagguugagcccagcaa

SEQ ID NO: 137842 - RNA, 22 nt, Human
acuuuucuaagcaauggucuug

SEQ ID NO: 137843 - RNA, 22 nt, Human
cagcaucuuucucuucuggagu

SEQ ID NO: 137844 - RNA, 22 nt, Human
acugccaggauggcacuagagg

SEQ ID NO: 137845 - RNA, 22 nt, Human
uuucuucauucaccuucacccc

SEQ ID NO: 137846 - RNA, 22 nt, Human
aaguuuaagguggaaguggugg

SEQ ID NO: 137847 - RNA, 22 nt, Human
ucuuugaccaaauuauccuguu

SEQ ID NO: 137848 - RNA, 22 nt, Human
ggcuggccucaggguccucgcu

SEQ ID NO: 137849 - RNA, 22 nt, Human
cguggcuggggcgacuccacgg

SEQ ID NO: 137850 - RNA, 19 nt, Human
gcugucugaugcugagguc

SEQ ID NO: 137851 - RNA, 22 nt, Human
cccaggcugaguuagagguguc

SEQ ID NO: 137852 - RNA, 22 nt, Human
aggcuucccaagcagcugcaaa

SEQ ID NO: 137853 - RNA, 22 nt, Human
cacugggcguguccugggugag

SEQ ID NO: 137854 - RNA, 22 nt, Human
ugagggaggcccuuugagcaga

SEQ ID NO: 137855 - RNA, 22 nt, Human
gcccagcagaucucagugucuc

SEQ ID NO: 137856 - RNA, 22 nt, Human
uuugacaguaauaaagcacaag

SEQ ID NO: 137857 - RNA, 22 nt, Human
ucugccugaaauucacauguaa

SEQ ID NO: 137858 - RNA, 22 nt, Human
ugcauugcauuugucaugaaga

SEQ ID NO: 137859 - RNA, 22 nt, Human
caggguggaaaagcuaguugga

SEQ ID NO: 137860 - RNA, 22 nt, Human
ggcagugaaugaaacagaggcu

SEQ ID NO: 137861 - RNA, 18 nt, Human
aucuuuccauagcauguu

SEQ ID NO: 137862 - RNA, 19 nt, Human
ugggugugaccaucucugc

SEQ ID NO: 137863 - RNA, 22 nt, Human
agcuccugaaaagcgcuugcuu

SEQ ID NO: 137864 - RNA, 22 nt, Human
agaggccaggcugcagagggau

SEQ ID NO: 137865 - RNA, 22 nt, Human
ccugccugcaaaaugggacaag

SEQ ID NO: 137866 - RNA, 22 nt, Human
gcaggggcugagcaccagcggg

SEQ ID NO: 137867 - RNA, 22 nt, Human
uccaguaugacugauguccuuc

SEQ ID NO: 137868 - RNA, 22 nt, Human
uccuggaguugugcagugcaca

SEQ ID NO: 137869 - RNA, 22 nt, Human
ggggacccucaggacugcgucu

SEQ ID NO: 137870 - RNA, 22 nt, Human
gccuucaggaaaucaguccuug

SEQ ID NO: 137871 - RNA, 22 nt, Human
auagaacagaaacagaugcaca

SEQ ID NO: 137872 - RNA, 22 nt, Human
ggggaggcugaugugggcaaag

SEQ ID NO: 137873 - RNA, 22 nt, Human
uugagucaguaauuccauuucu

SEQ ID NO: 137874 - RNA, 22 nt, Human
gaaccaaguaggauacaaggag

SEQ ID NO: 137875 - RNA, 22 nt, Human
uuuacaaggcagaacugauuaa

SEQ ID NO: 137876 - RNA, 22 nt, Human
uguguguauccauuagaggcca

SEQ ID NO: 137877 - RNA, 22 nt, Human
gugucccaaagauuagaaauca

SEQ ID NO: 137878 - RNA, 22 nt, Human
cugcucuggcguacucggcauc

SEQ ID NO: 137879 - RNA, 22 nt, Human
aagugaaacauguaucucuuua

SEQ ID NO: 137880 - RNA, 22 nt, Human
cugggaggugcagcaaaaauca

SEQ ID NO: 137881 - RNA, 22 nt, Human
aggcacaggaaugucauccagu

SEQ ID NO: 137882 - RNA, 22 nt, Human
aggcacuggguaauuaguagcu

SEQ ID NO: 137883 - RNA, 22 nt, Human
uaucaauacauguuaucagugu

SEQ ID NO: 137884 - RNA, 22 nt, Human
uucagagcaucucuaaagccag

SEQ ID NO: 137885 - RNA, 22 nt, Human
cagucacauggaugauggauag

SEQ ID NO: 137886 - RNA, 22 nt, Human
gccaccagccccaugcgcugug

SEQ ID NO: 137887 - RNA, 22 nt, Human
uucuaguguccuuggacuugcu

SEQ ID NO: 137888 - RNA, 22 nt, Human
ggagccagagucugcaguguaa

SEQ ID NO: 137889 - RNA, 22 nt, Human
ccagucccaucucugucgcuua

SEQ ID NO: 137890 - RNA, 19 nt, Human
acagaaauuaguuauuuuc

SEQ ID NO: 137891 - RNA, 22 nt, Human
auguaacaggugaagcucugag

SEQ ID NO: 137892 - RNA, 22 nt, Human
gcuucucucucagacugcaagc

SEQ ID NO: 137893 - RNA, 22 nt, Human
ggugacuggagggacccaggcc

SEQ ID NO: 137894 - RNA, 22 nt, Human
ccuucucuacuccugaugcaug

SEQ ID NO: 137895 - RNA, 22 nt, Human
ggcuucucucuucacauggcuu

SEQ ID NO: 137896 - RNA, 22 nt, Human
uaaauguaccuucugccuuacu

SEQ ID NO: 137897 - RNA, 22 nt, Human
aggugcugccccgagaaggaug

SEQ ID NO: 137898 - RNA, 22 nt, Human
cuucucucggugcaucccucac

SEQ ID NO: 137899 - RNA, 22 nt, Human
aggaugaauaacugaaauggug

SEQ ID NO: 137900 - RNA, 22 nt, Human
ggccucugccccagccacaccu

SEQ ID NO: 137901 - RNA, 21 nt, Human
acccuggguucuccauacccu

SEQ ID NO: 137902 - RNA, 22 nt, Human
acugccuugucucuugccuguu

SEQ ID NO: 137903 - RNA, 21 nt, Human
gugugucuaauguaguggaaa

SEQ ID NO: 137904 - RNA, 22 nt, Human
uacaaguauggaaugauucuca

SEQ ID NO: 137905 - RNA, 22 nt, Human
gggcuggaggagauccagaggc

SEQ ID NO: 137906 - RNA, 22 nt, Human
aagcugccugggaggaagggcu

SEQ ID NO: 137907 - RNA, 22 nt, Human
ccugucuggccaccagggcgau

SEQ ID NO: 137908 - RNA, 22 nt, Human
aauguguagauguugcauuccu

SEQ ID NO: 137909 - RNA, 22 nt, Human
ccagcaccuugaucuuggaguu

SEQ ID NO: 137910 - RNA, 22 nt, Human
acaggcugacuuccugccaugu

SEQ ID NO: 137911 - RNA, 22 nt, Human
aggccugagccccagguuuguu

SEQ ID NO: 137912 - RNA, 22 nt, Human
ucuuuccaaggacucuguagca

SEQ ID NO: 137913 - RNA, 22 nt, Human
cccuccccacaaagcuucacac

SEQ ID NO: 137914 - RNA, 22 nt, Human
ucaguuuuucuauacuuuguag

SEQ ID NO: 137915 - RNA, 22 nt, Human
cagucccaguuugagacucugg

SEQ ID NO: 137916 - RNA, 22 nt, Human
gcuggcugccuuacuuugugga

SEQ ID NO: 137917 - RNA, 22 nt, Human
gcugucagcgcccaaggagcuc

SEQ ID NO: 137918 - RNA, 22 nt, Human
auggcuguuuagcuucucugcu

SEQ ID NO: 137919 - RNA, 22 nt, Human
cucaggguaaugaaagacgaau

SEQ ID NO: 137920 - RNA, 22 nt, Human
agggagaaaauuggaugcacaa

SEQ ID NO: 137921 - RNA, 22 nt, Human
gcucucuugacagcuugcuguu

SEQ ID NO: 137922 - RNA, 22 nt, Human
ggggcagagaauaaaaaccuaa

SEQ ID NO: 137923 - RNA, 22 nt, Human
gugugccaacaaaagacagugc

SEQ ID NO: 137924 - RNA, 22 nt, Human
uccagagcagguggucagaagg

SEQ ID NO: 137925 - RNA, 22 nt, Human
cugcaggcaucuaacugugggc

SEQ ID NO: 137926 - RNA, 22 nt, Human
ucucucuucuuuguuaagaaug

SEQ ID NO: 137927 - RNA, 22 nt, Human
ucugcugugucccuggucuccu

SEQ ID NO: 137928 - RNA, 22 nt, Human
ucauuuguugaacuuuagugcg

SEQ ID NO: 137929 - RNA, 22 nt, Human
cugagcugaaacuugagaggcu

SEQ ID NO: 137930 - RNA, 22 nt, Human
agcucagggcgaucugucucgg

SEQ ID NO: 137931 - RNA, 22 nt, Human
ugaagcagcaccauuuuagagc

SEQ ID NO: 137932 - RNA, 23 nt, Human
uccaugagaugugggcuucuagu

SEQ ID NO: 137933 - RNA, 22 nt, Human
gcucucugucguuaugcuucau

SEQ ID NO: 137934 - RNA, 22 nt, Human
cuggcccuucucuugcuuccug

SEQ ID NO: 137935 - RNA, 19 nt, Human
cugcugggugcugagggag

SEQ ID NO: 137936 - RNA, 22 nt, Human
cccagcauccucagggagcggg

SEQ ID NO: 137937 - RNA, 22 nt, Human
uuuccucuucuucccaugucau

SEQ ID NO: 137938 - RNA, 22 nt, Human
ugcugccaggucuugcugucca

SEQ ID NO: 137939 - RNA, 17 nt, Human
cuggagccuccaacucc

SEQ ID NO: 137940 - RNA, 22 nt, Human
cugaaggacuuggugauaguug

SEQ ID NO: 137941 - RNA, 22 nt, Human
auccuugaaugacucugcccuc

SEQ ID NO: 137942 - RNA, 22 nt, Human
uucagagaugacaccugguguu

SEQ ID NO: 137943 - RNA, 22 nt, Human
cauuuacagugagaguuuuuac

SEQ ID NO: 137944 - RNA, 22 nt, Human
gcucucuugguggcuguccugg

SEQ ID NO: 137945 - RNA, 22 nt, Human
auggcuguaaauucagagaugg

SEQ ID NO: 137946 - RNA, 17 nt, Human
ugcugccaagucccaac

SEQ ID NO: 137947 - RNA, 22 nt, Human
cugucuguaucccuguugguaa

SEQ ID NO: 137948 - RNA, 22 nt, Human
uaaaucacuccuaauaaucagu

SEQ ID NO: 137949 - RNA, 22 nt, Human
aggcagcuggcagcacccaggg

SEQ ID NO: 137950 - RNA, 22 nt, Human
cugggcagagcuaacaccugag

SEQ ID NO: 137951 - RNA, 20 nt, Human
cacagcuugccuuuuaugac

SEQ ID NO: 137952 - RNA, 22 nt, Human
gugcagugagcagugcagcacc

SEQ ID NO: 137953 - RNA, 22 nt, Human
gggcugugugcaguacgggucc

SEQ ID NO: 137954 - RNA, 22 nt, Human
aaucuggcauguaagcuuagag

SEQ ID NO: 137955 - RNA, 22 nt, Human
gaccuggaggauccucuucuug

SEQ ID NO: 137956 - RNA, 22 nt, Human
ccugccuguaagauggguacaa

SEQ ID NO: 137957 - RNA, 22 nt, Human
ucagagcuaaggggagagcaaa

SEQ ID NO: 137958 - RNA, 22 nt, Human
caugcuccaaaaacaagagaau

SEQ ID NO: 137959 - RNA, 22 nt, Human
uucucucuuuuggguaggaggu

SEQ ID NO: 137960 - RNA, 22 nt, Human
uucaggauggcggauguugggg

SEQ ID NO: 137961 - RNA, 22 nt, Human
ccagggcuggugggagaugcug

SEQ ID NO: 137962 - RNA, 22 nt, Human
aggccugaggaccuucuggagg

SEQ ID NO: 137963 - RNA, 22 nt, Human
cucaggccauucuuccagcugc

SEQ ID NO: 137964 - RNA, 22 nt, Human
ccuggcucuguccucgcgcaaa

SEQ ID NO: 137965 - RNA, 22 nt, Human
cagagacagggcagggagugug

SEQ ID NO: 137966 - RNA, 22 nt, Human
acugggaggcaaagagcaagga

SEQ ID NO: 137967 - RNA, 22 nt, Human
uaacuuuaugacaugucuugcu

SEQ ID NO: 137968 - RNA, 22 nt, Human
acagagauguggaugagggauu

SEQ ID NO: 137969 - RNA, 22 nt, Human
uaagaacaguguuucaucucua

SEQ ID NO: 137970 - RNA, 22 nt, Human
auggcuguagucaucugaaggc

SEQ ID NO: 137971 - RNA, 21 nt, Human
uggcucugagccucauggcug

SEQ ID NO: 137972 - RNA, 22 nt, Human
agacccugucaguguuaggaaa

SEQ ID NO: 137973 - RNA, 22 nt, Human
ccagcucuagccccauguggcu

SEQ ID NO: 137974 - RNA, 22 nt, Human
uggcuuccugcacagugucugc

SEQ ID NO: 137975 - RNA, 22 nt, Human
ggaggaccugcuggcccugcaa

SEQ ID NO: 137976 - RNA, 22 nt, Human
ggugaaggucuacugugugcca

SEQ ID NO: 137977 - RNA, 22 nt, Human
cacaguaugaucuaaaguaagu

SEQ ID NO: 137978 - RNA, 22 nt, Human
ggccugagucccaccuggcugu

SEQ ID NO: 137979 - RNA, 22 nt, Human
agagugucugguagcugcucug

SEQ ID NO: 137980 - RNA, 22 nt, Human
ugugcuauuuuugcauaugugu

SEQ ID NO: 137981 - RNA, 22 nt, Human
gugugugugccugcacacacac

SEQ ID NO: 137982 - RNA, 22 nt, Human
gccagagcugagugagguucuu

SEQ ID NO: 137983 - RNA, 22 nt, Human
gcauguguuauuuuauguauga

SEQ ID NO: 137984 - RNA, 19 nt, Human
aauauuuuagccucuuccu

SEQ ID NO: 137985 - RNA, 22 nt, Human
uauauucuuaccaguguaugua

SEQ ID NO: 137986 - RNA, 22 nt, Human
uggcugcugagaaggcagcugu

SEQ ID NO: 137987 - RNA, 22 nt, Human
ucuggcuuucauuuguuuaaag

SEQ ID NO: 137988 - RNA, 22 nt, Human
gggaguggagagcaauggauga

SEQ ID NO: 137989 - RNA, 22 nt, Human
uguguggaugcagcgugggucu

SEQ ID NO: 137990 - RNA, 22 nt, Human
cuggggugucucgucugccauu

SEQ ID NO: 137991 - RNA, 22 nt, Human
aaguuuuaacaaguacuuacua

SEQ ID NO: 137992 - RNA, 22 nt, Human
uuuuaucugcuucauuaguuga

SEQ ID NO: 137993 - RNA, 22 nt, Human
uucacauuauaaucaguucugc

SEQ ID NO: 137994 - RNA, 22 nt, Human
uuauucuuuucuccagaauccc

SEQ ID NO: 137995 - RNA, 21 nt, Human
ugcuccuuagcugccccugcc

SEQ ID NO: 137996 - RNA, 22 nt, Human
ugguaauuuacgcauuucugua

SEQ ID NO: 137997 - RNA, 23 nt, Human
ugcagcugccucuggcgggccgg

SEQ ID NO: 137998 - RNA, 22 nt, Human
ccaggcugggcggggaaccugg

SEQ ID NO: 137999 - RNA, 22 nt, Human
uccuuccucggggacccagauc

SEQ ID NO: 138000 - RNA, 22 nt, Human
ugggcagagucauacaggagac

SEQ ID NO: 138001 - RNA, 22 nt, Human
auuucucuuccuccuaggguug

SEQ ID NO: 138002 - RNA, 22 nt, Human
uggcagcugaggggaggcuuug

SEQ ID NO: 138003 - RNA, 22 nt, Human
ugaacauauucaccucuaaaua

SEQ ID NO: 138004 - RNA, 22 nt, Human
guggcugcuacagagcuggagg

SEQ ID NO: 138005 - RNA, 20 nt, Human
uccaagcccuccuuccauuc

SEQ ID NO: 138006 - RNA, 22 nt, Human
agaugcugugaggaagcuagga

SEQ ID NO: 138007 - RNA, 22 nt, Human
cagcuucccuuggcugagcaga

SEQ ID NO: 138008 - RNA, 22 nt, Human
uguaugcuugaguguguauacu

SEQ ID NO: 138009 - RNA, 22 nt, Human
uuacagugacaguugcuaugau

SEQ ID NO: 138010 - RNA, 22 nt, Human
gagagugaaggcuucccagcaa

SEQ ID NO: 138011 - RNA, 22 nt, Human
cucuggcuuugcucaugcaucc

SEQ ID NO: 138012 - RNA, 22 nt, Human
uucaacuaauguuuauuuuaug

SEQ ID NO: 138013 - RNA, 22 nt, Human
acccaggguagagugcaguggc

SEQ ID NO: 138014 - RNA, 22 nt, Human
uaugaagaaguucugugaaaug

SEQ ID NO: 138015 - RNA, 22 nt, Human
agaaauguuuauggcugccuau

SEQ ID NO: 138016 - RNA, 23 nt, Human
aguggcugagaguguuucauaug

SEQ ID NO: 138017 - RNA, 22 nt, Human
agccacagcuccuugguggaga

SEQ ID NO: 138018 - RNA, 22 nt, Human
uucuucuuaauguccugggaac

SEQ ID NO: 138019 - RNA, 22 nt, Human
aauaauuuugagagccuggaaa

SEQ ID NO: 138020 - RNA, 22 nt, Human
aguggcugccaagauauaauuc

SEQ ID NO: 138021 - RNA, 22 nt, Human
gcccugugccagucacgcugug

SEQ ID NO: 138022 - RNA, 22 nt, Human
uuauuuaaugugaucugaagag

SEQ ID NO: 138023 - RNA, 22 nt, Human
ggcagugacuguucagacgucc

SEQ ID NO: 138024 - RNA, 22 nt, Human
ucacaguuauagucuguagaau

SEQ ID NO: 138025 - RNA, 22 nt, Human
ucaggcagaccaccgugggcag

SEQ ID NO: 138026 - RNA, 22 nt, Human
uggcagagaugaagaguuguuu

SEQ ID NO: 138027 - RNA, 22 nt, Human
aaaugcacaauaaaguaaaggc

SEQ ID NO: 138028 - RNA, 22 nt, Human
gcuguggcuguacagagaccau

SEQ ID NO: 138029 - RNA, 22 nt, Human
agaaacauuuagauuauauguc

SEQ ID NO: 138030 - RNA, 22 nt, Human
agagccagguguagucucggag

SEQ ID NO: 138031 - RNA, 22 nt, Human
gugccuuccccgguggucuguu

SEQ ID NO: 138032 - RNA, 22 nt, Human
uugaaagaggcaaaguuugauc

SEQ ID NO: 138033 - RNA, 22 nt, Human
cacagcagaaauaugaaggcag

SEQ ID NO: 138034 - RNA, 22 nt, Human
ugcugggggugucucaccaggc

SEQ ID NO: 138035 - RNA, 22 nt, Human
uauuacugagguuuuauggagu

SEQ ID NO: 138036 - RNA, 22 nt, Human
cagggacugagauccagacugu

SEQ ID NO: 138037 - RNA, 22 nt, Human
cucaguuucuucauauuguagg

SEQ ID NO: 138038 - RNA, 22 nt, Human
ugcauauuuuauaaagauggaa

SEQ ID NO: 138039 - RNA, 22 nt, Human
caaggccagagccagcgauaag

SEQ ID NO: 138040 - RNA, 22 nt, Human
ugucacauguguggcauuuuuc

SEQ ID NO: 138041 - RNA, 22 nt, Human
ucuauuuuguuuccagcucuac

SEQ ID NO: 138042 - RNA, 22 nt, Human
uucucucauucaaauuaaagug

SEQ ID NO: 138043 - RNA, 22 nt, Human
gagaggccaaaaucccugcccc

SEQ ID NO: 138044 - RNA, 22 nt, Human
agcugccagaugacagugcuau

SEQ ID NO: 138045 - RNA, 22 nt, Human
aagggcuggaucucucugagca

SEQ ID NO: 138046 - RNA, 20 nt, Human
uugagcuuuuaguacagaca

SEQ ID NO: 138047 - RNA, 15 nt, Human
ugauuuccuacuaac

SEQ ID NO: 138048 - RNA, 22 nt, Human
aaagaaauagauggcauuuaaa

SEQ ID NO: 138049 - RNA, 22 nt, Human
aauuugcaugaugagaacaaua

SEQ ID NO: 138050 - RNA, 22 nt, Human
ccuguguggaaggcaggaggcc

SEQ ID NO: 138051 - RNA, 22 nt, Human
aggcacugggaauaugcugagg

SEQ ID NO: 138052 - RNA, 22 nt, Human
cauguauagcaaauauuuguuc

SEQ ID NO: 138053 - RNA, 22 nt, Human
aaggaaccauuugugugcaugg

SEQ ID NO: 138054 - RNA, 22 nt, Human
aauguacaaggguuccaguuuu

SEQ ID NO: 138055 - RNA, 22 nt, Human
gugcuucucuucacacccaacu

SEQ ID NO: 138056 - RNA, 22 nt, Human
ccuuccuggagcccaugcagau

SEQ ID NO: 138057 - RNA, 22 nt, Human
ccagagccagagaggugccugc

SEQ ID NO: 138058 - RNA, 22 nt, Human
cagugggaagggcagaggcuuu

SEQ ID NO: 138059 - RNA, 22 nt, Human
agcugaaggcuagaacagcugg

SEQ ID NO: 138060 - RNA, 22 nt, Human
caaggccaagguuuugugaacu

SEQ ID NO: 138061 - RNA, 22 nt, Human
uguguuugaggcauguugcaga

SEQ ID NO: 138062 - RNA, 18 nt, Human
ugcuuggagcauuuacca

SEQ ID NO: 138063 - RNA, 22 nt, Human
uggcugugcggccucgggcaga

SEQ ID NO: 138064 - RNA, 22 nt, Human
cuugucugugucggauaaaacu

SEQ ID NO: 138065 - RNA, 22 nt, Human
uucaggauccccuugaugggcu

SEQ ID NO: 138066 - RNA, 22 nt, Human
uacauucaacaugucacuaugu

SEQ ID NO: 138067 - RNA, 22 nt, Human
cauuuguuggucagauuguagu

SEQ ID NO: 138068 - RNA, 22 nt, Human
agcagcugguaggaguggccac

SEQ ID NO: 138069 - RNA, 21 nt, Human
ucucugugucuuuaagcugga

SEQ ID NO: 138070 - RNA, 22 nt, Human
auguggcuccuuacucaucagc

SEQ ID NO: 138071 - RNA, 22 nt, Human
gcaaagucugcaucuggaucag

SEQ ID NO: 138072 - RNA, 22 nt, Human
ugcuguguuccucaguuucaug

SEQ ID NO: 138073 - RNA, 22 nt, Human
uuuuuauaugaaggauagugcg

SEQ ID NO: 138074 - RNA, 22 nt, Human
ggcacugagaggcucuuccuaa

SEQ ID NO: 138075 - RNA, 22 nt, Human
cacacauugaauucauucuugu

SEQ ID NO: 138076 - RNA, 20 nt, Human
uccagcugucuuucagagac

SEQ ID NO: 138077 - RNA, 22 nt, Human
gcccucucggcauagcaggggc

SEQ ID NO: 138078 - RNA, 22 nt, Human
uaauguguccugaaagcuucug

SEQ ID NO: 138079 - RNA, 22 nt, Human
aaaucaaaagacauguguuuua

SEQ ID NO: 138080 - RNA, 22 nt, Human
ggcugcagagcugggugggccu

SEQ ID NO: 138081 - RNA, 22 nt, Human
ccagagccggcucccucagcuu

SEQ ID NO: 138082 - RNA, 22 nt, Human
gccugccuuuuggaggcacauu

SEQ ID NO: 138083 - RNA, 22 nt, Human
ucauucagguugggcaaguguc

SEQ ID NO: 138084 - RNA, 22 nt, Human
caguuuuugccauuaagaguaa

SEQ ID NO: 138085 - RNA, 22 nt, Human
acauuucugagcagggagcugu

SEQ ID NO: 138086 - RNA, 22 nt, Human
ccucugcugcuguugagcaccg

SEQ ID NO: 138087 - RNA, 22 nt, Human
cugggagcccugacuagccugg

SEQ ID NO: 138088 - RNA, 22 nt, Human
uguaugugcuugagaagguggg

SEQ ID NO: 138089 - RNA, 22 nt, Human
gccugccuuuguaugacccuga

SEQ ID NO: 138090 - RNA, 22 nt, Human
agggacagucuacuguucacug

SEQ ID NO: 138091 - RNA, 22 nt, Human
gucacuguuuccuauuauauuu

SEQ ID NO: 138092 - RNA, 22 nt, Human
acaacauucuuaaauacacuga

SEQ ID NO: 138093 - RNA, 22 nt, Human
caggaggcccaaagggcgcaga

SEQ ID NO: 138094 - RNA, 20 nt, Human
gccuggcacccggggcuggc

SEQ ID NO: 138095 - RNA, 17 nt, Human
ucugggcuucagugguc

SEQ ID NO: 138096 - RNA, 22 nt, Human
gucuggaguggggccugagaau

SEQ ID NO: 138097 - RNA, 22 nt, Human
aucacauucuuucaaagcaguc

SEQ ID NO: 138098 - RNA, 22 nt, Human
gagccuggagcuggaacgaagc

SEQ ID NO: 138099 - RNA, 22 nt, Human
uugccaggagcucaucugaggg

SEQ ID NO: 138100 - RNA, 22 nt, Human
acuuagaacaggcagaauucca

SEQ ID NO: 138101 - RNA, 22 nt, Human
agcugauuccacuuuuucccca

SEQ ID NO: 138102 - RNA, 22 nt, Human
cuuucauucuuagauauuagug

SEQ ID NO: 138103 - RNA, 22 nt, Human
ccugggagagucuguggucucc

SEQ ID NO: 138104 - RNA, 22 nt, Human
cagcaguggaacuacccaggga

SEQ ID NO: 138105 - RNA, 22 nt, Human
cggggcuguagcacagcugagc

SEQ ID NO: 138106 - RNA, 22 nt, Human
uccuucagugucccgcucaggu

SEQ ID NO: 138107 - RNA, 22 nt, Human
ggcugcugguagggguaggaag

SEQ ID NO: 138108 - RNA, 22 nt, Human
cgcugugugcagacugaaaaug

SEQ ID NO: 138109 - RNA, 22 nt, Human
ccacugaaggucaacauagagc

SEQ ID NO: 138110 - RNA, 22 nt, Human
cucagcagagaccagggaggaa

SEQ ID NO: 138111 - RNA, 22 nt, Human
aaagccuugggauuugugauca

SEQ ID NO: 138112 - RNA, 22 nt, Human
gugccugguuuggggaguguuc

SEQ ID NO: 138113 - RNA, 22 nt, Human
uaguuucuaaacugaacuguca

SEQ ID NO: 138114 - RNA, 22 nt, Human
ggagccuggcaaugcugcgucc

SEQ ID NO: 138115 - RNA, 22 nt, Human
gcagaagggaauaaggagcuuu

SEQ ID NO: 138116 - RNA, 22 nt, Human
ugcauggacucaucagacaaga

SEQ ID NO: 138117 - RNA, 20 nt, Human
cuguccccgaggucaccagg

SEQ ID NO: 138118 - RNA, 22 nt, Human
aaguguuaaaagauuaaaugcu

SEQ ID NO: 138119 - RNA, 22 nt, Human
uucagaaugugaccuuauuugg

SEQ ID NO: 138120 - RNA, 22 nt, Human
cauugcacugcagcccgggcaa

SEQ ID NO: 138121 - RNA, 22 nt, Human
aaggcccuggccccagcuucuu

SEQ ID NO: 138122 - RNA, 22 nt, Human
auacaucuugucagauucaugu

SEQ ID NO: 138123 - RNA, 22 nt, Human
caguguccucagccagcagcua

SEQ ID NO: 138124 - RNA, 22 nt, Human
caguggaggcucaagugugcuu

SEQ ID NO: 138125 - RNA, 22 nt, Human
ccuggcugggccugauuucuca

SEQ ID NO: 138126 - RNA, 22 nt, Human
acuguguggaccacucugaggc

SEQ ID NO: 138127 - RNA, 22 nt, Human
aaaguguacuaugucaugaaca

SEQ ID NO: 138128 - RNA, 22 nt, Human
uaaugugugucaucaguagagu

SEQ ID NO: 138129 - RNA, 22 nt, Human
acugagcucuugacugggaguu

SEQ ID NO: 138130 - RNA, 18 nt, Human
uacaugcauaaaugaagc

SEQ ID NO: 138131 - RNA, 22 nt, Human
uucccaggcugugcuaccagag

SEQ ID NO: 138132 - RNA, 22 nt, Human
cacagaauuaagggagaaauau

SEQ ID NO: 138133 - RNA, 22 nt, Human
uacaguaacauguuguacaagc

SEQ ID NO: 138134 - RNA, 22 nt, Human
cacaguaucuuuugaguaagca

SEQ ID NO: 138135 - RNA, 22 nt, Human
gaagagcuguagccugcucuuu

SEQ ID NO: 138136 - RNA, 22 nt, Human
cagcagcaggcgcacggccguc

SEQ ID NO: 138137 - RNA, 22 nt, Human
auuuugaugcuaucuaaugaau

SEQ ID NO: 138138 - RNA, 22 nt, Human
cucacagaugcugugggucagg

SEQ ID NO: 138139 - RNA, 22 nt, Human
caagaugaucccugaaggcagc

SEQ ID NO: 138140 - RNA, 22 nt, Human
aggguauaaagagcaagcagaa

SEQ ID NO: 138141 - RNA, 22 nt, Human
uuggaaggagucaaccagcuga

SEQ ID NO: 138142 - RNA, 22 nt, Human
ccaggcaucacgggcauguggc

SEQ ID NO: 138143 - RNA, 22 nt, Human
gggagggaagguaccuguguga

SEQ ID NO: 138144 - RNA, 22 nt, Human
agccagcaggugagugcagccu

SEQ ID NO: 138145 - RNA, 22 nt, Human
uuugugugcaacgcauggaguc

SEQ ID NO: 138146 - RNA, 19 nt, Human
gggcuucugggaucaagag

SEQ ID NO: 138147 - RNA, 22 nt, Human
uuuccucugacugcuccccugc

SEQ ID NO: 138148 - RNA, 22 nt, Human
cuggggggagcugcguccagca

SEQ ID NO: 138149 - RNA, 22 nt, Human
ugucucaguacacuccgauguu

SEQ ID NO: 138150 - RNA, 22 nt, Human
uauguguggcagcugggagugu

SEQ ID NO: 138151 - RNA, 22 nt, Human
cagaggugcauacaggucauua

SEQ ID NO: 138152 - RNA, 22 nt, Human
ucauugcaguagggagagaccc

SEQ ID NO: 138153 - RNA, 22 nt, Human
aaaagagucuuaggcagucaua

SEQ ID NO: 138154 - RNA, 22 nt, Human
ggagccugacagugcccagcau

SEQ ID NO: 138155 - RNA, 22 nt, Human
aacaugauggggaagaacaaga

SEQ ID NO: 138156 - RNA, 22 nt, Human
uguucucuucucauugaacaug

SEQ ID NO: 138157 - RNA, 22 nt, Human
acccagagcugggcuuggcaaa

SEQ ID NO: 138158 - RNA, 22 nt, Human
ucugcagcuuuuugguggggug

SEQ ID NO: 138159 - RNA, 22 nt, Human
ccugggaggcggagguugcagu

SEQ ID NO: 138160 - RNA, 22 nt, Human
ugcuuaauauugugauguaaua

SEQ ID NO: 138161 - RNA, 22 nt, Human
cauguacacucauguaacuaua

SEQ ID NO: 138162 - RNA, 22 nt, Human
gcaucuaaauaaacgugggagu

SEQ ID NO: 138163 - RNA, 23 nt, Human
ccugaagggucaggguccucagc

SEQ ID NO: 138164 - RNA, 22 nt, Human
uugaaggacauccuauuucuag

SEQ ID NO: 138165 - RNA, 22 nt, Human
ucuucacaugaccuucaugucu

SEQ ID NO: 138166 - RNA, 21 nt, Human
aggagcuguguuagcuggucg

SEQ ID NO: 138167 - RNA, 22 nt, Human
ccaccagcagugugcaaggauu

SEQ ID NO: 138168 - RNA, 22 nt, Human
auaugugugccauuucagcagu

SEQ ID NO: 138169 - RNA, 22 nt, Human
ugauuuccaauaaggagaaugu

SEQ ID NO: 138170 - RNA, 22 nt, Human
uaaaugugggggccacgggcuu

SEQ ID NO: 138171 - RNA, 22 nt, Human
cuggccuuuaaaaugaccuuau

SEQ ID NO: 138172 - RNA, 22 nt, Human
ugcaguggaaagacucagacuu

SEQ ID NO: 138173 - RNA, 21 nt, Human
cauuucuauugaugagaaaag

SEQ ID NO: 138174 - RNA, 22 nt, Human
cagggccuccccggcagucuuu

SEQ ID NO: 138175 - RNA, 22 nt, Human
cguggccuuugagugagcuccc

SEQ ID NO: 138176 - RNA, 22 nt, Human
ugcuucaggagaugucaccaug

SEQ ID NO: 138177 - RNA, 22 nt, Human
cuuggccucuucucaggguggg

SEQ ID NO: 138178 - RNA, 22 nt, Human
ugagcuuccucccugcauccau

SEQ ID NO: 138179 - RNA, 22 nt, Human
aggagucauaaaugugaacaaa

SEQ ID NO: 138180 - RNA, 22 nt, Human
ucucaggaagauuagggcuaag

SEQ ID NO: 138181 - RNA, 22 nt, Human
ucucuggagcugcagauccagg

SEQ ID NO: 138182 - RNA, 22 nt, Human
caggagcaaggagcagugggau

SEQ ID NO: 138183 - RNA, 22 nt, Human
ugcagcagcagggaggaggcuc

SEQ ID NO: 138184 - RNA, 22 nt, Human
ucagaggagccaaaguucugag

SEQ ID NO: 138185 - RNA, 22 nt, Human
ugcuggccgugagcucucggga

SEQ ID NO: 138186 - RNA, 22 nt, Human
cuuuccagaccuccuuguagcu

SEQ ID NO: 138187 - RNA, 22 nt, Human
acugucugcccugagaugccag

SEQ ID NO: 138188 - RNA, 22 nt, Human
agagccugugggagaugcagcu

SEQ ID NO: 138189 - RNA, 22 nt, Human
gcaaggcugugcacuuugcauu

SEQ ID NO: 138190 - RNA, 22 nt, Human
gcucagagcuugaaguuccacu

SEQ ID NO: 138191 - RNA, 22 nt, Human
auucagcaguuccugcuucagu

SEQ ID NO: 138192 - RNA, 22 nt, Human
acuuaguauuuuucagcuuuga

SEQ ID NO: 138193 - RNA, 22 nt, Human
uggcucaguuuagcagcucagu

SEQ ID NO: 138194 - RNA, 23 nt, Human
cugcuguguuggucucgauggga

SEQ ID NO: 138195 - RNA, 23 nt, Human
ggagugcaauggcgccaucucgg

SEQ ID NO: 138196 - RNA, 22 nt, Human
uuucuacucauccuuuggagaa

SEQ ID NO: 138197 - RNA, 22 nt, Human
gcugucacacaugggaucucag

SEQ ID NO: 138198 - RNA, 22 nt, Human
uaaauuauguuccauguccuuu

SEQ ID NO: 138199 - RNA, 22 nt, Human
aucaggaucagggcuagcagag

SEQ ID NO: 138200 - RNA, 22 nt, Human
aaugagacacgugaagcagaug

SEQ ID NO: 138201 - RNA, 22 nt, Human
ugccuguggaaaggcuggugcu

SEQ ID NO: 138202 - RNA, 22 nt, Human
aagaaauuaaugugccauuacu

SEQ ID NO: 138203 - RNA, 22 nt, Human
gaagccaguacugugcucugca

SEQ ID NO: 138204 - RNA, 22 nt, Human
caggagacaaguuagcagcuga

SEQ ID NO: 138205 - RNA, 22 nt, Human
aaaauuauucauggcuuuugga

SEQ ID NO: 138206 - RNA, 22 nt, Human
agccaaggagugcagguggcuu

SEQ ID NO: 138207 - RNA, 22 nt, Human
gaggccugaggcugccuggagc

SEQ ID NO: 138208 - RNA, 22 nt, Human
ucucuggggauggaccugggag

SEQ ID NO: 138209 - RNA, 22 nt, Human
uagcugccuuugggcuccugcu

SEQ ID NO: 138210 - RNA, 22 nt, Human
ucucucuccuaguuuuuagugg

SEQ ID NO: 138211 - RNA, 22 nt, Human
gcagccacucucauuccacgug

SEQ ID NO: 138212 - RNA, 22 nt, Human
auuguucuggauauuuacauug

SEQ ID NO: 138213 - RNA, 22 nt, Human
uguguagugauuuucuuccaac

SEQ ID NO: 138214 - RNA, 22 nt, Human
gggucucucucggcuccacgcg

SEQ ID NO: 138215 - RNA, 22 nt, Human
cagucccaaggaggaagcaguc

SEQ ID NO: 138216 - RNA, 20 nt, Human
ggccuuggguuucgccuguu

SEQ ID NO: 138217 - RNA, 22 nt, Human
gcccacacaccagcucaggagg

SEQ ID NO: 138218 - RNA, 22 nt, Human
ugccugggguuggcaaacugcu

SEQ ID NO: 138219 - RNA, 22 nt, Human
uuaacuauuauuagcaucuuug

SEQ ID NO: 138220 - RNA, 22 nt, Human
ggcugccugaggcagugagaga

SEQ ID NO: 138221 - RNA, 22 nt, Human
gaggcugggaaguccaagacca

SEQ ID NO: 138222 - RNA, 22 nt, Human
uacaguuaaaaaguucaauggu

SEQ ID NO: 138223 - RNA, 22 nt, Human
uaaaguauccaguuauucuucu

SEQ ID NO: 138224 - RNA, 22 nt, Human
ccugccugcggcccgcggggag

SEQ ID NO: 138225 - RNA, 22 nt, Human
uggcuguggacucagauggcuc

SEQ ID NO: 138226 - RNA, 22 nt, Human
uacaaagucaccagcuucuugc

SEQ ID NO: 138227 - RNA, 22 nt, Human
guccugggccugcugaggcuga

SEQ ID NO: 138228 - RNA, 22 nt, Human
ggauggagaugaccauggugac

SEQ ID NO: 138229 - RNA, 22 nt, Human
uugaauaguuuuggauagcaua

SEQ ID NO: 138230 - RNA, 22 nt, Human
ucugccugcggcugcagguggc

SEQ ID NO: 138231 - RNA, 22 nt, Human
uuucaguuuaugucuugaauua

SEQ ID NO: 138232 - RNA, 22 nt, Human
acaguauauaugguuaucugau

SEQ ID NO: 138233 - RNA, 22 nt, Human
gagauucuguagucaggcaucu

SEQ ID NO: 138234 - RNA, 22 nt, Human
auacauguuguaccauauguuu

SEQ ID NO: 138235 - RNA, 22 nt, Human
cagcucccuauggugaggcgac

SEQ ID NO: 138236 - RNA, 22 nt, Human
gccugcagugagugcagaaggu

SEQ ID NO: 138237 - RNA, 22 nt, Human
uccucugcuguucugguucuuu

SEQ ID NO: 138238 - RNA, 22 nt, Human
aagcagcauucagugaaaugug

SEQ ID NO: 138239 - RNA, 22 nt, Human
gacagaagaggaacuuggacag

SEQ ID NO: 138240 - RNA, 22 nt, Human
gcugugugacccuagccaguag

SEQ ID NO: 138241 - RNA, 23 nt, Human
aggagccaggugcagcccuugug

SEQ ID NO: 138242 - RNA, 20 nt, Human
ccaagagcaugcaugaggaa

SEQ ID NO: 138243 - RNA, 22 nt, Human
ggggcagcucccgagggcagga

SEQ ID NO: 138244 - RNA, 22 nt, Human
cgcugggggaacagcgagggug

SEQ ID NO: 138245 - RNA, 22 nt, Human
uugacaguugcaauggugaucu

SEQ ID NO: 138246 - RNA, 22 nt, Human
gguggcugaaucaaaucaggcc

SEQ ID NO: 138247 - RNA, 20 nt, Human
caggaugauuggacacgaug

SEQ ID NO: 138248 - RNA, 23 nt, Human
ucuugaaaagccuacagcaguuc

SEQ ID NO: 138249 - RNA, 22 nt, Human
agugacugggcagggcagggcc

SEQ ID NO: 138250 - RNA, 22 nt, Human
cagaggccucacuuccagccag

SEQ ID NO: 138251 - RNA, 22 nt, Human
uuagaaaacauaagugguaaag

SEQ ID NO: 138252 - RNA, 22 nt, Human
uuccuguauucuaaagggaaag

SEQ ID NO: 138253 - RNA, 22 nt, Human
cagagcugcacauucuaugaug

SEQ ID NO: 138254 - RNA, 22 nt, Human
agaggcuccaccuucucugucc

SEQ ID NO: 138255 - RNA, 22 nt, Human
uccugagagcagaguccaggug

SEQ ID NO: 138256 - RNA, 22 nt, Human
acaaaugcuuaguucaccaaaa

SEQ ID NO: 138257 - RNA, 22 nt, Human
augcacagacccaaaggccauc

SEQ ID NO: 138258 - RNA, 21 nt, Human
gccuggcagguggaagggcuc

SEQ ID NO: 138259 - RNA, 22 nt, Human
cugugagucuucagcaaguguu

SEQ ID NO: 138260 - RNA, 22 nt, Human
auucuucugccuacuuucaucc

SEQ ID NO: 138261 - RNA, 22 nt, Human
gcaggcaggagcccaacugccu

SEQ ID NO: 138262 - RNA, 20 nt, Human
uuuaacuggccuucuggcuc

SEQ ID NO: 138263 - RNA, 22 nt, Human
gcuggggucugugaggagggcu

SEQ ID NO: 138264 - RNA, 22 nt, Human
uggccucucuaccaggcagccu

SEQ ID NO: 138265 - RNA, 22 nt, Human
cagcagugucuccagcaucaca

SEQ ID NO: 138266 - RNA, 22 nt, Human
ccaucuccacugucccugucaa

SEQ ID NO: 138267 - RNA, 22 nt, Human
cuggcucauagagcagcuccaa

SEQ ID NO: 138268 - RNA, 22 nt, Human
gaacaauagugguaacaaagcc

SEQ ID NO: 138269 - RNA, 22 nt, Human
ugugugggcgaagacagccuuu

SEQ ID NO: 138270 - RNA, 22 nt, Human
gcuuuacaugauuucucacccu

SEQ ID NO: 138271 - RNA, 22 nt, Human
ugcccugcagugagugcgucug

SEQ ID NO: 138272 - RNA, 22 nt, Human
cuugacagaagguuuuauccua

SEQ ID NO: 138273 - RNA, 22 nt, Human
uggcagggaguugcaggauuuc

SEQ ID NO: 138274 - RNA, 22 nt, Human
uuaaauauuauguugucugcaa

SEQ ID NO: 138275 - RNA, 22 nt, Human
gucaugccuggcuucuuagaca

SEQ ID NO: 138276 - RNA, 22 nt, Human
acucugccuuucagcagaugaa

SEQ ID NO: 138277 - RNA, 22 nt, Human
cagagagagugggguguggauu

SEQ ID NO: 138278 - RNA, 22 nt, Human
caggcagcauuuacucugauga

SEQ ID NO: 138279 - RNA, 19 nt, Human
ugcaggaggacugagcaga

SEQ ID NO: 138280 - RNA, 22 nt, Human
acagcuguauccccagagcuca

SEQ ID NO: 138281 - RNA, 22 nt, Human
auugucugaauccaaagcucug

SEQ ID NO: 138282 - RNA, 22 nt, Human
aggcuggaguacaguggcuauu

SEQ ID NO: 138283 - RNA, 22 nt, Human
ccaggcugcuuagccuuaucuu

SEQ ID NO: 138284 - RNA, 22 nt, Human
agcugcaggccucuccugggga

SEQ ID NO: 138285 - RNA, 22 nt, Human
gaugguuuggaaugaaguagcu

SEQ ID NO: 138286 - RNA, 22 nt, Human
ugcugccaagcccgugcuccug

SEQ ID NO: 138287 - RNA, 22 nt, Human
uuuuggucagguuggucucgaa

SEQ ID NO: 138288 - RNA, 17 nt, Human
gauuuccugaaguucuu

SEQ ID NO: 138289 - RNA, 18 nt, Human
uacaguauuuucucgccu

SEQ ID NO: 138290 - RNA, 21 nt, Human
aggugcagagccagggaccag

SEQ ID NO: 138291 - RNA, 22 nt, Human
cacaggaggaggugcccgggcc

SEQ ID NO: 138292 - RNA, 22 nt, Human
auguguacaaccaagcacuaaa

SEQ ID NO: 138293 - RNA, 22 nt, Human
uuuauuccaugugucuaugacc

SEQ ID NO: 138294 - RNA, 21 nt, Human
aucauucuggaaaauucaagc

SEQ ID NO: 138295 - RNA, 22 nt, Human
aucuccaggcauuucaagagac

SEQ ID NO: 138296 - RNA, 22 nt, Human
augccuggacugacaugcacug

SEQ ID NO: 138297 - RNA, 22 nt, Human
gagcucugggaaacaaagugua

SEQ ID NO: 138298 - RNA, 22 nt, Human
gccuggugugcgccgcgcagcu

SEQ ID NO: 138299 - RNA, 22 nt, Human
ccaggacuuuaaguccagcacu

SEQ ID NO: 138300 - RNA, 22 nt, Human
auacuuuggggguuaguguaga

SEQ ID NO: 138301 - RNA, 22 nt, Human
agagcuggauggucaagauggc

SEQ ID NO: 138302 - RNA, 22 nt, Human
ggucaugcugugaaucagugcu

SEQ ID NO: 138303 - RNA, 22 nt, Human
ucaggacagccagggugcagac

SEQ ID NO: 138304 - RNA, 20 nt, Human
agccugccagcuggcccaga

SEQ ID NO: 138305 - RNA, 23 nt, Human
caguggagacucaugcuuccuua

SEQ ID NO: 138306 - RNA, 22 nt, Human
gaggaacccagcugggguugcc

SEQ ID NO: 138307 - RNA, 22 nt, Human
acaguuaucuuugaaauagaga

SEQ ID NO: 138308 - RNA, 23 nt, Human
ucuuuacagcagcaggauuugga

SEQ ID NO: 138309 - RNA, 21 nt, Human
uguguauguccaaugcccuac

SEQ ID NO: 138310 - RNA, 23 nt, Human
uugaaggagaaagcuuucuuggu

SEQ ID NO: 138311 - RNA, 22 nt, Human
cugagcccaggcgggagcugag

SEQ ID NO: 138312 - RNA, 16 nt, Human
gccuggaguggcaggg

SEQ ID NO: 138313 - RNA, 22 nt, Human
gccuggcaggccuguuggggcu

SEQ ID NO: 138314 - RNA, 22 nt, Human
agaugaagauaucugcaggggc

SEQ ID NO: 138315 - RNA, 22 nt, Human
ucagaggaaaggucagauggcu

SEQ ID NO: 138316 - RNA, 22 nt, Human
uguguauguaagcaugugcaua

SEQ ID NO: 138317 - RNA, 22 nt, Human
uacaaguauauucuagugauau

SEQ ID NO: 138318 - RNA, 22 nt, Human
cucucugguacauagaguuugg

SEQ ID NO: 138319 - RNA, 21 nt, Human
ccuccaggagcagagcccuga

SEQ ID NO: 138320 - RNA, 23 nt, Human
acacaauagaguacuauucagcc

SEQ ID NO: 138321 - RNA, 22 nt, Human
uuacagcuuacauuuuaccuug

SEQ ID NO: 138322 - RNA, 22 nt, Human
cucucucuuuagaagcgucugg

SEQ ID NO: 138323 - RNA, 18 nt, Human
uggagccauugccaccau

SEQ ID NO: 138324 - RNA, 22 nt, Human
cuggcaggcggcagagcccagg

SEQ ID NO: 138325 - RNA, 22 nt, Human
uagacacaucaaguauaguuaa

SEQ ID NO: 138326 - RNA, 22 nt, Human
gcugauuauuacaugucugugg

SEQ ID NO: 138327 - RNA, 22 nt, Human
cuggccaacuugcuuguuggca

SEQ ID NO: 138328 - RNA, 22 nt, Human
agccucucuccagcuuggcaga

SEQ ID NO: 138329 - RNA, 22 nt, Human
agaaugcauuuuguguagcuau

SEQ ID NO: 138330 - RNA, 22 nt, Human
ccugggagguggagguugcagc

SEQ ID NO: 138331 - RNA, 22 nt, Human
uaggccaggacagagcuuccag

SEQ ID NO: 138332 - RNA, 22 nt, Human
gaggccuggcugggaggaggug

SEQ ID NO: 138333 - RNA, 22 nt, Human
gggcccuggacguggcggcaga

SEQ ID NO: 138334 - RNA, 22 nt, Human
cugccuggagcauucugaaggu

SEQ ID NO: 138335 - RNA, 22 nt, Human
aggcugcuuucauggccgcccc

SEQ ID NO: 138336 - RNA, 20 nt, Human
gggugagauguaggagaggg

SEQ ID NO: 138337 - RNA, 23 nt, Human
ugaaggccuggaggacgcguugu

SEQ ID NO: 138338 - RNA, 22 nt, Human
agcuguguuaggauguuaauaa

SEQ ID NO: 138339 - RNA, 18 nt, Human
cagaaguccuucaaggcc

SEQ ID NO: 138340 - RNA, 22 nt, Human
uaacagaagaugaaacuucuuu

SEQ ID NO: 138341 - RNA, 22 nt, Human
aacauauaaacucuuaaguuca

SEQ ID NO: 138342 - RNA, 22 nt, Human
ccauaaggagccagacauucca

SEQ ID NO: 138343 - RNA, 22 nt, Human
agcagagucugugugcacuuua

SEQ ID NO: 138344 - RNA, 22 nt, Human
ucuggccuuaucuguccaagcc

SEQ ID NO: 138345 - RNA, 22 nt, Human
ccaaaugcuccacugacuuugg

SEQ ID NO: 138346 - RNA, 22 nt, Human
caguuucuuggaugccaauuuc

SEQ ID NO: 138347 - RNA, 21 nt, Human
uuugaaagcuacaucuauagc

SEQ ID NO: 138348 - RNA, 22 nt, Human
ucaauucaacacaugcacauug

SEQ ID NO: 138349 - RNA, 22 nt, Human
ugagccuggagucguggagggg

SEQ ID NO: 138350 - RNA, 22 nt, Human
cugcugagguccuugcucagac

SEQ ID NO: 138351 - RNA, 22 nt, Human
acacugcagaugaaagcauaag

SEQ ID NO: 138352 - RNA, 22 nt, Human
gagcucccaggccccagcaagg

SEQ ID NO: 138353 - RNA, 22 nt, Human
gcacugaacuuuaaucauuucu

SEQ ID NO: 138354 - RNA, 22 nt, Human
acauuugucuucuuucagauua

SEQ ID NO: 138355 - RNA, 22 nt, Human
ugagcuguagcagaugcuguug

SEQ ID NO: 138356 - RNA, 19 nt, Human
uccaaaggacccaccucca

SEQ ID NO: 138357 - RNA, 22 nt, Human
agaaaugacacacaugagacau

SEQ ID NO: 138358 - RNA, 22 nt, Human
aaagaucagucugaagcaacau

SEQ ID NO: 138359 - RNA, 22 nt, Human
gacuuucucuccucccaggugu

SEQ ID NO: 138360 - RNA, 22 nt, Human
ucagggcacauucugcaguggc

SEQ ID NO: 138361 - RNA, 22 nt, Human
agcuccugcacccagccuugag

SEQ ID NO: 138362 - RNA, 22 nt, Human
gugugggcuaugugcgugggca

SEQ ID NO: 138363 - RNA, 22 nt, Human
cauggccuugagugacugcacu

SEQ ID NO: 138364 - RNA, 22 nt, Human
caggcugagcucuggccugggc

SEQ ID NO: 138365 - RNA, 22 nt, Human
ccaggagcuggagggugcagug

SEQ ID NO: 138366 - RNA, 22 nt, Human
ccacaggggcccacgagccgcu

SEQ ID NO: 138367 - RNA, 22 nt, Human
uggcccugugugcaggcugcac

SEQ ID NO: 138368 - RNA, 22 nt, Human
gcuggcaucacuggcuucggug

SEQ ID NO: 138369 - RNA, 22 nt, Human
cagcagcuggugagacacagcc

SEQ ID NO: 138370 - RNA, 23 nt, Human
ugggccuggccucccaguccagc

SEQ ID NO: 138371 - RNA, 22 nt, Human
aaaaguuuaagacucauucuag

SEQ ID NO: 138372 - RNA, 21 nt, Human
ugcaggagucugugagucagg

SEQ ID NO: 138373 - RNA, 22 nt, Human
ucuguggcuuucuuauguugua

SEQ ID NO: 138374 - RNA, 22 nt, Human
aaccauuugccauuaucuuaag

SEQ ID NO: 138375 - RNA, 22 nt, Human
auggauaauggugauaguugca

SEQ ID NO: 138376 - RNA, 22 nt, Human
cugggccuagcaacagaggagu

SEQ ID NO: 138377 - RNA, 22 nt, Human
ggggaugguggcauuuguaaaa

SEQ ID NO: 138378 - RNA, 22 nt, Human
aggccugucuggggcucagcca

SEQ ID NO: 138379 - RNA, 22 nt, Human
uuauuugcccauguuuagcaga

SEQ ID NO: 138380 - RNA, 22 nt, Human
ucauacaucuuguauaucuauc

SEQ ID NO: 138381 - RNA, 22 nt, Human
ucauugcaagcucauuuaucug

SEQ ID NO: 138382 - RNA, 22 nt, Human
ucucuguguguuggcuguauau

SEQ ID NO: 138383 - RNA, 22 nt, Human
ggcuucaccgcgggguugcagg

SEQ ID NO: 138384 - RNA, 22 nt, Human
aagcuuccugaaugcucauuua

SEQ ID NO: 138385 - RNA, 22 nt, Human
ccacagggcacaagggagguug

SEQ ID NO: 138386 - RNA, 22 nt, Human
aacagcaauagcacuauucauu

SEQ ID NO: 138387 - RNA, 22 nt, Human
ggcagcucaccucugguccagg

SEQ ID NO: 138388 - RNA, 22 nt, Human
gggagggacacaaagaguuccc

SEQ ID NO: 138389 - RNA, 22 nt, Human
ccagcccugaacccugcugcau

SEQ ID NO: 138390 - RNA, 22 nt, Human
uggccucuggcugaggacuaac

SEQ ID NO: 138391 - RNA, 22 nt, Human
ggagcuggucagccuugagcau

SEQ ID NO: 138392 - RNA, 22 nt, Human
aaauguaguauguugcauguau

SEQ ID NO: 138393 - RNA, 22 nt, Human
cagcagcugauggggaagugau

SEQ ID NO: 138394 - RNA, 22 nt, Human
agccagcagggcuuagaggaca

SEQ ID NO: 138395 - RNA, 22 nt, Human
augcaguggcagcuccuggugu

SEQ ID NO: 138396 - RNA, 22 nt, Human
caggugggagcggagacugauu

SEQ ID NO: 138397 - RNA, 19 nt, Human
gcucagagggcccugugcu

SEQ ID NO: 138398 - RNA, 22 nt, Human
cagggccacccucugcugggug

SEQ ID NO: 138399 - RNA, 22 nt, Human
gagaggcuaugagguucugugu

SEQ ID NO: 138400 - RNA, 19 nt, Human
cucugccucuggcuguggc

SEQ ID NO: 138401 - RNA, 22 nt, Human
aaguuauugcagcaauccaagu

SEQ ID NO: 138402 - RNA, 22 nt, Human
gcucccaccaggcagaccuacc

SEQ ID NO: 138403 - RNA, 22 nt, Human
gcaagcaagcagguagagcuga

SEQ ID NO: 138404 - RNA, 22 nt, Human
uaaaugcagauuccugagccua

SEQ ID NO: 138405 - RNA, 22 nt, Human
caguggcugugaccagggaccu

SEQ ID NO: 138406 - RNA, 22 nt, Human
guguuuccucacuucucugacu

SEQ ID NO: 138407 - RNA, 22 nt, Human
cugugucccuugucccagagcc

SEQ ID NO: 138408 - RNA, 22 nt, Human
cccaggagagaggccaguuggc

SEQ ID NO: 138409 - RNA, 22 nt, Human
aguauacauauauuagccuucg

SEQ ID NO: 138410 - RNA, 22 nt, Human
uccagcagguuggucaggugca

SEQ ID NO: 138411 - RNA, 22 nt, Human
ucauugcauuuauucacuggca

SEQ ID NO: 138412 - RNA, 22 nt, Human
aagaggucauaccagauaaggg

SEQ ID NO: 138413 - RNA, 22 nt, Human
uuugggcaguagauguaucacu

SEQ ID NO: 138414 - RNA, 22 nt, Human
uuucucugcuguguuggcagcu

SEQ ID NO: 138415 - RNA, 21 nt, Human
uugaagcaaggguggcucuga

SEQ ID NO: 138416 - RNA, 22 nt, Human
agcugcagagguuugugcaaca

SEQ ID NO: 138417 - RNA, 22 nt, Human
ucuuacauauagcaugaguaca

SEQ ID NO: 138418 - RNA, 22 nt, Human
ccaggcagagugcuccagaaag

SEQ ID NO: 138419 - RNA, 22 nt, Human
acaaagucucuaauaaucuucu

SEQ ID NO: 138420 - RNA, 22 nt, Human
acagauugaucuugagaauuau

SEQ ID NO: 138421 - RNA, 22 nt, Human
ccugccaggcuuugggcuucug

SEQ ID NO: 138422 - RNA, 22 nt, Human
auguuacacauaggcauaaaug

SEQ ID NO: 138423 - RNA, 19 nt, Human
gcugugugaccuugggcaa

SEQ ID NO: 138424 - RNA, 22 nt, Human
uugcauguuauuuaaucuguau

SEQ ID NO: 138425 - RNA, 20 nt, Human
aguuauaguaucuagccaug

SEQ ID NO: 138426 - RNA, 22 nt, Human
ugugaaagcaagucuaguucuc

SEQ ID NO: 138427 - RNA, 22 nt, Human
aacuuuauuguuaggggcuaaa

SEQ ID NO: 138428 - RNA, 22 nt, Human
gcacaauuauuuaugcaguaug

SEQ ID NO: 138429 - RNA, 22 nt, Human
uuggaaggugagucccuggguu

SEQ ID NO: 138430 - RNA, 22 nt, Human
auguggcuuuucuaacccuucc

SEQ ID NO: 138431 - RNA, 22 nt, Human
gaggaaccaaaucagcuugcac

SEQ ID NO: 138432 - RNA, 22 nt, Human
gaguuauuucagaaggaaagau

SEQ ID NO: 138433 - RNA, 22 nt, Human
aguuuauguagaauuggcaaua

SEQ ID NO: 138434 - RNA, 22 nt, Human
guguccagggccguguugucuu

SEQ ID NO: 138435 - RNA, 22 nt, Human
auuuguagugaagugaaaauaa

SEQ ID NO: 138436 - RNA, 22 nt, Human
ggaggcccagagaggugaagug

SEQ ID NO: 138437 - RNA, 22 nt, Human
ucuugacauugcaaucuucaga

SEQ ID NO: 138438 - RNA, 22 nt, Human
cagagcagggugcaccuugggc

SEQ ID NO: 138439 - RNA, 22 nt, Human
uaaaugugagugaugcggugaa

SEQ ID NO: 138440 - RNA, 22 nt, Human
ugcauuugucuugucucaugaa

SEQ ID NO: 138441 - RNA, 21 nt, Human
gcucucugcaugguggcucag

SEQ ID NO: 138442 - RNA, 22 nt, Human
caguucuuuguggggaguucuc

SEQ ID NO: 138443 - RNA, 22 nt, Human
ugcagccaccaccucugcugaa

SEQ ID NO: 138444 - RNA, 22 nt, Human
ggaccuggcaauuugcaucucu

SEQ ID NO: 138445 - RNA, 22 nt, Human
cuacauuucccagcugccuucc

SEQ ID NO: 138446 - RNA, 22 nt, Human
ugcacacacgcggcacaucugu

SEQ ID NO: 138447 - RNA, 22 nt, Human
uguuuuaagagcgcacuuuaua

SEQ ID NO: 138448 - RNA, 22 nt, Human
cccuggaggcaaagguugcagu

SEQ ID NO: 138449 - RNA, 22 nt, Human
ugcacuggggucccagcgcacg

SEQ ID NO: 138450 - RNA, 22 nt, Human
cugauguguuuuaguuugguaa

SEQ ID NO: 138451 - RNA, 22 nt, Human
gaaggccacaagagaaguuaag

SEQ ID NO: 138452 - RNA, 22 nt, Human
ccaccaggacagcccugagggg

SEQ ID NO: 138453 - RNA, 22 nt, Human
ugccucagcugaggccgcucca

SEQ ID NO: 138454 - RNA, 22 nt, Human
agcaggaaguagucuguaagca

SEQ ID NO: 138455 - RNA, 22 nt, Human
uuucuuguaagauguuuauuaa

SEQ ID NO: 138456 - RNA, 20 nt, Human
gcaggcagggaaugggggug

SEQ ID NO: 138457 - RNA, 22 nt, Human
gcacagggaggcuggccuggcc

SEQ ID NO: 138458 - RNA, 22 nt, Human
gaaacuguauguaguuuuuggg

SEQ ID NO: 138459 - RNA, 22 nt, Human
aaaucaguucucccuuucuuca

SEQ ID NO: 138460 - RNA, 22 nt, Human
uuuuugaaggcugaugugauua

SEQ ID NO: 138461 - RNA, 22 nt, Human
gucaggaugggcagccaaacua

SEQ ID NO: 138462 - RNA, 22 nt, Human
cucugaacucuugggcagcaug

SEQ ID NO: 138463 - RNA, 22 nt, Human
ccaguugguuucaaugggacag

SEQ ID NO: 138464 - RNA, 22 nt, Human
ccagggcuccauugcucauccu

SEQ ID NO: 138465 - RNA, 22 nt, Human
cuuauuuugcugaugacccagg

SEQ ID NO: 138466 - RNA, 22 nt, Human
gaagaacacuucaugauucauu

SEQ ID NO: 138467 - RNA, 22 nt, Human
ugcuggccaacaaggcuccaag

SEQ ID NO: 138468 - RNA, 22 nt, Human
cugcaggggccucgagcacagg

SEQ ID NO: 138469 - RNA, 22 nt, Human
aucaaaaugcuccagugauggu

SEQ ID NO: 138470 - RNA, 22 nt, Human
aaaugucugagacuucugaacu

SEQ ID NO: 138471 - RNA, 22 nt, Human
caguaugagaguugaaucaagg

SEQ ID NO: 138472 - RNA, 22 nt, Human
auccccagaaaauaggugccua

SEQ ID NO: 138473 - RNA, 22 nt, Human
ugccugccaugcagaaagcuga

SEQ ID NO: 138474 - RNA, 22 nt, Human
ugcugccucagcuuccugggcu

SEQ ID NO: 138475 - RNA, 22 nt, Human
gugugugugcauauaacauaua

SEQ ID NO: 138476 - RNA, 22 nt, Human
gcugcucuuuucagagaugaga

SEQ ID NO: 138477 - RNA, 22 nt, Human
acugcagccuagggaccacagu

SEQ ID NO: 138478 - RNA, 22 nt, Human
ucccuguccugggcaaucccag

SEQ ID NO: 138479 - RNA, 22 nt, Human
ggcuccugaaagacuaugggaa

SEQ ID NO: 138480 - RNA, 22 nt, Human
ucacaggcuccagggccuggau

SEQ ID NO: 138481 - RNA, 21 nt, Human
ccagccucagaucagggagcu

SEQ ID NO: 138482 - RNA, 22 nt, Human
uacauuccacuagugacuggcg

SEQ ID NO: 138483 - RNA, 22 nt, Human
agucccaguucgguucuuccuc

SEQ ID NO: 138484 - RNA, 22 nt, Human
acagagcuuaggaugacuccca

SEQ ID NO: 138485 - RNA, 22 nt, Human
ucaggaucggccuuuuuuuaag

SEQ ID NO: 138486 - RNA, 22 nt, Human
ggcuccuguccuccuggagcuc

SEQ ID NO: 138487 - RNA, 22 nt, Human
ucccagccuuccagucugguuu

SEQ ID NO: 138488 - RNA, 22 nt, Human
gccaggcuggugucacaacucu

SEQ ID NO: 138489 - RNA, 22 nt, Human
ugcagggccgcuggaggucaug

SEQ ID NO: 138490 - RNA, 22 nt, Human
ugggacagagugagcuuuggcc

SEQ ID NO: 138491 - RNA, 22 nt, Human
aggcugaggcagguggaucacc

SEQ ID NO: 138492 - RNA, 22 nt, Human
augcccaaugucacaauuuuug

SEQ ID NO: 138493 - RNA, 22 nt, Human
uagauuucucauucauagauug

SEQ ID NO: 138494 - RNA, 22 nt, Human
gcagggccagggcucaggcugu

SEQ ID NO: 138495 - RNA, 22 nt, Human
gucccagaggacagggucacau

SEQ ID NO: 138496 - RNA, 22 nt, Human
cagcaggggaacugugggccag

SEQ ID NO: 138497 - RNA, 22 nt, Human
aaaguuugaaugauauauuagu

SEQ ID NO: 138498 - RNA, 22 nt, Human
agggacugagcuaggaucuagu

SEQ ID NO: 138499 - RNA, 22 nt, Human
agcaagcuaccuagauagucua

SEQ ID NO: 138500 - RNA, 22 nt, Human
augcuguggggagugaggguag

SEQ ID NO: 138501 - RNA, 22 nt, Human
ugaugauguuuaucuugguauu

SEQ ID NO: 138502 - RNA, 22 nt, Human
uuguaugcuguaggcaugcauu

SEQ ID NO: 138503 - RNA, 22 nt, Human
gggcugccuuucuucugggagc

SEQ ID NO: 138504 - RNA, 22 nt, Human
caugggagguuggcuuggcaug

SEQ ID NO: 138505 - RNA, 22 nt, Human
aguguccccuacagaggcauuc

SEQ ID NO: 138506 - RNA, 22 nt, Human
cauggcugcgagaagagugggu

SEQ ID NO: 138507 - RNA, 18 nt, Human
uucacaggaaaugucuuu

SEQ ID NO: 138508 - RNA, 22 nt, Human
ggcacugggagaggugagacgg

SEQ ID NO: 138509 - RNA, 22 nt, Human
uuuaaucuucaaaauagucuua

SEQ ID NO: 138510 - RNA, 22 nt, Human
cuccagggagcuguggagguuu

SEQ ID NO: 138511 - RNA, 22 nt, Human
uaacauuagguagacauaagcc

SEQ ID NO: 138512 - RNA, 22 nt, Human
uccuucagccaugggcucucca

SEQ ID NO: 138513 - RNA, 22 nt, Human
gcacagggagcaggucucuggu

SEQ ID NO: 138514 - RNA, 22 nt, Human
ucaggcugcccguucagggcuc

SEQ ID NO: 138515 - RNA, 22 nt, Human
ggcuggagugggcuccagaguu

SEQ ID NO: 138516 - RNA, 22 nt, Human
uuaaucuucagggacucuugcu

SEQ ID NO: 138517 - RNA, 22 nt, Human
uuugaaaguguuuacuugggaa

SEQ ID NO: 138518 - RNA, 22 nt, Human
guuaacuuccccaugucugcau

SEQ ID NO: 138519 - RNA, 23 nt, Human
uuucaacuccugccauuauuucu

SEQ ID NO: 138520 - RNA, 22 nt, Human
aggcugggaaauguagucuucc

SEQ ID NO: 138521 - RNA, 22 nt, Human
gaacagcuucuugggagcuggg

SEQ ID NO: 138522 - RNA, 22 nt, Human
ugggagagugcucaaugugcaa

SEQ ID NO: 138523 - RNA, 22 nt, Human
gcagccacagaggagggaugca

SEQ ID NO: 138524 - RNA, 18 nt, Human
augggaggggccaagaga

SEQ ID NO: 138525 - RNA, 22 nt, Human
cauugcacagcccuguggugau

SEQ ID NO: 138526 - RNA, 22 nt, Human
cagcugccuucugcgggaaguc

SEQ ID NO: 138527 - RNA, 22 nt, Human
gcucagaaaagugaggcucagu

SEQ ID NO: 138528 - RNA, 22 nt, Human
ucagugugacugauggcuuuau

SEQ ID NO: 138529 - RNA, 22 nt, Human
ugaaagcucugucaucauuccu

SEQ ID NO: 138530 - RNA, 22 nt, Human
uucagcaaacacgaugcuuguu

SEQ ID NO: 138531 - RNA, 22 nt, Human
gaggggcugggguugacuccaa

SEQ ID NO: 138532 - RNA, 22 nt, Human
ggcuccuggcaucuggugggua

SEQ ID NO: 138533 - RNA, 22 nt, Human
gggagagagaaaacguggcgca

SEQ ID NO: 138534 - RNA, 22 nt, Human
uucuucaauuuuccauauacug

SEQ ID NO: 138535 - RNA, 22 nt, Human
ugggcucucuggcaggaaggcu

SEQ ID NO: 138536 - RNA, 22 nt, Human
ugggccaggauuucaagacccu

SEQ ID NO: 138537 - RNA, 22 nt, Human
uggcuccuaggauggugccugg

SEQ ID NO: 138538 - RNA, 22 nt, Human
ugcauuauuugcaugugccugu

SEQ ID NO: 138539 - RNA, 22 nt, Human
ugcaggugugguuccucagcca

SEQ ID NO: 138540 - RNA, 22 nt, Human
uagaaacaucagcuaaccaaaa

SEQ ID NO: 138541 - RNA, 22 nt, Human
ucagggcaagucucagaagguu

SEQ ID NO: 138542 - RNA, 22 nt, Human
caggccugugaguugaggcccc

SEQ ID NO: 138543 - RNA, 22 nt, Human
gaugugugcugcauaguauauu

SEQ ID NO: 138544 - RNA, 20 nt, Human
ggccugagcauggcuggcag

SEQ ID NO: 138545 - RNA, 22 nt, Human
cauguguguggacgagcguggc

SEQ ID NO: 138546 - RNA, 22 nt, Human
cugugugcaggugcuggguacc

SEQ ID NO: 138547 - RNA, 22 nt, Human
caggucagagucccccuguccu

SEQ ID NO: 138548 - RNA, 22 nt, Human
caagcccaggauuccccaguua

SEQ ID NO: 138549 - RNA, 22 nt, Human
ugaagcugugggcaguggagcc

SEQ ID NO: 138550 - RNA, 21 nt, Human
gcacagggacagaucaucaca

SEQ ID NO: 138551 - RNA, 22 nt, Human
agagcuggguggacuuguaguu

SEQ ID NO: 138552 - RNA, 22 nt, Human
cugucagguuggucucagagcu

SEQ ID NO: 138553 - RNA, 22 nt, Human
gagccagcgccuugccucuggg

SEQ ID NO: 138554 - RNA, 22 nt, Human
aauguguagcauuuaaugcagu

SEQ ID NO: 138555 - RNA, 22 nt, Human
gaaggagggugcggaucugagc

SEQ ID NO: 138556 - RNA, 22 nt, Human
gaaaggccagcucacagaugag

SEQ ID NO: 138557 - RNA, 21 nt, Human
ccacaggggcuccccugucag

SEQ ID NO: 138558 - RNA, 22 nt, Human
ucuuccagcaaugugaaaucac

SEQ ID NO: 138559 - RNA, 22 nt, Human
uaacuuuucuaggugugauaau

SEQ ID NO: 138560 - RNA, 22 nt, Human
ccaggccaaauucagucagcag

SEQ ID NO: 138561 - RNA, 22 nt, Human
aaggacuccaauucuuucaucu

SEQ ID NO: 138562 - RNA, 22 nt, Human
gggcaugguggcaggcaccugu

SEQ ID NO: 138563 - RNA, 22 nt, Human
ucuagaaauuuugccuuguauu

SEQ ID NO: 138564 - RNA, 22 nt, Human
ccaguccagugccaugcauggc

SEQ ID NO: 138565 - RNA, 22 nt, Human
auguguaugauaccuuugcuga

SEQ ID NO: 138566 - RNA, 22 nt, Human
uauuuccaccuauuauuuucug

SEQ ID NO: 138567 - RNA, 22 nt, Human
agccucugcuuaugcaaaggua

SEQ ID NO: 138568 - RNA, 22 nt, Human
agaagaaacugucggggauauu

SEQ ID NO: 138569 - RNA, 22 nt, Human
cugcuucuccaaaguaggacuu

SEQ ID NO: 138570 - RNA, 22 nt, Human
ugaaagguagcuggccucauag

SEQ ID NO: 138571 - RNA, 22 nt, Human
auuguggugucaguuauaggca

SEQ ID NO: 138572 - RNA, 22 nt, Human
cuguguguccucggacgaguuu

SEQ ID NO: 138573 - RNA, 22 nt, Human
uuugcauuaguuuagauuucaa

SEQ ID NO: 138574 - RNA, 22 nt, Human
cagaaauucccauuucagauuc

SEQ ID NO: 138575 - RNA, 22 nt, Human
agcaccaucagaugcaauaucu

SEQ ID NO: 138576 - RNA, 22 nt, Human
aguggcugguaguuacugagca

SEQ ID NO: 138577 - RNA, 22 nt, Human
caauguguguguuuuucucaac

SEQ ID NO: 138578 - RNA, 22 nt, Human
ugccugucuuuccucccucgua

SEQ ID NO: 138579 - RNA, 22 nt, Human
cagcccaaagccccaggcuaga

SEQ ID NO: 138580 - RNA, 22 nt, Human
uggcagaaguacacaagcaugc

SEQ ID NO: 138581 - RNA, 22 nt, Human
caggggcuuuuccucuauaagg

SEQ ID NO: 138582 - RNA, 22 nt, Human
agcauuuaggagaauuugagaa

SEQ ID NO: 138583 - RNA, 22 nt, Human
caagugucuauaucagugcuug

SEQ ID NO: 138584 - RNA, 22 nt, Human
aggcugggaaauguauuccagc

SEQ ID NO: 138585 - RNA, 22 nt, Human
agugccuggaccccaugacaua

SEQ ID NO: 138586 - RNA, 22 nt, Human
cuggccugagcacagcggcugc

SEQ ID NO: 138587 - RNA, 22 nt, Human
cagcucugaagaaaggugucua

SEQ ID NO: 138588 - RNA, 22 nt, Human
uuagccaugugggaaaaacagc

SEQ ID NO: 138589 - RNA, 22 nt, Human
ugcacacacaugaaguagcaug

SEQ ID NO: 138590 - RNA, 22 nt, Human
uguggcugcagacacuggagcc

SEQ ID NO: 138591 - RNA, 22 nt, Human
uacauguaauuuucauaguaag

SEQ ID NO: 138592 - RNA, 22 nt, Human
gcagggccagugcagagaggaa

SEQ ID NO: 138593 - RNA, 21 nt, Human
gcacagcaugaguguuggcau

SEQ ID NO: 138594 - RNA, 20 nt, Human
agcauuugaaauaugacuau

SEQ ID NO: 138595 - RNA, 22 nt, Human
cugugugcauaguugugcucaa

SEQ ID NO: 138596 - RNA, 22 nt, Human
ucucucagaggaagaggcagug

SEQ ID NO: 138597 - RNA, 22 nt, Human
uccugccuugccugggacauca

SEQ ID NO: 138598 - RNA, 22 nt, Human
guaauugacucagcucuguuca

SEQ ID NO: 138599 - RNA, 22 nt, Human
caggugggagccacagcguaca

SEQ ID NO: 138600 - RNA, 22 nt, Human
ccagaagucaggaaugagucuu

SEQ ID NO: 138601 - RNA, 22 nt, Human
ugcaggugguuuggacacugcu

SEQ ID NO: 138602 - RNA, 19 nt, Human
cuggugcuugagugaguca

SEQ ID NO: 138603 - RNA, 22 nt, Human
ggugcugguucaggguggcugu

SEQ ID NO: 138604 - RNA, 22 nt, Human
ucugggcuuuacacugugcuua

SEQ ID NO: 138605 - RNA, 22 nt, Human
acauuucuuccuaauuaucccu

SEQ ID NO: 138606 - RNA, 22 nt, Human
cugcuuuguguggucccuccag

SEQ ID NO: 138607 - RNA, 22 nt, Human
cuggcugccacuucagggucuu

SEQ ID NO: 138608 - RNA, 22 nt, Human
ccucccagugccuccagagcag

SEQ ID NO: 138609 - RNA, 22 nt, Human
uuaugacauaugaguacaagua

SEQ ID NO: 138610 - RNA, 22 nt, Human
ccugucuguauugguuugcuau

SEQ ID NO: 138611 - RNA, 22 nt, Human
ccuaagaauuaaugaauacacc

SEQ ID NO: 138612 - RNA, 22 nt, Human
ucucuggaagcgcagaucuguu

SEQ ID NO: 138613 - RNA, 22 nt, Human
uggagcaggugcucaggguaau

SEQ ID NO: 138614 - RNA, 22 nt, Human
ucuggagcgaggucccugucug

SEQ ID NO: 138615 - RNA, 22 nt, Human
ucagggcaggcgagcagcugcu

SEQ ID NO: 138616 - RNA, 22 nt, Human
cccaggcuggagugcaauggug

SEQ ID NO: 138617 - RNA, 22 nt, Human
gcaggcugauagaggauuccau

SEQ ID NO: 138618 - RNA, 22 nt, Human
augaaaacggaccagagcuauu

SEQ ID NO: 138619 - RNA, 22 nt, Human
acucacuuuccauucaagcacc

SEQ ID NO: 138620 - RNA, 21 nt, Human
aguguccuugaucuugccuug

SEQ ID NO: 138621 - RNA, 21 nt, Human
uuugaaagcccuauguuuuca

SEQ ID NO: 138622 - RNA, 22 nt, Human
cacaugggcguaauguccaugg

SEQ ID NO: 138623 - RNA, 22 nt, Human
agugcauugcaucucugcuuca

SEQ ID NO: 138624 - RNA, 22 nt, Human
gccaggcuccaggcccuccuga

SEQ ID NO: 138625 - RNA, 22 nt, Human
cagcccuuuccuucucagcuuu

SEQ ID NO: 138626 - RNA, 22 nt, Human
aaaugguauuuacucuguauua

SEQ ID NO: 138627 - RNA, 22 nt, Human
cgcaugugcguugauugcagug

SEQ ID NO: 138628 - RNA, 22 nt, Human
gcuccuggucuggagcuucaag

SEQ ID NO: 138629 - RNA, 19 nt, Human
uggcucugucgaaggcaca

SEQ ID NO: 138630 - RNA, 22 nt, Human
cacagggcaggccccaggccuc

SEQ ID NO: 138631 - RNA, 19 nt, Human
ucagaggauuuggcuauga

SEQ ID NO: 138632 - RNA, 22 nt, Human
caagauggguguugugaugguu

SEQ ID NO: 138633 - RNA, 22 nt, Human
cuggagcaggcuugucccagcu

SEQ ID NO: 138634 - RNA, 22 nt, Human
aaaugcuugcucuugauuauuu

SEQ ID NO: 138635 - RNA, 22 nt, Human
ugucucuuggagggucuaguga

SEQ ID NO: 138636 - RNA, 22 nt, Human
aggacugggugcagagggcauc

SEQ ID NO: 138637 - RNA, 22 nt, Human
guggccuggaaaggcuggucug

SEQ ID NO: 138638 - RNA, 22 nt, Human
aggccuggguguucaccagaag

SEQ ID NO: 138639 - RNA, 22 nt, Human
uguucuucuagauugccuuuua

SEQ ID NO: 138640 - RNA, 22 nt, Human
ccuggccugugaaucugagagc

SEQ ID NO: 138641 - RNA, 19 nt, Human
ccucccacggauuccuucc

SEQ ID NO: 138642 - RNA, 20 nt, Human
ugcagcugcaggaggguggg

SEQ ID NO: 138643 - RNA, 22 nt, Human
caggaugagaggcccagggaag

SEQ ID NO: 138644 - RNA, 22 nt, Human
aguguggguuuuauggagcccu

SEQ ID NO: 138645 - RNA, 22 nt, Human
ugcagaaggaggaggaaaucca

SEQ ID NO: 138646 - RNA, 22 nt, Human
agcaggugaauuccuggaugug

SEQ ID NO: 138647 - RNA, 22 nt, Human
gcugagcugaggcagggcuggg

SEQ ID NO: 138648 - RNA, 22 nt, Human
aggcugugcauuuuggagggcc

SEQ ID NO: 138649 - RNA, 22 nt, Human
uguagcacagagcuuugacacu

SEQ ID NO: 138650 - RNA, 22 nt, Human
ucacaugcucaccuaagccaca

SEQ ID NO: 138651 - RNA, 22 nt, Human
gagcagagacaguacaacuggc

SEQ ID NO: 138652 - RNA, 20 nt, Human
cagagacccaggcuucagcu

SEQ ID NO: 138653 - RNA, 22 nt, Human
uaaaugcaguacaaauuguucu

SEQ ID NO: 138654 - RNA, 22 nt, Human
agcccuccucacaucagcgucc

SEQ ID NO: 138655 - RNA, 22 nt, Human
ccuggagcacauggcaggaggc

SEQ ID NO: 138656 - RNA, 22 nt, Human
agccagccgggggaccacagug

SEQ ID NO: 138657 - RNA, 18 nt, Human
aggaagcaggaggaaggc

SEQ ID NO: 138658 - RNA, 22 nt, Human
uuucugcucauccuaguggagc

SEQ ID NO: 138659 - RNA, 22 nt, Human
ucagggacugcagagggaagcu

SEQ ID NO: 138660 - RNA, 22 nt, Human
uggagggcaucuguggucaggc

SEQ ID NO: 138661 - RNA, 22 nt, Human
uuuacagaucuguugauuuguu

SEQ ID NO: 138662 - RNA, 22 nt, Human
agcaccuggucuccuggcgcug

SEQ ID NO: 138663 - RNA, 22 nt, Human
gccccagcucugccacaacuag

SEQ ID NO: 138664 - RNA, 21 nt, Human
aaggccugcuuacugcuaguu

SEQ ID NO: 138665 - RNA, 22 nt, Human
ggagauuuauagcacacuucag

SEQ ID NO: 138666 - RNA, 22 nt, Human
uucaagaugucuucacaauagu

SEQ ID NO: 138667 - RNA, 22 nt, Human
uuacaucuaaacugugaacaau

SEQ ID NO: 138668 - RNA, 22 nt, Human
cagagaccccgcugcccuucug

SEQ ID NO: 138669 - RNA, 22 nt, Human
ccugccuggaucagccauccug

SEQ ID NO: 138670 - RNA, 19 nt, Human
acucaagucuaaugaaauc

SEQ ID NO: 138671 - RNA, 22 nt, Human
gauaccagacagggagggagaa

SEQ ID NO: 138672 - RNA, 22 nt, Human
aggcugugggguucugcuuuca

SEQ ID NO: 138673 - RNA, 22 nt, Human
ggucacugcucuaaacaaaagu

SEQ ID NO: 138674 - RNA, 22 nt, Human
ggcuccucucuggccgcucccg

SEQ ID NO: 138675 - RNA, 22 nt, Human
gagcugccuacauugccaagag

SEQ ID NO: 138676 - RNA, 22 nt, Human
aauuccugucuuaacaguucug

SEQ ID NO: 138677 - RNA, 22 nt, Human
gggcuacauugugagagaaguu

SEQ ID NO: 138678 - RNA, 22 nt, Human
acaguaaugauucugagucucu

SEQ ID NO: 138679 - RNA, 22 nt, Human
aggcuggcgacaucuggcgggc

SEQ ID NO: 138680 - RNA, 22 nt, Human
auuguggcuagacagucacaau

SEQ ID NO: 138681 - RNA, 22 nt, Human
agccaugcaccuuacucuugcu

SEQ ID NO: 138682 - RNA, 22 nt, Human
uauuuauaaucugccaaagaga

SEQ ID NO: 138683 - RNA, 22 nt, Human
auuuaucaccaguuagcugacu

SEQ ID NO: 138684 - RNA, 22 nt, Human
ugaguucuaguggcugcagauu

SEQ ID NO: 138685 - RNA, 20 nt, Human
gagccuuccccucaccacug

SEQ ID NO: 138686 - RNA, 22 nt, Human
acagucauuagauacaaugucu

SEQ ID NO: 138687 - RNA, 22 nt, Human
agaggccuaauugcuacccuuu

SEQ ID NO: 138688 - RNA, 22 nt, Human
uguuccaucaguuuuugguuga

SEQ ID NO: 138689 - RNA, 22 nt, Human
cugaggccuaagacaugaauga

SEQ ID NO: 138690 - RNA, 22 nt, Human
gccagagguucaacaacugucu

SEQ ID NO: 138691 - RNA, 22 nt, Human
gcugccugauuuacauagugaa

SEQ ID NO: 138692 - RNA, 22 nt, Human
ucacagugaugacgugggagca

SEQ ID NO: 138693 - RNA, 22 nt, Human
caggggcaggugugagaucauc

SEQ ID NO: 138694 - RNA, 22 nt, Human
aagagcuggaguuugcagcccu

SEQ ID NO: 138695 - RNA, 22 nt, Human
gugugcagaagacacaagacau

SEQ ID NO: 138696 - RNA, 22 nt, Human
gcaugugucuccccaguggagg

SEQ ID NO: 138697 - RNA, 22 nt, Human
aggcugugaucucaugauuugu

SEQ ID NO: 138698 - RNA, 22 nt, Human
gcagacagacugcagugauuuu

SEQ ID NO: 138699 - RNA, 22 nt, Human
uggcagugaagcugucuuuagg

SEQ ID NO: 138700 - RNA, 22 nt, Human
gucaggauuggggucaugaguc

SEQ ID NO: 138701 - RNA, 22 nt, Human
gccugagcccaggugugcagag

SEQ ID NO: 138702 - RNA, 22 nt, Human
cucuucuugaaagaggaauuca

SEQ ID NO: 138703 - RNA, 22 nt, Human
aaacaaguguaaacuagucugu

SEQ ID NO: 138704 - RNA, 22 nt, Human
uguagcauguaaauugguuauu

SEQ ID NO: 138705 - RNA, 22 nt, Human
ucccuggcugggggcugccuug

SEQ ID NO: 138706 - RNA, 22 nt, Human
gacugucauucuagugcccaug

SEQ ID NO: 138707 - RNA, 22 nt, Human
acagaauuaaaguguuugugga

SEQ ID NO: 138708 - RNA, 22 nt, Human
ccagccuccauguagauagcug

SEQ ID NO: 138709 - RNA, 22 nt, Human
ccacccuggacaggccucugag

SEQ ID NO: 138710 - RNA, 22 nt, Human
gaguauauauagacaugucaca

SEQ ID NO: 138711 - RNA, 22 nt, Human
gugacucacacaggccugggcu

SEQ ID NO: 138712 - RNA, 21 nt, Human
guggcucugccaggacugaaa

SEQ ID NO: 138713 - RNA, 22 nt, Human
ugggaaauguguuucuggacca

SEQ ID NO: 138714 - RNA, 22 nt, Human
guuuccauggcucuguuaaugg

SEQ ID NO: 138715 - RNA, 22 nt, Human
gaacuuuugggaagccguguga

SEQ ID NO: 138716 - RNA, 22 nt, Human
cugcugcucagugucaucaugu

SEQ ID NO: 138717 - RNA, 22 nt, Human
gucuggcuguuccugccuguga

SEQ ID NO: 138718 - RNA, 22 nt, Human
acuuucuuggucccauguuuga

SEQ ID NO: 138719 - RNA, 22 nt, Human
gaaaagagaacaucugaggauc

SEQ ID NO: 138720 - RNA, 22 nt, Human
uguguacuugaaagggcagguc

SEQ ID NO: 138721 - RNA, 22 nt, Human
uauuauguagaguaaggguuaa

SEQ ID NO: 138722 - RNA, 22 nt, Human
ucucucuucagagauaccuugc

SEQ ID NO: 138723 - RNA, 22 nt, Human
uuguaacagcugcuuaauagag

SEQ ID NO: 138724 - RNA, 22 nt, Human
cucccacuccuggcucaccaca

SEQ ID NO: 138725 - RNA, 22 nt, Human
uccuguguucuagguauggucu

SEQ ID NO: 138726 - RNA, 22 nt, Human
ccugucucuuucaaucugagag

SEQ ID NO: 138727 - RNA, 22 nt, Human
cugccagguuggcgcucgcucu

SEQ ID NO: 138728 - RNA, 22 nt, Human
cuggacagaaaaggccacugga

SEQ ID NO: 138729 - RNA, 22 nt, Human
aucaguuugagugcugugucaa

SEQ ID NO: 138730 - RNA, 22 nt, Human
gcaguauaaguggauuaugucc

SEQ ID NO: 138731 - RNA, 22 nt, Human
ggcagcuccucucagcaaaaga

SEQ ID NO: 138732 - RNA, 22 nt, Human
gugcaugucggggugcauguca

SEQ ID NO: 138733 - RNA, 22 nt, Human
ggguggcacaggugcagagggu

SEQ ID NO: 138734 - RNA, 22 nt, Human
ugucuguauaucacuuuugucc

SEQ ID NO: 138735 - RNA, 22 nt, Human
aaaugucuuuaucucauguaac

SEQ ID NO: 138736 - RNA, 22 nt, Human
ggggauggauuccgggucccug

SEQ ID NO: 138737 - RNA, 22 nt, Human
uuuccuuccuugcuagccugag

SEQ ID NO: 138738 - RNA, 22 nt, Human
uuugcauuguaauauuuaguuc

SEQ ID NO: 138739 - RNA, 22 nt, Human
agauuguagaaacuguagcauu

SEQ ID NO: 138740 - RNA, 22 nt, Human
gcucugcuggagggaaagagaa

SEQ ID NO: 138741 - RNA, 22 nt, Human
uggagcagggcaucacugugcg

SEQ ID NO: 138742 - RNA, 22 nt, Human
gggcccuggauuuaagcaugga

SEQ ID NO: 138743 - RNA, 22 nt, Human
guuauguaugagggaaugauua

SEQ ID NO: 138744 - RNA, 22 nt, Human
ggaggugggagacauaggcggc

SEQ ID NO: 138745 - RNA, 23 nt, Human
cccauuuucauguuaacuccugg

SEQ ID NO: 138746 - RNA, 21 nt, Human
uuuuacagaugaggggaaggg

SEQ ID NO: 138747 - RNA, 22 nt, Human
ucccagggucaguggugaggcc

SEQ ID NO: 138748 - RNA, 19 nt, Human
gaagaagcuugagaaguag

SEQ ID NO: 138749 - RNA, 22 nt, Human
uguauuuugaguccaaucuccu

SEQ ID NO: 138750 - RNA, 23 nt, Human
ccguguguauacucuguaauaga

SEQ ID NO: 138751 - RNA, 22 nt, Human
cagugggcugugauggauucac

SEQ ID NO: 138752 - RNA, 22 nt, Human
gaaaugcauaaucuuaguagau

SEQ ID NO: 138753 - RNA, 21 nt, Human
aagccucaagcagaagacaga

SEQ ID NO: 138754 - RNA, 22 nt, Human
uucucuuuuagaggcuccauga

SEQ ID NO: 138755 - RNA, 22 nt, Human
cuggagccauguauagccuaug

SEQ ID NO: 138756 - RNA, 22 nt, Human
uuccucucucuugccagaaugu

SEQ ID NO: 138757 - RNA, 22 nt, Human
uuucaaagguggaagagugaau

SEQ ID NO: 138758 - RNA, 22 nt, Human
caggguggcacaucacagcauu

SEQ ID NO: 138759 - RNA, 22 nt, Human
agccuguggaucccugcacugg

SEQ ID NO: 138760 - RNA, 22 nt, Human
gcaugugucccucagucugugc

SEQ ID NO: 138761 - RNA, 21 nt, Human
ugcagccauucagcccuaugc

SEQ ID NO: 138762 - RNA, 20 nt, Human
agugacagagacuguguggc

SEQ ID NO: 138763 - RNA, 19 nt, Human
uugguggugguuuugguuc

SEQ ID NO: 138764 - RNA, 22 nt, Human
gugccagcucuccccacaucug

SEQ ID NO: 138765 - RNA, 20 nt, Human
gccuggaggcagagauaaag

SEQ ID NO: 138766 - RNA, 22 nt, Human
gcuaggagauugagcucugaag

SEQ ID NO: 138767 - RNA, 23 nt, Human
ccugucugugcuggguggacaca

SEQ ID NO: 138768 - RNA, 22 nt, Human
accuuuuuguucuguucucagc

SEQ ID NO: 138769 - RNA, 22 nt, Human
uccagggagagccgcugcucca

SEQ ID NO: 138770 - RNA, 22 nt, Human
ucacacagauugguagagcuga

SEQ ID NO: 138771 - RNA, 22 nt, Human
uucugucucccugauguagagc

SEQ ID NO: 138772 - RNA, 22 nt, Human
gugaggugguacaauauuaacu

SEQ ID NO: 138773 - RNA, 22 nt, Human
caggauggucagaugcauuguc

SEQ ID NO: 138774 - RNA, 22 nt, Human
acuuguguaacacagaaagaac

SEQ ID NO: 138775 - RNA, 22 nt, Human
acccagaggugucuagcaagcu

SEQ ID NO: 138776 - RNA, 22 nt, Human
ccuggagccccucuggccagcc

SEQ ID NO: 138777 - RNA, 22 nt, Human
uaccuuuugcuuauuaugacac

SEQ ID NO: 138778 - RNA, 22 nt, Human
aagaacuuccuaauauauuuuc

SEQ ID NO: 138779 - RNA, 22 nt, Human
auuaucucaagggauagcagau

SEQ ID NO: 138780 - RNA, 22 nt, Human
cuccugaguaguagcauuguca

SEQ ID NO: 138781 - RNA, 22 nt, Human
ucaggcagaugcagggauggau

SEQ ID NO: 138782 - RNA, 22 nt, Human
uuaauaaaguaugaauuggaaa

SEQ ID NO: 138783 - RNA, 21 nt, Human
gugcucugggcagcagagggc

SEQ ID NO: 138784 - RNA, 22 nt, Human
ccauggcaauggucagucuauu

SEQ ID NO: 138785 - RNA, 21 nt, Human
gccugccugcgugacccucuu

SEQ ID NO: 138786 - RNA, 22 nt, Human
aguggcugcugacuuuaauaca

SEQ ID NO: 138787 - RNA, 22 nt, Human
ggggauggaggcgugugguccu

SEQ ID NO: 138788 - RNA, 22 nt, Human
gcagggcuaauggggcaaguag

SEQ ID NO: 138789 - RNA, 22 nt, Human
gcagugguccaguucacaccca

SEQ ID NO: 138790 - RNA, 22 nt, Human
acaaaugcaaguuuuaugucaa

SEQ ID NO: 138791 - RNA, 18 nt, Human
acugugguuuauguguag

SEQ ID NO: 138792 - RNA, 22 nt, Human
uuuuccuguuaaaucugggcac

SEQ ID NO: 138793 - RNA, 22 nt, Human
agauuucacaugcugcucuauu

SEQ ID NO: 138794 - RNA, 22 nt, Human
aucuuucuccauauacaucuuu

SEQ ID NO: 138795 - RNA, 22 nt, Human
ugucccagacacaguaugcgcu

SEQ ID NO: 138796 - RNA, 22 nt, Human
aagcgccacgagaagcuggacc

SEQ ID NO: 138797 - RNA, 22 nt, Human
gcagugggaagguuggcacaug

SEQ ID NO: 138798 - RNA, 20 nt, Human
cugagcugagcuccaugggu

SEQ ID NO: 138799 - RNA, 22 nt, Human
ucucuacagaaucuuauuauug

SEQ ID NO: 138800 - RNA, 22 nt, Human
cuguagcagugugcucuuuuuc

SEQ ID NO: 138801 - RNA, 22 nt, Human
acugucuccucaucaugccugg

SEQ ID NO: 138802 - RNA, 22 nt, Human
cugccuguuagucuagcaguua

SEQ ID NO: 138803 - RNA, 18 nt, Human
gcagcugcaguuguagcu

SEQ ID NO: 138804 - RNA, 22 nt, Human
aggggccauuguucugcccgcu

SEQ ID NO: 138805 - RNA, 22 nt, Human
uguauacauacauaugugugug

SEQ ID NO: 138806 - RNA, 20 nt, Human
cuggguggcaagcaaggggg

SEQ ID NO: 138807 - RNA, 22 nt, Human
aaaucaguuguuauauuaaaga

SEQ ID NO: 138808 - RNA, 22 nt, Human
ucagccugcgucauggugacac

SEQ ID NO: 138809 - RNA, 22 nt, Human
aagggagguaaagcuauuuaaa

SEQ ID NO: 138810 - RNA, 22 nt, Human
cauuucugauuacagaauacua

SEQ ID NO: 138811 - RNA, 22 nt, Human
ucuguuccaguagaaaggugca

SEQ ID NO: 138812 - RNA, 22 nt, Human
agaaauaugcugauuagaugaa

SEQ ID NO: 138813 - RNA, 22 nt, Human
ccucacugcuauguguuugcuc

SEQ ID NO: 138814 - RNA, 22 nt, Human
uggauuaaagauuaaaaugaca

SEQ ID NO: 138815 - RNA, 22 nt, Human
agcagugaugcaugacagccua

SEQ ID NO: 138816 - RNA, 22 nt, Human
accugaggcuguuagucuaggu

SEQ ID NO: 138817 - RNA, 22 nt, Human
gugugcgcgcucauaggugugu

SEQ ID NO: 138818 - RNA, 22 nt, Human
gucagcagugucagcucugggg

SEQ ID NO: 138819 - RNA, 22 nt, Human
agaaauuccuaagguacacaag

SEQ ID NO: 138820 - RNA, 22 nt, Human
ucauuuucaaguuugaacagga

SEQ ID NO: 138821 - RNA, 22 nt, Human
uggccugcuuucauuugaugcu

SEQ ID NO: 138822 - RNA, 22 nt, Human
auucuuggcaaggagauuuaaa

SEQ ID NO: 138823 - RNA, 22 nt, Human
cagagcagagugauuguucugg

SEQ ID NO: 138824 - RNA, 19 nt, Human
ccucuccgcccaccagccc

SEQ ID NO: 138825 - RNA, 22 nt, Human
ugggcucugcaucagugcccau

SEQ ID NO: 138826 - RNA, 22 nt, Human
agcagcauagaugcuauccgag

SEQ ID NO: 138827 - RNA, 22 nt, Human
acagggucaagggugcuacaag

SEQ ID NO: 138828 - RNA, 22 nt, Human
cauugcacuccacccuaggcaa

SEQ ID NO: 138829 - RNA, 22 nt, Human
auacaguauguaggcuuuucag

SEQ ID NO: 138830 - RNA, 22 nt, Human
ggcagcaugagccuggugaauu

SEQ ID NO: 138831 - RNA, 22 nt, Human
ucugugcuagaggaguuggcca

SEQ ID NO: 138832 - RNA, 22 nt, Human
uauguguuugacacccugcaag

SEQ ID NO: 138833 - RNA, 22 nt, Human
cuccugggaauuuaguugugag

SEQ ID NO: 138834 - RNA, 22 nt, Human
cugcuuccauaaauaaugugcu

SEQ ID NO: 138835 - RNA, 22 nt, Human
agcagggggccacagucacagc

SEQ ID NO: 138836 - RNA, 22 nt, Human
cucuugaagcaggggccaguuc

SEQ ID NO: 138837 - RNA, 22 nt, Human
agccuggagaggcgccauacac

SEQ ID NO: 138838 - RNA, 21 nt, Human
ccuggcugcacaguugcuggu

SEQ ID NO: 138839 - RNA, 18 nt, Human
gggcucugauccuucacc

SEQ ID NO: 138840 - RNA, 22 nt, Human
aucugacaaccuauugacuuga

SEQ ID NO: 138841 - RNA, 22 nt, Human
aaggcaguuugggccaccaucu

SEQ ID NO: 138842 - RNA, 22 nt, Human
auguggcugccaccugccugaa

SEQ ID NO: 138843 - RNA, 22 nt, Human
cuauugaauuaacuauuaaagu

SEQ ID NO: 138844 - RNA, 22 nt, Human
uucuucuugucugcccucacau

SEQ ID NO: 138845 - RNA, 22 nt, Human
ucagagugggagaaugugccaa

SEQ ID NO: 138846 - RNA, 22 nt, Human
ccuugcaggggaacaggcagug

SEQ ID NO: 138847 - RNA, 23 nt, Human
aucaagauaauccagaugaccua

SEQ ID NO: 138848 - RNA, 22 nt, Human
ucagguggcuuggagggggacg

SEQ ID NO: 138849 - RNA, 22 nt, Human
ucuuggagacucuuguauauuu

SEQ ID NO: 138850 - RNA, 22 nt, Human
agacaaaggauuaaugaugaug

SEQ ID NO: 138851 - RNA, 22 nt, Human
aggcuuccucgugccuuagaua

SEQ ID NO: 138852 - RNA, 21 nt, Human
ucugggcccaugcugccucac

SEQ ID NO: 138853 - RNA, 22 nt, Human
ugaaaucugcaugcaaaguccu

SEQ ID NO: 138854 - RNA, 21 nt, Human
cucuggaggcaagggagagug

SEQ ID NO: 138855 - RNA, 22 nt, Human
agggagcucaguuggaagcggu

SEQ ID NO: 138856 - RNA, 22 nt, Human
gcacagccagcaucugagggau

SEQ ID NO: 138857 - RNA, 22 nt, Human
gcaggugguccccguggagugg

SEQ ID NO: 138858 - RNA, 22 nt, Human
agagauaugaguaguugugaca

SEQ ID NO: 138859 - RNA, 22 nt, Human
cuuagaaauuguuacucauuca

SEQ ID NO: 138860 - RNA, 22 nt, Human
uggcagcaaguucuugggaggu

SEQ ID NO: 138861 - RNA, 22 nt, Human
cuacuuuaauuuucugcagaga

SEQ ID NO: 138862 - RNA, 22 nt, Human
gcaucuaauccaguccagcauc

SEQ ID NO: 138863 - RNA, 19 nt, Human
auacaguaagguguuugcc

SEQ ID NO: 138864 - RNA, 21 nt, Human
aaugcauuaacauaaagcuga

SEQ ID NO: 138865 - RNA, 21 nt, Human
gcagcagaggcuugacagaca

SEQ ID NO: 138866 - RNA, 22 nt, Human
aaacaugaauagauauuaaaca

SEQ ID NO: 138867 - RNA, 22 nt, Human
caagaaauguuuacugagcauc

SEQ ID NO: 138868 - RNA, 22 nt, Human
ugucuguaauagucacuaugug

SEQ ID NO: 138869 - RNA, 22 nt, Human
uugggaaggcguggaagcagaa

SEQ ID NO: 138870 - RNA, 22 nt, Human
uuagauaaauugcaacuugauu

SEQ ID NO: 138871 - RNA, 22 nt, Human
auuauuauauagggaaaguccc

SEQ ID NO: 138872 - RNA, 22 nt, Human
guuauugcaguauagaggucua

SEQ ID NO: 138873 - RNA, 22 nt, Human
ugucacauaggcaaaauguuuu

SEQ ID NO: 138874 - RNA, 22 nt, Human
cucuggacacuggcaugggguc

SEQ ID NO: 138875 - RNA, 22 nt, Human
uccaucagauucccuccugaga

SEQ ID NO: 138876 - RNA, 22 nt, Human
aggacuccauguguccuggaga

SEQ ID NO: 138877 - RNA, 21 nt, Human
accucaagcaacaaccaaggu

SEQ ID NO: 138878 - RNA, 22 nt, Human
auuaaaauuccaagguaugcca

SEQ ID NO: 138879 - RNA, 22 nt, Human
uaaagucaucuuuacaucuuug

SEQ ID NO: 138880 - RNA, 22 nt, Human
auuuaguguguauugcuauuau

SEQ ID NO: 138881 - RNA, 22 nt, Human
acugugcaugaaccgaaacaaa

SEQ ID NO: 138882 - RNA, 22 nt, Human
cagcuucugucugauuagcaag

SEQ ID NO: 138883 - RNA, 20 nt, Human
aggcugccaggucucacauc

SEQ ID NO: 138884 - RNA, 23 nt, Human
caggcaggaugaggacuacacuc

SEQ ID NO: 138885 - RNA, 20 nt, Human
agggcagcuugaggagccgg

SEQ ID NO: 138886 - RNA, 22 nt, Human
uggcagagaaccugggcuuugu

SEQ ID NO: 138887 - RNA, 22 nt, Human
gucucuggguuaagcagugcau

SEQ ID NO: 138888 - RNA, 22 nt, Human
cagcucccagagugaccagcag

SEQ ID NO: 138889 - RNA, 19 nt, Human
ucuggcuccgccucuuagu

SEQ ID NO: 138890 - RNA, 22 nt, Human
acuucucuucauagguggcaau

SEQ ID NO: 138891 - RNA, 22 nt, Human
ucucugggugauggcagggcac

SEQ ID NO: 138892 - RNA, 22 nt, Human
guucuucaggccauccucccag

SEQ ID NO: 138893 - RNA, 22 nt, Human
cagucccaccaggaucgcucuu

SEQ ID NO: 138894 - RNA, 22 nt, Human
agcuggagaucaugcugauacu

SEQ ID NO: 138895 - RNA, 23 nt, Human
ugggccuggaaagccuuagagag

SEQ ID NO: 138896 - RNA, 23 nt, Human
ucugggcaccuuguugacaugau

SEQ ID NO: 138897 - RNA, 22 nt, Human
gagcugggcacacgccacuuga

SEQ ID NO: 138898 - RNA, 22 nt, Human
agcagcugucccuuaacaucag

SEQ ID NO: 138899 - RNA, 22 nt, Human
aucuuucuauuucuaaaaacua

SEQ ID NO: 138900 - RNA, 22 nt, Human
ggagggagucagcugauuagaa

SEQ ID NO: 138901 - RNA, 22 nt, Human
ugucucaguauacgaaacacuu

SEQ ID NO: 138902 - RNA, 22 nt, Human
ucaguuuuuacggucacaggga

SEQ ID NO: 138903 - RNA, 22 nt, Human
cccagcuugcccaggacugagg

SEQ ID NO: 138904 - RNA, 22 nt, Human
caucugugccggguguuuguca

SEQ ID NO: 138905 - RNA, 16 nt, Human
gagccaggugccuuga

SEQ ID NO: 138906 - RNA, 22 nt, Human
aaguuuuucacauugcuguugu

SEQ ID NO: 138907 - RNA, 22 nt, Human
gcaagcaguuguggcuucugag

SEQ ID NO: 138908 - RNA, 20 nt, Human
uaugcaguauguguguauaa

SEQ ID NO: 138909 - RNA, 18 nt, Human
ugggauggagaguaacug

SEQ ID NO: 138910 - RNA, 22 nt, Human
ugccagcaguagcaguaggcca

SEQ ID NO: 138911 - RNA, 23 nt, Human
guaaaauacgcagugcaguguga

SEQ ID NO: 138912 - RNA, 22 nt, Human
cucagagaaaaggagcaagggu

SEQ ID NO: 138913 - RNA, 22 nt, Human
gaugcacugcaguauauacugu

SEQ ID NO: 138914 - RNA, 22 nt, Human
cagagcuggguuugggaaaccu

SEQ ID NO: 138915 - RNA, 22 nt, Human
ugaagcagaggggucuugagcu

SEQ ID NO: 138916 - RNA, 22 nt, Human
aucugccuggcuccaggugagc

SEQ ID NO: 138917 - RNA, 22 nt, Human
ucaaaugcaggucuggucuugg

SEQ ID NO: 138918 - RNA, 22 nt, Human
acacauuuacauguuuacguau

SEQ ID NO: 138919 - RNA, 19 nt, Human
ggcucucuuaaagcuguuu

SEQ ID NO: 138920 - RNA, 22 nt, Human
ucaagauaccaccauuauaugu

SEQ ID NO: 138921 - RNA, 22 nt, Human
gcugugcuugcaugagugucug

SEQ ID NO: 138922 - RNA, 20 nt, Human
ugucaugcauuagaugaaga

SEQ ID NO: 138923 - RNA, 22 nt, Human
gagccaggguuugaaacuagac

SEQ ID NO: 138924 - RNA, 22 nt, Human
ggcagcucugaugaugcucugg

SEQ ID NO: 138925 - RNA, 22 nt, Human
gccugggaagacuaagugggag

SEQ ID NO: 138926 - RNA, 22 nt, Human
uuuaacagauaguuucuucugu

SEQ ID NO: 138927 - RNA, 22 nt, Human
agggcacaagacucugagcccc

SEQ ID NO: 138928 - RNA, 22 nt, Human
gcauccagucuuggcuccugga

SEQ ID NO: 138929 - RNA, 22 nt, Human
acacauauauacauauuugugc

SEQ ID NO: 138930 - RNA, 21 nt, Human
acagagccgggcacaaagcug

SEQ ID NO: 138931 - RNA, 22 nt, Human
uggagcucaaaggccuguggga

SEQ ID NO: 138932 - RNA, 22 nt, Human
aguucucagcuuaguaugcugu

SEQ ID NO: 138933 - RNA, 22 nt, Human
uaucuacuccucuuucagaugc

SEQ ID NO: 138934 - RNA, 22 nt, Human
agguauauguucauguaugugu

SEQ ID NO: 138935 - RNA, 22 nt, Human
acaggugaccugcucauaugaa

SEQ ID NO: 138936 - RNA, 22 nt, Human
ggcacugaauuucuuggcaucu

SEQ ID NO: 138937 - RNA, 22 nt, Human
ucuaaccuuugaaacugcuuuc

SEQ ID NO: 138938 - RNA, 22 nt, Human
aaugcacaugccacauguggua

SEQ ID NO: 138939 - RNA, 23 nt, Human
cagagcuggcucagagcugccug

SEQ ID NO: 138940 - RNA, 22 nt, Human
auaaauuuauaauuguuuccug

SEQ ID NO: 138941 - RNA, 22 nt, Human
cugccugugccaaugcuccuuu

SEQ ID NO: 138942 - RNA, 21 nt, Human
cccuugccugcacuccucggc

SEQ ID NO: 138943 - RNA, 22 nt, Human
augcauaauguauguauugacu

SEQ ID NO: 138944 - RNA, 22 nt, Human
ugggagcugggguuggacgucu

SEQ ID NO: 138945 - RNA, 22 nt, Human
ucacauuuguuccucugcacuu

SEQ ID NO: 138946 - RNA, 22 nt, Human
ccauuuguucgcccagcuccaa

SEQ ID NO: 138947 - RNA, 22 nt, Human
uaugcacauugguuuccucauu

SEQ ID NO: 138948 - RNA, 22 nt, Human
augaugguggguaauguguaaa

SEQ ID NO: 138949 - RNA, 22 nt, Human
ucucagagggaggauuacugcc

SEQ ID NO: 138950 - RNA, 22 nt, Human
gugcaguggcagauccuagcuc

SEQ ID NO: 138951 - RNA, 22 nt, Human
gccaggcuggcaaaaggaaacc

SEQ ID NO: 138952 - RNA, 22 nt, Human
ccugugugucugucacugcaca

SEQ ID NO: 138953 - RNA, 22 nt, Human
cagggcccaggccacuggguug

SEQ ID NO: 138954 - RNA, 22 nt, Human
cugaaugucgaucagcuugggu

SEQ ID NO: 138955 - RNA, 22 nt, Human
agcagcauauugugucuucaua

SEQ ID NO: 138956 - RNA, 23 nt, Human
auaauaacgucugucuugucucu

SEQ ID NO: 138957 - RNA, 22 nt, Human
ccuggcaguggugaagaagagg

SEQ ID NO: 138958 - RNA, 22 nt, Human
auccaaaucaugucagaagaac

SEQ ID NO: 138959 - RNA, 22 nt, Human
gcauuguccugcuucugagugu

SEQ ID NO: 138960 - RNA, 22 nt, Human
ugugacuggcagaggugucugg

SEQ ID NO: 138961 - RNA, 23 nt, Human
cagaccuggcagucauccucaac

SEQ ID NO: 138962 - RNA, 22 nt, Human
agauggagaccuuggaugaacu

SEQ ID NO: 138963 - RNA, 22 nt, Human
ugaagcaggaaccagcagcauu

SEQ ID NO: 138964 - RNA, 22 nt, Human
ugagccagaggaggcugugugg

SEQ ID NO: 138965 - RNA, 22 nt, Human
agauggggcagaauggagccau

SEQ ID NO: 138966 - RNA, 22 nt, Human
gcugccuguguggccacucacu

SEQ ID NO: 138967 - RNA, 22 nt, Human
gcugccaugccacagcacucac

SEQ ID NO: 138968 - RNA, 22 nt, Human
caggcagccaggggaccugucc

SEQ ID NO: 138969 - RNA, 22 nt, Human
gccuucugaucgcuggacugac

SEQ ID NO: 138970 - RNA, 23 nt, Human
aguuuuucugcaugguucuguau

SEQ ID NO: 138971 - RNA, 22 nt, Human
aaguucaaggcucuagaguucc

SEQ ID NO: 138972 - RNA, 17 nt, Human
ucaggauccaggguucu

SEQ ID NO: 138973 - RNA, 22 nt, Human
cuccuuccccuacucagcaucc

SEQ ID NO: 138974 - RNA, 22 nt, Human
uugacacagaucaauauucaac

SEQ ID NO: 138975 - RNA, 22 nt, Human
auuaaauuuucacuaggcuccc

SEQ ID NO: 138976 - RNA, 22 nt, Human
cugggccagcaacugcaaugga

SEQ ID NO: 138977 - RNA, 22 nt, Human
acagaguagcucaagaagauug

SEQ ID NO: 138978 - RNA, 22 nt, Human
cacauuuaauccuuuauaagua

SEQ ID NO: 138979 - RNA, 18 nt, Human
gugagcagagagcaucac

SEQ ID NO: 138980 - RNA, 22 nt, Human
uucuucuuuccuauaauuaauu

SEQ ID NO: 138981 - RNA, 22 nt, Human
uacaaaguaauguauaauaucg

SEQ ID NO: 138982 - RNA, 22 nt, Human
ccagcccuucccaacuggccag

SEQ ID NO: 138983 - RNA, 22 nt, Human
aggggcuggcuuaucugagagu

SEQ ID NO: 138984 - RNA, 22 nt, Human
cccuggagugugacgaggcauu

SEQ ID NO: 138985 - RNA, 19 nt, Human
ugaaauggcaguugcuaaa

SEQ ID NO: 138986 - RNA, 22 nt, Human
gcugccugggcaggaggcgcug

SEQ ID NO: 138987 - RNA, 22 nt, Human
auguuucuguccuacgagauaa

SEQ ID NO: 138988 - RNA, 22 nt, Human
cccagacucaucccugggagcu

SEQ ID NO: 138989 - RNA, 22 nt, Human
aaaguguaaggaauuuaaguaa

SEQ ID NO: 138990 - RNA, 22 nt, Human
aaagccuugcccgucacuggga

SEQ ID NO: 138991 - RNA, 22 nt, Human
caucaguguggcaguucacugu

SEQ ID NO: 138992 - RNA, 23 nt, Human
ugcucugugaauaguuggugacu

SEQ ID NO: 138993 - RNA, 22 nt, Human
gaggcagcaucuauggugggaa

SEQ ID NO: 138994 - RNA, 22 nt, Human
auauucguggucaaguaaggcc

SEQ ID NO: 138995 - RNA, 22 nt, Human
aagcugccaaugguaagcugcu

SEQ ID NO: 138996 - RNA, 17 nt, Human
ugguggcuggagucagg

SEQ ID NO: 138997 - RNA, 22 nt, Human
gcugccacgaucucugcuguag

SEQ ID NO: 138998 - RNA, 22 nt, Human
acagguggagugguuagcaggc

SEQ ID NO: 138999 - RNA, 23 nt, Human
agggaaaguaguaauggccuuug

SEQ ID NO: 139000 - RNA, 22 nt, Human
uuaccaguuuugccauuugcua

SEQ ID NO: 139001 - RNA, 22 nt, Human
uaaugucagcauaguuuauuuu

SEQ ID NO: 139002 - RNA, 22 nt, Human
cagggccaguucucgcagcagu

SEQ ID NO: 139003 - RNA, 22 nt, Human
cuggaagggucuacuuagcaga

SEQ ID NO: 139004 - RNA, 22 nt, Human
cagcaucaccgccauuucugau

SEQ ID NO: 139005 - RNA, 22 nt, Human
uuugcauuaucucacuuauaua

SEQ ID NO: 139006 - RNA, 22 nt, Human
uaaagcaggccacauaugugau

SEQ ID NO: 139007 - RNA, 22 nt, Human
gucucccaaccccugugcccag

SEQ ID NO: 139008 - RNA, 22 nt, Human
acagcagggggagcuguuggac

SEQ ID NO: 139009 - RNA, 22 nt, Human
ccucaggggucacugugaggag

SEQ ID NO: 139010 - RNA, 22 nt, Human
uucuucaaaauccagcaugauu

SEQ ID NO: 139011 - RNA, 22 nt, Human
gagcuuggugaugccuccuggu

SEQ ID NO: 139012 - RNA, 22 nt, Human
uuccauaaucaccuuauucuuu

SEQ ID NO: 139013 - RNA, 22 nt, Human
gguggccuuucaguggaucagg

SEQ ID NO: 139014 - RNA, 22 nt, Human
cugggugaguugaugaaggaga

SEQ ID NO: 139015 - RNA, 22 nt, Human
gaaggccauugcguccugggau

SEQ ID NO: 139016 - RNA, 22 nt, Human
aagugagugguaaggagcaugg

SEQ ID NO: 139017 - RNA, 22 nt, Human
cuguccuugcuggccagguaug

SEQ ID NO: 139018 - RNA, 20 nt, Human
uggagccaaggugugucugg

SEQ ID NO: 139019 - RNA, 22 nt, Human
caguuucuucaucaguuaagca

SEQ ID NO: 139020 - RNA, 22 nt, Human
agugaguggguuacagauggga

SEQ ID NO: 139021 - RNA, 22 nt, Human
cauugcucaggcccagcaggaa

SEQ ID NO: 139022 - RNA, 22 nt, Human
agaaaaaucuuggcgcuugucu

SEQ ID NO: 139023 - RNA, 22 nt, Human
acaggugggcuuaagagucggc

SEQ ID NO: 139024 - RNA, 22 nt, Human
acagucauagcagccuuuguua

SEQ ID NO: 139025 - RNA, 22 nt, Human
gauggcacacagacauccccgc

SEQ ID NO: 139026 - RNA, 22 nt, Human
uuuuucucuucuguaaaguggu

SEQ ID NO: 139027 - RNA, 22 nt, Human
cagucucuaaaucaaucugaau

SEQ ID NO: 139028 - RNA, 20 nt, Human
augugagggguugaaguggg

SEQ ID NO: 139029 - RNA, 22 nt, Human
ugccugucucugacugccauua

SEQ ID NO: 139030 - RNA, 22 nt, Human
ugacccauggucugaucauagg

SEQ ID NO: 139031 - RNA, 22 nt, Human
gcaguauauggauuuuaaacau

SEQ ID NO: 139032 - RNA, 22 nt, Human
ccucucuguguggccucuccau

SEQ ID NO: 139033 - RNA, 22 nt, Human
cucugggcaccaaagagcagcu

SEQ ID NO: 139034 - RNA, 20 nt, Human
ggaccagguggggcgguggc

SEQ ID NO: 139035 - RNA, 22 nt, Human
uggcccgaccucugcucaugca

SEQ ID NO: 139036 - RNA, 22 nt, Human
gcugccucaggcaccuccuggc

SEQ ID NO: 139037 - RNA, 22 nt, Human
uuaagaauggaaugaggaauuu

SEQ ID NO: 139038 - RNA, 23 nt, Human
aguacauucgaaaaauucuguga

SEQ ID NO: 139039 - RNA, 22 nt, Human
acucaggaaauugagauaaugg

SEQ ID NO: 139040 - RNA, 22 nt, Human
uggaaagagguagaggaucugg

SEQ ID NO: 139041 - RNA, 22 nt, Human
agcaggguauguuagagcugua

SEQ ID NO: 139042 - RNA, 22 nt, Human
cucuggccagagccugcgggaa

SEQ ID NO: 139043 - RNA, 22 nt, Human
aaugugguuaacccauuuaaga

SEQ ID NO: 139044 - RNA, 22 nt, Human
acccuggguucccgcagcacca

SEQ ID NO: 139045 - RNA, 22 nt, Human
uaaaguuuggcagacaauaaca

SEQ ID NO: 139046 - RNA, 19 nt, Human
gaaggagagcugaguuagg

SEQ ID NO: 139047 - RNA, 21 nt, Human
cucuguguugaggguguugag

SEQ ID NO: 139048 - RNA, 22 nt, Human
ucuuaacaagcuccucagugcu

SEQ ID NO: 139049 - RNA, 22 nt, Human
cagggagggacaauugucaccu

SEQ ID NO: 139050 - RNA, 22 nt, Human
acugaaggucucagcaaggaug

SEQ ID NO: 139051 - RNA, 22 nt, Human
uuacagguacuugcugcugaaa

SEQ ID NO: 139052 - RNA, 22 nt, Human
uauauauucuuaaguaguguag

SEQ ID NO: 139053 - RNA, 17 nt, Human
cugagcauccgugcucu

SEQ ID NO: 139054 - RNA, 22 nt, Human
ucagcuggagaugagaaccgaa

SEQ ID NO: 139055 - RNA, 21 nt, Human
gcucccugcucagcuccuggg

SEQ ID NO: 139056 - RNA, 22 nt, Human
aucagcaagauugugucuugua

SEQ ID NO: 139057 - RNA, 22 nt, Human
cuguguccugcgucaagccaau

SEQ ID NO: 139058 - RNA, 22 nt, Human
uuuagaaauugcagagugggug

SEQ ID NO: 139059 - RNA, 22 nt, Human
uacaugcucaguaacuuucagu

SEQ ID NO: 139060 - RNA, 21 nt, Human
acaggcuuuagaaaaugacuc

SEQ ID NO: 139061 - RNA, 22 nt, Human
guacauuucauuuaaaugaugu

SEQ ID NO: 139062 - RNA, 22 nt, Human
gaguauauuucucucucuuaag

SEQ ID NO: 139063 - RNA, 22 nt, Human
aggucauuaaaguuaaaugagg

SEQ ID NO: 139064 - RNA, 18 nt, Human
accugccuguucuucucu

SEQ ID NO: 139065 - RNA, 22 nt, Human
acaguaauuaaaauggaucugc

SEQ ID NO: 139066 - RNA, 22 nt, Human
gcaccugggacccagaggcacc

SEQ ID NO: 139067 - RNA, 19 nt, Human
caugagcugcucacuuccc

SEQ ID NO: 139068 - RNA, 22 nt, Human
ugggaggcuuccagaccuugcu

SEQ ID NO: 139069 - RNA, 22 nt, Human
uguggcugcucaggugcagacc

SEQ ID NO: 139070 - RNA, 22 nt, Human
gccaggcacaguucuaggugcu

SEQ ID NO: 139071 - RNA, 22 nt, Human
ucugcagaaguggcugggccac

SEQ ID NO: 139072 - RNA, 22 nt, Human
cuggcucauuuuagcaucaggu

SEQ ID NO: 139073 - RNA, 22 nt, Human
aacucagucauaaagcgaaugc

SEQ ID NO: 139074 - RNA, 22 nt, Human
cuuccucccggcccaugcucug

SEQ ID NO: 139075 - RNA, 22 nt, Human
ccucucuuuccuacaccuugga

SEQ ID NO: 139076 - RNA, 22 nt, Human
gaaggaaaaauacucuguaagg

SEQ ID NO: 139077 - RNA, 22 nt, Human
gcuggccucgcaggcaggaugu

SEQ ID NO: 139078 - RNA, 22 nt, Human
uggagcugggguuugaaucugg

SEQ ID NO: 139079 - RNA, 22 nt, Human
gaggcuggugguuaguuccauu

SEQ ID NO: 139080 - RNA, 22 nt, Human
gcccagcacauugcugaggacc

SEQ ID NO: 139081 - RNA, 22 nt, Human
agagcugcaauuucauguggug

SEQ ID NO: 139082 - RNA, 22 nt, Human
ugugugauugcaggagaugugg

SEQ ID NO: 139083 - RNA, 22 nt, Human
cucugugugcuggugggguccu

SEQ ID NO: 139084 - RNA, 22 nt, Human
auggcuguuuugugacuucuca

SEQ ID NO: 139085 - RNA, 22 nt, Human
uaugcacgucuauuuaugaaga

SEQ ID NO: 139086 - RNA, 22 nt, Human
cuuccucccccacacacucacu

SEQ ID NO: 139087 - RNA, 22 nt, Human
aaaggccaagcaugagguggac

SEQ ID NO: 139088 - RNA, 22 nt, Human
uccugugugggcaggaugagaa

SEQ ID NO: 139089 - RNA, 22 nt, Human
ccaaggagcugcaggcacuugu

SEQ ID NO: 139090 - RNA, 18 nt, Human
acaggccucaguccugca

SEQ ID NO: 139091 - RNA, 22 nt, Human
acaccauacucauguugguucc

SEQ ID NO: 139092 - RNA, 22 nt, Human
uuuucucagcugcacuguauua

SEQ ID NO: 139093 - RNA, 22 nt, Human
ucucuggaauuggcugaggcaa

SEQ ID NO: 139094 - RNA, 22 nt, Human
augggaggcaggcucagaaccg

SEQ ID NO: 139095 - RNA, 22 nt, Human
auagucuuagaucagauaaagu

SEQ ID NO: 139096 - RNA, 22 nt, Human
guuucucuuaacacauaaagua

SEQ ID NO: 139097 - RNA, 22 nt, Human
gcccagcaggggauggcagcuc

SEQ ID NO: 139098 - RNA, 18 nt, Human
uaaaugcauguuaauaac

SEQ ID NO: 139099 - RNA, 22 nt, Human
agcagcucacaggauuccugaa

SEQ ID NO: 139100 - RNA, 22 nt, Human
uaaaguucagugcaugaaugug

SEQ ID NO: 139101 - RNA, 22 nt, Human
cagagguagaaggcaugcagug

SEQ ID NO: 139102 - RNA, 20 nt, Human
cuuucucuaauuuauaagua

SEQ ID NO: 139103 - RNA, 20 nt, Human
uaucaaucagaaagaagacu

SEQ ID NO: 139104 - RNA, 22 nt, Human
gguggccuccagggcauaggug

SEQ ID NO: 139105 - RNA, 22 nt, Human
caugagauaauuuuucuccagu

SEQ ID NO: 139106 - RNA, 19 nt, Human
ucucugugucucuguuuau

SEQ ID NO: 139107 - RNA, 22 nt, Human
aggcagcagccacaaggccuga

SEQ ID NO: 139108 - RNA, 22 nt, Human
cugccugugccaccgccucauu

SEQ ID NO: 139109 - RNA, 22 nt, Human
gguuugcacgauauuuccaugg

SEQ ID NO: 139110 - RNA, 22 nt, Human
ugugugaacucucugauguaca

SEQ ID NO: 139111 - RNA, 22 nt, Human
agggaguuagaaauccaggaua

SEQ ID NO: 139112 - RNA, 18 nt, Human
cagagcagagguggagcg

SEQ ID NO: 139113 - RNA, 22 nt, Human
uuuaaauuauaguuaaugucug

SEQ ID NO: 139114 - RNA, 22 nt, Human
cauggggagacaccuagggaaa

SEQ ID NO: 139115 - RNA, 22 nt, Human
auugagaauccauuugagauga

SEQ ID NO: 139116 - RNA, 22 nt, Human
cuggggcuggugaggcaggcuc

SEQ ID NO: 139117 - RNA, 21 nt, Human
ccugccaggaaacugaguguc

SEQ ID NO: 139118 - RNA, 21 nt, Human
cagagcuguccaaacccugac

SEQ ID NO: 139119 - RNA, 22 nt, Human
uggcucuguugagguauggauu

SEQ ID NO: 139120 - RNA, 20 nt, Human
ucagaggcugccagcugggg

SEQ ID NO: 139121 - RNA, 22 nt, Human
ucugggaacagccuggcugugu

SEQ ID NO: 139122 - RNA, 22 nt, Human
gucaggauuugaacucaggucu

SEQ ID NO: 139123 - RNA, 22 nt, Human
ugccugucuuggaguccuggcc

SEQ ID NO: 139124 - RNA, 22 nt, Human
gggcaagcucuucagaagcucu

SEQ ID NO: 139125 - RNA, 22 nt, Human
uguguacacaaugauugcagag

SEQ ID NO: 139126 - RNA, 22 nt, Human
uguauuuucuucuggaagcuua

SEQ ID NO: 139127 - RNA, 22 nt, Human
uggcccugccacucacugcuga

SEQ ID NO: 139128 - RNA, 22 nt, Human
gagcacaggcuuugguggacac

SEQ ID NO: 139129 - RNA, 20 nt, Human
guggccuguccuguuguggg

SEQ ID NO: 139130 - RNA, 22 nt, Human
cuguacaucucugaggacagua

SEQ ID NO: 139131 - RNA, 20 nt, Human
uucuggaggcuacaagucug

SEQ ID NO: 139132 - RNA, 22 nt, Human
uacauuccauguguguguauuc

SEQ ID NO: 139133 - RNA, 22 nt, Human
agagccuggggauuggcaaggg

SEQ ID NO: 139134 - RNA, 22 nt, Human
gacagccucaugaggagcaaaa

SEQ ID NO: 139135 - RNA, 22 nt, Human
uuuuccuggggcuucuggacuc

SEQ ID NO: 139136 - RNA, 22 nt, Human
gaagagcugacagugucauccu

SEQ ID NO: 139137 - RNA, 22 nt, Human
gcugccugucccaggaugagga

SEQ ID NO: 139138 - RNA, 22 nt, Human
acaguauagggcuuauauugua

SEQ ID NO: 139139 - RNA, 22 nt, Human
uuucugcuuaggacucugugga

SEQ ID NO: 139140 - RNA, 22 nt, Human
agggagcuguggucagcucagu

SEQ ID NO: 139141 - RNA, 22 nt, Human
uggcagaguucgcuccuauuca

SEQ ID NO: 139142 - RNA, 22 nt, Human
gagcacagaaucuucccaugca

SEQ ID NO: 139143 - RNA, 22 nt, Human
gcaguggauccaaugguaucuu

SEQ ID NO: 139144 - RNA, 22 nt, Human
aggcuguguuucuugcguuuuc

SEQ ID NO: 139145 - RNA, 22 nt, Human
aguuugaauugaaaugcagaug

SEQ ID NO: 139146 - RNA, 22 nt, Human
cauguguauuauucuuguggaa

SEQ ID NO: 139147 - RNA, 22 nt, Human
gaccaaggaagaggggagccag

SEQ ID NO: 139148 - RNA, 22 nt, Human
uggcagcagggccccuggagga

SEQ ID NO: 139149 - RNA, 22 nt, Human
uccugagauaaaucucauguga

SEQ ID NO: 139150 - RNA, 22 nt, Human
guuauguaugggggccuuauga

SEQ ID NO: 139151 - RNA, 22 nt, Human
ucugucacuuauuaagauggau

SEQ ID NO: 139152 - RNA, 22 nt, Human
auaucaguaucuauguauuugu

SEQ ID NO: 139153 - RNA, 22 nt, Human
cuuguacaggaauccaugguau

SEQ ID NO: 139154 - RNA, 23 nt, Human
auauuuccagguuagugagguaa

SEQ ID NO: 139155 - RNA, 22 nt, Human
uuugacauggaauaacucauuu

SEQ ID NO: 139156 - RNA, 22 nt, Human
gcuguggcuuucuguuucuguu

SEQ ID NO: 139157 - RNA, 22 nt, Human
gucugucucucuccagagugca

SEQ ID NO: 139158 - RNA, 22 nt, Human
ucaguguguacacugagcauuu

SEQ ID NO: 139159 - RNA, 19 nt, Human
cuggcagccugucuguguc

SEQ ID NO: 139160 - RNA, 22 nt, Human
ccacagcugaccgcaggugagc

SEQ ID NO: 139161 - RNA, 22 nt, Human
aaguucaauggaaaagcuuuag

SEQ ID NO: 139162 - RNA, 22 nt, Human
gacauuucaaucucauuauggg

SEQ ID NO: 139163 - RNA, 22 nt, Human
uuaaauuccagccucauaauag

SEQ ID NO: 139164 - RNA, 22 nt, Human
gagagcugauagaugagcuacu

SEQ ID NO: 139165 - RNA, 22 nt, Human
aauuuucuaaggugaugaucug

SEQ ID NO: 139166 - RNA, 17 nt, Human
ucaggcugggugcagug

SEQ ID NO: 139167 - RNA, 22 nt, Human
cagggccacuguagaugaggag

SEQ ID NO: 139168 - RNA, 22 nt, Human
uugcauaaaagaguauaucuua

SEQ ID NO: 139169 - RNA, 22 nt, Human
augcagguugggcaaguguggg

SEQ ID NO: 139170 - RNA, 22 nt, Human
cuguggcugcgccaucgaaaac

SEQ ID NO: 139171 - RNA, 22 nt, Human
ggcuucugagugcucugcuguu

SEQ ID NO: 139172 - RNA, 22 nt, Human
cuguguagccucaugugggcuu

SEQ ID NO: 139173 - RNA, 22 nt, Human
acagggcagagugaaaugcuau

SEQ ID NO: 139174 - RNA, 22 nt, Human
uugaacauuaacuucagucuau

SEQ ID NO: 139175 - RNA, 22 nt, Human
auguggcugaucgcagagcucu

SEQ ID NO: 139176 - RNA, 22 nt, Human
aaggcagcaccgccuccugaaa

SEQ ID NO: 139177 - RNA, 23 nt, Human
agcaauaagaagggauacaugug

SEQ ID NO: 139178 - RNA, 23 nt, Human
ucaggauauugugugccaaggug

SEQ ID NO: 139179 - RNA, 23 nt, Human
ccagcuccgugagccucgggcuc

SEQ ID NO: 139180 - RNA, 22 nt, Human
guggcugcagcccagcggcacg

SEQ ID NO: 139181 - RNA, 22 nt, Human
auucuucuaauaugaucguguu

SEQ ID NO: 139182 - RNA, 22 nt, Human
cagauauaguggcuugccuggg

SEQ ID NO: 139183 - RNA, 23 nt, Human
agcugugugcgcguccggguucu

SEQ ID NO: 139184 - RNA, 20 nt, Human
auugucagccuucagaggag

SEQ ID NO: 139185 - RNA, 19 nt, Human
uggaggagaggaaaaguca

SEQ ID NO: 139186 - RNA, 22 nt, Human
gcaccuggcugcccagguggag

SEQ ID NO: 139187 - RNA, 22 nt, Human
gggcugucaugugucagugacc

SEQ ID NO: 139188 - RNA, 22 nt, Human
cugccuggguucaaguccuguu

SEQ ID NO: 139189 - RNA, 22 nt, Human
agugaaauccuggucaacaggu

SEQ ID NO: 139190 - RNA, 22 nt, Human
uuucacagcaacacugucugca

SEQ ID NO: 139191 - RNA, 21 nt, Human
gggugcuguggucaugcagga

SEQ ID NO: 139192 - RNA, 19 nt, Human
ugaggggcucacagucuca

SEQ ID NO: 139193 - RNA, 22 nt, Human
uugaagcaugguacuuguucaa

SEQ ID NO: 139194 - RNA, 22 nt, Human
caggcuugggagcagagccacu

SEQ ID NO: 139195 - RNA, 22 nt, Human
cccagcaucccagugggcagca

SEQ ID NO: 139196 - RNA, 22 nt, Human
ccuuaaaagaacuaucucuucu

SEQ ID NO: 139197 - RNA, 22 nt, Human
gcugucugucucugucccacca

SEQ ID NO: 139198 - RNA, 22 nt, Human
cuguauuuucaugccuacguac

SEQ ID NO: 139199 - RNA, 22 nt, Human
auggcagccuguggacagucaa

SEQ ID NO: 139200 - RNA, 22 nt, Human
ccagcuggagccaagguggacu

SEQ ID NO: 139201 - RNA, 22 nt, Human
uguuuucugauucucguguggu

SEQ ID NO: 139202 - RNA, 22 nt, Human
gcaggguaggugacagguaguc

SEQ ID NO: 139203 - RNA, 22 nt, Human
ugauuuccaaaaggcuucuaag

SEQ ID NO: 139204 - RNA, 22 nt, Human
gcugucccgaaccccugguaau

SEQ ID NO: 139205 - RNA, 23 nt, Human
ucugagugauuagccucuggggu

SEQ ID NO: 139206 - RNA, 22 nt, Human
aggcugugcacagggcaccugc

SEQ ID NO: 139207 - RNA, 19 nt, Human
ggaccagguccugggcagc

SEQ ID NO: 139208 - RNA, 22 nt, Human
ucugugcugagcucugagaugu

SEQ ID NO: 139209 - RNA, 22 nt, Human
caggcacuggggaugcugggau

SEQ ID NO: 139210 - RNA, 22 nt, Human
cucuggccgcagcucagcucug

SEQ ID NO: 139211 - RNA, 18 nt, Human
agcagaauucuaggguuc

SEQ ID NO: 139212 - RNA, 22 nt, Human
agcauauuguaugucuauaugu

SEQ ID NO: 139213 - RNA, 22 nt, Human
uuugcauuauauuuauagaaga

SEQ ID NO: 139214 - RNA, 22 nt, Human
gccucccuguucuuccacaaua

SEQ ID NO: 139215 - RNA, 22 nt, Human
caaaugauagagccgauuauca

SEQ ID NO: 139216 - RNA, 22 nt, Human
accuggagucauuugaggagua

SEQ ID NO: 139217 - RNA, 19 nt, Human
uucuguguuaauuccuuua

SEQ ID NO: 139218 - RNA, 22 nt, Human
acaugcauaggagaagucuuua

SEQ ID NO: 139219 - RNA, 22 nt, Human
ggcagugugcaucuguguggcc

SEQ ID NO: 139220 - RNA, 22 nt, Human
uccauggguagcccugguugag

SEQ ID NO: 139221 - RNA, 22 nt, Human
gucauucuuaacaacucaguag

SEQ ID NO: 139222 - RNA, 19 nt, Human
agcauuuggaauucuacac

SEQ ID NO: 139223 - RNA, 22 nt, Human
gaaaugcaggcuuggauucagc

SEQ ID NO: 139224 - RNA, 22 nt, Human
gggcuggucuggcuuagucagg

SEQ ID NO: 139225 - RNA, 19 nt, Human
ucaggacugacuugaaguc

SEQ ID NO: 139226 - RNA, 22 nt, Human
agcugucugucuccugaggaga

SEQ ID NO: 139227 - RNA, 22 nt, Human
ucugccuggauuccauucucca

SEQ ID NO: 139228 - RNA, 22 nt, Human
aagggcagcuuaaauugguagc

SEQ ID NO: 139229 - RNA, 22 nt, Human
ucacagaauagcacuguaagcg

SEQ ID NO: 139230 - RNA, 22 nt, Human
aaagcccauguggaaguacagg

SEQ ID NO: 139231 - RNA, 20 nt, Human
uccugcaguuccuaggaggg

SEQ ID NO: 139232 - RNA, 22 nt, Human
gccaggcauuuguuaggugcug

SEQ ID NO: 139233 - RNA, 22 nt, Human
cccugggacccgcugcagaggc

SEQ ID NO: 139234 - RNA, 22 nt, Human
gcagcguggggcugagucagcu

SEQ ID NO: 139235 - RNA, 22 nt, Human
aacaucagaauauccauguugg

SEQ ID NO: 139236 - RNA, 22 nt, Human
ccagcuggaagagugcagaacu

SEQ ID NO: 139237 - RNA, 22 nt, Human
ggagcugaaggggugggcucag

SEQ ID NO: 139238 - RNA, 22 nt, Human
cucucccccacagcagccuucu

SEQ ID NO: 139239 - RNA, 22 nt, Human
agcuguguucugguugauucac

SEQ ID NO: 139240 - RNA, 22 nt, Human
ccccaggacacauggaccaagu

SEQ ID NO: 139241 - RNA, 19 nt, Human
cagagccucagagcuagaa

SEQ ID NO: 139242 - RNA, 22 nt, Human
aucuuucucugcacuauacaau

SEQ ID NO: 139243 - RNA, 22 nt, Human
uggcauguauacuugaguagga

SEQ ID NO: 139244 - RNA, 22 nt, Human
gagccuggauagccuuguucca

SEQ ID NO: 139245 - RNA, 22 nt, Human
gaggccaaucaauagggcaaua

SEQ ID NO: 139246 - RNA, 22 nt, Human
ggucucuguugccuccaucaag

SEQ ID NO: 139247 - RNA, 22 nt, Human
uacauauagacaguuacucuag

SEQ ID NO: 139248 - RNA, 22 nt, Human
cucagaguccccacaucugggu

SEQ ID NO: 139249 - RNA, 22 nt, Human
uagagugguuaacaguuuagaa

SEQ ID NO: 139250 - RNA, 22 nt, Human
caacuuuugacacgugugcuaa

SEQ ID NO: 139251 - RNA, 22 nt, Human
ugcagggcuaagucagagccug

SEQ ID NO: 139252 - RNA, 22 nt, Human
cuguggcucauaucuguaaucu

SEQ ID NO: 139253 - RNA, 22 nt, Human
cuggccugcugggugagguccu

SEQ ID NO: 139254 - RNA, 22 nt, Human
uuuauuaugauggacaccuucg

SEQ ID NO: 139255 - RNA, 22 nt, Human
ccuuucucuggcagcaggacag

SEQ ID NO: 139256 - RNA, 22 nt, Human
ggcucuggcaaggggaggcuac

SEQ ID NO: 139257 - RNA, 22 nt, Human
ugcagaagcagagaguugccaa

SEQ ID NO: 139258 - RNA, 22 nt, Human
cagagcugugauaaauagauau

SEQ ID NO: 139259 - RNA, 22 nt, Human
gagcucugacugcugggugaca

SEQ ID NO: 139260 - RNA, 22 nt, Human
uaucuucuugccaggcuggugu

SEQ ID NO: 139261 - RNA, 22 nt, Human
cuucucuugguaguucuuguug

SEQ ID NO: 139262 - RNA, 20 nt, Human
gcaaauggaucccacaagcc

SEQ ID NO: 139263 - RNA, 19 nt, Human
ugagugggccccugcagac

SEQ ID NO: 139264 - RNA, 22 nt, Human
gucaggggccaugggccaagga

SEQ ID NO: 139265 - RNA, 22 nt, Human
aaggucauuuaacaauuuauga

SEQ ID NO: 139266 - RNA, 22 nt, Human
gcugccuguccugaggaguccg

SEQ ID NO: 139267 - RNA, 22 nt, Human
cugagccaaaaagcagagcuug

SEQ ID NO: 139268 - RNA, 17 nt, Human
agcuccugcccauggcu

SEQ ID NO: 139269 - RNA, 22 nt, Human
ucuggagcuggagggcaaggca

SEQ ID NO: 139270 - RNA, 22 nt, Human
aucacaaaggcugcuucaugau

SEQ ID NO: 139271 - RNA, 20 nt, Human
cagcccuccaguggaggcag

SEQ ID NO: 139272 - RNA, 22 nt, Human
agcaugaaaggcgugccaacuu

SEQ ID NO: 139273 - RNA, 22 nt, Human
caaggccauaagagauacaaaa

SEQ ID NO: 139274 - RNA, 22 nt, Human
ggaggaugccaagcugugcaca

SEQ ID NO: 139275 - RNA, 22 nt, Human
ccaggcaggcagcguucucagg

SEQ ID NO: 139276 - RNA, 17 nt, Human
ggccuguguggcugcag

SEQ ID NO: 139277 - RNA, 22 nt, Human
ucuacagacagagcagguggga

SEQ ID NO: 139278 - RNA, 22 nt, Human
aaaggccaugguuggaguguuu

SEQ ID NO: 139279 - RNA, 22 nt, Human
ucaagaaagggcuucaccagga

SEQ ID NO: 139280 - RNA, 19 nt, Human
agagaggcugugugaggga

SEQ ID NO: 139281 - RNA, 22 nt, Human
ggcaaaaacagcaaugacuuuu

SEQ ID NO: 139282 - RNA, 22 nt, Human
uugugugucuucuucacugccc

SEQ ID NO: 139283 - RNA, 22 nt, Human
cagagacaguuucacagggucu

SEQ ID NO: 139284 - RNA, 22 nt, Human
ggcagggucuggacugaaagcu

SEQ ID NO: 139285 - RNA, 22 nt, Human
cccagcacuuugaauaugucac

SEQ ID NO: 139286 - RNA, 22 nt, Human
uucauucuugucuuuguauagu

SEQ ID NO: 139287 - RNA, 22 nt, Human
gaugaagccugacuucucggug

SEQ ID NO: 139288 - RNA, 22 nt, Human
ugcuucugggcaaaugugugug

SEQ ID NO: 139289 - RNA, 22 nt, Human
ucuaggagcaugaagggaaggc

SEQ ID NO: 139290 - RNA, 20 nt, Human
cacaguauucuuccuuaaaa

SEQ ID NO: 139291 - RNA, 21 nt, Human
ugcugccauagaccugaggga

SEQ ID NO: 139292 - RNA, 22 nt, Human
auagaaaacagauguccuuaaa

SEQ ID NO: 139293 - RNA, 22 nt, Human
gcagauggcugagccugcagau

SEQ ID NO: 139294 - RNA, 22 nt, Human
acccagcucuuugauggucuug

SEQ ID NO: 139295 - RNA, 22 nt, Human
gugggugauguacuggaggcca

SEQ ID NO: 139296 - RNA, 21 nt, Human
ggccugagcaccuguccaccu

SEQ ID NO: 139297 - RNA, 23 nt, Human
gugcucugcggucugcuagucug

SEQ ID NO: 139298 - RNA, 22 nt, Human
uuccaugaaagugaaauggagc

SEQ ID NO: 139299 - RNA, 22 nt, Human
uacauaguauucacauuguuuu

SEQ ID NO: 139300 - RNA, 22 nt, Human
ucagcagggaggcucugugccc

SEQ ID NO: 139301 - RNA, 21 nt, Human
ugaggcuguuguaccagggag

SEQ ID NO: 139302 - RNA, 22 nt, Human
cuuccagagauagggccucaag

SEQ ID NO: 139303 - RNA, 22 nt, Human
uaaguaaauuuauaaugugauu

SEQ ID NO: 139304 - RNA, 22 nt, Human
cagcuccccucuguggggcagu

SEQ ID NO: 139305 - RNA, 22 nt, Human
ucaggcugccuaucagacugug

SEQ ID NO: 139306 - RNA, 23 nt, Human
aaagacugcugagaauuuuagga

SEQ ID NO: 139307 - RNA, 21 nt, Human
cagaggcagguccugggacgg

SEQ ID NO: 139308 - RNA, 22 nt, Human
auaaaaguuuccaaucaugccu

SEQ ID NO: 139309 - RNA, 22 nt, Human
aggcugugaacucuaugcugaa

SEQ ID NO: 139310 - RNA, 22 nt, Human
gcuggccugggcucaagaccag

SEQ ID NO: 139311 - RNA, 22 nt, Human
uggcagcuacagacagagguga

SEQ ID NO: 139312 - RNA, 19 nt, Human
gagcccucuccauggccac

SEQ ID NO: 139313 - RNA, 22 nt, Human
uuugcauugcagugguuuacag

SEQ ID NO: 139314 - RNA, 20 nt, Human
ucacauccucucccaacaug

SEQ ID NO: 139315 - RNA, 22 nt, Human
aguguauggaauuagcucccuu

SEQ ID NO: 139316 - RNA, 22 nt, Human
uugucccaggacuugcauagau

SEQ ID NO: 139317 - RNA, 22 nt, Human
ccucaggauacaggagccacag

SEQ ID NO: 139318 - RNA, 22 nt, Human
ucccagagucuucuccuguaau

SEQ ID NO: 139319 - RNA, 22 nt, Human
uuagaguagagccauuucuguu

SEQ ID NO: 139320 - RNA, 22 nt, Human
gcucugcugucuucuugcaggc

SEQ ID NO: 139321 - RNA, 22 nt, Human
gaggcugcuguuagcccugggc

SEQ ID NO: 139322 - RNA, 22 nt, Human
ggcagaagaaaggcuaagucuc

SEQ ID NO: 139323 - RNA, 21 nt, Human
agcugccacccuagcuucuga

SEQ ID NO: 139324 - RNA, 22 nt, Human
agugucauuccagggacccucg

SEQ ID NO: 139325 - RNA, 22 nt, Human
cugugugucauuugucaauccu

SEQ ID NO: 139326 - RNA, 22 nt, Human
gcugagaguguaggauguuuac

SEQ ID NO: 139327 - RNA, 19 nt, Human
accaggcuuauggucagug

SEQ ID NO: 139328 - RNA, 22 nt, Human
uaaacauuuguuauucuuguuu

SEQ ID NO: 139329 - RNA, 22 nt, Human
aaaucugggucaagguggagug

SEQ ID NO: 139330 - RNA, 22 nt, Human
cugaggugagcuucccugggcu

SEQ ID NO: 139331 - RNA, 20 nt, Human
agguggcuccugcugggggu

SEQ ID NO: 139332 - RNA, 22 nt, Human
ugacaguagaagaugcuguuac

SEQ ID NO: 139333 - RNA, 22 nt, Human
uaaacaugugagugugcauaua

SEQ ID NO: 139334 - RNA, 22 nt, Human
ugcaguggugguaaagaugcuc

SEQ ID NO: 139335 - RNA, 22 nt, Human
ugaguagcggcuauguguaacu

SEQ ID NO: 139336 - RNA, 22 nt, Human
ggaccugccagaacucaggcua

SEQ ID NO: 139337 - RNA, 22 nt, Human
ucuuccucuagaucugaggccc

SEQ ID NO: 139338 - RNA, 22 nt, Human
caguggcagagaacagagaccu

SEQ ID NO: 139339 - RNA, 18 nt, Human
ccauuucaugauuauuac

SEQ ID NO: 139340 - RNA, 22 nt, Human
uucacagucacccuucuccaug

SEQ ID NO: 139341 - RNA, 22 nt, Human
ugguccagaugccuuggcuuua

SEQ ID NO: 139342 - RNA, 22 nt, Human
cauguuuucuaggcuuucacaa

SEQ ID NO: 139343 - RNA, 22 nt, Human
uguguuuguuagacuaauguua

SEQ ID NO: 139344 - RNA, 23 nt, Human
caugugugacaguaucacuguuu

SEQ ID NO: 139345 - RNA, 22 nt, Human
ggcucuggugcccuggcuccca

SEQ ID NO: 139346 - RNA, 22 nt, Human
uauuuucauucugugugacugu

SEQ ID NO: 139347 - RNA, 21 nt, Human
gcaggcuggucaaaccucagu

SEQ ID NO: 139348 - RNA, 22 nt, Human
auugucuguacuuuaaaaaugu

SEQ ID NO: 139349 - RNA, 22 nt, Human
auguguaugucuuauucaaaga

SEQ ID NO: 139350 - RNA, 22 nt, Human
aggcacugauucuguuuuccau

SEQ ID NO: 139351 - RNA, 22 nt, Human
ucagggacauuuagacacugau

SEQ ID NO: 139352 - RNA, 22 nt, Human
gggcugagucugcugccuguca

SEQ ID NO: 139353 - RNA, 22 nt, Human
gguggcugaagcagucuucggg

SEQ ID NO: 139354 - RNA, 22 nt, Human
uggccugggugcugcugacauc

SEQ ID NO: 139355 - RNA, 22 nt, Human
gaggcuggcagaaaagcacagg

SEQ ID NO: 139356 - RNA, 21 nt, Human
uggaaagauucaaagaccagg

SEQ ID NO: 139357 - RNA, 22 nt, Human
cugccacuuucacccagugcuc

SEQ ID NO: 139358 - RNA, 22 nt, Human
gggcuggcgggaaaggcaauuc

SEQ ID NO: 139359 - RNA, 22 nt, Human
acagaccaaaaaaggauauugg

SEQ ID NO: 139360 - RNA, 22 nt, Human
guguauguucuacuuaauauua

SEQ ID NO: 139361 - RNA, 22 nt, Human
ugguaucagagccaucuguauu

SEQ ID NO: 139362 - RNA, 22 nt, Human
auuauaaagaacaugugugugg

SEQ ID NO: 139363 - RNA, 22 nt, Human
ggugaggcuaagugacacaggg

SEQ ID NO: 139364 - RNA, 22 nt, Human
gcagcauuaccaagacauggca

SEQ ID NO: 139365 - RNA, 22 nt, Human
aggccucacauugggcuucaag

SEQ ID NO: 139366 - RNA, 22 nt, Human
gccuucugugcuccuggccuuu

SEQ ID NO: 139367 - RNA, 22 nt, Human
agacagcaggggagucugguuu

SEQ ID NO: 139368 - RNA, 23 nt, Human
agggguggucaguacccgcagug

SEQ ID NO: 139369 - RNA, 22 nt, Human
gggucuggacggcugcaggaag

SEQ ID NO: 139370 - RNA, 22 nt, Human
cccagcccaucucaaaggucua

SEQ ID NO: 139371 - RNA, 22 nt, Human
ccagggcaugggaagaacugaa

SEQ ID NO: 139372 - RNA, 22 nt, Human
gaagagcuauguccagggagca

SEQ ID NO: 139373 - RNA, 22 nt, Human
gcaggaugggagcuucacucug

SEQ ID NO: 139374 - RNA, 22 nt, Human
cuggcuguaugcuggccucaga

SEQ ID NO: 139375 - RNA, 22 nt, Human
uuuuuuauagcaaugaacccac

SEQ ID NO: 139376 - RNA, 22 nt, Human
agcccuggcccggcugugcuuu

SEQ ID NO: 139377 - RNA, 22 nt, Human
caggugggccaugaaaaaugac

SEQ ID NO: 139378 - RNA, 22 nt, Human
ccaaggagcaaggcucaacaag

SEQ ID NO: 139379 - RNA, 22 nt, Human
cagagccagaacuagaccuugu

SEQ ID NO: 139380 - RNA, 22 nt, Human
ccucccacauugaggacaugcu

SEQ ID NO: 139381 - RNA, 22 nt, Human
ugggacugcucuugcugggguc

SEQ ID NO: 139382 - RNA, 22 nt, Human
uaaaucccuacaucuguguuuu

SEQ ID NO: 139383 - RNA, 22 nt, Human
guugaaagcuuuucauuuaguu

SEQ ID NO: 139384 - RNA, 22 nt, Human
cugcugagcaucagggcugccc

SEQ ID NO: 139385 - RNA, 22 nt, Human
uggcagcuuccugcucauagga

SEQ ID NO: 139386 - RNA, 22 nt, Human
uuguguguguaacuuuaugaga

SEQ ID NO: 139387 - RNA, 22 nt, Human
auucaaauuaaguuaauucagc

SEQ ID NO: 139388 - RNA, 22 nt, Human
ugcaccauuaauuuaugugaga

SEQ ID NO: 139389 - RNA, 22 nt, Human
ccucucauagucuguauccuuu

SEQ ID NO: 139390 - RNA, 22 nt, Human
uacuuucuuguuccuuucauaa

SEQ ID NO: 139391 - RNA, 23 nt, Human
uggcagcagaucuuaaagugacc

SEQ ID NO: 139392 - RNA, 22 nt, Human
cagcaauaagccagguuagaca

SEQ ID NO: 139393 - RNA, 22 nt, Human
ucucaggaucuaauacauggua

SEQ ID NO: 139394 - RNA, 22 nt, Human
gagaaagacguaggcugggagg

SEQ ID NO: 139395 - RNA, 22 nt, Human
uuuucucuuguuaauguacuga

SEQ ID NO: 139396 - RNA, 22 nt, Human
cucuggaauuaaggaagccugu

SEQ ID NO: 139397 - RNA, 22 nt, Human
uggcauguuuaauguacuguau

SEQ ID NO: 139398 - RNA, 22 nt, Human
uuuucuuauggugaagcacaaa

SEQ ID NO: 139399 - RNA, 22 nt, Human
cucuguguucagccuagcagaa

SEQ ID NO: 139400 - RNA, 22 nt, Human
gcccagcuggcuuccagcacau

SEQ ID NO: 139401 - RNA, 22 nt, Human
ccagcugauucgguggugguug

SEQ ID NO: 139402 - RNA, 22 nt, Human
ucugggaacacacgucacuuca

SEQ ID NO: 139403 - RNA, 22 nt, Human
aaggcacugaaaaauugugugu

SEQ ID NO: 139404 - RNA, 22 nt, Human
cuccucccugcgauugcucugc

SEQ ID NO: 139405 - RNA, 19 nt, Human
uggcagcauugguaccuug

SEQ ID NO: 139406 - RNA, 22 nt, Human
cucugaagggagggccaagccc

SEQ ID NO: 139407 - RNA, 22 nt, Human
cugaaggagaaggccacuguuc

SEQ ID NO: 139408 - RNA, 22 nt, Human
ucuguggcgcauaguugucucu

SEQ ID NO: 139409 - RNA, 22 nt, Human
uuucauuacguguuugacuugu

SEQ ID NO: 139410 - RNA, 22 nt, Human
acacaguaugaaaagucuaguu

SEQ ID NO: 139411 - RNA, 18 nt, Human
cagaaaucacaccagcac

SEQ ID NO: 139412 - RNA, 22 nt, Human
cauggcaggugcagauucugug

SEQ ID NO: 139413 - RNA, 22 nt, Human
auuucagauucagaaauguagg

SEQ ID NO: 139414 - RNA, 22 nt, Human
gcauguguuagagugugcaugc

SEQ ID NO: 139415 - RNA, 22 nt, Human
aggagcagaccguaguccugca

SEQ ID NO: 139416 - RNA, 22 nt, Human
ggcugugccucaaggcuacuca

SEQ ID NO: 139417 - RNA, 22 nt, Human
aucuggcuuaccuagggugccu

SEQ ID NO: 139418 - RNA, 22 nt, Human
aggaagccugcaggugacugcu

SEQ ID NO: 139419 - RNA, 22 nt, Human
augcacccagugucuggacuau

SEQ ID NO: 139420 - RNA, 22 nt, Human
aguauguauuuuauacuuacag

SEQ ID NO: 139421 - RNA, 22 nt, Human
caagggaccugagauggucucu

SEQ ID NO: 139422 - RNA, 22 nt, Human
uguggccugggaaaugaguguu

SEQ ID NO: 139423 - RNA, 22 nt, Human
guguaugcuuagccagagauuu

SEQ ID NO: 139424 - RNA, 22 nt, Human
cauacauugcucauucaguauc

SEQ ID NO: 139425 - RNA, 22 nt, Human
uguccacaucacucacuuguca

SEQ ID NO: 139426 - RNA, 22 nt, Human
cccagcagugacccagugauac

SEQ ID NO: 139427 - RNA, 22 nt, Human
ucugugugaccauaagccagcu

SEQ ID NO: 139428 - RNA, 22 nt, Human
caggguggcacucagcgcaucu

SEQ ID NO: 139429 - RNA, 22 nt, Human
gggcagcagaggaucccuuaau

SEQ ID NO: 139430 - RNA, 22 nt, Human
ucugcuggccuuagcaggucua

SEQ ID NO: 139431 - RNA, 22 nt, Human
guguuuccuaguuuaaugaaug

SEQ ID NO: 139432 - RNA, 22 nt, Human
guggccucuguuggcuccuagg

SEQ ID NO: 139433 - RNA, 17 nt, Human
cauuuguugaucaguug

SEQ ID NO: 139434 - RNA, 22 nt, Human
ugcagcugaggccagcuaugcc

SEQ ID NO: 139435 - RNA, 22 nt, Human
cuuacaguguugagggaauuaa

SEQ ID NO: 139436 - RNA, 22 nt, Human
augggaggguggaaaggcucug

SEQ ID NO: 139437 - RNA, 22 nt, Human
aaacuuuuuuagguucauaggc

SEQ ID NO: 139438 - RNA, 22 nt, Human
uuuguguguauauguauauaga

SEQ ID NO: 139439 - RNA, 22 nt, Human
ucuguguacgcaggcgugcgcg

SEQ ID NO: 139440 - RNA, 22 nt, Human
ccugggaggcuguuuccagccu

SEQ ID NO: 139441 - RNA, 22 nt, Human
uuuccuuccagguuccuaaggc

SEQ ID NO: 139442 - RNA, 22 nt, Human
aggcugugagcaagaacaccua

SEQ ID NO: 139443 - RNA, 22 nt, Human
aggcugugcgaggucucagagu

SEQ ID NO: 139444 - RNA, 22 nt, Human
ggcucuggugggaagguuagau

SEQ ID NO: 139445 - RNA, 23 nt, Human
cagcugaagcagccugggcugga

SEQ ID NO: 139446 - RNA, 22 nt, Human
ucacguuuuacugagugagaua

SEQ ID NO: 139447 - RNA, 22 nt, Human
gacccuguuucuacaaauaauu

SEQ ID NO: 139448 - RNA, 22 nt, Human
cccugcaggggaccugcagccu

SEQ ID NO: 139449 - RNA, 22 nt, Human
gaaggccauuagagccugugcc

SEQ ID NO: 139450 - RNA, 22 nt, Human
ggcagggagagcaugcugauaa

SEQ ID NO: 139451 - RNA, 22 nt, Human
aucuggcuauugacauguuaua

SEQ ID NO: 139452 - RNA, 22 nt, Human
cccaugccuucugacucacagg

SEQ ID NO: 139453 - RNA, 22 nt, Human
ugcccacaggaagacaccagcg

SEQ ID NO: 139454 - RNA, 22 nt, Human
gcucucuuugugccacuuaagg

SEQ ID NO: 139455 - RNA, 22 nt, Human
acaguagucuuaauuucaugua

SEQ ID NO: 139456 - RNA, 22 nt, Human
acucaggaaaugaagacugguu

SEQ ID NO: 139457 - RNA, 22 nt, Human
gaaaaaugagcugaugucaggg

SEQ ID NO: 139458 - RNA, 22 nt, Human
ggggcugggauuugaacccagg

SEQ ID NO: 139459 - RNA, 22 nt, Human
ccaggguggggcaggcccacug

SEQ ID NO: 139460 - RNA, 22 nt, Human
uuugaaaguccuaggagagucc

SEQ ID NO: 139461 - RNA, 22 nt, Human
uuuccucuuugugacacagcug

SEQ ID NO: 139462 - RNA, 22 nt, Human
gaggcagagucacaaagagucu

SEQ ID NO: 139463 - RNA, 22 nt, Human
acugaaggcuuaacucuuucau

SEQ ID NO: 139464 - RNA, 22 nt, Human
ccucucucuccugcacacacac

SEQ ID NO: 139465 - RNA, 22 nt, Human
ggcagaguggagugcggccucc

SEQ ID NO: 139466 - RNA, 22 nt, Human
ccugggaggcugugggucugcu

SEQ ID NO: 139467 - RNA, 22 nt, Human
uggcugugccucuuuccaggcc

SEQ ID NO: 139468 - RNA, 22 nt, Human
ugugugggagcacgggcuguug

SEQ ID NO: 139469 - RNA, 22 nt, Human
aagcaauagcaacaacuuuaca

SEQ ID NO: 139470 - RNA, 22 nt, Human
aagugguaggaagagagcacug

SEQ ID NO: 139471 - RNA, 22 nt, Human
agaggcaggaagagcugauuuu

SEQ ID NO: 139472 - RNA, 22 nt, Human
caguggcuguuucuggaaggca

SEQ ID NO: 139473 - RNA, 22 nt, Human
aagauuuccuucaguagagcua

SEQ ID NO: 139474 - RNA, 22 nt, Human
uauuucugggaguucagaaauu

SEQ ID NO: 139475 - RNA, 22 nt, Human
uuucuugucuuuaguaucuggc

SEQ ID NO: 139476 - RNA, 22 nt, Human
acauuucuggaguuucucaaca

SEQ ID NO: 139477 - RNA, 22 nt, Human
ugaggcaggaguucaggcugcg

SEQ ID NO: 139478 - RNA, 22 nt, Human
ugucaccagcugcuccucagga

SEQ ID NO: 139479 - RNA, 22 nt, Human
gagcagcugagcuggaaugaga

SEQ ID NO: 139480 - RNA, 22 nt, Human
cucuggagaacuccuugugucu

SEQ ID NO: 139481 - RNA, 22 nt, Human
gcuugcucaacccccgucucuc

SEQ ID NO: 139482 - RNA, 22 nt, Human
aggacucaucccugcuugucag

SEQ ID NO: 139483 - RNA, 22 nt, Human
uugaaagggauauaucuuucug

SEQ ID NO: 139484 - RNA, 21 nt, Human
guguuuccuguuuauggcuug

SEQ ID NO: 139485 - RNA, 22 nt, Human
caggcagcugacugucagauau

SEQ ID NO: 139486 - RNA, 22 nt, Human
cucacugucuguacuagcugau

SEQ ID NO: 139487 - RNA, 22 nt, Human
ccuccaggaacuugagagacac

SEQ ID NO: 139488 - RNA, 22 nt, Human
cucagggccaaggaugcuguug

SEQ ID NO: 139489 - RNA, 22 nt, Human
caguagcacucugucagugaag

SEQ ID NO: 139490 - RNA, 23 nt, Human
aaaguguagccagguuaagaacc

SEQ ID NO: 139491 - RNA, 19 nt, Human
uguguaaagucugugguca

SEQ ID NO: 139492 - RNA, 22 nt, Human
aagccaggaagagagccuucac

SEQ ID NO: 139493 - RNA, 22 nt, Human
ugaggugaccgcagaugggaag

SEQ ID NO: 139494 - RNA, 22 nt, Human
ucugugugcccuaaagccugcu

SEQ ID NO: 139495 - RNA, 22 nt, Human
acaaaugucuccucuuuuguua

SEQ ID NO: 139496 - RNA, 22 nt, Human
cuguucaugcugauucuguaug

SEQ ID NO: 139497 - RNA, 22 nt, Human
gugaaaucugaggcccaugaug

SEQ ID NO: 139498 - RNA, 22 nt, Human
cucccuggcacagcgagagguu

SEQ ID NO: 139499 - RNA, 19 nt, Human
gagcacagcggcauuuggu

SEQ ID NO: 139500 - RNA, 20 nt, Human
cccugagaccagagagcagc

SEQ ID NO: 139501 - RNA, 18 nt, Human
ccgggcuuuggugacaca

SEQ ID NO: 139502 - RNA, 17 nt, Human
uauguguguuugcagca

SEQ ID NO: 139503 - RNA, 22 nt, Human
gcugcugcgcuugucuacuguu

SEQ ID NO: 139504 - RNA, 22 nt, Human
cagccaggagccucugcaacua

SEQ ID NO: 139505 - RNA, 22 nt, Human
caggccugugacaccgugucug

SEQ ID NO: 139506 - RNA, 22 nt, Human
agagaagacuuacagccacagu

SEQ ID NO: 139507 - RNA, 19 nt, Human
agccuggcuuugcucugcu

SEQ ID NO: 139508 - RNA, 22 nt, Human
ucugucuucaucagcaugugau

SEQ ID NO: 139509 - RNA, 22 nt, Human
uucuuuggggaauauucugguu

SEQ ID NO: 139510 - RNA, 22 nt, Human
agcagcucuguuuaccuggagg

SEQ ID NO: 139511 - RNA, 22 nt, Human
uggaaagacauucagccgcugg

SEQ ID NO: 139512 - RNA, 22 nt, Human
cagcauggggcuuggagucagc

SEQ ID NO: 139513 - RNA, 22 nt, Human
ucaguaacuuacuuauucaccu

SEQ ID NO: 139514 - RNA, 22 nt, Human
agcuggagaaaccugggagggu

SEQ ID NO: 139515 - RNA, 22 nt, Human
acagauauaugauuguguaaau

SEQ ID NO: 139516 - RNA, 22 nt, Human
gccccuggcuggccagcuccuc

SEQ ID NO: 139517 - RNA, 22 nt, Human
ugcugaggagguggcugugcuu

SEQ ID NO: 139518 - RNA, 22 nt, Human
uccagaguacggaagagucauc

SEQ ID NO: 139519 - RNA, 22 nt, Human
uagaaaucauuuagaaguauug

SEQ ID NO: 139520 - RNA, 22 nt, Human
aggagguggccugagcgugccc

SEQ ID NO: 139521 - RNA, 23 nt, Human
ucugcucugaaguucggcugagc

SEQ ID NO: 139522 - RNA, 22 nt, Human
ucacaggacccugaggguggcg

SEQ ID NO: 139523 - RNA, 22 nt, Human
cccuggaggaccccaauguggc

SEQ ID NO: 139524 - RNA, 22 nt, Human
ugauggcuaucccuggaagggc

SEQ ID NO: 139525 - RNA, 20 nt, Human
agggcagagggauuacaggc

SEQ ID NO: 139526 - RNA, 22 nt, Human
aaugucugccugaacuuuauau

SEQ ID NO: 139527 - RNA, 19 nt, Human
cuggggcuuugguacugcc

SEQ ID NO: 139528 - RNA, 22 nt, Human
uggcagcuguguccagguagaa

SEQ ID NO: 139529 - RNA, 22 nt, Human
aacaacugaaaagcuuuuucug

SEQ ID NO: 139530 - RNA, 22 nt, Human
uucuuuuccuacacagcgauuu

SEQ ID NO: 139531 - RNA, 22 nt, Human
gcugucuguucgagcguguguu

SEQ ID NO: 139532 - RNA, 22 nt, Human
guggcagagguuccucagugug

SEQ ID NO: 139533 - RNA, 22 nt, Human
ccagcccuugcugaaggguggc

SEQ ID NO: 139534 - RNA, 22 nt, Human
agcagcugggcucagagcuggg

SEQ ID NO: 139535 - RNA, 22 nt, Human
ucaggggcccuucccucagcag

SEQ ID NO: 139536 - RNA, 22 nt, Human
agcugugugcauuugggucuca

SEQ ID NO: 139537 - RNA, 22 nt, Human
accagagcgcucaagccuuccc

SEQ ID NO: 139538 - RNA, 22 nt, Human
gugaccaucagagaauaacaaa

SEQ ID NO: 139539 - RNA, 22 nt, Human
cagccaggagcucccccugcuc

SEQ ID NO: 139540 - RNA, 22 nt, Human
uucuucuucuggcugcaccugg

SEQ ID NO: 139541 - RNA, 22 nt, Human
gcagugacagggcugcugccuu

SEQ ID NO: 139542 - RNA, 21 nt, Human
ugggagagggcucagcuaccc

SEQ ID NO: 139543 - RNA, 21 nt, Human
ugcccacagcaaaugcagagg

SEQ ID NO: 139544 - RNA, 22 nt, Human
uuccauaauaaccugagagaaa

SEQ ID NO: 139545 - RNA, 22 nt, Human
ugaagcagagugaaggugaauu

SEQ ID NO: 139546 - RNA, 22 nt, Human
guuacagugcuuggcaauaagu

SEQ ID NO: 139547 - RNA, 22 nt, Human
gugugcagugagcaaaagaucu

SEQ ID NO: 139548 - RNA, 22 nt, Human
auauuucuugagcaccugguau

SEQ ID NO: 139549 - RNA, 22 nt, Human
gcccagcaggacagagugguuu

SEQ ID NO: 139550 - RNA, 22 nt, Human
aguggcugugaaauacauggga

SEQ ID NO: 139551 - RNA, 22 nt, Human
ggacacaguggaagacagcuug

SEQ ID NO: 139552 - RNA, 22 nt, Human
agaucaaagccaugagagauuu

SEQ ID NO: 139553 - RNA, 22 nt, Human
gcuggagauaguaggauccaua

SEQ ID NO: 139554 - RNA, 22 nt, Human
uauguuuccugagcuuacacca

SEQ ID NO: 139555 - RNA, 20 nt, Human
uucucuuuggguccagagaa

SEQ ID NO: 139556 - RNA, 22 nt, Human
cauugcaccacauugcaucccu

SEQ ID NO: 139557 - RNA, 22 nt, Human
uauagaaguaagcauugugaug

SEQ ID NO: 139558 - RNA, 22 nt, Human
gcacuaaaccaacauguaauaa

SEQ ID NO: 139559 - RNA, 22 nt, Human
cagagcucagagcagggcacuc

SEQ ID NO: 139560 - RNA, 22 nt, Human
gagagugagauaauuucacaua

SEQ ID NO: 139561 - RNA, 22 nt, Human
aaggcgacacaggcagcaggcc

SEQ ID NO: 139562 - RNA, 22 nt, Human
cccaggagguggagguugcagc

SEQ ID NO: 139563 - RNA, 21 nt, Human
gaaaggucuuaacuuacagag

SEQ ID NO: 139564 - RNA, 22 nt, Human
acaggcagcgucauugcugcuc

SEQ ID NO: 139565 - RNA, 22 nt, Human
gaugagggccugguggcugugc

SEQ ID NO: 139566 - RNA, 19 nt, Human
cucuuuccauuguauuugc

SEQ ID NO: 139567 - RNA, 22 nt, Human
cuacauggagaagaaaauucuu

SEQ ID NO: 139568 - RNA, 20 nt, Human
ccuccuggucaggugugcag

SEQ ID NO: 139569 - RNA, 22 nt, Human
ugccugggccucugaggaaggc

SEQ ID NO: 139570 - RNA, 22 nt, Human
ucaagagaaggggaaauagacu

SEQ ID NO: 139571 - RNA, 22 nt, Human
aagggaggggauguaagccugg

SEQ ID NO: 139572 - RNA, 22 nt, Human
auguuauaguuauaaaaugagg

SEQ ID NO: 139573 - RNA, 22 nt, Human
gcugcucucucccuaaguuggg

SEQ ID NO: 139574 - RNA, 22 nt, Human
ugggaggcagguaggugaugau

SEQ ID NO: 139575 - RNA, 18 nt, Human
cugccuguugcugagagg

SEQ ID NO: 139576 - RNA, 22 nt, Human
ccagaggcauguucaaagcaau

SEQ ID NO: 139577 - RNA, 22 nt, Human
gccagcagggcccaaaugcugg

SEQ ID NO: 139578 - RNA, 22 nt, Human
uuuuccugggcuuucuguguaa

SEQ ID NO: 139579 - RNA, 22 nt, Human
ggcccacacugacagcugagcu

SEQ ID NO: 139580 - RNA, 22 nt, Human
cuuagaaaugcagauucucagg

SEQ ID NO: 139581 - RNA, 22 nt, Human
gacagguggggaaacuaaggua

SEQ ID NO: 139582 - RNA, 18 nt, Human
caggucagccuggccuca

SEQ ID NO: 139583 - RNA, 22 nt, Human
acagugaaugcccaagaaaagu

SEQ ID NO: 139584 - RNA, 22 nt, Human
cagcugccacuugcucucggcu

SEQ ID NO: 139585 - RNA, 22 nt, Human
uaacagaaauauuuccagguga

SEQ ID NO: 139586 - RNA, 22 nt, Human
cugaaggagcauagucaguuuu

SEQ ID NO: 139587 - RNA, 22 nt, Human
auugacaagacaauggcucuua

SEQ ID NO: 139588 - RNA, 22 nt, Human
gauuuccuaauguggaucucug

SEQ ID NO: 139589 - RNA, 18 nt, Human
gaugggagcaagagaaga

SEQ ID NO: 139590 - RNA, 22 nt, Human
aaaugcacugaacacauguugu

SEQ ID NO: 139591 - RNA, 22 nt, Human
uuucuauuggcgucacuguugu

SEQ ID NO: 139592 - RNA, 22 nt, Human
cucuauuuauggcaucuuuaug

SEQ ID NO: 139593 - RNA, 22 nt, Human
uauugacaauaggcaacugagg

SEQ ID NO: 139594 - RNA, 22 nt, Human
agguagagcuccaguagaaaau

SEQ ID NO: 139595 - RNA, 22 nt, Human
auuuucaugacuaccuuaaaua

SEQ ID NO: 139596 - RNA, 22 nt, Human
ggcuguguuccaagugucagga

SEQ ID NO: 139597 - RNA, 22 nt, Human
ugaagcagauggucuggucauu

SEQ ID NO: 139598 - RNA, 22 nt, Human
agggcagaccacgugcaaggau

SEQ ID NO: 139599 - RNA, 22 nt, Human
caguggaggccuugggaccuuu

SEQ ID NO: 139600 - RNA, 22 nt, Human
auucucaaacaagugguuugau

SEQ ID NO: 139601 - RNA, 22 nt, Human
ccugccugcagaaaguaucucc

SEQ ID NO: 139602 - RNA, 22 nt, Human
aggccuguuccuuccugggcac

SEQ ID NO: 139603 - RNA, 22 nt, Human
ucacaguacaugauucaguggu

SEQ ID NO: 139604 - RNA, 22 nt, Human
uucacaggauauaugugcaggg

SEQ ID NO: 139605 - RNA, 19 nt, Human
ugugugcaugcgcacgugu

SEQ ID NO: 139606 - RNA, 22 nt, Human
ugugcagcuaguccuggacuug

SEQ ID NO: 139607 - RNA, 22 nt, Human
uccucuggauauaagccucacc

SEQ ID NO: 139608 - RNA, 20 nt, Human
gagccugggaagucuaaggu

SEQ ID NO: 139609 - RNA, 22 nt, Human
auucuguauuucuaauaagauc

SEQ ID NO: 139610 - RNA, 22 nt, Human
agucccaggcagccgagccggu

SEQ ID NO: 139611 - RNA, 22 nt, Human
ugcucuguaaggucagaaaagg

SEQ ID NO: 139612 - RNA, 22 nt, Human
aaguauauuuuuugaagcauau

SEQ ID NO: 139613 - RNA, 22 nt, Human
cccuggcauaaaacuucuccag

SEQ ID NO: 139614 - RNA, 22 nt, Human
agaggucauaucucagaagaga

SEQ ID NO: 139615 - RNA, 22 nt, Human
ucaguuuuuaagaguuaugcga

SEQ ID NO: 139616 - RNA, 22 nt, Human
auauuuguauuucgugugugua

SEQ ID NO: 139617 - RNA, 22 nt, Human
gcugucuggaggcucugaggga

SEQ ID NO: 139618 - RNA, 22 nt, Human
ugugccugcuagaugguugucg

SEQ ID NO: 139619 - RNA, 22 nt, Human
guggccagaagacugcaaugcu

SEQ ID NO: 139620 - RNA, 22 nt, Human
agguggaacguucaggugcuag

SEQ ID NO: 139621 - RNA, 22 nt, Human
caggaagagaacauggaggcug

SEQ ID NO: 139622 - RNA, 20 nt, Human
cagcaguggaugagaguuuu

SEQ ID NO: 139623 - RNA, 22 nt, Human
ccaccuccaccuauugccagcc

SEQ ID NO: 139624 - RNA, 22 nt, Human
aguuauauaacuaucuagaugc

SEQ ID NO: 139625 - RNA, 22 nt, Human
acagucuaggugugugauuuaa

SEQ ID NO: 139626 - RNA, 22 nt, Human
aaaugguguuucuaaugcuaga

SEQ ID NO: 139627 - RNA, 22 nt, Human
gggcagagaaauggacaguugg

SEQ ID NO: 139628 - RNA, 22 nt, Human
cuuuuuauaccgugccaguuga

SEQ ID NO: 139629 - RNA, 22 nt, Human
ucagaacagaagaaggaacacg

SEQ ID NO: 139630 - RNA, 22 nt, Human
uuucauaugggcauuggcaaua

SEQ ID NO: 139631 - RNA, 22 nt, Human
aucuuucaguuucauaccaauu

SEQ ID NO: 139632 - RNA, 22 nt, Human
uuacagcacagugcuuuuacug

SEQ ID NO: 139633 - RNA, 22 nt, Human
ucacaucucccuggaggacaca

SEQ ID NO: 139634 - RNA, 22 nt, Human
aaggccuggauuuagguuguga

SEQ ID NO: 139635 - RNA, 22 nt, Human
gcagcaggagaguuuguccugc

SEQ ID NO: 139636 - RNA, 22 nt, Human
agcagaugagccucaugacugg

SEQ ID NO: 139637 - RNA, 22 nt, Human
ugcagcagacugaguaugagaa

SEQ ID NO: 139638 - RNA, 22 nt, Human
ccagagugacgugaagugugaa

SEQ ID NO: 139639 - RNA, 22 nt, Human
aagccagggauuccugagggag

SEQ ID NO: 139640 - RNA, 22 nt, Human
ugggugugcccagauggugucc

SEQ ID NO: 139641 - RNA, 22 nt, Human
auuugcucuagcugcagugaau

SEQ ID NO: 139642 - RNA, 22 nt, Human
caggccuggagugcaauggcac

SEQ ID NO: 139643 - RNA, 23 nt, Human
gcugucugucaucucugcgggag

SEQ ID NO: 139644 - RNA, 22 nt, Human
gcuggugagcaaaggagaagga

SEQ ID NO: 139645 - RNA, 22 nt, Human
aaugcagugagccauuaaaugg

SEQ ID NO: 139646 - RNA, 22 nt, Human
cucuggaauguuuacaugcccu

SEQ ID NO: 139647 - RNA, 22 nt, Human
acaaaaguguaggaauuccuua

SEQ ID NO: 139648 - RNA, 17 nt, Human
ucugugauaguguagau

SEQ ID NO: 139649 - RNA, 20 nt, Human
accuuucaaaugauucagca

SEQ ID NO: 139650 - RNA, 22 nt, Human
ccuucugcuggucaucccagug

SEQ ID NO: 139651 - RNA, 17 nt, Human
ucuguccagggagugug

SEQ ID NO: 139652 - RNA, 22 nt, Human
ugugaauguauaguuuguauau

SEQ ID NO: 139653 - RNA, 22 nt, Human
cuuguacacucaguacuucuag

SEQ ID NO: 139654 - RNA, 22 nt, Human
cucuuuucaaaccuguuuaugg

SEQ ID NO: 139655 - RNA, 22 nt, Human
cugcaggcccccuuccuggagu

SEQ ID NO: 139656 - RNA, 22 nt, Human
aggcagagaaaaaccagauaug

SEQ ID NO: 139657 - RNA, 22 nt, Human
uuuaaucucccacucucagccu

SEQ ID NO: 139658 - RNA, 22 nt, Human
auccuugagccaaugacugauu

SEQ ID NO: 139659 - RNA, 23 nt, Human
uccagggauuaaugaagucaguc

SEQ ID NO: 139660 - RNA, 22 nt, Human
gcacagaacuucucuuaguagg

SEQ ID NO: 139661 - RNA, 22 nt, Human
ucagagugaggcccagcaaucu

SEQ ID NO: 139662 - RNA, 22 nt, Human
aggcaggugggucacuugaguc

SEQ ID NO: 139663 - RNA, 22 nt, Human
uuuagagucauuuuauauugac

SEQ ID NO: 139664 - RNA, 22 nt, Human
cagagccagcuguccuuggcau

SEQ ID NO: 139665 - RNA, 18 nt, Human
aggccagcccugcuacug

SEQ ID NO: 139666 - RNA, 22 nt, Human
ggcacugauaauguccucucuc

SEQ ID NO: 139667 - RNA, 19 nt, Human
cuguacagguugcuucugg

SEQ ID NO: 139668 - RNA, 22 nt, Human
cuccucuggcuuccuggaggca

SEQ ID NO: 139669 - RNA, 22 nt, Human
ugaagcaggaaacuucuuguuu

SEQ ID NO: 139670 - RNA, 22 nt, Human
uggcucagcgguggcagcagac

SEQ ID NO: 139671 - RNA, 22 nt, Human
cagagcagguaucuuuggugaa

SEQ ID NO: 139672 - RNA, 22 nt, Human
aaaggcaggcuuucacaucuca

SEQ ID NO: 139673 - RNA, 22 nt, Human
ccagcuggugggucuuucucug

SEQ ID NO: 139674 - RNA, 20 nt, Human
uccaguauguuauuuggugu

SEQ ID NO: 139675 - RNA, 22 nt, Human
cucaggauagcugcgcagccug

SEQ ID NO: 139676 - RNA, 22 nt, Human
gagccuguguuuccuguagcca

SEQ ID NO: 139677 - RNA, 22 nt, Human
gacagggcaagacucugucuaa

SEQ ID NO: 139678 - RNA, 22 nt, Human
auucucucuagaagcugagaug

SEQ ID NO: 139679 - RNA, 22 nt, Human
uggacaggugagugacucaggg

SEQ ID NO: 139680 - RNA, 22 nt, Human
uaagaacagauaaaguuucccc

SEQ ID NO: 139681 - RNA, 22 nt, Human
ugcagggcacacgcacgggugu

SEQ ID NO: 139682 - RNA, 22 nt, Human
cugugucggacgugggcagcag

SEQ ID NO: 139683 - RNA, 22 nt, Human
ugcagaagaaugagcuuggagu

SEQ ID NO: 139684 - RNA, 22 nt, Human
acuuuuaaaugaguuucaguug

SEQ ID NO: 139685 - RNA, 22 nt, Human
aggccagggucccacacucgca

SEQ ID NO: 139686 - RNA, 22 nt, Human
agaggccuuucuguugagugaa

SEQ ID NO: 139687 - RNA, 22 nt, Human
ggcucacgcaauuaucccggcc

SEQ ID NO: 139688 - RNA, 22 nt, Human
caggccugauacacugaacucu

SEQ ID NO: 139689 - RNA, 22 nt, Human
cuggcagcuggaggcuagaggc

SEQ ID NO: 139690 - RNA, 22 nt, Human
cuggcuugcagcucaucauaaa

SEQ ID NO: 139691 - RNA, 22 nt, Human
uggagcccagacacuggcauug

SEQ ID NO: 139692 - RNA, 22 nt, Human
aguggcagagccaaguagagcc

SEQ ID NO: 139693 - RNA, 22 nt, Human
uucucuagguuuuagaugaaga

SEQ ID NO: 139694 - RNA, 22 nt, Human
agcccuagagcuggaggucagu

SEQ ID NO: 139695 - RNA, 22 nt, Human
auuuucugugugcagauaaaua

SEQ ID NO: 139696 - RNA, 22 nt, Human
uggggaagggcacccuggagac

SEQ ID NO: 139697 - RNA, 22 nt, Human
ccaaaguccauaguuuacuuua

SEQ ID NO: 139698 - RNA, 21 nt, Human
gugugaguagcaugugucuca

SEQ ID NO: 139699 - RNA, 22 nt, Human
gccaggugcuaucccugcgcug

SEQ ID NO: 139700 - RNA, 22 nt, Human
guaugcaugcauguguauguac

SEQ ID NO: 139701 - RNA, 22 nt, Human
uauauuaacacccacuugccuc

SEQ ID NO: 139702 - RNA, 20 nt, Human
agaguaacuggcacauaggg

SEQ ID NO: 139703 - RNA, 22 nt, Human
agggcuggccacaugauuuggu

SEQ ID NO: 139704 - RNA, 18 nt, Human
ggagagugacagagucgu

SEQ ID NO: 139705 - RNA, 22 nt, Human
uccucaugccgggucucacgcu

SEQ ID NO: 139706 - RNA, 21 nt, Human
ggagggcagcccagacuggcu

SEQ ID NO: 139707 - RNA, 22 nt, Human
auuugcaaagucguaucuguga

SEQ ID NO: 139708 - RNA, 22 nt, Human
ggccucagaccggagcuggcca

SEQ ID NO: 139709 - RNA, 22 nt, Human
acaggcuucucacagaaaaggg

SEQ ID NO: 139710 - RNA, 22 nt, Human
acuuggcaaguaucuauaaagu

SEQ ID NO: 139711 - RNA, 22 nt, Human
agggcugcccagugugagagcu

SEQ ID NO: 139712 - RNA, 22 nt, Human
uuuggaaaguugucacuuuaga

SEQ ID NO: 139713 - RNA, 22 nt, Human
cggagccugcuuguugcagcug

SEQ ID NO: 139714 - RNA, 20 nt, Human
gaggcugcggacugcuggac

SEQ ID NO: 139715 - RNA, 22 nt, Human
cuccaguaucuguaggaaaagg

SEQ ID NO: 139716 - RNA, 22 nt, Human
uuucucauggaacaucguuuag

SEQ ID NO: 139717 - RNA, 22 nt, Human
ccauccugcauugcuauucaga

SEQ ID NO: 139718 - RNA, 20 nt, Human
cucugcugcccgccggcugc

SEQ ID NO: 139719 - RNA, 22 nt, Human
gagggggagaugugcacacacu

SEQ ID NO: 139720 - RNA, 22 nt, Human
ggcuggcucagggcuugagaga

SEQ ID NO: 139721 - RNA, 22 nt, Human
uucugucuucucgguuguuuac

SEQ ID NO: 139722 - RNA, 22 nt, Human
uggcccugucccuggagccugg

SEQ ID NO: 139723 - RNA, 22 nt, Human
aaggcagccucugccagccggg

SEQ ID NO: 139724 - RNA, 22 nt, Human
uugaagcaaggcgaaucuugug

SEQ ID NO: 139725 - RNA, 22 nt, Human
gggcccacuggcugucugaccc

SEQ ID NO: 139726 - RNA, 21 nt, Human
aguguguguggaaugagaaua

SEQ ID NO: 139727 - RNA, 22 nt, Human
gggucuggcaugcugagaugga

SEQ ID NO: 139728 - RNA, 22 nt, Human
uuuuauguaauccuuacugucg

SEQ ID NO: 139729 - RNA, 22 nt, Human
uaguauuugcagauuuguguca

SEQ ID NO: 139730 - RNA, 22 nt, Human
agugggcaugaucuggugucug

SEQ ID NO: 139731 - RNA, 22 nt, Human
ggccucucuccuuggcuugcag

SEQ ID NO: 139732 - RNA, 22 nt, Human
agggggcaucagguccuggcuc

SEQ ID NO: 139733 - RNA, 22 nt, Human
gacaguauuuaacuaguucauu

SEQ ID NO: 139734 - RNA, 22 nt, Human
agaaguaggcagggcuguauca

SEQ ID NO: 139735 - RNA, 22 nt, Human
uuucaucuaacacuacauaggg

SEQ ID NO: 139736 - RNA, 22 nt, Human
gcucugagucucagcuaccaca

SEQ ID NO: 139737 - RNA, 22 nt, Human
uccucagaugcucuuggacgcc

SEQ ID NO: 139738 - RNA, 22 nt, Human
uuugucugccuugcuggacugu

SEQ ID NO: 139739 - RNA, 22 nt, Human
uguguuguuuuaagcugcugca

SEQ ID NO: 139740 - RNA, 22 nt, Human
caggagugcagguggugaggca

SEQ ID NO: 139741 - RNA, 22 nt, Human
ucuuuggauaucgcuagaccgu

SEQ ID NO: 139742 - RNA, 23 nt, Human
uccaagggcuacaaacacagacc

SEQ ID NO: 139743 - RNA, 22 nt, Human
agcagcaucaacccucccgugu

SEQ ID NO: 139744 - RNA, 22 nt, Human
cuggguggaucgcagccccagg

SEQ ID NO: 139745 - RNA, 22 nt, Human
gcugccuucaguucugauucau

SEQ ID NO: 139746 - RNA, 22 nt, Human
aaagauaauguuuccuuauucu

SEQ ID NO: 139747 - RNA, 22 nt, Human
ucagaccauccugcuguuagug

SEQ ID NO: 139748 - RNA, 22 nt, Human
gccaggcagcaggaagccagug

SEQ ID NO: 139749 - RNA, 22 nt, Human
augugugccccuuuuacucuuu

SEQ ID NO: 139750 - RNA, 19 nt, Human
gccugagccagccaugcaa

SEQ ID NO: 139751 - RNA, 22 nt, Human
ccucucccacguggcagaggcu

SEQ ID NO: 139752 - RNA, 22 nt, Human
ugguaaauauguccauucucuu

SEQ ID NO: 139753 - RNA, 19 nt, Human
cucuuuacucccuugccuu

SEQ ID NO: 139754 - RNA, 22 nt, Human
ucugggcccuaaaccagcucua

SEQ ID NO: 139755 - RNA, 22 nt, Human
gcugauguuuaguugauguuac

SEQ ID NO: 139756 - RNA, 22 nt, Human
uggcugaacuaaugugcuguuu

SEQ ID NO: 139757 - RNA, 22 nt, Human
gugugcuguuguucagguagaa

SEQ ID NO: 139758 - RNA, 23 nt, Human
auaaggcauaaagguacauugga

SEQ ID NO: 139759 - RNA, 22 nt, Human
cagcaauaagguaagcuucucc

SEQ ID NO: 139760 - RNA, 22 nt, Human
uccaguggagugugggggugaa

SEQ ID NO: 139761 - RNA, 22 nt, Human
uuuuaauacugcuauuguagga

SEQ ID NO: 139762 - RNA, 23 nt, Human
ggaguuggauuguacuugcugcu

SEQ ID NO: 139763 - RNA, 22 nt, Human
cagaaauggaauuuuccaucac

SEQ ID NO: 139764 - RNA, 22 nt, Human
guggccaggacauugccaggca

SEQ ID NO: 139765 - RNA, 20 nt, Human
uccagggcuagggagcucau

SEQ ID NO: 139766 - RNA, 22 nt, Human
aagaaaagaaaccugaggcuuu

SEQ ID NO: 139767 - RNA, 23 nt, Human
uguguauguaucuaugcauaggu

SEQ ID NO: 139768 - RNA, 22 nt, Human
uuuuuccuagugcuuucuggua

SEQ ID NO: 139769 - RNA, 22 nt, Human
aggucauuccuugucuucuugc

SEQ ID NO: 139770 - RNA, 22 nt, Human
uuuacaguuaagaaauguuacc

SEQ ID NO: 139771 - RNA, 22 nt, Human
uuucucucugacugggagcuga

SEQ ID NO: 139772 - RNA, 22 nt, Human
gcuggccugggcagccugucgg

SEQ ID NO: 139773 - RNA, 22 nt, Human
ucauuguuucugcuuuucauga

SEQ ID NO: 139774 - RNA, 20 nt, Human
cagucccaauccagggccag

SEQ ID NO: 139775 - RNA, 22 nt, Human
uguggguuuguaguuaaguucu

SEQ ID NO: 139776 - RNA, 22 nt, Human
acugugugaaacaucaaugugu

SEQ ID NO: 139777 - RNA, 22 nt, Human
gagccagguuugaaucucaguc

SEQ ID NO: 139778 - RNA, 22 nt, Human
ugucccagaucacaggagggga

SEQ ID NO: 139779 - RNA, 22 nt, Human
uuaucguacgcuucagaaauuu

SEQ ID NO: 139780 - RNA, 22 nt, Human
cuggacagaaagggcugcugug

SEQ ID NO: 139781 - RNA, 22 nt, Human
ugagcugucuaugguccugucu

SEQ ID NO: 139782 - RNA, 22 nt, Human
cugccuggggaaugugaggauu

SEQ ID NO: 139783 - RNA, 22 nt, Human
agcagaagaaagccacaugacu

SEQ ID NO: 139784 - RNA, 22 nt, Human
cagccagguucaaguccuuaua

SEQ ID NO: 139785 - RNA, 22 nt, Human
uccuugaaaaucuugguuuaga

SEQ ID NO: 139786 - RNA, 22 nt, Human
cagcagcugggaaggaggcuga

SEQ ID NO: 139787 - RNA, 19 nt, Human
uuuucucgugcuugucugc

SEQ ID NO: 139788 - RNA, 22 nt, Human
ugcagccaucgcagagucugua

SEQ ID NO: 139789 - RNA, 23 nt, Human
uuccagaguccacaucugccacc

SEQ ID NO: 139790 - RNA, 22 nt, Human
auuuacagaaacuuaaucauag

SEQ ID NO: 139791 - RNA, 22 nt, Human
ccguguguaugguggaacugcu

SEQ ID NO: 139792 - RNA, 22 nt, Human
cuggagccugcaguuuucacuu

SEQ ID NO: 139793 - RNA, 17 nt, Human
ugauaguucauuuuaag

SEQ ID NO: 139794 - RNA, 22 nt, Human
uucauuaguucugaagaugucu

SEQ ID NO: 139795 - RNA, 22 nt, Human
ugcagaagaaaacagcugugug

SEQ ID NO: 139796 - RNA, 21 nt, Human
ucuuuccaauauucaugucuc

SEQ ID NO: 139797 - RNA, 22 nt, Human
cugggaggcagucucucuagaa

SEQ ID NO: 139798 - RNA, 22 nt, Human
aagcaaaagguuacacuucugg

SEQ ID NO: 139799 - RNA, 22 nt, Human
aucaguauauuccuuggucuuu

SEQ ID NO: 139800 - RNA, 22 nt, Human
uuuguuuacucauucauugaug

SEQ ID NO: 139801 - RNA, 22 nt, Human
ugggcccugacuucaagcaucc

SEQ ID NO: 139802 - RNA, 22 nt, Human
cuccuugguguaguacugagca

SEQ ID NO: 139803 - RNA, 22 nt, Human
aaggcugagacagcacaggucc

SEQ ID NO: 139804 - RNA, 22 nt, Human
ucuacuuucacucauacuuauu

SEQ ID NO: 139805 - RNA, 22 nt, Human
cagcagugugcaggugugcugg

SEQ ID NO: 139806 - RNA, 22 nt, Human
ucaggcagaggauggggagcgu

SEQ ID NO: 139807 - RNA, 22 nt, Human
agaauaaaucaaauguccugag

SEQ ID NO: 139808 - RNA, 22 nt, Human
ggcagauggagaagcagcaggu

SEQ ID NO: 139809 - RNA, 22 nt, Human
uacaguaaccuuauuugucauu

SEQ ID NO: 139810 - RNA, 22 nt, Human
auguauauacuuacaugugugg

SEQ ID NO: 139811 - RNA, 22 nt, Human
gugcucuguguauuaggauguc

SEQ ID NO: 139812 - RNA, 17 nt, Human
ggugagaccucccacuc

SEQ ID NO: 139813 - RNA, 22 nt, Human
cuggcagcgcagcaugaagucg

SEQ ID NO: 139814 - RNA, 22 nt, Human
uauucucugcagcugaauguuu

SEQ ID NO: 139815 - RNA, 22 nt, Human
uuuccauguuggugaaaugagg

SEQ ID NO: 139816 - RNA, 22 nt, Human
ugggcugcugcggugcucuugg

SEQ ID NO: 139817 - RNA, 22 nt, Human
ugaaaucuccucuuuauauauc

SEQ ID NO: 139818 - RNA, 22 nt, Human
uuucuguauuuaaaagaucugg

SEQ ID NO: 139819 - RNA, 22 nt, Human
auguaguauuuggaaauguaaa

SEQ ID NO: 139820 - RNA, 22 nt, Human
acacuuuacagcuuccuuugca

SEQ ID NO: 139821 - RNA, 22 nt, Human
ucuguuccauguuuuguuccau

SEQ ID NO: 139822 - RNA, 22 nt, Human
ccucacuuuccuuucuccuggg

SEQ ID NO: 139823 - RNA, 22 nt, Human
ggccuguggcaaggugagaaug

SEQ ID NO: 139824 - RNA, 22 nt, Human
cacuucaauuaacuucagcauu

SEQ ID NO: 139825 - RNA, 22 nt, Human
acagagguaggacaugagauau

SEQ ID NO: 139826 - RNA, 22 nt, Human
aaauuguugaucuacaguaagg

SEQ ID NO: 139827 - RNA, 22 nt, Human
cugucccuucauuauucacuac

SEQ ID NO: 139828 - RNA, 22 nt, Human
ccagagcugauuccugggacuu

SEQ ID NO: 139829 - RNA, 22 nt, Human
gcagauggugccaugucuugug

SEQ ID NO: 139830 - RNA, 22 nt, Human
aagggcagaaagggacgcuuug

SEQ ID NO: 139831 - RNA, 18 nt, Human
cuucagugacagucuggc

SEQ ID NO: 139832 - RNA, 22 nt, Human
aucuaagauguauugagcacuu

SEQ ID NO: 139833 - RNA, 17 nt, Human
uauguguguguuuauac

SEQ ID NO: 139834 - RNA, 22 nt, Human
acagagcacugcccugugccgc

SEQ ID NO: 139835 - RNA, 21 nt, Human
gcagggacaaagcuucaggag

SEQ ID NO: 139836 - RNA, 22 nt, Human
gcagggugccgacuucagggau

SEQ ID NO: 139837 - RNA, 19 nt, Human
aaaaacuuaguccagaaag

SEQ ID NO: 139838 - RNA, 22 nt, Human
agagcuggggccagagucaagg

SEQ ID NO: 139839 - RNA, 22 nt, Human
cauuaucugccauugacaccau

SEQ ID NO: 139840 - RNA, 22 nt, Human
uaguuucugguucuugcucugg

SEQ ID NO: 139841 - RNA, 17 nt, Human
gcugagugcagggaguc

SEQ ID NO: 139842 - RNA, 22 nt, Human
uaaauucugaucaaguuccuuc

SEQ ID NO: 139843 - RNA, 22 nt, Human
cugagguguugaugaccuaugc

SEQ ID NO: 139844 - RNA, 22 nt, Human
aucuuccuucacuuucucccac

SEQ ID NO: 139845 - RNA, 22 nt, Human
auguggcucauuguuugcuuac

SEQ ID NO: 139846 - RNA, 22 nt, Human
auguacaguuucuagacucaaa

SEQ ID NO: 139847 - RNA, 22 nt, Human
auguguauguguauacacacag

SEQ ID NO: 139848 - RNA, 22 nt, Human
aggcuguguucugguucuuagc

SEQ ID NO: 139849 - RNA, 22 nt, Human
uguguacaagaguguuuacugu

SEQ ID NO: 139850 - RNA, 22 nt, Human
aggaaagggguagguguggacg

SEQ ID NO: 139851 - RNA, 22 nt, Human
ugcucuggaguggcuugugcac

SEQ ID NO: 139852 - RNA, 22 nt, Human
gaagcacauggcuauagcuauu

SEQ ID NO: 139853 - RNA, 22 nt, Human
uuguaacagguacuaaauaacu

SEQ ID NO: 139854 - RNA, 22 nt, Human
guucuugccagcauccucaggu

SEQ ID NO: 139855 - RNA, 22 nt, Human
gcugcucuacccaugcaucugu

SEQ ID NO: 139856 - RNA, 18 nt, Human
agccuggaggguugaagu

SEQ ID NO: 139857 - RNA, 22 nt, Human
ggccuugguaaagggaugcaug

SEQ ID NO: 139858 - RNA, 22 nt, Human
auuugucugcuugcugccuucc

SEQ ID NO: 139859 - RNA, 22 nt, Human
uggcucaggaucuaagcagaau

SEQ ID NO: 139860 - RNA, 17 nt, Human
ucaggcugugccuggua

SEQ ID NO: 139861 - RNA, 22 nt, Human
ucacuguaucauguugcacuua

SEQ ID NO: 139862 - RNA, 20 nt, Human
gagggcaggcacccauuuca

SEQ ID NO: 139863 - RNA, 22 nt, Human
agggcacagccuaaagccuaug

SEQ ID NO: 139864 - RNA, 22 nt, Human
cacagaguggaggcuuggccug

SEQ ID NO: 139865 - RNA, 21 nt, Human
agguggggcugcaccucugcu

SEQ ID NO: 139866 - RNA, 22 nt, Human
uacaguauguucuugaauuugg

SEQ ID NO: 139867 - RNA, 22 nt, Human
ggaggguuagcaaaggcacaga

SEQ ID NO: 139868 - RNA, 22 nt, Human
acugcagccuugaacucugggc

SEQ ID NO: 139869 - RNA, 22 nt, Human
agacagcugcucgcagagcuau

SEQ ID NO: 139870 - RNA, 22 nt, Human
uagcuuuaccauagaagaguau

SEQ ID NO: 139871 - RNA, 22 nt, Human
ugcagaagugagucaugaggaa

SEQ ID NO: 139872 - RNA, 22 nt, Human
agggccagaaucccucagucua

SEQ ID NO: 139873 - RNA, 22 nt, Human
ucagaaauagucuuuaaaauga

SEQ ID NO: 139874 - RNA, 23 nt, Human
ggcagcucucaucugaugacuga

SEQ ID NO: 139875 - RNA, 22 nt, Human
cagccugggcuccagagucccu

SEQ ID NO: 139876 - RNA, 23 nt, Human
caugccaguuugugcaggcagau

SEQ ID NO: 139877 - RNA, 20 nt, Human
acugccuugguucaguaggu

SEQ ID NO: 139878 - RNA, 22 nt, Human
cuuuacagauggauaauuguuu

SEQ ID NO: 139879 - RNA, 22 nt, Human
cuuaacuugaugucucucugcu

SEQ ID NO: 139880 - RNA, 18 nt, Human
uggcucugcagccagaug

SEQ ID NO: 139881 - RNA, 22 nt, Human
ugcuggggguucagaugaguaa

SEQ ID NO: 139882 - RNA, 22 nt, Human
gugcccaggcccaaggcaccac

SEQ ID NO: 139883 - RNA, 22 nt, Human
ugucaugcuuauguuacauacu

SEQ ID NO: 139884 - RNA, 22 nt, Human
gccugccuucggugcgcagcgg

SEQ ID NO: 139885 - RNA, 22 nt, Human
uaguauaucuuuaguacauagu

SEQ ID NO: 139886 - RNA, 22 nt, Human
gcaggagcucguuuccaggcug

SEQ ID NO: 139887 - RNA, 22 nt, Human
aagcuggaacaucuugaggaag

SEQ ID NO: 139888 - RNA, 22 nt, Human
aggcuguguggaugagucuuac

SEQ ID NO: 139889 - RNA, 22 nt, Human
uuuuagauugggaaauguaaag

SEQ ID NO: 139890 - RNA, 22 nt, Human
aaggucauugguucugaauucu

SEQ ID NO: 139891 - RNA, 22 nt, Human
gaucaaaagcuggguucuaaaa

SEQ ID NO: 139892 - RNA, 22 nt, Human
gcagcaggcacggucucgacau

SEQ ID NO: 139893 - RNA, 22 nt, Human
ggcucagagaccugcgaucuga

SEQ ID NO: 139894 - RNA, 22 nt, Human
ccucucuguaagggucccuccc

SEQ ID NO: 139895 - RNA, 22 nt, Human
agcagccaagguaaccugugcu

SEQ ID NO: 139896 - RNA, 22 nt, Human
gguggcugggauuaguagccca

SEQ ID NO: 139897 - RNA, 22 nt, Human
auauuuucuggaacuaugccug

SEQ ID NO: 139898 - RNA, 22 nt, Human
gagcugccaguguaugaauucu

SEQ ID NO: 139899 - RNA, 22 nt, Human
uggguaaacugggucuggagag

SEQ ID NO: 139900 - RNA, 22 nt, Human
ucucugugggcuuuggacuuga

SEQ ID NO: 139901 - RNA, 21 nt, Human
ugcucacagaugugcucagug

SEQ ID NO: 139902 - RNA, 22 nt, Human
agggccugucagcgguguccug

SEQ ID NO: 139903 - RNA, 22 nt, Human
ugcguggcgcagcgugugggau

SEQ ID NO: 139904 - RNA, 22 nt, Human
agggcucuguccccagaggccc

SEQ ID NO: 139905 - RNA, 22 nt, Human
ugcuggagaucauuaauguuca

SEQ ID NO: 139906 - RNA, 22 nt, Human
cagagcugcagauugaaggcau

SEQ ID NO: 139907 - RNA, 22 nt, Human
uccucacauggugagccacaca

SEQ ID NO: 139908 - RNA, 21 nt, Human
uggagcugccacuuguccucc

SEQ ID NO: 139909 - RNA, 22 nt, Human
uguacaguggaaaauggauucg

SEQ ID NO: 139910 - RNA, 22 nt, Human
cuggccuguccugacccagccu

SEQ ID NO: 139911 - RNA, 23 nt, Human
ucucuuaucacaauucauuuugc

SEQ ID NO: 139912 - RNA, 22 nt, Human
guccucuggaagaugaguucuu

SEQ ID NO: 139913 - RNA, 22 nt, Human
acaugcauacacguacauaccu

SEQ ID NO: 139914 - RNA, 22 nt, Human
uuccuucucagcccucgaggau

SEQ ID NO: 139915 - RNA, 22 nt, Human
cagcuauauuguuuucuacugu

SEQ ID NO: 139916 - RNA, 22 nt, Human
cucaggauugugccuagggaga

SEQ ID NO: 139917 - RNA, 18 nt, Human
uccagagguguuggagcc

SEQ ID NO: 139918 - RNA, 22 nt, Human
accuuuuuccaaagcuucuuac

SEQ ID NO: 139919 - RNA, 17 nt, Human
uuccucucacauuuuuu

SEQ ID NO: 139920 - RNA, 22 nt, Human
cuucuggaggacacuggcccca

SEQ ID NO: 139921 - RNA, 22 nt, Human
auuuccauagagcgucucacag

SEQ ID NO: 139922 - RNA, 22 nt, Human
ugagguaggugguaagagauac

SEQ ID NO: 139923 - RNA, 22 nt, Human
uguuugugagaugugagguacg

SEQ ID NO: 139924 - RNA, 22 nt, Human
gcagggucuugagaggcagcca

SEQ ID NO: 139925 - RNA, 22 nt, Human
uccuucagcuuauuucuuagga

SEQ ID NO: 139926 - RNA, 22 nt, Human
gccucugcggggcccgagcccg

SEQ ID NO: 139927 - RNA, 22 nt, Human
acugugcuuucucuggaggcau

SEQ ID NO: 139928 - RNA, 22 nt, Human
uucuacaauaugaauaaugaag

SEQ ID NO: 139929 - RNA, 19 nt, Human
agaggccucagcagcuggc

SEQ ID NO: 139930 - RNA, 22 nt, Human
ggccucaguuucuucaacugua

SEQ ID NO: 139931 - RNA, 22 nt, Human
agaagccauucccuguaggcuc

SEQ ID NO: 139932 - RNA, 19 nt, Human
ucuaacagaagugucgucc

SEQ ID NO: 139933 - RNA, 22 nt, Human
cuuuucucugcaccauguguga

SEQ ID NO: 139934 - RNA, 22 nt, Human
aauaucaacaguguccuucuaa

SEQ ID NO: 139935 - RNA, 20 nt, Human
cugcucugcuuugcaggugg

SEQ ID NO: 139936 - RNA, 22 nt, Human
acuuuguugaagaauauguuag

SEQ ID NO: 139937 - RNA, 22 nt, Human
cuuuauguucaguacaaugcuu

SEQ ID NO: 139938 - RNA, 22 nt, Human
uggggcuguggauucucacgaa

SEQ ID NO: 139939 - RNA, 22 nt, Human
ucuguguuuaaaagauaugucc

SEQ ID NO: 139940 - RNA, 22 nt, Human
ccagggcagaaaaagagggaau

SEQ ID NO: 139941 - RNA, 22 nt, Human
gguagcacauugcauuaggaga

SEQ ID NO: 139942 - RNA, 22 nt, Human
aucuggcuuucuuaaugacuua

SEQ ID NO: 139943 - RNA, 22 nt, Human
auuacaguaaaugcuacaggca

SEQ ID NO: 139944 - RNA, 22 nt, Human
uggcugggggugcuauagcugc

SEQ ID NO: 139945 - RNA, 22 nt, Human
ugucuuccucuuggcuugagcu

SEQ ID NO: 139946 - RNA, 22 nt, Human
uggcucugggcaccguguccac

SEQ ID NO: 139947 - RNA, 22 nt, Human
ucucugcugagaagggcuggca

SEQ ID NO: 139948 - RNA, 22 nt, Human
auauauuugagaauauucauga

SEQ ID NO: 139949 - RNA, 22 nt, Human
cagggucuuauaaggccaauuu

SEQ ID NO: 139950 - RNA, 22 nt, Human
cucagggcuugaguguccagga

SEQ ID NO: 139951 - RNA, 22 nt, Human
ucugagagagggucagaugcua

SEQ ID NO: 139952 - RNA, 22 nt, Human
uccuauugguagacauuucugu

SEQ ID NO: 139953 - RNA, 22 nt, Human
uuguggcugugcaccgcugccu

SEQ ID NO: 139954 - RNA, 22 nt, Human
acugcagggcauccuggccaag

SEQ ID NO: 139955 - RNA, 21 nt, Human
uacagucuccccuguugucca

SEQ ID NO: 139956 - RNA, 20 nt, Human
gccagcccugacacaggagc

SEQ ID NO: 139957 - RNA, 22 nt, Human
gagccagguuggaggcugcagu

SEQ ID NO: 139958 - RNA, 22 nt, Human
cugcugggucuaugcaagugga

SEQ ID NO: 139959 - RNA, 22 nt, Human
ccaggccuagccccugagggua

SEQ ID NO: 139960 - RNA, 22 nt, Human
ucagagugugagacauauugga

SEQ ID NO: 139961 - RNA, 22 nt, Human
ucucagagcuucagaaagcacc

SEQ ID NO: 139962 - RNA, 22 nt, Human
uuccucagagggcgcuggggaa

SEQ ID NO: 139963 - RNA, 22 nt, Human
cugggcuacguguugacagcau

SEQ ID NO: 139964 - RNA, 22 nt, Human
cucuggaguggguggccgggag

SEQ ID NO: 139965 - RNA, 22 nt, Human
ugcaccauguaaguggccacgu

SEQ ID NO: 139966 - RNA, 20 nt, Human
cacugaagacuucuugcuca

SEQ ID NO: 139967 - RNA, 22 nt, Human
caggggcugugggcggagccuc

SEQ ID NO: 139968 - RNA, 22 nt, Human
cagggagaagucuggucagucc

SEQ ID NO: 139969 - RNA, 22 nt, Human
ggcuguagguuggugcuggaca

SEQ ID NO: 139970 - RNA, 22 nt, Human
uagaaguuaaaggaauacagaa

SEQ ID NO: 139971 - RNA, 22 nt, Human
gagagugaggcaucaggggcag

SEQ ID NO: 139972 - RNA, 22 nt, Human
auucucucauuuaucuguccua

SEQ ID NO: 139973 - RNA, 20 nt, Human
uguguagcaggugcugugcc

SEQ ID NO: 139974 - RNA, 15 nt, Human
ugggcagaucacuug

SEQ ID NO: 139975 - RNA, 22 nt, Human
ugaucagucccaugaucuucca

SEQ ID NO: 139976 - RNA, 22 nt, Human
ucucuucuauuugagacuauuu

SEQ ID NO: 139977 - RNA, 20 nt, Human
gucaucgccggcagcaaaga

SEQ ID NO: 139978 - RNA, 22 nt, Human
gccagcaguauguccuggcagu

SEQ ID NO: 139979 - RNA, 22 nt, Human
ucuaugugcccuuugugugaug

SEQ ID NO: 139980 - RNA, 22 nt, Human
ucaauucugguccucaggaacu

SEQ ID NO: 139981 - RNA, 22 nt, Human
aggcacugauucucagaguuac

SEQ ID NO: 139982 - RNA, 22 nt, Human
ggagugacucacagcugggaca

SEQ ID NO: 139983 - RNA, 22 nt, Human
uuccuguaguugugcaauguac

SEQ ID NO: 139984 - RNA, 22 nt, Human
cauuaugugggaaaauguucuu

SEQ ID NO: 139985 - RNA, 22 nt, Human
ggccucuggucaagacaagcau

SEQ ID NO: 139986 - RNA, 22 nt, Human
uaacuucucugagccucauucc

SEQ ID NO: 139987 - RNA, 22 nt, Human
ccucaugguacuuacuguagcu

SEQ ID NO: 139988 - RNA, 22 nt, Human
caggcacugugcuagauccuug

SEQ ID NO: 139989 - RNA, 22 nt, Human
uggaagggagugacagucagag

SEQ ID NO: 139990 - RNA, 21 nt, Human
ucucuacacuuucacuaggcu

SEQ ID NO: 139991 - RNA, 22 nt, Human
auuuuccuagucaugugcuucu

SEQ ID NO: 139992 - RNA, 22 nt, Human
uggcagcagggaggccaguguu

SEQ ID NO: 139993 - RNA, 22 nt, Human
gcucugggaacugacugccuuc

SEQ ID NO: 139994 - RNA, 22 nt, Human
gcugccugauguccagcaggac

SEQ ID NO: 139995 - RNA, 22 nt, Human
cagcccagcagggucuggcccu

SEQ ID NO: 139996 - RNA, 23 nt, Human
aucaaacuggugagaaugucagu

SEQ ID NO: 139997 - RNA, 22 nt, Human
auugacaaucuacuauguucug

SEQ ID NO: 139998 - RNA, 20 nt, Human
cagcugccuggcucugggau

SEQ ID NO: 139999 - RNA, 20 nt, Human
cuuccacacaagaagcacag

SEQ ID NO: 140000 - RNA, 22 nt, Human
aaguucaaucagaugaaaaagc

SEQ ID NO: 140001 - RNA, 22 nt, Human
acaauacaggcuucuggacuua

SEQ ID NO: 140002 - RNA, 22 nt, Human
auuccaguucuccucucuaaag

SEQ ID NO: 140003 - RNA, 22 nt, Human
ucaaagcaucagucaauuuagg

SEQ ID NO: 140004 - RNA, 22 nt, Human
gcucagaggcacgaccucuugg

SEQ ID NO: 140005 - RNA, 22 nt, Human
cuggccgguauuugccucuggg

SEQ ID NO: 140006 - RNA, 20 nt, Human
gccugcagguuggaugggau

SEQ ID NO: 140007 - RNA, 22 nt, Human
ccaggagcaacuugaaggcaag

SEQ ID NO: 140008 - RNA, 21 nt, Human
agcugcuuucagcuccuagag

SEQ ID NO: 140009 - RNA, 22 nt, Human
uggacagguugaguaggaggag

SEQ ID NO: 140010 - RNA, 22 nt, Human
ggaggccaaagugugggcggcu

SEQ ID NO: 140011 - RNA, 22 nt, Human
gcugccacuuggucaugucaug

SEQ ID NO: 140012 - RNA, 22 nt, Human
uuucuguagggauuucacaguu

SEQ ID NO: 140013 - RNA, 22 nt, Human
guuugcauauuugcacaggaau

SEQ ID NO: 140014 - RNA, 22 nt, Human
aagcagcuuaaauuagagccug

SEQ ID NO: 140015 - RNA, 22 nt, Human
ggccccaggaccuccacggucc

SEQ ID NO: 140016 - RNA, 19 nt, Human
uuucugucuguguuuugcc

SEQ ID NO: 140017 - RNA, 22 nt, Human
cccagagccucauucuguuggg

SEQ ID NO: 140018 - RNA, 22 nt, Human
aaacuuuugguccucauggguu

SEQ ID NO: 140019 - RNA, 22 nt, Human
cuaauacucauuucuguaacuc

SEQ ID NO: 140020 - RNA, 20 nt, Human
acagccagaggaggcagaca

SEQ ID NO: 140021 - RNA, 22 nt, Human
augcaguauaaaucauuucugg

SEQ ID NO: 140022 - RNA, 22 nt, Human
agcucccauuaucuucugaaac

SEQ ID NO: 140023 - RNA, 22 nt, Human
augugaaagagguguucagugg

SEQ ID NO: 140024 - RNA, 22 nt, Human
uuguaacuuaaguuuugcauau

SEQ ID NO: 140025 - RNA, 22 nt, Human
ggcugcuugcuguuucuuggau

SEQ ID NO: 140026 - RNA, 23 nt, Human
uggcucugagagguucagaugcu

SEQ ID NO: 140027 - RNA, 22 nt, Human
uucauguaauuccauaagguaa

SEQ ID NO: 140028 - RNA, 22 nt, Human
gccuugccucagccauggaaac

SEQ ID NO: 140029 - RNA, 22 nt, Human
ugagcccaggaguuggagaccg

SEQ ID NO: 140030 - RNA, 22 nt, Human
cuguuuuugugcugugucuccc

SEQ ID NO: 140031 - RNA, 22 nt, Human
aggggcugccuggcuuggcacu

SEQ ID NO: 140032 - RNA, 22 nt, Human
ggagagcugguagcuggcucca

SEQ ID NO: 140033 - RNA, 17 nt, Human
ggccuuggggccucagu

SEQ ID NO: 140034 - RNA, 22 nt, Human
cuggaggcugaguugggucucc

SEQ ID NO: 140035 - RNA, 22 nt, Human
caaugauucugcaacugugugc

SEQ ID NO: 140036 - RNA, 21 nt, Human
uguucacauggagcagaaugu

SEQ ID NO: 140037 - RNA, 22 nt, Human
caaggccugccucuggcagaaa

SEQ ID NO: 140038 - RNA, 18 nt, Human
uuccaguagcuguaucac

SEQ ID NO: 140039 - RNA, 22 nt, Human
caggcuggagugaguguagugg

SEQ ID NO: 140040 - RNA, 22 nt, Human
aguguguacucauauacuucca

SEQ ID NO: 140041 - RNA, 22 nt, Human
ugaagccacagagcaucugccu

SEQ ID NO: 140042 - RNA, 22 nt, Human
aggcuucuaggguuggcagcgg

SEQ ID NO: 140043 - RNA, 22 nt, Human
ggcugggcaggucugcacaggg

SEQ ID NO: 140044 - RNA, 22 nt, Human
caucucaugggcaugccaagcu

SEQ ID NO: 140045 - RNA, 22 nt, Human
cagaguggcgacccccucagcu

SEQ ID NO: 140046 - RNA, 22 nt, Human
uguguacauaucuauccuagau

SEQ ID NO: 140047 - RNA, 22 nt, Human
accugagggcccaaacuuggua

SEQ ID NO: 140048 - RNA, 22 nt, Human
agccaggacguugcucagcucc

SEQ ID NO: 140049 - RNA, 22 nt, Human
cugccuuggcccuaguucaugg

SEQ ID NO: 140050 - RNA, 22 nt, Human
aacaguaaagacagaauuuauc

SEQ ID NO: 140051 - RNA, 22 nt, Human
uuccauaaaggugauaguauac

SEQ ID NO: 140052 - RNA, 22 nt, Human
gaagcagcgaaguggaagggac

SEQ ID NO: 140053 - RNA, 22 nt, Human
agggccagcugaugagaaugag

SEQ ID NO: 140054 - RNA, 22 nt, Human
aaguauaagcuauucuucauga

SEQ ID NO: 140055 - RNA, 22 nt, Human
gucucagggacugcuucugggg

SEQ ID NO: 140056 - RNA, 22 nt, Human
caaauguguagagcuuuugggg

SEQ ID NO: 140057 - RNA, 22 nt, Human
uuucuuauauucugucauuguu

SEQ ID NO: 140058 - RNA, 22 nt, Human
ggcugugcgggcagccguggga

SEQ ID NO: 140059 - RNA, 22 nt, Human
cagaaugcaaauuuuauaauau

SEQ ID NO: 140060 - RNA, 22 nt, Human
gaggcugaggguuagagaguca

SEQ ID NO: 140061 - RNA, 22 nt, Human
acucaagauagggaaaguacaa

SEQ ID NO: 140062 - RNA, 22 nt, Human
caacauuucaaggucuuuagga

SEQ ID NO: 140063 - RNA, 22 nt, Human
gcagcugaauguccauugcugc

SEQ ID NO: 140064 - RNA, 21 nt, Human
ucucuuugggaacauuaauca

SEQ ID NO: 140065 - RNA, 22 nt, Human
ucagagaguuagugucuuagcu

SEQ ID NO: 140066 - RNA, 22 nt, Human
guaaaguucuauuugaauuuag

SEQ ID NO: 140067 - RNA, 22 nt, Human
acagagcaugcucaguguguga

SEQ ID NO: 140068 - RNA, 19 nt, Human
uuagaaacuguugacacug

SEQ ID NO: 140069 - RNA, 22 nt, Human
uacagcauugcauuuuccuuug

SEQ ID NO: 140070 - RNA, 22 nt, Human
cuuacauuuaaucaugugucau

SEQ ID NO: 140071 - RNA, 22 nt, Human
cagggccugagggcugcucugc

SEQ ID NO: 140072 - RNA, 23 nt, Human
gccuggccaccccagggcugcuu

SEQ ID NO: 140073 - RNA, 19 nt, Human
ccucugcgcuguccugcuc

SEQ ID NO: 140074 - RNA, 22 nt, Human
uucugcucaguaguaagagugc

SEQ ID NO: 140075 - RNA, 22 nt, Human
aggccuccugcagggaugagug

SEQ ID NO: 140076 - RNA, 23 nt, Human
cuggcuccgaagacuccaggauc

SEQ ID NO: 140077 - RNA, 22 nt, Human
ugcucugggcaacagccucccu

SEQ ID NO: 140078 - RNA, 22 nt, Human
ccaggaguuugaggcugcagug

SEQ ID NO: 140079 - RNA, 22 nt, Human
uggcucagauuuuuguaggcuu

SEQ ID NO: 140080 - RNA, 22 nt, Human
uccaggaggguuuucugccuuc

SEQ ID NO: 140081 - RNA, 22 nt, Human
uuccauaauuaaguggagagaa

SEQ ID NO: 140082 - RNA, 22 nt, Human
gaggaaaagagacagguuauug

SEQ ID NO: 140083 - RNA, 22 nt, Human
uacaaaugaaccaacuuugaug

SEQ ID NO: 140084 - RNA, 22 nt, Human
auacuguuucucuucuacauga

SEQ ID NO: 140085 - RNA, 22 nt, Human
aggcuguguggucaugguggcu

SEQ ID NO: 140086 - RNA, 20 nt, Human
uuucaagucagcaauucuca

SEQ ID NO: 140087 - RNA, 22 nt, Human
ggcugaguugagaggauuacuu

SEQ ID NO: 140088 - RNA, 21 nt, Human
guuauuuuaagugagcuuugc

SEQ ID NO: 140089 - RNA, 22 nt, Human
uuuuaugugucaaagcaguggu

SEQ ID NO: 140090 - RNA, 22 nt, Human
uuucucccuccacuacaggcuc

SEQ ID NO: 140091 - RNA, 22 nt, Human
ucguaugcucucuguguccugu

SEQ ID NO: 140092 - RNA, 22 nt, Human
uuuacuuuugguaaggucauuu

SEQ ID NO: 140093 - RNA, 22 nt, Human
aaucagaaaauucaguggaauu

SEQ ID NO: 140094 - RNA, 22 nt, Human
cuggcccauggugagcucuggg

SEQ ID NO: 140095 - RNA, 22 nt, Human
ggaggccaggguggguggaucg

SEQ ID NO: 140096 - RNA, 22 nt, Human
agcagcugcagagggcuccccc

SEQ ID NO: 140097 - RNA, 22 nt, Human
ugagcccaggaguuggaggcug

SEQ ID NO: 140098 - RNA, 21 nt, Human
agagucugcauuucugacaag

SEQ ID NO: 140099 - RNA, 22 nt, Human
cugcagccuccugggguacaug

SEQ ID NO: 140100 - RNA, 22 nt, Human
caagagcuagaaauugguuaga

SEQ ID NO: 140101 - RNA, 22 nt, Human
cccuggagggacagcugcucua

SEQ ID NO: 140102 - RNA, 22 nt, Human
cagcugccuguauuguccucau

SEQ ID NO: 140103 - RNA, 22 nt, Human
guuguauucuucaauaucagag

SEQ ID NO: 140104 - RNA, 22 nt, Human
cuucuucagcacaauauugaug

SEQ ID NO: 140105 - RNA, 22 nt, Human
caguagcaggcaggugcuuuug

SEQ ID NO: 140106 - RNA, 22 nt, Human
guugaguggguuaggaugcuga

SEQ ID NO: 140107 - RNA, 22 nt, Human
augcagagacagauguggcaug

SEQ ID NO: 140108 - RNA, 21 nt, Human
ccugugugugucccuuuaaga

SEQ ID NO: 140109 - RNA, 22 nt, Human
uaagaacaagcuggggguucca

SEQ ID NO: 140110 - RNA, 22 nt, Human
ugggcaagucacuucugucuuu

SEQ ID NO: 140111 - RNA, 21 nt, Human
cuggacugaggagacagucgc

SEQ ID NO: 140112 - RNA, 21 nt, Human
aauaaaacaguuggugucaau

SEQ ID NO: 140113 - RNA, 22 nt, Human
cugagccauccauaccagcuua

SEQ ID NO: 140114 - RNA, 22 nt, Human
ugggccuguggcuuggcucuag

SEQ ID NO: 140115 - RNA, 22 nt, Human
ugagcuucuuuauuuggccaga

SEQ ID NO: 140116 - RNA, 22 nt, Human
uccuggaggcaaaugagcacau

SEQ ID NO: 140117 - RNA, 22 nt, Human
cuggagcugucuucacaggccu

SEQ ID NO: 140118 - RNA, 22 nt, Human
agucucaggcagaggaaggcua

SEQ ID NO: 140119 - RNA, 22 nt, Human
ugcagcucauugcuggggucug

SEQ ID NO: 140120 - RNA, 22 nt, Human
ccaggcucaggugcgagagaca

SEQ ID NO: 140121 - RNA, 20 nt, Human
agaggccaguuaggagucua

SEQ ID NO: 140122 - RNA, 22 nt, Human
cacagggcaccaguuggccauc

SEQ ID NO: 140123 - RNA, 22 nt, Human
gcaucuucacacaaagccagug

SEQ ID NO: 140124 - RNA, 22 nt, Human
ucugggaaccagugcggcuggg

SEQ ID NO: 140125 - RNA, 22 nt, Human
gcagcugcuggaaguuccugcc

SEQ ID NO: 140126 - RNA, 22 nt, Human
ucccagaggucucugcugguuc

SEQ ID NO: 140127 - RNA, 22 nt, Human
gcuaccugagcaagagcuucaa

SEQ ID NO: 140128 - RNA, 18 nt, Human
cccucuccugcuaguggg

SEQ ID NO: 140129 - RNA, 22 nt, Human
ggcagaggaaggaugaauucac

SEQ ID NO: 140130 - RNA, 22 nt, Human
agcauuuaauuacaguuuaauu

SEQ ID NO: 140131 - RNA, 22 nt, Human
gccccagccaaggugacacgaa

SEQ ID NO: 140132 - RNA, 23 nt, Human
agcagccagagauccucggcccu

SEQ ID NO: 140133 - RNA, 22 nt, Human
ggcucagguuaccagucccucc

SEQ ID NO: 140134 - RNA, 22 nt, Human
ugggccugugaugcugggcuau

SEQ ID NO: 140135 - RNA, 22 nt, Human
aacuuuaaggcuauaaauuaug

SEQ ID NO: 140136 - RNA, 21 nt, Human
uauacaugugugcauacgugu

SEQ ID NO: 140137 - RNA, 22 nt, Human
acauuucugcaucucagagcua

SEQ ID NO: 140138 - RNA, 22 nt, Human
guggaggagaggcgccuugcgg

SEQ ID NO: 140139 - RNA, 22 nt, Human
gauccuugcacuugacuuggca

SEQ ID NO: 140140 - RNA, 22 nt, Human
guucucucaaacuuuguguuug

SEQ ID NO: 140141 - RNA, 18 nt, Human
aaaaugcaggcgacaugg

SEQ ID NO: 140142 - RNA, 22 nt, Human
uuauguacaauguuaauguaaa

SEQ ID NO: 140143 - RNA, 22 nt, Human
aggccucagugaucaucaucag

SEQ ID NO: 140144 - RNA, 22 nt, Human
uuucuuauacuauauugucauc

SEQ ID NO: 140145 - RNA, 22 nt, Human
ugggccugauucuugaauccug

SEQ ID NO: 140146 - RNA, 22 nt, Human
gaugauuuuaugucuugucauu

SEQ ID NO: 140147 - RNA, 22 nt, Human
cuguggcuuuggggcggaggac

SEQ ID NO: 140148 - RNA, 22 nt, Human
gagguagcaugcuggaagggac

SEQ ID NO: 140149 - RNA, 22 nt, Human
gggagguucuguucgcacuuga

SEQ ID NO: 140150 - RNA, 22 nt, Human
cuuuggaagugaccacaauccu

SEQ ID NO: 140151 - RNA, 22 nt, Human
gcagugggagcuuaggcagugc

SEQ ID NO: 140152 - RNA, 22 nt, Human
uggggcuccuccuggcaggagg

SEQ ID NO: 140153 - RNA, 20 nt, Human
uggggccuguuucugugguu

SEQ ID NO: 140154 - RNA, 22 nt, Human
agaggggcucaagcaguggucu

SEQ ID NO: 140155 - RNA, 21 nt, Human
uccauuguuuucccaggguuu

SEQ ID NO: 140156 - RNA, 21 nt, Human
ggagucagggucuggcugggg

SEQ ID NO: 140157 - RNA, 20 nt, Human
aggaaaaauggaaacuggag

SEQ ID NO: 140158 - RNA, 22 nt, Human
gguggcugcuuccucaagagga

SEQ ID NO: 140159 - RNA, 22 nt, Human
uacauauuugucuuuguacugu

SEQ ID NO: 140160 - RNA, 22 nt, Human
auucuccacacauccagaccuu

SEQ ID NO: 140161 - RNA, 22 nt, Human
ggccuggccuccagaugugggc

SEQ ID NO: 140162 - RNA, 22 nt, Human
ucagcagugcagggugaggcag

SEQ ID NO: 140163 - RNA, 22 nt, Human
cagcagagcugugugggaaggg

SEQ ID NO: 140164 - RNA, 22 nt, Human
ugucagggcaugcgguccagcc

SEQ ID NO: 140165 - RNA, 22 nt, Human
uucaggaugcucagaguagucu

SEQ ID NO: 140166 - RNA, 22 nt, Human
gaaggccacaaaaaaugucaua

SEQ ID NO: 140167 - RNA, 22 nt, Human
aacaaaugauuguugguuggag

SEQ ID NO: 140168 - RNA, 22 nt, Human
guacaguaaauguaaauggauu

SEQ ID NO: 140169 - RNA, 22 nt, Human
caggaaagaaaugagaacacca

SEQ ID NO: 140170 - RNA, 22 nt, Human
augaggcauuccacucaaacuc

SEQ ID NO: 140171 - RNA, 22 nt, Human
cauacauaugcauguguguaua

SEQ ID NO: 140172 - RNA, 22 nt, Human
ccuggcuggcaagaucgugaag

SEQ ID NO: 140173 - RNA, 22 nt, Human
gucucagauucagacaucuaca

SEQ ID NO: 140174 - RNA, 18 nt, Human
ugucucugaauuccagug

SEQ ID NO: 140175 - RNA, 22 nt, Human
uggccugcagcucucagggaag

SEQ ID NO: 140176 - RNA, 22 nt, Human
uguaggacauguacuuguaaca

SEQ ID NO: 140177 - RNA, 22 nt, Human
uacuuucuagcucuccccaguu

SEQ ID NO: 140178 - RNA, 22 nt, Human
gcagcguggggacaggagcuca

SEQ ID NO: 140179 - RNA, 22 nt, Human
uggggcugucccgguuuggcga

SEQ ID NO: 140180 - RNA, 18 nt, Human
cuuuaugugcagagcuuu

SEQ ID NO: 140181 - RNA, 22 nt, Human
gagagcugcauucucagacaca

SEQ ID NO: 140182 - RNA, 22 nt, Human
uauaucauggagauuaacauuc

SEQ ID NO: 140183 - RNA, 22 nt, Human
aagcccagcaucccugcaccag

SEQ ID NO: 140184 - RNA, 22 nt, Human
ucuuuccagaggaauuuuuaga

SEQ ID NO: 140185 - RNA, 22 nt, Human
gcagcugaagcugcaguuccag

SEQ ID NO: 140186 - RNA, 22 nt, Human
ugaagcaggaucguuugcuuca

SEQ ID NO: 140187 - RNA, 18 nt, Human
uguggcugguccacacug

SEQ ID NO: 140188 - RNA, 23 nt, Human
guggccuccccggaaugccucgc

SEQ ID NO: 140189 - RNA, 22 nt, Human
uucacaguggcccucucugagu

SEQ ID NO: 140190 - RNA, 22 nt, Human
cagacaggcuagccagacucac

SEQ ID NO: 140191 - RNA, 20 nt, Human
ucacaucuggcagcugauga

SEQ ID NO: 140192 - RNA, 22 nt, Human
agcagcucuggcacuguagcau

SEQ ID NO: 140193 - RNA, 22 nt, Human
uccauuuacuauucucauaucg

SEQ ID NO: 140194 - RNA, 22 nt, Human
cccaagaucuuucgugcacuaa

SEQ ID NO: 140195 - RNA, 22 nt, Human
gggagccaugcuggucuucuuu

SEQ ID NO: 140196 - RNA, 17 nt, Human
uggcuucccugggccac

SEQ ID NO: 140197 - RNA, 22 nt, Human
auguacauuuuccuaauguuuu

SEQ ID NO: 140198 - RNA, 22 nt, Human
uagggcaguuucauguuaucuu

SEQ ID NO: 140199 - RNA, 22 nt, Human
aucagcaagcauuuauugagug

SEQ ID NO: 140200 - RNA, 22 nt, Human
caaaguuuaaaguagauuucag

SEQ ID NO: 140201 - RNA, 18 nt, Human
gguggcucagucaugggg

SEQ ID NO: 140202 - RNA, 17 nt, Human
agcagcugaagcagcca

SEQ ID NO: 140203 - RNA, 22 nt, Human
uggggacauagccagucuggcu

SEQ ID NO: 140204 - RNA, 22 nt, Human
ucacauacacuaggauauuuuu

SEQ ID NO: 140205 - RNA, 22 nt, Human
cuggcagcccaaccuagagucu

SEQ ID NO: 140206 - RNA, 22 nt, Human
agcugagcugcagaugacugua

SEQ ID NO: 140207 - RNA, 22 nt, Human
uggggcuggcuauugucucccu

SEQ ID NO: 140208 - RNA, 20 nt, Human
cagaaggucuaagcuuuaga

SEQ ID NO: 140209 - RNA, 19 nt, Human
aggaaagguggccuuagca

SEQ ID NO: 140210 - RNA, 22 nt, Human
gaaaggucuuccggucuuccag

SEQ ID NO: 140211 - RNA, 22 nt, Human
uggaagccaggcccgcuccuaa

SEQ ID NO: 140212 - RNA, 22 nt, Human
agcaggcuaagggaccuguuua

SEQ ID NO: 140213 - RNA, 22 nt, Human
uuugggaagaggaaucucugga

SEQ ID NO: 140214 - RNA, 22 nt, Human
cuucagaggggacucaaaguca

SEQ ID NO: 140215 - RNA, 22 nt, Human
aguggcaggaaaguggaagaga

SEQ ID NO: 140216 - RNA, 22 nt, Human
ucaaaguccuugcuuuuucugu

SEQ ID NO: 140217 - RNA, 22 nt, Human
uaguuucugaggauugaaagau

SEQ ID NO: 140218 - RNA, 22 nt, Human
aaguguauauaugacuuauaaa

SEQ ID NO: 140219 - RNA, 23 nt, Human
ggcagagagcauggcuggggccc

SEQ ID NO: 140220 - RNA, 22 nt, Human
aagaggaaaugauugacuauau

SEQ ID NO: 140221 - RNA, 22 nt, Human
aguguggcugcguagggcucuc

SEQ ID NO: 140222 - RNA, 22 nt, Human
gagagggccgggggccagcucc

SEQ ID NO: 140223 - RNA, 22 nt, Human
ucagucucuggggcuucuguuu

SEQ ID NO: 140224 - RNA, 22 nt, Human
cuggcugggagcgagcugcuca

SEQ ID NO: 140225 - RNA, 22 nt, Human
guguguaaugcuuauugugcuu

SEQ ID NO: 140226 - RNA, 22 nt, Human
agcagagcugcaguggccugcu

SEQ ID NO: 140227 - RNA, 22 nt, Human
gcaguauauccauuacuucaua

SEQ ID NO: 140228 - RNA, 22 nt, Human
gcagaagcugggcagcgaggug

SEQ ID NO: 140229 - RNA, 22 nt, Human
cccuggagcuagucugagcaga

SEQ ID NO: 140230 - RNA, 22 nt, Human
cugccucuugacagaucguggc

SEQ ID NO: 140231 - RNA, 22 nt, Human
auguggcuugucgauauuagca

SEQ ID NO: 140232 - RNA, 22 nt, Human
uuguggcugucgagaauugagg

SEQ ID NO: 140233 - RNA, 22 nt, Human
caggaaugacugcagauggggc

SEQ ID NO: 140234 - RNA, 22 nt, Human
cacuauaucuguucuuguuuau

SEQ ID NO: 140235 - RNA, 22 nt, Human
uuucaguggguuuauuucaugu

SEQ ID NO: 140236 - RNA, 22 nt, Human
uggcucaggugugagcugaaga

SEQ ID NO: 140237 - RNA, 22 nt, Human
aagaugcuuauugcuccugcag

SEQ ID NO: 140238 - RNA, 22 nt, Human
uucugucacuuaggaggucaua

SEQ ID NO: 140239 - RNA, 22 nt, Human
gcugcaggcgccugcggucucu

SEQ ID NO: 140240 - RNA, 22 nt, Human
cugucccucaucaccucugggu

SEQ ID NO: 140241 - RNA, 23 nt, Human
ucccagccucuucucuugcauac

SEQ ID NO: 140242 - RNA, 17 nt, Human
aggugcuggagcaucag

SEQ ID NO: 140243 - RNA, 22 nt, Human
ugcaucuguucagagcugucga

SEQ ID NO: 140244 - RNA, 22 nt, Human
cuucugggcauucagcugcaca

SEQ ID NO: 140245 - RNA, 22 nt, Human
auggcuguccaguuucuagaga

SEQ ID NO: 140246 - RNA, 22 nt, Human
agccucugugacucacagguca

SEQ ID NO: 140247 - RNA, 22 nt, Human
guccucugggcagcugccccac

SEQ ID NO: 140248 - RNA, 22 nt, Human
caggaguggugugagggacucc

SEQ ID NO: 140249 - RNA, 22 nt, Human
caggccucuauggucagcugag

SEQ ID NO: 140250 - RNA, 22 nt, Human
uccagggauguccuguagcacu

SEQ ID NO: 140251 - RNA, 22 nt, Human
ucaguguggguaagcaugcugu

SEQ ID NO: 140252 - RNA, 22 nt, Human
ucuucccuaaucaccaucuuca

SEQ ID NO: 140253 - RNA, 22 nt, Human
uguuccuaaauaugaauggaga

SEQ ID NO: 140254 - RNA, 22 nt, Human
gcuuccugagaaacaaucugau

SEQ ID NO: 140255 - RNA, 22 nt, Human
aaauauguauggaguucaugaa

SEQ ID NO: 140256 - RNA, 22 nt, Human
ggcuguaguuaccugaugaaau

SEQ ID NO: 140257 - RNA, 22 nt, Human
cacaaauggccguguucaaaga

SEQ ID NO: 140258 - RNA, 22 nt, Human
ugucucagaauggcucauaaua

SEQ ID NO: 140259 - RNA, 22 nt, Human
ggcaguggaggacccugugucu

SEQ ID NO: 140260 - RNA, 22 nt, Human
ugcugggcuagaagcugaggcc

SEQ ID NO: 140261 - RNA, 22 nt, Human
ccacagggcucuaggcgcuucc

SEQ ID NO: 140262 - RNA, 22 nt, Human
uggagccagcccaggccccucu

SEQ ID NO: 140263 - RNA, 22 nt, Human
aagauacugaugauguaggcua

SEQ ID NO: 140264 - RNA, 22 nt, Human
uggcucagaggggaagugguuu

SEQ ID NO: 140265 - RNA, 22 nt, Human
gucacacuagggccaaguggag

SEQ ID NO: 140266 - RNA, 22 nt, Human
gcagauggaaagugcuugaggg

SEQ ID NO: 140267 - RNA, 22 nt, Human
uguuuacagggugauuuuaccu

SEQ ID NO: 140268 - RNA, 22 nt, Human
ccaggccauucccagaguugcu

SEQ ID NO: 140269 - RNA, 21 nt, Human
guuuuaagggagaaaaccuag

SEQ ID NO: 140270 - RNA, 22 nt, Human
aaaguguugggauuacaggugu

SEQ ID NO: 140271 - RNA, 22 nt, Human
gggaccaggugggugcauuccg

SEQ ID NO: 140272 - RNA, 22 nt, Human
uauugucuaucgcugcuuucau

SEQ ID NO: 140273 - RNA, 22 nt, Human
ugcugcucucagccaccaggaa

SEQ ID NO: 140274 - RNA, 22 nt, Human
auguauguaugcugugcuugca

SEQ ID NO: 140275 - RNA, 22 nt, Human
ggacagcccauacacaugucug

SEQ ID NO: 140276 - RNA, 22 nt, Human
aggauccuguauggagaagcug

SEQ ID NO: 140277 - RNA, 22 nt, Human
ugcuggcucaguuugcagacuc

SEQ ID NO: 140278 - RNA, 23 nt, Human
cacugcagcguggucuggcagga

SEQ ID NO: 140279 - RNA, 22 nt, Human
ccagcaggggaauauuuuuagg

SEQ ID NO: 140280 - RNA, 22 nt, Human
uucaacuauuaugaauaaaauu

SEQ ID NO: 140281 - RNA, 22 nt, Human
ggagcugcucagagccaguccc

SEQ ID NO: 140282 - RNA, 22 nt, Human
cagcaauauacacagucuaugg

SEQ ID NO: 140283 - RNA, 22 nt, Human
agagccacugggagacagagca

SEQ ID NO: 140284 - RNA, 22 nt, Human
uguaaucauuacaguacaugga

SEQ ID NO: 140285 - RNA, 22 nt, Human
uccucuucugcccaucagaggc

SEQ ID NO: 140286 - RNA, 22 nt, Human
uggcuucuuagaccaguggccu

SEQ ID NO: 140287 - RNA, 19 nt, Human
ccagucccauacaggagau

SEQ ID NO: 140288 - RNA, 22 nt, Human
cugggccucauccucagaguuu

SEQ ID NO: 140289 - RNA, 22 nt, Human
gcagagccaugggagguuuuug

SEQ ID NO: 140290 - RNA, 22 nt, Human
aggcagagcugauguucuguga

SEQ ID NO: 140291 - RNA, 22 nt, Human
cauuauauuuuacugcauggga

SEQ ID NO: 140292 - RNA, 22 nt, Human
cccagcauggagugaggacuca

SEQ ID NO: 140293 - RNA, 20 nt, Human
uggcaucucucaauuguagg

SEQ ID NO: 140294 - RNA, 22 nt, Human
ugaaagguuauuuaggucugcu

SEQ ID NO: 140295 - RNA, 22 nt, Human
gagggaaagguuaauacaugau

SEQ ID NO: 140296 - RNA, 22 nt, Human
gcucaggaaaacagucuaguaa

SEQ ID NO: 140297 - RNA, 21 nt, Human
gaggccacuaauaggggcaga

SEQ ID NO: 140298 - RNA, 22 nt, Human
uccauucauucauugaugaaca

SEQ ID NO: 140299 - RNA, 22 nt, Human
caggcagcaggagcccugcucg

SEQ ID NO: 140300 - RNA, 22 nt, Human
gcugucacaucaaggcacuaaa

SEQ ID NO: 140301 - RNA, 22 nt, Human
gcuggcucuucaguggagauag

SEQ ID NO: 140302 - RNA, 22 nt, Human
uagacacauccguggaagcuuc

SEQ ID NO: 140303 - RNA, 22 nt, Human
uuccagaauuuuguucugcuug

SEQ ID NO: 140304 - RNA, 22 nt, Human
caggccucuccuuagucuggca

SEQ ID NO: 140305 - RNA, 22 nt, Human
agccuggcccugcugaacucug

SEQ ID NO: 140306 - RNA, 22 nt, Human
gagcccucucuguaggcaagua

SEQ ID NO: 140307 - RNA, 22 nt, Human
ucugugcggucuguguuaugaa

SEQ ID NO: 140308 - RNA, 19 nt, Human
ggcugucuggcguguggau

SEQ ID NO: 140309 - RNA, 22 nt, Human
agagugauggguugugcugacc

SEQ ID NO: 140310 - RNA, 22 nt, Human
gcccagcuuuuugaggcaggca

SEQ ID NO: 140311 - RNA, 22 nt, Human
augcugaggacaaagagaucaa

SEQ ID NO: 140312 - RNA, 22 nt, Human
uggcccuguguccugcugccag

SEQ ID NO: 140313 - RNA, 20 nt, Human
ccugugugguuugcacuaca

SEQ ID NO: 140314 - RNA, 21 nt, Human
acagcauguuuguguguuugc

SEQ ID NO: 140315 - RNA, 22 nt, Human
uuauuuacaacucuucucuucc

SEQ ID NO: 140316 - RNA, 22 nt, Human
ccuuucagaugggcauggaccg

SEQ ID NO: 140317 - RNA, 22 nt, Human
uuuugcuugagugcacaaaaug

SEQ ID NO: 140318 - RNA, 22 nt, Human
uguguguguuuacaguuucuca

SEQ ID NO: 140319 - RNA, 22 nt, Human
auguguccacaggugugagaga

SEQ ID NO: 140320 - RNA, 22 nt, Human
caggguggcaggcaccauggcc

SEQ ID NO: 140321 - RNA, 22 nt, Human
aggaaaaaccuguuaaugguag

SEQ ID NO: 140322 - RNA, 22 nt, Human
agcagcaucucuuauugcagug

SEQ ID NO: 140323 - RNA, 22 nt, Human
cuucuguguuuuacuauaugua

SEQ ID NO: 140324 - RNA, 22 nt, Human
cuucuuauuaauccuucucugu

SEQ ID NO: 140325 - RNA, 22 nt, Human
gccagguggucuggcuccagag

SEQ ID NO: 140326 - RNA, 22 nt, Human
gucccagggagguucagggcuu

SEQ ID NO: 140327 - RNA, 22 nt, Human
cugggagcggcugucacugguu

SEQ ID NO: 140328 - RNA, 22 nt, Human
ugggccacggggguggagagcu

SEQ ID NO: 140329 - RNA, 22 nt, Human
agggcuggaggguacuaguuua

SEQ ID NO: 140330 - RNA, 22 nt, Human
agcugugugccaggggagaugu

SEQ ID NO: 140331 - RNA, 22 nt, Human
caggcagcucgaugccuuguug

SEQ ID NO: 140332 - RNA, 22 nt, Human
uuugacaguccccugauguuug

SEQ ID NO: 140333 - RNA, 17 nt, Human
aaucuguuuacagucag

SEQ ID NO: 140334 - RNA, 22 nt, Human
uagcagggguagauagagugug

SEQ ID NO: 140335 - RNA, 22 nt, Human
gcucugucaacagcuagcugug

SEQ ID NO: 140336 - RNA, 19 nt, Human
aggacucuggaggcaugag

SEQ ID NO: 140337 - RNA, 17 nt, Human
cugcuuugugcaacgcu

SEQ ID NO: 140338 - RNA, 19 nt, Human
gcuggggccugaccagaca

SEQ ID NO: 140339 - RNA, 22 nt, Human
ucauggagacuuugagccuguu

SEQ ID NO: 140340 - RNA, 22 nt, Human
uaagaacauaaauucauacggg

SEQ ID NO: 140341 - RNA, 22 nt, Human
acagcugggugcugcucagagc

SEQ ID NO: 140342 - RNA, 22 nt, Human
gagcaacaguuuaugguuuuuc

SEQ ID NO: 140343 - RNA, 22 nt, Human
ugcccacauucaaaaggugaug

SEQ ID NO: 140344 - RNA, 22 nt, Human
agcagcagauccaaaaaaugug

SEQ ID NO: 140345 - RNA, 22 nt, Human
cagaaugagauaacccagauug

SEQ ID NO: 140346 - RNA, 22 nt, Human
auaaacagcuccauuuagugcc

SEQ ID NO: 140347 - RNA, 22 nt, Human
ccugucuggaacauggccuguu

SEQ ID NO: 140348 - RNA, 22 nt, Human
cuggguggcgucuggggccagu

SEQ ID NO: 140349 - RNA, 22 nt, Human
gcugccuggaauaacggcuggc

SEQ ID NO: 140350 - RNA, 22 nt, Human
ccugcacuaccuggggcugcug

SEQ ID NO: 140351 - RNA, 22 nt, Human
ggagccaggcaaucuguacuuu

SEQ ID NO: 140352 - RNA, 22 nt, Human
uagggcagaguccaggaugggc

SEQ ID NO: 140353 - RNA, 22 nt, Human
ucuucuccagugcuucugcaca

SEQ ID NO: 140354 - RNA, 23 nt, Human
agacagaggcugaggcuggccgc

SEQ ID NO: 140355 - RNA, 18 nt, Human
uguacaguuaugagcauu

SEQ ID NO: 140356 - RNA, 22 nt, Human
agagauguucauucagcauguu

SEQ ID NO: 140357 - RNA, 22 nt, Human
gggaaggagccugcuugcuaga

SEQ ID NO: 140358 - RNA, 22 nt, Human
cauuugaugacucaacucauaa

SEQ ID NO: 140359 - RNA, 22 nt, Human
uguggccuccccacuucugggg

SEQ ID NO: 140360 - RNA, 21 nt, Human
uggcacugcuuagcagguucc

SEQ ID NO: 140361 - RNA, 22 nt, Human
cuagagggauguuaggauagca

SEQ ID NO: 140362 - RNA, 19 nt, Human
ccuuugaaucaggacacuu

SEQ ID NO: 140363 - RNA, 22 nt, Human
uucguguggagauguuucugca

SEQ ID NO: 140364 - RNA, 22 nt, Human
cagacacagcaauucuguguug

SEQ ID NO: 140365 - RNA, 22 nt, Human
gcccagcugucuggcagggaug

SEQ ID NO: 140366 - RNA, 22 nt, Human
gagagcugggcuuugggugaag

SEQ ID NO: 140367 - RNA, 20 nt, Human
uggcuccucuuggcuguggc

SEQ ID NO: 140368 - RNA, 22 nt, Human
cagaaauggagcccaggaaucu

SEQ ID NO: 140369 - RNA, 22 nt, Human
ccuuuacaaaguucuucauggg

SEQ ID NO: 140370 - RNA, 22 nt, Human
gucuccugagacugcagucacc

SEQ ID NO: 140371 - RNA, 22 nt, Human
aggagcugcaaauauuaguaau

SEQ ID NO: 140372 - RNA, 22 nt, Human
auaucacaguaguuguuuaguu

SEQ ID NO: 140373 - RNA, 22 nt, Human
ugggaggaaugucacugagcca

SEQ ID NO: 140374 - RNA, 22 nt, Human
uuccaaagucauguugcugaua

SEQ ID NO: 140375 - RNA, 22 nt, Human
caggccuccacuccacgcagac

SEQ ID NO: 140376 - RNA, 22 nt, Human
uggccuuggcagugagaagagu

SEQ ID NO: 140377 - RNA, 22 nt, Human
acaauucucucauaucuuauua

SEQ ID NO: 140378 - RNA, 19 nt, Human
uuccugugcugcugugucc

SEQ ID NO: 140379 - RNA, 22 nt, Human
auugacaaauggauguugacau

SEQ ID NO: 140380 - RNA, 22 nt, Human
aaaugcagaucccugaaucuca

SEQ ID NO: 140381 - RNA, 15 nt, Human
uucaggauaugacuc

SEQ ID NO: 140382 - RNA, 19 nt, Human
uuuucucagcuucuagcgg

SEQ ID NO: 140383 - RNA, 21 nt, Human
aguggcugucaagggggccuu

SEQ ID NO: 140384 - RNA, 20 nt, Human
uugcagcagugaggugaagg

SEQ ID NO: 140385 - RNA, 22 nt, Human
gugauuucaaauauagagugag

SEQ ID NO: 140386 - RNA, 22 nt, Human
uuccucagaaaauacuguccaa

SEQ ID NO: 140387 - RNA, 18 nt, Human
ugcucuggucucacuugg

SEQ ID NO: 140388 - RNA, 22 nt, Human
augaggcaucugcagucacuag

SEQ ID NO: 140389 - RNA, 22 nt, Human
cccuccagccauggacccaggu

SEQ ID NO: 140390 - RNA, 22 nt, Human
ucacacagguuugcaaugauuu

SEQ ID NO: 140391 - RNA, 22 nt, Human
agggagcuuccgaacuacagcu

SEQ ID NO: 140392 - RNA, 22 nt, Human
ucuuuaacaggaauuauuacag

SEQ ID NO: 140393 - RNA, 22 nt, Human
cagagccaaaugcugugguuau

SEQ ID NO: 140394 - RNA, 20 nt, Human
gggcugugccuccucguggu

SEQ ID NO: 140395 - RNA, 22 nt, Human
agccaggaauuggacaacacau

SEQ ID NO: 140396 - RNA, 20 nt, Human
acaauagauuugagcaaagu

SEQ ID NO: 140397 - RNA, 21 nt, Human
cauugucgacauuuuccccuc

SEQ ID NO: 140398 - RNA, 22 nt, Human
uauaguacauggaaucuucaua

SEQ ID NO: 140399 - RNA, 22 nt, Human
aacaucuuuuuguuugcugaaa

SEQ ID NO: 140400 - RNA, 19 nt, Human
gggaugggcccucacccuc

SEQ ID NO: 140401 - RNA, 22 nt, Human
ugaagccuuguguggccucucu

SEQ ID NO: 140402 - RNA, 22 nt, Human
ugcucagggacaauggagaggg

SEQ ID NO: 140403 - RNA, 22 nt, Human
gaugcugagagguggagggaac

SEQ ID NO: 140404 - RNA, 22 nt, Human
ucccaaggcacagggcagggac

SEQ ID NO: 140405 - RNA, 22 nt, Human
caucugccuaaguggcccuguu

SEQ ID NO: 140406 - RNA, 22 nt, Human
uuccucucaacaugccugccgg

SEQ ID NO: 140407 - RNA, 22 nt, Human
cucagagaggcaguggaaguca

SEQ ID NO: 140408 - RNA, 22 nt, Human
acaagagauuaucuacagauga

SEQ ID NO: 140409 - RNA, 22 nt, Human
ugcagcuguuacggacccuguc

SEQ ID NO: 140410 - RNA, 22 nt, Human
aauaauuagugggacagagaac

SEQ ID NO: 140411 - RNA, 22 nt, Human
ugaaggccuaacuuccagugcu

SEQ ID NO: 140412 - RNA, 22 nt, Human
gcucugucauuuugcagacacu

SEQ ID NO: 140413 - RNA, 21 nt, Human
ccagacuggccuaugugguag

SEQ ID NO: 140414 - RNA, 22 nt, Human
ucugugguggagugggcaugag

SEQ ID NO: 140415 - RNA, 22 nt, Human
ggcaaaaaccgcaauaacuucu

SEQ ID NO: 140416 - RNA, 22 nt, Human
ugcugucccccgugucugggcu

SEQ ID NO: 140417 - RNA, 22 nt, Human
ccugagggcgccgagcucccag

SEQ ID NO: 140418 - RNA, 22 nt, Human
cagcugaguuacucugaggucu

SEQ ID NO: 140419 - RNA, 22 nt, Human
uaugcacauauaaccugcacug

SEQ ID NO: 140420 - RNA, 22 nt, Human
aagaugcagcuuccacuuuugc

SEQ ID NO: 140421 - RNA, 22 nt, Human
uugcagagaucagcagguuuga

SEQ ID NO: 140422 - RNA, 22 nt, Human
ugaggcucaaggucugguggag

SEQ ID NO: 140423 - RNA, 22 nt, Human
ugcuuuuaagaacaaugcugcu

SEQ ID NO: 140424 - RNA, 22 nt, Human
aaggccaugaccacuugcugug

SEQ ID NO: 140425 - RNA, 18 nt, Human
agcagcugucagaaugcc

SEQ ID NO: 140426 - RNA, 22 nt, Human
caggagcucucaucgucagggc

SEQ ID NO: 140427 - RNA, 22 nt, Human
agcugucuuucugccuccugau

SEQ ID NO: 140428 - RNA, 22 nt, Human
agggacacugaugagaaauucu

SEQ ID NO: 140429 - RNA, 22 nt, Human
cagggcccauggcucagguagg

SEQ ID NO: 140430 - RNA, 22 nt, Human
cagcucccaguggcagcuccuu

SEQ ID NO: 140431 - RNA, 22 nt, Human
gggagcuggagcuggaagacuc

SEQ ID NO: 140432 - RNA, 22 nt, Human
aaggcaggaugggaaaagauuu

SEQ ID NO: 140433 - RNA, 22 nt, Human
uucucugccucacaggucuaag

SEQ ID NO: 140434 - RNA, 22 nt, Human
uuuaaccugucaauuugcaugc

SEQ ID NO: 140435 - RNA, 17 nt, Human
aucuggcugcuucuaga

SEQ ID NO: 140436 - RNA, 22 nt, Human
uagaauaugugguaggaucugg

SEQ ID NO: 140437 - RNA, 22 nt, Human
gcuggccucuggagaagggcuu

SEQ ID NO: 140438 - RNA, 22 nt, Human
agcagcaucuucuaaguaaggc

SEQ ID NO: 140439 - RNA, 22 nt, Human
caucacagauguuguguggagu

SEQ ID NO: 140440 - RNA, 22 nt, Human
gcuugcuggugccugcaggcuc

SEQ ID NO: 140441 - RNA, 22 nt, Human
uccuugaaugaagagaggugac

SEQ ID NO: 140442 - RNA, 22 nt, Human
uagaaauaaaucugcagcuggg

SEQ ID NO: 140443 - RNA, 20 nt, Human
cucaggauacugcaaaguug

SEQ ID NO: 140444 - RNA, 22 nt, Human
agcagccaguucucugugguag

SEQ ID NO: 140445 - RNA, 22 nt, Human
acugaaggaaagccuuugcaug

SEQ ID NO: 140446 - RNA, 22 nt, Human
uccugagaugagacagugcugc

SEQ ID NO: 140447 - RNA, 22 nt, Human
cacugaaggcugcagcucagcc

SEQ ID NO: 140448 - RNA, 22 nt, Human
agcugccauccgaggugucaga

SEQ ID NO: 140449 - RNA, 22 nt, Human
gaggcugauucggggaacagca

SEQ ID NO: 140450 - RNA, 22 nt, Human
uauucacaggcuggagugaugu

SEQ ID NO: 140451 - RNA, 22 nt, Human
ggacucagcagccaggaguggc

SEQ ID NO: 140452 - RNA, 22 nt, Human
cuggagcccugaaugggcagga

SEQ ID NO: 140453 - RNA, 20 nt, Human
uagaaaucuuauaaaagacu

SEQ ID NO: 140454 - RNA, 22 nt, Human
gugugucugaaguugaguagac

SEQ ID NO: 140455 - RNA, 22 nt, Human
acaugcauacaagcacauguag

SEQ ID NO: 140456 - RNA, 22 nt, Human
agugcagccgagaucaggugcu

SEQ ID NO: 140457 - RNA, 22 nt, Human
gccagagccggcuucacaggau

SEQ ID NO: 140458 - RNA, 22 nt, Human
uguguguguuccuccucagcua

SEQ ID NO: 140459 - RNA, 22 nt, Human
cagcugagucugagguucuuug

SEQ ID NO: 140460 - RNA, 22 nt, Human
guguggguguacuguucuagau

SEQ ID NO: 140461 - RNA, 22 nt, Human
agucucagaaaauaugcuuuuu

SEQ ID NO: 140462 - RNA, 21 nt, Human
ucugugcuuuuuuggcuccua

SEQ ID NO: 140463 - RNA, 22 nt, Human
uagaaagcuugggguguuuaaa

SEQ ID NO: 140464 - RNA, 22 nt, Human
cagcauggagacaaagugggca

SEQ ID NO: 140465 - RNA, 22 nt, Human
guggccugggguuuguucugag

SEQ ID NO: 140466 - RNA, 22 nt, Human
gaggugagaagggggucagaug

SEQ ID NO: 140467 - RNA, 22 nt, Human
uuaaacagucccagaggcugac

SEQ ID NO: 140468 - RNA, 22 nt, Human
aaggccauuauucugauauauu

SEQ ID NO: 140469 - RNA, 22 nt, Human
uucucucuggaccugggaugcg

SEQ ID NO: 140470 - RNA, 22 nt, Human
cagggccagcgucucgggcuau

SEQ ID NO: 140471 - RNA, 22 nt, Human
uauguacaugauuucauuugcu

SEQ ID NO: 140472 - RNA, 22 nt, Human
cuucuucaucuguaaaacuugg

SEQ ID NO: 140473 - RNA, 22 nt, Human
aauuuccaaauuucugucacac

SEQ ID NO: 140474 - RNA, 22 nt, Human
ccucaggauccgcaggugcagu

SEQ ID NO: 140475 - RNA, 22 nt, Human
cuugaaagucacaugcagcccu

SEQ ID NO: 140476 - RNA, 22 nt, Human
uuauguuuuauggcuauaucau

SEQ ID NO: 140477 - RNA, 22 nt, Human
cagccaucccagccugugguuc

SEQ ID NO: 140478 - RNA, 22 nt, Human
cuguggcugugaaacuucucag

SEQ ID NO: 140479 - RNA, 22 nt, Human
cccagccuuugcuuccugguuc

SEQ ID NO: 140480 - RNA, 22 nt, Human
aggccuguuggcgugggcucua

SEQ ID NO: 140481 - RNA, 22 nt, Human
ugagagugguucagcucagaag

SEQ ID NO: 140482 - RNA, 18 nt, Human
cugaaggauccaggugua

SEQ ID NO: 140483 - RNA, 22 nt, Human
ucucuguggcaagcaugcugcu

SEQ ID NO: 140484 - RNA, 22 nt, Human
uuacacuaagcuacuucuauau

SEQ ID NO: 140485 - RNA, 22 nt, Human
augcaguacagauaauucuaca

SEQ ID NO: 140486 - RNA, 22 nt, Human
gcauuucugugcauacacauga

SEQ ID NO: 140487 - RNA, 22 nt, Human
cagcaggaggugaguagcaggu

SEQ ID NO: 140488 - RNA, 22 nt, Human
uggcucugugcuucuaguaucu

SEQ ID NO: 140489 - RNA, 22 nt, Human
gcugggcagccccuacagagag

SEQ ID NO: 140490 - RNA, 22 nt, Human
cagcccagcagucuuagccugc

SEQ ID NO: 140491 - RNA, 22 nt, Human
uuguuuuggaagaacuuacucu

SEQ ID NO: 140492 - RNA, 22 nt, Human
ucagguggcuucggggaguggc

SEQ ID NO: 140493 - RNA, 22 nt, Human
ggucccaggaaucuguguucua

SEQ ID NO: 140494 - RNA, 22 nt, Human
uugaaaggaauacagaggccua

SEQ ID NO: 140495 - RNA, 22 nt, Human
gcugucacaagcaucuggggca

SEQ ID NO: 140496 - RNA, 22 nt, Human
agcucauggugcuaucucaggg

SEQ ID NO: 140497 - RNA, 18 nt, Human
uuuuacucauagcaggcc

SEQ ID NO: 140498 - RNA, 22 nt, Human
aggagcugaaacuucucauaug

SEQ ID NO: 140499 - RNA, 23 nt, Human
auuugagaaaguauuuuuaagac

SEQ ID NO: 140500 - RNA, 22 nt, Human
cuguguaguauuuguacacaua

SEQ ID NO: 140501 - RNA, 22 nt, Human
aagauuuacuagcauaauagcu

SEQ ID NO: 140502 - RNA, 22 nt, Human
cauacuuugggauaagagugga

SEQ ID NO: 140503 - RNA, 22 nt, Human
ccacagccauuccagggaggcu

SEQ ID NO: 140504 - RNA, 22 nt, Human
aggacuucaucaccuguauaaa

SEQ ID NO: 140505 - RNA, 22 nt, Human
gucauuucuguuucuucagugc

SEQ ID NO: 140506 - RNA, 19 nt, Human
gccaggagggcucuggcug

SEQ ID NO: 140507 - RNA, 22 nt, Human
acccugccgugggcugcuugug

SEQ ID NO: 140508 - RNA, 22 nt, Human
aggcccugcuuuccagagcuca

SEQ ID NO: 140509 - RNA, 22 nt, Human
cacaaaugugcagaaaugugag

SEQ ID NO: 140510 - RNA, 23 nt, Human
ccuggcuggauucucugcauuca

SEQ ID NO: 140511 - RNA, 22 nt, Human
uggccagguguggguucucaga

SEQ ID NO: 140512 - RNA, 22 nt, Human
uguguguucucaauuauugaug

SEQ ID NO: 140513 - RNA, 22 nt, Human
aggcuguggcauuaaacguuug

SEQ ID NO: 140514 - RNA, 22 nt, Human
uuagauaauguagagauaugag

SEQ ID NO: 140515 - RNA, 22 nt, Human
acauauaugugcacaugugcag

SEQ ID NO: 140516 - RNA, 21 nt, Human
auauuuuuguuuggacuguca

SEQ ID NO: 140517 - RNA, 17 nt, Human
uuccaguuuaguauugu

SEQ ID NO: 140518 - RNA, 22 nt, Human
auggcccaggccuccuguggcu

SEQ ID NO: 140519 - RNA, 22 nt, Human
cugucccaggagcuguaagaca

SEQ ID NO: 140520 - RNA, 22 nt, Human
acuuucuaggucucaguccuuu

SEQ ID NO: 140521 - RNA, 22 nt, Human
auuuuacuacuccaauuaauga

SEQ ID NO: 140522 - RNA, 22 nt, Human
guggcugcagagggcacagcau

SEQ ID NO: 140523 - RNA, 22 nt, Human
acagggcaccugagguaggaag

SEQ ID NO: 140524 - RNA, 23 nt, Human
ugcugguguuuuugggaccaggg

SEQ ID NO: 140525 - RNA, 22 nt, Human
cuuuuccacugagccucacaaa

SEQ ID NO: 140526 - RNA, 22 nt, Human
guuuacaaauauuuuaaauggu

SEQ ID NO: 140527 - RNA, 22 nt, Human
caaggagauaaaauguugagcu

SEQ ID NO: 140528 - RNA, 22 nt, Human
augugaggcagcacggagauua

SEQ ID NO: 140529 - RNA, 22 nt, Human
ucugucacugagcucaggauuc

SEQ ID NO: 140530 - RNA, 22 nt, Human
ucuuuuuauauugacaaaaggu

SEQ ID NO: 140531 - RNA, 22 nt, Human
guccuggcuuaguucgcuguaa

SEQ ID NO: 140532 - RNA, 22 nt, Human
ugucuccucauacugucauauu

SEQ ID NO: 140533 - RNA, 22 nt, Human
ggcuagaauaauugacuucauu

SEQ ID NO: 140534 - RNA, 22 nt, Human
auuacaguggguaaacagaauu

SEQ ID NO: 140535 - RNA, 22 nt, Human
gugcaugugucuuuauaguaga

SEQ ID NO: 140536 - RNA, 22 nt, Human
gcuguccagagcaugggagcaa

SEQ ID NO: 140537 - RNA, 22 nt, Human
ucuggagccacaaaccucagcu

SEQ ID NO: 140538 - RNA, 22 nt, Human
uucuuuauugagacuucauugu

SEQ ID NO: 140539 - RNA, 22 nt, Human
gaugauggacaaagcauuggug

SEQ ID NO: 140540 - RNA, 22 nt, Human
caagagcugaggcuggagaggu

SEQ ID NO: 140541 - RNA, 22 nt, Human
cugagauggaguuucgcucuuc

SEQ ID NO: 140542 - RNA, 22 nt, Human
ugccuggcaacuguggugggcu

SEQ ID NO: 140543 - RNA, 22 nt, Human
gaggccuggugugucucccgcu

SEQ ID NO: 140544 - RNA, 22 nt, Human
ccagcauggcaccugagaugag

SEQ ID NO: 140545 - RNA, 22 nt, Human
gcucccagggcagcgcagaaga

SEQ ID NO: 140546 - RNA, 22 nt, Human
agcagggcaaagucaggcuaac

SEQ ID NO: 140547 - RNA, 22 nt, Human
ccugaggacacacgcugcagga

SEQ ID NO: 140548 - RNA, 17 nt, Human
agguggcugcugcgccu

SEQ ID NO: 140549 - RNA, 22 nt, Human
caggggcucccugggugccagu

SEQ ID NO: 140550 - RNA, 22 nt, Human
caggccucccggugcacacuga

SEQ ID NO: 140551 - RNA, 22 nt, Human
uaagugcaauguuuuacuuaaa

SEQ ID NO: 140552 - RNA, 22 nt, Human
cagagccaggucuaggagucuc

SEQ ID NO: 140553 - RNA, 22 nt, Human
agccucucuguuagucacuggg

SEQ ID NO: 140554 - RNA, 22 nt, Human
uguggcugcuccugggugguca

SEQ ID NO: 140555 - RNA, 22 nt, Human
cugcgugucucugucucauggc

SEQ ID NO: 140556 - RNA, 22 nt, Human
agccauugaauuuagugccuuu

SEQ ID NO: 140557 - RNA, 22 nt, Human
ugaaauauuuagagaguaaguu

SEQ ID NO: 140558 - RNA, 22 nt, Human
gcucagagcaucccagugaaug

SEQ ID NO: 140559 - RNA, 21 nt, Human
cuguuucuugugaagugacac

SEQ ID NO: 140560 - RNA, 22 nt, Human
ccaggcugagcaugauuggagc

SEQ ID NO: 140561 - RNA, 22 nt, Human
uucuuuucuuggcaggaguaga

SEQ ID NO: 140562 - RNA, 22 nt, Human
uuacaguagauuuugaaugugg

SEQ ID NO: 140563 - RNA, 22 nt, Human
gcuggcccagggucaccuagga

SEQ ID NO: 140564 - RNA, 22 nt, Human
ccaaaguccuuucuccaccugc

SEQ ID NO: 140565 - RNA, 22 nt, Human
gacucugcuacaggccgagguu

SEQ ID NO: 140566 - RNA, 22 nt, Human
gcucuguacgcaggaugagggg

SEQ ID NO: 140567 - RNA, 22 nt, Human
uacaaagccugguagauaucug

SEQ ID NO: 140568 - RNA, 22 nt, Human
uaguuauuauuguuacuaucag

SEQ ID NO: 140569 - RNA, 22 nt, Human
ccuggagcccaaggcagugaga

SEQ ID NO: 140570 - RNA, 20 nt, Human
guggccucucacauucugag

SEQ ID NO: 140571 - RNA, 22 nt, Human
aggucauugaaguuauuuucuu

SEQ ID NO: 140572 - RNA, 22 nt, Human
gauugaaacauaggcagucgag

SEQ ID NO: 140573 - RNA, 22 nt, Human
gcuccuggcuccaggcagccaa

SEQ ID NO: 140574 - RNA, 22 nt, Human
caguacuuuucuggcuuucuac

SEQ ID NO: 140575 - RNA, 22 nt, Human
uggcccugcuuaugucucucuu

SEQ ID NO: 140576 - RNA, 22 nt, Human
gacagaggcaagaccagaagcc

SEQ ID NO: 140577 - RNA, 22 nt, Human
gccucugcaugcucagcaccca

SEQ ID NO: 140578 - RNA, 22 nt, Human
auuuaugacuggugaauagaac

SEQ ID NO: 140579 - RNA, 19 nt, Human
uuggaaggagccagagugg

SEQ ID NO: 140580 - RNA, 22 nt, Human
gccaccucuuugucucugccgc

SEQ ID NO: 140581 - RNA, 22 nt, Human
gcugugcagguccccacugccu

SEQ ID NO: 140582 - RNA, 22 nt, Human
agaggggcucauauccugucau

SEQ ID NO: 140583 - RNA, 22 nt, Human
ugcugccuccaacuccugggcu

SEQ ID NO: 140584 - RNA, 23 nt, Human
ucaguuuuggcuguucaguguug

SEQ ID NO: 140585 - RNA, 22 nt, Human
aagcuggcaauuaucaaaacug

SEQ ID NO: 140586 - RNA, 19 nt, Human
uucaggauugacccuacug

SEQ ID NO: 140587 - RNA, 22 nt, Human
caggugggccgggguuuguucu

SEQ ID NO: 140588 - RNA, 22 nt, Human
cuggaaggucuguccccacugc

SEQ ID NO: 140589 - RNA, 22 nt, Human
agggucuguggaugcaucuggg

SEQ ID NO: 140590 - RNA, 22 nt, Human
uagugauuaaaggcagaauguu

SEQ ID NO: 140591 - RNA, 22 nt, Human
agcuguguggugucugacagcu

SEQ ID NO: 140592 - RNA, 22 nt, Human
ugcugucuguuuacuggcuaua

SEQ ID NO: 140593 - RNA, 22 nt, Human
gucccuuggcucacaaacagcu

SEQ ID NO: 140594 - RNA, 22 nt, Human
aaggcagucugguuucaaagca

SEQ ID NO: 140595 - RNA, 22 nt, Human
aaugagcugcugcuguuccacc

SEQ ID NO: 140596 - RNA, 22 nt, Human
auguggaggaaaugaguguaca

SEQ ID NO: 140597 - RNA, 22 nt, Human
ucucagggagggcgagucagcg

SEQ ID NO: 140598 - RNA, 22 nt, Human
auuauguauuugguauaguuug

SEQ ID NO: 140599 - RNA, 22 nt, Human
gucucagauaacauguauucua

SEQ ID NO: 140600 - RNA, 23 nt, Human
ucucuuucaagagcuuaaugugc

SEQ ID NO: 140601 - RNA, 22 nt, Human
cuuucucuggaggggagugguu

SEQ ID NO: 140602 - RNA, 22 nt, Human
agcuguguuuccagaugguagc

SEQ ID NO: 140603 - RNA, 22 nt, Human
gccauccucugagcacuaggca

SEQ ID NO: 140604 - RNA, 22 nt, Human
cuguggcugucucuuucccaug

SEQ ID NO: 140605 - RNA, 22 nt, Human
gcugcccugucugcagcaggac

SEQ ID NO: 140606 - RNA, 22 nt, Human
uagggaggcuacuucuuguagg

SEQ ID NO: 140607 - RNA, 22 nt, Human
cugucaucacaguugagcagcc

SEQ ID NO: 140608 - RNA, 22 nt, Human
ucuuugcaucccuuccauaguu

SEQ ID NO: 140609 - RNA, 22 nt, Human
agauacauuaguaguuacuugu

SEQ ID NO: 140610 - RNA, 22 nt, Human
uguggaaaagaauaagggagau

SEQ ID NO: 140611 - RNA, 22 nt, Human
cagggugacugcccuggccacu

SEQ ID NO: 140612 - RNA, 22 nt, Human
auggcugugaaggucacacccu

SEQ ID NO: 140613 - RNA, 22 nt, Human
uacaaaguagaaauucaguaaa

SEQ ID NO: 140614 - RNA, 18 nt, Human
aagaggaggagcagguug

SEQ ID NO: 140615 - RNA, 22 nt, Human
cagggcaguuugugccuaugag

SEQ ID NO: 140616 - RNA, 22 nt, Human
guaacagaggguuugcagauau

SEQ ID NO: 140617 - RNA, 22 nt, Human
uuagccauugucagcacauggc

SEQ ID NO: 140618 - RNA, 22 nt, Human
aagacacagcgaaauguuccug

SEQ ID NO: 140619 - RNA, 22 nt, Human
uaagcugugggagauuggcaua

SEQ ID NO: 140620 - RNA, 22 nt, Human
ccagccucacuggcaucaccua

SEQ ID NO: 140621 - RNA, 22 nt, Human
ugcagggcuacaggacuacaac

SEQ ID NO: 140622 - RNA, 22 nt, Human
acugcuuuuagaaaucuauaga

SEQ ID NO: 140623 - RNA, 19 nt, Human
cugaggugcaguaagaggc

SEQ ID NO: 140624 - RNA, 22 nt, Human
gagaaccucuccacaagucugg

SEQ ID NO: 140625 - RNA, 22 nt, Human
aguugaaauuagaguccuggcu

SEQ ID NO: 140626 - RNA, 22 nt, Human
agaaaucaauaucuauauguug

SEQ ID NO: 140627 - RNA, 22 nt, Human
augaugguuguccuaggugcau

SEQ ID NO: 140628 - RNA, 22 nt, Human
acugugugccaggcgcuggucu

SEQ ID NO: 140629 - RNA, 18 nt, Human
uuccauaauguauguaac

SEQ ID NO: 140630 - RNA, 22 nt, Human
gaaggccacuuuguguugagaa

SEQ ID NO: 140631 - RNA, 21 nt, Human
ucccacucuaaauggacugaa

SEQ ID NO: 140632 - RNA, 22 nt, Human
uaauaucuacuucauagaguuu

SEQ ID NO: 140633 - RNA, 22 nt, Human
cuggcucucugagauauugagu

SEQ ID NO: 140634 - RNA, 22 nt, Human
auggcuguuggcaggaggccuc

SEQ ID NO: 140635 - RNA, 23 nt, Human
gggugggccaaauuagguagccu

SEQ ID NO: 140636 - RNA, 22 nt, Human
auuguauaacagcauguauuuu

SEQ ID NO: 140637 - RNA, 22 nt, Human
gcaggaguguauuugcauguaa

SEQ ID NO: 140638 - RNA, 17 nt, Human
uagagcugguucaggag

SEQ ID NO: 140639 - RNA, 22 nt, Human
uauccaauucaccauugauggg

SEQ ID NO: 140640 - RNA, 22 nt, Human
caggaacagcaccaggagcuag

SEQ ID NO: 140641 - RNA, 20 nt, Human
aggcagagcgcacuuuuaga

SEQ ID NO: 140642 - RNA, 22 nt, Human
auguaacuucugugaaucugac

SEQ ID NO: 140643 - RNA, 23 nt, Human
aaaugcagggucgcagguuacag

SEQ ID NO: 140644 - RNA, 22 nt, Human
acugccuugaaagauuguugag

SEQ ID NO: 140645 - RNA, 22 nt, Human
gcauuuagcuuuaaaauauuuc

SEQ ID NO: 140646 - RNA, 22 nt, Human
uggagcugguaaacagugacau

SEQ ID NO: 140647 - RNA, 17 nt, Human
ucagcaggggccaagcu

SEQ ID NO: 140648 - RNA, 22 nt, Human
uggcugggcccccaccugccuc

SEQ ID NO: 140649 - RNA, 22 nt, Human
cuguguguuuauaucauuuccu

SEQ ID NO: 140650 - RNA, 22 nt, Human
gaaaaugugccuuuggguauug

SEQ ID NO: 140651 - RNA, 22 nt, Human
cuguguagagcggcugcgagcg

SEQ ID NO: 140652 - RNA, 23 nt, Human
cagaagcaccuguugacugcugc

SEQ ID NO: 140653 - RNA, 22 nt, Human
ggagaugguggaagcuggugca

SEQ ID NO: 140654 - RNA, 22 nt, Human
ggcugccauaacagaguaccac

SEQ ID NO: 140655 - RNA, 22 nt, Human
ggaaccaguggaaugauaugcu

SEQ ID NO: 140656 - RNA, 22 nt, Human
uucuuuccacagaggggaugau

SEQ ID NO: 140657 - RNA, 19 nt, Human
aagaagcaauaagcuguga

SEQ ID NO: 140658 - RNA, 22 nt, Human
uggcagaggcucugugauguug

SEQ ID NO: 140659 - RNA, 22 nt, Human
accauuuaauaaguauuuccau

SEQ ID NO: 140660 - RNA, 22 nt, Human
cucucuguauguguauauuuau

SEQ ID NO: 140661 - RNA, 22 nt, Human
agagaggcugggcguagggcuu

SEQ ID NO: 140662 - RNA, 22 nt, Human
aaaugcacagagccuuagagau

SEQ ID NO: 140663 - RNA, 22 nt, Human
uuaaaaccaucagcuguaagau

SEQ ID NO: 140664 - RNA, 23 nt, Human
aggagccaggaaccagcuucccc

SEQ ID NO: 140665 - RNA, 22 nt, Human
gccaggggacgcggagcgacga

SEQ ID NO: 140666 - RNA, 22 nt, Human
cugagccaugagccugcgccca

SEQ ID NO: 140667 - RNA, 22 nt, Human
uagcugccaaaagggugggcua

SEQ ID NO: 140668 - RNA, 21 nt, Human
uguguuugagacuauguuucc

SEQ ID NO: 140669 - RNA, 22 nt, Human
gagggcugccacguugggcgag

SEQ ID NO: 140670 - RNA, 22 nt, Human
agggcagaaguacagacacuua

SEQ ID NO: 140671 - RNA, 22 nt, Human
auaaacaguagagaaagguggu

SEQ ID NO: 140672 - RNA, 22 nt, Human
gaggccugucgcuaggccucug

SEQ ID NO: 140673 - RNA, 22 nt, Human
aaaugucuuucuucugcuacgu

SEQ ID NO: 140674 - RNA, 22 nt, Human
ugggggagccuucacaguagcu

SEQ ID NO: 140675 - RNA, 22 nt, Human
uauguacagggauagaacuuga

SEQ ID NO: 140676 - RNA, 22 nt, Human
ggucccaggcugcgggcuggug

SEQ ID NO: 140677 - RNA, 22 nt, Human
uuauuauugauucgcucucaaa

SEQ ID NO: 140678 - RNA, 22 nt, Human
uuauugccugauugaggucauu

SEQ ID NO: 140679 - RNA, 22 nt, Human
gccccagguugccugucccagg

SEQ ID NO: 140680 - RNA, 22 nt, Human
gggccugacugagagcuccuca

SEQ ID NO: 140681 - RNA, 22 nt, Human
aaaggaagaugccaggacucug

SEQ ID NO: 140682 - RNA, 22 nt, Human
ucauaaaacacaccagguaguu

SEQ ID NO: 140683 - RNA, 22 nt, Human
ucugccuuuucacugccacuaa

SEQ ID NO: 140684 - RNA, 22 nt, Human
ucaggggcuugaggugcauguc

SEQ ID NO: 140685 - RNA, 22 nt, Human
cuguggcuccauagaaguugca

SEQ ID NO: 140686 - RNA, 22 nt, Human
uuuccucugaugcugacuugga

SEQ ID NO: 140687 - RNA, 22 nt, Human
ucauuucaaugauacuacuaag

SEQ ID NO: 140688 - RNA, 22 nt, Human
ugcugccacugguagucucauu

SEQ ID NO: 140689 - RNA, 22 nt, Human
uuacaggggacauuggggacau

SEQ ID NO: 140690 - RNA, 22 nt, Human
cuggccaguuguccuggcuugg

SEQ ID NO: 140691 - RNA, 22 nt, Human
guguguauuauugcauacacau

SEQ ID NO: 140692 - RNA, 22 nt, Human
auuuacagccuugccaucuaua

SEQ ID NO: 140693 - RNA, 22 nt, Human
cagaccugagguugaguaccag

SEQ ID NO: 140694 - RNA, 22 nt, Human
aucuauuaugcugagaaacugu

SEQ ID NO: 140695 - RNA, 22 nt, Human
cucuccuccaacagcccugccg

SEQ ID NO: 140696 - RNA, 22 nt, Human
agcugccaggccccugagaacc

SEQ ID NO: 140697 - RNA, 22 nt, Human
cauucuuauauuuacucauuca

SEQ ID NO: 140698 - RNA, 22 nt, Human
gagcagaacuacucacauaucg

SEQ ID NO: 140699 - RNA, 22 nt, Human
ugaaggaauggaggaucagagc

SEQ ID NO: 140700 - RNA, 22 nt, Human
acuuuacacaucuuuucucauu

SEQ ID NO: 140701 - RNA, 22 nt, Human
cuaacuuuagcuuagauuauca

SEQ ID NO: 140702 - RNA, 22 nt, Human
agcagcauccccggccuccacc

SEQ ID NO: 140703 - RNA, 22 nt, Human
uucacagugagcuaugucuugu

SEQ ID NO: 140704 - RNA, 23 nt, Human
auuuccuacuauaaaagagguaa

SEQ ID NO: 140705 - RNA, 22 nt, Human
cuguucucuggcgguggcuguu

SEQ ID NO: 140706 - RNA, 22 nt, Human
cugucuguucagauucauuacu

SEQ ID NO: 140707 - RNA, 20 nt, Human
uguuugugccagcuuuguca

SEQ ID NO: 140708 - RNA, 22 nt, Human
uuguaacuguggguugauuaga

SEQ ID NO: 140709 - RNA, 22 nt, Human
uuuccauauuuggucuuuggga

SEQ ID NO: 140710 - RNA, 22 nt, Human
uccuggcccacuaugccagcau

SEQ ID NO: 140711 - RNA, 19 nt, Human
cccagcuugaccaccugcu

SEQ ID NO: 140712 - RNA, 22 nt, Human
gccaugcuugguaugcugugag

SEQ ID NO: 140713 - RNA, 22 nt, Human
gugccugcagcaauccauggca

SEQ ID NO: 140714 - RNA, 22 nt, Human
uagauuuccucuuccucauucc

SEQ ID NO: 140715 - RNA, 22 nt, Human
auauuugugguuuuuggcuccu

SEQ ID NO: 140716 - RNA, 22 nt, Human
aaagguuaagguguucaagaaa

SEQ ID NO: 140717 - RNA, 22 nt, Human
auccuugaacuuagacacuagg

SEQ ID NO: 140718 - RNA, 22 nt, Human
agccuuguuggucugaguuugg

SEQ ID NO: 140719 - RNA, 22 nt, Human
auucucucucuaugaaaacuga

SEQ ID NO: 140720 - RNA, 22 nt, Human
uacaguaaagcugcuaugaauu

SEQ ID NO: 140721 - RNA, 22 nt, Human
guucuucacauuucauugagga

SEQ ID NO: 140722 - RNA, 22 nt, Human
auuuacucgugcuucauugaau

SEQ ID NO: 140723 - RNA, 22 nt, Human
ucugagcuggagcccaucaccu

SEQ ID NO: 140724 - RNA, 22 nt, Human
uccagggacagcgcuggagcua

SEQ ID NO: 140725 - RNA, 22 nt, Human
auucuuauuuaaauagagucug

SEQ ID NO: 140726 - RNA, 22 nt, Human
aacccagccguguagcugccgc

SEQ ID NO: 140727 - RNA, 23 nt, Human
ccucucuuuuuaggugguguuug

SEQ ID NO: 140728 - RNA, 22 nt, Human
ccagggagccuggugugucagc

SEQ ID NO: 140729 - RNA, 22 nt, Human
gccaggcucucagugacugccc

SEQ ID NO: 140730 - RNA, 21 nt, Human
ccuauugaauauaggaagauu

SEQ ID NO: 140731 - RNA, 22 nt, Human
ggaggccaaggcagguggauca

SEQ ID NO: 140732 - RNA, 22 nt, Human
uauguacauguuaaagggcaaa

SEQ ID NO: 140733 - RNA, 22 nt, Human
ucucagaggcccgacguucucc

SEQ ID NO: 140734 - RNA, 22 nt, Human
gaggccuggcugucagucccca

SEQ ID NO: 140735 - RNA, 22 nt, Human
uauucacagcugccgcacucag

SEQ ID NO: 140736 - RNA, 22 nt, Human
uuagaaaggaaucuucauuuca

SEQ ID NO: 140737 - RNA, 18 nt, Human
uccauuguucuacuguga

SEQ ID NO: 140738 - RNA, 22 nt, Human
cuuugcagauuuguuuagugcu

SEQ ID NO: 140739 - RNA, 22 nt, Human
uuaugcuaguauaguccuuaga

SEQ ID NO: 140740 - RNA, 22 nt, Human
cuggugguucaggagaauggcu

SEQ ID NO: 140741 - RNA, 22 nt, Human
caaggagaaaacggcuucugaa

SEQ ID NO: 140742 - RNA, 22 nt, Human
gcagagccgugaauggauuuca

SEQ ID NO: 140743 - RNA, 23 nt, Human
ccaggccucucagagggugugcc

SEQ ID NO: 140744 - RNA, 22 nt, Human
cuucaagagaaugcagggaugu

SEQ ID NO: 140745 - RNA, 22 nt, Human
ucccagagccucugccacucug

SEQ ID NO: 140746 - RNA, 22 nt, Human
cuggcucacaggugagaugcau

SEQ ID NO: 140747 - RNA, 22 nt, Human
gcucccagacugaccagaggug

SEQ ID NO: 140748 - RNA, 22 nt, Human
gcagagccugacgggauuuuuc

SEQ ID NO: 140749 - RNA, 22 nt, Human
acaguagauugguaugauguca

SEQ ID NO: 140750 - RNA, 22 nt, Human
cggcagagacggcgcuuugaac

SEQ ID NO: 140751 - RNA, 22 nt, Human
uggcagucggacuucuaucuca

SEQ ID NO: 140752 - RNA, 21 nt, Human
aggcucagcagguguauaaag

SEQ ID NO: 140753 - RNA, 22 nt, Human
ggggacaguuaaagaccaagac

SEQ ID NO: 140754 - RNA, 22 nt, Human
cagcccaggccgacaguuccuc

SEQ ID NO: 140755 - RNA, 23 nt, Human
ucagcugcuuccuccugccugcc

SEQ ID NO: 140756 - RNA, 19 nt, Human
auuuuucuuccucugugca

SEQ ID NO: 140757 - RNA, 22 nt, Human
gugcagagaaaugagaagucga

SEQ ID NO: 140758 - RNA, 22 nt, Human
ugggcacaaacaucugccuguu

SEQ ID NO: 140759 - RNA, 22 nt, Human
ggcucaagcagucugccugccu

SEQ ID NO: 140760 - RNA, 22 nt, Human
gugugccagacaugaugcuaug

SEQ ID NO: 140761 - RNA, 22 nt, Human
augguguagcaugugauaugac

SEQ ID NO: 140762 - RNA, 22 nt, Human
gccuucaguaguauccucauga

SEQ ID NO: 140763 - RNA, 21 nt, Human
uagggcaggcauuggaagaga

SEQ ID NO: 140764 - RNA, 22 nt, Human
uuauccaaacuggugaaucauu

SEQ ID NO: 140765 - RNA, 22 nt, Human
uagcagaaccagcagucaauuu

SEQ ID NO: 140766 - RNA, 22 nt, Human
agccaagcugaucuccugcuga

SEQ ID NO: 140767 - RNA, 22 nt, Human
ccugccuggcuuccagaagaga

SEQ ID NO: 140768 - RNA, 22 nt, Human
uguauguguccuaauucaagca

SEQ ID NO: 140769 - RNA, 22 nt, Human
agagccuggacuuuucugagcc

SEQ ID NO: 140770 - RNA, 22 nt, Human
uuucuauuguaagucuccuaua

SEQ ID NO: 140771 - RNA, 22 nt, Human
agcaauauuuaaagguuugcaa

SEQ ID NO: 140772 - RNA, 18 nt, Human
aggagccuuugcacugga

SEQ ID NO: 140773 - RNA, 22 nt, Human
ccaggacucaguggggaaaggg

SEQ ID NO: 140774 - RNA, 22 nt, Human
cucugucccagacccaccucuc

SEQ ID NO: 140775 - RNA, 22 nt, Human
gucuuuauuugagauugucauu

SEQ ID NO: 140776 - RNA, 22 nt, Human
uauuuagaacagacaauagaaa

SEQ ID NO: 140777 - RNA, 22 nt, Human
cuuuuuacucuguugucucagc

SEQ ID NO: 140778 - RNA, 22 nt, Human
cauggacucugguuuggggagc

SEQ ID NO: 140779 - RNA, 22 nt, Human
auguaugcaugcuacaguuuuc

SEQ ID NO: 140780 - RNA, 22 nt, Human
aggcugagauagguggaucauu

SEQ ID NO: 140781 - RNA, 22 nt, Human
caggcugcagaggccuuucaug

SEQ ID NO: 140782 - RNA, 22 nt, Human
cagagggcacaugguuuccuca

SEQ ID NO: 140783 - RNA, 17 nt, Human
ccagguggaaucgugga

SEQ ID NO: 140784 - RNA, 22 nt, Human
cagcagcaacaacggaagccuu

SEQ ID NO: 140785 - RNA, 22 nt, Human
ugauuaacugucuauuaaucau

SEQ ID NO: 140786 - RNA, 22 nt, Human
uuugaaaauuuaagugcuacac

SEQ ID NO: 140787 - RNA, 22 nt, Human
aacaguaaugugguguuggguu

SEQ ID NO: 140788 - RNA, 22 nt, Human
ucugggcucugucagcaccucu

SEQ ID NO: 140789 - RNA, 22 nt, Human
aggccuggcaugagaccugaga

SEQ ID NO: 140790 - RNA, 22 nt, Human
aggcaguguauugcuagcggcu

SEQ ID NO: 140791 - RNA, 22 nt, Human
agcuggaggggccagcaggugu

SEQ ID NO: 140792 - RNA, 22 nt, Human
agagcuguagcuuccuagagcc

SEQ ID NO: 140793 - RNA, 22 nt, Human
aggcuggguaccugucauaugc

SEQ ID NO: 140794 - RNA, 20 nt, Human
aagagaagaagucuuugaaa

SEQ ID NO: 140795 - RNA, 22 nt, Human
agggugcauguuugcaagagug

SEQ ID NO: 140796 - RNA, 19 nt, Human
ucucugcuucucuuggcau

SEQ ID NO: 140797 - RNA, 22 nt, Human
gaggcccaggucaagcagccac

SEQ ID NO: 140798 - RNA, 21 nt, Human
agggcagauuagcuguaagag

SEQ ID NO: 140799 - RNA, 22 nt, Human
cagcuggcuccaccucugggcu

SEQ ID NO: 140800 - RNA, 22 nt, Human
uucacagaauggcaaguuaugg

SEQ ID NO: 140801 - RNA, 22 nt, Human
cagccaggacagggaaacuagu

SEQ ID NO: 140802 - RNA, 21 nt, Human
agacagaacaacugcucucca

SEQ ID NO: 140803 - RNA, 22 nt, Human
ggcugaaacagauuucaagaca

SEQ ID NO: 140804 - RNA, 22 nt, Human
uaucuaaaggauuuaauuuagu

SEQ ID NO: 140805 - RNA, 22 nt, Human
acagugucugacacauuguagc

SEQ ID NO: 140806 - RNA, 22 nt, Human
aucuguguaugaaaguauaacu

SEQ ID NO: 140807 - RNA, 22 nt, Human
aaagccuuggucaucugguucc

SEQ ID NO: 140808 - RNA, 22 nt, Human
ugaagcccugugucagcuucca

SEQ ID NO: 140809 - RNA, 19 nt, Human
uucauucucuuauuguugu

SEQ ID NO: 140810 - RNA, 20 nt, Human
ucccuggaggugguggcauc

SEQ ID NO: 140811 - RNA, 22 nt, Human
ucaaaugcuucuacuccuaaga

SEQ ID NO: 140812 - RNA, 23 nt, Human
uguagcaucucuuauuucucagc

SEQ ID NO: 140813 - RNA, 22 nt, Human
ccacagagacagagcccagggu

SEQ ID NO: 140814 - RNA, 22 nt, Human
agaugcuucaguguuuaauuua

SEQ ID NO: 140815 - RNA, 22 nt, Human
ucuaacuuagggaauacuuuag

SEQ ID NO: 140816 - RNA, 22 nt, Human
caagggcucuuuugaggaaugu

SEQ ID NO: 140817 - RNA, 22 nt, Human
agggugccuggaagccacucac

SEQ ID NO: 140818 - RNA, 22 nt, Human
uuacuuuguucucaagauaugu

SEQ ID NO: 140819 - RNA, 22 nt, Human
uuucucuggcauuagguauaaa

SEQ ID NO: 140820 - RNA, 22 nt, Human
gccccucccagucaggagcacu

SEQ ID NO: 140821 - RNA, 22 nt, Human
guggcugcuguccucucugguu

SEQ ID NO: 140822 - RNA, 22 nt, Human
caggucagaggcgcagccccca

SEQ ID NO: 140823 - RNA, 22 nt, Human
acagagcaauucuuggguguuu

SEQ ID NO: 140824 - RNA, 20 nt, Human
ugugugcaucuguauguauu

SEQ ID NO: 140825 - RNA, 22 nt, Human
uccugccucaggcucuggagua

SEQ ID NO: 140826 - RNA, 22 nt, Human
uguucauuuggcccuuuuguau

SEQ ID NO: 140827 - RNA, 22 nt, Human
agcccagcagaaaguccagccu

SEQ ID NO: 140828 - RNA, 22 nt, Human
cagcccuggccccagguggucu

SEQ ID NO: 140829 - RNA, 23 nt, Human
agaugaggcuucuccauguuggu

SEQ ID NO: 140830 - RNA, 16 nt, Human
gggcugggggauucug

SEQ ID NO: 140831 - RNA, 22 nt, Human
agccuggaauuaaggaaaugca

SEQ ID NO: 140832 - RNA, 20 nt, Human
agucucuguagugccugaga

SEQ ID NO: 140833 - RNA, 19 nt, Human
uguguguuuauauauguau

SEQ ID NO: 140834 - RNA, 22 nt, Human
ucauugcagaaauaaaggugaa

SEQ ID NO: 140835 - RNA, 22 nt, Human
aguggcagaucucuggucugga

SEQ ID NO: 140836 - RNA, 22 nt, Human
cagggcuggauccuccagacuc

SEQ ID NO: 140837 - RNA, 22 nt, Human
ucuuuuggguucuuaugauuua

SEQ ID NO: 140838 - RNA, 19 nt, Human
uuugucucugaauaauauu

SEQ ID NO: 140839 - RNA, 22 nt, Human
uccuggagggaggcggugcuac

SEQ ID NO: 140840 - RNA, 22 nt, Human
ggcuuccuggggccuccugcaa

SEQ ID NO: 140841 - RNA, 22 nt, Human
uuucaaaguugggaauuguaau

SEQ ID NO: 140842 - RNA, 22 nt, Human
uccaugagagguaacuuuacaa

SEQ ID NO: 140843 - RNA, 23 nt, Human
uacuguauauuacuguguuauac

SEQ ID NO: 140844 - RNA, 22 nt, Human
ugcauuguugaugaguugaaua

SEQ ID NO: 140845 - RNA, 22 nt, Human
ggaggccaucuggcuggaggcu

SEQ ID NO: 140846 - RNA, 22 nt, Human
acagccagaggagccaggcugg

SEQ ID NO: 140847 - RNA, 22 nt, Human
cuucuucaguugcauguauugg

SEQ ID NO: 140848 - RNA, 21 nt, Human
ccaggcuccugaggcugguca

SEQ ID NO: 140849 - RNA, 22 nt, Human
agugcugaagacuggcuaggga

SEQ ID NO: 140850 - RNA, 22 nt, Human
auguguagaacuguaaugccca

SEQ ID NO: 140851 - RNA, 22 nt, Human
acaguauaacuccaugccaccc

SEQ ID NO: 140852 - RNA, 22 nt, Human
ugaaucauggauaaauagcuua

SEQ ID NO: 140853 - RNA, 22 nt, Human
aggugaaguugaggaggcagaa

SEQ ID NO: 140854 - RNA, 22 nt, Human
aagccucuggggccucaucugu

SEQ ID NO: 140855 - RNA, 22 nt, Human
ugugugccugagccgugccugg

SEQ ID NO: 140856 - RNA, 22 nt, Human
ucagcaguguaguuuaucauuc

SEQ ID NO: 140857 - RNA, 18 nt, Human
gugacagcugcuagcuca

SEQ ID NO: 140858 - RNA, 22 nt, Human
uuccaugugaguacacugugau

SEQ ID NO: 140859 - RNA, 22 nt, Human
uaggcagcugcaaacuucgguc

SEQ ID NO: 140860 - RNA, 22 nt, Human
gaucauuugcaggaaacauuaa

SEQ ID NO: 140861 - RNA, 22 nt, Human
ggcugcagaaguacuuccggau

SEQ ID NO: 140862 - RNA, 19 nt, Human
uguggcugagcacuccuua

SEQ ID NO: 140863 - RNA, 22 nt, Human
ggagccugggcauuaguaauuu

SEQ ID NO: 140864 - RNA, 19 nt, Human
ugaagcagcaaacucucag

SEQ ID NO: 140865 - RNA, 22 nt, Human
auuagcugaccucuaaggagcc

SEQ ID NO: 140866 - RNA, 21 nt, Human
caguauuuuaagcagugaguu

SEQ ID NO: 140867 - RNA, 22 nt, Human
aaucaguuagaaggaagagaau

SEQ ID NO: 140868 - RNA, 22 nt, Human
cagcuggcccuuugguagccuu

SEQ ID NO: 140869 - RNA, 22 nt, Human
uguauguggcuacuuuucuugc

SEQ ID NO: 140870 - RNA, 22 nt, Human
cccucuggcucuucucaggccg

SEQ ID NO: 140871 - RNA, 22 nt, Human
ucccagcauaacaaacugcccg

SEQ ID NO: 140872 - RNA, 22 nt, Human
ucacaauuuggauacagcuaug

SEQ ID NO: 140873 - RNA, 22 nt, Human
uuuauugcauacacaaauguca

SEQ ID NO: 140874 - RNA, 22 nt, Human
uuucuucuaugugugauauuuu

SEQ ID NO: 140875 - RNA, 20 nt, Human
uggagcuccagcguccaugu

SEQ ID NO: 140876 - RNA, 22 nt, Human
cucucugggcccaguuggcacc

SEQ ID NO: 140877 - RNA, 22 nt, Human
aucuggguucaccaugcuccug

SEQ ID NO: 140878 - RNA, 22 nt, Human
uggacagcgaaagugccuggga

SEQ ID NO: 140879 - RNA, 21 nt, Human
ggccucugccuugccccacuc

SEQ ID NO: 140880 - RNA, 22 nt, Human
ugggcagauuaaugcaguggcu

SEQ ID NO: 140881 - RNA, 22 nt, Human
gcuggccacacugcugauggag

SEQ ID NO: 140882 - RNA, 20 nt, Human
cuguaucagguuacaaagua

SEQ ID NO: 140883 - RNA, 22 nt, Human
gugccugggcaugagcuuguug

SEQ ID NO: 140884 - RNA, 22 nt, Human
uuggcugugcagaucuugccua

SEQ ID NO: 140885 - RNA, 22 nt, Human
ucuggcucuuugggugauugua

SEQ ID NO: 140886 - RNA, 22 nt, Human
auuuauuaugggauuuggcaca

SEQ ID NO: 140887 - RNA, 22 nt, Human
agcugguaugaacaggauagga

SEQ ID NO: 140888 - RNA, 19 nt, Human
gcagcugugggaagagcca

SEQ ID NO: 140889 - RNA, 22 nt, Human
cugugugcucggauggacucgu

SEQ ID NO: 140890 - RNA, 22 nt, Human
agagcuggaaucagaccucagg

SEQ ID NO: 140891 - RNA, 22 nt, Human
uuuuucauugcagccucucucc

SEQ ID NO: 140892 - RNA, 22 nt, Human
uaucuacaggugucagguaaga

SEQ ID NO: 140893 - RNA, 18 nt, Human
aagcugcccucaggcagg

SEQ ID NO: 140894 - RNA, 22 nt, Human
aagagcuggaugaagaaaucaa

SEQ ID NO: 140895 - RNA, 22 nt, Human
gggcugggaauggcuaaguaug

SEQ ID NO: 140896 - RNA, 22 nt, Human
agggcucugggguggcagagau

SEQ ID NO: 140897 - RNA, 22 nt, Human
agcuggugcugaagcucuugag

SEQ ID NO: 140898 - RNA, 22 nt, Human
cagaggcagaggucaucucugg

SEQ ID NO: 140899 - RNA, 22 nt, Human
gcagggacaacugugcaccuga

SEQ ID NO: 140900 - RNA, 20 nt, Human
auacacauauucuugcaacu

SEQ ID NO: 140901 - RNA, 22 nt, Human
acagcagccuuguugguuucga

SEQ ID NO: 140902 - RNA, 22 nt, Human
gagugugugacuucacuuuagc

SEQ ID NO: 140903 - RNA, 22 nt, Human
gguguguguggauuagcaugcc

SEQ ID NO: 140904 - RNA, 19 nt, Human
ccagcccugucacuucuug

SEQ ID NO: 140905 - RNA, 22 nt, Human
acagccagggcauugucgccga

SEQ ID NO: 140906 - RNA, 22 nt, Human
aaagcucacaguaauacaaggc

SEQ ID NO: 140907 - RNA, 22 nt, Human
uccagggcuggguuggcucagc

SEQ ID NO: 140908 - RNA, 22 nt, Human
ggcugccuacuuucccagaguu

SEQ ID NO: 140909 - RNA, 22 nt, Human
cuggggcuucaaugcuucggug

SEQ ID NO: 140910 - RNA, 22 nt, Human
uuuacaaggcaguuauuuuccu

SEQ ID NO: 140911 - RNA, 22 nt, Human
ggagauggcucugcaaggucua

SEQ ID NO: 140912 - RNA, 22 nt, Human
ggcaccuggauguagcagugaa

SEQ ID NO: 140913 - RNA, 22 nt, Human
cugcucugaguauuaacggagg

SEQ ID NO: 140914 - RNA, 22 nt, Human
ucauuuguucucauucucuacu

SEQ ID NO: 140915 - RNA, 23 nt, Human
cugcagccgcguggggacgugga

SEQ ID NO: 140916 - RNA, 22 nt, Human
cugcagugcaagcccagaugga

SEQ ID NO: 140917 - RNA, 22 nt, Human
gcuggcagaagagcugguucaa

SEQ ID NO: 140918 - RNA, 22 nt, Human
ugugucuaggcucaugcuugcu

SEQ ID NO: 140919 - RNA, 22 nt, Human
agcagaacugaugagacuugag

SEQ ID NO: 140920 - RNA, 22 nt, Human
uugauuuucaauucauugacaa

SEQ ID NO: 140921 - RNA, 19 nt, Human
cugguccugacugaggggu

SEQ ID NO: 140922 - RNA, 22 nt, Human
uccuguguuacccuugcaguga

SEQ ID NO: 140923 - RNA, 22 nt, Human
gcagcuggcucagagagguggg

SEQ ID NO: 140924 - RNA, 18 nt, Human
uccagcgugcuccagggc

SEQ ID NO: 140925 - RNA, 22 nt, Human
agaaggccuaacuugggggcaa

SEQ ID NO: 140926 - RNA, 22 nt, Human
acguguucaauuuccaucugac

SEQ ID NO: 140927 - RNA, 22 nt, Human
uaguuuuacuugcgaugauaau

SEQ ID NO: 140928 - RNA, 22 nt, Human
gggcuggaggaccggccucgga

SEQ ID NO: 140929 - RNA, 22 nt, Human
gucacuguauccagguuccagc

SEQ ID NO: 140930 - RNA, 22 nt, Human
ugaaauguuugaagaccacuga

SEQ ID NO: 140931 - RNA, 22 nt, Human
cugaggagagaucacguggugu

SEQ ID NO: 140932 - RNA, 22 nt, Human
guggguguggaacugugagacc

SEQ ID NO: 140933 - RNA, 22 nt, Human
uuuauguuugcauuuucaaaga

SEQ ID NO: 140934 - RNA, 22 nt, Human
ccucuggcuguaccacuggcac

SEQ ID NO: 140935 - RNA, 22 nt, Human
agcagccacacgccuccuucuc

SEQ ID NO: 140936 - RNA, 22 nt, Human
ugggcacuauggcucugugcac

SEQ ID NO: 140937 - RNA, 22 nt, Human
cagagcagaagcgguccucaca

SEQ ID NO: 140938 - RNA, 22 nt, Human
accugaggccuccccagcagac

SEQ ID NO: 140939 - RNA, 22 nt, Human
aggguggcaguuacuggagcaa

SEQ ID NO: 140940 - RNA, 22 nt, Human
uucuuaaaacuuauggacaggu

SEQ ID NO: 140941 - RNA, 22 nt, Human
aggcaguuuaggcagcgauuua

SEQ ID NO: 140942 - RNA, 22 nt, Human
aaugcacauauauguguauaca

SEQ ID NO: 140943 - RNA, 22 nt, Human
cugggaguguucuaggucacau

SEQ ID NO: 140944 - RNA, 22 nt, Human
uccagggacacagaguccuucu

SEQ ID NO: 140945 - RNA, 22 nt, Human
guacucucuugaaggccuuucu

SEQ ID NO: 140946 - RNA, 22 nt, Human
aacuagaaccacuuguauuucc

SEQ ID NO: 140947 - RNA, 23 nt, Human
uuugaaguugacugccuuccaga

SEQ ID NO: 140948 - RNA, 22 nt, Human
uucaauucugcucugaucuuag

SEQ ID NO: 140949 - RNA, 22 nt, Human
acauuucugcuagaauagguga

SEQ ID NO: 140950 - RNA, 21 nt, Human
gcccucaggggaggauggccu

SEQ ID NO: 140951 - RNA, 22 nt, Human
uccugccuagcaggugaccuau

SEQ ID NO: 140952 - RNA, 22 nt, Human
guaggaagcucugaggcuaguu

SEQ ID NO: 140953 - RNA, 19 nt, Human
uuaucuguguugcaguggu

SEQ ID NO: 140954 - RNA, 22 nt, Human
gcaaagucucaagacccaagug

SEQ ID NO: 140955 - RNA, 22 nt, Human
gcauucaucuuccuccaugcag

SEQ ID NO: 140956 - RNA, 22 nt, Human
guguguuuagcauuagcagggg

SEQ ID NO: 140957 - RNA, 22 nt, Human
uccuucagcucucuauuuagau

SEQ ID NO: 140958 - RNA, 22 nt, Human
uaaauucccaacucugcucuuc

SEQ ID NO: 140959 - RNA, 22 nt, Human
auuauguagcuaaaaauugugu

SEQ ID NO: 140960 - RNA, 22 nt, Human
cuccucuuuggggauuuacaca

SEQ ID NO: 140961 - RNA, 19 nt, Human
uggagacugagagugagca

SEQ ID NO: 140962 - RNA, 20 nt, Human
uauuuacaacuuagagccuc

SEQ ID NO: 140963 - RNA, 22 nt, Human
ucagggcauacucuucaagguc

SEQ ID NO: 140964 - RNA, 23 nt, Human
ggcacugaagcuacaauggugag

SEQ ID NO: 140965 - RNA, 22 nt, Human
cuggcagcugcccgagaugccc

SEQ ID NO: 140966 - RNA, 22 nt, Human
guggagacuucuacuagagacc

SEQ ID NO: 140967 - RNA, 22 nt, Human
cccucccaggaguggccagaga

SEQ ID NO: 140968 - RNA, 22 nt, Human
gacagggccgcagauggagacu

SEQ ID NO: 140969 - RNA, 22 nt, Human
caggcugccgugaagcaggccu

SEQ ID NO: 140970 - RNA, 23 nt, Human
ccugugugcccuuaauucacagc

SEQ ID NO: 140971 - RNA, 22 nt, Human
ugccuuggugcuucuucaugug

SEQ ID NO: 140972 - RNA, 22 nt, Human
acauuucuccuugcaggaguca

SEQ ID NO: 140973 - RNA, 20 nt, Human
uacaaguacauuauaguuau

SEQ ID NO: 140974 - RNA, 22 nt, Human
cuggccacaugugugcugagca

SEQ ID NO: 140975 - RNA, 20 nt, Human
ccugucuggagacaaagaga

SEQ ID NO: 140976 - RNA, 22 nt, Human
gucaaguuaagauaaggucaug

SEQ ID NO: 140977 - RNA, 19 nt, Human
ucucagagcccuagaggcc

SEQ ID NO: 140978 - RNA, 18 nt, Human
uggagcagguaggcauga

SEQ ID NO: 140979 - RNA, 22 nt, Human
cauuaaaauaucucaugguguu

SEQ ID NO: 140980 - RNA, 23 nt, Human
gcagacagagcagacuaagacaa

SEQ ID NO: 140981 - RNA, 22 nt, Human
ggagaaggugcuggucacugug

SEQ ID NO: 140982 - RNA, 22 nt, Human
caaauguauucucacuucaggg

SEQ ID NO: 140983 - RNA, 22 nt, Human
gccucacugcagccccaggaag

SEQ ID NO: 140984 - RNA, 22 nt, Human
ugcaggagcugugcggugaggg

SEQ ID NO: 140985 - RNA, 22 nt, Human
ugcauuguugaccaguugugca

SEQ ID NO: 140986 - RNA, 22 nt, Human
acucaggaaaugagaggcucuc

SEQ ID NO: 140987 - RNA, 22 nt, Human
ugccucagagugggcuugcuau

SEQ ID NO: 140988 - RNA, 22 nt, Human
uacagucuuuggaaagagauag

SEQ ID NO: 140989 - RNA, 22 nt, Human
uuacaaguacugaauaugauuu

SEQ ID NO: 140990 - RNA, 22 nt, Human
uaaaugugucuauggacccgcc

SEQ ID NO: 140991 - RNA, 22 nt, Human
caaaguccuagaacagugcuug

SEQ ID NO: 140992 - RNA, 22 nt, Human
ugucaaauuuuuauugcaguau

SEQ ID NO: 140993 - RNA, 22 nt, Human
aacaguaugugagauuuacaca

SEQ ID NO: 140994 - RNA, 22 nt, Human
caauguguuugcauauuaaaau

SEQ ID NO: 140995 - RNA, 22 nt, Human
cagccuucugaaugaacguacu

SEQ ID NO: 140996 - RNA, 22 nt, Human
ggccaagauggaaggagagaug

SEQ ID NO: 140997 - RNA, 22 nt, Human
auaaggcaagcugucaguuugu

SEQ ID NO: 140998 - RNA, 22 nt, Human
uuucuucucgacaccuuauccc

SEQ ID NO: 140999 - RNA, 22 nt, Human
aauuucucucucaugcuucaug

SEQ ID NO: 141000 - RNA, 22 nt, Human
ggagagaaauugagguagcaag

SEQ ID NO: 141001 - RNA, 22 nt, Human
cagcaggaccauugaggcauca

SEQ ID NO: 141002 - RNA, 22 nt, Human
guuauauucaaaaugaggcugu

SEQ ID NO: 141003 - RNA, 22 nt, Human
cccuggagucagguuggccugg

SEQ ID NO: 141004 - RNA, 22 nt, Human
uucucuucaucucaguaaaugu

SEQ ID NO: 141005 - RNA, 22 nt, Human
uagcccagagucccaauuccag

SEQ ID NO: 141006 - RNA, 22 nt, Human
agcucucaagauaagaaagaac

SEQ ID NO: 141007 - RNA, 22 nt, Human
ucagggcucaccagccucugcc

SEQ ID NO: 141008 - RNA, 22 nt, Human
caucugcuguuccuuggacuca

SEQ ID NO: 141009 - RNA, 22 nt, Human
agucucugugagcucccaaugg

SEQ ID NO: 141010 - RNA, 22 nt, Human
uccugagggcgauucagcaggu

SEQ ID NO: 141011 - RNA, 22 nt, Human
agauuuagugguggaauuuugg

SEQ ID NO: 141012 - RNA, 22 nt, Human
uagagcaguuggcagcuguauu

SEQ ID NO: 141013 - RNA, 22 nt, Human
ggcugcuguacugaugucaguu

SEQ ID NO: 141014 - RNA, 22 nt, Human
ugcagcauucuuggccacuacu

SEQ ID NO: 141015 - RNA, 22 nt, Human
aggaaucccgcaccagcugcug

SEQ ID NO: 141016 - RNA, 22 nt, Human
uguuugaauuuugcuaacgugu

SEQ ID NO: 141017 - RNA, 22 nt, Human
aggggugaaggcccgauaggag

SEQ ID NO: 141018 - RNA, 22 nt, Human
gaaaauguuuccuguuauuugc

SEQ ID NO: 141019 - RNA, 20 nt, Human
ccuccaggcacacccaugug

SEQ ID NO: 141020 - RNA, 22 nt, Human
uggcucucaggccugcugcguu

SEQ ID NO: 141021 - RNA, 22 nt, Human
uguuacacagcagaauagcaag

SEQ ID NO: 141022 - RNA, 22 nt, Human
aggucaaggccaaaagaguggu

SEQ ID NO: 141023 - RNA, 19 nt, Human
agcagccaucgaccaugga

SEQ ID NO: 141024 - RNA, 22 nt, Human
auuaaauuagcaaacugugaaa

SEQ ID NO: 141025 - RNA, 22 nt, Human
agaaugcaguuugaaauaaggu

SEQ ID NO: 141026 - RNA, 22 nt, Human
aagacaagcaucaaaucaggca

SEQ ID NO: 141027 - RNA, 22 nt, Human
agcagccaggaaucugcagagc

SEQ ID NO: 141028 - RNA, 19 nt, Human
gcagccaccgcggcggccg

SEQ ID NO: 141029 - RNA, 22 nt, Human
aagagcuggaagugaagauaac

SEQ ID NO: 141030 - RNA, 22 nt, Human
gugaggggaguaaagccauguu

SEQ ID NO: 141031 - RNA, 22 nt, Human
gcuuuacacagaugaauauuuc

SEQ ID NO: 141032 - RNA, 22 nt, Human
cuucaagaagacagcagagcau

SEQ ID NO: 141033 - RNA, 20 nt, Human
agaaucugacccagagagac

SEQ ID NO: 141034 - RNA, 22 nt, Human
uuuauucuugagagugagaaga

SEQ ID NO: 141035 - RNA, 22 nt, Human
caucuggcuagcuaucauugug

SEQ ID NO: 141036 - RNA, 22 nt, Human
ggucccugaagaggccuggggu

SEQ ID NO: 141037 - RNA, 22 nt, Human
cugggcagcuaccaccacugcu

SEQ ID NO: 141038 - RNA, 22 nt, Human
uguaugugcaauguuuauaugu

SEQ ID NO: 141039 - RNA, 22 nt, Human
caguuuauaguuguuaugugug

SEQ ID NO: 141040 - RNA, 21 nt, Human
ggccugaguauaggacaggcc

SEQ ID NO: 141041 - RNA, 22 nt, Human
cagagccauuauggagacuugc

SEQ ID NO: 141042 - RNA, 22 nt, Human
cauuuguauagugcuuagacca

SEQ ID NO: 141043 - RNA, 19 nt, Human
cagucccaaauucuuguca

SEQ ID NO: 141044 - RNA, 19 nt, Human
gaguuauugccagggcaug

SEQ ID NO: 141045 - RNA, 22 nt, Human
gcagaagcccggucagcgcacg

SEQ ID NO: 141046 - RNA, 22 nt, Human
caaggccacguucugcaugcgg

SEQ ID NO: 141047 - RNA, 22 nt, Human
agaagccaauucugugugaguc

SEQ ID NO: 141048 - RNA, 22 nt, Human
ugccacacucacuucuguggac

SEQ ID NO: 141049 - RNA, 22 nt, Human
uggaggcauaggccugggcccu

SEQ ID NO: 141050 - RNA, 22 nt, Human
cccaucaggaacccaggagccc

SEQ ID NO: 141051 - RNA, 22 nt, Human
gcuuuacacagcugguucuugu

SEQ ID NO: 141052 - RNA, 19 nt, Human
ggugugugcuggggccugu

SEQ ID NO: 141053 - RNA, 22 nt, Human
ggaggcuccacugcucuuccug

SEQ ID NO: 141054 - RNA, 22 nt, Human
cccuggaggcggagcuugcagu

SEQ ID NO: 141055 - RNA, 22 nt, Human
gagcagcuguccccaaagcuuc

SEQ ID NO: 141056 - RNA, 22 nt, Human
guuaacuuuuuacagaaaugaa

SEQ ID NO: 141057 - RNA, 22 nt, Human
ugguuuugcuccaguauaaaua

SEQ ID NO: 141058 - RNA, 22 nt, Human
uuagcuaaacuguaacuagaau

SEQ ID NO: 141059 - RNA, 22 nt, Human
cugggagcugucaggagcgugu

SEQ ID NO: 141060 - RNA, 22 nt, Human
gaacaguaaauuuaugcagcac

SEQ ID NO: 141061 - RNA, 22 nt, Human
cccaugagguggagguugcagu

SEQ ID NO: 141062 - RNA, 22 nt, Human
aguacuucagaggcugcccagg

SEQ ID NO: 141063 - RNA, 22 nt, Human
cauuaucucuucuauaugcuag

SEQ ID NO: 141064 - RNA, 22 nt, Human
agaacagaggccuuauguuuca

SEQ ID NO: 141065 - RNA, 22 nt, Human
uauugaguuacagaaaauacuu

SEQ ID NO: 141066 - RNA, 22 nt, Human
augaagauaagaccaggcugga

SEQ ID NO: 141067 - RNA, 22 nt, Human
agcaccugcuuaaugugcagug

SEQ ID NO: 141068 - RNA, 18 nt, Human
acagacaaaauggaaaug

SEQ ID NO: 141069 - RNA, 22 nt, Human
auaacagaugugaagugcuaau

SEQ ID NO: 141070 - RNA, 22 nt, Human
gcucaggaaauaguuuaguguu

SEQ ID NO: 141071 - RNA, 22 nt, Human
agggaaggaaaagcugucgcuu

SEQ ID NO: 141072 - RNA, 22 nt, Human
cagugauguuucugcaucagag

SEQ ID NO: 141073 - RNA, 22 nt, Human
ggcagcuccaaaaggaaacacu

SEQ ID NO: 141074 - RNA, 22 nt, Human
ugaagccaucccucagauggcc

SEQ ID NO: 141075 - RNA, 22 nt, Human
uguguguguuucugcucauaca

SEQ ID NO: 141076 - RNA, 22 nt, Human
gggcagcucuggcugugggaag

SEQ ID NO: 141077 - RNA, 22 nt, Human
ccugggcucaagugauccuccu

SEQ ID NO: 141078 - RNA, 22 nt, Human
auucucuuuguauaacaucuug

SEQ ID NO: 141079 - RNA, 22 nt, Human
aguacagaccugucucuuccug

SEQ ID NO: 141080 - RNA, 22 nt, Human
ugcagauucaaaugaaaugcaa

SEQ ID NO: 141081 - RNA, 22 nt, Human
ccagguggaaggucugugcucu

SEQ ID NO: 141082 - RNA, 22 nt, Human
aucaggauggguuuggcuuagg

SEQ ID NO: 141083 - RNA, 22 nt, Human
acagcauaaucacuucuuucuu

SEQ ID NO: 141084 - RNA, 22 nt, Human
uuacagauucaagcucuuugaa

SEQ ID NO: 141085 - RNA, 18 nt, Human
agagcagcggcaucacac

SEQ ID NO: 141086 - RNA, 22 nt, Human
acagaguaggugcugucgacug

SEQ ID NO: 141087 - RNA, 22 nt, Human
caagggugguauugggagcaua

SEQ ID NO: 141088 - RNA, 22 nt, Human
agcagcuggugagcaagcucag

SEQ ID NO: 141089 - RNA, 22 nt, Human
acacacagguaaaggagccugg

SEQ ID NO: 141090 - RNA, 19 nt, Human
agcagagcagggccguggg

SEQ ID NO: 141091 - RNA, 22 nt, Human
ugaaggcuguuggauggggaag

SEQ ID NO: 141092 - RNA, 22 nt, Human
uaaauguggagacucaggaguc

SEQ ID NO: 141093 - RNA, 22 nt, Human
ccugggcaggaugggcccggug

SEQ ID NO: 141094 - RNA, 22 nt, Human
auucacaaaaugauauagauac

SEQ ID NO: 141095 - RNA, 22 nt, Human
ugcagagggacagccacagcuc

SEQ ID NO: 141096 - RNA, 22 nt, Human
ugacucuguaccugucugccuu

SEQ ID NO: 141097 - RNA, 19 nt, Human
ugaaggagggggauggcca

SEQ ID NO: 141098 - RNA, 22 nt, Human
ugcucuguauucuauggcaguu

SEQ ID NO: 141099 - RNA, 22 nt, Human
cugucugucaaguucaucucca

SEQ ID NO: 141100 - RNA, 22 nt, Human
ucagggcagguuaacuugggug

SEQ ID NO: 141101 - RNA, 22 nt, Human
auucuucaaagagugucaaagu

SEQ ID NO: 141102 - RNA, 22 nt, Human
gccccugggagcagagccacca

SEQ ID NO: 141103 - RNA, 18 nt, Human
ugagaggcagguagagga

SEQ ID NO: 141104 - RNA, 22 nt, Human
ugccucagucuaaagucucuca

SEQ ID NO: 141105 - RNA, 22 nt, Human
agcucccagggcugggcaaguu

SEQ ID NO: 141106 - RNA, 22 nt, Human
ucauacauaacuuguacaguga

SEQ ID NO: 141107 - RNA, 22 nt, Human
gagcagugggaaggaacagggu

SEQ ID NO: 141108 - RNA, 22 nt, Human
agugugugcuguuccccggagg

SEQ ID NO: 141109 - RNA, 22 nt, Human
aaagguuugcauggaauuuacc

SEQ ID NO: 141110 - RNA, 22 nt, Human
uggccacagccucugccaguuc

SEQ ID NO: 141111 - RNA, 22 nt, Human
guucuucaucuuaaccaucugu

SEQ ID NO: 141112 - RNA, 22 nt, Human
cacaguggcagguguggguugu

SEQ ID NO: 141113 - RNA, 22 nt, Human
accaggggugucaacagcauuu

SEQ ID NO: 141114 - RNA, 22 nt, Human
agcaggcuuucaagagucuucu

SEQ ID NO: 141115 - RNA, 22 nt, Human
gaccauuuguugaaaagauuau

SEQ ID NO: 141116 - RNA, 21 nt, Human
ugugugggcauaucugcugca

SEQ ID NO: 141117 - RNA, 22 nt, Human
ugaaaaggaguccuuguuuuca

SEQ ID NO: 141118 - RNA, 23 nt, Human
uggccuggagagaaaagaugagu

SEQ ID NO: 141119 - RNA, 20 nt, Human
cccaggagugagcagcuuua

SEQ ID NO: 141120 - RNA, 22 nt, Human
aaucaguuucuuggcaaguuua

SEQ ID NO: 141121 - RNA, 22 nt, Human
ugcaccccauuuuacauuuaca

SEQ ID NO: 141122 - RNA, 22 nt, Human
uuaacauuucuuuuccacucau

SEQ ID NO: 141123 - RNA, 22 nt, Human
uggcugagcucccuguguguug

SEQ ID NO: 141124 - RNA, 22 nt, Human
cguguggucccggcaaggcaag

SEQ ID NO: 141125 - RNA, 22 nt, Human
uuuucugugcccugcuagcugg

SEQ ID NO: 141126 - RNA, 22 nt, Human
uggaugcuguaggacacgcucu

SEQ ID NO: 141127 - RNA, 22 nt, Human
ugggaggagcccucugggaagg

SEQ ID NO: 141128 - RNA, 22 nt, Human
agaaauguacgauguuaugcag

SEQ ID NO: 141129 - RNA, 21 nt, Human
aucagcaaaugccugucuccc

SEQ ID NO: 141130 - RNA, 20 nt, Human
cugggcugcccagcuauggg

SEQ ID NO: 141131 - RNA, 22 nt, Human
ccagggcagccaacccagaugc

SEQ ID NO: 141132 - RNA, 22 nt, Human
ugugugugugcgcgcacgcaua

SEQ ID NO: 141133 - RNA, 22 nt, Human
ggagccuugggcgcucucccau

SEQ ID NO: 141134 - RNA, 22 nt, Human
ucuuagcacagcuauauaaguu

SEQ ID NO: 141135 - RNA, 22 nt, Human
uucacagugugaucuaugggca

SEQ ID NO: 141136 - RNA, 22 nt, Human
gccuguccacuaaacagccaag

SEQ ID NO: 141137 - RNA, 22 nt, Human
cuucuuaaugacagauuaaaau

SEQ ID NO: 141138 - RNA, 22 nt, Human
cccaggagguggagcuugcagu

SEQ ID NO: 141139 - RNA, 22 nt, Human
uuucaguucaguuuauuauauc

SEQ ID NO: 141140 - RNA, 22 nt, Human
ggcugaaggaugaaagcugcag

SEQ ID NO: 141141 - RNA, 21 nt, Human
uggcagaguugaguaguuaug

SEQ ID NO: 141142 - RNA, 22 nt, Human
augaaggcuguguagauggaug

SEQ ID NO: 141143 - RNA, 22 nt, Human
cauguacaguuuuucuguccug

SEQ ID NO: 141144 - RNA, 22 nt, Human
cucagggcaguauggcugagag

SEQ ID NO: 141145 - RNA, 22 nt, Human
guguaucaguaacuguggacag

SEQ ID NO: 141146 - RNA, 21 nt, Human
gcaggguccuuuccauuccua

SEQ ID NO: 141147 - RNA, 22 nt, Human
ugcagucuuccagcugcacaaa

SEQ ID NO: 141148 - RNA, 22 nt, Human
cuguguggacugguugaggccc

SEQ ID NO: 141149 - RNA, 22 nt, Human
agaaaucuaagaugcucaagga

SEQ ID NO: 141150 - RNA, 22 nt, Human
uaccaggcagcugcacagaggc

SEQ ID NO: 141151 - RNA, 22 nt, Human
acagccagaggugguccugggu

SEQ ID NO: 141152 - RNA, 21 nt, Human
ugagccaggcugacggcugug

SEQ ID NO: 141153 - RNA, 22 nt, Human
ucugggggcgaccagggacugc

SEQ ID NO: 141154 - RNA, 22 nt, Human
aggcccuggguuagggcccacu

SEQ ID NO: 141155 - RNA, 22 nt, Human
cagcagccuacaaugcacagaa

SEQ ID NO: 141156 - RNA, 22 nt, Human
ucauaauacaaagaguucugca

SEQ ID NO: 141157 - RNA, 22 nt, Human
aaggcaggaugcggacccaucu

SEQ ID NO: 141158 - RNA, 20 nt, Human
uuaucugucaaucugucuca

SEQ ID NO: 141159 - RNA, 22 nt, Human
ugcagccauuuucugccaaugc

SEQ ID NO: 141160 - RNA, 21 nt, Human
aggaaguggccagauugggaa

SEQ ID NO: 141161 - RNA, 22 nt, Human
uguuaucugagcaacgucgacg

SEQ ID NO: 141162 - RNA, 22 nt, Human
uucagcagucguccaggaaaag

SEQ ID NO: 141163 - RNA, 22 nt, Human
acagaggaaggcugagcugccc

SEQ ID NO: 141164 - RNA, 19 nt, Human
cucuggagcagacacugga

SEQ ID NO: 141165 - RNA, 22 nt, Human
acagagauggcacagagaaggu

SEQ ID NO: 141166 - RNA, 22 nt, Human
aaaagggacuacucucagcucc

SEQ ID NO: 141167 - RNA, 22 nt, Human
cuuucucuucagcacccagccc

SEQ ID NO: 141168 - RNA, 22 nt, Human
accuuucauuaaagucuguagu

SEQ ID NO: 141169 - RNA, 22 nt, Human
aggguggggugcuacaucuuua

SEQ ID NO: 141170 - RNA, 22 nt, Human
caaagaugcugauguuggauca

SEQ ID NO: 141171 - RNA, 22 nt, Human
gccucaggacuggcauacucau

SEQ ID NO: 141172 - RNA, 21 nt, Human
uccuuccuugagguccuuucc

SEQ ID NO: 141173 - RNA, 22 nt, Human
gggaaccagccgcuuccgccuc

SEQ ID NO: 141174 - RNA, 22 nt, Human
agcugggaugauaaccucaguc

SEQ ID NO: 141175 - RNA, 22 nt, Human
ucagugugaggggcuggguccu

SEQ ID NO: 141176 - RNA, 22 nt, Human
agucucugucguagaucagcgu

SEQ ID NO: 141177 - RNA, 22 nt, Human
uuacacaacaucuguauuauua

SEQ ID NO: 141178 - RNA, 22 nt, Human
ccaggagguggagauugcagug

SEQ ID NO: 141179 - RNA, 22 nt, Human
uuuacagucaccaaacuuugcu

SEQ ID NO: 141180 - RNA, 22 nt, Human
aggcagcagggccacuggcuga

SEQ ID NO: 141181 - RNA, 22 nt, Human
ugauuuucaugggugaucuuug

SEQ ID NO: 141182 - RNA, 22 nt, Human
gagauggggucagcugggacau

SEQ ID NO: 141183 - RNA, 22 nt, Human
aggaaaaauaaggcagcagggc

SEQ ID NO: 141184 - RNA, 22 nt, Human
ugcauuguuuagaacucuuugg

SEQ ID NO: 141185 - RNA, 22 nt, Human
ggcuuguggcaaguguuuuaag

SEQ ID NO: 141186 - RNA, 22 nt, Human
uggaagagggagcuggguggcc

SEQ ID NO: 141187 - RNA, 22 nt, Human
ugugugcuaauguaugcucuaa

SEQ ID NO: 141188 - RNA, 22 nt, Human
agccugagugcuuaggacuguu

SEQ ID NO: 141189 - RNA, 19 nt, Human
ugaguguguguuucucuaa

SEQ ID NO: 141190 - RNA, 22 nt, Human
ugaaccaggaggcagccagcac

SEQ ID NO: 141191 - RNA, 22 nt, Human
caguuucuauggcugggcucug

SEQ ID NO: 141192 - RNA, 22 nt, Human
caaugugugcuuacaggccagu

SEQ ID NO: 141193 - RNA, 22 nt, Human
ucuggcuccugaguccaugcuc

SEQ ID NO: 141194 - RNA, 22 nt, Human
uguuacagucauuguuuucuga

SEQ ID NO: 141195 - RNA, 22 nt, Human
cuucaucaacucuaacaaaugu

SEQ ID NO: 141196 - RNA, 22 nt, Human
ccucugcaccauagccuucagc

SEQ ID NO: 141197 - RNA, 22 nt, Human
gaggcaugucuggccuguccca

SEQ ID NO: 141198 - RNA, 22 nt, Human
gugcagcugugugagagcucca

SEQ ID NO: 141199 - RNA, 22 nt, Human
uuccauaacugaccgaaugcau

SEQ ID NO: 141200 - RNA, 22 nt, Human
aacugcauuugcauaaguccau

SEQ ID NO: 141201 - RNA, 19 nt, Human
gcccugcaggagguggggc

SEQ ID NO: 141202 - RNA, 20 nt, Human
uuauuugcucuuuaucugca

SEQ ID NO: 141203 - RNA, 22 nt, Human
uuacuguaugagugugguaguc

SEQ ID NO: 141204 - RNA, 22 nt, Human
caggugggcguggcgagaaggc

SEQ ID NO: 141205 - RNA, 18 nt, Human
ucugucuguguugucuuu

SEQ ID NO: 141206 - RNA, 22 nt, Human
uugcucaggcuuagagcuacua

SEQ ID NO: 141207 - RNA, 21 nt, Human
ugaaaguuggagucaaaugua

SEQ ID NO: 141208 - RNA, 23 nt, Human
uugaaagguagcuggcagcuaga

SEQ ID NO: 141209 - RNA, 21 nt, Human
auuuucauuaauucagugugg

SEQ ID NO: 141210 - RNA, 22 nt, Human
agaccauggccauccuaggaaa

SEQ ID NO: 141211 - RNA, 22 nt, Human
uuuguuuagaaagagauuggug

SEQ ID NO: 141212 - RNA, 22 nt, Human
acagcagagacacucaggaggc

SEQ ID NO: 141213 - RNA, 22 nt, Human
ccugcagguugcagaggcggaa

SEQ ID NO: 141214 - RNA, 22 nt, Human
guguauaacuaucuaucuagua

SEQ ID NO: 141215 - RNA, 22 nt, Human
uuucagauggagguuuaggaca

SEQ ID NO: 141216 - RNA, 22 nt, Human
agcagcaggagccgugggguga

SEQ ID NO: 141217 - RNA, 22 nt, Human
gagcuggcaggaggcuccccga

SEQ ID NO: 141218 - RNA, 22 nt, Human
cugcuuuguggaaucacacugg

SEQ ID NO: 141219 - RNA, 22 nt, Human
uagggcaguuauaacauuagug

SEQ ID NO: 141220 - RNA, 22 nt, Human
uggccacccagcugacgccuuc

SEQ ID NO: 141221 - RNA, 22 nt, Human
agagccagccuucucagcuuac

SEQ ID NO: 141222 - RNA, 22 nt, Human
guuugcauuuauuagucuucug

SEQ ID NO: 141223 - RNA, 22 nt, Human
ugcugucccuaagucucuucaa

SEQ ID NO: 141224 - RNA, 22 nt, Human
ucccagaggacuguuggugcua

SEQ ID NO: 141225 - RNA, 22 nt, Human
cuggcagcaguuaugaaacaau

SEQ ID NO: 141226 - RNA, 22 nt, Human
gaagagcugugauucaggcuua

SEQ ID NO: 141227 - RNA, 22 nt, Human
ggaggccaaggcgggcggauca

SEQ ID NO: 141228 - RNA, 22 nt, Human
ccuggcaggccccuccuggauu

SEQ ID NO: 141229 - RNA, 22 nt, Human
augggcuguccuaguccagccc

SEQ ID NO: 141230 - RNA, 22 nt, Human
uugaagcacaaugucuuuuauc

SEQ ID NO: 141231 - RNA, 18 nt, Human
gcuggcugcacuucugcu

SEQ ID NO: 141232 - RNA, 22 nt, Human
gcuucuggaggagcugggcuga

SEQ ID NO: 141233 - RNA, 23 nt, Human
ccugcagcugcuggggcuccacc

SEQ ID NO: 141234 - RNA, 22 nt, Human
ccugagagcgaguggccucaug

SEQ ID NO: 141235 - RNA, 19 nt, Human
guugaaaguaggugagggu

SEQ ID NO: 141236 - RNA, 22 nt, Human
aaugcuagugugauauguaagg

SEQ ID NO: 141237 - RNA, 22 nt, Human
cguggcuggggaggucagccag

SEQ ID NO: 141238 - RNA, 22 nt, Human
caggccuggcccccggcacacc

SEQ ID NO: 141239 - RNA, 22 nt, Human
gagcuucccucugcagucccug

SEQ ID NO: 141240 - RNA, 22 nt, Human
caugggcuuuggaggcuggagg

SEQ ID NO: 141241 - RNA, 22 nt, Human
cacagggcuuugauggcugagu

SEQ ID NO: 141242 - RNA, 22 nt, Human
uggcauguuugcuugugcauau

SEQ ID NO: 141243 - RNA, 22 nt, Human
gcaaauauucaagacuuuucca

SEQ ID NO: 141244 - RNA, 17 nt, Human
cugaggcccagggccca

SEQ ID NO: 141245 - RNA, 22 nt, Human
gccuaggaguacagaaugguuu

SEQ ID NO: 141246 - RNA, 22 nt, Human
uggcagggugccaguugcgagu

SEQ ID NO: 141247 - RNA, 22 nt, Human
ccuggcacgaagggcugagguu

SEQ ID NO: 141248 - RNA, 22 nt, Human
cugccagcagaggccagcgcug

SEQ ID NO: 141249 - RNA, 22 nt, Human
aggcuguggugcugaaggaggg

SEQ ID NO: 141250 - RNA, 22 nt, Human
aauguguacuuuuucaugcuca

SEQ ID NO: 141251 - RNA, 22 nt, Human
cccauuuaaacacaagcuuuca

SEQ ID NO: 141252 - RNA, 22 nt, Human
cugcccuggucccauggcugau

SEQ ID NO: 141253 - RNA, 22 nt, Human
aagaacauuuuguagaaugaca

SEQ ID NO: 141254 - RNA, 22 nt, Human
acuuugaaggggaacauuuuaa

SEQ ID NO: 141255 - RNA, 22 nt, Human
auguggcuuucugcguuuucuc

SEQ ID NO: 141256 - RNA, 22 nt, Human
uggcuggcaguaggcuaguggc

SEQ ID NO: 141257 - RNA, 22 nt, Human
ggccugagucacaucaggagag

SEQ ID NO: 141258 - RNA, 22 nt, Human
aagugacaaaaggguauccaaa

SEQ ID NO: 141259 - RNA, 22 nt, Human
uaagaauuguguugaauagagu

SEQ ID NO: 141260 - RNA, 22 nt, Human
agugaaaugacugaaucagaua

SEQ ID NO: 141261 - RNA, 22 nt, Human
uucagcaaauggacuguucagg

SEQ ID NO: 141262 - RNA, 22 nt, Human
ccugucucccuggcauggcuca

SEQ ID NO: 141263 - RNA, 23 nt, Human
ugaguucucaucuuggcuucuau

SEQ ID NO: 141264 - RNA, 22 nt, Human
cagcucucacacccuccuccca

SEQ ID NO: 141265 - RNA, 22 nt, Human
gugcgugugccuaucaauaaag

SEQ ID NO: 141266 - RNA, 22 nt, Human
gccaaagcagucuugccucugc

SEQ ID NO: 141267 - RNA, 22 nt, Human
aggcaggggagcuggaagggua

SEQ ID NO: 141268 - RNA, 22 nt, Human
aggccugagguuccugugcuca

SEQ ID NO: 141269 - RNA, 22 nt, Human
uccagggguaccggccaggcag

SEQ ID NO: 141270 - RNA, 22 nt, Human
aagagcuggagcugcuacagga

SEQ ID NO: 141271 - RNA, 22 nt, Human
cauuguuaauugguaucuuaca

SEQ ID NO: 141272 - RNA, 22 nt, Human
cuggagcuccagggucuccucu

SEQ ID NO: 141273 - RNA, 22 nt, Human
auuuacucgugucuccagugcu

SEQ ID NO: 141274 - RNA, 22 nt, Human
ggcccugugguuuugcaaaguc

SEQ ID NO: 141275 - RNA, 22 nt, Human
cauuuguaggaugcuucuuguu

SEQ ID NO: 141276 - RNA, 22 nt, Human
ggcucuggagacauguggagag

SEQ ID NO: 141277 - RNA, 22 nt, Human
ccagcugguuaaaauagagaaa

SEQ ID NO: 141278 - RNA, 19 nt, Human
agacagagcucaguggguu

SEQ ID NO: 141279 - RNA, 22 nt, Human
ucuggagagucacagugccaga

SEQ ID NO: 141280 - RNA, 22 nt, Human
aggcucuguuauucuagagggc

SEQ ID NO: 141281 - RNA, 22 nt, Human
cugagaaggaagccuccacucu

SEQ ID NO: 141282 - RNA, 22 nt, Human
accaggcuggagugcaguggcg

SEQ ID NO: 141283 - RNA, 22 nt, Human
gccucuggucccucaugcugug

SEQ ID NO: 141284 - RNA, 22 nt, Human
guuuuauuggaacacagccaug

SEQ ID NO: 141285 - RNA, 22 nt, Human
gagaugaauguaaacaaaggca

SEQ ID NO: 141286 - RNA, 16 nt, Human
cagaguguaaacagga

SEQ ID NO: 141287 - RNA, 22 nt, Human
ugggcugcacccucagccucug

SEQ ID NO: 141288 - RNA, 22 nt, Human
ucaaucacguguuccauguucu

SEQ ID NO: 141289 - RNA, 17 nt, Human
gagagcugcugcuuccg

SEQ ID NO: 141290 - RNA, 22 nt, Human
uauuucagggagaauaaauuug

SEQ ID NO: 141291 - RNA, 22 nt, Human
gcaggauggugcccuuucugcc

SEQ ID NO: 141292 - RNA, 22 nt, Human
cccagacuccucuggcuggugg

SEQ ID NO: 141293 - RNA, 22 nt, Human
cagaggcugaugugggaugggc

SEQ ID NO: 141294 - RNA, 22 nt, Human
uucuuuaccagugaaauguuau

SEQ ID NO: 141295 - RNA, 22 nt, Human
gugguaaucggauucuuaccgg

SEQ ID NO: 141296 - RNA, 22 nt, Human
guccucugcccaggucaagguu

SEQ ID NO: 141297 - RNA, 22 nt, Human
uuuauuauagugguggggacug

SEQ ID NO: 141298 - RNA, 22 nt, Human
uauuuuacagacuacuuuagau

SEQ ID NO: 141299 - RNA, 22 nt, Human
cagggcucaucugugugaccag

SEQ ID NO: 141300 - RNA, 22 nt, Human
gaguccaguuguucacagaggc

SEQ ID NO: 141301 - RNA, 22 nt, Human
caggccugagacaucugagaua

SEQ ID NO: 141302 - RNA, 21 nt, Human
acagaguaguugaaacagaga

SEQ ID NO: 141303 - RNA, 22 nt, Human
cauuuagacauuugauuugggg

SEQ ID NO: 141304 - RNA, 22 nt, Human
agacuuugagcucuuagagaag

SEQ ID NO: 141305 - RNA, 22 nt, Human
ggaaggucgagcugcaucuggc

SEQ ID NO: 141306 - RNA, 22 nt, Human
aucaggaugacaacugcugggu

SEQ ID NO: 141307 - RNA, 22 nt, Human
cugccagcacugccuccugagg

SEQ ID NO: 141308 - RNA, 22 nt, Human
auacaacagaaaaugauuauuc

SEQ ID NO: 141309 - RNA, 20 nt, Human
acagaauaugcugguugugg

SEQ ID NO: 141310 - RNA, 22 nt, Human
cugaaggagguagagugacaua

SEQ ID NO: 141311 - RNA, 22 nt, Human
ucacaggagggagagacaccca

SEQ ID NO: 141312 - RNA, 22 nt, Human
auggcagcaaaugucuggcugg

SEQ ID NO: 141313 - RNA, 22 nt, Human
uuuuccagauuggacuuagucc

SEQ ID NO: 141314 - RNA, 22 nt, Human
uacaaaguuugggguccucaaa

SEQ ID NO: 141315 - RNA, 22 nt, Human
agaggccaugcuagaggccugg

SEQ ID NO: 141316 - RNA, 22 nt, Human
cccagcaggcauguugggagga

SEQ ID NO: 141317 - RNA, 22 nt, Human
gcagauggacuguaugaccuga

SEQ ID NO: 141318 - RNA, 22 nt, Human
gggccuguguguucaggagccu

SEQ ID NO: 141319 - RNA, 22 nt, Human
aggcccaguagugcugccuuua

SEQ ID NO: 141320 - RNA, 22 nt, Human
auguacauuuagaucauuucug

SEQ ID NO: 141321 - RNA, 22 nt, Human
aggcagaggagaaugaucuucc

SEQ ID NO: 141322 - RNA, 20 nt, Human
aggaaaaggguggugguaga

SEQ ID NO: 141323 - RNA, 22 nt, Human
gccagacacuccccugggcagg

SEQ ID NO: 141324 - RNA, 22 nt, Human
uucugucucuguguuuacauua

SEQ ID NO: 141325 - RNA, 22 nt, Human
ucacugcagagaccucuaguca

SEQ ID NO: 141326 - RNA, 22 nt, Human
gcuuuccuggcccugucccugc

SEQ ID NO: 141327 - RNA, 22 nt, Human
aaucaguuguucacucugaaaa

SEQ ID NO: 141328 - RNA, 22 nt, Human
gcuggagcugaguucccugggc

SEQ ID NO: 141329 - RNA, 22 nt, Human
guaaaugugcuucuuuuaacuu

SEQ ID NO: 141330 - RNA, 22 nt, Human
aauuucaauuacuuuugcacca

SEQ ID NO: 141331 - RNA, 22 nt, Human
agaugcugccucuccucacaag

SEQ ID NO: 141332 - RNA, 22 nt, Human
acagagcuucccagccugagca

SEQ ID NO: 141333 - RNA, 22 nt, Human
cuggagccuucaccaggggaaa

SEQ ID NO: 141334 - RNA, 22 nt, Human
aggagaguaccauugggccgca

SEQ ID NO: 141335 - RNA, 22 nt, Human
ugagccugaguucaaggcugca

SEQ ID NO: 141336 - RNA, 23 nt, Human
uccagcagagccuuccaggaggg

SEQ ID NO: 141337 - RNA, 22 nt, Human
ggagagagaugccgccuugcuc

SEQ ID NO: 141338 - RNA, 22 nt, Human
auauauuuuuugagacagaguc

SEQ ID NO: 141339 - RNA, 21 nt, Human
aguucauacugaguaacaaaa

SEQ ID NO: 141340 - RNA, 22 nt, Human
gccuggagggcucuagagaggc

SEQ ID NO: 141341 - RNA, 22 nt, Human
agcugugugugcuugggauuau

SEQ ID NO: 141342 - RNA, 22 nt, Human
cuugccuucuuuuccuauagaa

SEQ ID NO: 141343 - RNA, 22 nt, Human
ccuuucucauuuuaagcauuag

SEQ ID NO: 141344 - RNA, 22 nt, Human
agggagagguugaaaccucagu

SEQ ID NO: 141345 - RNA, 15 nt, Human
aaucuggcggcaagu

SEQ ID NO: 141346 - RNA, 22 nt, Human
acauuaucccuggcacaacugc

SEQ ID NO: 141347 - RNA, 22 nt, Human
aggagcugggcugcugcuggga

SEQ ID NO: 141348 - RNA, 22 nt, Human
uaacaguauccccauuugcaag

SEQ ID NO: 141349 - RNA, 22 nt, Human
ccucaggaaccacauugcugcu

SEQ ID NO: 141350 - RNA, 22 nt, Human
agggcagcacaaggcauggacu

SEQ ID NO: 141351 - RNA, 21 nt, Human
uuccagagauuguuucaccug

SEQ ID NO: 141352 - RNA, 19 nt, Human
uuucucucccucaucccga

SEQ ID NO: 141353 - RNA, 22 nt, Human
uguaccuuuuucugugcaugcu

SEQ ID NO: 141354 - RNA, 19 nt, Human
uugcauuguaguuggacug

SEQ ID NO: 141355 - RNA, 22 nt, Human
aaaaacuguaauuacuuuugca

SEQ ID NO: 141356 - RNA, 22 nt, Human
agcugcagauucuaucuagaag

SEQ ID NO: 141357 - RNA, 22 nt, Human
guggcccugucccaggccuccu

SEQ ID NO: 141358 - RNA, 22 nt, Human
ggcugccugaacuuuggggaaa

SEQ ID NO: 141359 - RNA, 22 nt, Human
uuucacaguagaaaucauuaug

SEQ ID NO: 141360 - RNA, 22 nt, Human
cagacagaaggcuccuugaggu

SEQ ID NO: 141361 - RNA, 22 nt, Human
agcaggugacagggcuguggug

SEQ ID NO: 141362 - RNA, 22 nt, Human
aagauuucagaguuugggggaa

SEQ ID NO: 141363 - RNA, 22 nt, Human
ugcagaccucccauggcugccu

SEQ ID NO: 141364 - RNA, 21 nt, Human
cuuuuacauucagucaugaug

SEQ ID NO: 141365 - RNA, 22 nt, Human
aaaguguugauaugugacaucc

SEQ ID NO: 141366 - RNA, 22 nt, Human
cugacucuccucaagcauaaau

SEQ ID NO: 141367 - RNA, 22 nt, Human
aucuggcucgcuaggcucuggg

SEQ ID NO: 141368 - RNA, 23 nt, Human
acagagguccaaacaguauaagc

SEQ ID NO: 141369 - RNA, 22 nt, Human
ccagcugcaggggagcagugga

SEQ ID NO: 141370 - RNA, 22 nt, Human
aaauuuaagaagugugugcgug

SEQ ID NO: 141371 - RNA, 21 nt, Human
gccaccucgucucggagcagc

SEQ ID NO: 141372 - RNA, 22 nt, Human
cccagccucagcuuuacuucca

SEQ ID NO: 141373 - RNA, 20 nt, Human
aagcagaagcugcucucagc

SEQ ID NO: 141374 - RNA, 22 nt, Human
agaagcugacagaugcagcagg

SEQ ID NO: 141375 - RNA, 22 nt, Human
aaggcagcccuggcucagccug

SEQ ID NO: 141376 - RNA, 22 nt, Human
cugaggcugcccagggccaggu

SEQ ID NO: 141377 - RNA, 22 nt, Human
gcugucacucuccggccuuccc

SEQ ID NO: 141378 - RNA, 22 nt, Human
agaggccaucugcucugugggg

SEQ ID NO: 141379 - RNA, 22 nt, Human
caguggcgugaucucugcucac

SEQ ID NO: 141380 - RNA, 22 nt, Human
ucucagagcucacaccuccugg

SEQ ID NO: 141381 - RNA, 22 nt, Human
gcagggacaucuuugucuagua

SEQ ID NO: 141382 - RNA, 21 nt, Human
uacuguauagauguguucuug

SEQ ID NO: 141383 - RNA, 22 nt, Human
cuucuaggcuucucagggggca

SEQ ID NO: 141384 - RNA, 22 nt, Human
uguacaauagcuauuaucucca

SEQ ID NO: 141385 - RNA, 22 nt, Human
aguguguacauuuggugcaguu

SEQ ID NO: 141386 - RNA, 22 nt, Human
acaggggcuccgaaggugaggg

SEQ ID NO: 141387 - RNA, 22 nt, Human
agccccaggcccggacgccucu

SEQ ID NO: 141388 - RNA, 22 nt, Human
uaauuauucuagucacauagca

SEQ ID NO: 141389 - RNA, 22 nt, Human
ccugcugugaaacuggcauaug

SEQ ID NO: 141390 - RNA, 22 nt, Human
caguucuuaauaccaugugguu

SEQ ID NO: 141391 - RNA, 22 nt, Human
gcaaggcugcugccacccaucu

SEQ ID NO: 141392 - RNA, 22 nt, Human
guggauggacaugggcaagagg

SEQ ID NO: 141393 - RNA, 22 nt, Human
gcugccaguaguuggagcucca

SEQ ID NO: 141394 - RNA, 22 nt, Human
acaacauuauacauagaaagcu

SEQ ID NO: 141395 - RNA, 22 nt, Human
ccccuuccaggaagcagaaucg

SEQ ID NO: 141396 - RNA, 22 nt, Human
uuucaaauaccauaaaccuaau

SEQ ID NO: 141397 - RNA, 22 nt, Human
cugccgagugggucaugaggca

SEQ ID NO: 141398 - RNA, 22 nt, Human
agguggagaagagaugggcagu

SEQ ID NO: 141399 - RNA, 23 nt, Human
uguggcugagaaauugacaacuu

SEQ ID NO: 141400 - RNA, 22 nt, Human
ccuggcagguggcgcccucggc

SEQ ID NO: 141401 - RNA, 22 nt, Human
uggcagggaauacagauguuua

SEQ ID NO: 141402 - RNA, 22 nt, Human
gggcucugguacuuccuggcuc

SEQ ID NO: 141403 - RNA, 22 nt, Human
cuuaacagauacaucugugguu

SEQ ID NO: 141404 - RNA, 22 nt, Human
cgucccaguuccagccgcgcug

SEQ ID NO: 141405 - RNA, 22 nt, Human
auguccuucuccucuuaccugc

SEQ ID NO: 141406 - RNA, 22 nt, Human
uaaggccagcaugaaugcagca

SEQ ID NO: 141407 - RNA, 22 nt, Human
uauguuuuucaagugcacacua

SEQ ID NO: 141408 - RNA, 22 nt, Human
cuggccucaccucagacuuacu

SEQ ID NO: 141409 - RNA, 22 nt, Human
uguuccaugucuuuguaggacu

SEQ ID NO: 141410 - RNA, 17 nt, Human
cuuuuaauuuacuuccc

SEQ ID NO: 141411 - RNA, 22 nt, Human
aguggcagagguugacugcagu

SEQ ID NO: 141412 - RNA, 22 nt, Human
agagaugucgccuugcccaggg

SEQ ID NO: 141413 - RNA, 21 nt, Human
agcuuguguguaucacagugu

SEQ ID NO: 141414 - RNA, 22 nt, Human
agccaggauggucucgaucggc

SEQ ID NO: 141415 - RNA, 22 nt, Human
agccccugggaguagcugcugc

SEQ ID NO: 141416 - RNA, 22 nt, Human
aggagcccugcgggaggcagag

SEQ ID NO: 141417 - RNA, 22 nt, Human
ggcugugauugguggaugugaa

SEQ ID NO: 141418 - RNA, 22 nt, Human
ggucccagcuggucacugucag

SEQ ID NO: 141419 - RNA, 22 nt, Human
ugugugugcacaugcauauaca

SEQ ID NO: 141420 - RNA, 22 nt, Human
gcagcuggagcaucuucucauc

SEQ ID NO: 141421 - RNA, 17 nt, Human
cccagagaugcugccuu

SEQ ID NO: 141422 - RNA, 22 nt, Human
cagagcaguaaaucuggggcac

SEQ ID NO: 141423 - RNA, 22 nt, Human
gcugggaggaucucucccuguc

SEQ ID NO: 141424 - RNA, 23 nt, Human
ucuuuccucagcacacaccaaga

SEQ ID NO: 141425 - RNA, 22 nt, Human
agcugccaccucugccuuuggg

SEQ ID NO: 141426 - RNA, 22 nt, Human
uucaagauccagcacaacagug

SEQ ID NO: 141427 - RNA, 22 nt, Human
cuguggcucuuuaguugagcac

SEQ ID NO: 141428 - RNA, 22 nt, Human
gagugugucggucagcguggcg

SEQ ID NO: 141429 - RNA, 22 nt, Human
agcagaaccugcagaccugucu

SEQ ID NO: 141430 - RNA, 22 nt, Human
ucuagaaacaugacauugaucu

SEQ ID NO: 141431 - RNA, 22 nt, Human
caagaaauuucuuaagaacuaa

SEQ ID NO: 141432 - RNA, 22 nt, Human
uuggccuucccuaccugggcca

SEQ ID NO: 141433 - RNA, 22 nt, Human
cauuuguuuagaagucuuuaua

SEQ ID NO: 141434 - RNA, 22 nt, Human
cagaccagaaggaagccgacaa

SEQ ID NO: 141435 - RNA, 22 nt, Human
cagaguguuagcgcugguuggg

SEQ ID NO: 141436 - RNA, 22 nt, Human
aaguuacaggagaaagagauca

SEQ ID NO: 141437 - RNA, 22 nt, Human
ccagcuccccucagcagguaau

SEQ ID NO: 141438 - RNA, 22 nt, Human
caaaugcuaacuucuuuccaaa

SEQ ID NO: 141439 - RNA, 19 nt, Human
ucauucaggaccaguggau

SEQ ID NO: 141440 - RNA, 22 nt, Human
uacaaguagcucagguuuucug

SEQ ID NO: 141441 - RNA, 22 nt, Human
gcugcagcuuuaggauccagug

SEQ ID NO: 141442 - RNA, 22 nt, Human
agcagggccucuggcacugguc

SEQ ID NO: 141443 - RNA, 22 nt, Human
ggcaggguggcccuccagugag

SEQ ID NO: 141444 - RNA, 20 nt, Human
gugcuucagaagccauugcu

SEQ ID NO: 141445 - RNA, 22 nt, Human
ugaagccaucaggaagccagca

SEQ ID NO: 141446 - RNA, 22 nt, Human
agggccugcaucaggagcuugg

SEQ ID NO: 141447 - RNA, 22 nt, Human
ggcugccagugagugcagaccg

SEQ ID NO: 141448 - RNA, 22 nt, Human
gcucucuggguggugggcaaca

SEQ ID NO: 141449 - RNA, 22 nt, Human
aguguaugaacuuaagagagag

SEQ ID NO: 141450 - RNA, 22 nt, Human
aguauguagugcaaucagucag

SEQ ID NO: 141451 - RNA, 22 nt, Human
ccuccagguguuacauaugacu

SEQ ID NO: 141452 - RNA, 22 nt, Human
gccuucugauaucucuuggcau

SEQ ID NO: 141453 - RNA, 22 nt, Human
aaaguuugagugauuugacaca

SEQ ID NO: 141454 - RNA, 22 nt, Human
aaauguguuuagaugguuuauu

SEQ ID NO: 141455 - RNA, 21 nt, Human
cuccugggcuaagauauagug

SEQ ID NO: 141456 - RNA, 22 nt, Human
gcuggccugcgagggcaggcug

SEQ ID NO: 141457 - RNA, 22 nt, Human
aaaggccacacagagcagggag

SEQ ID NO: 141458 - RNA, 22 nt, Human
aucaggauuacacggggaugcu

SEQ ID NO: 141459 - RNA, 22 nt, Human
cugagcugggcucucuugaggg

SEQ ID NO: 141460 - RNA, 21 nt, Human
auacuuugaauuacagccuug

SEQ ID NO: 141461 - RNA, 22 nt, Human
cacagcuucugagugaggauuu

SEQ ID NO: 141462 - RNA, 22 nt, Human
ggcagccuccagggcacuggug

SEQ ID NO: 141463 - RNA, 22 nt, Human
gcagccuguuguaccagccugu

SEQ ID NO: 141464 - RNA, 22 nt, Human
caaaugcagucccuuuguugcu

SEQ ID NO: 141465 - RNA, 22 nt, Human
acagggucauuuuaugaucugu

SEQ ID NO: 141466 - RNA, 22 nt, Human
gacagcauggugucuguucagg

SEQ ID NO: 141467 - RNA, 22 nt, Human
gccucugccaagggggcugcgg

SEQ ID NO: 141468 - RNA, 22 nt, Human
ucugucugacaggguaugaacu

SEQ ID NO: 141469 - RNA, 19 nt, Human
gcauuucucuuuacagcca

SEQ ID NO: 141470 - RNA, 22 nt, Human
agucccagcuacucaagaggcu

SEQ ID NO: 141471 - RNA, 22 nt, Human
uauuucuuucagguauguguug

SEQ ID NO: 141472 - RNA, 22 nt, Human
aacucaguuacauauuagaaua

SEQ ID NO: 141473 - RNA, 22 nt, Human
uuuaaauaggacuccugggggu

SEQ ID NO: 141474 - RNA, 22 nt, Human
agagcuggccagggaucacucu

SEQ ID NO: 141475 - RNA, 18 nt, Human
ugagagugugugcucuug

SEQ ID NO: 141476 - RNA, 22 nt, Human
accugagaaugggggcaugugu

SEQ ID NO: 141477 - RNA, 22 nt, Human
guugacagcuggugagcugcua

SEQ ID NO: 141478 - RNA, 22 nt, Human
aacucaguucuuuccacaaugc

SEQ ID NO: 141479 - RNA, 22 nt, Human
auguccuuugcuucucuggucc

SEQ ID NO: 141480 - RNA, 22 nt, Human
ggcuguccuuggccaaggcacu

SEQ ID NO: 141481 - RNA, 22 nt, Human
uguggcugugccgucacacgug

SEQ ID NO: 141482 - RNA, 19 nt, Human
cuguccuuggcugcacugu

SEQ ID NO: 141483 - RNA, 22 nt, Human
gggcugcuuuuuucuuagcaga

SEQ ID NO: 141484 - RNA, 22 nt, Human
agcucccagaguccucugccca

SEQ ID NO: 141485 - RNA, 22 nt, Human
cugagccacugcuuguucagug

SEQ ID NO: 141486 - RNA, 21 nt, Human
ugcagcagaguaagcagggga

SEQ ID NO: 141487 - RNA, 22 nt, Human
gcuguguugggaaucauguggg

SEQ ID NO: 141488 - RNA, 22 nt, Human
gggcugcuguagagaacauguu

SEQ ID NO: 141489 - RNA, 22 nt, Human
ggcagcuccuccuagucugccc

SEQ ID NO: 141490 - RNA, 22 nt, Human
uggccaggggaguuccccucca

SEQ ID NO: 141491 - RNA, 22 nt, Human
aaaucacuaaguuauagugugg

SEQ ID NO: 141492 - RNA, 22 nt, Human
uugcauugcuuggucuucaaga

SEQ ID NO: 141493 - RNA, 22 nt, Human
agugguaacuaaguccugcuua

SEQ ID NO: 141494 - RNA, 22 nt, Human
agcagcauggaugggccucagc

SEQ ID NO: 141495 - RNA, 22 nt, Human
caaggccaugagcagcgagugu

SEQ ID NO: 141496 - RNA, 22 nt, Human
gaggagcuggcagcgucuccgc

SEQ ID NO: 141497 - RNA, 22 nt, Human
uggccugcccagagcagcucug

SEQ ID NO: 141498 - RNA, 22 nt, Human
uuggcugagagaggaaaagggc

SEQ ID NO: 141499 - RNA, 22 nt, Human
uguguuuugaacucaucuacug

SEQ ID NO: 141500 - RNA, 22 nt, Human
aaucuguuuaguucugcguaug

SEQ ID NO: 141501 - RNA, 22 nt, Human
uuuacgagugcuaaugauauug

SEQ ID NO: 141502 - RNA, 22 nt, Human
cuaaaugccuuuccuaccuaac

SEQ ID NO: 141503 - RNA, 22 nt, Human
aagggccauaacuugcaguguu

SEQ ID NO: 141504 - RNA, 22 nt, Human
ucucagagaggggccgggccuu

SEQ ID NO: 141505 - RNA, 20 nt, Human
cguaaggcaagugcugcauc

SEQ ID NO: 141506 - RNA, 22 nt, Human
ugauuucccucaucauaacaga

SEQ ID NO: 141507 - RNA, 22 nt, Human
agcaggaggguuuuguagaguc

SEQ ID NO: 141508 - RNA, 22 nt, Human
gacucagugauuugacaugccu

SEQ ID NO: 141509 - RNA, 22 nt, Human
caaauacuggguaaguuaauuu

SEQ ID NO: 141510 - RNA, 23 nt, Human
gcagaggagcaagcuggacacca

SEQ ID NO: 141511 - RNA, 22 nt, Human
ggcugcuggcagauguaguuua

SEQ ID NO: 141512 - RNA, 22 nt, Human
cacugaagccugggaguaagac

SEQ ID NO: 141513 - RNA, 22 nt, Human
gccuuggccuuccuaggccuga

SEQ ID NO: 141514 - RNA, 22 nt, Human
agaccaagacuauaaugagagg

SEQ ID NO: 141515 - RNA, 22 nt, Human
ugucacagggauaccauggggc

SEQ ID NO: 141516 - RNA, 22 nt, Human
gcccagcaccucucucaggguu

SEQ ID NO: 141517 - RNA, 22 nt, Human
ugccucuguugagccuuggcug

SEQ ID NO: 141518 - RNA, 22 nt, Human
ccaggagcauuaagagaacaua

SEQ ID NO: 141519 - RNA, 22 nt, Human
gccuggagacagcagaggcggc

SEQ ID NO: 141520 - RNA, 22 nt, Human
ugucccaggcugaaguacagug

SEQ ID NO: 141521 - RNA, 22 nt, Human
ugucucuccacacagccagugc

SEQ ID NO: 141522 - RNA, 22 nt, Human
gcugccugaagugucuacacug

SEQ ID NO: 141523 - RNA, 22 nt, Human
gucccuggaucugggacagcug

SEQ ID NO: 141524 - RNA, 22 nt, Human
ggccagggggcuucagacucca

SEQ ID NO: 141525 - RNA, 22 nt, Human
ccagagccucgcccggagccuc

SEQ ID NO: 141526 - RNA, 22 nt, Human
ccucccacuucuugcugagguc

SEQ ID NO: 141527 - RNA, 22 nt, Human
caagaugugccuaaucagaccu

SEQ ID NO: 141528 - RNA, 22 nt, Human
gggugcugacuggggccugaaa

SEQ ID NO: 141529 - RNA, 22 nt, Human
uuuuagaaauacugauuuagug

SEQ ID NO: 141530 - RNA, 22 nt, Human
uggcugcucaagggaggaggcu

SEQ ID NO: 141531 - RNA, 22 nt, Human
gccugggagugcacagugaggu

SEQ ID NO: 141532 - RNA, 22 nt, Human
uugcauugaucccagcuugggc

SEQ ID NO: 141533 - RNA, 22 nt, Human
gagcagggagacaacucuggug

SEQ ID NO: 141534 - RNA, 22 nt, Human
cccagcuccgagcuccgagccg

SEQ ID NO: 141535 - RNA, 22 nt, Human
cuggggcucucuggaaugcuug

SEQ ID NO: 141536 - RNA, 22 nt, Human
cuacauuuguucuauagcuuuu

SEQ ID NO: 141537 - RNA, 18 nt, Human
acucaggaaaugaugaca

SEQ ID NO: 141538 - RNA, 22 nt, Human
ggccagaggugguacauagcuu

SEQ ID NO: 141539 - RNA, 22 nt, Human
agaaaagguugaaaguaggauu

SEQ ID NO: 141540 - RNA, 22 nt, Human
uuuacagggaauauuuuggcuu

SEQ ID NO: 141541 - RNA, 22 nt, Human
ucagcaggcgguuccuuguggg

SEQ ID NO: 141542 - RNA, 22 nt, Human
ccucugaguccucccugguugc

SEQ ID NO: 141543 - RNA, 22 nt, Human
ugggccuguugccugaguccau

SEQ ID NO: 141544 - RNA, 22 nt, Human
ugagagagccugaaucucuuac

SEQ ID NO: 141545 - RNA, 23 nt, Human
cuggcucauccugguugcagugg

SEQ ID NO: 141546 - RNA, 22 nt, Human
gcuggagguuucaccugaguuu

SEQ ID NO: 141547 - RNA, 22 nt, Human
aaugaugggaaggagaaaagca

SEQ ID NO: 141548 - RNA, 22 nt, Human
gcaguggggaaugcuggggaga

SEQ ID NO: 141549 - RNA, 22 nt, Human
cauucauuuacuuucaacagcu

SEQ ID NO: 141550 - RNA, 22 nt, Human
acauugaugaaaagguaucauu

SEQ ID NO: 141551 - RNA, 22 nt, Human
ugcagugguguccagguguacu

SEQ ID NO: 141552 - RNA, 22 nt, Human
ccagcagcuuuauuggcucucc

SEQ ID NO: 141553 - RNA, 22 nt, Human
aaacaugagcaucucuucaagc

SEQ ID NO: 141554 - RNA, 22 nt, Human
ggccugaggcaauagucagaca

SEQ ID NO: 141555 - RNA, 22 nt, Human
gcugugugaccugggcaagucu

SEQ ID NO: 141556 - RNA, 22 nt, Human
ggagccuggccuggcucugugu

SEQ ID NO: 141557 - RNA, 22 nt, Human
uagcagcuuaaguaauuagaau

SEQ ID NO: 141558 - RNA, 22 nt, Human
cccagcucuuuuagcggcaucu

SEQ ID NO: 141559 - RNA, 22 nt, Human
ccauaagguugaaaacuguaca

SEQ ID NO: 141560 - RNA, 22 nt, Human
gugugauaacagggcaugacgg

SEQ ID NO: 141561 - RNA, 22 nt, Human
aaguuucauguggagguagacu

SEQ ID NO: 141562 - RNA, 22 nt, Human
aaggcacugagccagccgucuc

SEQ ID NO: 141563 - RNA, 23 nt, Human
cacaccaggagccgucugggcca

SEQ ID NO: 141564 - RNA, 22 nt, Human
caggcugggcagccuccccggc

SEQ ID NO: 141565 - RNA, 22 nt, Human
guggcuucacauggcauuuggc

SEQ ID NO: 141566 - RNA, 22 nt, Human
acauuucuucccuuuagcagaa

SEQ ID NO: 141567 - RNA, 21 nt, Human
uggcugccuacaugcugcagg

SEQ ID NO: 141568 - RNA, 22 nt, Human
aagggcaggcacccacccucac

SEQ ID NO: 141569 - RNA, 22 nt, Human
ccuggagcucacugggagccgg

SEQ ID NO: 141570 - RNA, 22 nt, Human
cugcucugcagcuuggacuccc

SEQ ID NO: 141571 - RNA, 22 nt, Human
cagguggcaugacugccuacaa

SEQ ID NO: 141572 - RNA, 22 nt, Human
gcuguguuggugaagcuguagc

SEQ ID NO: 141573 - RNA, 22 nt, Human
agggcagcucucaccucuggcc

SEQ ID NO: 141574 - RNA, 22 nt, Human
uuugucagucaugucugcuuuu

SEQ ID NO: 141575 - RNA, 22 nt, Human
acagagcacauagauuggaguu

SEQ ID NO: 141576 - RNA, 22 nt, Human
gggcagcagagcccugccgagu

SEQ ID NO: 141577 - RNA, 22 nt, Human
gcaugucaugucauguaggaau

SEQ ID NO: 141578 - RNA, 22 nt, Human
cucuguguauccaaguucaggu

SEQ ID NO: 141579 - RNA, 22 nt, Human
cagagguaccagcagccucugg

SEQ ID NO: 141580 - RNA, 22 nt, Human
gagacagaguuucacucuuguu

SEQ ID NO: 141581 - RNA, 22 nt, Human
ggacagaggguugacagaguau

SEQ ID NO: 141582 - RNA, 22 nt, Human
agcugugugacucuaagcaagu

SEQ ID NO: 141583 - RNA, 17 nt, Human
agugugugaaauggugg

SEQ ID NO: 141584 - RNA, 22 nt, Human
cagcagugcuucagugugagau

SEQ ID NO: 141585 - RNA, 22 nt, Human
ucccagagacaucauuucuccg

SEQ ID NO: 141586 - RNA, 21 nt, Human
gcucuuggaaggggcucagcu

SEQ ID NO: 141587 - RNA, 19 nt, Human
ugggccugcaucugggucu

SEQ ID NO: 141588 - RNA, 19 nt, Human
uuuagcuuacguuucauug

SEQ ID NO: 141589 - RNA, 22 nt, Human
auuguaucuugucauuaugcau

SEQ ID NO: 141590 - RNA, 22 nt, Human
ugucagugaguuaguugcaagu

SEQ ID NO: 141591 - RNA, 22 nt, Human
caaggcaggcaguucacuugag

SEQ ID NO: 141592 - RNA, 22 nt, Human
gcuggccauauauuuugcuguu

SEQ ID NO: 141593 - RNA, 22 nt, Human
agggcagagaucugagugggca

SEQ ID NO: 141594 - RNA, 22 nt, Human
uaugcgugccucugucugucug

SEQ ID NO: 141595 - RNA, 22 nt, Human
ggccucuguucugcauuccucc

SEQ ID NO: 141596 - RNA, 22 nt, Human
ggccugcucugcagccucuaca

SEQ ID NO: 141597 - RNA, 22 nt, Human
agagauucauguuuacuguagg

SEQ ID NO: 141598 - RNA, 19 nt, Human
uagaaugcccacuuaaaaa

SEQ ID NO: 141599 - RNA, 22 nt, Human
uggcccugcagaacuagccugg

SEQ ID NO: 141600 - RNA, 22 nt, Human
aucauuuuauggcugagaggac

SEQ ID NO: 141601 - RNA, 21 nt, Human
acagucuccccagaucucucc

SEQ ID NO: 141602 - RNA, 22 nt, Human
cuuguggcccauggcuuccugc

SEQ ID NO: 141603 - RNA, 22 nt, Human
ucacuugccuagcccaguucag

SEQ ID NO: 141604 - RNA, 20 nt, Human
acaaaugcauucugugacau

SEQ ID NO: 141605 - RNA, 19 nt, Human
agacacacuugauaugugu

SEQ ID NO: 141606 - RNA, 22 nt, Human
gccucuggggcagcugagucau

SEQ ID NO: 141607 - RNA, 23 nt, Human
aaguaacagggauaauagcaguu

SEQ ID NO: 141608 - RNA, 22 nt, Human
aucagcaaucucguguauuagg

SEQ ID NO: 141609 - RNA, 23 nt, Human
auguuauuauuagcagucuugcc

SEQ ID NO: 141610 - RNA, 23 nt, Human
acagcugcaccuggccgccuggc

SEQ ID NO: 141611 - RNA, 22 nt, Human
ggugaguugggguucacagguc

SEQ ID NO: 141612 - RNA, 20 nt, Human
gcagcugaaaguaugacacc

SEQ ID NO: 141613 - RNA, 22 nt, Human
uucuuuacaguggguuuugaau

SEQ ID NO: 141614 - RNA, 22 nt, Human
augaagcugguuuuggcuuggg

SEQ ID NO: 141615 - RNA, 20 nt, Human
cuguggaauuuuaccaugcg

SEQ ID NO: 141616 - RNA, 22 nt, Human
uacuuuuugucucuuugaaugu

SEQ ID NO: 141617 - RNA, 23 nt, Human
gggcugcuccaggccaaggcugg

SEQ ID NO: 141618 - RNA, 22 nt, Human
acugagcugcaagucagggagg

SEQ ID NO: 141619 - RNA, 19 nt, Human
agccagggugagaaggagc

SEQ ID NO: 141620 - RNA, 22 nt, Human
cucugagaggugagaagcagca

SEQ ID NO: 141621 - RNA, 22 nt, Human
auguggcuaguccucugcggca

SEQ ID NO: 141622 - RNA, 22 nt, Human
acagagaaagugggcugaagau

SEQ ID NO: 141623 - RNA, 20 nt, Human
cuccagggaacagacuggag

SEQ ID NO: 141624 - RNA, 22 nt, Human
aggagccuccuucucaugugca

SEQ ID NO: 141625 - RNA, 22 nt, Human
auaucuucuuuauuuugugagg

SEQ ID NO: 141626 - RNA, 22 nt, Human
ucuggcucuauaacuccuagcu

SEQ ID NO: 141627 - RNA, 22 nt, Human
guuccuauauagccuuaaggau

SEQ ID NO: 141628 - RNA, 22 nt, Human
gcuguguccucacacagccuuu

SEQ ID NO: 141629 - RNA, 22 nt, Human
ggcaggcuggcuuuguuccagg

SEQ ID NO: 141630 - RNA, 22 nt, Human
ggggccugcgagguucaacuuc

SEQ ID NO: 141631 - RNA, 22 nt, Human
ggguccagaguugaagagguua

SEQ ID NO: 141632 - RNA, 22 nt, Human
caggauccccaggucgccgucc

SEQ ID NO: 141633 - RNA, 22 nt, Human
cacucugacuggcccugcagga

SEQ ID NO: 141634 - RNA, 22 nt, Human
ggcucugcagugacuugagggg

SEQ ID NO: 141635 - RNA, 22 nt, Human
uggaaggggagcuggaaagggg

SEQ ID NO: 141636 - RNA, 22 nt, Human
caggugcugcguggcggagcug

SEQ ID NO: 141637 - RNA, 22 nt, Human
aguggcuguccuggcucuaacu

SEQ ID NO: 141638 - RNA, 22 nt, Human
aucuggcucacuuagucuagga

SEQ ID NO: 141639 - RNA, 22 nt, Human
aguuuuuccugauuuuacagaa

SEQ ID NO: 141640 - RNA, 22 nt, Human
cugugcuggcagaccuggaguu

SEQ ID NO: 141641 - RNA, 22 nt, Human
guccucugaaguugugcaaugc

SEQ ID NO: 141642 - RNA, 22 nt, Human
uagacuuuccagccugcugcuu

SEQ ID NO: 141643 - RNA, 22 nt, Human
uccucugcuccaggcuggacuu

SEQ ID NO: 141644 - RNA, 22 nt, Human
acagguggccccgagggagugg

SEQ ID NO: 141645 - RNA, 22 nt, Human
gagacacaggugguuccuguca

SEQ ID NO: 141646 - RNA, 22 nt, Human
agugaccauuuucagcuagagg

SEQ ID NO: 141647 - RNA, 19 nt, Human
auucucugguuugcuggcu

SEQ ID NO: 141648 - RNA, 22 nt, Human
ggcugcucugccuuccagcugg

SEQ ID NO: 141649 - RNA, 22 nt, Human
aagccaggcaugcuuggacagu

SEQ ID NO: 141650 - RNA, 18 nt, Human
cagauccaggcagcuauu

SEQ ID NO: 141651 - RNA, 22 nt, Human
ccuuuacaguaugguuguauca

SEQ ID NO: 141652 - RNA, 22 nt, Human
uacauugugauguuucaauaca

SEQ ID NO: 141653 - RNA, 19 nt, Human
ugcucauggggacuucucc

SEQ ID NO: 141654 - RNA, 21 nt, Human
ucacaugcccauuacuggagc

SEQ ID NO: 141655 - RNA, 22 nt, Human
gggcacagaagucuaagacauc

SEQ ID NO: 141656 - RNA, 22 nt, Human
ucugggcacugcugagccugua

SEQ ID NO: 141657 - RNA, 22 nt, Human
auguguaggugaaucgaggcug

SEQ ID NO: 141658 - RNA, 22 nt, Human
gcaggagcagucaggggcagcu

SEQ ID NO: 141659 - RNA, 22 nt, Human
uaaaugugcacagguuagaagg

SEQ ID NO: 141660 - RNA, 22 nt, Human
ucaccaggcuggaaugcagugg

SEQ ID NO: 141661 - RNA, 22 nt, Human
uggcucagagccuugagagcug

SEQ ID NO: 141662 - RNA, 22 nt, Human
uuagaaagcuuuccauagucaa

SEQ ID NO: 141663 - RNA, 22 nt, Human
aguaggaggcgggagcaugaag

SEQ ID NO: 141664 - RNA, 22 nt, Human
aucuacagugcacaggacagcc

SEQ ID NO: 141665 - RNA, 22 nt, Human
gcuuccuagaucugugguacuc

SEQ ID NO: 141666 - RNA, 22 nt, Human
uucucucugugucauuauggac

SEQ ID NO: 141667 - RNA, 22 nt, Human
aaguaacaaugcuguugaauug

SEQ ID NO: 141668 - RNA, 22 nt, Human
uggcucaggauaauuuucccaa

SEQ ID NO: 141669 - RNA, 22 nt, Human
auagauacauuagguaacuugu

SEQ ID NO: 141670 - RNA, 23 nt, Human
gagcugggauacaggcuuacugc

SEQ ID NO: 141671 - RNA, 22 nt, Human
uggcugugugccaggcugucug

SEQ ID NO: 141672 - RNA, 23 nt, Human
ccaaagucgaagucuaguccaga

SEQ ID NO: 141673 - RNA, 22 nt, Human
cucagagucccuucccucgugg

SEQ ID NO: 141674 - RNA, 21 nt, Human
cagcaaaucauugggcagacu

SEQ ID NO: 141675 - RNA, 17 nt, Human
cccugccaccaggaagc

SEQ ID NO: 141676 - RNA, 22 nt, Human
gauccuugcaacucugugaggu

SEQ ID NO: 141677 - RNA, 22 nt, Human
caggcagaagaaguggaaggac

SEQ ID NO: 141678 - RNA, 22 nt, Human
ccugccugcaccuucucugggg

SEQ ID NO: 141679 - RNA, 22 nt, Human
ucuggcuccuggcuccacugcc

SEQ ID NO: 141680 - RNA, 22 nt, Human
aucaguuuugggggacauacug

SEQ ID NO: 141681 - RNA, 22 nt, Human
agucagcagccuggccaggaga

SEQ ID NO: 141682 - RNA, 23 nt, Human
agucaguguaaguuuggaaugca

SEQ ID NO: 141683 - RNA, 22 nt, Human
ucuccuggauggaccuucucuu

SEQ ID NO: 141684 - RNA, 22 nt, Human
ucaggauguuaauauagcauua

SEQ ID NO: 141685 - RNA, 22 nt, Human
uuugcauugcauacaaggaacu

SEQ ID NO: 141686 - RNA, 22 nt, Human
ccauggaguuccucuggucuau

SEQ ID NO: 141687 - RNA, 22 nt, Human
uggcugggugcuauccaguacu

SEQ ID NO: 141688 - RNA, 22 nt, Human
uccaugagcuagcuuuccaaag

SEQ ID NO: 141689 - RNA, 22 nt, Human
ccagcccuccuccaucagagga

SEQ ID NO: 141690 - RNA, 22 nt, Human
cuggcugcgucugcucugacag

SEQ ID NO: 141691 - RNA, 22 nt, Human
cuucagagugcagaagauuggg

SEQ ID NO: 141692 - RNA, 22 nt, Human
guccucuguguaggcugcagac

SEQ ID NO: 141693 - RNA, 22 nt, Human
ugggcuccagcaccugugcucu

SEQ ID NO: 141694 - RNA, 22 nt, Human
agcuugaguuuuggaugaagug

SEQ ID NO: 141695 - RNA, 22 nt, Human
agcugugucauccuggaaaaug

SEQ ID NO: 141696 - RNA, 22 nt, Human
ggcugggcugcugggucagagc

SEQ ID NO: 141697 - RNA, 22 nt, Human
aagguacaguuuuaagaauaag

SEQ ID NO: 141698 - RNA, 22 nt, Human
ggggauggugggaaggcaaucu

SEQ ID NO: 141699 - RNA, 22 nt, Human
gcuggcagggacagcugcgugu

SEQ ID NO: 141700 - RNA, 22 nt, Human
gagacacagagaggcuguguga

SEQ ID NO: 141701 - RNA, 22 nt, Human
ggucauuguucuuuucugugau

SEQ ID NO: 141702 - RNA, 22 nt, Human
cugggugguuuugaugugaauu

SEQ ID NO: 141703 - RNA, 22 nt, Human
aagauucucagagugaaagaau

SEQ ID NO: 141704 - RNA, 22 nt, Human
auaaagaggauguauuuacagc

SEQ ID NO: 141705 - RNA, 22 nt, Human
uuucucuuucaaucugcaguac

SEQ ID NO: 141706 - RNA, 22 nt, Human
cagcauggugccagugagucca

SEQ ID NO: 141707 - RNA, 22 nt, Human
ugcagcccuuccuuccucuggg

SEQ ID NO: 141708 - RNA, 22 nt, Human
aaggcacuguacuaguuaguua

SEQ ID NO: 141709 - RNA, 22 nt, Human
uggcagaaguucacuaguagcu

SEQ ID NO: 141710 - RNA, 22 nt, Human
gccuggaguuguggugaagcca

SEQ ID NO: 141711 - RNA, 22 nt, Human
cagaacauucacucauaugugg

SEQ ID NO: 141712 - RNA, 22 nt, Human
ccaaagucugcauuuuaacaug

SEQ ID NO: 141713 - RNA, 22 nt, Human
uugaagcaggaaaauuucuauu

SEQ ID NO: 141714 - RNA, 22 nt, Human
cagagccaacgccaccugccca

SEQ ID NO: 141715 - RNA, 21 nt, Human
ugcugccaucaugcagagaug

SEQ ID NO: 141716 - RNA, 22 nt, Human
ucugggagagcugcugucagag

SEQ ID NO: 141717 - RNA, 22 nt, Human
cauugcugugggcauuugcugc

SEQ ID NO: 141718 - RNA, 22 nt, Human
ugaauggucacugagcaucugu

SEQ ID NO: 141719 - RNA, 22 nt, Human
aguuauucauuuauucuguaca

SEQ ID NO: 141720 - RNA, 22 nt, Human
guucacaucacuucacugaacc

SEQ ID NO: 141721 - RNA, 22 nt, Human
cugggcacagcguugggcucuu

SEQ ID NO: 141722 - RNA, 22 nt, Human
agugacugacaccuguaauccc

SEQ ID NO: 141723 - RNA, 22 nt, Human
aaauaauguuaggccuuugcuc

SEQ ID NO: 141724 - RNA, 22 nt, Human
agugggcagcccaggaggucuu

SEQ ID NO: 141725 - RNA, 22 nt, Human
acucugagcaucccaagucuua

SEQ ID NO: 141726 - RNA, 22 nt, Human
cuuccucugcggcgccgggcgc

SEQ ID NO: 141727 - RNA, 22 nt, Human
aggcugugacuacgcagggaag

SEQ ID NO: 141728 - RNA, 22 nt, Human
uggcucagcgcggccuggucuu

SEQ ID NO: 141729 - RNA, 22 nt, Human
cugggaggauacacaagaucag

SEQ ID NO: 141730 - RNA, 22 nt, Human
gggcuguguacuaugaggaggg

SEQ ID NO: 141731 - RNA, 22 nt, Human
agcaggagagcagugcgugguc

SEQ ID NO: 141732 - RNA, 22 nt, Human
uuaaugcagaaaucaaacugac

SEQ ID NO: 141733 - RNA, 22 nt, Human
cuuuacagccccacuuccgggc

SEQ ID NO: 141734 - RNA, 22 nt, Human
gcguggugcugcccugcacaca

SEQ ID NO: 141735 - RNA, 22 nt, Human
ucucugugcaggaugcugaguu

SEQ ID NO: 141736 - RNA, 19 nt, Human
ccauggcaaugaucugaug

SEQ ID NO: 141737 - RNA, 22 nt, Human
augaggcaguacacacaaagcc

SEQ ID NO: 141738 - RNA, 22 nt, Human
uaguauauuuuguugcaauuca

SEQ ID NO: 141739 - RNA, 22 nt, Human
ggcagcaguggcugcuauuguc

SEQ ID NO: 141740 - RNA, 22 nt, Human
gucccagaugucuggaacuccc

SEQ ID NO: 141741 - RNA, 22 nt, Human
uaacuucuggaaaugcaucugc

SEQ ID NO: 141742 - RNA, 22 nt, Human
cagcaggaggcauggcuucccu

SEQ ID NO: 141743 - RNA, 22 nt, Human
agcaggcuccuuccuucucugg

SEQ ID NO: 141744 - RNA, 22 nt, Human
ugugcuucagguugucgccacg

SEQ ID NO: 141745 - RNA, 22 nt, Human
gggauggggggaagcguccaug

SEQ ID NO: 141746 - RNA, 22 nt, Human
auaacuuucuucacccuugcug

SEQ ID NO: 141747 - RNA, 16 nt, Human
ccacagggcaaggggc

SEQ ID NO: 141748 - RNA, 19 nt, Human
cugaagucuuuucagcugg

SEQ ID NO: 141749 - RNA, 22 nt, Human
ccagggcaggggcuggaguuca

SEQ ID NO: 141750 - RNA, 22 nt, Human
gcugaagcccacguggcuugua

SEQ ID NO: 141751 - RNA, 22 nt, Human
ggcagcaggagccaucugguag

SEQ ID NO: 141752 - RNA, 22 nt, Human
accaggggaugguuggcacugu

SEQ ID NO: 141753 - RNA, 19 nt, Human
aucugccuguuaucacaua

SEQ ID NO: 141754 - RNA, 22 nt, Human
aucuggcugacuuugugggaca

SEQ ID NO: 141755 - RNA, 22 nt, Human
ucuggccuauuucugucagauc

SEQ ID NO: 141756 - RNA, 22 nt, Human
gaaggcaggcuucugauuaggu

SEQ ID NO: 141757 - RNA, 19 nt, Human
aggcugugagggaggacuc

SEQ ID NO: 141758 - RNA, 20 nt, Human
uccucagaagacauuugggg

SEQ ID NO: 141759 - RNA, 22 nt, Human
gccuggcccagggcuccgcagg

SEQ ID NO: 141760 - RNA, 20 nt, Human
auauguguacguguauacau

SEQ ID NO: 141761 - RNA, 22 nt, Human
gcaguucuacuuauccauagac

SEQ ID NO: 141762 - RNA, 22 nt, Human
ugugugucagagucuccauggu

SEQ ID NO: 141763 - RNA, 22 nt, Human
gagcugucuggggacucugggu

SEQ ID NO: 141764 - RNA, 22 nt, Human
uagcaggguaaauguagaugga

SEQ ID NO: 141765 - RNA, 22 nt, Human
cagcuugcuaauuuugacuuca

SEQ ID NO: 141766 - RNA, 20 nt, Human
ugucagugccugaggcacag

SEQ ID NO: 141767 - RNA, 22 nt, Human
ugcucacugaacucuugcuguc

SEQ ID NO: 141768 - RNA, 22 nt, Human
caggauggucucgaucuccuga

SEQ ID NO: 141769 - RNA, 20 nt, Human
uguguaugugcacaugcgaa

SEQ ID NO: 141770 - RNA, 22 nt, Human
aauuucucauggauucaguuau

SEQ ID NO: 141771 - RNA, 18 nt, Human
ggcugagguugacuagaa

SEQ ID NO: 141772 - RNA, 22 nt, Human
ucagcaguggcucucaugcagu

SEQ ID NO: 141773 - RNA, 20 nt, Human
ggcacuggaagcacacagga

SEQ ID NO: 141774 - RNA, 22 nt, Human
acagcaggauuuggcgauguug

SEQ ID NO: 141775 - RNA, 22 nt, Human
uggagggcaugcuguccauggg

SEQ ID NO: 141776 - RNA, 22 nt, Human
uuguuucugaguuuucauguau

SEQ ID NO: 141777 - RNA, 22 nt, Human
guccucugacucagccuuggga

SEQ ID NO: 141778 - RNA, 22 nt, Human
aacaaauggggccuuguaugaa

SEQ ID NO: 141779 - RNA, 21 nt, Human
ccucuggcuugugcugugccc

SEQ ID NO: 141780 - RNA, 22 nt, Human
gggcacagagggucuugaagaa

SEQ ID NO: 141781 - RNA, 22 nt, Human
gcagccacugggagugcuuaua

SEQ ID NO: 141782 - RNA, 22 nt, Human
gcccucagaugggaaaggaggg

SEQ ID NO: 141783 - RNA, 22 nt, Human
gcucugcuugcaucaugacugc

SEQ ID NO: 141784 - RNA, 22 nt, Human
caaauguguuuuuucuucuaca

SEQ ID NO: 141785 - RNA, 22 nt, Human
cuuuucucuguaccguauaucu

SEQ ID NO: 141786 - RNA, 22 nt, Human
cagaggcugcucuggguggcau

SEQ ID NO: 141787 - RNA, 22 nt, Human
ucauuuauaaggaugcaauuaa

SEQ ID NO: 141788 - RNA, 22 nt, Human
caggcacuucugcugcuugucu

SEQ ID NO: 141789 - RNA, 22 nt, Human
gagagucuagugcaccuaguuu

SEQ ID NO: 141790 - RNA, 22 nt, Human
gggcugcuuccuggggaaugcu

SEQ ID NO: 141791 - RNA, 22 nt, Human
acagaguaucuaucaggaguau

SEQ ID NO: 141792 - RNA, 22 nt, Human
cuuuggcaaugaaacacaagaa

SEQ ID NO: 141793 - RNA, 22 nt, Human
uuuacauugcauuagguauuau

SEQ ID NO: 141794 - RNA, 22 nt, Human
gaaaaugugucaucccuacugu

SEQ ID NO: 141795 - RNA, 18 nt, Human
ucucucugauaacauuuu

SEQ ID NO: 141796 - RNA, 22 nt, Human
uguucucucuccuuuugaagug

SEQ ID NO: 141797 - RNA, 22 nt, Human
ucucucugaguugagcaggagu

SEQ ID NO: 141798 - RNA, 22 nt, Human
guuauaaaaugcacaguuguuu

SEQ ID NO: 141799 - RNA, 22 nt, Human
uccuuuuugguccaaggugacc

SEQ ID NO: 141800 - RNA, 22 nt, Human
cagucccagacauaguaaggga

SEQ ID NO: 141801 - RNA, 22 nt, Human
ucacuuaaaaauucuaguuaug

SEQ ID NO: 141802 - RNA, 22 nt, Human
aggcugugggacaguuaggaga

SEQ ID NO: 141803 - RNA, 22 nt, Human
caggguccaucuuucaucacug

SEQ ID NO: 141804 - RNA, 22 nt, Human
uuagcaucugcuguaagcuuau

SEQ ID NO: 141805 - RNA, 22 nt, Human
gccugcuggauguggccaggcc

SEQ ID NO: 141806 - RNA, 20 nt, Human
uccuugaaagugggguauau

SEQ ID NO: 141807 - RNA, 22 nt, Human
cugagcuuggccaggaaugaau

SEQ ID NO: 141808 - RNA, 22 nt, Human
aagcagccacuggccaguuaua

SEQ ID NO: 141809 - RNA, 19 nt, Human
uauuuucguggaggccuau

SEQ ID NO: 141810 - RNA, 22 nt, Human
cuucucucugcauaggcauggg

SEQ ID NO: 141811 - RNA, 22 nt, Human
gcaaagguagccaaggagcuca

SEQ ID NO: 141812 - RNA, 22 nt, Human
ggugggcacauucagucucugu

SEQ ID NO: 141813 - RNA, 22 nt, Human
cagauccacccuuguagugaca

SEQ ID NO: 141814 - RNA, 22 nt, Human
cccagggaaugacucuggccuu

SEQ ID NO: 141815 - RNA, 22 nt, Human
uugugguuaaccgcacauuuuu

SEQ ID NO: 141816 - RNA, 21 nt, Human
ucacuuauaauguauuugcug

SEQ ID NO: 141817 - RNA, 22 nt, Human
gaagcagcugccagagaugucu

SEQ ID NO: 141818 - RNA, 22 nt, Human
uccucagaaaccccugugaggu

SEQ ID NO: 141819 - RNA, 19 nt, Human
ucucaauguucagaaagcu

SEQ ID NO: 141820 - RNA, 22 nt, Human
uagagcuagcuucaaaaugcga

SEQ ID NO: 141821 - RNA, 22 nt, Human
uuucacaaguuucaggauucug

SEQ ID NO: 141822 - RNA, 22 nt, Human
uggcugugaauggcaaauaauc

SEQ ID NO: 141823 - RNA, 22 nt, Human
caaauagugucacauugugagg

SEQ ID NO: 141824 - RNA, 22 nt, Human
aguguacauguuuacagcaucu

SEQ ID NO: 141825 - RNA, 22 nt, Human
uuggcuuccaggaucucagcag

SEQ ID NO: 141826 - RNA, 22 nt, Human
gccaggcugcuccagggaggcc

SEQ ID NO: 141827 - RNA, 22 nt, Human
acagcuggaggucugugagcac

SEQ ID NO: 141828 - RNA, 23 nt, Human
gugagcagcccacuaggaaugcc

SEQ ID NO: 141829 - RNA, 22 nt, Human
accaaggagaaggugcaagcuu

SEQ ID NO: 141830 - RNA, 22 nt, Human
ugugcugguacaugugaggaug

SEQ ID NO: 141831 - RNA, 22 nt, Human
ccugggaggcagagguugcagu

SEQ ID NO: 141832 - RNA, 22 nt, Human
gcugcagcccggcgcgccugag

SEQ ID NO: 141833 - RNA, 22 nt, Human
aauaauuuccagccaacuggaa

SEQ ID NO: 141834 - RNA, 22 nt, Human
gagcagggccacuucuguaccu

SEQ ID NO: 141835 - RNA, 21 nt, Human
aaauguguuccauaaugcuuu

SEQ ID NO: 141836 - RNA, 22 nt, Human
gccuggaguucagccaaguccc

SEQ ID NO: 141837 - RNA, 22 nt, Human
uguggcugccacccugaagccg

SEQ ID NO: 141838 - RNA, 22 nt, Human
caguuauuaugaggucauuagg

SEQ ID NO: 141839 - RNA, 22 nt, Human
uggcaggagguuuucuccagga

SEQ ID NO: 141840 - RNA, 22 nt, Human
acaggcucuggggcaggauggc

SEQ ID NO: 141841 - RNA, 22 nt, Human
cacucccuucaggagccuagga

SEQ ID NO: 141842 - RNA, 22 nt, Human
uuuccagagcaugucugcucag

SEQ ID NO: 141843 - RNA, 22 nt, Human
ucaguuuucucauuuaugagau

SEQ ID NO: 141844 - RNA, 22 nt, Human
auccaguucucagugcuuacag

SEQ ID NO: 141845 - RNA, 22 nt, Human
cugagaggcacaaggcauuucg

SEQ ID NO: 141846 - RNA, 22 nt, Human
cugcaagauuggaagaugcaau

SEQ ID NO: 141847 - RNA, 22 nt, Human
uuuccuuccaaaugcccgggag

SEQ ID NO: 141848 - RNA, 22 nt, Human
ccagggcacuuaggcccagccc

SEQ ID NO: 141849 - RNA, 22 nt, Human
ucugccuuccccauaaucugau

SEQ ID NO: 141850 - RNA, 22 nt, Human
augcacuugcguguuugcaaau

SEQ ID NO: 141851 - RNA, 22 nt, Human
ucaguuuucauuucaugagcag

SEQ ID NO: 141852 - RNA, 22 nt, Human
ggacacagauaaucacacagau

SEQ ID NO: 141853 - RNA, 22 nt, Human
agcagcagaggucagaaaggua

SEQ ID NO: 141854 - RNA, 22 nt, Human
cuggcagguuuggugucuggug

SEQ ID NO: 141855 - RNA, 22 nt, Human
uuugcauuuguuuagaaccuga

SEQ ID NO: 141856 - RNA, 22 nt, Human
accugccuaguugguucugccc

SEQ ID NO: 141857 - RNA, 22 nt, Human
cugccgaguacagccauagaaa

SEQ ID NO: 141858 - RNA, 22 nt, Human
gcuuccuucuaccacaucaugc

SEQ ID NO: 141859 - RNA, 22 nt, Human
guggccuggcgagcuggcgcgg

SEQ ID NO: 141860 - RNA, 20 nt, Human
gucagugucuucaguaguga

SEQ ID NO: 141861 - RNA, 22 nt, Human
acccugggucauauacagugug

SEQ ID NO: 141862 - RNA, 22 nt, Human
gccucugcucucagguagccuc

SEQ ID NO: 141863 - RNA, 22 nt, Human
ucugagugaguguaggccugac

SEQ ID NO: 141864 - RNA, 18 nt, Human
ggaaaaggagugucuagc

SEQ ID NO: 141865 - RNA, 22 nt, Human
uuuauguaguuacggacuauca

SEQ ID NO: 141866 - RNA, 22 nt, Human
ugugaaaggagccauagacagu

SEQ ID NO: 141867 - RNA, 21 nt, Human
gcaugccugcaucuuaguguu

SEQ ID NO: 141868 - RNA, 22 nt, Human
ugcagagguguugcugagauaa

SEQ ID NO: 141869 - RNA, 22 nt, Human
agcccccaaaagugcuuaugau

SEQ ID NO: 141870 - RNA, 22 nt, Human
gcccugggauuggguggaggcu

SEQ ID NO: 141871 - RNA, 22 nt, Human
ccucagccuuggccccaggcag

SEQ ID NO: 141872 - RNA, 22 nt, Human
aggcagaauguuggaaaggaag

SEQ ID NO: 141873 - RNA, 22 nt, Human
gaaaucugaacaacagcuguca

SEQ ID NO: 141874 - RNA, 22 nt, Human
ugacuuccugcacucaggugau

SEQ ID NO: 141875 - RNA, 22 nt, Human
uagagaaaagcagggaucagga

SEQ ID NO: 141876 - RNA, 22 nt, Human
gugugagugaaaguaguuugau

SEQ ID NO: 141877 - RNA, 22 nt, Human
ccuggagauuauuugguccaau

SEQ ID NO: 141878 - RNA, 22 nt, Human
gcucugaggcugugaggugcug

SEQ ID NO: 141879 - RNA, 22 nt, Human
augucuuucgcaucaguagcua

SEQ ID NO: 141880 - RNA, 22 nt, Human
ccaggaagccucagaugcugag

SEQ ID NO: 141881 - RNA, 22 nt, Human
uggggacacagagccaaacuau

SEQ ID NO: 141882 - RNA, 22 nt, Human
cccugcagccuugcaugccuuc

SEQ ID NO: 141883 - RNA, 22 nt, Human
agaggagcugggaggcccucgu

SEQ ID NO: 141884 - RNA, 22 nt, Human
ucucuuuaaaaauagugaaaua

SEQ ID NO: 141885 - RNA, 22 nt, Human
uuaauuuauguccaaaccagau

SEQ ID NO: 141886 - RNA, 22 nt, Human
ucagaguguggugagaugugca

SEQ ID NO: 141887 - RNA, 22 nt, Human
guuccacaaaauguacccaguu

SEQ ID NO: 141888 - RNA, 22 nt, Human
cugcccugugaggguccuuggg

SEQ ID NO: 141889 - RNA, 22 nt, Human
aacauucugguucuaaaaaccu

SEQ ID NO: 141890 - RNA, 22 nt, Human
gugugcaugcauagacaccaca

SEQ ID NO: 141891 - RNA, 22 nt, Human
uguguuggcuugccuguuaggc

SEQ ID NO: 141892 - RNA, 18 nt, Human
uccuccuuuggccuuuuc

SEQ ID NO: 141893 - RNA, 22 nt, Human
ugcaggccggcccuaggccuca

SEQ ID NO: 141894 - RNA, 22 nt, Human
aaguucaaguguaaucuuuauu

SEQ ID NO: 141895 - RNA, 22 nt, Human
ucucuuuagugcuuagacgucu

SEQ ID NO: 141896 - RNA, 22 nt, Human
gccugugcauagcagcggacuc

SEQ ID NO: 141897 - RNA, 17 nt, Human
ugcgaugucuguguuug

SEQ ID NO: 141898 - RNA, 22 nt, Human
cugucagcacucuacuacagau

SEQ ID NO: 141899 - RNA, 22 nt, Human
agugcauuauauguuucaaugg

SEQ ID NO: 141900 - RNA, 22 nt, Human
ugaagcaaacgcuucuguuccu

SEQ ID NO: 141901 - RNA, 22 nt, Human
agcagcaacuuauuuuucuuau

SEQ ID NO: 141902 - RNA, 22 nt, Human
ucauuuacuugguuuuaaucuu

SEQ ID NO: 141903 - RNA, 22 nt, Human
agggcugccugacuccagagcc

SEQ ID NO: 141904 - RNA, 22 nt, Human
ucaugugucugcugcagcuguu

SEQ ID NO: 141905 - RNA, 22 nt, Human
cacaggcugcccgcagcuggga

SEQ ID NO: 141906 - RNA, 22 nt, Human
auuauucuuaugucaucauggc

SEQ ID NO: 141907 - RNA, 22 nt, Human
cauuuguuaaccaguguggauu

SEQ ID NO: 141908 - RNA, 22 nt, Human
uuaaacagacaguaaaugaaac

SEQ ID NO: 141909 - RNA, 22 nt, Human
acugcagcaaagcccgugucuu

SEQ ID NO: 141910 - RNA, 22 nt, Human
acauguaaaaggaacaugcaug

SEQ ID NO: 141911 - RNA, 22 nt, Human
gccagguggcugagcagcugca

SEQ ID NO: 141912 - RNA, 22 nt, Human
cagggcagggagcuuagaauga

SEQ ID NO: 141913 - RNA, 22 nt, Human
auuguacaaugccuggaacauu

SEQ ID NO: 141914 - RNA, 22 nt, Human
gacagcagggacauguaggaag

SEQ ID NO: 141915 - RNA, 22 nt, Human
ugucuagggagcugcucaggcu

SEQ ID NO: 141916 - RNA, 22 nt, Human
ucagaaauuuucucaguaguuc

SEQ ID NO: 141917 - RNA, 22 nt, Human
acucagaguuugcguuccauac

SEQ ID NO: 141918 - RNA, 22 nt, Human
cugugcaagcccaagauaaaac

SEQ ID NO: 141919 - RNA, 22 nt, Human
auacaucucauguaagagauaa

SEQ ID NO: 141920 - RNA, 22 nt, Human
ugcuguguucaccaauaugugu

SEQ ID NO: 141921 - RNA, 22 nt, Human
aucaggaucacagaaacuuuua

SEQ ID NO: 141922 - RNA, 22 nt, Human
cauuauguucaguagcuuaaaa

SEQ ID NO: 141923 - RNA, 22 nt, Human
ggaaaaggccauuguuucucug

SEQ ID NO: 141924 - RNA, 22 nt, Human
ggccucagugggccgcugcagg

SEQ ID NO: 141925 - RNA, 22 nt, Human
ccucuuccacugggccccaucc

SEQ ID NO: 141926 - RNA, 22 nt, Human
aucaggauuauuaaaucuggau

SEQ ID NO: 141927 - RNA, 22 nt, Human
agcaugcacaugacuggcuuaa

SEQ ID NO: 141928 - RNA, 19 nt, Human
uguuggugcggauguggag

SEQ ID NO: 141929 - RNA, 22 nt, Human
ugagagucucagaccuccuggu

SEQ ID NO: 141930 - RNA, 22 nt, Human
gcucaggaaacagcagggcuug

SEQ ID NO: 141931 - RNA, 22 nt, Human
guacuucccugggaggcaagca

SEQ ID NO: 141932 - RNA, 22 nt, Human
cuggccagacuacacaugugug

SEQ ID NO: 141933 - RNA, 22 nt, Human
aacauucuauuuugcuaaaaca

SEQ ID NO: 141934 - RNA, 22 nt, Human
ugucuguauugaggugcauauu

SEQ ID NO: 141935 - RNA, 22 nt, Human
auggcaggcccagguguucauu

SEQ ID NO: 141936 - RNA, 22 nt, Human
gagaagcaaucaguggccaccc

SEQ ID NO: 141937 - RNA, 22 nt, Human
uucugugugucucagcaagcug

SEQ ID NO: 141938 - RNA, 22 nt, Human
ucauuacaguguuuauaugucu

SEQ ID NO: 141939 - RNA, 22 nt, Human
ggcucugggucuguggggagcg

SEQ ID NO: 141940 - RNA, 22 nt, Human
gccuaggaguggggauggcggu

SEQ ID NO: 141941 - RNA, 22 nt, Human
acagccagggucucaggaggcg

SEQ ID NO: 141942 - RNA, 22 nt, Human
ugccuugcacauaauauacauu

SEQ ID NO: 141943 - RNA, 22 nt, Human
uccucaggaucuaggagugcuu

SEQ ID NO: 141944 - RNA, 22 nt, Human
guauuugauacaugaaauggug

SEQ ID NO: 141945 - RNA, 23 nt, Human
uucauuugucuacuucacuuguu

SEQ ID NO: 141946 - RNA, 22 nt, Human
gccuuccugcagcucugagcgu

SEQ ID NO: 141947 - RNA, 22 nt, Human
ugugugcacguacauacuguau

SEQ ID NO: 141948 - RNA, 23 nt, Human
agcuggaggcugucuacucccaa

SEQ ID NO: 141949 - RNA, 22 nt, Human
acugggccuugccauggcagcc

SEQ ID NO: 141950 - RNA, 19 nt, Human
agccuggagggcuggucac

SEQ ID NO: 141951 - RNA, 22 nt, Human
gggcugcugccaaucacagccu

SEQ ID NO: 141952 - RNA, 22 nt, Human
ucugccugcuaacuccugcacc

SEQ ID NO: 141953 - RNA, 22 nt, Human
gcagugguggagcuuacauauc

SEQ ID NO: 141954 - RNA, 22 nt, Human
gcugucccgcugacuuccagcu

SEQ ID NO: 141955 - RNA, 22 nt, Human
ucucugauguauaucagagaac

SEQ ID NO: 141956 - RNA, 22 nt, Human
uucugugugcugucuuggcuuu

SEQ ID NO: 141957 - RNA, 22 nt, Human
auguaugcuuugauuuuagaug

SEQ ID NO: 141958 - RNA, 21 nt, Human
ugggcacugagggugcugcuc

SEQ ID NO: 141959 - RNA, 22 nt, Human
ugccugagugauguggcagcca

SEQ ID NO: 141960 - RNA, 22 nt, Human
uuugugugguggauacugggua

SEQ ID NO: 141961 - RNA, 22 nt, Human
ugugugagacaauuggcugugg

SEQ ID NO: 141962 - RNA, 22 nt, Human
guguaugcagaaacaugcaaag

SEQ ID NO: 141963 - RNA, 22 nt, Human
gcacagggccuggcacauaaga

SEQ ID NO: 141964 - RNA, 22 nt, Human
ucuguaucuaauuuuacaguag

SEQ ID NO: 141965 - RNA, 22 nt, Human
cagguaggauggaagggcucaa

SEQ ID NO: 141966 - RNA, 22 nt, Human
agaaaagggcaggagggauaca

SEQ ID NO: 141967 - RNA, 23 nt, Human
acacauuuuucccguucugaggu

SEQ ID NO: 141968 - RNA, 17 nt, Human
gugccuguuguccugga

SEQ ID NO: 141969 - RNA, 22 nt, Human
agccacagcauguguguaugua

SEQ ID NO: 141970 - RNA, 22 nt, Human
guggcuagaaaaauaugggugc

SEQ ID NO: 141971 - RNA, 22 nt, Human
ugcugcacaauuggaaaguauc

SEQ ID NO: 141972 - RNA, 22 nt, Human
cuggccuuuuguuucuggagaa

SEQ ID NO: 141973 - RNA, 22 nt, Human
ggaggccaguccuggccgggcu

SEQ ID NO: 141974 - RNA, 22 nt, Human
aucauucugauggucaaugcua

SEQ ID NO: 141975 - RNA, 22 nt, Human
caagauggaguccgggaaugug

SEQ ID NO: 141976 - RNA, 22 nt, Human
gucugugugcacagagcuuugg

SEQ ID NO: 141977 - RNA, 22 nt, Human
uucugugugccagaguugugcu

SEQ ID NO: 141978 - RNA, 22 nt, Human
ucagagugaggcgucaacauga

SEQ ID NO: 141979 - RNA, 22 nt, Human
gcagcugagagaagaacagggc

SEQ ID NO: 141980 - RNA, 22 nt, Human
gaaaucugcuucuugcauagua

SEQ ID NO: 141981 - RNA, 20 nt, Human
ggggcugcaugcagagaaga

SEQ ID NO: 141982 - RNA, 22 nt, Human
aggucauuguuaagucaccaua

SEQ ID NO: 141983 - RNA, 22 nt, Human
ucauccaguuguggagagggaa

SEQ ID NO: 141984 - RNA, 22 nt, Human
ccagcuccuucugucuguggag

SEQ ID NO: 141985 - RNA, 22 nt, Human
agagacaggaguucuguuucca

SEQ ID NO: 141986 - RNA, 22 nt, Human
caggaccuggaaugcuugugaa

SEQ ID NO: 141987 - RNA, 22 nt, Human
uggcagcaauuugugauguuga

SEQ ID NO: 141988 - RNA, 22 nt, Human
aagcccaguuucacacugagac

SEQ ID NO: 141989 - RNA, 22 nt, Human
ugggcaggaugcguugauucuu

SEQ ID NO: 141990 - RNA, 22 nt, Human
cagccaggccuggugaccaaag

SEQ ID NO: 141991 - RNA, 22 nt, Human
auucauuugcuauuguguaugg

SEQ ID NO: 141992 - RNA, 22 nt, Human
aaaguucagauuagacucaaga

SEQ ID NO: 141993 - RNA, 22 nt, Human
ugcccaaguccuccaccgaggu

SEQ ID NO: 141994 - RNA, 22 nt, Human
agugugagcccuggaguggugc

SEQ ID NO: 141995 - RNA, 22 nt, Human
ugggcagagucguggggaauag

SEQ ID NO: 141996 - RNA, 22 nt, Human
aagggcagggaguuugugucua

SEQ ID NO: 141997 - RNA, 18 nt, Human
acauuucuaugcuucugg

SEQ ID NO: 141998 - RNA, 22 nt, Human
agcugcucucacuggacgccug

SEQ ID NO: 141999 - RNA, 22 nt, Human
uacaguuuguuacauuguuagu

SEQ ID NO: 142000 - RNA, 19 nt, Human
ucaaaugccaaugucacag

SEQ ID NO: 142001 - RNA, 22 nt, Human
ugcucagacaagcugaacagua

SEQ ID NO: 142002 - RNA, 22 nt, Human
gggacaggccccucgcuagcuu

SEQ ID NO: 142003 - RNA, 22 nt, Human
ucucccacagucucccauggcu

SEQ ID NO: 142004 - RNA, 22 nt, Human
ccaggguguagggauuccagau

SEQ ID NO: 142005 - RNA, 19 nt, Human
uccauaagcuuguguucau

SEQ ID NO: 142006 - RNA, 22 nt, Human
uaugccugauaacugugucucu

SEQ ID NO: 142007 - RNA, 22 nt, Human
cucuguguuaaauuggguuuuu

SEQ ID NO: 142008 - RNA, 22 nt, Human
ggcucaggaugagccuucucau

SEQ ID NO: 142009 - RNA, 22 nt, Human
aggcucagagagcuguguccau

SEQ ID NO: 142010 - RNA, 22 nt, Human
aagauuucugcuccugagagaa

SEQ ID NO: 142011 - RNA, 22 nt, Human
ccaggagcagauauggacauaa

SEQ ID NO: 142012 - RNA, 22 nt, Human
ucugggagauccaagcagaacu

SEQ ID NO: 142013 - RNA, 22 nt, Human
cucugggcaaagaugccucauc

SEQ ID NO: 142014 - RNA, 22 nt, Human
agcaguggcuggauggugugcu

SEQ ID NO: 142015 - RNA, 22 nt, Human
aggcuggagggcaauggcaaga

SEQ ID NO: 142016 - RNA, 22 nt, Human
aagagggaggugcgggugcaga

SEQ ID NO: 142017 - RNA, 22 nt, Human
gcucuggaagcaucugagagga

SEQ ID NO: 142018 - RNA, 22 nt, Human
cugcagccuaggugcagcuggg

SEQ ID NO: 142019 - RNA, 17 nt, Human
ugagcaguagaagaugc

SEQ ID NO: 142020 - RNA, 18 nt, Human
uccugccugcgggcuccc

SEQ ID NO: 142021 - RNA, 22 nt, Human
uaacucuuuacuauacauuuau

SEQ ID NO: 142022 - RNA, 22 nt, Human
agccugcaggaugggcagcacc

SEQ ID NO: 142023 - RNA, 22 nt, Human
uggccuggccacauccagcagg

SEQ ID NO: 142024 - RNA, 22 nt, Human
gccugguguccagaggcgagug

SEQ ID NO: 142025 - RNA, 22 nt, Human
aggugcagcugguggagucugg

SEQ ID NO: 142026 - RNA, 22 nt, Human
ugcaguggaaucuggagagcag

SEQ ID NO: 142027 - RNA, 22 nt, Human
uguauacauuuaacuagauaga

SEQ ID NO: 142028 - RNA, 22 nt, Human
caggcugcggucggcucugguc

SEQ ID NO: 142029 - RNA, 19 nt, Human
gucuguguauuuguugcug

SEQ ID NO: 142030 - RNA, 22 nt, Human
ugagguguguccccagggaggu

SEQ ID NO: 142031 - RNA, 19 nt, Human
aggccugggguuuugcacu

SEQ ID NO: 142032 - RNA, 22 nt, Human
uugucugaaagaucauuacauu

SEQ ID NO: 142033 - RNA, 22 nt, Human
aaagccagagcaagcugucaca

SEQ ID NO: 142034 - RNA, 22 nt, Human
gcucagagcacucagacucagc

SEQ ID NO: 142035 - RNA, 20 nt, Human
aacuuguucuaccuguuuca

SEQ ID NO: 142036 - RNA, 22 nt, Human
ucaucucucaggauaccagcag

SEQ ID NO: 142037 - RNA, 22 nt, Human
ugagugugcuaggugucucggu

SEQ ID NO: 142038 - RNA, 22 nt, Human
cuuucagagguuacucaggaaa

SEQ ID NO: 142039 - RNA, 22 nt, Human
acagcagcacuauugacauuuu

SEQ ID NO: 142040 - RNA, 22 nt, Human
guauucuugguuaucaaaauac

SEQ ID NO: 142041 - RNA, 20 nt, Human
aauuuacucacagaaugaau

SEQ ID NO: 142042 - RNA, 22 nt, Human
guacaugucaaaaaaugcauaa

SEQ ID NO: 142043 - RNA, 22 nt, Human
ucagauggcacacagagccugc

SEQ ID NO: 142044 - RNA, 22 nt, Human
cagcaggaaaaucaauucugug

SEQ ID NO: 142045 - RNA, 22 nt, Human
ugaaagcagcaccaauaccauu

SEQ ID NO: 142046 - RNA, 22 nt, Human
gguugccggggcaggacuggaa

SEQ ID NO: 142047 - RNA, 19 nt, Human
cagaguccuugaccagucc

SEQ ID NO: 142048 - RNA, 23 nt, Human
caugggagugagaaugccagcuc

SEQ ID NO: 142049 - RNA, 22 nt, Human
guaguauuuucugugauguagg

SEQ ID NO: 142050 - RNA, 22 nt, Human
ugugucugaacaugcuuuguaa

SEQ ID NO: 142051 - RNA, 22 nt, Human
uucugugucuucuuguucugug

SEQ ID NO: 142052 - RNA, 23 nt, Human
ggguccagagacaggcaugggug

SEQ ID NO: 142053 - RNA, 22 nt, Human
uccagugguuugaaaggggugu

SEQ ID NO: 142054 - RNA, 22 nt, Human
gggcucuggaaggugcaccaug

SEQ ID NO: 142055 - RNA, 22 nt, Human
ccugggcaacauagugagaccu

SEQ ID NO: 142056 - RNA, 22 nt, Human
ggcccucccugagccagguggg

SEQ ID NO: 142057 - RNA, 22 nt, Human
uucuauguagauaaggcugcuc

SEQ ID NO: 142058 - RNA, 22 nt, Human
uguggcuguguccaccugcugc

SEQ ID NO: 142059 - RNA, 22 nt, Human
uaacaucuuuagcagcucgaac

SEQ ID NO: 142060 - RNA, 22 nt, Human
aggagucaggaccaaauggaaa

SEQ ID NO: 142061 - RNA, 19 nt, Human
ucaaggcucccugagggau

SEQ ID NO: 142062 - RNA, 22 nt, Human
uaaggcagaaauaugagcaggg

SEQ ID NO: 142063 - RNA, 22 nt, Human
ucagcuuggacagcuugguuga

SEQ ID NO: 142064 - RNA, 22 nt, Human
cccucugcaggcuggaccugcc

SEQ ID NO: 142065 - RNA, 22 nt, Human
acaguauaccauugugacuuug

SEQ ID NO: 142066 - RNA, 22 nt, Human
augugugguuuguaaaugauuu

SEQ ID NO: 142067 - RNA, 22 nt, Human
gggcagaggggcgcuucccucu

SEQ ID NO: 142068 - RNA, 22 nt, Human
uugugcauuucucugagugugu

SEQ ID NO: 142069 - RNA, 22 nt, Human
gcccagagagaugcuguagacc

SEQ ID NO: 142070 - RNA, 23 nt, Human
auacauacagucuuacugacuuu

SEQ ID NO: 142071 - RNA, 22 nt, Human
ugcagugggccggaggccaggg

SEQ ID NO: 142072 - RNA, 22 nt, Human
cugccuugaggagguuguggga

SEQ ID NO: 142073 - RNA, 22 nt, Human
acacaggagauauguaauggcu

SEQ ID NO: 142074 - RNA, 22 nt, Human
uucuuuccaaccagauauuggu

SEQ ID NO: 142075 - RNA, 22 nt, Human
cagagccuuccuagcagacucu

SEQ ID NO: 142076 - RNA, 22 nt, Human
uauguggccuuuuaugucugac

SEQ ID NO: 142077 - RNA, 22 nt, Human
ugguguguacauuuuugcuucu

SEQ ID NO: 142078 - RNA, 22 nt, Human
ggcucuggguucugcaaugcgu

SEQ ID NO: 142079 - RNA, 22 nt, Human
gaggcagaggaagguggucucu

SEQ ID NO: 142080 - RNA, 22 nt, Human
agucaauuaucucuaggucauc

SEQ ID NO: 142081 - RNA, 22 nt, Human
ugagaaccaugaaaagcuguca

SEQ ID NO: 142082 - RNA, 22 nt, Human
ucuucacaucauguuuuuuaau

SEQ ID NO: 142083 - RNA, 22 nt, Human
cccuggaagguucucuggcuca

SEQ ID NO: 142084 - RNA, 22 nt, Human
aacuagaacgucuaguugcugg

SEQ ID NO: 142085 - RNA, 22 nt, Human
gaggcaggcagauugcuugagg

SEQ ID NO: 142086 - RNA, 22 nt, Human
cugagccuuauucaccagcccu

SEQ ID NO: 142087 - RNA, 22 nt, Human
aggcucagauccuuguguccug

SEQ ID NO: 142088 - RNA, 22 nt, Human
uuccucuccucacaugagucac

SEQ ID NO: 142089 - RNA, 22 nt, Human
aucuggcuugacuuugcgacuu

SEQ ID NO: 142090 - RNA, 22 nt, Human
uuaacuuuuauuucugcucgcc

SEQ ID NO: 142091 - RNA, 22 nt, Human
cugccuugaaaaugaagcuuua

SEQ ID NO: 142092 - RNA, 22 nt, Human
cucugcaggggaggcaugcacu

SEQ ID NO: 142093 - RNA, 20 nt, Human
ccagagcugauggcugcccg

SEQ ID NO: 142094 - RNA, 22 nt, Human
gugauuucuaaucaucugaaug

SEQ ID NO: 142095 - RNA, 22 nt, Human
aucagcugaaaaacaggcagca

SEQ ID NO: 142096 - RNA, 17 nt, Human
ggcagcugccacuuuuu

SEQ ID NO: 142097 - RNA, 23 nt, Human
uggauaaagcugugcugcauagg

SEQ ID NO: 142098 - RNA, 22 nt, Human
gauuuagagaauguuuuguaag

SEQ ID NO: 142099 - RNA, 22 nt, Human
uugcauaaaugcuuaaaauuug

SEQ ID NO: 142100 - RNA, 22 nt, Human
cuuugcagugauuguucuugga

SEQ ID NO: 142101 - RNA, 22 nt, Human
caggcagcugggucaccguccc

SEQ ID NO: 142102 - RNA, 22 nt, Human
aucuuugaagaggacuugaagu

SEQ ID NO: 142103 - RNA, 22 nt, Human
gcaggaugggagcuucacuuug

SEQ ID NO: 142104 - RNA, 22 nt, Human
ggcucaggcuggagugcagugg

SEQ ID NO: 142105 - RNA, 22 nt, Human
acugccauuggucaaaugagug

SEQ ID NO: 142106 - RNA, 19 nt, Human
ccuggaggugaagguucuc

SEQ ID NO: 142107 - RNA, 22 nt, Human
uauuuguugaguuguuaugucu

SEQ ID NO: 142108 - RNA, 22 nt, Human
cucuccucugaaguggugaccc

SEQ ID NO: 142109 - RNA, 22 nt, Human
caggcacugugcugagcucugc

SEQ ID NO: 142110 - RNA, 22 nt, Human
ucaaugauaucagcaggaugug

SEQ ID NO: 142111 - RNA, 22 nt, Human
gauuucaaggauguuagaggug

SEQ ID NO: 142112 - RNA, 22 nt, Human
gcugcagcaagcccuccagggg

SEQ ID NO: 142113 - RNA, 22 nt, Human
guccucugcuucaugcccugau

SEQ ID NO: 142114 - RNA, 22 nt, Human
cugugcuucgcaacuccaaggu

SEQ ID NO: 142115 - RNA, 22 nt, Human
ugcaaacaggagaguaaguaua

SEQ ID NO: 142116 - RNA, 23 nt, Human
ucugagagaacaaugccuccuau

SEQ ID NO: 142117 - RNA, 22 nt, Human
aguuugaaaguauugacagaag

SEQ ID NO: 142118 - RNA, 22 nt, Human
ucucuccuuaucauuguguuua

SEQ ID NO: 142119 - RNA, 22 nt, Human
cuucuucauguauugauagucu

SEQ ID NO: 142120 - RNA, 22 nt, Human
agccugccuugggcugcuugag

SEQ ID NO: 142121 - RNA, 22 nt, Human
agagacaggguuuugccauguu

SEQ ID NO: 142122 - RNA, 22 nt, Human
ccagguggacggcgaguacagg

SEQ ID NO: 142123 - RNA, 19 nt, Human
uucauucuuucuacuuacc

SEQ ID NO: 142124 - RNA, 22 nt, Human
cugaagcacagcauauaaauaa

SEQ ID NO: 142125 - RNA, 22 nt, Human
uguuacagaaugaauuuccgga

SEQ ID NO: 142126 - RNA, 18 nt, Human
caggaugagugaugggga

SEQ ID NO: 142127 - RNA, 22 nt, Human
uccagccaagccuugguagcug

SEQ ID NO: 142128 - RNA, 21 nt, Human
auuuucugugauagcugucuc

SEQ ID NO: 142129 - RNA, 22 nt, Human
gcaaagcugggugugaaugcac

SEQ ID NO: 142130 - RNA, 22 nt, Human
uggcagcauuuuuuccagaaca

SEQ ID NO: 142131 - RNA, 22 nt, Human
acagacagauuuugucugaugu

SEQ ID NO: 142132 - RNA, 22 nt, Human
caccagcagaagacugagggug

SEQ ID NO: 142133 - RNA, 22 nt, Human
ucaaagucucugcuucuguaac

SEQ ID NO: 142134 - RNA, 22 nt, Human
ucagaacauugacauucuuauu

SEQ ID NO: 142135 - RNA, 22 nt, Human
acaguguacuagguacauguuc

SEQ ID NO: 142136 - RNA, 22 nt, Human
cacaggaggaggccagagcgua

SEQ ID NO: 142137 - RNA, 22 nt, Human
ugcuuuauuuauaaaauagcaa

SEQ ID NO: 142138 - RNA, 22 nt, Human
aggguccaucaaggacugcaca

SEQ ID NO: 142139 - RNA, 22 nt, Human
aagcuggagaguuaggugaaua

SEQ ID NO: 142140 - RNA, 22 nt, Human
caguaaauuuuauuugugggug

SEQ ID NO: 142141 - RNA, 22 nt, Human
agaggagguggugaugcuuuaa

SEQ ID NO: 142142 - RNA, 22 nt, Human
ggccucucuggcauggcugccc

SEQ ID NO: 142143 - RNA, 22 nt, Human
ucccuggguccugcuugcucuc

SEQ ID NO: 142144 - RNA, 22 nt, Human
gagucccaugaugauagccaca

SEQ ID NO: 142145 - RNA, 22 nt, Human
cguuggagacacuugaggacuu

SEQ ID NO: 142146 - RNA, 22 nt, Human
cugucugcuagaacaucuauac

SEQ ID NO: 142147 - RNA, 22 nt, Human
agcugcaguaaagcucuccagg

SEQ ID NO: 142148 - RNA, 22 nt, Human
uggcuucuugggaugggucauu

SEQ ID NO: 142149 - RNA, 22 nt, Human
gaaaaaugcuccaaaucugugg

SEQ ID NO: 142150 - RNA, 22 nt, Human
caguguuccaggcggcagugaa

SEQ ID NO: 142151 - RNA, 22 nt, Human
uggcagagucugggcuugggca

SEQ ID NO: 142152 - RNA, 22 nt, Human
aguuuucacacucaccaaaagg

SEQ ID NO: 142153 - RNA, 22 nt, Human
cacacaugucucuccaugcucu

SEQ ID NO: 142154 - RNA, 22 nt, Human
ccugaagagcacucuagaguug

SEQ ID NO: 142155 - RNA, 22 nt, Human
agcuguguccugaagacacugc

SEQ ID NO: 142156 - RNA, 22 nt, Human
cagagcugguguuacaagucca

SEQ ID NO: 142157 - RNA, 22 nt, Human
auuuacagguagaauuuuaagu

SEQ ID NO: 142158 - RNA, 22 nt, Human
uuucugucauaguuaucuuugu

SEQ ID NO: 142159 - RNA, 22 nt, Human
uucucucuguuauggauuuuac

SEQ ID NO: 142160 - RNA, 22 nt, Human
ugggcucugugccagguuggug

SEQ ID NO: 142161 - RNA, 22 nt, Human
caauauucaguggaaaagccau

SEQ ID NO: 142162 - RNA, 22 nt, Human
ggcagccaugcacgcugccugg

SEQ ID NO: 142163 - RNA, 22 nt, Human
agcuuuauuugucauucacggc

SEQ ID NO: 142164 - RNA, 22 nt, Human
guacaguacuucagaaccagcc

SEQ ID NO: 142165 - RNA, 22 nt, Human
ucaguggagcuaagcaugagau

SEQ ID NO: 142166 - RNA, 22 nt, Human
aaauauguaagauuagcacuag

SEQ ID NO: 142167 - RNA, 21 nt, Human
aggugccaaggagaagcaggc

SEQ ID NO: 142168 - RNA, 22 nt, Human
aacaaauguguuuuguaauuaa

SEQ ID NO: 142169 - RNA, 22 nt, Human
aggccuggugugccggaugcag

SEQ ID NO: 142170 - RNA, 22 nt, Human
aauauaugugguauugaccagc

SEQ ID NO: 142171 - RNA, 22 nt, Human
gucucccaucguuugugaggaa

SEQ ID NO: 142172 - RNA, 22 nt, Human
uguguauguuuugagguugcua

SEQ ID NO: 142173 - RNA, 22 nt, Human
uguacaugugucuguauaucuu

SEQ ID NO: 142174 - RNA, 22 nt, Human
aaaugcaggaaauuaugcuuuu

SEQ ID NO: 142175 - RNA, 22 nt, Human
cuucugcaauaaguuuuggucc

SEQ ID NO: 142176 - RNA, 22 nt, Human
aggcugaggcagguggaucacu

SEQ ID NO: 142177 - RNA, 22 nt, Human
gauuuauuggucuuucauuggu

SEQ ID NO: 142178 - RNA, 22 nt, Human
uuugaacaugcugcaugauaau

SEQ ID NO: 142179 - RNA, 19 nt, Human
ugcauaaauuauauacuuu

SEQ ID NO: 142180 - RNA, 22 nt, Human
uauagagguggaaacugagguu

SEQ ID NO: 142181 - RNA, 22 nt, Human
cagcuccugccugggcagcugu

SEQ ID NO: 142182 - RNA, 22 nt, Human
gagugcaucguggccauuuuaa

SEQ ID NO: 142183 - RNA, 22 nt, Human
cucucucuuguguugcugcaga

SEQ ID NO: 142184 - RNA, 21 nt, Human
ccugugugucugacugggcua

SEQ ID NO: 142185 - RNA, 22 nt, Human
auuuagaaguuggagggcaaga

SEQ ID NO: 142186 - RNA, 22 nt, Human
gggcacugaaugccaagcuagg

SEQ ID NO: 142187 - RNA, 22 nt, Human
caggcagcugaggacuuugcua

SEQ ID NO: 142188 - RNA, 22 nt, Human
uccaggcugggcugaagggugc

SEQ ID NO: 142189 - RNA, 22 nt, Human
aauuaacaaauguagcugugau

SEQ ID NO: 142190 - RNA, 22 nt, Human
aauuucaaugcacucaugguug

SEQ ID NO: 142191 - RNA, 22 nt, Human
ucagggcauguauguuucuuua

SEQ ID NO: 142192 - RNA, 19 nt, Human
acaggcagaauugggugug

SEQ ID NO: 142193 - RNA, 22 nt, Human
cugaagaugucugagaugcuca

SEQ ID NO: 142194 - RNA, 22 nt, Human
ucugggagguaaccaugcugau

SEQ ID NO: 142195 - RNA, 22 nt, Human
agggcagagcugucuaaauggc

SEQ ID NO: 142196 - RNA, 22 nt, Human
uucacauugugcagauuauggu

SEQ ID NO: 142197 - RNA, 18 nt, Human
gccugggaggaggaaaug

SEQ ID NO: 142198 - RNA, 22 nt, Human
gcugccuguugaagggucugug

SEQ ID NO: 142199 - RNA, 22 nt, Human
uaagaacuucggacauguuauc

SEQ ID NO: 142200 - RNA, 22 nt, Human
uuauuaaugaguacaaguuauu

SEQ ID NO: 142201 - RNA, 22 nt, Human
gcaugcugcaccagagccucuc

SEQ ID NO: 142202 - RNA, 22 nt, Human
aguuauuuggcuauagauggua

SEQ ID NO: 142203 - RNA, 22 nt, Human
ugacagaacagguugggagcaa

SEQ ID NO: 142204 - RNA, 22 nt, Human
aucagcaagauguaauuucuau

SEQ ID NO: 142205 - RNA, 22 nt, Human
cacugaaucucaaggggagggu

SEQ ID NO: 142206 - RNA, 22 nt, Human
aggaagcucggagagggcaaau

SEQ ID NO: 142207 - RNA, 22 nt, Human
cuauacagcagcuuacuaguua

SEQ ID NO: 142208 - RNA, 21 nt, Human
ccugggccaaauucccuggac

SEQ ID NO: 142209 - RNA, 18 nt, Human
uauauucugugcccuggu

SEQ ID NO: 142210 - RNA, 20 nt, Human
uguuaaaggacacuugcuuu

SEQ ID NO: 142211 - RNA, 17 nt, Human
cccaugagcccacuccc

SEQ ID NO: 142212 - RNA, 23 nt, Human
ucacaggggccagcgcucugugg

SEQ ID NO: 142213 - RNA, 22 nt, Human
uacaguauggaaaauguauagu

SEQ ID NO: 142214 - RNA, 22 nt, Human
uuuacuuugugucaagucaaga

SEQ ID NO: 142215 - RNA, 22 nt, Human
uuucucugaggcuggccucccu

SEQ ID NO: 142216 - RNA, 22 nt, Human
gggagcugaauggcaauggaga

SEQ ID NO: 142217 - RNA, 22 nt, Human
cugggaugucuauagaacacuu

SEQ ID NO: 142218 - RNA, 18 nt, Human
gcugccugcauuccucac

SEQ ID NO: 142219 - RNA, 22 nt, Human
gcucacagccggcuggcagggg

SEQ ID NO: 142220 - RNA, 22 nt, Human
ccacagggaacaugacagccuu

SEQ ID NO: 142221 - RNA, 22 nt, Human
ggaccagagaagugagcaccug

SEQ ID NO: 142222 - RNA, 22 nt, Human
ggaggggccggcugccugccac

SEQ ID NO: 142223 - RNA, 22 nt, Human
gggcauggaggucugucugcag

SEQ ID NO: 142224 - RNA, 22 nt, Human
gguggcugugagcauuauguga

SEQ ID NO: 142225 - RNA, 22 nt, Human
uauguguaaucauaucugauac

SEQ ID NO: 142226 - RNA, 22 nt, Human
aauuucaagucuugaagaagua

SEQ ID NO: 142227 - RNA, 22 nt, Human
agaauauugaaaguucuugaca

SEQ ID NO: 142228 - RNA, 22 nt, Human
gagaggcugacuggcuguccug

SEQ ID NO: 142229 - RNA, 22 nt, Human
uucaacacaggaacaugauaua

SEQ ID NO: 142230 - RNA, 22 nt, Human
ccagagccugcugagccccauu

SEQ ID NO: 142231 - RNA, 22 nt, Human
cuguggcucucugcaggguccc

SEQ ID NO: 142232 - RNA, 22 nt, Human
cacacagaugguaagggaggga

SEQ ID NO: 142233 - RNA, 22 nt, Human
aggagccaagcagaacuaagga

SEQ ID NO: 142234 - RNA, 22 nt, Human
ucaacagaagugauagcuauua

SEQ ID NO: 142235 - RNA, 22 nt, Human
cuccuuccugccccagugauaa

SEQ ID NO: 142236 - RNA, 22 nt, Human
auaaggcagugacuucaucuau

SEQ ID NO: 142237 - RNA, 20 nt, Human
ugcagcugguuucacaggga

SEQ ID NO: 142238 - RNA, 18 nt, Human
ucagagguacagaaaagu

SEQ ID NO: 142239 - RNA, 22 nt, Human
uggucaggcugcucugcggcgu

SEQ ID NO: 142240 - RNA, 22 nt, Human
ucaaguauaucuagucauuagg

SEQ ID NO: 142241 - RNA, 22 nt, Human
ucucagagaucuuucugcaugu

SEQ ID NO: 142242 - RNA, 22 nt, Human
accaugggucagccaccucagc

SEQ ID NO: 142243 - RNA, 23 nt, Human
cauguacacacagcuguacagug

SEQ ID NO: 142244 - RNA, 22 nt, Human
ucugccugcaguguggcagggc

SEQ ID NO: 142245 - RNA, 22 nt, Human
gcagggugauagugaggcucag

SEQ ID NO: 142246 - RNA, 22 nt, Human
gggacagaaggaagugagcaca

SEQ ID NO: 142247 - RNA, 22 nt, Human
ugauuuccaguugcugggugcu

SEQ ID NO: 142248 - RNA, 22 nt, Human
cugugggcugaaagugcucccg

SEQ ID NO: 142249 - RNA, 22 nt, Human
auuugcuuaucuccacaguugu

SEQ ID NO: 142250 - RNA, 22 nt, Human
uauuuucuggggagagugaacc

SEQ ID NO: 142251 - RNA, 22 nt, Human
ugggccugggucuuugcugcca

SEQ ID NO: 142252 - RNA, 22 nt, Human
uaaauguguaaaccuccauuac

SEQ ID NO: 142253 - RNA, 22 nt, Human
cuggcagcauuaacagagagca

SEQ ID NO: 142254 - RNA, 22 nt, Human
agggagccagaguugggagcuc

SEQ ID NO: 142255 - RNA, 22 nt, Human
aguguccccuccaagggccugg

SEQ ID NO: 142256 - RNA, 22 nt, Human
gucuggcuuuugcccuguguuu

SEQ ID NO: 142257 - RNA, 22 nt, Human
gcagaugguggggcaggaaaau

SEQ ID NO: 142258 - RNA, 22 nt, Human
uuuuccagagcugucucuugca

SEQ ID NO: 142259 - RNA, 22 nt, Human
gagcaggccagcaauggaaggg

SEQ ID NO: 142260 - RNA, 22 nt, Human
uguggcuguggaugcuuuccag

SEQ ID NO: 142261 - RNA, 22 nt, Human
ugcuggcccaguauggacugca

SEQ ID NO: 142262 - RNA, 22 nt, Human
ucaaaguagggguaagccaggc

SEQ ID NO: 142263 - RNA, 22 nt, Human
ucagaggugguaaaggacagca

SEQ ID NO: 142264 - RNA, 22 nt, Human
aggagcuggguuccuuuggugg

SEQ ID NO: 142265 - RNA, 22 nt, Human
uaaaugcaguuaguacuugcca

SEQ ID NO: 142266 - RNA, 21 nt, Human
gccagggaagagaguuggcug

SEQ ID NO: 142267 - RNA, 22 nt, Human
gcagagccugugucugagcaaa

SEQ ID NO: 142268 - RNA, 22 nt, Human
uguugagacugagggagucagc

SEQ ID NO: 142269 - RNA, 22 nt, Human
aguuucauauuaccaugucacc

SEQ ID NO: 142270 - RNA, 22 nt, Human
caggauggagaguuguugguug

SEQ ID NO: 142271 - RNA, 22 nt, Human
ccucuugccaaucagcuacaga

SEQ ID NO: 142272 - RNA, 22 nt, Human
cugggcucagcccaugcugucc

SEQ ID NO: 142273 - RNA, 22 nt, Human
gaagaagcaggaguguguagca

SEQ ID NO: 142274 - RNA, 22 nt, Human
gcuugggauaugcugauguaaa

SEQ ID NO: 142275 - RNA, 22 nt, Human
augacagaggagugcaggugau

SEQ ID NO: 142276 - RNA, 20 nt, Human
uucuaacuacucucccuuug

SEQ ID NO: 142277 - RNA, 22 nt, Human
aaggcaguaggaucuuccacag

SEQ ID NO: 142278 - RNA, 22 nt, Human
accaaggaagagauucucaguu

SEQ ID NO: 142279 - RNA, 21 nt, Human
aacauuucaggauccaaauug

SEQ ID NO: 142280 - RNA, 22 nt, Human
ggcagcacugcagcuuguuggg

SEQ ID NO: 142281 - RNA, 22 nt, Human
ucacagggcauuauggcuccag

SEQ ID NO: 142282 - RNA, 22 nt, Human
aaaauguguuuaugcauuucgu

SEQ ID NO: 142283 - RNA, 19 nt, Human
aggcugcaagguggugggc

SEQ ID NO: 142284 - RNA, 22 nt, Human
agcugaguuaauucaucacuua

SEQ ID NO: 142285 - RNA, 22 nt, Human
uuaugauuugccacagauuggu

SEQ ID NO: 142286 - RNA, 22 nt, Human
uagugugucccuggggaguguu

SEQ ID NO: 142287 - RNA, 22 nt, Human
aucuggcucaccuggguaaaua

SEQ ID NO: 142288 - RNA, 22 nt, Human
uaaaugcagcaguuucuguucu

SEQ ID NO: 142289 - RNA, 22 nt, Human
uuaacagagugccuggcaugua

SEQ ID NO: 142290 - RNA, 22 nt, Human
ugguuucccauuaucugcagga

SEQ ID NO: 142291 - RNA, 22 nt, Human
cagaagcaaaugccuugcugag

SEQ ID NO: 142292 - RNA, 22 nt, Human
cugggcacuuuggggagccuac

SEQ ID NO: 142293 - RNA, 22 nt, Human
cuagcaucagaugagaagcugu

SEQ ID NO: 142294 - RNA, 22 nt, Human
uauuugcaacauaaaacucuga

SEQ ID NO: 142295 - RNA, 22 nt, Human
aaauguauccuacuuccugagu

SEQ ID NO: 142296 - RNA, 22 nt, Human
gcugccuguggcccuucugggu

SEQ ID NO: 142297 - RNA, 22 nt, Human
ggcaguagccagggacuggcag

SEQ ID NO: 142298 - RNA, 22 nt, Human
cuggcugugcagucuuccagaa

SEQ ID NO: 142299 - RNA, 22 nt, Human
acccugagucagacagccugac

SEQ ID NO: 142300 - RNA, 22 nt, Human
uugguuuagagagugugguuac

SEQ ID NO: 142301 - RNA, 21 nt, Human
augcauguuacaguauaugcc

SEQ ID NO: 142302 - RNA, 22 nt, Human
uggagcccagggugagaaggag

SEQ ID NO: 142303 - RNA, 22 nt, Human
agcuggccuucggugucacugg

SEQ ID NO: 142304 - RNA, 22 nt, Human
auacuuacuuuucuucagacua

SEQ ID NO: 142305 - RNA, 22 nt, Human
ccuggcagucaggggaguccuu

SEQ ID NO: 142306 - RNA, 22 nt, Human
uggcugagagucauccugugug

SEQ ID NO: 142307 - RNA, 22 nt, Human
gugcuaggauuacaggcauggg

SEQ ID NO: 142308 - RNA, 22 nt, Human
auguacacaugcaugcaugugc

SEQ ID NO: 142309 - RNA, 22 nt, Human
ucugcucuguggcuucagcuaa

SEQ ID NO: 142310 - RNA, 22 nt, Human
cugggagcuagcucugagcuga

SEQ ID NO: 142311 - RNA, 22 nt, Human
gaaggccaguuuugagauaggu

SEQ ID NO: 142312 - RNA, 22 nt, Human
uucaugugauaaaugugugacu

SEQ ID NO: 142313 - RNA, 22 nt, Human
cauucauuuaugaaauaucuau

SEQ ID NO: 142314 - RNA, 22 nt, Human
uagccucucuccuccacaaccu

SEQ ID NO: 142315 - RNA, 22 nt, Human
cugccuggaccggcagcccucc

SEQ ID NO: 142316 - RNA, 22 nt, Human
ugccacacuccccugcugcagu

SEQ ID NO: 142317 - RNA, 22 nt, Human
aagaacugugcuccaggcucca

SEQ ID NO: 142318 - RNA, 22 nt, Human
acucaggaauggggcugggacu

SEQ ID NO: 142319 - RNA, 22 nt, Human
uaauguguugaauauuuguaca

SEQ ID NO: 142320 - RNA, 22 nt, Human
uuuacaguuccaugugauaggc

SEQ ID NO: 142321 - RNA, 22 nt, Human
cugcccagaagccagaugggca

SEQ ID NO: 142322 - RNA, 22 nt, Human
auuuucugaguccagaauuuac

SEQ ID NO: 142323 - RNA, 22 nt, Human
ccagaccacccuggccaugcac

SEQ ID NO: 142324 - RNA, 22 nt, Human
uguguggguacagaugauuguu

SEQ ID NO: 142325 - RNA, 22 nt, Human
uuguauuuuguuaugcuacugc

SEQ ID NO: 142326 - RNA, 22 nt, Human
cccuucagcugagugggacagc

SEQ ID NO: 142327 - RNA, 22 nt, Human
ugaccaaaggugguuuauuugg

SEQ ID NO: 142328 - RNA, 22 nt, Human
uggagugaaguaaagaggacaa

SEQ ID NO: 142329 - RNA, 21 nt, Human
ggcagccugacccccagagag

SEQ ID NO: 142330 - RNA, 22 nt, Human
ggugcuggacacguggcacucc

SEQ ID NO: 142331 - RNA, 22 nt, Human
ugaugcugcugggaguggugcu

SEQ ID NO: 142332 - RNA, 22 nt, Human
ucuuuagacauccaguuucucu

SEQ ID NO: 142333 - RNA, 22 nt, Human
cacaugaguccugccagguaug

SEQ ID NO: 142334 - RNA, 22 nt, Human
guagcuuauuagggauaauagu

SEQ ID NO: 142335 - RNA, 22 nt, Human
agaugggcgcccuggacugagg

SEQ ID NO: 142336 - RNA, 22 nt, Human
aggccuggugaaugaaguaucu

SEQ ID NO: 142337 - RNA, 22 nt, Human
accccagaggcggaggcugcag

SEQ ID NO: 142338 - RNA, 22 nt, Human
aaaggccacacugcucuuucuc

SEQ ID NO: 142339 - RNA, 22 nt, Human
cuucuucaaccugaaaguuuca

SEQ ID NO: 142340 - RNA, 22 nt, Human
caggcaggugcagauuccucuu

SEQ ID NO: 142341 - RNA, 18 nt, Human
uucagcagcagacacacu

SEQ ID NO: 142342 - RNA, 22 nt, Human
auguucuuccaaaucuguaaca

SEQ ID NO: 142343 - RNA, 22 nt, Human
uaauccacaauagagauuaucu

SEQ ID NO: 142344 - RNA, 22 nt, Human
cagcauggcuugaguguuuccu

SEQ ID NO: 142345 - RNA, 22 nt, Human
ggcacugauuccauucaugaag

SEQ ID NO: 142346 - RNA, 20 nt, Human
ugcagcuucaccugugucau

SEQ ID NO: 142347 - RNA, 22 nt, Human
auggggagagaagggcugagcu

SEQ ID NO: 142348 - RNA, 22 nt, Human
gcuguccaugucuggccucagu

SEQ ID NO: 142349 - RNA, 22 nt, Human
ucuuuagccaguaucauaauga

SEQ ID NO: 142350 - RNA, 22 nt, Human
gagcagcugguaggugaaccca

SEQ ID NO: 142351 - RNA, 19 nt, Human
acaaagcugugagcagcuu

SEQ ID NO: 142352 - RNA, 22 nt, Human
uauguguauguucauucaugca

SEQ ID NO: 142353 - RNA, 22 nt, Human
ggggugggcgugcagggacacc

SEQ ID NO: 142354 - RNA, 22 nt, Human
ccaucagcuccaguaucuucug

SEQ ID NO: 142355 - RNA, 22 nt, Human
uacaguaucuucuggcaagcau

SEQ ID NO: 142356 - RNA, 22 nt, Human
acacauuucucuuuuuguaagu

SEQ ID NO: 142357 - RNA, 22 nt, Human
cccagggcuuuucucacuagac

SEQ ID NO: 142358 - RNA, 22 nt, Human
ucagaggucccuagcaggagug

SEQ ID NO: 142359 - RNA, 23 nt, Human
auuacaguuaauuacaacaucuu

SEQ ID NO: 142360 - RNA, 22 nt, Human
ugcggguugguggcauaugcag

SEQ ID NO: 142361 - RNA, 22 nt, Human
gagccuggauugucaccgacuu

SEQ ID NO: 142362 - RNA, 22 nt, Human
agugaaauggaugcugcuacug

SEQ ID NO: 142363 - RNA, 22 nt, Human
ugaggaugacgauggcaauggc

SEQ ID NO: 142364 - RNA, 22 nt, Human
cuguggcuggcucaucauaggu

SEQ ID NO: 142365 - RNA, 22 nt, Human
uuacaguaauguauuauuuaac

SEQ ID NO: 142366 - RNA, 22 nt, Human
gcuguauuuauuuucuaggguu

SEQ ID NO: 142367 - RNA, 22 nt, Human
auacauguucguguacauguuc

SEQ ID NO: 142368 - RNA, 22 nt, Human
gccuggagcucaugugggcauu

SEQ ID NO: 142369 - RNA, 22 nt, Human
acucugcuuauugcugcaggca

SEQ ID NO: 142370 - RNA, 19 nt, Human
uggcugggugccaauggcc

SEQ ID NO: 142371 - RNA, 22 nt, Human
uaagaacaucuguccccagauu

SEQ ID NO: 142372 - RNA, 22 nt, Human
ucacagaaauaagauaguuauu

SEQ ID NO: 142373 - RNA, 22 nt, Human
ccacucugauuuuggcuccacu

SEQ ID NO: 142374 - RNA, 22 nt, Human
uacuuucuguccuucuguuaaa

SEQ ID NO: 142375 - RNA, 22 nt, Human
gagggagugccagagggccagc

SEQ ID NO: 142376 - RNA, 22 nt, Human
guugaaagaucauguggcugcc

SEQ ID NO: 142377 - RNA, 22 nt, Human
gggagagaugcugauugccaau

SEQ ID NO: 142378 - RNA, 22 nt, Human
ugaugggaaaaugaggccuggg

SEQ ID NO: 142379 - RNA, 22 nt, Human
ccaaagugcugagauuacaggu

SEQ ID NO: 142380 - RNA, 22 nt, Human
caggcacuggccagucagcaca

SEQ ID NO: 142381 - RNA, 22 nt, Human
ugucuuuaguuuuacugucugg

SEQ ID NO: 142382 - RNA, 22 nt, Human
gucugucaucugagauggagug

SEQ ID NO: 142383 - RNA, 22 nt, Human
uaaguucaguuggucgaaguag

SEQ ID NO: 142384 - RNA, 22 nt, Human
gcuggagccuucugcucuguug

SEQ ID NO: 142385 - RNA, 22 nt, Human
cccagacauaacagcagagagg

SEQ ID NO: 142386 - RNA, 21 nt, Human
cugagggccgcagcugggcuc

SEQ ID NO: 142387 - RNA, 22 nt, Human
uggcuuccugcauggauccucu

SEQ ID NO: 142388 - RNA, 22 nt, Human
acagcagcuggguucccaccau

SEQ ID NO: 142389 - RNA, 22 nt, Human
gagggcagagacagugauucac

SEQ ID NO: 142390 - RNA, 22 nt, Human
agcaauauaaauguuggguaga

SEQ ID NO: 142391 - RNA, 22 nt, Human
uccagcagaccaucaaggcuca

SEQ ID NO: 142392 - RNA, 22 nt, Human
ccuccucugggaagauucagag

SEQ ID NO: 142393 - RNA, 22 nt, Human
augggggccugaacaggcaaaa

SEQ ID NO: 142394 - RNA, 22 nt, Human
uuaugacaggaaaaucacagaa

SEQ ID NO: 142395 - RNA, 22 nt, Human
caggugcccagcuccugcugug

SEQ ID NO: 142396 - RNA, 22 nt, Human
aagcacaaugaacaucuuagau

SEQ ID NO: 142397 - RNA, 22 nt, Human
aguggcuguucauuuuacacaa

SEQ ID NO: 142398 - RNA, 22 nt, Human
aucuguguguugaguucucagc

SEQ ID NO: 142399 - RNA, 22 nt, Human
gccugaggaaugcuccugacuu

SEQ ID NO: 142400 - RNA, 22 nt, Human
ccuggcugggguagaagugagg

SEQ ID NO: 142401 - RNA, 22 nt, Human
aaaugcacucugcuucugugac

SEQ ID NO: 142402 - RNA, 22 nt, Human
uucuccucuguuggccuucccu

SEQ ID NO: 142403 - RNA, 22 nt, Human
gaaaucugcccagugcacuggu

SEQ ID NO: 142404 - RNA, 20 nt, Human
cguguguggcuauuuugggu

SEQ ID NO: 142405 - RNA, 22 nt, Human
cuggcuuccaugcuguaguggc

SEQ ID NO: 142406 - RNA, 22 nt, Human
ccucugagaccagcucugcacc

SEQ ID NO: 142407 - RNA, 22 nt, Human
cagggcagaaggcacucuacuc

SEQ ID NO: 142408 - RNA, 22 nt, Human
cucugugugguagauuccauua

SEQ ID NO: 142409 - RNA, 22 nt, Human
ucccagccugacagugcaucaa

SEQ ID NO: 142410 - RNA, 22 nt, Human
uaaguucauuagacuacagaua

SEQ ID NO: 142411 - RNA, 22 nt, Human
cuggagcagguuuaggaguccc

SEQ ID NO: 142412 - RNA, 22 nt, Human
cagucuucuaaccuagcagccu

SEQ ID NO: 142413 - RNA, 22 nt, Human
uaugugcaguuugcucuuaaca

SEQ ID NO: 142414 - RNA, 22 nt, Human
agggagcaugggugaagcaggc

SEQ ID NO: 142415 - RNA, 22 nt, Human
uuuaaaaaacuagucugagucu

SEQ ID NO: 142416 - RNA, 22 nt, Human
gggcugugggacccggcacuuu

SEQ ID NO: 142417 - RNA, 22 nt, Human
aggacagaccuaggacuggagc

SEQ ID NO: 142418 - RNA, 22 nt, Human
gcugucuugcucacucuugcag

SEQ ID NO: 142419 - RNA, 22 nt, Human
uccagucauuuccauuguuccc

SEQ ID NO: 142420 - RNA, 22 nt, Human
auaugaagaauuccaauuugga

SEQ ID NO: 142421 - RNA, 22 nt, Human
cugggcacuugcucacagcucu

SEQ ID NO: 142422 - RNA, 22 nt, Human
auggcuguuccugggaguucua

SEQ ID NO: 142423 - RNA, 22 nt, Human
ugugacaugugucaucuuuucu

SEQ ID NO: 142424 - RNA, 22 nt, Human
uggcagcuggagggcaauggcc

SEQ ID NO: 142425 - RNA, 22 nt, Human
augcauguauucaugugugaca

SEQ ID NO: 142426 - RNA, 21 nt, Human
uuucuuucuggcucucacagu

SEQ ID NO: 142427 - RNA, 22 nt, Human
ugcaccauuuugucaggcuacu

SEQ ID NO: 142428 - RNA, 22 nt, Human
auauacuuggagacuaucauug

SEQ ID NO: 142429 - RNA, 22 nt, Human
caagaauuguacaaacugggug

SEQ ID NO: 142430 - RNA, 22 nt, Human
ggagccaggggaccuucacaga

SEQ ID NO: 142431 - RNA, 22 nt, Human
cuguaaauaugaagaauauaug

SEQ ID NO: 142432 - RNA, 19 nt, Human
cccuggcaggcaagccugg

SEQ ID NO: 142433 - RNA, 22 nt, Human
uuugggaaacuuaggggucaga

SEQ ID NO: 142434 - RNA, 22 nt, Human
ugcagcuucuuguccugugauu

SEQ ID NO: 142435 - RNA, 22 nt, Human
gcucccagaaccaaggcugggg

SEQ ID NO: 142436 - RNA, 22 nt, Human
cacauggggcgcugcauuggcc

SEQ ID NO: 142437 - RNA, 22 nt, Human
ugucccuggaacuauggcucca

SEQ ID NO: 142438 - RNA, 22 nt, Human
agcccaagcauaggagggaggc

SEQ ID NO: 142439 - RNA, 22 nt, Human
uuuauuguugggucuuaagcug

SEQ ID NO: 142440 - RNA, 22 nt, Human
cgcugggcgccgaccugcuggc

SEQ ID NO: 142441 - RNA, 22 nt, Human
ugcaguggaagagguggagauc

SEQ ID NO: 142442 - RNA, 22 nt, Human
ggugcagugguguggcaaaggg

SEQ ID NO: 142443 - RNA, 22 nt, Human
auggcugugagacaaagagcug

SEQ ID NO: 142444 - RNA, 22 nt, Human
auacauuagaaucugguacuca

SEQ ID NO: 142445 - RNA, 22 nt, Human
uccugccucacaguugaaguuu

SEQ ID NO: 142446 - RNA, 22 nt, Human
caaaguccauaguuuacaauag

SEQ ID NO: 142447 - RNA, 22 nt, Human
uccagcaguccaugugagacac

SEQ ID NO: 142448 - RNA, 22 nt, Human
auuugucuuuggaccugugaga

SEQ ID NO: 142449 - RNA, 22 nt, Human
ccuccagcgcgauccacuccgg

SEQ ID NO: 142450 - RNA, 22 nt, Human
uggcaggguuggccaccuuacc

SEQ ID NO: 142451 - RNA, 22 nt, Human
ggggcagaguagcuggggugug

SEQ ID NO: 142452 - RNA, 22 nt, Human
ccaaagucagugcucagucguc

SEQ ID NO: 142453 - RNA, 22 nt, Human
gagacacaaacauuuauuccac

SEQ ID NO: 142454 - RNA, 22 nt, Human
aagacauuuauuugaaucaauu

SEQ ID NO: 142455 - RNA, 22 nt, Human
gguggccucugcaggccucgac

SEQ ID NO: 142456 - RNA, 22 nt, Human
cugcuuugcauagcugccagag

SEQ ID NO: 142457 - RNA, 22 nt, Human
gugcagggcuggcaccggaggc

SEQ ID NO: 142458 - RNA, 22 nt, Human
augauguugauaaauuacuuua

SEQ ID NO: 142459 - RNA, 22 nt, Human
ugcuuccugaggccgucuucuc

SEQ ID NO: 142460 - RNA, 22 nt, Human
gucccagaggcuuuggccacag

SEQ ID NO: 142461 - RNA, 22 nt, Human
ccaugagcuucaacugacacag

SEQ ID NO: 142462 - RNA, 22 nt, Human
ugaacagaucaauagaacugac

SEQ ID NO: 142463 - RNA, 22 nt, Human
uguggcugggaagaagguaacu

SEQ ID NO: 142464 - RNA, 22 nt, Human
auuaacuuuugaucaguguggu

SEQ ID NO: 142465 - RNA, 22 nt, Human
ugagccagccuugcagcugugc

SEQ ID NO: 142466 - RNA, 22 nt, Human
gcagcugcaggcaggcuugcug

SEQ ID NO: 142467 - RNA, 22 nt, Human
cauuaagauuuuuuucuacugg

SEQ ID NO: 142468 - RNA, 22 nt, Human
ggcugcagcagagggacucacg

SEQ ID NO: 142469 - RNA, 22 nt, Human
uucacauuugcccuuaugugug

SEQ ID NO: 142470 - RNA, 22 nt, Human
agccuggauucgugcauccaca

SEQ ID NO: 142471 - RNA, 22 nt, Human
cacccacccacugcucauuggc

SEQ ID NO: 142472 - RNA, 22 nt, Human
ccagaggcuggguucaccucag

SEQ ID NO: 142473 - RNA, 22 nt, Human
ugucucuggcccaugagcagag

SEQ ID NO: 142474 - RNA, 22 nt, Human
ugcucugguccucccucggcgc

SEQ ID NO: 142475 - RNA, 22 nt, Human
aaaggucaagcuggacucaggu

SEQ ID NO: 142476 - RNA, 22 nt, Human
agugucugccagcugccaggug

SEQ ID NO: 142477 - RNA, 22 nt, Human
ugggcugccagcucuccagaug

SEQ ID NO: 142478 - RNA, 23 nt, Human
acucacaaagcaggaucauguug

SEQ ID NO: 142479 - RNA, 22 nt, Human
ggcugaguucucuugcugaauc

SEQ ID NO: 142480 - RNA, 22 nt, Human
guuuuuccuugcugaggacccg

SEQ ID NO: 142481 - RNA, 22 nt, Human
cucugugucugaagcccuauuu

SEQ ID NO: 142482 - RNA, 22 nt, Human
cuggggcucacuuuggucaggc

SEQ ID NO: 142483 - RNA, 22 nt, Human
aaaauuauggaguaucccaaag

SEQ ID NO: 142484 - RNA, 22 nt, Human
ccagcaggagagaacauuuccc

SEQ ID NO: 142485 - RNA, 22 nt, Human
uagggcaggggaggaaucugaa

SEQ ID NO: 142486 - RNA, 22 nt, Human
aggcaguggcugagaccagggg

SEQ ID NO: 142487 - RNA, 22 nt, Human
agugucugaaccaccggggcau

SEQ ID NO: 142488 - RNA, 22 nt, Human
uccucuuuaaaugcuuuuaucu

SEQ ID NO: 142489 - RNA, 22 nt, Human
cuggguaaguuccuaaggcuca

SEQ ID NO: 142490 - RNA, 22 nt, Human
ucucugggauaaacugggccag

SEQ ID NO: 142491 - RNA, 22 nt, Human
cugcagccucaaccuccugagc

SEQ ID NO: 142492 - RNA, 22 nt, Human
gggcacugcuggaggcucccug

SEQ ID NO: 142493 - RNA, 22 nt, Human
gcugagagaaaagugagguucu

SEQ ID NO: 142494 - RNA, 22 nt, Human
aauaugugagguauguucagug

SEQ ID NO: 142495 - RNA, 23 nt, Human
gggagaauaugaggaugauggug

SEQ ID NO: 142496 - RNA, 22 nt, Human
ucucacugcaaauauuauguau

SEQ ID NO: 142497 - RNA, 22 nt, Human
ucugagugucuuaauaggcucu

SEQ ID NO: 142498 - RNA, 18 nt, Human
ccuggcagccaugcgcgc

SEQ ID NO: 142499 - RNA, 22 nt, Human
agggauguaaauucuucuucuu

SEQ ID NO: 142500 - RNA, 23 nt, Human
uguugaaguaacuguuacauaga

SEQ ID NO: 142501 - RNA, 22 nt, Human
uuucuuaggcucuaaaaugacu

SEQ ID NO: 142502 - RNA, 22 nt, Human
gagcaggcucugccuguguguc

SEQ ID NO: 142503 - RNA, 22 nt, Human
gccugcuguuaacugcaggaau

SEQ ID NO: 142504 - RNA, 22 nt, Human
gguggccucgguggugcacagg

SEQ ID NO: 142505 - RNA, 22 nt, Human
accuggccauccagcuggcauc

SEQ ID NO: 142506 - RNA, 22 nt, Human
caggugcucccagagaagugcu

SEQ ID NO: 142507 - RNA, 22 nt, Human
cucuuucaguucugauagucuc

SEQ ID NO: 142508 - RNA, 22 nt, Human
guuauaaauaccuaauaggauu

SEQ ID NO: 142509 - RNA, 22 nt, Human
caggggcaagaaugcugucagc

SEQ ID NO: 142510 - RNA, 22 nt, Human
cagauauauuuuauuuggucaa

SEQ ID NO: 142511 - RNA, 22 nt, Human
gcugucaggaacaugccuuggu

SEQ ID NO: 142512 - RNA, 22 nt, Human
acaaaggugcgucccuucagcu

SEQ ID NO: 142513 - RNA, 18 nt, Human
gggcaagcggcugucacc

SEQ ID NO: 142514 - RNA, 22 nt, Human
guguaaggugaaaucaacaaau

SEQ ID NO: 142515 - RNA, 22 nt, Human
agcagcauagaagcugggagga

SEQ ID NO: 142516 - RNA, 22 nt, Human
cuguuugugauuagcagugggu

SEQ ID NO: 142517 - RNA, 22 nt, Human
aaggccaggacaccaggggacu

SEQ ID NO: 142518 - RNA, 22 nt, Human
uugaaaggguuaaagugguaaa

SEQ ID NO: 142519 - RNA, 22 nt, Human
uuauuuauuguguaccuacugu

SEQ ID NO: 142520 - RNA, 22 nt, Human
uuucauguuuauggaaaaugag

SEQ ID NO: 142521 - RNA, 19 nt, Human
aguguauuuuuuucuguag

SEQ ID NO: 142522 - RNA, 22 nt, Human
agagcugugcuuugcaccacgu

SEQ ID NO: 142523 - RNA, 22 nt, Human
gccaccagggggcuccagugag

SEQ ID NO: 142524 - RNA, 22 nt, Human
ccaggagucuggaugagguguc

SEQ ID NO: 142525 - RNA, 22 nt, Human
ccuguguguaggccaggggagu

SEQ ID NO: 142526 - RNA, 22 nt, Human
ucucagucagccuugauguccc

SEQ ID NO: 142527 - RNA, 22 nt, Human
ugugugugaaccauugagggcu

SEQ ID NO: 142528 - RNA, 22 nt, Human
caggcagagugagguggucuaa

SEQ ID NO: 142529 - RNA, 22 nt, Human
uacuauuuauggagugguuauu

SEQ ID NO: 142530 - RNA, 22 nt, Human
guuauaaaggugauaaugguca

SEQ ID NO: 142531 - RNA, 22 nt, Human
ggcuggccuguguggccgccac

SEQ ID NO: 142532 - RNA, 20 nt, Human
gcaaggcacagugaggaggg

SEQ ID NO: 142533 - RNA, 20 nt, Human
uacagaaugcaauaaaaugg

SEQ ID NO: 142534 - RNA, 22 nt, Human
agugggcagugcgcucggaugc

SEQ ID NO: 142535 - RNA, 22 nt, Human
gucaccagugcuaagaggugga

SEQ ID NO: 142536 - RNA, 22 nt, Human
uucaguauauuacucuugucaa

SEQ ID NO: 142537 - RNA, 22 nt, Human
guccuggggauacagaagugaa

SEQ ID NO: 142538 - RNA, 22 nt, Human
aaaugcauaucaaagacuugaa

SEQ ID NO: 142539 - RNA, 22 nt, Human
gcucagaggaugcuccuuuaug

SEQ ID NO: 142540 - RNA, 22 nt, Human
aaagaggaaccaagagcacgug

SEQ ID NO: 142541 - RNA, 22 nt, Human
uucaguaaaacacugcaauguc

SEQ ID NO: 142542 - RNA, 20 nt, Human
caggccucugggggcccugg

SEQ ID NO: 142543 - RNA, 22 nt, Human
agaaaugugaauuucauuuccu

SEQ ID NO: 142544 - RNA, 22 nt, Human
gcagcagaugcuuucauggaca

SEQ ID NO: 142545 - RNA, 22 nt, Human
uaaggcacuucaauguuuagaa

SEQ ID NO: 142546 - RNA, 22 nt, Human
ccagggcagugggagaaggugc

SEQ ID NO: 142547 - RNA, 22 nt, Human
cagcaguggccaucuguguggu

SEQ ID NO: 142548 - RNA, 22 nt, Human
uguaggaguccaaucaggagac

SEQ ID NO: 142549 - RNA, 22 nt, Human
uuguaugcugaucaaaagcuuc

SEQ ID NO: 142550 - RNA, 21 nt, Human
aaugugugcuauuuaucuuuu

SEQ ID NO: 142551 - RNA, 22 nt, Human
cagcucugaggaacacuccuuu

SEQ ID NO: 142552 - RNA, 22 nt, Human
ccuggcuguggcggugcucuca

SEQ ID NO: 142553 - RNA, 22 nt, Human
ucaugacaucuguuuaucucaa

SEQ ID NO: 142554 - RNA, 22 nt, Human
ggagcugcauuuagggagccuu

SEQ ID NO: 142555 - RNA, 22 nt, Human
uucacagacuuuccauagauug

SEQ ID NO: 142556 - RNA, 22 nt, Human
cccagcuccagagccagaaaca

SEQ ID NO: 142557 - RNA, 22 nt, Human
augcuuuuccuaaaaugaugcc

SEQ ID NO: 142558 - RNA, 22 nt, Human
gaagccaagugcaaaugccuua

SEQ ID NO: 142559 - RNA, 22 nt, Human
ggagagaauuccauggacaugu

SEQ ID NO: 142560 - RNA, 22 nt, Human
gcugugugcuaggauauguuuu

SEQ ID NO: 142561 - RNA, 22 nt, Human
accagcucagaagccagaaaga

SEQ ID NO: 142562 - RNA, 22 nt, Human
ugugugcacaggaguguuugaa

SEQ ID NO: 142563 - RNA, 22 nt, Human
cuuucucuuacccaaggaucug

SEQ ID NO: 142564 - RNA, 22 nt, Human
uuuaucaguagcaaaguuuuaa

SEQ ID NO: 142565 - RNA, 22 nt, Human
gcacagaaguaaaauacaaguc

SEQ ID NO: 142566 - RNA, 22 nt, Human
aagccgggccugagaaaugaca

SEQ ID NO: 142567 - RNA, 22 nt, Human
gagcacugauuuauuuuugucu

SEQ ID NO: 142568 - RNA, 22 nt, Human
caaaguauauuggauugaaugg

SEQ ID NO: 142569 - RNA, 22 nt, Human
uggcacuggcgcaggauggcgg

SEQ ID NO: 142570 - RNA, 22 nt, Human
cuggcuguguccacagaguaag

SEQ ID NO: 142571 - RNA, 16 nt, Human
uuucucucugcuauuu

SEQ ID NO: 142572 - RNA, 22 nt, Human
uguguaugucuguaugcacaca

SEQ ID NO: 142573 - RNA, 22 nt, Human
uacauucuggaaaggcacagac

SEQ ID NO: 142574 - RNA, 20 nt, Human
ggagagcagggaagacagua

SEQ ID NO: 142575 - RNA, 22 nt, Human
ucaaagucacaacucucuaauu

SEQ ID NO: 142576 - RNA, 22 nt, Human
uugucucugggacaugguauua

SEQ ID NO: 142577 - RNA, 22 nt, Human
aagcagaaguugaucuaccaua

SEQ ID NO: 142578 - RNA, 22 nt, Human
ugugugccccagaugaguagcu

SEQ ID NO: 142579 - RNA, 22 nt, Human
cagagccccucagcucucuccc

SEQ ID NO: 142580 - RNA, 22 nt, Human
gaggcagcugaaggagugacag

SEQ ID NO: 142581 - RNA, 22 nt, Human
gcagcccaauggacugagacag

SEQ ID NO: 142582 - RNA, 22 nt, Human
guucuucaucauuuuagauagg

SEQ ID NO: 142583 - RNA, 22 nt, Human
cugcuuuggcucagugacauca

SEQ ID NO: 142584 - RNA, 22 nt, Human
uaucuuuagaggaagagaaucu

SEQ ID NO: 142585 - RNA, 22 nt, Human
ccuggagcgcgggucaagcugg

SEQ ID NO: 142586 - RNA, 22 nt, Human
uggcagagcuggcugcggauga

SEQ ID NO: 142587 - RNA, 20 nt, Human
uacuugaauguugcagcagu

SEQ ID NO: 142588 - RNA, 22 nt, Human
agucccagccuguaggauuggg

SEQ ID NO: 142589 - RNA, 20 nt, Human
uuauuucucauucuccuacu

SEQ ID NO: 142590 - RNA, 22 nt, Human
cacaggguuguucugaggauuc

SEQ ID NO: 142591 - RNA, 19 nt, Human
ccaguagagacagcugcag

SEQ ID NO: 142592 - RNA, 22 nt, Human
ucuacccagagcuaugaccuga

SEQ ID NO: 142593 - RNA, 22 nt, Human
ccagggcauguccaagacuuag

SEQ ID NO: 142594 - RNA, 22 nt, Human
aggcacugaagaacucuuuuug

SEQ ID NO: 142595 - RNA, 22 nt, Human
ccuggcucuucagagguuccua

SEQ ID NO: 142596 - RNA, 20 nt, Human
cucucuggaaggugggagcc

SEQ ID NO: 142597 - RNA, 17 nt, Human
ucaggauguagcaguag

SEQ ID NO: 142598 - RNA, 21 nt, Human
aggcugugacuuacacuaucu

SEQ ID NO: 142599 - RNA, 22 nt, Human
cugugcugauucagcacaggcc

SEQ ID NO: 142600 - RNA, 22 nt, Human
cagcugaguguuggcauguuca

SEQ ID NO: 142601 - RNA, 22 nt, Human
caggaccccauauucacugaac

SEQ ID NO: 142602 - RNA, 20 nt, Human
gugaccagaagacagugggu

SEQ ID NO: 142603 - RNA, 22 nt, Human
agagugaaguuuuugaaaguga

SEQ ID NO: 142604 - RNA, 22 nt, Human
gcccagcagcugguggagaagg

SEQ ID NO: 142605 - RNA, 22 nt, Human
ggagccuuccagacugcccaca

SEQ ID NO: 142606 - RNA, 22 nt, Human
gauacaaauucaugucugaauu

SEQ ID NO: 142607 - RNA, 22 nt, Human
uuaauacagucuccagaaguaa

SEQ ID NO: 142608 - RNA, 22 nt, Human
uaagaacagugucugucucaca

SEQ ID NO: 142609 - RNA, 18 nt, Human
gcugcgugggaugugacc

SEQ ID NO: 142610 - RNA, 22 nt, Human
gcacagguugcaaaaguucaca

SEQ ID NO: 142611 - RNA, 22 nt, Human
cucaaguaagaaacagaauugg

SEQ ID NO: 142612 - RNA, 22 nt, Human
cagcaaaauuugaggauugccu

SEQ ID NO: 142613 - RNA, 22 nt, Human
ugccuggcaagaggggcuggcu

SEQ ID NO: 142614 - RNA, 22 nt, Human
guguauugcacauccuguagcc

SEQ ID NO: 142615 - RNA, 22 nt, Human
cugggguggauggguccaaguu

SEQ ID NO: 142616 - RNA, 22 nt, Human
gagaaguuucugguuugcauag

SEQ ID NO: 142617 - RNA, 22 nt, Human
cacacaggaugaagcagcagaa

SEQ ID NO: 142618 - RNA, 22 nt, Human
gugcagcagggggaagacagug

SEQ ID NO: 142619 - RNA, 22 nt, Human
cccuguccuggaugggagcacu

SEQ ID NO: 142620 - RNA, 22 nt, Human
aggcagugcagaguccucuucu

SEQ ID NO: 142621 - RNA, 22 nt, Human
uucaaugagcccaagaacguga

SEQ ID NO: 142622 - RNA, 22 nt, Human
aaacuuuuucuuagguaugucu

SEQ ID NO: 142623 - RNA, 22 nt, Human
guggagccaggaucuccgcaca

SEQ ID NO: 142624 - RNA, 22 nt, Human
cuacauuuuucaccgagccucu

SEQ ID NO: 142625 - RNA, 22 nt, Human
cacugagcugauagaauuccag

SEQ ID NO: 142626 - RNA, 22 nt, Human
cugaaugaggaaaagagugagg

SEQ ID NO: 142627 - RNA, 22 nt, Human
ugucucuuggcucuaucacuua

SEQ ID NO: 142628 - RNA, 22 nt, Human
gguaacaguauguagaguaaga

SEQ ID NO: 142629 - RNA, 18 nt, Human
ggagagugagaucaaaca

SEQ ID NO: 142630 - RNA, 22 nt, Human
ugaaaggugacauuucuuggau

SEQ ID NO: 142631 - RNA, 22 nt, Human
cucccagagaccaagcugagaa

SEQ ID NO: 142632 - RNA, 22 nt, Human
ccuuuugcucucccauccagaa

SEQ ID NO: 142633 - RNA, 22 nt, Human
cugucuuuucauacuuucccuc

SEQ ID NO: 142634 - RNA, 22 nt, Human
aucugguuuggggauccuugug

SEQ ID NO: 142635 - RNA, 22 nt, Human
guggccaggccgacugccaggc

SEQ ID NO: 142636 - RNA, 22 nt, Human
gagccuggauugaagugggugg

SEQ ID NO: 142637 - RNA, 22 nt, Human
agagggagcccagucauagcug

SEQ ID NO: 142638 - RNA, 20 nt, Human
auaauuuacccugcaccacu

SEQ ID NO: 142639 - RNA, 22 nt, Human
uauaauuuuagaagagauggaa

SEQ ID NO: 142640 - RNA, 22 nt, Human
cccagccucugggcucacccaa

SEQ ID NO: 142641 - RNA, 22 nt, Human
gcacccagccagcaucucagag

SEQ ID NO: 142642 - RNA, 22 nt, Human
uaaacagaaagcagauguacuu

SEQ ID NO: 142643 - RNA, 22 nt, Human
aggcacugaccugcuuccuuga

SEQ ID NO: 142644 - RNA, 20 nt, Human
cacaagagaauacacacugg

SEQ ID NO: 142645 - RNA, 22 nt, Human
ugugcguggauuccuguacuca

SEQ ID NO: 142646 - RNA, 20 nt, Human
ucucaggguucagcaaagua

SEQ ID NO: 142647 - RNA, 23 nt, Human
uggcccugaaucuguccuggagg

SEQ ID NO: 142648 - RNA, 22 nt, Human
uuauucuuuaaacauauauguu

SEQ ID NO: 142649 - RNA, 22 nt, Human
gccuggcugagguggggaggca

SEQ ID NO: 142650 - RNA, 22 nt, Human
gcaguauacacugauacaugag

SEQ ID NO: 142651 - RNA, 22 nt, Human
uccuucuuucccccuagucauu

SEQ ID NO: 142652 - RNA, 22 nt, Human
acagugucuccugguacccagu

SEQ ID NO: 142653 - RNA, 22 nt, Human
uaggccaguggcagguugugug

SEQ ID NO: 142654 - RNA, 22 nt, Human
gccucugcugacaagauggaca

SEQ ID NO: 142655 - RNA, 22 nt, Human
agcuguguguuugucaugggcg

SEQ ID NO: 142656 - RNA, 22 nt, Human
augggagugacagggccacugg

SEQ ID NO: 142657 - RNA, 22 nt, Human
aagugguagacaaagauaauug

SEQ ID NO: 142658 - RNA, 22 nt, Human
aaauguguauaugaaacaugau

SEQ ID NO: 142659 - RNA, 19 nt, Human
uggccagguacugucugcu

SEQ ID NO: 142660 - RNA, 22 nt, Human
gaaaucugucuuuguuugaaua

SEQ ID NO: 142661 - RNA, 20 nt, Human
uccaguuuuggagacauucu

SEQ ID NO: 142662 - RNA, 22 nt, Human
uacauacacaaauauacuguuu

SEQ ID NO: 142663 - RNA, 22 nt, Human
uauuuucuggacagucuugcuu

SEQ ID NO: 142664 - RNA, 22 nt, Human
gcauggcagugaggauggugcu

SEQ ID NO: 142665 - RNA, 22 nt, Human
ucucucagucagaugcuaaaga

SEQ ID NO: 142666 - RNA, 22 nt, Human
auugacaauguauuuguaucug

SEQ ID NO: 142667 - RNA, 22 nt, Human
uauguacaccggggaagguggg

SEQ ID NO: 142668 - RNA, 22 nt, Human
ucugguaaccuuuaucccuccu

SEQ ID NO: 142669 - RNA, 22 nt, Human
uucaggauucugugucugacaa

SEQ ID NO: 142670 - RNA, 22 nt, Human
aaggccaugcacauccuaggca

SEQ ID NO: 142671 - RNA, 22 nt, Human
cuucacaggcaagucuguuuuu

SEQ ID NO: 142672 - RNA, 22 nt, Human
acauuucugucuuagggacugu

SEQ ID NO: 142673 - RNA, 22 nt, Human
ucucauuugccucaucuauaaa

SEQ ID NO: 142674 - RNA, 22 nt, Human
ggcaccuggagguuuacuggau

SEQ ID NO: 142675 - RNA, 22 nt, Human
uccaaacacccuccaugcugca

SEQ ID NO: 142676 - RNA, 22 nt, Human
uagugcacacgcauguagcagu

SEQ ID NO: 142677 - RNA, 22 nt, Human
cagagccugccucuggcugugg

SEQ ID NO: 142678 - RNA, 22 nt, Human
agcuucucaggagucugaggca

SEQ ID NO: 142679 - RNA, 22 nt, Human
ugugucuguccucgguugaugc

SEQ ID NO: 142680 - RNA, 22 nt, Human
aguuaaagucugaaauagagaa

SEQ ID NO: 142681 - RNA, 22 nt, Human
uuucaucuuauuugucuacauc

SEQ ID NO: 142682 - RNA, 22 nt, Human
ugggcuacucugggagccuaac

SEQ ID NO: 142683 - RNA, 23 nt, Human
ggcugagacuacaggcgcuugcc

SEQ ID NO: 142684 - RNA, 22 nt, Human
ucaaugauagacaagaucuaag

SEQ ID NO: 142685 - RNA, 22 nt, Human
gagcaggcuugcagagaagggg

SEQ ID NO: 142686 - RNA, 22 nt, Human
ccuccugguccagcaucucuuu

SEQ ID NO: 142687 - RNA, 16 nt, Human
ugggcagaugagaaga

SEQ ID NO: 142688 - RNA, 22 nt, Human
ucauuuaauaauuuuugaguag

SEQ ID NO: 142689 - RNA, 22 nt, Human
auguuucugaguguauauacau

SEQ ID NO: 142690 - RNA, 22 nt, Human
gaguguuccagaaacuggcccu

SEQ ID NO: 142691 - RNA, 22 nt, Human
ugauuuccuggcuuuggaguuc

SEQ ID NO: 142692 - RNA, 22 nt, Human
ggcccagcccgagucagccuuc

SEQ ID NO: 142693 - RNA, 22 nt, Human
uugaaaguagcagcugcauaug

SEQ ID NO: 142694 - RNA, 23 nt, Human
aggagaagagauuuccacaugca

SEQ ID NO: 142695 - RNA, 22 nt, Human
gagggcaggggucuugcacggu

SEQ ID NO: 142696 - RNA, 17 nt, Human
guuugcaugguguuaac

SEQ ID NO: 142697 - RNA, 22 nt, Human
ccaggggaaacagggagcacuc

SEQ ID NO: 142698 - RNA, 22 nt, Human
cuccaggggccagaagccuggc

SEQ ID NO: 142699 - RNA, 22 nt, Human
guguggcugauugacaugguca

SEQ ID NO: 142700 - RNA, 22 nt, Human
uccucagacuucccuuugugua

SEQ ID NO: 142701 - RNA, 22 nt, Human
uggagcugauacagcuggcuuu

SEQ ID NO: 142702 - RNA, 22 nt, Human
cuccucuggaaauuccucugcc

SEQ ID NO: 142703 - RNA, 22 nt, Human
uaucuuuaacuugcaguauuua

SEQ ID NO: 142704 - RNA, 22 nt, Human
gagcuggugugugcccgagcac

SEQ ID NO: 142705 - RNA, 22 nt, Human
cugcuucuaagaaccugcagcu

SEQ ID NO: 142706 - RNA, 18 nt, Human
gcugagguggugucagag

SEQ ID NO: 142707 - RNA, 22 nt, Human
caugaagcuugaagcaguccac

SEQ ID NO: 142708 - RNA, 17 nt, Human
uccuucagugccucugc

SEQ ID NO: 142709 - RNA, 22 nt, Human
aucuacaggcugaggugggagg

SEQ ID NO: 142710 - RNA, 22 nt, Human
aacaugaaaguugcuaagugca

SEQ ID NO: 142711 - RNA, 22 nt, Human
aaauguguguauguacauauau

SEQ ID NO: 142712 - RNA, 22 nt, Human
augaaggcuguguggagccccc

SEQ ID NO: 142713 - RNA, 22 nt, Human
cuugugcauuucauuccucagg

SEQ ID NO: 142714 - RNA, 22 nt, Human
cagcugugcuguauuaagcucu

SEQ ID NO: 142715 - RNA, 22 nt, Human
ggcagcagaacuggcccuguau

SEQ ID NO: 142716 - RNA, 22 nt, Human
gucuucuuuaaccuacuaaagc

SEQ ID NO: 142717 - RNA, 22 nt, Human
agcagcugaucaaagcacuuau

SEQ ID NO: 142718 - RNA, 22 nt, Human
ggucuuccgagaggccugugcu

SEQ ID NO: 142719 - RNA, 21 nt, Human
ugaaugaggaggauggcauuu

SEQ ID NO: 142720 - RNA, 20 nt, Human
auaaaauaacugccacaaga

SEQ ID NO: 142721 - RNA, 22 nt, Human
gagagugagauccuccugggga

SEQ ID NO: 142722 - RNA, 22 nt, Human
cagagaaaaaauccugcucuca

SEQ ID NO: 142723 - RNA, 22 nt, Human
agaacagaugugggcagaccug

SEQ ID NO: 142724 - RNA, 22 nt, Human
agccauggcgccacuagaggga

SEQ ID NO: 142725 - RNA, 19 nt, Human
ucucuacacuacauuucua

SEQ ID NO: 142726 - RNA, 22 nt, Human
cuggaaugccucccugucagag

SEQ ID NO: 142727 - RNA, 22 nt, Human
ugcaauaacccaguaucuguga

SEQ ID NO: 142728 - RNA, 22 nt, Human
gagcacugagcuggaauuggag

SEQ ID NO: 142729 - RNA, 22 nt, Human
gaaugcagauggcugguguaug

SEQ ID NO: 142730 - RNA, 22 nt, Human
augcaucauggaaaacucaguu

SEQ ID NO: 142731 - RNA, 22 nt, Human
cugugcuuccaggauggcagcu

SEQ ID NO: 142732 - RNA, 22 nt, Human
gccacaggcacuuaagggcugg

SEQ ID NO: 142733 - RNA, 22 nt, Human
ggcuggucacaccacugcaggg

SEQ ID NO: 142734 - RNA, 22 nt, Human
ggcagaggaagcuggaaguggg

SEQ ID NO: 142735 - RNA, 22 nt, Human
cucuucuugccugaugaggcag

SEQ ID NO: 142736 - RNA, 19 nt, Human
cagaacagaggucauggcc

SEQ ID NO: 142737 - RNA, 20 nt, Human
caggcacacucauuccugcu

SEQ ID NO: 142738 - RNA, 22 nt, Human
auugaauagaugcauuauacua

SEQ ID NO: 142739 - RNA, 22 nt, Human
ugggacagggaaucugaucccc

SEQ ID NO: 142740 - RNA, 22 nt, Human
aggacuucuccgauaagucaga

SEQ ID NO: 142741 - RNA, 22 nt, Human
ugggcugccggcaggcucugcc

SEQ ID NO: 142742 - RNA, 22 nt, Human
acuuugcagagccagaagagaa

SEQ ID NO: 142743 - RNA, 22 nt, Human
auguaucaauuaucugucugca

SEQ ID NO: 142744 - RNA, 22 nt, Human
cacugaagcuuucauucucuug

SEQ ID NO: 142745 - RNA, 20 nt, Human
gccagcacagggagcaguuc

SEQ ID NO: 142746 - RNA, 22 nt, Human
aggcaaaauuacaaaguuauua

SEQ ID NO: 142747 - RNA, 22 nt, Human
ucugugcugccauccuguggcc

SEQ ID NO: 142748 - RNA, 19 nt, Human
uggcaggcccaggauggac

SEQ ID NO: 142749 - RNA, 22 nt, Human
gaggccugcuuuggcacucugg

SEQ ID NO: 142750 - RNA, 22 nt, Human
aggcugucaucuuugcaggcag

SEQ ID NO: 142751 - RNA, 22 nt, Human
uaacuuuggggacacuucucuu

SEQ ID NO: 142752 - RNA, 22 nt, Human
aaaggccauuacuugcuuuuag

SEQ ID NO: 142753 - RNA, 22 nt, Human
cagcugccccuccagggcuggg

SEQ ID NO: 142754 - RNA, 22 nt, Human
guauuauucucagcuuugggau

SEQ ID NO: 142755 - RNA, 20 nt, Human
uuucacagucccuguuuccu

SEQ ID NO: 142756 - RNA, 21 nt, Human
agcugggccucagccugcagu

SEQ ID NO: 142757 - RNA, 22 nt, Human
uacagguagagucucuaguuua

SEQ ID NO: 142758 - RNA, 22 nt, Human
agccucugcuggcccuggcacu

SEQ ID NO: 142759 - RNA, 22 nt, Human
gagauggggaauaggagcaagc

SEQ ID NO: 142760 - RNA, 22 nt, Human
gggagcugguuccugcccucca

SEQ ID NO: 142761 - RNA, 22 nt, Human
caguauguccuuccucguuggc

SEQ ID NO: 142762 - RNA, 22 nt, Human
ccucagagaaagguauggcuga

SEQ ID NO: 142763 - RNA, 22 nt, Human
uagcacauaacuuagaauaguu

SEQ ID NO: 142764 - RNA, 22 nt, Human
cauugcacuucugcuuuuccuc

SEQ ID NO: 142765 - RNA, 22 nt, Human
ucagaguggugguuuugccuuc

SEQ ID NO: 142766 - RNA, 22 nt, Human
uacaguucacaguaucauaaau

SEQ ID NO: 142767 - RNA, 22 nt, Human
gcccuuccaacccagagggcaa

SEQ ID NO: 142768 - RNA, 22 nt, Human
gaggggcucuuuaauaguaaca

SEQ ID NO: 142769 - RNA, 22 nt, Human
cagcacugcugcuguacacaca

SEQ ID NO: 142770 - RNA, 21 nt, Human
ggccucugucauccugggaag

SEQ ID NO: 142771 - RNA, 21 nt, Human
aacaaagggaugcucaucuuu

SEQ ID NO: 142772 - RNA, 22 nt, Human
uguggcucucagauccuccaau

SEQ ID NO: 142773 - RNA, 22 nt, Human
cagggccaugaggcacaggguc

SEQ ID NO: 142774 - RNA, 21 nt, Human
cacucaggguaugugccaggc

SEQ ID NO: 142775 - RNA, 22 nt, Human
agcugguggauuaugcuguaca

SEQ ID NO: 142776 - RNA, 22 nt, Human
cugagcucuaaugucagccuug

SEQ ID NO: 142777 - RNA, 22 nt, Human
caggcacuguguuaggcacugu

SEQ ID NO: 142778 - RNA, 22 nt, Human
acuaagugauucuaagcaucuu

SEQ ID NO: 142779 - RNA, 22 nt, Human
acuccagggcuccaucccuugu

SEQ ID NO: 142780 - RNA, 22 nt, Human
ccugggaggcggagguugcagg

SEQ ID NO: 142781 - RNA, 22 nt, Human
ucacugcagacaaccucaguca

SEQ ID NO: 142782 - RNA, 21 nt, Human
ccuuuacaauuuugcauuccu

SEQ ID NO: 142783 - RNA, 19 nt, Human
uugaggggccaggggagau

SEQ ID NO: 142784 - RNA, 22 nt, Human
ucucaccaaagccuugaccaua

SEQ ID NO: 142785 - RNA, 22 nt, Human
gcaucuuucuguccauucagca

SEQ ID NO: 142786 - RNA, 23 nt, Human
ugcgugugugcugaggggcgucc

SEQ ID NO: 142787 - RNA, 22 nt, Human
aaaucagugcucauuugaaagg

SEQ ID NO: 142788 - RNA, 18 nt, Human
ugcucuguuuaaugauuu

SEQ ID NO: 142789 - RNA, 22 nt, Human
auuuacagacccucccacuaag

SEQ ID NO: 142790 - RNA, 22 nt, Human
uucccucuuuuccaacaguugu

SEQ ID NO: 142791 - RNA, 22 nt, Human
ccugccugaaggucagccaccc

SEQ ID NO: 142792 - RNA, 21 nt, Human
uggcugagccaggugugugga

SEQ ID NO: 142793 - RNA, 22 nt, Human
agggcccauagaucgucagcuu

SEQ ID NO: 142794 - RNA, 21 nt, Human
agcuggcagauauggugucug

SEQ ID NO: 142795 - RNA, 22 nt, Human
uggccugaauuauggcagaucu

SEQ ID NO: 142796 - RNA, 22 nt, Human
aggaaaaaagucugugauuaua

SEQ ID NO: 142797 - RNA, 22 nt, Human
uauuguucuucacuggucuuau

SEQ ID NO: 142798 - RNA, 22 nt, Human
uugaagcauuucuuugagcuuc

SEQ ID NO: 142799 - RNA, 22 nt, Human
aaaaucugguaauuugaaugug

SEQ ID NO: 142800 - RNA, 22 nt, Human
ugccacaccaacaucuuucagc

SEQ ID NO: 142801 - RNA, 22 nt, Human
gagcucagcacuaaaaucaugu

SEQ ID NO: 142802 - RNA, 22 nt, Human
ucuggaguccagauccauuugg

SEQ ID NO: 142803 - RNA, 23 nt, Human
ccagcucccaggucugaggacug

SEQ ID NO: 142804 - RNA, 20 nt, Human
cccuggagagaagcuccacg

SEQ ID NO: 142805 - RNA, 22 nt, Human
aagauuucugcuuuuggaggca

SEQ ID NO: 142806 - RNA, 22 nt, Human
uggcagagcccagaacugagca

SEQ ID NO: 142807 - RNA, 22 nt, Human
auggacaggaacucccuuggca

SEQ ID NO: 142808 - RNA, 22 nt, Human
cuggggaggcagggcugccccu

SEQ ID NO: 142809 - RNA, 22 nt, Human
aagcagccuggcaugaugcuuu

SEQ ID NO: 142810 - RNA, 20 nt, Human
gggcuggcgcauggggaaag

SEQ ID NO: 142811 - RNA, 22 nt, Human
uuuugucuaagaacuuugcaaa

SEQ ID NO: 142812 - RNA, 22 nt, Human
uuaaauauuuucagcaggguca

SEQ ID NO: 142813 - RNA, 22 nt, Human
ucugucacccgagcaggcgaga

SEQ ID NO: 142814 - RNA, 22 nt, Human
guccugggcccaggggcugccu

SEQ ID NO: 142815 - RNA, 19 nt, Human
uaaggccaaaaguaagugu

SEQ ID NO: 142816 - RNA, 22 nt, Human
aaaugucuuugaguauuucugc

SEQ ID NO: 142817 - RNA, 22 nt, Human
ggcuggcauccagggaaaucca

SEQ ID NO: 142818 - RNA, 22 nt, Human
agugcugucccgacaacugagg

SEQ ID NO: 142819 - RNA, 21 nt, Human
ucaggcaggcgcagagggaag

SEQ ID NO: 142820 - RNA, 18 nt, Human
acagugauuguucuaugc

SEQ ID NO: 142821 - RNA, 20 nt, Human
ugggagcuggugaggucuca

SEQ ID NO: 142822 - RNA, 22 nt, Human
guucuucaggcugugcucuaga

SEQ ID NO: 142823 - RNA, 22 nt, Human
gcugucacauuuggagcacugg

SEQ ID NO: 142824 - RNA, 22 nt, Human
cccuggguucuggcugggcugc

SEQ ID NO: 142825 - RNA, 22 nt, Human
uuaaaaugcagauucugauuca

SEQ ID NO: 142826 - RNA, 21 nt, Human
uguggcugccucuggcccugg

SEQ ID NO: 142827 - RNA, 20 nt, Human
gcugucuggauuagaagccu

SEQ ID NO: 142828 - RNA, 20 nt, Human
aguguauuuggguagagugu

SEQ ID NO: 142829 - RNA, 22 nt, Human
agccuucacugggaccuuggau

SEQ ID NO: 142830 - RNA, 22 nt, Human
acagccaggagccaugggcagg

SEQ ID NO: 142831 - RNA, 22 nt, Human
gaaaugcagaaccugagaccau

SEQ ID NO: 142832 - RNA, 22 nt, Human
gugucccaaucuacuuuucccu

SEQ ID NO: 142833 - RNA, 22 nt, Human
ccuggccuccuggccuucucau

SEQ ID NO: 142834 - RNA, 22 nt, Human
uuacaguauuggucacguuugu

SEQ ID NO: 142835 - RNA, 22 nt, Human
uuuaaaaucagaugggaguugg

SEQ ID NO: 142836 - RNA, 22 nt, Human
uauuucucucacgguugccugg

SEQ ID NO: 142837 - RNA, 21 nt, Human
auaagcaugcugauuacauuu

SEQ ID NO: 142838 - RNA, 22 nt, Human
cucccuggcuuuguccugaggc

SEQ ID NO: 142839 - RNA, 22 nt, Human
caaggccaagucucugugaaga

SEQ ID NO: 142840 - RNA, 22 nt, Human
gcugucugucuucacaucucgc

SEQ ID NO: 142841 - RNA, 22 nt, Human
aagcaggauggaucuaguguuc

SEQ ID NO: 142842 - RNA, 22 nt, Human
aagcuuuuuggauuugcuucag

SEQ ID NO: 142843 - RNA, 22 nt, Human
agccuggagaagauguguauug

SEQ ID NO: 142844 - RNA, 22 nt, Human
gaagcccacguuuggugaugua

SEQ ID NO: 142845 - RNA, 22 nt, Human
uaacagaaauuuuaguuagggg

SEQ ID NO: 142846 - RNA, 22 nt, Human
gcacugaaaauguuggauucca

SEQ ID NO: 142847 - RNA, 18 nt, Human
uggcagccagcugcuccu

SEQ ID NO: 142848 - RNA, 22 nt, Human
cucuucagauaaaagggauauu

SEQ ID NO: 142849 - RNA, 19 nt, Human
uugugugucagucagaguu

SEQ ID NO: 142850 - RNA, 22 nt, Human
uccuuuuuauaguuagagaaac

SEQ ID NO: 142851 - RNA, 22 nt, Human
agucuucucauuucacaugcuu

SEQ ID NO: 142852 - RNA, 22 nt, Human
gccuccugaaaggaagagcucc

SEQ ID NO: 142853 - RNA, 22 nt, Human
uuuccucugggcccugccaccc

SEQ ID NO: 142854 - RNA, 22 nt, Human
cuuucucuguguuucacaugcu

SEQ ID NO: 142855 - RNA, 22 nt, Human
auuugucuaaugaguguguacu

SEQ ID NO: 142856 - RNA, 22 nt, Human
augugucuuugagacucugcua

SEQ ID NO: 142857 - RNA, 22 nt, Human
gcugucugggaggccuccacuu

SEQ ID NO: 142858 - RNA, 22 nt, Human
ucuucagauggccaguuguccc

SEQ ID NO: 142859 - RNA, 22 nt, Human
gcugcccaggguggagccggcu

SEQ ID NO: 142860 - RNA, 22 nt, Human
uauugaugcuuggauugggcca

SEQ ID NO: 142861 - RNA, 22 nt, Human
gaagcagcucagauugacugaa

SEQ ID NO: 142862 - RNA, 22 nt, Human
auggagacgcaagggaccuagg

SEQ ID NO: 142863 - RNA, 22 nt, Human
uggagccauaacccuuucguac

SEQ ID NO: 142864 - RNA, 22 nt, Human
ucccagagcucuggagguugga

SEQ ID NO: 142865 - RNA, 22 nt, Human
cuggcucccagcuuucagggag

SEQ ID NO: 142866 - RNA, 22 nt, Human
cagacccucgggugaguuggcc

SEQ ID NO: 142867 - RNA, 22 nt, Human
gucagaggggcagcugccaggc

SEQ ID NO: 142868 - RNA, 22 nt, Human
ggucaggguuccagguaucuuc

SEQ ID NO: 142869 - RNA, 20 nt, Human
ccagcauguacacaugugga

SEQ ID NO: 142870 - RNA, 22 nt, Human
gagccugaaauacaggucacug

SEQ ID NO: 142871 - RNA, 22 nt, Human
aguguguguuugggcgguuuau

SEQ ID NO: 142872 - RNA, 22 nt, Human
agcagggcugcagugugucuuu

SEQ ID NO: 142873 - RNA, 22 nt, Human
auuacaguaacagcuacaaugc

SEQ ID NO: 142874 - RNA, 22 nt, Human
cguguacagucuaucuuuuuuc

SEQ ID NO: 142875 - RNA, 20 nt, Human
acugcuucuuucucugaccu

SEQ ID NO: 142876 - RNA, 22 nt, Human
gcuggggaggcagcagagaaca

SEQ ID NO: 142877 - RNA, 22 nt, Human
uguaguaagugcgcaauaaaua

SEQ ID NO: 142878 - RNA, 22 nt, Human
uccauuuucuugcucuagguaa

SEQ ID NO: 142879 - RNA, 22 nt, Human
uuccauuguuucugucuucacu

SEQ ID NO: 142880 - RNA, 22 nt, Human
cuggccugaucucaugcugucc

SEQ ID NO: 142881 - RNA, 22 nt, Human
gacaggggucccucugggcugu

SEQ ID NO: 142882 - RNA, 21 nt, Human
uucuuuccccagaggacuaaa

SEQ ID NO: 142883 - RNA, 22 nt, Human
gaaaguuucuucauuaagaugu

SEQ ID NO: 142884 - RNA, 22 nt, Human
aucuggcuauuucuggucgggg

SEQ ID NO: 142885 - RNA, 22 nt, Human
caggagcucuuaaggaugugau

SEQ ID NO: 142886 - RNA, 23 nt, Human
agggcccaagccuggacagcagg

SEQ ID NO: 142887 - RNA, 17 nt, Human
ucuggccuuccugaacu

SEQ ID NO: 142888 - RNA, 22 nt, Human
aaaagacaucuauuucaggcag

SEQ ID NO: 142889 - RNA, 22 nt, Human
uucucuuuucaccaguugcuaa

SEQ ID NO: 142890 - RNA, 22 nt, Human
gcagagccugggggucugcgga

SEQ ID NO: 142891 - RNA, 22 nt, Human
aagcugccugccacgcuagaua

SEQ ID NO: 142892 - RNA, 19 nt, Human
aagcagcccuggcaagagc

SEQ ID NO: 142893 - RNA, 22 nt, Human
uccugucugcucacagagcugg

SEQ ID NO: 142894 - RNA, 22 nt, Human
gcuggcauuacaggagagaacc

SEQ ID NO: 142895 - RNA, 22 nt, Human
ggagccagugcccucuggugga

SEQ ID NO: 142896 - RNA, 22 nt, Human
aggggcucaguuacuuuggcag

SEQ ID NO: 142897 - RNA, 22 nt, Human
cccugccuugggguccacaccg

SEQ ID NO: 142898 - RNA, 22 nt, Human
gagccugaugaaacaggcagac

SEQ ID NO: 142899 - RNA, 22 nt, Human
ucauugaacgaagagcuccauu

SEQ ID NO: 142900 - RNA, 22 nt, Human
cagcugucuaaguugagcagga

SEQ ID NO: 142901 - RNA, 22 nt, Human
uccuuggcuuucuggagcuucu

SEQ ID NO: 142902 - RNA, 22 nt, Human
ccuggcagcuaagugcuuugag

SEQ ID NO: 142903 - RNA, 22 nt, Human
gguagcagggcugugagucaga

SEQ ID NO: 142904 - RNA, 22 nt, Human
ucaagcaucuuggucuacgauc

SEQ ID NO: 142905 - RNA, 18 nt, Human
gcaggagauggguggggu

SEQ ID NO: 142906 - RNA, 22 nt, Human
uuucagaaagcugaacauauga

SEQ ID NO: 142907 - RNA, 22 nt, Human
ugcugucuuccaggauggugaa

SEQ ID NO: 142908 - RNA, 22 nt, Human
auguggcuggugacugccguac

SEQ ID NO: 142909 - RNA, 22 nt, Human
gcaggugggggucggugcaucu

SEQ ID NO: 142910 - RNA, 20 nt, Human
aguguuccggaagacuggca

SEQ ID NO: 142911 - RNA, 22 nt, Human
gcugugugccaggggaaggcug

SEQ ID NO: 142912 - RNA, 22 nt, Human
gucaggauguuuauucuccagu

SEQ ID NO: 142913 - RNA, 22 nt, Human
agaugguguuuccccaggugga

SEQ ID NO: 142914 - RNA, 22 nt, Human
gguggccugcccugaucccugg

SEQ ID NO: 142915 - RNA, 22 nt, Human
cagcaugguggagcugcucuuu

SEQ ID NO: 142916 - RNA, 22 nt, Human
uggcucugccacuaacuuggua

SEQ ID NO: 142917 - RNA, 22 nt, Human
ugguacuuggaggcagaaaaau

SEQ ID NO: 142918 - RNA, 22 nt, Human
ugcagcuucuccaucuccuugu

SEQ ID NO: 142919 - RNA, 22 nt, Human
ggaggggcagccauggaacucc

SEQ ID NO: 142920 - RNA, 22 nt, Human
gcccaugcacuuucugugaugg

SEQ ID NO: 142921 - RNA, 22 nt, Human
gcagacagccagacugcacugg

SEQ ID NO: 142922 - RNA, 22 nt, Human
gucucucugacugguccacacc

SEQ ID NO: 142923 - RNA, 22 nt, Human
auacagaagaacuauagccacu

SEQ ID NO: 142924 - RNA, 22 nt, Human
cugccucuccccagaguggccc

SEQ ID NO: 142925 - RNA, 22 nt, Human
ucuggcucaggagcuguguuca

SEQ ID NO: 142926 - RNA, 22 nt, Human
uagcauuuauggucaugugucc

SEQ ID NO: 142927 - RNA, 22 nt, Human
uaacuuuuacauuuggcucacu

SEQ ID NO: 142928 - RNA, 22 nt, Human
uccaguggguugcugagggagg

SEQ ID NO: 142929 - RNA, 22 nt, Human
caguacuucuuggaaacuggau

SEQ ID NO: 142930 - RNA, 19 nt, Human
aguggcugggcagaagcaa

SEQ ID NO: 142931 - RNA, 22 nt, Human
ggaggccaccugaccugcuguu

SEQ ID NO: 142932 - RNA, 23 nt, Human
acuuaaaugguucuuuaucucag

SEQ ID NO: 142933 - RNA, 22 nt, Human
cuguggcuuugcagggcuuguu

SEQ ID NO: 142934 - RNA, 22 nt, Human
uuauuuuuaaaaguucacacag

SEQ ID NO: 142935 - RNA, 22 nt, Human
aaugggaggauuuucucucuug

SEQ ID NO: 142936 - RNA, 22 nt, Human
uggcucagccagcccuaggaac

SEQ ID NO: 142937 - RNA, 22 nt, Human
uuuuaucuaccuaugcucauuu

SEQ ID NO: 142938 - RNA, 22 nt, Human
agccaaagaucagugugcaagu

SEQ ID NO: 142939 - RNA, 22 nt, Human
ugaggccaggaucccaggcucu

SEQ ID NO: 142940 - RNA, 22 nt, Human
ccacagggccuuuccugcuggc

SEQ ID NO: 142941 - RNA, 22 nt, Human
uguccauggauagagcugcucg

SEQ ID NO: 142942 - RNA, 22 nt, Human
acagcacaaucugagucccaga

SEQ ID NO: 142943 - RNA, 22 nt, Human
uugaagauggaucgccacucuc

SEQ ID NO: 142944 - RNA, 22 nt, Human
auucaaguccagcuucucuaca

SEQ ID NO: 142945 - RNA, 19 nt, Human
ggacacagaaagcugcauu

SEQ ID NO: 142946 - RNA, 22 nt, Human
uuuucucuccagguggggugau

SEQ ID NO: 142947 - RNA, 17 nt, Human
gcagcagagagacccuc

SEQ ID NO: 142948 - RNA, 22 nt, Human
uuuuucauauuccccucucugg

SEQ ID NO: 142949 - RNA, 22 nt, Human
agccuggcacugaggcagggcg

SEQ ID NO: 142950 - RNA, 22 nt, Human
uggcagcacaagguggcccaug

SEQ ID NO: 142951 - RNA, 22 nt, Human
cagucucuugcuucauuaguug

SEQ ID NO: 142952 - RNA, 22 nt, Human
cacugcuuucacaguuuguucc

SEQ ID NO: 142953 - RNA, 22 nt, Human
gcacacagccagcugagggcua

SEQ ID NO: 142954 - RNA, 19 nt, Human
cugugagucuuguggccuc

SEQ ID NO: 142955 - RNA, 21 nt, Human
ugauuuccaucuuaaaauaaa

SEQ ID NO: 142956 - RNA, 22 nt, Human
gccagggcucgcggucccucgu

SEQ ID NO: 142957 - RNA, 22 nt, Human
gcagcuggaagugacacucugu

SEQ ID NO: 142958 - RNA, 21 nt, Human
cacaggugggucagugaggcc

SEQ ID NO: 142959 - RNA, 22 nt, Human
aaauugugcucacacugauauu

SEQ ID NO: 142960 - RNA, 22 nt, Human
ucucagagauuuuguuucccuu

SEQ ID NO: 142961 - RNA, 22 nt, Human
agggaaaguaagcauuucauua

SEQ ID NO: 142962 - RNA, 22 nt, Human
cauuuguaucauauguaucuua

SEQ ID NO: 142963 - RNA, 22 nt, Human
auucuucaucacuaccuuguga

SEQ ID NO: 142964 - RNA, 19 nt, Human
gcugugccucucuccugcu

SEQ ID NO: 142965 - RNA, 19 nt, Human
cugugcuuuaaacuccuau

SEQ ID NO: 142966 - RNA, 22 nt, Human
acacagggaggaggugcugugc

SEQ ID NO: 142967 - RNA, 22 nt, Human
ucaaauaaugccauucaucauc

SEQ ID NO: 142968 - RNA, 22 nt, Human
gcauuccuacaggcugcuauga

SEQ ID NO: 142969 - RNA, 22 nt, Human
ugucucuugaguuuguuuuaau

SEQ ID NO: 142970 - RNA, 22 nt, Human
cuuguagaauugaaauggucuc

SEQ ID NO: 142971 - RNA, 22 nt, Human
uggcagaggaaaaagucacugg

SEQ ID NO: 142972 - RNA, 22 nt, Human
ugccugugucacagugauguuu

SEQ ID NO: 142973 - RNA, 22 nt, Human
ucugagagccucuagccuaagu

SEQ ID NO: 142974 - RNA, 21 nt, Human
gagccuucccucugcccuuuc

SEQ ID NO: 142975 - RNA, 22 nt, Human
gcaggagcccuggcauguucuu

SEQ ID NO: 142976 - RNA, 22 nt, Human
uguguguccuugaccucagugg

SEQ ID NO: 142977 - RNA, 22 nt, Human
uguuaaucaaucaacaguauua

SEQ ID NO: 142978 - RNA, 22 nt, Human
cuguauuuguccucuauuuauu

SEQ ID NO: 142979 - RNA, 22 nt, Human
ggggcccagcaccccuccucgc

SEQ ID NO: 142980 - RNA, 22 nt, Human
aaggucauuguugcauguucuc

SEQ ID NO: 142981 - RNA, 22 nt, Human
aaaugccucugcuguacacaau

SEQ ID NO: 142982 - RNA, 22 nt, Human
ucuuuacaguccucugucaauc

SEQ ID NO: 142983 - RNA, 22 nt, Human
ugggcccaagagagucuccaac

SEQ ID NO: 142984 - RNA, 22 nt, Human
acaguacauaauccugagucug

SEQ ID NO: 142985 - RNA, 22 nt, Human
cagcuugggaguuugguuuuau

SEQ ID NO: 142986 - RNA, 22 nt, Human
gucuucuguaagaugagguccc

SEQ ID NO: 142987 - RNA, 22 nt, Human
cuggcucacuagcccugcccug

SEQ ID NO: 142988 - RNA, 20 nt, Human
gggagucuggaugaaagaug

SEQ ID NO: 142989 - RNA, 22 nt, Human
ccuccugggcuccugucugcac

SEQ ID NO: 142990 - RNA, 22 nt, Human
cagcugccccgcuggcugacca

SEQ ID NO: 142991 - RNA, 22 nt, Human
aggagccaagauggggcaagua

SEQ ID NO: 142992 - RNA, 22 nt, Human
agccuggccugggcaggcacau

SEQ ID NO: 142993 - RNA, 20 nt, Human
uggagccacagucagguucc

SEQ ID NO: 142994 - RNA, 22 nt, Human
gaguguggugaacaggagcacc

SEQ ID NO: 142995 - RNA, 23 nt, Human
agcuggguggccugcgugaagcu

SEQ ID NO: 142996 - RNA, 22 nt, Human
agccacagucugaugccugaga

SEQ ID NO: 142997 - RNA, 22 nt, Human
uggcagagucaucacaucugga

SEQ ID NO: 142998 - RNA, 22 nt, Human
agaagccagcuucagcugcccg

SEQ ID NO: 142999 - RNA, 22 nt, Human
uuuaucagagauauguguggac

SEQ ID NO: 143000 - RNA, 22 nt, Human
agccauugaguuuuaugugcua

SEQ ID NO: 143001 - RNA, 22 nt, Human
aagggagacaguugugugagga

SEQ ID NO: 143002 - RNA, 22 nt, Human
uucugugugcuuacugguguuc

SEQ ID NO: 143003 - RNA, 22 nt, Human
auucuucaccauggauaauuug

SEQ ID NO: 143004 - RNA, 22 nt, Human
guguguggaaugcucauuuauu

SEQ ID NO: 143005 - RNA, 22 nt, Human
cccagggacagcuagguggggc

SEQ ID NO: 143006 - RNA, 22 nt, Human
ugggcucugaagucagucugcu

SEQ ID NO: 143007 - RNA, 22 nt, Human
aggcacugggggaugagcaagg

SEQ ID NO: 143008 - RNA, 22 nt, Human
agugaaauuccuggucuuuguu

SEQ ID NO: 143009 - RNA, 22 nt, Human
ugaaaucuacccuauucagggu

SEQ ID NO: 143010 - RNA, 22 nt, Human
cagaggccuauccaguguccau

SEQ ID NO: 143011 - RNA, 22 nt, Human
ggucagccuuggauuugguagc

SEQ ID NO: 143012 - RNA, 20 nt, Human
cccuccagcaaccaggacuu

SEQ ID NO: 143013 - RNA, 21 nt, Human
guuugcaugaacaagucagcc

SEQ ID NO: 143014 - RNA, 20 nt, Human
cagggccacgcuccaaggca

SEQ ID NO: 143015 - RNA, 22 nt, Human
cagggcacaguuauggaggugg

SEQ ID NO: 143016 - RNA, 22 nt, Human
cuggccacaacuagcccaggac

SEQ ID NO: 143017 - RNA, 22 nt, Human
cagcugagcaucacuagucugg

SEQ ID NO: 143018 - RNA, 22 nt, Human
ccugacgaaaggcgugcuggag

SEQ ID NO: 143019 - RNA, 22 nt, Human
uuuuauuggagugauaccaagc

SEQ ID NO: 143020 - RNA, 22 nt, Human
aggaguggaauuacuggguucu

SEQ ID NO: 143021 - RNA, 22 nt, Human
uggcuaguaggugaguagugcu

SEQ ID NO: 143022 - RNA, 22 nt, Human
uuccaugaaggagacugagaag

SEQ ID NO: 143023 - RNA, 22 nt, Human
ccagggcaauuauuuggagggu

SEQ ID NO: 143024 - RNA, 22 nt, Human
ccagcuccucuucccaguguca

SEQ ID NO: 143025 - RNA, 22 nt, Human
uuaaauuagucaagcuucucug

SEQ ID NO: 143026 - RNA, 22 nt, Human
acaaaugccauauauaaauucu

SEQ ID NO: 143027 - RNA, 22 nt, Human
uuguacagaaaaaauucuuggu

SEQ ID NO: 143028 - RNA, 22 nt, Human
agcugguuagcaaucuaaguga

SEQ ID NO: 143029 - RNA, 22 nt, Human
agugaggcuaauaggcaauggu

SEQ ID NO: 143030 - RNA, 17 nt, Human
gagaguguauuggaugc

SEQ ID NO: 143031 - RNA, 22 nt, Human
gaaggaagugcucauacuaguu

SEQ ID NO: 143032 - RNA, 22 nt, Human
uccagggcuuggcugggacggu

SEQ ID NO: 143033 - RNA, 22 nt, Human
ucagagucauugcaaguagaag

SEQ ID NO: 143034 - RNA, 22 nt, Human
acaguaguacacaucuaugucc

SEQ ID NO: 143035 - RNA, 22 nt, Human
agucccagccuaggcugugcug

SEQ ID NO: 143036 - RNA, 22 nt, Human
uauguacaaucagcaguucaua

SEQ ID NO: 143037 - RNA, 22 nt, Human
gccuuggccaacaccuugcaaa

SEQ ID NO: 143038 - RNA, 22 nt, Human
acaaauguggacauggauaaug

SEQ ID NO: 143039 - RNA, 23 nt, Human
ugcucccaggugacgcugcuguu

SEQ ID NO: 143040 - RNA, 22 nt, Human
cuggagagaaaugacaaagcua

SEQ ID NO: 143041 - RNA, 22 nt, Human
aucuggcuggauucuuagcguu

SEQ ID NO: 143042 - RNA, 22 nt, Human
aagcugcccuguguuagaguuc

SEQ ID NO: 143043 - RNA, 18 nt, Human
gggaagaggaucuggccc

SEQ ID NO: 143044 - RNA, 22 nt, Human
aaucuucuacuugacaguucuc

SEQ ID NO: 143045 - RNA, 22 nt, Human
gggccuggggacaccaccauga

SEQ ID NO: 143046 - RNA, 22 nt, Human
cugggaggcacuauucaggagg

SEQ ID NO: 143047 - RNA, 22 nt, Human
acuuuacaauauccugugacuu

SEQ ID NO: 143048 - RNA, 22 nt, Human
ccagagcuccagggcuacagaa

SEQ ID NO: 143049 - RNA, 22 nt, Human
uuuguaaaaggaggaagcaugg

SEQ ID NO: 143050 - RNA, 19 nt, Human
ccuuccuccccagggccau

SEQ ID NO: 143051 - RNA, 22 nt, Human
gccagcccagcuccaggggaaa

SEQ ID NO: 143052 - RNA, 22 nt, Human
auggggugaccaugagcauuua

SEQ ID NO: 143053 - RNA, 22 nt, Human
uuacuuugaugaucaaugagcg

SEQ ID NO: 143054 - RNA, 22 nt, Human
caacagaaggaagcagggucag

SEQ ID NO: 143055 - RNA, 22 nt, Human
uucucucugagagcaucuggaa

SEQ ID NO: 143056 - RNA, 15 nt, Human
uguggcuggcuccug

SEQ ID NO: 143057 - RNA, 22 nt, Human
uggcucaguggcagccgcagcu

SEQ ID NO: 143058 - RNA, 22 nt, Human
agugggaggcggcugacgggcg

SEQ ID NO: 143059 - RNA, 22 nt, Human
cuggugggaggcaagguggaag

SEQ ID NO: 143060 - RNA, 22 nt, Human
uagccggguguugugucaugca

SEQ ID NO: 143061 - RNA, 22 nt, Human
gguggguauugaauacaggugu

SEQ ID NO: 143062 - RNA, 22 nt, Human
guuuucuuugaaugcuucuaga

SEQ ID NO: 143063 - RNA, 22 nt, Human
gcuccucuauuccccacauuuu

SEQ ID NO: 143064 - RNA, 22 nt, Human
ugcagcucauugguguccuggu

SEQ ID NO: 143065 - RNA, 22 nt, Human
ccaccagcuucagcagccgcgg

SEQ ID NO: 143066 - RNA, 22 nt, Human
ucuggcucuguguccccaccca

SEQ ID NO: 143067 - RNA, 22 nt, Human
guauuuauaggggaaugagagu

SEQ ID NO: 143068 - RNA, 21 nt, Human
uaacuuuugugccuaucuugu

SEQ ID NO: 143069 - RNA, 19 nt, Human
ugucuuaauuaacucagag

SEQ ID NO: 143070 - RNA, 22 nt, Human
agaauucuccuucagggcagga

SEQ ID NO: 143071 - RNA, 22 nt, Human
uguguguguccucauuugcaga

SEQ ID NO: 143072 - RNA, 22 nt, Human
agccagcaugaagacagaggcc

SEQ ID NO: 143073 - RNA, 19 nt, Human
ggccuggauuuagggcucc

SEQ ID NO: 143074 - RNA, 22 nt, Human
aggaccagaggccagagucagc

SEQ ID NO: 143075 - RNA, 23 nt, Human
uggcucuguggaucccucaggag

SEQ ID NO: 143076 - RNA, 22 nt, Human
aaaaguauuggccaccauuucu

SEQ ID NO: 143077 - RNA, 19 nt, Human
uuuggcacucugaaguguu

SEQ ID NO: 143078 - RNA, 22 nt, Human
gcugccuggcuuuaguccacuu

SEQ ID NO: 143079 - RNA, 22 nt, Human
ccuggcugcuauagcagcaugu

SEQ ID NO: 143080 - RNA, 22 nt, Human
ggggauggaauguaguagugau

SEQ ID NO: 143081 - RNA, 22 nt, Human
agccaagcaccacuggcacucg

SEQ ID NO: 143082 - RNA, 22 nt, Human
gggagggaaagcuugaucuguc

SEQ ID NO: 143083 - RNA, 22 nt, Human
aguggcuggucuaaggucacag

SEQ ID NO: 143084 - RNA, 22 nt, Human
uugaaaggugacauuguuagag

SEQ ID NO: 143085 - RNA, 18 nt, Human
caugucugcgccacaagg

SEQ ID NO: 143086 - RNA, 22 nt, Human
ugucacaaacauacauuauaga

SEQ ID NO: 143087 - RNA, 18 nt, Human
ucucuuuuccccucauug

SEQ ID NO: 143088 - RNA, 22 nt, Human
aggagccaguuccaccccagga

SEQ ID NO: 143089 - RNA, 23 nt, Human
agaugagccaacaccuccaugcc

SEQ ID NO: 143090 - RNA, 22 nt, Human
aagcagcugauuucacagcuca

SEQ ID NO: 143091 - RNA, 22 nt, Human
gggcaugagagggcagcuggca

SEQ ID NO: 143092 - RNA, 22 nt, Human
cccagcagcuugcacagugcug

SEQ ID NO: 143093 - RNA, 22 nt, Human
ccauggccgccgcugcucagga

SEQ ID NO: 143094 - RNA, 22 nt, Human
uccugugccuccaccugcuccg

SEQ ID NO: 143095 - RNA, 22 nt, Human
ccaguuuuuccagugcuuucug

SEQ ID NO: 143096 - RNA, 22 nt, Human
cuuugcagcaauuucuguuaaa

SEQ ID NO: 143097 - RNA, 22 nt, Human
cccaagcagggugcagaggcau

SEQ ID NO: 143098 - RNA, 22 nt, Human
gagugagggcagcaggggcugc

SEQ ID NO: 143099 - RNA, 22 nt, Human
uacaugaacaaaauagcagaaa

SEQ ID NO: 143100 - RNA, 23 nt, Human
acagcaagaggaccagaugugag

SEQ ID NO: 143101 - RNA, 22 nt, Human
aguaaugucccuuaaauguggu

SEQ ID NO: 143102 - RNA, 22 nt, Human
aguggcagccgagcaggagaug

SEQ ID NO: 143103 - RNA, 22 nt, Human
acagcugugaaaauccacagga

SEQ ID NO: 143104 - RNA, 22 nt, Human
guaucacuuuugagagugagaa

SEQ ID NO: 143105 - RNA, 22 nt, Human
cgcaccacugaauuccagccug

SEQ ID NO: 143106 - RNA, 23 nt, Human
cagugcagggcaacucagacucc

SEQ ID NO: 143107 - RNA, 22 nt, Human
cuggccuuuagccccagugucu

SEQ ID NO: 143108 - RNA, 22 nt, Human
gaguguucccacaccccaguug

SEQ ID NO: 143109 - RNA, 22 nt, Human
gcccagcugcacccuggugggu

SEQ ID NO: 143110 - RNA, 22 nt, Human
cccaggccagaacuugguugcu

SEQ ID NO: 143111 - RNA, 22 nt, Human
ccaggccuggaccaugccaggg

SEQ ID NO: 143112 - RNA, 22 nt, Human
uuuuucaugagacuagaaguca

SEQ ID NO: 143113 - RNA, 22 nt, Human
uuccagaaaucuuucagcucaa

SEQ ID NO: 143114 - RNA, 22 nt, Human
uggccugucuuguugugcuaga

SEQ ID NO: 143115 - RNA, 21 nt, Human
gccagccuguuuaccuguggu

SEQ ID NO: 143116 - RNA, 22 nt, Human
cuguggcucucagaggcugcug

SEQ ID NO: 143117 - RNA, 22 nt, Human
caguagccacuagacacaugua

SEQ ID NO: 143118 - RNA, 19 nt, Human
ucuuucauuucuagcucug

SEQ ID NO: 143119 - RNA, 22 nt, Human
auuuccaguccuaaugaucugg

SEQ ID NO: 143120 - RNA, 22 nt, Human
agugauggugagugagaagcuc

SEQ ID NO: 143121 - RNA, 22 nt, Human
uuguaacuuugcauacuccugu

SEQ ID NO: 143122 - RNA, 22 nt, Human
uucuuucucaacaugaauguuu

SEQ ID NO: 143123 - RNA, 22 nt, Human
ucuucuucccaucccucaaaug

SEQ ID NO: 143124 - RNA, 22 nt, Human
uggccugguuauauugcuauca

SEQ ID NO: 143125 - RNA, 22 nt, Human
aucuguguguuauuguuuauca

SEQ ID NO: 143126 - RNA, 22 nt, Human
gccucugcaucaucacuccagc

SEQ ID NO: 143127 - RNA, 22 nt, Human
aggggcucaaagugugcaggga

SEQ ID NO: 143128 - RNA, 22 nt, Human
ucagcugccccaguggccccag

SEQ ID NO: 143129 - RNA, 22 nt, Human
uuauuauugugguugcauuauc

SEQ ID NO: 143130 - RNA, 22 nt, Human
gcugagugagguccagagcuug

SEQ ID NO: 143131 - RNA, 22 nt, Human
ucaccugggagggcugugguag

SEQ ID NO: 143132 - RNA, 22 nt, Human
ugcugcucuguaaagugaugag

SEQ ID NO: 143133 - RNA, 22 nt, Human
ucuucagagacucugagccccu

SEQ ID NO: 143134 - RNA, 22 nt, Human
uuuaacuuagaagagauauccu

SEQ ID NO: 143135 - RNA, 22 nt, Human
ugucuauguauacauguguaua

SEQ ID NO: 143136 - RNA, 21 nt, Human
gcagagccugagguucuugag

SEQ ID NO: 143137 - RNA, 20 nt, Human
uuucugugagaaacacuguu

SEQ ID NO: 143138 - RNA, 22 nt, Human
uaguuucuagucaaucuucuuu

SEQ ID NO: 143139 - RNA, 22 nt, Human
gcacccagaauaaggacaggac

SEQ ID NO: 143140 - RNA, 22 nt, Human
ccugugugaagguuaggcaggu

SEQ ID NO: 143141 - RNA, 22 nt, Human
ccuggcagcaggugggcccgug

SEQ ID NO: 143142 - RNA, 22 nt, Human
gucaaguuuauccgcucauuca

SEQ ID NO: 143143 - RNA, 22 nt, Human
gaggcagcaugguaccuuggag

SEQ ID NO: 143144 - RNA, 22 nt, Human
gauguguguuuauacauauauu

SEQ ID NO: 143145 - RNA, 22 nt, Human
agggcugcuauguugauucaga

SEQ ID NO: 143146 - RNA, 22 nt, Human
gcagauggcagcccaggcuggg

SEQ ID NO: 143147 - RNA, 22 nt, Human
agucauauuuagcuuguggaau

SEQ ID NO: 143148 - RNA, 22 nt, Human
uaacacugauuuguucucaggg

SEQ ID NO: 143149 - RNA, 22 nt, Human
ucagaggaccuuacugagaacc

SEQ ID NO: 143150 - RNA, 22 nt, Human
cuauuuucauucuuacauuguc

SEQ ID NO: 143151 - RNA, 22 nt, Human
aacuuuuucugggauggagggu

SEQ ID NO: 143152 - RNA, 22 nt, Human
agggcagagcacugaauuggga

SEQ ID NO: 143153 - RNA, 22 nt, Human
aauuuucugccuagcaaaaacu

SEQ ID NO: 143154 - RNA, 22 nt, Human
ucccagacaaucauuggccacc

SEQ ID NO: 143155 - RNA, 22 nt, Human
augcaguagauaggcacuuuua

SEQ ID NO: 143156 - RNA, 22 nt, Human
cuggcucaauuuguacugcugu

SEQ ID NO: 143157 - RNA, 22 nt, Human
caguagcagggauuauuuuagg

SEQ ID NO: 143158 - RNA, 20 nt, Human
uuacagaaaugauguuauuu

SEQ ID NO: 143159 - RNA, 22 nt, Human
ugagaggccccagcucuuggcc

SEQ ID NO: 143160 - RNA, 22 nt, Human
ugugccaugaggcucugauaug

SEQ ID NO: 143161 - RNA, 22 nt, Human
gcugcccuaauaucacauguua

SEQ ID NO: 143162 - RNA, 22 nt, Human
uguguauauguaaauauaguug

SEQ ID NO: 143163 - RNA, 22 nt, Human
guuauuuuaacuucucaguaau

SEQ ID NO: 143164 - RNA, 16 nt, Human
cuuccucuucacuggc

SEQ ID NO: 143165 - RNA, 22 nt, Human
aucuggcuuuuaccccacggcc

SEQ ID NO: 143166 - RNA, 22 nt, Human
gagggugguggcuuaaggugcu

SEQ ID NO: 143167 - RNA, 22 nt, Human
cugugucuaaucuuauacauca

SEQ ID NO: 143168 - RNA, 22 nt, Human
agaagccaacagggcaggagag

SEQ ID NO: 143169 - RNA, 22 nt, Human
cuguuuaucuaggaguugcagg

SEQ ID NO: 143170 - RNA, 22 nt, Human
gucaccaggucugaugcagcca

SEQ ID NO: 143171 - RNA, 22 nt, Human
caugaagcacagcucucuuuuu

SEQ ID NO: 143172 - RNA, 22 nt, Human
ucuggcucacuucaggcuucac

SEQ ID NO: 143173 - RNA, 22 nt, Human
aaagaacaucggagugggcggg

SEQ ID NO: 143174 - RNA, 22 nt, Human
uacagaguggugagaucuuuug

SEQ ID NO: 143175 - RNA, 22 nt, Human
acauacuuuuuaaaagauugcu

SEQ ID NO: 143176 - RNA, 22 nt, Human
ucacacgugagguucuauccug

SEQ ID NO: 143177 - RNA, 22 nt, Human
ucaaaguuuuugagaauuacau

SEQ ID NO: 143178 - RNA, 22 nt, Human
agagccaggacugugucucacu

SEQ ID NO: 143179 - RNA, 22 nt, Human
uugaauucauuucucauugagu

SEQ ID NO: 143180 - RNA, 22 nt, Human
gaaucucaaggcuugugaggau

SEQ ID NO: 143181 - RNA, 22 nt, Human
gcagccccaggagacgcccagg

SEQ ID NO: 143182 - RNA, 22 nt, Human
gggcccuggggccugauuugca

SEQ ID NO: 143183 - RNA, 22 nt, Human
uaaagguagugugacauauugu

SEQ ID NO: 143184 - RNA, 22 nt, Human
aaaugcaauuguauguacucca

SEQ ID NO: 143185 - RNA, 22 nt, Human
aagggcaggaaaagauggaugu

SEQ ID NO: 143186 - RNA, 22 nt, Human
cuucugugacguaugugaggac

SEQ ID NO: 143187 - RNA, 22 nt, Human
cugcuuuguaaaauagacauaa

SEQ ID NO: 143188 - RNA, 22 nt, Human
caggcugaucagggcugggaug

SEQ ID NO: 143189 - RNA, 22 nt, Human
uggagcugaacuuugaggccag

SEQ ID NO: 143190 - RNA, 22 nt, Human
cguguaugugccugcauucaca

SEQ ID NO: 143191 - RNA, 18 nt, Human
auguguggcuuggggucc

SEQ ID NO: 143192 - RNA, 22 nt, Human
ucugucugggugccucgaguac

SEQ ID NO: 143193 - RNA, 22 nt, Human
uacacuuuauggauccuacuuu

SEQ ID NO: 143194 - RNA, 22 nt, Human
gcagagcauguccucaggacag

SEQ ID NO: 143195 - RNA, 22 nt, Human
agcagcauguaugagggugaac

SEQ ID NO: 143196 - RNA, 22 nt, Human
uuggcuguauguacaucuguua

SEQ ID NO: 143197 - RNA, 22 nt, Human
ucucucuugaaguauuagcuag

SEQ ID NO: 143198 - RNA, 22 nt, Human
ugucccauggauaccaggcuau

SEQ ID NO: 143199 - RNA, 22 nt, Human
aaguuauuuccucgugacugaa

SEQ ID NO: 143200 - RNA, 22 nt, Human
gcugagagcaaagcaugucuag

SEQ ID NO: 143201 - RNA, 22 nt, Human
auggaaagccaguguuccauca

SEQ ID NO: 143202 - RNA, 22 nt, Human
gggcuucuagaccagcagugag

SEQ ID NO: 143203 - RNA, 20 nt, Human
ucaggaugugcugagugaag

SEQ ID NO: 143204 - RNA, 23 nt, Human
gugugccaagcacugugccagga

SEQ ID NO: 143205 - RNA, 22 nt, Human
aauguguagggugccuguuuuu

SEQ ID NO: 143206 - RNA, 22 nt, Human
gcuguguucauuuugcauaugu

SEQ ID NO: 143207 - RNA, 22 nt, Human
uauuaguagcuugaaauuggug

SEQ ID NO: 143208 - RNA, 22 nt, Human
cccuguacagucucuguggcac

SEQ ID NO: 143209 - RNA, 22 nt, Human
uucugcugagugggcaggugca

SEQ ID NO: 143210 - RNA, 18 nt, Human
gccugcaggcacgggggu

SEQ ID NO: 143211 - RNA, 22 nt, Human
ccugucuggccuuccacggggg

SEQ ID NO: 143212 - RNA, 22 nt, Human
ugcuggaggccugacuguguuu

SEQ ID NO: 143213 - RNA, 22 nt, Human
uacaaaguauauuucuagcugu

SEQ ID NO: 143214 - RNA, 22 nt, Human
gcagcagaguuugggagauggu

SEQ ID NO: 143215 - RNA, 22 nt, Human
cugucuguuuuguauacaggcc

SEQ ID NO: 143216 - RNA, 22 nt, Human
gcccucagaggacagcugacuu

SEQ ID NO: 143217 - RNA, 22 nt, Human
cuuuuaaugagcauugcugucu

SEQ ID NO: 143218 - RNA, 18 nt, Human
cugagggcagccccuggg

SEQ ID NO: 143219 - RNA, 22 nt, Human
ccuguguggccgcacugcuccc

SEQ ID NO: 143220 - RNA, 22 nt, Human
cucaggagacaguguccacaug

SEQ ID NO: 143221 - RNA, 22 nt, Human
caaggcugcugcgggucgcacc

SEQ ID NO: 143222 - RNA, 22 nt, Human
uccuccagugucuggggccuug

SEQ ID NO: 143223 - RNA, 22 nt, Human
gcagagugauggaaugugggug

SEQ ID NO: 143224 - RNA, 22 nt, Human
cuuuccaaugcauuuccaaugu

SEQ ID NO: 143225 - RNA, 22 nt, Human
gcugccugccuaguuccacagu

SEQ ID NO: 143226 - RNA, 22 nt, Human
uugauacauagcacaguuuagg

SEQ ID NO: 143227 - RNA, 22 nt, Human
ugcugcuccccagcacacagca

SEQ ID NO: 143228 - RNA, 22 nt, Human
uagauuucaggcuggcuugcgg

SEQ ID NO: 143229 - RNA, 22 nt, Human
gggugggaacaggaugccagga

SEQ ID NO: 143230 - RNA, 21 nt, Human
aacauuucugggagaacucac

SEQ ID NO: 143231 - RNA, 22 nt, Human
gccuccugguugcuucuccaac

SEQ ID NO: 143232 - RNA, 22 nt, Human
augguuuguaacccaauacucc

SEQ ID NO: 143233 - RNA, 22 nt, Human
gcuggcagucccaucagcuggg

SEQ ID NO: 143234 - RNA, 22 nt, Human
cuggcugugcugcaggcuuugg

SEQ ID NO: 143235 - RNA, 22 nt, Human
gcuuccuaaaugcacagggcag

SEQ ID NO: 143236 - RNA, 22 nt, Human
cccaggcucccaggugggacaa

SEQ ID NO: 143237 - RNA, 22 nt, Human
ucuacagucaaguuauauugcu

SEQ ID NO: 143238 - RNA, 22 nt, Human
cugggaggcccacguugggaag

SEQ ID NO: 143239 - RNA, 22 nt, Human
cuguggcuggccuuauugcugc

SEQ ID NO: 143240 - RNA, 22 nt, Human
cuuacagugacccugcagauuu

SEQ ID NO: 143241 - RNA, 22 nt, Human
cugaaggacacgugaggagcca

SEQ ID NO: 143242 - RNA, 22 nt, Human
uucaguauuucaugacuuucuu

SEQ ID NO: 143243 - RNA, 22 nt, Human
uuucuuccuuaccuuacuagag

SEQ ID NO: 143244 - RNA, 23 nt, Human
uaaagacagccuucaggauucug

SEQ ID NO: 143245 - RNA, 22 nt, Human
aaggaaccuggaguagagggag

SEQ ID NO: 143246 - RNA, 22 nt, Human
ucuggccauggcaagccgagug

SEQ ID NO: 143247 - RNA, 22 nt, Human
ccagggcaggagaaagacucac

SEQ ID NO: 143248 - RNA, 22 nt, Human
ucugcuguucucaugcugauuu

SEQ ID NO: 143249 - RNA, 22 nt, Human
uaguauuuaaucacuuuugucu

SEQ ID NO: 143250 - RNA, 22 nt, Human
guuuggggucugcagagcggcg

SEQ ID NO: 143251 - RNA, 22 nt, Human
agaaacugaauuauuucugagg

SEQ ID NO: 143252 - RNA, 22 nt, Human
ucagcugaguucuagagcacuc

SEQ ID NO: 143253 - RNA, 22 nt, Human
ugagcuuacuucuguacacaga

SEQ ID NO: 143254 - RNA, 22 nt, Human
ccuggagcaaaaaucuaaggag

SEQ ID NO: 143255 - RNA, 22 nt, Human
gcagagaaaguuuuguccucag

SEQ ID NO: 143256 - RNA, 22 nt, Human
aaaucugguucaguaaguccuc

SEQ ID NO: 143257 - RNA, 22 nt, Human
gcaggcaguuauuuaguagaau

SEQ ID NO: 143258 - RNA, 22 nt, Human
gccuggagacaaggacaaaggg

SEQ ID NO: 143259 - RNA, 22 nt, Human
agcuggcccucgagagccaauu

SEQ ID NO: 143260 - RNA, 22 nt, Human
augucuaaaagauaaaguuuaa

SEQ ID NO: 143261 - RNA, 22 nt, Human
uccaaagggaagcgcuuucugu

SEQ ID NO: 143262 - RNA, 22 nt, Human
gccuaauaacuagcuguguaac

SEQ ID NO: 143263 - RNA, 22 nt, Human
ggucacaggggagaagagugau

SEQ ID NO: 143264 - RNA, 22 nt, Human
accauuuuggguauuuucagag

SEQ ID NO: 143265 - RNA, 22 nt, Human
ggcagccauggacacuggcuag

SEQ ID NO: 143266 - RNA, 22 nt, Human
ucagagugaccuuacauggucu

SEQ ID NO: 143267 - RNA, 22 nt, Human
ccagagccuggcaucugcauaa

SEQ ID NO: 143268 - RNA, 22 nt, Human
ucuguaguagguuguaguucuu

SEQ ID NO: 143269 - RNA, 22 nt, Human
gcucaggaucagccaccucuuu

SEQ ID NO: 143270 - RNA, 22 nt, Human
cuugaaagcuuugcgucuucua

SEQ ID NO: 143271 - RNA, 19 nt, Human
cagaccuguccagccugug

SEQ ID NO: 143272 - RNA, 23 nt, Human
uuacaugugugcacacauucugg

SEQ ID NO: 143273 - RNA, 22 nt, Human
aggcugugauggauguaaagga

SEQ ID NO: 143274 - RNA, 22 nt, Human
uggcaggguggcaacuuuuggu

SEQ ID NO: 143275 - RNA, 22 nt, Human
auuguuaugaaaauaagauguu

SEQ ID NO: 143276 - RNA, 23 nt, Human
cuugcagggcuggaggcuuagaa

SEQ ID NO: 143277 - RNA, 22 nt, Human
uugcauugaaugcacauuuuua

SEQ ID NO: 143278 - RNA, 22 nt, Human
cuggcagcagcuucuggaucga

SEQ ID NO: 143279 - RNA, 22 nt, Human
agcaguggagcgagauguuuaa

SEQ ID NO: 143280 - RNA, 22 nt, Human
aggagcuggaguccaggcaagu

SEQ ID NO: 143281 - RNA, 22 nt, Human
ccagucccaggcagaaauccag

SEQ ID NO: 143282 - RNA, 22 nt, Human
aauguguacaugacagauagaa

SEQ ID NO: 143283 - RNA, 22 nt, Human
gcucugcugcuuacuagauggu

SEQ ID NO: 143284 - RNA, 22 nt, Human
cugcccugagucaugccagaug

SEQ ID NO: 143285 - RNA, 22 nt, Human
gccuuuuuuguugcucugucac

SEQ ID NO: 143286 - RNA, 20 nt, Human
cuuuggcaaugagaacaggg

SEQ ID NO: 143287 - RNA, 22 nt, Human
gaggcugguaggaaaggaaaca

SEQ ID NO: 143288 - RNA, 22 nt, Human
uuaggaaauuaugguuucagau

SEQ ID NO: 143289 - RNA, 21 nt, Human
uugaaggaucacuucuguacc

SEQ ID NO: 143290 - RNA, 22 nt, Human
aagggcaggugggcauuucugg

SEQ ID NO: 143291 - RNA, 22 nt, Human
guuccaggcaagugggauagga

SEQ ID NO: 143292 - RNA, 22 nt, Human
aucacgucaugguuugaucugg

SEQ ID NO: 143293 - RNA, 22 nt, Human
uugcauguguaauuuuucuaaa

SEQ ID NO: 143294 - RNA, 22 nt, Human
aaauguguuccuuugcuacaga

SEQ ID NO: 143295 - RNA, 22 nt, Human
ugggccuggacaaggccacuag

SEQ ID NO: 143296 - RNA, 22 nt, Human
caggagugucuccacacagcaa

SEQ ID NO: 143297 - RNA, 22 nt, Human
aaagacuagcauuuauauguac

SEQ ID NO: 143298 - RNA, 22 nt, Human
aggccagagaggggaccagccu

SEQ ID NO: 143299 - RNA, 18 nt, Human
aggcuucuuggcucaguc

SEQ ID NO: 143300 - RNA, 22 nt, Human
ugcagggcuuccucuuggaguu

SEQ ID NO: 143301 - RNA, 22 nt, Human
gaugugugcuuuucgcaguguc

SEQ ID NO: 143302 - RNA, 22 nt, Human
uccaggcuggacaugaggcggg

SEQ ID NO: 143303 - RNA, 22 nt, Human
uuucagugcuucuguuuaccgg

SEQ ID NO: 143304 - RNA, 19 nt, Human
ggcccaaguacugagugcc

SEQ ID NO: 143305 - RNA, 22 nt, Human
uaucucuuucauuuuagaguca

SEQ ID NO: 143306 - RNA, 22 nt, Human
cagucccaggguugguucagcu

SEQ ID NO: 143307 - RNA, 22 nt, Human
cugugcuugacagugggaagca

SEQ ID NO: 143308 - RNA, 22 nt, Human
guguccaucagcagccacugug

SEQ ID NO: 143309 - RNA, 22 nt, Human
aaaaaguuucaacugccaacuc

SEQ ID NO: 143310 - RNA, 22 nt, Human
cccaggagguagagguugcagu

SEQ ID NO: 143311 - RNA, 22 nt, Human
cuuuaucauggagguaaauaug

SEQ ID NO: 143312 - RNA, 22 nt, Human
uucaagauggccccagugagcc

SEQ ID NO: 143313 - RNA, 20 nt, Human
aguagcagugugacauugac

SEQ ID NO: 143314 - RNA, 22 nt, Human
caggggcagucugugugcgugg

SEQ ID NO: 143315 - RNA, 22 nt, Human
uacauagcaaggaaaugacaga

SEQ ID NO: 143316 - RNA, 22 nt, Human
auuuacaggacagcuuggcauu

SEQ ID NO: 143317 - RNA, 23 nt, Human
ucucuuaccugagacauuuccua

SEQ ID NO: 143318 - RNA, 22 nt, Human
gcagagcugucuaagucacuuc

SEQ ID NO: 143319 - RNA, 22 nt, Human
ugaaggaaugaguauacuguuu

SEQ ID NO: 143320 - RNA, 22 nt, Human
ggaagagccuggggugucaggc

SEQ ID NO: 143321 - RNA, 22 nt, Human
gcaggcagaucaccugucagga

SEQ ID NO: 143322 - RNA, 17 nt, Human
ccucccacaccgcccug

SEQ ID NO: 143323 - RNA, 22 nt, Human
cucaggaggugguagaggcccu

SEQ ID NO: 143324 - RNA, 22 nt, Human
agcagggcucuguggagggugg

SEQ ID NO: 143325 - RNA, 22 nt, Human
cugggacuuuacccuguggccc

SEQ ID NO: 143326 - RNA, 22 nt, Human
ccagcaggguugguuucuucug

SEQ ID NO: 143327 - RNA, 22 nt, Human
uaacaguacauccuuuucucuu

SEQ ID NO: 143328 - RNA, 22 nt, Human
cuuucucugugugguaaagggc

SEQ ID NO: 143329 - RNA, 22 nt, Human
ugggcagacgggagcuugccuu

SEQ ID NO: 143330 - RNA, 22 nt, Human
cggagcugccugccaagccugc

SEQ ID NO: 143331 - RNA, 20 nt, Human
uucaggauucuagaccacac

SEQ ID NO: 143332 - RNA, 19 nt, Human
cuggcucuuggguggagga

SEQ ID NO: 143333 - RNA, 18 nt, Human
uaucuuuuccagugguau

SEQ ID NO: 143334 - RNA, 22 nt, Human
uuaacaugucuugacuucaucu

SEQ ID NO: 143335 - RNA, 22 nt, Human
caggaaagggaugggcugccac

SEQ ID NO: 143336 - RNA, 22 nt, Human
gcucaggacccaggugugaccu

SEQ ID NO: 143337 - RNA, 22 nt, Human
ucccagagguugagucacuuau

SEQ ID NO: 143338 - RNA, 22 nt, Human
ucucugcucugugccucaguuu

SEQ ID NO: 143339 - RNA, 22 nt, Human
uggcauguauuuguggugaauu

SEQ ID NO: 143340 - RNA, 22 nt, Human
cuggagccacuuuuuauccuuu

SEQ ID NO: 143341 - RNA, 22 nt, Human
ugaugaaacugagguuccaaga

SEQ ID NO: 143342 - RNA, 22 nt, Human
uauuucuaagagauaucuguac

SEQ ID NO: 143343 - RNA, 22 nt, Human
auggcucauuuaucuugcagcc

SEQ ID NO: 143344 - RNA, 22 nt, Human
uacuuagagcgauaauuuauac

SEQ ID NO: 143345 - RNA, 22 nt, Human
guagcccaccuggggagggcga

SEQ ID NO: 143346 - RNA, 22 nt, Human
gcagcuuggugaaaggugaugg

SEQ ID NO: 143347 - RNA, 22 nt, Human
uguaugcuuugguuguuucucu

SEQ ID NO: 143348 - RNA, 22 nt, Human
cacacuagucuauccauuagcu

SEQ ID NO: 143349 - RNA, 22 nt, Human
ccuggcugugcauugccggccc

SEQ ID NO: 143350 - RNA, 22 nt, Human
caggcagcagccacucugguau

SEQ ID NO: 143351 - RNA, 22 nt, Human
cucucccagucaggcucaggau

SEQ ID NO: 143352 - RNA, 21 nt, Human
aaggaaaagcuuggucucuga

SEQ ID NO: 143353 - RNA, 22 nt, Human
gagggcugcaaugagacagaga

SEQ ID NO: 143354 - RNA, 22 nt, Human
uccucugcucagcauuccucac

SEQ ID NO: 143355 - RNA, 22 nt, Human
uuugcucuuaugaacaaggugg

SEQ ID NO: 143356 - RNA, 22 nt, Human
ugcauauuauguguaucugucu

SEQ ID NO: 143357 - RNA, 22 nt, Human
caagaugccccugguagggauc

SEQ ID NO: 143358 - RNA, 20 nt, Human
uccagccacuuccgcugguc

SEQ ID NO: 143359 - RNA, 22 nt, Human
cuccucuucugaguaccaggga

SEQ ID NO: 143360 - RNA, 18 nt, Human
uggugaaggguggaggag

SEQ ID NO: 143361 - RNA, 22 nt, Human
ucccagggugcgccugcccucg

SEQ ID NO: 143362 - RNA, 22 nt, Human
caaggccagggaauuuuucugg

SEQ ID NO: 143363 - RNA, 22 nt, Human
ggugaaggaggaagcugaugga

SEQ ID NO: 143364 - RNA, 22 nt, Human
ccaggaggcggaagguacagug

SEQ ID NO: 143365 - RNA, 22 nt, Human
cugcaggauucucccaguugga

SEQ ID NO: 143366 - RNA, 22 nt, Human
acacccagagcgccagugccga

SEQ ID NO: 143367 - RNA, 22 nt, Human
gcagcagcccagggcucucaga

SEQ ID NO: 143368 - RNA, 22 nt, Human
uggcccucagucuugcuccugc

SEQ ID NO: 143369 - RNA, 22 nt, Human
agccacagagcaggagaccuuu

SEQ ID NO: 143370 - RNA, 22 nt, Human
uuagaaaaaggcuguggucuua

SEQ ID NO: 143371 - RNA, 22 nt, Human
cauuuccacuucugaaaacugg

SEQ ID NO: 143372 - RNA, 22 nt, Human
uuuaaacuguugauuuuaugaa

SEQ ID NO: 143373 - RNA, 22 nt, Human
uugaggagcacuagucagguau

SEQ ID NO: 143374 - RNA, 22 nt, Human
caggcagccuucucgucucaca

SEQ ID NO: 143375 - RNA, 22 nt, Human
acaaacuaccuacagauguuca

SEQ ID NO: 143376 - RNA, 22 nt, Human
ucagaggagaaguugggaaaau

SEQ ID NO: 143377 - RNA, 22 nt, Human
ggccucaguuucuccauggguu

SEQ ID NO: 143378 - RNA, 22 nt, Human
ccacagaggacaacugccuggc

SEQ ID NO: 143379 - RNA, 22 nt, Human
ccagggccaagagaccucgagg

SEQ ID NO: 143380 - RNA, 18 nt, Human
ucugucucuguccuugcu

SEQ ID NO: 143381 - RNA, 20 nt, Human
aagcaauauagugcaaaugu

SEQ ID NO: 143382 - RNA, 22 nt, Human
cuguguggccucaagccagccu

SEQ ID NO: 143383 - RNA, 22 nt, Human
ucugucuucuguagcuaauaau

SEQ ID NO: 143384 - RNA, 22 nt, Human
aacucagcauccugcacagaga

SEQ ID NO: 143385 - RNA, 22 nt, Human
guuuacagagacagaaaguagu

SEQ ID NO: 143386 - RNA, 22 nt, Human
aaguucuaauuuugcauucagg

SEQ ID NO: 143387 - RNA, 22 nt, Human
uaaagaacacagggaauagcac

SEQ ID NO: 143388 - RNA, 22 nt, Human
ucuggcucagggcucugaggga

SEQ ID NO: 143389 - RNA, 22 nt, Human
ggcccagccggcgagucucgcg

SEQ ID NO: 143390 - RNA, 22 nt, Human
gggcuucucuuuagugagcuga

SEQ ID NO: 143391 - RNA, 22 nt, Human
uugaaggaggcuccuuuuuaaa

SEQ ID NO: 143392 - RNA, 20 nt, Human
cucaggauugucuagccccu

SEQ ID NO: 143393 - RNA, 22 nt, Human
augcuguagaucuuagccucua

SEQ ID NO: 143394 - RNA, 22 nt, Human
acauuuuuauucaucaaagcag

SEQ ID NO: 143395 - RNA, 22 nt, Human
ugcuccauucucuagccagugc

SEQ ID NO: 143396 - RNA, 22 nt, Human
aucauguuccagaaacagugau

SEQ ID NO: 143397 - RNA, 22 nt, Human
acagagcaguucuggagcuggc

SEQ ID NO: 143398 - RNA, 22 nt, Human
cugucguguucacuguggccua

SEQ ID NO: 143399 - RNA, 22 nt, Human
uuacagaacugcccuaguuggc

SEQ ID NO: 143400 - RNA, 18 nt, Human
ucucagaggccauccuag

SEQ ID NO: 143401 - RNA, 22 nt, Human
ucauauuucaaaauggcuggag

SEQ ID NO: 143402 - RNA, 22 nt, Human
uccauuuuagagaugaagaaac

SEQ ID NO: 143403 - RNA, 22 nt, Human
cagccagggucaggcagcuucu

SEQ ID NO: 143404 - RNA, 22 nt, Human
uacaguauuugaagaauaugag

SEQ ID NO: 143405 - RNA, 22 nt, Human
agggccagcccauaaugccaaa

SEQ ID NO: 143406 - RNA, 20 nt, Human
gcugggggugugcugaguga

SEQ ID NO: 143407 - RNA, 22 nt, Human
gccuggcaaggcccuguugacu

SEQ ID NO: 143408 - RNA, 22 nt, Human
auucuucacauaagugcuguac

SEQ ID NO: 143409 - RNA, 22 nt, Human
uauuuccaggccccacucuaga

SEQ ID NO: 143410 - RNA, 17 nt, Human
agcugagcuggccaggg

SEQ ID NO: 143411 - RNA, 22 nt, Human
uccuguaguugcuaaguuuguu

SEQ ID NO: 143412 - RNA, 20 nt, Human
aguguaugaaucuggauggg

SEQ ID NO: 143413 - RNA, 22 nt, Human
acagauauuaugguuucuccuu

SEQ ID NO: 143414 - RNA, 22 nt, Human
auguacauuuguaguaauauca

SEQ ID NO: 143415 - RNA, 22 nt, Human
uucucuuucuacagugugauug

SEQ ID NO: 143416 - RNA, 22 nt, Human
aagggcuggccacauucugggu

SEQ ID NO: 143417 - RNA, 22 nt, Human
acauuucugcauguaggguaau

SEQ ID NO: 143418 - RNA, 22 nt, Human
guaagcaucugucucuucugca

SEQ ID NO: 143419 - RNA, 22 nt, Human
uccuugaauauaauaacaguag

SEQ ID NO: 143420 - RNA, 22 nt, Human
aaaaguaauugcaauuuuguag

SEQ ID NO: 143421 - RNA, 22 nt, Human
auccaaagauggaaagaacuuu

SEQ ID NO: 143422 - RNA, 20 nt, Human
auguagaugaaagcaaaggc

SEQ ID NO: 143423 - RNA, 22 nt, Human
uggcucugugucucccagcagc

SEQ ID NO: 143424 - RNA, 22 nt, Human
uguauuuucagaguggcauuuc

SEQ ID NO: 143425 - RNA, 22 nt, Human
ugcauuauaacugaauguuguu

SEQ ID NO: 143426 - RNA, 22 nt, Human
acagccagguaaaggcauggca

SEQ ID NO: 143427 - RNA, 19 nt, Human
uguggccaugguucagcug

SEQ ID NO: 143428 - RNA, 22 nt, Human
uccugucagugaggcagaugaa

SEQ ID NO: 143429 - RNA, 22 nt, Human
ucacaggguuuggaagccuccu

SEQ ID NO: 143430 - RNA, 22 nt, Human
aaaguguagagacuuuggaacc

SEQ ID NO: 143431 - RNA, 17 nt, Human
ucauuuguugugacuag

SEQ ID NO: 143432 - RNA, 22 nt, Human
cugggcagugcagcuauagaac

SEQ ID NO: 143433 - RNA, 19 nt, Human
gcuguauuaaagauacaug

SEQ ID NO: 143434 - RNA, 22 nt, Human
agcuggagccagugugaggcuu

SEQ ID NO: 143435 - RNA, 22 nt, Human
cagaggccauauuucuucacuc

SEQ ID NO: 143436 - RNA, 22 nt, Human
ugcccugugugugcaagcacug

SEQ ID NO: 143437 - RNA, 22 nt, Human
cugcugcugcuaucuacccagg

SEQ ID NO: 143438 - RNA, 22 nt, Human
gggcucuggauggagccugcag

SEQ ID NO: 143439 - RNA, 22 nt, Human
agauuucccucuuguauuugca

SEQ ID NO: 143440 - RNA, 20 nt, Human
cucugcuuuaggagagucag

SEQ ID NO: 143441 - RNA, 22 nt, Human
uuauguauggauggcugaaagu

SEQ ID NO: 143442 - RNA, 22 nt, Human
cauaacuagagugaaauguuga

SEQ ID NO: 143443 - RNA, 22 nt, Human
agccaaggcagcuagagcucug

SEQ ID NO: 143444 - RNA, 22 nt, Human
uggcccugcuaugauccugcaa

SEQ ID NO: 143445 - RNA, 20 nt, Human
gucucaaguaucucacaguc

SEQ ID NO: 143446 - RNA, 22 nt, Human
gcagggcuguucaggagggugg

SEQ ID NO: 143447 - RNA, 22 nt, Human
acugucacuccaacugagucgu

SEQ ID NO: 143448 - RNA, 22 nt, Human
cucagggucugguccuuagauu

SEQ ID NO: 143449 - RNA, 22 nt, Human
ggcuucucgugccgaagcaaga

SEQ ID NO: 143450 - RNA, 23 nt, Human
cccuggaguaaauucuuggaagg

SEQ ID NO: 143451 - RNA, 22 nt, Human
uccccagccgugaaggagagga

SEQ ID NO: 143452 - RNA, 22 nt, Human
caggagcccagaguccucagcu

SEQ ID NO: 143453 - RNA, 22 nt, Human
cuugcaggauuuugcugcugua

SEQ ID NO: 143454 - RNA, 22 nt, Human
cagggcaggacagauacauuac

SEQ ID NO: 143455 - RNA, 22 nt, Human
ccgggccucgggacaccgggua

SEQ ID NO: 143456 - RNA, 22 nt, Human
cuuuauguuggggugucuuagu

SEQ ID NO: 143457 - RNA, 22 nt, Human
ucuuuucuguaacucagugucu

SEQ ID NO: 143458 - RNA, 22 nt, Human
ucacaguaguuguucucuguuu

SEQ ID NO: 143459 - RNA, 22 nt, Human
uggcucagcagguuagaaacua

SEQ ID NO: 143460 - RNA, 22 nt, Human
ugagcccaggaguaugaggcug

SEQ ID NO: 143461 - RNA, 22 nt, Human
gcagggcagccacaggcccccu

SEQ ID NO: 143462 - RNA, 22 nt, Human
ccaaaauguuugaaugcaugug

SEQ ID NO: 143463 - RNA, 22 nt, Human
uuuaacuccuaguguguauuag

SEQ ID NO: 143464 - RNA, 22 nt, Human
aagugaguggccuggagaggug

SEQ ID NO: 143465 - RNA, 22 nt, Human
aaacuuuucuuggggaccugcc

SEQ ID NO: 143466 - RNA, 22 nt, Human
aauaauuuuagcucagaguugu

SEQ ID NO: 143467 - RNA, 22 nt, Human
aaaugcaucagcucauaagaga

SEQ ID NO: 143468 - RNA, 22 nt, Human
acauuucuuccacaugcugcug

SEQ ID NO: 143469 - RNA, 22 nt, Human
ccugucugaaggcagggggaug

SEQ ID NO: 143470 - RNA, 22 nt, Human
gugcagugacccuggagagcug

SEQ ID NO: 143471 - RNA, 22 nt, Human
agcuauauagaugguguguuug

SEQ ID NO: 143472 - RNA, 22 nt, Human
cagcuggcgggcagagccgcca

SEQ ID NO: 143473 - RNA, 22 nt, Human
uucucuuagcuguaaagucaau

SEQ ID NO: 143474 - RNA, 22 nt, Human
ccagagaccagaacauggggau

SEQ ID NO: 143475 - RNA, 22 nt, Human
cucuccagaauaugccgccgug

SEQ ID NO: 143476 - RNA, 22 nt, Human
gccuggagaauuaaaaggaagg

SEQ ID NO: 143477 - RNA, 22 nt, Human
aacuuuguuuuauucacugcug

SEQ ID NO: 143478 - RNA, 21 nt, Human
cagcuuugucugucuucgggg

SEQ ID NO: 143479 - RNA, 22 nt, Human
ggcucugguugaccaugauggc

SEQ ID NO: 143480 - RNA, 19 nt, Human
acacugaauguagaauugg

SEQ ID NO: 143481 - RNA, 23 nt, Human
gcucagagguuuuucucuggaug

SEQ ID NO: 143482 - RNA, 22 nt, Human
ucuucagaggaagucagucuuu

SEQ ID NO: 143483 - RNA, 23 nt, Human
gguggcaggaguggaugcugagc

SEQ ID NO: 143484 - RNA, 22 nt, Human
ggagcugcacgcucugaagccu

SEQ ID NO: 143485 - RNA, 21 nt, Human
uucagcaguccucuagagaua

SEQ ID NO: 143486 - RNA, 22 nt, Human
uauugacagagggucagaagag

SEQ ID NO: 143487 - RNA, 22 nt, Human
ggccuguccagccugccuggcu

SEQ ID NO: 143488 - RNA, 22 nt, Human
uucucauucugacucaguguag

SEQ ID NO: 143489 - RNA, 22 nt, Human
cucucucuaugcguuguuccua

SEQ ID NO: 143490 - RNA, 22 nt, Human
ggcgaggccgggacaggcugga

SEQ ID NO: 143491 - RNA, 23 nt, Human
uggcugagauccuacuguuugcu

SEQ ID NO: 143492 - RNA, 22 nt, Human
ugaggcagcuuuuucugugugu

SEQ ID NO: 143493 - RNA, 22 nt, Human
uggugccuugggccuacagcgc

SEQ ID NO: 143494 - RNA, 22 nt, Human
ccucagagguuuucauucugua

SEQ ID NO: 143495 - RNA, 22 nt, Human
ugcccacauggugccauggcca

SEQ ID NO: 143496 - RNA, 22 nt, Human
uuucaugaggggcaaaaucuca

SEQ ID NO: 143497 - RNA, 22 nt, Human
gcugucaguuuuacccacagac

SEQ ID NO: 143498 - RNA, 22 nt, Human
cacugcuuaguugguaaaugug

SEQ ID NO: 143499 - RNA, 23 nt, Human
agaggccaacuucuugccccucc

SEQ ID NO: 143500 - RNA, 22 nt, Human
ggcuguauauacuguauacagu

SEQ ID NO: 143501 - RNA, 22 nt, Human
uugaaagucacaauggcauuaa

SEQ ID NO: 143502 - RNA, 21 nt, Human
uuagacuuggguuuuuccugg

SEQ ID NO: 143503 - RNA, 22 nt, Human
uggcaguggcucagagugcaga

SEQ ID NO: 143504 - RNA, 22 nt, Human
cacccagcagcacuuaagacua

SEQ ID NO: 143505 - RNA, 22 nt, Human
cugagccagggccacacaugga

SEQ ID NO: 143506 - RNA, 22 nt, Human
auggacaggcugagcuuccuca

SEQ ID NO: 143507 - RNA, 22 nt, Human
cugccuggccugaucuccacgc

SEQ ID NO: 143508 - RNA, 22 nt, Human
cuuuacagugaacuugcuuguc

SEQ ID NO: 143509 - RNA, 22 nt, Human
guguugaugacauuuuagaaac

SEQ ID NO: 143510 - RNA, 22 nt, Human
cagggcagggauguugcggcag

SEQ ID NO: 143511 - RNA, 22 nt, Human
uaaucacaucaggguaaauggg

SEQ ID NO: 143512 - RNA, 22 nt, Human
gcaugggcaagaggacuggggg

SEQ ID NO: 143513 - RNA, 22 nt, Human
cagcagagcauuugguaggagg

SEQ ID NO: 143514 - RNA, 22 nt, Human
gcugccuuugugagccaagggg

SEQ ID NO: 143515 - RNA, 22 nt, Human
uucacauugguucuugauagcu

SEQ ID NO: 143516 - RNA, 22 nt, Human
gcuggcuccucuguccucacgg

SEQ ID NO: 143517 - RNA, 15 nt, Human
aucucucuagcugcu

SEQ ID NO: 143518 - RNA, 22 nt, Human
uuugcauugccucugacuuaug

SEQ ID NO: 143519 - RNA, 22 nt, Human
cugcugggcagaggcugcauga

SEQ ID NO: 143520 - RNA, 22 nt, Human
cuggggacuugcagacacaauu

SEQ ID NO: 143521 - RNA, 17 nt, Human
ggagagugggaauggcc

SEQ ID NO: 143522 - RNA, 22 nt, Human
uagugaaacaguuaucaaucug

SEQ ID NO: 143523 - RNA, 22 nt, Human
cagggagaggcaucauagggaa

SEQ ID NO: 143524 - RNA, 22 nt, Human
caauaugcaagcuauuaaguau

SEQ ID NO: 143525 - RNA, 22 nt, Human
aguggcuggacgacaaggguga

SEQ ID NO: 143526 - RNA, 22 nt, Human
agagcuuagaauuucagaugau

SEQ ID NO: 143527 - RNA, 22 nt, Human
guucuucaucauuaacacucug

SEQ ID NO: 143528 - RNA, 22 nt, Human
cccugggcaagcccuauuuucc

SEQ ID NO: 143529 - RNA, 22 nt, Human
gcauuucuuccuggugugagcc

SEQ ID NO: 143530 - RNA, 22 nt, Human
agugcuguccaguuucacaggu

SEQ ID NO: 143531 - RNA, 22 nt, Human
cugcagggcccgccugagcccu

SEQ ID NO: 143532 - RNA, 22 nt, Human
uaaggccaaguucauauacaac

SEQ ID NO: 143533 - RNA, 22 nt, Human
aggcuguguuuaagugguaaug

SEQ ID NO: 143534 - RNA, 22 nt, Human
uucucugugagggugcuggauu

SEQ ID NO: 143535 - RNA, 22 nt, Human
ucccagagcagaugugcuaaag

SEQ ID NO: 143536 - RNA, 23 nt, Human
ucagagagcuguugagagcugcc

SEQ ID NO: 143537 - RNA, 22 nt, Human
uucucugccucuagcuauauuc

SEQ ID NO: 143538 - RNA, 22 nt, Human
aaggccugggaguacugggaca

SEQ ID NO: 143539 - RNA, 22 nt, Human
gcuuuauguaaguccaaaggca

SEQ ID NO: 143540 - RNA, 22 nt, Human
ugaacccaggagguugcaguga

SEQ ID NO: 143541 - RNA, 22 nt, Human
cucugcuuggaacuggacagaa

SEQ ID NO: 143542 - RNA, 22 nt, Human
cccaggcuggagugcaauggca

SEQ ID NO: 143543 - RNA, 19 nt, Human
uacuuuuucaggacagagu

SEQ ID NO: 143544 - RNA, 22 nt, Human
agcagccacccagcugcucauu

SEQ ID NO: 143545 - RNA, 22 nt, Human
uuaaguccuugguaauuuucuu

SEQ ID NO: 143546 - RNA, 22 nt, Human
ugguggccaauucacagggcuc

SEQ ID NO: 143547 - RNA, 23 nt, Human
ugccagaggcagucacaguggug

SEQ ID NO: 143548 - RNA, 22 nt, Human
aggagcugaagucucugcacuc

SEQ ID NO: 143549 - RNA, 22 nt, Human
gaguggggcguggauccagcgu

SEQ ID NO: 143550 - RNA, 22 nt, Human
uguacaaugccgagacuaacuc

SEQ ID NO: 143551 - RNA, 22 nt, Human
agucucagaaaagaagcaugga

SEQ ID NO: 143552 - RNA, 19 nt, Human
ugccagcauuaggcugaag

SEQ ID NO: 143553 - RNA, 20 nt, Human
uuucaguuaucuugaccuuc

SEQ ID NO: 143554 - RNA, 22 nt, Human
cugccaucugagccaaaagugc

SEQ ID NO: 143555 - RNA, 22 nt, Human
aggugccagcucucaggcagga

SEQ ID NO: 143556 - RNA, 22 nt, Human
aaguucaaggugauaguggcag

SEQ ID NO: 143557 - RNA, 22 nt, Human
cuggagccacugggucuuguau

SEQ ID NO: 143558 - RNA, 22 nt, Human
gcccccucuuuggagccagcca

SEQ ID NO: 143559 - RNA, 23 nt, Human
ucccuggaggcagguccagggcc

SEQ ID NO: 143560 - RNA, 22 nt, Human
auuugucucucuggguuuacuu

SEQ ID NO: 143561 - RNA, 22 nt, Human
caggcagccugcggucugcaca

SEQ ID NO: 143562 - RNA, 22 nt, Human
caaggccaguucaccaagggca

SEQ ID NO: 143563 - RNA, 22 nt, Human
accugccuucucaaggacauga

SEQ ID NO: 143564 - RNA, 22 nt, Human
agggcagccaugagccuucagg

SEQ ID NO: 143565 - RNA, 22 nt, Human
ucuguguauaggguugugcgcu

SEQ ID NO: 143566 - RNA, 22 nt, Human
ucucugugucuuagugaaggga

SEQ ID NO: 143567 - RNA, 22 nt, Human
auaacagagagcuacugaacug

SEQ ID NO: 143568 - RNA, 22 nt, Human
accugccucuaagcagcaggug

SEQ ID NO: 143569 - RNA, 22 nt, Human
gugccugcugcagagucgcugu

SEQ ID NO: 143570 - RNA, 22 nt, Human
uguggcugaucaaagcgcucag

SEQ ID NO: 143571 - RNA, 19 nt, Human
ggaugagggucaggcauag

SEQ ID NO: 143572 - RNA, 22 nt, Human
gcaagauguuaacauagggaga

SEQ ID NO: 143573 - RNA, 22 nt, Human
ugugggugaugaauuuguucuu

SEQ ID NO: 143574 - RNA, 22 nt, Human
gacacagcacuguacaaggaau

SEQ ID NO: 143575 - RNA, 22 nt, Human
uggcucaggguccccaaauggu

SEQ ID NO: 143576 - RNA, 22 nt, Human
agcagcugagaugguaagauuc

SEQ ID NO: 143577 - RNA, 22 nt, Human
cacagaaaaaggcuugaaaauc

SEQ ID NO: 143578 - RNA, 22 nt, Human
uuuacagucugucuagcaaugu

SEQ ID NO: 143579 - RNA, 22 nt, Human
auugugcaaauauuaucuguag

SEQ ID NO: 143580 - RNA, 22 nt, Human
ccugcuggccaguggagggcug

SEQ ID NO: 143581 - RNA, 22 nt, Human
gagggggcgugcaaggcuccgc

SEQ ID NO: 143582 - RNA, 22 nt, Human
uuucuguaauuaaaagggcagg

SEQ ID NO: 143583 - RNA, 22 nt, Human
agaggccagguccagaguuugu

SEQ ID NO: 143584 - RNA, 22 nt, Human
gcugggcaccggagagacccca

SEQ ID NO: 143585 - RNA, 22 nt, Human
ugagccuggggccugggcagcg

SEQ ID NO: 143586 - RNA, 22 nt, Human
agcagggcagugaucagaaagg

SEQ ID NO: 143587 - RNA, 22 nt, Human
gcagaggcauuucugacgcugc

SEQ ID NO: 143588 - RNA, 22 nt, Human
uagcagggucucaggagucagg

SEQ ID NO: 143589 - RNA, 22 nt, Human
uauguguacaucugguugagca

SEQ ID NO: 143590 - RNA, 22 nt, Human
agcugugugcccaugguggagg

SEQ ID NO: 143591 - RNA, 22 nt, Human
uguguuuuacaaauucucuuaa

SEQ ID NO: 143592 - RNA, 22 nt, Human
aggcugcuggcaggcguggacg

SEQ ID NO: 143593 - RNA, 22 nt, Human
ucaaacuagccugacugguauu

SEQ ID NO: 143594 - RNA, 22 nt, Human
uuucagaugcaauuaauuuuca

SEQ ID NO: 143595 - RNA, 22 nt, Human
ugggcugcugucugcacaugcu

SEQ ID NO: 143596 - RNA, 22 nt, Human
uuuugaaagggugauuuggcuu

SEQ ID NO: 143597 - RNA, 22 nt, Human
ccacagagcauuagauuucaga

SEQ ID NO: 143598 - RNA, 22 nt, Human
cccagcaguaaccaguggaaau

SEQ ID NO: 143599 - RNA, 20 nt, Human
ucucuauucccacgaggaaa

SEQ ID NO: 143600 - RNA, 22 nt, Human
aacauuucagcaaauaagaaca

SEQ ID NO: 143601 - RNA, 22 nt, Human
uuucaaagucaauaucauuacc

SEQ ID NO: 143602 - RNA, 22 nt, Human
gaaacccaaacuaagacaguag

SEQ ID NO: 143603 - RNA, 22 nt, Human
gcuccucuucucccacugaaug

SEQ ID NO: 143604 - RNA, 22 nt, Human
augccacugacauggacaauuu

SEQ ID NO: 143605 - RNA, 22 nt, Human
cagcccucagguccucagcagc

SEQ ID NO: 143606 - RNA, 20 nt, Human
caguccaaucagaggccacc

SEQ ID NO: 143607 - RNA, 22 nt, Human
agggucccgaaggagacagcaa

SEQ ID NO: 143608 - RNA, 21 nt, Human
gcugagagguugggaaguuca

SEQ ID NO: 143609 - RNA, 22 nt, Human
cacucugcagcugaagggcugg

SEQ ID NO: 143610 - RNA, 22 nt, Human
ugugcccaucccucuggagugu

SEQ ID NO: 143611 - RNA, 22 nt, Human
ucuucauuuuauagcaucugug

SEQ ID NO: 143612 - RNA, 19 nt, Human
ccaggccaucccaguuccc

SEQ ID NO: 143613 - RNA, 22 nt, Human
ucaaaagucugcauucuucaca

SEQ ID NO: 143614 - RNA, 22 nt, Human
caaugugucaggaaaagggcca

SEQ ID NO: 143615 - RNA, 20 nt, Human
cugggaggucuuccaaauca

SEQ ID NO: 143616 - RNA, 22 nt, Human
cuggcucaccuccgcuccagca

SEQ ID NO: 143617 - RNA, 22 nt, Human
gcagggucgcucuaggagauca

SEQ ID NO: 143618 - RNA, 22 nt, Human
agugagggaugaagaacugcgg

SEQ ID NO: 143619 - RNA, 22 nt, Human
guuuucucugagaugccuuucu

SEQ ID NO: 143620 - RNA, 20 nt, Human
uccaggagaacugggagccg

SEQ ID NO: 143621 - RNA, 22 nt, Human
uuacaguaccuguauggccacu

SEQ ID NO: 143622 - RNA, 22 nt, Human
cugccuggaaugccagcuucuc

SEQ ID NO: 143623 - RNA, 22 nt, Human
uaacagaaaggggacagaaaua

SEQ ID NO: 143624 - RNA, 22 nt, Human
uguggucucguuauguugccca

SEQ ID NO: 143625 - RNA, 22 nt, Human
cugcugcauuacucuucucaag

SEQ ID NO: 143626 - RNA, 22 nt, Human
gaggccugguuugcaugagaau

SEQ ID NO: 143627 - RNA, 22 nt, Human
gggcugggcaugguguucccuc

SEQ ID NO: 143628 - RNA, 22 nt, Human
cacaggggcaaacuguagggga

SEQ ID NO: 143629 - RNA, 22 nt, Human
ggcagagcuuguuccuucuguu

SEQ ID NO: 143630 - RNA, 22 nt, Human
ucuguaucacccguucccagaa

SEQ ID NO: 143631 - RNA, 22 nt, Human
auaaggcaucucucaguuagca

SEQ ID NO: 143632 - RNA, 22 nt, Human
gcugucugcugugcacugagca

SEQ ID NO: 143633 - RNA, 22 nt, Human
cugaggccucuguucaccagaa

SEQ ID NO: 143634 - RNA, 22 nt, Human
cagccaggcccccgagucguug

SEQ ID NO: 143635 - RNA, 22 nt, Human
uccuuggcaugccgucuucucc

SEQ ID NO: 143636 - RNA, 22 nt, Human
ugacaccacaacuagccauuga

SEQ ID NO: 143637 - RNA, 22 nt, Human
gguccccagcaguggcugcuuc

SEQ ID NO: 143638 - RNA, 22 nt, Human
cucuguagaaacagggcagaag

SEQ ID NO: 143639 - RNA, 18 nt, Human
gucauugcaacauacugu

SEQ ID NO: 143640 - RNA, 22 nt, Human
ugagagugaaaugucacauguc

SEQ ID NO: 143641 - RNA, 22 nt, Human
guggaauguccuugaucauaag

SEQ ID NO: 143642 - RNA, 22 nt, Human
auguggcuuggcagggaauaug

SEQ ID NO: 143643 - RNA, 22 nt, Human
ggcccuguccuggcugucuccg

SEQ ID NO: 143644 - RNA, 22 nt, Human
uggaagcacuuggguuuuguug

SEQ ID NO: 143645 - RNA, 22 nt, Human
cccugcagcuuuugcauaguca

SEQ ID NO: 143646 - RNA, 21 nt, Human
agugaaauugcaucagaggga

SEQ ID NO: 143647 - RNA, 22 nt, Human
agccuucagcaguucaggugcc

SEQ ID NO: 143648 - RNA, 22 nt, Human
cccagcagccagaaugaggagc

SEQ ID NO: 143649 - RNA, 22 nt, Human
aauauuucuccuucguuauagc

SEQ ID NO: 143650 - RNA, 21 nt, Human
gugguuauuuucauuagcauc

SEQ ID NO: 143651 - RNA, 22 nt, Human
ugcagcauuauucacaguagcc

SEQ ID NO: 143652 - RNA, 22 nt, Human
guggagcccugguagggacccc

SEQ ID NO: 143653 - RNA, 22 nt, Human
uccugcagaccucagucagguc

SEQ ID NO: 143654 - RNA, 22 nt, Human
uuuuguaugagaagugcuuuac

SEQ ID NO: 143655 - RNA, 22 nt, Human
uacuuuagaaggaaauaaguuc

SEQ ID NO: 143656 - RNA, 22 nt, Human
ggagggcaucaaucaggccugg

SEQ ID NO: 143657 - RNA, 22 nt, Human
cccaggcuggauuucgguggca

SEQ ID NO: 143658 - RNA, 22 nt, Human
ccaggugggaggaaagcagaga

SEQ ID NO: 143659 - RNA, 23 nt, Human
agaaaagcuuggacacauggccu

SEQ ID NO: 143660 - RNA, 22 nt, Human
ggaggccaaggugggcggauca

SEQ ID NO: 143661 - RNA, 22 nt, Human
uucuauguaccuagcguuguau

SEQ ID NO: 143662 - RNA, 22 nt, Human
aaaggucaaaaucgugacauug

SEQ ID NO: 143663 - RNA, 22 nt, Human
uuuggaaaguguacaaauuuga

SEQ ID NO: 143664 - RNA, 22 nt, Human
cauauuuuaguugcugaacagc

SEQ ID NO: 143665 - RNA, 19 nt, Human
ccagcagacacagcugccc

SEQ ID NO: 143666 - RNA, 22 nt, Human
acuuguuucaacuguacucucc

SEQ ID NO: 143667 - RNA, 22 nt, Human
cagggguguuuuuggccaggag

SEQ ID NO: 143668 - RNA, 22 nt, Human
gguggcagcgucuaucugacau

SEQ ID NO: 143669 - RNA, 23 nt, Human
cuccucguaacucuguggugggu

SEQ ID NO: 143670 - RNA, 22 nt, Human
cagaccagcucuaugaacccaa

SEQ ID NO: 143671 - RNA, 22 nt, Human
gaagagcugcaguuuccugggc

SEQ ID NO: 143672 - RNA, 22 nt, Human
ggcugcuggaagacugaacaag

SEQ ID NO: 143673 - RNA, 22 nt, Human
ccuuccaggagucucugcaggu

SEQ ID NO: 143674 - RNA, 22 nt, Human
ggcuggcuugccaagcucaggg

SEQ ID NO: 143675 - RNA, 22 nt, Human
gggauggacuuggggacuccag

SEQ ID NO: 143676 - RNA, 22 nt, Human
aguauauuuaccauuggguggg

SEQ ID NO: 143677 - RNA, 23 nt, Human
ggccauggagacuuagaaugggc

SEQ ID NO: 143678 - RNA, 22 nt, Human
uucuucaaugugcccuguuuuc

SEQ ID NO: 143679 - RNA, 22 nt, Human
cugaaauuccauuucagccaca

SEQ ID NO: 143680 - RNA, 22 nt, Human
auccaaagcccuaaguuaacug

SEQ ID NO: 143681 - RNA, 22 nt, Human
gaauuguagagggaacagaagc

SEQ ID NO: 143682 - RNA, 22 nt, Human
ccugggugaaaucucuccugca

SEQ ID NO: 143683 - RNA, 22 nt, Human
agauaacuuuuggguauucaug

SEQ ID NO: 143684 - RNA, 22 nt, Human
agaauuguaagcaauuugauua

SEQ ID NO: 143685 - RNA, 20 nt, Human
ucuggcucuuugcuccuccc

SEQ ID NO: 143686 - RNA, 22 nt, Human
uacuguauacuacugcuguucu

SEQ ID NO: 143687 - RNA, 22 nt, Human
uugcagcuuagugauguuaucu

SEQ ID NO: 143688 - RNA, 22 nt, Human
agcugucuaccugcagaguccu

SEQ ID NO: 143689 - RNA, 22 nt, Human
uuguccuuaccucaaucuggaa

SEQ ID NO: 143690 - RNA, 22 nt, Human
acucacauuucaucaggccaag

SEQ ID NO: 143691 - RNA, 22 nt, Human
acuuucuuauccaugaucucac

SEQ ID NO: 143692 - RNA, 22 nt, Human
agucuauuuccccuucucuuga

SEQ ID NO: 143693 - RNA, 22 nt, Human
gcucugcuguguuuguucagca

SEQ ID NO: 143694 - RNA, 21 nt, Human
agaugaggauacugaggccua

SEQ ID NO: 143695 - RNA, 18 nt, Human
uggagcaggaagccuggc

SEQ ID NO: 143696 - RNA, 22 nt, Human
gauuuccuugcauauugguaau

SEQ ID NO: 143697 - RNA, 22 nt, Human
cccucugcucaggugcauaggc

SEQ ID NO: 143698 - RNA, 19 nt, Human
agggaaggauucugucauu

SEQ ID NO: 143699 - RNA, 22 nt, Human
agaaaguucugugaguuguuca

SEQ ID NO: 143700 - RNA, 22 nt, Human
augagcuucccagacaggaugg

SEQ ID NO: 143701 - RNA, 22 nt, Human
gcucccagauuucagccuugug

SEQ ID NO: 143702 - RNA, 17 nt, Human
aggcauggucuggggug

SEQ ID NO: 143703 - RNA, 22 nt, Human
ggcuucagugacuggugcccuc

SEQ ID NO: 143704 - RNA, 20 nt, Human
ucuuugugucagauggacag

SEQ ID NO: 143705 - RNA, 21 nt, Human
gccucugcugucuuauuguga

SEQ ID NO: 143706 - RNA, 19 nt, Human
gagaggccugugcuugaag

SEQ ID NO: 143707 - RNA, 22 nt, Human
auccaguuuaugucauauucuu

SEQ ID NO: 143708 - RNA, 19 nt, Human
cagagcagugguuccugaa

SEQ ID NO: 143709 - RNA, 22 nt, Human
uaaguucaaugaacucaguucu

SEQ ID NO: 143710 - RNA, 22 nt, Human
uggaaagaaaguaaaggcguau

SEQ ID NO: 143711 - RNA, 22 nt, Human
ucagucucaucaacucuauucc

SEQ ID NO: 143712 - RNA, 22 nt, Human
cagggccagagagggcuggcug

SEQ ID NO: 143713 - RNA, 22 nt, Human
aagcagcacgcuuugccaacaa

SEQ ID NO: 143714 - RNA, 21 nt, Human
ugaagccugaggcauagcccc

SEQ ID NO: 143715 - RNA, 22 nt, Human
agucccagcccaguccuguaag

SEQ ID NO: 143716 - RNA, 21 nt, Human
uuugaaagugggugauucuuu

SEQ ID NO: 143717 - RNA, 22 nt, Human
acagaacuuccugcuggagugg

SEQ ID NO: 143718 - RNA, 22 nt, Human
aggggugaaagagggcccucaa

SEQ ID NO: 143719 - RNA, 22 nt, Human
gcugugugcucacguaguggaa

SEQ ID NO: 143720 - RNA, 22 nt, Human
ccugucagaugaaguaauugug

SEQ ID NO: 143721 - RNA, 22 nt, Human
guucuucagucacaucacagaa

SEQ ID NO: 143722 - RNA, 22 nt, Human
ugaggugaagaguggagcucag

SEQ ID NO: 143723 - RNA, 22 nt, Human
uuuuucucuaaguagucccaaa

SEQ ID NO: 143724 - RNA, 20 nt, Human
uucauucauuccacaacuuc

SEQ ID NO: 143725 - RNA, 22 nt, Human
gggugggccacugagcagcgug

SEQ ID NO: 143726 - RNA, 22 nt, Human
acuaaggaauaugacaaacuca

SEQ ID NO: 143727 - RNA, 22 nt, Human
uugaaauaucaaguuauuagug

SEQ ID NO: 143728 - RNA, 22 nt, Human
aggaggcugguucaggccauau

SEQ ID NO: 143729 - RNA, 22 nt, Human
gcuguggccaacaaaccacuuu

SEQ ID NO: 143730 - RNA, 22 nt, Human
cuccaugaauuugagcuuugug

SEQ ID NO: 143731 - RNA, 22 nt, Human
acaaagucuuuuacaacaguca

SEQ ID NO: 143732 - RNA, 22 nt, Human
gcucugugcaguucagggacac

SEQ ID NO: 143733 - RNA, 22 nt, Human
uuauuucauguaaaauuuaugu

SEQ ID NO: 143734 - RNA, 22 nt, Human
ugguccuggggaucugcaguga

SEQ ID NO: 143735 - RNA, 23 nt, Human
uugucugugcuuuuccaguugcu

SEQ ID NO: 143736 - RNA, 22 nt, Human
agagcugcaggguggacccagg

SEQ ID NO: 143737 - RNA, 22 nt, Human
ccuccuggcccugggccuggaa

SEQ ID NO: 143738 - RNA, 22 nt, Human
ugugugugacaaccuaguucag

SEQ ID NO: 143739 - RNA, 22 nt, Human
cuggagcugcuguccuugggug

SEQ ID NO: 143740 - RNA, 21 nt, Human
ucccagggccaggugccauca

SEQ ID NO: 143741 - RNA, 22 nt, Human
ggagcugugcagugacuacaga

SEQ ID NO: 143742 - RNA, 22 nt, Human
aauauguucaaaauagaucacu

SEQ ID NO: 143743 - RNA, 22 nt, Human
aaagcaaugaugguagacacgu

SEQ ID NO: 143744 - RNA, 22 nt, Human
acagccugagaguggagcuggc

SEQ ID NO: 143745 - RNA, 22 nt, Human
gaggaggcuaagugggcucugg

SEQ ID NO: 143746 - RNA, 22 nt, Human
gagggucccugcucagggccag

SEQ ID NO: 143747 - RNA, 22 nt, Human
uguauaugugcacaugugcuuc

SEQ ID NO: 143748 - RNA, 22 nt, Human
auguucuguuuuguaauucaua

SEQ ID NO: 143749 - RNA, 22 nt, Human
cucccagggccaucgagucacu

SEQ ID NO: 143750 - RNA, 22 nt, Human
aggcacugaauauccaguaaaa

SEQ ID NO: 143751 - RNA, 22 nt, Human
caggguggggcuggcuaucaaa

SEQ ID NO: 143752 - RNA, 22 nt, Human
aggcucauucuugccucugagc

SEQ ID NO: 143753 - RNA, 22 nt, Human
acagggccaggugagaggugcu

SEQ ID NO: 143754 - RNA, 22 nt, Human
uuacaguuuaguccaagccaga

SEQ ID NO: 143755 - RNA, 21 nt, Human
uucuccccagcgaauccucgg

SEQ ID NO: 143756 - RNA, 22 nt, Human
ugaugaauaaacuugagaguca

SEQ ID NO: 143757 - RNA, 22 nt, Human
ucauuucccuccuacaaagagg

SEQ ID NO: 143758 - RNA, 18 nt, Human
cucuguguuggugugaag

SEQ ID NO: 143759 - RNA, 22 nt, Human
uauaagaaacaaggcaaauuuu

SEQ ID NO: 143760 - RNA, 20 nt, Human
ccucucugaagaggucaucu

SEQ ID NO: 143761 - RNA, 22 nt, Human
guucuucagaggggaaagaacc

SEQ ID NO: 143762 - RNA, 22 nt, Human
caucagcaggcaacacucuugg

SEQ ID NO: 143763 - RNA, 22 nt, Human
ggcccaaggcccaggucgagcu

SEQ ID NO: 143764 - RNA, 22 nt, Human
ugaagcaguuacuggguguuaa

SEQ ID NO: 143765 - RNA, 22 nt, Human
gcucucuuuuuccagugguggu

SEQ ID NO: 143766 - RNA, 22 nt, Human
gcuggcuguguuccuucugcca

SEQ ID NO: 143767 - RNA, 22 nt, Human
ugggagaagcagcagccaagug

SEQ ID NO: 143768 - RNA, 22 nt, Human
uguaugcuuguguauaauauaa

SEQ ID NO: 143769 - RNA, 22 nt, Human
caguauaaugcccccugugggg

SEQ ID NO: 143770 - RNA, 22 nt, Human
uggcugagaaugggaugaugcc

SEQ ID NO: 143771 - RNA, 19 nt, Human
gccugcagaaaaggcaggg

SEQ ID NO: 143772 - RNA, 17 nt, Human
ggcuggagcagcucccc

SEQ ID NO: 143773 - RNA, 22 nt, Human
caguacuuaacuuauaggagag

SEQ ID NO: 143774 - RNA, 22 nt, Human
ugaaacagucuccagacuugga

SEQ ID NO: 143775 - RNA, 22 nt, Human
accugggagucacaccugagaa

SEQ ID NO: 143776 - RNA, 22 nt, Human
cccaggcagggacgugcucugg

SEQ ID NO: 143777 - RNA, 19 nt, Human
uggcuguggggaaaugcuu

SEQ ID NO: 143778 - RNA, 22 nt, Human
ugggcagacgcuguuggaaggc

SEQ ID NO: 143779 - RNA, 22 nt, Human
aucuuuuuacuaacacugcuua

SEQ ID NO: 143780 - RNA, 22 nt, Human
ugcaccugagaggucucugagg

SEQ ID NO: 143781 - RNA, 22 nt, Human
uuacaguagauacaaugaguaa

SEQ ID NO: 143782 - RNA, 22 nt, Human
cugaagaggacgcagcagcaag

SEQ ID NO: 143783 - RNA, 22 nt, Human
aggaguguggccagggcucugg

SEQ ID NO: 143784 - RNA, 22 nt, Human
cccaggccccagggcuugucag

SEQ ID NO: 143785 - RNA, 22 nt, Human
aagccagguguuuaggccagcg

SEQ ID NO: 143786 - RNA, 22 nt, Human
ugccacacauugucagguuagu

SEQ ID NO: 143787 - RNA, 17 nt, Human
aggccucccuccaggcc

SEQ ID NO: 143788 - RNA, 22 nt, Human
gcuggcaggguucucacugaaa

SEQ ID NO: 143789 - RNA, 22 nt, Human
aagcugccuuccaugugaggaa

SEQ ID NO: 143790 - RNA, 23 nt, Human
ucuauuacuuauuguacucugga

SEQ ID NO: 143791 - RNA, 22 nt, Human
agcuguguaggaucauaacacg

SEQ ID NO: 143792 - RNA, 23 nt, Human
cagggcugguagggaagagcgug

SEQ ID NO: 143793 - RNA, 22 nt, Human
acuuuacaagcuuauagccuag

SEQ ID NO: 143794 - RNA, 22 nt, Human
caucaaauggcaagugaaagcu

SEQ ID NO: 143795 - RNA, 19 nt, Human
auuugaaagcugugcuugc

SEQ ID NO: 143796 - RNA, 22 nt, Human
uuuuuaucuuguaugugucucu

SEQ ID NO: 143797 - RNA, 19 nt, Human
uggcuccugccugccuucu

SEQ ID NO: 143798 - RNA, 22 nt, Human
aucaggauagucuguaaauugu

SEQ ID NO: 143799 - RNA, 22 nt, Human
uuagaaacccagacucuuaggu

SEQ ID NO: 143800 - RNA, 22 nt, Human
uuugugugcuugguauugaaga

SEQ ID NO: 143801 - RNA, 22 nt, Human
gcugucgugugcaagugacaga

SEQ ID NO: 143802 - RNA, 22 nt, Human
ugugaggagaggcccagcuccc

SEQ ID NO: 143803 - RNA, 19 nt, Human
uucucuauuaugucuucuc

SEQ ID NO: 143804 - RNA, 22 nt, Human
ugcagaagcugcaggucagugg

SEQ ID NO: 143805 - RNA, 22 nt, Human
cagaugaggcaaccucauugcu

SEQ ID NO: 143806 - RNA, 22 nt, Human
ugggaugggaucucgcuguguc

SEQ ID NO: 143807 - RNA, 22 nt, Human
agcagccauuuaaaaugaauug

SEQ ID NO: 143808 - RNA, 22 nt, Human
uggcccugcugggucagagcug

SEQ ID NO: 143809 - RNA, 22 nt, Human
uauguucugacucuacauggga

SEQ ID NO: 143810 - RNA, 22 nt, Human
aagcgccaugguuccugcgcag

SEQ ID NO: 143811 - RNA, 22 nt, Human
cuuccugaacaaugccaucaau

SEQ ID NO: 143812 - RNA, 22 nt, Human
cccugccucugaagcugcucag

SEQ ID NO: 143813 - RNA, 22 nt, Human
uuacaguauuguuaaacucuuu

SEQ ID NO: 143814 - RNA, 20 nt, Human
augugucugccucuguguuc

SEQ ID NO: 143815 - RNA, 17 nt, Human
ucucuuucccuuucugc

SEQ ID NO: 143816 - RNA, 22 nt, Human
agggcagaaaccaccuugaugg

SEQ ID NO: 143817 - RNA, 22 nt, Human
gucacuggggccacaugcagaa

SEQ ID NO: 143818 - RNA, 22 nt, Human
cuaaaugcccuacaaugacugg

SEQ ID NO: 143819 - RNA, 22 nt, Human
ggccucugguucguggugaccu

SEQ ID NO: 143820 - RNA, 22 nt, Human
ugcaaucucggcacuuugggag

SEQ ID NO: 143821 - RNA, 22 nt, Human
gcaguauauacucuuugagggg

SEQ ID NO: 143822 - RNA, 22 nt, Human
ucacuuuuugauaucauucugc

SEQ ID NO: 143823 - RNA, 22 nt, Human
aggccucuucagggagcaugga

SEQ ID NO: 143824 - RNA, 22 nt, Human
ccugggucuugguucaugcucu

SEQ ID NO: 143825 - RNA, 22 nt, Human
cuggagagggagcccuggcagu

SEQ ID NO: 143826 - RNA, 22 nt, Human
gcuuuuucaaaugaaagcuggu

SEQ ID NO: 143827 - RNA, 22 nt, Human
gcucaagagagaugcaguucuu

SEQ ID NO: 143828 - RNA, 22 nt, Human
gggcugugaggugagaacuuac

SEQ ID NO: 143829 - RNA, 22 nt, Human
gcuguguuugacaguagcagac

SEQ ID NO: 143830 - RNA, 20 nt, Human
ccuguguggccagcugaggc

SEQ ID NO: 143831 - RNA, 22 nt, Human
cauagcaacagcaucaagucaa

SEQ ID NO: 143832 - RNA, 22 nt, Human
cccagcauuucugggcugcacu

SEQ ID NO: 143833 - RNA, 19 nt, Human
gcauaaaaugucaaugugu

SEQ ID NO: 143834 - RNA, 22 nt, Human
gcugucugcaucucuagagcuu

SEQ ID NO: 143835 - RNA, 22 nt, Human
uuucaaaauuuugcagugguaa

SEQ ID NO: 143836 - RNA, 22 nt, Human
uuugugaaaugaagucacaacu

SEQ ID NO: 143837 - RNA, 22 nt, Human
ugaaacauuugaugaucuuugg

SEQ ID NO: 143838 - RNA, 22 nt, Human
cucuguuuuucaauaguucuug

SEQ ID NO: 143839 - RNA, 22 nt, Human
uucuagaugauaaaccagcagc

SEQ ID NO: 143840 - RNA, 18 nt, Human
ugcuggcaacuacuauug

SEQ ID NO: 143841 - RNA, 22 nt, Human
uggcagagaauaaaucuugacu

SEQ ID NO: 143842 - RNA, 22 nt, Human
cugucacacugauaucaggcuu

SEQ ID NO: 143843 - RNA, 22 nt, Human
uucccaugccuggccccuaucc

SEQ ID NO: 143844 - RNA, 23 nt, Human
cuggcucuguagguggcauccuu

SEQ ID NO: 143845 - RNA, 23 nt, Human
cauguguaauuucugguugggug

SEQ ID NO: 143846 - RNA, 22 nt, Human
gugcucuggcuggucucccggu

SEQ ID NO: 143847 - RNA, 22 nt, Human
uccuucagauuccugcuucugg

SEQ ID NO: 143848 - RNA, 22 nt, Human
gagcucuggcagggcaggucug

SEQ ID NO: 143849 - RNA, 22 nt, Human
ugucucaggcccaagccaguaa

SEQ ID NO: 143850 - RNA, 21 nt, Human
gcucagaguauugcacuguuu

SEQ ID NO: 143851 - RNA, 22 nt, Human
uaacagaauccuguuauugcca

SEQ ID NO: 143852 - RNA, 22 nt, Human
ggcccacuugaaauggagcuca

SEQ ID NO: 143853 - RNA, 22 nt, Human
cagagcaggcccacugcccucc

SEQ ID NO: 143854 - RNA, 20 nt, Human
aggcagacaaggagucuguu

SEQ ID NO: 143855 - RNA, 22 nt, Human
ggcucuggugaggguaggagau

SEQ ID NO: 143856 - RNA, 22 nt, Human
acaggcugccuaccaaguauca

SEQ ID NO: 143857 - RNA, 22 nt, Human
uaugugaauacagcaguggaug

SEQ ID NO: 143858 - RNA, 22 nt, Human
guguaugcaauugagucauaga

SEQ ID NO: 143859 - RNA, 22 nt, Human
uggcuguguuaccacuucaugu

SEQ ID NO: 143860 - RNA, 22 nt, Human
guguuuccucuagaagccaugg

SEQ ID NO: 143861 - RNA, 19 nt, Human
uguuuuguuaaagcagucc

SEQ ID NO: 143862 - RNA, 22 nt, Human
ucucagucuuugcaaggaugcu

SEQ ID NO: 143863 - RNA, 22 nt, Human
cuggcugcuggccugaggaugc

SEQ ID NO: 143864 - RNA, 22 nt, Human
cugggagucaccaggagcaagg

SEQ ID NO: 143865 - RNA, 22 nt, Human
uuucaaaccuacuuguauguuu

SEQ ID NO: 143866 - RNA, 22 nt, Human
ucugagagcuguagaagccuau

SEQ ID NO: 143867 - RNA, 22 nt, Human
cuaggaggcgggggcugcagua

SEQ ID NO: 143868 - RNA, 22 nt, Human
ucugggugcccuuugcucuguu

SEQ ID NO: 143869 - RNA, 22 nt, Human
uguggccuggaaggggcugcuc

SEQ ID NO: 143870 - RNA, 22 nt, Human
ugaaaaggguagaucccuaagu

SEQ ID NO: 143871 - RNA, 22 nt, Human
acagugaugagggaauuuugug

SEQ ID NO: 143872 - RNA, 22 nt, Human
cugccacuuacuaggcauggug

SEQ ID NO: 143873 - RNA, 22 nt, Human
gaggacagcuuagggcuuccug

SEQ ID NO: 143874 - RNA, 22 nt, Human
uguguauguguauacacuauau

SEQ ID NO: 143875 - RNA, 22 nt, Human
ucagagguaagggcugagagga

SEQ ID NO: 143876 - RNA, 22 nt, Human
cccuggagggauuucucaauca

SEQ ID NO: 143877 - RNA, 22 nt, Human
aucuacaggauuuuacagaguu

SEQ ID NO: 143878 - RNA, 22 nt, Human
auagcuguuagauuggggucga

SEQ ID NO: 143879 - RNA, 22 nt, Human
uauuuugacgauuuuaugcaaa

SEQ ID NO: 143880 - RNA, 22 nt, Human
gccucugcccauccaccaucag

SEQ ID NO: 143881 - RNA, 22 nt, Human
uuucacuagaacguucuuguuu

SEQ ID NO: 143882 - RNA, 22 nt, Human
cuagccugggauuugaacuuau

SEQ ID NO: 143883 - RNA, 22 nt, Human
gauauuuucagucuccuuucaa

SEQ ID NO: 143884 - RNA, 22 nt, Human
gcagggaccugccacugcuguc

SEQ ID NO: 143885 - RNA, 22 nt, Human
uugaaagugccaaguccuagug

SEQ ID NO: 143886 - RNA, 22 nt, Human
ccuggcagcuccuccccggcgg

SEQ ID NO: 143887 - RNA, 22 nt, Human
ugugaugucagugguaucaaag

SEQ ID NO: 143888 - RNA, 22 nt, Human
uggcuuccaaaggaaugggccu

SEQ ID NO: 143889 - RNA, 22 nt, Human
ucuccucugcgcggcagugccc

SEQ ID NO: 143890 - RNA, 22 nt, Human
ccugagacaugaaccaggcucc

SEQ ID NO: 143891 - RNA, 22 nt, Human
aggguggagggagucccugagc

SEQ ID NO: 143892 - RNA, 22 nt, Human
caugcuuugggucagaaaugcc

SEQ ID NO: 143893 - RNA, 22 nt, Human
gcugccagcucacucuccugag

SEQ ID NO: 143894 - RNA, 22 nt, Human
ggcugcuggcauugagguaggu

SEQ ID NO: 143895 - RNA, 22 nt, Human
aggcacuguacuagguacaggg

SEQ ID NO: 143896 - RNA, 22 nt, Human
gucugcugcagagcauggcuuu

SEQ ID NO: 143897 - RNA, 22 nt, Human
ggccaggagcaagccaggcucu

SEQ ID NO: 143898 - RNA, 21 nt, Human
uucugggaaaugagcuggggc

SEQ ID NO: 143899 - RNA, 22 nt, Human
ggcccaucucuugcucuggguu

SEQ ID NO: 143900 - RNA, 22 nt, Human
agcuccuccugugccaggccag

SEQ ID NO: 143901 - RNA, 22 nt, Human
cuuugcaauagaggcacacaug

SEQ ID NO: 143902 - RNA, 22 nt, Human
aucaaaguccaucagaagguag

SEQ ID NO: 143903 - RNA, 22 nt, Human
uauguacacauacacuuguaau

SEQ ID NO: 143904 - RNA, 18 nt, Human
aggcuucccaggcaggcc

SEQ ID NO: 143905 - RNA, 22 nt, Human
aucuggcuuuuacugaauugcu

SEQ ID NO: 143906 - RNA, 22 nt, Human
caggcagccugagggaucuggg

SEQ ID NO: 143907 - RNA, 18 nt, Human
agaaggagcuaugggcag

SEQ ID NO: 143908 - RNA, 21 nt, Human
ggcagcccgcccucuccuggc

SEQ ID NO: 143909 - RNA, 22 nt, Human
auuuuuccaugauacuuaucug

SEQ ID NO: 143910 - RNA, 20 nt, Human
aauaaaagaagccuucaccc

SEQ ID NO: 143911 - RNA, 22 nt, Human
cucucuuugauguauaaauaau

SEQ ID NO: 143912 - RNA, 22 nt, Human
cuggcaggaaguuagaugguaa

SEQ ID NO: 143913 - RNA, 22 nt, Human
gccugucucuuggaacuuggua

SEQ ID NO: 143914 - RNA, 23 nt, Human
ugagcugguauuguccaucucca

SEQ ID NO: 143915 - RNA, 22 nt, Human
gguggcuggaggagcugaugga

SEQ ID NO: 143916 - RNA, 22 nt, Human
uggcucuguugugcugagccag

SEQ ID NO: 143917 - RNA, 22 nt, Human
gcaaaugcucuccuuggucagg

SEQ ID NO: 143918 - RNA, 22 nt, Human
ccaaaugugccuguuucaacaa

SEQ ID NO: 143919 - RNA, 22 nt, Human
cuuggcagagggcugggcucag

SEQ ID NO: 143920 - RNA, 22 nt, Human
acugcaucugaaacauggguca

SEQ ID NO: 143921 - RNA, 22 nt, Human
cuguauguuucuaugaauguga

SEQ ID NO: 143922 - RNA, 22 nt, Human
ccuuucucuuugcugaucaugu

SEQ ID NO: 143923 - RNA, 22 nt, Human
aggccaaguagcuagcauugaa

SEQ ID NO: 143924 - RNA, 22 nt, Human
ucuuaaaaguaugccaauugga

SEQ ID NO: 143925 - RNA, 23 nt, Human
aacaauagguuuuggcagaauag

SEQ ID NO: 143926 - RNA, 22 nt, Human
ucaguuuugauuccugguucuc

SEQ ID NO: 143927 - RNA, 22 nt, Human
uauugacaauuugugaaacuau

SEQ ID NO: 143928 - RNA, 22 nt, Human
accccaagacaguagaagagaa

SEQ ID NO: 143929 - RNA, 22 nt, Human
uucucuguaguugccuggugga

SEQ ID NO: 143930 - RNA, 23 nt, Human
cuggggcuuucaaaucugggcag

SEQ ID NO: 143931 - RNA, 21 nt, Human
caugaagccgguucccuguuu

SEQ ID NO: 143932 - RNA, 21 nt, Human
aagagcugucaggaaggcugc

SEQ ID NO: 143933 - RNA, 22 nt, Human
acucugccccgaguucugggaa

SEQ ID NO: 143934 - RNA, 22 nt, Human
gugccuggcacacagaaggcaa

SEQ ID NO: 143935 - RNA, 22 nt, Human
auggggcucugcggcugcuccc

SEQ ID NO: 143936 - RNA, 18 nt, Human
uggcucuggacuugcucc

SEQ ID NO: 143937 - RNA, 22 nt, Human
cagagcaguccuugucaaucag

SEQ ID NO: 143938 - RNA, 22 nt, Human
gcagagccagaauggccaggac

SEQ ID NO: 143939 - RNA, 22 nt, Human
acagugauuucauccuucuggg

SEQ ID NO: 143940 - RNA, 22 nt, Human
uuccuguaugucagugaagagc

SEQ ID NO: 143941 - RNA, 22 nt, Human
gagagcugcaagguagggcggg

SEQ ID NO: 143942 - RNA, 22 nt, Human
ccagagacgucggucagggcgc

SEQ ID NO: 143943 - RNA, 22 nt, Human
ucuuuacaaucuaagcauaguu

SEQ ID NO: 143944 - RNA, 22 nt, Human
acagguggaggcuuuaggaggu

SEQ ID NO: 143945 - RNA, 22 nt, Human
agucauauauuuuguuugugca

SEQ ID NO: 143946 - RNA, 22 nt, Human
cugggccucaaucucagaguuu

SEQ ID NO: 143947 - RNA, 22 nt, Human
cugugucugaauaacucugugu

SEQ ID NO: 143948 - RNA, 22 nt, Human
auauuuuggcaaaugucuagau

SEQ ID NO: 143949 - RNA, 22 nt, Human
gaaguacaguuuuaucuagcca

SEQ ID NO: 143950 - RNA, 22 nt, Human
ugcagaaguauuccaggcccca

SEQ ID NO: 143951 - RNA, 22 nt, Human
ucagggcauggcugcacuuggc

SEQ ID NO: 143952 - RNA, 22 nt, Human
cagcacuggggggauucggagc

SEQ ID NO: 143953 - RNA, 22 nt, Human
caggcagauuugcugcccucca

SEQ ID NO: 143954 - RNA, 22 nt, Human
uuuucauuguaaaucaggaaac

SEQ ID NO: 143955 - RNA, 22 nt, Human
gcuucauuacugacagucugug

SEQ ID NO: 143956 - RNA, 22 nt, Human
cugccugcuucugagccagagg

SEQ ID NO: 143957 - RNA, 22 nt, Human
aagcagccucauuugugguaag

SEQ ID NO: 143958 - RNA, 22 nt, Human
ccuuuuauauggcucaucacag

SEQ ID NO: 143959 - RNA, 22 nt, Human
gagcugccugaacaagcagcag

SEQ ID NO: 143960 - RNA, 22 nt, Human
caugcacuuaccugaaauucaa

SEQ ID NO: 143961 - RNA, 22 nt, Human
uuuaacucugucauucucuuua

SEQ ID NO: 143962 - RNA, 22 nt, Human
agcagcaggcuguguggacuga

SEQ ID NO: 143963 - RNA, 22 nt, Human
auucuucagaauaucuggcacu

SEQ ID NO: 143964 - RNA, 22 nt, Human
aguauauugguguuauuccuca

SEQ ID NO: 143965 - RNA, 22 nt, Human
ucuuugcaugcauuuucccuua

SEQ ID NO: 143966 - RNA, 22 nt, Human
ucaagagauugaauaauaacug

SEQ ID NO: 143967 - RNA, 22 nt, Human
gguggguauaguuagggccucu

SEQ ID NO: 143968 - RNA, 22 nt, Human
aggcugggcaccguuuugaucc

SEQ ID NO: 143969 - RNA, 22 nt, Human
uguguguauaugcauuuaucua

SEQ ID NO: 143970 - RNA, 22 nt, Human
uuccaagagcuuuaauuguuga

SEQ ID NO: 143971 - RNA, 22 nt, Human
auucaguaggucuagaauaaga

SEQ ID NO: 143972 - RNA, 22 nt, Human
ugggauaguggccaggaccccc

SEQ ID NO: 143973 - RNA, 22 nt, Human
uuugcauugcauuaaguauucu

SEQ ID NO: 143974 - RNA, 22 nt, Human
cugucucucuaggacacugggg

SEQ ID NO: 143975 - RNA, 22 nt, Human
gccuuggcugaugugcgaauga

SEQ ID NO: 143976 - RNA, 22 nt, Human
gcuggugcauuagcugcaguuc

SEQ ID NO: 143977 - RNA, 22 nt, Human
gagggucccgagcccugucaga

SEQ ID NO: 143978 - RNA, 22 nt, Human
gggcugcacguauucugcucac

SEQ ID NO: 143979 - RNA, 22 nt, Human
aaggagugcaugacucagagua

SEQ ID NO: 143980 - RNA, 19 nt, Human
gguaaaagugagcuucagg

SEQ ID NO: 143981 - RNA, 22 nt, Human
guguggcuaccucagaggagca

SEQ ID NO: 143982 - RNA, 22 nt, Human
aaaagguagauucuccuucuau

SEQ ID NO: 143983 - RNA, 22 nt, Human
ccccagcucagugcagggacau

SEQ ID NO: 143984 - RNA, 19 nt, Human
agcaccugugagagccugg

SEQ ID NO: 143985 - RNA, 22 nt, Human
uccucuggcccagcugccucug

SEQ ID NO: 143986 - RNA, 22 nt, Human
agaacuuaggaacaacagcuua

SEQ ID NO: 143987 - RNA, 22 nt, Human
auuuuacuuugugaauauugac

SEQ ID NO: 143988 - RNA, 22 nt, Human
caguacuuggucaaggaagcag

SEQ ID NO: 143989 - RNA, 22 nt, Human
gagagguccauuccccugucag

SEQ ID NO: 143990 - RNA, 22 nt, Human
uccucugcuggaagggcaagag

SEQ ID NO: 143991 - RNA, 22 nt, Human
uggccugggccugccggugcaa

SEQ ID NO: 143992 - RNA, 22 nt, Human
ucucucuaggcaucuauuuuca

SEQ ID NO: 143993 - RNA, 22 nt, Human
gcuuuacauguuucccuuuaag

SEQ ID NO: 143994 - RNA, 22 nt, Human
agcagugggggaguguuaguuu

SEQ ID NO: 143995 - RNA, 22 nt, Human
cugggggcaagcagacagcugu

SEQ ID NO: 143996 - RNA, 22 nt, Human
ccagcccucacugaggccucuc

SEQ ID NO: 143997 - RNA, 22 nt, Human
uuaaagggccgauuuccaggcc

SEQ ID NO: 143998 - RNA, 22 nt, Human
gagcuuugcuggaagccugggg

SEQ ID NO: 143999 - RNA, 22 nt, Human
cuucccuuggugaacagagcau

SEQ ID NO: 144000 - RNA, 22 nt, Human
aucauucuagcuguuguguuga

SEQ ID NO: 144001 - RNA, 22 nt, Human
aaaucaguuaagaugaggccau

SEQ ID NO: 144002 - RNA, 22 nt, Human
acauguggucaaucuguguagg

SEQ ID NO: 144003 - RNA, 22 nt, Human
gcagcuuggauuucuguaguuu

SEQ ID NO: 144004 - RNA, 15 nt, Human
cagucccagggaccc

SEQ ID NO: 144005 - RNA, 22 nt, Human
uuauacagcauugcuagugaug

SEQ ID NO: 144006 - RNA, 22 nt, Human
guuuuuauauccuguggagugu

SEQ ID NO: 144007 - RNA, 22 nt, Human
acuauacauugaauguuaaggu

SEQ ID NO: 144008 - RNA, 20 nt, Human
aggcacuggauuucuuauau

SEQ ID NO: 144009 - RNA, 22 nt, Human
ucagaggacgcacuaggguugu

SEQ ID NO: 144010 - RNA, 22 nt, Human
uguauguaaaggucuucauguu

SEQ ID NO: 144011 - RNA, 20 nt, Human
ugaaaaggucaggagacaug

SEQ ID NO: 144012 - RNA, 22 nt, Human
acagaauauuuggcaugcgucu

SEQ ID NO: 144013 - RNA, 20 nt, Human
ccagagcagccacugaaguu

SEQ ID NO: 144014 - RNA, 19 nt, Human
cugucaggggcuggauguu

SEQ ID NO: 144015 - RNA, 22 nt, Human
ccaggccuuccaguacgcagaa

SEQ ID NO: 144016 - RNA, 22 nt, Human
cagaggccaccuguggccacug

SEQ ID NO: 144017 - RNA, 22 nt, Human
ggaugcaggaguugaagaagga

SEQ ID NO: 144018 - RNA, 22 nt, Human
ugcuucucccaaccagggccug

SEQ ID NO: 144019 - RNA, 22 nt, Human
ggccuucacgugaccuggcgug

SEQ ID NO: 144020 - RNA, 22 nt, Human
uacauguaguucacugguggca

SEQ ID NO: 144021 - RNA, 22 nt, Human
cugugucccaguaccuugggua

SEQ ID NO: 144022 - RNA, 20 nt, Human
cccucugcuacacugggagc

SEQ ID NO: 144023 - RNA, 22 nt, Human
ucacacguccuugcuacuccuc

SEQ ID NO: 144024 - RNA, 22 nt, Human
uuucaaauagaaucuuuccaaa

SEQ ID NO: 144025 - RNA, 22 nt, Human
ggcugggcucgcugauuggcug

SEQ ID NO: 144026 - RNA, 21 nt, Human
uguuacaguccaaauguuugu

SEQ ID NO: 144027 - RNA, 22 nt, Human
uucaguuucagucuugcaaaaa

SEQ ID NO: 144028 - RNA, 23 nt, Human
aaucuggcugauguuuuuucucu

SEQ ID NO: 144029 - RNA, 22 nt, Human
gacaguauccagguggugaaga

SEQ ID NO: 144030 - RNA, 22 nt, Human
aaaguucaugguguuauagaaa

SEQ ID NO: 144031 - RNA, 22 nt, Human
cuguaugugaaaaugucaagug

SEQ ID NO: 144032 - RNA, 22 nt, Human
aacaguaucuacgggaacuauu

SEQ ID NO: 144033 - RNA, 22 nt, Human
ucucagagagcuguguuuuccu

SEQ ID NO: 144034 - RNA, 22 nt, Human
cugcugggcuccucaugugacu

SEQ ID NO: 144035 - RNA, 22 nt, Human
uucuuucagaacacaagugauu

SEQ ID NO: 144036 - RNA, 22 nt, Human
cagcucuguaaauuccuucauc

SEQ ID NO: 144037 - RNA, 22 nt, Human
aucccaugagaccacguuggcu

SEQ ID NO: 144038 - RNA, 22 nt, Human
aaguguagauuauggagugucu

SEQ ID NO: 144039 - RNA, 22 nt, Human
guguguggaaaguuuuccaugg

SEQ ID NO: 144040 - RNA, 22 nt, Human
gaggaaccaaucugugauauuc

SEQ ID NO: 144041 - RNA, 22 nt, Human
agggaaagguagugaggucaca

SEQ ID NO: 144042 - RNA, 22 nt, Human
aguuauuacucuuuaacauauu

SEQ ID NO: 144043 - RNA, 22 nt, Human
gcacccagaggucagcagugcu

SEQ ID NO: 144044 - RNA, 22 nt, Human
gugucccaauguucaggacggc

SEQ ID NO: 144045 - RNA, 22 nt, Human
uguggccaccagagcugcuauu

SEQ ID NO: 144046 - RNA, 22 nt, Human
accagagcuggcagaguaucaa

SEQ ID NO: 144047 - RNA, 22 nt, Human
gaggccuggucuaugagauguu

SEQ ID NO: 144048 - RNA, 22 nt, Human
aguauaaugaaaugugucagua

SEQ ID NO: 144049 - RNA, 22 nt, Human
cagggccauuggcguggcuguc

SEQ ID NO: 144050 - RNA, 22 nt, Human
ucucaagaucucaagauggccc

SEQ ID NO: 144051 - RNA, 22 nt, Human
gcugagucuugagcacugagca

SEQ ID NO: 144052 - RNA, 22 nt, Human
ggaggcugcugccucacguggg

SEQ ID NO: 144053 - RNA, 23 nt, Human
uugcauguagcccaugaguaacu

SEQ ID NO: 144054 - RNA, 22 nt, Human
agcagcauuuaaguuucuucua

SEQ ID NO: 144055 - RNA, 22 nt, Human
ucagaggguggcugggagcauc

SEQ ID NO: 144056 - RNA, 22 nt, Human
guguggcuagaagugucuuguu

SEQ ID NO: 144057 - RNA, 22 nt, Human
ccuuccaggugcaggcaagccu

SEQ ID NO: 144058 - RNA, 22 nt, Human
uguguacagcaggauuucucaa

SEQ ID NO: 144059 - RNA, 21 nt, Human
auccauccaucuuggccuaac

SEQ ID NO: 144060 - RNA, 22 nt, Human
uggguggcggccugguucugag

SEQ ID NO: 144061 - RNA, 22 nt, Human
gucaggauuauaauccccaugg

SEQ ID NO: 144062 - RNA, 22 nt, Human
acaaggaggucuggggggcccu

SEQ ID NO: 144063 - RNA, 22 nt, Human
gcuguauuccugcacuguauag

SEQ ID NO: 144064 - RNA, 22 nt, Human
gaagcccuauccucuccuggga

SEQ ID NO: 144065 - RNA, 22 nt, Human
gggugggccugucuggccaugu

SEQ ID NO: 144066 - RNA, 22 nt, Human
gggccaggucggugaaugguca

SEQ ID NO: 144067 - RNA, 22 nt, Human
gccaccagugggggccugggca

SEQ ID NO: 144068 - RNA, 22 nt, Human
ccugagggaggguauaggcugu

SEQ ID NO: 144069 - RNA, 22 nt, Human
aggcugcuuccuuacguggcug

SEQ ID NO: 144070 - RNA, 22 nt, Human
aguguguagcaauaugcuggca

SEQ ID NO: 144071 - RNA, 22 nt, Human
gcagacagcauguugggcuauu

SEQ ID NO: 144072 - RNA, 22 nt, Human
agagugaaguucaucgugcagc

SEQ ID NO: 144073 - RNA, 22 nt, Human
acaaagcuagagaagagaauug

SEQ ID NO: 144074 - RNA, 22 nt, Human
auaugcauaugucaaaacuuau

SEQ ID NO: 144075 - RNA, 22 nt, Human
ucagcagggccuccuugugcag

SEQ ID NO: 144076 - RNA, 22 nt, Human
ggcuccugauaggagaaugcgg

SEQ ID NO: 144077 - RNA, 22 nt, Human
gcaggaugagugaguacauuua

SEQ ID NO: 144078 - RNA, 22 nt, Human
ucccaggacaggccacauggaa

SEQ ID NO: 144079 - RNA, 22 nt, Human
caggcuggaguuaccuuuaggg

SEQ ID NO: 144080 - RNA, 22 nt, Human
cagaccuggaaaacaggcuugc

SEQ ID NO: 144081 - RNA, 22 nt, Human
agagcucaagacgcucacagua

SEQ ID NO: 144082 - RNA, 22 nt, Human
ccuccuggugggcgcuucuggc

SEQ ID NO: 144083 - RNA, 22 nt, Human
gugcugcucacaucuggaggua

SEQ ID NO: 144084 - RNA, 22 nt, Human
auacaguagggaccaugucuga

SEQ ID NO: 144085 - RNA, 22 nt, Human
agucaauucuuuucaacucaag

SEQ ID NO: 144086 - RNA, 23 nt, Human
gggagccaggaccucgcgcccca

SEQ ID NO: 144087 - RNA, 22 nt, Human
uccucccacauaggacaauggg

SEQ ID NO: 144088 - RNA, 20 nt, Human
gaggcucugggcauggcgcc

SEQ ID NO: 144089 - RNA, 22 nt, Human
gacagcaggagaucaugauaga

SEQ ID NO: 144090 - RNA, 22 nt, Human
caagagcugcaaauagcgugac

SEQ ID NO: 144091 - RNA, 22 nt, Human
cagagccuaaaacgacuccacu

SEQ ID NO: 144092 - RNA, 22 nt, Human
ccucacagggccaggccccuca

SEQ ID NO: 144093 - RNA, 22 nt, Human
ccagagccccugagcuucccug

SEQ ID NO: 144094 - RNA, 23 nt, Human
uggcucagcuaguuuuccauuuc

SEQ ID NO: 144095 - RNA, 22 nt, Human
gagcagcugcagugcagacccu

SEQ ID NO: 144096 - RNA, 22 nt, Human
gaaaauguuuguccggagcuga

SEQ ID NO: 144097 - RNA, 22 nt, Human
caucucuugccaaaguuugacc

SEQ ID NO: 144098 - RNA, 22 nt, Human
uucauuuuauaaacccugcuga

SEQ ID NO: 144099 - RNA, 22 nt, Human
agcagcaugaugacagagucuc

SEQ ID NO: 144100 - RNA, 19 nt, Human
ugccuggacaaaugugggg

SEQ ID NO: 144101 - RNA, 22 nt, Human
aggcccuguccauggugcugaa

SEQ ID NO: 144102 - RNA, 22 nt, Human
auguaucagauaaagcaugugg

SEQ ID NO: 144103 - RNA, 22 nt, Human
aguggcuguaggcuaugagaga

SEQ ID NO: 144104 - RNA, 22 nt, Human
uguguuugaguccucacagugc

SEQ ID NO: 144105 - RNA, 22 nt, Human
cuggaagguucuuugugugccu

SEQ ID NO: 144106 - RNA, 22 nt, Human
gaggagguuccggguggagaag

SEQ ID NO: 144107 - RNA, 22 nt, Human
ugaagcaggugaauggaugucg

SEQ ID NO: 144108 - RNA, 21 nt, Human
uggcucugcucagagcagucc

SEQ ID NO: 144109 - RNA, 22 nt, Human
ggagcagagcucuucaucugca

SEQ ID NO: 144110 - RNA, 22 nt, Human
gcaggagucacugacuuggucc

SEQ ID NO: 144111 - RNA, 22 nt, Human
cuuuacaaagcaauuuugucuc

SEQ ID NO: 144112 - RNA, 22 nt, Human
ugcccaaguguuuggcugaguc

SEQ ID NO: 144113 - RNA, 22 nt, Human
gggccccaaaaugccaggcucu

SEQ ID NO: 144114 - RNA, 22 nt, Human
caguuucuacgacuuaagcaca

SEQ ID NO: 144115 - RNA, 22 nt, Human
uuuccuaugauauucuaugugu

SEQ ID NO: 144116 - RNA, 22 nt, Human
cagugcauaaucuaaauggggg

SEQ ID NO: 144117 - RNA, 22 nt, Human
ugcaggcaggggaugagcagcc

SEQ ID NO: 144118 - RNA, 22 nt, Human
gugccaggugcuaagcugugcu

SEQ ID NO: 144119 - RNA, 22 nt, Human
uggcuguagaacaguggauauu

SEQ ID NO: 144120 - RNA, 20 nt, Human
agagaauucccuuuggagau

SEQ ID NO: 144121 - RNA, 22 nt, Human
ugccugugcccuuugcugggag

SEQ ID NO: 144122 - RNA, 21 nt, Human
gagacagcccagugccagggc

SEQ ID NO: 144123 - RNA, 22 nt, Human
uucugcuccaccacuuccagca

SEQ ID NO: 144124 - RNA, 22 nt, Human
gccuggugcuaugagggccagc

SEQ ID NO: 144125 - RNA, 22 nt, Human
aggcuggcccuacuggcugccu

SEQ ID NO: 144126 - RNA, 19 nt, Human
uggcagggagugauauuag

SEQ ID NO: 144127 - RNA, 18 nt, Human
ccucagggagagagacgc

SEQ ID NO: 144128 - RNA, 22 nt, Human
gggcuggagccagcuguggcug

SEQ ID NO: 144129 - RNA, 21 nt, Human
aaauacagaaacuuguuuuca

SEQ ID NO: 144130 - RNA, 22 nt, Human
cacagguggcuccaaguuagag

SEQ ID NO: 144131 - RNA, 22 nt, Human
cauuuguaguuaaaaaugucuc

SEQ ID NO: 144132 - RNA, 22 nt, Human
aacccuggggcagcugcuaggg

SEQ ID NO: 144133 - RNA, 22 nt, Human
guuaacuuucaggugcauguuu

SEQ ID NO: 144134 - RNA, 22 nt, Human
cuuuacuguucuucugugggaa

SEQ ID NO: 144135 - RNA, 22 nt, Human
auucuucuugagucuuggacuc

SEQ ID NO: 144136 - RNA, 22 nt, Human
ugcuggcuacugauggcaggcc

SEQ ID NO: 144137 - RNA, 22 nt, Human
cuccagggaugagacagaguag

SEQ ID NO: 144138 - RNA, 22 nt, Human
auuacagugccaccucgugguc

SEQ ID NO: 144139 - RNA, 22 nt, Human
ccagcugcagguguuccagaug

SEQ ID NO: 144140 - RNA, 22 nt, Human
aggagugcaaauaguccagaga

SEQ ID NO: 144141 - RNA, 22 nt, Human
gggugggaucuguggagccuca

SEQ ID NO: 144142 - RNA, 22 nt, Human
gugcauuucucauacacuaaau

SEQ ID NO: 144143 - RNA, 22 nt, Human
aggcugugggaauggcugcuug

SEQ ID NO: 144144 - RNA, 22 nt, Human
gaagcagcuuucuggugaggag

SEQ ID NO: 144145 - RNA, 21 nt, Human
gagugucuaauccaggcuguc

SEQ ID NO: 144146 - RNA, 22 nt, Human
ucccagagaaagucaaggucuu

SEQ ID NO: 144147 - RNA, 22 nt, Human
uauuuccagcaguaagaagaca

SEQ ID NO: 144148 - RNA, 22 nt, Human
cacugcuuuaaggcugaguaac

SEQ ID NO: 144149 - RNA, 22 nt, Human
uggcacugaccccaggccugug

SEQ ID NO: 144150 - RNA, 22 nt, Human
agagugaagguugacacuucac

SEQ ID NO: 144151 - RNA, 22 nt, Human
ggagaaggaagaaagcuacuau

SEQ ID NO: 144152 - RNA, 22 nt, Human
uuccugugaagccgguggucuc

SEQ ID NO: 144153 - RNA, 22 nt, Human
ggcucugcuucagaaggcucau

SEQ ID NO: 144154 - RNA, 22 nt, Human
ccagccaguccagcauuggugu

SEQ ID NO: 144155 - RNA, 22 nt, Human
agcagcauuccuggcuucuauc

SEQ ID NO: 144156 - RNA, 22 nt, Human
gggcuccaacggugagcaugga

SEQ ID NO: 144157 - RNA, 22 nt, Human
aagccagguguugugguaagag

SEQ ID NO: 144158 - RNA, 22 nt, Human
cuugcuuuguccagaaauucag

SEQ ID NO: 144159 - RNA, 21 nt, Human
cagaaguaaggguaacuucuc

SEQ ID NO: 144160 - RNA, 22 nt, Human
guacuuccagccaagugagaca

SEQ ID NO: 144161 - RNA, 22 nt, Human
aaggcaguaaaaucuaccuugc

SEQ ID NO: 144162 - RNA, 22 nt, Human
acagggcccuugccagcacaag

SEQ ID NO: 144163 - RNA, 22 nt, Human
cauucugugauucuaaaucccu

SEQ ID NO: 144164 - RNA, 22 nt, Human
aucaggaugcugucaguuacca

SEQ ID NO: 144165 - RNA, 22 nt, Human
uauauuguaggugcuauuugaa

SEQ ID NO: 144166 - RNA, 22 nt, Human
uuauuuuguagcucugaucuuu

SEQ ID NO: 144167 - RNA, 22 nt, Human
acauuucuauagugcaucuguu

SEQ ID NO: 144168 - RNA, 22 nt, Human
cagaaguaagauuacugugaga

SEQ ID NO: 144169 - RNA, 22 nt, Human
ugucauaaaacacaagcuguug

SEQ ID NO: 144170 - RNA, 17 nt, Human
aggugcagaggcagagc

SEQ ID NO: 144171 - RNA, 22 nt, Human
uccuuuuuaagucguuguggua

SEQ ID NO: 144172 - RNA, 22 nt, Human
gcagggcaugggcccugucugc

SEQ ID NO: 144173 - RNA, 22 nt, Human
cuggaaggcucugcugccuguc

SEQ ID NO: 144174 - RNA, 22 nt, Human
auguccuuccauuuugaucugu

SEQ ID NO: 144175 - RNA, 22 nt, Human
ggugugugguccucucacuuag

SEQ ID NO: 144176 - RNA, 15 nt, Human
aggcacugugggacc

SEQ ID NO: 144177 - RNA, 22 nt, Human
cuguuuauacgacagguggagg

SEQ ID NO: 144178 - RNA, 22 nt, Human
guuuuauaggugaaauauuacu

SEQ ID NO: 144179 - RNA, 22 nt, Human
caggcagggagcuggaaaggau

SEQ ID NO: 144180 - RNA, 22 nt, Human
aaucaguucuacaucuuaucca

SEQ ID NO: 144181 - RNA, 22 nt, Human
ggcuucuuccugugaacauguu

SEQ ID NO: 144182 - RNA, 22 nt, Human
agcaggugcauggcgagcgcgg

SEQ ID NO: 144183 - RNA, 22 nt, Human
acagagcugggaucugaaccca

SEQ ID NO: 144184 - RNA, 22 nt, Human
uggcuggggagccccgacuccc

SEQ ID NO: 144185 - RNA, 22 nt, Human
ugggugugccauauuccauuuc

SEQ ID NO: 144186 - RNA, 22 nt, Human
uguggccucaaggcugcccuca

SEQ ID NO: 144187 - RNA, 22 nt, Human
aggaugggccugggauaugcuu

SEQ ID NO: 144188 - RNA, 22 nt, Human
agugcacagcgugauguauugg

SEQ ID NO: 144189 - RNA, 22 nt, Human
gucaggaugagggaugaggagu

SEQ ID NO: 144190 - RNA, 21 nt, Human
gcagcaguguucuagaauacu

SEQ ID NO: 144191 - RNA, 22 nt, Human
ugugucagagguagagauggca

SEQ ID NO: 144192 - RNA, 20 nt, Human
accauaauguuaauuacaaa

SEQ ID NO: 144193 - RNA, 22 nt, Human
uguugaagauaaaguucucauu

SEQ ID NO: 144194 - RNA, 22 nt, Human
uucuucuucauuucugacgaug

SEQ ID NO: 144195 - RNA, 19 nt, Human
ucugccucuggucaggcuc

SEQ ID NO: 144196 - RNA, 22 nt, Human
ucugucugcgcuugcccuggug

SEQ ID NO: 144197 - RNA, 22 nt, Human
ggccugucucacccccgggugc

SEQ ID NO: 144198 - RNA, 22 nt, Human
agauggagaaugacaauuaagg

SEQ ID NO: 144199 - RNA, 20 nt, Human
uucuucucuaguuaucuuca

SEQ ID NO: 144200 - RNA, 22 nt, Human
acuccuggguugcaguccucaa

SEQ ID NO: 144201 - RNA, 22 nt, Human
uugcagggaccugcagaaagcu

SEQ ID NO: 144202 - RNA, 20 nt, Human
gcagagcuguucugugggga

SEQ ID NO: 144203 - RNA, 22 nt, Human
gcucuguguugucagaggcacc

SEQ ID NO: 144204 - RNA, 20 nt, Human
uccugagauuuaagggguuc

SEQ ID NO: 144205 - RNA, 22 nt, Human
uggcucuggcgugaagcccaga

SEQ ID NO: 144206 - RNA, 22 nt, Human
auuuugcuacaguugguggaaa

SEQ ID NO: 144207 - RNA, 22 nt, Human
ccagcugcuugggaaaaugucu

SEQ ID NO: 144208 - RNA, 22 nt, Human
agagugauucuaguuagggaau

SEQ ID NO: 144209 - RNA, 22 nt, Human
ugaaagguguccaauauuucuc

SEQ ID NO: 144210 - RNA, 22 nt, Human
uggccugccuucgcugagcuga

SEQ ID NO: 144211 - RNA, 22 nt, Human
uaguaacagauuuauacagucu

SEQ ID NO: 144212 - RNA, 22 nt, Human
ucugggagacguguguugucag

SEQ ID NO: 144213 - RNA, 22 nt, Human
ucccacugcuuugcucugcuca

SEQ ID NO: 144214 - RNA, 22 nt, Human
aagugagauuauauguacggga

SEQ ID NO: 144215 - RNA, 22 nt, Human
ucaucacucauuggacaacaga

SEQ ID NO: 144216 - RNA, 22 nt, Human
agcccucauggaacagcuccua

SEQ ID NO: 144217 - RNA, 22 nt, Human
ucccagagcucugacaccagcu

SEQ ID NO: 144218 - RNA, 22 nt, Human
acagagcuuaauucaggagcuu

SEQ ID NO: 144219 - RNA, 22 nt, Human
gugucauguagaaauugaugaa

SEQ ID NO: 144220 - RNA, 22 nt, Human
aaggcacuacgcugcuggggcg

SEQ ID NO: 144221 - RNA, 22 nt, Human
ggucagggcucuuccaguggcu

SEQ ID NO: 144222 - RNA, 22 nt, Human
ccagcuccugggucuuagucag

SEQ ID NO: 144223 - RNA, 21 nt, Human
ugcagagauaucugaagcaga

SEQ ID NO: 144224 - RNA, 22 nt, Human
uaaggcacccauguucauacag

SEQ ID NO: 144225 - RNA, 22 nt, Human
caccagcuacagacuacugugu

SEQ ID NO: 144226 - RNA, 22 nt, Human
uucaaaggcaggauagcagcug

SEQ ID NO: 144227 - RNA, 22 nt, Human
uucauugucucuguuugccuuc

SEQ ID NO: 144228 - RNA, 22 nt, Human
agaaauguuguggguuuuguua

SEQ ID NO: 144229 - RNA, 22 nt, Human
caaaagcaguucuaucugaguu

SEQ ID NO: 144230 - RNA, 22 nt, Human
aaaggccaauaaagacaagcug

SEQ ID NO: 144231 - RNA, 22 nt, Human
augaaaacuuuagccucauuag

SEQ ID NO: 144232 - RNA, 22 nt, Human
auucugauaucuuauucuagcu

SEQ ID NO: 144233 - RNA, 22 nt, Human
cuggugucugcucccucacagc

SEQ ID NO: 144234 - RNA, 22 nt, Human
acuguguggaaauuugugaggg

SEQ ID NO: 144235 - RNA, 22 nt, Human
uggcucugcugaaccuagugca

SEQ ID NO: 144236 - RNA, 22 nt, Human
ucugggcagcagcagcuaguag

SEQ ID NO: 144237 - RNA, 22 nt, Human
cuggcagcugugugaagaacug

SEQ ID NO: 144238 - RNA, 18 nt, Human
caaagcucacguuccauc

SEQ ID NO: 144239 - RNA, 22 nt, Human
ggugggcaggcgaggcccaggu

SEQ ID NO: 144240 - RNA, 22 nt, Human
gugugugugcaucucuuuuauu

SEQ ID NO: 144241 - RNA, 22 nt, Human
ccagggcugcugugggacucca

SEQ ID NO: 144242 - RNA, 19 nt, Human
ccagcagguucauuucagg

SEQ ID NO: 144243 - RNA, 20 nt, Human
agagccuggaaaaagacauc

SEQ ID NO: 144244 - RNA, 22 nt, Human
aaggcacuagcagaauuaguga

SEQ ID NO: 144245 - RNA, 22 nt, Human
gugccugggguugagcuaugaa

SEQ ID NO: 144246 - RNA, 22 nt, Human
aggggagccccugguccuggug

SEQ ID NO: 144247 - RNA, 22 nt, Human
agcugcucugauaaaccuacuu

SEQ ID NO: 144248 - RNA, 22 nt, Human
acugcaggagacacagcugcug

SEQ ID NO: 144249 - RNA, 22 nt, Human
cagagggcucaguccugcugga

SEQ ID NO: 144250 - RNA, 22 nt, Human
uacauggguagguuaagucaua

SEQ ID NO: 144251 - RNA, 20 nt, Human
agugucuggugcagggccuc

SEQ ID NO: 144252 - RNA, 22 nt, Human
uagaaaagauaacauucugugc

SEQ ID NO: 144253 - RNA, 22 nt, Human
agccagcugccuuucacaucug

SEQ ID NO: 144254 - RNA, 22 nt, Human
uagacacaagagaaggguauaa

SEQ ID NO: 144255 - RNA, 22 nt, Human
cuuguacauugauuucugcauu

SEQ ID NO: 144256 - RNA, 22 nt, Human
uccucacagucaacacuuugag

SEQ ID NO: 144257 - RNA, 22 nt, Human
acagugauuauuaguugguggu

SEQ ID NO: 144258 - RNA, 22 nt, Human
ucucagagggaaaggccaauuu

SEQ ID NO: 144259 - RNA, 22 nt, Human
agcacagguacggagaugcuac

SEQ ID NO: 144260 - RNA, 22 nt, Human
gauauuuucgcagggagaauuc

SEQ ID NO: 144261 - RNA, 22 nt, Human
agcauggggcaaugcaugugcu

SEQ ID NO: 144262 - RNA, 22 nt, Human
cacaguggauugggugaugccc

SEQ ID NO: 144263 - RNA, 22 nt, Human
ggagccagggaagcugcuuccu

SEQ ID NO: 144264 - RNA, 22 nt, Human
gguuugcauucugaaaggcuca

SEQ ID NO: 144265 - RNA, 22 nt, Human
uagaaaauagggccuguggagc

SEQ ID NO: 144266 - RNA, 22 nt, Human
uuucaugagauuccuccacauc

SEQ ID NO: 144267 - RNA, 22 nt, Human
aggcuggggaauugaauuugcu

SEQ ID NO: 144268 - RNA, 22 nt, Human
ccaggacuucgaggcuacagug

SEQ ID NO: 144269 - RNA, 22 nt, Human
agcuuccuuggcgcugaggccu

SEQ ID NO: 144270 - RNA, 22 nt, Human
agccaaggacacggagccuccu

SEQ ID NO: 144271 - RNA, 22 nt, Human
aagagcugcccaaggugaacag

SEQ ID NO: 144272 - RNA, 22 nt, Human
caggaggcaucauggagcggac

SEQ ID NO: 144273 - RNA, 22 nt, Human
ggcucugccugcccagcagcac

SEQ ID NO: 144274 - RNA, 22 nt, Human
agggcccuccccgcucagggca

SEQ ID NO: 144275 - RNA, 22 nt, Human
uucacaggaggguggaugcaug

SEQ ID NO: 144276 - RNA, 22 nt, Human
ccaugagcuuccuauauagggu

SEQ ID NO: 144277 - RNA, 22 nt, Human
ccucagggccaucucugucccu

SEQ ID NO: 144278 - RNA, 22 nt, Human
uucaaucauuagaaucucaggc

SEQ ID NO: 144279 - RNA, 22 nt, Human
augcacaagaggcuagaaaaga

SEQ ID NO: 144280 - RNA, 20 nt, Human
ccuaggcaugcugagucucc

SEQ ID NO: 144281 - RNA, 22 nt, Human
agagcagcacguuguccccaca

SEQ ID NO: 144282 - RNA, 22 nt, Human
gaaaggccauuucugaggguuu

SEQ ID NO: 144283 - RNA, 22 nt, Human
gcagauggugggggaggaguac

SEQ ID NO: 144284 - RNA, 22 nt, Human
gccagcagguggagagaucaag

SEQ ID NO: 144285 - RNA, 22 nt, Human
ugcugaggucaccuugcugcua

SEQ ID NO: 144286 - RNA, 22 nt, Human
ccuggccugcucggcucuuaag

SEQ ID NO: 144287 - RNA, 22 nt, Human
auggcugugugcuucuccccau

SEQ ID NO: 144288 - RNA, 22 nt, Human
ugaggccacuuccccacagccc

SEQ ID NO: 144289 - RNA, 22 nt, Human
gcccauggacacccaagugcca

SEQ ID NO: 144290 - RNA, 22 nt, Human
cuggcaggcagacuucugcaag

SEQ ID NO: 144291 - RNA, 22 nt, Human
aggcucaguuugguuuccauug

SEQ ID NO: 144292 - RNA, 22 nt, Human
ucaccuuagcuagaggaagaga

SEQ ID NO: 144293 - RNA, 22 nt, Human
agaggucagaacaggaaagugu

SEQ ID NO: 144294 - RNA, 22 nt, Human
uugcagggcaggaccauggaca

SEQ ID NO: 144295 - RNA, 23 nt, Human
acuauaaaguuguucugauuuac

SEQ ID NO: 144296 - RNA, 21 nt, Human
acagcaagccuucacaugagu

SEQ ID NO: 144297 - RNA, 22 nt, Human
cucccaggcacagggaggagcc

SEQ ID NO: 144298 - RNA, 22 nt, Human
auccuucaaggggcugacagcu

SEQ ID NO: 144299 - RNA, 19 nt, Human
aguagcagaaagugcagug

SEQ ID NO: 144300 - RNA, 22 nt, Human
gcugcccagcaggccccagggg

SEQ ID NO: 144301 - RNA, 17 nt, Human
ccaggugggaggugggg

SEQ ID NO: 144302 - RNA, 22 nt, Human
uaugcauaauuggauaaguaga

SEQ ID NO: 144303 - RNA, 22 nt, Human
gcagggcugcugaaacuuguuu

SEQ ID NO: 144304 - RNA, 21 nt, Human
agaggccuuacaggauagacc

SEQ ID NO: 144305 - RNA, 19 nt, Human
ccuuggaguuccaggugga

SEQ ID NO: 144306 - RNA, 22 nt, Human
uuagugucuucuucauccucug

SEQ ID NO: 144307 - RNA, 22 nt, Human
acugaaauacugcucuuggauu

SEQ ID NO: 144308 - RNA, 22 nt, Human
agcucccaggcagucaugagga

SEQ ID NO: 144309 - RNA, 22 nt, Human
ucauccaguucacauggugagu

SEQ ID NO: 144310 - RNA, 22 nt, Human
acauuuaaugauccuacuguga

SEQ ID NO: 144311 - RNA, 22 nt, Human
ugggccuccaauuccagcggga

SEQ ID NO: 144312 - RNA, 22 nt, Human
acacugaauauacaaugaauau

SEQ ID NO: 144313 - RNA, 22 nt, Human
uguggcugacuccuggucccca

SEQ ID NO: 144314 - RNA, 22 nt, Human
uuucagaucauuuuuuaaguac

SEQ ID NO: 144315 - RNA, 22 nt, Human
aggccuggccccaguugcuagg

SEQ ID NO: 144316 - RNA, 22 nt, Human
caggguggggaaauagcgcccu

SEQ ID NO: 144317 - RNA, 22 nt, Human
ugccuggaaggcccaugggaag

SEQ ID NO: 144318 - RNA, 22 nt, Human
uuuaacauguaauugcugcuuu

SEQ ID NO: 144319 - RNA, 22 nt, Human
ucugcugucuuuucugggugag

SEQ ID NO: 144320 - RNA, 22 nt, Human
auguuucaccagcaaauuaccu

SEQ ID NO: 144321 - RNA, 22 nt, Human
cugagcugggaguggauagugg

SEQ ID NO: 144322 - RNA, 22 nt, Human
aacguuuuaucgugugcucuuc

SEQ ID NO: 144323 - RNA, 22 nt, Human
ucaguucugcuagaaaaacagu

SEQ ID NO: 144324 - RNA, 22 nt, Human
gauauuuugagaaauccuauga

SEQ ID NO: 144325 - RNA, 22 nt, Human
cagugauggauauggagaaguc

SEQ ID NO: 144326 - RNA, 22 nt, Human
aggcuguguucugcccucuccc

SEQ ID NO: 144327 - RNA, 22 nt, Human
uuaacaguaaagaauugugcaa

SEQ ID NO: 144328 - RNA, 22 nt, Human
ucagaacauuuaaaaagugguu

SEQ ID NO: 144329 - RNA, 20 nt, Human
gcacugaagguuccagggga

SEQ ID NO: 144330 - RNA, 22 nt, Human
ccacugucugcaggccucagca

SEQ ID NO: 144331 - RNA, 22 nt, Human
cagagagagucaaaucuuugcu

SEQ ID NO: 144332 - RNA, 22 nt, Human
uucuuacuaguauguuucagca

SEQ ID NO: 144333 - RNA, 22 nt, Human
ugccagcacuucuggcugucug

SEQ ID NO: 144334 - RNA, 23 nt, Human
gcauugucuccccacuucugggc

SEQ ID NO: 144335 - RNA, 22 nt, Human
agaagcaguuauuuuuugcaca

SEQ ID NO: 144336 - RNA, 22 nt, Human
ucucagaguuuagagcugagcc

SEQ ID NO: 144337 - RNA, 22 nt, Human
gccuggaguggacuuggccccu

SEQ ID NO: 144338 - RNA, 22 nt, Human
ucauggauggccgggaggugau

SEQ ID NO: 144339 - RNA, 22 nt, Human
agggcagcagcuccuccuagcu

SEQ ID NO: 144340 - RNA, 22 nt, Human
guugaaagaugucuugguuccc

SEQ ID NO: 144341 - RNA, 22 nt, Human
uuacaguuacugguacuguuaa

SEQ ID NO: 144342 - RNA, 22 nt, Human
uccucagacacccugcuggcuu

SEQ ID NO: 144343 - RNA, 22 nt, Human
uuuucuuuaaucugguggggug

SEQ ID NO: 144344 - RNA, 22 nt, Human
cuuguccccagcagguugguuu

SEQ ID NO: 144345 - RNA, 22 nt, Human
accagccugucugagucguggg

SEQ ID NO: 144346 - RNA, 23 nt, Human
uggcucagggucucuuaugaagu

SEQ ID NO: 144347 - RNA, 22 nt, Human
aggcugugagagguggcuccca

SEQ ID NO: 144348 - RNA, 22 nt, Human
cacaccuguaauaccagcuacu

SEQ ID NO: 144349 - RNA, 22 nt, Human
uggccaggcagguagaacggcc

SEQ ID NO: 144350 - RNA, 22 nt, Human
uggagggcucuuucaccuggua

SEQ ID NO: 144351 - RNA, 22 nt, Human
aacaugaaguuuucuauaguga

SEQ ID NO: 144352 - RNA, 23 nt, Human
ucucagaggauuccugggccuug

SEQ ID NO: 144353 - RNA, 22 nt, Human
ugauuuccugugcgcccuuagg

SEQ ID NO: 144354 - RNA, 22 nt, Human
gcacacaggcaguuuccagcca

SEQ ID NO: 144355 - RNA, 22 nt, Human
agggcagagacaugcuuccuga

SEQ ID NO: 144356 - RNA, 22 nt, Human
ugccagcuccgaggagcugcag

SEQ ID NO: 144357 - RNA, 20 nt, Human
uauaacaguguugggugugu

SEQ ID NO: 144358 - RNA, 22 nt, Human
uuacagauggcaguuucuugag

SEQ ID NO: 144359 - RNA, 21 nt, Human
gugugcugauacauuggagaa

SEQ ID NO: 144360 - RNA, 22 nt, Human
aaguuugcauagauuaagcauu

SEQ ID NO: 144361 - RNA, 22 nt, Human
acuuugcaaugggcagaaccca

SEQ ID NO: 144362 - RNA, 22 nt, Human
uugcucugacuggagugcagug

SEQ ID NO: 144363 - RNA, 22 nt, Human
ugugcucuggaguugccuucac

SEQ ID NO: 144364 - RNA, 22 nt, Human
aagauuauggcagauaacaauu

SEQ ID NO: 144365 - RNA, 22 nt, Human
gaaugcacucacccaucacuca

SEQ ID NO: 144366 - RNA, 22 nt, Human
ggcccugagcugaaguacugug

SEQ ID NO: 144367 - RNA, 22 nt, Human
acagaauugauggaaaucucag

SEQ ID NO: 144368 - RNA, 22 nt, Human
gccauuuucugucuuguuuauu

SEQ ID NO: 144369 - RNA, 22 nt, Human
uuguggcucgugagauguuagg

SEQ ID NO: 144370 - RNA, 22 nt, Human
ucuguggccuguguccaagugc

SEQ ID NO: 144371 - RNA, 23 nt, Human
gcugcagcuguggauguucucag

SEQ ID NO: 144372 - RNA, 22 nt, Human
gcuugaaaauucauagguauuu

SEQ ID NO: 144373 - RNA, 22 nt, Human
agggcuggcuaggugcguuccc

SEQ ID NO: 144374 - RNA, 22 nt, Human
caagccugucucaccagugcua

SEQ ID NO: 144375 - RNA, 22 nt, Human
accauguguuuuacacauggua

SEQ ID NO: 144376 - RNA, 20 nt, Human
cuguggcucaugcaucugcc

SEQ ID NO: 144377 - RNA, 22 nt, Human
aaggcucuuggagugaaugcag

SEQ ID NO: 144378 - RNA, 22 nt, Human
uggccagguugggcuuugcagc

SEQ ID NO: 144379 - RNA, 22 nt, Human
gcuggccaggugcuuugguucu

SEQ ID NO: 144380 - RNA, 22 nt, Human
accucuggccuucaggcaucau

SEQ ID NO: 144381 - RNA, 22 nt, Human
agaggcugagaaacccucuucu

SEQ ID NO: 144382 - RNA, 22 nt, Human
cugggccugggaggccaggucu

SEQ ID NO: 144383 - RNA, 22 nt, Human
cugaggccucucuccugggcuu

SEQ ID NO: 144384 - RNA, 16 nt, Human
gggagggaguuggugg

SEQ ID NO: 144385 - RNA, 22 nt, Human
ggguccagcuacaucagggugg

SEQ ID NO: 144386 - RNA, 22 nt, Human
cugugucucuccuuacaagacu

SEQ ID NO: 144387 - RNA, 22 nt, Human
cagagcagcagagcuuccaugg

SEQ ID NO: 144388 - RNA, 17 nt, Human
auuuccucagggcugag

SEQ ID NO: 144389 - RNA, 22 nt, Human
cucccuggaggugagcuggcac

SEQ ID NO: 144390 - RNA, 22 nt, Human
cuguuacauagcuuuucuuaac

SEQ ID NO: 144391 - RNA, 22 nt, Human
gccagguggcugagugacugag

SEQ ID NO: 144392 - RNA, 22 nt, Human
uuauuuucuccucagaaagugg

SEQ ID NO: 144393 - RNA, 22 nt, Human
gagauguacaauguguauuaau

SEQ ID NO: 144394 - RNA, 22 nt, Human
agugugaccuuauuuggaaaca

SEQ ID NO: 144395 - RNA, 21 nt, Human
cagaggggcuagccuggcugc

SEQ ID NO: 144396 - RNA, 22 nt, Human
cugaggugcuagggucccugcu

SEQ ID NO: 144397 - RNA, 22 nt, Human
cucagggacguuagaggacagg

SEQ ID NO: 144398 - RNA, 23 nt, Human
ugcugggguaguuuguggcacag

SEQ ID NO: 144399 - RNA, 20 nt, Human
agacccuguguccuguggcc

SEQ ID NO: 144400 - RNA, 17 nt, Human
aguguguaacuugugua

SEQ ID NO: 144401 - RNA, 22 nt, Human
uccagucaagcuugagaauuuc

SEQ ID NO: 144402 - RNA, 22 nt, Human
agccuggcuguaaccucauggu

SEQ ID NO: 144403 - RNA, 22 nt, Human
gccugagagacccauggggcaa

SEQ ID NO: 144404 - RNA, 22 nt, Human
accuggcacuacaggcaccugu

SEQ ID NO: 144405 - RNA, 22 nt, Human
gcaggggaguggcaggcccgga

SEQ ID NO: 144406 - RNA, 22 nt, Human
gucaggauuauuuuauuaaaag

SEQ ID NO: 144407 - RNA, 19 nt, Human
caaggguugggucugucau

SEQ ID NO: 144408 - RNA, 22 nt, Human
agcauauugucuuuggugucuc

SEQ ID NO: 144409 - RNA, 22 nt, Human
gcugcucuggcucugcaguguc

SEQ ID NO: 144410 - RNA, 22 nt, Human
guggcccaggcuuggcgcuggc

SEQ ID NO: 144411 - RNA, 22 nt, Human
gccugugacucgucuugggcca

SEQ ID NO: 144412 - RNA, 22 nt, Human
cagucccacuagugccaauacc

SEQ ID NO: 144413 - RNA, 22 nt, Human
ugcauuauacuuuuagaaauuu

SEQ ID NO: 144414 - RNA, 22 nt, Human
ugcauguguuugccacagugag

SEQ ID NO: 144415 - RNA, 18 nt, Human
guguggcugagaugaggc

SEQ ID NO: 144416 - RNA, 22 nt, Human
gugcuuuccauccucccugcug

SEQ ID NO: 144417 - RNA, 19 nt, Human
agcaaauauaauaguguuc

SEQ ID NO: 144418 - RNA, 22 nt, Human
uuguggcucaucuucagcuccc

SEQ ID NO: 144419 - RNA, 22 nt, Human
uggaguucauccaugacagcuu

SEQ ID NO: 144420 - RNA, 22 nt, Human
aaugccaguguguugauuccag

SEQ ID NO: 144421 - RNA, 22 nt, Human
caggaugggauguagugggccc

SEQ ID NO: 144422 - RNA, 22 nt, Human
cagccugcagggcugccuguug

SEQ ID NO: 144423 - RNA, 22 nt, Human
gguggggccugcuccagcggcc

SEQ ID NO: 144424 - RNA, 22 nt, Human
acauucuagaagucuuugcaau

SEQ ID NO: 144425 - RNA, 22 nt, Human
aggaggccgggauucuggagau

SEQ ID NO: 144426 - RNA, 22 nt, Human
guguacauauugagucugcuga

SEQ ID NO: 144427 - RNA, 22 nt, Human
ugcugucugcaacaguacuaca

SEQ ID NO: 144428 - RNA, 22 nt, Human
agacagaacagaauaauuguug

SEQ ID NO: 144429 - RNA, 22 nt, Human
agaaaugcucuuccugaccaga

SEQ ID NO: 144430 - RNA, 22 nt, Human
acacaggggaaaguggagcuga

SEQ ID NO: 144431 - RNA, 22 nt, Human
gaaaauguuagcuucauaguca

SEQ ID NO: 144432 - RNA, 19 nt, Human
agcagagcccugaagaucc

SEQ ID NO: 144433 - RNA, 22 nt, Human
cauaauauacuacauugaugaa

SEQ ID NO: 144434 - RNA, 22 nt, Human
agcaggguuuggggauuggcac

SEQ ID NO: 144435 - RNA, 22 nt, Human
cacauuugaaggaauuagcauu

SEQ ID NO: 144436 - RNA, 22 nt, Human
agagcugggacuuggacucaau

SEQ ID NO: 144437 - RNA, 19 nt, Human
ucugaggguccagaugcau

SEQ ID NO: 144438 - RNA, 20 nt, Human
gccugccucagcuagcugag

SEQ ID NO: 144439 - RNA, 22 nt, Human
aaucauaauuguauacauucau

SEQ ID NO: 144440 - RNA, 22 nt, Human
augaaggcaguuaaacgucauc

SEQ ID NO: 144441 - RNA, 22 nt, Human
aucaggauagugguuaccuggg

SEQ ID NO: 144442 - RNA, 22 nt, Human
cugggcuggcgcauccgacacg

SEQ ID NO: 144443 - RNA, 22 nt, Human
ccagggcagcagaauuggggca

SEQ ID NO: 144444 - RNA, 22 nt, Human
ggcuggguacagggcagugugc

SEQ ID NO: 144445 - RNA, 22 nt, Human
aaaugcacagaggccagagagg

SEQ ID NO: 144446 - RNA, 22 nt, Human
ccagcucucagcgggagacuca

SEQ ID NO: 144447 - RNA, 22 nt, Human
gaggaaccacucugagaagcca

SEQ ID NO: 144448 - RNA, 19 nt, Human
gcugcuggcucuggcugga

SEQ ID NO: 144449 - RNA, 22 nt, Human
agugucugccaacugcaugguc

SEQ ID NO: 144450 - RNA, 22 nt, Human
ccagaagaccccguccaccucc

SEQ ID NO: 144451 - RNA, 22 nt, Human
ugccugggagugaccaagacuc

SEQ ID NO: 144452 - RNA, 22 nt, Human
gcugugagcugccugugucaca

SEQ ID NO: 144453 - RNA, 22 nt, Human
ugagguggcuagggaggcacuc

SEQ ID NO: 144454 - RNA, 22 nt, Human
aagaacaguguccugggacucg

SEQ ID NO: 144455 - RNA, 22 nt, Human
cuggcagguccagcuggacuca

SEQ ID NO: 144456 - RNA, 22 nt, Human
ggacuucuaagugccagacacu

SEQ ID NO: 144457 - RNA, 22 nt, Human
gcagagccuugcgucaugugcc

SEQ ID NO: 144458 - RNA, 22 nt, Human
cuggaagaggaagccagcugga

SEQ ID NO: 144459 - RNA, 23 nt, Human
ugcuucucugcuugacaguucug

SEQ ID NO: 144460 - RNA, 22 nt, Human
gcagagcccuggggguauggug

SEQ ID NO: 144461 - RNA, 22 nt, Human
uuuuauguaauaaacuguacac

SEQ ID NO: 144462 - RNA, 22 nt, Human
cuguggcuucuagguccccgau

SEQ ID NO: 144463 - RNA, 18 nt, Human
auccuugaugagaggucu

SEQ ID NO: 144464 - RNA, 22 nt, Human
auugaggcagcauaguucaggg

SEQ ID NO: 144465 - RNA, 20 nt, Human
aggcacuggggauagguaag

SEQ ID NO: 144466 - RNA, 22 nt, Human
aucuggcugcugugcuuaagcu

SEQ ID NO: 144467 - RNA, 22 nt, Human
cuacauuuugugauuaugaaau

SEQ ID NO: 144468 - RNA, 22 nt, Human
ucugggaacugagcuccccuag

SEQ ID NO: 144469 - RNA, 22 nt, Human
gagugaaaaaggaagggccaua

SEQ ID NO: 144470 - RNA, 22 nt, Human
ugugccugucacccucagagag

SEQ ID NO: 144471 - RNA, 22 nt, Human
agcaaggcagucagcuggcugg

SEQ ID NO: 144472 - RNA, 22 nt, Human
agauauuuugugugauguuuca

SEQ ID NO: 144473 - RNA, 21 nt, Human
cugguguagcacucaggugcu

SEQ ID NO: 144474 - RNA, 22 nt, Human
ccuuuacacauggaaugggucu

SEQ ID NO: 144475 - RNA, 21 nt, Human
uagcacuucgcuguaauuggg

SEQ ID NO: 144476 - RNA, 22 nt, Human
agaguguuuuucugucaaggac

SEQ ID NO: 144477 - RNA, 22 nt, Human
accagcagaguugaggaggaca

SEQ ID NO: 144478 - RNA, 22 nt, Human
aaugggagguaguaugggaggu

SEQ ID NO: 144479 - RNA, 22 nt, Human
ccagcaggagaugccugugucu

SEQ ID NO: 144480 - RNA, 22 nt, Human
ucagggcaccaaaaaagaugcc

SEQ ID NO: 144481 - RNA, 22 nt, Human
auugucuuuggugcuuccagga

SEQ ID NO: 144482 - RNA, 22 nt, Human
ucuucucccaucuccaggcagg

SEQ ID NO: 144483 - RNA, 22 nt, Human
uuccaguucccaugaggauuaa

SEQ ID NO: 144484 - RNA, 22 nt, Human
gccagagcugagacacgagucc

SEQ ID NO: 144485 - RNA, 22 nt, Human
uuuucucaggugcuuaucuaag

SEQ ID NO: 144486 - RNA, 22 nt, Human
cuugugcaauugacauugaauc

SEQ ID NO: 144487 - RNA, 22 nt, Human
agagcuguucagcagccagguu

SEQ ID NO: 144488 - RNA, 22 nt, Human
uacaguagacaauguuaguaug

SEQ ID NO: 144489 - RNA, 20 nt, Human
uucuuuacgaccuuucugca

SEQ ID NO: 144490 - RNA, 22 nt, Human
cuggaguuagaguagacacuga

SEQ ID NO: 144491 - RNA, 22 nt, Human
cuggcagcucugagucccuucu

SEQ ID NO: 144492 - RNA, 22 nt, Human
cuggggccacaacggcgcacgc

SEQ ID NO: 144493 - RNA, 22 nt, Human
aggcccugcccagugccacaag

SEQ ID NO: 144494 - RNA, 22 nt, Human
uucugcucuuggcuuugcuggu

SEQ ID NO: 144495 - RNA, 22 nt, Human
uaaggcacccgugagcugccag

SEQ ID NO: 144496 - RNA, 22 nt, Human
aagcucugcucagcagacuagg

SEQ ID NO: 144497 - RNA, 22 nt, Human
auguguauauuuauuguaguuu

SEQ ID NO: 144498 - RNA, 22 nt, Human
uuuccuucaucaucugagagcu

SEQ ID NO: 144499 - RNA, 22 nt, Human
uacaaacuuguuuuaaguaagu

SEQ ID NO: 144500 - RNA, 22 nt, Human
uuccgcuggggccgccuggcgg

SEQ ID NO: 144501 - RNA, 22 nt, Human
cugucccagauguucucagcac

SEQ ID NO: 144502 - RNA, 22 nt, Human
cugccaggacugacgucuucag

SEQ ID NO: 144503 - RNA, 22 nt, Human
uucugcucuaauguacaccagc

SEQ ID NO: 144504 - RNA, 22 nt, Human
gugggcuggacccuccugcucc

SEQ ID NO: 144505 - RNA, 22 nt, Human
ugaagcaacuggacaaguuggc

SEQ ID NO: 144506 - RNA, 22 nt, Human
gugagcaggauuucauggugua

SEQ ID NO: 144507 - RNA, 21 nt, Human
uuuauguacuucauagaguag

SEQ ID NO: 144508 - RNA, 19 nt, Human
ggcucucccuugagagagc

SEQ ID NO: 144509 - RNA, 22 nt, Human
cugcuggggucagagcacuggg

SEQ ID NO: 144510 - RNA, 22 nt, Human
ggaggccauaguuugggaguca

SEQ ID NO: 144511 - RNA, 22 nt, Human
ccagaggaaaaauaucucccua

SEQ ID NO: 144512 - RNA, 22 nt, Human
caggggcuuaagugacagaagg

SEQ ID NO: 144513 - RNA, 22 nt, Human
ucucagagaugucaagagucua

SEQ ID NO: 144514 - RNA, 22 nt, Human
gagaggaguaggcugauggugc

SEQ ID NO: 144515 - RNA, 22 nt, Human
caguccuggggaccaggcugag

SEQ ID NO: 144516 - RNA, 22 nt, Human
aggaccugacuggcuccugcuu

SEQ ID NO: 144517 - RNA, 22 nt, Human
uaacagaaaagaacugaguuug

SEQ ID NO: 144518 - RNA, 22 nt, Human
aagggcagccugacucacgguc

SEQ ID NO: 144519 - RNA, 22 nt, Human
ucuacuuuucccuauacaguuu

SEQ ID NO: 144520 - RNA, 22 nt, Human
uuguuacaucuuauguaagugg

SEQ ID NO: 144521 - RNA, 21 nt, Human
agagccugagaucuuccagca

SEQ ID NO: 144522 - RNA, 22 nt, Human
uuagaaagaacuuuagauauca

SEQ ID NO: 144523 - RNA, 22 nt, Human
agcucccagcuccuuugagaga

SEQ ID NO: 144524 - RNA, 22 nt, Human
ggaugcuggggaccaaucucug

SEQ ID NO: 144525 - RNA, 22 nt, Human
cugccuggcauggagaagagaa

SEQ ID NO: 144526 - RNA, 22 nt, Human
cugcucucuguuccccuggauc

SEQ ID NO: 144527 - RNA, 22 nt, Human
ggagggcugccagguggagcgg

SEQ ID NO: 144528 - RNA, 18 nt, Human
gguggcuggggacggaca

SEQ ID NO: 144529 - RNA, 22 nt, Human
aaaauacuguggaguguugaaa

SEQ ID NO: 144530 - RNA, 22 nt, Human
gagaaggggugauguggguaau

SEQ ID NO: 144531 - RNA, 22 nt, Human
ggccugugagccuuaguuuaua

SEQ ID NO: 144532 - RNA, 17 nt, Human
gagauggguggaucacc

SEQ ID NO: 144533 - RNA, 22 nt, Human
aaaagacauaugugggcauucu

SEQ ID NO: 144534 - RNA, 22 nt, Human
ggcuucuccagguacugagcau

SEQ ID NO: 144535 - RNA, 23 nt, Human
acagacaacacugaugagagaaa

SEQ ID NO: 144536 - RNA, 21 nt, Human
gaacauuuggguuguuucuac

SEQ ID NO: 144537 - RNA, 22 nt, Human
auccugggcagugugucacucu

SEQ ID NO: 144538 - RNA, 22 nt, Human
agcagagcggggccuccggaag

SEQ ID NO: 144539 - RNA, 22 nt, Human
uuucccaguucccugcucuaua

SEQ ID NO: 144540 - RNA, 22 nt, Human
agucauaugacccuucacaaac

SEQ ID NO: 144541 - RNA, 22 nt, Human
cuguguuugacaggcggucucc

SEQ ID NO: 144542 - RNA, 21 nt, Human
gcaggaugcaucuuggugucu

SEQ ID NO: 144543 - RNA, 22 nt, Human
gccagaaacauacacaucacuu

SEQ ID NO: 144544 - RNA, 23 nt, Human
uuauuuugucagaagggacuuuu

SEQ ID NO: 144545 - RNA, 22 nt, Human
aguggccagugcugcucugggg

SEQ ID NO: 144546 - RNA, 22 nt, Human
ugaagguggcauaggagagaug

SEQ ID NO: 144547 - RNA, 22 nt, Human
aaggcacuuaacgugggaggau

SEQ ID NO: 144548 - RNA, 22 nt, Human
caggccuggguucaaaucccuu

SEQ ID NO: 144549 - RNA, 22 nt, Human
gcugcagcagcugcaggguugu

SEQ ID NO: 144550 - RNA, 22 nt, Human
gcagacaggcccaguggaggga

SEQ ID NO: 144551 - RNA, 22 nt, Human
uucuggagagaaaccuuacaaa

SEQ ID NO: 144552 - RNA, 23 nt, Human
ggcucugugcuaauugcugaaaa

SEQ ID NO: 144553 - RNA, 20 nt, Human
ccuggaagagcuccccaggc

SEQ ID NO: 144554 - RNA, 18 nt, Human
uggcagggaggaaauaua

SEQ ID NO: 144555 - RNA, 20 nt, Human
gucucagaauggauuugcau

SEQ ID NO: 144556 - RNA, 22 nt, Human
gcagccacacuguuacagaaug

SEQ ID NO: 144557 - RNA, 22 nt, Human
aaugaugguuucaucacuugaa

SEQ ID NO: 144558 - RNA, 22 nt, Human
agcugcccccagggcugugcuu

SEQ ID NO: 144559 - RNA, 22 nt, Human
ucauuuguacuugugugcuugu

SEQ ID NO: 144560 - RNA, 22 nt, Human
aaaagaggagugguuuaugaca

SEQ ID NO: 144561 - RNA, 22 nt, Human
ugcauuccuccaccuccugcac

SEQ ID NO: 144562 - RNA, 22 nt, Human
aagaugauguuguguuuucacu

SEQ ID NO: 144563 - RNA, 22 nt, Human
ucucacuuuccagacuuuucaa

SEQ ID NO: 144564 - RNA, 22 nt, Human
gaauucuuuucuuucugaaagu

SEQ ID NO: 144565 - RNA, 22 nt, Human
gcagcacauauaaacaaagaga

SEQ ID NO: 144566 - RNA, 22 nt, Human
ccugcaggggagagacuucuag

SEQ ID NO: 144567 - RNA, 22 nt, Human
uuccucaucugugcaccucacu

SEQ ID NO: 144568 - RNA, 22 nt, Human
cagauaaaggcuuacuaguagu

SEQ ID NO: 144569 - RNA, 22 nt, Human
cugggaggcggagguuguagug

SEQ ID NO: 144570 - RNA, 22 nt, Human
ucugagggugggagaaggagcu

SEQ ID NO: 144571 - RNA, 19 nt, Human
ugcuuccucaccaucuccc

SEQ ID NO: 144572 - RNA, 22 nt, Human
agguggggaggagugucucuuu

SEQ ID NO: 144573 - RNA, 22 nt, Human
ccagcagcucccucaggguccg

SEQ ID NO: 144574 - RNA, 22 nt, Human
agcauuuaguuaguaaauguuu

SEQ ID NO: 144575 - RNA, 22 nt, Human
agggccugcucuaucacucuca

SEQ ID NO: 144576 - RNA, 22 nt, Human
ucacuuauaaaaugcaagaucu

SEQ ID NO: 144577 - RNA, 22 nt, Human
uguauuuucugaagauaaucaa

SEQ ID NO: 144578 - RNA, 20 nt, Human
ugcagagcuggcuggcuccu

SEQ ID NO: 144579 - RNA, 22 nt, Human
agaggaugguugaggaagaccu

SEQ ID NO: 144580 - RNA, 22 nt, Human
cuguggcugaguuccuuauguu

SEQ ID NO: 144581 - RNA, 22 nt, Human
aggcagaaaauagucauccaaa

SEQ ID NO: 144582 - RNA, 22 nt, Human
ccagcagguguagggcucaugg

SEQ ID NO: 144583 - RNA, 22 nt, Human
gcccagaguucaaggcugcagu

SEQ ID NO: 144584 - RNA, 19 nt, Human
uuugcagugguuccuuugu

SEQ ID NO: 144585 - RNA, 22 nt, Human
ccucagaggugaacaucagugc

SEQ ID NO: 144586 - RNA, 22 nt, Human
auuucacucuuaauugcuuccu

SEQ ID NO: 144587 - RNA, 22 nt, Human
uauuucuguaacucagggucug

SEQ ID NO: 144588 - RNA, 22 nt, Human
gggcuguguuaggugcgguuac

SEQ ID NO: 144589 - RNA, 22 nt, Human
auucuuggagcagucaaagaag

SEQ ID NO: 144590 - RNA, 19 nt, Human
ggccaggcugacugugguc

SEQ ID NO: 144591 - RNA, 22 nt, Human
cuggguguucaggagcugggcu

SEQ ID NO: 144592 - RNA, 22 nt, Human
ggagacagugguagggccuaag

SEQ ID NO: 144593 - RNA, 22 nt, Human
gaugccugcauuucaggagagu

SEQ ID NO: 144594 - RNA, 22 nt, Human
uuucaucuauuugcuuugugaa

SEQ ID NO: 144595 - RNA, 22 nt, Human
aacagcuuugcuucuggagaca

SEQ ID NO: 144596 - RNA, 22 nt, Human
aaauguuucuacuugugagcau

SEQ ID NO: 144597 - RNA, 22 nt, Human
ugugucuggauagguaauggau

SEQ ID NO: 144598 - RNA, 22 nt, Human
agagcuggacgucugagcccua

SEQ ID NO: 144599 - RNA, 22 nt, Human
cagagccccccuucugaucaca

SEQ ID NO: 144600 - RNA, 22 nt, Human
aguguugucaaacggcucagca

SEQ ID NO: 144601 - RNA, 22 nt, Human
uuugaaagggacaaagucacug

SEQ ID NO: 144602 - RNA, 22 nt, Human
gagguucacaggcuaucacagu

SEQ ID NO: 144603 - RNA, 22 nt, Human
ggugaggggagagugaaagaaa

SEQ ID NO: 144604 - RNA, 22 nt, Human
cagggccagcgcccaggcccag

SEQ ID NO: 144605 - RNA, 22 nt, Human
ucagaagcaaacaucacucuag

SEQ ID NO: 144606 - RNA, 22 nt, Human
cacaugcauaaggauaauuacu

SEQ ID NO: 144607 - RNA, 22 nt, Human
ugucccucauugacgcugugcc

SEQ ID NO: 144608 - RNA, 22 nt, Human
gaacccaggcuuuugaggcugu

SEQ ID NO: 144609 - RNA, 22 nt, Human
cagagguauugcaaaagccuag

SEQ ID NO: 144610 - RNA, 22 nt, Human
cggcuggguucggcugcaggcc

SEQ ID NO: 144611 - RNA, 22 nt, Human
cagggccuccuaaggcaucuaa

SEQ ID NO: 144612 - RNA, 22 nt, Human
ucccagaguucaaugggaaggu

SEQ ID NO: 144613 - RNA, 22 nt, Human
ccagcagaggggcggagugcag

SEQ ID NO: 144614 - RNA, 22 nt, Human
uggaggugagugugguacagca

SEQ ID NO: 144615 - RNA, 22 nt, Human
ggccugcugacccaaguccugu

SEQ ID NO: 144616 - RNA, 22 nt, Human
uguguagcuuucuucugugggg

SEQ ID NO: 144617 - RNA, 23 nt, Human
ugacacauuuccuuuccacugca

SEQ ID NO: 144618 - RNA, 22 nt, Human
ugucauuuaguccucugugugu

SEQ ID NO: 144619 - RNA, 22 nt, Human
ucaugcacaugugucaccauca

SEQ ID NO: 144620 - RNA, 22 nt, Human
uuuucaucucugcuuuguaccu

SEQ ID NO: 144621 - RNA, 22 nt, Human
uacugcauaacuggcauguggg

SEQ ID NO: 144622 - RNA, 22 nt, Human
auucaaguggcugcuauguuaa

SEQ ID NO: 144623 - RNA, 20 nt, Human
agcuucuucugucuaauuuu

SEQ ID NO: 144624 - RNA, 22 nt, Human
gggcacagcugcuacccagugc

SEQ ID NO: 144625 - RNA, 22 nt, Human
uggcucaggcuugaaaauagau

SEQ ID NO: 144626 - RNA, 19 nt, Human
aguguguacugaaagcacu

SEQ ID NO: 144627 - RNA, 22 nt, Human
uugacacaguuuucucauuaag

SEQ ID NO: 144628 - RNA, 23 nt, Human
uggagcugggcucagacccuggg

SEQ ID NO: 144629 - RNA, 22 nt, Human
aaguucuacuguggguaaaaug

SEQ ID NO: 144630 - RNA, 22 nt, Human
cugcauuagucaugcuuugcag

SEQ ID NO: 144631 - RNA, 22 nt, Human
gcucugcuggaaguucucugga

SEQ ID NO: 144632 - RNA, 22 nt, Human
cucaaggacuuauucaugccug

SEQ ID NO: 144633 - RNA, 22 nt, Human
ucaggggaaaucucucagcgaa

SEQ ID NO: 144634 - RNA, 22 nt, Human
acacacaacucauuguguaaua

SEQ ID NO: 144635 - RNA, 19 nt, Human
cauaauacaguggaucuga

SEQ ID NO: 144636 - RNA, 22 nt, Human
uuuccagugaauuagucuguuu

SEQ ID NO: 144637 - RNA, 22 nt, Human
auggaagguccuacagagcgca

SEQ ID NO: 144638 - RNA, 22 nt, Human
acauuucuugaugccucuguga

SEQ ID NO: 144639 - RNA, 22 nt, Human
agucucagaguaccugagggac

SEQ ID NO: 144640 - RNA, 22 nt, Human
agaaaucucaguaucucaggga

SEQ ID NO: 144641 - RNA, 22 nt, Human
uuuacagugagagcuuagugag

SEQ ID NO: 144642 - RNA, 22 nt, Human
uacagcuaggcaaaaaugacau

SEQ ID NO: 144643 - RNA, 22 nt, Human
ccagcagagggucuuggccauu

SEQ ID NO: 144644 - RNA, 22 nt, Human
gugucaugggagucagaaguga

SEQ ID NO: 144645 - RNA, 22 nt, Human
uuacauguacugguuugacuua

SEQ ID NO: 144646 - RNA, 22 nt, Human
caaaggcaacauauacuuguuu

SEQ ID NO: 144647 - RNA, 22 nt, Human
ugcagcugguuuagaacuagau

SEQ ID NO: 144648 - RNA, 20 nt, Human
gggaguggugguagccugug

SEQ ID NO: 144649 - RNA, 22 nt, Human
uuuaucuuuggaucuucagaaa

SEQ ID NO: 144650 - RNA, 22 nt, Human
ggagccuguggcugcuugaagc

SEQ ID NO: 144651 - RNA, 22 nt, Human
ggccugaggcgucccagcugug

SEQ ID NO: 144652 - RNA, 22 nt, Human
uuguguguacugguuaugggca

SEQ ID NO: 144653 - RNA, 22 nt, Human
agggccagggaagcuguauuuu

SEQ ID NO: 144654 - RNA, 21 nt, Human
aacugcuggucuuuucugucu

SEQ ID NO: 144655 - RNA, 18 nt, Human
ccugcagcccaggaggcc

SEQ ID NO: 144656 - RNA, 22 nt, Human
aggagaguucacacuggucaga

SEQ ID NO: 144657 - RNA, 22 nt, Human
agcuucuggaagccuggcagca

SEQ ID NO: 144658 - RNA, 22 nt, Human
cuguccuccggccaccuacagu

SEQ ID NO: 144659 - RNA, 22 nt, Human
caaggccaguccauuuuggaag

SEQ ID NO: 144660 - RNA, 22 nt, Human
auaucuuuuagagcaagcuugu

SEQ ID NO: 144661 - RNA, 22 nt, Human
cugggcacauuuugacuagugu

SEQ ID NO: 144662 - RNA, 22 nt, Human
gaugccuccaaaugagggcaga

SEQ ID NO: 144663 - RNA, 22 nt, Human
cuauuuucugucucuauagagu

SEQ ID NO: 144664 - RNA, 22 nt, Human
aguggcagagcaggugcuggaa

SEQ ID NO: 144665 - RNA, 22 nt, Human
ggagcuguuggcagcuaucuug

SEQ ID NO: 144666 - RNA, 21 nt, Human
agaaauguaucauucuuuucc

SEQ ID NO: 144667 - RNA, 22 nt, Human
agacagcauggagcugauaaca

SEQ ID NO: 144668 - RNA, 22 nt, Human
ccagcucuuuuggcugagugag

SEQ ID NO: 144669 - RNA, 23 nt, Human
uuacaguaggaguuggaaaacca

SEQ ID NO: 144670 - RNA, 22 nt, Human
gcacagcaauuucuauaagcuc

SEQ ID NO: 144671 - RNA, 22 nt, Human
auucacagggacaaugggagag

SEQ ID NO: 144672 - RNA, 23 nt, Human
uuugaaaguaucaacucgccuga

SEQ ID NO: 144673 - RNA, 22 nt, Human
ucaggcagcuccaggaauggua

SEQ ID NO: 144674 - RNA, 20 nt, Human
cugcugugugugccucagcc

SEQ ID NO: 144675 - RNA, 22 nt, Human
aggagaaagacuggacagccaa

SEQ ID NO: 144676 - RNA, 22 nt, Human
acagcagcuaaaggugucuccu

SEQ ID NO: 144677 - RNA, 22 nt, Human
ugucuguaagguguuuauguua

SEQ ID NO: 144678 - RNA, 22 nt, Human
cucuggagggaggcugagcugg

SEQ ID NO: 144679 - RNA, 22 nt, Human
gaugguuugguaaaaguauguu

SEQ ID NO: 144680 - RNA, 22 nt, Human
ucagccugcuccaagugcugcc

SEQ ID NO: 144681 - RNA, 22 nt, Human
gcuguguaggauccuguuguau

SEQ ID NO: 144682 - RNA, 22 nt, Human
auauauuuugcggucacguggc

SEQ ID NO: 144683 - RNA, 22 nt, Human
cgcugccaggucaccaggggua

SEQ ID NO: 144684 - RNA, 22 nt, Human
acagguggcuuauuggcugauu

SEQ ID NO: 144685 - RNA, 22 nt, Human
uaaggccauuauggugggcccg

SEQ ID NO: 144686 - RNA, 22 nt, Human
aggagcugcuuaaaugguuggu

SEQ ID NO: 144687 - RNA, 17 nt, Human
agaugcuggccacaugu

SEQ ID NO: 144688 - RNA, 22 nt, Human
acuuugugcccaacagaaagaa

SEQ ID NO: 144689 - RNA, 22 nt, Human
cugcagcugucucuacugggca

SEQ ID NO: 144690 - RNA, 22 nt, Human
ggagucagccugucagagugua

SEQ ID NO: 144691 - RNA, 22 nt, Human
aaaauuauagaucuagugccug

SEQ ID NO: 144692 - RNA, 22 nt, Human
ggcugcuguuucagagacuguu

SEQ ID NO: 144693 - RNA, 22 nt, Human
uugcauugaaaauauauuuuaa

SEQ ID NO: 144694 - RNA, 22 nt, Human
uaaggcauucucaugcugugaa

SEQ ID NO: 144695 - RNA, 22 nt, Human
caguacuuuucaaccaguauga

SEQ ID NO: 144696 - RNA, 22 nt, Human
ugucucagggcagcagcagggg

SEQ ID NO: 144697 - RNA, 20 nt, Human
caagcccucuuuagccugcc

SEQ ID NO: 144698 - RNA, 22 nt, Human
ucugcuuuagugcaaagucuua

SEQ ID NO: 144699 - RNA, 22 nt, Human
uuuaacagaugugaaauuuuca

SEQ ID NO: 144700 - RNA, 22 nt, Human
gagcugcccugagcuuugcaug

SEQ ID NO: 144701 - RNA, 22 nt, Human
ugcuccagugagcuggccaucc

SEQ ID NO: 144702 - RNA, 22 nt, Human
acugggaggcaucuggagcuga

SEQ ID NO: 144703 - RNA, 22 nt, Human
gagccaaggguugccauggaga

SEQ ID NO: 144704 - RNA, 22 nt, Human
ccugccagauccccugagcuga

SEQ ID NO: 144705 - RNA, 22 nt, Human
uaugaagauauaucugaucucu

SEQ ID NO: 144706 - RNA, 22 nt, Human
agcugccacagagccuggccag

SEQ ID NO: 144707 - RNA, 22 nt, Human
ggggggugcugaucaguggagc

SEQ ID NO: 144708 - RNA, 21 nt, Human
gcccagcaaggugagaaggcc

SEQ ID NO: 144709 - RNA, 22 nt, Human
uucaauucaauucuaaauauau

SEQ ID NO: 144710 - RNA, 23 nt, Human
uuacuuuugcaccaaccuaauau

SEQ ID NO: 144711 - RNA, 22 nt, Human
ucccagccuuucuuuucugcug

SEQ ID NO: 144712 - RNA, 22 nt, Human
ucucucugagcccugcuuuuuc

SEQ ID NO: 144713 - RNA, 22 nt, Human
uuauuauugugaccugagaaug

SEQ ID NO: 144714 - RNA, 23 nt, Human
ucucaggacacacaugucuauca

SEQ ID NO: 144715 - RNA, 22 nt, Human
gccuggccgcuccgagcuccgc

SEQ ID NO: 144716 - RNA, 22 nt, Human
gcucugagaggugcagcaguaa

SEQ ID NO: 144717 - RNA, 22 nt, Human
cagaagccugccucagaugcac

SEQ ID NO: 144718 - RNA, 22 nt, Human
agucucugggcaugguugugac

SEQ ID NO: 144719 - RNA, 22 nt, Human
ggcagggugccuggcuccuguu

SEQ ID NO: 144720 - RNA, 22 nt, Human
uugguuuacuaggauucaaauu

SEQ ID NO: 144721 - RNA, 22 nt, Human
cagagguacaagcuaaguuggg

SEQ ID NO: 144722 - RNA, 22 nt, Human
acaagagacaagagguucuucu

SEQ ID NO: 144723 - RNA, 22 nt, Human
agguaaggcuguaagcuaagcc

SEQ ID NO: 144724 - RNA, 22 nt, Human
cacagggcagaggguccguggc

SEQ ID NO: 144725 - RNA, 22 nt, Human
aguuucuaccgguacauucagg

SEQ ID NO: 144726 - RNA, 22 nt, Human
gcagaagucagaccaucugaau

SEQ ID NO: 144727 - RNA, 22 nt, Human
agcuuuauauuuaaugaauucu

SEQ ID NO: 144728 - RNA, 22 nt, Human
cucacaggcaucucaucaggcu

SEQ ID NO: 144729 - RNA, 22 nt, Human
cugucuguuuuaccuucuccag

SEQ ID NO: 144730 - RNA, 22 nt, Human
uuucauaaugucacagucaaaa

SEQ ID NO: 144731 - RNA, 22 nt, Human
gcagaggggaagcugaggaauu

SEQ ID NO: 144732 - RNA, 22 nt, Human
ucucuggaguauaaccagggau

SEQ ID NO: 144733 - RNA, 22 nt, Human
ccaaaguccacaguuuacauua

SEQ ID NO: 144734 - RNA, 22 nt, Human
ucagccagugccuugaucuugc

SEQ ID NO: 144735 - RNA, 22 nt, Human
ugagcugucugaauggugagga

SEQ ID NO: 144736 - RNA, 22 nt, Human
aguaucaucuccauuucacuga

SEQ ID NO: 144737 - RNA, 22 nt, Human
ucggagcuguagaugaaacccu

SEQ ID NO: 144738 - RNA, 22 nt, Human
ugucugucugcaagccagaaag

SEQ ID NO: 144739 - RNA, 22 nt, Human
aggugccaauuuucagugaaca

SEQ ID NO: 144740 - RNA, 22 nt, Human
cuggcuccacucccugccugac

SEQ ID NO: 144741 - RNA, 22 nt, Human
cuauuucaaggcccagauauga

SEQ ID NO: 144742 - RNA, 22 nt, Human
augaacacauguacacauuucu

SEQ ID NO: 144743 - RNA, 22 nt, Human
uuucuucagccuucacaaccug

SEQ ID NO: 144744 - RNA, 22 nt, Human
uuuucagugguaucuuuguaaa

SEQ ID NO: 144745 - RNA, 22 nt, Human
gcugcuguugauuuaguccaau

SEQ ID NO: 144746 - RNA, 22 nt, Human
uugucucuacagagaguaguag

SEQ ID NO: 144747 - RNA, 22 nt, Human
uggcugugguuuaucccaguuc

SEQ ID NO: 144748 - RNA, 19 nt, Human
ggcucagggcgcugccgcc

SEQ ID NO: 144749 - RNA, 22 nt, Human
cugccagcucgccacaaugaca

SEQ ID NO: 144750 - RNA, 23 nt, Human
aggcugcagaagaauagggucau

SEQ ID NO: 144751 - RNA, 22 nt, Human
ucagauggguuuugaaggaugu

SEQ ID NO: 144752 - RNA, 22 nt, Human
gcauacagagaggauguggcau

SEQ ID NO: 144753 - RNA, 22 nt, Human
guuacacaggaaaacauuagca

SEQ ID NO: 144754 - RNA, 22 nt, Human
guccuggguccccgcaggucag

SEQ ID NO: 144755 - RNA, 22 nt, Human
aucauucuaguccuuauggucu

SEQ ID NO: 144756 - RNA, 18 nt, Human
gucaccuggaucagauua

SEQ ID NO: 144757 - RNA, 22 nt, Human
cagagccaggccugcccucuuu

SEQ ID NO: 144758 - RNA, 22 nt, Human
ucaggauaaaauguaauggcaa

SEQ ID NO: 144759 - RNA, 22 nt, Human
cccuggagguggagguugcagg

SEQ ID NO: 144760 - RNA, 23 nt, Human
cuggccuccgacacuggccaaga

SEQ ID NO: 144761 - RNA, 22 nt, Human
uccauugucuuugguccuagcc

SEQ ID NO: 144762 - RNA, 22 nt, Human
ccuggaaggugaugguacagca

SEQ ID NO: 144763 - RNA, 22 nt, Human
ccuggcaggcuggggacagugc

SEQ ID NO: 144764 - RNA, 22 nt, Human
gaugcacuugccccuccucaga

SEQ ID NO: 144765 - RNA, 22 nt, Human
cuggagcucuccagagccccgu

SEQ ID NO: 144766 - RNA, 21 nt, Human
gcugccaccgcgugcuccagg

SEQ ID NO: 144767 - RNA, 22 nt, Human
acagcagagugugagauagcca

SEQ ID NO: 144768 - RNA, 22 nt, Human
uggcuuccuccagagcaggagg

SEQ ID NO: 144769 - RNA, 22 nt, Human
aguguuucuggcaaaugaaagu

SEQ ID NO: 144770 - RNA, 22 nt, Human
cuuaacauccugcauuuuucuu

SEQ ID NO: 144771 - RNA, 18 nt, Human
uuugcaaaggaaguaugg

SEQ ID NO: 144772 - RNA, 22 nt, Human
agaaauguauagugaauuuuuc

SEQ ID NO: 144773 - RNA, 19 nt, Human
ggcuggcaagugacagugu

SEQ ID NO: 144774 - RNA, 22 nt, Human
auuucccagcuuugaucaguuu

SEQ ID NO: 144775 - RNA, 22 nt, Human
cagcaagauuuuuaaagcaagg

SEQ ID NO: 144776 - RNA, 19 nt, Human
ucuuuucacgcauuuugaa

SEQ ID NO: 144777 - RNA, 22 nt, Human
uggccucuuacgacauagccuu

SEQ ID NO: 144778 - RNA, 22 nt, Human
aaaaugcaugagaaugugcucg

SEQ ID NO: 144779 - RNA, 22 nt, Human
ucucagagccuaacuaaccuaa

SEQ ID NO: 144780 - RNA, 22 nt, Human
gcuggcugaggucuagcucuuu

SEQ ID NO: 144781 - RNA, 22 nt, Human
cagagccagcccacuguucccg

SEQ ID NO: 144782 - RNA, 22 nt, Human
cugcugcugagagcucagccug

SEQ ID NO: 144783 - RNA, 22 nt, Human
cuuuacugccaugcauuuauaa

SEQ ID NO: 144784 - RNA, 22 nt, Human
aggcacuguggguguggccgga

SEQ ID NO: 144785 - RNA, 22 nt, Human
ccaggcugcucacaagcugccc

SEQ ID NO: 144786 - RNA, 22 nt, Human
uggcagcaauuagcuagagcug

SEQ ID NO: 144787 - RNA, 22 nt, Human
uugcauuguaggauguuagaag

SEQ ID NO: 144788 - RNA, 22 nt, Human
aguguuccuugcuuucccagag

SEQ ID NO: 144789 - RNA, 21 nt, Human
agcagccauuucacagagacu

SEQ ID NO: 144790 - RNA, 22 nt, Human
ugggcaggauaauaucucaugu

SEQ ID NO: 144791 - RNA, 22 nt, Human
ccacuugugaaauaaucaaaua

SEQ ID NO: 144792 - RNA, 22 nt, Human
gccaggcuggucuugaacuccu

SEQ ID NO: 144793 - RNA, 22 nt, Human
agccagugcaacagcagugaag

SEQ ID NO: 144794 - RNA, 22 nt, Human
auguggcuagggaauaaaauau

SEQ ID NO: 144795 - RNA, 22 nt, Human
ccuggagggcgccgcacagucc

SEQ ID NO: 144796 - RNA, 22 nt, Human
uccaugagggacacuggaugcu

SEQ ID NO: 144797 - RNA, 22 nt, Human
auguggcucacauagcuggaaa

SEQ ID NO: 144798 - RNA, 22 nt, Human
cacagguguucuugcagugaaa

SEQ ID NO: 144799 - RNA, 22 nt, Human
uggaaagaauuccuaugguuca

SEQ ID NO: 144800 - RNA, 22 nt, Human
uugcugaagugaagguauguuu

SEQ ID NO: 144801 - RNA, 22 nt, Human
ggugugccuggggcuuagcugc

SEQ ID NO: 144802 - RNA, 22 nt, Human
ggccuggaaugcuuuccuacca

SEQ ID NO: 144803 - RNA, 22 nt, Human
gccagagccacuuuugggugau

SEQ ID NO: 144804 - RNA, 22 nt, Human
agccacagcgaaccucucuucc

SEQ ID NO: 144805 - RNA, 22 nt, Human
guggauggauugaggcaguggg

SEQ ID NO: 144806 - RNA, 22 nt, Human
ccugucuguaucgguucagagu

SEQ ID NO: 144807 - RNA, 22 nt, Human
guggccuuuccugaagaaauga

SEQ ID NO: 144808 - RNA, 22 nt, Human
cuuuuuauagcuauguccuaug

SEQ ID NO: 144809 - RNA, 22 nt, Human
gggcugcuuauacugaugauaa

SEQ ID NO: 144810 - RNA, 22 nt, Human
uggccuggcccugaggcccugu

SEQ ID NO: 144811 - RNA, 22 nt, Human
ugccucugggugaccaaggagc

SEQ ID NO: 144812 - RNA, 22 nt, Human
cugugaguaaugaccugucuug

SEQ ID NO: 144813 - RNA, 22 nt, Human
uggcacugccuggcagggcccc

SEQ ID NO: 144814 - RNA, 22 nt, Human
cagcaggcugcgauugcucauu

SEQ ID NO: 144815 - RNA, 22 nt, Human
accagguggccccagcgugguu

SEQ ID NO: 144816 - RNA, 22 nt, Human
ugccagggcugcuacuggcuga

SEQ ID NO: 144817 - RNA, 22 nt, Human
ggcugagggccagggcuagucu

SEQ ID NO: 144818 - RNA, 22 nt, Human
aaguaaaagcuuuaccaugcgc

SEQ ID NO: 144819 - RNA, 22 nt, Human
uacagggguaacaguggggaau

SEQ ID NO: 144820 - RNA, 22 nt, Human
auauuuguuagagucuaugugu

SEQ ID NO: 144821 - RNA, 22 nt, Human
gagagcugucagcguagcaccg

SEQ ID NO: 144822 - RNA, 22 nt, Human
uaguuuuuucaacaaauggugc

SEQ ID NO: 144823 - RNA, 22 nt, Human
aacagaaaucauuuagggcucu

SEQ ID NO: 144824 - RNA, 22 nt, Human
ucugaggcuucagacuguacug

SEQ ID NO: 144825 - RNA, 22 nt, Human
agcugucuccagauacaggauu

SEQ ID NO: 144826 - RNA, 22 nt, Human
uccagugguacauggagacacu

SEQ ID NO: 144827 - RNA, 22 nt, Human
ucuccuggucaccucagaaguc

SEQ ID NO: 144828 - RNA, 22 nt, Human
cacuguaucuuuuccaaagucu

SEQ ID NO: 144829 - RNA, 22 nt, Human
uaaaugcaaugugcuuuaccag

SEQ ID NO: 144830 - RNA, 22 nt, Human
cuuauguauaauguuccacaua

SEQ ID NO: 144831 - RNA, 22 nt, Human
gcucuguguaaauguagggucc

SEQ ID NO: 144832 - RNA, 23 nt, Human
cccuggagcuagucugagcagag

SEQ ID NO: 144833 - RNA, 20 nt, Human
cugccaugauugauagagug

SEQ ID NO: 144834 - RNA, 20 nt, Human
gugugugcuccaugcaugcu

SEQ ID NO: 144835 - RNA, 22 nt, Human
uaagaacagugacagccaacau

SEQ ID NO: 144836 - RNA, 23 nt, Human
guggagccacaucacaggcuccu

SEQ ID NO: 144837 - RNA, 20 nt, Human
gcccaagguccagaaggggg

SEQ ID NO: 144838 - RNA, 22 nt, Human
cugggaggacaacuuggagcuc

SEQ ID NO: 144839 - RNA, 22 nt, Human
caaggccaguuucuccuaguca

SEQ ID NO: 144840 - RNA, 22 nt, Human
uaugcacacauguaugcaugug

SEQ ID NO: 144841 - RNA, 22 nt, Human
uggcagaguaggauggcccugu

SEQ ID NO: 144842 - RNA, 22 nt, Human
uauuuugucuucugcucaucac

SEQ ID NO: 144843 - RNA, 22 nt, Human
gugggccucuugaggguggcua

SEQ ID NO: 144844 - RNA, 22 nt, Human
ggaaggagggcggcaaugauga

SEQ ID NO: 144845 - RNA, 22 nt, Human
cagagugaaaacugagcucaaa

SEQ ID NO: 144846 - RNA, 22 nt, Human
uuuuuuaucuaugguaguacca

SEQ ID NO: 144847 - RNA, 22 nt, Human
auacaugucaucauauguuugu

SEQ ID NO: 144848 - RNA, 21 nt, Human
ugguuugcggccaaaguuaaa

SEQ ID NO: 144849 - RNA, 22 nt, Human
aggcuguggcccuggucuagca

SEQ ID NO: 144850 - RNA, 22 nt, Human
uccagagccuauauguucaacu

SEQ ID NO: 144851 - RNA, 22 nt, Human
ugggcagagaucuggaucaaac

SEQ ID NO: 144852 - RNA, 22 nt, Human
uaguuucuggguuggcuucuac

SEQ ID NO: 144853 - RNA, 22 nt, Human
ugguggccuugauggcaucugc

SEQ ID NO: 144854 - RNA, 22 nt, Human
gggcagcagcaggaggucucug

SEQ ID NO: 144855 - RNA, 22 nt, Human
agcagugggugacagagcugag

SEQ ID NO: 144856 - RNA, 20 nt, Human
uacauucaaaacaaacucug

SEQ ID NO: 144857 - RNA, 22 nt, Human
uccucuggggucagggcacuac

SEQ ID NO: 144858 - RNA, 22 nt, Human
acaguuucuccauuuacaccuu

SEQ ID NO: 144859 - RNA, 22 nt, Human
uaugaaacauucauacaaauaa

SEQ ID NO: 144860 - RNA, 22 nt, Human
ggagcacuauaauagagauuuu

SEQ ID NO: 144861 - RNA, 22 nt, Human
uacuguauuugauaagugaagu

SEQ ID NO: 144862 - RNA, 22 nt, Human
ggcugcugggaauaugccagcu

SEQ ID NO: 144863 - RNA, 22 nt, Human
ugucuguguccaaauuuccucu

SEQ ID NO: 144864 - RNA, 22 nt, Human
cuggccuuggugcuugcagaca

SEQ ID NO: 144865 - RNA, 23 nt, Human
aaaguugauuugcaguuuaagag

SEQ ID NO: 144866 - RNA, 22 nt, Human
ugaugggaggugcugcaggacc

SEQ ID NO: 144867 - RNA, 22 nt, Human
cuccagggaggucugcaggacu

SEQ ID NO: 144868 - RNA, 22 nt, Human
cagggcagugaagaacacacgu

SEQ ID NO: 144869 - RNA, 22 nt, Human
uucacaggaauguaggggucuu

SEQ ID NO: 144870 - RNA, 22 nt, Human
aaacauuugcaacucgguuugg

SEQ ID NO: 144871 - RNA, 22 nt, Human
agucucugcaugaugcagcaca

SEQ ID NO: 144872 - RNA, 22 nt, Human
guuugcauguauuaagucaaua

SEQ ID NO: 144873 - RNA, 21 nt, Human
uuguaugcauacauacacaca

SEQ ID NO: 144874 - RNA, 23 nt, Human
uugauuucaaaugcagagaacac

SEQ ID NO: 144875 - RNA, 22 nt, Human
cucugagagcggucuguggcuu

SEQ ID NO: 144876 - RNA, 22 nt, Human
acuuuucucccuccugccuuca

SEQ ID NO: 144877 - RNA, 22 nt, Human
uacauaguuccauuuacaggaa

SEQ ID NO: 144878 - RNA, 22 nt, Human
aacaaauggaacacaaaucuuu

SEQ ID NO: 144879 - RNA, 22 nt, Human
ucugagaguccaucuccaagcc

SEQ ID NO: 144880 - RNA, 22 nt, Human
cugagaggaugcugcaguggag

SEQ ID NO: 144881 - RNA, 22 nt, Human
aggcugugggugauuuacugug

SEQ ID NO: 144882 - RNA, 22 nt, Human
agaacagcagcacgucaagcug

SEQ ID NO: 144883 - RNA, 22 nt, Human
uggcucugcgucuguucguggg

SEQ ID NO: 144884 - RNA, 22 nt, Human
caaaugcaugagaaauaagagg

SEQ ID NO: 144885 - RNA, 22 nt, Human
cccaggaguuugaguucagcau

SEQ ID NO: 144886 - RNA, 19 nt, Human
cagaguacaccagauagga

SEQ ID NO: 144887 - RNA, 18 nt, Human
acaaaggucugcaagacc

SEQ ID NO: 144888 - RNA, 22 nt, Human
cucugugccucaguuuucuucu

SEQ ID NO: 144889 - RNA, 22 nt, Human
gcugccuuuugcuccucccacc

SEQ ID NO: 144890 - RNA, 22 nt, Human
cugggcaguuuuacaucauugc

SEQ ID NO: 144891 - RNA, 22 nt, Human
aggagagaauguuccaggcuug

SEQ ID NO: 144892 - RNA, 20 nt, Human
gagauuuccaaucaugccca

SEQ ID NO: 144893 - RNA, 22 nt, Human
gcuggccugaccagccacaggc

SEQ ID NO: 144894 - RNA, 22 nt, Human
uguguuccuucgucuucccuuc

SEQ ID NO: 144895 - RNA, 22 nt, Human
uugcugaauugaauccuuuggu

SEQ ID NO: 144896 - RNA, 22 nt, Human
guuauguacuuuuuaaaucuug

SEQ ID NO: 144897 - RNA, 22 nt, Human
augaaacacacacgcgcauacu

SEQ ID NO: 144898 - RNA, 22 nt, Human
ucuggcucugacacuacuguua

SEQ ID NO: 144899 - RNA, 22 nt, Human
agucucugagguucagaugccu

SEQ ID NO: 144900 - RNA, 21 nt, Human
ucuuuucucagcuuugugguu

SEQ ID NO: 144901 - RNA, 22 nt, Human
acuuucucaggaauucacagac

SEQ ID NO: 144902 - RNA, 22 nt, Human
ucagcagucacauguuguccca

SEQ ID NO: 144903 - RNA, 22 nt, Human
agcuggguggagggcccacggu

SEQ ID NO: 144904 - RNA, 22 nt, Human
cuggcuguuucaaauguauaga

SEQ ID NO: 144905 - RNA, 22 nt, Human
auuacaguagcaaaagaccgga

SEQ ID NO: 144906 - RNA, 22 nt, Human
cacagcagagggagccauugaa

SEQ ID NO: 144907 - RNA, 22 nt, Human
auuuacagacguggauuagugc

SEQ ID NO: 144908 - RNA, 20 nt, Human
ccuggcuuugcaucugugau

SEQ ID NO: 144909 - RNA, 21 nt, Human
uuugcauuuuacaugugggga

SEQ ID NO: 144910 - RNA, 22 nt, Human
agcugcccuggcggagcugcuc

SEQ ID NO: 144911 - RNA, 22 nt, Human
agcagaaccacagcacuguuga

SEQ ID NO: 144912 - RNA, 22 nt, Human
agguccagcuguugcagccucc

SEQ ID NO: 144913 - RNA, 17 nt, Human
uccuucagggccucaca

SEQ ID NO: 144914 - RNA, 22 nt, Human
uuagcaguuuccauuuugguca

SEQ ID NO: 144915 - RNA, 22 nt, Human
gucucucugcuaggccuccagu

SEQ ID NO: 144916 - RNA, 22 nt, Human
auacaacuuuacaugcaauucc

SEQ ID NO: 144917 - RNA, 22 nt, Human
acauagcuuaaaugagaagaua

SEQ ID NO: 144918 - RNA, 23 nt, Human
agagcuuucuaaaauguaaaucu

SEQ ID NO: 144919 - RNA, 22 nt, Human
gggugacauuucccaaugagcc

SEQ ID NO: 144920 - RNA, 22 nt, Human
ugccuaggaaaccucaugcuuc

SEQ ID NO: 144921 - RNA, 22 nt, Human
gcugcccauuccacuggauggu

SEQ ID NO: 144922 - RNA, 22 nt, Human
ucuagaaaaaaacugcugugga

SEQ ID NO: 144923 - RNA, 22 nt, Human
augugugguuuaagaauugaau

SEQ ID NO: 144924 - RNA, 22 nt, Human
ucacuucacacccacuaucaug

SEQ ID NO: 144925 - RNA, 22 nt, Human
aaagauuuaugaaguucaauua

SEQ ID NO: 144926 - RNA, 22 nt, Human
guggccugccgugugguauggg

SEQ ID NO: 144927 - RNA, 22 nt, Human
agggcugcugaggaagccuugc

SEQ ID NO: 144928 - RNA, 20 nt, Human
aauguauauuuuaugccagg

SEQ ID NO: 144929 - RNA, 19 nt, Human
cccaaggcccugggcaggc

SEQ ID NO: 144930 - RNA, 22 nt, Human
uugcauugaugucuauacgcug

SEQ ID NO: 144931 - RNA, 22 nt, Human
ugagagugauugguucgaaugu

SEQ ID NO: 144932 - RNA, 22 nt, Human
cccaaggcauggcaugguggca

SEQ ID NO: 144933 - RNA, 22 nt, Human
ugucauuuucuaaucuguuguc

SEQ ID NO: 144934 - RNA, 22 nt, Human
aucaaaguuucccagaaguugu

SEQ ID NO: 144935 - RNA, 22 nt, Human
ugacagaaagaauaugucaauc

SEQ ID NO: 144936 - RNA, 22 nt, Human
agagccugaggccaggaaaaug

SEQ ID NO: 144937 - RNA, 22 nt, Human
cccucccaagcacucugacaua

SEQ ID NO: 144938 - RNA, 22 nt, Human
cagagcagaaaccugggugauu

SEQ ID NO: 144939 - RNA, 22 nt, Human
auuucugauaaacguaagcugc

SEQ ID NO: 144940 - RNA, 22 nt, Human
acuuuacaaacuccucacuguu

SEQ ID NO: 144941 - RNA, 22 nt, Human
cagcugccugcaacacaagcuu

SEQ ID NO: 144942 - RNA, 22 nt, Human
ugaggggagaagcagcagccug

SEQ ID NO: 144943 - RNA, 22 nt, Human
gucuguggaguugcuugcugga

SEQ ID NO: 144944 - RNA, 22 nt, Human
uugaaguuguaguucagugaag

SEQ ID NO: 144945 - RNA, 22 nt, Human
ccugggcaaaugccagagacaa

SEQ ID NO: 144946 - RNA, 22 nt, Human
gcugugcagccaagugccucug

SEQ ID NO: 144947 - RNA, 22 nt, Human
gcaggcuggaggcuguucuggg

SEQ ID NO: 144948 - RNA, 22 nt, Human
gucucccacuuucuggccucuu

SEQ ID NO: 144949 - RNA, 22 nt, Human
aauaugcauuaacuguguacau

SEQ ID NO: 144950 - RNA, 19 nt, Human
uccuucagucagaucuggg

SEQ ID NO: 144951 - RNA, 22 nt, Human
aggccuagaggaauggccaggg

SEQ ID NO: 144952 - RNA, 22 nt, Human
agaagcugccuacaugaccagc

SEQ ID NO: 144953 - RNA, 22 nt, Human
ucuuuccucugagcuccuguag

SEQ ID NO: 144954 - RNA, 22 nt, Human
ucagcuccucaugcaggggaua

SEQ ID NO: 144955 - RNA, 22 nt, Human
uuucacaaugcaauccuacuuc

SEQ ID NO: 144956 - RNA, 22 nt, Human
aaauguauugcauaggauauuu

SEQ ID NO: 144957 - RNA, 22 nt, Human
cccagcagccuggauguucuuu

SEQ ID NO: 144958 - RNA, 22 nt, Human
uauuucugucagccagauaugg

SEQ ID NO: 144959 - RNA, 22 nt, Human
caagagcugugaccucauucac

SEQ ID NO: 144960 - RNA, 22 nt, Human
ccugggagguggagguugcagu

SEQ ID NO: 144961 - RNA, 22 nt, Human
ggcugcugguggaaugguaggc

SEQ ID NO: 144962 - RNA, 22 nt, Human
cuacagacccaccuuggaagaa

SEQ ID NO: 144963 - RNA, 20 nt, Human
gagauggacagaugaagggg

SEQ ID NO: 144964 - RNA, 16 nt, Human
cuguggcucccagguu

SEQ ID NO: 144965 - RNA, 22 nt, Human
gagcccuggcagucugggaugg

SEQ ID NO: 144966 - RNA, 22 nt, Human
cagggcugagaauuuagagaca

SEQ ID NO: 144967 - RNA, 22 nt, Human
gggacuucauagcuaggcacuu

SEQ ID NO: 144968 - RNA, 22 nt, Human
cucuccagccacagaagcugcu

SEQ ID NO: 144969 - RNA, 22 nt, Human
uugauuuuuccagcuucuagag

SEQ ID NO: 144970 - RNA, 22 nt, Human
aagauguaucaguuaagucuuc

SEQ ID NO: 144971 - RNA, 22 nt, Human
ugggauggcauccugggccuug

SEQ ID NO: 144972 - RNA, 22 nt, Human
gcucaggauuucauccaugugu

SEQ ID NO: 144973 - RNA, 22 nt, Human
gccuugcuuugcuucuggacag

SEQ ID NO: 144974 - RNA, 22 nt, Human
gaggucaauaauaugugcuuua

SEQ ID NO: 144975 - RNA, 22 nt, Human
uucacauuggugauauguuucu

SEQ ID NO: 144976 - RNA, 22 nt, Human
uacaauauguggccuuuuguga

SEQ ID NO: 144977 - RNA, 22 nt, Human
uaggagaggugaauggcacacu

SEQ ID NO: 144978 - RNA, 22 nt, Human
gaguggggucugggcaucaguc

SEQ ID NO: 144979 - RNA, 18 nt, Human
cccacggugcuguagggc

SEQ ID NO: 144980 - RNA, 22 nt, Human
ccaagaugaucuuuacaguguu

SEQ ID NO: 144981 - RNA, 22 nt, Human
gggugaggagcugccagucaug

SEQ ID NO: 144982 - RNA, 22 nt, Human
ucagaggauugccucagcgagc

SEQ ID NO: 144983 - RNA, 19 nt, Human
ugagcuggcugagccucuc

SEQ ID NO: 144984 - RNA, 22 nt, Human
acaaaguccugguguauggcca

SEQ ID NO: 144985 - RNA, 18 nt, Human
acauuucucucugcguga

SEQ ID NO: 144986 - RNA, 22 nt, Human
uggccuuccuggugacucauga

SEQ ID NO: 144987 - RNA, 22 nt, Human
gccugccucaaaaucccaguuc

SEQ ID NO: 144988 - RNA, 22 nt, Human
agaggccacuuugccugugaug

SEQ ID NO: 144989 - RNA, 22 nt, Human
ggaaggaggggcaaagcaguuc

SEQ ID NO: 144990 - RNA, 22 nt, Human
cucugugggggagaggcagcug

SEQ ID NO: 144991 - RNA, 22 nt, Human
aucugcuugaaugagcaacagg

SEQ ID NO: 144992 - RNA, 22 nt, Human
auggcuguguuagaugcuaagu

SEQ ID NO: 144993 - RNA, 22 nt, Human
augggaggaugcucgggugcuc

SEQ ID NO: 144994 - RNA, 22 nt, Human
auggauaagucaaagaguaucc

SEQ ID NO: 144995 - RNA, 22 nt, Human
aggcccaguuauccuacuuguu

SEQ ID NO: 144996 - RNA, 22 nt, Human
gucucagaccacccucuuuggc

SEQ ID NO: 144997 - RNA, 22 nt, Human
gcagaaggucuggcacuucagg

SEQ ID NO: 144998 - RNA, 21 nt, Human
acagaacuguauagugauaaa

SEQ ID NO: 144999 - RNA, 22 nt, Human
auggcugugugacugaguucua

SEQ ID NO: 145000 - RNA, 22 nt, Human
ugucccagggaaggcccagcac

SEQ ID NO: 145001 - RNA, 22 nt, Human
gacaggguacgggcuaggcaca

SEQ ID NO: 145002 - RNA, 22 nt, Human
uaaaaguggauaagcuguagga

SEQ ID NO: 145003 - RNA, 22 nt, Human
uccagcagggaauuaguagucu

SEQ ID NO: 145004 - RNA, 22 nt, Human
ccagucccgcaugguccagaau

SEQ ID NO: 145005 - RNA, 22 nt, Human
aaucaguuaaauauugaguaca

SEQ ID NO: 145006 - RNA, 23 nt, Human
aggauccugguacaggagcagag

SEQ ID NO: 145007 - RNA, 22 nt, Human
uacuguaugaauuauguuauuu

SEQ ID NO: 145008 - RNA, 22 nt, Human
aauucuagcauugugaaaauau

SEQ ID NO: 145009 - RNA, 22 nt, Human
guguccacggcugagaaugauu

SEQ ID NO: 145010 - RNA, 22 nt, Human
ccucuccaguuuuaacgugacc

SEQ ID NO: 145011 - RNA, 22 nt, Human
gggcccagcgugguuccaucug

SEQ ID NO: 145012 - RNA, 17 nt, Human
uucucuuccuggauagu

SEQ ID NO: 145013 - RNA, 22 nt, Human
gucucagagagcuacucucuua

SEQ ID NO: 145014 - RNA, 22 nt, Human
gcagagccaggagagacccuug

SEQ ID NO: 145015 - RNA, 22 nt, Human
cuggacuuuggcccaucugcca

SEQ ID NO: 145016 - RNA, 23 nt, Human
ugggggugcacgggccacaucuu

SEQ ID NO: 145017 - RNA, 22 nt, Human
gagagcugugguuugaccaggc

SEQ ID NO: 145018 - RNA, 22 nt, Human
ggcugccugccuccaagccggg

SEQ ID NO: 145019 - RNA, 19 nt, Human
caagugaagccugggaugg

SEQ ID NO: 145020 - RNA, 20 nt, Human
caccaggcgcucugagaaca

SEQ ID NO: 145021 - RNA, 22 nt, Human
cuuccucaugugcaaugcaagc

SEQ ID NO: 145022 - RNA, 22 nt, Human
uggcucagcugacucggcuucu

SEQ ID NO: 145023 - RNA, 22 nt, Human
augaaggauggcuggcugcccu

SEQ ID NO: 145024 - RNA, 19 nt, Human
ugaagcaggcagagaagau

SEQ ID NO: 145025 - RNA, 22 nt, Human
gggcugcugcccaggaggcacc

SEQ ID NO: 145026 - RNA, 22 nt, Human
ggucccaguugcccaggucagg

SEQ ID NO: 145027 - RNA, 22 nt, Human
uaggagcuaaaauauuuuauau

SEQ ID NO: 145028 - RNA, 22 nt, Human
auguguaugcaugcacuaagau

SEQ ID NO: 145029 - RNA, 20 nt, Human
ggcugccuccuuccuuuccu

SEQ ID NO: 145030 - RNA, 22 nt, Human
ucagggcagccuaaggcaccuc

SEQ ID NO: 145031 - RNA, 22 nt, Human
aucagcaaucaaauugcagagu

SEQ ID NO: 145032 - RNA, 22 nt, Human
acacugaagagcacuuucaaag

SEQ ID NO: 145033 - RNA, 22 nt, Human
aguguccaacucagcuugucaa

SEQ ID NO: 145034 - RNA, 22 nt, Human
gguccuggaaauugacggaaag

SEQ ID NO: 145035 - RNA, 22 nt, Human
accuuucaaaguggcuaucacu

SEQ ID NO: 145036 - RNA, 18 nt, Human
aggccugggaagcugagg

SEQ ID NO: 145037 - RNA, 22 nt, Human
cuguggcucagcacggggucag

SEQ ID NO: 145038 - RNA, 22 nt, Human
guuacagucaggagauauuuug

SEQ ID NO: 145039 - RNA, 22 nt, Human
ucccuggccauuccucuaggcc

SEQ ID NO: 145040 - RNA, 21 nt, Human
cacugcagccuugaccugggc

SEQ ID NO: 145041 - RNA, 22 nt, Human
gcuggcuugauaguuucugcuu

SEQ ID NO: 145042 - RNA, 22 nt, Human
ugagcaguaggucugaauagug

SEQ ID NO: 145043 - RNA, 18 nt, Human
acaaauguagugucuuaa

SEQ ID NO: 145044 - RNA, 22 nt, Human
gcugccugaucauacaccaggg

SEQ ID NO: 145045 - RNA, 22 nt, Human
uauuauuaaauggcagaauuuu

SEQ ID NO: 145046 - RNA, 22 nt, Human
uuuuaaguuaauauaauugagg

SEQ ID NO: 145047 - RNA, 22 nt, Human
ggccauggaccccgagcugacc

SEQ ID NO: 145048 - RNA, 22 nt, Human
agugaaauagcauuuaugaagc

SEQ ID NO: 145049 - RNA, 22 nt, Human
aggucauuuccuuagaggcaga

SEQ ID NO: 145050 - RNA, 22 nt, Human
ugugcugugggacucaggcucc

SEQ ID NO: 145051 - RNA, 22 nt, Human
ccagcagaagcucccgcugggu

SEQ ID NO: 145052 - RNA, 22 nt, Human
cuacccaggcuggagugcagua

SEQ ID NO: 145053 - RNA, 22 nt, Human
ccucugcucccuggugucugag

SEQ ID NO: 145054 - RNA, 22 nt, Human
acagaauagucagcuguaggcc

SEQ ID NO: 145055 - RNA, 19 nt, Human
agggcugcucuggccuggg

SEQ ID NO: 145056 - RNA, 22 nt, Human
cagagccaugguaugggcuugu

SEQ ID NO: 145057 - RNA, 22 nt, Human
acugucaccaucagagcgggaa

SEQ ID NO: 145058 - RNA, 21 nt, Human
gcugucucuggcuccugggaa

SEQ ID NO: 145059 - RNA, 22 nt, Human
aagucauuaucucuucuaaucu

SEQ ID NO: 145060 - RNA, 17 nt, Human
ugccagccugucccagg

SEQ ID NO: 145061 - RNA, 19 nt, Human
gcugggugaggucguugga

SEQ ID NO: 145062 - RNA, 22 nt, Human
uguuuacaaggaguuuauauug

SEQ ID NO: 145063 - RNA, 22 nt, Human
ucuucucaguuucucuaggaug

SEQ ID NO: 145064 - RNA, 23 nt, Human
gugauuucagggaacagaaucag

SEQ ID NO: 145065 - RNA, 22 nt, Human
ugcagaagcagagccgguggcc

SEQ ID NO: 145066 - RNA, 22 nt, Human
acaaaguuugugguauuccaag

SEQ ID NO: 145067 - RNA, 22 nt, Human
cagcugccacaccucuuucucu

SEQ ID NO: 145068 - RNA, 21 nt, Human
agcuggugucagagcucuggg

SEQ ID NO: 145069 - RNA, 22 nt, Human
acagaauugaaaguauaaucug

SEQ ID NO: 145070 - RNA, 21 nt, Human
acaugucucuaaucucaguga

SEQ ID NO: 145071 - RNA, 22 nt, Human
ucugggaauuuauuggcacuuu

SEQ ID NO: 145072 - RNA, 22 nt, Human
cauuuucagcacccaucugaaa

SEQ ID NO: 145073 - RNA, 22 nt, Human
agccccaguaagggagggccug

SEQ ID NO: 145074 - RNA, 22 nt, Human
gucccuggggaaucagcuggag

SEQ ID NO: 145075 - RNA, 21 nt, Human
ccaggguccagcugccauggu

SEQ ID NO: 145076 - RNA, 20 nt, Human
ucugcccaccccggcuccca

SEQ ID NO: 145077 - RNA, 22 nt, Human
ccacccagccagaugcaggaag

SEQ ID NO: 145078 - RNA, 22 nt, Human
guuugcauuccaauuuagggga

SEQ ID NO: 145079 - RNA, 22 nt, Human
uugauuaaacaggcauauucaa

SEQ ID NO: 145080 - RNA, 22 nt, Human
aaaaaugucauuauggaacuga

SEQ ID NO: 145081 - RNA, 22 nt, Human
cugggcagugguggcccuuccc

SEQ ID NO: 145082 - RNA, 22 nt, Human
uucacagacauugcagacugaa

SEQ ID NO: 145083 - RNA, 22 nt, Human
gcuuuacauaaacauuuauuau

SEQ ID NO: 145084 - RNA, 22 nt, Human
cugucaggggcggguggagcgg

SEQ ID NO: 145085 - RNA, 22 nt, Human
gaacagcugcuagagaucugug

SEQ ID NO: 145086 - RNA, 22 nt, Human
cauggccugccuccuccuggug

SEQ ID NO: 145087 - RNA, 22 nt, Human
uuuauuugucuugccauuuagu

SEQ ID NO: 145088 - RNA, 22 nt, Human
uggcucuggggacaguaagucc

SEQ ID NO: 145089 - RNA, 22 nt, Human
cagcugccccauaaaucacagu

SEQ ID NO: 145090 - RNA, 22 nt, Human
caggcacugugcaagggucucg

SEQ ID NO: 145091 - RNA, 22 nt, Human
uuaucacuuaugagcuuuuugc

SEQ ID NO: 145092 - RNA, 22 nt, Human
cucacuguuuaauagcuggauc

SEQ ID NO: 145093 - RNA, 22 nt, Human
cucagaaucugccaaguucagg

SEQ ID NO: 145094 - RNA, 17 nt, Human
uguuccauuugaccacc

SEQ ID NO: 145095 - RNA, 22 nt, Human
acguuuucuagagaauaugcag

SEQ ID NO: 145096 - RNA, 22 nt, Human
ggccuugggcagacacgucaca

SEQ ID NO: 145097 - RNA, 22 nt, Human
uugcuuccaguccaagucuguu

SEQ ID NO: 145098 - RNA, 22 nt, Human
gagagugucgggggccccagga

SEQ ID NO: 145099 - RNA, 22 nt, Human
acucucucacagcuuggcugau

SEQ ID NO: 145100 - RNA, 22 nt, Human
agaaauguuacaguuguuauuu

SEQ ID NO: 145101 - RNA, 22 nt, Human
gcuggcugcgucaucacagggc

SEQ ID NO: 145102 - RNA, 22 nt, Human
acagccuggacuggcucucugc

SEQ ID NO: 145103 - RNA, 22 nt, Human
aaauacagaguugcuuaaaagc

SEQ ID NO: 145104 - RNA, 21 nt, Human
aggcuguccuuugccagcccu

SEQ ID NO: 145105 - RNA, 22 nt, Human
acauuuacagugcuagacaauc

SEQ ID NO: 145106 - RNA, 22 nt, Human
gaguuauuaauggcugaguuug

SEQ ID NO: 145107 - RNA, 22 nt, Human
cagggacaauggcagagccuga

SEQ ID NO: 145108 - RNA, 22 nt, Human
acugaaagauaaaucaguuagc

SEQ ID NO: 145109 - RNA, 22 nt, Human
cugcucuggucucuucauguuu

SEQ ID NO: 145110 - RNA, 22 nt, Human
ccugccagcccgcguucaugcc

SEQ ID NO: 145111 - RNA, 22 nt, Human
uggaggaaaauuacuggggucu

SEQ ID NO: 145112 - RNA, 22 nt, Human
ugcugucaguuggcaggaugag

SEQ ID NO: 145113 - RNA, 22 nt, Human
caggauggccccggggcugugc

SEQ ID NO: 145114 - RNA, 22 nt, Human
augggaggcagacacuaaguuc

SEQ ID NO: 145115 - RNA, 22 nt, Human
uguuuaaucuauaaaauggaga

SEQ ID NO: 145116 - RNA, 22 nt, Human
aaaugcacaggagaaccaauuc

SEQ ID NO: 145117 - RNA, 22 nt, Human
agcccagaggcugggcgugcau

SEQ ID NO: 145118 - RNA, 22 nt, Human
uuucauugcagagucugugugc

SEQ ID NO: 145119 - RNA, 22 nt, Human
auuucacucauucauguuacuu

SEQ ID NO: 145120 - RNA, 22 nt, Human
ugugcagggaagggcaugcuau

SEQ ID NO: 145121 - RNA, 22 nt, Human
gugucccaggccucuggaauua

SEQ ID NO: 145122 - RNA, 22 nt, Human
aagcugccuugcugaggagaaa

SEQ ID NO: 145123 - RNA, 22 nt, Human
caucagcacuaugauuaaagua

SEQ ID NO: 145124 - RNA, 22 nt, Human
uacacuuuuuacuacagauucu

SEQ ID NO: 145125 - RNA, 21 nt, Human
cuaacuuugaguccuggcccc

SEQ ID NO: 145126 - RNA, 22 nt, Human
cccaggaggcagagcuugcagu

SEQ ID NO: 145127 - RNA, 22 nt, Human
aggccagguuccucaaucuuga

SEQ ID NO: 145128 - RNA, 22 nt, Human
cagccagaaccuaggaugagcu

SEQ ID NO: 145129 - RNA, 23 nt, Human
aucucucuuuauucuuggggaua

SEQ ID NO: 145130 - RNA, 23 nt, Human
ggcuggcccggggcugcuccuga

SEQ ID NO: 145131 - RNA, 22 nt, Human
cuuuacagauaggaacuacuca

SEQ ID NO: 145132 - RNA, 22 nt, Human
caguaguaguuaaacuguguau

SEQ ID NO: 145133 - RNA, 22 nt, Human
uuucaguguaucuuccaaaagc

SEQ ID NO: 145134 - RNA, 22 nt, Human
ugauuuccacgugcacccaggu

SEQ ID NO: 145135 - RNA, 21 nt, Human
ccagcagcucaaggaucucuu

SEQ ID NO: 145136 - RNA, 21 nt, Human
cucuugugucagagccagagg

SEQ ID NO: 145137 - RNA, 22 nt, Human
aagagcauauuaauaguggaga

SEQ ID NO: 145138 - RNA, 22 nt, Human
cucacugacgaggaagcugaga

SEQ ID NO: 145139 - RNA, 22 nt, Human
cugucuccuccacugcauggga

SEQ ID NO: 145140 - RNA, 22 nt, Human
cuggagccggaccagggacggu

SEQ ID NO: 145141 - RNA, 22 nt, Human
gggacuggcacagggcugggag

SEQ ID NO: 145142 - RNA, 22 nt, Human
uaccaguaauaguaugugagau

SEQ ID NO: 145143 - RNA, 22 nt, Human
ccuggaaguuggagguugcagu

SEQ ID NO: 145144 - RNA, 22 nt, Human
uuuauguaauuucauaggugug

SEQ ID NO: 145145 - RNA, 22 nt, Human
aguguuucccaguaggaugaaa

SEQ ID NO: 145146 - RNA, 23 nt, Human
ucacagggcacuggcugggguug

SEQ ID NO: 145147 - RNA, 22 nt, Human
uauaguaaaauuuucauuuaug

SEQ ID NO: 145148 - RNA, 18 nt, Human
auuucucuggggugauuc

SEQ ID NO: 145149 - RNA, 19 nt, Human
acauuuaaauucagaucuc

SEQ ID NO: 145150 - RNA, 22 nt, Human
gcugcucugcuguguaagcagg

SEQ ID NO: 145151 - RNA, 22 nt, Human
ggugaagggccuuaggagacag

SEQ ID NO: 145152 - RNA, 22 nt, Human
caguauaugcucuuucaucaaa

SEQ ID NO: 145153 - RNA, 22 nt, Human
gugacagaguuuuagaucucau

SEQ ID NO: 145154 - RNA, 22 nt, Human
auaaggcacacauagauagggu

SEQ ID NO: 145155 - RNA, 22 nt, Human
uuaugcuaagugcaacaagcca

SEQ ID NO: 145156 - RNA, 19 nt, Human
ucgagucaagacacuaggc

SEQ ID NO: 145157 - RNA, 22 nt, Human
gauucugagcugguguuuuacg

SEQ ID NO: 145158 - RNA, 22 nt, Human
ucacaguaucagguggagugga

SEQ ID NO: 145159 - RNA, 22 nt, Human
ccaaagagcuagaauuauaggc

SEQ ID NO: 145160 - RNA, 22 nt, Human
agguacagggugaaaguuuaug

SEQ ID NO: 145161 - RNA, 22 nt, Human
guccuggcccacuggcaggcug

SEQ ID NO: 145162 - RNA, 22 nt, Human
cuggcagccaagugggauacuc

SEQ ID NO: 145163 - RNA, 22 nt, Human
ucuucuuccucauuuauacaua

SEQ ID NO: 145164 - RNA, 17 nt, Human
cagugcagagcccuuuc

SEQ ID NO: 145165 - RNA, 22 nt, Human
uacaguaguaucuucauuuguu

SEQ ID NO: 145166 - RNA, 22 nt, Human
ucccaggauguuggcggcaggu

SEQ ID NO: 145167 - RNA, 20 nt, Human
gccugagcuauugccaggau

SEQ ID NO: 145168 - RNA, 22 nt, Human
caggaacacaaugagucucaaa

SEQ ID NO: 145169 - RNA, 22 nt, Human
agagaugaaaaguggagacugg

SEQ ID NO: 145170 - RNA, 22 nt, Human
agcauuuauuucuuagaaauug

SEQ ID NO: 145171 - RNA, 20 nt, Human
aaucagaaagugugagcucu

SEQ ID NO: 145172 - RNA, 22 nt, Human
gaugcacagugacccugccagu

SEQ ID NO: 145173 - RNA, 22 nt, Human
caggagaagguuuggagugcag

SEQ ID NO: 145174 - RNA, 22 nt, Human
ucugcucuaguugcuuccugcc

SEQ ID NO: 145175 - RNA, 20 nt, Human
cuucuucaguaguuuguucu

SEQ ID NO: 145176 - RNA, 22 nt, Human
gcucaggaaggcucaaccagga

SEQ ID NO: 145177 - RNA, 22 nt, Human
auuauuuuaugugcggccugau

SEQ ID NO: 145178 - RNA, 22 nt, Human
uuuagcuucaguucuagcuucu

SEQ ID NO: 145179 - RNA, 22 nt, Human
uguacacaauucuuaacauaca

SEQ ID NO: 145180 - RNA, 22 nt, Human
uggcucaguuaggucagaaaca

SEQ ID NO: 145181 - RNA, 22 nt, Human
ccucccuggccagagcagcagc

SEQ ID NO: 145182 - RNA, 22 nt, Human
acacagggcugcgccugacccc

SEQ ID NO: 145183 - RNA, 22 nt, Human
ucucagagauuuauggaaaacu

SEQ ID NO: 145184 - RNA, 22 nt, Human
ugaaggcccuaucuccauauac

SEQ ID NO: 145185 - RNA, 22 nt, Human
aguggaccagaagacugaagcu

SEQ ID NO: 145186 - RNA, 22 nt, Human
aaaaaaucagaucuuugguuaa

SEQ ID NO: 145187 - RNA, 22 nt, Human
gcucuggguagccacugccugg

SEQ ID NO: 145188 - RNA, 22 nt, Human
cucaggauauugggcuggagca

SEQ ID NO: 145189 - RNA, 22 nt, Human
gccagcagccacagaagucacu

SEQ ID NO: 145190 - RNA, 22 nt, Human
aaugggagagaacacaaagucc

SEQ ID NO: 145191 - RNA, 18 nt, Human
cuccagggaacucaguca

SEQ ID NO: 145192 - RNA, 22 nt, Human
gugguaauuuaauccuacacug

SEQ ID NO: 145193 - RNA, 21 nt, Human
acagaugggaugagcacacug

SEQ ID NO: 145194 - RNA, 19 nt, Human
uucacaauuaugaaauuag

SEQ ID NO: 145195 - RNA, 22 nt, Human
ggugccagccuagugcaguggu

SEQ ID NO: 145196 - RNA, 22 nt, Human
auggggcugggauucuccucgg

SEQ ID NO: 145197 - RNA, 20 nt, Human
gcagagccucacugcaaggg

SEQ ID NO: 145198 - RNA, 22 nt, Human
ucauuauuuuggacuggagugu

SEQ ID NO: 145199 - RNA, 22 nt, Human
acagcagcaauagcagugacau

SEQ ID NO: 145200 - RNA, 22 nt, Human
uugcaccaaaugaguuaaaauu

SEQ ID NO: 145201 - RNA, 22 nt, Human
gagcucccuggagguucagaua

SEQ ID NO: 145202 - RNA, 19 nt, Human
uguagcaguuuaaaacaac

SEQ ID NO: 145203 - RNA, 22 nt, Human
ucuggcuccacaccucacugca

SEQ ID NO: 145204 - RNA, 22 nt, Human
uuuucuauucauugucuauggu

SEQ ID NO: 145205 - RNA, 19 nt, Human
aacuagaaagguuuugaga

SEQ ID NO: 145206 - RNA, 22 nt, Human
uuccuuccgggcaccaggcacu

SEQ ID NO: 145207 - RNA, 22 nt, Human
cucaggaugucggugacuauug

SEQ ID NO: 145208 - RNA, 22 nt, Human
uacaguaggauuuucagggucu

SEQ ID NO: 145209 - RNA, 22 nt, Human
ggcugcuucucacucauuugca

SEQ ID NO: 145210 - RNA, 22 nt, Human
gaggccuggaccagccacagag

SEQ ID NO: 145211 - RNA, 22 nt, Human
gcagggacgccagggacagcaa

SEQ ID NO: 145212 - RNA, 22 nt, Human
auggacagugugaagcagauag

SEQ ID NO: 145213 - RNA, 22 nt, Human
gggccugggaacuugcauuuag

SEQ ID NO: 145214 - RNA, 22 nt, Human
gagcagugacuggagcaugaga

SEQ ID NO: 145215 - RNA, 22 nt, Human
uuugcuauaaaagggucacacg

SEQ ID NO: 145216 - RNA, 22 nt, Human
uucucucuguggucccauuuug

SEQ ID NO: 145217 - RNA, 22 nt, Human
ucucagggcgcagugaggcagu

SEQ ID NO: 145218 - RNA, 22 nt, Human
ggcagagaugugggucagaauc

SEQ ID NO: 145219 - RNA, 22 nt, Human
ucucacuggguauaaaugagua

SEQ ID NO: 145220 - RNA, 22 nt, Human
gccagcucagugccaggccccu

SEQ ID NO: 145221 - RNA, 22 nt, Human
gcagaggcuccauuuuacagau

SEQ ID NO: 145222 - RNA, 19 nt, Human
aauguaguguuaugucaac

SEQ ID NO: 145223 - RNA, 22 nt, Human
acugcagccuuugggcucauaa

SEQ ID NO: 145224 - RNA, 22 nt, Human
cucugcugcccaggccugcuag

SEQ ID NO: 145225 - RNA, 22 nt, Human
ugcuucaggaagaaacgccagg

SEQ ID NO: 145226 - RNA, 22 nt, Human
cuggggcugcgguggaggagcc

SEQ ID NO: 145227 - RNA, 22 nt, Human
ugcugccuuagcagccaggcaa

SEQ ID NO: 145228 - RNA, 22 nt, Human
ccaagggcugcugaggugucca

SEQ ID NO: 145229 - RNA, 22 nt, Human
guggcuugaccaucccugcuac

SEQ ID NO: 145230 - RNA, 22 nt, Human
aaucauucuuauuucacagcaa

SEQ ID NO: 145231 - RNA, 22 nt, Human
cuggcugugugcccccggcacc

SEQ ID NO: 145232 - RNA, 22 nt, Human
ccugccaggccagugagcuucc

SEQ ID NO: 145233 - RNA, 22 nt, Human
uagagcuauuuagagcauuuua

SEQ ID NO: 145234 - RNA, 22 nt, Human
uggcucucagcucccagcagcc

SEQ ID NO: 145235 - RNA, 22 nt, Human
uucuaacuccacuucccacucc

SEQ ID NO: 145236 - RNA, 22 nt, Human
uagugaaauuuaugcacagcua

SEQ ID NO: 145237 - RNA, 22 nt, Human
uccugccucuugccuucuucac

SEQ ID NO: 145238 - RNA, 22 nt, Human
ggaggccaaggagggcggauca

SEQ ID NO: 145239 - RNA, 19 nt, Human
uauauauuuugggguugug

SEQ ID NO: 145240 - RNA, 22 nt, Human
uucuucaaccaucuacauaaac

SEQ ID NO: 145241 - RNA, 22 nt, Human
cugcugucuuuauuucacugcu

SEQ ID NO: 145242 - RNA, 22 nt, Human
ggcuucuccccuuugagucuuc

SEQ ID NO: 145243 - RNA, 22 nt, Human
aacagacagaaaaaugugaucu

SEQ ID NO: 145244 - RNA, 22 nt, Human
ucagugugaguaccaugcucag

SEQ ID NO: 145245 - RNA, 20 nt, Human
aggaacuggaagggaggaaa

SEQ ID NO: 145246 - RNA, 22 nt, Human
ugugguggcuauucuggucuca

SEQ ID NO: 145247 - RNA, 20 nt, Human
caccacagaauuggggacag

SEQ ID NO: 145248 - RNA, 22 nt, Human
gcugucucauacaaggcccugc

SEQ ID NO: 145249 - RNA, 20 nt, Human
uccaugaguuagagacuaua

SEQ ID NO: 145250 - RNA, 22 nt, Human
uaguggcugcagggcuguuuga

SEQ ID NO: 145251 - RNA, 21 nt, Human
uccauaagagaccaucuccua

SEQ ID NO: 145252 - RNA, 22 nt, Human
ugaaggccucugguacaugcca

SEQ ID NO: 145253 - RNA, 23 nt, Human
ccuucagaagaaguaacaggggc

SEQ ID NO: 145254 - RNA, 22 nt, Human
cuggcuggccggaggcaucccu

SEQ ID NO: 145255 - RNA, 22 nt, Human
cugggccagauccagccucaca

SEQ ID NO: 145256 - RNA, 22 nt, Human
ugcugccuucuaggcgugcccu

SEQ ID NO: 145257 - RNA, 22 nt, Human
uucuuaacuggaaaaugucaga

SEQ ID NO: 145258 - RNA, 22 nt, Human
ugggccagcaauugcugcucag

SEQ ID NO: 145259 - RNA, 22 nt, Human
uacacuaugggcuuuguguaau

SEQ ID NO: 145260 - RNA, 22 nt, Human
ucacaugcuugaggaaagaaaa

SEQ ID NO: 145261 - RNA, 22 nt, Human
auuuacagaagcauguaauagc

SEQ ID NO: 145262 - RNA, 22 nt, Human
caggcugucugaauggaggccc

SEQ ID NO: 145263 - RNA, 22 nt, Human
aaaugcuguguuuuaacauaga

SEQ ID NO: 145264 - RNA, 22 nt, Human
cuggccuggggccucagcugcu

SEQ ID NO: 145265 - RNA, 22 nt, Human
aauggcugggaguguauuuugg

SEQ ID NO: 145266 - RNA, 22 nt, Human
gugcauuugacgaauacucacu

SEQ ID NO: 145267 - RNA, 22 nt, Human
uuauuacacugaaagaauugcg

SEQ ID NO: 145268 - RNA, 22 nt, Human
agucccagcuucccccaugcag

SEQ ID NO: 145269 - RNA, 22 nt, Human
gaccauuucuaggaaucagacu

SEQ ID NO: 145270 - RNA, 20 nt, Human
cagccuccacucacucagcu

SEQ ID NO: 145271 - RNA, 22 nt, Human
agagccaggcaggcaauguuga

SEQ ID NO: 145272 - RNA, 22 nt, Human
ugaggccaaugacccugggcag

SEQ ID NO: 145273 - RNA, 22 nt, Human
cgggcuggcugcagcugcugga

SEQ ID NO: 145274 - RNA, 22 nt, Human
agauacauuguucuaagcauug

SEQ ID NO: 145275 - RNA, 21 nt, Human
gcacagugccaggcacacagu

SEQ ID NO: 145276 - RNA, 22 nt, Human
uuaacagacauauauauuugua

SEQ ID NO: 145277 - RNA, 22 nt, Human
uuugaaugcaggacauacagaa

SEQ ID NO: 145278 - RNA, 22 nt, Human
cugagcugcucccgcugcagcg

SEQ ID NO: 145279 - RNA, 22 nt, Human
gagagcuggccagcuucaguau

SEQ ID NO: 145280 - RNA, 22 nt, Human
cucucuuucugaaugaggacua

SEQ ID NO: 145281 - RNA, 22 nt, Human
caggugaccuuuguccuaaguu

SEQ ID NO: 145282 - RNA, 22 nt, Human
gggcuggcucccagguguugaa

SEQ ID NO: 145283 - RNA, 22 nt, Human
uuuaaauuuguguuuagagggu

SEQ ID NO: 145284 - RNA, 22 nt, Human
ugggggugaaagucuggacagu

SEQ ID NO: 145285 - RNA, 22 nt, Human
ugacagaaugugacucucagau

SEQ ID NO: 145286 - RNA, 22 nt, Human
cuggagccccaggcugugcaga

SEQ ID NO: 145287 - RNA, 22 nt, Human
uccagggagauggcagaggcug

SEQ ID NO: 145288 - RNA, 22 nt, Human
ggcugccuugacccuggcuccg

SEQ ID NO: 145289 - RNA, 22 nt, Human
cagccugcauuuguaucuguau

SEQ ID NO: 145290 - RNA, 22 nt, Human
cccuggaguccggagcucaccu

SEQ ID NO: 145291 - RNA, 20 nt, Human
ggaagcagagaacuguuuuc

SEQ ID NO: 145292 - RNA, 22 nt, Human
agaacagcaguuaugguucauu

SEQ ID NO: 145293 - RNA, 22 nt, Human
agggcugggcugcuuguuguca

SEQ ID NO: 145294 - RNA, 22 nt, Human
cagucacauugcccugcauuua

SEQ ID NO: 145295 - RNA, 22 nt, Human
agcagagccagaauuggaccag

SEQ ID NO: 145296 - RNA, 22 nt, Human
agcucccugagaugccacagca

SEQ ID NO: 145297 - RNA, 22 nt, Human
cgcuggggcuuuuugcuugaga

SEQ ID NO: 145298 - RNA, 22 nt, Human
aaggccugggaggccucucuuc

SEQ ID NO: 145299 - RNA, 22 nt, Human
ccugccugggcucacuugccag

SEQ ID NO: 145300 - RNA, 22 nt, Human
aagugacaccucuucccuuucc

SEQ ID NO: 145301 - RNA, 22 nt, Human
caaugauggcuaggcagcugcu

SEQ ID NO: 145302 - RNA, 22 nt, Human
uaacuuugaagggaauuuuacu

SEQ ID NO: 145303 - RNA, 22 nt, Human
gggccucugugcagaggggccu

SEQ ID NO: 145304 - RNA, 18 nt, Human
aucucccauuggccaagg

SEQ ID NO: 145305 - RNA, 22 nt, Human
ccauuguaaagaguauacuuug

SEQ ID NO: 145306 - RNA, 19 nt, Human
ucaaagucugagucacuuu

SEQ ID NO: 145307 - RNA, 22 nt, Human
gaagcagccacggggagacaga

SEQ ID NO: 145308 - RNA, 18 nt, Human
gaagggagcuggaaugca

SEQ ID NO: 145309 - RNA, 22 nt, Human
ugugauauuugaguauugucaa

SEQ ID NO: 145310 - RNA, 20 nt, Human
uguguguguacuucuaaaua

SEQ ID NO: 145311 - RNA, 22 nt, Human
gaguaagagcuggcuuuggugu

SEQ ID NO: 145312 - RNA, 22 nt, Human
ucauuuaauagcuuuugucuuu

SEQ ID NO: 145313 - RNA, 22 nt, Human
gguggccucucaugcaagguag

SEQ ID NO: 145314 - RNA, 17 nt, Human
uuugaaaggaugucagu

SEQ ID NO: 145315 - RNA, 22 nt, Human
acaaagucacaauaauuaaccu

SEQ ID NO: 145316 - RNA, 22 nt, Human
uggucuguucaagguggcugau

SEQ ID NO: 145317 - RNA, 22 nt, Human
cacaguauuuguuuuucugagu

SEQ ID NO: 145318 - RNA, 22 nt, Human
uaacagaaaggcucaggugcuc

SEQ ID NO: 145319 - RNA, 22 nt, Human
uaaggccaccguuauagaacca

SEQ ID NO: 145320 - RNA, 18 nt, Human
agcagcugugccacacug

SEQ ID NO: 145321 - RNA, 22 nt, Human
cauugcacaucugagaagagau

SEQ ID NO: 145322 - RNA, 22 nt, Human
gucuggagccacccuaagcauu

SEQ ID NO: 145323 - RNA, 19 nt, Human
acauuuagaauguacuugc

SEQ ID NO: 145324 - RNA, 23 nt, Human
caacuuuuggcuacaugcuuagc

SEQ ID NO: 145325 - RNA, 22 nt, Human
aaacuuuuauaaagcugcagau

SEQ ID NO: 145326 - RNA, 22 nt, Human
gugcuuccugccuggugccuuu

SEQ ID NO: 145327 - RNA, 22 nt, Human
uuauuuugguaaauguuugccu

SEQ ID NO: 145328 - RNA, 22 nt, Human
uuagaaaggagcuuauuucuuu

SEQ ID NO: 145329 - RNA, 22 nt, Human
aagauuuccuggauguaauucc

SEQ ID NO: 145330 - RNA, 20 nt, Human
aagggcagagggaacagacu

SEQ ID NO: 145331 - RNA, 22 nt, Human
auguggcucagcaggcucccgu

SEQ ID NO: 145332 - RNA, 22 nt, Human
ccugucaguugcugucagggau

SEQ ID NO: 145333 - RNA, 22 nt, Human
ccuggcaguuuugcccaggauu

SEQ ID NO: 145334 - RNA, 22 nt, Human
agccucugucaagcuuuucaaa

SEQ ID NO: 145335 - RNA, 22 nt, Human
cagguggagcugacugagggca

SEQ ID NO: 145336 - RNA, 22 nt, Human
gcgaaaaauguguaaauauguu

SEQ ID NO: 145337 - RNA, 22 nt, Human
uuucacauuagauaugucauuu

SEQ ID NO: 145338 - RNA, 22 nt, Human
caguuaaaggcccaauaucugg

SEQ ID NO: 145339 - RNA, 22 nt, Human
uuguaaaugaccuuuucuaauu

SEQ ID NO: 145340 - RNA, 22 nt, Human
uuucucuccccaaguggaauug

SEQ ID NO: 145341 - RNA, 22 nt, Human
gcucuggacuggggccugagaa

SEQ ID NO: 145342 - RNA, 22 nt, Human
uuugcauuacuugacuuuaguu

SEQ ID NO: 145343 - RNA, 22 nt, Human
cagcuggaucccugcagaacuu

SEQ ID NO: 145344 - RNA, 22 nt, Human
agcuucuugaccaagccuguaa

SEQ ID NO: 145345 - RNA, 22 nt, Human
auuauauaggacuugcccuucc

SEQ ID NO: 145346 - RNA, 22 nt, Human
cuguacaggagacgucugugca

SEQ ID NO: 145347 - RNA, 22 nt, Human
gccucugcccuccugggacugc

SEQ ID NO: 145348 - RNA, 22 nt, Human
cagggcaggaauuugacauugc

SEQ ID NO: 145349 - RNA, 22 nt, Human
guggcucucgccagccugcggg

SEQ ID NO: 145350 - RNA, 22 nt, Human
cccacucccugcacgccugccg

SEQ ID NO: 145351 - RNA, 22 nt, Human
agugugugccuuuggauaccug

SEQ ID NO: 145352 - RNA, 22 nt, Human
gcugcuccgucugagcucuggu

SEQ ID NO: 145353 - RNA, 22 nt, Human
ucugcgugaauuugcauugugg

SEQ ID NO: 145354 - RNA, 22 nt, Human
agcucccagaagccagagucgg

SEQ ID NO: 145355 - RNA, 22 nt, Human
gcuuagucaauuauaaauaggc

SEQ ID NO: 145356 - RNA, 19 nt, Human
ucauuuacgguuuugauga

SEQ ID NO: 145357 - RNA, 22 nt, Human
aacuuuuacaaauugucaucau

SEQ ID NO: 145358 - RNA, 22 nt, Human
uuuuugcaccaaccuaauagaa

SEQ ID NO: 145359 - RNA, 22 nt, Human
ucaggagaaucagggcuguccu

SEQ ID NO: 145360 - RNA, 22 nt, Human
agccuucaaccuagcuagagca

SEQ ID NO: 145361 - RNA, 21 nt, Human
ugccagcauguaggcuaguug

SEQ ID NO: 145362 - RNA, 22 nt, Human
cugcuuccaugcaauggcaguc

SEQ ID NO: 145363 - RNA, 22 nt, Human
gccacguugccacccgggugac

SEQ ID NO: 145364 - RNA, 22 nt, Human
gucaccagucccagcuccugaa

SEQ ID NO: 145365 - RNA, 22 nt, Human
ugcugggggcuuucuggauacc

SEQ ID NO: 145366 - RNA, 21 nt, Human
agaagccuggguggagguggg

SEQ ID NO: 145367 - RNA, 22 nt, Human
gugcuguaucagaaucugcucu

SEQ ID NO: 145368 - RNA, 22 nt, Human
ugugugacacauugauaugugc

SEQ ID NO: 145369 - RNA, 22 nt, Human
ucacauuuuccuugguaucugu

SEQ ID NO: 145370 - RNA, 22 nt, Human
ccacagggcacagacaggaagc

SEQ ID NO: 145371 - RNA, 22 nt, Human
uuacaguuagguguguaguggu

SEQ ID NO: 145372 - RNA, 22 nt, Human
agggccuggugaccuggguccu

SEQ ID NO: 145373 - RNA, 22 nt, Human
gcucugggauuaccagccuuag

SEQ ID NO: 145374 - RNA, 22 nt, Human
ugcccagcacugugccagucac

SEQ ID NO: 145375 - RNA, 22 nt, Human
gcugccaauccagcugugggag

SEQ ID NO: 145376 - RNA, 22 nt, Human
uggcagcuccggguaggggcug

SEQ ID NO: 145377 - RNA, 22 nt, Human
ugggcucugcugcguaccaguu

SEQ ID NO: 145378 - RNA, 22 nt, Human
ugggcugcccaagguggccaug

SEQ ID NO: 145379 - RNA, 22 nt, Human
cugagaggugacagcgugcugg

SEQ ID NO: 145380 - RNA, 22 nt, Human
ccuggcagcgugccgagcugcg

SEQ ID NO: 145381 - RNA, 20 nt, Human
cucucucuccauucccaggg

SEQ ID NO: 145382 - RNA, 22 nt, Human
gaaaugcaaauucucucucgcu

SEQ ID NO: 145383 - RNA, 22 nt, Human
ugauuucaaguagugacaugcu

SEQ ID NO: 145384 - RNA, 19 nt, Human
ugcagaagacacaguggug

SEQ ID NO: 145385 - RNA, 22 nt, Human
uccagggccaagucauggaacc

SEQ ID NO: 145386 - RNA, 22 nt, Human
cuguagccaguuuggccucacc

SEQ ID NO: 145387 - RNA, 22 nt, Human
uuucacaaguaaaguccuaagu

SEQ ID NO: 145388 - RNA, 21 nt, Human
uauuugcugccaucuuugagg

SEQ ID NO: 145389 - RNA, 22 nt, Human
aguuuauagcccagauucaugg

SEQ ID NO: 145390 - RNA, 22 nt, Human
uggcagggugggcuucagcccc

SEQ ID NO: 145391 - RNA, 22 nt, Human
uuuuuccuuggaugugucucuc

SEQ ID NO: 145392 - RNA, 22 nt, Human
aguagaaagaaggcacugggcc

SEQ ID NO: 145393 - RNA, 22 nt, Human
ggaaaaggccacagggacacau

SEQ ID NO: 145394 - RNA, 22 nt, Human
uuucucuguucucuaacuguaa

SEQ ID NO: 145395 - RNA, 22 nt, Human
ucaaaccaccuuguuacugggg

SEQ ID NO: 145396 - RNA, 22 nt, Human
gccuucaguagugucagcugua

SEQ ID NO: 145397 - RNA, 22 nt, Human
auugaaagaguuuucugcugca

SEQ ID NO: 145398 - RNA, 22 nt, Human
ucuuggagaauggcagagaagc

SEQ ID NO: 145399 - RNA, 22 nt, Human
uagauuuuacuucugucauuac

SEQ ID NO: 145400 - RNA, 22 nt, Human
ccucccaccauuuagagagagc

SEQ ID NO: 145401 - RNA, 22 nt, Human
cagagcugcaaaugccccuccg

SEQ ID NO: 145402 - RNA, 22 nt, Human
cccugagcccauaguugacauu

SEQ ID NO: 145403 - RNA, 21 nt, Human
aggauauuaggugauuugggu

SEQ ID NO: 145404 - RNA, 22 nt, Human
ugcugccauggucgcugguguc

SEQ ID NO: 145405 - RNA, 22 nt, Human
uugaaagacuucuccugugaaa

SEQ ID NO: 145406 - RNA, 22 nt, Human
aagagcuggucacagguccauu

SEQ ID NO: 145407 - RNA, 22 nt, Human
aaauuauaggugccaccuugga

SEQ ID NO: 145408 - RNA, 22 nt, Human
ucauauuuggggguguguguuu

SEQ ID NO: 145409 - RNA, 22 nt, Human
uaauacuuaccuugcagagucu

SEQ ID NO: 145410 - RNA, 22 nt, Human
ugcugccacaaauucagcugcc

SEQ ID NO: 145411 - RNA, 22 nt, Human
caggccagguggcaggcaaaac

SEQ ID NO: 145412 - RNA, 19 nt, Human
caguuuaugcuuuggggac

SEQ ID NO: 145413 - RNA, 22 nt, Human
gagcagugguugaacagaggca

SEQ ID NO: 145414 - RNA, 22 nt, Human
uggggacaggagacuuacagcu

SEQ ID NO: 145415 - RNA, 22 nt, Human
guuucucugucuguuacauugg

SEQ ID NO: 145416 - RNA, 22 nt, Human
guaaaguucuacuagaaucaac

SEQ ID NO: 145417 - RNA, 22 nt, Human
uauuucagucacuucuucucug

SEQ ID NO: 145418 - RNA, 22 nt, Human
aaacuuuaagacaguccucaag

SEQ ID NO: 145419 - RNA, 22 nt, Human
ggccucuguuuggagccaggau

SEQ ID NO: 145420 - RNA, 22 nt, Human
ccuccugggacaggcuggcaca

SEQ ID NO: 145421 - RNA, 22 nt, Human
gaggggcugggcagucccugga

SEQ ID NO: 145422 - RNA, 22 nt, Human
ugccagccagguucugaggcua

SEQ ID NO: 145423 - RNA, 22 nt, Human
uggcucuggugcgggcuccugc

SEQ ID NO: 145424 - RNA, 22 nt, Human
uccacuuuagcaaugauugaau

SEQ ID NO: 145425 - RNA, 20 nt, Human
uauuuugcaauuaugguuca

SEQ ID NO: 145426 - RNA, 22 nt, Human
cuguggcuaauaauuaguauuu

SEQ ID NO: 145427 - RNA, 22 nt, Human
auguaucaacaaauuguacagu

SEQ ID NO: 145428 - RNA, 22 nt, Human
ugcucuggggagcuccucugcg

SEQ ID NO: 145429 - RNA, 22 nt, Human
aggcacugacagauucuguguc

SEQ ID NO: 145430 - RNA, 17 nt, Human
uucaagauauugaaaug

SEQ ID NO: 145431 - RNA, 22 nt, Human
cuggcuguggucacagguaacu

SEQ ID NO: 145432 - RNA, 22 nt, Human
ucugucaccgagggcauccaaa

SEQ ID NO: 145433 - RNA, 22 nt, Human
accagagaaaacacagcaggcu

SEQ ID NO: 145434 - RNA, 22 nt, Human
acagccuguguaccagcuggga

SEQ ID NO: 145435 - RNA, 22 nt, Human
cagccagggagcaaagaguuga

SEQ ID NO: 145436 - RNA, 22 nt, Human
uccugccugcaaucccagcacu

SEQ ID NO: 145437 - RNA, 22 nt, Human
gagugucugaauuagagcacaa

SEQ ID NO: 145438 - RNA, 22 nt, Human
cccagagcugagucugauauau

SEQ ID NO: 145439 - RNA, 17 nt, Human
gcagugaaaagagauca

SEQ ID NO: 145440 - RNA, 20 nt, Human
cagcucugggaaagaggcca

SEQ ID NO: 145441 - RNA, 22 nt, Human
aaauguuuugcucccauguggu

SEQ ID NO: 145442 - RNA, 22 nt, Human
caggagcccguugcuccggcgg

SEQ ID NO: 145443 - RNA, 20 nt, Human
ugcccagcaagagugcaguu

SEQ ID NO: 145444 - RNA, 22 nt, Human
ccacagaguuacaaaacaguca

SEQ ID NO: 145445 - RNA, 22 nt, Human
cuauuuuccgcagcaggaagua

SEQ ID NO: 145446 - RNA, 22 nt, Human
cuaauacacccuauugcuuguu

SEQ ID NO: 145447 - RNA, 22 nt, Human
agucagugaaggcauugcucaa

SEQ ID NO: 145448 - RNA, 22 nt, Human
cuggcagcuuagcacucugguu

SEQ ID NO: 145449 - RNA, 22 nt, Human
uucauuacugcgguagucacac

SEQ ID NO: 145450 - RNA, 22 nt, Human
acaugcauucucuaaaagcaaa

SEQ ID NO: 145451 - RNA, 22 nt, Human
guacauuuugagguuaaaacaa

SEQ ID NO: 145452 - RNA, 22 nt, Human
auuuuuucccaguuagccagga

SEQ ID NO: 145453 - RNA, 22 nt, Human
acaggcuuacaggcugcaagua

SEQ ID NO: 145454 - RNA, 22 nt, Human
ugaagcagagaauuugacaguc

SEQ ID NO: 145455 - RNA, 22 nt, Human
ucagcaauccucccacaggugg

SEQ ID NO: 145456 - RNA, 22 nt, Human
aucagcaaggcaaucacugcag

SEQ ID NO: 145457 - RNA, 22 nt, Human
agaugcugugucuguucccuug

SEQ ID NO: 145458 - RNA, 21 nt, Human
agagaagggacucuuccaguc

SEQ ID NO: 145459 - RNA, 22 nt, Human
aaaucaguuggaacacaagcag

SEQ ID NO: 145460 - RNA, 22 nt, Human
uuuuaucaaucauuaagacauu

SEQ ID NO: 145461 - RNA, 22 nt, Human
aguuuuucuccccuggcuucau

SEQ ID NO: 145462 - RNA, 22 nt, Human
ucugcagauuuaucagcagcug

SEQ ID NO: 145463 - RNA, 22 nt, Human
ugggcagaggacagggaagauc

SEQ ID NO: 145464 - RNA, 20 nt, Human
agugucugggccucaggccc

SEQ ID NO: 145465 - RNA, 22 nt, Human
guacaaaguggaccugauagua

SEQ ID NO: 145466 - RNA, 22 nt, Human
uaugcacauuaucuaauccauu

SEQ ID NO: 145467 - RNA, 22 nt, Human
auuugucuuugagugcccugcu

SEQ ID NO: 145468 - RNA, 22 nt, Human
ucccccacucuaaaggagccuu

SEQ ID NO: 145469 - RNA, 22 nt, Human
uuucucugccaguuauuuuccu

SEQ ID NO: 145470 - RNA, 22 nt, Human
cucagagcccaggguacacccg

SEQ ID NO: 145471 - RNA, 22 nt, Human
ccagcagcuguggcuuugccuc

SEQ ID NO: 145472 - RNA, 22 nt, Human
cagggcugugcccaucuucccc

SEQ ID NO: 145473 - RNA, 22 nt, Human
ucagggcaagauugguuaauaa

SEQ ID NO: 145474 - RNA, 19 nt, Human
gcagccaggugcucuaccu

SEQ ID NO: 145475 - RNA, 22 nt, Human
gagguggccucaagcagucuuc

SEQ ID NO: 145476 - RNA, 21 nt, Human
ucucuggaguuagcagagaga

SEQ ID NO: 145477 - RNA, 22 nt, Human
cccuggaguccuggcaguugau

SEQ ID NO: 145478 - RNA, 22 nt, Human
ucgagucauguucucccauuaa

SEQ ID NO: 145479 - RNA, 22 nt, Human
ucagggcacaggccuguggguu

SEQ ID NO: 145480 - RNA, 22 nt, Human
ucugagccaauuucugugucca

SEQ ID NO: 145481 - RNA, 22 nt, Human
gccugcagaggugcugcuagcu

SEQ ID NO: 145482 - RNA, 22 nt, Human
aaaguuacuaucacaaugaaau

SEQ ID NO: 145483 - RNA, 21 nt, Human
ucugggugcuaguguuugcuu

SEQ ID NO: 145484 - RNA, 22 nt, Human
caugggcuacagaagcaugcug

SEQ ID NO: 145485 - RNA, 22 nt, Human
cugcccugccuggccagugugg

SEQ ID NO: 145486 - RNA, 22 nt, Human
cuacauuaaauuggcuuacuua

SEQ ID NO: 145487 - RNA, 22 nt, Human
ccagcucccugaagccuggucu

SEQ ID NO: 145488 - RNA, 22 nt, Human
uagacagauuuaaaggaaugga

SEQ ID NO: 145489 - RNA, 22 nt, Human
uuuccuaggagauugaucacau

SEQ ID NO: 145490 - RNA, 22 nt, Human
ucugagaguagagcugccucuu

SEQ ID NO: 145491 - RNA, 22 nt, Human
cgucuuccucuuacgaugcgcu

SEQ ID NO: 145492 - RNA, 22 nt, Human
aggagcugucagagugccagag

SEQ ID NO: 145493 - RNA, 22 nt, Human
aaugauggauuuagacaagcug

SEQ ID NO: 145494 - RNA, 22 nt, Human
agcugccaaguuggaguagcaa

SEQ ID NO: 145495 - RNA, 22 nt, Human
uggcucaguaaucgagucuccu

SEQ ID NO: 145496 - RNA, 22 nt, Human
uguuaacuuccuccuccucugc

SEQ ID NO: 145497 - RNA, 20 nt, Human
aucuggcucagauccugcag

SEQ ID NO: 145498 - RNA, 22 nt, Human
aaaggccaccaacaugaagcau

SEQ ID NO: 145499 - RNA, 22 nt, Human
ucuuucagaaacuuugucugcg

SEQ ID NO: 145500 - RNA, 22 nt, Human
cccagccugugacagccguccu

SEQ ID NO: 145501 - RNA, 22 nt, Human
uggaggcaccacuggcugcccg

SEQ ID NO: 145502 - RNA, 22 nt, Human
aagucacacuagacaacugagg

SEQ ID NO: 145503 - RNA, 22 nt, Human
acuguauaguauuuauucuuag

SEQ ID NO: 145504 - RNA, 22 nt, Human
ugcaauaaguuguguuaucacu

SEQ ID NO: 145505 - RNA, 22 nt, Human
gugcuuucugcaugguuccuac

SEQ ID NO: 145506 - RNA, 22 nt, Human
uccugccuuagagcaaggaaaa

SEQ ID NO: 145507 - RNA, 22 nt, Human
caggaaaaaugccaggagucag

SEQ ID NO: 145508 - RNA, 22 nt, Human
uuagccauuuuauacaagugua

SEQ ID NO: 145509 - RNA, 22 nt, Human
ggugggcaggucacucugccuc

SEQ ID NO: 145510 - RNA, 22 nt, Human
gaaugugucacccugucccaug

SEQ ID NO: 145511 - RNA, 17 nt, Human
ugcauguccuuuguucc

SEQ ID NO: 145512 - RNA, 22 nt, Human
gcugagcuagcuaucucagucu

SEQ ID NO: 145513 - RNA, 22 nt, Human
gcagauggcucagacacugggg

SEQ ID NO: 145514 - RNA, 22 nt, Human
aguguuucucagaagggccuau

SEQ ID NO: 145515 - RNA, 22 nt, Human
acuuguuugccuaaaauuuuga

SEQ ID NO: 145516 - RNA, 22 nt, Human
cuuauguaaaacggaaagggaa

SEQ ID NO: 145517 - RNA, 22 nt, Human
acauuucucuugaugucucuau

SEQ ID NO: 145518 - RNA, 22 nt, Human
ggcucugcaugugagugggugg

SEQ ID NO: 145519 - RNA, 22 nt, Human
aggccagcucacccuggcuccu

SEQ ID NO: 145520 - RNA, 22 nt, Human
uggcagggccugcucaucaucc

SEQ ID NO: 145521 - RNA, 22 nt, Human
agauuucaaugugagcauuagu

SEQ ID NO: 145522 - RNA, 22 nt, Human
auuuucuucucucccuggcugc

SEQ ID NO: 145523 - RNA, 22 nt, Human
ccugauggagcccugcugcaug

SEQ ID NO: 145524 - RNA, 22 nt, Human
ugugaaagauacuaggcagagg

SEQ ID NO: 145525 - RNA, 22 nt, Human
uuacagcuagccaauuauuuag

SEQ ID NO: 145526 - RNA, 22 nt, Human
uuugaaagggaaauaaacuccu

SEQ ID NO: 145527 - RNA, 22 nt, Human
uagaaauguuagauguauugag

SEQ ID NO: 145528 - RNA, 22 nt, Human
guguguauuuaaaggauaguug

SEQ ID NO: 145529 - RNA, 22 nt, Human
aggagucagauaugggaaaguu

SEQ ID NO: 145530 - RNA, 22 nt, Human
cagugcauagauccugaggccu

SEQ ID NO: 145531 - RNA, 22 nt, Human
uaaggcaccauaauauauuuaa

SEQ ID NO: 145532 - RNA, 20 nt, Human
ugaaggccagcagcauaggg

SEQ ID NO: 145533 - RNA, 22 nt, Human
uucaggaugaaagugugcaaca

SEQ ID NO: 145534 - RNA, 22 nt, Human
uucuuaacucaaauauauaucc

SEQ ID NO: 145535 - RNA, 22 nt, Human
ccugccugcguccucugagggc

SEQ ID NO: 145536 - RNA, 22 nt, Human
uugaacagcuguuacauuguua

SEQ ID NO: 145537 - RNA, 22 nt, Human
ugucacauugaauaugauuuau

SEQ ID NO: 145538 - RNA, 22 nt, Human
ugacaauacagagagagcaaaa

SEQ ID NO: 145539 - RNA, 22 nt, Human
auguguguguuuaauccucaaa

SEQ ID NO: 145540 - RNA, 22 nt, Human
cugccuggcuaaacucaagucg

SEQ ID NO: 145541 - RNA, 22 nt, Human
auacaaagacaaaucucaaucu

SEQ ID NO: 145542 - RNA, 22 nt, Human
uuugaaagcuacuuucggguca

SEQ ID NO: 145543 - RNA, 22 nt, Human
uacaaagcuguauagccugguc

SEQ ID NO: 145544 - RNA, 22 nt, Human
ccagccuggguguuagaagaca

SEQ ID NO: 145545 - RNA, 22 nt, Human
uccuggguccauggcagccgaa

SEQ ID NO: 145546 - RNA, 22 nt, Human
gcucuggcuacuguggcuaccg

SEQ ID NO: 145547 - RNA, 22 nt, Human
cagaagcagugagagaugugca

SEQ ID NO: 145548 - RNA, 22 nt, Human
uagaaaagaauuuuauuugaua

SEQ ID NO: 145549 - RNA, 22 nt, Human
aucuucaaagcacaucguuugu

SEQ ID NO: 145550 - RNA, 22 nt, Human
ucucucauaagaugaguacuua

SEQ ID NO: 145551 - RNA, 22 nt, Human
caaggaaaacagaugaucaaca

SEQ ID NO: 145552 - RNA, 22 nt, Human
uggcucagucauggaugaguaa

SEQ ID NO: 145553 - RNA, 23 nt, Human
uggcuucugccccauucucucca

SEQ ID NO: 145554 - RNA, 22 nt, Human
agcagggcuugccgcuuguccu

SEQ ID NO: 145555 - RNA, 22 nt, Human
agagccaggaugucuucugggg

SEQ ID NO: 145556 - RNA, 22 nt, Human
cagggccugcuuccuucuuguu

SEQ ID NO: 145557 - RNA, 22 nt, Human
ugcugccagagagacagggacu

SEQ ID NO: 145558 - RNA, 22 nt, Human
cucuggaguucuucaagcuacu

SEQ ID NO: 145559 - RNA, 22 nt, Human
ugccaggcccugugcuggaugc

SEQ ID NO: 145560 - RNA, 22 nt, Human
gcaggccuuggcaaugagccug

SEQ ID NO: 145561 - RNA, 22 nt, Human
uucaggauuguguuuuuccuga

SEQ ID NO: 145562 - RNA, 22 nt, Human
uucauucuuauuugugaucugg

SEQ ID NO: 145563 - RNA, 22 nt, Human
uucuuccucagcagggcugccu

SEQ ID NO: 145564 - RNA, 22 nt, Human
aggccugggcaagaaggggcgu

SEQ ID NO: 145565 - RNA, 22 nt, Human
ggcuugcuucuuguccaggaau

SEQ ID NO: 145566 - RNA, 22 nt, Human
agcuggguguguaucagauaaa

SEQ ID NO: 145567 - RNA, 22 nt, Human
gcuuccugauauucauacuguu

SEQ ID NO: 145568 - RNA, 22 nt, Human
agccuauuccaggaugagcuca

SEQ ID NO: 145569 - RNA, 22 nt, Human
gcucugagagugggugauucug

SEQ ID NO: 145570 - RNA, 23 nt, Human
aaguucaagucacagccugucuu

SEQ ID NO: 145571 - RNA, 22 nt, Human
gagaggccaccugacgagcagu

SEQ ID NO: 145572 - RNA, 22 nt, Human
auuucauugaaguuaauucuuc

SEQ ID NO: 145573 - RNA, 22 nt, Human
caaggaaacaugaaaugcauug

SEQ ID NO: 145574 - RNA, 22 nt, Human
cugcagagaauuguggggcuuc

SEQ ID NO: 145575 - RNA, 19 nt, Human
guauauuuauauggcugua

SEQ ID NO: 145576 - RNA, 22 nt, Human
aauguguauacuggcaauuaag

SEQ ID NO: 145577 - RNA, 22 nt, Human
ccucaggggcuuuucguuguug

SEQ ID NO: 145578 - RNA, 22 nt, Human
ugugacaucgcugugucuguuu

SEQ ID NO: 145579 - RNA, 22 nt, Human
uuuuccuacugauaaacaguua

SEQ ID NO: 145580 - RNA, 22 nt, Human
gaugguuuaugauagaugggaa

SEQ ID NO: 145581 - RNA, 22 nt, Human
cccagcugcaccucuauggccu

SEQ ID NO: 145582 - RNA, 19 nt, Human
cucucacucgccacauccu

SEQ ID NO: 145583 - RNA, 22 nt, Human
uuagccauauagaaaaagagcu

SEQ ID NO: 145584 - RNA, 22 nt, Human
gcaguccucucauuggccuccu

SEQ ID NO: 145585 - RNA, 22 nt, Human
ucuggcucauacaagccugcaa

SEQ ID NO: 145586 - RNA, 22 nt, Human
uuacauauugucuauuguucaa

SEQ ID NO: 145587 - RNA, 23 nt, Human
uaauucacauauacauugcuuca

SEQ ID NO: 145588 - RNA, 22 nt, Human
aaggcccuaauagagcacauau

SEQ ID NO: 145589 - RNA, 22 nt, Human
cugugccuaagaugcaugucuc

SEQ ID NO: 145590 - RNA, 22 nt, Human
cccaggaggcagagguugcagu

SEQ ID NO: 145591 - RNA, 22 nt, Human
agcaccuucacaggcucucagg

SEQ ID NO: 145592 - RNA, 22 nt, Human
ccugggcuggaguacagcagug

SEQ ID NO: 145593 - RNA, 22 nt, Human
uuauggcauauuccucauugua

SEQ ID NO: 145594 - RNA, 22 nt, Human
ugauugaagaggugaggaaguu

SEQ ID NO: 145595 - RNA, 22 nt, Human
uuuucuguuacaaaguacagcg

SEQ ID NO: 145596 - RNA, 22 nt, Human
cagcucaaguuucccaggucag

SEQ ID NO: 145597 - RNA, 22 nt, Human
uuuucauuuacauuagggaaga

SEQ ID NO: 145598 - RNA, 22 nt, Human
uggccuggcagagcaaggccug

SEQ ID NO: 145599 - RNA, 22 nt, Human
aaaaguguccagauuaugaaga

SEQ ID NO: 145600 - RNA, 22 nt, Human
ucucagaguaauucuuuaaggu

SEQ ID NO: 145601 - RNA, 21 nt, Human
ucauuuuuauugcuaccuugc

SEQ ID NO: 145602 - RNA, 22 nt, Human
acucuuuuaugcauuccuucag

SEQ ID NO: 145603 - RNA, 22 nt, Human
ggcuguguccuguaugauuauu

SEQ ID NO: 145604 - RNA, 22 nt, Human
uggcagagcaaaaagauagaau

SEQ ID NO: 145605 - RNA, 22 nt, Human
cccugcagaccaaugccauaga

SEQ ID NO: 145606 - RNA, 22 nt, Human
agguggagacccagagaaggcg

SEQ ID NO: 145607 - RNA, 22 nt, Human
ccagggcugagcugugaccaug

SEQ ID NO: 145608 - RNA, 22 nt, Human
ggcagcaguccauggcccaagg

SEQ ID NO: 145609 - RNA, 19 nt, Human
uuuaaagugacugguauuu

SEQ ID NO: 145610 - RNA, 22 nt, Human
guuuacaguacucacuugcauu

SEQ ID NO: 145611 - RNA, 22 nt, Human
agaauuguugggguaauaaaag

SEQ ID NO: 145612 - RNA, 22 nt, Human
ggcaaaaaccauaauuacuuuu

SEQ ID NO: 145613 - RNA, 22 nt, Human
uuuaagaugguauuuuauaaag

SEQ ID NO: 145614 - RNA, 21 nt, Human
ucagcagcuuuugcagucccu

SEQ ID NO: 145615 - RNA, 22 nt, Human
agccucucuuucugguggcuaa

SEQ ID NO: 145616 - RNA, 22 nt, Human
agccugguguggggcugcagag

SEQ ID NO: 145617 - RNA, 22 nt, Human
uugggguguuggauggagcaag

SEQ ID NO: 145618 - RNA, 22 nt, Human
acaggagugaaucuggcacuua

SEQ ID NO: 145619 - RNA, 22 nt, Human
ucucuuucuauaugugagucuu

SEQ ID NO: 145620 - RNA, 22 nt, Human
cuguccuuacugcuucuggcuu

SEQ ID NO: 145621 - RNA, 22 nt, Human
aagggcugcuguagaagcagag

SEQ ID NO: 145622 - RNA, 22 nt, Human
guggcccucugauagggucagg

SEQ ID NO: 145623 - RNA, 22 nt, Human
auuugcuucugugaaaucaagu

SEQ ID NO: 145624 - RNA, 22 nt, Human
gcagggcugggugggagacaga

SEQ ID NO: 145625 - RNA, 22 nt, Human
cuggagccaugucuugacugcu

SEQ ID NO: 145626 - RNA, 22 nt, Human
uuggcugaagguuaagugcugg

SEQ ID NO: 145627 - RNA, 22 nt, Human
ccauaagguuuggggccaugca

SEQ ID NO: 145628 - RNA, 22 nt, Human
auuuagaaauuccaaaaguauu

SEQ ID NO: 145629 - RNA, 22 nt, Human
cuggcugguuacuauuucuggu

SEQ ID NO: 145630 - RNA, 22 nt, Human
gcuguguaccuacuaacugcuu

SEQ ID NO: 145631 - RNA, 22 nt, Human
aaguucaagagugacauauuag

SEQ ID NO: 145632 - RNA, 17 nt, Human
aagacagaagccaugag

SEQ ID NO: 145633 - RNA, 20 nt, Human
agauggugaaggccagggag

SEQ ID NO: 145634 - RNA, 22 nt, Human
aagauaaacucuugauuucuga

SEQ ID NO: 145635 - RNA, 22 nt, Human
auucaaguucuucugucuuugc

SEQ ID NO: 145636 - RNA, 22 nt, Human
caccaucagcagcaggugucaa

SEQ ID NO: 145637 - RNA, 22 nt, Human
auucucuguucaaggaugguga

SEQ ID NO: 145638 - RNA, 22 nt, Human
aacuuuucacaggcuagcucuu

SEQ ID NO: 145639 - RNA, 20 nt, Human
aaagucuuaugguuaauuuu

SEQ ID NO: 145640 - RNA, 22 nt, Human
agcugcugcggaaagaugccac

SEQ ID NO: 145641 - RNA, 22 nt, Human
cuuucacacacauacauuugga

SEQ ID NO: 145642 - RNA, 22 nt, Human
ugggcuggcugaacuucaaccu

SEQ ID NO: 145643 - RNA, 22 nt, Human
agggcugcaccggggcuucgcg

SEQ ID NO: 145644 - RNA, 22 nt, Human
ugcuggggcucugaccacucca

SEQ ID NO: 145645 - RNA, 22 nt, Human
gugggccuugcagggugcaggg

SEQ ID NO: 145646 - RNA, 22 nt, Human
aaacagaaauuuccucaugcuc

SEQ ID NO: 145647 - RNA, 22 nt, Human
auuuuucucuccacuccauuaa

SEQ ID NO: 145648 - RNA, 22 nt, Human
auuuucugguugagguuuaaca

SEQ ID NO: 145649 - RNA, 22 nt, Human
uuaagucauuucugauuauaga

SEQ ID NO: 145650 - RNA, 21 nt, Human
gugucaugguugacuuuggca

SEQ ID NO: 145651 - RNA, 22 nt, Human
aucacugucgucaucugagauu

SEQ ID NO: 145652 - RNA, 22 nt, Human
cagcucugggugacaggagggc

SEQ ID NO: 145653 - RNA, 22 nt, Human
gagccaggcaccuucuguguug

SEQ ID NO: 145654 - RNA, 22 nt, Human
agcagcauuaugauauaucuua

SEQ ID NO: 145655 - RNA, 22 nt, Human
uuuuucucuaugccaggggccu

SEQ ID NO: 145656 - RNA, 22 nt, Human
ccauggcauuuuaugugucuua

SEQ ID NO: 145657 - RNA, 20 nt, Human
uaggcagagcugugcagccu

SEQ ID NO: 145658 - RNA, 22 nt, Human
gucagaggaauggaugagugau

SEQ ID NO: 145659 - RNA, 17 nt, Human
aauagcugcucagagag

SEQ ID NO: 145660 - RNA, 22 nt, Human
cccuggagcugcuugcauguug

SEQ ID NO: 145661 - RNA, 22 nt, Human
uaugugugcuuuuuccaugcau

SEQ ID NO: 145662 - RNA, 22 nt, Human
ucugcagcgugcaggcuggugc

SEQ ID NO: 145663 - RNA, 22 nt, Human
caggacagagcccagacugugu

SEQ ID NO: 145664 - RNA, 22 nt, Human
auugcagcuggucaggguaauu

SEQ ID NO: 145665 - RNA, 22 nt, Human
uugauacagcagccugugaucc

SEQ ID NO: 145666 - RNA, 22 nt, Human
uuuucauuuuuguagaugcaag

SEQ ID NO: 145667 - RNA, 22 nt, Human
gagaggagucccuaucacaguu

SEQ ID NO: 145668 - RNA, 22 nt, Human
guccucugggagccuugagccu

SEQ ID NO: 145669 - RNA, 22 nt, Human
cugggcugucccaaccccaucc

SEQ ID NO: 145670 - RNA, 22 nt, Human
gcuggccauagaagccaaagag

SEQ ID NO: 145671 - RNA, 22 nt, Human
cucuggagugcagccugguggc

SEQ ID NO: 145672 - RNA, 22 nt, Human
uuagaaaauuugcuucuuugga

SEQ ID NO: 145673 - RNA, 20 nt, Human
uuguuucugcuauuuucuaa

SEQ ID NO: 145674 - RNA, 23 nt, Human
uugcuucugugcaauucaguacu

SEQ ID NO: 145675 - RNA, 22 nt, Human
uaaagguaacaugaacugcuuu

SEQ ID NO: 145676 - RNA, 22 nt, Human
uuucuguuaggcaucauuuuaa

SEQ ID NO: 145677 - RNA, 19 nt, Human
aucagcaagguaggaugug

SEQ ID NO: 145678 - RNA, 22 nt, Human
ucuuuauuuuaugcuugugcaa

SEQ ID NO: 145679 - RNA, 22 nt, Human
aaugcacauaaauauggucuua

SEQ ID NO: 145680 - RNA, 22 nt, Human
gauauuuuugcagacaccuggg

SEQ ID NO: 145681 - RNA, 22 nt, Human
uuucaguuacugcuauaucauu

SEQ ID NO: 145682 - RNA, 22 nt, Human
uggaggaaucagggcuuaggcu

SEQ ID NO: 145683 - RNA, 22 nt, Human
uccucuggggcgugguccugga

SEQ ID NO: 145684 - RNA, 20 nt, Human
cuuggccuacuuagcuuugu

SEQ ID NO: 145685 - RNA, 22 nt, Human
cggcagcaaaggaagccagguc

SEQ ID NO: 145686 - RNA, 21 nt, Human
ucucuggaauuagaccauguu

SEQ ID NO: 145687 - RNA, 22 nt, Human
gccugccuguuggcugaggugc

SEQ ID NO: 145688 - RNA, 22 nt, Human
acacaggggcucggcugggugc

SEQ ID NO: 145689 - RNA, 22 nt, Human
aggcuguggugggcuuugagcc

SEQ ID NO: 145690 - RNA, 22 nt, Human
ccagagucuuuauauuccugaa

SEQ ID NO: 145691 - RNA, 22 nt, Human
gcagggucugaggccacagagg

SEQ ID NO: 145692 - RNA, 22 nt, Human
aaggcccuggcaggaagcagga

SEQ ID NO: 145693 - RNA, 22 nt, Human
cagucccagacccagaaggugg

SEQ ID NO: 145694 - RNA, 22 nt, Human
ccuuuuucccuggagggacagc

SEQ ID NO: 145695 - RNA, 22 nt, Human
aauacaguaauuuugaugaguu

SEQ ID NO: 145696 - RNA, 22 nt, Human
uuacaggaggugcuagguguuu

SEQ ID NO: 145697 - RNA, 22 nt, Human
ucuguggcacgauugcacugca

SEQ ID NO: 145698 - RNA, 19 nt, Human
ucugcuggcagaauucccu

SEQ ID NO: 145699 - RNA, 22 nt, Human
caggggcucuaaugcaugauca

SEQ ID NO: 145700 - RNA, 22 nt, Human
uguguguauguuuacuuuuccu

SEQ ID NO: 145701 - RNA, 22 nt, Human
uuacgaguuugcaauuuuaaau

SEQ ID NO: 145702 - RNA, 22 nt, Human
ggcagggcuugucucugugaug

SEQ ID NO: 145703 - RNA, 22 nt, Human
uuuuacaguuccaugcaaagcg

SEQ ID NO: 145704 - RNA, 22 nt, Human
uguggcuggucuccgagcgucg

SEQ ID NO: 145705 - RNA, 17 nt, Human
gucugggcuuuagagac

SEQ ID NO: 145706 - RNA, 19 nt, Human
cccucaggucugagcaguc

SEQ ID NO: 145707 - RNA, 22 nt, Human
uuccuccacgugacaggagcca

SEQ ID NO: 145708 - RNA, 22 nt, Human
ucuccuuuaagauuuccucagg

SEQ ID NO: 145709 - RNA, 22 nt, Human
uaaaguucuggugagagguaag

SEQ ID NO: 145710 - RNA, 22 nt, Human
cugggccuagaggaagcugaca

SEQ ID NO: 145711 - RNA, 22 nt, Human
cuucacagucacccugcugugu

SEQ ID NO: 145712 - RNA, 22 nt, Human
ucuuccaagguugcacacuauc

SEQ ID NO: 145713 - RNA, 23 nt, Human
aagaauaaaugacauuaaaggug

SEQ ID NO: 145714 - RNA, 22 nt, Human
ggcucagaaacuaaaggcgcug

SEQ ID NO: 145715 - RNA, 21 nt, Human
ugcucaugcaaugcaugucca

SEQ ID NO: 145716 - RNA, 22 nt, Human
ucuuagaaaugaaguucuuucu

SEQ ID NO: 145717 - RNA, 19 nt, Human
uguuuacauguuucuucag

SEQ ID NO: 145718 - RNA, 22 nt, Human
gaggaggcuggcgccgccugcc

SEQ ID NO: 145719 - RNA, 22 nt, Human
agggcagcuaaggugcugacug

SEQ ID NO: 145720 - RNA, 22 nt, Human
guauguguugaauucagggguc

SEQ ID NO: 145721 - RNA, 22 nt, Human
cagguggaucucuaaggacuga

SEQ ID NO: 145722 - RNA, 22 nt, Human
ucucaguguguuuucucucaga

SEQ ID NO: 145723 - RNA, 22 nt, Human
gagauuucuuuugaugccuguc

SEQ ID NO: 145724 - RNA, 22 nt, Human
uuaaaguaaucugugugaauuu

SEQ ID NO: 145725 - RNA, 22 nt, Human
uuguccuuggaugaagcuggga

SEQ ID NO: 145726 - RNA, 22 nt, Human
cugccuguuuucugauagauuu

SEQ ID NO: 145727 - RNA, 22 nt, Human
acaaaugugucuaauugugccu

SEQ ID NO: 145728 - RNA, 22 nt, Human
gcauguguggaggagaugugcu

SEQ ID NO: 145729 - RNA, 19 nt, Human
guggccagggcaggggcug

SEQ ID NO: 145730 - RNA, 22 nt, Human
uugcagcugcaguaaauguuca

SEQ ID NO: 145731 - RNA, 19 nt, Human
agcuggagauuggagggca

SEQ ID NO: 145732 - RNA, 22 nt, Human
gcaggcugugaggcucagaugg

SEQ ID NO: 145733 - RNA, 22 nt, Human
gcagcugccuauucagggcuug

SEQ ID NO: 145734 - RNA, 22 nt, Human
gcagccaggaaagcuggacccu

SEQ ID NO: 145735 - RNA, 22 nt, Human
uuggccuuguuaaggaggcccu

SEQ ID NO: 145736 - RNA, 22 nt, Human
ggcugucugugguggagcguug

SEQ ID NO: 145737 - RNA, 22 nt, Human
agccacagagagggagcugcaa

SEQ ID NO: 145738 - RNA, 22 nt, Human
uuugaaagcaggugugggaggg

SEQ ID NO: 145739 - RNA, 22 nt, Human
ucuucacagaugcauauacuuc

SEQ ID NO: 145740 - RNA, 22 nt, Human
cugaaggaagcagaagcgaggu

SEQ ID NO: 145741 - RNA, 22 nt, Human
acagggcagguggcuacugguc

SEQ ID NO: 145742 - RNA, 18 nt, Human
ugacagaaccuggagccu

SEQ ID NO: 145743 - RNA, 22 nt, Human
ucagaguguuuuacuaaacaag

SEQ ID NO: 145744 - RNA, 22 nt, Human
aaaagguuuugaguacaaauau

SEQ ID NO: 145745 - RNA, 22 nt, Human
aaguucaaggaagccuccaguu

SEQ ID NO: 145746 - RNA, 22 nt, Human
cugucuuuuacuaucauuuacu

SEQ ID NO: 145747 - RNA, 22 nt, Human
aagagagaacucccuucgccag

SEQ ID NO: 145748 - RNA, 22 nt, Human
uauuuuguuaauaauccagucc

SEQ ID NO: 145749 - RNA, 22 nt, Human
uugcaccauuucacuuccauua

SEQ ID NO: 145750 - RNA, 22 nt, Human
gucccagggaugcagacaugag

SEQ ID NO: 145751 - RNA, 19 nt, Human
ccuggguccacucagacua

SEQ ID NO: 145752 - RNA, 22 nt, Human
auuuucucuuuguauaugcuag

SEQ ID NO: 145753 - RNA, 22 nt, Human
cuucuugcaauuuucaucuuau

SEQ ID NO: 145754 - RNA, 22 nt, Human
ugaguucucacccauucuucuu

SEQ ID NO: 145755 - RNA, 22 nt, Human
guguacaugagaaaucaacuuu

SEQ ID NO: 145756 - RNA, 23 nt, Human
ucuuuuuaagagaucuagugacg

SEQ ID NO: 145757 - RNA, 22 nt, Human
cuggcugugaaauggcaguguc

SEQ ID NO: 145758 - RNA, 22 nt, Human
guggcuguucuugccccaugcu

SEQ ID NO: 145759 - RNA, 22 nt, Human
agccucuggcccuagacugcuu

SEQ ID NO: 145760 - RNA, 22 nt, Human
ggcaccugcucaucuggacuca

SEQ ID NO: 145761 - RNA, 22 nt, Human
gccugaaguuucaugccucuau

SEQ ID NO: 145762 - RNA, 22 nt, Human
ccugucugcggaggaguggaag

SEQ ID NO: 145763 - RNA, 23 nt, Human
aguuuguaaagaaauauuugcac

SEQ ID NO: 145764 - RNA, 22 nt, Human
ugggcuccucgucacucgcugu

SEQ ID NO: 145765 - RNA, 22 nt, Human
gugcucacugugagacguccug

SEQ ID NO: 145766 - RNA, 22 nt, Human
ugaggaggucagagucuggcug

SEQ ID NO: 145767 - RNA, 22 nt, Human
gcuggccugggcagaggcuaug

SEQ ID NO: 145768 - RNA, 22 nt, Human
gugccuggagcuaauguguaua

SEQ ID NO: 145769 - RNA, 21 nt, Human
aggggacagaguagcuccagg

SEQ ID NO: 145770 - RNA, 19 nt, Human
ccagagcccgccagauggg

SEQ ID NO: 145771 - RNA, 22 nt, Human
ugcaucuuacguuuugaaaggg

SEQ ID NO: 145772 - RNA, 22 nt, Human
agguaaagacugcaaggagaau

SEQ ID NO: 145773 - RNA, 23 nt, Human
uucuuucaagaaguucacagugc

SEQ ID NO: 145774 - RNA, 22 nt, Human
ccagcuugaagaugugcugguu

SEQ ID NO: 145775 - RNA, 22 nt, Human
gagaaagcuucuuucccacagg

SEQ ID NO: 145776 - RNA, 22 nt, Human
ccucagggacuccaugcugcag

SEQ ID NO: 145777 - RNA, 22 nt, Human
acacuuuguuguggcauauacg

SEQ ID NO: 145778 - RNA, 22 nt, Human
gggaagggagggaccucagucu

SEQ ID NO: 145779 - RNA, 22 nt, Human
ugccucugaggaagauuguguu

SEQ ID NO: 145780 - RNA, 22 nt, Human
caaauaucuuuggcaaagagaa

SEQ ID NO: 145781 - RNA, 22 nt, Human
gaggucaggggagaggcugaug

SEQ ID NO: 145782 - RNA, 22 nt, Human
ugaagcagcuucuuucugucaa

SEQ ID NO: 145783 - RNA, 22 nt, Human
ucuggcucuaacuaggcaucag

SEQ ID NO: 145784 - RNA, 22 nt, Human
cagcuuccaucuccacugcccu

SEQ ID NO: 145785 - RNA, 22 nt, Human
ccagguggugaaagugggcccu

SEQ ID NO: 145786 - RNA, 22 nt, Human
uugaauaggacucagcagugau

SEQ ID NO: 145787 - RNA, 22 nt, Human
gaggugggagggcagucccuaa

SEQ ID NO: 145788 - RNA, 19 nt, Human
guggccucggagcgcgcgg

SEQ ID NO: 145789 - RNA, 22 nt, Human
agaaaugggccuugggacacaa

SEQ ID NO: 145790 - RNA, 22 nt, Human
cagggugccaaagaacaaauau

SEQ ID NO: 145791 - RNA, 22 nt, Human
uuugcagugucagcuucugugu

SEQ ID NO: 145792 - RNA, 22 nt, Human
cugcugugugaccauggacagg

SEQ ID NO: 145793 - RNA, 16 nt, Human
agaggccuugaggaag

SEQ ID NO: 145794 - RNA, 22 nt, Human
gcucugcucuaacauuccugac

SEQ ID NO: 145795 - RNA, 22 nt, Human
guaacacagaaaugaaauucca

SEQ ID NO: 145796 - RNA, 22 nt, Human
ugagccugggagauggaggcug

SEQ ID NO: 145797 - RNA, 22 nt, Human
cugguacaaaaugcugauauca

SEQ ID NO: 145798 - RNA, 20 nt, Human
cugccuggaggccucuaccu

SEQ ID NO: 145799 - RNA, 22 nt, Human
gcuccugggcucuaccuugcua

SEQ ID NO: 145800 - RNA, 22 nt, Human
gggaaauugucaacacucucaa

SEQ ID NO: 145801 - RNA, 22 nt, Human
ccugucacgaugacugcacucu

SEQ ID NO: 145802 - RNA, 22 nt, Human
aagagagagcauucuucuguua

SEQ ID NO: 145803 - RNA, 22 nt, Human
gcugagagugagcacuggauau

SEQ ID NO: 145804 - RNA, 22 nt, Human
uggcucuguucgccaucaggag

SEQ ID NO: 145805 - RNA, 22 nt, Human
ugcauuguugaauauuucauag

SEQ ID NO: 145806 - RNA, 22 nt, Human
uguguggcaagcuguaugcuag

SEQ ID NO: 145807 - RNA, 22 nt, Human
ucacaucuuauuagaguaucuc

SEQ ID NO: 145808 - RNA, 22 nt, Human
gccuguguggaugcgccggugc

SEQ ID NO: 145809 - RNA, 22 nt, Human
ggagucaggagcaggcugggcu

SEQ ID NO: 145810 - RNA, 22 nt, Human
agcagcaucugguucugaugug

SEQ ID NO: 145811 - RNA, 22 nt, Human
gcugcaggagcuggagcugugg

SEQ ID NO: 145812 - RNA, 22 nt, Human
ccugccuggcugucagcagagc

SEQ ID NO: 145813 - RNA, 18 nt, Human
uguuccaaggaaggaauc

SEQ ID NO: 145814 - RNA, 22 nt, Human
gcucccugaaaagaacaaaguc

SEQ ID NO: 145815 - RNA, 22 nt, Human
gugugucuuucauuucaugagg

SEQ ID NO: 145816 - RNA, 22 nt, Human
agggccugggguagcuuacugc

SEQ ID NO: 145817 - RNA, 22 nt, Human
uucuucaguuugguaaauguaa

SEQ ID NO: 145818 - RNA, 22 nt, Human
ccaaggagcucauauucuuguu

SEQ ID NO: 145819 - RNA, 21 nt, Human
agcucagccgggcacaguggc

SEQ ID NO: 145820 - RNA, 22 nt, Human
ccuggaggagcgcugaccagcu

SEQ ID NO: 145821 - RNA, 22 nt, Human
ccagggcacguugggacaguac

SEQ ID NO: 145822 - RNA, 22 nt, Human
uggcuagcccuuguggggagag

SEQ ID NO: 145823 - RNA, 22 nt, Human
guguguauguagaacuauguau

SEQ ID NO: 145824 - RNA, 23 nt, Human
agacccagagacuggcucugcuc

SEQ ID NO: 145825 - RNA, 22 nt, Human
cagccagccucucaaccaugca

SEQ ID NO: 145826 - RNA, 22 nt, Human
ugggggugacuaucucgggaau

SEQ ID NO: 145827 - RNA, 22 nt, Human
acaggcuuuuuuagaaugacau

SEQ ID NO: 145828 - RNA, 22 nt, Human
gaagcagcagcuggggacaguu

SEQ ID NO: 145829 - RNA, 22 nt, Human
gcguaaggccucuggucucgga

SEQ ID NO: 145830 - RNA, 22 nt, Human
uggccucugugggagcugagca

SEQ ID NO: 145831 - RNA, 22 nt, Human
cuuacagugaucaacacaaaga

SEQ ID NO: 145832 - RNA, 22 nt, Human
ggggccuguagagcuucaggga

SEQ ID NO: 145833 - RNA, 20 nt, Human
cagcaggaaaagugccucag

SEQ ID NO: 145834 - RNA, 20 nt, Human
cucuccucacccgugucagg

SEQ ID NO: 145835 - RNA, 17 nt, Human
aucucucuaaggcaggc

SEQ ID NO: 145836 - RNA, 22 nt, Human
gcagcauuuguggaaugggccc

SEQ ID NO: 145837 - RNA, 22 nt, Human
ucugccagaaguucugagagua

SEQ ID NO: 145838 - RNA, 22 nt, Human
ucaaacuguuuacagugagaua

SEQ ID NO: 145839 - RNA, 22 nt, Human
ugcucugcaagcaggagcaaga

SEQ ID NO: 145840 - RNA, 22 nt, Human
cagaaaaccugacucuagaacu

SEQ ID NO: 145841 - RNA, 22 nt, Human
guaacugaggcagcuuuuaaga

SEQ ID NO: 145842 - RNA, 18 nt, Human
ugggcugccuggccucug

SEQ ID NO: 145843 - RNA, 22 nt, Human
guuuucucuguguuuggaugau

SEQ ID NO: 145844 - RNA, 21 nt, Human
ugugugugcaggcacacacac

SEQ ID NO: 145845 - RNA, 22 nt, Human
acuuugcagggcuugauaucca

SEQ ID NO: 145846 - RNA, 22 nt, Human
aaaugucuguuagucauaucau

SEQ ID NO: 145847 - RNA, 22 nt, Human
gccugcagccucaagggcugag

SEQ ID NO: 145848 - RNA, 22 nt, Human
ccuccuuuccuguuuuccugag

SEQ ID NO: 145849 - RNA, 20 nt, Human
auuuggcaugaaguauugau

SEQ ID NO: 145850 - RNA, 22 nt, Human
gagguacagaguguuccaaugu

SEQ ID NO: 145851 - RNA, 19 nt, Human
gccacuccugaugcugccc

SEQ ID NO: 145852 - RNA, 22 nt, Human
gaaaccucuuagccucucuuug

SEQ ID NO: 145853 - RNA, 22 nt, Human
uuugacagagcucuuagucucu

SEQ ID NO: 145854 - RNA, 22 nt, Human
aaaugcagguaguauuuauuuu

SEQ ID NO: 145855 - RNA, 22 nt, Human
agggagaaugaccaagguauau

SEQ ID NO: 145856 - RNA, 22 nt, Human
cucugagcuccuggaagcgugc

SEQ ID NO: 145857 - RNA, 17 nt, Human
gguguauggggagggaa

SEQ ID NO: 145858 - RNA, 18 nt, Human
ccagagcuggcuccucgc

SEQ ID NO: 145859 - RNA, 22 nt, Human
uucuucaaauagcagggaguca

SEQ ID NO: 145860 - RNA, 22 nt, Human
gaaaguuuauagguuauauaau

SEQ ID NO: 145861 - RNA, 22 nt, Human
gcccucucuucugcagccucca

SEQ ID NO: 145862 - RNA, 23 nt, Human
ugggcaucuccucugugccaggc

SEQ ID NO: 145863 - RNA, 22 nt, Human
gggccuggggugacguaccccu

SEQ ID NO: 145864 - RNA, 22 nt, Human
gcacagggcccugugcguaggu

SEQ ID NO: 145865 - RNA, 22 nt, Human
cuucuucaagagaaugggagac

SEQ ID NO: 145866 - RNA, 22 nt, Human
acacagggucuagaguuaggcc

SEQ ID NO: 145867 - RNA, 22 nt, Human
augaguaaaaccacuauuuaca

SEQ ID NO: 145868 - RNA, 20 nt, Human
ggcagcaggaguuuccucuu

SEQ ID NO: 145869 - RNA, 22 nt, Human
auaugugugaugcauggacuaa

SEQ ID NO: 145870 - RNA, 22 nt, Human
acacugaauguuuaagaacuug

SEQ ID NO: 145871 - RNA, 22 nt, Human
cuggagcuaggaaguccaagau

SEQ ID NO: 145872 - RNA, 22 nt, Human
acacaggaagucagcacugaug

SEQ ID NO: 145873 - RNA, 21 nt, Human
ugccaggccugagcugggguc

SEQ ID NO: 145874 - RNA, 22 nt, Human
gaggcugcuuugaugacaggag

SEQ ID NO: 145875 - RNA, 22 nt, Human
aggccuccuggcuccaggccuu

SEQ ID NO: 145876 - RNA, 21 nt, Human
cccagggaagccgcagucacc

SEQ ID NO: 145877 - RNA, 22 nt, Human
aaccauuugcaguuacugagac

SEQ ID NO: 145878 - RNA, 20 nt, Human
agcugguuaucuuaauucuu

SEQ ID NO: 145879 - RNA, 22 nt, Human
ucugggaaugaauaagaccugu

SEQ ID NO: 145880 - RNA, 22 nt, Human
acagagcucccagccaucuccu

SEQ ID NO: 145881 - RNA, 22 nt, Human
aucacauugccagugauuaccc

SEQ ID NO: 145882 - RNA, 22 nt, Human
ggcugagcaauuuugaugacau

SEQ ID NO: 145883 - RNA, 22 nt, Human
uuucauuuugguuaugccauaa

SEQ ID NO: 145884 - RNA, 22 nt, Human
uccucagggaagaugagccuca

SEQ ID NO: 145885 - RNA, 22 nt, Human
gcagccacuuugcaaccaagag

SEQ ID NO: 145886 - RNA, 22 nt, Human
gccacacugcuucuuugagccu

SEQ ID NO: 145887 - RNA, 23 nt, Human
agcccagcagagaaccuaggucc

SEQ ID NO: 145888 - RNA, 22 nt, Human
aacaaauguaaaaugcagaugc

SEQ ID NO: 145889 - RNA, 22 nt, Human
uuucacauguggaaugccaggu

SEQ ID NO: 145890 - RNA, 22 nt, Human
cugcugagcccuggcacaggug

SEQ ID NO: 145891 - RNA, 22 nt, Human
gugcaggggaucagguugcagc

SEQ ID NO: 145892 - RNA, 22 nt, Human
acagaauacuacagacugguua

SEQ ID NO: 145893 - RNA, 22 nt, Human
ggcugccauaacugauaccaua

SEQ ID NO: 145894 - RNA, 22 nt, Human
ucagugcuucggcgagcaccua

SEQ ID NO: 145895 - RNA, 22 nt, Human
aggcacugugcagucccaagca

SEQ ID NO: 145896 - RNA, 22 nt, Human
aagaacagguucuagaaccauu

SEQ ID NO: 145897 - RNA, 22 nt, Human
cuggcucagugccuucagaagu

SEQ ID NO: 145898 - RNA, 22 nt, Human
aaggccagaguacuagaggcug

SEQ ID NO: 145899 - RNA, 22 nt, Human
uuucuucagccacuccaaacug

SEQ ID NO: 145900 - RNA, 22 nt, Human
gcuucucuggccugcagggcau

SEQ ID NO: 145901 - RNA, 22 nt, Human
auuugcuuucagguauaaaagg

SEQ ID NO: 145902 - RNA, 22 nt, Human
gggcucugcgcucagcuccagc

SEQ ID NO: 145903 - RNA, 22 nt, Human
cuggccugggagcugcuagcgu

SEQ ID NO: 145904 - RNA, 22 nt, Human
agcagcucugagaggccagcac

SEQ ID NO: 145905 - RNA, 22 nt, Human
acauuucuuucuauucaguagc

SEQ ID NO: 145906 - RNA, 22 nt, Human
gggcuuggcacaugggcucagc

SEQ ID NO: 145907 - RNA, 22 nt, Human
uguggccuuauuuguauggggg

SEQ ID NO: 145908 - RNA, 22 nt, Human
gcagggacugugaucucacaga

SEQ ID NO: 145909 - RNA, 22 nt, Human
gcugucagugaggugagacaug

SEQ ID NO: 145910 - RNA, 22 nt, Human
ggcacugacacuagcauggcac

SEQ ID NO: 145911 - RNA, 22 nt, Human
gccugccuggagcuugagguga

SEQ ID NO: 145912 - RNA, 22 nt, Human
ucaggugggaccugcuaggaca

SEQ ID NO: 145913 - RNA, 22 nt, Human
ucucuugugguuuuguaguuga

SEQ ID NO: 145914 - RNA, 22 nt, Human
auugaaaggcaaaguaggaagc

SEQ ID NO: 145915 - RNA, 22 nt, Human
ucccagcagucagagcuaugug

SEQ ID NO: 145916 - RNA, 22 nt, Human
uuauacuaaaacgcauugaauu

SEQ ID NO: 145917 - RNA, 22 nt, Human
ucaguuuucucaucuguaauuu

SEQ ID NO: 145918 - RNA, 22 nt, Human
cauugaaaaacguugacugagu

SEQ ID NO: 145919 - RNA, 22 nt, Human
caagacaagaucuaagcaugcu

SEQ ID NO: 145920 - RNA, 21 nt, Human
ccuucuccacagggucuccgg

SEQ ID NO: 145921 - RNA, 22 nt, Human
cauugaaaccuaacauaggcug

SEQ ID NO: 145922 - RNA, 22 nt, Human
gcacagggcaacaggucuguua

SEQ ID NO: 145923 - RNA, 22 nt, Human
cagugcugggcagaggagagcg

SEQ ID NO: 145924 - RNA, 22 nt, Human
ugucucugugacuccuuccgcc

SEQ ID NO: 145925 - RNA, 22 nt, Human
ugugaguaauaaagucauuuuu

SEQ ID NO: 145926 - RNA, 22 nt, Human
ucaucucaaaacccaaggggca

SEQ ID NO: 145927 - RNA, 22 nt, Human
caguuuauauucuagugcuguu

SEQ ID NO: 145928 - RNA, 22 nt, Human
aauuucucacucucuugaucac

SEQ ID NO: 145929 - RNA, 23 nt, Human
agaauuguaaauagaauauaccu

SEQ ID NO: 145930 - RNA, 22 nt, Human
aguuuuauuccaaugugcagca

SEQ ID NO: 145931 - RNA, 22 nt, Human
ucauccaguaccauggaaggca

SEQ ID NO: 145932 - RNA, 23 nt, Human
agaggcaggaguggcuugcccgg

SEQ ID NO: 145933 - RNA, 22 nt, Human
gcuggagcuugagaggacaggg

SEQ ID NO: 145934 - RNA, 22 nt, Human
aggcacugacaauucuggacug

SEQ ID NO: 145935 - RNA, 22 nt, Human
uggcauguaguaggugcuauaa

SEQ ID NO: 145936 - RNA, 20 nt, Human
accuugaacccgccagccau

SEQ ID NO: 145937 - RNA, 22 nt, Human
ggggcagagagaaggaagcuug

SEQ ID NO: 145938 - RNA, 22 nt, Human
ugcuuccuucccguucuucucc

SEQ ID NO: 145939 - RNA, 22 nt, Human
uacuuuucaagcagcugguuau

SEQ ID NO: 145940 - RNA, 22 nt, Human
aucagcaagcaugguuaggugu

SEQ ID NO: 145941 - RNA, 22 nt, Human
gaagcagcuagcccacuaguca

SEQ ID NO: 145942 - RNA, 22 nt, Human
guucuucaaagugacaacuaaa

SEQ ID NO: 145943 - RNA, 22 nt, Human
cucuucuugucucugguuagaa

SEQ ID NO: 145944 - RNA, 21 nt, Human
uggcugcuggcccucucucca

SEQ ID NO: 145945 - RNA, 22 nt, Human
ugugugaaggagccacuguuca

SEQ ID NO: 145946 - RNA, 22 nt, Human
caugagcugcugggagccuguc

SEQ ID NO: 145947 - RNA, 22 nt, Human
caguggccaugguggcaggggu

SEQ ID NO: 145948 - RNA, 22 nt, Human
gcaccugcaggaugagccaggg

SEQ ID NO: 145949 - RNA, 22 nt, Human
auuacaguucuacacauccuuu

SEQ ID NO: 145950 - RNA, 20 nt, Human
cugagcccccagccugcagg

SEQ ID NO: 145951 - RNA, 22 nt, Human
agggccuggaacugugggcagg

SEQ ID NO: 145952 - RNA, 22 nt, Human
uggagacugugcuaagggaguu

SEQ ID NO: 145953 - RNA, 22 nt, Human
ucugggugaugaaaugcacugu

SEQ ID NO: 145954 - RNA, 22 nt, Human
agcagggcuuugcagacuuggg

SEQ ID NO: 145955 - RNA, 22 nt, Human
auacauuagcucauaugauuaa

SEQ ID NO: 145956 - RNA, 22 nt, Human
cagcugcccugccuugcccuua

SEQ ID NO: 145957 - RNA, 22 nt, Human
ucaggcugguggucagauggcu

SEQ ID NO: 145958 - RNA, 20 nt, Human
acauguacuaaugaauacag

SEQ ID NO: 145959 - RNA, 18 nt, Human
acagaaauagcugugccu

SEQ ID NO: 145960 - RNA, 22 nt, Human
ggugaagggugucauggcauuu

SEQ ID NO: 145961 - RNA, 22 nt, Human
cauugcuuugugcauauuuaaa

SEQ ID NO: 145962 - RNA, 22 nt, Human
cacucaggguacaauggagggc

SEQ ID NO: 145963 - RNA, 22 nt, Human
gguucacauauugagaguauuc

SEQ ID NO: 145964 - RNA, 22 nt, Human
agccuggagguaaugaggaaac

SEQ ID NO: 145965 - RNA, 22 nt, Human
ggcagcuguggacgucgucauu

SEQ ID NO: 145966 - RNA, 22 nt, Human
cugggcuccuaaccauccaggu

SEQ ID NO: 145967 - RNA, 22 nt, Human
uaaaaugaucucucauguucuu

SEQ ID NO: 145968 - RNA, 22 nt, Human
ggguggaggagaacaggcccca

SEQ ID NO: 145969 - RNA, 22 nt, Human
aggucaaguuuagauagaguua

SEQ ID NO: 145970 - RNA, 22 nt, Human
ugagggaguuggguguauagga

SEQ ID NO: 145971 - RNA, 18 nt, Human
uugagggaggggcagagu

SEQ ID NO: 145972 - RNA, 22 nt, Human
ggaggugaggccguagggugug

SEQ ID NO: 145973 - RNA, 22 nt, Human
ccaggcucugcgcuggacaugg

SEQ ID NO: 145974 - RNA, 22 nt, Human
cagagcugucauuugccaguga

SEQ ID NO: 145975 - RNA, 22 nt, Human
uccaugaggaccaaauucguag

SEQ ID NO: 145976 - RNA, 22 nt, Human
gaggcugcggggaggagccugc

SEQ ID NO: 145977 - RNA, 22 nt, Human
cuuguacauagagaagaagccu

SEQ ID NO: 145978 - RNA, 22 nt, Human
cugccucugguuuuggucccug

SEQ ID NO: 145979 - RNA, 18 nt, Human
acagaggcagacauguau

SEQ ID NO: 145980 - RNA, 22 nt, Human
auuuuucucuuuccacugagau

SEQ ID NO: 145981 - RNA, 22 nt, Human
ugucucugugagaucugacgau

SEQ ID NO: 145982 - RNA, 22 nt, Human
gaguauauaauuaauuggucug

SEQ ID NO: 145983 - RNA, 22 nt, Human
ucaaagucuaucuguaauuacu

SEQ ID NO: 145984 - RNA, 22 nt, Human
cagagugagggccugcaccugc

SEQ ID NO: 145985 - RNA, 22 nt, Human
aguaaauuucugcauguguacu

SEQ ID NO: 145986 - RNA, 23 nt, Human
agaagcagcuucuggaguaucgg

SEQ ID NO: 145987 - RNA, 22 nt, Human
gugcugcagagucucgugccgc

SEQ ID NO: 145988 - RNA, 22 nt, Human
gggucccaggaaggagcagugu

SEQ ID NO: 145989 - RNA, 22 nt, Human
gacaugcaacaauuuggcauuu

SEQ ID NO: 145990 - RNA, 22 nt, Human
uuuaucagaggcuauguuucau

SEQ ID NO: 145991 - RNA, 22 nt, Human
cucugcaugccuugcucagaca

SEQ ID NO: 145992 - RNA, 22 nt, Human
accacuguaucuccagcacauu

SEQ ID NO: 145993 - RNA, 23 nt, Human
ugugucugaggauauaugugcau

SEQ ID NO: 145994 - RNA, 22 nt, Human
uaaggucauggugaauaauaag

SEQ ID NO: 145995 - RNA, 22 nt, Human
uuuucaguuccaucucugcucu

SEQ ID NO: 145996 - RNA, 22 nt, Human
ccugggcauaaaucacuccaag

SEQ ID NO: 145997 - RNA, 22 nt, Human
ucuggcucugaauucacuucug

SEQ ID NO: 145998 - RNA, 22 nt, Human
gagagcuguaauagucaugucu

SEQ ID NO: 145999 - RNA, 22 nt, Human
cuacuucuaaguacauggugau

SEQ ID NO: 146000 - RNA, 22 nt, Human
cagaggcugggaccucaggcau

SEQ ID NO: 146001 - RNA, 22 nt, Human
uuuauucaucaucuguucauau

SEQ ID NO: 146002 - RNA, 22 nt, Human
cucuuuccaggguaccccaggu

SEQ ID NO: 146003 - RNA, 22 nt, Human
uuacauuuuaguuaaccuguga

SEQ ID NO: 146004 - RNA, 22 nt, Human
ugggcugcuucuauuggugguc

SEQ ID NO: 146005 - RNA, 22 nt, Human
cugggcagccucacacaauguu

SEQ ID NO: 146006 - RNA, 22 nt, Human
ugcacccucaucagucaaaugg

SEQ ID NO: 146007 - RNA, 22 nt, Human
acagaacugggaaaugcacaua

SEQ ID NO: 146008 - RNA, 17 nt, Human
gcuuccucaugcaguuc

SEQ ID NO: 146009 - RNA, 22 nt, Human
uguauuuuuaggaaugcgcuau

SEQ ID NO: 146010 - RNA, 22 nt, Human
auggggcuguucucugcccugc

SEQ ID NO: 146011 - RNA, 22 nt, Human
ugccugucagggggagugggaa

SEQ ID NO: 146012 - RNA, 22 nt, Human
aagggcagcugacagaugcuua

SEQ ID NO: 146013 - RNA, 22 nt, Human
ugguacacauguccaaggucag

SEQ ID NO: 146014 - RNA, 22 nt, Human
uuaagucacuuaucuaaagaca

SEQ ID NO: 146015 - RNA, 17 nt, Human
acacagccagguucucc

SEQ ID NO: 146016 - RNA, 22 nt, Human
gaucuucuauguaaugaagugu

SEQ ID NO: 146017 - RNA, 22 nt, Human
gcaggcaguugcaguuuucuag

SEQ ID NO: 146018 - RNA, 17 nt, Human
ggaaaaggaugauacag

SEQ ID NO: 146019 - RNA, 22 nt, Human
guggcaugaaagcaucugugau

SEQ ID NO: 146020 - RNA, 22 nt, Human
cugcccugagggccuguguguu

SEQ ID NO: 146021 - RNA, 20 nt, Human
acauugauuauguuuguaga

SEQ ID NO: 146022 - RNA, 22 nt, Human
gcaggggaguggaugauggauu

SEQ ID NO: 146023 - RNA, 22 nt, Human
aucucagacauguuguccauga

SEQ ID NO: 146024 - RNA, 22 nt, Human
ucucaggagccacagcgggagu

SEQ ID NO: 146025 - RNA, 22 nt, Human
aacagaauaguugauguacagu

SEQ ID NO: 146026 - RNA, 22 nt, Human
ggcuccuggggaggugagcuug

SEQ ID NO: 146027 - RNA, 22 nt, Human
uaaguucagaguucucauuugu

SEQ ID NO: 146028 - RNA, 21 nt, Human
aucuuuauuacgcagagaaga

SEQ ID NO: 146029 - RNA, 22 nt, Human
caggaaccuaaugaaggcucac

SEQ ID NO: 146030 - RNA, 23 nt, Human
aagcugccuucgcaguuggucug

SEQ ID NO: 146031 - RNA, 22 nt, Human
ucaugugucugccaguguuuau

SEQ ID NO: 146032 - RNA, 22 nt, Human
gcacccagcccagggcgugaug

SEQ ID NO: 146033 - RNA, 22 nt, Human
augugucuucuguggguuugaa

SEQ ID NO: 146034 - RNA, 22 nt, Human
gggcuguggagccgcgagggcu

SEQ ID NO: 146035 - RNA, 22 nt, Human
guauaguuugcgauuugugguu

SEQ ID NO: 146036 - RNA, 22 nt, Human
ugaaggaaagagggaacauccc

SEQ ID NO: 146037 - RNA, 22 nt, Human
gcaggccuccccugcuggagcu

SEQ ID NO: 146038 - RNA, 22 nt, Human
agugauggagcuuccucugcua

SEQ ID NO: 146039 - RNA, 22 nt, Human
uguggguggagugauauuagcu

SEQ ID NO: 146040 - RNA, 22 nt, Human
auuuguacaaauuuauguuagu

SEQ ID NO: 146041 - RNA, 22 nt, Human
ugagccuggguggucgaggcug

SEQ ID NO: 146042 - RNA, 22 nt, Human
ggaggccuugaggccaggagcu

SEQ ID NO: 146043 - RNA, 22 nt, Human
uauacaguuaaguuucuucagu

SEQ ID NO: 146044 - RNA, 22 nt, Human
aagauggaguaguguaaugguu

SEQ ID NO: 146045 - RNA, 22 nt, Human
acugagcugcuugaagugaacu

SEQ ID NO: 146046 - RNA, 22 nt, Human
accucugccacuuucuaacucu

SEQ ID NO: 146047 - RNA, 22 nt, Human
uccuucagaaaaccucagucuu

SEQ ID NO: 146048 - RNA, 20 nt, Human
uggcccuguuuucuccaggc

SEQ ID NO: 146049 - RNA, 22 nt, Human
aaagauuugaaauuaggcauca

SEQ ID NO: 146050 - RNA, 23 nt, Human
gugcaugugucuuuacaguagca

SEQ ID NO: 146051 - RNA, 22 nt, Human
cuguguaucucugugggacaga

SEQ ID NO: 146052 - RNA, 22 nt, Human
uucauuccuucccuaagcaacu

SEQ ID NO: 146053 - RNA, 22 nt, Human
cuuauguaugcuacuuuguggu

SEQ ID NO: 146054 - RNA, 22 nt, Human
uccagccaacugccuagggagc

SEQ ID NO: 146055 - RNA, 22 nt, Human
agcagacaacccagaugaccca

SEQ ID NO: 146056 - RNA, 22 nt, Human
acauacauauguuuaaaugcau

SEQ ID NO: 146057 - RNA, 22 nt, Human
uguguaugcauacacacauaga

SEQ ID NO: 146058 - RNA, 22 nt, Human
acuuauuagacaucuucauugu

SEQ ID NO: 146059 - RNA, 19 nt, Human
ugaagcaauaccauuuuug

SEQ ID NO: 146060 - RNA, 22 nt, Human
ccagggccaguaagauuggcau

SEQ ID NO: 146061 - RNA, 22 nt, Human
gggcuccagcccgggaccaggu

SEQ ID NO: 146062 - RNA, 22 nt, Human
uggccugguaccacauagauuu

SEQ ID NO: 146063 - RNA, 22 nt, Human
cagagagcuuagugugcugcau

SEQ ID NO: 146064 - RNA, 22 nt, Human
aucaguuuauacuuauaaaucu

SEQ ID NO: 146065 - RNA, 22 nt, Human
agcaggagcugugggaagaugg

SEQ ID NO: 146066 - RNA, 22 nt, Human
ggguguccugugccaagcuggg

SEQ ID NO: 146067 - RNA, 22 nt, Human
gcucagagaugucugcugccuu

SEQ ID NO: 146068 - RNA, 20 nt, Human
cccugagacaaaggaggggc

SEQ ID NO: 146069 - RNA, 22 nt, Human
uaaguggaagguuauaugcuaa

SEQ ID NO: 146070 - RNA, 22 nt, Human
acauuuaaauaugccuuauauu

SEQ ID NO: 146071 - RNA, 22 nt, Human
uuuucucuauauugucugugaa

SEQ ID NO: 146072 - RNA, 22 nt, Human
gcuggccauggggagugaggag

SEQ ID NO: 146073 - RNA, 22 nt, Human
ccaaagugcugggguuacaggc

SEQ ID NO: 146074 - RNA, 22 nt, Human
cagcccugccauggagccuccu

SEQ ID NO: 146075 - RNA, 22 nt, Human
gagcccaggcagagguugcagu

SEQ ID NO: 146076 - RNA, 22 nt, Human
cauuuguaauacugacuugcag

SEQ ID NO: 146077 - RNA, 22 nt, Human
cccagccagccucuucccauau

SEQ ID NO: 146078 - RNA, 22 nt, Human
cacaguauucacugggcagauu

SEQ ID NO: 146079 - RNA, 20 nt, Human
ggcucuggaaucuggugggc

SEQ ID NO: 146080 - RNA, 23 nt, Human
ucucucuuagcuaugcuuauggc

SEQ ID NO: 146081 - RNA, 22 nt, Human
agcuuaggaggaugaugaacau

SEQ ID NO: 146082 - RNA, 18 nt, Human
aaguaacagaagagcaca

SEQ ID NO: 146083 - RNA, 22 nt, Human
aagagguaaccauagcaaccac

SEQ ID NO: 146084 - RNA, 22 nt, Human
agguggccggugccagccgggc

SEQ ID NO: 146085 - RNA, 22 nt, Human
uugaggagcaggaugggaggcu

SEQ ID NO: 146086 - RNA, 22 nt, Human
cagagcugggcauggugaaagg

SEQ ID NO: 146087 - RNA, 22 nt, Human
agcuucuggaaggcaaggcuug

SEQ ID NO: 146088 - RNA, 22 nt, Human
aguacauuuauuaaugguaaaa

SEQ ID NO: 146089 - RNA, 22 nt, Human
ucagccagguaauguggagaug

SEQ ID NO: 146090 - RNA, 22 nt, Human
uccuggaggggacagcaugggc

SEQ ID NO: 146091 - RNA, 22 nt, Human
cuuuacaccaagcagaucuuuc

SEQ ID NO: 146092 - RNA, 22 nt, Human
aggggccuggacauggacgcgc

SEQ ID NO: 146093 - RNA, 22 nt, Human
uacagucaacauugaugaugau

SEQ ID NO: 146094 - RNA, 22 nt, Human
ggcuggcacucuguccaguguc

SEQ ID NO: 146095 - RNA, 22 nt, Human
auguaucaugcaggguccauga

SEQ ID NO: 146096 - RNA, 22 nt, Human
caggaaaggugugucaugaugg

SEQ ID NO: 146097 - RNA, 21 nt, Human
ugcagcugacacugguaugcc

SEQ ID NO: 146098 - RNA, 22 nt, Human
acaggcugcugggcuccgugcu

SEQ ID NO: 146099 - RNA, 22 nt, Human
ccccagccuuccaugggaauug

SEQ ID NO: 146100 - RNA, 22 nt, Human
cugagccagcgggcucacuuuu

SEQ ID NO: 146101 - RNA, 21 nt, Human
cucacaggaugcaguguuacu

SEQ ID NO: 146102 - RNA, 22 nt, Human
cagcaggcccaggugcugguga

SEQ ID NO: 146103 - RNA, 22 nt, Human
uggcagcagacaaaaggccauu

SEQ ID NO: 146104 - RNA, 18 nt, Human
gucacuguguuucugagc

SEQ ID NO: 146105 - RNA, 22 nt, Human
acuuucuccagaaaaccaagga

SEQ ID NO: 146106 - RNA, 22 nt, Human
uccuggaggcaaaugaagacuc

SEQ ID NO: 146107 - RNA, 22 nt, Human
aaaaauguuaucuacuguccga

SEQ ID NO: 146108 - RNA, 20 nt, Human
ugagugauggaggcggguca

SEQ ID NO: 146109 - RNA, 22 nt, Human
ggcaggaggugaguggcgggug

SEQ ID NO: 146110 - RNA, 22 nt, Human
uuucucugugggcuuuaugcau

SEQ ID NO: 146111 - RNA, 22 nt, Human
cugccucuauucacugaggcag

SEQ ID NO: 146112 - RNA, 22 nt, Human
ccucugccugcacaucauccug

SEQ ID NO: 146113 - RNA, 19 nt, Human
ggcugccuggagcgagggc

SEQ ID NO: 146114 - RNA, 22 nt, Human
uauagaagagacaugugcauag

SEQ ID NO: 146115 - RNA, 22 nt, Human
cuuuccaagaaugcagauaccu

SEQ ID NO: 146116 - RNA, 19 nt, Human
agcauccagucaugggauc

SEQ ID NO: 146117 - RNA, 19 nt, Human
gcugcucugggucucaucu

SEQ ID NO: 146118 - RNA, 22 nt, Human
acacaaauuguaggauaauugc

SEQ ID NO: 146119 - RNA, 22 nt, Human
ucuuuucuugcauuauugcacu

SEQ ID NO: 146120 - RNA, 22 nt, Human
ccugagcugaacuaagcaguuu

SEQ ID NO: 146121 - RNA, 23 nt, Human
uuucuguuggguauauauccaag

SEQ ID NO: 146122 - RNA, 22 nt, Human
ugaguguggggaaugucaugag

SEQ ID NO: 146123 - RNA, 22 nt, Human
agccagacauggcuccugcucc

SEQ ID NO: 146124 - RNA, 22 nt, Human
agggacacaugugauuauuuau

SEQ ID NO: 146125 - RNA, 22 nt, Human
cagcagcuuugccaagucagcc

SEQ ID NO: 146126 - RNA, 22 nt, Human
gugcauuuggugacucucaccc

SEQ ID NO: 146127 - RNA, 20 nt, Human
ucuguagucuguggcaagac

SEQ ID NO: 146128 - RNA, 22 nt, Human
gcauuuguguucuuccuagagc

SEQ ID NO: 146129 - RNA, 22 nt, Human
cugggccuggcguuccaggcug

SEQ ID NO: 146130 - RNA, 22 nt, Human
caggacaguauaggcuuuagga

SEQ ID NO: 146131 - RNA, 22 nt, Human
cuggcucuucagugcuugguuc

SEQ ID NO: 146132 - RNA, 22 nt, Human
ccagggucucugcugccugaga

SEQ ID NO: 146133 - RNA, 22 nt, Human
agggagaacaguugcagcagac

SEQ ID NO: 146134 - RNA, 22 nt, Human
ggaggccaugaggcucuaggug

SEQ ID NO: 146135 - RNA, 22 nt, Human
acccucccauuuccauguagca

SEQ ID NO: 146136 - RNA, 22 nt, Human
ugccugggccuucccaccucug

SEQ ID NO: 146137 - RNA, 22 nt, Human
uuaaagaguaaucauaggucaa

SEQ ID NO: 146138 - RNA, 22 nt, Human
uuguaacuugugauuauaaucu

SEQ ID NO: 146139 - RNA, 22 nt, Human
acuucauuguaauauuauagca

SEQ ID NO: 146140 - RNA, 22 nt, Human
ccugggucacucaggcaggcgg

SEQ ID NO: 146141 - RNA, 22 nt, Human
caagauggacauaaggagagaa

SEQ ID NO: 146142 - RNA, 22 nt, Human
ccucccacauccuagcucugcu

SEQ ID NO: 146143 - RNA, 22 nt, Human
cugcucugacccuuucaccuuc

SEQ ID NO: 146144 - RNA, 22 nt, Human
ugcccagcugucaaaguagaua

SEQ ID NO: 146145 - RNA, 22 nt, Human
aggguauguuuuuaucuacugu

SEQ ID NO: 146146 - RNA, 23 nt, Human
ucuuuacauacugaugaguucuc

SEQ ID NO: 146147 - RNA, 22 nt, Human
auguuucugaaguuuacagaua

SEQ ID NO: 146148 - RNA, 22 nt, Human
acugugugcuggacaugauguu

SEQ ID NO: 146149 - RNA, 22 nt, Human
ugugcccauuccacuugaguac

SEQ ID NO: 146150 - RNA, 17 nt, Human
ucagcaaagacaaagga

SEQ ID NO: 146151 - RNA, 22 nt, Human
auuuucaucgcuagguuggccu

SEQ ID NO: 146152 - RNA, 22 nt, Human
aggucagaagugccagggaauu

SEQ ID NO: 146153 - RNA, 22 nt, Human
aggucauuccagccauuccccu

SEQ ID NO: 146154 - RNA, 22 nt, Human
gggcucucaugaguguguggua

SEQ ID NO: 146155 - RNA, 22 nt, Human
caagagcucccagaccugggca

SEQ ID NO: 146156 - RNA, 22 nt, Human
cagcagguauguuuguucagca

SEQ ID NO: 146157 - RNA, 22 nt, Human
cuuguuuaagccgcuguuaagc

SEQ ID NO: 146158 - RNA, 22 nt, Human
ucucagagaccugaacucccug

SEQ ID NO: 146159 - RNA, 22 nt, Human
caugcacaacauacucaagagg

SEQ ID NO: 146160 - RNA, 22 nt, Human
gaggggcagaaugugaucaggg

SEQ ID NO: 146161 - RNA, 23 nt, Human
augcucugggcugugggaccugc

SEQ ID NO: 146162 - RNA, 22 nt, Human
cccuggaggagcuuagagcuug

SEQ ID NO: 146163 - RNA, 22 nt, Human
cugcuuugaaaauaaacuuguc

SEQ ID NO: 146164 - RNA, 21 nt, Human
ucugucugguuuuagaguggc

SEQ ID NO: 146165 - RNA, 18 nt, Human
agucuucugauccauuuu

SEQ ID NO: 146166 - RNA, 22 nt, Human
uaugcauauagaugcacacaca

SEQ ID NO: 146167 - RNA, 22 nt, Human
ucacagcaaaagugugcagagc

SEQ ID NO: 146168 - RNA, 22 nt, Human
cucagaaguucagccuagagua

SEQ ID NO: 146169 - RNA, 22 nt, Human
ggccuggaagaggacagagaaa

SEQ ID NO: 146170 - RNA, 21 nt, Human
uucaaagagugggcauuguca

SEQ ID NO: 146171 - RNA, 22 nt, Human
ucugagaguacgggcugcgcgc

SEQ ID NO: 146172 - RNA, 22 nt, Human
cagcugccuaugaccuagccuc

SEQ ID NO: 146173 - RNA, 22 nt, Human
uccuggauucugcccugaaggc

SEQ ID NO: 146174 - RNA, 22 nt, Human
guauccuuugcggaaauuucua

SEQ ID NO: 146175 - RNA, 22 nt, Human
auggcagggcagccucucagag

SEQ ID NO: 146176 - RNA, 22 nt, Human
cauggcaggaggcugcuggcag

SEQ ID NO: 146177 - RNA, 22 nt, Human
ucugcuguacuuuuggucuguu

SEQ ID NO: 146178 - RNA, 22 nt, Human
uuuccaagacuccaguucuccc

SEQ ID NO: 146179 - RNA, 22 nt, Human
auuaucuauguagaaugauuuu

SEQ ID NO: 146180 - RNA, 22 nt, Human
ugaggcuguucuaccagggcca

SEQ ID NO: 146181 - RNA, 22 nt, Human
gccucugcucggacuuugccuc

SEQ ID NO: 146182 - RNA, 22 nt, Human
gccaggcuggccagcaccuucu

SEQ ID NO: 146183 - RNA, 22 nt, Human
uaugcacauucacacaaaaaug

SEQ ID NO: 146184 - RNA, 22 nt, Human
ccagagcccagggucaugcagg

SEQ ID NO: 146185 - RNA, 22 nt, Human
ucacuuagauggggaucaucac

SEQ ID NO: 146186 - RNA, 22 nt, Human
gcccucugcacagcucugagca

SEQ ID NO: 146187 - RNA, 22 nt, Human
aggaaacuccccuacaucucaa

SEQ ID NO: 146188 - RNA, 21 nt, Human
ucucugguuggaguugugcca

SEQ ID NO: 146189 - RNA, 22 nt, Human
ugucucagaggcaggaagagcc

SEQ ID NO: 146190 - RNA, 22 nt, Human
uuuuccucugagcuuugaauaa

SEQ ID NO: 146191 - RNA, 22 nt, Human
acugcuuuagaccuagagcucu

SEQ ID NO: 146192 - RNA, 22 nt, Human
caauaauauccugugcuguuug

SEQ ID NO: 146193 - RNA, 22 nt, Human
agcagccaauuggaggaugaag

SEQ ID NO: 146194 - RNA, 22 nt, Human
agcagcuggggccugugacgau

SEQ ID NO: 146195 - RNA, 22 nt, Human
aggggccucgcaggaccgcucc

SEQ ID NO: 146196 - RNA, 22 nt, Human
acacaugcauaagccuucccuu

SEQ ID NO: 146197 - RNA, 22 nt, Human
acacagggggcauucuaggagu

SEQ ID NO: 146198 - RNA, 22 nt, Human
gagguacaugaggauacacagg

SEQ ID NO: 146199 - RNA, 22 nt, Human
aaagacacacagugcuucaguu

SEQ ID NO: 146200 - RNA, 22 nt, Human
accugccuaucagcugccugcu

SEQ ID NO: 146201 - RNA, 22 nt, Human
uucacagggccacuggcaggag

SEQ ID NO: 146202 - RNA, 22 nt, Human
ugauacagucagcucacaauug

SEQ ID NO: 146203 - RNA, 22 nt, Human
aguauugugacucaaguauucu

SEQ ID NO: 146204 - RNA, 22 nt, Human
aauuaacagagggcuuauuacu

SEQ ID NO: 146205 - RNA, 22 nt, Human
cugcccugacugaccuuuugaa

SEQ ID NO: 146206 - RNA, 22 nt, Human
cucagaguccccaguggguuug

SEQ ID NO: 146207 - RNA, 22 nt, Human
caguacuugggggguucuaagu

SEQ ID NO: 146208 - RNA, 22 nt, Human
uuccaguuaaggaagcuauucu

SEQ ID NO: 146209 - RNA, 22 nt, Human
gcucaggagcucuugguggcgc

SEQ ID NO: 146210 - RNA, 22 nt, Human
ugcaggugccucuugagcuugu

SEQ ID NO: 146211 - RNA, 22 nt, Human
cccacaggcuagggguagggca

SEQ ID NO: 146212 - RNA, 22 nt, Human
cuucacagagucccugauuguu

SEQ ID NO: 146213 - RNA, 22 nt, Human
cugugagcuggguggccaggac

SEQ ID NO: 146214 - RNA, 22 nt, Human
agugaccaacaaugcugagaag

SEQ ID NO: 146215 - RNA, 22 nt, Human
cauuuacuguugaaucccuagc

SEQ ID NO: 146216 - RNA, 22 nt, Human
cagaacugggcagggagcagag

SEQ ID NO: 146217 - RNA, 22 nt, Human
uacugccuggagcauuggugcu

SEQ ID NO: 146218 - RNA, 22 nt, Human
gagguuagaggucagugcaguc

SEQ ID NO: 146219 - RNA, 22 nt, Human
ucugggaagcugguccuguucu

SEQ ID NO: 146220 - RNA, 22 nt, Human
uacaguagucgucuuauuuuga

SEQ ID NO: 146221 - RNA, 22 nt, Human
ugggcugcccugaugguccuca

SEQ ID NO: 146222 - RNA, 22 nt, Human
ggagaagggacagacucagcuu

SEQ ID NO: 146223 - RNA, 22 nt, Human
cuggccagcauuuuugcuuuag

SEQ ID NO: 146224 - RNA, 22 nt, Human
acucugaggagugacuagaggu

SEQ ID NO: 146225 - RNA, 22 nt, Human
aggcccagggcugcucucugaa

SEQ ID NO: 146226 - RNA, 22 nt, Human
uggcccugaggggcugugcccc

SEQ ID NO: 146227 - RNA, 22 nt, Human
uucagugucaauuuuuaaauau

SEQ ID NO: 146228 - RNA, 22 nt, Human
gagccuccuccuggugugccga

SEQ ID NO: 146229 - RNA, 22 nt, Human
gagguggguguaucacagguca

SEQ ID NO: 146230 - RNA, 22 nt, Human
uauaacaguuuaggugguguca

SEQ ID NO: 146231 - RNA, 22 nt, Human
ucugccuggauuuuggaaagcu

SEQ ID NO: 146232 - RNA, 23 nt, Human
agggcugaugccauugcagcucu

SEQ ID NO: 146233 - RNA, 22 nt, Human
agggaggagaauggacuccuuc

SEQ ID NO: 146234 - RNA, 22 nt, Human
auacaagacucagcacagacgg

SEQ ID NO: 146235 - RNA, 22 nt, Human
ucacagugagccaugucagaga

SEQ ID NO: 146236 - RNA, 22 nt, Human
ggcagcagggucuagauugaug

SEQ ID NO: 146237 - RNA, 22 nt, Human
uguccucuaauuggccucuugc

SEQ ID NO: 146238 - RNA, 22 nt, Human
caggauggucuucauuuggcuc

SEQ ID NO: 146239 - RNA, 22 nt, Human
uaacauuugcugucuccuaugu

SEQ ID NO: 146240 - RNA, 22 nt, Human
ggcaguggguggaucucaggga

SEQ ID NO: 146241 - RNA, 22 nt, Human
gaaaugcauggaucuuggcaga

SEQ ID NO: 146242 - RNA, 22 nt, Human
ugcacacaguucucaggaaaga

SEQ ID NO: 146243 - RNA, 22 nt, Human
aaagauuucagaagccugugcc

SEQ ID NO: 146244 - RNA, 22 nt, Human
agcagcuuacauguggccuauc

SEQ ID NO: 146245 - RNA, 22 nt, Human
uaaugcacagaauugacauggg

SEQ ID NO: 146246 - RNA, 22 nt, Human
ccagccagcugcccuuggggcc

SEQ ID NO: 146247 - RNA, 22 nt, Human
agcagaacauuuucagggcugu

SEQ ID NO: 146248 - RNA, 22 nt, Human
acaggccacaguggagucucug

SEQ ID NO: 146249 - RNA, 22 nt, Human
aucuggcuuacgaagcacuggu

SEQ ID NO: 146250 - RNA, 22 nt, Human
aguacauauaguaauuuagcca

SEQ ID NO: 146251 - RNA, 22 nt, Human
cuggcucccguuguccuugaag

SEQ ID NO: 146252 - RNA, 22 nt, Human
agguaagggucacaguucauau

SEQ ID NO: 146253 - RNA, 21 nt, Human
ugucagaaauaagcaugugau

SEQ ID NO: 146254 - RNA, 22 nt, Human
gaaaagcuaggccaguucagcu

SEQ ID NO: 146255 - RNA, 22 nt, Human
gccugggaacucugaucuccug

SEQ ID NO: 146256 - RNA, 22 nt, Human
gggugggagucuggcccucaaa

SEQ ID NO: 146257 - RNA, 22 nt, Human
cuucuguguuaaaugagucuuu

SEQ ID NO: 146258 - RNA, 22 nt, Human
ggccccacgggggaguccuagu

SEQ ID NO: 146259 - RNA, 22 nt, Human
uaacacugguauuucauuuagu

SEQ ID NO: 146260 - RNA, 22 nt, Human
auccagggauaaaaguaagguu

SEQ ID NO: 146261 - RNA, 20 nt, Human
ccucaagcagacugacagcu

SEQ ID NO: 146262 - RNA, 22 nt, Human
uauugaaauucuucauguccuc

SEQ ID NO: 146263 - RNA, 22 nt, Human
cuggccacuggagguggcaccc

SEQ ID NO: 146264 - RNA, 18 nt, Human
gucuggaggucaggagcu

SEQ ID NO: 146265 - RNA, 18 nt, Human
ucugagggugcgggagcu

SEQ ID NO: 146266 - RNA, 22 nt, Human
gggcacugugcuaggugcugag

SEQ ID NO: 146267 - RNA, 23 nt, Human
aggcagagccaaggucaaaaccc

SEQ ID NO: 146268 - RNA, 23 nt, Human
uuuuaauuuggacauaagaagau

SEQ ID NO: 146269 - RNA, 22 nt, Human
gcaugguggccuuaggguagcc

SEQ ID NO: 146270 - RNA, 22 nt, Human
acaggcucucagccaguuggca

SEQ ID NO: 146271 - RNA, 22 nt, Human
ggcuggguuauuuauggccaag

SEQ ID NO: 146272 - RNA, 22 nt, Human
ccugaggggcugcaggccagcu

SEQ ID NO: 146273 - RNA, 22 nt, Human
ggcucagacucccaggcccucu

SEQ ID NO: 146274 - RNA, 22 nt, Human
agccuggaccaggggccucaga

SEQ ID NO: 146275 - RNA, 18 nt, Human
agcagagcccaugcauuc

SEQ ID NO: 146276 - RNA, 22 nt, Human
gaagccccaaacccucgccauc

SEQ ID NO: 146277 - RNA, 22 nt, Human
gggcucugggauucagagcaag

SEQ ID NO: 146278 - RNA, 22 nt, Human
ccugggcauucuuugaguucuc

SEQ ID NO: 146279 - RNA, 22 nt, Human
gccugagaaggauaggaagcga

SEQ ID NO: 146280 - RNA, 22 nt, Human
acagggcagugucuugaaaaau

SEQ ID NO: 146281 - RNA, 22 nt, Human
gaaauuauugcuagagacugca

SEQ ID NO: 146282 - RNA, 22 nt, Human
agugacucacuagcucucagug

SEQ ID NO: 146283 - RNA, 22 nt, Human
ucuguuuaggcaaaauagcuac

SEQ ID NO: 146284 - RNA, 22 nt, Human
ugggcucuccuggaggacaaca

SEQ ID NO: 146285 - RNA, 22 nt, Human
caggcugcagugcaguggcuau

SEQ ID NO: 146286 - RNA, 20 nt, Human
cccuggccuguuucaugccc

SEQ ID NO: 146287 - RNA, 22 nt, Human
agagugggccucugagucccag

SEQ ID NO: 146288 - RNA, 22 nt, Human
ugaaggaaaugacggcagaaga

SEQ ID NO: 146289 - RNA, 21 nt, Human
aaagugguaaggauuauuuug

SEQ ID NO: 146290 - RNA, 22 nt, Human
cugucaccuguucacugcagca

SEQ ID NO: 146291 - RNA, 22 nt, Human
ccacagggacuguuaaaacccu

SEQ ID NO: 146292 - RNA, 22 nt, Human
gcuguccucugaucucuggagg

SEQ ID NO: 146293 - RNA, 23 nt, Human
uucaagauacgguuuccaggcug

SEQ ID NO: 146294 - RNA, 22 nt, Human
gaggaagcagggcuuggcugag

SEQ ID NO: 146295 - RNA, 19 nt, Human
agcuggggcgguguguguu

SEQ ID NO: 146296 - RNA, 22 nt, Human
agaggccagggacacugcucaa

SEQ ID NO: 146297 - RNA, 22 nt, Human
auuucacucucccugccacuua

SEQ ID NO: 146298 - RNA, 22 nt, Human
ggccuuggugccauggccaguu

SEQ ID NO: 146299 - RNA, 23 nt, Human
cccuggccuuggggcacaggcug

SEQ ID NO: 146300 - RNA, 22 nt, Human
uguccugggaaugggaugcagu

SEQ ID NO: 146301 - RNA, 21 nt, Human
uaagaacauuaucuucuuccu

SEQ ID NO: 146302 - RNA, 20 nt, Human
cccagccccuaccuguugcc

SEQ ID NO: 146303 - RNA, 22 nt, Human
ugguaaaguguacugaauauga

SEQ ID NO: 146304 - RNA, 22 nt, Human
gaaggccauuuuuagguagaau

SEQ ID NO: 146305 - RNA, 19 nt, Human
ggaggccuggguauuugcc

SEQ ID NO: 146306 - RNA, 22 nt, Human
gccuuccuuuuaccaccagcca

SEQ ID NO: 146307 - RNA, 22 nt, Human
ugggcacuguagcuggugcugg

SEQ ID NO: 146308 - RNA, 22 nt, Human
cuucugugagucaguguuucug

SEQ ID NO: 146309 - RNA, 22 nt, Human
ugugugaccuggggugagauag

SEQ ID NO: 146310 - RNA, 22 nt, Human
guacauuuuacuuuguuugaau

SEQ ID NO: 146311 - RNA, 22 nt, Human
gggcaguggguggcugcagccu

SEQ ID NO: 146312 - RNA, 22 nt, Human
uggcugugucccuguccagagu

SEQ ID NO: 146313 - RNA, 22 nt, Human
aguauauaguggcgcuguaugc

SEQ ID NO: 146314 - RNA, 21 nt, Human
gcauguguggugugcuccaca

SEQ ID NO: 146315 - RNA, 17 nt, Human
uaucucuucaaguuuca

SEQ ID NO: 146316 - RNA, 22 nt, Human
ggcagcugagcauggcuaccuu

SEQ ID NO: 146317 - RNA, 22 nt, Human
ucagagugcagggaguagcagc

SEQ ID NO: 146318 - RNA, 22 nt, Human
agaggcccucucucuccugaug

SEQ ID NO: 146319 - RNA, 22 nt, Human
gcacagaagagcuuuggaauga

SEQ ID NO: 146320 - RNA, 22 nt, Human
uccugggcugugugccacucug

SEQ ID NO: 146321 - RNA, 22 nt, Human
acaguauauuuucuugauuguu

SEQ ID NO: 146322 - RNA, 22 nt, Human
gugcugucguggaacugggcug

SEQ ID NO: 146323 - RNA, 22 nt, Human
aggagcuguuuuguucagcaaa

SEQ ID NO: 146324 - RNA, 22 nt, Human
agagccuggcucccagcuaccg

SEQ ID NO: 146325 - RNA, 19 nt, Human
cccagagcauccugaacuu

SEQ ID NO: 146326 - RNA, 22 nt, Human
ggaugcaggacggcauggaugu

SEQ ID NO: 146327 - RNA, 22 nt, Human
agccaggggauucaucagggac

SEQ ID NO: 146328 - RNA, 22 nt, Human
aaugcugcaagaggugaaaaga

SEQ ID NO: 146329 - RNA, 22 nt, Human
ucugcaggccucgacaaggcca

SEQ ID NO: 146330 - RNA, 22 nt, Human
ccuauugacaauucucuucucc

SEQ ID NO: 146331 - RNA, 22 nt, Human
gccugucaauuuuguguacaau

SEQ ID NO: 146332 - RNA, 22 nt, Human
gcugguccacucccuggaggcu

SEQ ID NO: 146333 - RNA, 22 nt, Human
acuguuuaggaggcuuauaugc

SEQ ID NO: 146334 - RNA, 22 nt, Human
aaagaacagauguguggugcau

SEQ ID NO: 146335 - RNA, 21 nt, Human
gggcagaggggccuccugggu

SEQ ID NO: 146336 - RNA, 22 nt, Human
ccaggccuccugugaguggacc

SEQ ID NO: 146337 - RNA, 22 nt, Human
cagaagaaaguggggagacaag

SEQ ID NO: 146338 - RNA, 22 nt, Human
ugacagggcuagaggcaaugca

SEQ ID NO: 146339 - RNA, 22 nt, Human
ggucccugguucccucugagcu

SEQ ID NO: 146340 - RNA, 22 nt, Human
cugaggcuggggaagggaagug

SEQ ID NO: 146341 - RNA, 22 nt, Human
aggcucugcagaccccagcugu

SEQ ID NO: 146342 - RNA, 22 nt, Human
aaugaugguuaaacacuggagg

SEQ ID NO: 146343 - RNA, 22 nt, Human
ccuguggcacaugcagggauuc

SEQ ID NO: 146344 - RNA, 22 nt, Human
aaaacuaaauacgcuuugccuc

SEQ ID NO: 146345 - RNA, 22 nt, Human
ggaaccaggaguuacacgaguu

SEQ ID NO: 146346 - RNA, 22 nt, Human
aaggagagagcuuugcuggaac

SEQ ID NO: 146347 - RNA, 22 nt, Human
acuggacagaggaaauauggag

SEQ ID NO: 146348 - RNA, 22 nt, Human
auugucgcuuauuuaggugcuu

SEQ ID NO: 146349 - RNA, 22 nt, Human
ucagcugccuuucccaugcuag

SEQ ID NO: 146350 - RNA, 22 nt, Human
ccuggccucagacagagggugg

SEQ ID NO: 146351 - RNA, 19 nt, Human
ucaaagcaagcauguucug

SEQ ID NO: 146352 - RNA, 18 nt, Human
gucuguguggcuugggga

SEQ ID NO: 146353 - RNA, 22 nt, Human
cuauuacauuucuggacauuca

SEQ ID NO: 146354 - RNA, 22 nt, Human
aaauugcaaaaguacuuuuagg

SEQ ID NO: 146355 - RNA, 22 nt, Human
acagcuggcaggggggcaugaa

SEQ ID NO: 146356 - RNA, 22 nt, Human
ccucuggggguccucagagucu

SEQ ID NO: 146357 - RNA, 22 nt, Human
agaaacuucagcuauucuuuug

SEQ ID NO: 146358 - RNA, 22 nt, Human
cuguccugcaguugggggcagg

SEQ ID NO: 146359 - RNA, 22 nt, Human
gcuuuacauuuuggaaagguga

SEQ ID NO: 146360 - RNA, 22 nt, Human
cuguagccagaagcagaaggcc

SEQ ID NO: 146361 - RNA, 22 nt, Human
gcuuuacaacaaauugaauaug

SEQ ID NO: 146362 - RNA, 22 nt, Human
uguauguauacacugaucauca

SEQ ID NO: 146363 - RNA, 22 nt, Human
uugaagcaaauucugugcagua

SEQ ID NO: 146364 - RNA, 22 nt, Human
gcugucucggggcuuucuccug

SEQ ID NO: 146365 - RNA, 22 nt, Human
uuccuguguguugguggcagaa

SEQ ID NO: 146366 - RNA, 22 nt, Human
uagcugcccaucuuuccuuuag

SEQ ID NO: 146367 - RNA, 23 nt, Human
cucugcaggagagugggcagggc

SEQ ID NO: 146368 - RNA, 22 nt, Human
cagagaaacucagauagcugau

SEQ ID NO: 146369 - RNA, 22 nt, Human
guaacaaaguuucuaggugcug

SEQ ID NO: 146370 - RNA, 22 nt, Human
ccugccuggagcugagugugga

SEQ ID NO: 146371 - RNA, 21 nt, Human
uauuucuuugacucucucccu

SEQ ID NO: 146372 - RNA, 22 nt, Human
cacaguaucccucuuucucccc

SEQ ID NO: 146373 - RNA, 22 nt, Human
uauguguauaccuauacaugug

SEQ ID NO: 146374 - RNA, 19 nt, Human
acagggcagcaauaggaua

SEQ ID NO: 146375 - RNA, 22 nt, Human
gcagcaaucuucacagugucau

SEQ ID NO: 146376 - RNA, 22 nt, Human
gcccugcugucuucagaguaua

SEQ ID NO: 146377 - RNA, 18 nt, Human
gguggccuugacuucucu

SEQ ID NO: 146378 - RNA, 19 nt, Human
agauggggaagagugugag

SEQ ID NO: 146379 - RNA, 20 nt, Human
uauuugaaauggccaagugu

SEQ ID NO: 146380 - RNA, 20 nt, Human
uuugaacuuuguacucuguu

SEQ ID NO: 146381 - RNA, 22 nt, Human
ccuggagcuuggucacgcugcg

SEQ ID NO: 146382 - RNA, 21 nt, Human
uggcccuggccacggcugcca

SEQ ID NO: 146383 - RNA, 22 nt, Human
uuucaaacauaucuucauuacu

SEQ ID NO: 146384 - RNA, 22 nt, Human
agagugaaggccagguuacagu

SEQ ID NO: 146385 - RNA, 22 nt, Human
ugucccaguuuugcagguuaga

SEQ ID NO: 146386 - RNA, 22 nt, Human
uagaaauccccagucucauagu

SEQ ID NO: 146387 - RNA, 18 nt, Human
cuuucagauggauaugcu

SEQ ID NO: 146388 - RNA, 22 nt, Human
cccucaggagaugucagcugga

SEQ ID NO: 146389 - RNA, 21 nt, Human
ucccugcuuucuggcccaguc

SEQ ID NO: 146390 - RNA, 22 nt, Human
gaagagcuuagacagaaucaaa

SEQ ID NO: 146391 - RNA, 22 nt, Human
cuggagcauccaugcccagggu

SEQ ID NO: 146392 - RNA, 22 nt, Human
gagacauggcaaaagcacuggu

SEQ ID NO: 146393 - RNA, 22 nt, Human
cugaaggauuagagagcacuua

SEQ ID NO: 146394 - RNA, 22 nt, Human
uuugaaaguucuucugacacua

SEQ ID NO: 146395 - RNA, 22 nt, Human
gggcugccaagccugccugccu

SEQ ID NO: 146396 - RNA, 22 nt, Human
cagucccaucucccagguggcu

SEQ ID NO: 146397 - RNA, 22 nt, Human
gccuccuggccuuugcuccuca

SEQ ID NO: 146398 - RNA, 22 nt, Human
uggcucagugacauuccuccca

SEQ ID NO: 146399 - RNA, 22 nt, Human
gggcacuggaaggcucucaggc

SEQ ID NO: 146400 - RNA, 22 nt, Human
gcagacuggucuucagccuugg

SEQ ID NO: 146401 - RNA, 22 nt, Human
uuccaaagaaauugaccaagac

SEQ ID NO: 146402 - RNA, 20 nt, Human
cccagggaccugagcuccau

SEQ ID NO: 146403 - RNA, 22 nt, Human
agaccaugggcucugaagagca

SEQ ID NO: 146404 - RNA, 20 nt, Human
ugcuccaucuaaagugauua

SEQ ID NO: 146405 - RNA, 22 nt, Human
uuucuucugagaucagggagaa

SEQ ID NO: 146406 - RNA, 22 nt, Human
uguaugccuuuuucuguuguaa

SEQ ID NO: 146407 - RNA, 22 nt, Human
auguguguaaacaaguauaauu

SEQ ID NO: 146408 - RNA, 22 nt, Human
gugcagugaaaaaagaaugucc

SEQ ID NO: 146409 - RNA, 17 nt, Human
ggugaguguccaggugg

SEQ ID NO: 146410 - RNA, 22 nt, Human
uccuuccuggggucucugcugc

SEQ ID NO: 146411 - RNA, 22 nt, Human
cagcucugcugggaggaugcag

SEQ ID NO: 146412 - RNA, 22 nt, Human
ugcugcacucaccaacagauaa

SEQ ID NO: 146413 - RNA, 22 nt, Human
uggcagggucuugcuguguugc

SEQ ID NO: 146414 - RNA, 22 nt, Human
cagagcugcucaugguggccag

SEQ ID NO: 146415 - RNA, 22 nt, Human
cagggcuggcuguggcaaucuc

SEQ ID NO: 146416 - RNA, 22 nt, Human
uguuaaauguuccuuuacugga

SEQ ID NO: 146417 - RNA, 23 nt, Human
cccagcagagaugaggagggguc

SEQ ID NO: 146418 - RNA, 22 nt, Human
ggcagcugggucacaccgaucu

SEQ ID NO: 146419 - RNA, 22 nt, Human
cuguccuguggaccugaggacg

SEQ ID NO: 146420 - RNA, 22 nt, Human
guccagggaaauagcgacaggg

SEQ ID NO: 146421 - RNA, 22 nt, Human
ucgugucagaucagagguuccu

SEQ ID NO: 146422 - RNA, 22 nt, Human
cuguccuggagggcauaggacg

SEQ ID NO: 146423 - RNA, 22 nt, Human
uggagccaaggccaguucucag

SEQ ID NO: 146424 - RNA, 22 nt, Human
ccagugcacagccaggcaggug

SEQ ID NO: 146425 - RNA, 22 nt, Human
agccuggagcuugaguuaugag

SEQ ID NO: 146426 - RNA, 22 nt, Human
aggaccaacauagcagcagugg

SEQ ID NO: 146427 - RNA, 22 nt, Human
acuguacuguguauuguagaau

SEQ ID NO: 146428 - RNA, 22 nt, Human
gccuggagccucagcaaggagg

SEQ ID NO: 146429 - RNA, 22 nt, Human
uccugccuucauacugcuguau

SEQ ID NO: 146430 - RNA, 22 nt, Human
uucauucuugggaucagagagu

SEQ ID NO: 146431 - RNA, 22 nt, Human
uugacuuuaaagcuuugucucu

SEQ ID NO: 146432 - RNA, 22 nt, Human
gcuguggcuccaauggugagcc

SEQ ID NO: 146433 - RNA, 22 nt, Human
ggcagcuguaagaugagugaau

SEQ ID NO: 146434 - RNA, 22 nt, Human
caguaaauaguggagauguggg

SEQ ID NO: 146435 - RNA, 22 nt, Human
cucugugauuuugugagccaga

SEQ ID NO: 146436 - RNA, 22 nt, Human
agcccaaggcuucccugcuggc

SEQ ID NO: 146437 - RNA, 22 nt, Human
ggagcuguucaggacugcuuca

SEQ ID NO: 146438 - RNA, 22 nt, Human
aacuguuuggaacucuuccaca

SEQ ID NO: 146439 - RNA, 22 nt, Human
ugggggugugccagggaccucc

SEQ ID NO: 146440 - RNA, 22 nt, Human
cucaggaggaggaaguucauug

SEQ ID NO: 146441 - RNA, 22 nt, Human
caggagugaaaugaggcccagg

SEQ ID NO: 146442 - RNA, 18 nt, Human
agugugugcccuuucagg

SEQ ID NO: 146443 - RNA, 22 nt, Human
agagccaggaucuguuuugggg

SEQ ID NO: 146444 - RNA, 21 nt, Human
gagugcagcaagguagagucu

SEQ ID NO: 146445 - RNA, 22 nt, Human
ucccagagaagagcuggaugga

SEQ ID NO: 146446 - RNA, 22 nt, Human
gagcacagccaaaguaagaagg

SEQ ID NO: 146447 - RNA, 22 nt, Human
cauuuguacagaacagcuuuau

SEQ ID NO: 146448 - RNA, 22 nt, Human
gcccucugcuggccucaccucg

SEQ ID NO: 146449 - RNA, 22 nt, Human
uaauuuacuugcaaauaacaau

SEQ ID NO: 146450 - RNA, 22 nt, Human
ggcucaggagaggggcuaaaag

SEQ ID NO: 146451 - RNA, 21 nt, Human
gccauuguuuucuaccuggag

SEQ ID NO: 146452 - RNA, 22 nt, Human
ugaaggcccagccacagaaugg

SEQ ID NO: 146453 - RNA, 22 nt, Human
caagaacaguuugccaaauugg

SEQ ID NO: 146454 - RNA, 22 nt, Human
gcccugugcgacucuagagguu

SEQ ID NO: 146455 - RNA, 22 nt, Human
uccugggccuguacuccauccg

SEQ ID NO: 146456 - RNA, 22 nt, Human
ugggcuggcguggagaguuuag

SEQ ID NO: 146457 - RNA, 23 nt, Human
gcccaugcuguugggcccgagca

SEQ ID NO: 146458 - RNA, 22 nt, Human
cacagagagcuacgugcagcgu

SEQ ID NO: 146459 - RNA, 22 nt, Human
gccuggagaccugcuccucuac

SEQ ID NO: 146460 - RNA, 22 nt, Human
agcacagauucugaagaguccu

SEQ ID NO: 146461 - RNA, 22 nt, Human
gugucaugggguuuguuauaca

SEQ ID NO: 146462 - RNA, 22 nt, Human
gguucacacuaagcuuaagugg

SEQ ID NO: 146463 - RNA, 22 nt, Human
aaggcacuugcccagagcugca

SEQ ID NO: 146464 - RNA, 22 nt, Human
cucuugggagugcucuggagaa

SEQ ID NO: 146465 - RNA, 22 nt, Human
aggagagagaacacuugggucc

SEQ ID NO: 146466 - RNA, 22 nt, Human
uuauuuauucauucugucuguc

SEQ ID NO: 146467 - RNA, 22 nt, Human
cagcccuggaacagcugacuca

SEQ ID NO: 146468 - RNA, 23 nt, Human
acacaaggguaacugccagccau

SEQ ID NO: 146469 - RNA, 21 nt, Human
agagaagaggacuuucucaca

SEQ ID NO: 146470 - RNA, 22 nt, Human
acacuaaugagaaaggaauuaa

SEQ ID NO: 146471 - RNA, 19 nt, Human
uagucuuuauucuuaauuu

SEQ ID NO: 146472 - RNA, 22 nt, Human
agccuucauaaucuugggcuuu

SEQ ID NO: 146473 - RNA, 22 nt, Human
cuguacaucccgagagccagua

SEQ ID NO: 146474 - RNA, 19 nt, Human
ucucucuguacauuagaua

SEQ ID NO: 146475 - RNA, 22 nt, Human
uaaaacuuaacuauccagauua

SEQ ID NO: 146476 - RNA, 21 nt, Human
auugaaagucaacaaucaguu

SEQ ID NO: 146477 - RNA, 22 nt, Human
ucacaggguaucugggauggau

SEQ ID NO: 146478 - RNA, 22 nt, Human
cagggcugcuggccgugcccuc

SEQ ID NO: 146479 - RNA, 22 nt, Human
cuggggcugcggacgggagccc

SEQ ID NO: 146480 - RNA, 22 nt, Human
aguggcuguuccaggugaggac

SEQ ID NO: 146481 - RNA, 22 nt, Human
guccuggggauuauagaguguu

SEQ ID NO: 146482 - RNA, 22 nt, Human
ggagccagagggaugcaguuga

SEQ ID NO: 146483 - RNA, 22 nt, Human
uguucaauccccagguccugaa

SEQ ID NO: 146484 - RNA, 22 nt, Human
cacagcuuaugccacugauugg

SEQ ID NO: 146485 - RNA, 21 nt, Human
aaagaacaggcagauguucuu

SEQ ID NO: 146486 - RNA, 19 nt, Human
cuuauacagauuuucucau

SEQ ID NO: 146487 - RNA, 22 nt, Human
auucaagagcccauguuuccug

SEQ ID NO: 146488 - RNA, 22 nt, Human
uacuaucucuucuaacuucaga

SEQ ID NO: 146489 - RNA, 22 nt, Human
gagacugcauuguccaaggguu

SEQ ID NO: 146490 - RNA, 22 nt, Human
auacuguuuugugacuuaucuu

SEQ ID NO: 146491 - RNA, 22 nt, Human
uacugugugacccuggguaggu

SEQ ID NO: 146492 - RNA, 22 nt, Human
ugcagcugauuaaagggcagac

SEQ ID NO: 146493 - RNA, 23 nt, Human
uuguuuuuagagguggcaugaga

SEQ ID NO: 146494 - RNA, 22 nt, Human
cuggcuggcaaguagaacacaa

SEQ ID NO: 146495 - RNA, 22 nt, Human
uccugccuaccuugcggaggug

SEQ ID NO: 146496 - RNA, 22 nt, Human
ucucaggccccugaguuucucu

SEQ ID NO: 146497 - RNA, 22 nt, Human
gguggagcuggaccaggagagg

SEQ ID NO: 146498 - RNA, 22 nt, Human
uguaggccuauguccagcaauu

SEQ ID NO: 146499 - RNA, 22 nt, Human
cacacaugaaucccuaguaccu

SEQ ID NO: 146500 - RNA, 22 nt, Human
agagcccucucauuggcuuauu

SEQ ID NO: 146501 - RNA, 22 nt, Human
uccugagauguggagcuccaug

SEQ ID NO: 146502 - RNA, 22 nt, Human
agauuuccugcacugccuuuga

SEQ ID NO: 146503 - RNA, 22 nt, Human
agcugcugagccaggcugaugu

SEQ ID NO: 146504 - RNA, 22 nt, Human
agugcagugguuaggagccagg

SEQ ID NO: 146505 - RNA, 22 nt, Human
auagaaauggcagcuggugcua

SEQ ID NO: 146506 - RNA, 22 nt, Human
cauuagaagaacaguuauauua

SEQ ID NO: 146507 - RNA, 22 nt, Human
cagccagguaugggcgugcggg

SEQ ID NO: 146508 - RNA, 22 nt, Human
aauaacaggcucaucagaugcu

SEQ ID NO: 146509 - RNA, 22 nt, Human
aggcugccuguuccaaucuccu

SEQ ID NO: 146510 - RNA, 22 nt, Human
uuucuucucacccaggacagag

SEQ ID NO: 146511 - RNA, 22 nt, Human
ccagggcaauaggaacacuuuu

SEQ ID NO: 146512 - RNA, 22 nt, Human
auauuuucacagaacuugcaaa

SEQ ID NO: 146513 - RNA, 22 nt, Human
gucuucaauagagccucaauuu

SEQ ID NO: 146514 - RNA, 20 nt, Human
cucuuuacaugucucuuccu

SEQ ID NO: 146515 - RNA, 17 nt, Human
uuucuccuuccaucuca

SEQ ID NO: 146516 - RNA, 22 nt, Human
ccucucuuggccgcagucuucu

SEQ ID NO: 146517 - RNA, 22 nt, Human
uucuacagaauaaauguuuaca

SEQ ID NO: 146518 - RNA, 22 nt, Human
cuccagggagcugcgggagcca

SEQ ID NO: 146519 - RNA, 22 nt, Human
ccagggcaacgcugucucagag

SEQ ID NO: 146520 - RNA, 22 nt, Human
auuaaaagcuucccaagaguua

SEQ ID NO: 146521 - RNA, 22 nt, Human
auguuucuaaaacuugcauggc

SEQ ID NO: 146522 - RNA, 22 nt, Human
uuucacaggaugcuguuuuaua

SEQ ID NO: 146523 - RNA, 22 nt, Human
uccaguucuaggucacucucug

SEQ ID NO: 146524 - RNA, 21 nt, Human
uuacuuuugcagcaaccuaau

SEQ ID NO: 146525 - RNA, 22 nt, Human
ugcuggggagugauugaccauc

SEQ ID NO: 146526 - RNA, 22 nt, Human
gcaguggggcgcugggaguugg

SEQ ID NO: 146527 - RNA, 22 nt, Human
gggcuguguaucaguuaucuau

SEQ ID NO: 146528 - RNA, 22 nt, Human
ugugugcacugccuuuugugga

SEQ ID NO: 146529 - RNA, 22 nt, Human
agagugaaguaauuguuaggau

SEQ ID NO: 146530 - RNA, 21 nt, Human
cagaggccucaugcucugugc

SEQ ID NO: 146531 - RNA, 22 nt, Human
agggaaaggcugaugcuguggg

SEQ ID NO: 146532 - RNA, 22 nt, Human
aaacuguaagagaauaaacuac

SEQ ID NO: 146533 - RNA, 22 nt, Human
cagcucugugggagcguaugug

SEQ ID NO: 146534 - RNA, 19 nt, Human
caguggccuggaggucucu

SEQ ID NO: 146535 - RNA, 22 nt, Human
gaggugggaugugugugcuacu

SEQ ID NO: 146536 - RNA, 22 nt, Human
ucagagucucccccaguuuggg

SEQ ID NO: 146537 - RNA, 22 nt, Human
ugugucccuuggaaccucagcu

SEQ ID NO: 146538 - RNA, 22 nt, Human
agcugccugggcuuguacaccu

SEQ ID NO: 146539 - RNA, 22 nt, Human
ucauuuacaugucuuucucuga

SEQ ID NO: 146540 - RNA, 22 nt, Human
ucaggggacagccagcuggagg

SEQ ID NO: 146541 - RNA, 22 nt, Human
ucagaagccggaagugcuccuc

SEQ ID NO: 146542 - RNA, 22 nt, Human
gcucugcugaagccccuugcau

SEQ ID NO: 146543 - RNA, 22 nt, Human
aagcagaauuucccacuaguug

SEQ ID NO: 146544 - RNA, 22 nt, Human
cugucuguuucugauucaaccu

SEQ ID NO: 146545 - RNA, 22 nt, Human
ucuuuccaaguaauacuuccca

SEQ ID NO: 146546 - RNA, 21 nt, Human
uggcucaguugcugggcacag

SEQ ID NO: 146547 - RNA, 21 nt, Human
uccagggaacuucucaggaau

SEQ ID NO: 146548 - RNA, 22 nt, Human
augaaauaucuugaagaaauuc

SEQ ID NO: 146549 - RNA, 22 nt, Human
ccagccaggcauugcaaacuga

SEQ ID NO: 146550 - RNA, 20 nt, Human
cuucuucauuaacccuacug

SEQ ID NO: 146551 - RNA, 22 nt, Human
gcagaggcaaucagguaugugg

SEQ ID NO: 146552 - RNA, 22 nt, Human
aggcuguggaugcuuaacaaau

SEQ ID NO: 146553 - RNA, 22 nt, Human
guguuccauguuugagguaguu

SEQ ID NO: 146554 - RNA, 22 nt, Human
ccagcagggcagugcccuggac

SEQ ID NO: 146555 - RNA, 22 nt, Human
ggccugagcagacagcaugaug

SEQ ID NO: 146556 - RNA, 22 nt, Human
uaugugugcauguauacauuaa

SEQ ID NO: 146557 - RNA, 22 nt, Human
agugacagcugggaaggugaaa

SEQ ID NO: 146558 - RNA, 18 nt, Human
uccucucuuuccccaggg

SEQ ID NO: 146559 - RNA, 22 nt, Human
gccuggagcagacgugucccgg

SEQ ID NO: 146560 - RNA, 22 nt, Human
aaauguguuugauaggaauauu

SEQ ID NO: 146561 - RNA, 18 nt, Human
agucucagcggaggagua

SEQ ID NO: 146562 - RNA, 22 nt, Human
aagcccagaugugagaacugag

SEQ ID NO: 146563 - RNA, 22 nt, Human
ccucuccuugcacccgucccgc

SEQ ID NO: 146564 - RNA, 22 nt, Human
cuggaagguuccucccagcucc

SEQ ID NO: 146565 - RNA, 19 nt, Human
cagcucaguuugauucucu

SEQ ID NO: 146566 - RNA, 23 nt, Human
uuuuccagaaucgacucuguaga

SEQ ID NO: 146567 - RNA, 23 nt, Human
agcagccauagggaagcaauaca

SEQ ID NO: 146568 - RNA, 23 nt, Human
uggccugcagaguuucugcuggg

SEQ ID NO: 146569 - RNA, 22 nt, Human
ggcuucccaaggagccaggaug

SEQ ID NO: 146570 - RNA, 22 nt, Human
cuugaaguugcaaaacauuaau

SEQ ID NO: 146571 - RNA, 22 nt, Human
gagacagcagggccagggccug

SEQ ID NO: 146572 - RNA, 22 nt, Human
uucuuuugggaauuacguaugc

SEQ ID NO: 146573 - RNA, 19 nt, Human
ucccuuccugucgggcucc

SEQ ID NO: 146574 - RNA, 22 nt, Human
aggagcugagggagcgcccuug

SEQ ID NO: 146575 - RNA, 22 nt, Human
aggcugaggcagguggaucauu

SEQ ID NO: 146576 - RNA, 22 nt, Human
uucucuuugacauuauucaggu

SEQ ID NO: 146577 - RNA, 22 nt, Human
ccacagcaugcaggccugacac

SEQ ID NO: 146578 - RNA, 22 nt, Human
ggcuuccuuucacuacccucag

SEQ ID NO: 146579 - RNA, 20 nt, Human
gcauugaguauagacagaug

SEQ ID NO: 146580 - RNA, 22 nt, Human
aaggacagaaacagauugcugg

SEQ ID NO: 146581 - RNA, 22 nt, Human
uggacucagugcugccauuccc

SEQ ID NO: 146582 - RNA, 22 nt, Human
cagccccucacagagcuguccu

SEQ ID NO: 146583 - RNA, 22 nt, Human
uuucuagggcucuugucuucug

SEQ ID NO: 146584 - RNA, 22 nt, Human
agauacaucauuuauaccuuca

SEQ ID NO: 146585 - RNA, 22 nt, Human
acaaaugcagcauaaagugaac

SEQ ID NO: 146586 - RNA, 22 nt, Human
agggagcugcucugcuuccgug

SEQ ID NO: 146587 - RNA, 22 nt, Human
gcagcugccccgacugugaguc

SEQ ID NO: 146588 - RNA, 16 nt, Human
uguuagcugugcauua

SEQ ID NO: 146589 - RNA, 22 nt, Human
caaaugcauaguuuauaagaag

SEQ ID NO: 146590 - RNA, 20 nt, Human
aaggcacuaugucugcuagc

SEQ ID NO: 146591 - RNA, 18 nt, Human
ccuggcuuccaucuuggu

SEQ ID NO: 146592 - RNA, 22 nt, Human
aaagauuauggcauugaaauac

SEQ ID NO: 146593 - RNA, 22 nt, Human
uacacacagaggccaugggauu

SEQ ID NO: 146594 - RNA, 22 nt, Human
ccaggaugacccccacuuuccu

SEQ ID NO: 146595 - RNA, 22 nt, Human
cgcuguguuuacaucauugcug

SEQ ID NO: 146596 - RNA, 22 nt, Human
aggcacagcacaccuggccccc

SEQ ID NO: 146597 - RNA, 22 nt, Human
gcagcugccgugagcucacgcc

SEQ ID NO: 146598 - RNA, 22 nt, Human
uuugugugcgucuggccugggg

SEQ ID NO: 146599 - RNA, 22 nt, Human
accucugcaguagggcugugcc

SEQ ID NO: 146600 - RNA, 22 nt, Human
aggagccaggaaaccugcucug

SEQ ID NO: 146601 - RNA, 22 nt, Human
ucugaggcuauguucaggcuaa

SEQ ID NO: 146602 - RNA, 22 nt, Human
gugcuguaacaacagagugucu

SEQ ID NO: 146603 - RNA, 22 nt, Human
augaaacaugagaaauggagag

SEQ ID NO: 146604 - RNA, 22 nt, Human
ucugagugagggugugagauau

SEQ ID NO: 146605 - RNA, 20 nt, Human
cuucaggacccauccucccc

SEQ ID NO: 146606 - RNA, 18 nt, Human
cagaugagaugcaaucuc

SEQ ID NO: 146607 - RNA, 22 nt, Human
ucucugguuauuaacuaacucc

SEQ ID NO: 146608 - RNA, 22 nt, Human
ugaguguguauuauguaucagg

SEQ ID NO: 146609 - RNA, 22 nt, Human
agggacacacuccaguguuauu

SEQ ID NO: 146610 - RNA, 22 nt, Human
gugggugugguucguuuaagac

SEQ ID NO: 146611 - RNA, 22 nt, Human
auguggcuaguccaauuaauga

SEQ ID NO: 146612 - RNA, 22 nt, Human
uuacuuuggauggucaagaaag

SEQ ID NO: 146613 - RNA, 22 nt, Human
acuuuauuuccuauugcaucca

SEQ ID NO: 146614 - RNA, 22 nt, Human
uagaguauauaggccuuugugu

SEQ ID NO: 146615 - RNA, 22 nt, Human
guuucucuuugaagccuggcug

SEQ ID NO: 146616 - RNA, 22 nt, Human
aaacagaaggguagguaaacau

SEQ ID NO: 146617 - RNA, 22 nt, Human
cuucucucccuggcacucagac

SEQ ID NO: 146618 - RNA, 22 nt, Human
ugucaugccaggaaauaguccc

SEQ ID NO: 146619 - RNA, 22 nt, Human
agggggcccuugcaggugagcg

SEQ ID NO: 146620 - RNA, 22 nt, Human
cuggagggugagccucaucucu

SEQ ID NO: 146621 - RNA, 21 nt, Human
uccucugcagugagguggccu

SEQ ID NO: 146622 - RNA, 22 nt, Human
acaguaaagccuucugguugac

SEQ ID NO: 146623 - RNA, 22 nt, Human
ugcucuucggggccacugcuug

SEQ ID NO: 146624 - RNA, 22 nt, Human
gucccugcccuccugggacuca

SEQ ID NO: 146625 - RNA, 22 nt, Human
agagccuggaccugagcuacaa

SEQ ID NO: 146626 - RNA, 22 nt, Human
gcucccagggaccgcagggcag

SEQ ID NO: 146627 - RNA, 22 nt, Human
ccucagggucugaggagaccgu

SEQ ID NO: 146628 - RNA, 22 nt, Human
ggcuggagauaugucuggaaca

SEQ ID NO: 146629 - RNA, 22 nt, Human
ggcuggaaguccaagaucaagg

SEQ ID NO: 146630 - RNA, 22 nt, Human
ucagagcuuuggagaccaggaa

SEQ ID NO: 146631 - RNA, 22 nt, Human
agggccugacacccuugccagc

SEQ ID NO: 146632 - RNA, 22 nt, Human
cagcuuugauucuuucugccau

SEQ ID NO: 146633 - RNA, 22 nt, Human
cuggcuguggauuaucacaggc

SEQ ID NO: 146634 - RNA, 22 nt, Human
gggacugggagauccuccuggc

SEQ ID NO: 146635 - RNA, 22 nt, Human
caggccugaguguggaagucuu

SEQ ID NO: 146636 - RNA, 22 nt, Human
ucaaaaguuucacauagagaua

SEQ ID NO: 146637 - RNA, 21 nt, Human
ucuugaaaauuguagcaguuu

SEQ ID NO: 146638 - RNA, 22 nt, Human
cagcugccacaggacuuucuga

SEQ ID NO: 146639 - RNA, 22 nt, Human
cccagcucucugcucuuagccu

SEQ ID NO: 146640 - RNA, 22 nt, Human
accaucagagcacaguccgugc

SEQ ID NO: 146641 - RNA, 22 nt, Human
agcagcugccagagagaguucc

SEQ ID NO: 146642 - RNA, 22 nt, Human
caugcuuuaccaaagcagugau

SEQ ID NO: 146643 - RNA, 22 nt, Human
ggacugugaggucugggugagg

SEQ ID NO: 146644 - RNA, 22 nt, Human
cauguacauucuguagauggag

SEQ ID NO: 146645 - RNA, 21 nt, Human
aggccucuucauggccaugau

SEQ ID NO: 146646 - RNA, 22 nt, Human
auauuucuccaaauguuuucaa

SEQ ID NO: 146647 - RNA, 22 nt, Human
auaaaacuuauuagaauugugu

SEQ ID NO: 146648 - RNA, 22 nt, Human
aucuaagaguuaacaucaagaa

SEQ ID NO: 146649 - RNA, 22 nt, Human
uaggcaggugugcacugcccac

SEQ ID NO: 146650 - RNA, 22 nt, Human
auucucuguagauggcuugaga

SEQ ID NO: 146651 - RNA, 22 nt, Human
uaacguuugauaacuucuguuc

SEQ ID NO: 146652 - RNA, 22 nt, Human
cacauuucucuaccucacacaa

SEQ ID NO: 146653 - RNA, 22 nt, Human
gggaguggauuauguggaccca

SEQ ID NO: 146654 - RNA, 22 nt, Human
agcucccagucuccucuccaug

SEQ ID NO: 146655 - RNA, 22 nt, Human
agcugcuccuuuccugcaggcg

SEQ ID NO: 146656 - RNA, 22 nt, Human
uuuuaagaugcuaguauuucag

SEQ ID NO: 146657 - RNA, 22 nt, Human
acagagcauauaaagugcuuug

SEQ ID NO: 146658 - RNA, 22 nt, Human
uuccauauuuguguggcaaaag

SEQ ID NO: 146659 - RNA, 22 nt, Human
ggaggccacgguuuagcaccga

SEQ ID NO: 146660 - RNA, 20 nt, Human
gccuggaggcaaugggaaga

SEQ ID NO: 146661 - RNA, 22 nt, Human
caguggucugugcuucuguaca

SEQ ID NO: 146662 - RNA, 21 nt, Human
guggcccugccgcagugucca

SEQ ID NO: 146663 - RNA, 22 nt, Human
aucuggcucccuuggaauccgu

SEQ ID NO: 146664 - RNA, 22 nt, Human
uucucuccuacccaguauccau

SEQ ID NO: 146665 - RNA, 22 nt, Human
caagagcucagaaacccuugcu

SEQ ID NO: 146666 - RNA, 22 nt, Human
uaaaauagcaugugcagugaaa

SEQ ID NO: 146667 - RNA, 22 nt, Human
aauaaacugcucaauugcauca

SEQ ID NO: 146668 - RNA, 22 nt, Human
ggcagcugauuagcaucaagga

SEQ ID NO: 146669 - RNA, 22 nt, Human
uuauauuucugguagccuucag

SEQ ID NO: 146670 - RNA, 22 nt, Human
gcacugaaugccaaaguguagg

SEQ ID NO: 146671 - RNA, 22 nt, Human
cccugcagaaccacagacaaac

SEQ ID NO: 146672 - RNA, 22 nt, Human
caauagcagcuucugaaugcaa

SEQ ID NO: 146673 - RNA, 22 nt, Human
ugggcagaguagcucagaagaa

SEQ ID NO: 146674 - RNA, 22 nt, Human
cuacaguaugaaaccuuuacuc

SEQ ID NO: 146675 - RNA, 22 nt, Human
agggccagaggcaccuugcagc

SEQ ID NO: 146676 - RNA, 22 nt, Human
gccaggcuggaaagaacagaca

SEQ ID NO: 146677 - RNA, 22 nt, Human
cagguacacucccuugugcuga

SEQ ID NO: 146678 - RNA, 22 nt, Human
ggagugacucucggggccacua

SEQ ID NO: 146679 - RNA, 22 nt, Human
ggccucucauguccugggcuuc

SEQ ID NO: 146680 - RNA, 22 nt, Human
auacaucuaugccuuucugaca

SEQ ID NO: 146681 - RNA, 22 nt, Human
gucagcugucuccccagagugg

SEQ ID NO: 146682 - RNA, 22 nt, Human
gucugcccucacgccagcuggg

SEQ ID NO: 146683 - RNA, 22 nt, Human
caguuucuguuuuaaauagcag

SEQ ID NO: 146684 - RNA, 22 nt, Human
ugugcccauuacacagaggcau

SEQ ID NO: 146685 - RNA, 21 nt, Human
ggucagggggugccuccaggu

SEQ ID NO: 146686 - RNA, 22 nt, Human
uuauuugccagaauuucucuug

SEQ ID NO: 146687 - RNA, 22 nt, Human
acuuuucugcagaugaucucuu

SEQ ID NO: 146688 - RNA, 23 nt, Human
uuuauccaacucuguaaucucuc

SEQ ID NO: 146689 - RNA, 22 nt, Human
uagggcagcugcaucaggcacu

SEQ ID NO: 146690 - RNA, 22 nt, Human
agggccagagucuguguagaua

SEQ ID NO: 146691 - RNA, 23 nt, Human
uccagcagccaagaaggguagaa

SEQ ID NO: 146692 - RNA, 22 nt, Human
acugugugacuguuauuacugu

SEQ ID NO: 146693 - RNA, 18 nt, Human
ggccugaggauuucagca

SEQ ID NO: 146694 - RNA, 22 nt, Human
gagagcuggauucuggauaggu

SEQ ID NO: 146695 - RNA, 22 nt, Human
uugauacaggcucuauuucauc

SEQ ID NO: 146696 - RNA, 22 nt, Human
caggacagguguucuagaucag

SEQ ID NO: 146697 - RNA, 22 nt, Human
cuggagcuggcuuccuuccacu

SEQ ID NO: 146698 - RNA, 20 nt, Human
gcuguggcaaagcuuugugu

SEQ ID NO: 146699 - RNA, 22 nt, Human
guccugucccccaaggcugugg

SEQ ID NO: 146700 - RNA, 22 nt, Human
ucugugacuugcgggaggagaa

SEQ ID NO: 146701 - RNA, 22 nt, Human
uuuguguguauauccuuccaga

SEQ ID NO: 146702 - RNA, 23 nt, Human
ugucccagagggagggauaggcu

SEQ ID NO: 146703 - RNA, 22 nt, Human
auaagguaugaaaaguaaaugg

SEQ ID NO: 146704 - RNA, 22 nt, Human
cugugucuccuuggugggauau

SEQ ID NO: 146705 - RNA, 22 nt, Human
ggcugcagauagccagccacca

SEQ ID NO: 146706 - RNA, 22 nt, Human
ucaguuuuuguuugccagauag

SEQ ID NO: 146707 - RNA, 22 nt, Human
gaguuauuuguagggauuauau

SEQ ID NO: 146708 - RNA, 22 nt, Human
uaacacacugaaggugagaugg

SEQ ID NO: 146709 - RNA, 22 nt, Human
caggaacaauguaagucucauu

SEQ ID NO: 146710 - RNA, 22 nt, Human
ccuguggcucucuuuggagguc

SEQ ID NO: 146711 - RNA, 22 nt, Human
uggcucugcagcagugugcgug

SEQ ID NO: 146712 - RNA, 22 nt, Human
ccuggaagauucaccacuacca

SEQ ID NO: 146713 - RNA, 22 nt, Human
acaaauauuuacugaauccacu

SEQ ID NO: 146714 - RNA, 22 nt, Human
uacaguauagaauguguauuaa

SEQ ID NO: 146715 - RNA, 22 nt, Human
gucuugaucuccugaccuugug

SEQ ID NO: 146716 - RNA, 22 nt, Human
uuuagaaauucaucuauggccu

SEQ ID NO: 146717 - RNA, 22 nt, Human
uucauucugggcucuaaggaac

SEQ ID NO: 146718 - RNA, 22 nt, Human
gaaggaaaucugugauuuaugc

SEQ ID NO: 146719 - RNA, 19 nt, Human
ugcagccacgugagagacu

SEQ ID NO: 146720 - RNA, 22 nt, Human
caagaugggcaccccagcaccu

SEQ ID NO: 146721 - RNA, 22 nt, Human
uguguauuucuggaacagacua

SEQ ID NO: 146722 - RNA, 22 nt, Human
ucaguguccggagccugagugc

SEQ ID NO: 146723 - RNA, 19 nt, Human
ugcagcucagggcaggggc

SEQ ID NO: 146724 - RNA, 23 nt, Human
ugucuggcucauggugggucuca

SEQ ID NO: 146725 - RNA, 22 nt, Human
uugauguacagaauuguucaca

SEQ ID NO: 146726 - RNA, 19 nt, Human
ucaguauauaauuacacca

SEQ ID NO: 146727 - RNA, 22 nt, Human
ggcaggagcucuccaguuugcc

SEQ ID NO: 146728 - RNA, 22 nt, Human
cagccuccugggacacucaccg

SEQ ID NO: 146729 - RNA, 22 nt, Human
ccugugugauuggaagcugaga

SEQ ID NO: 146730 - RNA, 22 nt, Human
ugucccauggacacaacuucuu

SEQ ID NO: 146731 - RNA, 20 nt, Human
aagaaacuugaaaguacaag

SEQ ID NO: 146732 - RNA, 21 nt, Human
ugcuucucuagaucaacuacu

SEQ ID NO: 146733 - RNA, 22 nt, Human
gccuggagaagauggaacuagc

SEQ ID NO: 146734 - RNA, 22 nt, Human
guggcugcucgggcuccggccc

SEQ ID NO: 146735 - RNA, 18 nt, Human
aguggucuguuauaucau

SEQ ID NO: 146736 - RNA, 22 nt, Human
aggggcuguggaaaccaacucu

SEQ ID NO: 146737 - RNA, 22 nt, Human
ugugaaggagaugaagggagug

SEQ ID NO: 146738 - RNA, 22 nt, Human
aguggugcugcgcgcggagcuc

SEQ ID NO: 146739 - RNA, 22 nt, Human
cugaagagcucuccuguccccu

SEQ ID NO: 146740 - RNA, 23 nt, Human
uauguguaaggagaaggagugag

SEQ ID NO: 146741 - RNA, 22 nt, Human
cacaggagcuguggggcagugu

SEQ ID NO: 146742 - RNA, 22 nt, Human
ccagguggcuucugcccgaugu

SEQ ID NO: 146743 - RNA, 22 nt, Human
acacagccgugaaucugcuucu

SEQ ID NO: 146744 - RNA, 21 nt, Human
ugcaugcuauguuuuuauuuc

SEQ ID NO: 146745 - RNA, 22 nt, Human
cagagcugacccaaggauugaa

SEQ ID NO: 146746 - RNA, 22 nt, Human
agcgggugcugugucagcccuc

SEQ ID NO: 146747 - RNA, 23 nt, Human
aggcccugccugucccucuuuuu

SEQ ID NO: 146748 - RNA, 22 nt, Human
uguguacucaauugagccauuu

SEQ ID NO: 146749 - RNA, 22 nt, Human
gcugugauguggagggugcuga

SEQ ID NO: 146750 - RNA, 22 nt, Human
uguauauugccugagucuuucc

SEQ ID NO: 146751 - RNA, 22 nt, Human
gggaguggguuuggccuaggcc

SEQ ID NO: 146752 - RNA, 22 nt, Human
uuaaacaguguuucaugugggg

SEQ ID NO: 146753 - RNA, 22 nt, Human
uucucuacuugagauuuuaaug

SEQ ID NO: 146754 - RNA, 22 nt, Human
augcaguacauacaaacacuga

SEQ ID NO: 146755 - RNA, 22 nt, Human
cacugcaguaacucuaggacug

SEQ ID NO: 146756 - RNA, 22 nt, Human
auuguaaguagaaauguuaugg

SEQ ID NO: 146757 - RNA, 22 nt, Human
uaacagaagagcaggcagcccu

SEQ ID NO: 146758 - RNA, 23 nt, Human
aucucucugguggucacagucag

SEQ ID NO: 146759 - RNA, 22 nt, Human
acuuuguauaagacaauaaaga

SEQ ID NO: 146760 - RNA, 22 nt, Human
uucagugugugauaccugcugu

SEQ ID NO: 146761 - RNA, 22 nt, Human
auggggugagacuaggauuaaa

SEQ ID NO: 146762 - RNA, 22 nt, Human
uggcugggccgggccuugugcc

SEQ ID NO: 146763 - RNA, 21 nt, Human
ucagggcagcugcucuucaga

SEQ ID NO: 146764 - RNA, 22 nt, Human
gaguggggcccacugcugggug

SEQ ID NO: 146765 - RNA, 22 nt, Human
ccagcuggcaggagagucaggg

SEQ ID NO: 146766 - RNA, 22 nt, Human
agcagcauaucagagaaaguca

SEQ ID NO: 146767 - RNA, 22 nt, Human
ccagucccagcucugccaugcu

SEQ ID NO: 146768 - RNA, 22 nt, Human
gauggcagucaaccaggugagg

SEQ ID NO: 146769 - RNA, 22 nt, Human
uauguucugucuguacagauuu

SEQ ID NO: 146770 - RNA, 22 nt, Human
acugggccggugcagaguaguu

SEQ ID NO: 146771 - RNA, 22 nt, Human
cugggcuguucugccccugggu

SEQ ID NO: 146772 - RNA, 22 nt, Human
uuucacagcagugugcugcuuu

SEQ ID NO: 146773 - RNA, 22 nt, Human
uugaccauaccuccaggcaguu

SEQ ID NO: 146774 - RNA, 20 nt, Human
ccagacagcaccugccuggu

SEQ ID NO: 146775 - RNA, 22 nt, Human
guggaaugaauagauuugcauu

SEQ ID NO: 146776 - RNA, 22 nt, Human
uuucaauguaacauuuccaggc

SEQ ID NO: 146777 - RNA, 22 nt, Human
guggcuguauagccaagucaga

SEQ ID NO: 146778 - RNA, 22 nt, Human
acaugcuuucuagguccuucug

SEQ ID NO: 146779 - RNA, 19 nt, Human
ugagaaggcaguggggagc

SEQ ID NO: 146780 - RNA, 22 nt, Human
acagaacugcaggaggaaaagc

SEQ ID NO: 146781 - RNA, 22 nt, Human
agggcagacuaggauggaagug

SEQ ID NO: 146782 - RNA, 22 nt, Human
agaugcugucacacacacuguu

SEQ ID NO: 146783 - RNA, 22 nt, Human
ucugcucugggccagcuauuaa

SEQ ID NO: 146784 - RNA, 17 nt, Human
auguggcuaagcugcug

SEQ ID NO: 146785 - RNA, 21 nt, Human
uucuucuuggacuguuuuggc

SEQ ID NO: 146786 - RNA, 22 nt, Human
gucaggaucaaauugaaguuau

SEQ ID NO: 146787 - RNA, 22 nt, Human
agcuggccuccgggugccuggg

SEQ ID NO: 146788 - RNA, 22 nt, Human
gcagggacaccuuugugaagcu

SEQ ID NO: 146789 - RNA, 22 nt, Human
acaggcugcccgcuccccaccu

SEQ ID NO: 146790 - RNA, 22 nt, Human
cagggagcuggcuggcgugagu

SEQ ID NO: 146791 - RNA, 22 nt, Human
ccuguccuccaagagcacaucu

SEQ ID NO: 146792 - RNA, 22 nt, Human
uguuuguucccucucuuuccug

SEQ ID NO: 146793 - RNA, 22 nt, Human
ucaguuuucucaucugugaaau

SEQ ID NO: 146794 - RNA, 22 nt, Human
ggcaguggguuccccaaggcac

SEQ ID NO: 146795 - RNA, 23 nt, Human
gggaccagcuagggcugugaccu

SEQ ID NO: 146796 - RNA, 22 nt, Human
cugcucugagaggcucuuccua

SEQ ID NO: 146797 - RNA, 22 nt, Human
accagagcuggcucugagcacc

SEQ ID NO: 146798 - RNA, 22 nt, Human
uucuucugaaacagugacagac

SEQ ID NO: 146799 - RNA, 21 nt, Human
uguggcugacacccuuuggga

SEQ ID NO: 146800 - RNA, 22 nt, Human
uuuacauggaauauugucuugu

SEQ ID NO: 146801 - RNA, 22 nt, Human
ucuucacaggagccugccugcc

SEQ ID NO: 146802 - RNA, 22 nt, Human
uguguauagaugcaugcauaua

SEQ ID NO: 146803 - RNA, 22 nt, Human
ucaaggaggugcuuggcuucac

SEQ ID NO: 146804 - RNA, 22 nt, Human
aguggggacuuaugccagcauu

SEQ ID NO: 146805 - RNA, 22 nt, Human
ucuuugcaugugcuucuuggcc

SEQ ID NO: 146806 - RNA, 22 nt, Human
ggcccagcugugcuuccagccc

SEQ ID NO: 146807 - RNA, 22 nt, Human
gcagagccaggagcccaggauc

SEQ ID NO: 146808 - RNA, 19 nt, Human
uggcugggcgugccuccgu

SEQ ID NO: 146809 - RNA, 22 nt, Human
uuuaacuuaaucugcuugauga

SEQ ID NO: 146810 - RNA, 22 nt, Human
gaggcaggguguugauuacaga

SEQ ID NO: 146811 - RNA, 22 nt, Human
cugggcugugguguggcccaaa

SEQ ID NO: 146812 - RNA, 22 nt, Human
accaguccgcggagcuccgggg

SEQ ID NO: 146813 - RNA, 22 nt, Human
agccacagugcaagagagaaaa

SEQ ID NO: 146814 - RNA, 22 nt, Human
ucauuuccucaaauucaagguu

SEQ ID NO: 146815 - RNA, 22 nt, Human
cagcccagcacuaaguagauuu

SEQ ID NO: 146816 - RNA, 22 nt, Human
ccugagccugaguggugcaggg

SEQ ID NO: 146817 - RNA, 22 nt, Human
agcacuuuccuggcaaaugugg

SEQ ID NO: 146818 - RNA, 22 nt, Human
cucaacagcucugccauacucc

SEQ ID NO: 146819 - RNA, 22 nt, Human
uuagccauuaaauuacaaggug

SEQ ID NO: 146820 - RNA, 19 nt, Human
ccucugccagcccgccucu

SEQ ID NO: 146821 - RNA, 22 nt, Human
auguaugcauguauguaucgcu

SEQ ID NO: 146822 - RNA, 20 nt, Human
ggucccugcccucugucauc

SEQ ID NO: 146823 - RNA, 22 nt, Human
uucuuuuacauuaagauuucag

SEQ ID NO: 146824 - RNA, 22 nt, Human
ucccagccggugccuggguccc

SEQ ID NO: 146825 - RNA, 22 nt, Human
aggcuggcuggcaggggacaca

SEQ ID NO: 146826 - RNA, 22 nt, Human
cucucuauggaugcaguuuuuc

SEQ ID NO: 146827 - RNA, 19 nt, Human
ucaguuuuagucaucaguu

SEQ ID NO: 146828 - RNA, 22 nt, Human
cccugaggggaguggugaggug

SEQ ID NO: 146829 - RNA, 22 nt, Human
cagggcagccaggccccguggg

SEQ ID NO: 146830 - RNA, 18 nt, Human
ccuggagcuccacagcaa

SEQ ID NO: 146831 - RNA, 22 nt, Human
ccgggcgggggcucucgucacc

SEQ ID NO: 146832 - RNA, 22 nt, Human
ccagaggugccacagaaagagc

SEQ ID NO: 146833 - RNA, 22 nt, Human
cacugagaggucucauuuccaa

SEQ ID NO: 146834 - RNA, 22 nt, Human
ugcuguguaaaaggugauugaa

SEQ ID NO: 146835 - RNA, 22 nt, Human
uugaaaggugcugugugcugau

SEQ ID NO: 146836 - RNA, 22 nt, Human
uauauuugcuaaaugugugcaa

SEQ ID NO: 146837 - RNA, 22 nt, Human
uucuucuugaaacuuuagguug

SEQ ID NO: 146838 - RNA, 22 nt, Human
cugguuuagcuguaagguuccc

SEQ ID NO: 146839 - RNA, 22 nt, Human
gcucccaggaagagaagggcca

SEQ ID NO: 146840 - RNA, 22 nt, Human
gcuggggagcuagaccucagca

SEQ ID NO: 146841 - RNA, 22 nt, Human
auuccaguuggguucuaauaca

SEQ ID NO: 146842 - RNA, 22 nt, Human
uggcagcugucuguggggucuc

SEQ ID NO: 146843 - RNA, 22 nt, Human
agguuuucagcuguauccugag

SEQ ID NO: 146844 - RNA, 21 nt, Human
agcagcugcaguuucuaucug

SEQ ID NO: 146845 - RNA, 22 nt, Human
uauuacagcuuugauuaucugg

SEQ ID NO: 146846 - RNA, 22 nt, Human
aauugcuaaagauuauguuuuc

SEQ ID NO: 146847 - RNA, 20 nt, Human
gcccuggagccuuguccugg

SEQ ID NO: 146848 - RNA, 22 nt, Human
acccuggggguggccagugcca

SEQ ID NO: 146849 - RNA, 19 nt, Human
ucagugugugggagguggu

SEQ ID NO: 146850 - RNA, 22 nt, Human
cugccucuguugggcauggucu

SEQ ID NO: 146851 - RNA, 22 nt, Human
uggcucagcuuuccccaucugg

SEQ ID NO: 146852 - RNA, 23 nt, Human
cccagcagauuguaaagugucca

SEQ ID NO: 146853 - RNA, 22 nt, Human
gagccucguggcggccacugcg

SEQ ID NO: 146854 - RNA, 22 nt, Human
uuuacuguguccaucugugacu

SEQ ID NO: 146855 - RNA, 22 nt, Human
cucagaguucuccugggaggug

SEQ ID NO: 146856 - RNA, 22 nt, Human
uuucucugcugccugugucgau

SEQ ID NO: 146857 - RNA, 22 nt, Human
auuuaaaugcuuaagaggguuu

SEQ ID NO: 146858 - RNA, 22 nt, Human
aggcugcucugcgaagucagcu

SEQ ID NO: 146859 - RNA, 22 nt, Human
caguggguggcuaaguggcuga

SEQ ID NO: 146860 - RNA, 22 nt, Human
cugggccagggaggugucugua

SEQ ID NO: 146861 - RNA, 19 nt, Human
gugauuucuuuccacaagc

SEQ ID NO: 146862 - RNA, 22 nt, Human
agcaauauuucagcuagcaggu

SEQ ID NO: 146863 - RNA, 21 nt, Human
agggccugugcucuccagguc

SEQ ID NO: 146864 - RNA, 22 nt, Human
uguguguaauguuucucucuuc

SEQ ID NO: 146865 - RNA, 22 nt, Human
ucagagccaaucauggugcauu

SEQ ID NO: 146866 - RNA, 22 nt, Human
ccaucagcaugggagcaugggc

SEQ ID NO: 146867 - RNA, 22 nt, Human
ccucauggccuugagcugaggg

SEQ ID NO: 146868 - RNA, 22 nt, Human
ugccaggaggaggugggacaga

SEQ ID NO: 146869 - RNA, 18 nt, Human
uaguuucuaauggccuuu

SEQ ID NO: 146870 - RNA, 22 nt, Human
ggagagcaggguccugagauac

SEQ ID NO: 146871 - RNA, 22 nt, Human
uaaccuuugaccuugcuugugc

SEQ ID NO: 146872 - RNA, 22 nt, Human
ucccagagugagccaggggcag

SEQ ID NO: 146873 - RNA, 22 nt, Human
accucugccaagaugugcuccc

SEQ ID NO: 146874 - RNA, 20 nt, Human
cacguuuuuccacuagcaaa

SEQ ID NO: 146875 - RNA, 22 nt, Human
acugcuuuucuaagauucugug

SEQ ID NO: 146876 - RNA, 22 nt, Human
agugaaauugcuguaagaggaa

SEQ ID NO: 146877 - RNA, 22 nt, Human
gcuggaaggcuaggcucaguug

SEQ ID NO: 146878 - RNA, 22 nt, Human
uauuugucuaagaggcugacag

SEQ ID NO: 146879 - RNA, 22 nt, Human
uggaaagucucuuuugacugua

SEQ ID NO: 146880 - RNA, 22 nt, Human
acacagggcggaaagcaugaga

SEQ ID NO: 146881 - RNA, 22 nt, Human
gcaccacaucaaugaggggagc

SEQ ID NO: 146882 - RNA, 22 nt, Human
gaagcccagggcguggccgggc

SEQ ID NO: 146883 - RNA, 22 nt, Human
cccagggcccuggacagcuaca

SEQ ID NO: 146884 - RNA, 22 nt, Human
gaggcugcaggcaaugcugccc

SEQ ID NO: 146885 - RNA, 22 nt, Human
cccuucccuucugggagaucca

SEQ ID NO: 146886 - RNA, 22 nt, Human
uccaugagaacccuuggagaua

SEQ ID NO: 146887 - RNA, 22 nt, Human
cucuggagcauuucaccuacau

SEQ ID NO: 146888 - RNA, 19 nt, Human
cucugccucccuccugggu

SEQ ID NO: 146889 - RNA, 22 nt, Human
ugccacccagccaggaguggga

SEQ ID NO: 146890 - RNA, 22 nt, Human
ucaguuuugaaaacauugaaug

SEQ ID NO: 146891 - RNA, 22 nt, Human
gcugaagcugcagcaggaggaa

SEQ ID NO: 146892 - RNA, 20 nt, Human
ugcagggcugccucccagcu

SEQ ID NO: 146893 - RNA, 22 nt, Human
gccuggaguacuccuugaagug

SEQ ID NO: 146894 - RNA, 22 nt, Human
cugcccuguuuggacagcccgg

SEQ ID NO: 146895 - RNA, 22 nt, Human
cuggggcugcagcgaucuucau

SEQ ID NO: 146896 - RNA, 22 nt, Human
cugugucuaaucaggucaguca

SEQ ID NO: 146897 - RNA, 22 nt, Human
ccagggugagaaaaggcuggau

SEQ ID NO: 146898 - RNA, 22 nt, Human
gcacugcagguggguggagagg

SEQ ID NO: 146899 - RNA, 22 nt, Human
uugcauaaagauuuuauugcau

SEQ ID NO: 146900 - RNA, 22 nt, Human
ccuggacucaggcugugggcac

SEQ ID NO: 146901 - RNA, 22 nt, Human
ucuccugugcacccucccugug

SEQ ID NO: 146902 - RNA, 22 nt, Human
gccuggcuccuaagagcacaac

SEQ ID NO: 146903 - RNA, 22 nt, Human
cccagcagaccgcugugauggc

SEQ ID NO: 146904 - RNA, 22 nt, Human
gcugggaagugcaagaucaagg

SEQ ID NO: 146905 - RNA, 23 nt, Human
caguacuuaguguagcguuaauu

SEQ ID NO: 146906 - RNA, 23 nt, Human
uaagaacagacaagcauuuacau

SEQ ID NO: 146907 - RNA, 22 nt, Human
uguggccuccuguuccugggua

SEQ ID NO: 146908 - RNA, 19 nt, Human
caguggagauuggaggagg

SEQ ID NO: 146909 - RNA, 22 nt, Human
uauugucuaggaauuguuuaaa

SEQ ID NO: 146910 - RNA, 22 nt, Human
ucucagaguuccucuggagucc

SEQ ID NO: 146911 - RNA, 21 nt, Human
agcagcaucagccucaccuga

SEQ ID NO: 146912 - RNA, 22 nt, Human
aggcagaggaaggguggauuug

SEQ ID NO: 146913 - RNA, 22 nt, Human
cuaacuuuuugauucuugggga

SEQ ID NO: 146914 - RNA, 22 nt, Human
ucugccuguucaagucuucuag

SEQ ID NO: 146915 - RNA, 22 nt, Human
gggauggcucaaaggagucagg

SEQ ID NO: 146916 - RNA, 22 nt, Human
agcaggaaggggaugaugggca

SEQ ID NO: 146917 - RNA, 22 nt, Human
gcucuccacugaccacggggca

SEQ ID NO: 146918 - RNA, 22 nt, Human
uuguggaaauacagacuccaag

SEQ ID NO: 146919 - RNA, 21 nt, Human
gagcucucaggcaagaagcag

SEQ ID NO: 146920 - RNA, 22 nt, Human
ugcuuucaaaggcuuucuagau

SEQ ID NO: 146921 - RNA, 23 nt, Human
cuguggcugaguccuguuggagu

SEQ ID NO: 146922 - RNA, 22 nt, Human
uuuuuaguagagguggguuuca

SEQ ID NO: 146923 - RNA, 19 nt, Human
acaagggcaggcaagguga

SEQ ID NO: 146924 - RNA, 22 nt, Human
ucaucucuccccagugucuuua

SEQ ID NO: 146925 - RNA, 21 nt, Human
aggcagcucaggcccagagag

SEQ ID NO: 146926 - RNA, 22 nt, Human
gucauuguguggacauggagaa

SEQ ID NO: 146927 - RNA, 22 nt, Human
ucagcagcagcucagcauguuu

SEQ ID NO: 146928 - RNA, 23 nt, Human
ugcauuauccucucugaagacca

SEQ ID NO: 146929 - RNA, 22 nt, Human
uuugaaagccuggcuuuucucu

SEQ ID NO: 146930 - RNA, 22 nt, Human
uuuaaucaggcaaagcauaaua

SEQ ID NO: 146931 - RNA, 22 nt, Human
auagugguuggauaugucagag

SEQ ID NO: 146932 - RNA, 22 nt, Human
agcagggccaacaguaaacacc

SEQ ID NO: 146933 - RNA, 22 nt, Human
uugauagguuuuauguauaguu

SEQ ID NO: 146934 - RNA, 22 nt, Human
uugcauugugauuacagaggug

SEQ ID NO: 146935 - RNA, 22 nt, Human
gacagggcauggugcagaguuc

SEQ ID NO: 146936 - RNA, 22 nt, Human
ggcaguggcuccucucuacucc

SEQ ID NO: 146937 - RNA, 22 nt, Human
uauuggugggggcagagagaga

SEQ ID NO: 146938 - RNA, 22 nt, Human
cuguagcaaguuauucaauaaa

SEQ ID NO: 146939 - RNA, 22 nt, Human
ucagaggacaagcucccuggug

SEQ ID NO: 146940 - RNA, 22 nt, Human
auugcacaaacacagucagacu

SEQ ID NO: 146941 - RNA, 22 nt, Human
cccucugaccuccugccacagu

SEQ ID NO: 146942 - RNA, 22 nt, Human
cagcuugcaguacuuguuuuug

SEQ ID NO: 146943 - RNA, 22 nt, Human
aucaguuuuuauuaauguagcu

SEQ ID NO: 146944 - RNA, 18 nt, Human
ucugucuguacaaguauc

SEQ ID NO: 146945 - RNA, 22 nt, Human
caaaauguucuggcaccuuuaa

SEQ ID NO: 146946 - RNA, 22 nt, Human
cugugcauugucuugucuguag

SEQ ID NO: 146947 - RNA, 22 nt, Human
ugugugucugcacauguauaau

SEQ ID NO: 146948 - RNA, 22 nt, Human
uguaacaguaagccugugagcu

SEQ ID NO: 146949 - RNA, 22 nt, Human
guaucuuuccacaucuucagua

SEQ ID NO: 146950 - RNA, 18 nt, Human
gcagcugacacuggaguu

SEQ ID NO: 146951 - RNA, 22 nt, Human
caguacuugggaaugcugggga

SEQ ID NO: 146952 - RNA, 22 nt, Human
ggaggccaaggcagguggaucg

SEQ ID NO: 146953 - RNA, 22 nt, Human
auuuugaaaccaaguuauuucc

SEQ ID NO: 146954 - RNA, 22 nt, Human
aagggcagcuauuaucgucauc

SEQ ID NO: 146955 - RNA, 22 nt, Human
auguaucagaaauagcauuggc

SEQ ID NO: 146956 - RNA, 22 nt, Human
aacagaacccgagugugaaucu

SEQ ID NO: 146957 - RNA, 21 nt, Human
ucuuugcaucaguuguuuucu

SEQ ID NO: 146958 - RNA, 22 nt, Human
cccccaaggccaggcugagacc

SEQ ID NO: 146959 - RNA, 22 nt, Human
accacugcccauggugaaaacu

SEQ ID NO: 146960 - RNA, 21 nt, Human
agcagccauggaugguaugua

SEQ ID NO: 146961 - RNA, 22 nt, Human
caaaugcuggcccugcuacuua

SEQ ID NO: 146962 - RNA, 22 nt, Human
caaagugcuggaauuacaggug

SEQ ID NO: 146963 - RNA, 22 nt, Human
gagccagccgcaagagcuguga

SEQ ID NO: 146964 - RNA, 22 nt, Human
gcugaagggagugcugagucug

SEQ ID NO: 146965 - RNA, 22 nt, Human
aucauaaagugcuaucugauug

SEQ ID NO: 146966 - RNA, 22 nt, Human
cagggugcagugucgcugcuag

SEQ ID NO: 146967 - RNA, 20 nt, Human
aguaccuuuuguauguuacc

SEQ ID NO: 146968 - RNA, 22 nt, Human
ugggagcucagaaagggagguc

SEQ ID NO: 146969 - RNA, 22 nt, Human
caggcagcguccugcuuccugu

SEQ ID NO: 146970 - RNA, 18 nt, Human
ggagccagucugucucug

SEQ ID NO: 146971 - RNA, 22 nt, Human
cagcugaauucuucagacucca

SEQ ID NO: 146972 - RNA, 22 nt, Human
cugugauguuagcucuguguua

SEQ ID NO: 146973 - RNA, 22 nt, Human
ggcauggcuggguucuggugag

SEQ ID NO: 146974 - RNA, 22 nt, Human
ugguggcuucugaggauggcga

SEQ ID NO: 146975 - RNA, 22 nt, Human
acaaaguuauucuuucagagga

SEQ ID NO: 146976 - RNA, 16 nt, Human
agcagggcgggaagga

SEQ ID NO: 146977 - RNA, 22 nt, Human
guggagcccugccuugcucaug

SEQ ID NO: 146978 - RNA, 22 nt, Human
ucaggaucaggggccuuuccuu

SEQ ID NO: 146979 - RNA, 22 nt, Human
cuuguaauuauaauguacuguu

SEQ ID NO: 146980 - RNA, 22 nt, Human
uggcucagcaagacauugaccu

SEQ ID NO: 146981 - RNA, 22 nt, Human
gguggcaggcccugagcauccc

SEQ ID NO: 146982 - RNA, 19 nt, Human
uagcagcugccaaaggaga

SEQ ID NO: 146983 - RNA, 22 nt, Human
ccucugggugggaggccgggcg

SEQ ID NO: 146984 - RNA, 22 nt, Human
ucucauugguauauacaugugu

SEQ ID NO: 146985 - RNA, 17 nt, Human
ccagagcuacugagacu

SEQ ID NO: 146986 - RNA, 19 nt, Human
ggagccuggagcacgugcc

SEQ ID NO: 146987 - RNA, 17 nt, Human
augugucugaguguccu

SEQ ID NO: 146988 - RNA, 22 nt, Human
cuggcagcuucaggacacucgg

SEQ ID NO: 146989 - RNA, 22 nt, Human
ugcucccaggcucuguggucug

SEQ ID NO: 146990 - RNA, 22 nt, Human
ccccagcugcauacuugccaag

SEQ ID NO: 146991 - RNA, 22 nt, Human
ccugggagagccaucuguggcc

SEQ ID NO: 146992 - RNA, 22 nt, Human
uucucuguggauugggugagag

SEQ ID NO: 146993 - RNA, 22 nt, Human
gcagcuggggccacacuuaggc

SEQ ID NO: 146994 - RNA, 22 nt, Human
ggcacugaaccaggacacaagc

SEQ ID NO: 146995 - RNA, 22 nt, Human
aggaagcccuugucauuucugu

SEQ ID NO: 146996 - RNA, 17 nt, Human
cugucugcgcaugaggu

SEQ ID NO: 146997 - RNA, 22 nt, Human
aggcagcccacaggacacagga

SEQ ID NO: 146998 - RNA, 22 nt, Human
cacaaugcguacauauaucaaa

SEQ ID NO: 146999 - RNA, 22 nt, Human
gucccaggugggcuccaccucu

SEQ ID NO: 147000 - RNA, 22 nt, Human
ggcgcuggccacgguggcucug

SEQ ID NO: 147001 - RNA, 22 nt, Human
guuuucugauuagcaaaucuga

SEQ ID NO: 147002 - RNA, 22 nt, Human
ugacagaaauaguucuuaauuu

SEQ ID NO: 147003 - RNA, 22 nt, Human
gugcauuggugcgccacuucac

SEQ ID NO: 147004 - RNA, 22 nt, Human
uguguauucagcaagcgaaaca

SEQ ID NO: 147005 - RNA, 22 nt, Human
uucaugugaauauauuugucuu

SEQ ID NO: 147006 - RNA, 22 nt, Human
ccucaggaaaugaauaaauggc

SEQ ID NO: 147007 - RNA, 22 nt, Human
gugcugucaauugcuuucagua

SEQ ID NO: 147008 - RNA, 22 nt, Human
ucagaagcaggagugugcacaa

SEQ ID NO: 147009 - RNA, 22 nt, Human
aucuggcuuggguguggguagc

SEQ ID NO: 147010 - RNA, 22 nt, Human
cuggcuguaagcguguuuccua

SEQ ID NO: 147011 - RNA, 22 nt, Human
ugggcagaauugugguaguuaa

SEQ ID NO: 147012 - RNA, 22 nt, Human
uauuuugagguauuuuugagcu

SEQ ID NO: 147013 - RNA, 22 nt, Human
uccauuuuucaugacuccucaa

SEQ ID NO: 147014 - RNA, 22 nt, Human
ugccugcugcuaagcucuuugu

SEQ ID NO: 147015 - RNA, 22 nt, Human
cuccaggagcugugucuuucuu

SEQ ID NO: 147016 - RNA, 22 nt, Human
ucaggcuggaaugcaguggggc

SEQ ID NO: 147017 - RNA, 22 nt, Human
ccuggccuuaagggcagggagc

SEQ ID NO: 147018 - RNA, 22 nt, Human
cucaggaugcaggucacaggac

SEQ ID NO: 147019 - RNA, 18 nt, Human
cuuguucuucucuuggcg

SEQ ID NO: 147020 - RNA, 22 nt, Human
uagagaaauaagcuuugccuug

SEQ ID NO: 147021 - RNA, 22 nt, Human
cacaauuuccuugcuucacuuu

SEQ ID NO: 147022 - RNA, 22 nt, Human
ugcucuggagggugaagcuuuu

SEQ ID NO: 147023 - RNA, 22 nt, Human
ggaugcugggagacagcaggca

SEQ ID NO: 147024 - RNA, 22 nt, Human
ccagcugacgaugccuggucuc

SEQ ID NO: 147025 - RNA, 22 nt, Human
ugacacauuaaaugcucacaaa

SEQ ID NO: 147026 - RNA, 22 nt, Human
cuguacaggugaggagggggcu

SEQ ID NO: 147027 - RNA, 22 nt, Human
uguguugguagaucugaggucu

SEQ ID NO: 147028 - RNA, 22 nt, Human
uagaaacauguucuguucuguu

SEQ ID NO: 147029 - RNA, 22 nt, Human
caggaugguggcaugaucagaa

SEQ ID NO: 147030 - RNA, 22 nt, Human
uccagggaagagcagaggcuac

SEQ ID NO: 147031 - RNA, 22 nt, Human
aucaggaucugggagccugaaa

SEQ ID NO: 147032 - RNA, 22 nt, Human
aaguguguugacugaauugggg

SEQ ID NO: 147033 - RNA, 22 nt, Human
agcagccagugggagugauaca

SEQ ID NO: 147034 - RNA, 22 nt, Human
uugaauaguguuuucaguauac

SEQ ID NO: 147035 - RNA, 22 nt, Human
ugguggcuguugcagaacugag

SEQ ID NO: 147036 - RNA, 22 nt, Human
caggauagaaaggccauggagu

SEQ ID NO: 147037 - RNA, 22 nt, Human
gcagaacauuucacaguaucuu

SEQ ID NO: 147038 - RNA, 22 nt, Human
ucaucacauaugucaugauuug

SEQ ID NO: 147039 - RNA, 22 nt, Human
cagagccacugucugccaggca

SEQ ID NO: 147040 - RNA, 22 nt, Human
gauuucaauccagcuuucuucu

SEQ ID NO: 147041 - RNA, 22 nt, Human
ucaucuucuauuaauagggaga

SEQ ID NO: 147042 - RNA, 22 nt, Human
aaugcacagcguuccaugcuug

SEQ ID NO: 147043 - RNA, 22 nt, Human
aagggcaggagaagacggauau

SEQ ID NO: 147044 - RNA, 22 nt, Human
acacugaauaauugagaguuga

SEQ ID NO: 147045 - RNA, 22 nt, Human
uuuccucugcugccauugcccc

SEQ ID NO: 147046 - RNA, 22 nt, Human
uauuuccauguuagaacuaagu

SEQ ID NO: 147047 - RNA, 22 nt, Human
ugccugugggugaugauuugau

SEQ ID NO: 147048 - RNA, 22 nt, Human
ugaggcaguucuuacuuguauu

SEQ ID NO: 147049 - RNA, 22 nt, Human
cugcccugucugcagccuggcu

SEQ ID NO: 147050 - RNA, 22 nt, Human
cugagggcaugaacauuccaua

SEQ ID NO: 147051 - RNA, 22 nt, Human
accagagauggggcuucucugu

SEQ ID NO: 147052 - RNA, 22 nt, Human
caguggguaggaaaggcucuuc

SEQ ID NO: 147053 - RNA, 22 nt, Human
acagucuugagcaucagccaga

SEQ ID NO: 147054 - RNA, 22 nt, Human
ugaaaucuuagccauucugccu

SEQ ID NO: 147055 - RNA, 22 nt, Human
cuaucuuuuguucauuuugagu

SEQ ID NO: 147056 - RNA, 20 nt, Human
ucuguagucuaugaggcuua

SEQ ID NO: 147057 - RNA, 22 nt, Human
gcaggggaguccacucuaugca

SEQ ID NO: 147058 - RNA, 22 nt, Human
ucucugucugagccuggcagac

SEQ ID NO: 147059 - RNA, 22 nt, Human
cacauccuucagcugagcccag

SEQ ID NO: 147060 - RNA, 23 nt, Human
auuuacagguuaaaugaaaucag

SEQ ID NO: 147061 - RNA, 22 nt, Human
ugcucccaaacgaccuacugug

SEQ ID NO: 147062 - RNA, 22 nt, Human
cuucacauguuggaguccuuug

SEQ ID NO: 147063 - RNA, 22 nt, Human
ccuggccucgugcucacggcuc

SEQ ID NO: 147064 - RNA, 22 nt, Human
ucucccaggcugcccuguggac

SEQ ID NO: 147065 - RNA, 22 nt, Human
acguuuucagccuuaauguaga

SEQ ID NO: 147066 - RNA, 22 nt, Human
ucaggaugaccacgagccucua

SEQ ID NO: 147067 - RNA, 22 nt, Human
ucucugugacauuucugagccu

SEQ ID NO: 147068 - RNA, 20 nt, Human
gaggaaaagcugccaggccu

SEQ ID NO: 147069 - RNA, 20 nt, Human
cugggcagguguuugaucuc

SEQ ID NO: 147070 - RNA, 22 nt, Human
agagugggugaucucuguuguc

SEQ ID NO: 147071 - RNA, 22 nt, Human
agcagagcgccugcucagaggg

SEQ ID NO: 147072 - RNA, 22 nt, Human
aaaguucagugccuucuauaca

SEQ ID NO: 147073 - RNA, 22 nt, Human
ugcccugucuaagcugucagua

SEQ ID NO: 147074 - RNA, 22 nt, Human
ccagcacugcucucagacugag

SEQ ID NO: 147075 - RNA, 22 nt, Human
gcugagagcggccagcugggaa

SEQ ID NO: 147076 - RNA, 22 nt, Human
ucaaugauuagaguuuagugug

SEQ ID NO: 147077 - RNA, 22 nt, Human
uguggccagcagguggcugugu

SEQ ID NO: 147078 - RNA, 22 nt, Human
acaguauacauugauuaggacc

SEQ ID NO: 147079 - RNA, 22 nt, Human
aaagcaguauauugguaguugu

SEQ ID NO: 147080 - RNA, 22 nt, Human
cagcugaggucaaagaagcagg

SEQ ID NO: 147081 - RNA, 19 nt, Human
uacauuuguguacacuugu

SEQ ID NO: 147082 - RNA, 22 nt, Human
acuggagcccguggaggcgcag

SEQ ID NO: 147083 - RNA, 22 nt, Human
uguuauugagguuacuuauaag

SEQ ID NO: 147084 - RNA, 22 nt, Human
cccucagcuccacccucagcag

SEQ ID NO: 147085 - RNA, 22 nt, Human
agcagcuucuuucacuccugga

SEQ ID NO: 147086 - RNA, 22 nt, Human
agacucaagcagauaggaauua

SEQ ID NO: 147087 - RNA, 22 nt, Human
aaaauacacauacuaggggaaa

SEQ ID NO: 147088 - RNA, 22 nt, Human
ggcugaugggcaugagcuguca

SEQ ID NO: 147089 - RNA, 22 nt, Human
ucccagaguuuccuguguccca

SEQ ID NO: 147090 - RNA, 22 nt, Human
cacagcauaaugaaauauacuu

SEQ ID NO: 147091 - RNA, 22 nt, Human
ugucuuuagccagcagucuucu

SEQ ID NO: 147092 - RNA, 22 nt, Human
guauuugauagauuucaaagga

SEQ ID NO: 147093 - RNA, 22 nt, Human
ccuguguggccaggcuggaguc

SEQ ID NO: 147094 - RNA, 22 nt, Human
agcugcccuucucuugcccuug

SEQ ID NO: 147095 - RNA, 22 nt, Human
uccaggaggaggaaggcugcca

SEQ ID NO: 147096 - RNA, 22 nt, Human
guucucucagccuuuguuauua

SEQ ID NO: 147097 - RNA, 22 nt, Human
uggcagagaacacggcugaucu

SEQ ID NO: 147098 - RNA, 22 nt, Human
augcagcugugggcaagaaaug

SEQ ID NO: 147099 - RNA, 22 nt, Human
cugucauuuaagacauucugga

SEQ ID NO: 147100 - RNA, 22 nt, Human
ucaaagucauggcuaguaauga

SEQ ID NO: 147101 - RNA, 22 nt, Human
cuggcuguaacauuuugccaua

SEQ ID NO: 147102 - RNA, 22 nt, Human
aagagcuggcucuugcagcagc

SEQ ID NO: 147103 - RNA, 22 nt, Human
caggcuugauuauucagacaau

SEQ ID NO: 147104 - RNA, 22 nt, Human
ucucagggccucccucuguuuc

SEQ ID NO: 147105 - RNA, 22 nt, Human
uucuucugugaggugugugccu

SEQ ID NO: 147106 - RNA, 22 nt, Human
gccccaccuugagagcagaaac

SEQ ID NO: 147107 - RNA, 22 nt, Human
ccuggcaggcaagaggaaggga

SEQ ID NO: 147108 - RNA, 22 nt, Human
gcuggcagaauuucuucuugcu

SEQ ID NO: 147109 - RNA, 22 nt, Human
aggcaggggagcuggaagggua

SEQ ID NO: 147110 - RNA, 22 nt, Human
ccuggcagaaagaguuacaccu

SEQ ID NO: 147111 - RNA, 22 nt, Human
agacacagucugucuggaggag

SEQ ID NO: 147112 - RNA, 20 nt, Human
uggccucugagaugccacgg

SEQ ID NO: 147113 - RNA, 22 nt, Human
uggcagggugccaguugcgagu

SEQ ID NO: 147114 - RNA, 20 nt, Human
agggcugagaagggacuagc

SEQ ID NO: 147115 - RNA, 22 nt, Human
uccaggcuaauuuugcauuguu

SEQ ID NO: 147116 - RNA, 22 nt, Human
ucuggcagagucagugcacaca

SEQ ID NO: 147117 - RNA, 22 nt, Human
cccuuccuugugacuggugggg

SEQ ID NO: 147118 - RNA, 22 nt, Human
cuccuggcaggcugagugaaau

SEQ ID NO: 147119 - RNA, 19 nt, Human
guccucucaacaacccggg

SEQ ID NO: 147120 - RNA, 20 nt, Human
aagagucuuuacugagcuaa

SEQ ID NO: 147121 - RNA, 20 nt, Human
acaaagacuggaaaagcaag

SEQ ID NO: 147122 - RNA, 22 nt, Human
ugccugccaugcagaaagcuga

SEQ ID NO: 147123 - RNA, 22 nt, Human
acuggcagcuguaggaugcaug

SEQ ID NO: 147124 - RNA, 19 nt, Human
acuggcagggcugcggugg

SEQ ID NO: 147125 - RNA, 22 nt, Human
aggccacaguacuuugcagacc

SEQ ID NO: 147126 - RNA, 22 nt, Human
agaggccuccgaaaggugggcu

SEQ ID NO: 147127 - RNA, 22 nt, Human
aaagagucuggcacuguaccag

SEQ ID NO: 147128 - RNA, 22 nt, Human
gcagccucaaacuccccagcuc

SEQ ID NO: 147129 - RNA, 22 nt, Human
aggaggcugaacuagggucugg

SEQ ID NO: 147130 - RNA, 22 nt, Human
gccuccuggaagucacauguuu

SEQ ID NO: 147131 - RNA, 22 nt, Human
uggcagugguaccggcucucag

SEQ ID NO: 147132 - RNA, 22 nt, Human
cagguuggggacuuaggaugac

SEQ ID NO: 147133 - RNA, 22 nt, Human
acuggcagagacccugauggcc

SEQ ID NO: 147134 - RNA, 22 nt, Human
agggacucccugggccgacacg

SEQ ID NO: 147135 - RNA, 22 nt, Human
gaggcacagucccgaggcaagg

SEQ ID NO: 147136 - RNA, 20 nt, Human
gcuggcagaugucuugagau

SEQ ID NO: 147137 - RNA, 22 nt, Human
cucucuccuuagcugcagacca

SEQ ID NO: 147138 - RNA, 22 nt, Human
gagauggccagugccaggacaa

SEQ ID NO: 147139 - RNA, 22 nt, Human
ggcagagguagcuggaaccagg

SEQ ID NO: 147140 - RNA, 22 nt, Human
ucuggcagcgaagcguguacuu

SEQ ID NO: 147141 - RNA, 22 nt, Human
uggcaguggcucagagugcaga

SEQ ID NO: 147142 - RNA, 22 nt, Human
guccuggcccaggaguacacau

SEQ ID NO: 147143 - RNA, 22 nt, Human
ucuggcaggcaaucggcucugg

SEQ ID NO: 147144 - RNA, 22 nt, Human
gguucccggaucuccgaguccc

SEQ ID NO: 147145 - RNA, 22 nt, Human
gucaggacucugacccgucccg

SEQ ID NO: 147146 - RNA, 22 nt, Human
cuccaggccauggcugcggagg

SEQ ID NO: 147147 - RNA, 22 nt, Human
ggagcugaaccccaucgugcug

SEQ ID NO: 147148 - RNA, 20 nt, Human
ugccuggccuuucucugccc

SEQ ID NO: 147149 - RNA, 22 nt, Human
uggcacucacucucagagucug

SEQ ID NO: 147150 - RNA, 22 nt, Human
gggccccuugcugcucugcugg

SEQ ID NO: 147151 - RNA, 22 nt, Human
agagggugcuggagagacauug

SEQ ID NO: 147152 - RNA, 22 nt, Human
aggagcugcagauucugccuug

SEQ ID NO: 147153 - RNA, 21 nt, Human
ucuggcaggaagacggauggg

SEQ ID NO: 147154 - RNA, 22 nt, Human
gaaagacuuccuuugagaguac

SEQ ID NO: 147155 - RNA, 22 nt, Human
uccugcagccacugcaggcaga

SEQ ID NO: 147156 - RNA, 22 nt, Human
cuggcaugaaauggcaucucau

SEQ ID NO: 147157 - RNA, 18 nt, Human
uccuggcagucagagagg

SEQ ID NO: 147158 - RNA, 19 nt, Human
ccagucccauacaggagau

SEQ ID NO: 147159 - RNA, 22 nt, Human
ugaccaggauacugcagggaug

SEQ ID NO: 147160 - RNA, 22 nt, Human
ccagcccuuagauaaaccuggc

SEQ ID NO: 147161 - RNA, 22 nt, Human
ucuugggauagugucucauggc

SEQ ID NO: 147162 - RNA, 18 nt, Human
cuccuggcugauggugag

SEQ ID NO: 147163 - RNA, 22 nt, Human
cuggccucauagccaagcugug

SEQ ID NO: 147164 - RNA, 22 nt, Human
uccuggcagggucuaggucuag

SEQ ID NO: 147165 - RNA, 22 nt, Human
guccuggcugguucuguggggc

SEQ ID NO: 147166 - RNA, 22 nt, Human
ccuccagcgcgauccacuccgg

SEQ ID NO: 147167 - RNA, 22 nt, Human
ugccugccucuggcagcccugc

SEQ ID NO: 147168 - RNA, 17 nt, Human
gcccacccuuaggagcu

SEQ ID NO: 147169 - RNA, 22 nt, Human
cugccucuauaggaguccacca

SEQ ID NO: 147170 - RNA, 22 nt, Human
aaagaucaaguaggcauggccu

SEQ ID NO: 147171 - RNA, 22 nt, Human
acuggcagguccaucgcccuuu

SEQ ID NO: 147172 - RNA, 22 nt, Human
uggcaguagauccagucucucu

SEQ ID NO: 147173 - RNA, 21 nt, Human
agaugcugaugcugcaggucc

SEQ ID NO: 147174 - RNA, 21 nt, Human
cccuugccugcacuccucggc

SEQ ID NO: 147175 - RNA, 22 nt, Human
uccuggcagaaauggggcugug

SEQ ID NO: 147176 - RNA, 22 nt, Human
gguguugggcucacugguccuu

SEQ ID NO: 147177 - RNA, 22 nt, Human
ccuggcagguggagguugcagu

SEQ ID NO: 147178 - RNA, 22 nt, Human
uccaggcaaaaaccaacuacag

SEQ ID NO: 147179 - RNA, 22 nt, Human
gacucugggcugagccagggcc

SEQ ID NO: 147180 - RNA, 22 nt, Human
ggggcugagucagugggaagag

SEQ ID NO: 147181 - RNA, 22 nt, Human
ugccucucuaacccaugcccaa

SEQ ID NO: 147182 - RNA, 22 nt, Human
ggagcugaggcugaggccucac

SEQ ID NO: 147183 - RNA, 22 nt, Human
uugggaaguuuaaugacagacu

SEQ ID NO: 147184 - RNA, 22 nt, Human
ucuggcaguaauaggggagaga

SEQ ID NO: 147185 - RNA, 22 nt, Human
uuggaacaugccgggguccagg

SEQ ID NO: 147186 - RNA, 22 nt, Human
agucuagggugggguccacagg

SEQ ID NO: 147187 - RNA, 22 nt, Human
ccuggcagcagcacaugccuuc

SEQ ID NO: 147188 - RNA, 22 nt, Human
aggaggcugggcacaguggccu

SEQ ID NO: 147189 - RNA, 19 nt, Human
agaggccucagcagcuggc

SEQ ID NO: 147190 - RNA, 22 nt, Human
cccgagugucuacucacuccca

SEQ ID NO: 147191 - RNA, 22 nt, Human
agagcacagaagaauaggugcu

SEQ ID NO: 147192 - RNA, 22 nt, Human
cccagcccaucucaaaggucua

SEQ ID NO: 147193 - RNA, 22 nt, Human
uggcagugggaauggacaaaca

SEQ ID NO: 147194 - RNA, 22 nt, Human
ggaggacaggggcugcagcaca

SEQ ID NO: 147195 - RNA, 20 nt, Human
aaaagagugcuucaacugcu

SEQ ID NO: 147196 - RNA, 22 nt, Human
ugccagccagggaagcucaccc

SEQ ID NO: 147197 - RNA, 22 nt, Human
ggagagaauuccauggacaugu

SEQ ID NO: 147198 - RNA, 22 nt, Human
cuccuggcacugucuugaccca

SEQ ID NO: 147199 - RNA, 22 nt, Human
ggagacucggguucuagccuug

SEQ ID NO: 147200 - RNA, 22 nt, Human
gcuggcagguaaagccccgggg

SEQ ID NO: 147201 - RNA, 23 nt, Human
ugagggacaugguggcuucugag

SEQ ID NO: 147202 - RNA, 22 nt, Human
ggccucucugagagcagacguu

SEQ ID NO: 147203 - RNA, 22 nt, Human
ucuggcagagauauccauccca

SEQ ID NO: 147204 - RNA, 22 nt, Human
ccuggcagcauugguagagauu

SEQ ID NO: 147205 - RNA, 22 nt, Human
aacaaaagccgaaguagguguc

SEQ ID NO: 147206 - RNA, 22 nt, Human
agggagacacaugaggaaguca

SEQ ID NO: 147207 - RNA, 22 nt, Human
gucacaggcaguaacuaggacc

SEQ ID NO: 147208 - RNA, 22 nt, Human
cccaggccagaacuugguugcu

SEQ ID NO: 147209 - RNA, 22 nt, Human
gccuggcacucaaucaucugcu

SEQ ID NO: 147210 - RNA, 22 nt, Human
agggccccauagucacugcccg

SEQ ID NO: 147211 - RNA, 22 nt, Human
caugagauaauuuuucuccagu

SEQ ID NO: 147212 - RNA, 22 nt, Human
gagaaagauuguccuucagggg

SEQ ID NO: 147213 - RNA, 22 nt, Human
ccuggcagacugugagggcagg

SEQ ID NO: 147214 - RNA, 22 nt, Human
agaggccugugugcuccagugg

SEQ ID NO: 147215 - RNA, 22 nt, Human
aggccuccagccacaugccagu

SEQ ID NO: 147216 - RNA, 21 nt, Human
agagucugagugugcaagggc

SEQ ID NO: 147217 - RNA, 22 nt, Human
ucaggagcucuucccuggugug

SEQ ID NO: 147218 - RNA, 22 nt, Human
gcuggcagcuggaaguugggcu

SEQ ID NO: 147219 - RNA, 22 nt, Human
acuggcagaggauagcacuaau

SEQ ID NO: 147220 - RNA, 22 nt, Human
uugggaucucaaauccagcuau

SEQ ID NO: 147221 - RNA, 21 nt, Human
uccacccucucugcucccagu

SEQ ID NO: 147222 - RNA, 22 nt, Human
gccucaggccgcccugcugcuc

SEQ ID NO: 147223 - RNA, 20 nt, Human
cccagccccuaccuguugcc

SEQ ID NO: 147224 - RNA, 22 nt, Human
gggccccuuguaucucuggcuc

SEQ ID NO: 147225 - RNA, 22 nt, Human
ucuggcagaagugcugucagua

SEQ ID NO: 147226 - RNA, 22 nt, Human
ccaggcccaggguacugaccaa

SEQ ID NO: 147227 - RNA, 22 nt, Human
uacaaaaggaagagggaucuua

SEQ ID NO: 147228 - RNA, 22 nt, Human
augacugcucugggcucccaug

SEQ ID NO: 147229 - RNA, 22 nt, Human
ccuggcaguuuugcccaggauu

SEQ ID NO: 147230 - RNA, 22 nt, Human
ucccaccccuugacucuuuaag

SEQ ID NO: 147231 - RNA, 22 nt, Human
cugccugccuuggccuccagga

SEQ ID NO: 147232 - RNA, 22 nt, Human
gucuggaaggaggagauggagc

SEQ ID NO: 147233 - RNA, 19 nt, Human
guccuggcgccgccacacc

SEQ ID NO: 147234 - RNA, 22 nt, Human
gaggagcugagccacguccugg

SEQ ID NO: 147235 - RNA, 22 nt, Human
agugccccaugggugccugggg

SEQ ID NO: 147236 - RNA, 17 nt, Human
ugccagccugucccagg

SEQ ID NO: 147237 - RNA, 22 nt, Human
gccuccggagucacagugucuu

SEQ ID NO: 147238 - RNA, 22 nt, Human
ccugccuguacuagagacccag

SEQ ID NO: 147239 - RNA, 22 nt, Human
uccuggcagcccgcaggugcug

SEQ ID NO: 147240 - RNA, 22 nt, Human
ggcaagagggcagauggagugc

SEQ ID NO: 147241 - RNA, 20 nt, Human
agaggcuuccuugggaggag

SEQ ID NO: 147242 - RNA, 22 nt, Human
aggcaguguguagcuggaagag

SEQ ID NO: 147243 - RNA, 22 nt, Human
gcuggcagucccaucagcuggg

SEQ ID NO: 147244 - RNA, 22 nt, Human
uauuacagaaucaggcauaacu

SEQ ID NO: 147245 - RNA, 22 nt, Human
cugcaggagcaaagccucugcu

SEQ ID NO: 147246 - RNA, 22 nt, Human
cccagccugugacagccguccu

SEQ ID NO: 147247 - RNA, 22 nt, Human
ggccucucaugcccagagccaa

SEQ ID NO: 147248 - RNA, 22 nt, Human
ggcacagggggcugaggacuag

SEQ ID NO: 147249 - RNA, 22 nt, Human
gcuggcagguccaagauagagc

SEQ ID NO: 147250 - RNA, 19 nt, Human
gcuggcagauguggccgug

SEQ ID NO: 147251 - RNA, 22 nt, Human
cccuuccucccaggcuucugug

SEQ ID NO: 147252 - RNA, 22 nt, Human
guccuggcaccucacuggcuac

SEQ ID NO: 147253 - RNA, 22 nt, Human
uguuggaauuaggauacagagg

SEQ ID NO: 147254 - RNA, 22 nt, Human
ccucucccgggugccgcugggc

SEQ ID NO: 147255 - RNA, 22 nt, Human
gcuggcagcauuagacccuggg

SEQ ID NO: 147256 - RNA, 22 nt, Human
guccacagagggcugggcaggc

SEQ ID NO: 147257 - RNA, 22 nt, Human
guggcaguuuugacaucacaaa

SEQ ID NO: 147258 - RNA, 22 nt, Human
caggaguggugugagggacucc

SEQ ID NO: 147259 - RNA, 22 nt, Human
gagaggcuggcagugccagguu

SEQ ID NO: 147260 - RNA, 22 nt, Human
uccacccugcuuuugucuuuga

SEQ ID NO: 147261 - RNA, 22 nt, Human
acuggcaguuugagaaugcauu

SEQ ID NO: 147262 - RNA, 19 nt, Human
ccuuccuccccagggccau

SEQ ID NO: 147263 - RNA, 22 nt, Human
ccuggcagguagcauugaggag

SEQ ID NO: 147264 - RNA, 22 nt, Human
cccuggcagagggggcaggugc

SEQ ID NO: 147265 - RNA, 22 nt, Human
ucuggcagcuauccucuggcca

SEQ ID NO: 147266 - RNA, 22 nt, Human
uuccuggccuaagguaggugac

SEQ ID NO: 147267 - RNA, 22 nt, Human
uggccugccacugccacgccac

SEQ ID NO: 147268 - RNA, 22 nt, Human
ggcaaggggucaggcugagaca

SEQ ID NO: 147269 - RNA, 22 nt, Human
accugccuaucagcugccugcu

SEQ ID NO: 147270 - RNA, 22 nt, Human
uccuggcauugugcagggugug

SEQ ID NO: 147271 - RNA, 22 nt, Human
accugccuucucaaggacauga

SEQ ID NO: 147272 - RNA, 22 nt, Human
cuugggaaugcuaacagaugac

SEQ ID NO: 147273 - RNA, 22 nt, Human
cccuuccuugauuuuaacugga

SEQ ID NO: 147274 - RNA, 22 nt, Human
acaggugguagaguggaaagag

SEQ ID NO: 147275 - RNA, 22 nt, Human
uccaggcuugagaccaggcucu

SEQ ID NO: 147276 - RNA, 20 nt, Human
aaagagcccuuggagcaggc

SEQ ID NO: 147277 - RNA, 22 nt, Human
uggucucugcaggccaggcuca

SEQ ID NO: 147278 - RNA, 22 nt, Human
cucuccagaauaugccgccgug

SEQ ID NO: 147279 - RNA, 22 nt, Human
ucuggcagaucuucccacguuu

SEQ ID NO: 147280 - RNA, 22 nt, Human
uggaaagagguagaggaucugg

SEQ ID NO: 147281 - RNA, 22 nt, Human
cuugccucccucagcucacagc

SEQ ID NO: 147282 - RNA, 22 nt, Human
aaaaagucugcaaaggagguug

SEQ ID NO: 147283 - RNA, 22 nt, Human
gguggcagaggugcaucagccc

SEQ ID NO: 147284 - RNA, 22 nt, Human
cugccugcugcccuccagagcc

SEQ ID NO: 147285 - RNA, 22 nt, Human
ccucccuucaguagagcccaau

SEQ ID NO: 147286 - RNA, 17 nt, Human
uugggagagaaagguau

SEQ ID NO: 147287 - RNA, 22 nt, Human
aggggugugcauccuggaggau

SEQ ID NO: 147288 - RNA, 22 nt, Human
gcuggcagagagcuggugagga

SEQ ID NO: 147289 - RNA, 22 nt, Human
ggagaagaggagcuggaagccu

SEQ ID NO: 147290 - RNA, 20 nt, Human
gagucacagaagaagcugaa

SEQ ID NO: 147291 - RNA, 22 nt, Human
aaagaucaauagauaaagcuac

SEQ ID NO: 147292 - RNA, 22 nt, Human
gccuggcacaggaauuaggagg

SEQ ID NO: 147293 - RNA, 22 nt, Human
gcuggcagacugggggcagaac

SEQ ID NO: 147294 - RNA, 22 nt, Human
uccuggcagagggcggccucga

SEQ ID NO: 147295 - RNA, 22 nt, Human
gcuggcaguaaaggguuuggca

SEQ ID NO: 147296 - RNA, 22 nt, Human
cccagccuuccacccuggacua

SEQ ID NO: 147297 - RNA, 21 nt, Human
ucuggcaggcacgggcccagc

SEQ ID NO: 147298 - RNA, 21 nt, Human
ucuggcagcaguuuguugagu

SEQ ID NO: 147299 - RNA, 22 nt, Human
uccccaccuaagauacccaucu

SEQ ID NO: 147300 - RNA, 22 nt, Human
gcuggcagaagagcugguucaa

SEQ ID NO: 147301 - RNA, 22 nt, Human
gccuccggaguugcagugucuu

SEQ ID NO: 147302 - RNA, 22 nt, Human
aggaagaaccuaagaaagucuc

SEQ ID NO: 147303 - RNA, 22 nt, Human
uuccuggcgccacggagccggu

SEQ ID NO: 147304 - RNA, 22 nt, Human
aaagaucacgucccaggacucg

SEQ ID NO: 147305 - RNA, 22 nt, Human
cuggcagguuuggugucuggug

SEQ ID NO: 147306 - RNA, 22 nt, Human
gaagagaaaggcaaggaguuuu

SEQ ID NO: 147307 - RNA, 18 nt, Human
gccugcucugcucucccc

SEQ ID NO: 147308 - RNA, 22 nt, Human
cuggcagucugguggaaggccu

SEQ ID NO: 147309 - RNA, 22 nt, Human
gccuggcacaguagggacccaa

SEQ ID NO: 147310 - RNA, 22 nt, Human
ccuggcagcuccguggccuucc

SEQ ID NO: 147311 - RNA, 22 nt, Human
cuccaggccccuggccuucugc

SEQ ID NO: 147312 - RNA, 17 nt, Human
gccuucucugcccucac

SEQ ID NO: 147313 - RNA, 22 nt, Human
acuggcagcagcagcccuuggg

SEQ ID NO: 147314 - RNA, 22 nt, Human
cuccaggcucguccaagaucga

SEQ ID NO: 147315 - RNA, 22 nt, Human
uugggaagaauggaggugguua

SEQ ID NO: 147316 - RNA, 22 nt, Human
uuccuggccaagcagaguggaa

SEQ ID NO: 147317 - RNA, 22 nt, Human
gugggagaaauuagcucuaguu

SEQ ID NO: 147318 - RNA, 22 nt, Human
ggagucugcucccagacaugau

SEQ ID NO: 147319 - RNA, 22 nt, Human
cuggcaguauuaagagaaguga

SEQ ID NO: 147320 - RNA, 22 nt, Human
gugugggaaggcuaggaugcug

SEQ ID NO: 147321 - RNA, 22 nt, Human
agaaagaggaugcagaucucau

SEQ ID NO: 147322 - RNA, 22 nt, Human
gagaaagaugaagaguggcguu

SEQ ID NO: 147323 - RNA, 22 nt, Human
ugggagaaacugucucucccac

SEQ ID NO: 147324 - RNA, 22 nt, Human
ucuggcagcucaguucaggucu

SEQ ID NO: 147325 - RNA, 22 nt, Human
cuccuggcuuucccagaccagg

SEQ ID NO: 147326 - RNA, 22 nt, Human
aagagcacuaacagagcugaua

SEQ ID NO: 147327 - RNA, 22 nt, Human
ucccugccuccuggcagugcca

SEQ ID NO: 147328 - RNA, 22 nt, Human
ggaggacacuggcucugccuuc

SEQ ID NO: 147329 - RNA, 22 nt, Human
gccuccuguuaugccaugugcc

SEQ ID NO: 147330 - RNA, 22 nt, Human
gaggcugcuuugaugacaggag

SEQ ID NO: 147331 - RNA, 22 nt, Human
uccuucccaggugucgccgccu

SEQ ID NO: 147332 - RNA, 18 nt, Human
aggaaagaaaggcaggug

SEQ ID NO: 147333 - RNA, 22 nt, Human
cucaccccacuaccccuuggug

SEQ ID NO: 147334 - RNA, 22 nt, Human
aaagaaucagaagucucaaaca

SEQ ID NO: 147335 - RNA, 22 nt, Human
cucuccagccuuuagcccacgc

SEQ ID NO: 147336 - RNA, 22 nt, Human
cccugccuugggguccacaccg

SEQ ID NO: 147337 - RNA, 22 nt, Human
aggcugcuucagcugcagggag

SEQ ID NO: 147338 - RNA, 21 nt, Human
aaagagcccgcugagagguuc

SEQ ID NO: 147339 - RNA, 19 nt, Human
uccuggcacaguggaacca

SEQ ID NO: 147340 - RNA, 22 nt, Human
acagguggggcacuuggagccu

SEQ ID NO: 147341 - RNA, 23 nt, Human
uccaggagcaugcuggcuggcga

SEQ ID NO: 147342 - RNA, 22 nt, Human
acuggcagaacgugaugcgggu

SEQ ID NO: 147343 - RNA, 21 nt, Human
uccugccuuaguccagagcag

SEQ ID NO: 147344 - RNA, 22 nt, Human
gguggcauaagaacacuaaaga

SEQ ID NO: 147345 - RNA, 22 nt, Human
cccuuccugggugucccggagu

SEQ ID NO: 147346 - RNA, 22 nt, Human
ucuggcagaggaaggaggccug

SEQ ID NO: 147347 - RNA, 22 nt, Human
ccuccuggcuuuucccauugaa

SEQ ID NO: 147348 - RNA, 22 nt, Human
uggaaagaggaagugcccagca

SEQ ID NO: 147349 - RNA, 22 nt, Human
gaggcacauauauacagagccc

SEQ ID NO: 147350 - RNA, 19 nt, Human
uccuggcauuuguaggaaa

SEQ ID NO: 147351 - RNA, 22 nt, Human
uccuggcaguaauuugauguug

SEQ ID NO: 147352 - RNA, 22 nt, Human
cagguugguauucaucuccaca

SEQ ID NO: 147353 - RNA, 22 nt, Human
ccuggcagggcugcaguaaugg

SEQ ID NO: 147354 - RNA, 22 nt, Human
cucucugggcccaguuggcacc

SEQ ID NO: 147355 - RNA, 22 nt, Human
cuccuggcacucaguguggaag

SEQ ID NO: 147356 - RNA, 22 nt, Human
gcccucucuucugcagccucca

SEQ ID NO: 147357 - RNA, 22 nt, Human
gcuggcaggauagaagucuaau

SEQ ID NO: 147358 - RNA, 22 nt, Human
uccaggcucuaggcugcucucc

SEQ ID NO: 147359 - RNA, 22 nt, Human
agcacaggcuuuggugugaggg

SEQ ID NO: 147360 - RNA, 19 nt, Human
gggagcugaggucuuuggu

SEQ ID NO: 147361 - RNA, 22 nt, Human
gaggagcucaugaaagcggugu

SEQ ID NO: 147362 - RNA, 22 nt, Human
gccacagguacuaugggagaga

SEQ ID NO: 147363 - RNA, 22 nt, Human
ucaggcccuuugcugcugcccc

SEQ ID NO: 147364 - RNA, 22 nt, Human
aguugggaguuauagacucuau

SEQ ID NO: 147365 - RNA, 22 nt, Human
gcuugggaagggcccuguguac

SEQ ID NO: 147366 - RNA, 22 nt, Human
uuggagagauuuaggucucagu

SEQ ID NO: 147367 - RNA, 22 nt, Human
uccaggcuuuuucaugcugucu

SEQ ID NO: 147368 - RNA, 22 nt, Human
gcacucuccuggcugccacagu

SEQ ID NO: 147369 - RNA, 22 nt, Human
ggugccaggcuguagucagggu

SEQ ID NO: 147370 - RNA, 22 nt, Human
aaaagagugacugauaaguaua

SEQ ID NO: 147371 - RNA, 22 nt, Human
ucaggcccagagucacggaucc

SEQ ID NO: 147372 - RNA, 22 nt, Human
ucuggcagagugauaggauaag

SEQ ID NO: 147373 - RNA, 22 nt, Human
uggcaucuccgacagucuugau

SEQ ID NO: 147374 - RNA, 22 nt, Human
gcaguguuuguguucucacaug

SEQ ID NO: 147375 - RNA, 20 nt, Human
ccuggcaggcggguuacuua

SEQ ID NO: 147376 - RNA, 18 nt, Human
gacaaaaguacagacaga

SEQ ID NO: 147377 - RNA, 22 nt, Human
cuccugaggacuucuauugggu

SEQ ID NO: 147378 - RNA, 22 nt, Human
gcagggacagggcagggccuuu

SEQ ID NO: 147379 - RNA, 22 nt, Human
ucuggcaguuccuuguugauau

SEQ ID NO: 147380 - RNA, 22 nt, Human
ucuggcaggguguguauuuaca

SEQ ID NO: 147381 - RNA, 22 nt, Human
aggcaguggagcuggaauaggc

SEQ ID NO: 147382 - RNA, 22 nt, Human
aggcuggauuuauggggacuuc

SEQ ID NO: 147383 - RNA, 22 nt, Human
ccucagcugcuucccuggagcc

SEQ ID NO: 147384 - RNA, 22 nt, Human
caggucccugcgccccggccuc

SEQ ID NO: 147385 - RNA, 22 nt, Human
uccuggcacuuugggggcucgc

SEQ ID NO: 147386 - RNA, 22 nt, Human
cagugggggggccaugcugcag

SEQ ID NO: 147387 - RNA, 22 nt, Human
agccagggucucucgcucuguu

SEQ ID NO: 147388 - RNA, 22 nt, Human
aggguagggcccggagacagac

SEQ ID NO: 147389 - RNA, 22 nt, Human
ccuggcagcgugccgagcugcg

SEQ ID NO: 147390 - RNA, 22 nt, Human
ccuggcagucaggggaguccuu

SEQ ID NO: 147391 - RNA, 22 nt, Human
aggcacaggaggugguaagaag

SEQ ID NO: 147392 - RNA, 22 nt, Human
uggccucugggaaagcagauuc

SEQ ID NO: 147393 - RNA, 22 nt, Human
aggaggcuuuugcaggugccac

SEQ ID NO: 147394 - RNA, 22 nt, Human
aggacaagcuaaaggacuuccu

SEQ ID NO: 147395 - RNA, 22 nt, Human
uucuuucaauagcuggcauaug

SEQ ID NO: 147396 - RNA, 22 nt, Human
cagguggguguaugaaugcaaa

SEQ ID NO: 147397 - RNA, 22 nt, Human
ccaggcccugcuccucacacca

SEQ ID NO: 147398 - RNA, 22 nt, Human
uccaggcuagguuuacaggaca

SEQ ID NO: 147399 - RNA, 22 nt, Human
ucuggcaggaccaugaagcgua

SEQ ID NO: 147400 - RNA, 22 nt, Human
acuggcagccacaacuggcagg

SEQ ID NO: 147401 - RNA, 23 nt, Human
cauccaggagcugagucugacug

SEQ ID NO: 147402 - RNA, 22 nt, Human
aguguggcaggaaugacuagaa

SEQ ID NO: 147403 - RNA, 22 nt, Human
aggaagaacagauaauggacgc

SEQ ID NO: 147404 - RNA, 22 nt, Human
ccaggcuguaagagugauguug

SEQ ID NO: 147405 - RNA, 22 nt, Human
ccuggcaggacuguuguaagaa

SEQ ID NO: 147406 - RNA, 22 nt, Human
ccuggcagcuaagugcuuugag

SEQ ID NO: 147407 - RNA, 22 nt, Human
cucugagcagaggccguggcua

SEQ ID NO: 147408 - RNA, 22 nt, Human
gagaaagauguaggcugggagg

SEQ ID NO: 147409 - RNA, 23 nt, Human
aguguugguugggaagccaagca

SEQ ID NO: 147410 - RNA, 22 nt, Human
cagccaggauggagaacuguug

SEQ ID NO: 147411 - RNA, 22 nt, Human
ccuccccaugacccggugcugg

SEQ ID NO: 147412 - RNA, 22 nt, Human
gguuccuucugaggucccugua

SEQ ID NO: 147413 - RNA, 22 nt, Human
ccaggccucuggcugcuuaguc

SEQ ID NO: 147414 - RNA, 22 nt, Human
uggcagugucuuaucaggagug

SEQ ID NO: 147415 - RNA, 22 nt, Human
cccagcccacgguccugggugg

SEQ ID NO: 147416 - RNA, 22 nt, Human
ucuggcagcucuccucggcgga

SEQ ID NO: 147417 - RNA, 22 nt, Human
uccugccuguuuaccuguacuu

SEQ ID NO: 147418 - RNA, 22 nt, Human
gcacaggaugauggguugaggg

SEQ ID NO: 147419 - RNA, 22 nt, Human
cuggccucuguguucaccauag

SEQ ID NO: 147420 - RNA, 22 nt, Human
guggcagugaaggucauagcau

SEQ ID NO: 147421 - RNA, 22 nt, Human
aaagagucguguuccagguuug

SEQ ID NO: 147422 - RNA, 22 nt, Human
gcuggcagugugaaugacaagc

SEQ ID NO: 147423 - RNA, 22 nt, Human
ucuggcaggccuugucaaucug

SEQ ID NO: 147424 - RNA, 22 nt, Human
uccaaggcuccggcccuggcgu

SEQ ID NO: 147425 - RNA, 22 nt, Human
agggcugaagggaggugcucau

SEQ ID NO: 147426 - RNA, 22 nt, Human
uuccuggcucacagcagugggg

SEQ ID NO: 147427 - RNA, 22 nt, Human
ccucuccuugcacccgucccgc

SEQ ID NO: 147428 - RNA, 22 nt, Human
uggccucugugggagcugagca

SEQ ID NO: 147429 - RNA, 22 nt, Human
auggccugaugcaccuguccca

SEQ ID NO: 147430 - RNA, 22 nt, Human
gaggagcugcagggggagucua

SEQ ID NO: 147431 - RNA, 22 nt, Human
aggaaagauggaaggaggauaa

SEQ ID NO: 147432 - RNA, 22 nt, Human
auccaggccccaagaccccgac

SEQ ID NO: 147433 - RNA, 22 nt, Human
cuuggcagagggcugggcucag

SEQ ID NO: 147434 - RNA, 17 nt, Human
cccaggccgccgggagc

SEQ ID NO: 147435 - RNA, 22 nt, Human
cccagccucuguuugcuccucu

SEQ ID NO: 147436 - RNA, 22 nt, Human
ucccagccaggcucuaccacuu

SEQ ID NO: 147437 - RNA, 22 nt, Human
gauggccuuguuuucucccuuc

SEQ ID NO: 147438 - RNA, 22 nt, Human
gcuggcagccaagugaagaggg

SEQ ID NO: 147439 - RNA, 18 nt, Human
ccuagccuccaagcucau

SEQ ID NO: 147440 - RNA, 22 nt, Human
ccacccuaacaauccuuacugu

SEQ ID NO: 147441 - RNA, 22 nt, Human
gccagguugcugacgacgaucu

SEQ ID NO: 147442 - RNA, 22 nt, Human
cuggcacgcccacguaggcacu

SEQ ID NO: 147443 - RNA, 22 nt, Human
cccugccucugaagcugcucag

SEQ ID NO: 147444 - RNA, 22 nt, Human
cuggcaguuggcauuggcaucu

SEQ ID NO: 147445 - RNA, 22 nt, Human
ucuggcagaaggcagaaauuca

SEQ ID NO: 147446 - RNA, 22 nt, Human
guugggaagcagauggaugagc

SEQ ID NO: 147447 - RNA, 21 nt, Human
ccuggcagaagccugauaugc

SEQ ID NO: 147448 - RNA, 22 nt, Human
ccuggcaguggugaagaagagg

SEQ ID NO: 147449 - RNA, 21 nt, Human
gggagggauggaaaugauguu

SEQ ID NO: 147450 - RNA, 22 nt, Human
uccaggaggaggaaggcugcca

SEQ ID NO: 147451 - RNA, 22 nt, Human
ccagugcccagcugcccaggca

SEQ ID NO: 147452 - RNA, 22 nt, Human
ccauucauacaauuuuguucua

SEQ ID NO: 147453 - RNA, 22 nt, Human
uacaaaaguaauuacgguuuuu

SEQ ID NO: 147454 - RNA, 22 nt, Human
agaggcuuggaggugcaagguu

SEQ ID NO: 147455 - RNA, 22 nt, Human
uccugagcccuguaggacccug

SEQ ID NO: 147456 - RNA, 22 nt, Human
uguggggaagaguaugacuugg

SEQ ID NO: 147457 - RNA, 22 nt, Human
ccagccucacuggcaucaccua

SEQ ID NO: 147458 - RNA, 22 nt, Human
gaggggcuggguagggcaaccc

SEQ ID NO: 147459 - RNA, 22 nt, Human
guccuggcccacuggcaggcug

SEQ ID NO: 147460 - RNA, 22 nt, Human
ugggacucacucuuuuggccag

SEQ ID NO: 147461 - RNA, 22 nt, Human
gaggcugcggggaggagccugc

SEQ ID NO: 147462 - RNA, 22 nt, Human
aggaggcuguggagcacuccau

SEQ ID NO: 147463 - RNA, 22 nt, Human
uuccuggcagaggccccgacag

SEQ ID NO: 147464 - RNA, 19 nt, Human
uggcagguagugagcaguc

SEQ ID NO: 147465 - RNA, 20 nt, Human
cugcuccacccggcucucag

SEQ ID NO: 147466 - RNA, 22 nt, Human
accugccuauggagccacaugg

SEQ ID NO: 147467 - RNA, 22 nt, Human
gaggagcuguucccucaccucu

SEQ ID NO: 147468 - RNA, 22 nt, Human
ucuccugggaggacaaggaagg

SEQ ID NO: 147469 - RNA, 22 nt, Human
aggccccaaagcagugcaagua

SEQ ID NO: 147470 - RNA, 22 nt, Human
caggcuggagugcaauggcaca

SEQ ID NO: 147471 - RNA, 22 nt, Human
uucaguuccauuucaggugggu

SEQ ID NO: 147472 - RNA, 22 nt, Human
agguagggaagaaggcaugaaa

SEQ ID NO: 147473 - RNA, 22 nt, Human
acagguggcuuauuggcugauu

SEQ ID NO: 147474 - RNA, 22 nt, Human
ggugccagaguggcccaggggc

SEQ ID NO: 147475 - RNA, 22 nt, Human
gcuggcagggacagcugcgugu

SEQ ID NO: 147476 - RNA, 22 nt, Human
uucauugcaguucuucagguua

SEQ ID NO: 147477 - RNA, 22 nt, Human
auggccuggggauuccugagca

SEQ ID NO: 147478 - RNA, 22 nt, Human
ccuggcagcgccgaagcuggcc

SEQ ID NO: 147479 - RNA, 22 nt, Human
cccaggccuggucugggccagu

SEQ ID NO: 147480 - RNA, 22 nt, Human
cuguccagcuuggcuccugggg

SEQ ID NO: 147481 - RNA, 21 nt, Human
ccuagccucuuacccagcuuu

SEQ ID NO: 147482 - RNA, 22 nt, Human
ccuggcaguucaucaaauggca

SEQ ID NO: 147483 - RNA, 22 nt, Human
uccaggcuccccugcgugcucc

SEQ ID NO: 147484 - RNA, 22 nt, Human
gccuggcaauggccucaggaag

SEQ ID NO: 147485 - RNA, 22 nt, Human
cuuacaaauacacuuaggagag

SEQ ID NO: 147486 - RNA, 22 nt, Human
acaagagcauugcagguguguu

SEQ ID NO: 147487 - RNA, 22 nt, Human
cagguuggucggcaaguacaca

SEQ ID NO: 147488 - RNA, 22 nt, Human
aggaggcugcaacccugaggcc

SEQ ID NO: 147489 - RNA, 22 nt, Human
ggugccagugggucucaggaua

SEQ ID NO: 147490 - RNA, 22 nt, Human
gccgggaccaaggccacggagc

SEQ ID NO: 147491 - RNA, 22 nt, Human
cccugagcucaggcccuugggg

SEQ ID NO: 147492 - RNA, 22 nt, Human
uuccaggcaugucagacauagg

SEQ ID NO: 147493 - RNA, 22 nt, Human
agcacagggacaaugccaggug

SEQ ID NO: 147494 - RNA, 22 nt, Human
gcuggcagagcucugggcuggg

SEQ ID NO: 147495 - RNA, 22 nt, Human
cugccugcucuauccaggccug

SEQ ID NO: 147496 - RNA, 22 nt, Human
ggagcugaguucuucagccggg

SEQ ID NO: 147497 - RNA, 22 nt, Human
ggcugaguugagaggauuacuu

SEQ ID NO: 147498 - RNA, 22 nt, Human
ucuggcagugagcaacuugaca

SEQ ID NO: 147499 - RNA, 22 nt, Human
ggccucucagggcagagacccu

SEQ ID NO: 147500 - RNA, 22 nt, Human
guggcagugggaugcuaucagg

SEQ ID NO: 147501 - RNA, 22 nt, Human
ucuggcaguugccgcuucaguc

SEQ ID NO: 147502 - RNA, 22 nt, Human
uggcaguggauaggggagcggu

SEQ ID NO: 147503 - RNA, 22 nt, Human
ucccugcccucagugcacccgg

SEQ ID NO: 147504 - RNA, 22 nt, Human
gcuccaggaggaugaccuuccu

SEQ ID NO: 147505 - RNA, 22 nt, Human
gauggccuggguccccuuccgg

SEQ ID NO: 147506 - RNA, 23 nt, Human
uugggaaauaguuaagacaugag

SEQ ID NO: 147507 - RNA, 22 nt, Human
guuaggaacacuggagccuaaa

SEQ ID NO: 147508 - RNA, 22 nt, Human
ccuggcagccucagccaauucu

SEQ ID NO: 147509 - RNA, 22 nt, Human
caggauggucucgaucuccuga

SEQ ID NO: 147510 - RNA, 22 nt, Human
gagggugucugcguaacuggca

SEQ ID NO: 147511 - RNA, 22 nt, Human
uccugagcacagagacaaggaa

SEQ ID NO: 147512 - RNA, 22 nt, Human
uccugugccaucucuagagacu

SEQ ID NO: 147513 - RNA, 22 nt, Human
ccuggcagcuccuccccggcgg

SEQ ID NO: 147514 - RNA, 19 nt, Human
acuggcagcuguagucugu

SEQ ID NO: 147515 - RNA, 22 nt, Human
aaaagagucuuaggcagucaua

SEQ ID NO: 147516 - RNA, 22 nt, Human
uccaggcucccucaggaugcac

SEQ ID NO: 147517 - RNA, 22 nt, Human
ccccacccucgcuccauuucgg

SEQ ID NO: 147518 - RNA, 22 nt, Human
ucuggcaggacaugcugaccau

SEQ ID NO: 147519 - RNA, 17 nt, Human
ugcuggcaacauacaaa

SEQ ID NO: 147520 - RNA, 22 nt, Human
gaaaagaguccugugugaggag

SEQ ID NO: 147521 - RNA, 23 nt, Human
uuggagagggugaguagugucag

SEQ ID NO: 147522 - RNA, 22 nt, Human
gacuguggggggcggacacaag

SEQ ID NO: 147523 - RNA, 22 nt, Human
ucaggauggagggaagcacaga

SEQ ID NO: 147524 - RNA, 22 nt, Human
auccaggcgaaugcagaaggcc

SEQ ID NO: 147525 - RNA, 22 nt, Human
acaggugguaaaauggacuguc

SEQ ID NO: 147526 - RNA, 22 nt, Human
cuuggcaguuucggaaggauga

SEQ ID NO: 147527 - RNA, 22 nt, Human
acuggcagagguuggacaccau

SEQ ID NO: 147528 - RNA, 22 nt, Human
cggcuggugucgggcacagcaa

SEQ ID NO: 147529 - RNA, 22 nt, Human
uggccuccccuaacagccucuu

SEQ ID NO: 147530 - RNA, 22 nt, Human
acuccugggugcugaccagcgu

SEQ ID NO: 147531 - RNA, 22 nt, Human
ggagccugaaaagucugcauuu

SEQ ID NO: 147532 - RNA, 22 nt, Human
uccuggcagugcuuguuuugga

SEQ ID NO: 147533 - RNA, 22 nt, Human
acagguggccccgagggagugg

SEQ ID NO: 147534 - RNA, 22 nt, Human
cacaaaaguaggaggcaggcgg

SEQ ID NO: 147535 - RNA, 20 nt, Human
gcuccaggucagagaggacg

SEQ ID NO: 147536 - RNA, 22 nt, Human
cagaaagaccugggcucaagag

SEQ ID NO: 147537 - RNA, 22 nt, Human
cuggcaggagcauucacagagg

SEQ ID NO: 147538 - RNA, 23 nt, Human
ccuggcagcaaacgaggagguua

SEQ ID NO: 147539 - RNA, 22 nt, Human
ccuggcagcaggugggcccgug

SEQ ID NO: 147540 - RNA, 22 nt, Human
ccuggcagcuguuuggcuuggc

SEQ ID NO: 147541 - RNA, 22 nt, Human
agucacaguuucccugagagag

SEQ ID NO: 147542 - RNA, 22 nt, Human
ucuggcaggauaucgaagugaa

SEQ ID NO: 147543 - RNA, 22 nt, Human
uggcaggaaaguaacagagcac

SEQ ID NO: 147544 - RNA, 22 nt, Human
ccuucucucugaagaccccaaa

SEQ ID NO: 147545 - RNA, 22 nt, Human
ucuggcagguucccauguuaug

SEQ ID NO: 147546 - RNA, 22 nt, Human
cuuggcaggguggaggaugcag

SEQ ID NO: 147547 - RNA, 18 nt, Human
uccugccugugccccagg

SEQ ID NO: 147548 - RNA, 22 nt, Human
cugccugcaggacaccucgcua

SEQ ID NO: 147549 - RNA, 22 nt, Human
uccuggcauccgugggucugug

SEQ ID NO: 147550 - RNA, 22 nt, Human
uuccaggcucccuuggaggugu

SEQ ID NO: 147551 - RNA, 22 nt, Human
ugcacaggugagacucaggaag

SEQ ID NO: 147552 - RNA, 22 nt, Human
uccugagcuacaguaguaugau

SEQ ID NO: 147553 - RNA, 22 nt, Human
gcuggcaggguucucacugaaa

SEQ ID NO: 147554 - RNA, 22 nt, Human
gaaagaagcuuuagauggcuau

SEQ ID NO: 147555 - RNA, 22 nt, Human
gcuccaggugucccagguaaaa

SEQ ID NO: 147556 - RNA, 23 nt, Human
uccuuccuuugagaggcuccauc

SEQ ID NO: 147557 - RNA, 22 nt, Human
guugggaaggcaagaaguagaa

SEQ ID NO: 147558 - RNA, 22 nt, Human
agaggcuucucggauggggcag

SEQ ID NO: 147559 - RNA, 22 nt, Human
acuggcagaacuggugauuguc

SEQ ID NO: 147560 - RNA, 22 nt, Human
ccugccucccagagguccucua

SEQ ID NO: 147561 - RNA, 22 nt, Human
ucccuccccacuucugagcuuu

SEQ ID NO: 147562 - RNA, 20 nt, Human
ucccucccuccagcucuggg

SEQ ID NO: 147563 - RNA, 22 nt, Human
ugagggacucccggcccugcca

SEQ ID NO: 147564 - RNA, 22 nt, Human
gcuggcaggagaaacggggugc

SEQ ID NO: 147565 - RNA, 19 nt, Human
acuggcaguuucugcaugg

SEQ ID NO: 147566 - RNA, 22 nt, Human
uuccaggcuauccggugaaggg

SEQ ID NO: 147567 - RNA, 22 nt, Human
uuggaaaguuuuuacugaagac

SEQ ID NO: 147568 - RNA, 22 nt, Human
acuggcaguagagggagcgcau

SEQ ID NO: 147569 - RNA, 22 nt, Human
ccuggcagcccagagcgccgcu

SEQ ID NO: 147570 - RNA, 22 nt, Human
ugcuggcacguggaccaggaga

SEQ ID NO: 147571 - RNA, 22 nt, Human
cccagccuacucugccauagca

SEQ ID NO: 147572 - RNA, 22 nt, Human
guugggaaggugaacaugaugc

SEQ ID NO: 147573 - RNA, 22 nt, Human
acccacccuacuagcagugucc

SEQ ID NO: 147574 - RNA, 22 nt, Human
gcugcgccggaucccacguucc

SEQ ID NO: 147575 - RNA, 22 nt, Human
ucuuuuucugcacacguguccc

SEQ ID NO: 147576 - RNA, 22 nt, Human
ugcacaggaggcuguggagaag

SEQ ID NO: 147577 - RNA, 22 nt, Human
guggcagucgcugacagauaca

SEQ ID NO: 147578 - RNA, 18 nt, Human
ggcagggaaaagauaggg

SEQ ID NO: 147579 - RNA, 23 nt, Human
acuccccagucucuucuugccaa

SEQ ID NO: 147580 - RNA, 22 nt, Human
cccugagcgugaggaggaagua

SEQ ID NO: 147581 - RNA, 22 nt, Human
ucccagccacaguuuccaccug

SEQ ID NO: 147582 - RNA, 22 nt, Human
cugccugcucaccagggcucug

SEQ ID NO: 147583 - RNA, 18 nt, Human
acucugcggaggccccag

SEQ ID NO: 147584 - RNA, 22 nt, Human
ccugaccuauuuuucucagcug

SEQ ID NO: 147585 - RNA, 22 nt, Human
acuggcagugucguuuacauga

SEQ ID NO: 147586 - RNA, 22 nt, Human
gaggagcugggacccugucauc

SEQ ID NO: 147587 - RNA, 22 nt, Human
cugcaggacgaccgccucaucu

SEQ ID NO: 147588 - RNA, 22 nt, Human
ccagguccuguuuucaccacag

SEQ ID NO: 147589 - RNA, 22 nt, Human
uuccaggcuucucuggggcguc

SEQ ID NO: 147590 - RNA, 22 nt, Human
ccagcccuugcugaaggguggc

SEQ ID NO: 147591 - RNA, 22 nt, Human
gcuccaggagagggaagcagau

SEQ ID NO: 147592 - RNA, 22 nt, Human
uccugagccugacaaucaccau

SEQ ID NO: 147593 - RNA, 17 nt, Human
uuaagguggaucagcac

SEQ ID NO: 147594 - RNA, 22 nt, Human
ucuggcagcagcaucaguggcu

SEQ ID NO: 147595 - RNA, 22 nt, Human
uuccugccccugagagcuccca

SEQ ID NO: 147596 - RNA, 22 nt, Human
uuccuggccccaccccuggaga

SEQ ID NO: 147597 - RNA, 18 nt, Human
cuccuccacagccccugc

SEQ ID NO: 147598 - RNA, 22 nt, Human
gcuccaggcagcauaguggaug

SEQ ID NO: 147599 - RNA, 22 nt, Human
ucuggcagcaagauaacaaugg

SEQ ID NO: 147600 - RNA, 22 nt, Human
uccugagcaacacagcuaagug

SEQ ID NO: 147601 - RNA, 22 nt, Human
ccuggcaggcuggggacagugc

SEQ ID NO: 147602 - RNA, 22 nt, Human
cugccugcuuaccaugcaucag

SEQ ID NO: 147603 - RNA, 22 nt, Human
gcuggcaguuuccucaccgagg

SEQ ID NO: 147604 - RNA, 22 nt, Human
cuccuggcucgcccccagcuga

SEQ ID NO: 147605 - RNA, 22 nt, Human
ucuggcagugaagucaugaggu

SEQ ID NO: 147606 - RNA, 22 nt, Human
acuggcaggcugcuggccggcg

SEQ ID NO: 147607 - RNA, 22 nt, Human
gaugccuggcacccagcaagga

SEQ ID NO: 147608 - RNA, 22 nt, Human
gagagaaaagggggaauugauu

SEQ ID NO: 147609 - RNA, 22 nt, Human
ccuggcugguggcagcgacaag

SEQ ID NO: 147610 - RNA, 22 nt, Human
acagguggaggcuuuaggaggu

SEQ ID NO: 147611 - RNA, 22 nt, Human
gccuggcaggggccugggagug

SEQ ID NO: 147612 - RNA, 22 nt, Human
ucccagccuuucuuuucugcug

SEQ ID NO: 147613 - RNA, 22 nt, Human
ccacaaaacugugugucaaaga

SEQ ID NO: 147614 - RNA, 19 nt, Human
ugccuggcaccagcuccac

SEQ ID NO: 147615 - RNA, 22 nt, Human
ccccacccaccuaagagaaacu

SEQ ID NO: 147616 - RNA, 21 nt, Human
aggcugcuggcucaggguccu

SEQ ID NO: 147617 - RNA, 22 nt, Human
uuccaggcugaugggccacagg

SEQ ID NO: 147618 - RNA, 22 nt, Human
ccagcccugccagagagagcug

SEQ ID NO: 147619 - RNA, 22 nt, Human
ccuggcagguuacaaccaguua

SEQ ID NO: 147620 - RNA, 22 nt, Human
ucccaccccggucaagggcuga

SEQ ID NO: 147621 - RNA, 22 nt, Human
uccugagcugccgcaucagcag

SEQ ID NO: 147622 - RNA, 22 nt, Human
agcacaggaacauggagauggg

SEQ ID NO: 147623 - RNA, 22 nt, Human
caccagggccccaggcugugcc

SEQ ID NO: 147624 - RNA, 21 nt, Human
agugccaguagguauggagga

SEQ ID NO: 147625 - RNA, 22 nt, Human
agcacaggaccaaggaagcugu

SEQ ID NO: 147626 - RNA, 22 nt, Human
cccacccucaagggugucuaua

SEQ ID NO: 147627 - RNA, 22 nt, Human
ccagcccugucaccaacuggag

SEQ ID NO: 147628 - RNA, 22 nt, Human
caggacaaagcccuuugagaaa

SEQ ID NO: 147629 - RNA, 22 nt, Human
auccuggcccagguguggaggg

SEQ ID NO: 147630 - RNA, 22 nt, Human
cugccugccacguucagcugua

SEQ ID NO: 147631 - RNA, 22 nt, Human
cugagcagugguucuugagcgc

SEQ ID NO: 147632 - RNA, 22 nt, Human
gcuggcaggagccuuucccuuu

SEQ ID NO: 147633 - RNA, 18 nt, Human
ccuggcagccaugcgcgc

SEQ ID NO: 147634 - RNA, 22 nt, Human
ccaggcugggcggggaaccugg

SEQ ID NO: 147635 - RNA, 22 nt, Human
uccuggcacccuuggguuggag

SEQ ID NO: 147636 - RNA, 17 nt, Human
agccugccccaugcugc

SEQ ID NO: 147637 - RNA, 22 nt, Human
caggagggcccgagacucuucc

SEQ ID NO: 147638 - RNA, 22 nt, Human
ccuggcagguggcgcccucggc

SEQ ID NO: 147639 - RNA, 22 nt, Human
gaggagcucugcuccauccuuc

SEQ ID NO: 147640 - RNA, 22 nt, Human
gagccugaugaaacaggcagac

SEQ ID NO: 147641 - RNA, 22 nt, Human
gcuggcagggugguugagagag

SEQ ID NO: 147642 - RNA, 22 nt, Human
gagaaagacguaggcugggagg

SEQ ID NO: 147643 - RNA, 22 nt, Human
gaggagcuggcagcgucuccgc

SEQ ID NO: 147644 - RNA, 22 nt, Human
ccuggcagacagcacugaagcu

SEQ ID NO: 147645 - RNA, 22 nt, Human
acagaguccuagcugcaaagaa

SEQ ID NO: 147646 - RNA, 19 nt, Human
ucuggcagguaauuaggga

SEQ ID NO: 147647 - RNA, 19 nt, Human
gcuggcagaauuuugaacc

SEQ ID NO: 147648 - RNA, 22 nt, Human
ucuggcaguggaugagggcagc

SEQ ID NO: 147649 - RNA, 22 nt, Human
aagagccagcuagugaagaggc

SEQ ID NO: 147650 - RNA, 22 nt, Human
cuccugaggaaaagcuugguca

SEQ ID NO: 147651 - RNA, 22 nt, Human
ucccugccugacagcacccacc

SEQ ID NO: 147652 - RNA, 22 nt, Human
agggcugacaaauggcagugac

SEQ ID NO: 147653 - RNA, 22 nt, Human
acuggcagagggaaaaccauuc

SEQ ID NO: 147654 - RNA, 22 nt, Human
ugcuccagugccugccccacag

SEQ ID NO: 147655 - RNA, 22 nt, Human
gacaaaaguguuuugaacaagg

SEQ ID NO: 147656 - RNA, 22 nt, Human
acuggcagggggagccccgaga

SEQ ID NO: 147657 - RNA, 22 nt, Human
ucuggcaguuugagaaaggcua

SEQ ID NO: 147658 - RNA, 22 nt, Human
ccuggcagaauauuaaagugca

SEQ ID NO: 147659 - RNA, 22 nt, Human
uuccuggcauagagagggcaca

SEQ ID NO: 147660 - RNA, 22 nt, Human
gagacacacauucuggagagaa

SEQ ID NO: 147661 - RNA, 22 nt, Human
aagaggucauaccagauaaggg

SEQ ID NO: 147662 - RNA, 22 nt, Human
agacacagcugcaggagguggg

SEQ ID NO: 147663 - RNA, 22 nt, Human
ugguaagaacccaucagagaag

SEQ ID NO: 147664 - RNA, 22 nt, Human
uccucuccaugucucacgccac

SEQ ID NO: 147665 - RNA, 22 nt, Human
uccacccugcuuucuuaucucc

SEQ ID NO: 147666 - RNA, 22 nt, Human
ucccacccccuccaaggaggaa

SEQ ID NO: 147667 - RNA, 22 nt, Human
aagugccaucauagcauggcug

SEQ ID NO: 147668 - RNA, 22 nt, Human
ugccugacugcugccaccacua

SEQ ID NO: 147669 - RNA, 19 nt, Human
ccuugccugucccugcagc

SEQ ID NO: 147670 - RNA, 22 nt, Human
ccucucagcgauuccucuugga

SEQ ID NO: 147671 - RNA, 22 nt, Human
uccuggcaaagauguugguguu

SEQ ID NO: 147672 - RNA, 22 nt, Human
uccaggcaagggaggagcaugg

SEQ ID NO: 147673 - RNA, 22 nt, Human
ucccuccuggccgucaccgcug

SEQ ID NO: 147674 - RNA, 22 nt, Human
agacaagaaacugggagucucu

SEQ ID NO: 147675 - RNA, 22 nt, Human
gucacaggccuggaugaggggc

SEQ ID NO: 147676 - RNA, 22 nt, Human
gccuggcauauaguaguugugc

SEQ ID NO: 147677 - RNA, 22 nt, Human
ccugccuucagcccugaagucu

SEQ ID NO: 147678 - RNA, 22 nt, Human
cuggcaguuugccaggagcucg

SEQ ID NO: 147679 - RNA, 22 nt, Human
ucuggcagugauuucugugauc

SEQ ID NO: 147680 - RNA, 21 nt, Human
ucacguggucacaugagcuuu

SEQ ID NO: 147681 - RNA, 22 nt, Human
ucuggcagggucagggcccagg

SEQ ID NO: 147682 - RNA, 22 nt, Human
gccuggcaaggcccuguugacu

SEQ ID NO: 147683 - RNA, 22 nt, Human
gacugccucaguuucccugcag

SEQ ID NO: 147684 - RNA, 22 nt, Human
agggcugacagugaggagucaa

SEQ ID NO: 147685 - RNA, 20 nt, Human
ucuggcaggugaacgagcug

SEQ ID NO: 147686 - RNA, 22 nt, Human
gaccugccugagcugccucugc

SEQ ID NO: 147687 - RNA, 22 nt, Human
aguguugggucuuuagaauuua

SEQ ID NO: 147688 - RNA, 22 nt, Human
auggccugcagugcugccacag

SEQ ID NO: 147689 - RNA, 23 nt, Human
gcccacccucagcguccucacgg

SEQ ID NO: 147690 - RNA, 19 nt, Human
cagcccucuuaccacugug

SEQ ID NO: 147691 - RNA, 22 nt, Human
ucuggcagcaagucuguuucuc

SEQ ID NO: 147692 - RNA, 22 nt, Human
accugccucagugcagcuggau

SEQ ID NO: 147693 - RNA, 22 nt, Human
ccucugccaccucccacgaggc

SEQ ID NO: 147694 - RNA, 22 nt, Human
ucuggcagggguucugcacuug

SEQ ID NO: 147695 - RNA, 18 nt, Human
acaggcugugggaauggu

SEQ ID NO: 147696 - RNA, 22 nt, Human
aagucguggcaggcuugcacga

SEQ ID NO: 147697 - RNA, 22 nt, Human
ugacaggaggcuugaggccagg

SEQ ID NO: 147698 - RNA, 22 nt, Human
ucccacccauccugcaucucuu

SEQ ID NO: 147699 - RNA, 23 nt, Human
uuccaggcagagcagggauuaga

SEQ ID NO: 147700 - RNA, 22 nt, Human
gcuggcagagacaagaagacua

SEQ ID NO: 147701 - RNA, 22 nt, Human
gaggacucugggcguguauggg

SEQ ID NO: 147702 - RNA, 22 nt, Human
ucuggcaggucaaucauucuuu

SEQ ID NO: 147703 - RNA, 22 nt, Human
ggagcugaaggggugggcucag

SEQ ID NO: 147704 - RNA, 22 nt, Human
agcagguugugauacacucaga

SEQ ID NO: 147705 - RNA, 22 nt, Human
gcuggcaggagaccauacccua

SEQ ID NO: 147706 - RNA, 22 nt, Human
uccaggccauugacugcauccu

SEQ ID NO: 147707 - RNA, 22 nt, Human
agggaagaagcugguaguaggu

SEQ ID NO: 147708 - RNA, 22 nt, Human
cagggacaauggcagagccuga

SEQ ID NO: 147709 - RNA, 22 nt, Human
cccagccuuugcuuccugguuc

SEQ ID NO: 147710 - RNA, 22 nt, Human
gaggcuguuaggagggacucug

SEQ ID NO: 147711 - RNA, 22 nt, Human
acuggcagaauugaauaguugu

SEQ ID NO: 147712 - RNA, 22 nt, Human
uugggaagaaacauguccauca

SEQ ID NO: 147713 - RNA, 22 nt, Human
gcuggcaggauaacuucuaagc

SEQ ID NO: 147714 - RNA, 22 nt, Human
ucccagccuuccagucugguuu

SEQ ID NO: 147715 - RNA, 20 nt, Human
acuggcagccugccugcugu

SEQ ID NO: 147716 - RNA, 22 nt, Human
gccuggcaggccuguuggggcu

SEQ ID NO: 147717 - RNA, 22 nt, Human
acuggcaguggcagcagaaaga

SEQ ID NO: 147718 - RNA, 22 nt, Human
gcuggcaguguauuguuagcug

SEQ ID NO: 147719 - RNA, 22 nt, Human
cuccuggcaguuccccuuguca

SEQ ID NO: 147720 - RNA, 22 nt, Human
ggccucagagaaggcugugcgg

SEQ ID NO: 147721 - RNA, 22 nt, Human
uuccaggccgggcaggaaacac

SEQ ID NO: 147722 - RNA, 21 nt, Human
ucuggcaguggucuuucaaau

SEQ ID NO: 147723 - RNA, 22 nt, Human
cugagccagggccacacaugga

SEQ ID NO: 147724 - RNA, 22 nt, Human
cccacccugggaagcuaggcag

SEQ ID NO: 147725 - RNA, 17 nt, Human
uccaggcagcaacugag

SEQ ID NO: 147726 - RNA, 22 nt, Human
aaagagucaaaggcaugucucu

SEQ ID NO: 147727 - RNA, 22 nt, Human
ucaggcccuucucccaggacuc

SEQ ID NO: 147728 - RNA, 22 nt, Human
ccuggcaggccccuccuggauu

SEQ ID NO: 147729 - RNA, 22 nt, Colorado tick fever virus
ucgcaaggugaggcaguucaug

SEQ ID NO: 147730 - RNA, 22 nt, Colorado tick fever virus
cauuuguauugcacaauguacu

SEQ ID NO: 147731 - RNA, 22 nt, Human
ugccuaggcuggaaugcagugg

SEQ ID NO: 147732 - RNA, 19 nt, Human
acccucuccccacuggguc

SEQ ID NO: 147733 - RNA, 22 nt, Human
caugcaugccgggcugacagag

SEQ ID NO: 147734 - RNA, 22 nt, Human
gaacugcauugugguauauguu

SEQ ID NO: 147735 - RNA, 22 nt, Human
acugccaguuguuuuguccagu

SEQ ID NO: 147736 - RNA, 22 nt, Human
uaugcuagauggaaaaauauug

SEQ ID NO: 147737 - RNA, 20 nt, Human
ucccuggggcccuacuuccu

SEQ ID NO: 147738 - RNA, 22 nt, Human
uugaguuuccugacagcgaagg

SEQ ID NO: 147739 - RNA, 22 nt, Human
gccgugcgugcgcaggugcugu

SEQ ID NO: 147740 - RNA, 22 nt, Human
acuucacagauauuuauuuggu

SEQ ID NO: 147741 - RNA, 23 nt, Human
gcauccagagcucaguccccuuu

SEQ ID NO: 147742 - RNA, 22 nt, Human
cccacucccugcacgccugccg

SEQ ID NO: 147743 - RNA, 22 nt, Human
ugcauccuguucuagguuuggg

SEQ ID NO: 147744 - RNA, 22 nt, Human
aaggcucccucuucucgagugu

SEQ ID NO: 147745 - RNA, 22 nt, Human
caauuaccaguaauugagguuu

SEQ ID NO: 147746 - RNA, 22 nt, Human
uaagccugcaugaaccaugaga

SEQ ID NO: 147747 - RNA, 22 nt, Human
acagccaggaauucuggagaag

SEQ ID NO: 147748 - RNA, 19 nt, Human
uccugcccaccagccaggg

SEQ ID NO: 147749 - RNA, 22 nt, Human
aagcagcacagcaaugacucua

SEQ ID NO: 147750 - RNA, 22 nt, Human
cuccaaaggauaaaagcagagu

SEQ ID NO: 147751 - RNA, 22 nt, Human
ccagacuggggcuccuugaggg

SEQ ID NO: 147752 - RNA, 22 nt, Human
gacacugcacuuggggcccaca

SEQ ID NO: 147753 - RNA, 22 nt, Human
cugaagcugggcacuuccuuuu

SEQ ID NO: 147754 - RNA, 21 nt, Human
ccacaauucuaguuacauaug

SEQ ID NO: 147755 - RNA, 20 nt, Human
gacuucaauuucuaucuuuu

SEQ ID NO: 147756 - RNA, 22 nt, Human
uuuagcaaggagaaauaauccu

SEQ ID NO: 147757 - RNA, 22 nt, Human
uugcaaauaauagccugaaacu

SEQ ID NO: 147758 - RNA, 22 nt, Human
cugcagggcccaaggucaacgg

SEQ ID NO: 147759 - RNA, 22 nt, Human
ccagcagcucccucaggguccg

SEQ ID NO: 147760 - RNA, 22 nt, Human
ugguccucacccuacccagcug

SEQ ID NO: 147761 - RNA, 22 nt, Human
ccugcacuaccuggggcugcug

SEQ ID NO: 147762 - RNA, 22 nt, Human
uugaagcauuugcuauagcauu

SEQ ID NO: 147763 - RNA, 22 nt, Human
gugcaaagcuuaacauucugca

SEQ ID NO: 147764 - RNA, 22 nt, Human
gucaucaucaggcagaugcugc

SEQ ID NO: 147765 - RNA, 22 nt, Human
cccugcacagccuggcucucuu

SEQ ID NO: 147766 - RNA, 18 nt, Human
ggccucagccuggccgga

SEQ ID NO: 147767 - RNA, 22 nt, Human
ccugggaaggugaggcccugga

SEQ ID NO: 147768 - RNA, 22 nt, Human
cagggagaggccucuguugccc

SEQ ID NO: 147769 - RNA, 22 nt, Human
ucccaggauguuuauggcuggu

SEQ ID NO: 147770 - RNA, 22 nt, Human
cugcuucacccugccugagaac

SEQ ID NO: 147771 - RNA, 22 nt, Human
ucaccggugacccucggcucgc

SEQ ID NO: 147772 - RNA, 22 nt, Human
cacuuuuaacaggagaauuccc

SEQ ID NO: 147773 - RNA, 22 nt, Human
aaaugcacugaauauuccaaau

SEQ ID NO: 147774 - RNA, 22 nt, Human
acugcauuugguaaagucaaga

SEQ ID NO: 147775 - RNA, 22 nt, Human
auccuucaaaaggaauagcagg

SEQ ID NO: 147776 - RNA, 22 nt, Human
ucauccugaagaaccugcuucc

SEQ ID NO: 147777 - RNA, 22 nt, Human
ugccucugcugcauauucaccu

SEQ ID NO: 147778 - RNA, 22 nt, Human
gcaaggagcaccuuucuggaac

SEQ ID NO: 147779 - RNA, 22 nt, Human
cugcagaugguauuguucuggu

SEQ ID NO: 147780 - RNA, 22 nt, Human
ugcaugacaauugccgucaagu

SEQ ID NO: 147781 - RNA, 22 nt, Human
caagcagauauuuuagucaaga

SEQ ID NO: 147782 - RNA, 22 nt, Human
auccucagagaacgaacacaau

SEQ ID NO: 147783 - RNA, 22 nt, Human
cugaugcucuggauguagucaa

SEQ ID NO: 147784 - RNA, 22 nt, Human
ucaaaaugccgagugcccaggu

SEQ ID NO: 147785 - RNA, 22 nt, Human
uuacccagugaagccgaggcag

SEQ ID NO: 147786 - RNA, 22 nt, Human
ugcccugcagacccugcagugu

SEQ ID NO: 147787 - RNA, 22 nt, Human
gauuuucauuauagcuaguuuc

SEQ ID NO: 147788 - RNA, 22 nt, Human
ggcacugggugagggucacugg

SEQ ID NO: 147789 - RNA, 22 nt, Human
auugaagacuugguauccgugg

SEQ ID NO: 147790 - RNA, 22 nt, Human
ucauuccuccagcgggagucca

SEQ ID NO: 147791 - RNA, 22 nt, Human
uccuugcagcaggaacccacuu

SEQ ID NO: 147792 - RNA, 22 nt, Human
cacucacccgguccuucccagu

SEQ ID NO: 147793 - RNA, 22 nt, Human
ccagcagcgauagggugagugc

SEQ ID NO: 147794 - RNA, 22 nt, Human
uucagcacuggacagcgagucu

SEQ ID NO: 147795 - RNA, 22 nt, Human
cugcucaauuccggcacgcugg

SEQ ID NO: 147796 - RNA, 22 nt, Human
gccuggcaaggcccuguugacu

SEQ ID NO: 147797 - RNA, 22 nt, Human
uacagcgaaaauuuagcuugau

SEQ ID NO: 147798 - RNA, 22 nt, Human
cggcagagcccugagucagccu

SEQ ID NO: 147799 - RNA, 20 nt, Human
uugcaaagugaauagcaauu

SEQ ID NO: 147800 - RNA, 21 nt, Human
uaaggaagagcauuuuagguc

SEQ ID NO: 147801 - RNA, 22 nt, Human
ucugcucagccgaucugcuccg

SEQ ID NO: 147802 - RNA, 21 nt, Human
uaagcuaaacauucaguuaac

SEQ ID NO: 147803 - RNA, 22 nt, Human
gcgcugccucugcucuccccac

SEQ ID NO: 147804 - RNA, 22 nt, Human
guuaacaacacugugagugcug

SEQ ID NO: 147805 - RNA, 22 nt, Human
cagucauuaugggaguuaaucc

SEQ ID NO: 147806 - RNA, 22 nt, Human
ugacagcccaccucacaggauu

SEQ ID NO: 147807 - RNA, 22 nt, Human
acugcauuaucaccaagaugua

SEQ ID NO: 147808 - RNA, 22 nt, Human
aagagagaacucccuucgccag

SEQ ID NO: 147809 - RNA, 21 nt, Human
uuuaaggccagcaggagguga

SEQ ID NO: 147810 - RNA, 22 nt, Human
agccagcauauauauaguugaa

SEQ ID NO: 147811 - RNA, 22 nt, Human
cugcagggcagggccuccuggc

SEQ ID NO: 147812 - RNA, 22 nt, Human
ggcagucuuucccuugagcucu

SEQ ID NO: 147813 - RNA, 22 nt, Human
cugcauaucaaauuacuccugg

SEQ ID NO: 147814 - RNA, 22 nt, Human
cgccguccccuaggaaagagcu

SEQ ID NO: 147815 - RNA, 22 nt, Human
aagguccuguagccacagagcc

SEQ ID NO: 147816 - RNA, 22 nt, Human
accuuuaugaaacagcugucgu

SEQ ID NO: 147817 - RNA, 22 nt, Human
aagcuggccuguaccugcugag

SEQ ID NO: 147818 - RNA, 22 nt, Human
ggcacagcugaugcagacacac

SEQ ID NO: 147819 - RNA, 22 nt, Human
cucacucaguuuuuaguucauc

SEQ ID NO: 147820 - RNA, 22 nt, Human
uuucacaugguacugccuguuu

SEQ ID NO: 147821 - RNA, 22 nt, Human
aaaugccucauuuucucucacu

SEQ ID NO: 147822 - RNA, 22 nt, Human
uacaccagauuauuuauaacau

SEQ ID NO: 147823 - RNA, 21 nt, Human
ugcaaugcauugacagcagca

SEQ ID NO: 147824 - RNA, 22 nt, Human
cagagcugucauuugccaguga

SEQ ID NO: 147825 - RNA, 22 nt, Human
uauucacagcugccgcacucag

SEQ ID NO: 147826 - RNA, 22 nt, Human
uacauuccaaaggaaacuggcu

SEQ ID NO: 147827 - RNA, 22 nt, Human
aaagcuauuuuauugcagcucu

SEQ ID NO: 147828 - RNA, 22 nt, Human
uccucagcaaacacuucacucu

SEQ ID NO: 147829 - RNA, 18 nt, Human
uauaaacacacuuagguu

SEQ ID NO: 147830 - RNA, 22 nt, Human
uguguacauguaucaacuaucg

SEQ ID NO: 147831 - RNA, 22 nt, Human
ccagcagccaccuucucgaaau

SEQ ID NO: 147832 - RNA, 20 nt, Human
augcacccucagggucccug

SEQ ID NO: 147833 - RNA, 22 nt, Human
ugcacccacuuagcugaaguuc

SEQ ID NO: 147834 - RNA, 22 nt, Human
agcagccuugugacuccggggu

SEQ ID NO: 147835 - RNA, 22 nt, Human
cgucauuuguaaaugaucaaga

SEQ ID NO: 147836 - RNA, 22 nt, Human
uccgggagcugaacgucuugcg

SEQ ID NO: 147837 - RNA, 22 nt, Human
uugauguaauacuuugcaacca

SEQ ID NO: 147838 - RNA, 22 nt, Human
caugcauuucuaccaaggaaua

SEQ ID NO: 147839 - RNA, 23 nt, Human
acauuacacgcaguaauugcccc

SEQ ID NO: 147840 - RNA, 22 nt, Human
auugucgucaauggacacauag

SEQ ID NO: 147841 - RNA, 22 nt, Human
cuauucaguugugggcaacaau

SEQ ID NO: 147842 - RNA, 21 nt, Human
acaaauuguuuauauaggaag

SEQ ID NO: 147843 - RNA, 22 nt, Human
cacggccacugcagcaccccag

SEQ ID NO: 147844 - RNA, 22 nt, Human
auugugcaccuacugugugcag

SEQ ID NO: 147845 - RNA, 23 nt, Human
auagaccauugucucacacuuca

SEQ ID NO: 147846 - RNA, 22 nt, Human
caaugcagauaccuuccagaga

SEQ ID NO: 147847 - RNA, 21 nt, Human
ucacuagugccuucugucauu

SEQ ID NO: 147848 - RNA, 22 nt, Human
uucuccagcucaucagggaggg

SEQ ID NO: 147849 - RNA, 22 nt, Human
ugcaaauucuuuacucugugau

SEQ ID NO: 147850 - RNA, 22 nt, Human
cugcaucaguggauaugauggu

SEQ ID NO: 147851 - RNA, 22 nt, Human
gcagccuccgcacugcgagucc

SEQ ID NO: 147852 - RNA, 22 nt, Human
agugccucugcagguccgaguu

SEQ ID NO: 147853 - RNA, 22 nt, Human
agacagcacuuuuguauggggg

SEQ ID NO: 147854 - RNA, 19 nt, Human
ugguucuccuuccacaguc

SEQ ID NO: 147855 - RNA, 22 nt, Human
gagcagcaggccagguugcagg

SEQ ID NO: 147856 - RNA, 22 nt, Human
caucugcaggggaagccaguuu

SEQ ID NO: 147857 - RNA, 22 nt, Human
ugucuucauuccccaugaaguc

SEQ ID NO: 147858 - RNA, 22 nt, Human
cugcaccgugucucgggcugcc

SEQ ID NO: 147859 - RNA, 22 nt, Human
uucacagcuaagagcuaaguaa

SEQ ID NO: 147860 - RNA, 22 nt, Human
augagugcuuagagaguaaucc

SEQ ID NO: 147861 - RNA, 22 nt, Human
gcuaagggauaggcugccuccu

SEQ ID NO: 147862 - RNA, 22 nt, Human
ggcaauuacguauuagucaugu

SEQ ID NO: 147863 - RNA, 23 nt, Human
aagaaugcuucugaagagcugcc

SEQ ID NO: 147864 - RNA, 22 nt, Human
ucauuguuucugcuuuucauga

SEQ ID NO: 147865 - RNA, 22 nt, Human
guucuccaggggcuguucaucu

SEQ ID NO: 147866 - RNA, 21 nt, Human
acuguauuguuuucaaggauc

SEQ ID NO: 147867 - RNA, 22 nt, Human
agacugugagaagauggcugcg

SEQ ID NO: 147868 - RNA, 23 nt, Human
aacugcaagguugcugggaagua

SEQ ID NO: 147869 - RNA, 22 nt, Human
uacugcaaaccauuuacaguag

SEQ ID NO: 147870 - RNA, 22 nt, Human
cugagcagaagggugcacgugc

SEQ ID NO: 147871 - RNA, 22 nt, Human
acuugcaucuuagagacucacc

SEQ ID NO: 147872 - RNA, 22 nt, Human
uacccacugucauauucagggu

SEQ ID NO: 147873 - RNA, 22 nt, Human
ggacagacuuuacagccccggg

SEQ ID NO: 147874 - RNA, 22 nt, Human
gcugcaagugcauguugcaacu

SEQ ID NO: 147875 - RNA, 22 nt, Human
acagacacaggcguggagucgc

SEQ ID NO: 147876 - RNA, 22 nt, Human
agcaggcauuugauauauauuu

SEQ ID NO: 147877 - RNA, 22 nt, Human
acacacagaaggaagccccacu

SEQ ID NO: 147878 - RNA, 22 nt, Human
uuucagacaggcucagagccgu

SEQ ID NO: 147879 - RNA, 22 nt, Human
gcacccagggcaggaagugagg

SEQ ID NO: 147880 - RNA, 22 nt, Human
ccaucuucucuugaaccuccuu

SEQ ID NO: 147881 - RNA, 19 nt, Human
aacuacagcgcacuguccu

SEQ ID NO: 147882 - RNA, 22 nt, Human
aauggagugguucuugcccucu

SEQ ID NO: 147883 - RNA, 22 nt, Human
gucgaucaccucguccuccgug

SEQ ID NO: 147884 - RNA, 22 nt, Human
gaaugcacacgugugugcaugc

SEQ ID NO: 147885 - RNA, 22 nt, Human
auggaguugagcucuguugucc

SEQ ID NO: 147886 - RNA, 22 nt, Human
aagugauuucugccugcauguu

SEQ ID NO: 147887 - RNA, 23 nt, Human
uguguucagucaaggaucagagu

SEQ ID NO: 147888 - RNA, 22 nt, Human
acuggauucucuuacacagaug

SEQ ID NO: 147889 - RNA, 22 nt, Human
agccccaggcccggacgccucu

SEQ ID NO: 147890 - RNA, 22 nt, Human
gugauuuucuccuccuagaagu

SEQ ID NO: 147891 - RNA, 22 nt, Human
aaggcuccagugaaugcuggca

SEQ ID NO: 147892 - RNA, 22 nt, Human
ccugggcaaaugccagagacaa

SEQ ID NO: 147893 - RNA, 22 nt, Human
cacaccuuaggccugagcgcuu

SEQ ID NO: 147894 - RNA, 22 nt, Human
acaccuuuuauucgccaggcac

SEQ ID NO: 147895 - RNA, 22 nt, Human
ucccgggcaggucgagcgagcc

SEQ ID NO: 147896 - RNA, 22 nt, Human
aggucccugcagcagacugcca

SEQ ID NO: 147897 - RNA, 22 nt, Human
cagccuuugggucagaagauuc

SEQ ID NO: 147898 - RNA, 22 nt, Human
agaauguaagaaugcaaagauu

SEQ ID NO: 147899 - RNA, 22 nt, Human
uugaugcugucuuucagaauca

SEQ ID NO: 147900 - RNA, 21 nt, Human
acccugcuuuaugccguccuc

SEQ ID NO: 147901 - RNA, 22 nt, Human
auggaguucugccagcgcugcu

SEQ ID NO: 147902 - RNA, 22 nt, Human
ggaaugcacuagacugugaaac

SEQ ID NO: 147903 - RNA, 22 nt, Human
uucaaaccuaucuaagaaauag

SEQ ID NO: 147904 - RNA, 22 nt, Human
ucaugcaccucuccaugucccc

SEQ ID NO: 147905 - RNA, 22 nt, Human
aauugcuuuacaagccguuuaa

SEQ ID NO: 147906 - RNA, 22 nt, Human
guguuuggucagacguccgggg

SEQ ID NO: 147907 - RNA, 23 nt, Human
agccucuuguggauggucagcga

SEQ ID NO: 147908 - RNA, 22 nt, Human
acaugcauaaacuacuucuuau

SEQ ID NO: 147909 - RNA, 22 nt, Human
agcugaacgugcuucugcagca

SEQ ID NO: 147910 - RNA, 22 nt, Human
agcuccugaaaagcgcuugcuu

SEQ ID NO: 147911 - RNA, 22 nt, Human
guucuucagauuccauuucagu

SEQ ID NO: 147912 - RNA, 22 nt, Human
cuccugcagcccucagcagcca

SEQ ID NO: 147913 - RNA, 22 nt, Human
cugcaguucuucuccucaaggc

SEQ ID NO: 147914 - RNA, 22 nt, Human
aaggauuuuuggaaugagaugg

SEQ ID NO: 147915 - RNA, 22 nt, Human
cugaaacuauggggaggggagc

SEQ ID NO: 147916 - RNA, 22 nt, Human
gcaagcagcccagaacagcucu

SEQ ID NO: 147917 - RNA, 22 nt, Human
ugcauuugcaauggguacacaa

SEQ ID NO: 147918 - RNA, 22 nt, Human
gucuugcacuuaccuaagaacu

SEQ ID NO: 147919 - RNA, 22 nt, Human
agcuccugaaaauccagacugg

SEQ ID NO: 147920 - RNA, 22 nt, Human
caugugaauuccaaagcuaggu

SEQ ID NO: 147921 - RNA, 22 nt, Human
gagcugcauagcugggauccuc

SEQ ID NO: 147922 - RNA, 22 nt, Human
aagcagccagccaucaugcccg

SEQ ID NO: 147923 - RNA, 21 nt, Human
agagacugucacugcaguacc

SEQ ID NO: 147924 - RNA, 22 nt, Human
cucaucuggcuucaguaacagu

SEQ ID NO: 147925 - RNA, 22 nt, Human
gcuagggagacuugugucauca

SEQ ID NO: 147926 - RNA, 22 nt, Human
ugcugggauuacagucaugagc

SEQ ID NO: 147927 - RNA, 22 nt, Human
auuuccuauacaguuguccaua

SEQ ID NO: 147928 - RNA, 22 nt, Human
gccagcagcucuugggcgggca

SEQ ID NO: 147929 - RNA, 22 nt, Human
gggagacaaaggugagguucuu

SEQ ID NO: 147930 - RNA, 22 nt, Human
acccugccucugcuuccuguag

SEQ ID NO: 147931 - RNA, 19 nt, Human
cugggacaaugaaagcauc

SEQ ID NO: 147932 - RNA, 22 nt, Human
ucaugucccguugcuggcugcc

SEQ ID NO: 147933 - RNA, 21 nt, Human
acugaacuuguguucuagagg

SEQ ID NO: 147934 - RNA, 22 nt, Human
acugagcaggguuccgcaugga

SEQ ID NO: 147935 - RNA, 22 nt, Human
uguggaauguccucagcauccu

SEQ ID NO: 147936 - RNA, 22 nt, Human
ugcaauuagcguauuaguuuau

SEQ ID NO: 147937 - RNA, 22 nt, Human
gccagccccagacauccuaucg

SEQ ID NO: 147938 - RNA, 22 nt, Human
ugaucagcaucuucccagcucg

SEQ ID NO: 147939 - RNA, 22 nt, Human
ccuggaaaaugccacuuucaca

SEQ ID NO: 147940 - RNA, 22 nt, Human
uuucuacauuuguaaccagauu

SEQ ID NO: 147941 - RNA, 22 nt, Human
ucccacacagcccgcucaccgg

SEQ ID NO: 147942 - RNA, 22 nt, Human
ggagacucaccccgcauucuag

SEQ ID NO: 147943 - RNA, 22 nt, Human
cccgggaggaggaaguugcagu

SEQ ID NO: 147944 - RNA, 22 nt, Human
ucuucacaguccuggucagugg

SEQ ID NO: 147945 - RNA, 21 nt, Human
cugcacugugauuuaaaaugu

SEQ ID NO: 147946 - RNA, 22 nt, Human
agggacuauuuacccaucucac

SEQ ID NO: 147947 - RNA, 22 nt, Human
ugcaaggcacccacucugcuuu

SEQ ID NO: 147948 - RNA, 22 nt, Human
caggccuugaaggccugcggga

SEQ ID NO: 147949 - RNA, 22 nt, Human
accuccuccaaggagccauagg

SEQ ID NO: 147950 - RNA, 22 nt, Human
cagacugaaaaucccugguagu

SEQ ID NO: 147951 - RNA, 22 nt, Human
ucccugccuccuggcagugcca

SEQ ID NO: 147952 - RNA, 22 nt, Human
cugaccaguccuuagcaccugg

SEQ ID NO: 147953 - RNA, 22 nt, Human
ugaggauggaaugcugugcaag

SEQ ID NO: 147954 - RNA, 21 nt, Human
agaugcagugacccacugggg

SEQ ID NO: 147955 - RNA, 20 nt, Human
caucaacaccuugucagccu

SEQ ID NO: 147956 - RNA, 22 nt, Human
acugcauucuuuaucccacaac

SEQ ID NO: 147957 - RNA, 22 nt, Human
uuugacaggaauucucucuagg

SEQ ID NO: 147958 - RNA, 22 nt, Human
ugauuuacaguagugucuaaac

SEQ ID NO: 147959 - RNA, 23 nt, Human
uuguucuuggaucuuccugaagc

SEQ ID NO: 147960 - RNA, 22 nt, Human
cccgaccucgcaaagcgcacuc

SEQ ID NO: 147961 - RNA, 22 nt, Human
ugucuucuaccuugacagcauu

SEQ ID NO: 147962 - RNA, 22 nt, Human
caagggcagcagccucaagcgg

SEQ ID NO: 147963 - RNA, 22 nt, Human
ccugggacgacucuguacccuu

SEQ ID NO: 147964 - RNA, 22 nt, Human
aaccccgcucaggcugggugag

SEQ ID NO: 147965 - RNA, 22 nt, Human
cugcacagucauuuccucucaa

SEQ ID NO: 147966 - RNA, 22 nt, Human
cugaggaucuaauuauuggguc

SEQ ID NO: 147967 - RNA, 22 nt, Human
gccagcagcgagaguuuaaccu

SEQ ID NO: 147968 - RNA, 21 nt, Human
gccugggaagagaaagguaag

SEQ ID NO: 147969 - RNA, 22 nt, Human
ucugcacccugugguccucuag

SEQ ID NO: 147970 - RNA, 22 nt, Human
uuucacauacaguguauaguag

SEQ ID NO: 147971 - RNA, 22 nt, Human
cucccucaggccuuagcccugc

SEQ ID NO: 147972 - RNA, 19 nt, Human
gggccucacccacaccucc

SEQ ID NO: 147973 - RNA, 22 nt, Human
uuccugcaggccauagagccug

SEQ ID NO: 147974 - RNA, 21 nt, Human
ccuuugaguguguuugaagua

SEQ ID NO: 147975 - RNA, 22 nt, Human
ugagcaccaggcaccacagcuc

SEQ ID NO: 147976 - RNA, 21 nt, Human
agccugcaauguagguaccgg

SEQ ID NO: 147977 - RNA, 20 nt, Human
ccacccuguccggggcggag

SEQ ID NO: 147978 - RNA, 22 nt, Human
caacuuuagaccccaaguagcu

SEQ ID NO: 147979 - RNA, 22 nt, Human
aaucuguugucaggaauccaca

SEQ ID NO: 147980 - RNA, 22 nt, Human
aaauugaauuugggaaacauug

SEQ ID NO: 147981 - RNA, 22 nt, Human
cugagcaucauggcagaaucuu

SEQ ID NO: 147982 - RNA, 22 nt, Human
cagacuuaccuaaggucacaca

SEQ ID NO: 147983 - RNA, 22 nt, Human
uggaagggguuacgcagcagga

SEQ ID NO: 147984 - RNA, 22 nt, Human
ccacugauucugccaggucucu

SEQ ID NO: 147985 - RNA, 22 nt, Human
gguagggaaggucucccacauu

SEQ ID NO: 147986 - RNA, 19 nt, Human
ugaggauugagguccagua

SEQ ID NO: 147987 - RNA, 23 nt, Human
agaagcagcuucuggaguaucgg

SEQ ID NO: 147988 - RNA, 23 nt, Human
uggagaauucagucuuuguuuug

SEQ ID NO: 147989 - RNA, 22 nt, Human
agauuucaauggauauugcaag

SEQ ID NO: 147990 - RNA, 22 nt, Human
gagcugcagcggcugacgcaac

SEQ ID NO: 147991 - RNA, 22 nt, Human
cacaucauguuaauucauuaca

SEQ ID NO: 147992 - RNA, 22 nt, Human
ucacagcugggguuuuggcagc

SEQ ID NO: 147993 - RNA, 23 nt, Human
ugacacccucauugugugucgca

SEQ ID NO: 147994 - RNA, 22 nt, Human
cucugccagccaaagucaucac

SEQ ID NO: 147995 - RNA, 22 nt, Human
aagcacagggacucaggaccgg

SEQ ID NO: 147996 - RNA, 23 nt, Human
acucguggaauucucugcgaucg

SEQ ID NO: 147997 - RNA, 21 nt, Human
caagacauaugaguacucugg

SEQ ID NO: 147998 - RNA, 22 nt, Human
agucuuagaacuacagugccua

SEQ ID NO: 147999 - RNA, 22 nt, Human
augcaacuacccccaggauuuu

SEQ ID NO: 148000 - RNA, 22 nt, Human
agaagugaguugugacuauggg

SEQ ID NO: 148001 - RNA, 19 nt, Human
acugcagggaggaggugug

SEQ ID NO: 148002 - RNA, 22 nt, Human
ccagaacagaccugccugaccu

SEQ ID NO: 148003 - RNA, 22 nt, Human
uacugcauuaucaaggggaagg

SEQ ID NO: 148004 - RNA, 22 nt, Human
cugugaauguuauaucucaaug

SEQ ID NO: 148005 - RNA, 20 nt, Human
acagaugaggaugcggaggc

SEQ ID NO: 148006 - RNA, 22 nt, Human
aaugcaaugcagcaccuccuug

SEQ ID NO: 148007 - RNA, 22 nt, Human
auccaggcgaaugcagaaggcc

SEQ ID NO: 148008 - RNA, 22 nt, Human
aucaucaucuaaauugugucgc

SEQ ID NO: 148009 - RNA, 22 nt, Human
ugcaugguguaauucuaaugcu

SEQ ID NO: 148010 - RNA, 22 nt, Human
ccaggccuguguuguguggagg

SEQ ID NO: 148011 - RNA, 22 nt, Human
gagcagcagcugggccagguuc

SEQ ID NO: 148012 - RNA, 21 nt, Human
aucuuaaaaggucuuaacuuu

SEQ ID NO: 148013 - RNA, 19 nt, Human
gggaaugauggaagacuuc

SEQ ID NO: 148014 - RNA, 22 nt, Human
ugcaugcagcuggucgggcgcc

SEQ ID NO: 148015 - RNA, 22 nt, Human
agggagcugcucugcuuccgug

SEQ ID NO: 148016 - RNA, 22 nt, Human
caucagucugaaagccagggag

SEQ ID NO: 148017 - RNA, 22 nt, Human
augccaucaaugacagaguuag

SEQ ID NO: 148018 - RNA, 22 nt, Human
aaagcagaacugagagagcugg

SEQ ID NO: 148019 - RNA, 22 nt, Human
cugagcaugcuacaugcagcac

SEQ ID NO: 148020 - RNA, 22 nt, Human
auauacacuguuucaguugaag

SEQ ID NO: 148021 - RNA, 23 nt, Human
caaaaugcuaugugcccaaugca

SEQ ID NO: 148022 - RNA, 22 nt, Human
gaugugucccuuucaacucaga

SEQ ID NO: 148023 - RNA, 22 nt, Human
cugcugucuuuauuucacugcu

SEQ ID NO: 148024 - RNA, 22 nt, Human
accugguaaccugccugacuaa

SEQ ID NO: 148025 - RNA, 22 nt, Human
acugcacuccagcccgagcaac

SEQ ID NO: 148026 - RNA, 22 nt, Human
cagcugccuguauuguccucau

SEQ ID NO: 148027 - RNA, 22 nt, Human
cugaaggacacgugaggagcca

SEQ ID NO: 148028 - RNA, 22 nt, Human
ugaagcuagaauguccauauuu

SEQ ID NO: 148029 - RNA, 22 nt, Human
aacccuggggcugcucugccug

SEQ ID NO: 148030 - RNA, 22 nt, Human
ccagaaugugugaaauuugaug

SEQ ID NO: 148031 - RNA, 22 nt, Human
gugcgccagcucaaggggaggc

SEQ ID NO: 148032 - RNA, 22 nt, Human
cuucaugcugauauccucgaug

SEQ ID NO: 148033 - RNA, 21 nt, Human
gcaauucgcuaugaugguggc

SEQ ID NO: 148034 - RNA, 22 nt, Human
caaugcacauggacaucaggcu

SEQ ID NO: 148035 - RNA, 22 nt, Human
aaucacagccacaaccuggggg

SEQ ID NO: 148036 - RNA, 22 nt, Human
ggcgaggugucugccaucaagc

SEQ ID NO: 148037 - RNA, 22 nt, Human
ugugcucagucuuuggcuggga

SEQ ID NO: 148038 - RNA, 22 nt, Human
ugcaagagcccaaacuauauac

SEQ ID NO: 148039 - RNA, 22 nt, Human
augcauugaggaugacaugagu

SEQ ID NO: 148040 - RNA, 22 nt, Human
aaaugcacaauaaaguaaaggc

SEQ ID NO: 148041 - RNA, 22 nt, Human
cagggagaucuuggcuccuggu

SEQ ID NO: 148042 - RNA, 22 nt, Human
cgcugauaaacgucacguuccc

SEQ ID NO: 148043 - RNA, 22 nt, Human
ggagcugaaggggugggcucag

SEQ ID NO: 148044 - RNA, 22 nt, Human
cacauacuuguguguacauaug

SEQ ID NO: 148045 - RNA, 22 nt, Human
acuggcagcuguaggaugcaug

SEQ ID NO: 148046 - RNA, 22 nt, Human
acacacaugguauuguucagaa

SEQ ID NO: 148047 - RNA, 22 nt, Human
gagaaagauguaggcugggagg

SEQ ID NO: 148048 - RNA, 22 nt, Human
cggcuggugucgggcacagcaa

SEQ ID NO: 148049 - RNA, 22 nt, Human
aggagcugcagauucugccuug

SEQ ID NO: 148050 - RNA, 22 nt, Human
uccacccugcuuucuuaucucc

SEQ ID NO: 148051 - RNA, 22 nt, Human
agucacaguuucccugagagag

SEQ ID NO: 148052 - RNA, 22 nt, Human
ccacauacaaauggggugcugu

SEQ ID NO: 148053 - RNA, 22 nt, Human
cccagccuuugcuuccugguuc

SEQ ID NO: 148054 - RNA, 22 nt, Human
uggcaguagauccagucucucu

SEQ ID NO: 148055 - RNA, 22 nt, Human
gccuccggagucacagugucuu

SEQ ID NO: 148056 - RNA, 22 nt, Human
aaagagucaaaggcaugucucu

SEQ ID NO: 148057 - RNA, 22 nt, Human
gucacaggccuggaugaggggc

SEQ ID NO: 148058 - RNA, 22 nt, Human
uccaggcuuuuucaugcugucu

SEQ ID NO: 148059 - RNA, 22 nt, Human
ccuugcucaagcuagugacggg

SEQ ID NO: 148060 - RNA, 22 nt, Human
auggcagaccuccuggccacaa

SEQ ID NO: 148061 - RNA, 22 nt, Human
cuggcaguuugccaggagcucg

SEQ ID NO: 148062 - RNA, 22 nt, Human
ucuggcagcgaagcguguacuu

SEQ ID NO: 148063 - RNA, 22 nt, Human
uccaggcucccucaggaugcac

SEQ ID NO: 148064 - RNA, 22 nt, Human
cacaucccuggaguuacccagu

SEQ ID NO: 148065 - RNA, 22 nt, Human
acagaguccuagcugcaaagaa

SEQ ID NO: 148066 - RNA, 22 nt, Human
ucuggcagggucagggcccagg

SEQ ID NO: 148067 - RNA, 22 nt, Human
acuggcagugucguuuacauga

SEQ ID NO: 148068 - RNA, 22 nt, Human
auggcagagggauugaacagcu

SEQ ID NO: 148069 - RNA, 22 nt, Human
uggcgucucucauaaguaugug

SEQ ID NO: 148070 - RNA, 18 nt, Human
ccuggcagccaugcgcgc

SEQ ID NO: 148071 - RNA, 22 nt, Human
gccuccuguuaugccaugugcc

SEQ ID NO: 148072 - RNA, 22 nt, Human
cagccaagaaccacagacccag

SEQ ID NO: 148073 - RNA, 22 nt, Human
uucuuucaauagcuggcauaug

SEQ ID NO: 148074 - RNA, 19 nt, Human
cugagagaugcuucacaca

SEQ ID NO: 148075 - RNA, 22 nt, Human
cagucacauagguauacacaua

SEQ ID NO: 148076 - RNA, 22 nt, Human
ucaucacaauuuuaugacccuc

SEQ ID NO: 148077 - RNA, 22 nt, Human
ccaggcccaggguacugaccaa

SEQ ID NO: 148078 - RNA, 22 nt, Human
ucccacaggaaaguagacauug

SEQ ID NO: 148079 - RNA, 22 nt, Human
ucacacacauggauaguauuuu

SEQ ID NO: 148080 - RNA, 22 nt, Human
acugagagucaagauagcaugg

SEQ ID NO: 148081 - RNA, 22 nt, Human
ccaggcccugcuccucacacca

SEQ ID NO: 148082 - RNA, 22 nt, Human
guacacacaaucucuggucagu

SEQ ID NO: 148083 - RNA, 22 nt, Human
gccacauagaggaggauauuaa

SEQ ID NO: 148084 - RNA, 22 nt, Human
agacaagaaacugggagucucu

SEQ ID NO: 148085 - RNA, 22 nt, Human
ucccacacuacacgguuguugg

SEQ ID NO: 148086 - RNA, 22 nt, Human
cugagccagggccacacaugga

SEQ ID NO: 148087 - RNA, 22 nt, Human
aggguagggcccggagacagac

SEQ ID NO: 148088 - RNA, 22 nt, Human
ucuuuuucugcacacguguccc

SEQ ID NO: 148089 - RNA, 22 nt, Human
cagguggguguaugaaugcaaa

SEQ ID NO: 148090 - RNA, 22 nt, Human
cccagccuacucugccauagca

SEQ ID NO: 148091 - RNA, 22 nt, Human
acaucugaggagaccagccucu

SEQ ID NO: 148092 - RNA, 22 nt, Human
aaagagucuggcacuguaccag

SEQ ID NO: 148093 - RNA, 22 nt, Human
ucaggcccuuugcugcugcccc

SEQ ID NO: 148094 - RNA, 22 nt, Human
gcuggcagggugguugagagag

SEQ ID NO: 148095 - RNA, 22 nt, Human
cuccucuggguccugguggcca

SEQ ID NO: 148096 - RNA, 22 nt, Human
ugcucuguauucuauggcaguu

SEQ ID NO: 148097 - RNA, 22 nt, Human
gcacacaguagggauucaauga

SEQ ID NO: 148098 - RNA, 22 nt, Human
acacacuggcccccaguacuga

SEQ ID NO: 148099 - RNA, 22 nt, Human
acuccugggugcugaccagcgu

SEQ ID NO: 148100 - RNA, 22 nt, Human
cccaggccuggucugggccagu

SEQ ID NO: 148101 - RNA, 18 nt, Human
acacacacaccuguguau

SEQ ID NO: 148102 - RNA, 22 nt, Human
ucacacagcugacagagccuuu

SEQ ID NO: 148103 - RNA, 22 nt, Human
cacccacauuccaucacucugc

SEQ ID NO: 148104 - RNA, 22 nt, Human
acagacuggccugucucgcacc

SEQ ID NO: 148105 - RNA, 22 nt, Human
gcugcuaagcguuucuguucca

SEQ ID NO: 148106 - RNA, 19 nt, Human
ccuugccugucccugcagc

SEQ ID NO: 148107 - RNA, 22 nt, Human
gcccacacagcagauccuuugg

SEQ ID NO: 148108 - RNA, 21 nt, Human
ucuggcaggcacgggcccagc

SEQ ID NO: 148109 - RNA, 22 nt, Human
ccagguccuguuuucaccacag

SEQ ID NO: 148110 - RNA, 22 nt, Human
gcuggcagugugaaugacaagc

SEQ ID NO: 148111 - RNA, 22 nt, Human
cucugagcagaggccguggcua

SEQ ID NO: 148112 - RNA, 22 nt, Human
gcccacacaccagcucaggagg

SEQ ID NO: 148113 - RNA, 22 nt, Human
aggccuccagccacaugccagu

SEQ ID NO: 148114 - RNA, 20 nt, Human
acuggcagccugccugcugu

SEQ ID NO: 148115 - RNA, 21 nt, Human
acacagaggcaucaucacuuu

SEQ ID NO: 148116 - RNA, 22 nt, Human
agagucccagggacacuccaga

SEQ ID NO: 148117 - RNA, 22 nt, Human
ucccacaugugaauccucaggu

SEQ ID NO: 148118 - RNA, 22 nt, Human
guccucuguguaggcugcagac

SEQ ID NO: 148119 - RNA, 22 nt, Human
aagagccagcuagugaagaggc

SEQ ID NO: 148120 - RNA, 22 nt, Human
gaccugccugagcugccucugc

SEQ ID NO: 148121 - RNA, 22 nt, Human
cacauacauacguauguauaca

SEQ ID NO: 148122 - RNA, 19 nt, Human
ccuuccuccccagggccau

SEQ ID NO: 148123 - RNA, 22 nt, Human
ugagagucucagaccuccuggu

SEQ ID NO: 148124 - RNA, 22 nt, Human
uccaggcuaauuuugcauuguu

SEQ ID NO: 148125 - RNA, 22 nt, Human
uccaaggcuccggcccuggcgu

SEQ ID NO: 148126 - RNA, 22 nt, Human
acuggcaggcugcuggccggcg

SEQ ID NO: 148127 - RNA, 22 nt, Human
agaggccggccgagcccauggg

SEQ ID NO: 148128 - RNA, 22 nt, Human
aauggcagaggcaaagauggua

SEQ ID NO: 148129 - RNA, 22 nt, Human
cccugccucugaagcugcucag

SEQ ID NO: 148130 - RNA, 20 nt, Human
ucuggcaggugaacgagcug

SEQ ID NO: 148131 - RNA, 22 nt, Human
cacauacugagaaucacaccca

SEQ ID NO: 148132 - RNA, 22 nt, Human
cuuggcaguuucggaaggauga

SEQ ID NO: 148133 - RNA, 22 nt, Human
cccacacucugagaaaugcuga

SEQ ID NO: 148134 - RNA, 22 nt, Human
uggcaucuccgacagucuugau

SEQ ID NO: 148135 - RNA, 22 nt, Human
acacacacaagcagguugugga

SEQ ID NO: 148136 - RNA, 22 nt, Human
guggcagugaaggucauagcau

SEQ ID NO: 148137 - RNA, 22 nt, Human
uauucccauuccacuuaucaag

SEQ ID NO: 148138 - RNA, 22 nt, Human
uggcagagucaucacaucugga

SEQ ID NO: 148139 - RNA, 22 nt, Human
ccuccccaugacccggugcugg

SEQ ID NO: 148140 - RNA, 22 nt, Human
ucacauacacuaggauauuuuu

SEQ ID NO: 148141 - RNA, 22 nt, Human
gagggugucugcguaacuggca

SEQ ID NO: 148142 - RNA, 22 nt, Human
gacacagaauuuacucccgaua

SEQ ID NO: 148143 - RNA, 22 nt, Human
uucccacaguguugaauccucu

SEQ ID NO: 148144 - RNA, 22 nt, Human
gcacacacuguuuuccucacau

SEQ ID NO: 148145 - RNA, 22 nt, Human
gcuggcagcauuagacccuggg

SEQ ID NO: 148146 - RNA, 22 nt, Human
cugccugccuuggccuccagga

SEQ ID NO: 148147 - RNA, 19 nt, Human
gugggacagacauuacaua

SEQ ID NO: 148148 - RNA, 22 nt, Human
ucuggcagcuauccucuggcca

SEQ ID NO: 148149 - RNA, 22 nt, Human
acccacacaucucuaauucagu

SEQ ID NO: 148150 - RNA, 22 nt, Human
ccuggcagguggagguugcagu

SEQ ID NO: 148151 - RNA, 22 nt, Human
uacacacagaggccaugggauu

SEQ ID NO: 148152 - RNA, 22 nt, Human
uccugagcuacaguaguaugau

SEQ ID NO: 148153 - RNA, 20 nt, Human
accccacagaguccauugca

SEQ ID NO: 148154 - RNA, 22 nt, Human
ccugccucccagagguccucua

SEQ ID NO: 148155 - RNA, 22 nt, Human
ccuggcaguucaucaaauggca

SEQ ID NO: 148156 - RNA, 20 nt, Human
agaggcuuccuugggaggag

SEQ ID NO: 148157 - RNA, 18 nt, Human
cccacacagcaguagcuc

SEQ ID NO: 148158 - RNA, 22 nt, Human
cacauaagaaaugaauaugaga

SEQ ID NO: 148159 - RNA, 22 nt, Human
uccccacagcagaagaucugag

SEQ ID NO: 148160 - RNA, 22 nt, Human
gcuggcaggagaccauacccua

SEQ ID NO: 148161 - RNA, 22 nt, Human
gucacacagggccuccaaauca

SEQ ID NO: 148162 - RNA, 22 nt, Human
gcacauacccacugucaagcac

SEQ ID NO: 148163 - RNA, 21 nt, Human
agagucugagugugcaagggc

SEQ ID NO: 148164 - RNA, 22 nt, Human
ucuggcagaggaaggaggccug

SEQ ID NO: 148165 - RNA, 22 nt, Human
cacaaaaguaggaggcaggcgg

SEQ ID NO: 148166 - RNA, 22 nt, Human
agggaagaagcugguaguaggu

SEQ ID NO: 148167 - RNA, 22 nt, Human
uugggaagaauggaggugguua

SEQ ID NO: 148168 - RNA, 22 nt, Human
agcacaggcuuuggugugaggg

SEQ ID NO: 148169 - RNA, 22 nt, Human
ccuggcaggccccuccuggauu

SEQ ID NO: 148170 - RNA, 22 nt, Human
aggccccaaagcagugcaagua

SEQ ID NO: 148171 - RNA, 22 nt, Human
acaucacagagcccagauaaag

SEQ ID NO: 148172 - RNA, 22 nt, Human
ucuggcaggguguguauuuaca

SEQ ID NO: 148173 - RNA, 20 nt, Human
ugccuggccuuucucugccc

SEQ ID NO: 148174 - RNA, 22 nt, Human
gcccagccuccaagcuccaagg

SEQ ID NO: 148175 - RNA, 22 nt, Human
gcuccaggugucccagguaaaa

SEQ ID NO: 148176 - RNA, 22 nt, Human
uggaaagagguagaggaucugg

SEQ ID NO: 148177 - RNA, 22 nt, Human
gagaaagaugaagaguggcguu

SEQ ID NO: 148178 - RNA, 21 nt, Human
uccugccuuaguccagagcag

SEQ ID NO: 148179 - RNA, 18 nt, Human
cuccuggcugauggugag

SEQ ID NO: 148180 - RNA, 22 nt, Human
cacauacauucauguuacucua

SEQ ID NO: 148181 - RNA, 22 nt, Human
uuccaggcaugucagacauagg

SEQ ID NO: 148182 - RNA, 22 nt, Human
gacucugggcugagccagggcc

SEQ ID NO: 148183 - RNA, 21 nt, Human
ucacacacguuuccaagggca

SEQ ID NO: 148184 - RNA, 22 nt, Human
ccccacccaccuaagagaaacu

SEQ ID NO: 148185 - RNA, 22 nt, Human
gcuggcaguaaaggguuuggca

SEQ ID NO: 148186 - RNA, 23 nt, Human
uugggaaauaguuaagacaugag

SEQ ID NO: 148187 - RNA, 22 nt, Human
cuccaggcucguccaagaucga

SEQ ID NO: 148188 - RNA, 22 nt, Human
guccucuguuagaaaugugcuu

SEQ ID NO: 148189 - RNA, 20 nt, Human
cccacacccuucccacuugg

SEQ ID NO: 148190 - RNA, 22 nt, Human
auggcagacgaggcagcagggg

SEQ ID NO: 148191 - RNA, 23 nt, Human
aguguugguugggaagccaagca

SEQ ID NO: 148192 - RNA, 22 nt, Human
uacaaaaguaauuacgguuuuu

SEQ ID NO: 148193 - RNA, 22 nt, Human
uccccaccuaagauacccaucu

SEQ ID NO: 148194 - RNA, 22 nt, Human
gcacacaugcaugcacaggagu

SEQ ID NO: 148195 - RNA, 22 nt, Human
uguaaagaaagacgcagaguua

SEQ ID NO: 148196 - RNA, 22 nt, Human
ugccugccaugcagaaagcuga

SEQ ID NO: 148197 - RNA, 22 nt, Human
ccugaccuauuuuucucagcug

SEQ ID NO: 148198 - RNA, 22 nt, Human
acaauucugaugguuucccagu

SEQ ID NO: 148199 - RNA, 22 nt, Human
cugccugcugcccuccagagcc

SEQ ID NO: 148200 - RNA, 22 nt, Human
cuguccagcuuggcuccugggg

SEQ ID NO: 148201 - RNA, 22 nt, Human
gaggagcuggcagcgucuccgc

SEQ ID NO: 148202 - RNA, 22 nt, Human
cuuggcagagggcugggcucag

SEQ ID NO: 148203 - RNA, 22 nt, Human
ccccacccucgcuccauuucgg

SEQ ID NO: 148204 - RNA, 22 nt, Human
ugccucucuaacccaugcccaa

SEQ ID NO: 148205 - RNA, 22 nt, Human
guccucugggcuuugagcaguc

SEQ ID NO: 148206 - RNA, 22 nt, Human
aggaggcugaacuagggucugg

SEQ ID NO: 148207 - RNA, 22 nt, Human
acacagaugcauuacacaucua

SEQ ID NO: 148208 - RNA, 20 nt, Human
aagagucuuuacugagcuaa

SEQ ID NO: 148209 - RNA, 22 nt, Human
cacuguccaugcuugcuaaccc

SEQ ID NO: 148210 - RNA, 22 nt, Human
aacacauaggcagagcaugaca

SEQ ID NO: 148211 - RNA, 22 nt, Human
auacacacugcuauccuuuuuu

SEQ ID NO: 148212 - RNA, 22 nt, Human
agaggcuucucggauggggcag

SEQ ID NO: 148213 - RNA, 22 nt, Human
ccuggcagcuguuuggcuuggc

SEQ ID NO: 148214 - RNA, 20 nt, Human
aaaagagugcuucaacugcu

SEQ ID NO: 148215 - RNA, 22 nt, Human
aucucccagccacagcauucuu

SEQ ID NO: 148216 - RNA, 22 nt, Human
ucuggcagagauauccauccca

SEQ ID NO: 148217 - RNA, 23 nt, Human
ucacauaauccuucauccacagg

SEQ ID NO: 148218 - RNA, 21 nt, Human
uccuguaagcuuggguggcuc

SEQ ID NO: 148219 - RNA, 22 nt, Human
ccuggcagcauugguagagauu

SEQ ID NO: 148220 - RNA, 22 nt, Human
uggcagugggaauggacaaaca

SEQ ID NO: 148221 - RNA, 20 nt, Human
ucccucccuccagcucuggg

SEQ ID NO: 148222 - RNA, 22 nt, Human
caggaguggugugagggacucc

SEQ ID NO: 148223 - RNA, 22 nt, Human
caggauggucucgaucuccuga

SEQ ID NO: 148224 - RNA, 22 nt, Human
uuccacauuccuuacauucaua

SEQ ID NO: 148225 - RNA, 22 nt, Human
gugugggaaggcuaggaugcug

SEQ ID NO: 148226 - RNA, 18 nt, Human
gacacauccccaggccuc

SEQ ID NO: 148227 - RNA, 22 nt, Human
uugggaagaaacauguccauca

SEQ ID NO: 148228 - RNA, 22 nt, Human
gacccauauaggacccuccaaa

SEQ ID NO: 148229 - RNA, 22 nt, Human
guggcagugggaugcuaucagg

SEQ ID NO: 148230 - RNA, 22 nt, Human
cccacacacuggcugcugccaa

SEQ ID NO: 148231 - RNA, 22 nt, Human
gacacagauaucucugagauua

SEQ ID NO: 148232 - RNA, 23 nt, Human
acacugucucauggauagacugc

SEQ ID NO: 148233 - RNA, 22 nt, Human
ucuggcagagugauaggauaag

SEQ ID NO: 148234 - RNA, 18 nt, Human
uguagagccagguuugcc

SEQ ID NO: 148235 - RNA, 22 nt, Human
ccuggcaguuuugcccaggauu

SEQ ID NO: 148236 - RNA, 22 nt, Human
agagggugcuggagagacauug

SEQ ID NO: 148237 - RNA, 22 nt, Human
cacaauguauauguauaucaaa

SEQ ID NO: 148238 - RNA, 17 nt, Human
gcccacccuuaggagcu

SEQ ID NO: 148239 - RNA, 22 nt, Human
ccugccuguacuagagacccag

SEQ ID NO: 148240 - RNA, 22 nt, Human
ggagagaauuccauggacaugu

SEQ ID NO: 148241 - RNA, 22 nt, Human
gcuggcagucccaucagcuggg

SEQ ID NO: 148242 - RNA, 22 nt, Human
gugggagaaauuagcucuaguu

SEQ ID NO: 148243 - RNA, 22 nt, Human
uacacacuuacuggagaugaag

SEQ ID NO: 148244 - RNA, 22 nt, Human
ucuggcaggauaucgaagugaa

SEQ ID NO: 148245 - RNA, 22 nt, Human
ucuggcaggucaaucauucuuu

SEQ ID NO: 148246 - RNA, 22 nt, Human
cccccaaaguuugcacggauaa

SEQ ID NO: 148247 - RNA, 22 nt, Human
uguaaacagccccauggagagc

SEQ ID NO: 148248 - RNA, 22 nt, Human
cccuggcagagggggcaggugc

SEQ ID NO: 148249 - RNA, 22 nt, Human
gccuggcacaguagggacccaa

SEQ ID NO: 148250 - RNA, 22 nt, Human
ucacacauuucucaaguguagg

SEQ ID NO: 148251 - RNA, 22 nt, Human
acuggcagaggauagcacuaau

SEQ ID NO: 148252 - RNA, 22 nt, Human
acacagaguuugacacauggga

SEQ ID NO: 148253 - RNA, 22 nt, Human
ucccugccugacagcacccacc

SEQ ID NO: 148254 - RNA, 22 nt, Human
ucuggcagcaagauaacaaugg

SEQ ID NO: 148255 - RNA, 22 nt, Human
gaggggcuggguagggcaaccc

SEQ ID NO: 148256 - RNA, 22 nt, Human
gaggcugcggggaggagccugc

SEQ ID NO: 148257 - RNA, 22 nt, Human
cugccugcaggacaccucgcua

SEQ ID NO: 148258 - RNA, 23 nt, Human
ggacacauuuauuucagaauuca

SEQ ID NO: 148259 - RNA, 22 nt, Human
ucaucacauguguagucauccc

SEQ ID NO: 148260 - RNA, 22 nt, Human
gcacucuccuggcugccacagu

SEQ ID NO: 148261 - RNA, 22 nt, Human
gaggcugcuuugaugacaggag

SEQ ID NO: 148262 - RNA, 22 nt, Human
cugccugccacguucagcugua

SEQ ID NO: 148263 - RNA, 22 nt, Human
ucccugccuccuggcagugcca

SEQ ID NO: 148264 - RNA, 22 nt, Human
auccuggcccagguguggaggg

SEQ ID NO: 148265 - RNA, 22 nt, Human
acaggugguaaaauggacuguc

SEQ ID NO: 148266 - RNA, 22 nt, Human
uggcacaguccugggugccugc

SEQ ID NO: 148267 - RNA, 22 nt, Human
ucaggagcucuucccuggugug

SEQ ID NO: 148268 - RNA, 22 nt, Human
aagucguggcaggcuugcacga

SEQ ID NO: 148269 - RNA, 22 nt, Human
gaaagaagcuuuagauggcuau

SEQ ID NO: 148270 - RNA, 20 nt, Human
cugcuccacccggcucucag

SEQ ID NO: 148271 - RNA, 22 nt, Human
cuggccuggggggacacauccc

SEQ ID NO: 148272 - RNA, 22 nt, Human
aggcuggauuuauggggacuuc

SEQ ID NO: 148273 - RNA, 22 nt, Human
cagucccaugagcccagaacau

SEQ ID NO: 148274 - RNA, 22 nt, Human
acagguggcuuauuggcugauu

SEQ ID NO: 148275 - RNA, 19 nt, Human
uccuggcacaguggaacca

SEQ ID NO: 148276 - RNA, 22 nt, Human
gucuggaaggaggagauggagc

SEQ ID NO: 148277 - RNA, 22 nt, Human
caauacugaguuuacauucauc

SEQ ID NO: 148278 - RNA, 22 nt, Human
ccacacagucaguuuccaagaa

SEQ ID NO: 148279 - RNA, 22 nt, Human
uuccuggcauagagagggcaca

SEQ ID NO: 148280 - RNA, 22 nt, Human
uccuggcauccgugggucugug

SEQ ID NO: 148281 - RNA, 22 nt, Human
aggaggcugcaacccugaggcc

SEQ ID NO: 148282 - RNA, 22 nt, Human
aguguugggucuuuagaauuua

SEQ ID NO: 148283 - RNA, 22 nt, Human
ccucucagcgauuccucuugga

SEQ ID NO: 148284 - RNA, 19 nt, Human
ccacacagugugcaauuua

SEQ ID NO: 148285 - RNA, 22 nt, Human
uccuggcagcccgcaggugcug

SEQ ID NO: 148286 - RNA, 22 nt, Human
gcuggcagaagagcugguucaa

SEQ ID NO: 148287 - RNA, 22 nt, Human
cuggcacgcccacguaggcacu

SEQ ID NO: 148288 - RNA, 22 nt, Human
agaggcuuggaggugcaagguu

SEQ ID NO: 148289 - RNA, 22 nt, Human
aggaggcuuuugcaggugccac

SEQ ID NO: 148290 - RNA, 19 nt, Human
gcuggcagauguggccgug

SEQ ID NO: 148291 - RNA, 22 nt, Human
ccucuccuugcacccgucccgc

SEQ ID NO: 148292 - RNA, 22 nt, Human
cagugggggggccaugcugcag

SEQ ID NO: 148293 - RNA, 22 nt, Human
gccuggcaggccuguuggggcu

SEQ ID NO: 148294 - RNA, 22 nt, Human
gacacagacaguuagagguaau

SEQ ID NO: 148295 - RNA, 22 nt, Human
ugaguagagaauucagcuaagg

SEQ ID NO: 148296 - RNA, 22 nt, Human
acuggcagaauugaauaguugu

SEQ ID NO: 148297 - RNA, 22 nt, Human
aucacaauguacguuaaaaugu

SEQ ID NO: 148298 - RNA, 22 nt, Human
gcuggcagagcucugggcuggg

SEQ ID NO: 148299 - RNA, 22 nt, Human
cugagggucaacuugauuguau

SEQ ID NO: 148300 - RNA, 19 nt, Human
gcuggcagaauuuugaacc

SEQ ID NO: 148301 - RNA, 23 nt, Human
uaaauuaccuuuccagugcaggg

SEQ ID NO: 148302 - RNA, 22 nt, Human
uucccacagagauuacauugaa

SEQ ID NO: 148303 - RNA, 17 nt, Human
agccugccccaugcugc

SEQ ID NO: 148304 - RNA, 22 nt, Human
agacacagcugcaggagguggg

SEQ ID NO: 148305 - RNA, 22 nt, Human
cugccugcucuauccaggccug

SEQ ID NO: 148306 - RNA, 22 nt, Human
uccuggcaguaauuugauguug

SEQ ID NO: 148307 - RNA, 22 nt, Human
cuucccacuaguaucacagagc

SEQ ID NO: 148308 - RNA, 22 nt, Human
aggcaggggagcuggaagggua

SEQ ID NO: 148309 - RNA, 22 nt, Human
gacuguggggggcggacacaag

SEQ ID NO: 148310 - RNA, 20 nt, Human
acaaagacuggaaaagcaag

SEQ ID NO: 148311 - RNA, 22 nt, Human
ucuggcagugaagucaugaggu

SEQ ID NO: 148312 - RNA, 22 nt, Human
acacaucuuagacugaaauaug

SEQ ID NO: 148313 - RNA, 22 nt, Human
auacauucaaaggaaggauaga

SEQ ID NO: 148314 - RNA, 22 nt, Human
guuaggaacacuggagccuaaa

SEQ ID NO: 148315 - RNA, 22 nt, Human
gaggagcugggacccugucauc

SEQ ID NO: 148316 - RNA, 22 nt, Human
guccuggcccaggaguacacau

SEQ ID NO: 148317 - RNA, 22 nt, Human
cagaaagaccugggcucaagag

SEQ ID NO: 148318 - RNA, 22 nt, Human
agugccccaugggugccugggg

SEQ ID NO: 148319 - RNA, 22 nt, Human
aaagaaucagaagucucaaaca

SEQ ID NO: 148320 - RNA, 22 nt, Human
ccacaaaacugugugucaaaga

SEQ ID NO: 148321 - RNA, 22 nt, Human
agaggccugugugcuccagugg

SEQ ID NO: 148322 - RNA, 22 nt, Human
cuggccucauagccaagcugug

SEQ ID NO: 148323 - RNA, 22 nt, Human
uuccuggccccaccccuggaga

SEQ ID NO: 148324 - RNA, 22 nt, Human
gcccucucuucugcagccucca

SEQ ID NO: 148325 - RNA, 22 nt, Human
uggcaggaaaguaacagagcac

SEQ ID NO: 148326 - RNA, 22 nt, Human
cucuccagaauaugccgccgug

SEQ ID NO: 148327 - RNA, 21 nt, Human
uucucuccauaugcccagccc

SEQ ID NO: 148328 - RNA, 22 nt, Human
uccugccuguuuaccuguacuu

SEQ ID NO: 148329 - RNA, 22 nt, Human
uccugagcccuguaggacccug

SEQ ID NO: 148330 - RNA, 22 nt, Human
ugccugccucuggcagcccugc

SEQ ID NO: 148331 - RNA, 22 nt, Human
aggacaagcuaaaggacuuccu

SEQ ID NO: 148332 - RNA, 22 nt, Human
agggacucccugggccgacacg

SEQ ID NO: 148333 - RNA, 22 nt, Human
acacaucagaaauaugaaugag

SEQ ID NO: 148334 - RNA, 20 nt, Human
uuccacaucuuugcacaugc

SEQ ID NO: 148335 - RNA, 22 nt, Human
ucccacccauccugcaucucuu

SEQ ID NO: 148336 - RNA, 22 nt, Human
cucucugggcccaguuggcacc

SEQ ID NO: 148337 - RNA, 22 nt, Human
uccugagcacagagacaaggaa

SEQ ID NO: 148338 - RNA, 22 nt, Human
acaaauccagugaacuccagug

SEQ ID NO: 148339 - RNA, 22 nt, Human
ccuggcagcuccguggccuucc

SEQ ID NO: 148340 - RNA, 19 nt, Human
ucuggcagguaauuaggga

SEQ ID NO: 148341 - RNA, 22 nt, Human
ugcuggcacguggaccaggaga

SEQ ID NO: 148342 - RNA, 22 nt, Human
acacauaagccuaaucaucucc

SEQ ID NO: 148343 - RNA, 22 nt, Human
gcagccucaaacuccccagcuc

SEQ ID NO: 148344 - RNA, 22 nt, Human
ggcugaguugagaggauuacuu

SEQ ID NO: 148345 - RNA, 22 nt, Human
ccacacagauaaguguuuucua

SEQ ID NO: 148346 - RNA, 22 nt, Human
cccugagcucaggcccuugggg

SEQ ID NO: 148347 - RNA, 22 nt, Human
gacccggcuccaggcccagcag

SEQ ID NO: 148348 - RNA, 22 nt, Human
gacacagaaggucacauguuca

SEQ ID NO: 148349 - RNA, 22 nt, Human
acauaaugagcucuuuauaaau

SEQ ID NO: 148350 - RNA, 22 nt, Human
guugggaaggcaagaaguagaa

SEQ ID NO: 148351 - RNA, 22 nt, Human
auggcagauggcuggagcaggu

SEQ ID NO: 148352 - RNA, 22 nt, Human
ucaucacauaugucaugauuug

SEQ ID NO: 148353 - RNA, 23 nt, Human
gcccacccucagcguccucacgg

SEQ ID NO: 148354 - RNA, 22 nt, Human
auagggccuaaaaaguauugcu

SEQ ID NO: 148355 - RNA, 22 nt, Human
uccccacacagauacagaguag

SEQ ID NO: 148356 - RNA, 17 nt, Human
uugggagagaaagguau

SEQ ID NO: 148357 - RNA, 22 nt, Human
acacaucucaggggacacucuc

SEQ ID NO: 148358 - RNA, 22 nt, Human
cccacacaaaucauggggagaa

SEQ ID NO: 148359 - RNA, 22 nt, Human
cccagccugugacagccguccu

SEQ ID NO: 148360 - RNA, 22 nt, Human
aaauacugcugcuauuccuuuu

SEQ ID NO: 148361 - RNA, 17 nt, Human
uccaggcagcaacugag

SEQ ID NO: 148362 - RNA, 22 nt, Human
gcuggcagagagcuggugagga

SEQ ID NO: 148363 - RNA, 22 nt, Human
agagcacagaagaauaggugcu

SEQ ID NO: 148364 - RNA, 22 nt, Human
uggcagagagacucuccuugau

SEQ ID NO: 148365 - RNA, 22 nt, Human
uauucccagccucuuucuaucu

SEQ ID NO: 148366 - RNA, 22 nt, Human
uccacacacauuucuaugugca

SEQ ID NO: 148367 - RNA, 22 nt, Human
uccccaccccagaacuacuagg

SEQ ID NO: 148368 - RNA, 22 nt, Human
caggcuggagugcaauggcaca

SEQ ID NO: 148369 - RNA, 22 nt, Human
gguggcauaagaacacuaaaga

SEQ ID NO: 148370 - RNA, 22 nt, Human
agggccccauagucacugcccg

SEQ ID NO: 148371 - RNA, 22 nt, Human
uccacccugcuuuugucuuuga

SEQ ID NO: 148372 - RNA, 22 nt, Human
gccccaccuugagagcagaaac

SEQ ID NO: 148373 - RNA, 22 nt, Human
gacugccucaguuucccugcag

SEQ ID NO: 148374 - RNA, 22 nt, Human
gucacaggcaguaacuaggacc

SEQ ID NO: 148375 - RNA, 22 nt, Human
gguggcagaggugcaucagccc

SEQ ID NO: 148376 - RNA, 22 nt, Human
ggccucucagggcagagacccu

SEQ ID NO: 148377 - RNA, 22 nt, Human
cuggccucagagggucauggug

SEQ ID NO: 148378 - RNA, 22 nt, Human
gcuggcagguccaagauagagc

SEQ ID NO: 148379 - RNA, 22 nt, Human
uuggagagauuuaggucucagu

SEQ ID NO: 148380 - RNA, 22 nt, Human
uggucucugcaggccaggcuca

SEQ ID NO: 148381 - RNA, 22 nt, Human
cccuuccuugugacuggugggg

SEQ ID NO: 148382 - RNA, 22 nt, Human
ugguaagaacccaucagagaag

SEQ ID NO: 148383 - RNA, 22 nt, Human
ccuggcaggcuggggacagugc

SEQ ID NO: 148384 - RNA, 22 nt, Human
ggcaaggggucaggcugagaca

SEQ ID NO: 148385 - RNA, 22 nt, Human
gaugccuggcacccagcaagga

SEQ ID NO: 148386 - RNA, 21 nt, Human
cagcccagcccauugacagug

SEQ ID NO: 148387 - RNA, 22 nt, Human
cacacagaaccgcucgccacuu

SEQ ID NO: 148388 - RNA, 22 nt, Human
gcuggcaggguucucacugaaa

SEQ ID NO: 148389 - RNA, 22 nt, Human
cccaggccagaacuugguugcu

SEQ ID NO: 148390 - RNA, 22 nt, Human
cccacccugggaagcuaggcag

SEQ ID NO: 148391 - RNA, 22 nt, Human
cccagcccccgagugucuggaa

SEQ ID NO: 148392 - RNA, 20 nt, Human
ccccacacuauugagcacuu

SEQ ID NO: 148393 - RNA, 22 nt, Human
gccuggcauauaguaguugugc

SEQ ID NO: 148394 - RNA, 22 nt, Human
gccagguugcugacgacgaucu

SEQ ID NO: 148395 - RNA, 22 nt, Human
ggagccugaaaagucugcauuu

SEQ ID NO: 148396 - RNA, 22 nt, Human
uuccaggcugaugggccacagg

SEQ ID NO: 148397 - RNA, 22 nt, Human
cacauuccuggugcucagcagc

SEQ ID NO: 148398 - RNA, 22 nt, Human
gagagaaaagggggaauugauu

SEQ ID NO: 148399 - RNA, 22 nt, Human
ccauucauacaauuuuguucua

SEQ ID NO: 148400 - RNA, 22 nt, Human
uacacaucacuguaucuuucag

SEQ ID NO: 148401 - RNA, 22 nt, Human
cagcccaggccgacaguuccuc

SEQ ID NO: 148402 - RNA, 22 nt, Human
ucuggcagaaggcagaaauuca

SEQ ID NO: 148403 - RNA, 22 nt, Human
cugcaggacgaccgccucaucu

SEQ ID NO: 148404 - RNA, 22 nt, Human
uccaggcucuaggcugcucucc

SEQ ID NO: 148405 - RNA, 22 nt, Human
guugggaaggugaacaugaugc

SEQ ID NO: 148406 - RNA, 22 nt, Human
ggugccagaguggcccaggggc

SEQ ID NO: 148407 - RNA, 22 nt, Human
cccagcccacgguccugggugg

SEQ ID NO: 148408 - RNA, 22 nt, Human
ucacacagcuccuuuccuuagu

SEQ ID NO: 148409 - RNA, 22 nt, Human
auuccacacaguaauacucaau

SEQ ID NO: 148410 - RNA, 22 nt, Human
uccuggcagggucuaggucuag

SEQ ID NO: 148411 - RNA, 22 nt, Human
ccacaucauggauacaguuaug

SEQ ID NO: 148412 - RNA, 18 nt, Human
uccugccugugccccagg

SEQ ID NO: 148413 - RNA, 21 nt, Human
ucuggcaguggucuuucaaau

SEQ ID NO: 148414 - RNA, 22 nt, Human
uccugagcaacacagcuaagug

SEQ ID NO: 148415 - RNA, 22 nt, Human
caccagggccccaggcugugcc

SEQ ID NO: 148416 - RNA, 22 nt, Human
ccucagcugcuucccuggagcc

SEQ ID NO: 148417 - RNA, 22 nt, Human
uacacagaaccugguguacagu

SEQ ID NO: 148418 - RNA, 22 nt, Human
uccuggcagugcuuguuuugga

SEQ ID NO: 148419 - RNA, 22 nt, Human
guccucugagggggcugcacgc

SEQ ID NO: 148420 - RNA, 22 nt, Human
aaaaagucugcaaaggagguug

SEQ ID NO: 148421 - RNA, 22 nt, Human
ugagggacucccggcccugcca

SEQ ID NO: 148422 - RNA, 22 nt, Human
acaguucccgucuugcacagcu

SEQ ID NO: 148423 - RNA, 22 nt, Human
guccucuguuuccaucugacuu

SEQ ID NO: 148424 - RNA, 22 nt, Human
cugccugcucaccagggcucug

SEQ ID NO: 148425 - RNA, 22 nt, Human
guccucugauuucuagguauau

SEQ ID NO: 148426 - RNA, 22 nt, Human
ccccacacucuuuacauucaua

SEQ ID NO: 148427 - RNA, 22 nt, Human
gauggcagguaguggucucauc

SEQ ID NO: 148428 - RNA, 22 nt, Human
auccaggcgaaugcagaaggcc

SEQ ID NO: 148429 - RNA, 22 nt, Human
cagguugguauucaucuccaca

SEQ ID NO: 148430 - RNA, 22 nt, Human
uuggaacaugccgggguccagg

SEQ ID NO: 148431 - RNA, 22 nt, Human
ugguccuggaagguccugaggg

SEQ ID NO: 148432 - RNA, 22 nt, Human
gagaaagacguaggcugggagg

SEQ ID NO: 148433 - RNA, 22 nt, Human
ucccagccacaguuuccaccug

SEQ ID NO: 148434 - RNA, 22 nt, Human
ccuggcaggacuguuguaagaa

SEQ ID NO: 148435 - RNA, 19 nt, Human
acuggcaguuucugcaugg

SEQ ID NO: 148436 - RNA, 22 nt, Human
uccaggcaaaaaccaacuacag

SEQ ID NO: 148437 - RNA, 22 nt, Human
cacacaucuuaucccaguuauu

SEQ ID NO: 148438 - RNA, 22 nt, Human
gaggagcugcagggggagucua

SEQ ID NO: 148439 - RNA, 22 nt, Human
ggagcugaaccccaucgugcug

SEQ ID NO: 148440 - RNA, 22 nt, Human
caaauacuacgauucuugcagu

SEQ ID NO: 148441 - RNA, 22 nt, Human
cuccugaggacuucuauugggu

SEQ ID NO: 148442 - RNA, 19 nt, Human
acauucccaucagcaaugu

SEQ ID NO: 148443 - RNA, 23 nt, Human
ccuggcagcaaacgaggagguua

SEQ ID NO: 148444 - RNA, 22 nt, Human
ggcccagccucagacaugcccu

SEQ ID NO: 148445 - RNA, 22 nt, Human
acuggcagaacgugaugcgggu

SEQ ID NO: 148446 - RNA, 22 nt, Human
gccuggcacaggaauuaggagg

SEQ ID NO: 148447 - RNA, 22 nt, Human
cuugccucccucagcucacagc

SEQ ID NO: 148448 - RNA, 22 nt, Human
ccuggcagccucagccaauucu

SEQ ID NO: 148449 - RNA, 22 nt, Human
ucuggcaggcaaucggcucugg

SEQ ID NO: 148450 - RNA, 18 nt, Human
ccuagccuccaagcucau

SEQ ID NO: 148451 - RNA, 22 nt, Human
gacaaaaguguuuugaacaagg

SEQ ID NO: 148452 - RNA, 22 nt, Human
ccuggcagguuacaaccaguua

SEQ ID NO: 148453 - RNA, 22 nt, Human
uggccugccacugccacgccac

SEQ ID NO: 148454 - RNA, 22 nt, Human
acacacucaauugcauaagcac

SEQ ID NO: 148455 - RNA, 17 nt, Human
cccaggccgccgggagc

SEQ ID NO: 148456 - RNA, 22 nt, Human
gcuggcaggagaaacggggugc

SEQ ID NO: 148457 - RNA, 22 nt, Human
ccacacagggggaugaguuauu

SEQ ID NO: 148458 - RNA, 22 nt, Human
gcuggcagaauuucuucuugcu

SEQ ID NO: 148459 - RNA, 22 nt, Human
ucuggcaggacaugcugaccau

SEQ ID NO: 148460 - RNA, 22 nt, Human
uggccuccccuaacagccucuu

SEQ ID NO: 148461 - RNA, 22 nt, Human
guccuggcccacuggcaggcug

SEQ ID NO: 148462 - RNA, 22 nt, Human
accugccuucucaaggacauga

SEQ ID NO: 148463 - RNA, 22 nt, Human
cagguuggucggcaaguacaca

SEQ ID NO: 148464 - RNA, 23 nt, Human
uguaaacaucacccccuggaguu

SEQ ID NO: 148465 - RNA, 21 nt, Human
ccagcccagcugugucccagc

SEQ ID NO: 148466 - RNA, 17 nt, Human
ugccagccugucccagg

SEQ ID NO: 148467 - RNA, 22 nt, Human
ucaggauggagggaagcacaga

SEQ ID NO: 148468 - RNA, 22 nt, Human
ggcacagagcuuugucccaguu

SEQ ID NO: 148469 - RNA, 22 nt, Human
aggcaguggagcuggaauaggc

SEQ ID NO: 148470 - RNA, 22 nt, Human
gaaaagaguccugugugaggag

SEQ ID NO: 148471 - RNA, 22 nt, Human
gccgggaccaaggccacggagc

SEQ ID NO: 148472 - RNA, 22 nt, Human
agcacagggacaaugccaggug

SEQ ID NO: 148473 - RNA, 22 nt, Human
aggcaguguguagcuggaagag

SEQ ID NO: 148474 - RNA, 22 nt, Human
gcacauaaagggcaugggaggu

SEQ ID NO: 148475 - RNA, 22 nt, Human
uggcaguggauaggggagcggu

SEQ ID NO: 148476 - RNA, 21 nt, Human
aacacauccagaguauuugac

SEQ ID NO: 148477 - RNA, 22 nt, Human
gcacacaggggaguucucagaa

SEQ ID NO: 148478 - RNA, 22 nt, Human
aagagagaacucccuucgccag

SEQ ID NO: 148479 - RNA, 23 nt, Human
cauccaggagcugagucugacug

SEQ ID NO: 148480 - RNA, 22 nt, Human
cuccaggccccuggccuucugc

SEQ ID NO: 148481 - RNA, 20 nt, Human
uucaugggagcaaagaggcc

SEQ ID NO: 148482 - RNA, 22 nt, Human
cuccuggcacucaguguggaag

SEQ ID NO: 148483 - RNA, 19 nt, Human
acacauuugcacaauccac

SEQ ID NO: 148484 - RNA, 23 nt, Human
uccuuccuuugagaggcuccauc

SEQ ID NO: 148485 - RNA, 22 nt, Human
ccuggcuccugccucugcaggg

SEQ ID NO: 148486 - RNA, 22 nt, Human
gagacaucauaaugaaguuucc

SEQ ID NO: 148487 - RNA, 19 nt, Human
acuggcagcuguagucugu

SEQ ID NO: 148488 - RNA, 22 nt, Human
acacauaagaaacuacaaagag

SEQ ID NO: 148489 - RNA, 22 nt, Human
caggucccugcgccccggccuc

SEQ ID NO: 148490 - RNA, 22 nt, Human
ccuggcagcuccuccccggcgg

SEQ ID NO: 148491 - RNA, 22 nt, Human
acaagagcauugcagguguguu

SEQ ID NO: 148492 - RNA, 18 nt, Human
cuccuccacagccccugc

SEQ ID NO: 148493 - RNA, 22 nt, Human
ccaggcugggcggggaaccugg

SEQ ID NO: 148494 - RNA, 22 nt, Human
agcccagcuuugaaccauauca

SEQ ID NO: 148495 - RNA, 17 nt, Human
ugcuggcaacauacaaa

SEQ ID NO: 148496 - RNA, 22 nt, Human
ucccacaccugucuauuccuag

SEQ ID NO: 148497 - RNA, 22 nt, Human
gcagggacagggcagggccuuu

SEQ ID NO: 148498 - RNA, 22 nt, Human
uugggaucucaaauccagcuau

SEQ ID NO: 148499 - RNA, 22 nt, Human
uuccuggcgccacggagccggu

SEQ ID NO: 148500 - RNA, 20 nt, Human
gcuggcagaugucuugagau

SEQ ID NO: 148501 - RNA, 22 nt, Human
guacacacuguuugaucauuuc

SEQ ID NO: 148502 - RNA, 22 nt, Human
ccagugcccagcugcccaggca

SEQ ID NO: 148503 - RNA, 22 nt, Human
ggccucagagaaggcugugcgg

SEQ ID NO: 148504 - RNA, 22 nt, Human
acuggcagccacaacuggcagg

SEQ ID NO: 148505 - RNA, 22 nt, Human
guccucuguagggcugggccac

SEQ ID NO: 148506 - RNA, 22 nt, Human
ucuggcagcucaguucaggucu

SEQ ID NO: 148507 - RNA, 22 nt, Human
gaggagcugagccacguccugg

SEQ ID NO: 148508 - RNA, 22 nt, Human
ugaccaggauacugcagggaug

SEQ ID NO: 148509 - RNA, 22 nt, Human
cccacccugggcuacacaucca

SEQ ID NO: 148510 - RNA, 22 nt, Human
ucccacauaugcaauccugaau

SEQ ID NO: 148511 - RNA, 22 nt, Human
ccacagaccuuggcuuccaccu

SEQ ID NO: 148512 - RNA, 19 nt, Human
uggcagguagugagcaguc

SEQ ID NO: 148513 - RNA, 22 nt, Human
gccuggcaggggccugggagug

SEQ ID NO: 148514 - RNA, 22 nt, Human
cccugccuugggguccacaccg

SEQ ID NO: 148515 - RNA, 22 nt, Human
acugccaaugguaguuugaugg

SEQ ID NO: 148516 - RNA, 22 nt, Human
acuggcagggggagccccgaga

SEQ ID NO: 148517 - RNA, 22 nt, Human
cuccugaggaaaagcuugguca

SEQ ID NO: 148518 - RNA, 22 nt, Human
uauguaaaguagauggcaggua

SEQ ID NO: 148519 - RNA, 22 nt, Human
auggccugaugcaccuguccca

SEQ ID NO: 148520 - RNA, 22 nt, Human
acuggcagagggaaaaccauuc

SEQ ID NO: 148521 - RNA, 23 nt, Human
uccaggagcaugcuggcuggcga

SEQ ID NO: 148522 - RNA, 22 nt, Human
cuggcagucugguggaaggccu

SEQ ID NO: 148523 - RNA, 21 nt, Human
ucuggcagcaguuuguugagu

SEQ ID NO: 148524 - RNA, 22 nt, Human
uccaggcuccccugcgugcucc

SEQ ID NO: 148525 - RNA, 22 nt, Human
guccucugaaagaugaaccaug

SEQ ID NO: 148526 - RNA, 18 nt, Human
ggccucuggacuggcagc

SEQ ID NO: 148527 - RNA, 22 nt, Human
ccuggcagguagcauugaggag

SEQ ID NO: 148528 - RNA, 22 nt, Human
cacauacaaggcacacuggagg

SEQ ID NO: 148529 - RNA, 22 nt, Human
cuccucuguauugauugggacu

SEQ ID NO: 148530 - RNA, 22 nt, Human
gcuggcaggagccuuucccuuu

SEQ ID NO: 148531 - RNA, 22 nt, Human
aucacagagauugcuuuuaaaa

SEQ ID NO: 148532 - RNA, 22 nt, Human
gaggagcucugcuccauccuuc

SEQ ID NO: 148533 - RNA, 22 nt, Human
ccacccuaacaauccuuacugu

SEQ ID NO: 148534 - RNA, 22 nt, Human
uacugacacaaagccaaucccu

SEQ ID NO: 148535 - RNA, 19 nt, Human
acuggcagggcugcggugg

SEQ ID NO: 148536 - RNA, 22 nt, Human
gcacauacugcaaagauuacua

SEQ ID NO: 148537 - RNA, 22 nt, Human
gcuccaggagagggaagcagau

SEQ ID NO: 148538 - RNA, 22 nt, Human
gccuccuggaagucacauguuu

SEQ ID NO: 148539 - RNA, 22 nt, Human
gcuggcaguuuccucaccgagg

SEQ ID NO: 148540 - RNA, 22 nt, Human
cccagcaugcacgcugacacuc

SEQ ID NO: 148541 - RNA, 22 nt, Human
aggaggcugggcacaguggccu

SEQ ID NO: 148542 - RNA, 22 nt, Human
ucuggcagugagcaacuugaca

SEQ ID NO: 148543 - RNA, 22 nt, Human
guccucugacucagccuuggga

SEQ ID NO: 148544 - RNA, 22 nt, Human
cugccucuauaggaguccacca

SEQ ID NO: 148545 - RNA, 19 nt, Human
guccucucaacaacccggg

SEQ ID NO: 148546 - RNA, 22 nt, Human
gccuccggaguugcagugucuu

SEQ ID NO: 148547 - RNA, 22 nt, Human
cuuacacagucuggcacuucuu

SEQ ID NO: 148548 - RNA, 21 nt, Human
agugccaguagguauggagga

SEQ ID NO: 148549 - RNA, 22 nt, Human
caugagauaauuuuucuccagu

SEQ ID NO: 148550 - RNA, 22 nt, Human
ucuccacacuuucucucccagg

SEQ ID NO: 148551 - RNA, 22 nt, Human
gucaggacucugacccgucccg

SEQ ID NO: 148552 - RNA, 22 nt, Human
ucccacacuugaaacaaggcug

SEQ ID NO: 148553 - RNA, 22 nt, Human
uccuggcacccuuggguuggag

SEQ ID NO: 148554 - RNA, 22 nt, Human
gcuggcagacugggggcagaac

SEQ ID NO: 148555 - RNA, 22 nt, Human
uccaggaggaggaaggcugcca

SEQ ID NO: 148556 - RNA, 22 nt, Human
gcuggcaguguauuguuagcug

SEQ ID NO: 148557 - RNA, 22 nt, Human
aaagagucguguuccagguuug

SEQ ID NO: 148558 - RNA, 22 nt, Human
uggcagugucuuaucaggagug

SEQ ID NO: 148559 - RNA, 22 nt, Human
uacaaaaggaagagggaucuua

SEQ ID NO: 148560 - RNA, 22 nt, Human
guccucuggagguuuuuaggug

SEQ ID NO: 148561 - RNA, 22 nt, Human
acacacagaaggaagccccacu

SEQ ID NO: 148562 - RNA, 22 nt, Human
ccuucucucugaagaccccaaa

SEQ ID NO: 148563 - RNA, 22 nt, Human
agcacugugauuuauaacauuu

SEQ ID NO: 148564 - RNA, 22 nt, Human
ucccacauuacccugacugaca

SEQ ID NO: 148565 - RNA, 21 nt, Human
cccuugccugcacuccucggc

SEQ ID NO: 148566 - RNA, 22 nt, Human
ccuggcagucaggggaguccuu

SEQ ID NO: 148567 - RNA, 22 nt, Human
aacacagaucaaaauauuuccu

SEQ ID NO: 148568 - RNA, 22 nt, Human
cuccuggcuuucccagaccagg

SEQ ID NO: 148569 - RNA, 22 nt, Human
ucccuccccacuucugagcuuu

SEQ ID NO: 148570 - RNA, 22 nt, Human
ccuggcagacugugagggcagg

SEQ ID NO: 148571 - RNA, 22 nt, Human
uuccuggccaagcagaguggaa

SEQ ID NO: 148572 - RNA, 22 nt, Human
ggccucucugagagcagacguu

SEQ ID NO: 148573 - RNA, 22 nt, Human
acuggcaguagagggagcgcau

SEQ ID NO: 148574 - RNA, 22 nt, Human
accugccuaucagcugccugcu

SEQ ID NO: 148575 - RNA, 22 nt, Human
acacacuguugcucauccaggc

SEQ ID NO: 148576 - RNA, 21 nt, Human
ccacucaugacuccacucacc

SEQ ID NO: 148577 - RNA, 22 nt, Human
ccccacaccugccgggcagcag

SEQ ID NO: 148578 - RNA, 22 nt, Human
gcccacaccauuuauucuuugu

SEQ ID NO: 148579 - RNA, 22 nt, Human
ggaggacaggggcugcagcaca

SEQ ID NO: 148580 - RNA, 22 nt, Human
acacacaugccuuuccuaagua

SEQ ID NO: 148581 - RNA, 21 nt, Human
uccccacauuucuaaacagac

SEQ ID NO: 148582 - RNA, 22 nt, Human
cuggcaguuggcauuggcaucu

SEQ ID NO: 148583 - RNA, 22 nt, Human
aggggugugcauccuggaggau

SEQ ID NO: 148584 - RNA, 22 nt, Human
acacacagguaaaggagccugg

SEQ ID NO: 148585 - RNA, 22 nt, Human
guggcaguuuugacaucacaaa

SEQ ID NO: 148586 - RNA, 22 nt, Human
ucauggcacuuagcacaguccu

SEQ ID NO: 148587 - RNA, 22 nt, Human
ugguccugccccgugcacagag

SEQ ID NO: 148588 - RNA, 22 nt, Human
gcuggcaggauagaagucuaau

SEQ ID NO: 148589 - RNA, 22 nt, Human
auggccuggggauuccugagca

SEQ ID NO: 148590 - RNA, 22 nt, Human
aucccacaccccuacaacauau

SEQ ID NO: 148591 - RNA, 22 nt, Human
cccagcccaucucaaaggucua

SEQ ID NO: 148592 - RNA, 22 nt, Human
uuccaggcucccuuggaggugu

SEQ ID NO: 148593 - RNA, 22 nt, Human
ccauacacacaccaaauuugua

SEQ ID NO: 148594 - RNA, 18 nt, Human
acucugcggaggccccag

SEQ ID NO: 148595 - RNA, 22 nt, Human
uccuggcagaaauggggcugug

SEQ ID NO: 148596 - RNA, 22 nt, Human
augacugcucugggcucccaug

SEQ ID NO: 148597 - RNA, 22 nt, Human
gguucccggaucuccgaguccc

SEQ ID NO: 148598 - RNA, 22 nt, Human
uguaaacauauguauguaugua

SEQ ID NO: 148599 - RNA, 22 nt, Human
guacacacuauuuaaaguguuu

SEQ ID NO: 148600 - RNA, 22 nt, Human
acagguccucaagucagcuggg

SEQ ID NO: 148601 - RNA, 22 nt, Human
cuggccucuguguucaccauag

SEQ ID NO: 148602 - RNA, 22 nt, Human
cagccaggauggagaacuguug

SEQ ID NO: 148603 - RNA, 22 nt, Human
gcuggcagggacagcugcgugu

SEQ ID NO: 148604 - RNA, 22 nt, Human
gaggagcucaugaaagcggugu

SEQ ID NO: 148605 - RNA, 22 nt, Human
ucuggcaguuugagaaaggcua

SEQ ID NO: 148606 - RNA, 22 nt, Human
cagggacaauggcagagccuga

SEQ ID NO: 148607 - RNA, 22 nt, Human
ucuggcaggaccaugaagcgua

SEQ ID NO: 148608 - RNA, 21 nt, Human
ccuggcagaagccugauaugc

SEQ ID NO: 148609 - RNA, 22 nt, Human
cccacacacauuuaugauagga

SEQ ID NO: 148610 - RNA, 21 nt, Human
cacacagugaucuauccacau

SEQ ID NO: 148611 - RNA, 22 nt, Human
ggugccaggcuguagucagggu

SEQ ID NO: 148612 - RNA, 22 nt, Human
guugggaagcagauggaugagc

SEQ ID NO: 148613 - RNA, 22 nt, Human
aguugggaguuauagacucuau

SEQ ID NO: 148614 - RNA, 22 nt, Human
aguguggcaggaaugacuagaa

SEQ ID NO: 148615 - RNA, 22 nt, Human
agggcugaagggaggugcucau

SEQ ID NO: 148616 - RNA, 22 nt, Human
cucagccccaauucuccccauu

SEQ ID NO: 148617 - RNA, 22 nt, Human
caggacaaagcccuuugagaaa

SEQ ID NO: 148618 - RNA, 22 nt, Human
ggggcugagucagugggaagag

SEQ ID NO: 148619 - RNA, 22 nt, Human
uguuggaauuaggauacagagg

SEQ ID NO: 148620 - RNA, 23 nt, Human
uuggagagggugaguagugucag

SEQ ID NO: 148621 - RNA, 22 nt, Human
uccugagccugacaaucaccau

SEQ ID NO: 148622 - RNA, 22 nt, Human
uuuaaauuuagaagaaacacug

SEQ ID NO: 148623 - RNA, 22 nt, Human
cccgagugucuacucacuccca

SEQ ID NO: 148624 - RNA, 22 nt, Human
acccacaccuccguauaucacu

SEQ ID NO: 148625 - RNA, 22 nt, Human
ucacacacauaaucuaagauua

SEQ ID NO: 148626 - RNA, 22 nt, Human
gcugcgccggaucccacguucc

SEQ ID NO: 148627 - RNA, 15 nt, Human
cacacagacagcuug

SEQ ID NO: 148628 - RNA, 19 nt, Human
ccagcccacagugacuuuc

SEQ ID NO: 148629 - RNA, 22 nt, Human
uacauuccuguuagcaucuaag

SEQ ID NO: 148630 - RNA, 22 nt, Human
uccuggcagagggcggccucga

SEQ ID NO: 148631 - RNA, 22 nt, Human
ucuggcagaagugcugucagua

SEQ ID NO: 148632 - RNA, 22 nt, Human
cucucuccuuagcugcagacca

SEQ ID NO: 148633 - RNA, 22 nt, Human
ugcacaggugagacucaggaag

SEQ ID NO: 148634 - RNA, 22 nt, Human
ccagccucacuggcaucaccua

SEQ ID NO: 148635 - RNA, 22 nt, Human
cccacccucaagggugucuaua

SEQ ID NO: 148636 - RNA, 22 nt, Human
ucuggcaguugccgcuucaguc

SEQ ID NO: 148637 - RNA, 22 nt, Human
uuccuggcagaggccccgacag

SEQ ID NO: 148638 - RNA, 22 nt, Human
accugccucagugcagcuggau

SEQ ID NO: 148639 - RNA, 22 nt, Human
gagaggcuggcagugccagguu

SEQ ID NO: 148640 - RNA, 22 nt, Human
uuccaggccgggcaggaaacac

SEQ ID NO: 148641 - RNA, 22 nt, Human
ugacaggaggcuugaggccagg

SEQ ID NO: 148642 - RNA, 22 nt, Human
acacacagcgccuaccaugugc

SEQ ID NO: 148643 - RNA, 22 nt, Human
accugccuauggagccacaugg

SEQ ID NO: 148644 - RNA, 22 nt, Human
gggacaauggaggccucucucc

SEQ ID NO: 148645 - RNA, 22 nt, Human
ugcagagaaaacuccuggguac

SEQ ID NO: 148646 - RNA, 23 nt, Human
acauacauggagauaaagugaug

SEQ ID NO: 148647 - RNA, 19 nt, Human
cagcccucuuaccacugug

SEQ ID NO: 148648 - RNA, 22 nt, Human
cacaacuuuaggaaccacauuc

SEQ ID NO: 148649 - RNA, 22 nt, Human
acacacuuuaaauuaaaccucu

SEQ ID NO: 148650 - RNA, 22 nt, Human
cuggcagguuuggugucuggug

SEQ ID NO: 148651 - RNA, 22 nt, Human
uggcacagggcuuggucgcuca

SEQ ID NO: 148652 - RNA, 22 nt, Human
auccaggccccaagaccccgac

SEQ ID NO: 148653 - RNA, 22 nt, Human
cuguccuccagacgacaguccc

SEQ ID NO: 148654 - RNA, 22 nt, Human
ucccugcccucagugcacccgg

SEQ ID NO: 148655 - RNA, 22 nt, Human
aagugccaucauagcauggcug

SEQ ID NO: 148656 - RNA, 22 nt, Human
agcacaggaccaaggaagcugu

SEQ ID NO: 148657 - RNA, 22 nt, Human
guccucugaaguugugcaaugc

SEQ ID NO: 148658 - RNA, 22 nt, Human
uggcagagaacacacaugauuc

SEQ ID NO: 148659 - RNA, 20 nt, Human
uggccucugagaugccacgg

SEQ ID NO: 148660 - RNA, 22 nt, Human
cagcacagugaccagacccacu

SEQ ID NO: 148661 - RNA, 22 nt, Human
gcuccaggcagcauaguggaug

SEQ ID NO: 148662 - RNA, 21 nt, Human
aggcugcuggcucaggguccu

SEQ ID NO: 148663 - RNA, 22 nt, Human
cacacugucagguaaauaacac

SEQ ID NO: 148664 - RNA, 22 nt, Human
cccuuccugggugucccggagu

SEQ ID NO: 148665 - RNA, 22 nt, Human
aucacagagcucccuuccacug

SEQ ID NO: 148666 - RNA, 22 nt, Human
cccuuccucccaggcuucugug

SEQ ID NO: 148667 - RNA, 22 nt, Human
cauucccacguguucuuugcuu

SEQ ID NO: 148668 - RNA, 22 nt, Human
ccaggcuguaagagugauguug

SEQ ID NO: 148669 - RNA, 22 nt, Human
agacacagucugucuggaggag

SEQ ID NO: 148670 - RNA, 22 nt, Human
ccuccuggcuuuucccauugaa

SEQ ID NO: 148671 - RNA, 22 nt, Human
cacacaucaaccuagacauugu

SEQ ID NO: 148672 - RNA, 22 nt, Human
ccucugccaccucccacgaggc

SEQ ID NO: 148673 - RNA, 22 nt, Human
cuccuggcaguuccccuuguca

SEQ ID NO: 148674 - RNA, 22 nt, Human
acccacccuacuagcagugucc

SEQ ID NO: 148675 - RNA, 22 nt, Human
acaucacacgccuuccaggagg

SEQ ID NO: 148676 - RNA, 22 nt, Human
cccugagcgugaggaggaagua

SEQ ID NO: 148677 - RNA, 22 nt, Human
cacacagacagcucucugaaga

SEQ ID NO: 148678 - RNA, 22 nt, Human
ccagcccuugcugaaggguggc

SEQ ID NO: 148679 - RNA, 22 nt, Human
uccaggccauugacugcauccu

SEQ ID NO: 148680 - RNA, 22 nt, Human
acaucacaguaguuaagccaga

SEQ ID NO: 148681 - RNA, 22 nt, Human
uguaaacauaccagagccaagu

SEQ ID NO: 148682 - RNA, 22 nt, Human
gagaccucuugguaucgcuagg

SEQ ID NO: 148683 - RNA, 22 nt, Human
ucuggcagaucuucccacguuu

SEQ ID NO: 148684 - RNA, 23 nt, Human
acuccccagucucuucuugccaa

SEQ ID NO: 148685 - RNA, 22 nt, Human
agaggccuccgaaaggugggcu

SEQ ID NO: 148686 - RNA, 22 nt, Human
aaagaucaauagauaaagcuac

SEQ ID NO: 148687 - RNA, 22 nt, Human
agcagguugugauacacucaga

SEQ ID NO: 148688 - RNA, 22 nt, Human
cagguuggggacuuaggaugac

SEQ ID NO: 148689 - RNA, 22 nt, Human
ccacacuaaacugcucaaacca

SEQ ID NO: 148690 - RNA, 22 nt, Human
ugcuccagugccugccccacag

SEQ ID NO: 148691 - RNA, 19 nt, Human
gggagcugaggucuuuggu

SEQ ID NO: 148692 - RNA, 22 nt, Human
cacacacugacaccuuaucuug

SEQ ID NO: 148693 - RNA, 22 nt, Human
ucuggcaguggaugagggcagc

SEQ ID NO: 148694 - RNA, 22 nt, Human
ccuggcagcaggugggcccgug

SEQ ID NO: 148695 - RNA, 22 nt, Human
ucacacacauuugcugucugau

SEQ ID NO: 148696 - RNA, 22 nt, Human
uccaggcuagguuuacaggaca

SEQ ID NO: 148697 - RNA, 22 nt, Human
gguuccuucugaggucccugua

SEQ ID NO: 148698 - RNA, 19 nt, Human
ccagucccauacaggagau

SEQ ID NO: 148699 - RNA, 22 nt, Human
gcuccaggaggaugaccuuccu

SEQ ID NO: 148700 - RNA, 22 nt, Human
auccucuguggauuacaccuag

SEQ ID NO: 148701 - RNA, 22 nt, Human
gagacacacauucuggagagaa

SEQ ID NO: 148702 - RNA, 22 nt, Human
ucuggcaggccuugucaaucug

SEQ ID NO: 148703 - RNA, 20 nt, Human
aaagagcccuuggagcaggc

SEQ ID NO: 148704 - RNA, 22 nt, Human
ucacauaaauuuaccagaugau

SEQ ID NO: 148705 - RNA, 22 nt, Human
uccccacacuuucacuccuggc

SEQ ID NO: 148706 - RNA, 22 nt, Human
ccuggcagaauauuaaagugca

SEQ ID NO: 148707 - RNA, 22 nt, Human
ccuggcagcgccgaagcuggcc

SEQ ID NO: 148708 - RNA, 18 nt, Human
acaggcugugggaauggu

SEQ ID NO: 148709 - RNA, 22 nt, Human
cacacacuggagcaaggagaug

SEQ ID NO: 148710 - RNA, 22 nt, Human
cuaugagaagaaaacaagauua

SEQ ID NO: 148711 - RNA, 22 nt, Human
auuccacagcuacaucaaucua

SEQ ID NO: 148712 - RNA, 22 nt, Human
gcacacacaugugaguacaugc

SEQ ID NO: 148713 - RNA, 22 nt, Human
gagauggccagugccaggacaa

SEQ ID NO: 148714 - RNA, 22 nt, Human
gcuugggaagggcccuguguac

SEQ ID NO: 148715 - RNA, 22 nt, Human
aagaggucauaccagauaaggg

SEQ ID NO: 148716 - RNA, 22 nt, Human
uggcagagcccagacuccaguc

SEQ ID NO: 148717 - RNA, 22 nt, Human
ccuccagcgcgauccacuccgg

SEQ ID NO: 148718 - RNA, 22 nt, Human
gccuggcaaggcccuguugacu

SEQ ID NO: 148719 - RNA, 22 nt, Human
agacacauaggaccacacugug

SEQ ID NO: 148720 - RNA, 22 nt, Human
guccucugcuucaugcccugau

SEQ ID NO: 148721 - RNA, 22 nt, Human
gacacauagaucuaucucacuc

SEQ ID NO: 148722 - RNA, 22 nt, Human
cuuacaaauacacuuaggagag

SEQ ID NO: 148723 - RNA, 22 nt, Human
cuccuggcacugucuugaccca

SEQ ID NO: 148724 - RNA, 22 nt, Human
uuccagcccgcgacuuguucag

SEQ ID NO: 148725 - RNA, 22 nt, Human
cacacaguaggcacucauuaau

SEQ ID NO: 148726 - RNA, 22 nt, Human
uccuggcacuuugggggcucgc

SEQ ID NO: 148727 - RNA, 22 nt, Human
gaggcacagucccgaggcaagg

SEQ ID NO: 148728 - RNA, 22 nt, Human
cugcaggagcaaagccucugcu

SEQ ID NO: 148729 - RNA, 22 nt, Human
ggcacagggggcugaggacuag

SEQ ID NO: 148730 - RNA, 22 nt, Human
cucaucaccacauauaacaaag

SEQ ID NO: 148731 - RNA, 22 nt, Human
guccucuggaagaugaguucuu

SEQ ID NO: 148732 - RNA, 22 nt, Human
ugccagccagggaagcucaccc

SEQ ID NO: 148733 - RNA, 22 nt, Human
acacacagaguuuauacaggca

SEQ ID NO: 148734 - RNA, 22 nt, Human
ccagcccugucaccaacuggag

SEQ ID NO: 148735 - RNA, 22 nt, Human
uccaggcaagggaggagcaugg

SEQ ID NO: 148736 - RNA, 22 nt, Human
auguuggagucguaaggcaugg

SEQ ID NO: 148737 - RNA, 22 nt, Human
ucccaccccggucaagggcuga

SEQ ID NO: 148738 - RNA, 22 nt, Human
ugagagucuguuccucuugcag

SEQ ID NO: 148739 - RNA, 20 nt, Human
ccuggcaggcggguuacuua

SEQ ID NO: 148740 - RNA, 22 nt, Human
ggagucugcucccagacaugau

SEQ ID NO: 148741 - RNA, 22 nt, Human
uuccuggcucacagcagugggg

SEQ ID NO: 148742 - RNA, 22 nt, Human
aaaagagucuuaggcagucaua

SEQ ID NO: 148743 - RNA, 22 nt, Human
ccuggcagaaagaguuacaccu

SEQ ID NO: 148744 - RNA, 22 nt, Human
gcacacauucggauucuuaacc

SEQ ID NO: 148745 - RNA, 22 nt, Human
cagcccagccuugucucuuuau

SEQ ID NO: 148746 - RNA, 22 nt, Human
ucccagccuuucuuuucugcug

SEQ ID NO: 148747 - RNA, 23 nt, Human
uuccaggcagagcagggauuaga

SEQ ID NO: 148748 - RNA, 22 nt, Human
ccuggcaggcaagaggaaggga

SEQ ID NO: 148749 - RNA, 22 nt, Human
ucaggcccagagucacggaucc

SEQ ID NO: 148750 - RNA, 22 nt, Human
uugggaaguuuaaugacagacu

SEQ ID NO: 148751 - RNA, 19 nt, Human
ugccuggcaccagcuccac

SEQ ID NO: 148752 - RNA, 22 nt, Human
aaagaucaaguaggcauggccu

SEQ ID NO: 148753 - RNA, 22 nt, Human
agccagggucucucgcucuguu

SEQ ID NO: 148754 - RNA, 22 nt, Human
ccuggcagggcugcaguaaugg

SEQ ID NO: 148755 - RNA, 22 nt, Human
gagccugaugaaacaggcagac

SEQ ID NO: 148756 - RNA, 22 nt, Human
auacaugacucacacauucugc

SEQ ID NO: 148757 - RNA, 22 nt, Human
gcacauaacugaccacaucuaa

SEQ ID NO: 148758 - RNA, 18 nt, Human
gacaaaaguacagacaga

SEQ ID NO: 148759 - RNA, 22 nt, Human
gguguugggcucacugguccuu

SEQ ID NO: 148760 - RNA, 22 nt, Human
uacacacaugcauuugccuuau

SEQ ID NO: 148761 - RNA, 22 nt, Human
ucccagccuggacccugccagu

SEQ ID NO: 148762 - RNA, 22 nt, Human
ugcacaggaggcuguggagaag

SEQ ID NO: 148763 - RNA, 22 nt, Human
ccaccccaaaugaagaccucuc

SEQ ID NO: 148764 - RNA, 22 nt, Human
uccuggcaaagauguugguguu

SEQ ID NO: 148765 - RNA, 22 nt, Human
uggaaagaggaagugcccagca

SEQ ID NO: 148766 - RNA, 22 nt, Human
ggcccagcgaggccaccuacag

SEQ ID NO: 148767 - RNA, 22 nt, Human
ccagcccugccagagagagcug

SEQ ID NO: 148768 - RNA, 22 nt, Human
acacucuguaaugucacacucc

SEQ ID NO: 148769 - RNA, 22 nt, Human
aggaaagauggaaggaggauaa

SEQ ID NO: 148770 - RNA, 22 nt, Human
uggcagggugccaguugcgagu

SEQ ID NO: 148771 - RNA, 22 nt, Human
uacacaucucugucaguaguga

SEQ ID NO: 148772 - RNA, 22 nt, Human
acuggcagaacuggugauuguc

SEQ ID NO: 148773 - RNA, 22 nt, Human
uuccagccaugguuucccuaug

SEQ ID NO: 148774 - RNA, 22 nt, Human
cacuguccaauagauacauaau

SEQ ID NO: 148775 - RNA, 22 nt, Human
agaaagaggaugcagaucucau

SEQ ID NO: 148776 - RNA, 23 nt, Human
ugagggacaugguggcuucugag

SEQ ID NO: 148777 - RNA, 22 nt, Human
guccucugcccaggucaagguu

SEQ ID NO: 148778 - RNA, 22 nt, Human
aaagaucacgucccaggacucg

SEQ ID NO: 148779 - RNA, 22 nt, Human
cccagccucuguuugcuccucu

SEQ ID NO: 148780 - RNA, 22 nt, Human
aacaaaagccgaaguagguguc

SEQ ID NO: 148781 - RNA, 22 nt, Human
cgcauacauagaaacacacaga

SEQ ID NO: 148782 - RNA, 22 nt, Human
uggcaguggcucagagugcaga

SEQ ID NO: 148783 - RNA, 22 nt, Human
gccacagguacuaugggagaga

SEQ ID NO: 148784 - RNA, 22 nt, Human
cuugggaaugcuaacagaugac

SEQ ID NO: 148785 - RNA, 22 nt, Human
cugagcagugguucuugagcgc

SEQ ID NO: 148786 - RNA, 21 nt, Human
ccuagccucuuacccagcuuu

SEQ ID NO: 148787 - RNA, 22 nt, Human
ccaggccucuggcugcuuaguc

SEQ ID NO: 148788 - RNA, 22 nt, Human
ugcagagagaccccugggccag

SEQ ID NO: 148789 - RNA, 22 nt, Human
ucuggcagcagcaucaguggcu

SEQ ID NO: 148790 - RNA, 22 nt, Human
cacagagacagaagcacuuaug

SEQ ID NO: 148791 - RNA, 22 nt, Human
gcuggcaggauaacuucuaagc

SEQ ID NO: 148792 - RNA, 22 nt, Human
uacacagacucuucaauucaga

SEQ ID NO: 148793 - RNA, 22 nt, Human
ccuggcagcccagagcgccgcu

SEQ ID NO: 148794 - RNA, 22 nt, Human
cuccaggccauggcugcggagg

SEQ ID NO: 148795 - RNA, 17 nt, Human
uuaagguggaucagcac

SEQ ID NO: 148796 - RNA, 22 nt, Human
cuuccucuagccuaguaaugcc

SEQ ID NO: 148797 - RNA, 22 nt, Human
ucuggcagguucccauguuaug

SEQ ID NO: 148798 - RNA, 22 nt, Human
acuggcagagguuggacaccau

SEQ ID NO: 148799 - RNA, 22 nt, Human
acagguggaggcuuuaggaggu

SEQ ID NO: 148800 - RNA, 22 nt, Human
caucacagguccugaugacauu

SEQ ID NO: 148801 - RNA, 22 nt, Human
ucacacaugcuaagccagagau

SEQ ID NO: 148802 - RNA, 22 nt, Human
acaggugguagaguggaaagag

SEQ ID NO: 148803 - RNA, 22 nt, Human
gagaaagauuguccuucagggg

SEQ ID NO: 148804 - RNA, 22 nt, Human
cccuuccuugauuuuaacugga

SEQ ID NO: 148805 - RNA, 22 nt, Human
ucccacccccuccaaggaggaa

SEQ ID NO: 148806 - RNA, 22 nt, Human
uggcagagaacacggcugaucu

SEQ ID NO: 148807 - RNA, 22 nt, Human
ccuggcagcgugccgagcugcg

SEQ ID NO: 148808 - RNA, 22 nt, Human
uggcagugguaccggcucucag

SEQ ID NO: 148809 - RNA, 22 nt, Human
cuggcaggagcauucacagagg

SEQ ID NO: 148810 - RNA, 22 nt, Human
uaaaggguagguuuuacuguaa

SEQ ID NO: 148811 - RNA, 22 nt, Human
cacugucccuguuuccuggaaa

SEQ ID NO: 148812 - RNA, 22 nt, Human
guccucugggcagcugccccac

SEQ ID NO: 148813 - RNA, 22 nt, Human
gggccccuugcugcucugcugg

SEQ ID NO: 148814 - RNA, 22 nt, Human
uuccuggccuaagguaggugac

SEQ ID NO: 148815 - RNA, 22 nt, Human
uacacagauaugugaucaauca

SEQ ID NO: 148816 - RNA, 22 nt, Human
cagcccaggucucucuuccagu

SEQ ID NO: 148817 - RNA, 21 nt, Human
ucacguggucacaugagcuuu

SEQ ID NO: 148818 - RNA, 20 nt, Human
ucacacaugguaagcuauga

SEQ ID NO: 148819 - RNA, 22 nt, Human
ggugccagugggucucaggaua

SEQ ID NO: 148820 - RNA, 22 nt, Human
cacacacuguuaauguaggagu

SEQ ID NO: 148821 - RNA, 22 nt, Human
aggcugcuucagcugcagggag

SEQ ID NO: 148822 - RNA, 22 nt, Human
gcuggcagguaaagccccgggg

SEQ ID NO: 148823 - RNA, 22 nt, Human
uauuacagaaucaggcauaacu

SEQ ID NO: 148824 - RNA, 16 nt, Human
gcacacacaucaauga

SEQ ID NO: 148825 - RNA, 22 nt, Human
ggagcugaggcugaggccucac

SEQ ID NO: 148826 - RNA, 22 nt, Human
cacacagaugguaagggaggga

SEQ ID NO: 148827 - RNA, 22 nt, Human
cacaauuuuaauacacagucaa

SEQ ID NO: 148828 - RNA, 22 nt, Human
ucuggcaguaauaggggagaga

SEQ ID NO: 148829 - RNA, 20 nt, Human
gagucacagaagaagcugaa

SEQ ID NO: 148830 - RNA, 22 nt, Human
uagacacaucuucauccacaau

SEQ ID NO: 148831 - RNA, 22 nt, Human
ugggagaaacugucucucccac

SEQ ID NO: 148832 - RNA, 21 nt, Human
ucuggcaggaagacggauggg

SEQ ID NO: 148833 - RNA, 22 nt, Human
cuccuggcaggcugagugaaau

SEQ ID NO: 148834 - RNA, 22 nt, Human
acaugacuuuucucuuccagag

SEQ ID NO: 148835 - RNA, 22 nt, Human
ugcagagagauccucaggguuu

SEQ ID NO: 148836 - RNA, 22 nt, Human
aagagagagugcgcucacagaa

SEQ ID NO: 148837 - RNA, 21 nt, Human
aaagagcccgcugagagguuc

SEQ ID NO: 148838 - RNA, 21 nt, Human
acacacugaguuuuccacugu

SEQ ID NO: 148839 - RNA, 22 nt, Human
auccccacgauauagccaaagc

SEQ ID NO: 148840 - RNA, 18 nt, Human
ggcagggaaaagauaggg

SEQ ID NO: 148841 - RNA, 22 nt, Human
guccucuggccuuucccaggac

SEQ ID NO: 148842 - RNA, 22 nt, Human
cccagccuuccacccuggacua

SEQ ID NO: 148843 - RNA, 22 nt, Human
auaauggccgggggcugaaugc

SEQ ID NO: 148844 - RNA, 22 nt, Human
aacacauauuuauauaugcaca

SEQ ID NO: 148845 - RNA, 22 nt, Human
ggcagagguagcuggaaccagg

SEQ ID NO: 148846 - RNA, 22 nt, Human
cacacacaguuuuguauucugu

SEQ ID NO: 148847 - RNA, 22 nt, Human
uccugagcugccgcaucagcag

SEQ ID NO: 148848 - RNA, 21 nt, Human
gggcagaggggccuccugggu

SEQ ID NO: 148849 - RNA, 22 nt, Human
ccugccuucagcccugaagucu

SEQ ID NO: 148850 - RNA, 22 nt, Human
aggaagaaccuaagaaagucuc

SEQ ID NO: 148851 - RNA, 22 nt, Human
uacacaucccagacucccagga

SEQ ID NO: 148852 - RNA, 22 nt, Human
ccuggcagcagcacaugccuuc

SEQ ID NO: 148853 - RNA, 22 nt, Human
ucacauacugaaaguccaguga

SEQ ID NO: 148854 - RNA, 21 nt, Human
agaugcugaugcugcaggucc

SEQ ID NO: 148855 - RNA, 22 nt, Human
gcuggcagccaagugaagaggg

SEQ ID NO: 148856 - RNA, 22 nt, Human
uagauacaggcucucugagccu

SEQ ID NO: 148857 - RNA, 22 nt, Human
ccagcccuuagauaaaccuggc

SEQ ID NO: 148858 - RNA, 22 nt, Human
auggccugcagugcugccacag

SEQ ID NO: 148859 - RNA, 22 nt, Human
ucuccugggaggacaaggaagg

SEQ ID NO: 148860 - RNA, 22 nt, Human
cauuacaaccccaaauuacaaa

SEQ ID NO: 148861 - RNA, 22 nt, Human
uuguaaacugcugcaggagugc

SEQ ID NO: 148862 - RNA, 22 nt, Human
ucuugggauagugucucauggc

SEQ ID NO: 148863 - RNA, 22 nt, Human
guccuggcaccucacuggcuac

SEQ ID NO: 148864 - RNA, 22 nt, Human
uccuggcauugugcagggugug

SEQ ID NO: 148865 - RNA, 21 nt, Human
uccacccucucugcucccagu

SEQ ID NO: 148866 - RNA, 22 nt, Human
cccacacauuuuucacuuaccg

SEQ ID NO: 148867 - RNA, 22 nt, Human
ggcagugagaggucuccugguc

SEQ ID NO: 148868 - RNA, 22 nt, Human
acagguggccccgagggagugg

SEQ ID NO: 148869 - RNA, 22 nt, Human
ccucccuucaguagagcccaau

SEQ ID NO: 148870 - RNA, 22 nt, Human
ggccucucaugcccagagccaa

SEQ ID NO: 148871 - RNA, 22 nt, Human
ucccagccaggcucuaccacuu

SEQ ID NO: 148872 - RNA, 22 nt, Human
agguagggaagaaggcaugaaa

SEQ ID NO: 148873 - RNA, 20 nt, Human
cacaacuguccacaugcucc

SEQ ID NO: 148874 - RNA, 22 nt, Human
cugccugcuuaccaugcaucag

SEQ ID NO: 148875 - RNA, 22 nt, Human
ugcagagaagaggacaguucua

SEQ ID NO: 148876 - RNA, 20 nt, Human
auacacaugcagacagaugc

SEQ ID NO: 148877 - RNA, 22 nt, Human
acacacaugcaugcuugccauu

SEQ ID NO: 148878 - RNA, 22 nt, Human
uguggggaagaguaugacuugg

SEQ ID NO: 148879 - RNA, 20 nt, Human
gauacacagcacagagggcc

SEQ ID NO: 148880 - RNA, 22 nt, Human
acagguggggcacuuggagccu

SEQ ID NO: 148881 - RNA, 22 nt, Human
acuggcagguccaucgcccuuu

SEQ ID NO: 148882 - RNA, 22 nt, Human
cacacacucuuccuggcaccua

SEQ ID NO: 148883 - RNA, 22 nt, Human
cucuccagccuuuagcccacgc

SEQ ID NO: 148884 - RNA, 22 nt, Human
gcacacaguauaugcucauuaa

SEQ ID NO: 148885 - RNA, 22 nt, Human
cacccacauggaaauucacagu

SEQ ID NO: 148886 - RNA, 22 nt, Human
cagcccaaagccccaggcuaga

SEQ ID NO: 148887 - RNA, 22 nt, Human
aggccacaguacuuugcagacc

SEQ ID NO: 148888 - RNA, 22 nt, Human
uccugugccaucucuagagacu

SEQ ID NO: 148889 - RNA, 19 nt, Human
uccuggcauuuguaggaaa

SEQ ID NO: 148890 - RNA, 22 nt, Human
cugagagaucaagccacaggau

SEQ ID NO: 148891 - RNA, 21 nt, Human
acacacucugagucuucuauu

SEQ ID NO: 148892 - RNA, 22 nt, Human
uccccacaucucugcaucaggc

SEQ ID NO: 148893 - RNA, 22 nt, Human
ucccacacagcccgcucaccgg

SEQ ID NO: 148894 - RNA, 22 nt, Human
ccucucccgggugccgcugggc

SEQ ID NO: 148895 - RNA, 22 nt, Human
ggaggacacuggcucugccuuc

SEQ ID NO: 148896 - RNA, 22 nt, Human
gcacacagcuagauuaccauuc

SEQ ID NO: 148897 - RNA, 22 nt, Human
uccaggcuugagaccaggcucu

SEQ ID NO: 148898 - RNA, 22 nt, Human
uuggaaaguuuuuacugaagac

SEQ ID NO: 148899 - RNA, 22 nt, Human
agcacaggaacauggagauggg

SEQ ID NO: 148900 - RNA, 22 nt, Human
uccuucccaggugucgccgccu

SEQ ID NO: 148901 - RNA, 22 nt, Human
cuggcaguauuaagagaaguga

SEQ ID NO: 148902 - RNA, 22 nt, Human
ucccuccuggccgucaccgcug

SEQ ID NO: 148903 - RNA, 22 nt, Human
guccucugucccuggggcacgg

SEQ ID NO: 148904 - RNA, 22 nt, Human
guccuggcugguucuguggggc

SEQ ID NO: 148905 - RNA, 22 nt, Human
uggccucugugggagcugagca

SEQ ID NO: 148906 - RNA, 22 nt, Human
aggcacaggaggugguaagaag

SEQ ID NO: 148907 - RNA, 22 nt, Human
uacacauccauguuuugacuuu

SEQ ID NO: 148908 - RNA, 22 nt, Human
gcacacaggcaguuuccagcca

SEQ ID NO: 148909 - RNA, 22 nt, Human
acauacacaugaauauauuuuu

SEQ ID NO: 148910 - RNA, 22 nt, Human
aaaagagugacugauaaguaua

SEQ ID NO: 148911 - RNA, 22 nt, Human
acuggcaguggcagcagaaaga

SEQ ID NO: 148912 - RNA, 22 nt, Human
ugccugacugcugccaccacua

SEQ ID NO: 148913 - RNA, 18 nt, Human
aggaaagaaaggcaggug

SEQ ID NO: 148914 - RNA, 22 nt, Human
acacaucaugccaaguuucacc

SEQ ID NO: 148915 - RNA, 22 nt, Human
aggaggcuguggagcacuccau

SEQ ID NO: 148916 - RNA, 22 nt, Human
ucuggcagagucagugcacaca

SEQ ID NO: 148917 - RNA, 22 nt, Human
ccuggcagguggcgcccucggc

SEQ ID NO: 148918 - RNA, 22 nt, Human
cucaccccacuaccccuuggug

SEQ ID NO: 148919 - RNA, 22 nt, Human
acuggcaguuugagaaugcauu

SEQ ID NO: 148920 - RNA, 22 nt, Human
acacauacauggggaagaugag

SEQ ID NO: 148921 - RNA, 22 nt, Human
gauggccuggguccccuuccgg

SEQ ID NO: 148922 - RNA, 22 nt, Human
uucauugcaguucuucagguua

SEQ ID NO: 148923 - RNA, 22 nt, Human
gaggacucugggcguguauggg

SEQ ID NO: 148924 - RNA, 22 nt, Human
ccuggcagacagcacugaagcu

SEQ ID NO: 148925 - RNA, 17 nt, Human
ccauacugacauauuga

SEQ ID NO: 148926 - RNA, 22 nt, Human
acauacacaagcguacaugaac

SEQ ID NO: 148927 - RNA, 22 nt, Human
uucaguuccauuucaggugggu

SEQ ID NO: 148928 - RNA, 22 nt, Human
gacacauaugcguauaguuuag

SEQ ID NO: 148929 - RNA, 21 nt, Human
gggagggauggaaaugauguu

SEQ ID NO: 148930 - RNA, 22 nt, Human
uccucuccaugucucacgccac

SEQ ID NO: 148931 - RNA, 22 nt, Human
ccuggcaguggugaagaagagg

SEQ ID NO: 148932 - RNA, 22 nt, Human
uggccucugggaaagcagauuc

SEQ ID NO: 148933 - RNA, 22 nt, Human
ggagaagaggagcuggaagccu

SEQ ID NO: 148934 - RNA, 22 nt, Human
cacacauuucagaugcuacaau

SEQ ID NO: 148935 - RNA, 22 nt, Human
ucaggcccuucucccaggacuc

SEQ ID NO: 148936 - RNA, 22 nt, Human
ucuggcaguuccuuguugauau

SEQ ID NO: 148937 - RNA, 21 nt, Human
ugacugaggcuucuucacaca

SEQ ID NO: 148938 - RNA, 22 nt, Human
gaagagaaaggcaaggaguuuu

SEQ ID NO: 148939 - RNA, 17 nt, Human
gcaucacagauaacacg

SEQ ID NO: 148940 - RNA, 22 nt, Human
guggcagucgcugacagauaca

SEQ ID NO: 148941 - RNA, 22 nt, Human
uuccaggcuucucuggggcguc

SEQ ID NO: 148942 - RNA, 22 nt, Human
gcuggcagcuggaaguugggcu

SEQ ID NO: 148943 - RNA, 22 nt, Human
uaagaacaguagaacaguaggu

SEQ ID NO: 148944 - RNA, 17 nt, Human
gccuucucugcccucac

SEQ ID NO: 148945 - RNA, 22 nt, Human
gauggccuuguuuucucccuuc

SEQ ID NO: 148946 - RNA, 20 nt, Human
gcuccaggucagagaggacg

SEQ ID NO: 148947 - RNA, 22 nt, Human
uacacagauuucaguaucauca

SEQ ID NO: 148948 - RNA, 22 nt, Human
cauacauuuauacacaucuaug

SEQ ID NO: 148949 - RNA, 22 nt, Human
gacacagagcucacagucuccu

SEQ ID NO: 148950 - RNA, 22 nt, Human
gcuggcagagacaagaagacua

SEQ ID NO: 148951 - RNA, 22 nt, Human
ggagcugaguucuucagccggg

SEQ ID NO: 148952 - RNA, 19 nt, Human
agaggccucagcagcuggc

SEQ ID NO: 148953 - RNA, 22 nt, Human
acacucacccucccacugccug

SEQ ID NO: 148954 - RNA, 20 nt, Human
cccagccccuaccuguugcc

SEQ ID NO: 148955 - RNA, 22 nt, Human
gacacuucaccuuucccagccu

SEQ ID NO: 148956 - RNA, 22 nt, Human
uuccugccccugagagcuccca

SEQ ID NO: 148957 - RNA, 22 nt, Human
gccuggcacucaaucaucugcu

SEQ ID NO: 148958 - RNA, 20 nt, Human
agggcugagaagggacuagc

SEQ ID NO: 148959 - RNA, 22 nt, Human
acuggcagagacccugauggcc

SEQ ID NO: 148960 - RNA, 22 nt, Human
uacacaacugacaaccauucug

SEQ ID NO: 148961 - RNA, 22 nt, Human
ucuggcagcucuccucggcgga

SEQ ID NO: 148962 - RNA, 22 nt, Human
gaggcuguuaggagggacucug

SEQ ID NO: 148963 - RNA, 22 nt, Human
ccuggcagcuaagugcuuugag

SEQ ID NO: 148964 - RNA, 22 nt, Human
acacauuugcauaauaccucau

SEQ ID NO: 148965 - RNA, 22 nt, Human
gaggcacauauauacagagccc

SEQ ID NO: 148966 - RNA, 22 nt, Human
guccucuggugaaagcauuccc

SEQ ID NO: 148967 - RNA, 22 nt, Human
uuccaggcuauccggugaaggg

SEQ ID NO: 148968 - RNA, 22 nt, Human
agggagacacaugaggaaguca

SEQ ID NO: 148969 - RNA, 22 nt, Human
ucccagccuuccagucugguuu

SEQ ID NO: 148970 - RNA, 22 nt, Human
cuuggcaggguggaggaugcag

SEQ ID NO: 148971 - RNA, 22 nt, Human
ggagacucggguucuagccuug

SEQ ID NO: 148972 - RNA, 22 nt, Human
guccucugggagccuugagccu

SEQ ID NO: 148973 - RNA, 22 nt, Human
gacacagagggcaccagauaug

SEQ ID NO: 148974 - RNA, 22 nt, Human
uggcacucacucucagagucug

SEQ ID NO: 148975 - RNA, 23 nt, Human
guccucuggagagaaaggcagua

SEQ ID NO: 148976 - RNA, 22 nt, Human
caggagggcccgagacucuucc

SEQ ID NO: 148977 - RNA, 22 nt, Human
gccuggcaauggccucaggaag

SEQ ID NO: 148978 - RNA, 22 nt, Human
gcacaggaugauggguugaggg

SEQ ID NO: 148979 - RNA, 22 nt, Human
ucacacaugaguaaauacaggg

SEQ ID NO: 148980 - RNA, 22 nt, Human
aggacacacagaauacaaaucc

SEQ ID NO: 148981 - RNA, 22 nt, Human
agucuagggugggguccacagg

SEQ ID NO: 148982 - RNA, 22 nt, Human
cagacagagucuucccaucagu

SEQ ID NO: 148983 - RNA, 22 nt, Human
aaauuacagaucaccaaugcau

SEQ ID NO: 148984 - RNA, 22 nt, Human
uggcagagagagugcagucgac

SEQ ID NO: 148985 - RNA, 22 nt, Human
ugggacucacucuuuuggccag

SEQ ID NO: 148986 - RNA, 22 nt, Human
ucuggcagcaagucuguuucuc

SEQ ID NO: 148987 - RNA, 22 nt, Human
ucccaccccuugacucuuuaag

SEQ ID NO: 148988 - RNA, 22 nt, Human
agggcugacaaauggcagugac

SEQ ID NO: 148989 - RNA, 22 nt, Human
ggcaagagggcagauggagugc

SEQ ID NO: 148990 - RNA, 22 nt, Human
gcaguguuuguguucucacaug

SEQ ID NO: 148991 - RNA, 22 nt, Human
gccucaggccgcccugcugcuc

SEQ ID NO: 148992 - RNA, 22 nt, Human
gaaagacuuccuuugagaguac

SEQ ID NO: 148993 - RNA, 22 nt, Human
agcccaggucuggcccagccug

SEQ ID NO: 148994 - RNA, 22 nt, Human
agggcugacagugaggagucaa

SEQ ID NO: 148995 - RNA, 22 nt, Human
acacacuguaaggacuaucacu

SEQ ID NO: 148996 - RNA, 22 nt, Human
gaggagcuguucccucaccucu

SEQ ID NO: 148997 - RNA, 22 nt, Human
ucuggcagugauuucugugauc

SEQ ID NO: 148998 - RNA, 22 nt, Human
gggccccuuguaucucuggcuc

SEQ ID NO: 148999 - RNA, 22 nt, Human
uccugcagccacugcaggcaga

SEQ ID NO: 149000 - RNA, 22 nt, Human
caucacagaaauaaacauaccu

SEQ ID NO: 149001 - RNA, 22 nt, Human
guccacagagggcugggcaggc

SEQ ID NO: 149002 - RNA, 18 nt, Human
gccugcucugcucucccc

SEQ ID NO: 149003 - RNA, 22 nt, Human
cuggcaugaaauggcaucucau

SEQ ID NO: 149004 - RNA, 22 nt, Human
cuccuggcucgcccccagcuga

SEQ ID NO: 149005 - RNA, 22 nt, Human
gccccacagccugcggucucag

SEQ ID NO: 149006 - RNA, 22 nt, Human
ccuucuucuguguggcccaaga

SEQ ID NO: 149007 - RNA, 19 nt, Human
guccuggcgccgccacacc

SEQ ID NO: 149008 - RNA, 18 nt, Human
uccuggcagucagagagg

SEQ ID NO: 149009 - RNA, 22 nt, Human
ccaucacaguccccaucgugau

SEQ ID NO: 149010 - RNA, 22 nt, Human
ucuggcagggguucugcacuug

SEQ ID NO: 149011 - RNA, 22 nt, Human
aagagcacuaacagagcugaua

SEQ ID NO: 149012 - RNA, 21 nt, Human
acauacauaccuuaccaccuu

SEQ ID NO: 149013 - RNA, 22 nt, Human
acaucccacagaaacauacaua

SEQ ID NO: 149014 - RNA, 22 nt, Human
uucccacauucuuuacauucau

SEQ ID NO: 149015 - RNA, 16 nt, Human
ucacauacuuccuugc

SEQ ID NO: 149016 - RNA, 22 nt, Human
aggaagaacagauaauggacgc

SEQ ID NO: 149017 - RNA, 22 nt, Human
guacacacuauguauuguacac

SEQ ID NO: 149018 - RNA, 22 nt, Human
acuggcagcagcagcccuuggg

SEQ ID NO: 149019 - RNA, 22 nt, Human
ccuggcugguggcagcgacaag

SEQ ID NO: 149020 - RNA, 21 nt, Human
guacacacagguggaugggcu

SEQ ID NO: 149021 - RNA, 22 nt, Dengue virus
gcuuccuccauuucagcugcca

SEQ ID NO: 149022 - RNA, 22 nt, Human
uuucauaauacuguacaugaaa

SEQ ID NO: 149023 - RNA, 22 nt, Human
guuucacagucugcagaauuuu

SEQ ID NO: 149024 - RNA, 22 nt, Human
ugcaggcucacccuggagcuga

SEQ ID NO: 149025 - RNA, 22 nt, Human
guguaugagccuccagcugggc

SEQ ID NO: 149026 - RNA, 22 nt, Human
gauaauauuagaagauacaaau

SEQ ID NO: 149027 - RNA, 22 nt, Human
acacaucagaaauaugaaugag

SEQ ID NO: 149028 - RNA, 20 nt, Human
uuccacaucuuugcacaugc

SEQ ID NO: 149029 - RNA, 22 nt, Human
ugcaggcuuuagccccauggcu

SEQ ID NO: 149030 - RNA, 22 nt, Human
uuugcaauuugugcugcaaaug

SEQ ID NO: 149031 - RNA, 22 nt, Human
cugcaggacgaccgccucaucu

SEQ ID NO: 149032 - RNA, 22 nt, Human
cuggggacuugcagacacaauu

SEQ ID NO: 149033 - RNA, 22 nt, Human
cugccugcuuaccaugcaucag

SEQ ID NO: 149034 - RNA, 17 nt, Human
aggcauggucuggggug

SEQ ID NO: 149035 - RNA, 22 nt, Human
gccuccuguuaugccaugugcc

SEQ ID NO: 149036 - RNA, 22 nt, Human
cuucugggcagaaguuuugaga

SEQ ID NO: 149037 - RNA, 22 nt, Human
cuucugggcauucagcugcaca

SEQ ID NO: 149038 - RNA, 22 nt, Human
ugggcucagucugcuugguccu

SEQ ID NO: 149039 - RNA, 20 nt, Human
ccccacacuauugagcacuu

SEQ ID NO: 149040 - RNA, 22 nt, Human
ugcaggcuccaugaggacaggc

SEQ ID NO: 149041 - RNA, 22 nt, Human
cccacacauuuuucacuuaccg

SEQ ID NO: 149042 - RNA, 22 nt, Human
gcacacaugcaugcacaggagu

SEQ ID NO: 149043 - RNA, 22 nt, Human
ugugaagauuuggcaugcagaa

SEQ ID NO: 149044 - RNA, 22 nt, Human
ugcagagaaaacuccuggguac

SEQ ID NO: 149045 - RNA, 22 nt, Human
gccacauagaggaggauauuaa

SEQ ID NO: 149046 - RNA, 22 nt, Human
aguaugaagaugaugaaaaaua

SEQ ID NO: 149047 - RNA, 22 nt, Human
cuguaugaggaucagacuggac

SEQ ID NO: 149048 - RNA, 22 nt, Human
uguaaacauaccagagccaagu

SEQ ID NO: 149049 - RNA, 22 nt, Human
aagcuuccugaaugcucauuua

SEQ ID NO: 149050 - RNA, 22 nt, Human
cagccucuugcacuuugaaggc

SEQ ID NO: 149051 - RNA, 16 nt, Human
uguaugaacgucucca

SEQ ID NO: 149052 - RNA, 22 nt, Human
ucaggcucugagcugaugcuaa

SEQ ID NO: 149053 - RNA, 22 nt, Human
uggggaccagauuagaccaugg

SEQ ID NO: 149054 - RNA, 22 nt, Human
ucuguucauguugggcuuuucc

SEQ ID NO: 149055 - RNA, 22 nt, Human
ggcaggcuccagagcccucucc

SEQ ID NO: 149056 - RNA, 22 nt, Human
aaauuucaguuaccuuuacguu

SEQ ID NO: 149057 - RNA, 22 nt, Human
gccaagcuguuuuucagagacg

SEQ ID NO: 149058 - RNA, 22 nt, Human
uuucacauggaagcucucgaga

SEQ ID NO: 149059 - RNA, 22 nt, Human
cuguggcucauucuugguggca

SEQ ID NO: 149060 - RNA, 22 nt, Human
ucugggcugcuaugaggcagag

SEQ ID NO: 149061 - RNA, 22 nt, Human
uacauuccuucguuuagagauu

SEQ ID NO: 149062 - RNA, 22 nt, Human
aaucuucacagagaaaauuagg

SEQ ID NO: 149063 - RNA, 22 nt, Human
uccaggccauugacugcauccu

SEQ ID NO: 149064 - RNA, 22 nt, Human
cagcccucaucucagcuucuuu

SEQ ID NO: 149065 - RNA, 22 nt, Human
guggagcaggacuagcugagaa

SEQ ID NO: 149066 - RNA, 22 nt, Human
auuuaaauuuucugauggagag

SEQ ID NO: 149067 - RNA, 22 nt, Human
cuggggacucauucagagcaua

SEQ ID NO: 149068 - RNA, 22 nt, Human
ugcaggcuggcagauaucucau

SEQ ID NO: 149069 - RNA, 22 nt, Human
cacccacauggaaauucacagu

SEQ ID NO: 149070 - RNA, 22 nt, Human
uuccaaguugagcgauuuuccu

SEQ ID NO: 149071 - RNA, 20 nt, Human
aacuuguucuaccuguuuca

SEQ ID NO: 149072 - RNA, 22 nt, Human
ggcccaaacggguccagugaaa

SEQ ID NO: 149073 - RNA, 22 nt, Human
cugcagccuccuccagcuacgu

SEQ ID NO: 149074 - RNA, 22 nt, Human
auucacaugugcuucuuaucac

SEQ ID NO: 149075 - RNA, 22 nt, Human
aacuuucaggcaaugaauauuu

SEQ ID NO: 149076 - RNA, 22 nt, Human
auguaauaggguaacauaacau

SEQ ID NO: 149077 - RNA, 19 nt, Human
cuccaagugccaaggacag

SEQ ID NO: 149078 - RNA, 22 nt, Human
uuuaccaguguuaaacaccagc

SEQ ID NO: 149079 - RNA, 21 nt, Human
ucuguucaaggaacuacggau

SEQ ID NO: 149080 - RNA, 22 nt, Human
gaugaagccccaguguaaguaa

SEQ ID NO: 149081 - RNA, 20 nt, Human
ccugggcuccaggagccccg

SEQ ID NO: 149082 - RNA, 22 nt, Human
agcaggcugaugggcaugcuug

SEQ ID NO: 149083 - RNA, 22 nt, Human
gugggcuuugcuggauccuucc

SEQ ID NO: 149084 - RNA, 21 nt, Human
uggaccuguccuucucgcugu

SEQ ID NO: 149085 - RNA, 17 nt, Human
uccaggcagcaacugag

SEQ ID NO: 149086 - RNA, 22 nt, Human
gagggugucugcguaacuggca

SEQ ID NO: 149087 - RNA, 22 nt, Human
gaaauauuguacuggagauguu

SEQ ID NO: 149088 - RNA, 22 nt, Human
ccacuguaguuaugaugaaguu

SEQ ID NO: 149089 - RNA, 22 nt, Human
uuccaaguccagccaggccaaa

SEQ ID NO: 149090 - RNA, 22 nt, Human
uuugaaucugauauggcagcau

SEQ ID NO: 149091 - RNA, 22 nt, Human
uacacacagaggccaugggauu

SEQ ID NO: 149092 - RNA, 22 nt, Human
agacaugucaccaauucuuacu

SEQ ID NO: 149093 - RNA, 22 nt, Human
gccaaaguaccuagcccucugc

SEQ ID NO: 149094 - RNA, 22 nt, Human
gccuggcacucaaucaucugcu

SEQ ID NO: 149095 - RNA, 22 nt, Human
gcaguguuuguguucucacaug

SEQ ID NO: 149096 - RNA, 22 nt, Human
ucucuuucuauugcaccaugcu

SEQ ID NO: 149097 - RNA, 22 nt, Human
uggcagagaacacacaugauuc

SEQ ID NO: 149098 - RNA, 22 nt, Human
gguggccaggccagcucuggcc

SEQ ID NO: 149099 - RNA, 22 nt, Human
auuuggaaacaauuauauucuu

SEQ ID NO: 149100 - RNA, 22 nt, Human
ccugggcuuucaaaaccagccu

SEQ ID NO: 149101 - RNA, 22 nt, Human
gguaugaauucacuacuuccaa

SEQ ID NO: 149102 - RNA, 22 nt, Human
uccaggcuuuuucaugcugucu

SEQ ID NO: 149103 - RNA, 22 nt, Human
uuggagguuugaaaauaugugu

SEQ ID NO: 149104 - RNA, 22 nt, Human
ugcacagcuggcucuccuuuuc

SEQ ID NO: 149105 - RNA, 22 nt, Human
uggccucugugggagcugagca

SEQ ID NO: 149106 - RNA, 22 nt, Human
uaggaagcugagcagcauuccu

SEQ ID NO: 149107 - RNA, 22 nt, Human
gcuucugggcaccugaacagga

SEQ ID NO: 149108 - RNA, 22 nt, Human
uguaaagguaggugcaaaauga

SEQ ID NO: 149109 - RNA, 22 nt, Human
cccugccucugaagcugcucag

SEQ ID NO: 149110 - RNA, 22 nt, Human
uucauagugauuguucagauag

SEQ ID NO: 149111 - RNA, 22 nt, Human
auuccacacaguaauacucaau

SEQ ID NO: 149112 - RNA, 22 nt, Human
aguaugaaucuuucagaccgua

SEQ ID NO: 149113 - RNA, 22 nt, Human
ggcaggcugcuugggucauguc

SEQ ID NO: 149114 - RNA, 22 nt, Human
gaaauuuauuaucuacaucauu

SEQ ID NO: 149115 - RNA, 22 nt, Human
ucacauacacuaggauauuuuu

SEQ ID NO: 149116 - RNA, 22 nt, Human
cucagccccaauucuccccauu

SEQ ID NO: 149117 - RNA, 23 nt, Human
uuccaagugcuuuacuuaauccu

SEQ ID NO: 149118 - RNA, 22 nt, Human
acacaucuuagacugaaauaug

SEQ ID NO: 149119 - RNA, 22 nt, Human
gcuguucacagacucugcucug

SEQ ID NO: 149120 - RNA, 20 nt, Human
ucacuguaauugccuacauu

SEQ ID NO: 149121 - RNA, 22 nt, Human
ggcaggcuuucagcaucaaguc

SEQ ID NO: 149122 - RNA, 22 nt, Human
cauuuugugcuagacacuaugg

SEQ ID NO: 149123 - RNA, 22 nt, Human
aggcuuuguaccuggggucuua

SEQ ID NO: 149124 - RNA, 22 nt, Human
ccuguucaagggaugauugacc

SEQ ID NO: 149125 - RNA, 22 nt, Human
cauauuuauagaucuggcauuu

SEQ ID NO: 149126 - RNA, 19 nt, Human
uccuggcauuuguaggaaa

SEQ ID NO: 149127 - RNA, 23 nt, Human
ucugggcugagacuuggaagguc

SEQ ID NO: 149128 - RNA, 22 nt, Human
aggaggcugggcacaguggccu

SEQ ID NO: 149129 - RNA, 22 nt, Human
cucccaagcugugcugaacugu

SEQ ID NO: 149130 - RNA, 22 nt, Human
cccagccucuguuugcuccucu

SEQ ID NO: 149131 - RNA, 22 nt, Human
cguguggucccggcaaggcaag

SEQ ID NO: 149132 - RNA, 22 nt, Human
ggcuuugggcccucaagucucc

SEQ ID NO: 149133 - RNA, 22 nt, Human
gggcugacaccacccaggcgca

SEQ ID NO: 149134 - RNA, 22 nt, Human
gaccugccugagcugccucugc

SEQ ID NO: 149135 - RNA, 22 nt, Human
ugaagccaaucugccaggcaga

SEQ ID NO: 149136 - RNA, 22 nt, Human
uccaggcucuaggcugcucucc

SEQ ID NO: 149137 - RNA, 22 nt, Human
aggcuggauuuauggggacuuc

SEQ ID NO: 149138 - RNA, 22 nt, Human
agcaggcuccaggcuggccauc

SEQ ID NO: 149139 - RNA, 22 nt, Human
ccaggcugggcggggaaccugg

SEQ ID NO: 149140 - RNA, 22 nt, Human
aguguggcaggaaugacuagaa

SEQ ID NO: 149141 - RNA, 22 nt, Human
uuccaggauggcaauaaugaau

SEQ ID NO: 149142 - RNA, 22 nt, Human
cuggggaccgagcaagcucugg

SEQ ID NO: 149143 - RNA, 19 nt, Human
gucuucugaauguggcugc

SEQ ID NO: 149144 - RNA, 22 nt, Human
auagggccuaaaaaguauugcu

SEQ ID NO: 149145 - RNA, 18 nt, Human
acacacacaccuguguau

SEQ ID NO: 149146 - RNA, 22 nt, Human
acacucuguaaugucacacucc

SEQ ID NO: 149147 - RNA, 22 nt, Human
gccugcaguucugugcuaggca

SEQ ID NO: 149148 - RNA, 22 nt, Human
ugggcugaguggcagccagagu

SEQ ID NO: 149149 - RNA, 23 nt, Human
aguaugaauucauuguuuuaguu

SEQ ID NO: 149150 - RNA, 20 nt, Human
ucuggcaggugaacgagcug

SEQ ID NO: 149151 - RNA, 22 nt, Human
uuccagcccgcgacuuguucag

SEQ ID NO: 149152 - RNA, 22 nt, Human
accuggagaaagccucucccug

SEQ ID NO: 149153 - RNA, 22 nt, Human
ucuuugaaaagggagauagaaa

SEQ ID NO: 149154 - RNA, 22 nt, Human
cagggggugcaggcccugugac

SEQ ID NO: 149155 - RNA, 22 nt, Human
ugggcuucauaauugguccuag

SEQ ID NO: 149156 - RNA, 22 nt, Human
gcugggcucugucaugccuucc

SEQ ID NO: 149157 - RNA, 20 nt, Human
gagucacagaagaagcugaa

SEQ ID NO: 149158 - RNA, 22 nt, Human
agacacagcugcaggagguggg

SEQ ID NO: 149159 - RNA, 22 nt, Human
cccagccuuccacccuggacua

SEQ ID NO: 149160 - RNA, 22 nt, Human
gcuggcagucccaucagcuggg

SEQ ID NO: 149161 - RNA, 22 nt, Human
uucaugaaaguguaucuugugg

SEQ ID NO: 149162 - RNA, 22 nt, Human
cagguuggucggcaaguacaca

SEQ ID NO: 149163 - RNA, 22 nt, Human
uggcagugggaauggacaaaca

SEQ ID NO: 149164 - RNA, 22 nt, Human
gcuggcagguccaagauagagc

SEQ ID NO: 149165 - RNA, 22 nt, Human
guauucauauuaaacauaucaa

SEQ ID NO: 149166 - RNA, 22 nt, Human
uggcaguggauaggggagcggu

SEQ ID NO: 149167 - RNA, 22 nt, Human
uccaagcuugcuuuagccacag

SEQ ID NO: 149168 - RNA, 22 nt, Human
aauggcagaggcaaagauggua

SEQ ID NO: 149169 - RNA, 22 nt, Human
uccccaccuaagauacccaucu

SEQ ID NO: 149170 - RNA, 22 nt, Human
ucccacccauccugcaucucuu

SEQ ID NO: 149171 - RNA, 22 nt, Human
agggcccaggacagcaucaggg

SEQ ID NO: 149172 - RNA, 22 nt, Human
uuucuguaaggacuuaaugcaa

SEQ ID NO: 149173 - RNA, 22 nt, Human
acaggugguagaguggaaagag

SEQ ID NO: 149174 - RNA, 22 nt, Human
uugggaagaaacauguccauca

SEQ ID NO: 149175 - RNA, 22 nt, Human
aguauucuggaauucuauguga

SEQ ID NO: 149176 - RNA, 20 nt, Human
auacacaugcagacagaugc

SEQ ID NO: 149177 - RNA, 22 nt, Human
uuccuggccccaccccuggaga

SEQ ID NO: 149178 - RNA, 23 nt, Human
cugcagagaacugagggacagcc

SEQ ID NO: 149179 - RNA, 22 nt, Human
ugggcugagaguaccuuauaaa

SEQ ID NO: 149180 - RNA, 22 nt, Human
aggcaguguguagcuggaagag

SEQ ID NO: 149181 - RNA, 22 nt, Human
ugcuucugaacucagcaugugg

SEQ ID NO: 149182 - RNA, 22 nt, Human
uccaagcuguauguuccuagag

SEQ ID NO: 149183 - RNA, 22 nt, Human
guucugggaagguggaccuguu

SEQ ID NO: 149184 - RNA, 22 nt, Human
uuuauuuaaagucguguguuaa

SEQ ID NO: 149185 - RNA, 22 nt, Human
cugggcuggauaauucuuugcu

SEQ ID NO: 149186 - RNA, 22 nt, Human
uccaaauucuagggccuugguu

SEQ ID NO: 149187 - RNA, 22 nt, Human
uccaagcucucuaugccaugau

SEQ ID NO: 149188 - RNA, 22 nt, Human
cuggcaguuggcauuggcaucu

SEQ ID NO: 149189 - RNA, 22 nt, Human
uguaggcugaagaugaagugga

SEQ ID NO: 149190 - RNA, 22 nt, Human
uauuccaagcacagcaacccag

SEQ ID NO: 149191 - RNA, 22 nt, Human
cccagcccacgguccugggugg

SEQ ID NO: 149192 - RNA, 21 nt, Human
uccccacauuucuaaacagac

SEQ ID NO: 149193 - RNA, 22 nt, Human
cagccaggauggagaacuguug

SEQ ID NO: 149194 - RNA, 22 nt, Human
gcuggcagcauuagacccuggg

SEQ ID NO: 149195 - RNA, 22 nt, Human
cccagccugugacagccguccu

SEQ ID NO: 149196 - RNA, 22 nt, Human
ccuggcugguggcagcgacaag

SEQ ID NO: 149197 - RNA, 18 nt, Human
ggccucagccuggccgga

SEQ ID NO: 149198 - RNA, 22 nt, Human
ucaggcucaaagggccggauga

SEQ ID NO: 149199 - RNA, 22 nt, Human
ugggcugaguguggaacuaguu

SEQ ID NO: 149200 - RNA, 22 nt, Human
auuccacagcuacaucaaucua

SEQ ID NO: 149201 - RNA, 22 nt, Human
cugggcuguucugccccugggu

SEQ ID NO: 149202 - RNA, 22 nt, Human
aacacagaucaaaauauuuccu

SEQ ID NO: 149203 - RNA, 17 nt, Human
ugaaacaccaagacugu

SEQ ID NO: 149204 - RNA, 22 nt, Human
cagaugaggggcauauaacaau

SEQ ID NO: 149205 - RNA, 22 nt, Human
cucucugggcccaguuggcacc

SEQ ID NO: 149206 - RNA, 22 nt, Human
ccuggcagcuccuccccggcgg

SEQ ID NO: 149207 - RNA, 22 nt, Human
cuugggcucugugggccuuagu

SEQ ID NO: 149208 - RNA, 22 nt, Human
ucccugcccucagugcacccgg

SEQ ID NO: 149209 - RNA, 22 nt, Human
uucaugaauggaaucaaugcuc

SEQ ID NO: 149210 - RNA, 22 nt, Human
gagccugaugaaacaggcagac

SEQ ID NO: 149211 - RNA, 22 nt, Human
ggcaggcuguucaccugcuuuu

SEQ ID NO: 149212 - RNA, 22 nt, Human
ggcugcagggcagcuggugugg

SEQ ID NO: 149213 - RNA, 22 nt, Human
ucacacacauaaucuaagauua

SEQ ID NO: 149214 - RNA, 22 nt, Human
uuccuggcauagagagggcaca

SEQ ID NO: 149215 - RNA, 22 nt, Human
auccaggcgaaugcagaaggcc

SEQ ID NO: 149216 - RNA, 22 nt, Human
ucuuuuucugcacacguguccc

SEQ ID NO: 149217 - RNA, 22 nt, Human
cuccugaggacuucuauugggu

SEQ ID NO: 149218 - RNA, 22 nt, Human
agagggugcuggagagacauug

SEQ ID NO: 149219 - RNA, 22 nt, Human
uggcagggccuaccccaauauc

SEQ ID NO: 149220 - RNA, 22 nt, Human
uggaaagagguagaggaucugg

SEQ ID NO: 149221 - RNA, 22 nt, Human
auaugaagaaucuaggauaggc

SEQ ID NO: 149222 - RNA, 22 nt, Human
ugcaggcucaccugccagggcc

SEQ ID NO: 149223 - RNA, 22 nt, Human
aaggccacacuugcuggccagc

SEQ ID NO: 149224 - RNA, 22 nt, Human
gcuggcaggauaacuucuaagc

SEQ ID NO: 149225 - RNA, 22 nt, Human
uggcgucucucauaaguaugug

SEQ ID NO: 149226 - RNA, 22 nt, Human
ccuguucaaguugcagggcugg

SEQ ID NO: 149227 - RNA, 22 nt, Human
gcuggcagggugguugagagag

SEQ ID NO: 149228 - RNA, 19 nt, Human
ugcuucuggaaugcaaggc

SEQ ID NO: 149229 - RNA, 22 nt, Human
ucuccaggccuuucccaucuua

SEQ ID NO: 149230 - RNA, 22 nt, Human
gggcugacaaucucuuuacuua

SEQ ID NO: 149231 - RNA, 22 nt, Human
acagcucuguugccagaucugc

SEQ ID NO: 149232 - RNA, 23 nt, Human
uugggcuggcucucgaugccucu

SEQ ID NO: 149233 - RNA, 22 nt, Human
ucugcagauuuaucagcagcug

SEQ ID NO: 149234 - RNA, 22 nt, Human
cccacacaaaucauggggagaa

SEQ ID NO: 149235 - RNA, 22 nt, Human
guccucugggagccuugagccu

SEQ ID NO: 149236 - RNA, 22 nt, Human
uucauuccuucuguaccuugcc

SEQ ID NO: 149237 - RNA, 22 nt, Human
augggcuggcagccugaacagc

SEQ ID NO: 149238 - RNA, 20 nt, Human
accccacagaguccauugca

SEQ ID NO: 149239 - RNA, 22 nt, Human
uuccacauuccuuacauucaua

SEQ ID NO: 149240 - RNA, 22 nt, Human
ggcaggcuagcacugauguccu

SEQ ID NO: 149241 - RNA, 22 nt, Human
uacaaaaguaauuacgguuuuu

SEQ ID NO: 149242 - RNA, 22 nt, Human
ucuggggaugagguccagugau

SEQ ID NO: 149243 - RNA, 22 nt, Human
ugcagagagaccccugggccag

SEQ ID NO: 149244 - RNA, 22 nt, Human
cugggcugucaguuuuguuuua

SEQ ID NO: 149245 - RNA, 22 nt, Human
uggacuggaaugcugauccucu

SEQ ID NO: 149246 - RNA, 22 nt, Human
gcaggcuccaggccggccccuu

SEQ ID NO: 149247 - RNA, 22 nt, Human
acagaccaaguuuccagcaggu

SEQ ID NO: 149248 - RNA, 22 nt, Human
aggccuccagccacaugccagu

SEQ ID NO: 149249 - RNA, 22 nt, Human
acaggcucgugcgcgcacgugu

SEQ ID NO: 149250 - RNA, 22 nt, Human
cagguugguauucaucuccaca

SEQ ID NO: 149251 - RNA, 22 nt, Human
acuguucauuuguccuguaucu

SEQ ID NO: 149252 - RNA, 22 nt, Human
ucacauacugaaaguccaguga

SEQ ID NO: 149253 - RNA, 22 nt, Human
ggcaagagggcagauggagugc

SEQ ID NO: 149254 - RNA, 22 nt, Human
gaaauauuacaguggaggggau

SEQ ID NO: 149255 - RNA, 22 nt, Human
ucuguucagcugccucagggua

SEQ ID NO: 149256 - RNA, 22 nt, Human
gggaccugaggcccugcuccac

SEQ ID NO: 149257 - RNA, 22 nt, Human
ugguuccuucugcauuuucagc

SEQ ID NO: 149258 - RNA, 19 nt, Human
cccucuugcacaaagcaaa

SEQ ID NO: 149259 - RNA, 22 nt, Human
acuggcagaggauagcacuaau

SEQ ID NO: 149260 - RNA, 22 nt, Human
guccuggcccacuggcaggcug

SEQ ID NO: 149261 - RNA, 22 nt, Human
ugcuucugcugauauuuuguga

SEQ ID NO: 149262 - RNA, 22 nt, Human
cccaguuucaacuuuccagugg

SEQ ID NO: 149263 - RNA, 22 nt, Human
aaaagagugacugauaaguaua

SEQ ID NO: 149264 - RNA, 22 nt, Human
cguaugaaauuuuugacauuug

SEQ ID NO: 149265 - RNA, 22 nt, Human
ccuggcagcgugccgagcugcg

SEQ ID NO: 149266 - RNA, 22 nt, Human
cauaauauacuacauugaugaa

SEQ ID NO: 149267 - RNA, 17 nt, Human
ugcuggcaacauacaaa

SEQ ID NO: 149268 - RNA, 19 nt, Human
acuggcaguuucugcaugg

SEQ ID NO: 149269 - RNA, 22 nt, Human
guccucugcccaggucaagguu

SEQ ID NO: 149270 - RNA, 22 nt, Human
ccaggcucugacauagauggga

SEQ ID NO: 149271 - RNA, 22 nt, Human
cuccaggguuccccgauccacu

SEQ ID NO: 149272 - RNA, 22 nt, Human
uggggacccggacuccuggguc

SEQ ID NO: 149273 - RNA, 22 nt, Human
auuguugggucucacuccuaga

SEQ ID NO: 149274 - RNA, 22 nt, Human
ucaggcucugccaccuagauua

SEQ ID NO: 149275 - RNA, 22 nt, Human
ugcuucugacugggucaguuga

SEQ ID NO: 149276 - RNA, 20 nt, Human
acaaagacuggaaaagcaag

SEQ ID NO: 149277 - RNA, 22 nt, Human
ccagcccuugcugaaggguggc

SEQ ID NO: 149278 - RNA, 22 nt, Human
cuucaaaugugauuuuaauaac

SEQ ID NO: 149279 - RNA, 22 nt, Human
cuuggcaguuucggaaggauga

SEQ ID NO: 149280 - RNA, 22 nt, Human
gcugcgccggaucccacguucc

SEQ ID NO: 149281 - RNA, 22 nt, Human
ccagcccugucaccaacuggag

SEQ ID NO: 149282 - RNA, 22 nt, Human
aucuguucuucaaaauauuaca

SEQ ID NO: 149283 - RNA, 22 nt, Human
ccccacaccugccgggcagcag

SEQ ID NO: 149284 - RNA, 22 nt, Human
cuuguuaaaaugcagauuccaa

SEQ ID NO: 149285 - RNA, 22 nt, Human
cuggcaguauuaagagaaguga

SEQ ID NO: 149286 - RNA, 22 nt, Human
ucaaauauuggcuauuucacau

SEQ ID NO: 149287 - RNA, 22 nt, Human
cuauaauuaugcucaaaaugua

SEQ ID NO: 149288 - RNA, 22 nt, Human
uauauuuaaauccagguugaaa

SEQ ID NO: 149289 - RNA, 22 nt, Human
uuauuuaaaauguagguuggga

SEQ ID NO: 149290 - RNA, 22 nt, Human
ugcuucuggggacaggcugccu

SEQ ID NO: 149291 - RNA, 22 nt, Human
gagaaagaugaagaguggcguu

SEQ ID NO: 149292 - RNA, 22 nt, Human
accaagcucucuucccggcucu

SEQ ID NO: 149293 - RNA, 22 nt, Human
gcaggcucuucuuucugcccag

SEQ ID NO: 149294 - RNA, 22 nt, Human
gaagucuucauucucucugaga

SEQ ID NO: 149295 - RNA, 22 nt, Human
ugggacucacucuuuuggccag

SEQ ID NO: 149296 - RNA, 19 nt, Human
auguaugaggucuucugcu

SEQ ID NO: 149297 - RNA, 18 nt, Human
acaggcugugggaauggu

SEQ ID NO: 149298 - RNA, 22 nt, Human
auuucauagauuguaaaucccu

SEQ ID NO: 149299 - RNA, 22 nt, Human
cagcucaggcucuccaugcucc

SEQ ID NO: 149300 - RNA, 22 nt, Human
uuccaagugucagaucagauuu

SEQ ID NO: 149301 - RNA, 22 nt, Human
augaaaacggaccagagcuauu

SEQ ID NO: 149302 - RNA, 22 nt, Human
ccugggcugaagucaagugugg

SEQ ID NO: 149303 - RNA, 22 nt, Human
gacacagaauuuacucccgaua

SEQ ID NO: 149304 - RNA, 19 nt, Human
gggguggcuggggcuccag

SEQ ID NO: 149305 - RNA, 22 nt, Human
uuguaugaauguauccuaauuu

SEQ ID NO: 149306 - RNA, 22 nt, Human
uaauucagggccagaaucccca

SEQ ID NO: 149307 - RNA, 22 nt, Human
ucccagccuuucuuuucugcug

SEQ ID NO: 149308 - RNA, 22 nt, Human
aagucguggcaggcuugcacga

SEQ ID NO: 149309 - RNA, 22 nt, Human
ucuggcagaagugcugucagua

SEQ ID NO: 149310 - RNA, 22 nt, Human
ucuugauuacaaauaacaucau

SEQ ID NO: 149311 - RNA, 22 nt, Human
gcuggcaggguucucacugaaa

SEQ ID NO: 149312 - RNA, 20 nt, Human
agcuuugguuaagccagugg

SEQ ID NO: 149313 - RNA, 22 nt, Human
gaggguggggaauagacugcua

SEQ ID NO: 149314 - RNA, 20 nt, Human
cccagccccuaccuguugcc

SEQ ID NO: 149315 - RNA, 22 nt, Human
guccucuguagggcugggccac

SEQ ID NO: 149316 - RNA, 22 nt, Human
uuccaagugggggaagcugagu

SEQ ID NO: 149317 - RNA, 22 nt, Human
cagaaagaccugggcucaagag

SEQ ID NO: 149318 - RNA, 22 nt, Human
gagaaagauuguccuucagggg

SEQ ID NO: 149319 - RNA, 22 nt, Human
caugaagcacagcucucuuuuu

SEQ ID NO: 149320 - RNA, 21 nt, Human
uccagcucuuauguucaugaa

SEQ ID NO: 149321 - RNA, 23 nt, Human
aguguugguugggaagccaagca

SEQ ID NO: 149322 - RNA, 22 nt, Human
gcuaggagauugagcucugaag

SEQ ID NO: 149323 - RNA, 22 nt, Human
gccagaagggguggauccaggc

SEQ ID NO: 149324 - RNA, 23 nt, Human
ucugcagacgcuguucuauuguc

SEQ ID NO: 149325 - RNA, 22 nt, Human
ggggcugaaccuggaggugguc

SEQ ID NO: 149326 - RNA, 22 nt, Human
guccuggcaccucacuggcuac

SEQ ID NO: 149327 - RNA, 22 nt, Human
gacugccucaguuucccugcag

SEQ ID NO: 149328 - RNA, 22 nt, Human
uggcaggaaaguaacagagcac

SEQ ID NO: 149329 - RNA, 22 nt, Human
uauuugaaggcauacauuuuga

SEQ ID NO: 149330 - RNA, 22 nt, Human
ugggcuucugauguugagugcu

SEQ ID NO: 149331 - RNA, 22 nt, Human
guggcagguggagccuccugca

SEQ ID NO: 149332 - RNA, 22 nt, Human
ucuggcaguugccgcuucaguc

SEQ ID NO: 149333 - RNA, 22 nt, Human
guggccagcaagugcugccucu

SEQ ID NO: 149334 - RNA, 22 nt, Human
uauuuagaugcauuuggauugc

SEQ ID NO: 149335 - RNA, 22 nt, Human
agccagggucucucgcucuguu

SEQ ID NO: 149336 - RNA, 22 nt, Human
uuguaugaguaugguguauagg

SEQ ID NO: 149337 - RNA, 23 nt, Human
ugcaggcuaggaagagagccuuc

SEQ ID NO: 149338 - RNA, 22 nt, Human
cccaaguuaauuuguagcugaa

SEQ ID NO: 149339 - RNA, 22 nt, Human
uaaaagcucuucuguugaguua

SEQ ID NO: 149340 - RNA, 22 nt, Human
uggaacacaagucauugagggg

SEQ ID NO: 149341 - RNA, 19 nt, Human
agaggccucagcagcuggc

SEQ ID NO: 149342 - RNA, 22 nt, Human
ucuccugcucagaacagccuca

SEQ ID NO: 149343 - RNA, 22 nt, Human
ucuccacacuuucucucccagg

SEQ ID NO: 149344 - RNA, 22 nt, Human
acaauucugaugguuucccagu

SEQ ID NO: 149345 - RNA, 22 nt, Human
uuuaauauucugcauucuccuu

SEQ ID NO: 149346 - RNA, 22 nt, Human
acaugacuuuucucuuccagag

SEQ ID NO: 149347 - RNA, 22 nt, Human
aaaauucugucauuaaauugug

SEQ ID NO: 149348 - RNA, 23 nt, Human
cuucacaaucaaaaucaguucug

SEQ ID NO: 149349 - RNA, 23 nt, Human
ccuggcagcaaacgaggagguua

SEQ ID NO: 149350 - RNA, 22 nt, Human
aacccaggagacagguugcagu

SEQ ID NO: 149351 - RNA, 22 nt, Human
acugggcugccugguucuucua

SEQ ID NO: 149352 - RNA, 22 nt, Human
augggcugugggacccuggacc

SEQ ID NO: 149353 - RNA, 22 nt, Human
ccaggcucaccuggagccccug

SEQ ID NO: 149354 - RNA, 22 nt, Human
ccuggcagcaggugggcccgug

SEQ ID NO: 149355 - RNA, 22 nt, Human
aucuccagauugugaucaucag

SEQ ID NO: 149356 - RNA, 22 nt, Human
uuccugggugguccugguagag

SEQ ID NO: 149357 - RNA, 22 nt, Human
cccuuccuugauuuuaacugga

SEQ ID NO: 149358 - RNA, 22 nt, Human
ggggaccuuuccauuucugaga

SEQ ID NO: 149359 - RNA, 22 nt, Human
ugcacaggaggcuguggagaag

SEQ ID NO: 149360 - RNA, 22 nt, Human
augugagggaaaucagucagaa

SEQ ID NO: 149361 - RNA, 22 nt, Human
ucaugaauauugaaugcuucau

SEQ ID NO: 149362 - RNA, 22 nt, Human
gcacacagcuagauuaccauuc

SEQ ID NO: 149363 - RNA, 22 nt, Human
agacaagaaacugggagucucu

SEQ ID NO: 149364 - RNA, 22 nt, Human
gacacagaaggucacauguuca

SEQ ID NO: 149365 - RNA, 22 nt, Human
cuccucuggguccugguggcca

SEQ ID NO: 149366 - RNA, 22 nt, Human
agcaggcuacuccuguguucgu

SEQ ID NO: 149367 - RNA, 22 nt, Human
cuggggaccagugucuguuugu

SEQ ID NO: 149368 - RNA, 23 nt, Human
gcccacccucagcguccucacgg

SEQ ID NO: 149369 - RNA, 18 nt, Human
gacaaaaguacagacaga

SEQ ID NO: 149370 - RNA, 17 nt, Human
ucugcagaggcaaaccu

SEQ ID NO: 149371 - RNA, 22 nt, Human
gcuucugguagaauucaauaga

SEQ ID NO: 149372 - RNA, 22 nt, Human
ccuguucauuuuuugacucugc

SEQ ID NO: 149373 - RNA, 22 nt, Human
ccaggaccuggagcucuaugaa

SEQ ID NO: 149374 - RNA, 18 nt, Human
uaaauauauuucccccuu

SEQ ID NO: 149375 - RNA, 22 nt, Human
agaugaaaauacgugacuuuaa

SEQ ID NO: 149376 - RNA, 22 nt, Human
ugggccagcugaagugccgccc

SEQ ID NO: 149377 - RNA, 22 nt, Human
cuuccuccgaagaaguugcugg

SEQ ID NO: 149378 - RNA, 17 nt, Human
ccaggcuccaucacugu

SEQ ID NO: 149379 - RNA, 21 nt, Human
gcccccuggacuccucaucca

SEQ ID NO: 149380 - RNA, 21 nt, Human
ucuggcagcaguuuguugagu

SEQ ID NO: 149381 - RNA, 22 nt, Human
uccugugccaucucuagagacu

SEQ ID NO: 149382 - RNA, 22 nt, Human
ucugggcugguugugcuugcuu

SEQ ID NO: 149383 - RNA, 22 nt, Human
ugcaggcuggaggagggacuaa

SEQ ID NO: 149384 - RNA, 22 nt, Human
aggagcugcagauucugccuug

SEQ ID NO: 149385 - RNA, 22 nt, Human
gcuugggaagggcccuguguac

SEQ ID NO: 149386 - RNA, 22 nt, Human
gugggcuuuugacagugccugg

SEQ ID NO: 149387 - RNA, 22 nt, Human
gcuguucacggaggaggauggg

SEQ ID NO: 149388 - RNA, 22 nt, Human
cuacauuaaauuggcuuacuua

SEQ ID NO: 149389 - RNA, 18 nt, Human
ccuggcagccaugcgcgc

SEQ ID NO: 149390 - RNA, 22 nt, Human
uacacagauaugugaucaauca

SEQ ID NO: 149391 - RNA, 22 nt, Human
gccaggggugcccacccaagga

SEQ ID NO: 149392 - RNA, 22 nt, Human
cacacugucagguaaauaacac

SEQ ID NO: 149393 - RNA, 22 nt, Human
auaugaaaauguuuuagcugua

SEQ ID NO: 149394 - RNA, 22 nt, Human
ugcuucugcauucaauguugga

SEQ ID NO: 149395 - RNA, 22 nt, Human
gguaugaaaugauuccauguua

SEQ ID NO: 149396 - RNA, 22 nt, Human
ggagcugaaccccaucgugcug

SEQ ID NO: 149397 - RNA, 20 nt, Human
acuguucaagggccuggugg

SEQ ID NO: 149398 - RNA, 22 nt, Human
ugagugugcagggaaguggcgg

SEQ ID NO: 149399 - RNA, 22 nt, Human
agcaggugggcaugaaagcuga

SEQ ID NO: 149400 - RNA, 22 nt, Human
auguuggagucguaaggcaugg

SEQ ID NO: 149401 - RNA, 23 nt, Human
uuuauauuccuaaugucuugagc

SEQ ID NO: 149402 - RNA, 22 nt, Human
agcaggcuugguccccagccuc

SEQ ID NO: 149403 - RNA, 22 nt, Human
uguaugaauauguuggggaggu

SEQ ID NO: 149404 - RNA, 22 nt, Human
gagauggccagugccaggacaa

SEQ ID NO: 149405 - RNA, 22 nt, Human
ucuggcaggacaugcugaccau

SEQ ID NO: 149406 - RNA, 22 nt, Human
cauuacaaccccaaauuacaaa

SEQ ID NO: 149407 - RNA, 22 nt, Human
ccauucauacaauuuuguucua

SEQ ID NO: 149408 - RNA, 22 nt, Human
aguaugaaaguuaaucaauuua

SEQ ID NO: 149409 - RNA, 22 nt, Human
cuggggcuggugaggcaggcuc

SEQ ID NO: 149410 - RNA, 22 nt, Human
ucacuguaaaguaauacuguca

SEQ ID NO: 149411 - RNA, 22 nt, Human
agagacaggguuuugucguguu

SEQ ID NO: 149412 - RNA, 22 nt, Human
uucuucaaagaugucuguugga

SEQ ID NO: 149413 - RNA, 22 nt, Human
uuuacagaaugucaauuucuau

SEQ ID NO: 149414 - RNA, 22 nt, Human
caggucuuuucuacugguggag

SEQ ID NO: 149415 - RNA, 20 nt, Human
acugugaaugcugaauuagc

SEQ ID NO: 149416 - RNA, 22 nt, Human
gaagagaaaggcaaggaguuuu

SEQ ID NO: 149417 - RNA, 22 nt, Human
cuuccucccggcccaugcucug

SEQ ID NO: 149418 - RNA, 22 nt, Human
ggagcugaaggggugggcucag

SEQ ID NO: 149419 - RNA, 17 nt, Human
ugcaggcuguuauagcc

SEQ ID NO: 149420 - RNA, 22 nt, Human
guccucuggugaaagcauuccc

SEQ ID NO: 149421 - RNA, 22 nt, Human
gucacaggccuggaugaggggc

SEQ ID NO: 149422 - RNA, 22 nt, Human
gaggagcugagccacguccugg

SEQ ID NO: 149423 - RNA, 22 nt, Human
gccuggcacaguagggacccaa

SEQ ID NO: 149424 - RNA, 22 nt, Human
gagagaaaagggggaauugauu

SEQ ID NO: 149425 - RNA, 22 nt, Human
auauuauucuagcucuugugug

SEQ ID NO: 149426 - RNA, 22 nt, Human
agaggcuuggaggugcaagguu

SEQ ID NO: 149427 - RNA, 22 nt, Human
uguaugaaguuacugagccucu

SEQ ID NO: 149428 - RNA, 22 nt, Human
uccugagcuacaguaguaugau

SEQ ID NO: 149429 - RNA, 22 nt, Human
uuguaugaucaaaagaaaugua

SEQ ID NO: 149430 - RNA, 20 nt, Human
ucuggggaugaggucuagga

SEQ ID NO: 149431 - RNA, 22 nt, Human
cuggcagucugguggaaggccu

SEQ ID NO: 149432 - RNA, 22 nt, Human
aauuucagaacccaaauuagcg

SEQ ID NO: 149433 - RNA, 22 nt, Human
cuccuggcuuucccagaccagg

SEQ ID NO: 149434 - RNA, 22 nt, Human
aggcugcuucagcugcagggag

SEQ ID NO: 149435 - RNA, 22 nt, Human
cuuacaaauacacuuaggagag

SEQ ID NO: 149436 - RNA, 23 nt, Human
agcuuuggugaugugacagauaa

SEQ ID NO: 149437 - RNA, 22 nt, Human
ccacacagggggaugaguuauu

SEQ ID NO: 149438 - RNA, 22 nt, Human
ucccugccugacagcacccacc

SEQ ID NO: 149439 - RNA, 16 nt, Human
gcacacacaucaauga

SEQ ID NO: 149440 - RNA, 22 nt, Human
gaggcacauauauacagagccc

SEQ ID NO: 149441 - RNA, 22 nt, Human
ucugggcuuggauuggcucugc

SEQ ID NO: 149442 - RNA, 22 nt, Human
uuuaagaaguuauguuauaaau

SEQ ID NO: 149443 - RNA, 22 nt, Human
agggaccugcucacugccuggc

SEQ ID NO: 149444 - RNA, 22 nt, Human
cugccugcucaccagggcucug

SEQ ID NO: 149445 - RNA, 17 nt, Human
ucugggcuucagugguc

SEQ ID NO: 149446 - RNA, 22 nt, Human
ccccacccaccuaagagaaacu

SEQ ID NO: 149447 - RNA, 22 nt, Human
uccccacagcagaagaucugag

SEQ ID NO: 149448 - RNA, 22 nt, Human
ccuggggaccugccucagcccu

SEQ ID NO: 149449 - RNA, 22 nt, Human
caucacagaaauaaacauaccu

SEQ ID NO: 149450 - RNA, 22 nt, Human
ucuccaagcagggcugcaaggc

SEQ ID NO: 149451 - RNA, 20 nt, Human
ucccucccuccagcucuggg

SEQ ID NO: 149452 - RNA, 22 nt, Human
uggaacacuuuguugaaaugca

SEQ ID NO: 149453 - RNA, 22 nt, Human
uaaaggguagguuuuacuguaa

SEQ ID NO: 149454 - RNA, 22 nt, Human
aauauucaaguuauucuuucuu

SEQ ID NO: 149455 - RNA, 22 nt, Human
uccuguuuaucugugugacucg

SEQ ID NO: 149456 - RNA, 22 nt, Human
acagcucuguguauugucaucu

SEQ ID NO: 149457 - RNA, 22 nt, Human
uggcagagagacucuccuugau

SEQ ID NO: 149458 - RNA, 22 nt, Human
cuucccacuaguaucacagagc

SEQ ID NO: 149459 - RNA, 22 nt, Human
ggagucugcucccagacaugau

SEQ ID NO: 149460 - RNA, 22 nt, Human
acuggcaguagagggagcgcau

SEQ ID NO: 149461 - RNA, 22 nt, Human
ccacauacaaauggggugcugu

SEQ ID NO: 149462 - RNA, 22 nt, Human
cuggccucauagccaagcugug

SEQ ID NO: 149463 - RNA, 22 nt, Human
uacaaaaggaagagggaucuua

SEQ ID NO: 149464 - RNA, 22 nt, Human
ugcuucaaguugaaauauucuu

SEQ ID NO: 149465 - RNA, 22 nt, Human
acauacacaugaauauauuuuu

SEQ ID NO: 149466 - RNA, 18 nt, Human
gaguguggcacugggccc

SEQ ID NO: 149467 - RNA, 22 nt, Human
auuucuguauccugcugucaga

SEQ ID NO: 149468 - RNA, 22 nt, Human
agcaggcuuuccacagaaggag

SEQ ID NO: 149469 - RNA, 19 nt, Human
ugccuggcaccagcuccac

SEQ ID NO: 149470 - RNA, 22 nt, Human
guuaaccaaggcaccaagugua

SEQ ID NO: 149471 - RNA, 22 nt, Human
cuuccucccccacacacucacu

SEQ ID NO: 149472 - RNA, 22 nt, Human
gaggggcuggguagggcaaccc

SEQ ID NO: 149473 - RNA, 22 nt, Human
gacucugggcugagccagggcc

SEQ ID NO: 149474 - RNA, 22 nt, Human
agcaggcuaaucuugcugaaca

SEQ ID NO: 149475 - RNA, 22 nt, Human
uuucaaaugcaugucuuuccuc

SEQ ID NO: 149476 - RNA, 19 nt, Human
uggaccugugcccauggcu

SEQ ID NO: 149477 - RNA, 22 nt, Human
ggggaccuucccagagcaguug

SEQ ID NO: 149478 - RNA, 22 nt, Human
guacacacaaucucuggucagu

SEQ ID NO: 149479 - RNA, 22 nt, Human
ucuaggagaaccaucagggagg

SEQ ID NO: 149480 - RNA, 22 nt, Human
aguaaaauuucugcugaggaga

SEQ ID NO: 149481 - RNA, 22 nt, Human
guccucuggagguuuuuaggug

SEQ ID NO: 149482 - RNA, 22 nt, Human
agggcugacagugaggagucaa

SEQ ID NO: 149483 - RNA, 22 nt, Human
ugacaggaggcuugaggccagg

SEQ ID NO: 149484 - RNA, 21 nt, Human
acugggcuagccugacuucug

SEQ ID NO: 149485 - RNA, 22 nt, Human
ugaaccacaugcaaagugaaua

SEQ ID NO: 149486 - RNA, 22 nt, Human
ugcaggcugugucauuuaguga

SEQ ID NO: 149487 - RNA, 18 nt, Human
ucuggaacaacuucaugu

SEQ ID NO: 149488 - RNA, 22 nt, Human
acuggggagugguuuugggaag

SEQ ID NO: 149489 - RNA, 22 nt, Human
gcaggcucagagcagauuagca

SEQ ID NO: 149490 - RNA, 22 nt, Human
cuggcaugaaauggcaucucau

SEQ ID NO: 149491 - RNA, 22 nt, Human
uuuaaaaucagaugggaguugg

SEQ ID NO: 149492 - RNA, 22 nt, Human
cuguaugauuccauuucuauaa

SEQ ID NO: 149493 - RNA, 22 nt, Human
uuccuggcagaggccccgacag

SEQ ID NO: 149494 - RNA, 22 nt, Human
ccugggcuuugagggcaggaug

SEQ ID NO: 149495 - RNA, 22 nt, Human
gcacacauucggauucuuaacc

SEQ ID NO: 149496 - RNA, 22 nt, Human
uccugagcugccgcaucagcag

SEQ ID NO: 149497 - RNA, 22 nt, Human
gggaccuggcgagggucacaca

SEQ ID NO: 149498 - RNA, 22 nt, Human
ccugggcucaggcuugggcagc

SEQ ID NO: 149499 - RNA, 21 nt, Human
ccuagccucuuacccagcuuu

SEQ ID NO: 149500 - RNA, 23 nt, Human
uggccagguagaggagguaguga

SEQ ID NO: 149501 - RNA, 22 nt, Human
ccucugugucuugguuucaaga

SEQ ID NO: 149502 - RNA, 22 nt, Human
caucuucagguucauggucaua

SEQ ID NO: 149503 - RNA, 22 nt, Human
ccugggcucgcgcacuucaccc

SEQ ID NO: 149504 - RNA, 22 nt, Human
gggcugacucaaccuugcaaag

SEQ ID NO: 149505 - RNA, 22 nt, Human
ugcaggcuccaggugcacauau

SEQ ID NO: 149506 - RNA, 22 nt, Human
cucagcucugacaggaggcauc

SEQ ID NO: 149507 - RNA, 22 nt, Human
agagucccagggacacuccaga

SEQ ID NO: 149508 - RNA, 22 nt, Human
aucacaauguacguuaaaaugu

SEQ ID NO: 149509 - RNA, 22 nt, Human
ucaggcccagagucacggaucc

SEQ ID NO: 149510 - RNA, 21 nt, Human
ucuggcaggaagacggauggg

SEQ ID NO: 149511 - RNA, 22 nt, Human
uuccagccaugguuucccuaug

SEQ ID NO: 149512 - RNA, 22 nt, Human
aaucuucacagaaaaaugucug

SEQ ID NO: 149513 - RNA, 20 nt, Human
agaggcuuccuugggaggag

SEQ ID NO: 149514 - RNA, 22 nt, Human
uuccagaagccuccauauuacu

SEQ ID NO: 149515 - RNA, 22 nt, Human
ucuaggaguaaugagcuagcac

SEQ ID NO: 149516 - RNA, 22 nt, Human
ucuguucaguugauguaguuuu

SEQ ID NO: 149517 - RNA, 22 nt, Human
cugggcugaaaguguuccuuga

SEQ ID NO: 149518 - RNA, 22 nt, Human
uuguaugaccacaaucugacgu

SEQ ID NO: 149519 - RNA, 22 nt, Human
gccaagcuuggaaggaucaugg

SEQ ID NO: 149520 - RNA, 22 nt, Human
cagcucuuugaguauuccauuu

SEQ ID NO: 149521 - RNA, 22 nt, Human
ccaggcccugcuccucacacca

SEQ ID NO: 149522 - RNA, 22 nt, Human
aauauuucuguagcuauguucu

SEQ ID NO: 149523 - RNA, 22 nt, Human
aguaugaauacagauuuucucu

SEQ ID NO: 149524 - RNA, 22 nt, Human
acuguucaagcaaaugacauug

SEQ ID NO: 149525 - RNA, 22 nt, Human
aaucuucauuuugacaagauuc

SEQ ID NO: 149526 - RNA, 22 nt, Human
gccucaggccgcccugcugcuc

SEQ ID NO: 149527 - RNA, 22 nt, Human
aucacuguuaucuagaagcaca

SEQ ID NO: 149528 - RNA, 22 nt, Human
ugggcugagcagugaagcucau

SEQ ID NO: 149529 - RNA, 19 nt, Human
ggcggguggacuggagccc

SEQ ID NO: 149530 - RNA, 22 nt, Human
gcuccaagguauccaccagggu

SEQ ID NO: 149531 - RNA, 22 nt, Human
aucucccagccacagcauucuu

SEQ ID NO: 149532 - RNA, 22 nt, Human
ugggcugaggggccuugaugac

SEQ ID NO: 149533 - RNA, 22 nt, Human
ccuggcaggacuguuguaagaa

SEQ ID NO: 149534 - RNA, 22 nt, Human
ccagcccugaacccugcugcau

SEQ ID NO: 149535 - RNA, 22 nt, Human
guccucugagggggcugcacgc

SEQ ID NO: 149536 - RNA, 23 nt, Human
cagugugacgaggugaggcaggc

SEQ ID NO: 149537 - RNA, 22 nt, Human
cacacaguaggcacucauuaau

SEQ ID NO: 149538 - RNA, 22 nt, Human
auugguggugaggacaugccag

SEQ ID NO: 149539 - RNA, 22 nt, Human
gccuggaagugugucgugggaa

SEQ ID NO: 149540 - RNA, 22 nt, Human
uuuauuuauccuucuggauugc

SEQ ID NO: 149541 - RNA, 22 nt, Human
auuucuguugcuuauaaauuac

SEQ ID NO: 149542 - RNA, 22 nt, Human
uuccagcuaacucacaucccuu

SEQ ID NO: 149543 - RNA, 22 nt, Human
ggagcugaggcugaggccucac

SEQ ID NO: 149544 - RNA, 22 nt, Human
auggcuagcaccgcguugcugg

SEQ ID NO: 149545 - RNA, 22 nt, Human
aauguugagcuugaaaguaggu

SEQ ID NO: 149546 - RNA, 22 nt, Human
ucuguucaagacugaggugaca

SEQ ID NO: 149547 - RNA, 22 nt, Human
guguaugauuucaaauggcuag

SEQ ID NO: 149548 - RNA, 22 nt, Human
uccugcagccacugcaggcaga

SEQ ID NO: 149549 - RNA, 22 nt, Human
ucucuucauagugacacccauc

SEQ ID NO: 149550 - RNA, 22 nt, Human
auggcagagggauugaacagcu

SEQ ID NO: 149551 - RNA, 22 nt, Human
uggucucugcaggccaggcuca

SEQ ID NO: 149552 - RNA, 22 nt, Human
uugaauucauuucucauugagu

SEQ ID NO: 149553 - RNA, 22 nt, Human
ccacaucauggauacaguuaug

SEQ ID NO: 149554 - RNA, 22 nt, Human
guuacucuuccccggggucugg

SEQ ID NO: 149555 - RNA, 22 nt, Human
uccuggcacccuuggguuggag

SEQ ID NO: 149556 - RNA, 22 nt, Human
uucuuguauauaaaaaucauuu

SEQ ID NO: 149557 - RNA, 22 nt, Human
ccagauagaaaagaaggcagga

SEQ ID NO: 149558 - RNA, 22 nt, Human
aggcuguguggaugagucuuac

SEQ ID NO: 149559 - RNA, 22 nt, Human
acaucacagagcccagauaaag

SEQ ID NO: 149560 - RNA, 22 nt, Human
ccagcccuuagauaaaccuggc

SEQ ID NO: 149561 - RNA, 22 nt, Human
ucccacacuugaaacaaggcug

SEQ ID NO: 149562 - RNA, 22 nt, Human
gugggcuucccuuaagccagag

SEQ ID NO: 149563 - RNA, 22 nt, Human
ugggcucucaaagugcggcuug

SEQ ID NO: 149564 - RNA, 22 nt, Human
uuccaaguuaggcgagcuggug

SEQ ID NO: 149565 - RNA, 22 nt, Human
agaagcuuccuacauuguucuu

SEQ ID NO: 149566 - RNA, 22 nt, Human
cugagggagcugcuggccuugg

SEQ ID NO: 149567 - RNA, 20 nt, Human
ugccuggccuuucucugccc

SEQ ID NO: 149568 - RNA, 22 nt, Human
aauuuagauugauaaacaugga

SEQ ID NO: 149569 - RNA, 22 nt, Human
aaggcucuggguuucauaggug

SEQ ID NO: 149570 - RNA, 22 nt, Human
aaaaagucugcaaaggagguug

SEQ ID NO: 149571 - RNA, 22 nt, Human
ucuggggagugccuaaguggaa

SEQ ID NO: 149572 - RNA, 22 nt, Human
ugccugccaugcagaaagcuga

SEQ ID NO: 149573 - RNA, 22 nt, Human
caugaagcauguuuugucauga

SEQ ID NO: 149574 - RNA, 22 nt, Human
uacacagauuucaguaucauca

SEQ ID NO: 149575 - RNA, 22 nt, Human
ggcucugcagugacuugagggg

SEQ ID NO: 149576 - RNA, 22 nt, Human
uguaaacagccccauggagagc

SEQ ID NO: 149577 - RNA, 22 nt, Human
aggaagaaccuaagaaagucuc

SEQ ID NO: 149578 - RNA, 22 nt, Human
agcagguguauauaaggcugag

SEQ ID NO: 149579 - RNA, 22 nt, Human
ucccagccuggacccugccagu

SEQ ID NO: 149580 - RNA, 22 nt, Human
ucacacaugaguaaauacaggg

SEQ ID NO: 149581 - RNA, 22 nt, Human
uaugaagcuuugaaaagcuuac

SEQ ID NO: 149582 - RNA, 22 nt, Human
uuuaaagugcugcuccuauccu

SEQ ID NO: 149583 - RNA, 22 nt, Human
ccucccuucaguagagcccaau

SEQ ID NO: 149584 - RNA, 22 nt, Human
uacauugaauuuuuuagcaugu

SEQ ID NO: 149585 - RNA, 22 nt, Human
cugggagggguagccaauccua

SEQ ID NO: 149586 - RNA, 22 nt, Human
cagaaaauaaaguuucuacgca

SEQ ID NO: 149587 - RNA, 22 nt, Human
auccuggcccagguguggaggg

SEQ ID NO: 149588 - RNA, 22 nt, Human
cagcucugagacugaggcuaug

SEQ ID NO: 149589 - RNA, 22 nt, Human
gggccccuuguaucucuggcuc

SEQ ID NO: 149590 - RNA, 22 nt, Human
ccuguucacgguguguuguuag

SEQ ID NO: 149591 - RNA, 22 nt, Human
gccuggcaaggcccuguugacu

SEQ ID NO: 149592 - RNA, 22 nt, Human
ggccucaggguugggcccauua

SEQ ID NO: 149593 - RNA, 22 nt, Human
ggcacagggggcugaggacuag

SEQ ID NO: 149594 - RNA, 22 nt, Human
guccucugaaguugugcaaugc

SEQ ID NO: 149595 - RNA, 22 nt, Human
aggaggcugcaacccugaggcc

SEQ ID NO: 149596 - RNA, 22 nt, Human
uauuccagguuucuuguuguau

SEQ ID NO: 149597 - RNA, 22 nt, Human
ccaucacaguccccaucgugau

SEQ ID NO: 149598 - RNA, 22 nt, Human
aauauaaugcuguuuuaugcca

SEQ ID NO: 149599 - RNA, 18 nt, Human
auccuugaugagaggucu

SEQ ID NO: 149600 - RNA, 22 nt, Human
ugucuucaucuccaugcacaga

SEQ ID NO: 149601 - RNA, 22 nt, Human
gaaauauuucucuugagccccu

SEQ ID NO: 149602 - RNA, 22 nt, Human
cuguaugaguugggaauagaau

SEQ ID NO: 149603 - RNA, 22 nt, Human
cacacaucaaccuagacauugu

SEQ ID NO: 149604 - RNA, 22 nt, Human
ugcuggcacguggaccaggaga

SEQ ID NO: 149605 - RNA, 22 nt, Human
uccaggcaagggaggagcaugg

SEQ ID NO: 149606 - RNA, 22 nt, Human
auuuggaaaugcaucucuugag

SEQ ID NO: 149607 - RNA, 22 nt, Human
gcacacacuguuuuccucacau

SEQ ID NO: 149608 - RNA, 22 nt, Human
acaguucccgucuugcacagcu

SEQ ID NO: 149609 - RNA, 22 nt, Human
ugaagcacaggcauacacaacc

SEQ ID NO: 149610 - RNA, 22 nt, Human
aguaugaacggaaggccuggga

SEQ ID NO: 149611 - RNA, 22 nt, Human
ucuguggaaauuuccugaggca

SEQ ID NO: 149612 - RNA, 22 nt, Human
cuccaaguauguuaaaaucuaa

SEQ ID NO: 149613 - RNA, 22 nt, Human
cuguagaacgauccaggcauuu

SEQ ID NO: 149614 - RNA, 22 nt, Human
gucuggaaggaggagauggagc

SEQ ID NO: 149615 - RNA, 22 nt, Human
ccccacccucgcuccauuucgg

SEQ ID NO: 149616 - RNA, 16 nt, Human
ccugggcucuguugga

SEQ ID NO: 149617 - RNA, 21 nt, Human
ccaggcuccugaggcugguca

SEQ ID NO: 149618 - RNA, 22 nt, Human
cucuugcagauaccuugaagga

SEQ ID NO: 149619 - RNA, 21 nt, Human
ugcaggcuguuuaagaggcaa

SEQ ID NO: 149620 - RNA, 20 nt, Human
aaagagcccuuggagcaggc

SEQ ID NO: 149621 - RNA, 18 nt, Human
ggcagggaaaagauaggg

SEQ ID NO: 149622 - RNA, 22 nt, Human
ccacuguaaguuugaaaauaac

SEQ ID NO: 149623 - RNA, 22 nt, Human
guggcagggcuuugcuguucuu

SEQ ID NO: 149624 - RNA, 22 nt, Human
ggugccagaguggcccaggggc

SEQ ID NO: 149625 - RNA, 22 nt, Human
ccaggcucuaucccuccuucuu

SEQ ID NO: 149626 - RNA, 22 nt, Human
ccuugcucaagcuagugacggg

SEQ ID NO: 149627 - RNA, 22 nt, Human
cuaggaauccuuuuagaguugg

SEQ ID NO: 149628 - RNA, 23 nt, Human
aacagccaacuuuagcggguggc

SEQ ID NO: 149629 - RNA, 17 nt, Human
gccuucucugcccucac

SEQ ID NO: 149630 - RNA, 22 nt, Human
cagucccaugagcccagaacau

SEQ ID NO: 149631 - RNA, 22 nt, Human
uggcaggcaaguucagcuccac

SEQ ID NO: 149632 - RNA, 22 nt, Human
acacaucucaggggacacucuc

SEQ ID NO: 149633 - RNA, 22 nt, Human
uccaggcaaaaaccaacuacag

SEQ ID NO: 149634 - RNA, 22 nt, Human
agcaggcuuacuuucugauuag

SEQ ID NO: 149635 - RNA, 18 nt, Human
ccuagccuccaagcucau

SEQ ID NO: 149636 - RNA, 22 nt, Human
aauucuauguucuugaguaaga

SEQ ID NO: 149637 - RNA, 22 nt, Human
gagaccucuugguaucgcuagg

SEQ ID NO: 149638 - RNA, 20 nt, Human
cauuugaaucuccauucugc

SEQ ID NO: 149639 - RNA, 22 nt, Human
gcagccuccgcacugcgagucc

SEQ ID NO: 149640 - RNA, 22 nt, Human
ccugggcuccacuccaagagca

SEQ ID NO: 149641 - RNA, 22 nt, Human
ccuggcagacagcacugaagcu

SEQ ID NO: 149642 - RNA, 22 nt, Human
caggcccucgcccgcagcgacc

SEQ ID NO: 149643 - RNA, 22 nt, Human
gcaggcucccuugcagagcagg

SEQ ID NO: 149644 - RNA, 22 nt, Human
guggccagccccauggacaguu

SEQ ID NO: 149645 - RNA, 22 nt, Human
ucuggcaguuccuuguugauau

SEQ ID NO: 149646 - RNA, 22 nt, Human
gagguggcuccuucagggaaua

SEQ ID NO: 149647 - RNA, 22 nt, Human
uuccaggacuggguguuugaag

SEQ ID NO: 149648 - RNA, 22 nt, Human
agcucccauuaucuucugaaac

SEQ ID NO: 149649 - RNA, 22 nt, Human
acacacagcgccuaccaugugc

SEQ ID NO: 149650 - RNA, 22 nt, Human
ugggcugcuucuauuggugguc

SEQ ID NO: 149651 - RNA, 22 nt, Human
aucacagagauugcuuuuaaaa

SEQ ID NO: 149652 - RNA, 22 nt, Human
acacauaagccuaaucaucucc

SEQ ID NO: 149653 - RNA, 22 nt, Human
uacacaucucugucaguaguga

SEQ ID NO: 149654 - RNA, 22 nt, Human
auaaaauuugcuacuguuaaau

SEQ ID NO: 149655 - RNA, 20 nt, Human
acaaaauagguacuggguag

SEQ ID NO: 149656 - RNA, 22 nt, Human
ucacuguaccuuccauuucauu

SEQ ID NO: 149657 - RNA, 22 nt, Human
ccacacagucaguuuccaagaa

SEQ ID NO: 149658 - RNA, 22 nt, Human
gcugggcucaccaggccacuag

SEQ ID NO: 149659 - RNA, 21 nt, Human
auucagaguaauucaucuuua

SEQ ID NO: 149660 - RNA, 19 nt, Human
caggucuucuuggaggacu

SEQ ID NO: 149661 - RNA, 22 nt, Human
ugggcuuaggucggaggcggcc

SEQ ID NO: 149662 - RNA, 22 nt, Human
uuccauuuauucuuguccagau

SEQ ID NO: 149663 - RNA, 22 nt, Human
ugcuucugcaacuugaauguac

SEQ ID NO: 149664 - RNA, 22 nt, Human
acaggcucucagccaguuggca

SEQ ID NO: 149665 - RNA, 22 nt, Human
ggcugaguugagaggauuacuu

SEQ ID NO: 149666 - RNA, 19 nt, Human
gcugggcuuggguuuguag

SEQ ID NO: 149667 - RNA, 22 nt, Human
ugggcugaacuucaucugauga

SEQ ID NO: 149668 - RNA, 17 nt, Human
ucuguucaagugagagg

SEQ ID NO: 149669 - RNA, 22 nt, Human
gcacauaaagggcaugggaggu

SEQ ID NO: 149670 - RNA, 22 nt, Human
auaugagaauuggaaaauauca

SEQ ID NO: 149671 - RNA, 22 nt, Human
cccgagugucuacucacuccca

SEQ ID NO: 149672 - RNA, 22 nt, Human
gguggccugaauuagcucaggg

SEQ ID NO: 149673 - RNA, 22 nt, Human
ucuggcaggguguguauuuaca

SEQ ID NO: 149674 - RNA, 22 nt, Human
uuggcaggaauauugcagaggu

SEQ ID NO: 149675 - RNA, 22 nt, Human
gcuucuggugaggccucaggaa

SEQ ID NO: 149676 - RNA, 22 nt, Human
gucuucuguucugugaggcuuc

SEQ ID NO: 149677 - RNA, 19 nt, Human
cagcccucuuaccacugug

SEQ ID NO: 149678 - RNA, 22 nt, Human
gcaggcucacucuguuuggcuc

SEQ ID NO: 149679 - RNA, 22 nt, Human
acuggggagagucaugccagca

SEQ ID NO: 149680 - RNA, 22 nt, Human
gcacucuccuggcugccacagu

SEQ ID NO: 149681 - RNA, 22 nt, Human
uggccuccccuaacagccucuu

SEQ ID NO: 149682 - RNA, 22 nt, Human
ucuccugggaggacaaggaagg

SEQ ID NO: 149683 - RNA, 22 nt, Human
acacucacccucccacugccug

SEQ ID NO: 149684 - RNA, 22 nt, Human
ucccaccccggucaagggcuga

SEQ ID NO: 149685 - RNA, 22 nt, Human
gcccacacagcagauccuuugg

SEQ ID NO: 149686 - RNA, 23 nt, Human
uccaggagcaugcuggcuggcga

SEQ ID NO: 149687 - RNA, 22 nt, Human
ugguaagaacccaucagagaag

SEQ ID NO: 149688 - RNA, 22 nt, Human
gggaccuggggacuccuuguuc

SEQ ID NO: 149689 - RNA, 22 nt, Human
gcuucugggguucuggcaugcu

SEQ ID NO: 149690 - RNA, 22 nt, Human
guccucugcuucaugcccugau

SEQ ID NO: 149691 - RNA, 22 nt, Human
gcuucuggaggagcugggcuga

SEQ ID NO: 149692 - RNA, 22 nt, Human
auggccugaugcaccuguccca

SEQ ID NO: 149693 - RNA, 22 nt, Human
auggccugcagugcugccacag

SEQ ID NO: 149694 - RNA, 22 nt, Human
cgcaggcugcagccaagaagag

SEQ ID NO: 149695 - RNA, 22 nt, Human
cauuggaaugcauuugaagaga

SEQ ID NO: 149696 - RNA, 22 nt, Human
gauggccuggguccccuuccgg

SEQ ID NO: 149697 - RNA, 19 nt, Human
acacauuugcacaauccac

SEQ ID NO: 149698 - RNA, 22 nt, Human
cuguccuccagacgacaguccc

SEQ ID NO: 149699 - RNA, 22 nt, Human
ugcuucuguucuuucaccuacg

SEQ ID NO: 149700 - RNA, 22 nt, Human
gggcucucaugaguguguggua

SEQ ID NO: 149701 - RNA, 22 nt, Human
ccuggcaggccccuccuggauu

SEQ ID NO: 149702 - RNA, 22 nt, Human
gaugaaaaucuugagaugucga

SEQ ID NO: 149703 - RNA, 20 nt, Human
ggccucaguguccuuguuug

SEQ ID NO: 149704 - RNA, 22 nt, Human
uccuggcagaaauggggcugug

SEQ ID NO: 149705 - RNA, 22 nt, Human
uuucagaaaacuuaucaucagu

SEQ ID NO: 149706 - RNA, 22 nt, Human
uauuucagacacugaucuugca

SEQ ID NO: 149707 - RNA, 22 nt, Human
gcccacaccauuuauucuuugu

SEQ ID NO: 149708 - RNA, 22 nt, Human
ggccucagaaauagaguaaaau

SEQ ID NO: 149709 - RNA, 22 nt, Human
agcuuguuaaggaugcauauua

SEQ ID NO: 149710 - RNA, 22 nt, Human
auguaugagagauucuuuuauu

SEQ ID NO: 149711 - RNA, 22 nt, Human
aauucuugguccuaguguauaa

SEQ ID NO: 149712 - RNA, 23 nt, Human
uuccaggcagagcagggauuaga

SEQ ID NO: 149713 - RNA, 22 nt, Human
aagauuuaccacuuuauucaag

SEQ ID NO: 149714 - RNA, 22 nt, Human
agugaaccaggcugcgucccug

SEQ ID NO: 149715 - RNA, 22 nt, Human
gacacagacaguuagagguaau

SEQ ID NO: 149716 - RNA, 22 nt, Human
aggacacacagaauacaaaucc

SEQ ID NO: 149717 - RNA, 18 nt, Human
ugcaggcuguugaaacug

SEQ ID NO: 149718 - RNA, 22 nt, Human
cacacacuguuaauguaggagu

SEQ ID NO: 149719 - RNA, 22 nt, Human
ugaacaacugcaaaaaucucca

SEQ ID NO: 149720 - RNA, 22 nt, Human
ucuggcagaucuucccacguuu

SEQ ID NO: 149721 - RNA, 22 nt, Human
aguaaaauuguauuggaaaaca

SEQ ID NO: 149722 - RNA, 21 nt, Human
acacacugaguuuuccacugu

SEQ ID NO: 149723 - RNA, 22 nt, Human
ccugggcugggcgucucauggg

SEQ ID NO: 149724 - RNA, 22 nt, Human
guuuaagaaaauucauguuguu

SEQ ID NO: 149725 - RNA, 22 nt, Human
ccccuuccacagugcuuccuaa

SEQ ID NO: 149726 - RNA, 22 nt, Human
acugggcuagaguggaagcugg

SEQ ID NO: 149727 - RNA, 22 nt, Human
gggcugacagcacgccuucugu

SEQ ID NO: 149728 - RNA, 22 nt, Human
aucccacaccccuacaacauau

SEQ ID NO: 149729 - RNA, 22 nt, Human
gaagcacugcauuucaagauca

SEQ ID NO: 149730 - RNA, 22 nt, Human
ugcuucugggccugguguuccc

SEQ ID NO: 149731 - RNA, 17 nt, Human
agcaggcugcagaggcc

SEQ ID NO: 149732 - RNA, 22 nt, Human
gguggcauaagaacacuaaaga

SEQ ID NO: 149733 - RNA, 22 nt, Human
caagcuuguuucuccugggggu

SEQ ID NO: 149734 - RNA, 22 nt, Human
ucacacagcugacagagccuuu

SEQ ID NO: 149735 - RNA, 22 nt, Human
uacagccacaggugacucucau

SEQ ID NO: 149736 - RNA, 22 nt, Human
cugagccagggccacacaugga

SEQ ID NO: 149737 - RNA, 22 nt, Human
uuauuuaaaagugguaagauuc

SEQ ID NO: 149738 - RNA, 22 nt, Human
uucauacaguggcugcacucca

SEQ ID NO: 149739 - RNA, 22 nt, Human
aacacauaggcagagcaugaca

SEQ ID NO: 149740 - RNA, 22 nt, Human
cacauugcagcuucuuuuggcu

SEQ ID NO: 149741 - RNA, 19 nt, Human
gcuggcagaauuuugaacc

SEQ ID NO: 149742 - RNA, 22 nt, Human
aaagagucaaaggcaugucucu

SEQ ID NO: 149743 - RNA, 22 nt, Human
accugccuaucagcugccugcu

SEQ ID NO: 149744 - RNA, 22 nt, Human
acacacuuuaaauuaaaccucu

SEQ ID NO: 149745 - RNA, 22 nt, Human
ccugggcucaagcgaucuuguc

SEQ ID NO: 149746 - RNA, 22 nt, Human
accauugccuagaaaaauuccu

SEQ ID NO: 149747 - RNA, 22 nt, Human
acacagaugcauuacacaucua

SEQ ID NO: 149748 - RNA, 22 nt, Human
ucucuuaaaggucuucagcuga

SEQ ID NO: 149749 - RNA, 22 nt, Human
acaagaauuuacauguagugga

SEQ ID NO: 149750 - RNA, 22 nt, Human
uggcuagguagcuuucugcugu

SEQ ID NO: 149751 - RNA, 22 nt, Human
gcuggggaggcagcagagaaca

SEQ ID NO: 149752 - RNA, 19 nt, Human
ccugccugagcugucccuc

SEQ ID NO: 149753 - RNA, 22 nt, Human
aauguugaggauaucagaaaau

SEQ ID NO: 149754 - RNA, 22 nt, Human
ccuggcagccucagccaauucu

SEQ ID NO: 149755 - RNA, 22 nt, Human
gcaggcuccaacuggaggaguu

SEQ ID NO: 149756 - RNA, 22 nt, Human
caaauucacaugauugcuucug

SEQ ID NO: 149757 - RNA, 22 nt, Human
ucuguucagguuucagagaacu

SEQ ID NO: 149758 - RNA, 22 nt, Human
cuguggcugcguaggucuggca

SEQ ID NO: 149759 - RNA, 22 nt, Human
cuucugggauuuuugaagacuc

SEQ ID NO: 149760 - RNA, 22 nt, Human
cauuugaaugagauugcuguaa

SEQ ID NO: 149761 - RNA, 22 nt, Human
cuuggcagagggcugggcucag

SEQ ID NO: 149762 - RNA, 22 nt, Human
ucuguucaugaaauaucuuuuu

SEQ ID NO: 149763 - RNA, 22 nt, Human
ugccucucuaacccaugcccaa

SEQ ID NO: 149764 - RNA, 22 nt, Human
agcugccauggccugaauuuac

SEQ ID NO: 149765 - RNA, 22 nt, Human
uuguaugagcuccaggaacuca

SEQ ID NO: 149766 - RNA, 22 nt, Human
acaggcucacagucauuucauu

SEQ ID NO: 149767 - RNA, 22 nt, Human
caaauucagaaaauugguagag

SEQ ID NO: 149768 - RNA, 22 nt, Human
uccaaguccauuaugguggucu

SEQ ID NO: 149769 - RNA, 22 nt, Human
acuggcagaauugaauaguugu

SEQ ID NO: 149770 - RNA, 22 nt, Human
cuugaaucuggcuuugccacuu

SEQ ID NO: 149771 - RNA, 22 nt, Human
ucuggcagguucccauguuaug

SEQ ID NO: 149772 - RNA, 22 nt, Human
cccugagcgugaggaggaagua

SEQ ID NO: 149773 - RNA, 22 nt, Human
ucuguucauacagaguauagua

SEQ ID NO: 149774 - RNA, 22 nt, Human
ccaggcucagggcagacuuuca

SEQ ID NO: 149775 - RNA, 22 nt, Human
ccugggcucugaggagggaguc

SEQ ID NO: 149776 - RNA, 22 nt, Human
aagugugggaaguugcuaaaau

SEQ ID NO: 149777 - RNA, 19 nt, Human
acuggcagggcugcggugg

SEQ ID NO: 149778 - RNA, 22 nt, Human
uucccacaguguugaauccucu

SEQ ID NO: 149779 - RNA, 22 nt, Human
uccugagccugacaaucaccau

SEQ ID NO: 149780 - RNA, 22 nt, Human
gcacauacugcaaagauuacua

SEQ ID NO: 149781 - RNA, 22 nt, Human
uauuuagaaugcguguacgugu

SEQ ID NO: 149782 - RNA, 22 nt, Human
uucacaaaacacuauuuucugg

SEQ ID NO: 149783 - RNA, 22 nt, Human
uauucccauuccacuuaucaag

SEQ ID NO: 149784 - RNA, 22 nt, Human
uauuccuauggccacugcuacu

SEQ ID NO: 149785 - RNA, 22 nt, Human
augaccagccgagauaaacaga

SEQ ID NO: 149786 - RNA, 22 nt, Human
uggcagugguaccggcucucag

SEQ ID NO: 149787 - RNA, 22 nt, Human
gauggcagguaguggucucauc

SEQ ID NO: 149788 - RNA, 22 nt, Human
ggcaggcuugauauggggggac

SEQ ID NO: 149789 - RNA, 20 nt, Human
agccugccagcuggcccaga

SEQ ID NO: 149790 - RNA, 22 nt, Human
ucuggggaccauggcaucuaaa

SEQ ID NO: 149791 - RNA, 22 nt, Human
acugggcuguuuuuugagugga

SEQ ID NO: 149792 - RNA, 22 nt, Human
ucccagccaggcucuaccacuu

SEQ ID NO: 149793 - RNA, 22 nt, Human
acagguggccccgagggagugg

SEQ ID NO: 149794 - RNA, 22 nt, Human
ggggucccugcaccagcauguc

SEQ ID NO: 149795 - RNA, 22 nt, Human
gacacagagcucacagucuccu

SEQ ID NO: 149796 - RNA, 22 nt, Human
ugggcuuccuggagccugugcu

SEQ ID NO: 149797 - RNA, 20 nt, Human
gccucagccaacccaugggg

SEQ ID NO: 149798 - RNA, 22 nt, Human
cuugaauccaaaugggagauga

SEQ ID NO: 149799 - RNA, 20 nt, Human
agacaaaaugacuucaugca

SEQ ID NO: 149800 - RNA, 22 nt, Human
gggcugacauauuuggugcucu

SEQ ID NO: 149801 - RNA, 22 nt, Human
auugaaucugcacuaguauuuu

SEQ ID NO: 149802 - RNA, 22 nt, Human
aaaugcuacauacacaucaggg

SEQ ID NO: 149803 - RNA, 22 nt, Human
ugcuucuggcuuaucucgugcc

SEQ ID NO: 149804 - RNA, 22 nt, Human
uaugaaaagguggccaauguag

SEQ ID NO: 149805 - RNA, 22 nt, Human
cugccugcugcccuccagagcc

SEQ ID NO: 149806 - RNA, 22 nt, Human
gccuggcauauaguaguugugc

SEQ ID NO: 149807 - RNA, 22 nt, Human
gucaaauauacuaagagguaaa

SEQ ID NO: 149808 - RNA, 22 nt, Human
aauucuauaggcaagcuauuuu

SEQ ID NO: 149809 - RNA, 22 nt, Human
ugcuucuguauugaaauuguua

SEQ ID NO: 149810 - RNA, 22 nt, Human
aucacagagcucccuuccacug

SEQ ID NO: 149811 - RNA, 22 nt, Human
cuucuggguauuccagauaccu

SEQ ID NO: 149812 - RNA, 23 nt, Human
acuccccagucucuucuugccaa

SEQ ID NO: 149813 - RNA, 22 nt, Human
ugaaaucaauugcaauguuuau

SEQ ID NO: 149814 - RNA, 22 nt, Human
acagaguccuagcugcaaagaa

SEQ ID NO: 149815 - RNA, 22 nt, Human
uccaggaggaggaaggcugcca

SEQ ID NO: 149816 - RNA, 22 nt, Human
uuggagagauuuaggucucagu

SEQ ID NO: 149817 - RNA, 22 nt, Human
ugaagcuuuccuguggucagga

SEQ ID NO: 149818 - RNA, 22 nt, Human
uccccacacuuucacuccuggc

SEQ ID NO: 149819 - RNA, 22 nt, Human
gccaagcuuauaugaugcuuga

SEQ ID NO: 149820 - RNA, 23 nt, Human
ucuuuucaaugguucuuuaugug

SEQ ID NO: 149821 - RNA, 22 nt, Human
cuugggaggagaacaaagcucc

SEQ ID NO: 149822 - RNA, 22 nt, Human
aggcuccauaccaucuccggag

SEQ ID NO: 149823 - RNA, 22 nt, Human
guggccagccagggugcugaug

SEQ ID NO: 149824 - RNA, 23 nt, Human
acugggcuuaugaggaggcuugu

SEQ ID NO: 149825 - RNA, 21 nt, Human
acaggcucuggggaugcuggg

SEQ ID NO: 149826 - RNA, 22 nt, Human
aggugaguccugggcacaggua

SEQ ID NO: 149827 - RNA, 22 nt, Human
uaguuucagcuccuucauccug

SEQ ID NO: 149828 - RNA, 20 nt, Human
gcaggcuccgggcuugggag

SEQ ID NO: 149829 - RNA, 22 nt, Human
cuucuggguaauucuucuucau

SEQ ID NO: 149830 - RNA, 22 nt, Human
aaacagcuaauggccaggaaua

SEQ ID NO: 149831 - RNA, 19 nt, Human
ccuguucaugacucugucc

SEQ ID NO: 149832 - RNA, 22 nt, Human
agcaggcugcuggcguugaagu

SEQ ID NO: 149833 - RNA, 22 nt, Human
gccuccuggaagucacauguuu

SEQ ID NO: 149834 - RNA, 22 nt, Human
agaggcuucucggauggggcag

SEQ ID NO: 149835 - RNA, 22 nt, Human
cugcaggagcaaagccucugcu

SEQ ID NO: 149836 - RNA, 22 nt, Human
ggccucucugagagcagacguu

SEQ ID NO: 149837 - RNA, 22 nt, Human
ccucuccuugcacccgucccgc

SEQ ID NO: 149838 - RNA, 22 nt, Human
gagugaugucuguagugaagaa

SEQ ID NO: 149839 - RNA, 22 nt, Human
guuucaaauagguuucagcaaa

SEQ ID NO: 149840 - RNA, 22 nt, Human
ccugggcuguaccugugcgcgg

SEQ ID NO: 149841 - RNA, 22 nt, Human
gcuggcagaagagcugguucaa

SEQ ID NO: 149842 - RNA, 22 nt, Human
augaguugaagcuacaagaggc

SEQ ID NO: 149843 - RNA, 22 nt, Human
ggcaggcuccguguuccauucc

SEQ ID NO: 149844 - RNA, 22 nt, Human
uuccaggcuauccggugaaggg

SEQ ID NO: 149845 - RNA, 22 nt, Human
aacuuucagaauccuaugcauu

SEQ ID NO: 149846 - RNA, 22 nt, Human
ugcuucuggaguaacaggguga

SEQ ID NO: 149847 - RNA, 22 nt, Human
ccugggcuggaguacagcagug

SEQ ID NO: 149848 - RNA, 22 nt, Human
ucccuccuggccgucaccgcug

SEQ ID NO: 149849 - RNA, 22 nt, Human
ucuggcagcagcaucaguggcu

SEQ ID NO: 149850 - RNA, 22 nt, Human
guggccaggccgacugccaggc

SEQ ID NO: 149851 - RNA, 22 nt, Human
uuuccuaagguagugauaauuu

SEQ ID NO: 149852 - RNA, 22 nt, Human
gcucugagaggaugcugagcag

SEQ ID NO: 149853 - RNA, 22 nt, Human
gcuccaggagagggaagcagau

SEQ ID NO: 149854 - RNA, 19 nt, Human
gggaccugacuaauuggca

SEQ ID NO: 149855 - RNA, 22 nt, Human
acuccaggcaucugcuucugcu

SEQ ID NO: 149856 - RNA, 22 nt, Human
gggcugaccaaugccuugcuuu

SEQ ID NO: 149857 - RNA, 22 nt, Human
gaaagaagcuuuagauggcuau

SEQ ID NO: 149858 - RNA, 22 nt, Human
uccuggcagugcuuguuuugga

SEQ ID NO: 149859 - RNA, 22 nt, Human
uuggcuucuugugaaaucugag

SEQ ID NO: 149860 - RNA, 22 nt, Human
ggaggugggcuaaggacucucu

SEQ ID NO: 149861 - RNA, 22 nt, Human
ccuggcagucaggggaguccuu

SEQ ID NO: 149862 - RNA, 22 nt, Human
aauagauacuacuuagauguag

SEQ ID NO: 149863 - RNA, 19 nt, Human
guccuggcgccgccacacc

SEQ ID NO: 149864 - RNA, 22 nt, Human
cacacacugacaccuuaucuug

SEQ ID NO: 149865 - RNA, 22 nt, Human
uuugaacugauaaucuucuguu

SEQ ID NO: 149866 - RNA, 22 nt, Human
cugggcugcaggaguggggcaa

SEQ ID NO: 149867 - RNA, 19 nt, Human
guccucucaacaacccggg

SEQ ID NO: 149868 - RNA, 22 nt, Human
ucaucacaauuuuaugacccuc

SEQ ID NO: 149869 - RNA, 22 nt, Human
gcuggggagggcgucaaggcca

SEQ ID NO: 149870 - RNA, 22 nt, Human
cacauacuuguguguacauaug

SEQ ID NO: 149871 - RNA, 22 nt, Human
gcuccuggguguggcugccccu

SEQ ID NO: 149872 - RNA, 22 nt, Human
guccucugggcagcugccccac

SEQ ID NO: 149873 - RNA, 22 nt, Human
ccaucuccaaauaccaucacau

SEQ ID NO: 149874 - RNA, 22 nt, Human
uguaaagaaagacgcagaguua

SEQ ID NO: 149875 - RNA, 22 nt, Human
agcacaggaccaaggaagcugu

SEQ ID NO: 149876 - RNA, 22 nt, Human
uggcuaggaauccaugacucuc

SEQ ID NO: 149877 - RNA, 22 nt, Human
agcaggcuaggaaccucacugc

SEQ ID NO: 149878 - RNA, 20 nt, Human
ucuguucaaaucuuaguucc

SEQ ID NO: 149879 - RNA, 22 nt, Human
ugcucugcacaucccucacaaa

SEQ ID NO: 149880 - RNA, 22 nt, Human
ucuguucauaguaguguauaug

SEQ ID NO: 149881 - RNA, 22 nt, Human
cugccucuauaggaguccacca

SEQ ID NO: 149882 - RNA, 22 nt, Human
cacuguccaugcuugcuaaccc

SEQ ID NO: 149883 - RNA, 22 nt, Human
uggcagagagagugcagucgac

SEQ ID NO: 149884 - RNA, 22 nt, Human
ccuguucaaugcccuggcuuca

SEQ ID NO: 149885 - RNA, 22 nt, Human
cugggcuuugguacugugauua

SEQ ID NO: 149886 - RNA, 22 nt, Human
agaggcuuggccucaguucugu

SEQ ID NO: 149887 - RNA, 22 nt, Human
aacagcaugcuggguaacauug

SEQ ID NO: 149888 - RNA, 22 nt, Human
guuagaauaaaaggucagagag

SEQ ID NO: 149889 - RNA, 22 nt, Human
cacaauguauauguauaucaaa

SEQ ID NO: 149890 - RNA, 22 nt, Human
uuguaugaucccauuuagugaa

SEQ ID NO: 149891 - RNA, 22 nt, Human
cucuccagaauaugccgccgug

SEQ ID NO: 149892 - RNA, 22 nt, Human
cagcccaggccgacaguuccuc

SEQ ID NO: 149893 - RNA, 22 nt, Human
ggcuuugguagacacagauuga

SEQ ID NO: 149894 - RNA, 22 nt, Human
gcuucuggagucuucagaggaa

SEQ ID NO: 149895 - RNA, 22 nt, Human
auugacuuccauagcuaccugg

SEQ ID NO: 149896 - RNA, 22 nt, Human
ccuggcagguuacaaccaguua

SEQ ID NO: 149897 - RNA, 22 nt, Human
ucugggcuuuguaaugggaggu

SEQ ID NO: 149898 - RNA, 22 nt, Human
gccuggggaacuugauccuguc

SEQ ID NO: 149899 - RNA, 22 nt, Human
uuccaggaggagguacuagagg

SEQ ID NO: 149900 - RNA, 22 nt, Human
ccuccagcgcgauccacuccgg

SEQ ID NO: 149901 - RNA, 22 nt, Human
ggcugcaggcagaggcugucug

SEQ ID NO: 149902 - RNA, 22 nt, Human
acuggagcugagagcaugggua

SEQ ID NO: 149903 - RNA, 22 nt, Human
ggggaccuggccacccauccuu

SEQ ID NO: 149904 - RNA, 22 nt, Human
ucagcucuguguacaguuagca

SEQ ID NO: 149905 - RNA, 22 nt, Human
cuguaugaaauugucauuuuua

SEQ ID NO: 149906 - RNA, 23 nt, Human
uguggcugagaaauugacaacuu

SEQ ID NO: 149907 - RNA, 22 nt, Human
acaggugguaaaauggacuguc

SEQ ID NO: 149908 - RNA, 20 nt, Human
gcuccccuucucugggccuc

SEQ ID NO: 149909 - RNA, 22 nt, Human
gggcugacuccuauuggaugaa

SEQ ID NO: 149910 - RNA, 22 nt, Human
ucuggggcaguuacuggggccu

SEQ ID NO: 149911 - RNA, 22 nt, Human
ccugggcuugguuguugagaac

SEQ ID NO: 149912 - RNA, 22 nt, Human
gaggcugcggggaggagccugc

SEQ ID NO: 149913 - RNA, 22 nt, Human
aaugaagcaagcugcuguguuu

SEQ ID NO: 149914 - RNA, 22 nt, Human
gaggacucugggcguguauggg

SEQ ID NO: 149915 - RNA, 22 nt, Human
uccacacacauuucuaugugca

SEQ ID NO: 149916 - RNA, 22 nt, Human
cagcacaggucaguuuuuuaag

SEQ ID NO: 149917 - RNA, 22 nt, Human
ugaacacugccauauuuaagaa

SEQ ID NO: 149918 - RNA, 18 nt, Human
cccucuugcacaaagcaa

SEQ ID NO: 149919 - RNA, 17 nt, Human
cucugggcagccugggg

SEQ ID NO: 149920 - RNA, 22 nt, Human
gccccacagccugcggucucag

SEQ ID NO: 149921 - RNA, 22 nt, Human
ccagcucucaaggcucccuggg

SEQ ID NO: 149922 - RNA, 22 nt, Human
gcuggggagaauuggguuaucu

SEQ ID NO: 149923 - RNA, 22 nt, Human
gcucugagacaguagagauggc

SEQ ID NO: 149924 - RNA, 22 nt, Human
auguaugaugcuaggcucucag

SEQ ID NO: 149925 - RNA, 20 nt, Human
augggcugguuaggaagugu

SEQ ID NO: 149926 - RNA, 21 nt, Human
uccugccuuaguccagagcag

SEQ ID NO: 149927 - RNA, 22 nt, Human
ucaggauggagggaagcacaga

SEQ ID NO: 149928 - RNA, 22 nt, Human
cugaaccacuaauauuuugauu

SEQ ID NO: 149929 - RNA, 22 nt, Human
cacuggaauauggcguugaacc

SEQ ID NO: 149930 - RNA, 22 nt, Human
ccuggcagcagcacaugccuuc

SEQ ID NO: 149931 - RNA, 22 nt, Human
uccccaccccagaacuacuagg

SEQ ID NO: 149932 - RNA, 22 nt, Human
ggaggacacuggcucugccuuc

SEQ ID NO: 149933 - RNA, 22 nt, Human
gaaguuuauuucaaucuauuca

SEQ ID NO: 149934 - RNA, 22 nt, Human
ucugcagaaggaaucagcugag

SEQ ID NO: 149935 - RNA, 22 nt, Human
ccugggcuuucggcggcuuccu

SEQ ID NO: 149936 - RNA, 22 nt, Human
acacucucagcuuuucaacuua

SEQ ID NO: 149937 - RNA, 22 nt, Human
ccugggcucugucagaauuggg

SEQ ID NO: 149938 - RNA, 22 nt, Human
cucugguuucgcaggaaauaga

SEQ ID NO: 149939 - RNA, 22 nt, Human
uucugggggaauacagcuauga

SEQ ID NO: 149940 - RNA, 22 nt, Human
cauauucuuuaagcaaugcucu

SEQ ID NO: 149941 - RNA, 22 nt, Human
gggacccagguaauccugugcu

SEQ ID NO: 149942 - RNA, 22 nt, Human
uuaaaacugcaaauccuacuga

SEQ ID NO: 149943 - RNA, 22 nt, Human
acacacucaauugcauaagcac

SEQ ID NO: 149944 - RNA, 22 nt, Human
gggcaaaaccugggcaucauga

SEQ ID NO: 149945 - RNA, 22 nt, Human
acuccugggugcugaccagcgu

SEQ ID NO: 149946 - RNA, 22 nt, Human
cuuccucuagccuaguaaugcc

SEQ ID NO: 149947 - RNA, 22 nt, Human
ugucaaaaugacuuuacuacag

SEQ ID NO: 149948 - RNA, 22 nt, Human
uaauauuucuacccugcugccu

SEQ ID NO: 149949 - RNA, 22 nt, Human
uccaagcuuuccaugcccucac

SEQ ID NO: 149950 - RNA, 22 nt, Human
gcagcucucuggccugcccugg

SEQ ID NO: 149951 - RNA, 21 nt, Human
ucuggcaguggucuuucaaau

SEQ ID NO: 149952 - RNA, 22 nt, Human
ucuggcagugauuucugugauc

SEQ ID NO: 149953 - RNA, 22 nt, Human
ccuggcagcuccguggccuucc

SEQ ID NO: 149954 - RNA, 22 nt, Human
aagauuuagggccaguuuacau

SEQ ID NO: 149955 - RNA, 22 nt, Human
cacauuccuggugcucagcagc

SEQ ID NO: 149956 - RNA, 22 nt, Human
cccagcccccgagugucuggaa

SEQ ID NO: 149957 - RNA, 19 nt, Human
ccagucccauacaggagau

SEQ ID NO: 149958 - RNA, 22 nt, Human
acuggcagccacaacuggcagg

SEQ ID NO: 149959 - RNA, 22 nt, Human
cuucaguucuaaaguagaaugu

SEQ ID NO: 149960 - RNA, 22 nt, Human
agggcugaagggaggugcucau

SEQ ID NO: 149961 - RNA, 18 nt, Human
aguuccuuaaauuggugu

SEQ ID NO: 149962 - RNA, 21 nt, Human
ucuggggaagacaucuaggau

SEQ ID NO: 149963 - RNA, 22 nt, Human
guccucuguuagaaaugugcuu

SEQ ID NO: 149964 - RNA, 19 nt, Human
aaaugugaugguacaauuc

SEQ ID NO: 149965 - RNA, 22 nt, Human
uuccaggaggcacugacagagg

SEQ ID NO: 149966 - RNA, 22 nt, Human
ugcaggcugcagucucaggugg

SEQ ID NO: 149967 - RNA, 22 nt, Human
ugcuucugcuuuacuugguuca

SEQ ID NO: 149968 - RNA, 22 nt, Human
uucuuguauguaugcaaaauca

SEQ ID NO: 149969 - RNA, 22 nt, Human
ccacaaaacugugugucaaaga

SEQ ID NO: 149970 - RNA, 22 nt, Human
ggcggguguaaguaggacagcg

SEQ ID NO: 149971 - RNA, 17 nt, Human
gcuucuggagcuucugu

SEQ ID NO: 149972 - RNA, 22 nt, Human
acuguucaucucuuagaaagua

SEQ ID NO: 149973 - RNA, 22 nt, Human
ccuggcagggcugcaguaaugg

SEQ ID NO: 149974 - RNA, 22 nt, Human
aauaauuuuagcucagaguugu

SEQ ID NO: 149975 - RNA, 22 nt, Human
cuguggcuucugcuugggccuc

SEQ ID NO: 149976 - RNA, 22 nt, Human
ccuccuggcuuuucccauugaa

SEQ ID NO: 149977 - RNA, 22 nt, Human
ggcaggcucuuggccuuaugag

SEQ ID NO: 149978 - RNA, 22 nt, Human
guccucugacucagccuuggga

SEQ ID NO: 149979 - RNA, 22 nt, Human
uucauugcaguucuucagguua

SEQ ID NO: 149980 - RNA, 22 nt, Human
uggccagguugggcuuugcagc

SEQ ID NO: 149981 - RNA, 22 nt, Human
ucauggcacuuagcacaguccu

SEQ ID NO: 149982 - RNA, 22 nt, Human
guacacacuauguauuguacac

SEQ ID NO: 149983 - RNA, 22 nt, Human
ucuggcagagucagugcacaca

SEQ ID NO: 149984 - RNA, 22 nt, Human
gugugagggacagagaaagggg

SEQ ID NO: 149985 - RNA, 22 nt, Human
aaacagauaaugcuauaaaugg

SEQ ID NO: 149986 - RNA, 22 nt, Human
uacauucccccaauuaccaaug

SEQ ID NO: 149987 - RNA, 22 nt, Human
cuccaaguccgagggcucucaa

SEQ ID NO: 149988 - RNA, 22 nt, Human
cuggcaggagcauucacagagg

SEQ ID NO: 149989 - RNA, 22 nt, Human
uggcaguggcucagagugcaga

SEQ ID NO: 149990 - RNA, 22 nt, Human
cucucuggaagggggagcugau

SEQ ID NO: 149991 - RNA, 22 nt, Human
agaggccuccgaaaggugggcu

SEQ ID NO: 149992 - RNA, 22 nt, Human
uucucuuuuagaggcuccauga

SEQ ID NO: 149993 - RNA, 22 nt, Human
accugccuauggagccacaugg

SEQ ID NO: 149994 - RNA, 22 nt, Human
gcuggcaggauagaagucuaau

SEQ ID NO: 149995 - RNA, 22 nt, Human
acaggcucuggggcaggauggc

SEQ ID NO: 149996 - RNA, 22 nt, Human
gcuggcagcuggaaguugggcu

SEQ ID NO: 149997 - RNA, 22 nt, Human
ggcccagccucagacaugcccu

SEQ ID NO: 149998 - RNA, 22 nt, Human
ccaccccaaaugaagaccucuc

SEQ ID NO: 149999 - RNA, 22 nt, Human
guuugaaugcaguaugcauuuu

SEQ ID NO: 150000 - RNA, 22 nt, Human
aguaaaaucaccaucucuuugu

SEQ ID NO: 150001 - RNA, 16 nt, Human
gcagggguggguggag

SEQ ID NO: 150002 - RNA, 22 nt, Human
gaggagcuggcagcgucuccgc

SEQ ID NO: 150003 - RNA, 22 nt, Human
uggaaagaggaagugcccagca

SEQ ID NO: 150004 - RNA, 18 nt, Human
cuccagggaacucaguca

SEQ ID NO: 150005 - RNA, 22 nt, Human
ucuggcaggcaaucggcucugg

SEQ ID NO: 150006 - RNA, 22 nt, Human
cagacagagucuucccaucagu

SEQ ID NO: 150007 - RNA, 22 nt, Human
ggccucagagaaggcugugcgg

SEQ ID NO: 150008 - RNA, 22 nt, Human
caggucuguuuccaucagugcu

SEQ ID NO: 150009 - RNA, 22 nt, Human
auaaugaggauuugcauauuag

SEQ ID NO: 150010 - RNA, 22 nt, Human
agaauucugacaauagaauugg

SEQ ID NO: 150011 - RNA, 22 nt, Human
uuauuccauucaguucaacaag

SEQ ID NO: 150012 - RNA, 15 nt, Human
ccaggcucugcacuc

SEQ ID NO: 150013 - RNA, 22 nt, Human
uuccuggcucacagcagugggg

SEQ ID NO: 150014 - RNA, 22 nt, Human
gacaguuuuuaauccuuucaug

SEQ ID NO: 150015 - RNA, 22 nt, Human
ccauacacacaccaaauuugua

SEQ ID NO: 150016 - RNA, 22 nt, Human
uggccugccacugccacgccac

SEQ ID NO: 150017 - RNA, 22 nt, Human
ccuguucacccuccaugcacag

SEQ ID NO: 150018 - RNA, 22 nt, Human
uccuggcauccgugggucugug

SEQ ID NO: 150019 - RNA, 22 nt, Human
ccacccuaacaauccuuacugu

SEQ ID NO: 150020 - RNA, 22 nt, Human
gggcugcaaugcuucaguuguu

SEQ ID NO: 150021 - RNA, 22 nt, Human
ugagagcacacagaaauauuuu

SEQ ID NO: 150022 - RNA, 22 nt, Human
uggcacagggcuuggucgcuca

SEQ ID NO: 150023 - RNA, 22 nt, Human
acauuuaaauaccuauguuucu

SEQ ID NO: 150024 - RNA, 22 nt, Human
gcuggcagugugaaugacaagc

SEQ ID NO: 150025 - RNA, 22 nt, Human
gaauauuuucaguacagauggu

SEQ ID NO: 150026 - RNA, 23 nt, Human
ccagcccuccaccagcucuaggc

SEQ ID NO: 150027 - RNA, 22 nt, Human
gcuucuggcagugcagccacca

SEQ ID NO: 150028 - RNA, 22 nt, Human
cauguugaauggccuugauuuu

SEQ ID NO: 150029 - RNA, 22 nt, Human
ugcuucugggucccagccuggc

SEQ ID NO: 150030 - RNA, 22 nt, Human
ccagugcccagcugcccaggca

SEQ ID NO: 150031 - RNA, 22 nt, Human
ucuggcaguggaugagggcagc

SEQ ID NO: 150032 - RNA, 22 nt, Human
uuacauaacgguaugaaaaaug

SEQ ID NO: 150033 - RNA, 22 nt, Human
ccugggcugcaugauggcauuu

SEQ ID NO: 150034 - RNA, 22 nt, Human
acacauuugcauaauaccucau

SEQ ID NO: 150035 - RNA, 22 nt, Human
acacacaugccuuuccuaagua

SEQ ID NO: 150036 - RNA, 22 nt, Human
cuaugagaagaaaacaagauua

SEQ ID NO: 150037 - RNA, 20 nt, Human
ucacacaugguaagcuauga

SEQ ID NO: 150038 - RNA, 22 nt, Human
uuugaacuucuccauucugaug

SEQ ID NO: 150039 - RNA, 22 nt, Human
ucaucacauaugucaugauuug

SEQ ID NO: 150040 - RNA, 22 nt, Human
ccuggcagcauugguagagauu

SEQ ID NO: 150041 - RNA, 22 nt, Human
ccugggcugcucauggggauga

SEQ ID NO: 150042 - RNA, 22 nt, Human
auaugaagaauuccaauuugga

SEQ ID NO: 150043 - RNA, 22 nt, Human
auacacacugcuauccuuuuuu

SEQ ID NO: 150044 - RNA, 22 nt, Human
aggcuuuggaaucagaguucug

SEQ ID NO: 150045 - RNA, 22 nt, Human
uauauucaaugauuaguaucag

SEQ ID NO: 150046 - RNA, 21 nt, Human
caugaagccgguucccuguuu

SEQ ID NO: 150047 - RNA, 22 nt, Human
gccuccuggccuuugcuccuca

SEQ ID NO: 150048 - RNA, 21 nt, Human
aagaaguuuggauuuuguccu

SEQ ID NO: 150049 - RNA, 22 nt, Human
guugggaagcagauggaugagc

SEQ ID NO: 150050 - RNA, 23 nt, Human
cucccuggcccuugggagaccug

SEQ ID NO: 150051 - RNA, 22 nt, Human
gcuaggaaucggacccaggaag

SEQ ID NO: 150052 - RNA, 22 nt, Human
uaaguucauaagcuuauucuua

SEQ ID NO: 150053 - RNA, 22 nt, Human
uggcagagucaucacaucugga

SEQ ID NO: 150054 - RNA, 22 nt, Human
gaggggucacaugggcuggcuu

SEQ ID NO: 150055 - RNA, 22 nt, Human
ucuggcaguaauaggggagaga

SEQ ID NO: 150056 - RNA, 22 nt, Human
uuccuggccuaagguaggugac

SEQ ID NO: 150057 - RNA, 22 nt, Human
ucacuguagugagcagaauaua

SEQ ID NO: 150058 - RNA, 22 nt, Human
uaugaagcucucacuguguguc

SEQ ID NO: 150059 - RNA, 22 nt, Human
gcuggggagcaagaguagugag

SEQ ID NO: 150060 - RNA, 20 nt, Human
uauaaauucagagcuuuggu

SEQ ID NO: 150061 - RNA, 22 nt, Human
ccaggccucuggcugcuuaguc

SEQ ID NO: 150062 - RNA, 22 nt, Human
ucugggcuuuugcacuggccau

SEQ ID NO: 150063 - RNA, 22 nt, Human
uauuugaagauucuucugaugu

SEQ ID NO: 150064 - RNA, 22 nt, Human
aacacauauuuauauaugcaca

SEQ ID NO: 150065 - RNA, 22 nt, Human
cagucucuuuauccaccaagcc

SEQ ID NO: 150066 - RNA, 22 nt, Human
ccagguccuguuuucaccacag

SEQ ID NO: 150067 - RNA, 22 nt, Human
uucccacagagauuacauugaa

SEQ ID NO: 150068 - RNA, 22 nt, Human
acuuguucauugaguacauaug

SEQ ID NO: 150069 - RNA, 22 nt, Human
ggcuccaagucucagagugaag

SEQ ID NO: 150070 - RNA, 22 nt, Human
ucuggggaauguucauuucuga

SEQ ID NO: 150071 - RNA, 23 nt, Human
ggacacauuuauuucagaauuca

SEQ ID NO: 150072 - RNA, 22 nt, Human
uggccaggcuggucuggaacgc

SEQ ID NO: 150073 - RNA, 22 nt, Human
uccuucccaggugucgccgccu

SEQ ID NO: 150074 - RNA, 22 nt, Human
ccuuccagaguucagucugccc

SEQ ID NO: 150075 - RNA, 22 nt, Human
agccaccuucuccaaggccuag

SEQ ID NO: 150076 - RNA, 22 nt, Human
ccacuguagagauuugaaugcc

SEQ ID NO: 150077 - RNA, 22 nt, Human
ucccagccuuccagucugguuu

SEQ ID NO: 150078 - RNA, 21 nt, Human
ccacuguagacucauucugag

SEQ ID NO: 150079 - RNA, 22 nt, Human
gcucacagccggcuggcagggg

SEQ ID NO: 150080 - RNA, 22 nt, Human
caaauacuaaacauaagauuuu

SEQ ID NO: 150081 - RNA, 22 nt, Human
cagggcuccccagagagccucu

SEQ ID NO: 150082 - RNA, 22 nt, Human
augggcugggaauacacagggg

SEQ ID NO: 150083 - RNA, 22 nt, Human
ugggccaggcaugugaucagca

SEQ ID NO: 150084 - RNA, 22 nt, Human
uaauuucaccguugcuagaaau

SEQ ID NO: 150085 - RNA, 22 nt, Human
gucacacagggccuccaaauca

SEQ ID NO: 150086 - RNA, 22 nt, Human
gcugggcuucucaaugcugccu

SEQ ID NO: 150087 - RNA, 22 nt, Human
ugcuucugaguugcaggacuug

SEQ ID NO: 150088 - RNA, 22 nt, Human
auuucaguagaaaaucuugauu

SEQ ID NO: 150089 - RNA, 22 nt, Human
uggguaggaccagaaaugcacu

SEQ ID NO: 150090 - RNA, 22 nt, Human
guuuaagaggguuucauuccca

SEQ ID NO: 150091 - RNA, 22 nt, Human
gcugucugccgcaggcugccac

SEQ ID NO: 150092 - RNA, 20 nt, Human
aagauucauuguaauuaggg

SEQ ID NO: 150093 - RNA, 22 nt, Human
gcuccaggugucccagguaaaa

SEQ ID NO: 150094 - RNA, 22 nt, Human
ccugggcuuuggaacaguacuu

SEQ ID NO: 150095 - RNA, 22 nt, Human
gacacauagaucuaucucacuc

SEQ ID NO: 150096 - RNA, 22 nt, Human
ucccacacagcccgcucaccgg

SEQ ID NO: 150097 - RNA, 22 nt, Human
auauaguuggguuucauucuac

SEQ ID NO: 150098 - RNA, 22 nt, Human
ugcaggcucugugugugccugg

SEQ ID NO: 150099 - RNA, 22 nt, Human
aggcuuuggggcauucuguguu

SEQ ID NO: 150100 - RNA, 22 nt, Human
uccucuccaugucucacgccac

SEQ ID NO: 150101 - RNA, 22 nt, Human
auuucugugcaguaaaugguga

SEQ ID NO: 150102 - RNA, 22 nt, Human
auuugcauaauagugauuugua

SEQ ID NO: 150103 - RNA, 22 nt, Human
ugagagucuguuccucuugcag

SEQ ID NO: 150104 - RNA, 22 nt, Human
gggcugacgaaggccaugugug

SEQ ID NO: 150105 - RNA, 22 nt, Human
agcugccaaguuucucaguuua

SEQ ID NO: 150106 - RNA, 19 nt, Human
gcuggggaauggauauuga

SEQ ID NO: 150107 - RNA, 22 nt, Human
ugcaggcucucugcugccagau

SEQ ID NO: 150108 - RNA, 22 nt, Human
uuaagacaguguauuuguuuuc

SEQ ID NO: 150109 - RNA, 22 nt, Human
cuggaaagugucuccauccugg

SEQ ID NO: 150110 - RNA, 22 nt, Human
gagacagaguuucacucuuguu

SEQ ID NO: 150111 - RNA, 22 nt, Human
gcacacaguauaugcucauuaa

SEQ ID NO: 150112 - RNA, 22 nt, Human
cacagagacagaagcacuuaug

SEQ ID NO: 150113 - RNA, 22 nt, Human
cuucuggguguggagugaggac

SEQ ID NO: 150114 - RNA, 22 nt, Human
uuucagaaagcaucaucaaagu

SEQ ID NO: 150115 - RNA, 22 nt, Human
aaaucucaggccucuauuuacu

SEQ ID NO: 150116 - RNA, 22 nt, Human
gccaagcucaccuucugaugga

SEQ ID NO: 150117 - RNA, 22 nt, Human
uuccaggcugaugggccacagg

SEQ ID NO: 150118 - RNA, 20 nt, Human
agguuccuuuguggagaauu

SEQ ID NO: 150119 - RNA, 22 nt, Human
ucuggggagucaaagagaccug

SEQ ID NO: 150120 - RNA, 22 nt, Human
ucuggcagugagcaacuugaca

SEQ ID NO: 150121 - RNA, 22 nt, Human
guaugaaggcgagagcccacua

SEQ ID NO: 150122 - RNA, 21 nt, Human
gaugaagcaaucuuucuguug

SEQ ID NO: 150123 - RNA, 22 nt, Human
auuuccaguccuaaugaucugg

SEQ ID NO: 150124 - RNA, 22 nt, Human
caagcucugggauagcagagag

SEQ ID NO: 150125 - RNA, 22 nt, Human
cucuuaaagaauguuccagcug

SEQ ID NO: 150126 - RNA, 22 nt, Human
aauaucaguauauuguaucagu

SEQ ID NO: 150127 - RNA, 22 nt, Human
uucaauaucauuguuuagucuc

SEQ ID NO: 150128 - RNA, 22 nt, Human
uuccuaauggcaaaacauguuu

SEQ ID NO: 150129 - RNA, 22 nt, Human
ucaggcccuucucccaggacuc

SEQ ID NO: 150130 - RNA, 22 nt, Human
acacacacaagcagguugugga

SEQ ID NO: 150131 - RNA, 22 nt, Human
uuccaggaagauucaacaaaag

SEQ ID NO: 150132 - RNA, 22 nt, Human
uuccaggagacuuccagaaaua

SEQ ID NO: 150133 - RNA, 22 nt, Human
acuggcaguggcagcagaaaga

SEQ ID NO: 150134 - RNA, 22 nt, Human
ggagagaauuccauggacaugu

SEQ ID NO: 150135 - RNA, 22 nt, Human
guacacauuaugcuucucuaaa

SEQ ID NO: 150136 - RNA, 19 nt, Human
acauucccaucagcaaugu

SEQ ID NO: 150137 - RNA, 19 nt, Human
aaaagucuauucaauuaca

SEQ ID NO: 150138 - RNA, 22 nt, Human
cacacaucuuaucccaguuauu

SEQ ID NO: 150139 - RNA, 21 nt, Human
ggccucagccaccuggcucug

SEQ ID NO: 150140 - RNA, 22 nt, Human
cuuuccaaugcauuuccaaugu

SEQ ID NO: 150141 - RNA, 22 nt, Human
acacacuguaaggacuaucacu

SEQ ID NO: 150142 - RNA, 22 nt, Human
caggagggcccgagacucuucc

SEQ ID NO: 150143 - RNA, 22 nt, Human
ccuggcagaaagaguuacaccu

SEQ ID NO: 150144 - RNA, 22 nt, Human
gcccucucuucugcagccucca

SEQ ID NO: 150145 - RNA, 22 nt, Human
uaaguucaagucuuggauauaa

SEQ ID NO: 150146 - RNA, 22 nt, Human
cugggcugcuguccacuagggu

SEQ ID NO: 150147 - RNA, 22 nt, Human
ggggcugagaauucagucucgg

SEQ ID NO: 150148 - RNA, 22 nt, Human
ucccagaagugaaauuucuaga

SEQ ID NO: 150149 - RNA, 22 nt, Human
ccacacugucuaacaaggcaua

SEQ ID NO: 150150 - RNA, 22 nt, Human
ucaucacauguguagucauccc

SEQ ID NO: 150151 - RNA, 22 nt, Human
uccuggcagggucuaggucuag

SEQ ID NO: 150152 - RNA, 17 nt, Human
uuaagguggaucagcac

SEQ ID NO: 150153 - RNA, 22 nt, Human
ccucagcugcuucccuggagcc

SEQ ID NO: 150154 - RNA, 22 nt, Human
uugucaaguaaggcugacauuu

SEQ ID NO: 150155 - RNA, 22 nt, Human
aggugaguugguaggaaguuug

SEQ ID NO: 150156 - RNA, 22 nt, Human
gcacauaacugaccacaucuaa

SEQ ID NO: 150157 - RNA, 22 nt, Human
uugggaaguuuaaugacagacu

SEQ ID NO: 150158 - RNA, 18 nt, Human
uccugccugugccccagg

SEQ ID NO: 150159 - RNA, 22 nt, Human
uccaagaugguugguguggugg

SEQ ID NO: 150160 - RNA, 22 nt, Human
cugguggagggacaggcuuagc

SEQ ID NO: 150161 - RNA, 22 nt, Human
ugaccaggauacugcagggaug

SEQ ID NO: 150162 - RNA, 22 nt, Human
gacaauaaaaugaucuuacagu

SEQ ID NO: 150163 - RNA, 22 nt, Human
guacacacuguuugaucauuuc

SEQ ID NO: 150164 - RNA, 22 nt, Human
uuccuuccauagcaaaacaugc

SEQ ID NO: 150165 - RNA, 22 nt, Human
auguggcugguaguugacaacu

SEQ ID NO: 150166 - RNA, 19 nt, Human
uggcagguagugagcaguc

SEQ ID NO: 150167 - RNA, 22 nt, Human
acuguucaaguuuuaugcugga

SEQ ID NO: 150168 - RNA, 20 nt, Human
ccuggcaggcggguuacuua

SEQ ID NO: 150169 - RNA, 23 nt, Human
uccugcugaaagcuccagcuggc

SEQ ID NO: 150170 - RNA, 21 nt, Human
ccuguucacagaucuguaacu

SEQ ID NO: 150171 - RNA, 22 nt, Human
guccucuguuuccaucugacuu

SEQ ID NO: 150172 - RNA, 22 nt, Human
auacauucaaaggaaggauaga

SEQ ID NO: 150173 - RNA, 22 nt, Human
accugccucagugcagcuggau

SEQ ID NO: 150174 - RNA, 23 nt, Human
gcugacugugaaauucuggagcu

SEQ ID NO: 150175 - RNA, 22 nt, Human
acuggggaauggaacugggaau

SEQ ID NO: 150176 - RNA, 22 nt, Human
ggagugugggauggagcucagg

SEQ ID NO: 150177 - RNA, 21 nt, Human
ugcaggcuacuucugacucua

SEQ ID NO: 150178 - RNA, 20 nt, Human
gcucugaccauaucaagaca

SEQ ID NO: 150179 - RNA, 22 nt, Human
gaggguggccuuuagagcccau

SEQ ID NO: 150180 - RNA, 22 nt, Human
uguaauauuguagugacaguac

SEQ ID NO: 150181 - RNA, 22 nt, Human
aauucuagcauugugaaaauau

SEQ ID NO: 150182 - RNA, 22 nt, Human
agcaggcugagcacccaggggg

SEQ ID NO: 150183 - RNA, 22 nt, Human
acaagagcauugcagguguguu

SEQ ID NO: 150184 - RNA, 22 nt, Human
ugucaaaaauaagagagauugu

SEQ ID NO: 150185 - RNA, 22 nt, Human
gcuguucauuagaaauagaaug

SEQ ID NO: 150186 - RNA, 22 nt, Human
agauuccagaucccaaaaauga

SEQ ID NO: 150187 - RNA, 22 nt, Human
gggcuguaggagcuggaauggg

SEQ ID NO: 150188 - RNA, 22 nt, Human
uguuccaauaaggaguugaaau

SEQ ID NO: 150189 - RNA, 22 nt, Human
cccuuccuccucgccugucaga

SEQ ID NO: 150190 - RNA, 22 nt, Human
cucaucaccacauauaacaaag

SEQ ID NO: 150191 - RNA, 22 nt, Human
uccaggcuugagaccaggcucu

SEQ ID NO: 150192 - RNA, 21 nt, Human
ucuggcaggcacgggcccagc

SEQ ID NO: 150193 - RNA, 22 nt, Human
cugggcuuagcagcuccugguc

SEQ ID NO: 150194 - RNA, 22 nt, Human
auuuaagauugcguauucaugu

SEQ ID NO: 150195 - RNA, 22 nt, Human
ugcaggcuauaucuuauuugac

SEQ ID NO: 150196 - RNA, 22 nt, Human
aaaagagucuuaggcagucaua

SEQ ID NO: 150197 - RNA, 22 nt, Human
ccuguucaugaaacugcuuucc

SEQ ID NO: 150198 - RNA, 22 nt, Human
ccaggcucacagcaucccagga

SEQ ID NO: 150199 - RNA, 22 nt, Human
cugccuggccacaacccagggu

SEQ ID NO: 150200 - RNA, 22 nt, Human
ucuggcagcaagauaacaaugg

SEQ ID NO: 150201 - RNA, 22 nt, Human
aagagagaacucccuucgccag

SEQ ID NO: 150202 - RNA, 22 nt, Human
aaagaucaaguaggcauggccu

SEQ ID NO: 150203 - RNA, 23 nt, Human
uuggagagggugaguagugucag

SEQ ID NO: 150204 - RNA, 22 nt, Human
ugcaggcuauccuuugcugcaa

SEQ ID NO: 150205 - RNA, 22 nt, Human
cuccaggcucguccaagaucga

SEQ ID NO: 150206 - RNA, 22 nt, Human
gagcucagccugaggccuggcu

SEQ ID NO: 150207 - RNA, 22 nt, Human
caugaguuuuuuaguucaugca

SEQ ID NO: 150208 - RNA, 22 nt, Human
ccuggcaguucaucaaauggca

SEQ ID NO: 150209 - RNA, 22 nt, Human
ugcuucugcucagcuuccuacu

SEQ ID NO: 150210 - RNA, 22 nt, Human
gagggguccaggaggcacuuac

SEQ ID NO: 150211 - RNA, 22 nt, Human
gugaaaauaaggcugguucuug

SEQ ID NO: 150212 - RNA, 22 nt, Human
cugccugccuuggccuccagga

SEQ ID NO: 150213 - RNA, 22 nt, Human
ugggagaaacugucucucccac

SEQ ID NO: 150214 - RNA, 22 nt, Human
ucuucacagaugcauauacuuc

SEQ ID NO: 150215 - RNA, 22 nt, Human
uagauacaggcucucugagccu

SEQ ID NO: 150216 - RNA, 22 nt, Human
uccuggcaguaauuugauguug

SEQ ID NO: 150217 - RNA, 22 nt, Human
uuuaagagcuaguaugucauuu

SEQ ID NO: 150218 - RNA, 22 nt, Human
ugcucuguauucuauggcaguu

SEQ ID NO: 150219 - RNA, 22 nt, Human
gccuggcaggggccugggagug

SEQ ID NO: 150220 - RNA, 22 nt, Human
ucuguucauuugccucggcucu

SEQ ID NO: 150221 - RNA, 22 nt, Human
uggaacacugaucauugccuuu

SEQ ID NO: 150222 - RNA, 22 nt, Human
ccuguucacugcacaguuuccg

SEQ ID NO: 150223 - RNA, 22 nt, Human
cucugggcaaguuucuucauga

SEQ ID NO: 150224 - RNA, 22 nt, Human
acuggcagagguuggacaccau

SEQ ID NO: 150225 - RNA, 21 nt, Human
cuugggcuuguagauggugga

SEQ ID NO: 150226 - RNA, 22 nt, Human
uuucuguagugugguauguagg

SEQ ID NO: 150227 - RNA, 22 nt, Human
cugguggaggugccaggauuug

SEQ ID NO: 150228 - RNA, 21 nt, Human
uccuguaagcuuggguggcuc

SEQ ID NO: 150229 - RNA, 22 nt, Human
ucuuugaaguugaaguaguugg

SEQ ID NO: 150230 - RNA, 22 nt, Human
aggaaagauggaaggaggauaa

SEQ ID NO: 150231 - RNA, 22 nt, Human
cucugcagauucaucccuucac

SEQ ID NO: 150232 - RNA, 22 nt, Human
agcucccagcuccuuugagaga

SEQ ID NO: 150233 - RNA, 22 nt, Human
ccuggggagccgccugagcccc

SEQ ID NO: 150234 - RNA, 22 nt, Human
agcaggcugccuuccaaagccu

SEQ ID NO: 150235 - RNA, 22 nt, Human
uugggaagaauggaggugguua

SEQ ID NO: 150236 - RNA, 22 nt, Human
auuugaauggcuuaacacaacg

SEQ ID NO: 150237 - RNA, 22 nt, Human
ccugggcuuugcuggcaaggcc

SEQ ID NO: 150238 - RNA, 22 nt, Human
guccucugaaagaugaaccaug

SEQ ID NO: 150239 - RNA, 22 nt, Human
uucucuuuucaccaguugcuaa

SEQ ID NO: 150240 - RNA, 22 nt, Human
ucaggcucccugcugggcucug

SEQ ID NO: 150241 - RNA, 23 nt, Human
uggccaggguacuacacccaccc

SEQ ID NO: 150242 - RNA, 22 nt, Human
ucuaggagcuuaaaggaggcca

SEQ ID NO: 150243 - RNA, 17 nt, Human
gcaucacagauaacacg

SEQ ID NO: 150244 - RNA, 18 nt, Human
agcagguggcgucugcag

SEQ ID NO: 150245 - RNA, 22 nt, Human
acugggcuuaugcuguggagua

SEQ ID NO: 150246 - RNA, 22 nt, Human
uuccuggcgccacggagccggu

SEQ ID NO: 150247 - RNA, 22 nt, Human
aguugaauaauuagacauaucu

SEQ ID NO: 150248 - RNA, 22 nt, Human
uccaagcuacugaagguuuggg

SEQ ID NO: 150249 - RNA, 22 nt, Human
gaggcacagucccgaggcaagg

SEQ ID NO: 150250 - RNA, 20 nt, Human
ugggcugaggaucaggugcc

SEQ ID NO: 150251 - RNA, 22 nt, Human
acuguucauauucuuagaaauu

SEQ ID NO: 150252 - RNA, 22 nt, Human
uacacacuuacuggagaugaag

SEQ ID NO: 150253 - RNA, 22 nt, Human
uuccaaguguugagauuagagg

SEQ ID NO: 150254 - RNA, 22 nt, Human
gcagggguuuucugacuugagu

SEQ ID NO: 150255 - RNA, 22 nt, Human
ccuggcagguggagguugcagu

SEQ ID NO: 150256 - RNA, 22 nt, Human
ccucucccgggugccgcugggc

SEQ ID NO: 150257 - RNA, 22 nt, Human
uugaaucuauguauucagugua

SEQ ID NO: 150258 - RNA, 22 nt, Human
agcucugacugaagagaugcaa

SEQ ID NO: 150259 - RNA, 22 nt, Human
agggccccauagucacugcccg

SEQ ID NO: 150260 - RNA, 22 nt, Human
aaaaucuaaguagcgaguaagg

SEQ ID NO: 150261 - RNA, 22 nt, Human
acaaaauuguguuaaacuuuau

SEQ ID NO: 150262 - RNA, 22 nt, Human
ucuggcagaggaaggaggccug

SEQ ID NO: 150263 - RNA, 22 nt, Human
cccugagcucaggcccuugggg

SEQ ID NO: 150264 - RNA, 22 nt, Human
ggcaggcugggugucauggagu

SEQ ID NO: 150265 - RNA, 22 nt, Human
uccugagcccuguaggacccug

SEQ ID NO: 150266 - RNA, 22 nt, Human
uuaaauuauuucuagugaggug

SEQ ID NO: 150267 - RNA, 22 nt, Human
uauuuaauuagugauuguagag

SEQ ID NO: 150268 - RNA, 22 nt, Human
uuuaagacuuagauuuauuggg

SEQ ID NO: 150269 - RNA, 22 nt, Human
ccaggcucugcaaaaucaggcu

SEQ ID NO: 150270 - RNA, 22 nt, Human
guggcagugggaugcuaucagg

SEQ ID NO: 150271 - RNA, 22 nt, Human
aaugaagcaguuuucaucaagu

SEQ ID NO: 150272 - RNA, 22 nt, Human
uccugagcacagagacaaggaa

SEQ ID NO: 150273 - RNA, 22 nt, Human
gcaggcuccaaggccugggaga

SEQ ID NO: 150274 - RNA, 22 nt, Human
uucuuucaauagcuggcauaug

SEQ ID NO: 150275 - RNA, 22 nt, Human
ucaugaaucguggaaugauuua

SEQ ID NO: 150276 - RNA, 18 nt, Human
gaugaagcugcuggggau

SEQ ID NO: 150277 - RNA, 22 nt, Human
cuuacacagucuggcacuucuu

SEQ ID NO: 150278 - RNA, 22 nt, Human
uguuucaugauugcugucauuu

SEQ ID NO: 150279 - RNA, 22 nt, Human
ucuguucaucucaugggagaau

SEQ ID NO: 150280 - RNA, 22 nt, Human
agacacauaggaccacacugug

SEQ ID NO: 150281 - RNA, 22 nt, Human
gguggcagaggugcaucagccc

SEQ ID NO: 150282 - RNA, 22 nt, Human
ucccacauuacccugacugaca

SEQ ID NO: 150283 - RNA, 22 nt, Human
ggccucagugggccgcugcagg

SEQ ID NO: 150284 - RNA, 22 nt, Human
gaugaagcuaaaucuaagguuu

SEQ ID NO: 150285 - RNA, 22 nt, Human
aggccucugcuggaaagaguug

SEQ ID NO: 150286 - RNA, 20 nt, Human
aaaaucucccagaaacuuau

SEQ ID NO: 150287 - RNA, 22 nt, Human
uuaggaauauuuucugaguagu

SEQ ID NO: 150288 - RNA, 22 nt, Human
agcccaggucuggcccagccug

SEQ ID NO: 150289 - RNA, 22 nt, Human
gggcugacaaccaucugacaag

SEQ ID NO: 150290 - RNA, 22 nt, Human
caucacagguccugaugacauu

SEQ ID NO: 150291 - RNA, 22 nt, Human
uguccagguggccucugcugcu

SEQ ID NO: 150292 - RNA, 22 nt, Human
cagccaagaaccacagacccag

SEQ ID NO: 150293 - RNA, 22 nt, Human
ggcaaggggucaggcugagaca

SEQ ID NO: 150294 - RNA, 22 nt, Human
acuugaauuauauuucuagaga

SEQ ID NO: 150295 - RNA, 22 nt, Human
uuuaacacuaguuucuuuaacu

SEQ ID NO: 150296 - RNA, 18 nt, Human
cccacacagcaguagcuc

SEQ ID NO: 150297 - RNA, 22 nt, Human
uucaguuccauuucaggugggu

SEQ ID NO: 150298 - RNA, 22 nt, Human
ucagcucuguuuugaguggaac

SEQ ID NO: 150299 - RNA, 22 nt, Human
cccacacacuggcugcugccaa

SEQ ID NO: 150300 - RNA, 22 nt, Human
gacccauauaggacccuccaaa

SEQ ID NO: 150301 - RNA, 22 nt, Human
uuucaaauggagucgugaaaug

SEQ ID NO: 150302 - RNA, 22 nt, Human
uacauugacuuggauuguuaga

SEQ ID NO: 150303 - RNA, 22 nt, Human
aacagccacugauacugaauag

SEQ ID NO: 150304 - RNA, 22 nt, Human
gaaucauuuauuuuugacagca

SEQ ID NO: 150305 - RNA, 22 nt, Human
cagcacagugaccagacccacu

SEQ ID NO: 150306 - RNA, 22 nt, Human
cucucuccuuagcugcagacca

SEQ ID NO: 150307 - RNA, 22 nt, Human
cggcuggugucgggcacagcaa

SEQ ID NO: 150308 - RNA, 22 nt, Human
acuggggauuagggacucagug

SEQ ID NO: 150309 - RNA, 22 nt, Human
gacauguugaagaauauuugga

SEQ ID NO: 150310 - RNA, 22 nt, Human
agcugccagcaaguuucaaaca

SEQ ID NO: 150311 - RNA, 22 nt, Human
uccaggcucccucaggaugcac

SEQ ID NO: 150312 - RNA, 19 nt, Human
uuugaauccagcugguaac

SEQ ID NO: 150313 - RNA, 22 nt, Human
acacacaugguauuguucagaa

SEQ ID NO: 150314 - RNA, 22 nt, Human
cugggcugagccugggcugugu

SEQ ID NO: 150315 - RNA, 22 nt, Human
ccaggcucugugugggcuagag

SEQ ID NO: 150316 - RNA, 22 nt, Human
agcacugugauuuauaacauuu

SEQ ID NO: 150317 - RNA, 22 nt, Human
ucccacaccugucuauuccuag

SEQ ID NO: 150318 - RNA, 22 nt, Human
auacauauaugguacuuccugg

SEQ ID NO: 150319 - RNA, 22 nt, Human
cagucacauagguauacacaua

SEQ ID NO: 150320 - RNA, 22 nt, Human
ucuccaagaaaagaucucagcu

SEQ ID NO: 150321 - RNA, 22 nt, Human
gcugggcuguaguuugcugacc

SEQ ID NO: 150322 - RNA, 22 nt, Human
uggcagggugccaguugcgagu

SEQ ID NO: 150323 - RNA, 22 nt, Human
gcuggcaguuuccucaccgagg

SEQ ID NO: 150324 - RNA, 21 nt, Human
acuguucauuugaugaacugg

SEQ ID NO: 150325 - RNA, 22 nt, Human
guugggaaggcaagaaguagaa

SEQ ID NO: 150326 - RNA, 22 nt, Human
cuguucauggaaaaauaguugg

SEQ ID NO: 150327 - RNA, 22 nt, Human
uguaugaagacuucuucugugu

SEQ ID NO: 150328 - RNA, 22 nt, Human
ccuguucauuuguauuugucuu

SEQ ID NO: 150329 - RNA, 22 nt, Human
acacagaguuugacacauggga

SEQ ID NO: 150330 - RNA, 22 nt, Human
ccaggcccaggguacugaccaa

SEQ ID NO: 150331 - RNA, 22 nt, Human
ugggcuucuggaguggggcaga

SEQ ID NO: 150332 - RNA, 22 nt, Human
augggcugaaagaguaagcugu

SEQ ID NO: 150333 - RNA, 22 nt, Human
cgcaggcuuuagaaucugcuac

SEQ ID NO: 150334 - RNA, 22 nt, Human
aaagcucuuuuccaaguauuga

SEQ ID NO: 150335 - RNA, 22 nt, Human
aaugaagccagcugggaugcga

SEQ ID NO: 150336 - RNA, 22 nt, Human
guccucugucccuggggcacgg

SEQ ID NO: 150337 - RNA, 22 nt, Human
uuccaagugcccauauuucauc

SEQ ID NO: 150338 - RNA, 22 nt, Human
cuccuggcacucaguguggaag

SEQ ID NO: 150339 - RNA, 22 nt, Human
acugagagucaagauagcaugg

SEQ ID NO: 150340 - RNA, 22 nt, Human
acacauaagaaacuacaaagag

SEQ ID NO: 150341 - RNA, 17 nt, Human
gcccacccuuaggagcu

SEQ ID NO: 150342 - RNA, 22 nt, Human
uauuccuaagucccaacuacau

SEQ ID NO: 150343 - RNA, 22 nt, Human
ugccugacugcugccaccacua

SEQ ID NO: 150344 - RNA, 22 nt, Human
acacacagaguuuauacaggca

SEQ ID NO: 150345 - RNA, 22 nt, Human
acuggcaguuugagaaugcauu

SEQ ID NO: 150346 - RNA, 22 nt, Human
ccuguucaauauucuuccuugu

SEQ ID NO: 150347 - RNA, 22 nt, Human
acugggcuguaaagagaggcaa

SEQ ID NO: 150348 - RNA, 22 nt, Human
cuggccucuguguucaccauag

SEQ ID NO: 150349 - RNA, 22 nt, Human
uauuccagaugaaaucauucag

SEQ ID NO: 150350 - RNA, 22 nt, Human
acuguucacuagugaggguuga

SEQ ID NO: 150351 - RNA, 22 nt, Human
uucugggggccaggacaguggu

SEQ ID NO: 150352 - RNA, 23 nt, Human
acacugucucauggauagacugc

SEQ ID NO: 150353 - RNA, 22 nt, Human
uguaugaaagaacaagggcuua

SEQ ID NO: 150354 - RNA, 22 nt, Human
acacaucaugccaaguuucacc

SEQ ID NO: 150355 - RNA, 20 nt, Human
cugcuccacccggcucucag

SEQ ID NO: 150356 - RNA, 22 nt, Human
aggccccaaagcagugcaagua

SEQ ID NO: 150357 - RNA, 22 nt, Human
cauuugaaauucuuagaacaaa

SEQ ID NO: 150358 - RNA, 23 nt, Human
ugaaauauucuuuugcaugagcu

SEQ ID NO: 150359 - RNA, 22 nt, Human
gcagggacagggcagggccuuu

SEQ ID NO: 150360 - RNA, 22 nt, Human
aaauucuaugucaauguuuauu

SEQ ID NO: 150361 - RNA, 22 nt, Human
cugccugccacguucagcugua

SEQ ID NO: 150362 - RNA, 22 nt, Human
aaagagucguguuccagguuug

SEQ ID NO: 150363 - RNA, 22 nt, Human
aaugaagccagguagaagagaa

SEQ ID NO: 150364 - RNA, 20 nt, Human
cugaaccaaggcuuucucag

SEQ ID NO: 150365 - RNA, 22 nt, Human
ugugaaaagcaggcuacuuucu

SEQ ID NO: 150366 - RNA, 22 nt, Human
cacaucccuggaguuacccagu

SEQ ID NO: 150367 - RNA, 22 nt, Human
ugcuucugucucuuaugccuug

SEQ ID NO: 150368 - RNA, 22 nt, Human
uucuggggacauaacaguaagc

SEQ ID NO: 150369 - RNA, 22 nt, Human
uucuuguaauuuggagaaauga

SEQ ID NO: 150370 - RNA, 22 nt, Human
uccuggcacuuugggggcucgc

SEQ ID NO: 150371 - RNA, 22 nt, Human
ugagagucucagaccuccuggu

SEQ ID NO: 150372 - RNA, 22 nt, Human
ggggaccugggcuucaaggguu

SEQ ID NO: 150373 - RNA, 22 nt, Human
augggcugacaagacaugcaua

SEQ ID NO: 150374 - RNA, 22 nt, Human
ugggccagcaauugcugcucag

SEQ ID NO: 150375 - RNA, 22 nt, Human
cuccuggcaguuccccuuguca

SEQ ID NO: 150376 - RNA, 22 nt, Human
ccaggcuccgcauagaccccac

SEQ ID NO: 150377 - RNA, 22 nt, Human
uucaagauggcaccagugagug

SEQ ID NO: 150378 - RNA, 22 nt, Human
ucuguucaguuguaccuucccc

SEQ ID NO: 150379 - RNA, 22 nt, Human
ucccagccuccugacaguuuug

SEQ ID NO: 150380 - RNA, 22 nt, Human
cagcccaggucucucuuccagu

SEQ ID NO: 150381 - RNA, 22 nt, Human
auaauggccgggggcugaaugc

SEQ ID NO: 150382 - RNA, 23 nt, Human
cuguaugauguuaaguggaaagc

SEQ ID NO: 150383 - RNA, 21 nt, Human
ccugggcugugguuuggagac

SEQ ID NO: 150384 - RNA, 22 nt, Human
gucacaggcaguaacuaggacc

SEQ ID NO: 150385 - RNA, 22 nt, Human
cuuccaagaugaacagcaagcg

SEQ ID NO: 150386 - RNA, 22 nt, Human
acugggcuuauuucuugugaac

SEQ ID NO: 150387 - RNA, 22 nt, Human
cuucugggccauggccuuccuc

SEQ ID NO: 150388 - RNA, 22 nt, Human
uguaugaaucucauuuguuuaa

SEQ ID NO: 150389 - RNA, 22 nt, Human
guugggaaggugaacaugaugc

SEQ ID NO: 150390 - RNA, 22 nt, Human
uuccaagucuaaguuauaaauc

SEQ ID NO: 150391 - RNA, 22 nt, Human
aggaagaacagauaauggacgc

SEQ ID NO: 150392 - RNA, 21 nt, Human
aggucccagguuugggcagca

SEQ ID NO: 150393 - RNA, 22 nt, Human
uucuggggccaauugccacugc

SEQ ID NO: 150394 - RNA, 22 nt, Human
ggagaagaggagcuggaagccu

SEQ ID NO: 150395 - RNA, 22 nt, Human
auguaugaagcuuuguuuggga

SEQ ID NO: 150396 - RNA, 22 nt, Human
auggcagaccuccuggccacaa

SEQ ID NO: 150397 - RNA, 22 nt, Human
ucuggcaguuugagaaaggcua

SEQ ID NO: 150398 - RNA, 22 nt, Human
aaauauuugucugaggcgguug

SEQ ID NO: 150399 - RNA, 22 nt, Human
cuugggcucagacuugaggaca

SEQ ID NO: 150400 - RNA, 22 nt, Human
cacaauuuuaauacacagucaa

SEQ ID NO: 150401 - RNA, 22 nt, Human
cuguaugauauccaaauugaua

SEQ ID NO: 150402 - RNA, 18 nt, Human
gacacauccccaggccuc

SEQ ID NO: 150403 - RNA, 22 nt, Human
gaugaagccugacuucucggug

SEQ ID NO: 150404 - RNA, 22 nt, Human
cuguccagcuuggcuccugggg

SEQ ID NO: 150405 - RNA, 22 nt, Human
cugggcuuaggaccuggugcgg

SEQ ID NO: 150406 - RNA, 22 nt, Human
ucuggcagggucagggcccagg

SEQ ID NO: 150407 - RNA, 22 nt, Human
cccagcccaucucaaaggucua

SEQ ID NO: 150408 - RNA, 22 nt, Human
gcccacacaccagcucaggagg

SEQ ID NO: 150409 - RNA, 22 nt, Human
gucaggacucugacccgucccg

SEQ ID NO: 150410 - RNA, 22 nt, Human
ccugccugucuuuauccccugu

SEQ ID NO: 150411 - RNA, 20 nt, Human
uggccucugagaugccacgg

SEQ ID NO: 150412 - RNA, 22 nt, Human
acaaauccagugaacuccagug

SEQ ID NO: 150413 - RNA, 22 nt, Human
uggccaggaggcugcuucugac

SEQ ID NO: 150414 - RNA, 22 nt, Human
uuccagagcaguuuucagauca

SEQ ID NO: 150415 - RNA, 22 nt, Human
auggccuggggauuccugagca

SEQ ID NO: 150416 - RNA, 23 nt, Human
ugagggacaugguggcuucugag

SEQ ID NO: 150417 - RNA, 22 nt, Human
cacauacugagaaucacaccca

SEQ ID NO: 150418 - RNA, 22 nt, Human
ucuggggaugaggaccuagaug

SEQ ID NO: 150419 - RNA, 22 nt, Human
ccccuuccuuccucagacagcc

SEQ ID NO: 150420 - RNA, 22 nt, Human
auuucuguaacuuaugaaaguu

SEQ ID NO: 150421 - RNA, 22 nt, Human
uugguuccuucugaaaguauug

SEQ ID NO: 150422 - RNA, 22 nt, Human
ucacacacauuugcugucugau

SEQ ID NO: 150423 - RNA, 22 nt, Human
gcuggcaggagaaacggggugc

SEQ ID NO: 150424 - RNA, 21 nt, Human
uccaagcucaacucccuuccu

SEQ ID NO: 150425 - RNA, 22 nt, Human
uaagaacaguagaacaguaggu

SEQ ID NO: 150426 - RNA, 22 nt, Human
ggaaccacagcccccagcaggc

SEQ ID NO: 150427 - RNA, 22 nt, Human
uguaaacauauguauguaugua

SEQ ID NO: 150428 - RNA, 18 nt, Human
uccucucuuuccccaggg

SEQ ID NO: 150429 - RNA, 22 nt, Human
uguucagagacagaaauucuaa

SEQ ID NO: 150430 - RNA, 22 nt, Human
agccuccaucucccaucuguga

SEQ ID NO: 150431 - RNA, 22 nt, Human
caugaagcucuugcaccucuag

SEQ ID NO: 150432 - RNA, 17 nt, Human
aaaauucuguaaagagg

SEQ ID NO: 150433 - RNA, 19 nt, Human
cuccaaguuaagagggagg

SEQ ID NO: 150434 - RNA, 22 nt, Human
agucuagggugggguccacagg

SEQ ID NO: 150435 - RNA, 22 nt, Human
uucacauuugaaaggaaagaua

SEQ ID NO: 150436 - RNA, 22 nt, Human
acuggcagugucguuuacauga

SEQ ID NO: 150437 - RNA, 22 nt, Human
cgcaggcuccggggugcccugg

SEQ ID NO: 150438 - RNA, 22 nt, Human
cuccucuguauugauugggacu

SEQ ID NO: 150439 - RNA, 22 nt, Human
caggcucuuuugguggcaagga

SEQ ID NO: 150440 - RNA, 22 nt, Human
caggcccugggcaggcacagag

SEQ ID NO: 150441 - RNA, 22 nt, Human
ugcuucuggcagauugagugag

SEQ ID NO: 150442 - RNA, 22 nt, Human
agagcagauggagcuggaagag

SEQ ID NO: 150443 - RNA, 22 nt, Human
acacacaugcaugcuugccauu

SEQ ID NO: 150444 - RNA, 22 nt, Human
ucuggcagagugauaggauaag

SEQ ID NO: 150445 - RNA, 22 nt, Human
agcaggcuccuuccuucucugg

SEQ ID NO: 150446 - RNA, 22 nt, Human
ggcaggcuuugagaaagagcau

SEQ ID NO: 150447 - RNA, 22 nt, Human
auccucuguggauuacaccuag

SEQ ID NO: 150448 - RNA, 21 nt, Human
ccacucaugacuccacucacc

SEQ ID NO: 150449 - RNA, 22 nt, Human
aaugugaaaccgcacagaauaa

SEQ ID NO: 150450 - RNA, 22 nt, Human
ggugccagugggucucaggaua

SEQ ID NO: 150451 - RNA, 22 nt, Human
gccuggcaggccuguuggggcu

SEQ ID NO: 150452 - RNA, 22 nt, Human
guccucugggcuuugagcaguc

SEQ ID NO: 150453 - RNA, 21 nt, Human
ccagcccagcugugucccagc

SEQ ID NO: 150454 - RNA, 22 nt, Human
ccucugccaccucccacgaggc

SEQ ID NO: 150455 - RNA, 22 nt, Human
gccuggaaucaugcagggguua

SEQ ID NO: 150456 - RNA, 22 nt, Human
gaauauuuguaauuacuguuga

SEQ ID NO: 150457 - RNA, 22 nt, Human
uguaugaaaaggaauagauuga

SEQ ID NO: 150458 - RNA, 22 nt, Human
gugggcuucuguuagggaggcu

SEQ ID NO: 150459 - RNA, 22 nt, Human
guggcagucgcugacagauaca

SEQ ID NO: 150460 - RNA, 19 nt, Human
aggcuuggcuagauuuacu

SEQ ID NO: 150461 - RNA, 22 nt, Human
ggccucucaugcccagagccaa

SEQ ID NO: 150462 - RNA, 22 nt, Human
acuggcagaacuggugauuguc

SEQ ID NO: 150463 - RNA, 22 nt, Human
cacacacuggagcaaggagaug

SEQ ID NO: 150464 - RNA, 22 nt, Human
uuugaaguaccugguucugacu

SEQ ID NO: 150465 - RNA, 22 nt, Human
ugcuucugauucaugguuauug

SEQ ID NO: 150466 - RNA, 22 nt, Human
ucugcagaauucgaggaagaaa

SEQ ID NO: 150467 - RNA, 22 nt, Human
ccaggcucaggccugcucguug

SEQ ID NO: 150468 - RNA, 21 nt, Human
ccuggcagaagccugauaugc

SEQ ID NO: 150469 - RNA, 22 nt, Human
cugugggaacacugaggacuuc

SEQ ID NO: 150470 - RNA, 22 nt, Human
cagaaauucccauuucagauuc

SEQ ID NO: 150471 - RNA, 22 nt, Human
gcugggcugagcuagacuuggc

SEQ ID NO: 150472 - RNA, 22 nt, Human
uuccaggaagcaguuagcagcc

SEQ ID NO: 150473 - RNA, 22 nt, Human
uguggagacuauagccauaaca

SEQ ID NO: 150474 - RNA, 22 nt, Human
aaagaucacgucccaggacucg

SEQ ID NO: 150475 - RNA, 22 nt, Human
ggaaucagaauuaggauuugaa

SEQ ID NO: 150476 - RNA, 22 nt, Human
ucccacacuacacgguuguugg

SEQ ID NO: 150477 - RNA, 23 nt, Human
ucuguucaaggcuuucuccuuga

SEQ ID NO: 150478 - RNA, 22 nt, Human
auguaugauauuuccaguauca

SEQ ID NO: 150479 - RNA, 22 nt, Human
uuacaauaccacaucaccucau

SEQ ID NO: 150480 - RNA, 22 nt, Human
auauauuugagaauauucauga

SEQ ID NO: 150481 - RNA, 18 nt, Human
gccugcucugcucucccc

SEQ ID NO: 150482 - RNA, 22 nt, Human
ccuggcaguuuugcccaggauu

SEQ ID NO: 150483 - RNA, 22 nt, Human
ucuggcagcucuccucggcgga

SEQ ID NO: 150484 - RNA, 22 nt, Human
ucuguucagaauuguaacacuc

SEQ ID NO: 150485 - RNA, 22 nt, Human
caaauucucacccuguuugauu

SEQ ID NO: 150486 - RNA, 20 nt, Human
agcaggcugcagggugaaau

SEQ ID NO: 150487 - RNA, 22 nt, Human
uuucuguaaguggcaaauaaug

SEQ ID NO: 150488 - RNA, 22 nt, Human
ucacuguauuugcugaugcaua

SEQ ID NO: 150489 - RNA, 22 nt, Human
guccaaguacauguguguacau

SEQ ID NO: 150490 - RNA, 22 nt, Human
gggaccuggcaccuuugcucug

SEQ ID NO: 150491 - RNA, 22 nt, Human
uccccacaucucugcaucaggc

SEQ ID NO: 150492 - RNA, 22 nt, Human
uuccuggccaagcagaguggaa

SEQ ID NO: 150493 - RNA, 22 nt, Human
acagguggaggcuuuaggaggu

SEQ ID NO: 150494 - RNA, 22 nt, Human
agagcacagaagaauaggugcu

SEQ ID NO: 150495 - RNA, 22 nt, Human
cugaaccaucucuguucuguau

SEQ ID NO: 150496 - RNA, 22 nt, Human
cuggcaguuugccaggagcucg

SEQ ID NO: 150497 - RNA, 22 nt, Human
cuccugcaagccuccccaagca

SEQ ID NO: 150498 - RNA, 22 nt, Human
cagccucuguggcugccacacc

SEQ ID NO: 150499 - RNA, 23 nt, Human
ccaggcucuuucaccugcuauuc

SEQ ID NO: 150500 - RNA, 22 nt, Human
uccuggcaaagauguugguguu

SEQ ID NO: 150501 - RNA, 22 nt, Human
ugcuucugaaaugcaggucuuc

SEQ ID NO: 150502 - RNA, 20 nt, Human
gcuguucacauuauuaguag

SEQ ID NO: 150503 - RNA, 22 nt, Human
uugaaucucuugaaucucuguu

SEQ ID NO: 150504 - RNA, 19 nt, Human
gcagagugggguggagggu

SEQ ID NO: 150505 - RNA, 22 nt, Human
uggcaggcgggagccauagagg

SEQ ID NO: 150506 - RNA, 20 nt, Human
auguaaaauuauaaggcuga

SEQ ID NO: 150507 - RNA, 22 nt, Human
gugcuaggauuacaggcauggg

SEQ ID NO: 150508 - RNA, 18 nt, Human
ggcaggcucucuggguca

SEQ ID NO: 150509 - RNA, 22 nt, Human
gcuggggacuccccaccauagc

SEQ ID NO: 150510 - RNA, 22 nt, Human
agggcugacaaauggcagugac

SEQ ID NO: 150511 - RNA, 22 nt, Human
ugguccuggaagguccugaggg

SEQ ID NO: 150512 - RNA, 21 nt, Human
aggcucucauccagggaccca

SEQ ID NO: 150513 - RNA, 18 nt, Human
ugcaggcugggguuccuc

SEQ ID NO: 150514 - RNA, 22 nt, Human
gcuaggaggaagaaugugaauu

SEQ ID NO: 150515 - RNA, 22 nt, Human
ccuggcagcuguuuggcuuggc

SEQ ID NO: 150516 - RNA, 22 nt, Human
ggcuuuggggugugcagagaug

SEQ ID NO: 150517 - RNA, 22 nt, Human
agaugaaagauuuuuauagaga

SEQ ID NO: 150518 - RNA, 19 nt, Human
ucccaggaagcaaauguca

SEQ ID NO: 150519 - RNA, 22 nt, Human
cgaggcucagagagggugacuu

SEQ ID NO: 150520 - RNA, 22 nt, Human
ucuggcagaaggcagaaauuca

SEQ ID NO: 150521 - RNA, 22 nt, Human
agggacucccugggccgacacg

SEQ ID NO: 150522 - RNA, 22 nt, Human
aguugacauccagagacauucu

SEQ ID NO: 150523 - RNA, 22 nt, Human
uuucauaauagugcaguuuguu

SEQ ID NO: 150524 - RNA, 22 nt, Human
gagcacugauuuauuuuugucu

SEQ ID NO: 150525 - RNA, 22 nt, Human
cugucucagcaggaagucauca

SEQ ID NO: 150526 - RNA, 22 nt, Human
ccagccucacuggcaucaccua

SEQ ID NO: 150527 - RNA, 22 nt, Human
uucuguuuuagaaauaaguagu

SEQ ID NO: 150528 - RNA, 22 nt, Human
gcuggcagaauuucuucuugcu

SEQ ID NO: 150529 - RNA, 22 nt, Human
ucuguucacugagcaauggcaa

SEQ ID NO: 150530 - RNA, 19 nt, Human
cgcaggcuucgggucgcuc

SEQ ID NO: 150531 - RNA, 22 nt, Human
ucugggcugaaaugaaggccuu

SEQ ID NO: 150532 - RNA, 22 nt, Human
cccacccugggcuacacaucca

SEQ ID NO: 150533 - RNA, 22 nt, Human
uaauuucacugauaugaaguca

SEQ ID NO: 150534 - RNA, 22 nt, Human
gucauuccuauccauuugauac

SEQ ID NO: 150535 - RNA, 22 nt, Human
ugcacaggugagacucaggaag

SEQ ID NO: 150536 - RNA, 22 nt, Human
gugggagaaauuagcucuaguu

SEQ ID NO: 150537 - RNA, 22 nt, Human
ucuccugucuucucagcacccc

SEQ ID NO: 150538 - RNA, 22 nt, Human
aauauguugagucuaucuuuau

SEQ ID NO: 150539 - RNA, 22 nt, Human
ccuggcaguggugaagaagagg

SEQ ID NO: 150540 - RNA, 22 nt, Human
cgcugauaaacgucacguuccc

SEQ ID NO: 150541 - RNA, 22 nt, Human
gguaaaaugcagauucuuagcc

SEQ ID NO: 150542 - RNA, 22 nt, Human
gcccagccuccaagcuccaagg

SEQ ID NO: 150543 - RNA, 17 nt, Human
aaugaaugaauucuuug

SEQ ID NO: 150544 - RNA, 22 nt, Human
agcaggcuuaugguugaaggga

SEQ ID NO: 150545 - RNA, 22 nt, Human
ucacaaaagcuuuugaauuugg

SEQ ID NO: 150546 - RNA, 22 nt, Human
uauuucagcaagaagaaugugg

SEQ ID NO: 150547 - RNA, 22 nt, Human
ccccacacucuuuacauucaua

SEQ ID NO: 150548 - RNA, 22 nt, Human
ucuguucaguugauuagacaga

SEQ ID NO: 150549 - RNA, 22 nt, Human
gaggccugucgcuaggccucug

SEQ ID NO: 150550 - RNA, 22 nt, Human
uugggaucucaaauccagcuau

SEQ ID NO: 150551 - RNA, 22 nt, Human
cccacccucaagggugucuaua

SEQ ID NO: 150552 - RNA, 22 nt, Human
ggcagugagaggucuccugguc

SEQ ID NO: 150553 - RNA, 22 nt, Human
ucugggcuugguuagggcuguu

SEQ ID NO: 150554 - RNA, 22 nt, Human
gugggguagaucuuucucagga

SEQ ID NO: 150555 - RNA, 22 nt, Human
caugaaaauaacauuguuguga

SEQ ID NO: 150556 - RNA, 22 nt, Human
ugcaggcuggauuugcuuuugu

SEQ ID NO: 150557 - RNA, 22 nt, Human
ugcuucuguauuuugggcuuga

SEQ ID NO: 150558 - RNA, 17 nt, Human
gggcugacaguggccuc

SEQ ID NO: 150559 - RNA, 22 nt, Human
aagauucagccaaauuguucau

SEQ ID NO: 150560 - RNA, 22 nt, Human
gcagcucuccucugugaggaac

SEQ ID NO: 150561 - RNA, 22 nt, Human
guccaagucuuccuucccaaac

SEQ ID NO: 150562 - RNA, 20 nt, Human
aaguuuucuccaaauacagu

SEQ ID NO: 150563 - RNA, 22 nt, Human
guccuggcugguucuguggggc

SEQ ID NO: 150564 - RNA, 22 nt, Human
aaaucagugcucauuugaaagg

SEQ ID NO: 150565 - RNA, 22 nt, Human
uuggcaggaggcuucaguuccu

SEQ ID NO: 150566 - RNA, 22 nt, Human
ugcaggcugcuggcaguagcuu

SEQ ID NO: 150567 - RNA, 22 nt, Human
ccacacuaaacugcucaaacca

SEQ ID NO: 150568 - RNA, 22 nt, Human
aggcacaggaggugguaagaag

SEQ ID NO: 150569 - RNA, 22 nt, Human
ccuggcuccugccucugcaggg

SEQ ID NO: 150570 - RNA, 22 nt, Human
ggcuccaaagggcagugugagg

SEQ ID NO: 150571 - RNA, 22 nt, Human
gugugggaaggcuaggaugcug

SEQ ID NO: 150572 - RNA, 22 nt, Human
uaaauucugaucaaguuccuuc

SEQ ID NO: 150573 - RNA, 22 nt, Human
caggacaaagcccuuugagaaa

SEQ ID NO: 150574 - RNA, 22 nt, Human
gcuuggaaguaggauugggaga

SEQ ID NO: 150575 - RNA, 22 nt, Human
ucccacauaugcaauccugaau

SEQ ID NO: 150576 - RNA, 22 nt, Human
augggcugugagguccggcagg

SEQ ID NO: 150577 - RNA, 22 nt, Human
gagaggcuggcagugccagguu

SEQ ID NO: 150578 - RNA, 22 nt, Human
ugaagccauaggacagaggaua

SEQ ID NO: 150579 - RNA, 22 nt, Human
gcacacaggcaguuuccagcca

SEQ ID NO: 150580 - RNA, 22 nt, Human
aagugccaucauagcauggcug

SEQ ID NO: 150581 - RNA, 22 nt, Human
ccaggcucuguuccccgaggag

SEQ ID NO: 150582 - RNA, 22 nt, Human
ugaguguauaucaggagagagc

SEQ ID NO: 150583 - RNA, 22 nt, Human
ucuggcagggguucugcacuug

SEQ ID NO: 150584 - RNA, 22 nt, Human
gcuguucaagacuaggaaauuu

SEQ ID NO: 150585 - RNA, 22 nt, Human
gccuggcaauggccucaggaag

SEQ ID NO: 150586 - RNA, 22 nt, Human
ccugccuguacuagagacccag

SEQ ID NO: 150587 - RNA, 22 nt, Human
auauauuuugcggucacguggc

SEQ ID NO: 150588 - RNA, 22 nt, Human
gaggagcuguucccucaccucu

SEQ ID NO: 150589 - RNA, 23 nt, Human
acauacauggagauaaagugaug

SEQ ID NO: 150590 - RNA, 22 nt, Human
cagccucuuuccacaucaggca

SEQ ID NO: 150591 - RNA, 22 nt, Human
aaaagucugcucucauuucaga

SEQ ID NO: 150592 - RNA, 22 nt, Human
agucuucacucuucacuacuau

SEQ ID NO: 150593 - RNA, 22 nt, Human
cagcccagccuugucucuuuau

SEQ ID NO: 150594 - RNA, 23 nt, Human
agucuucauuguauuuccagacc

SEQ ID NO: 150595 - RNA, 22 nt, Human
guggcuuggaccagucacagug

SEQ ID NO: 150596 - RNA, 22 nt, Human
gaaagacuuccuuugagaguac

SEQ ID NO: 150597 - RNA, 22 nt, Human
ucacacacauggauaguauuuu

SEQ ID NO: 150598 - RNA, 22 nt, Human
ggggcugagucagugggaagag

SEQ ID NO: 150599 - RNA, 22 nt, Human
ccugggcuuccacgagcagagg

SEQ ID NO: 150600 - RNA, 22 nt, Human
agcaccaucacagcuguauguc

SEQ ID NO: 150601 - RNA, 22 nt, Human
ccuacauucucugaguuuuccu

SEQ ID NO: 150602 - RNA, 22 nt, Human
guggcagguuccguagacagca

SEQ ID NO: 150603 - RNA, 23 nt, Human
ggccucagcgcacagaaacugcu

SEQ ID NO: 150604 - RNA, 22 nt, Human
ccuucucucugaagaccccaaa

SEQ ID NO: 150605 - RNA, 22 nt, Human
gcagccucaaacuccccagcuc

SEQ ID NO: 150606 - RNA, 22 nt, Human
uuccaagugcugaggacaguag

SEQ ID NO: 150607 - RNA, 22 nt, Human
cuguaugaacccauauacuuau

SEQ ID NO: 150608 - RNA, 22 nt, Human
aauauugagaaccagcauguuu

SEQ ID NO: 150609 - RNA, 22 nt, Human
ucuucaaaugcuaguaauauca

SEQ ID NO: 150610 - RNA, 22 nt, Human
agcagguggacagaggaagaaa

SEQ ID NO: 150611 - RNA, 22 nt, Human
cugcagccacgagucacagccc

SEQ ID NO: 150612 - RNA, 22 nt, Human
cacugucccuguuuccuggaaa

SEQ ID NO: 150613 - RNA, 22 nt, Human
cucaccccacuaccccuuggug

SEQ ID NO: 150614 - RNA, 22 nt, Human
uccaaggcuccggcccuggcgu

SEQ ID NO: 150615 - RNA, 17 nt, Human
ugcuucuguauugcugg

SEQ ID NO: 150616 - RNA, 22 nt, Human
ccuggcagguggcgcccucggc

SEQ ID NO: 150617 - RNA, 22 nt, Human
ucuggcaggaccaugaagcgua

SEQ ID NO: 150618 - RNA, 22 nt, Human
gcuggcagggacagcugcgugu

SEQ ID NO: 150619 - RNA, 22 nt, Human
cuggcagguuuggugucuggug

SEQ ID NO: 150620 - RNA, 20 nt, Human
gauacacagcacagagggcc

SEQ ID NO: 150621 - RNA, 22 nt, Human
ugggcuuuaucaugggucuggu

SEQ ID NO: 150622 - RNA, 22 nt, Human
acacacuguugcucauccaggc

SEQ ID NO: 150623 - RNA, 16 nt, Human
ucacauacuuccuugc

SEQ ID NO: 150624 - RNA, 22 nt, Human
gaaaagaguccugugugaggag

SEQ ID NO: 150625 - RNA, 22 nt, Human
gaacacaugauuauaaaugcua

SEQ ID NO: 150626 - RNA, 22 nt, Human
gcuggcagagacaagaagacua

SEQ ID NO: 150627 - RNA, 22 nt, Human
ucuggggagggagccacagguc

SEQ ID NO: 150628 - RNA, 22 nt, Human
aucuuguuaaaaugcagaaacu

SEQ ID NO: 150629 - RNA, 22 nt, Human
aucuucaaagggauguccaugg

SEQ ID NO: 150630 - RNA, 22 nt, Human
cacacagacagcucucugaaga

SEQ ID NO: 150631 - RNA, 22 nt, Human
cacuggaauucaagauacugag

SEQ ID NO: 150632 - RNA, 22 nt, Human
ugggcagggagcuggaaccaca

SEQ ID NO: 150633 - RNA, 22 nt, Human
uucugggguuaugggugauucu

SEQ ID NO: 150634 - RNA, 22 nt, Human
caggcugccuggaagaggacug

SEQ ID NO: 150635 - RNA, 22 nt, Human
augggcuggccuuucccgcucu

SEQ ID NO: 150636 - RNA, 22 nt, Human
gccuggcacaggaauuaggagg

SEQ ID NO: 150637 - RNA, 22 nt, Human
auucagagcacuggguagaauu

SEQ ID NO: 150638 - RNA, 22 nt, Human
augggcugaggugggauagaag

SEQ ID NO: 150639 - RNA, 22 nt, Human
aggcugugggaguugagagucu

SEQ ID NO: 150640 - RNA, 22 nt, Human
acuguucauuuggauuucucug

SEQ ID NO: 150641 - RNA, 18 nt, Human
ucaggcucucuggcuaga

SEQ ID NO: 150642 - RNA, 20 nt, Human
gcugggcuuugacugacaca

SEQ ID NO: 150643 - RNA, 22 nt, Human
ugccaggcacgugagaguggcc

SEQ ID NO: 150644 - RNA, 22 nt, Human
gaggagcucugcuccauccuuc

SEQ ID NO: 150645 - RNA, 22 nt, Human
cacuguccaauagauacauaau

SEQ ID NO: 150646 - RNA, 19 nt, Human
uucacaauuaugaaauuag

SEQ ID NO: 150647 - RNA, 22 nt, Human
auaacaugaccugugcuucaca

SEQ ID NO: 150648 - RNA, 23 nt, Human
caggcucccggaccaggauccgc

SEQ ID NO: 150649 - RNA, 17 nt, Human
ugccagccugucccagg

SEQ ID NO: 150650 - RNA, 22 nt, Human
cuguugcaucauggcucuuaau

SEQ ID NO: 150651 - RNA, 22 nt, Human
ucacauaaauuuaccagaugau

SEQ ID NO: 150652 - RNA, 22 nt, Human
gaugaaaaaagacgagcauaua

SEQ ID NO: 150653 - RNA, 22 nt, Human
agguaaaauagauaguauuucu

SEQ ID NO: 150654 - RNA, 22 nt, Human
cuuuaagagaucaccaaucaca

SEQ ID NO: 150655 - RNA, 20 nt, Human
aagagucuuuacugagcuaa

SEQ ID NO: 150656 - RNA, 22 nt, Human
ucccugugagaaaugaagcagg

SEQ ID NO: 150657 - RNA, 22 nt, Human
ugguccugccccgugcacagag

SEQ ID NO: 150658 - RNA, 22 nt, Human
ccaggcucugucuggucagaag

SEQ ID NO: 150659 - RNA, 22 nt, Human
caaaugcuacuaauaggcaagu

SEQ ID NO: 150660 - RNA, 22 nt, Human
cucugagcagaggccguggcua

SEQ ID NO: 150661 - RNA, 23 nt, Human
uaaauuaccuuuccagugcaggg

SEQ ID NO: 150662 - RNA, 22 nt, Human
ccugcagaggucaggccagaaa

SEQ ID NO: 150663 - RNA, 22 nt, Human
gacaaaaguguuuugaacaagg

SEQ ID NO: 150664 - RNA, 22 nt, Human
acacacagguaaaggagccugg

SEQ ID NO: 150665 - RNA, 22 nt, Human
aucugggggagcugcucaugga

SEQ ID NO: 150666 - RNA, 18 nt, Human
uguagagccagguuugcc

SEQ ID NO: 150667 - RNA, 22 nt, Human
cauauuugguauaacuuaagca

SEQ ID NO: 150668 - RNA, 22 nt, Human
gccaaugacagucucaguucug

SEQ ID NO: 150669 - RNA, 22 nt, Human
guguaugaggggagaauguuuu

SEQ ID NO: 150670 - RNA, 22 nt, Human
uggcuggagcauuccuugucuu

SEQ ID NO: 150671 - RNA, 22 nt, Human
auuucuguaguccacauucuuu

SEQ ID NO: 150672 - RNA, 22 nt, Human
ggagccugaaaagucugcauuu

SEQ ID NO: 150673 - RNA, 20 nt, Human
acuggcagccugccugcugu

SEQ ID NO: 150674 - RNA, 22 nt, Human
cuugaaucuucugaguauuugc

SEQ ID NO: 150675 - RNA, 22 nt, Human
cuuuaagacucugcucuuggug

SEQ ID NO: 150676 - RNA, 22 nt, Human
gccaagcuuugcaggaguguug

SEQ ID NO: 150677 - RNA, 22 nt, Human
cagaggcugcucuggguggcau

SEQ ID NO: 150678 - RNA, 22 nt, Human
cccaggccagaacuugguugcu

SEQ ID NO: 150679 - RNA, 22 nt, Human
ccugggcuuacgaccucugacu

SEQ ID NO: 150680 - RNA, 22 nt, Human
ggaagaaagcacacaaacuuga

SEQ ID NO: 150681 - RNA, 22 nt, Human
agcucugcuucuugggaagaug

SEQ ID NO: 150682 - RNA, 22 nt, Human
augggcugggaucugaguguca

SEQ ID NO: 150683 - RNA, 22 nt, Human
uauuccagguauucuucaagag

SEQ ID NO: 150684 - RNA, 22 nt, Human
cccucucucaggcugacagccu

SEQ ID NO: 150685 - RNA, 22 nt, Human
uuggaacaugccgggguccagg

SEQ ID NO: 150686 - RNA, 22 nt, Human
ccuguucaagguauuaauuauc

SEQ ID NO: 150687 - RNA, 22 nt, Human
auggcagauggcuggagcaggu

SEQ ID NO: 150688 - RNA, 22 nt, Human
ccucucagcgauuccucuugga

SEQ ID NO: 150689 - RNA, 22 nt, Human
gacagccaucagcacacgcugc

SEQ ID NO: 150690 - RNA, 22 nt, Human
aguugacauccauaacaggaag

SEQ ID NO: 150691 - RNA, 22 nt, Human
ucaaauaccagcuuuuccagaa

SEQ ID NO: 150692 - RNA, 22 nt, Human
acuggggaguugaagcacuuuc

SEQ ID NO: 150693 - RNA, 22 nt, Human
cuuaaaaucuggcaguuagcua

SEQ ID NO: 150694 - RNA, 22 nt, Human
ugaguagagaauucagcuaagg

SEQ ID NO: 150695 - RNA, 22 nt, Human
uuauuccaauuucuccuacaaa

SEQ ID NO: 150696 - RNA, 22 nt, Human
ucuccaggaagcccucccugac

SEQ ID NO: 150697 - RNA, 22 nt, Human
cugggagaggaaccucgagggu

SEQ ID NO: 150698 - RNA, 22 nt, Human
aaucuuuuaggggauccugagg

SEQ ID NO: 150699 - RNA, 22 nt, Human
ucuggggacggggcccagcaau

SEQ ID NO: 150700 - RNA, 22 nt, Human
ugccugccucuggcagcccugc

SEQ ID NO: 150701 - RNA, 22 nt, Human
aaucucuugggaggaaugaauu

SEQ ID NO: 150702 - RNA, 22 nt, Human
gcuggcagccaagugaagaggg

SEQ ID NO: 150703 - RNA, 20 nt, Human
aaaagagugcuucaacugcu

SEQ ID NO: 150704 - RNA, 22 nt, Human
cuggccucagagggucauggug

SEQ ID NO: 150705 - RNA, 19 nt, Human
ccaaaagcaauuccaagua

SEQ ID NO: 150706 - RNA, 17 nt, Human
uguagcuucuccuucuc

SEQ ID NO: 150707 - RNA, 22 nt, Human
uuuuggaaugaggaacauccag

SEQ ID NO: 150708 - RNA, 22 nt, Human
cucugggcacuguauggguucu

SEQ ID NO: 150709 - RNA, 20 nt, Human
cacaacuguccacaugcucc

SEQ ID NO: 150710 - RNA, 20 nt, Human
ucaggcuccgcauuaacuua

SEQ ID NO: 150711 - RNA, 22 nt, Human
uguaugaaccuuuaauauagug

SEQ ID NO: 150712 - RNA, 22 nt, Human
auacaugacucacacauucugc

SEQ ID NO: 150713 - RNA, 22 nt, Human
ucacuguaauagguuugaagau

SEQ ID NO: 150714 - RNA, 22 nt, Human
ugcaggcuggggaggcagacuu

SEQ ID NO: 150715 - RNA, 22 nt, Human
cuccagggggcauccacacagc

SEQ ID NO: 150716 - RNA, 22 nt, Human
ccaggcucaggugcgagagaca

SEQ ID NO: 150717 - RNA, 22 nt, Human
ugggcugaaaugcuguggacua

SEQ ID NO: 150718 - RNA, 22 nt, Human
ugcauugauagaaaaacaugga

SEQ ID NO: 150719 - RNA, 22 nt, Human
gcuggcagagagcuggugagga

SEQ ID NO: 150720 - RNA, 22 nt, Human
ugccagccagggaagcucaccc

SEQ ID NO: 150721 - RNA, 22 nt, Human
cuuggcaggguggaggaugcag

SEQ ID NO: 150722 - RNA, 22 nt, Human
agcuucuugggcuuuacacaaa

SEQ ID NO: 150723 - RNA, 22 nt, Human
aaauucaguuuuaauaaucacu

SEQ ID NO: 150724 - RNA, 19 nt, Human
gcuggcagauguggccgug

SEQ ID NO: 150725 - RNA, 22 nt, Human
agauauuuguaucuugcuauug

SEQ ID NO: 150726 - RNA, 20 nt, Human
uuucuggguacucucccucu

SEQ ID NO: 150727 - RNA, 22 nt, Human
gacacagagggcaccagauaug

SEQ ID NO: 150728 - RNA, 22 nt, Human
aguugggaguuauagacucuau

SEQ ID NO: 150729 - RNA, 22 nt, Human
ucuggcagugaagucaugaggu

SEQ ID NO: 150730 - RNA, 23 nt, Human
uccuuccuuugagaggcuccauc

SEQ ID NO: 150731 - RNA, 22 nt, Human
acugggcugcuugagugccuuc

SEQ ID NO: 150732 - RNA, 22 nt, Human
uauucugugugauauguaaaug

SEQ ID NO: 150733 - RNA, 22 nt, Human
caggaguccagagugucauuuu

SEQ ID NO: 150734 - RNA, 22 nt, Human
gccacagguacuaugggagaga

SEQ ID NO: 150735 - RNA, 22 nt, Human
auuugaagucuucaugauuucu

SEQ ID NO: 150736 - RNA, 22 nt, Human
gggguggccaaggacucugacc

SEQ ID NO: 150737 - RNA, 22 nt, Human
ugcccccugguggccagagccg

SEQ ID NO: 150738 - RNA, 22 nt, Human
ccuggcagaauauuaaagugca

SEQ ID NO: 150739 - RNA, 22 nt, Human
uuucuauaugaggagcuaaagu

SEQ ID NO: 150740 - RNA, 22 nt, Human
agaauauugaaaguucuugaca

SEQ ID NO: 150741 - RNA, 22 nt, Human
gccuccggaguugcagugucuu

SEQ ID NO: 150742 - RNA, 22 nt, Human
cugccugcucuauccaggccug

SEQ ID NO: 150743 - RNA, 22 nt, Human
gccagguugcugacgacgaucu

SEQ ID NO: 150744 - RNA, 22 nt, Human
ggccucucagggcagagacccu

SEQ ID NO: 150745 - RNA, 22 nt, Human
ggugccaggcuguagucagggu

SEQ ID NO: 150746 - RNA, 23 nt, Human
uugggaaauaguuaagacaugag

SEQ ID NO: 150747 - RNA, 21 nt, Human
agcaggcuuuggaguggggcu

SEQ ID NO: 150748 - RNA, 22 nt, Human
agcaggcuaaauaauaauacau

SEQ ID NO: 150749 - RNA, 22 nt, Human
acagguggggcacuuggagccu

SEQ ID NO: 150750 - RNA, 19 nt, Human
agcaggcuaggcugccucu

SEQ ID NO: 150751 - RNA, 22 nt, Human
ucucuuaauuguaaugguuccu

SEQ ID NO: 150752 - RNA, 22 nt, Human
cugagcagugguucuugagcgc

SEQ ID NO: 150753 - RNA, 22 nt, Human
cuccugaggaaaagcuugguca

SEQ ID NO: 150754 - RNA, 22 nt, Human
gcugggcuugguuucccugcuu

SEQ ID NO: 150755 - RNA, 22 nt, Human
uugaaaacuuucuagaccaaga

SEQ ID NO: 150756 - RNA, 21 nt, Human
aacacauccagaguauuugac

SEQ ID NO: 150757 - RNA, 22 nt, Human
ugagaaaagguugagaugauaa

SEQ ID NO: 150758 - RNA, 22 nt, Human
guuaggaacacuggagccuaaa

SEQ ID NO: 150759 - RNA, 22 nt, Human
cagcccaaagccccaggcuaga

SEQ ID NO: 150760 - RNA, 22 nt, Human
accagugggaaguggaaaauga

SEQ ID NO: 150761 - RNA, 22 nt, Human
ucccacaggaaaguagacauug

SEQ ID NO: 150762 - RNA, 22 nt, Human
ugaaacacugcgauaaaauccu

SEQ ID NO: 150763 - RNA, 22 nt, Human
guccuggcccaggaguacacau

SEQ ID NO: 150764 - RNA, 22 nt, Human
caaauucucaagguuuauccca

SEQ ID NO: 150765 - RNA, 22 nt, Human
uuuaaauuuagaagaaacacug

SEQ ID NO: 150766 - RNA, 22 nt, Human
uuccaaguagaagcauuugcau

SEQ ID NO: 150767 - RNA, 19 nt, Human
ucuguucacauuguuucgc

SEQ ID NO: 150768 - RNA, 22 nt, Human
ugcaggcugccuucacagagcc

SEQ ID NO: 150769 - RNA, 22 nt, Human
gcauccaaaccauucaucagcc

SEQ ID NO: 150770 - RNA, 22 nt, Human
uuuauuuauaagccacuugcug

SEQ ID NO: 150771 - RNA, 20 nt, Human
gcugggcuaccacuggcccu

SEQ ID NO: 150772 - RNA, 22 nt, Human
accugccuucucaaggacauga

SEQ ID NO: 150773 - RNA, 22 nt, Human
ugguuccucaagcgcuggcggc

SEQ ID NO: 150774 - RNA, 22 nt, Human
ugcaggcugcucaagacuuagu

SEQ ID NO: 150775 - RNA, 22 nt, Human
auggcagacgaggcagcagggg

SEQ ID NO: 150776 - RNA, 22 nt, Human
uacaauauguggccuuuuguga

SEQ ID NO: 150777 - RNA, 22 nt, Human
acagguccucaagucagcuggg

SEQ ID NO: 150778 - RNA, 22 nt, Human
gcuggcagguaaagccccgggg

SEQ ID NO: 150779 - RNA, 22 nt, Human
cagugggggggccaugcugcag

SEQ ID NO: 150780 - RNA, 22 nt, Human
cucuccagccuuuagcccacgc

SEQ ID NO: 150781 - RNA, 22 nt, Human
gcuccugggcccugggcuaacu

SEQ ID NO: 150782 - RNA, 22 nt, Human
uuauuccagcuaagaguccugg

SEQ ID NO: 150783 - RNA, 22 nt, Human
uauuuaguuaucuuucauaaaa

SEQ ID NO: 150784 - RNA, 22 nt, Human
ccugggcuguugcaucauccuu

SEQ ID NO: 150785 - RNA, 22 nt, Human
uuguacaaauaggaaccucuga

SEQ ID NO: 150786 - RNA, 22 nt, Human
ccuggggaaaagcaggcauuua

SEQ ID NO: 150787 - RNA, 22 nt, Human
cugagggucaacuugauuguau

SEQ ID NO: 150788 - RNA, 22 nt, Human
agcuuuggagacugacuccauc

SEQ ID NO: 150789 - RNA, 22 nt, Human
acugggcucaagugauuguccu

SEQ ID NO: 150790 - RNA, 17 nt, Human
gugaagagucauugaau

SEQ ID NO: 150791 - RNA, 22 nt, Human
cuacauggagaagaaaauucuu

SEQ ID NO: 150792 - RNA, 22 nt, Human
augggcugaggaagcuccugag

SEQ ID NO: 150793 - RNA, 21 nt, Human
ggcuaggaugcugggguuucc

SEQ ID NO: 150794 - RNA, 22 nt, Human
cugggcuuugaagccaggcugc

SEQ ID NO: 150795 - RNA, 22 nt, Human
aagcuguucucuaaguuucaug

SEQ ID NO: 150796 - RNA, 20 nt, Human
cucuuuugacucuuugcaag

SEQ ID NO: 150797 - RNA, 17 nt, Human
ugcaggcuccugucccu

SEQ ID NO: 150798 - RNA, 22 nt, Human
aaauaugaaugauaagaguuau

SEQ ID NO: 150799 - RNA, 23 nt, Human
uugugggcagauuccauggggag

SEQ ID NO: 150800 - RNA, 22 nt, Human
uugaagcagagaaauacuugaa

SEQ ID NO: 150801 - RNA, 22 nt, Human
uauguaaaguagauggcaggua

SEQ ID NO: 150802 - RNA, 18 nt, Human
cuacauucauaggaaagg

SEQ ID NO: 150803 - RNA, 22 nt, Human
ggggcugauggaacucaggccu

SEQ ID NO: 150804 - RNA, 19 nt, Human
cugagagaugcuucacaca

SEQ ID NO: 150805 - RNA, 22 nt, Human
uucuucaaauagcagggaguca

SEQ ID NO: 150806 - RNA, 23 nt, Human
uucaaaacuggaaaaucagaugc

SEQ ID NO: 150807 - RNA, 22 nt, Human
cccuggcagagggggcaggugc

SEQ ID NO: 150808 - RNA, 18 nt, Human
ucuaggagaguaccuacc

SEQ ID NO: 150809 - RNA, 22 nt, Human
caaaaguucucacccagacaug

SEQ ID NO: 150810 - RNA, 22 nt, Human
ccagggggcuuggugaggccau

SEQ ID NO: 150811 - RNA, 22 nt, Human
ugcaggcugaggcuggcucaac

SEQ ID NO: 150812 - RNA, 22 nt, Human
aacuuucagcaaguaauucugg

SEQ ID NO: 150813 - RNA, 22 nt, Human
cuguaugaaauuaaguaaacag

SEQ ID NO: 150814 - RNA, 22 nt, Human
caggucccugcgccccggccuc

SEQ ID NO: 150815 - RNA, 19 nt, Human
acuggcagcuguagucugu

SEQ ID NO: 150816 - RNA, 22 nt, Human
uggcacaguccugggugccugc

SEQ ID NO: 150817 - RNA, 22 nt, Human
ucccagccacaguuuccaccug

SEQ ID NO: 150818 - RNA, 22 nt, Human
aagagcacuaacagagcugaua

SEQ ID NO: 150819 - RNA, 22 nt, Human
aauacugucuuucacagauauu

SEQ ID NO: 150820 - RNA, 22 nt, Human
acuggcuugaaguagauucaaa

SEQ ID NO: 150821 - RNA, 22 nt, Human
ucaggcucuacacuugacacac

SEQ ID NO: 150822 - RNA, 22 nt, Human
gagcucagauucuggugucaga

SEQ ID NO: 150823 - RNA, 22 nt, Human
gaugaagcuuugaagucuaauc

SEQ ID NO: 150824 - RNA, 22 nt, Human
acuggcagguccaucgcccuuu

SEQ ID NO: 150825 - RNA, 22 nt, Human
cagguggccaguacucaaggau

SEQ ID NO: 150826 - RNA, 22 nt, Human
uuucaaauagaaucuuuccaaa

SEQ ID NO: 150827 - RNA, 21 nt, Human
ugacugaggcuucuucacaca

SEQ ID NO: 150828 - RNA, 22 nt, Human
ucugggcuggcuuuaugcugac

SEQ ID NO: 150829 - RNA, 22 nt, Human
uuguuaaagaugcagauuccau

SEQ ID NO: 150830 - RNA, 22 nt, Human
cugagagaucaagccacaggau

SEQ ID NO: 150831 - RNA, 22 nt, Human
cacaacuuuaggaaccacauuc

SEQ ID NO: 150832 - RNA, 22 nt, Human
ccugggcucaccaugccuugga

SEQ ID NO: 150833 - RNA, 22 nt, Human
cugaaagaauaagauguuuaca

SEQ ID NO: 150834 - RNA, 22 nt, Human
gugggcuggauuugcuugcaga

SEQ ID NO: 150835 - RNA, 22 nt, Human
cuacauaaauuuaucacagacu

SEQ ID NO: 150836 - RNA, 22 nt, Human
uuccggaagguucucuagaauu

SEQ ID NO: 150837 - RNA, 22 nt, Human
cugggcucaccuguggcuggca

SEQ ID NO: 150838 - RNA, 22 nt, Human
agagugaaaagcuagagcagua

SEQ ID NO: 150839 - RNA, 22 nt, Human
gacuguggggggcggacacaag

SEQ ID NO: 150840 - RNA, 22 nt, Human
ugcaggcucaucucaagaguag

SEQ ID NO: 150841 - RNA, 22 nt, Human
aaagagucuggcacuguaccag

SEQ ID NO: 150842 - RNA, 22 nt, Human
ccaggcuccccaggaggcccuu

SEQ ID NO: 150843 - RNA, 22 nt, Human
gagccagguuugaaucucaguc

SEQ ID NO: 150844 - RNA, 22 nt, Human
uucuguauauuguaaagacuca

SEQ ID NO: 150845 - RNA, 22 nt, Human
gcuguucacaucuggaccauuu

SEQ ID NO: 150846 - RNA, 22 nt, Human
cauaaguuggguaauauaauga

SEQ ID NO: 150847 - RNA, 22 nt, Human
caugaagcuugaagcaguccac

SEQ ID NO: 150848 - RNA, 22 nt, Human
ccugggcuugcaucugugcugg

SEQ ID NO: 150849 - RNA, 22 nt, Human
gccuggaaugcaaugugacgaa

SEQ ID NO: 150850 - RNA, 22 nt, Human
agcacaggaacauggagauggg

SEQ ID NO: 150851 - RNA, 22 nt, Human
auuaaagaaacccagcauguga

SEQ ID NO: 150852 - RNA, 20 nt, Human
ugccaggcacggagugcaug

SEQ ID NO: 150853 - RNA, 20 nt, Human
ggcugcaggacucauuggcu

SEQ ID NO: 150854 - RNA, 22 nt, Human
ugcaggcuguaaucugaggcua

SEQ ID NO: 150855 - RNA, 22 nt, Human
cagcucagucuugaagcacugg

SEQ ID NO: 150856 - RNA, 22 nt, Human
cuccuggcucgcccccagcuga

SEQ ID NO: 150857 - RNA, 21 nt, Human
aaagagcccgcugagagguuc

SEQ ID NO: 150858 - RNA, 22 nt, Human
guaugaaguaagauauuguuca

SEQ ID NO: 150859 - RNA, 22 nt, Human
ugcaggcuuggaucacaucucc

SEQ ID NO: 150860 - RNA, 22 nt, Human
ugcaggcuguuugguggaucuc

SEQ ID NO: 150861 - RNA, 22 nt, Human
ggaggacaggggcugcagcaca

SEQ ID NO: 150862 - RNA, 22 nt, Human
auuaaaauuccaagguaugcca

SEQ ID NO: 150863 - RNA, 22 nt, Human
gccaagcucuuuaaaggccaaa

SEQ ID NO: 150864 - RNA, 20 nt, Human
acuccagguggcaugaggac

SEQ ID NO: 150865 - RNA, 22 nt, Human
augacugcucugggcucccaug

SEQ ID NO: 150866 - RNA, 18 nt, Human
cucucuuuccacucuuug

SEQ ID NO: 150867 - RNA, 22 nt, Human
gacucguucauaguuccaauuu

SEQ ID NO: 150868 - RNA, 22 nt, Human
uacacaucacuguaucuuucag

SEQ ID NO: 150869 - RNA, 22 nt, Human
ccuggggaauagagucaagggg

SEQ ID NO: 150870 - RNA, 22 nt, Human
ucuguucagaagaggugaaagu

SEQ ID NO: 150871 - RNA, 22 nt, Human
ucagcucuaaguuuuaugcaaa

SEQ ID NO: 150872 - RNA, 22 nt, Human
aaugaagccacugaagacaauc

SEQ ID NO: 150873 - RNA, 22 nt, Human
uggcaucuccgacagucuugau

SEQ ID NO: 150874 - RNA, 22 nt, Human
acaucccacagaaacauacaua

SEQ ID NO: 150875 - RNA, 22 nt, Human
aucuagauuagguauaagagcu

SEQ ID NO: 150876 - RNA, 22 nt, Human
cccccaaaguuugcacggauaa

SEQ ID NO: 150877 - RNA, 22 nt, Human
caggccucuuccaugcagcagc

SEQ ID NO: 150878 - RNA, 22 nt, Human
ucacacauuucucaaguguagg

SEQ ID NO: 150879 - RNA, 21 nt, Human
acaggcucacgauccauuucu

SEQ ID NO: 150880 - RNA, 22 nt, Human
gagcucagcaaaggucugugug

SEQ ID NO: 150881 - RNA, 22 nt, Human
cugcaggcccccuuccuggagu

SEQ ID NO: 150882 - RNA, 22 nt, Human
aguguugggucuuuagaauuua

SEQ ID NO: 150883 - RNA, 22 nt, Human
gcuggcaggagccuuucccuuu

SEQ ID NO: 150884 - RNA, 22 nt, Human
aguaugaauugcuuugccugua

SEQ ID NO: 150885 - RNA, 22 nt, Human
acuggcagagggaaaaccauuc

SEQ ID NO: 150886 - RNA, 18 nt, Human
cuccuggcugauggugag

SEQ ID NO: 150887 - RNA, 22 nt, Human
cugggcuguuuguucuggucuc

SEQ ID NO: 150888 - RNA, 21 nt, Human
agugccaguagguauggagga

SEQ ID NO: 150889 - RNA, 22 nt, Human
augggcugagaaucaagaauau

SEQ ID NO: 150890 - RNA, 22 nt, Human
aaauuacagaucaccaaugcau

SEQ ID NO: 150891 - RNA, 23 nt, Human
cugggcugcuugagucccuggcu

SEQ ID NO: 150892 - RNA, 22 nt, Human
agcaggcuaagggaccuguuua

SEQ ID NO: 150893 - RNA, 22 nt, Human
uuuuauguaauccuuacugucg

SEQ ID NO: 150894 - RNA, 22 nt, Human
cccacacacauuuaugauagga

SEQ ID NO: 150895 - RNA, 22 nt, Human
acuguucacagauuagucgaug

SEQ ID NO: 150896 - RNA, 22 nt, Human
acaaaagugagugugucucaga

SEQ ID NO: 150897 - RNA, 22 nt, Human
ucacacaugcuaagccagagau

SEQ ID NO: 150898 - RNA, 22 nt, Human
gaauauuuuuaaagggacuaau

SEQ ID NO: 150899 - RNA, 22 nt, Human
ccagcucucuuugaagcauaaa

SEQ ID NO: 150900 - RNA, 17 nt, Human
ucgguuugccaggcuuc

SEQ ID NO: 150901 - RNA, 20 nt, Human
aggcucugccugcaggccca

SEQ ID NO: 150902 - RNA, 22 nt, Human
ugcuucuguuucauugaucuua

SEQ ID NO: 150903 - RNA, 22 nt, Human
caugagauuugggaggggccag

SEQ ID NO: 150904 - RNA, 22 nt, Human
auuuccagcagcauauuugucu

SEQ ID NO: 150905 - RNA, 22 nt, Human
cagaguuuuaucauacguggau

SEQ ID NO: 150906 - RNA, 22 nt, Human
ucuggggagcagcccuggugag

SEQ ID NO: 150907 - RNA, 22 nt, Human
gaggugagaagggggucagaug

SEQ ID NO: 150908 - RNA, 22 nt, Human
gguuccuucugaggucccugua

SEQ ID NO: 150909 - RNA, 23 nt, Human
ucacauaauccuucauccacagg

SEQ ID NO: 150910 - RNA, 22 nt, Human
uauuccaaaaucccaaacugcc

SEQ ID NO: 150911 - RNA, 21 nt, Human
ucacacacguuuccaagggca

SEQ ID NO: 150912 - RNA, 22 nt, Human
ugcagagaagaggacaguucua

SEQ ID NO: 150913 - RNA, 22 nt, Human
aguaugaauggaaacuaccuau

SEQ ID NO: 150914 - RNA, 22 nt, Human
accaagcuucguggaggaaguu

SEQ ID NO: 150915 - RNA, 22 nt, Human
ccugaccuauuuuucucagcug

SEQ ID NO: 150916 - RNA, 20 nt, Human
uucaugggagcaaagaggcc

SEQ ID NO: 150917 - RNA, 22 nt, Human
uugcauuccaguccccacugug

SEQ ID NO: 150918 - RNA, 22 nt, Human
aagaggucauaccagauaaggg

SEQ ID NO: 150919 - RNA, 22 nt, Human
ccugggcucaagugaugguccc

SEQ ID NO: 150920 - RNA, 22 nt, Human
uggcacucacucucagagucug

SEQ ID NO: 150921 - RNA, 22 nt, Human
agcuuguuagaaauguagacuc

SEQ ID NO: 150922 - RNA, 22 nt, Human
cuggcagggugggcuuugcuuu

SEQ ID NO: 150923 - RNA, 22 nt, Human
cuaggaaucaccaagauucuag

SEQ ID NO: 150924 - RNA, 22 nt, Human
ccugccucccagagguccucua

SEQ ID NO: 150925 - RNA, 22 nt, Human
aacaaaagccgaaguagguguc

SEQ ID NO: 150926 - RNA, 22 nt, Human
gguggcagagaggagguaguuu

SEQ ID NO: 150927 - RNA, 22 nt, Human
gaggcucugugaugugccaggc

SEQ ID NO: 150928 - RNA, 22 nt, Human
aauuucagaccauuugcaauua

SEQ ID NO: 150929 - RNA, 22 nt, Human
uuguaaacugcugcaggagugc

SEQ ID NO: 150930 - RNA, 22 nt, Human
ccuucaaaacacuaguuuuuga

SEQ ID NO: 150931 - RNA, 22 nt, Human
uguaaaauaauucuccauguuu

SEQ ID NO: 150932 - RNA, 22 nt, Human
uccaggcuccccugcgugcucc

SEQ ID NO: 150933 - RNA, 22 nt, Human
gcuguucauagaaauggucuca

SEQ ID NO: 150934 - RNA, 22 nt, Human
agucacaguuucccugagagag

SEQ ID NO: 150935 - RNA, 23 nt, Human
gggaccugguaggaggugauugg

SEQ ID NO: 150936 - RNA, 22 nt, Human
aauuucagagguagagauucua

SEQ ID NO: 150937 - RNA, 22 nt, Human
aucuuuuacauuacugcccaga

SEQ ID NO: 150938 - RNA, 22 nt, Human
acuggcagggggagccccgaga

SEQ ID NO: 150939 - RNA, 22 nt, Human
ccuggcagguagcauugaggag

SEQ ID NO: 150940 - RNA, 20 nt, Human
agggucugaugugguggccc

SEQ ID NO: 150941 - RNA, 22 nt, Human
uggguaggggacguggaagaaa

SEQ ID NO: 150942 - RNA, 22 nt, Human
ugauucacagacuucacaaggc

SEQ ID NO: 150943 - RNA, 22 nt, Human
uguaugaaugggaaaaggaaac

SEQ ID NO: 150944 - RNA, 22 nt, Human
ucuguucaugucuuuuuaagug

SEQ ID NO: 150945 - RNA, 22 nt, Human
gcacacaguagggauucaauga

SEQ ID NO: 150946 - RNA, 22 nt, Human
uggccucugggaaagcagauuc

SEQ ID NO: 150947 - RNA, 22 nt, Human
gagacacacauucuggagagaa

SEQ ID NO: 150948 - RNA, 22 nt, Human
uauuacagaaucaggcauaacu

SEQ ID NO: 150949 - RNA, 22 nt, Human
uuuacagaucuguugauuuguu

SEQ ID NO: 150950 - RNA, 22 nt, Human
auuuacagaagcauguaauagc

SEQ ID NO: 150951 - RNA, 22 nt, Human
aguggcugccaagagcaaugcu

SEQ ID NO: 150952 - RNA, 21 nt, Human
aguugcauaggccagccaucc

SEQ ID NO: 150953 - RNA, 22 nt, Human
gguuuccugcauugggaaauuu

SEQ ID NO: 150954 - RNA, 22 nt, Human
accacccauucagaaacacuga

SEQ ID NO: 150955 - RNA, 22 nt, Human
acauaucuuucccucuccugaa

SEQ ID NO: 150956 - RNA, 22 nt, Human
ucuggggauggucuacuuucug

SEQ ID NO: 150957 - RNA, 22 nt, Human
ucccucuaaacuguaagauucu

SEQ ID NO: 150958 - RNA, 20 nt, Human
uauuugaaauggccaagugu

SEQ ID NO: 150959 - RNA, 22 nt, Human
agcaggcugggcaauaugggca

SEQ ID NO: 150960 - RNA, 22 nt, Human
cacacagaugguaagggaggga

SEQ ID NO: 150961 - RNA, 22 nt, Human
cagguuggggacuuaggaugac

SEQ ID NO: 150962 - RNA, 22 nt, Human
ucuggcaggucaaucauucuuu

SEQ ID NO: 150963 - RNA, 22 nt, Human
uggcagagaacacggcugaucu

SEQ ID NO: 150964 - RNA, 21 nt, Human
cuacuuaaguaggggauuagg

SEQ ID NO: 150965 - RNA, 19 nt, Human
gacuccaacuuuaagcaug

SEQ ID NO: 150966 - RNA, 22 nt, Human
gggcugacaguuuccccugaaa

SEQ ID NO: 150967 - RNA, 22 nt, Human
ccuggggagagaaagcccagcc

SEQ ID NO: 150968 - RNA, 22 nt, Human
cagcucuggguaggaggaaucu

SEQ ID NO: 150969 - RNA, 22 nt, Human
gcacacaggggaguucucagaa

SEQ ID NO: 150970 - RNA, 21 nt, Human
ugcaggcugugcgcuccugcc

SEQ ID NO: 150971 - RNA, 22 nt, Human
ucuccaggagcaagucacccag

SEQ ID NO: 150972 - RNA, 22 nt, Human
gcagggguagugucuuccugag

SEQ ID NO: 150973 - RNA, 22 nt, Human
agaggccugugugcuccagugg

SEQ ID NO: 150974 - RNA, 22 nt, Human
uccugagcaacacagcuaagug

SEQ ID NO: 150975 - RNA, 22 nt, Human
uaagauguuuugguuugauaag

SEQ ID NO: 150976 - RNA, 22 nt, Human
gagaaagauguaggcugggagg

SEQ ID NO: 150977 - RNA, 22 nt, Human
ggagacucggguucuagccuug

SEQ ID NO: 150978 - RNA, 22 nt, Human
cccacccugggaagcuaggcag

SEQ ID NO: 150979 - RNA, 22 nt, Human
guccucuggaagaugaguucuu

SEQ ID NO: 150980 - RNA, 22 nt, Human
gaggagcucaugaaagcggugu

SEQ ID NO: 150981 - RNA, 22 nt, Human
acauacacaagcguacaugaac

SEQ ID NO: 150982 - RNA, 22 nt, Human
cugggcugcaguuccugguccu

SEQ ID NO: 150983 - RNA, 22 nt, Human
auuuguaauuucuuaucugugu

SEQ ID NO: 150984 - RNA, 22 nt, Human
caguauagaaaguuuuaaauug

SEQ ID NO: 150985 - RNA, 22 nt, Human
gcuuuuaauuaguugcuuccau

SEQ ID NO: 150986 - RNA, 22 nt, Human
uggccaggccucuuggugccca

SEQ ID NO: 150987 - RNA, 22 nt, Human
guugcacaguuccucaagcagg

SEQ ID NO: 150988 - RNA, 18 nt, Human
ccaaggccccugcugggg

SEQ ID NO: 150989 - RNA, 22 nt, Human
cuaugaaaggauuuggaguugu

SEQ ID NO: 150990 - RNA, 22 nt, Human
cuccuggcacugucuugaccca

SEQ ID NO: 150991 - RNA, 22 nt, Human
uauuccagugugaucuuuguag

SEQ ID NO: 150992 - RNA, 22 nt, Human
uucauuccuucccuaagcaacu

SEQ ID NO: 150993 - RNA, 22 nt, Human
gccuccuggguucaugccauuc

SEQ ID NO: 150994 - RNA, 22 nt, Human
uuguaugaggauagcaagaagc

SEQ ID NO: 150995 - RNA, 22 nt, Human
caccuaggguuucgccuuucuu

SEQ ID NO: 150996 - RNA, 22 nt, Human
acuggcagagacccugauggcc

SEQ ID NO: 150997 - RNA, 22 nt, Human
ccaggcuccucaugaucuuguu

SEQ ID NO: 150998 - RNA, 22 nt, Human
uguaugaagccagaaucuguuu

SEQ ID NO: 150999 - RNA, 22 nt, Human
aaagcucuuauagcagagugug

SEQ ID NO: 151000 - RNA, 22 nt, Human
gcccaagcuggacugcaguggc

SEQ ID NO: 151001 - RNA, 22 nt, Human
gggaccuggacaugugugugcu

SEQ ID NO: 151002 - RNA, 22 nt, Human
cacacacucuuccuggcaccua

SEQ ID NO: 151003 - RNA, 22 nt, Human
caggcuggagugcaauggcaca

SEQ ID NO: 151004 - RNA, 21 nt, Human
cacacagugaucuauccacau

SEQ ID NO: 151005 - RNA, 22 nt, Human
acugggcucccaggcuugucau

SEQ ID NO: 151006 - RNA, 22 nt, Human
aguaaaauuaauggaucagaag

SEQ ID NO: 151007 - RNA, 22 nt, Human
gcuguucaaaagccacaguuac

SEQ ID NO: 151008 - RNA, 22 nt, Human
ucuguucagacacuuuacaugu

SEQ ID NO: 151009 - RNA, 22 nt, Human
ucaggcccuuugcugcugcccc

SEQ ID NO: 151010 - RNA, 22 nt, Human
ucacuguauuuggaagggaugg

SEQ ID NO: 151011 - RNA, 22 nt, Human
uguuggaauuaggauacagagg

SEQ ID NO: 151012 - RNA, 22 nt, Human
uaaacauuuguuauucuuguuu

SEQ ID NO: 151013 - RNA, 22 nt, Human
cuucugggcauggcagagccug

SEQ ID NO: 151014 - RNA, 22 nt, Human
agcaggcuuucaagagucuucu

SEQ ID NO: 151015 - RNA, 22 nt, Human
ucaggcucaggaauguguuuau

SEQ ID NO: 151016 - RNA, 22 nt, Human
uacacagaaccugguguacagu

SEQ ID NO: 151017 - RNA, 22 nt, Human
ggcucugcaugugagugggugg

SEQ ID NO: 151018 - RNA, 22 nt, Human
uuccaggauagcuuucaggaau

SEQ ID NO: 151019 - RNA, 22 nt, Human
ggcaggcuugguggcaccgguu

SEQ ID NO: 151020 - RNA, 22 nt, Human
uccuggcauugugcagggugug

SEQ ID NO: 151021 - RNA, 22 nt, Human
agaaagaggaugcagaucucau

SEQ ID NO: 151022 - RNA, 20 nt, Human
guggcaggcagugaaggagc

SEQ ID NO: 151023 - RNA, 22 nt, Human
ucuguucaucaucuggacacau

SEQ ID NO: 151024 - RNA, 22 nt, Human
uuccaagugaaaguagcuuugu

SEQ ID NO: 151025 - RNA, 23 nt, Human
gcugggcuuacucuuucagugag

SEQ ID NO: 151026 - RNA, 22 nt, Human
cuuuccaaugucacuaugaauc

SEQ ID NO: 151027 - RNA, 20 nt, Human
gcuccaggucagagaggacg

SEQ ID NO: 151028 - RNA, 22 nt, Human
cagcucuguucauagauggugc

SEQ ID NO: 151029 - RNA, 22 nt, Human
ggccucaguuucuccauggguu

SEQ ID NO: 151030 - RNA, 22 nt, Human
guggcagugaaggucauagcau

SEQ ID NO: 151031 - RNA, 22 nt, Human
uuggguaggagaaagaacagau

SEQ ID NO: 151032 - RNA, 22 nt, Human
ccugaggggcugcaggccagcu

SEQ ID NO: 151033 - RNA, 22 nt, Human
uuccaggacaagauguuucagg

SEQ ID NO: 151034 - RNA, 22 nt, Human
ccuucuucuguguggcccaaga

SEQ ID NO: 151035 - RNA, 22 nt, Human
gcagcucuuuucuuaaagagau

SEQ ID NO: 151036 - RNA, 22 nt, Human
guaugaaguuggacuguauaaa

SEQ ID NO: 151037 - RNA, 22 nt, Human
ucuggcagcuauccucuggcca

SEQ ID NO: 151038 - RNA, 22 nt, Human
ucuggcaggccuugucaaucug

SEQ ID NO: 151039 - RNA, 22 nt, Human
cuuuucacaggaggauaagccc

SEQ ID NO: 151040 - RNA, 22 nt, Human
uuaggaaguguguccagaagcg

SEQ ID NO: 151041 - RNA, 22 nt, Human
ccugggcucaagugauccuccu

SEQ ID NO: 151042 - RNA, 22 nt, Human
augggcugacuaaugguaaacu

SEQ ID NO: 151043 - RNA, 22 nt, Human
ccugggcucacagccaaggcuc

SEQ ID NO: 151044 - RNA, 22 nt, Human
aaauacugcugcuauuccuuuu

SEQ ID NO: 151045 - RNA, 22 nt, Human
ggcaggcugggagucaucagag

SEQ ID NO: 151046 - RNA, 22 nt, Human
gucauuccuuauguugauucag

SEQ ID NO: 151047 - RNA, 22 nt, Human
gaacugaguuuucugccuggac

SEQ ID NO: 151048 - RNA, 22 nt, Human
uuggagagcaguaaaccacacu

SEQ ID NO: 151049 - RNA, 22 nt, Human
uugauuccuugaaauauccuug

SEQ ID NO: 151050 - RNA, 22 nt, Human
uggcaugggcaaaccagggaaa

SEQ ID NO: 151051 - RNA, 22 nt, Human
uccugccuguuuaccuguacuu

SEQ ID NO: 151052 - RNA, 22 nt, Human
aggaggcuuuugcaggugccac

SEQ ID NO: 151053 - RNA, 22 nt, Human
ugcaggcuccacguuguugucc

SEQ ID NO: 151054 - RNA, 22 nt, Human
cccagccuacucugccauagca

SEQ ID NO: 151055 - RNA, 22 nt, Human
ccuuuaaagacugcauaacuuc

SEQ ID NO: 151056 - RNA, 22 nt, Human
cccuuccugggugucccggagu

SEQ ID NO: 151057 - RNA, 22 nt, Human
uucccacauucuuuacauucau

SEQ ID NO: 151058 - RNA, 22 nt, Human
guccaagagucaagaagggggc

SEQ ID NO: 151059 - RNA, 22 nt, Human
cauuugaaauaguucauucuug

SEQ ID NO: 151060 - RNA, 22 nt, Human
ugaagccacuuuccagaaucac

SEQ ID NO: 151061 - RNA, 22 nt, Human
caaaagucuuccuauucucuua

SEQ ID NO: 151062 - RNA, 22 nt, Human
acaucacaguaguuaagccaga

SEQ ID NO: 151063 - RNA, 22 nt, Human
ugcuucugcaggagcuccugau

SEQ ID NO: 151064 - RNA, 22 nt, Human
uuauauaucuugauuuguucca

SEQ ID NO: 151065 - RNA, 22 nt, Human
cauuugaauuguucugugggaa

SEQ ID NO: 151066 - RNA, 22 nt, Human
acugggcugguuaguuuuacua

SEQ ID NO: 151067 - RNA, 22 nt, Human
aguaugaagaauacauagauga

SEQ ID NO: 151068 - RNA, 22 nt, Human
agcaggcuuguuaugucugaga

SEQ ID NO: 151069 - RNA, 22 nt, Human
caaauauuccagguacaucccu

SEQ ID NO: 151070 - RNA, 22 nt, Human
ccccuguguuguucaaggguca

SEQ ID NO: 151071 - RNA, 22 nt, Human
cuccuggcaggcugagugaaau

SEQ ID NO: 151072 - RNA, 20 nt, Human
agggcugagaagggacuagc

SEQ ID NO: 151073 - RNA, 22 nt, Human
uuccugccccugagagcuccca

SEQ ID NO: 151074 - RNA, 22 nt, Human
ccuggcagcuaagugcuuugag

SEQ ID NO: 151075 - RNA, 22 nt, Human
cccuuccuugugacuggugggg

SEQ ID NO: 151076 - RNA, 17 nt, Human
uugggagagaaagguau

SEQ ID NO: 151077 - RNA, 22 nt, Human
uuggaagacagugaaacagcac

SEQ ID NO: 151078 - RNA, 22 nt, Human
gguucccggaucuccgaguccc

SEQ ID NO: 151079 - RNA, 22 nt, Human
uguaacacucaaucuguuuaac

SEQ ID NO: 151080 - RNA, 22 nt, Human
cacacacaguuuuguauucugu

SEQ ID NO: 151081 - RNA, 22 nt, Human
accaagcuguauauuauugguu

SEQ ID NO: 151082 - RNA, 22 nt, Human
auuugaagaaaguuuucuagau

SEQ ID NO: 151083 - RNA, 22 nt, Human
augggcugacccagucguggca

SEQ ID NO: 151084 - RNA, 22 nt, Human
uccaggcuaauuuugcauuguu

SEQ ID NO: 151085 - RNA, 22 nt, Human
acaucacacgccuuccaggagg

SEQ ID NO: 151086 - RNA, 22 nt, Human
gcuggggagcuagaccucagca

SEQ ID NO: 151087 - RNA, 22 nt, Human
aggggugugcauccuggaggau

SEQ ID NO: 151088 - RNA, 22 nt, Human
cugugggaugggaccucagcug

SEQ ID NO: 151089 - RNA, 22 nt, Human
gggcugaccccaccccucacuc

SEQ ID NO: 151090 - RNA, 22 nt, Human
gagaaagacguaggcugggagg

SEQ ID NO: 151091 - RNA, 22 nt, Human
ucccagccuuccuuguggugaa

SEQ ID NO: 151092 - RNA, 22 nt, Human
gcucucagaugcuccagcagcc

SEQ ID NO: 151093 - RNA, 22 nt, Human
gccaggcauguccucugcagaa

SEQ ID NO: 151094 - RNA, 22 nt, Human
guaacauaguuugugcuucauc

SEQ ID NO: 151095 - RNA, 22 nt, Human
ggcaggcuggcuuuguuccagg

SEQ ID NO: 151096 - RNA, 22 nt, Human
ugcuucuggaaacaguggcugu

SEQ ID NO: 151097 - RNA, 22 nt, Human
cucugagauaguuucuaucaau

SEQ ID NO: 151098 - RNA, 22 nt, Human
ugucuucaguaaaauacacuau

SEQ ID NO: 151099 - RNA, 19 nt, Human
ucugcagaaggcauacaug

SEQ ID NO: 151100 - RNA, 22 nt, Human
cuggcacgcccacguaggcacu

SEQ ID NO: 151101 - RNA, 22 nt, Human
gcacacacaugugaguacaugc

SEQ ID NO: 151102 - RNA, 22 nt, Human
uuccaggcucccuuggaggugu

SEQ ID NO: 151103 - RNA, 21 nt, Human
uccacccucucugcucccagu

SEQ ID NO: 151104 - RNA, 22 nt, Human
aggugaguuacaggaggagguc

SEQ ID NO: 151105 - RNA, 22 nt, Human
uaaauuuacccaaggaacaugu

SEQ ID NO: 151106 - RNA, 22 nt, Human
guggcaggggcgggcuguuccg

SEQ ID NO: 151107 - RNA, 22 nt, Human
gggaccugcgccacucacuguc

SEQ ID NO: 151108 - RNA, 22 nt, Human
ggcuucugcucagccugcacgc

SEQ ID NO: 151109 - RNA, 22 nt, Human
caaauacuacgauucuugcagu

SEQ ID NO: 151110 - RNA, 22 nt, Human
uacacaucccagacucccagga

SEQ ID NO: 151111 - RNA, 22 nt, Human
uuauuccaguaaucucuguaau

SEQ ID NO: 151112 - RNA, 22 nt, Human
aaagcuaugaggcaugcauuuc

SEQ ID NO: 151113 - RNA, 19 nt, Human
uccuggcacaguggaacca

SEQ ID NO: 151114 - RNA, 22 nt, Human
guccucuguguaggcugcagac

SEQ ID NO: 151115 - RNA, 22 nt, Human
ucuucauuuuacaggcagaccu

SEQ ID NO: 151116 - RNA, 21 nt, Human
acacagaggcaucaucacuuu

SEQ ID NO: 151117 - RNA, 21 nt, Human
guacacacagguggaugggcu

SEQ ID NO: 151118 - RNA, 22 nt, Human
gauggccuuguuuucucccuuc

SEQ ID NO: 151119 - RNA, 22 nt, Human
cuuccagguccuucuugagaag

SEQ ID NO: 151120 - RNA, 22 nt, Human
acacccaggcuggcgugcagug

SEQ ID NO: 151121 - RNA, 22 nt, Human
ccacacagauaaguguuuucua

SEQ ID NO: 151122 - RNA, 22 nt, Human
acuguucacccagcacuagcag

SEQ ID NO: 151123 - RNA, 17 nt, Human
ccauacugacauauuga

SEQ ID NO: 151124 - RNA, 22 nt, Human
ucccuccccacuucugagcuuu

SEQ ID NO: 151125 - RNA, 22 nt, Human
gaaauauucuugucuuguuuuc

SEQ ID NO: 151126 - RNA, 22 nt, Human
aauguucagaggacaauauaaa

SEQ ID NO: 151127 - RNA, 22 nt, Human
gcuggcaguaaaggguuuggca

SEQ ID NO: 151128 - RNA, 22 nt, Human
agcagguugugauacacucaga

SEQ ID NO: 151129 - RNA, 22 nt, Human
uuucacauuggcuucuauuucu

SEQ ID NO: 151130 - RNA, 22 nt, Human
cugggccugucagggcuuuuug

SEQ ID NO: 151131 - RNA, 22 nt, Human
uggcagagcccagacuccaguc

SEQ ID NO: 151132 - RNA, 22 nt, Human
gaagcuucguggcucuucaaau

SEQ ID NO: 151133 - RNA, 22 nt, Human
gggcuaggcuuggccagcacug

SEQ ID NO: 151134 - RNA, 22 nt, Human
augggcugcuucuccagcaccu

SEQ ID NO: 151135 - RNA, 22 nt, Human
uauuccaguccuauccucuuuu

SEQ ID NO: 151136 - RNA, 22 nt, Human
ggagcugaguucuucagccggg

SEQ ID NO: 151137 - RNA, 19 nt, Human
ccagcccacagugacuuuc

SEQ ID NO: 151138 - RNA, 22 nt, Human
cccuuccucccaggcuucugug

SEQ ID NO: 151139 - RNA, 22 nt, Human
gcuguucagaugcgauucagga

SEQ ID NO: 151140 - RNA, 22 nt, Human
cuggggacgucgggcaguguuc

SEQ ID NO: 151141 - RNA, 22 nt, Human
uggcagugucuuaucaggagug

SEQ ID NO: 151142 - RNA, 22 nt, Human
agcacagggacaaugccaggug

SEQ ID NO: 151143 - RNA, 22 nt, Human
aguuuccaaagcauguucacac

SEQ ID NO: 151144 - RNA, 22 nt, Human
ugcugagcgcauccggcggccg

SEQ ID NO: 151145 - RNA, 22 nt, Human
auaugaaguuacagguaagaaa

SEQ ID NO: 151146 - RNA, 22 nt, Human
gaugaagcuauuugguuggcac

SEQ ID NO: 151147 - RNA, 22 nt, Human
cuucuuaaauuggauugcuauu

SEQ ID NO: 151148 - RNA, 22 nt, Human
caggcccucaggcaagggcucu

SEQ ID NO: 151149 - RNA, 22 nt, Human
gcaggcucaaaagcugguagga

SEQ ID NO: 151150 - RNA, 22 nt, Human
gggccccuugcugcucugcugg

SEQ ID NO: 151151 - RNA, 22 nt, Human
ccuggcaggcuggggacagugc

SEQ ID NO: 151152 - RNA, 22 nt, Human
uaauuucaauagcuugcauaau

SEQ ID NO: 151153 - RNA, 22 nt, Human
ucccacccccuccaaggaggaa

SEQ ID NO: 151154 - RNA, 22 nt, Human
gcagcucugacaaugccuggaa

SEQ ID NO: 151155 - RNA, 21 nt, Human
aggcugcuggcucaggguccu

SEQ ID NO: 151156 - RNA, 22 nt, Human
guucuguacuccaagcucuucc

SEQ ID NO: 151157 - RNA, 22 nt, Human
uucuggggcuaauacagagguc

SEQ ID NO: 151158 - RNA, 19 nt, Human
aggugagugugggaaaggg

SEQ ID NO: 151159 - RNA, 22 nt, Human
cauacauuuauacacaucuaug

SEQ ID NO: 151160 - RNA, 22 nt, Human
ucaggguugcugugaucagucc

SEQ ID NO: 151161 - RNA, 22 nt, Human
agggagacacaugaggaaguca

SEQ ID NO: 151162 - RNA, 22 nt, Human
gcacauacccacugucaagcac

SEQ ID NO: 151163 - RNA, 22 nt, Human
ccaggcucugccaggcccuuga

SEQ ID NO: 151164 - RNA, 22 nt, Human
gcaggugaugugaugugagcau

SEQ ID NO: 151165 - RNA, 17 nt, Human
agccugccccaugcugc

SEQ ID NO: 151166 - RNA, 22 nt, Human
caugaagcccucaucagucuga

SEQ ID NO: 151167 - RNA, 22 nt, Human
aagcuuucagagcagaauguga

SEQ ID NO: 151168 - RNA, 22 nt, Human
ugcuucugacuaagcugcauga

SEQ ID NO: 151169 - RNA, 22 nt, Human
ggcuucuggugggagcaugacu

SEQ ID NO: 151170 - RNA, 22 nt, Human
ccugggcuucugucuagauguu

SEQ ID NO: 151171 - RNA, 22 nt, Human
gccgggaccaaggccacggagc

SEQ ID NO: 151172 - RNA, 22 nt, Human
ugcuucuggcacuugagggggu

SEQ ID NO: 151173 - RNA, 22 nt, Human
cugccugcaggacaccucgcua

SEQ ID NO: 151174 - RNA, 22 nt, Human
gcacaggaugauggguugaggg

SEQ ID NO: 151175 - RNA, 23 nt, Human
acugggcugaaauuuuucauggc

SEQ ID NO: 151176 - RNA, 22 nt, Human
uucaagauggccccagugagcc

SEQ ID NO: 151177 - RNA, 22 nt, Human
ugcagccccugaaaauggcagc

SEQ ID NO: 151178 - RNA, 22 nt, Human
uuccaagucacccuuaggguca

SEQ ID NO: 151179 - RNA, 22 nt, Human
acuggcagcuguaggaugcaug

SEQ ID NO: 151180 - RNA, 22 nt, Human
ggcaggcucagcagccaaggag

SEQ ID NO: 151181 - RNA, 22 nt, Human
ccuggggaaucuugcaggggaa

SEQ ID NO: 151182 - RNA, 22 nt, Human
ggcugcagagcugggugggccu

SEQ ID NO: 151183 - RNA, 22 nt, Human
aggccacaguacuuugcagacc

SEQ ID NO: 151184 - RNA, 22 nt, Human
ucaggcucuggguacaccugac

SEQ ID NO: 151185 - RNA, 22 nt, Human
gaagcacugccauaauucagac

SEQ ID NO: 151186 - RNA, 22 nt, Human
gggucaggcucagcagggcagc

SEQ ID NO: 151187 - RNA, 22 nt, Human
ucugggcugcugugcagugacc

SEQ ID NO: 151188 - RNA, 22 nt, Human
agguggcucugacagcucuggu

SEQ ID NO: 151189 - RNA, 23 nt, Human
guccucuggagagaaaggcagua

SEQ ID NO: 151190 - RNA, 22 nt, Human
ccacagaccuuggcuuccaccu

SEQ ID NO: 151191 - RNA, 22 nt, Human
guacacacuauuuaaaguguuu

SEQ ID NO: 151192 - RNA, 22 nt, Human
aggcccaaaagaaaccacuggg

SEQ ID NO: 151193 - RNA, 21 nt, Human
acacacucugagucuucuauu

SEQ ID NO: 151194 - RNA, 22 nt, Human
ccuggggauucugacacggagu

SEQ ID NO: 151195 - RNA, 20 nt, Human
cuaggaacuauggucuggcu

SEQ ID NO: 151196 - RNA, 22 nt, Human
agaaauaugcugauuagaugaa

SEQ ID NO: 151197 - RNA, 22 nt, Human
auuuaaugucgagcuauuguag

SEQ ID NO: 151198 - RNA, 22 nt, Human
ugcaggcucugguuuauagugc

SEQ ID NO: 151199 - RNA, 18 nt, Human
uccuggcagucagagagg

SEQ ID NO: 151200 - RNA, 22 nt, Human
ggccucagaccggagcuggcca

SEQ ID NO: 151201 - RNA, 20 nt, Human
gcuggcagaugucuugagau

SEQ ID NO: 151202 - RNA, 20 nt, Human
ggcaggcuuuauauggaggg

SEQ ID NO: 151203 - RNA, 22 nt, Human
ugggcugagcacugaggaagga

SEQ ID NO: 151204 - RNA, 22 nt, Human
uuagaauuauuguuuccuucua

SEQ ID NO: 151205 - RNA, 22 nt, Human
cagggacaauggcagagccuga

SEQ ID NO: 151206 - RNA, 22 nt, Human
cuccaagucggcugcagcugga

SEQ ID NO: 151207 - RNA, 22 nt, Human
aaguuucaugauguaauuauug

SEQ ID NO: 151208 - RNA, 22 nt, Human
acacacagaaggaagccccacu

SEQ ID NO: 151209 - RNA, 22 nt, Human
auaugagagaggaaagauuuua

SEQ ID NO: 151210 - RNA, 17 nt, Human
gcuaggagagggaggag

SEQ ID NO: 151211 - RNA, 22 nt, Human
caggaguggugugagggacucc

SEQ ID NO: 151212 - RNA, 22 nt, Human
ggcagagguagcuggaaccagg

SEQ ID NO: 151213 - RNA, 22 nt, Human
ggaccaggccagccucccugcg

SEQ ID NO: 151214 - RNA, 22 nt, Human
gcuggcaggagaccauacccua

SEQ ID NO: 151215 - RNA, 22 nt, Human
agcuuugggcagaagaggauuc

SEQ ID NO: 151216 - RNA, 15 nt, Human
cacacagacagcuug

SEQ ID NO: 151217 - RNA, 22 nt, Human
gaccaccagagguccgugggua

SEQ ID NO: 151218 - RNA, 22 nt, Human
auaauucagguuuucuggcaca

SEQ ID NO: 151219 - RNA, 22 nt, Human
uggaagagaaaauccacccuua

SEQ ID NO: 151220 - RNA, 22 nt, Human
aggaggcuguggagcacuccau

SEQ ID NO: 151221 - RNA, 22 nt, Human
ggccagggggcuucagacucca

SEQ ID NO: 151222 - RNA, 22 nt, Human
uuugaaaagaaccaucgccuua

SEQ ID NO: 151223 - RNA, 22 nt, Human
cuaaaugacuuccagugguuau

SEQ ID NO: 151224 - RNA, 22 nt, Human
ucuuugaaaagauauuccuccu

SEQ ID NO: 151225 - RNA, 22 nt, Human
uuauuccauagaagucaaggaa

SEQ ID NO: 151226 - RNA, 22 nt, Human
uccaaguugauguuucuuaaau

SEQ ID NO: 151227 - RNA, 22 nt, Human
ucccugccuccuggcagugcca

SEQ ID NO: 151228 - RNA, 22 nt, Human
ccaggcucugcgcuggacaugg

SEQ ID NO: 151229 - RNA, 22 nt, Human
gacccggcuccaggcccagcag

SEQ ID NO: 151230 - RNA, 22 nt, Human
uuuaaagaaauuccucaucuuu

SEQ ID NO: 151231 - RNA, 17 nt, Human
ucuguucaugcauaccu

SEQ ID NO: 151232 - RNA, 22 nt, Human
agugccccaugggugccugggg

SEQ ID NO: 151233 - RNA, 22 nt, Human
cucugggcugccuuuuagcucu

SEQ ID NO: 151234 - RNA, 22 nt, Human
acagacuggccugucucgcacc

SEQ ID NO: 151235 - RNA, 23 nt, Human
cuggggcuuucaaaucugggcag

SEQ ID NO: 151236 - RNA, 21 nt, Human
ccaggcugggagggcaguucc

SEQ ID NO: 151237 - RNA, 22 nt, Human
ccuggcaggcaagaggaaggga

SEQ ID NO: 151238 - RNA, 19 nt, Human
ugcuucuggaaccaugauc

SEQ ID NO: 151239 - RNA, 22 nt, Human
gggcugacucugcacugagcca

SEQ ID NO: 151240 - RNA, 22 nt, Human
uagaaucuaguucauucauuug

SEQ ID NO: 151241 - RNA, 20 nt, Human
ccuguucacugcgcaguuuc

SEQ ID NO: 151242 - RNA, 22 nt, Human
ccuggcagcgccgaagcuggcc

SEQ ID NO: 151243 - RNA, 22 nt, Human
cugguggagagugggcucugga

SEQ ID NO: 151244 - RNA, 22 nt, Human
ucuggcagcucaguucaggucu

SEQ ID NO: 151245 - RNA, 22 nt, Human
ggccucaguuucuucaacugua

SEQ ID NO: 151246 - RNA, 22 nt, Human
guuuacauauuuuaauugguga

SEQ ID NO: 151247 - RNA, 22 nt, Human
cccacacucugagaaaugcuga

SEQ ID NO: 151248 - RNA, 22 nt, Human
gguguugggcucacugguccuu

SEQ ID NO: 151249 - RNA, 22 nt, Human
agcaggggcuccuccacagcca

SEQ ID NO: 151250 - RNA, 22 nt, Human
ucuugggauagugucucauggc

SEQ ID NO: 151251 - RNA, 22 nt, Human
gccccaccuugagagcagaaac

SEQ ID NO: 151252 - RNA, 17 nt, Human
cucuggggacaguucua

SEQ ID NO: 151253 - RNA, 22 nt, Human
gaugccuggcacccagcaagga

SEQ ID NO: 151254 - RNA, 22 nt, Human
gagacaucauaaugaaguuucc

SEQ ID NO: 151255 - RNA, 22 nt, Human
cuaugaaaugucagauucugca

SEQ ID NO: 151256 - RNA, 22 nt, Human
cuuguucaguccugacuuccug

SEQ ID NO: 151257 - RNA, 22 nt, Human
ccugccuucagcccugaagucu

SEQ ID NO: 151258 - RNA, 22 nt, Human
cagccucugacaccacagucgu

SEQ ID NO: 151259 - RNA, 22 nt, Human
uccacccugcuuucuuaucucc

SEQ ID NO: 151260 - RNA, 22 nt, Human
ccaggcucagcuauuaagaaac

SEQ ID NO: 151261 - RNA, 22 nt, Human
cgcaggcuggcgcggaguggca

SEQ ID NO: 151262 - RNA, 21 nt, Human
uucaauacuauuucaauaguc

SEQ ID NO: 151263 - RNA, 22 nt, Human
guccucugauuucuagguauau

SEQ ID NO: 151264 - RNA, 22 nt, Human
gcuaggagugggauggaagucg

SEQ ID NO: 151265 - RNA, 22 nt, Human
uggaagcuguggcauaacugag

SEQ ID NO: 151266 - RNA, 22 nt, Human
ccaggcucagcgcgcacgucug

SEQ ID NO: 151267 - RNA, 22 nt, Human
caggcuccuucccagggauggu

SEQ ID NO: 151268 - RNA, 22 nt, Human
uuugacauuggcuuauucuguu

SEQ ID NO: 151269 - RNA, 22 nt, Human
uccuccuccucacagucaccug

SEQ ID NO: 151270 - RNA, 22 nt, Human
uuccaggccgggcaggaaacac

SEQ ID NO: 151271 - RNA, 22 nt, Human
uguuucauuaguacugacaaua

SEQ ID NO: 151272 - RNA, 22 nt, Human
gcugccagucuaaugggaaaca

SEQ ID NO: 151273 - RNA, 22 nt, Human
cacauacaaggcacacuggagg

SEQ ID NO: 151274 - RNA, 22 nt, Human
acagcucugcauggcaguuauu

SEQ ID NO: 151275 - RNA, 20 nt, Human
auuucaguguuugcaauuuc

SEQ ID NO: 151276 - RNA, 22 nt, Human
ucagccucagguguucagauuu

SEQ ID NO: 151277 - RNA, 22 nt, Human
agggcugaaguuauggcugagc

SEQ ID NO: 151278 - RNA, 22 nt, Human
auccaggccccaagaccccgac

SEQ ID NO: 151279 - RNA, 22 nt, Human
caauacugaguuuacauucauc

SEQ ID NO: 151280 - RNA, 22 nt, Human
ugucuucaucucagacacaguu

SEQ ID NO: 151281 - RNA, 22 nt, Human
gacacuucaccuuucccagccu

SEQ ID NO: 151282 - RNA, 22 nt, Human
auaaguaggaaaauuugaauau

SEQ ID NO: 151283 - RNA, 23 nt, Human
ccuggggagcuguauccagagug

SEQ ID NO: 151284 - RNA, 22 nt, Human
gaggagcugcagggggagucua

SEQ ID NO: 151285 - RNA, 22 nt, Human
cauucccacguguucuuugcuu

SEQ ID NO: 151286 - RNA, 22 nt, Human
cuucuggguugcaggucuuggc

SEQ ID NO: 151287 - RNA, 22 nt, Human
augaaugcugggacaaauauau

SEQ ID NO: 151288 - RNA, 22 nt, Human
cuggggacuuugguucuccaug

SEQ ID NO: 151289 - RNA, 22 nt, Human
gugggcuuguuuugaugagauc

SEQ ID NO: 151290 - RNA, 22 nt, Human
ucuguuuaggcaaaauagcuac

SEQ ID NO: 151291 - RNA, 20 nt, Human
agguauaagaaaugugauuu

SEQ ID NO: 151292 - RNA, 22 nt, Human
aaaauguaaagcuugaguguag

SEQ ID NO: 151293 - RNA, 22 nt, Human
gcuucuggaagcugcuucugcc

SEQ ID NO: 151294 - RNA, 22 nt, Human
aaauucagcagugaaaugcccc

SEQ ID NO: 151295 - RNA, 22 nt, Human
ccuggcagacugugagggcagg

SEQ ID NO: 151296 - RNA, 21 nt, Human
cccuugccugcacuccucggc

SEQ ID NO: 151297 - RNA, 22 nt, Human
ggcaggcuccaagcauccuaug

SEQ ID NO: 151298 - RNA, 22 nt, Human
ugcuucuguuuguuucugucau

SEQ ID NO: 151299 - RNA, 22 nt, Human
guccucuggccuuucccaggac

SEQ ID NO: 151300 - RNA, 22 nt, Human
auauuccauugguuucccuucu

SEQ ID NO: 151301 - RNA, 22 nt, Human
ucugugacugauggaggcuuuu

SEQ ID NO: 151302 - RNA, 22 nt, Human
ccucugcaaagaauuugucucc

SEQ ID NO: 151303 - RNA, 22 nt, Human
uacacagacucuucaauucaga

SEQ ID NO: 151304 - RNA, 22 nt, Human
acccacccuacuagcagugucc

SEQ ID NO: 151305 - RNA, 22 nt, Human
cagcucugcugggaggaugcag

SEQ ID NO: 151306 - RNA, 22 nt, Human
aguaugaagauuauaauuuuuc

SEQ ID NO: 151307 - RNA, 22 nt, Human
aacagcauaccaauguacauau

SEQ ID NO: 151308 - RNA, 22 nt, Human
auuucaguguuuuaagaguuca

SEQ ID NO: 151309 - RNA, 22 nt, Human
cuugccucccucagcucacagc

SEQ ID NO: 151310 - RNA, 22 nt, Human
uggaacacagugauugauagcg

SEQ ID NO: 151311 - RNA, 22 nt, Human
uuccuugguagagagaauauuu

SEQ ID NO: 151312 - RNA, 22 nt, Human
acuggcaggcugcuggccggcg

SEQ ID NO: 151313 - RNA, 22 nt, Human
gcugcaggcggccgugguggcg

SEQ ID NO: 151314 - RNA, 22 nt, Human
ucuggggauaagacccagguau

SEQ ID NO: 151315 - RNA, 22 nt, Human
uggcaguagauccagucucucu

SEQ ID NO: 151316 - RNA, 22 nt, Human
agcagcuccugccaugagugcu

SEQ ID NO: 151317 - RNA, 18 nt, Human
ggccucuggacuggcagc

SEQ ID NO: 151318 - RNA, 22 nt, Human
ggcuucugagugcucugcuguu

SEQ ID NO: 151319 - RNA, 22 nt, Human
uccuucaagaugccacagcuuu

SEQ ID NO: 151320 - RNA, 22 nt, Human
ccagcccugccagagagagcug

SEQ ID NO: 151321 - RNA, 22 nt, Human
agacacagucugucuggaggag

SEQ ID NO: 151322 - RNA, 20 nt, Human
cuggggacagcaauggcugu

SEQ ID NO: 151323 - RNA, 22 nt, Human
ucuggcagagauauccauccca

SEQ ID NO: 151324 - RNA, 20 nt, Human
uuccuguauacaaagaguuc

SEQ ID NO: 151325 - RNA, 22 nt, Human
cagcucagucuggagagaugca

SEQ ID NO: 151326 - RNA, 19 nt, Human
ucuggcagguaauuaggga

SEQ ID NO: 151327 - RNA, 22 nt, Human
aggaggcugaacuagggucugg

SEQ ID NO: 151328 - RNA, 22 nt, Human
uuaagacauucagauauuucua

SEQ ID NO: 151329 - RNA, 22 nt, Human
gcaaauucuuaacuggacugug

SEQ ID NO: 151330 - RNA, 22 nt, Human
gcugggcugcgucggggaagcc

SEQ ID NO: 151331 - RNA, 22 nt, Human
uuaugaaggaucagguacuugg

SEQ ID NO: 151332 - RNA, 22 nt, Human
cacaaaaguaggaggcaggcgg

SEQ ID NO: 151333 - RNA, 22 nt, Human
uguaugaagguuuaccugcugu

SEQ ID NO: 151334 - RNA, 22 nt, Human
guguaugaacgaaagaauggau

SEQ ID NO: 151335 - RNA, 21 nt, Human
uucucuccauaugcccagccc

SEQ ID NO: 151336 - RNA, 22 nt, Human
gacacagauaucucugagauua

SEQ ID NO: 151337 - RNA, 22 nt, Human
aagagagagugcgcucacagaa

SEQ ID NO: 151338 - RNA, 22 nt, Human
ucaucccuaaggacagcucugc

SEQ ID NO: 151339 - RNA, 22 nt, Human
uugaaauacugcauuguucagu

SEQ ID NO: 151340 - RNA, 22 nt, Human
aaguuuuccuguguccaagaug

SEQ ID NO: 151341 - RNA, 22 nt, Human
uguucaaaugaucuucuuaaau

SEQ ID NO: 151342 - RNA, 22 nt, Human
gcuguucacauuuugggccaaa

SEQ ID NO: 151343 - RNA, 22 nt, Human
ugcagagagauccucaggguuu

SEQ ID NO: 151344 - RNA, 22 nt, Human
aaucucuuuggcucaaggaucc

SEQ ID NO: 151345 - RNA, 22 nt, Human
accaagcuagaacauuacaggc

SEQ ID NO: 151346 - RNA, 22 nt, Human
gcuggggaccagcugucucuga

SEQ ID NO: 151347 - RNA, 22 nt, Human
uggaacacaucuaaggaagcag

SEQ ID NO: 151348 - RNA, 22 nt, Human
aguaugaagcugaaugauuuua

SEQ ID NO: 151349 - RNA, 22 nt, Human
uguaaauaaugcauguaaauca

SEQ ID NO: 151350 - RNA, 19 nt, Human
ugcuucuggggcuucucca

SEQ ID NO: 151351 - RNA, 22 nt, Human
gugagagggcugggcucaugau

SEQ ID NO: 151352 - RNA, 22 nt, Human
gcuccaggcagcauaguggaug

SEQ ID NO: 151353 - RNA, 20 nt, Human
cccacacccuucccacuugg

SEQ ID NO: 151354 - RNA, 22 nt, Human
uacacaacugacaaccauucug

SEQ ID NO: 151355 - RNA, 22 nt, Human
uuuaaaauuuagaccucuccac

SEQ ID NO: 151356 - RNA, 22 nt, Human
uuuccacaauguuuuugcagga

SEQ ID NO: 151357 - RNA, 22 nt, Human
cuugggaaugcuaacagaugac

SEQ ID NO: 151358 - RNA, 22 nt, Human
aaacagcuggucucaaauguuc

SEQ ID NO: 151359 - RNA, 22 nt, Human
auccaagucagggauaguuuga

SEQ ID NO: 151360 - RNA, 22 nt, Human
ggcacagagcuuugucccaguu

SEQ ID NO: 151361 - RNA, 22 nt, Human
gcuuccaaaucuguucaaaaug

SEQ ID NO: 151362 - RNA, 20 nt, Human
uugauucccucuaaacucgc

SEQ ID NO: 151363 - RNA, 22 nt, Human
guggcagggugcucaucaugca

SEQ ID NO: 151364 - RNA, 22 nt, Human
ucuucaaaaaauauccaucagu

SEQ ID NO: 151365 - RNA, 22 nt, Human
cugggcugcggugguagguugu

SEQ ID NO: 151366 - RNA, 20 nt, Human
uuucuguaaggcauuaaucu

SEQ ID NO: 151367 - RNA, 22 nt, Human
uuccaggcuucucuggggcguc

SEQ ID NO: 151368 - RNA, 19 nt, Human
uuaugaaggcuggggggag

SEQ ID NO: 151369 - RNA, 22 nt, Human
ggcuucugaaccaggcccugga

SEQ ID NO: 151370 - RNA, 19 nt, Human
ucuuuucacgcauuuugaa

SEQ ID NO: 151371 - RNA, 22 nt, Human
caggcccugccuugagggaccu

SEQ ID NO: 151372 - RNA, 22 nt, Human
ucacacagcuccuuuccuuagu

SEQ ID NO: 151373 - RNA, 22 nt, Human
uguggggaagaguaugacuugg

SEQ ID NO: 151374 - RNA, 22 nt, Human
cuucugggagagcuuuugcuuc

SEQ ID NO: 151375 - RNA, 22 nt, Human
uccuggcagcccgcaggugcug

SEQ ID NO: 151376 - RNA, 19 nt, Human
gggagcugaggucuuuggu

SEQ ID NO: 151377 - RNA, 22 nt, Human
ccuccccaugacccggugcugg

SEQ ID NO: 151378 - RNA, 22 nt, Human
uuccaggcaugucagacauagg

SEQ ID NO: 151379 - RNA, 22 nt, Human
cgcauacauagaaacacacaga

SEQ ID NO: 151380 - RNA, 22 nt, Human
agggaagaagcugguaguaggu

SEQ ID NO: 151381 - RNA, 22 nt, Human
cuguucacacacuuguacucuc

SEQ ID NO: 151382 - RNA, 22 nt, Human
gccugcagaggugcugcuagcu

SEQ ID NO: 151383 - RNA, 22 nt, Human
acugggcuccaaggaccuggag

SEQ ID NO: 151384 - RNA, 22 nt, Human
uuaugaaguuccuguuacagug

SEQ ID NO: 151385 - RNA, 22 nt, Human
agggggucguccggaagaccug

SEQ ID NO: 151386 - RNA, 22 nt, Human
aguaugaaucucuuuauucugc

SEQ ID NO: 151387 - RNA, 22 nt, Human
agcacaggcuuuggugugaggg

SEQ ID NO: 151388 - RNA, 23 nt, Human
ugccaaaguuuaccuaacacugg

SEQ ID NO: 151389 - RNA, 21 nt, Human
ucacguggucacaugagcuuu

SEQ ID NO: 151390 - RNA, 22 nt, Human
uacugacacaaagccaaucccu

SEQ ID NO: 151391 - RNA, 22 nt, Human
guggggacgggauggcucacug

SEQ ID NO: 151392 - RNA, 22 nt, Human
ugcuucugaugugagcagcccc

SEQ ID NO: 151393 - RNA, 18 nt, Human
acuggcuuuagcaucaga

SEQ ID NO: 151394 - RNA, 22 nt, Human
cuggggacugaaggauguugcu

SEQ ID NO: 151395 - RNA, 22 nt, Human
ccuaggaacccccaggcuucug

SEQ ID NO: 151396 - RNA, 22 nt, Human
cuccaggccccuggccuucugc

SEQ ID NO: 151397 - RNA, 23 nt, Human
cauccaggagcugagucugacug

SEQ ID NO: 151398 - RNA, 22 nt, Human
ugaaauaucauuuucaucuccc

SEQ ID NO: 151399 - RNA, 22 nt, Human
cacucuccagcacaccccauuu

SEQ ID NO: 151400 - RNA, 22 nt, Human
ucuggcagcgaagcguguacuu

SEQ ID NO: 151401 - RNA, 22 nt, Human
cuuguucaguugccucuccugc

SEQ ID NO: 151402 - RNA, 22 nt, Human
cgcaggcucgguucacagagca

SEQ ID NO: 151403 - RNA, 22 nt, Human
ucugggcugggagcguguggac

SEQ ID NO: 151404 - RNA, 22 nt, Human
ggcuucuguccucuggaucugu

SEQ ID NO: 151405 - RNA, 20 nt, Human
ccugggcucaaagcauccuc

SEQ ID NO: 151406 - RNA, 22 nt, Human
acacauacauggggaagaugag

SEQ ID NO: 151407 - RNA, 22 nt, Human
gggaccugccauugcucacagg

SEQ ID NO: 151408 - RNA, 22 nt, Human
gcuaggaguggugggucaagga

SEQ ID NO: 151409 - RNA, 23 nt, Human
uguaugaauaugccacaguuuaa

SEQ ID NO: 151410 - RNA, 18 nt, Human
acucugcggaggccccag

SEQ ID NO: 151411 - RNA, 22 nt, Human
uagaauaugauuaauuuucuua

SEQ ID NO: 151412 - RNA, 22 nt, Human
cccagcaugcacgcugacacuc

SEQ ID NO: 151413 - RNA, 22 nt, Human
uauucccagccucuuucuaucu

SEQ ID NO: 151414 - RNA, 22 nt, Human
ucugggcuuuuccaugccugug

SEQ ID NO: 151415 - RNA, 23 nt, Human
uguaaacaucacccccuggaguu

SEQ ID NO: 151416 - RNA, 22 nt, Human
augggcuguccuaguccagccc

SEQ ID NO: 151417 - RNA, 22 nt, Human
ucuggggaugagugaugucgua

SEQ ID NO: 151418 - RNA, 22 nt, Human
gugggcuuuggccucuuucucc

SEQ ID NO: 151419 - RNA, 22 nt, Human
uuuacagagaauguacauaaag

SEQ ID NO: 151420 - RNA, 22 nt, Human
ccaggcucacugacuaccacau

SEQ ID NO: 151421 - RNA, 22 nt, Human
gcuggcagacugggggcagaac

SEQ ID NO: 151422 - RNA, 22 nt, Human
uccugggguuuuggccgcagcu

SEQ ID NO: 151423 - RNA, 22 nt, Human
cagagcucagagcagggcacuc

SEQ ID NO: 151424 - RNA, 22 nt, Human
gacacauaugcguauaguuuag

SEQ ID NO: 151425 - RNA, 22 nt, Human
ggggcugacgggcauguggcuu

SEQ ID NO: 151426 - RNA, 22 nt, Human
ggggaccuaggcucugucucuu

SEQ ID NO: 151427 - RNA, 22 nt, Human
uguaugaauauguauuuucaua

SEQ ID NO: 151428 - RNA, 22 nt, Human
augccaaauucucagccucuuu

SEQ ID NO: 151429 - RNA, 22 nt, Human
ucuggcaggauaucgaagugaa

SEQ ID NO: 151430 - RNA, 22 nt, Human
ucccacaugugaauccucaggu

SEQ ID NO: 151431 - RNA, 22 nt, Human
ucaggcucagguuaggggccaa

SEQ ID NO: 151432 - RNA, 19 nt, Human
ccuugccugucccugcagc

SEQ ID NO: 151433 - RNA, 22 nt, Human
uccaggcuagguuuacaggaca

SEQ ID NO: 151434 - RNA, 20 nt, Human
cagcccuccaguggaggcag

SEQ ID NO: 151435 - RNA, 22 nt, Human
uagacacaucuucauccacaau

SEQ ID NO: 151436 - RNA, 22 nt, Human
cucuucaaaagucuaauccuua

SEQ ID NO: 151437 - RNA, 22 nt, Human
cugggcuucucccccuggcaga

SEQ ID NO: 151438 - RNA, 22 nt, Human
uaaauucagugaguaauuucug

SEQ ID NO: 151439 - RNA, 22 nt, Human
aacccaggguggagguugcagu

SEQ ID NO: 151440 - RNA, 22 nt, Human
aaagaucaauagauaaagcuac

SEQ ID NO: 151441 - RNA, 22 nt, Human
cugggcuuucaggcccuaaggc

SEQ ID NO: 151442 - RNA, 22 nt, Human
aauucaugaguagaaucuauau

SEQ ID NO: 151443 - RNA, 22 nt, Human
acaggcucucuauugagugcag

SEQ ID NO: 151444 - RNA, 22 nt, Human
acaggcucaguucacuggauuu

SEQ ID NO: 151445 - RNA, 22 nt, Human
acccacaccuccguauaucacu

SEQ ID NO: 151446 - RNA, 22 nt, Human
gccaagcuggaugaagagguug

SEQ ID NO: 151447 - RNA, 22 nt, Human
auacuguacgucccagauagga

SEQ ID NO: 151448 - RNA, 22 nt, Human
uacauuccuguuagcaucuaag

SEQ ID NO: 151449 - RNA, 22 nt, Human
uuggcagggccaggcucucucu

SEQ ID NO: 151450 - RNA, 22 nt, Human
gggaccugccaaggccacccag

SEQ ID NO: 151451 - RNA, 22 nt, Human
ucuaggagcaugaagggaaggc

SEQ ID NO: 151452 - RNA, 22 nt, Human
ccaggcucugagaggaauguga

SEQ ID NO: 151453 - RNA, 23 nt, Human
ccucucucccuguuuggcaaaua

SEQ ID NO: 151454 - RNA, 22 nt, Human
cacacagaaccgcucgccacuu

SEQ ID NO: 151455 - RNA, 22 nt, Human
acauaaugagcucuuuauaaau

SEQ ID NO: 151456 - RNA, 22 nt, Human
gaggcugcuuugaugacaggag

SEQ ID NO: 151457 - RNA, 22 nt, Human
ucaggagcucuucccuggugug

SEQ ID NO: 151458 - RNA, 22 nt, Human
augggcugcuuggcuuccaccc

SEQ ID NO: 151459 - RNA, 22 nt, Human
ccuggggagaagagcuuccccc

SEQ ID NO: 151460 - RNA, 22 nt, Human
ugcuccagugccugccccacag

SEQ ID NO: 151461 - RNA, 22 nt, Human
aggcaguggagcuggaauaggc

SEQ ID NO: 151462 - RNA, 22 nt, Human
guuuccaaccccaccaaagugc

SEQ ID NO: 151463 - RNA, 22 nt, Human
uuccagauuucuacacaagacc

SEQ ID NO: 151464 - RNA, 22 nt, Human
auauaaguuaguggucauguuu

SEQ ID NO: 151465 - RNA, 22 nt, Human
ucuggcagcaagucuguuucuc

SEQ ID NO: 151466 - RNA, 22 nt, Human
ugcaggcuggcagugcugaaau

SEQ ID NO: 151467 - RNA, 19 nt, Human
uggccagguacugucugcu

SEQ ID NO: 151468 - RNA, 22 nt, Human
ccaggcucugagccucacucuu

SEQ ID NO: 151469 - RNA, 22 nt, Human
agaggccggccgagcccauggg

SEQ ID NO: 151470 - RNA, 22 nt, Human
aguaugaaccuggguucuggau

SEQ ID NO: 151471 - RNA, 19 nt, Human
ccacacagugugcaauuua

SEQ ID NO: 151472 - RNA, 22 nt, Human
agagugaaguucaucgugcagc

SEQ ID NO: 151473 - RNA, 22 nt, Human
gcugggcuggaaggccaaggca

SEQ ID NO: 151474 - RNA, 22 nt, Human
acuguucauccuuuuugaacaa

SEQ ID NO: 151475 - RNA, 22 nt, Human
agugugagccuacaggccaaag

SEQ ID NO: 151476 - RNA, 22 nt, Human
ucucuucacaugcuugcuccaa

SEQ ID NO: 151477 - RNA, 21 nt, Human
agagucugagugugcaagggc

SEQ ID NO: 151478 - RNA, 22 nt, Human
ugcuucuguuacauaccagaac

SEQ ID NO: 151479 - RNA, 22 nt, Human
gcaggcucguuggaaguccccu

SEQ ID NO: 151480 - RNA, 22 nt, Human
auuucuguuugcuacuauaagu

SEQ ID NO: 151481 - RNA, 22 nt, Human
cccugccuugggguccacaccg

SEQ ID NO: 151482 - RNA, 22 nt, Human
ugcuucugaaguggaugggugc

SEQ ID NO: 151483 - RNA, 22 nt, Human
aggaagcuuggggcagggcuac

SEQ ID NO: 151484 - RNA, 22 nt, Human
uuuaacaugugaauuuuggaag

SEQ ID NO: 151485 - RNA, 19 nt, Human
auggaaaaugccagacuga

SEQ ID NO: 151486 - RNA, 22 nt, Human
uucuggggccccaguguccucg

SEQ ID NO: 151487 - RNA, 22 nt, Human
uuaaauauuuucagcaggguca

SEQ ID NO: 151488 - RNA, 22 nt, Human
agcccagcuuugaaccauauca

SEQ ID NO: 151489 - RNA, 22 nt, Human
uggaacacuguggaugagaaga

SEQ ID NO: 151490 - RNA, 23 nt, Human
aaauucaguccuucaacucugag

SEQ ID NO: 151491 - RNA, 22 nt, Human
ugagggacucccggcccugcca

SEQ ID NO: 151492 - RNA, 22 nt, Human
gcugcuaagcguuucuguucca

SEQ ID NO: 151493 - RNA, 22 nt, Human
aggacaagcuaaaggacuuccu

SEQ ID NO: 151494 - RNA, 22 nt, Human
aaugaagcaguccaucugcucu

SEQ ID NO: 151495 - RNA, 22 nt, Human
uuuguguuuguacaaugcacua

SEQ ID NO: 151496 - RNA, 22 nt, Human
ucccaccccuugacucuuuaag

SEQ ID NO: 151497 - RNA, 22 nt, Human
ccuggcagcccagagcgccgcu

SEQ ID NO: 151498 - RNA, 22 nt, Human
uccccacacagauacagaguag

SEQ ID NO: 151499 - RNA, 22 nt, Human
uauuugagcgaagcaguguuuu

SEQ ID NO: 151500 - RNA, 23 nt, Human
uccuuuaaugcuggaauggcuag

SEQ ID NO: 151501 - RNA, 22 nt, Human
gcuucuggaagcauaugcaaga

SEQ ID NO: 151502 - RNA, 22 nt, Human
ugcuucugggcaaaugugugug

SEQ ID NO: 151503 - RNA, 22 nt, Human
cuggaaaggguccucauucugu

SEQ ID NO: 151504 - RNA, 22 nt, Human
cuucugggugccugugaguguu

SEQ ID NO: 151505 - RNA, 22 nt, Human
ggcaggguuuacaauagcaaua

SEQ ID NO: 151506 - RNA, 22 nt, Human
agagaguugaggaagcaacacu

SEQ ID NO: 151507 - RNA, 22 nt, Human
caccagggccccaggcugugcc

SEQ ID NO: 151508 - RNA, 22 nt, Human
cagaguuuugugaacaacuugg

SEQ ID NO: 151509 - RNA, 21 nt, Human
acauacauaccuuaccaccuu

SEQ ID NO: 151510 - RNA, 22 nt, Human
cauuugaaccuggauguucuua

SEQ ID NO: 151511 - RNA, 22 nt, Human
cuucugggauuaauuuuuccug

SEQ ID NO: 151512 - RNA, 22 nt, Human
cacccacauuccaucacucugc

SEQ ID NO: 151513 - RNA, 22 nt, Human
aaauuucaagcaaaguagcuau

SEQ ID NO: 151514 - RNA, 19 nt, Human
aggcugugagggaggacuc

SEQ ID NO: 151515 - RNA, 22 nt, Human
augggcuggggaagcucacucc

SEQ ID NO: 151516 - RNA, 22 nt, Human
uccuggcagagggcggccucga

SEQ ID NO: 151517 - RNA, 22 nt, Human
acagguggcuuauuggcugauu

SEQ ID NO: 151518 - RNA, 22 nt, Human
uuggaaaguuuuuacugaagac

SEQ ID NO: 151519 - RNA, 22 nt, Human
cgcuaggauuaggauuaauccu

SEQ ID NO: 151520 - RNA, 20 nt, Human
ugcaggcuucgcucuaggag

SEQ ID NO: 151521 - RNA, 22 nt, Human
caucuuuucagaagccauucug

SEQ ID NO: 151522 - RNA, 22 nt, Human
cuggccuggggggacacauccc

SEQ ID NO: 151523 - RNA, 22 nt, Human
aaaucucaauuugaauuguagc

SEQ ID NO: 151524 - RNA, 22 nt, Human
ucagccuccgaaagugcuggga

SEQ ID NO: 151525 - RNA, 22 nt, Human
acacacuggcccccaguacuga

SEQ ID NO: 151526 - RNA, 22 nt, Human
aagagccagcuagugaagaggc

SEQ ID NO: 151527 - RNA, 22 nt, Human
ugcaggcugggaagagggacaa

SEQ ID NO: 151528 - RNA, 22 nt, Human
cacauaagaaaugaauaugaga

SEQ ID NO: 151529 - RNA, 22 nt, Human
cagccucugagccuuggcagau

SEQ ID NO: 151530 - RNA, 22 nt, Human
acuggcagcagcagcccuuggg

SEQ ID NO: 151531 - RNA, 22 nt, Human
gccuccggagucacagugucuu

SEQ ID NO: 151532 - RNA, 22 nt, Human
cugggaggcagucucucuagaa

SEQ ID NO: 151533 - RNA, 22 nt, Human
auuucaguguugguuagcaagc

SEQ ID NO: 151534 - RNA, 22 nt, Human
ucaggcucucagaccaacagca

SEQ ID NO: 151535 - RNA, 21 nt, Human
gggcagaggggccuccugggu

SEQ ID NO: 151536 - RNA, 21 nt, Human
acuguucaucuguucagaagc

SEQ ID NO: 151537 - RNA, 22 nt, Human
cccagccuuugcuuccugguuc

SEQ ID NO: 151538 - RNA, 22 nt, Human
uauuccaguucaccuuuucauc

SEQ ID NO: 151539 - RNA, 22 nt, Human
ccugcagagccacgugccagcg

SEQ ID NO: 151540 - RNA, 22 nt, Human
gaggcuguuaggagggacucug

SEQ ID NO: 151541 - RNA, 22 nt, Human
gcuggcagagcucugggcuggg

SEQ ID NO: 151542 - RNA, 22 nt, Human
caaauucucuuacuguuugaca

SEQ ID NO: 151543 - RNA, 22 nt, Human
ugggggcugugcacaggcucac

SEQ ID NO: 151544 - RNA, 19 nt, Human
uucuggggccuggccuugg

SEQ ID NO: 151545 - RNA, 17 nt, Human
cccaggccgccgggagc

SEQ ID NO: 151546 - RNA, 22 nt, Human
acuggcagaacgugaugcgggu

SEQ ID NO: 151547 - RNA, 22 nt, Human
aggcaggggagcuggaagggua

SEQ ID NO: 151548 - RNA, 22 nt, Human
ggcccagcgaggccaccuacag

SEQ ID NO: 151549 - RNA, 19 nt, Human
cagguggcgcucuacaggg

SEQ ID NO: 151550 - RNA, 22 nt, Human
uuuccuguugccaucaagaaug

SEQ ID NO: 151551 - RNA, 22 nt, Human
ggccucagaggaggugugaguc

SEQ ID NO: 151552 - RNA, 22 nt, Human
cucuucaauagauuguugaggg

SEQ ID NO: 151553 - RNA, 22 nt, Human
uggaacacuggcuuuccacugu

SEQ ID NO: 151554 - RNA, 22 nt, Human
cuccaggccauggcugcggagg

SEQ ID NO: 151555 - RNA, 22 nt, Human
auccccacgauauagccaaagc

SEQ ID NO: 151556 - RNA, 22 nt, Human
uugaaucuggguacuuguaaua

SEQ ID NO: 151557 - RNA, 22 nt, Human
caggauggucucgaucuccuga

SEQ ID NO: 151558 - RNA, 22 nt, Human
ccuguucaccauggucacgugc

SEQ ID NO: 151559 - RNA, 22 nt, Human
cuggaaagaccugcuugcuuuu

SEQ ID NO: 151560 - RNA, 22 nt, Human
aggcuccugcaggugaggugcu

SEQ ID NO: 151561 - RNA, 22 nt, Human
uacacacaugcauuugccuuau

SEQ ID NO: 151562 - RNA, 22 nt, Human
uuccaagaguaaauucaaauug

SEQ ID NO: 151563 - RNA, 22 nt, Human
gggaccugggccagaggacagu

SEQ ID NO: 151564 - RNA, 22 nt, Human
aggcugugacagggucauggag

SEQ ID NO: 151565 - RNA, 21 nt, Human
agaugcugaugcugcaggucc

SEQ ID NO: 151566 - RNA, 22 nt, Human
uuccagugaugggcaauuuggu

SEQ ID NO: 151567 - RNA, 22 nt, Human
agcaggugggaucaagcuggca

SEQ ID NO: 151568 - RNA, 22 nt, Human
cuucuggggauggagcccagaa

SEQ ID NO: 151569 - RNA, 22 nt, Human
acugccaaugguaguuugaugg

SEQ ID NO: 151570 - RNA, 22 nt, Human
auuuaagacugacuucaccagu

SEQ ID NO: 151571 - RNA, 22 nt, Human
gggguggcccuacccucuggaa

SEQ ID NO: 151572 - RNA, 22 nt, Human
cacauacauacguauguauaca

SEQ ID NO: 151573 - RNA, 22 nt, Human
cauaugaaauaugaguugaaca

SEQ ID NO: 151574 - RNA, 22 nt, Human
agguagggaagaaggcaugaaa

SEQ ID NO: 151575 - RNA, 22 nt, Human
gggaccugaggagggguuucag

SEQ ID NO: 151576 - RNA, 22 nt, Human
gaaauauugggacucagagcuu

SEQ ID NO: 151577 - RNA, 22 nt, Human
gggacaauggaggccucucucc

SEQ ID NO: 151578 - RNA, 23 nt, Human
acaggcucuuaaucagugcuccu

SEQ ID NO: 151579 - RNA, 22 nt, Human
ccagcucugcauguuucccuug

SEQ ID NO: 151580 - RNA, 22 nt, Human
cugggcuugaguuccugcucgu

SEQ ID NO: 151581 - RNA, 22 nt, Human
uccacccugcuuuugucuuuga

SEQ ID NO: 151582 - RNA, 22 nt, Human
uggcuaggacucauccuguuuc

SEQ ID NO: 151583 - RNA, 22 nt, Human
gcuggcaguguauuguuagcug

SEQ ID NO: 151584 - RNA, 23 nt, Human
cauaaaauauuaguaugguagca

SEQ ID NO: 151585 - RNA, 22 nt, Human
gggaccuggucuagcacugagc

SEQ ID NO: 151586 - RNA, 22 nt, Human
uuuauguuugacaaugaucugg

SEQ ID NO: 151587 - RNA, 22 nt, Human
cagguggguguaugaaugcaaa

SEQ ID NO: 151588 - RNA, 23 nt, Human
agcaggcugcuucuccacagcug

SEQ ID NO: 151589 - RNA, 22 nt, Human
ucuguucagaaauggaagugcc

SEQ ID NO: 151590 - RNA, 19 nt, Human
ccuuccuccccagggccau

SEQ ID NO: 151591 - RNA, 22 nt, Human
caggggccaaggguccagaccu

SEQ ID NO: 151592 - RNA, 22 nt, Human
cuggccagagguuccucugccc

SEQ ID NO: 151593 - RNA, 22 nt, Human
ccacuguauuuuggaagcagau

SEQ ID NO: 151594 - RNA, 22 nt, Human
ugcuucugacauguucuugguu

SEQ ID NO: 151595 - RNA, 22 nt, Human
ggggccuuuucugaauguggaa

SEQ ID NO: 151596 - RNA, 22 nt, Human
guggcaguuuugacaucacaaa

SEQ ID NO: 151597 - RNA, 22 nt, Human
auuugcaugcuucuauugugaa

SEQ ID NO: 151598 - RNA, 22 nt, Human
caugagauaauuuuucuccagu

SEQ ID NO: 151599 - RNA, 22 nt, Human
ugaagcuugagugucaguuccu

SEQ ID NO: 151600 - RNA, 22 nt, Human
ugcuucuggguaggccucagga

SEQ ID NO: 151601 - RNA, 22 nt, Human
guccacagagggcugggcaggc

SEQ ID NO: 151602 - RNA, 22 nt, Human
uucaaacaaaacuguucccaua

SEQ ID NO: 151603 - RNA, 22 nt, Human
acccacacaucucuaauucagu

SEQ ID NO: 151604 - RNA, 22 nt, Human
gcuaggagccgcugcacuaggu

SEQ ID NO: 151605 - RNA, 22 nt, Human
aauucuuguuguuaguauauuu

SEQ ID NO: 151606 - RNA, 19 nt, Human
guucaaacacugauucagc

SEQ ID NO: 151607 - RNA, 19 nt, Human
gugggacagacauuacaua

SEQ ID NO: 151608 - RNA, 22 nt, Human
ccagcucucagcgggagacuca

SEQ ID NO: 151609 - RNA, 22 nt, Human
gcuguucagggcacucaugggc

SEQ ID NO: 151610 - RNA, 22 nt, Human
ugggccaggucugugucagcug

SEQ ID NO: 151611 - RNA, 22 nt, Human
uacauugcuagaaauguauuuu

SEQ ID NO: 151612 - RNA, 22 nt, Human
aaaauauuuuagggccaggaga

SEQ ID NO: 151613 - RNA, 22 nt, Human
auaugaagucagacaaacuggg

SEQ ID NO: 151614 - RNA, 22 nt, Human
ggccucagggucacucuguaga

SEQ ID NO: 151615 - RNA, 22 nt, Human
ccuguucacuuugacuucucca

SEQ ID NO: 151616 - RNA, 21 nt, Human
gggagggauggaaaugauguu

SEQ ID NO: 151617 - RNA, 22 nt, Human
ccuggggaagucacuucucuuu

SEQ ID NO: 151618 - RNA, 22 nt, Human
aggguagggcccggagacagac

SEQ ID NO: 151619 - RNA, 22 nt, Human
ucugggcuuuaguuuguuaucu

SEQ ID NO: 151620 - RNA, 22 nt, Human
gaggagcugggacccugucauc

SEQ ID NO: 151621 - RNA, 22 nt, Human
uggaaacaucucugccuuuauu

SEQ ID NO: 151622 - RNA, 22 nt, Human
gagcucagacucgggccugggg

SEQ ID NO: 151623 - RNA, 22 nt, Human
acaucugaggagaccagccucu

SEQ ID NO: 151624 - RNA, 22 nt, Human
cucuggggaagcagccagcugg

SEQ ID NO: 151625 - RNA, 22 nt, Human
cacugaaauauuaauaucuuau

SEQ ID NO: 151626 - RNA, 22 nt, Human
caugaaaaugucaaguucugcu

SEQ ID NO: 151627 - RNA, 22 nt, Human
cuaggaaugguaccucuuacaa

SEQ ID NO: 151628 - RNA, 22 nt, Human
ugcaggcugcaccccugcccug

SEQ ID NO: 151629 - RNA, 22 nt, Human
cacauacauucauguuacucua

SEQ ID NO: 151630 - RNA, 22 nt, Human
gcuccaggaggaugaccuuccu

SEQ ID NO: 151631 - RNA, 18 nt, Human
cuccuccacagccccugc

SEQ ID NO: 151632 - RNA, 22 nt, Human
uacacauccauguuuugacuuu

SEQ ID NO: 151633 - RNA, 22 nt, Human
uaugaagcugauaaucacugau

SEQ ID NO: 151634 - RNA, 17 nt, Human
ggagaucuggcagaggg

SEQ ID NO: 151635 - RNA, 22 nt, Human
aaccucaggcucucuggacaau

SEQ ID NO: 151636 - RNA, 22 nt, Human
ugcccccuuuucuuguuacacu

SEQ ID NO: 151637 - RNA, 21 nt, Human
cagcccagcccauugacagug

SEQ ID NO: 151638 - RNA, 22 nt, Human
ccuguucagagcuaagcaucau

SEQ ID NO: 151639 - RNA, 22 nt, Human
guuucauacagauuauucaugg

SEQ ID NO: 151640 - RNA, 18 nt, Human
cuguucuagaacuccugu

SEQ ID NO: 151641 - RNA, 22 nt, Human
cacacauuucagaugcuacaau

SEQ ID NO: 151642 - RNA, 22 nt, Human
aaauaaguaguuuaguguugug

SEQ ID NO: 151643 - RNA, 22 nt, Human
aaagaaucagaagucucaaaca

SEQ ID NO: 151644 - RNA, 22 nt, Human
uauuccuauuucuaaacauaug

SEQ ID NO: 151645 - RNA, 22 nt, Human
aaauccuaaggagaauaugauu

SEQ ID NO: 151646 - RNA, 22 nt, Human
ccaggcuguaagagugauguug

SEQ ID NO: 151647 - RNA, 22 nt, Human
ccugggcucuauccugacccag

SEQ ID NO: 151648 - RNA, 19 nt, Human
ggcaggcuggauagagagg

SEQ ID NO: 151649 - RNA, 19 nt, Human
auuucaagagguuuauugg

SEQ ID NO: 151650 - RNA, 22 nt, Human
uuauuccauuauuucacuuagg

SEQ ID NO: 151651 - RNA, 18 nt, Human
aggaaagaaaggcaggug

SEQ ID NO: 151652 - RNA, 22 nt, Human
cccaggccuggucugggccagu

SEQ ID NO: 151653 - RNA, 20 nt, Dobrava virus
ucaugugggguuuacuauug

SEQ ID NO: 151654 - RNA, 22 nt, Dobrava virus
uaguaguagacuccgcaagaaa

SEQ ID NO: 151655 - RNA, 22 nt, Dobrava virus
aaaggaaaauuuuauguauuca

SEQ ID NO: 151656 - RNA, 22 nt, Human
uacaaaaggaagagggaucuua

SEQ ID NO: 151657 - RNA, 22 nt, Human
ucuggcagaggaaggaggccug

SEQ ID NO: 151658 - RNA, 22 nt, Human
gacugccucaguuucccugcag

SEQ ID NO: 151659 - RNA, 22 nt, Human
ucaucacaauuuuaugacccuc

SEQ ID NO: 151660 - RNA, 22 nt, Human
uuccuggccuaagguaggugac

SEQ ID NO: 151661 - RNA, 22 nt, Human
agaggccugugugcuccagugg

SEQ ID NO: 151662 - RNA, 22 nt, Human
uucaguuccauuucaggugggu

SEQ ID NO: 151663 - RNA, 22 nt, Human
cacacugucagguaaauaacac

SEQ ID NO: 151664 - RNA, 22 nt, Human
cccacacacuggcugcugccaa

SEQ ID NO: 151665 - RNA, 22 nt, Human
uagacacaucuucauccacaau

SEQ ID NO: 151666 - RNA, 22 nt, Human
ccucugccaccucccacgaggc

SEQ ID NO: 151667 - RNA, 22 nt, Human
ccuggcagcccagagcgccgcu

SEQ ID NO: 151668 - RNA, 22 nt, Human
cucaucaccacauauaacaaag

SEQ ID NO: 151669 - RNA, 22 nt, Human
uggccucugggaaagcagauuc

SEQ ID NO: 151670 - RNA, 22 nt, Human
aagagagaacucccuucgccag

SEQ ID NO: 151671 - RNA, 22 nt, Human
agcccaggucuggcccagccug

SEQ ID NO: 151672 - RNA, 22 nt, Human
gcacauacugcaaagauuacua

SEQ ID NO: 151673 - RNA, 22 nt, Human
acagguggcuuauuggcugauu

SEQ ID NO: 151674 - RNA, 22 nt, Human
ucaucacauguguagucauccc

SEQ ID NO: 151675 - RNA, 23 nt, Human
uuggagagggugaguagugucag

SEQ ID NO: 151676 - RNA, 22 nt, Human
uggccucugugggagcugagca

SEQ ID NO: 151677 - RNA, 21 nt, Human
ugacugaggcuucuucacaca

SEQ ID NO: 151678 - RNA, 22 nt, Human
cccugagcucaggcccuugggg

SEQ ID NO: 151679 - RNA, 20 nt, Human
acuggcagccugccugcugu

SEQ ID NO: 151680 - RNA, 22 nt, Human
cugccugcuuaccaugcaucag

SEQ ID NO: 151681 - RNA, 22 nt, Human
gccuggcaggccuguuggggcu

SEQ ID NO: 151682 - RNA, 22 nt, Human
gcuggcaggauaacuucuaagc

SEQ ID NO: 151683 - RNA, 22 nt, Human
cgcugauaaacgucacguuccc

SEQ ID NO: 151684 - RNA, 22 nt, Human
gcuggcaguguauuguuagcug

SEQ ID NO: 151685 - RNA, 22 nt, Human
ucacacacauaaucuaagauua

SEQ ID NO: 151686 - RNA, 22 nt, Human
ccaggccucuggcugcuuaguc

SEQ ID NO: 151687 - RNA, 22 nt, Human
uacacagauaugugaucaauca

SEQ ID NO: 151688 - RNA, 22 nt, Human
agacacagcugcaggagguggg

SEQ ID NO: 151689 - RNA, 22 nt, Human
gggccccuuguaucucuggcuc

SEQ ID NO: 151690 - RNA, 22 nt, Human
uuccuggccccaccccuggaga

SEQ ID NO: 151691 - RNA, 22 nt, Human
ccuggcagguuacaaccaguua

SEQ ID NO: 151692 - RNA, 22 nt, Human
uggcaucuccgacagucuugau

SEQ ID NO: 151693 - RNA, 22 nt, Human
gcuggcagguaaagccccgggg

SEQ ID NO: 151694 - RNA, 22 nt, Human
aggccccaaagcagugcaagua

SEQ ID NO: 151695 - RNA, 22 nt, Human
uuccugccccugagagcuccca

SEQ ID NO: 151696 - RNA, 22 nt, Human
gagaaagauguaggcugggagg

SEQ ID NO: 151697 - RNA, 19 nt, Human
ccagucccauacaggagau

SEQ ID NO: 151698 - RNA, 19 nt, Human
acauucccaucagcaaugu

SEQ ID NO: 151699 - RNA, 22 nt, Human
aagucguggcaggcuugcacga

SEQ ID NO: 151700 - RNA, 22 nt, Human
ccagcccuugcugaaggguggc

SEQ ID NO: 151701 - RNA, 22 nt, Human
ugagagucucagaccuccuggu

SEQ ID NO: 151702 - RNA, 22 nt, Human
cagguugguauucaucuccaca

SEQ ID NO: 151703 - RNA, 22 nt, Human
uccaggcuugagaccaggcucu

SEQ ID NO: 151704 - RNA, 22 nt, Human
gccuccuggaagucacauguuu

SEQ ID NO: 151705 - RNA, 22 nt, Human
ugccugccaugcagaaagcuga

SEQ ID NO: 151706 - RNA, 22 nt, Human
gcacacacuguuuuccucacau

SEQ ID NO: 151707 - RNA, 22 nt, Human
cuccuggcaggcugagugaaau

SEQ ID NO: 151708 - RNA, 22 nt, Human
ucccagccacaguuuccaccug

SEQ ID NO: 151709 - RNA, 22 nt, Human
cuggccucagagggucauggug

SEQ ID NO: 151710 - RNA, 22 nt, Human
ucacacagcugacagagccuuu

SEQ ID NO: 151711 - RNA, 22 nt, Human
gagacaucauaaugaaguuucc

SEQ ID NO: 151712 - RNA, 22 nt, Human
ucuggcaggacaugcugaccau

SEQ ID NO: 151713 - RNA, 22 nt, Human
cacaacuuuaggaaccacauuc

SEQ ID NO: 151714 - RNA, 22 nt, Human
uguaaacauauguauguaugua

SEQ ID NO: 151715 - RNA, 22 nt, Human
cccacacaaaucauggggagaa

SEQ ID NO: 151716 - RNA, 22 nt, Human
ucaggauggagggaagcacaga

SEQ ID NO: 151717 - RNA, 21 nt, Human
uucucuccauaugcccagccc

SEQ ID NO: 151718 - RNA, 20 nt, Human
uggccucugagaugccacgg

SEQ ID NO: 151719 - RNA, 22 nt, Human
ucacacaugaguaaauacaggg

SEQ ID NO: 151720 - RNA, 22 nt, Human
gccccaccuugagagcagaaac

SEQ ID NO: 151721 - RNA, 22 nt, Human
cucugagcagaggccguggcua

SEQ ID NO: 151722 - RNA, 22 nt, Human
guugggaaggcaagaaguagaa

SEQ ID NO: 151723 - RNA, 19 nt, Human
acuggcagcuguagucugu

SEQ ID NO: 151724 - RNA, 18 nt, Human
acaggcugugggaauggu

SEQ ID NO: 151725 - RNA, 21 nt, Human
acacagaggcaucaucacuuu

SEQ ID NO: 151726 - RNA, 22 nt, Human
uccuucccaggugucgccgccu

SEQ ID NO: 151727 - RNA, 22 nt, Human
cuccugaggacuucuauugggu

SEQ ID NO: 151728 - RNA, 22 nt, Human
acugagagucaagauagcaugg

SEQ ID NO: 151729 - RNA, 22 nt, Human
uuccuggcauagagagggcaca

SEQ ID NO: 151730 - RNA, 22 nt, Human
uccugagcccuguaggacccug

SEQ ID NO: 151731 - RNA, 22 nt, Human
ggccucucugagagcagacguu

SEQ ID NO: 151732 - RNA, 22 nt, Human
gagggugucugcguaacuggca

SEQ ID NO: 151733 - RNA, 18 nt, Human
cccacacagcaguagcuc

SEQ ID NO: 151734 - RNA, 19 nt, Human
gcuggcagauguggccgug

SEQ ID NO: 151735 - RNA, 22 nt, Human
uuggagagauuuaggucucagu

SEQ ID NO: 151736 - RNA, 22 nt, Human
ggagagaauuccauggacaugu

SEQ ID NO: 151737 - RNA, 22 nt, Human
uggcacucacucucagagucug

SEQ ID NO: 151738 - RNA, 20 nt, Human
accccacagaguccauugca

SEQ ID NO: 151739 - RNA, 22 nt, Human
agcacagggacaaugccaggug

SEQ ID NO: 151740 - RNA, 22 nt, Human
uugggaagaaacauguccauca

SEQ ID NO: 151741 - RNA, 22 nt, Human
ccccacacucuuuacauucaua

SEQ ID NO: 151742 - RNA, 22 nt, Human
uauguaaaguagauggcaggua

SEQ ID NO: 151743 - RNA, 22 nt, Human
uacacacuuacuggagaugaag

SEQ ID NO: 151744 - RNA, 22 nt, Human
gccacagguacuaugggagaga

SEQ ID NO: 151745 - RNA, 22 nt, Human
ccuggcaggcuggggacagugc

SEQ ID NO: 151746 - RNA, 22 nt, Human
ugcacaggugagacucaggaag

SEQ ID NO: 151747 - RNA, 22 nt, Human
guggcagugggaugcuaucagg

SEQ ID NO: 151748 - RNA, 22 nt, Human
aucacaauguacguuaaaaugu

SEQ ID NO: 151749 - RNA, 22 nt, Human
uuggaaaguuuuuacugaagac

SEQ ID NO: 151750 - RNA, 22 nt, Human
aggcuggauuuauggggacuuc

SEQ ID NO: 151751 - RNA, 22 nt, Human
gccuccuguuaugccaugugcc

SEQ ID NO: 151752 - RNA, 22 nt, Human
acaucccacagaaacauacaua

SEQ ID NO: 151753 - RNA, 22 nt, Human
guccucugaaagaugaaccaug

SEQ ID NO: 151754 - RNA, 22 nt, Human
gccuggcacaggaauuaggagg

SEQ ID NO: 151755 - RNA, 22 nt, Human
gacacagagcucacagucuccu

SEQ ID NO: 151756 - RNA, 22 nt, Human
gccacauagaggaggauauuaa

SEQ ID NO: 151757 - RNA, 22 nt, Human
uccaggccauugacugcauccu

SEQ ID NO: 151758 - RNA, 22 nt, Human
uccaggcuagguuuacaggaca

SEQ ID NO: 151759 - RNA, 22 nt, Human
ccaggcugggcggggaaccugg

SEQ ID NO: 151760 - RNA, 22 nt, Human
ucuggcaguuugagaaaggcua

SEQ ID NO: 151761 - RNA, 22 nt, Human
acuggcagguccaucgcccuuu

SEQ ID NO: 151762 - RNA, 22 nt, Human
acuccugggugcugaccagcgu

SEQ ID NO: 151763 - RNA, 22 nt, Human
aaaagagugacugauaaguaua

SEQ ID NO: 151764 - RNA, 22 nt, Human
gacacauaugcguauaguuuag

SEQ ID NO: 151765 - RNA, 22 nt, Human
acacaucagaaauaugaaugag

SEQ ID NO: 151766 - RNA, 20 nt, Human
agggcugagaagggacuagc

SEQ ID NO: 151767 - RNA, 17 nt, Human
uuaagguggaucagcac

SEQ ID NO: 151768 - RNA, 22 nt, Human
ccccacccaccuaagagaaacu

SEQ ID NO: 151769 - RNA, 22 nt, Human
ucccugccuccuggcagugcca

SEQ ID NO: 151770 - RNA, 21 nt, Human
ucuggcaggcacgggcccagc

SEQ ID NO: 151771 - RNA, 22 nt, Human
acuggcagagggaaaaccauuc

SEQ ID NO: 151772 - RNA, 22 nt, Human
uccuggcagagggcggccucga

SEQ ID NO: 151773 - RNA, 22 nt, Human
ugguccugccccgugcacagag

SEQ ID NO: 151774 - RNA, 22 nt, Human
auggccugcagugcugccacag

SEQ ID NO: 151775 - RNA, 22 nt, Human
cccagcaugcacgcugacacuc

SEQ ID NO: 151776 - RNA, 22 nt, Human
gacucugggcugagccagggcc

SEQ ID NO: 151777 - RNA, 22 nt, Human
uguaaacagccccauggagagc

SEQ ID NO: 151778 - RNA, 22 nt, Human
acaugacuuuucucuuccagag

SEQ ID NO: 151779 - RNA, 22 nt, Human
aggaggcuguggagcacuccau

SEQ ID NO: 151780 - RNA, 22 nt, Human
uucccacaguguugaauccucu

SEQ ID NO: 151781 - RNA, 22 nt, Human
uggccugccacugccacgccac

SEQ ID NO: 151782 - RNA, 20 nt, Human
ucacacaugguaagcuauga

SEQ ID NO: 151783 - RNA, 21 nt, Human
aacacauccagaguauuugac

SEQ ID NO: 151784 - RNA, 22 nt, Human
ccacccuaacaauccuuacugu

SEQ ID NO: 151785 - RNA, 22 nt, Human
uccugagccugacaaucaccau

SEQ ID NO: 151786 - RNA, 17 nt, Human
gcccacccuuaggagcu

SEQ ID NO: 151787 - RNA, 22 nt, Human
aucucccagccacagcauucuu

SEQ ID NO: 151788 - RNA, 22 nt, Human
cuuacacagucuggcacuucuu

SEQ ID NO: 151789 - RNA, 22 nt, Human
ucuggcaguggaugagggcagc

SEQ ID NO: 151790 - RNA, 22 nt, Human
cuccuggcacucaguguggaag

SEQ ID NO: 151791 - RNA, 22 nt, Human
guccucuguuagaaaugugcuu

SEQ ID NO: 151792 - RNA, 22 nt, Human
uuguaaacugcugcaggagugc

SEQ ID NO: 151793 - RNA, 22 nt, Human
acacauaagccuaaucaucucc

SEQ ID NO: 151794 - RNA, 22 nt, Human
gcuggcagagagcuggugagga

SEQ ID NO: 151795 - RNA, 22 nt, Human
ccuugcucaagcuagugacggg

SEQ ID NO: 151796 - RNA, 20 nt, Human
cacaacuguccacaugcucc

SEQ ID NO: 151797 - RNA, 22 nt, Human
acagaguccuagcugcaaagaa

SEQ ID NO: 151798 - RNA, 18 nt, Human
acucugcggaggccccag

SEQ ID NO: 151799 - RNA, 22 nt, Human
gcccacacaccagcucaggagg

SEQ ID NO: 151800 - RNA, 23 nt, Human
acuccccagucucuucuugccaa

SEQ ID NO: 151801 - RNA, 22 nt, Human
guccucugggcuuugagcaguc

SEQ ID NO: 151802 - RNA, 22 nt, Human
aggggugugcauccuggaggau

SEQ ID NO: 151803 - RNA, 22 nt, Human
gcccacaccauuuauucuuugu

SEQ ID NO: 151804 - RNA, 22 nt, Human
uggcagagcccagacuccaguc

SEQ ID NO: 151805 - RNA, 22 nt, Human
acuggcagaacgugaugcgggu

SEQ ID NO: 151806 - RNA, 18 nt, Human
ggcagggaaaagauaggg

SEQ ID NO: 151807 - RNA, 22 nt, Human
uccuggcagaaauggggcugug

SEQ ID NO: 151808 - RNA, 22 nt, Human
cuguccagcuuggcuccugggg

SEQ ID NO: 151809 - RNA, 22 nt, Human
ucuggcagaucuucccacguuu

SEQ ID NO: 151810 - RNA, 20 nt, Human
uuccacaucuuugcacaugc

SEQ ID NO: 151811 - RNA, 22 nt, Human
agucacaguuucccugagagag

SEQ ID NO: 151812 - RNA, 22 nt, Human
uggcagugguaccggcucucag

SEQ ID NO: 151813 - RNA, 22 nt, Human
gcacacagcuagauuaccauuc

SEQ ID NO: 151814 - RNA, 22 nt, Human
uccuggcauccgugggucugug

SEQ ID NO: 151815 - RNA, 22 nt, Human
cuggcaguauuaagagaaguga

SEQ ID NO: 151816 - RNA, 22 nt, Human
uugggaagaauggaggugguua

SEQ ID NO: 151817 - RNA, 22 nt, Human
ccauucauacaauuuuguucua

SEQ ID NO: 151818 - RNA, 22 nt, Human
uggcagagucaucacaucugga

SEQ ID NO: 151819 - RNA, 17 nt, Human
uccaggcagcaacugag

SEQ ID NO: 151820 - RNA, 22 nt, Human
cuccaggccccuggccuucugc

SEQ ID NO: 151821 - RNA, 22 nt, Human
acauacacaagcguacaugaac

SEQ ID NO: 151822 - RNA, 22 nt, Human
aacaaaagccgaaguagguguc

SEQ ID NO: 151823 - RNA, 22 nt, Human
acacacaugcaugcuugccauu

SEQ ID NO: 151824 - RNA, 22 nt, Human
acuggcagcagcagcccuuggg

SEQ ID NO: 151825 - RNA, 22 nt, Human
agagggugcuggagagacauug

SEQ ID NO: 151826 - RNA, 22 nt, Human
caucacagguccugaugacauu

SEQ ID NO: 151827 - RNA, 22 nt, Human
ucuggcagugagcaacuugaca

SEQ ID NO: 151828 - RNA, 22 nt, Human
ccacaaaacugugugucaaaga

SEQ ID NO: 151829 - RNA, 22 nt, Human
ggagcugaaccccaucgugcug

SEQ ID NO: 151830 - RNA, 22 nt, Human
acacacuguaaggacuaucacu

SEQ ID NO: 151831 - RNA, 22 nt, Human
ccuggcagguggcgcccucggc

SEQ ID NO: 151832 - RNA, 21 nt, Human
ucuggcaguggucuuucaaau

SEQ ID NO: 151833 - RNA, 22 nt, Human
gugggagaaauuagcucuaguu

SEQ ID NO: 151834 - RNA, 22 nt, Human
uccaggcuaauuuugcauuguu

SEQ ID NO: 151835 - RNA, 22 nt, Human
aucccacaccccuacaacauau

SEQ ID NO: 151836 - RNA, 22 nt, Human
agacaagaaacugggagucucu

SEQ ID NO: 151837 - RNA, 22 nt, Human
uccuggcaaagauguugguguu

SEQ ID NO: 151838 - RNA, 22 nt, Human
acacacaugccuuuccuaagua

SEQ ID NO: 151839 - RNA, 20 nt, Human
gcuggcagaugucuugagau

SEQ ID NO: 151840 - RNA, 22 nt, Human
aggaggcugcaacccugaggcc

SEQ ID NO: 151841 - RNA, 22 nt, Human
ucuggcagcaagauaacaaugg

SEQ ID NO: 151842 - RNA, 22 nt, Human
ccugccucccagagguccucua

SEQ ID NO: 151843 - RNA, 22 nt, Human
cuuggcaggguggaggaugcag

SEQ ID NO: 151844 - RNA, 22 nt, Human
cacaucccuggaguuacccagu

SEQ ID NO: 151845 - RNA, 22 nt, Human
ucccacacuacacgguuguugg

SEQ ID NO: 151846 - RNA, 22 nt, Human
aacacauauuuauauaugcaca

SEQ ID NO: 151847 - RNA, 21 nt, Human
ucacguggucacaugagcuuu

SEQ ID NO: 151848 - RNA, 22 nt, Human
gcuggcagaagagcugguucaa

SEQ ID NO: 151849 - RNA, 22 nt, Human
cuccugaggaaaagcuugguca

SEQ ID NO: 151850 - RNA, 22 nt, Human
cugccugcucuauccaggccug

SEQ ID NO: 151851 - RNA, 22 nt, Human
aagaggucauaccagauaaggg

SEQ ID NO: 151852 - RNA, 22 nt, Human
gcuugggaagggcccuguguac

SEQ ID NO: 151853 - RNA, 22 nt, Human
gcacauaacugaccacaucuaa

SEQ ID NO: 151854 - RNA, 23 nt, Human
uuccaggcagagcagggauuaga

SEQ ID NO: 151855 - RNA, 21 nt, Human
gggcagaggggccuccugggu

SEQ ID NO: 151856 - RNA, 22 nt, Human
gagccugaugaaacaggcagac

SEQ ID NO: 151857 - RNA, 22 nt, Human
ugcagagagaccccugggccag

SEQ ID NO: 151858 - RNA, 22 nt, Human
gcuggcagugugaaugacaagc

SEQ ID NO: 151859 - RNA, 22 nt, Human
cccacccugggcuacacaucca

SEQ ID NO: 151860 - RNA, 22 nt, Human
cagccaagaaccacagacccag

SEQ ID NO: 151861 - RNA, 22 nt, Human
gcccacacagcagauccuuugg

SEQ ID NO: 151862 - RNA, 22 nt, Human
cacugucccuguuuccuggaaa

SEQ ID NO: 151863 - RNA, 22 nt, Human
cugccugcaggacaccucgcua

SEQ ID NO: 151864 - RNA, 22 nt, Human
uaaaggguagguuuuacuguaa

SEQ ID NO: 151865 - RNA, 22 nt, Human
agcccagcuuugaaccauauca

SEQ ID NO: 151866 - RNA, 22 nt, Human
gcccucucuucugcagccucca

SEQ ID NO: 151867 - RNA, 22 nt, Human
cuggcagguuuggugucuggug

SEQ ID NO: 151868 - RNA, 22 nt, Human
aggcaggggagcuggaagggua

SEQ ID NO: 151869 - RNA, 22 nt, Human
caauacugaguuuacauucauc

SEQ ID NO: 151870 - RNA, 22 nt, Human
agagcacagaagaauaggugcu

SEQ ID NO: 151871 - RNA, 22 nt, Human
uggcacaguccugggugccugc

SEQ ID NO: 151872 - RNA, 22 nt, Human
gacaaaaguguuuugaacaagg

SEQ ID NO: 151873 - RNA, 22 nt, Human
gacacagaauuuacucccgaua

SEQ ID NO: 151874 - RNA, 21 nt, Human
cccuugccugcacuccucggc

SEQ ID NO: 151875 - RNA, 22 nt, Human
cacacacucuuccuggcaccua

SEQ ID NO: 151876 - RNA, 22 nt, Human
ccaggcccugcuccucacacca

SEQ ID NO: 151877 - RNA, 22 nt, Human
uccacacacauuucuaugugca

SEQ ID NO: 151878 - RNA, 22 nt, Human
acuggcagaggauagcacuaau

SEQ ID NO: 151879 - RNA, 22 nt, Human
ugagagucuguuccucuugcag

SEQ ID NO: 151880 - RNA, 22 nt, Human
cuccaggcucguccaagaucga

SEQ ID NO: 151881 - RNA, 22 nt, Human
guccuggcugguucuguggggc

SEQ ID NO: 151882 - RNA, 22 nt, Human
cuggccuggggggacacauccc

SEQ ID NO: 151883 - RNA, 22 nt, Human
aguguugggucuuuagaauuua

SEQ ID NO: 151884 - RNA, 22 nt, Human
accugccuauggagccacaugg

SEQ ID NO: 151885 - RNA, 22 nt, Human
cccacacucugagaaaugcuga

SEQ ID NO: 151886 - RNA, 22 nt, Human
acagacuggccugucucgcacc

SEQ ID NO: 151887 - RNA, 22 nt, Human
ccuggcagucaggggaguccuu

SEQ ID NO: 151888 - RNA, 22 nt, Human
gccuggcaggggccugggagug

SEQ ID NO: 151889 - RNA, 22 nt, Human
cagucacauagguauacacaua

SEQ ID NO: 151890 - RNA, 19 nt, Human
guccuggcgccgccacacc

SEQ ID NO: 151891 - RNA, 22 nt, Human
agagucccagggacacuccaga

SEQ ID NO: 151892 - RNA, 22 nt, Human
ccuggcagcagcacaugccuuc

SEQ ID NO: 151893 - RNA, 22 nt, Human
cuggcaugaaauggcaucucau

SEQ ID NO: 151894 - RNA, 19 nt, Human
ccacacagugugcaauuua

SEQ ID NO: 151895 - RNA, 22 nt, Human
ucacauacugaaaguccaguga

SEQ ID NO: 151896 - RNA, 22 nt, Human
gccccacagccugcggucucag

SEQ ID NO: 151897 - RNA, 22 nt, Human
acacucacccucccacugccug

SEQ ID NO: 151898 - RNA, 22 nt, Human
cagcccagccuugucucuuuau

SEQ ID NO: 151899 - RNA, 22 nt, Human
gcacacaggcaguuuccagcca

SEQ ID NO: 151900 - RNA, 18 nt, Human
uccuggcagucagagagg

SEQ ID NO: 151901 - RNA, 22 nt, Human
cagcacagugaccagacccacu

SEQ ID NO: 151902 - RNA, 22 nt, Human
uccaggcaagggaggagcaugg

SEQ ID NO: 151903 - RNA, 22 nt, Human
agggccccauagucacugcccg

SEQ ID NO: 151904 - RNA, 22 nt, Human
gcaguguuuguguucucacaug

SEQ ID NO: 151905 - RNA, 22 nt, Human
ccucucccgggugccgcugggc

SEQ ID NO: 151906 - RNA, 22 nt, Human
ggugccaggcuguagucagggu

SEQ ID NO: 151907 - RNA, 22 nt, Human
ccuggcagcuaagugcuuugag

SEQ ID NO: 151908 - RNA, 22 nt, Human
cccuuccugggugucccggagu

SEQ ID NO: 151909 - RNA, 22 nt, Human
ugccucucuaacccaugcccaa

SEQ ID NO: 151910 - RNA, 22 nt, Human
ggcccagccucagacaugcccu

SEQ ID NO: 151911 - RNA, 22 nt, Human
cuuggcagagggcugggcucag

SEQ ID NO: 151912 - RNA, 17 nt, Human
uugggagagaaagguau

SEQ ID NO: 151913 - RNA, 22 nt, Human
aaagagucaaaggcaugucucu

SEQ ID NO: 151914 - RNA, 22 nt, Human
uacacagaaccugguguacagu

SEQ ID NO: 151915 - RNA, 22 nt, Human
ccacacuaaacugcucaaacca

SEQ ID NO: 151916 - RNA, 22 nt, Human
aaauuacagaucaccaaugcau

SEQ ID NO: 151917 - RNA, 22 nt, Human
cagcccaggccgacaguuccuc

SEQ ID NO: 151918 - RNA, 22 nt, Human
acuggcaggcugcuggccggcg

SEQ ID NO: 151919 - RNA, 22 nt, Human
cucucuccuuagcugcagacca

SEQ ID NO: 151920 - RNA, 22 nt, Human
uguggggaagaguaugacuugg

SEQ ID NO: 151921 - RNA, 22 nt, Human
ggcaagagggcagauggagugc

SEQ ID NO: 151922 - RNA, 22 nt, Human
ucuggcagugaagucaugaggu

SEQ ID NO: 151923 - RNA, 22 nt, Human
gcagccucaaacuccccagcuc

SEQ ID NO: 151924 - RNA, 22 nt, Human
gcuggcaggagaaacggggugc

SEQ ID NO: 151925 - RNA, 22 nt, Human
ucuggcagugauuucugugauc

SEQ ID NO: 151926 - RNA, 22 nt, Human
ccuggcagcgccgaagcuggcc

SEQ ID NO: 151927 - RNA, 22 nt, Human
auggcagagggauugaacagcu

SEQ ID NO: 151928 - RNA, 22 nt, Human
auuccacacaguaauacucaau

SEQ ID NO: 151929 - RNA, 19 nt, Human
agaggccucagcagcuggc

SEQ ID NO: 151930 - RNA, 22 nt, Human
uuccagcccgcgacuuguucag

SEQ ID NO: 151931 - RNA, 22 nt, Human
ggugccagugggucucaggaua

SEQ ID NO: 151932 - RNA, 22 nt, Human
cacacacuggagcaaggagaug

SEQ ID NO: 151933 - RNA, 18 nt, Human
ggccucuggacuggcagc

SEQ ID NO: 151934 - RNA, 22 nt, Human
uacacagauuucaguaucauca

SEQ ID NO: 151935 - RNA, 22 nt, Human
ucuggcaguugccgcuucaguc

SEQ ID NO: 151936 - RNA, 22 nt, Human
ccuggcagaauauuaaagugca

SEQ ID NO: 151937 - RNA, 22 nt, Human
gcuccaggaggaugaccuuccu

SEQ ID NO: 151938 - RNA, 22 nt, Human
guccucuggaagaugaguucuu

SEQ ID NO: 151939 - RNA, 22 nt, Human
cacacauuucagaugcuacaau

SEQ ID NO: 151940 - RNA, 22 nt, Human
cagcccaaagccccaggcuaga

SEQ ID NO: 151941 - RNA, 22 nt, Human
cagguuggggacuuaggaugac

SEQ ID NO: 151942 - RNA, 22 nt, Human
ccuggcagguggagguugcagu

SEQ ID NO: 151943 - RNA, 22 nt, Human
accugccuucucaaggacauga

SEQ ID NO: 151944 - RNA, 21 nt, Human
ucuggcaggaagacggauggg

SEQ ID NO: 151945 - RNA, 21 nt, Human
ccuggcagaagccugauaugc

SEQ ID NO: 151946 - RNA, 22 nt, Human
ggaggacacuggcucugccuuc

SEQ ID NO: 151947 - RNA, 15 nt, Human
cacacagacagcuug

SEQ ID NO: 151948 - RNA, 22 nt, Human
aggcaguggagcuggaauaggc

SEQ ID NO: 151949 - RNA, 23 nt, Human
ggacacauuuauuucagaauuca

SEQ ID NO: 151950 - RNA, 22 nt, Human
guuaggaacacuggagccuaaa

SEQ ID NO: 151951 - RNA, 22 nt, Human
ucccacacuugaaacaaggcug

SEQ ID NO: 151952 - RNA, 22 nt, Human
uucuuucaauagcuggcauaug

SEQ ID NO: 151953 - RNA, 19 nt, Human
gugggacagacauuacaua

SEQ ID NO: 151954 - RNA, 22 nt, Human
ccacaucauggauacaguuaug

SEQ ID NO: 151955 - RNA, 22 nt, Human
aaaagagucuuaggcagucaua

SEQ ID NO: 151956 - RNA, 22 nt, Human
acuggcaguagagggagcgcau

SEQ ID NO: 151957 - RNA, 22 nt, Human
gagaggcuggcagugccagguu

SEQ ID NO: 151958 - RNA, 22 nt, Human
guccucugggcagcugccccac

SEQ ID NO: 151959 - RNA, 22 nt, Human
ccugccuguacuagagacccag

SEQ ID NO: 151960 - RNA, 22 nt, Human
aaagagucguguuccagguuug

SEQ ID NO: 151961 - RNA, 20 nt, Human
aaaagagugcuucaacugcu

SEQ ID NO: 151962 - RNA, 22 nt, Human
acuggcagugucguuuacauga

SEQ ID NO: 151963 - RNA, 22 nt, Human
cccugagcgugaggaggaagua

SEQ ID NO: 151964 - RNA, 18 nt, Human
uccugccugugccccagg

SEQ ID NO: 151965 - RNA, 22 nt, Human
acacagaugcauuacacaucua

SEQ ID NO: 151966 - RNA, 22 nt, Human
uggaaagaggaagugcccagca

SEQ ID NO: 151967 - RNA, 22 nt, Human
ugcacaggaggcuguggagaag

SEQ ID NO: 151968 - RNA, 22 nt, Human
ggugccagaguggcccaggggc

SEQ ID NO: 151969 - RNA, 17 nt, Human
gccuucucugcccucac

SEQ ID NO: 151970 - RNA, 22 nt, Human
guccucugacucagccuuggga

SEQ ID NO: 151971 - RNA, 22 nt, Human
auggccuggggauuccugagca

SEQ ID NO: 151972 - RNA, 22 nt, Human
cuggcaguuugccaggagcucg

SEQ ID NO: 151973 - RNA, 22 nt, Human
cagguggguguaugaaugcaaa

SEQ ID NO: 151974 - RNA, 22 nt, Human
uccuggcacuuugggggcucgc

SEQ ID NO: 151975 - RNA, 22 nt, Human
guccucugagggggcugcacgc

SEQ ID NO: 151976 - RNA, 22 nt, Human
acaucacaguaguuaagccaga

SEQ ID NO: 151977 - RNA, 22 nt, Human
guccucugauuucuagguauau

SEQ ID NO: 151978 - RNA, 22 nt, Human
aggaagaacagauaauggacgc

SEQ ID NO: 151979 - RNA, 22 nt, Human
auguuggagucguaaggcaugg

SEQ ID NO: 151980 - RNA, 20 nt, Human
uucaugggagcaaagaggcc

SEQ ID NO: 151981 - RNA, 22 nt, Human
ucuggcagggucagggcccagg

SEQ ID NO: 151982 - RNA, 22 nt, Human
auacauucaaaggaaggauaga

SEQ ID NO: 151983 - RNA, 22 nt, Human
ggccucagagaaggcugugcgg

SEQ ID NO: 151984 - RNA, 22 nt, Human
gcuggcagguccaagauagagc

SEQ ID NO: 151985 - RNA, 22 nt, Human
ccuggcugguggcagcgacaag

SEQ ID NO: 151986 - RNA, 23 nt, Human
uguaaacaucacccccuggaguu

SEQ ID NO: 151987 - RNA, 22 nt, Human
ccagccucacuggcaucaccua

SEQ ID NO: 151988 - RNA, 22 nt, Human
cagguuggucggcaaguacaca

SEQ ID NO: 151989 - RNA, 22 nt, Human
ugacaggaggcuugaggccagg

SEQ ID NO: 151990 - RNA, 22 nt, Human
uuccagccaugguuucccuaug

SEQ ID NO: 151991 - RNA, 22 nt, Human
uccaggcucuaggcugcucucc

SEQ ID NO: 151992 - RNA, 22 nt, Human
acagguggaggcuuuaggaggu

SEQ ID NO: 151993 - RNA, 19 nt, Human
ccagcccacagugacuuuc

SEQ ID NO: 151994 - RNA, 18 nt, Human
uguagagccagguuugcc

SEQ ID NO: 151995 - RNA, 22 nt, Human
uccugccuguuuaccuguacuu

SEQ ID NO: 151996 - RNA, 22 nt, Human
ggagcugaguucuucagccggg

SEQ ID NO: 151997 - RNA, 16 nt, Human
ucacauacuuccuugc

SEQ ID NO: 151998 - RNA, 17 nt, Human
ccauacugacauauuga

SEQ ID NO: 151999 - RNA, 22 nt, Human
cccagcccacgguccugggugg

SEQ ID NO: 152000 - RNA, 22 nt, Human
uccugagcaacacagcuaagug

SEQ ID NO: 152001 - RNA, 22 nt, Human
gaggagcucaugaaagcggugu

SEQ ID NO: 152002 - RNA, 22 nt, Human
ccuggcagcauugguagagauu

SEQ ID NO: 152003 - RNA, 23 nt, Human
guccucuggagagaaaggcagua

SEQ ID NO: 152004 - RNA, 22 nt, Human
uuccuggcgccacggagccggu

SEQ ID NO: 152005 - RNA, 22 nt, Human
uggcaggaaaguaacagagcac

SEQ ID NO: 152006 - RNA, 22 nt, Human
uccaggcuccccugcgugcucc

SEQ ID NO: 152007 - RNA, 22 nt, Human
cugccugccuuggccuccagga

SEQ ID NO: 152008 - RNA, 22 nt, Human
guccucugggagccuugagccu

SEQ ID NO: 152009 - RNA, 22 nt, Human
uggcagagagagugcagucgac

SEQ ID NO: 152010 - RNA, 22 nt, Human
cuccuggcacugucuugaccca

SEQ ID NO: 152011 - RNA, 22 nt, Human
uacacacaugcauuugccuuau

SEQ ID NO: 152012 - RNA, 22 nt, Human
acacacacaagcagguugugga

SEQ ID NO: 152013 - RNA, 22 nt, Human
agaggccggccgagcccauggg

SEQ ID NO: 152014 - RNA, 22 nt, Human
caggaguggugugagggacucc

SEQ ID NO: 152015 - RNA, 22 nt, Human
gccuggcacaguagggacccaa

SEQ ID NO: 152016 - RNA, 22 nt, Human
gcuggcaggauagaagucuaau

SEQ ID NO: 152017 - RNA, 22 nt, Human
auccuggcccagguguggaggg

SEQ ID NO: 152018 - RNA, 22 nt, Human
acagguccucaagucagcuggg

SEQ ID NO: 152019 - RNA, 22 nt, Human
ccuggcaggacuguuguaagaa

SEQ ID NO: 152020 - RNA, 22 nt, Human
gguguugggcucacugguccuu

SEQ ID NO: 152021 - RNA, 22 nt, Human
acugccaaugguaguuugaugg

SEQ ID NO: 152022 - RNA, 22 nt, Human
ucuggcagcgaagcguguacuu

SEQ ID NO: 152023 - RNA, 22 nt, Human
ccacacagggggaugaguuauu

SEQ ID NO: 152024 - RNA, 22 nt, Human
augacugcucugggcucccaug

SEQ ID NO: 152025 - RNA, 22 nt, Human
gcccagccuccaagcuccaagg

SEQ ID NO: 152026 - RNA, 22 nt, Human
ccacauacaaauggggugcugu

SEQ ID NO: 152027 - RNA, 22 nt, Human
cacauuccuggugcucagcagc

SEQ ID NO: 152028 - RNA, 17 nt, Human
gcaucacagauaacacg

SEQ ID NO: 152029 - RNA, 22 nt, Human
ccagcccugucaccaacuggag

SEQ ID NO: 152030 - RNA, 22 nt, Human
ugagggacucccggcccugcca

SEQ ID NO: 152031 - RNA, 22 nt, Human
uccaggcucccucaggaugcac

SEQ ID NO: 152032 - RNA, 22 nt, Human
uccugcagccacugcaggcaga

SEQ ID NO: 152033 - RNA, 22 nt, Human
gaagagaaaggcaaggaguuuu

SEQ ID NO: 152034 - RNA, 19 nt, Human
acuggcagggcugcggugg

SEQ ID NO: 152035 - RNA, 20 nt, Human
ucuggcaggugaacgagcug

SEQ ID NO: 152036 - RNA, 22 nt, Human
cccacccucaagggugucuaua

SEQ ID NO: 152037 - RNA, 22 nt, Human
gcuggcagaauuucuucuugcu

SEQ ID NO: 152038 - RNA, 22 nt, Human
uguaaagaaagacgcagaguua

SEQ ID NO: 152039 - RNA, 22 nt, Human
ggcacagggggcugaggacuag

SEQ ID NO: 152040 - RNA, 19 nt, Human
guccucucaacaacccggg

SEQ ID NO: 152041 - RNA, 22 nt, Human
aucacagagcucccuuccacug

SEQ ID NO: 152042 - RNA, 22 nt, Human
ucccacacagcccgcucaccgg

SEQ ID NO: 152043 - RNA, 22 nt, Human
cauacauuuauacacaucuaug

SEQ ID NO: 152044 - RNA, 22 nt, Human
agacacagucugucuggaggag

SEQ ID NO: 152045 - RNA, 22 nt, Human
gguggcagaggugcaucagccc

SEQ ID NO: 152046 - RNA, 22 nt, Human
agucuagggugggguccacagg

SEQ ID NO: 152047 - RNA, 22 nt, Human
aaagaucaauagauaaagcuac

SEQ ID NO: 152048 - RNA, 22 nt, Human
cagucccaugagcccagaacau

SEQ ID NO: 152049 - RNA, 22 nt, Human
ugcuggcacguggaccaggaga

SEQ ID NO: 152050 - RNA, 22 nt, Human
gaggagcuggcagcgucuccgc

SEQ ID NO: 152051 - RNA, 22 nt, Human
ucccagccaggcucuaccacuu

SEQ ID NO: 152052 - RNA, 22 nt, Human
auaauggccgggggcugaaugc

SEQ ID NO: 152053 - RNA, 22 nt, Human
uucccacauucuuuacauucau

SEQ ID NO: 152054 - RNA, 20 nt, Human
acaaagacuggaaaagcaag

SEQ ID NO: 152055 - RNA, 22 nt, Human
uguaaacauaccagagccaagu

SEQ ID NO: 152056 - RNA, 22 nt, Human
aggaaagauggaaggaggauaa

SEQ ID NO: 152057 - RNA, 21 nt, Human
ucacacacguuuccaagggca

SEQ ID NO: 152058 - RNA, 22 nt, Human
uggucucugcaggccaggcuca

SEQ ID NO: 152059 - RNA, 22 nt, Human
acacacuguugcucauccaggc

SEQ ID NO: 152060 - RNA, 22 nt, Human
acacacagguaaaggagccugg

SEQ ID NO: 152061 - RNA, 22 nt, Human
ggagaagaggagcuggaagccu

SEQ ID NO: 152062 - RNA, 22 nt, Human
ucccuccuggccgucaccgcug

SEQ ID NO: 152063 - RNA, 22 nt, Human
ucaggagcucuucccuggugug

SEQ ID NO: 152064 - RNA, 22 nt, Human
cuggcaguuggcauuggcaucu

SEQ ID NO: 152065 - RNA, 22 nt, Human
cuccuggcucgcccccagcuga

SEQ ID NO: 152066 - RNA, 21 nt, Human
aggcugcuggcucaggguccu

SEQ ID NO: 152067 - RNA, 22 nt, Human
gcacacaguauaugcucauuaa

SEQ ID NO: 152068 - RNA, 22 nt, Human
cuccaggccauggcugcggagg

SEQ ID NO: 152069 - RNA, 22 nt, Human
gccuggcauauaguaguugugc

SEQ ID NO: 152070 - RNA, 22 nt, Human
acacaucucaggggacacucuc

SEQ ID NO: 152071 - RNA, 21 nt, Human
cagcccagcccauugacagug

SEQ ID NO: 152072 - RNA, 22 nt, Human
ucccacauaugcaauccugaau

SEQ ID NO: 152073 - RNA, 22 nt, Human
agaggcuuggaggugcaagguu

SEQ ID NO: 152074 - RNA, 22 nt, Human
aagugccaucauagcauggcug

SEQ ID NO: 152075 - RNA, 22 nt, Human
cccagcccccgagugucuggaa

SEQ ID NO: 152076 - RNA, 22 nt, Human
gaggagcucugcuccauccuuc

SEQ ID NO: 152077 - RNA, 22 nt, Human
guggcaguuuugacaucacaaa

SEQ ID NO: 152078 - RNA, 22 nt, Human
auccccacgauauagccaaagc

SEQ ID NO: 152079 - RNA, 21 nt, Human
gggagggauggaaaugauguu

SEQ ID NO: 152080 - RNA, 22 nt, Human
aggacaagcuaaaggacuuccu

SEQ ID NO: 152081 - RNA, 22 nt, Human
ggcagagguagcuggaaccagg

SEQ ID NO: 152082 - RNA, 22 nt, Human
caaauacuacgauucuugcagu

SEQ ID NO: 152083 - RNA, 22 nt, Human
auagggccuaaaaaguauugcu

SEQ ID NO: 152084 - RNA, 22 nt, Human
gacacagagggcaccagauaug

SEQ ID NO: 152085 - RNA, 22 nt, Human
gauggcagguaguggucucauc

SEQ ID NO: 152086 - RNA, 22 nt, Human
uccacccugcuuucuuaucucc

SEQ ID NO: 152087 - RNA, 22 nt, Human
ccagcccugccagagagagcug

SEQ ID NO: 152088 - RNA, 22 nt, Human
gucacaggcaguaacuaggacc

SEQ ID NO: 152089 - RNA, 22 nt, Human
ucccacauuacccugacugaca

SEQ ID NO: 152090 - RNA, 22 nt, Human
uccaggaggaggaaggcugcca

SEQ ID NO: 152091 - RNA, 18 nt, Human
cuccuccacagccccugc

SEQ ID NO: 152092 - RNA, 22 nt, Human
aggagcugcagauucugccuug

SEQ ID NO: 152093 - RNA, 22 nt, Human
ccuggcagaaagaguuacaccu

SEQ ID NO: 152094 - RNA, 22 nt, Human
gccuccggagucacagugucuu

SEQ ID NO: 152095 - RNA, 22 nt, Human
gaggcacauauauacagagccc

SEQ ID NO: 152096 - RNA, 22 nt, Human
gaggggcuggguagggcaaccc

SEQ ID NO: 152097 - RNA, 22 nt, Human
uauucccagccucuuucuaucu

SEQ ID NO: 152098 - RNA, 22 nt, Human
caggagggcccgagacucuucc

SEQ ID NO: 152099 - RNA, 22 nt, Human
cucuccagccuuuagcccacgc

SEQ ID NO: 152100 - RNA, 22 nt, Human
gcacauacccacugucaagcac

SEQ ID NO: 152101 - RNA, 22 nt, Human
caggucccugcgccccggccuc

SEQ ID NO: 152102 - RNA, 22 nt, Human
cggcuggugucgggcacagcaa

SEQ ID NO: 152103 - RNA, 22 nt, Human
gaggacucugggcguguauggg

SEQ ID NO: 152104 - RNA, 19 nt, Human
uccuggcauuuguaggaaa

SEQ ID NO: 152105 - RNA, 22 nt, Human
acaggugguaaaauggacuguc

SEQ ID NO: 152106 - RNA, 22 nt, Human
ccagcccuuagauaaaccuggc

SEQ ID NO: 152107 - RNA, 22 nt, Human
uggcacagggcuuggucgcuca

SEQ ID NO: 152108 - RNA, 21 nt, Human
cacacagugaucuauccacau

SEQ ID NO: 152109 - RNA, 22 nt, Human
guacacacuguuugaucauuuc

SEQ ID NO: 152110 - RNA, 22 nt, Human
uggcaguagauccagucucucu

SEQ ID NO: 152111 - RNA, 22 nt, Human
ugggagaaacugucucucccac

SEQ ID NO: 152112 - RNA, 22 nt, Human
ccuggcagacugugagggcagg

SEQ ID NO: 152113 - RNA, 22 nt, Human
ccucagcugcuucccuggagcc

SEQ ID NO: 152114 - RNA, 22 nt, Human
cagugggggggccaugcugcag

SEQ ID NO: 152115 - RNA, 22 nt, Human
gugugggaaggcuaggaugcug

SEQ ID NO: 152116 - RNA, 18 nt, Human
cuccuggcugauggugag

SEQ ID NO: 152117 - RNA, 17 nt, Human
ugcuggcaacauacaaa

SEQ ID NO: 152118 - RNA, 21 nt, Human
agagucugagugugcaagggc

SEQ ID NO: 152119 - RNA, 22 nt, Human
ccacagaccuuggcuuccaccu

SEQ ID NO: 152120 - RNA, 22 nt, Human
agaaagaggaugcagaucucau

SEQ ID NO: 152121 - RNA, 22 nt, Human
ccuccagcgcgauccacuccgg

SEQ ID NO: 152122 - RNA, 22 nt, Human
caccagggccccaggcugugcc

SEQ ID NO: 152123 - RNA, 22 nt, Human
uccuggcauugugcagggugug

SEQ ID NO: 152124 - RNA, 22 nt, Human
ggagucugcucccagacaugau

SEQ ID NO: 152125 - RNA, 22 nt, Human
agugccccaugggugccugggg

SEQ ID NO: 152126 - RNA, 22 nt, Human
gaggagcugcagggggagucua

SEQ ID NO: 152127 - RNA, 22 nt, Human
gcacacauucggauucuuaacc

SEQ ID NO: 152128 - RNA, 20 nt, Human
cugcuccacccggcucucag

SEQ ID NO: 152129 - RNA, 19 nt, Human
cugagagaugcuucacaca

SEQ ID NO: 152130 - RNA, 22 nt, Human
agcacaggaacauggagauggg

SEQ ID NO: 152131 - RNA, 22 nt, Human
acccacccuacuagcagugucc

SEQ ID NO: 152132 - RNA, 22 nt, Human
caggacaaagcccuuugagaaa

SEQ ID NO: 152133 - RNA, 22 nt, Human
uauuacagaaucaggcauaacu

SEQ ID NO: 152134 - RNA, 22 nt, Human
ucuggcagagauauccauccca

SEQ ID NO: 152135 - RNA, 22 nt, Human
gucacaggccuggaugaggggc

SEQ ID NO: 152136 - RNA, 22 nt, Human
cccuuccuugauuuuaacugga

SEQ ID NO: 152137 - RNA, 22 nt, Human
gacuguggggggcggacacaag

SEQ ID NO: 152138 - RNA, 22 nt, Human
cacacagaugguaagggaggga

SEQ ID NO: 152139 - RNA, 22 nt, Human
cuccucuguauugauugggacu

SEQ ID NO: 152140 - RNA, 18 nt, Human
ccuagccuccaagcucau

SEQ ID NO: 152141 - RNA, 22 nt, Human
acuggcagcuguaggaugcaug

SEQ ID NO: 152142 - RNA, 22 nt, Human
cccacacauuuuucacuuaccg

SEQ ID NO: 152143 - RNA, 22 nt, Human
acuggcagccacaacuggcagg

SEQ ID NO: 152144 - RNA, 22 nt, Human
auacaugacucacacauucugc

SEQ ID NO: 152145 - RNA, 22 nt, Human
ccuggcagggcugcaguaaugg

SEQ ID NO: 152146 - RNA, 22 nt, Human
uuccaggcaugucagacauagg

SEQ ID NO: 152147 - RNA, 22 nt, Human
ugcuccagugccugccccacag

SEQ ID NO: 152148 - RNA, 22 nt, Human
ucuggcaggucaaucauucuuu

SEQ ID NO: 152149 - RNA, 22 nt, Human
cugagccagggccacacaugga

SEQ ID NO: 152150 - RNA, 22 nt, Human
cacaaaaguaggaggcaggcgg

SEQ ID NO: 152151 - RNA, 22 nt, Human
acauacacaugaauauauuuuu

SEQ ID NO: 152152 - RNA, 23 nt, Human
acauacauggagauaaagugaug

SEQ ID NO: 152153 - RNA, 22 nt, Human
acacacagaaggaagccccacu

SEQ ID NO: 152154 - RNA, 22 nt, Human
ugggacucacucuuuuggccag

SEQ ID NO: 152155 - RNA, 21 nt, Human
uccuguaagcuuggguggcuc

SEQ ID NO: 152156 - RNA, 22 nt, Human
ccuggcagguagcauugaggag

SEQ ID NO: 152157 - RNA, 22 nt, Human
uacacacagaggccaugggauu

SEQ ID NO: 152158 - RNA, 22 nt, Human
acacauuugcauaauaccucau

SEQ ID NO: 152159 - RNA, 22 nt, Human
guacacacuauguauuguacac

SEQ ID NO: 152160 - RNA, 22 nt, Human
uccugagcuacaguaguaugau

SEQ ID NO: 152161 - RNA, 22 nt, Human
cuguccuccagacgacaguccc

SEQ ID NO: 152162 - RNA, 22 nt, Human
uuccaggccgggcaggaaacac

SEQ ID NO: 152163 - RNA, 22 nt, Human
ucuggcagggguucugcacuug

SEQ ID NO: 152164 - RNA, 20 nt, Human
gauacacagcacagagggcc

SEQ ID NO: 152165 - RNA, 22 nt, Human
uggcgucucucauaaguaugug

SEQ ID NO: 152166 - RNA, 22 nt, Human
ucuggcagcuauccucuggcca

SEQ ID NO: 152167 - RNA, 23 nt, Human
uugggaaauaguuaagacaugag

SEQ ID NO: 152168 - RNA, 22 nt, Human
ccuggcagcgugccgagcugcg

SEQ ID NO: 152169 - RNA, 22 nt, Human
aggguagggcccggagacagac

SEQ ID NO: 152170 - RNA, 22 nt, Human
ccuucucucugaagaccccaaa

SEQ ID NO: 152171 - RNA, 22 nt, Human
guccacagagggcugggcaggc

SEQ ID NO: 152172 - RNA, 22 nt, Human
ucccagccuuucuuuucugcug

SEQ ID NO: 152173 - RNA, 22 nt, Human
aaagagucuggcacuguaccag

SEQ ID NO: 152174 - RNA, 22 nt, Human
ucacauaaauuuaccagaugau

SEQ ID NO: 152175 - RNA, 22 nt, Human
ucuggcagagugauaggauaag

SEQ ID NO: 152176 - RNA, 22 nt, Human
cgcauacauagaaacacacaga

SEQ ID NO: 152177 - RNA, 22 nt, Human
caugagauaauuuuucuccagu

SEQ ID NO: 152178 - RNA, 22 nt, Human
gaaagaagcuuuagauggcuau

SEQ ID NO: 152179 - RNA, 22 nt, Human
gcacaggaugauggguugaggg

SEQ ID NO: 152180 - RNA, 22 nt, Human
uuccaggcuauccggugaaggg

SEQ ID NO: 152181 - RNA, 22 nt, Human
guugggaagcagauggaugagc

SEQ ID NO: 152182 - RNA, 22 nt, Human
uggcaguggauaggggagcggu

SEQ ID NO: 152183 - RNA, 22 nt, Human
gcuggcaggguucucacugaaa

SEQ ID NO: 152184 - RNA, 22 nt, Human
ggccucucagggcagagacccu

SEQ ID NO: 152185 - RNA, 22 nt, Human
cccagccuuugcuuccugguuc

SEQ ID NO: 152186 - RNA, 22 nt, Human
ccuucuucuguguggcccaaga

SEQ ID NO: 152187 - RNA, 22 nt, Human
guccuggcccacuggcaggcug

SEQ ID NO: 152188 - RNA, 22 nt, Human
caucacagaaauaaacauaccu

SEQ ID NO: 152189 - RNA, 19 nt, Human
gggagcugaggucuuuggu

SEQ ID NO: 152190 - RNA, 22 nt, Human
acacauaagaaacuacaaagag

SEQ ID NO: 152191 - RNA, 22 nt, Human
ucuggcaggguguguauuuaca

SEQ ID NO: 152192 - RNA, 22 nt, Human
cccagcccaucucaaaggucua

SEQ ID NO: 152193 - RNA, 22 nt, Human
ccuccccaugacccggugcugg

SEQ ID NO: 152194 - RNA, 20 nt, Human
gcuccaggucagagaggacg

SEQ ID NO: 152195 - RNA, 22 nt, Human
gauggccuggguccccuuccgg

SEQ ID NO: 152196 - RNA, 22 nt, Human
ucccugcccucagugcacccgg

SEQ ID NO: 152197 - RNA, 22 nt, Human
agggagacacaugaggaaguca

SEQ ID NO: 152198 - RNA, 22 nt, Human
cacacacaguuuuguauucugu

SEQ ID NO: 152199 - RNA, 22 nt, Human
gcuccaggugucccagguaaaa

SEQ ID NO: 152200 - RNA, 23 nt, Human
gcccacccucagcguccucacgg

SEQ ID NO: 152201 - RNA, 22 nt, Human
ucccacccauccugcaucucuu

SEQ ID NO: 152202 - RNA, 22 nt, Human
guccucugcuucaugcccugau

SEQ ID NO: 152203 - RNA, 22 nt, Human
gccuggcacucaaucaucugcu

SEQ ID NO: 152204 - RNA, 22 nt, Human
cuaugagaagaaaacaagauua

SEQ ID NO: 152205 - RNA, 22 nt, Human
gccucaggccgcccugcugcuc

SEQ ID NO: 152206 - RNA, 19 nt, Human
ucuggcagguaauuaggga

SEQ ID NO: 152207 - RNA, 22 nt, Human
gguggcauaagaacacuaaaga

SEQ ID NO: 152208 - RNA, 22 nt, Human
aggaggcuuuugcaggugccac

SEQ ID NO: 152209 - RNA, 22 nt, Human
ucuggcagagucagugcacaca

SEQ ID NO: 152210 - RNA, 22 nt, Human
acagguggccccgagggagugg

SEQ ID NO: 152211 - RNA, 22 nt, Human
ucccaccccuugacucuuuaag

SEQ ID NO: 152212 - RNA, 22 nt, Human
gauggccuuguuuucucccuuc

SEQ ID NO: 152213 - RNA, 22 nt, Human
gcacacacaugugaguacaugc

SEQ ID NO: 152214 - RNA, 22 nt, Human
aucacagagauugcuuuuaaaa

SEQ ID NO: 152215 - RNA, 22 nt, Human
uuccaggcuucucuggggcguc

SEQ ID NO: 152216 - RNA, 22 nt, Human
ccuggcagccucagccaauucu

SEQ ID NO: 152217 - RNA, 22 nt, Human
acaucacagagcccagauaaag

SEQ ID NO: 152218 - RNA, 22 nt, Human
auccaggccccaagaccccgac

SEQ ID NO: 152219 - RNA, 22 nt, Human
ucacacacauuugcugucugau

SEQ ID NO: 152220 - RNA, 22 nt, Human
ucuggcagaagugcugucagua

SEQ ID NO: 152221 - RNA, 22 nt, Human
ucuggcagcaagucuguuucuc

SEQ ID NO: 152222 - RNA, 22 nt, Human
cccccaaaguuugcacggauaa

SEQ ID NO: 152223 - RNA, 22 nt, Human
aacacagaucaaaauauuuccu

SEQ ID NO: 152224 - RNA, 22 nt, Human
uuccacauuccuuacauucaua

SEQ ID NO: 152225 - RNA, 22 nt, Human
gaggcuguuaggagggacucug

SEQ ID NO: 152226 - RNA, 22 nt, Human
cuggccucuguguucaccauag

SEQ ID NO: 152227 - RNA, 22 nt, Human
agcacugugauuuauaacauuu

SEQ ID NO: 152228 - RNA, 22 nt, Human
cacacaguaggcacucauuaau

SEQ ID NO: 152229 - RNA, 22 nt, Human
ucacauacacuaggauauuuuu

SEQ ID NO: 152230 - RNA, 22 nt, Human
cacccacauggaaauucacagu

SEQ ID NO: 152231 - RNA, 22 nt, Human
aaauacugcugcuauuccuuuu

SEQ ID NO: 152232 - RNA, 22 nt, Human
ucuggcagguucccauguuaug

SEQ ID NO: 152233 - RNA, 22 nt, Human
uacacaacugacaaccauucug

SEQ ID NO: 152234 - RNA, 22 nt, Human
gacccauauaggacccuccaaa

SEQ ID NO: 152235 - RNA, 22 nt, Human
uccccacacuuucacuccuggc

SEQ ID NO: 152236 - RNA, 22 nt, Human
ucuggcagcagcaucaguggcu

SEQ ID NO: 152237 - RNA, 21 nt, Human
acauacauaccuuaccaccuu

SEQ ID NO: 152238 - RNA, 22 nt, Human
cccaggccagaacuugguugcu

SEQ ID NO: 152239 - RNA, 22 nt, Human
gcacauaaagggcaugggaggu

SEQ ID NO: 152240 - RNA, 22 nt, Human
uguuggaauuaggauacagagg

SEQ ID NO: 152241 - RNA, 22 nt, Human
acuggcaguggcagcagaaaga

SEQ ID NO: 152242 - RNA, 22 nt, Human
acuggcaguuugagaaugcauu

SEQ ID NO: 152243 - RNA, 22 nt, Human
ugguaagaacccaucagagaag

SEQ ID NO: 152244 - RNA, 22 nt, Human
cugagggucaacuugauuguau

SEQ ID NO: 152245 - RNA, 22 nt, Human
uggcagugggaauggacaaaca

SEQ ID NO: 152246 - RNA, 22 nt, Human
gguuccuucugaggucccugua

SEQ ID NO: 152247 - RNA, 22 nt, Human
acuggcagggggagccccgaga

SEQ ID NO: 152248 - RNA, 22 nt, Human
ccucuccuugcacccgucccgc

SEQ ID NO: 152249 - RNA, 22 nt, Human
gcuggcagagcucugggcuggg

SEQ ID NO: 152250 - RNA, 21 nt, Human
ucuggcagcaguuuguugagu

SEQ ID NO: 152251 - RNA, 22 nt, Human
aaagaucacgucccaggacucg

SEQ ID NO: 152252 - RNA, 22 nt, Human
agggaagaagcugguaguaggu

SEQ ID NO: 152253 - RNA, 23 nt, Human
acacugucucauggauagacugc

SEQ ID NO: 152254 - RNA, 22 nt, Human
agcacaggcuuuggugugaggg

SEQ ID NO: 152255 - RNA, 18 nt, Human
aggaaagaaaggcaggug

SEQ ID NO: 152256 - RNA, 22 nt, Human
gcuggcaggagaccauacccua

SEQ ID NO: 152257 - RNA, 22 nt, Human
ggccucucaugcccagagccaa

SEQ ID NO: 152258 - RNA, 22 nt, Human
ccucccuucaguagagcccaau

SEQ ID NO: 152259 - RNA, 22 nt, Human
uccuggcaguaauuugauguug

SEQ ID NO: 152260 - RNA, 22 nt, Human
uccuggcacccuuggguuggag

SEQ ID NO: 152261 - RNA, 22 nt, Human
auggccugaugcaccuguccca

SEQ ID NO: 152262 - RNA, 22 nt, Human
gucuggaaggaggagauggagc

SEQ ID NO: 152263 - RNA, 22 nt, Human
cccgagugucuacucacuccca

SEQ ID NO: 152264 - RNA, 22 nt, Human
ccuggcaggccccuccuggauu

SEQ ID NO: 152265 - RNA, 22 nt, Human
guacacacuauuuaaaguguuu

SEQ ID NO: 152266 - RNA, 22 nt, Human
ccuggcagcuguuuggcuuggc

SEQ ID NO: 152267 - RNA, 22 nt, Human
cacaauuuuaauacacagucaa

SEQ ID NO: 152268 - RNA, 22 nt, Human
uccugagcugccgcaucagcag

SEQ ID NO: 152269 - RNA, 22 nt, Human
gcuggcaguaaaggguuuggca

SEQ ID NO: 152270 - RNA, 22 nt, Human
uccccaccccagaacuacuagg

SEQ ID NO: 152271 - RNA, 22 nt, Human
cacacagaaccgcucgccacuu

SEQ ID NO: 152272 - RNA, 22 nt, Human
acaagagcauugcagguguguu

SEQ ID NO: 152273 - RNA, 22 nt, Human
cccacacacauuuaugauagga

SEQ ID NO: 152274 - RNA, 22 nt, Human
gacccggcuccaggcccagcag

SEQ ID NO: 152275 - RNA, 22 nt, Human
uccccacagcagaagaucugag

SEQ ID NO: 152276 - RNA, 22 nt, Human
gagagaaaagggggaauugauu

SEQ ID NO: 152277 - RNA, 22 nt, Human
cacccacauuccaucacucugc

SEQ ID NO: 152278 - RNA, 22 nt, Human
gaggagcugggacccugucauc

SEQ ID NO: 152279 - RNA, 22 nt, Human
aauggcagaggcaaagauggua

SEQ ID NO: 152280 - RNA, 22 nt, Human
uggcagagaacacacaugauuc

SEQ ID NO: 152281 - RNA, 18 nt, Human
gacacauccccaggccuc

SEQ ID NO: 152282 - RNA, 22 nt, Human
cuggcagucugguggaaggccu

SEQ ID NO: 152283 - RNA, 21 nt, Human
acacacucugagucuucuauu

SEQ ID NO: 152284 - RNA, 22 nt, Human
ugccugacugcugccaccacua

SEQ ID NO: 152285 - RNA, 22 nt, Human
acaucacacgccuuccaggagg

SEQ ID NO: 152286 - RNA, 22 nt, Human
cccugccucugaagcugcucag

SEQ ID NO: 152287 - RNA, 22 nt, Human
ccuggcagacagcacugaagcu

SEQ ID NO: 152288 - RNA, 22 nt, Human
uuccuggcagaggccccgacag

SEQ ID NO: 152289 - RNA, 22 nt, Human
ccacacagucaguuuccaagaa

SEQ ID NO: 152290 - RNA, 20 nt, Human
ugccuggccuuucucugccc

SEQ ID NO: 152291 - RNA, 22 nt, Human
uacacaucccagacucccagga

SEQ ID NO: 152292 - RNA, 21 nt, Human
ccacucaugacuccacucacc

SEQ ID NO: 152293 - RNA, 22 nt, Human
uggccuccccuaacagccucuu

SEQ ID NO: 152294 - RNA, 22 nt, Human
gcacacaguagggauucaauga

SEQ ID NO: 152295 - RNA, 22 nt, Human
ugguccuggaagguccugaggg

SEQ ID NO: 152296 - RNA, 22 nt, Human
ucccugccugacagcacccacc

SEQ ID NO: 152297 - RNA, 22 nt, Human
ucccacaugugaauccucaggu

SEQ ID NO: 152298 - RNA, 22 nt, Human
cacacacugacaccuuaucuug

SEQ ID NO: 152299 - RNA, 22 nt, Human
agaggcuucucggauggggcag

SEQ ID NO: 152300 - RNA, 22 nt, Human
ggcacagagcuuugucccaguu

SEQ ID NO: 152301 - RNA, 21 nt, Human
agaugcugaugcugcaggucc

SEQ ID NO: 152302 - RNA, 22 nt, Human
cccagccuacucugccauagca

SEQ ID NO: 152303 - RNA, 22 nt, Human
cacacacuguuaauguaggagu

SEQ ID NO: 152304 - RNA, 22 nt, Human
guccucuggugaaagcauuccc

SEQ ID NO: 152305 - RNA, 22 nt, Human
gcuggcagcuggaaguugggcu

SEQ ID NO: 152306 - RNA, 22 nt, Human
guccucuggccuuucccaggac

SEQ ID NO: 152307 - RNA, 22 nt, Human
ccaggcuguaagagugauguug

SEQ ID NO: 152308 - RNA, 22 nt, Human
uggcagggugccaguugcgagu

SEQ ID NO: 152309 - RNA, 22 nt, Human
cuugccucccucagcucacagc

SEQ ID NO: 152310 - RNA, 22 nt, Human
gagaccucuugguaucgcuagg

SEQ ID NO: 152311 - RNA, 22 nt, Human
agcagguugugauacacucaga

SEQ ID NO: 152312 - RNA, 22 nt, Human
uacacaucucugucaguaguga

SEQ ID NO: 152313 - RNA, 22 nt, Human
gucacacagggccuccaaauca

SEQ ID NO: 152314 - RNA, 23 nt, Human
aguguugguugggaagccaagca

SEQ ID NO: 152315 - RNA, 22 nt, Human
ccaggcccaggguacugaccaa

SEQ ID NO: 152316 - RNA, 22 nt, Human
gagaaagacguaggcugggagg

SEQ ID NO: 152317 - RNA, 22 nt, Human
acaaauccagugaacuccagug

SEQ ID NO: 152318 - RNA, 22 nt, Human
gggacaauggaggccucucucc

SEQ ID NO: 152319 - RNA, 22 nt, Human
acacauacauggggaagaugag

SEQ ID NO: 152320 - RNA, 21 nt, Human
uccccacauuucuaaacagac

SEQ ID NO: 152321 - RNA, 22 nt, Human
uccugugccaucucuagagacu

SEQ ID NO: 152322 - RNA, 22 nt, Human
uuccaggcugaugggccacagg

SEQ ID NO: 152323 - RNA, 22 nt, Human
gacacauagaucuaucucacuc

SEQ ID NO: 152324 - RNA, 22 nt, Human
aggcugcuucagcugcagggag

SEQ ID NO: 152325 - RNA, 22 nt, Human
aggcacaggaggugguaagaag

SEQ ID NO: 152326 - RNA, 22 nt, Human
ucccaccccggucaagggcuga

SEQ ID NO: 152327 - RNA, 22 nt, Human
uacacauccauguuuugacuuu

SEQ ID NO: 152328 - RNA, 22 nt, Human
ccccacaccugccgggcagcag

SEQ ID NO: 152329 - RNA, 22 nt, Human
ucccagccuggacccugccagu

SEQ ID NO: 152330 - RNA, 22 nt, Human
ccuggcagcuccguggccuucc

SEQ ID NO: 152331 - RNA, 18 nt, Human
gacaaaaguacagacaga

SEQ ID NO: 152332 - RNA, 22 nt, Human
uagauacaggcucucugagccu

SEQ ID NO: 152333 - RNA, 22 nt, Human
cacacaucuuaucccaguuauu

SEQ ID NO: 152334 - RNA, 22 nt, Human
guccuggcccaggaguacacau

SEQ ID NO: 152335 - RNA, 22 nt, Human
agggcugaagggaggugcucau

SEQ ID NO: 152336 - RNA, 22 nt, Human
uccaggcuuuuucaugcugucu

SEQ ID NO: 152337 - RNA, 22 nt, Human
ggcugaguugagaggauuacuu

SEQ ID NO: 152338 - RNA, 22 nt, Human
ggagacucggguucuagccuug

SEQ ID NO: 152339 - RNA, 22 nt, Human
cuccucuggguccugguggcca

SEQ ID NO: 152340 - RNA, 22 nt, Human
ggagccugaaaagucugcauuu

SEQ ID NO: 152341 - RNA, 22 nt, Human
gaggcacagucccgaggcaagg

SEQ ID NO: 152342 - RNA, 22 nt, Human
cucucugggcccaguuggcacc

SEQ ID NO: 152343 - RNA, 22 nt, Human
ucacacagcuccuuuccuuagu

SEQ ID NO: 152344 - RNA, 22 nt, Human
acuggcagaacuggugauuguc

SEQ ID NO: 152345 - RNA, 22 nt, Human
acacucuguaaugucacacucc

SEQ ID NO: 152346 - RNA, 22 nt, Human
cuggcaggagcauucacagagg

SEQ ID NO: 152347 - RNA, 22 nt, Human
aaagaaucagaagucucaaaca

SEQ ID NO: 152348 - RNA, 22 nt, Human
cuucccacuaguaucacagagc

SEQ ID NO: 152349 - RNA, 22 nt, Human
uacacaucacuguaucuuucag

SEQ ID NO: 152350 - RNA, 22 nt, Human
gaccugccugagcugccucugc

SEQ ID NO: 152351 - RNA, 22 nt, Human
gcuggcagggugguugagagag

SEQ ID NO: 152352 - RNA, 22 nt, Human
agggcugacagugaggagucaa

SEQ ID NO: 152353 - RNA, 22 nt, Human
ggcccagcgaggccaccuacag

SEQ ID NO: 152354 - RNA, 22 nt, Human
ggggcugagucagugggaagag

SEQ ID NO: 152355 - RNA, 22 nt, Human
caggcuggagugcaauggcaca

SEQ ID NO: 152356 - RNA, 22 nt, Human
ucuggcaggaccaugaagcgua

SEQ ID NO: 152357 - RNA, 22 nt, Human
auccaggcgaaugcagaaggcc

SEQ ID NO: 152358 - RNA, 22 nt, Human
ucuccugggaggacaaggaagg

SEQ ID NO: 152359 - RNA, 17 nt, Human
ugccagccugucccagg

SEQ ID NO: 152360 - RNA, 22 nt, Human
ggagcugaaggggugggcucag

SEQ ID NO: 152361 - RNA, 22 nt, Human
cuccuggcuuucccagaccagg

SEQ ID NO: 152362 - RNA, 22 nt, Human
cccugccuugggguccacaccg

SEQ ID NO: 152363 - RNA, 22 nt, Human
agggcugacaaauggcagugac

SEQ ID NO: 152364 - RNA, 22 nt, Human
cugagagaucaagccacaggau

SEQ ID NO: 152365 - RNA, 22 nt, Human
gcugcuaagcguuucuguucca

SEQ ID NO: 152366 - RNA, 22 nt, Human
cacauaagaaaugaauaugaga

SEQ ID NO: 152367 - RNA, 22 nt, Human
ccaucacaguccccaucgugau

SEQ ID NO: 152368 - RNA, 23 nt, Human
cauccaggagcugagucugacug

SEQ ID NO: 152369 - RNA, 22 nt, Human
cccuggcagagggggcaggugc

SEQ ID NO: 152370 - RNA, 22 nt, Human
uauucccauuccacuuaucaag

SEQ ID NO: 152371 - RNA, 22 nt, Human
gcuggcagucccaucagcuggg

SEQ ID NO: 152372 - RNA, 22 nt, Human
ucuggcagcucaguucaggucu

SEQ ID NO: 152373 - RNA, 22 nt, Human
gaggagcuguucccucaccucu

SEQ ID NO: 152374 - RNA, 22 nt, Human
acacacaugguauuguucagaa

SEQ ID NO: 152375 - RNA, 22 nt, Human
auccucuguggauuacaccuag

SEQ ID NO: 152376 - RNA, 22 nt, Human
ucuggcagaaggcagaaauuca

SEQ ID NO: 152377 - RNA, 22 nt, Human
uuggaacaugccgggguccagg

SEQ ID NO: 152378 - RNA, 22 nt, Human
cugcaggacgaccgccucaucu

SEQ ID NO: 152379 - RNA, 23 nt, Human
ccuggcagcaaacgaggagguua

SEQ ID NO: 152380 - RNA, 19 nt, Human
ugccuggcaccagcuccac

SEQ ID NO: 152381 - RNA, 22 nt, Human
guccucugcccaggucaagguu

SEQ ID NO: 152382 - RNA, 23 nt, Human
uccuuccuuugagaggcuccauc

SEQ ID NO: 152383 - RNA, 19 nt, Human
ccuuccuccccagggccau

SEQ ID NO: 152384 - RNA, 22 nt, Human
cauuacaaccccaaauuacaaa

SEQ ID NO: 152385 - RNA, 22 nt, Human
ugccagccagggaagcucaccc

SEQ ID NO: 152386 - RNA, 21 nt, Human
ccagcccagcugugucccagc

SEQ ID NO: 152387 - RNA, 22 nt, Human
gcuggcagcauuagacccuggg

SEQ ID NO: 152388 - RNA, 22 nt, Human
accugccuaucagcugccugcu

SEQ ID NO: 152389 - RNA, 22 nt, Human
gcuggcagggacagcugcgugu

SEQ ID NO: 152390 - RNA, 22 nt, Human
caggauggucucgaucuccuga

SEQ ID NO: 152391 - RNA, 22 nt, Human
acacacucaauugcauaagcac

SEQ ID NO: 152392 - RNA, 22 nt, Human
ccccacccucgcuccauuucgg

SEQ ID NO: 152393 - RNA, 22 nt, Human
gacacagaaggucacauguuca

SEQ ID NO: 152394 - RNA, 22 nt, Human
agggacucccugggccgacacg

SEQ ID NO: 152395 - RNA, 22 nt, Human
ucacacauuucucaaguguagg

SEQ ID NO: 152396 - RNA, 19 nt, Human
acacauuugcacaauccac

SEQ ID NO: 152397 - RNA, 22 nt, Human
cugagcagugguucuugagcgc

SEQ ID NO: 152398 - RNA, 20 nt, Human
auacacaugcagacagaugc

SEQ ID NO: 152399 - RNA, 22 nt, Human
ucaggcccuuugcugcugcccc

SEQ ID NO: 152400 - RNA, 22 nt, Human
guccucugucccuggggcacgg

SEQ ID NO: 152401 - RNA, 22 nt, Human
ucuccacacuuucucucccagg

SEQ ID NO: 152402 - RNA, 22 nt, Human
ccugccuucagcccugaagucu

SEQ ID NO: 152403 - RNA, 22 nt, Human
gcacacaggggaguucucagaa

SEQ ID NO: 152404 - RNA, 22 nt, Human
gaaagacuuccuuugagaguac

SEQ ID NO: 152405 - RNA, 22 nt, Human
uccccacacagauacagaguag

SEQ ID NO: 152406 - RNA, 22 nt, Human
gcuggcaguuuccucaccgagg

SEQ ID NO: 152407 - RNA, 22 nt, Human
gccagguugcugacgacgaucu

SEQ ID NO: 152408 - RNA, 22 nt, Human
cagccaggauggagaacuguug

SEQ ID NO: 152409 - RNA, 22 nt, Human
cacauacauacguauguauaca

SEQ ID NO: 152410 - RNA, 22 nt, Human
agguagggaagaaggcaugaaa

SEQ ID NO: 152411 - RNA, 22 nt, Human
guccucuguuuccaucugacuu

SEQ ID NO: 152412 - RNA, 22 nt, Human
guccucuguagggcugggccac

SEQ ID NO: 152413 - RNA, 22 nt, Human
gagacacacauucuggagagaa

SEQ ID NO: 152414 - RNA, 22 nt, Human
gcuggcagacugggggcagaac

SEQ ID NO: 152415 - RNA, 22 nt, Human
uggcagagagacucuccuugau

SEQ ID NO: 152416 - RNA, 22 nt, Human
uccuggcagggucuaggucuag

SEQ ID NO: 152417 - RNA, 22 nt, Human
acaguucccgucuugcacagcu

SEQ ID NO: 152418 - RNA, 22 nt, Human
aacacauaggcagagcaugaca

SEQ ID NO: 152419 - RNA, 20 nt, Human
ucccucccuccagcucuggg

SEQ ID NO: 152420 - RNA, 22 nt, Human
cuuacaaauacacuuaggagag

SEQ ID NO: 152421 - RNA, 22 nt, Human
agaggccuccgaaaggugggcu

SEQ ID NO: 152422 - RNA, 22 nt, Human
acaauucugaugguuucccagu

SEQ ID NO: 152423 - RNA, 22 nt, Human
uccaggcaaaaaccaacuacag

SEQ ID NO: 152424 - RNA, 22 nt, Human
ucuggcaggccuugucaaucug

SEQ ID NO: 152425 - RNA, 22 nt, Human
ucaggcccuucucccaggacuc

SEQ ID NO: 152426 - RNA, 22 nt, Human
cccagccugugacagccguccu

SEQ ID NO: 152427 - RNA, 22 nt, Human
uccuggcagcccgcaggugcug

SEQ ID NO: 152428 - RNA, 22 nt, Human
ucaucacauaugucaugauuug

SEQ ID NO: 152429 - RNA, 22 nt, Human
gccgggaccaaggccacggagc

SEQ ID NO: 152430 - RNA, 22 nt, Human
agccagggucucucgcucuguu

SEQ ID NO: 152431 - RNA, 22 nt, Human
ucuggcaguuccuuguugauau

SEQ ID NO: 152432 - RNA, 22 nt, Human
uacauuccuguuagcaucuaag

SEQ ID NO: 152433 - RNA, 22 nt, Human
aggccacaguacuuugcagacc

SEQ ID NO: 152434 - RNA, 22 nt, Human
cauucccacguguucuuugcuu

SEQ ID NO: 152435 - RNA, 22 nt, Human
aggaggcugggcacaguggccu

SEQ ID NO: 152436 - RNA, 22 nt, Human
cacauacugagaaucacaccca

SEQ ID NO: 152437 - RNA, 22 nt, Human
gacacagauaucucugagauua

SEQ ID NO: 152438 - RNA, 22 nt, Human
ccagguccuguuuucaccacag

SEQ ID NO: 152439 - RNA, 20 nt, Human
gagucacagaagaagcugaa

SEQ ID NO: 152440 - RNA, 22 nt, Human
cucagccccaauucuccccauu

SEQ ID NO: 152441 - RNA, 19 nt, Human
gcuggcagaauuuugaacc

SEQ ID NO: 152442 - RNA, 22 nt, Human
aggccuccagccacaugccagu

SEQ ID NO: 152443 - RNA, 22 nt, Human
cacacagacagcucucugaaga

SEQ ID NO: 152444 - RNA, 22 nt, Human
agacacauaggaccacacugug

SEQ ID NO: 152445 - RNA, 22 nt, Human
ucuggcaggcaaucggcucugg

SEQ ID NO: 152446 - RNA, 22 nt, Human
cccagccucuguuugcuccucu

SEQ ID NO: 152447 - RNA, 20 nt, Human
cccagccccuaccuguugcc

SEQ ID NO: 152448 - RNA, 21 nt, Human
guacacacagguggaugggcu

SEQ ID NO: 152449 - RNA, 22 nt, Human
guccucuguguaggcugcagac

SEQ ID NO: 152450 - RNA, 22 nt, Human
auggcagacgaggcagcagggg

SEQ ID NO: 152451 - RNA, 22 nt, Human
cccuuccuugugacuggugggg

SEQ ID NO: 152452 - RNA, 22 nt, Human
cacacaucaaccuagacauugu

SEQ ID NO: 152453 - RNA, 22 nt, Human
guccucuggagguuuuuaggug

SEQ ID NO: 152454 - RNA, 22 nt, Human
acacacagaguuuauacaggca

SEQ ID NO: 152455 - RNA, 22 nt, Human
acacacuggcccccaguacuga

SEQ ID NO: 152456 - RNA, 22 nt, Human
uuccaggcucccuuggaggugu

SEQ ID NO: 152457 - RNA, 21 nt, Human
uccacccucucugcucccagu

SEQ ID NO: 152458 - RNA, 20 nt, Human
cccacacccuucccacuugg

SEQ ID NO: 152459 - RNA, 22 nt, Human
ucacacacauggauaguauuuu

SEQ ID NO: 152460 - RNA, 22 nt, Human
acacacuuuaaauuaaaccucu

SEQ ID NO: 152461 - RNA, 22 nt, Human
gagaaagauuguccuucagggg

SEQ ID NO: 152462 - RNA, 22 nt, Human
uccucuccaugucucacgccac

SEQ ID NO: 152463 - RNA, 22 nt, Human
ccucucagcgauuccucuugga

SEQ ID NO: 152464 - RNA, 22 nt, Human
gaugccuggcacccagcaagga

SEQ ID NO: 152465 - RNA, 22 nt, Human
ucuggcagcucuccucggcgga

SEQ ID NO: 152466 - RNA, 22 nt, Human
aggaggcugaacuagggucugg

SEQ ID NO: 152467 - RNA, 22 nt, Human
guccuggcaccucacuggcuac

SEQ ID NO: 152468 - RNA, 22 nt, Human
cccuuccucccaggcuucugug

SEQ ID NO: 152469 - RNA, 22 nt, Human
cagaaagaccugggcucaagag

SEQ ID NO: 152470 - RNA, 22 nt, Human
ccuggcagcaggugggcccgug

SEQ ID NO: 152471 - RNA, 22 nt, Human
cuccuggcaguuccccuuguca

SEQ ID NO: 152472 - RNA, 22 nt, Human
cuugggaaugcuaacagaugac

SEQ ID NO: 152473 - RNA, 22 nt, Human
acuggcagaauugaauaguugu

SEQ ID NO: 152474 - RNA, 22 nt, Human
ccagugcccagcugcccaggca

SEQ ID NO: 152475 - RNA, 18 nt, Human
gccugcucugcucucccc

SEQ ID NO: 152476 - RNA, 18 nt, Human
ccuggcagccaugcgcgc

SEQ ID NO: 152477 - RNA, 22 nt, Human
acccacaccuccguauaucacu

SEQ ID NO: 152478 - RNA, 22 nt, Human
acacagaguuugacacauggga

SEQ ID NO: 152479 - RNA, 22 nt, Human
aggcaguguguagcuggaagag

SEQ ID NO: 152480 - RNA, 22 nt, Human
acuggcagagacccugauggcc

SEQ ID NO: 152481 - RNA, 22 nt, Human
uggcagugucuuaucaggagug

SEQ ID NO: 152482 - RNA, 22 nt, Human
gaaaagaguccugugugaggag

SEQ ID NO: 152483 - RNA, 22 nt, Human
uccaaggcuccggcccuggcgu

SEQ ID NO: 152484 - RNA, 20 nt, Human
ccuggcaggcggguuacuua

SEQ ID NO: 152485 - RNA, 22 nt, Human
gggccccuugcugcucugcugg

SEQ ID NO: 152486 - RNA, 22 nt, Human
cagggacaauggcagagccuga

SEQ ID NO: 152487 - RNA, 22 nt, Human
cuggccucauagccaagcugug

SEQ ID NO: 152488 - RNA, 22 nt, Human
ucccagccuuccagucugguuu

SEQ ID NO: 152489 - RNA, 22 nt, Human
cugcaggagcaaagccucugcu

SEQ ID NO: 152490 - RNA, 22 nt, Human
acaggugguagaguggaaagag

SEQ ID NO: 152491 - RNA, 22 nt, Human
acacaucuuagacugaaauaug

SEQ ID NO: 152492 - RNA, 21 nt, Human
ccuagccucuuacccagcuuu

SEQ ID NO: 152493 - RNA, 17 nt, Human
agccugccccaugcugc

SEQ ID NO: 152494 - RNA, 22 nt, Human
ucccuccccacuucugagcuuu

SEQ ID NO: 152495 - RNA, 22 nt, Human
aguugggaguuauagacucuau

SEQ ID NO: 152496 - RNA, 22 nt, Human
gagauggccagugccaggacaa

SEQ ID NO: 152497 - RNA, 22 nt, Human
ucuggcaggauaucgaagugaa

SEQ ID NO: 152498 - RNA, 22 nt, Human
cacuguccaugcuugcuaaccc

SEQ ID NO: 152499 - RNA, 22 nt, Human
cccacccugggaagcuaggcag

SEQ ID NO: 152500 - RNA, 17 nt, Human
cccaggccgccgggagc

SEQ ID NO: 152501 - RNA, 22 nt, Human
gcuggcagagacaagaagacua

SEQ ID NO: 152502 - RNA, 22 nt, Human
cacauacaaggcacacuggagg

SEQ ID NO: 152503 - RNA, 22 nt, Human
agcacaggaccaaggaagcugu

SEQ ID NO: 152504 - RNA, 22 nt, Human
ugaccaggauacugcagggaug

SEQ ID NO: 152505 - RNA, 22 nt, Human
uugggaucucaaauccagcuau

SEQ ID NO: 152506 - RNA, 22 nt, Human
uacacagacucuucaauucaga

SEQ ID NO: 152507 - RNA, 22 nt, Human
cccagccuuccacccuggacua

SEQ ID NO: 152508 - RNA, 22 nt, Human
aagagcacuaacagagcugaua

SEQ ID NO: 152509 - RNA, 22 nt, Human
cagacagagucuucccaucagu

SEQ ID NO: 152510 - RNA, 22 nt, Human
cuggcacgcccacguaggcacu

SEQ ID NO: 152511 - RNA, 22 nt, Human
ggagcugaggcugaggccucac

SEQ ID NO: 152512 - RNA, 19 nt, Human
acuggcaguuucugcaugg

SEQ ID NO: 152513 - RNA, 19 nt, Human
cagcccucuuaccacugug

SEQ ID NO: 152514 - RNA, 22 nt, Human
uaagaacaguagaacaguaggu

SEQ ID NO: 152515 - RNA, 22 nt, Human
acaucugaggagaccagccucu

SEQ ID NO: 152516 - RNA, 22 nt, Human
ccuggcaggcaagaggaaggga

SEQ ID NO: 152517 - RNA, 22 nt, Human
gcuccaggagagggaagcagau

SEQ ID NO: 152518 - RNA, 22 nt, Human
uggaaagagguagaggaucugg

SEQ ID NO: 152519 - RNA, 22 nt, Human
aagagccagcuagugaagaggc

SEQ ID NO: 152520 - RNA, 22 nt, Human
acagguggggcacuuggagccu

SEQ ID NO: 152521 - RNA, 19 nt, Human
ccuugccugucccugcagc

SEQ ID NO: 152522 - RNA, 22 nt, Human
uuccuggcucacagcagugggg

SEQ ID NO: 152523 - RNA, 22 nt, Human
gacacuucaccuuucccagccu

SEQ ID NO: 152524 - RNA, 22 nt, Human
guugggaaggugaacaugaugc

SEQ ID NO: 152525 - RNA, 20 nt, Human
aagagucuuuacugagcuaa

SEQ ID NO: 152526 - RNA, 22 nt, Human
gguucccggaucuccgaguccc

SEQ ID NO: 152527 - RNA, 22 nt, Human
cacauacauucauguuacucua

SEQ ID NO: 152528 - RNA, 22 nt, Human
gcacacaugcaugcacaggagu

SEQ ID NO: 152529 - RNA, 22 nt, Human
cugccugcucaccagggcucug

SEQ ID NO: 152530 - RNA, 22 nt, Human
ccuccuggcuuuucccauugaa

SEQ ID NO: 152531 - RNA, 16 nt, Human
gcacacacaucaauga

SEQ ID NO: 152532 - RNA, 23 nt, Human
ugagggacaugguggcuucugag

SEQ ID NO: 152533 - RNA, 22 nt, Human
auggcagauggcuggagcaggu

SEQ ID NO: 152534 - RNA, 22 nt, Human
auggcagaccuccuggccacaa

SEQ ID NO: 152535 - RNA, 22 nt, Human
cagcccaggucucucuuccagu

SEQ ID NO: 152536 - RNA, 22 nt, Human
ccugaccuauuuuucucagcug

SEQ ID NO: 152537 - RNA, 22 nt, Human
guggcagucgcugacagauaca

SEQ ID NO: 152538 - RNA, 22 nt, Human
ugcagagagauccucaggguuu

SEQ ID NO: 152539 - RNA, 22 nt, Human
uucauugcaguucuucagguua

SEQ ID NO: 152540 - RNA, 22 nt, Human
ucuggcaguaauaggggagaga

SEQ ID NO: 152541 - RNA, 22 nt, Human
cucuccagaauaugccgccgug

SEQ ID NO: 152542 - RNA, 22 nt, Human
aaaaagucugcaaaggagguug

SEQ ID NO: 152543 - RNA, 22 nt, Human
ugcagagaagaggacaguucua

SEQ ID NO: 152544 - RNA, 22 nt, Human
uccccaccuaagauacccaucu

SEQ ID NO: 152545 - RNA, 22 nt, Human
cugccugcugcccuccagagcc

SEQ ID NO: 152546 - RNA, 21 nt, Human
acacacugaguuuuccacugu

SEQ ID NO: 152547 - RNA, 20 nt, Human
aaagagcccuuggagcaggc

SEQ ID NO: 152548 - RNA, 22 nt, Human
acacacagcgccuaccaugugc

SEQ ID NO: 152549 - RNA, 22 nt, Human
uuccuggccaagcagaguggaa

SEQ ID NO: 152550 - RNA, 22 nt, Human
ccuggcagcuccuccccggcgg

SEQ ID NO: 152551 - RNA, 22 nt, Human
cacuguccaauagauacauaau

SEQ ID NO: 152552 - RNA, 22 nt, Human
uccugagcacagagacaaggaa

SEQ ID NO: 152553 - RNA, 22 nt, Human
gcuggcagccaagugaagaggg

SEQ ID NO: 152554 - RNA, 22 nt, Human
cuuccucuagccuaguaaugcc

SEQ ID NO: 152555 - RNA, 22 nt, Human
uacaaaaguaauuacgguuuuu

SEQ ID NO: 152556 - RNA, 18 nt, Human
acacacacaccuguguau

SEQ ID NO: 152557 - RNA, 22 nt, Human
uccccacaucucugcaucaggc

SEQ ID NO: 152558 - RNA, 22 nt, Human
gcuggcaggagccuuucccuuu

SEQ ID NO: 152559 - RNA, 22 nt, Human
ccacacagauaaguguuuucua

SEQ ID NO: 152560 - RNA, 22 nt, Human
gcagggacagggcagggccuuu

SEQ ID NO: 152561 - RNA, 22 nt, Human
ucuuuuucugcacacguguccc

SEQ ID NO: 152562 - RNA, 23 nt, Human
uaaauuaccuuuccagugcaggg

SEQ ID NO: 152563 - RNA, 22 nt, Human
guggcagugaaggucauagcau

SEQ ID NO: 152564 - RNA, 22 nt, Human
ggcaaggggucaggcugagaca

SEQ ID NO: 152565 - RNA, 22 nt, Human
ucaggcccagagucacggaucc

SEQ ID NO: 152566 - RNA, 19 nt, Human
uccuggcacaguggaacca

SEQ ID NO: 152567 - RNA, 22 nt, Human
gucaggacucugacccgucccg

SEQ ID NO: 152568 - RNA, 21 nt, Human
aaagagcccgcugagagguuc

SEQ ID NO: 152569 - RNA, 22 nt, Human
uggcaguggcucagagugcaga

SEQ ID NO: 152570 - RNA, 22 nt, Human
gccuccggaguugcagugucuu

SEQ ID NO: 152571 - RNA, 22 nt, Human
gcacucuccuggcugccacagu

SEQ ID NO: 152572 - RNA, 22 nt, Human
cacauacuuguguguacauaug

SEQ ID NO: 152573 - RNA, 22 nt, Human
ggaggacaggggcugcagcaca

SEQ ID NO: 152574 - RNA, 22 nt, Human
ugaguagagaauucagcuaagg

SEQ ID NO: 152575 - RNA, 22 nt, Human
ugcagagaaaacuccuggguac

SEQ ID NO: 152576 - RNA, 22 nt, Human
aggaagaaccuaagaaagucuc

SEQ ID NO: 152577 - RNA, 22 nt, Human
ccuggcaguggugaagaagagg

SEQ ID NO: 152578 - RNA, 22 nt, Human
aggacacacagaauacaaaucc

SEQ ID NO: 152579 - RNA, 22 nt, Human
gcuccaggcagcauaguggaug

SEQ ID NO: 152580 - RNA, 22 nt, Human
uucccacagagauuacauugaa

SEQ ID NO: 152581 - RNA, 23 nt, Human
ucacauaauccuucauccacagg

SEQ ID NO: 152582 - RNA, 22 nt, Human
uccacccugcuuuugucuuuga

SEQ ID NO: 152583 - RNA, 22 nt, Human
ucccacaggaaaguagacauug

SEQ ID NO: 152584 - RNA, 22 nt, Human
ucccacaccugucuauuccuag

SEQ ID NO: 152585 - RNA, 22 nt, Human
uacugacacaaagccaaucccu

SEQ ID NO: 152586 - RNA, 22 nt, Human
auuccacagcuacaucaaucua

SEQ ID NO: 152587 - RNA, 20 nt, Human
agaggcuuccuugggaggag

SEQ ID NO: 152588 - RNA, 22 nt, Human
gcugcgccggaucccacguucc

SEQ ID NO: 152589 - RNA, 22 nt, Human
guacacacaaucucuggucagu

SEQ ID NO: 152590 - RNA, 22 nt, Human
guccucugaaguugugcaaugc

SEQ ID NO: 152591 - RNA, 22 nt, Human
ucacacaugcuaagccagagau

SEQ ID NO: 152592 - RNA, 22 nt, Human
gccuggcaauggccucaggaag

SEQ ID NO: 152593 - RNA, 21 nt, Human
uccugccuuaguccagagcag

SEQ ID NO: 152594 - RNA, 22 nt, Human
ccuggcaguuuugcccaggauu

SEQ ID NO: 152595 - RNA, 22 nt, Human
aguguggcaggaaugacuagaa

SEQ ID NO: 152596 - RNA, 22 nt, Human
aaagaucaaguaggcauggccu

SEQ ID NO: 152597 - RNA, 22 nt, Human
ugcucuguauucuauggcaguu

SEQ ID NO: 152598 - RNA, 22 nt, Human
cucaccccacuaccccuuggug

SEQ ID NO: 152599 - RNA, 22 nt, Human
ccuggcuccugccucugcaggg

SEQ ID NO: 152600 - RNA, 22 nt, Human
uuuaaauuuagaagaaacacug

SEQ ID NO: 152601 - RNA, 22 nt, Human
gaggagcugagccacguccugg

SEQ ID NO: 152602 - RNA, 22 nt, Human
gaggcugcuuugaugacaggag

SEQ ID NO: 152603 - RNA, 22 nt, Human
uccuggcagugcuuguuuugga

SEQ ID NO: 152604 - RNA, 22 nt, Human
ccuggcaguucaucaaauggca

SEQ ID NO: 152605 - RNA, 22 nt, Human
cccaggccuggucugggccagu

SEQ ID NO: 152606 - RNA, 22 nt, Human
acacaucaugccaaguuucacc

SEQ ID NO: 152607 - RNA, 22 nt, Human
cugccucuauaggaguccacca

SEQ ID NO: 152608 - RNA, 20 nt, Human
ccccacacuauugagcacuu

SEQ ID NO: 152609 - RNA, 22 nt, Human
uugggaaguuuaaugacagacu

SEQ ID NO: 152610 - RNA, 22 nt, Human
cuuggcaguuucggaaggauga

SEQ ID NO: 152611 - RNA, 22 nt, Human
ugccugccucuggcagcccugc

SEQ ID NO: 152612 - RNA, 23 nt, Human
uccaggagcaugcuggcuggcga

SEQ ID NO: 152613 - RNA, 22 nt, Human
cugccugccacguucagcugua

SEQ ID NO: 152614 - RNA, 21 nt, Human
agugccaguagguauggagga

SEQ ID NO: 152615 - RNA, 22 nt, Human
gaggcugcggggaggagccugc

SEQ ID NO: 152616 - RNA, 22 nt, Human
accugccucagugcagcuggau

SEQ ID NO: 152617 - RNA, 22 nt, Human
ggcagugagaggucuccugguc

SEQ ID NO: 152618 - RNA, 22 nt, Human
ucuugggauagugucucauggc

SEQ ID NO: 152619 - RNA, 22 nt, Human
gacacagacaguuagagguaau

SEQ ID NO: 152620 - RNA, 22 nt, Human
gccuggcaaggcccuguugacu

SEQ ID NO: 152621 - RNA, 22 nt, Human
cacaauguauauguauaucaaa

SEQ ID NO: 152622 - RNA, 22 nt, Human
gagaaagaugaagaguggcguu

SEQ ID NO: 152623 - RNA, 22 nt, Human
acuggcagagguuggacaccau

SEQ ID NO: 152624 - RNA, 19 nt, Human
uggcagguagugagcaguc

SEQ ID NO: 152625 - RNA, 22 nt, Human
uggcagagaacacggcugaucu

SEQ ID NO: 152626 - RNA, 22 nt, Human
auacacacugcuauccuuuuuu

SEQ ID NO: 152627 - RNA, 22 nt, Human
acccacacaucucuaauucagu

SEQ ID NO: 152628 - RNA, 22 nt, Human
ucccacccccuccaaggaggaa

SEQ ID NO: 152629 - RNA, 22 nt, Human
cacagagacagaagcacuuaug

SEQ ID NO: 152630 - RNA, 22 nt, Human
ccauacacacaccaaauuugua

SEQ ID NO: 152631 - RNA, 22 nt, Human
ccaccccaaaugaagaccucuc

SEQ ID NO: 152632 - RNA, 22 nt, Human
ucauggcacuuagcacaguccu

SEQ ID NO: 152633 - RNA, 22 nt, Human
aagagagagugcgcucacagaa

SEQ ID NO: 152634 - RNA, 22 nt, Human
acauaaugagcucuuuauaaau

SEQ ID NO: 152635 - RNA, 22 nt, Human
uaaguauguuagaaaaucaagu

SEQ ID NO: 152636 - RNA, 22 nt, Human
gaaggcaagcagcauaaauguc

SEQ ID NO: 152637 - RNA, 17 nt, Human
gagguaggaagugaguc

SEQ ID NO: 152638 - RNA, 22 nt, Human
cugagguagggacgugccguag

SEQ ID NO: 152639 - RNA, 22 nt, Human
aaauugcaaaaguacuuuuagg

SEQ ID NO: 152640 - RNA, 22 nt, Human
caagauauguccuguuacuaag

SEQ ID NO: 152641 - RNA, 22 nt, Human
ugaaagcucugucaucauuccu

SEQ ID NO: 152642 - RNA, 22 nt, Human
cugagguagaggaaauguagcu

SEQ ID NO: 152643 - RNA, 22 nt, Human
aaauugaauuugggaaacauug

SEQ ID NO: 152644 - RNA, 22 nt, Human
cuaagguuggcaguggaauugg

SEQ ID NO: 152645 - RNA, 22 nt, Human
augaauaaaacauuuuaaucag

SEQ ID NO: 152646 - RNA, 22 nt, Human
auuguugacuugauuacucaac

SEQ ID NO: 152647 - RNA, 22 nt, Human
uggaaauaguugugagucaggc

SEQ ID NO: 152648 - RNA, 22 nt, Human
ggaaaaugggaaccugaagcca

SEQ ID NO: 152649 - RNA, 22 nt, Human
uuccggaauggcaggguagcuc

SEQ ID NO: 152650 - RNA, 22 nt, Human
uguuaguauuggcaaauuuguu

SEQ ID NO: 152651 - RNA, 22 nt, Human
aauacagauggcaugugaagau

SEQ ID NO: 152652 - RNA, 22 nt, Human
uaaaugaaaggguuuaauuuau

SEQ ID NO: 152653 - RNA, 22 nt, Human
ugcuccaggcugcugaagaucu

SEQ ID NO: 152654 - RNA, 22 nt, Human
uaacuaggauuacaagcgugcg

SEQ ID NO: 152655 - RNA, 23 nt, Human
aguacauuugacccaaauaagcu

SEQ ID NO: 152656 - RNA, 22 nt, Human
uggaaaauauuuaggugaauga

SEQ ID NO: 152657 - RNA, 22 nt, Human
cauuguuggcagagggacagag

SEQ ID NO: 152658 - RNA, 18 nt, Human
cuacauucauaggaaagg

SEQ ID NO: 152659 - RNA, 22 nt, Human
cagugcaacguugugcauucaa

SEQ ID NO: 152660 - RNA, 22 nt, Human
cagaaagcaguugucaaugggc

SEQ ID NO: 152661 - RNA, 22 nt, Human
cucaggaaaauauugaagaagu

SEQ ID NO: 152662 - RNA, 22 nt, Human
uuuaaacuaacaguacacguug

SEQ ID NO: 152663 - RNA, 22 nt, Human
aaauacaguggcagcagauaau

SEQ ID NO: 152664 - RNA, 22 nt, Human
agaaaagaggcuuucuaagcau

SEQ ID NO: 152665 - RNA, 21 nt, Human
acagaaguggcuuggucucag

SEQ ID NO: 152666 - RNA, 22 nt, Human
aaggauuuuuggaaugagaugg

SEQ ID NO: 152667 - RNA, 22 nt, Human
auaucuaggcugaauguaaaau

SEQ ID NO: 152668 - RNA, 22 nt, Human
acauucaggccacaguggaguc

SEQ ID NO: 152669 - RNA, 22 nt, Human
ucagguagugguuaaguucugu

SEQ ID NO: 152670 - RNA, 22 nt, Human
aaguuauugguggagagcacug

SEQ ID NO: 152671 - RNA, 22 nt, Human
aaagcuauuuuauugcagcucu

SEQ ID NO: 152672 - RNA, 22 nt, Human
acagaagugacaauuucuuggg

SEQ ID NO: 152673 - RNA, 22 nt, Human
aguacaagugaugugguaaaaa

SEQ ID NO: 152674 - RNA, 22 nt, Human
aauaaguacuuggggauaacuu

SEQ ID NO: 152675 - RNA, 22 nt, Human
caaucaaugcugcuaguuccuu

SEQ ID NO: 152676 - RNA, 22 nt, Human
aaauugcauuuuaaagguagau

SEQ ID NO: 152677 - RNA, 20 nt, Human
uuacagaaaugauguuauuu

SEQ ID NO: 152678 - RNA, 22 nt, Human
aguuauugagugcagagcaggg

SEQ ID NO: 152679 - RNA, 22 nt, Human
ugggaugagcuauauagaaagu

SEQ ID NO: 152680 - RNA, 22 nt, Human
auguaguauuuggaaauguaaa

SEQ ID NO: 152681 - RNA, 22 nt, Human
uuauugagcacauaguaugugg

SEQ ID NO: 152682 - RNA, 22 nt, Eastern equine encephalitis virus
caagucacugcaaagaugcuuu

SEQ ID NO: 152683 - RNA, 22 nt, Eastern equine encephalitis virus
cgccuaggcggauuaggauccc

SEQ ID NO: 152684 - RNA, 21 nt, Eastern equine encephalitis virus
acguaguucaccucguagcgu

SEQ ID NO: 152685 - RNA, 20 nt, Eastern equine encephalitis virus
gcucucgauguauaccacau

SEQ ID NO: 152686 - RNA, 21 nt, Eastern equine encephalitis virus
uggucgcacagugucgcuggc

SEQ ID NO: 152687 - RNA, 22 nt, Eastern equine encephalitis virus
ggguuaaucggcgccauaggcg

SEQ ID NO: 152688 - RNA, 22 nt, Eastern equine encephalitis virus
augcuaauguggucaacgcugu

SEQ ID NO: 152689 - RNA, 22 nt, Eastern equine encephalitis virus
guguggauauucgguagcagca

SEQ ID NO: 152690 - RNA, 22 nt, Human
cacugaaggacaguaggaaggg

SEQ ID NO: 152691 - RNA, 22 nt, Human
agcugggaggugggcagugaga

SEQ ID NO: 152692 - RNA, 22 nt, Human
acucugcuuauugcugcaggca

SEQ ID NO: 152693 - RNA, 22 nt, Human
cuauugaaaguguacaauucaa

SEQ ID NO: 152694 - RNA, 22 nt, Human
aagcagaaaaacugagcuccaa

SEQ ID NO: 152695 - RNA, 22 nt, Human
cauuucugcagaauugcucuuc

SEQ ID NO: 152696 - RNA, 22 nt, Human
aucaguuucuaccauguggaau

SEQ ID NO: 152697 - RNA, 20 nt, Human
caggcacacucauuccugcu

SEQ ID NO: 152698 - RNA, 22 nt, Human
agugcauauaugaagaguauga

SEQ ID NO: 152699 - RNA, 21 nt, Human
aaauguguuccauaaugcuuu

SEQ ID NO: 152700 - RNA, 22 nt, Human
uggcucagccuggcccuuucau

SEQ ID NO: 152701 - RNA, 22 nt, Human
uagagcauuuagaggggcagga

SEQ ID NO: 152702 - RNA, 22 nt, Human
aggccuggcaugagaccugaga

SEQ ID NO: 152703 - RNA, 17 nt, Human
gcagugaaaagagauca

SEQ ID NO: 152704 - RNA, 22 nt, Human
cuuccucccccacacacucacu

SEQ ID NO: 152705 - RNA, 22 nt, Human
cagagccauccaggugccuguu

SEQ ID NO: 152706 - RNA, 22 nt, Human
uaugcauaauuggauaaguaga

SEQ ID NO: 152707 - RNA, 22 nt, Human
gagugcagaugaacagaagauu

SEQ ID NO: 152708 - RNA, 22 nt, Human
cagagccccccuucugaucaca

SEQ ID NO: 152709 - RNA, 22 nt, Human
agggugcauguuugcaagagug

SEQ ID NO: 152710 - RNA, 22 nt, Human
agggugccuggaagccacucac

SEQ ID NO: 152711 - RNA, 22 nt, Human
guggcucuccauugacauggaa

SEQ ID NO: 152712 - RNA, 17 nt, Human
cugaggcccagggccca

SEQ ID NO: 152713 - RNA, 22 nt, Human
gcugcccagcaggccccagggg

SEQ ID NO: 152714 - RNA, 22 nt, Human
aggcacugauucuguuuuccau

SEQ ID NO: 152715 - RNA, 22 nt, Human
gcugcagcagaaguucucagag

SEQ ID NO: 152716 - RNA, 23 nt, Human
ccugcagcugcuggggcuccacc

SEQ ID NO: 152717 - RNA, 22 nt, Human
ggagcugcuccuucagccaagu

SEQ ID NO: 152718 - RNA, 22 nt, Human
agccacagcauguguguaugua

SEQ ID NO: 152719 - RNA, 22 nt, Human
gaggggcagaaugugaucaggg

SEQ ID NO: 152720 - RNA, 22 nt, Human
cuggagccuucaccaggggaaa

SEQ ID NO: 152721 - RNA, 19 nt, Human
uggcagggagugauauuag

SEQ ID NO: 152722 - RNA, 22 nt, Human
caaauguguaaggaaguguuag

SEQ ID NO: 152723 - RNA, 22 nt, Human
gagccugggacugggggucaug

SEQ ID NO: 152724 - RNA, 22 nt, Human
accuuuuuguucuguucucagc

SEQ ID NO: 152725 - RNA, 22 nt, Human
guuauaaauaccuaauaggauu

SEQ ID NO: 152726 - RNA, 22 nt, Human
gcugucccaugguugcaagaug

SEQ ID NO: 152727 - RNA, 22 nt, Human
cagagcugucauuugccaguga

SEQ ID NO: 152728 - RNA, 22 nt, Human
ugcugccagagagacagggacu

SEQ ID NO: 152729 - RNA, 18 nt, Human
gguggcucagucaugggg

SEQ ID NO: 152730 - RNA, 22 nt, Human
gugcauuucucauacacuaaau

SEQ ID NO: 152731 - RNA, 22 nt, Human
aaucagucauuagcucugaccu

SEQ ID NO: 152732 - RNA, 22 nt, Human
uaaaugcaguacaaauuguucu

SEQ ID NO: 152733 - RNA, 22 nt, Human
ggcagcucugaugaugcucugg

SEQ ID NO: 152734 - RNA, 22 nt, Human
cucugggcaaguaugauagaaa

SEQ ID NO: 152735 - RNA, 22 nt, Human
gggaagggagggaccucagucu

SEQ ID NO: 152736 - RNA, 18 nt, Human
gcccagaggucugggccc

SEQ ID NO: 152737 - RNA, 22 nt, Human
ccugcagaccacacucaguccu

SEQ ID NO: 152738 - RNA, 22 nt, Human
cugcuuccaugcaauggcaguc

SEQ ID NO: 152739 - RNA, 22 nt, Human
gagccagccgcaagagcuguga

SEQ ID NO: 152740 - RNA, 22 nt, Human
ccuccagcgcgauccacuccgg

SEQ ID NO: 152741 - RNA, 22 nt, Human
uuuuuccuuggaugugucucuc

SEQ ID NO: 152742 - RNA, 20 nt, Human
cuggguggcaagcaaggggg

SEQ ID NO: 152743 - RNA, 22 nt, Human
ucaugcccagagcaguaaauua

SEQ ID NO: 152744 - RNA, 18 nt, Human
uuucacaaccuccagagg

SEQ ID NO: 152745 - RNA, 22 nt, Human
gggcugcugcccaggaggcacc

SEQ ID NO: 152746 - RNA, 22 nt, Human
cguguggucccggcaaggcaag

SEQ ID NO: 152747 - RNA, 22 nt, Human
ugucauuuucuaaucuguuguc

SEQ ID NO: 152748 - RNA, 22 nt, Human
ucagggcaggacaguguaggcc

SEQ ID NO: 152749 - RNA, 22 nt, Human
ucucagagauguuagggaagag

SEQ ID NO: 152750 - RNA, 22 nt, Human
uauuucuuguuauucucguuga

SEQ ID NO: 152751 - RNA, 22 nt, Human
cagugggugaugaguccugggg

SEQ ID NO: 152752 - RNA, 22 nt, Human
uucaagguaugguagcugguca

SEQ ID NO: 152753 - RNA, 22 nt, Human
ucagcuuggacagcuugguuga

SEQ ID NO: 152754 - RNA, 22 nt, Human
agcaggguauguuagagcugua

SEQ ID NO: 152755 - RNA, 22 nt, Human
cagucccagacauaguaaggga

SEQ ID NO: 152756 - RNA, 22 nt, Human
uguggcucucagauccuccaau

SEQ ID NO: 152757 - RNA, 22 nt, Human
cauguaaaacacucagaacagu

SEQ ID NO: 152758 - RNA, 22 nt, Human
cuugugcauuucauuccucagg

SEQ ID NO: 152759 - RNA, 21 nt, Human
ggcagaaguagcauggacggg

SEQ ID NO: 152760 - RNA, 22 nt, Human
gcucccuguucucagccaugau

SEQ ID NO: 152761 - RNA, 22 nt, Human
ggccagaggccauccuccugcu

SEQ ID NO: 152762 - RNA, 22 nt, Human
aacagacaacuccuguggcuca

SEQ ID NO: 152763 - RNA, 22 nt, Human
cuggggcugcagcgaucuucau

SEQ ID NO: 152764 - RNA, 22 nt, Human
ugagccugcaauaagcacagcc

SEQ ID NO: 152765 - RNA, 22 nt, Human
auguaacuguuauauuuuguug

SEQ ID NO: 152766 - RNA, 22 nt, Human
uuuuaaucaugcuucuaugucc

SEQ ID NO: 152767 - RNA, 22 nt, Human
cccugcagaccaaugccauaga

SEQ ID NO: 152768 - RNA, 23 nt, Human
uggcagugaucaaaagcuuacau

SEQ ID NO: 152769 - RNA, 22 nt, Human
uucauguaauuccauaagguaa

SEQ ID NO: 152770 - RNA, 22 nt, Human
uccugcagaccucagucagguc

SEQ ID NO: 152771 - RNA, 22 nt, Human
gcccagcacauugcugaggacc

SEQ ID NO: 152772 - RNA, 22 nt, Human
gccagccccuuagggcucuccc

SEQ ID NO: 152773 - RNA, 22 nt, Human
cccucugcaggcuggaccugcc

SEQ ID NO: 152774 - RNA, 22 nt, Human
auacuuuggggguuaguguaga

SEQ ID NO: 152775 - RNA, 22 nt, Human
uccaggaggaggaaggcugcca

SEQ ID NO: 152776 - RNA, 22 nt, Human
gaggggcuggcuguggucccau

SEQ ID NO: 152777 - RNA, 22 nt, Human
cucuguccacagguuugucccu

SEQ ID NO: 152778 - RNA, 22 nt, Human
ugccugugucacagugauguuu

SEQ ID NO: 152779 - RNA, 22 nt, Human
acugaaauacugcucuuggauu

SEQ ID NO: 152780 - RNA, 22 nt, Human
uggcaggggaggugcuugcuua

SEQ ID NO: 152781 - RNA, 22 nt, Human
cagcugcccaagccccagaugu

SEQ ID NO: 152782 - RNA, 22 nt, Human
cagggcaggaugcugugauuau

SEQ ID NO: 152783 - RNA, 22 nt, Human
gcaaagcugggugugaaugcac

SEQ ID NO: 152784 - RNA, 22 nt, Human
gcugcagcagcugcaggguugu

SEQ ID NO: 152785 - RNA, 22 nt, Human
agguacagaugaaagucuaguu

SEQ ID NO: 152786 - RNA, 22 nt, Human
agggcugggcugcuuguuguca

SEQ ID NO: 152787 - RNA, 22 nt, Human
cucuugggagugcucuggagaa

SEQ ID NO: 152788 - RNA, 22 nt, Human
gguccccagcaguggcugcuuc

SEQ ID NO: 152789 - RNA, 22 nt, Human
aggccugucuggggcucagcca

SEQ ID NO: 152790 - RNA, 22 nt, Human
gcacugaaugcuuuuacuguaa

SEQ ID NO: 152791 - RNA, 22 nt, Human
aaaaagguugauccagauuagg

SEQ ID NO: 152792 - RNA, 22 nt, Human
uaagaacauaaauucauacggg

SEQ ID NO: 152793 - RNA, 22 nt, Human
uuguuuuggaagaacuuacucu

SEQ ID NO: 152794 - RNA, 22 nt, Human
caggggccaggcugucugcugu

SEQ ID NO: 152795 - RNA, 22 nt, Human
gggacuguaaauucauauggcc

SEQ ID NO: 152796 - RNA, 22 nt, Human
uggcagaggcucugugauguug

SEQ ID NO: 152797 - RNA, 22 nt, Human
ggcugagggccagggcuagucu

SEQ ID NO: 152798 - RNA, 18 nt, Human
uggguggcuagggaguuu

SEQ ID NO: 152799 - RNA, 17 nt, Human
agaggcagauacuugga

SEQ ID NO: 152800 - RNA, 22 nt, Human
caggaacagcaccaggagcuag

SEQ ID NO: 152801 - RNA, 22 nt, Human
aucauuccacauguaccacuag

SEQ ID NO: 152802 - RNA, 22 nt, Human
uguggccuugcagccuggaggu

SEQ ID NO: 152803 - RNA, 22 nt, Human
uuucuuccuuaccuuacuagag

SEQ ID NO: 152804 - RNA, 22 nt, Human
gcuggccauagaagccaaagag

SEQ ID NO: 152805 - RNA, 22 nt, Human
ugcagcugaggccagcuaugcc

SEQ ID NO: 152806 - RNA, 22 nt, Human
cucugagagcggucuguggcuu

SEQ ID NO: 152807 - RNA, 22 nt, Human
uuaugaaagacauuucuguugg

SEQ ID NO: 152808 - RNA, 22 nt, Human
uugggcugaaguagagggcaga

SEQ ID NO: 152809 - RNA, 22 nt, Human
ugaagccaucaggaagccagca

SEQ ID NO: 152810 - RNA, 23 nt, Human
agcagccagagauccucggcccu

SEQ ID NO: 152811 - RNA, 22 nt, Human
acuuccuguguuggucuugcug

SEQ ID NO: 152812 - RNA, 22 nt, Human
acauuucuuugcuagacagcag

SEQ ID NO: 152813 - RNA, 22 nt, Human
uggcucaguaaucgagucuccu

SEQ ID NO: 152814 - RNA, 22 nt, Human
uuucuguuaggcaucauuuuaa

SEQ ID NO: 152815 - RNA, 22 nt, Human
uaggagaggugaauggcacacu

SEQ ID NO: 152816 - RNA, 22 nt, Human
gugauuccuauuaguacaugca

SEQ ID NO: 152817 - RNA, 22 nt, Human
gcaggcugauagaggauuccau

SEQ ID NO: 152818 - RNA, 22 nt, Human
gaguggggcguggauccagcgu

SEQ ID NO: 152819 - RNA, 22 nt, Human
uggcucugccacuaacuuggua

SEQ ID NO: 152820 - RNA, 22 nt, Human
ugggguggauagaaagugaugu

SEQ ID NO: 152821 - RNA, 22 nt, Human
gcagacagccagacugcacugg

SEQ ID NO: 152822 - RNA, 22 nt, Human
ggcucaggggccaggccugucc

SEQ ID NO: 152823 - RNA, 22 nt, Human
ggcucuggguucugcaaugcgu

SEQ ID NO: 152824 - RNA, 22 nt, Human
caaaguuaugaaugauaagauu

SEQ ID NO: 152825 - RNA, 22 nt, Human
gcugucagaaggugaaggguaa

SEQ ID NO: 152826 - RNA, 22 nt, Human
cuggccucaccucagacuuacu

SEQ ID NO: 152827 - RNA, 23 nt, Human
ggcugagacuacaggcgcuugcc

SEQ ID NO: 152828 - RNA, 22 nt, Human
aggcucagagagcuguguccau

SEQ ID NO: 152829 - RNA, 18 nt, Human
gaagggagcuggaaugca

SEQ ID NO: 152830 - RNA, 22 nt, Human
gcacugaaugccaaaguguagg

SEQ ID NO: 152831 - RNA, 22 nt, Human
aucuaggauuugaaugcacagu

SEQ ID NO: 152832 - RNA, 22 nt, Human
ccagagcaauucucacagaacu

SEQ ID NO: 152833 - RNA, 22 nt, Human
agccuggauccuaggcucagcu

SEQ ID NO: 152834 - RNA, 22 nt, Human
uggcuucagacuucugcuacgu

SEQ ID NO: 152835 - RNA, 22 nt, Human
gccaaagcagucuugccucugc

SEQ ID NO: 152836 - RNA, 22 nt, Human
ucagaagcauguggggagccug

SEQ ID NO: 152837 - RNA, 22 nt, Human
gcacacaguauaugcucauuaa

SEQ ID NO: 152838 - RNA, 21 nt, Human
ggcccugguuacgccuccucu

SEQ ID NO: 152839 - RNA, 22 nt, Human
caggcagcauuuacucugauga

SEQ ID NO: 152840 - RNA, 22 nt, Human
agcugggccugagcuggaagcu

SEQ ID NO: 152841 - RNA, 22 nt, Human
acacaggagauauguaauggcu

SEQ ID NO: 152842 - RNA, 22 nt, Human
uggcuaggcuccaagagcugga

SEQ ID NO: 152843 - RNA, 22 nt, Human
cuggccuagcucucugcuugaa

SEQ ID NO: 152844 - RNA, 22 nt, Human
gcugagcuagaaaaggaccaca

SEQ ID NO: 152845 - RNA, 22 nt, Human
agauacaucauuuauaccuuca

SEQ ID NO: 152846 - RNA, 22 nt, Human
agaucucaccucuguguauuau

SEQ ID NO: 152847 - RNA, 22 nt, Human
caggccucuauggucagcugag

SEQ ID NO: 152848 - RNA, 23 nt, Human
ggccuguguuuugucugaaguac

SEQ ID NO: 152849 - RNA, 22 nt, Human
ccagggugagugucauggguua

SEQ ID NO: 152850 - RNA, 22 nt, Human
gguuggggcgagcuggaggccc

SEQ ID NO: 152851 - RNA, 19 nt, Human
ucccgcccacugagcgugc

SEQ ID NO: 152852 - RNA, 22 nt, Human
augggguggaguccgggcagcg

SEQ ID NO: 152853 - RNA, 22 nt, Human
gacagacauuuccugauccaau

SEQ ID NO: 152854 - RNA, 22 nt, Human
gggagagaugcugauugccaau

SEQ ID NO: 152855 - RNA, 22 nt, Human
uguuaaucaaucaacaguauua

SEQ ID NO: 152856 - RNA, 22 nt, Human
gggacuggaguagaggccggug

SEQ ID NO: 152857 - RNA, 22 nt, Human
cugcaggggccucgagcacagg

SEQ ID NO: 152858 - RNA, 22 nt, Human
caagccucagaaucuucuccau

SEQ ID NO: 152859 - RNA, 22 nt, Human
uuuuagaaauacugauuuagug

SEQ ID NO: 152860 - RNA, 22 nt, Human
agcugccagggacugggcaugg

SEQ ID NO: 152861 - RNA, 20 nt, Human
ugugugcacacaugacauuc

SEQ ID NO: 152862 - RNA, 22 nt, Human
aggacuucaucaccuguauaaa

SEQ ID NO: 152863 - RNA, 22 nt, Human
cugggaggugcagcaaaaauca

SEQ ID NO: 152864 - RNA, 22 nt, Human
agcagcauagaagcugggagga

SEQ ID NO: 152865 - RNA, 22 nt, Human
ggcuccugaaagacuaugggaa

SEQ ID NO: 152866 - RNA, 22 nt, Human
cucacuggcaagacuacaggug

SEQ ID NO: 152867 - RNA, 22 nt, Human
uuuccucuaaacgcauuugcuu

SEQ ID NO: 152868 - RNA, 22 nt, Human
agcauuuaguuaguaaauguuu

SEQ ID NO: 152869 - RNA, 22 nt, Human
cucaggaugcaauuccaucaag

SEQ ID NO: 152870 - RNA, 22 nt, Human
aggaggccccuccuggguugcu

SEQ ID NO: 152871 - RNA, 22 nt, Human
gaugggggccagggccugcuuu

SEQ ID NO: 152872 - RNA, 22 nt, Human
cugcaggaauucaaagugagcu

SEQ ID NO: 152873 - RNA, 22 nt, Human
caaagggcucuagacucagcag

SEQ ID NO: 152874 - RNA, 22 nt, Human
cagggccaaguuggugccuuuu

SEQ ID NO: 152875 - RNA, 22 nt, Human
cugggagaugacucagagcagg

SEQ ID NO: 152876 - RNA, 22 nt, Human
acuggacagaggaaauauggag

SEQ ID NO: 152877 - RNA, 22 nt, Human
cuggggggagcugcguccagca

SEQ ID NO: 152878 - RNA, 20 nt, Human
ugucauuguuucuaggaccu

SEQ ID NO: 152879 - RNA, 20 nt, Human
ggcacuggaagcacacagga

SEQ ID NO: 152880 - RNA, 22 nt, Human
caggcagcugcuggguucagcc

SEQ ID NO: 152881 - RNA, 22 nt, Human
aacacaaagaagcugcaggauc

SEQ ID NO: 152882 - RNA, 22 nt, Human
cuguacaggugaggagggggcu

SEQ ID NO: 152883 - RNA, 22 nt, Human
ccauggcauuuuaugugucuua

SEQ ID NO: 152884 - RNA, 22 nt, Human
gggcugcugccaaucacagccu

SEQ ID NO: 152885 - RNA, 22 nt, Human
ggagauuuauagcacacuucag

SEQ ID NO: 152886 - RNA, 22 nt, Human
ucugccuucgcugcucccugaa

SEQ ID NO: 152887 - RNA, 22 nt, Human
ggggauggaauguaguagugau

SEQ ID NO: 152888 - RNA, 21 nt, Human
aaggccugcuuacugcuaguu

SEQ ID NO: 152889 - RNA, 22 nt, Human
cccagcucugcagaccugcccu

SEQ ID NO: 152890 - RNA, 17 nt, Human
agugacuuggaaagagc

SEQ ID NO: 152891 - RNA, 22 nt, Human
uauuggugggggcagagagaga

SEQ ID NO: 152892 - RNA, 22 nt, Human
aggaagccugcaggugacugcu

SEQ ID NO: 152893 - RNA, 19 nt, Human
gccugggaugggcagaacu

SEQ ID NO: 152894 - RNA, 22 nt, Human
uacuuuggauccuuacaauagc

SEQ ID NO: 152895 - RNA, 22 nt, Human
uaaaugugaccuucauuuuaua

SEQ ID NO: 152896 - RNA, 22 nt, Human
caggugggagccacagcguaca

SEQ ID NO: 152897 - RNA, 22 nt, Human
gggcuggcaucgguugcugaga

SEQ ID NO: 152898 - RNA, 22 nt, Human
ucccaaggcacagggcagggac

SEQ ID NO: 152899 - RNA, 22 nt, Human
cugcucugcagcuuggacuccc

SEQ ID NO: 152900 - RNA, 22 nt, Human
cuugucugugucggauaaaacu

SEQ ID NO: 152901 - RNA, 22 nt, Human
cuggcuucugggccagggcaga

SEQ ID NO: 152902 - RNA, 20 nt, Human
aaggcacuaugucugcuagc

SEQ ID NO: 152903 - RNA, 22 nt, Human
uugauacaggcucuauuucauc

SEQ ID NO: 152904 - RNA, 22 nt, Human
uaaauguguguagccaucugug

SEQ ID NO: 152905 - RNA, 22 nt, Human
augaagucuagcaagcauugaa

SEQ ID NO: 152906 - RNA, 22 nt, Human
ggccacuccgcugcuacuggaa

SEQ ID NO: 152907 - RNA, 19 nt, Human
ggaggccuggguauuugcc

SEQ ID NO: 152908 - RNA, 22 nt, Human
ucacuguaucauguugcacuua

SEQ ID NO: 152909 - RNA, 22 nt, Human
cagcagcuggugagacacagcc

SEQ ID NO: 152910 - RNA, 22 nt, Human
agccuggccacucagggccuga

SEQ ID NO: 152911 - RNA, 22 nt, Human
cccaggucugugccagcucuga

SEQ ID NO: 152912 - RNA, 22 nt, Human
cagagccccucagcucucuccc

SEQ ID NO: 152913 - RNA, 22 nt, Human
agccucugacugucagcaaggu

SEQ ID NO: 152914 - RNA, 22 nt, Human
agggacacaugugauuauuuau

SEQ ID NO: 152915 - RNA, 22 nt, Human
cuguuuaucuaggaguugcagg

SEQ ID NO: 152916 - RNA, 22 nt, Human
cuuuuuccagcuucaggguggg

SEQ ID NO: 152917 - RNA, 22 nt, Human
uugggcucaggaguuugagacc

SEQ ID NO: 152918 - RNA, 22 nt, Human
ugcauuucagaagaaaauucgg

SEQ ID NO: 152919 - RNA, 22 nt, Human
uccuucagcuacucaguuucca

SEQ ID NO: 152920 - RNA, 22 nt, Human
cccuccccacaaagcuucacac

SEQ ID NO: 152921 - RNA, 22 nt, Human
ggugcucaagagggcauccucu

SEQ ID NO: 152922 - RNA, 22 nt, Human
ggugaggcccagugaucugugu

SEQ ID NO: 152923 - RNA, 22 nt, Human
ggaggccaucuggcuggaggcu

SEQ ID NO: 152924 - RNA, 22 nt, Human
agaguguuucagucuuccuaga

SEQ ID NO: 152925 - RNA, 22 nt, Human
caagaaaugggauuugacugcc

SEQ ID NO: 152926 - RNA, 22 nt, Human
agggcugcaccggggcuucgcg

SEQ ID NO: 152927 - RNA, 21 nt, Human
uggagcugaauuuuuggcauc

SEQ ID NO: 152928 - RNA, 22 nt, Human
aggaagccaugguggacgucua

SEQ ID NO: 152929 - RNA, 21 nt, Human
ccucugcucgggcaugcguuu

SEQ ID NO: 152930 - RNA, 22 nt, Human
ucuggcucauacaagccugcaa

SEQ ID NO: 152931 - RNA, 22 nt, Human
agaggccagcagugccuaucug

SEQ ID NO: 152932 - RNA, 20 nt, Human
uuccagagaucugcauuuua

SEQ ID NO: 152933 - RNA, 22 nt, Human
cugcuuugaaaauaaacuuguc

SEQ ID NO: 152934 - RNA, 22 nt, Human
aucuggcucauucagggaacgg

SEQ ID NO: 152935 - RNA, 22 nt, Human
cccagggauuauaaaggugaaa

SEQ ID NO: 152936 - RNA, 22 nt, Human
uuauuuucuccucagaaagugg

SEQ ID NO: 152937 - RNA, 22 nt, Human
cuggaagggucuacuuagcaga

SEQ ID NO: 152938 - RNA, 22 nt, Human
gcucugggaacugacugccuuc

SEQ ID NO: 152939 - RNA, 22 nt, Human
agcucuggaauaaugaugugau

SEQ ID NO: 152940 - RNA, 22 nt, Human
ccccaccugugcgucugccgca

SEQ ID NO: 152941 - RNA, 22 nt, Human
uugaagcaaauucugugcagua

SEQ ID NO: 152942 - RNA, 22 nt, Human
aggaguguggccagggcucugg

SEQ ID NO: 152943 - RNA, 22 nt, Human
ccacagggugucaucagcuuga

SEQ ID NO: 152944 - RNA, 22 nt, Human
cugcagcugucucuacugggca

SEQ ID NO: 152945 - RNA, 22 nt, Human
ugggugaggaugaugaggcagc

SEQ ID NO: 152946 - RNA, 22 nt, Human
ugagaguauuuuggcauuauca

SEQ ID NO: 152947 - RNA, 22 nt, Human
ccuggagcccaaggcagugaga

SEQ ID NO: 152948 - RNA, 22 nt, Human
cuuucaaugugccugccuuggg

SEQ ID NO: 152949 - RNA, 22 nt, Human
cugaggcuuugugugcaugccu

SEQ ID NO: 152950 - RNA, 22 nt, Human
agugucauaugccacugcaucc

SEQ ID NO: 152951 - RNA, 22 nt, Human
uggaggaaaauuacuggggucu

SEQ ID NO: 152952 - RNA, 22 nt, Human
ccuggcagaauauuaaagugca

SEQ ID NO: 152953 - RNA, 22 nt, Human
uuucaagcauaacugggaagag

SEQ ID NO: 152954 - RNA, 22 nt, Human
aguauuucuaguugguucuacu

SEQ ID NO: 152955 - RNA, 22 nt, Human
uuucacauaaauauuaugccua

SEQ ID NO: 152956 - RNA, 22 nt, Human
auaaaacuuauuagaauugugu

SEQ ID NO: 152957 - RNA, 22 nt, Human
gcuugcucaacccccgucucuc

SEQ ID NO: 152958 - RNA, 22 nt, Human
ccagcuggagccaagguggacu

SEQ ID NO: 152959 - RNA, 22 nt, Human
gcagagccugugucugagcaaa

SEQ ID NO: 152960 - RNA, 22 nt, Human
caagagcauuuaguuagcuggu

SEQ ID NO: 152961 - RNA, 22 nt, Human
ccuggccuggcacucccucugc

SEQ ID NO: 152962 - RNA, 22 nt, Human
ugguccuggggaucugcaguga

SEQ ID NO: 152963 - RNA, 22 nt, Human
gguggccuuucaguggaucagg

SEQ ID NO: 152964 - RNA, 22 nt, Human
ugcaaucucggcacuuugggag

SEQ ID NO: 152965 - RNA, 22 nt, Human
guggcucucgccagccugcggg

SEQ ID NO: 152966 - RNA, 22 nt, Human
gggcuggucuggcuuagucagg

SEQ ID NO: 152967 - RNA, 22 nt, Human
aaggagagguuguccguguugu

SEQ ID NO: 152968 - RNA, 22 nt, Human
aggggccucgcaggaccgcucc

SEQ ID NO: 152969 - RNA, 22 nt, Human
ccagcugauucgguggugguug

SEQ ID NO: 152970 - RNA, 22 nt, Human
agcuuccuacaaccaucucaga

SEQ ID NO: 152971 - RNA, 22 nt, Human
cauuaucugccauugacaccau

SEQ ID NO: 152972 - RNA, 22 nt, Human
caucacugacgcugagauucca

SEQ ID NO: 152973 - RNA, 22 nt, Human
agugcacaccuuaguacaaagu

SEQ ID NO: 152974 - RNA, 22 nt, Human
caguggggaggccaggauagaa

SEQ ID NO: 152975 - RNA, 22 nt, Human
ccugcagcuguaggagaaggcg

SEQ ID NO: 152976 - RNA, 22 nt, Human
uuuccucuccggggccuccagg

SEQ ID NO: 152977 - RNA, 22 nt, Human
caggccugugacaccgugucug

SEQ ID NO: 152978 - RNA, 21 nt, Human
aagagcugucaggaaggcugc

SEQ ID NO: 152979 - RNA, 22 nt, Human
cuggcagcgugagcagcaucca

SEQ ID NO: 152980 - RNA, 22 nt, Human
agagcagcacguuguccccaca

SEQ ID NO: 152981 - RNA, 22 nt, Human
ggggagaguccuuuccaguucc

SEQ ID NO: 152982 - RNA, 22 nt, Human
aacuucuugguccugagcuguu

SEQ ID NO: 152983 - RNA, 22 nt, Human
ucucuuuuauguacacccugac

SEQ ID NO: 152984 - RNA, 22 nt, Human
auaacagagagcuacugaacug

SEQ ID NO: 152985 - RNA, 22 nt, Human
accaucagagcacaguccgugc

SEQ ID NO: 152986 - RNA, 22 nt, Human
ugccuggaugugcuggccucac

SEQ ID NO: 152987 - RNA, 22 nt, Human
cuugugcaauugacauugaauc

SEQ ID NO: 152988 - RNA, 22 nt, Human
ggaggaccugcuggcccugcaa

SEQ ID NO: 152989 - RNA, 22 nt, Human
ugggcugccagcucuccagaug

SEQ ID NO: 152990 - RNA, 22 nt, Human
aaucuggcauguaagcuuagag

SEQ ID NO: 152991 - RNA, 22 nt, Human
cgccugggaguccacaccugcu

SEQ ID NO: 152992 - RNA, 22 nt, Human
ucagcugagcuccagcucauag

SEQ ID NO: 152993 - RNA, 17 nt, Human
ggcugcugugcuggugc

SEQ ID NO: 152994 - RNA, 20 nt, Human
ggcugccuccuuccuuuccu

SEQ ID NO: 152995 - RNA, 21 nt, Human
uccauaagagaccaucuccua

SEQ ID NO: 152996 - RNA, 22 nt, Human
ucucagaggugcccuggcaucu

SEQ ID NO: 152997 - RNA, 22 nt, Human
cucugcagaauuugagcugcuc

SEQ ID NO: 152998 - RNA, 22 nt, Human
cuggagccacuuuuuauccuuu

SEQ ID NO: 152999 - RNA, 22 nt, Human
gccccugggagcagagccacca

SEQ ID NO: 153000 - RNA, 22 nt, Human
uggccugccuucgcugagcuga

SEQ ID NO: 153001 - RNA, 22 nt, Human
uguccucuaauuggccucuugc

SEQ ID NO: 153002 - RNA, 22 nt, Human
uuuuagauugggaaauguaaag

SEQ ID NO: 153003 - RNA, 22 nt, Human
cccaaggcauggcaugguggca

SEQ ID NO: 153004 - RNA, 22 nt, Human
gggcuaggcuuggccagcacug

SEQ ID NO: 153005 - RNA, 22 nt, Human
gggauggggggaagcguccaug

SEQ ID NO: 153006 - RNA, 22 nt, Human
ggagcugggacccugucaucug

SEQ ID NO: 153007 - RNA, 22 nt, Human
agggaaauuaaugugagcaaug

SEQ ID NO: 153008 - RNA, 22 nt, Human
ccagcucugccaagcgucagcu

SEQ ID NO: 153009 - RNA, 22 nt, Human
cagggugacugcccuggccacu

SEQ ID NO: 153010 - RNA, 23 nt, Human
ggcuggcccggggcugcuccuga

SEQ ID NO: 153011 - RNA, 22 nt, Human
gccuuuuuuguugcucugucac

SEQ ID NO: 153012 - RNA, 22 nt, Human
uggagggcaugcuguccauggg

SEQ ID NO: 153013 - RNA, 22 nt, Human
cuggugguucaggagaauggcu

SEQ ID NO: 153014 - RNA, 22 nt, Human
ccaggcugggcuacaaguugag

SEQ ID NO: 153015 - RNA, 22 nt, Human
cagaguguugaccauaagccca

SEQ ID NO: 153016 - RNA, 22 nt, Human
gcugcucuugaggggcucacug

SEQ ID NO: 153017 - RNA, 22 nt, Human
agaggccacuuugccugugaug

SEQ ID NO: 153018 - RNA, 22 nt, Human
aaugggaggauuuucucucuug

SEQ ID NO: 153019 - RNA, 22 nt, Human
guggcuucuggcugggccucag

SEQ ID NO: 153020 - RNA, 22 nt, Human
gaaggagggugcggaucugagc

SEQ ID NO: 153021 - RNA, 22 nt, Human
cauagcaacagcaucaagucaa

SEQ ID NO: 153022 - RNA, 22 nt, Human
cucuggaauuaaggaagccugu

SEQ ID NO: 153023 - RNA, 22 nt, Human
cucuggagcgcugcuucccgcg

SEQ ID NO: 153024 - RNA, 19 nt, Human
aagaagcaauaagcuguga

SEQ ID NO: 153025 - RNA, 22 nt, Human
agccacaccuguccugccagcu

SEQ ID NO: 153026 - RNA, 22 nt, Human
aacaugaaguuuucuauaguga

SEQ ID NO: 153027 - RNA, 22 nt, Human
caaaugcauagaaagaugaaac

SEQ ID NO: 153028 - RNA, 22 nt, Human
ugucagugaguuaguugcaagu

SEQ ID NO: 153029 - RNA, 22 nt, Human
agcacuuuccuggcaaaugugg

SEQ ID NO: 153030 - RNA, 22 nt, Human
ucaguggagcuaagcaugagau

SEQ ID NO: 153031 - RNA, 22 nt, Human
uaaguucauuagacuacagaua

SEQ ID NO: 153032 - RNA, 17 nt, Human
gcagcagagagacccuc

SEQ ID NO: 153033 - RNA, 22 nt, Human
agcuggggcugcagagaacagg

SEQ ID NO: 153034 - RNA, 22 nt, Human
uuucacaaguaaaguccuaagu

SEQ ID NO: 153035 - RNA, 22 nt, Human
uauaagaaacaaggcaaauuuu

SEQ ID NO: 153036 - RNA, 22 nt, Human
agggccagggaagcuguauuuu

SEQ ID NO: 153037 - RNA, 22 nt, Human
ccaggguggaggcuggauggag

SEQ ID NO: 153038 - RNA, 22 nt, Human
ccugaagcaaggguaggcaggu

SEQ ID NO: 153039 - RNA, 19 nt, Human
uggccagguacugucugcu

SEQ ID NO: 153040 - RNA, 22 nt, Human
caaagugcugagauuacaggua

SEQ ID NO: 153041 - RNA, 22 nt, Human
gcagaggcaaucagguaugugg

SEQ ID NO: 153042 - RNA, 22 nt, Human
cugcuccacaccuccauuuccu

SEQ ID NO: 153043 - RNA, 22 nt, Human
agauacauuaguaguuacuugu

SEQ ID NO: 153044 - RNA, 22 nt, Human
cuggccuggggccucagcugcu

SEQ ID NO: 153045 - RNA, 22 nt, Human
gagaagccgagucagcugagcc

SEQ ID NO: 153046 - RNA, 22 nt, Human
gaugcacuugccccuccucaga

SEQ ID NO: 153047 - RNA, 22 nt, Human
gggcagcugcagggauggugac

SEQ ID NO: 153048 - RNA, 22 nt, Human
uugcuauuuugagagucauagu

SEQ ID NO: 153049 - RNA, 23 nt, Human
gcagauggccccagagugcugcc

SEQ ID NO: 153050 - RNA, 22 nt, Human
cuggguggcgucuggggccagu

SEQ ID NO: 153051 - RNA, 22 nt, Human
cacugaaggcugcagcucagcc

SEQ ID NO: 153052 - RNA, 22 nt, Human
ugaggccacuuccccacagccc

SEQ ID NO: 153053 - RNA, 22 nt, Human
caaugugucaggaaaagggcca

SEQ ID NO: 153054 - RNA, 22 nt, Human
gccuggagaccugcuccucuac

SEQ ID NO: 153055 - RNA, 22 nt, Human
uauuucugggaguucagaaauu

SEQ ID NO: 153056 - RNA, 22 nt, Human
ccagacuguggaguuccuggug

SEQ ID NO: 153057 - RNA, 22 nt, Human
aagcugccuuccaugugaggaa

SEQ ID NO: 153058 - RNA, 22 nt, Human
acaguaaugauucugagucucu

SEQ ID NO: 153059 - RNA, 23 nt, Human
ccugggcauuggcugcagcuucu

SEQ ID NO: 153060 - RNA, 22 nt, Human
aauuccugucuuaacaguucug

SEQ ID NO: 153061 - RNA, 22 nt, Human
agggggcaucagguccuggcuc

SEQ ID NO: 153062 - RNA, 20 nt, Human
cuuuggcaaugagaacaggg

SEQ ID NO: 153063 - RNA, 19 nt, Human
aggacucuggaggcaugag

SEQ ID NO: 153064 - RNA, 22 nt, Human
aagaacagguucuagaaccauu

SEQ ID NO: 153065 - RNA, 22 nt, Human
acacagggcaaugcuuugaccu

SEQ ID NO: 153066 - RNA, 22 nt, Human
cagcugugcuguauuaagcucu

SEQ ID NO: 153067 - RNA, 22 nt, Human
agcagaaccacagcacuguuga

SEQ ID NO: 153068 - RNA, 22 nt, Human
uguggcucucaugcacucccag

SEQ ID NO: 153069 - RNA, 22 nt, Human
ccagggccaguaagauuggcau

SEQ ID NO: 153070 - RNA, 22 nt, Human
aaaaucugguaauuugaaugug

SEQ ID NO: 153071 - RNA, 19 nt, Human
cugaggugcaguaagaggc

SEQ ID NO: 153072 - RNA, 22 nt, Human
ugaagacagaccaaggagaaug

SEQ ID NO: 153073 - RNA, 22 nt, Human
cagcaugcaaguccagaugugg

SEQ ID NO: 153074 - RNA, 22 nt, Human
gugcagugaaaaaagaaugucc

SEQ ID NO: 153075 - RNA, 22 nt, Human
aaaguuugagugauuugacaca

SEQ ID NO: 153076 - RNA, 22 nt, Human
uccugcaggccuguucccagua

SEQ ID NO: 153077 - RNA, 22 nt, Human
ucucaagagggaggcaaucaug

SEQ ID NO: 153078 - RNA, 22 nt, Human
acaggcagggaccuuggcuaag

SEQ ID NO: 153079 - RNA, 22 nt, Human
cugccgaguacagccauagaaa

SEQ ID NO: 153080 - RNA, 22 nt, Human
ugagcuuacuucuguacacaga

SEQ ID NO: 153081 - RNA, 22 nt, Human
ggcacugagaacaggcugacuu

SEQ ID NO: 153082 - RNA, 22 nt, Human
cccuggugguacggcacuggca

SEQ ID NO: 153083 - RNA, 22 nt, Human
accuuucaaaguggcuaucacu

SEQ ID NO: 153084 - RNA, 22 nt, Human
augucacagucugacucaguga

SEQ ID NO: 153085 - RNA, 22 nt, Human
cagcaucaccgccauuucugau

SEQ ID NO: 153086 - RNA, 22 nt, Human
gccucugcucucagguagccuc

SEQ ID NO: 153087 - RNA, 23 nt, Human
ggccauggagacuuagaaugggc

SEQ ID NO: 153088 - RNA, 22 nt, Human
cugagaggaugcugcaguggag

SEQ ID NO: 153089 - RNA, 19 nt, Human
gccacuccugaugcugccc

SEQ ID NO: 153090 - RNA, 22 nt, Human
cagggacaugacuggucucugu

SEQ ID NO: 153091 - RNA, 22 nt, Human
ggccccuggcaccaggcugauu

SEQ ID NO: 153092 - RNA, 22 nt, Human
agacaaagaaaccguagaagca

SEQ ID NO: 153093 - RNA, 22 nt, Human
aguguacauguuuacagcaucu

SEQ ID NO: 153094 - RNA, 22 nt, Human
acugcuuacaaaaggaaagaau

SEQ ID NO: 153095 - RNA, 22 nt, Human
agaacagcagcacgucaagcug

SEQ ID NO: 153096 - RNA, 22 nt, Human
aaggguggauuucugagcucua

SEQ ID NO: 153097 - RNA, 22 nt, Human
aaggcugaguaaaacagagaac

SEQ ID NO: 153098 - RNA, 22 nt, Human
ggccucuguuuggagccaggau

SEQ ID NO: 153099 - RNA, 22 nt, Human
gcccugagacugagcauggguu

SEQ ID NO: 153100 - RNA, 22 nt, Human
agugcagugguuaggagccagg

SEQ ID NO: 153101 - RNA, 21 nt, Human
ucucugggaggacuugugaga

SEQ ID NO: 153102 - RNA, 18 nt, Human
cuuucagauggauaugcu

SEQ ID NO: 153103 - RNA, 21 nt, Human
ccagcuccaggaccuuggauc

SEQ ID NO: 153104 - RNA, 23 nt, Human
gagugcagaauagacaugcagug

SEQ ID NO: 153105 - RNA, 18 nt, Human
uugagggaggggcagagu

SEQ ID NO: 153106 - RNA, 22 nt, Human
uuugcauuuccagaguagcaga

SEQ ID NO: 153107 - RNA, 22 nt, Human
gugcaggggaucagguugcagc

SEQ ID NO: 153108 - RNA, 22 nt, Human
uggcagucggacuucuaucuca

SEQ ID NO: 153109 - RNA, 22 nt, Human
gcaggagcuggaaagugauguu

SEQ ID NO: 153110 - RNA, 17 nt, Human
agcagaagucagaggga

SEQ ID NO: 153111 - RNA, 22 nt, Human
agcaagcuaccuagauagucua

SEQ ID NO: 153112 - RNA, 22 nt, Human
ccacagggcacagacaggaagc

SEQ ID NO: 153113 - RNA, 21 nt, Human
ccugggagaucagcugccuuc

SEQ ID NO: 153114 - RNA, 22 nt, Human
agccuggaguucccaggagaag

SEQ ID NO: 153115 - RNA, 22 nt, Human
ugcccugcagugagugcgucug

SEQ ID NO: 153116 - RNA, 22 nt, Human
agcaauaugacauugcuacauc

SEQ ID NO: 153117 - RNA, 22 nt, Human
uuucuucucacccaggacagag

SEQ ID NO: 153118 - RNA, 22 nt, Human
agggcugcaggcaagauauggc

SEQ ID NO: 153119 - RNA, 22 nt, Human
gcauguguggaggagaugugcu

SEQ ID NO: 153120 - RNA, 22 nt, Human
aagacccacaaggcugaauguu

SEQ ID NO: 153121 - RNA, 21 nt, Human
aucagcaaaugccugucuccc

SEQ ID NO: 153122 - RNA, 22 nt, Human
caguacuugggaaugcugggga

SEQ ID NO: 153123 - RNA, 22 nt, Human
cuucagaggggacucaaaguca

SEQ ID NO: 153124 - RNA, 22 nt, Human
agagcuguagcuuccuagagcc

SEQ ID NO: 153125 - RNA, 22 nt, Human
cacagggcagugauuguccaca

SEQ ID NO: 153126 - RNA, 22 nt, Human
caaagccucugauuucacuugu

SEQ ID NO: 153127 - RNA, 22 nt, Human
gcagauggacuguaugaccuga

SEQ ID NO: 153128 - RNA, 22 nt, Human
ccucccuggccagagcagcagc

SEQ ID NO: 153129 - RNA, 22 nt, Human
agccaaagaucagugugcaagu

SEQ ID NO: 153130 - RNA, 22 nt, Human
agggucuguggaugcaucuggg

SEQ ID NO: 153131 - RNA, 22 nt, Human
uggccuggugucugcgaggccu

SEQ ID NO: 153132 - RNA, 22 nt, Human
uuucagaugcaauuaauuuuca

SEQ ID NO: 153133 - RNA, 22 nt, Human
agagcugcaauuucauguggug

SEQ ID NO: 153134 - RNA, 22 nt, Human
cagaaaaccugacucuagaacu

SEQ ID NO: 153135 - RNA, 22 nt, Human
gcugcuuccuuuccugcugacc

SEQ ID NO: 153136 - RNA, 22 nt, Human
gaaugcacuuccaacaucuauu

SEQ ID NO: 153137 - RNA, 22 nt, Human
cuggcaggaagaggaaagguca

SEQ ID NO: 153138 - RNA, 22 nt, Human
gcacccaggccggcgacugcag

SEQ ID NO: 153139 - RNA, 22 nt, Human
ucugucacccgagcaggcgaga

SEQ ID NO: 153140 - RNA, 22 nt, Human
uggagccauaacccuuucguac

SEQ ID NO: 153141 - RNA, 22 nt, Human
caguguacuuggaauguaacag

SEQ ID NO: 153142 - RNA, 20 nt, Human
ucaggcaguggggaaaggca

SEQ ID NO: 153143 - RNA, 22 nt, Human
aggcugcaggucugggucaugu

SEQ ID NO: 153144 - RNA, 22 nt, Human
ugggccacuugaaaguggaugu

SEQ ID NO: 153145 - RNA, 22 nt, Human
agaagccauguuuaguaggaug

SEQ ID NO: 153146 - RNA, 18 nt, Human
aucucccauuggccaagg

SEQ ID NO: 153147 - RNA, 22 nt, Human
gcucaggagcugacagccucaa

SEQ ID NO: 153148 - RNA, 22 nt, Human
gcuggagcugaguucccugggc

SEQ ID NO: 153149 - RNA, 22 nt, Human
gauuucaauccagcuuucuucu

SEQ ID NO: 153150 - RNA, 22 nt, Human
gggcuccaacggugagcaugga

SEQ ID NO: 153151 - RNA, 22 nt, Human
caaugugugcuuacaggccagu

SEQ ID NO: 153152 - RNA, 22 nt, Human
aaaaucaguacacuuuauuuug

SEQ ID NO: 153153 - RNA, 22 nt, Human
acagagcuucccagccugagca

SEQ ID NO: 153154 - RNA, 22 nt, Human
ugggccagcaauugcugcucag

SEQ ID NO: 153155 - RNA, 22 nt, Human
aauguguguauuucuaggcgag

SEQ ID NO: 153156 - RNA, 21 nt, Human
gcagcuggucucagagcuugc

SEQ ID NO: 153157 - RNA, 22 nt, Human
ucagggacuuacaaaccagaag

SEQ ID NO: 153158 - RNA, 19 nt, Human
ucuggcuccgccucuuagu

SEQ ID NO: 153159 - RNA, 22 nt, Human
agguauagaauugaaaggguuu

SEQ ID NO: 153160 - RNA, 22 nt, Human
ucuguggccuguguccaagugc

SEQ ID NO: 153161 - RNA, 19 nt, Human
cugucaggggcuggauguu

SEQ ID NO: 153162 - RNA, 19 nt, Human
cugagagaugcuucacaca

SEQ ID NO: 153163 - RNA, 22 nt, Human
gccagccugugggggcucugug

SEQ ID NO: 153164 - RNA, 22 nt, Human
ccugggagguggagguugcagc

SEQ ID NO: 153165 - RNA, 22 nt, Human
agccuggagaagauguguauug

SEQ ID NO: 153166 - RNA, 22 nt, Human
uccucagacuucccuuugugua

SEQ ID NO: 153167 - RNA, 22 nt, Human
uuuauguaguuacggacuauca

SEQ ID NO: 153168 - RNA, 22 nt, Human
guggcugcuguccucucugguu

SEQ ID NO: 153169 - RNA, 17 nt, Human
cucugcagugcauggcu

SEQ ID NO: 153170 - RNA, 22 nt, Human
cccccagccagcagugcucagc

SEQ ID NO: 153171 - RNA, 22 nt, Human
agcaggagagcagugcgugguc

SEQ ID NO: 153172 - RNA, 22 nt, Human
uuaugacauaugaguacaagua

SEQ ID NO: 153173 - RNA, 22 nt, Human
aggagcugucagagugccagag

SEQ ID NO: 153174 - RNA, 22 nt, Human
ugggagagugcucaaugugcaa

SEQ ID NO: 153175 - RNA, 22 nt, Human
cugaagcacagcauauaaauaa

SEQ ID NO: 153176 - RNA, 21 nt, Human
cugcucugacagugaggccag

SEQ ID NO: 153177 - RNA, 22 nt, Human
cuggagcuccagggucuccucu

SEQ ID NO: 153178 - RNA, 22 nt, Human
gagagugauucccucccauaga

SEQ ID NO: 153179 - RNA, 19 nt, Human
uggcugggugccaauggcc

SEQ ID NO: 153180 - RNA, 19 nt, Human
aauguaguguuaugucaac

SEQ ID NO: 153181 - RNA, 22 nt, Human
aggcucagcccaagguggagag

SEQ ID NO: 153182 - RNA, 17 nt, Human
uguuccauuugaccacc

SEQ ID NO: 153183 - RNA, 21 nt, Human
cagggcacacagaggauggua

SEQ ID NO: 153184 - RNA, 22 nt, Human
gugcuuucugcaugguuccuac

SEQ ID NO: 153185 - RNA, 22 nt, Human
cucugaagggagggccaagccc

SEQ ID NO: 153186 - RNA, 22 nt, Human
ccagggcauguccaagacuuag

SEQ ID NO: 153187 - RNA, 22 nt, Human
ccacacugaaccucagugucuu

SEQ ID NO: 153188 - RNA, 22 nt, Human
caggggcugugggcggagccuc

SEQ ID NO: 153189 - RNA, 22 nt, Human
gggugggaucuguggagccuca

SEQ ID NO: 153190 - RNA, 22 nt, Human
ggaggccaggguggguggaucg

SEQ ID NO: 153191 - RNA, 22 nt, Human
uucaagucaaggaaagaggucu

SEQ ID NO: 153192 - RNA, 23 nt, Human
gacagagugagaccuugucuuac

SEQ ID NO: 153193 - RNA, 22 nt, Human
cugaggucucuuuccauaguga

SEQ ID NO: 153194 - RNA, 22 nt, Human
ucccagcgcggggggaggaucc

SEQ ID NO: 153195 - RNA, 22 nt, Human
aagauuucugcuuuuggaggca

SEQ ID NO: 153196 - RNA, 20 nt, Human
uccugagauuuaagggguuc

SEQ ID NO: 153197 - RNA, 22 nt, Human
cucuguccuugcacaguuccua

SEQ ID NO: 153198 - RNA, 22 nt, Human
ucagaacauuuaaaaagugguu

SEQ ID NO: 153199 - RNA, 22 nt, Human
acaaaguuauucuuucagagga

SEQ ID NO: 153200 - RNA, 22 nt, Human
caagagcucagaaacccuugcu

SEQ ID NO: 153201 - RNA, 22 nt, Human
acccaggagguggaggcugcag

SEQ ID NO: 153202 - RNA, 22 nt, Human
augcacagacccaaaggccauc

SEQ ID NO: 153203 - RNA, 22 nt, Human
uggcagaaguucacuaguagcu

SEQ ID NO: 153204 - RNA, 22 nt, Human
aaaugcuugcucuugauuauuu

SEQ ID NO: 153205 - RNA, 22 nt, Human
ccagcccugccagagagagcug

SEQ ID NO: 153206 - RNA, 22 nt, Human
gccugggagggcagcagugugg

SEQ ID NO: 153207 - RNA, 22 nt, Human
ucagaaauacuaucagcuuuug

SEQ ID NO: 153208 - RNA, 22 nt, Human
acuccagggcuccaucccuugu

SEQ ID NO: 153209 - RNA, 22 nt, Human
gugauuucaaauauagagugag

SEQ ID NO: 153210 - RNA, 22 nt, Human
ugcuucucccaaccagggccug

SEQ ID NO: 153211 - RNA, 22 nt, Human
uuuucauuuacauuagggaaga

SEQ ID NO: 153212 - RNA, 19 nt, Human
acuuugcaugugugucuaa

SEQ ID NO: 153213 - RNA, 22 nt, Human
accagcuguguccuggcugcag

SEQ ID NO: 153214 - RNA, 22 nt, Human
uauacuuuccugcaacuuugau

SEQ ID NO: 153215 - RNA, 22 nt, Human
ggccugccucacagucagcacc

SEQ ID NO: 153216 - RNA, 22 nt, Human
gaagccaacauuccaaguagaa

SEQ ID NO: 153217 - RNA, 22 nt, Human
auucugucuuuuuaaaauaaua

SEQ ID NO: 153218 - RNA, 22 nt, Human
caggcuggaguuaccuuuaggg

SEQ ID NO: 153219 - RNA, 22 nt, Human
gagagucacugucugcauuucc

SEQ ID NO: 153220 - RNA, 22 nt, Human
agaaaucucaguaucucaggga

SEQ ID NO: 153221 - RNA, 22 nt, Human
gaaaucugaacaacagcuguca

SEQ ID NO: 153222 - RNA, 22 nt, Human
uagacacaagagaaggguauaa

SEQ ID NO: 153223 - RNA, 22 nt, Human
gagggcugaagauuguggcccc

SEQ ID NO: 153224 - RNA, 22 nt, Human
cuggccugaggucggcuguagg

SEQ ID NO: 153225 - RNA, 22 nt, Human
agucucagcuacuugggaggcu

SEQ ID NO: 153226 - RNA, 22 nt, Human
ggaaggagggcggcaaugauga

SEQ ID NO: 153227 - RNA, 22 nt, Human
gagagugaggccugggaaucua

SEQ ID NO: 153228 - RNA, 23 nt, Human
aguuuguaaagaaauauuugcac

SEQ ID NO: 153229 - RNA, 22 nt, Human
ggaaagagcccagcagugcuug

SEQ ID NO: 153230 - RNA, 23 nt, Human
agcagccauagggaagcaauaca

SEQ ID NO: 153231 - RNA, 22 nt, Human
uagcugccauugcuccaggaag

SEQ ID NO: 153232 - RNA, 22 nt, Human
uguacaugugucuguauaucuu

SEQ ID NO: 153233 - RNA, 22 nt, Human
agccucugauggcucccaagga

SEQ ID NO: 153234 - RNA, 20 nt, Human
uccuggccuucucgggcagu

SEQ ID NO: 153235 - RNA, 22 nt, Human
ugccucuguggaaauggugguc

SEQ ID NO: 153236 - RNA, 22 nt, Human
gaggcagagucacaaagagucu

SEQ ID NO: 153237 - RNA, 22 nt, Human
gagagcugggggacuguggaug

SEQ ID NO: 153238 - RNA, 22 nt, Human
agggccuggaacugugggcagg

SEQ ID NO: 153239 - RNA, 22 nt, Human
ugugaaaggagccauagacagu

SEQ ID NO: 153240 - RNA, 22 nt, Human
guggccuggaaaggcuggucug

SEQ ID NO: 153241 - RNA, 23 nt, Human
aaccagauaaauggcuccagggc

SEQ ID NO: 153242 - RNA, 22 nt, Human
cugucccaggagcuguaagaca

SEQ ID NO: 153243 - RNA, 22 nt, Human
gaggccuggugugucucccgcu

SEQ ID NO: 153244 - RNA, 22 nt, Human
ccugaggggcugcaggccagcu

SEQ ID NO: 153245 - RNA, 22 nt, Human
caggcagcugggucaccguccc

SEQ ID NO: 153246 - RNA, 22 nt, Human
cggcagcaaaggaagccagguc

SEQ ID NO: 153247 - RNA, 22 nt, Human
agcaggugacccaagcaggcug

SEQ ID NO: 153248 - RNA, 23 nt, Human
uuuuaauuuggacauaagaagau

SEQ ID NO: 153249 - RNA, 22 nt, Human
ccuggagcacauggcaggaggc

SEQ ID NO: 153250 - RNA, 20 nt, Human
gcugcucuccacggucugca

SEQ ID NO: 153251 - RNA, 22 nt, Human
uggcagagcaaaaagauagaau

SEQ ID NO: 153252 - RNA, 21 nt, Human
auccauccaucuuggccuaac

SEQ ID NO: 153253 - RNA, 22 nt, Human
aucagcaagauugugucuugua

SEQ ID NO: 153254 - RNA, 22 nt, Human
uccacagaauguaagauccaca

SEQ ID NO: 153255 - RNA, 22 nt, Human
cuuuauguccuugaagaguugu

SEQ ID NO: 153256 - RNA, 22 nt, Human
gugucaugggagucagaaguga

SEQ ID NO: 153257 - RNA, 22 nt, Human
gaaaaaugcuccaaaucugugg

SEQ ID NO: 153258 - RNA, 18 nt, Human
gggaucaggcugccuagg

SEQ ID NO: 153259 - RNA, 22 nt, Human
cuguuuauacgacagguggagg

SEQ ID NO: 153260 - RNA, 22 nt, Human
agcagccaaccuuacauucauc

SEQ ID NO: 153261 - RNA, 22 nt, Human
aggaagcucggagagggcaaau

SEQ ID NO: 153262 - RNA, 22 nt, Human
gcagcguggggacaggagcuca

SEQ ID NO: 153263 - RNA, 22 nt, Human
uggcucuggggacaguaagucc

SEQ ID NO: 153264 - RNA, 22 nt, Human
agagcccuuucuccaggcaccu

SEQ ID NO: 153265 - RNA, 22 nt, Human
acagcuuuucaauucugcugag

SEQ ID NO: 153266 - RNA, 22 nt, Human
acuuccuggcguagcugacauu

SEQ ID NO: 153267 - RNA, 22 nt, Human
gcucugaggcugggagcacucu

SEQ ID NO: 153268 - RNA, 22 nt, Human
caggaggaaaugugacccugcu

SEQ ID NO: 153269 - RNA, 21 nt, Human
ugagagccuccaaccggcuac

SEQ ID NO: 153270 - RNA, 22 nt, Human
ucccugggccuccugcuaugca

SEQ ID NO: 153271 - RNA, 22 nt, Human
ccaucagcuccaguaucuucug

SEQ ID NO: 153272 - RNA, 22 nt, Human
gcucaggauuucauccaugugu

SEQ ID NO: 153273 - RNA, 22 nt, Human
gugucauuaaccaccaugcaaa

SEQ ID NO: 153274 - RNA, 22 nt, Human
cugccucucagccugaccgcca

SEQ ID NO: 153275 - RNA, 22 nt, Human
gaaggcugaugacagauucugc

SEQ ID NO: 153276 - RNA, 22 nt, Human
aggugaguugguaggaaguuug

SEQ ID NO: 153277 - RNA, 22 nt, Human
gagcagaacuacucacauaucg

SEQ ID NO: 153278 - RNA, 20 nt, Human
cuaucuccuggcgugccuuc

SEQ ID NO: 153279 - RNA, 22 nt, Human
agggccuggcgcguggccgccg

SEQ ID NO: 153280 - RNA, 22 nt, Human
ccuggccucagacagagggugg

SEQ ID NO: 153281 - RNA, 22 nt, Human
caggugccgggaaugcagcaau

SEQ ID NO: 153282 - RNA, 22 nt, Human
acccagaggugucuagcaagcu

SEQ ID NO: 153283 - RNA, 22 nt, Human
gcaggaguguauuugcauguaa

SEQ ID NO: 153284 - RNA, 22 nt, Human
ucaagagaagugcuccacagua

SEQ ID NO: 153285 - RNA, 22 nt, Human
agucccagccuaggcugugcug

SEQ ID NO: 153286 - RNA, 22 nt, Human
cugucacacugauaucaggcuu

SEQ ID NO: 153287 - RNA, 22 nt, Human
cuuacauuaaguaagagauuga

SEQ ID NO: 153288 - RNA, 22 nt, Human
aaagcugcugccaaucaggcuu

SEQ ID NO: 153289 - RNA, 22 nt, Human
aagggcaggugggcauuucugg

SEQ ID NO: 153290 - RNA, 22 nt, Human
uugacaauguccuuugaauuuc

SEQ ID NO: 153291 - RNA, 22 nt, Human
gggcuggcucccagguguugaa

SEQ ID NO: 153292 - RNA, 22 nt, Human
gcaggggcaggagaucucaggc

SEQ ID NO: 153293 - RNA, 22 nt, Human
ccuucugcucccuggccagggc

SEQ ID NO: 153294 - RNA, 22 nt, Human
ucccagcccagauuugugugac

SEQ ID NO: 153295 - RNA, 22 nt, Human
uuaaugcagaaaucaaacugac

SEQ ID NO: 153296 - RNA, 22 nt, Human
cugugugugucugcagcauacu

SEQ ID NO: 153297 - RNA, 20 nt, Human
uccuucaggcagggccuagu

SEQ ID NO: 153298 - RNA, 22 nt, Human
cagaauuugaaguaauauucca

SEQ ID NO: 153299 - RNA, 20 nt, Human
cuguagggugcagcaggcuc

SEQ ID NO: 153300 - RNA, 22 nt, Human
caggagacuauggcccaaggcc

SEQ ID NO: 153301 - RNA, 22 nt, Human
auucuagaugcuguaaguagca

SEQ ID NO: 153302 - RNA, 22 nt, Human
cagaacauucacucauaugugg

SEQ ID NO: 153303 - RNA, 22 nt, Human
caggcagcugaggacuuugcua

SEQ ID NO: 153304 - RNA, 22 nt, Human
ugcaggagaaaguacggagcgu

SEQ ID NO: 153305 - RNA, 22 nt, Human
aaggcugcuuuuaacaugcaua

SEQ ID NO: 153306 - RNA, 22 nt, Human
gggaugucacugugccuggcac

SEQ ID NO: 153307 - RNA, 22 nt, Human
aaaugcacaaaguaaguguaau

SEQ ID NO: 153308 - RNA, 22 nt, Human
uugucugaaagaucauuacauu

SEQ ID NO: 153309 - RNA, 22 nt, Human
ugaaccagagucuccagugguu

SEQ ID NO: 153310 - RNA, 22 nt, Human
cagagcugguaagugguagagg

SEQ ID NO: 153311 - RNA, 22 nt, Human
cucaggauagauuguccucuca

SEQ ID NO: 153312 - RNA, 22 nt, Human
acugggaguucuccaugucccu

SEQ ID NO: 153313 - RNA, 22 nt, Human
auuugucucugcacuuuacuca

SEQ ID NO: 153314 - RNA, 22 nt, Human
ccagcauggcaccugagaugag

SEQ ID NO: 153315 - RNA, 22 nt, Human
ggagugacucacagcugggaca

SEQ ID NO: 153316 - RNA, 22 nt, Human
ccucagggccaucucugucccu

SEQ ID NO: 153317 - RNA, 22 nt, Human
uguuauugagguuacuuauaag

SEQ ID NO: 153318 - RNA, 22 nt, Human
ugcauuguugaugaguugaaua

SEQ ID NO: 153319 - RNA, 22 nt, Human
gcugccaauccagcugugggag

SEQ ID NO: 153320 - RNA, 22 nt, Human
ugccagccagguucugaggcua

SEQ ID NO: 153321 - RNA, 20 nt, Human
cuguggcucaugcaucugcc

SEQ ID NO: 153322 - RNA, 22 nt, Human
uuugcauuacuugacuuuaguu

SEQ ID NO: 153323 - RNA, 22 nt, Human
ugcucacugaacucuugcuguc

SEQ ID NO: 153324 - RNA, 22 nt, Human
gcagcugggccccagccucucc

SEQ ID NO: 153325 - RNA, 22 nt, Human
agggcacaucugcugggaaugg

SEQ ID NO: 153326 - RNA, 22 nt, Human
cacagggccacuuucccaguaa

SEQ ID NO: 153327 - RNA, 22 nt, Human
uuccagggcuaauuccugugga

SEQ ID NO: 153328 - RNA, 22 nt, Human
uacuuuuugucucuuugaaugu

SEQ ID NO: 153329 - RNA, 22 nt, Human
uagaaaauagggccuguggagc

SEQ ID NO: 153330 - RNA, 22 nt, Human
ugggccugggcuccuguccucu

SEQ ID NO: 153331 - RNA, 22 nt, Human
gauuuagagaauguuuuguaag

SEQ ID NO: 153332 - RNA, 19 nt, Human
uagcugccuguuaccucca

SEQ ID NO: 153333 - RNA, 22 nt, Human
ggugucccaggccagcugugug

SEQ ID NO: 153334 - RNA, 19 nt, Human
aggucauugauagugcagg

SEQ ID NO: 153335 - RNA, 22 nt, Human
ucugucacuuuuauuuacugaa

SEQ ID NO: 153336 - RNA, 23 nt, Human
uagggcagcugggagggacaugc

SEQ ID NO: 153337 - RNA, 22 nt, Human
cuguccuguagcuccaucaguc

SEQ ID NO: 153338 - RNA, 22 nt, Human
acagagcaauucuuggguguuu

SEQ ID NO: 153339 - RNA, 22 nt, Human
cugggaguugacgaggcuugua

SEQ ID NO: 153340 - RNA, 22 nt, Human
uggcucagaagaaaagguaaac

SEQ ID NO: 153341 - RNA, 19 nt, Human
cccaaggcccugggcaggc

SEQ ID NO: 153342 - RNA, 22 nt, Human
agccagccaguucacuaggaaa

SEQ ID NO: 153343 - RNA, 22 nt, Human
cagagcuggagcuugaauggag

SEQ ID NO: 153344 - RNA, 22 nt, Human
cuggggcucacuuuggucaggc

SEQ ID NO: 153345 - RNA, 22 nt, Human
gggcagcagcaggaggucucug

SEQ ID NO: 153346 - RNA, 22 nt, Human
uauaguaaaauuuucauuuaug

SEQ ID NO: 153347 - RNA, 22 nt, Human
gcucccugaaaagaacaaaguc

SEQ ID NO: 153348 - RNA, 22 nt, Human
gucaccagucccagcuccugaa

SEQ ID NO: 153349 - RNA, 22 nt, Human
cagcugagcucccaggccauca

SEQ ID NO: 153350 - RNA, 22 nt, Human
ggcagagacuggguuggcagag

SEQ ID NO: 153351 - RNA, 22 nt, Human
guccuggcuuaguucgcuguaa

SEQ ID NO: 153352 - RNA, 22 nt, Human
caguuucuucaucaguuaagca

SEQ ID NO: 153353 - RNA, 18 nt, Human
ggcucaggcuauccuaac

SEQ ID NO: 153354 - RNA, 18 nt, Human
ggagagugagaucaaaca

SEQ ID NO: 153355 - RNA, 22 nt, Human
agcccagcaaagggagguucag

SEQ ID NO: 153356 - RNA, 22 nt, Human
agcaggguuuggggauuggcac

SEQ ID NO: 153357 - RNA, 22 nt, Human
aggcacugguccauuuucugca

SEQ ID NO: 153358 - RNA, 22 nt, Human
uauguguacaucugguugagca

SEQ ID NO: 153359 - RNA, 22 nt, Human
uccugagggcgauucagcaggu

SEQ ID NO: 153360 - RNA, 22 nt, Human
cucaggagacaguguccacaug

SEQ ID NO: 153361 - RNA, 22 nt, Human
aaaucagugcucauuugaaagg

SEQ ID NO: 153362 - RNA, 22 nt, Human
ggagcuggucagccuugagcau

SEQ ID NO: 153363 - RNA, 22 nt, Human
cucugggcacauuuuccaggac

SEQ ID NO: 153364 - RNA, 22 nt, Human
caguuucucucaauaagcaucg

SEQ ID NO: 153365 - RNA, 22 nt, Human
uaugcacgucuauuuaugaaga

SEQ ID NO: 153366 - RNA, 19 nt, Human
gcacacccugcaccaccau

SEQ ID NO: 153367 - RNA, 22 nt, Human
caggcugggaacgccacccgcu

SEQ ID NO: 153368 - RNA, 22 nt, Human
aaugaacaaaauaugcuuugca

SEQ ID NO: 153369 - RNA, 22 nt, Human
ucaaaguuuguggcaauuuauu

SEQ ID NO: 153370 - RNA, 22 nt, Human
uggaggccagagguacugggac

SEQ ID NO: 153371 - RNA, 22 nt, Human
gguggcagaggugcaucagccc

SEQ ID NO: 153372 - RNA, 22 nt, Human
gaagcccuauccucuccuggga

SEQ ID NO: 153373 - RNA, 22 nt, Human
acaggcuuacaggcugcaagua

SEQ ID NO: 153374 - RNA, 17 nt, Human
gguguauggggagggaa

SEQ ID NO: 153375 - RNA, 22 nt, Human
cagggacaauggcagagccuga

SEQ ID NO: 153376 - RNA, 22 nt, Human
aagaauguucauuaaacuguug

SEQ ID NO: 153377 - RNA, 22 nt, Human
uguagcacagagcuuugacacu

SEQ ID NO: 153378 - RNA, 22 nt, Human
cuuggcugucuauaggaaagag

SEQ ID NO: 153379 - RNA, 22 nt, Human
cuggcuccacucccugccugac

SEQ ID NO: 153380 - RNA, 23 nt, Human
ugagcugguauuguccaucucca

SEQ ID NO: 153381 - RNA, 22 nt, Human
ucauaaaacacaccagguaguu

SEQ ID NO: 153382 - RNA, 22 nt, Human
cuuccuguugucacagucugcg

SEQ ID NO: 153383 - RNA, 22 nt, Human
gaagcccagggcguggccgggc

SEQ ID NO: 153384 - RNA, 22 nt, Human
ccagucugaggccuggugaggg

SEQ ID NO: 153385 - RNA, 22 nt, Human
ugggugagugggaaaagcccag

SEQ ID NO: 153386 - RNA, 22 nt, Human
agcucugggccaggaacccuaa

SEQ ID NO: 153387 - RNA, 22 nt, Human
agauuucccaaauacuuguuau

SEQ ID NO: 153388 - RNA, 22 nt, Human
cugagauggccacugggucuca

SEQ ID NO: 153389 - RNA, 22 nt, Human
ccugggagagucuguggucucc

SEQ ID NO: 153390 - RNA, 22 nt, Human
ugcacagcgggugucugucagg

SEQ ID NO: 153391 - RNA, 22 nt, Human
cagcccucagguccucagcagc

SEQ ID NO: 153392 - RNA, 22 nt, Human
aaggcacugacugugcagggga

SEQ ID NO: 153393 - RNA, 22 nt, Human
agcuuccucaccucagaggucu

SEQ ID NO: 153394 - RNA, 22 nt, Human
cuucucuucccagggacacagg

SEQ ID NO: 153395 - RNA, 22 nt, Human
cugcagccuaggugcagcuggg

SEQ ID NO: 153396 - RNA, 22 nt, Human
ucccagagcagaugugcuaaag

SEQ ID NO: 153397 - RNA, 22 nt, Human
gccugccugcugucaucugccu

SEQ ID NO: 153398 - RNA, 22 nt, Human
caugcacuuaccugaaauucaa

SEQ ID NO: 153399 - RNA, 16 nt, Human
gagccaggugccuuga

SEQ ID NO: 153400 - RNA, 22 nt, Human
guggcuucugcggugugcgcag

SEQ ID NO: 153401 - RNA, 22 nt, Human
ucaguuuugaaaacauugaaug

SEQ ID NO: 153402 - RNA, 22 nt, Human
auuauauugaguauaaccagag

SEQ ID NO: 153403 - RNA, 21 nt, Human
uuacuuuugcagcaaccuaau

SEQ ID NO: 153404 - RNA, 22 nt, Human
acuggcaguuugagaaugcauu

SEQ ID NO: 153405 - RNA, 22 nt, Human
acauuucugucuuagggacugu

SEQ ID NO: 153406 - RNA, 22 nt, Human
cagggacugagauccagacugu

SEQ ID NO: 153407 - RNA, 22 nt, Human
uggcagcuuccugcucauagga

SEQ ID NO: 153408 - RNA, 22 nt, Human
uggacucaaguccaaguucacg

SEQ ID NO: 153409 - RNA, 22 nt, Human
agggcagaccacgugcaaggau

SEQ ID NO: 153410 - RNA, 19 nt, Human
cugccuguuauggagagaa

SEQ ID NO: 153411 - RNA, 18 nt, Human
aagccagagaccacugcc

SEQ ID NO: 153412 - RNA, 22 nt, Human
aaaugcagaucccugaaucuca

SEQ ID NO: 153413 - RNA, 22 nt, Human
guacaaaguggaccugauagua

SEQ ID NO: 153414 - RNA, 22 nt, Human
aacaacugaaaagcuuuuucug

SEQ ID NO: 153415 - RNA, 22 nt, Human
cacagguggcuccaaguuagag

SEQ ID NO: 153416 - RNA, 22 nt, Human
ccugccugcagaaaguaucucc

SEQ ID NO: 153417 - RNA, 22 nt, Human
gacagaguuguugauguaugcu

SEQ ID NO: 153418 - RNA, 22 nt, Human
auuuaaauuuucugauggagag

SEQ ID NO: 153419 - RNA, 22 nt, Human
ucagagugugacuuggucauga

SEQ ID NO: 153420 - RNA, 22 nt, Human
uuugggaacucuaucauggaaa

SEQ ID NO: 153421 - RNA, 20 nt, Human
ccuggcugcauucaggacgg

SEQ ID NO: 153422 - RNA, 22 nt, Human
uggccuuggacagagcgcuccu

SEQ ID NO: 153423 - RNA, 22 nt, Human
agauuucaaugugagcauuagu

SEQ ID NO: 153424 - RNA, 23 nt, Human
cacugcagcguggucuggcagga

SEQ ID NO: 153425 - RNA, 22 nt, Human
auaaauuuauaauuguuuccug

SEQ ID NO: 153426 - RNA, 22 nt, Human
cuguccucuguccucagcagga

SEQ ID NO: 153427 - RNA, 20 nt, Human
agcugguuaucuuaauucuu

SEQ ID NO: 153428 - RNA, 22 nt, Human
aguguggguuuuauggagcccu

SEQ ID NO: 153429 - RNA, 22 nt, Human
ugugccugaguuggcugaguac

SEQ ID NO: 153430 - RNA, 22 nt, Human
uggccuggaagagaggucgagg

SEQ ID NO: 153431 - RNA, 22 nt, Human
cugccucugcgucccacagagu

SEQ ID NO: 153432 - RNA, 22 nt, Human
cagagccuaaaacgacuccacu

SEQ ID NO: 153433 - RNA, 23 nt, Human
uggcccugaaucuguccuggagg

SEQ ID NO: 153434 - RNA, 22 nt, Human
gcucugggcugcccucuggaca

SEQ ID NO: 153435 - RNA, 22 nt, Human
agugaaauggaugcugcuacug

SEQ ID NO: 153436 - RNA, 22 nt, Human
ugcuugagacacauaugaauuu

SEQ ID NO: 153437 - RNA, 22 nt, Human
ucacugcaaggaggcuucucaa

SEQ ID NO: 153438 - RNA, 19 nt, Human
ugagaggcuuaaggcagcu

SEQ ID NO: 153439 - RNA, 22 nt, Human
gacagggccgcagauggagacu

SEQ ID NO: 153440 - RNA, 22 nt, Human
gagggcagagucuaaugaugca

SEQ ID NO: 153441 - RNA, 22 nt, Human
aauggcugggaguguauuuugg

SEQ ID NO: 153442 - RNA, 17 nt, Human
acagggcagaaacagcu

SEQ ID NO: 153443 - RNA, 22 nt, Human
ugaagcaggaaccagcagcauu

SEQ ID NO: 153444 - RNA, 21 nt, Human
ccuggcuucagggugcacugg

SEQ ID NO: 153445 - RNA, 22 nt, Human
aaaugugcuugugaucagcugu

SEQ ID NO: 153446 - RNA, 22 nt, Human
gaaggccucacucugcagcaua

SEQ ID NO: 153447 - RNA, 22 nt, Human
aaaggucauugaaaaggaggaa

SEQ ID NO: 153448 - RNA, 22 nt, Human
aggcagcagggccacuggcuga

SEQ ID NO: 153449 - RNA, 22 nt, Human
uggugcugacaguucugagugc

SEQ ID NO: 153450 - RNA, 17 nt, Human
gcaaucucagucuccuu

SEQ ID NO: 153451 - RNA, 22 nt, Human
ugcagucuuccagcugcacaaa

SEQ ID NO: 153452 - RNA, 22 nt, Human
ggaaaaggccauuguuucucug

SEQ ID NO: 153453 - RNA, 22 nt, Human
caucugcuguuccuuggacuca

SEQ ID NO: 153454 - RNA, 22 nt, Human
caacagaagguguacuacugaa

SEQ ID NO: 153455 - RNA, 22 nt, Human
ggcuucucgugccgaagcaaga

SEQ ID NO: 153456 - RNA, 22 nt, Human
ccugcuggccaguggagggcug

SEQ ID NO: 153457 - RNA, 22 nt, Human
ggcagggagagcaugcugauaa

SEQ ID NO: 153458 - RNA, 22 nt, Human
cucaggccauucuuccagcugc

SEQ ID NO: 153459 - RNA, 21 nt, Human
cugugcuucuuccuaagccag

SEQ ID NO: 153460 - RNA, 22 nt, Human
ugaagcagcuucuuucugucaa

SEQ ID NO: 153461 - RNA, 22 nt, Human
ggcugagcacuuuaggcaggag

SEQ ID NO: 153462 - RNA, 22 nt, Human
gguggggcccuggcacugguau

SEQ ID NO: 153463 - RNA, 19 nt, Human
guggccucggagcgcgcgg

SEQ ID NO: 153464 - RNA, 22 nt, Human
uuccucugaaauggcuuggaaa

SEQ ID NO: 153465 - RNA, 22 nt, Human
aaggaagggaaauagugauguc

SEQ ID NO: 153466 - RNA, 22 nt, Human
cuggcucagacagcugugcagu

SEQ ID NO: 153467 - RNA, 22 nt, Human
gugccugcugcagagucgcugu

SEQ ID NO: 153468 - RNA, 22 nt, Human
cucagagaagucuuugcuaaac

SEQ ID NO: 153469 - RNA, 22 nt, Human
gggugaggagcugccagucaug

SEQ ID NO: 153470 - RNA, 22 nt, Human
uacauguauugauuucucuucu

SEQ ID NO: 153471 - RNA, 22 nt, Human
uccucacagucaacacuuugag

SEQ ID NO: 153472 - RNA, 22 nt, Human
uaagaacaagauguuccuguuu

SEQ ID NO: 153473 - RNA, 22 nt, Human
gcaggauggugcccuuucugcc

SEQ ID NO: 153474 - RNA, 17 nt, Human
ugcauguccuuuguucc

SEQ ID NO: 153475 - RNA, 22 nt, Human
caggaaagguagucacaaugua

SEQ ID NO: 153476 - RNA, 22 nt, Human
auucaguucuaaggucagugcc

SEQ ID NO: 153477 - RNA, 22 nt, Human
ggauggagguucucagaugcuc

SEQ ID NO: 153478 - RNA, 22 nt, Human
acccugccgugggcugcuugug

SEQ ID NO: 153479 - RNA, 22 nt, Human
uggcucaggagggaucuuugcu

SEQ ID NO: 153480 - RNA, 22 nt, Human
auacaugucaucauauguuugu

SEQ ID NO: 153481 - RNA, 22 nt, Human
agaauucucuuccauugaaaca

SEQ ID NO: 153482 - RNA, 22 nt, Human
ucccuggccauuccucuaggcc

SEQ ID NO: 153483 - RNA, 22 nt, Human
aagaauuauugcaauacuagau

SEQ ID NO: 153484 - RNA, 22 nt, Human
uuccuuccgggcaccaggcacu

SEQ ID NO: 153485 - RNA, 22 nt, Human
cagaagccugccucagaugcac

SEQ ID NO: 153486 - RNA, 22 nt, Human
agccugagccccauccagcuga

SEQ ID NO: 153487 - RNA, 22 nt, Human
ugguccugagcaccagccugac

SEQ ID NO: 153488 - RNA, 22 nt, Human
uggucaguugcaucagagaagu

SEQ ID NO: 153489 - RNA, 22 nt, Human
uaaguucaaugaacucaguucu

SEQ ID NO: 153490 - RNA, 22 nt, Human
uuguaacacuuuucuauuaaua

SEQ ID NO: 153491 - RNA, 22 nt, Human
cauuucuguacauguuuuggug

SEQ ID NO: 153492 - RNA, 22 nt, Human
gcugagcucccagcaguaucug

SEQ ID NO: 153493 - RNA, 22 nt, Human
ggcuucugccacgagagggaag

SEQ ID NO: 153494 - RNA, 22 nt, Human
gccugccugcugugugcaaguu

SEQ ID NO: 153495 - RNA, 22 nt, Human
aaaggugacugcagcagcuauu

SEQ ID NO: 153496 - RNA, 22 nt, Human
ggcugggcuccgggagcaugcg

SEQ ID NO: 153497 - RNA, 22 nt, Human
ucagguggcuucggggaguggc

SEQ ID NO: 153498 - RNA, 17 nt, Human
ucagagggaugagcagg

SEQ ID NO: 153499 - RNA, 23 nt, Human
ugacacauuuccuuuccacugca

SEQ ID NO: 153500 - RNA, 22 nt, Human
acauuguauaaugauuaucaca

SEQ ID NO: 153501 - RNA, 20 nt, Human
ggggcccaagcccucuugcc

SEQ ID NO: 153502 - RNA, 22 nt, Human
aaguuguauauaccgcuuuaag

SEQ ID NO: 153503 - RNA, 23 nt, Human
aagcuuccuucacgucuccuggg

SEQ ID NO: 153504 - RNA, 22 nt, Human
uguacacugcaggaugcauugc

SEQ ID NO: 153505 - RNA, 22 nt, Human
cagacagaaggcuccuugaggu

SEQ ID NO: 153506 - RNA, 22 nt, Human
uuaugcuaagugcaacaagcca

SEQ ID NO: 153507 - RNA, 22 nt, Human
aaguaaaagcuuuaccaugcgc

SEQ ID NO: 153508 - RNA, 22 nt, Human
ccucuuugugccugcaggcugc

SEQ ID NO: 153509 - RNA, 22 nt, Human
uuuauuauagugguggggacug

SEQ ID NO: 153510 - RNA, 22 nt, Human
gcugcagcucgccuuccggccu

SEQ ID NO: 153511 - RNA, 22 nt, Human
cuggcagcucugagucccuucu

SEQ ID NO: 153512 - RNA, 22 nt, Human
ggggugggguuacucauugugc

SEQ ID NO: 153513 - RNA, 22 nt, Human
ugacucuguaccugucugccuu

SEQ ID NO: 153514 - RNA, 20 nt, Human
caguagcaauaauuagaagc

SEQ ID NO: 153515 - RNA, 22 nt, Human
cuacuucugugaugaaacuaca

SEQ ID NO: 153516 - RNA, 22 nt, Human
ucugagagccucuagccuaagu

SEQ ID NO: 153517 - RNA, 22 nt, Human
ccuggcugcauuuugcuggaug

SEQ ID NO: 153518 - RNA, 22 nt, Human
gguggagcuggaccaggagagg

SEQ ID NO: 153519 - RNA, 22 nt, Human
gggaccaggugggugcauuccg

SEQ ID NO: 153520 - RNA, 21 nt, Human
cugagggccgcagcugggcuc

SEQ ID NO: 153521 - RNA, 22 nt, Human
uuuagaaauucaucuauggccu

SEQ ID NO: 153522 - RNA, 22 nt, Human
ucucagagcuucaguuauuuuc

SEQ ID NO: 153523 - RNA, 18 nt, Human
ugacagaaccuggagccu

SEQ ID NO: 153524 - RNA, 22 nt, Human
aaaaccaggcguuuccuauuau

SEQ ID NO: 153525 - RNA, 22 nt, Human
aguacagaccugucucuuccug

SEQ ID NO: 153526 - RNA, 22 nt, Human
cuucuuaaugacagauuaaaau

SEQ ID NO: 153527 - RNA, 22 nt, Human
cucuggacacuggcaugggguc

SEQ ID NO: 153528 - RNA, 22 nt, Human
aagccagguguugugguaagag

SEQ ID NO: 153529 - RNA, 22 nt, Human
aguaaacauaauuuaccuguag

SEQ ID NO: 153530 - RNA, 23 nt, Human
ucugggcaccuuguugacaugau

SEQ ID NO: 153531 - RNA, 23 nt, Human
uccucccaaauuucagccucauu

SEQ ID NO: 153532 - RNA, 22 nt, Human
cuguucucuggcgguggcuguu

SEQ ID NO: 153533 - RNA, 22 nt, Human
gccugaagaacagcugugagga

SEQ ID NO: 153534 - RNA, 19 nt, Human
guggccagggcaggggcug

SEQ ID NO: 153535 - RNA, 22 nt, Human
cuggagcugucuucacaggccu

SEQ ID NO: 153536 - RNA, 19 nt, Human
agagaggcugugugaggga

SEQ ID NO: 153537 - RNA, 22 nt, Human
ucucaggaauagaguggcagca

SEQ ID NO: 153538 - RNA, 22 nt, Human
uccucugcuccaucuuuacugu

SEQ ID NO: 153539 - RNA, 22 nt, Human
gagcuggcuaauacugacuuau

SEQ ID NO: 153540 - RNA, 22 nt, Human
aagcagcuuaaauuagagccug

SEQ ID NO: 153541 - RNA, 22 nt, Human
uucaagauggccccagugagcc

SEQ ID NO: 153542 - RNA, 22 nt, Human
gcccagcuggcuuccagcacau

SEQ ID NO: 153543 - RNA, 22 nt, Human
caggugccucaggaugagacaa

SEQ ID NO: 153544 - RNA, 22 nt, Human
uauuuugacuauuaaaccaaca

SEQ ID NO: 153545 - RNA, 22 nt, Human
agaagauuuagguugacgcuau

SEQ ID NO: 153546 - RNA, 22 nt, Human
ugacuuccugcacucaggugau

SEQ ID NO: 153547 - RNA, 22 nt, Human
ugagcccaggaguuggaggcug

SEQ ID NO: 153548 - RNA, 21 nt, Human
gcaggggauagaaauggucug

SEQ ID NO: 153549 - RNA, 22 nt, Human
gcuggccaguguggugaccacc

SEQ ID NO: 153550 - RNA, 17 nt, Human
guuugcaugguguuaac

SEQ ID NO: 153551 - RNA, 22 nt, Human
caucaguguggcaguucacugu

SEQ ID NO: 153552 - RNA, 19 nt, Human
gcaugcuugguggcuucug

SEQ ID NO: 153553 - RNA, 18 nt, Human
gcagcugcaguuguagcu

SEQ ID NO: 153554 - RNA, 22 nt, Human
aggaggcugguucaggccauau

SEQ ID NO: 153555 - RNA, 22 nt, Human
gggccuggugcuucugacuccu

SEQ ID NO: 153556 - RNA, 22 nt, Human
cuguccugcaguugggggcagg

SEQ ID NO: 153557 - RNA, 19 nt, Human
ggaaacaggggccagagga

SEQ ID NO: 153558 - RNA, 22 nt, Human
uuauccaaacuggugaaucauu

SEQ ID NO: 153559 - RNA, 22 nt, Human
aaugcaguuucauuuguagaau

SEQ ID NO: 153560 - RNA, 22 nt, Human
uuguguccugauuugacacaau

SEQ ID NO: 153561 - RNA, 22 nt, Human
ggccagaaaguuaagcuguggc

SEQ ID NO: 153562 - RNA, 23 nt, Human
cagggccaggcagcagcugucac

SEQ ID NO: 153563 - RNA, 21 nt, Human
gucagcagauccagcacuugu

SEQ ID NO: 153564 - RNA, 22 nt, Human
gucccugggaugcccuucuggg

SEQ ID NO: 153565 - RNA, 22 nt, Human
auggcccaggccuccuguggcu

SEQ ID NO: 153566 - RNA, 22 nt, Human
gcagagcugucuaagucacuuc

SEQ ID NO: 153567 - RNA, 22 nt, Human
ucucccacugcaagcccaggcu

SEQ ID NO: 153568 - RNA, 22 nt, Human
gccaggcugaggcucuggaaga

SEQ ID NO: 153569 - RNA, 18 nt, Human
uucagcagcagacacacu

SEQ ID NO: 153570 - RNA, 22 nt, Human
cucuggcuuugcucaugcaucc

SEQ ID NO: 153571 - RNA, 20 nt, Human
uucuggaggcuacaagucug

SEQ ID NO: 153572 - RNA, 18 nt, Human
cugccuguugcugagagg

SEQ ID NO: 153573 - RNA, 22 nt, Human
uauguacaccggggaagguggg

SEQ ID NO: 153574 - RNA, 22 nt, Human
cagaaauggagcccaggaaucu

SEQ ID NO: 153575 - RNA, 22 nt, Human
ugcaggugguuuggacacugcu

SEQ ID NO: 153576 - RNA, 22 nt, Human
ucuuugcaacucccauuuccau

SEQ ID NO: 153577 - RNA, 22 nt, Human
agcccugggaggccagcuugua

SEQ ID NO: 153578 - RNA, 22 nt, Human
ggcaugggccgaggugccuccu

SEQ ID NO: 153579 - RNA, 22 nt, Human
caggguggaauggaaugcuggc

SEQ ID NO: 153580 - RNA, 22 nt, Human
aauuuagaauucgcuagcuaau

SEQ ID NO: 153581 - RNA, 22 nt, Human
accaaggagacaaagguguauu

SEQ ID NO: 153582 - RNA, 22 nt, Human
aagaacauguuaaaagauucac

SEQ ID NO: 153583 - RNA, 19 nt, Human
cugguccugacugaggggu

SEQ ID NO: 153584 - RNA, 19 nt, Human
ggcucucuuaaagcuguuu

SEQ ID NO: 153585 - RNA, 22 nt, Human
agcagggcugcagugugucuuu

SEQ ID NO: 153586 - RNA, 22 nt, Human
aggcagcagccacaaggccuga

SEQ ID NO: 153587 - RNA, 22 nt, Human
cugcaguguucuggaaugcauu

SEQ ID NO: 153588 - RNA, 22 nt, Human
aagggccuccuggggagccugg

SEQ ID NO: 153589 - RNA, 22 nt, Human
cggggcugcgcucuuccugccg

SEQ ID NO: 153590 - RNA, 22 nt, Human
ccucagagguguggcaucucug

SEQ ID NO: 153591 - RNA, 22 nt, Human
aaaugcagguucuugagccaag

SEQ ID NO: 153592 - RNA, 22 nt, Human
gcccagcugucuggcagggaug

SEQ ID NO: 153593 - RNA, 22 nt, Human
gugcugucguggaacugggcug

SEQ ID NO: 153594 - RNA, 22 nt, Human
cucugcaggggaggcaugcacu

SEQ ID NO: 153595 - RNA, 22 nt, Human
ucccaggauguuggcggcaggu

SEQ ID NO: 153596 - RNA, 23 nt, Human
gccuggccaccccagggcugcuu

SEQ ID NO: 153597 - RNA, 22 nt, Human
ggagaaggugcuggucacugug

SEQ ID NO: 153598 - RNA, 22 nt, Human
ggaggugggagacauaggcggc

SEQ ID NO: 153599 - RNA, 22 nt, Human
gccuggagcucggcugagggcg

SEQ ID NO: 153600 - RNA, 22 nt, Human
gccuccuggauuuuagugccau

SEQ ID NO: 153601 - RNA, 22 nt, Human
cugccucuguugggcauggucu

SEQ ID NO: 153602 - RNA, 22 nt, Human
gggcaggaugcaguuucagaga

SEQ ID NO: 153603 - RNA, 22 nt, Human
agagcagauggccagggggccu

SEQ ID NO: 153604 - RNA, 22 nt, Human
ucacaacucuuuccauuuaaua

SEQ ID NO: 153605 - RNA, 22 nt, Human
ugggcugcggauaggccucgga

SEQ ID NO: 153606 - RNA, 22 nt, Human
uucuggaguauuccuggcaccu

SEQ ID NO: 153607 - RNA, 22 nt, Human
ggugaggggagagugaaagaaa

SEQ ID NO: 153608 - RNA, 21 nt, Human
acagcagacaggcuuaggacc

SEQ ID NO: 153609 - RNA, 22 nt, Human
uggagcaggacugcugcccuca

SEQ ID NO: 153610 - RNA, 22 nt, Human
cuuucacauaauugaccuugaa

SEQ ID NO: 153611 - RNA, 21 nt, Human
gggccacaccuucugcagacc

SEQ ID NO: 153612 - RNA, 22 nt, Human
cuccucacuuuccagacugggc

SEQ ID NO: 153613 - RNA, 22 nt, Human
ccaaaguccauaguuuacauaa

SEQ ID NO: 153614 - RNA, 22 nt, Human
uaaagguaguuuuaaaggugcu

SEQ ID NO: 153615 - RNA, 22 nt, Human
cagcugagucugagguucuuug

SEQ ID NO: 153616 - RNA, 22 nt, Human
caggaagagaacauggaggcug

SEQ ID NO: 153617 - RNA, 22 nt, Human
acagggcagugucuugaaaaau

SEQ ID NO: 153618 - RNA, 22 nt, Human
ggagccaggggaccuucacaga

SEQ ID NO: 153619 - RNA, 22 nt, Human
uggccucaagucugagggccuu

SEQ ID NO: 153620 - RNA, 22 nt, Human
uuggcagggccaggcucucucu

SEQ ID NO: 153621 - RNA, 22 nt, Human
uuaguaaauaaagucuacuuuc

SEQ ID NO: 153622 - RNA, 22 nt, Human
auguuacacauaggcauaaaug

SEQ ID NO: 153623 - RNA, 22 nt, Human
guggccucuguuggcuccuagg

SEQ ID NO: 153624 - RNA, 22 nt, Human
ggcugucucugugacugccacc

SEQ ID NO: 153625 - RNA, 22 nt, Human
ugcagcauugcaaagcagucuu

SEQ ID NO: 153626 - RNA, 22 nt, Human
ugagggaggcccuuugagcaga

SEQ ID NO: 153627 - RNA, 22 nt, Human
agcugagccagcagcaacagga

SEQ ID NO: 153628 - RNA, 22 nt, Human
uggcucaguuuagcagcucagu

SEQ ID NO: 153629 - RNA, 22 nt, Human
gugccuuccccgguggucuguu

SEQ ID NO: 153630 - RNA, 22 nt, Human
gagcugccuguugcauagcaac

SEQ ID NO: 153631 - RNA, 22 nt, Human
gaggccuggucuaugagauguu

SEQ ID NO: 153632 - RNA, 22 nt, Human
aggaccuguagggccugcaucc

SEQ ID NO: 153633 - RNA, 23 nt, Human
gccucugcucugcguuggggacu

SEQ ID NO: 153634 - RNA, 22 nt, Human
cccagccuuugcuuccugguuc

SEQ ID NO: 153635 - RNA, 22 nt, Human
acaaagucucuaauaaucuucu

SEQ ID NO: 153636 - RNA, 22 nt, Human
agugccaggagcaaggagcucc

SEQ ID NO: 153637 - RNA, 22 nt, Human
gggcucugggaugcucuuagag

SEQ ID NO: 153638 - RNA, 22 nt, Human
uggagggaacccaggcugcucu

SEQ ID NO: 153639 - RNA, 22 nt, Human
gcucucugaggugcuggcagag

SEQ ID NO: 153640 - RNA, 22 nt, Human
ccuggaaggcaggcauggauug

SEQ ID NO: 153641 - RNA, 22 nt, Human
gcucagagcaucccagugaaug

SEQ ID NO: 153642 - RNA, 22 nt, Human
gcugucugcaucucuagagcuu

SEQ ID NO: 153643 - RNA, 22 nt, Human
agagcuggccagggaucacucu

SEQ ID NO: 153644 - RNA, 22 nt, Human
gccucugcaacuccgccuuggu

SEQ ID NO: 153645 - RNA, 22 nt, Human
guggcagcaaaauccugcauuc

SEQ ID NO: 153646 - RNA, 22 nt, Human
guccacauaggaacccagcuuc

SEQ ID NO: 153647 - RNA, 22 nt, Human
ccagagccuggcaucugcauaa

SEQ ID NO: 153648 - RNA, 22 nt, Human
gcugcagcaagcccuccagggg

SEQ ID NO: 153649 - RNA, 22 nt, Human
ucaggcuggaaugcaguggggc

SEQ ID NO: 153650 - RNA, 22 nt, Human
ucagaaaugaucguuauucauu

SEQ ID NO: 153651 - RNA, 22 nt, Human
ggccuggaaugcuuuccuacca

SEQ ID NO: 153652 - RNA, 22 nt, Human
ccucauggccuugagcugaggg

SEQ ID NO: 153653 - RNA, 22 nt, Human
ugauuucaaguagugacaugcu

SEQ ID NO: 153654 - RNA, 20 nt, Human
agcccaggccugugugaguc

SEQ ID NO: 153655 - RNA, 22 nt, Human
aggugcugccccgagaaggaug

SEQ ID NO: 153656 - RNA, 22 nt, Human
agaaaugacacacaugagacau

SEQ ID NO: 153657 - RNA, 22 nt, Human
acagagcacauagauuggaguu

SEQ ID NO: 153658 - RNA, 22 nt, Human
ggacacaagcuccggggcugca

SEQ ID NO: 153659 - RNA, 22 nt, Human
uggcugaauaaaauaugguguu

SEQ ID NO: 153660 - RNA, 22 nt, Human
uaauguguugaauauuuguaca

SEQ ID NO: 153661 - RNA, 22 nt, Human
cugcuggggucagagcacuggg

SEQ ID NO: 153662 - RNA, 22 nt, Human
uggggugggcaugcgcuguccu

SEQ ID NO: 153663 - RNA, 22 nt, Human
uccagcagguuggucaggugca

SEQ ID NO: 153664 - RNA, 22 nt, Human
acagagcacugcccugugccgc

SEQ ID NO: 153665 - RNA, 22 nt, Human
aauuuggcagugucuugaagua

SEQ ID NO: 153666 - RNA, 22 nt, Human
caguggcuguuucuggaaggca

SEQ ID NO: 153667 - RNA, 22 nt, Human
aggagucagauaugggaaaguu

SEQ ID NO: 153668 - RNA, 22 nt, Human
cucugagaggugagaagcagca

SEQ ID NO: 153669 - RNA, 22 nt, Human
ggagugaguacuggaguagcug

SEQ ID NO: 153670 - RNA, 22 nt, Human
gggccucucccuucucacgcau

SEQ ID NO: 153671 - RNA, 22 nt, Human
cuggccaguuguccuggcuugg

SEQ ID NO: 153672 - RNA, 22 nt, Human
gggaucagaaacauagcccuga

SEQ ID NO: 153673 - RNA, 22 nt, Human
ccuggcugcuuucacuauggag

SEQ ID NO: 153674 - RNA, 22 nt, Human
gcagccccaggagacgcccagg

SEQ ID NO: 153675 - RNA, 22 nt, Human
caucuggcuagcuaucauugug

SEQ ID NO: 153676 - RNA, 22 nt, Human
gugccugguuuggggaauguuc

SEQ ID NO: 153677 - RNA, 22 nt, Human
cugaugcuauaagccacagugg

SEQ ID NO: 153678 - RNA, 22 nt, Human
ccuggccacucagguguggggc

SEQ ID NO: 153679 - RNA, 22 nt, Human
acacugaagagcacuuucaaag

SEQ ID NO: 153680 - RNA, 22 nt, Human
agacaggacacaagcugcauaa

SEQ ID NO: 153681 - RNA, 22 nt, Human
auuuucugguugagguuuaaca

SEQ ID NO: 153682 - RNA, 22 nt, Human
aaagauuucacaucccaagccu

SEQ ID NO: 153683 - RNA, 22 nt, Human
uggcuggggagccccgacuccc

SEQ ID NO: 153684 - RNA, 22 nt, Human
accaggggugucaacagcauuu

SEQ ID NO: 153685 - RNA, 22 nt, Human
agagugaaguucaucgugcagc

SEQ ID NO: 153686 - RNA, 22 nt, Human
uggcucagagagggagugugga

SEQ ID NO: 153687 - RNA, 18 nt, Human
ccagguggugacagagau

SEQ ID NO: 153688 - RNA, 22 nt, Human
cacugcuucuggaggaauuugg

SEQ ID NO: 153689 - RNA, 22 nt, Human
gcucugcucuaacauuccugac

SEQ ID NO: 153690 - RNA, 22 nt, Human
ccaggggcuggugcugagcugg

SEQ ID NO: 153691 - RNA, 22 nt, Human
aggcacugugcuucuuauaugu

SEQ ID NO: 153692 - RNA, 19 nt, Human
cucuggagcagacacugga

SEQ ID NO: 153693 - RNA, 22 nt, Human
agugaaaugacugaaucagaua

SEQ ID NO: 153694 - RNA, 22 nt, Human
gcaagauguuaacauagggaga

SEQ ID NO: 153695 - RNA, 22 nt, Human
agcaggaguguccccuggcugu

SEQ ID NO: 153696 - RNA, 22 nt, Human
guccucagagugggcagguccu

SEQ ID NO: 153697 - RNA, 22 nt, Human
gcaggccuccccugcuggagcu

SEQ ID NO: 153698 - RNA, 22 nt, Human
gugaggggaguaaagccauguu

SEQ ID NO: 153699 - RNA, 22 nt, Human
gcugcucuacccaugcaucugu

SEQ ID NO: 153700 - RNA, 22 nt, Human
agacagcauggagcugauaaca

SEQ ID NO: 153701 - RNA, 22 nt, Human
guggauggauugaggcaguggg

SEQ ID NO: 153702 - RNA, 22 nt, Human
cccuuucccuucuggcucaggg

SEQ ID NO: 153703 - RNA, 22 nt, Human
aaaaguaauugcaauuuuguag

SEQ ID NO: 153704 - RNA, 22 nt, Human
ccucagagccuccagaaggaau

SEQ ID NO: 153705 - RNA, 22 nt, Human
agccaggaaugcaugcucugcu

SEQ ID NO: 153706 - RNA, 22 nt, Human
cuuagaaaucgaacucagguua

SEQ ID NO: 153707 - RNA, 22 nt, Human
agagacaccgcgcaucauggcu

SEQ ID NO: 153708 - RNA, 22 nt, Human
caggggcuagcacuuaauguuu

SEQ ID NO: 153709 - RNA, 22 nt, Human
cucuuuccucagccacagucua

SEQ ID NO: 153710 - RNA, 22 nt, Human
cccaggcuggagugcaauggca

SEQ ID NO: 153711 - RNA, 22 nt, Human
gggagagagaaaacguggcgca

SEQ ID NO: 153712 - RNA, 22 nt, Human
caaaugugguuucucagcauuc

SEQ ID NO: 153713 - RNA, 22 nt, Human
aaggucauuuaacaauuuauga

SEQ ID NO: 153714 - RNA, 22 nt, Human
gcagggccagggcucaggcugu

SEQ ID NO: 153715 - RNA, 22 nt, Human
cagcauggcuugaguguuuccu

SEQ ID NO: 153716 - RNA, 22 nt, Human
ggcaaggccuugcccagcauuc

SEQ ID NO: 153717 - RNA, 22 nt, Human
gggcuggcaggaccugggcuga

SEQ ID NO: 153718 - RNA, 22 nt, Human
ccucucccacguggcagaggcu

SEQ ID NO: 153719 - RNA, 22 nt, Human
uccuggauucugcccugaaggc

SEQ ID NO: 153720 - RNA, 22 nt, Human
ggagccagaggcugcugcugug

SEQ ID NO: 153721 - RNA, 22 nt, Human
aaaaaugcuuggacuuaauaaa

SEQ ID NO: 153722 - RNA, 22 nt, Human
gccugaggaaugcuccugacuu

SEQ ID NO: 153723 - RNA, 21 nt, Human
gcaaggcuuuuguguuuccca

SEQ ID NO: 153724 - RNA, 22 nt, Human
ggcccuguuagagcucccacaa

SEQ ID NO: 153725 - RNA, 22 nt, Human
caaagguauucucauuuuggaa

SEQ ID NO: 153726 - RNA, 22 nt, Human
aggaggcccuagagcucuagag

SEQ ID NO: 153727 - RNA, 22 nt, Human
aagguacaccaaaguucaaguu

SEQ ID NO: 153728 - RNA, 22 nt, Human
acauuuaaauaccuauguuucu

SEQ ID NO: 153729 - RNA, 23 nt, Human
acuuaaaugguucuuuaucucag

SEQ ID NO: 153730 - RNA, 22 nt, Human
ccucuuccacugggccccaucc

SEQ ID NO: 153731 - RNA, 22 nt, Human
acagcagccuuguugguuucga

SEQ ID NO: 153732 - RNA, 22 nt, Human
aagucauuaucucuucuaaucu

SEQ ID NO: 153733 - RNA, 22 nt, Human
gcuguucccauguggggcucag

SEQ ID NO: 153734 - RNA, 22 nt, Human
gcuggugccuuguuguuguuac

SEQ ID NO: 153735 - RNA, 22 nt, Human
auaaggcauauagucacuuuuu

SEQ ID NO: 153736 - RNA, 22 nt, Human
gaugaggggucauuggcuggga

SEQ ID NO: 153737 - RNA, 22 nt, Human
cagcagcugggaaggaggcuga

SEQ ID NO: 153738 - RNA, 22 nt, Human
ucugaggcccugcaggcagugu

SEQ ID NO: 153739 - RNA, 22 nt, Human
aagcagaaguugaucuaccaua

SEQ ID NO: 153740 - RNA, 22 nt, Human
cagcucugaagaaaggugucua

SEQ ID NO: 153741 - RNA, 21 nt, Human
agggccugugcucuccagguc

SEQ ID NO: 153742 - RNA, 22 nt, Human
cuuuauguccaccagacugcaa

SEQ ID NO: 153743 - RNA, 22 nt, Human
uggcucagcgguggcagcagac

SEQ ID NO: 153744 - RNA, 22 nt, Human
ucuccuggauggaccuucucuu

SEQ ID NO: 153745 - RNA, 22 nt, Human
cccaggagauggagguugcagu

SEQ ID NO: 153746 - RNA, 22 nt, Human
guuuucuuugaaugcuucuaga

SEQ ID NO: 153747 - RNA, 22 nt, Human
gcuguccaugucuggccucagu

SEQ ID NO: 153748 - RNA, 22 nt, Human
cauggcagagaaggggaacugg

SEQ ID NO: 153749 - RNA, 22 nt, Human
ucacagacaauuguuuuggugu

SEQ ID NO: 153750 - RNA, 22 nt, Human
ugaaggagcucaaugaugaugc

SEQ ID NO: 153751 - RNA, 22 nt, Human
aaacuuuaagacaguccucaag

SEQ ID NO: 153752 - RNA, 22 nt, Human
ugaacagauggcccagcagagg

SEQ ID NO: 153753 - RNA, 22 nt, Human
gaaaagggcaagagagagggca

SEQ ID NO: 153754 - RNA, 22 nt, Human
guaacagaaagucaugcucauu

SEQ ID NO: 153755 - RNA, 20 nt, Human
aggcacuggauuucuuauau

SEQ ID NO: 153756 - RNA, 22 nt, Human
gcuccuggcuccaggcagccaa

SEQ ID NO: 153757 - RNA, 22 nt, Human
cugagcccaggcgggagcugag

SEQ ID NO: 153758 - RNA, 16 nt, Human
ggagagugucugcaaa

SEQ ID NO: 153759 - RNA, 22 nt, Human
cugccacuuucacccagugcuc

SEQ ID NO: 153760 - RNA, 22 nt, Human
ugggggagauuagagcuucuua

SEQ ID NO: 153761 - RNA, 22 nt, Human
ggcagaaggccucccagcuccu

SEQ ID NO: 153762 - RNA, 22 nt, Human
aucaguuuaacugucaagagcc

SEQ ID NO: 153763 - RNA, 21 nt, Human
cauugucgacauuuuccccuc

SEQ ID NO: 153764 - RNA, 22 nt, Human
ccuggcugcuauagcagcaugu

SEQ ID NO: 153765 - RNA, 22 nt, Human
agguagagcuccaguagaaaau

SEQ ID NO: 153766 - RNA, 22 nt, Human
gccuaauaugcaaaauugauac

SEQ ID NO: 153767 - RNA, 22 nt, Human
uuugcauuguuucaaaagugaa

SEQ ID NO: 153768 - RNA, 22 nt, Human
uccguauuugacuauugcaccg

SEQ ID NO: 153769 - RNA, 22 nt, Human
gacagcagacagaacuaccugc

SEQ ID NO: 153770 - RNA, 23 nt, Human
aggauguaggauguauggcagag

SEQ ID NO: 153771 - RNA, 22 nt, Human
aagggcuggccacauucugggu

SEQ ID NO: 153772 - RNA, 22 nt, Human
guuguauucuucaauaucagag

SEQ ID NO: 153773 - RNA, 19 nt, Human
ggcucucccuugagagagc

SEQ ID NO: 153774 - RNA, 22 nt, Human
gcagggaccugccacugcuguc

SEQ ID NO: 153775 - RNA, 22 nt, Human
ccucauggaccucagacugucc

SEQ ID NO: 153776 - RNA, 22 nt, Human
gccaggcuggugcaaggauauu

SEQ ID NO: 153777 - RNA, 22 nt, Human
gcagacuggucuucagccuugg

SEQ ID NO: 153778 - RNA, 22 nt, Human
uagaaaucagguuuuuagaaag

SEQ ID NO: 153779 - RNA, 23 nt, Human
cagaccuggcagucauccucaac

SEQ ID NO: 153780 - RNA, 22 nt, Human
cugccuggaaggagcaagggga

SEQ ID NO: 153781 - RNA, 22 nt, Human
acagagcauuugggacagagag

SEQ ID NO: 153782 - RNA, 22 nt, Human
ugcagaagaauguaggcauaag

SEQ ID NO: 153783 - RNA, 22 nt, Human
ucuuuucuggacucugcaugga

SEQ ID NO: 153784 - RNA, 22 nt, Human
gcauuucugugcauacacauga

SEQ ID NO: 153785 - RNA, 20 nt, Human
cucugcuuuaggagagucag

SEQ ID NO: 153786 - RNA, 22 nt, Human
ggcagcaguaggagcuaaucuu

SEQ ID NO: 153787 - RNA, 22 nt, Human
ugcuuuauguuaucagaagggu

SEQ ID NO: 153788 - RNA, 23 nt, Human
auggagcugguacuagcuaccuc

SEQ ID NO: 153789 - RNA, 22 nt, Human
uagggcaguuauaacauuagug

SEQ ID NO: 153790 - RNA, 20 nt, Human
uggcccuguuuucuccaggc

SEQ ID NO: 153791 - RNA, 22 nt, Human
aaaugcaccuugcugugagacu

SEQ ID NO: 153792 - RNA, 22 nt, Human
ucugagagucucugaggcagau

SEQ ID NO: 153793 - RNA, 23 nt, Human
aaaugcagggucgcagguuacag

SEQ ID NO: 153794 - RNA, 22 nt, Human
uuguuucaugaguguaaaggga

SEQ ID NO: 153795 - RNA, 22 nt, Human
gaggugagaagggggucagaug

SEQ ID NO: 153796 - RNA, 22 nt, Human
aaacuguaaacacagcaguaca

SEQ ID NO: 153797 - RNA, 19 nt, Human
uggcuucuguuuucauguu

SEQ ID NO: 153798 - RNA, 22 nt, Human
agaauuagucacaauuauagga

SEQ ID NO: 153799 - RNA, 22 nt, Human
uagcugucaccagaaauggcca

SEQ ID NO: 153800 - RNA, 22 nt, Human
cagagacagggcagggagugug

SEQ ID NO: 153801 - RNA, 22 nt, Human
uuugcuauuuuucugugcagcu

SEQ ID NO: 153802 - RNA, 22 nt, Human
uggcucaggauaauuuucccaa

SEQ ID NO: 153803 - RNA, 22 nt, Human
cccagcuccagagccagaaaca

SEQ ID NO: 153804 - RNA, 22 nt, Human
uguggcugcucaggugcagacc

SEQ ID NO: 153805 - RNA, 22 nt, Human
gacuguguccaugugcuggauu

SEQ ID NO: 153806 - RNA, 22 nt, Human
agugcauuauauguuucaaugg

SEQ ID NO: 153807 - RNA, 22 nt, Human
ccaggcagccaagugugugugu

SEQ ID NO: 153808 - RNA, 22 nt, Human
ugaagcugugggcaguggagcc

SEQ ID NO: 153809 - RNA, 22 nt, Human
agugccuggaccccaugacaua

SEQ ID NO: 153810 - RNA, 22 nt, Human
cugggcucagaugagaggaagg

SEQ ID NO: 153811 - RNA, 23 nt, Human
uccaagggcuacaaacacagacc

SEQ ID NO: 153812 - RNA, 22 nt, Human
aaguucaaggcucuagaguucc

SEQ ID NO: 153813 - RNA, 22 nt, Human
agaggccagggacacugcucaa

SEQ ID NO: 153814 - RNA, 23 nt, Human
ccucagcauggcaggagcccagc

SEQ ID NO: 153815 - RNA, 22 nt, Human
gguggguauaguuagggccucu

SEQ ID NO: 153816 - RNA, 22 nt, Human
ggucucuguugccuccaucaag

SEQ ID NO: 153817 - RNA, 22 nt, Human
ccagcaugagacgaugaugaag

SEQ ID NO: 153818 - RNA, 22 nt, Human
uagcugcccaucuuuccuuuag

SEQ ID NO: 153819 - RNA, 22 nt, Human
gacccuguuucuacaaauaauu

SEQ ID NO: 153820 - RNA, 22 nt, Human
caggugggcguggcgagaaggc

SEQ ID NO: 153821 - RNA, 22 nt, Human
gcucugcugucuucuugcaggc

SEQ ID NO: 153822 - RNA, 22 nt, Human
cccuggagugccggaaucaaga

SEQ ID NO: 153823 - RNA, 22 nt, Human
gccuggccgcuccgagcuccgc

SEQ ID NO: 153824 - RNA, 22 nt, Human
uccuugaauccuagcauccuau

SEQ ID NO: 153825 - RNA, 22 nt, Human
aguacuuuacuucuuacaguuu

SEQ ID NO: 153826 - RNA, 22 nt, Human
uggccuggggaagaccaugggc

SEQ ID NO: 153827 - RNA, 22 nt, Human
cugcccugggauggucugugcg

SEQ ID NO: 153828 - RNA, 22 nt, Human
ugggcuguccagcaccugggcu

SEQ ID NO: 153829 - RNA, 22 nt, Human
uuauuuaauuuucucacucaga

SEQ ID NO: 153830 - RNA, 22 nt, Human
caagagcuagaaauugguuaga

SEQ ID NO: 153831 - RNA, 22 nt, Human
cggagccugcuuguugcagcug

SEQ ID NO: 153832 - RNA, 22 nt, Human
ugaggggagaagcagcagccug

SEQ ID NO: 153833 - RNA, 22 nt, Human
uuuucucuacaaaauaaccagc

SEQ ID NO: 153834 - RNA, 22 nt, Human
gcauacagagaggauguggcau

SEQ ID NO: 153835 - RNA, 22 nt, Human
ccagucccaucucugucgcuua

SEQ ID NO: 153836 - RNA, 22 nt, Human
cugucuccuccacugcauggga

SEQ ID NO: 153837 - RNA, 22 nt, Human
acaaagugaauugcaucgaguu

SEQ ID NO: 153838 - RNA, 18 nt, Human
agucucagcggaggagua

SEQ ID NO: 153839 - RNA, 22 nt, Human
uuagauauguuuuugcuaaugc

SEQ ID NO: 153840 - RNA, 22 nt, Human
agagcuguucagcagccagguu

SEQ ID NO: 153841 - RNA, 18 nt, Human
uggcagggaggaaauaua

SEQ ID NO: 153842 - RNA, 22 nt, Human
cagaacugggcagggagcagag

SEQ ID NO: 153843 - RNA, 22 nt, Human
aaaauacacauacuaggggaaa

SEQ ID NO: 153844 - RNA, 22 nt, Human
cacugucuuuugugaagacaau

SEQ ID NO: 153845 - RNA, 22 nt, Human
ucagaccauccugcuguuagug

SEQ ID NO: 153846 - RNA, 22 nt, Human
cugccuugaaaaugaagcuuua

SEQ ID NO: 153847 - RNA, 22 nt, Human
auguaguauuuggaaauguaaa

SEQ ID NO: 153848 - RNA, 22 nt, Human
agagugaagguugacacuucac

SEQ ID NO: 153849 - RNA, 22 nt, Human
cuggagccaugucuugacugcu

SEQ ID NO: 153850 - RNA, 22 nt, Human
acaggagugaaucuggcacuua

SEQ ID NO: 153851 - RNA, 22 nt, Human
gaaggcuggcuuucugagagca

SEQ ID NO: 153852 - RNA, 22 nt, Human
aagccaggggcugcuuaggaga

SEQ ID NO: 153853 - RNA, 22 nt, Human
ucacaggguguacaucaccuau

SEQ ID NO: 153854 - RNA, 22 nt, Human
ugcccacauucaaaaggugaug

SEQ ID NO: 153855 - RNA, 22 nt, Human
aagcugaggcccauggcaaggu

SEQ ID NO: 153856 - RNA, 22 nt, Human
agaaaucacaggaggcagaagg

SEQ ID NO: 153857 - RNA, 22 nt, Human
uuggcugaagguuaagugcugg

SEQ ID NO: 153858 - RNA, 19 nt, Human
cugagcagcggcagcacuu

SEQ ID NO: 153859 - RNA, 22 nt, Human
aaaucaguuaagaugaggccau

SEQ ID NO: 153860 - RNA, 22 nt, Human
cagggaguuuuuguuccucuag

SEQ ID NO: 153861 - RNA, 22 nt, Human
ggcugggcaggucugcacaggg

SEQ ID NO: 153862 - RNA, 22 nt, Human
gagcucagcccaaagagcagug

SEQ ID NO: 153863 - RNA, 22 nt, Human
gaggaaaauggaguguaauuaa

SEQ ID NO: 153864 - RNA, 22 nt, Human
gggacuggaacuacuggugcag

SEQ ID NO: 153865 - RNA, 22 nt, Human
acacaugcauaagccuucccuu

SEQ ID NO: 153866 - RNA, 22 nt, Human
guucacaucacuucacugaacc

SEQ ID NO: 153867 - RNA, 22 nt, Human
uauaaaguuucgaaagauguau

SEQ ID NO: 153868 - RNA, 22 nt, Human
guguuuccaguucagaaagcaa

SEQ ID NO: 153869 - RNA, 22 nt, Human
uguggcugacuccuggucccca

SEQ ID NO: 153870 - RNA, 22 nt, Human
aggcucagagaugaguaagcac

SEQ ID NO: 153871 - RNA, 19 nt, Human
ggcagaagguguaggggga

SEQ ID NO: 153872 - RNA, 22 nt, Human
cagacaugauguaagcagaggc

SEQ ID NO: 153873 - RNA, 22 nt, Human
auaaacacuucuagggcacaca

SEQ ID NO: 153874 - RNA, 22 nt, Human
gagcugucuggggacucugggu

SEQ ID NO: 153875 - RNA, 22 nt, Human
ucauccuuuugcaugggaaggc

SEQ ID NO: 153876 - RNA, 21 nt, Human
guauucuuuaugaagugaaaa

SEQ ID NO: 153877 - RNA, 22 nt, Human
auggcagggcagccucucagag

SEQ ID NO: 153878 - RNA, 22 nt, Human
gaguuauuucagaaggaaagau

SEQ ID NO: 153879 - RNA, 18 nt, Human
ccuggagcuccacagcaa

SEQ ID NO: 153880 - RNA, 22 nt, Human
gcagcugccuauucagggcuug

SEQ ID NO: 153881 - RNA, 22 nt, Human
cagagcaggcccacugcccucc

SEQ ID NO: 153882 - RNA, 22 nt, Human
gaggaggcuggcgccgccugcc

SEQ ID NO: 153883 - RNA, 22 nt, Human
cucaggauuuacuaauuucaag

SEQ ID NO: 153884 - RNA, 22 nt, Human
ccugugcauccgguggucauug

SEQ ID NO: 153885 - RNA, 22 nt, Human
uugggcaaaguguuucuggagc

SEQ ID NO: 153886 - RNA, 22 nt, Human
caucagcaggcaacacucuugg

SEQ ID NO: 153887 - RNA, 22 nt, Human
cauuuagaaacuguuuuuaaca

SEQ ID NO: 153888 - RNA, 22 nt, Human
cuacauuuguucuauagcuuuu

SEQ ID NO: 153889 - RNA, 22 nt, Human
uggcucagccauucguguugcc

SEQ ID NO: 153890 - RNA, 22 nt, Human
cucugcuuggaacuggacagaa

SEQ ID NO: 153891 - RNA, 22 nt, Human
ccugagugaauucccucacugu

SEQ ID NO: 153892 - RNA, 17 nt, Human
cccagagaugcugccuu

SEQ ID NO: 153893 - RNA, 22 nt, Human
uccagagguauguagagaguau

SEQ ID NO: 153894 - RNA, 22 nt, Human
cucucccccacagcagccuucu

SEQ ID NO: 153895 - RNA, 22 nt, Human
aaaugcacacaccaggaaacua

SEQ ID NO: 153896 - RNA, 22 nt, Human
augagcugugggauuccagagg

SEQ ID NO: 153897 - RNA, 22 nt, Human
ucuguuccauguuuuguuccau

SEQ ID NO: 153898 - RNA, 19 nt, Human
agcagagcccugaagaucc

SEQ ID NO: 153899 - RNA, 22 nt, Human
agggcccauagaucgucagcuu

SEQ ID NO: 153900 - RNA, 22 nt, Human
cagggccucuccuccaggaacu

SEQ ID NO: 153901 - RNA, 18 nt, Human
cagggccccagaauuauc

SEQ ID NO: 153902 - RNA, 22 nt, Human
uccucccacauaggacaauggg

SEQ ID NO: 153903 - RNA, 22 nt, Human
ggggcuggcucacuaagagacu

SEQ ID NO: 153904 - RNA, 23 nt, Human
aaagacugcugagaauuuuagga

SEQ ID NO: 153905 - RNA, 22 nt, Human
ggaggcaggaaagacagguuca

SEQ ID NO: 153906 - RNA, 22 nt, Human
agagccugugggagaugcagcu

SEQ ID NO: 153907 - RNA, 22 nt, Human
uugcaggggaaggagcagagcu

SEQ ID NO: 153908 - RNA, 20 nt, Human
auauguguacguguauacau

SEQ ID NO: 153909 - RNA, 22 nt, Human
cacagaggaaaggcaguuggua

SEQ ID NO: 153910 - RNA, 22 nt, Human
gagccagguuggaggcugcagu

SEQ ID NO: 153911 - RNA, 22 nt, Human
ccuggccuccuggccuucucau

SEQ ID NO: 153912 - RNA, 22 nt, Human
aacaucuuuuuguuugcugaaa

SEQ ID NO: 153913 - RNA, 22 nt, Human
uaauuauaacaguuacaucuua

SEQ ID NO: 153914 - RNA, 22 nt, Human
uguuuauaccuugguauaacca

SEQ ID NO: 153915 - RNA, 22 nt, Human
ugucccagguccuagaugacca

SEQ ID NO: 153916 - RNA, 22 nt, Human
ugggcuggcguggagaguuuag

SEQ ID NO: 153917 - RNA, 22 nt, Human
caguacuuugaagauauuuuag

SEQ ID NO: 153918 - RNA, 22 nt, Human
accaggaggccuggagcacaaa

SEQ ID NO: 153919 - RNA, 19 nt, Human
gcauaaaaugucaaugugu

SEQ ID NO: 153920 - RNA, 22 nt, Human
ggagagcagggaggcugcucug

SEQ ID NO: 153921 - RNA, 23 nt, Human
ucagcugcuuccuccugccugcc

SEQ ID NO: 153922 - RNA, 20 nt, Human
gccagcacagggagcaguuc

SEQ ID NO: 153923 - RNA, 22 nt, Human
agcagccaauuggaggaugaag

SEQ ID NO: 153924 - RNA, 22 nt, Human
aaucaguuucuuggcaaguuua

SEQ ID NO: 153925 - RNA, 22 nt, Human
uacauacacaaauauacuguuu

SEQ ID NO: 153926 - RNA, 22 nt, Human
ucuggcucucucaucacccaau

SEQ ID NO: 153927 - RNA, 22 nt, Human
gagccuccuccuggugugccga

SEQ ID NO: 153928 - RNA, 22 nt, Human
ccagcucugcagggccuggggu

SEQ ID NO: 153929 - RNA, 21 nt, Human
ucagcagcuuuugcagucccu

SEQ ID NO: 153930 - RNA, 22 nt, Human
agcucccagaagccagagucgg

SEQ ID NO: 153931 - RNA, 22 nt, Human
cagggcccaagacacaaugagg

SEQ ID NO: 153932 - RNA, 22 nt, Human
cuucccugauaagagccucaga

SEQ ID NO: 153933 - RNA, 22 nt, Human
caguggcagagaacagagaccu

SEQ ID NO: 153934 - RNA, 22 nt, Human
gacagguggggaaacuaaggua

SEQ ID NO: 153935 - RNA, 22 nt, Human
cccaggcugaguuagagguguc

SEQ ID NO: 153936 - RNA, 22 nt, Human
ggcugcuguacugaugucaguu

SEQ ID NO: 153937 - RNA, 22 nt, Human
gcaaagucugcaucuggaucag

SEQ ID NO: 153938 - RNA, 22 nt, Human
acaggcagcacuaaucucuggu

SEQ ID NO: 153939 - RNA, 22 nt, Human
gcucaagagagaugcaguucuu

SEQ ID NO: 153940 - RNA, 22 nt, Human
uggcagaguucgcuccuauuca

SEQ ID NO: 153941 - RNA, 22 nt, Human
ccagagccuaagaucugauccu

SEQ ID NO: 153942 - RNA, 22 nt, Human
ccagcuccucuucccaguguca

SEQ ID NO: 153943 - RNA, 22 nt, Human
ggcauguuucaucacaucaaga

SEQ ID NO: 153944 - RNA, 22 nt, Human
agagagcccgggccagggcaca

SEQ ID NO: 153945 - RNA, 22 nt, Human
agcagcugccagagagaguucc

SEQ ID NO: 153946 - RNA, 22 nt, Human
ugagguguguccccagggaggu

SEQ ID NO: 153947 - RNA, 22 nt, Human
acaguuucuccauuuacaccuu

SEQ ID NO: 153948 - RNA, 22 nt, Human
ccugccagauccccugagcuga

SEQ ID NO: 153949 - RNA, 22 nt, Human
ggugcagaggagccagcugggg

SEQ ID NO: 153950 - RNA, 22 nt, Human
uggcagcagggaggccaguguu

SEQ ID NO: 153951 - RNA, 22 nt, Human
guccucuggccuuucccaggac

SEQ ID NO: 153952 - RNA, 22 nt, Human
caggcacugugcuagauccuug

SEQ ID NO: 153953 - RNA, 20 nt, Human
aaaauauguauaacucuucu

SEQ ID NO: 153954 - RNA, 22 nt, Human
ugcaccauguaaguggccacgu

SEQ ID NO: 153955 - RNA, 22 nt, Human
uaaagguaugucuuaaucaaac

SEQ ID NO: 153956 - RNA, 22 nt, Human
cuggacagaaaaggccacugga

SEQ ID NO: 153957 - RNA, 22 nt, Human
gcagugcuaaguagcuggccca

SEQ ID NO: 153958 - RNA, 22 nt, Human
caggggaagaugccaagggaga

SEQ ID NO: 153959 - RNA, 22 nt, Human
cagcccagcacuaaguagauuu

SEQ ID NO: 153960 - RNA, 22 nt, Human
gacugucauucuagugcccaug

SEQ ID NO: 153961 - RNA, 22 nt, Human
uggagccagagcgcagccuggg

SEQ ID NO: 153962 - RNA, 20 nt, Human
uguucacaguaguugcugcu

SEQ ID NO: 153963 - RNA, 22 nt, Human
ggcuucauggaggaggugaguc

SEQ ID NO: 153964 - RNA, 22 nt, Human
gggcucugggauucagagcaag

SEQ ID NO: 153965 - RNA, 22 nt, Human
uggcucagugcauucacaguaa

SEQ ID NO: 153966 - RNA, 22 nt, Human
aaggccaugcacauccuaggca

SEQ ID NO: 153967 - RNA, 22 nt, Human
ucaaagucuaucuguaauuacu

SEQ ID NO: 153968 - RNA, 20 nt, Human
ucagggcaugggacagcccc

SEQ ID NO: 153969 - RNA, 22 nt, Human
ccucagggacuccaugcugcag

SEQ ID NO: 153970 - RNA, 22 nt, Human
auuuuucucucacacuuaccag

SEQ ID NO: 153971 - RNA, 22 nt, Human
uuccauaauaaccugagagaaa

SEQ ID NO: 153972 - RNA, 22 nt, Human
auaugugugaugcauggacuaa

SEQ ID NO: 153973 - RNA, 22 nt, Human
ugcucagacaagcugaacagua

SEQ ID NO: 153974 - RNA, 22 nt, Human
ccagggucucugcugccugaga

SEQ ID NO: 153975 - RNA, 22 nt, Human
auggggugaccaugagcauuua

SEQ ID NO: 153976 - RNA, 22 nt, Human
ucaccacugaacagaccuuugg

SEQ ID NO: 153977 - RNA, 22 nt, Human
auaacagaguugggaagugaaa

SEQ ID NO: 153978 - RNA, 20 nt, Human
ccagacagcaccugccuggu

SEQ ID NO: 153979 - RNA, 22 nt, Human
cagcucaaguuucccaggucag

SEQ ID NO: 153980 - RNA, 22 nt, Human
gcugcagccaaauucauuguca

SEQ ID NO: 153981 - RNA, 22 nt, Human
uuguuucauggggauguuuauu

SEQ ID NO: 153982 - RNA, 20 nt, Human
agugccagggcaggugagag

SEQ ID NO: 153983 - RNA, 22 nt, Human
guggugcauccuugaguaagcu

SEQ ID NO: 153984 - RNA, 22 nt, Human
gaggugggaugugugugcuacu

SEQ ID NO: 153985 - RNA, 22 nt, Human
aguguguguuugggcgguuuau

SEQ ID NO: 153986 - RNA, 23 nt, Human
agccacuucuaucuugcuccugg

SEQ ID NO: 153987 - RNA, 22 nt, Human
aggcuucuuagauuggcuggag

SEQ ID NO: 153988 - RNA, 22 nt, Human
acacaggaagucagcacugaug

SEQ ID NO: 153989 - RNA, 21 nt, Human
aaagaacaggcagauguucuu

SEQ ID NO: 153990 - RNA, 22 nt, Human
gcuggccauucucuuugagaug

SEQ ID NO: 153991 - RNA, 22 nt, Human
uguccucacaggaaugaacuuu

SEQ ID NO: 153992 - RNA, 22 nt, Human
gcuuccugucccucagccauga

SEQ ID NO: 153993 - RNA, 22 nt, Human
gaaacuguauguaguuuuuggg

SEQ ID NO: 153994 - RNA, 22 nt, Human
ccuccuggcccugggccuggaa

SEQ ID NO: 153995 - RNA, 22 nt, Human
uggagggcaucuguggucaggc

SEQ ID NO: 153996 - RNA, 20 nt, Human
aaagucuuaugguuaauuuu

SEQ ID NO: 153997 - RNA, 22 nt, Human
ucaggcugagaaaaucuggacc

SEQ ID NO: 153998 - RNA, 22 nt, Human
aaaauguaaagcuugaguguag

SEQ ID NO: 153999 - RNA, 22 nt, Human
uuugacaggacuaacauauggc

SEQ ID NO: 154000 - RNA, 22 nt, Human
uugaagcaggaaaauuucuauu

SEQ ID NO: 154001 - RNA, 22 nt, Human
uggguaaacugggucuggagag

SEQ ID NO: 154002 - RNA, 22 nt, Human
cugcugggcuccucaugugacu

SEQ ID NO: 154003 - RNA, 22 nt, Human
gggcucuggaaggugcaccaug

SEQ ID NO: 154004 - RNA, 22 nt, Human
cuacugaguccuucagcugcca

SEQ ID NO: 154005 - RNA, 20 nt, Human
aguagcagugugacauugac

SEQ ID NO: 154006 - RNA, 22 nt, Human
ggugggcacauucagucucugu

SEQ ID NO: 154007 - RNA, 22 nt, Human
ggauggagaugaccauggugac

SEQ ID NO: 154008 - RNA, 20 nt, Human
gugugaagcccucaggagga

SEQ ID NO: 154009 - RNA, 22 nt, Human
aacucaguguguuucuuaguau

SEQ ID NO: 154010 - RNA, 22 nt, Human
gcuggagguuucaccugaguuu

SEQ ID NO: 154011 - RNA, 22 nt, Human
cugcagagcauaaaucugaaua

SEQ ID NO: 154012 - RNA, 22 nt, Human
ugcuggaggaguuuacuguggc

SEQ ID NO: 154013 - RNA, 22 nt, Human
uagauuucucauucauagauug

SEQ ID NO: 154014 - RNA, 22 nt, Human
ucugggagcacacgcagugauc

SEQ ID NO: 154015 - RNA, 22 nt, Human
gucccucugugucccugcaguc

SEQ ID NO: 154016 - RNA, 21 nt, Human
cugcucuggggaccggcugug

SEQ ID NO: 154017 - RNA, 22 nt, Human
uagaacagaguuccagugauca

SEQ ID NO: 154018 - RNA, 22 nt, Human
ugcagggcccuugggguugaac

SEQ ID NO: 154019 - RNA, 22 nt, Human
ggccugagcuugggcagcguau

SEQ ID NO: 154020 - RNA, 22 nt, Human
cagugucuuauuuguagcucag

SEQ ID NO: 154021 - RNA, 22 nt, Human
uccuuccugcaggccaaguccu

SEQ ID NO: 154022 - RNA, 22 nt, Human
uccaguggagugugggggugaa

SEQ ID NO: 154023 - RNA, 22 nt, Human
cugucugcuagaacaucuauac

SEQ ID NO: 154024 - RNA, 22 nt, Human
augcucuggaguacgugaaauu

SEQ ID NO: 154025 - RNA, 22 nt, Human
cugugucucuccuuacaagacu

SEQ ID NO: 154026 - RNA, 22 nt, Human
aagggcagcuuaaauugguagc

SEQ ID NO: 154027 - RNA, 22 nt, Human
aggagaguucacacuggucaga

SEQ ID NO: 154028 - RNA, 22 nt, Human
cagcugccuaugaccuagccuc

SEQ ID NO: 154029 - RNA, 22 nt, Human
aaagacugguguguuacauaua

SEQ ID NO: 154030 - RNA, 22 nt, Human
ggcuucuccagguacugagcau

SEQ ID NO: 154031 - RNA, 22 nt, Human
ucagaagacuacuaggacacau

SEQ ID NO: 154032 - RNA, 22 nt, Human
aaugggagguaguaugggaggu

SEQ ID NO: 154033 - RNA, 22 nt, Human
gggcaguggcucacgccuguaa

SEQ ID NO: 154034 - RNA, 22 nt, Human
ccagcagagggucuuggccauu

SEQ ID NO: 154035 - RNA, 22 nt, Human
ucagcagucacauguuguccca

SEQ ID NO: 154036 - RNA, 22 nt, Human
agaaaaggcuugaagagguuuu

SEQ ID NO: 154037 - RNA, 21 nt, Human
ugugucacuaacuagaggcua

SEQ ID NO: 154038 - RNA, 22 nt, Human
ugcguugcgcuccugcagcagg

SEQ ID NO: 154039 - RNA, 22 nt, Human
agcuuaggaggaugaugaacau

SEQ ID NO: 154040 - RNA, 22 nt, Human
gucugcccucacgccagcuggg

SEQ ID NO: 154041 - RNA, 22 nt, Human
cgcugccaggucaccaggggua

SEQ ID NO: 154042 - RNA, 22 nt, Human
uauguagaagcugcucaaagaa

SEQ ID NO: 154043 - RNA, 22 nt, Human
ccaggcucugucuggucagaag

SEQ ID NO: 154044 - RNA, 22 nt, Human
cugcagagaauuguggggcuuc

SEQ ID NO: 154045 - RNA, 22 nt, Human
cagcagccuacaaugcacagaa

SEQ ID NO: 154046 - RNA, 22 nt, Human
cugcugccggcgagccucccuu

SEQ ID NO: 154047 - RNA, 22 nt, Human
ugcuggcugggcugcuggagac

SEQ ID NO: 154048 - RNA, 22 nt, Human
cagggcagugaagaacacacgu

SEQ ID NO: 154049 - RNA, 22 nt, Human
cucaggauugugccuagggaga

SEQ ID NO: 154050 - RNA, 22 nt, Human
ggguccagcgacagcaggcuca

SEQ ID NO: 154051 - RNA, 22 nt, Human
cuuucacagcugugcuuaugau

SEQ ID NO: 154052 - RNA, 22 nt, Human
acagagcaauaacagggagagg

SEQ ID NO: 154053 - RNA, 22 nt, Human
aaccaggacaauuuugaaagua

SEQ ID NO: 154054 - RNA, 22 nt, Human
gcaggggaguggcaggcccgga

SEQ ID NO: 154055 - RNA, 22 nt, Human
ccacucugcugugcuccaugau

SEQ ID NO: 154056 - RNA, 21 nt, Human
uuugcauuuuacaugugggga

SEQ ID NO: 154057 - RNA, 22 nt, Human
cuggcuggucaucagcaguacg

SEQ ID NO: 154058 - RNA, 22 nt, Human
aucuggcucccuuggaauccgu

SEQ ID NO: 154059 - RNA, 22 nt, Human
augggcugugagguccggcagg

SEQ ID NO: 154060 - RNA, 22 nt, Human
acagagcaugcucaguguguga

SEQ ID NO: 154061 - RNA, 22 nt, Human
gaagcccauuuguacagcacau

SEQ ID NO: 154062 - RNA, 22 nt, Human
cccuggcagaaugucucugggc

SEQ ID NO: 154063 - RNA, 22 nt, Human
uccugggcugugugccacucug

SEQ ID NO: 154064 - RNA, 22 nt, Human
ccauaagguugaaaacuguaca

SEQ ID NO: 154065 - RNA, 22 nt, Human
uuucucuaaauagggaggcuua

SEQ ID NO: 154066 - RNA, 22 nt, Human
gaggaaaagagacagguuauug

SEQ ID NO: 154067 - RNA, 22 nt, Human
uggcucaggccuacgacgccuu

SEQ ID NO: 154068 - RNA, 22 nt, Human
cccaugccuucugacucacagg

SEQ ID NO: 154069 - RNA, 22 nt, Human
gccugggugucgaucacuagug

SEQ ID NO: 154070 - RNA, 22 nt, Human
gccagcagguugucaaggagcu

SEQ ID NO: 154071 - RNA, 22 nt, Human
aagauuuacuagcauaauagcu

SEQ ID NO: 154072 - RNA, 22 nt, Human
augggcuguccuaguccagccc

SEQ ID NO: 154073 - RNA, 22 nt, Human
uuccucucaacaugccugccgg

SEQ ID NO: 154074 - RNA, 22 nt, Human
uccuugaaugaagagaggugac

SEQ ID NO: 154075 - RNA, 22 nt, Human
agagcagugcugaagaguaggg

SEQ ID NO: 154076 - RNA, 22 nt, Human
gagccugaauuugaccugcuua

SEQ ID NO: 154077 - RNA, 22 nt, Human
aagauuuccuggauguaauucc

SEQ ID NO: 154078 - RNA, 22 nt, Human
ucccuuaaaacucauguguugu

SEQ ID NO: 154079 - RNA, 22 nt, Human
cagagcugcacauucuaugaug

SEQ ID NO: 154080 - RNA, 22 nt, Human
gcucugcugcuuacuagauggu

SEQ ID NO: 154081 - RNA, 22 nt, Human
ugccaggcccagcuccagagcu

SEQ ID NO: 154082 - RNA, 22 nt, Human
cugaagccacgauagcuuccua

SEQ ID NO: 154083 - RNA, 22 nt, Human
ucuggcucuguguccccaccca

SEQ ID NO: 154084 - RNA, 22 nt, Human
gggagcugagggaccucugugg

SEQ ID NO: 154085 - RNA, 22 nt, Human
agcagcucacaggauuccugaa

SEQ ID NO: 154086 - RNA, 22 nt, Human
cuggcucaggaaaguugcugcu

SEQ ID NO: 154087 - RNA, 22 nt, Human
ugcaucuuacguuuugaaaggg

SEQ ID NO: 154088 - RNA, 22 nt, Human
agcagggguaacagaaggaaag

SEQ ID NO: 154089 - RNA, 23 nt, Human
aacaauagguuuuggcagaauag

SEQ ID NO: 154090 - RNA, 22 nt, Human
ugcaauaacuacuuuaauguug

SEQ ID NO: 154091 - RNA, 22 nt, Human
aggagcagaacuguuguggagg

SEQ ID NO: 154092 - RNA, 22 nt, Human
uaugcacacaucgcagcaggaa

SEQ ID NO: 154093 - RNA, 22 nt, Human
uuuguuuucaaugugucauuca

SEQ ID NO: 154094 - RNA, 22 nt, Human
uuggaggcaaugggaaggaggc

SEQ ID NO: 154095 - RNA, 22 nt, Human
gcaggcagguggcaucuuguga

SEQ ID NO: 154096 - RNA, 22 nt, Human
uuauuauaaugagggauaaaaa

SEQ ID NO: 154097 - RNA, 22 nt, Human
aaggcucuuggagugaaugcag

SEQ ID NO: 154098 - RNA, 22 nt, Human
gccucugcaucaucacuccagc

SEQ ID NO: 154099 - RNA, 22 nt, Human
ugugaggagaggcccagcuccc

SEQ ID NO: 154100 - RNA, 23 nt, Human
ggguccagagacaggcaugggug

SEQ ID NO: 154101 - RNA, 22 nt, Human
agcuguguguuuccacugagcu

SEQ ID NO: 154102 - RNA, 21 nt, Human
guauugcagaguuaugugcuc

SEQ ID NO: 154103 - RNA, 22 nt, Human
augggugugaaaauggucaucu

SEQ ID NO: 154104 - RNA, 18 nt, Human
cugagggcagccccuggg

SEQ ID NO: 154105 - RNA, 22 nt, Human
uagcagugccaggauuuugcug

SEQ ID NO: 154106 - RNA, 22 nt, Human
uauucacaguugauuuacaguu

SEQ ID NO: 154107 - RNA, 22 nt, Human
acagagauguggaugagggauu

SEQ ID NO: 154108 - RNA, 19 nt, Human
ugagaaggcaguggggagc

SEQ ID NO: 154109 - RNA, 22 nt, Human
agaaaucaauaucuauauguug

SEQ ID NO: 154110 - RNA, 22 nt, Human
agcugguucauucauucauggu

SEQ ID NO: 154111 - RNA, 22 nt, Human
uacaguagaauuuuuaguaacu

SEQ ID NO: 154112 - RNA, 22 nt, Human
cagcagguauguuuguucagca

SEQ ID NO: 154113 - RNA, 22 nt, Human
ggucuuccgagaggccugugcu

SEQ ID NO: 154114 - RNA, 15 nt, Human
ugauuuccuacuaac

SEQ ID NO: 154115 - RNA, 22 nt, Human
auuguauuuccagcuugaaugu

SEQ ID NO: 154116 - RNA, 22 nt, Human
ucagaggacgcacuaggguugu

SEQ ID NO: 154117 - RNA, 22 nt, Human
aggucauuacaauuaucauuuu

SEQ ID NO: 154118 - RNA, 22 nt, Human
caggacagagcccagacugugu

SEQ ID NO: 154119 - RNA, 19 nt, Human
aggcugcaagguggugggc

SEQ ID NO: 154120 - RNA, 22 nt, Human
agaacuguccuuggaggagagu

SEQ ID NO: 154121 - RNA, 22 nt, Human
cccuucccuucugggagaucca

SEQ ID NO: 154122 - RNA, 22 nt, Human
uauuucuguaacucagggucug

SEQ ID NO: 154123 - RNA, 22 nt, Human
guggcugcucgggcuccggccc

SEQ ID NO: 154124 - RNA, 22 nt, Human
agugggcagugcgcucggaugc

SEQ ID NO: 154125 - RNA, 22 nt, Human
uucccaguauuaccuucaggaa

SEQ ID NO: 154126 - RNA, 22 nt, Human
cacacagaugguaagggaggga

SEQ ID NO: 154127 - RNA, 23 nt, Human
cugaggccugcugcguucagguu

SEQ ID NO: 154128 - RNA, 22 nt, Human
cacugaagccacuggaagagga

SEQ ID NO: 154129 - RNA, 22 nt, Human
gggcugggaauggcuaaguaug

SEQ ID NO: 154130 - RNA, 22 nt, Human
ccaggugguucaggucaccaua

SEQ ID NO: 154131 - RNA, 22 nt, Human
aagagcuggaugaagaaaucaa

SEQ ID NO: 154132 - RNA, 22 nt, Human
agcccagcagaaaguccagccu

SEQ ID NO: 154133 - RNA, 22 nt, Human
agggacaguuacaucaucagac

SEQ ID NO: 154134 - RNA, 22 nt, Human
gagcagugaagacagaaguaca

SEQ ID NO: 154135 - RNA, 22 nt, Human
gcuccagaugaaaggccagagg

SEQ ID NO: 154136 - RNA, 20 nt, Human
uuuuuccuucucuacaggca

SEQ ID NO: 154137 - RNA, 22 nt, Human
ccuuuccuuuuuagugugggag

SEQ ID NO: 154138 - RNA, 22 nt, Human
agugggcagcccaggaggucuu

SEQ ID NO: 154139 - RNA, 17 nt, Human
gagugcugguggagcuc

SEQ ID NO: 154140 - RNA, 22 nt, Human
gcucugagccgggggccugucc

SEQ ID NO: 154141 - RNA, 22 nt, Human
agcugcaggccucuccugggga

SEQ ID NO: 154142 - RNA, 22 nt, Human
gccaggcuggaaagaacagaca

SEQ ID NO: 154143 - RNA, 22 nt, Human
auguguagaacuguaaugccca

SEQ ID NO: 154144 - RNA, 22 nt, Human
gagggcugauaaaugcgcaugg

SEQ ID NO: 154145 - RNA, 20 nt, Human
gucucagaauggauuugcau

SEQ ID NO: 154146 - RNA, 23 nt, Human
uggggagaguuacccuggaagcg

SEQ ID NO: 154147 - RNA, 22 nt, Human
agugggaggcggcugacgggcg

SEQ ID NO: 154148 - RNA, 22 nt, Human
ggccugagucacaucaggagag

SEQ ID NO: 154149 - RNA, 22 nt, Human
gaacaauagugguaacaaagcc

SEQ ID NO: 154150 - RNA, 22 nt, Human
agucagcagccuggccaggaga

SEQ ID NO: 154151 - RNA, 22 nt, Human
aucuggcuuucuuaaugacuua

SEQ ID NO: 154152 - RNA, 22 nt, Human
uugugucccccuuugagagcca

SEQ ID NO: 154153 - RNA, 22 nt, Human
cagagagaggccacugcuauua

SEQ ID NO: 154154 - RNA, 22 nt, Human
gcagagcuguuaauggagcuga

SEQ ID NO: 154155 - RNA, 22 nt, Human
uggccuuccuggugacucauga

SEQ ID NO: 154156 - RNA, 22 nt, Human
ccagucccaggcagaaauccag

SEQ ID NO: 154157 - RNA, 22 nt, Human
accaggcuggagugcaguggcg

SEQ ID NO: 154158 - RNA, 18 nt, Human
uguacaguuaugagcauu

SEQ ID NO: 154159 - RNA, 22 nt, Human
auaauguagguauguguauuua

SEQ ID NO: 154160 - RNA, 22 nt, Human
cacugagaggucucauuuccaa

SEQ ID NO: 154161 - RNA, 20 nt, Human
acuuucucgguuucucaccu

SEQ ID NO: 154162 - RNA, 22 nt, Human
ucucagagaucuuucugcaugu

SEQ ID NO: 154163 - RNA, 22 nt, Human
ggcagagcugcaugagcacuca

SEQ ID NO: 154164 - RNA, 22 nt, Human
gugucauggaaaauugcaaugg

SEQ ID NO: 154165 - RNA, 22 nt, Human
ccccuuccacagugcuuccuaa

SEQ ID NO: 154166 - RNA, 22 nt, Human
gcuuccuaaaugcacagggcag

SEQ ID NO: 154167 - RNA, 22 nt, Human
uuucaaauggagucgugaaaug

SEQ ID NO: 154168 - RNA, 22 nt, Human
ccagagucuaugaguccucauu

SEQ ID NO: 154169 - RNA, 22 nt, Human
cuggcagcuucaggacacucgg

SEQ ID NO: 154170 - RNA, 22 nt, Human
cuggaugcuuccucucugcuag

SEQ ID NO: 154171 - RNA, 23 nt, Human
ucuggcucuaugugacagcucuc

SEQ ID NO: 154172 - RNA, 22 nt, Human
gagcuggcuccgccaugcugcu

SEQ ID NO: 154173 - RNA, 20 nt, Human
agugucugggccucaggccc

SEQ ID NO: 154174 - RNA, 22 nt, Human
auaauuaauuucaguaaucucc

SEQ ID NO: 154175 - RNA, 22 nt, Human
uguaucaaggguuuauguaagc

SEQ ID NO: 154176 - RNA, 22 nt, Human
ccagggcaggagaaagacucac

SEQ ID NO: 154177 - RNA, 22 nt, Human
gcugccaccguggagaugagug

SEQ ID NO: 154178 - RNA, 22 nt, Human
agcaaaguagcugcuguucuua

SEQ ID NO: 154179 - RNA, 22 nt, Human
cugggcaguuuauucaguucug

SEQ ID NO: 154180 - RNA, 22 nt, Human
uagccgggugugguggaacucc

SEQ ID NO: 154181 - RNA, 22 nt, Human
ugagccagucugucugggugaa

SEQ ID NO: 154182 - RNA, 22 nt, Human
gcugucugacuccaaguuggag

SEQ ID NO: 154183 - RNA, 22 nt, Human
gauaugaaguggcauugugaag

SEQ ID NO: 154184 - RNA, 22 nt, Human
ugugugacccccagugaagccu

SEQ ID NO: 154185 - RNA, 22 nt, Human
ugcagccaauucauucauucuu

SEQ ID NO: 154186 - RNA, 22 nt, Human
aaaugcagauuuugaugcagca

SEQ ID NO: 154187 - RNA, 22 nt, Human
gcauggcagugaggauggugcu

SEQ ID NO: 154188 - RNA, 22 nt, Human
caguuuuuagauuaguuggugg

SEQ ID NO: 154189 - RNA, 22 nt, Human
auugaaagagaauguagcucuu

SEQ ID NO: 154190 - RNA, 19 nt, Human
auuccucaaggacagaaau

SEQ ID NO: 154191 - RNA, 22 nt, Human
uacagaaaaacuggcauugaag

SEQ ID NO: 154192 - RNA, 22 nt, Human
ggaggggcagccauggaacucc

SEQ ID NO: 154193 - RNA, 22 nt, Human
ucauugcaagcucauuuaucug

SEQ ID NO: 154194 - RNA, 22 nt, Human
cuccagggggcauccacacagc

SEQ ID NO: 154195 - RNA, 22 nt, Human
guggccugccgugugguauggg

SEQ ID NO: 154196 - RNA, 22 nt, Human
uugcauugcuuggucuucaaga

SEQ ID NO: 154197 - RNA, 22 nt, Human
agggaauguagcaagaugccaa

SEQ ID NO: 154198 - RNA, 22 nt, Human
gcaaaugaguuguaacauaaaa

SEQ ID NO: 154199 - RNA, 22 nt, Human
caggcuggagugaguguagugg

SEQ ID NO: 154200 - RNA, 22 nt, Human
cagccuguagaauacaguaaau

SEQ ID NO: 154201 - RNA, 22 nt, Human
gcaggaugccagggcagcagcg

SEQ ID NO: 154202 - RNA, 22 nt, Human
ugaaaucuacccuauucagggu

SEQ ID NO: 154203 - RNA, 22 nt, Human
cucugggcuuguugaccugcac

SEQ ID NO: 154204 - RNA, 22 nt, Human
caggagcuacucagguuggguu

SEQ ID NO: 154205 - RNA, 22 nt, Human
ccugugugcacacgaggccaug

SEQ ID NO: 154206 - RNA, 23 nt, Human
uggcucuguggaucccucaggag

SEQ ID NO: 154207 - RNA, 21 nt, Human
gcucucugcaugguggcucag

SEQ ID NO: 154208 - RNA, 22 nt, Human
ggcuggcaagugucugcucaug

SEQ ID NO: 154209 - RNA, 22 nt, Human
aguauguagugcaaucagucag

SEQ ID NO: 154210 - RNA, 22 nt, Human
gccucugcugcaagccugguug

SEQ ID NO: 154211 - RNA, 22 nt, Human
ggccucucauguccugggcuuc

SEQ ID NO: 154212 - RNA, 22 nt, Human
acugagcugcuugaagugaacu

SEQ ID NO: 154213 - RNA, 22 nt, Human
ggcucaggaugagccuucucau

SEQ ID NO: 154214 - RNA, 22 nt, Human
gagggaaagguuaauacaugau

SEQ ID NO: 154215 - RNA, 22 nt, Human
cagcagcuacuuggagcagcag

SEQ ID NO: 154216 - RNA, 22 nt, Human
agaggcugagaaacccucuucu

SEQ ID NO: 154217 - RNA, 22 nt, Human
ucaggccacuucacaggugauu

SEQ ID NO: 154218 - RNA, 22 nt, Human
uucuuacuaguauguuucagca

SEQ ID NO: 154219 - RNA, 22 nt, Human
caaaugcagucccuuuguugcu

SEQ ID NO: 154220 - RNA, 22 nt, Human
gagagcugucagcguagcaccg

SEQ ID NO: 154221 - RNA, 22 nt, Human
aaaaaaucagaucuuugguuaa

SEQ ID NO: 154222 - RNA, 22 nt, Human
aucacgucaugguuugaucugg

SEQ ID NO: 154223 - RNA, 22 nt, Human
ggagccagggaagcugcuuccu

SEQ ID NO: 154224 - RNA, 19 nt, Human
gcuccugggccucacucau

SEQ ID NO: 154225 - RNA, 22 nt, Human
acaggggauugauuggaagucu

SEQ ID NO: 154226 - RNA, 22 nt, Human
ccucaggguggcaucagaucuu

SEQ ID NO: 154227 - RNA, 21 nt, Human
gcagccacugccuucaacaau

SEQ ID NO: 154228 - RNA, 22 nt, Human
ggucauuguucuuuucugugau

SEQ ID NO: 154229 - RNA, 22 nt, Human
caaagcucaugcucuuagccau

SEQ ID NO: 154230 - RNA, 22 nt, Human
ucacuuuugaucccuaugcagu

SEQ ID NO: 154231 - RNA, 21 nt, Human
gccugccugcgugacccucuu

SEQ ID NO: 154232 - RNA, 22 nt, Human
ucaaaguagggguaagccaggc

SEQ ID NO: 154233 - RNA, 20 nt, Human
ggcugcugugggcagagagg

SEQ ID NO: 154234 - RNA, 20 nt, Human
caccaggcgcucugagaaca

SEQ ID NO: 154235 - RNA, 22 nt, Human
cauggccuugagugacugcacu

SEQ ID NO: 154236 - RNA, 22 nt, Human
uggccucugcaauggauucacc

SEQ ID NO: 154237 - RNA, 22 nt, Human
uaugugcaguuugcucuuaaca

SEQ ID NO: 154238 - RNA, 22 nt, Human
gcugugcuggaaggggaccugc

SEQ ID NO: 154239 - RNA, 21 nt, Human
ccacaggggcuccccugucag

SEQ ID NO: 154240 - RNA, 22 nt, Human
ugaagcagauggucuggucauu

SEQ ID NO: 154241 - RNA, 22 nt, Human
ugggggugugccagggaccucc

SEQ ID NO: 154242 - RNA, 22 nt, Human
aggcacugggaauaugcugagg

SEQ ID NO: 154243 - RNA, 22 nt, Human
gcugugcagucuuuggugugcc

SEQ ID NO: 154244 - RNA, 22 nt, Human
gcaggagugacauggaugugga

SEQ ID NO: 154245 - RNA, 22 nt, Human
gcagagugaggaagagcuucca

SEQ ID NO: 154246 - RNA, 22 nt, Human
guuugcauuucuugaacuauau

SEQ ID NO: 154247 - RNA, 18 nt, Human
cugcugcaggcacucagg

SEQ ID NO: 154248 - RNA, 22 nt, Human
uccugccucuugccuucuucac

SEQ ID NO: 154249 - RNA, 22 nt, Human
ugagcuuacgugggaacagacu

SEQ ID NO: 154250 - RNA, 22 nt, Human
gaugcugagagguggagggaac

SEQ ID NO: 154251 - RNA, 22 nt, Human
uugaagcauuucuuugagcuuc

SEQ ID NO: 154252 - RNA, 22 nt, Human
aaggucauggcaaauuacuuuu

SEQ ID NO: 154253 - RNA, 22 nt, Human
acagaacugcaggaggaaaagc

SEQ ID NO: 154254 - RNA, 18 nt, Human
gggaagaggaucuggccc

SEQ ID NO: 154255 - RNA, 22 nt, Human
uggggccugagguggagcugca

SEQ ID NO: 154256 - RNA, 22 nt, Human
acauagcuuaaaugagaagaua

SEQ ID NO: 154257 - RNA, 22 nt, Human
acagggcagagggcaguuggua

SEQ ID NO: 154258 - RNA, 22 nt, Human
agugacugggcagggcagggcc

SEQ ID NO: 154259 - RNA, 22 nt, Human
uccugggcuugcuccuccagcu

SEQ ID NO: 154260 - RNA, 22 nt, Human
guguccacggcugagaaugauu

SEQ ID NO: 154261 - RNA, 22 nt, Human
ucugucugacaggguaugaacu

SEQ ID NO: 154262 - RNA, 22 nt, Human
aguaauaauuuauauuagggag

SEQ ID NO: 154263 - RNA, 19 nt, Human
aggcagcacccaguccuug

SEQ ID NO: 154264 - RNA, 23 nt, Human
ugggggugcacgggccacaucuu

SEQ ID NO: 154265 - RNA, 22 nt, Human
ucugccugcaguguggcagggc

SEQ ID NO: 154266 - RNA, 22 nt, Human
gaacaguaaauuuaugcagcac

SEQ ID NO: 154267 - RNA, 22 nt, Human
cucugggcaggaccaguggacc

SEQ ID NO: 154268 - RNA, 22 nt, Human
cucuguccuaugcuugauagaa

SEQ ID NO: 154269 - RNA, 22 nt, Human
ugcccaaguguuuggcugaguc

SEQ ID NO: 154270 - RNA, 22 nt, Human
ucagcuccucaugcaggggaua

SEQ ID NO: 154271 - RNA, 22 nt, Human
uccuucaguuaaagaucucaca

SEQ ID NO: 154272 - RNA, 22 nt, Human
cucagggacguuagaggacagg

SEQ ID NO: 154273 - RNA, 22 nt, Human
ccuccagguguuacauaugacu

SEQ ID NO: 154274 - RNA, 19 nt, Human
gggcuucugggaucaagag

SEQ ID NO: 154275 - RNA, 22 nt, Human
agcagggccucuggcacugguc

SEQ ID NO: 154276 - RNA, 22 nt, Human
aagucacagcuaaauagcuaag

SEQ ID NO: 154277 - RNA, 22 nt, Human
aguggggagguccaggccaccc

SEQ ID NO: 154278 - RNA, 19 nt, Human
acccagagcccuuugcagg

SEQ ID NO: 154279 - RNA, 22 nt, Human
acacagggaggaggugcugugc

SEQ ID NO: 154280 - RNA, 22 nt, Human
agggagccagaguugggagcuc

SEQ ID NO: 154281 - RNA, 22 nt, Human
gagagcuggguucaaguagcug

SEQ ID NO: 154282 - RNA, 22 nt, Human
ggcagcugggucacaccgaucu

SEQ ID NO: 154283 - RNA, 22 nt, Human
cucuccagccacagaagcugcu

SEQ ID NO: 154284 - RNA, 22 nt, Human
aggcaguguguagcuggaagag

SEQ ID NO: 154285 - RNA, 19 nt, Human
cagaguccuugaccagucc

SEQ ID NO: 154286 - RNA, 22 nt, Human
uugugaaauguuucaaaauagu

SEQ ID NO: 154287 - RNA, 22 nt, Human
ccagucccagcucugccaugcu

SEQ ID NO: 154288 - RNA, 22 nt, Human
uccagggaucuuuagagucuuu

SEQ ID NO: 154289 - RNA, 22 nt, Human
acagaguaucuaucaggaguau

SEQ ID NO: 154290 - RNA, 22 nt, Human
aagcccaguuucacacugagac

SEQ ID NO: 154291 - RNA, 22 nt, Human
acagagccaaaaggacauagua

SEQ ID NO: 154292 - RNA, 22 nt, Human
ccugggcaacauagugagaccu

SEQ ID NO: 154293 - RNA, 22 nt, Human
cauuucugucacguucuuuuau

SEQ ID NO: 154294 - RNA, 22 nt, Human
agagcuguuuggacaucugagu

SEQ ID NO: 154295 - RNA, 22 nt, Human
cagcuccugccugggcagcugu

SEQ ID NO: 154296 - RNA, 22 nt, Human
acauguuagaaaugcagaaucu

SEQ ID NO: 154297 - RNA, 22 nt, Human
ggagagagaugccgccuugcuc

SEQ ID NO: 154298 - RNA, 22 nt, Human
ggcugcuggggacgugggagag

SEQ ID NO: 154299 - RNA, 22 nt, Human
gggaguggauuauguggaccca

SEQ ID NO: 154300 - RNA, 22 nt, Human
gagaaagcuucuuucccacagg

SEQ ID NO: 154301 - RNA, 22 nt, Human
cgccaggcuugguagcucaugc

SEQ ID NO: 154302 - RNA, 22 nt, Human
aguaaugugccugaaauacuug

SEQ ID NO: 154303 - RNA, 22 nt, Human
gccucugccaagggggcugcgg

SEQ ID NO: 154304 - RNA, 22 nt, Human
cagguggggcagcugugggagc

SEQ ID NO: 154305 - RNA, 22 nt, Human
gugggccuugcagggugcaggg

SEQ ID NO: 154306 - RNA, 22 nt, Human
uacauuccacuagugacuggcg

SEQ ID NO: 154307 - RNA, 22 nt, Human
cagagugaaauaggggaucaag

SEQ ID NO: 154308 - RNA, 22 nt, Human
aaaaacuguaauuacuuuugca

SEQ ID NO: 154309 - RNA, 22 nt, Human
ccagagccggauugugaagugc

SEQ ID NO: 154310 - RNA, 22 nt, Human
agcugcaguaaagcucuccagg

SEQ ID NO: 154311 - RNA, 22 nt, Human
aggggccuggacauggacgcgc

SEQ ID NO: 154312 - RNA, 22 nt, Human
ggagugaaucacuagaugcaga

SEQ ID NO: 154313 - RNA, 23 nt, Human
gcagaggagcaagcuggacacca

SEQ ID NO: 154314 - RNA, 22 nt, Human
gccuuccugcagcucugagcgu

SEQ ID NO: 154315 - RNA, 22 nt, Human
aggggcuguggaaaccaacucu

SEQ ID NO: 154316 - RNA, 22 nt, Human
agcugcuguggggcucggccug

SEQ ID NO: 154317 - RNA, 22 nt, Human
ugccugagugauguggcagcca

SEQ ID NO: 154318 - RNA, 22 nt, Human
auggcaggcccagguguucauu

SEQ ID NO: 154319 - RNA, 21 nt, Human
guggcucugccaggacugaaa

SEQ ID NO: 154320 - RNA, 22 nt, Human
ugagccugaguucaaggcugca

SEQ ID NO: 154321 - RNA, 22 nt, Human
uccucuucugcccaucagaggc

SEQ ID NO: 154322 - RNA, 22 nt, Human
ccaggccagcaggcacaccugc

SEQ ID NO: 154323 - RNA, 22 nt, Human
uggccgggccgggcgccuccac

SEQ ID NO: 154324 - RNA, 22 nt, Human
ucugaggcuaagagacagaggc

SEQ ID NO: 154325 - RNA, 22 nt, Human
cuccagaagacccauccucaug

SEQ ID NO: 154326 - RNA, 17 nt, Human
gcucccugaggacagcu

SEQ ID NO: 154327 - RNA, 22 nt, Human
acaaagcuagagaagagaauug

SEQ ID NO: 154328 - RNA, 18 nt, Human
ggccugaggauuucagca

SEQ ID NO: 154329 - RNA, 22 nt, Human
gacauucacagguaaacauucc

SEQ ID NO: 154330 - RNA, 22 nt, Human
gagacauggcaaaagcacuggu

SEQ ID NO: 154331 - RNA, 22 nt, Human
gccaugccugugucuccaggcc

SEQ ID NO: 154332 - RNA, 22 nt, Human
ggcacugacugugcagcgcacc

SEQ ID NO: 154333 - RNA, 22 nt, Human
aaguguuaaaagauuaaaugcu

SEQ ID NO: 154334 - RNA, 22 nt, Human
auuugucuucaguagguucuuc

SEQ ID NO: 154335 - RNA, 19 nt, Human
uaaaaugucuguggucagu

SEQ ID NO: 154336 - RNA, 22 nt, Human
ccugagagcauuccacacugaa

SEQ ID NO: 154337 - RNA, 21 nt, Human
agcagcugggcaacauggagg

SEQ ID NO: 154338 - RNA, 22 nt, Human
gcaaaugcucuccuuggucagg

SEQ ID NO: 154339 - RNA, 22 nt, Human
gcugggcugagcuagacuuggc

SEQ ID NO: 154340 - RNA, 19 nt, Human
agucccaggcccgaaagag

SEQ ID NO: 154341 - RNA, 22 nt, Human
accaaggaagaaucuauuugag

SEQ ID NO: 154342 - RNA, 22 nt, Human
ggcugcagcagagggacucacg

SEQ ID NO: 154343 - RNA, 22 nt, Human
uacaaacuuguuuuaaguaagu

SEQ ID NO: 154344 - RNA, 22 nt, Human
aggaaagggguagguguggacg

SEQ ID NO: 154345 - RNA, 22 nt, Human
guccugggccugcugaggcuga

SEQ ID NO: 154346 - RNA, 19 nt, Human
acagaaauguaagugagac

SEQ ID NO: 154347 - RNA, 22 nt, Human
cauggccucaaaggacugcaga

SEQ ID NO: 154348 - RNA, 22 nt, Human
ucaggcagagcuguggagcucu

SEQ ID NO: 154349 - RNA, 22 nt, Human
cuggagaggcugggaacagguu

SEQ ID NO: 154350 - RNA, 22 nt, Human
aggugcuggagucugggcagga

SEQ ID NO: 154351 - RNA, 22 nt, Human
cagggccauaucuugugcacca

SEQ ID NO: 154352 - RNA, 21 nt, Human
aaagagguuaauauuguaagu

SEQ ID NO: 154353 - RNA, 20 nt, Human
uuugagaccagucugcccaa

SEQ ID NO: 154354 - RNA, 22 nt, Human
uggccugggcaugaagcaucgu

SEQ ID NO: 154355 - RNA, 23 nt, Human
cccagagcacagccuccagaugc

SEQ ID NO: 154356 - RNA, 22 nt, Human
cauggacucugguuuggggagc

SEQ ID NO: 154357 - RNA, 22 nt, Human
cugagccagcgggcucacuuuu

SEQ ID NO: 154358 - RNA, 22 nt, Human
aguaggaggcgggagcaugaag

SEQ ID NO: 154359 - RNA, 22 nt, Human
ucucaggcuaccuugcacaagg

SEQ ID NO: 154360 - RNA, 22 nt, Human
agucccagcccaguccuguaag

SEQ ID NO: 154361 - RNA, 22 nt, Human
ugauuuccaugaagcugaaggc

SEQ ID NO: 154362 - RNA, 22 nt, Human
cacagcuucugagugaggauuu

SEQ ID NO: 154363 - RNA, 19 nt, Human
ggaccagguccugggcagc

SEQ ID NO: 154364 - RNA, 21 nt, Human
gagcauggcuuacaucagcag

SEQ ID NO: 154365 - RNA, 22 nt, Human
uggugccuugggccuacagcgc

SEQ ID NO: 154366 - RNA, 22 nt, Human
caagauggacauaaggagagaa

SEQ ID NO: 154367 - RNA, 22 nt, Human
acagaaauaacuuuuuauguuu

SEQ ID NO: 154368 - RNA, 22 nt, Human
cagccaucaguaaagacagcuu

SEQ ID NO: 154369 - RNA, 18 nt, Human
aggcuucccaggcaggcc

SEQ ID NO: 154370 - RNA, 22 nt, Human
ccuuucucuaucgacccaucgc

SEQ ID NO: 154371 - RNA, 22 nt, Human
uccagucaucucccuucacauu

SEQ ID NO: 154372 - RNA, 22 nt, Human
caggcagggagcuggaaaggau

SEQ ID NO: 154373 - RNA, 22 nt, Human
uccauuuuguagguaugcuaca

SEQ ID NO: 154374 - RNA, 22 nt, Human
ugggggugacuaucucgggaau

SEQ ID NO: 154375 - RNA, 22 nt, Human
agugugggugagggaggcccuc

SEQ ID NO: 154376 - RNA, 22 nt, Human
ggggacaguuaaagaccaagac

SEQ ID NO: 154377 - RNA, 22 nt, Human
ccaagggcucugacuugccugc

SEQ ID NO: 154378 - RNA, 19 nt, Human
auaaggcaauuggauuugg

SEQ ID NO: 154379 - RNA, 22 nt, Human
uccuggguccauggcagccgaa

SEQ ID NO: 154380 - RNA, 22 nt, Human
cauugcuguuaauugucucuag

SEQ ID NO: 154381 - RNA, 22 nt, Human
ggccaagauggaaggagagaug

SEQ ID NO: 154382 - RNA, 22 nt, Human
caaugauggcuaggcagcugcu

SEQ ID NO: 154383 - RNA, 20 nt, Human
aagagcauaguacaggaaga

SEQ ID NO: 154384 - RNA, 22 nt, Human
ggaggccuagccagcuccaguu

SEQ ID NO: 154385 - RNA, 22 nt, Human
uuucuuaggcucuaaaaugacu

SEQ ID NO: 154386 - RNA, 22 nt, Human
agcuccugcacccagccuugag

SEQ ID NO: 154387 - RNA, 22 nt, Human
uaagaacauuuucggaaagaua

SEQ ID NO: 154388 - RNA, 22 nt, Human
cuggguggaaagugcugagaau

SEQ ID NO: 154389 - RNA, 22 nt, Human
ugucccagaucacaggagggga

SEQ ID NO: 154390 - RNA, 22 nt, Human
aauguacaauaagacaaagagg

SEQ ID NO: 154391 - RNA, 22 nt, Human
gggauggcucaaaggagucagg

SEQ ID NO: 154392 - RNA, 22 nt, Human
gcugucacaucaaggcacuaaa

SEQ ID NO: 154393 - RNA, 22 nt, Human
guggcccugucccaggccuccu

SEQ ID NO: 154394 - RNA, 22 nt, Human
aggccugaggaccagauaaaug

SEQ ID NO: 154395 - RNA, 19 nt, Human
ucucaauguucagaaagcu

SEQ ID NO: 154396 - RNA, 22 nt, Human
aagauuuaccacuuuauucaag

SEQ ID NO: 154397 - RNA, 22 nt, Human
ccucucaucauuaucgcuuugu

SEQ ID NO: 154398 - RNA, 22 nt, Human
uggcagcuccggguaggggcug

SEQ ID NO: 154399 - RNA, 22 nt, Human
uuugcauuguaauauuuaguuc

SEQ ID NO: 154400 - RNA, 22 nt, Human
gcucugcuugcaucaugacugc

SEQ ID NO: 154401 - RNA, 22 nt, Human
cauugcaccacauugcaucccu

SEQ ID NO: 154402 - RNA, 22 nt, Human
gagcugccuacauugccaagag

SEQ ID NO: 154403 - RNA, 22 nt, Human
cuuuauguucaguacaaugcuu

SEQ ID NO: 154404 - RNA, 22 nt, Human
ccugggugucaugggcagcugg

SEQ ID NO: 154405 - RNA, 19 nt, Human
ggccaggcugacugugguc

SEQ ID NO: 154406 - RNA, 22 nt, Human
ugaugggacugccagcugcuga

SEQ ID NO: 154407 - RNA, 20 nt, Human
ucugcucagcccucaguggc

SEQ ID NO: 154408 - RNA, 22 nt, Human
ggaggccaaggugggcggauca

SEQ ID NO: 154409 - RNA, 22 nt, Human
cugaggccagcugcagagcucu

SEQ ID NO: 154410 - RNA, 22 nt, Human
ugcuguagcccugcacagugca

SEQ ID NO: 154411 - RNA, 22 nt, Human
uacuacauuaauaaaacauuca

SEQ ID NO: 154412 - RNA, 22 nt, Human
caagaugaucccugaaggcagc

SEQ ID NO: 154413 - RNA, 22 nt, Human
uucaaugagcccaagaacguga

SEQ ID NO: 154414 - RNA, 22 nt, Human
aggccagggucccacacucgca

SEQ ID NO: 154415 - RNA, 22 nt, Human
ccugccugcguccucugagggc

SEQ ID NO: 154416 - RNA, 22 nt, Human
gucuggagccacccuaagcauu

SEQ ID NO: 154417 - RNA, 22 nt, Human
ugagccuggccugcagagacca

SEQ ID NO: 154418 - RNA, 21 nt, Human
uuguucuuccagaagcaaagu

SEQ ID NO: 154419 - RNA, 22 nt, Human
cuacauuuggagaguauaggaa

SEQ ID NO: 154420 - RNA, 22 nt, Human
cugagagucagcuucuccuccu

SEQ ID NO: 154421 - RNA, 23 nt, Human
gccuucagcucgggaaggcuccc

SEQ ID NO: 154422 - RNA, 22 nt, Human
gccugguggacacugggcauca

SEQ ID NO: 154423 - RNA, 22 nt, Human
ccaggcuggauuuugcaguuca

SEQ ID NO: 154424 - RNA, 22 nt, Human
aacaaaugaccugauuucuucc

SEQ ID NO: 154425 - RNA, 22 nt, Human
cccaggaggcagagguugcagu

SEQ ID NO: 154426 - RNA, 22 nt, Human
aggcuccaugcaaaggcuguuu

SEQ ID NO: 154427 - RNA, 22 nt, Human
gcugagagcaaagcaugucuag

SEQ ID NO: 154428 - RNA, 22 nt, Human
ucccccacucuaaaggagccuu

SEQ ID NO: 154429 - RNA, 22 nt, Human
ugggcuggugagggaucauuua

SEQ ID NO: 154430 - RNA, 22 nt, Human
caccaucagcagcaggugucaa

SEQ ID NO: 154431 - RNA, 22 nt, Human
uccagggaugguaaugagcagu

SEQ ID NO: 154432 - RNA, 22 nt, Human
agcagcuggggccugugacgau

SEQ ID NO: 154433 - RNA, 22 nt, Human
ucaaagucauggcaggcucaga

SEQ ID NO: 154434 - RNA, 22 nt, Human
gcucaaggcaggcagacaugag

SEQ ID NO: 154435 - RNA, 22 nt, Human
caggccucaggggcucaggcug

SEQ ID NO: 154436 - RNA, 22 nt, Human
cuuauguacacacauauauugu

SEQ ID NO: 154437 - RNA, 22 nt, Human
uuuccucuuccgagggggaggc

SEQ ID NO: 154438 - RNA, 22 nt, Human
gaaacccaaacuaagacaguag

SEQ ID NO: 154439 - RNA, 22 nt, Human
cuggggugagcagaaacagggg

SEQ ID NO: 154440 - RNA, 22 nt, Human
uggcagcugucuguggggucuc

SEQ ID NO: 154441 - RNA, 22 nt, Human
acugccaggauggcacuagagg

SEQ ID NO: 154442 - RNA, 23 nt, Human
uuucuguuggguauauauccaag

SEQ ID NO: 154443 - RNA, 22 nt, Human
cagcagagcauuugguaggagg

SEQ ID NO: 154444 - RNA, 22 nt, Human
cccuggagucagguuggccugg

SEQ ID NO: 154445 - RNA, 22 nt, Human
agccaggauggucucgaucggc

SEQ ID NO: 154446 - RNA, 22 nt, Human
ccagagacgucggucagggcgc

SEQ ID NO: 154447 - RNA, 22 nt, Human
uugauacaggccuucuagauga

SEQ ID NO: 154448 - RNA, 21 nt, Human
agcugagcccagaagacuggu

SEQ ID NO: 154449 - RNA, 23 nt, Human
ccuggcuggauucucugcauuca

SEQ ID NO: 154450 - RNA, 22 nt, Human
ucuguagcaagugagaggcauu

SEQ ID NO: 154451 - RNA, 22 nt, Human
agcagcuguacuuucaucuguu

SEQ ID NO: 154452 - RNA, 22 nt, Human
uguccugcaacugaaggagaag

SEQ ID NO: 154453 - RNA, 22 nt, Human
ccuugcaggggaacaggcagug

SEQ ID NO: 154454 - RNA, 22 nt, Human
uacauuaucuuguuaucuuuca

SEQ ID NO: 154455 - RNA, 21 nt, Human
uguucacauggagcagaaugu

SEQ ID NO: 154456 - RNA, 17 nt, Human
uagagcugguucaggag

SEQ ID NO: 154457 - RNA, 22 nt, Human
uuccagaauuuuguucugcuug

SEQ ID NO: 154458 - RNA, 22 nt, Human
uggagggcucuuucaccuggua

SEQ ID NO: 154459 - RNA, 22 nt, Human
aggaaucccgcaccagcugcug

SEQ ID NO: 154460 - RNA, 22 nt, Human
ucucccagaggaucccagugga

SEQ ID NO: 154461 - RNA, 22 nt, Human
cuggccacuggagguggcaccc

SEQ ID NO: 154462 - RNA, 22 nt, Human
cuuguacauagagaagaagccu

SEQ ID NO: 154463 - RNA, 22 nt, Human
cagcacuggggggauucggagc

SEQ ID NO: 154464 - RNA, 21 nt, Human
ccuccaggugauuccgugcuc

SEQ ID NO: 154465 - RNA, 22 nt, Human
agccacagagcaggagaccuuu

SEQ ID NO: 154466 - RNA, 22 nt, Human
aaauaauuauagcgagucuauc

SEQ ID NO: 154467 - RNA, 22 nt, Human
auucagcauaaucaguagcuug

SEQ ID NO: 154468 - RNA, 23 nt, Human
auucuucauuaucuucuagaaaa

SEQ ID NO: 154469 - RNA, 22 nt, Human
auugcagcuggucaggguaauu

SEQ ID NO: 154470 - RNA, 22 nt, Human
cugggagagaagcgaagcuggg

SEQ ID NO: 154471 - RNA, 22 nt, Human
gugucccaaagauuagaaauca

SEQ ID NO: 154472 - RNA, 22 nt, Human
gugcagagaaaugagaagucga

SEQ ID NO: 154473 - RNA, 22 nt, Human
uuaaacagacaguaaaugaaac

SEQ ID NO: 154474 - RNA, 22 nt, Human
agugucauuuuguccaucuucu

SEQ ID NO: 154475 - RNA, 22 nt, Human
accacugcccauggugaaaacu

SEQ ID NO: 154476 - RNA, 22 nt, Human
uuggccuuaaccucucugugcc

SEQ ID NO: 154477 - RNA, 22 nt, Human
ccaaagugcugagauuacaggu

SEQ ID NO: 154478 - RNA, 22 nt, Human
ugggcugcccaagguggccaug

SEQ ID NO: 154479 - RNA, 22 nt, Human
guccucugggagccuugagccu

SEQ ID NO: 154480 - RNA, 22 nt, Human
ggaggaugagcuacgaggagcu

SEQ ID NO: 154481 - RNA, 22 nt, Human
uggguagagacacagucugggg

SEQ ID NO: 154482 - RNA, 22 nt, Human
cagcuuccaucuccacugcccu

SEQ ID NO: 154483 - RNA, 22 nt, Human
aggcuuccucgugccuuagaua

SEQ ID NO: 154484 - RNA, 22 nt, Human
uuugcauugcauuaaguauucu

SEQ ID NO: 154485 - RNA, 22 nt, Human
cagcagggcccccgggugcgcc

SEQ ID NO: 154486 - RNA, 22 nt, Human
uaaugcacauagaaguacuuag

SEQ ID NO: 154487 - RNA, 22 nt, Human
acccaggagcaggcugggcagu

SEQ ID NO: 154488 - RNA, 22 nt, Human
aagagagaacucccuucgccag

SEQ ID NO: 154489 - RNA, 22 nt, Human
ccugucuguccucucaugagcc

SEQ ID NO: 154490 - RNA, 22 nt, Human
ggcagggucuggacugaaagcu

SEQ ID NO: 154491 - RNA, 22 nt, Human
ucuuuacaucacaauuguaugg

SEQ ID NO: 154492 - RNA, 22 nt, Human
gcuggcuguguuucaucucuga

SEQ ID NO: 154493 - RNA, 22 nt, Human
aggcccuggguuagggcccacu

SEQ ID NO: 154494 - RNA, 22 nt, Human
caagggcucacggucugcuggg

SEQ ID NO: 154495 - RNA, 22 nt, Human
uaagauaugguaggaaguuugg

SEQ ID NO: 154496 - RNA, 22 nt, Human
aggcuggguaccugucauaugc

SEQ ID NO: 154497 - RNA, 22 nt, Human
uuccaguugguagaauguaagg

SEQ ID NO: 154498 - RNA, 21 nt, Human
gcacagugccaggcacacagu

SEQ ID NO: 154499 - RNA, 22 nt, Human
cagcuggcuccaccucugggcu

SEQ ID NO: 154500 - RNA, 22 nt, Human
ucugucaccgagggcauccaaa

SEQ ID NO: 154501 - RNA, 22 nt, Human
ggcugagcucaggggcagcagg

SEQ ID NO: 154502 - RNA, 22 nt, Human
agagcugcaggguggacccagg

SEQ ID NO: 154503 - RNA, 22 nt, Human
uggcagcaguggagguagaaag

SEQ ID NO: 154504 - RNA, 22 nt, Human
ggcccuguccuggcugucuccg

SEQ ID NO: 154505 - RNA, 22 nt, Human
gcagagguggcaucugggcucu

SEQ ID NO: 154506 - RNA, 22 nt, Human
uccaaacacccuccaugcugca

SEQ ID NO: 154507 - RNA, 21 nt, Human
ugaggcuguuguaccagggag

SEQ ID NO: 154508 - RNA, 22 nt, Human
ucauccaguuguggagagggaa

SEQ ID NO: 154509 - RNA, 22 nt, Human
cagcaguguacaaggugucaga

SEQ ID NO: 154510 - RNA, 22 nt, Human
caguggaggcucaagugugcuu

SEQ ID NO: 154511 - RNA, 22 nt, Human
uggcgugcccuccagacuuggc

SEQ ID NO: 154512 - RNA, 22 nt, Human
uagagaaaagcagggaucagga

SEQ ID NO: 154513 - RNA, 22 nt, Human
cauaccuuucucaagcacaugu

SEQ ID NO: 154514 - RNA, 22 nt, Human
cagcagcugcgugcccaggccg

SEQ ID NO: 154515 - RNA, 22 nt, Human
gccuggagggcucuagagaggc

SEQ ID NO: 154516 - RNA, 22 nt, Human
ucagaguggugguuuugccuuc

SEQ ID NO: 154517 - RNA, 22 nt, Human
agaagcagacucugaggcaagg

SEQ ID NO: 154518 - RNA, 22 nt, Human
cucagaguccccacaucugggu

SEQ ID NO: 154519 - RNA, 22 nt, Human
caagggcucuuuugaggaaugu

SEQ ID NO: 154520 - RNA, 22 nt, Human
uaaaugcaaugugcuuuaccag

SEQ ID NO: 154521 - RNA, 22 nt, Human
gagauuggccuggcuugccaac

SEQ ID NO: 154522 - RNA, 22 nt, Human
agaagccacuggagguugagau

SEQ ID NO: 154523 - RNA, 22 nt, Human
augguuuguguggcccagauga

SEQ ID NO: 154524 - RNA, 22 nt, Human
gcccagcagcugguggagaagg

SEQ ID NO: 154525 - RNA, 22 nt, Human
aagccagggauuccugagggag

SEQ ID NO: 154526 - RNA, 22 nt, Human
cagcaauaagccagguuagaca

SEQ ID NO: 154527 - RNA, 22 nt, Human
auuugucuuugagugcccugcu

SEQ ID NO: 154528 - RNA, 22 nt, Human
caagagcuuuagaaaugcucau

SEQ ID NO: 154529 - RNA, 22 nt, Human
gguggcagucuuaagagaucuu

SEQ ID NO: 154530 - RNA, 22 nt, Human
cugagccagcuggcaugugcua

SEQ ID NO: 154531 - RNA, 22 nt, Human
augggaggcaggcucagaaccg

SEQ ID NO: 154532 - RNA, 21 nt, Human
uggcucugagccucauggcug

SEQ ID NO: 154533 - RNA, 22 nt, Human
uguauuuugugaggaucacucu

SEQ ID NO: 154534 - RNA, 22 nt, Human
accugccucuaagcagcaggug

SEQ ID NO: 154535 - RNA, 22 nt, Human
ggagcugggaauuggaucaucu

SEQ ID NO: 154536 - RNA, 22 nt, Human
ugucaccaguuccaggaaauaa

SEQ ID NO: 154537 - RNA, 22 nt, Human
cugagccagagggagucggguc

SEQ ID NO: 154538 - RNA, 22 nt, Human
caggguccaucuuucaucacug

SEQ ID NO: 154539 - RNA, 22 nt, Human
gagcuuccugaugccgaccagu

SEQ ID NO: 154540 - RNA, 22 nt, Human
ccugcagcuccggauuucuggg

SEQ ID NO: 154541 - RNA, 19 nt, Human
uggcaggcccaggauggac

SEQ ID NO: 154542 - RNA, 22 nt, Human
gucucagauaacauguauucua

SEQ ID NO: 154543 - RNA, 22 nt, Human
gcucagaggcacgaccucuugg

SEQ ID NO: 154544 - RNA, 22 nt, Human
ucugcucagugcuuaucucuaa

SEQ ID NO: 154545 - RNA, 22 nt, Human
aucuggcuccuacacuugaaga

SEQ ID NO: 154546 - RNA, 22 nt, Human
uccuguaguugcuaaguuuguu

SEQ ID NO: 154547 - RNA, 22 nt, Human
auacuuacuuuucuucagacua

SEQ ID NO: 154548 - RNA, 22 nt, Human
auggaaagggaagcaaggaaca

SEQ ID NO: 154549 - RNA, 22 nt, Human
agugaccauuuucagcuagagg

SEQ ID NO: 154550 - RNA, 22 nt, Human
cccagccucugggcucacccaa

SEQ ID NO: 154551 - RNA, 22 nt, Human
gccgaagcugccgucugguccu

SEQ ID NO: 154552 - RNA, 22 nt, Human
ggcagcugauuagcaucaagga

SEQ ID NO: 154553 - RNA, 22 nt, Human
agcagugggugacagagcugag

SEQ ID NO: 154554 - RNA, 22 nt, Human
uaaaucacuccuaauaaucagu

SEQ ID NO: 154555 - RNA, 22 nt, Human
agaaauguuuauggcugccuau

SEQ ID NO: 154556 - RNA, 22 nt, Human
cccaagggagugccuggucaac

SEQ ID NO: 154557 - RNA, 22 nt, Human
ggucagccuuggauuugguagc

SEQ ID NO: 154558 - RNA, 22 nt, Human
aggcucauucuugccucugagc

SEQ ID NO: 154559 - RNA, 22 nt, Human
gguccuggaaauugacggaaag

SEQ ID NO: 154560 - RNA, 22 nt, Human
cagcuugcuaauuuugacuuca

SEQ ID NO: 154561 - RNA, 22 nt, Human
uggccuugggcagguggccugc

SEQ ID NO: 154562 - RNA, 22 nt, Human
ccagccaguccagcauuggugu

SEQ ID NO: 154563 - RNA, 22 nt, Human
uggcagaguggaccauacucaa

SEQ ID NO: 154564 - RNA, 22 nt, Human
uccugcagagacagaggccuca

SEQ ID NO: 154565 - RNA, 22 nt, Human
cuuacauugucuuaguuuucaa

SEQ ID NO: 154566 - RNA, 22 nt, Human
uucacaggcuuggagguggggg

SEQ ID NO: 154567 - RNA, 22 nt, Human
gggcugggcaugguguucccuc

SEQ ID NO: 154568 - RNA, 22 nt, Human
uuuuccuacugauaaacaguua

SEQ ID NO: 154569 - RNA, 22 nt, Human
uacauguaggugacauuuuaau

SEQ ID NO: 154570 - RNA, 22 nt, Human
ucucuccuuaucauuguguuua

SEQ ID NO: 154571 - RNA, 22 nt, Human
augaaggauggcuggcugcccu

SEQ ID NO: 154572 - RNA, 22 nt, Human
cuuugaaaacuuaaauaacagc

SEQ ID NO: 154573 - RNA, 22 nt, Human
gcugcaggcauuuuccugggca

SEQ ID NO: 154574 - RNA, 19 nt, Human
ccugggaggcggagguugc

SEQ ID NO: 154575 - RNA, 22 nt, Human
uggcagagaacacacaugauuc

SEQ ID NO: 154576 - RNA, 22 nt, Human
uguaggaguccaaucaggagac

SEQ ID NO: 154577 - RNA, 22 nt, Human
ccacaggggucucuguagcuga

SEQ ID NO: 154578 - RNA, 22 nt, Human
gaugcacagugacccugccagu

SEQ ID NO: 154579 - RNA, 22 nt, Human
ugcagcucauugcuggggucug

SEQ ID NO: 154580 - RNA, 22 nt, Human
gcugucacucuccggccuuccc

SEQ ID NO: 154581 - RNA, 22 nt, Human
agggcccucuggcaggccaggc

SEQ ID NO: 154582 - RNA, 22 nt, Human
ccugggcuucugucuagauguu

SEQ ID NO: 154583 - RNA, 22 nt, Human
ucagcugccuuucccaugcuag

SEQ ID NO: 154584 - RNA, 22 nt, Human
agagccugggaauuugcauguu

SEQ ID NO: 154585 - RNA, 22 nt, Human
uggcccugcuguaucaucugcu

SEQ ID NO: 154586 - RNA, 22 nt, Human
acaguaauuaaaauggaucugc

SEQ ID NO: 154587 - RNA, 22 nt, Human
uggagcauauucuggagcuugg

SEQ ID NO: 154588 - RNA, 22 nt, Human
ucaggagcagcaugggugagag

SEQ ID NO: 154589 - RNA, 22 nt, Human
cagagcucagagcagggcacuc

SEQ ID NO: 154590 - RNA, 22 nt, Human
ggaggugguggcagugacaauu

SEQ ID NO: 154591 - RNA, 22 nt, Human
cagcauggggaucacuguaggc

SEQ ID NO: 154592 - RNA, 22 nt, Human
caggcuugcugcuagagcacuu

SEQ ID NO: 154593 - RNA, 20 nt, Human
uggcuccugcgguggaacca

SEQ ID NO: 154594 - RNA, 22 nt, Human
guguuuccucuagaagccaugg

SEQ ID NO: 154595 - RNA, 23 nt, Human
agagcuuagggaauucacaugag

SEQ ID NO: 154596 - RNA, 22 nt, Human
aagaacaguguccugggacucg

SEQ ID NO: 154597 - RNA, 22 nt, Human
uuagcucagaaaauuuaaacuu

SEQ ID NO: 154598 - RNA, 22 nt, Human
ugucccaguuuaucugggacug

SEQ ID NO: 154599 - RNA, 22 nt, Human
gccuuccuuacaccugcucagc

SEQ ID NO: 154600 - RNA, 20 nt, Human
ccucaagcagacugacagcu

SEQ ID NO: 154601 - RNA, 22 nt, Human
acaggugggcuuaagagucggc

SEQ ID NO: 154602 - RNA, 22 nt, Human
auuguacaaugccuggaacauu

SEQ ID NO: 154603 - RNA, 22 nt, Human
ccugauggagcccugcugcaug

SEQ ID NO: 154604 - RNA, 22 nt, Human
ucuuucagccacuuaccugucu

SEQ ID NO: 154605 - RNA, 22 nt, Human
aaauaauguuaggccuuugcuc

SEQ ID NO: 154606 - RNA, 22 nt, Human
gccugcuggauguggccaggcc

SEQ ID NO: 154607 - RNA, 22 nt, Human
ggaggccaggaaggcucggaga

SEQ ID NO: 154608 - RNA, 22 nt, Human
gcucugagcacugugcggcugg

SEQ ID NO: 154609 - RNA, 22 nt, Human
agcagggcaaagucaggcuaac

SEQ ID NO: 154610 - RNA, 22 nt, Human
ggcugcagagcugggugggccu

SEQ ID NO: 154611 - RNA, 22 nt, Human
gugugcaugcauagacaccaca

SEQ ID NO: 154612 - RNA, 22 nt, Human
agcagagcuauucuugugcaau

SEQ ID NO: 154613 - RNA, 22 nt, Human
caguggucugugcuucuguaca

SEQ ID NO: 154614 - RNA, 22 nt, Human
agccucucugaugugacagcua

SEQ ID NO: 154615 - RNA, 22 nt, Human
aaauguagaccuauagggaccu

SEQ ID NO: 154616 - RNA, 22 nt, Human
auugacaaucuacuauguucug

SEQ ID NO: 154617 - RNA, 22 nt, Human
caggaggccaacugugggacuu

SEQ ID NO: 154618 - RNA, 22 nt, Human
gugucccagcagcacauuggcu

SEQ ID NO: 154619 - RNA, 22 nt, Human
acacagccgugaaucugcuucu

SEQ ID NO: 154620 - RNA, 22 nt, Human
cauaucccauuggccaggacau

SEQ ID NO: 154621 - RNA, 22 nt, Human
caggugggagcggagacugauu

SEQ ID NO: 154622 - RNA, 22 nt, Human
acagccagggucucaggaggcg

SEQ ID NO: 154623 - RNA, 22 nt, Human
uggacucagaaguguucuuuua

SEQ ID NO: 154624 - RNA, 22 nt, Human
cugugcuggcagaccuggaguu

SEQ ID NO: 154625 - RNA, 22 nt, Human
gcagguguggaguggggugagc

SEQ ID NO: 154626 - RNA, 22 nt, Human
aucagcaaucaaauugcagagu

SEQ ID NO: 154627 - RNA, 22 nt, Human
ucuggaaguuagaggaggaaag

SEQ ID NO: 154628 - RNA, 22 nt, Human
agguaggguuaauggagauaua

SEQ ID NO: 154629 - RNA, 22 nt, Human
agggcagcuagcuguagaaaga

SEQ ID NO: 154630 - RNA, 22 nt, Human
aaauguguuugauaggaauauu

SEQ ID NO: 154631 - RNA, 22 nt, Human
aaaaguuaccucuguaauauaa

SEQ ID NO: 154632 - RNA, 22 nt, Human
ugccaggggaccuagggauguc

SEQ ID NO: 154633 - RNA, 22 nt, Human
uguacaaugccgagacuaacuc

SEQ ID NO: 154634 - RNA, 22 nt, Human
gcucccagcauugcuucccagg

SEQ ID NO: 154635 - RNA, 22 nt, Human
aagggcuggaucucucugagca

SEQ ID NO: 154636 - RNA, 22 nt, Human
ucuggagcgaggucccugucug

SEQ ID NO: 154637 - RNA, 22 nt, Human
cugggcucagcccaugcugucc

SEQ ID NO: 154638 - RNA, 22 nt, Human
cagugggcugugauggauucac

SEQ ID NO: 154639 - RNA, 22 nt, Human
gcugugugacugagagccuggc

SEQ ID NO: 154640 - RNA, 17 nt, Human
accagccucuccugggg

SEQ ID NO: 154641 - RNA, 22 nt, Human
ucugggcugggagcguguggac

SEQ ID NO: 154642 - RNA, 20 nt, Human
cuuugccuauucucugccug

SEQ ID NO: 154643 - RNA, 22 nt, Human
ggggauggugggaaggcaaucu

SEQ ID NO: 154644 - RNA, 22 nt, Human
cuggccacaugugugcugagca

SEQ ID NO: 154645 - RNA, 22 nt, Human
ugauggcuaucccuggaagggc

SEQ ID NO: 154646 - RNA, 22 nt, Human
ucaggcaguagaauugcuugaa

SEQ ID NO: 154647 - RNA, 22 nt, Human
ccagggugggaggcugaaggcg

SEQ ID NO: 154648 - RNA, 22 nt, Human
acagagaugcaaguguguauuu

SEQ ID NO: 154649 - RNA, 22 nt, Human
uuacaguauuguuaaacucuuu

SEQ ID NO: 154650 - RNA, 22 nt, Human
ucaugacaucuguuuaucucaa

SEQ ID NO: 154651 - RNA, 22 nt, Human
accagagaaaacacagcaggcu

SEQ ID NO: 154652 - RNA, 22 nt, Human
gcccugucccuuggcuucuagg

SEQ ID NO: 154653 - RNA, 21 nt, Human
agcuggugucagagcucuggg

SEQ ID NO: 154654 - RNA, 22 nt, Human
ugagcuggucacuccuucugaa

SEQ ID NO: 154655 - RNA, 22 nt, Human
gcagggacaucuuugucuagua

SEQ ID NO: 154656 - RNA, 22 nt, Human
agggucaggagacacuggcaac

SEQ ID NO: 154657 - RNA, 22 nt, Human
gcagcagaugcuuucauggaca

SEQ ID NO: 154658 - RNA, 22 nt, Human
aagaagagaaaugugcugcugg

SEQ ID NO: 154659 - RNA, 22 nt, Human
ucuggccuacuggaguccauga

SEQ ID NO: 154660 - RNA, 22 nt, Human
agggcagcacagcugugcuccu

SEQ ID NO: 154661 - RNA, 22 nt, Human
aggcacuggguaauuaguagcu

SEQ ID NO: 154662 - RNA, 22 nt, Human
caggaaccuaaagagacauuac

SEQ ID NO: 154663 - RNA, 22 nt, Human
cuuagaaauuguuacucauuca

SEQ ID NO: 154664 - RNA, 22 nt, Human
cuaaaugcccuacaaugacugg

SEQ ID NO: 154665 - RNA, 22 nt, Human
aggccugggcaagaaggggcgu

SEQ ID NO: 154666 - RNA, 22 nt, Human
uugcauuguugcaaugaaguau

SEQ ID NO: 154667 - RNA, 22 nt, Human
ggcagaguggagugcggccucc

SEQ ID NO: 154668 - RNA, 22 nt, Human
cugccagguuggcgcucgcucu

SEQ ID NO: 154669 - RNA, 22 nt, Human
uucauuacugcgguagucacac

SEQ ID NO: 154670 - RNA, 22 nt, Human
gccuucaggaaaucaguccuug

SEQ ID NO: 154671 - RNA, 22 nt, Human
gccuggagcucuccacuugggg

SEQ ID NO: 154672 - RNA, 22 nt, Human
aaggcagauauaaagacuagag

SEQ ID NO: 154673 - RNA, 22 nt, Human
gccucccuguucuuccacaaua

SEQ ID NO: 154674 - RNA, 22 nt, Human
uccugccucacaguugaaguuu

SEQ ID NO: 154675 - RNA, 22 nt, Human
uuagauaauguagagauaugag

SEQ ID NO: 154676 - RNA, 22 nt, Human
ccagcucucagcgggagacuca

SEQ ID NO: 154677 - RNA, 22 nt, Human
caggcacuggggaugcugggau

SEQ ID NO: 154678 - RNA, 22 nt, Human
uuauuaaugaguacaaguuauu

SEQ ID NO: 154679 - RNA, 22 nt, Human
guggagacuucuacuagagacc

SEQ ID NO: 154680 - RNA, 22 nt, Human
gagcugccaguguaugaauucu

SEQ ID NO: 154681 - RNA, 22 nt, Human
ccucucuguaagggucccuccc

SEQ ID NO: 154682 - RNA, 22 nt, Human
caggcugagcucuggccugggc

SEQ ID NO: 154683 - RNA, 22 nt, Human
cccagcccaucucaaaggucua

SEQ ID NO: 154684 - RNA, 22 nt, Human
uggggugccgacagggagggca

SEQ ID NO: 154685 - RNA, 22 nt, Human
uacccaggagaaacagcagggc

SEQ ID NO: 154686 - RNA, 22 nt, Human
ggcuggcucagggcuugagaga

SEQ ID NO: 154687 - RNA, 22 nt, Human
aagcagugcgcucaucuaaggg

SEQ ID NO: 154688 - RNA, 22 nt, Human
aggggcugggacagagccaagc

SEQ ID NO: 154689 - RNA, 22 nt, Human
aggagcugaaacuucucauaug

SEQ ID NO: 154690 - RNA, 22 nt, Human
agagugaaaagcuagagcagua

SEQ ID NO: 154691 - RNA, 22 nt, Human
ggcucugggucuguggggagcg

SEQ ID NO: 154692 - RNA, 22 nt, Human
gcaagcuggcuguuagaggaug

SEQ ID NO: 154693 - RNA, 22 nt, Human
uuuccuuccuugcuagccugag

SEQ ID NO: 154694 - RNA, 22 nt, Human
cccagacugcagagcgggcaga

SEQ ID NO: 154695 - RNA, 22 nt, Human
caggaucccuggccuccgccca

SEQ ID NO: 154696 - RNA, 22 nt, Human
gcucccaccaggcagaccuacc

SEQ ID NO: 154697 - RNA, 22 nt, Human
gcugucugggaugucacugcug

SEQ ID NO: 154698 - RNA, 22 nt, Human
gccauuuagggaggcaagguga

SEQ ID NO: 154699 - RNA, 22 nt, Human
ucucagagagaugaaacuucca

SEQ ID NO: 154700 - RNA, 22 nt, Human
uaaugcacaugacugaacuauu

SEQ ID NO: 154701 - RNA, 22 nt, Human
ggcagcaguccauggcccaagg

SEQ ID NO: 154702 - RNA, 18 nt, Human
uccugccugcgggcuccc

SEQ ID NO: 154703 - RNA, 22 nt, Human
aguugaaauuagaguccuggcu

SEQ ID NO: 154704 - RNA, 17 nt, Human
uauguaguacuuauaaa

SEQ ID NO: 154705 - RNA, 22 nt, Human
uuucacauuuuauacuuaagcc

SEQ ID NO: 154706 - RNA, 22 nt, Human
cagggccagccgcagcauccac

SEQ ID NO: 154707 - RNA, 22 nt, Human
ggccucacccaucggugccuuu

SEQ ID NO: 154708 - RNA, 22 nt, Human
cuggcucccucgcugaggugcu

SEQ ID NO: 154709 - RNA, 22 nt, Human
uuagugucuucuucauccucug

SEQ ID NO: 154710 - RNA, 22 nt, Human
uuaucguacgcuucagaaauuu

SEQ ID NO: 154711 - RNA, 22 nt, Human
gagagcugcagccgagaggggg

SEQ ID NO: 154712 - RNA, 22 nt, Human
cugagcugggcucucuugaggg

SEQ ID NO: 154713 - RNA, 22 nt, Human
ccucuggcuguaccacuggcac

SEQ ID NO: 154714 - RNA, 19 nt, Human
augauacaggugaaaauug

SEQ ID NO: 154715 - RNA, 22 nt, Human
ggccuggcucuugcccagccug

SEQ ID NO: 154716 - RNA, 19 nt, Human
acaaagcugugagcagcuu

SEQ ID NO: 154717 - RNA, 22 nt, Human
caagggcuucaaguggccaaga

SEQ ID NO: 154718 - RNA, 19 nt, Human
ccugcagggaugagagguu

SEQ ID NO: 154719 - RNA, 22 nt, Human
cagcuuugauucuuucugccau

SEQ ID NO: 154720 - RNA, 22 nt, Human
cuguggcuaggaagcuguggga

SEQ ID NO: 154721 - RNA, 22 nt, Human
uuccucaugggguuccuucaga

SEQ ID NO: 154722 - RNA, 22 nt, Human
ggucccaggaagugcggcggcg

SEQ ID NO: 154723 - RNA, 22 nt, Human
ggugccagccuagugcaguggu

SEQ ID NO: 154724 - RNA, 22 nt, Human
agcugccaucugaagaacugca

SEQ ID NO: 154725 - RNA, 21 nt, Human
agcagcugcaguuucuaucug

SEQ ID NO: 154726 - RNA, 22 nt, Human
gagcugccugugugccaugaug

SEQ ID NO: 154727 - RNA, 22 nt, Human
ggcugugcgggcagccguggga

SEQ ID NO: 154728 - RNA, 22 nt, Human
ugaagccuuguguggccucucu

SEQ ID NO: 154729 - RNA, 22 nt, Human
cuguccuuacugcuucuggcuu

SEQ ID NO: 154730 - RNA, 22 nt, Human
gcaggaagaugagcucagguaa

SEQ ID NO: 154731 - RNA, 20 nt, Human
uaugaguauuacuuucagga

SEQ ID NO: 154732 - RNA, 22 nt, Human
cuggugagacgguugacaggag

SEQ ID NO: 154733 - RNA, 22 nt, Human
cugggcagagcuaacaccugag

SEQ ID NO: 154734 - RNA, 22 nt, Human
ggcaaaaaccauaauuacuuuu

SEQ ID NO: 154735 - RNA, 22 nt, Human
agugacucacuagcucucagug

SEQ ID NO: 154736 - RNA, 22 nt, Human
uuccaguucccaugaggauuaa

SEQ ID NO: 154737 - RNA, 22 nt, Human
agggccugucagcgguguccug

SEQ ID NO: 154738 - RNA, 22 nt, Human
uuggaaggugagucccuggguu

SEQ ID NO: 154739 - RNA, 22 nt, Human
ucugccugaaauucacauguaa

SEQ ID NO: 154740 - RNA, 22 nt, Human
auguaacaggugaagcucugag

SEQ ID NO: 154741 - RNA, 22 nt, Human
ugauuuccucuacuagcaauua

SEQ ID NO: 154742 - RNA, 22 nt, Human
gaacaguaucaguagugccagu

SEQ ID NO: 154743 - RNA, 18 nt, Human
auggucucauacugggag

SEQ ID NO: 154744 - RNA, 22 nt, Human
ucccagcagcauagcucagaau

SEQ ID NO: 154745 - RNA, 22 nt, Human
cacugcauggaugauggcugua

SEQ ID NO: 154746 - RNA, 22 nt, Human
ccagggcagaaaaagagggaau

SEQ ID NO: 154747 - RNA, 20 nt, Human
aagagcugacucacaguggu

SEQ ID NO: 154748 - RNA, 18 nt, Human
gggcaagcggcugucacc

SEQ ID NO: 154749 - RNA, 22 nt, Human
ucuggcuccaggaccgggcaca

SEQ ID NO: 154750 - RNA, 22 nt, Human
gagggggcgugcaaggcuccgc

SEQ ID NO: 154751 - RNA, 22 nt, Human
gguucacacuuucaugauuuca

SEQ ID NO: 154752 - RNA, 22 nt, Human
gcucucugccauaugaggauac

SEQ ID NO: 154753 - RNA, 22 nt, Human
acugcagggcauccuggccaag

SEQ ID NO: 154754 - RNA, 19 nt, Human
agccuggcuuugcucugcu

SEQ ID NO: 154755 - RNA, 19 nt, Human
ucccuggcgccucucgggc

SEQ ID NO: 154756 - RNA, 22 nt, Human
agggcugcugcuccgggcccag

SEQ ID NO: 154757 - RNA, 22 nt, Human
ucauucuccucuggaaaaggca

SEQ ID NO: 154758 - RNA, 22 nt, Human
ucugagagagggucagaugcua

SEQ ID NO: 154759 - RNA, 22 nt, Human
uuuuuccuuagggguuacucac

SEQ ID NO: 154760 - RNA, 22 nt, Human
uuacaaagcguugagacaagua

SEQ ID NO: 154761 - RNA, 22 nt, Human
uguggcugucuguucuccuagg

SEQ ID NO: 154762 - RNA, 22 nt, Human
gccuggagggucccucucugga

SEQ ID NO: 154763 - RNA, 22 nt, Human
uaggcagcugcaaacuucgguc

SEQ ID NO: 154764 - RNA, 22 nt, Human
agggucugacuccucuggcaag

SEQ ID NO: 154765 - RNA, 22 nt, Human
cagucccaaggaggaagcaguc

SEQ ID NO: 154766 - RNA, 22 nt, Human
ucacuggggccuuuggucagga

SEQ ID NO: 154767 - RNA, 22 nt, Human
uccugggcuguggccccgggca

SEQ ID NO: 154768 - RNA, 22 nt, Human
uccuccaggucuaggguggcuu

SEQ ID NO: 154769 - RNA, 22 nt, Human
guugggaagcagauggaugagc

SEQ ID NO: 154770 - RNA, 21 nt, Human
aagcaggacauaugaugcccu

SEQ ID NO: 154771 - RNA, 22 nt, Human
gauuucaagcccccagagauuc

SEQ ID NO: 154772 - RNA, 23 nt, Human
gugcucugcggucugcuagucug

SEQ ID NO: 154773 - RNA, 22 nt, Human
gggccugggaacuugcauuuag

SEQ ID NO: 154774 - RNA, 22 nt, Human
gagagugagauccuccugggga

SEQ ID NO: 154775 - RNA, 22 nt, Human
aaauauguaagauuagcacuag

SEQ ID NO: 154776 - RNA, 22 nt, Human
cauugcacuuuggguccaggac

SEQ ID NO: 154777 - RNA, 22 nt, Human
agugaaaacacuaguucuugcc

SEQ ID NO: 154778 - RNA, 22 nt, Human
ggcagcagcaagguuggagcug

SEQ ID NO: 154779 - RNA, 22 nt, Human
accagcagaguugaggaggaca

SEQ ID NO: 154780 - RNA, 22 nt, Human
cuggcucucugagauauugagu

SEQ ID NO: 154781 - RNA, 22 nt, Human
ggagagaaauugagguagcaag

SEQ ID NO: 154782 - RNA, 22 nt, Human
augaguaagaccauaauuuuug

SEQ ID NO: 154783 - RNA, 22 nt, Human
ugcauugcauuugucaugaaga

SEQ ID NO: 154784 - RNA, 22 nt, Human
cuuugcaauagaggcacacaug

SEQ ID NO: 154785 - RNA, 22 nt, Human
agcugccaggccccugagaacc

SEQ ID NO: 154786 - RNA, 22 nt, Human
ucuggccagugaaaugcagaau

SEQ ID NO: 154787 - RNA, 22 nt, Human
aaggcagagggcuggaucagag

SEQ ID NO: 154788 - RNA, 22 nt, Human
gccugagaaggauaggaagcga

SEQ ID NO: 154789 - RNA, 22 nt, Human
aggugaguuacaggaggagguc

SEQ ID NO: 154790 - RNA, 16 nt, Human
ccacagggcaaggggc

SEQ ID NO: 154791 - RNA, 22 nt, Human
ccuguggcugccacuuggguga

SEQ ID NO: 154792 - RNA, 22 nt, Human
cacugggcguguccugggugag

SEQ ID NO: 154793 - RNA, 22 nt, Human
ugggcugcugucugcacaugcu

SEQ ID NO: 154794 - RNA, 22 nt, Human
gacacagcacuguacaaggaau

SEQ ID NO: 154795 - RNA, 23 nt, Human
cccagcgcugagcccugcaggca

SEQ ID NO: 154796 - RNA, 19 nt, Human
cucugccucuggcuguggc

SEQ ID NO: 154797 - RNA, 22 nt, Human
ucugucugagggagugacauuu

SEQ ID NO: 154798 - RNA, 22 nt, Human
gaaaggagggaaacagagcggu

SEQ ID NO: 154799 - RNA, 22 nt, Human
ccaaggagcaaggcucaacaag

SEQ ID NO: 154800 - RNA, 22 nt, Human
gcagcuggaagugacacucugu

SEQ ID NO: 154801 - RNA, 17 nt, Human
uucucuuccuggauagu

SEQ ID NO: 154802 - RNA, 21 nt, Human
ccuggcagaagccugauaugc

SEQ ID NO: 154803 - RNA, 22 nt, Human
agucccagaucuacaggaggga

SEQ ID NO: 154804 - RNA, 17 nt, Human
ugagcaguagaagaugc

SEQ ID NO: 154805 - RNA, 22 nt, Human
cagcaauaacucaaagccauuu

SEQ ID NO: 154806 - RNA, 22 nt, Human
ugucaguguauacauacaguau

SEQ ID NO: 154807 - RNA, 22 nt, Human
aaacagaaauuuccucaugcuc

SEQ ID NO: 154808 - RNA, 22 nt, Human
gcugccuguugaagggucugug

SEQ ID NO: 154809 - RNA, 22 nt, Human
ucagcugccucucccuggaaga

SEQ ID NO: 154810 - RNA, 22 nt, Human
ccaggagcagauauggacauaa

SEQ ID NO: 154811 - RNA, 22 nt, Human
aagcagcugauuucacagcuca

SEQ ID NO: 154812 - RNA, 22 nt, Human
aaaguuugcaauuuauguuaau

SEQ ID NO: 154813 - RNA, 22 nt, Human
aagcagcagaccugauuuugaa

SEQ ID NO: 154814 - RNA, 22 nt, Human
gccugagagacccauggggcaa

SEQ ID NO: 154815 - RNA, 22 nt, Human
ugcugcacaauuggaaaguauc

SEQ ID NO: 154816 - RNA, 22 nt, Human
aggcugcuuucauggccgcccc

SEQ ID NO: 154817 - RNA, 22 nt, Human
gagaggccauggcugugcagug

SEQ ID NO: 154818 - RNA, 22 nt, Human
agguggguccuggcucugccau

SEQ ID NO: 154819 - RNA, 22 nt, Human
aaaagucagucucuccuagcuc

SEQ ID NO: 154820 - RNA, 22 nt, Human
guggcugcagagggcacagcau

SEQ ID NO: 154821 - RNA, 22 nt, Human
uaaguucaguuggucgaaguag

SEQ ID NO: 154822 - RNA, 19 nt, Human
acacagggaucagaggguu

SEQ ID NO: 154823 - RNA, 18 nt, Human
aggcacagagcauacaua

SEQ ID NO: 154824 - RNA, 22 nt, Human
caggccuggagugcaauggcac

SEQ ID NO: 154825 - RNA, 22 nt, Human
cuggcugguuacuauuucuggu

SEQ ID NO: 154826 - RNA, 22 nt, Human
uaugcacaccuggguccuuguc

SEQ ID NO: 154827 - RNA, 22 nt, Human
cuggcagccaagugggauacuc

SEQ ID NO: 154828 - RNA, 22 nt, Human
aagagguugucugugaugaguu

SEQ ID NO: 154829 - RNA, 22 nt, Human
agggcagagcugucuaaauggc

SEQ ID NO: 154830 - RNA, 22 nt, Human
gucucuggguuaagcagugcau

SEQ ID NO: 154831 - RNA, 22 nt, Human
gggcccuggauuuaagcaugga

SEQ ID NO: 154832 - RNA, 19 nt, Human
uggcugggcgugccuccgu

SEQ ID NO: 154833 - RNA, 22 nt, Human
ugggcagagaucuggaucaaac

SEQ ID NO: 154834 - RNA, 21 nt, Human
cucaggaucuuauauauuagu

SEQ ID NO: 154835 - RNA, 23 nt, Human
cagggcugguagggaagagcgug

SEQ ID NO: 154836 - RNA, 22 nt, Human
aggcagccagauggcagccugc

SEQ ID NO: 154837 - RNA, 22 nt, Human
ccagguggcuucugcccgaugu

SEQ ID NO: 154838 - RNA, 22 nt, Human
uagggcagccuuauagcuccca

SEQ ID NO: 154839 - RNA, 22 nt, Human
cagcuggcuggucagugcacaa

SEQ ID NO: 154840 - RNA, 22 nt, Human
ggcuccuggcaucuggugggua

SEQ ID NO: 154841 - RNA, 22 nt, Human
gagagaagaaagccaugguccu

SEQ ID NO: 154842 - RNA, 19 nt, Human
acagaaauuaguuauuuuc

SEQ ID NO: 154843 - RNA, 22 nt, Human
cuggagccccagacagggagag

SEQ ID NO: 154844 - RNA, 22 nt, Human
agagaaaacucauugagguguc

SEQ ID NO: 154845 - RNA, 22 nt, Human
agagcagguggcaacucuggga

SEQ ID NO: 154846 - RNA, 22 nt, Human
uguguacauaucuauccuagau

SEQ ID NO: 154847 - RNA, 21 nt, Human
gaaaggucuuaacuuacagag

SEQ ID NO: 154848 - RNA, 22 nt, Human
aaaugcaucagcucauaagaga

SEQ ID NO: 154849 - RNA, 22 nt, Human
uggagcuggaauuucugggccu

SEQ ID NO: 154850 - RNA, 22 nt, Human
ugcagaaggccugacauugcac

SEQ ID NO: 154851 - RNA, 22 nt, Human
ggcaugggguguauguggcacg

SEQ ID NO: 154852 - RNA, 22 nt, Human
ugcugccaugcagagcaacaga

SEQ ID NO: 154853 - RNA, 22 nt, Human
gcagcccaauggacugagacag

SEQ ID NO: 154854 - RNA, 22 nt, Human
uacagauacagaucuagauaca

SEQ ID NO: 154855 - RNA, 22 nt, Human
aggcacugcagauuacaggcgc

SEQ ID NO: 154856 - RNA, 22 nt, Human
gucuggaggaggaagaaggcac

SEQ ID NO: 154857 - RNA, 21 nt, Human
gcagagccggggcgagaaggc

SEQ ID NO: 154858 - RNA, 22 nt, Human
cagugccucuuaagugucaccc

SEQ ID NO: 154859 - RNA, 22 nt, Human
uccaaagggaagcgcuuucugu

SEQ ID NO: 154860 - RNA, 22 nt, Human
uuauuuauggcacuguuggugg

SEQ ID NO: 154861 - RNA, 22 nt, Human
gucagaggggcagcugccaggc

SEQ ID NO: 154862 - RNA, 22 nt, Human
uugggguguuggauggagcaag

SEQ ID NO: 154863 - RNA, 22 nt, Human
ggccugaggcgucccagcugug

SEQ ID NO: 154864 - RNA, 16 nt, Human
agcagggcgggaagga

SEQ ID NO: 154865 - RNA, 22 nt, Human
agagggagcccagucauagcug

SEQ ID NO: 154866 - RNA, 22 nt, Human
aagccagggucaggggccuccu

SEQ ID NO: 154867 - RNA, 22 nt, Human
cugggggcaagcagacagcugu

SEQ ID NO: 154868 - RNA, 22 nt, Human
uagcagaaccagcagucaauuu

SEQ ID NO: 154869 - RNA, 22 nt, Human
auacaucuaugccuuucugaca

SEQ ID NO: 154870 - RNA, 22 nt, Human
cauaagaaauaaugaugaugac

SEQ ID NO: 154871 - RNA, 20 nt, Human
gaagcagcuucauguagaca

SEQ ID NO: 154872 - RNA, 22 nt, Human
aagaguuaagcaacagauacca

SEQ ID NO: 154873 - RNA, 22 nt, Human
ugcagcaggagccaggccuggu

SEQ ID NO: 154874 - RNA, 22 nt, Human
guccucuggugaaagcauuccc

SEQ ID NO: 154875 - RNA, 22 nt, Human
uaagaaauuuaguuauagaaug

SEQ ID NO: 154876 - RNA, 22 nt, Human
ccugccaggagcuggugcugca

SEQ ID NO: 154877 - RNA, 22 nt, Human
agcccagccggauucccaguuc

SEQ ID NO: 154878 - RNA, 22 nt, Human
uccagggccaagucauggaacc

SEQ ID NO: 154879 - RNA, 22 nt, Human
aggcugucugaccccagagccc

SEQ ID NO: 154880 - RNA, 22 nt, Human
gcagcaugagcuauacaaagua

SEQ ID NO: 154881 - RNA, 20 nt, Human
cucuccuugccgacuuggca

SEQ ID NO: 154882 - RNA, 22 nt, Human
agcuguucccucacugcaguca

SEQ ID NO: 154883 - RNA, 22 nt, Human
ugcauugcaguuaacucaguau

SEQ ID NO: 154884 - RNA, 22 nt, Human
aggcaguggcugagaccagggg

SEQ ID NO: 154885 - RNA, 22 nt, Human
augagacuaccuguaauguggc

SEQ ID NO: 154886 - RNA, 22 nt, Human
gccagcagcccagaaggacuuu

SEQ ID NO: 154887 - RNA, 22 nt, Human
ugccuggguucccaccccaaag

SEQ ID NO: 154888 - RNA, 22 nt, Human
uauguacaaucagcaguucaua

SEQ ID NO: 154889 - RNA, 22 nt, Human
agggccagaggcaccuugcagc

SEQ ID NO: 154890 - RNA, 22 nt, Human
aggaccaacauagcagcagugg

SEQ ID NO: 154891 - RNA, 22 nt, Human
aaggccagcuuguagggcuggu

SEQ ID NO: 154892 - RNA, 21 nt, Human
ucuuugcaucaguuguuuucu

SEQ ID NO: 154893 - RNA, 22 nt, Human
caggcacuggccagucagcaca

SEQ ID NO: 154894 - RNA, 22 nt, Human
ccaggcagcaaauuuucugaau

SEQ ID NO: 154895 - RNA, 22 nt, Human
ugcuccauucucuagccagugc

SEQ ID NO: 154896 - RNA, 22 nt, Human
gcuggagccauuggcuuggccu

SEQ ID NO: 154897 - RNA, 22 nt, Human
uucuccgcuaaguucucugcag

SEQ ID NO: 154898 - RNA, 22 nt, Human
gcuccacuugcagcuaggcuug

SEQ ID NO: 154899 - RNA, 22 nt, Human
auugagaauccauuugagauga

SEQ ID NO: 154900 - RNA, 22 nt, Human
acaguaauauugaugcucguca

SEQ ID NO: 154901 - RNA, 22 nt, Human
cccuggcaaaacacucucuuga

SEQ ID NO: 154902 - RNA, 22 nt, Human
gcaggagcucguuuccaggcug

SEQ ID NO: 154903 - RNA, 22 nt, Human
uggagccugagucagcggaggc

SEQ ID NO: 154904 - RNA, 22 nt, Human
aggcugucaucuuugcaggcag

SEQ ID NO: 154905 - RNA, 20 nt, Human
ucacaucuggcagcugauga

SEQ ID NO: 154906 - RNA, 22 nt, Human
uacaguucacaguaucauaaau

SEQ ID NO: 154907 - RNA, 22 nt, Human
uuauguacucugcaauguuuga

SEQ ID NO: 154908 - RNA, 22 nt, Human
ucaagcaggguagcaagcuggu

SEQ ID NO: 154909 - RNA, 22 nt, Human
ugagcuuccucccugcauccau

SEQ ID NO: 154910 - RNA, 20 nt, Human
cuuagaaauuuuuacccugg

SEQ ID NO: 154911 - RNA, 22 nt, Human
gagcaacaguuuaugguuuuuc

SEQ ID NO: 154912 - RNA, 22 nt, Human
ucaaaugcuguauuguaguaau

SEQ ID NO: 154913 - RNA, 22 nt, Human
cucccuggaggcccagaccugg

SEQ ID NO: 154914 - RNA, 22 nt, Human
cagcugccugucuggaggcaau

SEQ ID NO: 154915 - RNA, 22 nt, Human
ggagccaggcaaucuguacuuu

SEQ ID NO: 154916 - RNA, 22 nt, Human
ucaguggauauuucuguggcug

SEQ ID NO: 154917 - RNA, 22 nt, Human
uccuccuucgggacugcuugac

SEQ ID NO: 154918 - RNA, 22 nt, Human
acuccuggggauccauuccuuu

SEQ ID NO: 154919 - RNA, 22 nt, Human
uccaagggcagccauagaacuu

SEQ ID NO: 154920 - RNA, 22 nt, Human
cugaggugcuagggucccugcu

SEQ ID NO: 154921 - RNA, 22 nt, Human
accagagauggggcuucucugu

SEQ ID NO: 154922 - RNA, 22 nt, Human
uggccucucuaccaggcagccu

SEQ ID NO: 154923 - RNA, 21 nt, Human
ggccucugccuugccccacuc

SEQ ID NO: 154924 - RNA, 22 nt, Human
gugcucuggcuggucucccggu

SEQ ID NO: 154925 - RNA, 20 nt, Human
accauaauguuaauuacaaa

SEQ ID NO: 154926 - RNA, 22 nt, Human
gggcuggagccagcuguggcug

SEQ ID NO: 154927 - RNA, 19 nt, Human
ccagucccauacaggagau

SEQ ID NO: 154928 - RNA, 22 nt, Human
ucauugcagaaauaaaggugaa

SEQ ID NO: 154929 - RNA, 22 nt, Human
aaaggucagcugccaucguucu

SEQ ID NO: 154930 - RNA, 22 nt, Human
aaagccuugagauccuauaguu

SEQ ID NO: 154931 - RNA, 20 nt, Human
gccugcagguuggaugggau

SEQ ID NO: 154932 - RNA, 22 nt, Human
cugccuguuagucuagcaguua

SEQ ID NO: 154933 - RNA, 22 nt, Human
uaaaguuuggcagacaauaaca

SEQ ID NO: 154934 - RNA, 22 nt, Human
ggcagcucugcuccacaugagu

SEQ ID NO: 154935 - RNA, 22 nt, Human
cuggaagguuccucccagcucc

SEQ ID NO: 154936 - RNA, 22 nt, Human
ggccuuggugcucuguguugca

SEQ ID NO: 154937 - RNA, 22 nt, Human
agaguggggaagguguugagaa

SEQ ID NO: 154938 - RNA, 22 nt, Human
gaaggccauugcguccugggau

SEQ ID NO: 154939 - RNA, 22 nt, Human
agucccagaucuccauucgguc

SEQ ID NO: 154940 - RNA, 22 nt, Human
agcugcugcggaaagaugccac

SEQ ID NO: 154941 - RNA, 22 nt, Human
ggcugcuggcauugagguaggu

SEQ ID NO: 154942 - RNA, 22 nt, Human
uuucagaucauuuuuuaaguac

SEQ ID NO: 154943 - RNA, 22 nt, Human
auacauuagaaucugguacuca

SEQ ID NO: 154944 - RNA, 22 nt, Human
uuguuucugaguuuucauguau

SEQ ID NO: 154945 - RNA, 22 nt, Human
aagcagccacuggccaguuaua

SEQ ID NO: 154946 - RNA, 22 nt, Human
gagccaggcccguacuugcugu

SEQ ID NO: 154947 - RNA, 22 nt, Human
ggugggcaggcgaggcccaggu

SEQ ID NO: 154948 - RNA, 22 nt, Human
gccuguccuggaugcucugcaa

SEQ ID NO: 154949 - RNA, 22 nt, Human
cagaggugcauacaggucauua

SEQ ID NO: 154950 - RNA, 22 nt, Human
aucaguuuugggggacauacug

SEQ ID NO: 154951 - RNA, 22 nt, Human
ggcucaggacugcagcguagag

SEQ ID NO: 154952 - RNA, 22 nt, Human
agagcuggcugguagcccugau

SEQ ID NO: 154953 - RNA, 22 nt, Human
gucccuggucuaccguggcuuc

SEQ ID NO: 154954 - RNA, 22 nt, Human
ggcuuccuggagaaggucugag

SEQ ID NO: 154955 - RNA, 22 nt, Human
uugccuugauucuucucaugug

SEQ ID NO: 154956 - RNA, 22 nt, Human
acagaauauugguuacuguugc

SEQ ID NO: 154957 - RNA, 22 nt, Human
cuggggcugcggacgggagccc

SEQ ID NO: 154958 - RNA, 22 nt, Human
gaagcagcaaguauaggacagg

SEQ ID NO: 154959 - RNA, 22 nt, Human
uuccaaagaaauugaccaagac

SEQ ID NO: 154960 - RNA, 22 nt, Human
ggcaggagauaaaauauuaguu

SEQ ID NO: 154961 - RNA, 22 nt, Human
ugggcucuccuggaggacaaca

SEQ ID NO: 154962 - RNA, 20 nt, Human
uacugggcaagcccacagac

SEQ ID NO: 154963 - RNA, 22 nt, Human
ucaggggacagccagcuggagg

SEQ ID NO: 154964 - RNA, 22 nt, Human
gaacagcugcuagagaucugug

SEQ ID NO: 154965 - RNA, 22 nt, Human
ccagucugugugccagccugcg

SEQ ID NO: 154966 - RNA, 22 nt, Human
ggcacugacacuagcauggcac

SEQ ID NO: 154967 - RNA, 22 nt, Human
ugaguagcggcuauguguaacu

SEQ ID NO: 154968 - RNA, 23 nt, Human
aucaaaguggaaaucaauuaucu

SEQ ID NO: 154969 - RNA, 22 nt, Human
uauguguaggaggaggacaggg

SEQ ID NO: 154970 - RNA, 22 nt, Human
gacagggcaagacucugucuaa

SEQ ID NO: 154971 - RNA, 19 nt, Human
augucuguugaauuucaua

SEQ ID NO: 154972 - RNA, 22 nt, Human
cucccuggcacagcgagagguu

SEQ ID NO: 154973 - RNA, 22 nt, Human
ucugagcuuuuauuaucaaccu

SEQ ID NO: 154974 - RNA, 22 nt, Human
ucugccagugguuuggcccuga

SEQ ID NO: 154975 - RNA, 22 nt, Human
caggcacuguguuaggcacugu

SEQ ID NO: 154976 - RNA, 22 nt, Human
agguggggaaaccagcgauccc

SEQ ID NO: 154977 - RNA, 22 nt, Human
ugggcagauuaaugcaguggcu

SEQ ID NO: 154978 - RNA, 22 nt, Human
acugagcucuugacugggaguu

SEQ ID NO: 154979 - RNA, 22 nt, Human
gcuggccugaccagccacaggc

SEQ ID NO: 154980 - RNA, 22 nt, Human
ggcucuggcaaggggaggcuac

SEQ ID NO: 154981 - RNA, 22 nt, Human
ggcugccugaacuuuggggaaa

SEQ ID NO: 154982 - RNA, 22 nt, Human
gcccuuccaacccagagggcaa

SEQ ID NO: 154983 - RNA, 20 nt, Human
uauuuagauucaaguaugga

SEQ ID NO: 154984 - RNA, 20 nt, Human
cuguccccgaggucaccagg

SEQ ID NO: 154985 - RNA, 22 nt, Human
uccagggacagcgcuggagcua

SEQ ID NO: 154986 - RNA, 22 nt, Human
uugaagauggaucgccacucuc

SEQ ID NO: 154987 - RNA, 22 nt, Human
cuucuuuccuuccuccaguggc

SEQ ID NO: 154988 - RNA, 22 nt, Human
cagagaaacucagauagcugau

SEQ ID NO: 154989 - RNA, 22 nt, Human
uacaaagcuguauagccugguc

SEQ ID NO: 154990 - RNA, 22 nt, Human
cuguagccagaagcagaaggcc

SEQ ID NO: 154991 - RNA, 17 nt, Human
aagauuucauuagcuga

SEQ ID NO: 154992 - RNA, 22 nt, Human
guugaguggguuaggaugcuga

SEQ ID NO: 154993 - RNA, 22 nt, Human
ucuggagagucacagugccaga

SEQ ID NO: 154994 - RNA, 22 nt, Human
ggcagaggaagcuggaaguggg

SEQ ID NO: 154995 - RNA, 22 nt, Human
aggggagccccugguccuggug

SEQ ID NO: 154996 - RNA, 22 nt, Human
uaaguaaauuuauaaugugauu

SEQ ID NO: 154997 - RNA, 22 nt, Human
uaaauguauaggcacuaaaccu

SEQ ID NO: 154998 - RNA, 22 nt, Human
ucauuacagagauauaaucuac

SEQ ID NO: 154999 - RNA, 22 nt, Human
gcuggcaucacuggcuucggug

SEQ ID NO: 155000 - RNA, 22 nt, Human
aguaacaagugccaacguuaga

SEQ ID NO: 155001 - RNA, 22 nt, Human
ugucuguaagguguuuauguua

SEQ ID NO: 155002 - RNA, 22 nt, Human
aaaucaguaaauguucauuaac

SEQ ID NO: 155003 - RNA, 22 nt, Human
cagggcccaggccacuggguug

SEQ ID NO: 155004 - RNA, 22 nt, Human
uggagcaagcuggagagaacau

SEQ ID NO: 155005 - RNA, 22 nt, Human
ucuguaucacccguucccagaa

SEQ ID NO: 155006 - RNA, 22 nt, Human
acagcagagacacucaggaggc

SEQ ID NO: 155007 - RNA, 22 nt, Human
ucaccagucuuucuuaccauug

SEQ ID NO: 155008 - RNA, 22 nt, Human
ccagggcaugggaagaacugaa

SEQ ID NO: 155009 - RNA, 22 nt, Human
ugcucauuggcgaucugaggga

SEQ ID NO: 155010 - RNA, 22 nt, Human
uugcauugaaaauauauuuuaa

SEQ ID NO: 155011 - RNA, 22 nt, Human
gcaaggagacuguagggccaag

SEQ ID NO: 155012 - RNA, 22 nt, Human
acauuucucagguaagucauuu

SEQ ID NO: 155013 - RNA, 22 nt, Human
aggagaguaccauugggccgca

SEQ ID NO: 155014 - RNA, 22 nt, Human
ggccccacgggggaguccuagu

SEQ ID NO: 155015 - RNA, 22 nt, Human
cacagaaucugugacuccaaga

SEQ ID NO: 155016 - RNA, 22 nt, Human
ggcugcugcccaccccugcaug

SEQ ID NO: 155017 - RNA, 22 nt, Human
uugaaagggauauaucuuucug

SEQ ID NO: 155018 - RNA, 22 nt, Human
ccuggcagacagcacugaagcu

SEQ ID NO: 155019 - RNA, 22 nt, Human
aaggagcucccggcagaccagg

SEQ ID NO: 155020 - RNA, 22 nt, Human
auuugcagagcucugaauuuug

SEQ ID NO: 155021 - RNA, 22 nt, Human
ucuuuccuuagaauaauucuuu

SEQ ID NO: 155022 - RNA, 22 nt, Human
gagcagaugugugccaggaugc

SEQ ID NO: 155023 - RNA, 22 nt, Human
cagagcugcuucccaguuugug

SEQ ID NO: 155024 - RNA, 22 nt, Human
agccaggaaccagcuacagucu

SEQ ID NO: 155025 - RNA, 22 nt, Human
cagggagaaaucuccaggaggu

SEQ ID NO: 155026 - RNA, 22 nt, Human
agaaagaacguugguuaucuua

SEQ ID NO: 155027 - RNA, 22 nt, Human
uccuggagauaauugcagugaa

SEQ ID NO: 155028 - RNA, 22 nt, Human
aaggcccuggcaggaagcagga

SEQ ID NO: 155029 - RNA, 22 nt, Human
cagaggccuauccaguguccau

SEQ ID NO: 155030 - RNA, 22 nt, Human
uggaggaugagugugggcucug

SEQ ID NO: 155031 - RNA, 22 nt, Human
agccacagucaaccuguccaua

SEQ ID NO: 155032 - RNA, 22 nt, Human
cugacucuccucaagcauaaau

SEQ ID NO: 155033 - RNA, 22 nt, Human
aggguauaaagagcaagcagaa

SEQ ID NO: 155034 - RNA, 22 nt, Human
ugggcuguggagcaccuuugca

SEQ ID NO: 155035 - RNA, 21 nt, Human
guuuuaagggagaaaaccuag

SEQ ID NO: 155036 - RNA, 18 nt, Human
cuccagggaacucaguca

SEQ ID NO: 155037 - RNA, 22 nt, Human
gagcugcugguugcuggugccu

SEQ ID NO: 155038 - RNA, 22 nt, Human
guccuggggauuauagaguguu

SEQ ID NO: 155039 - RNA, 22 nt, Human
aaguucaaggaagccuccaguu

SEQ ID NO: 155040 - RNA, 22 nt, Human
uacaaaguagaaauucaguaaa

SEQ ID NO: 155041 - RNA, 22 nt, Human
auugaauagaugcauuauacua

SEQ ID NO: 155042 - RNA, 22 nt, Human
ucaggcagcuccaggaauggua

SEQ ID NO: 155043 - RNA, 22 nt, Human
cagccagaaccuaggaugagcu

SEQ ID NO: 155044 - RNA, 22 nt, Human
uguucaauccccagguccugaa

SEQ ID NO: 155045 - RNA, 22 nt, Human
ggggccugcgagguucaacuuc

SEQ ID NO: 155046 - RNA, 20 nt, Human
gaggcucugggcauggcgcc

SEQ ID NO: 155047 - RNA, 22 nt, Human
ucucagagggaaacaugaguga

SEQ ID NO: 155048 - RNA, 22 nt, Human
uccuuuccaugcuucuagaggc

SEQ ID NO: 155049 - RNA, 22 nt, Human
ggcagcuuuuaucccugacaga

SEQ ID NO: 155050 - RNA, 22 nt, Human
cuucucucugcauaggcauggg

SEQ ID NO: 155051 - RNA, 22 nt, Human
ugcagcuccucuggcugccuga

SEQ ID NO: 155052 - RNA, 22 nt, Human
ggguccagacacuccagaggaa

SEQ ID NO: 155053 - RNA, 22 nt, Human
uucauucauuacgugccaggca

SEQ ID NO: 155054 - RNA, 22 nt, Human
acauucaugucccacuucuagc

SEQ ID NO: 155055 - RNA, 22 nt, Human
aguuuaugaaacacagauuuga

SEQ ID NO: 155056 - RNA, 18 nt, Human
cugaggcuggcaggagcc

SEQ ID NO: 155057 - RNA, 21 nt, Human
gcagccagccgagaccaugcc

SEQ ID NO: 155058 - RNA, 22 nt, Human
acaagagacaagagguucuucu

SEQ ID NO: 155059 - RNA, 22 nt, Human
auccuuggaugugucuuuuugu

SEQ ID NO: 155060 - RNA, 23 nt, Human
gcccaugcuguugggcccgagca

SEQ ID NO: 155061 - RNA, 22 nt, Human
gccuggagcagacgugucccgg

SEQ ID NO: 155062 - RNA, 22 nt, Human
guccucaggaaagcagauaaca

SEQ ID NO: 155063 - RNA, 22 nt, Human
cuuccugguuugaagcucgccg

SEQ ID NO: 155064 - RNA, 22 nt, Human
aaugauggucauggcaacuuuu

SEQ ID NO: 155065 - RNA, 22 nt, Human
ggguccagaguugaagagguua

SEQ ID NO: 155066 - RNA, 22 nt, Human
gcagcugggacacugaggccag

SEQ ID NO: 155067 - RNA, 22 nt, Human
uacagaguggugagaucuuuug

SEQ ID NO: 155068 - RNA, 22 nt, Human
caggggcucugggugaugugag

SEQ ID NO: 155069 - RNA, 22 nt, Human
gccaggcugcuggcugcugucc

SEQ ID NO: 155070 - RNA, 22 nt, Human
ugaggcuggcaaggcugguauu

SEQ ID NO: 155071 - RNA, 22 nt, Human
uugugaaacauucauggauuug

SEQ ID NO: 155072 - RNA, 22 nt, Human
acuccuggggcugccaucacag

SEQ ID NO: 155073 - RNA, 22 nt, Human
gccagggaggcuguaggguccu

SEQ ID NO: 155074 - RNA, 21 nt, Human
gauuucacuuaccuucauuua

SEQ ID NO: 155075 - RNA, 22 nt, Human
gagguacagaguguuccaaugu

SEQ ID NO: 155076 - RNA, 22 nt, Human
gccaggcagccacccucugcga

SEQ ID NO: 155077 - RNA, 22 nt, Human
ucgugucagaucagagguuccu

SEQ ID NO: 155078 - RNA, 22 nt, Human
gcauuguccugcuucugagugu

SEQ ID NO: 155079 - RNA, 22 nt, Human
acucugugugaguagagccugu

SEQ ID NO: 155080 - RNA, 22 nt, Human
ugucauaaaacacaagcuguug

SEQ ID NO: 155081 - RNA, 22 nt, Human
cccauuuaucccaagguuacuc

SEQ ID NO: 155082 - RNA, 22 nt, Human
cugccagccaggccagguaggc

SEQ ID NO: 155083 - RNA, 22 nt, Human
ggucccagcugcucaagaggcu

SEQ ID NO: 155084 - RNA, 22 nt, Human
cugcuuugauuagaagaguaca

SEQ ID NO: 155085 - RNA, 23 nt, Human
uucaagauacgguuuccaggcug

SEQ ID NO: 155086 - RNA, 22 nt, Human
agacaucagcuugugugcaggg

SEQ ID NO: 155087 - RNA, 22 nt, Human
guaaaucccauccuuucucugg

SEQ ID NO: 155088 - RNA, 22 nt, Human
gccacaugcaauugcagcacgu

SEQ ID NO: 155089 - RNA, 22 nt, Human
ggcuucuuccugugaacauguu

SEQ ID NO: 155090 - RNA, 19 nt, Human
ugcucaggccaaggagccc

SEQ ID NO: 155091 - RNA, 22 nt, Human
accccagcucugagccacacca

SEQ ID NO: 155092 - RNA, 22 nt, Human
guuauguaaucuaacacucagu

SEQ ID NO: 155093 - RNA, 22 nt, Human
gcagaggccaucaacuuugcca

SEQ ID NO: 155094 - RNA, 22 nt, Human
cagcaaaauuugaggauugccu

SEQ ID NO: 155095 - RNA, 22 nt, Human
acagcuggcaggggggcaugaa

SEQ ID NO: 155096 - RNA, 17 nt, Human
ucaggcugggugcagug

SEQ ID NO: 155097 - RNA, 22 nt, Human
cuggcucauccagguguugcuc

SEQ ID NO: 155098 - RNA, 22 nt, Human
aagggccauaacuugcaguguu

SEQ ID NO: 155099 - RNA, 19 nt, Human
cccagagcauccugaacuu

SEQ ID NO: 155100 - RNA, 22 nt, Human
ggacacaguggaagacagcuug

SEQ ID NO: 155101 - RNA, 22 nt, Human
agcugccauccuguucagcacc

SEQ ID NO: 155102 - RNA, 22 nt, Human
agcuucuggaaggcaaggcuug

SEQ ID NO: 155103 - RNA, 22 nt, Human
uuggaaggcccugccuagcagg

SEQ ID NO: 155104 - RNA, 22 nt, Human
gaaggcaggcuucugauuaggu

SEQ ID NO: 155105 - RNA, 22 nt, Human
gcugcccuaauaucacauguua

SEQ ID NO: 155106 - RNA, 22 nt, Human
ugcugaggagguggcugugcuu

SEQ ID NO: 155107 - RNA, 20 nt, Human
cccugagacaaaggaggggc

SEQ ID NO: 155108 - RNA, 22 nt, Human
gcaaggaccuuugagcgugcca

SEQ ID NO: 155109 - RNA, 22 nt, Human
ggccuugguaaagggaugcaug

SEQ ID NO: 155110 - RNA, 22 nt, Human
gaggcccaguccugcaagcacg

SEQ ID NO: 155111 - RNA, 22 nt, Human
ugugccauuucuauucugcagc

SEQ ID NO: 155112 - RNA, 22 nt, Human
ucucagagggaaaggccaauuu

SEQ ID NO: 155113 - RNA, 22 nt, Human
ucacugcucucuaagcaucgcc

SEQ ID NO: 155114 - RNA, 22 nt, Human
cauuuucucaaugaacccucuu

SEQ ID NO: 155115 - RNA, 23 nt, Human
cuggcucuguagguggcauccuu

SEQ ID NO: 155116 - RNA, 22 nt, Human
aggucacccguuugacuaucca

SEQ ID NO: 155117 - RNA, 22 nt, Human
ugccagaagugcuuuauaagug

SEQ ID NO: 155118 - RNA, 22 nt, Human
uaugcacauucacacaaaaaug

SEQ ID NO: 155119 - RNA, 22 nt, Human
gacagggcgcccagccuguuuc

SEQ ID NO: 155120 - RNA, 22 nt, Human
cugggccaucagaggggcugga

SEQ ID NO: 155121 - RNA, 22 nt, Human
agagaugucgccuugcccaggg

SEQ ID NO: 155122 - RNA, 22 nt, Human
uggccugggccugccggugcaa

SEQ ID NO: 155123 - RNA, 22 nt, Human
gugagcaggauuucauggugua

SEQ ID NO: 155124 - RNA, 22 nt, Human
ucagaggaauaaugcugcauuu

SEQ ID NO: 155125 - RNA, 22 nt, Human
acagaguagcucaagaagauug

SEQ ID NO: 155126 - RNA, 22 nt, Human
aaaugucuuucaauagagaaau

SEQ ID NO: 155127 - RNA, 22 nt, Human
uggaaggggagcuggaaagggg

SEQ ID NO: 155128 - RNA, 22 nt, Human
cauugacaguucuuuaaguugc

SEQ ID NO: 155129 - RNA, 22 nt, Human
guucauuuuacuguaaauagca

SEQ ID NO: 155130 - RNA, 22 nt, Human
ccucacagggccaggccccuca

SEQ ID NO: 155131 - RNA, 22 nt, Human
ggcucaggccagaccacgacuc

SEQ ID NO: 155132 - RNA, 18 nt, Human
aaaaugcaggcgacaugg

SEQ ID NO: 155133 - RNA, 22 nt, Human
gugccucagcaccgccugcagc

SEQ ID NO: 155134 - RNA, 22 nt, Human
gggcagugguccaggcuacagc

SEQ ID NO: 155135 - RNA, 22 nt, Human
gggaaauugugugagaucuuug

SEQ ID NO: 155136 - RNA, 22 nt, Human
ccagagccucgcccggagccuc

SEQ ID NO: 155137 - RNA, 22 nt, Human
gacagccucaugaggagcaaaa

SEQ ID NO: 155138 - RNA, 22 nt, Human
uccucaggugacuagguaucuu

SEQ ID NO: 155139 - RNA, 22 nt, Human
caggggcuguuugccucaggcc

SEQ ID NO: 155140 - RNA, 22 nt, Human
cagagccugccaccuuucuccc

SEQ ID NO: 155141 - RNA, 22 nt, Human
uggggaggacgggcgccuuccu

SEQ ID NO: 155142 - RNA, 22 nt, Human
uacuguauuugauaagugaagu

SEQ ID NO: 155143 - RNA, 22 nt, Human
acacuuuguuguggcauauacg

SEQ ID NO: 155144 - RNA, 22 nt, Human
gaggagcacaugaggcugaggg

SEQ ID NO: 155145 - RNA, 22 nt, Human
gcuucucuggccugcagggcau

SEQ ID NO: 155146 - RNA, 22 nt, Human
gauacauuuuaucuccuaacag

SEQ ID NO: 155147 - RNA, 22 nt, Human
gcaugcugcaccagagccucuc

SEQ ID NO: 155148 - RNA, 22 nt, Human
gccuucaggaggguuccagaca

SEQ ID NO: 155149 - RNA, 22 nt, Human
guuccuauauagccuuaaggau

SEQ ID NO: 155150 - RNA, 22 nt, Human
gagagcugcaagguagggcggg

SEQ ID NO: 155151 - RNA, 22 nt, Human
cuggcaggaaguuagaugguaa

SEQ ID NO: 155152 - RNA, 22 nt, Human
uugaagcauuguggcuuguauu

SEQ ID NO: 155153 - RNA, 22 nt, Human
uggcagaggaaaaagucacugg

SEQ ID NO: 155154 - RNA, 22 nt, Human
agcuggccuguuagagcugagu

SEQ ID NO: 155155 - RNA, 22 nt, Human
guaucuuuuacaccaggaaauu

SEQ ID NO: 155156 - RNA, 22 nt, Human
aggcccuggcacugccugggag

SEQ ID NO: 155157 - RNA, 22 nt, Human
uaagaacaucuguccccagauu

SEQ ID NO: 155158 - RNA, 22 nt, Human
gcucugcuggaaguucucugga

SEQ ID NO: 155159 - RNA, 22 nt, Human
aaagaggaaccaagagcacgug

SEQ ID NO: 155160 - RNA, 22 nt, Human
aaaguguagagacuuuggaacc

SEQ ID NO: 155161 - RNA, 22 nt, Human
gcagagccccauugcuggcggg

SEQ ID NO: 155162 - RNA, 22 nt, Human
aaaguucaugguguuauagaaa

SEQ ID NO: 155163 - RNA, 22 nt, Human
cucugagaaagcugugagcuaa

SEQ ID NO: 155164 - RNA, 22 nt, Human
uuucauguuuauggaaaaugag

SEQ ID NO: 155165 - RNA, 22 nt, Human
uuaguaauguguuaauaugaau

SEQ ID NO: 155166 - RNA, 22 nt, Human
uuagaaaucugcugccaugcaa

SEQ ID NO: 155167 - RNA, 22 nt, Human
aggcacugagaggcuguguugc

SEQ ID NO: 155168 - RNA, 22 nt, Human
ucuuucucucuaaucaagcaca

SEQ ID NO: 155169 - RNA, 22 nt, Human
uggcugaaggaagauucuucua

SEQ ID NO: 155170 - RNA, 22 nt, Human
aaagaacagauguguggugcau

SEQ ID NO: 155171 - RNA, 22 nt, Human
cccuggagguggagguugcagg

SEQ ID NO: 155172 - RNA, 22 nt, Human
cucaguuucugacauuaaaauc

SEQ ID NO: 155173 - RNA, 22 nt, Human
aaaugaacaguugcauucucug

SEQ ID NO: 155174 - RNA, 22 nt, Human
augucuuucgcaucaguagcua

SEQ ID NO: 155175 - RNA, 22 nt, Human
uggcagggccugaaucuuauac

SEQ ID NO: 155176 - RNA, 22 nt, Human
guuccacaaaauguacccaguu

SEQ ID NO: 155177 - RNA, 22 nt, Human
ucuggcuccacuuucuucauuu

SEQ ID NO: 155178 - RNA, 22 nt, Human
ggugaggcuaagugacacaggg

SEQ ID NO: 155179 - RNA, 22 nt, Human
aaagauuugaguucugcuuaua

SEQ ID NO: 155180 - RNA, 22 nt, Human
ucacauuuuaucuauuuuaagu

SEQ ID NO: 155181 - RNA, 22 nt, Human
ugacagcugagccccaggcaag

SEQ ID NO: 155182 - RNA, 22 nt, Human
cugggggcaauggucagagugu

SEQ ID NO: 155183 - RNA, 22 nt, Human
ggacucagcagccaggaguggc

SEQ ID NO: 155184 - RNA, 22 nt, Human
guuuuccuucucagccauugcc

SEQ ID NO: 155185 - RNA, 22 nt, Human
ugggcucugugccagguuggug

SEQ ID NO: 155186 - RNA, 22 nt, Human
ucagaagcaaacaucacucuag

SEQ ID NO: 155187 - RNA, 22 nt, Human
cagggccugccugguuccugga

SEQ ID NO: 155188 - RNA, 22 nt, Human
uggcucagcuuacuuuugaggg

SEQ ID NO: 155189 - RNA, 22 nt, Human
aggaggccgcugaugggcuccc

SEQ ID NO: 155190 - RNA, 19 nt, Human
ggucacagggguuacaagg

SEQ ID NO: 155191 - RNA, 22 nt, Human
cccucccagaugggcuugaggu

SEQ ID NO: 155192 - RNA, 22 nt, Human
cuccugagcucugaggaagcuu

SEQ ID NO: 155193 - RNA, 22 nt, Human
cugaaggauuagagagcacuua

SEQ ID NO: 155194 - RNA, 22 nt, Human
uggcagaggaggcucagauuga

SEQ ID NO: 155195 - RNA, 22 nt, Human
agcagugaugcaugacagccua

SEQ ID NO: 155196 - RNA, 22 nt, Human
gcucagagaugucugcugccuu

SEQ ID NO: 155197 - RNA, 22 nt, Human
ucagagaaaugaaguagggauu

SEQ ID NO: 155198 - RNA, 22 nt, Human
ugaggccagucucaucacaggc

SEQ ID NO: 155199 - RNA, 22 nt, Human
gggucccaggaaggagcagugu

SEQ ID NO: 155200 - RNA, 22 nt, Human
agccucugugacucacagguca

SEQ ID NO: 155201 - RNA, 22 nt, Human
aggcccaguuauccuacuuguu

SEQ ID NO: 155202 - RNA, 22 nt, Human
uugucuguaaagacggccacca

SEQ ID NO: 155203 - RNA, 22 nt, Human
acagggccucagcugauucugg

SEQ ID NO: 155204 - RNA, 21 nt, Human
agcagaggcagaauguaugca

SEQ ID NO: 155205 - RNA, 22 nt, Human
uagucuuuuuaauaaauaaugc

SEQ ID NO: 155206 - RNA, 22 nt, Human
ugcugccuuagcagccaggcaa

SEQ ID NO: 155207 - RNA, 22 nt, Human
cugccuuggcccuaguucaugg

SEQ ID NO: 155208 - RNA, 22 nt, Human
gcugcucugcuguguaagcagg

SEQ ID NO: 155209 - RNA, 22 nt, Human
acuuccuguuaugugugccucu

SEQ ID NO: 155210 - RNA, 22 nt, Human
aaaugucuguuagucauaucau

SEQ ID NO: 155211 - RNA, 22 nt, Human
gcccucagaggacagcugacuu

SEQ ID NO: 155212 - RNA, 22 nt, Human
gcugcucuccauggccgugagu

SEQ ID NO: 155213 - RNA, 22 nt, Human
cugcuuuguguggucccuccag

SEQ ID NO: 155214 - RNA, 22 nt, Human
cauugcacgggcgucugucugu

SEQ ID NO: 155215 - RNA, 21 nt, Human
cccuguguuccacagcagaca

SEQ ID NO: 155216 - RNA, 22 nt, Human
uggcugggccgggccuugugcc

SEQ ID NO: 155217 - RNA, 20 nt, Human
ccagcauguacacaugugga

SEQ ID NO: 155218 - RNA, 22 nt, Human
gagagcugggaaagccguggag

SEQ ID NO: 155219 - RNA, 22 nt, Human
agcagcagaggucagaaaggua

SEQ ID NO: 155220 - RNA, 22 nt, Human
ugcagaaggaggaggaaaucca

SEQ ID NO: 155221 - RNA, 22 nt, Human
agccauggcgccacuagaggga

SEQ ID NO: 155222 - RNA, 22 nt, Human
cacaggguuguucugaggauuc

SEQ ID NO: 155223 - RNA, 22 nt, Human
ugcucagggacaauggagaggg

SEQ ID NO: 155224 - RNA, 22 nt, Human
caggaaggcccaccuguccugu

SEQ ID NO: 155225 - RNA, 22 nt, Human
agcucccagaguccucugccca

SEQ ID NO: 155226 - RNA, 22 nt, Human
uguggccaccagagcugcuauu

SEQ ID NO: 155227 - RNA, 22 nt, Human
cugaggcugcccagggccaggu

SEQ ID NO: 155228 - RNA, 22 nt, Human
cucaggaugucggugacuauug

SEQ ID NO: 155229 - RNA, 22 nt, Human
ggcagcucacugauuagcaauu

SEQ ID NO: 155230 - RNA, 22 nt, Human
ugggagcucagaaagggagguc

SEQ ID NO: 155231 - RNA, 22 nt, Human
agggcagccaugagccuucagg

SEQ ID NO: 155232 - RNA, 22 nt, Human
gggacaggccccucgcuagcuu

SEQ ID NO: 155233 - RNA, 22 nt, Human
gcuggccugcgagggcaggcug

SEQ ID NO: 155234 - RNA, 22 nt, Human
gcagggcuguucaggagggugg

SEQ ID NO: 155235 - RNA, 21 nt, Human
aaggaaaagcuuggucucuga

SEQ ID NO: 155236 - RNA, 22 nt, Human
uucagcagugcagacacccagu

SEQ ID NO: 155237 - RNA, 22 nt, Human
aagggcugccagggggugccag

SEQ ID NO: 155238 - RNA, 22 nt, Human
agucucugccagcuuguccucu

SEQ ID NO: 155239 - RNA, 22 nt, Human
caguuauuaugaggucauuagg

SEQ ID NO: 155240 - RNA, 22 nt, Human
uuccagaaaucuuucagcucaa

SEQ ID NO: 155241 - RNA, 22 nt, Human
gggcagggguagcauuccaagu

SEQ ID NO: 155242 - RNA, 22 nt, Human
cuggagggugagccucaucucu

SEQ ID NO: 155243 - RNA, 22 nt, Human
uaagacauuugaaaugugaucc

SEQ ID NO: 155244 - RNA, 22 nt, Human
agaaaugggccuugggacacaa

SEQ ID NO: 155245 - RNA, 20 nt, Human
uaucaaucagaaagaagacu

SEQ ID NO: 155246 - RNA, 22 nt, Human
cuccagggaaaggggcguccgc

SEQ ID NO: 155247 - RNA, 22 nt, Human
caggagccccaggcugacaaua

SEQ ID NO: 155248 - RNA, 22 nt, Human
aucuuugaagaggacuugaagu

SEQ ID NO: 155249 - RNA, 22 nt, Human
ggccugcacagagguggcucua

SEQ ID NO: 155250 - RNA, 22 nt, Human
agaggcccucucucuccugaug

SEQ ID NO: 155251 - RNA, 22 nt, Human
ccaggagcuggagggugcagug

SEQ ID NO: 155252 - RNA, 22 nt, Human
cccugagagugagugccaccuu

SEQ ID NO: 155253 - RNA, 22 nt, Human
aggacuccauguguccuggaga

SEQ ID NO: 155254 - RNA, 22 nt, Human
ggggagugacgcagggccauag

SEQ ID NO: 155255 - RNA, 22 nt, Human
ugcaagggcuuagggggcugug

SEQ ID NO: 155256 - RNA, 22 nt, Human
ccagcccuugagauggaaggga

SEQ ID NO: 155257 - RNA, 22 nt, Human
ugucccagggaaggcccagcac

SEQ ID NO: 155258 - RNA, 21 nt, Human
aaagugguaaggauuauuuug

SEQ ID NO: 155259 - RNA, 22 nt, Human
uaaauguguaaaccuccauuac

SEQ ID NO: 155260 - RNA, 22 nt, Human
aaggcacugagccagccgucuc

SEQ ID NO: 155261 - RNA, 22 nt, Human
cuggccugagcacagcggcugc

SEQ ID NO: 155262 - RNA, 22 nt, Human
ucaguuuuaagguuugagaauu

SEQ ID NO: 155263 - RNA, 22 nt, Human
cucaggggaccuggcuccgagu

SEQ ID NO: 155264 - RNA, 22 nt, Human
aggcuggaguacaguggcuauu

SEQ ID NO: 155265 - RNA, 22 nt, Human
uccaagaucuacagcaguuuag

SEQ ID NO: 155266 - RNA, 22 nt, Human
ucuucucccaucuccaggcagg

SEQ ID NO: 155267 - RNA, 22 nt, Human
agcugucuuucugccuccugau

SEQ ID NO: 155268 - RNA, 22 nt, Human
uacaugcaugucacagaaugaa

SEQ ID NO: 155269 - RNA, 19 nt, Human
ccucuccgcccaccagccc

SEQ ID NO: 155270 - RNA, 22 nt, Human
gccucugcccauccaccaucag

SEQ ID NO: 155271 - RNA, 22 nt, Human
ugcagugguguccagguguacu

SEQ ID NO: 155272 - RNA, 17 nt, Human
aggagucucagaugagc

SEQ ID NO: 155273 - RNA, 22 nt, Human
aggcacuguggguguggccgga

SEQ ID NO: 155274 - RNA, 22 nt, Human
cuguggagcuuguggcaguggg

SEQ ID NO: 155275 - RNA, 22 nt, Human
uggcagcagacaaaaggccauu

SEQ ID NO: 155276 - RNA, 22 nt, Human
caccaggcugaaccagagggga

SEQ ID NO: 155277 - RNA, 22 nt, Human
uucaacacaggaacaugauaua

SEQ ID NO: 155278 - RNA, 22 nt, Human
ggugcagaaggaagggagcugg

SEQ ID NO: 155279 - RNA, 22 nt, Human
ucuucuuccuccacagggccca

SEQ ID NO: 155280 - RNA, 22 nt, Human
caagagcuagacuuugucagga

SEQ ID NO: 155281 - RNA, 18 nt, Human
cccagcuccacuucccuc

SEQ ID NO: 155282 - RNA, 22 nt, Human
ccagagcugauuccugggacuu

SEQ ID NO: 155283 - RNA, 19 nt, Human
augagcuggcauuucaggu

SEQ ID NO: 155284 - RNA, 22 nt, Human
cugcagagguugguucuaagau

SEQ ID NO: 155285 - RNA, 22 nt, Human
uguuuuguuuaugagagcacag

SEQ ID NO: 155286 - RNA, 18 nt, Human
caugggugacagguggau

SEQ ID NO: 155287 - RNA, 21 nt, Human
uggcucugcucagagcagucc

SEQ ID NO: 155288 - RNA, 23 nt, Human
gccugggacugguagugugaccu

SEQ ID NO: 155289 - RNA, 22 nt, Human
ucaacacucuuuggcacaguua

SEQ ID NO: 155290 - RNA, 22 nt, Human
gccucugcggagcuguacauca

SEQ ID NO: 155291 - RNA, 22 nt, Human
ucacaucuuauuagaguaucuc

SEQ ID NO: 155292 - RNA, 22 nt, Human
aagucagagcaacugagacauu

SEQ ID NO: 155293 - RNA, 22 nt, Human
cagcucuggcgucagggagcga

SEQ ID NO: 155294 - RNA, 22 nt, Human
ucacuuauugcucaucucaugc

SEQ ID NO: 155295 - RNA, 22 nt, Human
acccucccauuuccauguagca

SEQ ID NO: 155296 - RNA, 22 nt, Human
aauaguguuguucacucaggag

SEQ ID NO: 155297 - RNA, 22 nt, Human
ucauaacagcuaagucccuuuc

SEQ ID NO: 155298 - RNA, 22 nt, Human
cugggguggauggguccaaguu

SEQ ID NO: 155299 - RNA, 22 nt, Human
auaucuuuguaugguucagcag

SEQ ID NO: 155300 - RNA, 22 nt, Human
caggguggaaaagcuaguugga

SEQ ID NO: 155301 - RNA, 18 nt, Human
agggucagugucacuggc

SEQ ID NO: 155302 - RNA, 22 nt, Human
gucaugccuggcuucuuagaca

SEQ ID NO: 155303 - RNA, 19 nt, Human
acagggcagcaauaggaua

SEQ ID NO: 155304 - RNA, 22 nt, Human
ccucugaggucauggacuuggc

SEQ ID NO: 155305 - RNA, 22 nt, Human
cucuccagaucugcugagccag

SEQ ID NO: 155306 - RNA, 22 nt, Human
cuuugaaagcucccaggacuua

SEQ ID NO: 155307 - RNA, 22 nt, Human
uggcccugacacgugguacugg

SEQ ID NO: 155308 - RNA, 22 nt, Human
aucagcaaucucguguauuagg

SEQ ID NO: 155309 - RNA, 22 nt, Human
aucuacagugcacaggacagcc

SEQ ID NO: 155310 - RNA, 22 nt, Human
gcagugugaccgagcuugcuuc

SEQ ID NO: 155311 - RNA, 22 nt, Human
gccugggugaauuugauccuaa

SEQ ID NO: 155312 - RNA, 22 nt, Human
auguguauacuugugcuuacuc

SEQ ID NO: 155313 - RNA, 22 nt, Human
auccaggguguggagagagcuc

SEQ ID NO: 155314 - RNA, 19 nt, Human
ugaggccaaggucacagau

SEQ ID NO: 155315 - RNA, 22 nt, Human
aggccuguuccuuccugggcac

SEQ ID NO: 155316 - RNA, 22 nt, Human
ugagcuucaaaauaugugaauc

SEQ ID NO: 155317 - RNA, 22 nt, Human
caguacuuauuucuauuuaggg

SEQ ID NO: 155318 - RNA, 19 nt, Human
ggcugcugguuacagaggc

SEQ ID NO: 155319 - RNA, 22 nt, Human
ucucacucauuuccuaggucuu

SEQ ID NO: 155320 - RNA, 22 nt, Human
gucuuguuugggauguggaugg

SEQ ID NO: 155321 - RNA, 22 nt, Human
agcugguuagcaaucuaaguga

SEQ ID NO: 155322 - RNA, 22 nt, Human
agacagcugcucgcagagcuau

SEQ ID NO: 155323 - RNA, 22 nt, Human
ugcauuguuuagaacucuuugg

SEQ ID NO: 155324 - RNA, 22 nt, Human
ugggcucucuggcaggaaggcu

SEQ ID NO: 155325 - RNA, 22 nt, Human
uggcagggccuaccccaauauc

SEQ ID NO: 155326 - RNA, 22 nt, Human
cauuuacauuuaagguuaauau

SEQ ID NO: 155327 - RNA, 23 nt, Human
acagggcauugcuggccucgagg

SEQ ID NO: 155328 - RNA, 22 nt, Human
ucagaagaagagacuccacagc

SEQ ID NO: 155329 - RNA, 22 nt, Human
gcugagugauugauauuuuagu

SEQ ID NO: 155330 - RNA, 22 nt, Human
guacauuuuacuuuguuugaau

SEQ ID NO: 155331 - RNA, 22 nt, Human
ccugugucuuccccacuggugu

SEQ ID NO: 155332 - RNA, 22 nt, Human
uagaauaugugguaggaucugg

SEQ ID NO: 155333 - RNA, 22 nt, Human
agggcccaggacagcaucaggg

SEQ ID NO: 155334 - RNA, 22 nt, Human
cagcagcuucuguugaucagaa

SEQ ID NO: 155335 - RNA, 22 nt, Human
ggcccucccugagccagguggg

SEQ ID NO: 155336 - RNA, 22 nt, Human
cagagcugggcauggugaaagg

SEQ ID NO: 155337 - RNA, 22 nt, Human
ccugggaguggcacucacagca

SEQ ID NO: 155338 - RNA, 22 nt, Human
gaguggagcaaaagagguagau

SEQ ID NO: 155339 - RNA, 22 nt, Human
ugauuucccuguagccucugaa

SEQ ID NO: 155340 - RNA, 22 nt, Human
gcuguuccugcuuagaggucgg

SEQ ID NO: 155341 - RNA, 22 nt, Human
aucucagggcuggagcccugga

SEQ ID NO: 155342 - RNA, 22 nt, Human
gcagagccaggagagacccuug

SEQ ID NO: 155343 - RNA, 22 nt, Human
aagcuggagaguuaggugaaua

SEQ ID NO: 155344 - RNA, 22 nt, Human
aaggucauuuuuuccucuguug

SEQ ID NO: 155345 - RNA, 22 nt, Human
cacagggcuaaaugaaggguug

SEQ ID NO: 155346 - RNA, 22 nt, Human
gccagagcugagacacgagucc

SEQ ID NO: 155347 - RNA, 22 nt, Human
ucucagggaccaugaugaugac

SEQ ID NO: 155348 - RNA, 22 nt, Human
gugucccaauguucaggacggc

SEQ ID NO: 155349 - RNA, 22 nt, Human
ccacccuuggguucggaggccg

SEQ ID NO: 155350 - RNA, 22 nt, Human
gcaggcaggcuuccuugaacug

SEQ ID NO: 155351 - RNA, 22 nt, Human
gggcugcacagaucuucaaggg

SEQ ID NO: 155352 - RNA, 22 nt, Human
aagguacagaaauuaacaagga

SEQ ID NO: 155353 - RNA, 22 nt, Human
uaauaucuacuucauagaguuu

SEQ ID NO: 155354 - RNA, 22 nt, Human
gggaggugauggcaagcagcgg

SEQ ID NO: 155355 - RNA, 22 nt, Human
uagaaagugaagguuaauuaau

SEQ ID NO: 155356 - RNA, 22 nt, Human
ugaucagucccaugaucuucca

SEQ ID NO: 155357 - RNA, 22 nt, Human
accaugggucagccaccucagc

SEQ ID NO: 155358 - RNA, 22 nt, Human
cugcccugagucaugccagaug

SEQ ID NO: 155359 - RNA, 22 nt, Human
agguaaggcuguaagcuaagcc

SEQ ID NO: 155360 - RNA, 22 nt, Human
gaggccacgguuuuccuugggg

SEQ ID NO: 155361 - RNA, 22 nt, Human
gagggggagaugugcacacacu

SEQ ID NO: 155362 - RNA, 22 nt, Human
auuauguaacugugguucagca

SEQ ID NO: 155363 - RNA, 22 nt, Human
cuggccaggcuugggacagaca

SEQ ID NO: 155364 - RNA, 22 nt, Human
agaaaguucacugguauauuuu

SEQ ID NO: 155365 - RNA, 22 nt, Human
ccuguccuccaagagcacaucu

SEQ ID NO: 155366 - RNA, 22 nt, Human
cccugagaugccucacccuagu

SEQ ID NO: 155367 - RNA, 22 nt, Human
ugugaagcuggauccuggagcu

SEQ ID NO: 155368 - RNA, 23 nt, Human
cauguacagaguuugauaaagug

SEQ ID NO: 155369 - RNA, 22 nt, Human
cauggaaggcaaaagacacaga

SEQ ID NO: 155370 - RNA, 22 nt, Human
uggcagagagagugcagucgac

SEQ ID NO: 155371 - RNA, 22 nt, Human
ccaggacuucgaggcuacagug

SEQ ID NO: 155372 - RNA, 22 nt, Human
caaagcaaggcucaguuugaac

SEQ ID NO: 155373 - RNA, 22 nt, Human
gucccuggggaaucagcuggag

SEQ ID NO: 155374 - RNA, 21 nt, Human
uccucugcucucauaccacaa

SEQ ID NO: 155375 - RNA, 22 nt, Human
ucugucugcaccuaagcacagu

SEQ ID NO: 155376 - RNA, 22 nt, Human
cacugcuuauaaauucuaggca

SEQ ID NO: 155377 - RNA, 22 nt, Human
ccuagagcucugcuuuaucuaa

SEQ ID NO: 155378 - RNA, 20 nt, Human
acuggagccaucucagccua

SEQ ID NO: 155379 - RNA, 22 nt, Human
guuugcauuccaauuuagggga

SEQ ID NO: 155380 - RNA, 20 nt, Human
acugagcugcauggagagga

SEQ ID NO: 155381 - RNA, 22 nt, Human
guuuggggucugcagagcggcg

SEQ ID NO: 155382 - RNA, 22 nt, Human
uauuuugagguauuuuugagcu

SEQ ID NO: 155383 - RNA, 22 nt, Human
uucucuuagcuguaaagucaau

SEQ ID NO: 155384 - RNA, 22 nt, Human
aucuggcuauuucuggucgggg

SEQ ID NO: 155385 - RNA, 22 nt, Human
uaauuuaauuucaugccagccu

SEQ ID NO: 155386 - RNA, 22 nt, Human
agcagccacccagcugcucauu

SEQ ID NO: 155387 - RNA, 22 nt, Human
ucuguuccaguagaaaggugca

SEQ ID NO: 155388 - RNA, 22 nt, Human
cugggccagcaacugcaaugga

SEQ ID NO: 155389 - RNA, 20 nt, Human
agugacagagacuguguggc

SEQ ID NO: 155390 - RNA, 22 nt, Human
cagagcugauuggauccagaga

SEQ ID NO: 155391 - RNA, 22 nt, Human
ugaggugaccgcagaugggaag

SEQ ID NO: 155392 - RNA, 21 nt, Human
cacugcagccuugaccugggc

SEQ ID NO: 155393 - RNA, 22 nt, Human
acagagguguguguaggacagu

SEQ ID NO: 155394 - RNA, 22 nt, Human
cucugagcagaggccguggcua

SEQ ID NO: 155395 - RNA, 23 nt, Human
uuucauaugguguggaugaagaa

SEQ ID NO: 155396 - RNA, 20 nt, Human
acugcuucuuucucugaccu

SEQ ID NO: 155397 - RNA, 22 nt, Human
aagagcuggaagugaagauaac

SEQ ID NO: 155398 - RNA, 22 nt, Human
ccucccagugccuccagagcag

SEQ ID NO: 155399 - RNA, 22 nt, Human
aguuuauguagaauuggcaaua

SEQ ID NO: 155400 - RNA, 22 nt, Human
ccuccaggauaagucagggccu

SEQ ID NO: 155401 - RNA, 22 nt, Human
ucccagaggaaauggcagcuga

SEQ ID NO: 155402 - RNA, 22 nt, Human
ucccagaggucucugcugguuc

SEQ ID NO: 155403 - RNA, 22 nt, Human
aaaugaccagaauacaggcuuc

SEQ ID NO: 155404 - RNA, 22 nt, Human
cacccaggcuggagugcagggg

SEQ ID NO: 155405 - RNA, 22 nt, Human
caggcagauuugcugcccucca

SEQ ID NO: 155406 - RNA, 22 nt, Human
uucuuuaaaauagugagaaaga

SEQ ID NO: 155407 - RNA, 22 nt, Human
ccaaggaguagagcaggaagcu

SEQ ID NO: 155408 - RNA, 22 nt, Human
auugacaaauggauguugacau

SEQ ID NO: 155409 - RNA, 22 nt, Human
cagugcaguuucccagaugcug

SEQ ID NO: 155410 - RNA, 22 nt, Human
caugcacagugauaucugaaga

SEQ ID NO: 155411 - RNA, 16 nt, Human
agcagccagcacugga

SEQ ID NO: 155412 - RNA, 20 nt, Human
acaaaugcauucugugacau

SEQ ID NO: 155413 - RNA, 22 nt, Human
uagaaaugcaguguacuguguc

SEQ ID NO: 155414 - RNA, 22 nt, Human
ucccagagccaagcuauggaug

SEQ ID NO: 155415 - RNA, 22 nt, Human
ggaccagagaagugagcaccug

SEQ ID NO: 155416 - RNA, 22 nt, Human
ugacacagauuagagacauacc

SEQ ID NO: 155417 - RNA, 20 nt, Human
gguagcagcugcugucaucc

SEQ ID NO: 155418 - RNA, 22 nt, Human
gcagacagacugcagugauuuu

SEQ ID NO: 155419 - RNA, 22 nt, Human
aagggcaggcacccacccucac

SEQ ID NO: 155420 - RNA, 22 nt, Human
cacaguggcagguguggguugu

SEQ ID NO: 155421 - RNA, 22 nt, Human
ugcagaagcagagccgguggcc

SEQ ID NO: 155422 - RNA, 22 nt, Human
acugcagccuagggaccacagu

SEQ ID NO: 155423 - RNA, 22 nt, Human
ccacaggggcccacgagccgcu

SEQ ID NO: 155424 - RNA, 22 nt, Human
cagcuggcagaaccugcaucca

SEQ ID NO: 155425 - RNA, 22 nt, Human
uugaggagcacuagucagguau

SEQ ID NO: 155426 - RNA, 23 nt, Human
gugugccaagcacugugccagga

SEQ ID NO: 155427 - RNA, 19 nt, Human
guuuuucccagacgaggca

SEQ ID NO: 155428 - RNA, 22 nt, Human
gcaguggcaugaugugggcuca

SEQ ID NO: 155429 - RNA, 22 nt, Human
gcagccaccucccauggcgggg

SEQ ID NO: 155430 - RNA, 22 nt, Human
uaaaguucagugcaugaaugug

SEQ ID NO: 155431 - RNA, 22 nt, Human
accucugcaaugcaaugucaug

SEQ ID NO: 155432 - RNA, 22 nt, Human
cugggagguggagguugcauug

SEQ ID NO: 155433 - RNA, 22 nt, Human
agcagccagaaagggcagucga

SEQ ID NO: 155434 - RNA, 22 nt, Human
uucauauauaugcacuacguac

SEQ ID NO: 155435 - RNA, 22 nt, Human
ugugaaagauacuaggcagagg

SEQ ID NO: 155436 - RNA, 22 nt, Human
ucaaggugcugugcugugcuag

SEQ ID NO: 155437 - RNA, 22 nt, Human
ccuccugguccagcaucucuuu

SEQ ID NO: 155438 - RNA, 22 nt, Human
ugagcuucuuuauuuggccaga

SEQ ID NO: 155439 - RNA, 22 nt, Human
ggacucuguuuuccugaucacu

SEQ ID NO: 155440 - RNA, 18 nt, Human
acagacaaaauggaaaug

SEQ ID NO: 155441 - RNA, 22 nt, Human
caguggaggccuugggaccuuu

SEQ ID NO: 155442 - RNA, 22 nt, Human
gccuguguggaugcgccggugc

SEQ ID NO: 155443 - RNA, 20 nt, Human
aggcucagagcaguaguaca

SEQ ID NO: 155444 - RNA, 22 nt, Human
ccugccaggacauugcuugaag

SEQ ID NO: 155445 - RNA, 22 nt, Human
gcuggccucaucacugacuucu

SEQ ID NO: 155446 - RNA, 22 nt, Human
gaaggaagugcucauacuaguu

SEQ ID NO: 155447 - RNA, 20 nt, Human
gggcaguggcgcuaucucag

SEQ ID NO: 155448 - RNA, 22 nt, Human
ugcaggugugguuccucagcca

SEQ ID NO: 155449 - RNA, 22 nt, Human
ucagcugcucuguugagcugaa

SEQ ID NO: 155450 - RNA, 22 nt, Human
aaugaugguuaaacacuggagg

SEQ ID NO: 155451 - RNA, 22 nt, Human
agagcuuauaucuuggccaucc

SEQ ID NO: 155452 - RNA, 22 nt, Human
uuacaaaguucugaguucaaac

SEQ ID NO: 155453 - RNA, 22 nt, Human
ccucacuggccagccaggggug

SEQ ID NO: 155454 - RNA, 22 nt, Human
auucuuggcaaggagauuuaaa

SEQ ID NO: 155455 - RNA, 22 nt, Human
caggugggcuugggagaacacu

SEQ ID NO: 155456 - RNA, 22 nt, Human
uccagggcuuggcugggacggu

SEQ ID NO: 155457 - RNA, 22 nt, Human
aguuauauaacuaucuagaugc

SEQ ID NO: 155458 - RNA, 22 nt, Human
ccuuggaggacugcugcuucuu

SEQ ID NO: 155459 - RNA, 21 nt, Human
aggcucagagaucaaacagua

SEQ ID NO: 155460 - RNA, 22 nt, Human
ucagaaauagucuuuaaaauga

SEQ ID NO: 155461 - RNA, 22 nt, Human
gcagggucuugagaggcagcca

SEQ ID NO: 155462 - RNA, 22 nt, Human
auggcucauuuaucuugcagcc

SEQ ID NO: 155463 - RNA, 23 nt, Human
ggagugcaauggcgccaucucgg

SEQ ID NO: 155464 - RNA, 22 nt, Human
gagaaguuucugguuugcauag

SEQ ID NO: 155465 - RNA, 22 nt, Human
guguaaggccccagguucuuua

SEQ ID NO: 155466 - RNA, 22 nt, Human
gcuggcugcgucaucacagggc

SEQ ID NO: 155467 - RNA, 22 nt, Human
agggcugccugcucugcauuga

SEQ ID NO: 155468 - RNA, 22 nt, Human
cugggagucaccaggagcaagg

SEQ ID NO: 155469 - RNA, 22 nt, Human
uggagccagcccaggccccucu

SEQ ID NO: 155470 - RNA, 22 nt, Human
uaagaacagugacagccaacau

SEQ ID NO: 155471 - RNA, 22 nt, Human
ugcugucugauucagggugauu

SEQ ID NO: 155472 - RNA, 22 nt, Human
ggagccaguuuagaccucaguu

SEQ ID NO: 155473 - RNA, 22 nt, Human
uaaggcacacaguugcugcaug

SEQ ID NO: 155474 - RNA, 22 nt, Human
uacagaaaucacaucgcuuuga

SEQ ID NO: 155475 - RNA, 22 nt, Human
uaaaugcagcaguuucuguucu

SEQ ID NO: 155476 - RNA, 22 nt, Human
ucugccuggauuuuggaaagcu

SEQ ID NO: 155477 - RNA, 22 nt, Human
cagcucugugcaggccugggga

SEQ ID NO: 155478 - RNA, 19 nt, Human
ucgagucaagacacuaggc

SEQ ID NO: 155479 - RNA, 22 nt, Human
uacaaaguuuucuuggauugag

SEQ ID NO: 155480 - RNA, 22 nt, Human
gagccuguguuuccuguagcca

SEQ ID NO: 155481 - RNA, 22 nt, Human
ggcacugagcgggcucugagcg

SEQ ID NO: 155482 - RNA, 22 nt, Human
ucacacguccuugcuacuccuc

SEQ ID NO: 155483 - RNA, 22 nt, Human
uggaagccaggcccgcuccuaa

SEQ ID NO: 155484 - RNA, 21 nt, Human
cagaggcugagagggcaaucu

SEQ ID NO: 155485 - RNA, 19 nt, Human
uccugggcugggccagguc

SEQ ID NO: 155486 - RNA, 22 nt, Human
uggagcagcaucacuuugagcu

SEQ ID NO: 155487 - RNA, 21 nt, Human
gagcugggcgaggcuccgggg

SEQ ID NO: 155488 - RNA, 20 nt, Human
aggcucagcugagcucuugg

SEQ ID NO: 155489 - RNA, 18 nt, Human
cuucagugacagucuggc

SEQ ID NO: 155490 - RNA, 22 nt, Human
uagggcaguuucauguuaucuu

SEQ ID NO: 155491 - RNA, 22 nt, Human
ugugcuucugcagagacuauuu

SEQ ID NO: 155492 - RNA, 22 nt, Human
aauuuagauugauaaacaugga

SEQ ID NO: 155493 - RNA, 18 nt, Human
uucaccagugugaugggu

SEQ ID NO: 155494 - RNA, 22 nt, Human
ugaagcagagugaaggugaauu

SEQ ID NO: 155495 - RNA, 22 nt, Human
cuggcucaauaaauauuagcug

SEQ ID NO: 155496 - RNA, 22 nt, Human
aauaaacugcucaauugcauca

SEQ ID NO: 155497 - RNA, 22 nt, Human
ggagagaauuccauggacaugu

SEQ ID NO: 155498 - RNA, 22 nt, Human
cacaccuguaauaccagcuacu

SEQ ID NO: 155499 - RNA, 22 nt, Human
aacauuuaugguagucauugca

SEQ ID NO: 155500 - RNA, 22 nt, Human
uccuuggcuuucuggagcuucu

SEQ ID NO: 155501 - RNA, 22 nt, Human
ggggauggauuccgggucccug

SEQ ID NO: 155502 - RNA, 22 nt, Human
auaagagcuagucuuuuccuug

SEQ ID NO: 155503 - RNA, 22 nt, Human
ugccugggggacuaaggccaaa

SEQ ID NO: 155504 - RNA, 22 nt, Human
guauuugauacaugaaauggug

SEQ ID NO: 155505 - RNA, 21 nt, Human
agggcagauuagcuguaagag

SEQ ID NO: 155506 - RNA, 22 nt, Human
uugcauugauguuccuucuugc

SEQ ID NO: 155507 - RNA, 22 nt, Human
agggcagaggcggacacggaag

SEQ ID NO: 155508 - RNA, 22 nt, Human
agaauucuuggugguuagaaua

SEQ ID NO: 155509 - RNA, 22 nt, Human
uggggcuggcuauugucucccu

SEQ ID NO: 155510 - RNA, 22 nt, Human
aaaaaugugaccacaggguguu

SEQ ID NO: 155511 - RNA, 22 nt, Human
cuguccuaugaguacucacuag

SEQ ID NO: 155512 - RNA, 22 nt, Human
accaaggagccacauacaaccu

SEQ ID NO: 155513 - RNA, 19 nt, Human
ucacaggcaucuccccaga

SEQ ID NO: 155514 - RNA, 22 nt, Human
cugggagcugucaggagcgugu

SEQ ID NO: 155515 - RNA, 22 nt, Human
cuggcagcucuacucagagccu

SEQ ID NO: 155516 - RNA, 22 nt, Human
ugaaaaggagccuuagguaggu

SEQ ID NO: 155517 - RNA, 22 nt, Human
agcugcucugauaaaccuacuu

SEQ ID NO: 155518 - RNA, 22 nt, Human
cagccagggagcaaagaguuga

SEQ ID NO: 155519 - RNA, 22 nt, Human
gcucccaccuuugcuaucagua

SEQ ID NO: 155520 - RNA, 22 nt, Human
cccagacucaucccugggagcu

SEQ ID NO: 155521 - RNA, 22 nt, Human
gaaggaaaggucucaugccuuu

SEQ ID NO: 155522 - RNA, 22 nt, Human
ccagagcccgggaccuggacuu

SEQ ID NO: 155523 - RNA, 22 nt, Human
ccuggcucuucagagguuccua

SEQ ID NO: 155524 - RNA, 22 nt, Human
ggcugcuggaagacugaacaag

SEQ ID NO: 155525 - RNA, 22 nt, Human
aggcuccuugcucacaggcuca

SEQ ID NO: 155526 - RNA, 22 nt, Human
cuacuuuaauuuucugcagaga

SEQ ID NO: 155527 - RNA, 22 nt, Human
acugugugggccgcucacuggg

SEQ ID NO: 155528 - RNA, 22 nt, Human
caaaguuuaaaguagauuucag

SEQ ID NO: 155529 - RNA, 22 nt, Human
gcucuggguagccacugccugg

SEQ ID NO: 155530 - RNA, 22 nt, Human
guggcaggucccauuggagcag

SEQ ID NO: 155531 - RNA, 22 nt, Human
agcagcugaccagugaguccug

SEQ ID NO: 155532 - RNA, 22 nt, Human
ucuggccugggccugccggugc

SEQ ID NO: 155533 - RNA, 21 nt, Human
cuccugggcuaagauauagug

SEQ ID NO: 155534 - RNA, 22 nt, Human
cugggaggcagucucucuagaa

SEQ ID NO: 155535 - RNA, 22 nt, Human
uuuuuaagagauucuccagucu

SEQ ID NO: 155536 - RNA, 22 nt, Human
auguuacauaguccuuauuugu

SEQ ID NO: 155537 - RNA, 22 nt, Human
cuuucucugugugguaaagggc

SEQ ID NO: 155538 - RNA, 22 nt, Human
ugggacugcucuugcugggguc

SEQ ID NO: 155539 - RNA, 22 nt, Human
agagcuggguggacuuguaguu

SEQ ID NO: 155540 - RNA, 22 nt, Human
ugcaagagguaaaaugaaagga

SEQ ID NO: 155541 - RNA, 20 nt, Human
cagaaggucuaagcuuuaga

SEQ ID NO: 155542 - RNA, 22 nt, Human
agagugaucagauaucaggugu

SEQ ID NO: 155543 - RNA, 22 nt, Human
cagguggguacaucacagagac

SEQ ID NO: 155544 - RNA, 23 nt, Human
ccaaagucgaagucuaguccaga

SEQ ID NO: 155545 - RNA, 22 nt, Human
augggaguuuucucugaugcuc

SEQ ID NO: 155546 - RNA, 22 nt, Human
aggcugccucgugagcucgcug

SEQ ID NO: 155547 - RNA, 22 nt, Human
cagggcuguaaauuagugcuga

SEQ ID NO: 155548 - RNA, 22 nt, Human
gcagagugauggaaugugggug

SEQ ID NO: 155549 - RNA, 22 nt, Human
uggcagaguucgcugugccuuu

SEQ ID NO: 155550 - RNA, 22 nt, Human
cacugcaguuccccagugcgca

SEQ ID NO: 155551 - RNA, 22 nt, Human
gaagccaguacugugcucugca

SEQ ID NO: 155552 - RNA, 22 nt, Human
agagugggugaucucuguuguc

SEQ ID NO: 155553 - RNA, 22 nt, Human
gccaccagugggggccugggca

SEQ ID NO: 155554 - RNA, 22 nt, Human
cauggcccucuucuggagcaau

SEQ ID NO: 155555 - RNA, 22 nt, Human
auaauuuacaacugcuuuuaau

SEQ ID NO: 155556 - RNA, 22 nt, Human
gcagcugcaggcaggcuugcug

SEQ ID NO: 155557 - RNA, 21 nt, Human
ccugagccuguuuauccagaa

SEQ ID NO: 155558 - RNA, 22 nt, Human
gcugcccucccagggcaagcuu

SEQ ID NO: 155559 - RNA, 22 nt, Human
gcagcuuuuuggaugucaguua

SEQ ID NO: 155560 - RNA, 22 nt, Human
cauucauuagaauagauaugua

SEQ ID NO: 155561 - RNA, 22 nt, Human
cugcugucuuuauuucacugcu

SEQ ID NO: 155562 - RNA, 22 nt, Human
ugguacuuggaggcagaaaaau

SEQ ID NO: 155563 - RNA, 18 nt, Human
acagaaauagcugugccu

SEQ ID NO: 155564 - RNA, 22 nt, Human
ggggcagaguagcuggggugug

SEQ ID NO: 155565 - RNA, 22 nt, Human
uccuggagcuuccuucauggua

SEQ ID NO: 155566 - RNA, 22 nt, Human
gugcauauaugcacauaugugu

SEQ ID NO: 155567 - RNA, 22 nt, Human
uccuugaaaaucuugguuuaga

SEQ ID NO: 155568 - RNA, 22 nt, Human
ugagccagaguggagugugccu

SEQ ID NO: 155569 - RNA, 22 nt, Human
cagcuccagcccaggcagcucc

SEQ ID NO: 155570 - RNA, 22 nt, Human
ugggcagagaguagaggcaacg

SEQ ID NO: 155571 - RNA, 22 nt, Human
cuccaguaucuguaggaaaagg

SEQ ID NO: 155572 - RNA, 21 nt, Human
agcucagccgggcacaguggc

SEQ ID NO: 155573 - RNA, 22 nt, Human
gcugccacgaucucugcuguag

SEQ ID NO: 155574 - RNA, 22 nt, Human
uccaguggguugcugagggagg

SEQ ID NO: 155575 - RNA, 22 nt, Human
gcuaccugagcaagagcuucaa

SEQ ID NO: 155576 - RNA, 22 nt, Human
aggauccuuuggccacuucuua

SEQ ID NO: 155577 - RNA, 22 nt, Human
ucaggugguccuaagugccauc

SEQ ID NO: 155578 - RNA, 22 nt, Human
gcaggggcuaaggacacagaga

SEQ ID NO: 155579 - RNA, 22 nt, Human
agaugcuucaguguuuaauuua

SEQ ID NO: 155580 - RNA, 22 nt, Human
gagucaguaauggauaugucau

SEQ ID NO: 155581 - RNA, 22 nt, Human
cauuaugugggaaaauguucuu

SEQ ID NO: 155582 - RNA, 19 nt, Human
gccagcagaaugaugaggc

SEQ ID NO: 155583 - RNA, 22 nt, Human
agacaaaggauuaaugaugaug

SEQ ID NO: 155584 - RNA, 22 nt, Human
gcucuggacccuggaguggcug

SEQ ID NO: 155585 - RNA, 22 nt, Human
gcucuuccauuucucuugaacu

SEQ ID NO: 155586 - RNA, 22 nt, Human
uagacacauccguggaagcuuc

SEQ ID NO: 155587 - RNA, 22 nt, Human
guuauugcaguauagaggucua

SEQ ID NO: 155588 - RNA, 22 nt, Human
aaagcaaugaugguagacacgu

SEQ ID NO: 155589 - RNA, 21 nt, Human
ugaagccugaggcauagcccc

SEQ ID NO: 155590 - RNA, 18 nt, Human
ugcucuggucucacuugg

SEQ ID NO: 155591 - RNA, 22 nt, Human
ugcagcuguaacagaggccuca

SEQ ID NO: 155592 - RNA, 20 nt, Human
gcaggcagggaaugggggug

SEQ ID NO: 155593 - RNA, 22 nt, Human
gcaggagcagucaggggcagcu

SEQ ID NO: 155594 - RNA, 22 nt, Human
ccugagagcagcuuccugcuua

SEQ ID NO: 155595 - RNA, 22 nt, Human
gguggagcuguggacaggaagg

SEQ ID NO: 155596 - RNA, 22 nt, Human
aucugacaaccuauugacuuga

SEQ ID NO: 155597 - RNA, 22 nt, Human
cugaggaugguguggucuucuc

SEQ ID NO: 155598 - RNA, 22 nt, Human
uccugagauaaaucucauguga

SEQ ID NO: 155599 - RNA, 22 nt, Human
ucccagggugcgccugcccucg

SEQ ID NO: 155600 - RNA, 22 nt, Human
ccagcacugcucucagacugag

SEQ ID NO: 155601 - RNA, 22 nt, Human
acuuucucaggaauucacagac

SEQ ID NO: 155602 - RNA, 22 nt, Human
cuccaggccagggaaguggaca

SEQ ID NO: 155603 - RNA, 22 nt, Human
ucuaaaaaagucuguucacuug

SEQ ID NO: 155604 - RNA, 22 nt, Human
aaugcacaugccacauguggua

SEQ ID NO: 155605 - RNA, 22 nt, Human
cccuggaggcggauguugcagu

SEQ ID NO: 155606 - RNA, 22 nt, Human
agauuucccacuccauguauug

SEQ ID NO: 155607 - RNA, 23 nt, Human
agagcuuucuaaaauguaaaucu

SEQ ID NO: 155608 - RNA, 22 nt, Human
agcucacaguguccuuccucaa

SEQ ID NO: 155609 - RNA, 20 nt, Human
ccugucugcaauggagguca

SEQ ID NO: 155610 - RNA, 22 nt, Human
gagcacagcuggagguagcauu

SEQ ID NO: 155611 - RNA, 22 nt, Human
ccacagagagugucagccuuug

SEQ ID NO: 155612 - RNA, 22 nt, Human
ugccuugguucucuacuuggag

SEQ ID NO: 155613 - RNA, 22 nt, Human
ccuggagauuauuugguccaau

SEQ ID NO: 155614 - RNA, 22 nt, Human
cauucauuuaugaaauaucuau

SEQ ID NO: 155615 - RNA, 22 nt, Human
ccccuuccaggaagcagaaucg

SEQ ID NO: 155616 - RNA, 21 nt, Human
ccccugggagcccugucagua

SEQ ID NO: 155617 - RNA, 22 nt, Human
aucuggcugacuuugugggaca

SEQ ID NO: 155618 - RNA, 22 nt, Human
uggagcagccaugaugacagag

SEQ ID NO: 155619 - RNA, 22 nt, Human
agucucugcugguugugccuau

SEQ ID NO: 155620 - RNA, 20 nt, Human
aaucagaaagugugagcucu

SEQ ID NO: 155621 - RNA, 22 nt, Human
agcugagagguggcaagcugua

SEQ ID NO: 155622 - RNA, 22 nt, Human
uggcacugccuggcagggcccc

SEQ ID NO: 155623 - RNA, 22 nt, Human
uagauuucgcugcaucucaauc

SEQ ID NO: 155624 - RNA, 22 nt, Human
gcugccuuuugcuccucccacc

SEQ ID NO: 155625 - RNA, 22 nt, Human
uggcugcuagccagagcuucag

SEQ ID NO: 155626 - RNA, 22 nt, Human
uccugaggaaaguucaugaaug

SEQ ID NO: 155627 - RNA, 22 nt, Human
ugcucugucaagaaaagaugcc

SEQ ID NO: 155628 - RNA, 20 nt, Human
cccaggagugagcagcuuua

SEQ ID NO: 155629 - RNA, 22 nt, Human
ccaucuccacugucccugucaa

SEQ ID NO: 155630 - RNA, 22 nt, Human
gccuguccacuaaacagccaag

SEQ ID NO: 155631 - RNA, 20 nt, Human
gaggcugcggacugcuggac

SEQ ID NO: 155632 - RNA, 22 nt, Human
gccagcucagaugcaggaagga

SEQ ID NO: 155633 - RNA, 22 nt, Human
uagccucuggaauccuuucucu

SEQ ID NO: 155634 - RNA, 22 nt, Human
cucagggucugguccuuagauu

SEQ ID NO: 155635 - RNA, 22 nt, Human
aaaugguaagacaacacauuau

SEQ ID NO: 155636 - RNA, 22 nt, Human
ggcaccuggauguagcagugaa

SEQ ID NO: 155637 - RNA, 21 nt, Human
gggaaauuaggauugcucauc

SEQ ID NO: 155638 - RNA, 22 nt, Human
aauagguagccagauauauaaa

SEQ ID NO: 155639 - RNA, 22 nt, Human
gugugcagaagacacaagacau

SEQ ID NO: 155640 - RNA, 22 nt, Human
aggaaaaaccuguuaaugguag

SEQ ID NO: 155641 - RNA, 22 nt, Human
cagcacugcuucgcagccaggg

SEQ ID NO: 155642 - RNA, 22 nt, Human
ucuuccagcaaugugaaaucac

SEQ ID NO: 155643 - RNA, 22 nt, Human
agaaaucauucccaaacccaua

SEQ ID NO: 155644 - RNA, 19 nt, Human
ucaguuuuagucaucaguu

SEQ ID NO: 155645 - RNA, 22 nt, Human
ucacaccuguaaucccaggccu

SEQ ID NO: 155646 - RNA, 22 nt, Human
agggggcccuugcaggugagcg

SEQ ID NO: 155647 - RNA, 22 nt, Human
gugcuuaauacaugucaauaac

SEQ ID NO: 155648 - RNA, 22 nt, Human
aggguagggcccggagacagac

SEQ ID NO: 155649 - RNA, 22 nt, Human
aaggcugccucugccagaggag

SEQ ID NO: 155650 - RNA, 22 nt, Human
ccugucuggaacauggccuguu

SEQ ID NO: 155651 - RNA, 22 nt, Human
gauuucuucauucauuagaugg

SEQ ID NO: 155652 - RNA, 22 nt, Human
acagaggucauggagaguucuc

SEQ ID NO: 155653 - RNA, 22 nt, Human
auagucuuagaucagauaaagu

SEQ ID NO: 155654 - RNA, 22 nt, Human
ggacagagcccugguggccuaa

SEQ ID NO: 155655 - RNA, 22 nt, Human
aagagcuguaugccauaugauu

SEQ ID NO: 155656 - RNA, 22 nt, Human
acauuuaggauguuuugagaga

SEQ ID NO: 155657 - RNA, 22 nt, Human
ggucucagcuggaguccuuggu

SEQ ID NO: 155658 - RNA, 22 nt, Human
ccauaagguuuggggccaugca

SEQ ID NO: 155659 - RNA, 19 nt, Human
uggcauugguccagauaaa

SEQ ID NO: 155660 - RNA, 17 nt, Human
agguggguggaucaccu

SEQ ID NO: 155661 - RNA, 22 nt, Human
aagcagcacaguaauauuggug

SEQ ID NO: 155662 - RNA, 22 nt, Human
agccagcaugaagacagaggcc

SEQ ID NO: 155663 - RNA, 22 nt, Human
ggcagauggagaagcagcaggu

SEQ ID NO: 155664 - RNA, 22 nt, Human
acacagggucuagaguuaggcc

SEQ ID NO: 155665 - RNA, 22 nt, Human
augagcuguaagguggcuuccu

SEQ ID NO: 155666 - RNA, 22 nt, Human
uuaauacagucuccagaaguaa

SEQ ID NO: 155667 - RNA, 22 nt, Human
uggaggaaguggcuggccagaa

SEQ ID NO: 155668 - RNA, 22 nt, Human
cagugccaugucugagccccua

SEQ ID NO: 155669 - RNA, 22 nt, Human
gaugugagugguagcugggauu

SEQ ID NO: 155670 - RNA, 22 nt, Human
gagcugggacauggguccucuc

SEQ ID NO: 155671 - RNA, 22 nt, Human
uacaugaacaaaauagcagaaa

SEQ ID NO: 155672 - RNA, 22 nt, Human
augucuuuggcuuugacauggc

SEQ ID NO: 155673 - RNA, 22 nt, Human
uuacuuugaugaucaaugagcg

SEQ ID NO: 155674 - RNA, 22 nt, Human
gucagugucuuaacagagauua

SEQ ID NO: 155675 - RNA, 22 nt, Human
uuaaaaugcagauucugauuca

SEQ ID NO: 155676 - RNA, 22 nt, Human
uaaaauguuugcaagagaccag

SEQ ID NO: 155677 - RNA, 22 nt, Human
ucagcaauaugauaggcuuugu

SEQ ID NO: 155678 - RNA, 22 nt, Human
ucauggcacuuagcacaguccu

SEQ ID NO: 155679 - RNA, 22 nt, Human
ucucaggaucuaauacauggua

SEQ ID NO: 155680 - RNA, 22 nt, Human
ugccagaagauucucuaucaga

SEQ ID NO: 155681 - RNA, 23 nt, Human
gccaggcuccggucuguggccac

SEQ ID NO: 155682 - RNA, 22 nt, Human
ggagcauguggggugagcaggg

SEQ ID NO: 155683 - RNA, 22 nt, Human
cagcagugaugugugaggguuc

SEQ ID NO: 155684 - RNA, 19 nt, Human
ggacacagaaagcugcauu

SEQ ID NO: 155685 - RNA, 22 nt, Human
ugucccauggauaccaggcuau

SEQ ID NO: 155686 - RNA, 22 nt, Human
ugggcacuggaagccugcugug

SEQ ID NO: 155687 - RNA, 22 nt, Human
gcucaggaccgaggggugggaa

SEQ ID NO: 155688 - RNA, 22 nt, Human
gugccugcagcaauccauggca

SEQ ID NO: 155689 - RNA, 22 nt, Human
gagccagguuugaaucucaguc

SEQ ID NO: 155690 - RNA, 21 nt, Human
gcugccaccgcgugcuccagg

SEQ ID NO: 155691 - RNA, 20 nt, Human
cagagaccugucuucacaga

SEQ ID NO: 155692 - RNA, 22 nt, Human
ugccucugggugaccaaggagc

SEQ ID NO: 155693 - RNA, 22 nt, Human
cugggcaguuuuacaucauugc

SEQ ID NO: 155694 - RNA, 22 nt, Human
ggcagcaguggcugcuauuguc

SEQ ID NO: 155695 - RNA, 20 nt, Human
gcuuuuucuaauagcagucc

SEQ ID NO: 155696 - RNA, 22 nt, Human
cucaaggacuuauucaugccug

SEQ ID NO: 155697 - RNA, 22 nt, Human
cucacugcaaguuccaccuacc

SEQ ID NO: 155698 - RNA, 22 nt, Human
ggggacccucaggacugcgucu

SEQ ID NO: 155699 - RNA, 22 nt, Human
agcuuuaugggagcuuagauaa

SEQ ID NO: 155700 - RNA, 22 nt, Human
gcugccucuguagcuuuggacc

SEQ ID NO: 155701 - RNA, 22 nt, Human
ugggccuguugccugaguccau

SEQ ID NO: 155702 - RNA, 22 nt, Human
uucuggagagaaaccuuacaaa

SEQ ID NO: 155703 - RNA, 22 nt, Human
aagagggaggugcgggugcaga

SEQ ID NO: 155704 - RNA, 22 nt, Human
augggaggcagcagagcccagc

SEQ ID NO: 155705 - RNA, 22 nt, Human
auuucuuccucugucaguaacu

SEQ ID NO: 155706 - RNA, 22 nt, Human
aaaaaucacuuuuauaggcagc

SEQ ID NO: 155707 - RNA, 22 nt, Human
ccagggugagaaaaggcuggau

SEQ ID NO: 155708 - RNA, 22 nt, Human
uggagcaggccggaaguggcuu

SEQ ID NO: 155709 - RNA, 22 nt, Human
gccagggaacccaagggccuca

SEQ ID NO: 155710 - RNA, 22 nt, Human
gcugagguaggagguugcagug

SEQ ID NO: 155711 - RNA, 22 nt, Human
acucuugucucaacuuuuguau

SEQ ID NO: 155712 - RNA, 22 nt, Human
cugucuguuucugauucaaccu

SEQ ID NO: 155713 - RNA, 22 nt, Human
aucuagaaguggcaugaauuac

SEQ ID NO: 155714 - RNA, 22 nt, Human
aaggagaaaugguagaugugca

SEQ ID NO: 155715 - RNA, 22 nt, Human
agccccacacucucucugagaa

SEQ ID NO: 155716 - RNA, 22 nt, Human
agaugcugugaggaagcuagga

SEQ ID NO: 155717 - RNA, 22 nt, Human
aucuggcuuacgaagcacuggu

SEQ ID NO: 155718 - RNA, 22 nt, Human
aagaacauuuuguagaaugaca

SEQ ID NO: 155719 - RNA, 22 nt, Human
uuguuuuuaugaacauccagga

SEQ ID NO: 155720 - RNA, 22 nt, Human
cugccagcacugccuccugagg

SEQ ID NO: 155721 - RNA, 22 nt, Human
ggguggaggagaacaggcccca

SEQ ID NO: 155722 - RNA, 22 nt, Human
ugcagggccagacuggguugga

SEQ ID NO: 155723 - RNA, 22 nt, Human
ccaggaaugaaauguagauaaa

SEQ ID NO: 155724 - RNA, 22 nt, Human
cuagaaauauuuuacagucaag

SEQ ID NO: 155725 - RNA, 22 nt, Human
gcugucugagaacaugguggaa

SEQ ID NO: 155726 - RNA, 22 nt, Human
cuucuggaggacacuggcccca

SEQ ID NO: 155727 - RNA, 22 nt, Human
ggcagagaugugggucagaauc

SEQ ID NO: 155728 - RNA, 22 nt, Human
cagagguauugcaaaagccuag

SEQ ID NO: 155729 - RNA, 22 nt, Human
ggcugggagcuggacaggccgg

SEQ ID NO: 155730 - RNA, 22 nt, Human
aagcugccauagaacgagaggu

SEQ ID NO: 155731 - RNA, 17 nt, Human
gauuuccugaaguucuu

SEQ ID NO: 155732 - RNA, 22 nt, Human
agcaccuguggcucaugcucgu

SEQ ID NO: 155733 - RNA, 22 nt, Human
ggcaggagaauggcgugaacuc

SEQ ID NO: 155734 - RNA, 22 nt, Human
agcuuccuguugagagagggag

SEQ ID NO: 155735 - RNA, 22 nt, Human
gagcugccggcccacaguacua

SEQ ID NO: 155736 - RNA, 22 nt, Human
aggccugaggaccuucuggagg

SEQ ID NO: 155737 - RNA, 22 nt, Human
cccagcuccaagggacagcgaa

SEQ ID NO: 155738 - RNA, 22 nt, Human
uguuuuaugagccauauaaccu

SEQ ID NO: 155739 - RNA, 22 nt, Human
aggggaggagcuuuucuugccu

SEQ ID NO: 155740 - RNA, 22 nt, Human
agucuucccugugccagagugu

SEQ ID NO: 155741 - RNA, 22 nt, Human
gcaaggcugugcacuuugcauu

SEQ ID NO: 155742 - RNA, 22 nt, Human
cacaggagagcugggaggugcc

SEQ ID NO: 155743 - RNA, 22 nt, Human
cagagcuggguuugggaaaccu

SEQ ID NO: 155744 - RNA, 22 nt, Human
ugugugcagccucugucuuugg

SEQ ID NO: 155745 - RNA, 22 nt, Human
gcguaaggccucuggucucgga

SEQ ID NO: 155746 - RNA, 18 nt, Human
agaaggagcuaugggcag

SEQ ID NO: 155747 - RNA, 22 nt, Human
ucuuuccuguaacugcuguuca

SEQ ID NO: 155748 - RNA, 22 nt, Human
ucaaguguaguggugucagguc

SEQ ID NO: 155749 - RNA, 22 nt, Human
ccugagaggcccucucacuguc

SEQ ID NO: 155750 - RNA, 22 nt, Human
ggcagagcuugcagugagccga

SEQ ID NO: 155751 - RNA, 22 nt, Human
agagcuggggccagagucaagg

SEQ ID NO: 155752 - RNA, 17 nt, Human
agcagcuggcacaggag

SEQ ID NO: 155753 - RNA, 22 nt, Human
caccagcagaagacugagggug

SEQ ID NO: 155754 - RNA, 22 nt, Human
cugcucugugguccaugagaca

SEQ ID NO: 155755 - RNA, 22 nt, Human
cugcugggucuaugcaagugga

SEQ ID NO: 155756 - RNA, 22 nt, Human
gucucccaaccccugugcccag

SEQ ID NO: 155757 - RNA, 22 nt, Human
ucucuggaguauaaccagggau

SEQ ID NO: 155758 - RNA, 23 nt, Human
caugccaguuugugcaggcagau

SEQ ID NO: 155759 - RNA, 23 nt, Human
agccucuuuucuccugcccugca

SEQ ID NO: 155760 - RNA, 22 nt, Human
ggcucuggaaaguguccuugau

SEQ ID NO: 155761 - RNA, 22 nt, Human
ucagaacauugacauucuuauu

SEQ ID NO: 155762 - RNA, 22 nt, Human
cacagcuggugcacuagcucug

SEQ ID NO: 155763 - RNA, 22 nt, Human
agggaagaagcugguaguaggu

SEQ ID NO: 155764 - RNA, 22 nt, Human
aggcccugcuuuccagagcuca

SEQ ID NO: 155765 - RNA, 22 nt, Human
ggucacugcucuaaacaaaagu

SEQ ID NO: 155766 - RNA, 22 nt, Human
ggaugcugacuuuggagcaugg

SEQ ID NO: 155767 - RNA, 22 nt, Human
uccagagggcgauggcuggggg

SEQ ID NO: 155768 - RNA, 22 nt, Human
agcaugaaagcauaggacaguc

SEQ ID NO: 155769 - RNA, 22 nt, Human
cccagggagguagcaggagaaa

SEQ ID NO: 155770 - RNA, 20 nt, Human
ugcucaggauggagaggugu

SEQ ID NO: 155771 - RNA, 22 nt, Human
guccucaguaagagggccucug

SEQ ID NO: 155772 - RNA, 22 nt, Human
aaggagcuuguucgccuuccuc

SEQ ID NO: 155773 - RNA, 20 nt, Human
cccuggccuguuucaugccc

SEQ ID NO: 155774 - RNA, 22 nt, Human
aucagcaagcaugguuaggugu

SEQ ID NO: 155775 - RNA, 22 nt, Human
agcaauauaaauguuggguaga

SEQ ID NO: 155776 - RNA, 22 nt, Human
ggugaagggugucauggcauuu

SEQ ID NO: 155777 - RNA, 22 nt, Human
aggucauuuuugccuucuauuu

SEQ ID NO: 155778 - RNA, 22 nt, Human
aaggcgacacaggcagcaggcc

SEQ ID NO: 155779 - RNA, 21 nt, Human
uucaaaguuugccuaaagauu

SEQ ID NO: 155780 - RNA, 22 nt, Human
augcaagauguauagaagacuu

SEQ ID NO: 155781 - RNA, 18 nt, Human
ggcugagguugacuagaa

SEQ ID NO: 155782 - RNA, 22 nt, Human
cagcagggggcagcgcagauca

SEQ ID NO: 155783 - RNA, 23 nt, Human
ugagcccaggaggucaaggcugc

SEQ ID NO: 155784 - RNA, 22 nt, Human
ugcccuuggguaacuugcugau

SEQ ID NO: 155785 - RNA, 22 nt, Human
acuuuauuuccuauugcaucca

SEQ ID NO: 155786 - RNA, 22 nt, Human
uucuuucccaguagaugugaaa

SEQ ID NO: 155787 - RNA, 22 nt, Human
cuguguggacugguugaggccc

SEQ ID NO: 155788 - RNA, 22 nt, Human
gcucuggaagcaucugagagga

SEQ ID NO: 155789 - RNA, 22 nt, Human
uagauuucaggcuggcuugcgg

SEQ ID NO: 155790 - RNA, 22 nt, Human
gaggccagcgcgcagcacuuuu

SEQ ID NO: 155791 - RNA, 22 nt, Human
augguacaaaauguauaaaguc

SEQ ID NO: 155792 - RNA, 18 nt, Human
ucucagaggccauccuag

SEQ ID NO: 155793 - RNA, 22 nt, Human
cacagggcaggccccaggccuc

SEQ ID NO: 155794 - RNA, 22 nt, Human
cuccugggcucaagugauccuc

SEQ ID NO: 155795 - RNA, 18 nt, Human
cagaaguccuucaaggcc

SEQ ID NO: 155796 - RNA, 22 nt, Human
agcugguucagaaauuagaugg

SEQ ID NO: 155797 - RNA, 21 nt, Human
ggcuccugcuuugugaggggc

SEQ ID NO: 155798 - RNA, 22 nt, Human
acaaaguuaacaguuggauagu

SEQ ID NO: 155799 - RNA, 21 nt, Human
aggggacagaguagcuccagg

SEQ ID NO: 155800 - RNA, 20 nt, Human
auacacauauucuugcaacu

SEQ ID NO: 155801 - RNA, 22 nt, Human
cagaggcucuuccucacugccc

SEQ ID NO: 155802 - RNA, 22 nt, Human
uggcuggcccugggagugcaga

SEQ ID NO: 155803 - RNA, 22 nt, Human
cacugccugugagcugugugcc

SEQ ID NO: 155804 - RNA, 22 nt, Human
ggugugccuggggcuuagcugc

SEQ ID NO: 155805 - RNA, 22 nt, Human
acacacaacucauuguguaaua

SEQ ID NO: 155806 - RNA, 22 nt, Human
acucugccccgaguucugggaa

SEQ ID NO: 155807 - RNA, 22 nt, Human
aagagcuggauugugcugcaga

SEQ ID NO: 155808 - RNA, 22 nt, Human
uuugcauuaguuuagauuucaa

SEQ ID NO: 155809 - RNA, 19 nt, Human
uguuuuguuaaagcagucc

SEQ ID NO: 155810 - RNA, 22 nt, Human
ccugcugggccugagcaaugag

SEQ ID NO: 155811 - RNA, 22 nt, Human
ugcuauugugaacagugccaca

SEQ ID NO: 155812 - RNA, 23 nt, Human
acucacaaagcaggaucauguug

SEQ ID NO: 155813 - RNA, 22 nt, Human
ccagagcuccagggcuacagaa

SEQ ID NO: 155814 - RNA, 22 nt, Human
ucagaggaccuuacugagaacc

SEQ ID NO: 155815 - RNA, 23 nt, Human
auaaggcauaaagguacauugga

SEQ ID NO: 155816 - RNA, 22 nt, Human
guggccuuuccugaagaaauga

SEQ ID NO: 155817 - RNA, 22 nt, Human
uuuauuaugauggacaccuucg

SEQ ID NO: 155818 - RNA, 22 nt, Human
cuggcuuccaugcuguaguggc

SEQ ID NO: 155819 - RNA, 22 nt, Human
gaagcagcgaaguggaagggac

SEQ ID NO: 155820 - RNA, 20 nt, Human
guucucacugaucugcaggg

SEQ ID NO: 155821 - RNA, 22 nt, Human
guccucuguagggcugggccac

SEQ ID NO: 155822 - RNA, 22 nt, Human
gcuguggcuguacagagaccau

SEQ ID NO: 155823 - RNA, 22 nt, Human
uucauuccuucuguaccuugcc

SEQ ID NO: 155824 - RNA, 22 nt, Human
cugggcugagccugggcugugu

SEQ ID NO: 155825 - RNA, 22 nt, Human
ucaggcugguggucagauggcu

SEQ ID NO: 155826 - RNA, 22 nt, Human
uauuucuuucagguauguguug

SEQ ID NO: 155827 - RNA, 22 nt, Human
gccuggcugagguggggaggca

SEQ ID NO: 155828 - RNA, 22 nt, Human
uuaauuuauguccaaaccagau

SEQ ID NO: 155829 - RNA, 22 nt, Human
agccugcaggaugggcagcacc

SEQ ID NO: 155830 - RNA, 22 nt, Human
aggcagagaaaaaccagauaug

SEQ ID NO: 155831 - RNA, 22 nt, Human
ucugggcacugcugagccugua

SEQ ID NO: 155832 - RNA, 23 nt, Human
agucaguguaaguuuggaaugca

SEQ ID NO: 155833 - RNA, 22 nt, Human
cagccaggagccucugcaacua

SEQ ID NO: 155834 - RNA, 22 nt, Human
guauccuuugcggaaauuucua

SEQ ID NO: 155835 - RNA, 22 nt, Human
cagcuccugcagcugcugccgu

SEQ ID NO: 155836 - RNA, 22 nt, Human
aaaugcagguaguauuuauuuu

SEQ ID NO: 155837 - RNA, 21 nt, Human
uggcccuggccacggcugcca

SEQ ID NO: 155838 - RNA, 22 nt, Human
ucuggcucugaauucacuucug

SEQ ID NO: 155839 - RNA, 22 nt, Human
cugcagggcagggccuccuggc

SEQ ID NO: 155840 - RNA, 19 nt, Human
aggaaagguggccuuagca

SEQ ID NO: 155841 - RNA, 22 nt, Human
agaggccuuucuguugagugaa

SEQ ID NO: 155842 - RNA, 22 nt, Human
auguacauuuuccuaauguuuu

SEQ ID NO: 155843 - RNA, 22 nt, Human
uguggugagaaacugguagauu

SEQ ID NO: 155844 - RNA, 22 nt, Human
cccagcugcaccucuauggccu

SEQ ID NO: 155845 - RNA, 22 nt, Human
ucuuugcaggagcccuuugaac

SEQ ID NO: 155846 - RNA, 22 nt, Human
gcagggcacagacagugccaag

SEQ ID NO: 155847 - RNA, 22 nt, Human
uggggcuggggaucuugagccu

SEQ ID NO: 155848 - RNA, 22 nt, Human
auuuccuagccucucuugcagu

SEQ ID NO: 155849 - RNA, 19 nt, Human
ggcuggcaagugacagugu

SEQ ID NO: 155850 - RNA, 22 nt, Human
ugccugaugcaggaguaucaga

SEQ ID NO: 155851 - RNA, 22 nt, Human
aggaaaaucgagucuggaggca

SEQ ID NO: 155852 - RNA, 22 nt, Human
ugaaaucugucccacuuuagcu

SEQ ID NO: 155853 - RNA, 22 nt, Human
ucugagccaauuucugugucca

SEQ ID NO: 155854 - RNA, 22 nt, Human
gugccugggguugagcuaugaa

SEQ ID NO: 155855 - RNA, 22 nt, Human
ucuacuuuucccuauacaguuu

SEQ ID NO: 155856 - RNA, 22 nt, Human
gcaguggcuaggagucuggcgu

SEQ ID NO: 155857 - RNA, 22 nt, Human
caucacagauguuguguggagu

SEQ ID NO: 155858 - RNA, 22 nt, Human
uuccucagagggcgcuggggaa

SEQ ID NO: 155859 - RNA, 22 nt, Human
agggagcuuccgaacuacagcu

SEQ ID NO: 155860 - RNA, 22 nt, Human
cucuggcuucuaccuugcaguu

SEQ ID NO: 155861 - RNA, 22 nt, Human
ccuuucucauuuuaagcauuag

SEQ ID NO: 155862 - RNA, 22 nt, Human
ccaggcucugcgcuggacaugg

SEQ ID NO: 155863 - RNA, 22 nt, Human
aagcugccagcugagcugaggc

SEQ ID NO: 155864 - RNA, 22 nt, Human
agaugggcgcccuggacugagg

SEQ ID NO: 155865 - RNA, 22 nt, Human
ugagggaguuggguguauagga

SEQ ID NO: 155866 - RNA, 22 nt, Human
gcaggaaagguugagacuuugc

SEQ ID NO: 155867 - RNA, 22 nt, Human
agcugcucuuugaaggacacuu

SEQ ID NO: 155868 - RNA, 22 nt, Human
cccagggcuuuucucacuagac

SEQ ID NO: 155869 - RNA, 22 nt, Human
uccagggagagccgcugcucca

SEQ ID NO: 155870 - RNA, 22 nt, Human
ugcaccauuaauuuaugugaga

SEQ ID NO: 155871 - RNA, 22 nt, Human
cagcaguggccaucuguguggu

SEQ ID NO: 155872 - RNA, 22 nt, Human
cagggccugagggcugcucugc

SEQ ID NO: 155873 - RNA, 22 nt, Human
ccugucugcaugagugagcaua

SEQ ID NO: 155874 - RNA, 22 nt, Human
accuggagucauuugaggagua

SEQ ID NO: 155875 - RNA, 22 nt, Human
cuucccagacgggguggcagcc

SEQ ID NO: 155876 - RNA, 17 nt, Human
aggaaacauuuucuuuc

SEQ ID NO: 155877 - RNA, 22 nt, Human
ucagggcauccauugccuguug

SEQ ID NO: 155878 - RNA, 22 nt, Human
aagcagccagccaucaugcccg

SEQ ID NO: 155879 - RNA, 22 nt, Human
cuuggggcugucacucuggcau

SEQ ID NO: 155880 - RNA, 21 nt, Human
cacucaggguaugugccaggc

SEQ ID NO: 155881 - RNA, 22 nt, Human
gccaggccugcaagugcuggug

SEQ ID NO: 155882 - RNA, 22 nt, Human
caggccaggcugcauuugcccc

SEQ ID NO: 155883 - RNA, 22 nt, Human
uggacagguuugggugccuguu

SEQ ID NO: 155884 - RNA, 22 nt, Human
gcagagcucuguucuuaucucc

SEQ ID NO: 155885 - RNA, 22 nt, Human
uccuucaggccucauucucaua

SEQ ID NO: 155886 - RNA, 22 nt, Human
cuggagccuagguugaccuggg

SEQ ID NO: 155887 - RNA, 22 nt, Human
agcuggagaucaugcugauacu

SEQ ID NO: 155888 - RNA, 22 nt, Human
gcuuuccuggcccugucccugc

SEQ ID NO: 155889 - RNA, 22 nt, Human
ggcacugagaggcucuuccuaa

SEQ ID NO: 155890 - RNA, 22 nt, Human
ugucauguguucuuaaauacau

SEQ ID NO: 155891 - RNA, 22 nt, Human
ucuggcucugacacuacuguua

SEQ ID NO: 155892 - RNA, 22 nt, Human
uugcauaaaagaguauaucuua

SEQ ID NO: 155893 - RNA, 22 nt, Human
gcccauggcagaacugugagca

SEQ ID NO: 155894 - RNA, 22 nt, Human
uaagacaugguugaucuagugu

SEQ ID NO: 155895 - RNA, 22 nt, Human
uaugaguacaaggacucugucu

SEQ ID NO: 155896 - RNA, 22 nt, Human
ccagggccaagagaccucgagg

SEQ ID NO: 155897 - RNA, 22 nt, Human
cugagcuuccaguuccuccagg

SEQ ID NO: 155898 - RNA, 22 nt, Human
ccugggaggcggagguugcagu

SEQ ID NO: 155899 - RNA, 20 nt, Human
aucagcaacugccacucagu

SEQ ID NO: 155900 - RNA, 22 nt, Human
cgcugggcgccgaccugcuggc

SEQ ID NO: 155901 - RNA, 22 nt, Human
ugaagaugucagcagggguggu

SEQ ID NO: 155902 - RNA, 22 nt, Human
gcuggagcuugagaggacaggg

SEQ ID NO: 155903 - RNA, 22 nt, Human
agagcagaggcauggccguggg

SEQ ID NO: 155904 - RNA, 22 nt, Human
ggagccuggccuggcucugugu

SEQ ID NO: 155905 - RNA, 18 nt, Human
gccugcaggcacgggggu

SEQ ID NO: 155906 - RNA, 22 nt, Human
agcugagcauuugauccaccuc

SEQ ID NO: 155907 - RNA, 22 nt, Human
aggcucugugacaaucaagcug

SEQ ID NO: 155908 - RNA, 22 nt, Human
uugaagcagagaaauacuugaa

SEQ ID NO: 155909 - RNA, 22 nt, Human
ggcagcaugagccuggugaauu

SEQ ID NO: 155910 - RNA, 22 nt, Human
gcucugucuucagcacacagua

SEQ ID NO: 155911 - RNA, 20 nt, Human
uccugggguaagccaugguc

SEQ ID NO: 155912 - RNA, 22 nt, Human
aggcucugcagugcuggaggac

SEQ ID NO: 155913 - RNA, 21 nt, Human
uauuucuuugacucucucccu

SEQ ID NO: 155914 - RNA, 23 nt, Human
ucagaaugcacugaauuuacccu

SEQ ID NO: 155915 - RNA, 22 nt, Human
ucugagaguccaucuccaagcc

SEQ ID NO: 155916 - RNA, 23 nt, Human
ccaggcaguagcuauugaaguga

SEQ ID NO: 155917 - RNA, 22 nt, Human
ucugagggcuugaggggaagua

SEQ ID NO: 155918 - RNA, 22 nt, Human
gcugucuucacuuccugguuuc

SEQ ID NO: 155919 - RNA, 22 nt, Human
cugccugugccaaugcuccuuu

SEQ ID NO: 155920 - RNA, 22 nt, Human
gcagugccuugcuucucugucu

SEQ ID NO: 155921 - RNA, 22 nt, Human
aaggcacuguacuaguuaguua

SEQ ID NO: 155922 - RNA, 22 nt, Human
cacagaguggaggcuuggccug

SEQ ID NO: 155923 - RNA, 22 nt, Human
ccagccaggcuggcuguggagg

SEQ ID NO: 155924 - RNA, 22 nt, Human
gcccaggccggagagcagugcu

SEQ ID NO: 155925 - RNA, 23 nt, Human
cauggcagcaagagcucauggcc

SEQ ID NO: 155926 - RNA, 22 nt, Human
ucugccugccagucugguccuc

SEQ ID NO: 155927 - RNA, 22 nt, Human
gaaccaaguaggauacaaggag

SEQ ID NO: 155928 - RNA, 22 nt, Human
guuugcauguguacuuaauugg

SEQ ID NO: 155929 - RNA, 22 nt, Human
ggcagcugagcauggcuaccuu

SEQ ID NO: 155930 - RNA, 22 nt, Human
cacguuuuaugacagaagaagc

SEQ ID NO: 155931 - RNA, 22 nt, Human
uuuauuauucucuggagaaugu

SEQ ID NO: 155932 - RNA, 22 nt, Human
gaccugccugagcugccucugc

SEQ ID NO: 155933 - RNA, 22 nt, Human
ggcccacacugacagcugagcu

SEQ ID NO: 155934 - RNA, 22 nt, Human
aaaugcacaggagaaccaauuc

SEQ ID NO: 155935 - RNA, 22 nt, Human
cccaggucuaugccagcucuga

SEQ ID NO: 155936 - RNA, 22 nt, Human
cacagaaguuucauagucucga

SEQ ID NO: 155937 - RNA, 22 nt, Human
acagggccagccugggaccugg

SEQ ID NO: 155938 - RNA, 22 nt, Human
gggcugugggacccggcacuuu

SEQ ID NO: 155939 - RNA, 22 nt, Human
acucacuuuccauucaagcacc

SEQ ID NO: 155940 - RNA, 22 nt, Human
ugcugucccccgugucugggcu

SEQ ID NO: 155941 - RNA, 22 nt, Human
uccucagggggccaacccagcc

SEQ ID NO: 155942 - RNA, 22 nt, Human
agcagggcagugaucagaaagg

SEQ ID NO: 155943 - RNA, 22 nt, Human
agcccuggcccggcugugcuuu

SEQ ID NO: 155944 - RNA, 22 nt, Human
aaucaguuguucacucugaaaa

SEQ ID NO: 155945 - RNA, 22 nt, Human
cagggcagggccacacccccug

SEQ ID NO: 155946 - RNA, 22 nt, Human
cuguccugauggugccacuggu

SEQ ID NO: 155947 - RNA, 22 nt, Human
guaggcagauaggagugcagcc

SEQ ID NO: 155948 - RNA, 23 nt, Human
aagaauaaaugacauuaaaggug

SEQ ID NO: 155949 - RNA, 22 nt, Human
uccagggaagagcagaggcuac

SEQ ID NO: 155950 - RNA, 22 nt, Human
guacauuuugagguuaaaacaa

SEQ ID NO: 155951 - RNA, 22 nt, Human
ugcugccuccaacuccugggcu

SEQ ID NO: 155952 - RNA, 22 nt, Human
aguaaaaucuuaagcacagugg

SEQ ID NO: 155953 - RNA, 22 nt, Human
ucuggcucccagccugcucuca

SEQ ID NO: 155954 - RNA, 22 nt, Human
gccggggcuggggagagacaug

SEQ ID NO: 155955 - RNA, 22 nt, Human
cagcugaauucuucagacucca

SEQ ID NO: 155956 - RNA, 22 nt, Human
aggccucacauugggcuucaag

SEQ ID NO: 155957 - RNA, 22 nt, Human
caagacaagaucuaagcaugcu

SEQ ID NO: 155958 - RNA, 20 nt, Human
cucucccagcacagcuuccu

SEQ ID NO: 155959 - RNA, 22 nt, Human
ggagcuguaacgagccauugcu

SEQ ID NO: 155960 - RNA, 22 nt, Human
gaagaacacuucaugauucauu

SEQ ID NO: 155961 - RNA, 19 nt, Human
agggagaauuccaagagga

SEQ ID NO: 155962 - RNA, 22 nt, Human
ucagccagugccuugaucuugc

SEQ ID NO: 155963 - RNA, 23 nt, Human
auaauaacgucugucuugucucu

SEQ ID NO: 155964 - RNA, 22 nt, Human
ucugagcuggagcccaucaccu

SEQ ID NO: 155965 - RNA, 22 nt, Human
gaguuauuaauggcugaguuug

SEQ ID NO: 155966 - RNA, 22 nt, Human
ccuggcagcgugccgagcugcg

SEQ ID NO: 155967 - RNA, 19 nt, Human
agcagccauagacaauaug

SEQ ID NO: 155968 - RNA, 22 nt, Human
cagcacugcugcuguacacaca

SEQ ID NO: 155969 - RNA, 22 nt, Human
acucucagaggguggcagcaau

SEQ ID NO: 155970 - RNA, 22 nt, Human
ccaggccuggaccaugccaggg

SEQ ID NO: 155971 - RNA, 22 nt, Human
caugggcucuucuggacugcac

SEQ ID NO: 155972 - RNA, 20 nt, Human
ucugcccaccccggcuccca

SEQ ID NO: 155973 - RNA, 20 nt, Human
ugaaaggugggaauuguggg

SEQ ID NO: 155974 - RNA, 22 nt, Human
uccagcagaaaagagguaggga

SEQ ID NO: 155975 - RNA, 21 nt, Human
cuguuucuugugaagugacac

SEQ ID NO: 155976 - RNA, 22 nt, Human
aucaguuuaaaugggcuguugg

SEQ ID NO: 155977 - RNA, 22 nt, Human
auugacaagcaguaugucuuag

SEQ ID NO: 155978 - RNA, 22 nt, Human
cccugcugucaggugcugggag

SEQ ID NO: 155979 - RNA, 22 nt, Human
cuuauguaugcuacuuuguggu

SEQ ID NO: 155980 - RNA, 22 nt, Human
gcauuccuacaggcugcuauga

SEQ ID NO: 155981 - RNA, 21 nt, Human
ugggggagaauugguugcuuu

SEQ ID NO: 155982 - RNA, 22 nt, Human
acagguggagugguuagcaggc

SEQ ID NO: 155983 - RNA, 19 nt, Human
cugggagguguucagagaa

SEQ ID NO: 155984 - RNA, 22 nt, Human
gcugucagugaggugagacaug

SEQ ID NO: 155985 - RNA, 22 nt, Human
cacaggagguuaggaagugguc

SEQ ID NO: 155986 - RNA, 22 nt, Human
uuuguaaauagcaguacucaug

SEQ ID NO: 155987 - RNA, 22 nt, Human
gccuccugagaagccacaggcu

SEQ ID NO: 155988 - RNA, 22 nt, Human
auagucuuagucuauaguuuug

SEQ ID NO: 155989 - RNA, 22 nt, Human
gggcugggauggcuugaagauu

SEQ ID NO: 155990 - RNA, 22 nt, Human
cccugccuucuuggccuuuaaa

SEQ ID NO: 155991 - RNA, 22 nt, Human
cagucccagaagagccugggag

SEQ ID NO: 155992 - RNA, 22 nt, Human
acacaggggcucggcugggugc

SEQ ID NO: 155993 - RNA, 22 nt, Human
gaaugugucacccugucccaug

SEQ ID NO: 155994 - RNA, 22 nt, Human
gaagagcuuaguuguccuagaa

SEQ ID NO: 155995 - RNA, 22 nt, Human
ugcagcuguuacggacccuguc

SEQ ID NO: 155996 - RNA, 22 nt, Human
guggccucaugucuauaaagag

SEQ ID NO: 155997 - RNA, 22 nt, Human
gcucuggcuacuguggcuaccg

SEQ ID NO: 155998 - RNA, 22 nt, Human
uuccucucucuugccagaaugu

SEQ ID NO: 155999 - RNA, 22 nt, Human
gcugccugcucggcuccuggga

SEQ ID NO: 156000 - RNA, 23 nt, Human
uccuucagagccucccuccaagc

SEQ ID NO: 156001 - RNA, 22 nt, Human
uuugcauuucucguaaggaaac

SEQ ID NO: 156002 - RNA, 22 nt, Human
acauacauaugacaacuuuccu

SEQ ID NO: 156003 - RNA, 22 nt, Human
cuggaggcugaguugggucucc

SEQ ID NO: 156004 - RNA, 22 nt, Human
gggcugacucugcacugagcca

SEQ ID NO: 156005 - RNA, 22 nt, Human
uggcucagaaggcugccuucac

SEQ ID NO: 156006 - RNA, 22 nt, Human
ugucacuucaggaaugcaggga

SEQ ID NO: 156007 - RNA, 19 nt, Human
gagcagcugcacccauuga

SEQ ID NO: 156008 - RNA, 22 nt, Human
uggcuccuaucaaggagugggu

SEQ ID NO: 156009 - RNA, 22 nt, Human
caggagcucuuaaggaugugau

SEQ ID NO: 156010 - RNA, 22 nt, Human
aaaauguguuuaugcauuucgu

SEQ ID NO: 156011 - RNA, 22 nt, Human
uuugcauuauauuuauagaaga

SEQ ID NO: 156012 - RNA, 22 nt, Human
ccagcagcagcguccaaggaga

SEQ ID NO: 156013 - RNA, 22 nt, Human
gcucuggagauggagccuugag

SEQ ID NO: 156014 - RNA, 22 nt, Human
gcucccaggaugaggagccagg

SEQ ID NO: 156015 - RNA, 22 nt, Human
agcucagggcgaucugucucgg

SEQ ID NO: 156016 - RNA, 22 nt, Human
uuaaaaccaucagcuguaagau

SEQ ID NO: 156017 - RNA, 22 nt, Human
acccagcucuuugauggucuug

SEQ ID NO: 156018 - RNA, 22 nt, Human
ugcucuguaacaaauugacaug

SEQ ID NO: 156019 - RNA, 22 nt, Human
uggcccugacagguccugggca

SEQ ID NO: 156020 - RNA, 22 nt, Human
cagagccaggguugcaccccug

SEQ ID NO: 156021 - RNA, 22 nt, Human
gggcauggugaugugcaccugu

SEQ ID NO: 156022 - RNA, 22 nt, Human
caggccugugaguugaggcccc

SEQ ID NO: 156023 - RNA, 22 nt, Human
uugucuguccaggcaccccaag

SEQ ID NO: 156024 - RNA, 22 nt, Human
uauuaucauugguaauaugguc

SEQ ID NO: 156025 - RNA, 22 nt, Human
ugccugggccucugaggaaggc

SEQ ID NO: 156026 - RNA, 22 nt, Human
ugaagacacauacaagggaaug

SEQ ID NO: 156027 - RNA, 21 nt, Human
gccaccccuggcacaggugcu

SEQ ID NO: 156028 - RNA, 22 nt, Human
cagggagaucuuggcuccuggu

SEQ ID NO: 156029 - RNA, 22 nt, Human
cagggcuggauccuccagacuc

SEQ ID NO: 156030 - RNA, 22 nt, Human
cugaaauuccauuucagccaca

SEQ ID NO: 156031 - RNA, 22 nt, Human
ccagcucccugaagccuggucu

SEQ ID NO: 156032 - RNA, 22 nt, Human
gagggcugccacguugggcgag

SEQ ID NO: 156033 - RNA, 22 nt, Human
ggagggagucagcugauuagaa

SEQ ID NO: 156034 - RNA, 22 nt, Human
uguaugcuuuccaaaaaugcug

SEQ ID NO: 156035 - RNA, 22 nt, Human
ccucugagagaaggccuucagc

SEQ ID NO: 156036 - RNA, 22 nt, Human
agcagaagaaagccacaugacu

SEQ ID NO: 156037 - RNA, 23 nt, Human
agggcccaagccuggacagcagg

SEQ ID NO: 156038 - RNA, 22 nt, Human
uggagcagggcaucacugugcg

SEQ ID NO: 156039 - RNA, 22 nt, Human
cggggacacacuggcagcuccu

SEQ ID NO: 156040 - RNA, 22 nt, Human
gauuucaaaaguagauccauca

SEQ ID NO: 156041 - RNA, 21 nt, Human
aacauuucaggauccaaauug

SEQ ID NO: 156042 - RNA, 22 nt, Human
gccuggagcccaguguggggcu

SEQ ID NO: 156043 - RNA, 22 nt, Human
cuggaagguucuuugugugccu

SEQ ID NO: 156044 - RNA, 22 nt, Human
uccuggaggcaaaugagcacau

SEQ ID NO: 156045 - RNA, 22 nt, Human
agcagagcgccugcucagaggg

SEQ ID NO: 156046 - RNA, 22 nt, Human
ugggggagccuucacaguagcu

SEQ ID NO: 156047 - RNA, 22 nt, Human
guacauuucauuuaaaugaugu

SEQ ID NO: 156048 - RNA, 22 nt, Human
ccugucugaggaggugcucuuu

SEQ ID NO: 156049 - RNA, 22 nt, Human
acuuccugcaaucguccacucc

SEQ ID NO: 156050 - RNA, 22 nt, Human
acacccagagcgccagugccga

SEQ ID NO: 156051 - RNA, 22 nt, Human
aagggcaggaaaagauggaugu

SEQ ID NO: 156052 - RNA, 22 nt, Human
ggaugcaggggcagcagagccu

SEQ ID NO: 156053 - RNA, 22 nt, Human
agagccugcagcugugaagaaa

SEQ ID NO: 156054 - RNA, 22 nt, Human
uggcagcacuagguacugagcu

SEQ ID NO: 156055 - RNA, 22 nt, Human
uucuggagcuaaaguccacucu

SEQ ID NO: 156056 - RNA, 22 nt, Human
cacagggcaccaguuggccauc

SEQ ID NO: 156057 - RNA, 22 nt, Human
aaaugcacagaaaggaugugga

SEQ ID NO: 156058 - RNA, 22 nt, Human
gaggaaugucagcacaggccuc

SEQ ID NO: 156059 - RNA, 22 nt, Human
gggcuccagcccgggaccaggu

SEQ ID NO: 156060 - RNA, 22 nt, Human
uguacauuuagagcucaauaga

SEQ ID NO: 156061 - RNA, 22 nt, Human
agaauuguaagcaauuugauua

SEQ ID NO: 156062 - RNA, 18 nt, Human
cuuuaugugcagagcuuu

SEQ ID NO: 156063 - RNA, 18 nt, Human
aaagaaggauuggagagc

SEQ ID NO: 156064 - RNA, 22 nt, Human
ucugccugcggcugcagguggc

SEQ ID NO: 156065 - RNA, 22 nt, Human
gggcugcacguauucugcucac

SEQ ID NO: 156066 - RNA, 23 nt, Human
ccuucagaagaaguaacaggggc

SEQ ID NO: 156067 - RNA, 22 nt, Human
gcuggccugggcagaggcuaug

SEQ ID NO: 156068 - RNA, 22 nt, Human
ugggauggagccugaguauagu

SEQ ID NO: 156069 - RNA, 22 nt, Human
gcugucacauuuggagcacugg

SEQ ID NO: 156070 - RNA, 22 nt, Human
ccagcccugucaccaacuggag

SEQ ID NO: 156071 - RNA, 22 nt, Human
cucugagcugaaacaugagcau

SEQ ID NO: 156072 - RNA, 22 nt, Human
aagugguaggaagagagcacug

SEQ ID NO: 156073 - RNA, 22 nt, Human
gugucacaagagcccaggaaac

SEQ ID NO: 156074 - RNA, 22 nt, Human
gccuggaguggacuuggccccu

SEQ ID NO: 156075 - RNA, 23 nt, Human
ugcucccaggugacgcugcuguu

SEQ ID NO: 156076 - RNA, 20 nt, Human
ucauccaggacaggaguggc

SEQ ID NO: 156077 - RNA, 19 nt, Human
ggcucagggcgcugccgcc

SEQ ID NO: 156078 - RNA, 22 nt, Human
agggcugguauguccaugaaag

SEQ ID NO: 156079 - RNA, 22 nt, Human
ggcaggaggugaguggcgggug

SEQ ID NO: 156080 - RNA, 18 nt, Human
aggagccuuugcacugga

SEQ ID NO: 156081 - RNA, 22 nt, Human
cucaggaggugguagaggcccu

SEQ ID NO: 156082 - RNA, 22 nt, Human
ucagggacugcagagggaagcu

SEQ ID NO: 156083 - RNA, 20 nt, Human
aggagccauugacugcagca

SEQ ID NO: 156084 - RNA, 22 nt, Human
acagaauuaaaguguuugugga

SEQ ID NO: 156085 - RNA, 22 nt, Human
aggggagaguuaaugugaaugu

SEQ ID NO: 156086 - RNA, 22 nt, Human
ugcugccagccaggccauggag

SEQ ID NO: 156087 - RNA, 22 nt, Human
gcucccacaaccuucuugcucc

SEQ ID NO: 156088 - RNA, 22 nt, Human
aggucacacaacugucagaggc

SEQ ID NO: 156089 - RNA, 22 nt, Human
ucugagcauugaauuuucuucc

SEQ ID NO: 156090 - RNA, 22 nt, Human
ggccugagucccaccuggcugu

SEQ ID NO: 156091 - RNA, 20 nt, Human
caggccucugggggcccugg

SEQ ID NO: 156092 - RNA, 22 nt, Human
ccagaggugccacagaaagagc

SEQ ID NO: 156093 - RNA, 22 nt, Human
uggagcugauacagcuggcuuu

SEQ ID NO: 156094 - RNA, 21 nt, Human
agcagccauggaugguaugua

SEQ ID NO: 156095 - RNA, 22 nt, Human
uuucauuacguguuugacuugu

SEQ ID NO: 156096 - RNA, 22 nt, Human
acugugcacaauucuaaguccu

SEQ ID NO: 156097 - RNA, 21 nt, Human
ugcagcugacacugguaugcc

SEQ ID NO: 156098 - RNA, 23 nt, Human
agcccagcagagaaccuaggucc

SEQ ID NO: 156099 - RNA, 22 nt, Human
ccugaggcuuaaucugucccaa

SEQ ID NO: 156100 - RNA, 23 nt, Human
acacaauagaguacuauucagcc

SEQ ID NO: 156101 - RNA, 22 nt, Human
ugggcagaggcucugaagucca

SEQ ID NO: 156102 - RNA, 22 nt, Human
caguggccaugguggcaggggu

SEQ ID NO: 156103 - RNA, 22 nt, Human
gcagggcugggugggagacaga

SEQ ID NO: 156104 - RNA, 22 nt, Human
agccacagcuccuugguggaga

SEQ ID NO: 156105 - RNA, 22 nt, Human
aacuuuauuguuaggggcuaaa

SEQ ID NO: 156106 - RNA, 22 nt, Human
guuuuuaucuaauagcaguuau

SEQ ID NO: 156107 - RNA, 22 nt, Human
guccucugcccaggucaagguu

SEQ ID NO: 156108 - RNA, 22 nt, Human
uguguccuucugggagucccag

SEQ ID NO: 156109 - RNA, 22 nt, Human
gcucccacugcagcccugagcc

SEQ ID NO: 156110 - RNA, 22 nt, Human
caguauuuauggcuugaguauu

SEQ ID NO: 156111 - RNA, 22 nt, Human
cugaagcaaaugaaacagcucu

SEQ ID NO: 156112 - RNA, 22 nt, Human
agccucucuuucugguggcuaa

SEQ ID NO: 156113 - RNA, 22 nt, Human
gccugggagagggauagugcag

SEQ ID NO: 156114 - RNA, 22 nt, Human
gcuggcucuucaguggagauag

SEQ ID NO: 156115 - RNA, 22 nt, Human
gccuggaggggacagucucugg

SEQ ID NO: 156116 - RNA, 22 nt, Human
cagugggaagggcagaggcuuu

SEQ ID NO: 156117 - RNA, 22 nt, Human
cuacauuucccagcugccuucc

SEQ ID NO: 156118 - RNA, 22 nt, Human
acacugaauguuuaagaacuug

SEQ ID NO: 156119 - RNA, 22 nt, Human
acccuuucuuacucacacgcuc

SEQ ID NO: 156120 - RNA, 22 nt, Human
uagaaaagauaacauucugugc

SEQ ID NO: 156121 - RNA, 22 nt, Human
uucauucaucucuaaaaugccu

SEQ ID NO: 156122 - RNA, 22 nt, Human
gugcagcugugugagagcucca

SEQ ID NO: 156123 - RNA, 22 nt, Human
uagccgcuuaauuauuugguga

SEQ ID NO: 156124 - RNA, 22 nt, Human
uguauagaguuggaagaugacu

SEQ ID NO: 156125 - RNA, 22 nt, Human
uugcauguguaauuuuucuaaa

SEQ ID NO: 156126 - RNA, 22 nt, Human
agcugggaugauaaccucaguc

SEQ ID NO: 156127 - RNA, 22 nt, Human
uuauacauguguuuugagauga

SEQ ID NO: 156128 - RNA, 22 nt, Human
aggcugccaaagcuucugucuc

SEQ ID NO: 156129 - RNA, 22 nt, Human
aggaaaugcugaugcuccugga

SEQ ID NO: 156130 - RNA, 22 nt, Human
ucagaggugguaaaggacagca

SEQ ID NO: 156131 - RNA, 22 nt, Human
aggagcuggguuccuuuggugg

SEQ ID NO: 156132 - RNA, 22 nt, Human
gugcuuuccauccucccugcug

SEQ ID NO: 156133 - RNA, 22 nt, Human
caugcacaaagguaagaugcgu

SEQ ID NO: 156134 - RNA, 22 nt, Human
uuccuauuuccaugaaacacaa

SEQ ID NO: 156135 - RNA, 22 nt, Human
guguacaugagaaaucaacuuu

SEQ ID NO: 156136 - RNA, 22 nt, Human
uggacagcgaaagugccuggga

SEQ ID NO: 156137 - RNA, 22 nt, Human
ugcugcauuuaucuucucaaac

SEQ ID NO: 156138 - RNA, 22 nt, Human
auuguacuuuuauuacauguag

SEQ ID NO: 156139 - RNA, 22 nt, Human
agggccagcccauaaugccaaa

SEQ ID NO: 156140 - RNA, 23 nt, Human
agcacagacuagaaaggucuuuc

SEQ ID NO: 156141 - RNA, 22 nt, Human
cugccucuauaggaguccacca

SEQ ID NO: 156142 - RNA, 22 nt, Human
gccagagcaugcacugccugca

SEQ ID NO: 156143 - RNA, 22 nt, Human
uauuucugucagccagauaugg

SEQ ID NO: 156144 - RNA, 22 nt, Human
guuugaaaaaagcaguauguaa

SEQ ID NO: 156145 - RNA, 22 nt, Human
aaaucuguaagcaauugcucag

SEQ ID NO: 156146 - RNA, 22 nt, Human
aaggccugggaggccucucuuc

SEQ ID NO: 156147 - RNA, 22 nt, Human
ugacagaaagaauaugucaauc

SEQ ID NO: 156148 - RNA, 22 nt, Human
ggcugcugguggaaugguaggc

SEQ ID NO: 156149 - RNA, 22 nt, Human
cagagcagagugauuguucugg

SEQ ID NO: 156150 - RNA, 22 nt, Human
gcugugugaaaacugggccugg

SEQ ID NO: 156151 - RNA, 22 nt, Human
ccuggcugugcauugccggccc

SEQ ID NO: 156152 - RNA, 22 nt, Human
cauucauuuacuuucaacagcu

SEQ ID NO: 156153 - RNA, 22 nt, Human
aauguguacuuuuucaugcuca

SEQ ID NO: 156154 - RNA, 22 nt, Human
ucaaugaugcugaagguagcgu

SEQ ID NO: 156155 - RNA, 22 nt, Human
ggccccaggaccuccacggucc

SEQ ID NO: 156156 - RNA, 22 nt, Human
accugagccuagggagguugag

SEQ ID NO: 156157 - RNA, 22 nt, Human
uccuggaggggacagcaugggc

SEQ ID NO: 156158 - RNA, 22 nt, Human
cuggcucauuuuagcaucaggu

SEQ ID NO: 156159 - RNA, 22 nt, Human
ucucugucugagccuggcagac

SEQ ID NO: 156160 - RNA, 22 nt, Human
cucccaagggguaagggagcug

SEQ ID NO: 156161 - RNA, 22 nt, Human
caggccacaaguuggguucaag

SEQ ID NO: 156162 - RNA, 22 nt, Human
cagcaauaguguguuuguuuca

SEQ ID NO: 156163 - RNA, 22 nt, Human
ugcccaggguggagugcagcgg

SEQ ID NO: 156164 - RNA, 22 nt, Human
aaggcacuacgcugcuggggcg

SEQ ID NO: 156165 - RNA, 22 nt, Human
gucacacuagggccaaguggag

SEQ ID NO: 156166 - RNA, 22 nt, Human
uuccgcuggggccgccuggcgg

SEQ ID NO: 156167 - RNA, 22 nt, Human
uuaauaaacaggugcagcugaa

SEQ ID NO: 156168 - RNA, 23 nt, Human
cuggggcuuucaaaucugggcag

SEQ ID NO: 156169 - RNA, 22 nt, Human
gaugcacaugugaguauagaag

SEQ ID NO: 156170 - RNA, 22 nt, Human
uaacagaaauaguaggugaggg

SEQ ID NO: 156171 - RNA, 22 nt, Human
ggcuucuccccuuugagucuuc

SEQ ID NO: 156172 - RNA, 22 nt, Human
gcucccagcuggagccucaaca

SEQ ID NO: 156173 - RNA, 22 nt, Human
ccugggcuugcaucugugcugg

SEQ ID NO: 156174 - RNA, 22 nt, Human
ugauuuccuagcugacaugaaa

SEQ ID NO: 156175 - RNA, 22 nt, Human
ucagaacagaagcuggcuauaa

SEQ ID NO: 156176 - RNA, 22 nt, Human
uugaaaggaauacagaggccua

SEQ ID NO: 156177 - RNA, 22 nt, Human
ucuccaagcagggcugcaaggc

SEQ ID NO: 156178 - RNA, 19 nt, Human
ggcuccuguggcugcagcc

SEQ ID NO: 156179 - RNA, 22 nt, Human
gcagggcucauucuaguacaau

SEQ ID NO: 156180 - RNA, 22 nt, Human
guacauuggcaacucucuuaga

SEQ ID NO: 156181 - RNA, 22 nt, Human
agcuccuccugugccaggccag

SEQ ID NO: 156182 - RNA, 22 nt, Human
caaaugaagaaccuucucaccu

SEQ ID NO: 156183 - RNA, 21 nt, Human
acaggcucuggggaugcuggg

SEQ ID NO: 156184 - RNA, 22 nt, Human
caguacuuguccucagguguua

SEQ ID NO: 156185 - RNA, 22 nt, Human
gucauugcaguggcaaaucaca

SEQ ID NO: 156186 - RNA, 17 nt, Human
ucuggccuuccugaacu

SEQ ID NO: 156187 - RNA, 22 nt, Human
ggggaggcugaugugggcaaag

SEQ ID NO: 156188 - RNA, 22 nt, Human
gagcugccugaacaagcagcag

SEQ ID NO: 156189 - RNA, 22 nt, Human
caugagauaauuuuucuccagu

SEQ ID NO: 156190 - RNA, 22 nt, Human
uagaaacauguucuguucuguu

SEQ ID NO: 156191 - RNA, 22 nt, Human
ugauuucccucaucauaacaga

SEQ ID NO: 156192 - RNA, 22 nt, Human
gagcagcuuaugucaagccaga

SEQ ID NO: 156193 - RNA, 22 nt, Human
ucagcuggagaugagaaccgaa

SEQ ID NO: 156194 - RNA, 20 nt, Human
agugcaagaaagcacagcug

SEQ ID NO: 156195 - RNA, 22 nt, Human
guggccugucagaagccguggg

SEQ ID NO: 156196 - RNA, 22 nt, Human
uagagugguuaacaguuuagaa

SEQ ID NO: 156197 - RNA, 22 nt, Human
acauuucuggaguuucucaaca

SEQ ID NO: 156198 - RNA, 22 nt, Human
ugggcagacgcuguuggaaggc

SEQ ID NO: 156199 - RNA, 22 nt, Human
uggcccugccacucacugcuga

SEQ ID NO: 156200 - RNA, 22 nt, Human
aauauguucaaaauagaucacu

SEQ ID NO: 156201 - RNA, 22 nt, Human
agcagccacacgccuccuucuc

SEQ ID NO: 156202 - RNA, 22 nt, Human
aaagaucagucugaagcaacau

SEQ ID NO: 156203 - RNA, 22 nt, Human
cagagcuguccaaacccugaca

SEQ ID NO: 156204 - RNA, 22 nt, Human
aaucgguugaacccaggaagug

SEQ ID NO: 156205 - RNA, 22 nt, Human
agugaguggguuacagauggga

SEQ ID NO: 156206 - RNA, 22 nt, Human
gccuaauaacuagcuguguaac

SEQ ID NO: 156207 - RNA, 22 nt, Human
ucagggcagguuaacuugggug

SEQ ID NO: 156208 - RNA, 22 nt, Human
aucaaaguucguaacugauaac

SEQ ID NO: 156209 - RNA, 22 nt, Human
aggccugaaguguggagugggg

SEQ ID NO: 156210 - RNA, 22 nt, Human
cagcccuuuccuucucagcuuu

SEQ ID NO: 156211 - RNA, 22 nt, Human
accacugggcgggcagccugcu

SEQ ID NO: 156212 - RNA, 17 nt, Human
aauagcugcucagagag

SEQ ID NO: 156213 - RNA, 22 nt, Human
aaagcccauguggaaguacagg

SEQ ID NO: 156214 - RNA, 22 nt, Human
gagaggcugaaaucacaggagc

SEQ ID NO: 156215 - RNA, 22 nt, Human
cagacagcugcuuucuugcugu

SEQ ID NO: 156216 - RNA, 22 nt, Human
augcacaagaggcuagaaaaga

SEQ ID NO: 156217 - RNA, 22 nt, Human
ugugggcaggcccgggucugag

SEQ ID NO: 156218 - RNA, 22 nt, Human
cuccuuccugguuagcaccuua

SEQ ID NO: 156219 - RNA, 22 nt, Human
uuuuccuaguaggccuauuaga

SEQ ID NO: 156220 - RNA, 22 nt, Human
ggacacagcugcagccacaccc

SEQ ID NO: 156221 - RNA, 22 nt, Human
uggcucucaggccugcugcguu

SEQ ID NO: 156222 - RNA, 22 nt, Human
aaaucaguucacguucugaggu

SEQ ID NO: 156223 - RNA, 22 nt, Human
uaaggcaccuguccaggcuggg

SEQ ID NO: 156224 - RNA, 22 nt, Human
aaggcacuuaacgugggaggau

SEQ ID NO: 156225 - RNA, 22 nt, Human
ggagucccagcaaagccuuccc

SEQ ID NO: 156226 - RNA, 22 nt, Human
uuuauuugucuugccauuuagu

SEQ ID NO: 156227 - RNA, 22 nt, Human
agucuccuuggccucaaugccu

SEQ ID NO: 156228 - RNA, 21 nt, Human
ugaaaucugaugggacaaaug

SEQ ID NO: 156229 - RNA, 22 nt, Human
gagccuggagcuggaacgaagc

SEQ ID NO: 156230 - RNA, 23 nt, Human
uggcaccaggcauucuaggggua

SEQ ID NO: 156231 - RNA, 22 nt, Human
acagaccaaaaaaggauauugg

SEQ ID NO: 156232 - RNA, 17 nt, Human
uggacccuugggccucc

SEQ ID NO: 156233 - RNA, 22 nt, Human
gcuggcaggguucucacugaaa

SEQ ID NO: 156234 - RNA, 22 nt, Human
ggccugaggcaauagucagaca

SEQ ID NO: 156235 - RNA, 22 nt, Human
cugaaggaagcagaagcgaggu

SEQ ID NO: 156236 - RNA, 22 nt, Human
ggcuggcauccagggaaaucca

SEQ ID NO: 156237 - RNA, 22 nt, Human
cuuuccuagauggccaucuuuc

SEQ ID NO: 156238 - RNA, 22 nt, Human
aaguuacaggagaaagagauca

SEQ ID NO: 156239 - RNA, 22 nt, Human
aaagaacaaauuagcuguuuua

SEQ ID NO: 156240 - RNA, 22 nt, Human
ggagcugcuuugaucugaagaa

SEQ ID NO: 156241 - RNA, 22 nt, Human
cccaggccagaacuugguugcu

SEQ ID NO: 156242 - RNA, 22 nt, Human
uagaucugauacaauucaucug

SEQ ID NO: 156243 - RNA, 22 nt, Human
ugaggcaggagguugagaacug

SEQ ID NO: 156244 - RNA, 22 nt, Human
ggccucugccccagccacaccu

SEQ ID NO: 156245 - RNA, 22 nt, Human
acuggcagagguuggacaccau

SEQ ID NO: 156246 - RNA, 22 nt, Human
aagggcagaaagggacgcuuug

SEQ ID NO: 156247 - RNA, 22 nt, Human
uucacaggaggguggaugcaug

SEQ ID NO: 156248 - RNA, 22 nt, Human
ugggcugcccugaugguccuca

SEQ ID NO: 156249 - RNA, 22 nt, Human
cuccaggccauggcugcggagg

SEQ ID NO: 156250 - RNA, 22 nt, Human
ugaagcccugugucagcuucca

SEQ ID NO: 156251 - RNA, 22 nt, Human
gagaggaguaggcugauggugc

SEQ ID NO: 156252 - RNA, 21 nt, Human
ugguggagugugcugagcaug

SEQ ID NO: 156253 - RNA, 22 nt, Human
cucuggagugcagccugguggc

SEQ ID NO: 156254 - RNA, 22 nt, Human
gggcccuggacguggcggcaga

SEQ ID NO: 156255 - RNA, 22 nt, Human
ggccucagaccggagcuggcca

SEQ ID NO: 156256 - RNA, 22 nt, Human
ucaguuuuguauguuguaaguc

SEQ ID NO: 156257 - RNA, 22 nt, Human
gcuuuguguagaaggaggaugg

SEQ ID NO: 156258 - RNA, 22 nt, Human
aggcuucccagcugagcucagc

SEQ ID NO: 156259 - RNA, 22 nt, Human
cgcuggggcuuuuugcuugaga

SEQ ID NO: 156260 - RNA, 22 nt, Human
augggaugcauggcuguggcca

SEQ ID NO: 156261 - RNA, 22 nt, Human
gugcaugugucuuuauaguaga

SEQ ID NO: 156262 - RNA, 22 nt, Human
agcugguguccuccuggagcug

SEQ ID NO: 156263 - RNA, 22 nt, Human
agggacacugaugagaaauucu

SEQ ID NO: 156264 - RNA, 22 nt, Human
ccugccuggcugucagcagagc

SEQ ID NO: 156265 - RNA, 22 nt, Human
gcccugagggguggugucugua

SEQ ID NO: 156266 - RNA, 22 nt, Human
gaguguuccagaaacuggcccu

SEQ ID NO: 156267 - RNA, 22 nt, Human
agggagcuguggucagcucagu

SEQ ID NO: 156268 - RNA, 22 nt, Human
cacagggcuuugauggcugagu

SEQ ID NO: 156269 - RNA, 19 nt, Human
agcagccaucgaccaugga

SEQ ID NO: 156270 - RNA, 22 nt, Human
gugccuggagcuaauguguaua

SEQ ID NO: 156271 - RNA, 22 nt, Human
ggcugcaggcagaggcugucug

SEQ ID NO: 156272 - RNA, 22 nt, Human
aaaaauaggucaaccguguaug

SEQ ID NO: 156273 - RNA, 22 nt, Human
cacugaagaugcgacuagugcu

SEQ ID NO: 156274 - RNA, 22 nt, Human
gcuguucugcgucccaggcugg

SEQ ID NO: 156275 - RNA, 22 nt, Human
acuucuugggacccuggcaccg

SEQ ID NO: 156276 - RNA, 22 nt, Human
ccucccaccauuuagagagagc

SEQ ID NO: 156277 - RNA, 22 nt, Human
ugugccuggaucucugugacaa

SEQ ID NO: 156278 - RNA, 22 nt, Human
uaagacaauucuucagucacaa

SEQ ID NO: 156279 - RNA, 22 nt, Human
cucuggagaacuccuugugucu

SEQ ID NO: 156280 - RNA, 22 nt, Human
gaggccugaggcugccuggagc

SEQ ID NO: 156281 - RNA, 22 nt, Human
uggcagagagacucuccuugau

SEQ ID NO: 156282 - RNA, 19 nt, Human
ggccccucucacaggaguu

SEQ ID NO: 156283 - RNA, 22 nt, Human
gcccagcuuuuugaggcaggca

SEQ ID NO: 156284 - RNA, 18 nt, Human
cucagggcaucagucugg

SEQ ID NO: 156285 - RNA, 22 nt, Human
cagagcugugauaaauagauau

SEQ ID NO: 156286 - RNA, 22 nt, Human
ugugcagggaagggcaugcuau

SEQ ID NO: 156287 - RNA, 22 nt, Human
aagcugccuugcugaggagaaa

SEQ ID NO: 156288 - RNA, 19 nt, Human
ucagaggauuuggcuauga

SEQ ID NO: 156289 - RNA, 23 nt, Human
agaagcagcuucuggaguaucgg

SEQ ID NO: 156290 - RNA, 19 nt, Human
aacuagaaagguuuugaga

SEQ ID NO: 156291 - RNA, 23 nt, Human
ggcucugugcugggccugcagga

SEQ ID NO: 156292 - RNA, 22 nt, Human
gggcuggcucugucuagaaagg

SEQ ID NO: 156293 - RNA, 22 nt, Human
aggauccuguauggagaagcug

SEQ ID NO: 156294 - RNA, 22 nt, Human
uguaccuuuuucugugcaugcu

SEQ ID NO: 156295 - RNA, 22 nt, Human
auuucuuuucaagagggugcuu

SEQ ID NO: 156296 - RNA, 20 nt, Human
ccugaggguuuguguucuuu

SEQ ID NO: 156297 - RNA, 22 nt, Human
gucagcugucuccccagagugg

SEQ ID NO: 156298 - RNA, 22 nt, Human
uacauuguucaugcaugagaaa

SEQ ID NO: 156299 - RNA, 22 nt, Human
aucuagaaaguguugaagauca

SEQ ID NO: 156300 - RNA, 22 nt, Human
caaaaugugagucccaccucaa

SEQ ID NO: 156301 - RNA, 21 nt, Human
aaaaugugagcgugaugcuua

SEQ ID NO: 156302 - RNA, 22 nt, Human
ugucacauguguggcauuuuuc

SEQ ID NO: 156303 - RNA, 22 nt, Human
gguggccucucaugcaagguag

SEQ ID NO: 156304 - RNA, 22 nt, Human
uugaacagcuguuacauuguua

SEQ ID NO: 156305 - RNA, 22 nt, Human
cauuuagacauuugauuugggg

SEQ ID NO: 156306 - RNA, 22 nt, Human
cauggggagacaccuagggaaa

SEQ ID NO: 156307 - RNA, 22 nt, Human
aguauuucugcucaugaaagag

SEQ ID NO: 156308 - RNA, 22 nt, Human
agugaguggacccugcaaggaa

SEQ ID NO: 156309 - RNA, 22 nt, Human
gcugccuuuuaaagccucgcuu

SEQ ID NO: 156310 - RNA, 22 nt, Human
uucuuucagaacacaagugauu

SEQ ID NO: 156311 - RNA, 22 nt, Human
uggguggcggccugguucugag

SEQ ID NO: 156312 - RNA, 22 nt, Human
ccugucaggguuugccucagaa

SEQ ID NO: 156313 - RNA, 22 nt, Human
aacuagaaccacuuguauuucc

SEQ ID NO: 156314 - RNA, 21 nt, Human
aggcagaaagagcccaggcug

SEQ ID NO: 156315 - RNA, 23 nt, Human
ugccagaggcagucacaguggug

SEQ ID NO: 156316 - RNA, 22 nt, Human
uuuccucuucuggcaggcaggg

SEQ ID NO: 156317 - RNA, 22 nt, Human
cugggccagggaggugucugua

SEQ ID NO: 156318 - RNA, 22 nt, Human
agcuggccuccgggugccuggg

SEQ ID NO: 156319 - RNA, 22 nt, Human
guuuuuccuugcugaggacccg

SEQ ID NO: 156320 - RNA, 22 nt, Human
gagagaagggggauaugagccu

SEQ ID NO: 156321 - RNA, 22 nt, Human
aaugccaguguguugauuccag

SEQ ID NO: 156322 - RNA, 22 nt, Human
ucaaaagucugcauucuucaca

SEQ ID NO: 156323 - RNA, 22 nt, Human
cacacaugagucuccccauugg

SEQ ID NO: 156324 - RNA, 22 nt, Human
uccucuggggucagggcacuac

SEQ ID NO: 156325 - RNA, 20 nt, Human
uauuugaaauggccaagugu

SEQ ID NO: 156326 - RNA, 22 nt, Human
agaaauaugcugauuagaugaa

SEQ ID NO: 156327 - RNA, 22 nt, Human
cccaggccccagggcuugucag

SEQ ID NO: 156328 - RNA, 22 nt, Human
aagagcuggaguuugcagcccu

SEQ ID NO: 156329 - RNA, 22 nt, Human
ccuggagcacagcccaguccca

SEQ ID NO: 156330 - RNA, 22 nt, Human
ugucccauggacacaacuucuu

SEQ ID NO: 156331 - RNA, 22 nt, Human
cuguacaucccgagagccagua

SEQ ID NO: 156332 - RNA, 21 nt, Human
aaggcagaagcauggaaugag

SEQ ID NO: 156333 - RNA, 22 nt, Human
gagugcaucguggccauuuuaa

SEQ ID NO: 156334 - RNA, 22 nt, Human
gcacagggagcaggucucuggu

SEQ ID NO: 156335 - RNA, 22 nt, Human
ugaagccacagagcaucugccu

SEQ ID NO: 156336 - RNA, 22 nt, Human
agaaauuccuaagguacacaag

SEQ ID NO: 156337 - RNA, 22 nt, Human
gggcauggaggucugucugcag

SEQ ID NO: 156338 - RNA, 19 nt, Human
augucccaccgccccugag

SEQ ID NO: 156339 - RNA, 22 nt, Human
ggcugagccuggagcaucuggu

SEQ ID NO: 156340 - RNA, 22 nt, Human
uggcagagaugaagaguuguuu

SEQ ID NO: 156341 - RNA, 20 nt, Human
cugugcuuuggaaccuggaa

SEQ ID NO: 156342 - RNA, 22 nt, Human
uacaaaaguaauuacgguuuuu

SEQ ID NO: 156343 - RNA, 22 nt, Human
ugcaggagcugugcggugaggg

SEQ ID NO: 156344 - RNA, 22 nt, Human
ggcaguggguuccccaaggcac

SEQ ID NO: 156345 - RNA, 22 nt, Human
ccuuaaaagaacuaucucuucu

SEQ ID NO: 156346 - RNA, 22 nt, Human
gcacacccucucaccagcacug

SEQ ID NO: 156347 - RNA, 22 nt, Human
ggcagggguccugguguugacu

SEQ ID NO: 156348 - RNA, 22 nt, Human
auccuugacacacuccaguacu

SEQ ID NO: 156349 - RNA, 22 nt, Human
ugcagucuggauguccucagau

SEQ ID NO: 156350 - RNA, 22 nt, Human
ugggccugggagggcagacgcu

SEQ ID NO: 156351 - RNA, 22 nt, Human
caggggcuguggcacauggugu

SEQ ID NO: 156352 - RNA, 22 nt, Human
caggcacugugcaagggucucg

SEQ ID NO: 156353 - RNA, 22 nt, Human
uccuuggcaugccgucuucucc

SEQ ID NO: 156354 - RNA, 22 nt, Human
gcuggggagcuagaccucagca

SEQ ID NO: 156355 - RNA, 22 nt, Human
agggccuggugaccuggguccu

SEQ ID NO: 156356 - RNA, 22 nt, Human
cccaggcagggacgugcucugg

SEQ ID NO: 156357 - RNA, 22 nt, Human
cagaacauuccaugugcccugc

SEQ ID NO: 156358 - RNA, 22 nt, Human
agagccagcauuugacacuggc

SEQ ID NO: 156359 - RNA, 22 nt, Human
ugcccuguuccugccuccagcu

SEQ ID NO: 156360 - RNA, 22 nt, Human
gcagagccugggggucugcgga

SEQ ID NO: 156361 - RNA, 22 nt, Human
agcagagcggggccuccggaag

SEQ ID NO: 156362 - RNA, 22 nt, Human
cagagccucagaauccugugga

SEQ ID NO: 156363 - RNA, 22 nt, Human
uugcagcagggugaauucacuc

SEQ ID NO: 156364 - RNA, 22 nt, Human
gcucccugccuacacggaccuu

SEQ ID NO: 156365 - RNA, 19 nt, Human
ucuaacagaagugucgucc

SEQ ID NO: 156366 - RNA, 22 nt, Human
cucucuggcuuggcacggagau

SEQ ID NO: 156367 - RNA, 23 nt, Human
uggcagagacccagaaucuacau

SEQ ID NO: 156368 - RNA, 22 nt, Human
uacauuccauguguguguauuc

SEQ ID NO: 156369 - RNA, 22 nt, Human
caggugcucccagagaagugcu

SEQ ID NO: 156370 - RNA, 20 nt, Human
ugggccugagccugugggcu

SEQ ID NO: 156371 - RNA, 22 nt, Human
uggccuggaaaaaugcagaugg

SEQ ID NO: 156372 - RNA, 22 nt, Human
aagagcuggcucuugcagcagc

SEQ ID NO: 156373 - RNA, 22 nt, Human
agcaguggagcgagauguuuaa

SEQ ID NO: 156374 - RNA, 21 nt, Human
aggugggagaccauguagguc

SEQ ID NO: 156375 - RNA, 22 nt, Human
uagauaaauuagaaaguuuacu

SEQ ID NO: 156376 - RNA, 22 nt, Human
gcagccacuuugcaaccaagag

SEQ ID NO: 156377 - RNA, 22 nt, Human
ugugaaagucaaauuaauugaa

SEQ ID NO: 156378 - RNA, 22 nt, Human
gagccauacaaccuauaaagug

SEQ ID NO: 156379 - RNA, 22 nt, Human
cccauuuaaacacaagcuuuca

SEQ ID NO: 156380 - RNA, 22 nt, Human
ugcuccagugagcuggccaucc

SEQ ID NO: 156381 - RNA, 22 nt, Human
agcugcagagguuugugcaaca

SEQ ID NO: 156382 - RNA, 22 nt, Human
agaaggaguguacaggucaugc

SEQ ID NO: 156383 - RNA, 22 nt, Human
cagacuugacggcagcugcuuu

SEQ ID NO: 156384 - RNA, 23 nt, Human
uggcucugugucacauacaggau

SEQ ID NO: 156385 - RNA, 22 nt, Human
agugaaauccuggucaacaggu

SEQ ID NO: 156386 - RNA, 22 nt, Human
ccaaggagcaaguuuacaccug

SEQ ID NO: 156387 - RNA, 22 nt, Human
aaguguguauuguuuaugcugc

SEQ ID NO: 156388 - RNA, 22 nt, Human
cuccuucccuucaaguguuccu

SEQ ID NO: 156389 - RNA, 17 nt, Human
ccaggugggaggugggg

SEQ ID NO: 156390 - RNA, 18 nt, Human
ucugggcuucccgaggcu

SEQ ID NO: 156391 - RNA, 22 nt, Human
uagugcacacgcauguagcagu

SEQ ID NO: 156392 - RNA, 19 nt, Human
gcugugugaccuugggcaa

SEQ ID NO: 156393 - RNA, 22 nt, Human
ugaaagguuaaaaguaguauug

SEQ ID NO: 156394 - RNA, 22 nt, Human
ggcaggagcucuccaguuugcc

SEQ ID NO: 156395 - RNA, 22 nt, Human
gugcauuuggugacucucaccc

SEQ ID NO: 156396 - RNA, 23 nt, Human
ugaugggaaggaacgacuaccac

SEQ ID NO: 156397 - RNA, 22 nt, Human
caguagcaggcacucagcacgu

SEQ ID NO: 156398 - RNA, 22 nt, Human
gcucugucauuuugcagacacu

SEQ ID NO: 156399 - RNA, 22 nt, Human
cauguacaaaaggcaaaugccu

SEQ ID NO: 156400 - RNA, 22 nt, Human
agaaggccuaacuugggggcaa

SEQ ID NO: 156401 - RNA, 22 nt, Human
accugagaaugggggcaugugu

SEQ ID NO: 156402 - RNA, 21 nt, Human
ccugggccaaauucccuggac

SEQ ID NO: 156403 - RNA, 22 nt, Human
auaaaaguuuccaaucaugccu

SEQ ID NO: 156404 - RNA, 22 nt, Human
ccuccagggcagacggggagca

SEQ ID NO: 156405 - RNA, 22 nt, Human
uuagauaaauuaagacuuuaca

SEQ ID NO: 156406 - RNA, 22 nt, Human
ugcagcagguuccaaaggguua

SEQ ID NO: 156407 - RNA, 22 nt, Human
gcagcaggcuuuucauaccuug

SEQ ID NO: 156408 - RNA, 22 nt, Human
ccagggcugcugugggacucca

SEQ ID NO: 156409 - RNA, 22 nt, Human
cagaccugagguugaguaccag

SEQ ID NO: 156410 - RNA, 22 nt, Human
agauacauauagaaaacaucaa

SEQ ID NO: 156411 - RNA, 22 nt, Human
aggacuucuccgauaagucaga

SEQ ID NO: 156412 - RNA, 19 nt, Human
cccucaggucugagcaguc

SEQ ID NO: 156413 - RNA, 22 nt, Human
gcaggcuggaggcuguucuggg

SEQ ID NO: 156414 - RNA, 18 nt, Human
uccagagcuacuguggug

SEQ ID NO: 156415 - RNA, 22 nt, Human
cugcaggcccccuuccuggagu

SEQ ID NO: 156416 - RNA, 23 nt, Human
ugcucugggaggcccuggagagc

SEQ ID NO: 156417 - RNA, 22 nt, Human
aguguuucucagaagggccuau

SEQ ID NO: 156418 - RNA, 22 nt, Human
acugagcugcaagucagggagg

SEQ ID NO: 156419 - RNA, 22 nt, Human
caggguuucaccauguuagcag

SEQ ID NO: 156420 - RNA, 18 nt, Human
aagcugcccucaggcagg

SEQ ID NO: 156421 - RNA, 22 nt, Human
gugcucaggaagcuguuccugc

SEQ ID NO: 156422 - RNA, 22 nt, Human
cucagagcccaggguacacccg

SEQ ID NO: 156423 - RNA, 22 nt, Human
cagcuugggaguuugguuuuau

SEQ ID NO: 156424 - RNA, 22 nt, Human
ccucagaggugaacaucagugc

SEQ ID NO: 156425 - RNA, 22 nt, Human
agcccaagcauaggagggaggc

SEQ ID NO: 156426 - RNA, 22 nt, Human
ucuuugcaucccuuccauaguu

SEQ ID NO: 156427 - RNA, 22 nt, Human
uccuauugguagacauuucugu

SEQ ID NO: 156428 - RNA, 22 nt, Human
agcagagccagaauuggaccag

SEQ ID NO: 156429 - RNA, 22 nt, Human
ucaagcaucuuggucuacgauc

SEQ ID NO: 156430 - RNA, 22 nt, Human
gcugccuguguggccacucacu

SEQ ID NO: 156431 - RNA, 22 nt, Human
aagauuucuuacuuauugaugc

SEQ ID NO: 156432 - RNA, 22 nt, Human
ggaaagaggauaguggguaggu

SEQ ID NO: 156433 - RNA, 22 nt, Human
aaugaacaucaaaugccuacca

SEQ ID NO: 156434 - RNA, 22 nt, Human
agacagaacagaauaauuguug

SEQ ID NO: 156435 - RNA, 22 nt, Human
uacagucuuuggaaagagauag

SEQ ID NO: 156436 - RNA, 22 nt, Human
ggagugggaacaaugacauggu

SEQ ID NO: 156437 - RNA, 22 nt, Human
gagagcuguccggcugagcagc

SEQ ID NO: 156438 - RNA, 22 nt, Human
cuggccuggcagggagggcaug

SEQ ID NO: 156439 - RNA, 22 nt, Human
cacuguaucuuuuccaaagucu

SEQ ID NO: 156440 - RNA, 22 nt, Human
gcugucuuccuugcuccaaggg

SEQ ID NO: 156441 - RNA, 22 nt, Human
uacacauguuuggcaaguaugu

SEQ ID NO: 156442 - RNA, 22 nt, Human
agagcugaauuuggguggugga

SEQ ID NO: 156443 - RNA, 23 nt, Human
guggagccacaucacaggcuccu

SEQ ID NO: 156444 - RNA, 21 nt, Human
uggcucuggguaggagagugc

SEQ ID NO: 156445 - RNA, 22 nt, Human
cauucacucagcgaugccagua

SEQ ID NO: 156446 - RNA, 22 nt, Human
gcagggcuguggacacuuuggu

SEQ ID NO: 156447 - RNA, 22 nt, Human
gcagccacacuguuacagaaug

SEQ ID NO: 156448 - RNA, 22 nt, Human
uggcucaguuucugcccagcug

SEQ ID NO: 156449 - RNA, 22 nt, Human
cagggucuuauaaggccaauuu

SEQ ID NO: 156450 - RNA, 22 nt, Human
ugucagugguagacccagaggu

SEQ ID NO: 156451 - RNA, 22 nt, Human
uaguccaguaaaacagcuaacg

SEQ ID NO: 156452 - RNA, 22 nt, Human
gggcucucaugaguguguggua

SEQ ID NO: 156453 - RNA, 22 nt, Human
agugucugccaacugcaugguc

SEQ ID NO: 156454 - RNA, 22 nt, Human
cugagagcagggacuugagcca

SEQ ID NO: 156455 - RNA, 22 nt, Human
agcugcugugugcucaggcagg

SEQ ID NO: 156456 - RNA, 22 nt, Human
uagaaacacagaucugguguca

SEQ ID NO: 156457 - RNA, 22 nt, Human
ggcaguggugggaggcucgcuc

SEQ ID NO: 156458 - RNA, 22 nt, Human
agggcagaaguacagacacuua

SEQ ID NO: 156459 - RNA, 22 nt, Human
cuacacaguucugccuaauggc

SEQ ID NO: 156460 - RNA, 22 nt, Human
cugucaucacaguugagcagcc

SEQ ID NO: 156461 - RNA, 22 nt, Human
cacagaagaaucaugcuguguu

SEQ ID NO: 156462 - RNA, 22 nt, Human
gugugcagugagcaaaagaucu

SEQ ID NO: 156463 - RNA, 22 nt, Human
uggagcccagacacuggcauug

SEQ ID NO: 156464 - RNA, 22 nt, Human
gcuucauuacugacagucugug

SEQ ID NO: 156465 - RNA, 22 nt, Human
uaggccaguggcagguugugug

SEQ ID NO: 156466 - RNA, 22 nt, Human
ccugccugcaccuucucugggg

SEQ ID NO: 156467 - RNA, 22 nt, Human
uuccucaucugugcaccucacu

SEQ ID NO: 156468 - RNA, 22 nt, Human
uggagcucaaaggccuguggga

SEQ ID NO: 156469 - RNA, 22 nt, Human
cacagaggcaaccuucuggggu

SEQ ID NO: 156470 - RNA, 22 nt, Human
ugggccuggaguuuguccagag

SEQ ID NO: 156471 - RNA, 22 nt, Human
augcaguacugauacaugccac

SEQ ID NO: 156472 - RNA, 22 nt, Human
ggcagagcuuguuccuucuguu

SEQ ID NO: 156473 - RNA, 22 nt, Human
ugguggcuguugcagaacugag

SEQ ID NO: 156474 - RNA, 22 nt, Human
ugcuggggagugauugaccauc

SEQ ID NO: 156475 - RNA, 22 nt, Human
uuuuugaaggcugaugugauua

SEQ ID NO: 156476 - RNA, 22 nt, Human
ucccuggggauguuggccugcc

SEQ ID NO: 156477 - RNA, 22 nt, Human
uggcugaaucugcagcaggaag

SEQ ID NO: 156478 - RNA, 22 nt, Human
gagcugccaagauuacaaucag

SEQ ID NO: 156479 - RNA, 20 nt, Human
uagauuucauacuucucuuu

SEQ ID NO: 156480 - RNA, 22 nt, Human
gcucuguccagcgugcacagaa

SEQ ID NO: 156481 - RNA, 16 nt, Human
agaggccuugaggaag

SEQ ID NO: 156482 - RNA, 22 nt, Human
cugaagaugucugagaugcuca

SEQ ID NO: 156483 - RNA, 22 nt, Human
ggcugccuucagacuccagcuu

SEQ ID NO: 156484 - RNA, 22 nt, Human
aaguuuuaacaaguacuuacua

SEQ ID NO: 156485 - RNA, 22 nt, Human
gaaaugcagauucugauucugu

SEQ ID NO: 156486 - RNA, 22 nt, Human
uaugaagaaguucugugaaaug

SEQ ID NO: 156487 - RNA, 22 nt, Human
gaaaugugugacaaguuucaau

SEQ ID NO: 156488 - RNA, 22 nt, Human
cugcccuguggcucugagucau

SEQ ID NO: 156489 - RNA, 21 nt, Human
ugaaaguuggagucaaaugua

SEQ ID NO: 156490 - RNA, 22 nt, Human
gaggccugcagcguggucccug

SEQ ID NO: 156491 - RNA, 22 nt, Human
ggcagcaggcgacuucccuauu

SEQ ID NO: 156492 - RNA, 23 nt, Human
uggcagcagaucuuaaagugacc

SEQ ID NO: 156493 - RNA, 22 nt, Human
uggagccaaggccaguucucag

SEQ ID NO: 156494 - RNA, 22 nt, Human
cagggccagcgcccaggcccag

SEQ ID NO: 156495 - RNA, 22 nt, Human
ccaaagucagugcucagucguc

SEQ ID NO: 156496 - RNA, 19 nt, Human
aguagcagaaagugcagug

SEQ ID NO: 156497 - RNA, 22 nt, Human
gucccacaccuugaggggucuu

SEQ ID NO: 156498 - RNA, 22 nt, Human
ucaggaaagaagaugcucagug

SEQ ID NO: 156499 - RNA, 22 nt, Human
uccugcagagccgcccucaggu

SEQ ID NO: 156500 - RNA, 22 nt, Human
auguaucaugcaggguccauga

SEQ ID NO: 156501 - RNA, 22 nt, Human
acuuuguauaagacaauaaaga

SEQ ID NO: 156502 - RNA, 22 nt, Human
cagggcuggcuguggcaaucuc

SEQ ID NO: 156503 - RNA, 22 nt, Human
gcuucccacagcuggacugggg

SEQ ID NO: 156504 - RNA, 22 nt, Human
aaaugcagcagcuaauugaaaa

SEQ ID NO: 156505 - RNA, 22 nt, Human
ucucaggguuuccugggggcug

SEQ ID NO: 156506 - RNA, 22 nt, Human
ugugaaggcagcagcucugucc

SEQ ID NO: 156507 - RNA, 23 nt, Human
uugcauguagcccaugaguaacu

SEQ ID NO: 156508 - RNA, 22 nt, Human
agcugccauccgaggugucaga

SEQ ID NO: 156509 - RNA, 22 nt, Human
ccaggaagcggugagggcugcc

SEQ ID NO: 156510 - RNA, 22 nt, Human
ccuuggagcggucagcacuggu

SEQ ID NO: 156511 - RNA, 19 nt, Human
ggcugucuggcguguggau

SEQ ID NO: 156512 - RNA, 22 nt, Human
uguguacagcaggauuucucaa

SEQ ID NO: 156513 - RNA, 22 nt, Human
augcacagcagugaguucagug

SEQ ID NO: 156514 - RNA, 22 nt, Human
auaaggcaucucucaguuagca

SEQ ID NO: 156515 - RNA, 22 nt, Human
aucagcaagcauuuauugagug

SEQ ID NO: 156516 - RNA, 22 nt, Human
cccaggcucccaggugggacaa

SEQ ID NO: 156517 - RNA, 22 nt, Human
gcugcucugugacagccuccgg

SEQ ID NO: 156518 - RNA, 22 nt, Human
gagagcugugguuugaccaggc

SEQ ID NO: 156519 - RNA, 18 nt, Human
augggaggggccaagaga

SEQ ID NO: 156520 - RNA, 22 nt, Human
uagcagcuuaaguaauuagaau

SEQ ID NO: 156521 - RNA, 22 nt, Human
gcccucucggcauagcaggggc

SEQ ID NO: 156522 - RNA, 22 nt, Human
agggaugguggagguugcaagu

SEQ ID NO: 156523 - RNA, 22 nt, Human
ccagaggcuggguucaccucag

SEQ ID NO: 156524 - RNA, 22 nt, Human
aggaaaaaagucugugauuaua

SEQ ID NO: 156525 - RNA, 22 nt, Human
uacccagcuucaagucaggacu

SEQ ID NO: 156526 - RNA, 22 nt, Human
acugucacuccaacugagucgu

SEQ ID NO: 156527 - RNA, 22 nt, Human
cucuggaggccuaaggaagugg

SEQ ID NO: 156528 - RNA, 22 nt, Human
aggccuggccccaguugcuagg

SEQ ID NO: 156529 - RNA, 22 nt, Human
ggagagcugguagcuggcucca

SEQ ID NO: 156530 - RNA, 22 nt, Human
uaucuguuccaggcacucagcu

SEQ ID NO: 156531 - RNA, 21 nt, Human
agcuuccugcagugggagguc

SEQ ID NO: 156532 - RNA, 22 nt, Human
caggccagugugcuucccaggc

SEQ ID NO: 156533 - RNA, 22 nt, Human
ccuggccugcucggcucuuaag

SEQ ID NO: 156534 - RNA, 22 nt, Human
ugaggcagcaauuguauuguau

SEQ ID NO: 156535 - RNA, 22 nt, Human
ugucucugauaaguaguucagu

SEQ ID NO: 156536 - RNA, 22 nt, Human
gcugggcagccuggccgcugcc

SEQ ID NO: 156537 - RNA, 22 nt, Human
gacauuucaaucucauuauggg

SEQ ID NO: 156538 - RNA, 22 nt, Human
uggcccugcuggccaaaggcua

SEQ ID NO: 156539 - RNA, 22 nt, Human
cuguggcuaugguguacauacu

SEQ ID NO: 156540 - RNA, 22 nt, Human
cagagcagggugcaccuugggc

SEQ ID NO: 156541 - RNA, 22 nt, Human
aaguuugagaagcuuauagaua

SEQ ID NO: 156542 - RNA, 21 nt, Human
acccuggguucuccauacccu

SEQ ID NO: 156543 - RNA, 21 nt, Human
ugcucaugcaaugcaugucca

SEQ ID NO: 156544 - RNA, 22 nt, Human
agaaaagggcaggagggauaca

SEQ ID NO: 156545 - RNA, 22 nt, Human
ggccagggccuggggacugucc

SEQ ID NO: 156546 - RNA, 23 nt, Human
uggcuggcagaaacugaagcaug

SEQ ID NO: 156547 - RNA, 22 nt, Human
cacaggcuccggccuugcagcc

SEQ ID NO: 156548 - RNA, 22 nt, Human
cagaguguggcaucuuccaacu

SEQ ID NO: 156549 - RNA, 22 nt, Human
guucauauuacuuugagugcag

SEQ ID NO: 156550 - RNA, 22 nt, Human
gaugcacugcaguauauacugu

SEQ ID NO: 156551 - RNA, 22 nt, Human
aagaggaacugggggcugaguc

SEQ ID NO: 156552 - RNA, 22 nt, Human
ugagcccaggaguaugaggcug

SEQ ID NO: 156553 - RNA, 22 nt, Human
cuguccccgcgaguccagagcu

SEQ ID NO: 156554 - RNA, 22 nt, Human
auccaaaucaugucagaagaac

SEQ ID NO: 156555 - RNA, 22 nt, Human
uguuuguucccucucuuuccug

SEQ ID NO: 156556 - RNA, 22 nt, Human
gcuuccucgcugggcagaggca

SEQ ID NO: 156557 - RNA, 22 nt, Human
ugugacaucgcugugucuguuu

SEQ ID NO: 156558 - RNA, 17 nt, Human
uuccaguuuaguauugu

SEQ ID NO: 156559 - RNA, 22 nt, Human
aaaguuugaaugauauauuagu

SEQ ID NO: 156560 - RNA, 20 nt, Human
gcugccagugccugaugcuu

SEQ ID NO: 156561 - RNA, 22 nt, Human
gucaccaggucugaugcagcca

SEQ ID NO: 156562 - RNA, 22 nt, Human
acagcagcauaaacugacuaag

SEQ ID NO: 156563 - RNA, 22 nt, Human
agccccugggaguagcugcugc

SEQ ID NO: 156564 - RNA, 22 nt, Human
ucuuaaaaguaugccaauugga

SEQ ID NO: 156565 - RNA, 22 nt, Human
auugacaagugagcugggcugc

SEQ ID NO: 156566 - RNA, 22 nt, Human
uccagugguacauggagacacu

SEQ ID NO: 156567 - RNA, 21 nt, Human
ucagaguguguuacagcaagc

SEQ ID NO: 156568 - RNA, 22 nt, Human
cauguacaguuuuucuguccug

SEQ ID NO: 156569 - RNA, 22 nt, Human
uggccuggcugcccugucugga

SEQ ID NO: 156570 - RNA, 22 nt, Human
ggcuggaaguccaagaucaagg

SEQ ID NO: 156571 - RNA, 22 nt, Human
cuggcaggagcauucacagagg

SEQ ID NO: 156572 - RNA, 22 nt, Human
ucagagcuaaggggagagcaaa

SEQ ID NO: 156573 - RNA, 22 nt, Human
aguggugcugcgcgcggagcuc

SEQ ID NO: 156574 - RNA, 22 nt, Human
cugcucugacccuuucaccuuc

SEQ ID NO: 156575 - RNA, 22 nt, Human
ucucaccaaagccuugaccaua

SEQ ID NO: 156576 - RNA, 22 nt, Human
gccccagguugccugucccagg

SEQ ID NO: 156577 - RNA, 22 nt, Human
ccagggcaacgcugucucagag

SEQ ID NO: 156578 - RNA, 18 nt, Human
guucaaggucaagagaga

SEQ ID NO: 156579 - RNA, 22 nt, Human
ggaguucacugugcaggcucug

SEQ ID NO: 156580 - RNA, 22 nt, Human
agggcagcagcggcccaggccu

SEQ ID NO: 156581 - RNA, 21 nt, Human
agagaagggacucuuccaguc

SEQ ID NO: 156582 - RNA, 22 nt, Human
agugaaaugauaguguaaauac

SEQ ID NO: 156583 - RNA, 19 nt, Human
cagagccucagagcuagaa

SEQ ID NO: 156584 - RNA, 22 nt, Human
gccugggaacucugaucuccug

SEQ ID NO: 156585 - RNA, 22 nt, Human
cugugccaggcccagcugacuu

SEQ ID NO: 156586 - RNA, 22 nt, Human
cucagaguucuccugggaggug

SEQ ID NO: 156587 - RNA, 22 nt, Human
ugccagggugucaggagagcua

SEQ ID NO: 156588 - RNA, 22 nt, Human
uguggucucguuauguugccca

SEQ ID NO: 156589 - RNA, 21 nt, Human
ugcagagauaucugaagcaga

SEQ ID NO: 156590 - RNA, 22 nt, Human
agagauaugaguaguugugaca

SEQ ID NO: 156591 - RNA, 22 nt, Human
agugaaauaaagcugccuaugg

SEQ ID NO: 156592 - RNA, 22 nt, Human
ugggcuggagcuuguugcuucc

SEQ ID NO: 156593 - RNA, 22 nt, Human
caucaaauggcaagugaaagcu

SEQ ID NO: 156594 - RNA, 22 nt, Human
ucucuuucuauugcaccaugcu

SEQ ID NO: 156595 - RNA, 22 nt, Human
cccacagguccccaugaacucg

SEQ ID NO: 156596 - RNA, 22 nt, Human
acauuuguaugcguuuuuacug

SEQ ID NO: 156597 - RNA, 22 nt, Human
ucuuuacacaagacaagaauaa

SEQ ID NO: 156598 - RNA, 22 nt, Human
ccugagcugaacuaagcaguuu

SEQ ID NO: 156599 - RNA, 22 nt, Human
ggcagccagagggcagcuggau

SEQ ID NO: 156600 - RNA, 20 nt, Human
ccuggagccuggaaggaguc

SEQ ID NO: 156601 - RNA, 18 nt, Human
aggccugggaagcugagg

SEQ ID NO: 156602 - RNA, 20 nt, Human
ugcagcugcaggaggguggg

SEQ ID NO: 156603 - RNA, 22 nt, Human
cggggcugcucguccuccugug

SEQ ID NO: 156604 - RNA, 21 nt, Human
cccagggaagccgcagucacc

SEQ ID NO: 156605 - RNA, 22 nt, Human
guauacauagaugaugaacaag

SEQ ID NO: 156606 - RNA, 22 nt, Human
ugucagggcaugcgguccagcc

SEQ ID NO: 156607 - RNA, 22 nt, Human
ucaguuuucaauuucaucagag

SEQ ID NO: 156608 - RNA, 22 nt, Human
gcacagguugcaaaaguucaca

SEQ ID NO: 156609 - RNA, 22 nt, Human
uugaggagucaggggcacggaa

SEQ ID NO: 156610 - RNA, 22 nt, Human
aggguccaucaaggacugcaca

SEQ ID NO: 156611 - RNA, 22 nt, Human
auggacagugugaagcagauag

SEQ ID NO: 156612 - RNA, 22 nt, Human
uaaggcacgcauaagagggggc

SEQ ID NO: 156613 - RNA, 22 nt, Human
acauuugaggauguuaagaaug

SEQ ID NO: 156614 - RNA, 22 nt, Human
guuaauaaagguauagaaucag

SEQ ID NO: 156615 - RNA, 22 nt, Human
gaggcugcuguuagcccugggc

SEQ ID NO: 156616 - RNA, 22 nt, Human
auuuugaaaccaaguuauuucc

SEQ ID NO: 156617 - RNA, 22 nt, Human
cuguagccaguuuggccucacc

SEQ ID NO: 156618 - RNA, 22 nt, Human
cugagccaaaaagcagagcuug

SEQ ID NO: 156619 - RNA, 22 nt, Human
cugucaguucuuccagauagag

SEQ ID NO: 156620 - RNA, 22 nt, Human
gcagcuguguaaugagcccaca

SEQ ID NO: 156621 - RNA, 22 nt, Human
ugcuuccuucccguucuucucc

SEQ ID NO: 156622 - RNA, 22 nt, Human
caagagcugaggcuggagaggu

SEQ ID NO: 156623 - RNA, 22 nt, Human
ccauggccgccgcugcucagga

SEQ ID NO: 156624 - RNA, 22 nt, Human
ucagaggguggcugggagcauc

SEQ ID NO: 156625 - RNA, 22 nt, Human
augggcagcagcugccauucau

SEQ ID NO: 156626 - RNA, 23 nt, Human
augcucugggcugugggaccugc

SEQ ID NO: 156627 - RNA, 23 nt, Human
caguacuuaguguagcguuaauu

SEQ ID NO: 156628 - RNA, 22 nt, Human
cacagggcuucucauggggugc

SEQ ID NO: 156629 - RNA, 22 nt, Human
uuuguaaagucuguucugaguu

SEQ ID NO: 156630 - RNA, 22 nt, Human
gagcaggccagcaauggaaggg

SEQ ID NO: 156631 - RNA, 22 nt, Human
gcaggcagagguggaggagaca

SEQ ID NO: 156632 - RNA, 22 nt, Human
uucugucacuuaggaggucaua

SEQ ID NO: 156633 - RNA, 22 nt, Human
ggcugcagcggauuggggauug

SEQ ID NO: 156634 - RNA, 22 nt, Human
cucugggcaaagaugccucauc

SEQ ID NO: 156635 - RNA, 22 nt, Human
ucccagcagucagagcuaugug

SEQ ID NO: 156636 - RNA, 22 nt, Human
cagggccaccguguuugcugcu

SEQ ID NO: 156637 - RNA, 22 nt, Human
ugggagcugggguuggacgucu

SEQ ID NO: 156638 - RNA, 20 nt, Human
ucucaggccccaguuuucuu

SEQ ID NO: 156639 - RNA, 22 nt, Human
uagaggugucacuuugggaagu

SEQ ID NO: 156640 - RNA, 23 nt, Human
cagagcuggcucagagcugccug

SEQ ID NO: 156641 - RNA, 22 nt, Human
ggagcugaaggggugggcucag

SEQ ID NO: 156642 - RNA, 22 nt, Human
auguacacaugcaugcaugugc

SEQ ID NO: 156643 - RNA, 22 nt, Human
ggacccugggcuugcuccuggg

SEQ ID NO: 156644 - RNA, 22 nt, Human
ccagguggaaggucugugcucu

SEQ ID NO: 156645 - RNA, 22 nt, Human
aaggcacugaaaaauugugugu

SEQ ID NO: 156646 - RNA, 22 nt, Human
acuaaggaauaugacaaacuca

SEQ ID NO: 156647 - RNA, 22 nt, Human
ggcucuggugaggguaggagau

SEQ ID NO: 156648 - RNA, 22 nt, Human
cugauuccugauucaugcucuu

SEQ ID NO: 156649 - RNA, 22 nt, Human
gcucucugccuuucucaaugac

SEQ ID NO: 156650 - RNA, 22 nt, Human
guguggcuaccucagaggagca

SEQ ID NO: 156651 - RNA, 22 nt, Human
gcagagccaugggagguuuuug

SEQ ID NO: 156652 - RNA, 22 nt, Human
gcacugcagccucagauggugg

SEQ ID NO: 156653 - RNA, 18 nt, Human
uacaugcauaaaugaagc

SEQ ID NO: 156654 - RNA, 22 nt, Human
gggugggccugucuggccaugu

SEQ ID NO: 156655 - RNA, 22 nt, Human
aaaucaguuagugguaggauug

SEQ ID NO: 156656 - RNA, 22 nt, Human
uggcuuccugcauggauccucu

SEQ ID NO: 156657 - RNA, 22 nt, Human
ugaggcaggaguucaggcugcg

SEQ ID NO: 156658 - RNA, 22 nt, Human
cugugcaagacuuacuuuaaua

SEQ ID NO: 156659 - RNA, 18 nt, Human
aggcuucuuggcucaguc

SEQ ID NO: 156660 - RNA, 22 nt, Human
gccuaggaguacagaaugguuu

SEQ ID NO: 156661 - RNA, 22 nt, Human
ugggugcuucgucagcucugag

SEQ ID NO: 156662 - RNA, 22 nt, Human
guugggaaggcaagaaguagaa

SEQ ID NO: 156663 - RNA, 22 nt, Human
uggcaguguauagguggcuccu

SEQ ID NO: 156664 - RNA, 22 nt, Human
ucucaggggccuggaguccugg

SEQ ID NO: 156665 - RNA, 18 nt, Human
ugggauggagaguaacug

SEQ ID NO: 156666 - RNA, 22 nt, Human
cugggguggaggagcuccccug

SEQ ID NO: 156667 - RNA, 22 nt, Human
ugucccucauugacgcugugcc

SEQ ID NO: 156668 - RNA, 22 nt, Human
uccuggaguauuucuguggugu

SEQ ID NO: 156669 - RNA, 19 nt, Human
uccuucagucagaucuggg

SEQ ID NO: 156670 - RNA, 22 nt, Human
gcagagaaaguuuuguccucag

SEQ ID NO: 156671 - RNA, 22 nt, Human
uaauccacaauagagauuaucu

SEQ ID NO: 156672 - RNA, 18 nt, Human
ccauuucaugauuauuac

SEQ ID NO: 156673 - RNA, 22 nt, Human
ggccugagcagacagcaugaug

SEQ ID NO: 156674 - RNA, 22 nt, Human
agcucccagagcucgagaguaa

SEQ ID NO: 156675 - RNA, 22 nt, Human
cauugcuuugugcauauuuaaa

SEQ ID NO: 156676 - RNA, 22 nt, Human
uggggacacagagguucguugg

SEQ ID NO: 156677 - RNA, 22 nt, Human
uacauucuacuuuuucacuccc

SEQ ID NO: 156678 - RNA, 22 nt, Human
ccugagguggcugcagcacugc

SEQ ID NO: 156679 - RNA, 22 nt, Human
acagaguaggugcugucgacug

SEQ ID NO: 156680 - RNA, 22 nt, Human
uguaugcagcaaaacaauuagu

SEQ ID NO: 156681 - RNA, 21 nt, Human
ucugucucuccacugcccugc

SEQ ID NO: 156682 - RNA, 22 nt, Human
ugggcaggaugcguugauucuu

SEQ ID NO: 156683 - RNA, 22 nt, Human
gagguggccucaagcagucuuc

SEQ ID NO: 156684 - RNA, 22 nt, Human
caugagcugcugggagccuguc

SEQ ID NO: 156685 - RNA, 22 nt, Human
agucucaggcagaggaaggcua

SEQ ID NO: 156686 - RNA, 22 nt, Human
acugucugcuggccccugguua

SEQ ID NO: 156687 - RNA, 18 nt, Human
aaaugcuaggcuacauga

SEQ ID NO: 156688 - RNA, 22 nt, Human
agagccuggacuuuucugagcc

SEQ ID NO: 156689 - RNA, 22 nt, Human
uggggcugugagacuacaggau

SEQ ID NO: 156690 - RNA, 22 nt, Human
gaggagguuccggguggagaag

SEQ ID NO: 156691 - RNA, 22 nt, Human
uguaauggaagugggauugcau

SEQ ID NO: 156692 - RNA, 22 nt, Human
cugggccucauccucagaguuu

SEQ ID NO: 156693 - RNA, 22 nt, Human
cagagcuguuacuauucaugaa

SEQ ID NO: 156694 - RNA, 18 nt, Human
aagaggaggagcagguug

SEQ ID NO: 156695 - RNA, 22 nt, Human
acagccauagaugcuuauguaa

SEQ ID NO: 156696 - RNA, 22 nt, Human
uagcugccaaaagggugggcua

SEQ ID NO: 156697 - RNA, 22 nt, Human
uccacuuuagcaaugauugaau

SEQ ID NO: 156698 - RNA, 22 nt, Human
gcuguccagagcaugggagcaa

SEQ ID NO: 156699 - RNA, 22 nt, Human
gcagcuggugcaaaugucacuc

SEQ ID NO: 156700 - RNA, 22 nt, Human
aauauuucuccuucguuauagc

SEQ ID NO: 156701 - RNA, 22 nt, Human
cugcagggcccgccugagcccu

SEQ ID NO: 156702 - RNA, 22 nt, Human
ucucagagugacaaugagaauu

SEQ ID NO: 156703 - RNA, 22 nt, Human
uaugagaaaauaaauaucuguu

SEQ ID NO: 156704 - RNA, 22 nt, Human
uuuagaaauugcagagugggug

SEQ ID NO: 156705 - RNA, 22 nt, Human
ggcagcuccuccuagucugccc

SEQ ID NO: 156706 - RNA, 22 nt, Human
augugcauuaaaugucaauguu

SEQ ID NO: 156707 - RNA, 22 nt, Human
ccagccugaaaugccucauccu

SEQ ID NO: 156708 - RNA, 22 nt, Human
agcagaacugaugagacuugag

SEQ ID NO: 156709 - RNA, 20 nt, Human
gcagagcuguucugugggga

SEQ ID NO: 156710 - RNA, 22 nt, Human
aagcugcccuguguuagaguuc

SEQ ID NO: 156711 - RNA, 22 nt, Human
auaaggcagaaauagggaaagu

SEQ ID NO: 156712 - RNA, 22 nt, Human
ucauggagacuuugagccuguu

SEQ ID NO: 156713 - RNA, 22 nt, Human
uccagggguaccggccaggcag

SEQ ID NO: 156714 - RNA, 22 nt, Human
acacaguauuacaauaggugcu

SEQ ID NO: 156715 - RNA, 22 nt, Human
uccugccucaggcucuggagua

SEQ ID NO: 156716 - RNA, 21 nt, Human
agaaaauggcguuuuagauuu

SEQ ID NO: 156717 - RNA, 22 nt, Human
ggagcuguugcgcaugcgcucg

SEQ ID NO: 156718 - RNA, 22 nt, Human
ucagaagagcuggugcugccug

SEQ ID NO: 156719 - RNA, 22 nt, Human
agcagcugucccuuaacaucag

SEQ ID NO: 156720 - RNA, 22 nt, Human
cagguggagcugacugagggca

SEQ ID NO: 156721 - RNA, 22 nt, Human
aaguucaaucagaugaaaaagc

SEQ ID NO: 156722 - RNA, 22 nt, Human
ugggaguguucuuggcuugcuu

SEQ ID NO: 156723 - RNA, 22 nt, Human
gcucccagacugaccagaggug

SEQ ID NO: 156724 - RNA, 22 nt, Human
gcacagggcugccaggcggcuu

SEQ ID NO: 156725 - RNA, 22 nt, Human
uggauaaacucacuguaaguug

SEQ ID NO: 156726 - RNA, 22 nt, Human
cuggcucacaggugagaugcau

SEQ ID NO: 156727 - RNA, 22 nt, Human
gcccugugccagucacgcugug

SEQ ID NO: 156728 - RNA, 22 nt, Human
gccugagauucccggagccgug

SEQ ID NO: 156729 - RNA, 22 nt, Human
agaggcaggaagagcugauuuu

SEQ ID NO: 156730 - RNA, 22 nt, Human
caggacagguguucuagaucag

SEQ ID NO: 156731 - RNA, 22 nt, Human
cuccagggaugagacagaguag

SEQ ID NO: 156732 - RNA, 22 nt, Human
ggaggccacgguuuagcaccga

SEQ ID NO: 156733 - RNA, 22 nt, Human
gccagagcacaggcugguagua

SEQ ID NO: 156734 - RNA, 22 nt, Human
agucucagaaaauaugcuuuuu

SEQ ID NO: 156735 - RNA, 22 nt, Human
ccagcccuugcugaaggguggc

SEQ ID NO: 156736 - RNA, 22 nt, Human
acagggcagagugaaaugcuau

SEQ ID NO: 156737 - RNA, 22 nt, Human
ugagacaguucugcagcugggu

SEQ ID NO: 156738 - RNA, 22 nt, Human
aaaguuucaauagaggaagugg

SEQ ID NO: 156739 - RNA, 22 nt, Human
ggccauggaccccgagcugacc

SEQ ID NO: 156740 - RNA, 22 nt, Human
cccuggagugugacgaggcauu

SEQ ID NO: 156741 - RNA, 22 nt, Human
gcagugggcaacaagagcugga

SEQ ID NO: 156742 - RNA, 22 nt, Human
acuuugcagagccagaagagaa

SEQ ID NO: 156743 - RNA, 22 nt, Human
gacucagugauuugacaugccu

SEQ ID NO: 156744 - RNA, 22 nt, Human
ugggacagggaaucugaucccc

SEQ ID NO: 156745 - RNA, 22 nt, Human
cagccaggacagggaaacuagu

SEQ ID NO: 156746 - RNA, 22 nt, Human
cacaggcuugucagcaugaggc

SEQ ID NO: 156747 - RNA, 22 nt, Human
cuuguacaggaauccaugguau

SEQ ID NO: 156748 - RNA, 22 nt, Human
cagagcagaagcgguccucaca

SEQ ID NO: 156749 - RNA, 22 nt, Human
aggccugaaggaagaugagcug

SEQ ID NO: 156750 - RNA, 21 nt, Human
gagcucucaggcaagaagcag

SEQ ID NO: 156751 - RNA, 22 nt, Human
ugcugucaguuggcaggaugag

SEQ ID NO: 156752 - RNA, 22 nt, Human
aagggaaaucauauggugcagu

SEQ ID NO: 156753 - RNA, 22 nt, Human
agaagcugccuacaugaccagc

SEQ ID NO: 156754 - RNA, 22 nt, Human
ggagccuguggcugcuugaagc

SEQ ID NO: 156755 - RNA, 22 nt, Human
aggagccaggaaaccugcucug

SEQ ID NO: 156756 - RNA, 22 nt, Human
gugcccugaguggguaggagag

SEQ ID NO: 156757 - RNA, 22 nt, Human
aacagcuuugcuucuggagaca

SEQ ID NO: 156758 - RNA, 22 nt, Human
uaacagaaaggggacagaaaua

SEQ ID NO: 156759 - RNA, 22 nt, Human
cugggcuccuaaccauccaggu

SEQ ID NO: 156760 - RNA, 22 nt, Human
cuggcugggagcgagcugcuca

SEQ ID NO: 156761 - RNA, 22 nt, Human
ugcccacaggaagacaccagcg

SEQ ID NO: 156762 - RNA, 22 nt, Human
aggaccagaggccagagucagc

SEQ ID NO: 156763 - RNA, 22 nt, Human
gcaggccugacuguagggggca

SEQ ID NO: 156764 - RNA, 22 nt, Human
aagaugcuuauugcuccugcag

SEQ ID NO: 156765 - RNA, 22 nt, Human
agagaggcgaguuaccugugcu

SEQ ID NO: 156766 - RNA, 22 nt, Human
ccaaggcuggagugcaguggcg

SEQ ID NO: 156767 - RNA, 22 nt, Human
cagggcucaucugugugaccag

SEQ ID NO: 156768 - RNA, 22 nt, Human
gcagggacgccagggacagcaa

SEQ ID NO: 156769 - RNA, 22 nt, Human
gaggccuggagccgccuaggcg

SEQ ID NO: 156770 - RNA, 22 nt, Human
caaugauucugcaacugugugc

SEQ ID NO: 156771 - RNA, 22 nt, Human
agcaccuucacaggcucucagg

SEQ ID NO: 156772 - RNA, 22 nt, Human
uggcagcauguuauguaaggaa

SEQ ID NO: 156773 - RNA, 22 nt, Human
ugguggcaauguccuggagaag

SEQ ID NO: 156774 - RNA, 19 nt, Human
gagaggccugugcuugaag

SEQ ID NO: 156775 - RNA, 22 nt, Human
ggcuggccucaggguccucgcu

SEQ ID NO: 156776 - RNA, 23 nt, Human
gucagggcuggggucagagugac

SEQ ID NO: 156777 - RNA, 18 nt, Human
ggagagugacagagucgu

SEQ ID NO: 156778 - RNA, 22 nt, Human
acuuccugggcaugcagagucc

SEQ ID NO: 156779 - RNA, 22 nt, Human
cacaggggcaaacuguagggga

SEQ ID NO: 156780 - RNA, 22 nt, Human
gcuggcagaagagcugguucaa

SEQ ID NO: 156781 - RNA, 22 nt, Human
ugagccagccuugcagcugugc

SEQ ID NO: 156782 - RNA, 21 nt, Human
gcugagagguugggaaguuca

SEQ ID NO: 156783 - RNA, 22 nt, Human
cugcugcugagagcucagccug

SEQ ID NO: 156784 - RNA, 23 nt, Human
uggcagcuguguaagagaaagca

SEQ ID NO: 156785 - RNA, 22 nt, Human
cccuguccuggaugggagcacu

SEQ ID NO: 156786 - RNA, 22 nt, Human
gagcagugggaaggaacagggu

SEQ ID NO: 156787 - RNA, 22 nt, Human
acagcagcacuauugacauuuu

SEQ ID NO: 156788 - RNA, 19 nt, Human
gggaaauucacuugcuucc

SEQ ID NO: 156789 - RNA, 22 nt, Human
aggagcuggaguccaggcaagu

SEQ ID NO: 156790 - RNA, 22 nt, Human
cagcagcuuugccaagucagcc

SEQ ID NO: 156791 - RNA, 19 nt, Human
caugagcugcucacuuccc

SEQ ID NO: 156792 - RNA, 22 nt, Human
cccuggcaugcaugucccuggc

SEQ ID NO: 156793 - RNA, 22 nt, Human
gcuggcugggucccugagaggc

SEQ ID NO: 156794 - RNA, 22 nt, Human
agggaucaaaaaauguacaugc

SEQ ID NO: 156795 - RNA, 22 nt, Human
uccagccaagggagguuacuag

SEQ ID NO: 156796 - RNA, 21 nt, Human
ucacuuauaauguauuugcug

SEQ ID NO: 156797 - RNA, 22 nt, Human
uccagcagcccgaaggcccauc

SEQ ID NO: 156798 - RNA, 22 nt, Human
ccugggcucaagugauccuccu

SEQ ID NO: 156799 - RNA, 22 nt, Human
cccagcagaccgcugugauggc

SEQ ID NO: 156800 - RNA, 22 nt, Human
uaaaugcaguuaguacuugcca

SEQ ID NO: 156801 - RNA, 22 nt, Human
aggcccugcccagugccacaag

SEQ ID NO: 156802 - RNA, 22 nt, Human
gcugcuucucugauggagucca

SEQ ID NO: 156803 - RNA, 22 nt, Human
gaaaugugaccuacuuccuugu

SEQ ID NO: 156804 - RNA, 19 nt, Human
ggaagagaggaaaggugga

SEQ ID NO: 156805 - RNA, 22 nt, Human
gcuggccugaccugaggcuggg

SEQ ID NO: 156806 - RNA, 22 nt, Human
gccagggcaggggagcaucugc

SEQ ID NO: 156807 - RNA, 21 nt, Human
ggucagggggugccuccaggu

SEQ ID NO: 156808 - RNA, 22 nt, Human
aggugaaguugaggaggcagaa

SEQ ID NO: 156809 - RNA, 22 nt, Human
ucucuggagcugcagauccagg

SEQ ID NO: 156810 - RNA, 22 nt, Human
agaagccaacagggcaggagag

SEQ ID NO: 156811 - RNA, 22 nt, Human
gaggugaguggaucacgagguc

SEQ ID NO: 156812 - RNA, 22 nt, Human
aguggcagagcugugucuugaa

SEQ ID NO: 156813 - RNA, 22 nt, Human
ggcugcagauagccagccacca

SEQ ID NO: 156814 - RNA, 22 nt, Human
aggcaggcucaggcccaugcuu

SEQ ID NO: 156815 - RNA, 22 nt, Human
ucucucagggggaaggcugaag

SEQ ID NO: 156816 - RNA, 22 nt, Human
cauacuuuugcccugacauucu

SEQ ID NO: 156817 - RNA, 22 nt, Human
ugucuguacaaauuuucugugu

SEQ ID NO: 156818 - RNA, 22 nt, Human
agaggccagguccagaguuugu

SEQ ID NO: 156819 - RNA, 22 nt, Human
agucccagugacuuggccagaa

SEQ ID NO: 156820 - RNA, 22 nt, Human
gagcagcuggacaggccucccu

SEQ ID NO: 156821 - RNA, 22 nt, Human
gagccagcugagcugcacuguc

SEQ ID NO: 156822 - RNA, 22 nt, Human
aaguucuacuguggguaaaaug

SEQ ID NO: 156823 - RNA, 22 nt, Human
ucagggacuaggugcugccuga

SEQ ID NO: 156824 - RNA, 22 nt, Human
gcugccagcucacucuccugag

SEQ ID NO: 156825 - RNA, 16 nt, Human
ccuuucucugccuucc

SEQ ID NO: 156826 - RNA, 22 nt, Human
cugccagcucaaagcgcagcua

SEQ ID NO: 156827 - RNA, 22 nt, Human
gccugcagaacugugaggcaau

SEQ ID NO: 156828 - RNA, 22 nt, Human
uggccugauuuugcuaagagaa

SEQ ID NO: 156829 - RNA, 22 nt, Human
guggccuggaugagcuucgaca

SEQ ID NO: 156830 - RNA, 19 nt, Human
ucaaaugccaaugucacag

SEQ ID NO: 156831 - RNA, 22 nt, Human
uagagcuggccgggacagcugg

SEQ ID NO: 156832 - RNA, 22 nt, Human
auucuguauggaaaagcacuau

SEQ ID NO: 156833 - RNA, 19 nt, Human
cacagggcaggucucaugu

SEQ ID NO: 156834 - RNA, 22 nt, Human
guccugucccccaaggcugugg

SEQ ID NO: 156835 - RNA, 22 nt, Human
agcagggcuucugugccugugc

SEQ ID NO: 156836 - RNA, 22 nt, Human
gcugagagcaguguggccuuaa

SEQ ID NO: 156837 - RNA, 22 nt, Human
agucucagaguaccugagggac

SEQ ID NO: 156838 - RNA, 22 nt, Human
gccagggggucagcaggcacuu

SEQ ID NO: 156839 - RNA, 22 nt, Human
ucgagucauguucucccauuaa

SEQ ID NO: 156840 - RNA, 22 nt, Human
gggagcuguaguccagauaccg

SEQ ID NO: 156841 - RNA, 22 nt, Human
cucccucugucuuguccagaaa

SEQ ID NO: 156842 - RNA, 22 nt, Human
uggccugacugucaggcuguau

SEQ ID NO: 156843 - RNA, 18 nt, Human
cagcugccagcucaugga

SEQ ID NO: 156844 - RNA, 17 nt, Human
ccucacagggaccagac

SEQ ID NO: 156845 - RNA, 22 nt, Human
cugugcuucgcaacuccaaggu

SEQ ID NO: 156846 - RNA, 22 nt, Human
agcagggcagguaaggaucaga

SEQ ID NO: 156847 - RNA, 21 nt, Human
auuauuauuucuguguccagc

SEQ ID NO: 156848 - RNA, 22 nt, Human
augucacagcucccauuccucc

SEQ ID NO: 156849 - RNA, 22 nt, Human
uggcaggagguuuucuccagga

SEQ ID NO: 156850 - RNA, 22 nt, Human
ggggcacacuuuugguagauau

SEQ ID NO: 156851 - RNA, 18 nt, Human
uaaaugcauguuaauaac

SEQ ID NO: 156852 - RNA, 22 nt, Human
ccacccuggacaggccucugag

SEQ ID NO: 156853 - RNA, 22 nt, Human
auaaggcagugacuucaucuau

SEQ ID NO: 156854 - RNA, 22 nt, Human
acucccacuccagaguagaagc

SEQ ID NO: 156855 - RNA, 22 nt, Human
gagaaagauguaggcugggagg

SEQ ID NO: 156856 - RNA, 22 nt, Human
caguccaggccuggaggagcca

SEQ ID NO: 156857 - RNA, 22 nt, Human
agggcacagccuaaagccuaug

SEQ ID NO: 156858 - RNA, 23 nt, Human
uggcuucugccccauucucucca

SEQ ID NO: 156859 - RNA, 22 nt, Human
ccagcugcugugcagggaggcu

SEQ ID NO: 156860 - RNA, 22 nt, Human
cuggcagcugcccgagaugccc

SEQ ID NO: 156861 - RNA, 22 nt, Human
gggagcugagcuggaagagaau

SEQ ID NO: 156862 - RNA, 22 nt, Human
auucucaaacaagugguuugau

SEQ ID NO: 156863 - RNA, 22 nt, Human
cugggagcccgcguccuggugg

SEQ ID NO: 156864 - RNA, 22 nt, Human
ugcaggcuguaaucugaggcua

SEQ ID NO: 156865 - RNA, 22 nt, Human
uggcagaguuauggguauuuau

SEQ ID NO: 156866 - RNA, 22 nt, Human
ugcagcugcuggcccaggugcu

SEQ ID NO: 156867 - RNA, 22 nt, Human
agccuggcacugaggcagggcg

SEQ ID NO: 156868 - RNA, 22 nt, Human
uugcaaaagccgaggcacucca

SEQ ID NO: 156869 - RNA, 22 nt, Human
ucugcuguaaagaauuucugcc

SEQ ID NO: 156870 - RNA, 22 nt, Human
gaggcugccccuuccucagcug

SEQ ID NO: 156871 - RNA, 22 nt, Human
augcaguauaaaucauuucugg

SEQ ID NO: 156872 - RNA, 22 nt, Human
cuggcuggccggagcgaggcgg

SEQ ID NO: 156873 - RNA, 22 nt, Human
agcagccaguucucugugguag

SEQ ID NO: 156874 - RNA, 22 nt, Human
uauguacauaacaugaaaugca

SEQ ID NO: 156875 - RNA, 22 nt, Human
auaacagauacucucugugagg

SEQ ID NO: 156876 - RNA, 22 nt, Human
ggaagagccuggggugucaggc

SEQ ID NO: 156877 - RNA, 19 nt, Human
ugcaggaggacugagcaga

SEQ ID NO: 156878 - RNA, 22 nt, Human
ucagggcacauucugcaguggc

SEQ ID NO: 156879 - RNA, 22 nt, Human
ggugaaggucuacugugugcca

SEQ ID NO: 156880 - RNA, 22 nt, Human
agcagagcccuuccauggccuu

SEQ ID NO: 156881 - RNA, 22 nt, Human
aagacaagcaucaaaucaggca

SEQ ID NO: 156882 - RNA, 22 nt, Human
uugaagcaaggcgaaucuugug

SEQ ID NO: 156883 - RNA, 22 nt, Human
uacauauuugucuuuguacugu

SEQ ID NO: 156884 - RNA, 22 nt, Human
ucccaguguggcaggccaugga

SEQ ID NO: 156885 - RNA, 22 nt, Human
uccagggacacagaguccuucu

SEQ ID NO: 156886 - RNA, 17 nt, Human
cgagggcuugcuggcuc

SEQ ID NO: 156887 - RNA, 19 nt, Human
gcugucugaugcugagguc

SEQ ID NO: 156888 - RNA, 22 nt, Human
gcugucucggggcuuucuccug

SEQ ID NO: 156889 - RNA, 22 nt, Human
cagggugcgccacucagaugua

SEQ ID NO: 156890 - RNA, 22 nt, Human
gugccugggcaugagcuuguug

SEQ ID NO: 156891 - RNA, 18 nt, Human
uggcagagugucuguucu

SEQ ID NO: 156892 - RNA, 22 nt, Human
cuguauuuaguuaaaaugcuaa

SEQ ID NO: 156893 - RNA, 22 nt, Human
gcagagccugacgggauuuuuc

SEQ ID NO: 156894 - RNA, 22 nt, Human
uagcaggguccaaugugaggca

SEQ ID NO: 156895 - RNA, 22 nt, Human
augaugguaaauucaguauccg

SEQ ID NO: 156896 - RNA, 22 nt, Human
uacuuugucauucuaaccuucc

SEQ ID NO: 156897 - RNA, 21 nt, Human
ugcccacagcaaaugcagagg

SEQ ID NO: 156898 - RNA, 22 nt, Human
uguguuuuacaaauucucuuaa

SEQ ID NO: 156899 - RNA, 22 nt, Human
gggcccacuggcugucugaccc

SEQ ID NO: 156900 - RNA, 22 nt, Human
gagcuggcaggaggcuccccga

SEQ ID NO: 156901 - RNA, 22 nt, Human
gagcugaguuaccuccagauca

SEQ ID NO: 156902 - RNA, 22 nt, Human
ccagagcccagggucaugcagg

SEQ ID NO: 156903 - RNA, 22 nt, Human
guguggcugauugacaugguca

SEQ ID NO: 156904 - RNA, 22 nt, Human
agcuuuauuugucauucacggc

SEQ ID NO: 156905 - RNA, 22 nt, Human
aggagaaagacuggacagccaa

SEQ ID NO: 156906 - RNA, 22 nt, Human
cagcaauaagguaagcuucucc

SEQ ID NO: 156907 - RNA, 22 nt, Human
ucucuucugaaaccugucuuua

SEQ ID NO: 156908 - RNA, 22 nt, Human
guuugcauuuauuagucuucug

SEQ ID NO: 156909 - RNA, 22 nt, Human
acugaaggcuuaacucuuucau

SEQ ID NO: 156910 - RNA, 22 nt, Human
auuguaaguagaaauguuaugg

SEQ ID NO: 156911 - RNA, 22 nt, Human
acaggcuucucacagaaaaggg

SEQ ID NO: 156912 - RNA, 22 nt, Human
augcaguggcagcuccuggugu

SEQ ID NO: 156913 - RNA, 22 nt, Human
acuguguccuauuuccuugaca

SEQ ID NO: 156914 - RNA, 22 nt, Human
ucccagaggcaguugguaacuu

SEQ ID NO: 156915 - RNA, 22 nt, Human
ucugccugcuaacuccugcacc

SEQ ID NO: 156916 - RNA, 22 nt, Human
caagagcugugaccucauucac

SEQ ID NO: 156917 - RNA, 18 nt, Human
acugugguuuauguguag

SEQ ID NO: 156918 - RNA, 22 nt, Human
caacagaaggaagcagggucag

SEQ ID NO: 156919 - RNA, 22 nt, Human
gggcuguggagccgcgagggcu

SEQ ID NO: 156920 - RNA, 22 nt, Human
auuuagaaguuggagggcaaga

SEQ ID NO: 156921 - RNA, 22 nt, Human
uacuuuagaaggaaauaaguuc

SEQ ID NO: 156922 - RNA, 22 nt, Human
ugcugccucagcuuccugggcu

SEQ ID NO: 156923 - RNA, 22 nt, Human
cucaggauggaagccuacagga

SEQ ID NO: 156924 - RNA, 21 nt, Human
ggccugagcaccuguccaccu

SEQ ID NO: 156925 - RNA, 22 nt, Human
cuugcaggauuuugcugcugua

SEQ ID NO: 156926 - RNA, 22 nt, Human
agauggggcucaguguggaggc

SEQ ID NO: 156927 - RNA, 22 nt, Human
ugggccugacucaccugccucc

SEQ ID NO: 156928 - RNA, 22 nt, Human
ugagcccagucugucugacaug

SEQ ID NO: 156929 - RNA, 22 nt, Human
ggagccagagucugcaguguaa

SEQ ID NO: 156930 - RNA, 22 nt, Human
cagccagguucaaguccuuaua

SEQ ID NO: 156931 - RNA, 22 nt, Human
cacacauugaauucauucuugu

SEQ ID NO: 156932 - RNA, 22 nt, Human
cagagccugccucuggcugugg

SEQ ID NO: 156933 - RNA, 22 nt, Human
uuuccuuccagguuccuaaggc

SEQ ID NO: 156934 - RNA, 22 nt, Human
ugcccagcacugugccagucac

SEQ ID NO: 156935 - RNA, 22 nt, Human
uggcuuccaaaggaaugggccu

SEQ ID NO: 156936 - RNA, 22 nt, Human
uggcuucaucugcagcacugcc

SEQ ID NO: 156937 - RNA, 22 nt, Human
ucacagggauggaauagaaaua

SEQ ID NO: 156938 - RNA, 22 nt, Human
cagccagccucucaaccaugca

SEQ ID NO: 156939 - RNA, 22 nt, Human
ccaggcugggcggggaaccugg

SEQ ID NO: 156940 - RNA, 22 nt, Human
uccugggaagagaccugagcau

SEQ ID NO: 156941 - RNA, 22 nt, Human
cauuaagauuuuuuucuacugg

SEQ ID NO: 156942 - RNA, 22 nt, Human
uggcuggggccugaauccugca

SEQ ID NO: 156943 - RNA, 22 nt, Human
ccagcuccagguagaugggcag

SEQ ID NO: 156944 - RNA, 22 nt, Human
acugucucucuagcaguucagg

SEQ ID NO: 156945 - RNA, 22 nt, Human
ugggcagaguugugaugaacug

SEQ ID NO: 156946 - RNA, 22 nt, Human
ugaaacagucuccagacuugga

SEQ ID NO: 156947 - RNA, 22 nt, Human
ggggcagagaauaaaaaccuaa

SEQ ID NO: 156948 - RNA, 22 nt, Human
auuucagcccaguaugagcccc

SEQ ID NO: 156949 - RNA, 22 nt, Human
aucaaaguuucccagaaguugu

SEQ ID NO: 156950 - RNA, 22 nt, Human
ggugcuggacacguggcacucc

SEQ ID NO: 156951 - RNA, 22 nt, Human
gccaggcauucuagaaguagug

SEQ ID NO: 156952 - RNA, 22 nt, Human
agcagcuccugccaugagugcu

SEQ ID NO: 156953 - RNA, 22 nt, Human
uaagaagcuucugcuaaugccu

SEQ ID NO: 156954 - RNA, 22 nt, Human
gcugcaggagcuggagcugugg

SEQ ID NO: 156955 - RNA, 22 nt, Human
ugggcuccucgucacucgcugu

SEQ ID NO: 156956 - RNA, 22 nt, Human
ggccaggcuggucucagacuuc

SEQ ID NO: 156957 - RNA, 22 nt, Human
cgggcuggcugcagcugcugga

SEQ ID NO: 156958 - RNA, 22 nt, Human
agccucucuccagcuuggcaga

SEQ ID NO: 156959 - RNA, 22 nt, Human
aagcccagcaucccugcaccag

SEQ ID NO: 156960 - RNA, 22 nt, Human
cugccugcugccuguggagggu

SEQ ID NO: 156961 - RNA, 22 nt, Human
guuagaaagugucugcuugggu

SEQ ID NO: 156962 - RNA, 22 nt, Human
acagagcugggaucugaaccca

SEQ ID NO: 156963 - RNA, 18 nt, Human
accugccuguucuucucu

SEQ ID NO: 156964 - RNA, 22 nt, Human
ugcagagguguugcugagauaa

SEQ ID NO: 156965 - RNA, 20 nt, Human
ggcucugcuugugagcagcc

SEQ ID NO: 156966 - RNA, 22 nt, Human
uuagggcuuuucugaauaggcc

SEQ ID NO: 156967 - RNA, 22 nt, Human
gcacagcaauuucuauaagcuc

SEQ ID NO: 156968 - RNA, 22 nt, Human
cagccaggagcucccccugcuc

SEQ ID NO: 156969 - RNA, 22 nt, Human
auacauuagcucauaugauuaa

SEQ ID NO: 156970 - RNA, 21 nt, Human
uaaagaagaugaaugugauca

SEQ ID NO: 156971 - RNA, 22 nt, Human
ggcaggugcaccugagccaucu

SEQ ID NO: 156972 - RNA, 22 nt, Human
uucaagaugucuucacaauagu

SEQ ID NO: 156973 - RNA, 19 nt, Human
cuggcucuuggguggagga

SEQ ID NO: 156974 - RNA, 22 nt, Human
ucuggcucuccagugcucuuag

SEQ ID NO: 156975 - RNA, 22 nt, Human
cucaaggaaagucuggagaaga

SEQ ID NO: 156976 - RNA, 22 nt, Human
uggggacaggagacuuacagcu

SEQ ID NO: 156977 - RNA, 22 nt, Human
uaugugaauacagcaguggaug

SEQ ID NO: 156978 - RNA, 22 nt, Human
uuggcuucuggcagucuggacg

SEQ ID NO: 156979 - RNA, 22 nt, Human
cugcagaggccucgccuccucu

SEQ ID NO: 156980 - RNA, 22 nt, Human
cagagccauuauggagacuugc

SEQ ID NO: 156981 - RNA, 22 nt, Human
gcucccagcaauugaggcagcc

SEQ ID NO: 156982 - RNA, 22 nt, Human
gggagggaggugaugcuuggcu

SEQ ID NO: 156983 - RNA, 22 nt, Human
uaacagaauagcagaaacagaa

SEQ ID NO: 156984 - RNA, 22 nt, Human
agcaccugcacaguggaggaaa

SEQ ID NO: 156985 - RNA, 21 nt, Human
ucccacucuaaauggacugaa

SEQ ID NO: 156986 - RNA, 22 nt, Human
acuuuuuacaggguguauacca

SEQ ID NO: 156987 - RNA, 22 nt, Human
ucacugggagaugugggaaggg

SEQ ID NO: 156988 - RNA, 22 nt, Human
cccuccagcucaaagcaaccgg

SEQ ID NO: 156989 - RNA, 22 nt, Human
ugcaguggcgccaucucagcuc

SEQ ID NO: 156990 - RNA, 22 nt, Human
acaugcauucucuaaaagcaaa

SEQ ID NO: 156991 - RNA, 22 nt, Human
gagagcuguguucauucuacca

SEQ ID NO: 156992 - RNA, 22 nt, Human
ccuggagcacucucccuggcug

SEQ ID NO: 156993 - RNA, 20 nt, Human
caccacagaauuggggacag

SEQ ID NO: 156994 - RNA, 22 nt, Human
cccugcagccuugcaugccuuc

SEQ ID NO: 156995 - RNA, 22 nt, Human
uggcuggcuuguucacugacug

SEQ ID NO: 156996 - RNA, 22 nt, Human
guggccagcaagugcugccucu

SEQ ID NO: 156997 - RNA, 22 nt, Human
uuuuccucugcaauaaaagcag

SEQ ID NO: 156998 - RNA, 22 nt, Human
aaaggcuccuucucccaugacc

SEQ ID NO: 156999 - RNA, 22 nt, Human
ucacaggaaccaucagagaaau

SEQ ID NO: 157000 - RNA, 22 nt, Human
ccuggcaggccccuccuggauu

SEQ ID NO: 157001 - RNA, 21 nt, Human
gaugaagcaaucuuucuguug

SEQ ID NO: 157002 - RNA, 22 nt, Human
accucugcaacccuggaauggg

SEQ ID NO: 157003 - RNA, 22 nt, Human
agcagggcuugccgcuuguccu

SEQ ID NO: 157004 - RNA, 22 nt, Human
ucaguuuucucaucuguaauuu

SEQ ID NO: 157005 - RNA, 22 nt, Human
ccagagccccugagcuucccug

SEQ ID NO: 157006 - RNA, 22 nt, Human
gcugcagcccggcgcgccugag

SEQ ID NO: 157007 - RNA, 22 nt, Human
gcuggagauaguaggauccaua

SEQ ID NO: 157008 - RNA, 22 nt, Human
cagcauggagacaaagugggca

SEQ ID NO: 157009 - RNA, 22 nt, Human
gcccccucuuuggagccagcca

SEQ ID NO: 157010 - RNA, 18 nt, Human
cccacggugcuguagggc

SEQ ID NO: 157011 - RNA, 21 nt, Human
ggcagcugaccgcgcggugca

SEQ ID NO: 157012 - RNA, 22 nt, Human
cugagagccuccuguuggcuag

SEQ ID NO: 157013 - RNA, 22 nt, Human
aaaacucugcaguuaguuucua

SEQ ID NO: 157014 - RNA, 22 nt, Human
aauguguauaugaacauacagg

SEQ ID NO: 157015 - RNA, 22 nt, Human
ggcaggcugcuugggucauguc

SEQ ID NO: 157016 - RNA, 22 nt, Human
gcagugaaucuggcaagaauuu

SEQ ID NO: 157017 - RNA, 21 nt, Human
ucucuggaguuagcagagaga

SEQ ID NO: 157018 - RNA, 22 nt, Human
agacccugucaguguuaggaaa

SEQ ID NO: 157019 - RNA, 22 nt, Human
cagguggguguaugaaugcaaa

SEQ ID NO: 157020 - RNA, 22 nt, Human
aggcacugacaauucuggacug

SEQ ID NO: 157021 - RNA, 16 nt, Human
uggaaggggucuccgg

SEQ ID NO: 157022 - RNA, 22 nt, Human
aggagccuccuucucaugugca

SEQ ID NO: 157023 - RNA, 22 nt, Human
uuaacagacauauauauuugua

SEQ ID NO: 157024 - RNA, 22 nt, Human
uaagaacaagcuggggguucca

SEQ ID NO: 157025 - RNA, 22 nt, Human
aggggccauuguucugcccgcu

SEQ ID NO: 157026 - RNA, 22 nt, Human
ucagguguuagaagaaauuuca

SEQ ID NO: 157027 - RNA, 22 nt, Human
cagggugccaaagaacaaauau

SEQ ID NO: 157028 - RNA, 22 nt, Human
ucacgagaggcacagaauagag

SEQ ID NO: 157029 - RNA, 22 nt, Human
gcugaguguaaugauggcagag

SEQ ID NO: 157030 - RNA, 22 nt, Human
cuggagcuaggaaguccaagau

SEQ ID NO: 157031 - RNA, 22 nt, Human
cuggcucaugugaugagggcaa

SEQ ID NO: 157032 - RNA, 22 nt, Human
caggugggagcgaggagcuacu

SEQ ID NO: 157033 - RNA, 22 nt, Human
gaagcagcagcuggggacaguu

SEQ ID NO: 157034 - RNA, 22 nt, Human
cuccuugguguaguacugagca

SEQ ID NO: 157035 - RNA, 20 nt, Human
agaauucuuacccuuugaug

SEQ ID NO: 157036 - RNA, 22 nt, Human
gcugucaggccaugugggccuu

SEQ ID NO: 157037 - RNA, 22 nt, Human
ggcugaguugagaggauuacuu

SEQ ID NO: 157038 - RNA, 22 nt, Human
agccugagugcuuaggacuguu

SEQ ID NO: 157039 - RNA, 22 nt, Human
ggggggugcugaucaguggagc

SEQ ID NO: 157040 - RNA, 22 nt, Human
acauguguauagccuguauaga

SEQ ID NO: 157041 - RNA, 22 nt, Human
caggaggcuccuagggcucugu

SEQ ID NO: 157042 - RNA, 22 nt, Human
uuagaaauacaagugagguuga

SEQ ID NO: 157043 - RNA, 22 nt, Human
caggccagguggcaggcaaaac

SEQ ID NO: 157044 - RNA, 22 nt, Human
cucagggccaaggaugcuguug

SEQ ID NO: 157045 - RNA, 22 nt, Human
auacauauaugguacuuccugg

SEQ ID NO: 157046 - RNA, 22 nt, Human
agaggcagcagucauacuacag

SEQ ID NO: 157047 - RNA, 21 nt, Human
agcagaacagucgagcacugc

SEQ ID NO: 157048 - RNA, 22 nt, Human
auugucuuuggugcuuccagga

SEQ ID NO: 157049 - RNA, 22 nt, Human
aaggcacucauucaaggagaua

SEQ ID NO: 157050 - RNA, 22 nt, Human
agggcucugggguggcagagau

SEQ ID NO: 157051 - RNA, 22 nt, Human
uacaguaacauguuguacaagc

SEQ ID NO: 157052 - RNA, 22 nt, Human
aagagguaaccauagcaaccac

SEQ ID NO: 157053 - RNA, 22 nt, Human
ggagccuuccagacugcccaca

SEQ ID NO: 157054 - RNA, 22 nt, Human
cauuuguauguuccuccuuagg

SEQ ID NO: 157055 - RNA, 23 nt, Human
ucaugcccaggcuccagauguca

SEQ ID NO: 157056 - RNA, 22 nt, Human
uguuaucugagcaacgucgacg

SEQ ID NO: 157057 - RNA, 22 nt, Human
agcuucuugaccaagccuguaa

SEQ ID NO: 157058 - RNA, 22 nt, Human
agcaggaguuugaugcuuuuau

SEQ ID NO: 157059 - RNA, 22 nt, Human
cugagcugcucccgcugcagcg

SEQ ID NO: 157060 - RNA, 22 nt, Human
uguacaauagcuauuaucucca

SEQ ID NO: 157061 - RNA, 22 nt, Human
ugcugccaccccucaccagagc

SEQ ID NO: 157062 - RNA, 22 nt, Human
gccuggaguacuccuugaagug

SEQ ID NO: 157063 - RNA, 22 nt, Human
ggcugcugggaauaugccagcu

SEQ ID NO: 157064 - RNA, 22 nt, Human
gagcagugacuggagcaugaga

SEQ ID NO: 157065 - RNA, 22 nt, Human
agauuucagaugcucggcaguu

SEQ ID NO: 157066 - RNA, 22 nt, Human
gugucaugcacacucaguguug

SEQ ID NO: 157067 - RNA, 22 nt, Human
uguauuuuuaggaaugcgcuau

SEQ ID NO: 157068 - RNA, 22 nt, Human
ugcaagcacucaaugcaaacag

SEQ ID NO: 157069 - RNA, 22 nt, Human
gagcugagccuggguggaccgc

SEQ ID NO: 157070 - RNA, 22 nt, Human
ggcuccuggggaggugagcuug

SEQ ID NO: 157071 - RNA, 22 nt, Human
caucagcacuaugauuaaagua

SEQ ID NO: 157072 - RNA, 22 nt, Human
cccagggacagaugggcagcua

SEQ ID NO: 157073 - RNA, 22 nt, Human
cagcagcccacgcgugcugucc

SEQ ID NO: 157074 - RNA, 22 nt, Human
gcagcagcccagggcucucaga

SEQ ID NO: 157075 - RNA, 22 nt, Human
ucaaaccaccuuguuacugggg

SEQ ID NO: 157076 - RNA, 22 nt, Human
cagcugccccuccagggcuggg

SEQ ID NO: 157077 - RNA, 22 nt, Human
cacagcugaaguagccaugugg

SEQ ID NO: 157078 - RNA, 22 nt, Human
ugagcccagagaucugagcuau

SEQ ID NO: 157079 - RNA, 20 nt, Human
ucucccaggcucagggaaga

SEQ ID NO: 157080 - RNA, 22 nt, Human
aucagcaaguccuguuaauucu

SEQ ID NO: 157081 - RNA, 22 nt, Human
agcaguggcugaagauguuccu

SEQ ID NO: 157082 - RNA, 22 nt, Human
gggugacauuucccaaugagcc

SEQ ID NO: 157083 - RNA, 20 nt, Human
uccaagcccuccuuccauuc

SEQ ID NO: 157084 - RNA, 22 nt, Human
guaacagaggguuugcagauau

SEQ ID NO: 157085 - RNA, 22 nt, Human
acccaggguagagugcaguggc

SEQ ID NO: 157086 - RNA, 22 nt, Human
augcuauacucaaagaaauuca

SEQ ID NO: 157087 - RNA, 22 nt, Human
ugcucuguauucuauggcaguu

SEQ ID NO: 157088 - RNA, 22 nt, Human
uagaaagcuugggguguuuaaa

SEQ ID NO: 157089 - RNA, 22 nt, Human
gccaggcauuuguuaggugcug

SEQ ID NO: 157090 - RNA, 22 nt, Human
augggggccugaacaggcaaaa

SEQ ID NO: 157091 - RNA, 22 nt, Human
agccugccuugggcugcuugag

SEQ ID NO: 157092 - RNA, 21 nt, Human
ugcaggcaggcagagaugcug

SEQ ID NO: 157093 - RNA, 23 nt, Human
uguagcaucucuuauuucucagc

SEQ ID NO: 157094 - RNA, 22 nt, Human
ccuggcagcaggugggcccgug

SEQ ID NO: 157095 - RNA, 20 nt, Human
ggcagcaggaguuuccucuu

SEQ ID NO: 157096 - RNA, 22 nt, Human
gagauggggucagcugggacau

SEQ ID NO: 157097 - RNA, 22 nt, Human
ucucucagucagaugcuaaaga

SEQ ID NO: 157098 - RNA, 22 nt, Human
gaaaucugcuucuugcauagua

SEQ ID NO: 157099 - RNA, 22 nt, Human
gggcugccaagccugccugccu

SEQ ID NO: 157100 - RNA, 22 nt, Human
cugcagugaaaucaggaagcaa

SEQ ID NO: 157101 - RNA, 22 nt, Human
uaacacugguauuucauuuagu

SEQ ID NO: 157102 - RNA, 22 nt, Human
agauacaugucaagagacuuau

SEQ ID NO: 157103 - RNA, 22 nt, Human
agggcagaaauauugauacugu

SEQ ID NO: 157104 - RNA, 22 nt, Human
aauguuaaaaccuucagugcuu

SEQ ID NO: 157105 - RNA, 22 nt, Human
ugccugggagugaccaagacuc

SEQ ID NO: 157106 - RNA, 22 nt, Human
ggugaaggcacaagagggcaag

SEQ ID NO: 157107 - RNA, 22 nt, Human
cagaaauguucuaaugauucag

SEQ ID NO: 157108 - RNA, 22 nt, Human
ucaucaaagucaaagaaugacu

SEQ ID NO: 157109 - RNA, 22 nt, Human
ccugccuggagcugagugugga

SEQ ID NO: 157110 - RNA, 22 nt, Human
gccuucagcccugacuggccag

SEQ ID NO: 157111 - RNA, 22 nt, Human
ccuggugcuuaccagagcuuuu

SEQ ID NO: 157112 - RNA, 22 nt, Human
caggcaggagccagggauucca

SEQ ID NO: 157113 - RNA, 22 nt, Human
uuugcauuaucucacuuauaua

SEQ ID NO: 157114 - RNA, 22 nt, Human
uucuucaaaauccagcaugauu

SEQ ID NO: 157115 - RNA, 22 nt, Human
ggcucugcuucagaaggcucau

SEQ ID NO: 157116 - RNA, 22 nt, Human
uucaagaugccagggacgcggc

SEQ ID NO: 157117 - RNA, 22 nt, Human
cgcuggccauagccuccugugu

SEQ ID NO: 157118 - RNA, 22 nt, Human
aggcucuguuauucuagagggc

SEQ ID NO: 157119 - RNA, 22 nt, Human
accaaggagaaggugcaagcuu

SEQ ID NO: 157120 - RNA, 22 nt, Human
ccuuugggugaauuccucucuu

SEQ ID NO: 157121 - RNA, 22 nt, Human
uucacauuggugauauguuucu

SEQ ID NO: 157122 - RNA, 22 nt, Human
ggcucugcaugugagugggugg

SEQ ID NO: 157123 - RNA, 22 nt, Human
gagcugugagggacacauugcu

SEQ ID NO: 157124 - RNA, 22 nt, Human
ggcuggguuauuuauggccaag

SEQ ID NO: 157125 - RNA, 22 nt, Human
ggcuggucacaccacugcaggg

SEQ ID NO: 157126 - RNA, 22 nt, Human
ugcugucuguuuacuggcuaua

SEQ ID NO: 157127 - RNA, 22 nt, Human
gagcucaggagcaucagaagaa

SEQ ID NO: 157128 - RNA, 22 nt, Human
agagaaggucacuaaggaccca

SEQ ID NO: 157129 - RNA, 22 nt, Human
ugucccaguucccaggguugcu

SEQ ID NO: 157130 - RNA, 22 nt, Human
gcucugucaacagcuagcugug

SEQ ID NO: 157131 - RNA, 22 nt, Human
acugaguguaggacuuugaguu

SEQ ID NO: 157132 - RNA, 22 nt, Human
cagcucuguaaauuccuucauc

SEQ ID NO: 157133 - RNA, 22 nt, Human
ggcucagguuuaaagugcuuua

SEQ ID NO: 157134 - RNA, 22 nt, Human
acaaaguuugugguauuccaag

SEQ ID NO: 157135 - RNA, 22 nt, Human
aggcagagcuggguuuugaaau

SEQ ID NO: 157136 - RNA, 22 nt, Human
gcagcuggggaggucgugggga

SEQ ID NO: 157137 - RNA, 22 nt, Human
agcugcagauucuaucuagaag

SEQ ID NO: 157138 - RNA, 22 nt, Human
agugcagccgagaucaggugcu

SEQ ID NO: 157139 - RNA, 22 nt, Human
ggugacugguuuaucuggcagu

SEQ ID NO: 157140 - RNA, 22 nt, Human
gcugaagcccacguggcuugua

SEQ ID NO: 157141 - RNA, 22 nt, Human
cugggagcccugacuagccugg

SEQ ID NO: 157142 - RNA, 22 nt, Human
aggcugggaaaccugaaguugu

SEQ ID NO: 157143 - RNA, 22 nt, Human
ucaguauccacaaaugcucaaa

SEQ ID NO: 157144 - RNA, 22 nt, Human
cuuaagaauauugaaguugugg

SEQ ID NO: 157145 - RNA, 22 nt, Human
gcagagccccucaagccagccu

SEQ ID NO: 157146 - RNA, 22 nt, Human
ucugccuuccccauaaucugau

SEQ ID NO: 157147 - RNA, 22 nt, Human
acccagcuggaugcauggaggc

SEQ ID NO: 157148 - RNA, 22 nt, Human
auguccuucuccucuuaccugc

SEQ ID NO: 157149 - RNA, 22 nt, Human
cagagccaggucuaggagucuc

SEQ ID NO: 157150 - RNA, 22 nt, Human
gcucaggaaggcucaaccagga

SEQ ID NO: 157151 - RNA, 22 nt, Human
auguagcagauauuugugcaca

SEQ ID NO: 157152 - RNA, 22 nt, Human
ugggcugccggcaggcucugcc

SEQ ID NO: 157153 - RNA, 21 nt, Human
ccaggguccagcugccauggu

SEQ ID NO: 157154 - RNA, 22 nt, Human
cacugcuuucacaguuuguucc

SEQ ID NO: 157155 - RNA, 22 nt, Human
acacaugagaaacaucaguugu

SEQ ID NO: 157156 - RNA, 22 nt, Human
ugcaggggcuugucugggccug

SEQ ID NO: 157157 - RNA, 18 nt, Human
gcuggcugcacuucugcu

SEQ ID NO: 157158 - RNA, 22 nt, Human
agugaaaucagguuuugacugc

SEQ ID NO: 157159 - RNA, 22 nt, Human
uugaacauuaacuucagucuau

SEQ ID NO: 157160 - RNA, 23 nt, Human
acaguuauagcugugaauaacau

SEQ ID NO: 157161 - RNA, 22 nt, Human
agccucuggcccuagacugcuu

SEQ ID NO: 157162 - RNA, 22 nt, Human
gucucccaucguuugugaggaa

SEQ ID NO: 157163 - RNA, 22 nt, Human
cugaggccucuguucaccagaa

SEQ ID NO: 157164 - RNA, 22 nt, Human
aggcugggcaccguuuugaucc

SEQ ID NO: 157165 - RNA, 20 nt, Human
gucagaggacccuagagcga

SEQ ID NO: 157166 - RNA, 22 nt, Human
ccagcagaagcucccgcugggu

SEQ ID NO: 157167 - RNA, 22 nt, Human
agcacaggaccaaggaagcugu

SEQ ID NO: 157168 - RNA, 22 nt, Human
uacaguagacaauguuaguaug

SEQ ID NO: 157169 - RNA, 22 nt, Human
uagccucucuccuccacaaccu

SEQ ID NO: 157170 - RNA, 22 nt, Human
ccuggcagacugugagggcagg

SEQ ID NO: 157171 - RNA, 22 nt, Human
cucccaggguagggagagacua

SEQ ID NO: 157172 - RNA, 22 nt, Human
aggcaggggagcuggaagggua

SEQ ID NO: 157173 - RNA, 22 nt, Human
uuccauaauaggcuuaagugaa

SEQ ID NO: 157174 - RNA, 22 nt, Human
ucucugguggcuccaucaguag

SEQ ID NO: 157175 - RNA, 22 nt, Human
uuucuaaaugguggcugcauug

SEQ ID NO: 157176 - RNA, 22 nt, Human
ugaugcugcugggaguggugcu

SEQ ID NO: 157177 - RNA, 22 nt, Human
uucuuuccccauggaguucgga

SEQ ID NO: 157178 - RNA, 22 nt, Human
ggcgcuggccacgguggcucug

SEQ ID NO: 157179 - RNA, 19 nt, Human
uggaggagaggaaaaguca

SEQ ID NO: 157180 - RNA, 22 nt, Human
agagauguucauucagcauguu

SEQ ID NO: 157181 - RNA, 22 nt, Human
ccagcugacgaugccuggucuc

SEQ ID NO: 157182 - RNA, 22 nt, Human
gaagccccaaacccucgccauc

SEQ ID NO: 157183 - RNA, 22 nt, Human
ccaaggcuccucagcuggucuu

SEQ ID NO: 157184 - RNA, 22 nt, Human
caguacuuugcaucauuccacu

SEQ ID NO: 157185 - RNA, 23 nt, Human
gcucagagguuuuucucuggaug

SEQ ID NO: 157186 - RNA, 22 nt, Human
aaguucaagucuccugaguaua

SEQ ID NO: 157187 - RNA, 20 nt, Human
cccuggagagaagcuccacg

SEQ ID NO: 157188 - RNA, 22 nt, Human
acguuuucagccuuaauguaga

SEQ ID NO: 157189 - RNA, 22 nt, Human
ugucccuggaacuauggcucca

SEQ ID NO: 157190 - RNA, 22 nt, Human
uaacagaagaaaacauauugga

SEQ ID NO: 157191 - RNA, 22 nt, Human
cugcccugccuggccagugugg

SEQ ID NO: 157192 - RNA, 22 nt, Human
aaucaguuaggguguuaaugag

SEQ ID NO: 157193 - RNA, 22 nt, Human
ugucucaggcccaagccaguaa

SEQ ID NO: 157194 - RNA, 22 nt, Human
uccaucagauucccuccugaga

SEQ ID NO: 157195 - RNA, 22 nt, Human
agagcuguucaacguagcaaug

SEQ ID NO: 157196 - RNA, 20 nt, Human
ccugccugccucggcucauu

SEQ ID NO: 157197 - RNA, 22 nt, Human
cugccuggccugaucuccacgc

SEQ ID NO: 157198 - RNA, 22 nt, Human
uggcucagauuuuuguaggcuu

SEQ ID NO: 157199 - RNA, 22 nt, Human
caccagcuuugcccacugccca

SEQ ID NO: 157200 - RNA, 22 nt, Human
uauugaaauccauuacguucuu

SEQ ID NO: 157201 - RNA, 22 nt, Human
ucagagcuuaucucuugcugga

SEQ ID NO: 157202 - RNA, 22 nt, Human
ccagaagggcuauugcagugac

SEQ ID NO: 157203 - RNA, 22 nt, Human
cugggccuagaggaagcugaca

SEQ ID NO: 157204 - RNA, 22 nt, Human
gcacccagccagcaucucagag

SEQ ID NO: 157205 - RNA, 22 nt, Human
uugucugucccagcuugugcau

SEQ ID NO: 157206 - RNA, 22 nt, Human
ucugagcuacgaugccugucac

SEQ ID NO: 157207 - RNA, 19 nt, Human
auuuacugccuaaaaucuc

SEQ ID NO: 157208 - RNA, 22 nt, Human
cagggcagccaggccccguggg

SEQ ID NO: 157209 - RNA, 22 nt, Human
aggucaaggccaaaagaguggu

SEQ ID NO: 157210 - RNA, 22 nt, Human
uaacagaaauuuuaguuagggg

SEQ ID NO: 157211 - RNA, 17 nt, Human
uagcugccccgaaugcu

SEQ ID NO: 157212 - RNA, 22 nt, Human
cucuggacagcaggugcugugg

SEQ ID NO: 157213 - RNA, 22 nt, Human
aggcuuccuggaggaagaggua

SEQ ID NO: 157214 - RNA, 22 nt, Human
gagccagcgccuugccucuggg

SEQ ID NO: 157215 - RNA, 19 nt, Human
ccuggaggugaagguucuc

SEQ ID NO: 157216 - RNA, 22 nt, Human
acagggucaagggugcuacaag

SEQ ID NO: 157217 - RNA, 22 nt, Human
aggagucauaaaugugaacaaa

SEQ ID NO: 157218 - RNA, 22 nt, Human
cuucuugcugggggccucagug

SEQ ID NO: 157219 - RNA, 22 nt, Human
agcccuagagcuggaggucagu

SEQ ID NO: 157220 - RNA, 17 nt, Human
uccuggcucugccacug

SEQ ID NO: 157221 - RNA, 22 nt, Human
ucugggagguaaccaugcugau

SEQ ID NO: 157222 - RNA, 22 nt, Human
agaaauguuacaguuguuauuu

SEQ ID NO: 157223 - RNA, 22 nt, Human
gagccugagugcugccuccccu

SEQ ID NO: 157224 - RNA, 22 nt, Human
ggugcagugguguggcaaaggg

SEQ ID NO: 157225 - RNA, 22 nt, Human
acaaaugcuuaguucaccaaaa

SEQ ID NO: 157226 - RNA, 22 nt, Human
cagguggaucucuaaggacuga

SEQ ID NO: 157227 - RNA, 22 nt, Human
ugucccagucaaggcugucauc

SEQ ID NO: 157228 - RNA, 22 nt, Human
cagcugccuucugcgggaaguc

SEQ ID NO: 157229 - RNA, 22 nt, Human
uuuuggucagguuggucucgaa

SEQ ID NO: 157230 - RNA, 22 nt, Human
gcagcugcuguggcaucaagcu

SEQ ID NO: 157231 - RNA, 22 nt, Human
acagguggaggcuuuaggaggu

SEQ ID NO: 157232 - RNA, 22 nt, Human
agggaagagcuugcaagaaacc

SEQ ID NO: 157233 - RNA, 17 nt, Human
gccuggcccagccuggc

SEQ ID NO: 157234 - RNA, 22 nt, Human
cugccuggggaaugugaggauu

SEQ ID NO: 157235 - RNA, 22 nt, Human
ggccugcugacccaaguccugu

SEQ ID NO: 157236 - RNA, 22 nt, Human
cuggggcugcgguggaggagcc

SEQ ID NO: 157237 - RNA, 22 nt, Human
caagagcucaccggagagcauu

SEQ ID NO: 157238 - RNA, 22 nt, Human
ccagcccugccucucagggccc

SEQ ID NO: 157239 - RNA, 19 nt, Human
cucugccucccuccugggu

SEQ ID NO: 157240 - RNA, 21 nt, Human
aggccucuucauggccaugau

SEQ ID NO: 157241 - RNA, 22 nt, Human
acauuucugcaucucagagcua

SEQ ID NO: 157242 - RNA, 22 nt, Human
ucucaggccccugaguuucucu

SEQ ID NO: 157243 - RNA, 22 nt, Human
ggucccaguugcccaggucagg

SEQ ID NO: 157244 - RNA, 22 nt, Human
acccagagccagggucaggagc

SEQ ID NO: 157245 - RNA, 22 nt, Human
uuaacagagaacauagaaguag

SEQ ID NO: 157246 - RNA, 22 nt, Human
caugaagcauguuuugucauga

SEQ ID NO: 157247 - RNA, 22 nt, Human
ugcacacaguucucaggaaaga

SEQ ID NO: 157248 - RNA, 22 nt, Human
uauagaaguaagcauugugaug

SEQ ID NO: 157249 - RNA, 22 nt, Human
agaaaucagaacccugaaguuc

SEQ ID NO: 157250 - RNA, 22 nt, Human
ggcaugggagugagcaaccuua

SEQ ID NO: 157251 - RNA, 22 nt, Human
gugucccacucuggaggugaag

SEQ ID NO: 157252 - RNA, 22 nt, Human
ccaaagucuggagcagcagagc

SEQ ID NO: 157253 - RNA, 22 nt, Human
cugcucugaguauuaacggagg

SEQ ID NO: 157254 - RNA, 22 nt, Human
ugggccugaaggagcugcgccc

SEQ ID NO: 157255 - RNA, 22 nt, Human
cagcagaggaaagcaaaucuaa

SEQ ID NO: 157256 - RNA, 22 nt, Human
gagcucagauucuggugucaga

SEQ ID NO: 157257 - RNA, 22 nt, Human
gaugugggguugagggaccagc

SEQ ID NO: 157258 - RNA, 22 nt, Human
ugugccaggcacuugcccaggc

SEQ ID NO: 157259 - RNA, 22 nt, Human
cacacuagucuauccauuagcu

SEQ ID NO: 157260 - RNA, 21 nt, Human
ggagucauuagucauuuccuu

SEQ ID NO: 157261 - RNA, 22 nt, Human
gccaggcucagcagucaaccug

SEQ ID NO: 157262 - RNA, 22 nt, Human
gggccuggggacaccaccauga

SEQ ID NO: 157263 - RNA, 22 nt, Human
aaagcaguauauugguaguugu

SEQ ID NO: 157264 - RNA, 22 nt, Human
ugcuggggcucugaccacucca

SEQ ID NO: 157265 - RNA, 22 nt, Human
acugaaggaaagccuuugcaug

SEQ ID NO: 157266 - RNA, 22 nt, Human
ugugacaugugucaucuuuucu

SEQ ID NO: 157267 - RNA, 22 nt, Human
aaaagagguuaaccaggugugu

SEQ ID NO: 157268 - RNA, 22 nt, Human
cccagcucaagcagagagcuaa

SEQ ID NO: 157269 - RNA, 22 nt, Human
acaugcauacaagcacauguag

SEQ ID NO: 157270 - RNA, 22 nt, Human
accagagcuggcucugagcacc

SEQ ID NO: 157271 - RNA, 23 nt, Human
gccucuggagccccagugcucag

SEQ ID NO: 157272 - RNA, 22 nt, Human
aggguggggugcuacaucuuua

SEQ ID NO: 157273 - RNA, 21 nt, Human
uucuuuccccagaggacuaaa

SEQ ID NO: 157274 - RNA, 22 nt, Human
ugggcuggcugaacuucaaccu

SEQ ID NO: 157275 - RNA, 22 nt, Human
uccucuggauauaagccucacc

SEQ ID NO: 157276 - RNA, 22 nt, Human
cccaagaucuuucgugcacuaa

SEQ ID NO: 157277 - RNA, 22 nt, Human
cagucccaucucccagguggcu

SEQ ID NO: 157278 - RNA, 22 nt, Human
gcagggugugucucauacaguu

SEQ ID NO: 157279 - RNA, 22 nt, Human
ugaggcagaaauuccuguuuuc

SEQ ID NO: 157280 - RNA, 22 nt, Human
agccucugucaagcuuuucaaa

SEQ ID NO: 157281 - RNA, 22 nt, Human
agucccagugagaugagccacg

SEQ ID NO: 157282 - RNA, 22 nt, Human
aagacauuuauuugaaucaauu

SEQ ID NO: 157283 - RNA, 22 nt, Human
caggugaccuuuguccuaaguu

SEQ ID NO: 157284 - RNA, 22 nt, Human
aagggcugaaagaccuugggca

SEQ ID NO: 157285 - RNA, 22 nt, Human
caggucccgccccgggcugacc

SEQ ID NO: 157286 - RNA, 22 nt, Human
cggcuggggcuguccccaugac

SEQ ID NO: 157287 - RNA, 22 nt, Human
caggaggaggugagguagaacu

SEQ ID NO: 157288 - RNA, 22 nt, Human
cagaguccuggacacagagaca

SEQ ID NO: 157289 - RNA, 22 nt, Human
augacagaggagugcaggugau

SEQ ID NO: 157290 - RNA, 22 nt, Human
agccugguguggggcugcagag

SEQ ID NO: 157291 - RNA, 22 nt, Human
ucccagccugacagugcaucaa

SEQ ID NO: 157292 - RNA, 22 nt, Human
ccaggcugcucacaagcugccc

SEQ ID NO: 157293 - RNA, 22 nt, Human
agcauuuauuucuuagaaauug

SEQ ID NO: 157294 - RNA, 22 nt, Human
ugggauaguggccaggaccccc

SEQ ID NO: 157295 - RNA, 22 nt, Human
acauuuaaugauccuacuguga

SEQ ID NO: 157296 - RNA, 22 nt, Human
gcugcugguccucagagcucau

SEQ ID NO: 157297 - RNA, 21 nt, Human
gccacguuucagucuucucag

SEQ ID NO: 157298 - RNA, 22 nt, Human
uucuuaaagaggcaaaacacag

SEQ ID NO: 157299 - RNA, 22 nt, Human
cagguaggauggaagggcucaa

SEQ ID NO: 157300 - RNA, 22 nt, Human
ugaaggaaugagggaguggguc

SEQ ID NO: 157301 - RNA, 22 nt, Human
gccuucugcgcucgugucuccg

SEQ ID NO: 157302 - RNA, 22 nt, Human
auguguaggugaaucgaggcug

SEQ ID NO: 157303 - RNA, 22 nt, Human
cucucugggcccaguuggcacc

SEQ ID NO: 157304 - RNA, 22 nt, Human
cucagagucccuucccucgugg

SEQ ID NO: 157305 - RNA, 22 nt, Human
aggacucaucccugcuugucag

SEQ ID NO: 157306 - RNA, 22 nt, Human
uggcaccugaacuuagaggugu

SEQ ID NO: 157307 - RNA, 22 nt, Human
caggagacaaguuagcagcuga

SEQ ID NO: 157308 - RNA, 22 nt, Human
uuccauaacugaccgaaugcau

SEQ ID NO: 157309 - RNA, 22 nt, Human
guuugcauaaaguggaugcagg

SEQ ID NO: 157310 - RNA, 22 nt, Human
agagugauucuaguuagggaau

SEQ ID NO: 157311 - RNA, 22 nt, Human
uacaguuuguuacauuguuagu

SEQ ID NO: 157312 - RNA, 22 nt, Human
uaaggcacccauguucauacag

SEQ ID NO: 157313 - RNA, 22 nt, Human
gcugaaggaggcucugguacua

SEQ ID NO: 157314 - RNA, 20 nt, Human
ugaugguucuuuccggguug

SEQ ID NO: 157315 - RNA, 22 nt, Human
agcagcaggcuguguggacuga

SEQ ID NO: 157316 - RNA, 20 nt, Human
cagaccugcacccacuucga

SEQ ID NO: 157317 - RNA, 22 nt, Human
gcccacacaccagcucaggagg

SEQ ID NO: 157318 - RNA, 22 nt, Human
aaguuacuggcaagggcugcag

SEQ ID NO: 157319 - RNA, 22 nt, Human
ucuuugcagaauuuaacuuugc

SEQ ID NO: 157320 - RNA, 22 nt, Human
ucucccacagucucccauggcu

SEQ ID NO: 157321 - RNA, 22 nt, Human
ggcuggcuuucucuccgcaccu

SEQ ID NO: 157322 - RNA, 20 nt, Human
ggccuuggguuucgccuguu

SEQ ID NO: 157323 - RNA, 22 nt, Human
gugaggugguacaauauuaacu

SEQ ID NO: 157324 - RNA, 22 nt, Human
ugaagcagagaauuugacaguc

SEQ ID NO: 157325 - RNA, 22 nt, Human
ucaucacucauuggacaacaga

SEQ ID NO: 157326 - RNA, 18 nt, Human
gcugucugaggucugagg

SEQ ID NO: 157327 - RNA, 22 nt, Human
gugugccaggaacuggcugcug

SEQ ID NO: 157328 - RNA, 22 nt, Human
uggcucugagacacaggcucuc

SEQ ID NO: 157329 - RNA, 22 nt, Human
aauaauuuuagcucagaguugu

SEQ ID NO: 157330 - RNA, 22 nt, Human
auucacagggacaaugggagag

SEQ ID NO: 157331 - RNA, 22 nt, Human
gagguucacaggcuaucacagu

SEQ ID NO: 157332 - RNA, 22 nt, Human
guguguccucaguaguggcaug

SEQ ID NO: 157333 - RNA, 22 nt, Human
ucauaauacaaagaguucugca

SEQ ID NO: 157334 - RNA, 22 nt, Human
cagagcugacccaaggauugaa

SEQ ID NO: 157335 - RNA, 22 nt, Human
ccucugccugcacaucauccug

SEQ ID NO: 157336 - RNA, 22 nt, Human
cugagguggaacagaggugaag

SEQ ID NO: 157337 - RNA, 22 nt, Human
uaaccauauuuuccauuaaguu

SEQ ID NO: 157338 - RNA, 22 nt, Human
guccuggcccacuggcaggcug

SEQ ID NO: 157339 - RNA, 18 nt, Human
uccugccugugccccagg

SEQ ID NO: 157340 - RNA, 22 nt, Human
ucagggcaaagggcagaguuug

SEQ ID NO: 157341 - RNA, 22 nt, Human
cagcaucuuucucuucuggagu

SEQ ID NO: 157342 - RNA, 22 nt, Human
cacugugucaguuugguuagac

SEQ ID NO: 157343 - RNA, 22 nt, Human
gcugguuagaaaacagagcuca

SEQ ID NO: 157344 - RNA, 22 nt, Human
uggccuggcucacagugagauu

SEQ ID NO: 157345 - RNA, 21 nt, Human
cugaggcagcacagcuaguca

SEQ ID NO: 157346 - RNA, 22 nt, Human
aaauguguauaugaaacaugau

SEQ ID NO: 157347 - RNA, 18 nt, Human
uggagcagguaggcauga

SEQ ID NO: 157348 - RNA, 21 nt, Human
gccagccuguuuaccuguggu

SEQ ID NO: 157349 - RNA, 22 nt, Human
cccagcaggucggugcugccug

SEQ ID NO: 157350 - RNA, 22 nt, Human
cccccuggcaggcuggccucuc

SEQ ID NO: 157351 - RNA, 22 nt, Human
auuagcugaccucuaaggagcc

SEQ ID NO: 157352 - RNA, 22 nt, Human
aaggagugcaugacucagagua

SEQ ID NO: 157353 - RNA, 22 nt, Human
agagccugcuguguaagucaca

SEQ ID NO: 157354 - RNA, 22 nt, Human
ccaguccagugccaugcauggc

SEQ ID NO: 157355 - RNA, 22 nt, Human
cauauaaauacaacauguguua

SEQ ID NO: 157356 - RNA, 22 nt, Human
cuggccuucagacucggacuga

SEQ ID NO: 157357 - RNA, 22 nt, Human
acgcagaagggccuggcgugcc

SEQ ID NO: 157358 - RNA, 22 nt, Human
gcaggcugugaggcucagaugg

SEQ ID NO: 157359 - RNA, 22 nt, Human
accuuucauuaaagucuguagu

SEQ ID NO: 157360 - RNA, 22 nt, Human
uaaauguggagacucaggaguc

SEQ ID NO: 157361 - RNA, 22 nt, Human
uucaguuucagucuugcaaaaa

SEQ ID NO: 157362 - RNA, 22 nt, Human
ucacauuuuccuugguaucugu

SEQ ID NO: 157363 - RNA, 22 nt, Human
ucugucacuuauuaagauggau

SEQ ID NO: 157364 - RNA, 22 nt, Human
agaccagcugccucccagggcc

SEQ ID NO: 157365 - RNA, 21 nt, Human
acagcaagccuuccuuucagg

SEQ ID NO: 157366 - RNA, 22 nt, Human
ugccucagucuaaagucucuca

SEQ ID NO: 157367 - RNA, 22 nt, Human
uaauuuauuucaacugccaagg

SEQ ID NO: 157368 - RNA, 22 nt, Human
gagagcacaugaacauggagga

SEQ ID NO: 157369 - RNA, 22 nt, Human
auacauguucguguacauguuc

SEQ ID NO: 157370 - RNA, 22 nt, Human
agauuuccaucuuuuucaugug

SEQ ID NO: 157371 - RNA, 22 nt, Human
gccccuggcuggccagcuccuc

SEQ ID NO: 157372 - RNA, 22 nt, Human
acagauauaugauuguguaaau

SEQ ID NO: 157373 - RNA, 22 nt, Human
ucccacucccaggcaggccucu

SEQ ID NO: 157374 - RNA, 22 nt, Human
aagggacuuugucagcuuucca

SEQ ID NO: 157375 - RNA, 22 nt, Human
aggacccagaggcagaggacgu

SEQ ID NO: 157376 - RNA, 22 nt, Human
agcugccaccucugccuuuggg

SEQ ID NO: 157377 - RNA, 22 nt, Human
aucaguuucacuugcuugcaaa

SEQ ID NO: 157378 - RNA, 22 nt, Human
agggcuggcaagggauugaaau

SEQ ID NO: 157379 - RNA, 22 nt, Human
ucagaagcaggagugugcacaa

SEQ ID NO: 157380 - RNA, 22 nt, Human
ggcugggcucgcugauuggcug

SEQ ID NO: 157381 - RNA, 22 nt, Human
gcagcacauauaaacaaagaga

SEQ ID NO: 157382 - RNA, 22 nt, Human
ugccucugaggaagauuguguu

SEQ ID NO: 157383 - RNA, 22 nt, Human
uguauuuucuucuggaagcuua

SEQ ID NO: 157384 - RNA, 22 nt, Human
aaguaugacauuuaagacaauu

SEQ ID NO: 157385 - RNA, 22 nt, Human
uucaaaggcaggauagcagcug

SEQ ID NO: 157386 - RNA, 22 nt, Human
guccucagggaauguggcgggu

SEQ ID NO: 157387 - RNA, 22 nt, Human
uauguuuuucaagugcacacua

SEQ ID NO: 157388 - RNA, 22 nt, Human
aagugacacauggcacuucuau

SEQ ID NO: 157389 - RNA, 22 nt, Human
auaucacaaacaagucuguacu

SEQ ID NO: 157390 - RNA, 22 nt, Human
aagccucuggggccucaucugu

SEQ ID NO: 157391 - RNA, 22 nt, Human
gcaggguaggugacagguaguc

SEQ ID NO: 157392 - RNA, 22 nt, Human
cagagccacugucugccaggca

SEQ ID NO: 157393 - RNA, 22 nt, Human
auuuauuaugggauuuggcaca

SEQ ID NO: 157394 - RNA, 22 nt, Human
cugucuguuuuaccuucuccag

SEQ ID NO: 157395 - RNA, 22 nt, Human
ggcucagguuaccagucccucc

SEQ ID NO: 157396 - RNA, 22 nt, Human
auuuuuccaauuaggauaaaga

SEQ ID NO: 157397 - RNA, 21 nt, Human
ucuguacaucauugagucccc

SEQ ID NO: 157398 - RNA, 22 nt, Human
uugcucugacuggagugcagug

SEQ ID NO: 157399 - RNA, 19 nt, Human
ugucuuaauuaacucagag

SEQ ID NO: 157400 - RNA, 22 nt, Human
uagcagggccaggcugggaacc

SEQ ID NO: 157401 - RNA, 22 nt, Human
ggagggagcauccccuugcuga

SEQ ID NO: 157402 - RNA, 23 nt, Human
aaguucaagucacagccugucuu

SEQ ID NO: 157403 - RNA, 22 nt, Human
uugaaaggccuguuuauccagc

SEQ ID NO: 157404 - RNA, 22 nt, Human
ccaggagcaacuugaaggcaag

SEQ ID NO: 157405 - RNA, 22 nt, Human
gccuggagacaaggacaaaggg

SEQ ID NO: 157406 - RNA, 22 nt, Human
agcucucaagauaagaaagaac

SEQ ID NO: 157407 - RNA, 22 nt, Human
cagccaucccagccugugguuc

SEQ ID NO: 157408 - RNA, 22 nt, Human
agcaauauuuaaagguuugcaa

SEQ ID NO: 157409 - RNA, 22 nt, Human
ucagagugaggcgucaacauga

SEQ ID NO: 157410 - RNA, 22 nt, Human
ccagggcacguugggacaguac

SEQ ID NO: 157411 - RNA, 22 nt, Human
caggcugcagaggccuuucaug

SEQ ID NO: 157412 - RNA, 22 nt, Human
cauuucuguucucuuccuguac

SEQ ID NO: 157413 - RNA, 20 nt, Human
cugggcagguguuugaucuc

SEQ ID NO: 157414 - RNA, 18 nt, Human
uccagcgugcuccagggc

SEQ ID NO: 157415 - RNA, 22 nt, Human
ucaggggagguugaaucgucuc

SEQ ID NO: 157416 - RNA, 18 nt, Human
gcuccuggaccaggucac

SEQ ID NO: 157417 - RNA, 22 nt, Human
ccagggcaaaugagaucauagc

SEQ ID NO: 157418 - RNA, 22 nt, Human
cagugcaugaaacaauaugcag

SEQ ID NO: 157419 - RNA, 22 nt, Human
cuucaagagaaugcagggaugu

SEQ ID NO: 157420 - RNA, 22 nt, Human
ucucauguauugcccuggugug

SEQ ID NO: 157421 - RNA, 22 nt, Human
auaauuuaaauuaguaugugau

SEQ ID NO: 157422 - RNA, 22 nt, Human
ugucuucaguaaaauacacuau

SEQ ID NO: 157423 - RNA, 22 nt, Human
agugaaaugauucugagcaaga

SEQ ID NO: 157424 - RNA, 21 nt, Human
agcugccacccuagcuucuga

SEQ ID NO: 157425 - RNA, 22 nt, Human
gccugggagugcacagugaggu

SEQ ID NO: 157426 - RNA, 22 nt, Human
agccuucaaccuagcuagagca

SEQ ID NO: 157427 - RNA, 22 nt, Human
acagagguaggacaugagauau

SEQ ID NO: 157428 - RNA, 22 nt, Human
ggggcccagcaccccuccucgc

SEQ ID NO: 157429 - RNA, 22 nt, Human
gcagcguggggcugagucagcu

SEQ ID NO: 157430 - RNA, 22 nt, Human
uccagggagauacuggcugcca

SEQ ID NO: 157431 - RNA, 22 nt, Human
ccuggcagcgccgaagcuggcc

SEQ ID NO: 157432 - RNA, 22 nt, Human
ccuggcagcuguuuggcuuggc

SEQ ID NO: 157433 - RNA, 22 nt, Human
aagagcugcccaaggugaacag

SEQ ID NO: 157434 - RNA, 22 nt, Human
ccucaggggugcccacagcugc

SEQ ID NO: 157435 - RNA, 22 nt, Human
ucaaggaggugcuuggcuucac

SEQ ID NO: 157436 - RNA, 22 nt, Human
cagcuggaucccugcagaacuu

SEQ ID NO: 157437 - RNA, 22 nt, Human
guggcucuaggugagcauggag

SEQ ID NO: 157438 - RNA, 22 nt, Human
ugccuuccuggagcugaaggcu

SEQ ID NO: 157439 - RNA, 21 nt, Human
ccuauugaauauaggaagauu

SEQ ID NO: 157440 - RNA, 23 nt, Human
uccuuccuuugagaggcuccauc

SEQ ID NO: 157441 - RNA, 22 nt, Human
acauugaugaaaagguaucauu

SEQ ID NO: 157442 - RNA, 22 nt, Human
accugagggcccaaacuuggua

SEQ ID NO: 157443 - RNA, 22 nt, Human
ccucccaccguaucucaguggc

SEQ ID NO: 157444 - RNA, 22 nt, Human
aagauacugaugauguaggcua

SEQ ID NO: 157445 - RNA, 22 nt, Human
acaggcugcccgcuccccaccu

SEQ ID NO: 157446 - RNA, 22 nt, Human
gcuccaggagagggaagcagau

SEQ ID NO: 157447 - RNA, 22 nt, Human
uuagucaauagugaauauagag

SEQ ID NO: 157448 - RNA, 22 nt, Human
cagagccuuccuagcagacucu

SEQ ID NO: 157449 - RNA, 22 nt, Human
caaggcaggcaguucacuugag

SEQ ID NO: 157450 - RNA, 22 nt, Human
gggcuggcgggaaaggcaauuc

SEQ ID NO: 157451 - RNA, 22 nt, Human
gggcagugguuacacagcugag

SEQ ID NO: 157452 - RNA, 22 nt, Human
ucagagugaggcccagcaaucu

SEQ ID NO: 157453 - RNA, 22 nt, Human
ugcaugcauaaauguacacaca

SEQ ID NO: 157454 - RNA, 22 nt, Human
agaugguguuuccccaggugga

SEQ ID NO: 157455 - RNA, 22 nt, Human
agagggaucacccuguuucugg

SEQ ID NO: 157456 - RNA, 22 nt, Human
acagugaaugcccaagaaaagu

SEQ ID NO: 157457 - RNA, 22 nt, Human
ucugggagagcugcugucagag

SEQ ID NO: 157458 - RNA, 22 nt, Human
ggcuuucuagaucuagcucugu

SEQ ID NO: 157459 - RNA, 22 nt, Human
ucuggcucucaacaaauauuua

SEQ ID NO: 157460 - RNA, 21 nt, Human
agcagagugcuuugacuuugu

SEQ ID NO: 157461 - RNA, 22 nt, Human
aaagguuugcauggaauuuacc

SEQ ID NO: 157462 - RNA, 20 nt, Human
ggcagcucacuacuuucugu

SEQ ID NO: 157463 - RNA, 22 nt, Human
aagagcugauuaagucaugagg

SEQ ID NO: 157464 - RNA, 22 nt, Human
agccacagagguugaugugguu

SEQ ID NO: 157465 - RNA, 22 nt, Human
gcacccagaauaaggacaggac

SEQ ID NO: 157466 - RNA, 22 nt, Human
cuauugaauagcccaaaucauu

SEQ ID NO: 157467 - RNA, 22 nt, Human
acugucuguccugcucuccgug

SEQ ID NO: 157468 - RNA, 22 nt, Human
cccagcucaucaggagccgccc

SEQ ID NO: 157469 - RNA, 22 nt, Human
uuucucugaggcuggccucccu

SEQ ID NO: 157470 - RNA, 22 nt, Human
ccaggcagcucugauuuauguc

SEQ ID NO: 157471 - RNA, 22 nt, Human
cagagacauuaagugccaugau

SEQ ID NO: 157472 - RNA, 22 nt, Human
agccuggcccugcugaacucug

SEQ ID NO: 157473 - RNA, 22 nt, Human
gcuggccugucuagagccuuac

SEQ ID NO: 157474 - RNA, 22 nt, Human
ugcucacagcccagaacauaau

SEQ ID NO: 157475 - RNA, 22 nt, Human
ugcuucaggaagaaacgccagg

SEQ ID NO: 157476 - RNA, 21 nt, Human
agcugcuuucagcuccuagag

SEQ ID NO: 157477 - RNA, 18 nt, Human
gagguccugcucuagccc

SEQ ID NO: 157478 - RNA, 22 nt, Human
ccuggguggcagagguugcagu

SEQ ID NO: 157479 - RNA, 22 nt, Human
uggcuagcccuuguggggagag

SEQ ID NO: 157480 - RNA, 22 nt, Human
gggauggcuuuguggcugacuc

SEQ ID NO: 157481 - RNA, 22 nt, Human
aagaaauuaaugugccauuacu

SEQ ID NO: 157482 - RNA, 22 nt, Human
guggaggagaggcgccuugcgg

SEQ ID NO: 157483 - RNA, 22 nt, Human
ugcagggccgcuggaggucaug

SEQ ID NO: 157484 - RNA, 22 nt, Human
agaccacagucaggcuccuggu

SEQ ID NO: 157485 - RNA, 22 nt, Human
uugcauugugauuacagaggug

SEQ ID NO: 157486 - RNA, 22 nt, Human
cugcacagagcagggcagacac

SEQ ID NO: 157487 - RNA, 22 nt, Human
cagagcagcagagcuuccaugg

SEQ ID NO: 157488 - RNA, 22 nt, Human
cucuuccucucaugcggucaua

SEQ ID NO: 157489 - RNA, 22 nt, Human
uggccucugugggagcugagca

SEQ ID NO: 157490 - RNA, 22 nt, Human
aggugccagugcuguggucccc

SEQ ID NO: 157491 - RNA, 22 nt, Human
ccagggcaucacauccaguguu

SEQ ID NO: 157492 - RNA, 22 nt, Human
aguaaaaauugaggugcaaaau

SEQ ID NO: 157493 - RNA, 18 nt, Human
uggcucagauggcuuuaa

SEQ ID NO: 157494 - RNA, 22 nt, Human
uccagggcuggguuggcucagc

SEQ ID NO: 157495 - RNA, 22 nt, Human
agcucccagaaggcccugcgcc

SEQ ID NO: 157496 - RNA, 22 nt, Human
cccuggaggcggagcuugcagu

SEQ ID NO: 157497 - RNA, 22 nt, Human
ggccucugguucguggugaccu

SEQ ID NO: 157498 - RNA, 22 nt, Human
ccugggugaaaucucuccugca

SEQ ID NO: 157499 - RNA, 22 nt, Human
aaaugguauuuacucuguauua

SEQ ID NO: 157500 - RNA, 22 nt, Human
agcugauuccacuuuuucccca

SEQ ID NO: 157501 - RNA, 22 nt, Human
ucucagagauuuauggaaaacu

SEQ ID NO: 157502 - RNA, 22 nt, Human
auaugugugccauuucagcagu

SEQ ID NO: 157503 - RNA, 22 nt, Human
cccugccugugggcaucaacau

SEQ ID NO: 157504 - RNA, 22 nt, Human
guggagccaggggcuguaggua

SEQ ID NO: 157505 - RNA, 22 nt, Human
ugaagcaggguggccagauugu

SEQ ID NO: 157506 - RNA, 20 nt, Human
acauguacuaaugaauacag

SEQ ID NO: 157507 - RNA, 22 nt, Human
gcuggggagggcgucaaggcca

SEQ ID NO: 157508 - RNA, 22 nt, Human
gccuggagacagcagaggcggc

SEQ ID NO: 157509 - RNA, 21 nt, Human
acagccugucaucucaugguc

SEQ ID NO: 157510 - RNA, 22 nt, Human
uggcagcaaaaccagaaucaga

SEQ ID NO: 157511 - RNA, 20 nt, Human
cguaaggcaagugcugcauc

SEQ ID NO: 157512 - RNA, 22 nt, Human
gcagacuguaucaaugucagua

SEQ ID NO: 157513 - RNA, 22 nt, Human
aaaaguuuaagacucauucuag

SEQ ID NO: 157514 - RNA, 22 nt, Human
ggucucagcaguugcuuugacu

SEQ ID NO: 157515 - RNA, 22 nt, Human
aucaguuuggugcuuucaguga

SEQ ID NO: 157516 - RNA, 22 nt, Human
uauuucugaauccaaaagguca

SEQ ID NO: 157517 - RNA, 18 nt, Human
uggugaaggguggaggag

SEQ ID NO: 157518 - RNA, 22 nt, Human
cuguccuugcuggccagguaug

SEQ ID NO: 157519 - RNA, 22 nt, Human
aggucauuggggacuaucuccg

SEQ ID NO: 157520 - RNA, 22 nt, Human
aaguucaagaucaagguuccag

SEQ ID NO: 157521 - RNA, 22 nt, Human
agcaggagcugugggaagaugg

SEQ ID NO: 157522 - RNA, 22 nt, Human
aguuaaagucugaaauagagaa

SEQ ID NO: 157523 - RNA, 22 nt, Human
cugugcaguaggucagggcugg

SEQ ID NO: 157524 - RNA, 22 nt, Human
gggugggccacugagcagcgug

SEQ ID NO: 157525 - RNA, 22 nt, Human
ggcacugggcaccggcugaggg

SEQ ID NO: 157526 - RNA, 22 nt, Human
uauuucuggcuuugagggugau

SEQ ID NO: 157527 - RNA, 22 nt, Human
gccauccucugagcacuaggca

SEQ ID NO: 157528 - RNA, 22 nt, Human
cccagccugucuuucccaauga

SEQ ID NO: 157529 - RNA, 22 nt, Human
gugccugugccaggggugugcu

SEQ ID NO: 157530 - RNA, 22 nt, Human
gcagggacaaggcagguguucu

SEQ ID NO: 157531 - RNA, 22 nt, Human
cagccucucuguaucucaggau

SEQ ID NO: 157532 - RNA, 22 nt, Human
ucaagaaagggcuucaccagga

SEQ ID NO: 157533 - RNA, 22 nt, Human
agucccagccuguaggauuggg

SEQ ID NO: 157534 - RNA, 22 nt, Human
ugaagccaucccucagauggcc

SEQ ID NO: 157535 - RNA, 22 nt, Human
gggagggaaggaggcgccgugu

SEQ ID NO: 157536 - RNA, 22 nt, Human
ccagggugugggcgucggcacg

SEQ ID NO: 157537 - RNA, 22 nt, Human
acaggcugcugggcuccgugcu

SEQ ID NO: 157538 - RNA, 19 nt, Human
ugggccugcaucugggucu

SEQ ID NO: 157539 - RNA, 22 nt, Human
ugccagcacuucuggcugucug

SEQ ID NO: 157540 - RNA, 22 nt, Human
uaugcauagguaucuauacuca

SEQ ID NO: 157541 - RNA, 22 nt, Human
uuguuuuggagaugagcuaaaa

SEQ ID NO: 157542 - RNA, 19 nt, Human
gccugcagaaaaggcaggg

SEQ ID NO: 157543 - RNA, 22 nt, Human
caaaugcuaacuucuuuccaaa

SEQ ID NO: 157544 - RNA, 22 nt, Human
gagccuucaucgcagccuuguu

SEQ ID NO: 157545 - RNA, 22 nt, Human
gcaggaugaaggcagaggcuga

SEQ ID NO: 157546 - RNA, 22 nt, Human
uacauggguagguuaagucaua

SEQ ID NO: 157547 - RNA, 22 nt, Human
ucucagagugguggucccucug

SEQ ID NO: 157548 - RNA, 22 nt, Human
augcacgccccacacuggugug

SEQ ID NO: 157549 - RNA, 22 nt, Human
agagucugaggcagcugcagcc

SEQ ID NO: 157550 - RNA, 20 nt, Human
agcugaggcaccugagguua

SEQ ID NO: 157551 - RNA, 22 nt, Human
cugccuuccaaccccagacucc

SEQ ID NO: 157552 - RNA, 22 nt, Human
cuggcagcccaaccuagagucu

SEQ ID NO: 157553 - RNA, 22 nt, Human
gaugaagccugacuucucggug

SEQ ID NO: 157554 - RNA, 22 nt, Human
ccucagaguaggucucagcugu

SEQ ID NO: 157555 - RNA, 22 nt, Human
uggaggcauaggccugggcccu

SEQ ID NO: 157556 - RNA, 22 nt, Human
gaugggaggaaccugggucccu

SEQ ID NO: 157557 - RNA, 22 nt, Human
gcugggagcccuggucugcucc

SEQ ID NO: 157558 - RNA, 22 nt, Human
ucagggacauuuagacacugau

SEQ ID NO: 157559 - RNA, 22 nt, Human
ugcuuaauauugugauguaaua

SEQ ID NO: 157560 - RNA, 22 nt, Human
gagcagcuccagccgcaugacu

SEQ ID NO: 157561 - RNA, 22 nt, Human
gugcagcagggggaagacagug

SEQ ID NO: 157562 - RNA, 22 nt, Human
uguagcauguaaauugguuauu

SEQ ID NO: 157563 - RNA, 22 nt, Human
gaacccaguccaggugcagccu

SEQ ID NO: 157564 - RNA, 22 nt, Human
gagugagggcagcaggggcugc

SEQ ID NO: 157565 - RNA, 22 nt, Human
accugggagucacaccugagaa

SEQ ID NO: 157566 - RNA, 22 nt, Human
aaugcacauauauguguauaca

SEQ ID NO: 157567 - RNA, 22 nt, Human
caguugaugggacucauguggg

SEQ ID NO: 157568 - RNA, 22 nt, Human
cccagcuccuuacagggccgaa

SEQ ID NO: 157569 - RNA, 22 nt, Human
aaaaauguuaucuacuguccga

SEQ ID NO: 157570 - RNA, 22 nt, Human
caagugucuauaucagugcuug

SEQ ID NO: 157571 - RNA, 22 nt, Human
cuguccuccggccaccuacagu

SEQ ID NO: 157572 - RNA, 22 nt, Human
ggcugcuguuucagagacuguu

SEQ ID NO: 157573 - RNA, 22 nt, Human
cccagcucucugcucuuagccu

SEQ ID NO: 157574 - RNA, 22 nt, Human
acugcaggagacacagcugcug

SEQ ID NO: 157575 - RNA, 18 nt, Human
agagaugguguagaguuu

SEQ ID NO: 157576 - RNA, 22 nt, Human
uggagcugggaguccugggcug

SEQ ID NO: 157577 - RNA, 22 nt, Human
cccagggucccugcucucugug

SEQ ID NO: 157578 - RNA, 22 nt, Human
cuccucccucuuugccacacau

SEQ ID NO: 157579 - RNA, 22 nt, Human
uuauugccugauugaggucauu

SEQ ID NO: 157580 - RNA, 22 nt, Human
cuggggcuucaaugcuucggug

SEQ ID NO: 157581 - RNA, 22 nt, Human
aggccuccugcagggaugagug

SEQ ID NO: 157582 - RNA, 22 nt, Human
aaagaacaucggagugggcggg

SEQ ID NO: 157583 - RNA, 22 nt, Human
ucucccaggugggugccuggag

SEQ ID NO: 157584 - RNA, 22 nt, Human
gagucccaugaugauagccaca

SEQ ID NO: 157585 - RNA, 22 nt, Human
auucuucauguugaagcuguca

SEQ ID NO: 157586 - RNA, 20 nt, Human
gagccuuccccucaccacug

SEQ ID NO: 157587 - RNA, 22 nt, Human
ugcucugugguccaagauggcu

SEQ ID NO: 157588 - RNA, 22 nt, Human
ccacugucagaggggcugugcc

SEQ ID NO: 157589 - RNA, 22 nt, Human
ucucauucauacccuacaugcu

SEQ ID NO: 157590 - RNA, 23 nt, Human
acaaaugcccauacaucuaguuc

SEQ ID NO: 157591 - RNA, 18 nt, Human
ucuggcucaggacugaac

SEQ ID NO: 157592 - RNA, 22 nt, Human
uaggcaggugugcacugcccac

SEQ ID NO: 157593 - RNA, 22 nt, Human
cagcaggcccaggugcugguga

SEQ ID NO: 157594 - RNA, 22 nt, Human
cuggugugauugagcccaggug

SEQ ID NO: 157595 - RNA, 22 nt, Human
ccauuguaaagaguauacuuug

SEQ ID NO: 157596 - RNA, 22 nt, Human
gagcccuggcagucugggaugg

SEQ ID NO: 157597 - RNA, 22 nt, Human
gcuccuggucuggagcuucaag

SEQ ID NO: 157598 - RNA, 22 nt, Human
caggcagcaucagucugcugua

SEQ ID NO: 157599 - RNA, 22 nt, Human
ugcuagaauaccuaccuggagg

SEQ ID NO: 157600 - RNA, 22 nt, Human
uuuuccucugagcuuugaauaa

SEQ ID NO: 157601 - RNA, 16 nt, Human
uguuagcugugcauua

SEQ ID NO: 157602 - RNA, 19 nt, Human
uuagaaacuguugacacug

SEQ ID NO: 157603 - RNA, 21 nt, Human
guuugcaugaacaagucagcc

SEQ ID NO: 157604 - RNA, 22 nt, Human
cggcuggguagaggugccgggu

SEQ ID NO: 157605 - RNA, 22 nt, Human
gucccagaggcuuuggccacag

SEQ ID NO: 157606 - RNA, 22 nt, Human
gccugaaguuucaugccucuau

SEQ ID NO: 157607 - RNA, 22 nt, Human
cuggagcccaggccuggugucu

SEQ ID NO: 157608 - RNA, 22 nt, Human
ucuagaaaaaaacugcugugga

SEQ ID NO: 157609 - RNA, 22 nt, Human
cugccugcuucugagccagagg

SEQ ID NO: 157610 - RNA, 22 nt, Human
gccugcagauauauaggauggu

SEQ ID NO: 157611 - RNA, 22 nt, Human
ucugagggugggagaaggagcu

SEQ ID NO: 157612 - RNA, 22 nt, Human
ucagagugaccuuacauggucu

SEQ ID NO: 157613 - RNA, 22 nt, Human
agccugagagccaagcugugca

SEQ ID NO: 157614 - RNA, 22 nt, Human
ccaaaugcuccacugacuuugg

SEQ ID NO: 157615 - RNA, 23 nt, Human
agcuggguggccugcgugaagcu

SEQ ID NO: 157616 - RNA, 22 nt, Human
ucuuugcaaauguuauuaucuu

SEQ ID NO: 157617 - RNA, 22 nt, Human
cuugcuuuguccagaaauucag

SEQ ID NO: 157618 - RNA, 22 nt, Human
aguaacuaugcuugagaaucag

SEQ ID NO: 157619 - RNA, 22 nt, Human
cuggcagggugggcuuugcuuu

SEQ ID NO: 157620 - RNA, 22 nt, Human
agaugauggccauguccucucc

SEQ ID NO: 157621 - RNA, 22 nt, Human
ggcagugguuagaaacaugagc

SEQ ID NO: 157622 - RNA, 22 nt, Human
uguguauuaccauuuuacagcu

SEQ ID NO: 157623 - RNA, 22 nt, Human
gcuggagccaagcugcucuugg

SEQ ID NO: 157624 - RNA, 22 nt, Human
ugcagcagcagggaggaggcuc

SEQ ID NO: 157625 - RNA, 22 nt, Human
ggggcuguuuuuggaauggcug

SEQ ID NO: 157626 - RNA, 22 nt, Human
cuggucugagggcucuugaggc

SEQ ID NO: 157627 - RNA, 22 nt, Human
uuccaugugaguacacugugau

SEQ ID NO: 157628 - RNA, 22 nt, Human
aagggcagcugacagaugcuua

SEQ ID NO: 157629 - RNA, 22 nt, Human
acagguggcuuauuggcugauu

SEQ ID NO: 157630 - RNA, 18 nt, Human
ccugcagcccaggaggcc

SEQ ID NO: 157631 - RNA, 22 nt, Human
auucuaggcuugaaacaugaag

SEQ ID NO: 157632 - RNA, 22 nt, Human
agaaaugcucuuccugaccaga

SEQ ID NO: 157633 - RNA, 18 nt, Human
gcugagguggugucagag

SEQ ID NO: 157634 - RNA, 22 nt, Human
gaccagagaaaggcacuggaag

SEQ ID NO: 157635 - RNA, 22 nt, Human
ucaaauguucccuguacuggcc

SEQ ID NO: 157636 - RNA, 22 nt, Human
ucuggcucaaaauacguacucu

SEQ ID NO: 157637 - RNA, 22 nt, Human
auaaggcaagcugucaguuugu

SEQ ID NO: 157638 - RNA, 22 nt, Human
uggcagggaauacagauguuua

SEQ ID NO: 157639 - RNA, 22 nt, Human
acagccuguguaccagcuggga

SEQ ID NO: 157640 - RNA, 22 nt, Human
aggcacugaagugguaaaugua

SEQ ID NO: 157641 - RNA, 21 nt, Human
ugagccaggcugacggcugug

SEQ ID NO: 157642 - RNA, 22 nt, Human
uggagcaggugcucaggguaau

SEQ ID NO: 157643 - RNA, 22 nt, Human
gccugccuagaauugcagcuuu

SEQ ID NO: 157644 - RNA, 22 nt, Human
gaaugcagauggcugguguaug

SEQ ID NO: 157645 - RNA, 22 nt, Human
gagcacagccaaaguaagaagg

SEQ ID NO: 157646 - RNA, 22 nt, Human
aaauguguuuagaugguuuauu

SEQ ID NO: 157647 - RNA, 22 nt, Human
uucugggacaucuggacaguuu

SEQ ID NO: 157648 - RNA, 22 nt, Human
ggcuccagggaguggagagaag

SEQ ID NO: 157649 - RNA, 22 nt, Human
gaauuguagagggaacagaagc

SEQ ID NO: 157650 - RNA, 22 nt, Human
gcccaggcuagcguagagugca

SEQ ID NO: 157651 - RNA, 22 nt, Human
agcccccaaaagugcuuaugau

SEQ ID NO: 157652 - RNA, 22 nt, Human
gucccuggaucugggacagcug

SEQ ID NO: 157653 - RNA, 22 nt, Human
agccaagcaccacuggcacucg

SEQ ID NO: 157654 - RNA, 22 nt, Human
ucuggccuuaucuguccaagcc

SEQ ID NO: 157655 - RNA, 22 nt, Human
gagccagccuucuucugagguc

SEQ ID NO: 157656 - RNA, 22 nt, Human
acauuugucuucuuucagauua

SEQ ID NO: 157657 - RNA, 21 nt, Human
aagcuucccugcucuccaggg

SEQ ID NO: 157658 - RNA, 22 nt, Human
aggaggugacagccugcaucug

SEQ ID NO: 157659 - RNA, 22 nt, Human
uugcaccauuucacuuccauua

SEQ ID NO: 157660 - RNA, 22 nt, Human
cagguggggcgcccucaggcag

SEQ ID NO: 157661 - RNA, 22 nt, Human
acagcagcgucaacuuaaaauu

SEQ ID NO: 157662 - RNA, 22 nt, Human
ucccagagacaucauuucuccg

SEQ ID NO: 157663 - RNA, 22 nt, Human
uucacaggugacuggggauaac

SEQ ID NO: 157664 - RNA, 22 nt, Human
caggaggcccaaagggcgcaga

SEQ ID NO: 157665 - RNA, 22 nt, Human
caggcuggagugcaguugugca

SEQ ID NO: 157666 - RNA, 22 nt, Human
cagucccacuagugccaauacc

SEQ ID NO: 157667 - RNA, 22 nt, Human
uucugaggcacuggcucuccca

SEQ ID NO: 157668 - RNA, 22 nt, Human
uuaggaaauuaugguuucagau

SEQ ID NO: 157669 - RNA, 22 nt, Human
uaguaucuauuaguaacaagag

SEQ ID NO: 157670 - RNA, 22 nt, Human
gccuuggccuuccuaggccuga

SEQ ID NO: 157671 - RNA, 22 nt, Human
ccagaggucuccugcacgggau

SEQ ID NO: 157672 - RNA, 23 nt, Human
ccuggcagcaaacgaggagguua

SEQ ID NO: 157673 - RNA, 22 nt, Human
gcacccagggacuuggcuggcc

SEQ ID NO: 157674 - RNA, 22 nt, Human
aggccuccuggcuccaggccuu

SEQ ID NO: 157675 - RNA, 22 nt, Human
uugcauaaagauuuuauugcau

SEQ ID NO: 157676 - RNA, 21 nt, Human
ucuggagcccuaagcugagaa

SEQ ID NO: 157677 - RNA, 18 nt, Human
uuccauaauguauguaac

SEQ ID NO: 157678 - RNA, 22 nt, Human
augacagaaggccucccugaca

SEQ ID NO: 157679 - RNA, 21 nt, Human
gccugcagaccccaccaggcu

SEQ ID NO: 157680 - RNA, 22 nt, Human
auuguaucuugucauuaugcau

SEQ ID NO: 157681 - RNA, 22 nt, Human
ggagcagagcucuucaucugca

SEQ ID NO: 157682 - RNA, 22 nt, Human
gcugggcuucucaaugcugccu

SEQ ID NO: 157683 - RNA, 22 nt, Human
gcagcaaucuucacagugucau

SEQ ID NO: 157684 - RNA, 21 nt, Human
uggcucaguugcugggcacag

SEQ ID NO: 157685 - RNA, 22 nt, Human
gccuggugaaaggcagagagcg

SEQ ID NO: 157686 - RNA, 20 nt, Human
agaggcuuccuugggaggag

SEQ ID NO: 157687 - RNA, 20 nt, Human
aggaacuggaagggaggaaa

SEQ ID NO: 157688 - RNA, 22 nt, Human
agcagcuuacauguggccuauc

SEQ ID NO: 157689 - RNA, 19 nt, Human
gaaggagagcugaguuagg

SEQ ID NO: 157690 - RNA, 22 nt, Human
aaaguuuuagaacuaggaagca

SEQ ID NO: 157691 - RNA, 22 nt, Human
gggugggaacaggaugccagga

SEQ ID NO: 157692 - RNA, 22 nt, Human
uaaaugugucuuuuuaaggccu

SEQ ID NO: 157693 - RNA, 22 nt, Human
aaagccuugggauuugugauca

SEQ ID NO: 157694 - RNA, 17 nt, Human
agaugcuggccacaugu

SEQ ID NO: 157695 - RNA, 22 nt, Human
cugcagcuccccugagaucaag

SEQ ID NO: 157696 - RNA, 19 nt, Human
uggcagaggcaguuuguac

SEQ ID NO: 157697 - RNA, 22 nt, Human
ugccuucaaucaggauggucuc

SEQ ID NO: 157698 - RNA, 22 nt, Human
gcugccugggcaggaggcgcug

SEQ ID NO: 157699 - RNA, 22 nt, Human
agcagagaagacacaggcuuca

SEQ ID NO: 157700 - RNA, 22 nt, Human
gggcacugaaugccaagcuagg

SEQ ID NO: 157701 - RNA, 22 nt, Human
acagggccauuaucuguucuag

SEQ ID NO: 157702 - RNA, 23 nt, Human
gcugcagcuguggauguucucag

SEQ ID NO: 157703 - RNA, 17 nt, Human
cccugccaccaggaagc

SEQ ID NO: 157704 - RNA, 19 nt, Human
cagaccuguccagccugug

SEQ ID NO: 157705 - RNA, 22 nt, Human
aggggccugguuggccucuguu

SEQ ID NO: 157706 - RNA, 22 nt, Human
ugccugggccuucccaccucug

SEQ ID NO: 157707 - RNA, 22 nt, Human
uggcucagucuggguugacuga

SEQ ID NO: 157708 - RNA, 22 nt, Human
auaaggaaugauguaucaguuu

SEQ ID NO: 157709 - RNA, 22 nt, Human
cauugacaucaggcuuggccaa

SEQ ID NO: 157710 - RNA, 22 nt, Human
cuugaaagucacaugcagcccu

SEQ ID NO: 157711 - RNA, 22 nt, Human
uggcagcaaguucuugggaggu

SEQ ID NO: 157712 - RNA, 21 nt, Human
cugguguagcacucaggugcu

SEQ ID NO: 157713 - RNA, 23 nt, Human
acuuuagauaaauuaugugcaca

SEQ ID NO: 157714 - RNA, 22 nt, Human
aagauuucagaguuugggggaa

SEQ ID NO: 157715 - RNA, 22 nt, Human
aggagcugggcugcugcuggga

SEQ ID NO: 157716 - RNA, 22 nt, Human
ucaaaguuuuugagaauuacau

SEQ ID NO: 157717 - RNA, 22 nt, Human
ucaguuuucucauuuaugagau

SEQ ID NO: 157718 - RNA, 22 nt, Human
auuguaauuuuagagaaagugg

SEQ ID NO: 157719 - RNA, 22 nt, Human
uagcagagcagggaucagagcc

SEQ ID NO: 157720 - RNA, 22 nt, Human
acacaggggaaaguggagcuga

SEQ ID NO: 157721 - RNA, 22 nt, Human
aagggcagagggaaucccacau

SEQ ID NO: 157722 - RNA, 21 nt, Human
aguguccuugaucuugccuug

SEQ ID NO: 157723 - RNA, 22 nt, Human
gaggaugugucuggucugggca

SEQ ID NO: 157724 - RNA, 22 nt, Human
ucuguucuauuggucuaugugu

SEQ ID NO: 157725 - RNA, 22 nt, Human
ccagcccuccuccaucagagga

SEQ ID NO: 157726 - RNA, 22 nt, Human
aaacaugagcaucucuucaagc

SEQ ID NO: 157727 - RNA, 22 nt, Human
ugggccugggucuuugcugcca

SEQ ID NO: 157728 - RNA, 22 nt, Human
gugccugccccacuccucagca

SEQ ID NO: 157729 - RNA, 21 nt, Human
gagugcaggucugaugccauc

SEQ ID NO: 157730 - RNA, 22 nt, Human
ucuggaguccagauccauuugg

SEQ ID NO: 157731 - RNA, 22 nt, Human
aaggcccuggccccagcuucuu

SEQ ID NO: 157732 - RNA, 21 nt, Human
gcagacugcccugcugucccc

SEQ ID NO: 157733 - RNA, 22 nt, Human
cuggggcccaucgagggcugag

SEQ ID NO: 157734 - RNA, 22 nt, Human
agaggucagaacaggaaagugu

SEQ ID NO: 157735 - RNA, 22 nt, Human
auuguauuagcacaauacaauu

SEQ ID NO: 157736 - RNA, 22 nt, Human
cagaaauguuuauauguggugu

SEQ ID NO: 157737 - RNA, 22 nt, Human
aguggcaggaaaguggaagaga

SEQ ID NO: 157738 - RNA, 22 nt, Human
ccagcugguuaaaauagagaaa

SEQ ID NO: 157739 - RNA, 22 nt, Human
uccauguggccagacacuggca

SEQ ID NO: 157740 - RNA, 22 nt, Human
aaggcucucugauggcagcagu

SEQ ID NO: 157741 - RNA, 22 nt, Human
acauuucuuagccuaguuccag

SEQ ID NO: 157742 - RNA, 22 nt, Human
ggggaugguagaccggugacgu

SEQ ID NO: 157743 - RNA, 22 nt, Human
uugcauugaucccagcuugggc

SEQ ID NO: 157744 - RNA, 22 nt, Human
agaauccugaugaaaaggagag

SEQ ID NO: 157745 - RNA, 19 nt, Human
uggcucugucgaaggcaca

SEQ ID NO: 157746 - RNA, 22 nt, Human
gaagaacaccugcugcccagug

SEQ ID NO: 157747 - RNA, 22 nt, Human
ccagagccucuuaugaagaucg

SEQ ID NO: 157748 - RNA, 22 nt, Human
aguguuccugcucucaggaagc

SEQ ID NO: 157749 - RNA, 22 nt, Human
ccacagcaugcaggccugacac

SEQ ID NO: 157750 - RNA, 22 nt, Human
ggaggccuugaggccaggagcu

SEQ ID NO: 157751 - RNA, 22 nt, Human
uaugcacagaaguuugcugaau

SEQ ID NO: 157752 - RNA, 22 nt, Human
agcucccugagaugccacagca

SEQ ID NO: 157753 - RNA, 22 nt, Human
cugaaggaagcagguggccugu

SEQ ID NO: 157754 - RNA, 22 nt, Human
cacuguguaagaagaugggcuu

SEQ ID NO: 157755 - RNA, 22 nt, Human
aaagucauguaaugauaugauu

SEQ ID NO: 157756 - RNA, 22 nt, Human
caggacaguauaggcuuuagga

SEQ ID NO: 157757 - RNA, 22 nt, Human
caggguggggcuggcuaucaaa

SEQ ID NO: 157758 - RNA, 22 nt, Human
uccuugaauggacauuacacug

SEQ ID NO: 157759 - RNA, 22 nt, Human
uggacucagugcugccauuccc

SEQ ID NO: 157760 - RNA, 22 nt, Human
aagcaauaagccagauuuggau

SEQ ID NO: 157761 - RNA, 22 nt, Human
agccagcuggagaccacuguuu

SEQ ID NO: 157762 - RNA, 22 nt, Human
ucugcugcacaaauucaucucu

SEQ ID NO: 157763 - RNA, 20 nt, Human
ucugucucugagcuagacuu

SEQ ID NO: 157764 - RNA, 22 nt, Human
gugcauuggugcgccacuucac

SEQ ID NO: 157765 - RNA, 22 nt, Human
augagcugggccauccagugau

SEQ ID NO: 157766 - RNA, 22 nt, Human
ugcucuggaguggcuugugcac

SEQ ID NO: 157767 - RNA, 22 nt, Human
ggcagcucugugucugggaagc

SEQ ID NO: 157768 - RNA, 22 nt, Human
cagggccagcgucucgggcuau

SEQ ID NO: 157769 - RNA, 22 nt, Human
acuuggagagcauugcugggga

SEQ ID NO: 157770 - RNA, 22 nt, Human
agucaguguucuccggagaggc

SEQ ID NO: 157771 - RNA, 22 nt, Human
cuggagccggcgagccccagcc

SEQ ID NO: 157772 - RNA, 22 nt, Human
uagaaaugcccagauucugcua

SEQ ID NO: 157773 - RNA, 22 nt, Human
uccuccagugucuggggccuug

SEQ ID NO: 157774 - RNA, 22 nt, Human
agaggcuguuacacucccagau

SEQ ID NO: 157775 - RNA, 22 nt, Human
gaggagagagggacugucugca

SEQ ID NO: 157776 - RNA, 22 nt, Human
uaggacaggugaggggcugugg

SEQ ID NO: 157777 - RNA, 22 nt, Human
cagaguacugggagaacagaag

SEQ ID NO: 157778 - RNA, 22 nt, Human
gagauggggaauaggagcaagc

SEQ ID NO: 157779 - RNA, 22 nt, Human
augcaguagauaggcacuuuua

SEQ ID NO: 157780 - RNA, 22 nt, Human
uguggccucaaggcugcccuca

SEQ ID NO: 157781 - RNA, 22 nt, Human
caggaaaaaugccaggagucag

SEQ ID NO: 157782 - RNA, 22 nt, Human
gagcagagacaguacaacuggc

SEQ ID NO: 157783 - RNA, 22 nt, Human
cgggcagauugggaagguucau

SEQ ID NO: 157784 - RNA, 22 nt, Human
agucucugagguucagaugccu

SEQ ID NO: 157785 - RNA, 22 nt, Human
agcaugcacaugacuggcuuaa

SEQ ID NO: 157786 - RNA, 22 nt, Human
cuggcccagagagcagagcuua

SEQ ID NO: 157787 - RNA, 22 nt, Human
ccagcuccaaguuugggcauca

SEQ ID NO: 157788 - RNA, 22 nt, Human
ucucugauguauaucagagaac

SEQ ID NO: 157789 - RNA, 22 nt, Human
ucagaagcugguguccuuugaa

SEQ ID NO: 157790 - RNA, 22 nt, Human
ucucaggaagauuagggcuaag

SEQ ID NO: 157791 - RNA, 22 nt, Human
ugauuaacugucuauuaaucau

SEQ ID NO: 157792 - RNA, 17 nt, Human
gguggccugcaguggcu

SEQ ID NO: 157793 - RNA, 23 nt, Human
aagcugccagucugaagccuggg

SEQ ID NO: 157794 - RNA, 22 nt, Human
gggcucugcgcucagcuccagc

SEQ ID NO: 157795 - RNA, 22 nt, Human
caagaacauugugaucacuuca

SEQ ID NO: 157796 - RNA, 22 nt, Human
uguuaaauguuccuuuacugga

SEQ ID NO: 157797 - RNA, 22 nt, Human
aucaguuuauacuuauaaaucu

SEQ ID NO: 157798 - RNA, 22 nt, Human
uugcagggcaggaccauggaca

SEQ ID NO: 157799 - RNA, 22 nt, Human
ggcugccuacuuucccagaguu

SEQ ID NO: 157800 - RNA, 22 nt, Human
ggagcugggguuggcaucuucc

SEQ ID NO: 157801 - RNA, 22 nt, Human
cuggcucuaucuccaaggcugg

SEQ ID NO: 157802 - RNA, 22 nt, Human
ucccagggcagcuguccagaag

SEQ ID NO: 157803 - RNA, 22 nt, Human
cagcuggccugaucccuguggc

SEQ ID NO: 157804 - RNA, 22 nt, Human
cugguuuagcuguaagguuccc

SEQ ID NO: 157805 - RNA, 23 nt, Human
cuuuccuuucuuugacacccagc

SEQ ID NO: 157806 - RNA, 22 nt, Human
uaacagaagagcaggcagcccu

SEQ ID NO: 157807 - RNA, 22 nt, Human
agcaauauuucagcuagcaggu

SEQ ID NO: 157808 - RNA, 22 nt, Human
agccacagucugaugccugaga

SEQ ID NO: 157809 - RNA, 22 nt, Human
ucugaggcuucagacuguacug

SEQ ID NO: 157810 - RNA, 22 nt, Human
uguauacauuuaacuagauaga

SEQ ID NO: 157811 - RNA, 22 nt, Human
gaggcucugugaugugccaggc

SEQ ID NO: 157812 - RNA, 22 nt, Human
agccuggaggaggaguugagca

SEQ ID NO: 157813 - RNA, 22 nt, Human
gauuucaaccuaacaguaugac

SEQ ID NO: 157814 - RNA, 22 nt, Human
auagaaaacagauguccuuaaa

SEQ ID NO: 157815 - RNA, 22 nt, Human
gcagcugccgugagcucacgcc

SEQ ID NO: 157816 - RNA, 22 nt, Human
ucucagaguuuagagcugagcc

SEQ ID NO: 157817 - RNA, 22 nt, Human
agagcugggacuuggacucaau

SEQ ID NO: 157818 - RNA, 22 nt, Human
ggccucaguuucuucaacugua

SEQ ID NO: 157819 - RNA, 22 nt, Human
cccagcagaaucugaugagggc

SEQ ID NO: 157820 - RNA, 22 nt, Human
gcucaggacuggaggagcgggg

SEQ ID NO: 157821 - RNA, 22 nt, Human
agagaggcugggcguagggcuu

SEQ ID NO: 157822 - RNA, 22 nt, Human
caggggcuuuuccucuauaagg

SEQ ID NO: 157823 - RNA, 22 nt, Human
ccaaggcuucccagagaugcuc

SEQ ID NO: 157824 - RNA, 23 nt, Human
aacaccaaggcucagagagauaa

SEQ ID NO: 157825 - RNA, 22 nt, Human
agggccagaaucccucagucua

SEQ ID NO: 157826 - RNA, 22 nt, Human
agagcagagggcucugggacaa

SEQ ID NO: 157827 - RNA, 22 nt, Human
auggauaauggugauaguugca

SEQ ID NO: 157828 - RNA, 22 nt, Human
agugaggcuaauaggcaauggu

SEQ ID NO: 157829 - RNA, 18 nt, Human
caggaugagugaugggga

SEQ ID NO: 157830 - RNA, 22 nt, Human
ccugggaagagcugacaggagg

SEQ ID NO: 157831 - RNA, 22 nt, Human
caggaugggauguagugggccc

SEQ ID NO: 157832 - RNA, 21 nt, Human
cagaggggcuagccuggcugc

SEQ ID NO: 157833 - RNA, 22 nt, Human
aaaaguucccugguuagaaaag

SEQ ID NO: 157834 - RNA, 22 nt, Human
gcaaggcugcugccacccaucu

SEQ ID NO: 157835 - RNA, 22 nt, Human
uaagaacagauaaaguuucccc

SEQ ID NO: 157836 - RNA, 22 nt, Human
guguaauuauauaaagaucuac

SEQ ID NO: 157837 - RNA, 22 nt, Human
agcagcucugagaggccagcac

SEQ ID NO: 157838 - RNA, 22 nt, Human
uugaagcauuugcuauagcauu

SEQ ID NO: 157839 - RNA, 22 nt, Human
gugcuucucuucacacccaacu

SEQ ID NO: 157840 - RNA, 22 nt, Human
gcagcagaguuugggagauggu

SEQ ID NO: 157841 - RNA, 18 nt, Human
cauuguacaaugcuuuau

SEQ ID NO: 157842 - RNA, 22 nt, Human
gggcuucuagaccagcagugag

SEQ ID NO: 157843 - RNA, 22 nt, Human
uuggcugagagaggaaaagggc

SEQ ID NO: 157844 - RNA, 22 nt, Human
uaucuuuaacuugcaguauuua

SEQ ID NO: 157845 - RNA, 22 nt, Human
aaaugcacaauaaaguaaaggc

SEQ ID NO: 157846 - RNA, 18 nt, Human
gagaggcccggcugugcc

SEQ ID NO: 157847 - RNA, 22 nt, Human
ccugccuggaucagccauccug

SEQ ID NO: 157848 - RNA, 22 nt, Human
uagaaaucagcaggcauaugua

SEQ ID NO: 157849 - RNA, 22 nt, Human
ccugugcccucagccuggcucu

SEQ ID NO: 157850 - RNA, 22 nt, Human
uggcuccuaggauggugccugg

SEQ ID NO: 157851 - RNA, 22 nt, Human
ccagggugugagaaggaaguag

SEQ ID NO: 157852 - RNA, 22 nt, Human
aagauuuagggccaguuuacau

SEQ ID NO: 157853 - RNA, 22 nt, Human
ggcagucagugugguucauaaa

SEQ ID NO: 157854 - RNA, 23 nt, Human
aggcuuccuaucuuagagcuggg

SEQ ID NO: 157855 - RNA, 22 nt, Human
agaggcaggagguugacuugag

SEQ ID NO: 157856 - RNA, 22 nt, Human
uccuggccugucuggaguagcu

SEQ ID NO: 157857 - RNA, 22 nt, Human
cugagaaggaagccuccacucu

SEQ ID NO: 157858 - RNA, 22 nt, Human
ugaagcaguucucagaaguggg

SEQ ID NO: 157859 - RNA, 22 nt, Human
gaaaugcagaaccugagaccau

SEQ ID NO: 157860 - RNA, 22 nt, Human
uccuugaaugaauguucucucc

SEQ ID NO: 157861 - RNA, 22 nt, Human
aaucaguucuacaucuuaucca

SEQ ID NO: 157862 - RNA, 22 nt, Human
gcucacagccggcuggcagggg

SEQ ID NO: 157863 - RNA, 22 nt, Human
ggcaccuggagguuuacuggau

SEQ ID NO: 157864 - RNA, 22 nt, Human
cugggcuacguguugacagcau

SEQ ID NO: 157865 - RNA, 22 nt, Human
ggaggccaguccuggccgggcu

SEQ ID NO: 157866 - RNA, 22 nt, Human
ggccaggaagggaagaucagca

SEQ ID NO: 157867 - RNA, 22 nt, Human
uggcucagcagguuagaaacua

SEQ ID NO: 157868 - RNA, 22 nt, Human
uaaaugcaagugcuccugggag

SEQ ID NO: 157869 - RNA, 23 nt, Human
uguaaaaugggguaguguuacca

SEQ ID NO: 157870 - RNA, 22 nt, Human
ccaggcugcuuagccuuaucuu

SEQ ID NO: 157871 - RNA, 21 nt, Human
aggcagcucaggcccagagag

SEQ ID NO: 157872 - RNA, 22 nt, Human
aagagcauauuaauaguggaga

SEQ ID NO: 157873 - RNA, 22 nt, Human
cuggagccggaccagggacggu

SEQ ID NO: 157874 - RNA, 22 nt, Human
gcagacagcauguugggcuauu

SEQ ID NO: 157875 - RNA, 22 nt, Human
uucagcagucguccaggaaaag

SEQ ID NO: 157876 - RNA, 22 nt, Human
ucucaagcuuguugguauguuu

SEQ ID NO: 157877 - RNA, 22 nt, Human
accugagcaugccaggagagug

SEQ ID NO: 157878 - RNA, 22 nt, Human
caggccugauacacugaacucu

SEQ ID NO: 157879 - RNA, 22 nt, Human
agggggaggcugugcugcgucu

SEQ ID NO: 157880 - RNA, 22 nt, Human
uguguuccuucgucuucccuuc

SEQ ID NO: 157881 - RNA, 17 nt, Human
cccagcuggcagugccg

SEQ ID NO: 157882 - RNA, 18 nt, Human
ccgggcuuuggugacaca

SEQ ID NO: 157883 - RNA, 22 nt, Human
uggagcugacucacaccagcua

SEQ ID NO: 157884 - RNA, 20 nt, Human
aagcagaagcugcucucagc

SEQ ID NO: 157885 - RNA, 22 nt, Human
gcugugugcucacguaguggaa

SEQ ID NO: 157886 - RNA, 22 nt, Human
gcugccugauguccagcaggac

SEQ ID NO: 157887 - RNA, 22 nt, Human
ccagaggcauguucaaagcaau

SEQ ID NO: 157888 - RNA, 23 nt, Human
ccugaagggucaggguccucagc

SEQ ID NO: 157889 - RNA, 22 nt, Human
ccaggaggcggaagguacagug

SEQ ID NO: 157890 - RNA, 22 nt, Human
ucacagugaugacgugggagca

SEQ ID NO: 157891 - RNA, 22 nt, Human
cucuuuccaggguaccccaggu

SEQ ID NO: 157892 - RNA, 22 nt, Human
cauacuuugggauaagagugga

SEQ ID NO: 157893 - RNA, 22 nt, Human
auugaaagauaggcuacugugg

SEQ ID NO: 157894 - RNA, 22 nt, Human
acuuccuggcugggugaccugg

SEQ ID NO: 157895 - RNA, 22 nt, Human
uaguccagccuuggguguagcc

SEQ ID NO: 157896 - RNA, 22 nt, Human
ucagcugaaguggagaagcaga

SEQ ID NO: 157897 - RNA, 17 nt, Human
agcuccugcccauggcu

SEQ ID NO: 157898 - RNA, 22 nt, Human
acuccugggugcugaccagcgu

SEQ ID NO: 157899 - RNA, 22 nt, Human
aacuagaaaacaagaugcugau

SEQ ID NO: 157900 - RNA, 22 nt, Human
ggcacugauaauguccucucuc

SEQ ID NO: 157901 - RNA, 22 nt, Human
ggagccugcgggagcucccauu

SEQ ID NO: 157902 - RNA, 22 nt, Human
acucugagcaucccaagucuua

SEQ ID NO: 157903 - RNA, 19 nt, Human
ucauaaggagagaggaaau

SEQ ID NO: 157904 - RNA, 20 nt, Human
ugugcccaauguccagguuc

SEQ ID NO: 157905 - RNA, 22 nt, Human
cagacagacagccguggccacc

SEQ ID NO: 157906 - RNA, 22 nt, Human
cagcugccugcaacacaagcuu

SEQ ID NO: 157907 - RNA, 22 nt, Human
gagaggagucccuaucacaguu

SEQ ID NO: 157908 - RNA, 22 nt, Human
ccaucagcaugggagcaugggc

SEQ ID NO: 157909 - RNA, 22 nt, Human
uuguggaaauacagacuccaag

SEQ ID NO: 157910 - RNA, 22 nt, Human
ggcucugcugguaagaugccuc

SEQ ID NO: 157911 - RNA, 22 nt, Human
ccagcuggcacuguggcugccc

SEQ ID NO: 157912 - RNA, 19 nt, Human
ugucacugucauggcccag

SEQ ID NO: 157913 - RNA, 22 nt, Human
uccaggagguuuggaggaagca

SEQ ID NO: 157914 - RNA, 22 nt, Human
gcaggagcugcucuccugacga

SEQ ID NO: 157915 - RNA, 22 nt, Human
cagaaagaccugggcucaagag

SEQ ID NO: 157916 - RNA, 22 nt, Human
cccauuuagauaacaguucaaa

SEQ ID NO: 157917 - RNA, 22 nt, Human
gcaggagccacuucagggaugc

SEQ ID NO: 157918 - RNA, 22 nt, Human
uguauguguauguacauaugca

SEQ ID NO: 157919 - RNA, 22 nt, Human
aaauuguugaucuacaguaagg

SEQ ID NO: 157920 - RNA, 22 nt, Human
cugaaggauguguggugggagu

SEQ ID NO: 157921 - RNA, 22 nt, Human
gugugccagacaugaugcuaug

SEQ ID NO: 157922 - RNA, 22 nt, Human
cauugucacccaaagcucauag

SEQ ID NO: 157923 - RNA, 22 nt, Human
agagaugaaaaguggagacugg

SEQ ID NO: 157924 - RNA, 22 nt, Human
cucaggaugaaagucaugguga

SEQ ID NO: 157925 - RNA, 22 nt, Human
gaaugugugacucuauugagca

SEQ ID NO: 157926 - RNA, 19 nt, Human
gaagaagcuugagaaguag

SEQ ID NO: 157927 - RNA, 22 nt, Human
cuggccuuggugcuugcagaca

SEQ ID NO: 157928 - RNA, 22 nt, Human
cacaaaaguaggaggcaggcgg

SEQ ID NO: 157929 - RNA, 19 nt, Human
accucugcagagauguuua

SEQ ID NO: 157930 - RNA, 22 nt, Human
gcccucugcacagcucugagca

SEQ ID NO: 157931 - RNA, 19 nt, Human
cagagcugcuggccucguc

SEQ ID NO: 157932 - RNA, 22 nt, Human
uuccauaauuaaguggagagaa

SEQ ID NO: 157933 - RNA, 22 nt, Human
cagcaguguggaagcugagggg

SEQ ID NO: 157934 - RNA, 22 nt, Human
uccuuuuuaagucguuguggua

SEQ ID NO: 157935 - RNA, 22 nt, Human
uaucuuugcaaauaucucuaag

SEQ ID NO: 157936 - RNA, 23 nt, Human
uccuccuuuugcuugugcuuccc

SEQ ID NO: 157937 - RNA, 22 nt, Human
agcucccagcagagcuggccac

SEQ ID NO: 157938 - RNA, 21 nt, Human
gcaggaugcaucuuggugucu

SEQ ID NO: 157939 - RNA, 22 nt, Human
ugcugccauggucgcugguguc

SEQ ID NO: 157940 - RNA, 22 nt, Human
ucccagaggacuguuggugcua

SEQ ID NO: 157941 - RNA, 22 nt, Human
gguggcagcgucuaucugacau

SEQ ID NO: 157942 - RNA, 22 nt, Human
cagcagugucuccagcaucaca

SEQ ID NO: 157943 - RNA, 22 nt, Human
aaguuugacagaaguuucuaau

SEQ ID NO: 157944 - RNA, 22 nt, Human
cugcccugucugcagccuggcu

SEQ ID NO: 157945 - RNA, 22 nt, Human
ggccuugggcuggcugcaguau

SEQ ID NO: 157946 - RNA, 22 nt, Human
ccucccacuucuugcugagguc

SEQ ID NO: 157947 - RNA, 22 nt, Human
uccugccugagcguggaggagg

SEQ ID NO: 157948 - RNA, 19 nt, Human
ugccuggcaccagcuccac

SEQ ID NO: 157949 - RNA, 22 nt, Human
cacugccuggaaggagagacau

SEQ ID NO: 157950 - RNA, 19 nt, Human
gagguggguccccgcagcc

SEQ ID NO: 157951 - RNA, 22 nt, Human
ucaucaaagcgcuuggaguagg

SEQ ID NO: 157952 - RNA, 22 nt, Human
acacuuuacagcuuccuuugca

SEQ ID NO: 157953 - RNA, 22 nt, Human
cagggccugcuuccuucuuguu

SEQ ID NO: 157954 - RNA, 20 nt, Human
ccugucuggagacaaagaga

SEQ ID NO: 157955 - RNA, 22 nt, Human
aggcagaaaauagucauccaaa

SEQ ID NO: 157956 - RNA, 22 nt, Human
ggaggccaaggcagguggaucg

SEQ ID NO: 157957 - RNA, 22 nt, Human
cagagcuguugcggggcuuggc

SEQ ID NO: 157958 - RNA, 22 nt, Human
gggcaagcucuucagaagcucu

SEQ ID NO: 157959 - RNA, 22 nt, Human
uuuucuuacugucugugauccu

SEQ ID NO: 157960 - RNA, 22 nt, Human
uuugcaauuugugcugcaaaug

SEQ ID NO: 157961 - RNA, 22 nt, Human
ccagccucacuggcaucaccua

SEQ ID NO: 157962 - RNA, 22 nt, Human
agccuggauccauguggcuacc

SEQ ID NO: 157963 - RNA, 22 nt, Human
ucagugucuugggcuugaaugc

SEQ ID NO: 157964 - RNA, 22 nt, Human
gaggccuggaauuccagccugg

SEQ ID NO: 157965 - RNA, 22 nt, Human
cagggcaguuuuacuucucucu

SEQ ID NO: 157966 - RNA, 22 nt, Human
ucugggugaugaaaugcacugu

SEQ ID NO: 157967 - RNA, 22 nt, Human
guguacauauugagucugcuga

SEQ ID NO: 157968 - RNA, 22 nt, Human
auuuaugacuggugaauagaac

SEQ ID NO: 157969 - RNA, 22 nt, Human
ggagccagugcccucuggugga

SEQ ID NO: 157970 - RNA, 22 nt, Human
ugggcacuauggcucugugcac

SEQ ID NO: 157971 - RNA, 22 nt, Human
uauucacagcugccgcacucag

SEQ ID NO: 157972 - RNA, 22 nt, Human
guguccagagaaacucacagcu

SEQ ID NO: 157973 - RNA, 22 nt, Human
ucacaggacccugaggguggcg

SEQ ID NO: 157974 - RNA, 22 nt, Human
accccaagacaguagaagagaa

SEQ ID NO: 157975 - RNA, 22 nt, Human
gaugcugaagugaagugaucuu

SEQ ID NO: 157976 - RNA, 22 nt, Human
ugccagcacaaguuaagagauc

SEQ ID NO: 157977 - RNA, 22 nt, Human
aggcacugaagaacucuuuuug

SEQ ID NO: 157978 - RNA, 19 nt, Human
agggaaggauucugucauu

SEQ ID NO: 157979 - RNA, 22 nt, Human
ugagcccaggaguuggagaccg

SEQ ID NO: 157980 - RNA, 22 nt, Human
ugcagaagaaugagcuuggagu

SEQ ID NO: 157981 - RNA, 22 nt, Human
ugccugcugcuaagcucuuugu

SEQ ID NO: 157982 - RNA, 22 nt, Human
ucuggagcuuccucauuuacag

SEQ ID NO: 157983 - RNA, 22 nt, Human
uagcagcugugaguaaaagcca

SEQ ID NO: 157984 - RNA, 18 nt, Human
cucugcuaaugggcagcu

SEQ ID NO: 157985 - RNA, 22 nt, Human
uggcuucugcuuucaguggagg

SEQ ID NO: 157986 - RNA, 22 nt, Human
aacaugaaaguugcuaagugca

SEQ ID NO: 157987 - RNA, 22 nt, Human
cagcccugccauggagccuccu

SEQ ID NO: 157988 - RNA, 22 nt, Human
gaaaggucaguuccacuuccau

SEQ ID NO: 157989 - RNA, 22 nt, Human
uggcucucagcucccagcagcc

SEQ ID NO: 157990 - RNA, 18 nt, Human
cagagcagagguggagcg

SEQ ID NO: 157991 - RNA, 22 nt, Human
agccaggauuggcugagccuua

SEQ ID NO: 157992 - RNA, 22 nt, Human
aagagcuggucacagguccauu

SEQ ID NO: 157993 - RNA, 22 nt, Human
ucuggcucuaacuaggcaucag

SEQ ID NO: 157994 - RNA, 19 nt, Human
cuggggcuuugguacugcc

SEQ ID NO: 157995 - RNA, 22 nt, Human
gaaaugcauggaucuuggcaga

SEQ ID NO: 157996 - RNA, 23 nt, Human
cccuguagcccaggacaggcuuu

SEQ ID NO: 157997 - RNA, 22 nt, Human
gcucucugucguuaugcuucau

SEQ ID NO: 157998 - RNA, 20 nt, Human
ggagagcagggaagacagua

SEQ ID NO: 157999 - RNA, 22 nt, Human
gcugucugucucugucccacca

SEQ ID NO: 158000 - RNA, 22 nt, Human
uauuucugaggcccaggaagug

SEQ ID NO: 158001 - RNA, 22 nt, Human
ggccuagggaguggccaugccu

SEQ ID NO: 158002 - RNA, 22 nt, Human
ugggcaaguaucggacucugag

SEQ ID NO: 158003 - RNA, 22 nt, Human
acugugcaaugaguaauaaacu

SEQ ID NO: 158004 - RNA, 21 nt, Human
acaugcauagagagauuucug

SEQ ID NO: 158005 - RNA, 22 nt, Human
uaacagaaauagaaaugagagu

SEQ ID NO: 158006 - RNA, 22 nt, Human
uucaagaucgaguuuaaaguga

SEQ ID NO: 158007 - RNA, 17 nt, Human
uccagagcacagagcuc

SEQ ID NO: 158008 - RNA, 22 nt, Human
aaaugcuguguuuuaacauaga

SEQ ID NO: 158009 - RNA, 20 nt, Human
gcacugaaauucaauguuug

SEQ ID NO: 158010 - RNA, 22 nt, Human
gaugcagaaaguagacaccauc

SEQ ID NO: 158011 - RNA, 17 nt, Human
auuuccucagggcugag

SEQ ID NO: 158012 - RNA, 22 nt, Human
gaaaugcauaaucuuaguagau

SEQ ID NO: 158013 - RNA, 17 nt, Human
cugagcauccgugcucu

SEQ ID NO: 158014 - RNA, 22 nt, Human
gccaguuccuguggagucagag

SEQ ID NO: 158015 - RNA, 22 nt, Human
ggagggcugccagguggagcgg

SEQ ID NO: 158016 - RNA, 22 nt, Human
agagccagcaacucuagcccug

SEQ ID NO: 158017 - RNA, 22 nt, Human
agaaaugugaauuucauuuccu

SEQ ID NO: 158018 - RNA, 17 nt, Human
uucaagauauugaaaug

SEQ ID NO: 158019 - RNA, 22 nt, Human
gaggccuggcucugcccuccug

SEQ ID NO: 158020 - RNA, 22 nt, Human
augcaguaaauguuaagaaaaa

SEQ ID NO: 158021 - RNA, 22 nt, Human
ggcaguggguggaucucaggga

SEQ ID NO: 158022 - RNA, 21 nt, Human
gggugcuguggucaugcagga

SEQ ID NO: 158023 - RNA, 22 nt, Human
ucucagaguaauucuuuaaggu

SEQ ID NO: 158024 - RNA, 22 nt, Human
uggaggaugccuggggaggccu

SEQ ID NO: 158025 - RNA, 22 nt, Human
gagagcuguaauagucaugucu

SEQ ID NO: 158026 - RNA, 22 nt, Human
ugcaugcagcuggugauaagaa

SEQ ID NO: 158027 - RNA, 22 nt, Human
ggggcagauggaacagagcaca

SEQ ID NO: 158028 - RNA, 22 nt, Human
aucuucaaagcacaucguuugu

SEQ ID NO: 158029 - RNA, 22 nt, Human
agccuggaagaaccugaagucu

SEQ ID NO: 158030 - RNA, 22 nt, Human
ccugcagguugcagaggcggaa

SEQ ID NO: 158031 - RNA, 22 nt, Human
aagaacaacugcuuuaaaagca

SEQ ID NO: 158032 - RNA, 22 nt, Human
gcuggccagggcugcucgcgga

SEQ ID NO: 158033 - RNA, 22 nt, Human
cagagacagaaaauggaucuag

SEQ ID NO: 158034 - RNA, 22 nt, Human
ucuuggagaauggcagagaagc

SEQ ID NO: 158035 - RNA, 22 nt, Human
ccaggcccugcuccucacacca

SEQ ID NO: 158036 - RNA, 22 nt, Human
uggugcaagucucugaggaggg

SEQ ID NO: 158037 - RNA, 19 nt, Human
ccaggccaucccaguuccc

SEQ ID NO: 158038 - RNA, 22 nt, Human
cagggcaggaauuugacauugc

SEQ ID NO: 158039 - RNA, 22 nt, Human
guggccuggauagacuccaucu

SEQ ID NO: 158040 - RNA, 22 nt, Human
acagggcagaaauguugcaucu

SEQ ID NO: 158041 - RNA, 22 nt, Human
cacagggcagaggguccguggc

SEQ ID NO: 158042 - RNA, 22 nt, Human
cagagcuggagggaacccuggc

SEQ ID NO: 158043 - RNA, 22 nt, Human
cuggcuuccucaggagcagugg

SEQ ID NO: 158044 - RNA, 19 nt, Human
uuucaauggcuuagagaaa

SEQ ID NO: 158045 - RNA, 22 nt, Human
gcucuguguccacagcuggaaa

SEQ ID NO: 158046 - RNA, 22 nt, Human
gcgaaaaauguguaaauauguu

SEQ ID NO: 158047 - RNA, 22 nt, Human
cagcuggcaaguggagcagggu

SEQ ID NO: 158048 - RNA, 22 nt, Human
uccuggagaauccugccaccug

SEQ ID NO: 158049 - RNA, 22 nt, Human
uacaaagucaccagcuucuugc

SEQ ID NO: 158050 - RNA, 22 nt, Human
gccugaugagcuuccagcugag

SEQ ID NO: 158051 - RNA, 19 nt, Human
cccagcuugaccaccugcu

SEQ ID NO: 158052 - RNA, 22 nt, Human
acagcagccugcagcccugugu

SEQ ID NO: 158053 - RNA, 22 nt, Human
uuccauaaucaccuuauucuuu

SEQ ID NO: 158054 - RNA, 22 nt, Human
ucuguaguagguuguaguucuu

SEQ ID NO: 158055 - RNA, 22 nt, Human
cugugccuaagaugcaugucuc

SEQ ID NO: 158056 - RNA, 21 nt, Human
ucagcagcaucugccuagagu

SEQ ID NO: 158057 - RNA, 22 nt, Human
auuugucuagugguauucacgu

SEQ ID NO: 158058 - RNA, 22 nt, Human
cacaggugcuccucggggagcu

SEQ ID NO: 158059 - RNA, 22 nt, Human
uggccugccugggagcagcagg

SEQ ID NO: 158060 - RNA, 21 nt, Human
uccauuguuuucccaggguuu

SEQ ID NO: 158061 - RNA, 22 nt, Human
agugcuguccaguuucacaggu

SEQ ID NO: 158062 - RNA, 22 nt, Human
guggaggacaaaagaagccuuu

SEQ ID NO: 158063 - RNA, 22 nt, Human
ggaggccaccugaccugcuguu

SEQ ID NO: 158064 - RNA, 20 nt, Human
cacugaagacuucuugcuca

SEQ ID NO: 158065 - RNA, 22 nt, Human
gcuuagucaauuauaaauaggc

SEQ ID NO: 158066 - RNA, 22 nt, Human
cagucacauggaugauggauag

SEQ ID NO: 158067 - RNA, 22 nt, Human
cccugccuugggguccacaccg

SEQ ID NO: 158068 - RNA, 22 nt, Human
cucagcagugacaagagaguau

SEQ ID NO: 158069 - RNA, 22 nt, Human
acugcuuuuagaaaucuauaga

SEQ ID NO: 158070 - RNA, 20 nt, Human
aacagggggcugcagagggc

SEQ ID NO: 158071 - RNA, 22 nt, Human
uuuugaaagggugauuuggcuu

SEQ ID NO: 158072 - RNA, 22 nt, Human
ugggcacaggggaauggaugaa

SEQ ID NO: 158073 - RNA, 22 nt, Human
ccucagccuuggccccaggcag

SEQ ID NO: 158074 - RNA, 22 nt, Human
gucucagggacugcuucugggg

SEQ ID NO: 158075 - RNA, 22 nt, Human
uggccuccccuaacagccucuu

SEQ ID NO: 158076 - RNA, 22 nt, Human
acugaaggucucagcaaggaug

SEQ ID NO: 158077 - RNA, 22 nt, Human
cagccagguaugggcgugcggg

SEQ ID NO: 158078 - RNA, 22 nt, Human
gggagcuggagcuggaagacuc

SEQ ID NO: 158079 - RNA, 21 nt, Human
ucugggcccaugcugccucac

SEQ ID NO: 158080 - RNA, 22 nt, Human
guggcugcuacagagcuggagg

SEQ ID NO: 158081 - RNA, 19 nt, Human
gcagccaggugcucuaccu

SEQ ID NO: 158082 - RNA, 22 nt, Human
ccuggccugugaaucugagagc

SEQ ID NO: 158083 - RNA, 22 nt, Human
uuucuggcagcgggacaggggu

SEQ ID NO: 158084 - RNA, 22 nt, Human
auccaaaccuggacaugagugg

SEQ ID NO: 158085 - RNA, 17 nt, Human
guccugggaggagagag

SEQ ID NO: 158086 - RNA, 21 nt, Human
gcagcaguguucuagaauacu

SEQ ID NO: 158087 - RNA, 22 nt, Human
uaugcacaauaugaucuauuug

SEQ ID NO: 158088 - RNA, 22 nt, Human
ugugccagccucuggcuguguc

SEQ ID NO: 158089 - RNA, 22 nt, Human
gauccuugcacuugacuuggca

SEQ ID NO: 158090 - RNA, 22 nt, Human
ugcagugguugagagcccagac

SEQ ID NO: 158091 - RNA, 22 nt, Human
ccaaaguccuuucuccaccugc

SEQ ID NO: 158092 - RNA, 22 nt, Human
agcagccauuuaaaaugaauug

SEQ ID NO: 158093 - RNA, 20 nt, Human
ccuccuggucaggugugcag

SEQ ID NO: 158094 - RNA, 23 nt, Human
uagagcagggaaaucugucagag

SEQ ID NO: 158095 - RNA, 22 nt, Human
ggacagcccauacacaugucug

SEQ ID NO: 158096 - RNA, 22 nt, Human
agagcugugaaaaugagguuug

SEQ ID NO: 158097 - RNA, 21 nt, Human
gccauuguuuucuaccuggag

SEQ ID NO: 158098 - RNA, 22 nt, Human
aaaguguacuaugucaugaaca

SEQ ID NO: 158099 - RNA, 22 nt, Human
ucagcagugcagggugaggcag

SEQ ID NO: 158100 - RNA, 22 nt, Human
ccuguguggaaaccgcaugacg

SEQ ID NO: 158101 - RNA, 22 nt, Human
aagcagaugggacuccaaggca

SEQ ID NO: 158102 - RNA, 22 nt, Human
ccuggcugggccugauuucuca

SEQ ID NO: 158103 - RNA, 22 nt, Human
gugggugauguacuggaggcca

SEQ ID NO: 158104 - RNA, 19 nt, Human
augauggucccauucaccu

SEQ ID NO: 158105 - RNA, 22 nt, Human
uugugugguagcuucauugaac

SEQ ID NO: 158106 - RNA, 18 nt, Human
uggagccagcucuaggau

SEQ ID NO: 158107 - RNA, 23 nt, Human
ucugucaccuauggcugcucuuc

SEQ ID NO: 158108 - RNA, 22 nt, Human
ucauucagguugggcaaguguc

SEQ ID NO: 158109 - RNA, 22 nt, Human
gagagaagaauguuccgaggcc

SEQ ID NO: 158110 - RNA, 21 nt, Human
aggcugcuggcucaggguccu

SEQ ID NO: 158111 - RNA, 22 nt, Human
gcccugugcgacucuagagguu

SEQ ID NO: 158112 - RNA, 22 nt, Human
aucccuggacggcgccucccca

SEQ ID NO: 158113 - RNA, 22 nt, Human
ccacacagggggaugaguuauu

SEQ ID NO: 158114 - RNA, 22 nt, Human
agcucacagaaauccugcagga

SEQ ID NO: 158115 - RNA, 22 nt, Human
cccuggagggacagcugcucua

SEQ ID NO: 158116 - RNA, 22 nt, Human
gcugcccauuccacuggauggu

SEQ ID NO: 158117 - RNA, 22 nt, Human
ucuggagcuggcagggcccugg

SEQ ID NO: 158118 - RNA, 22 nt, Human
agcugcuccuuuccugcaggcg

SEQ ID NO: 158119 - RNA, 22 nt, Human
aguucacauuccgagguacugg

SEQ ID NO: 158120 - RNA, 22 nt, Human
gccagguggucuggcuccagag

SEQ ID NO: 158121 - RNA, 22 nt, Human
cagggcuguggcuuugugcugu

SEQ ID NO: 158122 - RNA, 22 nt, Human
ucugucacuauuggccagaaca

SEQ ID NO: 158123 - RNA, 22 nt, Human
gagcugggcacacgccacuuga

SEQ ID NO: 158124 - RNA, 22 nt, Human
gccuggaggggccaggguggua

SEQ ID NO: 158125 - RNA, 18 nt, Human
ggcugugcguggaggcug

SEQ ID NO: 158126 - RNA, 22 nt, Human
agucaaagcuacaggcauuuga

SEQ ID NO: 158127 - RNA, 22 nt, Human
cugcagcuauauuuucccacag

SEQ ID NO: 158128 - RNA, 22 nt, Human
gccucucucuacccaguaugau

SEQ ID NO: 158129 - RNA, 23 nt, Human
ugcugguguuuuugggaccaggg

SEQ ID NO: 158130 - RNA, 22 nt, Human
ucagaggagaaguugggaaaau

SEQ ID NO: 158131 - RNA, 20 nt, Human
cugagcugagcuccaugggu

SEQ ID NO: 158132 - RNA, 22 nt, Human
ugggcagauguggcucuccuug

SEQ ID NO: 158133 - RNA, 22 nt, Human
agccuggagguaaugaggaaac

SEQ ID NO: 158134 - RNA, 22 nt, Human
uguaugugcuugagaagguggg

SEQ ID NO: 158135 - RNA, 22 nt, Human
agggcugcaucugccuggugaa

SEQ ID NO: 158136 - RNA, 22 nt, Human
aaggcugagggcuguaccuggc

SEQ ID NO: 158137 - RNA, 22 nt, Human
caggaguggugugagggacucc

SEQ ID NO: 158138 - RNA, 22 nt, Human
gaaagaagcuuuagauggcuau

SEQ ID NO: 158139 - RNA, 22 nt, Human
ucucuucuuguguuuuccugcc

SEQ ID NO: 158140 - RNA, 22 nt, Human
cuuucacaguccugacugagcg

SEQ ID NO: 158141 - RNA, 22 nt, Human
acagaacugggaaaugcacaua

SEQ ID NO: 158142 - RNA, 22 nt, Human
ccugccagugaagcugacgggc

SEQ ID NO: 158143 - RNA, 22 nt, Human
agguccagcuguugcagccucc

SEQ ID NO: 158144 - RNA, 22 nt, Human
ccugaggacacacgcugcagga

SEQ ID NO: 158145 - RNA, 22 nt, Human
uggccuggcccugaggcccugu

SEQ ID NO: 158146 - RNA, 18 nt, Human
agcagcugucagaaugcc

SEQ ID NO: 158147 - RNA, 22 nt, Human
uggaaagaaaaacaggccauga

SEQ ID NO: 158148 - RNA, 22 nt, Human
gccugcuggcuguccauugcag

SEQ ID NO: 158149 - RNA, 18 nt, Human
ucuuggaguaaugaucaa

SEQ ID NO: 158150 - RNA, 22 nt, Human
aagacagagggaagcaaugaug

SEQ ID NO: 158151 - RNA, 22 nt, Human
gaggcugcuuugaugacaggag

SEQ ID NO: 158152 - RNA, 22 nt, Human
caaauccagaucccagucguag

SEQ ID NO: 158153 - RNA, 22 nt, Human
aaggcugauuagacugauagcu

SEQ ID NO: 158154 - RNA, 22 nt, Human
aaaagguaguugccaaauaagg

SEQ ID NO: 158155 - RNA, 22 nt, Human
cagcugaguuuccaagucugcc

SEQ ID NO: 158156 - RNA, 21 nt, Human
aagccucaagcagaagacaga

SEQ ID NO: 158157 - RNA, 21 nt, Human
uucaaugaaaacaaagugagg

SEQ ID NO: 158158 - RNA, 22 nt, Human
uggggacacagagccaaacuau

SEQ ID NO: 158159 - RNA, 23 nt, Human
uggcucugagcuuccugguggcc

SEQ ID NO: 158160 - RNA, 22 nt, Human
ucccagggacugggcuaggcuu

SEQ ID NO: 158161 - RNA, 22 nt, Human
ccagcugggauuaagggaaaau

SEQ ID NO: 158162 - RNA, 22 nt, Human
gacacagagauaggccuguguu

SEQ ID NO: 158163 - RNA, 22 nt, Human
agagccaggaugucuucugggg

SEQ ID NO: 158164 - RNA, 22 nt, Human
uuaaaguucauuaaaugagcca

SEQ ID NO: 158165 - RNA, 22 nt, Human
gugcaguggcagauccuagcuc

SEQ ID NO: 158166 - RNA, 22 nt, Human
agagcaggcauaaagcuuugaa

SEQ ID NO: 158167 - RNA, 22 nt, Human
gcuggccugcaaagcccggcug

SEQ ID NO: 158168 - RNA, 22 nt, Human
aagaugauguuguguuuucacu

SEQ ID NO: 158169 - RNA, 22 nt, Human
ugggcucauggcccagcacugg

SEQ ID NO: 158170 - RNA, 22 nt, Human
gccugccugaaggcuguaccag

SEQ ID NO: 158171 - RNA, 22 nt, Human
aggcugggcuccgcccaacucc

SEQ ID NO: 158172 - RNA, 22 nt, Human
cccucagcuucucccugcagcu

SEQ ID NO: 158173 - RNA, 22 nt, Human
agcugguggauuaugcuguaca

SEQ ID NO: 158174 - RNA, 22 nt, Human
uagaaauguugguauuaacauu

SEQ ID NO: 158175 - RNA, 22 nt, Human
cauugcacuccacccuaggcaa

SEQ ID NO: 158176 - RNA, 19 nt, Human
aguguguacugaaagcacu

SEQ ID NO: 158177 - RNA, 22 nt, Human
ggcaggugugagaucgaggcca

SEQ ID NO: 158178 - RNA, 22 nt, Human
gcagccacccucaaggcugaau

SEQ ID NO: 158179 - RNA, 22 nt, Human
cacccaggcuagagugcagugg

SEQ ID NO: 158180 - RNA, 22 nt, Human
gaaugcacacgugugugcaugc

SEQ ID NO: 158181 - RNA, 22 nt, Human
ggcugccaggagggaggccagu

SEQ ID NO: 158182 - RNA, 22 nt, Human
gcugcucugaaaaugacuguug

SEQ ID NO: 158183 - RNA, 22 nt, Human
gcccaucaucacuguggaggcu

SEQ ID NO: 158184 - RNA, 23 nt, Human
uggggcugauggagacggaccag

SEQ ID NO: 158185 - RNA, 22 nt, Human
auggccuggccagagcucugcu

SEQ ID NO: 158186 - RNA, 23 nt, Human
uggaccugaaccagugccucugu

SEQ ID NO: 158187 - RNA, 21 nt, Human
gcucccuggcugugugaccug

SEQ ID NO: 158188 - RNA, 22 nt, Human
gguuugcacgauauuuccaugg

SEQ ID NO: 158189 - RNA, 22 nt, Human
gcugggaggaucucucccuguc

SEQ ID NO: 158190 - RNA, 22 nt, Human
gagccuggggacccuccugagu

SEQ ID NO: 158191 - RNA, 22 nt, Human
augcaguacagauaauucuaca

SEQ ID NO: 158192 - RNA, 22 nt, Human
gugcaugucggggugcauguca

SEQ ID NO: 158193 - RNA, 22 nt, Human
ggcucugcagugacuugagggg

SEQ ID NO: 158194 - RNA, 22 nt, Human
gcacugcaucuacuggcaagua

SEQ ID NO: 158195 - RNA, 22 nt, Human
ugagugaggaagcgguggagga

SEQ ID NO: 158196 - RNA, 22 nt, Human
ucagggcacaggccuguggguu

SEQ ID NO: 158197 - RNA, 22 nt, Human
ugguggccaauucacagggcuc

SEQ ID NO: 158198 - RNA, 21 nt, Human
ggcagcccgcccucuccuggc

SEQ ID NO: 158199 - RNA, 22 nt, Human
agcucccauuaucuucugaaac

SEQ ID NO: 158200 - RNA, 22 nt, Human
ugggaugggaucucgcuguguc

SEQ ID NO: 158201 - RNA, 20 nt, Human
cucugcagcaaggccugggu

SEQ ID NO: 158202 - RNA, 22 nt, Human
ucucagaguuuacggggcugaa

SEQ ID NO: 158203 - RNA, 22 nt, Human
cagacuggccacaucugcacug

SEQ ID NO: 158204 - RNA, 22 nt, Human
ccaggccuggccaggggaugcc

SEQ ID NO: 158205 - RNA, 22 nt, Human
ucaggacagccagggugcagac

SEQ ID NO: 158206 - RNA, 22 nt, Human
cagccugcauuuguaucuguau

SEQ ID NO: 158207 - RNA, 18 nt, Human
acauuucuaggugaaagc

SEQ ID NO: 158208 - RNA, 20 nt, Human
gcagcugaaaguaugacacc

SEQ ID NO: 158209 - RNA, 22 nt, Human
ucacagaauagcacuguaagcg

SEQ ID NO: 158210 - RNA, 22 nt, Human
acagccagguaaaggcauggca

SEQ ID NO: 158211 - RNA, 22 nt, Human
gcugagagcggccagcugggaa

SEQ ID NO: 158212 - RNA, 22 nt, Human
cagggguguuuuuggccaggag

SEQ ID NO: 158213 - RNA, 23 nt, Human
agggguggucaguacccgcagug

SEQ ID NO: 158214 - RNA, 22 nt, Human
acauguggucaaucuguguagg

SEQ ID NO: 158215 - RNA, 22 nt, Human
uuguuuucacagcuuugcccgg

SEQ ID NO: 158216 - RNA, 22 nt, Human
augggaggaugcucgggugcuc

SEQ ID NO: 158217 - RNA, 22 nt, Human
uguagaaagaauauguuucaua

SEQ ID NO: 158218 - RNA, 19 nt, Human
ucugucacuggggguauuc

SEQ ID NO: 158219 - RNA, 22 nt, Human
aggcagcccacaggacacagga

SEQ ID NO: 158220 - RNA, 22 nt, Human
uggcccuguguccugcugccag

SEQ ID NO: 158221 - RNA, 22 nt, Human
uccucacauggugagccacaca

SEQ ID NO: 158222 - RNA, 22 nt, Human
aggagaaguaaggcuagaugau

SEQ ID NO: 158223 - RNA, 21 nt, Human
cauuucuauugaugagaaaag

SEQ ID NO: 158224 - RNA, 22 nt, Human
ccagucccgcaugguccagaau

SEQ ID NO: 158225 - RNA, 22 nt, Human
ccaggaguuggagguugcagug

SEQ ID NO: 158226 - RNA, 22 nt, Human
uaauguguccugaaagcuucug

SEQ ID NO: 158227 - RNA, 21 nt, Human
ugucagaaauaagcaugugau

SEQ ID NO: 158228 - RNA, 22 nt, Human
acacugcucacuucuucccuug

SEQ ID NO: 158229 - RNA, 22 nt, Human
aaaugugugcacaaagacagcu

SEQ ID NO: 158230 - RNA, 22 nt, Human
cccaggagguagagguugcagu

SEQ ID NO: 158231 - RNA, 22 nt, Human
ggaggcccagagaggugaagug

SEQ ID NO: 158232 - RNA, 22 nt, Human
aggcacugugcugaugucuuau

SEQ ID NO: 158233 - RNA, 22 nt, Human
gagacaaaaguuggagugcaag

SEQ ID NO: 158234 - RNA, 22 nt, Human
aaaugugucaguuucauucucu

SEQ ID NO: 158235 - RNA, 22 nt, Human
ggccugcugcuaugacuuccug

SEQ ID NO: 158236 - RNA, 22 nt, Human
gagcagugguugaacagaggca

SEQ ID NO: 158237 - RNA, 23 nt, Human
agcuggaggcugucuacucccaa

SEQ ID NO: 158238 - RNA, 22 nt, Human
accccagcccugcuucugggag

SEQ ID NO: 158239 - RNA, 19 nt, Human
cagcucaguuugauucucu

SEQ ID NO: 158240 - RNA, 22 nt, Human
agguggggugagcugcagacua

SEQ ID NO: 158241 - RNA, 22 nt, Human
ugaugggaggugcugcaggacc

SEQ ID NO: 158242 - RNA, 22 nt, Human
cuggaagaggaagccagcugga

SEQ ID NO: 158243 - RNA, 22 nt, Human
caaaguauauuggauugaaugg

SEQ ID NO: 158244 - RNA, 22 nt, Human
cugggagggguagccaauccua

SEQ ID NO: 158245 - RNA, 22 nt, Human
accuggccauccagcuggcauc

SEQ ID NO: 158246 - RNA, 22 nt, Human
gagggauggugugagaggcuca

SEQ ID NO: 158247 - RNA, 22 nt, Human
cagccuucugaaugaacguacu

SEQ ID NO: 158248 - RNA, 22 nt, Human
gcagggagguuugcugaccugg

SEQ ID NO: 158249 - RNA, 22 nt, Human
ugccucagcugaggccgcucca

SEQ ID NO: 158250 - RNA, 22 nt, Human
uugaaggacaucuuguuucuag

SEQ ID NO: 158251 - RNA, 22 nt, Human
cagcucugggugacaggagggc

SEQ ID NO: 158252 - RNA, 19 nt, Human
ucucagagcccuagaggcc

SEQ ID NO: 158253 - RNA, 22 nt, Human
gagugaaaaaggaagggccaua

SEQ ID NO: 158254 - RNA, 22 nt, Human
agcagccaagguaaccugugcu

SEQ ID NO: 158255 - RNA, 22 nt, Human
agguacaguagacagacaguua

SEQ ID NO: 158256 - RNA, 22 nt, Human
uaaauucccaacucugcucuuc

SEQ ID NO: 158257 - RNA, 19 nt, Human
ugucucugaaagaugagcu

SEQ ID NO: 158258 - RNA, 22 nt, Human
gccuggguuccaugaucuccag

SEQ ID NO: 158259 - RNA, 22 nt, Human
aaugcacagcguuccaugcuug

SEQ ID NO: 158260 - RNA, 22 nt, Human
aagcccagaugggagcauuuca

SEQ ID NO: 158261 - RNA, 22 nt, Human
uggaggagggcuggugucugua

SEQ ID NO: 158262 - RNA, 22 nt, Human
acuggaagccaguugacaauca

SEQ ID NO: 158263 - RNA, 22 nt, Human
gcaagcaagcagguagagcuga

SEQ ID NO: 158264 - RNA, 22 nt, Human
gagggcaguagccucguacccu

SEQ ID NO: 158265 - RNA, 21 nt, Human
uugaagcaaggguggcucuga

SEQ ID NO: 158266 - RNA, 22 nt, Human
gccuggugugcgccgcgcagcu

SEQ ID NO: 158267 - RNA, 22 nt, Human
cccagcacaggcaauuccauac

SEQ ID NO: 158268 - RNA, 22 nt, Human
agcaggcuuguuaugucugaga

SEQ ID NO: 158269 - RNA, 22 nt, Human
uggcucaguggcagccgcagcu

SEQ ID NO: 158270 - RNA, 22 nt, Human
cagcauugaucccaggcugugg

SEQ ID NO: 158271 - RNA, 22 nt, Human
gcaguggggaaugcuggggaga

SEQ ID NO: 158272 - RNA, 22 nt, Human
agcugcaggcccaugcucaguc

SEQ ID NO: 158273 - RNA, 22 nt, Human
ugcagcauucuuggccacuacu

SEQ ID NO: 158274 - RNA, 22 nt, Human
uaaauucugaucaaguuccuuc

SEQ ID NO: 158275 - RNA, 22 nt, Human
ggccagggggcuucagacucca

SEQ ID NO: 158276 - RNA, 22 nt, Human
cagcagcugauggggaagugau

SEQ ID NO: 158277 - RNA, 22 nt, Human
gcucagaggaugcuccuuuaug

SEQ ID NO: 158278 - RNA, 22 nt, Human
aaaaaguuucaacugccaacuc

SEQ ID NO: 158279 - RNA, 22 nt, Human
ccuccaggcugaauaucuagaa

SEQ ID NO: 158280 - RNA, 22 nt, Human
cccaccaguacagaugguagau

SEQ ID NO: 158281 - RNA, 22 nt, Human
ccacagaguuacaaaacaguca

SEQ ID NO: 158282 - RNA, 22 nt, Human
ucuuuacaaucuaagcauaguu

SEQ ID NO: 158283 - RNA, 22 nt, Human
uuaagucacuuaucuaaagaca

SEQ ID NO: 158284 - RNA, 22 nt, Human
ucagagaugcagugccaccuac

SEQ ID NO: 158285 - RNA, 22 nt, Human
gcccagcacagcuggaagaguc

SEQ ID NO: 158286 - RNA, 22 nt, Human
cacauggggcgcugcauuggcc

SEQ ID NO: 158287 - RNA, 22 nt, Human
ugucccagcagcuggguucucu

SEQ ID NO: 158288 - RNA, 22 nt, Human
uuugggcaguagauguaucacu

SEQ ID NO: 158289 - RNA, 22 nt, Human
gaagcagccacggggagacaga

SEQ ID NO: 158290 - RNA, 22 nt, Human
auggccugggcccgcuucagau

SEQ ID NO: 158291 - RNA, 22 nt, Human
gaguggggucugggcaucaguc

SEQ ID NO: 158292 - RNA, 22 nt, Human
acuggcagcuguaggaugcaug

SEQ ID NO: 158293 - RNA, 22 nt, Human
ugugccagaaaauaugcugagg

SEQ ID NO: 158294 - RNA, 22 nt, Human
caggaccuggaaugcuugugaa

SEQ ID NO: 158295 - RNA, 22 nt, Human
cuggcugcgucugcucugacag

SEQ ID NO: 158296 - RNA, 22 nt, Human
ggcaguggcuccucucuacucc

SEQ ID NO: 158297 - RNA, 21 nt, Human
ucuuuccugcccaguugcccu

SEQ ID NO: 158298 - RNA, 18 nt, Human
cccucuccugcuaguggg

SEQ ID NO: 158299 - RNA, 22 nt, Human
uccucugcuggaagggcaagag

SEQ ID NO: 158300 - RNA, 22 nt, Human
uuuuugcaccaaccuaauagaa

SEQ ID NO: 158301 - RNA, 22 nt, Human
aagaggucauaccagauaaggg

SEQ ID NO: 158302 - RNA, 22 nt, Human
ggauccuucuuugaccucacag

SEQ ID NO: 158303 - RNA, 22 nt, Human
cagcagcucccauccgcugagc

SEQ ID NO: 158304 - RNA, 22 nt, Human
cugagauggaguuucgcucuuc

SEQ ID NO: 158305 - RNA, 22 nt, Human
aggccucacucucagagcuucu

SEQ ID NO: 158306 - RNA, 22 nt, Human
ucuccucaccaccagcagcaga

SEQ ID NO: 158307 - RNA, 22 nt, Human
gaguguggugaacaggagcacc

SEQ ID NO: 158308 - RNA, 22 nt, Human
agcagggccaacaguaaacacc

SEQ ID NO: 158309 - RNA, 22 nt, Human
agggcagacuaggauggaagug

SEQ ID NO: 158310 - RNA, 22 nt, Human
acuuccugcagcuucucagccc

SEQ ID NO: 158311 - RNA, 22 nt, Human
ugcaggcaggggaugagcagcc

SEQ ID NO: 158312 - RNA, 22 nt, Human
ugccagggcugcuacuggcuga

SEQ ID NO: 158313 - RNA, 20 nt, Human
ccagcugagccaaggggaga

SEQ ID NO: 158314 - RNA, 22 nt, Human
ucaggcugcccguucagggcuc

SEQ ID NO: 158315 - RNA, 22 nt, Human
ccaaagagcuagaauuauaggc

SEQ ID NO: 158316 - RNA, 22 nt, Human
ggcucugcccagaugaagagga

SEQ ID NO: 158317 - RNA, 22 nt, Human
agucucugugagcucccaaugg

SEQ ID NO: 158318 - RNA, 23 nt, Human
uacauuguggauggaguccuggg

SEQ ID NO: 158319 - RNA, 21 nt, Human
uggccucccacacuuccaugg

SEQ ID NO: 158320 - RNA, 22 nt, Human
cugaggcucaagggcagguggg

SEQ ID NO: 158321 - RNA, 22 nt, Human
agauggggcagaauggagccau

SEQ ID NO: 158322 - RNA, 22 nt, Human
gaggccuggcugggaggaggug

SEQ ID NO: 158323 - RNA, 22 nt, Human
ucugggcuuuacacugugcuua

SEQ ID NO: 158324 - RNA, 22 nt, Human
aauguguagauguugcauuccu

SEQ ID NO: 158325 - RNA, 18 nt, Human
acauacauucugucugca

SEQ ID NO: 158326 - RNA, 22 nt, Human
gcagggccagugcagagaggaa

SEQ ID NO: 158327 - RNA, 22 nt, Human
cagagccagcuguccuuggcau

SEQ ID NO: 158328 - RNA, 22 nt, Human
gauuuauuggucuuucauuggu

SEQ ID NO: 158329 - RNA, 22 nt, Human
ggcugugccucaaggcuacuca

SEQ ID NO: 158330 - RNA, 22 nt, Human
cccuggaggucagaggccuggg

SEQ ID NO: 158331 - RNA, 22 nt, Human
cucccaggcacagggaggagcc

SEQ ID NO: 158332 - RNA, 22 nt, Human
gcugagcugcuguucauccugc

SEQ ID NO: 158333 - RNA, 22 nt, Human
uggagcaggaagucuauggcug

SEQ ID NO: 158334 - RNA, 21 nt, Human
ugcuccuuagcugccccugcc

SEQ ID NO: 158335 - RNA, 21 nt, Human
aggcacuguuugugguuuggg

SEQ ID NO: 158336 - RNA, 22 nt, Human
uuuccucugagugagcugggag

SEQ ID NO: 158337 - RNA, 22 nt, Human
guauuuauaggggaaugagagu

SEQ ID NO: 158338 - RNA, 22 nt, Human
gcaggcaguuugcuuuucccuc

SEQ ID NO: 158339 - RNA, 22 nt, Human
ccucccacauugaggacaugcu

SEQ ID NO: 158340 - RNA, 22 nt, Human
cucugaacucuugggcagcaug

SEQ ID NO: 158341 - RNA, 22 nt, Human
ucuggagauaagacagacagau

SEQ ID NO: 158342 - RNA, 22 nt, Human
uggagcaggugggaugucguga

SEQ ID NO: 158343 - RNA, 22 nt, Human
gcuggcccagggucaccuagga

SEQ ID NO: 158344 - RNA, 22 nt, Human
cccagcuugcccaggacugagg

SEQ ID NO: 158345 - RNA, 22 nt, Human
aaaguguggagauugaacuaaa

SEQ ID NO: 158346 - RNA, 22 nt, Human
uucaagaugcacaguggcauuc

SEQ ID NO: 158347 - RNA, 22 nt, Human
gugggaugcaguggugaguggc

SEQ ID NO: 158348 - RNA, 22 nt, Human
agggacagaugaaugacugagu

SEQ ID NO: 158349 - RNA, 22 nt, Human
gcagagcugggucuguauccaa

SEQ ID NO: 158350 - RNA, 22 nt, Human
cacccaggcagguggcugagaa

SEQ ID NO: 158351 - RNA, 22 nt, Human
aguaaugucccuuaaauguggu

SEQ ID NO: 158352 - RNA, 22 nt, Human
auccuugaacuuagacacuagg

SEQ ID NO: 158353 - RNA, 22 nt, Human
ugggcagaauugugguaguuaa

SEQ ID NO: 158354 - RNA, 22 nt, Human
acaaaugccauauauaaauucu

SEQ ID NO: 158355 - RNA, 22 nt, Human
uaugagcuuccaguguugcaug

SEQ ID NO: 158356 - RNA, 22 nt, Human
gcccuggaaucucuccauggga

SEQ ID NO: 158357 - RNA, 18 nt, Human
ucugucuguacaaguauc

SEQ ID NO: 158358 - RNA, 22 nt, Human
ugaugcugagccugggacugac

SEQ ID NO: 158359 - RNA, 22 nt, Human
ugcugcucaaugagaugccauc

SEQ ID NO: 158360 - RNA, 22 nt, Human
aaggcagccgugugacugcaug

SEQ ID NO: 158361 - RNA, 22 nt, Human
aggagcugcuuaaaugguuggu

SEQ ID NO: 158362 - RNA, 22 nt, Human
gaacagcuucuugggagcuggg

SEQ ID NO: 158363 - RNA, 22 nt, Human
aagucacacuagacaacugagg

SEQ ID NO: 158364 - RNA, 22 nt, Human
gagacagcagggccagggccug

SEQ ID NO: 158365 - RNA, 22 nt, Human
uggcuuccgccgcgggccucgg

SEQ ID NO: 158366 - RNA, 22 nt, Human
cagaggccccagaacuagcucu

SEQ ID NO: 158367 - RNA, 22 nt, Human
gagagugucgggggccccagga

SEQ ID NO: 158368 - RNA, 22 nt, Human
cucugcugcccaggccugcuag

SEQ ID NO: 158369 - RNA, 23 nt, Human
acagcaagaggaccagaugugag

SEQ ID NO: 158370 - RNA, 22 nt, Human
gggcacugcuuugcucugucac

SEQ ID NO: 158371 - RNA, 22 nt, Human
ggcacugagcugccuuggggca

SEQ ID NO: 158372 - RNA, 22 nt, Human
gucccagaggacagggucacau

SEQ ID NO: 158373 - RNA, 22 nt, Human
acauuucugcuagaauagguga

SEQ ID NO: 158374 - RNA, 22 nt, Human
ucagggcagccuaaggcaccuc

SEQ ID NO: 158375 - RNA, 20 nt, Human
aggaaaaauggaaacuggag

SEQ ID NO: 158376 - RNA, 22 nt, Human
ucccagagcugauaagccuuua

SEQ ID NO: 158377 - RNA, 22 nt, Human
gggcugucaugugucagugacc

SEQ ID NO: 158378 - RNA, 22 nt, Human
gcagaggcuccauuuuacagau

SEQ ID NO: 158379 - RNA, 22 nt, Human
uaugcacauuaucuaauccauu

SEQ ID NO: 158380 - RNA, 18 nt, Human
cagaugagaugcaaucuc

SEQ ID NO: 158381 - RNA, 22 nt, Human
uggcuuccugcacagugucugc

SEQ ID NO: 158382 - RNA, 22 nt, Human
agggcagcauugccuuucucca

SEQ ID NO: 158383 - RNA, 22 nt, Human
ucagcaauccucccacaggugg

SEQ ID NO: 158384 - RNA, 22 nt, Human
agcagggcagcugaugcgcacg

SEQ ID NO: 158385 - RNA, 22 nt, Human
aaaucaaaagacauguguuuua

SEQ ID NO: 158386 - RNA, 22 nt, Human
cauacauuuugcauauuuacca

SEQ ID NO: 158387 - RNA, 22 nt, Human
ccugccucaucaacuugucgug

SEQ ID NO: 158388 - RNA, 22 nt, Human
ggcugccugggagcccuccucu

SEQ ID NO: 158389 - RNA, 22 nt, Human
aaggaaagacauauaaaugacu

SEQ ID NO: 158390 - RNA, 22 nt, Human
ucaugucaguuucuucuauaaa

SEQ ID NO: 158391 - RNA, 22 nt, Human
uccucugccccagaugaaauuu

SEQ ID NO: 158392 - RNA, 22 nt, Human
ggcagcuggggcagugcccugu

SEQ ID NO: 158393 - RNA, 22 nt, Human
gggcguggauggucagugcagg

SEQ ID NO: 158394 - RNA, 22 nt, Human
uuugcauucuagaaaaauuucu

SEQ ID NO: 158395 - RNA, 22 nt, Human
gaaaauguuuguccggagcuga

SEQ ID NO: 158396 - RNA, 22 nt, Human
ccacaggaccagaggagaucac

SEQ ID NO: 158397 - RNA, 22 nt, Human
agcaccugcuaugugucaggga

SEQ ID NO: 158398 - RNA, 22 nt, Human
uaguuuuuucaacaaauggugc

SEQ ID NO: 158399 - RNA, 22 nt, Human
aguuucuaccgguacauucagg

SEQ ID NO: 158400 - RNA, 19 nt, Human
ggcccaaguacugagugcc

SEQ ID NO: 158401 - RNA, 18 nt, Human
cguuuuuccgggauugca

SEQ ID NO: 158402 - RNA, 22 nt, Human
cccuggagcaucucugcugucu

SEQ ID NO: 158403 - RNA, 22 nt, Human
uccagccuuucuacucacugag

SEQ ID NO: 158404 - RNA, 22 nt, Human
uggggaagggcacccuggagac

SEQ ID NO: 158405 - RNA, 18 nt, Human
gggcccuggcguccgccc

SEQ ID NO: 158406 - RNA, 22 nt, Human
uaagcuauuccugaagaagguu

SEQ ID NO: 158407 - RNA, 19 nt, Human
gccaggagggcucuggcug

SEQ ID NO: 158408 - RNA, 22 nt, Human
gagaaggggugauguggguaau

SEQ ID NO: 158409 - RNA, 22 nt, Human
uacauuaacuuacguccacaug

SEQ ID NO: 158410 - RNA, 19 nt, Human
ggcugccuuuccuuaccag

SEQ ID NO: 158411 - RNA, 22 nt, Human
agaugaaaagauaagcagcaau

SEQ ID NO: 158412 - RNA, 22 nt, Human
ugugcagcuaguccuggacuug

SEQ ID NO: 158413 - RNA, 22 nt, Human
cacuggggaaaacaggcuucuu

SEQ ID NO: 158414 - RNA, 22 nt, Human
augggaggaagagaagaugucu

SEQ ID NO: 158415 - RNA, 22 nt, Human
uggggugguaauacaccguucu

SEQ ID NO: 158416 - RNA, 22 nt, Human
aguggcaguagaugagcugguu

SEQ ID NO: 158417 - RNA, 22 nt, Human
cuuccucccggcccaugcucug

SEQ ID NO: 158418 - RNA, 22 nt, Human
caaaggcaguuacugaaugaag

SEQ ID NO: 158419 - RNA, 22 nt, Human
ccagaagucaggaaugagucuu

SEQ ID NO: 158420 - RNA, 22 nt, Human
ucccagagguugagucacuuau

SEQ ID NO: 158421 - RNA, 22 nt, Human
ccagugcaggugagcaccaggu

SEQ ID NO: 158422 - RNA, 22 nt, Human
agcagcugggcucagagcuggg

SEQ ID NO: 158423 - RNA, 22 nt, Human
acagccagaggagccaggcugg

SEQ ID NO: 158424 - RNA, 22 nt, Human
gggugcaggcagcccaggcagg

SEQ ID NO: 158425 - RNA, 22 nt, Human
accagagcagacuacuggaggu

SEQ ID NO: 158426 - RNA, 22 nt, Human
gucccaggcagagucaggaggg

SEQ ID NO: 158427 - RNA, 22 nt, Human
cuggggugugcucagagcaggg

SEQ ID NO: 158428 - RNA, 22 nt, Human
ccucuggucccagcucugcugc

SEQ ID NO: 158429 - RNA, 22 nt, Human
agaggcaguauacaauccgagc

SEQ ID NO: 158430 - RNA, 22 nt, Human
cugaaugucgaucagcuugggu

SEQ ID NO: 158431 - RNA, 22 nt, Human
uuagaaaggagcuuauuucuuu

SEQ ID NO: 158432 - RNA, 22 nt, Human
aaggaggaauuucagggugaau

SEQ ID NO: 158433 - RNA, 22 nt, Human
ugacacauuaaaugcucacaaa

SEQ ID NO: 158434 - RNA, 22 nt, Human
agagcugggugaagugccauca

SEQ ID NO: 158435 - RNA, 22 nt, Human
ucaaaugcacguagagaaaaua

SEQ ID NO: 158436 - RNA, 22 nt, Human
aaaugcuguaacugauauucug

SEQ ID NO: 158437 - RNA, 22 nt, Human
aggcacugacagauucuguguc

SEQ ID NO: 158438 - RNA, 22 nt, Human
cccuggaggaaaaucugaggcu

SEQ ID NO: 158439 - RNA, 22 nt, Human
cacugcagcaccaugcagggcu

SEQ ID NO: 158440 - RNA, 22 nt, Human
aagaggaaaugauugacuauau

SEQ ID NO: 158441 - RNA, 22 nt, Human
acugcaucugaaacauggguca

SEQ ID NO: 158442 - RNA, 22 nt, Human
ccagggcaggggcuggaguuca

SEQ ID NO: 158443 - RNA, 22 nt, Human
ugucauuuaguccucugugugu

SEQ ID NO: 158444 - RNA, 22 nt, Human
auguaacuucugugaaucugac

SEQ ID NO: 158445 - RNA, 22 nt, Human
cuuggcagagggcugggcucag

SEQ ID NO: 158446 - RNA, 22 nt, Human
agcccucauggaacagcuccua

SEQ ID NO: 158447 - RNA, 22 nt, Human
cuagaaaugcucaagagaaagu

SEQ ID NO: 158448 - RNA, 22 nt, Human
ggaggcucugcuccguguguuc

SEQ ID NO: 158449 - RNA, 22 nt, Human
cagcaauauacacagucuaugg

SEQ ID NO: 158450 - RNA, 22 nt, Human
agaaaacauuacauaggugugu

SEQ ID NO: 158451 - RNA, 20 nt, Human
agugucuggugcagggccuc

SEQ ID NO: 158452 - RNA, 22 nt, Human
agggcagagauuaauuaagaca

SEQ ID NO: 158453 - RNA, 22 nt, Human
uggcucuguuuguuaacuagac

SEQ ID NO: 158454 - RNA, 22 nt, Human
caggcagcaggagcccugcucg

SEQ ID NO: 158455 - RNA, 18 nt, Human
aaugcacacauuuacucc

SEQ ID NO: 158456 - RNA, 22 nt, Human
cagcugcccauccugggaaaug

SEQ ID NO: 158457 - RNA, 20 nt, Human
aguguuccggaagacuggca

SEQ ID NO: 158458 - RNA, 22 nt, Human
uuagaaacccagacucuuaggu

SEQ ID NO: 158459 - RNA, 22 nt, Human
gggccaggucggugaaugguca

SEQ ID NO: 158460 - RNA, 22 nt, Human
agggcugccugacuccagagcc

SEQ ID NO: 158461 - RNA, 22 nt, Human
gggagggauuaguucugccugg

SEQ ID NO: 158462 - RNA, 22 nt, Human
augauugaccaucugcugggcu

SEQ ID NO: 158463 - RNA, 22 nt, Human
uccuugaaaggggcugcagggc

SEQ ID NO: 158464 - RNA, 22 nt, Human
auugaaagauuuugggcucaug

SEQ ID NO: 158465 - RNA, 22 nt, Human
cuucacauguuggaguccuuug

SEQ ID NO: 158466 - RNA, 22 nt, Human
ucuuuccuaggugauaugcaau

SEQ ID NO: 158467 - RNA, 22 nt, Human
agagcugcccacacagcagauu

SEQ ID NO: 158468 - RNA, 22 nt, Human
gcucaggaaaacagucuaguaa

SEQ ID NO: 158469 - RNA, 22 nt, Human
cagcugccccauaaaucacagu

SEQ ID NO: 158470 - RNA, 22 nt, Human
caggguagacaguaggugucug

SEQ ID NO: 158471 - RNA, 22 nt, Human
uuuugucuaagaacuuugcaaa

SEQ ID NO: 158472 - RNA, 22 nt, Human
acagagcugggugcccccugga

SEQ ID NO: 158473 - RNA, 22 nt, Human
cucuggccagagccugcgggaa

SEQ ID NO: 158474 - RNA, 22 nt, Human
cuggagagggagcccuggcagu

SEQ ID NO: 158475 - RNA, 22 nt, Human
gcccuggccuucaucucagaca

SEQ ID NO: 158476 - RNA, 22 nt, Human
uccuuuuugguccaaggugacc

SEQ ID NO: 158477 - RNA, 22 nt, Human
cacucugacuggcccugcagga

SEQ ID NO: 158478 - RNA, 22 nt, Human
ugauuuccuaggucuggagaag

SEQ ID NO: 158479 - RNA, 22 nt, Human
ugaaggcauugaugaaggaauc

SEQ ID NO: 158480 - RNA, 22 nt, Human
gcuggccuccugcuagauggaa

SEQ ID NO: 158481 - RNA, 22 nt, Human
ucacaugcccuguauuuaccag

SEQ ID NO: 158482 - RNA, 22 nt, Human
gagcugcuucugugugccgggu

SEQ ID NO: 158483 - RNA, 22 nt, Human
ucuggccacccgaggccccugc

SEQ ID NO: 158484 - RNA, 22 nt, Human
gcuuggaaguaggauugggaga

SEQ ID NO: 158485 - RNA, 22 nt, Human
gcagcugaauguccauugcugc

SEQ ID NO: 158486 - RNA, 22 nt, Human
ccucgaccuccccaggcucagg

SEQ ID NO: 158487 - RNA, 22 nt, Human
ccuggaaggugaugguacagca

SEQ ID NO: 158488 - RNA, 22 nt, Human
gggagagagagcucauguugaa

SEQ ID NO: 158489 - RNA, 22 nt, Human
agaaugcauuuuguguagcuau

SEQ ID NO: 158490 - RNA, 22 nt, Human
uguauuagaucugagaacuucu

SEQ ID NO: 158491 - RNA, 23 nt, Human
uggcucucucagugcugcagagg

SEQ ID NO: 158492 - RNA, 22 nt, Human
cuccucacacccacugcaacca

SEQ ID NO: 158493 - RNA, 22 nt, Human
gcacagccagcaucugagggau

SEQ ID NO: 158494 - RNA, 22 nt, Human
gcagccagaagacucagaacaa

SEQ ID NO: 158495 - RNA, 20 nt, Human
ggccuuggccucuuugcagc

SEQ ID NO: 158496 - RNA, 22 nt, Human
agaucaaagccaugagagauuu

SEQ ID NO: 158497 - RNA, 22 nt, Human
gaggaagcagggcuuggcugag

SEQ ID NO: 158498 - RNA, 22 nt, Human
uccucagggaagaugagccuca

SEQ ID NO: 158499 - RNA, 22 nt, Human
auccaguuuaugucauauucuu

SEQ ID NO: 158500 - RNA, 19 nt, Human
uggggccuccugucccugg

SEQ ID NO: 158501 - RNA, 22 nt, Human
cugucucuguugccuguaggug

SEQ ID NO: 158502 - RNA, 22 nt, Human
uggcccgaccucugcucaugca

SEQ ID NO: 158503 - RNA, 22 nt, Human
ugcucuguaaggucagaaaagg

SEQ ID NO: 158504 - RNA, 22 nt, Human
uggagcagcuaagccucugaga

SEQ ID NO: 158505 - RNA, 22 nt, Human
ucccagaguucaaugggaaggu

SEQ ID NO: 158506 - RNA, 17 nt, Human
aggccucccuccaggcc

SEQ ID NO: 158507 - RNA, 22 nt, Human
gcucucuggaggccauggacag

SEQ ID NO: 158508 - RNA, 22 nt, Human
ucccagcauuaaugccugucag

SEQ ID NO: 158509 - RNA, 22 nt, Human
ccugggcucuauccugacccag

SEQ ID NO: 158510 - RNA, 22 nt, Human
aucuacagcugucugcacagua

SEQ ID NO: 158511 - RNA, 22 nt, Human
agccuccaguagcugaagagac

SEQ ID NO: 158512 - RNA, 22 nt, Human
caagcagacaguaggccuagaa

SEQ ID NO: 158513 - RNA, 22 nt, Human
cagugcuccugauguacccuug

SEQ ID NO: 158514 - RNA, 22 nt, Human
acagggcccuugccagcacaag

SEQ ID NO: 158515 - RNA, 22 nt, Human
aggcccuguccauggugcugaa

SEQ ID NO: 158516 - RNA, 22 nt, Human
uggaagggggaagacagcucug

SEQ ID NO: 158517 - RNA, 22 nt, Human
uuccuguaugucagugaagagc

SEQ ID NO: 158518 - RNA, 22 nt, Human
acauuucugagcagggagcugu

SEQ ID NO: 158519 - RNA, 22 nt, Human
gugccugguuuggggaguguuc

SEQ ID NO: 158520 - RNA, 21 nt, Human
ucagggcagugggagguuccu

SEQ ID NO: 158521 - RNA, 22 nt, Human
gcagcuggagccagccagacac

SEQ ID NO: 158522 - RNA, 18 nt, Human
uggccuggagacaacucu

SEQ ID NO: 158523 - RNA, 22 nt, Human
ggagccagagggaugcaguuga

SEQ ID NO: 158524 - RNA, 22 nt, Human
ugugcugguacaugugaggaug

SEQ ID NO: 158525 - RNA, 22 nt, Human
ugugaugguucacugggcauga

SEQ ID NO: 158526 - RNA, 22 nt, Human
cugcaagauuggaagaugcaau

SEQ ID NO: 158527 - RNA, 22 nt, Human
gcuguccucuuggacucagggc

SEQ ID NO: 158528 - RNA, 22 nt, Human
ccagggagccuggugugucagc

SEQ ID NO: 158529 - RNA, 22 nt, Human
ggugccaggcucccagcucagg

SEQ ID NO: 158530 - RNA, 22 nt, Human
agauuuccugcacugccuuuga

SEQ ID NO: 158531 - RNA, 22 nt, Human
cagcucugaggaacacuccuuu

SEQ ID NO: 158532 - RNA, 22 nt, Human
ccccuuccuuccucagacagcc

SEQ ID NO: 158533 - RNA, 22 nt, Human
gaggcuggcagaaaagcacagg

SEQ ID NO: 158534 - RNA, 22 nt, Human
aagugacaaaaggguauccaaa

SEQ ID NO: 158535 - RNA, 22 nt, Human
ucagggcaccaaaaaagaugcc

SEQ ID NO: 158536 - RNA, 22 nt, Human
cagucccacaagaucuccacaa

SEQ ID NO: 158537 - RNA, 22 nt, Human
cucccuggcuuuguccugaggc

SEQ ID NO: 158538 - RNA, 22 nt, Human
ucacuuaaaaauucuaguuaug

SEQ ID NO: 158539 - RNA, 22 nt, Human
uuuccucuuugugacacagcug

SEQ ID NO: 158540 - RNA, 22 nt, Human
gcagagcuucuguccuucagga

SEQ ID NO: 158541 - RNA, 22 nt, Human
ucagagagccucaggcacugcc

SEQ ID NO: 158542 - RNA, 22 nt, Human
uuagcugcauuaucaaaguuau

SEQ ID NO: 158543 - RNA, 20 nt, Human
aggcacuggggauagguaag

SEQ ID NO: 158544 - RNA, 22 nt, Human
cuccucuggcuuccuggaggca

SEQ ID NO: 158545 - RNA, 22 nt, Human
agcagggggaguuagacuagau

SEQ ID NO: 158546 - RNA, 22 nt, Human
ugagaggcagaauggugccugc

SEQ ID NO: 158547 - RNA, 22 nt, Human
uuguuaaaaugcauauucuggu

SEQ ID NO: 158548 - RNA, 22 nt, Human
agguggguaucaugagagauua

SEQ ID NO: 158549 - RNA, 22 nt, Human
aggccagcuguuacuagagcca

SEQ ID NO: 158550 - RNA, 20 nt, Human
cccugagaccagagagcagc

SEQ ID NO: 158551 - RNA, 22 nt, Human
acagggccucagccagggcaga

SEQ ID NO: 158552 - RNA, 22 nt, Human
cuggagccgcauggagcaggga

SEQ ID NO: 158553 - RNA, 22 nt, Human
cccugggcaagcccuauuuucc

SEQ ID NO: 158554 - RNA, 22 nt, Human
ccugccugaaggucagccaccc

SEQ ID NO: 158555 - RNA, 22 nt, Human
cgugucaucugagccuugggcg

SEQ ID NO: 158556 - RNA, 22 nt, Human
ugugccugucacccucagagag

SEQ ID NO: 158557 - RNA, 22 nt, Human
agucccagcuacucaagaggcu

SEQ ID NO: 158558 - RNA, 22 nt, Human
augauggugggagaugacccag

SEQ ID NO: 158559 - RNA, 22 nt, Human
aauaauuuccagccaacuggaa

SEQ ID NO: 158560 - RNA, 18 nt, Human
uggcagccagcugcuccu

SEQ ID NO: 158561 - RNA, 22 nt, Human
uccuugaagcaacgugcagaca

SEQ ID NO: 158562 - RNA, 22 nt, Human
agcugcugcgccucacccuggc

SEQ ID NO: 158563 - RNA, 22 nt, Human
agagccuggcucccagcuaccg

SEQ ID NO: 158564 - RNA, 22 nt, Human
caggcugcagcagcaguggccc

SEQ ID NO: 158565 - RNA, 22 nt, Human
acuuucucaaaucagacuuuaa

SEQ ID NO: 158566 - RNA, 22 nt, Human
ccaguggguaggccauggugag

SEQ ID NO: 158567 - RNA, 22 nt, Human
uuucuagaggcuccaggggagu

SEQ ID NO: 158568 - RNA, 22 nt, Human
uauagaagagacaugugcauag

SEQ ID NO: 158569 - RNA, 22 nt, Human
cagcugucuaaguugagcagga

SEQ ID NO: 158570 - RNA, 22 nt, Human
ugggccugauucuugaauccug

SEQ ID NO: 158571 - RNA, 22 nt, Human
ggcugcucuucuuggcgaccuc

SEQ ID NO: 158572 - RNA, 20 nt, Human
ggccugagcauggcuggcag

SEQ ID NO: 158573 - RNA, 22 nt, Human
cuuaacagauacaucugugguu

SEQ ID NO: 158574 - RNA, 22 nt, Human
agaaugcaguuugaaauaaggu

SEQ ID NO: 158575 - RNA, 22 nt, Human
agcugccagaugacagugcuau

SEQ ID NO: 158576 - RNA, 19 nt, Human
auaaggcagugacuuuuuu

SEQ ID NO: 158577 - RNA, 22 nt, Human
ggccugcucugcagccucuaca

SEQ ID NO: 158578 - RNA, 22 nt, Human
guucccauacaguaucagugcu

SEQ ID NO: 158579 - RNA, 22 nt, Human
ggcagauggaagaggcuggguc

SEQ ID NO: 158580 - RNA, 22 nt, Human
gaguuguucaacgugugugaaa

SEQ ID NO: 158581 - RNA, 22 nt, Human
gggucagcugcugggggcugac

SEQ ID NO: 158582 - RNA, 22 nt, Human
cucaggaggaggaaguucauug

SEQ ID NO: 158583 - RNA, 22 nt, Human
cagcccuggugccaagguuccc

SEQ ID NO: 158584 - RNA, 22 nt, Human
gccuggucucuuucaugucagu

SEQ ID NO: 158585 - RNA, 22 nt, Human
cagguacacucccuugugcuga

SEQ ID NO: 158586 - RNA, 22 nt, Human
gccagaaacauacacaucacuu

SEQ ID NO: 158587 - RNA, 22 nt, Human
gcugugcacuaccuauacaucc

SEQ ID NO: 158588 - RNA, 22 nt, Human
auaauaacaccugaauaggaaa

SEQ ID NO: 158589 - RNA, 22 nt, Human
ccuggaagauucaccacuacca

SEQ ID NO: 158590 - RNA, 18 nt, Human
ugacucacccugucagug

SEQ ID NO: 158591 - RNA, 23 nt, Human
cagcugaagcagccugggcugga

SEQ ID NO: 158592 - RNA, 22 nt, Human
gggagccuugggagugccagcc

SEQ ID NO: 158593 - RNA, 22 nt, Human
gcaggaugggagcuucacuuug

SEQ ID NO: 158594 - RNA, 22 nt, Human
gcugugcagccaagugccucug

SEQ ID NO: 158595 - RNA, 22 nt, Human
ucaggggcugugcauuucccag

SEQ ID NO: 158596 - RNA, 22 nt, Human
ggagcagagcauuucacagccu

SEQ ID NO: 158597 - RNA, 22 nt, Human
aggcucagauccuuguguccug

SEQ ID NO: 158598 - RNA, 22 nt, Human
gaauucuuuucuuucugaaagu

SEQ ID NO: 158599 - RNA, 22 nt, Human
aguguuguaugggaugacugcu

SEQ ID NO: 158600 - RNA, 22 nt, Human
auugcaccuuggguuuugaaag

SEQ ID NO: 158601 - RNA, 22 nt, Human
agagcagauggagcuggaagag

SEQ ID NO: 158602 - RNA, 22 nt, Human
ucugcaggaggcuggcugcagg

SEQ ID NO: 158603 - RNA, 22 nt, Human
gcagcagaggcccuacucuuug

SEQ ID NO: 158604 - RNA, 22 nt, Human
agugucauuccagggacccucg

SEQ ID NO: 158605 - RNA, 22 nt, Human
gaaggaaaaauacucuguaagg

SEQ ID NO: 158606 - RNA, 22 nt, Human
gggaguguugagcgcccugcca

SEQ ID NO: 158607 - RNA, 22 nt, Human
cccagcuaccucugcuaggaga

SEQ ID NO: 158608 - RNA, 19 nt, Human
ccaggccuccugggagguc

SEQ ID NO: 158609 - RNA, 22 nt, Human
uaagaauuguguugaauagagu

SEQ ID NO: 158610 - RNA, 22 nt, Human
uaagaacagugucugucucaca

SEQ ID NO: 158611 - RNA, 22 nt, Human
cccagggaaugacucuggccuu

SEQ ID NO: 158612 - RNA, 22 nt, Human
gccuccccugcaauuguccuug

SEQ ID NO: 158613 - RNA, 22 nt, Human
uccugccuucauacugcuguau

SEQ ID NO: 158614 - RNA, 22 nt, Human
gagauuucuuuugaugccuguc

SEQ ID NO: 158615 - RNA, 22 nt, Human
gaggcugcugagagcccuguuu

SEQ ID NO: 158616 - RNA, 22 nt, Human
aagccagguuccauggaggagc

SEQ ID NO: 158617 - RNA, 22 nt, Human
cccaggaggcagaaguugcagu

SEQ ID NO: 158618 - RNA, 22 nt, Human
aagcgccaugguuccugcgcag

SEQ ID NO: 158619 - RNA, 22 nt, Human
cccugcagccggccagcucauu

SEQ ID NO: 158620 - RNA, 22 nt, Human
uucauucccaagaguaaacaua

SEQ ID NO: 158621 - RNA, 22 nt, Human
uaacagaagaugaaacuucuuu

SEQ ID NO: 158622 - RNA, 22 nt, Human
ggccagaggccacagcuguguc

SEQ ID NO: 158623 - RNA, 22 nt, Human
caggaacauuuaaccacagggu

SEQ ID NO: 158624 - RNA, 22 nt, Human
cccagccucuguuugcuccucu

SEQ ID NO: 158625 - RNA, 22 nt, Human
auguguccacaggugugagaga

SEQ ID NO: 158626 - RNA, 22 nt, Human
ucuuacauauagcaugaguaca

SEQ ID NO: 158627 - RNA, 22 nt, Human
gaaggagagggucaaggauaau

SEQ ID NO: 158628 - RNA, 22 nt, Human
gcacagggagacagccguggcc

SEQ ID NO: 158629 - RNA, 22 nt, Human
acagaguauuggaaaggcagug

SEQ ID NO: 158630 - RNA, 23 nt, Human
ggccuccuggucuaggcuagacu

SEQ ID NO: 158631 - RNA, 22 nt, Human
ucugggcucuuaguguacccuc

SEQ ID NO: 158632 - RNA, 22 nt, Human
cacauaaguggguuccauugca

SEQ ID NO: 158633 - RNA, 22 nt, Human
aacaaauggggccuuguaugaa

SEQ ID NO: 158634 - RNA, 22 nt, Human
uuguaacaaucugucauaaaug

SEQ ID NO: 158635 - RNA, 22 nt, Human
cugcccugagggccuguguguu

SEQ ID NO: 158636 - RNA, 22 nt, Human
ugcauuaugcuacccagaagcu

SEQ ID NO: 158637 - RNA, 23 nt, Human
cuugcagggcuggaggcuuagaa

SEQ ID NO: 158638 - RNA, 22 nt, Human
cagaagcauugacuccuugcuc

SEQ ID NO: 158639 - RNA, 22 nt, Human
auguuaaaugguuuauuauuaa

SEQ ID NO: 158640 - RNA, 22 nt, Human
cuggggcucucuggaaugcuug

SEQ ID NO: 158641 - RNA, 22 nt, Human
ugggccuggacaaggccacuag

SEQ ID NO: 158642 - RNA, 19 nt, Human
agcagcuggagguggagug

SEQ ID NO: 158643 - RNA, 22 nt, Human
gagcucauucauucauugccug

SEQ ID NO: 158644 - RNA, 22 nt, Human
cagagggcucaguccugcugga

SEQ ID NO: 158645 - RNA, 22 nt, Human
ucaggcagaugcagggauggau

SEQ ID NO: 158646 - RNA, 22 nt, Human
ggcaggcaggagcgugcuuggg

SEQ ID NO: 158647 - RNA, 21 nt, Human
cagcaaaucauugggcagacu

SEQ ID NO: 158648 - RNA, 22 nt, Human
guacaugucaaaaaaugcauaa

SEQ ID NO: 158649 - RNA, 22 nt, Human
cucuucagauaaaagggauauu

SEQ ID NO: 158650 - RNA, 22 nt, Human
guggcuucacauggcauuuggc

SEQ ID NO: 158651 - RNA, 22 nt, Human
agcagaacauuuucagggcugu

SEQ ID NO: 158652 - RNA, 22 nt, Human
ggaaggaggaugcucuggccuu

SEQ ID NO: 158653 - RNA, 22 nt, Human
gugcuuccccaagccacagccu

SEQ ID NO: 158654 - RNA, 22 nt, Human
guccucuguguaggcugcagac

SEQ ID NO: 158655 - RNA, 22 nt, Human
agcagaaccugcagaccugucu

SEQ ID NO: 158656 - RNA, 22 nt, Human
gcccugcugucuucagaguaua

SEQ ID NO: 158657 - RNA, 22 nt, Human
uguaucaaaccaaauuaauucu

SEQ ID NO: 158658 - RNA, 22 nt, Human
cugggaggcggagguuguagug

SEQ ID NO: 158659 - RNA, 22 nt, Human
uggcucagcauucacuggucuu

SEQ ID NO: 158660 - RNA, 22 nt, Human
uggcugccuagugucugagcag

SEQ ID NO: 158661 - RNA, 22 nt, Human
ugagugccugaacauagaguag

SEQ ID NO: 158662 - RNA, 22 nt, Human
ccaggggaaacagggagcacuc

SEQ ID NO: 158663 - RNA, 22 nt, Human
ugccacagaggugaagcccacu

SEQ ID NO: 158664 - RNA, 22 nt, Human
agaaguuaccacauacuucucu

SEQ ID NO: 158665 - RNA, 22 nt, Human
caggugcugcguggcggagcug

SEQ ID NO: 158666 - RNA, 22 nt, Human
ucucagggccccaaaggcuagu

SEQ ID NO: 158667 - RNA, 22 nt, Human
ccuguggcucucuuuggagguc

SEQ ID NO: 158668 - RNA, 22 nt, Human
gcugccuguccugaggaguccg

SEQ ID NO: 158669 - RNA, 22 nt, Human
ccaggcuggagugcaauggugc

SEQ ID NO: 158670 - RNA, 22 nt, Human
ucauugcagcuucagguguuca

SEQ ID NO: 158671 - RNA, 22 nt, Human
ugcaauaaagugcuauaaaucc

SEQ ID NO: 158672 - RNA, 22 nt, Human
agagaagagcaaugauaaauuu

SEQ ID NO: 158673 - RNA, 22 nt, Human
uaaaaguggauaagcuguagga

SEQ ID NO: 158674 - RNA, 22 nt, Human
agaugagggguagaaaggacuu

SEQ ID NO: 158675 - RNA, 18 nt, Human
uggagcaggaagccuggc

SEQ ID NO: 158676 - RNA, 22 nt, Human
auccagggauaaaaguaagguu

SEQ ID NO: 158677 - RNA, 22 nt, Human
aaaaguauuggccaccauuucu

SEQ ID NO: 158678 - RNA, 22 nt, Human
agggcuggcaucucuaaugcug

SEQ ID NO: 158679 - RNA, 22 nt, Human
cagaccuggaaaacaggcuugc

SEQ ID NO: 158680 - RNA, 22 nt, Human
ugcugggcuaggguggagcucu

SEQ ID NO: 158681 - RNA, 22 nt, Human
gcagccacugggagugcuuaua

SEQ ID NO: 158682 - RNA, 22 nt, Human
acagguggccccgagggagugg

SEQ ID NO: 158683 - RNA, 22 nt, Human
ugcagaagaccuuccagggcug

SEQ ID NO: 158684 - RNA, 22 nt, Human
aggccuggugugccggaugcag

SEQ ID NO: 158685 - RNA, 22 nt, Human
agaauuuuugauuaucuacucg

SEQ ID NO: 158686 - RNA, 19 nt, Human
gcccugcaggagguggggc

SEQ ID NO: 158687 - RNA, 22 nt, Human
ccaggcagagggauccccaucc

SEQ ID NO: 158688 - RNA, 22 nt, Human
ggccucucucccuggcuugcag

SEQ ID NO: 158689 - RNA, 22 nt, Human
gaagaagcaggaguguguagca

SEQ ID NO: 158690 - RNA, 22 nt, Human
gagagugaggcaucaggggcag

SEQ ID NO: 158691 - RNA, 22 nt, Human
ucuguuuaggcaaaauagcuac

SEQ ID NO: 158692 - RNA, 18 nt, Human
agugugugcccuuucagg

SEQ ID NO: 158693 - RNA, 18 nt, Human
cacaggcucccagugagg

SEQ ID NO: 158694 - RNA, 22 nt, Human
ccagguggacggcgaguacagg

SEQ ID NO: 158695 - RNA, 22 nt, Human
aucauguuccagaaacagugau

SEQ ID NO: 158696 - RNA, 22 nt, Human
uuuccucugggcccugccaccc

SEQ ID NO: 158697 - RNA, 22 nt, Human
gcacugaaaauguuggauucca

SEQ ID NO: 158698 - RNA, 22 nt, Human
gggcagcucucacagcagccaa

SEQ ID NO: 158699 - RNA, 22 nt, Human
cauuuacagugagaguuuuuac

SEQ ID NO: 158700 - RNA, 22 nt, Human
gagcuuccauggacgccaucug

SEQ ID NO: 158701 - RNA, 22 nt, Human
guggccuggaguuugauguagg

SEQ ID NO: 158702 - RNA, 22 nt, Human
caggugggccaugaaaaaugac

SEQ ID NO: 158703 - RNA, 22 nt, Human
uagggcagccacccaggcugcu

SEQ ID NO: 158704 - RNA, 22 nt, Human
uuuccucuucgauuaaguuugg

SEQ ID NO: 158705 - RNA, 20 nt, Human
auaauuuacccugcaccacu

SEQ ID NO: 158706 - RNA, 22 nt, Human
uaaauguguuguggaugaaguu

SEQ ID NO: 158707 - RNA, 22 nt, Human
cccuguccuuggcugugaggcu

SEQ ID NO: 158708 - RNA, 22 nt, Human
agagccuguuuugugggagaug

SEQ ID NO: 158709 - RNA, 22 nt, Human
ggaagggcaaaagagaugaacu

SEQ ID NO: 158710 - RNA, 22 nt, Human
acacaguaccccaaggcugggc

SEQ ID NO: 158711 - RNA, 22 nt, Human
accacuguaucuccagcacauu

SEQ ID NO: 158712 - RNA, 22 nt, Human
ggucauugucagagccuguacu

SEQ ID NO: 158713 - RNA, 22 nt, Human
cuggccagcauuuuugcuuuag

SEQ ID NO: 158714 - RNA, 22 nt, Human
cugggcagccucacacaauguu

SEQ ID NO: 158715 - RNA, 22 nt, Human
aaaucugggagcagcucggcca

SEQ ID NO: 158716 - RNA, 22 nt, Human
agccacaggaaacagagacagc

SEQ ID NO: 158717 - RNA, 22 nt, Human
caagggaguuacugagggcggg

SEQ ID NO: 158718 - RNA, 22 nt, Human
agcugaguuaauucaucacuua

SEQ ID NO: 158719 - RNA, 22 nt, Human
augucccaagauacagcuagag

SEQ ID NO: 158720 - RNA, 22 nt, Human
uuuccuucaucaucugagagcu

SEQ ID NO: 158721 - RNA, 22 nt, Human
cucucuguuaugcuuucaugaa

SEQ ID NO: 158722 - RNA, 22 nt, Human
gccagcaguauguccuggcagu

SEQ ID NO: 158723 - RNA, 22 nt, Human
acuuugaaggggaacauuuuaa

SEQ ID NO: 158724 - RNA, 22 nt, Human
accaaggaagagauucucaguu

SEQ ID NO: 158725 - RNA, 22 nt, Human
cauggcagaaaccugagcugcu

SEQ ID NO: 158726 - RNA, 22 nt, Human
ugcugcacucaccaacagauaa

SEQ ID NO: 158727 - RNA, 22 nt, Human
ccugccagcccgcguucaugcc

SEQ ID NO: 158728 - RNA, 23 nt, Human
aggagaagagauuuccacaugca

SEQ ID NO: 158729 - RNA, 21 nt, Human
agugaaauugcaucagaggga

SEQ ID NO: 158730 - RNA, 22 nt, Human
gcugcucucucccuaaguuggg

SEQ ID NO: 158731 - RNA, 22 nt, Human
cccugggacccgcugcagaggc

SEQ ID NO: 158732 - RNA, 22 nt, Human
gucucagaguccuacuuauucc

SEQ ID NO: 158733 - RNA, 22 nt, Human
ucuggcucacuucaggcuucac

SEQ ID NO: 158734 - RNA, 22 nt, Human
ucugucacucccugaugaugaa

SEQ ID NO: 158735 - RNA, 22 nt, Human
uguuuuauuucuccaagaggga

SEQ ID NO: 158736 - RNA, 22 nt, Human
ucucuggaauuuugagagugac

SEQ ID NO: 158737 - RNA, 22 nt, Human
acagaccaaguuuccagcaggu

SEQ ID NO: 158738 - RNA, 22 nt, Human
gacccaggguuucugcacaggg

SEQ ID NO: 158739 - RNA, 22 nt, Human
ugaagccagcuuuggaagacac

SEQ ID NO: 158740 - RNA, 22 nt, Human
acccagaggcggagguugcagu

SEQ ID NO: 158741 - RNA, 22 nt, Human
aacagacagaaaaaugugaucu

SEQ ID NO: 158742 - RNA, 22 nt, Human
aggccaggcaacauucugaagu

SEQ ID NO: 158743 - RNA, 22 nt, Human
gggaguggagagcaauggauga

SEQ ID NO: 158744 - RNA, 22 nt, Human
aaguccaucucugccccacaca

SEQ ID NO: 158745 - RNA, 22 nt, Human
aagauucucagagugaaagaau

SEQ ID NO: 158746 - RNA, 22 nt, Human
ucucuggaagcgcagaucuguu

SEQ ID NO: 158747 - RNA, 22 nt, Human
ucauugaauuucacagcuuuau

SEQ ID NO: 158748 - RNA, 22 nt, Human
gcccucugcuggccucaccucg

SEQ ID NO: 158749 - RNA, 22 nt, Human
guucucucugcuuccaagaugg

SEQ ID NO: 158750 - RNA, 22 nt, Human
ggcucuggugggaagguuagau

SEQ ID NO: 158751 - RNA, 22 nt, Human
gacaggggucccucugggcugu

SEQ ID NO: 158752 - RNA, 23 nt, Human
cccuggccuuggggcacaggcug

SEQ ID NO: 158753 - RNA, 21 nt, Human
guggccugauuaugaaugggu

SEQ ID NO: 158754 - RNA, 22 nt, Human
cucucugguuucagcgaagggg

SEQ ID NO: 158755 - RNA, 22 nt, Human
uuacaaagagugccagagugug

SEQ ID NO: 158756 - RNA, 22 nt, Human
ugggccacaagccaugggacca

SEQ ID NO: 158757 - RNA, 22 nt, Human
uagacacaucaaguauaguuaa

SEQ ID NO: 158758 - RNA, 22 nt, Human
ggaucauuaacacauccaucac

SEQ ID NO: 158759 - RNA, 22 nt, Human
cuggagcuggcuuccuuccacu

SEQ ID NO: 158760 - RNA, 22 nt, Human
uuuauuccaugugucuaugacc

SEQ ID NO: 158761 - RNA, 22 nt, Human
gcagcuggucuggccuagagua

SEQ ID NO: 158762 - RNA, 22 nt, Human
gucacacucagaaugacuagag

SEQ ID NO: 158763 - RNA, 22 nt, Human
uggcagggucuugcuguguugc

SEQ ID NO: 158764 - RNA, 16 nt, Human
gggagggaguuggugg

SEQ ID NO: 158765 - RNA, 22 nt, Human
cugaagccaugugcucacuggu

SEQ ID NO: 158766 - RNA, 22 nt, Human
cucagcagcagggaagagguca

SEQ ID NO: 158767 - RNA, 22 nt, Human
gcuggcuguuggagguaccugc

SEQ ID NO: 158768 - RNA, 21 nt, Human
ugcuucucuagaucaacuacu

SEQ ID NO: 158769 - RNA, 22 nt, Human
gagggacagcuaaagagaaauu

SEQ ID NO: 158770 - RNA, 22 nt, Human
agaaauguuguggguuuuguua

SEQ ID NO: 158771 - RNA, 22 nt, Human
cagcucccagagugaccagcag

SEQ ID NO: 158772 - RNA, 22 nt, Human
ggucccagguugacagggagac

SEQ ID NO: 158773 - RNA, 22 nt, Human
caguguuccaggcggcagugaa

SEQ ID NO: 158774 - RNA, 22 nt, Human
augggaggguggaaaggcucug

SEQ ID NO: 158775 - RNA, 17 nt, Human
gugcagggaugaaggau

SEQ ID NO: 158776 - RNA, 22 nt, Human
gccaggcuccccggaucccugg

SEQ ID NO: 158777 - RNA, 22 nt, Human
agcccagaggcugggcgugcau

SEQ ID NO: 158778 - RNA, 22 nt, Human
uuucaaugacacaaaagagaaa

SEQ ID NO: 158779 - RNA, 22 nt, Human
acacugaaugcuguuuagaaau

SEQ ID NO: 158780 - RNA, 22 nt, Human
gcguggugcugcccugcacaca

SEQ ID NO: 158781 - RNA, 22 nt, Human
uugcacagaugagggugaugcu

SEQ ID NO: 158782 - RNA, 22 nt, Human
aggucacacuuggaucauagaa

SEQ ID NO: 158783 - RNA, 22 nt, Human
agcagcugagccccagcuguga

SEQ ID NO: 158784 - RNA, 22 nt, Human
uggcucaggguccccaaauggu

SEQ ID NO: 158785 - RNA, 20 nt, Human
cccuccagcaaccaggacuu

SEQ ID NO: 158786 - RNA, 20 nt, Human
cugccuggaggccucuaccu

SEQ ID NO: 158787 - RNA, 22 nt, Human
cagcccaaagccccaggcuaga

SEQ ID NO: 158788 - RNA, 22 nt, Human
cuccugaguaguagcauuguca

SEQ ID NO: 158789 - RNA, 22 nt, Human
uuugacagauccuuaacucagc

SEQ ID NO: 158790 - RNA, 22 nt, Human
auugacaauuagcccuuaggug

SEQ ID NO: 158791 - RNA, 22 nt, Human
caaaugcaugagaaauaagagg

SEQ ID NO: 158792 - RNA, 22 nt, Human
uugaggagcaggaugggaggcu

SEQ ID NO: 158793 - RNA, 22 nt, Human
ugcugcuccccagcacacagca

SEQ ID NO: 158794 - RNA, 22 nt, Human
agcagccauagauagcaugcaa

SEQ ID NO: 158795 - RNA, 22 nt, Human
augcacccagugucuggacuau

SEQ ID NO: 158796 - RNA, 19 nt, Human
ugagagugaggaaggcuuc

SEQ ID NO: 158797 - RNA, 22 nt, Human
aagcugccaaugguaagcugcu

SEQ ID NO: 158798 - RNA, 22 nt, Human
aagccagccagugccagucuua

SEQ ID NO: 158799 - RNA, 22 nt, Human
aagccaggcaugcuuggacagu

SEQ ID NO: 158800 - RNA, 22 nt, Human
cagcucccgccaucgggaggca

SEQ ID NO: 158801 - RNA, 22 nt, Human
ugagccuggagucguggagggg

SEQ ID NO: 158802 - RNA, 22 nt, Human
gggcacuguggggcccaugcug

SEQ ID NO: 158803 - RNA, 22 nt, Human
ucagggcaucaucaugaauaua

SEQ ID NO: 158804 - RNA, 22 nt, Human
aaggcagcaccgccuccugaaa

SEQ ID NO: 158805 - RNA, 22 nt, Human
gcacccaggcuugggcagcaac

SEQ ID NO: 158806 - RNA, 22 nt, Human
aggcacugugcagucccaagca

SEQ ID NO: 158807 - RNA, 22 nt, Human
aggcaaaauuacaaaguuauua

SEQ ID NO: 158808 - RNA, 22 nt, Human
gcugucacacauggccccagcu

SEQ ID NO: 158809 - RNA, 22 nt, Human
auaauuuaauuuucacaguggu

SEQ ID NO: 158810 - RNA, 22 nt, Human
ugaaaucuuagccauucugccu

SEQ ID NO: 158811 - RNA, 22 nt, Human
ccagucacuggaaaaugggaau

SEQ ID NO: 158812 - RNA, 22 nt, Human
agcagcauguugggaugugaaa

SEQ ID NO: 158813 - RNA, 22 nt, Human
aagaguuuucuauaaucuuggc

SEQ ID NO: 158814 - RNA, 20 nt, Human
uggagcugugguaaggagca

SEQ ID NO: 158815 - RNA, 22 nt, Human
uucagagcaucucuaaagccag

SEQ ID NO: 158816 - RNA, 19 nt, Human
ugcucauggggacuucucc

SEQ ID NO: 158817 - RNA, 17 nt, Human
gucugggcuuuagagac

SEQ ID NO: 158818 - RNA, 19 nt, Human
ccuuccuccccagggccau

SEQ ID NO: 158819 - RNA, 22 nt, Human
aaaugcauguagaauaauagag

SEQ ID NO: 158820 - RNA, 22 nt, Human
cagcagugcuucagugugagau

SEQ ID NO: 158821 - RNA, 22 nt, Human
acauuaucccuggcacaacugc

SEQ ID NO: 158822 - RNA, 22 nt, Human
uggucaggcugcucugcggcgu

SEQ ID NO: 158823 - RNA, 22 nt, Human
agggagguaggagcuucuagcu

SEQ ID NO: 158824 - RNA, 22 nt, Human
gggcagcagagcccugccgagu

SEQ ID NO: 158825 - RNA, 22 nt, Human
uggccucuuaggacauccucua

SEQ ID NO: 158826 - RNA, 22 nt, Human
ugggcagaaugugggauccaga

SEQ ID NO: 158827 - RNA, 22 nt, Human
uugcuuuguggugguucuucca

SEQ ID NO: 158828 - RNA, 22 nt, Human
aggcuggcgacaucuggcgggc

SEQ ID NO: 158829 - RNA, 22 nt, Human
uugauacauagcacaguuuagg

SEQ ID NO: 158830 - RNA, 22 nt, Human
gccugcagccucaagggcugag

SEQ ID NO: 158831 - RNA, 22 nt, Human
ucuucagauugcacugagcaag

SEQ ID NO: 158832 - RNA, 22 nt, Human
ccugccugguguaagucuaagg

SEQ ID NO: 158833 - RNA, 22 nt, Human
cuggcucauagagcagcuccaa

SEQ ID NO: 158834 - RNA, 22 nt, Human
augugugccccuuuuacucuuu

SEQ ID NO: 158835 - RNA, 22 nt, Human
cuggccuggcaggggaccucua

SEQ ID NO: 158836 - RNA, 22 nt, Human
ggcugggcaaacaagacucuuc

SEQ ID NO: 158837 - RNA, 22 nt, Human
uuucuucugagaucagggagaa

SEQ ID NO: 158838 - RNA, 22 nt, Human
gucugagaaucuugcauaucau

SEQ ID NO: 158839 - RNA, 22 nt, Human
gugcccaggcccaaggcaccac

SEQ ID NO: 158840 - RNA, 22 nt, Human
agucucagcaagcauggcuagu

SEQ ID NO: 158841 - RNA, 22 nt, Human
ucaaaguccuugcuuuuucugu

SEQ ID NO: 158842 - RNA, 22 nt, Human
auagauacauuagguaacuugu

SEQ ID NO: 158843 - RNA, 18 nt, Human
ugaacagaugaguugaag

SEQ ID NO: 158844 - RNA, 22 nt, Human
gaugcagggcuggcaggagcuu

SEQ ID NO: 158845 - RNA, 22 nt, Human
uaucuauuccaaauaucagcgu

SEQ ID NO: 158846 - RNA, 22 nt, Human
ugucuuuucuacuguaagcaua

SEQ ID NO: 158847 - RNA, 23 nt, Human
agggcugaugccauugcagcucu

SEQ ID NO: 158848 - RNA, 20 nt, Human
uaaggcuguuuuguauuccu

SEQ ID NO: 158849 - RNA, 22 nt, Human
caguagcagggauuauuuuagg

SEQ ID NO: 158850 - RNA, 22 nt, Human
ggcucagguugggucacaugac

SEQ ID NO: 158851 - RNA, 22 nt, Human
gccuggcaggccuguuggggcu

SEQ ID NO: 158852 - RNA, 22 nt, Human
agcagaugagccucaugacugg

SEQ ID NO: 158853 - RNA, 22 nt, Human
agcaggaaguagucuguaagca

SEQ ID NO: 158854 - RNA, 22 nt, Human
uuugacagacauuuacuacauu

SEQ ID NO: 158855 - RNA, 22 nt, Human
gagcugucucuauaugaaugcu

SEQ ID NO: 158856 - RNA, 22 nt, Human
aaugucugccugaacuuuauau

SEQ ID NO: 158857 - RNA, 22 nt, Human
uacauucuggaaaggcacagac

SEQ ID NO: 158858 - RNA, 22 nt, Human
uggagcugguaaacagugacau

SEQ ID NO: 158859 - RNA, 17 nt, Human
gcugagugcagggaguc

SEQ ID NO: 158860 - RNA, 22 nt, Human
uggcucagagccuugagagcug

SEQ ID NO: 158861 - RNA, 22 nt, Human
agucucagggccacccggggaa

SEQ ID NO: 158862 - RNA, 22 nt, Human
ugcuuuggccacuagaauucag

SEQ ID NO: 158863 - RNA, 22 nt, Human
cagagccaugguaugggcuugu

SEQ ID NO: 158864 - RNA, 22 nt, Human
ccagugggugcugggcucugcc

SEQ ID NO: 158865 - RNA, 22 nt, Human
aauuucaauuacuuuugcacca

SEQ ID NO: 158866 - RNA, 17 nt, Human
ucaggcugugccuggua

SEQ ID NO: 158867 - RNA, 21 nt, Human
ggagggcagcccagacuggcu

SEQ ID NO: 158868 - RNA, 22 nt, Human
ugcugccuugaccuccugggcu

SEQ ID NO: 158869 - RNA, 22 nt, Human
uagucuuuugagaaguauaucu

SEQ ID NO: 158870 - RNA, 20 nt, Human
aagcaauauagugcaaaugu

SEQ ID NO: 158871 - RNA, 22 nt, Human
cagggccuccuaaggcaucuaa

SEQ ID NO: 158872 - RNA, 23 nt, Human
ucacaggggccagcgcucugugg

SEQ ID NO: 158873 - RNA, 22 nt, Human
agcagcucuguuuaccuggagg

SEQ ID NO: 158874 - RNA, 21 nt, Human
agaagccuggguggagguggg

SEQ ID NO: 158875 - RNA, 22 nt, Human
gguggguauugaauacaggugu

SEQ ID NO: 158876 - RNA, 22 nt, Human
agucccaguucgguucuuccuc

SEQ ID NO: 158877 - RNA, 23 nt, Human
gccuggagaaaagcugcaguuca

SEQ ID NO: 158878 - RNA, 22 nt, Human
caguccuggggaccaggcugag

SEQ ID NO: 158879 - RNA, 22 nt, Human
acagaaauugggcaaauggaag

SEQ ID NO: 158880 - RNA, 22 nt, Human
ucccuggcugggggcugccuug

SEQ ID NO: 158881 - RNA, 22 nt, Human
gcucucuggguggugggcaaca

SEQ ID NO: 158882 - RNA, 22 nt, Human
ccacccugagccgcaagagcag

SEQ ID NO: 158883 - RNA, 22 nt, Human
cccagcuccuuggaugggcagg

SEQ ID NO: 158884 - RNA, 22 nt, Human
ugggaggaaugucacugagcca

SEQ ID NO: 158885 - RNA, 22 nt, Human
cucugugccucaguuuucuucu

SEQ ID NO: 158886 - RNA, 22 nt, Human
caggguggaagcuguagagugg

SEQ ID NO: 158887 - RNA, 20 nt, Human
ccuggcuuugcaucugugau

SEQ ID NO: 158888 - RNA, 22 nt, Human
cagagccaggccugcccucuuu

SEQ ID NO: 158889 - RNA, 20 nt, Human
aggaaaaggguggugguaga

SEQ ID NO: 158890 - RNA, 22 nt, Human
gcagagcaguacucucuugacu

SEQ ID NO: 158891 - RNA, 22 nt, Human
gcaugggcaagaggacuggggg

SEQ ID NO: 158892 - RNA, 22 nt, Human
ucuguggauuuuaguguucaug

SEQ ID NO: 158893 - RNA, 22 nt, Human
gagcuggugugugcccgagcac

SEQ ID NO: 158894 - RNA, 22 nt, Human
cccuggagcuagucugagcaga

SEQ ID NO: 158895 - RNA, 22 nt, Human
acugucaccaucagagcgggaa

SEQ ID NO: 158896 - RNA, 22 nt, Human
ccauuuguucgcccagcuccaa

SEQ ID NO: 158897 - RNA, 22 nt, Human
ccacagagacaggguccuugcu

SEQ ID NO: 158898 - RNA, 22 nt, Human
ccugggucacucaggcaggcgg

SEQ ID NO: 158899 - RNA, 18 nt, Human
ggagccagucugucucug

SEQ ID NO: 158900 - RNA, 22 nt, Human
cauugaaauauggaaacugaug

SEQ ID NO: 158901 - RNA, 22 nt, Human
cacugcuuaguugguaaaugug

SEQ ID NO: 158902 - RNA, 22 nt, Human
cagggccaugaggcacaggguc

SEQ ID NO: 158903 - RNA, 22 nt, Human
aucucagacauguuguccauga

SEQ ID NO: 158904 - RNA, 22 nt, Human
ugacccugcuucuuggugcagg

SEQ ID NO: 158905 - RNA, 22 nt, Human
gcaggaguguggugggacaucc

SEQ ID NO: 158906 - RNA, 22 nt, Human
uggcccugugugcaggcugcac

SEQ ID NO: 158907 - RNA, 22 nt, Human
cugagguguugaugaccuaugc

SEQ ID NO: 158908 - RNA, 22 nt, Human
agggcugcugaggaagccuugc

SEQ ID NO: 158909 - RNA, 22 nt, Human
gcuggccuuugaggaagcugcg

SEQ ID NO: 158910 - RNA, 22 nt, Human
ucagggcauucaagaggccugg

SEQ ID NO: 158911 - RNA, 22 nt, Human
aacagaauaguugauguacagu

SEQ ID NO: 158912 - RNA, 22 nt, Human
cugaggucaauuaaucaacaac

SEQ ID NO: 158913 - RNA, 21 nt, Human
ggacuuacauagguaaggggu

SEQ ID NO: 158914 - RNA, 22 nt, Human
cacugaagcuuucauucucuug

SEQ ID NO: 158915 - RNA, 22 nt, Human
gcugggagcaaagccaugcaua

SEQ ID NO: 158916 - RNA, 20 nt, Human
cagcuuggaugagaggcuga

SEQ ID NO: 158917 - RNA, 19 nt, Human
ucuggcuccugccaggcug

SEQ ID NO: 158918 - RNA, 22 nt, Human
ggaggcugcugccucacguggg

SEQ ID NO: 158919 - RNA, 22 nt, Human
uagcugccagaccauucuuacu

SEQ ID NO: 158920 - RNA, 22 nt, Human
uccauggggcccaggaugagag

SEQ ID NO: 158921 - RNA, 22 nt, Human
ugccugucuuuccucccucgua

SEQ ID NO: 158922 - RNA, 22 nt, Human
cucacagaugcugugggucagg

SEQ ID NO: 158923 - RNA, 22 nt, Human
uccuuggcagcagggagcauga

SEQ ID NO: 158924 - RNA, 22 nt, Human
uuugggaaacuuaggggucaga

SEQ ID NO: 158925 - RNA, 22 nt, Human
gcccauggacacccaagugcca

SEQ ID NO: 158926 - RNA, 22 nt, Human
acauuucuuucuauucaguagc

SEQ ID NO: 158927 - RNA, 22 nt, Human
ucuucagagacucugagccccu

SEQ ID NO: 158928 - RNA, 22 nt, Human
gccaggcuccaggcccuccuga

SEQ ID NO: 158929 - RNA, 22 nt, Human
gcagcaggcacggucucgacau

SEQ ID NO: 158930 - RNA, 22 nt, Human
cugggccauggaagucucugcc

SEQ ID NO: 158931 - RNA, 22 nt, Human
ggcagcuggguuggccagaaac

SEQ ID NO: 158932 - RNA, 22 nt, Human
guggccaggccgacugccaggc

SEQ ID NO: 158933 - RNA, 22 nt, Human
cuggagagauccuccugaaaaa

SEQ ID NO: 158934 - RNA, 22 nt, Human
auucuggauuaucaguccacca

SEQ ID NO: 158935 - RNA, 22 nt, Human
aagaaucauccugcaagagucu

SEQ ID NO: 158936 - RNA, 22 nt, Human
ccucuucugagugagacucccu

SEQ ID NO: 158937 - RNA, 22 nt, Human
gaggcaggcccugaaugaguca

SEQ ID NO: 158938 - RNA, 17 nt, Human
gcuuccucaugcaguuc

SEQ ID NO: 158939 - RNA, 22 nt, Human
aaggccugaacaugaggagaug

SEQ ID NO: 158940 - RNA, 22 nt, Human
uaaugcaguacugauauaaaca

SEQ ID NO: 158941 - RNA, 22 nt, Human
gcugcccugucugcagcaggac

SEQ ID NO: 158942 - RNA, 22 nt, Human
ccuggcagcuccuccccggcgg

SEQ ID NO: 158943 - RNA, 22 nt, Human
cagccagcuggcacugugagua

SEQ ID NO: 158944 - RNA, 22 nt, Human
cugggcagugguggcaucuuug

SEQ ID NO: 158945 - RNA, 22 nt, Human
ggccgggcaggucucagccagc

SEQ ID NO: 158946 - RNA, 20 nt, Human
cccugcagccaugggagugg

SEQ ID NO: 158947 - RNA, 22 nt, Human
gcucccagggaccgcagggcag

SEQ ID NO: 158948 - RNA, 22 nt, Human
ccucaggcuuacgggcaaugga

SEQ ID NO: 158949 - RNA, 20 nt, Human
aggagaaauucgggacaccu

SEQ ID NO: 158950 - RNA, 22 nt, Human
ggggcagaaguagugccccuga

SEQ ID NO: 158951 - RNA, 22 nt, Human
aguccaggaguugggugacauu

SEQ ID NO: 158952 - RNA, 23 nt, Human
ucagugauguugaaccuagcagu

SEQ ID NO: 158953 - RNA, 22 nt, Human
cgcugccaggauccccugccgg

SEQ ID NO: 158954 - RNA, 22 nt, Human
uggagccaggagccugggaguc

SEQ ID NO: 158955 - RNA, 22 nt, Human
uggcuuccuggacagaugcggu

SEQ ID NO: 158956 - RNA, 22 nt, Human
gggugcugacuggggccugaaa

SEQ ID NO: 158957 - RNA, 22 nt, Human
acuguacacgugucauuuacag

SEQ ID NO: 158958 - RNA, 22 nt, Human
ccugagggaaggaugcuaccca

SEQ ID NO: 158959 - RNA, 22 nt, Human
guccugggcccaggggcugccu

SEQ ID NO: 158960 - RNA, 22 nt, Human
acugccuugaaagauuguugag

SEQ ID NO: 158961 - RNA, 22 nt, Human
aaaugcacucugcuucugugac

SEQ ID NO: 158962 - RNA, 22 nt, Human
ucugucacaauuugcuuacucu

SEQ ID NO: 158963 - RNA, 22 nt, Human
cucugagagagcuggugagcac

SEQ ID NO: 158964 - RNA, 22 nt, Human
ugggauggcauccugggccuug

SEQ ID NO: 158965 - RNA, 22 nt, Human
agggccugacacccuugccagc

SEQ ID NO: 158966 - RNA, 22 nt, Human
uccucugcucagcauuccucac

SEQ ID NO: 158967 - RNA, 21 nt, Human
ccaccaggucuucugcucggg

SEQ ID NO: 158968 - RNA, 22 nt, Human
agggguggccugccuuacuccc

SEQ ID NO: 158969 - RNA, 22 nt, Human
acugagcugugacaaugcuuaa

SEQ ID NO: 158970 - RNA, 20 nt, Human
uccagcugggaacagcugau

SEQ ID NO: 158971 - RNA, 22 nt, Human
ggaggcucccacgcagcucaca

SEQ ID NO: 158972 - RNA, 22 nt, Human
acuuguguaacacagaaagaac

SEQ ID NO: 158973 - RNA, 22 nt, Human
ugcuggcuacugauggcaggcc

SEQ ID NO: 158974 - RNA, 22 nt, Human
aaagagcuucauuuccauuuau

SEQ ID NO: 158975 - RNA, 22 nt, Human
gggcucuggauggagccugcag

SEQ ID NO: 158976 - RNA, 22 nt, Human
ucccagauuguugauggcuuaa

SEQ ID NO: 158977 - RNA, 22 nt, Human
aagcagccucauuugugguaag

SEQ ID NO: 158978 - RNA, 22 nt, Human
ugggccugaguuugggaacugg

SEQ ID NO: 158979 - RNA, 22 nt, Human
aaaucuggccccuugccuauuu

SEQ ID NO: 158980 - RNA, 18 nt, Human
uggcagcaggaagccauu

SEQ ID NO: 158981 - RNA, 18 nt, Human
uggagcugagugcugugc

SEQ ID NO: 158982 - RNA, 22 nt, Human
aaggcugagagucacaguccua

SEQ ID NO: 158983 - RNA, 22 nt, Human
cugcucugaagccaggauucug

SEQ ID NO: 158984 - RNA, 22 nt, Human
aucuggcucacuuagucuagga

SEQ ID NO: 158985 - RNA, 22 nt, Human
cacugcuuuaaggcugaguaac

SEQ ID NO: 158986 - RNA, 17 nt, Human
auccccagcaucuagaa

SEQ ID NO: 158987 - RNA, 20 nt, Human
uggcuccucuuggcuguggc

SEQ ID NO: 158988 - RNA, 23 nt, Human
ucacacagcuggucagguacaga

SEQ ID NO: 158989 - RNA, 22 nt, Human
uccucugcuguucugguucuuu

SEQ ID NO: 158990 - RNA, 22 nt, Human
uacaguaaccuuauuugucauu

SEQ ID NO: 158991 - RNA, 22 nt, Human
caggccucuccuuagucuggca

SEQ ID NO: 158992 - RNA, 19 nt, Human
cucuggccucuggaugcug

SEQ ID NO: 158993 - RNA, 22 nt, Human
accugccucagugcagcuggau

SEQ ID NO: 158994 - RNA, 22 nt, Human
ggugggcaacauuuggccugag

SEQ ID NO: 158995 - RNA, 22 nt, Human
uguuccaucaguuuuugguuga

SEQ ID NO: 158996 - RNA, 22 nt, Human
agaggcuccaccuucucugucc

SEQ ID NO: 158997 - RNA, 17 nt, Human
aggugcagaggcagagc

SEQ ID NO: 158998 - RNA, 22 nt, Human
ucagaaauguaagcugaugacu

SEQ ID NO: 158999 - RNA, 22 nt, Human
cccagagcugagucugauauau

SEQ ID NO: 159000 - RNA, 22 nt, Human
uuuauguaauuucauaggugug

SEQ ID NO: 159001 - RNA, 22 nt, Human
caggagugucuccacacagcaa

SEQ ID NO: 159002 - RNA, 22 nt, Human
aggacuuagaacauuauguacu

SEQ ID NO: 159003 - RNA, 22 nt, Human
uuucuguauuuaaaagaucugg

SEQ ID NO: 159004 - RNA, 22 nt, Human
cucaggauccaucuccugcccu

SEQ ID NO: 159005 - RNA, 22 nt, Human
cagccugcagggcugccuguug

SEQ ID NO: 159006 - RNA, 22 nt, Human
gcccucuggcagccuuggcugg

SEQ ID NO: 159007 - RNA, 22 nt, Human
ggcuucagugagcugagcucac

SEQ ID NO: 159008 - RNA, 22 nt, Human
uuccuggugguggugacagcac

SEQ ID NO: 159009 - RNA, 22 nt, Human
aguuuuucuccccuggcuucau

SEQ ID NO: 159010 - RNA, 22 nt, Human
cagagagcuuagugugcugcau

SEQ ID NO: 159011 - RNA, 22 nt, Human
ccacuugugaaauaaucaaaua

SEQ ID NO: 159012 - RNA, 19 nt, Human
gagcccucuccauggccac

SEQ ID NO: 159013 - RNA, 22 nt, Human
uauguacacauacacuuguaau

SEQ ID NO: 159014 - RNA, 20 nt, Human
guggccucucacauucugag

SEQ ID NO: 159015 - RNA, 22 nt, Human
uccagccuaauguucuucccac

SEQ ID NO: 159016 - RNA, 22 nt, Human
cagagcugagaauguugaugcu

SEQ ID NO: 159017 - RNA, 22 nt, Human
cugaggccucucuccugggcuu

SEQ ID NO: 159018 - RNA, 21 nt, Human
ucuuguccuugcucucccacu

SEQ ID NO: 159019 - RNA, 22 nt, Human
gauccuugcaacucugugaggu

SEQ ID NO: 159020 - RNA, 22 nt, Human
gcagcugaagcugcaguuccag

SEQ ID NO: 159021 - RNA, 22 nt, Human
ugucuuccucuuggcuugagcu

SEQ ID NO: 159022 - RNA, 22 nt, Human
gccugccuuuguaugacccuga

SEQ ID NO: 159023 - RNA, 22 nt, Human
augcuuuacaguuuuccaaaca

SEQ ID NO: 159024 - RNA, 22 nt, Human
uuuuccucuguauuugaaaugc

SEQ ID NO: 159025 - RNA, 22 nt, Human
aggcagcaugcucugcuucuac

SEQ ID NO: 159026 - RNA, 22 nt, Human
gccuggaguagcauggcaagcc

SEQ ID NO: 159027 - RNA, 22 nt, Human
gucccugcaucaccacgggacu

SEQ ID NO: 159028 - RNA, 22 nt, Human
agagccaggcggcugggcaccu

SEQ ID NO: 159029 - RNA, 22 nt, Human
cucacaggagaaagucaugguc

SEQ ID NO: 159030 - RNA, 22 nt, Human
aacucaguucuuuccacaaugc

SEQ ID NO: 159031 - RNA, 22 nt, Human
aggguauguuuuuaucuacugu

SEQ ID NO: 159032 - RNA, 17 nt, Human
agugaaauuuacauugc

SEQ ID NO: 159033 - RNA, 22 nt, Human
ccuggugccacuagagaauguc

SEQ ID NO: 159034 - RNA, 22 nt, Human
uaaauuguuuucuagaaguugu

SEQ ID NO: 159035 - RNA, 21 nt, Human
cucaggauggcggccuggugg

SEQ ID NO: 159036 - RNA, 22 nt, Human
ucagggcaagauugguuaauaa

SEQ ID NO: 159037 - RNA, 22 nt, Human
caaagguaaagaucugcugugg

SEQ ID NO: 159038 - RNA, 22 nt, Human
uaaagguagcaugaaacugcaa

SEQ ID NO: 159039 - RNA, 22 nt, Human
gcugggcuugguuucccugcuu

SEQ ID NO: 159040 - RNA, 20 nt, Human
cagagacccaggcuucagcu

SEQ ID NO: 159041 - RNA, 22 nt, Human
uucuggaggccccuuccuucuc

SEQ ID NO: 159042 - RNA, 22 nt, Human
gcaggcagaucaccugucagga

SEQ ID NO: 159043 - RNA, 22 nt, Human
aggcaugugacccuggacucag

SEQ ID NO: 159044 - RNA, 22 nt, Human
gcagggcuaauggggcaaguag

SEQ ID NO: 159045 - RNA, 22 nt, Human
ugggcaggauaauaucucaugu

SEQ ID NO: 159046 - RNA, 22 nt, Human
ucuuccaguguagacaucugcc

SEQ ID NO: 159047 - RNA, 22 nt, Human
gagcuguccuaccaggaguccu

SEQ ID NO: 159048 - RNA, 22 nt, Human
ccuggcugggguagaagugagg

SEQ ID NO: 159049 - RNA, 22 nt, Human
ccaggacucaguggggaaaggg

SEQ ID NO: 159050 - RNA, 22 nt, Human
caguacuuuucuggcuuucuac

SEQ ID NO: 159051 - RNA, 22 nt, Human
cuggagcugcuguccuugggug

SEQ ID NO: 159052 - RNA, 22 nt, Human
augaugguuguccuaggugcau

SEQ ID NO: 159053 - RNA, 22 nt, Human
guccuggggauacagaagugaa

SEQ ID NO: 159054 - RNA, 22 nt, Human
cucuggagguugagcccagcaa

SEQ ID NO: 159055 - RNA, 22 nt, Human
ucacuuauaaaaugcaagaucu

SEQ ID NO: 159056 - RNA, 22 nt, Human
ggcucugcuggauugaggccag

SEQ ID NO: 159057 - RNA, 22 nt, Human
ccugggcaaaugccagagacaa

SEQ ID NO: 159058 - RNA, 22 nt, Human
uaaugugugucaucaguagagu

SEQ ID NO: 159059 - RNA, 22 nt, Human
cugagggcaugaacauuccaua

SEQ ID NO: 159060 - RNA, 22 nt, Human
aacagaaugcaggggaugcugc

SEQ ID NO: 159061 - RNA, 22 nt, Human
aagauuuccauuucuagcucau

SEQ ID NO: 159062 - RNA, 22 nt, Human
agagaagacuuacagccacagu

SEQ ID NO: 159063 - RNA, 17 nt, Human
gcugccaccuuuggagc

SEQ ID NO: 159064 - RNA, 22 nt, Human
ugcugggggugucucaccaggc

SEQ ID NO: 159065 - RNA, 19 nt, Human
gcagccaccgcggcggccg

SEQ ID NO: 159066 - RNA, 22 nt, Human
gggugggguucaggaaucuuca

SEQ ID NO: 159067 - RNA, 22 nt, Human
agagaacaaauuaaaggugguu

SEQ ID NO: 159068 - RNA, 22 nt, Human
ugcagccaccaccucugcugaa

SEQ ID NO: 159069 - RNA, 22 nt, Human
ccagagucuuuauauuccugaa

SEQ ID NO: 159070 - RNA, 18 nt, Human
agggaucaucacugcagc

SEQ ID NO: 159071 - RNA, 22 nt, Human
uguggcccagaugagugugcua

SEQ ID NO: 159072 - RNA, 22 nt, Human
agcaguggccuggggcucugug

SEQ ID NO: 159073 - RNA, 22 nt, Human
gcucaggacccaggugugaccu

SEQ ID NO: 159074 - RNA, 22 nt, Human
cccucugccucugaguaggaca

SEQ ID NO: 159075 - RNA, 22 nt, Human
uugaagcaugguacuuguucaa

SEQ ID NO: 159076 - RNA, 22 nt, Human
aaugcuguaaagaugcuaucug

SEQ ID NO: 159077 - RNA, 22 nt, Human
aaggccugcucagcugucugug

SEQ ID NO: 159078 - RNA, 22 nt, Human
guaacaaaguuucuaggugcug

SEQ ID NO: 159079 - RNA, 22 nt, Human
gcccagaaguugaggcugcagu

SEQ ID NO: 159080 - RNA, 22 nt, Human
acagccuggacuggcucucugc

SEQ ID NO: 159081 - RNA, 22 nt, Human
acagugucuccugguacccagu

SEQ ID NO: 159082 - RNA, 22 nt, Human
aaguuugagagccuuuaguaua

SEQ ID NO: 159083 - RNA, 22 nt, Human
uauauguaagcuauguaagagu

SEQ ID NO: 159084 - RNA, 22 nt, Human
caguuucugggcguucacaggu

SEQ ID NO: 159085 - RNA, 22 nt, Human
uugucccaggacuugcauagau

SEQ ID NO: 159086 - RNA, 22 nt, Human
ucucugcucugugccucaguuu

SEQ ID NO: 159087 - RNA, 22 nt, Human
ucuuccucucuaauugaucaga

SEQ ID NO: 159088 - RNA, 22 nt, Human
cugcugagcccuggcacaggug

SEQ ID NO: 159089 - RNA, 22 nt, Human
gcugugcuauaucucugagugu

SEQ ID NO: 159090 - RNA, 22 nt, Human
gauuucaaggaguuuucacagu

SEQ ID NO: 159091 - RNA, 22 nt, Human
gaggaccacagaugagccugca

SEQ ID NO: 159092 - RNA, 22 nt, Human
cagguggcaugacugccuacaa

SEQ ID NO: 159093 - RNA, 19 nt, Human
ccuuggaguuccaggugga

SEQ ID NO: 159094 - RNA, 22 nt, Human
ccugucuguaucgguucagagu

SEQ ID NO: 159095 - RNA, 22 nt, Human
ccuggccuuaagggcagggagc

SEQ ID NO: 159096 - RNA, 22 nt, Human
ucuggcucaggagcuguguuca

SEQ ID NO: 159097 - RNA, 22 nt, Human
ccaaggagcucauauucuuguu

SEQ ID NO: 159098 - RNA, 22 nt, Human
uaaaugugggggccacgggcuu

SEQ ID NO: 159099 - RNA, 22 nt, Human
acagaaauuagcagugaguuua

SEQ ID NO: 159100 - RNA, 22 nt, Human
guaagagcacugucuccugcug

SEQ ID NO: 159101 - RNA, 22 nt, Human
ggcugcuuuaucggcugcugaa

SEQ ID NO: 159102 - RNA, 22 nt, Human
ugaggaugacgauggcaauggc

SEQ ID NO: 159103 - RNA, 22 nt, Human
aaggcacugaacuuaaauucug

SEQ ID NO: 159104 - RNA, 22 nt, Human
ggugcccaccugucuuccugga

SEQ ID NO: 159105 - RNA, 22 nt, Human
aaucuggcucagaagaagauga

SEQ ID NO: 159106 - RNA, 22 nt, Human
gaggcaggcagauugcuugagg

SEQ ID NO: 159107 - RNA, 22 nt, Human
acaggcugacuuccugccaugu

SEQ ID NO: 159108 - RNA, 22 nt, Human
gcucccuccaugaggcagaccg

SEQ ID NO: 159109 - RNA, 22 nt, Human
ggcugggcugcugggucagagc

SEQ ID NO: 159110 - RNA, 22 nt, Human
caugugucaaaugauguagcug

SEQ ID NO: 159111 - RNA, 22 nt, Human
ggagccaguauuuaguggucuu

SEQ ID NO: 159112 - RNA, 22 nt, Human
aggccuggugaaugaaguaucu

SEQ ID NO: 159113 - RNA, 22 nt, Human
gccuggcacucacugaagaggc

SEQ ID NO: 159114 - RNA, 22 nt, Human
gccaccagggggcuccagugag

SEQ ID NO: 159115 - RNA, 22 nt, Human
gcucagagcacucagacucagc

SEQ ID NO: 159116 - RNA, 22 nt, Human
cccagcccagcguucgaggggu

SEQ ID NO: 159117 - RNA, 22 nt, Human
cucagggcaguauggcugagag

SEQ ID NO: 159118 - RNA, 22 nt, Human
uccucacaagcaagcacaggua

SEQ ID NO: 159119 - RNA, 22 nt, Human
ccagccugguucagaauuggcu

SEQ ID NO: 159120 - RNA, 21 nt, Human
acaugucucuaaucucaguga

SEQ ID NO: 159121 - RNA, 22 nt, Human
ccagcuggugggucuuucucug

SEQ ID NO: 159122 - RNA, 22 nt, Human
uuccauuuauucuuguccagau

SEQ ID NO: 159123 - RNA, 23 nt, Human
cacaccaggagccgucugggcca

SEQ ID NO: 159124 - RNA, 22 nt, Human
gggcugcuuccuggggaaugcu

SEQ ID NO: 159125 - RNA, 22 nt, Human
uuaauaaaguaugaauuggaaa

SEQ ID NO: 159126 - RNA, 22 nt, Human
cucuggagguggagguugcagu

SEQ ID NO: 159127 - RNA, 22 nt, Human
gagcucuguguagccugagggu

SEQ ID NO: 159128 - RNA, 22 nt, Human
cuugccuucuuuuccuauagaa

SEQ ID NO: 159129 - RNA, 22 nt, Human
uucauuccugagcccauauuua

SEQ ID NO: 159130 - RNA, 22 nt, Human
cuggccuuggaagggagcccgu

SEQ ID NO: 159131 - RNA, 22 nt, Human
ugguuuugcuccaguauaaaua

SEQ ID NO: 159132 - RNA, 22 nt, Human
gcagugguccaguucacaccca

SEQ ID NO: 159133 - RNA, 22 nt, Human
uucuaguguccuuggacuugcu

SEQ ID NO: 159134 - RNA, 22 nt, Human
ugaacccaggagguugcaguga

SEQ ID NO: 159135 - RNA, 22 nt, Human
ccuccugggcuccugucugcac

SEQ ID NO: 159136 - RNA, 22 nt, Human
agcuccugaaaagcgcuugcuu

SEQ ID NO: 159137 - RNA, 22 nt, Human
cacacaugaaucccuaguaccu

SEQ ID NO: 159138 - RNA, 20 nt, Human
uguugauuggugucaucuca

SEQ ID NO: 159139 - RNA, 22 nt, Human
cccaccccuggacaggugagug

SEQ ID NO: 159140 - RNA, 22 nt, Human
aguggggaagagcaugggcccu

SEQ ID NO: 159141 - RNA, 22 nt, Human
gccuuucaguuccaucaaagga

SEQ ID NO: 159142 - RNA, 22 nt, Human
cagggacauugguggccagguu

SEQ ID NO: 159143 - RNA, 22 nt, Human
ucccagggacucucugccuucc

SEQ ID NO: 159144 - RNA, 22 nt, Human
cagcuuggcuuccgcuuuacug

SEQ ID NO: 159145 - RNA, 22 nt, Human
agcugagcugcagaugacugua

SEQ ID NO: 159146 - RNA, 22 nt, Human
gugugcaguagagaaagagcag

SEQ ID NO: 159147 - RNA, 18 nt, Human
aaauguacuguccauggc

SEQ ID NO: 159148 - RNA, 22 nt, Human
uccagaggcuccaaagggagau

SEQ ID NO: 159149 - RNA, 22 nt, Human
acagaauuaucaggaaauguua

SEQ ID NO: 159150 - RNA, 22 nt, Human
cagagccagcccacuguucccg

SEQ ID NO: 159151 - RNA, 22 nt, Human
ugcucccaggcauucucuguug

SEQ ID NO: 159152 - RNA, 22 nt, Human
cagccaggccuggugaccaaag

SEQ ID NO: 159153 - RNA, 22 nt, Human
uuugacagcuuguuacaaaguu

SEQ ID NO: 159154 - RNA, 22 nt, Human
ggcccugagcugaaguacugug

SEQ ID NO: 159155 - RNA, 19 nt, Human
gcuggggccugaccagaca

SEQ ID NO: 159156 - RNA, 22 nt, Human
gcagcaggagaguuuguccugc

SEQ ID NO: 159157 - RNA, 22 nt, Human
aaggacuccaauucuuucaucu

SEQ ID NO: 159158 - RNA, 22 nt, Human
ucucagagauuuuguuucccuu

SEQ ID NO: 159159 - RNA, 22 nt, Human
cagaggccucacuuccagccag

SEQ ID NO: 159160 - RNA, 22 nt, Human
agcuggguguguaucagauaaa

SEQ ID NO: 159161 - RNA, 22 nt, Human
cucaccacagagccuguccagc

SEQ ID NO: 159162 - RNA, 22 nt, Human
agguaagggucacaguucauau

SEQ ID NO: 159163 - RNA, 22 nt, Human
agcuuuauauuuaaugaauucu

SEQ ID NO: 159164 - RNA, 22 nt, Human
uggcucagaacuacuucuaguu

SEQ ID NO: 159165 - RNA, 22 nt, Human
aagcugccaccagcccagggca

SEQ ID NO: 159166 - RNA, 22 nt, Human
cugaggcuuggaggggucuggu

SEQ ID NO: 159167 - RNA, 22 nt, Human
ccacagaaaguugucuagagua

SEQ ID NO: 159168 - RNA, 22 nt, Human
cccagcauggagugaggacuca

SEQ ID NO: 159169 - RNA, 22 nt, Human
cucugugauuuugugagccaga

SEQ ID NO: 159170 - RNA, 22 nt, Human
uuguuacacauaauaacauuuu

SEQ ID NO: 159171 - RNA, 22 nt, Human
ucccugcucagcucaccuggca

SEQ ID NO: 159172 - RNA, 22 nt, Human
cagcaguggaacuacccaggga

SEQ ID NO: 159173 - RNA, 22 nt, Human
uauaucuuauaugugcagguac

SEQ ID NO: 159174 - RNA, 22 nt, Human
guauuugauagauuucaaagga

SEQ ID NO: 159175 - RNA, 22 nt, Human
ccaccagcuucagcagccgcgg

SEQ ID NO: 159176 - RNA, 22 nt, Human
ggccucuguucugcauuccucc

SEQ ID NO: 159177 - RNA, 20 nt, Human
acagccagaggaggcagaca

SEQ ID NO: 159178 - RNA, 23 nt, Human
gggagaauaugaggaugauggug

SEQ ID NO: 159179 - RNA, 22 nt, Human
gcccagcaccucucucaggguu

SEQ ID NO: 159180 - RNA, 23 nt, Human
agcaauaagaagggauacaugug

SEQ ID NO: 159181 - RNA, 22 nt, Human
gagcagggagacaacucuggug

SEQ ID NO: 159182 - RNA, 22 nt, Human
accuuucacgguaucagacauc

SEQ ID NO: 159183 - RNA, 22 nt, Human
ugagccugggagauggaggcug

SEQ ID NO: 159184 - RNA, 22 nt, Human
agccuggcuguaaccucauggu

SEQ ID NO: 159185 - RNA, 22 nt, Human
ugaugguugauuauaaaucagu

SEQ ID NO: 159186 - RNA, 22 nt, Human
aggcacugggggaugagcaagg

SEQ ID NO: 159187 - RNA, 22 nt, Human
ucacaggguaucugggauggau

SEQ ID NO: 159188 - RNA, 22 nt, Human
ccuggcacgaagggcugagguu

SEQ ID NO: 159189 - RNA, 22 nt, Human
uguaguaagugcgcaauaaaua

SEQ ID NO: 159190 - RNA, 22 nt, Human
agaaaucugacugcugugcaca

SEQ ID NO: 159191 - RNA, 22 nt, Human
aacaaauggaacacaaaucuuu

SEQ ID NO: 159192 - RNA, 22 nt, Human
ggaagggccucgggcgugggac

SEQ ID NO: 159193 - RNA, 22 nt, Human
uggaaggcaugggaacuguucu

SEQ ID NO: 159194 - RNA, 23 nt, Human
caugggagugagaaugccagcuc

SEQ ID NO: 159195 - RNA, 22 nt, Human
ucugugacuugcgggaggagaa

SEQ ID NO: 159196 - RNA, 22 nt, Human
uuuugaaagccagguuuguaug

SEQ ID NO: 159197 - RNA, 20 nt, Human
aaaaacaguaaugcugaaga

SEQ ID NO: 159198 - RNA, 22 nt, Human
aaguugaagcaugaaccaaggu

SEQ ID NO: 159199 - RNA, 22 nt, Human
cuuauguaaaacggaaagggaa

SEQ ID NO: 159200 - RNA, 22 nt, Human
uagaaaugauuuugaugcuuca

SEQ ID NO: 159201 - RNA, 22 nt, Human
agcuggagaugcccagcaccgg

SEQ ID NO: 159202 - RNA, 22 nt, Human
uagcccagagucccaauuccag

SEQ ID NO: 159203 - RNA, 22 nt, Human
cuugcaggcagggccuccugga

SEQ ID NO: 159204 - RNA, 19 nt, Human
gcuuuuuguugucaaaggu

SEQ ID NO: 159205 - RNA, 22 nt, Human
ugcuaucucuauauccauuuau

SEQ ID NO: 159206 - RNA, 22 nt, Human
ccugacgaaaggcgugcuggag

SEQ ID NO: 159207 - RNA, 19 nt, Human
agcaaauauaauaguguuc

SEQ ID NO: 159208 - RNA, 22 nt, Human
ucugcagcuucuugccagagag

SEQ ID NO: 159209 - RNA, 20 nt, Human
agcagcuguguuuucauccu

SEQ ID NO: 159210 - RNA, 22 nt, Human
cugggcugcaucaaagaggcau

SEQ ID NO: 159211 - RNA, 23 nt, Human
uggcucagggucucuuaugaagu

SEQ ID NO: 159212 - RNA, 22 nt, Human
ccugcacuaccuggggcugcug

SEQ ID NO: 159213 - RNA, 21 nt, Human
ccuggcugcacaguugcuggu

SEQ ID NO: 159214 - RNA, 22 nt, Human
uccagagcagguggucagaagg

SEQ ID NO: 159215 - RNA, 22 nt, Human
agggaagaaaauccaucgcugc

SEQ ID NO: 159216 - RNA, 22 nt, Human
agccuggagaggcgccauacac

SEQ ID NO: 159217 - RNA, 21 nt, Human
agggaaagaaaaugagcuaau

SEQ ID NO: 159218 - RNA, 22 nt, Human
acagaaauauagaagguaggaa

SEQ ID NO: 159219 - RNA, 22 nt, Human
aggcucugaucagguggcugug

SEQ ID NO: 159220 - RNA, 22 nt, Human
gccagggagucugggccacaga

SEQ ID NO: 159221 - RNA, 22 nt, Human
auucaguaggucuagaauaaga

SEQ ID NO: 159222 - RNA, 22 nt, Human
cagagagagugggguguggauu

SEQ ID NO: 159223 - RNA, 22 nt, Human
uggcagcacaagguggcccaug

SEQ ID NO: 159224 - RNA, 22 nt, Human
gcugagggcuguaacagcagag

SEQ ID NO: 159225 - RNA, 19 nt, Human
cuggugcuugagugaguca

SEQ ID NO: 159226 - RNA, 22 nt, Human
guuauguauugggaaauccaag

SEQ ID NO: 159227 - RNA, 22 nt, Human
agccagcaggugagugcagccu

SEQ ID NO: 159228 - RNA, 22 nt, Human
uguccacaucacucacuuguca

SEQ ID NO: 159229 - RNA, 22 nt, Human
agaguguaauaagggcaagggc

SEQ ID NO: 159230 - RNA, 22 nt, Human
uguaagauauucagcuuauuga

SEQ ID NO: 159231 - RNA, 22 nt, Human
cuggcucacuagcccugcccug

SEQ ID NO: 159232 - RNA, 22 nt, Human
aagcaaagaguuuaguggguga

SEQ ID NO: 159233 - RNA, 22 nt, Human
acuguguggaaauuugugaggg

SEQ ID NO: 159234 - RNA, 22 nt, Human
agugcacagcgugauguauugg

SEQ ID NO: 159235 - RNA, 22 nt, Human
gcugccaguaguuggagcucca

SEQ ID NO: 159236 - RNA, 22 nt, Human
uucauuccuucccuaagcaacu

SEQ ID NO: 159237 - RNA, 22 nt, Human
gucucagagagcuacucucuua

SEQ ID NO: 159238 - RNA, 22 nt, Human
gaggggcuggcacgauggcugc

SEQ ID NO: 159239 - RNA, 18 nt, Human
gguggcaggucagaugcc

SEQ ID NO: 159240 - RNA, 22 nt, Human
gccaggcugcuccagggaggcc

SEQ ID NO: 159241 - RNA, 22 nt, Human
ccuggccucagccuagggcuga

SEQ ID NO: 159242 - RNA, 22 nt, Human
gcauuucuuccuggugugagcc

SEQ ID NO: 159243 - RNA, 19 nt, Human
acaagggcaggcaagguga

SEQ ID NO: 159244 - RNA, 17 nt, Human
aggcuggcucacaggga

SEQ ID NO: 159245 - RNA, 18 nt, Human
caugucugcgccacaagg

SEQ ID NO: 159246 - RNA, 22 nt, Human
cuuccuggccauugccauggca

SEQ ID NO: 159247 - RNA, 22 nt, Human
gaggccugaaaggggaccuaug

SEQ ID NO: 159248 - RNA, 23 nt, Human
auacauacagucuuacugacuuu

SEQ ID NO: 159249 - RNA, 22 nt, Human
caucacuguccucagcauucca

SEQ ID NO: 159250 - RNA, 22 nt, Human
ucuuuccuacuuuauugugaac

SEQ ID NO: 159251 - RNA, 22 nt, Human
caggccugacccugagcuucac

SEQ ID NO: 159252 - RNA, 22 nt, Human
ucuggagcuuguuucagauggu

SEQ ID NO: 159253 - RNA, 22 nt, Human
ucucagggagggcgagucagcg

SEQ ID NO: 159254 - RNA, 22 nt, Human
gggguggauuccuacaggucca

SEQ ID NO: 159255 - RNA, 22 nt, Human
ggcagccaugucccagggcuuc

SEQ ID NO: 159256 - RNA, 22 nt, Human
caaauaucuuuggcaaagagaa

SEQ ID NO: 159257 - RNA, 22 nt, Human
ccaggagcauuaagagaacaua

SEQ ID NO: 159258 - RNA, 22 nt, Human
agcagcagauccaaaaaaugug

SEQ ID NO: 159259 - RNA, 22 nt, Human
ugggcagaguagcucagaagaa

SEQ ID NO: 159260 - RNA, 22 nt, Human
gcucuccacugaccacggggca

SEQ ID NO: 159261 - RNA, 22 nt, Human
cuucaagauccauagauauugc

SEQ ID NO: 159262 - RNA, 22 nt, Human
uggcucugcugaaccuagugca

SEQ ID NO: 159263 - RNA, 22 nt, Human
ugccugggaaccaauccuggcu

SEQ ID NO: 159264 - RNA, 22 nt, Human
cugucucugucuuaacucccag

SEQ ID NO: 159265 - RNA, 22 nt, Human
aaaauaucagcaaagggugaca

SEQ ID NO: 159266 - RNA, 22 nt, Human
gggccagagcuuggcagcuggg

SEQ ID NO: 159267 - RNA, 17 nt, Human
agcugagcuggccaggg

SEQ ID NO: 159268 - RNA, 22 nt, Human
aaagauuuaugaaguucaauua

SEQ ID NO: 159269 - RNA, 22 nt, Human
ggagcugcucagagccaguccc

SEQ ID NO: 159270 - RNA, 22 nt, Human
uaagcauucaaugcuuagcacu

SEQ ID NO: 159271 - RNA, 19 nt, Human
agugucaucagcuacucag

SEQ ID NO: 159272 - RNA, 20 nt, Human
gggcuggcgcauggggaaag

SEQ ID NO: 159273 - RNA, 22 nt, Human
ccucacuuuccuuucuccuggg

SEQ ID NO: 159274 - RNA, 22 nt, Human
ggcaggguggcccuccagugag

SEQ ID NO: 159275 - RNA, 22 nt, Human
uccaggagagguguggggacug

SEQ ID NO: 159276 - RNA, 22 nt, Human
ugucucugagaugacucccacc

SEQ ID NO: 159277 - RNA, 22 nt, Human
aaauguguuucgaaaacuggug

SEQ ID NO: 159278 - RNA, 22 nt, Human
aaaucaguucucccuuucuuca

SEQ ID NO: 159279 - RNA, 20 nt, Human
agucccuuuggucagguauu

SEQ ID NO: 159280 - RNA, 22 nt, Human
guucaaagcuccugguacagua

SEQ ID NO: 159281 - RNA, 22 nt, Human
ggagcuggcuacagagaacucc

SEQ ID NO: 159282 - RNA, 22 nt, Human
agcucuccacacauaggacuag

SEQ ID NO: 159283 - RNA, 22 nt, Human
ggaugcaggaguugaagaagga

SEQ ID NO: 159284 - RNA, 22 nt, Human
uugucuuaaauggauggacaau

SEQ ID NO: 159285 - RNA, 22 nt, Human
guggagaccuccuaggaugugu

SEQ ID NO: 159286 - RNA, 19 nt, Human
uccccagcaccucugaguc

SEQ ID NO: 159287 - RNA, 22 nt, Human
ucuugccucuuccccuuuccau

SEQ ID NO: 159288 - RNA, 22 nt, Human
augcugaggacaaagagaucaa

SEQ ID NO: 159289 - RNA, 22 nt, Human
ccaggccuuucuucuuggucug

SEQ ID NO: 159290 - RNA, 22 nt, Human
acugggaggcaaagagcaagga

SEQ ID NO: 159291 - RNA, 21 nt, Human
ucaggcaggcgcagagggaag

SEQ ID NO: 159292 - RNA, 22 nt, Human
aucaaaguccaucagaagguag

SEQ ID NO: 159293 - RNA, 22 nt, Human
ugacagaacagguugggagcaa

SEQ ID NO: 159294 - RNA, 22 nt, Human
gaguuauucuagguccuuugua

SEQ ID NO: 159295 - RNA, 22 nt, Human
caauguguguguuuuucucaac

SEQ ID NO: 159296 - RNA, 22 nt, Human
ugagccagaggaggcugugugg

SEQ ID NO: 159297 - RNA, 22 nt, Human
ggaaaguggugguggaaagagg

SEQ ID NO: 159298 - RNA, 22 nt, Human
cucuccagaauaugccgccgug

SEQ ID NO: 159299 - RNA, 22 nt, Human
cagaguguuucuuugggugggu

SEQ ID NO: 159300 - RNA, 21 nt, Human
gagacagcccagugccagggc

SEQ ID NO: 159301 - RNA, 22 nt, Human
ggcuucaccgcgggguugcagg

SEQ ID NO: 159302 - RNA, 21 nt, Human
ugcaggaaagugcugcgaccc

SEQ ID NO: 159303 - RNA, 21 nt, Human
gcagccacagccaccaagcua

SEQ ID NO: 159304 - RNA, 22 nt, Human
auaugcacacucugcccacaga

SEQ ID NO: 159305 - RNA, 22 nt, Human
agcuguguagggaaucagagaa

SEQ ID NO: 159306 - RNA, 19 nt, Human
ccucccacggauuccuucc

SEQ ID NO: 159307 - RNA, 22 nt, Human
ugggccuguugggguugaguua

SEQ ID NO: 159308 - RNA, 22 nt, Human
guguuuccuaguuuaaugaaug

SEQ ID NO: 159309 - RNA, 22 nt, Human
uugacaauugggagauauaaag

SEQ ID NO: 159310 - RNA, 22 nt, Human
uggcucugucaaacugcacaca

SEQ ID NO: 159311 - RNA, 22 nt, Human
aggcugcuucagcugcagggag

SEQ ID NO: 159312 - RNA, 22 nt, Human
aauuagagaucaguucuuugac

SEQ ID NO: 159313 - RNA, 20 nt, Human
gucagugucuucaguaguga

SEQ ID NO: 159314 - RNA, 22 nt, Human
gcccucagaugggaaaggaggg

SEQ ID NO: 159315 - RNA, 22 nt, Human
gcugccugcacagagcugcuuu

SEQ ID NO: 159316 - RNA, 22 nt, Human
gugcauuugugcaugcacaugu

SEQ ID NO: 159317 - RNA, 22 nt, Human
agggcagcuaaggugcugacug

SEQ ID NO: 159318 - RNA, 22 nt, Human
ggagccagcagggugacacuga

SEQ ID NO: 159319 - RNA, 17 nt, Human
ugcugccaagucccaac

SEQ ID NO: 159320 - RNA, 23 nt, Human
agcagggccagaauacuugcugu

SEQ ID NO: 159321 - RNA, 22 nt, Human
agagccacugggagacagagca

SEQ ID NO: 159322 - RNA, 22 nt, Human
ccucugagaccagcucugcacc

SEQ ID NO: 159323 - RNA, 22 nt, Human
ugauuuccacagucaggggugc

SEQ ID NO: 159324 - RNA, 22 nt, Human
ugaacgcagguccacauggcuc

SEQ ID NO: 159325 - RNA, 22 nt, Human
ccccagccagcaggaccucuga

SEQ ID NO: 159326 - RNA, 22 nt, Human
gggcagauggggcacaggcuga

SEQ ID NO: 159327 - RNA, 22 nt, Human
gagcucuggcagggcaggucug

SEQ ID NO: 159328 - RNA, 22 nt, Human
ggagggcaucaaucaggccugg

SEQ ID NO: 159329 - RNA, 22 nt, Human
ugcauuaugcuugugcuguaua

SEQ ID NO: 159330 - RNA, 22 nt, Human
uggcuggacagugggcagugga

SEQ ID NO: 159331 - RNA, 22 nt, Human
ugggcucugcaucagugcccau

SEQ ID NO: 159332 - RNA, 22 nt, Human
ucucagagcucacaccuccugg

SEQ ID NO: 159333 - RNA, 22 nt, Human
gaggaggcuaagugggcucugg

SEQ ID NO: 159334 - RNA, 22 nt, Human
ugggccuguggcuuggcucuag

SEQ ID NO: 159335 - RNA, 22 nt, Human
acaggcuuuuuuagaaugacau

SEQ ID NO: 159336 - RNA, 22 nt, Human
acaaggcugaacagugaagccg

SEQ ID NO: 159337 - RNA, 22 nt, Human
cuucuuuacuuucuagaaauaa

SEQ ID NO: 159338 - RNA, 22 nt, Human
cugggcacuuuggggagccuac

SEQ ID NO: 159339 - RNA, 22 nt, Human
acagagcaguucuggagcuggc

SEQ ID NO: 159340 - RNA, 22 nt, Human
ugcuggcuguauaugugagagu

SEQ ID NO: 159341 - RNA, 22 nt, Human
uagggcagagcuuguacacgau

SEQ ID NO: 159342 - RNA, 22 nt, Human
cucugggcaaguuucuucauga

SEQ ID NO: 159343 - RNA, 22 nt, Human
gccucugcaauuacauugugcc

SEQ ID NO: 159344 - RNA, 22 nt, Human
aagcacuuagaagagugccugc

SEQ ID NO: 159345 - RNA, 22 nt, Human
aagagcugcaucuaagccauga

SEQ ID NO: 159346 - RNA, 22 nt, Human
ccuggagcuuggucacgcugcg

SEQ ID NO: 159347 - RNA, 22 nt, Human
accugccuauggagccacaugg

SEQ ID NO: 159348 - RNA, 22 nt, Human
gggcugugagaguggggcugcu

SEQ ID NO: 159349 - RNA, 21 nt, Human
ccugagggugguugugaagau

SEQ ID NO: 159350 - RNA, 22 nt, Human
agagugaaggccagguuacagu

SEQ ID NO: 159351 - RNA, 22 nt, Human
accagguggccccagcgugguu

SEQ ID NO: 159352 - RNA, 22 nt, Human
guacuucccugggaggcaagca

SEQ ID NO: 159353 - RNA, 22 nt, Human
aaggcacuagcagaauuaguga

SEQ ID NO: 159354 - RNA, 22 nt, Human
acaugcuuucuagguccuucug

SEQ ID NO: 159355 - RNA, 22 nt, Human
ucagaggucacacagcaaguuu

SEQ ID NO: 159356 - RNA, 22 nt, Human
gguugccggggcaggacuggaa

SEQ ID NO: 159357 - RNA, 22 nt, Human
uggccugguccuugucaaggca

SEQ ID NO: 159358 - RNA, 22 nt, Human
aaugaacaggugaaugucagau

SEQ ID NO: 159359 - RNA, 22 nt, Human
ccugggagggcaagugcugaug

SEQ ID NO: 159360 - RNA, 22 nt, Human
uucacauuaucaggauuguuuc

SEQ ID NO: 159361 - RNA, 22 nt, Human
cucuggaguucucaugaggaac

SEQ ID NO: 159362 - RNA, 22 nt, Human
cagggcaggacagauacauuac

SEQ ID NO: 159363 - RNA, 22 nt, Human
cuccucugucuaccacgagggu

SEQ ID NO: 159364 - RNA, 22 nt, Human
cacauccuucagcugagcccag

SEQ ID NO: 159365 - RNA, 22 nt, Human
agggaggaucugcuccuugucu

SEQ ID NO: 159366 - RNA, 21 nt, Human
agaaaaaccagcauguuuuca

SEQ ID NO: 159367 - RNA, 22 nt, Human
uacaaaguuugagaaugcuuuc

SEQ ID NO: 159368 - RNA, 22 nt, Human
ccagugcacagccaggcaggug

SEQ ID NO: 159369 - RNA, 22 nt, Human
ugucccaguuuugcagguuaga

SEQ ID NO: 159370 - RNA, 22 nt, Human
gucccagggagguucagggcuu

SEQ ID NO: 159371 - RNA, 22 nt, Human
gucccuaguggaaagacaugau

SEQ ID NO: 159372 - RNA, 22 nt, Human
auggaaagccaguguuccauca

SEQ ID NO: 159373 - RNA, 22 nt, Human
gcugccugccuugccuggagga

SEQ ID NO: 159374 - RNA, 22 nt, Human
ucaggcaggcagagggcaaaug

SEQ ID NO: 159375 - RNA, 22 nt, Human
gaaaccucuuagccucucuuug

SEQ ID NO: 159376 - RNA, 22 nt, Human
ugcagcuucuuguccugugauu

SEQ ID NO: 159377 - RNA, 22 nt, Human
gacagcaggagaucaugauaga

SEQ ID NO: 159378 - RNA, 22 nt, Human
caagagcugcaaauagcgugac

SEQ ID NO: 159379 - RNA, 22 nt, Human
caauguguuugcauauuaaaau

SEQ ID NO: 159380 - RNA, 22 nt, Human
gagguagccacagauagagacu

SEQ ID NO: 159381 - RNA, 22 nt, Human
ccugugccauccugagcauccc

SEQ ID NO: 159382 - RNA, 22 nt, Human
uccuucaggguugaggccgacu

SEQ ID NO: 159383 - RNA, 22 nt, Human
ugcauuguuugauaggugaauu

SEQ ID NO: 159384 - RNA, 22 nt, Human
auucaagagcccauguuuccug

SEQ ID NO: 159385 - RNA, 22 nt, Human
agagccagcauuugggcccugc

SEQ ID NO: 159386 - RNA, 22 nt, Human
gcugcaggcgccugcggucucu

SEQ ID NO: 159387 - RNA, 22 nt, Human
cauuucugugacacuuccaucu

SEQ ID NO: 159388 - RNA, 21 nt, Human
uugaaggaucacuucuguacc

SEQ ID NO: 159389 - RNA, 22 nt, Human
gagaagcaauuuccaacugugc

SEQ ID NO: 159390 - RNA, 22 nt, Human
guaacugaggcagcuuuuaaga

SEQ ID NO: 159391 - RNA, 22 nt, Human
aggaaaaagaguugcugccuuc

SEQ ID NO: 159392 - RNA, 22 nt, Human
aaaaugcaugagaaugugcucg

SEQ ID NO: 159393 - RNA, 22 nt, Human
cccucugcugccuggcuggguc

SEQ ID NO: 159394 - RNA, 21 nt, Human
agagccugagaucuuccagca

SEQ ID NO: 159395 - RNA, 19 nt, Human
ugaagcaauaccauuuuug

SEQ ID NO: 159396 - RNA, 22 nt, Human
acaggugguaaaauggacuguc

SEQ ID NO: 159397 - RNA, 22 nt, Human
cacugcucgcugcagcauggcc

SEQ ID NO: 159398 - RNA, 22 nt, Human
gagcccaggcagagguugcagu

SEQ ID NO: 159399 - RNA, 22 nt, Human
acaaagucaaauugcagccgcc

SEQ ID NO: 159400 - RNA, 22 nt, Human
aaaguuacuaucacaaugaaau

SEQ ID NO: 159401 - RNA, 22 nt, Human
uagggcaggugaagaaaagcua

SEQ ID NO: 159402 - RNA, 22 nt, Human
aagaacagauucagccugaacu

SEQ ID NO: 159403 - RNA, 22 nt, Human
ccagcagcgauagggugagugc

SEQ ID NO: 159404 - RNA, 21 nt, Human
ugggcagauggcaguguggcu

SEQ ID NO: 159405 - RNA, 22 nt, Human
ccugggagugucagacuugcuu

SEQ ID NO: 159406 - RNA, 22 nt, Human
cucugagcuccuggaagcgugc

SEQ ID NO: 159407 - RNA, 22 nt, Human
gggagggaucugcuaggcaaug

SEQ ID NO: 159408 - RNA, 22 nt, Human
agagcucaagacgcucacagua

SEQ ID NO: 159409 - RNA, 22 nt, Human
ucaaaaguuucacauagagaua

SEQ ID NO: 159410 - RNA, 22 nt, Human
ccagagccugcugagccccauu

SEQ ID NO: 159411 - RNA, 22 nt, Human
acuuucuaggucucaguccuuu

SEQ ID NO: 159412 - RNA, 22 nt, Human
guggcccucugauagggucagg

SEQ ID NO: 159413 - RNA, 22 nt, Human
accaucagucacauguagagaa

SEQ ID NO: 159414 - RNA, 22 nt, Human
caaaugugacuuuugggcuucu

SEQ ID NO: 159415 - RNA, 22 nt, Human
gaaggcuugcagcucuguggca

SEQ ID NO: 159416 - RNA, 18 nt, Human
ggaaaaggagugucuagc

SEQ ID NO: 159417 - RNA, 22 nt, Human
aggccaaguagcuagcauugaa

SEQ ID NO: 159418 - RNA, 22 nt, Human
cugcagaggucuugcugauggu

SEQ ID NO: 159419 - RNA, 22 nt, Human
ggcugcagguugguuggcagcu

SEQ ID NO: 159420 - RNA, 21 nt, Human
cugcaucucauagaacauguc

SEQ ID NO: 159421 - RNA, 22 nt, Human
aggcacugacucaagggagcca

SEQ ID NO: 159422 - RNA, 22 nt, Human
ggagaaggaagaaagcuacuau

SEQ ID NO: 159423 - RNA, 22 nt, Human
ugacagaaauaguucuuaauuu

SEQ ID NO: 159424 - RNA, 22 nt, Human
ugcugugagguugagaaggaag

SEQ ID NO: 159425 - RNA, 22 nt, Human
ggcugccacgucgaggguccaa

SEQ ID NO: 159426 - RNA, 22 nt, Human
ccagcccuguaaggaugaggca

SEQ ID NO: 159427 - RNA, 20 nt, Human
gcucccagccugcagucccc

SEQ ID NO: 159428 - RNA, 22 nt, Human
aaggcaggaugcggacccaucu

SEQ ID NO: 159429 - RNA, 17 nt, Human
aaaauucuguaaagagg

SEQ ID NO: 159430 - RNA, 22 nt, Human
ugcagggccuucuagaccaugg

SEQ ID NO: 159431 - RNA, 22 nt, Human
aggagccaugagugacaucaca

SEQ ID NO: 159432 - RNA, 22 nt, Human
gcaggagucacugacuuggucc

SEQ ID NO: 159433 - RNA, 22 nt, Human
agguggagacccagagaaggcg

SEQ ID NO: 159434 - RNA, 22 nt, Human
gaaaguuuauagguuauauaau

SEQ ID NO: 159435 - RNA, 22 nt, Human
ugugugcauucacaugcaugcc

SEQ ID NO: 159436 - RNA, 22 nt, Human
agcauugccugccuauugcuaa

SEQ ID NO: 159437 - RNA, 22 nt, Human
gcugccacuuggucaugucaug

SEQ ID NO: 159438 - RNA, 21 nt, Human
ggccugaguauaggacaggcc

SEQ ID NO: 159439 - RNA, 22 nt, Human
uaugcacauauaaccugcacug

SEQ ID NO: 159440 - RNA, 22 nt, Human
ccugccugggcucacuugccag

SEQ ID NO: 159441 - RNA, 22 nt, Human
aaggcuaugaucuuuuucauga

SEQ ID NO: 159442 - RNA, 19 nt, Human
ugagugggccccugcagac

SEQ ID NO: 159443 - RNA, 19 nt, Human
agucucaguguacagaggc

SEQ ID NO: 159444 - RNA, 22 nt, Human
ggcuggcacucuguccaguguc

SEQ ID NO: 159445 - RNA, 22 nt, Human
aaucagaaaauucaguggaauu

SEQ ID NO: 159446 - RNA, 22 nt, Human
uccuuugacuucuugcagucca

SEQ ID NO: 159447 - RNA, 22 nt, Human
ggggauggaggcgugugguccu

SEQ ID NO: 159448 - RNA, 17 nt, Human
cagugcagagcccuuuc

SEQ ID NO: 159449 - RNA, 22 nt, Human
cugcuggccuagcccauccucu

SEQ ID NO: 159450 - RNA, 22 nt, Human
cccucccaagcacucugacaua

SEQ ID NO: 159451 - RNA, 22 nt, Human
gcugucuggguugagggcccug

SEQ ID NO: 159452 - RNA, 22 nt, Human
ggucaugcugugaaucagugcu

SEQ ID NO: 159453 - RNA, 20 nt, Human
gcugggggugugcugaguga

SEQ ID NO: 159454 - RNA, 17 nt, Human
uuuucucucuuggauuc

SEQ ID NO: 159455 - RNA, 22 nt, Human
ugagccaguggaagauggcagu

SEQ ID NO: 159456 - RNA, 22 nt, Human
cucccagggccaucgagucacu

SEQ ID NO: 159457 - RNA, 22 nt, Human
aguacuucagaggcugcccagg

SEQ ID NO: 159458 - RNA, 22 nt, Human
cagguggggagaguguggagca

SEQ ID NO: 159459 - RNA, 22 nt, Human
ucccagagugagccaggggcag

SEQ ID NO: 159460 - RNA, 22 nt, Human
ccaggaguuugaggcugcagug

SEQ ID NO: 159461 - RNA, 22 nt, Human
gccugcagugagugcagaaggu

SEQ ID NO: 159462 - RNA, 22 nt, Human
agcacagaguugcagagagcgu

SEQ ID NO: 159463 - RNA, 22 nt, Human
gggcagagacucagaaacagaa

SEQ ID NO: 159464 - RNA, 22 nt, Human
caggggccggcuguccgugccc

SEQ ID NO: 159465 - RNA, 22 nt, Human
ccugucucuuucaaucugagag

SEQ ID NO: 159466 - RNA, 22 nt, Human
ucagagccaaucauggugcauu

SEQ ID NO: 159467 - RNA, 22 nt, Human
agucugcacucagguggagguc

SEQ ID NO: 159468 - RNA, 17 nt, Human
gccuuccuuccuccaca

SEQ ID NO: 159469 - RNA, 22 nt, Human
ccaggagcagggcuggcugcac

SEQ ID NO: 159470 - RNA, 22 nt, Human
ugcugccagggcucugcccaca

SEQ ID NO: 159471 - RNA, 22 nt, Human
uccuugaagcuuguaucuaaua

SEQ ID NO: 159472 - RNA, 23 nt, Human
gccucugcagccuaguuaguguc

SEQ ID NO: 159473 - RNA, 22 nt, Human
ggcggggguccaggagccugca

SEQ ID NO: 159474 - RNA, 22 nt, Human
acauuuacagugcuagacaauc

SEQ ID NO: 159475 - RNA, 22 nt, Human
ucccucuguguugggcaugccu

SEQ ID NO: 159476 - RNA, 22 nt, Human
ggggacugccuuccacagacac

SEQ ID NO: 159477 - RNA, 22 nt, Human
auggacaggaacucccuuggca

SEQ ID NO: 159478 - RNA, 22 nt, Human
cagaguggcagucccaggccca

SEQ ID NO: 159479 - RNA, 22 nt, Human
ucuggagccacaaaccucagcu

SEQ ID NO: 159480 - RNA, 22 nt, Human
aagcagggugucuugacccaug

SEQ ID NO: 159481 - RNA, 22 nt, Human
cugagcuggucuauggacuugg

SEQ ID NO: 159482 - RNA, 22 nt, Human
cccaggcagagagcuggugagc

SEQ ID NO: 159483 - RNA, 19 nt, Human
ggagccuggagcacgugcc

SEQ ID NO: 159484 - RNA, 22 nt, Human
agaauucuguucuucgggugug

SEQ ID NO: 159485 - RNA, 22 nt, Human
ccagcuccgggaguugcugcug

SEQ ID NO: 159486 - RNA, 22 nt, Human
uacaaagugagcaaccucuuuu

SEQ ID NO: 159487 - RNA, 22 nt, Human
ucucagggcgcagugaggcagu

SEQ ID NO: 159488 - RNA, 22 nt, Human
aagccaagaguuaacuauuugu

SEQ ID NO: 159489 - RNA, 22 nt, Human
cccagagcuccgguccugccca

SEQ ID NO: 159490 - RNA, 22 nt, Human
uucaggagcuggcugcgaagga

SEQ ID NO: 159491 - RNA, 20 nt, Human
ugcagggcugccucccagcu

SEQ ID NO: 159492 - RNA, 22 nt, Human
gccugagauucugcauuucuaa

SEQ ID NO: 159493 - RNA, 22 nt, Human
gccagccugugcuuggccaggc

SEQ ID NO: 159494 - RNA, 22 nt, Human
uuuauguacauauccacaagga

SEQ ID NO: 159495 - RNA, 22 nt, Human
gugauugcccagcaccauuguu

SEQ ID NO: 159496 - RNA, 22 nt, Human
gggggcuguccugugcauugua

SEQ ID NO: 159497 - RNA, 22 nt, Human
acccacgaagaugagcggcaug

SEQ ID NO: 159498 - RNA, 19 nt, Human
uugguggugguuuugguuc

SEQ ID NO: 159499 - RNA, 15 nt, Human
aggcacugugggacc

SEQ ID NO: 159500 - RNA, 22 nt, Human
uggagcuggaauuugagcugga

SEQ ID NO: 159501 - RNA, 22 nt, Human
acaaaaauuagcugggcauggu

SEQ ID NO: 159502 - RNA, 22 nt, Human
ucucagagcaucauuuucuuag

SEQ ID NO: 159503 - RNA, 22 nt, Human
ucugcaggacugaggccuguuu

SEQ ID NO: 159504 - RNA, 22 nt, Human
ggccugugucugugccuguccu

SEQ ID NO: 159505 - RNA, 22 nt, Human
gucccaggugggcuccaccucu

SEQ ID NO: 159506 - RNA, 22 nt, Human
agcucauggugcuaucucaggg

SEQ ID NO: 159507 - RNA, 22 nt, Human
caguuucuacgacuuaagcaca

SEQ ID NO: 159508 - RNA, 21 nt, Human
agcagcagaucuggugagggc

SEQ ID NO: 159509 - RNA, 22 nt, Human
gggcaugagagggcagcuggca

SEQ ID NO: 159510 - RNA, 22 nt, Human
cugccuguuuucugauagauuu

SEQ ID NO: 159511 - RNA, 22 nt, Human
uucuggagaucugccuauggga

SEQ ID NO: 159512 - RNA, 22 nt, Human
agagccuugaagaucuggaaaa

SEQ ID NO: 159513 - RNA, 22 nt, Human
cagagcagugaggaguugugua

SEQ ID NO: 159514 - RNA, 22 nt, Human
acagaaggcggggacaaggcgg

SEQ ID NO: 159515 - RNA, 18 nt, Human
ccugagcccugcuuacuu

SEQ ID NO: 159516 - RNA, 22 nt, Human
cagcagagcugugugggaaggg

SEQ ID NO: 159517 - RNA, 22 nt, Human
gaagcucucaaacucuccccuu

SEQ ID NO: 159518 - RNA, 22 nt, Human
ggugaaggaggaagcugaugga

SEQ ID NO: 159519 - RNA, 22 nt, Human
acauuucucuugaugucucuau

SEQ ID NO: 159520 - RNA, 22 nt, Human
ucucaggggauucacuggcacc

SEQ ID NO: 159521 - RNA, 22 nt, Human
cugcuuugaggggcucuguaua

SEQ ID NO: 159522 - RNA, 22 nt, Human
cucagaguccauaguuuacagu

SEQ ID NO: 159523 - RNA, 22 nt, Human
cucuggccugcuuccucaggua

SEQ ID NO: 159524 - RNA, 22 nt, Human
aaggagucucagcugggccuga

SEQ ID NO: 159525 - RNA, 22 nt, Human
uguucuugggaaucuuacaguu

SEQ ID NO: 159526 - RNA, 22 nt, Human
uuuccucuuauacaguguuuau

SEQ ID NO: 159527 - RNA, 22 nt, Human
agcagacaacccagaugaccca

SEQ ID NO: 159528 - RNA, 20 nt, Human
ucagaggcugccagcugggg

SEQ ID NO: 159529 - RNA, 22 nt, Human
gccuccugaaaggaagagcucc

SEQ ID NO: 159530 - RNA, 22 nt, Human
cagaauuuagcacaauguaugg

SEQ ID NO: 159531 - RNA, 22 nt, Human
cuguguccugcgucaagccaau

SEQ ID NO: 159532 - RNA, 21 nt, Human
uccuccuucaaguccuggccu

SEQ ID NO: 159533 - RNA, 22 nt, Human
guuauguaugagggaaugauua

SEQ ID NO: 159534 - RNA, 22 nt, Human
caggguccggcugccuggcugu

SEQ ID NO: 159535 - RNA, 22 nt, Human
uggcucuguugagguauggauu

SEQ ID NO: 159536 - RNA, 22 nt, Human
gggcuggggcucaauaauuugu

SEQ ID NO: 159537 - RNA, 22 nt, Human
ucaaagucacaacucucuaauu

SEQ ID NO: 159538 - RNA, 22 nt, Human
ugugugccugagccgugccugg

SEQ ID NO: 159539 - RNA, 22 nt, Human
agcugccaaguuucucaguuua

SEQ ID NO: 159540 - RNA, 20 nt, Human
ccaggcacugucccaugcag

SEQ ID NO: 159541 - RNA, 17 nt, Human
agccccucagcgucacc

SEQ ID NO: 159542 - RNA, 22 nt, Human
uggggcuguggauucucacgaa

SEQ ID NO: 159543 - RNA, 22 nt, Human
cagcaauaaugucuacaaaucu

SEQ ID NO: 159544 - RNA, 22 nt, Human
uugggaaggcguggaagcagaa

SEQ ID NO: 159545 - RNA, 22 nt, Human
gaggagagggcugcgggcccac

SEQ ID NO: 159546 - RNA, 22 nt, Human
acagggcagagaggcaggcuug

SEQ ID NO: 159547 - RNA, 22 nt, Human
uaccuugggguuuuguugcucu

SEQ ID NO: 159548 - RNA, 22 nt, Human
gcucucugggugugucuagaua

SEQ ID NO: 159549 - RNA, 17 nt, Human
cuggagccuccaacucc

SEQ ID NO: 159550 - RNA, 20 nt, Human
ucacaggggaccaggagcag

SEQ ID NO: 159551 - RNA, 22 nt, Human
ggugggcacccgagacuggauc

SEQ ID NO: 159552 - RNA, 21 nt, Human
cuggacugaggagacagucgc

SEQ ID NO: 159553 - RNA, 22 nt, Human
gccugccucaaaaucccaguuc

SEQ ID NO: 159554 - RNA, 22 nt, Human
ugcucuggagggugaagcuuuu

SEQ ID NO: 159555 - RNA, 23 nt, Human
uggcccugugcaugcugcuuccc

SEQ ID NO: 159556 - RNA, 22 nt, Human
gaggcugggaaguccaagacca

SEQ ID NO: 159557 - RNA, 22 nt, Human
auuugucugcuugcugccuucc

SEQ ID NO: 159558 - RNA, 22 nt, Human
ugggcagaggacagggaagauc

SEQ ID NO: 159559 - RNA, 22 nt, Human
cagggcagaaggcacucuacuc

SEQ ID NO: 159560 - RNA, 22 nt, Human
gccagcugguaggcaccuagcc

SEQ ID NO: 159561 - RNA, 22 nt, Human
ucacaggagggagagacaccca

SEQ ID NO: 159562 - RNA, 22 nt, Human
gccucugcgccucagccgaccu

SEQ ID NO: 159563 - RNA, 23 nt, Human
agggaaaguaguaauggccuuug

SEQ ID NO: 159564 - RNA, 22 nt, Human
acaccagggccuagccagggcg

SEQ ID NO: 159565 - RNA, 22 nt, Human
aagcccagcugaaagcauuuuu

SEQ ID NO: 159566 - RNA, 22 nt, Human
ggcucacgcaauuaucccggcc

SEQ ID NO: 159567 - RNA, 22 nt, Human
ugcugcucuucaccauggccuc

SEQ ID NO: 159568 - RNA, 20 nt, Human
gccugagcuccgccuccugu

SEQ ID NO: 159569 - RNA, 22 nt, Human
acuuucuccagaaaaccaagga

SEQ ID NO: 159570 - RNA, 22 nt, Human
gcagccagccccucugaccucu

SEQ ID NO: 159571 - RNA, 22 nt, Human
gugucccaaucuacuuuucccu

SEQ ID NO: 159572 - RNA, 22 nt, Human
aggccagagaggggaccagccu

SEQ ID NO: 159573 - RNA, 22 nt, Human
cagcuucucagaaagcugaggu

SEQ ID NO: 159574 - RNA, 22 nt, Human
aacauacagugagcaguggacu

SEQ ID NO: 159575 - RNA, 22 nt, Human
ugggaggcuuccagaccuugcu

SEQ ID NO: 159576 - RNA, 23 nt, Human
uuugcaaauuggacacaaccaca

SEQ ID NO: 159577 - RNA, 22 nt, Human
uaccaggcagcugcacagaggc

SEQ ID NO: 159578 - RNA, 22 nt, Human
agagugaaguuuuugaaaguga

SEQ ID NO: 159579 - RNA, 22 nt, Human
agguggcuccucccauggcugg

SEQ ID NO: 159580 - RNA, 22 nt, Human
ugucucaguucccuucucugga

SEQ ID NO: 159581 - RNA, 22 nt, Human
cuguagcagugugcucuuuuuc

SEQ ID NO: 159582 - RNA, 22 nt, Human
ugcagccauuuucugccaaugc

SEQ ID NO: 159583 - RNA, 22 nt, Human
uccuuucaccaaaaaguguugu

SEQ ID NO: 159584 - RNA, 22 nt, Human
cggcagagacggcgcuuugaac

SEQ ID NO: 159585 - RNA, 22 nt, Human
augggaggcagacacuaaguuc

SEQ ID NO: 159586 - RNA, 22 nt, Human
ucagcagggaggcucugugccc

SEQ ID NO: 159587 - RNA, 22 nt, Human
uauguacaguccuuaacuuaaa

SEQ ID NO: 159588 - RNA, 22 nt, Human
auguaucagauaaagcaugugg

SEQ ID NO: 159589 - RNA, 22 nt, Human
gaggcuggugguuaguuccauu

SEQ ID NO: 159590 - RNA, 22 nt, Human
uuacauuagacccacuuucaug

SEQ ID NO: 159591 - RNA, 22 nt, Human
agagccugugauugucaucacc

SEQ ID NO: 159592 - RNA, 18 nt, Human
gaggauggaaggagaugc

SEQ ID NO: 159593 - RNA, 22 nt, Human
agaaaucaugacuaagagcagu

SEQ ID NO: 159594 - RNA, 22 nt, Human
uuuauucuugagagugagaaga

SEQ ID NO: 159595 - RNA, 22 nt, Human
uccaggagaggccugaccaggu

SEQ ID NO: 159596 - RNA, 22 nt, Human
uuccuguauucuaaagggaaag

SEQ ID NO: 159597 - RNA, 22 nt, Human
uuuaguaaguucacugcaaagc

SEQ ID NO: 159598 - RNA, 22 nt, Human
ggccugcuuuccgagccugcag

SEQ ID NO: 159599 - RNA, 22 nt, Human
uagcagggguagauagagugug

SEQ ID NO: 159600 - RNA, 22 nt, Human
guuuacaaauauuuuaaauggu

SEQ ID NO: 159601 - RNA, 22 nt, Human
acauuucuucccuuuagcagaa

SEQ ID NO: 159602 - RNA, 22 nt, Human
cucucccagucaggcucaggau

SEQ ID NO: 159603 - RNA, 22 nt, Human
cacccagcagcacuuaagacua

SEQ ID NO: 159604 - RNA, 22 nt, Human
acugaaggguaaugugggagcc

SEQ ID NO: 159605 - RNA, 22 nt, Human
caggccuggggcuggcuuccag

SEQ ID NO: 159606 - RNA, 22 nt, Human
ugugcucuggaguugccuucac

SEQ ID NO: 159607 - RNA, 22 nt, Human
caguacuugggggguucuaagu

SEQ ID NO: 159608 - RNA, 22 nt, Human
ucagagguaagggcugagagga

SEQ ID NO: 159609 - RNA, 22 nt, Human
uauccuuguacuauaguauuua

SEQ ID NO: 159610 - RNA, 22 nt, Human
ucagacaguuugcagugugccu

SEQ ID NO: 159611 - RNA, 20 nt, Human
uccaguuuuggagacauucu

SEQ ID NO: 159612 - RNA, 22 nt, Human
gcugccuuugugagccaagggg

SEQ ID NO: 159613 - RNA, 22 nt, Human
aguagaaagaaggcacugggcc

SEQ ID NO: 159614 - RNA, 22 nt, Human
gcugcccugugguccagcaggu

SEQ ID NO: 159615 - RNA, 22 nt, Human
gaugccugcauuucaggagagu

SEQ ID NO: 159616 - RNA, 22 nt, Human
gaaaucugcccagugcacuggu

SEQ ID NO: 159617 - RNA, 22 nt, Human
gccuggagugcaguggcgugau

SEQ ID NO: 159618 - RNA, 21 nt, Human
uccucagggccccagagcacu

SEQ ID NO: 159619 - RNA, 22 nt, Human
cauaacuagagugaaauguuga

SEQ ID NO: 159620 - RNA, 22 nt, Human
ugggaauggaugcuaagugcua

SEQ ID NO: 159621 - RNA, 22 nt, Human
uuagcuaaacuguaacuagaau

SEQ ID NO: 159622 - RNA, 22 nt, Human
cugggcacauuuugacuagugu

SEQ ID NO: 159623 - RNA, 22 nt, Human
ugcucuggguccugggccuccu

SEQ ID NO: 159624 - RNA, 22 nt, Human
cagcucucuaaggucuugcuuu

SEQ ID NO: 159625 - RNA, 22 nt, Human
cccacaggcuagggguagggca

SEQ ID NO: 159626 - RNA, 22 nt, Human
uggcagagaauaaaucuugacu

SEQ ID NO: 159627 - RNA, 23 nt, Human
aggaggaaaaguuaucugcugag

SEQ ID NO: 159628 - RNA, 22 nt, Human
aaaugucugagacuucugaacu

SEQ ID NO: 159629 - RNA, 22 nt, Human
gaugguuuaugauagaugggaa

SEQ ID NO: 159630 - RNA, 22 nt, Human
cacccacccacugcucauuggc

SEQ ID NO: 159631 - RNA, 22 nt, Human
agucccagugagaugaaccagg

SEQ ID NO: 159632 - RNA, 22 nt, Human
ucuggcucaggucagacaggga

SEQ ID NO: 159633 - RNA, 22 nt, Human
cccaggcugaugggaugggcca

SEQ ID NO: 159634 - RNA, 22 nt, Human
gcuggccacacugcugauggag

SEQ ID NO: 159635 - RNA, 22 nt, Human
ggcuucucucuucacauggcuu

SEQ ID NO: 159636 - RNA, 22 nt, Human
uacaugcucaguaacuuucagu

SEQ ID NO: 159637 - RNA, 22 nt, Human
uggaagcacuuggguuuuguug

SEQ ID NO: 159638 - RNA, 22 nt, Human
ucugucaggagauuggcagcug

SEQ ID NO: 159639 - RNA, 22 nt, Human
auguguacaaccaagcacuaaa

SEQ ID NO: 159640 - RNA, 22 nt, Human
gcagagacuccacugucuugug

SEQ ID NO: 159641 - RNA, 22 nt, Human
acagggcaccugagguaggaag

SEQ ID NO: 159642 - RNA, 22 nt, Human
acagaaagaagguguauuugag

SEQ ID NO: 159643 - RNA, 22 nt, Human
cugggcagugcagcuauagaac

SEQ ID NO: 159644 - RNA, 22 nt, Human
agcugccagcaucccggaaggg

SEQ ID NO: 159645 - RNA, 22 nt, Human
aggacagaccuaggacuggagc

SEQ ID NO: 159646 - RNA, 22 nt, Human
acagccugagaguggagcuggc

SEQ ID NO: 159647 - RNA, 22 nt, Human
uggcagggccugcucaucaucc

SEQ ID NO: 159648 - RNA, 22 nt, Human
gcugggcaccggagagacccca

SEQ ID NO: 159649 - RNA, 22 nt, Human
agggcagcucucaccucuggcc

SEQ ID NO: 159650 - RNA, 22 nt, Human
ugagcaguaggucugaauagug

SEQ ID NO: 159651 - RNA, 22 nt, Human
ucaaagucauggcuaguaauga

SEQ ID NO: 159652 - RNA, 22 nt, Human
gagguuagaggucagugcaguc

SEQ ID NO: 159653 - RNA, 22 nt, Human
ggccuugggcagacacgucaca

SEQ ID NO: 159654 - RNA, 22 nt, Human
acagguggggaggcugagguuc

SEQ ID NO: 159655 - RNA, 22 nt, Human
aguauacauauauuagccuucg

SEQ ID NO: 159656 - RNA, 22 nt, Human
cccagcuccgagcuccgagccg

SEQ ID NO: 159657 - RNA, 22 nt, Human
acuggagcccguggaggcgcag

SEQ ID NO: 159658 - RNA, 22 nt, Human
gugggaugguagguagguaaua

SEQ ID NO: 159659 - RNA, 22 nt, Human
cuggcugcuggccugaggaugc

SEQ ID NO: 159660 - RNA, 22 nt, Human
gcagcugcuggaaguuccugcc

SEQ ID NO: 159661 - RNA, 21 nt, Human
auggagccuaagaguggaggu

SEQ ID NO: 159662 - RNA, 22 nt, Human
ucucugcugagaagggcuggca

SEQ ID NO: 159663 - RNA, 22 nt, Human
gcugucaggaacaugccuuggu

SEQ ID NO: 159664 - RNA, 22 nt, Human
gguggccucgguggugcacagg

SEQ ID NO: 159665 - RNA, 22 nt, Human
gccuggguccacugaucaugcu

SEQ ID NO: 159666 - RNA, 22 nt, Human
uccuucagaggacggcagccag

SEQ ID NO: 159667 - RNA, 22 nt, Human
ugggaaauguguuucuggacca

SEQ ID NO: 159668 - RNA, 22 nt, Human
gcagcagagaacacaaugaugg

SEQ ID NO: 159669 - RNA, 22 nt, Human
ucucuggccgagagucccuggg

SEQ ID NO: 159670 - RNA, 22 nt, Human
gcucccucugcucaggcacuug

SEQ ID NO: 159671 - RNA, 17 nt, Human
ggaaaaggaugauacag

SEQ ID NO: 159672 - RNA, 22 nt, Human
acagaagagcacauuuaguaug

SEQ ID NO: 159673 - RNA, 22 nt, Human
uggguagaggaauugggcuacc

SEQ ID NO: 159674 - RNA, 22 nt, Human
uucaaugagcccggggccauag

SEQ ID NO: 159675 - RNA, 22 nt, Human
aaaaaugaauucuucaguggca

SEQ ID NO: 159676 - RNA, 22 nt, Human
guggagacgggacagaagcuaa

SEQ ID NO: 159677 - RNA, 22 nt, Human
cagaggaggccaccgcauaggc

SEQ ID NO: 159678 - RNA, 22 nt, Human
ucugcagcuugcacaggcaggc

SEQ ID NO: 159679 - RNA, 22 nt, Human
aauguguauacuggcaauuaag

SEQ ID NO: 159680 - RNA, 22 nt, Human
aaggcugagacagcacaggucc

SEQ ID NO: 159681 - RNA, 22 nt, Human
uguaggauuuucaccagaccuu

SEQ ID NO: 159682 - RNA, 22 nt, Human
cugccuggcauggagaagagaa

SEQ ID NO: 159683 - RNA, 22 nt, Human
cagauggccagaggcagcugca

SEQ ID NO: 159684 - RNA, 23 nt, Human
uugcuucugugcaauucaguacu

SEQ ID NO: 159685 - RNA, 17 nt, Human
gagauggguggaucacc

SEQ ID NO: 159686 - RNA, 22 nt, Human
gcuggcaccugcaccaagcagg

SEQ ID NO: 159687 - RNA, 21 nt, Human
gcuccuggugcugcguggcgc

SEQ ID NO: 159688 - RNA, 22 nt, Human
uagccggguguugugucaugca

SEQ ID NO: 159689 - RNA, 22 nt, Human
ccaggcaucacgggcauguggc

SEQ ID NO: 159690 - RNA, 22 nt, Human
ggccaugguuggggaagacaug

SEQ ID NO: 159691 - RNA, 22 nt, Human
cauuguauugaggauacuuaag

SEQ ID NO: 159692 - RNA, 22 nt, Human
ugaaaucuccucuuuauauauc

SEQ ID NO: 159693 - RNA, 22 nt, Human
cucuuucaguucugauagucuc

SEQ ID NO: 159694 - RNA, 22 nt, Human
cagagaccccgcugcccuucug

SEQ ID NO: 159695 - RNA, 22 nt, Human
uuagaaaggaaucuucauuuca

SEQ ID NO: 159696 - RNA, 22 nt, Human
aaugggagagaacacaaagucc

SEQ ID NO: 159697 - RNA, 22 nt, Human
agcaggcuaagggaccuguuua

SEQ ID NO: 159698 - RNA, 22 nt, Human
ucugugcucuucucaguaucac

SEQ ID NO: 159699 - RNA, 23 nt, Human
ggcacugaagcuacaauggugag

SEQ ID NO: 159700 - RNA, 19 nt, Human
gcugcuggcucuggcugga

SEQ ID NO: 159701 - RNA, 22 nt, Human
gacccugccaugagugacaggg

SEQ ID NO: 159702 - RNA, 22 nt, Human
uaacagaauuugcuaaacuccg

SEQ ID NO: 159703 - RNA, 22 nt, Human
caggcugccgugaagcaggccu

SEQ ID NO: 159704 - RNA, 22 nt, Human
uggcucugcaccucaguguacc

SEQ ID NO: 159705 - RNA, 22 nt, Human
gcucucugguuccagucaggaa

SEQ ID NO: 159706 - RNA, 22 nt, Human
cuuucucuguguuucacaugcu

SEQ ID NO: 159707 - RNA, 22 nt, Human
cccuggaggagcuuagagcuug

SEQ ID NO: 159708 - RNA, 22 nt, Human
acagccugcugccugcuucuug

SEQ ID NO: 159709 - RNA, 22 nt, Human
gaaaugcaggcuuggauucagc

SEQ ID NO: 159710 - RNA, 22 nt, Human
cugacccauauaagaguggagg

SEQ ID NO: 159711 - RNA, 18 nt, Human
aggccagcccugcuacug

SEQ ID NO: 159712 - RNA, 22 nt, Human
agggcagcacaaggcauggacu

SEQ ID NO: 159713 - RNA, 22 nt, Human
gcuggaaggcuaggcucaguug

SEQ ID NO: 159714 - RNA, 22 nt, Human
gaguuauuggguggaaagguag

SEQ ID NO: 159715 - RNA, 22 nt, Human
gaagcagcuaggaucuucauuu

SEQ ID NO: 159716 - RNA, 22 nt, Human
ggcuccuguggcaagacagcuu

SEQ ID NO: 159717 - RNA, 22 nt, Human
uggccaggggaguuccccucca

SEQ ID NO: 159718 - RNA, 22 nt, Human
ugcuuccuugagcucuccaauc

SEQ ID NO: 159719 - RNA, 22 nt, Human
ccucccacauccuagcucugcu

SEQ ID NO: 159720 - RNA, 22 nt, Human
agagguagagguugcagugagc

SEQ ID NO: 159721 - RNA, 22 nt, Human
ccagggcagcagaauuggggca

SEQ ID NO: 159722 - RNA, 22 nt, Human
gaggggcuggguagggcaaccc

SEQ ID NO: 159723 - RNA, 22 nt, Human
uggcagagcuggcugcggauga

SEQ ID NO: 159724 - RNA, 22 nt, Human
cugcugcugcuaucuacccagg

SEQ ID NO: 159725 - RNA, 22 nt, Human
gccuugccucagccauggaaac

SEQ ID NO: 159726 - RNA, 22 nt, Human
agaggggcucauauccugucau

SEQ ID NO: 159727 - RNA, 22 nt, Human
auaugaagucagacaaacuggg

SEQ ID NO: 159728 - RNA, 22 nt, Human
uuacuuuggauggucaagaaag

SEQ ID NO: 159729 - RNA, 22 nt, Human
uggagcccagggugagaaggag

SEQ ID NO: 159730 - RNA, 22 nt, Human
aguuucauauuaccaugucacc

SEQ ID NO: 159731 - RNA, 22 nt, Human
uuccauauuuguguggcaaaag

SEQ ID NO: 159732 - RNA, 22 nt, Human
gagguagcaugcuggaagggac

SEQ ID NO: 159733 - RNA, 20 nt, Human
aagagaagaagucuuugaaa

SEQ ID NO: 159734 - RNA, 22 nt, Human
cugcuuuguggaaucacacugg

SEQ ID NO: 159735 - RNA, 22 nt, Human
gcaggggaguccacucuaugca

SEQ ID NO: 159736 - RNA, 22 nt, Human
aauggacaggagagcauaguca

SEQ ID NO: 159737 - RNA, 22 nt, Human
ggccuucacgugaccuggcgug

SEQ ID NO: 159738 - RNA, 22 nt, Human
gcuggccucgcaggcaggaugu

SEQ ID NO: 159739 - RNA, 22 nt, Human
gugcauuugacgaauacucacu

SEQ ID NO: 159740 - RNA, 22 nt, Human
caggcugucugaauggaggccc

SEQ ID NO: 159741 - RNA, 22 nt, Human
gggcugccuuucuucugggagc

SEQ ID NO: 159742 - RNA, 20 nt, Human
gucucaaguaucucacaguc

SEQ ID NO: 159743 - RNA, 22 nt, Human
ugacaauacagagagagcaaaa

SEQ ID NO: 159744 - RNA, 22 nt, Human
agccuccuggaguuucugggau

SEQ ID NO: 159745 - RNA, 23 nt, Human
ugcuguccaacagacuggccaug

SEQ ID NO: 159746 - RNA, 22 nt, Human
agcugcugaaugacacugcaag

SEQ ID NO: 159747 - RNA, 22 nt, Human
aagagcuggauggaaucuggga

SEQ ID NO: 159748 - RNA, 22 nt, Human
uccuggaguugugcagugcaca

SEQ ID NO: 159749 - RNA, 22 nt, Human
cagacaggcuagccagacucac

SEQ ID NO: 159750 - RNA, 22 nt, Human
gcucuguacgcaggaugagggg

SEQ ID NO: 159751 - RNA, 22 nt, Human
aagggcaggagaagacggauau

SEQ ID NO: 159752 - RNA, 22 nt, Human
aaggcacuagcaagcugccugg

SEQ ID NO: 159753 - RNA, 22 nt, Human
ggccucaguuucuccauggguu

SEQ ID NO: 159754 - RNA, 22 nt, Human
uauugacaauaggcaacugagg

SEQ ID NO: 159755 - RNA, 22 nt, Human
uccuucagaaaaccucagucuu

SEQ ID NO: 159756 - RNA, 22 nt, Human
gcagugggaagguuggcacaug

SEQ ID NO: 159757 - RNA, 22 nt, Human
gccagcagguggagagaucaag

SEQ ID NO: 159758 - RNA, 21 nt, Human
auccuugaucagaagagugcu

SEQ ID NO: 159759 - RNA, 22 nt, Human
aaacagcugucauuguuuuaaa

SEQ ID NO: 159760 - RNA, 22 nt, Human
cuggagcagguuuaggaguccc

SEQ ID NO: 159761 - RNA, 22 nt, Human
uuucacauguggaaugccaggu

SEQ ID NO: 159762 - RNA, 22 nt, Human
aggcuggcccuacuggcugccu

SEQ ID NO: 159763 - RNA, 22 nt, Human
ugagccuggguggucgaggcug

SEQ ID NO: 159764 - RNA, 19 nt, Human
accaggcuuauggucagug

SEQ ID NO: 159765 - RNA, 20 nt, Human
cacaggcuauaugagagcca

SEQ ID NO: 159766 - RNA, 22 nt, Human
cccaggaggccaagguugcagu

SEQ ID NO: 159767 - RNA, 22 nt, Human
uaaaucccuacaucuguguuuu

SEQ ID NO: 159768 - RNA, 17 nt, Human
ucugggcuucagugguc

SEQ ID NO: 159769 - RNA, 22 nt, Human
uuuccauauucugcgucugcca

SEQ ID NO: 159770 - RNA, 22 nt, Human
uccugcugagcgucugucauuu

SEQ ID NO: 159771 - RNA, 22 nt, Human
cuguguccucccgcugcaccca

SEQ ID NO: 159772 - RNA, 22 nt, Human
cccacucuggcucccuucuagu

SEQ ID NO: 159773 - RNA, 22 nt, Human
aaggccaugaccacuugcugug

SEQ ID NO: 159774 - RNA, 22 nt, Human
aagaauucacugguagagucaa

SEQ ID NO: 159775 - RNA, 22 nt, Human
gccaggugggagacagacagca

SEQ ID NO: 159776 - RNA, 22 nt, Human
gcccaugcucucaggcgggccu

SEQ ID NO: 159777 - RNA, 22 nt, Human
ccagcucuagccccauguggcu

SEQ ID NO: 159778 - RNA, 22 nt, Human
ucccaaagcuacucuucugacu

SEQ ID NO: 159779 - RNA, 22 nt, Human
aaguucuaauuuugcauucagg

SEQ ID NO: 159780 - RNA, 22 nt, Human
gcugccugguuucucagcugca

SEQ ID NO: 159781 - RNA, 22 nt, Human
uagaaacucaggauacucuucc

SEQ ID NO: 159782 - RNA, 22 nt, Human
ggcugcuucucacucauuugca

SEQ ID NO: 159783 - RNA, 22 nt, Human
cagagcugcgcuuuuuccuggu

SEQ ID NO: 159784 - RNA, 20 nt, Human
ugcagaagaacguucugguu

SEQ ID NO: 159785 - RNA, 22 nt, Human
acagcagcaauagcagugacau

SEQ ID NO: 159786 - RNA, 22 nt, Human
gcagcuggagcaucuucucauc

SEQ ID NO: 159787 - RNA, 22 nt, Human
cucagcuggcaauucuggcucc

SEQ ID NO: 159788 - RNA, 22 nt, Human
aucacaaaggcugcuucaugau

SEQ ID NO: 159789 - RNA, 22 nt, Human
acaggcagcgucauugcugcuc

SEQ ID NO: 159790 - RNA, 22 nt, Human
gcagggacaccuuugugaagcu

SEQ ID NO: 159791 - RNA, 22 nt, Human
cugggaguguucuaggucacau

SEQ ID NO: 159792 - RNA, 22 nt, Human
cugggcacaaguggcccuggau

SEQ ID NO: 159793 - RNA, 17 nt, Human
aggcauggucuggggug

SEQ ID NO: 159794 - RNA, 22 nt, Human
gagagcugcauucucagacaca

SEQ ID NO: 159795 - RNA, 22 nt, Human
uguauuagagcaguagaauuau

SEQ ID NO: 159796 - RNA, 22 nt, Human
acagcuggaggccccauugucc

SEQ ID NO: 159797 - RNA, 18 nt, Human
auccuugaugagaggucu

SEQ ID NO: 159798 - RNA, 22 nt, Human
agaguguuuuucugucaaggac

SEQ ID NO: 159799 - RNA, 22 nt, Human
agcagcugagaugguaagauuc

SEQ ID NO: 159800 - RNA, 22 nt, Human
agccacagcgaaccucucuucc

SEQ ID NO: 159801 - RNA, 22 nt, Human
gccuggagccucagcaaggagg

SEQ ID NO: 159802 - RNA, 22 nt, Human
augcuuuuccuaaaaugaugcc

SEQ ID NO: 159803 - RNA, 22 nt, Human
gcucugcuguguuuguucagca

SEQ ID NO: 159804 - RNA, 22 nt, Human
cugaagagcucuccuguccccu

SEQ ID NO: 159805 - RNA, 22 nt, Human
cccugccuuguuggagccuaug

SEQ ID NO: 159806 - RNA, 22 nt, Human
ucaguuuuucuauacuuuguag

SEQ ID NO: 159807 - RNA, 23 nt, Human
cugcagccgcguggggacgugga

SEQ ID NO: 159808 - RNA, 22 nt, Human
gccuggagggauagaaugcaag

SEQ ID NO: 159809 - RNA, 22 nt, Human
uccuuucccuuuccauccuggc

SEQ ID NO: 159810 - RNA, 22 nt, Human
aaauugugcucacacugauauu

SEQ ID NO: 159811 - RNA, 22 nt, Human
gccuggaguuguggugaagcca

SEQ ID NO: 159812 - RNA, 22 nt, Human
cagggccacuguagaugaggag

SEQ ID NO: 159813 - RNA, 22 nt, Human
cagggccaagcugcagcaucug

SEQ ID NO: 159814 - RNA, 20 nt, Human
cacguuuuuccacuagcaaa

SEQ ID NO: 159815 - RNA, 22 nt, Human
agugcauugcaucucugcuuca

SEQ ID NO: 159816 - RNA, 22 nt, Human
cucagaauuacaucccauuuua

SEQ ID NO: 159817 - RNA, 22 nt, Human
ugaacauauucaccucuaaaua

SEQ ID NO: 159818 - RNA, 22 nt, Human
uugaaggaggcuccuuuuuaaa

SEQ ID NO: 159819 - RNA, 22 nt, Human
caguagcacuagauaugugugg

SEQ ID NO: 159820 - RNA, 22 nt, Human
accauuuaauaaguauuuccau

SEQ ID NO: 159821 - RNA, 22 nt, Human
ccugagaccaaguugcagccau

SEQ ID NO: 159822 - RNA, 22 nt, Human
caagaaauuucuuaagaacuaa

SEQ ID NO: 159823 - RNA, 22 nt, Human
cccuggggcugagggauggccg

SEQ ID NO: 159824 - RNA, 22 nt, Human
gaaagagaaccugggccuagau

SEQ ID NO: 159825 - RNA, 22 nt, Human
uggaagcaucacuucuugccug

SEQ ID NO: 159826 - RNA, 22 nt, Human
ccagaccacccuggccaugcac

SEQ ID NO: 159827 - RNA, 23 nt, Human
ugcucugugaauaguuggugacu

SEQ ID NO: 159828 - RNA, 22 nt, Human
aggagagagaacacuugggucc

SEQ ID NO: 159829 - RNA, 22 nt, Human
uugcauugaaugcacauuuuua

SEQ ID NO: 159830 - RNA, 22 nt, Human
aaagguuaguucuuagaagugc

SEQ ID NO: 159831 - RNA, 22 nt, Human
cuuagaaauaaugguuucaguu

SEQ ID NO: 159832 - RNA, 22 nt, Human
aaggcagcagugcacgacugau

SEQ ID NO: 159833 - RNA, 22 nt, Human
gugcuuccaucuagagggucac

SEQ ID NO: 159834 - RNA, 22 nt, Human
uggggagugaugccucggauaa

SEQ ID NO: 159835 - RNA, 22 nt, Human
caauaugcaagcuauuaaguau

SEQ ID NO: 159836 - RNA, 20 nt, Human
ucagagucaucaaagauggu

SEQ ID NO: 159837 - RNA, 22 nt, Human
cacagggcagugcugcccacuc

SEQ ID NO: 159838 - RNA, 22 nt, Human
cugggugguuuugaugugaauu

SEQ ID NO: 159839 - RNA, 22 nt, Human
acagcuguggggacucuugccc

SEQ ID NO: 159840 - RNA, 22 nt, Human
uuugggaagaggaaucucugga

SEQ ID NO: 159841 - RNA, 22 nt, Human
guaucuuuugguggaaaaauaa

SEQ ID NO: 159842 - RNA, 20 nt, Human
cugggaggucuuccaaauca

SEQ ID NO: 159843 - RNA, 22 nt, Human
ucccacugugaauccaaggccu

SEQ ID NO: 159844 - RNA, 22 nt, Human
agacccagaaagcagcugcauu

SEQ ID NO: 159845 - RNA, 22 nt, Human
uauugaaaugaaugacagugau

SEQ ID NO: 159846 - RNA, 19 nt, Human
ggugaccaccuggucagug

SEQ ID NO: 159847 - RNA, 21 nt, Human
gccucugcugucuuauuguga

SEQ ID NO: 159848 - RNA, 22 nt, Human
gaggcaugucuggccuguccca

SEQ ID NO: 159849 - RNA, 22 nt, Human
ugcugcacgauaaauaauuucu

SEQ ID NO: 159850 - RNA, 22 nt, Human
aggacaggauugagcugaacug

SEQ ID NO: 159851 - RNA, 22 nt, Human
gaaaauguuuccuguuauuugc

SEQ ID NO: 159852 - RNA, 23 nt, Human
aggcugcagaagaauagggucau

SEQ ID NO: 159853 - RNA, 22 nt, Human
aaugcugcaagaggugaaaaga

SEQ ID NO: 159854 - RNA, 22 nt, Human
aguuacuugagacguuuaugaa

SEQ ID NO: 159855 - RNA, 22 nt, Human
cagaggcucaccagccuuucac

SEQ ID NO: 159856 - RNA, 21 nt, Human
ugccaggccugagcugggguc

SEQ ID NO: 159857 - RNA, 22 nt, Human
gcaggcaguugcaguuuucuag

SEQ ID NO: 159858 - RNA, 22 nt, Human
ugcagaagugagucaugaggaa

SEQ ID NO: 159859 - RNA, 23 nt, Human
gcauugucuccccacuucugggc

SEQ ID NO: 159860 - RNA, 22 nt, Human
agcagcauucucugguaugggg

SEQ ID NO: 159861 - RNA, 22 nt, Human
augaccccuaaaauuuacuguc

SEQ ID NO: 159862 - RNA, 22 nt, Human
ucacacgugagguucuauccug

SEQ ID NO: 159863 - RNA, 21 nt, Human
cugccuugaaugguacuggga

SEQ ID NO: 159864 - RNA, 22 nt, Human
ucccagagcaguacuccaggag

SEQ ID NO: 159865 - RNA, 22 nt, Human
aggcugaggcagguggaucauu

SEQ ID NO: 159866 - RNA, 22 nt, Human
gcuucuggaggagcugggcuga

SEQ ID NO: 159867 - RNA, 22 nt, Human
agacuuugagcucuuagagaag

SEQ ID NO: 159868 - RNA, 22 nt, Human
cagugcagaacacauggaaaau

SEQ ID NO: 159869 - RNA, 22 nt, Human
uguggcuguguccaccugcugc

SEQ ID NO: 159870 - RNA, 21 nt, Human
uucaagauauuuaaaaggugg

SEQ ID NO: 159871 - RNA, 22 nt, Human
acuuugcacuaaguuacucauu

SEQ ID NO: 159872 - RNA, 22 nt, Human
ugcuucaggagaugucaccaug

SEQ ID NO: 159873 - RNA, 22 nt, Human
uggcucuggcgugaagcccaga

SEQ ID NO: 159874 - RNA, 22 nt, Human
caguuucuuaucuucaaaauug

SEQ ID NO: 159875 - RNA, 22 nt, Human
uccagaguacggaagagucauc

SEQ ID NO: 159876 - RNA, 22 nt, Human
agggcagagacaugcuuccuga

SEQ ID NO: 159877 - RNA, 22 nt, Human
ucaucacauaugucaugauuug

SEQ ID NO: 159878 - RNA, 20 nt, Human
uugcauuggaugugcaggug

SEQ ID NO: 159879 - RNA, 22 nt, Human
gcagcugcagguggucccaugc

SEQ ID NO: 159880 - RNA, 22 nt, Human
uagaaauguuagauguauugag

SEQ ID NO: 159881 - RNA, 22 nt, Human
aacccagccguguagcugccgc

SEQ ID NO: 159882 - RNA, 22 nt, Human
uggcugggugcuauccaguacu

SEQ ID NO: 159883 - RNA, 22 nt, Human
auaugaagaauuccaauuugga

SEQ ID NO: 159884 - RNA, 22 nt, Human
gcugccucugcgacucugggcg

SEQ ID NO: 159885 - RNA, 22 nt, Human
ucaggccacggcucacugagac

SEQ ID NO: 159886 - RNA, 22 nt, Human
aucucccagccacagcauucuu

SEQ ID NO: 159887 - RNA, 22 nt, Human
ugggcuggcugaggcauucacu

SEQ ID NO: 159888 - RNA, 22 nt, Human
agccccuuccaguucucagauc

SEQ ID NO: 159889 - RNA, 22 nt, Human
uucuuuggggaauauucugguu

SEQ ID NO: 159890 - RNA, 22 nt, Human
ggguggaguagaaagaugaauu

SEQ ID NO: 159891 - RNA, 22 nt, Human
gcucugcugaagccccuugcau

SEQ ID NO: 159892 - RNA, 22 nt, Human
acaauucucucauaucuuauua

SEQ ID NO: 159893 - RNA, 22 nt, Human
cucccugggcagauguggcucu

SEQ ID NO: 159894 - RNA, 22 nt, Human
uggcucaguuugggggauugaa

SEQ ID NO: 159895 - RNA, 22 nt, Human
cagcaggcucugaguggcugcc

SEQ ID NO: 159896 - RNA, 22 nt, Human
guguguccaggcgggagucaag

SEQ ID NO: 159897 - RNA, 22 nt, Human
cuuguccuuuacuugagacuca

SEQ ID NO: 159898 - RNA, 22 nt, Human
ugaagcagaggggucuugagcu

SEQ ID NO: 159899 - RNA, 20 nt, Human
gaggaaaagcugccaggccu

SEQ ID NO: 159900 - RNA, 22 nt, Human
uggacaggaucugagacugaga

SEQ ID NO: 159901 - RNA, 23 nt, Human
ccagcucccaggucugaggacug

SEQ ID NO: 159902 - RNA, 22 nt, Human
caggcagcgcucguggccuggc

SEQ ID NO: 159903 - RNA, 22 nt, Human
auaaacaguagagaaagguggu

SEQ ID NO: 159904 - RNA, 22 nt, Human
agcaaggcagucagcuggcugg

SEQ ID NO: 159905 - RNA, 22 nt, Human
agcuggcuccagaaggagucgu

SEQ ID NO: 159906 - RNA, 22 nt, Human
agauguguuucuaguuccugca

SEQ ID NO: 159907 - RNA, 22 nt, Human
ucucaggguuuguacaagugua

SEQ ID NO: 159908 - RNA, 22 nt, Human
gucccagggaugcagacaugag

SEQ ID NO: 159909 - RNA, 20 nt, Human
gacauucauaguuauuacca

SEQ ID NO: 159910 - RNA, 22 nt, Human
ccagggcuccauugcucauccu

SEQ ID NO: 159911 - RNA, 22 nt, Human
aaguguauauaugacuuauaaa

SEQ ID NO: 159912 - RNA, 22 nt, Human
ccccagcugcauacuugccaag

SEQ ID NO: 159913 - RNA, 22 nt, Human
gcagaacauuucacaguaucuu

SEQ ID NO: 159914 - RNA, 21 nt, Human
gcagcagaggcuugacagaca

SEQ ID NO: 159915 - RNA, 20 nt, Human
ccaagagcaugcaugaggaa

SEQ ID NO: 159916 - RNA, 22 nt, Human
caggaccccauauucacugaac

SEQ ID NO: 159917 - RNA, 22 nt, Human
cucaggacccgguccagguggg

SEQ ID NO: 159918 - RNA, 22 nt, Human
caaagguaguauauauauuguu

SEQ ID NO: 159919 - RNA, 22 nt, Human
ugucucugcuuuccuugcaggg

SEQ ID NO: 159920 - RNA, 19 nt, Human
ugcagaagacacaguggug

SEQ ID NO: 159921 - RNA, 22 nt, Human
auugaaagaguuuucugcugca

SEQ ID NO: 159922 - RNA, 22 nt, Human
ucccagagauuuccucuccuuc

SEQ ID NO: 159923 - RNA, 22 nt, Human
agaggccuaaccaagauguccu

SEQ ID NO: 159924 - RNA, 22 nt, Human
cagccagggagggcaaaugaga

SEQ ID NO: 159925 - RNA, 22 nt, Human
aggggcuggaguucgagguuac

SEQ ID NO: 159926 - RNA, 22 nt, Human
uaaagaacacagggaauagcac

SEQ ID NO: 159927 - RNA, 20 nt, Human
agaguaacuggcacauaggg

SEQ ID NO: 159928 - RNA, 22 nt, Human
caguggguggcuaaguggcuga

SEQ ID NO: 159929 - RNA, 22 nt, Human
aagaaaagaaaccugaggcuuu

SEQ ID NO: 159930 - RNA, 22 nt, Human
ccaguuuuuccagugcuuucug

SEQ ID NO: 159931 - RNA, 22 nt, Human
auuaaaagcuucccaagaguua

SEQ ID NO: 159932 - RNA, 22 nt, Human
agggcagaaaucgauuacaccu

SEQ ID NO: 159933 - RNA, 20 nt, Human
gggaguggugguagccugug

SEQ ID NO: 159934 - RNA, 22 nt, Human
aggucauuccuugucuucuugc

SEQ ID NO: 159935 - RNA, 22 nt, Human
uuuuuccuagugcuuucuggua

SEQ ID NO: 159936 - RNA, 22 nt, Human
aggcuggcuggcaggggacaca

SEQ ID NO: 159937 - RNA, 22 nt, Human
acuccugguuuguguccuggcu

SEQ ID NO: 159938 - RNA, 23 nt, Human
gggcugcuccaggccaaggcugg

SEQ ID NO: 159939 - RNA, 22 nt, Human
cuggagagaccgaaagaggcug

SEQ ID NO: 159940 - RNA, 22 nt, Human
cuguucaugcugauucuguaug

SEQ ID NO: 159941 - RNA, 22 nt, Human
cagaaugcaaauuuuauaauau

SEQ ID NO: 159942 - RNA, 22 nt, Human
gccuugcuuugcuucuggacag

SEQ ID NO: 159943 - RNA, 22 nt, Human
gggacagcuguagugcuuggcu

SEQ ID NO: 159944 - RNA, 22 nt, Human
agcagagccaggucucucugua

SEQ ID NO: 159945 - RNA, 17 nt, Human
ggugagaccucccacuc

SEQ ID NO: 159946 - RNA, 21 nt, Human
ccagccucagaucagggagcu

SEQ ID NO: 159947 - RNA, 22 nt, Human
uccuucagggcugaccacaggc

SEQ ID NO: 159948 - RNA, 22 nt, Human
gcauaauauacaugcuugaucc

SEQ ID NO: 159949 - RNA, 22 nt, Human
augagcuucccagacaggaugg

SEQ ID NO: 159950 - RNA, 22 nt, Human
guccucugggcuuugagcaguc

SEQ ID NO: 159951 - RNA, 22 nt, Human
guggccaggacauugccaggca

SEQ ID NO: 159952 - RNA, 22 nt, Human
agccaucauuucugucacuggc

SEQ ID NO: 159953 - RNA, 21 nt, Human
uuuauguacuucauagaguag

SEQ ID NO: 159954 - RNA, 22 nt, Human
guccugggaaggaagccaggga

SEQ ID NO: 159955 - RNA, 22 nt, Human
gcuggccaggugcuuugguucu

SEQ ID NO: 159956 - RNA, 22 nt, Human
ccuuuggguucaaucucggucu

SEQ ID NO: 159957 - RNA, 23 nt, Human
aaggucacagaacuuagcaagcc

SEQ ID NO: 159958 - RNA, 22 nt, Human
cagucccaggguugguucagcu

SEQ ID NO: 159959 - RNA, 22 nt, Human
acagagccuccaggagugcugg

SEQ ID NO: 159960 - RNA, 22 nt, Human
uggcucaguuucaguccugguu

SEQ ID NO: 159961 - RNA, 22 nt, Human
ggagccuguggccgucacgacu

SEQ ID NO: 159962 - RNA, 22 nt, Human
augaagucugcacaugcaugug

SEQ ID NO: 159963 - RNA, 22 nt, Human
ccuggggcucaagauggcgccg

SEQ ID NO: 159964 - RNA, 22 nt, Human
gcugucugggaggccuccacuu

SEQ ID NO: 159965 - RNA, 18 nt, Human
uguuccaaggaaggaauc

SEQ ID NO: 159966 - RNA, 22 nt, Human
cucuggaaaaccacuagcagga

SEQ ID NO: 159967 - RNA, 22 nt, Human
agaauguagucuuggagauuua

SEQ ID NO: 159968 - RNA, 22 nt, Human
uccagccaugacucggacagug

SEQ ID NO: 159969 - RNA, 22 nt, Human
uccuggcccacuaugccagcau

SEQ ID NO: 159970 - RNA, 18 nt, Human
acauuucucucugcguga

SEQ ID NO: 159971 - RNA, 22 nt, Human
gcuggcagucccaucagcuggg

SEQ ID NO: 159972 - RNA, 22 nt, Human
cucucuggaagggggagcugau

SEQ ID NO: 159973 - RNA, 22 nt, Human
caggcacuagcagaaugaggcu

SEQ ID NO: 159974 - RNA, 22 nt, Human
gccagcaguccugcugugugcc

SEQ ID NO: 159975 - RNA, 22 nt, Human
cugugggcugaaagugcucccg

SEQ ID NO: 159976 - RNA, 22 nt, Human
cuggagcccugaaugggcagga

SEQ ID NO: 159977 - RNA, 22 nt, Human
cugaaggauucaaaauggcagg

SEQ ID NO: 159978 - RNA, 22 nt, Human
gcagagcccuggggguauggug

SEQ ID NO: 159979 - RNA, 20 nt, Human
auugucagccuucagaggag

SEQ ID NO: 159980 - RNA, 22 nt, Human
augucccagcugagagacaacu

SEQ ID NO: 159981 - RNA, 22 nt, Human
aaggagaguacaggaguuggua

SEQ ID NO: 159982 - RNA, 22 nt, Human
ccugagacaugaaccaggcucc

SEQ ID NO: 159983 - RNA, 22 nt, Human
cugcaggcucgaagacacggau

SEQ ID NO: 159984 - RNA, 22 nt, Human
cagcugccacaccucuuucucu

SEQ ID NO: 159985 - RNA, 22 nt, Human
aguggcagagcaggugcuggaa

SEQ ID NO: 159986 - RNA, 22 nt, Human
cagagggcucuuggcugccugc

SEQ ID NO: 159987 - RNA, 22 nt, Human
uccugccuguuuaccuguacuu

SEQ ID NO: 159988 - RNA, 22 nt, Human
aaaguggucaccuucucauuuc

SEQ ID NO: 159989 - RNA, 22 nt, Human
uguacuuccccaaugacagcac

SEQ ID NO: 159990 - RNA, 22 nt, Human
aagcacagaaaaggagcaugga

SEQ ID NO: 159991 - RNA, 22 nt, Human
cagggagaggcaucauagggaa

SEQ ID NO: 159992 - RNA, 22 nt, Human
ugcagcuucuccaucuccuugu

SEQ ID NO: 159993 - RNA, 22 nt, Human
aggugccagcucucaggcagga

SEQ ID NO: 159994 - RNA, 22 nt, Human
gcaggcagagagggguuuccag

SEQ ID NO: 159995 - RNA, 22 nt, Human
caaauguguuuuuucuucuaca

SEQ ID NO: 159996 - RNA, 22 nt, Human
cagcaugguggagcugcucuuu

SEQ ID NO: 159997 - RNA, 22 nt, Human
cagagguacaagcuaaguuggg

SEQ ID NO: 159998 - RNA, 22 nt, Human
ccaggugggaggaaagcagaga

SEQ ID NO: 159999 - RNA, 23 nt, Human
uugaaggagaaagcuuucuuggu

SEQ ID NO: 160000 - RNA, 22 nt, Human
augguguagcaugugauaugac

SEQ ID NO: 160001 - RNA, 22 nt, Human
ccggggacuuaaagugaaggaa

SEQ ID NO: 160002 - RNA, 22 nt, Human
ggcucaggcuggagugcagugg

SEQ ID NO: 160003 - RNA, 22 nt, Human
gcugggagaggcccugaaguga

SEQ ID NO: 160004 - RNA, 22 nt, Human
ccugcagguccccggaugcgca

SEQ ID NO: 160005 - RNA, 22 nt, Human
acugucugcccugagaugccag

SEQ ID NO: 160006 - RNA, 22 nt, Human
ggguguguuccuaaggaaacca

SEQ ID NO: 160007 - RNA, 22 nt, Human
acagggcaaccucugggagacu

SEQ ID NO: 160008 - RNA, 22 nt, Human
ucugucacucuagagauggcag

SEQ ID NO: 160009 - RNA, 22 nt, Human
gccugccuuuuggaggcacauu

SEQ ID NO: 160010 - RNA, 22 nt, Human
uggcucuggugcgggcuccugc

SEQ ID NO: 160011 - RNA, 22 nt, Human
ccuggcugucguuuugugaaau

SEQ ID NO: 160012 - RNA, 22 nt, Human
gcugucuggaggcucugaggga

SEQ ID NO: 160013 - RNA, 20 nt, Human
ugacucugcaaccgucucuc

SEQ ID NO: 160014 - RNA, 19 nt, Human
uacuuuuucaggacagagu

SEQ ID NO: 160015 - RNA, 22 nt, Human
cugugucggacgugggcagcag

SEQ ID NO: 160016 - RNA, 22 nt, Human
cugggcacagcguugggcucuu

SEQ ID NO: 160017 - RNA, 22 nt, Human
aaguaacaaugcuguugaauug

SEQ ID NO: 160018 - RNA, 22 nt, Human
ccuggcaguggugaagaagagg

SEQ ID NO: 160019 - RNA, 20 nt, Human
gucaucgccggcagcaaaga

SEQ ID NO: 160020 - RNA, 22 nt, Human
acuauacauugaauguuaaggu

SEQ ID NO: 160021 - RNA, 22 nt, Human
gccuggcaggccucaugagggg

SEQ ID NO: 160022 - RNA, 22 nt, Human
cacagugcaugaugggcagaag

SEQ ID NO: 160023 - RNA, 22 nt, Human
ucccagcauaacaaacugcccg

SEQ ID NO: 160024 - RNA, 22 nt, Human
uuuccucugucaugacagcuga

SEQ ID NO: 160025 - RNA, 22 nt, Human
gggcugcuguagagaacauguu

SEQ ID NO: 160026 - RNA, 22 nt, Human
cagcagagcuuauguuggguca

SEQ ID NO: 160027 - RNA, 22 nt, Human
aggagcugcagauucugccuug

SEQ ID NO: 160028 - RNA, 21 nt, Human
aggcccagcuuuccucuugcu

SEQ ID NO: 160029 - RNA, 22 nt, Human
ucauacauaacuuguacaguga

SEQ ID NO: 160030 - RNA, 22 nt, Human
ucaggggacuuaggagagaagu

SEQ ID NO: 160031 - RNA, 22 nt, Human
ggccucugguucacagggagga

SEQ ID NO: 160032 - RNA, 22 nt, Human
uguguuuugaacucaucuacug

SEQ ID NO: 160033 - RNA, 22 nt, Human
cugagcucuaaugucagccuug

SEQ ID NO: 160034 - RNA, 22 nt, Human
agcagugggggaguguuaguuu

SEQ ID NO: 160035 - RNA, 22 nt, Human
cugccucuccccagaguggccc

SEQ ID NO: 160036 - RNA, 22 nt, Human
uggccugaggcucggcaugggu

SEQ ID NO: 160037 - RNA, 22 nt, Human
ucccagggacaccaagcuguuu

SEQ ID NO: 160038 - RNA, 22 nt, Human
caguaugucuacuggacaaagu

SEQ ID NO: 160039 - RNA, 22 nt, Human
ugcacagagagaugagacacgu

SEQ ID NO: 160040 - RNA, 17 nt, Human
ucagcaaagacaaagga

SEQ ID NO: 160041 - RNA, 22 nt, Human
uuuuaauacugcuauuguagga

SEQ ID NO: 160042 - RNA, 22 nt, Human
ccagcuccccucagcagguaau

SEQ ID NO: 160043 - RNA, 22 nt, Human
cuaucuuucgauucuagcuuaa

SEQ ID NO: 160044 - RNA, 22 nt, Human
ccaggcugugguuuagauagag

SEQ ID NO: 160045 - RNA, 22 nt, Human
uugcuuccaguccaagucuguu

SEQ ID NO: 160046 - RNA, 19 nt, Human
gggaugggcccucacccuc

SEQ ID NO: 160047 - RNA, 22 nt, Human
cagggcagggauguugcggcag

SEQ ID NO: 160048 - RNA, 22 nt, Human
ccuuccaggagucucugcaggu

SEQ ID NO: 160049 - RNA, 22 nt, Human
ggucccugcugaagccuuggug

SEQ ID NO: 160050 - RNA, 22 nt, Human
ugcuggagaucauuaauguuca

SEQ ID NO: 160051 - RNA, 22 nt, Human
cugccagcucgccacaaugaca

SEQ ID NO: 160052 - RNA, 22 nt, Human
gacagaggcaagaccagaagcc

SEQ ID NO: 160053 - RNA, 22 nt, Human
gcccagcagaucucagugucuc

SEQ ID NO: 160054 - RNA, 22 nt, Human
gcagagccaggcuggggcaggu

SEQ ID NO: 160055 - RNA, 22 nt, Human
cucagcccagcccaggaccagg

SEQ ID NO: 160056 - RNA, 19 nt, Human
uugaggggccaggggagau

SEQ ID NO: 160057 - RNA, 22 nt, Human
auauuucuccaaauguuuucaa

SEQ ID NO: 160058 - RNA, 22 nt, Human
gccaccucggcuuucucugcuc

SEQ ID NO: 160059 - RNA, 22 nt, Human
agugguaacuaaguccugcuua

SEQ ID NO: 160060 - RNA, 21 nt, Human
ugcaugcuauguuuuuauuuc

SEQ ID NO: 160061 - RNA, 22 nt, Human
aaguuucauguggagguagacu

SEQ ID NO: 160062 - RNA, 22 nt, Human
uccagccaacugccuagggagc

SEQ ID NO: 160063 - RNA, 22 nt, Human
agagcccugaagcagagcuaaa

SEQ ID NO: 160064 - RNA, 22 nt, Human
gggcugagucugcugccuguca

SEQ ID NO: 160065 - RNA, 22 nt, Human
aauguguguucggggcccagag

SEQ ID NO: 160066 - RNA, 20 nt, Human
aggcugccaggucucacauc

SEQ ID NO: 160067 - RNA, 23 nt, Human
aaucuggcugauguuuuuucucu

SEQ ID NO: 160068 - RNA, 22 nt, Human
uggcagaggagaauuaagauua

SEQ ID NO: 160069 - RNA, 21 nt, Human
ggugucaguuuuggucauuag

SEQ ID NO: 160070 - RNA, 22 nt, Human
aggggcugccuggcuuggcacu

SEQ ID NO: 160071 - RNA, 22 nt, Human
acucucucacagcuuggcugau

SEQ ID NO: 160072 - RNA, 20 nt, Human
ugucaugcauuagaugaaga

SEQ ID NO: 160073 - RNA, 22 nt, Human
uaaaucaguuucucuuauuggu

SEQ ID NO: 160074 - RNA, 22 nt, Human
ggcagaggagcuggaaacaugg

SEQ ID NO: 160075 - RNA, 22 nt, Human
aagugaguggccuggagaggug

SEQ ID NO: 160076 - RNA, 20 nt, Human
gcagcugcccccagucccug

SEQ ID NO: 160077 - RNA, 23 nt, Human
gguggcaggaguggaugcugagc

SEQ ID NO: 160078 - RNA, 22 nt, Human
uccucaggcggugaggaggggc

SEQ ID NO: 160079 - RNA, 22 nt, Human
gcagaaggucuggcacuucagg

SEQ ID NO: 160080 - RNA, 20 nt, Human
gcuuccuucccagcccccac

SEQ ID NO: 160081 - RNA, 22 nt, Human
gaugauggacaaagcauuggug

SEQ ID NO: 160082 - RNA, 22 nt, Human
gaaaucugaacucuguauccuu

SEQ ID NO: 160083 - RNA, 22 nt, Human
uucacauugugcagauuauggu

SEQ ID NO: 160084 - RNA, 22 nt, Human
ugucugagugugccugggcauu

SEQ ID NO: 160085 - RNA, 21 nt, Human
gcagccagacgggauucaguu

SEQ ID NO: 160086 - RNA, 22 nt, Human
agggagaaugaccaagguauau

SEQ ID NO: 160087 - RNA, 21 nt, Human
ucucuacacuuucacuaggcu

SEQ ID NO: 160088 - RNA, 22 nt, Human
ggcuggaaguccaagaucaaga

SEQ ID NO: 160089 - RNA, 20 nt, Human
ccacaggaguccagucgacc

SEQ ID NO: 160090 - RNA, 22 nt, Human
agccucugcuuaugcaaaggua

SEQ ID NO: 160091 - RNA, 21 nt, Human
uagggcaggcauuggaagaga

SEQ ID NO: 160092 - RNA, 22 nt, Human
cagcugcccugccuugcccuua

SEQ ID NO: 160093 - RNA, 22 nt, Human
uggaccugcuggaugggcaggu

SEQ ID NO: 160094 - RNA, 22 nt, Human
cugugcaagcccaagauaaaac

SEQ ID NO: 160095 - RNA, 22 nt, Human
ucauugcaccccagucccagcu

SEQ ID NO: 160096 - RNA, 23 nt, Human
uucuuucaagaaguucacagugc

SEQ ID NO: 160097 - RNA, 22 nt, Human
gggcagagaaauggacaguugg

SEQ ID NO: 160098 - RNA, 22 nt, Human
caaggaaaaagcgagcucgggg

SEQ ID NO: 160099 - RNA, 22 nt, Human
uaaacagaaagcagauguacuu

SEQ ID NO: 160100 - RNA, 22 nt, Human
ggggcagagucuggacuguugu

SEQ ID NO: 160101 - RNA, 22 nt, Human
ucaaggcuaaacuuucagagua

SEQ ID NO: 160102 - RNA, 22 nt, Human
cagccagcuucagauccaagcc

SEQ ID NO: 160103 - RNA, 22 nt, Human
cagaguguauucugcaguugca

SEQ ID NO: 160104 - RNA, 19 nt, Human
aucagcaagguaggaugug

SEQ ID NO: 160105 - RNA, 20 nt, Human
agagaauucccuuuggagau

SEQ ID NO: 160106 - RNA, 22 nt, Human
cagggcaguuugugccuaugag

SEQ ID NO: 160107 - RNA, 22 nt, Human
aagccuuccugagugcaaggcc

SEQ ID NO: 160108 - RNA, 22 nt, Human
ccuuccaggugcaggcaagccu

SEQ ID NO: 160109 - RNA, 22 nt, Human
cugggcaggagggcucuaugga

SEQ ID NO: 160110 - RNA, 22 nt, Human
cugggcugcagcgggagcgacg

SEQ ID NO: 160111 - RNA, 22 nt, Human
gagcagugagugaauguugccu

SEQ ID NO: 160112 - RNA, 22 nt, Human
gcaggagagucugugccagguu

SEQ ID NO: 160113 - RNA, 22 nt, Human
uugaggaguguuuagggugagg

SEQ ID NO: 160114 - RNA, 22 nt, Human
uaaacaugugagugugcauaua

SEQ ID NO: 160115 - RNA, 23 nt, Human
gugcaugugucuuuacaguagca

SEQ ID NO: 160116 - RNA, 22 nt, Human
ucccagagaaagucaaggucuu

SEQ ID NO: 160117 - RNA, 23 nt, Human
uggccuggagagaaaagaugagu

SEQ ID NO: 160118 - RNA, 23 nt, Human
uccugagaugagacagugcugcc

SEQ ID NO: 160119 - RNA, 22 nt, Human
aaguucaauggaaaagcuuuag

SEQ ID NO: 160120 - RNA, 22 nt, Human
ugcuggccgugagcucucggga

SEQ ID NO: 160121 - RNA, 22 nt, Human
gcugagguggcugccuuaguaa

SEQ ID NO: 160122 - RNA, 21 nt, Human
acagaguaguugaaacagaga

SEQ ID NO: 160123 - RNA, 22 nt, Human
ugaagcaguuacuggguguuaa

SEQ ID NO: 160124 - RNA, 22 nt, Human
auauuucuugagcaccugguau

SEQ ID NO: 160125 - RNA, 22 nt, Human
cugcccuggucccauggcugau

SEQ ID NO: 160126 - RNA, 22 nt, Human
ucccagccauuccuuuaggugu

SEQ ID NO: 160127 - RNA, 17 nt, Human
gagagcugcugcuuccg

SEQ ID NO: 160128 - RNA, 22 nt, Human
gaagagcugcaguuuccugggc

SEQ ID NO: 160129 - RNA, 22 nt, Human
acagggcaugugcaagagacau

SEQ ID NO: 160130 - RNA, 22 nt, Human
uuuauuguuguuagucauaagu

SEQ ID NO: 160131 - RNA, 22 nt, Human
aggaagcccuugucauuucugu

SEQ ID NO: 160132 - RNA, 22 nt, Human
ucuggccugaaaguccaugcuu

SEQ ID NO: 160133 - RNA, 22 nt, Human
gccuggcacauugcaguggauu

SEQ ID NO: 160134 - RNA, 22 nt, Human
aaaagguuuugaguacaaauau

SEQ ID NO: 160135 - RNA, 22 nt, Human
gggcuggugaggcugcccugca

SEQ ID NO: 160136 - RNA, 23 nt, Human
agacccagagacuggcucugcuc

SEQ ID NO: 160137 - RNA, 21 nt, Human
auugaaagucaacaaucaguu

SEQ ID NO: 160138 - RNA, 22 nt, Human
cagugguggaaugaggaauugu

SEQ ID NO: 160139 - RNA, 20 nt, Human
aauuuacucacagaaugaau

SEQ ID NO: 160140 - RNA, 22 nt, Human
agcagcuggugagcaagcucag

SEQ ID NO: 160141 - RNA, 22 nt, Human
gccugguguccagaggcgagug

SEQ ID NO: 160142 - RNA, 20 nt, Human
gcugaggucauuaugccuca

SEQ ID NO: 160143 - RNA, 22 nt, Human
ggccucuggcaggcaggcccuc

SEQ ID NO: 160144 - RNA, 22 nt, Human
uggcagggaguugcaggauuuc

SEQ ID NO: 160145 - RNA, 22 nt, Human
caccugagugucaguauucuca

SEQ ID NO: 160146 - RNA, 22 nt, Human
ugcauauugugaaaauguagau

SEQ ID NO: 160147 - RNA, 22 nt, Human
acugcagccuuugggcucauaa

SEQ ID NO: 160148 - RNA, 22 nt, Human
agcagccagagaaugaugcagu

SEQ ID NO: 160149 - RNA, 22 nt, Human
aaaguguaaaagcauguuaggg

SEQ ID NO: 160150 - RNA, 22 nt, Human
aaguucaaguguaaucuuuauu

SEQ ID NO: 160151 - RNA, 22 nt, Human
ggggcagagagaaggaagcuug

SEQ ID NO: 160152 - RNA, 22 nt, Human
guaaaugugcuucuuuuaacuu

SEQ ID NO: 160153 - RNA, 22 nt, Human
uguguacucaauugagccauuu

SEQ ID NO: 160154 - RNA, 22 nt, Human
uuggcuucucuuaacccuaaag

SEQ ID NO: 160155 - RNA, 22 nt, Human
guggcagcugguaugcagacag

SEQ ID NO: 160156 - RNA, 22 nt, Human
gcucugcugagauaucugggag

SEQ ID NO: 160157 - RNA, 22 nt, Human
aggcuggcuuggcucuccugug

SEQ ID NO: 160158 - RNA, 20 nt, Human
aagaaacuugaaaguacaag

SEQ ID NO: 160159 - RNA, 22 nt, Human
gcucugagagugggugauucug

SEQ ID NO: 160160 - RNA, 22 nt, Human
ccacagggcucuaggcgcuucc

SEQ ID NO: 160161 - RNA, 22 nt, Human
gauuuccuagacauggggcaga

SEQ ID NO: 160162 - RNA, 22 nt, Human
ccaccagcuuugccacccugcu

SEQ ID NO: 160163 - RNA, 22 nt, Human
cacagcuucuccuugauaucgc

SEQ ID NO: 160164 - RNA, 22 nt, Human
cacagcuuccauuagaaugaga

SEQ ID NO: 160165 - RNA, 22 nt, Human
ggaccugccagaacucaggcua

SEQ ID NO: 160166 - RNA, 22 nt, Human
uagugaaauuuaugcacagcua

SEQ ID NO: 160167 - RNA, 22 nt, Human
gggauggacuuggggacuccag

SEQ ID NO: 160168 - RNA, 22 nt, Human
ggcucugcccagguggacagca

SEQ ID NO: 160169 - RNA, 22 nt, Human
aaggugucacugggacaggaaa

SEQ ID NO: 160170 - RNA, 22 nt, Human
uuugcagcaaggagagagcauu

SEQ ID NO: 160171 - RNA, 22 nt, Human
ucauugcagugauguuguaugu

SEQ ID NO: 160172 - RNA, 22 nt, Human
cacauguuuggcaugucaccaa

SEQ ID NO: 160173 - RNA, 22 nt, Human
uuuccucuuuguaccuugacua

SEQ ID NO: 160174 - RNA, 22 nt, Human
acucugccuuucagcagaugaa

SEQ ID NO: 160175 - RNA, 22 nt, Human
uggcccuguggaggucagugag

SEQ ID NO: 160176 - RNA, 17 nt, Human
gcugcagcgguaggcag

SEQ ID NO: 160177 - RNA, 22 nt, Human
ggcucuggagacauguggagag

SEQ ID NO: 160178 - RNA, 22 nt, Human
ugucaccagcugcuccucagga

SEQ ID NO: 160179 - RNA, 19 nt, Human
gguaaaagugagcuucagg

SEQ ID NO: 160180 - RNA, 22 nt, Human
ccaaaguccauaguuuacauua

SEQ ID NO: 160181 - RNA, 22 nt, Human
gcagaagcccggucagcgcacg

SEQ ID NO: 160182 - RNA, 19 nt, Human
guaagggcuaauggacuau

SEQ ID NO: 160183 - RNA, 19 nt, Human
gaguuauugccagggcaug

SEQ ID NO: 160184 - RNA, 22 nt, Human
uccugggcccaggcugccaggg

SEQ ID NO: 160185 - RNA, 22 nt, Human
aauaauuuugagagccuggaaa

SEQ ID NO: 160186 - RNA, 22 nt, Human
caaugauguuuagauaaaaucc

SEQ ID NO: 160187 - RNA, 22 nt, Human
uggcugccuuucaccucaucuc

SEQ ID NO: 160188 - RNA, 22 nt, Human
ugcuccuuccucauccugugca

SEQ ID NO: 160189 - RNA, 22 nt, Human
uccagugguuugaaaggggugu

SEQ ID NO: 160190 - RNA, 23 nt, Human
gggagccauggguggucauggag

SEQ ID NO: 160191 - RNA, 22 nt, Human
acaggcugcugagccauuugcu

SEQ ID NO: 160192 - RNA, 22 nt, Human
cugcuuugcauagcugccagag

SEQ ID NO: 160193 - RNA, 22 nt, Human
cuuauguauaauguuccacaua

SEQ ID NO: 160194 - RNA, 22 nt, Human
agucccagaugacccagcuacu

SEQ ID NO: 160195 - RNA, 21 nt, Human
gcacagcaugaguguuggcau

SEQ ID NO: 160196 - RNA, 22 nt, Human
gaaggagacccugaagaugcug

SEQ ID NO: 160197 - RNA, 22 nt, Human
cgcagcagccccgugguaggug

SEQ ID NO: 160198 - RNA, 22 nt, Human
agccaagcacucaacuccugga

SEQ ID NO: 160199 - RNA, 20 nt, Human
cuguaucagguuacaaagua

SEQ ID NO: 160200 - RNA, 22 nt, Human
aguguuucccaguaggaugaaa

SEQ ID NO: 160201 - RNA, 22 nt, Human
auguacauuuagaucauuucug

SEQ ID NO: 160202 - RNA, 21 nt, Human
uaaaugugagcagggcugggc

SEQ ID NO: 160203 - RNA, 22 nt, Human
agcuguccuggcucaggcugug

SEQ ID NO: 160204 - RNA, 22 nt, Human
acaggugugagaacaugccuug

SEQ ID NO: 160205 - RNA, 22 nt, Human
cagcuggggcagccacgugcgg

SEQ ID NO: 160206 - RNA, 22 nt, Human
gccugugcuuaacugacgugag

SEQ ID NO: 160207 - RNA, 22 nt, Human
uucacaggauauaugugcaggg

SEQ ID NO: 160208 - RNA, 22 nt, Human
caaaugcaaaauauaacccugu

SEQ ID NO: 160209 - RNA, 22 nt, Human
ucagggcauggcugcacuuggc

SEQ ID NO: 160210 - RNA, 22 nt, Human
uagaaaguaaaucaguuuuauu

SEQ ID NO: 160211 - RNA, 21 nt, Human
agcuggcagauauggugucug

SEQ ID NO: 160212 - RNA, 22 nt, Human
auuuuuccaugauacuuaucug

SEQ ID NO: 160213 - RNA, 22 nt, Human
acuuucucccacccacccgucu

SEQ ID NO: 160214 - RNA, 22 nt, Human
agccaggaauuggacaacacau

SEQ ID NO: 160215 - RNA, 21 nt, Human
aggcuguccuuugccagcccu

SEQ ID NO: 160216 - RNA, 22 nt, Human
gcacagaaguaaaauacaaguc

SEQ ID NO: 160217 - RNA, 22 nt, Human
ccugucugcaugaucccugcca

SEQ ID NO: 160218 - RNA, 21 nt, Human
gagccuucccucugcccuuuc

SEQ ID NO: 160219 - RNA, 22 nt, Human
caaggaaacaugaaaugcauug

SEQ ID NO: 160220 - RNA, 22 nt, Human
aaaugcagauugucauucagga

SEQ ID NO: 160221 - RNA, 22 nt, Human
caugggcuacagaagcaugcug

SEQ ID NO: 160222 - RNA, 22 nt, Human
ucuggcagggguucugcacuug

SEQ ID NO: 160223 - RNA, 22 nt, Human
ugcaggagcagagauggcugga

SEQ ID NO: 160224 - RNA, 22 nt, Human
cagcugccacuugcucucggcu

SEQ ID NO: 160225 - RNA, 22 nt, Human
acagcagcuaaaggugucuccu

SEQ ID NO: 160226 - RNA, 22 nt, Human
ugagagugaaaugucacauguc

SEQ ID NO: 160227 - RNA, 22 nt, Human
ggcagcuccaaaaggaaacacu

SEQ ID NO: 160228 - RNA, 22 nt, Human
aauaugcauguauacaugugua

SEQ ID NO: 160229 - RNA, 22 nt, Human
ucccagagaagagcuggaugga

SEQ ID NO: 160230 - RNA, 22 nt, Human
ugaagcaggugaauggaugucg

SEQ ID NO: 160231 - RNA, 22 nt, Human
ugagguggcuagggaggcacuc

SEQ ID NO: 160232 - RNA, 22 nt, Human
ggagugacucucggggccacua

SEQ ID NO: 160233 - RNA, 22 nt, Human
acuuccugcuaugagcuucugu

SEQ ID NO: 160234 - RNA, 22 nt, Human
gaggggcuugaggcccugaugg

SEQ ID NO: 160235 - RNA, 22 nt, Human
uggcagcuugaaugcagucuuu

SEQ ID NO: 160236 - RNA, 22 nt, Human
acaaacuaccuacagauguuca

SEQ ID NO: 160237 - RNA, 22 nt, Human
gcagccacuaguuuuccuguuu

SEQ ID NO: 160238 - RNA, 22 nt, Human
cuucugugcuucacaguugcca

SEQ ID NO: 160239 - RNA, 22 nt, Human
augaaauaucuugaagaaauuc

SEQ ID NO: 160240 - RNA, 22 nt, Human
gaggguccccaugcagagcuca

SEQ ID NO: 160241 - RNA, 22 nt, Human
acacagggcggaaagcaugaga

SEQ ID NO: 160242 - RNA, 22 nt, Human
agggagcucaguuggaagcggu

SEQ ID NO: 160243 - RNA, 22 nt, Human
ccaaaauguuugaaugcaugug

SEQ ID NO: 160244 - RNA, 21 nt, Human
cagagguggccugaccucuga

SEQ ID NO: 160245 - RNA, 22 nt, Human
ggggaugguggcauuuguaaaa

SEQ ID NO: 160246 - RNA, 22 nt, Human
ccaggccugauugggaaucuug

SEQ ID NO: 160247 - RNA, 17 nt, Human
ccagagcuacugagacu

SEQ ID NO: 160248 - RNA, 22 nt, Human
uggccagguguggguucucaga

SEQ ID NO: 160249 - RNA, 22 nt, Human
cccagcauccucagggagcggg

SEQ ID NO: 160250 - RNA, 20 nt, Human
accucugcaucaauccuuug

SEQ ID NO: 160251 - RNA, 17 nt, Human
gcacugaacaauccugu

SEQ ID NO: 160252 - RNA, 22 nt, Human
ucaagagagugcugcuuggggu

SEQ ID NO: 160253 - RNA, 22 nt, Human
gcagagcagugcuugcccagcg

SEQ ID NO: 160254 - RNA, 22 nt, Human
ggagauggcucugcaaggucua

SEQ ID NO: 160255 - RNA, 19 nt, Human
ccagcagacacagcugccc

SEQ ID NO: 160256 - RNA, 22 nt, Human
ggcagccauggacacuggcuag

SEQ ID NO: 160257 - RNA, 22 nt, Human
aucaguuuguauaugaaacacu

SEQ ID NO: 160258 - RNA, 22 nt, Human
acucacauuucaucaggccaag

SEQ ID NO: 160259 - RNA, 22 nt, Human
ucagggcucaccagccucugcc

SEQ ID NO: 160260 - RNA, 22 nt, Human
cucucugcuguauccuuaggcu

SEQ ID NO: 160261 - RNA, 22 nt, Human
uuaaacagucccagaggcugac

SEQ ID NO: 160262 - RNA, 22 nt, Human
agcagcugcagagggcuccccc

SEQ ID NO: 160263 - RNA, 22 nt, Human
ugcugcucuguaaagugaugag

SEQ ID NO: 160264 - RNA, 22 nt, Human
acauuucucuuagaguuggacu

SEQ ID NO: 160265 - RNA, 22 nt, Human
uugaaaggugcugugugcugau

SEQ ID NO: 160266 - RNA, 22 nt, Human
caggcagaagaaguggaaggac

SEQ ID NO: 160267 - RNA, 22 nt, Human
gcucccugcacucugcagcccu

SEQ ID NO: 160268 - RNA, 19 nt, Human
cugcugggugcugagggag

SEQ ID NO: 160269 - RNA, 22 nt, Human
cuggcccuucucuugcuuccug

SEQ ID NO: 160270 - RNA, 22 nt, Human
auaagaaacauuauucuuucca

SEQ ID NO: 160271 - RNA, 22 nt, Human
ggcgaggccgggacaggcugga

SEQ ID NO: 160272 - RNA, 22 nt, Human
ugccuggcaacuguggugggcu

SEQ ID NO: 160273 - RNA, 22 nt, Human
uccuggagggaggcggugcuac

SEQ ID NO: 160274 - RNA, 22 nt, Human
uuuccucugaugcugacuugga

SEQ ID NO: 160275 - RNA, 22 nt, Human
augggaggaucacuugaggcca

SEQ ID NO: 160276 - RNA, 22 nt, Human
ugggcacuguagcuggugcugg

SEQ ID NO: 160277 - RNA, 20 nt, Human
aguaccuuuuguauguuacc

SEQ ID NO: 160278 - RNA, 22 nt, Human
gcacagggaggcuggccuggcc

SEQ ID NO: 160279 - RNA, 20 nt, Human
aucuggcucagauccugcag

SEQ ID NO: 160280 - RNA, 22 nt, Human
ucaguuuucauuucaugagcag

SEQ ID NO: 160281 - RNA, 22 nt, Human
gcccugucggaacugcgaccuc

SEQ ID NO: 160282 - RNA, 22 nt, Human
guggguggaucaccugagguca

SEQ ID NO: 160283 - RNA, 22 nt, Human
agggacagucuacuguucacug

SEQ ID NO: 160284 - RNA, 22 nt, Human
aaagccuugcccgucacuggga

SEQ ID NO: 160285 - RNA, 22 nt, Human
guuagaaacacauucuuauuga

SEQ ID NO: 160286 - RNA, 22 nt, Human
gcagggacaacugugcaccuga

SEQ ID NO: 160287 - RNA, 22 nt, Human
uuuccucuccaccaggaggucu

SEQ ID NO: 160288 - RNA, 22 nt, Human
agguuuucagcuguauccugag

SEQ ID NO: 160289 - RNA, 22 nt, Human
cgagaguggacagggcgcagcu

SEQ ID NO: 160290 - RNA, 22 nt, Human
uuaacagagugccuggcaugua

SEQ ID NO: 160291 - RNA, 22 nt, Human
auaaacagcuccauuuagugcc

SEQ ID NO: 160292 - RNA, 22 nt, Human
cagccuccugggacacucaccg

SEQ ID NO: 160293 - RNA, 22 nt, Human
acagugucaugucguguucccc

SEQ ID NO: 160294 - RNA, 22 nt, Human
aggcacugaauauccaguaaaa

SEQ ID NO: 160295 - RNA, 19 nt, Human
gcucugagaggggcauggg

SEQ ID NO: 160296 - RNA, 22 nt, Human
uacauucaacaugucacuaugu

SEQ ID NO: 160297 - RNA, 19 nt, Human
ggaugagggucaggcauag

SEQ ID NO: 160298 - RNA, 22 nt, Human
acugggccggugcagaguaguu

SEQ ID NO: 160299 - RNA, 22 nt, Human
guuugcauguauuaagucaaua

SEQ ID NO: 160300 - RNA, 22 nt, Human
ugaccaaagaguugcuuguauu

SEQ ID NO: 160301 - RNA, 23 nt, Human
aggagccaggaaccagcuucccc

SEQ ID NO: 160302 - RNA, 22 nt, Human
ggcugccugcucaggugcggcg

SEQ ID NO: 160303 - RNA, 22 nt, Human
cucuggagcaccgggcuaucca

SEQ ID NO: 160304 - RNA, 22 nt, Human
uugcuuccucgaggccagcgug

SEQ ID NO: 160305 - RNA, 19 nt, Human
uuacaucugcaacacuggu

SEQ ID NO: 160306 - RNA, 22 nt, Human
aucaguuugauaauaaggcuug

SEQ ID NO: 160307 - RNA, 23 nt, Human
ugcaggggaggcuuaaagcaggu

SEQ ID NO: 160308 - RNA, 22 nt, Human
ugaccaaaggugguuuauuugg

SEQ ID NO: 160309 - RNA, 22 nt, Human
ggccugggcccacugucaagag

SEQ ID NO: 160310 - RNA, 22 nt, Human
gagagugaugaaugguuaaaca

SEQ ID NO: 160311 - RNA, 22 nt, Human
aaauucuuucauggcuaauaag

SEQ ID NO: 160312 - RNA, 22 nt, Human
caaaugcuggcccugcuacuua

SEQ ID NO: 160313 - RNA, 20 nt, Human
uccugcaguuccuaggaggg

SEQ ID NO: 160314 - RNA, 22 nt, Human
ugggaccaagucauuucuuuag

SEQ ID NO: 160315 - RNA, 22 nt, Human
gcccagcuccucugcagacccu

SEQ ID NO: 160316 - RNA, 22 nt, Human
cugagccaguagucagggacaa

SEQ ID NO: 160317 - RNA, 22 nt, Human
uuuuccucaggaaugcuaagcu

SEQ ID NO: 160318 - RNA, 22 nt, Human
cugcagcuguagaggacagugg

SEQ ID NO: 160319 - RNA, 22 nt, Human
ugggcccaagagagucuccaac

SEQ ID NO: 160320 - RNA, 22 nt, Human
ucccuggagauaacuucuggga

SEQ ID NO: 160321 - RNA, 22 nt, Human
cuuuauguuggggugucuuagu

SEQ ID NO: 160322 - RNA, 22 nt, Human
cuggugggagcagcaggcagcu

SEQ ID NO: 160323 - RNA, 22 nt, Human
ggcucaggccuguaauccuagc

SEQ ID NO: 160324 - RNA, 22 nt, Human
ucucuucuugauuuucacugga

SEQ ID NO: 160325 - RNA, 22 nt, Human
aaauugugagcuauagaucuag

SEQ ID NO: 160326 - RNA, 22 nt, Human
augaagauaagaccaggcugga

SEQ ID NO: 160327 - RNA, 22 nt, Human
ugggaggacuugugggcuucau

SEQ ID NO: 160328 - RNA, 22 nt, Human
uucaaugauuuuuagggaucau

SEQ ID NO: 160329 - RNA, 22 nt, Human
acauuucuccuugcaggaguca

SEQ ID NO: 160330 - RNA, 22 nt, Human
ggaagaagggucauuggcagcc

SEQ ID NO: 160331 - RNA, 20 nt, Human
gcauugaguauagacagaug

SEQ ID NO: 160332 - RNA, 22 nt, Human
ugaaagguuauuuaggucugcu

SEQ ID NO: 160333 - RNA, 22 nt, Human
auccaguucucagugcuuacag

SEQ ID NO: 160334 - RNA, 22 nt, Human
gcagcugaaagggaucucuaca

SEQ ID NO: 160335 - RNA, 22 nt, Human
cucagagucugcauuucuguca

SEQ ID NO: 160336 - RNA, 22 nt, Human
ugcuggcccaguauggacugca

SEQ ID NO: 160337 - RNA, 22 nt, Human
aacugcauuugcauaaguccau

SEQ ID NO: 160338 - RNA, 22 nt, Human
gcacacagauuaggaaacagaa

SEQ ID NO: 160339 - RNA, 22 nt, Human
aaugcugcucucauaauuauag

SEQ ID NO: 160340 - RNA, 22 nt, Human
ggcugccuccucgagacaggau

SEQ ID NO: 160341 - RNA, 20 nt, Human
uagaaaucuuauaaaagacu

SEQ ID NO: 160342 - RNA, 23 nt, Human
uggagcugggcucagacccuggg

SEQ ID NO: 160343 - RNA, 22 nt, Human
gggcagagagcuggaacuccuu

SEQ ID NO: 160344 - RNA, 22 nt, Human
uuaagaauggaaugaggaauuu

SEQ ID NO: 160345 - RNA, 22 nt, Human
aaaagcucuuucugcuguagau

SEQ ID NO: 160346 - RNA, 22 nt, Human
aggguggcaguuacuggagcaa

SEQ ID NO: 160347 - RNA, 22 nt, Human
ucuuuccuagaggcugaugagu

SEQ ID NO: 160348 - RNA, 22 nt, Human
auccugggaagcugacauugaa

SEQ ID NO: 160349 - RNA, 22 nt, Human
ccuauugacaauucucuucucc

SEQ ID NO: 160350 - RNA, 22 nt, Human
cuccauugaacauccucucaga

SEQ ID NO: 160351 - RNA, 22 nt, Human
cucugagcccgcugcagcccca

SEQ ID NO: 160352 - RNA, 22 nt, Human
gagcucauccccaugguccguc

SEQ ID NO: 160353 - RNA, 22 nt, Human
gucuuucuuaauucaagugcuu

SEQ ID NO: 160354 - RNA, 22 nt, Human
gagguacaugaggauacacagg

SEQ ID NO: 160355 - RNA, 22 nt, Human
gagcucccuggagguucagaua

SEQ ID NO: 160356 - RNA, 18 nt, Human
agcuggcccuggcugccg

SEQ ID NO: 160357 - RNA, 22 nt, Human
aggaagccuggggcugcccucg

SEQ ID NO: 160358 - RNA, 22 nt, Human
augacacaauuuuagagcugaa

SEQ ID NO: 160359 - RNA, 22 nt, Human
cuggcagguggauggggacucc

SEQ ID NO: 160360 - RNA, 22 nt, Human
uaacagaaauauuuccagguga

SEQ ID NO: 160361 - RNA, 22 nt, Human
uauccaauucaccauugauggg

SEQ ID NO: 160362 - RNA, 22 nt, Human
ugggccuggcccuguggaggag

SEQ ID NO: 160363 - RNA, 22 nt, Human
gcugucuccauagcuguguguc

SEQ ID NO: 160364 - RNA, 22 nt, Human
guccucagucaguuuggugggg

SEQ ID NO: 160365 - RNA, 22 nt, Human
augaagcugguuuuggcuuggg

SEQ ID NO: 160366 - RNA, 22 nt, Human
ugggccugugaugcugggcuau

SEQ ID NO: 160367 - RNA, 22 nt, Human
ugucucuggcccaugagcagag

SEQ ID NO: 160368 - RNA, 22 nt, Human
acauuucucagggaguuuugcu

SEQ ID NO: 160369 - RNA, 22 nt, Human
aaggccaggacaccaggggacu

SEQ ID NO: 160370 - RNA, 22 nt, Human
ugcugucuuccaggauggugaa

SEQ ID NO: 160371 - RNA, 22 nt, Human
ugggcugcugcggugcucuugg

SEQ ID NO: 160372 - RNA, 22 nt, Human
gcagggcucugcuguaguccua

SEQ ID NO: 160373 - RNA, 22 nt, Human
cccugagcccauaguugacauu

SEQ ID NO: 160374 - RNA, 22 nt, Human
auucuccagcucacuguccaua

SEQ ID NO: 160375 - RNA, 22 nt, Human
agccagaggccagccugccuca

SEQ ID NO: 160376 - RNA, 20 nt, Human
ugcugcaguuucaugggacu

SEQ ID NO: 160377 - RNA, 22 nt, Human
cuggccgguauuugccucuggg

SEQ ID NO: 160378 - RNA, 19 nt, Human
cagucccaaauucuuguca

SEQ ID NO: 160379 - RNA, 22 nt, Human
ccagagccagagaggugccugc

SEQ ID NO: 160380 - RNA, 22 nt, Human
agcuggcccucgagagccaauu

SEQ ID NO: 160381 - RNA, 22 nt, Human
ucuccucugcgcggcagugccc

SEQ ID NO: 160382 - RNA, 22 nt, Human
cugggacagcugagacaggaga

SEQ ID NO: 160383 - RNA, 19 nt, Human
cagcugccuuuucuuugca

SEQ ID NO: 160384 - RNA, 22 nt, Human
cuccucuggaaauuccucugcc

SEQ ID NO: 160385 - RNA, 22 nt, Human
ccacaaguuucagcacccagag

SEQ ID NO: 160386 - RNA, 22 nt, Human
agcaggugaauuccuggaugug

SEQ ID NO: 160387 - RNA, 22 nt, Human
caugaagcacagcucucuuuuu

SEQ ID NO: 160388 - RNA, 21 nt, Human
ugccagcauuaaacagucauu

SEQ ID NO: 160389 - RNA, 22 nt, Human
gcucccacgcaauucuuuucag

SEQ ID NO: 160390 - RNA, 21 nt, Human
caggaaaagcggaagucuagc

SEQ ID NO: 160391 - RNA, 22 nt, Human
acaggugaccugcucauaugaa

SEQ ID NO: 160392 - RNA, 22 nt, Human
gcaccugcaggaugagccaggg

SEQ ID NO: 160393 - RNA, 22 nt, Human
agagcugcaccuaugcagaccu

SEQ ID NO: 160394 - RNA, 22 nt, Human
cugugcuuaccugcccagguga

SEQ ID NO: 160395 - RNA, 22 nt, Human
ugggcugcugagaaugagagag

SEQ ID NO: 160396 - RNA, 19 nt, Human
acauuuagaauguacuugc

SEQ ID NO: 160397 - RNA, 22 nt, Human
cugcccugggaguaccuguccu

SEQ ID NO: 160398 - RNA, 22 nt, Human
augccagucaaagaagaugaca

SEQ ID NO: 160399 - RNA, 22 nt, Human
cucucugaggaaggagcaucug

SEQ ID NO: 160400 - RNA, 22 nt, Human
uggcugcugcuuggucuucuuc

SEQ ID NO: 160401 - RNA, 22 nt, Human
gagcuuggugaugccuccuggu

SEQ ID NO: 160402 - RNA, 22 nt, Human
cucugugggggagaggcagcug

SEQ ID NO: 160403 - RNA, 22 nt, Human
cucucugaggcaggccuguggg

SEQ ID NO: 160404 - RNA, 22 nt, Human
ucagcaaugagaacuggcauuu

SEQ ID NO: 160405 - RNA, 22 nt, Human
ugcucugcaagcaggagcaaga

SEQ ID NO: 160406 - RNA, 22 nt, Human
ugauuuccaauaaggagaaugu

SEQ ID NO: 160407 - RNA, 22 nt, Human
aaaaaugcugugguagcugugu

SEQ ID NO: 160408 - RNA, 22 nt, Human
uuuucauuguaaaucaggaaac

SEQ ID NO: 160409 - RNA, 22 nt, Human
ggggcggggcucugagaagcau

SEQ ID NO: 160410 - RNA, 22 nt, Human
ccugccagcauggcuuaucucc

SEQ ID NO: 160411 - RNA, 22 nt, Human
cagggcagcuuccuuuguuagg

SEQ ID NO: 160412 - RNA, 22 nt, Human
ugggcacaaacaucugccuguu

SEQ ID NO: 160413 - RNA, 22 nt, Human
aucuggcuggauucuuagcguu

SEQ ID NO: 160414 - RNA, 22 nt, Human
agaugaagacucaggagcaggu

SEQ ID NO: 160415 - RNA, 21 nt, Human
gcucccugcucagcuccuggg

SEQ ID NO: 160416 - RNA, 22 nt, Human
ccugccuggcuuccagaagaga

SEQ ID NO: 160417 - RNA, 22 nt, Human
aggccugacuugaauuuagggc

SEQ ID NO: 160418 - RNA, 22 nt, Human
gagcagcucgagaaggaagcag

SEQ ID NO: 160419 - RNA, 22 nt, Human
cccagcaucccagugggcagca

SEQ ID NO: 160420 - RNA, 22 nt, Human
cuuguauuccccuaucucuaaa

SEQ ID NO: 160421 - RNA, 22 nt, Human
ucaguguaaguuauguagaugu

SEQ ID NO: 160422 - RNA, 22 nt, Human
agucauaauuauaaacaucagu

SEQ ID NO: 160423 - RNA, 22 nt, Human
ggcuggagugggcuccagaguu

SEQ ID NO: 160424 - RNA, 22 nt, Human
uguaugcuuguguauaauauaa

SEQ ID NO: 160425 - RNA, 21 nt, Human
cucuggaggcaagggagagug

SEQ ID NO: 160426 - RNA, 22 nt, Human
agggcugcuccuccuucaggcc

SEQ ID NO: 160427 - RNA, 22 nt, Human
ugcugccacaaauucagcugcc

SEQ ID NO: 160428 - RNA, 18 nt, Human
cauuaugugguuauagaa

SEQ ID NO: 160429 - RNA, 20 nt, Human
aggagcugaauuagaggguu

SEQ ID NO: 160430 - RNA, 22 nt, Human
ugaaauauuuagagaguaaguu

SEQ ID NO: 160431 - RNA, 22 nt, Human
ucccagccuuucuuuucugcug

SEQ ID NO: 160432 - RNA, 22 nt, Human
acaaagucuuuuacaacaguca

SEQ ID NO: 160433 - RNA, 22 nt, Human
gccugagcuacuagggagucug

SEQ ID NO: 160434 - RNA, 21 nt, Human
uuaagagcuuagcaguaggcc

SEQ ID NO: 160435 - RNA, 22 nt, Human
gcaggggaguggaugauggauu

SEQ ID NO: 160436 - RNA, 22 nt, Human
ucuggcuccugaguccaugcuc

SEQ ID NO: 160437 - RNA, 22 nt, Human
acauuucuaguuguucaucucc

SEQ ID NO: 160438 - RNA, 22 nt, Human
ucccaggacaggccacauggaa

SEQ ID NO: 160439 - RNA, 22 nt, Human
gcacagggcaacaggucuguua

SEQ ID NO: 160440 - RNA, 22 nt, Human
cacagcagagggagccauugaa

SEQ ID NO: 160441 - RNA, 22 nt, Human
gaugguuuggaaugaaguagcu

SEQ ID NO: 160442 - RNA, 22 nt, Human
gcuuccuucuaccacaucaugc

SEQ ID NO: 160443 - RNA, 22 nt, Human
gagaccaggaaguacagcagcc

SEQ ID NO: 160444 - RNA, 22 nt, Human
gaugcacuuucuuuucaacagu

SEQ ID NO: 160445 - RNA, 22 nt, Human
uaguuacagcaggcaggauaua

SEQ ID NO: 160446 - RNA, 22 nt, Human
aggugcagcugacaccaugugg

SEQ ID NO: 160447 - RNA, 22 nt, Human
ccagcagcccucuuccaagacu

SEQ ID NO: 160448 - RNA, 22 nt, Human
ugugcuucaucacuucucaguu

SEQ ID NO: 160449 - RNA, 17 nt, Human
aggugcuggagcaucag

SEQ ID NO: 160450 - RNA, 22 nt, Human
agagcugagaauguggcuuccu

SEQ ID NO: 160451 - RNA, 22 nt, Human
ccugccaggccagugagcuucc

SEQ ID NO: 160452 - RNA, 23 nt, Human
agaggccaacuucuugccccucc

SEQ ID NO: 160453 - RNA, 22 nt, Human
cuccagggagcuuggaaagacc

SEQ ID NO: 160454 - RNA, 17 nt, Human
acaagcaguggccaugg

SEQ ID NO: 160455 - RNA, 22 nt, Human
uccaugugccaaggggcagagg

SEQ ID NO: 160456 - RNA, 22 nt, Human
aaauauguauggaguucaugaa

SEQ ID NO: 160457 - RNA, 22 nt, Human
uggcugccuagucccucagccu

SEQ ID NO: 160458 - RNA, 22 nt, Human
uugcucaggcuuagagcuacua

SEQ ID NO: 160459 - RNA, 22 nt, Human
ggcucuggugugaagcagccuc

SEQ ID NO: 160460 - RNA, 22 nt, Human
gccugucugcgucacgcuuauu

SEQ ID NO: 160461 - RNA, 22 nt, Human
uggguagagcaggcuggggcuu

SEQ ID NO: 160462 - RNA, 22 nt, Human
accagagcuggcagaguaucaa

SEQ ID NO: 160463 - RNA, 22 nt, Human
auguuuuauauuuugcagcagu

SEQ ID NO: 160464 - RNA, 22 nt, Human
agcugccugggcuuguacaccu

SEQ ID NO: 160465 - RNA, 22 nt, Human
gggccacauugaagggugggua

SEQ ID NO: 160466 - RNA, 22 nt, Human
cagcagggaagcugugcuguuu

SEQ ID NO: 160467 - RNA, 22 nt, Human
uacauuguuuuuucuugccauc

SEQ ID NO: 160468 - RNA, 21 nt, Human
cgggcuggccgggcccucacc

SEQ ID NO: 160469 - RNA, 22 nt, Human
aagauuuccuucaguagagcua

SEQ ID NO: 160470 - RNA, 22 nt, Human
cagagcagaaaccugggugauu

SEQ ID NO: 160471 - RNA, 23 nt, Human
gcucugagggcuuaucccuccca

SEQ ID NO: 160472 - RNA, 22 nt, Human
ugcagugggccggaggccaggg

SEQ ID NO: 160473 - RNA, 20 nt, Human
uccagcugucuuucagagac

SEQ ID NO: 160474 - RNA, 22 nt, Human
ggagccuugggcgcucucccau

SEQ ID NO: 160475 - RNA, 18 nt, Human
ugcuggcaacuacuauug

SEQ ID NO: 160476 - RNA, 19 nt, Human
ucaaggcucccugagggau

SEQ ID NO: 160477 - RNA, 22 nt, Human
uacaugcuccacuuucuccugu

SEQ ID NO: 160478 - RNA, 22 nt, Human
ccucagcucuucccugugcaca

SEQ ID NO: 160479 - RNA, 22 nt, Human
aggaggcuguggagcacuccau

SEQ ID NO: 160480 - RNA, 22 nt, Human
ggguacaaagauuucauaagau

SEQ ID NO: 160481 - RNA, 22 nt, Human
agagccuggucugagauaggac

SEQ ID NO: 160482 - RNA, 22 nt, Human
gcuccugggcucuaccuugcua

SEQ ID NO: 160483 - RNA, 22 nt, Human
auugaaagauauacuguucuca

SEQ ID NO: 160484 - RNA, 17 nt, Human
agcugccagggagugug

SEQ ID NO: 160485 - RNA, 22 nt, Human
uguaugcagggcuuguaugcag

SEQ ID NO: 160486 - RNA, 22 nt, Human
ucagggcagaauccaaagaauu

SEQ ID NO: 160487 - RNA, 22 nt, Human
ccagcugcagguguuccagaug

SEQ ID NO: 160488 - RNA, 22 nt, Human
uccauaagcagguucuuccuga

SEQ ID NO: 160489 - RNA, 22 nt, Human
gacagccaugcacuucugcugu

SEQ ID NO: 160490 - RNA, 21 nt, Human
aguucauacugaguaacaaaa

SEQ ID NO: 160491 - RNA, 22 nt, Human
uuguaacagcuguuuauauagu

SEQ ID NO: 160492 - RNA, 22 nt, Human
acaaggaggucuggggggcccu

SEQ ID NO: 160493 - RNA, 19 nt, Human
ucccuuccugucgggcucc

SEQ ID NO: 160494 - RNA, 22 nt, Human
gcauuuaaauuugaacuucaga

SEQ ID NO: 160495 - RNA, 22 nt, Human
cuggcagcuuccuuugcaucug

SEQ ID NO: 160496 - RNA, 22 nt, Human
ugcagaguaaaagcagaugcua

SEQ ID NO: 160497 - RNA, 22 nt, Human
uacauaguauucacauuguuuu

SEQ ID NO: 160498 - RNA, 22 nt, Human
gcucugugccacaugcaguguu

SEQ ID NO: 160499 - RNA, 22 nt, Human
cagggccuuuuagcaucuucuc

SEQ ID NO: 160500 - RNA, 22 nt, Human
ggaggagacaguaaaaagcacg

SEQ ID NO: 160501 - RNA, 22 nt, Human
uggcucagcaagacauugaccu

SEQ ID NO: 160502 - RNA, 22 nt, Human
ggcagugacuguucagacgucc

SEQ ID NO: 160503 - RNA, 22 nt, Human
aggagucauugagagggguccu

SEQ ID NO: 160504 - RNA, 22 nt, Human
caggcagcagaggaguguggga

SEQ ID NO: 160505 - RNA, 21 nt, Human
uccagggaacuucucaggaau

SEQ ID NO: 160506 - RNA, 19 nt, Human
agaaaucucgagauuuguu

SEQ ID NO: 160507 - RNA, 22 nt, Human
uuggcuuccaggaucucagcag

SEQ ID NO: 160508 - RNA, 19 nt, Human
agacacacuugauaugugu

SEQ ID NO: 160509 - RNA, 22 nt, Human
uccuggagagugggcgagcaca

SEQ ID NO: 160510 - RNA, 22 nt, Human
uggugugggcguggcaggcaag

SEQ ID NO: 160511 - RNA, 22 nt, Human
cccagccaaggugcugguguug

SEQ ID NO: 160512 - RNA, 22 nt, Human
uguaugcaaauuuauuagcaca

SEQ ID NO: 160513 - RNA, 22 nt, Human
uuagaaaaaggcuguggucuua

SEQ ID NO: 160514 - RNA, 22 nt, Human
gggggcucugacucccucagcu

SEQ ID NO: 160515 - RNA, 21 nt, Human
gaggccacuaauaggggcaga

SEQ ID NO: 160516 - RNA, 22 nt, Human
agcccaagcuaugaggugaccu

SEQ ID NO: 160517 - RNA, 22 nt, Human
uaccuugggcuauuaucuuuga

SEQ ID NO: 160518 - RNA, 22 nt, Human
ggcagcuccucucagcaaaaga

SEQ ID NO: 160519 - RNA, 22 nt, Human
acauuucuugaugccucuguga

SEQ ID NO: 160520 - RNA, 22 nt, Human
ucagccuggcaggauggccugg

SEQ ID NO: 160521 - RNA, 22 nt, Human
acauacuaugaauacauguguc

SEQ ID NO: 160522 - RNA, 22 nt, Human
auucuuggagcagucaaagaag

SEQ ID NO: 160523 - RNA, 22 nt, Human
uggagcaggugccaggugugug

SEQ ID NO: 160524 - RNA, 22 nt, Human
ugcaaacaggagaguaaguaua

SEQ ID NO: 160525 - RNA, 22 nt, Human
ugcaguggaaagacucagacuu

SEQ ID NO: 160526 - RNA, 22 nt, Human
aaggcagcccuggcucagccug

SEQ ID NO: 160527 - RNA, 19 nt, Human
agcagagcagggccguggg

SEQ ID NO: 160528 - RNA, 22 nt, Human
cugucccucaucaccucugggu

SEQ ID NO: 160529 - RNA, 22 nt, Human
gagcagcugguaggugaaccca

SEQ ID NO: 160530 - RNA, 19 nt, Human
uugcauuguaguuggacug

SEQ ID NO: 160531 - RNA, 17 nt, Human
cauguguaugugggagu

SEQ ID NO: 160532 - RNA, 22 nt, Human
agcugucuccagauacaggauu

SEQ ID NO: 160533 - RNA, 22 nt, Human
caggccugaguguggaagucuu

SEQ ID NO: 160534 - RNA, 23 nt, Human
ccagcccuccaccagcucuaggc

SEQ ID NO: 160535 - RNA, 19 nt, Human
acccucucagugccugagg

SEQ ID NO: 160536 - RNA, 22 nt, Human
agggcugagacuaaggccagau

SEQ ID NO: 160537 - RNA, 22 nt, Human
acagaggccccgugggagagcc

SEQ ID NO: 160538 - RNA, 22 nt, Human
ugacacagaaauuaagcuguca

SEQ ID NO: 160539 - RNA, 22 nt, Human
cuggugccuccucccugugcuu

SEQ ID NO: 160540 - RNA, 22 nt, Human
cagccucuaagcacagccucuc

SEQ ID NO: 160541 - RNA, 22 nt, Human
caaagaugcugauguuggauca

SEQ ID NO: 160542 - RNA, 22 nt, Human
accagagcgcucaagccuuccc

SEQ ID NO: 160543 - RNA, 22 nt, Human
gugaccaucagagaauaacaaa

SEQ ID NO: 160544 - RNA, 22 nt, Human
caagcuccuuacauccacaggg

SEQ ID NO: 160545 - RNA, 22 nt, Human
agaacagaagggaggaaggccu

SEQ ID NO: 160546 - RNA, 22 nt, Human
gagagcugggcuuugggugaag

SEQ ID NO: 160547 - RNA, 22 nt, Human
cuacauuuuucaccgagccucu

SEQ ID NO: 160548 - RNA, 22 nt, Human
cugcugcauuccucuuuaugag

SEQ ID NO: 160549 - RNA, 22 nt, Human
gacaucauagggugggaggaaa

SEQ ID NO: 160550 - RNA, 22 nt, Human
cagcugccaugacauguccugc

SEQ ID NO: 160551 - RNA, 22 nt, Human
ucaaagucucugcuucuguaac

SEQ ID NO: 160552 - RNA, 22 nt, Human
augugaaacugaagcauccaua

SEQ ID NO: 160553 - RNA, 22 nt, Human
cugaggcuggggaagggaagug

SEQ ID NO: 160554 - RNA, 22 nt, Human
gcucuguguugucagaggcacc

SEQ ID NO: 160555 - RNA, 22 nt, Human
auaaggcagucacuggaauguu

SEQ ID NO: 160556 - RNA, 22 nt, Human
cuggcagguuuggugucuggug

SEQ ID NO: 160557 - RNA, 20 nt, Human
guccugggagccacagcaca

SEQ ID NO: 160558 - RNA, 22 nt, Human
ggcccaucucuugcucuggguu

SEQ ID NO: 160559 - RNA, 19 nt, Human
gcuucccaccagccagccc

SEQ ID NO: 160560 - RNA, 22 nt, Human
gaggcagcugaaggagugacag

SEQ ID NO: 160561 - RNA, 22 nt, Human
ccugggcauucuuugaguucuc

SEQ ID NO: 160562 - RNA, 22 nt, Human
gcugucacaagcaucuggggca

SEQ ID NO: 160563 - RNA, 22 nt, Human
augauacaucuucaugucagug

SEQ ID NO: 160564 - RNA, 22 nt, Human
aagggaggccagagguuuugca

SEQ ID NO: 160565 - RNA, 22 nt, Human
cuggaaugccucccugucagag

SEQ ID NO: 160566 - RNA, 22 nt, Human
ggcccaaggcccaggucgagcu

SEQ ID NO: 160567 - RNA, 22 nt, Human
ucugaaaguaucuggaucuuuu

SEQ ID NO: 160568 - RNA, 22 nt, Human
gcaccuggcugcccagguggag

SEQ ID NO: 160569 - RNA, 22 nt, Human
gcugguccacucccuggaggcu

SEQ ID NO: 160570 - RNA, 20 nt, Human
uggggccuguuucugugguu

SEQ ID NO: 160571 - RNA, 22 nt, Human
cucauggauauaagaacuguuu

SEQ ID NO: 160572 - RNA, 17 nt, Human
cucuccuuccucugagg

SEQ ID NO: 160573 - RNA, 22 nt, Human
agauuuagacugccuuaaucau

SEQ ID NO: 160574 - RNA, 22 nt, Human
cuuucauucuuagauauuagug

SEQ ID NO: 160575 - RNA, 22 nt, Human
cccuggaguccggagcucaccu

SEQ ID NO: 160576 - RNA, 22 nt, Human
acacugaauaauugagaguuga

SEQ ID NO: 160577 - RNA, 22 nt, Human
cagaagcauuccagcaaauagu

SEQ ID NO: 160578 - RNA, 22 nt, Human
cacagcagaaauaugaaggcag

SEQ ID NO: 160579 - RNA, 22 nt, Human
aaaguucugggggagaagaacg

SEQ ID NO: 160580 - RNA, 22 nt, Human
aaugcacauguuguaauaaaua

SEQ ID NO: 160581 - RNA, 22 nt, Human
ggcugccauaacugauaccaua

SEQ ID NO: 160582 - RNA, 22 nt, Human
gagagcccugcuccuaucccag

SEQ ID NO: 160583 - RNA, 22 nt, Human
ucagugcuucggcgagcaccua

SEQ ID NO: 160584 - RNA, 22 nt, Human
agcaggugcauggcgagcgcgg

SEQ ID NO: 160585 - RNA, 22 nt, Human
gcucagagggaacaaggggcug

SEQ ID NO: 160586 - RNA, 22 nt, Human
acacaguaugaaaagucuaguu

SEQ ID NO: 160587 - RNA, 22 nt, Human
uagaaaucauuuagaaguauug

SEQ ID NO: 160588 - RNA, 22 nt, Human
gugcagugacccuggagagcug

SEQ ID NO: 160589 - RNA, 22 nt, Human
cugccaggacugacgucuucag

SEQ ID NO: 160590 - RNA, 22 nt, Human
ucagggcaaaagggaaaccauu

SEQ ID NO: 160591 - RNA, 22 nt, Human
aagcugcccaagacugaagcau

SEQ ID NO: 160592 - RNA, 22 nt, Human
cugggccugucagggcuuuuug

SEQ ID NO: 160593 - RNA, 22 nt, Human
cuucccagaccuuagagugcag

SEQ ID NO: 160594 - RNA, 22 nt, Human
uggccuggggaccugugagacc

SEQ ID NO: 160595 - RNA, 22 nt, Human
ggugggcagcucuuggcaggca

SEQ ID NO: 160596 - RNA, 22 nt, Human
gcauugucaaaagugguaugac

SEQ ID NO: 160597 - RNA, 22 nt, Human
aaaaaugucauuauggaacuga

SEQ ID NO: 160598 - RNA, 22 nt, Human
ccugggugaugugcugcccucg

SEQ ID NO: 160599 - RNA, 22 nt, Human
acguuuucuagagaauaugcag

SEQ ID NO: 160600 - RNA, 22 nt, Human
gcagcugagagaagaacagggc

SEQ ID NO: 160601 - RNA, 22 nt, Human
agaugcugccucuccucacaag

SEQ ID NO: 160602 - RNA, 22 nt, Human
agaguguuauuugcucuguauu

SEQ ID NO: 160603 - RNA, 22 nt, Human
gcuggccugggcucaagaccag

SEQ ID NO: 160604 - RNA, 22 nt, Human
uugaaucauuacaauagauaag

SEQ ID NO: 160605 - RNA, 23 nt, Human
ucaguuuuggcuguucaguguug

SEQ ID NO: 160606 - RNA, 22 nt, Human
uuugcauuuugauaagaucacu

SEQ ID NO: 160607 - RNA, 22 nt, Human
gccugcagaggugcugcuagcu

SEQ ID NO: 160608 - RNA, 22 nt, Human
guccucuggaagaugaguucuu

SEQ ID NO: 160609 - RNA, 22 nt, Human
agugugcugcuuaaacaguugu

SEQ ID NO: 160610 - RNA, 22 nt, Human
ccugugugcugaugacgacaga

SEQ ID NO: 160611 - RNA, 22 nt, Human
gagagcuggccagcuucaguau

SEQ ID NO: 160612 - RNA, 22 nt, Human
aguuuguaucaauuugcuuuau

SEQ ID NO: 160613 - RNA, 19 nt, Human
gcagcugugggaagagcca

SEQ ID NO: 160614 - RNA, 22 nt, Human
agaugcugcuccacaggccagg

SEQ ID NO: 160615 - RNA, 22 nt, Human
cuggcaggucucgcugacgugu

SEQ ID NO: 160616 - RNA, 22 nt, Human
gagggcagaaaauuaugcggug

SEQ ID NO: 160617 - RNA, 22 nt, Human
caguguguggauccucccagga

SEQ ID NO: 160618 - RNA, 22 nt, Human
auccuugagaaaauaaaugacc

SEQ ID NO: 160619 - RNA, 22 nt, Human
uggcucagaguucaucuuuuag

SEQ ID NO: 160620 - RNA, 22 nt, Human
agcugcugagccaggcugaugu

SEQ ID NO: 160621 - RNA, 22 nt, Human
acaagagauuaucuacagauga

SEQ ID NO: 160622 - RNA, 22 nt, Human
cuucagaacuauaaaaaguacu

SEQ ID NO: 160623 - RNA, 22 nt, Human
aauaauguugacgauagucuua

SEQ ID NO: 160624 - RNA, 19 nt, Human
agcauccagucaugggauc

SEQ ID NO: 160625 - RNA, 22 nt, Human
uggccuuguguuuuagagaaag

SEQ ID NO: 160626 - RNA, 23 nt, Human
ccagccucugggucuucauccag

SEQ ID NO: 160627 - RNA, 22 nt, Human
aggggugaaagagggcccucaa

SEQ ID NO: 160628 - RNA, 22 nt, Human
ccugucauacuaacguaguggg

SEQ ID NO: 160629 - RNA, 22 nt, Human
cucuccuugcagauggcugccu

SEQ ID NO: 160630 - RNA, 22 nt, Human
aagccagauagaagaacucauu

SEQ ID NO: 160631 - RNA, 22 nt, Human
cugcugagcaucagggcugccc

SEQ ID NO: 160632 - RNA, 22 nt, Human
cugaggugagcuucccugggcu

SEQ ID NO: 160633 - RNA, 22 nt, Human
ucaagagacaggacguguuuca

SEQ ID NO: 160634 - RNA, 22 nt, Human
uggcagaguuggagguggaaga

SEQ ID NO: 160635 - RNA, 22 nt, Human
uccuucaguuaucacaguacug

SEQ ID NO: 160636 - RNA, 22 nt, Human
gcuguauuccugcacuguauag

SEQ ID NO: 160637 - RNA, 22 nt, Human
ucaacacuauccaggcaaucuu

SEQ ID NO: 160638 - RNA, 22 nt, Human
uccuucaguucaauuaguccgu

SEQ ID NO: 160639 - RNA, 22 nt, Human
gagcccagguucugcuuccagc

SEQ ID NO: 160640 - RNA, 22 nt, Human
auuguggugucaguuauaggca

SEQ ID NO: 160641 - RNA, 22 nt, Human
ggcuccuguccuccuggagcuc

SEQ ID NO: 160642 - RNA, 22 nt, Human
uuuuccucuguuauuaguguga

SEQ ID NO: 160643 - RNA, 22 nt, Human
cagcuggcccuuugguagccuu

SEQ ID NO: 160644 - RNA, 22 nt, Human
cuggcagcuuagcacucugguu

SEQ ID NO: 160645 - RNA, 22 nt, Human
ccaggccuagccccugagggua

SEQ ID NO: 160646 - RNA, 22 nt, Human
caguagccacuagacacaugua

SEQ ID NO: 160647 - RNA, 22 nt, Human
aggcugaggcagguggaucacu

SEQ ID NO: 160648 - RNA, 22 nt, Human
aaagcucacaguaauacaaggc

SEQ ID NO: 160649 - RNA, 22 nt, Human
aucagcaaggcaaucacugcag

SEQ ID NO: 160650 - RNA, 22 nt, Human
ugcugccacauuuaaagagggg

SEQ ID NO: 160651 - RNA, 22 nt, Human
ugcuugggaauguggagucaga

SEQ ID NO: 160652 - RNA, 22 nt, Human
caggcacucauucagagaggug

SEQ ID NO: 160653 - RNA, 22 nt, Human
ccaggagucaauaaaggaagcu

SEQ ID NO: 160654 - RNA, 22 nt, Human
aaugcacauaaauauggucuua

SEQ ID NO: 160655 - RNA, 22 nt, Human
ugcagcauuauucacaguagcc

SEQ ID NO: 160656 - RNA, 22 nt, Human
uuauguauggauggcugaaagu

SEQ ID NO: 160657 - RNA, 22 nt, Human
gcucccugcagcugagaguucc

SEQ ID NO: 160658 - RNA, 22 nt, Human
ugucucaguauacgaaacacuu

SEQ ID NO: 160659 - RNA, 22 nt, Human
gcugccucccccauggcuggaa

SEQ ID NO: 160660 - RNA, 22 nt, Human
guggcuugaccaucccugcuac

SEQ ID NO: 160661 - RNA, 22 nt, Human
aacaaauguguggcaguguggg

SEQ ID NO: 160662 - RNA, 22 nt, Human
caagggccuccaccuugcucgu

SEQ ID NO: 160663 - RNA, 22 nt, Human
ucccaggguccucuucuggaau

SEQ ID NO: 160664 - RNA, 22 nt, Human
aaaaguguccagauuaugaaga

SEQ ID NO: 160665 - RNA, 22 nt, Human
ggcugccuugacccuggcuccg

SEQ ID NO: 160666 - RNA, 21 nt, Human
agaugcugugcuccaggagca

SEQ ID NO: 160667 - RNA, 22 nt, Human
uaaaauguagcuucuaggcugg

SEQ ID NO: 160668 - RNA, 22 nt, Human
aguggcagaagucacuggguag

SEQ ID NO: 160669 - RNA, 22 nt, Human
aagggcagggaguuugugucua

SEQ ID NO: 160670 - RNA, 22 nt, Human
aaucuuucccuauuaaaugugg

SEQ ID NO: 160671 - RNA, 22 nt, Human
uauuuagaacagacaauagaaa

SEQ ID NO: 160672 - RNA, 22 nt, Human
ucuggagccuuggaugggaaag

SEQ ID NO: 160673 - RNA, 22 nt, Human
gggcagcagaggaucccuuaau

SEQ ID NO: 160674 - RNA, 21 nt, Human
ggagucagggucuggcugggg

SEQ ID NO: 160675 - RNA, 22 nt, Human
ccaggagcaggagcuggacaga

SEQ ID NO: 160676 - RNA, 22 nt, Human
gggcuucucuuuagugagcuga

SEQ ID NO: 160677 - RNA, 22 nt, Human
ccagccagucccgcaugaccgc

SEQ ID NO: 160678 - RNA, 22 nt, Human
aagacagaccacgugacagggc

SEQ ID NO: 160679 - RNA, 23 nt, Human
aggugccaacugagagcugagag

SEQ ID NO: 160680 - RNA, 22 nt, Human
ucagaguguuuuacuaaacaag

SEQ ID NO: 160681 - RNA, 22 nt, Human
cacaagucuguggucuccaaca

SEQ ID NO: 160682 - RNA, 22 nt, Human
ccagcuuguuugaagcucguca

SEQ ID NO: 160683 - RNA, 22 nt, Human
cccuggaagguucucuggcuca

SEQ ID NO: 160684 - RNA, 22 nt, Human
ucccagagcucugacaccagcu

SEQ ID NO: 160685 - RNA, 22 nt, Human
gagggguguggagccaucaguu

SEQ ID NO: 160686 - RNA, 22 nt, Human
aagccaggaagagagccuucac

SEQ ID NO: 160687 - RNA, 23 nt, Human
ggggccugcaccggucugcgcgg

SEQ ID NO: 160688 - RNA, 22 nt, Human
ccuggcagcauugguagagauu

SEQ ID NO: 160689 - RNA, 22 nt, Human
aaaaacugcaauuacuuuuguc

SEQ ID NO: 160690 - RNA, 22 nt, Human
guguaaggugaaaucaacaaau

SEQ ID NO: 160691 - RNA, 17 nt, Human
uuccccugaccaagccu

SEQ ID NO: 160692 - RNA, 18 nt, Human
acaaauguagugucuuaa

SEQ ID NO: 160693 - RNA, 22 nt, Human
ggcucccugccuguccucaguc

SEQ ID NO: 160694 - RNA, 18 nt, Human
agccuggaggguugaagu

SEQ ID NO: 160695 - RNA, 22 nt, Human
ccaggccaaauucagucagcag

SEQ ID NO: 160696 - RNA, 23 nt, Human
ccugugugcccuuaauucacagc

SEQ ID NO: 160697 - RNA, 22 nt, Human
gggcacugcuggaggcucccug

SEQ ID NO: 160698 - RNA, 22 nt, Human
gggcccuggggccugauuugca

SEQ ID NO: 160699 - RNA, 20 nt, Human
ucuggcucuuugcuccuccc

SEQ ID NO: 160700 - RNA, 22 nt, Human
aagaauguggguggauaugaug

SEQ ID NO: 160701 - RNA, 20 nt, Human
gccuggaggcagagauaaag

SEQ ID NO: 160702 - RNA, 22 nt, Human
caagaauuguacaaacugggug

SEQ ID NO: 160703 - RNA, 22 nt, Human
agggacugagcuaggaucuagu

SEQ ID NO: 160704 - RNA, 22 nt, Human
cuggcccagucucagaguguca

SEQ ID NO: 160705 - RNA, 22 nt, Human
agggcuggccacaugauuuggu

SEQ ID NO: 160706 - RNA, 22 nt, Human
gagggagagugauggaccauug

SEQ ID NO: 160707 - RNA, 19 nt, Human
gugaggauacugcucagag

SEQ ID NO: 160708 - RNA, 22 nt, Human
ucucagagaccugaacucccug

SEQ ID NO: 160709 - RNA, 22 nt, Human
ugccaggcccugugcuggaugc

SEQ ID NO: 160710 - RNA, 22 nt, Human
agccccaggcccggacgccucu

SEQ ID NO: 160711 - RNA, 22 nt, Human
ugaaaucuuuaguuucuguccc

SEQ ID NO: 160712 - RNA, 22 nt, Human
agaggcugcacuugcucaugau

SEQ ID NO: 160713 - RNA, 20 nt, Human
uaggcagagcugugcagccu

SEQ ID NO: 160714 - RNA, 22 nt, Human
gggcacugugcuaggugcugag

SEQ ID NO: 160715 - RNA, 22 nt, Human
ucccagagcccaaguuggagag

SEQ ID NO: 160716 - RNA, 22 nt, Human
ucuggcuccguguccgcuccca

SEQ ID NO: 160717 - RNA, 22 nt, Human
agagugauggguugugcugacc

SEQ ID NO: 160718 - RNA, 21 nt, Human
gugcucugggcagcagagggc

SEQ ID NO: 160719 - RNA, 22 nt, Human
aaacucuggagauguuuaugca

SEQ ID NO: 160720 - RNA, 22 nt, Human
gaaggaagucauuagugcagac

SEQ ID NO: 160721 - RNA, 19 nt, Human
uggcagcauugguaccuug

SEQ ID NO: 160722 - RNA, 23 nt, Human
uccagcagccaagaaggguagaa

SEQ ID NO: 160723 - RNA, 22 nt, Human
uacagggguaacaguggggaau

SEQ ID NO: 160724 - RNA, 22 nt, Human
uccugccuugccugggacauca

SEQ ID NO: 160725 - RNA, 22 nt, Human
aucaguuuuuauuaauguagcu

SEQ ID NO: 160726 - RNA, 22 nt, Human
uggcugcuuguuuuagugaggc

SEQ ID NO: 160727 - RNA, 22 nt, Human
ggaggccaaggcaggcggauca

SEQ ID NO: 160728 - RNA, 22 nt, Human
ucucagggugaggaaagaauuu

SEQ ID NO: 160729 - RNA, 22 nt, Human
cuguuuauuacacuggauagca

SEQ ID NO: 160730 - RNA, 22 nt, Human
cacugggcaauucugagccuaa

SEQ ID NO: 160731 - RNA, 22 nt, Human
gcuuccugagaaacaaucugau

SEQ ID NO: 160732 - RNA, 22 nt, Human
cuggagagaaaugacaaagcua

SEQ ID NO: 160733 - RNA, 22 nt, Human
aauuaacaaauguagcugugau

SEQ ID NO: 160734 - RNA, 22 nt, Human
gaggcagcaugguaccuuggag

SEQ ID NO: 160735 - RNA, 22 nt, Human
ccuuucucuggcagcaggacag

SEQ ID NO: 160736 - RNA, 22 nt, Human
acagauugaucuugagaauuau

SEQ ID NO: 160737 - RNA, 22 nt, Human
guggcagcggcccaggccgucu

SEQ ID NO: 160738 - RNA, 22 nt, Human
uggcaggguuggccaccuuacc

SEQ ID NO: 160739 - RNA, 22 nt, Human
ggcugcagggcagcuggugugg

SEQ ID NO: 160740 - RNA, 18 nt, Human
ucagcuggggcugcagcc

SEQ ID NO: 160741 - RNA, 22 nt, Human
ucacauacacuaggauauuuuu

SEQ ID NO: 160742 - RNA, 18 nt, Human
gaaaggagagacaguagg

SEQ ID NO: 160743 - RNA, 22 nt, Human
acaaagucugaaaccugaggca

SEQ ID NO: 160744 - RNA, 22 nt, Human
ccacagggccuuuccugcuggc

SEQ ID NO: 160745 - RNA, 22 nt, Human
gugagcagaacagguggcuucu

SEQ ID NO: 160746 - RNA, 22 nt, Human
gagugguaggcaguguuaggaa

SEQ ID NO: 160747 - RNA, 22 nt, Human
auauaaaguguuuagaaagcug

SEQ ID NO: 160748 - RNA, 22 nt, Human
ucccagacaaucauuggccacc

SEQ ID NO: 160749 - RNA, 22 nt, Human
ugcugcuccugccuggcuccca

SEQ ID NO: 160750 - RNA, 23 nt, Human
ugucccagagggagggauaggcu

SEQ ID NO: 160751 - RNA, 22 nt, Human
cuucaagaagacagcagagcau

SEQ ID NO: 160752 - RNA, 20 nt, Human
accuugaacccgccagccau

SEQ ID NO: 160753 - RNA, 22 nt, Human
acaauucuggguauuuauauag

SEQ ID NO: 160754 - RNA, 22 nt, Human
aguuuuucugcuggucucacua

SEQ ID NO: 160755 - RNA, 22 nt, Human
aagaacaguugggaggugagcc

SEQ ID NO: 160756 - RNA, 20 nt, Human
uggagccacagucagguucc

SEQ ID NO: 160757 - RNA, 22 nt, Human
ucuaggagcaugaagggaaggc

SEQ ID NO: 160758 - RNA, 22 nt, Human
gucaaguuuauccgcucauuca

SEQ ID NO: 160759 - RNA, 22 nt, Human
augauucagcaauuuuauaucu

SEQ ID NO: 160760 - RNA, 22 nt, Human
cacagcugccauggcugcacuu

SEQ ID NO: 160761 - RNA, 22 nt, Human
aggcagagcugauguucuguga

SEQ ID NO: 160762 - RNA, 22 nt, Human
ccucagcugcuucccuggagcc

SEQ ID NO: 160763 - RNA, 18 nt, Human
ccugccagucuggagcag

SEQ ID NO: 160764 - RNA, 22 nt, Human
uguacacaauucuuaacauaca

SEQ ID NO: 160765 - RNA, 23 nt, Human
cuggcuccgaagacuccaggauc

SEQ ID NO: 160766 - RNA, 22 nt, Human
auugucuguacuuuaaaaaugu

SEQ ID NO: 160767 - RNA, 22 nt, Human
caggugggaccaugauagggca

SEQ ID NO: 160768 - RNA, 20 nt, Human
ccugggcuccaggagccccg

SEQ ID NO: 160769 - RNA, 22 nt, Human
uguguccauucaggcacugacc

SEQ ID NO: 160770 - RNA, 22 nt, Human
gccucugcaugcucagcaccca

SEQ ID NO: 160771 - RNA, 20 nt, Human
ccaccuggccaaggcugugc

SEQ ID NO: 160772 - RNA, 22 nt, Human
aggggcuggcuuaucugagagu

SEQ ID NO: 160773 - RNA, 22 nt, Human
guaaaguucuacuagaaucaac

SEQ ID NO: 160774 - RNA, 22 nt, Human
aagguacaaaguauuauuuaaa

SEQ ID NO: 160775 - RNA, 22 nt, Human
cugaaggauuuaguucuuugcu

SEQ ID NO: 160776 - RNA, 22 nt, Human
ucugccuguucaagucuucuag

SEQ ID NO: 160777 - RNA, 22 nt, Human
ggaggccaucagggagggcauu

SEQ ID NO: 160778 - RNA, 22 nt, Human
aggcugggaaauguagucuucc

SEQ ID NO: 160779 - RNA, 22 nt, Human
cauucugugauucuaaaucccu

SEQ ID NO: 160780 - RNA, 22 nt, Human
agaggggcucaagcaguggucu

SEQ ID NO: 160781 - RNA, 22 nt, Human
aagaaauauugggccuuauaaa

SEQ ID NO: 160782 - RNA, 22 nt, Human
cacaugggcguaauguccaugg

SEQ ID NO: 160783 - RNA, 22 nt, Human
uggcugggcccccaccugccuc

SEQ ID NO: 160784 - RNA, 20 nt, Human
gagauggcuaagugcugaac

SEQ ID NO: 160785 - RNA, 22 nt, Human
uaagcauaacuaaaaaugauuu

SEQ ID NO: 160786 - RNA, 22 nt, Human
gcaugugucuccccaguggagg

SEQ ID NO: 160787 - RNA, 22 nt, Human
ugaaggaaugaguauacuguuu

SEQ ID NO: 160788 - RNA, 22 nt, Human
auguaaggcugccuaugacacu

SEQ ID NO: 160789 - RNA, 22 nt, Human
uagcugccuaugugauaagaga

SEQ ID NO: 160790 - RNA, 22 nt, Human
uauguacaucguugaauucaaa

SEQ ID NO: 160791 - RNA, 22 nt, Human
cauugcacuccagcuugggcaa

SEQ ID NO: 160792 - RNA, 22 nt, Human
uucacauuagugguucuauaua

SEQ ID NO: 160793 - RNA, 22 nt, Human
ugugggcucccccucacucugu

SEQ ID NO: 160794 - RNA, 22 nt, Human
aaacuguauauuuauggcaugu

SEQ ID NO: 160795 - RNA, 22 nt, Human
acauuucuaauuuaauguaaca

SEQ ID NO: 160796 - RNA, 22 nt, Human
aaaguuagaaugauaucaacga

SEQ ID NO: 160797 - RNA, 22 nt, Human
agcagcuguggaaaaguaacua

SEQ ID NO: 160798 - RNA, 22 nt, Human
uccuuuuuauaguuagagaaac

SEQ ID NO: 160799 - RNA, 19 nt, Human
ccagguggaacugagguag

SEQ ID NO: 160800 - RNA, 22 nt, Human
uccagucaagcuugagaauuuc

SEQ ID NO: 160801 - RNA, 22 nt, Human
cugucucucuaggacacugggg

SEQ ID NO: 160802 - RNA, 22 nt, Human
uggcacugggacagaugcucuc

SEQ ID NO: 160803 - RNA, 22 nt, Human
ggucccugguucccucugagcu

SEQ ID NO: 160804 - RNA, 22 nt, Human
ccucuggguaucuguggaagua

SEQ ID NO: 160805 - RNA, 20 nt, Human
agagccuugaggaagaugau

SEQ ID NO: 160806 - RNA, 22 nt, Human
gcugccuugaacuuggccuggg

SEQ ID NO: 160807 - RNA, 22 nt, Human
ccugggagagccaucuguggcc

SEQ ID NO: 160808 - RNA, 22 nt, Human
gcugaagggagugcugagucug

SEQ ID NO: 160809 - RNA, 22 nt, Human
ugcaguggaggccgugagacag

SEQ ID NO: 160810 - RNA, 20 nt, Human
ccagagcagccacugaaguu

SEQ ID NO: 160811 - RNA, 18 nt, Human
aggcacuggaauuaaggg

SEQ ID NO: 160812 - RNA, 22 nt, Human
gcuggccacauugugccguccu

SEQ ID NO: 160813 - RNA, 22 nt, Human
uggcucugaucagauguccagu

SEQ ID NO: 160814 - RNA, 22 nt, Human
ucagcaguuuuauaugcagcuu

SEQ ID NO: 160815 - RNA, 20 nt, Human
uggagcuguaaucuugucug

SEQ ID NO: 160816 - RNA, 22 nt, Human
uuagagaaauucugguaaugua

SEQ ID NO: 160817 - RNA, 22 nt, Human
cugccugugugugccugcagaa

SEQ ID NO: 160818 - RNA, 22 nt, Human
auuauguauuugguauaguuug

SEQ ID NO: 160819 - RNA, 22 nt, Human
uuugcauuuuagauuuaggccu

SEQ ID NO: 160820 - RNA, 22 nt, Human
agccaaggacacggagccuccu

SEQ ID NO: 160821 - RNA, 22 nt, Human
cagucacacaaguggacuuggg

SEQ ID NO: 160822 - RNA, 22 nt, Human
gaggcccaggucaagcagccac

SEQ ID NO: 160823 - RNA, 22 nt, Human
gcagggucgcucuaggagauca

SEQ ID NO: 160824 - RNA, 21 nt, Human
ugccagggauuuacagagccu

SEQ ID NO: 160825 - RNA, 22 nt, Human
uccuucagcuuauuucuuagga

SEQ ID NO: 160826 - RNA, 22 nt, Human
gcucuccaaacccuguggcuuu

SEQ ID NO: 160827 - RNA, 22 nt, Human
acuacuuugggccauuuguuua

SEQ ID NO: 160828 - RNA, 22 nt, Human
caggaaaggugugucaugaugg

SEQ ID NO: 160829 - RNA, 23 nt, Human
gccugccugaccugugcaaaguc

SEQ ID NO: 160830 - RNA, 22 nt, Human
guguacauagaauugugcuuug

SEQ ID NO: 160831 - RNA, 22 nt, Human
gccagcucccaagugagccccu

SEQ ID NO: 160832 - RNA, 22 nt, Human
uggaaagaaaguaaaggcguau

SEQ ID NO: 160833 - RNA, 22 nt, Human
agccacagcaacaagugcaauu

SEQ ID NO: 160834 - RNA, 18 nt, Human
ccuggcuuccaucuuggu

SEQ ID NO: 160835 - RNA, 20 nt, Human
gccuggaggcaaugggaaga

SEQ ID NO: 160836 - RNA, 22 nt, Human
acucaagauagggaaaguacaa

SEQ ID NO: 160837 - RNA, 22 nt, Human
gccuggcccagggcuccgcagg

SEQ ID NO: 160838 - RNA, 22 nt, Human
cagccccucccucaggcaggug

SEQ ID NO: 160839 - RNA, 22 nt, Human
ggcugccuggaccuccucuuuc

SEQ ID NO: 160840 - RNA, 22 nt, Human
uggcugaacuaaugugcuguuu

SEQ ID NO: 160841 - RNA, 22 nt, Human
aggcuucccaagcagcugcaaa

SEQ ID NO: 160842 - RNA, 22 nt, Human
uccuugaaaagaaugucuccau

SEQ ID NO: 160843 - RNA, 22 nt, Human
ugggcucugcugcguaccaguu

SEQ ID NO: 160844 - RNA, 23 nt, Human
ucuuuacauacugaugaguucuc

SEQ ID NO: 160845 - RNA, 22 nt, Human
cagaggcugggaccucaggcau

SEQ ID NO: 160846 - RNA, 22 nt, Human
ucagcaggcgguuccuuguggg

SEQ ID NO: 160847 - RNA, 22 nt, Human
gccugcuguuaacugcaggaau

SEQ ID NO: 160848 - RNA, 22 nt, Human
ugggagaagcagcagccaagug

SEQ ID NO: 160849 - RNA, 22 nt, Human
ucaucacuguaucauugauaga

SEQ ID NO: 160850 - RNA, 22 nt, Human
uuucauaugggcauuggcaaua

SEQ ID NO: 160851 - RNA, 22 nt, Human
guggcugguuuccugcaugcaa

SEQ ID NO: 160852 - RNA, 22 nt, Human
ggcuucuguccucuggaucugu

SEQ ID NO: 160853 - RNA, 19 nt, Human
uccuccuuacuuccucuug

SEQ ID NO: 160854 - RNA, 22 nt, Human
aggggcucaguuacuuuggcag

SEQ ID NO: 160855 - RNA, 22 nt, Human
ugcugccaggucuugcugucca

SEQ ID NO: 160856 - RNA, 22 nt, Human
ucucagagauucagggagaagu

SEQ ID NO: 160857 - RNA, 22 nt, Human
gccucugcaucuucgccgcacu

SEQ ID NO: 160858 - RNA, 22 nt, Human
ugcuguuauacuuagcugguua

SEQ ID NO: 160859 - RNA, 18 nt, Human
uggcucuggacuugcucc

SEQ ID NO: 160860 - RNA, 22 nt, Human
caauagcagcuucugaaugcaa

SEQ ID NO: 160861 - RNA, 22 nt, Human
aggccagcucacccuggcuccu

SEQ ID NO: 160862 - RNA, 22 nt, Human
aagcuuccugaaugcucauuua

SEQ ID NO: 160863 - RNA, 22 nt, Human
aggagucaggaccaaauggaaa

SEQ ID NO: 160864 - RNA, 20 nt, Human
agauggugaaggccagggag

SEQ ID NO: 160865 - RNA, 19 nt, Human
agugaaauggaguauucaa

SEQ ID NO: 160866 - RNA, 22 nt, Human
ggagcugaugacgucaccaugg

SEQ ID NO: 160867 - RNA, 22 nt, Human
aucuaagauguauugagcacuu

SEQ ID NO: 160868 - RNA, 22 nt, Human
ggcaaaaaguucccaucagugu

SEQ ID NO: 160869 - RNA, 22 nt, Human
gcucagagauguucaguagcuu

SEQ ID NO: 160870 - RNA, 22 nt, Human
agguggccggugccagccgggc

SEQ ID NO: 160871 - RNA, 22 nt, Human
uuuuaaguuaauauaauugagg

SEQ ID NO: 160872 - RNA, 22 nt, Human
ccuuucagaugggcauggaccg

SEQ ID NO: 160873 - RNA, 22 nt, Human
uuucuuauauucugucauuguu

SEQ ID NO: 160874 - RNA, 22 nt, Human
ccugccugcaaaaugggacaag

SEQ ID NO: 160875 - RNA, 22 nt, Human
guccagggcuaaaucagguucc

SEQ ID NO: 160876 - RNA, 22 nt, Human
ucccagagucuucuccuguaau

SEQ ID NO: 160877 - RNA, 22 nt, Human
ucucagggcagcaaggaagcau

SEQ ID NO: 160878 - RNA, 22 nt, Human
ugggccuggguuccuccugggc

SEQ ID NO: 160879 - RNA, 22 nt, Human
uucuuucacucaagaaggaucu

SEQ ID NO: 160880 - RNA, 23 nt, Human
gccagccuugcucuccugcagcc

SEQ ID NO: 160881 - RNA, 22 nt, Human
uuccugagggacuuuugagauu

SEQ ID NO: 160882 - RNA, 22 nt, Human
uuacaggggacauuggggacau

SEQ ID NO: 160883 - RNA, 22 nt, Human
ggccuguguccuccuugcccug

SEQ ID NO: 160884 - RNA, 22 nt, Human
auggggcugggauucuccucgg

SEQ ID NO: 160885 - RNA, 22 nt, Human
auggccuggggagcaugggaag

SEQ ID NO: 160886 - RNA, 22 nt, Human
agccucugcacgggcacgggug

SEQ ID NO: 160887 - RNA, 22 nt, Human
ugaugcuucacgcugaauaugc

SEQ ID NO: 160888 - RNA, 22 nt, Human
ccagggcagcgccccuccacgc

SEQ ID NO: 160889 - RNA, 22 nt, Human
gcucugagauugagccuuuggu

SEQ ID NO: 160890 - RNA, 22 nt, Human
aggagcugacuuguaaagcauu

SEQ ID NO: 160891 - RNA, 22 nt, Human
ccagagcugcauccagcagguu

SEQ ID NO: 160892 - RNA, 23 nt, Human
ggacagggcccugcccuauggcc

SEQ ID NO: 160893 - RNA, 20 nt, Human
ucucugcuguccacauuugc

SEQ ID NO: 160894 - RNA, 20 nt, Human
cagcaguggaugagaguuuu

SEQ ID NO: 160895 - RNA, 23 nt, Human
cauguacacacagcuguacagug

SEQ ID NO: 160896 - RNA, 22 nt, Human
auaccuuuuagacauguaguug

SEQ ID NO: 160897 - RNA, 22 nt, Human
uuuuuccuagcgauuugucagc

SEQ ID NO: 160898 - RNA, 22 nt, Human
ccaccuccaccuauugccagcc

SEQ ID NO: 160899 - RNA, 20 nt, Human
cugggcugcccagcuauggg

SEQ ID NO: 160900 - RNA, 22 nt, Human
cuguaauucacuagggucagcg

SEQ ID NO: 160901 - RNA, 22 nt, Human
aaccaggacaauuugaauagaa

SEQ ID NO: 160902 - RNA, 22 nt, Human
auacauguaacugcauuguaau

SEQ ID NO: 160903 - RNA, 22 nt, Human
ggagaguggauuccagcuguau

SEQ ID NO: 160904 - RNA, 22 nt, Human
ggcagcagggcugucucccuac

SEQ ID NO: 160905 - RNA, 22 nt, Human
ucccagaguauuagcaauugcu

SEQ ID NO: 160906 - RNA, 22 nt, Human
aaacauugcuaaauaaugcugc

SEQ ID NO: 160907 - RNA, 23 nt, Human
uugucugugcuuuuccaguugcu

SEQ ID NO: 160908 - RNA, 22 nt, Human
ucuggccauggcaagccgagug

SEQ ID NO: 160909 - RNA, 22 nt, Human
ggcuguccuuggccaaggcacu

SEQ ID NO: 160910 - RNA, 20 nt, Human
cugagcgucuaagaggugag

SEQ ID NO: 160911 - RNA, 21 nt, Human
aggagggcacaaggccaggaa

SEQ ID NO: 160912 - RNA, 23 nt, Human
ccaggccucucagagggugugcc

SEQ ID NO: 160913 - RNA, 20 nt, Human
aggcagagcgcacuuuuaga

SEQ ID NO: 160914 - RNA, 22 nt, Human
ugucacauaauuuaucuguagg

SEQ ID NO: 160915 - RNA, 22 nt, Human
uagagcaguuggcagcuguauu

SEQ ID NO: 160916 - RNA, 22 nt, Human
auagacuugguuaguaaauuug

SEQ ID NO: 160917 - RNA, 22 nt, Human
uuagaaaauuugcuucuuugga

SEQ ID NO: 160918 - RNA, 22 nt, Human
uggccuggugcucaggcaguag

SEQ ID NO: 160919 - RNA, 22 nt, Human
uucucuucaucucaguaaaugu

SEQ ID NO: 160920 - RNA, 22 nt, Human
ugcaggccucacaccuggcacc

SEQ ID NO: 160921 - RNA, 22 nt, Human
gagcugccagacaugggaauga

SEQ ID NO: 160922 - RNA, 22 nt, Human
ugcagagggacagccacagcuc

SEQ ID NO: 160923 - RNA, 22 nt, Human
aaggaagacacagaugaaguga

SEQ ID NO: 160924 - RNA, 22 nt, Human
uggccagguugggcuuugcagc

SEQ ID NO: 160925 - RNA, 20 nt, Human
accuuucaaaugauucagca

SEQ ID NO: 160926 - RNA, 22 nt, Human
uuauuuucagcuaggaaagcca

SEQ ID NO: 160927 - RNA, 18 nt, Human
guccugagcucugcugua

SEQ ID NO: 160928 - RNA, 22 nt, Human
ugccuggguguaaagggccaac

SEQ ID NO: 160929 - RNA, 22 nt, Human
cagacagaccugcaagggcaca

SEQ ID NO: 160930 - RNA, 19 nt, Human
gcugugccucucuccugcu

SEQ ID NO: 160931 - RNA, 22 nt, Human
agcaccuggucuccuggcgcug

SEQ ID NO: 160932 - RNA, 22 nt, Human
ucccuggacagccuugccuggg

SEQ ID NO: 160933 - RNA, 22 nt, Human
cugugcuggagaugggccagag

SEQ ID NO: 160934 - RNA, 22 nt, Human
ugcagaagaaaacagcugugug

SEQ ID NO: 160935 - RNA, 22 nt, Human
ggugauuuucgaguuucauguu

SEQ ID NO: 160936 - RNA, 22 nt, Human
agugauggugagugagaagcuc

SEQ ID NO: 160937 - RNA, 22 nt, Human
gggccuccggggugagcugugg

SEQ ID NO: 160938 - RNA, 22 nt, Human
agcccaaggcuucccugcuggc

SEQ ID NO: 160939 - RNA, 23 nt, Human
uuacaguaggaguuggaaaacca

SEQ ID NO: 160940 - RNA, 22 nt, Human
uagcacauaacuuagaauaguu

SEQ ID NO: 160941 - RNA, 22 nt, Human
agagccaggaucuguuuugggg

SEQ ID NO: 160942 - RNA, 22 nt, Human
cagggcugcuggccgugcccuc

SEQ ID NO: 160943 - RNA, 22 nt, Human
uggcucagugacauuccuccca

SEQ ID NO: 160944 - RNA, 22 nt, Human
guauuuucaagagcaguaguau

SEQ ID NO: 160945 - RNA, 22 nt, Human
caggccugagacaucugagaua

SEQ ID NO: 160946 - RNA, 22 nt, Human
uggcucuguuuuaugaguacca

SEQ ID NO: 160947 - RNA, 19 nt, Human
agguggucuaggcuggaga

SEQ ID NO: 160948 - RNA, 22 nt, Human
uuguccuuggaugaagcuggga

SEQ ID NO: 160949 - RNA, 21 nt, Human
ccuucuccacagggucuccgg

SEQ ID NO: 160950 - RNA, 22 nt, Human
ucauugcacuccagccugggca

SEQ ID NO: 160951 - RNA, 22 nt, Human
gcaaagguagccaaggagcuca

SEQ ID NO: 160952 - RNA, 22 nt, Human
ugugccaugaggcucugauaug

SEQ ID NO: 160953 - RNA, 19 nt, Human
ucaggacugacuugaaguc

SEQ ID NO: 160954 - RNA, 22 nt, Human
gcugggagucgcgucuguggcc

SEQ ID NO: 160955 - RNA, 22 nt, Human
caagccugucucaccagugcua

SEQ ID NO: 160956 - RNA, 22 nt, Human
cccuggagcugcuugcauguug

SEQ ID NO: 160957 - RNA, 22 nt, Human
uugaauucauuucucauugagu

SEQ ID NO: 160958 - RNA, 21 nt, Human
ggccuuggcgggggccgaauu

SEQ ID NO: 160959 - RNA, 22 nt, Human
aggcagugcagaguccucuucu

SEQ ID NO: 160960 - RNA, 22 nt, Human
cauggcaggugcagauucugug

SEQ ID NO: 160961 - RNA, 22 nt, Human
ucugccuugagguccucagcuc

SEQ ID NO: 160962 - RNA, 22 nt, Human
ugggcaagucacuucugucuuu

SEQ ID NO: 160963 - RNA, 22 nt, Human
ggcuccugggaugggacugagc

SEQ ID NO: 160964 - RNA, 22 nt, Human
acugaaagauaaaucaguuagc

SEQ ID NO: 160965 - RNA, 22 nt, Human
agggaaaguaagcauuucauua

SEQ ID NO: 160966 - RNA, 22 nt, Human
ggcugccuccugcugggcugga

SEQ ID NO: 160967 - RNA, 22 nt, Human
uagaaacauauaggauggcagg

SEQ ID NO: 160968 - RNA, 22 nt, Human
accucuggccuucaggcaucau

SEQ ID NO: 160969 - RNA, 22 nt, Human
ucaguguagcagacuuguagcc

SEQ ID NO: 160970 - RNA, 22 nt, Human
cauuuagagucuugcaauuuua

SEQ ID NO: 160971 - RNA, 22 nt, Human
uggcucagcugacucggcuucu

SEQ ID NO: 160972 - RNA, 22 nt, Human
uuuagaguugaguauucauugg

SEQ ID NO: 160973 - RNA, 22 nt, Human
ucugagaguacgggcugcgcgc

SEQ ID NO: 160974 - RNA, 22 nt, Human
uacaaaguauauuucuagcugu

SEQ ID NO: 160975 - RNA, 22 nt, Human
aaagaauuuguacacccuacua

SEQ ID NO: 160976 - RNA, 17 nt, Human
aagacagaagccaugag

SEQ ID NO: 160977 - RNA, 22 nt, Human
ucugucuccucugaggugccag

SEQ ID NO: 160978 - RNA, 18 nt, Human
ccucaggggaccuggcag

SEQ ID NO: 160979 - RNA, 22 nt, Human
gaggcagaaguugcagugagca

SEQ ID NO: 160980 - RNA, 22 nt, Human
cuggcagcguguuuaugaacau

SEQ ID NO: 160981 - RNA, 22 nt, Human
aagcccagaugugagaacugag

SEQ ID NO: 160982 - RNA, 22 nt, Human
gcugucuguucgagcguguguu

SEQ ID NO: 160983 - RNA, 22 nt, Human
agagaacacgugcaucugcaau

SEQ ID NO: 160984 - RNA, 22 nt, Human
auaguacacauccuacaauguu

SEQ ID NO: 160985 - RNA, 22 nt, Human
cucccuggaggugagcuggcac

SEQ ID NO: 160986 - RNA, 22 nt, Human
ugauuuccuggcuuuggaguuc

SEQ ID NO: 160987 - RNA, 22 nt, Human
agucaguguagaaagcccaggc

SEQ ID NO: 160988 - RNA, 22 nt, Human
cugcagccuccugggguacaug

SEQ ID NO: 160989 - RNA, 22 nt, Human
ugcauuguugaccaguugugca

SEQ ID NO: 160990 - RNA, 22 nt, Human
agauuuagugguggaauuuugg

SEQ ID NO: 160991 - RNA, 22 nt, Human
acuuugcaauacuuaauacaaa

SEQ ID NO: 160992 - RNA, 22 nt, Human
acugugcuuucucuggaggcau

SEQ ID NO: 160993 - RNA, 22 nt, Human
agacaacaccaaaugcuagugu

SEQ ID NO: 160994 - RNA, 22 nt, Human
ugucccaggccucauguugcca

SEQ ID NO: 160995 - RNA, 22 nt, Human
ucccacugcuuugcucugcuca

SEQ ID NO: 160996 - RNA, 22 nt, Human
cucacugcccugaaguuggguu

SEQ ID NO: 160997 - RNA, 22 nt, Human
guccucugcuucaugcccugau

SEQ ID NO: 160998 - RNA, 22 nt, Human
ggacuggacucucaggcucaca

SEQ ID NO: 160999 - RNA, 22 nt, Human
cuggcugcaggaugaggcugcc

SEQ ID NO: 161000 - RNA, 20 nt, Human
ccugucuccucuuaccuggc

SEQ ID NO: 161001 - RNA, 22 nt, Human
aguuuuaugcaguguucugaua

SEQ ID NO: 161002 - RNA, 22 nt, Human
agaagaaacugucggggauauu

SEQ ID NO: 161003 - RNA, 22 nt, Human
ccucagagguuuucauucugua

SEQ ID NO: 161004 - RNA, 22 nt, Human
ccagggcaauuauuuggagggu

SEQ ID NO: 161005 - RNA, 22 nt, Human
uuaugcuaaaugaaucaaguca

SEQ ID NO: 161006 - RNA, 23 nt, Human
ucugagagaacaaugccuccuau

SEQ ID NO: 161007 - RNA, 22 nt, Human
aucuggcuuuuacugaauugcu

SEQ ID NO: 161008 - RNA, 22 nt, Human
agccagagcugaugucauucuc

SEQ ID NO: 161009 - RNA, 22 nt, Human
cuccccagguucaggagguggg

SEQ ID NO: 161010 - RNA, 22 nt, Human
ggucaggguuccagguaucuuc

SEQ ID NO: 161011 - RNA, 22 nt, Human
aguuuauguaaaauuaguaaug

SEQ ID NO: 161012 - RNA, 20 nt, Human
acaauagauuugagcaaagu

SEQ ID NO: 161013 - RNA, 22 nt, Human
auugucgcuuauuuaggugcuu

SEQ ID NO: 161014 - RNA, 22 nt, Human
ccucuggggguccucagagucu

SEQ ID NO: 161015 - RNA, 22 nt, Human
auguccuuccauuuugaucugu

SEQ ID NO: 161016 - RNA, 22 nt, Human
acagccaggaauucuggagaag

SEQ ID NO: 161017 - RNA, 22 nt, Human
uccugagagcagaguccaggug

SEQ ID NO: 161018 - RNA, 22 nt, Human
caugcuuuaccaaagcagugau

SEQ ID NO: 161019 - RNA, 22 nt, Human
gccuggaggaauguagcugagg

SEQ ID NO: 161020 - RNA, 18 nt, Human
agcagagcccaugcauuc

SEQ ID NO: 161021 - RNA, 22 nt, Human
guggccagaagacugcaaugcu

SEQ ID NO: 161022 - RNA, 22 nt, Human
cugcucuggcuguguacuucag

SEQ ID NO: 161023 - RNA, 22 nt, Human
uagaaauccccagucucauagu

SEQ ID NO: 161024 - RNA, 22 nt, Human
auguguaaaaagugcuuaauau

SEQ ID NO: 161025 - RNA, 22 nt, Human
cugccuugaggagguuguggga

SEQ ID NO: 161026 - RNA, 22 nt, Human
ccaggcaggcgauggugcagug

SEQ ID NO: 161027 - RNA, 22 nt, Human
augauggugagguugagcacag

SEQ ID NO: 161028 - RNA, 22 nt, Human
ccugggaggcuguuuccagccu

SEQ ID NO: 161029 - RNA, 22 nt, Human
cuggacagaaagggcugcugug

SEQ ID NO: 161030 - RNA, 22 nt, Human
gaaguucaggugggaauugagc

SEQ ID NO: 161031 - RNA, 22 nt, Human
cugucugucaaguucaucucca

SEQ ID NO: 161032 - RNA, 22 nt, Human
ucuccuggucaccucagaaguc

SEQ ID NO: 161033 - RNA, 22 nt, Human
auccuugagccaaugacugauu

SEQ ID NO: 161034 - RNA, 22 nt, Human
agcaggcuccuuccuucucugg

SEQ ID NO: 161035 - RNA, 22 nt, Human
cuggcugccacuucagggucuu

SEQ ID NO: 161036 - RNA, 20 nt, Human
ugaagcagccuugauucugu

SEQ ID NO: 161037 - RNA, 22 nt, Human
uguccugggaaugggaugcagu

SEQ ID NO: 161038 - RNA, 19 nt, Human
gagcacagcggcauuuggu

SEQ ID NO: 161039 - RNA, 22 nt, Human
agaaauguacgauguuaugcag

SEQ ID NO: 161040 - RNA, 22 nt, Human
auuuugaaaagcauuugaguaa

SEQ ID NO: 161041 - RNA, 22 nt, Human
gggccuguguguucaggagccu

SEQ ID NO: 161042 - RNA, 22 nt, Human
cacagggccuggggcagcugcu

SEQ ID NO: 161043 - RNA, 22 nt, Human
gccagcccagcuccaggggaaa

SEQ ID NO: 161044 - RNA, 22 nt, Human
gggggcuggacuuucccacaca

SEQ ID NO: 161045 - RNA, 22 nt, Human
gagguggguguaucacagguca

SEQ ID NO: 161046 - RNA, 22 nt, Human
ggagaccagaaggaagcuucga

SEQ ID NO: 161047 - RNA, 22 nt, Human
cacagaggacuguagcggggag

SEQ ID NO: 161048 - RNA, 22 nt, Human
ugccuggcaagaggggcuggcu

SEQ ID NO: 161049 - RNA, 22 nt, Human
aucuuucaguuucauaccaauu

SEQ ID NO: 161050 - RNA, 22 nt, Human
gaagagcugacagugucauccu

SEQ ID NO: 161051 - RNA, 21 nt, Human
agcugcuccagggagcucagg

SEQ ID NO: 161052 - RNA, 20 nt, Human
agagccuggaaaaagacauc

SEQ ID NO: 161053 - RNA, 22 nt, Human
agccucugguccucccucagcu

SEQ ID NO: 161054 - RNA, 22 nt, Human
agcugcccuggcggagcugcuc

SEQ ID NO: 161055 - RNA, 22 nt, Human
acaggggcuccgaaggugaggg

SEQ ID NO: 161056 - RNA, 22 nt, Human
cugcugcucagugucaucaugu

SEQ ID NO: 161057 - RNA, 22 nt, Human
ccagggcauguaacuaauggug

SEQ ID NO: 161058 - RNA, 22 nt, Human
cuuaacagcaagaucuguguca

SEQ ID NO: 161059 - RNA, 22 nt, Human
guggauggauuuugaggaaugg

SEQ ID NO: 161060 - RNA, 22 nt, Human
uaauuuacuugcaaauaacaau

SEQ ID NO: 161061 - RNA, 22 nt, Human
acccuggggguggccagugcca

SEQ ID NO: 161062 - RNA, 20 nt, Human
gugcuucagaagccauugcu

SEQ ID NO: 161063 - RNA, 22 nt, Human
gguagcacauugcauuaggaga

SEQ ID NO: 161064 - RNA, 16 nt, Human
ccaccugcagcucuca

SEQ ID NO: 161065 - RNA, 22 nt, Human
cagcugccuguauuguccucau

SEQ ID NO: 161066 - RNA, 22 nt, Human
gccugucucuuggaacuuggua

SEQ ID NO: 161067 - RNA, 22 nt, Human
ccagguggugaaagugggcccu

SEQ ID NO: 161068 - RNA, 22 nt, Human
gccucugcucggacuuugccuc

SEQ ID NO: 161069 - RNA, 21 nt, Human
ucagaacaauuccaugccucc

SEQ ID NO: 161070 - RNA, 22 nt, Human
uuuuucaugagacuagaaguca

SEQ ID NO: 161071 - RNA, 22 nt, Human
cagggcugagaauuuagagaca

SEQ ID NO: 161072 - RNA, 22 nt, Human
gcugggagugggcaagaugaga

SEQ ID NO: 161073 - RNA, 22 nt, Human
cagaaauggaauuuuccaucac

SEQ ID NO: 161074 - RNA, 22 nt, Human
gccuaggagacaagcgugaaag

SEQ ID NO: 161075 - RNA, 22 nt, Human
gugucaugggguuuguuauaca

SEQ ID NO: 161076 - RNA, 22 nt, Human
gacagcauggugucuguucagg

SEQ ID NO: 161077 - RNA, 23 nt, Human
gggaccagcuagggcugugaccu

SEQ ID NO: 161078 - RNA, 23 nt, Human
cauuucugggagauuuauaaaau

SEQ ID NO: 161079 - RNA, 21 nt, Human
ucauuuuuauugcuaccuugc

SEQ ID NO: 161080 - RNA, 21 nt, Human
cacaggugggucagugaggcc

SEQ ID NO: 161081 - RNA, 22 nt, Human
gagggugguggcuuaaggugcu

SEQ ID NO: 161082 - RNA, 22 nt, Human
acaggggaauuuacugucauua

SEQ ID NO: 161083 - RNA, 22 nt, Human
uauuuauaaucugccaaagaga

SEQ ID NO: 161084 - RNA, 22 nt, Human
uggccacagccucugccaguuc

SEQ ID NO: 161085 - RNA, 22 nt, Human
ugaggaggucagagucuggcug

SEQ ID NO: 161086 - RNA, 22 nt, Human
ggucauugaaaucagaaggguu

SEQ ID NO: 161087 - RNA, 22 nt, Human
ccaguugguuucaaugggacag

SEQ ID NO: 161088 - RNA, 22 nt, Human
ccuggcucuguccucgcgcaaa

SEQ ID NO: 161089 - RNA, 18 nt, Human
ucagagguacagaaaagu

SEQ ID NO: 161090 - RNA, 22 nt, Human
ucugagaggauuccugucccga

SEQ ID NO: 161091 - RNA, 22 nt, Human
ucucccacgguacaggauaaac

SEQ ID NO: 161092 - RNA, 22 nt, Human
ggagccugugggaugagaugug

SEQ ID NO: 161093 - RNA, 22 nt, Human
agggugcagaaggagccuagga

SEQ ID NO: 161094 - RNA, 22 nt, Human
augcagguugggcaaguguggg

SEQ ID NO: 161095 - RNA, 23 nt, Human
cccagcuuucccacugccgagag

SEQ ID NO: 161096 - RNA, 20 nt, Human
cacaggccuugugagcagac

SEQ ID NO: 161097 - RNA, 22 nt, Human
ccuaagaauuaaugaauacacc

SEQ ID NO: 161098 - RNA, 22 nt, Human
cguuggagacacuugaggacuu

SEQ ID NO: 161099 - RNA, 22 nt, Human
cagcccuggaacagcugacuca

SEQ ID NO: 161100 - RNA, 21 nt, Human
aacaaagggaugcucaucuuu

SEQ ID NO: 161101 - RNA, 22 nt, Human
uccccagccgugaaggagagga

SEQ ID NO: 161102 - RNA, 17 nt, Human
uucaaugauuaaugcau

SEQ ID NO: 161103 - RNA, 22 nt, Human
uguauuuucugaagauaaucaa

SEQ ID NO: 161104 - RNA, 22 nt, Human
uuugcauuccugccugcauuca

SEQ ID NO: 161105 - RNA, 22 nt, Human
guggccugccagcagauggcgc

SEQ ID NO: 161106 - RNA, 22 nt, Human
cagagagagucaaaucuuugcu

SEQ ID NO: 161107 - RNA, 22 nt, Human
ugcaauaaguuguguuaucacu

SEQ ID NO: 161108 - RNA, 22 nt, Human
agaauuguugggguaauaaaag

SEQ ID NO: 161109 - RNA, 19 nt, Human
cuguccuuggcugcacugu

SEQ ID NO: 161110 - RNA, 22 nt, Human
aaaagggacuacucucagcucc

SEQ ID NO: 161111 - RNA, 23 nt, Human
aggcccugccugucccucuuuuu

SEQ ID NO: 161112 - RNA, 22 nt, Human
ccagggcaauaggaacacuuuu

SEQ ID NO: 161113 - RNA, 22 nt, Human
cacacaugucucuccaugcucu

SEQ ID NO: 161114 - RNA, 18 nt, Human
ucugagggugcgggagcu

SEQ ID NO: 161115 - RNA, 22 nt, Human
augguuuguaacccaauacucc

SEQ ID NO: 161116 - RNA, 22 nt, Human
gggggcuggaauauccaucaac

SEQ ID NO: 161117 - RNA, 22 nt, Human
uuuauguaaguggaaugaugcc

SEQ ID NO: 161118 - RNA, 22 nt, Human
cagggcccauggcucagguagg

SEQ ID NO: 161119 - RNA, 22 nt, Human
aggcugggaaauguauuccagc

SEQ ID NO: 161120 - RNA, 22 nt, Human
cugggccugggaggccaggucu

SEQ ID NO: 161121 - RNA, 22 nt, Human
auggauaagucaaagaguaucc

SEQ ID NO: 161122 - RNA, 22 nt, Human
cugggaugucuauagaacacuu

SEQ ID NO: 161123 - RNA, 22 nt, Human
ggcugccauaacagaguaccac

SEQ ID NO: 161124 - RNA, 22 nt, Human
uggcucuguucgccaucaggag

SEQ ID NO: 161125 - RNA, 22 nt, Human
ucaaaugcugccuuugugugcc

SEQ ID NO: 161126 - RNA, 22 nt, Human
gcaagcaguuguggcuucugag

SEQ ID NO: 161127 - RNA, 22 nt, Human
aaggcacuugcccagagcugca

SEQ ID NO: 161128 - RNA, 22 nt, Human
ccugccuguaagauggguacaa

SEQ ID NO: 161129 - RNA, 22 nt, Human
acagacagauuuugucugaugu

SEQ ID NO: 161130 - RNA, 22 nt, Human
ucuugggauugcccugcaguuc

SEQ ID NO: 161131 - RNA, 23 nt, Human
cagaagcaccuguugacugcugc

SEQ ID NO: 161132 - RNA, 22 nt, Human
uuccaguuaaggaagcuauucu

SEQ ID NO: 161133 - RNA, 22 nt, Human
ggcugccugccuccaagccggg

SEQ ID NO: 161134 - RNA, 22 nt, Human
caauauucaguggaaaagccau

SEQ ID NO: 161135 - RNA, 22 nt, Human
cagcuggcagcccuggcccugc

SEQ ID NO: 161136 - RNA, 22 nt, Human
uuucaauguaacauuuccaggc

SEQ ID NO: 161137 - RNA, 22 nt, Human
uuugcauuugcaaauaaugaaa

SEQ ID NO: 161138 - RNA, 20 nt, Human
uaacagaaguagaagugggu

SEQ ID NO: 161139 - RNA, 22 nt, Human
uccucaggauguggaguagaau

SEQ ID NO: 161140 - RNA, 22 nt, Human
uccagcagguccgagacaaguu

SEQ ID NO: 161141 - RNA, 22 nt, Human
ggggccuguagagcuucaggga

SEQ ID NO: 161142 - RNA, 22 nt, Human
caaauguguagagcuuuugggg

SEQ ID NO: 161143 - RNA, 22 nt, Human
ucucuucuagcuucuugugguu

SEQ ID NO: 161144 - RNA, 22 nt, Human
ccagaggugcugggagaggucu

SEQ ID NO: 161145 - RNA, 20 nt, Human
acugccuugguucaguaggu

SEQ ID NO: 161146 - RNA, 22 nt, Human
agagauucauguuuacuguagg

SEQ ID NO: 161147 - RNA, 22 nt, Human
uauacagaaccgccugaagucu

SEQ ID NO: 161148 - RNA, 22 nt, Human
gccucugcacuguggcacacca

SEQ ID NO: 161149 - RNA, 22 nt, Human
uagucaaaccucagaauacccc

SEQ ID NO: 161150 - RNA, 19 nt, Human
ccagcagcuuugauucucu

SEQ ID NO: 161151 - RNA, 22 nt, Human
gaagagcugugauucaggcuua

SEQ ID NO: 161152 - RNA, 22 nt, Human
uccagcucuaacaugcugggcc

SEQ ID NO: 161153 - RNA, 22 nt, Human
gccaccagguuagauccagccu

SEQ ID NO: 161154 - RNA, 22 nt, Human
cagcuggcauaccugggcccgg

SEQ ID NO: 161155 - RNA, 22 nt, Human
agagccaggacugugucucacu

SEQ ID NO: 161156 - RNA, 21 nt, Human
ugauccuuucccccauguugc

SEQ ID NO: 161157 - RNA, 22 nt, Human
gcucccagaaccaaggcugggg

SEQ ID NO: 161158 - RNA, 22 nt, Human
uucaagaucuggguuuucagcu

SEQ ID NO: 161159 - RNA, 22 nt, Human
cuggggccacaacggcgcacgc

SEQ ID NO: 161160 - RNA, 17 nt, Human
uuagcaaaauagcacuu

SEQ ID NO: 161161 - RNA, 22 nt, Human
aggagccccucuucaguccugg

SEQ ID NO: 161162 - RNA, 22 nt, Human
acugaaggaagcgggcaggggu

SEQ ID NO: 161163 - RNA, 23 nt, Human
uuacuuuugcaccaaccuaauau

SEQ ID NO: 161164 - RNA, 22 nt, Human
ucccagaggcuccagucucuau

SEQ ID NO: 161165 - RNA, 22 nt, Human
uaaaauguguuucuguaugguu

SEQ ID NO: 161166 - RNA, 21 nt, Human
gggcuggacaugguggcucau

SEQ ID NO: 161167 - RNA, 22 nt, Human
cugguccuugacgcgugggagg

SEQ ID NO: 161168 - RNA, 22 nt, Human
ugcugccaaaugcgagcucugu

SEQ ID NO: 161169 - RNA, 22 nt, Human
uucuaacucuguuauguguuuc

SEQ ID NO: 161170 - RNA, 22 nt, Human
guguuccauguuugagguaguu

SEQ ID NO: 161171 - RNA, 22 nt, Human
ucacuuagauggggaucaucac

SEQ ID NO: 161172 - RNA, 22 nt, Human
gccugagagucugcauuucuaa

SEQ ID NO: 161173 - RNA, 22 nt, Human
uccugagauucugcauuucuaa

SEQ ID NO: 161174 - RNA, 22 nt, Human
guggcugcagagccagcaagcu

SEQ ID NO: 161175 - RNA, 22 nt, Human
accaaggaguuugguauuuuag

SEQ ID NO: 161176 - RNA, 22 nt, Human
gccagcuggagacuggcagggg

SEQ ID NO: 161177 - RNA, 22 nt, Human
guuuuuccugcugacuuggguc

SEQ ID NO: 161178 - RNA, 22 nt, Human
acucugggccccagguggagcu

SEQ ID NO: 161179 - RNA, 22 nt, Human
uccucagggcggccuccgucuu

SEQ ID NO: 161180 - RNA, 22 nt, Human
gccccagcucugccacaacuag

SEQ ID NO: 161181 - RNA, 22 nt, Human
aggaugggccugggauaugcuu

SEQ ID NO: 161182 - RNA, 22 nt, Human
ggguuggggcccagcagucugc

SEQ ID NO: 161183 - RNA, 22 nt, Human
uuugaacaugcugcaugauaau

SEQ ID NO: 161184 - RNA, 22 nt, Human
acuucauuguaauauuauagca

SEQ ID NO: 161185 - RNA, 22 nt, Human
cuggcagcaguuaugaaacaau

SEQ ID NO: 161186 - RNA, 22 nt, Human
gguggguuuggaagagcaggcu

SEQ ID NO: 161187 - RNA, 22 nt, Human
gcagcuuggugaaaggugaugg

SEQ ID NO: 161188 - RNA, 22 nt, Human
agggagcugcucugcuuccgug

SEQ ID NO: 161189 - RNA, 22 nt, Human
agaaaagguugaaaguaggauu

SEQ ID NO: 161190 - RNA, 22 nt, Human
uggcagaaguacacaagcaugc

SEQ ID NO: 161191 - RNA, 22 nt, Human
uccagccaagccuugguagcug

SEQ ID NO: 161192 - RNA, 22 nt, Human
guaucuuucccaccaaucacaa

SEQ ID NO: 161193 - RNA, 22 nt, Human
caugggaggucugcaaggugcu

SEQ ID NO: 161194 - RNA, 22 nt, Human
agccuguccagaggacagggcu

SEQ ID NO: 161195 - RNA, 22 nt, Human
cgcugggggaacagcgagggug

SEQ ID NO: 161196 - RNA, 22 nt, Human
gcucugggugaacuuggagcaa

SEQ ID NO: 161197 - RNA, 22 nt, Human
cccaggaguuugaguucagcau

SEQ ID NO: 161198 - RNA, 22 nt, Human
accaguccgcggagcuccgggg

SEQ ID NO: 161199 - RNA, 22 nt, Human
cuggaaggucuguccccacugc

SEQ ID NO: 161200 - RNA, 22 nt, Human
ccagcuggagcucgcagauagg

SEQ ID NO: 161201 - RNA, 17 nt, Human
ugaaggaaggaugaugu

SEQ ID NO: 161202 - RNA, 22 nt, Human
acucccagguugccuggcaggc

SEQ ID NO: 161203 - RNA, 22 nt, Human
gaagccaagugcaaaugccuua

SEQ ID NO: 161204 - RNA, 22 nt, Human
uuuggaaaguugucacuuuaga

SEQ ID NO: 161205 - RNA, 22 nt, Human
gccuggagcuacuggacacuga

SEQ ID NO: 161206 - RNA, 22 nt, Human
ugcuggggauccguaccaaccc

SEQ ID NO: 161207 - RNA, 22 nt, Human
uaacacacugaaggugagaugg

SEQ ID NO: 161208 - RNA, 22 nt, Human
uccagagccuauauguucaacu

SEQ ID NO: 161209 - RNA, 22 nt, Human
gccugguggugugcucaagugg

SEQ ID NO: 161210 - RNA, 22 nt, Human
gcucccagggcagcgcagaaga

SEQ ID NO: 161211 - RNA, 22 nt, Human
aggauccugcgcuuugggggag

SEQ ID NO: 161212 - RNA, 22 nt, Human
agggagaacaguugcagcagac

SEQ ID NO: 161213 - RNA, 22 nt, Human
gauggcagucaaccaggugagg

SEQ ID NO: 161214 - RNA, 23 nt, Human
ugcagcugccucuggcgggccgg

SEQ ID NO: 161215 - RNA, 22 nt, Human
uggcugucagcugccuggugcg

SEQ ID NO: 161216 - RNA, 23 nt, Human
aggugcagcccuggaccugcccc

SEQ ID NO: 161217 - RNA, 22 nt, Human
uccuucaaagcuccuagugagc

SEQ ID NO: 161218 - RNA, 22 nt, Human
cucagcagagaccagggaggaa

SEQ ID NO: 161219 - RNA, 22 nt, Human
agggcuggaggguacuaguuua

SEQ ID NO: 161220 - RNA, 22 nt, Human
agccaggacguugcucagcucc

SEQ ID NO: 161221 - RNA, 22 nt, Human
acuggcagccacaacuggcagg

SEQ ID NO: 161222 - RNA, 23 nt, Human
ucugucacuuucugcuguggagu

SEQ ID NO: 161223 - RNA, 22 nt, Human
cugcugcucgaccagucccagg

SEQ ID NO: 161224 - RNA, 22 nt, Human
uuuuuccuaagcaguggagcug

SEQ ID NO: 161225 - RNA, 22 nt, Human
gcuugggauaugcugauguaaa

SEQ ID NO: 161226 - RNA, 22 nt, Human
ggcugccaggagaagcucagug

SEQ ID NO: 161227 - RNA, 21 nt, Human
auacuuugaauuacagccuug

SEQ ID NO: 161228 - RNA, 22 nt, Human
ggugaagggccuuaggagacag

SEQ ID NO: 161229 - RNA, 22 nt, Human
cugccucuggccucaggcccag

SEQ ID NO: 161230 - RNA, 22 nt, Human
agccuucacugggaccuuggau

SEQ ID NO: 161231 - RNA, 22 nt, Human
gggccucugugcagaggggccu

SEQ ID NO: 161232 - RNA, 22 nt, Human
gcucugaggcugugaggugcug

SEQ ID NO: 161233 - RNA, 22 nt, Human
uuuccucugacugcuccccugc

SEQ ID NO: 161234 - RNA, 20 nt, Human
ccagagcugauggcugcccg

SEQ ID NO: 161235 - RNA, 21 nt, Human
agaggccuuacaggauagacc

SEQ ID NO: 161236 - RNA, 22 nt, Human
ccuggcuguggcggugcucuca

SEQ ID NO: 161237 - RNA, 22 nt, Human
ccacucugauuuuggcuccacu

SEQ ID NO: 161238 - RNA, 22 nt, Human
aaauguguguauguacauauau

SEQ ID NO: 161239 - RNA, 22 nt, Human
augcugcacaagccacauguag

SEQ ID NO: 161240 - RNA, 21 nt, Human
gccaccucgucucggagcagc

SEQ ID NO: 161241 - RNA, 22 nt, Human
uggcucugucacugugagcuau

SEQ ID NO: 161242 - RNA, 22 nt, Human
cuuguggcccauggcuuccugc

SEQ ID NO: 161243 - RNA, 22 nt, Human
cccagcaucuccaggcauggcc

SEQ ID NO: 161244 - RNA, 22 nt, Human
cacauguacagaagcaggcugg

SEQ ID NO: 161245 - RNA, 22 nt, Human
augcaguaaauguucuaguuug

SEQ ID NO: 161246 - RNA, 22 nt, Human
caggaacaauguaagucucauu

SEQ ID NO: 161247 - RNA, 22 nt, Human
ucuccuuugaaaguuaggacug

SEQ ID NO: 161248 - RNA, 20 nt, Human
cugccaugauugauagagug

SEQ ID NO: 161249 - RNA, 22 nt, Human
cagacacagauaugcauauggc

SEQ ID NO: 161250 - RNA, 22 nt, Human
ucaugccacuuacaaaauaaug

SEQ ID NO: 161251 - RNA, 18 nt, Human
ucacagugcucuugccua

SEQ ID NO: 161252 - RNA, 22 nt, Human
ccuucucuacuccugaugcaug

SEQ ID NO: 161253 - RNA, 22 nt, Human
ggcacagggaggcccuggugug

SEQ ID NO: 161254 - RNA, 17 nt, Human
uuccuggaagucauucc

SEQ ID NO: 161255 - RNA, 22 nt, Human
uucuuuccaaccagauauuggu

SEQ ID NO: 161256 - RNA, 22 nt, Human
aggccuggcuuugguuugcuga

SEQ ID NO: 161257 - RNA, 22 nt, Human
ucuggccaacaaaaacuaaguc

SEQ ID NO: 161258 - RNA, 22 nt, Human
cuggccugagaaugcuacccuu

SEQ ID NO: 161259 - RNA, 22 nt, Human
aaaguucagauuagacucaaga

SEQ ID NO: 161260 - RNA, 22 nt, Human
gcugucugucucugugacuuaa

SEQ ID NO: 161261 - RNA, 22 nt, Human
gucccuuggcucacaaacagcu

SEQ ID NO: 161262 - RNA, 22 nt, Human
ccauuugucaccucugcacucc

SEQ ID NO: 161263 - RNA, 22 nt, Human
ggucccagaauugguuagcaca

SEQ ID NO: 161264 - RNA, 22 nt, Human
uguucuuucaguuagacacagu

SEQ ID NO: 161265 - RNA, 22 nt, Human
cagagccaaaugcugugguuau

SEQ ID NO: 161266 - RNA, 21 nt, Human
gugucaugguugacuuuggca

SEQ ID NO: 161267 - RNA, 22 nt, Human
uguacaguauauuucaaagcca

SEQ ID NO: 161268 - RNA, 22 nt, Human
uucuuccucagcagggcugccu

SEQ ID NO: 161269 - RNA, 19 nt, Human
cagaacagaggucauggcc

SEQ ID NO: 161270 - RNA, 22 nt, Human
gcuggguggaucggaggcucug

SEQ ID NO: 161271 - RNA, 22 nt, Human
uauuucugauugcucaugaggc

SEQ ID NO: 161272 - RNA, 22 nt, Human
uuucaaagguggaagagugaau

SEQ ID NO: 161273 - RNA, 22 nt, Human
auuuuucucuuuccacugagau

SEQ ID NO: 161274 - RNA, 22 nt, Human
caccagggcucugagcucugaa

SEQ ID NO: 161275 - RNA, 21 nt, Human
accucaagcaacaaccaaggu

SEQ ID NO: 161276 - RNA, 22 nt, Human
agagcuggacgucugagcccua

SEQ ID NO: 161277 - RNA, 22 nt, Human
augugacaauauuuggucuuau

SEQ ID NO: 161278 - RNA, 22 nt, Human
ggcugcugaguuggccaggaga

SEQ ID NO: 161279 - RNA, 22 nt, Human
gcuggccuugugucugaggaag

SEQ ID NO: 161280 - RNA, 17 nt, Human
uccuucagugccucugc

SEQ ID NO: 161281 - RNA, 22 nt, Human
gccugugcauagcagcggacuc

SEQ ID NO: 161282 - RNA, 22 nt, Human
cagccccucacagagcuguccu

SEQ ID NO: 161283 - RNA, 22 nt, Human
uucaagauccagcacaacagug

SEQ ID NO: 161284 - RNA, 22 nt, Human
cugggcagcuaccaccacugcu

SEQ ID NO: 161285 - RNA, 22 nt, Human
acuggcucagaguuccuagaga

SEQ ID NO: 161286 - RNA, 22 nt, Human
gggccuggcaugcagccccguu

SEQ ID NO: 161287 - RNA, 22 nt, Human
uggaaggagcuaaggaccuggg

SEQ ID NO: 161288 - RNA, 22 nt, Human
cugagccaaggggacagugaca

SEQ ID NO: 161289 - RNA, 22 nt, Human
augcccgauaccuaguuaacuc

SEQ ID NO: 161290 - RNA, 22 nt, Human
cuuggcagcuuuuggaggagcc

SEQ ID NO: 161291 - RNA, 22 nt, Human
uggacaggugagugacucaggg

SEQ ID NO: 161292 - RNA, 22 nt, Human
ggccucugccucaucugggcac

SEQ ID NO: 161293 - RNA, 22 nt, Human
aguacauuuauuaaugguaaaa

SEQ ID NO: 161294 - RNA, 22 nt, Human
guucuccauucagcuuccugug

SEQ ID NO: 161295 - RNA, 22 nt, Human
ugcagccuugccuccucccagc

SEQ ID NO: 161296 - RNA, 22 nt, Human
ugguaucagagccaucuguauu

SEQ ID NO: 161297 - RNA, 22 nt, Human
ugaaagaacuagcaucuucaag

SEQ ID NO: 161298 - RNA, 22 nt, Human
uaauuuaauccaaguguuacau

SEQ ID NO: 161299 - RNA, 22 nt, Human
cagugucuccagaugcuccaau

SEQ ID NO: 161300 - RNA, 22 nt, Human
uggagcagagaugggagcccaa

SEQ ID NO: 161301 - RNA, 22 nt, Human
ggagcugcacgcucugaagccu

SEQ ID NO: 161302 - RNA, 22 nt, Human
gagcagcugcagugcagacccu

SEQ ID NO: 161303 - RNA, 22 nt, Human
cagggacagccuugggguggcg

SEQ ID NO: 161304 - RNA, 22 nt, Human
gccuggagugguccugcugccc

SEQ ID NO: 161305 - RNA, 21 nt, Human
augacagaugcugcagaucgu

SEQ ID NO: 161306 - RNA, 22 nt, Human
cugccugggccggccacccucu

SEQ ID NO: 161307 - RNA, 22 nt, Human
ucaggaguccugccugcagccu

SEQ ID NO: 161308 - RNA, 22 nt, Human
gaagcccacguuuggugaugua

SEQ ID NO: 161309 - RNA, 22 nt, Human
ucagaggacaagcucccuggug

SEQ ID NO: 161310 - RNA, 22 nt, Human
ucucagaggcccgacguucucc

SEQ ID NO: 161311 - RNA, 22 nt, Human
acugccuuauaugcugugugug

SEQ ID NO: 161312 - RNA, 21 nt, Human
uggaaagauucaaagaccagg

SEQ ID NO: 161313 - RNA, 22 nt, Human
cuggagccugcaguuuucacuu

SEQ ID NO: 161314 - RNA, 22 nt, Human
cagcccugagaaggaggaucuc

SEQ ID NO: 161315 - RNA, 22 nt, Human
ccugccugucccucaguccaca

SEQ ID NO: 161316 - RNA, 22 nt, Human
gagcaggcauucuaguggcuga

SEQ ID NO: 161317 - RNA, 22 nt, Human
gccuggagaagauggaacuagc

SEQ ID NO: 161318 - RNA, 22 nt, Human
aucuggcuuggguguggguagc

SEQ ID NO: 161319 - RNA, 22 nt, Human
uuacuuuguucucaagauaugu

SEQ ID NO: 161320 - RNA, 22 nt, Human
cugaggugcuauggaggauacg

SEQ ID NO: 161321 - RNA, 20 nt, Human
agucucuguagugccugaga

SEQ ID NO: 161322 - RNA, 22 nt, Human
ggcagcacugcagcuuguuggg

SEQ ID NO: 161323 - RNA, 19 nt, Human
ugggcuuccccagggcaga

SEQ ID NO: 161324 - RNA, 22 nt, Human
aaaaaugaaacggcugguuggc

SEQ ID NO: 161325 - RNA, 22 nt, Human
auccuucaaggggcugacagcu

SEQ ID NO: 161326 - RNA, 22 nt, Human
uccugccuagcaggugaccuau

SEQ ID NO: 161327 - RNA, 22 nt, Human
ccagcucuuggugcacuuacau

SEQ ID NO: 161328 - RNA, 22 nt, Human
gucaugccagcggagcucggga

SEQ ID NO: 161329 - RNA, 22 nt, Human
cgggcagaucacacagggcuug

SEQ ID NO: 161330 - RNA, 22 nt, Human
uggcagagguauauugggagga

SEQ ID NO: 161331 - RNA, 22 nt, Human
gcucuggacuggggccugagaa

SEQ ID NO: 161332 - RNA, 22 nt, Human
cacagaauuaagggagaaauau

SEQ ID NO: 161333 - RNA, 22 nt, Human
gcugccugaagugucuacacug

SEQ ID NO: 161334 - RNA, 22 nt, Human
uggugaagucagcggagcccgg

SEQ ID NO: 161335 - RNA, 22 nt, Human
ucugucaccauucagcuugaau

SEQ ID NO: 161336 - RNA, 22 nt, Human
ccuccugggccuugcucuguga

SEQ ID NO: 161337 - RNA, 22 nt, Human
uuuucauuuuuguagaugcaag

SEQ ID NO: 161338 - RNA, 22 nt, Human
gcacugcagguggguggagagg

SEQ ID NO: 161339 - RNA, 22 nt, Human
agugaccaaucaugguuagauu

SEQ ID NO: 161340 - RNA, 22 nt, Human
ugaaccaggaggcagccagcac

SEQ ID NO: 161341 - RNA, 22 nt, Human
ggcccugggcagaggagugggc

SEQ ID NO: 161342 - RNA, 18 nt, Human
ccuggaccugucuccuuu

SEQ ID NO: 161343 - RNA, 22 nt, Human
ucugcagaaguggcugggccac

SEQ ID NO: 161344 - RNA, 22 nt, Human
uuuccucugcugccauugcccc

SEQ ID NO: 161345 - RNA, 22 nt, Human
uccucaggucaaagcaggagaa

SEQ ID NO: 161346 - RNA, 22 nt, Human
agaggccuaauugcuacccuuu

SEQ ID NO: 161347 - RNA, 22 nt, Human
ucagagugggagaaugugccaa

SEQ ID NO: 161348 - RNA, 22 nt, Human
uggcagggugggcuucagcccc

SEQ ID NO: 161349 - RNA, 22 nt, Human
agccaggcugcaguuggcuggc

SEQ ID NO: 161350 - RNA, 22 nt, Human
gcugccuccugaaagcgcucug

SEQ ID NO: 161351 - RNA, 22 nt, Human
ucugcagauuuaucagcagcug

SEQ ID NO: 161352 - RNA, 22 nt, Human
ggaggccaugaggcucuaggug

SEQ ID NO: 161353 - RNA, 22 nt, Human
caggucagagucccccuguccu

SEQ ID NO: 161354 - RNA, 22 nt, Human
uaccugagcccagugcagcaua

SEQ ID NO: 161355 - RNA, 22 nt, Human
ugucaccucuuuggcugcagcu

SEQ ID NO: 161356 - RNA, 22 nt, Human
caugucuguguacacaugcaca

SEQ ID NO: 161357 - RNA, 20 nt, Human
caggaggcaaggucaagguc

SEQ ID NO: 161358 - RNA, 22 nt, Human
ucugcagcgugcaggcuggugc

SEQ ID NO: 161359 - RNA, 22 nt, Human
cagggcagagccaggauuucaa

SEQ ID NO: 161360 - RNA, 22 nt, Human
agagccagguguagucucggag

SEQ ID NO: 161361 - RNA, 22 nt, Human
acauuuaaauaugccuuauauu

SEQ ID NO: 161362 - RNA, 22 nt, Human
ggaggcuccacugcucuuccug

SEQ ID NO: 161363 - RNA, 22 nt, Human
guucagggagggacagaugaag

SEQ ID NO: 161364 - RNA, 22 nt, Human
ccugggcuuucaaaaccagccu

SEQ ID NO: 161365 - RNA, 22 nt, Human
gccugugacucgucuugggcca

SEQ ID NO: 161366 - RNA, 22 nt, Human
uaauacuuuugccuuguauuca

SEQ ID NO: 161367 - RNA, 22 nt, Human
ucuaggagaaccaucagggagg

SEQ ID NO: 161368 - RNA, 22 nt, Human
ccagggcuggguuugucggugu

SEQ ID NO: 161369 - RNA, 21 nt, Human
ucccagggccaggugccauca

SEQ ID NO: 161370 - RNA, 22 nt, Human
guguccaucagcagccacugug

SEQ ID NO: 161371 - RNA, 22 nt, Human
cuggccugcugggugagguccu

SEQ ID NO: 161372 - RNA, 22 nt, Human
uaacagaaaagaacugaguuug

SEQ ID NO: 161373 - RNA, 22 nt, Human
ugcaccccauuuuacauuuaca

SEQ ID NO: 161374 - RNA, 21 nt, Human
gggagcuggaaacugggugac

SEQ ID NO: 161375 - RNA, 22 nt, Human
ucagaggagccaaaguucugag

SEQ ID NO: 161376 - RNA, 22 nt, Human
ugacaugcuuguuuuccuugaa

SEQ ID NO: 161377 - RNA, 22 nt, Human
ggaggccaaggagggcggauca

SEQ ID NO: 161378 - RNA, 22 nt, Human
cagcccuggccccagguggucu

SEQ ID NO: 161379 - RNA, 22 nt, Human
ucaggcagaggauggggagcgu

SEQ ID NO: 161380 - RNA, 22 nt, Human
ucugucucaaguucuugcacuc

SEQ ID NO: 161381 - RNA, 22 nt, Human
ccugucugcagauaucucaggu

SEQ ID NO: 161382 - RNA, 22 nt, Human
acugcuuuucuaagauucugug

SEQ ID NO: 161383 - RNA, 22 nt, Human
agaggucauaucucagaagaga

SEQ ID NO: 161384 - RNA, 22 nt, Human
ucuuugcaugcauuuucccuua

SEQ ID NO: 161385 - RNA, 22 nt, Human
agucucugcaugccugcugugc

SEQ ID NO: 161386 - RNA, 22 nt, Human
gcccacagcucguuccucuccu

SEQ ID NO: 161387 - RNA, 22 nt, Human
ccagguggaggugugagguccu

SEQ ID NO: 161388 - RNA, 20 nt, Human
gccuguccugagugucaugg

SEQ ID NO: 161389 - RNA, 22 nt, Human
agugaaauuuguuuagauaggu

SEQ ID NO: 161390 - RNA, 22 nt, Human
auaacagaugugaagugcuaau

SEQ ID NO: 161391 - RNA, 22 nt, Human
ucugccuuuucacugccacuaa

SEQ ID NO: 161392 - RNA, 22 nt, Human
uauuucuguaugcauaaaagga

SEQ ID NO: 161393 - RNA, 22 nt, Human
cagccagagaaagggcacugcc

SEQ ID NO: 161394 - RNA, 18 nt, Human
gggcucugauccuucacc

SEQ ID NO: 161395 - RNA, 22 nt, Human
caguguggagggagagagccug

SEQ ID NO: 161396 - RNA, 22 nt, Human
gugcuuccugccuggugccuuu

SEQ ID NO: 161397 - RNA, 22 nt, Human
uuguccuuaccucaaucuggaa

SEQ ID NO: 161398 - RNA, 22 nt, Human
gguuugcaugugauguugggca

SEQ ID NO: 161399 - RNA, 22 nt, Human
aggucccaggcauagcuggucu

SEQ ID NO: 161400 - RNA, 22 nt, Human
aagugaaacauguaucucuuua

SEQ ID NO: 161401 - RNA, 22 nt, Human
aagcaaaagguuacacuucugg

SEQ ID NO: 161402 - RNA, 22 nt, Human
uccuucagggggccgccugcac

SEQ ID NO: 161403 - RNA, 22 nt, Human
acaguaauaaguguuggugagg

SEQ ID NO: 161404 - RNA, 23 nt, Human
agccuucaggcaaugucaguaga

SEQ ID NO: 161405 - RNA, 22 nt, Human
aggcaguguauugcuagcggcu

SEQ ID NO: 161406 - RNA, 22 nt, Human
aggcagagagcaguggccgucu

SEQ ID NO: 161407 - RNA, 22 nt, Human
cuggugccauucuguggccuag

SEQ ID NO: 161408 - RNA, 22 nt, Human
cugggccugguagggcuugaaa

SEQ ID NO: 161409 - RNA, 22 nt, Human
ugcucccaaacgaccuacugug

SEQ ID NO: 161410 - RNA, 22 nt, Human
uauguacauguuaaagggcaaa

SEQ ID NO: 161411 - RNA, 22 nt, Human
caaaguccauaguuuacaauag

SEQ ID NO: 161412 - RNA, 22 nt, Human
ccagucagccaagcugcagcgg

SEQ ID NO: 161413 - RNA, 22 nt, Human
guuuagaauucuaacuuuaagg

SEQ ID NO: 161414 - RNA, 22 nt, Human
uaugcacacaggcuuaauucau

SEQ ID NO: 161415 - RNA, 22 nt, Human
agcuggugcugaagcucuugag

SEQ ID NO: 161416 - RNA, 22 nt, Human
gccuucaguagugucagcugua

SEQ ID NO: 161417 - RNA, 22 nt, Human
gguguccaucaggcugugcuuc

SEQ ID NO: 161418 - RNA, 22 nt, Human
uccugccuuagagcaaggaaaa

SEQ ID NO: 161419 - RNA, 22 nt, Human
acauuucuuccacaugcugcug

SEQ ID NO: 161420 - RNA, 22 nt, Human
augccuguaaucccagugcuuu

SEQ ID NO: 161421 - RNA, 22 nt, Human
uuuccucuucuucccaugucau

SEQ ID NO: 161422 - RNA, 18 nt, Human
gcucugcccaggcugccc

SEQ ID NO: 161423 - RNA, 22 nt, Human
gccaggggacgcggagcgacga

SEQ ID NO: 161424 - RNA, 22 nt, Human
ugugucagaaggcaauggggau

SEQ ID NO: 161425 - RNA, 22 nt, Human
ugucucugugagaucugacgau

SEQ ID NO: 161426 - RNA, 19 nt, Human
ugccagcauuaggcugaag

SEQ ID NO: 161427 - RNA, 19 nt, Human
uccuuugaauaucaguuga

SEQ ID NO: 161428 - RNA, 22 nt, Human
gcuggcuguguuccuucugcca

SEQ ID NO: 161429 - RNA, 22 nt, Human
ucugggcucugucagcaccucu

SEQ ID NO: 161430 - RNA, 22 nt, Human
gggcuugcugauuugggcagga

SEQ ID NO: 161431 - RNA, 22 nt, Human
ggcagggaaacagcugauccca

SEQ ID NO: 161432 - RNA, 21 nt, Human
uccugccuuaguccagagcag

SEQ ID NO: 161433 - RNA, 22 nt, Human
uucuuucccuuccagcagcucc

SEQ ID NO: 161434 - RNA, 22 nt, Human
gaggcugcccaacuggagugga

SEQ ID NO: 161435 - RNA, 23 nt, Human
aggagccaggugcagcccuugug

SEQ ID NO: 161436 - RNA, 19 nt, Human
ccugugugggguagagauc

SEQ ID NO: 161437 - RNA, 22 nt, Human
gcccagaguucaaggcugcagu

SEQ ID NO: 161438 - RNA, 22 nt, Human
ucucacugggucacagcagagg

SEQ ID NO: 161439 - RNA, 20 nt, Human
agccagaagaaggcuggaga

SEQ ID NO: 161440 - RNA, 22 nt, Human
uaaucacaucaggguaaauggg

SEQ ID NO: 161441 - RNA, 22 nt, Human
uccagucaggcugaauucaagg

SEQ ID NO: 161442 - RNA, 22 nt, Human
ggggcugguggugguuucucca

SEQ ID NO: 161443 - RNA, 22 nt, Human
agcucccaggcagucaugagga

SEQ ID NO: 161444 - RNA, 22 nt, Human
ucccagagugugggcaucaagg

SEQ ID NO: 161445 - RNA, 22 nt, Human
uccagccaugcaugacaaucac

SEQ ID NO: 161446 - RNA, 22 nt, Human
cacugcagaucagaggcugaga

SEQ ID NO: 161447 - RNA, 22 nt, Human
ggaugcugcuaucaggcuucga

SEQ ID NO: 161448 - RNA, 22 nt, Human
ccugggucuugguucaugcucu

SEQ ID NO: 161449 - RNA, 22 nt, Human
ggcaaaaaccacaauuacuuuu

SEQ ID NO: 161450 - RNA, 22 nt, Human
agcuggcauacuuugcuaggaa

SEQ ID NO: 161451 - RNA, 22 nt, Human
ccagccuggguguuagaagaca

SEQ ID NO: 161452 - RNA, 20 nt, Human
aaaguguaagcauauaauua

SEQ ID NO: 161453 - RNA, 22 nt, Human
uugcauugggagugaggagacc

SEQ ID NO: 161454 - RNA, 22 nt, Human
cagaagcagugagagaugugca

SEQ ID NO: 161455 - RNA, 22 nt, Human
ucacaugcuacugagccagacc

SEQ ID NO: 161456 - RNA, 22 nt, Human
gcugagcuagcuaucucagucu

SEQ ID NO: 161457 - RNA, 22 nt, Human
cugagccaugagccugcgccca

SEQ ID NO: 161458 - RNA, 22 nt, Human
aggagcugagggagcgcccuug

SEQ ID NO: 161459 - RNA, 22 nt, Human
uuacaaagaguguucuuuucca

SEQ ID NO: 161460 - RNA, 22 nt, Human
cugggcagaauuuuaggauggc

SEQ ID NO: 161461 - RNA, 23 nt, Human
ggaaagagaggaguugugcauag

SEQ ID NO: 161462 - RNA, 23 nt, Human
aggauccugguacaggagcagag

SEQ ID NO: 161463 - RNA, 22 nt, Human
uuccaaagucauguugcugaua

SEQ ID NO: 161464 - RNA, 22 nt, Human
cugccagcaaugugaccaugcu

SEQ ID NO: 161465 - RNA, 22 nt, Human
ggguaauuggggccuugcagug

SEQ ID NO: 161466 - RNA, 22 nt, Human
cucagaguggggcucccugagg

SEQ ID NO: 161467 - RNA, 22 nt, Human
uaauacuuaccuugcagagucu

SEQ ID NO: 161468 - RNA, 22 nt, Human
cagagcugcucaugguggccag

SEQ ID NO: 161469 - RNA, 22 nt, Human
uguccucaaggagcuucagucu

SEQ ID NO: 161470 - RNA, 22 nt, Human
ucuggcucuuugggugauugua

SEQ ID NO: 161471 - RNA, 22 nt, Human
ggagucaggagcaggcugggcu

SEQ ID NO: 161472 - RNA, 22 nt, Human
cucaggauagcugcgcagccug

SEQ ID NO: 161473 - RNA, 22 nt, Human
auccccagaaaauaggugccua

SEQ ID NO: 161474 - RNA, 22 nt, Human
aggccuuccucggagacaggga

SEQ ID NO: 161475 - RNA, 22 nt, Human
gugucauguagaaauugaugaa

SEQ ID NO: 161476 - RNA, 22 nt, Human
gauuucuguaacacuucagaua

SEQ ID NO: 161477 - RNA, 22 nt, Human
augauacaagcaaaacuaauca

SEQ ID NO: 161478 - RNA, 22 nt, Human
gcauuccugagaaugcagagug

SEQ ID NO: 161479 - RNA, 22 nt, Human
agcugguaugaacaggauagga

SEQ ID NO: 161480 - RNA, 22 nt, Human
ucugggcuugguuagggcuguu

SEQ ID NO: 161481 - RNA, 23 nt, Human
ucccuggaggcagguccagggcc

SEQ ID NO: 161482 - RNA, 22 nt, Human
agggauggaagcucgucugcaa

SEQ ID NO: 161483 - RNA, 22 nt, Human
aagaaugucguugguauuuuaa

SEQ ID NO: 161484 - RNA, 22 nt, Human
accugccuaguugguucugccc

SEQ ID NO: 161485 - RNA, 22 nt, Human
agagccagccuucucagcuuac

SEQ ID NO: 161486 - RNA, 22 nt, Human
aagaacugugcuccaggcucca

SEQ ID NO: 161487 - RNA, 20 nt, Human
cagcccuccaguggaggcag

SEQ ID NO: 161488 - RNA, 22 nt, Human
cugagcugggacucaguagcaa

SEQ ID NO: 161489 - RNA, 22 nt, Human
acagacagggcaccugccuccu

SEQ ID NO: 161490 - RNA, 22 nt, Human
acagaauucuaguauguggcuu

SEQ ID NO: 161491 - RNA, 22 nt, Human
uaguacuuaucucugucauugu

SEQ ID NO: 161492 - RNA, 22 nt, Human
uccuucagauuccugcuucugg

SEQ ID NO: 161493 - RNA, 22 nt, Human
auacaaguugugauaauguaaa

SEQ ID NO: 161494 - RNA, 22 nt, Human
cagcccaggccgacaguuccuc

SEQ ID NO: 161495 - RNA, 22 nt, Human
aagaugcagcuuccacuuuugc

SEQ ID NO: 161496 - RNA, 22 nt, Human
ggagacagugacuuagagacug

SEQ ID NO: 161497 - RNA, 22 nt, Human
uagugauuaaaggcagaauguu

SEQ ID NO: 161498 - RNA, 22 nt, Human
cugagaggcacaaggcauuucg

SEQ ID NO: 161499 - RNA, 17 nt, Human
cacaggugugguuugag

SEQ ID NO: 161500 - RNA, 22 nt, Human
uaaacauggauucugaucacag

SEQ ID NO: 161501 - RNA, 20 nt, Human
ucauugcacauaauggaagc

SEQ ID NO: 161502 - RNA, 22 nt, Human
ucuggagcuggagggcaaggca

SEQ ID NO: 161503 - RNA, 22 nt, Human
aggcacugaaagguggccagag

SEQ ID NO: 161504 - RNA, 22 nt, Human
gggcugggauugcuugcuguga

SEQ ID NO: 161505 - RNA, 22 nt, Human
aggucaaguuuagauagaguua

SEQ ID NO: 161506 - RNA, 22 nt, Human
ccugggcagguguggcuucccc

SEQ ID NO: 161507 - RNA, 22 nt, Human
uuccauaaaggugauaguauac

SEQ ID NO: 161508 - RNA, 22 nt, Human
acagggcauuuccucuaugugu

SEQ ID NO: 161509 - RNA, 22 nt, Human
gugcugucaauugcuuucagua

SEQ ID NO: 161510 - RNA, 22 nt, Human
ccuggcucucugcagauccugg

SEQ ID NO: 161511 - RNA, 22 nt, Human
gcugguuaggugagggugcgcc

SEQ ID NO: 161512 - RNA, 19 nt, Human
ggcugucucggcccagcca

SEQ ID NO: 161513 - RNA, 22 nt, Human
cccuuccucccaggcuucugug

SEQ ID NO: 161514 - RNA, 22 nt, Human
auccaaagcccuaaguuaacug

SEQ ID NO: 161515 - RNA, 22 nt, Human
gcuguauuuaacaacuggcuca

SEQ ID NO: 161516 - RNA, 20 nt, Human
gagauuuccaaucaugccca

SEQ ID NO: 161517 - RNA, 22 nt, Human
caaggcaggaagccugucuuau

SEQ ID NO: 161518 - RNA, 22 nt, Human
uaagugcaauguuuuacuuaaa

SEQ ID NO: 161519 - RNA, 22 nt, Human
uccagucauuuccauuguuccc

SEQ ID NO: 161520 - RNA, 22 nt, Human
acucugaggcaggucagggcag

SEQ ID NO: 161521 - RNA, 22 nt, Human
ugcugugcuggcggcagaggcc

SEQ ID NO: 161522 - RNA, 22 nt, Human
ggcagggugccuggcuccuguu

SEQ ID NO: 161523 - RNA, 22 nt, Human
auauguguacgugcaguauaua

SEQ ID NO: 161524 - RNA, 22 nt, Human
cuggcucaccuccgcuccagca

SEQ ID NO: 161525 - RNA, 22 nt, Human
ggccugugagcccuugcaugua

SEQ ID NO: 161526 - RNA, 22 nt, Human
ccaggagucuggaugagguguc

SEQ ID NO: 161527 - RNA, 22 nt, Human
gccugagcaggcguggaccaug

SEQ ID NO: 161528 - RNA, 22 nt, Human
ugggcugcuguuacaggggcug

SEQ ID NO: 161529 - RNA, 22 nt, Human
ccuggcugccgagugugcagcg

SEQ ID NO: 161530 - RNA, 22 nt, Human
acccugagggguauagcagaag

SEQ ID NO: 161531 - RNA, 22 nt, Human
ugaggcagcuuuuucugugugu

SEQ ID NO: 161532 - RNA, 22 nt, Human
gagcccucucuguaggcaagua

SEQ ID NO: 161533 - RNA, 22 nt, Human
gcuggcucagggacuagaguuu

SEQ ID NO: 161534 - RNA, 20 nt, Human
ggaccagguggggcgguggc

SEQ ID NO: 161535 - RNA, 22 nt, Human
cuuccugaacaaugccaucaau

SEQ ID NO: 161536 - RNA, 22 nt, Human
aagggagguaaagcuauuuaaa

SEQ ID NO: 161537 - RNA, 22 nt, Human
gcagggccuuagcagcggcugc

SEQ ID NO: 161538 - RNA, 22 nt, Human
agcugagcucaggcugauguaa

SEQ ID NO: 161539 - RNA, 22 nt, Human
uggcccugcuuaugucucucuu

SEQ ID NO: 161540 - RNA, 20 nt, Human
acagaauaugcugguugugg

SEQ ID NO: 161541 - RNA, 22 nt, Human
caggagcagaggguggucagca

SEQ ID NO: 161542 - RNA, 22 nt, Human
uggcucaguagcagugugguca

SEQ ID NO: 161543 - RNA, 22 nt, Human
ggccccugcggacugccuagag

SEQ ID NO: 161544 - RNA, 22 nt, Human
cugggcacuugcucacagcucu

SEQ ID NO: 161545 - RNA, 22 nt, Human
uucagucagugacuaagcaguu

SEQ ID NO: 161546 - RNA, 22 nt, Human
ccuggcugguggcagcgacaag

SEQ ID NO: 161547 - RNA, 22 nt, Human
gggcagccucggugccugcugc

SEQ ID NO: 161548 - RNA, 22 nt, Human
aggagagaauguuccaggcuug

SEQ ID NO: 161549 - RNA, 22 nt, Human
ugcccaaguccuccaccgaggu

SEQ ID NO: 161550 - RNA, 22 nt, Human
gcugccuggagcucagccugcc

SEQ ID NO: 161551 - RNA, 22 nt, Human
uggcucugugcuucuaguaucu

SEQ ID NO: 161552 - RNA, 22 nt, Human
acaauguaggauauguacuugu

SEQ ID NO: 161553 - RNA, 23 nt, Human
gggauauggaccuuggaggaguc

SEQ ID NO: 161554 - RNA, 22 nt, Human
cugcccugaccugccucagagu

SEQ ID NO: 161555 - RNA, 22 nt, Human
caaaguuaucaacugcaacauu

SEQ ID NO: 161556 - RNA, 22 nt, Human
agcucccagucuccucuccaug

SEQ ID NO: 161557 - RNA, 22 nt, Human
uggcucagauaauucaaggggc

SEQ ID NO: 161558 - RNA, 22 nt, Human
ucagaguguggugagaugugca

SEQ ID NO: 161559 - RNA, 22 nt, Human
cuuccagagauagggccucaag

SEQ ID NO: 161560 - RNA, 22 nt, Human
cccuucagcugagugggacagc

SEQ ID NO: 161561 - RNA, 22 nt, Human
auccugggcagugugucacucu

SEQ ID NO: 161562 - RNA, 18 nt, Human
gagacacaagggccugga

SEQ ID NO: 161563 - RNA, 22 nt, Human
ugcagaaguauuccaggcccca

SEQ ID NO: 161564 - RNA, 22 nt, Human
cugguucauccccuuccaggaa

SEQ ID NO: 161565 - RNA, 22 nt, Human
gugccagcaguuauggugauuu

SEQ ID NO: 161566 - RNA, 22 nt, Human
aucccugcccucauggagcuua

SEQ ID NO: 161567 - RNA, 22 nt, Human
gggauggggagcuggaaagggg

SEQ ID NO: 161568 - RNA, 22 nt, Human
ucagagugugagacauauugga

SEQ ID NO: 161569 - RNA, 22 nt, Human
gaggaguguauuccacaccacu

SEQ ID NO: 161570 - RNA, 23 nt, Human
gagagcugacugucaagacuguu

SEQ ID NO: 161571 - RNA, 22 nt, Human
gcucugcuggagggaaagagaa

SEQ ID NO: 161572 - RNA, 17 nt, Human
ucagcaggggccaagcu

SEQ ID NO: 161573 - RNA, 22 nt, Human
cagaguguaucuguguaagcau

SEQ ID NO: 161574 - RNA, 22 nt, Human
cccagccugugacagccguccu

SEQ ID NO: 161575 - RNA, 22 nt, Human
ggcacugaauuucuuggcaucu

SEQ ID NO: 161576 - RNA, 20 nt, Human
agcuggccuguccuaggccu

SEQ ID NO: 161577 - RNA, 16 nt, Human
ugggcagaugagaaga

SEQ ID NO: 161578 - RNA, 22 nt, Human
ggcugcucugccuuccagcugg

SEQ ID NO: 161579 - RNA, 22 nt, Human
uauuaguagcuugaaauuggug

SEQ ID NO: 161580 - RNA, 20 nt, Human
acaggagaucugaggaaagg

SEQ ID NO: 161581 - RNA, 22 nt, Human
ugccaggcgugguggugcgcac

SEQ ID NO: 161582 - RNA, 22 nt, Human
cgcaccacugaauuccagccug

SEQ ID NO: 161583 - RNA, 22 nt, Human
cugcuucuaagaaccugcagcu

SEQ ID NO: 161584 - RNA, 22 nt, Human
uggccuggccacauccagcagg

SEQ ID NO: 161585 - RNA, 22 nt, Human
uggcccugcuaugauccugcaa

SEQ ID NO: 161586 - RNA, 20 nt, Human
cugugccuaaaccuccgggu

SEQ ID NO: 161587 - RNA, 22 nt, Human
ggcagccaugcacgcugccugg

SEQ ID NO: 161588 - RNA, 22 nt, Human
gggguugguuuaaaugcuugag

SEQ ID NO: 161589 - RNA, 22 nt, Human
cagucccaguuugagacucugg

SEQ ID NO: 161590 - RNA, 22 nt, Human
uggagaagucaaagugaacagg

SEQ ID NO: 161591 - RNA, 22 nt, Human
ucaagauaccaccauuauaugu

SEQ ID NO: 161592 - RNA, 22 nt, Human
auuauguagcuaaaaauugugu

SEQ ID NO: 161593 - RNA, 22 nt, Human
gccuggagaauuaaaaggaagg

SEQ ID NO: 161594 - RNA, 22 nt, Human
ucaguuuuuacggucacaggga

SEQ ID NO: 161595 - RNA, 22 nt, Human
uuguaacaggcacucugugcca

SEQ ID NO: 161596 - RNA, 23 nt, Human
aaaguguagccagguuaagaacc

SEQ ID NO: 161597 - RNA, 22 nt, Human
aguggcagaucucuggucugga

SEQ ID NO: 161598 - RNA, 22 nt, Human
gagaggucaucucccaucagca

SEQ ID NO: 161599 - RNA, 21 nt, Human
ccugcagcaccagaaggagau

SEQ ID NO: 161600 - RNA, 22 nt, Human
ugucccagcacuuugggagucu

SEQ ID NO: 161601 - RNA, 22 nt, Human
agcugucagugcugugccugua

SEQ ID NO: 161602 - RNA, 22 nt, Human
cugcccuggcagccuaccaugg

SEQ ID NO: 161603 - RNA, 22 nt, Human
gucagcagugucagcucugggg

SEQ ID NO: 161604 - RNA, 22 nt, Human
agggcagagggugccucaccug

SEQ ID NO: 161605 - RNA, 22 nt, Human
cucaggagaugacagaagguau

SEQ ID NO: 161606 - RNA, 21 nt, Human
aagggagauaggaaucaggcc

SEQ ID NO: 161607 - RNA, 22 nt, Human
agggccaggaacaccugaaggg

SEQ ID NO: 161608 - RNA, 21 nt, Human
agugaaaugaaguguaugcuc

SEQ ID NO: 161609 - RNA, 22 nt, Human
cuggagccauguauagccuaug

SEQ ID NO: 161610 - RNA, 23 nt, Human
cuccucguaacucuguggugggu

SEQ ID NO: 161611 - RNA, 22 nt, Human
cuggcucccguuguccuugaag

SEQ ID NO: 161612 - RNA, 22 nt, Human
uaaugcacagaauugacauggg

SEQ ID NO: 161613 - RNA, 22 nt, Human
ugccugaggagucagggcaggu

SEQ ID NO: 161614 - RNA, 21 nt, Human
agacagaacaacugcucucca

SEQ ID NO: 161615 - RNA, 22 nt, Human
ccagggcagugggagaaggugc

SEQ ID NO: 161616 - RNA, 22 nt, Human
ccgggcgggggcucucgucacc

SEQ ID NO: 161617 - RNA, 22 nt, Human
ugcccacauggugccauggcca

SEQ ID NO: 161618 - RNA, 22 nt, Human
ucccugggcaucacguugcuuc

SEQ ID NO: 161619 - RNA, 22 nt, Human
gucuuuauuugagauugucauu

SEQ ID NO: 161620 - RNA, 21 nt, Human
ucaggggcuguguuuuccauc

SEQ ID NO: 161621 - RNA, 22 nt, Human
gauuuccuugcauauugguaau

SEQ ID NO: 161622 - RNA, 19 nt, Human
uguggccaugguucagcug

SEQ ID NO: 161623 - RNA, 22 nt, Human
cugggccagauccagccucaca

SEQ ID NO: 161624 - RNA, 22 nt, Human
aaaugcauaucaaagacuugaa

SEQ ID NO: 161625 - RNA, 22 nt, Human
cugggccuuggauugacacugu

SEQ ID NO: 161626 - RNA, 20 nt, Human
cccagccccuaccuguugcc

SEQ ID NO: 161627 - RNA, 22 nt, Human
ccugucuggccaccagggcgau

SEQ ID NO: 161628 - RNA, 22 nt, Human
gcucagaggagcaucauaagga

SEQ ID NO: 161629 - RNA, 19 nt, Human
cagaguacaccagauagga

SEQ ID NO: 161630 - RNA, 22 nt, Human
ugcagggcuuccucuuggaguu

SEQ ID NO: 161631 - RNA, 19 nt, Human
ugucccagacuccgugucu

SEQ ID NO: 161632 - RNA, 22 nt, Human
guguggcugugggagauguuca

SEQ ID NO: 161633 - RNA, 22 nt, Human
acauuucucauaggagagccac

SEQ ID NO: 161634 - RNA, 22 nt, Human
cuagagggauguuaggauagca

SEQ ID NO: 161635 - RNA, 22 nt, Human
ucugaggcauaaccuguucugc

SEQ ID NO: 161636 - RNA, 17 nt, Human
ucuguccagggagugug

SEQ ID NO: 161637 - RNA, 22 nt, Human
uggccugguuguugcugccguu

SEQ ID NO: 161638 - RNA, 22 nt, Human
augcucugggcaggagcccugg

SEQ ID NO: 161639 - RNA, 22 nt, Human
ccucccucuuucagucccacag

SEQ ID NO: 161640 - RNA, 22 nt, Human
agccagcugccuuucacaucug

SEQ ID NO: 161641 - RNA, 22 nt, Human
gacucugcuacaggccgagguu

SEQ ID NO: 161642 - RNA, 22 nt, Human
ugucucagaauggcucauaaua

SEQ ID NO: 161643 - RNA, 22 nt, Human
gcuggcuuugcacugggugcau

SEQ ID NO: 161644 - RNA, 22 nt, Human
uggccugcuuucauuugaugcu

SEQ ID NO: 161645 - RNA, 22 nt, Human
ucaggagaaucagggcuguccu

SEQ ID NO: 161646 - RNA, 22 nt, Human
ccaaggagcugcaggcacuugu

SEQ ID NO: 161647 - RNA, 22 nt, Human
aagggcugcuguagaagcagag

SEQ ID NO: 161648 - RNA, 22 nt, Human
agccagcagggcuuagaggaca

SEQ ID NO: 161649 - RNA, 17 nt, Human
agguggcugcugcgccu

SEQ ID NO: 161650 - RNA, 22 nt, Human
cagaaauucccauuucagauuc

SEQ ID NO: 161651 - RNA, 22 nt, Human
ccaggacuuauuacaguauaac

SEQ ID NO: 161652 - RNA, 19 nt, Human
uggcagggagaguuugaag

SEQ ID NO: 161653 - RNA, 22 nt, Human
uguaacaguaagccugugagcu

SEQ ID NO: 161654 - RNA, 22 nt, Human
guggagcccugccuugcucaug

SEQ ID NO: 161655 - RNA, 22 nt, Human
gaaggagcuaaagggagcccug

SEQ ID NO: 161656 - RNA, 22 nt, Human
uagaacagaggguugcccagau

SEQ ID NO: 161657 - RNA, 22 nt, Human
agcuuuauucaugauuucaggg

SEQ ID NO: 161658 - RNA, 22 nt, Human
uuuuauuggagugauaccaagc

SEQ ID NO: 161659 - RNA, 22 nt, Human
aggaggccgggauucuggagau

SEQ ID NO: 161660 - RNA, 22 nt, Human
gccuccugguugcuucuccaac

SEQ ID NO: 161661 - RNA, 18 nt, Human
caaagcucacguuccauc

SEQ ID NO: 161662 - RNA, 22 nt, Human
ucuccugugcacccucccugug

SEQ ID NO: 161663 - RNA, 22 nt, Human
acaaaugcaaguuuuaugucaa

SEQ ID NO: 161664 - RNA, 22 nt, Human
gcuccagguauuugcccuuuua

SEQ ID NO: 161665 - RNA, 22 nt, Human
ugcugggggcuuucuggauacc

SEQ ID NO: 161666 - RNA, 22 nt, Human
cccugaggggaguggugaggug

SEQ ID NO: 161667 - RNA, 17 nt, Human
cagggcugucugccuag

SEQ ID NO: 161668 - RNA, 22 nt, Human
gcugccaguguggcaugaugca

SEQ ID NO: 161669 - RNA, 22 nt, Human
gcagcuuggauuucuguaguuu

SEQ ID NO: 161670 - RNA, 22 nt, Human
gccuggcccagggcucuuguug

SEQ ID NO: 161671 - RNA, 22 nt, Human
ugucaugcccaggagcaaggua

SEQ ID NO: 161672 - RNA, 22 nt, Human
gugggcuggacccuccugcucc

SEQ ID NO: 161673 - RNA, 22 nt, Human
gugccuggcaugcgccggugcu

SEQ ID NO: 161674 - RNA, 19 nt, Human
cuggcagccugucuguguc

SEQ ID NO: 161675 - RNA, 22 nt, Human
ggcagcagggucuagauugaug

SEQ ID NO: 161676 - RNA, 22 nt, Human
ugguggcuucugaggauggcga

SEQ ID NO: 161677 - RNA, 22 nt, Human
uagggaggcuacuucuuguagg

SEQ ID NO: 161678 - RNA, 22 nt, Human
cagacacaccaggcccauucug

SEQ ID NO: 161679 - RNA, 22 nt, Human
gccagcuggagugagagugggc

SEQ ID NO: 161680 - RNA, 23 nt, Human
gcugagguacauuuacaggaaga

SEQ ID NO: 161681 - RNA, 21 nt, Human
acaguucaugauaacuccauc

SEQ ID NO: 161682 - RNA, 22 nt, Human
uggcucuggauuaaucuaggaa

SEQ ID NO: 161683 - RNA, 22 nt, Human
cugaaggagcauagucaguuuu

SEQ ID NO: 161684 - RNA, 22 nt, Human
uaaggcagaaauaugagcaggg

SEQ ID NO: 161685 - RNA, 22 nt, Human
gccuuugccugcgacguggcug

SEQ ID NO: 161686 - RNA, 22 nt, Human
uccuggagccacggagcuuuca

SEQ ID NO: 161687 - RNA, 22 nt, Human
ggccaccuuccaguugccugca

SEQ ID NO: 161688 - RNA, 22 nt, Human
cacaggcugcccgcagcuggga

SEQ ID NO: 161689 - RNA, 22 nt, Human
gccugucaauuuuguguacaau

SEQ ID NO: 161690 - RNA, 22 nt, Human
ugcuggccaacaaggcuccaag

SEQ ID NO: 161691 - RNA, 23 nt, Human
agucucagcuggaaacauguguc

SEQ ID NO: 161692 - RNA, 21 nt, Human
gccacugcacuccagccuggg

SEQ ID NO: 161693 - RNA, 22 nt, Human
gggucuggcaugcugagaugga

SEQ ID NO: 161694 - RNA, 22 nt, Human
gcugccugccuaguuccacagu

SEQ ID NO: 161695 - RNA, 21 nt, Human
ccaggcagagcugugaguucu

SEQ ID NO: 161696 - RNA, 22 nt, Human
uggcugggagcuggaacugggc

SEQ ID NO: 161697 - RNA, 22 nt, Human
ucucaggaguagugggauccau

SEQ ID NO: 161698 - RNA, 22 nt, Human
cugugcuugacagugggaagca

SEQ ID NO: 161699 - RNA, 22 nt, Human
ccacagggaacaugacagccuu

SEQ ID NO: 161700 - RNA, 22 nt, Human
ggcacugauuccauucaugaag

SEQ ID NO: 161701 - RNA, 22 nt, Human
cugugucccuugucccagagcc

SEQ ID NO: 161702 - RNA, 22 nt, Human
gcaggccuuggcaaugagccug

SEQ ID NO: 161703 - RNA, 18 nt, Human
gaaaugugauucuagggc

SEQ ID NO: 161704 - RNA, 22 nt, Human
cagcaggguagguuguaucagu

SEQ ID NO: 161705 - RNA, 22 nt, Human
gccuuggccaacaccuugcaaa

SEQ ID NO: 161706 - RNA, 22 nt, Human
ccagcugaggcagccacacagg

SEQ ID NO: 161707 - RNA, 22 nt, Human
agcaggaggguuuuguagaguc

SEQ ID NO: 161708 - RNA, 22 nt, Human
uggcaggguggcaacuuuuggu

SEQ ID NO: 161709 - RNA, 22 nt, Human
gagauguacaauguguauuaau

SEQ ID NO: 161710 - RNA, 22 nt, Human
ucucagaguuccucuggagucc

SEQ ID NO: 161711 - RNA, 19 nt, Human
aggguccagggagcggcuc

SEQ ID NO: 161712 - RNA, 22 nt, Human
ucucacuggguauaaaugagua

SEQ ID NO: 161713 - RNA, 22 nt, Human
ccaggcucaggugcgagagaca

SEQ ID NO: 161714 - RNA, 22 nt, Human
aggcucagcugguggugaucgc

SEQ ID NO: 161715 - RNA, 22 nt, Human
aggccagguggucaugcuugcu

SEQ ID NO: 161716 - RNA, 22 nt, Human
ccacugggggcugcaggcacuc

SEQ ID NO: 161717 - RNA, 22 nt, Human
aaugcacagcuaaagugguucc

SEQ ID NO: 161718 - RNA, 18 nt, Human
gcugccugcauuccucac

SEQ ID NO: 161719 - RNA, 22 nt, Human
ggguggcuccuaugggcauagc

SEQ ID NO: 161720 - RNA, 23 nt, Human
ccacagagcugccaauuccugug

SEQ ID NO: 161721 - RNA, 22 nt, Human
cccaggagagaggccaguuggc

SEQ ID NO: 161722 - RNA, 22 nt, Human
cccagcaguuguuggugcacau

SEQ ID NO: 161723 - RNA, 22 nt, Human
gccugcagggugaugggcugcc

SEQ ID NO: 161724 - RNA, 22 nt, Human
auggaaaggcuguggaaacuua

SEQ ID NO: 161725 - RNA, 22 nt, Human
ccuggcagcagcacaugccuuc

SEQ ID NO: 161726 - RNA, 22 nt, Human
ugccagcuccgaggagcugcag

SEQ ID NO: 161727 - RNA, 22 nt, Human
aguaucaaggaucuccagcacc

SEQ ID NO: 161728 - RNA, 22 nt, Human
aggugcagaaaaaaguccuuua

SEQ ID NO: 161729 - RNA, 22 nt, Human
ugagccuggggccugggcagcg

SEQ ID NO: 161730 - RNA, 22 nt, Human
ucagcagcagcucagcauguuu

SEQ ID NO: 161731 - RNA, 22 nt, Human
gcugaagcugcagcaggaggaa

SEQ ID NO: 161732 - RNA, 22 nt, Human
ugucacagggauaccauggggc

SEQ ID NO: 161733 - RNA, 22 nt, Human
gcugucccgaaccccugguaau

SEQ ID NO: 161734 - RNA, 22 nt, Human
gucccugcccuccugggacuca

SEQ ID NO: 161735 - RNA, 19 nt, Human
ugucucagugucccuuccu

SEQ ID NO: 161736 - RNA, 22 nt, Human
acaggccugacacacagagggc

SEQ ID NO: 161737 - RNA, 22 nt, Human
uggcccugacugauguggaggg

SEQ ID NO: 161738 - RNA, 22 nt, Human
uuccuguccgcaauggccuggg

SEQ ID NO: 161739 - RNA, 22 nt, Human
gcaggccagcugugcagauggg

SEQ ID NO: 161740 - RNA, 22 nt, Human
gcugccacauuuucaggacuaa

SEQ ID NO: 161741 - RNA, 22 nt, Human
uucauguauuuaucauguaaau

SEQ ID NO: 161742 - RNA, 22 nt, Human
cuguacauauacauuuuuuucc

SEQ ID NO: 161743 - RNA, 22 nt, Human
augugcaugcacuuacaugugu

SEQ ID NO: 161744 - RNA, 22 nt, Human
ucugaggccccugggcaggaug

SEQ ID NO: 161745 - RNA, 22 nt, Human
gggccccuuguaucucuggcuc

SEQ ID NO: 161746 - RNA, 22 nt, Human
ccucuccuugcacccgucccgc

SEQ ID NO: 161747 - RNA, 22 nt, Human
ugggugggagcgcccugucugg

SEQ ID NO: 161748 - RNA, 22 nt, Human
gcucaggaucagccaccucuuu

SEQ ID NO: 161749 - RNA, 22 nt, Human
uggcucugggaaucuguugcuu

SEQ ID NO: 161750 - RNA, 22 nt, Human
gccugagacagugugguccaau

SEQ ID NO: 161751 - RNA, 22 nt, Human
gcagcccaaaaaagagguagau

SEQ ID NO: 161752 - RNA, 22 nt, Human
cucagagaaaaggagcaagggu

SEQ ID NO: 161753 - RNA, 22 nt, Human
acaaagucacaauaauuaaccu

SEQ ID NO: 161754 - RNA, 19 nt, Human
gcuggcagauguggccgug

SEQ ID NO: 161755 - RNA, 22 nt, Human
caaaugcauaguuuauaagaag

SEQ ID NO: 161756 - RNA, 22 nt, Human
gucccagaaacauauugcuggu

SEQ ID NO: 161757 - RNA, 22 nt, Human
agcugcuguccuaggcacugua

SEQ ID NO: 161758 - RNA, 22 nt, Human
uccugccucuuuucuuauucca

SEQ ID NO: 161759 - RNA, 22 nt, Human
cucucuucccgugaguguugca

SEQ ID NO: 161760 - RNA, 22 nt, Human
gaacagaauuaccgaagaucug

SEQ ID NO: 161761 - RNA, 22 nt, Human
cccagggacagcuagguggggc

SEQ ID NO: 161762 - RNA, 22 nt, Human
uuucaugugcaauuagcaauau

SEQ ID NO: 161763 - RNA, 22 nt, Human
aaaagguagauucuccuucuau

SEQ ID NO: 161764 - RNA, 17 nt, Human
ucaugcccaacuauuac

SEQ ID NO: 161765 - RNA, 22 nt, Human
aguucuuuugugaacauaugcu

SEQ ID NO: 161766 - RNA, 20 nt, Human
cccucugcacauggcugugg

SEQ ID NO: 161767 - RNA, 22 nt, Human
gcaguaaaaaaggauaugugca

SEQ ID NO: 161768 - RNA, 22 nt, Human
gggacagaaggaagugagcaca

SEQ ID NO: 161769 - RNA, 22 nt, Human
cagggcuguuagcugcugcucu

SEQ ID NO: 161770 - RNA, 22 nt, Human
ucacauuuucuacuacuguacg

SEQ ID NO: 161771 - RNA, 22 nt, Human
ccugcucugguuuagucagucu

SEQ ID NO: 161772 - RNA, 22 nt, Human
ggcccagcugugcuuccagccc

SEQ ID NO: 161773 - RNA, 22 nt, Human
cagccugggcuccagagucccu

SEQ ID NO: 161774 - RNA, 22 nt, Human
aggugccaauuuucagugaaca

SEQ ID NO: 161775 - RNA, 22 nt, Human
cucaguuucuucauauuguagg

SEQ ID NO: 161776 - RNA, 22 nt, Human
uacauugugauguuucaauaca

SEQ ID NO: 161777 - RNA, 20 nt, Human
aggcacuguugucuguaucc

SEQ ID NO: 161778 - RNA, 22 nt, Human
cucuccuccaacagcccugccg

SEQ ID NO: 161779 - RNA, 22 nt, Human
agugagggaugaagaacugcgg

SEQ ID NO: 161780 - RNA, 22 nt, Human
cugggcacacagugacucugca

SEQ ID NO: 161781 - RNA, 22 nt, Human
cugcagagcuaggcugagugaa

SEQ ID NO: 161782 - RNA, 22 nt, Human
uagggcagcugcaucaggcacu

SEQ ID NO: 161783 - RNA, 22 nt, Human
cuggugcaggaaggagcuggca

SEQ ID NO: 161784 - RNA, 19 nt, Human
agcaccugugagagccugg

SEQ ID NO: 161785 - RNA, 22 nt, Human
ccaggcaggcagcguucucagg

SEQ ID NO: 161786 - RNA, 22 nt, Human
ugagguaggugguaagagauac

SEQ ID NO: 161787 - RNA, 17 nt, Human
agcagcugaagcagcca

SEQ ID NO: 161788 - RNA, 22 nt, Human
ggcuccugauaggagaaugcgg

SEQ ID NO: 161789 - RNA, 22 nt, Human
aucaguuugagugcugugucaa

SEQ ID NO: 161790 - RNA, 22 nt, Human
guggugcaggccagcaggggcg

SEQ ID NO: 161791 - RNA, 22 nt, Human
ugucugucugcaagccagaaag

SEQ ID NO: 161792 - RNA, 22 nt, Human
agagacaggguuuugucguguu

SEQ ID NO: 161793 - RNA, 22 nt, Human
ugaaggaauggaggaucagagc

SEQ ID NO: 161794 - RNA, 22 nt, Human
auaauuuacuaagcucuaccuu

SEQ ID NO: 161795 - RNA, 17 nt, Human
cagacagauauccuggg

SEQ ID NO: 161796 - RNA, 22 nt, Human
aacagcaauagcacuauucauu

SEQ ID NO: 161797 - RNA, 22 nt, Human
cuggcucaggguggucuggguc

SEQ ID NO: 161798 - RNA, 22 nt, Human
uccugccugcaaucccagcacu

SEQ ID NO: 161799 - RNA, 22 nt, Human
ccucucauagucuguauccuuu

SEQ ID NO: 161800 - RNA, 22 nt, Human
agggggcaggagagaccugcug

SEQ ID NO: 161801 - RNA, 22 nt, Human
aggaguggaauuacuggguucu

SEQ ID NO: 161802 - RNA, 19 nt, Human
agccuggagggcuggucac

SEQ ID NO: 161803 - RNA, 22 nt, Human
ggauccuuaacuaucacaguga

SEQ ID NO: 161804 - RNA, 22 nt, Human
auaaagaggauguauuuacagc

SEQ ID NO: 161805 - RNA, 22 nt, Human
ucccugggccacagcugugagc

SEQ ID NO: 161806 - RNA, 20 nt, Human
aguaggggaaugcaagagca

SEQ ID NO: 161807 - RNA, 17 nt, Human
ccuuucucuuucaucuc

SEQ ID NO: 161808 - RNA, 22 nt, Human
uggaaagaauuccuaugguuca

SEQ ID NO: 161809 - RNA, 22 nt, Human
uggggacauagccagucuggcu

SEQ ID NO: 161810 - RNA, 22 nt, Human
aggggacacggcuucuccaggg

SEQ ID NO: 161811 - RNA, 22 nt, Human
gcacagagggcagugagccucu

SEQ ID NO: 161812 - RNA, 19 nt, Human
ggucucagugcagcugcag

SEQ ID NO: 161813 - RNA, 22 nt, Human
acacagaaccucauagccucuc

SEQ ID NO: 161814 - RNA, 22 nt, Human
aggccugggacgggagccguga

SEQ ID NO: 161815 - RNA, 22 nt, Human
agcugcccccagggcugugcuu

SEQ ID NO: 161816 - RNA, 22 nt, Human
cagagguaccagcagccucugg

SEQ ID NO: 161817 - RNA, 22 nt, Human
gcugagaggcacuaucuccgga

SEQ ID NO: 161818 - RNA, 22 nt, Human
uucuguguggguagcuccuguu

SEQ ID NO: 161819 - RNA, 22 nt, Human
ucuggcucccuggagcuccaca

SEQ ID NO: 161820 - RNA, 22 nt, Human
gcagagccgugaauggauuuca

SEQ ID NO: 161821 - RNA, 22 nt, Human
uuucauguuuucuuaaauggca

SEQ ID NO: 161822 - RNA, 22 nt, Human
ggagggcucaauugacuccuga

SEQ ID NO: 161823 - RNA, 22 nt, Human
uggagaugaauauguguaccug

SEQ ID NO: 161824 - RNA, 18 nt, Human
agcuggggccucuggucc

SEQ ID NO: 161825 - RNA, 22 nt, Human
uugucugugaaauggaaauagu

SEQ ID NO: 161826 - RNA, 21 nt, Human
agaaaaguagaguuuucagag

SEQ ID NO: 161827 - RNA, 22 nt, Human
uucacauuauaaucaguucugc

SEQ ID NO: 161828 - RNA, 22 nt, Human
auguagcaucuauccugauaaa

SEQ ID NO: 161829 - RNA, 22 nt, Human
cagagcugcagauugaaggcau

SEQ ID NO: 161830 - RNA, 22 nt, Human
ucagcagauggguuguguuggc

SEQ ID NO: 161831 - RNA, 22 nt, Human
gaggaguggaguugcuggguug

SEQ ID NO: 161832 - RNA, 22 nt, Human
aaaggucaagcuggacucaggu

SEQ ID NO: 161833 - RNA, 22 nt, Human
cugucagcacucuacuacagau

SEQ ID NO: 161834 - RNA, 22 nt, Human
acugggaggcaucuggagcuga

SEQ ID NO: 161835 - RNA, 22 nt, Human
aguuuagaguucaaauuaguuc

SEQ ID NO: 161836 - RNA, 22 nt, Human
acagagaaagugggcugaagau

SEQ ID NO: 161837 - RNA, 22 nt, Human
aaaaugugcaguuuuuaagcug

SEQ ID NO: 161838 - RNA, 20 nt, Human
cuccagggaacagacuggag

SEQ ID NO: 161839 - RNA, 19 nt, Human
aggugaugugacucuagaa

SEQ ID NO: 161840 - RNA, 22 nt, Human
gagcugcccugagcuuugcaug

SEQ ID NO: 161841 - RNA, 19 nt, Human
acuuucuccaggaccuguu

SEQ ID NO: 161842 - RNA, 22 nt, Human
ugugucagagguagagauggca

SEQ ID NO: 161843 - RNA, 22 nt, Human
gacauucacaguuuccgauggu

SEQ ID NO: 161844 - RNA, 21 nt, Human
aaugugugcuauuuaucuuuu

SEQ ID NO: 161845 - RNA, 22 nt, Human
cagagcugcaaaugccccuccg

SEQ ID NO: 161846 - RNA, 22 nt, Human
gcuguccucugaucucuggagg

SEQ ID NO: 161847 - RNA, 22 nt, Human
cuucucucccuggcacucagac

SEQ ID NO: 161848 - RNA, 22 nt, Human
gggcugcuuuuaagggucucag

SEQ ID NO: 161849 - RNA, 22 nt, Human
uuccuucucagcccucgaggau

SEQ ID NO: 161850 - RNA, 22 nt, Human
ugagccuggcggaagcagcgug

SEQ ID NO: 161851 - RNA, 22 nt, Human
uaauuuaauuccauggauucua

SEQ ID NO: 161852 - RNA, 22 nt, Human
cuacauuaaauuggcuuacuua

SEQ ID NO: 161853 - RNA, 22 nt, Human
aggguggagggagucccugagc

SEQ ID NO: 161854 - RNA, 22 nt, Human
ccagcaccuugaucuuggaguu

SEQ ID NO: 161855 - RNA, 22 nt, Human
cagcuccccaugguuccugaag

SEQ ID NO: 161856 - RNA, 22 nt, Human
acuggcugaaguuuacuuuuug

SEQ ID NO: 161857 - RNA, 22 nt, Human
caggagcccguugcuccggcgg

SEQ ID NO: 161858 - RNA, 22 nt, Human
guuuuauaggugaaauauuacu

SEQ ID NO: 161859 - RNA, 22 nt, Human
cugccucaugcugccugcagcc

SEQ ID NO: 161860 - RNA, 22 nt, Human
uggcugcugagaaggcagcugu

SEQ ID NO: 161861 - RNA, 22 nt, Human
aucaguuuggaacauucaggcc

SEQ ID NO: 161862 - RNA, 22 nt, Human
guaggaagcucugaggcuaguu

SEQ ID NO: 161863 - RNA, 22 nt, Human
ucaggcugccuaucagacugug

SEQ ID NO: 161864 - RNA, 22 nt, Human
aaaagagucuuaggcagucaua

SEQ ID NO: 161865 - RNA, 22 nt, Human
gcuggcagaauuucuucuugcu

SEQ ID NO: 161866 - RNA, 22 nt, Human
cagugcauagauccugaggccu

SEQ ID NO: 161867 - RNA, 20 nt, Human
cuuccacacaagaagcacag

SEQ ID NO: 161868 - RNA, 22 nt, Human
ucugggcagcagcagcuaguag

SEQ ID NO: 161869 - RNA, 22 nt, Human
ugcagggcuacaggacuacaac

SEQ ID NO: 161870 - RNA, 22 nt, Human
gccagcagccacagaagucacu

SEQ ID NO: 161871 - RNA, 22 nt, Human
auagugguuggauaugucagag

SEQ ID NO: 161872 - RNA, 21 nt, Human
uggcucugaaagagugcugca

SEQ ID NO: 161873 - RNA, 22 nt, Human
uccugugccuccaccugcuccg

SEQ ID NO: 161874 - RNA, 22 nt, Human
gauuucaaggauguuagaggug

SEQ ID NO: 161875 - RNA, 22 nt, Human
cacucugcagcugaagggcugg

SEQ ID NO: 161876 - RNA, 20 nt, Human
ucccuggaggugguggcauc

SEQ ID NO: 161877 - RNA, 22 nt, Human
aaugaugguuucaucacuugaa

SEQ ID NO: 161878 - RNA, 22 nt, Human
cugggaggacaacuuggagcuc

SEQ ID NO: 161879 - RNA, 22 nt, Human
caggcagcucgaugccuuguug

SEQ ID NO: 161880 - RNA, 22 nt, Human
auaugucgcuacaucauuagau

SEQ ID NO: 161881 - RNA, 22 nt, Human
gccaccucuuugucucugccgc

SEQ ID NO: 161882 - RNA, 22 nt, Human
ugucccagacacaguaugcgcu

SEQ ID NO: 161883 - RNA, 22 nt, Human
caguacuucuuggaaacuggau

SEQ ID NO: 161884 - RNA, 22 nt, Human
ggucagggggaucugugaggua

SEQ ID NO: 161885 - RNA, 22 nt, Human
uauguacauggagagcaauuga

SEQ ID NO: 161886 - RNA, 22 nt, Human
gguuggaggugggaauagcuag

SEQ ID NO: 161887 - RNA, 22 nt, Human
agucucugcacaguaagaagca

SEQ ID NO: 161888 - RNA, 22 nt, Human
ugcuagaaaucugaaacuagca

SEQ ID NO: 161889 - RNA, 22 nt, Human
aguggcagccgagcaggagaug

SEQ ID NO: 161890 - RNA, 22 nt, Human
gcuuccuggagggagagagcug

SEQ ID NO: 161891 - RNA, 22 nt, Human
uuaaacagguuuuugaauggcc

SEQ ID NO: 161892 - RNA, 22 nt, Human
ggggcagcucccgagggcagga

SEQ ID NO: 161893 - RNA, 22 nt, Human
gagggcagagacagugauucac

SEQ ID NO: 161894 - RNA, 22 nt, Human
ucagagugcagcgggaggcugg

SEQ ID NO: 161895 - RNA, 22 nt, Human
uggcacugaccccaggccugug

SEQ ID NO: 161896 - RNA, 22 nt, Human
ucaggagagaaagaauacaauu

SEQ ID NO: 161897 - RNA, 22 nt, Human
uggcucaggcuugaaaauagau

SEQ ID NO: 161898 - RNA, 22 nt, Human
ggucagggcucuuccaguggcu

SEQ ID NO: 161899 - RNA, 22 nt, Human
uucacagggcagcagcugagcc

SEQ ID NO: 161900 - RNA, 22 nt, Human
auagaacagaaacagaugcaca

SEQ ID NO: 161901 - RNA, 22 nt, Human
cacuggggugggccugguagag

SEQ ID NO: 161902 - RNA, 18 nt, Human
gccugggaggaggaaaug

SEQ ID NO: 161903 - RNA, 22 nt, Human
gcuuuuucaaaugaaagcuggu

SEQ ID NO: 161904 - RNA, 22 nt, Human
gcagcuuuguggagaggcccau

SEQ ID NO: 161905 - RNA, 19 nt, Human
ccucugccagcccgccucu

SEQ ID NO: 161906 - RNA, 22 nt, Human
ucuggcccagccccugagguca

SEQ ID NO: 161907 - RNA, 22 nt, Human
aagcagccaccucaucuccacu

SEQ ID NO: 161908 - RNA, 17 nt, Human
gagaguguauuggaugc

SEQ ID NO: 161909 - RNA, 22 nt, Human
ggaggaccccagcagcucccca

SEQ ID NO: 161910 - RNA, 22 nt, Human
cucccugguguccccuccagga

SEQ ID NO: 161911 - RNA, 22 nt, Human
gcugccuggcuuuaguccacuu

SEQ ID NO: 161912 - RNA, 22 nt, Human
ggcugccucaaagcucaagcuc

SEQ ID NO: 161913 - RNA, 22 nt, Human
gccucugggcucugccccuggc

SEQ ID NO: 161914 - RNA, 22 nt, Human
caggcuugggagcagagccacu

SEQ ID NO: 161915 - RNA, 22 nt, Human
ccugucaguugcugucagggau

SEQ ID NO: 161916 - RNA, 22 nt, Human
ccaggccuguguuguguggagg

SEQ ID NO: 161917 - RNA, 22 nt, Human
ucugucugcgcuugcccuggug

SEQ ID NO: 161918 - RNA, 22 nt, Human
aucuauuaugcugagaaacugu

SEQ ID NO: 161919 - RNA, 22 nt, Human
cauugcacaucugagaagagau

SEQ ID NO: 161920 - RNA, 22 nt, Human
gcagggcugcugaaacuuguuu

SEQ ID NO: 161921 - RNA, 22 nt, Human
ggaccagagcucgggcuucuca

SEQ ID NO: 161922 - RNA, 22 nt, Human
guggcugcuaagucuccuuccu

SEQ ID NO: 161923 - RNA, 21 nt, Human
ugguuugcggccaaaguuaaa

SEQ ID NO: 161924 - RNA, 22 nt, Human
aaagauuuaagaauaauuugug

SEQ ID NO: 161925 - RNA, 21 nt, Human
ugauuuccagaaaauuggccc

SEQ ID NO: 161926 - RNA, 22 nt, Human
uccagggagauggcagaggcug

SEQ ID NO: 161927 - RNA, 21 nt, Human
cugcuuuacuucagaggaucu

SEQ ID NO: 161928 - RNA, 22 nt, Human
gugccuggcacacagaaggcaa

SEQ ID NO: 161929 - RNA, 22 nt, Human
gaaaucugucuuuguuugaaua

SEQ ID NO: 161930 - RNA, 22 nt, Human
agcccaugcaacaggccuagcg

SEQ ID NO: 161931 - RNA, 22 nt, Human
aagcagccuggcaugaugcuuu

SEQ ID NO: 161932 - RNA, 22 nt, Human
agccuggagcuugaguuaugag

SEQ ID NO: 161933 - RNA, 20 nt, Human
ugaaaaggucaggagacaug

SEQ ID NO: 161934 - RNA, 22 nt, Human
ugggaggaucgcuugagcccag

SEQ ID NO: 161935 - RNA, 22 nt, Human
gcuggcuguaucaccuggccag

SEQ ID NO: 161936 - RNA, 22 nt, Human
gagcuuugcuggaagccugggg

SEQ ID NO: 161937 - RNA, 23 nt, Human
ugggccuggccucccaguccagc

SEQ ID NO: 161938 - RNA, 22 nt, Human
gagagugagauaauuucacaua

SEQ ID NO: 161939 - RNA, 22 nt, Human
caaaggcaacauauacuuguuu

SEQ ID NO: 161940 - RNA, 22 nt, Human
gcugucugcugggucgcucagg

SEQ ID NO: 161941 - RNA, 22 nt, Human
ucaggggcccuucccucagcag

SEQ ID NO: 161942 - RNA, 20 nt, Human
cccagggaccugagcuccau

SEQ ID NO: 161943 - RNA, 22 nt, Human
cauugaaaccuaacauaggcug

SEQ ID NO: 161944 - RNA, 22 nt, Human
ggucccaggagaauaggugcaa

SEQ ID NO: 161945 - RNA, 22 nt, Human
agaaacauuuagauuauauguc

SEQ ID NO: 161946 - RNA, 22 nt, Human
gcagcccagagcgcaggacccc

SEQ ID NO: 161947 - RNA, 22 nt, Human
cacagagagcuacgugcagcgu

SEQ ID NO: 161948 - RNA, 22 nt, Human
ucaaauaugugauagaagcuaa

SEQ ID NO: 161949 - RNA, 22 nt, Human
agccuucauaaucuugggcuuu

SEQ ID NO: 161950 - RNA, 22 nt, Human
cagaagcacuaggaggaaacgu

SEQ ID NO: 161951 - RNA, 21 nt, Human
gcaggcuggucaaaccucagu

SEQ ID NO: 161952 - RNA, 22 nt, Human
cagcugggagcuccauuagaua

SEQ ID NO: 161953 - RNA, 22 nt, Human
gagcagggccacuucuguaccu

SEQ ID NO: 161954 - RNA, 22 nt, Human
cagccaggcccccgagucguug

SEQ ID NO: 161955 - RNA, 22 nt, Human
cagcugagaccagaaugcaggu

SEQ ID NO: 161956 - RNA, 21 nt, Human
uauacaugugugcauacgugu

SEQ ID NO: 161957 - RNA, 22 nt, Human
agugacagcugggaaggugaaa

SEQ ID NO: 161958 - RNA, 22 nt, Human
guggcagagguuccucagugug

SEQ ID NO: 161959 - RNA, 22 nt, Human
gggcacuggaaggcucucaggc

SEQ ID NO: 161960 - RNA, 22 nt, Human
gccuggcuccuaaggacuggcu

SEQ ID NO: 161961 - RNA, 22 nt, Human
aagggaggggauguaagccugg

SEQ ID NO: 161962 - RNA, 22 nt, Human
acaugucaauuuaguacucuua

SEQ ID NO: 161963 - RNA, 22 nt, Human
uuauuauugugaccugagaaug

SEQ ID NO: 161964 - RNA, 22 nt, Human
gcugccugucccaggaugagga

SEQ ID NO: 161965 - RNA, 22 nt, Human
cuguuuaucccuuuggucagca

SEQ ID NO: 161966 - RNA, 21 nt, Human
guggcccugguguggcugcac

SEQ ID NO: 161967 - RNA, 22 nt, Human
ugggugggagcacccugucugg

SEQ ID NO: 161968 - RNA, 22 nt, Human
agacccugcaccucucgugggc

SEQ ID NO: 161969 - RNA, 22 nt, Human
uggcagcuguguccagguagaa

SEQ ID NO: 161970 - RNA, 22 nt, Human
uuaaguccuugguaauuuucuu

SEQ ID NO: 161971 - RNA, 22 nt, Human
ucacugcagacaaccucaguca

SEQ ID NO: 161972 - RNA, 22 nt, Human
cugcucugcaaggcacagugau

SEQ ID NO: 161973 - RNA, 22 nt, Human
cccaggagguggagguugcagc

SEQ ID NO: 161974 - RNA, 21 nt, Human
uccacaaguuagaaggaaauu

SEQ ID NO: 161975 - RNA, 22 nt, Human
caggcugaggcaguaggguuug

SEQ ID NO: 161976 - RNA, 22 nt, Human
gcuggagccuucugcucuguug

SEQ ID NO: 161977 - RNA, 22 nt, Human
auacaguauuaccuguucagga

SEQ ID NO: 161978 - RNA, 19 nt, Human
ccauggcaaugaucugaug

SEQ ID NO: 161979 - RNA, 18 nt, Human
caggucagccuggccuca

SEQ ID NO: 161980 - RNA, 22 nt, Human
auugaaaguccuaucuaaggga

SEQ ID NO: 161981 - RNA, 22 nt, Human
gcaggccucuguugagggccuu

SEQ ID NO: 161982 - RNA, 22 nt, Human
augucuaaaagauaaaguuuaa

SEQ ID NO: 161983 - RNA, 22 nt, Human
agcaguggcuggauggugugcu

SEQ ID NO: 161984 - RNA, 22 nt, Human
accagagcuuacaugcuagaaa

SEQ ID NO: 161985 - RNA, 22 nt, Human
uuauuuuuaaaaguucacacag

SEQ ID NO: 161986 - RNA, 22 nt, Human
agcagggcuuugcagacuuggg

SEQ ID NO: 161987 - RNA, 22 nt, Human
auaaggcacacauagauagggu

SEQ ID NO: 161988 - RNA, 22 nt, Human
gccagcucagugccaggccccu

SEQ ID NO: 161989 - RNA, 22 nt, Human
aaaucugguucaguaaguccuc

SEQ ID NO: 161990 - RNA, 22 nt, Human
gauggguggucucagacuugcc

SEQ ID NO: 161991 - RNA, 22 nt, Human
caagggaccugagauggucucu

SEQ ID NO: 161992 - RNA, 22 nt, Human
cugugcauugucuugucuguag

SEQ ID NO: 161993 - RNA, 22 nt, Human
gccaggcagauaugugagcuua

SEQ ID NO: 161994 - RNA, 22 nt, Human
ucaugacaacuauauuauucca

SEQ ID NO: 161995 - RNA, 22 nt, Human
uggcuggcgccgggcuagccac

SEQ ID NO: 161996 - RNA, 22 nt, Human
uacaaaguuugggguccucaaa

SEQ ID NO: 161997 - RNA, 22 nt, Human
aggcacugcuucuaaguaggaa

SEQ ID NO: 161998 - RNA, 22 nt, Human
uacauguaauuuucauaguaag

SEQ ID NO: 161999 - RNA, 22 nt, Human
uggcagcuccuggggccagcac

SEQ ID NO: 162000 - RNA, 22 nt, Human
gcuguccugggaacaggcacua

SEQ ID NO: 162001 - RNA, 18 nt, Human
ucaagacaucaugaaaua

SEQ ID NO: 162002 - RNA, 22 nt, Human
agugugugcaugcauucgugca

SEQ ID NO: 162003 - RNA, 18 nt, Human
ccagagcuggcuccucgc

SEQ ID NO: 162004 - RNA, 22 nt, Human
ggcccugggaugcucagcagug

SEQ ID NO: 162005 - RNA, 22 nt, Human
cugcccugugaggguccuuggg

SEQ ID NO: 162006 - RNA, 22 nt, Human
agggagacacaugaggaaguca

SEQ ID NO: 162007 - RNA, 22 nt, Human
uaggcagggauuaggguugauu

SEQ ID NO: 162008 - RNA, 22 nt, Human
cagucccagacccagaaggugg

SEQ ID NO: 162009 - RNA, 21 nt, Human
ccucuggcuugugcugugccc

SEQ ID NO: 162010 - RNA, 22 nt, Human
gugggacucuucuuuggcagug

SEQ ID NO: 162011 - RNA, 22 nt, Human
agagugaaguaauuguuaggau

SEQ ID NO: 162012 - RNA, 20 nt, Human
ccuaggcaugcugagucucc

SEQ ID NO: 162013 - RNA, 22 nt, Human
cuggccagacuacacaugugug

SEQ ID NO: 162014 - RNA, 22 nt, Human
uuccaaaggaauggggagcuau

SEQ ID NO: 162015 - RNA, 22 nt, Human
uggcagggugccaguugcgagu

SEQ ID NO: 162016 - RNA, 22 nt, Human
guggagccaggaucuccgcaca

SEQ ID NO: 162017 - RNA, 22 nt, Human
aggccuggccuuuauguucaag

SEQ ID NO: 162018 - RNA, 22 nt, Human
gugcccugguccccagcauaua

SEQ ID NO: 162019 - RNA, 22 nt, Human
cuggagcauccaugcccagggu

SEQ ID NO: 162020 - RNA, 22 nt, Human
cucaccaggaacagcugcggag

SEQ ID NO: 162021 - RNA, 22 nt, Human
gcccagcaggacagagugguuu

SEQ ID NO: 162022 - RNA, 22 nt, Human
gggcuuggcacaugggcucagc

SEQ ID NO: 162023 - RNA, 22 nt, Human
cugaggcucccucgggucugcu

SEQ ID NO: 162024 - RNA, 22 nt, Human
gaugguuugguaaaaguauguu

SEQ ID NO: 162025 - RNA, 22 nt, Human
uccauuuucaucucauguauaa

SEQ ID NO: 162026 - RNA, 22 nt, Human
gcuccugucuuggggcacuggc

SEQ ID NO: 162027 - RNA, 22 nt, Human
cguguacagucuaucuuuuuuc

SEQ ID NO: 162028 - RNA, 22 nt, Human
ggcuccucucuggccgcucccg

SEQ ID NO: 162029 - RNA, 20 nt, Human
uucaggauucuagaccacac

SEQ ID NO: 162030 - RNA, 22 nt, Human
uucaaucauuuuuacauagucc

SEQ ID NO: 162031 - RNA, 19 nt, Human
cagcugcaccgugaccauc

SEQ ID NO: 162032 - RNA, 22 nt, Human
gauggcagguaguggucucauc

SEQ ID NO: 162033 - RNA, 18 nt, Human
gcccugguggagcuggug

SEQ ID NO: 162034 - RNA, 18 nt, Human
cucucuggucuggauccc

SEQ ID NO: 162035 - RNA, 22 nt, Human
ccaaggagaaugacaccaugga

SEQ ID NO: 162036 - RNA, 22 nt, Human
ucucagagaagugaugagcaau

SEQ ID NO: 162037 - RNA, 22 nt, Human
ugagagucucagaccuccuggu

SEQ ID NO: 162038 - RNA, 22 nt, Human
uggacagguugaguaggaggag

SEQ ID NO: 162039 - RNA, 22 nt, Human
ggacagaggguugacagaguau

SEQ ID NO: 162040 - RNA, 22 nt, Human
ggcuuccuuucacuacccucag

SEQ ID NO: 162041 - RNA, 19 nt, Human
ccuggguccacucagacua

SEQ ID NO: 162042 - RNA, 21 nt, Human
acagagccgggcacaaagcug

SEQ ID NO: 162043 - RNA, 22 nt, Human
cacaggaggaggccagagcgua

SEQ ID NO: 162044 - RNA, 22 nt, Human
gcagggacugugaucucacaga

SEQ ID NO: 162045 - RNA, 22 nt, Human
gcaggagagccagcaggcuucc

SEQ ID NO: 162046 - RNA, 17 nt, Human
ggcagcugccacuuuuu

SEQ ID NO: 162047 - RNA, 19 nt, Human
cgcaggagccgaggugacc

SEQ ID NO: 162048 - RNA, 21 nt, Human
ugcuuuaugggaaaaauguca

SEQ ID NO: 162049 - RNA, 22 nt, Human
gcccaugcacuuucugugaugg

SEQ ID NO: 162050 - RNA, 22 nt, Human
cagauaaaggcuuacuaguagu

SEQ ID NO: 162051 - RNA, 22 nt, Human
cagggagggacaauugucaccu

SEQ ID NO: 162052 - RNA, 22 nt, Human
cuauugaauuaacuauuaaagu

SEQ ID NO: 162053 - RNA, 22 nt, Human
cagccugcuagggcaaugccuu

SEQ ID NO: 162054 - RNA, 22 nt, Human
ucuggcuccuggcuccacugcc

SEQ ID NO: 162055 - RNA, 17 nt, Human
acagagguuauacagac

SEQ ID NO: 162056 - RNA, 20 nt, Human
ucugaggcugagcucuacuu

SEQ ID NO: 162057 - RNA, 22 nt, Human
aaggagagagcuuugcuggaac

SEQ ID NO: 162058 - RNA, 22 nt, Human
acagcugggugcugcucagagc

SEQ ID NO: 162059 - RNA, 22 nt, Human
gggagggaggugcugguucacg

SEQ ID NO: 162060 - RNA, 22 nt, Human
agcuucuguucaucuuccaggc

SEQ ID NO: 162061 - RNA, 22 nt, Human
aaauugcaaaaguacuuuuagg

SEQ ID NO: 162062 - RNA, 22 nt, Human
ccucugggagacugcuacugag

SEQ ID NO: 162063 - RNA, 20 nt, Human
aauguauauuuuaugccagg

SEQ ID NO: 162064 - RNA, 22 nt, Human
caaggcugcugcgggucgcacc

SEQ ID NO: 162065 - RNA, 22 nt, Human
cuugaaagcuuugcgucuucua

SEQ ID NO: 162066 - RNA, 22 nt, Human
ugaagcagcaccauuuuagagc

SEQ ID NO: 162067 - RNA, 22 nt, Human
ugcagcccuuccuuccucuggg

SEQ ID NO: 162068 - RNA, 22 nt, Human
gcaggcucuucuuucugcccag

SEQ ID NO: 162069 - RNA, 18 nt, Human
gccugccuagagcuugcc

SEQ ID NO: 162070 - RNA, 22 nt, Human
auugaaaggcaaaguaggaagc

SEQ ID NO: 162071 - RNA, 22 nt, Human
caguuucuguuuuaaauagcag

SEQ ID NO: 162072 - RNA, 22 nt, Human
ccugcccuagagaugacacaau

SEQ ID NO: 162073 - RNA, 22 nt, Human
aagggagacaguugugugagga

SEQ ID NO: 162074 - RNA, 22 nt, Human
ucucucagcuuugagaccugcu

SEQ ID NO: 162075 - RNA, 22 nt, Human
aggcccagggcugcucucugaa

SEQ ID NO: 162076 - RNA, 22 nt, Human
ucaccuuagcuagaggaagaga

SEQ ID NO: 162077 - RNA, 22 nt, Human
uggcucugaccagguagaggag

SEQ ID NO: 162078 - RNA, 22 nt, Human
ugucucugaacagcuuacuaaa

SEQ ID NO: 162079 - RNA, 22 nt, Human
ccugcaggggagagacuucuag

SEQ ID NO: 162080 - RNA, 22 nt, Human
gcagcugauggaaguccuauug

SEQ ID NO: 162081 - RNA, 22 nt, Human
cagggagaagucuggucagucc

SEQ ID NO: 162082 - RNA, 22 nt, Human
cccagccuggugcacugugggg

SEQ ID NO: 162083 - RNA, 22 nt, Human
uuagaaaugauuucaccucuuu

SEQ ID NO: 162084 - RNA, 23 nt, Human
ggaguuggauuguacuugcugcu

SEQ ID NO: 162085 - RNA, 20 nt, Human
uacuugaauguugcagcagu

SEQ ID NO: 162086 - RNA, 22 nt, Human
uggggcuguccuuagucugaga

SEQ ID NO: 162087 - RNA, 22 nt, Human
gaagagcuuagacagaaucaaa

SEQ ID NO: 162088 - RNA, 19 nt, Human
cugaagucuuuucagcugg

SEQ ID NO: 162089 - RNA, 22 nt, Human
agauggguaacuggagucugcu

SEQ ID NO: 162090 - RNA, 21 nt, Human
ccagaggccucucuuggccac

SEQ ID NO: 162091 - RNA, 22 nt, Human
gcucaggagcucuugguggcgc

SEQ ID NO: 162092 - RNA, 18 nt, Human
uggcucugcagccagaug

SEQ ID NO: 162093 - RNA, 22 nt, Human
cccagcucucucaguucugcuu

SEQ ID NO: 162094 - RNA, 22 nt, Human
guagaagugaugucauguuaua

SEQ ID NO: 162095 - RNA, 22 nt, Human
auaguaacuggcauguuuauga

SEQ ID NO: 162096 - RNA, 22 nt, Human
ccaggaagccucagaugcugag

SEQ ID NO: 162097 - RNA, 22 nt, Human
ggcaggcuggcuuuguuccagg

SEQ ID NO: 162098 - RNA, 21 nt, Human
uagagaaaagaagcuguuccu

SEQ ID NO: 162099 - RNA, 22 nt, Human
uguguacaggccuugcuagacu

SEQ ID NO: 162100 - RNA, 22 nt, Human
gcagcuggacccacacggcuua

SEQ ID NO: 162101 - RNA, 20 nt, Human
agguggcuccugcugggggu

SEQ ID NO: 162102 - RNA, 22 nt, Human
agggucugacaaugugacuuag

SEQ ID NO: 162103 - RNA, 22 nt, Human
guaaaguucuauuugaauuuag

SEQ ID NO: 162104 - RNA, 22 nt, Human
caugucuggguauaugcauaug

SEQ ID NO: 162105 - RNA, 22 nt, Human
ccugggcaucucaugcaccugc

SEQ ID NO: 162106 - RNA, 21 nt, Human
gacaggggaagaagcaaggag

SEQ ID NO: 162107 - RNA, 22 nt, Human
cacagcagaaaguguaggagga

SEQ ID NO: 162108 - RNA, 22 nt, Human
uauucacaggcuggagugaugu

SEQ ID NO: 162109 - RNA, 22 nt, Human
auaaguucagguaaagaaauca

SEQ ID NO: 162110 - RNA, 22 nt, Human
caggagcugggucuggaagcag

SEQ ID NO: 162111 - RNA, 22 nt, Human
acuuugcaaugggcagaaccca

SEQ ID NO: 162112 - RNA, 22 nt, Human
agguuauaugucauacugaagu

SEQ ID NO: 162113 - RNA, 22 nt, Human
cuguacaucucugaggacagua

SEQ ID NO: 162114 - RNA, 22 nt, Human
aagagcuggagcugcuacagga

SEQ ID NO: 162115 - RNA, 22 nt, Human
uccuuuccagccucaccucagc

SEQ ID NO: 162116 - RNA, 22 nt, Human
uccugucagugaggcagaugaa

SEQ ID NO: 162117 - RNA, 22 nt, Human
uuccuuguuuguagcucuggga

SEQ ID NO: 162118 - RNA, 22 nt, Human
gagcuggugaucagcuggagga

SEQ ID NO: 162119 - RNA, 22 nt, Human
ucggagcuguagaugaaacccu

SEQ ID NO: 162120 - RNA, 22 nt, Human
ugcaggugccucuugagcuugu

SEQ ID NO: 162121 - RNA, 22 nt, Human
auaugccauuagcuagaaauaa

SEQ ID NO: 162122 - RNA, 22 nt, Human
aaaagaggagugguuuaugaca

SEQ ID NO: 162123 - RNA, 21 nt, Human
ggucuuccaaauaaggagaaa

SEQ ID NO: 162124 - RNA, 22 nt, Human
ggagauagacuuggugagccac

SEQ ID NO: 162125 - RNA, 22 nt, Human
gcuggcauuacaggagagaacc

SEQ ID NO: 162126 - RNA, 19 nt, Human
ccaguagagacagcugcag

SEQ ID NO: 162127 - RNA, 21 nt, Human
uccaggaguggcugggcaggg

SEQ ID NO: 162128 - RNA, 22 nt, Human
gagggcugaugcuuacuuauuu

SEQ ID NO: 162129 - RNA, 21 nt, Human
guggcccugccgcagugucca

SEQ ID NO: 162130 - RNA, 22 nt, Human
uguggccuccccacuucugggg

SEQ ID NO: 162131 - RNA, 22 nt, Human
uagggcagaguccaggaugggc

SEQ ID NO: 162132 - RNA, 22 nt, Human
gccagagcugagugagguucuu

SEQ ID NO: 162133 - RNA, 22 nt, Human
cuacauuuugugauuaugaaau

SEQ ID NO: 162134 - RNA, 22 nt, Human
uggaaagacauucagccgcugg

SEQ ID NO: 162135 - RNA, 22 nt, Human
ugccacccagccaggaguggga

SEQ ID NO: 162136 - RNA, 22 nt, Human
ucccagagucagagguggggcc

SEQ ID NO: 162137 - RNA, 22 nt, Human
ggcacugaucugauuucccucc

SEQ ID NO: 162138 - RNA, 22 nt, Human
aggucauuccagccauuccccu

SEQ ID NO: 162139 - RNA, 22 nt, Human
ccagcuugaagaugugcugguu

SEQ ID NO: 162140 - RNA, 22 nt, Human
aggaccugacuggcuccugcuu

SEQ ID NO: 162141 - RNA, 22 nt, Human
ccagggcacuuaggcccagccc

SEQ ID NO: 162142 - RNA, 22 nt, Human
cagcauuggguuaccuuuguuu

SEQ ID NO: 162143 - RNA, 22 nt, Human
uucacagggccacuggcaggag

SEQ ID NO: 162144 - RNA, 20 nt, Human
cagcugccuggcucugggau

SEQ ID NO: 162145 - RNA, 22 nt, Human
auuuaaaugcuuaagaggguuu

SEQ ID NO: 162146 - RNA, 20 nt, Human
auaaaauaacugccacaaga

SEQ ID NO: 162147 - RNA, 22 nt, Human
cuucuugcaauuuucaucuuau

SEQ ID NO: 162148 - RNA, 22 nt, Human
cauugcacucuggcuggaacgg

SEQ ID NO: 162149 - RNA, 21 nt, Human
aggucccagguuugggcagca

SEQ ID NO: 162150 - RNA, 22 nt, Human
cacagaauaaauugguaucaga

SEQ ID NO: 162151 - RNA, 22 nt, Human
ccugucugaaggcagggggaug

SEQ ID NO: 162152 - RNA, 22 nt, Human
ucugucugcucauuuaccucag

SEQ ID NO: 162153 - RNA, 22 nt, Human
gaagcccaggcuuccuuggcuu

SEQ ID NO: 162154 - RNA, 22 nt, Human
cacaagagagugcgcguugcaa

SEQ ID NO: 162155 - RNA, 22 nt, Human
acagggcagguggcuacugguc

SEQ ID NO: 162156 - RNA, 22 nt, Human
cauugaaaaacguugacugagu

SEQ ID NO: 162157 - RNA, 22 nt, Human
ggcuggagauaugucuggaaca

SEQ ID NO: 162158 - RNA, 22 nt, Human
uacuuuuagccuauuugauucu

SEQ ID NO: 162159 - RNA, 22 nt, Human
ccagucacagguguguuuauau

SEQ ID NO: 162160 - RNA, 22 nt, Human
accucaggauguggacacagaa

SEQ ID NO: 162161 - RNA, 22 nt, Human
ucagagugcagggaguagcagc

SEQ ID NO: 162162 - RNA, 22 nt, Human
cuggggaggcagggcugccccu

SEQ ID NO: 162163 - RNA, 22 nt, Human
ucuagaaacaugacauugaucu

SEQ ID NO: 162164 - RNA, 22 nt, Human
gggcucugguacuuccuggcuc

SEQ ID NO: 162165 - RNA, 22 nt, Human
ccaggccauucccagaguugcu

SEQ ID NO: 162166 - RNA, 22 nt, Human
aacaggagaguaaauauaugau

SEQ ID NO: 162167 - RNA, 19 nt, Human
cuugguuaugguaugaugc

SEQ ID NO: 162168 - RNA, 22 nt, Human
auuguggcuagacagucacaau

SEQ ID NO: 162169 - RNA, 22 nt, Human
ugauuuccccagucuugcugcu

SEQ ID NO: 162170 - RNA, 22 nt, Human
uggucucuucuuccaagauggc

SEQ ID NO: 162171 - RNA, 22 nt, Human
augcacuugcguguuugcaaau

SEQ ID NO: 162172 - RNA, 22 nt, Human
agcucccaauugacuugaacua

SEQ ID NO: 162173 - RNA, 22 nt, Human
ucagaggaaaggucagauggcu

SEQ ID NO: 162174 - RNA, 22 nt, Human
aaaguguugauaugugacaucc

SEQ ID NO: 162175 - RNA, 22 nt, Human
aaucacaauuacuuuugcacca

SEQ ID NO: 162176 - RNA, 23 nt, Human
aggaacugaggccuagggaggua

SEQ ID NO: 162177 - RNA, 22 nt, Human
ucagagcugcccaugcaagggg

SEQ ID NO: 162178 - RNA, 22 nt, Human
ugggcuggcccaccacaccucg

SEQ ID NO: 162179 - RNA, 21 nt, Human
cagaggcagguccugggacgg

SEQ ID NO: 162180 - RNA, 20 nt, Human
cugcugugugugccucagcc

SEQ ID NO: 162181 - RNA, 22 nt, Human
aaucuggcauuugagaguagga

SEQ ID NO: 162182 - RNA, 22 nt, Human
gccaggcuguggggaacuugaa

SEQ ID NO: 162183 - RNA, 22 nt, Human
uaugaagauauaucugaucucu

SEQ ID NO: 162184 - RNA, 22 nt, Human
auagaaauggcagcuggugcua

SEQ ID NO: 162185 - RNA, 21 nt, Human
acagggcaugcagcuggcugu

SEQ ID NO: 162186 - RNA, 18 nt, Human
gucaccuggaucagauua

SEQ ID NO: 162187 - RNA, 22 nt, Human
gcugccuucaguucugauucau

SEQ ID NO: 162188 - RNA, 22 nt, Human
gggcagagguucaacuucaaca

SEQ ID NO: 162189 - RNA, 22 nt, Human
gccuuugcaccaucagugcaau

SEQ ID NO: 162190 - RNA, 18 nt, Human
ugugguggagcugccuuc

SEQ ID NO: 162191 - RNA, 22 nt, Human
ugcuggggucauggggcgcccg

SEQ ID NO: 162192 - RNA, 18 nt, Human
cucucugggugaggacaa

SEQ ID NO: 162193 - RNA, 22 nt, Human
cuuuggaagugaccacaauccu

SEQ ID NO: 162194 - RNA, 20 nt, Human
ccagucccugagcaccaggg

SEQ ID NO: 162195 - RNA, 22 nt, Human
cuccagggagcugcgggagcca

SEQ ID NO: 162196 - RNA, 22 nt, Human
gggcugugcugaguaggaggug

SEQ ID NO: 162197 - RNA, 22 nt, Human
cacucaggcugugucaggagga

SEQ ID NO: 162198 - RNA, 22 nt, Human
ccugccagucacuaugucaccu

SEQ ID NO: 162199 - RNA, 22 nt, Human
aggcuauuuccacucuucucau

SEQ ID NO: 162200 - RNA, 22 nt, Human
ccucagggaggccucuguggcu

SEQ ID NO: 162201 - RNA, 20 nt, Human
ccugccuguguuugugauga

SEQ ID NO: 162202 - RNA, 22 nt, Human
guaagcaucugucucuucugca

SEQ ID NO: 162203 - RNA, 22 nt, Human
gcagagccaggagcccaggauc

SEQ ID NO: 162204 - RNA, 22 nt, Human
uggcuuucucccccagcuucuc

SEQ ID NO: 162205 - RNA, 22 nt, Human
gucauuucuguuucuucagugc

SEQ ID NO: 162206 - RNA, 22 nt, Human
acucugaggagugacuagaggu

SEQ ID NO: 162207 - RNA, 22 nt, Human
uggcagcacuugaacuugagcc

SEQ ID NO: 162208 - RNA, 22 nt, Human
cagcaggguauacagggaauuu

SEQ ID NO: 162209 - RNA, 22 nt, Human
uacauuugcuuugauuuucagc

SEQ ID NO: 162210 - RNA, 22 nt, Human
uuucaguggguuuauuucaugu

SEQ ID NO: 162211 - RNA, 22 nt, Human
aagccagcauuuucccauuccu

SEQ ID NO: 162212 - RNA, 22 nt, Human
gaggagggagcuggaagcucuu

SEQ ID NO: 162213 - RNA, 22 nt, Human
cagcaggcugcgauugcucauu

SEQ ID NO: 162214 - RNA, 22 nt, Human
gcugucugcaagccaggaaaug

SEQ ID NO: 162215 - RNA, 22 nt, Human
aagcagccuggacuugggcugg

SEQ ID NO: 162216 - RNA, 22 nt, Human
ccaggcauccauugcuuccucu

SEQ ID NO: 162217 - RNA, 22 nt, Human
aacuagaacgucuaguugcugg

SEQ ID NO: 162218 - RNA, 22 nt, Human
gggagggaaggaccuuaugaau

SEQ ID NO: 162219 - RNA, 22 nt, Human
agcugggucuugggccaggaga

SEQ ID NO: 162220 - RNA, 22 nt, Human
guuugcauaucugugaaaugga

SEQ ID NO: 162221 - RNA, 22 nt, Human
agccccaguaagggagggccug

SEQ ID NO: 162222 - RNA, 21 nt, Human
ucagggcagcugcucuucaga

SEQ ID NO: 162223 - RNA, 22 nt, Human
ucaacagaagugauagcuauua

SEQ ID NO: 162224 - RNA, 22 nt, Human
aggcuucuacguggucccaggg

SEQ ID NO: 162225 - RNA, 22 nt, Human
cccaggagguggagguugcagu

SEQ ID NO: 162226 - RNA, 22 nt, Human
ugaugggaaaaugaggccuggg

SEQ ID NO: 162227 - RNA, 22 nt, Human
aaaagacauaugugggcauucu

SEQ ID NO: 162228 - RNA, 22 nt, Human
uggggcugucccgguuuggcga

SEQ ID NO: 162229 - RNA, 22 nt, Human
agauuucagguuggggcagaag

SEQ ID NO: 162230 - RNA, 22 nt, Human
aaaguuuccugcuaagugcuau

SEQ ID NO: 162231 - RNA, 21 nt, Human
gcucuuggaaggggcucagcu

SEQ ID NO: 162232 - RNA, 22 nt, Human
cugagauggaguuuugcucuug

SEQ ID NO: 162233 - RNA, 22 nt, Human
gccugccuuugugaggaagcgg

SEQ ID NO: 162234 - RNA, 22 nt, Human
uggcucaguuaggucagaaaca

SEQ ID NO: 162235 - RNA, 20 nt, Human
uggagccaaggugugucugg

SEQ ID NO: 162236 - RNA, 22 nt, Human
gggaaauugucaacacucucaa

SEQ ID NO: 162237 - RNA, 22 nt, Human
ccagcagcucccucaggguccg

SEQ ID NO: 162238 - RNA, 22 nt, Human
agggucccgaaggagacagcaa

SEQ ID NO: 162239 - RNA, 22 nt, Human
ucccuggguccugcuugcucuc

SEQ ID NO: 162240 - RNA, 23 nt, Human
ucuuuccucagcacacaccaaga

SEQ ID NO: 162241 - RNA, 22 nt, Human
ggggcugggauuugaacccagg

SEQ ID NO: 162242 - RNA, 22 nt, Human
gcugaagagagaugcguccagc

SEQ ID NO: 162243 - RNA, 19 nt, Human
ucaaagcaagcauguucug

SEQ ID NO: 162244 - RNA, 22 nt, Human
aucaauucuuaggaaaauagcu

SEQ ID NO: 162245 - RNA, 22 nt, Human
ggccugcuucucagugagcuug

SEQ ID NO: 162246 - RNA, 22 nt, Human
ggugaggcagguggcugcugag

SEQ ID NO: 162247 - RNA, 22 nt, Human
ccaaggaggccccaggucagcu

SEQ ID NO: 162248 - RNA, 22 nt, Human
ccugaagagcacucuagaguug

SEQ ID NO: 162249 - RNA, 22 nt, Human
auguaguguagagauuagucuc

SEQ ID NO: 162250 - RNA, 22 nt, Human
aaugagcuagaccugcuuccuc

SEQ ID NO: 162251 - RNA, 22 nt, Human
gagggcaggggucuugcacggu

SEQ ID NO: 162252 - RNA, 22 nt, Human
gucccagaugucuggaacuccc

SEQ ID NO: 162253 - RNA, 22 nt, Human
uuugcauuuguuuagaaccuga

SEQ ID NO: 162254 - RNA, 22 nt, Human
agcaguggaccucagugcuauu

SEQ ID NO: 162255 - RNA, 22 nt, Human
ccaggcugagcaugauuggagc

SEQ ID NO: 162256 - RNA, 17 nt, Human
agcagcuggguugaucu

SEQ ID NO: 162257 - RNA, 22 nt, Human
ucugagccguauggcuuggcua

SEQ ID NO: 162258 - RNA, 22 nt, Human
acagaaugcguagugcauguug

SEQ ID NO: 162259 - RNA, 23 nt, Human
acagagguccaaacaguauaagc

SEQ ID NO: 162260 - RNA, 22 nt, Human
ggagaagggacagacucagcuu

SEQ ID NO: 162261 - RNA, 22 nt, Human
gcaggcagucaucuuucauauu

SEQ ID NO: 162262 - RNA, 22 nt, Human
gggcuacagacaugcucuaagc

SEQ ID NO: 162263 - RNA, 22 nt, Human
uucagagccacuucaagucuaa

SEQ ID NO: 162264 - RNA, 22 nt, Human
auuuguaauuucuuaucugugu

SEQ ID NO: 162265 - RNA, 22 nt, Human
aggcagaggagaaugaucuucc

SEQ ID NO: 162266 - RNA, 22 nt, Human
gagucacauuaauuuaauuuua

SEQ ID NO: 162267 - RNA, 21 nt, Human
ucugucugguuuuagaguggc

SEQ ID NO: 162268 - RNA, 22 nt, Human
gcugucuguggugucagcugac

SEQ ID NO: 162269 - RNA, 22 nt, Human
cagggagcuggcuggcgugagu

SEQ ID NO: 162270 - RNA, 22 nt, Human
agaauaguggcaaugacugcac

SEQ ID NO: 162271 - RNA, 22 nt, Human
ccagcagcuguggcuuugccuc

SEQ ID NO: 162272 - RNA, 22 nt, Human
aggagcagaccguaguccugca

SEQ ID NO: 162273 - RNA, 22 nt, Human
agugugaccuuauuuggaaaca

SEQ ID NO: 162274 - RNA, 22 nt, Human
aaaugcauugguuucuacuugu

SEQ ID NO: 162275 - RNA, 22 nt, Human
cuggugggaggcaagguggaag

SEQ ID NO: 162276 - RNA, 22 nt, Human
ggcauggcuggguucuggugag

SEQ ID NO: 162277 - RNA, 22 nt, Human
gccaggcuggccagcaccuucu

SEQ ID NO: 162278 - RNA, 22 nt, Human
agcugccacugagggugcacag

SEQ ID NO: 162279 - RNA, 21 nt, Human
cugugcuuuuuaagugugaug

SEQ ID NO: 162280 - RNA, 22 nt, Human
ccagcuccaggacugggagcug

SEQ ID NO: 162281 - RNA, 22 nt, Human
cccuggagggauuucucaauca

SEQ ID NO: 162282 - RNA, 22 nt, Human
cuggcugcuuguagacucgacu

SEQ ID NO: 162283 - RNA, 23 nt, Human
gccucagagaaacagcugcacac

SEQ ID NO: 162284 - RNA, 22 nt, Human
cuggccucauagccaagcugug

SEQ ID NO: 162285 - RNA, 22 nt, Human
caggggcaggugugagaucauc

SEQ ID NO: 162286 - RNA, 22 nt, Human
ugcagugccucggcagugcagc

SEQ ID NO: 162287 - RNA, 22 nt, Human
aggcaucugaguuugcaagcuu

SEQ ID NO: 162288 - RNA, 22 nt, Human
ccagccaggcauugcaaacuga

SEQ ID NO: 162289 - RNA, 23 nt, Human
ugcagccacucaggagcucagug

SEQ ID NO: 162290 - RNA, 22 nt, Human
uguaugcaccauuguauuaccu

SEQ ID NO: 162291 - RNA, 22 nt, Human
aacccuggggcagcugcuaggg

SEQ ID NO: 162292 - RNA, 20 nt, Human
ugagugauggaggcggguca

SEQ ID NO: 162293 - RNA, 22 nt, Human
aggucauuaaaguuaaaugagg

SEQ ID NO: 162294 - RNA, 22 nt, Human
agggaguguaaauggugcucag

SEQ ID NO: 162295 - RNA, 22 nt, Human
uuucacaauuuuaaggagcaaa

SEQ ID NO: 162296 - RNA, 22 nt, Human
ugagcugggcugggcugagcug

SEQ ID NO: 162297 - RNA, 22 nt, Human
ugcaggcuuuagccccauggcu

SEQ ID NO: 162298 - RNA, 22 nt, Human
gagacacacacaggagguggca

SEQ ID NO: 162299 - RNA, 22 nt, Human
gucaaacaaauuaacauaucca

SEQ ID NO: 162300 - RNA, 22 nt, Human
ggcagugaaaaaguauguuucc

SEQ ID NO: 162301 - RNA, 22 nt, Human
uuguuuguaugcugagaagaau

SEQ ID NO: 162302 - RNA, 22 nt, Human
ggcagcagaacuggcccuguau

SEQ ID NO: 162303 - RNA, 22 nt, Human
uagcugugagcacccaggcugu

SEQ ID NO: 162304 - RNA, 21 nt, Human
uggcagaguugaguaguuaug

SEQ ID NO: 162305 - RNA, 20 nt, Human
gauuucaaagcagaguggcc

SEQ ID NO: 162306 - RNA, 22 nt, Human
cuuccugcaggacagccaucug

SEQ ID NO: 162307 - RNA, 22 nt, Human
ugcagcugguuuagaacuagau

SEQ ID NO: 162308 - RNA, 22 nt, Human
ucccagccuuccagucugguuu

SEQ ID NO: 162309 - RNA, 22 nt, Human
agggcagagcacugaauuggga

SEQ ID NO: 162310 - RNA, 22 nt, Human
gaagcagcuggugagauggagc

SEQ ID NO: 162311 - RNA, 22 nt, Human
agaaauguauucuguauguuuu

SEQ ID NO: 162312 - RNA, 22 nt, Human
gcagaagcugggcagcgaggug

SEQ ID NO: 162313 - RNA, 22 nt, Human
uggccugcagcucucagggaag

SEQ ID NO: 162314 - RNA, 22 nt, Human
cagcugagcaucacuagucugg

SEQ ID NO: 162315 - RNA, 22 nt, Human
acaaaugcagcauaaagugaac

SEQ ID NO: 162316 - RNA, 20 nt, Human
cucucuggaaggugggagcc

SEQ ID NO: 162317 - RNA, 22 nt, Human
uauguacaugauuucauuugcu

SEQ ID NO: 162318 - RNA, 22 nt, Human
uuacugaaaauucuucaggauu

SEQ ID NO: 162319 - RNA, 22 nt, Human
augccuggacugacaugcacug

SEQ ID NO: 162320 - RNA, 22 nt, Human
agguggaacguucaggugcuag

SEQ ID NO: 162321 - RNA, 22 nt, Human
gaaaugugcagaauguguuaga

SEQ ID NO: 162322 - RNA, 22 nt, Human
gugcagugagcagugcagcacc

SEQ ID NO: 162323 - RNA, 22 nt, Human
gagaaccucuccacaagucugg

SEQ ID NO: 162324 - RNA, 22 nt, Human
gucuugaucuccugaccuugug

SEQ ID NO: 162325 - RNA, 22 nt, Human
auaaggcagaaaugauucuagu

SEQ ID NO: 162326 - RNA, 22 nt, Human
ucucagaggucuucagccucug

SEQ ID NO: 162327 - RNA, 22 nt, Human
agaaagcacucugucuuuuacc

SEQ ID NO: 162328 - RNA, 22 nt, Human
cuccuggacauggagcggagga

SEQ ID NO: 162329 - RNA, 22 nt, Human
ucuuccucuagaucugaggccc

SEQ ID NO: 162330 - RNA, 22 nt, Human
gaaaggugccccauaggcagga

SEQ ID NO: 162331 - RNA, 22 nt, Human
auaucuuuguuuuugccaagau

SEQ ID NO: 162332 - RNA, 22 nt, Human
cuucuggggauggagcccagaa

SEQ ID NO: 162333 - RNA, 22 nt, Human
ugaaggugucuuugugaacauc

SEQ ID NO: 162334 - RNA, 22 nt, Human
ugggcagaaaucaguaucagau

SEQ ID NO: 162335 - RNA, 22 nt, Human
ccagcagagcauggggaggaag

SEQ ID NO: 162336 - RNA, 22 nt, Human
ucucuggguuuuuguccuguac

SEQ ID NO: 162337 - RNA, 22 nt, Human
ugacacaggcagcucccagcac

SEQ ID NO: 162338 - RNA, 22 nt, Human
ggcacugaaccaggacacaagc

SEQ ID NO: 162339 - RNA, 22 nt, Human
gaaaugugggucaugacccauu

SEQ ID NO: 162340 - RNA, 22 nt, Human
gaguggggcccacugcugggug

SEQ ID NO: 162341 - RNA, 22 nt, Human
ugccuguccugaggaugagggu

SEQ ID NO: 162342 - RNA, 22 nt, Human
gcagugaaacaauaggaucaaa

SEQ ID NO: 162343 - RNA, 22 nt, Human
gaggcaggguguugauuacaga

SEQ ID NO: 162344 - RNA, 22 nt, Human
uggccugucuuguugugcuaga

SEQ ID NO: 162345 - RNA, 17 nt, Human
uugggagagaaagguau

SEQ ID NO: 162346 - RNA, 22 nt, Human
ucccaagugucuuggaccaggg

SEQ ID NO: 162347 - RNA, 22 nt, Human
ugcauauuauguguaucugucu

SEQ ID NO: 162348 - RNA, 22 nt, Human
gcacuaaaccaacauguaauaa

SEQ ID NO: 162349 - RNA, 22 nt, Human
uggugcuguggaggggcagaag

SEQ ID NO: 162350 - RNA, 22 nt, Human
gcugggagcaaguacucaucuu

SEQ ID NO: 162351 - RNA, 22 nt, Human
uggcagcaauuugugauguuga

SEQ ID NO: 162352 - RNA, 22 nt, Human
uguacaaugccagggaacacca

SEQ ID NO: 162353 - RNA, 22 nt, Human
ugcacuggggucccagcgcacg

SEQ ID NO: 162354 - RNA, 22 nt, Human
cugccacuagcuuucacaucuu

SEQ ID NO: 162355 - RNA, 22 nt, Human
uggagccuguguuucugcccag

SEQ ID NO: 162356 - RNA, 22 nt, Human
cccaagcagggugcagaggcau

SEQ ID NO: 162357 - RNA, 22 nt, Human
aggugauguccacagcuugcag

SEQ ID NO: 162358 - RNA, 22 nt, Human
acacugcagaugaaagcauaag

SEQ ID NO: 162359 - RNA, 22 nt, Human
aaguuauugcagcaauccaagu

SEQ ID NO: 162360 - RNA, 22 nt, Human
aagagggcugcaaucuuauugc

SEQ ID NO: 162361 - RNA, 19 nt, Human
ugaagcaggcagagaagau

SEQ ID NO: 162362 - RNA, 22 nt, Human
aucuggcucucucauuuacaaa

SEQ ID NO: 162363 - RNA, 22 nt, Human
gcagggcugcagagggcacugu

SEQ ID NO: 162364 - RNA, 22 nt, Human
caaagugcuaggauuacaggcc

SEQ ID NO: 162365 - RNA, 22 nt, Human
cagcagcaaaucuagaagagga

SEQ ID NO: 162366 - RNA, 20 nt, Human
aggagaugauccagagucag

SEQ ID NO: 162367 - RNA, 22 nt, Human
uccucaggcugccuggaagacu

SEQ ID NO: 162368 - RNA, 22 nt, Human
ugauuuccacgugcacccaggu

SEQ ID NO: 162369 - RNA, 22 nt, Human
cucuggaguuagugaucugggc

SEQ ID NO: 162370 - RNA, 22 nt, Human
uaaauguguuagucaugguuuu

SEQ ID NO: 162371 - RNA, 22 nt, Human
uaugcacacauuagcacagggu

SEQ ID NO: 162372 - RNA, 23 nt, Human
cagggcugggcuugguguuaggc

SEQ ID NO: 162373 - RNA, 22 nt, Human
caguagcauguaauaaagacag

SEQ ID NO: 162374 - RNA, 22 nt, Human
gcucccagcauugcugcugaau

SEQ ID NO: 162375 - RNA, 22 nt, Human
ucaggcacugcuuucugauaug

SEQ ID NO: 162376 - RNA, 22 nt, Human
cucuugaagcaggggccaguuc

SEQ ID NO: 162377 - RNA, 22 nt, Human
ucauugcagacuaacaaucuca

SEQ ID NO: 162378 - RNA, 22 nt, Human
cccccaaggccaggcugagacc

SEQ ID NO: 162379 - RNA, 22 nt, Human
cacucugagaaguacaagcucc

SEQ ID NO: 162380 - RNA, 18 nt, Human
ggcugccuguuccugaag

SEQ ID NO: 162381 - RNA, 22 nt, Human
agucccagcuucccccaugcag

SEQ ID NO: 162382 - RNA, 22 nt, Human
ugcacacacgcggcacaucugu

SEQ ID NO: 162383 - RNA, 22 nt, Human
gugucccaggccucuggaauua

SEQ ID NO: 162384 - RNA, 22 nt, Human
gcugucuugcucacucuugcag

SEQ ID NO: 162385 - RNA, 22 nt, Human
uccuugaagagugggcggucga

SEQ ID NO: 162386 - RNA, 20 nt, Human
cagccuccacucacucagcu

SEQ ID NO: 162387 - RNA, 22 nt, Human
gagcagaacaggccggguggga

SEQ ID NO: 162388 - RNA, 22 nt, Human
cacauuuaauccuuuauaagua

SEQ ID NO: 162389 - RNA, 22 nt, Human
caguacuuaguucucaugguuu

SEQ ID NO: 162390 - RNA, 22 nt, Human
agaagcaguuauuuuuugcaca

SEQ ID NO: 162391 - RNA, 21 nt, Human
ggggcagagcuaggcccugca

SEQ ID NO: 162392 - RNA, 22 nt, Human
gcugcagcuguaggacacaauu

SEQ ID NO: 162393 - RNA, 22 nt, Human
uaccuuggguugaguucauucu

SEQ ID NO: 162394 - RNA, 21 nt, Human
acagaugggaugagcacacug

SEQ ID NO: 162395 - RNA, 20 nt, Human
ggucccugcccucugucauc

SEQ ID NO: 162396 - RNA, 20 nt, Human
uacagaaacaggacuuuugg

SEQ ID NO: 162397 - RNA, 20 nt, Human
ugcagcuucaccugugucau

SEQ ID NO: 162398 - RNA, 22 nt, Human
accucccagcucugagcuuggg

SEQ ID NO: 162399 - RNA, 22 nt, Human
ccaggguguagggauuccagau

SEQ ID NO: 162400 - RNA, 22 nt, Human
ucaggaucggccuuuuuuuaag

SEQ ID NO: 162401 - RNA, 22 nt, Human
ucccaggaucugagggcagaga

SEQ ID NO: 162402 - RNA, 22 nt, Human
ucugcugcugagcacacuccua

SEQ ID NO: 162403 - RNA, 22 nt, Human
cuccuuccccuacucagcaucc

SEQ ID NO: 162404 - RNA, 22 nt, Human
ccuuucucuuggauaccgauug

SEQ ID NO: 162405 - RNA, 22 nt, Human
ggagccugacagugcccagcau

SEQ ID NO: 162406 - RNA, 22 nt, Human
guguccagggccguguugucuu

SEQ ID NO: 162407 - RNA, 20 nt, Human
uccagggcuagggagcucau

SEQ ID NO: 162408 - RNA, 22 nt, Human
ugaagcaacuggacaaguuggc

SEQ ID NO: 162409 - RNA, 22 nt, Human
gaguguucccacaccccaguug

SEQ ID NO: 162410 - RNA, 22 nt, Human
caucacuguccaaaguucaguu

SEQ ID NO: 162411 - RNA, 23 nt, Human
caggcaggaugaggacuacacuc

SEQ ID NO: 162412 - RNA, 22 nt, Human
uacauggugguggcacuugacu

SEQ ID NO: 162413 - RNA, 22 nt, Human
aacagcagggggaccugcuggu

SEQ ID NO: 162414 - RNA, 22 nt, Human
gcugggagccguaccugucacg

SEQ ID NO: 162415 - RNA, 22 nt, Human
accugaggcuguuagucuaggu

SEQ ID NO: 162416 - RNA, 19 nt, Human
gccugccuggguuucugag

SEQ ID NO: 162417 - RNA, 22 nt, Human
agcagccacagucugggacagg

SEQ ID NO: 162418 - RNA, 22 nt, Human
cugcucuggggaagccagaugu

SEQ ID NO: 162419 - RNA, 22 nt, Human
ucccagggucaguggugaggcc

SEQ ID NO: 162420 - RNA, 22 nt, Human
aggccugggucucgugccuacc

SEQ ID NO: 162421 - RNA, 22 nt, Human
aggagagucuugagucacuggu

SEQ ID NO: 162422 - RNA, 22 nt, Human
gcaagcugcuuaagcucauugu

SEQ ID NO: 162423 - RNA, 22 nt, Human
cugcagaggguuugagcauccu

SEQ ID NO: 162424 - RNA, 22 nt, Human
uuauguaccugaauuaguaaag

SEQ ID NO: 162425 - RNA, 22 nt, Human
ucaaaugcaggucuggucuugg

SEQ ID NO: 162426 - RNA, 22 nt, Human
ucaggaucaggggccuuuccuu

SEQ ID NO: 162427 - RNA, 22 nt, Human
uugugucugggggagugacauc

SEQ ID NO: 162428 - RNA, 22 nt, Human
ccaaaguccacaguuuacauua

SEQ ID NO: 162429 - RNA, 20 nt, Human
ucacauccucucccaacaug

SEQ ID NO: 162430 - RNA, 22 nt, Human
agugaaauugcuguaagaggaa

SEQ ID NO: 162431 - RNA, 23 nt, Human
gagguacagcaccagugaauagg

SEQ ID NO: 162432 - RNA, 22 nt, Human
ucucagagaggggccgggccuu

SEQ ID NO: 162433 - RNA, 22 nt, Human
aaauacagaguugcuuaaaagc

SEQ ID NO: 162434 - RNA, 22 nt, Human
augcaguaaaauaggagguaau

SEQ ID NO: 162435 - RNA, 22 nt, Human
agccuggacagcuacggagaac

SEQ ID NO: 162436 - RNA, 22 nt, Human
agcagccagaaauccagaggug

SEQ ID NO: 162437 - RNA, 22 nt, Human
caugccaguuuugagaugcacc

SEQ ID NO: 162438 - RNA, 22 nt, Human
auuugucuuuggaccugugaga

SEQ ID NO: 162439 - RNA, 22 nt, Human
uggcucagcugucacagccugg

SEQ ID NO: 162440 - RNA, 22 nt, Human
agagggcccauguugggcugcu

SEQ ID NO: 162441 - RNA, 22 nt, Human
gcaugguggccuuaggguagcc

SEQ ID NO: 162442 - RNA, 22 nt, Human
agccaacuaggagauuaaggua

SEQ ID NO: 162443 - RNA, 22 nt, Human
ggucucagcccucgccagcagc

SEQ ID NO: 162444 - RNA, 22 nt, Human
gguuugcauucugaaaggcuca

SEQ ID NO: 162445 - RNA, 22 nt, Human
acugugcaugaaccgaaacaaa

SEQ ID NO: 162446 - RNA, 21 nt, Human
ugggagagggcucagcuaccc

SEQ ID NO: 162447 - RNA, 22 nt, Human
auggauaagaacaaauaucuga

SEQ ID NO: 162448 - RNA, 22 nt, Human
gcugucagcgcccaaggagcuc

SEQ ID NO: 162449 - RNA, 22 nt, Human
uagagaaauaagcuuugccuug

SEQ ID NO: 162450 - RNA, 22 nt, Human
uugcucagcacuggagccagcu

SEQ ID NO: 162451 - RNA, 22 nt, Human
ggagccugugcccaagcccaga

SEQ ID NO: 162452 - RNA, 22 nt, Human
gagcuguccgccccugggccga

SEQ ID NO: 162453 - RNA, 22 nt, Human
gccugccuguuggcugaggugc

SEQ ID NO: 162454 - RNA, 22 nt, Human
ucuggccaggauggcaagacca

SEQ ID NO: 162455 - RNA, 22 nt, Human
uuuaccaagcuuuaauuacaua

SEQ ID NO: 162456 - RNA, 22 nt, Human
ccucugcucccuggugucugag

SEQ ID NO: 162457 - RNA, 22 nt, Human
gguggccuccagggcauaggug

SEQ ID NO: 162458 - RNA, 22 nt, Human
uaaggucauggugaauaauaag

SEQ ID NO: 162459 - RNA, 22 nt, Human
uuugcauugcagugguuuacag

SEQ ID NO: 162460 - RNA, 22 nt, Human
cugggagauugcuagagaugca

SEQ ID NO: 162461 - RNA, 22 nt, Human
cacaaugcguacauauaucaaa

SEQ ID NO: 162462 - RNA, 22 nt, Human
gcagggugccgacuucagggau

SEQ ID NO: 162463 - RNA, 21 nt, Human
gccagggaagagaguuggcug

SEQ ID NO: 162464 - RNA, 22 nt, Human
cugagcugcggcaggcaccugg

SEQ ID NO: 162465 - RNA, 19 nt, Human
uuggaaggagccagagugg

SEQ ID NO: 162466 - RNA, 19 nt, Human
cugugcaggccgggcugag

SEQ ID NO: 162467 - RNA, 22 nt, Human
gagaagguggaccugaaggagc

SEQ ID NO: 162468 - RNA, 22 nt, Human
ucuguaucuaauuuuacaguag

SEQ ID NO: 162469 - RNA, 22 nt, Human
aggcugcuggcaggcguggacg

SEQ ID NO: 162470 - RNA, 22 nt, Human
ccuggagccccucuggccagcc

SEQ ID NO: 162471 - RNA, 22 nt, Human
uaccuuuugcuuauuaugacac

SEQ ID NO: 162472 - RNA, 22 nt, Human
ggcuagaacuuuacacuuugca

SEQ ID NO: 162473 - RNA, 19 nt, Human
ucucagaggaaaaauugcu

SEQ ID NO: 162474 - RNA, 22 nt, Human
ugcagcucauugguguccuggu

SEQ ID NO: 162475 - RNA, 22 nt, Human
aggugagugugacugcaagaga

SEQ ID NO: 162476 - RNA, 22 nt, Human
ccucagagaaagguauggcuga

SEQ ID NO: 162477 - RNA, 22 nt, Human
aagauguaucaguuaagucuuc

SEQ ID NO: 162478 - RNA, 23 nt, Human
ggcagagagcauggcuggggccc

SEQ ID NO: 162479 - RNA, 22 nt, Human
caggcagcagccacucugguau

SEQ ID NO: 162480 - RNA, 19 nt, Human
caucuggaugauucuccug

SEQ ID NO: 162481 - RNA, 20 nt, Human
agaaucugacccagagagac

SEQ ID NO: 162482 - RNA, 22 nt, Human
gccuccuggccuuugcuccuca

SEQ ID NO: 162483 - RNA, 19 nt, Human
agcuggggcgguguguguu

SEQ ID NO: 162484 - RNA, 22 nt, Human
ugggggugaaagucuggacagu

SEQ ID NO: 162485 - RNA, 22 nt, Human
cauuauguucaguagcuuaaaa

SEQ ID NO: 162486 - RNA, 22 nt, Human
uuucauaaugucacagucaaaa

SEQ ID NO: 162487 - RNA, 22 nt, Human
caggaaagaaaugagaacacca

SEQ ID NO: 162488 - RNA, 22 nt, Human
uccuggaggcaaaugaagacuc

SEQ ID NO: 162489 - RNA, 22 nt, Human
gcccaggcuggagugcaguagc

SEQ ID NO: 162490 - RNA, 22 nt, Human
auuucacucuuaauugcuuccu

SEQ ID NO: 162491 - RNA, 22 nt, Human
gcagagugggagcccagggcug

SEQ ID NO: 162492 - RNA, 22 nt, Human
aaauguauccuacuuccugagu

SEQ ID NO: 162493 - RNA, 22 nt, Human
ggaggguuagcaaaggcacaga

SEQ ID NO: 162494 - RNA, 22 nt, Human
ccagcucuggcuucuugcuggg

SEQ ID NO: 162495 - RNA, 22 nt, Human
ggcucagggaaugaggaagaau

SEQ ID NO: 162496 - RNA, 22 nt, Human
cucaggguaaugaaagacgaau

SEQ ID NO: 162497 - RNA, 22 nt, Human
ugccucugugugcaggugagca

SEQ ID NO: 162498 - RNA, 22 nt, Human
ggcucuggugcccuggcuccca

SEQ ID NO: 162499 - RNA, 22 nt, Human
uuguuucagcuguaugcuaugu

SEQ ID NO: 162500 - RNA, 22 nt, Human
ucagggcaagucucagaagguu

SEQ ID NO: 162501 - RNA, 22 nt, Human
uccuucagccaugggcucucca

SEQ ID NO: 162502 - RNA, 22 nt, Human
gaggggcugggcagucccugga

SEQ ID NO: 162503 - RNA, 22 nt, Human
uuuauugcauacacaaauguca

SEQ ID NO: 162504 - RNA, 17 nt, Human
uccuucagggccucaca

SEQ ID NO: 162505 - RNA, 22 nt, Human
ccugccaggcuuugggcuucug

SEQ ID NO: 162506 - RNA, 22 nt, Human
cuggccugaucucaugcugucc

SEQ ID NO: 162507 - RNA, 22 nt, Human
accccagaggcggaggcugcag

SEQ ID NO: 162508 - RNA, 22 nt, Human
gcuggccauggggagugaggag

SEQ ID NO: 162509 - RNA, 22 nt, Human
ggcuggcuugccaagcucaggg

SEQ ID NO: 162510 - RNA, 22 nt, Human
accucugcucaagaccccuccg

SEQ ID NO: 162511 - RNA, 21 nt, Human
uuuuuucuugcgugaggccug

SEQ ID NO: 162512 - RNA, 22 nt, Human
cagagcagguaucuuuggugaa

SEQ ID NO: 162513 - RNA, 22 nt, Human
cuggagcaggcuugucccagcu

SEQ ID NO: 162514 - RNA, 22 nt, Human
aggggugugcauccuggaggau

SEQ ID NO: 162515 - RNA, 22 nt, Human
ugggccaggauuucaagacccu

SEQ ID NO: 162516 - RNA, 22 nt, Human
cugcugggcagaggcugcauga

SEQ ID NO: 162517 - RNA, 21 nt, Human
gggccuggcugcgcaggacgg

SEQ ID NO: 162518 - RNA, 22 nt, Human
cagggcugaaaucaagguguag

SEQ ID NO: 162519 - RNA, 22 nt, Human
caggagugcagguggugaggca

SEQ ID NO: 162520 - RNA, 22 nt, Human
ggccugcuauuggugggcagac

SEQ ID NO: 162521 - RNA, 22 nt, Human
uuugaguugcuuauuuaauagg

SEQ ID NO: 162522 - RNA, 22 nt, Human
ccugggcuggaguacagcagug

SEQ ID NO: 162523 - RNA, 22 nt, Human
gccuggcaaggcccuguugacu

SEQ ID NO: 162524 - RNA, 22 nt, Human
ucaugcaaggcugaaacauggu

SEQ ID NO: 162525 - RNA, 22 nt, Human
gccaggcagcaggaagccagug

SEQ ID NO: 162526 - RNA, 22 nt, Human
caggcugggcagccuccccggc

SEQ ID NO: 162527 - RNA, 22 nt, Human
uuguaacagguacuaaauaacu

SEQ ID NO: 162528 - RNA, 22 nt, Human
uuuaaaaaacuagucugagucu

SEQ ID NO: 162529 - RNA, 22 nt, Human
gcuggccugggcagccugucgg

SEQ ID NO: 162530 - RNA, 22 nt, Human
ugugucccuuggaaccucagcu

SEQ ID NO: 162531 - RNA, 22 nt, Human
cuuauuauaaaauccuguuuga

SEQ ID NO: 162532 - RNA, 22 nt, Human
gcuggcuccucuguccucacgg

SEQ ID NO: 162533 - RNA, 22 nt, Human
gccucaggacuggcauacucau

SEQ ID NO: 162534 - RNA, 22 nt, Human
guggcccaggcuuggcgcuggc

SEQ ID NO: 162535 - RNA, 22 nt, Human
gucccuggaauggacucugcgc

SEQ ID NO: 162536 - RNA, 22 nt, Human
agagcuuagaauuucagaugau

SEQ ID NO: 162537 - RNA, 22 nt, Human
uagcagggaagaugaucagaau

SEQ ID NO: 162538 - RNA, 22 nt, Human
ugugcaguuucuauguugucca

SEQ ID NO: 162539 - RNA, 22 nt, Human
gccuucaguaguauccucauga

SEQ ID NO: 162540 - RNA, 22 nt, Human
ugcaguggaagagguggagauc

SEQ ID NO: 162541 - RNA, 22 nt, Human
aguguugucaaacggcucagca

SEQ ID NO: 162542 - RNA, 21 nt, Human
agaaauguaucauucuuuucc

SEQ ID NO: 162543 - RNA, 22 nt, Human
agggcagaaaccaccuugaugg

SEQ ID NO: 162544 - RNA, 22 nt, Human
ucaaugauuagaguuuagugug

SEQ ID NO: 162545 - RNA, 21 nt, Human
ucucugggcccuccugugggg

SEQ ID NO: 162546 - RNA, 22 nt, Human
aaaugucuuucuucugcuacgu

SEQ ID NO: 162547 - RNA, 22 nt, Human
aaaguguaaggaauuuaaguaa

SEQ ID NO: 162548 - RNA, 22 nt, Human
cccucagcuccacccucagcag

SEQ ID NO: 162549 - RNA, 22 nt, Human
caggggacaguaugguggauga

SEQ ID NO: 162550 - RNA, 23 nt, Human
ucacagggcacuggcugggguug

SEQ ID NO: 162551 - RNA, 22 nt, Human
ugcugccaagcccgugcuccug

SEQ ID NO: 162552 - RNA, 22 nt, Human
uuuuuaagcuccuuugauguca

SEQ ID NO: 162553 - RNA, 22 nt, Human
gcagcuguggguuccaagucua

SEQ ID NO: 162554 - RNA, 22 nt, Human
acauuucuccuacuuguuauuu

SEQ ID NO: 162555 - RNA, 22 nt, Human
caugcuccaaaaacaagagaau

SEQ ID NO: 162556 - RNA, 22 nt, Human
agggcuggcuaggugcguuccc

SEQ ID NO: 162557 - RNA, 22 nt, Human
ugaaaguuacaggaaaacagau

SEQ ID NO: 162558 - RNA, 22 nt, Human
gaggccagaaugagcugaaugc

SEQ ID NO: 162559 - RNA, 22 nt, Human
ggucucagacuggcaggcagug

SEQ ID NO: 162560 - RNA, 21 nt, Human
acagcagggcuggcaugacag

SEQ ID NO: 162561 - RNA, 22 nt, Human
guggccuggcgagcuggcgcgg

SEQ ID NO: 162562 - RNA, 22 nt, Human
uccucuggcccagcugccucug

SEQ ID NO: 162563 - RNA, 22 nt, Human
ucaguuuuuaaaugauauaauu

SEQ ID NO: 162564 - RNA, 22 nt, Human
agcaccaucagaugcaauaucu

SEQ ID NO: 162565 - RNA, 22 nt, Human
ucacaggcuccagggccuggau

SEQ ID NO: 162566 - RNA, 22 nt, Human
acagagcuuaggaugacuccca

SEQ ID NO: 162567 - RNA, 22 nt, Human
gugggccucuugaggguggcua

SEQ ID NO: 162568 - RNA, 23 nt, Human
ucuggcuccauccuuggggaucc

SEQ ID NO: 162569 - RNA, 22 nt, Human
gugacucacacaggccugggcu

SEQ ID NO: 162570 - RNA, 22 nt, Human
gcacaugagcugcugggauggg

SEQ ID NO: 162571 - RNA, 22 nt, Human
gaggaggaaacccuguuccucu

SEQ ID NO: 162572 - RNA, 22 nt, Human
ggcaguggaggacccugugucu

SEQ ID NO: 162573 - RNA, 22 nt, Human
ugguuucccauuaucugcagga

SEQ ID NO: 162574 - RNA, 19 nt, Human
uccaaaggacccaccucca

SEQ ID NO: 162575 - RNA, 22 nt, Human
aaauguguuccuuugcuacaga

SEQ ID NO: 162576 - RNA, 22 nt, Human
agggcugcccagugugagagcu

SEQ ID NO: 162577 - RNA, 22 nt, Human
acccaggccugagagacaggag

SEQ ID NO: 162578 - RNA, 22 nt, Human
ccccuuccgucucuugaguguc

SEQ ID NO: 162579 - RNA, 22 nt, Human
ggccucucuccuuggcuugcag

SEQ ID NO: 162580 - RNA, 22 nt, Human
ugcucccagggacucuggcugg

SEQ ID NO: 162581 - RNA, 22 nt, Human
acuguacuguguauuguagaau

SEQ ID NO: 162582 - RNA, 22 nt, Human
cacauugaaaugacccaauaau

SEQ ID NO: 162583 - RNA, 22 nt, Human
agcauggggcuccgcaaugaac

SEQ ID NO: 162584 - RNA, 22 nt, Human
ggccuuggggaggauggugucc

SEQ ID NO: 162585 - RNA, 22 nt, Human
ucuggcucaucucuccagguaa

SEQ ID NO: 162586 - RNA, 22 nt, Human
acacagggggcauucuaggagu

SEQ ID NO: 162587 - RNA, 22 nt, Human
gaggccuguagucauggaugua

SEQ ID NO: 162588 - RNA, 22 nt, Human
gugauuucagguuuuucauacu

SEQ ID NO: 162589 - RNA, 20 nt, Human
ggcugugcccuuccguggcc

SEQ ID NO: 162590 - RNA, 22 nt, Human
ugcauuugucuugucucaugaa

SEQ ID NO: 162591 - RNA, 22 nt, Human
ccugguguugugaaguagccgu

SEQ ID NO: 162592 - RNA, 20 nt, Human
cuggcaggagcgagucuacc

SEQ ID NO: 162593 - RNA, 22 nt, Human
uccagggaaggugugaggcugg

SEQ ID NO: 162594 - RNA, 22 nt, Human
uguacaguguagucaugagguu

SEQ ID NO: 162595 - RNA, 22 nt, Human
agagccugucugccuuucuacc

SEQ ID NO: 162596 - RNA, 22 nt, Human
cccucuggcucuucucaggccg

SEQ ID NO: 162597 - RNA, 22 nt, Human
aauuaacagagggcuuauuacu

SEQ ID NO: 162598 - RNA, 22 nt, Human
cucuguagaaacagggcagaag

SEQ ID NO: 162599 - RNA, 22 nt, Human
ggaguuggugagcaccaggcuu

SEQ ID NO: 162600 - RNA, 23 nt, Human
cuggccuccgacacuggccaaga

SEQ ID NO: 162601 - RNA, 20 nt, Human
cagagccaagagcagcaucu

SEQ ID NO: 162602 - RNA, 22 nt, Human
cccagccucagcuuuacuucca

SEQ ID NO: 162603 - RNA, 22 nt, Human
ugggcagaggcagcagaaaccu

SEQ ID NO: 162604 - RNA, 22 nt, Human
gugcgccagcucaaggggaggc

SEQ ID NO: 162605 - RNA, 18 nt, Human
acagaggcagacauguau

SEQ ID NO: 162606 - RNA, 22 nt, Human
ggcucagaaacuaaaggcgcug

SEQ ID NO: 162607 - RNA, 22 nt, Human
cugccacuuacuaggcauggug

SEQ ID NO: 162608 - RNA, 22 nt, Human
aucuggguucaccaugcuccug

SEQ ID NO: 162609 - RNA, 22 nt, Human
gcaggcaguuauuuaguagaau

SEQ ID NO: 162610 - RNA, 22 nt, Human
caggcagccugagggaucuggg

SEQ ID NO: 162611 - RNA, 22 nt, Human
gccuggagagcacugugcgcuu

SEQ ID NO: 162612 - RNA, 21 nt, Human
gugguuauuuucauuagcauc

SEQ ID NO: 162613 - RNA, 21 nt, Human
aggaaguggccagauugggaa

SEQ ID NO: 162614 - RNA, 22 nt, Human
agucccagacuccaguuuucug

SEQ ID NO: 162615 - RNA, 21 nt, Human
agccuggcccagggggaggcu

SEQ ID NO: 162616 - RNA, 22 nt, Human
ugguccugccccgugcacagag

SEQ ID NO: 162617 - RNA, 22 nt, Human
cagagguagaaggcaugcagug

SEQ ID NO: 162618 - RNA, 22 nt, Human
gcaguggcuaagcucgcaugca

SEQ ID NO: 162619 - RNA, 22 nt, Human
uuuaaauaggacuccugggggu

SEQ ID NO: 162620 - RNA, 17 nt, Human
ggagagugggaauggcc

SEQ ID NO: 162621 - RNA, 19 nt, Human
auuugaaagcugugcuugc

SEQ ID NO: 162622 - RNA, 22 nt, Human
cugaggucuagacaccccaggg

SEQ ID NO: 162623 - RNA, 22 nt, Human
accugaggccuccccagcagac

SEQ ID NO: 162624 - RNA, 22 nt, Human
uauuacugagguuuuauggagu

SEQ ID NO: 162625 - RNA, 22 nt, Human
gaagcagcaaaucugcaguauc

SEQ ID NO: 162626 - RNA, 22 nt, Human
ugcagaggagucagccugggca

SEQ ID NO: 162627 - RNA, 22 nt, Human
gauuucaccugaucuugucauc

SEQ ID NO: 162628 - RNA, 22 nt, Human
uuuaaucaggcaaagcauaaua

SEQ ID NO: 162629 - RNA, 21 nt, Human
aaaguucaugcuuuaauauuc

SEQ ID NO: 162630 - RNA, 22 nt, Human
uggcagaguaggauggcccugu

SEQ ID NO: 162631 - RNA, 22 nt, Human
guuugauucaagaacaaagagu

SEQ ID NO: 162632 - RNA, 22 nt, Human
uuucucaucuggaaacagugcu

SEQ ID NO: 162633 - RNA, 22 nt, Human
ggcucuggucagugaggggccu

SEQ ID NO: 162634 - RNA, 22 nt, Human
cugggcugucccaaccccaucc

SEQ ID NO: 162635 - RNA, 22 nt, Human
acauugaucagccucccaugca

SEQ ID NO: 162636 - RNA, 22 nt, Human
cagggugccuguccucagcaaa

SEQ ID NO: 162637 - RNA, 22 nt, Human
guggggggacguuggucacuuu

SEQ ID NO: 162638 - RNA, 22 nt, Human
uuugcauugccucugacuuaug

SEQ ID NO: 162639 - RNA, 22 nt, Human
uguauauucugccuaaaagcuu

SEQ ID NO: 162640 - RNA, 22 nt, Human
gccucacugcagccccaggaag

SEQ ID NO: 162641 - RNA, 22 nt, Human
ccagccuccauguagauagcug

SEQ ID NO: 162642 - RNA, 22 nt, Human
caguggguaggaaaggcucuuc

SEQ ID NO: 162643 - RNA, 22 nt, Human
ccagcgcuucccaucagggagg

SEQ ID NO: 162644 - RNA, 22 nt, Human
cacaguggauugggugaugccc

SEQ ID NO: 162645 - RNA, 22 nt, Human
acagaauugauggaaaucucag

SEQ ID NO: 162646 - RNA, 22 nt, Human
gaguccaguuguucacagaggc

SEQ ID NO: 162647 - RNA, 19 nt, Human
cagagcagugguuccugaa

SEQ ID NO: 162648 - RNA, 22 nt, Human
gcccucagcuccuggacacaug

SEQ ID NO: 162649 - RNA, 22 nt, Human
cugggaggugaacagaaaaacu

SEQ ID NO: 162650 - RNA, 22 nt, Human
ccuccuggugggcgcuucuggc

SEQ ID NO: 162651 - RNA, 22 nt, Human
gcaggguauaauacuuagguga

SEQ ID NO: 162652 - RNA, 22 nt, Human
uccucagacacccugcuggcuu

SEQ ID NO: 162653 - RNA, 22 nt, Human
cuggugcuggagccuagucccu

SEQ ID NO: 162654 - RNA, 17 nt, Human
auuucacuuagcaugag

SEQ ID NO: 162655 - RNA, 22 nt, Human
cacauuuaaagguugaagcuga

SEQ ID NO: 162656 - RNA, 22 nt, Human
uaguaacagauuuauacagucu

SEQ ID NO: 162657 - RNA, 22 nt, Human
uggcccugucccuggagccugg

SEQ ID NO: 162658 - RNA, 22 nt, Human
auguacaguggaaacuaacaaa

SEQ ID NO: 162659 - RNA, 22 nt, Human
aggaaagcucccaguagggcuc

SEQ ID NO: 162660 - RNA, 22 nt, Human
acuguguggaccacucugaggc

SEQ ID NO: 162661 - RNA, 22 nt, Human
uggcuuccacugugugcccccu

SEQ ID NO: 162662 - RNA, 22 nt, Human
gauggcacacagacauccccgc

SEQ ID NO: 162663 - RNA, 22 nt, Human
ccagcuggaagagugcagaacu

SEQ ID NO: 162664 - RNA, 22 nt, Human
gcucugagaggugcagcaguaa

SEQ ID NO: 162665 - RNA, 22 nt, Human
cugugcccuggccaggccucuc

SEQ ID NO: 162666 - RNA, 22 nt, Human
cuggcuggcaaguagaacacaa

SEQ ID NO: 162667 - RNA, 22 nt, Human
aggucaaaccacagcucuaggc

SEQ ID NO: 162668 - RNA, 22 nt, Human
ugccaggaggaggugggacaga

SEQ ID NO: 162669 - RNA, 22 nt, Human
uuucacauacaguguauaguag

SEQ ID NO: 162670 - RNA, 22 nt, Human
gcucagagauggggaaugaaaa

SEQ ID NO: 162671 - RNA, 22 nt, Human
uagagcuagcuucaaaaugcga

SEQ ID NO: 162672 - RNA, 22 nt, Human
ugcaucuguucagagcugucga

SEQ ID NO: 162673 - RNA, 22 nt, Human
uguacaguaggaacuuguuauu

SEQ ID NO: 162674 - RNA, 22 nt, Human
ugguccagaugccuuggcuuua

SEQ ID NO: 162675 - RNA, 22 nt, Human
aaugagcugcugcuguuccacc

SEQ ID NO: 162676 - RNA, 22 nt, Human
agcucagcuuccucuccaugcu

SEQ ID NO: 162677 - RNA, 18 nt, Human
ugucucugaauuccagug

SEQ ID NO: 162678 - RNA, 22 nt, Human
auacauguuguaccauauguuu

SEQ ID NO: 162679 - RNA, 22 nt, Human
acuuaguauuuuucagcuuuga

SEQ ID NO: 162680 - RNA, 22 nt, Human
uucagagaugacaccugguguu

SEQ ID NO: 162681 - RNA, 22 nt, Human
ucagagucucccccaguuuggg

SEQ ID NO: 162682 - RNA, 22 nt, Human
aggcugccuguuccaaucuccu

SEQ ID NO: 162683 - RNA, 22 nt, Human
acagaggaaggcugagcugccc

SEQ ID NO: 162684 - RNA, 22 nt, Human
gagcucugacugcugggugaca

SEQ ID NO: 162685 - RNA, 22 nt, Human
aggaaaaauaaggcagcagggc

SEQ ID NO: 162686 - RNA, 22 nt, Human
cagcucugcugggaggaugcag

SEQ ID NO: 162687 - RNA, 22 nt, Human
ggcaguagccagggacuggcag

SEQ ID NO: 162688 - RNA, 22 nt, Human
gauuuccuaauguggaucucug

SEQ ID NO: 162689 - RNA, 22 nt, Human
cugagccauaagggaggcuggg

SEQ ID NO: 162690 - RNA, 22 nt, Human
ggaggccaaggcgggcggauca

SEQ ID NO: 162691 - RNA, 22 nt, Human
auugaaagcauggauuuggauu

SEQ ID NO: 162692 - RNA, 22 nt, Human
aaggcacuuuucuaaagaccuu

SEQ ID NO: 162693 - RNA, 22 nt, Human
cagggcuccccgcaccgcagcc

SEQ ID NO: 162694 - RNA, 22 nt, Human
cucuggagggaggcugagcugg

SEQ ID NO: 162695 - RNA, 22 nt, Human
aguguccaacucagcuugucaa

SEQ ID NO: 162696 - RNA, 22 nt, Human
auaucuuuuagagcaagcuugu

SEQ ID NO: 162697 - RNA, 22 nt, Human
aggugcuuggcucgugcacaca

SEQ ID NO: 162698 - RNA, 21 nt, Human
aacugcuggucuuuucugucu

SEQ ID NO: 162699 - RNA, 19 nt, Human
gggcuuggggcugaagccu

SEQ ID NO: 162700 - RNA, 22 nt, Human
uggaggugagugugguacagca

SEQ ID NO: 162701 - RNA, 22 nt, Human
ccagcugagaaguguaaaguga

SEQ ID NO: 162702 - RNA, 22 nt, Human
ccacagccauuccagggaggcu

SEQ ID NO: 162703 - RNA, 22 nt, Human
agaggagguggugaugcuuuaa

SEQ ID NO: 162704 - RNA, 22 nt, Human
ucacguuuuacugagugagaua

SEQ ID NO: 162705 - RNA, 22 nt, Human
aacuuuaaggcuauaaauuaug

SEQ ID NO: 162706 - RNA, 22 nt, Human
uauuuuguuaauaauccagucc

SEQ ID NO: 162707 - RNA, 22 nt, Human
cauugcacagcccuguggugau

SEQ ID NO: 162708 - RNA, 22 nt, Human
cuguuuauaaauagaggggagu

SEQ ID NO: 162709 - RNA, 22 nt, Human
uccaagaagucaucuaaacugu

SEQ ID NO: 162710 - RNA, 22 nt, Human
ugacagggcuagaggcaaugca

SEQ ID NO: 162711 - RNA, 22 nt, Human
cuccucccugcgauugcucugc

SEQ ID NO: 162712 - RNA, 22 nt, Human
uggcagcuacagacagagguga

SEQ ID NO: 162713 - RNA, 22 nt, Human
cccucugaccuccugccacagu

SEQ ID NO: 162714 - RNA, 17 nt, Human
agauggcaggaggcaga

SEQ ID NO: 162715 - RNA, 22 nt, Human
uccuugaauugugccacuuacc

SEQ ID NO: 162716 - RNA, 22 nt, Human
auugaaagguuuugagcagaua

SEQ ID NO: 162717 - RNA, 22 nt, Human
aggaccaguaugagagcaucug

SEQ ID NO: 162718 - RNA, 22 nt, Human
agcccuccucacaucagcgucc

SEQ ID NO: 162719 - RNA, 22 nt, Human
auucuguauuucuaauaagauc

SEQ ID NO: 162720 - RNA, 22 nt, Human
agggacacacuccaguguuauu

SEQ ID NO: 162721 - RNA, 22 nt, Human
cagaggcuaagaugagugggug

SEQ ID NO: 162722 - RNA, 20 nt, Human
uccuugaaagugggguauau

SEQ ID NO: 162723 - RNA, 22 nt, Human
guccucugggcagcugccccac

SEQ ID NO: 162724 - RNA, 22 nt, Human
gcagggcaugggcccugucugc

SEQ ID NO: 162725 - RNA, 22 nt, Human
gugggcaaggucccugccagcu

SEQ ID NO: 162726 - RNA, 22 nt, Human
ucaaaugcucuuugcagagagg

SEQ ID NO: 162727 - RNA, 22 nt, Human
aaauuuaagaagugugugcgug

SEQ ID NO: 162728 - RNA, 22 nt, Human
uuuuccuauaugcaaagaaugc

SEQ ID NO: 162729 - RNA, 22 nt, Human
gcagggcuauuggaaggagaug

SEQ ID NO: 162730 - RNA, 22 nt, Human
agcugcucucacuggacgccug

SEQ ID NO: 162731 - RNA, 21 nt, Human
uccuuccuugagguccuuucc

SEQ ID NO: 162732 - RNA, 22 nt, Human
cagccugacaccagcuuugggc

SEQ ID NO: 162733 - RNA, 23 nt, Human
gagcugggauacaggcuuacugc

SEQ ID NO: 162734 - RNA, 23 nt, Human
aguuccagaaaaaugcucaagca

SEQ ID NO: 162735 - RNA, 22 nt, Human
cccaguccuaaagcagacgcca

SEQ ID NO: 162736 - RNA, 22 nt, Human
ccaggagcaaagaucacuggga

SEQ ID NO: 162737 - RNA, 22 nt, Human
gaggcagcaucuauggugggaa

SEQ ID NO: 162738 - RNA, 22 nt, Human
cccuggaguagcacugggucgc

SEQ ID NO: 162739 - RNA, 22 nt, Human
agaggcuggauugagcauagac

SEQ ID NO: 162740 - RNA, 22 nt, Human
aaggccuggauuuagguuguga

SEQ ID NO: 162741 - RNA, 20 nt, Human
cagcaggaaaagugccucag

SEQ ID NO: 162742 - RNA, 22 nt, Human
gcagugcugaucccauggcaga

SEQ ID NO: 162743 - RNA, 22 nt, Human
ccucuggcaacuucacagccca

SEQ ID NO: 162744 - RNA, 22 nt, Human
cuggccugggagcugcuagcgu

SEQ ID NO: 162745 - RNA, 22 nt, Human
caggugcccagcuccugcugug

SEQ ID NO: 162746 - RNA, 22 nt, Human
acagggucauuuuaugaucugu

SEQ ID NO: 162747 - RNA, 22 nt, Human
gaggggcugggguugacuccaa

SEQ ID NO: 162748 - RNA, 22 nt, Human
uuauuauuuuguguacagcaaa

SEQ ID NO: 162749 - RNA, 22 nt, Human
ucagaacaauugggaaccauua

SEQ ID NO: 162750 - RNA, 19 nt, Human
ccagcccugucacuucuug

SEQ ID NO: 162751 - RNA, 22 nt, Human
aguuauauuccauagauucaga

SEQ ID NO: 162752 - RNA, 22 nt, Human
cgcagaagagguugucuagucc

SEQ ID NO: 162753 - RNA, 22 nt, Human
ggcuggcacugaggagagcucu

SEQ ID NO: 162754 - RNA, 20 nt, Human
gcaaauggaucccacaagcc

SEQ ID NO: 162755 - RNA, 22 nt, Human
ggcaaaaaccgcaauaacuucu

SEQ ID NO: 162756 - RNA, 22 nt, Human
cccucugccugcgcccuggugu

SEQ ID NO: 162757 - RNA, 22 nt, Human
gagaagcaaucaguggccaccc

SEQ ID NO: 162758 - RNA, 22 nt, Human
ucugucacccagagugcagugg

SEQ ID NO: 162759 - RNA, 22 nt, Human
ucugguaaccuuuaucccuccu

SEQ ID NO: 162760 - RNA, 20 nt, Human
cuuggccuacuuagcuuugu

SEQ ID NO: 162761 - RNA, 21 nt, Human
cucacaggaugcaguguuacu

SEQ ID NO: 162762 - RNA, 22 nt, Human
ccaggcagagugcuccagaaag

SEQ ID NO: 162763 - RNA, 22 nt, Human
cagcaggguuaagugacucacc

SEQ ID NO: 162764 - RNA, 22 nt, Human
gagaggcugacuggcuguccug

SEQ ID NO: 162765 - RNA, 21 nt, Human
ugcugccauagaccugaggga

SEQ ID NO: 162766 - RNA, 22 nt, Human
ggagagugggagcaacuguugc

SEQ ID NO: 162767 - RNA, 22 nt, Human
ugagccugguugcagugucugg

SEQ ID NO: 162768 - RNA, 22 nt, Human
gagcccuccauggagccaggca

SEQ ID NO: 162769 - RNA, 22 nt, Human
aguguuucuggcaaaugaaagu

SEQ ID NO: 162770 - RNA, 22 nt, Human
aggcccugaagucggccccuca

SEQ ID NO: 162771 - RNA, 22 nt, Human
caggucagaggcgcagccccca

SEQ ID NO: 162772 - RNA, 22 nt, Human
uccucugccaaagggaguugcc

SEQ ID NO: 162773 - RNA, 22 nt, Human
gccugggaagacuaagugggag

SEQ ID NO: 162774 - RNA, 22 nt, Human
ggcuucccagcagagggcgcac

SEQ ID NO: 162775 - RNA, 22 nt, Human
auuuguacaaauuuauguuagu

SEQ ID NO: 162776 - RNA, 22 nt, Human
agucagugaaggcauugcucaa

SEQ ID NO: 162777 - RNA, 22 nt, Human
gggagggaagguaccuguguga

SEQ ID NO: 162778 - RNA, 22 nt, Human
uccaguggugguuugaagggca

SEQ ID NO: 162779 - RNA, 22 nt, Human
aauguguagggugccuguuuuu

SEQ ID NO: 162780 - RNA, 22 nt, Human
uaagaacaguagaacaguaggu

SEQ ID NO: 162781 - RNA, 22 nt, Human
uggcucagugaagagauaacuu

SEQ ID NO: 162782 - RNA, 22 nt, Human
ucucuggggauggaccugggag

SEQ ID NO: 162783 - RNA, 22 nt, Human
gcuggccuucugcagaguucug

SEQ ID NO: 162784 - RNA, 22 nt, Human
cugcaggcugagcgccugccgg

SEQ ID NO: 162785 - RNA, 22 nt, Human
ccugaggcccuggcugugcuga

SEQ ID NO: 162786 - RNA, 22 nt, Human
ccuggcagguggcgcccucggc

SEQ ID NO: 162787 - RNA, 22 nt, Human
gccucugcaccaguacugugcc

SEQ ID NO: 162788 - RNA, 22 nt, Human
gcaguggauccaaugguaucuu

SEQ ID NO: 162789 - RNA, 22 nt, Human
aggauccuuuuucugcuguuug

SEQ ID NO: 162790 - RNA, 22 nt, Human
uuguuacagcagugauuucaga

SEQ ID NO: 162791 - RNA, 21 nt, Human
uggcugcuggcccucucucca

SEQ ID NO: 162792 - RNA, 20 nt, Human
agggucaguagcacagagcu

SEQ ID NO: 162793 - RNA, 20 nt, Human
gggguuggcuggcacaggga

SEQ ID NO: 162794 - RNA, 22 nt, Human
gggcucuguccauuccuucaua

SEQ ID NO: 162795 - RNA, 22 nt, Human
gaggucaggggagaggcugaug

SEQ ID NO: 162796 - RNA, 22 nt, Human
ugguccagacauuucugaggua

SEQ ID NO: 162797 - RNA, 22 nt, Human
auucaguuaaaaacuguacuuc

SEQ ID NO: 162798 - RNA, 22 nt, Human
cuucaagauauuucuagaauca

SEQ ID NO: 162799 - RNA, 22 nt, Human
ugucuucaucuccaugcacaga

SEQ ID NO: 162800 - RNA, 22 nt, Human
ucaaacuagccugacugguauu

SEQ ID NO: 162801 - RNA, 22 nt, Human
acugucuccucaucaugccugg

SEQ ID NO: 162802 - RNA, 22 nt, Human
cagcucccaguggcagcuccuu

SEQ ID NO: 162803 - RNA, 22 nt, Human
ccgggccucgggacaccgggua

SEQ ID NO: 162804 - RNA, 22 nt, Human
acagaauacuacagacugguua

SEQ ID NO: 162805 - RNA, 22 nt, Human
caguuuuugccauuaagaguaa

SEQ ID NO: 162806 - RNA, 22 nt, Human
uagcaguggaaucuuuugucca

SEQ ID NO: 162807 - RNA, 22 nt, Human
cugacucagcagcugaugaucc

SEQ ID NO: 162808 - RNA, 22 nt, Human
gcuggggcugggcugaggaaga

SEQ ID NO: 162809 - RNA, 21 nt, Human
ugcagccauucagcccuaugc

SEQ ID NO: 162810 - RNA, 22 nt, Human
caagaugccccugguagggauc

SEQ ID NO: 162811 - RNA, 22 nt, Human
uugcaccaaaugaguuaaaauu

SEQ ID NO: 162812 - RNA, 22 nt, Human
agucccuguacuuuccacugcc

SEQ ID NO: 162813 - RNA, 22 nt, Human
cccuggaggaccccaauguggc

SEQ ID NO: 162814 - RNA, 22 nt, Human
cuagucacucagcacugacaaa

SEQ ID NO: 162815 - RNA, 22 nt, Human
gagccucguggcggccacugcg

SEQ ID NO: 162816 - RNA, 22 nt, Human
ucagugcagaauagugaugcau

SEQ ID NO: 162817 - RNA, 22 nt, Human
gagggcugauaacaggaauaca

SEQ ID NO: 162818 - RNA, 22 nt, Human
cggcuggguucggcugcaggcc

SEQ ID NO: 162819 - RNA, 22 nt, Human
cuccugggaauuuaguugugag

SEQ ID NO: 162820 - RNA, 22 nt, Human
agcagcugaucaaagcacuuau

SEQ ID NO: 162821 - RNA, 22 nt, Human
ugaaggaagaauaggcaguguu

SEQ ID NO: 162822 - RNA, 22 nt, Human
cugggacacccaaggaaagagc

SEQ ID NO: 162823 - RNA, 22 nt, Human
ccuggcagguggagguugcagu

SEQ ID NO: 162824 - RNA, 22 nt, Human
uccaguucuaggucacucucug

SEQ ID NO: 162825 - RNA, 19 nt, Human
agaggcugucaccuguagc

SEQ ID NO: 162826 - RNA, 22 nt, Human
uccuuccuggggucucugcugc

SEQ ID NO: 162827 - RNA, 22 nt, Human
cagagcugggaucccaugggcg

SEQ ID NO: 162828 - RNA, 22 nt, Human
uucucauucugacucaguguag

SEQ ID NO: 162829 - RNA, 22 nt, Human
uccuucagucuucugagccaua

SEQ ID NO: 162830 - RNA, 22 nt, Human
acauacuuuuuaaaagauugcu

SEQ ID NO: 162831 - RNA, 22 nt, Human
cauuacaugguccaggauauau

SEQ ID NO: 162832 - RNA, 22 nt, Human
cucuuccuacagucugcuaugc

SEQ ID NO: 162833 - RNA, 22 nt, Human
gcucagagaaucagcagacacc

SEQ ID NO: 162834 - RNA, 22 nt, Human
aauucuagcauugugaaaauau

SEQ ID NO: 162835 - RNA, 22 nt, Human
aagucauugguagcuugauagg

SEQ ID NO: 162836 - RNA, 22 nt, Human
ugcugccuuugggaccuggccu

SEQ ID NO: 162837 - RNA, 22 nt, Human
ucaagagauugaauaauaacug

SEQ ID NO: 162838 - RNA, 23 nt, Human
uggcucagcuaguuuuccauuuc

SEQ ID NO: 162839 - RNA, 22 nt, Human
uccagccacucagcagggauug

SEQ ID NO: 162840 - RNA, 22 nt, Human
guuauguacuuuuuaaaucuug

SEQ ID NO: 162841 - RNA, 22 nt, Human
ggcucugcgcgguaaagugacu

SEQ ID NO: 162842 - RNA, 22 nt, Human
agcaucuggucaugagugagaa

SEQ ID NO: 162843 - RNA, 22 nt, Human
ggccagagagccgcuguuagga

SEQ ID NO: 162844 - RNA, 19 nt, Human
uguagcaguuuaaaacaac

SEQ ID NO: 162845 - RNA, 22 nt, Human
cugagucucccggcaguggagg

SEQ ID NO: 162846 - RNA, 21 nt, Human
agcagaggggacauguuugau

SEQ ID NO: 162847 - RNA, 22 nt, Human
agcuguguggugucugacagcu

SEQ ID NO: 162848 - RNA, 22 nt, Human
ucuggcuccacaccucacugca

SEQ ID NO: 162849 - RNA, 17 nt, Human
uggagcugcguguguuc

SEQ ID NO: 162850 - RNA, 22 nt, Human
agagccuggaccugagcuacaa

SEQ ID NO: 162851 - RNA, 22 nt, Human
agaaauguggaucguuuuaaaa

SEQ ID NO: 162852 - RNA, 22 nt, Human
gaggccuggaccagccacagag

SEQ ID NO: 162853 - RNA, 22 nt, Human
gagccaggguuugaaacuagac

SEQ ID NO: 162854 - RNA, 22 nt, Human
cacaggcucuucucacuugauu

SEQ ID NO: 162855 - RNA, 22 nt, Human
cccuggcauaaaacuucuccag

SEQ ID NO: 162856 - RNA, 22 nt, Human
aaauguguuucuuugugaaugg

SEQ ID NO: 162857 - RNA, 20 nt, Human
uuccuguauacaaagaguuc

SEQ ID NO: 162858 - RNA, 22 nt, Human
cagucccaccaggaucgcucuu

SEQ ID NO: 162859 - RNA, 22 nt, Human
gagcaggcuugcagagaagggg

SEQ ID NO: 162860 - RNA, 22 nt, Human
agguacagcaauauaagagguc

SEQ ID NO: 162861 - RNA, 22 nt, Human
ugccuaggaaaccucaugcuuc

SEQ ID NO: 162862 - RNA, 22 nt, Human
uuguggcucgugagauguuagg

SEQ ID NO: 162863 - RNA, 22 nt, Human
gcugccacucugagcuugcuuc

SEQ ID NO: 162864 - RNA, 22 nt, Human
cuggcuggccggaggcaucccu

SEQ ID NO: 162865 - RNA, 22 nt, Human
gcugggcagccccuacagagag

SEQ ID NO: 162866 - RNA, 22 nt, Human
gggccugacugagagcuccuca

SEQ ID NO: 162867 - RNA, 22 nt, Human
gauuucaaguaucuugggcgag

SEQ ID NO: 162868 - RNA, 22 nt, Human
cuuagaaaugcagauucucagg

SEQ ID NO: 162869 - RNA, 22 nt, Human
uaaagguagugugacauauugu

SEQ ID NO: 162870 - RNA, 22 nt, Human
agcagcugcagggagggucugc

SEQ ID NO: 162871 - RNA, 22 nt, Human
ccugucuggccuuccacggggg

SEQ ID NO: 162872 - RNA, 22 nt, Human
gccuggcuccuaagagcacaac

SEQ ID NO: 162873 - RNA, 22 nt, Human
agguaacacuacuuaguauacu

SEQ ID NO: 162874 - RNA, 22 nt, Human
agcauuuaugacuaauguaaaa

SEQ ID NO: 162875 - RNA, 22 nt, Human
acugaaggaaacuuuuguguuu

SEQ ID NO: 162876 - RNA, 19 nt, Human
auagaaaggguuaaagaca

SEQ ID NO: 162877 - RNA, 22 nt, Human
cugagccaaccacagcaggagc

SEQ ID NO: 162878 - RNA, 22 nt, Human
ugggggucaggaugaggccuug

SEQ ID NO: 162879 - RNA, 22 nt, Human
ugccugcucuuaccacucuccc

SEQ ID NO: 162880 - RNA, 22 nt, Human
cacagcuugggcucugacaaua

SEQ ID NO: 162881 - RNA, 23 nt, Human
gcagagcugcccuauugccuugg

SEQ ID NO: 162882 - RNA, 22 nt, Human
aacucagucauaaagcgaaugc

SEQ ID NO: 162883 - RNA, 23 nt, Human
aagcugccuucgcaguuggucug

SEQ ID NO: 162884 - RNA, 18 nt, Human
gucauugcaacauacugu

SEQ ID NO: 162885 - RNA, 22 nt, Human
acagauauaaacuauaguagug

SEQ ID NO: 162886 - RNA, 22 nt, Human
gccucccuggcccacagcagcg

SEQ ID NO: 162887 - RNA, 22 nt, Human
agcaugcugguguucauggcag

SEQ ID NO: 162888 - RNA, 20 nt, Human
uggagcuccagcguccaugu

SEQ ID NO: 162889 - RNA, 22 nt, Human
aaugcacacauuugguacugaa

SEQ ID NO: 162890 - RNA, 22 nt, Human
accuuaaaacugacacauggag

SEQ ID NO: 162891 - RNA, 22 nt, Human
gugugccaacaaaagacagugc

SEQ ID NO: 162892 - RNA, 22 nt, Human
ccagcuggugacauccccaacc

SEQ ID NO: 162893 - RNA, 22 nt, Human
uagcagggaaggugugcugagc

SEQ ID NO: 162894 - RNA, 22 nt, Human
uggagcugaacuuugaggccag

SEQ ID NO: 162895 - RNA, 22 nt, Human
ugccugggguuggcaaacugcu

SEQ ID NO: 162896 - RNA, 22 nt, Human
cuggcuccuccaaggccuggag

SEQ ID NO: 162897 - RNA, 17 nt, Human
uggcuucccugggccac

SEQ ID NO: 162898 - RNA, 22 nt, Human
aggaggccgauuucagaggucg

SEQ ID NO: 162899 - RNA, 22 nt, Human
ccuggagcgcgggucaagcugg

SEQ ID NO: 162900 - RNA, 21 nt, Human
uaaauaauaaguugcugagau

SEQ ID NO: 162901 - RNA, 22 nt, Human
gccuucugauugcuggacugac

SEQ ID NO: 162902 - RNA, 22 nt, Human
ccagagaccagaacauggggau

SEQ ID NO: 162903 - RNA, 22 nt, Human
ucucuuccaguaagagucuuua

SEQ ID NO: 162904 - RNA, 22 nt, Human
uaugaagacaaugauagcauga

SEQ ID NO: 162905 - RNA, 22 nt, Human
gcucccaggaagagaagggcca

SEQ ID NO: 162906 - RNA, 22 nt, Human
acaaugcaccagcaucuucacc

SEQ ID NO: 162907 - RNA, 22 nt, Human
ccuggcugaaccaaugaagugg

SEQ ID NO: 162908 - RNA, 22 nt, Human
auuuacagaugaugcuauuuga

SEQ ID NO: 162909 - RNA, 22 nt, Human
ccugaagaugcuguggccuggu

SEQ ID NO: 162910 - RNA, 22 nt, Human
uagagcugauaaugaggccaag

SEQ ID NO: 162911 - RNA, 22 nt, Human
auacaaagacaaaucucaaucu

SEQ ID NO: 162912 - RNA, 22 nt, Human
cuggaaggcucugcugccuguc

SEQ ID NO: 162913 - RNA, 22 nt, Human
uugcauuguaggauguuagaag

SEQ ID NO: 162914 - RNA, 22 nt, Human
gccaggcuggcaaaaggaaacc

SEQ ID NO: 162915 - RNA, 22 nt, Human
aaagauuugaaauuaggcauca

SEQ ID NO: 162916 - RNA, 22 nt, Human
ugcuggcccuggcucagggaac

SEQ ID NO: 162917 - RNA, 22 nt, Human
gccugagccgccugagcggcgg

SEQ ID NO: 162918 - RNA, 22 nt, Human
caguggcaugguugacugcagu

SEQ ID NO: 162919 - RNA, 20 nt, Human
ggcagagcuaugucuguugc

SEQ ID NO: 162920 - RNA, 22 nt, Human
cugcugcaggaugggcacucug

SEQ ID NO: 162921 - RNA, 22 nt, Human
cugccugugccaccgccucauu

SEQ ID NO: 162922 - RNA, 22 nt, Human
ccaaggagaaaugcugugcuuu

SEQ ID NO: 162923 - RNA, 22 nt, Human
ggcagcugugaagugccucaca

SEQ ID NO: 162924 - RNA, 22 nt, Human
uugaacaguuuugucagguuca

SEQ ID NO: 162925 - RNA, 22 nt, Human
gugcaugugcauccauguguac

SEQ ID NO: 162926 - RNA, 22 nt, Human
aguguuccuugcuuucccagag

SEQ ID NO: 162927 - RNA, 22 nt, Human
gcucaggaaauaguuuaguguu

SEQ ID NO: 162928 - RNA, 22 nt, Human
gggcugagggguaucucauggg

SEQ ID NO: 162929 - RNA, 22 nt, Human
uguguacuugaaagggcagguc

SEQ ID NO: 162930 - RNA, 22 nt, Human
ccugcugugaaacuggcauaug

SEQ ID NO: 162931 - RNA, 22 nt, Human
guucauuuaugauguaacaugu

SEQ ID NO: 162932 - RNA, 19 nt, Human
ucauucaggaccaguggau

SEQ ID NO: 162933 - RNA, 22 nt, Human
cagagugagggccugcaccugc

SEQ ID NO: 162934 - RNA, 22 nt, Human
gcaggaugagugaguacauuua

SEQ ID NO: 162935 - RNA, 22 nt, Human
gcucaggaucccaggggugugc

SEQ ID NO: 162936 - RNA, 22 nt, Human
ggcccacuugaaauggagcuca

SEQ ID NO: 162937 - RNA, 22 nt, Human
ucauugcaguagggagagaccc

SEQ ID NO: 162938 - RNA, 20 nt, Human
auacaaagagauugauguau

SEQ ID NO: 162939 - RNA, 22 nt, Human
cccuggaguccuggcaguugau

SEQ ID NO: 162940 - RNA, 22 nt, Human
aacaguaaugugguguuggguu

SEQ ID NO: 162941 - RNA, 20 nt, Human
gcugaccccugcugucaugc

SEQ ID NO: 162942 - RNA, 22 nt, Human
ugcuggaggggccugaccagga

SEQ ID NO: 162943 - RNA, 22 nt, Human
aggcccaguagugcugccuuua

SEQ ID NO: 162944 - RNA, 22 nt, Human
uugaaaggugaacaugaugcac

SEQ ID NO: 162945 - RNA, 22 nt, Human
gccaggcacaguucuaggugcu

SEQ ID NO: 162946 - RNA, 22 nt, Human
gagcagcuagauaaagcccuuc

SEQ ID NO: 162947 - RNA, 22 nt, Human
uugggugcugucauggggcacg

SEQ ID NO: 162948 - RNA, 22 nt, Human
aggggcugacuggaaagugcca

SEQ ID NO: 162949 - RNA, 22 nt, Human
cagaagaauggugucugagcuc

SEQ ID NO: 162950 - RNA, 22 nt, Human
ggugcagcugcagccugggagc

SEQ ID NO: 162951 - RNA, 22 nt, Human
gguacaaggagugaagguuugg

SEQ ID NO: 162952 - RNA, 22 nt, Human
uuugugaagggaacagaagugu

SEQ ID NO: 162953 - RNA, 22 nt, Human
cuggagcucuccagagccccgu

SEQ ID NO: 162954 - RNA, 22 nt, Human
gggugggguguaucggauccua

SEQ ID NO: 162955 - RNA, 22 nt, Human
gagcagcuguccccaaagcuuc

SEQ ID NO: 162956 - RNA, 22 nt, Human
augaacacauguacacauuucu

SEQ ID NO: 162957 - RNA, 22 nt, Human
ggcucuggagcacagacgucug

SEQ ID NO: 162958 - RNA, 22 nt, Human
ccuuuuucccuggagggacagc

SEQ ID NO: 162959 - RNA, 22 nt, Human
gguggggccugcuccagcggcc

SEQ ID NO: 162960 - RNA, 22 nt, Human
agcauuuaauuacaguuuaauu

SEQ ID NO: 162961 - RNA, 22 nt, Human
cucagaguccccaguggguuug

SEQ ID NO: 162962 - RNA, 23 nt, Human
ugucacauuuaguuggcauuguu

SEQ ID NO: 162963 - RNA, 22 nt, Human
aucuggcugagcgaggcccaca

SEQ ID NO: 162964 - RNA, 18 nt, Human
gaugggagcaagagaaga

SEQ ID NO: 162965 - RNA, 20 nt, Human
gaggccucagccucagcucc

SEQ ID NO: 162966 - RNA, 22 nt, Human
agcauggggcaaugcaugugcu

SEQ ID NO: 162967 - RNA, 20 nt, Human
cacaagagaauacacacugg

SEQ ID NO: 162968 - RNA, 22 nt, Human
gggcagcucuggcugugggaag

SEQ ID NO: 162969 - RNA, 22 nt, Human
uauauagaaaagcagauguugg

SEQ ID NO: 162970 - RNA, 22 nt, Human
uccagccaccaccuugauugcc

SEQ ID NO: 162971 - RNA, 23 nt, Human
uugauacagaagaaucaguuugu

SEQ ID NO: 162972 - RNA, 22 nt, Human
ccucugaguccucccugguugc

SEQ ID NO: 162973 - RNA, 22 nt, Human
agcuggaggggccagcaggugu

SEQ ID NO: 162974 - RNA, 22 nt, Human
guuuuguugcugcagagcucaa

SEQ ID NO: 162975 - RNA, 22 nt, Human
cuugccuucuguuccuauagaa

SEQ ID NO: 162976 - RNA, 22 nt, Human
uuaugacaggaaaaucacagaa

SEQ ID NO: 162977 - RNA, 22 nt, Human
uucaagaugacccagucacacg

SEQ ID NO: 162978 - RNA, 22 nt, Human
acagagccacuuuggugccuac

SEQ ID NO: 162979 - RNA, 22 nt, Human
aggagggugauccgggcugguc

SEQ ID NO: 162980 - RNA, 22 nt, Human
gcagacaggcccaguggaggga

SEQ ID NO: 162981 - RNA, 22 nt, Human
gcaggugguccccguggagugg

SEQ ID NO: 162982 - RNA, 22 nt, Human
caguggccugagccaggcuucc

SEQ ID NO: 162983 - RNA, 22 nt, Human
guggcugcagcccagcggcacg

SEQ ID NO: 162984 - RNA, 18 nt, Human
gugacagcugcuagcuca

SEQ ID NO: 162985 - RNA, 22 nt, Human
auucccaucgucaacuucacug

SEQ ID NO: 162986 - RNA, 22 nt, Human
agccuggaccaggggccucaga

SEQ ID NO: 162987 - RNA, 22 nt, Human
uaucuacuccucuuucagaugc

SEQ ID NO: 162988 - RNA, 20 nt, Human
caagcccucuuuagccugcc

SEQ ID NO: 162989 - RNA, 22 nt, Human
agugucugccagcugccaggug

SEQ ID NO: 162990 - RNA, 22 nt, Human
ccuccugggacaggcuggcaca

SEQ ID NO: 162991 - RNA, 22 nt, Human
ugguccaggguguaguacagag

SEQ ID NO: 162992 - RNA, 22 nt, Human
cugccuggaccggcagcccucc

SEQ ID NO: 162993 - RNA, 22 nt, Human
gcaggggcugcugggaacucgg

SEQ ID NO: 162994 - RNA, 22 nt, Human
ccugucucccuggcauggcuca

SEQ ID NO: 162995 - RNA, 22 nt, Human
caggccuccacuccacgcagac

SEQ ID NO: 162996 - RNA, 22 nt, Human
gagcucugggaaacaaagugua

SEQ ID NO: 162997 - RNA, 22 nt, Human
aaaugcauuuuuaauuagaccc

SEQ ID NO: 162998 - RNA, 22 nt, Human
agcagggcucuguggagggugg

SEQ ID NO: 162999 - RNA, 22 nt, Human
agaaaguucugugaguuguuca

SEQ ID NO: 163000 - RNA, 22 nt, Human
uauuucaugugcaccauaauuc

SEQ ID NO: 163001 - RNA, 20 nt, Human
gacaucauguacacauugcc

SEQ ID NO: 163002 - RNA, 22 nt, Human
aaaggugacacucugccagcug

SEQ ID NO: 163003 - RNA, 22 nt, Human
uuguuuucuccacugcaucuua

SEQ ID NO: 163004 - RNA, 22 nt, Human
ccucaggggcuuuucguuguug

SEQ ID NO: 163005 - RNA, 22 nt, Human
cacaggaggaggugcccgggcc

SEQ ID NO: 163006 - RNA, 22 nt, Human
ugggcuacucugggagccuaac

SEQ ID NO: 163007 - RNA, 22 nt, Human
cucccacuccuggcucaccaca

SEQ ID NO: 163008 - RNA, 22 nt, Human
aacagaaaagguagguggcuuu

SEQ ID NO: 163009 - RNA, 23 nt, Human
aggcacugaaugugucagugagu

SEQ ID NO: 163010 - RNA, 22 nt, Human
ugucucagauacgccaucaagg

SEQ ID NO: 163011 - RNA, 22 nt, Human
uuguuuugcuaaagggucauca

SEQ ID NO: 163012 - RNA, 22 nt, Human
caggaaauaucuccuggcagag

SEQ ID NO: 163013 - RNA, 22 nt, Human
guuauguaugggggccuuauga

SEQ ID NO: 163014 - RNA, 22 nt, Human
gaggucaggcuugcagcagggu

SEQ ID NO: 163015 - RNA, 23 nt, Human
aucaagauaauccagaugaccua

SEQ ID NO: 163016 - RNA, 22 nt, Human
auucuccacacauccagaccuu

SEQ ID NO: 163017 - RNA, 22 nt, Human
ccuggccucgugcucacggcuc

SEQ ID NO: 163018 - RNA, 22 nt, Human
agccucucuguuagucacuggg

SEQ ID NO: 163019 - RNA, 23 nt, Human
ugcugggcagagcuggugcugag

SEQ ID NO: 163020 - RNA, 22 nt, Human
gaggcaggcacuguuaucagca

SEQ ID NO: 163021 - RNA, 22 nt, Human
uggccuggaaccuggcagggac

SEQ ID NO: 163022 - RNA, 22 nt, Human
gcuguggccaacaaaccacuuu

SEQ ID NO: 163023 - RNA, 22 nt, Human
gaaaauguuagcuucauaguca

SEQ ID NO: 163024 - RNA, 22 nt, Human
aaucaguuaaauauugaguaca

SEQ ID NO: 163025 - RNA, 22 nt, Human
aggagcugcaaauauuaguaau

SEQ ID NO: 163026 - RNA, 22 nt, Human
acccuggguucccgcagcacca

SEQ ID NO: 163027 - RNA, 22 nt, Human
cccuggaggcaaagguugcagu

SEQ ID NO: 163028 - RNA, 22 nt, Human
cuggccuggagccucugggugg

SEQ ID NO: 163029 - RNA, 22 nt, Human
ugcacacaaguuggagaaugaa

SEQ ID NO: 163030 - RNA, 22 nt, Human
ucucccaggcugcccuguggac

SEQ ID NO: 163031 - RNA, 22 nt, Human
gcugauccuuuuaugucuagcu

SEQ ID NO: 163032 - RNA, 22 nt, Human
uggcucagccagcccuaggaac

SEQ ID NO: 163033 - RNA, 22 nt, Human
ccacugucuuuuccaggcugaa

SEQ ID NO: 163034 - RNA, 22 nt, Human
aaaguucagugccuucuauaca

SEQ ID NO: 163035 - RNA, 22 nt, Human
cagcugccaagaaucuuuucua

SEQ ID NO: 163036 - RNA, 22 nt, Human
gcugggagccccgagccagcgc

SEQ ID NO: 163037 - RNA, 22 nt, Human
ucugggagacguguguugucag

SEQ ID NO: 163038 - RNA, 22 nt, Human
cucuggagcauuucaccuacau

SEQ ID NO: 163039 - RNA, 22 nt, Human
acagcagagugugagauagcca

SEQ ID NO: 163040 - RNA, 22 nt, Human
aaggucauugguucugaauucu

SEQ ID NO: 163041 - RNA, 22 nt, Human
caggcaggugcagauuccucuu

SEQ ID NO: 163042 - RNA, 22 nt, Human
ccuggggagaagagcuuccccc

SEQ ID NO: 163043 - RNA, 22 nt, Human
guaauugacucagcucuguuca

SEQ ID NO: 163044 - RNA, 22 nt, Human
agggcagauggaacuuccccga

SEQ ID NO: 163045 - RNA, 22 nt, Human
ucucugggauaaacugggccag

SEQ ID NO: 163046 - RNA, 20 nt, Human
cugcucugcuuugcaggugg

SEQ ID NO: 163047 - RNA, 19 nt, Human
ucugaggguccagaugcau

SEQ ID NO: 163048 - RNA, 18 nt, Human
cagcagagacauucaaaa

SEQ ID NO: 163049 - RNA, 22 nt, Human
caguuaaaggcccaauaucugg

SEQ ID NO: 163050 - RNA, 22 nt, Human
ugcucccaggcucuguggucug

SEQ ID NO: 163051 - RNA, 22 nt, Human
gcugcuccgucugagcucuggu

SEQ ID NO: 163052 - RNA, 22 nt, Human
uaucuuuagaggaagagaaucu

SEQ ID NO: 163053 - RNA, 22 nt, Human
gcuaggagauugagcucugaag

SEQ ID NO: 163054 - RNA, 22 nt, Human
agccaagcugaucuccugcuga

SEQ ID NO: 163055 - RNA, 22 nt, Human
aggagaaggaagugcaucacua

SEQ ID NO: 163056 - RNA, 22 nt, Human
ugucucagaguaucccugaacu

SEQ ID NO: 163057 - RNA, 22 nt, Human
ugguaaaguguacugaauauga

SEQ ID NO: 163058 - RNA, 22 nt, Human
ucucacugcaaauauuauguau

SEQ ID NO: 163059 - RNA, 22 nt, Human
cagcuuggaggaggaucuaaga

SEQ ID NO: 163060 - RNA, 22 nt, Human
ggaagagagggcugggccucaa

SEQ ID NO: 163061 - RNA, 22 nt, Human
uggaggaaucagggcuuaggcu

SEQ ID NO: 163062 - RNA, 22 nt, Human
ugcacacaaaugugaacgugcc

SEQ ID NO: 163063 - RNA, 22 nt, Human
uuugcaaauaccaugaaacuug

SEQ ID NO: 163064 - RNA, 18 nt, Human
ugucucaggcugaaacag

SEQ ID NO: 163065 - RNA, 15 nt, Human
ugggcagaucacuug

SEQ ID NO: 163066 - RNA, 22 nt, Human
aggcugagauagguggaucauu

SEQ ID NO: 163067 - RNA, 22 nt, Human
uccagggauguccuguagcacu

SEQ ID NO: 163068 - RNA, 23 nt, Human
aguuuuucugcaugguucuguau

SEQ ID NO: 163069 - RNA, 22 nt, Human
augaaaacggaccagagcuauu

SEQ ID NO: 163070 - RNA, 22 nt, Human
gggcaugguggugcacaccugu

SEQ ID NO: 163071 - RNA, 22 nt, Human
caccagcuacagacuacugugu

SEQ ID NO: 163072 - RNA, 22 nt, Human
gccucugcaggugcgguuaucc

SEQ ID NO: 163073 - RNA, 22 nt, Human
ugagccugcugucgcuggaccc

SEQ ID NO: 163074 - RNA, 22 nt, Human
cuugcugggguaagucugugcu

SEQ ID NO: 163075 - RNA, 22 nt, Human
cagagcaguccuugucaaucag

SEQ ID NO: 163076 - RNA, 22 nt, Human
uacuuagagcgauaauuuauac

SEQ ID NO: 163077 - RNA, 22 nt, Human
uggagcagagaugguggccuuc

SEQ ID NO: 163078 - RNA, 19 nt, Human
uggcuccugccugccuucu

SEQ ID NO: 163079 - RNA, 22 nt, Human
ccaaaguccauaguuuacuuua

SEQ ID NO: 163080 - RNA, 22 nt, Human
cccuggagggcagacagaugcc

SEQ ID NO: 163081 - RNA, 22 nt, Human
gacacauagaucuaucucacuc

SEQ ID NO: 163082 - RNA, 21 nt, Human
gggugggaggacacagcaggc

SEQ ID NO: 163083 - RNA, 22 nt, Human
cugggccuagcaacagaggagu

SEQ ID NO: 163084 - RNA, 22 nt, Human
cugagccacugcuuguucagug

SEQ ID NO: 163085 - RNA, 22 nt, Human
aaaugcaauuguauguacucca

SEQ ID NO: 163086 - RNA, 22 nt, Human
agucucugcaugaugcagcaca

SEQ ID NO: 163087 - RNA, 22 nt, Human
gaacagcccuguuaagucuguu

SEQ ID NO: 163088 - RNA, 22 nt, Human
ggcagugaaugaaacagaggcu

SEQ ID NO: 163089 - RNA, 19 nt, Human
gcaggcacagcccugggug

SEQ ID NO: 163090 - RNA, 22 nt, Human
aaugauggauuuagacaagcug

SEQ ID NO: 163091 - RNA, 22 nt, Human
gcugucaccaaagcaggcacug

SEQ ID NO: 163092 - RNA, 17 nt, Human
ucugccgacugccagcu

SEQ ID NO: 163093 - RNA, 22 nt, Human
cugggcuggcgcauccgacacg

SEQ ID NO: 163094 - RNA, 22 nt, Human
gcagagugagccgaggcugcuc

SEQ ID NO: 163095 - RNA, 22 nt, Human
aagcugccugggaggaagggcu

SEQ ID NO: 163096 - RNA, 23 nt, Human
aggcagagccaaggucaaaaccc

SEQ ID NO: 163097 - RNA, 22 nt, Human
ugaggccaggaucccaggcucu

SEQ ID NO: 163098 - RNA, 23 nt, Human
uggcucugagagguucagaugcu

SEQ ID NO: 163099 - RNA, 22 nt, Human
agccagacauggcuccugcucc

SEQ ID NO: 163100 - RNA, 22 nt, Human
gcugccuguggcccuucugggu

SEQ ID NO: 163101 - RNA, 22 nt, Human
gcccagccuccaagcuccaagg

SEQ ID NO: 163102 - RNA, 22 nt, Human
cagaauaugacaagauuuuccu

SEQ ID NO: 163103 - RNA, 22 nt, Human
ugggacaguuguccuccacucu

SEQ ID NO: 163104 - RNA, 23 nt, Human
ugcauuauccucucugaagacca

SEQ ID NO: 163105 - RNA, 22 nt, Human
ugaaauguuugaagaccacuga

SEQ ID NO: 163106 - RNA, 22 nt, Human
uauguacagggauagaacuuga

SEQ ID NO: 163107 - RNA, 19 nt, Human
gcacugaagaguuggucac

SEQ ID NO: 163108 - RNA, 22 nt, Human
cucuggaguucuucaagcuacu

SEQ ID NO: 163109 - RNA, 22 nt, Human
caaaguccuagaacagugcuug

SEQ ID NO: 163110 - RNA, 22 nt, Human
uguguacaagaguguuuacugu

SEQ ID NO: 163111 - RNA, 22 nt, Human
guucacauccuugugaggauuu

SEQ ID NO: 163112 - RNA, 22 nt, Human
caguuuuucaaaauuacaugau

SEQ ID NO: 163113 - RNA, 22 nt, Human
uucagaaagugaaucuuguuau

SEQ ID NO: 163114 - RNA, 22 nt, Human
auguacaguuucuagacucaaa

SEQ ID NO: 163115 - RNA, 22 nt, Human
gagccuggauagccuuguucca

SEQ ID NO: 163116 - RNA, 22 nt, Human
gcaaaaaaugcuuguugcuuag

SEQ ID NO: 163117 - RNA, 21 nt, Human
gcagggacaaagcuucaggag

SEQ ID NO: 163118 - RNA, 22 nt, Human
gagcucccaggccccagcaagg

SEQ ID NO: 163119 - RNA, 22 nt, Human
ccugggcagggcuggacucuca

SEQ ID NO: 163120 - RNA, 22 nt, Human
aagcaucucuauguggagagug

SEQ ID NO: 163121 - RNA, 22 nt, Human
agagaauuacagaagaauguca

SEQ ID NO: 163122 - RNA, 22 nt, Human
ugccucugugggccuuccuggc

SEQ ID NO: 163123 - RNA, 22 nt, Human
agacaaagacagcaucucaggu

SEQ ID NO: 163124 - RNA, 22 nt, Human
gccaggcaaauuaaggaaugca

SEQ ID NO: 163125 - RNA, 22 nt, Human
augcagcaguuuacaaagcaau

SEQ ID NO: 163126 - RNA, 22 nt, Human
uagcauuuauggucaugugucc

SEQ ID NO: 163127 - RNA, 22 nt, Human
gagcaggcucugccuguguguc

SEQ ID NO: 163128 - RNA, 23 nt, Human
ugcugggguaguuuguggcacag

SEQ ID NO: 163129 - RNA, 22 nt, Human
ccuguguggccaggcuggaguc

SEQ ID NO: 163130 - RNA, 22 nt, Human
uguuacuuaucucacgugaugc

SEQ ID NO: 163131 - RNA, 23 nt, Human
gggugggccaaauuagguagccu

SEQ ID NO: 163132 - RNA, 23 nt, Human
uugugggcagauuccauggggag

SEQ ID NO: 163133 - RNA, 22 nt, Human
cacaugggugugccuggaggaa

SEQ ID NO: 163134 - RNA, 22 nt, Human
ucugcgcugccuugauccuugg

SEQ ID NO: 163135 - RNA, 22 nt, Human
ggagaggugaauggcugcucua

SEQ ID NO: 163136 - RNA, 22 nt, Human
aaguucaaggugauaguggcag

SEQ ID NO: 163137 - RNA, 22 nt, Human
ggaugcaggacggcauggaugu

SEQ ID NO: 163138 - RNA, 22 nt, Human
uccagggaugccagccauguug

SEQ ID NO: 163139 - RNA, 20 nt, Human
cagggccacgcuccaaggca

SEQ ID NO: 163140 - RNA, 22 nt, Human
uggccuggcagagcaaggccug

SEQ ID NO: 163141 - RNA, 22 nt, Human
gggccacacagaaccuccuggu

SEQ ID NO: 163142 - RNA, 22 nt, Human
cggagcugccugccaagccugc

SEQ ID NO: 163143 - RNA, 22 nt, Human
agagccaggcaggcaauguuga

SEQ ID NO: 163144 - RNA, 22 nt, Human
uagauuuccucuuccucauucc

SEQ ID NO: 163145 - RNA, 22 nt, Human
gcaguggcaccgcuggcucugg

SEQ ID NO: 163146 - RNA, 22 nt, Human
ucugccuggauuccauucucca

SEQ ID NO: 163147 - RNA, 21 nt, Human
aagagcuggaucaaggauaag

SEQ ID NO: 163148 - RNA, 22 nt, Human
gaaaagcuaggccaguucagcu

SEQ ID NO: 163149 - RNA, 22 nt, Human
caggcagccugcggucugcaca

SEQ ID NO: 163150 - RNA, 22 nt, Human
uccugcagccacugcaggcaga

SEQ ID NO: 163151 - RNA, 22 nt, Human
ugggccuggagcccuggagagu

SEQ ID NO: 163152 - RNA, 17 nt, Human
ggccuuggggccucagu

SEQ ID NO: 163153 - RNA, 22 nt, Human
gaugauuuuaugucuugucauu

SEQ ID NO: 163154 - RNA, 22 nt, Human
ugggcagagucguggggaauag

SEQ ID NO: 163155 - RNA, 22 nt, Human
gcugccugaucauacaccaggg

SEQ ID NO: 163156 - RNA, 22 nt, Human
ugccugccaugcagaaagcuga

SEQ ID NO: 163157 - RNA, 22 nt, Human
cugagggccuuggcuccugccc

SEQ ID NO: 163158 - RNA, 22 nt, Human
ggcacugaaguggguguugggu

SEQ ID NO: 163159 - RNA, 22 nt, Human
agaggagcugggaggcccucgu

SEQ ID NO: 163160 - RNA, 22 nt, Human
ugggcagauguccucugaagug

SEQ ID NO: 163161 - RNA, 22 nt, Human
uuacauuuuaguuaaccuguga

SEQ ID NO: 163162 - RNA, 22 nt, Human
uucuuuccucccagccuuugga

SEQ ID NO: 163163 - RNA, 22 nt, Human
ucugcuggccuuagcaggucua

SEQ ID NO: 163164 - RNA, 22 nt, Human
agauuucccucuuguauuugca

SEQ ID NO: 163165 - RNA, 23 nt, Human
cugcagucgccggccugggugcc

SEQ ID NO: 163166 - RNA, 18 nt, Human
uccauuguucuacuguga

SEQ ID NO: 163167 - RNA, 22 nt, Human
uagcagcucacagccucccauu

SEQ ID NO: 163168 - RNA, 22 nt, Human
acagaaauauucguggugcuug

SEQ ID NO: 163169 - RNA, 22 nt, Human
ugugugccagccuacgaggagc

SEQ ID NO: 163170 - RNA, 22 nt, Human
uacaagagguauauagaaacag

SEQ ID NO: 163171 - RNA, 22 nt, Human
aggggugauuugggacaggaca

SEQ ID NO: 163172 - RNA, 22 nt, Human
gcuggcagagacaagaagacua

SEQ ID NO: 163173 - RNA, 23 nt, Human
cagugcagggcaacucagacucc

SEQ ID NO: 163174 - RNA, 22 nt, Human
cugggcagugguggcccuuccc

SEQ ID NO: 163175 - RNA, 20 nt, Human
gcugucuggauuagaagccu

SEQ ID NO: 163176 - RNA, 22 nt, Human
augggaggaaggaggcccuuga

SEQ ID NO: 163177 - RNA, 22 nt, Human
agaaagaacgcacuugugcugc

SEQ ID NO: 163178 - RNA, 22 nt, Human
cauugcccaguaggaucaccag

SEQ ID NO: 163179 - RNA, 22 nt, Human
aaugcuagugugauauguaagg

SEQ ID NO: 163180 - RNA, 22 nt, Human
uggcucugugucucccagcagc

SEQ ID NO: 163181 - RNA, 22 nt, Human
uggcagagaacacggcugaucu

SEQ ID NO: 163182 - RNA, 20 nt, Human
ucagugauuaucucugagug

SEQ ID NO: 163183 - RNA, 22 nt, Human
agccaaggagugcagguggcuu

SEQ ID NO: 163184 - RNA, 22 nt, Human
ugcagaggaccauuguccugga

SEQ ID NO: 163185 - RNA, 22 nt, Human
ggccucgcggcuucugguggcu

SEQ ID NO: 163186 - RNA, 22 nt, Human
agaggcuccuucacucuggcac

SEQ ID NO: 163187 - RNA, 22 nt, Human
ccaggacuuuaaguccagcacu

SEQ ID NO: 163188 - RNA, 22 nt, Human
uggccugccucccggcuucuuu

SEQ ID NO: 163189 - RNA, 21 nt, Human
cagagcuguccaaacccugac

SEQ ID NO: 163190 - RNA, 22 nt, Human
ucauccaguucacauggugagu

SEQ ID NO: 163191 - RNA, 22 nt, Human
uagccaggcgaggucagugucg

SEQ ID NO: 163192 - RNA, 22 nt, Human
uucaagauaauaggaaugaaaa

SEQ ID NO: 163193 - RNA, 22 nt, Human
aggccucagugaucaucaucag

SEQ ID NO: 163194 - RNA, 22 nt, Human
uuuucuuauggugaagcacaaa

SEQ ID NO: 163195 - RNA, 22 nt, Human
ggcccagcacagugcuuggggg

SEQ ID NO: 163196 - RNA, 19 nt, Human
gccugagccagccaugcaa

SEQ ID NO: 163197 - RNA, 22 nt, Human
ucacugaagacugggcucuaaa

SEQ ID NO: 163198 - RNA, 22 nt, Human
gggagcugguuccugcccucca

SEQ ID NO: 163199 - RNA, 22 nt, Human
gccugagcccaggugugcagag

SEQ ID NO: 163200 - RNA, 22 nt, Human
uggcucagaggggaagugguuu

SEQ ID NO: 163201 - RNA, 22 nt, Human
cauugcugugggcauuugcugc

SEQ ID NO: 163202 - RNA, 22 nt, Human
gccuucugauaucucuuggcau

SEQ ID NO: 163203 - RNA, 22 nt, Human
ccugggaggcggagguugcagg

SEQ ID NO: 163204 - RNA, 22 nt, Human
uuggccuucccuaccugggcca

SEQ ID NO: 163205 - RNA, 22 nt, Human
uuagucuucuuccuuauauguu

SEQ ID NO: 163206 - RNA, 22 nt, Human
gcugucucauacaaggcccugc

SEQ ID NO: 163207 - RNA, 22 nt, Human
aggcugaggcagguggaucacc

SEQ ID NO: 163208 - RNA, 22 nt, Human
agucagugaaaacuagaauguu

SEQ ID NO: 163209 - RNA, 22 nt, Human
gccuggagaggaagccggugga

SEQ ID NO: 163210 - RNA, 22 nt, Human
ggcucugguugaccaugauggc

SEQ ID NO: 163211 - RNA, 18 nt, Human
cagaagcaggcagugcag

SEQ ID NO: 163212 - RNA, 22 nt, Human
agauuucacaugcugcucuauu

SEQ ID NO: 163213 - RNA, 22 nt, Human
cagagugaaaacugagcucaaa

SEQ ID NO: 163214 - RNA, 22 nt, Human
guguauaacuaucuaucuagua

SEQ ID NO: 163215 - RNA, 22 nt, Human
ccugggaggcugugggucugcu

SEQ ID NO: 163216 - RNA, 22 nt, Human
aauugugcuaugauuaugaaag

SEQ ID NO: 163217 - RNA, 18 nt, Human
gagcugccauauuuaguu

SEQ ID NO: 163218 - RNA, 22 nt, Human
gagcuuccacucuagaaggagu

SEQ ID NO: 163219 - RNA, 21 nt, Human
ccaggcuccugaggcugguca

SEQ ID NO: 163220 - RNA, 22 nt, Human
ggaggccauaguuugggaguca

SEQ ID NO: 163221 - RNA, 22 nt, Human
ccaagggcugcugaggugucca

SEQ ID NO: 163222 - RNA, 22 nt, Human
agccagcuggugggucagcugg

SEQ ID NO: 163223 - RNA, 22 nt, Human
agcuucuggaagccuggcagca

SEQ ID NO: 163224 - RNA, 22 nt, Human
ggcaaaguuuucaucucauaac

SEQ ID NO: 163225 - RNA, 22 nt, Human
ccagcagcccacaggcgucccu

SEQ ID NO: 163226 - RNA, 22 nt, Human
ggaugcugggagacagcaggca

SEQ ID NO: 163227 - RNA, 22 nt, Human
uaaguucagaguucucauuugu

SEQ ID NO: 163228 - RNA, 22 nt, Human
ccuggcuccugccucugcaggg

SEQ ID NO: 163229 - RNA, 20 nt, Human
ugggagcuggugaggucuca

SEQ ID NO: 163230 - RNA, 22 nt, Human
uugaaaggguuaaagugguaaa

SEQ ID NO: 163231 - RNA, 22 nt, Human
caggaugugaggaggccauuug

SEQ ID NO: 163232 - RNA, 22 nt, Human
cugcugggaaggucugcucagu

SEQ ID NO: 163233 - RNA, 22 nt, Human
aggagcccugcgggaggcagag

SEQ ID NO: 163234 - RNA, 22 nt, Human
gaugagggccugguggcugugc

SEQ ID NO: 163235 - RNA, 22 nt, Human
gcagccugaugaucuggguugu

SEQ ID NO: 163236 - RNA, 22 nt, Human
gcagggacagggcagggccuuu

SEQ ID NO: 163237 - RNA, 22 nt, Human
agccagggauggcagugcccag

SEQ ID NO: 163238 - RNA, 22 nt, Human
cacagguguucuugcagugaaa

SEQ ID NO: 163239 - RNA, 22 nt, Human
uugggcugaacccugcagcuga

SEQ ID NO: 163240 - RNA, 22 nt, Human
cacagggcagagaccugggugc

SEQ ID NO: 163241 - RNA, 19 nt, Human
uagucuuuauucuuaauuu

SEQ ID NO: 163242 - RNA, 22 nt, Human
cuggccuuuuguuucuggagaa

SEQ ID NO: 163243 - RNA, 22 nt, Human
ccucuggggugagugggccacu

SEQ ID NO: 163244 - RNA, 22 nt, Human
cagucacauugcccugcauuua

SEQ ID NO: 163245 - RNA, 20 nt, Human
gagggcaggcacccauuuca

SEQ ID NO: 163246 - RNA, 21 nt, Human
ggagcugcaggagccgaaggc

SEQ ID NO: 163247 - RNA, 22 nt, Human
ccagcuccugggucuuagucag

SEQ ID NO: 163248 - RNA, 22 nt, Human
agucucagccacacagaccuau

SEQ ID NO: 163249 - RNA, 22 nt, Human
uuuccauauuuggucuuuggga

SEQ ID NO: 163250 - RNA, 22 nt, Human
acuggcaguggcagcagaaaga

SEQ ID NO: 163251 - RNA, 22 nt, Human
cucuggaguggguggccgggag

SEQ ID NO: 163252 - RNA, 22 nt, Human
ucugcaggaaaaaagugccugg

SEQ ID NO: 163253 - RNA, 23 nt, Human
gcugucugucaucucugcgggag

SEQ ID NO: 163254 - RNA, 22 nt, Human
ccagcugcuugggaaaaugucu

SEQ ID NO: 163255 - RNA, 22 nt, Human
cagggcagggagcuuagaauga

SEQ ID NO: 163256 - RNA, 23 nt, Human
ccugucugugcuggguggacaca

SEQ ID NO: 163257 - RNA, 22 nt, Human
aggcucugcagaccccagcugu

SEQ ID NO: 163258 - RNA, 22 nt, Human
ugcagggcuaagucagagccug

SEQ ID NO: 163259 - RNA, 22 nt, Human
ggguggggcccaggaaaucuau

SEQ ID NO: 163260 - RNA, 22 nt, Human
uagcagggucucaggagucagg

SEQ ID NO: 163261 - RNA, 22 nt, Human
caggcagagugagguggucuaa

SEQ ID NO: 163262 - RNA, 22 nt, Human
ucuggcugcugcgugagugcuu

SEQ ID NO: 163263 - RNA, 22 nt, Human
uccucagaaaccccugugaggu

SEQ ID NO: 163264 - RNA, 22 nt, Human
acagcacaaucugagucccaga

SEQ ID NO: 163265 - RNA, 22 nt, Human
aaauguauugcauaggauauuu

SEQ ID NO: 163266 - RNA, 22 nt, Human
ugggacacccucacgccugcac

SEQ ID NO: 163267 - RNA, 23 nt, Human
cuguggcugaguccuguuggagu

SEQ ID NO: 163268 - RNA, 21 nt, Human
gcaugccugcaucuuaguguu

SEQ ID NO: 163269 - RNA, 22 nt, Human
aauguguagcauuuaaugcagu

SEQ ID NO: 163270 - RNA, 22 nt, Human
uugcagagaucagcagguuuga

SEQ ID NO: 163271 - RNA, 21 nt, Human
gcccucaggggaggauggccu

SEQ ID NO: 163272 - RNA, 22 nt, Human
ccagggugaggaggcucccacg

SEQ ID NO: 163273 - RNA, 22 nt, Human
gcuggggaggcagcagagaaca

SEQ ID NO: 163274 - RNA, 22 nt, Human
aggccuagaggaauggccaggg

SEQ ID NO: 163275 - RNA, 22 nt, Human
aaaugugucauauucaaaguca

SEQ ID NO: 163276 - RNA, 20 nt, Human
ggaagcagagaacuguuuuc

SEQ ID NO: 163277 - RNA, 22 nt, Human
auucuccaucaccacuggcacu

SEQ ID NO: 163278 - RNA, 22 nt, Human
uagcugccuuugggcuccugcu

SEQ ID NO: 163279 - RNA, 22 nt, Human
cagcccuguccagcagagggug

SEQ ID NO: 163280 - RNA, 22 nt, Human
ggcaggaggaagaguuagcacc

SEQ ID NO: 163281 - RNA, 21 nt, Human
aaguaaaucagagaaauaacc

SEQ ID NO: 163282 - RNA, 22 nt, Human
ggcagagguagcuggaaccagg

SEQ ID NO: 163283 - RNA, 22 nt, Human
ugcccugugugugcaagcacug

SEQ ID NO: 163284 - RNA, 22 nt, Human
ugggcagagucauacaggagac

SEQ ID NO: 163285 - RNA, 22 nt, Human
ccugccugcggcccgcggggag

SEQ ID NO: 163286 - RNA, 22 nt, Human
ccagggugggguccaggaacca

SEQ ID NO: 163287 - RNA, 22 nt, Human
ugcuggggguucagaugaguaa

SEQ ID NO: 163288 - RNA, 21 nt, Human
cagagcagcguucugcugugg

SEQ ID NO: 163289 - RNA, 22 nt, Human
cccagguggguuggccucuguc

SEQ ID NO: 163290 - RNA, 18 nt, Human
acaggccucaguccugca

SEQ ID NO: 163291 - RNA, 22 nt, Human
uggagcugggguuugaaucugg

SEQ ID NO: 163292 - RNA, 22 nt, Human
ccugucagaugaaguaauugug

SEQ ID NO: 163293 - RNA, 15 nt, Human
cagucccagggaccc

SEQ ID NO: 163294 - RNA, 22 nt, Human
gagcagcucugggugacccagu

SEQ ID NO: 163295 - RNA, 22 nt, Human
cuuugcauacaauuuuuagaaa

SEQ ID NO: 163296 - RNA, 22 nt, Human
auacauacguacauacguaugu

SEQ ID NO: 163297 - RNA, 22 nt, Human
uacaguauuaugagugauugaa

SEQ ID NO: 163298 - RNA, 22 nt, Human
uuggagcccugaggaucuggau

SEQ ID NO: 163299 - RNA, 22 nt, Human
ugcucucucaggccuggcccac

SEQ ID NO: 163300 - RNA, 22 nt, Human
caaagucccagcugcuuagaga

SEQ ID NO: 163301 - RNA, 22 nt, Human
ugucuagggagcugcucaggcu

SEQ ID NO: 163302 - RNA, 22 nt, Human
gggcugcuuuuuucuuagcaga

SEQ ID NO: 163303 - RNA, 22 nt, Human
aagaaauuaaggaaugcaacga

SEQ ID NO: 163304 - RNA, 22 nt, Human
caaggagaaaacggcuucugaa

SEQ ID NO: 163305 - RNA, 22 nt, Human
auuuagaaauuccaaaaguauu

SEQ ID NO: 163306 - RNA, 22 nt, Human
caggaaccuaaugaaggcucac

SEQ ID NO: 163307 - RNA, 22 nt, Human
gucugucucucuccagagugca

SEQ ID NO: 163308 - RNA, 22 nt, Human
agagcagccugugaugaugcac

SEQ ID NO: 163309 - RNA, 22 nt, Human
gcugcugcgcuugucuacuguu

SEQ ID NO: 163310 - RNA, 22 nt, Human
ugcacccucaucagucaaaugg

SEQ ID NO: 163311 - RNA, 22 nt, Human
gcugcagcuuuaggauccagug

SEQ ID NO: 163312 - RNA, 22 nt, Human
ccagggccucguguucugagug

SEQ ID NO: 163313 - RNA, 20 nt, Human
acagaaagagagaaugucag

SEQ ID NO: 163314 - RNA, 22 nt, Human
gccacccccaaguagguggucu

SEQ ID NO: 163315 - RNA, 22 nt, Human
cccagacuccucuggcuggugg

SEQ ID NO: 163316 - RNA, 22 nt, Human
ggcagccuccagggcacuggug

SEQ ID NO: 163317 - RNA, 22 nt, Human
aggccucuucagggagcaugga

SEQ ID NO: 163318 - RNA, 18 nt, Human
ucaaagucuggcuccacu

SEQ ID NO: 163319 - RNA, 22 nt, Human
aggcuccuuguucaucauccau

SEQ ID NO: 163320 - RNA, 22 nt, Human
cuucccacuaguaucacagagc

SEQ ID NO: 163321 - RNA, 22 nt, Human
cauuccuuaacguggggagucu

SEQ ID NO: 163322 - RNA, 22 nt, Human
caggccuggcugcagcucgccu

SEQ ID NO: 163323 - RNA, 22 nt, Human
ccacugaaggucaacauagagc

SEQ ID NO: 163324 - RNA, 21 nt, Human
uggcagggguaguaguacagc

SEQ ID NO: 163325 - RNA, 22 nt, Human
ugcucuggggagcuccucugcg

SEQ ID NO: 163326 - RNA, 22 nt, Human
ucucagagccuaacuaaccuaa

SEQ ID NO: 163327 - RNA, 22 nt, Human
uccugucugcucacagagcugg

SEQ ID NO: 163328 - RNA, 22 nt, Human
ucccagagccucugccacucug

SEQ ID NO: 163329 - RNA, 22 nt, Human
auguaucaauuaucugucugca

SEQ ID NO: 163330 - RNA, 22 nt, Human
aggccugcagcaggagcaaacc

SEQ ID NO: 163331 - RNA, 22 nt, Human
cagcaucuaaucuucaugccgg

SEQ ID NO: 163332 - RNA, 22 nt, Human
aagggcagcuauuaucgucauc

SEQ ID NO: 163333 - RNA, 22 nt, Human
gcugagguggagauugcaguga

SEQ ID NO: 163334 - RNA, 22 nt, Human
agggccugcucuaucacucuca

SEQ ID NO: 163335 - RNA, 19 nt, Human
ucuggagcugaugcaggug

SEQ ID NO: 163336 - RNA, 18 nt, Human
ccuggcagccaugcgcgc

SEQ ID NO: 163337 - RNA, 22 nt, Human
ccucucucuccugcacacacac

SEQ ID NO: 163338 - RNA, 22 nt, Human
aaaugcacagguuuuaaauccu

SEQ ID NO: 163339 - RNA, 22 nt, Human
cugggcugcaggaguggggcaa

SEQ ID NO: 163340 - RNA, 22 nt, Human
cugaaggacuuggugauaguug

SEQ ID NO: 163341 - RNA, 22 nt, Human
acagagcuuaauucaggagcuu

SEQ ID NO: 163342 - RNA, 22 nt, Human
ccagagugacgugaagugugaa

SEQ ID NO: 163343 - RNA, 22 nt, Human
guacucucuugaaggccuuucu

SEQ ID NO: 163344 - RNA, 22 nt, Human
ucacaacuugaagcugauuuaa

SEQ ID NO: 163345 - RNA, 22 nt, Human
cagaggcagaggucaucucugg

SEQ ID NO: 163346 - RNA, 22 nt, Human
aaggcacugcuuugcugcgccc

SEQ ID NO: 163347 - RNA, 22 nt, Human
caaggagaguaauugaaugaga

SEQ ID NO: 163348 - RNA, 22 nt, Human
ucucagagaugucaagagucua

SEQ ID NO: 163349 - RNA, 22 nt, Human
gccuuggcugaugugcgaauga

SEQ ID NO: 163350 - RNA, 22 nt, Human
acaaaggugcgucccuucagcu

SEQ ID NO: 163351 - RNA, 22 nt, Human
ugacaccacaacuagccauuga

SEQ ID NO: 163352 - RNA, 22 nt, Human
cccagagccucauucuguuggg

SEQ ID NO: 163353 - RNA, 18 nt, Human
aggaagcaggaggaaggc

SEQ ID NO: 163354 - RNA, 19 nt, Human
uguuggugcggauguggag

SEQ ID NO: 163355 - RNA, 22 nt, Human
caccaggcuggagugcagaggu

SEQ ID NO: 163356 - RNA, 22 nt, Human
augcaucauggaaaacucaguu

SEQ ID NO: 163357 - RNA, 22 nt, Human
ucaccaggcuggaaugcagugg

SEQ ID NO: 163358 - RNA, 22 nt, Human
gaagagcuauguccagggagca

SEQ ID NO: 163359 - RNA, 22 nt, Human
ccucaugguacuuacuguagcu

SEQ ID NO: 163360 - RNA, 22 nt, Human
ugccugucuucaggagugucac

SEQ ID NO: 163361 - RNA, 22 nt, Human
ccuuggcccuagccucaggcaa

SEQ ID NO: 163362 - RNA, 22 nt, Human
cagcaaaagccagcauaagcuc

SEQ ID NO: 163363 - RNA, 22 nt, Human
uaagaacaguguuucaucucua

SEQ ID NO: 163364 - RNA, 22 nt, Human
gguggccucugcaggccucgac

SEQ ID NO: 163365 - RNA, 22 nt, Human
auugacaagacaauggcucuua

SEQ ID NO: 163366 - RNA, 22 nt, Human
cagagcuggagaaguggauuua

SEQ ID NO: 163367 - RNA, 22 nt, Human
ugcaccauacccauuccccucu

SEQ ID NO: 163368 - RNA, 22 nt, Human
cuggcuccauccuugagcucug

SEQ ID NO: 163369 - RNA, 22 nt, Human
caugggagcuaucuccaucacu

SEQ ID NO: 163370 - RNA, 22 nt, Human
augauuuccaguuguugcuaag

SEQ ID NO: 163371 - RNA, 22 nt, Human
agggcugccauuucuggcccaa

SEQ ID NO: 163372 - RNA, 22 nt, Human
gaaggaaaacagaucugccuga

SEQ ID NO: 163373 - RNA, 22 nt, Human
cagcuggcguggagugauugca

SEQ ID NO: 163374 - RNA, 22 nt, Human
ggucccagcuggucacugucag

SEQ ID NO: 163375 - RNA, 22 nt, Human
ucagcagggccuccuugugcag

SEQ ID NO: 163376 - RNA, 22 nt, Human
auauacuuggagacuaucauug

SEQ ID NO: 163377 - RNA, 22 nt, Human
caggugggccgggguuuguucu

SEQ ID NO: 163378 - RNA, 22 nt, Human
cucaggaugcaggucacaggac

SEQ ID NO: 163379 - RNA, 21 nt, Human
agagaauugccuuagauguuc

SEQ ID NO: 163380 - RNA, 22 nt, Human
gcuguauuuauuuucuaggguu

SEQ ID NO: 163381 - RNA, 22 nt, Human
agcugggagcagagccacagcc

SEQ ID NO: 163382 - RNA, 22 nt, Human
uaguaaaaguuuaguugaaagu

SEQ ID NO: 163383 - RNA, 17 nt, Human
ccugggaggaguuauga

SEQ ID NO: 163384 - RNA, 22 nt, Human
aagaauguuaguuucugauaca

SEQ ID NO: 163385 - RNA, 18 nt, Human
ucugucucuguccuugcu

SEQ ID NO: 163386 - RNA, 23 nt, Human
aguacauucgaaaaauucuguga

SEQ ID NO: 163387 - RNA, 22 nt, Human
caggcaccccaggugagcacug

SEQ ID NO: 163388 - RNA, 22 nt, Human
agaauaaaucaaauguccugag

SEQ ID NO: 163389 - RNA, 22 nt, Human
gaaaucugaaucuucuguuggu

SEQ ID NO: 163390 - RNA, 22 nt, Human
cagaggcugcucuggguggcau

SEQ ID NO: 163391 - RNA, 22 nt, Human
ugcagggcacacgcacgggugu

SEQ ID NO: 163392 - RNA, 22 nt, Human
aaggacagaaacagauugcugg

SEQ ID NO: 163393 - RNA, 20 nt, Human
ugcuguaagauuagagagcu

SEQ ID NO: 163394 - RNA, 22 nt, Human
aaugcacaugucuuggccucac

SEQ ID NO: 163395 - RNA, 22 nt, Human
aaggcccuaauagagcacauau

SEQ ID NO: 163396 - RNA, 22 nt, Human
gcacccagaggucagcagugcu

SEQ ID NO: 163397 - RNA, 22 nt, Human
cugcccugucuuuuucugauga

SEQ ID NO: 163398 - RNA, 22 nt, Human
agcuugaguuuuggaugaagug

SEQ ID NO: 163399 - RNA, 22 nt, Human
gggagggaaagcuugaucuguc

SEQ ID NO: 163400 - RNA, 22 nt, Human
uacaaaugaguuguaugaacca

SEQ ID NO: 163401 - RNA, 22 nt, Human
guguggcugccagccaagaggc

SEQ ID NO: 163402 - RNA, 22 nt, Human
uuacaucuaaacugugaacaau

SEQ ID NO: 163403 - RNA, 22 nt, Human
aguggccagugcugcucugggg

SEQ ID NO: 163404 - RNA, 21 nt, Human
agagaagaggacuuucucaca

SEQ ID NO: 163405 - RNA, 22 nt, Human
augcaccugaacuccaucagcu

SEQ ID NO: 163406 - RNA, 21 nt, Human
augaagucuaugcuucugugu

SEQ ID NO: 163407 - RNA, 22 nt, Human
cucugugcccuacugcucagcu

SEQ ID NO: 163408 - RNA, 22 nt, Human
guuugucuuaauuaggcaucga

SEQ ID NO: 163409 - RNA, 21 nt, Human
ugauuuccaucuuaaaauaaa

SEQ ID NO: 163410 - RNA, 18 nt, Human
caggagcaggaguugaac

SEQ ID NO: 163411 - RNA, 23 nt, Human
gugagcagcccacuaggaaugcc

SEQ ID NO: 163412 - RNA, 19 nt, Human
aggcucugagcuccuggag

SEQ ID NO: 163413 - RNA, 22 nt, Human
guacuuccguggacuaauuguu

SEQ ID NO: 163414 - RNA, 22 nt, Human
ugaaaaggaguccuuguuuuca

SEQ ID NO: 163415 - RNA, 22 nt, Human
uaaaaguuuuaguuguacauaa

SEQ ID NO: 163416 - RNA, 22 nt, Human
ugucaugcagguuuguuauaga

SEQ ID NO: 163417 - RNA, 22 nt, Human
gccuggcaggccugggccagca

SEQ ID NO: 163418 - RNA, 18 nt, Human
ccagcaugccagaggcug

SEQ ID NO: 163419 - RNA, 22 nt, Human
uccucaggaugugggguagaau

SEQ ID NO: 163420 - RNA, 22 nt, Human
ucugcaggccucgacaaggcca

SEQ ID NO: 163421 - RNA, 22 nt, Human
aaucaguuagaaggaagagaau

SEQ ID NO: 163422 - RNA, 22 nt, Human
aaaugguguuucuaaugcuaga

SEQ ID NO: 163423 - RNA, 22 nt, Human
cacagcuuaugccacugauugg

SEQ ID NO: 163424 - RNA, 22 nt, Human
uggaagagggagcuggguggcc

SEQ ID NO: 163425 - RNA, 22 nt, Human
cuuccaaagcacuuuauggacc

SEQ ID NO: 163426 - RNA, 22 nt, Human
agugaaauagcauuuaugaagc

SEQ ID NO: 163427 - RNA, 22 nt, Human
aagggcugaaugaaggguugaa

SEQ ID NO: 163428 - RNA, 22 nt, Human
ccucuugccaaucagcuacaga

SEQ ID NO: 163429 - RNA, 18 nt, Human
gguggccuugacuucucu

SEQ ID NO: 163430 - RNA, 21 nt, Human
agcagccauuucacagagacu

SEQ ID NO: 163431 - RNA, 22 nt, Human
uauuucuugaguggucaguuuc

SEQ ID NO: 163432 - RNA, 22 nt, Human
cacugaguucccugacauuuca

SEQ ID NO: 163433 - RNA, 22 nt, Human
gcacagggcccugugcguaggu

SEQ ID NO: 163434 - RNA, 22 nt, Human
ggcacagggagccgcaguugca

SEQ ID NO: 163435 - RNA, 22 nt, Human
cugaggagagaucacguggugu

SEQ ID NO: 163436 - RNA, 22 nt, Human
acugcuuuucagagucugccug

SEQ ID NO: 163437 - RNA, 22 nt, Human
agaacagcaguuaugguucauu

SEQ ID NO: 163438 - RNA, 22 nt, Human
gggcagaggggcgcuucccucu

SEQ ID NO: 163439 - RNA, 22 nt, Human
augugaaagagguguucagugg

SEQ ID NO: 163440 - RNA, 22 nt, Human
ugagccuguccugugcauguga

SEQ ID NO: 163441 - RNA, 22 nt, Human
ucucagggccucccucuguuuc

SEQ ID NO: 163442 - RNA, 19 nt, Human
ucaaagucugagucacuuu

SEQ ID NO: 163443 - RNA, 22 nt, Human
acuuuggaucugauguaaucag

SEQ ID NO: 163444 - RNA, 22 nt, Human
agugaccaacaaugcugagaag

SEQ ID NO: 163445 - RNA, 22 nt, Human
gggcccagcgugguuccaucug

SEQ ID NO: 163446 - RNA, 22 nt, Human
ggaggccaaggcagguggauca

SEQ ID NO: 163447 - RNA, 22 nt, Human
cagggccacccucugcugggug

SEQ ID NO: 163448 - RNA, 22 nt, Human
uggggguguccuggugcacaca

SEQ ID NO: 163449 - RNA, 22 nt, Human
uggcuggggccacaguuuuccu

SEQ ID NO: 163450 - RNA, 22 nt, Human
gcuggcagguccaagauagagc

SEQ ID NO: 163451 - RNA, 22 nt, Human
ucugucuccugccagugccucu

SEQ ID NO: 163452 - RNA, 22 nt, Human
uggggcuggcacagucucuauu

SEQ ID NO: 163453 - RNA, 22 nt, Human
aggugagguuugggagguguca

SEQ ID NO: 163454 - RNA, 22 nt, Human
gcagccacagaggagggaugca

SEQ ID NO: 163455 - RNA, 19 nt, Human
ugaaggagggggauggcca

SEQ ID NO: 163456 - RNA, 22 nt, Human
ggccugagcucuggggaggcaa

SEQ ID NO: 163457 - RNA, 22 nt, Human
ccagggugcucuguggcgucgc

SEQ ID NO: 163458 - RNA, 22 nt, Human
ugauuuuuagcuauucugaaga

SEQ ID NO: 163459 - RNA, 22 nt, Human
uggaaagaugaagauguuuaag

SEQ ID NO: 163460 - RNA, 22 nt, Human
agaggcugaaugaugucaucau

SEQ ID NO: 163461 - RNA, 22 nt, Human
guggccugaugccagcccugug

SEQ ID NO: 163462 - RNA, 22 nt, Human
acaggugauucaggcucuggga

SEQ ID NO: 163463 - RNA, 22 nt, Human
aagcagcauaauugcuauuuua

SEQ ID NO: 163464 - RNA, 22 nt, Human
gcaguggggcgcugggaguugg

SEQ ID NO: 163465 - RNA, 22 nt, Human
auucuucacuguuucagaauga

SEQ ID NO: 163466 - RNA, 22 nt, Human
uugcauguuauuuaaucuguau

SEQ ID NO: 163467 - RNA, 22 nt, Human
uucuucaauuauuggaaagaaa

SEQ ID NO: 163468 - RNA, 22 nt, Human
uguguauucagcaagcgaaaca

SEQ ID NO: 163469 - RNA, 21 nt, Human
ugcuggccucaagggugacuu

SEQ ID NO: 163470 - RNA, 22 nt, Human
ugaagcagcaaaugaugggaga

SEQ ID NO: 163471 - RNA, 22 nt, Human
uugagucaguaauuccauuucu

SEQ ID NO: 163472 - RNA, 22 nt, Human
aaaucaguuguuauauuaaaga

SEQ ID NO: 163473 - RNA, 22 nt, Human
cugccuggguucaaguccuguu

SEQ ID NO: 163474 - RNA, 22 nt, Human
uuacauuuggcuauguccucua

SEQ ID NO: 163475 - RNA, 22 nt, Human
uguggccagcagguggcugugu

SEQ ID NO: 163476 - RNA, 22 nt, Human
gugccagggggcacugaacaga

SEQ ID NO: 163477 - RNA, 22 nt, Human
uuaugcuaguauaguccuuaga

SEQ ID NO: 163478 - RNA, 22 nt, Human
ggcugcaguuugucuuuugcuu

SEQ ID NO: 163479 - RNA, 22 nt, Human
acugcagccuugaacucugggc

SEQ ID NO: 163480 - RNA, 22 nt, Human
gaggcccuccagcugucagcug

SEQ ID NO: 163481 - RNA, 22 nt, Human
auacaagacucagcacagacgg

SEQ ID NO: 163482 - RNA, 22 nt, Human
gccugucugcagggcugucauu

SEQ ID NO: 163483 - RNA, 22 nt, Human
aguggggacuuaugccagcauu

SEQ ID NO: 163484 - RNA, 19 nt, Human
gcucugugaugcugagggg

SEQ ID NO: 163485 - RNA, 22 nt, Human
aaguucaagucugcaucuuuuu

SEQ ID NO: 163486 - RNA, 22 nt, Human
gagggcugcaaugagacagaga

SEQ ID NO: 163487 - RNA, 22 nt, Human
ggcuggccuguguggccgccac

SEQ ID NO: 163488 - RNA, 19 nt, Human
gucacauuugucucccagg

SEQ ID NO: 163489 - RNA, 22 nt, Human
cugcugcauuacucuucucaag

SEQ ID NO: 163490 - RNA, 22 nt, Human
uuuugaaagaguccugcuacag

SEQ ID NO: 163491 - RNA, 17 nt, Human
gaaagguccuagaaauc

SEQ ID NO: 163492 - RNA, 22 nt, Human
cugggugaguugaugaaggaga

SEQ ID NO: 163493 - RNA, 20 nt, Human
gccagcccugacacaggagc

SEQ ID NO: 163494 - RNA, 22 nt, Human
ggugggugagcccugggagcug

SEQ ID NO: 163495 - RNA, 22 nt, Human
caggggcucugagauugucuaa

SEQ ID NO: 163496 - RNA, 22 nt, Human
uaaaugugcacagguuagaagg

SEQ ID NO: 163497 - RNA, 22 nt, Human
cagcaggcguugggagaaagac

SEQ ID NO: 163498 - RNA, 22 nt, Human
agggcccuccccgcucagggca

SEQ ID NO: 163499 - RNA, 22 nt, Human
auugucugaauccaaagcucug

SEQ ID NO: 163500 - RNA, 22 nt, Human
ggagacagugguagggccuaag

SEQ ID NO: 163501 - RNA, 22 nt, Human
ggcagcuccucaaaaaauuaaa

SEQ ID NO: 163502 - RNA, 22 nt, Human
auguaucagaaauagcauuggc

SEQ ID NO: 163503 - RNA, 22 nt, Human
gucugcugcagagcauggcuuu

SEQ ID NO: 163504 - RNA, 22 nt, Human
uggccuguggcuuaaggucugu

SEQ ID NO: 163505 - RNA, 22 nt, Human
ccugcccagcuucaccucaggc

SEQ ID NO: 163506 - RNA, 22 nt, Human
uaaaugugagugaugcggugaa

SEQ ID NO: 163507 - RNA, 22 nt, Human
gcuggcucccauugguccuucc

SEQ ID NO: 163508 - RNA, 23 nt, Human
agccagggcacugguggagauug

SEQ ID NO: 163509 - RNA, 22 nt, Human
cagggccaagccccuuuggcug

SEQ ID NO: 163510 - RNA, 22 nt, Human
agggcagccugagugcuggccc

SEQ ID NO: 163511 - RNA, 22 nt, Human
uaggccaggacagagcuuccag

SEQ ID NO: 163512 - RNA, 22 nt, Human
aggcacuguggaagacaugguu

SEQ ID NO: 163513 - RNA, 22 nt, Human
cugccaaggcuggggaggacaa

SEQ ID NO: 163514 - RNA, 22 nt, Human
agcugucugucuccugaggaga

SEQ ID NO: 163515 - RNA, 22 nt, Human
gcauucaucuuccuccaugcag

SEQ ID NO: 163516 - RNA, 22 nt, Human
uccagugguaguaaagaggucu

SEQ ID NO: 163517 - RNA, 20 nt, Human
aagggcagagggaacagacu

SEQ ID NO: 163518 - RNA, 22 nt, Human
ugauuuccaaaaggcuucuaag

SEQ ID NO: 163519 - RNA, 22 nt, Human
aagcaauauacugauaugauua

SEQ ID NO: 163520 - RNA, 22 nt, Human
uaugcauauagaugcacacaca

SEQ ID NO: 163521 - RNA, 22 nt, Human
guccucugaaguugugcaaugc

SEQ ID NO: 163522 - RNA, 22 nt, Human
uggccaggcagguagaacggcc

SEQ ID NO: 163523 - RNA, 22 nt, Human
aaacaaguguaaacuagucugu

SEQ ID NO: 163524 - RNA, 22 nt, Human
ucccuguccugggcaaucccag

SEQ ID NO: 163525 - RNA, 22 nt, Human
agagccuggggauuggcaaggg

SEQ ID NO: 163526 - RNA, 22 nt, Human
uccagggcugacuugggagagg

SEQ ID NO: 163527 - RNA, 22 nt, Human
ugcccugucuaagcugucagua

SEQ ID NO: 163528 - RNA, 22 nt, Human
cuggugucugcucccucacagc

SEQ ID NO: 163529 - RNA, 22 nt, Human
ucccagccggugccuggguccc

SEQ ID NO: 163530 - RNA, 22 nt, Human
ggugccaggcuguagucagggu

SEQ ID NO: 163531 - RNA, 22 nt, Human
ggcagcaggagccaucugguag

SEQ ID NO: 163532 - RNA, 22 nt, Human
aggcugcuuccuuacguggcug

SEQ ID NO: 163533 - RNA, 22 nt, Human
auugucuucuggucuuaucuuu

SEQ ID NO: 163534 - RNA, 22 nt, Human
aaugcagugagccauuaaaugg

SEQ ID NO: 163535 - RNA, 22 nt, Human
cucaaguaagaaacagaauugg

SEQ ID NO: 163536 - RNA, 22 nt, Human
cuaaaugccuuuccuaccuaac

SEQ ID NO: 163537 - RNA, 22 nt, Human
cagcauggugccagugagucca

SEQ ID NO: 163538 - RNA, 22 nt, Human
cuggcucaguucuugguuuuca

SEQ ID NO: 163539 - RNA, 22 nt, Human
ggaaaaggccacagggacacau

SEQ ID NO: 163540 - RNA, 22 nt, Human
uuuuccucugcagagcaguuag

SEQ ID NO: 163541 - RNA, 22 nt, Human
uugugcauuucucugagugugu

SEQ ID NO: 163542 - RNA, 22 nt, Human
agguggagaagagaugggcagu

SEQ ID NO: 163543 - RNA, 17 nt, Human
ucaggauccaggguucu

SEQ ID NO: 163544 - RNA, 22 nt, Human
gccaccaggagcccaguccaaa

SEQ ID NO: 163545 - RNA, 22 nt, Human
aggcacugaaggaagcuugcgc

SEQ ID NO: 163546 - RNA, 22 nt, Human
acaguaccugcucucaagcaaa

SEQ ID NO: 163547 - RNA, 20 nt, Human
ugggccuguggcagaagucu

SEQ ID NO: 163548 - RNA, 22 nt, Human
ccuggaugauccaugucaugga

SEQ ID NO: 163549 - RNA, 22 nt, Human
agaauucuccuucagggcagga

SEQ ID NO: 163550 - RNA, 22 nt, Human
ucuuuacaguccucugucaauc

SEQ ID NO: 163551 - RNA, 20 nt, Human
cucugcugcccgccggcugc

SEQ ID NO: 163552 - RNA, 20 nt, Human
gugaccagaagacagugggu

SEQ ID NO: 163553 - RNA, 20 nt, Human
cucaggauugucuagccccu

SEQ ID NO: 163554 - RNA, 22 nt, Human
gcugcaggggggucuggacuug

SEQ ID NO: 163555 - RNA, 22 nt, Human
ggccucggcccacugcugcggu

SEQ ID NO: 163556 - RNA, 22 nt, Human
cuccagggaggucugcaggacu

SEQ ID NO: 163557 - RNA, 22 nt, Human
ccugagagagaagcgaccuggu

SEQ ID NO: 163558 - RNA, 19 nt, Human
gcaggcaguggcauucgga

SEQ ID NO: 163559 - RNA, 19 nt, Human
guggccugcgcugggugcg

SEQ ID NO: 163560 - RNA, 22 nt, Human
uacaaaugaaccaacuuugaug

SEQ ID NO: 163561 - RNA, 22 nt, Human
gugggggcaggcagugcuagga

SEQ ID NO: 163562 - RNA, 22 nt, Human
ugcccuguuaucuuggaagagu

SEQ ID NO: 163563 - RNA, 20 nt, Human
agcaggaaugaugcuuucau

SEQ ID NO: 163564 - RNA, 22 nt, Human
cuggcccauggugagcucuggg

SEQ ID NO: 163565 - RNA, 22 nt, Human
gcagaggcauuucugacgcugc

SEQ ID NO: 163566 - RNA, 22 nt, Human
uagagcugcuggacuguaacag

SEQ ID NO: 163567 - RNA, 19 nt, Human
auaaggcaggaggaaauuu

SEQ ID NO: 163568 - RNA, 22 nt, Human
cagcucugugggagcguaugug

SEQ ID NO: 163569 - RNA, 22 nt, Human
ccucugcaccauagccuucagc

SEQ ID NO: 163570 - RNA, 22 nt, Human
gcugagucuugagcacugagca

SEQ ID NO: 163571 - RNA, 22 nt, Human
caagagcuggagaggcagucua

SEQ ID NO: 163572 - RNA, 22 nt, Human
uuccauaaugagauucccagcc

SEQ ID NO: 163573 - RNA, 20 nt, Human
agugugcauuuagagucugc

SEQ ID NO: 163574 - RNA, 22 nt, Human
cccagccagccucuucccauau

SEQ ID NO: 163575 - RNA, 22 nt, Human
gcagguggauuaucagaagugc

SEQ ID NO: 163576 - RNA, 22 nt, Human
cauugcucaggcccagcaggaa

SEQ ID NO: 163577 - RNA, 22 nt, Human
ccacagcugaccgcaggugagc

SEQ ID NO: 163578 - RNA, 22 nt, Human
ggccuguccagccugccuggcu

SEQ ID NO: 163579 - RNA, 22 nt, Human
agugcugucccgacaacugagg

SEQ ID NO: 163580 - RNA, 22 nt, Human
accucugcaguagggcugugcc

SEQ ID NO: 163581 - RNA, 22 nt, Human
uagcacaucuggcgcuuauagg

SEQ ID NO: 163582 - RNA, 22 nt, Human
ugaaagcucugucaucauuccu

SEQ ID NO: 163583 - RNA, 22 nt, Human
gccuucccacccugcgaggcug

SEQ ID NO: 163584 - RNA, 22 nt, Human
ggaggggccggcugccugccac

SEQ ID NO: 163585 - RNA, 22 nt, Human
uagaaaucuacuuagacuuucu

SEQ ID NO: 163586 - RNA, 22 nt, Human
cugggcuguucugccccugggu

SEQ ID NO: 163587 - RNA, 21 nt, Human
uuagcaaagcaaacacaugcu

SEQ ID NO: 163588 - RNA, 20 nt, Human
gcugccuguuucuguaagua

SEQ ID NO: 163589 - RNA, 23 nt, Human
uaagaacagacaagcauuuacau

SEQ ID NO: 163590 - RNA, 22 nt, Human
cccagacauaacagcagagagg

SEQ ID NO: 163591 - RNA, 22 nt, Human
cccucugccugggaccaagucc

SEQ ID NO: 163592 - RNA, 19 nt, Human
ucucuggggacacuuucac

SEQ ID NO: 163593 - RNA, 22 nt, Human
aggagcugagucagcccgacag

SEQ ID NO: 163594 - RNA, 22 nt, Human
gaaagaggaaggagauguauua

SEQ ID NO: 163595 - RNA, 22 nt, Human
gccuggugguauccuggcaaga

SEQ ID NO: 163596 - RNA, 22 nt, Human
agcagcucuggcacuguagcau

SEQ ID NO: 163597 - RNA, 22 nt, Human
cuggcucccagcuuucagggag

SEQ ID NO: 163598 - RNA, 22 nt, Human
auccuugagccuuaucuuuugu

SEQ ID NO: 163599 - RNA, 22 nt, Human
ccuggcuggcaagaucgugaag

SEQ ID NO: 163600 - RNA, 22 nt, Human
caagaacaguuugccaaauugg

SEQ ID NO: 163601 - RNA, 22 nt, Human
agcugccacaugcccaagggca

SEQ ID NO: 163602 - RNA, 22 nt, Human
augaugugugcugaucaagcuu

SEQ ID NO: 163603 - RNA, 22 nt, Human
uacuuucuagcucuccccaguu

SEQ ID NO: 163604 - RNA, 22 nt, Human
uccucaggaucuaggagugcuu

SEQ ID NO: 163605 - RNA, 22 nt, Human
gugucccagccccacaggccug

SEQ ID NO: 163606 - RNA, 22 nt, Human
cauguuuucuaggcuuucacaa

SEQ ID NO: 163607 - RNA, 22 nt, Human
agccacagugcaagagagaaaa

SEQ ID NO: 163608 - RNA, 22 nt, Human
agagacaggguuuugccauguu

SEQ ID NO: 163609 - RNA, 22 nt, Human
aagugguagacaaagauaauug

SEQ ID NO: 163610 - RNA, 22 nt, Human
uccugggccuguacuccauccg

SEQ ID NO: 163611 - RNA, 22 nt, Human
auuauaggcuugagccaccgug

SEQ ID NO: 163612 - RNA, 22 nt, Human
gugggcuucuguuagggaggcu

SEQ ID NO: 163613 - RNA, 22 nt, Human
ugcagcaggcacaggacggaag

SEQ ID NO: 163614 - RNA, 22 nt, Human
aaucagaauuuauugaaucuuu

SEQ ID NO: 163615 - RNA, 22 nt, Human
agcacagauucugaagaguccu

SEQ ID NO: 163616 - RNA, 17 nt, Human
gcuggcugacccaugcc

SEQ ID NO: 163617 - RNA, 22 nt, Human
cagaggccaccuguggccacug

SEQ ID NO: 163618 - RNA, 22 nt, Human
ucacugaauacuugucucaucc

SEQ ID NO: 163619 - RNA, 22 nt, Human
cuuauguauauuuggaacguac

SEQ ID NO: 163620 - RNA, 19 nt, Human
ggcugccuggagcgagggc

SEQ ID NO: 163621 - RNA, 22 nt, Human
aagccucaccuuuuagaagcua

SEQ ID NO: 163622 - RNA, 21 nt, Human
gggcagaggggccuccugggu

SEQ ID NO: 163623 - RNA, 22 nt, Human
ucuggccuauuucugucagauc

SEQ ID NO: 163624 - RNA, 22 nt, Human
uccaggaggguuuucugccuuc

SEQ ID NO: 163625 - RNA, 22 nt, Human
ucugccuuggcaaccacagcuu

SEQ ID NO: 163626 - RNA, 22 nt, Human
agccacgucccugucaggguca

SEQ ID NO: 163627 - RNA, 22 nt, Human
guggccugggguuuguucugag

SEQ ID NO: 163628 - RNA, 19 nt, Human
aagggcugggcaccucacu

SEQ ID NO: 163629 - RNA, 23 nt, Human
uccagcagagccuuccaggaggg

SEQ ID NO: 163630 - RNA, 22 nt, Human
caaggagauaaaauguugagcu

SEQ ID NO: 163631 - RNA, 21 nt, Human
uucagcaguccucuagagaua

SEQ ID NO: 163632 - RNA, 22 nt, Human
aauaacaggcucaucagaugcu

SEQ ID NO: 163633 - RNA, 22 nt, Human
ucucccacuggccuuguaugau

SEQ ID NO: 163634 - RNA, 22 nt, Human
cugggagucuggccucuggucc

SEQ ID NO: 163635 - RNA, 22 nt, Human
ucauguaaguauagaaagcagu

SEQ ID NO: 163636 - RNA, 22 nt, Human
gcagugacagggcugcugccuu

SEQ ID NO: 163637 - RNA, 22 nt, Human
caguacuuuucaaccaguauga

SEQ ID NO: 163638 - RNA, 22 nt, Human
ugggcugcacccucagccucug

SEQ ID NO: 163639 - RNA, 22 nt, Human
agccauugaauuuagugccuuu

SEQ ID NO: 163640 - RNA, 22 nt, Human
agcuuccugaugcaagagggcu

SEQ ID NO: 163641 - RNA, 22 nt, Human
ugucagaacucuauugaugucc

SEQ ID NO: 163642 - RNA, 22 nt, Human
caaagguauaaguuaauauaca

SEQ ID NO: 163643 - RNA, 22 nt, Human
gaaggccuagggaugcucugcg

SEQ ID NO: 163644 - RNA, 22 nt, Human
agacagggucuugaucagagcu

SEQ ID NO: 163645 - RNA, 22 nt, Human
aagggaggaggauuuauuguac

SEQ ID NO: 163646 - RNA, 22 nt, Human
ugguuugcccacucgagugauu

SEQ ID NO: 163647 - RNA, 22 nt, Human
gcaucuucacacaaagccagug

SEQ ID NO: 163648 - RNA, 22 nt, Human
ucuuuggauaucgcuagaccgu

SEQ ID NO: 163649 - RNA, 18 nt, Human
agagcagcggcaucacac

SEQ ID NO: 163650 - RNA, 20 nt, Human
gaaaugugaccucuucugug

SEQ ID NO: 163651 - RNA, 23 nt, Human
gugauuucagggaacagaaucag

SEQ ID NO: 163652 - RNA, 22 nt, Human
uaggggugaggccaggcaucag

SEQ ID NO: 163653 - RNA, 22 nt, Human
agccagugcaacagcagugaag

SEQ ID NO: 163654 - RNA, 22 nt, Human
gccuggaguucagccaaguccc

SEQ ID NO: 163655 - RNA, 22 nt, Human
uaguccauuuucacacugcuga

SEQ ID NO: 163656 - RNA, 22 nt, Human
uggcugcucaagggaggaggcu

SEQ ID NO: 163657 - RNA, 22 nt, Human
aggcccugggcaguucuguagc

SEQ ID NO: 163658 - RNA, 22 nt, Human
aagcagaauuucccacuaguug

SEQ ID NO: 163659 - RNA, 22 nt, Human
agggcucugagugggaaagagg

SEQ ID NO: 163660 - RNA, 22 nt, Human
ugaaagcacucacuucugcucu

SEQ ID NO: 163661 - RNA, 22 nt, Human
agugggcaugaucuggugucug

SEQ ID NO: 163662 - RNA, 21 nt, Human
guguuuccuguuuauggcuug

SEQ ID NO: 163663 - RNA, 22 nt, Human
cuacauggagaagaaaauucuu

SEQ ID NO: 163664 - RNA, 22 nt, Human
cauacauaugcauguguguaua

SEQ ID NO: 163665 - RNA, 20 nt, Human
ugcuuccuggccacugcggg

SEQ ID NO: 163666 - RNA, 22 nt, Human
ggucccaggcugcgggcuggug

SEQ ID NO: 163667 - RNA, 22 nt, Human
ggcuucagugacuggugcccuc

SEQ ID NO: 163668 - RNA, 22 nt, Human
ucagcaguguaguuuaucauuc

SEQ ID NO: 163669 - RNA, 22 nt, Human
uuccuguauuuugcgaauuuuc

SEQ ID NO: 163670 - RNA, 22 nt, Human
gcugagcugggacaguccuggg

SEQ ID NO: 163671 - RNA, 22 nt, Human
gucagaggaauggaugagugau

SEQ ID NO: 163672 - RNA, 22 nt, Human
gagccaggcaccuucuguguug

SEQ ID NO: 163673 - RNA, 20 nt, Human
ccuggaagagcuccccaggc

SEQ ID NO: 163674 - RNA, 22 nt, Human
cugcccugacugaccuuuugaa

SEQ ID NO: 163675 - RNA, 22 nt, Human
auguuacagaaagcaaagauga

SEQ ID NO: 163676 - RNA, 21 nt, Human
agaugaggauacugaggccua

SEQ ID NO: 163677 - RNA, 22 nt, Human
ccagcccuucccaacuggccag

SEQ ID NO: 163678 - RNA, 22 nt, Human
agagccagcaagugaauaguga

SEQ ID NO: 163679 - RNA, 22 nt, Human
aggcucugguuggcaaguaaag

SEQ ID NO: 163680 - RNA, 22 nt, Human
uacaaagugugcccaugcugag

SEQ ID NO: 163681 - RNA, 21 nt, Human
aucuuuauuacgcagagaaga

SEQ ID NO: 163682 - RNA, 22 nt, Human
aagauuucucuccuggaaagca

SEQ ID NO: 163683 - RNA, 22 nt, Human
ccaggagguggagauugcagug

SEQ ID NO: 163684 - RNA, 21 nt, Human
ucccugcuuucuggcccaguc

SEQ ID NO: 163685 - RNA, 22 nt, Human
cuggguggcagagccugcagug

SEQ ID NO: 163686 - RNA, 17 nt, Human
ccagguggaaucgugga

SEQ ID NO: 163687 - RNA, 22 nt, Human
ggcagggcuugucucugugaug

SEQ ID NO: 163688 - RNA, 22 nt, Human
auaaaaacugacccauccuuug

SEQ ID NO: 163689 - RNA, 17 nt, Human
gccaaaggguuccaauc

SEQ ID NO: 163690 - RNA, 22 nt, Human
ucuggcaggcaaucggcucugg

SEQ ID NO: 163691 - RNA, 22 nt, Human
cuuggccucuucucaggguggg

SEQ ID NO: 163692 - RNA, 22 nt, Human
gaaggaaaucugugauuuaugc

SEQ ID NO: 163693 - RNA, 22 nt, Human
cagggugccucccgcucgccgg

SEQ ID NO: 163694 - RNA, 22 nt, Human
aaaugcacugaacacauguugu

SEQ ID NO: 163695 - RNA, 19 nt, Human
acacagggcuagaguuaca

SEQ ID NO: 163696 - RNA, 20 nt, Human
gacaggagaguuagguaggu

SEQ ID NO: 163697 - RNA, 22 nt, Human
aggguggccaugagggagagau

SEQ ID NO: 163698 - RNA, 22 nt, Human
uccacugcagcuucugauggaa

SEQ ID NO: 163699 - RNA, 22 nt, Human
uucuugauuucaugcaguuaag

SEQ ID NO: 163700 - RNA, 22 nt, Human
augaagcuaaacccugcagcca

SEQ ID NO: 163701 - RNA, 22 nt, Human
ugcaguggaaucuggagagcag

SEQ ID NO: 163702 - RNA, 22 nt, Human
ccagcccucacugaggccucuc

SEQ ID NO: 163703 - RNA, 22 nt, Human
acagaauugaaaguauaaucug

SEQ ID NO: 163704 - RNA, 22 nt, Human
ucaguuuuuguuugccagauag

SEQ ID NO: 163705 - RNA, 22 nt, Human
ugcucuccggcuuccguggccu

SEQ ID NO: 163706 - RNA, 22 nt, Human
aagaaaugcagaaaugugcugg

SEQ ID NO: 163707 - RNA, 22 nt, Human
aggcccugcccagagcuccucg

SEQ ID NO: 163708 - RNA, 22 nt, Human
aagaaauguagagccuaguaaa

SEQ ID NO: 163709 - RNA, 22 nt, Human
ucaggagauggucuuuauaggc

SEQ ID NO: 163710 - RNA, 22 nt, Human
ccaggccucuggcugcuuaguc

SEQ ID NO: 163711 - RNA, 22 nt, Human
cugcagcuuuggaaaccuguuu

SEQ ID NO: 163712 - RNA, 22 nt, Human
agcugcagucaagcugggccac

SEQ ID NO: 163713 - RNA, 22 nt, Human
uggcagcagccauggaaggccc

SEQ ID NO: 163714 - RNA, 22 nt, Human
ccagggcagccaacccagaugc

SEQ ID NO: 163715 - RNA, 22 nt, Human
cuguuuuugugcugugucuccc

SEQ ID NO: 163716 - RNA, 22 nt, Human
gagaugaauguaaacaaaggca

SEQ ID NO: 163717 - RNA, 21 nt, Human
agauuguauggaggugagagg

SEQ ID NO: 163718 - RNA, 22 nt, Human
ucaggggaaaucucucagcgaa

SEQ ID NO: 163719 - RNA, 22 nt, Human
uagagcuguaucaaagagccuu

SEQ ID NO: 163720 - RNA, 22 nt, Human
acuucucuucauagguggcaau

SEQ ID NO: 163721 - RNA, 22 nt, Human
ucccacacagcccgcucaccgg

SEQ ID NO: 163722 - RNA, 22 nt, Human
cuguggcugcagccuugguccu

SEQ ID NO: 163723 - RNA, 22 nt, Human
ggcaucuguccaucucuccagc

SEQ ID NO: 163724 - RNA, 22 nt, Human
gaaucacgguauucugcacggg

SEQ ID NO: 163725 - RNA, 22 nt, Human
aggagcuguuuuguucagcaaa

SEQ ID NO: 163726 - RNA, 22 nt, Human
cuuggcagauccaaaaaugaca

SEQ ID NO: 163727 - RNA, 22 nt, Human
gcugcccaguucugcugcugcc

SEQ ID NO: 163728 - RNA, 22 nt, Human
uggcagcuggagggcaauggcc

SEQ ID NO: 163729 - RNA, 22 nt, Human
acauuucucauucuccccuaac

SEQ ID NO: 163730 - RNA, 22 nt, Human
agcucccagggcugggcaaguu

SEQ ID NO: 163731 - RNA, 22 nt, Human
uagggcagauucgguggaguuu

SEQ ID NO: 163732 - RNA, 22 nt, Human
caagaaauguuuacugagcauc

SEQ ID NO: 163733 - RNA, 22 nt, Human
uucaagauggcaccagugagug

SEQ ID NO: 163734 - RNA, 22 nt, Human
gugucccaggagaggagacaau

SEQ ID NO: 163735 - RNA, 22 nt, Human
accucugccaagaugugcuccc

SEQ ID NO: 163736 - RNA, 22 nt, Human
ggugggcaggucacucugccuc

SEQ ID NO: 163737 - RNA, 22 nt, Human
uggcagcugaggggaggcuuug

SEQ ID NO: 163738 - RNA, 20 nt, Human
gcaaggcacagugaggaggg

SEQ ID NO: 163739 - RNA, 22 nt, Human
ugagaauuacaaaugagucaca

SEQ ID NO: 163740 - RNA, 22 nt, Human
caaacugagcaucagaaaguuu

SEQ ID NO: 163741 - RNA, 22 nt, Human
gccccucccagucaggagcacu

SEQ ID NO: 163742 - RNA, 19 nt, Human
ccugucugucuucagcuag

SEQ ID NO: 163743 - RNA, 22 nt, Human
uucauucccuuauauuagcauu

SEQ ID NO: 163744 - RNA, 22 nt, Human
uagucccauuuugagguauuug

SEQ ID NO: 163745 - RNA, 22 nt, Human
gcugagugagguccagagcuug

SEQ ID NO: 163746 - RNA, 22 nt, Human
gcucagggaacuuuuugcaggc

SEQ ID NO: 163747 - RNA, 23 nt, Human
aaguaacagggauaauagcaguu

SEQ ID NO: 163748 - RNA, 22 nt, Human
ucagagugguagccuauuuucu

SEQ ID NO: 163749 - RNA, 22 nt, Human
aauacaaucaaauucacuagca

SEQ ID NO: 163750 - RNA, 22 nt, Human
ugcucugggcaacagccucccu

SEQ ID NO: 163751 - RNA, 22 nt, Human
cugucuccagggcaggugcagg

SEQ ID NO: 163752 - RNA, 22 nt, Human
ugucucagggcagcagcagggg

SEQ ID NO: 163753 - RNA, 22 nt, Human
auaauaaaccaggaugggucug

SEQ ID NO: 163754 - RNA, 22 nt, Human
gaggcagcagggcugguuccuu

SEQ ID NO: 163755 - RNA, 22 nt, Human
ggucccaguccucucccugcua

SEQ ID NO: 163756 - RNA, 22 nt, Human
uauuuugucuucugcucaucac

SEQ ID NO: 163757 - RNA, 22 nt, Human
aaggccugggaguacugggaca

SEQ ID NO: 163758 - RNA, 22 nt, Human
uucucuagguuuuagaugaaga

SEQ ID NO: 163759 - RNA, 22 nt, Human
aaaucaguuggaacacaagcag

SEQ ID NO: 163760 - RNA, 22 nt, Human
gugacagaguuuuagaucucau

SEQ ID NO: 163761 - RNA, 22 nt, Human
auuuaguguguauugcuauuau

SEQ ID NO: 163762 - RNA, 22 nt, Human
agggcagagagaugaaugggau

SEQ ID NO: 163763 - RNA, 22 nt, Human
ugugccuggcauucugggcuuc

SEQ ID NO: 163764 - RNA, 22 nt, Human
augcugagacuggagcagcugg

SEQ ID NO: 163765 - RNA, 22 nt, Human
gcugugcagguccccacugccu

SEQ ID NO: 163766 - RNA, 22 nt, Human
gagaggccaccugacgagcagu

SEQ ID NO: 163767 - RNA, 22 nt, Human
ccuggagcuuuuccauccugga

SEQ ID NO: 163768 - RNA, 18 nt, Human
aaguaacagaagagcaca

SEQ ID NO: 163769 - RNA, 22 nt, Human
cggcagcuccgcgccguaggac

SEQ ID NO: 163770 - RNA, 16 nt, Human
gggcugggggauucug

SEQ ID NO: 163771 - RNA, 22 nt, Human
uacaguaucuucuggcaagcau

SEQ ID NO: 163772 - RNA, 22 nt, Human
ugggaggagcccucugggaagg

SEQ ID NO: 163773 - RNA, 19 nt, Human
gggcucuggccucaguggg

SEQ ID NO: 163774 - RNA, 22 nt, Human
ucugccagaaguucugagagua

SEQ ID NO: 163775 - RNA, 20 nt, Human
uaugaagauaugugaacagc

SEQ ID NO: 163776 - RNA, 20 nt, Human
gccuggcacccggggcuggc

SEQ ID NO: 163777 - RNA, 22 nt, Human
gcaggcugaugacuggaguugg

SEQ ID NO: 163778 - RNA, 22 nt, Human
uuuuaagaugcuaguauuucag

SEQ ID NO: 163779 - RNA, 22 nt, Human
ucacugcagagaccucuaguca

SEQ ID NO: 163780 - RNA, 22 nt, Human
cugagcugggaguagagacucu

SEQ ID NO: 163781 - RNA, 21 nt, Human
ucaaagcacauauuugcacau

SEQ ID NO: 163782 - RNA, 22 nt, Human
auuguacaugcagugagucauc

SEQ ID NO: 163783 - RNA, 22 nt, Human
ggucucagaucuuuauuaaggc

SEQ ID NO: 163784 - RNA, 21 nt, Human
agagcugggacuugccugaga

SEQ ID NO: 163785 - RNA, 22 nt, Human
aggcacugaccugcuuccuuga

SEQ ID NO: 163786 - RNA, 22 nt, Human
aggacccugagcgggcaugccg

SEQ ID NO: 163787 - RNA, 22 nt, Human
guggccucugugcuccugccua

SEQ ID NO: 163788 - RNA, 22 nt, Human
agggaaagguagugaggucaca

SEQ ID NO: 163789 - RNA, 22 nt, Human
ggcugcagaaguacuuccggau

SEQ ID NO: 163790 - RNA, 22 nt, Human
ccucucuguguggccucuccau

SEQ ID NO: 163791 - RNA, 22 nt, Human
uccugagaugagacagugcugc

SEQ ID NO: 163792 - RNA, 22 nt, Human
ugaacagaucaauagaacugac

SEQ ID NO: 163793 - RNA, 22 nt, Human
cccagcagccagaaugaggagc

SEQ ID NO: 163794 - RNA, 22 nt, Human
acagcuguggccacuugcaucc

SEQ ID NO: 163795 - RNA, 22 nt, Human
ugagcccagagcccuuguaggg

SEQ ID NO: 163796 - RNA, 22 nt, Human
cagccacguagcccuuggccgu

SEQ ID NO: 163797 - RNA, 17 nt, Human
ugcauuguaggcuagcc

SEQ ID NO: 163798 - RNA, 22 nt, Human
cucugcagaggcccaaggcuga

SEQ ID NO: 163799 - RNA, 22 nt, Human
cugggcuucucccccuggcaga

SEQ ID NO: 163800 - RNA, 22 nt, Human
ucacaugcuugaggaaagaaaa

SEQ ID NO: 163801 - RNA, 22 nt, Human
gagcacaggcuuugguggacac

SEQ ID NO: 163802 - RNA, 22 nt, Human
uacauauacugagugauuugcu

SEQ ID NO: 163803 - RNA, 22 nt, Human
gaaaaugugccuuuggguauug

SEQ ID NO: 163804 - RNA, 22 nt, Human
aaguauauuuuuugaagcauau

SEQ ID NO: 163805 - RNA, 22 nt, Human
uccaggacuagcauuucugaua

SEQ ID NO: 163806 - RNA, 22 nt, Human
uuguauuagcuguaaauuuucu

SEQ ID NO: 163807 - RNA, 22 nt, Human
aggcucaggcaggaauggcgga

SEQ ID NO: 163808 - RNA, 22 nt, Human
gacccagcuuaagucacauguu

SEQ ID NO: 163809 - RNA, 22 nt, Human
auacaucuuccuuuuaaaaugc

SEQ ID NO: 163810 - RNA, 22 nt, Human
uauaauccauucauugauuucu

SEQ ID NO: 163811 - RNA, 22 nt, Human
ugaaggaaaugacggcagaaga

SEQ ID NO: 163812 - RNA, 19 nt, Human
uccauaagcuuguguucau

SEQ ID NO: 163813 - RNA, 22 nt, Human
ucuuugcaugugcuucuuggcc

SEQ ID NO: 163814 - RNA, 22 nt, Human
gaucaaaagcuggguucuaaaa

SEQ ID NO: 163815 - RNA, 22 nt, Human
cuggggugucucgucugccauu

SEQ ID NO: 163816 - RNA, 22 nt, Human
uggccugcccagagcagcucug

SEQ ID NO: 163817 - RNA, 22 nt, Human
gcacagggccuggcacauaaga

SEQ ID NO: 163818 - RNA, 22 nt, Human
uuucagauggagguuuaggaca

SEQ ID NO: 163819 - RNA, 22 nt, Human
ccaggguggggcaggcccacug

SEQ ID NO: 163820 - RNA, 22 nt, Human
uuuucacacaaggugauaaguu

SEQ ID NO: 163821 - RNA, 22 nt, Human
gcugcccaggguggagccggcu

SEQ ID NO: 163822 - RNA, 22 nt, Human
agucccagcucagaaccacuag

SEQ ID NO: 163823 - RNA, 22 nt, Human
ccuggaggagcgcugaccagcu

SEQ ID NO: 163824 - RNA, 22 nt, Human
ucugugaacaucacauugacag

SEQ ID NO: 163825 - RNA, 22 nt, Human
aggucacauggauaaugaucag

SEQ ID NO: 163826 - RNA, 22 nt, Human
ccagagcuucggggcggcugua

SEQ ID NO: 163827 - RNA, 22 nt, Human
uaaaguucuggugagagguaag

SEQ ID NO: 163828 - RNA, 22 nt, Human
ugcccaagcagaggagugauuc

SEQ ID NO: 163829 - RNA, 22 nt, Human
gcaggguccauggaggcagccc

SEQ ID NO: 163830 - RNA, 22 nt, Human
gucagcaggguccccuugagug

SEQ ID NO: 163831 - RNA, 22 nt, Human
agcagcucuuaacaaagcaugg

SEQ ID NO: 163832 - RNA, 22 nt, Human
aaagccuucaaguagauguaag

SEQ ID NO: 163833 - RNA, 22 nt, Human
auggggcuguucucugcccugc

SEQ ID NO: 163834 - RNA, 22 nt, Human
ggucacaggggagaagagugau

SEQ ID NO: 163835 - RNA, 22 nt, Human
gacagggcauggugcagaguuc

SEQ ID NO: 163836 - RNA, 22 nt, Human
cuagaaauacaggcacgugcca

SEQ ID NO: 163837 - RNA, 22 nt, Human
ugcagaagcugcaggucagugg

SEQ ID NO: 163838 - RNA, 22 nt, Human
gagggcagugaauuuugaagcu

SEQ ID NO: 163839 - RNA, 22 nt, Human
cagggcugguuugucgaagaaa

SEQ ID NO: 163840 - RNA, 22 nt, Human
uagggcuauucugaguaauaau

SEQ ID NO: 163841 - RNA, 22 nt, Human
cccugcaggggaccugcagccu

SEQ ID NO: 163842 - RNA, 22 nt, Human
ccuggcaggcuggggacagugc

SEQ ID NO: 163843 - RNA, 22 nt, Human
aucagcaaaaaugccuucagaa

SEQ ID NO: 163844 - RNA, 22 nt, Human
ggcaggagggcggacaaugacc

SEQ ID NO: 163845 - RNA, 22 nt, Human
ucacaugcucaccuaagccaca

SEQ ID NO: 163846 - RNA, 22 nt, Human
uagaggugacacugagaccaua

SEQ ID NO: 163847 - RNA, 21 nt, Human
ccugccaggaaacugaguguc

SEQ ID NO: 163848 - RNA, 22 nt, Human
uaaauguaccuucugccuuacu

SEQ ID NO: 163849 - RNA, 22 nt, Human
aaaaagauguccugaaguuuag

SEQ ID NO: 163850 - RNA, 22 nt, Human
aagccgggccugagaaaugaca

SEQ ID NO: 163851 - RNA, 22 nt, Human
uccucaugccgggucucacgcu

SEQ ID NO: 163852 - RNA, 19 nt, Human
cugaggcccauguaccaug

SEQ ID NO: 163853 - RNA, 22 nt, Human
ucugaggcauacccaggccccc

SEQ ID NO: 163854 - RNA, 22 nt, Human
gggaguggguuuggccuaggcc

SEQ ID NO: 163855 - RNA, 22 nt, Human
gcaggcaggagcccaacugccu

SEQ ID NO: 163856 - RNA, 22 nt, Human
gugauuucuaaucaucugaaug

SEQ ID NO: 163857 - RNA, 21 nt, Human
uggcugccuacaugcugcagg

SEQ ID NO: 163858 - RNA, 22 nt, Human
cugcagccucaaccuccugagc

SEQ ID NO: 163859 - RNA, 22 nt, Human
ucucagagaacaguuggugcuu

SEQ ID NO: 163860 - RNA, 22 nt, Human
cuccagggagcuguggagguuu

SEQ ID NO: 163861 - RNA, 22 nt, Human
cccccaggcucugacacaggag

SEQ ID NO: 163862 - RNA, 22 nt, Human
ugcaggugaaaauuaugaggau

SEQ ID NO: 163863 - RNA, 17 nt, Human
ugagacagggcaggccc

SEQ ID NO: 163864 - RNA, 22 nt, Human
uucaaagugcauguuccucaga

SEQ ID NO: 163865 - RNA, 20 nt, Human
agacccuguguccuguggcc

SEQ ID NO: 163866 - RNA, 23 nt, Human
gcagacagagcagacuaagacaa

SEQ ID NO: 163867 - RNA, 19 nt, Human
gugauuucuuuccacaagc

SEQ ID NO: 163868 - RNA, 22 nt, Human
gucaggggccaugggccaagga

SEQ ID NO: 163869 - RNA, 22 nt, Human
uuccaggaauucagcucucagu

SEQ ID NO: 163870 - RNA, 22 nt, Human
cuucagggugacgcaggcugca

SEQ ID NO: 163871 - RNA, 22 nt, Human
ugcaccauuuugucaggcuacu

SEQ ID NO: 163872 - RNA, 22 nt, Human
uaauaaaugaaagugcuggcau

SEQ ID NO: 163873 - RNA, 22 nt, Human
ggcugggccagggccuguggac

SEQ ID NO: 163874 - RNA, 22 nt, Human
ucugccugagggagcugaggaa

SEQ ID NO: 163875 - RNA, 22 nt, Human
ccacagaggacaacugccuggc

SEQ ID NO: 163876 - RNA, 22 nt, Human
acuguguguuugucuagcacag

SEQ ID NO: 163877 - RNA, 22 nt, Human
uuuccuuccaaaugcccgggag

SEQ ID NO: 163878 - RNA, 22 nt, Human
cauugcacuucugcuuuuccuc

SEQ ID NO: 163879 - RNA, 22 nt, Human
agcuggagcuucaagcagguaa

SEQ ID NO: 163880 - RNA, 22 nt, Human
ccaggccuuccaguacgcagaa

SEQ ID NO: 163881 - RNA, 22 nt, Human
gagccuggccuccugccucagc

SEQ ID NO: 163882 - RNA, 22 nt, Human
ugucucugccagcuagcagaau

SEQ ID NO: 163883 - RNA, 22 nt, Human
guggagcccugguagggacccc

SEQ ID NO: 163884 - RNA, 22 nt, Human
aggagcugcauggauaccuggu

SEQ ID NO: 163885 - RNA, 23 nt, Human
cucugcaggagagugggcagggc

SEQ ID NO: 163886 - RNA, 20 nt, Human
cccucccagaugcuucccaa

SEQ ID NO: 163887 - RNA, 22 nt, Human
guaagggauuugaacauagguu

SEQ ID NO: 163888 - RNA, 22 nt, Human
gaagagcuaaaggcacaggcuu

SEQ ID NO: 163889 - RNA, 23 nt, Human
ccucccaccuauuucacuuucuu

SEQ ID NO: 163890 - RNA, 22 nt, Human
gcagcuggcucagagagguggg

SEQ ID NO: 163891 - RNA, 21 nt, Human
ccagcagcucaaggaucucuu

SEQ ID NO: 163892 - RNA, 22 nt, Human
gcugagcugaggcagggcuggg

SEQ ID NO: 163893 - RNA, 22 nt, Human
gcagauggcugagccugcagau

SEQ ID NO: 163894 - RNA, 22 nt, Human
cugaggccuaagacaugaauga

SEQ ID NO: 163895 - RNA, 20 nt, Human
uucauucauuccacaacuuc

SEQ ID NO: 163896 - RNA, 22 nt, Human
gcccuuccuuagacagcaggau

SEQ ID NO: 163897 - RNA, 22 nt, Human
ggaaagagcuaaaagggugaga

SEQ ID NO: 163898 - RNA, 20 nt, Human
auuccauaguuggcacuuuu

SEQ ID NO: 163899 - RNA, 17 nt, Human
uggcucugaggcugaau

SEQ ID NO: 163900 - RNA, 22 nt, Human
ggcagaagaaaggcuaagucuc

SEQ ID NO: 163901 - RNA, 22 nt, Human
uggcuggcaguaggcuaguggc

SEQ ID NO: 163902 - RNA, 22 nt, Human
gcagagcucaagguguucagcu

SEQ ID NO: 163903 - RNA, 21 nt, Human
cagaggccucaugcucugugc

SEQ ID NO: 163904 - RNA, 22 nt, Human
agcugccuguccuaggccauca

SEQ ID NO: 163905 - RNA, 22 nt, Human
gcccugggauuggguggaggcu

SEQ ID NO: 163906 - RNA, 22 nt, Human
gcagauggaaagugcuugaggg

SEQ ID NO: 163907 - RNA, 22 nt, Human
uccugccuaccuugcggaggug

SEQ ID NO: 163908 - RNA, 22 nt, Human
gaggucaauaauaugugcuuua

SEQ ID NO: 163909 - RNA, 22 nt, Human
agggagagguugaaaccucagu

SEQ ID NO: 163910 - RNA, 22 nt, Human
ccagccagcugcccuuggggcc

SEQ ID NO: 163911 - RNA, 22 nt, Human
aggagucacucagggcuucauc

SEQ ID NO: 163912 - RNA, 22 nt, Human
acaacaggguaaggcaggccau

SEQ ID NO: 163913 - RNA, 22 nt, Human
aaaaugaggucaauauccuuuu

SEQ ID NO: 163914 - RNA, 22 nt, Human
agauaugacuagaagcucauuu

SEQ ID NO: 163915 - RNA, 22 nt, Human
ggccuuggugccauggccaguu

SEQ ID NO: 163916 - RNA, 22 nt, Human
cagcuggaugggagaccauguu

SEQ ID NO: 163917 - RNA, 19 nt, Human
gcuguauuaaagauacaug

SEQ ID NO: 163918 - RNA, 22 nt, Human
cagcugaggucaaagaagcagg

SEQ ID NO: 163919 - RNA, 22 nt, Human
ugcucugguaacucacuuccau

SEQ ID NO: 163920 - RNA, 22 nt, Human
gccucugcugacaagauggaca

SEQ ID NO: 163921 - RNA, 22 nt, Human
aauguacaaaagucagccaacu

SEQ ID NO: 163922 - RNA, 21 nt, Human
cagcuuugucugucuucgggg

SEQ ID NO: 163923 - RNA, 23 nt, Human
ugggccuggaaagccuuagagag

SEQ ID NO: 163924 - RNA, 22 nt, Human
gcagggcagccacaggcccccu

SEQ ID NO: 163925 - RNA, 21 nt, Human
cagugcucaaucugacagugg

SEQ ID NO: 163926 - RNA, 22 nt, Human
gcaaaugcuaaaguguagagac

SEQ ID NO: 163927 - RNA, 20 nt, Human
gugggcagcaggcauacugg

SEQ ID NO: 163928 - RNA, 22 nt, Human
gcaaggcugagcacauuugcau

SEQ ID NO: 163929 - RNA, 22 nt, Human
ggcuucaccaggugcaugcaug

SEQ ID NO: 163930 - RNA, 22 nt, Human
augucuuuauaaauguauaaug

SEQ ID NO: 163931 - RNA, 22 nt, Human
gcucaggaaacagcagggcuug

SEQ ID NO: 163932 - RNA, 22 nt, Human
gaggggcucuuuaauaguaaca

SEQ ID NO: 163933 - RNA, 22 nt, Human
aggucauugaaguuauuuucuu

SEQ ID NO: 163934 - RNA, 22 nt, Human
cagagccaaaccucagggcccg

SEQ ID NO: 163935 - RNA, 22 nt, Human
ugauuucauaguauauacauga

SEQ ID NO: 163936 - RNA, 22 nt, Human
gaggucagucagaccaggguuu

SEQ ID NO: 163937 - RNA, 22 nt, Human
ugcaagaggaauucuagaagca

SEQ ID NO: 163938 - RNA, 22 nt, Human
agagucuuccaggcagccugag

SEQ ID NO: 163939 - RNA, 22 nt, Human
gcagugcuuuagucuguccuuu

SEQ ID NO: 163940 - RNA, 22 nt, Human
ccucccuuggccauagccagcc

SEQ ID NO: 163941 - RNA, 22 nt, Human
cagcaggggaacugugggccag

SEQ ID NO: 163942 - RNA, 22 nt, Human
ccugucuguauugguuugcuau

SEQ ID NO: 163943 - RNA, 22 nt, Human
cuuuggcaugguccucacuaua

SEQ ID NO: 163944 - RNA, 22 nt, Human
aagauuucugcuccugagagaa

SEQ ID NO: 163945 - RNA, 22 nt, Human
uguaaucauuacaguacaugga

SEQ ID NO: 163946 - RNA, 22 nt, Human
gggcuggaggugagcaggacag

SEQ ID NO: 163947 - RNA, 22 nt, Human
aagcugcccucauucccagugc

SEQ ID NO: 163948 - RNA, 22 nt, Human
gggugggagucuggcccucaaa

SEQ ID NO: 163949 - RNA, 18 nt, Human
gugagcagagagcaucac

SEQ ID NO: 163950 - RNA, 20 nt, Human
uccaggagaacugggagccg

SEQ ID NO: 163951 - RNA, 22 nt, Human
cacccagccuucacacaggagu

SEQ ID NO: 163952 - RNA, 22 nt, Human
uggcagcauuuuuuccagaaca

SEQ ID NO: 163953 - RNA, 22 nt, Human
augcaguacauacaaacacuga

SEQ ID NO: 163954 - RNA, 22 nt, Human
auuuccucaugaucauaaugca

SEQ ID NO: 163955 - RNA, 22 nt, Human
caggcacugugcugagcucugc

SEQ ID NO: 163956 - RNA, 22 nt, Human
uggccugaauuauggcagaucu

SEQ ID NO: 163957 - RNA, 22 nt, Human
agcuaggaaauugaggcugaga

SEQ ID NO: 163958 - RNA, 22 nt, Human
auguauguuaguguauuaucua

SEQ ID NO: 163959 - RNA, 22 nt, Human
uccuugaauauaauaacaguag

SEQ ID NO: 163960 - RNA, 22 nt, Human
gaggcagaggaagguggucucu

SEQ ID NO: 163961 - RNA, 22 nt, Human
aucaaaaugcuccagugauggu

SEQ ID NO: 163962 - RNA, 21 nt, Human
agagucugcauuucugacaag

SEQ ID NO: 163963 - RNA, 22 nt, Human
ucccaggcuaggccucugcguu

SEQ ID NO: 163964 - RNA, 22 nt, Human
aagccaggcugcacuugcuggg

SEQ ID NO: 163965 - RNA, 22 nt, Human
cugagaggugacagcgugcugg

SEQ ID NO: 163966 - RNA, 22 nt, Human
ucuggagcaacagagcaggaca

SEQ ID NO: 163967 - RNA, 18 nt, Human
acagaacucaggggcacc

SEQ ID NO: 163968 - RNA, 22 nt, Human
gcugagagugagcacuggauau

SEQ ID NO: 163969 - RNA, 22 nt, Human
aaggcugaggagggccugcagg

SEQ ID NO: 163970 - RNA, 22 nt, Human
caggggcucccugggugccagu

SEQ ID NO: 163971 - RNA, 18 nt, Human
gggcaucauucacaaagu

SEQ ID NO: 163972 - RNA, 22 nt, Human
auguagcaugaggcacugugcc

SEQ ID NO: 163973 - RNA, 22 nt, Human
ugguggccuugauggcaucugc

SEQ ID NO: 163974 - RNA, 22 nt, Human
uccuuccucggggacccagauc

SEQ ID NO: 163975 - RNA, 22 nt, Human
ggccucugaggacagccuuggc

SEQ ID NO: 163976 - RNA, 22 nt, Human
ugucacauugaauaugauuuau

SEQ ID NO: 163977 - RNA, 20 nt, Human
uacauucaaaacaaacucug

SEQ ID NO: 163978 - RNA, 22 nt, Human
gcagauggcagcccaggcuggg

SEQ ID NO: 163979 - RNA, 22 nt, Human
aaaugaacucuuccugcauccc

SEQ ID NO: 163980 - RNA, 22 nt, Human
agcugccacauggugucacugu

SEQ ID NO: 163981 - RNA, 23 nt, Human
gccugggacucaggaggagcuca

SEQ ID NO: 163982 - RNA, 22 nt, Human
ugggaggcagguaggugaugau

SEQ ID NO: 163983 - RNA, 21 nt, Human
gcccagcaaggugagaaggcc

SEQ ID NO: 163984 - RNA, 22 nt, Human
ucagccugcuccaagugcugcc

SEQ ID NO: 163985 - RNA, 22 nt, Human
agcuggguggagggcccacggu

SEQ ID NO: 163986 - RNA, 22 nt, Human
gagccuggauugaagugggugg

SEQ ID NO: 163987 - RNA, 22 nt, Human
acagggccaggugagaggugcu

SEQ ID NO: 163988 - RNA, 22 nt, Human
cuggagccacugggucuuguau

SEQ ID NO: 163989 - RNA, 22 nt, Human
ugaaaucuuauacuuugguagu

SEQ ID NO: 163990 - RNA, 18 nt, Human
acauuucuccuucugacc

SEQ ID NO: 163991 - RNA, 22 nt, Human
aagcugcagacccccugucuca

SEQ ID NO: 163992 - RNA, 22 nt, Human
aacagaacccgagugugaaucu

SEQ ID NO: 163993 - RNA, 22 nt, Human
ccaggguggcguagaugcuggg

SEQ ID NO: 163994 - RNA, 22 nt, Human
uugccaggagcucaucugaggg

SEQ ID NO: 163995 - RNA, 22 nt, Human
agccuggaauuaaggaaaugca

SEQ ID NO: 163996 - RNA, 22 nt, Human
aucuuucagagcuccaucaggg

SEQ ID NO: 163997 - RNA, 22 nt, Human
ucauccaguaccauggaaggca

SEQ ID NO: 163998 - RNA, 22 nt, Human
auuccaguucuccucucuaaag

SEQ ID NO: 163999 - RNA, 22 nt, Human
uucucuuauucuggauaugcag

SEQ ID NO: 164000 - RNA, 22 nt, Human
uuugcauuuguucaaguauuga

SEQ ID NO: 164001 - RNA, 22 nt, Human
augaguaaaaccacuauuuaca

SEQ ID NO: 164002 - RNA, 22 nt, Human
agcugcccugggucuugcugcu

SEQ ID NO: 164003 - RNA, 22 nt, Human
ccuucagaccuagacaggaauc

SEQ ID NO: 164004 - RNA, 22 nt, Human
gcagcugccccgacugugaguc

SEQ ID NO: 164005 - RNA, 22 nt, Human
agccacagcccacaggacucuu

SEQ ID NO: 164006 - RNA, 22 nt, Human
aggaccagccuccaggucucuu

SEQ ID NO: 164007 - RNA, 22 nt, Human
caggagcucucaucgucagggc

SEQ ID NO: 164008 - RNA, 22 nt, Human
uugacagcaaagauugugccua

SEQ ID NO: 164009 - RNA, 22 nt, Human
cagguccccuccccuaccaggc

SEQ ID NO: 164010 - RNA, 20 nt, Human
gugggcagaugugugcaugg

SEQ ID NO: 164011 - RNA, 22 nt, Human
caggcugcggucggcucugguc

SEQ ID NO: 164012 - RNA, 22 nt, Human
agugaaauaugcccauugcugu

SEQ ID NO: 164013 - RNA, 23 nt, Human
cccuggaguaaauucuuggaagg

SEQ ID NO: 164014 - RNA, 22 nt, Human
ugcagcugauuaaagggcagac

SEQ ID NO: 164015 - RNA, 22 nt, Human
ggaggccaaggaggagcuugcc

SEQ ID NO: 164016 - RNA, 22 nt, Human
aguccuucaagaaaucuggaaa

SEQ ID NO: 164017 - RNA, 22 nt, Human
cccugccuacaggguuuucuuu

SEQ ID NO: 164018 - RNA, 22 nt, Human
ccuuccuggagcccaugcagau

SEQ ID NO: 164019 - RNA, 22 nt, Human
aucuggcuauugacauguuaua

SEQ ID NO: 164020 - RNA, 23 nt, Human
uugaaagguagcuggcagcuaga

SEQ ID NO: 164021 - RNA, 22 nt, Human
uauuuguauuucaugcaguaaa

SEQ ID NO: 164022 - RNA, 22 nt, Human
acagaacuuccugcuggagugg

SEQ ID NO: 164023 - RNA, 22 nt, Human
gugcauugcgaugcagacgacc

SEQ ID NO: 164024 - RNA, 22 nt, Human
agaugcugugucuguucccuug

SEQ ID NO: 164025 - RNA, 22 nt, Human
uucccaggcugugcuaccagag

SEQ ID NO: 164026 - RNA, 22 nt, Human
ucagaagccggaagugcuccuc

SEQ ID NO: 164027 - RNA, 22 nt, Human
uagaaacugauagucuugugcu

SEQ ID NO: 164028 - RNA, 22 nt, Human
uggcagccacaucucguggauu

SEQ ID NO: 164029 - RNA, 22 nt, Human
ugugacagaucuuuaaauaaug

SEQ ID NO: 164030 - RNA, 22 nt, Human
uaaguuuaaauguacaugaagc

SEQ ID NO: 164031 - RNA, 19 nt, Human
agauggggaagagugugag

SEQ ID NO: 164032 - RNA, 22 nt, Human
ggcuucugaaaucucugugcgu

SEQ ID NO: 164033 - RNA, 22 nt, Human
agaggcugucccuugcuauucc

SEQ ID NO: 164034 - RNA, 22 nt, Human
caccagggacaaugcuaggggu

SEQ ID NO: 164035 - RNA, 22 nt, Human
guacauguugguuguuuccagu

SEQ ID NO: 164036 - RNA, 22 nt, Human
cagggccaguucucgcagcagu

SEQ ID NO: 164037 - RNA, 22 nt, Human
ggcccagccggcgagucucgcg

SEQ ID NO: 164038 - RNA, 22 nt, Human
aaugugguuaacccauuuaaga

SEQ ID NO: 164039 - RNA, 22 nt, Human
gaagcagcuuucuggugaggag

SEQ ID NO: 164040 - RNA, 22 nt, Human
ugcaaacuauugguagagaugg

SEQ ID NO: 164041 - RNA, 22 nt, Human
uacacuuuuuacuacagauucu

SEQ ID NO: 164042 - RNA, 22 nt, Human
agaacagaugugggcagaccug

SEQ ID NO: 164043 - RNA, 20 nt, Human
guggccuguccuguuguggg

SEQ ID NO: 164044 - RNA, 21 nt, Human
ucucuggaauuagaccauguu

SEQ ID NO: 164045 - RNA, 22 nt, Human
gugugccaccagucaaggugaa

SEQ ID NO: 164046 - RNA, 22 nt, Human
uagagcuauuuagagcauuuua

SEQ ID NO: 164047 - RNA, 22 nt, Human
uggcccugcugggucagagcug

SEQ ID NO: 164048 - RNA, 22 nt, Human
uacaaagccugguagauaucug

SEQ ID NO: 164049 - RNA, 20 nt, Human
gcugccuuguccugcuuggu

SEQ ID NO: 164050 - RNA, 22 nt, Human
uuccucucgcucuccggggccc

SEQ ID NO: 164051 - RNA, 23 nt, Human
uggagcugacagucagagggagg

SEQ ID NO: 164052 - RNA, 22 nt, Human
aaaguguugggauuacaggugu

SEQ ID NO: 164053 - RNA, 22 nt, Human
uaaguucauaagcuuauucuua

SEQ ID NO: 164054 - RNA, 22 nt, Human
ggcagaggaaggaugaauucac

SEQ ID NO: 164055 - RNA, 17 nt, Human
agaaagaggauccacag

SEQ ID NO: 164056 - RNA, 22 nt, Human
ugcugucccuaagucucuucaa

SEQ ID NO: 164057 - RNA, 22 nt, Human
gaguuauuuguagggauuauau

SEQ ID NO: 164058 - RNA, 22 nt, Human
ggcugcugugaccucaggugau

SEQ ID NO: 164059 - RNA, 22 nt, Human
gggacagacccaugggccaggu

SEQ ID NO: 164060 - RNA, 22 nt, Human
uugcauaaaugcuuaaaauuug

SEQ ID NO: 164061 - RNA, 22 nt, Human
caucagcagucacaugaugcug

SEQ ID NO: 164062 - RNA, 20 nt, Human
cucaguguggccugaguguu

SEQ ID NO: 164063 - RNA, 21 nt, Human
gagugcagcaagguagagucu

SEQ ID NO: 164064 - RNA, 22 nt, Human
ccaggccuccugugaguggacc

SEQ ID NO: 164065 - RNA, 22 nt, Human
ggauaagaaaauuguaauaacu

SEQ ID NO: 164066 - RNA, 22 nt, Human
cugugucccccucagccaggug

SEQ ID NO: 164067 - RNA, 22 nt, Human
agcugaaggcuagaacagcugg

SEQ ID NO: 164068 - RNA, 22 nt, Human
cagagccagaacuagaccuugu

SEQ ID NO: 164069 - RNA, 22 nt, Human
gcagagccagaauggccaggac

SEQ ID NO: 164070 - RNA, 22 nt, Human
uuccauauguauauagcuguua

SEQ ID NO: 164071 - RNA, 22 nt, Human
uggugcugauaauggcaggauu

SEQ ID NO: 164072 - RNA, 22 nt, Human
ugccagugggugugcagagacu

SEQ ID NO: 164073 - RNA, 19 nt, Human
ucaaugcaugaaaucagcc

SEQ ID NO: 164074 - RNA, 22 nt, Human
ugaugguuuuauuaauaggacc

SEQ ID NO: 164075 - RNA, 19 nt, Human
acagaagcauagaaaagga

SEQ ID NO: 164076 - RNA, 22 nt, Human
gauacaaauucaugucugaauu

SEQ ID NO: 164077 - RNA, 22 nt, Human
gcugucacucaccaggccugca

SEQ ID NO: 164078 - RNA, 22 nt, Human
uguucuugagccuuuagaccua

SEQ ID NO: 164079 - RNA, 22 nt, Human
gccagcagggcccaaaugcugg

SEQ ID NO: 164080 - RNA, 20 nt, Human
uccaagggcagcagaaucag

SEQ ID NO: 164081 - RNA, 19 nt, Human
caguggagauuggaggagg

SEQ ID NO: 164082 - RNA, 22 nt, Human
uaacagaaguuguucauugugg

SEQ ID NO: 164083 - RNA, 22 nt, Human
uaugcauaugaccccaagcuug

SEQ ID NO: 164084 - RNA, 22 nt, Human
uuucagugcuucuguuuaccgg

SEQ ID NO: 164085 - RNA, 22 nt, Human
uaaggcaccauaauauauuuaa

SEQ ID NO: 164086 - RNA, 22 nt, Human
aagcaagacagaaguuacugcc

SEQ ID NO: 164087 - RNA, 22 nt, Human
ccugccagggccuuggaagaaa

SEQ ID NO: 164088 - RNA, 22 nt, Human
aagggcagccugacucacgguc

SEQ ID NO: 164089 - RNA, 22 nt, Human
acuguguccucauguggcagaa

SEQ ID NO: 164090 - RNA, 22 nt, Human
cccugcagaaccacagacaaac

SEQ ID NO: 164091 - RNA, 22 nt, Human
cugagcugguggaagcaugcag

SEQ ID NO: 164092 - RNA, 22 nt, Human
aggugcagcaugaguccaacgg

SEQ ID NO: 164093 - RNA, 22 nt, Human
cuggccuguccugacccagccu

SEQ ID NO: 164094 - RNA, 22 nt, Human
ugagaggccccagcucuuggcc

SEQ ID NO: 164095 - RNA, 22 nt, Human
cuggcugcaggaaggagugggc

SEQ ID NO: 164096 - RNA, 22 nt, Human
uucucucauucaaauuaaagug

SEQ ID NO: 164097 - RNA, 22 nt, Human
agauaacuuuuggguauucaug

SEQ ID NO: 164098 - RNA, 23 nt, Human
cccagcagauuguaaagugucca

SEQ ID NO: 164099 - RNA, 22 nt, Human
gcauccagagguagccacugug

SEQ ID NO: 164100 - RNA, 22 nt, Human
acugggccuugccauggcagcc

SEQ ID NO: 164101 - RNA, 22 nt, Human
agcagccacagcagaucugagu

SEQ ID NO: 164102 - RNA, 22 nt, Human
augaugguggguaauguguaaa

SEQ ID NO: 164103 - RNA, 22 nt, Human
agaaacuucagcuauucuuuug

SEQ ID NO: 164104 - RNA, 22 nt, Human
cagaggcugaugugggaugggc

SEQ ID NO: 164105 - RNA, 22 nt, Human
gguggcaggcccugagcauccc

SEQ ID NO: 164106 - RNA, 17 nt, Human
aguggcaggcagauggg

SEQ ID NO: 164107 - RNA, 21 nt, Human
accaggcuugugggagggagc

SEQ ID NO: 164108 - RNA, 22 nt, Human
gccaggcagcugggagggugcc

SEQ ID NO: 164109 - RNA, 21 nt, Human
aacauuucugggagaacucac

SEQ ID NO: 164110 - RNA, 22 nt, Human
aauaugugagguauguucagug

SEQ ID NO: 164111 - RNA, 22 nt, Human
agaggccaguggcugugcuguc

SEQ ID NO: 164112 - RNA, 22 nt, Human
agcauuuaggagaauuugagaa

SEQ ID NO: 164113 - RNA, 22 nt, Human
uauuugaaaguguacaaaaacu

SEQ ID NO: 164114 - RNA, 22 nt, Human
ugccuggcaaugccagaagcca

SEQ ID NO: 164115 - RNA, 22 nt, Human
gaaaggucuuccggucuuccag

SEQ ID NO: 164116 - RNA, 22 nt, Human
cugggagcuagcucugagcuga

SEQ ID NO: 164117 - RNA, 22 nt, Human
uggagccaugccuggccuuucc

SEQ ID NO: 164118 - RNA, 22 nt, Human
ccuggccucuccgaguaaccug

SEQ ID NO: 164119 - RNA, 22 nt, Human
ggagccuggcaaugcugcgucc

SEQ ID NO: 164120 - RNA, 22 nt, Human
ccacccagccagaugcaggaag

SEQ ID NO: 164121 - RNA, 22 nt, Human
cuggagaggccccaagauauuu

SEQ ID NO: 164122 - RNA, 22 nt, Human
uuguaacagcugcuuaauagag

SEQ ID NO: 164123 - RNA, 22 nt, Human
caguagcaggcaggugcuuuug

SEQ ID NO: 164124 - RNA, 22 nt, Human
ugcuuuuaagaacaaugcugcu

SEQ ID NO: 164125 - RNA, 22 nt, Human
aggugcagcugguggagucugg

SEQ ID NO: 164126 - RNA, 22 nt, Human
cagcccugcacgcugccuccgc

SEQ ID NO: 164127 - RNA, 22 nt, Human
cagagguagccgagugcaaucg

SEQ ID NO: 164128 - RNA, 22 nt, Human
cuggguggaucgcagccccagg

SEQ ID NO: 164129 - RNA, 22 nt, Human
gucaccagugcuaagaggugga

SEQ ID NO: 164130 - RNA, 22 nt, Human
aggcagcaaagaaaugaugcug

SEQ ID NO: 164131 - RNA, 21 nt, Human
ccugugugucugacugggcua

SEQ ID NO: 164132 - RNA, 22 nt, Human
auuauaaagaacaugugugugg

SEQ ID NO: 164133 - RNA, 22 nt, Human
uugcucuguaauaaucuggggu

SEQ ID NO: 164134 - RNA, 22 nt, Human
ugcugguggagaaaguggaggu

SEQ ID NO: 164135 - RNA, 22 nt, Human
gauaccagacagggagggagaa

SEQ ID NO: 164136 - RNA, 22 nt, Human
cuggccuuuaaaaugaccuuau

SEQ ID NO: 164137 - RNA, 22 nt, Human
ggccucugcaacuggcuguggc

SEQ ID NO: 164138 - RNA, 22 nt, Human
cacugcuuuuuuggcuauguac

SEQ ID NO: 164139 - RNA, 22 nt, Human
cuuacauugugugcaugagggg

SEQ ID NO: 164140 - RNA, 22 nt, Human
uggcuggcaaggcuggagucag

SEQ ID NO: 164141 - RNA, 20 nt, Human
ucucaggguucagcaaagua

SEQ ID NO: 164142 - RNA, 22 nt, Human
aacaaaugauuguugguuggag

SEQ ID NO: 164143 - RNA, 22 nt, Human
ccagccuucugagcugccugga

SEQ ID NO: 164144 - RNA, 22 nt, Human
uguuucagucccuguguucaau

SEQ ID NO: 164145 - RNA, 22 nt, Human
caaaguuuggcucucaugacau

SEQ ID NO: 164146 - RNA, 22 nt, Human
ugggccacggggguggagagcu

SEQ ID NO: 164147 - RNA, 22 nt, Human
cugagccagggccacacaugga

SEQ ID NO: 164148 - RNA, 22 nt, Human
gaagcagcuagcccacuaguca

SEQ ID NO: 164149 - RNA, 22 nt, Human
cugucaggggcggguggagcgg

SEQ ID NO: 164150 - RNA, 22 nt, Human
aggcugcagugcagguaggauu

SEQ ID NO: 164151 - RNA, 22 nt, Human
acugccuugucucuugccuguu

SEQ ID NO: 164152 - RNA, 22 nt, Human
acagagcauauaaagugcuuug

SEQ ID NO: 164153 - RNA, 22 nt, Human
ugucaccaugccagcuucugcc

SEQ ID NO: 164154 - RNA, 21 nt, Human
caugaagccgguucccuguuu

SEQ ID NO: 164155 - RNA, 22 nt, Human
gcucagaaaagugaggcucagu

SEQ ID NO: 164156 - RNA, 22 nt, Human
ugcugccacugguagucucauu

SEQ ID NO: 164157 - RNA, 22 nt, Human
uggcucaggggucuggcucugu

SEQ ID NO: 164158 - RNA, 19 nt, Human
ccugggagucagcugaagg

SEQ ID NO: 164159 - RNA, 22 nt, Human
gaaggagagagacaucgucccu

SEQ ID NO: 164160 - RNA, 19 nt, Human
aucuuacagagcagaguac

SEQ ID NO: 164161 - RNA, 22 nt, Human
gggaggucagggugccugcugg

SEQ ID NO: 164162 - RNA, 22 nt, Human
agccccaguccgcugcgggcgg

SEQ ID NO: 164163 - RNA, 23 nt, Human
uggccugcagaguuucugcuggg

SEQ ID NO: 164164 - RNA, 22 nt, Human
cugaggcaugaaugugggcuuu

SEQ ID NO: 164165 - RNA, 22 nt, Human
aggaccuguaccucagcaucua

SEQ ID NO: 164166 - RNA, 22 nt, Human
cacacaggagagugcuggaggu

SEQ ID NO: 164167 - RNA, 22 nt, Human
ucagcagggcugugguguggcu

SEQ ID NO: 164168 - RNA, 21 nt, Human
gccagagcaguacaaugaggu

SEQ ID NO: 164169 - RNA, 22 nt, Human
agauacauagcugugagcacac

SEQ ID NO: 164170 - RNA, 22 nt, Human
agaaaugugagccccuuaucaa

SEQ ID NO: 164171 - RNA, 22 nt, Human
uggcucagucauggaugaguaa

SEQ ID NO: 164172 - RNA, 22 nt, Human
ccauaaggagccagacauucca

SEQ ID NO: 164173 - RNA, 22 nt, Human
ccuuucucuuugcugaucaugu

SEQ ID NO: 164174 - RNA, 22 nt, Human
agggaggauaguagucaguuua

SEQ ID NO: 164175 - RNA, 22 nt, Human
aucauaaagugcuaucugauug

SEQ ID NO: 164176 - RNA, 22 nt, Human
gggagguucuguucgcacuuga

SEQ ID NO: 164177 - RNA, 22 nt, Human
ccaggaggcagagguuacagug

SEQ ID NO: 164178 - RNA, 22 nt, Human
uggccugguuauauugcuauca

SEQ ID NO: 164179 - RNA, 22 nt, Human
ccagcuccuucugucuguggag

SEQ ID NO: 164180 - RNA, 22 nt, Human
gcuggccucuacaggccggcca

SEQ ID NO: 164181 - RNA, 22 nt, Human
acugcagcaaagcccgugucuu

SEQ ID NO: 164182 - RNA, 21 nt, Human
gcagagccugagguucuugag

SEQ ID NO: 164183 - RNA, 22 nt, Human
ugauuuccaguugcugggugcu

SEQ ID NO: 164184 - RNA, 22 nt, Human
cagggcacaguuauggaggugg

SEQ ID NO: 164185 - RNA, 22 nt, Human
ucucagagggaggauuacugcc

SEQ ID NO: 164186 - RNA, 22 nt, Human
gaaaucugcggugaggccugag

SEQ ID NO: 164187 - RNA, 22 nt, Human
cuagaaaaauacuuuauuguga

SEQ ID NO: 164188 - RNA, 22 nt, Human
ugggcugcagggguugagagcu

SEQ ID NO: 164189 - RNA, 23 nt, Human
uggagaugccccacucccugucu

SEQ ID NO: 164190 - RNA, 22 nt, Human
ucagggcauguauguuucuuua

SEQ ID NO: 164191 - RNA, 23 nt, Human
agaauuguaaauagaauauaccu

SEQ ID NO: 164192 - RNA, 22 nt, Human
cuuacauuuaaucaugugucau

SEQ ID NO: 164193 - RNA, 22 nt, Human
aggucauuuccuuagaggcaga

SEQ ID NO: 164194 - RNA, 22 nt, Human
aggcagggucuugcuauguugc

SEQ ID NO: 164195 - RNA, 22 nt, Human
gggaaccagccgcuuccgccuc

SEQ ID NO: 164196 - RNA, 22 nt, Human
gggcuacauugugagagaaguu

SEQ ID NO: 164197 - RNA, 22 nt, Human
cagggcaguaccgcccucuggc

SEQ ID NO: 164198 - RNA, 22 nt, Human
ucagagucauugcaaguagaag

SEQ ID NO: 164199 - RNA, 22 nt, Human
caggagcaaggagcagugggau

SEQ ID NO: 164200 - RNA, 22 nt, Human
aggcuucuaggguuggcagcgg

SEQ ID NO: 164201 - RNA, 22 nt, Human
aagaauguucuuguagucauga

SEQ ID NO: 164202 - RNA, 22 nt, Human
ucccagaaaaaggaggcuauga

SEQ ID NO: 164203 - RNA, 22 nt, Human
caugggcuuuggaggcuggagg

SEQ ID NO: 164204 - RNA, 22 nt, Human
cugugcugauucagcacaggcc

SEQ ID NO: 164205 - RNA, 22 nt, Human
gucugaggaagaugcaggggga

SEQ ID NO: 164206 - RNA, 22 nt, Human
acagacauuuucuguauugccu

SEQ ID NO: 164207 - RNA, 22 nt, Human
uggagcugagaaguggagcucu

SEQ ID NO: 164208 - RNA, 19 nt, Human
aagcagcccuggcaagagc

SEQ ID NO: 164209 - RNA, 22 nt, Human
cugagccuuauucaccagcccu

SEQ ID NO: 164210 - RNA, 22 nt, Human
caagggugguauugggagcaua

SEQ ID NO: 164211 - RNA, 19 nt, Human
ugcagccacgugagagacu

SEQ ID NO: 164212 - RNA, 21 nt, Human
gagugucuaauccaggcuguc

SEQ ID NO: 164213 - RNA, 22 nt, Human
agcugucuaccugcagaguccu

SEQ ID NO: 164214 - RNA, 22 nt, Human
uguggcuuaagaaugccuuuaa

SEQ ID NO: 164215 - RNA, 19 nt, Human
auagucuuuccaauuauac

SEQ ID NO: 164216 - RNA, 22 nt, Human
gagcuuaggccagggacaggga

SEQ ID NO: 164217 - RNA, 22 nt, Human
cagacuuucaaggagugaaggc

SEQ ID NO: 164218 - RNA, 22 nt, Human
cauuucugggagacaugcuaga

SEQ ID NO: 164219 - RNA, 22 nt, Human
cgucccaguuccagccgcgcug

SEQ ID NO: 164220 - RNA, 22 nt, Human
gcagagccuugcgucaugugcc

SEQ ID NO: 164221 - RNA, 22 nt, Human
acucugccaucccaggugcugu

SEQ ID NO: 164222 - RNA, 22 nt, Human
uccuucagcucucuauuuagau

SEQ ID NO: 164223 - RNA, 22 nt, Human
cagcugccagcuucucuccauc

SEQ ID NO: 164224 - RNA, 22 nt, Human
gaggcagcaaaauauaucauaa

SEQ ID NO: 164225 - RNA, 22 nt, Human
agaaacugaauuauuucugagg

SEQ ID NO: 164226 - RNA, 22 nt, Human
ggggugggcgugcagggacacc

SEQ ID NO: 164227 - RNA, 22 nt, Human
cccugggcagucugcacuucag

SEQ ID NO: 164228 - RNA, 19 nt, Human
agggcugcucuggccuggg

SEQ ID NO: 164229 - RNA, 22 nt, Human
ugagcuguagcagaugcuguug

SEQ ID NO: 164230 - RNA, 22 nt, Human
uuucaguguaagguuuccagga

SEQ ID NO: 164231 - RNA, 22 nt, Human
auugacaaggaaacuauaccag

SEQ ID NO: 164232 - RNA, 22 nt, Human
gugcucacugugagacguccug

SEQ ID NO: 164233 - RNA, 23 nt, Human
agaugaggcuucuccauguuggu

SEQ ID NO: 164234 - RNA, 22 nt, Human
gcagggucugaggccacagagg

SEQ ID NO: 164235 - RNA, 22 nt, Human
uucucuggaacugaaacaagau

SEQ ID NO: 164236 - RNA, 22 nt, Human
uggaggcaccacuggcugcccg

SEQ ID NO: 164237 - RNA, 20 nt, Human
ggguggaguugcggucugug

SEQ ID NO: 164238 - RNA, 22 nt, Human
gcucagagcuugaaguuccacu

SEQ ID NO: 164239 - RNA, 22 nt, Human
cgucuuccucuuacgaugcgcu

SEQ ID NO: 164240 - RNA, 22 nt, Human
ccugagcuggaagagcuugugc

SEQ ID NO: 164241 - RNA, 22 nt, Human
ugcuggcccaugaagacgcagu

SEQ ID NO: 164242 - RNA, 22 nt, Human
acagccaggagccaugggcagg

SEQ ID NO: 164243 - RNA, 22 nt, Human
cugaaggacacgugaggagcca

SEQ ID NO: 164244 - RNA, 22 nt, Human
uguagcucuccagccagcaagg

SEQ ID NO: 164245 - RNA, 22 nt, Human
cugugccuuuguagcugugccu

SEQ ID NO: 164246 - RNA, 22 nt, Human
cacagggcagguacucucagag

SEQ ID NO: 164247 - RNA, 22 nt, Human
agcgggugcugugucagcccuc

SEQ ID NO: 164248 - RNA, 21 nt, Human
ucagaguggaagacaguuuga

SEQ ID NO: 164249 - RNA, 22 nt, Human
cugaagcaaaggaucgagcuaa

SEQ ID NO: 164250 - RNA, 22 nt, Human
cagaaugagauaacccagauug

SEQ ID NO: 164251 - RNA, 22 nt, Human
uggcucugggcaccguguccac

SEQ ID NO: 164252 - RNA, 22 nt, Human
aaggcagccucugccagccggg

SEQ ID NO: 164253 - RNA, 22 nt, Human
aaaggucagacuuaggcugggc

SEQ ID NO: 164254 - RNA, 20 nt, Human
agggcagcuugaggagccgg

SEQ ID NO: 164255 - RNA, 18 nt, Human
gggcauggaugcagcauc

SEQ ID NO: 164256 - RNA, 22 nt, Human
gauuuccucacuaacauccauc

SEQ ID NO: 164257 - RNA, 22 nt, Human
ugcauccuuaaccagcaucacu

SEQ ID NO: 164258 - RNA, 22 nt, Human
acuucuggugucauacugcauu

SEQ ID NO: 164259 - RNA, 22 nt, Human
cugggagcggcugucacugguu

SEQ ID NO: 164260 - RNA, 22 nt, Human
cugugaggcccugggugcugga

SEQ ID NO: 164261 - RNA, 22 nt, Human
cccaggcuggauuucgguggca

SEQ ID NO: 164262 - RNA, 22 nt, Human
ugaaagguagcuggccucauag

SEQ ID NO: 164263 - RNA, 22 nt, Human
caggggacauuaaagcuccaua

SEQ ID NO: 164264 - RNA, 22 nt, Human
ucaauuaugccauugcaauauu

SEQ ID NO: 164265 - RNA, 22 nt, Human
ggccuggcauggggacuaaggg

SEQ ID NO: 164266 - RNA, 22 nt, Human
gcucccaguucccaaagugacc

SEQ ID NO: 164267 - RNA, 22 nt, Human
ucaggcugugggcacuggccau

SEQ ID NO: 164268 - RNA, 22 nt, Human
ucucaccauggugcuugcuuau

SEQ ID NO: 164269 - RNA, 22 nt, Human
guggauggacaugggcaagagg

SEQ ID NO: 164270 - RNA, 22 nt, Human
gugcucuguguauuaggauguc

SEQ ID NO: 164271 - RNA, 20 nt, Human
uucuuucaucuacacguugu

SEQ ID NO: 164272 - RNA, 22 nt, Human
gucugucaucugagauggagug

SEQ ID NO: 164273 - RNA, 22 nt, Human
ucugggagauccaagcagaacu

SEQ ID NO: 164274 - RNA, 22 nt, Human
uggcuccuucauucuccugcca

SEQ ID NO: 164275 - RNA, 22 nt, Human
ucucccacagccgugcuucaag

SEQ ID NO: 164276 - RNA, 22 nt, Human
gugccaggugcuaagcugugcu

SEQ ID NO: 164277 - RNA, 22 nt, Human
agaggcuccuagccacuggcuu

SEQ ID NO: 164278 - RNA, 22 nt, Human
gcagagcuaucuucuggauuug

SEQ ID NO: 164279 - RNA, 22 nt, Human
cucugucccagacccaccucuc

SEQ ID NO: 164280 - RNA, 22 nt, Human
aggcacuguucccaguuauccu

SEQ ID NO: 164281 - RNA, 22 nt, Human
caggugcuguccugcacauguc

SEQ ID NO: 164282 - RNA, 22 nt, Human
ugcaggugcguuuucaagccuc

SEQ ID NO: 164283 - RNA, 19 nt, Human
agccagggugagaaggagc

SEQ ID NO: 164284 - RNA, 17 nt, Human
ccucccacaccgcccug

SEQ ID NO: 164285 - RNA, 22 nt, Human
cagaggcuguguaggcagacug

SEQ ID NO: 164286 - RNA, 20 nt, Human
gccugagcuauugccaggau

SEQ ID NO: 164287 - RNA, 22 nt, Human
cugucaccuguucacugcagca

SEQ ID NO: 164288 - RNA, 18 nt, Human
aguaguggguuuagcuuc

SEQ ID NO: 164289 - RNA, 23 nt, Human
agacagaggcugaggcuggccgc

SEQ ID NO: 164290 - RNA, 22 nt, Human
aguauguauuuuauacuuacag

SEQ ID NO: 164291 - RNA, 22 nt, Human
caggagacaauggcuguggggc

SEQ ID NO: 164292 - RNA, 22 nt, Human
uauugaguuacagaaaauacuu

SEQ ID NO: 164293 - RNA, 22 nt, Human
agaacagaggccuuauguuuca

SEQ ID NO: 164294 - RNA, 22 nt, Human
uugaagcacaaugucuuuuauc

SEQ ID NO: 164295 - RNA, 22 nt, Human
ccagcugcugugaggaccacag

SEQ ID NO: 164296 - RNA, 22 nt, Human
ugagcuggucuugaguguagcu

SEQ ID NO: 164297 - RNA, 22 nt, Human
ccugggagcuguggaaaggcug

SEQ ID NO: 164298 - RNA, 22 nt, Human
agcugagcacauucaaacaggu

SEQ ID NO: 164299 - RNA, 22 nt, Human
gccuuccuuuuaccaccagcca

SEQ ID NO: 164300 - RNA, 19 nt, Human
cuguggcugaccucuggcc

SEQ ID NO: 164301 - RNA, 22 nt, Human
cacauuucucuaccucacacaa

SEQ ID NO: 164302 - RNA, 22 nt, Human
uccucuggcucuuucccuagga

SEQ ID NO: 164303 - RNA, 22 nt, Human
ggaaccaguggaaugauaugcu

SEQ ID NO: 164304 - RNA, 22 nt, Human
auaaaaguaggaccaacuuaca

SEQ ID NO: 164305 - RNA, 22 nt, Human
acagcagcuggguucccaccau

SEQ ID NO: 164306 - RNA, 22 nt, Human
ucaaaguaaaaguauagaguuu

SEQ ID NO: 164307 - RNA, 22 nt, Human
ugggcccugacuucaagcaucc

SEQ ID NO: 164308 - RNA, 22 nt, Human
ccugugugucugucacugcaca

SEQ ID NO: 164309 - RNA, 22 nt, Human
gaggccugguuuccagcauccu

SEQ ID NO: 164310 - RNA, 22 nt, Human
agggccuggcuucacuuucuca

SEQ ID NO: 164311 - RNA, 22 nt, Human
ugcuuuauuuauaaaauagcaa

SEQ ID NO: 164312 - RNA, 22 nt, Human
uccucuggggcgugguccugga

SEQ ID NO: 164313 - RNA, 22 nt, Human
caggcagcugacugucagauau

SEQ ID NO: 164314 - RNA, 22 nt, Human
uucuuuccacagaggggaugau

SEQ ID NO: 164315 - RNA, 22 nt, Human
agcagagucugugugcacuuua

SEQ ID NO: 164316 - RNA, 22 nt, Human
augaaaacuuuagccucauuag

SEQ ID NO: 164317 - RNA, 18 nt, Human
aguggucuguuauaucau

SEQ ID NO: 164318 - RNA, 22 nt, Human
cugggaggcacuauucaggagg

SEQ ID NO: 164319 - RNA, 22 nt, Human
uguccucuuccagugcuccuuc

SEQ ID NO: 164320 - RNA, 22 nt, Human
ucuggcucagggcucugaggga

SEQ ID NO: 164321 - RNA, 21 nt, Human
ccagagccugcugagcccccu

SEQ ID NO: 164322 - RNA, 22 nt, Human
agaaaucuaagaugcucaagga

SEQ ID NO: 164323 - RNA, 22 nt, Human
ggucaggguauaaucaagugag

SEQ ID NO: 164324 - RNA, 22 nt, Human
gcuggccugcugggcaccaccg

SEQ ID NO: 164325 - RNA, 22 nt, Human
cugcaggcaucuaacugugggc

SEQ ID NO: 164326 - RNA, 22 nt, Human
agggcagagaaauguaguugag

SEQ ID NO: 164327 - RNA, 22 nt, Human
gcacacaggcaguuuccagcca

SEQ ID NO: 164328 - RNA, 22 nt, Human
aaguucaaguaguguuacaugg

SEQ ID NO: 164329 - RNA, 19 nt, Human
gcucagagggcccugugcu

SEQ ID NO: 164330 - RNA, 22 nt, Human
ugucugguggguugacaggcag

SEQ ID NO: 164331 - RNA, 22 nt, Human
ucaaagcaucagucaauuuagg

SEQ ID NO: 164332 - RNA, 22 nt, Human
gccugcaguucugugcuaggca

SEQ ID NO: 164333 - RNA, 22 nt, Human
agccuggauucgugcauccaca

SEQ ID NO: 164334 - RNA, 22 nt, Human
ccugggagugugccaucucugu

SEQ ID NO: 164335 - RNA, 22 nt, Human
gugcauguuaaugguguacaaa

SEQ ID NO: 164336 - RNA, 22 nt, Human
uagcuuuacaaagugcugcacc

SEQ ID NO: 164337 - RNA, 22 nt, Human
gccaggaguucagaugcauguu

SEQ ID NO: 164338 - RNA, 22 nt, Human
cugaggaguuuggguuguucaa

SEQ ID NO: 164339 - RNA, 22 nt, Human
gggcacuguacacugugcaugg

SEQ ID NO: 164340 - RNA, 18 nt, Human
uccucucuuuccccaggg

SEQ ID NO: 164341 - RNA, 22 nt, Human
cugcucugagaggcucuuccua

SEQ ID NO: 164342 - RNA, 22 nt, Human
uuuaucuuuaggacuuugcaga

SEQ ID NO: 164343 - RNA, 22 nt, Human
ccagccuggacugggucuugug

SEQ ID NO: 164344 - RNA, 22 nt, Human
ggcucaggaccugggauugcca

SEQ ID NO: 164345 - RNA, 18 nt, Human
gggcacuggggacuggag

SEQ ID NO: 164346 - RNA, 22 nt, Human
cagggcagaacauauagauagu

SEQ ID NO: 164347 - RNA, 22 nt, Human
cucugguguccuuuagaauuua

SEQ ID NO: 164348 - RNA, 22 nt, Human
ccuuccuggcuguccgccugau

SEQ ID NO: 164349 - RNA, 22 nt, Human
caggaacacaaguucagggaug

SEQ ID NO: 164350 - RNA, 22 nt, Human
gcugagagaaaagugagguucu

SEQ ID NO: 164351 - RNA, 22 nt, Human
ugaauggucacugagcaucugu

SEQ ID NO: 164352 - RNA, 22 nt, Human
auggacaggcugagcuuccuca

SEQ ID NO: 164353 - RNA, 22 nt, Human
ggagccugggcauuaguaauuu

SEQ ID NO: 164354 - RNA, 22 nt, Human
cugucuguucagauucauuacu

SEQ ID NO: 164355 - RNA, 22 nt, Human
aaaaauagcuucucuugucccu

SEQ ID NO: 164356 - RNA, 22 nt, Human
gggccaugagagguucaucaac

SEQ ID NO: 164357 - RNA, 22 nt, Human
uuuuaucaaucauuaagacauu

SEQ ID NO: 164358 - RNA, 22 nt, Human
gaaaugcaaauucucucucgcu

SEQ ID NO: 164359 - RNA, 22 nt, Human
ccugugucagccccugccucca

SEQ ID NO: 164360 - RNA, 22 nt, Human
ucuucuccagugcuucugcaca

SEQ ID NO: 164361 - RNA, 22 nt, Human
auguuauuuuggaaaauacaaa

SEQ ID NO: 164362 - RNA, 20 nt, Human
ugccaugguaacagagugug

SEQ ID NO: 164363 - RNA, 23 nt, Human
aucagucuugguagcugugccca

SEQ ID NO: 164364 - RNA, 22 nt, Human
gggcuggaggagauccagaggc

SEQ ID NO: 164365 - RNA, 22 nt, Human
ugcaauaaggaguaauaguaaa

SEQ ID NO: 164366 - RNA, 22 nt, Human
cauggccugccuccuccuggug

SEQ ID NO: 164367 - RNA, 22 nt, Human
agcugcucuugggugacuucaa

SEQ ID NO: 164368 - RNA, 22 nt, Human
cccucaggagaugucagcugga

SEQ ID NO: 164369 - RNA, 22 nt, Human
caggagaagguuuggagugcag

SEQ ID NO: 164370 - RNA, 22 nt, Human
agcaggugacagggcuguggug

SEQ ID NO: 164371 - RNA, 22 nt, Human
agcaggcuuucaagagucuucu

SEQ ID NO: 164372 - RNA, 20 nt, Human
accccagccccucuaucuga

SEQ ID NO: 164373 - RNA, 19 nt, Human
caguggccuggaggucucu

SEQ ID NO: 164374 - RNA, 22 nt, Human
uuucuguagggauuucacaguu

SEQ ID NO: 164375 - RNA, 22 nt, Human
cccagcucucgcacuuacuagc

SEQ ID NO: 164376 - RNA, 22 nt, Human
uggcccugaggggcugugcccc

SEQ ID NO: 164377 - RNA, 22 nt, Human
ucuuagaaaugaaguucuuucu

SEQ ID NO: 164378 - RNA, 22 nt, Human
gcuggagcugcagccugggccu

SEQ ID NO: 164379 - RNA, 22 nt, Human
ugggggacugcacuggcgucag

SEQ ID NO: 164380 - RNA, 22 nt, Human
cauugcacuccaucuugggcaa

SEQ ID NO: 164381 - RNA, 22 nt, Human
gggccccaaaaugccaggcucu

SEQ ID NO: 164382 - RNA, 22 nt, Human
acaaaguccugguguauggcca

SEQ ID NO: 164383 - RNA, 22 nt, Human
uaggaaaagucuagauugauga

SEQ ID NO: 164384 - RNA, 22 nt, Human
cacugcaguaacucuaggacug

SEQ ID NO: 164385 - RNA, 22 nt, Human
gaagaacaagcagugcuuuccu

SEQ ID NO: 164386 - RNA, 20 nt, Human
ugcuggggacauacagggug

SEQ ID NO: 164387 - RNA, 22 nt, Human
cagguaagagacggauuggccc

SEQ ID NO: 164388 - RNA, 22 nt, Human
cugcucucuguuccccuggauc

SEQ ID NO: 164389 - RNA, 22 nt, Human
ucaaaugcggucauggcuuuua

SEQ ID NO: 164390 - RNA, 22 nt, Human
gcagggugaaggucacauagaa

SEQ ID NO: 164391 - RNA, 22 nt, Human
aaugauguauuaguacaacaca

SEQ ID NO: 164392 - RNA, 19 nt, Human
cugugcuuuaaacuccuau

SEQ ID NO: 164393 - RNA, 22 nt, Human
cugggaggauucauugagguga

SEQ ID NO: 164394 - RNA, 22 nt, Human
uucacauuugcccuuaugugug

SEQ ID NO: 164395 - RNA, 20 nt, Human
cagagcuguuauggaugaug

SEQ ID NO: 164396 - RNA, 22 nt, Human
aauuucaagucuugaagaagua

SEQ ID NO: 164397 - RNA, 22 nt, Human
ucaguuuucucaucugugaaau

SEQ ID NO: 164398 - RNA, 22 nt, Human
ucuguggcacgauugcacugca

SEQ ID NO: 164399 - RNA, 22 nt, Human
agccucuguagaaagcagugug

SEQ ID NO: 164400 - RNA, 22 nt, Human
cccaggcuggagugcaauggug

SEQ ID NO: 164401 - RNA, 22 nt, Human
cugcaggauucucccaguugga

SEQ ID NO: 164402 - RNA, 22 nt, Human
ccugagccugaguggugcaggg

SEQ ID NO: 164403 - RNA, 22 nt, Human
gagagcugauagaugagcuacu

SEQ ID NO: 164404 - RNA, 22 nt, Human
auacaucuugucagauucaugu

SEQ ID NO: 164405 - RNA, 22 nt, Human
cagcuccccucuguggggcagu

SEQ ID NO: 164406 - RNA, 22 nt, Human
uaagacacaugcguacaagaua

SEQ ID NO: 164407 - RNA, 22 nt, Human
agaggccuccgaaaggugggcu

SEQ ID NO: 164408 - RNA, 22 nt, Human
uucucuucuguucagugcccaa

SEQ ID NO: 164409 - RNA, 22 nt, Human
aaaauggucucagcuggcacca

SEQ ID NO: 164410 - RNA, 22 nt, Human
ucuucucaguuucucuaggaug

SEQ ID NO: 164411 - RNA, 22 nt, Human
ugcugccuucuaggcgugcccu

SEQ ID NO: 164412 - RNA, 22 nt, Human
caggagugaaaugaggcccagg

SEQ ID NO: 164413 - RNA, 23 nt, Human
ugucauugugacuacagaaccag

SEQ ID NO: 164414 - RNA, 22 nt, Human
cccaaggccucuccuuggcuug

SEQ ID NO: 164415 - RNA, 22 nt, Human
aagggcuggcccugggaagagu

SEQ ID NO: 164416 - RNA, 22 nt, Human
acagcuugcaauggcuuucaac

SEQ ID NO: 164417 - RNA, 22 nt, Human
ugauacagucagcucacaauug

SEQ ID NO: 164418 - RNA, 22 nt, Human
aaauaauugaguuggucaauau

SEQ ID NO: 164419 - RNA, 22 nt, Human
ugcucuguugugcaugugggau

SEQ ID NO: 164420 - RNA, 22 nt, Human
ugaaagcuguccacuaggcugu

SEQ ID NO: 164421 - RNA, 19 nt, Human
ugccugucaguagaucuca

SEQ ID NO: 164422 - RNA, 22 nt, Human
uaaggcacccuucugaguagag

SEQ ID NO: 164423 - RNA, 19 nt, Human
gcauuucucuuuacagcca

SEQ ID NO: 164424 - RNA, 22 nt, Human
ucaguguccggagccugagugc

SEQ ID NO: 164425 - RNA, 21 nt, Human
ggagauggguaucgccugggc

SEQ ID NO: 164426 - RNA, 22 nt, Human
aagacuuucucccaaauccuca

SEQ ID NO: 164427 - RNA, 20 nt, Human
uuguuucugcuauuuucuaa

SEQ ID NO: 164428 - RNA, 22 nt, Human
cggggcuguagcacagcugagc

SEQ ID NO: 164429 - RNA, 22 nt, Human
ucugggggcgaccagggacugc

SEQ ID NO: 164430 - RNA, 22 nt, Human
uaaaugugcacuuuacuuuuca

SEQ ID NO: 164431 - RNA, 22 nt, Human
caugaagcuugaagcaguccac

SEQ ID NO: 164432 - RNA, 21 nt, Human
uuacuuuugcaccaaccuaau

SEQ ID NO: 164433 - RNA, 22 nt, Human
uguuaacaucuuggacucguga

SEQ ID NO: 164434 - RNA, 22 nt, Human
ugcagaagcagagaguugccaa

SEQ ID NO: 164435 - RNA, 22 nt, Human
aucuacaggcugaggugggagg

SEQ ID NO: 164436 - RNA, 22 nt, Human
gauuauauaauggaagcucuug

SEQ ID NO: 164437 - RNA, 22 nt, Human
uuuaagaugguauuuuauaaag

SEQ ID NO: 164438 - RNA, 22 nt, Human
ggcugcugguagggguaggaag

SEQ ID NO: 164439 - RNA, 22 nt, Human
ggccugagaaccauggggccaa

SEQ ID NO: 164440 - RNA, 18 nt, Human
agcagcugugccacacug

SEQ ID NO: 164441 - RNA, 22 nt, Human
uggcuucuuagaccaguggccu

SEQ ID NO: 164442 - RNA, 22 nt, Human
uuauguaauuuguuugcucuuc

SEQ ID NO: 164443 - RNA, 22 nt, Human
gcugucacacaugggaucucag

SEQ ID NO: 164444 - RNA, 22 nt, Human
gcagaugguggggcaggaaaau

SEQ ID NO: 164445 - RNA, 17 nt, Human
gggcagggacuccuggg

SEQ ID NO: 164446 - RNA, 22 nt, Human
auugcacaaacacagucagacu

SEQ ID NO: 164447 - RNA, 22 nt, Human
ggcugucugugguggagcguug

SEQ ID NO: 164448 - RNA, 21 nt, Human
uuucaauguguucuuuguagu

SEQ ID NO: 164449 - RNA, 22 nt, Human
ggucccugaagaggccuggggu

SEQ ID NO: 164450 - RNA, 21 nt, Human
ugcagcagaguaagcagggga

SEQ ID NO: 164451 - RNA, 22 nt, Human
gguggccugcccugaucccugg

SEQ ID NO: 164452 - RNA, 22 nt, Human
agcagggggccacagucacagc

SEQ ID NO: 164453 - RNA, 22 nt, Human
cggcagagcuuccugcucagcg

SEQ ID NO: 164454 - RNA, 22 nt, Human
aagcgccacgagaagcuggacc

SEQ ID NO: 164455 - RNA, 22 nt, Human
cccugccucugaagcugcucag

SEQ ID NO: 164456 - RNA, 22 nt, Human
agucauauguggcauuuucuaa

SEQ ID NO: 164457 - RNA, 22 nt, Human
agcccagguugaggcugcagug

SEQ ID NO: 164458 - RNA, 22 nt, Human
ccagcccugaacccugcugcau

SEQ ID NO: 164459 - RNA, 22 nt, Human
agucaguggcuccgagccuggu

SEQ ID NO: 164460 - RNA, 22 nt, Human
aacaugaagguaggaugguuuu

SEQ ID NO: 164461 - RNA, 22 nt, Human
ugccaggccucaggagucucca

SEQ ID NO: 164462 - RNA, 22 nt, Human
gaggagcuggcagcgucuccgc

SEQ ID NO: 164463 - RNA, 22 nt, Human
uaucuugagagacaacacagca

SEQ ID NO: 164464 - RNA, 19 nt, Human
ugaagcagcaaacucucag

SEQ ID NO: 164465 - RNA, 22 nt, Human
uggcagagcccagacuccaguc

SEQ ID NO: 164466 - RNA, 22 nt, Human
cugcuuuggcucagugacauca

SEQ ID NO: 164467 - RNA, 22 nt, Human
uggaggcauuuuagguugucac

SEQ ID NO: 164468 - RNA, 22 nt, Human
uacauuuauaaggcuucucugu

SEQ ID NO: 164469 - RNA, 22 nt, Human
cuggcagcagcuucuggaucga

SEQ ID NO: 164470 - RNA, 22 nt, Human
uggcucuguugugcugagccag

SEQ ID NO: 164471 - RNA, 22 nt, Human
augggagugacagggccacugg

SEQ ID NO: 164472 - RNA, 20 nt, Human
cucuggcuccgcgugaccgc

SEQ ID NO: 164473 - RNA, 22 nt, Human
ugccugucuccucugcagggug

SEQ ID NO: 164474 - RNA, 22 nt, Human
ccugcagacacuuguccagcaa

SEQ ID NO: 164475 - RNA, 22 nt, Human
uuuacuuugugucaagucaaga

SEQ ID NO: 164476 - RNA, 22 nt, Human
acaguggagaaggcaugaggcu

SEQ ID NO: 164477 - RNA, 22 nt, Human
gagggucccgagcccugucaga

SEQ ID NO: 164478 - RNA, 22 nt, Human
caguggcgugaucucugcucac

SEQ ID NO: 164479 - RNA, 22 nt, Human
gugcagggagcccagaaggucc

SEQ ID NO: 164480 - RNA, 22 nt, Human
ugcagccaucuuucuuggagga

SEQ ID NO: 164481 - RNA, 22 nt, Human
gccaggcuggugucacaacucu

SEQ ID NO: 164482 - RNA, 23 nt, Human
auuuccuacuauaaaagagguaa

SEQ ID NO: 164483 - RNA, 18 nt, Human
aaggcuucaaagaguaga

SEQ ID NO: 164484 - RNA, 22 nt, Human
gcagauggugccaugucuugug

SEQ ID NO: 164485 - RNA, 22 nt, Human
cuggcagcgcagcaugaagucg

SEQ ID NO: 164486 - RNA, 22 nt, Human
caggaaugacugcagauggggc

SEQ ID NO: 164487 - RNA, 22 nt, Human
uccauggguagcccugguugag

SEQ ID NO: 164488 - RNA, 20 nt, Human
ucugugugccaucaccuaac

SEQ ID NO: 164489 - RNA, 19 nt, Human
caggagagcaugcacuuug

SEQ ID NO: 164490 - RNA, 22 nt, Human
ccugcagagccacgugccagcg

SEQ ID NO: 164491 - RNA, 22 nt, Human
cacauuucuaggaaauuaaaug

SEQ ID NO: 164492 - RNA, 22 nt, Human
cccagcccccgagugucuggaa

SEQ ID NO: 164493 - RNA, 22 nt, Human
aucuucaacuugaucauuugaa

SEQ ID NO: 164494 - RNA, 22 nt, Human
caguacuuaacuuauaggagag

SEQ ID NO: 164495 - RNA, 22 nt, Human
uaacagaaacagauaaguguaa

SEQ ID NO: 164496 - RNA, 22 nt, Human
agcagcaacuuauuuuucuuau

SEQ ID NO: 164497 - RNA, 22 nt, Human
gccucuggggcagcugagucau

SEQ ID NO: 164498 - RNA, 22 nt, Human
gccagagcagaauagaguggcc

SEQ ID NO: 164499 - RNA, 22 nt, Human
gagacugauggggcucccagaa

SEQ ID NO: 164500 - RNA, 22 nt, Human
aacucaguuacauauuagaaua

SEQ ID NO: 164501 - RNA, 22 nt, Human
ccagagcccagcacacggugcu

SEQ ID NO: 164502 - RNA, 22 nt, Human
ugagagagccugaaucucuuac

SEQ ID NO: 164503 - RNA, 18 nt, Human
ugagagugugugcucuug

SEQ ID NO: 164504 - RNA, 22 nt, Human
gggauggggucaacauguaccu

SEQ ID NO: 164505 - RNA, 22 nt, Human
cacugaaucucaaggggagggu

SEQ ID NO: 164506 - RNA, 22 nt, Human
uaaaugugucuauggacccgcc

SEQ ID NO: 164507 - RNA, 22 nt, Human
cugaaggagaaggccacuguuc

SEQ ID NO: 164508 - RNA, 17 nt, Human
aucuggcugcuucuaga

SEQ ID NO: 164509 - RNA, 22 nt, Human
agaaauguauagugaauuuuuc

SEQ ID NO: 164510 - RNA, 22 nt, Human
aaaugucuaucuggcauauucc

SEQ ID NO: 164511 - RNA, 22 nt, Human
ugagggcugcuuccagagcuag

SEQ ID NO: 164512 - RNA, 22 nt, Human
aaagaacaauguggaaucuccu

SEQ ID NO: 164513 - RNA, 22 nt, Human
gcugagggcauguguggcgacu

SEQ ID NO: 164514 - RNA, 22 nt, Human
uugauacagcagccugugaucc

SEQ ID NO: 164515 - RNA, 22 nt, Human
cagagccaacgccaccugccca

SEQ ID NO: 164516 - RNA, 22 nt, Human
uccaggcugggcugaagggugc

SEQ ID NO: 164517 - RNA, 22 nt, Human
ucaggggcuugaggugcauguc

SEQ ID NO: 164518 - RNA, 22 nt, Human
ugcagcucugaacagucaugaa

SEQ ID NO: 164519 - RNA, 22 nt, Human
uggcacugggaugcuacuguua

SEQ ID NO: 164520 - RNA, 22 nt, Human
ggacaggguaaguacuagugug

SEQ ID NO: 164521 - RNA, 22 nt, Human
ccucagggucugaggagaccgu

SEQ ID NO: 164522 - RNA, 22 nt, Human
aagcugccuagaguugaauguc

SEQ ID NO: 164523 - RNA, 22 nt, Human
agggcagcagcccauggcucug

SEQ ID NO: 164524 - RNA, 22 nt, Human
aaacuguaagagaauaaacuac

SEQ ID NO: 164525 - RNA, 22 nt, Human
uugaaaggugacauuguuagag

SEQ ID NO: 164526 - RNA, 22 nt, Human
gcucccugacucaguuccugag

SEQ ID NO: 164527 - RNA, 22 nt, Human
gggcagaggcucuggcccaucc

SEQ ID NO: 164528 - RNA, 22 nt, Human
ggagucagccugucagagugua

SEQ ID NO: 164529 - RNA, 17 nt, Human
acacagccagguucucc

SEQ ID NO: 164530 - RNA, 20 nt, Human
cccucugcuacacugggagc

SEQ ID NO: 164531 - RNA, 22 nt, Human
cagcugaguguuggcauguuca

SEQ ID NO: 164532 - RNA, 22 nt, Human
cccuccagagcuugaccugcug

SEQ ID NO: 164533 - RNA, 22 nt, Human
gggucuggacggcugcaggaag

SEQ ID NO: 164534 - RNA, 22 nt, Human
accucugccacuuucuaacucu

SEQ ID NO: 164535 - RNA, 22 nt, Human
cuggcagcgguuugcagccugg

SEQ ID NO: 164536 - RNA, 20 nt, Human
uccucagaagacauuugggg

SEQ ID NO: 164537 - RNA, 22 nt, Human
agaauucugacaauagaauugg

SEQ ID NO: 164538 - RNA, 22 nt, Human
agggugggcuagacucuucccc

SEQ ID NO: 164539 - RNA, 22 nt, Human
ucaaugauaucagcaggaugug

SEQ ID NO: 164540 - RNA, 22 nt, Human
cagggugggcacccagccucca

SEQ ID NO: 164541 - RNA, 22 nt, Human
agggccagcugaugagaaugag

SEQ ID NO: 164542 - RNA, 22 nt, Human
agagaaaagaguucaggcuuug

SEQ ID NO: 164543 - RNA, 22 nt, Human
aaacagaaggguagguaaacau

SEQ ID NO: 164544 - RNA, 22 nt, Human
agaagcugacagaugcagcagg

SEQ ID NO: 164545 - RNA, 22 nt, Human
ccagcagaggggcggagugcag

SEQ ID NO: 164546 - RNA, 22 nt, Human
agaugaagauaucugcaggggc

SEQ ID NO: 164547 - RNA, 22 nt, Human
guuggccugaauggucaagagg

SEQ ID NO: 164548 - RNA, 22 nt, Human
cuguccuggagggcauaggacg

SEQ ID NO: 164549 - RNA, 22 nt, Human
accuggcaugaagcaugccuua

SEQ ID NO: 164550 - RNA, 22 nt, Human
acacacagguaaaggagccugg

SEQ ID NO: 164551 - RNA, 22 nt, Human
gugucacaugguuuacugcagc

SEQ ID NO: 164552 - RNA, 22 nt, Human
ucacagcaaaagugugcagagc

SEQ ID NO: 164553 - RNA, 22 nt, Human
uucagugugugauaccugcugu

SEQ ID NO: 164554 - RNA, 22 nt, Human
cagugcagccaaggacaggcac

SEQ ID NO: 164555 - RNA, 22 nt, Human
ccugucugcggaggaguggaag

SEQ ID NO: 164556 - RNA, 22 nt, Human
cuugccuguggcuaguuggcuc

SEQ ID NO: 164557 - RNA, 22 nt, Human
ugaaaggugacauuucuuggau

SEQ ID NO: 164558 - RNA, 22 nt, Human
cuuauguaaacuacagauaaua

SEQ ID NO: 164559 - RNA, 22 nt, Human
aacagcaugcuggguaacauug

SEQ ID NO: 164560 - RNA, 18 nt, Human
uggagccauugccaccau

SEQ ID NO: 164561 - RNA, 22 nt, Human
cuccuuccugccccagugauaa

SEQ ID NO: 164562 - RNA, 22 nt, Human
uggcccugacuuggaggccuga

SEQ ID NO: 164563 - RNA, 22 nt, Human
gcaccaggcuuagagccccagg

SEQ ID NO: 164564 - RNA, 22 nt, Human
uacaguaaagcugcuaugaauu

SEQ ID NO: 164565 - RNA, 22 nt, Human
uaaagcaggccacauaugugau

SEQ ID NO: 164566 - RNA, 22 nt, Human
gcaggcagagaaggaacauuua

SEQ ID NO: 164567 - RNA, 22 nt, Human
guccuggguccccgcaggucag

SEQ ID NO: 164568 - RNA, 22 nt, Human
ggaggugaggccguagggugug

SEQ ID NO: 164569 - RNA, 22 nt, Human
ggucagguuuuuaggagugacc

SEQ ID NO: 164570 - RNA, 22 nt, Human
gcugucugcugugcacugagca

SEQ ID NO: 164571 - RNA, 22 nt, Human
uuucaauguaugucuuucugag

SEQ ID NO: 164572 - RNA, 22 nt, Human
aguguccccuccaagggccugg

SEQ ID NO: 164573 - RNA, 22 nt, Human
ggcaggugcucugugggccugg

SEQ ID NO: 164574 - RNA, 22 nt, Human
gcuuccuagaucugugguacuc

SEQ ID NO: 164575 - RNA, 22 nt, Human
gagacagaguuucacucuuguu

SEQ ID NO: 164576 - RNA, 22 nt, Human
auuucugauaaacguaagcugc

SEQ ID NO: 164577 - RNA, 22 nt, Human
aguacuuugcacuuugcucaga

SEQ ID NO: 164578 - RNA, 22 nt, Human
caggcccugggcaggaucagcc

SEQ ID NO: 164579 - RNA, 22 nt, Human
agcccuucaaccugccuacucc

SEQ ID NO: 164580 - RNA, 22 nt, Human
acugaaggcuuucccaagguca

SEQ ID NO: 164581 - RNA, 22 nt, Human
caggauccccaggucgccgucc

SEQ ID NO: 164582 - RNA, 22 nt, Human
gugcugcagagucucgugccgc

SEQ ID NO: 164583 - RNA, 22 nt, Human
uuugugaaaugaagucacaacu

SEQ ID NO: 164584 - RNA, 22 nt, Human
uuaaacaguguuucaugugggg

SEQ ID NO: 164585 - RNA, 22 nt, Human
cuggccugaggccgccuucaga

SEQ ID NO: 164586 - RNA, 22 nt, Human
ucuggcuccacucugugcaugc

SEQ ID NO: 164587 - RNA, 22 nt, Human
ugcauauuuuauaaagauggaa

SEQ ID NO: 164588 - RNA, 22 nt, Human
augcagagacagauguggcaug

SEQ ID NO: 164589 - RNA, 22 nt, Human
aagguacaguuuuaagaauaag

SEQ ID NO: 164590 - RNA, 19 nt, Human
ggccuggauuuagggcucc

SEQ ID NO: 164591 - RNA, 22 nt, Human
uuauguacaauguuaauguaaa

SEQ ID NO: 164592 - RNA, 22 nt, Human
gggacugggagauccuccuggc

SEQ ID NO: 164593 - RNA, 22 nt, Human
guuugcauggaagacagugagu

SEQ ID NO: 164594 - RNA, 22 nt, Human
caggcugcagugcaguggcuau

SEQ ID NO: 164595 - RNA, 22 nt, Human
ugggcugcuucuauuggugguc

SEQ ID NO: 164596 - RNA, 22 nt, Human
ucacuguauuugcugaugcaua

SEQ ID NO: 164597 - RNA, 21 nt, Human
ucccagagugcuugggacugc

SEQ ID NO: 164598 - RNA, 22 nt, Human
ucucuggagggcuccaggcggg

SEQ ID NO: 164599 - RNA, 22 nt, Human
ucauugaacgaagagcuccauu

SEQ ID NO: 164600 - RNA, 22 nt, Human
agggaaaggcugaugcuguggg

SEQ ID NO: 164601 - RNA, 19 nt, Human
cucagcuguagcucaugug

SEQ ID NO: 164602 - RNA, 22 nt, Human
gcaucuuucuguccauucagca

SEQ ID NO: 164603 - RNA, 22 nt, Human
ucacagugagccaugucagaga

SEQ ID NO: 164604 - RNA, 22 nt, Human
ugcuggaggccugacuguguuu

SEQ ID NO: 164605 - RNA, 22 nt, Human
ggggcagaaagcccacagagug

SEQ ID NO: 164606 - RNA, 22 nt, Human
aagagcuggcccaaucugagca

SEQ ID NO: 164607 - RNA, 22 nt, Human
uuuauuauguacaggcacuaua

SEQ ID NO: 164608 - RNA, 22 nt, Human
cagaguguuagcgcugguuggg

SEQ ID NO: 164609 - RNA, 22 nt, Human
aucuggcucgcuaggcucuggg

SEQ ID NO: 164610 - RNA, 22 nt, Human
aggcaggugggucacuugaguc

SEQ ID NO: 164611 - RNA, 22 nt, Human
gccaggcagcagcgaggauggu

SEQ ID NO: 164612 - RNA, 21 nt, Human
gcugcugccccuagugaggcc

SEQ ID NO: 164613 - RNA, 22 nt, Human
cacugaagccugggaguaagac

SEQ ID NO: 164614 - RNA, 18 nt, Human
ugcucuguuuaaugauuu

SEQ ID NO: 164615 - RNA, 22 nt, Human
cugccucuugacagaucguggc

SEQ ID NO: 164616 - RNA, 22 nt, Human
aggcuuccgaguagcugggacu

SEQ ID NO: 164617 - RNA, 22 nt, Human
agauguuccagccaaugggaau

SEQ ID NO: 164618 - RNA, 22 nt, Human
ugucuccucauacugucauauu

SEQ ID NO: 164619 - RNA, 22 nt, Human
ugucucugguauuaggugaaaa

SEQ ID NO: 164620 - RNA, 22 nt, Human
gcuggucacucugggagcugcu

SEQ ID NO: 164621 - RNA, 16 nt, Human
gccuggaguggcaggg

SEQ ID NO: 164622 - RNA, 22 nt, Human
ccugucagcugauggcuaugua

SEQ ID NO: 164623 - RNA, 17 nt, Human
gccucugcuugugucau

SEQ ID NO: 164624 - RNA, 22 nt, Human
cacauacaaugguguuauuugg

SEQ ID NO: 164625 - RNA, 22 nt, Human
ucauugcaguugaguuguguua

SEQ ID NO: 164626 - RNA, 22 nt, Human
uauagagguggaaacugagguu

SEQ ID NO: 164627 - RNA, 22 nt, Human
cugagcugggaguggauagugg

SEQ ID NO: 164628 - RNA, 22 nt, Human
cugcucuguucccccaucaucu

SEQ ID NO: 164629 - RNA, 22 nt, Human
auggggagagaagggcugagcu

SEQ ID NO: 164630 - RNA, 19 nt, Human
caagugaagccugggaugg

SEQ ID NO: 164631 - RNA, 22 nt, Human
cacucccuucaggagccuagga

SEQ ID NO: 164632 - RNA, 22 nt, Human
acauuugagaugccuuuuaggu

SEQ ID NO: 164633 - RNA, 22 nt, Human
uauguuaaauguuugauguuua

SEQ ID NO: 164634 - RNA, 22 nt, Human
gcagggccagguacaagaagca

SEQ ID NO: 164635 - RNA, 22 nt, Human
ccagaaaaugcagaacauagaa

SEQ ID NO: 164636 - RNA, 22 nt, Human
agugaaauacugucguuuuuag

SEQ ID NO: 164637 - RNA, 22 nt, Human
ccucuccaguuuuaacgugacc

SEQ ID NO: 164638 - RNA, 22 nt, Human
cagucccagcugcucagaaggc

SEQ ID NO: 164639 - RNA, 22 nt, Human
ucuucacaccgggcagcaggaa

SEQ ID NO: 164640 - RNA, 22 nt, Human
cuucuccucugaguccugggag

SEQ ID NO: 164641 - RNA, 22 nt, Human
uuaugggagcaauuggggaggu

SEQ ID NO: 164642 - RNA, 21 nt, Human
aaggagccuaggaggcucagg

SEQ ID NO: 164643 - RNA, 22 nt, Human
ccauggaguuccucuggucuau

SEQ ID NO: 164644 - RNA, 22 nt, Human
uauugaaauucuucauguccuc

SEQ ID NO: 164645 - RNA, 19 nt, Human
uagaaugcccacuuaaaaa

SEQ ID NO: 164646 - RNA, 22 nt, Human
cuggagccccaggcugugcaga

SEQ ID NO: 164647 - RNA, 19 nt, Human
acucaagucuaaugaaauc

SEQ ID NO: 164648 - RNA, 22 nt, Human
gcugcucuuuucagagaugaga

SEQ ID NO: 164649 - RNA, 22 nt, Human
agggugccugcugcagguucag

SEQ ID NO: 164650 - RNA, 22 nt, Human
cuccucugucuggcccugagcc

SEQ ID NO: 164651 - RNA, 19 nt, Human
uuuggcacucugaaguguu

SEQ ID NO: 164652 - RNA, 22 nt, Human
gaggacagugugaucugccagc

SEQ ID NO: 164653 - RNA, 22 nt, Human
uuuggaaaguguacaaauuuga

SEQ ID NO: 164654 - RNA, 22 nt, Human
caaaagauacuugcaucuaacu

SEQ ID NO: 164655 - RNA, 22 nt, Human
guaacacagaaaugaaauucca

SEQ ID NO: 164656 - RNA, 22 nt, Human
caggagcccagaguccucagcu

SEQ ID NO: 164657 - RNA, 22 nt, Human
gcuguguccucacacagccuuu

SEQ ID NO: 164658 - RNA, 22 nt, Human
uacaguaaccagucuacuuaga

SEQ ID NO: 164659 - RNA, 22 nt, Human
ggaaccaggaguuacacgaguu

SEQ ID NO: 164660 - RNA, 19 nt, Human
acagagcucucugcuucug

SEQ ID NO: 164661 - RNA, 22 nt, Human
ucugccuggguguggagcagag

SEQ ID NO: 164662 - RNA, 22 nt, Human
cuggcagcugugugaagaacug

SEQ ID NO: 164663 - RNA, 22 nt, Human
ggccucuggucaagacaagcau

SEQ ID NO: 164664 - RNA, 22 nt, Human
ggcuuccuggggccuccugcaa

SEQ ID NO: 164665 - RNA, 22 nt, Human
uaaugaauaaacuugagaguca

SEQ ID NO: 164666 - RNA, 22 nt, Human
agcagcuucuuucacuccugga

SEQ ID NO: 164667 - RNA, 20 nt, Human
ccugggguacacuggcaugu

SEQ ID NO: 164668 - RNA, 22 nt, Human
agaaaugcauuagcacauauag

SEQ ID NO: 164669 - RNA, 22 nt, Human
cuucaucaacucuaacaaaugu

SEQ ID NO: 164670 - RNA, 22 nt, Human
ugaggugaagaguggagcucag

SEQ ID NO: 164671 - RNA, 22 nt, Human
gcugccucaggcaccuccuggc

SEQ ID NO: 164672 - RNA, 22 nt, Human
cuaggaggcgggggcugcagua

SEQ ID NO: 164673 - RNA, 21 nt, Human
agcaggaggcagucacagcuc

SEQ ID NO: 164674 - RNA, 22 nt, Human
agaaaaggauugauggaucaga

SEQ ID NO: 164675 - RNA, 22 nt, Human
ggccucucuggcauggcugccc

SEQ ID NO: 164676 - RNA, 19 nt, Human
uggcuuccaucucucucau

SEQ ID NO: 164677 - RNA, 22 nt, Human
gaggcagagugcaccccaggag

SEQ ID NO: 164678 - RNA, 22 nt, Human
aaggcacucagccuugggacag

SEQ ID NO: 164679 - RNA, 22 nt, Human
cucagagcaaugaacaugcaaa

SEQ ID NO: 164680 - RNA, 22 nt, Human
uccuugaagaaugauucuugga

SEQ ID NO: 164681 - RNA, 22 nt, Human
cucuccuggggagcacacacac

SEQ ID NO: 164682 - RNA, 21 nt, Human
uaagaacauuaucuucuuccu

SEQ ID NO: 164683 - RNA, 22 nt, Human
gccagguggcugagcagcugca

SEQ ID NO: 164684 - RNA, 22 nt, Human
cuggagccagccagggcccucu

SEQ ID NO: 164685 - RNA, 22 nt, Human
aacaucagaauauccauguugg

SEQ ID NO: 164686 - RNA, 22 nt, Human
agggccucugacgcccccagcc

SEQ ID NO: 164687 - RNA, 22 nt, Human
ucccagagacagagccuccucc

SEQ ID NO: 164688 - RNA, 22 nt, Human
auaugcacauacauacauaggu

SEQ ID NO: 164689 - RNA, 22 nt, Human
ugccucagaguugucccuacca

SEQ ID NO: 164690 - RNA, 22 nt, Human
cagcuucccuuggcugagcaga

SEQ ID NO: 164691 - RNA, 22 nt, Human
uugaagcagcucaggaggcuua

SEQ ID NO: 164692 - RNA, 22 nt, Human
aguggcagagguugacugcagu

SEQ ID NO: 164693 - RNA, 22 nt, Human
aagagagagcauucuucuguua

SEQ ID NO: 164694 - RNA, 18 nt, Human
cagggcuguggggucacu

SEQ ID NO: 164695 - RNA, 22 nt, Human
guggguggaggcgucgagggca

SEQ ID NO: 164696 - RNA, 22 nt, Human
ucucagagagcuguguuuuccu

SEQ ID NO: 164697 - RNA, 22 nt, Human
augcccaaugucacaauuuuug

SEQ ID NO: 164698 - RNA, 22 nt, Human
uuguuacaucuuauguaagugg

SEQ ID NO: 164699 - RNA, 23 nt, Human
guggccuccccggaaugccucgc

SEQ ID NO: 164700 - RNA, 22 nt, Human
gcuggaccaggugugcacaggc

SEQ ID NO: 164701 - RNA, 22 nt, Human
cuggcaggcagacuucugcaag

SEQ ID NO: 164702 - RNA, 22 nt, Human
caguauguacucuuaucaugua

SEQ ID NO: 164703 - RNA, 22 nt, Human
gugcagggcuggcaccggaggc

SEQ ID NO: 164704 - RNA, 22 nt, Human
ugaggcaguucuuacuuguauu

SEQ ID NO: 164705 - RNA, 22 nt, Human
ucagcagggagaggagaaugca

SEQ ID NO: 164706 - RNA, 22 nt, Human
ucucuggaauuggcugaggcaa

SEQ ID NO: 164707 - RNA, 22 nt, Human
accaggcugugaagugagacua

SEQ ID NO: 164708 - RNA, 21 nt, Human
gcugucucuggcuccugggaa

SEQ ID NO: 164709 - RNA, 22 nt, Human
aggcagaggaaggguggauuug

SEQ ID NO: 164710 - RNA, 22 nt, Human
ggcuuccuaauacucccuacac

SEQ ID NO: 164711 - RNA, 22 nt, Human
aaagaacaaaugauauaugguu

SEQ ID NO: 164712 - RNA, 22 nt, Human
agggcuggcuccguuaccuuga

SEQ ID NO: 164713 - RNA, 22 nt, Human
cagggcagagggaaacuccuuu

SEQ ID NO: 164714 - RNA, 22 nt, Human
ugggcagacuaaggucaaagcu

SEQ ID NO: 164715 - RNA, 18 nt, Human
uccuccuuuggccuuuuc

SEQ ID NO: 164716 - RNA, 22 nt, Human
aggcucaguuugguuuccauug

SEQ ID NO: 164717 - RNA, 22 nt, Human
uguaggacauguacuuguaaca

SEQ ID NO: 164718 - RNA, 18 nt, Human
ugggcugccuggccucug

SEQ ID NO: 164719 - RNA, 18 nt, Human
uuaagagcugaaagggga

SEQ ID NO: 164720 - RNA, 22 nt, Human
uguguauuucuggaacagacua

SEQ ID NO: 164721 - RNA, 22 nt, Human
aaguuaugaaauuuggacagcu

SEQ ID NO: 164722 - RNA, 22 nt, Human
gacaaaggaucagagguuggga

SEQ ID NO: 164723 - RNA, 22 nt, Human
gaggccacagcuaucagggaca

SEQ ID NO: 164724 - RNA, 21 nt, Human
ugcaggagucugugagucagg

SEQ ID NO: 164725 - RNA, 22 nt, Human
cuggagcucuguguguuccuga

SEQ ID NO: 164726 - RNA, 22 nt, Human
ugcauuaucuuuaauguucuca

SEQ ID NO: 164727 - RNA, 22 nt, Human
ugggcuccagcaccugugcucu

SEQ ID NO: 164728 - RNA, 22 nt, Human
acagagcucccagccaucuccu

SEQ ID NO: 164729 - RNA, 22 nt, Human
cugccgagugggucaugaggca

SEQ ID NO: 164730 - RNA, 22 nt, Human
agccauugaguuuuaugugcua

SEQ ID NO: 164731 - RNA, 22 nt, Human
gcagggcaaugaucccgagagg

SEQ ID NO: 164732 - RNA, 22 nt, Human
ugccaggcuaaguggaggacuu

SEQ ID NO: 164733 - RNA, 23 nt, Human
gggggcugguugacucucugcag

SEQ ID NO: 164734 - RNA, 22 nt, Human
aguuacaaccaugacacaagca

SEQ ID NO: 164735 - RNA, 17 nt, Human
ugagaaguaggcaucau

SEQ ID NO: 164736 - RNA, 22 nt, Human
aaagacuagcauuuauauguac

SEQ ID NO: 164737 - RNA, 22 nt, Human
uggcccugcagaacuagccugg

SEQ ID NO: 164738 - RNA, 22 nt, Human
agggcucuguccccagaggccc

SEQ ID NO: 164739 - RNA, 23 nt, Human
uggauaaagcugugcugcauagg

SEQ ID NO: 164740 - RNA, 20 nt, Human
uguacacaguacuuuacaau

SEQ ID NO: 164741 - RNA, 22 nt, Human
aagugacaccucuucccuuucc

SEQ ID NO: 164742 - RNA, 22 nt, Human
cugccagcagaggccagcgcug

SEQ ID NO: 164743 - RNA, 22 nt, Human
ggcugcaggcaggguauccacu

SEQ ID NO: 164744 - RNA, 22 nt, Human
gcuuccugauauucauacuguu

SEQ ID NO: 164745 - RNA, 22 nt, Human
gcucugcucuugacuuaccagg

SEQ ID NO: 164746 - RNA, 22 nt, Human
gcuggcugaggucuagcucuuu

SEQ ID NO: 164747 - RNA, 22 nt, Human
aaaucacuaaguuauagugugg

SEQ ID NO: 164748 - RNA, 22 nt, Human
gccuucagcggccgcucgcugc

SEQ ID NO: 164749 - RNA, 22 nt, Human
uagagcuggaauuugcagcaag

SEQ ID NO: 164750 - RNA, 20 nt, Human
cucaggauacugcaaaguug

SEQ ID NO: 164751 - RNA, 22 nt, Human
acagcugugaaaauccacagga

SEQ ID NO: 164752 - RNA, 22 nt, Human
ccugggcauaaaucacuccaag

SEQ ID NO: 164753 - RNA, 22 nt, Human
gaagagcuguagccugcucuuu

SEQ ID NO: 164754 - RNA, 22 nt, Human
cugugagcuggguggccaggac

SEQ ID NO: 164755 - RNA, 22 nt, Human
cuucuaggcuucucagggggca

SEQ ID NO: 164756 - RNA, 22 nt, Human
aaaggcuaugagauagaagaua

SEQ ID NO: 164757 - RNA, 22 nt, Human
ucaggauccauagacucccaaa

SEQ ID NO: 164758 - RNA, 22 nt, Human
gccaggugcauggcugagucuc

SEQ ID NO: 164759 - RNA, 22 nt, Human
uacauaguuccauuuacaggaa

SEQ ID NO: 164760 - RNA, 22 nt, Human
cugggugguucuaacuguugau

SEQ ID NO: 164761 - RNA, 22 nt, Human
cugccuuggaaaaugugguaau

SEQ ID NO: 164762 - RNA, 22 nt, Human
ccagcugcaggggagcagugga

SEQ ID NO: 164763 - RNA, 22 nt, Human
ggucccaggcucccucuugucc

SEQ ID NO: 164764 - RNA, 22 nt, Human
acauuucuaucauccuguaaug

SEQ ID NO: 164765 - RNA, 22 nt, Human
uuugaacaagagcuucacauua

SEQ ID NO: 164766 - RNA, 22 nt, Human
agaagccauucccuguaggcuc

SEQ ID NO: 164767 - RNA, 22 nt, Human
cagggccauuggcguggcuguc

SEQ ID NO: 164768 - RNA, 22 nt, Human
uggcacuggcgcaggauggcgg

SEQ ID NO: 164769 - RNA, 22 nt, Human
ugcauuccuccaccuccugcac

SEQ ID NO: 164770 - RNA, 22 nt, Human
ucaggagucugugcaguuccac

SEQ ID NO: 164771 - RNA, 22 nt, Human
ucucagaguuuuuuuccaggac

SEQ ID NO: 164772 - RNA, 22 nt, Human
cugagccauccauaccagcuua

SEQ ID NO: 164773 - RNA, 22 nt, Human
caggcuugauuauucagacaau

SEQ ID NO: 164774 - RNA, 22 nt, Human
gccuaggaguggggauggcggu

SEQ ID NO: 164775 - RNA, 22 nt, Human
guauucuugguuaucaaaauac

SEQ ID NO: 164776 - RNA, 22 nt, Human
ggcacugggagaggugagacgg

SEQ ID NO: 164777 - RNA, 22 nt, Human
gugcugcucacaucuggaggua

SEQ ID NO: 164778 - RNA, 17 nt, Human
gcagccagugcagcagg

SEQ ID NO: 164779 - RNA, 17 nt, Human
ggccuugggcugcucuu

SEQ ID NO: 164780 - RNA, 22 nt, Human
gaauguaauagucaguagaaca

SEQ ID NO: 164781 - RNA, 22 nt, Human
aucagugcuaaagcaaaugccc

SEQ ID NO: 164782 - RNA, 22 nt, Human
uacuuacagagcuuauaaguua

SEQ ID NO: 164783 - RNA, 22 nt, Human
ugggagcaagcuggugcuggag

SEQ ID NO: 164784 - RNA, 22 nt, Human
uguuacacagcagaauagcaag

SEQ ID NO: 164785 - RNA, 22 nt, Human
acagcuggaggucugugagcac

SEQ ID NO: 164786 - RNA, 22 nt, Human
ugccucugcugcuguggcauca

SEQ ID NO: 164787 - RNA, 22 nt, Human
cuguccuguggaccugaggacg

SEQ ID NO: 164788 - RNA, 22 nt, Human
caugcuuucuguccaaauguua

SEQ ID NO: 164789 - RNA, 21 nt, Human
ggugggcacaggagagcagag

SEQ ID NO: 164790 - RNA, 22 nt, Human
aaguuauuuccucgugacugaa

SEQ ID NO: 164791 - RNA, 22 nt, Human
ugcauuauaacugaauguuguu

SEQ ID NO: 164792 - RNA, 22 nt, Human
ugcugggcuugaaagcugcuaa

SEQ ID NO: 164793 - RNA, 22 nt, Human
ucagcaaugugauacugugcaa

SEQ ID NO: 164794 - RNA, 22 nt, Human
uauauuaacacccacuugccuc

SEQ ID NO: 164795 - RNA, 22 nt, Human
ugcugucugcaacaguacuaca

SEQ ID NO: 164796 - RNA, 19 nt, Human
gcugcucugggucucaucu

SEQ ID NO: 164797 - RNA, 17 nt, Human
ugaggccugcaucagug

SEQ ID NO: 164798 - RNA, 22 nt, Human
ucucagagaaaugugucaccau

SEQ ID NO: 164799 - RNA, 18 nt, Human
caguuuuuauaucuggca

SEQ ID NO: 164800 - RNA, 22 nt, Human
uggcagagcccagaacugagca

SEQ ID NO: 164801 - RNA, 22 nt, Human
uggcuggcuagugggcaggauu

SEQ ID NO: 164802 - RNA, 22 nt, Human
ccacacagucaguuuccaagaa

SEQ ID NO: 164803 - RNA, 22 nt, Human
caggccugcaggaaaggcuccc

SEQ ID NO: 164804 - RNA, 19 nt, Human
gaucuuugccaauuuaagc

SEQ ID NO: 164805 - RNA, 22 nt, Human
ucauugcauuuauucacuggca

SEQ ID NO: 164806 - RNA, 22 nt, Human
ucccagagcucuggagguugga

SEQ ID NO: 164807 - RNA, 22 nt, Human
ugcaggccggcccuaggccuca

SEQ ID NO: 164808 - RNA, 22 nt, Human
ggccucucuccagucagugcag

SEQ ID NO: 164809 - RNA, 22 nt, Human
agagcccucuucacugccccuu

SEQ ID NO: 164810 - RNA, 22 nt, Human
gagugugucggucagcguggcg

SEQ ID NO: 164811 - RNA, 22 nt, Human
caugggagguuggcuuggcaug

SEQ ID NO: 164812 - RNA, 22 nt, Human
ccagcagccaccuucucgaaau

SEQ ID NO: 164813 - RNA, 22 nt, Human
caggcugaucagggcugggaug

SEQ ID NO: 164814 - RNA, 22 nt, Human
ugucucagaggcaggaagagcc

SEQ ID NO: 164815 - RNA, 22 nt, Human
auuuguagugaagugaaaauaa

SEQ ID NO: 164816 - RNA, 22 nt, Human
agcaggguuccaggaguugcag

SEQ ID NO: 164817 - RNA, 22 nt, Human
uagacagauuuaaaggaaugga

SEQ ID NO: 164818 - RNA, 22 nt, Human
agcugccaaguuggaguagcaa

SEQ ID NO: 164819 - RNA, 22 nt, Human
uacauagcaaggaaaugacaga

SEQ ID NO: 164820 - RNA, 22 nt, Human
cacagcugcccuacuccaugug

SEQ ID NO: 164821 - RNA, 22 nt, Human
aagaugauaggacuugcuuaag

SEQ ID NO: 164822 - RNA, 22 nt, Human
caggggcagucugugugcgugg

SEQ ID NO: 164823 - RNA, 23 nt, Human
ugcagagggacugaagccagcuu

SEQ ID NO: 164824 - RNA, 22 nt, Human
ugcccaggaucuggcgaugcuc

SEQ ID NO: 164825 - RNA, 22 nt, Human
ggccuggaagaggacagagaaa

SEQ ID NO: 164826 - RNA, 22 nt, Human
uggaagcagugauucuugucug

SEQ ID NO: 164827 - RNA, 22 nt, Human
uccucucagugugguuguggga

SEQ ID NO: 164828 - RNA, 22 nt, Human
ugagagugauugguucgaaugu

SEQ ID NO: 164829 - RNA, 22 nt, Human
agggacuggcucucugagcagg

SEQ ID NO: 164830 - RNA, 22 nt, Human
aauguauaaaguguuaauaacu

SEQ ID NO: 164831 - RNA, 22 nt, Human
gcagccaggaaagcuggacccu

SEQ ID NO: 164832 - RNA, 19 nt, Human
cauaauacaguggaucuga

SEQ ID NO: 164833 - RNA, 22 nt, Human
aagggcagaauagagaagaugg

SEQ ID NO: 164834 - RNA, 22 nt, Human
cagacacagcaauucuguguug

SEQ ID NO: 164835 - RNA, 22 nt, Human
cacugcaggucugagauggggg

SEQ ID NO: 164836 - RNA, 22 nt, Human
ccaaagugcugggguuacaggc

SEQ ID NO: 164837 - RNA, 22 nt, Human
caguauguuugggagacaugac

SEQ ID NO: 164838 - RNA, 22 nt, Human
gcucacugccauucucuagaug

SEQ ID NO: 164839 - RNA, 23 nt, Human
ugggaguguugggaucucugcuc

SEQ ID NO: 164840 - RNA, 22 nt, Human
caggggcugagaaggaacgucc

SEQ ID NO: 164841 - RNA, 22 nt, Human
uuagauaaauugcaacuugauu

SEQ ID NO: 164842 - RNA, 22 nt, Human
ggagcagacauaaccuuacaga

SEQ ID NO: 164843 - RNA, 20 nt, Human
ugcagagcuggcuggcuccu

SEQ ID NO: 164844 - RNA, 22 nt, Human
aagugagauuauauguacggga

SEQ ID NO: 164845 - RNA, 22 nt, Human
ccugagggcgccgagcucccag

SEQ ID NO: 164846 - RNA, 22 nt, Human
aaguugaaugcguacgugacau

SEQ ID NO: 164847 - RNA, 22 nt, Human
ucucugggaaugggccugggua

SEQ ID NO: 164848 - RNA, 22 nt, Human
ggcuucccaaggagccaggaug

SEQ ID NO: 164849 - RNA, 20 nt, Human
gccugcagagaaggucagag

SEQ ID NO: 164850 - RNA, 22 nt, Human
agugacugacaccuguaauccc

SEQ ID NO: 164851 - RNA, 23 nt, Human
aguguuccaguugguugagagug

SEQ ID NO: 164852 - RNA, 22 nt, Human
gggcuggaucuccugcaggcag

SEQ ID NO: 164853 - RNA, 22 nt, Human
agcugccugcuuaugagcucca

SEQ ID NO: 164854 - RNA, 22 nt, Human
aaaugucuuugaguauuucugc

SEQ ID NO: 164855 - RNA, 22 nt, Human
uauaacaguuuaggugguguca

SEQ ID NO: 164856 - RNA, 22 nt, Human
cagcccagcagggucuggcccu

SEQ ID NO: 164857 - RNA, 22 nt, Human
cagggcuggcucaugaaaaguu

SEQ ID NO: 164858 - RNA, 17 nt, Human
acacagggagagggagc

SEQ ID NO: 164859 - RNA, 22 nt, Human
ugaggcuguucuaccagggcca

SEQ ID NO: 164860 - RNA, 22 nt, Human
cuggcucagugccuucagaagu

SEQ ID NO: 164861 - RNA, 22 nt, Human
aguuuauagcccagauucaugg

SEQ ID NO: 164862 - RNA, 22 nt, Human
gucacuggggccacaugcagaa

SEQ ID NO: 164863 - RNA, 22 nt, Human
ggaaggaggggcaaagcaguuc

SEQ ID NO: 164864 - RNA, 22 nt, Human
uuugucagucaugucugcuuuu

SEQ ID NO: 164865 - RNA, 20 nt, Human
ccagguggugccuggagagg

SEQ ID NO: 164866 - RNA, 22 nt, Human
acagagauggcacagagaaggu

SEQ ID NO: 164867 - RNA, 21 nt, Human
acagacagggccagugucccc

SEQ ID NO: 164868 - RNA, 23 nt, Human
ucccagggaaggugagcgaggcu

SEQ ID NO: 164869 - RNA, 22 nt, Human
aacugcauucagaaagcucacu

SEQ ID NO: 164870 - RNA, 22 nt, Human
ugcucuucggggccacugcuug

SEQ ID NO: 164871 - RNA, 22 nt, Human
agcugccaucagccuuuggaug

SEQ ID NO: 164872 - RNA, 22 nt, Human
ccucacucugcacccugcagca

SEQ ID NO: 164873 - RNA, 22 nt, Human
ugaaagguguccaauauuucuc

SEQ ID NO: 164874 - RNA, 22 nt, Human
ccuggagcaggagcugcagagg

SEQ ID NO: 164875 - RNA, 21 nt, Human
ucuccaguauccuucucugag

SEQ ID NO: 164876 - RNA, 22 nt, Human
caggacaguuugcuuugcccug

SEQ ID NO: 164877 - RNA, 22 nt, Human
uaggccagcccuuaguccuguc

SEQ ID NO: 164878 - RNA, 22 nt, Human
ccagcagacacacaggcguggg

SEQ ID NO: 164879 - RNA, 22 nt, Human
cugggguggugcaggccucaug

SEQ ID NO: 164880 - RNA, 22 nt, Human
auauucuuccaaaacaucauuu

SEQ ID NO: 164881 - RNA, 22 nt, Human
agguaaagacagugaaagaggg

SEQ ID NO: 164882 - RNA, 22 nt, Human
caaaagcaguucuaucugaguu

SEQ ID NO: 164883 - RNA, 22 nt, Human
aggcagaauguuggaaaggaag

SEQ ID NO: 164884 - RNA, 20 nt, Human
uguuucuuuuaaugagcggc

SEQ ID NO: 164885 - RNA, 22 nt, Human
cucacugucuguacuagcugau

SEQ ID NO: 164886 - RNA, 22 nt, Human
ccaggccugcaucugcugcgca

SEQ ID NO: 164887 - RNA, 22 nt, Human
aggagcagcccacuccuguccu

SEQ ID NO: 164888 - RNA, 22 nt, Human
uauugacaauuugugaaacuau

SEQ ID NO: 164889 - RNA, 20 nt, Human
augccucuaauuuugcaaac

SEQ ID NO: 164890 - RNA, 22 nt, Human
cuggcagcauggagccugugcu

SEQ ID NO: 164891 - RNA, 22 nt, Human
cugccuggcuaaacucaagucg

SEQ ID NO: 164892 - RNA, 22 nt, Human
ugucccagauacuggacauaga

SEQ ID NO: 164893 - RNA, 22 nt, Human
uggaugcuguaggacacgcucu

SEQ ID NO: 164894 - RNA, 22 nt, Human
cugccuggucucaggcaugggg

SEQ ID NO: 164895 - RNA, 22 nt, Human
gguagcagggcugugagucaga

SEQ ID NO: 164896 - RNA, 22 nt, Human
aggcagcuggcagcacccaggg

SEQ ID NO: 164897 - RNA, 22 nt, Human
ccagcucuuuuggcugagugag

SEQ ID NO: 164898 - RNA, 22 nt, Human
agauacauugaguuuccuccug

SEQ ID NO: 164899 - RNA, 22 nt, Human
caugcacaacauacucaagagg

SEQ ID NO: 164900 - RNA, 22 nt, Human
aaaugucuuuaucucauguaac

SEQ ID NO: 164901 - RNA, 22 nt, Human
cauggcaggaggcugcuggcag

SEQ ID NO: 164902 - RNA, 22 nt, Human
ccaccagcagugugcaaggauu

SEQ ID NO: 164903 - RNA, 22 nt, Human
caaugguggugucagaagagau

SEQ ID NO: 164904 - RNA, 22 nt, Human
caggauggucagaugcauuguc

SEQ ID NO: 164905 - RNA, 23 nt, Human
cagguggcuccacgagggguggg

SEQ ID NO: 164906 - RNA, 22 nt, Human
guuccauaucacagcagacgaa

SEQ ID NO: 164907 - RNA, 22 nt, Human
uacaaaugaccauagccacuua

SEQ ID NO: 164908 - RNA, 22 nt, Human
aacagugagaagguggacagga

SEQ ID NO: 164909 - RNA, 22 nt, Human
agagacaggauaucugcucaug

SEQ ID NO: 164910 - RNA, 22 nt, Human
ugccugucagggggagugggaa

SEQ ID NO: 164911 - RNA, 19 nt, Human
ucugcuggcagaauucccu

SEQ ID NO: 164912 - RNA, 22 nt, Human
gcugagaguguaggauguuuac

SEQ ID NO: 164913 - RNA, 22 nt, Human
ugacagaaugugacucucagau

SEQ ID NO: 164914 - RNA, 22 nt, Human
acccugggcuuggccugcucag

SEQ ID NO: 164915 - RNA, 22 nt, Human
cugcccugcccaggccuugggc

SEQ ID NO: 164916 - RNA, 22 nt, Human
aagacauuacuggaaucugacu

SEQ ID NO: 164917 - RNA, 22 nt, Human
acaaagugcacaagaugagaac

SEQ ID NO: 164918 - RNA, 22 nt, Human
guaggcagucucucaggugauc

SEQ ID NO: 164919 - RNA, 22 nt, Human
ccagcuucucucugaugcagcu

SEQ ID NO: 164920 - RNA, 22 nt, Human
acuccuggguugcaguccucaa

SEQ ID NO: 164921 - RNA, 22 nt, Human
ucagugucuugaccugggugug

SEQ ID NO: 164922 - RNA, 22 nt, Human
caagagcucccagaccugggca

SEQ ID NO: 164923 - RNA, 22 nt, Human
aaguguguugacugaauugggg

SEQ ID NO: 164924 - RNA, 22 nt, Human
agcaggaaagaaaaaucugugu

SEQ ID NO: 164925 - RNA, 22 nt, Human
gucaaguuaagauaaggucaug

SEQ ID NO: 164926 - RNA, 20 nt, Human
agucccagaucaaauuucug

SEQ ID NO: 164927 - RNA, 22 nt, Human
agggagaaaauuggaugcacaa

SEQ ID NO: 164928 - RNA, 22 nt, Human
gcagccacucucauuccacgug

SEQ ID NO: 164929 - RNA, 22 nt, Human
agccagccgggggaccacagug

SEQ ID NO: 164930 - RNA, 22 nt, Human
uggcagcugauuagauggugcc

SEQ ID NO: 164931 - RNA, 21 nt, Human
ugccagcauguaggcuaguug

SEQ ID NO: 164932 - RNA, 22 nt, Human
caaagugcuggaauuacaggug

SEQ ID NO: 164933 - RNA, 22 nt, Human
ucaggcugaggucaucugcauc

SEQ ID NO: 164934 - RNA, 22 nt, Human
gggcuucucuuaugcuaacugg

SEQ ID NO: 164935 - RNA, 20 nt, Human
gcucccugguagaaauguuu

SEQ ID NO: 164936 - RNA, 22 nt, Human
aacucagcauccugcacagaga

SEQ ID NO: 164937 - RNA, 22 nt, Human
caggggcucuaaugcaugauca

SEQ ID NO: 164938 - RNA, 23 nt, Human
ggucccaguggagaggccucacc

SEQ ID NO: 164939 - RNA, 22 nt, Human
agaggugacauaggagaggcuc

SEQ ID NO: 164940 - RNA, 22 nt, Human
cccacucccugcacgccugccg

SEQ ID NO: 164941 - RNA, 22 nt, Human
gagcucagcacuaaaaucaugu

SEQ ID NO: 164942 - RNA, 22 nt, Human
uggggccuggucagagcugcac

SEQ ID NO: 164943 - RNA, 22 nt, Human
augugucaauuuucaaaugcuu

SEQ ID NO: 164944 - RNA, 22 nt, Human
caugcuuugggucagaaaugcc

SEQ ID NO: 164945 - RNA, 22 nt, Human
ccagggugaccagcuggccuag

SEQ ID NO: 164946 - RNA, 22 nt, Human
gauuucaaagguucugcaugcc

SEQ ID NO: 164947 - RNA, 18 nt, Human
cggcagagugcuucuagc

SEQ ID NO: 164948 - RNA, 22 nt, Human
ccaggccucccuuuuccagcca

SEQ ID NO: 164949 - RNA, 22 nt, Human
gccuggcaggggccugggagug

SEQ ID NO: 164950 - RNA, 22 nt, Human
aagauacauaaagguagagucu

SEQ ID NO: 164951 - RNA, 22 nt, Human
uuagauaacaguagaauaucaa

SEQ ID NO: 164952 - RNA, 22 nt, Human
uaaaugcagauuccugagccua

SEQ ID NO: 164953 - RNA, 19 nt, Human
gggcuccuugggccucucu

SEQ ID NO: 164954 - RNA, 22 nt, Human
uugcagggaccugcagaaagcu

SEQ ID NO: 164955 - RNA, 22 nt, Human
cccagggcccuggacagcuaca

SEQ ID NO: 164956 - RNA, 22 nt, Human
uagucucuggagacucuagggg

SEQ ID NO: 164957 - RNA, 22 nt, Human
gaggcucagagggagcaugguc

SEQ ID NO: 164958 - RNA, 22 nt, Human
guacuuccagccaagugagaca

SEQ ID NO: 164959 - RNA, 22 nt, Human
gcucugggauuaccagccuuag

SEQ ID NO: 164960 - RNA, 23 nt, Human
cuggcucauccugguugcagugg

SEQ ID NO: 164961 - RNA, 22 nt, Human
agggguggagaguguugccagu

SEQ ID NO: 164962 - RNA, 22 nt, Human
ucaaugauagacaagaucuaag

SEQ ID NO: 164963 - RNA, 22 nt, Human
gcucagccgaacuucagagcag

SEQ ID NO: 164964 - RNA, 22 nt, Human
gcuucucucucagacugcaagc

SEQ ID NO: 164965 - RNA, 22 nt, Human
ccacagagacagagcccagggu

SEQ ID NO: 164966 - RNA, 22 nt, Human
cuccaggagcugugucuuucuu

SEQ ID NO: 164967 - RNA, 22 nt, Human
aggcucagauucacauuugguu

SEQ ID NO: 164968 - RNA, 22 nt, Human
cagaaguaagauuacugugagu

SEQ ID NO: 164969 - RNA, 22 nt, Human
aggagcugaagucucugcacuc

SEQ ID NO: 164970 - RNA, 20 nt, Human
ccuccaggcacacccaugug

SEQ ID NO: 164971 - RNA, 22 nt, Human
uuagaaaacauaagugguaaag

SEQ ID NO: 164972 - RNA, 22 nt, Human
ggagugggcagcacugcccugu

SEQ ID NO: 164973 - RNA, 22 nt, Human
uucacaggaauguaggggucuu

SEQ ID NO: 164974 - RNA, 22 nt, Human
uccagcagaccaucaaggcuca

SEQ ID NO: 164975 - RNA, 20 nt, Human
gcagagccucacugcaaggg

SEQ ID NO: 164976 - RNA, 23 nt, Human
ggagccuggcauaugagacgcau

SEQ ID NO: 164977 - RNA, 22 nt, Human
auucagcaguuccugcuucagu

SEQ ID NO: 164978 - RNA, 22 nt, Human
gcaaugauauugaagugaugaa

SEQ ID NO: 164979 - RNA, 22 nt, Human
caagagcuacccugugccauau

SEQ ID NO: 164980 - RNA, 20 nt, Human
ugcuccaucuaaagugauua

SEQ ID NO: 164981 - RNA, 22 nt, Human
ccagggcugagcugugaccaug

SEQ ID NO: 164982 - RNA, 22 nt, Human
acugugugaaacaucaaugugu

SEQ ID NO: 164983 - RNA, 22 nt, Human
aagggcaggcagagaucauaua

SEQ ID NO: 164984 - RNA, 22 nt, Human
aagauucuacaguagguacauu

SEQ ID NO: 164985 - RNA, 22 nt, Human
ucccuggcuguguucaggugcg

SEQ ID NO: 164986 - RNA, 22 nt, Human
uaaagucaucuuuacaucuuug

SEQ ID NO: 164987 - RNA, 22 nt, Human
caucugccuaaguggcccuguu

SEQ ID NO: 164988 - RNA, 22 nt, Human
ugggacagagugagcuuuggcc

SEQ ID NO: 164989 - RNA, 22 nt, Human
uggcucagcgcggccuggucuu

SEQ ID NO: 164990 - RNA, 22 nt, Human
ggcaggagaaaggucucuucuu

SEQ ID NO: 164991 - RNA, 22 nt, Human
cugcucuggucucuucauguuu

SEQ ID NO: 164992 - RNA, 22 nt, Human
cagcugcccaggccaccuggag

SEQ ID NO: 164993 - RNA, 22 nt, Human
ccagccagccuugaucugagua

SEQ ID NO: 164994 - RNA, 22 nt, Human
uuucacaaguuucaggauucug

SEQ ID NO: 164995 - RNA, 22 nt, Human
ucugagagcuguagaagccuau

SEQ ID NO: 164996 - RNA, 22 nt, Human
agucccaggcagccgagccggu

SEQ ID NO: 164997 - RNA, 22 nt, Human
caguggguccuaaguacaguuc

SEQ ID NO: 164998 - RNA, 22 nt, Human
ggcaaaaacagcaaugacuuuu

SEQ ID NO: 164999 - RNA, 22 nt, Human
ugggcagaaggaagagccaccu

SEQ ID NO: 165000 - RNA, 22 nt, Human
agauuucaauggauauugcaag

SEQ ID NO: 165001 - RNA, 22 nt, Human
ugggcagacugagcccuguccc

SEQ ID NO: 165002 - RNA, 22 nt, Human
gagagugaaggcuucccagcaa

SEQ ID NO: 165003 - RNA, 22 nt, Human
cuguuuucaaagagagagaaug

SEQ ID NO: 165004 - RNA, 22 nt, Human
ucaucuaagagucuuacauuua

SEQ ID NO: 165005 - RNA, 22 nt, Human
cugcccagaaucacucacucga

SEQ ID NO: 165006 - RNA, 22 nt, Human
gcuggugagcaaaggagaagga

SEQ ID NO: 165007 - RNA, 22 nt, Human
aguauuuccuggcuuaucugcu

SEQ ID NO: 165008 - RNA, 22 nt, Human
uuugcauuucuaaugagcuccg

SEQ ID NO: 165009 - RNA, 22 nt, Human
caccuggcuggaagugcuccgg

SEQ ID NO: 165010 - RNA, 22 nt, Human
ugcagaagacacaagguaacgu

SEQ ID NO: 165011 - RNA, 22 nt, Human
aucuggcugcugugcuuaagcu

SEQ ID NO: 165012 - RNA, 19 nt, Human
ccagagcccgccagauggg

SEQ ID NO: 165013 - RNA, 22 nt, Human
gccaagagaaugugagagaaau

SEQ ID NO: 165014 - RNA, 22 nt, Human
cagggccagccauccugcuggg

SEQ ID NO: 165015 - RNA, 22 nt, Human
cccaggcugauguucagcgggu

SEQ ID NO: 165016 - RNA, 22 nt, Human
aaagccuuggucaucugguucc

SEQ ID NO: 165017 - RNA, 22 nt, Human
caggcagcguccugcuuccugu

SEQ ID NO: 165018 - RNA, 22 nt, Human
gcacccagcccagggcgugaug

SEQ ID NO: 165019 - RNA, 22 nt, Human
cacugccuccccaggcuccaca

SEQ ID NO: 165020 - RNA, 22 nt, Human
uccauugucuuugguccuagcc

SEQ ID NO: 165021 - RNA, 22 nt, Human
cccuggccagcucaugucugag

SEQ ID NO: 165022 - RNA, 22 nt, Human
ugggcugcagagcccggccuuc

SEQ ID NO: 165023 - RNA, 22 nt, Human
gguaacaguauguagaguaaga

SEQ ID NO: 165024 - RNA, 22 nt, Human
uguuccuaaauaugaauggaga

SEQ ID NO: 165025 - RNA, 22 nt, Human
ucugucacugagcucaggauuc

SEQ ID NO: 165026 - RNA, 23 nt, Human
uuguuuuuagagguggcaugaga

SEQ ID NO: 165027 - RNA, 22 nt, Human
ugggccugccccaggcuucagc

SEQ ID NO: 165028 - RNA, 22 nt, Human
ccucugcugcuguugagcaccg

SEQ ID NO: 165029 - RNA, 22 nt, Human
aagaggaagucuccauggagag

SEQ ID NO: 165030 - RNA, 22 nt, Human
ucaaugauaguacaaucagccu

SEQ ID NO: 165031 - RNA, 22 nt, Human
agagcccucucauuggcuuauu

SEQ ID NO: 165032 - RNA, 22 nt, Human
uacauauagacaguuacucuag

SEQ ID NO: 165033 - RNA, 22 nt, Human
gaggccugcuuuggcacucugg

SEQ ID NO: 165034 - RNA, 22 nt, Human
cugccuggaaugccagcuucuc

SEQ ID NO: 165035 - RNA, 22 nt, Human
uuggcucaggaccccugugacu

SEQ ID NO: 165036 - RNA, 22 nt, Human
guaucuuuccacaucuucagua

SEQ ID NO: 165037 - RNA, 22 nt, Human
ccuuuugcucucccauccagaa

SEQ ID NO: 165038 - RNA, 22 nt, Human
caggguggcaggcaccauggcc

SEQ ID NO: 165039 - RNA, 22 nt, Human
gggcacagagggucuugaagaa

SEQ ID NO: 165040 - RNA, 22 nt, Human
gcucccaccuccagccugaguu

SEQ ID NO: 165041 - RNA, 23 nt, Human
ccagcuccgugagccucgggcuc

SEQ ID NO: 165042 - RNA, 22 nt, Human
agguggggaggagugucucuuu

SEQ ID NO: 165043 - RNA, 22 nt, Human
gccacaggcacuuaagggcugg

SEQ ID NO: 165044 - RNA, 22 nt, Human
uggcagagaaccugggcuuugu

SEQ ID NO: 165045 - RNA, 22 nt, Human
cugagcuuggccaggaaugaau

SEQ ID NO: 165046 - RNA, 22 nt, Human
cagcugcaggaacaaaaaugug

SEQ ID NO: 165047 - RNA, 22 nt, Human
uuccucuccucccaccagguga

SEQ ID NO: 165048 - RNA, 22 nt, Human
gcugccuggaauaacggcuggc

SEQ ID NO: 165049 - RNA, 22 nt, Human
uguacauugucacucaucaagu

SEQ ID NO: 165050 - RNA, 22 nt, Human
ggcucaggagaggggcuaaaag

SEQ ID NO: 165051 - RNA, 22 nt, Human
aaugcuguauaucuuagcuaau

SEQ ID NO: 165052 - RNA, 22 nt, Human
uagggcuauaagagaauaagac

SEQ ID NO: 165053 - RNA, 22 nt, Human
uggcucagcuuuccccaucugg

SEQ ID NO: 165054 - RNA, 22 nt, Human
uggcucagagcagggacucugg

SEQ ID NO: 165055 - RNA, 22 nt, Human
gcuuuauguaaguccaaaggca

SEQ ID NO: 165056 - RNA, 22 nt, Human
ggcucaagcagucugccugccu

SEQ ID NO: 165057 - RNA, 22 nt, Human
aucagcaagacuaggggaauac

SEQ ID NO: 165058 - RNA, 22 nt, Human
ccuguguguaggccaggggagu

SEQ ID NO: 165059 - RNA, 21 nt, Human
agggagcuauuuauaguaagc

SEQ ID NO: 165060 - RNA, 21 nt, Human
aggcucagcagguguauaaag

SEQ ID NO: 165061 - RNA, 22 nt, Human
agggcuggagccacagcuggga

SEQ ID NO: 165062 - RNA, 20 nt, Human
ugggcagcacugcuggcugg

SEQ ID NO: 165063 - RNA, 22 nt, Human
auguagcagaagauguuuuccu

SEQ ID NO: 165064 - RNA, 22 nt, Human
uggcccucagucuugcuccugc

SEQ ID NO: 165065 - RNA, 18 nt, Human
agcagaauucuaggguuc

SEQ ID NO: 165066 - RNA, 22 nt, Human
gggcacagcugcuacccagugc

SEQ ID NO: 165067 - RNA, 22 nt, Human
gcucaagggaugggagugggug

SEQ ID NO: 165068 - RNA, 22 nt, Human
aggcugggaagguaaaguugua

SEQ ID NO: 165069 - RNA, 22 nt, Human
cuggagcuaauaauccaucuga

SEQ ID NO: 165070 - RNA, 22 nt, Human
uccauuuacuauucucauaucg

SEQ ID NO: 165071 - RNA, 22 nt, Human
gagucacaaagccuuucuuauu

SEQ ID NO: 165072 - RNA, 22 nt, Human
ggcuccuguccccucagcugcu

SEQ ID NO: 165073 - RNA, 22 nt, Human
ugcugcucucagccaccaggaa

SEQ ID NO: 165074 - RNA, 22 nt, Human
uugacagcuauuuugcuuugau

SEQ ID NO: 165075 - RNA, 22 nt, Human
aaguucaagcucugccuaaaau

SEQ ID NO: 165076 - RNA, 22 nt, Human
uugaaggacauccuauuucuag

SEQ ID NO: 165077 - RNA, 22 nt, Human
augaaacaugagaaauggagag

SEQ ID NO: 165078 - RNA, 22 nt, Human
accugccuucucaaggacauga

SEQ ID NO: 165079 - RNA, 22 nt, Human
auuauguagguuaggugguugu

SEQ ID NO: 165080 - RNA, 23 nt, Human
acacaaggguaacugccagccau

SEQ ID NO: 165081 - RNA, 22 nt, Human
uguguacacaaugauugcagag

SEQ ID NO: 165082 - RNA, 22 nt, Human
ccuuuuucaauauagaauugca

SEQ ID NO: 165083 - RNA, 22 nt, Human
ggcugccuucccugagccccgg

SEQ ID NO: 165084 - RNA, 22 nt, Human
cucucugagugagggacaagcu

SEQ ID NO: 165085 - RNA, 22 nt, Human
uagaaaagaauuuuauuugaua

SEQ ID NO: 165086 - RNA, 22 nt, Human
agcagagcugcaguggccugcu

SEQ ID NO: 165087 - RNA, 20 nt, Human
caggccagagguuugauggc

SEQ ID NO: 165088 - RNA, 22 nt, Human
cuguggugagcaacugacugaa

SEQ ID NO: 165089 - RNA, 22 nt, Human
cacugaagguaggaccaaggcu

SEQ ID NO: 165090 - RNA, 22 nt, Human
ccacagggcacaagggagguug

SEQ ID NO: 165091 - RNA, 22 nt, Human
cguggccuuugagugagcuccc

SEQ ID NO: 165092 - RNA, 22 nt, Human
cagggguggcugcagcagaggu

SEQ ID NO: 165093 - RNA, 22 nt, Human
acacugaauauacaaugaauau

SEQ ID NO: 165094 - RNA, 22 nt, Human
aggucagaagugccagggaauu

SEQ ID NO: 165095 - RNA, 22 nt, Human
aggagccaguuccaccccagga

SEQ ID NO: 165096 - RNA, 23 nt, Human
ccuccugggcacaggccugaugg

SEQ ID NO: 165097 - RNA, 22 nt, Human
uagccuucucaagacaaaguug

SEQ ID NO: 165098 - RNA, 22 nt, Human
ugggcucugaagucagucugcu

SEQ ID NO: 165099 - RNA, 22 nt, Human
uuaagucauuucugauuauaga

SEQ ID NO: 165100 - RNA, 22 nt, Human
auaaggcagucccuuaacaagg

SEQ ID NO: 165101 - RNA, 22 nt, Human
cugccuuugcccuugacacugu

SEQ ID NO: 165102 - RNA, 20 nt, Human
uguauauuuucugguguaaa

SEQ ID NO: 165103 - RNA, 22 nt, Human
aaauguaguauguugcauguau

SEQ ID NO: 165104 - RNA, 22 nt, Human
agcuuccuuggcgcugaggccu

SEQ ID NO: 165105 - RNA, 22 nt, Human
gagccugaugaaacaggcagac

SEQ ID NO: 165106 - RNA, 22 nt, Human
gauucugagcugguguuuuacg

SEQ ID NO: 165107 - RNA, 22 nt, Human
acagaauucucucugcagaggc

SEQ ID NO: 165108 - RNA, 22 nt, Human
ccuuagagaguacugggcugcc

SEQ ID NO: 165109 - RNA, 20 nt, Human
gccugccucagcuagcugag

SEQ ID NO: 165110 - RNA, 22 nt, Human
ugcagccaucgcagagucugua

SEQ ID NO: 165111 - RNA, 22 nt, Human
acaugcaugucuaugggcaggu

SEQ ID NO: 165112 - RNA, 22 nt, Human
gggagggacacaaagaguuccc

SEQ ID NO: 165113 - RNA, 22 nt, Human
ugucucaguacacuccgauguu

SEQ ID NO: 165114 - RNA, 22 nt, Human
aagcugccacacggugaguacu

SEQ ID NO: 165115 - RNA, 21 nt, Human
ugcucacagaugugcucagug

SEQ ID NO: 165116 - RNA, 22 nt, Human
guuguauagagggcaugaaucu

SEQ ID NO: 165117 - RNA, 21 nt, Human
aaacugaccuugccugagaca

SEQ ID NO: 165118 - RNA, 21 nt, Human
uagcacuucgcuguaauuggg

SEQ ID NO: 165119 - RNA, 22 nt, Human
gcugggaggaauuuggggaaua

SEQ ID NO: 165120 - RNA, 22 nt, Human
gcugauuauuacaugucugugg

SEQ ID NO: 165121 - RNA, 22 nt, Human
gcuggccucuggagaagggcuu

SEQ ID NO: 165122 - RNA, 22 nt, Human
ucuggcuccaccuccuuuacua

SEQ ID NO: 165123 - RNA, 22 nt, Human
ucccuggacaacagacuucacu

SEQ ID NO: 165124 - RNA, 22 nt, Human
cucaggaucgcuugcccuaggg

SEQ ID NO: 165125 - RNA, 22 nt, Human
uaggaaaaauacagaauuauau

SEQ ID NO: 165126 - RNA, 20 nt, Human
gucugaggagcagugggaaa

SEQ ID NO: 165127 - RNA, 22 nt, Human
auguacauuuguaguaauauca

SEQ ID NO: 165128 - RNA, 22 nt, Human
cagggugcagugucgcugcuag

SEQ ID NO: 165129 - RNA, 22 nt, Human
acauauuuccaugcagcauguc

SEQ ID NO: 165130 - RNA, 22 nt, Human
ggagcugcauuuagggagccuu

SEQ ID NO: 165131 - RNA, 22 nt, Human
gcuugcuggugccugcaggcuc

SEQ ID NO: 165132 - RNA, 17 nt, Human
ugcauuguuggaaauuu

SEQ ID NO: 165133 - RNA, 22 nt, Human
cagcagagacgguaagcagaac

SEQ ID NO: 165134 - RNA, 20 nt, Human
uguuccaugacuauuuggau

SEQ ID NO: 165135 - RNA, 22 nt, Human
ggccugcuccgggggcugagcu

SEQ ID NO: 165136 - RNA, 22 nt, Human
ggccugucucacccccgggugc

SEQ ID NO: 165137 - RNA, 22 nt, Human
uggaggcaucagagugcuuggc

SEQ ID NO: 165138 - RNA, 18 nt, Human
cagauccaggcagcuauu

SEQ ID NO: 165139 - RNA, 22 nt, Human
acucagaguuugcguuccauac

SEQ ID NO: 165140 - RNA, 22 nt, Human
cucacagguaccagcacccucc

SEQ ID NO: 165141 - RNA, 22 nt, Human
ugagagugguucagcucagaag

SEQ ID NO: 165142 - RNA, 22 nt, Human
uggccucugggaaagcagauuc

SEQ ID NO: 165143 - RNA, 22 nt, Human
gcagugguggagcuuacauauc

SEQ ID NO: 165144 - RNA, 19 nt, Human
ggcugggucuggcagguuc

SEQ ID NO: 165145 - RNA, 22 nt, Human
ucacugcaaccucugccuuccg

SEQ ID NO: 165146 - RNA, 22 nt, Human
aggagagagcugagcuuugcug

SEQ ID NO: 165147 - RNA, 23 nt, Human
aucaaacuggugagaaugucagu

SEQ ID NO: 165148 - RNA, 22 nt, Human
uccaggcuagguuuacaggaca

SEQ ID NO: 165149 - RNA, 22 nt, Human
gggcuggcaucaguugccgaga

SEQ ID NO: 165150 - RNA, 22 nt, Human
gggcaugguggcaggcaccugu

SEQ ID NO: 165151 - RNA, 22 nt, Human
uugcauugaugucuauacgcug

SEQ ID NO: 165152 - RNA, 22 nt, Human
ggcuagaauaauugacuucauu

SEQ ID NO: 165153 - RNA, 22 nt, Human
gagaggcuaugagguucugugu

SEQ ID NO: 165154 - RNA, 22 nt, Human
aucuggcuuaccuagggugccu

SEQ ID NO: 165155 - RNA, 18 nt, Human
acaaaggucugcaagacc

SEQ ID NO: 165156 - RNA, 22 nt, Human
ccuggaaguuggagguugcagu

SEQ ID NO: 165157 - RNA, 22 nt, Human
ggcuugcuucuuguccaggaau

SEQ ID NO: 165158 - RNA, 22 nt, Human
cuggcagguccagcuggacuca

SEQ ID NO: 165159 - RNA, 22 nt, Human
uagcugccuagacagcuauagc

SEQ ID NO: 165160 - RNA, 22 nt, Human
guccuggggaauacagaagccg

SEQ ID NO: 165161 - RNA, 22 nt, Human
cucuggccgcagcucagcucug

SEQ ID NO: 165162 - RNA, 22 nt, Human
ccugagggaggguauaggcugu

SEQ ID NO: 165163 - RNA, 22 nt, Human
gucccagagagcacuaguccau

SEQ ID NO: 165164 - RNA, 22 nt, Human
gccuucugaucgcuggacugac

SEQ ID NO: 165165 - RNA, 22 nt, Human
auggaagguccuacagagcgca

SEQ ID NO: 165166 - RNA, 22 nt, Human
uggcugggggugcuauagcugc

SEQ ID NO: 165167 - RNA, 22 nt, Human
gaggccugggagccuguccucc

SEQ ID NO: 165168 - RNA, 18 nt, Human
cagucccaaaccuuagga

SEQ ID NO: 165169 - RNA, 22 nt, Human
ugcagcugcuugauucaucuug

SEQ ID NO: 165170 - RNA, 22 nt, Human
ucuuggagacucuuguauauuu

SEQ ID NO: 165171 - RNA, 22 nt, Human
uugauaaaaugauaucuucuuu

SEQ ID NO: 165172 - RNA, 19 nt, Human
cugcucaggucagucuguc

SEQ ID NO: 165173 - RNA, 22 nt, Human
cuggguggcuguccagccagcc

SEQ ID NO: 165174 - RNA, 22 nt, Human
ccugucugagccagggugggca

SEQ ID NO: 165175 - RNA, 20 nt, Human
cagcucugggaaagaggcca

SEQ ID NO: 165176 - RNA, 22 nt, Human
gaguaagagcuggcuuuggugu

SEQ ID NO: 165177 - RNA, 22 nt, Human
caggagugaguuggggucuaca

SEQ ID NO: 165178 - RNA, 22 nt, Human
aaugaugguauugaugagcuaa

SEQ ID NO: 165179 - RNA, 22 nt, Human
cauuacauuucaaaauguuucc

SEQ ID NO: 165180 - RNA, 22 nt, Human
ccuggagggcgccgcacagucc

SEQ ID NO: 165181 - RNA, 22 nt, Human
agaaaaaucuuggcgcuugucu

SEQ ID NO: 165182 - RNA, 22 nt, Human
gcagauggcucagacacugggg

SEQ ID NO: 165183 - RNA, 22 nt, Human
uuagauaauguuauuguaauuu

SEQ ID NO: 165184 - RNA, 22 nt, Human
ccugccugcuuucugcuuugca

SEQ ID NO: 165185 - RNA, 22 nt, Human
ucauuuccucaaauucaagguu

SEQ ID NO: 165186 - RNA, 22 nt, Human
aaggccauuauucugauauauu

SEQ ID NO: 165187 - RNA, 22 nt, Human
uggcagagucugggcuugggca

SEQ ID NO: 165188 - RNA, 22 nt, Human
caagaugaaacuacagggagga

SEQ ID NO: 165189 - RNA, 22 nt, Human
ggucccaggaaucuguguucua

SEQ ID NO: 165190 - RNA, 22 nt, Human
ucaucuucuauuaauagggaga

SEQ ID NO: 165191 - RNA, 22 nt, Human
gcagggaggaagagaugcuucc

SEQ ID NO: 165192 - RNA, 22 nt, Human
ccuccaggaacuugagagacac

SEQ ID NO: 165193 - RNA, 22 nt, Human
acaguguccuuguggucccugu

SEQ ID NO: 165194 - RNA, 17 nt, Human
aggcagcucagaacauc

SEQ ID NO: 165195 - RNA, 22 nt, Human
ugaugauguuuaucuugguauu

SEQ ID NO: 165196 - RNA, 22 nt, Human
ucuuagaaugucaacugauguu

SEQ ID NO: 165197 - RNA, 22 nt, Human
cugugcuuccaggauggcagcu

SEQ ID NO: 165198 - RNA, 22 nt, Human
cugaagaggacgcagcagcaag

SEQ ID NO: 165199 - RNA, 22 nt, Human
aggccugagccccagguuuguu

SEQ ID NO: 165200 - RNA, 20 nt, Human
aauaaaagaagccuucaccc

SEQ ID NO: 165201 - RNA, 21 nt, Human
uguaugcacgcacaugcacac

SEQ ID NO: 165202 - RNA, 22 nt, Human
gacagagugcagggcuagaaga

SEQ ID NO: 165203 - RNA, 22 nt, Human
uccugagauguggagcuccaug

SEQ ID NO: 165204 - RNA, 22 nt, Human
agcugcuaugacaacaccagcc

SEQ ID NO: 165205 - RNA, 19 nt, Human
aggcagaggcuuggcuagc

SEQ ID NO: 165206 - RNA, 22 nt, Human
cugcugagguccuugcucagac

SEQ ID NO: 165207 - RNA, 22 nt, Human
gagauuggauuuaauggccaaa

SEQ ID NO: 165208 - RNA, 22 nt, Human
uagagcuggaaaacugcaggua

SEQ ID NO: 165209 - RNA, 22 nt, Human
ugccugaguuuaacccucagag

SEQ ID NO: 165210 - RNA, 22 nt, Human
cagaggccauauuucuucacuc

SEQ ID NO: 165211 - RNA, 22 nt, Human
auuuccauacacccauuucuga

SEQ ID NO: 165212 - RNA, 22 nt, Human
accucugcuucccggguucaag

SEQ ID NO: 165213 - RNA, 21 nt, Human
aauaaaacaguuggugucaau

SEQ ID NO: 165214 - RNA, 22 nt, Human
caguacuuggucaaggaagcag

SEQ ID NO: 165215 - RNA, 22 nt, Human
ugcugccaccugguggcugaag

SEQ ID NO: 165216 - RNA, 22 nt, Human
uggcacuggaaucguagccuug

SEQ ID NO: 165217 - RNA, 22 nt, Human
aauuucaaugcacucaugguug

SEQ ID NO: 165218 - RNA, 22 nt, Human
ucagaacagaagaaggaacacg

SEQ ID NO: 165219 - RNA, 22 nt, Human
ccuaugccugucacucugcgcu

SEQ ID NO: 165220 - RNA, 18 nt, Human
agcugcagaccaggaggu

SEQ ID NO: 165221 - RNA, 22 nt, Human
gacuuucucuccucccaggugu

SEQ ID NO: 165222 - RNA, 22 nt, Human
aggcuccuaucgcuuucagcaa

SEQ ID NO: 165223 - RNA, 22 nt, Human
gaggccugguagccgagcccca

SEQ ID NO: 165224 - RNA, 22 nt, Human
ugguuuauuucucugaaagguu

SEQ ID NO: 165225 - RNA, 23 nt, Human
ucugcucugaaguucggcugagc

SEQ ID NO: 165226 - RNA, 22 nt, Human
gacaggaggcagagcucaggug

SEQ ID NO: 165227 - RNA, 18 nt, Human
auuuugaacaaugcugua

SEQ ID NO: 165228 - RNA, 22 nt, Human
acagagguguuccagaccuagg

SEQ ID NO: 165229 - RNA, 22 nt, Human
uaggagcuaaaauauuuuauau

SEQ ID NO: 165230 - RNA, 22 nt, Human
gcacugaacuuuaaucauuucu

SEQ ID NO: 165231 - RNA, 20 nt, Human
acccagcucugugcccuggg

SEQ ID NO: 165232 - RNA, 22 nt, Human
agggggugcuacuuccagaguu

SEQ ID NO: 165233 - RNA, 22 nt, Human
cagaaguaagauuacugugaga

SEQ ID NO: 165234 - RNA, 22 nt, Human
ugcauuauuugcaugugccugu

SEQ ID NO: 165235 - RNA, 19 nt, Human
ccuuugaaucaggacacuu

SEQ ID NO: 165236 - RNA, 22 nt, Human
cucucaggcuugggucguggca

SEQ ID NO: 165237 - RNA, 17 nt, Human
aggcugcugggccaggg

SEQ ID NO: 165238 - RNA, 22 nt, Human
gcaaagucucaagacccaagug

SEQ ID NO: 165239 - RNA, 22 nt, Human
uaacacugauuuguucucaggg

SEQ ID NO: 165240 - RNA, 22 nt, Human
aucuuccuucacuuucucccac

SEQ ID NO: 165241 - RNA, 20 nt, Human
uaagaacaagacuaggaagc

SEQ ID NO: 165242 - RNA, 22 nt, Human
cagugcauaaucuaaauggggg

SEQ ID NO: 165243 - RNA, 22 nt, Human
uugcacuccagcccgagcaaca

SEQ ID NO: 165244 - RNA, 20 nt, Human
cagucccaauccagggccag

SEQ ID NO: 165245 - RNA, 22 nt, Human
ggcucagguuuccuucccagcu

SEQ ID NO: 165246 - RNA, 22 nt, Human
caguagcacucugucagugaag

SEQ ID NO: 165247 - RNA, 22 nt, Human
ggagcagagcugggcuuggcug

SEQ ID NO: 165248 - RNA, 22 nt, Human
aggggugaaggcccgauaggag

SEQ ID NO: 165249 - RNA, 22 nt, Human
acugucuuccaggucuggaggu

SEQ ID NO: 165250 - RNA, 22 nt, Human
cuggccaacuugcuuguuggca

SEQ ID NO: 165251 - RNA, 22 nt, Human
gagaaagacguaggcugggagg

SEQ ID NO: 165252 - RNA, 22 nt, Human
ugaaaucuucacuaagucucuu

SEQ ID NO: 165253 - RNA, 22 nt, Human
ucugguuagccaauaaugccaa

SEQ ID NO: 165254 - RNA, 22 nt, Human
cuggacuuuggcccaucugcca

SEQ ID NO: 165255 - RNA, 22 nt, Human
aaguucaagagugacauauuag

SEQ ID NO: 165256 - RNA, 17 nt, Human
cugcuuugugcaacgcu

SEQ ID NO: 165257 - RNA, 22 nt, Human
gcucugagucucagcuaccaca

SEQ ID NO: 165258 - RNA, 22 nt, Human
caggccuggguucaaaucccuu

SEQ ID NO: 165259 - RNA, 22 nt, Human
cuaauacucauuucuguaacuc

SEQ ID NO: 165260 - RNA, 22 nt, Human
agagcuguggauaguccuggau

SEQ ID NO: 165261 - RNA, 22 nt, Human
cacaugcauaaggauaauuacu

SEQ ID NO: 165262 - RNA, 22 nt, Human
ucacagaaauaagauaguuauu

SEQ ID NO: 165263 - RNA, 22 nt, Human
ggucccaggauugguugcgcag

SEQ ID NO: 165264 - RNA, 18 nt, Human
gaggccugagaaccaggu

SEQ ID NO: 165265 - RNA, 22 nt, Human
ugccuuggugcuucuucaugug

SEQ ID NO: 165266 - RNA, 22 nt, Human
cauguacacucauguaacuaua

SEQ ID NO: 165267 - RNA, 23 nt, Human
gcugucaguuguuuuugucucua

SEQ ID NO: 165268 - RNA, 22 nt, Human
ucaccugggagggcugugguag

SEQ ID NO: 165269 - RNA, 22 nt, Human
aggagguggccugagcgugccc

SEQ ID NO: 165270 - RNA, 22 nt, Human
uggcacugagcagccgcggcag

SEQ ID NO: 165271 - RNA, 22 nt, Human
aaacugaauucccaagggcaug

SEQ ID NO: 165272 - RNA, 22 nt, Human
agguacagggugaaaguuuaug

SEQ ID NO: 165273 - RNA, 22 nt, Human
cuggccuuuagccccagugucu

SEQ ID NO: 165274 - RNA, 22 nt, Human
aauaaauguuaagauugucuca

SEQ ID NO: 165275 - RNA, 22 nt, Human
cacauuucugugagucaauauu

SEQ ID NO: 165276 - RNA, 22 nt, Human
caguggcugugaccagggaccu

SEQ ID NO: 165277 - RNA, 22 nt, Human
gggcugcuuauacugaugauaa

SEQ ID NO: 165278 - RNA, 22 nt, Human
agcagccaaaugaagauuuuac

SEQ ID NO: 165279 - RNA, 18 nt, Human
cagaaaucacaccagcac

SEQ ID NO: 165280 - RNA, 22 nt, Human
cuacauuuuaauaagcugcuua

SEQ ID NO: 165281 - RNA, 22 nt, Human
ggugcugguucaggguggcugu

SEQ ID NO: 165282 - RNA, 22 nt, Human
agggccugggauguccuccuag

SEQ ID NO: 165283 - RNA, 22 nt, Human
aagcucugcucagcagacuagg

SEQ ID NO: 165284 - RNA, 22 nt, Human
gggcuucucccuaaggacucug

SEQ ID NO: 165285 - RNA, 19 nt, Human
cccuggcaggcaagccugg

SEQ ID NO: 165286 - RNA, 22 nt, Human
gcacagaacagagaaauagcca

SEQ ID NO: 165287 - RNA, 19 nt, Human
uguguaaagucugugguca

SEQ ID NO: 165288 - RNA, 21 nt, Human
ucacaugcccauuacuggagc

SEQ ID NO: 165289 - RNA, 22 nt, Human
uacuuuaaaaacugauaauuca

SEQ ID NO: 165290 - RNA, 22 nt, Human
gagugugggcacgggggccuug

SEQ ID NO: 165291 - RNA, 22 nt, Human
auaugcauaugucaaaacuuau

SEQ ID NO: 165292 - RNA, 22 nt, Human
ugagccuguggggugacaacca

SEQ ID NO: 165293 - RNA, 22 nt, Human
ccuggcaguuuugcccaggauu

SEQ ID NO: 165294 - RNA, 22 nt, Human
agaaguaggcagggcuguauca

SEQ ID NO: 165295 - RNA, 22 nt, Human
auauucguggucaaguaaggcc

SEQ ID NO: 165296 - RNA, 23 nt, Human
uggugccucagaagcagugggcu

SEQ ID NO: 165297 - RNA, 22 nt, Human
cuggggacuugcagacacaauu

SEQ ID NO: 165298 - RNA, 20 nt, Human
aggaagccaaaggcugucuu

SEQ ID NO: 165299 - RNA, 22 nt, Human
auccuugaaugacucugcccuc

SEQ ID NO: 165300 - RNA, 18 nt, Human
gucuggaggucaggagcu

SEQ ID NO: 165301 - RNA, 22 nt, Human
agccuccacagaugcaaagggc

SEQ ID NO: 165302 - RNA, 22 nt, Human
agccccucuguggcucugccuc

SEQ ID NO: 165303 - RNA, 22 nt, Human
gcaccacaucaaugaggggagc

SEQ ID NO: 165304 - RNA, 19 nt, Human
acacugaauguagaauugg

SEQ ID NO: 165305 - RNA, 22 nt, Human
gguggcuggaggagcugaugga

SEQ ID NO: 165306 - RNA, 22 nt, Human
acagcagcuaaccccugggcca

SEQ ID NO: 165307 - RNA, 22 nt, Human
aucagcaagauguaauuucuau

SEQ ID NO: 165308 - RNA, 22 nt, Human
ugcuauaagaauuauauuacuc

SEQ ID NO: 165309 - RNA, 22 nt, Human
cugagcugaaacuugagaggcu

SEQ ID NO: 165310 - RNA, 22 nt, Human
cccagguggcagaagcugcagu

SEQ ID NO: 165311 - RNA, 22 nt, Human
agucucagaaaagaagcaugga

SEQ ID NO: 165312 - RNA, 22 nt, Human
ggcugcuugcuguuucuuggau

SEQ ID NO: 165313 - RNA, 22 nt, Human
uggcucaggaucuaagcagaau

SEQ ID NO: 165314 - RNA, 22 nt, Human
aauucauccaugaacaauucca

SEQ ID NO: 165315 - RNA, 22 nt, Human
gcaggugggggucggugcaucu

SEQ ID NO: 165316 - RNA, 22 nt, Human
gcagggugauagugaggcucag

SEQ ID NO: 165317 - RNA, 22 nt, Human
gauggggaugagaagugagcag

SEQ ID NO: 165318 - RNA, 22 nt, Human
uaucuacaggugucagguaaga

SEQ ID NO: 165319 - RNA, 22 nt, Human
ccuucugcuggucaucccagug

SEQ ID NO: 165320 - RNA, 22 nt, Human
gcacagaagagcuuuggaauga

SEQ ID NO: 165321 - RNA, 22 nt, Human
cagagcugguguuacaagucca

SEQ ID NO: 165322 - RNA, 22 nt, Human
gaacagaagaggcuggugccac

SEQ ID NO: 165323 - RNA, 22 nt, Human
cauuugaugacucaacucauaa

SEQ ID NO: 165324 - RNA, 22 nt, Human
cuuucagagguuacucaggaaa

SEQ ID NO: 165325 - RNA, 21 nt, Human
aagaagcaauuuauuggaagg

SEQ ID NO: 165326 - RNA, 22 nt, Human
uggccucuuacgacauagccuu

SEQ ID NO: 165327 - RNA, 22 nt, Human
accagcucagaagccagaaaga

SEQ ID NO: 165328 - RNA, 20 nt, Human
agggcagagggauuacaggc

SEQ ID NO: 165329 - RNA, 22 nt, Human
uaaggcacccgugagcugccag

SEQ ID NO: 165330 - RNA, 22 nt, Human
uugagggucuggaucugcugcu

SEQ ID NO: 165331 - RNA, 22 nt, Human
auuucacucucccugccacuua

SEQ ID NO: 165332 - RNA, 22 nt, Human
acagugucugacacauuguagc

SEQ ID NO: 165333 - RNA, 22 nt, Human
caagcagagacuagauagcugu

SEQ ID NO: 165334 - RNA, 22 nt, Human
auaguauuuaauaguuagcuca

SEQ ID NO: 165335 - RNA, 23 nt, Human
gcaggugguucgaacagaaguuu

SEQ ID NO: 165336 - RNA, 22 nt, Human
aggccuguuccaggccccuuuu

SEQ ID NO: 165337 - RNA, 22 nt, Human
ugcaguggugguaaagaugcuc

SEQ ID NO: 165338 - RNA, 22 nt, Human
ggcucugccugcccagcagcac

SEQ ID NO: 165339 - RNA, 18 nt, Human
uccagagguguuggagcc

SEQ ID NO: 165340 - RNA, 22 nt, Human
ugugaaaggggucacagggaaa

SEQ ID NO: 165341 - RNA, 22 nt, Human
agcagggcagugcuucagcucu

SEQ ID NO: 165342 - RNA, 20 nt, Human
uauaacaguguugggugugu

SEQ ID NO: 165343 - RNA, 19 nt, Human
caaggguugggucugucau

SEQ ID NO: 165344 - RNA, 22 nt, Human
cucagggggaaucaggucacag

SEQ ID NO: 165345 - RNA, 22 nt, Human
ugaaguccuagaacuccuggua

SEQ ID NO: 165346 - RNA, 22 nt, Human
aucuaagaguuaacaucaagaa

SEQ ID NO: 165347 - RNA, 22 nt, Human
aggcacuguacuagguacaggg

SEQ ID NO: 165348 - RNA, 22 nt, Human
uggcucaggccacuucuuuuau

SEQ ID NO: 165349 - RNA, 21 nt, Human
ggccucugucauccugggaag

SEQ ID NO: 165350 - RNA, 22 nt, Human
gcugcucucagagcucaugcug

SEQ ID NO: 165351 - RNA, 22 nt, Human
gucccaggcuuauguggagcuu

SEQ ID NO: 165352 - RNA, 22 nt, Human
ugucaugccaggaaauaguccc

SEQ ID NO: 165353 - RNA, 22 nt, Human
uauucacauucucaggccuggu

SEQ ID NO: 165354 - RNA, 22 nt, Human
caggguggcacucagcgcaucu

SEQ ID NO: 165355 - RNA, 22 nt, Human
aaaagacaucuauuucaggcag

SEQ ID NO: 165356 - RNA, 22 nt, Human
cuuccucaugugcaaugcaagc

SEQ ID NO: 165357 - RNA, 23 nt, Human
uggccucuccccaccuggcagaa

SEQ ID NO: 165358 - RNA, 22 nt, Human
gcaggggcugagcaccagcggg

SEQ ID NO: 165359 - RNA, 22 nt, Human
ccagcugguguuccuuaggacc

SEQ ID NO: 165360 - RNA, 18 nt, Human
gggcuguguucaugccca

SEQ ID NO: 165361 - RNA, 22 nt, Human
aaugcacaaaaauuguauguaa

SEQ ID NO: 165362 - RNA, 23 nt, Human
cuuuuaacuugaucugagaccag

SEQ ID NO: 165363 - RNA, 22 nt, Human
caggccugggcuucggggcuga

SEQ ID NO: 165364 - RNA, 22 nt, Human
uuucacaaugcaauccuacuuc

SEQ ID NO: 165365 - RNA, 22 nt, Human
cugcccuguuuggacagcccgg

SEQ ID NO: 165366 - RNA, 22 nt, Human
uggccucuggcugaggacuaac

SEQ ID NO: 165367 - RNA, 22 nt, Human
ggccuugggaggagggucagaa

SEQ ID NO: 165368 - RNA, 22 nt, Human
aggucauuguuaagucaccaua

SEQ ID NO: 165369 - RNA, 22 nt, Human
gagccuggauugucaccgacuu

SEQ ID NO: 165370 - RNA, 22 nt, Human
ucacauuuucauauucucugag

SEQ ID NO: 165371 - RNA, 20 nt, Human
ccucucugaagaggucaucu

SEQ ID NO: 165372 - RNA, 22 nt, Human
uagggcaggggaggaaucugaa

SEQ ID NO: 165373 - RNA, 22 nt, Human
auguucaaacuuuuuacacacc

SEQ ID NO: 165374 - RNA, 22 nt, Human
aagcacaaugaacaucuuagau

SEQ ID NO: 165375 - RNA, 22 nt, Human
cccaggcagucuggcucuaaag

SEQ ID NO: 165376 - RNA, 19 nt, Human
acaggcagaauugggugug

SEQ ID NO: 165377 - RNA, 22 nt, Human
ggacuggccggcgcugaggccc

SEQ ID NO: 165378 - RNA, 22 nt, Human
ucccagccuuccuuguggugaa

SEQ ID NO: 165379 - RNA, 22 nt, Human
cugguccuccuugccuucagau

SEQ ID NO: 165380 - RNA, 22 nt, Human
cagaagcaaaugccuugcugag

SEQ ID NO: 165381 - RNA, 22 nt, Human
ucuguccucuuugaagcugcuc

SEQ ID NO: 165382 - RNA, 22 nt, Human
cuugaaagauuuggccucugug

SEQ ID NO: 165383 - RNA, 22 nt, Human
agcaaagucaguggaaccaucc

SEQ ID NO: 165384 - RNA, 22 nt, Human
ugccugucuuaauaucuggaaa

SEQ ID NO: 165385 - RNA, 22 nt, Human
uugaccauaccuccaggcaguu

SEQ ID NO: 165386 - RNA, 22 nt, Human
gcuggcagggacagcugcgugu

SEQ ID NO: 165387 - RNA, 22 nt, Human
uauucacauguacauaugcuca

SEQ ID NO: 165388 - RNA, 22 nt, Human
aggcuggggaauugaauuugcu

SEQ ID NO: 165389 - RNA, 22 nt, Human
cuucccuuggugaacagagcau

SEQ ID NO: 165390 - RNA, 22 nt, Human
gaggcagcuuggggcugugggu

SEQ ID NO: 165391 - RNA, 22 nt, Human
uggcucaguuccaucaucugga

SEQ ID NO: 165392 - RNA, 22 nt, Human
gaagcagcucagauugacugaa

SEQ ID NO: 165393 - RNA, 22 nt, Human
cugggaggauacacaagaucag

SEQ ID NO: 165394 - RNA, 22 nt, Human
ccaccaggacagcccugagggg

SEQ ID NO: 165395 - RNA, 22 nt, Human
acaaauguggacauggauaaug

SEQ ID NO: 165396 - RNA, 22 nt, Human
gcccagagagaugcuguagacc

SEQ ID NO: 165397 - RNA, 22 nt, Human
cuggccugugggcugucuccgg

SEQ ID NO: 165398 - RNA, 22 nt, Human
ggcucuggcguccaauggagcg

SEQ ID NO: 165399 - RNA, 22 nt, Human
aggauccuccuuagaaaagacc

SEQ ID NO: 165400 - RNA, 22 nt, Human
gcucucuguuauuaagaucuuu

SEQ ID NO: 165401 - RNA, 22 nt, Human
cgaugguucuggcugcuuguau

SEQ ID NO: 165402 - RNA, 22 nt, Human
ucagcaguggcucucaugcagu

SEQ ID NO: 165403 - RNA, 22 nt, Human
ccugccugauuccaggauggcu

SEQ ID NO: 165404 - RNA, 22 nt, Human
cagcccagcagucuuagccugc

SEQ ID NO: 165405 - RNA, 22 nt, Human
ggguggcacaggugcagagggu

SEQ ID NO: 165406 - RNA, 22 nt, Human
cugggcugcaguuccugguccu

SEQ ID NO: 165407 - RNA, 22 nt, Human
cuuguagaauugaaauggucuc

SEQ ID NO: 165408 - RNA, 22 nt, Human
acaugauuggacuccuuccccu

SEQ ID NO: 165409 - RNA, 23 nt, Human
uaguuauuuucucuguaauuugc

SEQ ID NO: 165410 - RNA, 22 nt, Human
cugcucuguuaauuaaacuuug

SEQ ID NO: 165411 - RNA, 19 nt, Human
ugcagcucagggcaggggc

SEQ ID NO: 165412 - RNA, 22 nt, Human
ggucucaggagacuggagagca

SEQ ID NO: 165413 - RNA, 22 nt, Human
aguugcagacgcagagauguug

SEQ ID NO: 165414 - RNA, 22 nt, Human
agacagcaggggagucugguuu

SEQ ID NO: 165415 - RNA, 22 nt, Human
uauaacacucagaaagaaucau

SEQ ID NO: 165416 - RNA, 22 nt, Human
caggaggcaucauggagcggac

SEQ ID NO: 165417 - RNA, 22 nt, Human
aucuggcucuuccuggaguucc

SEQ ID NO: 165418 - RNA, 23 nt, Human
ucucaggacacacaugucuauca

SEQ ID NO: 165419 - RNA, 22 nt, Human
agggccagagucuguguagaua

SEQ ID NO: 165420 - RNA, 22 nt, Human
gcagugggagcuuaggcagugc

SEQ ID NO: 165421 - RNA, 22 nt, Human
uagcagcuuccagagagggcag

SEQ ID NO: 165422 - RNA, 20 nt, Human
gcccuggagccuuguccugg

SEQ ID NO: 165423 - RNA, 22 nt, Human
cacugaaggcuaggauuagaug

SEQ ID NO: 165424 - RNA, 22 nt, Human
aguguauugauuggaacagccu

SEQ ID NO: 165425 - RNA, 22 nt, Human
cuccagggcagcauggcagugg

SEQ ID NO: 165426 - RNA, 22 nt, Human
ugggggagauugugcaucucua

SEQ ID NO: 165427 - RNA, 22 nt, Human
uggaaagagguagaggaucugg

SEQ ID NO: 165428 - RNA, 22 nt, Human
uggccugggccggcagauauac

SEQ ID NO: 165429 - RNA, 22 nt, Human
gcagguggcagaggugggaucu

SEQ ID NO: 165430 - RNA, 22 nt, Human
ggaggaugccaagcugugcaca

SEQ ID NO: 165431 - RNA, 22 nt, Human
ccagcagagucuaggaaggagg

SEQ ID NO: 165432 - RNA, 22 nt, Human
gccuggagcucaugugggcauu

SEQ ID NO: 165433 - RNA, 22 nt, Human
auucauucugaccucaagagaa

SEQ ID NO: 165434 - RNA, 22 nt, Human
gguggggucacgacagagggaa

SEQ ID NO: 165435 - RNA, 23 nt, Human
acugagccagggccugggucagc

SEQ ID NO: 165436 - RNA, 22 nt, Human
ucuggauggucagcucuuccug

SEQ ID NO: 165437 - RNA, 22 nt, Human
ugggcagaucuuugguggcuag

SEQ ID NO: 165438 - RNA, 23 nt, Human
acagagaucuugacuuguaugga

SEQ ID NO: 165439 - RNA, 22 nt, Human
cuuauaguaugauguugagaau

SEQ ID NO: 165440 - RNA, 22 nt, Human
agggcagagaucugagugggca

SEQ ID NO: 165441 - RNA, 22 nt, Human
gagccaggucgggccgcggcga

SEQ ID NO: 165442 - RNA, 22 nt, Human
cacagaaaaaggcuugaaaauc

SEQ ID NO: 165443 - RNA, 22 nt, Human
ugugccuuaugaauucuuucug

SEQ ID NO: 165444 - RNA, 22 nt, Human
cagucccaugagcccagaacau

SEQ ID NO: 165445 - RNA, 22 nt, Human
augggaugaacuugaucugcuu

SEQ ID NO: 165446 - RNA, 22 nt, Human
aggucaccauggcaugcuccac

SEQ ID NO: 165447 - RNA, 22 nt, Human
ccugcagguaaggcuaacugcc

SEQ ID NO: 165448 - RNA, 23 nt, Human
agaggcaggaguggcuugcccgg

SEQ ID NO: 165449 - RNA, 22 nt, Human
cuuccugcauugugccagaguu

SEQ ID NO: 165450 - RNA, 22 nt, Human
ccuggcagcuaagugcuuugag

SEQ ID NO: 165451 - RNA, 22 nt, Human
gacagaagaggaacuuggacag

SEQ ID NO: 165452 - RNA, 22 nt, Human
aaagagcuaacauugccgagau

SEQ ID NO: 165453 - RNA, 22 nt, Human
gcucccagauuucagccuugug

SEQ ID NO: 165454 - RNA, 22 nt, Human
gggccuggggugacguaccccu

SEQ ID NO: 165455 - RNA, 22 nt, Human
ggaggagacccugugucaguuu

SEQ ID NO: 165456 - RNA, 22 nt, Human
aucaguuuuguucacuacuaua

SEQ ID NO: 165457 - RNA, 22 nt, Human
cagcugaacauguagagcaucu

SEQ ID NO: 165458 - RNA, 22 nt, Human
ccuccaaguuugacucaggaca

SEQ ID NO: 165459 - RNA, 20 nt, Human
agccugccagcuggcccaga

SEQ ID NO: 165460 - RNA, 22 nt, Human
agccuccaucccaugcacaaag

SEQ ID NO: 165461 - RNA, 22 nt, Human
uuccugaugcacacagucauuu

SEQ ID NO: 165462 - RNA, 22 nt, Human
cccaaggcugcagugagcauga

SEQ ID NO: 165463 - RNA, 22 nt, Human
ucaaacuguuuacagugagaua

SEQ ID NO: 165464 - RNA, 22 nt, Human
gagcagcugagcuggaaugaga

SEQ ID NO: 165465 - RNA, 22 nt, Human
caaaauguucuggcaccuuuaa

SEQ ID NO: 165466 - RNA, 22 nt, Human
gugcucuccuggcugcccugac

SEQ ID NO: 165467 - RNA, 19 nt, Human
ugacaggcuguugccuuga

SEQ ID NO: 165468 - RNA, 22 nt, Human
ucagccagguaauguggagaug

SEQ ID NO: 165469 - RNA, 22 nt, Human
aacaaaugauaccaguucucaa

SEQ ID NO: 165470 - RNA, 22 nt, Human
uguguguauaugcauuuaucua

SEQ ID NO: 165471 - RNA, 22 nt, Human
augcuguagaucuuagccucua

SEQ ID NO: 165472 - RNA, 21 nt, Human
uaucuacuggugucuuucaga

SEQ ID NO: 165473 - RNA, 22 nt, Human
uuucacaucagagguagauuag

SEQ ID NO: 165474 - RNA, 22 nt, Human
cacaggcuuccaguccccagcu

SEQ ID NO: 165475 - RNA, 20 nt, Human
agaagcugauacugauggaa

SEQ ID NO: 165476 - RNA, 20 nt, Human
uccagccacuuccgcugguc

SEQ ID NO: 165477 - RNA, 22 nt, Human
cuggcaggcggcagagcccagg

SEQ ID NO: 165478 - RNA, 22 nt, Human
ggcuucccuuuccgagaggaga

SEQ ID NO: 165479 - RNA, 22 nt, Human
gcauuuauuucuuuacugcauc

SEQ ID NO: 165480 - RNA, 22 nt, Human
ugggccuccaauuccagcggga

SEQ ID NO: 165481 - RNA, 22 nt, Human
agacagagauacuauguuguca

SEQ ID NO: 165482 - RNA, 22 nt, Human
agggaaggaaaagcugucgcuu

SEQ ID NO: 165483 - RNA, 21 nt, Human
cagaaguaaggguaacuucuc

SEQ ID NO: 165484 - RNA, 22 nt, Human
uuuccuaugauauucuaugugu

SEQ ID NO: 165485 - RNA, 22 nt, Human
ugcauuguugaauauuucauag

SEQ ID NO: 165486 - RNA, 22 nt, Human
ugaagcaggcauugacugauga

SEQ ID NO: 165487 - RNA, 22 nt, Human
ucugaagaacugaguaaacaug

SEQ ID NO: 165488 - RNA, 22 nt, Human
uuugcauugcauacaaggaacu

SEQ ID NO: 165489 - RNA, 22 nt, Human
uggagcugagagccaggcuggc

SEQ ID NO: 165490 - RNA, 22 nt, Human
agccacagagagggagcugcaa

SEQ ID NO: 165491 - RNA, 22 nt, Human
uccagggaccucccugagagcu

SEQ ID NO: 165492 - RNA, 22 nt, Human
ccugggaggcagagguugcagu

SEQ ID NO: 165493 - RNA, 22 nt, Human
cacacaggaugaagcagcagaa

SEQ ID NO: 165494 - RNA, 22 nt, Human
gccuggccugaacuaggaggug

SEQ ID NO: 165495 - RNA, 22 nt, Human
gccucuggucccucaugcugug

SEQ ID NO: 165496 - RNA, 22 nt, Human
agaagccauugaagcagaccuc

SEQ ID NO: 165497 - RNA, 22 nt, Human
gagacugcauuguccaaggguu

SEQ ID NO: 165498 - RNA, 22 nt, Human
ccagggcauccucacaucgcag

SEQ ID NO: 165499 - RNA, 22 nt, Human
ccuguggcacaugcagggauuc

SEQ ID NO: 165500 - RNA, 22 nt, Human
uaguaucuuucuauauuuccca

SEQ ID NO: 165501 - RNA, 22 nt, Human
gaauuguacgcuuuacauaggu

SEQ ID NO: 165502 - RNA, 22 nt, Human
gcugccaugguccaggcuccag

SEQ ID NO: 165503 - RNA, 22 nt, Human
uuccucagaaaauacuguccaa

SEQ ID NO: 165504 - RNA, 22 nt, Human
ugaagcaggaucguuugcuuca

SEQ ID NO: 165505 - RNA, 22 nt, Human
ccagcugcgggcaucgagaguu

SEQ ID NO: 165506 - RNA, 22 nt, Human
acuuagaacaggcagaauucca

SEQ ID NO: 165507 - RNA, 22 nt, Human
uuccaggggcagcagugauggu

SEQ ID NO: 165508 - RNA, 22 nt, Human
gucuggaguggggccugagaau

SEQ ID NO: 165509 - RNA, 22 nt, Human
cccaucaggaacccaggagccc

SEQ ID NO: 165510 - RNA, 22 nt, Human
cccagcacuuugaauaugucac

SEQ ID NO: 165511 - RNA, 22 nt, Human
caaaggagguaaugggugugag

SEQ ID NO: 165512 - RNA, 22 nt, Human
cugcuggagguuggagcaugca

SEQ ID NO: 165513 - RNA, 22 nt, Human
ggcugccugugcccaggcacac

SEQ ID NO: 165514 - RNA, 22 nt, Human
uggccugguaccacauagauuu

SEQ ID NO: 165515 - RNA, 22 nt, Human
auugacaauguauuuguaucug

SEQ ID NO: 165516 - RNA, 22 nt, Human
gagcacagaaucuucccaugca

SEQ ID NO: 165517 - RNA, 20 nt, Human
ugcagggcucugcuucucuc

SEQ ID NO: 165518 - RNA, 22 nt, Human
uggccugcagaggcuguggggc

SEQ ID NO: 165519 - RNA, 22 nt, Human
ggcugccucugaugugcagacg

SEQ ID NO: 165520 - RNA, 22 nt, Human
agauaauuugaguaaauuaauu

SEQ ID NO: 165521 - RNA, 23 nt, Human
cccagcagagaugaggagggguc

SEQ ID NO: 165522 - RNA, 22 nt, Human
ucacaggguuuggaagccuccu

SEQ ID NO: 165523 - RNA, 22 nt, Human
uugacaagaaucguugccuugg

SEQ ID NO: 165524 - RNA, 22 nt, Human
uguuuaaucuauaaaauggaga

SEQ ID NO: 165525 - RNA, 22 nt, Human
ucagcugaguucuagagcacuc

SEQ ID NO: 165526 - RNA, 23 nt, Human
ugcuucucugcuugacaguucug

SEQ ID NO: 165527 - RNA, 22 nt, Human
ugacagggugauuaugagagcu

SEQ ID NO: 165528 - RNA, 22 nt, Human
caggcacuucugcugcuugucu

SEQ ID NO: 165529 - RNA, 22 nt, Human
agccucucuuuauucccagcua

SEQ ID NO: 165530 - RNA, 22 nt, Human
ugaagguggcauaggagagaug

SEQ ID NO: 165531 - RNA, 23 nt, Human
ugauuuccagugagucaguggga

SEQ ID NO: 165532 - RNA, 22 nt, Human
guccagggaaauagcgacaggg

SEQ ID NO: 165533 - RNA, 20 nt, Human
gagagcuggggaugaggcug

SEQ ID NO: 165534 - RNA, 22 nt, Human
ggcugaaguguaguggcucacu

SEQ ID NO: 165535 - RNA, 21 nt, Human
ugcugccaucaugcagagaug

SEQ ID NO: 165536 - RNA, 22 nt, Human
gccagggcucgcggucccucgu

SEQ ID NO: 165537 - RNA, 22 nt, Human
ugaaaaggguagaucccuaagu

SEQ ID NO: 165538 - RNA, 22 nt, Human
ccugggcaacauagugagaccc

SEQ ID NO: 165539 - RNA, 22 nt, Human
auguaagguucagaguauguga

SEQ ID NO: 165540 - RNA, 22 nt, Human
caaggccugccucuggcagaaa

SEQ ID NO: 165541 - RNA, 22 nt, Human
augucuuucucacagccaguuc

SEQ ID NO: 165542 - RNA, 21 nt, Human
uggagcugccacuuguccucc

SEQ ID NO: 165543 - RNA, 22 nt, Human
aggcucagcaucugauucauau

SEQ ID NO: 165544 - RNA, 22 nt, Human
ucaguuuuuaagaguuaugcga

SEQ ID NO: 165545 - RNA, 22 nt, Human
ccucugcagcagagagccagag

SEQ ID NO: 165546 - RNA, 22 nt, Human
gccucugcggggcccgagcccg

SEQ ID NO: 165547 - RNA, 22 nt, Human
ggcaccugcucaucuggacuca

SEQ ID NO: 165548 - RNA, 22 nt, Human
uccucugcuccaggcuggacuu

SEQ ID NO: 165549 - RNA, 22 nt, Human
cuucugggcauucagcugcaca

SEQ ID NO: 165550 - RNA, 22 nt, Human
uagaaguuaaaggaauacagaa

SEQ ID NO: 165551 - RNA, 22 nt, Human
uccagcagggaauuaguagucu

SEQ ID NO: 165552 - RNA, 21 nt, Human
ccuccaggagcagagcccuga

SEQ ID NO: 165553 - RNA, 22 nt, Human
gaaaaugugucaucccuacugu

SEQ ID NO: 165554 - RNA, 22 nt, Human
aucuggcuuuuaccccacggcc

SEQ ID NO: 165555 - RNA, 22 nt, Human
gcagccuguuguaccagccugu

SEQ ID NO: 165556 - RNA, 22 nt, Human
gcuggccauauauuuugcuguu

SEQ ID NO: 165557 - RNA, 22 nt, Human
cugggaggcccacguugggaag

SEQ ID NO: 165558 - RNA, 22 nt, Human
ggggcagagcauagcuccaauu

SEQ ID NO: 165559 - RNA, 22 nt, Human
cugggccagucucggccgcucu

SEQ ID NO: 165560 - RNA, 21 nt, Human
agcugggccucagccugcagu

SEQ ID NO: 165561 - RNA, 22 nt, Human
cccagaaggucgaggcugcagu

SEQ ID NO: 165562 - RNA, 22 nt, Human
cccaggaggucgaagcugcagu

SEQ ID NO: 165563 - RNA, 22 nt, Human
ugcauuguaggauguuuagcag

SEQ ID NO: 165564 - RNA, 22 nt, Human
cuggccacaacuagcccaggac

SEQ ID NO: 165565 - RNA, 22 nt, Human
cugcagaguggagccucggcug

SEQ ID NO: 165566 - RNA, 22 nt, Human
aucaaaguggaaguuuacuagg

SEQ ID NO: 165567 - RNA, 22 nt, Human
agaggcugggaaggguccccgg

SEQ ID NO: 165568 - RNA, 22 nt, Human
aguguuccacacaucuggggaa

SEQ ID NO: 165569 - RNA, 22 nt, Human
cccaggagguggagcuugcagu

SEQ ID NO: 165570 - RNA, 22 nt, Human
aucuggcuugacuuugcgacuu

SEQ ID NO: 165571 - RNA, 22 nt, Human
agaacuuaggaacaacagcuua

SEQ ID NO: 165572 - RNA, 22 nt, Human
ugccaggagagugcaugcaggg

SEQ ID NO: 165573 - RNA, 22 nt, Human
uaaggcauucucaugcugugaa

SEQ ID NO: 165574 - RNA, 22 nt, Human
ugagcccuaagggucaagcagg

SEQ ID NO: 165575 - RNA, 22 nt, Human
aguuauucauuuauucuguaca

SEQ ID NO: 165576 - RNA, 22 nt, Human
ucugucacccaggcuggagugc

SEQ ID NO: 165577 - RNA, 22 nt, Human
ggguccagcuacaucagggugg

SEQ ID NO: 165578 - RNA, 22 nt, Human
gacagggcgagacucagucuca

SEQ ID NO: 165579 - RNA, 22 nt, Human
aauccagguggcggagguugug

SEQ ID NO: 165580 - RNA, 22 nt, Human
agcuggccuucggugucacugg

SEQ ID NO: 165581 - RNA, 17 nt, Human
uuccucucacauuuuuu

SEQ ID NO: 165582 - RNA, 22 nt, Human
acaggcucucagccaguuggca

SEQ ID NO: 165583 - RNA, 22 nt, Human
ggagagcaggguccugagauac

SEQ ID NO: 165584 - RNA, 22 nt, Human
auaagguaugaaaaguaaaugg

SEQ ID NO: 165585 - RNA, 22 nt, Human
ucugagaggcagaccuuccuaa

SEQ ID NO: 165586 - RNA, 22 nt, Human
cacauguaguaagcaggcaaug

SEQ ID NO: 165587 - RNA, 22 nt, Human
cugccagcucucuggaggcucu

SEQ ID NO: 165588 - RNA, 22 nt, Human
aggggcugcuggguccgccccu

SEQ ID NO: 165589 - RNA, 19 nt, Human
agaggccucagcagcuggc

SEQ ID NO: 165590 - RNA, 22 nt, Human
gggagccaaggagagaggccuu

SEQ ID NO: 165591 - RNA, 22 nt, Human
aggcaagggggcgccaccuucc

SEQ ID NO: 165592 - RNA, 22 nt, Human
gguucacacuaagcuuaagugg

SEQ ID NO: 165593 - RNA, 22 nt, Human
acauuucuauagugcaucuguu

SEQ ID NO: 165594 - RNA, 22 nt, Human
aaugucugagucucuguauccc

SEQ ID NO: 165595 - RNA, 22 nt, Human
ccacugggcguuucuguccaau

SEQ ID NO: 165596 - RNA, 22 nt, Human
aaagaugucauacacauuaaga

SEQ ID NO: 165597 - RNA, 22 nt, Human
gugaaaucugaggcccaugaug

SEQ ID NO: 165598 - RNA, 22 nt, Human
aagccagguguuuaggccagcg

SEQ ID NO: 165599 - RNA, 17 nt, Human
ggugaguguccaggugg

SEQ ID NO: 165600 - RNA, 22 nt, Human
gccacugcacuccagcccaggc

SEQ ID NO: 165601 - RNA, 20 nt, Human
gugcauuucaccuguacugu

SEQ ID NO: 165602 - RNA, 22 nt, Human
uaugcacaguuacaagaauauc

SEQ ID NO: 165603 - RNA, 22 nt, Human
uccucagaugcucuuggacgcc

SEQ ID NO: 165604 - RNA, 22 nt, Human
ggcagcuguaagaugagugaau

SEQ ID NO: 165605 - RNA, 22 nt, Human
agcugccacagagccuggccag

SEQ ID NO: 165606 - RNA, 22 nt, Human
gcagggcagcuuagucccuguc

SEQ ID NO: 165607 - RNA, 22 nt, Human
agccuucagcaguucaggugcc

SEQ ID NO: 165608 - RNA, 22 nt, Human
acagcaggauuuggcgauguug

SEQ ID NO: 165609 - RNA, 22 nt, Human
gaagcagcugccagagaugucu

SEQ ID NO: 165610 - RNA, 22 nt, Human
uugggcuggcagagguggucuu

SEQ ID NO: 165611 - RNA, 22 nt, Human
gaaugcacucacccaucacuca

SEQ ID NO: 165612 - RNA, 22 nt, Human
auggggugagacuaggauuaaa

SEQ ID NO: 165613 - RNA, 22 nt, Human
ccagggcagggaccacgugucu

SEQ ID NO: 165614 - RNA, 22 nt, Human
gcaggcuccaggccggccccuu

SEQ ID NO: 165615 - RNA, 22 nt, Human
gcuggggucugugaggagggcu

SEQ ID NO: 165616 - RNA, 22 nt, Human
auuuauguaucuguguagauca

SEQ ID NO: 165617 - RNA, 22 nt, Human
agggccugggguagcuuacugc

SEQ ID NO: 165618 - RNA, 22 nt, Human
cagcugccccgcuggcugacca

SEQ ID NO: 165619 - RNA, 22 nt, Human
aaagauuucagaagccugugcc

SEQ ID NO: 165620 - RNA, 22 nt, Human
uggcagugccccuugaccagug

SEQ ID NO: 165621 - RNA, 22 nt, Human
gcacagccacugagugagaacc

SEQ ID NO: 165622 - RNA, 19 nt, Human
auacacauacguaaacuga

SEQ ID NO: 165623 - RNA, 21 nt, Human
aggugccaaggagaagcaggc

SEQ ID NO: 165624 - RNA, 22 nt, Human
ucccuggcagcuaagggugguc

SEQ ID NO: 165625 - RNA, 22 nt, Human
ggaggccaaagugugggcggcu

SEQ ID NO: 165626 - RNA, 22 nt, Human
gggcucagccccauugaaccag

SEQ ID NO: 165627 - RNA, 21 nt, Human
gcacagggacagaucaucaca

SEQ ID NO: 165628 - RNA, 22 nt, Human
cacugaaggaaggacuacugca

SEQ ID NO: 165629 - RNA, 22 nt, Human
uccugggcugcagggaagagca

SEQ ID NO: 165630 - RNA, 22 nt, Human
ugugccuucucaguccugcuca

SEQ ID NO: 165631 - RNA, 22 nt, Human
gaggccuggguuggaggugcau

SEQ ID NO: 165632 - RNA, 22 nt, Human
cuccuguauguugggcuucaca

SEQ ID NO: 165633 - RNA, 20 nt, Human
ugucagugccugaggcacag

SEQ ID NO: 165634 - RNA, 22 nt, Human
ucauugucuugauaugauuguc

SEQ ID NO: 165635 - RNA, 22 nt, Human
gugccagcucuccccacaucug

SEQ ID NO: 165636 - RNA, 22 nt, Human
acccugagucagacagccugac

SEQ ID NO: 165637 - RNA, 22 nt, Human
cccuccagccauggacccaggu

SEQ ID NO: 165638 - RNA, 22 nt, Human
gagaaacuuggaguuauucugg

SEQ ID NO: 165639 - RNA, 22 nt, Human
cuagagaggcagauguccugug

SEQ ID NO: 165640 - RNA, 22 nt, Human
uucaaaacagcuagauauugga

SEQ ID NO: 165641 - RNA, 22 nt, Human
uauugucuguccgggucaaagc

SEQ ID NO: 165642 - RNA, 22 nt, Human
gggaucagcaagccacugcacc

SEQ ID NO: 165643 - RNA, 22 nt, Human
cagcagagguuggaacaguucu

SEQ ID NO: 165644 - RNA, 22 nt, Human
cucagggcuugaguguccagga

SEQ ID NO: 165645 - RNA, 22 nt, Human
aggcacuggucuaccccuuagu

SEQ ID NO: 165646 - RNA, 22 nt, Human
uagcaggguaaauguagaugga

SEQ ID NO: 165647 - RNA, 22 nt, Human
ugugcuucagguugucgccacg

SEQ ID NO: 165648 - RNA, 22 nt, Human
aggugccagaugcacagcugaa

SEQ ID NO: 165649 - RNA, 22 nt, Human
aguuuuauuccaaugugcagca

SEQ ID NO: 165650 - RNA, 22 nt, Human
agaggaugguugaggaagaccu

SEQ ID NO: 165651 - RNA, 22 nt, Human
gugccugugcggacucagggaa

SEQ ID NO: 165652 - RNA, 22 nt, Human
gucucccacuuucuggccucuu

SEQ ID NO: 165653 - RNA, 22 nt, Human
ccuggagcucacugggagccgg

SEQ ID NO: 165654 - RNA, 22 nt, Human
accaggggaugguuggcacugu

SEQ ID NO: 165655 - RNA, 22 nt, Human
ggaaagaccugagauaggaaua

SEQ ID NO: 165656 - RNA, 22 nt, Human
ucuggagaacuugcaagaggau

SEQ ID NO: 165657 - RNA, 22 nt, Human
agucuucagagaaauuaacucu

SEQ ID NO: 165658 - RNA, 22 nt, Human
agccuggaggccaggagacagu

SEQ ID NO: 165659 - RNA, 22 nt, Human
ugcagaggagcuggaaggcugg

SEQ ID NO: 165660 - RNA, 22 nt, Human
aguuuuucugggaggcacugcu

SEQ ID NO: 165661 - RNA, 22 nt, Human
augaagcugaccuugucuugcu

SEQ ID NO: 165662 - RNA, 22 nt, Human
gccuggagaaaggaagguggga

SEQ ID NO: 165663 - RNA, 22 nt, Human
gucuggggaagucagggcauca

SEQ ID NO: 165664 - RNA, 22 nt, Human
aucaguuucugugaagaacaca

SEQ ID NO: 165665 - RNA, 22 nt, Human
uaugcacacauguaugcaugug

SEQ ID NO: 165666 - RNA, 17 nt, Human
ugguggcuggagucagg

SEQ ID NO: 165667 - RNA, 22 nt, Human
ggacacagauaaucacacagau

SEQ ID NO: 165668 - RNA, 22 nt, Human
ucugccuggaugauggcagggc

SEQ ID NO: 165669 - RNA, 22 nt, Human
cccagcccugaccuauuggaaa

SEQ ID NO: 165670 - RNA, 22 nt, Human
cugugcuugcggguguggagcc

SEQ ID NO: 165671 - RNA, 22 nt, Human
ugcacacacaugaaguagcaug

SEQ ID NO: 165672 - RNA, 23 nt, Human
cugucuccugggcuagguggaau

SEQ ID NO: 165673 - RNA, 22 nt, Human
uagcagcucugauucugggccc

SEQ ID NO: 165674 - RNA, 22 nt, Human
ucccuggaacagagagacaacg

SEQ ID NO: 165675 - RNA, 22 nt, Human
cacaagacuuauuuguguagaa

SEQ ID NO: 165676 - RNA, 18 nt, Human
uucacaggaaaugucuuu

SEQ ID NO: 165677 - RNA, 22 nt, Human
agcagccagagucugaacauua

SEQ ID NO: 165678 - RNA, 22 nt, Human
aauguacaaggguuccaguuuu

SEQ ID NO: 165679 - RNA, 22 nt, Human
aguuggagugaacaugagauug

SEQ ID NO: 165680 - RNA, 22 nt, Human
ucagccacuacccaccuuaaca

SEQ ID NO: 165681 - RNA, 22 nt, Human
ccagcagcuuuauuggcucucc

SEQ ID NO: 165682 - RNA, 22 nt, Human
ugccucuguugagccuuggcug

SEQ ID NO: 165683 - RNA, 21 nt, Human
ggcagccugacccccagagag

SEQ ID NO: 165684 - RNA, 22 nt, Human
ccaaagucugcauuuuaacaug

SEQ ID NO: 165685 - RNA, 22 nt, Human
uggcagagucaucacaucugga

SEQ ID NO: 165686 - RNA, 22 nt, Human
ugguaaagaaggcuagaucuga

SEQ ID NO: 165687 - RNA, 22 nt, Human
gaggccuggcugucagucccca

SEQ ID NO: 165688 - RNA, 22 nt, Human
cagaagaaaguggggagacaag

SEQ ID NO: 165689 - RNA, 22 nt, Human
aucagcugaaaaacaggcagca

SEQ ID NO: 165690 - RNA, 22 nt, Human
ucaguuuugauuccugguucuc

SEQ ID NO: 165691 - RNA, 22 nt, Human
uggagugaaguaaagaggacaa

SEQ ID NO: 165692 - RNA, 22 nt, Human
cacauuugaaggaauuagcauu

SEQ ID NO: 165693 - RNA, 20 nt, Human
cuucaggacccauccucccc

SEQ ID NO: 165694 - RNA, 22 nt, Human
gugcaugugucuuuauaguagc

SEQ ID NO: 165695 - RNA, 21 nt, Human
ggcacugagccagauggacuc

SEQ ID NO: 165696 - RNA, 22 nt, Human
ucacugcaaucucugccuucca

SEQ ID NO: 165697 - RNA, 22 nt, Human
auugaaagcacaaagaacaagu

SEQ ID NO: 165698 - RNA, 22 nt, Human
aggagccaagcagaacuaagga

SEQ ID NO: 165699 - RNA, 22 nt, Human
ucagggcaaugucccucagaag

SEQ ID NO: 165700 - RNA, 22 nt, Human
auguacaaaaugccacugaauu

SEQ ID NO: 165701 - RNA, 19 nt, Human
gagcugccuuuugaagacc

SEQ ID NO: 165702 - RNA, 22 nt, Human
cugggcugugguguggcccaaa

SEQ ID NO: 165703 - RNA, 21 nt, Human
ugggcacugagggugcugcuc

SEQ ID NO: 165704 - RNA, 20 nt, Human
ugcagcugguuucacaggga

SEQ ID NO: 165705 - RNA, 22 nt, Human
uuccuguaguugugcaauguac

SEQ ID NO: 165706 - RNA, 23 nt, Human
gggagccaggaccucgcgcccca

SEQ ID NO: 165707 - RNA, 22 nt, Human
ucuagaaauuuugccuuguauu

SEQ ID NO: 165708 - RNA, 22 nt, Human
aacaaauguguuuuguaauuaa

SEQ ID NO: 165709 - RNA, 22 nt, Human
acacaugcugauaagaauauaa

SEQ ID NO: 165710 - RNA, 22 nt, Human
gcaaggcuuugugaauuuuaaa

SEQ ID NO: 165711 - RNA, 21 nt, Human
gccuggcagguggaagggcuc

SEQ ID NO: 165712 - RNA, 22 nt, Human
ucaaaugcuucuacuccuaaga

SEQ ID NO: 165713 - RNA, 22 nt, Human
agagggcauuaacucugucuug

SEQ ID NO: 165714 - RNA, 21 nt, Human
uccucugcagugagguggccu

SEQ ID NO: 165715 - RNA, 22 nt, Human
ccacagggucagccacucugca

SEQ ID NO: 165716 - RNA, 22 nt, Human
cagcaggcagccauuucacugu

SEQ ID NO: 165717 - RNA, 22 nt, Human
agaugcugucacacacacuguu

SEQ ID NO: 165718 - RNA, 22 nt, Human
aagcaggcauuccagagacaau

SEQ ID NO: 165719 - RNA, 22 nt, Human
ucagagcuuuggagaccaggaa

SEQ ID NO: 165720 - RNA, 22 nt, Human
acagccagaggugguccugggu

SEQ ID NO: 165721 - RNA, 22 nt, Human
agccagggagguggagguugca

SEQ ID NO: 165722 - RNA, 22 nt, Human
uccuucagugucccgcucaggu

SEQ ID NO: 165723 - RNA, 22 nt, Human
ugagccagauaagggcucacgc

SEQ ID NO: 165724 - RNA, 18 nt, Human
acccucuggcuucugagc

SEQ ID NO: 165725 - RNA, 22 nt, Human
ggaggacaggggcugcagcaca

SEQ ID NO: 165726 - RNA, 18 nt, Human
agaguguucucagugaaa

SEQ ID NO: 165727 - RNA, 22 nt, Human
auuucuucaggucagaaauaga

SEQ ID NO: 165728 - RNA, 22 nt, Human
cacuacuugaaagaauuacaga

SEQ ID NO: 165729 - RNA, 22 nt, Human
cuuaacagagagaaguguugcu

SEQ ID NO: 165730 - RNA, 22 nt, Human
agcacagguacggagaugcuac

SEQ ID NO: 165731 - RNA, 22 nt, Human
ugucaugccauuuaaaauguuu

SEQ ID NO: 165732 - RNA, 21 nt, Human
ccuucucuugcuucagcuuca

SEQ ID NO: 165733 - RNA, 22 nt, Human
ccaggcugcuguugguguccgc

SEQ ID NO: 165734 - RNA, 22 nt, Human
gcucugugcaguucagggacac

SEQ ID NO: 165735 - RNA, 22 nt, Human
agccugucugucuccaaagcug

SEQ ID NO: 165736 - RNA, 22 nt, Human
cuggccagaguuggagggugug

SEQ ID NO: 165737 - RNA, 22 nt, Human
caggcacagaguuauucauuua

SEQ ID NO: 165738 - RNA, 22 nt, Human
uguuuaagcugaugagguaucg

SEQ ID NO: 165739 - RNA, 23 nt, Human
gaguguucauagcaggcucuugc

SEQ ID NO: 165740 - RNA, 22 nt, Human
uggucucugacucugaagaccc

SEQ ID NO: 165741 - RNA, 22 nt, Human
cuggcagcauuaacagagagca

SEQ ID NO: 165742 - RNA, 22 nt, Human
ccugacucuggccaggccagcu

SEQ ID NO: 165743 - RNA, 22 nt, Human
agcucccagcuccuuugagaga

SEQ ID NO: 165744 - RNA, 22 nt, Human
cacucugcgcugggcgccagcg

SEQ ID NO: 165745 - RNA, 22 nt, Human
ggcagggaggaggugaaaguga

SEQ ID NO: 165746 - RNA, 22 nt, Human
ccucuguccuggggaguggagc

SEQ ID NO: 165747 - RNA, 19 nt, Human
agacagagcucaguggguu

SEQ ID NO: 165748 - RNA, 22 nt, Human
aggccugagcagaggaguggac

SEQ ID NO: 165749 - RNA, 22 nt, Human
cuggcagcuggaggcuagaggc

SEQ ID NO: 165750 - RNA, 22 nt, Human
cugggacuuuacccuguggccc

SEQ ID NO: 165751 - RNA, 22 nt, Human
gaagagcugcucagaacaugau

SEQ ID NO: 165752 - RNA, 22 nt, Human
uuuguaaaaggaggaagcaugg

SEQ ID NO: 165753 - RNA, 22 nt, Human
ugugcuucuugcagcuccugua

SEQ ID NO: 165754 - RNA, 22 nt, Human
ugggacagugugccuugcuccu

SEQ ID NO: 165755 - RNA, 21 nt, Human
cuugaaagguagagucuacag

SEQ ID NO: 165756 - RNA, 22 nt, Human
ugccugcuaggcccugcugggu

SEQ ID NO: 165757 - RNA, 22 nt, Human
cugggaggcaccgcgucgugcu

SEQ ID NO: 165758 - RNA, 22 nt, Human
gcaaggcagcgcggaguagcua

SEQ ID NO: 165759 - RNA, 19 nt, Human
ucucacaucagcuccuagc

SEQ ID NO: 165760 - RNA, 22 nt, Human
uccauuggucucugugcccagg

SEQ ID NO: 165761 - RNA, 22 nt, Human
cacuggcaugugaggcgguggc

SEQ ID NO: 165762 - RNA, 22 nt, Human
acugugugcccugacgccaggg

SEQ ID NO: 165763 - RNA, 22 nt, Human
ucuggcucuguguccucaccca

SEQ ID NO: 165764 - RNA, 22 nt, Human
cuguccauuuucgugccuccuu

SEQ ID NO: 165765 - RNA, 22 nt, Human
gcagagcauguccucaggacag

SEQ ID NO: 165766 - RNA, 22 nt, Human
ugaaggaaagagggaacauccc

SEQ ID NO: 165767 - RNA, 22 nt, Human
agaagugccauacuguggucca

SEQ ID NO: 165768 - RNA, 22 nt, Human
acuugauuuugaaccuuucuac

SEQ ID NO: 165769 - RNA, 22 nt, Human
cccagaggugcuucagaggugc

SEQ ID NO: 165770 - RNA, 22 nt, Human
uggcuucugggacuugugagca

SEQ ID NO: 165771 - RNA, 22 nt, Human
cccagcauuucugggcugcacu

SEQ ID NO: 165772 - RNA, 21 nt, Human
uugcaccaugauaaauucaga

SEQ ID NO: 165773 - RNA, 19 nt, Human
ccucugcgcuguccugcuc

SEQ ID NO: 165774 - RNA, 22 nt, Human
uagacagauuucuuguuagaca

SEQ ID NO: 165775 - RNA, 22 nt, Human
ucugggugcccuuugcucuguu

SEQ ID NO: 165776 - RNA, 22 nt, Human
ugcagaccucccauggcugccu

SEQ ID NO: 165777 - RNA, 22 nt, Human
agggccuggaacuggagaccac

SEQ ID NO: 165778 - RNA, 22 nt, Human
caggauccuggcugcauggacg

SEQ ID NO: 165779 - RNA, 22 nt, Human
uggcaguggcucagagugcaga

SEQ ID NO: 165780 - RNA, 20 nt, Human
cugagcccccagccugcagg

SEQ ID NO: 165781 - RNA, 22 nt, Human
auuguguaauuuucagcucaua

SEQ ID NO: 165782 - RNA, 21 nt, Human
agacagagugcagucuacaua

SEQ ID NO: 165783 - RNA, 22 nt, Human
uggccuuggcagugagaagagu

SEQ ID NO: 165784 - RNA, 22 nt, Human
ugucacauaggcaaaauguuuu

SEQ ID NO: 165785 - RNA, 22 nt, Human
ugcauauuuguaugauguuuag

SEQ ID NO: 165786 - RNA, 21 nt, Human
agagagaaggccauauggucc

SEQ ID NO: 165787 - RNA, 22 nt, Human
cacagcuuguuuagugacucac

SEQ ID NO: 165788 - RNA, 22 nt, Human
ccugccuguacuagagacccag

SEQ ID NO: 165789 - RNA, 22 nt, Human
agagccagagaccuggguucac

SEQ ID NO: 165790 - RNA, 22 nt, Human
gccucugcccuccugggacugc

SEQ ID NO: 165791 - RNA, 18 nt, Human
gcaggugccacugcuguu

SEQ ID NO: 165792 - RNA, 21 nt, Human
acagaacuguauagugauaaa

SEQ ID NO: 165793 - RNA, 22 nt, Human
cagcucccuauggugaggcgac

SEQ ID NO: 165794 - RNA, 22 nt, Human
acaaagguggaccauguggcuu

SEQ ID NO: 165795 - RNA, 22 nt, Human
agagccugaggccaggaaaaug

SEQ ID NO: 165796 - RNA, 22 nt, Human
aggccuggguguucaccagaag

SEQ ID NO: 165797 - RNA, 22 nt, Human
ggagacaguauggcuuguagcu

SEQ ID NO: 165798 - RNA, 22 nt, Human
ugcugaggucaccuugcugcua

SEQ ID NO: 165799 - RNA, 20 nt, Human
aggcugggguguuuugccca

SEQ ID NO: 165800 - RNA, 22 nt, Human
uguggccuccuguuccugggua

SEQ ID NO: 165801 - RNA, 22 nt, Human
acauuucugcauguaggguaau

SEQ ID NO: 165802 - RNA, 22 nt, Human
gcugccaugccacagcacucac

SEQ ID NO: 165803 - RNA, 22 nt, Human
ccagccuggagggcaguggugg

SEQ ID NO: 165804 - RNA, 22 nt, Human
aaggcacuuuuccugagaugau

SEQ ID NO: 165805 - RNA, 19 nt, Human
ucccagagucuagagguug

SEQ ID NO: 165806 - RNA, 22 nt, Human
ucagcuggcaguucagaggcug

SEQ ID NO: 165807 - RNA, 22 nt, Human
ccugccugacagagaagguuca

SEQ ID NO: 165808 - RNA, 22 nt, Human
ggcugccugcuccuccugcacg

SEQ ID NO: 165809 - RNA, 22 nt, Human
ggcugaaacagauuucaagaca

SEQ ID NO: 165810 - RNA, 22 nt, Human
gccacguugccacccgggugac

SEQ ID NO: 165811 - RNA, 22 nt, Human
acuuugugcccaacagaaagaa

SEQ ID NO: 165812 - RNA, 22 nt, Human
ggguguccugugccaagcuggg

SEQ ID NO: 165813 - RNA, 22 nt, Human
gugcagguguuuuggcugccag

SEQ ID NO: 165814 - RNA, 22 nt, Human
acugggccuggauuggcguguc

SEQ ID NO: 165815 - RNA, 21 nt, Human
gagacagacuuucguccccug

SEQ ID NO: 165816 - RNA, 18 nt, Human
ugucauugccagggaagc

SEQ ID NO: 165817 - RNA, 22 nt, Human
gagccugaaauacaggucacug

SEQ ID NO: 165818 - RNA, 22 nt, Human
aguggcaggcggagauguagga

SEQ ID NO: 165819 - RNA, 22 nt, Human
gcugccugauuuacauagugaa

SEQ ID NO: 165820 - RNA, 22 nt, Human
guagcccaccuggggagggcga

SEQ ID NO: 165821 - RNA, 22 nt, Human
ccagggcuggugggagaugcug

SEQ ID NO: 165822 - RNA, 22 nt, Human
gaaaaaugagcugaugucaggg

SEQ ID NO: 165823 - RNA, 22 nt, Human
cugggcugcgggcgccccucca

SEQ ID NO: 165824 - RNA, 22 nt, Human
cagggccucauccucagagauu

SEQ ID NO: 165825 - RNA, 22 nt, Human
gaggccugguuugcaugagaau

SEQ ID NO: 165826 - RNA, 22 nt, Human
agaagccaauucugugugaguc

SEQ ID NO: 165827 - RNA, 22 nt, Human
ccugagagcgaguggccucaug

SEQ ID NO: 165828 - RNA, 22 nt, Human
auguuuauguugggcuauauuu

SEQ ID NO: 165829 - RNA, 20 nt, Human
auguagaugaaagcaaaggc

SEQ ID NO: 165830 - RNA, 22 nt, Human
ccucugcucugguccaugugcu

SEQ ID NO: 165831 - RNA, 22 nt, Human
uuacaaagagaaguuguagaau

SEQ ID NO: 165832 - RNA, 22 nt, Human
cagccugcccuggaagcccagc

SEQ ID NO: 165833 - RNA, 20 nt, Human
gcccacucuaauccacuguc

SEQ ID NO: 165834 - RNA, 22 nt, Human
agccaaggcagcuagagcucug

SEQ ID NO: 165835 - RNA, 22 nt, Human
auacagaaaaugaugcagaguu

SEQ ID NO: 165836 - RNA, 22 nt, Human
ugcaauaacccaguaucuguga

SEQ ID NO: 165837 - RNA, 22 nt, Human
ugagaaagugggugccuagcaa

SEQ ID NO: 165838 - RNA, 22 nt, Human
cagccagcugaauguaccauga

SEQ ID NO: 165839 - RNA, 22 nt, Human
guggcugggcuccgagcggcuu

SEQ ID NO: 165840 - RNA, 22 nt, Human
gggaaggagguggcuugaagug

SEQ ID NO: 165841 - RNA, 16 nt, Human
gagggcagaggcggaa

SEQ ID NO: 165842 - RNA, 22 nt, Human
uccugccucuccaugcuaacua

SEQ ID NO: 165843 - RNA, 18 nt, Human
aggcccuggccucgaaca

SEQ ID NO: 165844 - RNA, 22 nt, Human
ucaagagaaggggaaauagacu

SEQ ID NO: 165845 - RNA, 22 nt, Human
uaacagaauccuguuauugcca

SEQ ID NO: 165846 - RNA, 22 nt, Human
cauuuacuguugaaucccuagc

SEQ ID NO: 165847 - RNA, 22 nt, Human
ugucacaaacauacauuauaga

SEQ ID NO: 165848 - RNA, 22 nt, Human
gguucacauauugagaguauuc

SEQ ID NO: 165849 - RNA, 22 nt, Human
acacagggauauuucagguggu

SEQ ID NO: 165850 - RNA, 22 nt, Human
ucacauuuguuccucugcacuu

SEQ ID NO: 165851 - RNA, 22 nt, Human
ucagcugccccaguggccccag

SEQ ID NO: 165852 - RNA, 21 nt, Human
cccuugccugcacuccucggc

SEQ ID NO: 165853 - RNA, 22 nt, Human
uuugcuauaaaagggucacacg

SEQ ID NO: 165854 - RNA, 22 nt, Human
uauugacagagggucagaagag

SEQ ID NO: 165855 - RNA, 22 nt, Human
uuuaucuuuggaucuucagaaa

SEQ ID NO: 165856 - RNA, 22 nt, Human
uggaaggcaacggagugagcug

SEQ ID NO: 165857 - RNA, 22 nt, Human
agcagccauccuuagagaaaga

SEQ ID NO: 165858 - RNA, 21 nt, Human
agcuuguguguaucacagugu

SEQ ID NO: 165859 - RNA, 22 nt, Human
auaguggugagcugcauuuaug

SEQ ID NO: 165860 - RNA, 21 nt, Human
aggagcuguguuagcuggucg

SEQ ID NO: 165861 - RNA, 22 nt, Human
ugcauuauacuuuuagaaauuu

SEQ ID NO: 165862 - RNA, 22 nt, Human
aagcuggcaauuaucaaaacug

SEQ ID NO: 165863 - RNA, 22 nt, Human
caggcagccaggggaccugucc

SEQ ID NO: 165864 - RNA, 19 nt, Human
gggcagaauggcaucucag

SEQ ID NO: 165865 - RNA, 22 nt, Human
ucuggcucucauacucgccagu

SEQ ID NO: 165866 - RNA, 22 nt, Human
caggcagccuucucgucucaca

SEQ ID NO: 165867 - RNA, 22 nt, Human
aggcugcucugcgaagucagcu

SEQ ID NO: 165868 - RNA, 22 nt, Human
cucugggcaccaaagagcagcu

SEQ ID NO: 165869 - RNA, 22 nt, Human
uacaggaggauuaucaaaggau

SEQ ID NO: 165870 - RNA, 18 nt, Human
ucucuuuuccccucauug

SEQ ID NO: 165871 - RNA, 22 nt, Human
aaguucaaggcagguccugagg

SEQ ID NO: 165872 - RNA, 22 nt, Human
aauguuguuuuucugcaugucu

SEQ ID NO: 165873 - RNA, 23 nt, Human
cccuggagcuagucugagcagag

SEQ ID NO: 165874 - RNA, 22 nt, Human
ccacagggauaggaauggggcu

SEQ ID NO: 165875 - RNA, 20 nt, Human
gggugagauguaggagaggg

SEQ ID NO: 165876 - RNA, 22 nt, Human
aaaguguugggaagaaagugca

SEQ ID NO: 165877 - RNA, 22 nt, Human
cucucugguacauagaguuugg

SEQ ID NO: 165878 - RNA, 22 nt, Human
uuccuccacgugacaggagcca

SEQ ID NO: 165879 - RNA, 22 nt, Human
ggcuggcuggcugguagacaag

SEQ ID NO: 165880 - RNA, 22 nt, Human
gccccagccaaggugacacgaa

SEQ ID NO: 165881 - RNA, 22 nt, Human
aucugguuuggggauccuugug

SEQ ID NO: 165882 - RNA, 22 nt, Human
ucauugcaggcauuccccugcc

SEQ ID NO: 165883 - RNA, 22 nt, Human
ccuggagcaaaaaucuaaggag

SEQ ID NO: 165884 - RNA, 22 nt, Human
cugggccuggcguuccaggcug

SEQ ID NO: 165885 - RNA, 22 nt, Human
uuucuguaauuaaaagggcagg

SEQ ID NO: 165886 - RNA, 22 nt, Human
aaaugccucugcuguacacaau

SEQ ID NO: 165887 - RNA, 22 nt, Human
ggcagcugaccuagcaccaucc

SEQ ID NO: 165888 - RNA, 22 nt, Human
aaaugcaggaaauuaugcuuuu

SEQ ID NO: 165889 - RNA, 22 nt, Human
auuucauugaaguuaauucuuc

SEQ ID NO: 165890 - RNA, 22 nt, Human
cuuccucugcggcgccgggcgc

SEQ ID NO: 165891 - RNA, 22 nt, Human
cacaggagcuguggggcagugu

SEQ ID NO: 165892 - RNA, 22 nt, Human
ugacagcauaacacuggucuug

SEQ ID NO: 165893 - RNA, 22 nt, Human
gggcugcugcugccagcgacac

SEQ ID NO: 165894 - RNA, 22 nt, Human
uuggccuuguuaaggaggcccu

SEQ ID NO: 165895 - RNA, 22 nt, Human
aauuaguauugcgauucauuag

SEQ ID NO: 165896 - RNA, 22 nt, Human
ccugccugucaucgccugcgcc

SEQ ID NO: 165897 - RNA, 19 nt, Human
agcuccugggcucugggcc

SEQ ID NO: 165898 - RNA, 22 nt, Human
cuuccucacggugcaacaggaa

SEQ ID NO: 165899 - RNA, 22 nt, Human
agcuugccucuuaaucaccuca

SEQ ID NO: 165900 - RNA, 22 nt, Human
auccaaagauggaaagaacuuu

SEQ ID NO: 165901 - RNA, 21 nt, Human
uucaaagagugggcauuguca

SEQ ID NO: 165902 - RNA, 22 nt, Human
ccccagccuuccaugggaauug

SEQ ID NO: 165903 - RNA, 22 nt, Human
cauacauugcucauucaguauc

SEQ ID NO: 165904 - RNA, 22 nt, Human
ggccucagugggccgcugcagg

SEQ ID NO: 165905 - RNA, 22 nt, Human
cugccucucaggucccugagau

SEQ ID NO: 165906 - RNA, 22 nt, Human
accauguuggccaagcuggucu

SEQ ID NO: 165907 - RNA, 22 nt, Human
ccaggagccacucaggcccaca

SEQ ID NO: 165908 - RNA, 22 nt, Human
uagcuuuaccauagaagaguau

SEQ ID NO: 165909 - RNA, 22 nt, Human
ccagcuggcaggagagucaggg

SEQ ID NO: 165910 - RNA, 22 nt, Human
agaagccagcuucagcugcccg

SEQ ID NO: 165911 - RNA, 22 nt, Human
ugcagauucaaaugaaaugcaa

SEQ ID NO: 165912 - RNA, 22 nt, Human
ccugggcaggaugggcccggug

SEQ ID NO: 165913 - RNA, 20 nt, Human
agcuggagaagggcccuucc

SEQ ID NO: 165914 - RNA, 22 nt, Human
cagacccucgggugaguuggcc

SEQ ID NO: 165915 - RNA, 22 nt, Human
uuucaaauaccauaaaccuaau

SEQ ID NO: 165916 - RNA, 19 nt, Human
uagcagcugccaaaggaga

SEQ ID NO: 165917 - RNA, 22 nt, Human
cagcaggcccagaguuucaugg

SEQ ID NO: 165918 - RNA, 22 nt, Human
ugagaaccaugaaaagcuguca

SEQ ID NO: 165919 - RNA, 21 nt, Human
uggcucuguucaauauaugga

SEQ ID NO: 165920 - RNA, 22 nt, Human
gcuggugcauuagcugcaguuc

SEQ ID NO: 165921 - RNA, 22 nt, Human
gaggcugcggggaggagccugc

SEQ ID NO: 165922 - RNA, 22 nt, Human
gcagcccagguguagcucuuug

SEQ ID NO: 165923 - RNA, 22 nt, Human
ucagaggauugccucagcgagc

SEQ ID NO: 165924 - RNA, 22 nt, Human
uggccacccagcugacgccuuc

SEQ ID NO: 165925 - RNA, 22 nt, Human
ucacuugccuagcccaguucag

SEQ ID NO: 165926 - RNA, 22 nt, Human
agagugggccucugagucccag

SEQ ID NO: 165927 - RNA, 22 nt, Human
cugagggcccugaagcuuggca

SEQ ID NO: 165928 - RNA, 22 nt, Human
cagcauggggcuuggagucagc

SEQ ID NO: 165929 - RNA, 22 nt, Human
gggcaguggguggcugcagccu

SEQ ID NO: 165930 - RNA, 22 nt, Human
gggagcaggagccugccugcca

SEQ ID NO: 165931 - RNA, 22 nt, Human
aaugaacacagcccucuacuuu

SEQ ID NO: 165932 - RNA, 22 nt, Human
uggguggcacuucuggggucca

SEQ ID NO: 165933 - RNA, 22 nt, Human
gccagccuucuguggccugcaa

SEQ ID NO: 165934 - RNA, 22 nt, Human
acagaauuaaugaaaauuacaa

SEQ ID NO: 165935 - RNA, 22 nt, Human
cugagcauggccgguccauggu

SEQ ID NO: 165936 - RNA, 22 nt, Human
auggggcucugcggcugcuccc

SEQ ID NO: 165937 - RNA, 22 nt, Human
agcaucuggugagggccuaguu

SEQ ID NO: 165938 - RNA, 23 nt, Human
uggggccaagugaggaagggucu

SEQ ID NO: 165939 - RNA, 22 nt, Human
cuggcucuucagugcuugguuc

SEQ ID NO: 165940 - RNA, 22 nt, Human
gucacaggccuggaugaggggc

SEQ ID NO: 165941 - RNA, 22 nt, Human
aguuuuuccugauuuuacagaa

SEQ ID NO: 165942 - RNA, 22 nt, Human
ugucccaggcugaaguacagug

SEQ ID NO: 165943 - RNA, 22 nt, Human
ggcugagcaauuuugaugacau

SEQ ID NO: 165944 - RNA, 22 nt, Human
ccugcuucagggaugauggcac

SEQ ID NO: 165945 - RNA, 22 nt, Human
aucuggcucaccuggguaaaua

SEQ ID NO: 165946 - RNA, 22 nt, Human
caggagugagaugcgaucacuu

SEQ ID NO: 165947 - RNA, 22 nt, Human
cucagaaucugccaaguucagg

SEQ ID NO: 165948 - RNA, 22 nt, Human
gcuggccauggccugcgccauc

SEQ ID NO: 165949 - RNA, 20 nt, Human
guaaaauauggucuuugggu

SEQ ID NO: 165950 - RNA, 22 nt, Human
aaggcaggaugggaaaagauuu

SEQ ID NO: 165951 - RNA, 22 nt, Human
accugccuaucagcugccugcu

SEQ ID NO: 165952 - RNA, 22 nt, Human
ccacugucugcaggccucagca

SEQ ID NO: 165953 - RNA, 21 nt, Human
uagaaaucagcuggugccucu

SEQ ID NO: 165954 - RNA, 22 nt, Human
ggccagaaguuggaaaagagcc

SEQ ID NO: 165955 - RNA, 22 nt, Human
uuaacagauguuuauggagcau

SEQ ID NO: 165956 - RNA, 22 nt, Human
ggcuucugagugcucugcuguu

SEQ ID NO: 165957 - RNA, 22 nt, Human
agcagcucaaagccugcaagga

SEQ ID NO: 165958 - RNA, 22 nt, Human
gcugucacaaauauuucucagc

SEQ ID NO: 165959 - RNA, 22 nt, Human
uggccugccccgagauccuggc

SEQ ID NO: 165960 - RNA, 22 nt, Human
gcauuuguguucuuccuagagc

SEQ ID NO: 165961 - RNA, 22 nt, Human
acauuucucaucuaguagagua

SEQ ID NO: 165962 - RNA, 22 nt, Human
uguuccauaaguggugcuuugu

SEQ ID NO: 165963 - RNA, 23 nt, Human
uccagggauuaaugaagucaguc

SEQ ID NO: 165964 - RNA, 22 nt, Human
cauuaucucuucuauaugcuag

SEQ ID NO: 165965 - RNA, 22 nt, Human
ugucccagacauaaguggacau

SEQ ID NO: 165966 - RNA, 22 nt, Human
gcaggaugggagcuucacucug

SEQ ID NO: 165967 - RNA, 19 nt, Human
ugcuuccucaccaucuccc

SEQ ID NO: 165968 - RNA, 22 nt, Human
acagagcuguacaugugccaug

SEQ ID NO: 165969 - RNA, 22 nt, Human
uagcugucagcaaucaaguggu

SEQ ID NO: 165970 - RNA, 20 nt, Human
gagccugggaagucuaaggu

SEQ ID NO: 165971 - RNA, 22 nt, Human
aaaaucugcuuccuuuuacaga

SEQ ID NO: 165972 - RNA, 22 nt, Human
cugucagguuggucucagagcu

SEQ ID NO: 165973 - RNA, 22 nt, Human
cugugccuggggggcagagcug

SEQ ID NO: 165974 - RNA, 22 nt, Human
acagguggcauaggcaguuuga

SEQ ID NO: 165975 - RNA, 22 nt, Human
ugaagcaaacgcuucuguuccu

SEQ ID NO: 165976 - RNA, 22 nt, Human
uccuugaacagagggccugggu

SEQ ID NO: 165977 - RNA, 22 nt, Human
ugugcccauuccacuugaguac

SEQ ID NO: 165978 - RNA, 22 nt, Human
gagguauguaugcuacauucuu

SEQ ID NO: 165979 - RNA, 22 nt, Human
ucucucagaggccaggguccug

SEQ ID NO: 165980 - RNA, 20 nt, Human
gcacugaagguuccagggga

SEQ ID NO: 165981 - RNA, 22 nt, Human
uauuuccugcauggugauguaa

SEQ ID NO: 165982 - RNA, 22 nt, Human
ugccuggguccaggccaagccu

SEQ ID NO: 165983 - RNA, 22 nt, Human
accuuuuuucagaacucuaaag

SEQ ID NO: 165984 - RNA, 22 nt, Human
guuacacaggaaaacauuagca

SEQ ID NO: 165985 - RNA, 22 nt, Human
gucucagauucagacaucuaca

SEQ ID NO: 165986 - RNA, 22 nt, Human
ucaaguauaucuagucauuagg

SEQ ID NO: 165987 - RNA, 22 nt, Human
gcugucugucuucacaucucgc

SEQ ID NO: 165988 - RNA, 22 nt, Human
uggcugaauaauauucuguugu

SEQ ID NO: 165989 - RNA, 22 nt, Human
ugggcagacgggagcuugccuu

SEQ ID NO: 165990 - RNA, 22 nt, Human
cuggggcuggugaggcaggcuc

SEQ ID NO: 165991 - RNA, 23 nt, Human
ggcagcucucaucugaugacuga

SEQ ID NO: 165992 - RNA, 22 nt, Human
guuuccauggcucuguuaaugg

SEQ ID NO: 165993 - RNA, 22 nt, Human
cucaggauucucgacacucaca

SEQ ID NO: 165994 - RNA, 22 nt, Human
aaaugcacagagccuuagagau

SEQ ID NO: 165995 - RNA, 22 nt, Human
gguggccaggccagcucuggcc

SEQ ID NO: 165996 - RNA, 22 nt, Human
cagagggagcccuccaggagca

SEQ ID NO: 165997 - RNA, 22 nt, Human
uaacaucuuuagcagcucgaac

SEQ ID NO: 165998 - RNA, 22 nt, Human
auacaucucauguaagagauaa

SEQ ID NO: 165999 - RNA, 22 nt, Human
cagcuggguuuaguggggugug

SEQ ID NO: 166000 - RNA, 22 nt, Human
acacagccaggguaguaaggcu

SEQ ID NO: 166001 - RNA, 22 nt, Human
caggguggcccuguggucucau

SEQ ID NO: 166002 - RNA, 22 nt, Human
aagaagaugguuaacuuucagu

SEQ ID NO: 166003 - RNA, 22 nt, Human
ccagggucuuggagaggagugc

SEQ ID NO: 166004 - RNA, 22 nt, Human
uuuuuccaccguacuuccugag

SEQ ID NO: 166005 - RNA, 22 nt, Human
ggguccaggucuucaggcagag

SEQ ID NO: 166006 - RNA, 22 nt, Human
ggcugccucuggaagcuggaga

SEQ ID NO: 166007 - RNA, 22 nt, Human
guguuuccucacuucucugacu

SEQ ID NO: 166008 - RNA, 22 nt, Human
gccagguggcugagugacugag

SEQ ID NO: 166009 - RNA, 23 nt, Human
acagcugcaccuggccgccuggc

SEQ ID NO: 166010 - RNA, 22 nt, Human
agauguaguagugggucuuuua

SEQ ID NO: 166011 - RNA, 22 nt, Human
acugcuuuagaccuagagcucu

SEQ ID NO: 166012 - RNA, 22 nt, Human
cagagcaguaaaucuggggcac

SEQ ID NO: 166013 - RNA, 22 nt, Human
augccacugacauggacaauuu

SEQ ID NO: 166014 - RNA, 22 nt, Human
ucacagggcauuauggcuccag

SEQ ID NO: 166015 - RNA, 22 nt, Human
agucccagcucugccacuuacu

SEQ ID NO: 166016 - RNA, 21 nt, Human
uccuucaguucugcacuuucu

SEQ ID NO: 166017 - RNA, 22 nt, Human
cucaggauguacuacagaaggc

SEQ ID NO: 166018 - RNA, 22 nt, Human
caggaaagagcugccaggcagg

SEQ ID NO: 166019 - RNA, 22 nt, Human
aggagccaagauggggcaagua

SEQ ID NO: 166020 - RNA, 22 nt, Human
gcagcuggggccacacuuaggc

SEQ ID NO: 166021 - RNA, 22 nt, Human
uggcucagaugcucuuccagug

SEQ ID NO: 166022 - RNA, 22 nt, Human
ugacuucaaaggcucuacuccu

SEQ ID NO: 166023 - RNA, 22 nt, Human
uuaucauugucgcagucuaauu

SEQ ID NO: 166024 - RNA, 22 nt, Human
cugcuuuguaaaauagacauaa

SEQ ID NO: 166025 - RNA, 22 nt, Human
auggcagccuguggacagucaa

SEQ ID NO: 166026 - RNA, 22 nt, Human
ccucugggugggaggccgggcg

SEQ ID NO: 166027 - RNA, 22 nt, Human
cagaauuuuucgaauguacugu

SEQ ID NO: 166028 - RNA, 22 nt, Human
agggagcaugggugaagcaggc

SEQ ID NO: 166029 - RNA, 22 nt, Human
cauuucugauuacagaauacua

SEQ ID NO: 166030 - RNA, 22 nt, Human
ucagagaaguaagguggggugc

SEQ ID NO: 166031 - RNA, 22 nt, Human
ucugggcccuaaaccagcucua

SEQ ID NO: 166032 - RNA, 22 nt, Human
gggcagcugccaagugcaucgc

SEQ ID NO: 166033 - RNA, 22 nt, Human
agaauucuggaguugggaggaa

SEQ ID NO: 166034 - RNA, 16 nt, Human
cagaguguaaacagga

SEQ ID NO: 166035 - RNA, 22 nt, Human
aucacaggugguaggaaaagaa

SEQ ID NO: 166036 - RNA, 22 nt, Human
acccugggucauauacagugug

SEQ ID NO: 166037 - RNA, 23 nt, Human
cucccuggaguuucuggaagaug

SEQ ID NO: 166038 - RNA, 22 nt, Human
ggcgugggaaguggggcuucug

SEQ ID NO: 166039 - RNA, 21 nt, Human
ugcauaaagaaauacaaauac

SEQ ID NO: 166040 - RNA, 22 nt, Human
guuauguaucuugauugggugg

SEQ ID NO: 166041 - RNA, 20 nt, Human
ugccagggccagcagaggcu

SEQ ID NO: 166042 - RNA, 22 nt, Human
agcugcccuucucuugcccuug

SEQ ID NO: 166043 - RNA, 22 nt, Human
uggaggagaauuuauggucgaa

SEQ ID NO: 166044 - RNA, 22 nt, Human
agccuucaguaaauccacugug

SEQ ID NO: 166045 - RNA, 22 nt, Human
aaguuuaagguggaaguggugg

SEQ ID NO: 166046 - RNA, 20 nt, Human
ugcuugucaugcacucaggc

SEQ ID NO: 166047 - RNA, 22 nt, Human
auuuaucaccaguuagcugacu

SEQ ID NO: 166048 - RNA, 22 nt, Human
gcaguccucucauuggccuccu

SEQ ID NO: 166049 - RNA, 17 nt, Human
ucuuuccugccaugcuc

SEQ ID NO: 166050 - RNA, 22 nt, Human
ugcuggcucaguuugcagacuc

SEQ ID NO: 166051 - RNA, 18 nt, Human
acauuucuaugcuucugg

SEQ ID NO: 166052 - RNA, 22 nt, Human
cacuucaauuaacuucagcauu

SEQ ID NO: 166053 - RNA, 22 nt, Human
ugccucagagugggcuugcuau

SEQ ID NO: 166054 - RNA, 22 nt, Human
uuugcauuuauaaguuggugga

SEQ ID NO: 166055 - RNA, 22 nt, Human
uucuuacagcccuauuacuaaa

SEQ ID NO: 166056 - RNA, 22 nt, Human
uuuucuaacaucuaguaauuug

SEQ ID NO: 166057 - RNA, 22 nt, Human
cugggcuguaauguggcacuga

SEQ ID NO: 166058 - RNA, 22 nt, Human
agagccugcaucaggcuugggg

SEQ ID NO: 166059 - RNA, 22 nt, Human
acagaguacauucagagacuau

SEQ ID NO: 166060 - RNA, 22 nt, Human
agcagccaggaaucugcagagc

SEQ ID NO: 166061 - RNA, 22 nt, Human
agccagagagccccagguucua

SEQ ID NO: 166062 - RNA, 22 nt, Human
agggccugcaucaggagcuugg

SEQ ID NO: 166063 - RNA, 22 nt, Human
aggcacugauucucagaguuac

SEQ ID NO: 166064 - RNA, 22 nt, Human
ggcucaggacacagugguuuag

SEQ ID NO: 166065 - RNA, 19 nt, Human
ccuggcccugcugcgcggg

SEQ ID NO: 166066 - RNA, 22 nt, Human
cagcugccacaggacuuucuga

SEQ ID NO: 166067 - RNA, 21 nt, Human
ccagacuggccuaugugguag

SEQ ID NO: 166068 - RNA, 22 nt, Human
agagcugaaaaagcugacccgg

SEQ ID NO: 166069 - RNA, 22 nt, Human
uggcucaggugugagcugaaga

SEQ ID NO: 166070 - RNA, 22 nt, Human
ucagggcaggcgagcagcugcu

SEQ ID NO: 166071 - RNA, 22 nt, Human
ccagcuggucugugcucauguu

SEQ ID NO: 166072 - RNA, 22 nt, Human
aagcugccugccacgcuagaua

SEQ ID NO: 166073 - RNA, 22 nt, Human
caagagcuggguggcaagcuag

SEQ ID NO: 166074 - RNA, 22 nt, Human
gcagcugguuaaugggagaauu

SEQ ID NO: 166075 - RNA, 19 nt, Human
aggccugggguuuugcacu

SEQ ID NO: 166076 - RNA, 22 nt, Human
cagcagugugcaggugugcugg

SEQ ID NO: 166077 - RNA, 22 nt, Human
cucagaaguucagccuagagua

SEQ ID NO: 166078 - RNA, 22 nt, Human
cagagccagcaguggggacagg

SEQ ID NO: 166079 - RNA, 22 nt, Human
gcucucagguacaaagcugugu

SEQ ID NO: 166080 - RNA, 22 nt, Human
cugggcugucaauggcccucug

SEQ ID NO: 166081 - RNA, 22 nt, Human
uuccauuguuucugucuucacu

SEQ ID NO: 166082 - RNA, 22 nt, Human
aacaguaucuuuuaucagaaau

SEQ ID NO: 166083 - RNA, 22 nt, Human
agcugcucaggagagccagguc

SEQ ID NO: 166084 - RNA, 22 nt, Human
ggcugccugaggcagugagaga

SEQ ID NO: 166085 - RNA, 22 nt, Human
cugccucugguuuuggucccug

SEQ ID NO: 166086 - RNA, 22 nt, Human
cuggccuggucuggccucucca

SEQ ID NO: 166087 - RNA, 22 nt, Human
acagcuguauccccagagcuca

SEQ ID NO: 166088 - RNA, 21 nt, Human
gcaggguccuuuccauuccua

SEQ ID NO: 166089 - RNA, 22 nt, Human
acaggcugccuaccaaguauca

SEQ ID NO: 166090 - RNA, 22 nt, Human
ucuggcucggauuugucuagca

SEQ ID NO: 166091 - RNA, 22 nt, Human
cucaggcccacagcagacccac

SEQ ID NO: 166092 - RNA, 22 nt, Human
agucccagagaggucggggcca

SEQ ID NO: 166093 - RNA, 19 nt, Human
cagcaauaaugccagaugg

SEQ ID NO: 166094 - RNA, 22 nt, Human
ugucucaggggcauugaaauaa

SEQ ID NO: 166095 - RNA, 22 nt, Human
cuggcucaauuuguacugcugu

SEQ ID NO: 166096 - RNA, 22 nt, Human
gcccucagaguuccccacagug

SEQ ID NO: 166097 - RNA, 15 nt, Human
aaucuggcggcaagu

SEQ ID NO: 166098 - RNA, 22 nt, Human
ugcagccaggaaauauuugcug

SEQ ID NO: 166099 - RNA, 22 nt, Human
gcaccugggacccagaggcacc

SEQ ID NO: 166100 - RNA, 22 nt, Human
cccucugcucaggugcauaggc

SEQ ID NO: 166101 - RNA, 22 nt, Human
agccagggacgcugcaggcuac

SEQ ID NO: 166102 - RNA, 22 nt, Human
acauuucuuuucaucucuauau

SEQ ID NO: 166103 - RNA, 22 nt, Human
uauucacaaaaugagguccuca

SEQ ID NO: 166104 - RNA, 22 nt, Human
agcuggccuuagugagcaccug

SEQ ID NO: 166105 - RNA, 22 nt, Human
uaaagguaacaugaacugcuuu

SEQ ID NO: 166106 - RNA, 22 nt, Human
agacagcaugauacaugaugcu

SEQ ID NO: 166107 - RNA, 22 nt, Human
agugaaauuccuggucuuuguu

SEQ ID NO: 166108 - RNA, 22 nt, Human
ucccagaguuuccuguguccca

SEQ ID NO: 166109 - RNA, 22 nt, Human
uucuuucccagaagauauguuu

SEQ ID NO: 166110 - RNA, 22 nt, Human
guuauaaaugacugcaaaaguu

SEQ ID NO: 166111 - RNA, 22 nt, Human
aucaaaguaggcauauguuuuu

SEQ ID NO: 166112 - RNA, 22 nt, Human
agagccugaggaugucccagcu

SEQ ID NO: 166113 - RNA, 22 nt, Human
gccaccagccccaugcgcugug

SEQ ID NO: 166114 - RNA, 20 nt, Human
ugcucugucuaaaacuuccc

SEQ ID NO: 166115 - RNA, 22 nt, Human
aggccuguuggcgugggcucua

SEQ ID NO: 166116 - RNA, 22 nt, Human
agccaugcaccuuacucuugcu

SEQ ID NO: 166117 - RNA, 22 nt, Human
aauuucaaacuaauaggaacca

SEQ ID NO: 166118 - RNA, 20 nt, Human
uauuucugggcaaccauuua

SEQ ID NO: 166119 - RNA, 22 nt, Human
guacaguuuucaguguucacug

SEQ ID NO: 166120 - RNA, 22 nt, Human
acauuucuuccuaauuaucccu

SEQ ID NO: 166121 - RNA, 22 nt, Human
gcauccagucuuggcuccugga

SEQ ID NO: 166122 - RNA, 22 nt, Human
ucagaaauuuucucaguaguuc

SEQ ID NO: 166123 - RNA, 22 nt, Human
aaaucuaggcucauccuggucc

SEQ ID NO: 166124 - RNA, 22 nt, Human
uuacaugguuguuggaaaugcu

SEQ ID NO: 166125 - RNA, 22 nt, Human
caggaacacaaugagucucaaa

SEQ ID NO: 166126 - RNA, 22 nt, Human
aacagaauugcugcugccaaug

SEQ ID NO: 166127 - RNA, 22 nt, Human
guccucugacucagccuuggga

SEQ ID NO: 166128 - RNA, 22 nt, Human
agugauggagcuuccucugcua

SEQ ID NO: 166129 - RNA, 23 nt, Human
augcaguauaugucaguaguuua

SEQ ID NO: 166130 - RNA, 20 nt, Human
aggcagacaaggagucuguu

SEQ ID NO: 166131 - RNA, 23 nt, Human
agaaaagcuuggacacauggccu

SEQ ID NO: 166132 - RNA, 22 nt, Human
ccuggcuuccuggagcucacaa

SEQ ID NO: 166133 - RNA, 22 nt, Human
ggcuucucucccccagcuccac

SEQ ID NO: 166134 - RNA, 22 nt, Human
guguaauugaaauugagaacca

SEQ ID NO: 166135 - RNA, 22 nt, Human
acuuugaaacuaaaauucauua

SEQ ID NO: 166136 - RNA, 22 nt, Human
ugaagcaggaaacuucuuguuu

SEQ ID NO: 166137 - RNA, 22 nt, Human
ccacagggacuguuaaaacccu

SEQ ID NO: 166138 - RNA, 22 nt, Human
ucugcucuaguugcuuccugcc

SEQ ID NO: 166139 - RNA, 22 nt, Human
cuuccaaacccaggguaugggc

SEQ ID NO: 166140 - RNA, 22 nt, Human
ucagccucucugaguccagacc

SEQ ID NO: 166141 - RNA, 22 nt, Human
ugucaugccaccguuucccaga

SEQ ID NO: 166142 - RNA, 22 nt, Human
cccuggguucuggcugggcugc

SEQ ID NO: 166143 - RNA, 22 nt, Human
ggccagagaauaugccuuacgu

SEQ ID NO: 166144 - RNA, 22 nt, Human
cacuuaagcaguuaauuuaucu

SEQ ID NO: 166145 - RNA, 22 nt, Human
ugccaaggguaugggcaagaua

SEQ ID NO: 166146 - RNA, 22 nt, Human
gagagggccgggggccagcucc

SEQ ID NO: 166147 - RNA, 22 nt, Human
agagccaggugcugcuguuuga

SEQ ID NO: 166148 - RNA, 22 nt, Human
ggcacucagagauucaggcugu

SEQ ID NO: 166149 - RNA, 22 nt, Human
agggcagcagcuccuccuagcu

SEQ ID NO: 166150 - RNA, 22 nt, Human
uccucaggagagcuccuaugcc

SEQ ID NO: 166151 - RNA, 22 nt, Human
ucauuucuccgaccugcugucc

SEQ ID NO: 166152 - RNA, 18 nt, Human
cuuguucuucucuuggcg

SEQ ID NO: 166153 - RNA, 21 nt, Human
ugggaugggucugggaccagc

SEQ ID NO: 166154 - RNA, 22 nt, Human
uaaagguacgaagugagggauu

SEQ ID NO: 166155 - RNA, 22 nt, Human
cucuuaguuuaucuuugacaaa

SEQ ID NO: 166156 - RNA, 22 nt, Human
uuauuuauuguguaccuacugu

SEQ ID NO: 166157 - RNA, 22 nt, Human
ggcuucugguaaagaccacacc

SEQ ID NO: 166158 - RNA, 22 nt, Human
aaaaugugaucuacaaaugcaa

SEQ ID NO: 166159 - RNA, 22 nt, Human
gucucagaccacccucuuuggc

SEQ ID NO: 166160 - RNA, 22 nt, Human
uaaggcacuucaauguuuagaa

SEQ ID NO: 166161 - RNA, 22 nt, Human
uuggaaggagucaaccagcuga

SEQ ID NO: 166162 - RNA, 22 nt, Human
gcacacagccagcugagggcua

SEQ ID NO: 166163 - RNA, 22 nt, Human
acagcaagccagcuugucacug

SEQ ID NO: 166164 - RNA, 22 nt, Human
uccaguggcacuggagacuaga

SEQ ID NO: 166165 - RNA, 22 nt, Human
ggcugccagugagugcagaccg

SEQ ID NO: 166166 - RNA, 21 nt, Human
aggugcagagccagggaccag

SEQ ID NO: 166167 - RNA, 20 nt, Human
uuucagugguuugugccuag

SEQ ID NO: 166168 - RNA, 22 nt, Human
cagcccugagagaaccaucuau

SEQ ID NO: 166169 - RNA, 22 nt, Human
ccucccucuguuagagcugucu

SEQ ID NO: 166170 - RNA, 22 nt, Human
ugaaggcuguuggauggggaag

SEQ ID NO: 166171 - RNA, 22 nt, Human
caguguccucagccagcagcua

SEQ ID NO: 166172 - RNA, 22 nt, Human
gggaaggagccugcuugcuaga

SEQ ID NO: 166173 - RNA, 22 nt, Human
aacagaaaucauuuagggcucu

SEQ ID NO: 166174 - RNA, 22 nt, Human
aagcuccccgaaacccaccucu

SEQ ID NO: 166175 - RNA, 22 nt, Human
agcagcaggagccgugggguga

SEQ ID NO: 166176 - RNA, 22 nt, Human
gcagaagggaauaaggagcuuu

SEQ ID NO: 166177 - RNA, 22 nt, Human
ccaggcugccgaggaaagaaag

SEQ ID NO: 166178 - RNA, 22 nt, Human
aggcugcagaacagucaggugc

SEQ ID NO: 166179 - RNA, 22 nt, Human
cauguacauucuguagauggag

SEQ ID NO: 166180 - RNA, 22 nt, Human
uuccucuccucacaugagucac

SEQ ID NO: 166181 - RNA, 22 nt, Human
acaggcucuggggcaggauggc

SEQ ID NO: 166182 - RNA, 22 nt, Human
agacuucucaguuuuauuagua

SEQ ID NO: 166183 - RNA, 22 nt, Human
ucagagaacacagaggugaugu

SEQ ID NO: 166184 - RNA, 22 nt, Human
ucccagcagggccgaccagccu

SEQ ID NO: 166185 - RNA, 22 nt, Human
ccucugccaccucccacgaggc

SEQ ID NO: 166186 - RNA, 22 nt, Human
ggccaggagcaagccaggcucu

SEQ ID NO: 166187 - RNA, 22 nt, Human
uggggcugaggagccucacucu

SEQ ID NO: 166188 - RNA, 20 nt, Human
ggcucuggaaucuggugggc

SEQ ID NO: 166189 - RNA, 22 nt, Human
ugugcccauuacacagaggcau

SEQ ID NO: 166190 - RNA, 22 nt, Human
ucucagagcuucagaaagcacc

SEQ ID NO: 166191 - RNA, 22 nt, Human
ggcagccauacucagaccuggg

SEQ ID NO: 166192 - RNA, 22 nt, Human
cuugggagacacaagaagacau

SEQ ID NO: 166193 - RNA, 22 nt, Human
gcauuauuaauagcugcaugag

SEQ ID NO: 166194 - RNA, 22 nt, Human
auacagaagaacuauagccacu

SEQ ID NO: 166195 - RNA, 22 nt, Human
guuccaggcaagugggauagga

SEQ ID NO: 166196 - RNA, 22 nt, Human
uguauguaaaguuuguaauaga

SEQ ID NO: 166197 - RNA, 22 nt, Human
gcaggaguuaggcgucguggau

SEQ ID NO: 166198 - RNA, 22 nt, Human
gaggugggagggcagucccuaa

SEQ ID NO: 166199 - RNA, 22 nt, Human
ucuuguccuaagagcuggauuc

SEQ ID NO: 166200 - RNA, 22 nt, Human
uggaggaugccauccaggauac

SEQ ID NO: 166201 - RNA, 22 nt, Human
cagaggccuuucuacagugaua

SEQ ID NO: 166202 - RNA, 22 nt, Human
gaggggcugcccuggugucagg

SEQ ID NO: 166203 - RNA, 22 nt, Human
ggagggugcauuuuacccugug

SEQ ID NO: 166204 - RNA, 22 nt, Human
cuacccaggcuggagugcagua

SEQ ID NO: 166205 - RNA, 22 nt, Human
cagagccugcucacgucucugu

SEQ ID NO: 166206 - RNA, 18 nt, Human
uggacaggguggagaaaa

SEQ ID NO: 166207 - RNA, 22 nt, Human
gagagcuggauucuggauaggu

SEQ ID NO: 166208 - RNA, 22 nt, Human
agcugagcuaguaguuccagug

SEQ ID NO: 166209 - RNA, 23 nt, Human
ucccagccucuucucuugcauac

SEQ ID NO: 166210 - RNA, 22 nt, Human
agaggaugauuuuaaggacacu

SEQ ID NO: 166211 - RNA, 22 nt, Human
cugucccagauguucucagcac

SEQ ID NO: 166212 - RNA, 22 nt, Human
cuauuucugccuaaugaccugu

SEQ ID NO: 166213 - RNA, 22 nt, Human
agaggccaucugcucugugggg

SEQ ID NO: 166214 - RNA, 22 nt, Human
agggauguaaauucuucuucuu

SEQ ID NO: 166215 - RNA, 22 nt, Human
cugaaggagguagagugacaua

SEQ ID NO: 166216 - RNA, 22 nt, Human
cauuagaagaacaguuauauua

SEQ ID NO: 166217 - RNA, 22 nt, Human
uguuccaugucuuuguaggacu

SEQ ID NO: 166218 - RNA, 22 nt, Human
gacagcagggacauguaggaag

SEQ ID NO: 166219 - RNA, 22 nt, Human
cuguauuuucaugccuacguac

SEQ ID NO: 166220 - RNA, 22 nt, Human
acauucuagaagucuuugcaau

SEQ ID NO: 166221 - RNA, 22 nt, Human
acguguucaauuuccaucugac

SEQ ID NO: 166222 - RNA, 22 nt, Human
cugccucuauucacugaggcag

SEQ ID NO: 166223 - RNA, 22 nt, Human
cugccugugcaugcagucagaa

SEQ ID NO: 166224 - RNA, 22 nt, Human
ucuggcucuauaacuccuagcu

SEQ ID NO: 166225 - RNA, 22 nt, Human
cugcucuggcguacucggcauc

SEQ ID NO: 166226 - RNA, 22 nt, Human
uggguggaauaaaucaguucug

SEQ ID NO: 166227 - RNA, 20 nt, Human
uugcagcagugaggugaagg

SEQ ID NO: 166228 - RNA, 22 nt, Human
agcugcugagagucugccgggc

SEQ ID NO: 166229 - RNA, 22 nt, Human
cuuuggcaaugaaacacaagaa

SEQ ID NO: 166230 - RNA, 22 nt, Human
uucacauugguucuugauagcu

SEQ ID NO: 166231 - RNA, 22 nt, Human
caggccugucugcacaugaggc

SEQ ID NO: 166232 - RNA, 22 nt, Human
agugucugaaccaccggggcau

SEQ ID NO: 166233 - RNA, 22 nt, Human
cucucugggggccaugccaaga

SEQ ID NO: 166234 - RNA, 22 nt, Human
caggggcaagaaugcugucagc

SEQ ID NO: 166235 - RNA, 22 nt, Human
ucugaggcuauguucaggcuaa

SEQ ID NO: 166236 - RNA, 22 nt, Human
uggcccugaggacccagugugg

SEQ ID NO: 166237 - RNA, 22 nt, Human
cagggccuucguaaguguccgg

SEQ ID NO: 166238 - RNA, 23 nt, Human
ugggcaucuccucugugccaggc

SEQ ID NO: 166239 - RNA, 22 nt, Human
uuacaguaugaucaacuuuuca

SEQ ID NO: 166240 - RNA, 22 nt, Human
uuugacaguaauaaagcacaag

SEQ ID NO: 166241 - RNA, 22 nt, Human
ggcuggaaaagacaaagcuauu

SEQ ID NO: 166242 - RNA, 23 nt, Human
agaugaaagcuucccaucacagu

SEQ ID NO: 166243 - RNA, 22 nt, Human
aggggagcuaacaccagagccc

SEQ ID NO: 166244 - RNA, 22 nt, Human
acauuguagacuuuucauaugu

SEQ ID NO: 166245 - RNA, 22 nt, Human
uggcagcaauuagcuagagcug

SEQ ID NO: 166246 - RNA, 22 nt, Human
uggcagcagggccccuggagga

SEQ ID NO: 166247 - RNA, 22 nt, Human
acagccuguuugaucuggugcu

SEQ ID NO: 166248 - RNA, 22 nt, Human
gccagacacuccccugggcagg

SEQ ID NO: 166249 - RNA, 22 nt, Human
aagcugccagauucagucugcu

SEQ ID NO: 166250 - RNA, 22 nt, Human
uggcagagucucuccuuuccag

SEQ ID NO: 166251 - RNA, 22 nt, Human
agcuucucaggagucugaggca

SEQ ID NO: 166252 - RNA, 22 nt, Human
uggcuuccuccagagcaggagg

SEQ ID NO: 166253 - RNA, 22 nt, Human
gaaaagagaacaucugaggauc

SEQ ID NO: 166254 - RNA, 17 nt, Human
cucagaguugcuuuguc

SEQ ID NO: 166255 - RNA, 22 nt, Human
agccaggggauucaucagggac

SEQ ID NO: 166256 - RNA, 22 nt, Human
ugccucugguuaucugguaccu

SEQ ID NO: 166257 - RNA, 22 nt, Human
cacagguguaugaauaugucca

SEQ ID NO: 166258 - RNA, 22 nt, Human
acugucugcaaaacucauacuc

SEQ ID NO: 166259 - RNA, 22 nt, Human
uauuauguagaguaaggguuaa

SEQ ID NO: 166260 - RNA, 22 nt, Human
agcuggaggauaacucacuucu

SEQ ID NO: 166261 - RNA, 22 nt, Human
caguugcuacaguucaagugug

SEQ ID NO: 166262 - RNA, 22 nt, Human
ucagccugcgucauggugacac

SEQ ID NO: 166263 - RNA, 22 nt, Human
gcaggggcuacucugagcuucc

SEQ ID NO: 166264 - RNA, 22 nt, Human
agcagcugguaggaguggccac

SEQ ID NO: 166265 - RNA, 22 nt, Human
ucaugcacaugugucaccauca

SEQ ID NO: 166266 - RNA, 17 nt, Human
cuggagccaagagggcc

SEQ ID NO: 166267 - RNA, 22 nt, Human
ugccagcccaccuuggggccuc

SEQ ID NO: 166268 - RNA, 22 nt, Human
guguaucaaagcacagacuuca

SEQ ID NO: 166269 - RNA, 18 nt, Human
gagcccugagucugcaca

SEQ ID NO: 166270 - RNA, 22 nt, Human
gccacagggcagaugcgcagag

SEQ ID NO: 166271 - RNA, 22 nt, Human
ucaggugggaccugcuaggaca

SEQ ID NO: 166272 - RNA, 22 nt, Human
aauuugcaugaugagaacaaua

SEQ ID NO: 166273 - RNA, 22 nt, Human
auggaaagcuaagccauuuacc

SEQ ID NO: 166274 - RNA, 22 nt, Human
caggccuggcccccggcacacc

SEQ ID NO: 166275 - RNA, 22 nt, Human
gacaugcaacaauuuggcauuu

SEQ ID NO: 166276 - RNA, 20 nt, Human
gugccuggagaagaggcugu

SEQ ID NO: 166277 - RNA, 22 nt, Human
gagauucuguagucaggcaucu

SEQ ID NO: 166278 - RNA, 22 nt, Human
uaaauucuacaacuucaaagau

SEQ ID NO: 166279 - RNA, 22 nt, Human
ugcagaagauggucugagcacc

SEQ ID NO: 166280 - RNA, 22 nt, Human
agggcacaagacucugagcccc

SEQ ID NO: 166281 - RNA, 18 nt, Human
gcagcugacacuggaguu

SEQ ID NO: 166282 - RNA, 22 nt, Human
caggccucccggugcacacuga

SEQ ID NO: 166283 - RNA, 22 nt, Human
ucucagaguuugaaucuggagu

SEQ ID NO: 166284 - RNA, 22 nt, Human
acccagagcugggcuuggcaaa

SEQ ID NO: 166285 - RNA, 22 nt, Human
ggagcugucuguagggcacagg

SEQ ID NO: 166286 - RNA, 17 nt, Human
ggccuguguggcugcag

SEQ ID NO: 166287 - RNA, 22 nt, Human
uacauguaagacaugagacucu

SEQ ID NO: 166288 - RNA, 22 nt, Human
ggagccuguuaguugagugcuc

SEQ ID NO: 166289 - RNA, 22 nt, Human
gccaggcuguuuuuauuacugu

SEQ ID NO: 166290 - RNA, 22 nt, Human
ucccagcagagccagcaagccg

SEQ ID NO: 166291 - RNA, 22 nt, Human
ggcagcuguggacgucgucauu

SEQ ID NO: 166292 - RNA, 22 nt, Human
gcugucaguuuuacccacagac

SEQ ID NO: 166293 - RNA, 22 nt, Human
acauuucucccugcaugccugc

SEQ ID NO: 166294 - RNA, 22 nt, Human
ugccagcaguagcaguaggcca

SEQ ID NO: 166295 - RNA, 22 nt, Human
ucugagagguuaagcaauuuga

SEQ ID NO: 166296 - RNA, 22 nt, Human
ucaggcagaccaccgugggcag

SEQ ID NO: 166297 - RNA, 18 nt, Human
gcaggagauggguggggu

SEQ ID NO: 166298 - RNA, 22 nt, Human
agccuguggaucccugcacugg

SEQ ID NO: 166299 - RNA, 21 nt, Human
agucccaggggugagugaugu

SEQ ID NO: 166300 - RNA, 20 nt, Human
cacagcuugccuuuuaugac

SEQ ID NO: 166301 - RNA, 22 nt, Human
gcagcagagcuuuguccuggcu

SEQ ID NO: 166302 - RNA, 22 nt, Human
cagggccuccccggcagucuuu

SEQ ID NO: 166303 - RNA, 22 nt, Human
cacuggugacuucugagcugga

SEQ ID NO: 166304 - RNA, 22 nt, Human
cccugcagcuuuugcauaguca

SEQ ID NO: 166305 - RNA, 22 nt, Human
ccagagccggcucccucagcuu

SEQ ID NO: 166306 - RNA, 22 nt, Human
gagaggccaaaaucccugcccc

SEQ ID NO: 166307 - RNA, 22 nt, Human
uuaaacagagucugaaauguaa

SEQ ID NO: 166308 - RNA, 22 nt, Human
ugaaaucugcaugcaaaguccu

SEQ ID NO: 166309 - RNA, 22 nt, Human
gggucucucucggcuccacgcg

SEQ ID NO: 166310 - RNA, 22 nt, Human
ugucauugaggaaaacuaggug

SEQ ID NO: 166311 - RNA, 22 nt, Human
ucuuuccucugagcuccuguag

SEQ ID NO: 166312 - RNA, 23 nt, Human
ucagagaaguuguaggcugggga

SEQ ID NO: 166313 - RNA, 22 nt, Human
aggagugcaaauaguccagaga

SEQ ID NO: 166314 - RNA, 22 nt, Human
cucccagagaccaagcugagaa

SEQ ID NO: 166315 - RNA, 22 nt, Human
caggccucagagaguggcgggg

SEQ ID NO: 166316 - RNA, 22 nt, Human
agccuccaaaugucaggucccg

SEQ ID NO: 166317 - RNA, 22 nt, Human
cuguggcuuucucugccuccuu

SEQ ID NO: 166318 - RNA, 22 nt, Human
ccugggugacccgugagcgucc

SEQ ID NO: 166319 - RNA, 22 nt, Human
acacagggcugcgccugacccc

SEQ ID NO: 166320 - RNA, 22 nt, Human
uaugcacauugguuuccucauu

SEQ ID NO: 166321 - RNA, 22 nt, Human
agauacaucuugaacuucuaga

SEQ ID NO: 166322 - RNA, 22 nt, Human
auuugagaugguaaauaacuuu

SEQ ID NO: 166323 - RNA, 22 nt, Human
agagaauuuuaaaagccuugaa

SEQ ID NO: 166324 - RNA, 22 nt, Human
augcauaauguauguauugacu

SEQ ID NO: 166325 - RNA, 22 nt, Human
gccagagccggcuucacaggau

SEQ ID NO: 166326 - RNA, 22 nt, Human
gucccagggaagaaggcagcac

SEQ ID NO: 166327 - RNA, 22 nt, Human
cagcucucacacccuccuccca

SEQ ID NO: 166328 - RNA, 22 nt, Human
ucccagccacagguguagcccu

SEQ ID NO: 166329 - RNA, 22 nt, Human
ucucugggugauggcagggcac

SEQ ID NO: 166330 - RNA, 22 nt, Human
cagggccuuauccugccauuga

SEQ ID NO: 166331 - RNA, 22 nt, Human
ucuccuuuaagauuuccucagg

SEQ ID NO: 166332 - RNA, 22 nt, Human
ugggcagcagcaaagccagacu

SEQ ID NO: 166333 - RNA, 22 nt, Human
ggugcagaucuuucucuucagg

SEQ ID NO: 166334 - RNA, 17 nt, Human
uguggccuucugagcuu

SEQ ID NO: 166335 - RNA, 22 nt, Human
ugaggcucaaggucugguggag

SEQ ID NO: 166336 - RNA, 22 nt, Human
gcacugaaauuauaugcauuug

SEQ ID NO: 166337 - RNA, 22 nt, Human
uguggccuggaaggggcugcuc

SEQ ID NO: 166338 - RNA, 22 nt, Human
agauuguagaaacuguagcauu

SEQ ID NO: 166339 - RNA, 17 nt, Human
ugccagccugucccagg

SEQ ID NO: 166340 - RNA, 22 nt, Human
aggccagguuccucaaucuuga

SEQ ID NO: 166341 - RNA, 22 nt, Human
cauugcacugcagcccgggcaa

SEQ ID NO: 166342 - RNA, 22 nt, Human
ucuccuucgaggcccagcuccc

SEQ ID NO: 166343 - RNA, 20 nt, Human
acauugauuauguuuguaga

SEQ ID NO: 166344 - RNA, 22 nt, Human
gccuucugugcuccuggccuuu

SEQ ID NO: 166345 - RNA, 22 nt, Human
uaacagaaaggcucaggugcuc

SEQ ID NO: 166346 - RNA, 20 nt, Human
agcccuguuuccuggagaga

SEQ ID NO: 166347 - RNA, 22 nt, Human
ggccuugggauguggcugcagc

SEQ ID NO: 166348 - RNA, 23 nt, Human
aaaguugauuugcaguuuaagag

SEQ ID NO: 166349 - RNA, 22 nt, Human
gccaggcucucagugacugccc

SEQ ID NO: 166350 - RNA, 22 nt, Human
agcaggagcccuuaucaccagg

SEQ ID NO: 166351 - RNA, 22 nt, Human
guuugcauauuugcacaggaau

SEQ ID NO: 166352 - RNA, 22 nt, Human
uggagcaggcaucuuucucucu

SEQ ID NO: 166353 - RNA, 22 nt, Human
uccaggcuggacaugaggcggg

SEQ ID NO: 166354 - RNA, 22 nt, Human
ggcugccugaggcugaggcccg

SEQ ID NO: 166355 - RNA, 22 nt, Human
ggccucugcccucacuccuguc

SEQ ID NO: 166356 - RNA, 22 nt, Human
agcagcaugaugacagagucuc

SEQ ID NO: 166357 - RNA, 22 nt, Human
uuagaaaucaccucugaagauc

SEQ ID NO: 166358 - RNA, 22 nt, Human
gcagggcucaacaggacacccc

SEQ ID NO: 166359 - RNA, 22 nt, Human
gcaggagccaggccgagcuggu

SEQ ID NO: 166360 - RNA, 22 nt, Human
gggacuggcacagggcugggag

SEQ ID NO: 166361 - RNA, 22 nt, Human
caaggaaaacagaugaucaaca

SEQ ID NO: 166362 - RNA, 22 nt, Human
uagugaaacaguuaucaaucug

SEQ ID NO: 166363 - RNA, 22 nt, Human
aaagaaauagauggcauuuaaa

SEQ ID NO: 166364 - RNA, 22 nt, Human
cagcuucugagcaagccagggg

SEQ ID NO: 166365 - RNA, 19 nt, Human
gcaggguguugacuguccc

SEQ ID NO: 166366 - RNA, 23 nt, Human
ugccucugccucccuagucugca

SEQ ID NO: 166367 - RNA, 17 nt, Human
gcuuccugugcugggga

SEQ ID NO: 166368 - RNA, 22 nt, Human
caagcccaggauuccccaguua

SEQ ID NO: 166369 - RNA, 22 nt, Human
ugaggccaaugacccugggcag

SEQ ID NO: 166370 - RNA, 22 nt, Human
ggcauggcucggagucagaaca

SEQ ID NO: 166371 - RNA, 22 nt, Human
aauguguacaugacagauagaa

SEQ ID NO: 166372 - RNA, 22 nt, Human
agagcuggauggucaagauggc

SEQ ID NO: 166373 - RNA, 22 nt, Human
acacagggcagagagcuggcuc

SEQ ID NO: 166374 - RNA, 22 nt, Human
cagguggcuucucccuaggcca

SEQ ID NO: 166375 - RNA, 22 nt, Human
aguuuuuccguggcuacgauaa

SEQ ID NO: 166376 - RNA, 22 nt, Human
aaaaguaauugaugcaaucgua

SEQ ID NO: 166377 - RNA, 22 nt, Human
cagugcaguugguggcaggggu

SEQ ID NO: 166378 - RNA, 22 nt, Human
gccaggugcuaucccugcgcug

SEQ ID NO: 166379 - RNA, 22 nt, Human
cugggcacaggggagcagaguc

SEQ ID NO: 166380 - RNA, 22 nt, Human
cagggcaguaacgggaacaucu

SEQ ID NO: 166381 - RNA, 22 nt, Human
ugagccaggcucaagugauccu

SEQ ID NO: 166382 - RNA, 22 nt, Human
auuuuuaugacaaaccauccuc

SEQ ID NO: 166383 - RNA, 22 nt, Human
accuggcacuacaggcaccugu

SEQ ID NO: 166384 - RNA, 22 nt, Human
agccuggccugggcaggcacau

SEQ ID NO: 166385 - RNA, 22 nt, Human
ccccagcucagugcagggacau

SEQ ID NO: 166386 - RNA, 22 nt, Human
ucagagccccuccgcuguccca

SEQ ID NO: 166387 - RNA, 22 nt, Human
agugcugaagacuggcuaggga

SEQ ID NO: 166388 - RNA, 22 nt, Human
gagcuucccucugcagucccug

SEQ ID NO: 166389 - RNA, 22 nt, Human
aggcccuguuaugagccacugu

SEQ ID NO: 166390 - RNA, 21 nt, Human
uggcacugcuuagcagguucc

SEQ ID NO: 166391 - RNA, 22 nt, Human
uaaaucucacuggguauauugg

SEQ ID NO: 166392 - RNA, 22 nt, Human
gcccucucuucugcagccucca

SEQ ID NO: 166393 - RNA, 22 nt, Human
aggccuggccugggcggcauug

SEQ ID NO: 166394 - RNA, 22 nt, Human
ugccugucucugacugccauua

SEQ ID NO: 166395 - RNA, 22 nt, Human
cacagccugcugcacucaagaa

SEQ ID NO: 166396 - RNA, 22 nt, Human
auguccuuugcuucucuggucc

SEQ ID NO: 166397 - RNA, 22 nt, Human
accaucaguacuggaugcugac

SEQ ID NO: 166398 - RNA, 22 nt, Human
cuccaggggccagaagccuggc

SEQ ID NO: 166399 - RNA, 19 nt, Human
gccucugcuggggacaggc

SEQ ID NO: 166400 - RNA, 22 nt, Human
uggcacugccaaccugcuaggu

SEQ ID NO: 166401 - RNA, 23 nt, Human
ggccucuguguucugcccacaug

SEQ ID NO: 166402 - RNA, 22 nt, Human
gcauuuagcuuuaaaauauuuc

SEQ ID NO: 166403 - RNA, 22 nt, Human
caguggugaagagcaggggcuc

SEQ ID NO: 166404 - RNA, 22 nt, Human
agagcugugcuuugcaccacgu

SEQ ID NO: 166405 - RNA, 23 nt, Human
auuugagaaaguauuuuuaagac

SEQ ID NO: 166406 - RNA, 22 nt, Human
ccugugaggucaucugugguaa

SEQ ID NO: 166407 - RNA, 22 nt, Human
cugugucccaguaccuugggua

SEQ ID NO: 166408 - RNA, 22 nt, Human
aacaaauguaaaaugcagaugc

SEQ ID NO: 166409 - RNA, 22 nt, Human
cagcuggcgggcagagccgcca

SEQ ID NO: 166410 - RNA, 22 nt, Human
acguuuucagugacugugcuuc

SEQ ID NO: 166411 - RNA, 22 nt, Human
gccagagccacuuuugggugau

SEQ ID NO: 166412 - RNA, 22 nt, Human
uaggccagaggagcagcuuugg

SEQ ID NO: 166413 - RNA, 22 nt, Human
agaaugcaagauaaacuuuauu

SEQ ID NO: 166414 - RNA, 22 nt, Human
aggccugagguuccugugcuca

SEQ ID NO: 166415 - RNA, 22 nt, Human
caguaugagaguugaaucaagg

SEQ ID NO: 166416 - RNA, 22 nt, Human
cacagggccuugugugacugca

SEQ ID NO: 166417 - RNA, 22 nt, Human
aaaggucaaaaucgugacauug

SEQ ID NO: 166418 - RNA, 22 nt, Human
cugcccugcuugaugacagcga

SEQ ID NO: 166419 - RNA, 22 nt, Human
gcagcuggcccugacacgcaga

SEQ ID NO: 166420 - RNA, 22 nt, Human
ugcuuccugaggccgucuucuc

SEQ ID NO: 166421 - RNA, 22 nt, Human
agccucugcuggcccuggcacu

SEQ ID NO: 166422 - RNA, 22 nt, Human
cagcuugggucaggugccugcu

SEQ ID NO: 166423 - RNA, 22 nt, Human
cugugugcugaaaugcagugag

SEQ ID NO: 166424 - RNA, 22 nt, Human
agguggggccaaaugcuacagu

SEQ ID NO: 166425 - RNA, 17 nt, Human
cugucugcgcaugaggu

SEQ ID NO: 166426 - RNA, 22 nt, Human
cugcucuguuucuuagcugggu

SEQ ID NO: 166427 - RNA, 22 nt, Human
cugccuggagcauucugaaggu

SEQ ID NO: 166428 - RNA, 22 nt, Human
caggaaagggaugggcugccac

SEQ ID NO: 166429 - RNA, 22 nt, Human
aaaucugggucaagguggagug

SEQ ID NO: 166430 - RNA, 22 nt, Human
ugucaugcuuauguuacauacu

SEQ ID NO: 166431 - RNA, 22 nt, Human
ucauacaucuuguauaucuauc

SEQ ID NO: 166432 - RNA, 22 nt, Human
agggcaaguugagugugcgugg

SEQ ID NO: 166433 - RNA, 20 nt, Human
caaugcacacagcugcuucu

SEQ ID NO: 166434 - RNA, 22 nt, Human
gaggggcucuugggcaugaagg

SEQ ID NO: 166435 - RNA, 22 nt, Human
aguguccccuacagaggcauuc

SEQ ID NO: 166436 - RNA, 22 nt, Human
gccaggcuggucuugaacuccu

SEQ ID NO: 166437 - RNA, 22 nt, Human
gcucugugggugaguagaaucu

SEQ ID NO: 166438 - RNA, 22 nt, Human
ccuggcagucaggggaguccuu

SEQ ID NO: 166439 - RNA, 22 nt, Human
ccuggagguggagguugcagug

SEQ ID NO: 166440 - RNA, 22 nt, Human
aaagguaguacuucuagaaggg

SEQ ID NO: 166441 - RNA, 22 nt, Human
cagcaagauuuuuaaagcaagg

SEQ ID NO: 166442 - RNA, 22 nt, Human
caggggcuuaagugacagaagg

SEQ ID NO: 166443 - RNA, 22 nt, Human
gccuggugcuaugagggccagc

SEQ ID NO: 166444 - RNA, 22 nt, Human
ggcagcucaccucugguccagg

SEQ ID NO: 166445 - RNA, 22 nt, Human
gcagcugagcgugaggaagagu

SEQ ID NO: 166446 - RNA, 22 nt, Human
gcagauggugggggaggaguac

SEQ ID NO: 166447 - RNA, 22 nt, Human
gcucacuggccugaagaggacg

SEQ ID NO: 166448 - RNA, 22 nt, Human
ggccuggccuccagaugugggc

SEQ ID NO: 166449 - RNA, 22 nt, Human
ugauuuccugugcgcccuuagg

SEQ ID NO: 166450 - RNA, 22 nt, Human
ugcucugguccucccucggcgc

SEQ ID NO: 166451 - RNA, 22 nt, Human
gggccugugcacaguucuguua

SEQ ID NO: 166452 - RNA, 22 nt, Human
ggucaggggcugcucuacagag

SEQ ID NO: 166453 - RNA, 22 nt, Human
ugaaaguugcacauaagagaau

SEQ ID NO: 166454 - RNA, 22 nt, Human
guuauaaaggugauaaugguca

SEQ ID NO: 166455 - RNA, 22 nt, Human
ccaggaggcagaaguugcagug

SEQ ID NO: 166456 - RNA, 22 nt, Human
cucuggaauguuuacaugcccu

SEQ ID NO: 166457 - RNA, 22 nt, Human
uacuuccagcaaucugcauauu

SEQ ID NO: 166458 - RNA, 22 nt, Human
uucaaucauuagaaucucaggc

SEQ ID NO: 166459 - RNA, 22 nt, Human
caggaugggugucggccagcac

SEQ ID NO: 166460 - RNA, 17 nt, Human
agagagagcaugccacc

SEQ ID NO: 166461 - RNA, 23 nt, Human
ucucagaggauuccugggccuug

SEQ ID NO: 166462 - RNA, 22 nt, Human
gaggccugucgcuaggccucug

SEQ ID NO: 166463 - RNA, 22 nt, Human
gcuuucucuucacugauguuca

SEQ ID NO: 166464 - RNA, 22 nt, Human
ggagaugguggaagcuggugca

SEQ ID NO: 166465 - RNA, 22 nt, Human
agaaugcuccagagcugaaaga

SEQ ID NO: 166466 - RNA, 22 nt, Human
ugcagcagacugaguaugagaa

SEQ ID NO: 166467 - RNA, 18 nt, Human
gcagagugcgucucugug

SEQ ID NO: 166468 - RNA, 22 nt, Human
acagccagggcauugucgccga

SEQ ID NO: 166469 - RNA, 22 nt, Human
uggccugggugcugcugacauc

SEQ ID NO: 166470 - RNA, 22 nt, Human
agccacagggggugagggacaa

SEQ ID NO: 166471 - RNA, 22 nt, Human
gucauuguguggacauggagaa

SEQ ID NO: 166472 - RNA, 22 nt, Human
gagauauguuagaaagcuauug

SEQ ID NO: 166473 - RNA, 22 nt, Human
agguaaagacugcaaggagaau

SEQ ID NO: 166474 - RNA, 22 nt, Human
agcagccagugggagugauaca

SEQ ID NO: 166475 - RNA, 22 nt, Human
uauaguacauggaaucuucaua

SEQ ID NO: 166476 - RNA, 20 nt, Human
ucagccagcuaacaugggga

SEQ ID NO: 166477 - RNA, 22 nt, Human
gccugccuggagcuugagguga

SEQ ID NO: 166478 - RNA, 22 nt, Human
gacaggguacgggcuaggcaca

SEQ ID NO: 166479 - RNA, 22 nt, Human
cuggcuccaucacugggugaug

SEQ ID NO: 166480 - RNA, 22 nt, Human
aggacugggugcagagggcauc

SEQ ID NO: 166481 - RNA, 22 nt, Human
ggcccugugguuuugcaaaguc

SEQ ID NO: 166482 - RNA, 22 nt, Human
ucaguaacuuacuuauucaccu

SEQ ID NO: 166483 - RNA, 22 nt, Human
ugugcccaucccucuggagugu

SEQ ID NO: 166484 - RNA, 22 nt, Human
cucaggauuaaggaaucuaaau

SEQ ID NO: 166485 - RNA, 23 nt, Human
gaagcagaugucugaguaggcag

SEQ ID NO: 166486 - RNA, 22 nt, Human
aucuacaggauuuuacagaguu

SEQ ID NO: 166487 - RNA, 22 nt, Human
cagcugaguuacucugaggucu

SEQ ID NO: 166488 - RNA, 22 nt, Human
uccugucugucuuuggucccuu

SEQ ID NO: 166489 - RNA, 22 nt, Human
ugccaggcauauggccucuuug

SEQ ID NO: 166490 - RNA, 22 nt, Human
aaucaguuguccaaaguucaca

SEQ ID NO: 166491 - RNA, 22 nt, Human
cagagacaguuucacagggucu

SEQ ID NO: 166492 - RNA, 23 nt, Human
ucuccagugucucuucauugagu

SEQ ID NO: 166493 - RNA, 22 nt, Human
aaagaaggaccuggaggaggau

SEQ ID NO: 166494 - RNA, 22 nt, Human
ggccucugggguccugagccca

SEQ ID NO: 166495 - RNA, 22 nt, Human
cagccagggucaggcagcuucu

SEQ ID NO: 166496 - RNA, 22 nt, Human
cucacaggcaucucaucaggcu

SEQ ID NO: 166497 - RNA, 22 nt, Human
uguguuccugccuggcucuggu

SEQ ID NO: 166498 - RNA, 22 nt, Human
cccaggaggcagagcuugcagu

SEQ ID NO: 166499 - RNA, 22 nt, Human
cucaggauuuaaaggggcacuc

SEQ ID NO: 166500 - RNA, 22 nt, Human
ucagggcauacucuucaagguc

SEQ ID NO: 166501 - RNA, 21 nt, Human
uuucugucucugccacuaguu

SEQ ID NO: 166502 - RNA, 22 nt, Human
uggccugggucacaccaggguc

SEQ ID NO: 166503 - RNA, 22 nt, Human
uaguuauuauuguuacuaucag

SEQ ID NO: 166504 - RNA, 22 nt, Human
auauucacugagcauaaagcca

SEQ ID NO: 166505 - RNA, 22 nt, Human
ccuccagcugccucagucucuu

SEQ ID NO: 166506 - RNA, 22 nt, Human
aaggucauuguugcauguucuc

SEQ ID NO: 166507 - RNA, 22 nt, Human
agggaggagaauggacuccuuc

SEQ ID NO: 166508 - RNA, 22 nt, Human
ccugggagguggagguugcagu

SEQ ID NO: 166509 - RNA, 21 nt, Human
accagcaggagaucagaagga

SEQ ID NO: 166510 - RNA, 22 nt, Human
agcaccugcuuaaugugcagug

SEQ ID NO: 166511 - RNA, 22 nt, Human
auauguguauuugguuagccua

SEQ ID NO: 166512 - RNA, 22 nt, Human
ccauuguaguaucuguuuuagu

SEQ ID NO: 166513 - RNA, 22 nt, Human
auguaucaacaaauuguacagu

SEQ ID NO: 166514 - RNA, 18 nt, Human
cugaaggauccaggugua

SEQ ID NO: 166515 - RNA, 22 nt, Human
auggacagugugucuguuucca

SEQ ID NO: 166516 - RNA, 22 nt, Human
gggagccaugcuggucuucuuu

SEQ ID NO: 166517 - RNA, 19 nt, Human
uucacauuggaagaaguag

SEQ ID NO: 166518 - RNA, 18 nt, Human
aucuuuccauagcauguu

SEQ ID NO: 166519 - RNA, 22 nt, Human
accaucagucauugucaguggg

SEQ ID NO: 166520 - RNA, 22 nt, Human
gaggacagcuuagggcuuccug

SEQ ID NO: 166521 - RNA, 22 nt, Human
aaguuauaucaucucauugacg

SEQ ID NO: 166522 - RNA, 22 nt, Human
gugcuaggauuacaggcauggg

SEQ ID NO: 166523 - RNA, 22 nt, Human
agcugcucccuauccuuuccuu

SEQ ID NO: 166524 - RNA, 22 nt, Human
aaagguuaagguguucaagaaa

SEQ ID NO: 166525 - RNA, 18 nt, Human
cccagcccaccauuucuc

SEQ ID NO: 166526 - RNA, 22 nt, Human
ugccugucuuggaguccuggcc

SEQ ID NO: 166527 - RNA, 22 nt, Human
agggccugagcuggcugaccuc

SEQ ID NO: 166528 - RNA, 22 nt, Human
aaaucagucccucuuggaauuu

SEQ ID NO: 166529 - RNA, 22 nt, Human
agagcugaggauccagcugagc

SEQ ID NO: 166530 - RNA, 22 nt, Human
ggugacuggagggacccaggcc

SEQ ID NO: 166531 - RNA, 22 nt, Human
ugcugggcuagaagcugaggcc

SEQ ID NO: 166532 - RNA, 22 nt, Human
cucaggauauugggcuggagca

SEQ ID NO: 166533 - RNA, 22 nt, Human
auggcagcaaaugucuggcugg

SEQ ID NO: 166534 - RNA, 22 nt, Human
acaaaaguguaggaauuccuua

SEQ ID NO: 166535 - RNA, 22 nt, Human
ggaaggucgagcugcaucuggc

SEQ ID NO: 166536 - RNA, 22 nt, Human
ugucucugugacuccuuccgcc

SEQ ID NO: 166537 - RNA, 22 nt, Human
cuguguggccucaagccagccu

SEQ ID NO: 166538 - RNA, 22 nt, Human
gcccagcugcacccuggugggu

SEQ ID NO: 166539 - RNA, 22 nt, Human
cugggcuggagugcaauggcgc

SEQ ID NO: 166540 - RNA, 22 nt, Human
gugaggugggcuggccagagac

SEQ ID NO: 166541 - RNA, 22 nt, Human
cugcagugcaagcccagaugga

SEQ ID NO: 166542 - RNA, 22 nt, Human
uucaaugaggauagaacuggau

SEQ ID NO: 166543 - RNA, 23 nt, Human
aggaggccugaaacugaggcuga

SEQ ID NO: 166544 - RNA, 22 nt, Human
gaggcugcaggcaaugcugccc

SEQ ID NO: 166545 - RNA, 22 nt, Human
ggcagcuggccuccucgcccac

SEQ ID NO: 166546 - RNA, 22 nt, Human
aagaugauagaucugucaaugu

SEQ ID NO: 166547 - RNA, 22 nt, Human
ugggcagacauugaguuuguuc

SEQ ID NO: 166548 - RNA, 22 nt, Human
cagggcugugcccaucuucccc

SEQ ID NO: 166549 - RNA, 22 nt, Human
uuugaaaauuuaagugcuacac

SEQ ID NO: 166550 - RNA, 21 nt, Human
agguggggcugcaccucugcu

SEQ ID NO: 166551 - RNA, 19 nt, Human
uacauuuguguacacuugu

SEQ ID NO: 166552 - RNA, 22 nt, Human
ugcuggccaauggcagaggcgg

SEQ ID NO: 166553 - RNA, 22 nt, Human
caggaggaacaagagguucugg

SEQ ID NO: 166554 - RNA, 22 nt, Human
uucaagauggcugcaaauacuu

SEQ ID NO: 166555 - RNA, 22 nt, Human
gccugccuucggugcgcagcgg

SEQ ID NO: 166556 - RNA, 22 nt, Human
gcugcucuggcucugcaguguc

SEQ ID NO: 166557 - RNA, 22 nt, Human
gggcuggaggaccggccucgga

SEQ ID NO: 166558 - RNA, 22 nt, Human
uugaaaggcacaggcaccuggg

SEQ ID NO: 166559 - RNA, 22 nt, Human
aaugaugggaaggagaaaagca

SEQ ID NO: 166560 - RNA, 22 nt, Human
auuuuucucuccacuccauuaa

SEQ ID NO: 166561 - RNA, 22 nt, Human
ggaugcuggggaccaaucucug

SEQ ID NO: 166562 - RNA, 22 nt, Human
ugggcugcuuccucagcugaga

SEQ ID NO: 166563 - RNA, 22 nt, Human
gggcugcugccaccagguggau

SEQ ID NO: 166564 - RNA, 22 nt, Human
agagcuggaaucagaccucagg

SEQ ID NO: 166565 - RNA, 22 nt, Human
caggguacagaguuuucuaaac

SEQ ID NO: 166566 - RNA, 21 nt, Human
cucuggagucaagagcuucca

SEQ ID NO: 166567 - RNA, 22 nt, Human
agggcugcuauguugauucaga

SEQ ID NO: 166568 - RNA, 22 nt, Human
ucuucuuccucauuuauacaua

SEQ ID NO: 166569 - RNA, 22 nt, Human
cugggccucaaucucagaguuu

SEQ ID NO: 166570 - RNA, 22 nt, Human
gcacagaacuucucuuaguagg

SEQ ID NO: 166571 - RNA, 22 nt, Human
gaaaguuucuucauuaagaugu

SEQ ID NO: 166572 - RNA, 22 nt, Human
augccaggccccacgcugggca

SEQ ID NO: 166573 - RNA, 22 nt, Human
ucagcagaggggaaggcaucug

SEQ ID NO: 166574 - RNA, 22 nt, Human
ucuggcucauaggaaggccauu

SEQ ID NO: 166575 - RNA, 22 nt, Human
cagggccagagagggcuggcug

SEQ ID NO: 166576 - RNA, 22 nt, Human
cccagcucuuuuagcggcaucu

SEQ ID NO: 166577 - RNA, 22 nt, Human
ucagaggucccuagcaggagug

SEQ ID NO: 166578 - RNA, 22 nt, Human
uucaagaucuuccaaaggauac

SEQ ID NO: 166579 - RNA, 22 nt, Human
agggccagcacuccuggcagga

SEQ ID NO: 166580 - RNA, 22 nt, Human
guagcuuauuagggauaauagu

SEQ ID NO: 166581 - RNA, 22 nt, Human
ugcuggcuggccuggccuggac

SEQ ID NO: 166582 - RNA, 22 nt, Human
ugcaccugagaggucucugagg

SEQ ID NO: 166583 - RNA, 22 nt, Human
cagcuugcaguacuuguuuuug

SEQ ID NO: 166584 - RNA, 22 nt, Human
agauacauuguucuaagcauug

SEQ ID NO: 166585 - RNA, 22 nt, Human
caauaauauccugugcuguuug

SEQ ID NO: 166586 - RNA, 22 nt, Human
uuuccaauaaagugucauuguu

SEQ ID NO: 166587 - RNA, 19 nt, Human
uccucaggggcucacagac

SEQ ID NO: 166588 - RNA, 21 nt, Human
acaggcuuuagaaaaugacuc

SEQ ID NO: 166589 - RNA, 22 nt, Human
gaaauguguuguucauuucuaa

SEQ ID NO: 166590 - RNA, 22 nt, Human
ucugagaguagagcugccucuu

SEQ ID NO: 166591 - RNA, 22 nt, Human
ucugcagcuuuuugguggggug

SEQ ID NO: 166592 - RNA, 22 nt, Human
cccucccaggaguggccagaga

SEQ ID NO: 166593 - RNA, 22 nt, Human
accagccugucugagucguggg

SEQ ID NO: 166594 - RNA, 22 nt, Human
aaaugcacagaggccagagagg

SEQ ID NO: 166595 - RNA, 22 nt, Human
gcaggagcccuggcauguucuu

SEQ ID NO: 166596 - RNA, 22 nt, Human
gggaggcuggcucuggccacag

SEQ ID NO: 166597 - RNA, 22 nt, Human
cugucaguaggcucccaucauu

SEQ ID NO: 166598 - RNA, 22 nt, Human
gaggcugguaggaaaggaaaca

SEQ ID NO: 166599 - RNA, 22 nt, Human
cuguagcaaguuauucaauaaa

SEQ ID NO: 166600 - RNA, 22 nt, Human
ccuuggcuuaccuucugugugg

SEQ ID NO: 166601 - RNA, 22 nt, Human
aguguauucugcaugggagacu

SEQ ID NO: 166602 - RNA, 22 nt, Human
ugucuucauuccccaugaaguc

SEQ ID NO: 166603 - RNA, 22 nt, Human
ggcaucagcccgguccugggcu

SEQ ID NO: 166604 - RNA, 22 nt, Human
augcugccuccucuucagccgc

SEQ ID NO: 166605 - RNA, 22 nt, Human
accuuguuguagguacaaaaga

SEQ ID NO: 166606 - RNA, 23 nt, Human
cuguggaucuagagggggcccua

SEQ ID NO: 166607 - RNA, 22 nt, Human
gugaagaugccucaggugaccc

SEQ ID NO: 166608 - RNA, 19 nt, Human
ugcagcuguaugagcuuaa

SEQ ID NO: 166609 - RNA, 22 nt, Human
agggcacuuccucugggucccu

SEQ ID NO: 166610 - RNA, 22 nt, Human
uuaaaagaauccuguuauccuc

SEQ ID NO: 166611 - RNA, 22 nt, Human
uggcggugacggcggcgccugg

SEQ ID NO: 166612 - RNA, 22 nt, Human
agguggcagacuaacagaagga

SEQ ID NO: 166613 - RNA, 22 nt, Human
ccagguggacggcgaguacagg

SEQ ID NO: 166614 - RNA, 19 nt, Human
gcagcugugggaagagcca

SEQ ID NO: 166615 - RNA, 22 nt, Human
cagcuuuugcagacuucuugcc

SEQ ID NO: 166616 - RNA, 22 nt, Human
gcacugccugugagcccugguu

SEQ ID NO: 166617 - RNA, 22 nt, Human
ggcagguguuuuuauauuaaag

SEQ ID NO: 166618 - RNA, 22 nt, Human
caguguuuagcacagugcuugg

SEQ ID NO: 166619 - RNA, 22 nt, Human
ggcagguguggugaccagagau

SEQ ID NO: 166620 - RNA, 21 nt, Human
ucauccagguccugcuucuuc

SEQ ID NO: 166621 - RNA, 22 nt, Human
guuaaaugcagauucugacuca

SEQ ID NO: 166622 - RNA, 22 nt, Human
ugcaugcagcuggucgggcgcc

SEQ ID NO: 166623 - RNA, 18 nt, Human
uggcaugcuuugauacau

SEQ ID NO: 166624 - RNA, 22 nt, Human
uuacuguagcuugacauauguc

SEQ ID NO: 166625 - RNA, 22 nt, Human
ucuuccagauacuuccugacuu

SEQ ID NO: 166626 - RNA, 22 nt, Human
ugacauccuacaccccuggguc

SEQ ID NO: 166627 - RNA, 21 nt, Human
gcugcucgagauccagugcuu

SEQ ID NO: 166628 - RNA, 22 nt, Human
ccacuuugagaagcugaugaaa

SEQ ID NO: 166629 - RNA, 18 nt, Human
uggucacuguggauagug

SEQ ID NO: 166630 - RNA, 22 nt, Human
aacacauggcaagagcaggaaa

SEQ ID NO: 166631 - RNA, 22 nt, Human
uagugucuuccaggacauggua

SEQ ID NO: 166632 - RNA, 22 nt, Human
cuggagggcugcagcgaggcug

SEQ ID NO: 166633 - RNA, 16 nt, Human
gcagguggggcgcgca

SEQ ID NO: 166634 - RNA, 22 nt, Human
ucaccucucuggccgucuaccu

SEQ ID NO: 166635 - RNA, 22 nt, Human
uuugacuccuguguuucuggaa

SEQ ID NO: 166636 - RNA, 22 nt, Human
cucagcaacccacacacggucu

SEQ ID NO: 166637 - RNA, 22 nt, Human
agguggcuaugaggaugcaguc

SEQ ID NO: 166638 - RNA, 22 nt, Human
uguaauguuagaaacaauugcu

SEQ ID NO: 166639 - RNA, 22 nt, Human
guccuggugcuggucauugucg

SEQ ID NO: 166640 - RNA, 22 nt, Human
cacaauuuccauugagcagcag

SEQ ID NO: 166641 - RNA, 22 nt, Human
gauggcgguggccaccuccuug

SEQ ID NO: 166642 - RNA, 22 nt, Human
acugugacugugucuucugggc

SEQ ID NO: 166643 - RNA, 22 nt, Human
uaguguguggucucucccuugu

SEQ ID NO: 166644 - RNA, 22 nt, Human
guguuuugugaggccuucuuuc

SEQ ID NO: 166645 - RNA, 20 nt, Human
uucaugcagugguugcugug

SEQ ID NO: 166646 - RNA, 22 nt, Human
cagcugcucugguggucucucc

SEQ ID NO: 166647 - RNA, 22 nt, Human
gugcaggugguuggcccagccg

SEQ ID NO: 166648 - RNA, 22 nt, Human
ucaucuccauacggucucgcag

SEQ ID NO: 166649 - RNA, 22 nt, Human
uaauucuagauugacauuuuga

SEQ ID NO: 166650 - RNA, 22 nt, Human
cagggcuccccagagagccucu

SEQ ID NO: 166651 - RNA, 22 nt, Human
uaggcacugguuguggauaguu

SEQ ID NO: 166652 - RNA, 22 nt, Human
ccuguacuuguauuaaaggucc

SEQ ID NO: 166653 - RNA, 22 nt, Human
uaacuaggauuacaagcgugcg

SEQ ID NO: 166654 - RNA, 18 nt, Human
agggcugaugaguuuggg

SEQ ID NO: 166655 - RNA, 22 nt, Human
cuucuucagaggccagccucug

SEQ ID NO: 166656 - RNA, 22 nt, Human
uugcaggucuggggguccuggu

SEQ ID NO: 166657 - RNA, 22 nt, Human
aucugccuggcuccaggugagc

SEQ ID NO: 166658 - RNA, 22 nt, Human
uguccuguccuuccuggaaguc

SEQ ID NO: 166659 - RNA, 20 nt, Human
ccagguggugccuggagagg

SEQ ID NO: 166660 - RNA, 22 nt, Human
ugucaaguuguuaaguucuggg

SEQ ID NO: 166661 - RNA, 22 nt, Human
cugggugagcuggccagagggu

SEQ ID NO: 166662 - RNA, 22 nt, Human
uucaaacacugcuuugagaggg

SEQ ID NO: 166663 - RNA, 23 nt, Human
cagcugguugugggaguggcugc

SEQ ID NO: 166664 - RNA, 22 nt, Human
agguuaggaaugggagguaaug

SEQ ID NO: 166665 - RNA, 22 nt, Human
ugcugcacuuauggcucugagg

SEQ ID NO: 166666 - RNA, 17 nt, Human
uuucugcaugauuggac

SEQ ID NO: 166667 - RNA, 22 nt, Human
acaguguuacuugauaguguau

SEQ ID NO: 166668 - RNA, 22 nt, Human
gccagagggauuccuggugugu

SEQ ID NO: 166669 - RNA, 22 nt, Human
gguggcaagggcagccaguaac

SEQ ID NO: 166670 - RNA, 22 nt, Human
uuucugcagcagacucagugug

SEQ ID NO: 166671 - RNA, 22 nt, Human
uggcagugugggaggaagguac

SEQ ID NO: 166672 - RNA, 22 nt, Human
cagguuagcaacaugguuagag

SEQ ID NO: 166673 - RNA, 22 nt, Human
ccucuucagcaaaguucggccc

SEQ ID NO: 166674 - RNA, 22 nt, Human
ucucugguuaugucauuaagca

SEQ ID NO: 166675 - RNA, 22 nt, Human
gaucggguggguucugccauca

SEQ ID NO: 166676 - RNA, 22 nt, Human
ggcuggccuguguggccgccac

SEQ ID NO: 166677 - RNA, 22 nt, Human
gcagagcugguacuugagccug

SEQ ID NO: 166678 - RNA, 22 nt, Human
cuuugcagagggggugggagcu

SEQ ID NO: 166679 - RNA, 22 nt, Human
acacauggucuacuucuucuca

SEQ ID NO: 166680 - RNA, 22 nt, Human
guucuucagauuccauuucagu

SEQ ID NO: 166681 - RNA, 22 nt, Human
uucucaggaacucagugucagc

SEQ ID NO: 166682 - RNA, 22 nt, Human
aggcuguccucucuugcucagu

SEQ ID NO: 166683 - RNA, 21 nt, Human
gcuccuggugcugcguggcgc

SEQ ID NO: 166684 - RNA, 22 nt, Human
gucaucaucaggcagaugcugc

SEQ ID NO: 166685 - RNA, 22 nt, Human
ucuucaugaaauugauugcuua

SEQ ID NO: 166686 - RNA, 22 nt, Human
gcugggugauucauuuccauaa

SEQ ID NO: 166687 - RNA, 22 nt, Human
ggcaguggcuccucucuacucc

SEQ ID NO: 166688 - RNA, 22 nt, Human
cccagcugaacuugcauuccaa

SEQ ID NO: 166689 - RNA, 22 nt, Human
acuguagucuaaauauagucuu

SEQ ID NO: 166690 - RNA, 22 nt, Human
gcaguuaccuauuuuguagaaa

SEQ ID NO: 166691 - RNA, 22 nt, Human
aguguucuagcgcugugcuugu

SEQ ID NO: 166692 - RNA, 22 nt, Human
gcugcagggagcuggaaggcuc

SEQ ID NO: 166693 - RNA, 22 nt, Human
ugggugaagaggcuaugcuacu

SEQ ID NO: 166694 - RNA, 22 nt, Human
ugaguguuguaaccauaugauu

SEQ ID NO: 166695 - RNA, 22 nt, Human
ucaugcagaguagaaagggcaa

SEQ ID NO: 166696 - RNA, 22 nt, Human
uggcaugcaagaggaggcuccc

SEQ ID NO: 166697 - RNA, 22 nt, Human
ucuucaugucaugguauauuga

SEQ ID NO: 166698 - RNA, 22 nt, Human
gcaugcaggaagggcuugggga

SEQ ID NO: 166699 - RNA, 20 nt, Human
agcuggcccccgguggccug

SEQ ID NO: 166700 - RNA, 22 nt, Human
gcuggguggaucggaggcucug

SEQ ID NO: 166701 - RNA, 22 nt, Human
guccuggugccaccugcgggau

SEQ ID NO: 166702 - RNA, 22 nt, Human
cugcacagccugucugggggcc

SEQ ID NO: 166703 - RNA, 22 nt, Human
ggcuucuuagaauuugacuuac

SEQ ID NO: 166704 - RNA, 22 nt, Human
ucaugcagauaagaauaaguaa

SEQ ID NO: 166705 - RNA, 22 nt, Human
uggaagguguggcaggucuagu

SEQ ID NO: 166706 - RNA, 22 nt, Human
ggggugaagguuuucugaaagc

SEQ ID NO: 166707 - RNA, 23 nt, Human
uggcucuguggaucccucaggag

SEQ ID NO: 166708 - RNA, 21 nt, Human
gacauugagcgugucgcagug

SEQ ID NO: 166709 - RNA, 22 nt, Human
gagcaccgccuccacgaugccc

SEQ ID NO: 166710 - RNA, 22 nt, Human
uggcuccaggggacacgcagua

SEQ ID NO: 166711 - RNA, 23 nt, Human
uggcucugagcuuccugguggcc

SEQ ID NO: 166712 - RNA, 22 nt, Human
ugcccugcagacccugcagugu

SEQ ID NO: 166713 - RNA, 22 nt, Human
auggugguagaagcacuaugug

SEQ ID NO: 166714 - RNA, 22 nt, Human
ccagaacagaccugccugaccu

SEQ ID NO: 166715 - RNA, 22 nt, Human
cacuuggaggaaggccuauuca

SEQ ID NO: 166716 - RNA, 22 nt, Human
ggugaccucaccuggucccacc

SEQ ID NO: 166717 - RNA, 22 nt, Human
uuuguugguugcacuggugggu

SEQ ID NO: 166718 - RNA, 22 nt, Human
gcccagaguuugaagauacagu

SEQ ID NO: 166719 - RNA, 22 nt, Human
gugggugucaguaucuuuaacg

SEQ ID NO: 166720 - RNA, 22 nt, Human
uggcacugaagcuggaaagccu

SEQ ID NO: 166721 - RNA, 18 nt, Human
gugacugccccaaaaggc

SEQ ID NO: 166722 - RNA, 22 nt, Human
augcccugggagugcuguacca

SEQ ID NO: 166723 - RNA, 22 nt, Human
ugcagguggcagcggggcacca

SEQ ID NO: 166724 - RNA, 22 nt, Human
gacaguggagccacguugggag

SEQ ID NO: 166725 - RNA, 22 nt, Human
cucagcaacagcgacuuaaggg

SEQ ID NO: 166726 - RNA, 22 nt, Human
guucuucagcccucagguccua

SEQ ID NO: 166727 - RNA, 22 nt, Human
gccagguaugaauuacgcacga

SEQ ID NO: 166728 - RNA, 22 nt, Human
uccugcagccauuagaggucaa

SEQ ID NO: 166729 - RNA, 22 nt, Human
ugcacauggccugagugccuga

SEQ ID NO: 166730 - RNA, 22 nt, Human
aucaugcagcaacaagcaaggc

SEQ ID NO: 166731 - RNA, 22 nt, Human
augcauugaggaugacaugagu

SEQ ID NO: 166732 - RNA, 22 nt, Human
gcuguaacuuuuucauuuucaa

SEQ ID NO: 166733 - RNA, 22 nt, Human
cccacaggcaggugcaugggcu

SEQ ID NO: 166734 - RNA, 22 nt, Human
ugcauuucccauuguguggcuc

SEQ ID NO: 166735 - RNA, 19 nt, Human
ugguucuccuuccacaguc

SEQ ID NO: 166736 - RNA, 22 nt, Human
agugauguagguggauucuggc

SEQ ID NO: 166737 - RNA, 21 nt, Human
ugacaguguggcauggaaggu

SEQ ID NO: 166738 - RNA, 22 nt, Human
guuuuguucaugaacauugggu

SEQ ID NO: 166739 - RNA, 23 nt, Human
ugacacccucauugugugucgca

SEQ ID NO: 166740 - RNA, 22 nt, Human
aggacagcagugcuggcacuug

SEQ ID NO: 166741 - RNA, 22 nt, Human
ccugugguuuacucuguggcua

SEQ ID NO: 166742 - RNA, 22 nt, Human
aggcugucucaccucaggaggg

SEQ ID NO: 166743 - RNA, 22 nt, Human
ugcauuugcaauggguacacaa

SEQ ID NO: 166744 - RNA, 22 nt, Human
gaccaggagauuugagcuaggc

SEQ ID NO: 166745 - RNA, 17 nt, Human
ucuggaugucauggaag

SEQ ID NO: 166746 - RNA, 20 nt, Human
uugagcagcagugcuguguc

SEQ ID NO: 166747 - RNA, 22 nt, Human
caugugguauugugagauccac

SEQ ID NO: 166748 - RNA, 22 nt, Human
ucaugauaauacaggccuucua

SEQ ID NO: 166749 - RNA, 22 nt, Human
cugucaccucugcccuuugccc

SEQ ID NO: 166750 - RNA, 22 nt, Human
cucucuccuuagcugcagacca

SEQ ID NO: 166751 - RNA, 22 nt, Human
uugagcagaucgggcugugggg

SEQ ID NO: 166752 - RNA, 22 nt, Human
gaugggcaucaaacaugacgug

SEQ ID NO: 166753 - RNA, 22 nt, Human
ugcagcugccuagggcuggcuu

SEQ ID NO: 166754 - RNA, 17 nt, Human
ggugaguguccaggugg

SEQ ID NO: 166755 - RNA, 22 nt, Human
ucccucugcuagugcuugagcu

SEQ ID NO: 166756 - RNA, 21 nt, Human
agcauucaaaagaugccauaa

SEQ ID NO: 166757 - RNA, 22 nt, Human
cuggagaacagagcuguuuaga

SEQ ID NO: 166758 - RNA, 22 nt, Human
ccaugcagugcuggagcugauu

SEQ ID NO: 166759 - RNA, 22 nt, Human
ugugcugcucucagugacagcc

SEQ ID NO: 166760 - RNA, 22 nt, Human
gcccucugguggccgccucggc

SEQ ID NO: 166761 - RNA, 22 nt, Human
cuguaaccuccucuuuccauuc

SEQ ID NO: 166762 - RNA, 22 nt, Human
cuucaugcugauauccucgaug

SEQ ID NO: 166763 - RNA, 22 nt, Human
ggcagcugaagaggaacuuugg

SEQ ID NO: 166764 - RNA, 22 nt, Human
uauagugucucuagaucaaaga

SEQ ID NO: 166765 - RNA, 22 nt, Human
caggugggagccacagcguaca

SEQ ID NO: 166766 - RNA, 22 nt, Human
gcaucugauccaauagauauau

SEQ ID NO: 166767 - RNA, 22 nt, Human
ucuccaggcuuaaucucagcuu

SEQ ID NO: 166768 - RNA, 22 nt, Human
aguggguguagucuuccuccug

SEQ ID NO: 166769 - RNA, 22 nt, Human
uuugagugcccauguuucccag

SEQ ID NO: 166770 - RNA, 22 nt, Human
cuguuuauucucaucuaaaaug

SEQ ID NO: 166771 - RNA, 22 nt, Human
auuguauacaagcuuaauuguu

SEQ ID NO: 166772 - RNA, 22 nt, Human
cccugccuacaggguuuucuuu

SEQ ID NO: 166773 - RNA, 22 nt, Human
acucaucuuugaauuuucagua

SEQ ID NO: 166774 - RNA, 22 nt, Human
gagcagcagcugggccagguuc

SEQ ID NO: 166775 - RNA, 22 nt, Human
cauuguccucugaugccuuccc

SEQ ID NO: 166776 - RNA, 22 nt, Human
ucugggugucacuccugccugc

SEQ ID NO: 166777 - RNA, 22 nt, Human
guuguacauaugaggauaaguu

SEQ ID NO: 166778 - RNA, 22 nt, Human
gagccacaguggauugauucca

SEQ ID NO: 166779 - RNA, 23 nt, Human
ucuggcugcuccuuucaaugcuc

SEQ ID NO: 166780 - RNA, 22 nt, Human
uuuuuugucuugaagaaauggu

SEQ ID NO: 166781 - RNA, 22 nt, Human
ucuucaugucucugcuugaguc

SEQ ID NO: 166782 - RNA, 21 nt, Human
ccaugucagaugugggcugug

SEQ ID NO: 166783 - RNA, 22 nt, Human
acagacuccccagguuaucuca

SEQ ID NO: 166784 - RNA, 22 nt, Human
ggcagccuccagggcacuggug

SEQ ID NO: 166785 - RNA, 22 nt, Human
gccugaucagguccucggcaua

SEQ ID NO: 166786 - RNA, 19 nt, Human
gagcagcuuccuaucuggu

SEQ ID NO: 166787 - RNA, 22 nt, Human
uccuggguccauggcagccgaa

SEQ ID NO: 166788 - RNA, 22 nt, Human
auucaugcaggauugucuccaa

SEQ ID NO: 166789 - RNA, 22 nt, Human
uuugacucugggugcuuuuucg

SEQ ID NO: 166790 - RNA, 22 nt, Human
caggcuugaugugucuauacuu

SEQ ID NO: 166791 - RNA, 22 nt, Human
auguacauuauucgagugaugg

SEQ ID NO: 166792 - RNA, 22 nt, Human
gugcaaagcuuaacauucugca

SEQ ID NO: 166793 - RNA, 22 nt, Human
gcagcugcgaagaagucuaucu

SEQ ID NO: 166794 - RNA, 22 nt, Human
cucugcaggcacccaggguggg

SEQ ID NO: 166795 - RNA, 20 nt, Human
agugauuuguuaguacauug

SEQ ID NO: 166796 - RNA, 22 nt, Human
gcagcugccgugagcucacgcc

SEQ ID NO: 166797 - RNA, 22 nt, Human
gcaguggccacauggaggagga

SEQ ID NO: 166798 - RNA, 22 nt, Human
ucaggaugagucaucaagcugc

SEQ ID NO: 166799 - RNA, 22 nt, Human
guuaaugcaaagcagagggcaa

SEQ ID NO: 166800 - RNA, 21 nt, Human
uggagagugauuucagugugg

SEQ ID NO: 166801 - RNA, 22 nt, Human
agcaggugucacuuucacucca

SEQ ID NO: 166802 - RNA, 22 nt, Human
aguguuaaggcugguugcuaua

SEQ ID NO: 166803 - RNA, 22 nt, Human
ucucauacguuuccagguguca

SEQ ID NO: 166804 - RNA, 22 nt, Human
aagcagccagccaucaugcccg

SEQ ID NO: 166805 - RNA, 22 nt, Human
ugcagcaucuccuugugccaug

SEQ ID NO: 166806 - RNA, 22 nt, Human
cugcaucaguggauaugauggu

SEQ ID NO: 166807 - RNA, 23 nt, Human
acucugacuuaguuauagcuauu

SEQ ID NO: 166808 - RNA, 22 nt, Human
ugggcacacugaaucugcuauu

SEQ ID NO: 166809 - RNA, 22 nt, Human
auccgcuuaucucagcuggcag

SEQ ID NO: 166810 - RNA, 22 nt, Human
cuucuccgacaaccgacgccgg

SEQ ID NO: 166811 - RNA, 22 nt, Human
aaacuagguucugauuuccaag

SEQ ID NO: 166812 - RNA, 22 nt, Human
guucaaccaugauuaggaacug

SEQ ID NO: 166813 - RNA, 22 nt, Human
uucuguucccuaggaccugggg

SEQ ID NO: 166814 - RNA, 22 nt, Human
uugcaggguugacacugccugc

SEQ ID NO: 166815 - RNA, 22 nt, Human
ggcucagaaaccucuggugucu

SEQ ID NO: 166816 - RNA, 22 nt, Human
acaaagugaaaagcaucgaauu

SEQ ID NO: 166817 - RNA, 22 nt, Human
ccagcuugcuccucugcaaugg

SEQ ID NO: 166818 - RNA, 21 nt, Human
gcccacagugaggaggauccc

SEQ ID NO: 166819 - RNA, 22 nt, Human
cuugaggcugcacuccagggcc

SEQ ID NO: 166820 - RNA, 22 nt, Human
gcugcaagugcauguugcaacu

SEQ ID NO: 166821 - RNA, 22 nt, Human
cucaugucggcaggacucgccc

SEQ ID NO: 166822 - RNA, 22 nt, Human
cuaggugauccacugcucucuu

SEQ ID NO: 166823 - RNA, 22 nt, Human
acuuggucguggugcagcaugg

SEQ ID NO: 166824 - RNA, 22 nt, Human
uauaagaaacaaggcaaauuuu

SEQ ID NO: 166825 - RNA, 22 nt, Human
auccuaaagcagacagcagguu

SEQ ID NO: 166826 - RNA, 22 nt, Human
ggugcggagacuccaugaggcc

SEQ ID NO: 166827 - RNA, 18 nt, Human
auuugcaggcaugcaggc

SEQ ID NO: 166828 - RNA, 22 nt, Human
ccuugcagcauauagagucccu

SEQ ID NO: 166829 - RNA, 22 nt, Human
ugcuucucucuaggaagacgcu

SEQ ID NO: 166830 - RNA, 22 nt, Human
augacagcucuagcacacagua

SEQ ID NO: 166831 - RNA, 23 nt, Human
aguguucagcauguaguaaauac

SEQ ID NO: 166832 - RNA, 22 nt, Human
gaacugcauugugguauauguu

SEQ ID NO: 166833 - RNA, 22 nt, Human
uggcucugccccauaccccugc

SEQ ID NO: 166834 - RNA, 23 nt, Human
ugucuggauucgacugugguugg

SEQ ID NO: 166835 - RNA, 22 nt, Human
uacguuuuaaacacggagccag

SEQ ID NO: 166836 - RNA, 22 nt, Human
uacagccuggcacuacccuggg

SEQ ID NO: 166837 - RNA, 22 nt, Human
ccugguguuaucauaggucaug

SEQ ID NO: 166838 - RNA, 19 nt, Human
agcaguggagccaugccug

SEQ ID NO: 166839 - RNA, 22 nt, Human
caggguggcaggcaccauggcc

SEQ ID NO: 166840 - RNA, 21 nt, Human
cugcacugugauuuaaaaugu

SEQ ID NO: 166841 - RNA, 22 nt, Human
gcagcucucuggccugcccugg

SEQ ID NO: 166842 - RNA, 22 nt, Human
gcuucugcagagccguccugag

SEQ ID NO: 166843 - RNA, 22 nt, Human
caggucuucuucagcacuugga

SEQ ID NO: 166844 - RNA, 22 nt, Human
uuuauacuccacucugcaagcg

SEQ ID NO: 166845 - RNA, 22 nt, Human
cugauggagagugugauuuggg

SEQ ID NO: 166846 - RNA, 22 nt, Human
ugcaugguguaauucuaaugcu

SEQ ID NO: 166847 - RNA, 22 nt, Human
uaucuguagucucaugguuccu

SEQ ID NO: 166848 - RNA, 23 nt, Human
acugccugugccgaucucucuca

SEQ ID NO: 166849 - RNA, 23 nt, Human
uguguucagucaaggaucagagu

SEQ ID NO: 166850 - RNA, 22 nt, Human
ccaggaugacccccacuuuccu

SEQ ID NO: 166851 - RNA, 20 nt, Human
ggucacuguggcugcaggau

SEQ ID NO: 166852 - RNA, 22 nt, Human
acaugcauaaacuacuucuuau

SEQ ID NO: 166853 - RNA, 22 nt, Human
cgcagcugcugcucugaaacag

SEQ ID NO: 166854 - RNA, 22 nt, Human
cgcaggugccggcagauggggu

SEQ ID NO: 166855 - RNA, 22 nt, Human
gaugucuggcuaccacucgcac

SEQ ID NO: 166856 - RNA, 22 nt, Human
uuccaaguuaggcgagcuggug

SEQ ID NO: 166857 - RNA, 22 nt, Human
uggcacugucaccaaugcuguc

SEQ ID NO: 166858 - RNA, 22 nt, Human
ggugggugagcccugggagcug

SEQ ID NO: 166859 - RNA, 22 nt, Human
ccuggauucucacuggacucca

SEQ ID NO: 166860 - RNA, 22 nt, Human
ucuuauaccccuaaacugcagc

SEQ ID NO: 166861 - RNA, 22 nt, Human
gcagcuuuggagguggaacucu

SEQ ID NO: 166862 - RNA, 22 nt, Human
guucuucaggcugugcucuaga

SEQ ID NO: 166863 - RNA, 22 nt, Human
gugcagcugguggagucugggg

SEQ ID NO: 166864 - RNA, 22 nt, Human
gcugauggcuugcuggcugaca

SEQ ID NO: 166865 - RNA, 22 nt, Human
uguaaagaaagacgcagaguua

SEQ ID NO: 166866 - RNA, 22 nt, Human
gcaggccuccccugcuggagcu

SEQ ID NO: 166867 - RNA, 22 nt, Human
ugauuugaaaccuuuggcaaga

SEQ ID NO: 166868 - RNA, 22 nt, Human
gugauuucagguuuuucauacu

SEQ ID NO: 166869 - RNA, 22 nt, Human
auaggcauaacacugauguccu

SEQ ID NO: 166870 - RNA, 22 nt, Human
auuaguguuguggcuucauggc

SEQ ID NO: 166871 - RNA, 22 nt, Human
cagaccuggaaaacaggcuugc

SEQ ID NO: 166872 - RNA, 21 nt, Human
acaguacuugagaucuuuuga

SEQ ID NO: 166873 - RNA, 22 nt, Human
aauccagguggcggagguugug

SEQ ID NO: 166874 - RNA, 22 nt, Human
gguuguaguuggagguuguaua

SEQ ID NO: 166875 - RNA, 22 nt, Human
cccuuguuuuugaguacaauag

SEQ ID NO: 166876 - RNA, 22 nt, Human
ucauccugaagaaccugcuucc

SEQ ID NO: 166877 - RNA, 22 nt, Human
caugucaagacugaagauccag

SEQ ID NO: 166878 - RNA, 22 nt, Human
auuagccuguugcauuuucacu

SEQ ID NO: 166879 - RNA, 22 nt, Human
ggcugcugcccaccccugcaug

SEQ ID NO: 166880 - RNA, 22 nt, Human
ugcaugguuauauacuacuagu

SEQ ID NO: 166881 - RNA, 22 nt, Human
ggcaguggugggaggcucgcuc

SEQ ID NO: 166882 - RNA, 17 nt, Human
agcagcuggguugaucu

SEQ ID NO: 166883 - RNA, 22 nt, Human
gcauucuugguggagugcuaaa

SEQ ID NO: 166884 - RNA, 22 nt, Human
uuuggucuggaaucuucagggu

SEQ ID NO: 166885 - RNA, 22 nt, Human
ugacagugugcccggagguuag

SEQ ID NO: 166886 - RNA, 22 nt, Human
aauaguguauuuuucaaaauua

SEQ ID NO: 166887 - RNA, 22 nt, Human
acaguacucuaaugaaaagugc

SEQ ID NO: 166888 - RNA, 22 nt, Human
cuguggcuaggaagcuguggga

SEQ ID NO: 166889 - RNA, 22 nt, Human
cucaucuggcuucaguaacagu

SEQ ID NO: 166890 - RNA, 22 nt, Human
cauugcuguuaauugucucuag

SEQ ID NO: 166891 - RNA, 22 nt, Human
cugcagggcccaaggucaacgg

SEQ ID NO: 166892 - RNA, 22 nt, Hepatitis A virus
cugauuuauagauccaagguuu

SEQ ID NO: 166893 - RNA, 22 nt, Hepatitis A virus
gaacucuugcuauacaaucucu

SEQ ID NO: 166894 - RNA, 22 nt, Hepatitis A virus
aaucuuaugauugguggagaau

SEQ ID NO: 166895 - RNA, 22 nt, Hepatitis A virus
ugcaggaaaauuaaucaugguu

SEQ ID NO: 166896 - RNA, 22 nt, Hepatitis A virus
ccauuuaucaucacauugauaa

SEQ ID NO: 166897 - RNA, 22 nt, Human
auauuauucuaguaacagugau

SEQ ID NO: 166898 - RNA, 22 nt, Human
uuuaguagaaugauacagggca

SEQ ID NO: 166899 - RNA, 22 nt, Human
acuuugcagggcuugauaucca

SEQ ID NO: 166900 - RNA, 23 nt, Human
aggcagguuugggcucuucuugu

SEQ ID NO: 166901 - RNA, 22 nt, Human
ccagagaccagaacauggggau

SEQ ID NO: 166902 - RNA, 22 nt, Human
agcuggcaguaugacuggugac

SEQ ID NO: 166903 - RNA, 23 nt, Human
uggcaaagcauucuuauaacagu

SEQ ID NO: 166904 - RNA, 22 nt, Human
aucagcuuuucucaucagaaau

SEQ ID NO: 166905 - RNA, 22 nt, Human
gacagcagccacagggagaggg

SEQ ID NO: 166906 - RNA, 22 nt, Human
uugcacuaggaaaaggcagcca

SEQ ID NO: 166907 - RNA, 22 nt, Human
aaggcuuuuaacuacuguuuua

SEQ ID NO: 166908 - RNA, 19 nt, Human
uggcauuuggaggcaaccu

SEQ ID NO: 166909 - RNA, 22 nt, Human
cagacaggguuuuggucuuugg

SEQ ID NO: 166910 - RNA, 22 nt, Human
uccauacauugaaauaccauuc

SEQ ID NO: 166911 - RNA, 22 nt, Human
uuuaggcauacuuuugggagaa

SEQ ID NO: 166912 - RNA, 22 nt, Human
ucaugaacaucucaaauaacca

SEQ ID NO: 166913 - RNA, 22 nt, Human
uacagacauuuacuccacuccu

SEQ ID NO: 166914 - RNA, 22 nt, Human
uaaguccuucaccuaauccuca

SEQ ID NO: 166915 - RNA, 22 nt, Human
uucaccgugaaccgauuccuca

SEQ ID NO: 166916 - RNA, 18 nt, Human
agcaggugugcagaaugu

SEQ ID NO: 166917 - RNA, 22 nt, Human
uucaugaauggaaucaaugcuc

SEQ ID NO: 166918 - RNA, 22 nt, Human
gagcagugaugggaggacguca

SEQ ID NO: 166919 - RNA, 19 nt, Human
agguggucuaggcuggaga

SEQ ID NO: 166920 - RNA, 21 nt, Human
ggugacacguggccccgcucu

SEQ ID NO: 166921 - RNA, 22 nt, Human
gggaccuggcgagggucacaca

SEQ ID NO: 166922 - RNA, 20 nt, Human
cuguaucagguuacaaagua

SEQ ID NO: 166923 - RNA, 22 nt, Human
gagucaccacacggugcugacu

SEQ ID NO: 166924 - RNA, 22 nt, Human
cccagugugaugagguugcuaa

SEQ ID NO: 166925 - RNA, 22 nt, Human
agcagggcagguaaggaucaga

SEQ ID NO: 166926 - RNA, 22 nt, Human
cacaugaguccugccagguaug

SEQ ID NO: 166927 - RNA, 22 nt, Human
cauuucaaguaacagauugcuu

SEQ ID NO: 166928 - RNA, 22 nt, Human
uccacagaauguaagauccaca

SEQ ID NO: 166929 - RNA, 23 nt, Human
uuguccucuggaucgguuugguu

SEQ ID NO: 166930 - RNA, 22 nt, Human
gucaccucucaucacaugcuac

SEQ ID NO: 166931 - RNA, 22 nt, Human
uuauugaguuguaagagcucuu

SEQ ID NO: 166932 - RNA, 22 nt, Human
agggacccugaugacugaggag

SEQ ID NO: 166933 - RNA, 22 nt, Human
cuggcccauggugagcucuggg

SEQ ID NO: 166934 - RNA, 22 nt, Human
gaaugaaucuguaagugacaag

SEQ ID NO: 166935 - RNA, 22 nt, Human
gggggcucugacucccucagcu

SEQ ID NO: 166936 - RNA, 20 nt, Human
uguguccaucaucugggcac

SEQ ID NO: 166937 - RNA, 22 nt, Human
cuuaacauccugcauuuuucuu

SEQ ID NO: 166938 - RNA, 22 nt, Human
aguguccuccucugggagccag

SEQ ID NO: 166939 - RNA, 22 nt, Human
acuaaacugaagcaugaaaagg

SEQ ID NO: 166940 - RNA, 22 nt, Human
cagguuuagguggacgugcagg

SEQ ID NO: 166941 - RNA, 22 nt, Human
ccaugcauauaauagugccugg

SEQ ID NO: 166942 - RNA, 19 nt, Human
acagaaauuaguuauuuuc

SEQ ID NO: 166943 - RNA, 22 nt, Human
gauuucaagcccccagagauuc

SEQ ID NO: 166944 - RNA, 22 nt, Human
ggcucccaggagggccuggagg

SEQ ID NO: 166945 - RNA, 22 nt, Human
agagacaggguuuugucguguu

SEQ ID NO: 166946 - RNA, 22 nt, Human
augcacuacuuggcuuuacuga

SEQ ID NO: 166947 - RNA, 22 nt, Human
ggcagguggaaggucuccauuc

SEQ ID NO: 166948 - RNA, 22 nt, Human
gauuuacagguuagguccugua

SEQ ID NO: 166949 - RNA, 22 nt, Human
ggcaggcaccagcucagcaaua

SEQ ID NO: 166950 - RNA, 22 nt, Human
ggcuuuauuaagcaggguaagu

SEQ ID NO: 166951 - RNA, 22 nt, Human
caaauucucuuacuguuugaca

SEQ ID NO: 166952 - RNA, 22 nt, Human
cagucaccuugaggacucagac

SEQ ID NO: 166953 - RNA, 21 nt, Human
aguuugaugcaauuucugaga

SEQ ID NO: 166954 - RNA, 22 nt, Human
ugauucacagacuucacaaggc

SEQ ID NO: 166955 - RNA, 22 nt, Human
gugagcagcucaggguggucuc

SEQ ID NO: 166956 - RNA, 22 nt, Human
acauguaaaagauaaauuaaca

SEQ ID NO: 166957 - RNA, 22 nt, Human
gcuuuacugagaugacacaggg

SEQ ID NO: 166958 - RNA, 22 nt, Human
agguggcuguauucagcuguaa

SEQ ID NO: 166959 - RNA, 19 nt, Human
acuguaaggcauuuuuuuc

SEQ ID NO: 166960 - RNA, 22 nt, Human
acagcauucaauaaauaauaac

SEQ ID NO: 166961 - RNA, 22 nt, Human
ccagcuuuccugcgaguugauu

SEQ ID NO: 166962 - RNA, 22 nt, Human
uuuaucugaggaaagcagacaa

SEQ ID NO: 166963 - RNA, 22 nt, Human
cuuaggaacgcucugccuagug

SEQ ID NO: 166964 - RNA, 22 nt, Human
auuuucaucgcuagguuggccu

SEQ ID NO: 166965 - RNA, 22 nt, Human
auuccaaacuuaccccagagga

SEQ ID NO: 166966 - RNA, 22 nt, Human
ugcuggagagccuuggccaagg

SEQ ID NO: 166967 - RNA, 22 nt, Human
gaguaguugcugcagagaauac

SEQ ID NO: 166968 - RNA, 20 nt, Human
aucuucuuggccagcuugcu

SEQ ID NO: 166969 - RNA, 22 nt, Human
uggaaaaacugagacuuagaca

SEQ ID NO: 166970 - RNA, 22 nt, Human
uugcuguaguguucugauguca

SEQ ID NO: 166971 - RNA, 22 nt, Human
uauuucagacacugaucuugca

SEQ ID NO: 166972 - RNA, 22 nt, Human
cucuucaaaagucuaauccuua

SEQ ID NO: 166973 - RNA, 22 nt, Human
uggcagguuuccuccucauagu

SEQ ID NO: 166974 - RNA, 22 nt, Human
uguaaauaguuagcuugccucu

SEQ ID NO: 166975 - RNA, 22 nt, Human
gacagcaggaugugaggggaug

SEQ ID NO: 166976 - RNA, 22 nt, Human
gacaucugaggcccucagagcc

SEQ ID NO: 166977 - RNA, 22 nt, Human
uuccucagggaggcuagcagua

SEQ ID NO: 166978 - RNA, 22 nt, Human
auguauuugcuuguuauggauu

SEQ ID NO: 166979 - RNA, 20 nt, Human
acaauauguagaugaauagc

SEQ ID NO: 166980 - RNA, 22 nt, Human
uucauucuugggaucagagagu

SEQ ID NO: 166981 - RNA, 22 nt, Human
ggcuuuauuuugcaugaaugcu

SEQ ID NO: 166982 - RNA, 22 nt, Human
uaucagaaaugccuuaaauugg

SEQ ID NO: 166983 - RNA, 22 nt, Human
ucuggaucgccggcgccugggc

SEQ ID NO: 166984 - RNA, 17 nt, Human
aguguuuccuuaucauu

SEQ ID NO: 166985 - RNA, 22 nt, Human
cugaaauucugccucugcacaa

SEQ ID NO: 166986 - RNA, 22 nt, Human
uucuucuuuaucucaguauccu

SEQ ID NO: 166987 - RNA, 22 nt, Human
uaauuucaauagcuugcauaau

SEQ ID NO: 166988 - RNA, 22 nt, Human
gacuuuauaaaugagaggcgga

SEQ ID NO: 166989 - RNA, 22 nt, Human
acagagcaugcucaguguguga

SEQ ID NO: 166990 - RNA, 22 nt, Human
ugaaagcuguacaugugguaca

SEQ ID NO: 166991 - RNA, 22 nt, Human
guugggguaccuugaggcuggg

SEQ ID NO: 166992 - RNA, 19 nt, Human
uaggaauguagaauccuag

SEQ ID NO: 166993 - RNA, 22 nt, Human
ucuggguggcagugauggcgug

SEQ ID NO: 166994 - RNA, 22 nt, Human
guuuuacacaccuaugaaagac

SEQ ID NO: 166995 - RNA, 22 nt, Human
acaugugucuaagaaugaaaga

SEQ ID NO: 166996 - RNA, 22 nt, Human
cuugaaucuggcuuugccacuu

SEQ ID NO: 166997 - RNA, 22 nt, Human
uagcuuuagugaaaaauaucag

SEQ ID NO: 166998 - RNA, 22 nt, Human
gcagguguucucagaggaggcu

SEQ ID NO: 166999 - RNA, 22 nt, Human
uacagaauuagauuauuagaga

SEQ ID NO: 167000 - RNA, 22 nt, Human
ugaauaauuaugggaguccuaa

SEQ ID NO: 167001 - RNA, 22 nt, Human
gccaggcacugcucuaagcccu

SEQ ID NO: 167002 - RNA, 22 nt, Human
ccagggcauguaacuaauggug

SEQ ID NO: 167003 - RNA, 22 nt, Human
ccaaugauggugcccacgauga

SEQ ID NO: 167004 - RNA, 17 nt, Human
uauacacagacagacug

SEQ ID NO: 167005 - RNA, 22 nt, Human
agagggaaaaacucaugucauu

SEQ ID NO: 167006 - RNA, 22 nt, Human
uagggaccuuagaauuguaugu

SEQ ID NO: 167007 - RNA, 19 nt, Human
aacuggauaauggccacau

SEQ ID NO: 167008 - RNA, 22 nt, Human
auuuccaugaauucccacucau

SEQ ID NO: 167009 - RNA, 22 nt, Human
aagaaaggauauaugggaggua

SEQ ID NO: 167010 - RNA, 22 nt, Human
ucauuuguaccauuuuuuaaga

SEQ ID NO: 167011 - RNA, 22 nt, Human
uacugcauaacuggcauguggg

SEQ ID NO: 167012 - RNA, 22 nt, Human
ccagguguggggaggacucaca

SEQ ID NO: 167013 - RNA, 22 nt, Human
uguaaauaaugcauguaaauca

SEQ ID NO: 167014 - RNA, 22 nt, Human
acacauauauacauauuugugc

SEQ ID NO: 167015 - RNA, 22 nt, Human
gucuucuuuucagucugcuugu

SEQ ID NO: 167016 - RNA, 17 nt, Human
gcaagggaugggagauu

SEQ ID NO: 167017 - RNA, 22 nt, Human
auuguaacauguucagaucacu

SEQ ID NO: 167018 - RNA, 23 nt, Human
ggccauuucauuugguucaaacu

SEQ ID NO: 167019 - RNA, 22 nt, Human
uaguauuuccuguaagcuauag

SEQ ID NO: 167020 - RNA, 22 nt, Human
auuuccauagagcgucucacag

SEQ ID NO: 167021 - RNA, 22 nt, Human
cauccagggcagccauggccug

SEQ ID NO: 167022 - RNA, 22 nt, Human
aggcuagaggcuucuggcuuca

SEQ ID NO: 167023 - RNA, 22 nt, Human
ccagagaguaucauggagagua

SEQ ID NO: 167024 - RNA, 22 nt, Human
augauuucuauauaaacuuaaa

SEQ ID NO: 167025 - RNA, 22 nt, Human
cagggcauaagaugaggcugua

SEQ ID NO: 167026 - RNA, 22 nt, Human
gcagaauuuggggguaaccuuu

SEQ ID NO: 167027 - RNA, 22 nt, Human
ucaggcaggaucccagggaagg

SEQ ID NO: 167028 - RNA, 22 nt, Human
uacagaaaaacuggcauugaag

SEQ ID NO: 167029 - RNA, 20 nt, Human
uauugaguaccuacuguaua

SEQ ID NO: 167030 - RNA, 22 nt, Human
aauauaauuuuauuccuagagu

SEQ ID NO: 167031 - RNA, 22 nt, Human
cacaugugugcugaggacugug

SEQ ID NO: 167032 - RNA, 22 nt, Human
gccaggcagacaggucaucagg

SEQ ID NO: 167033 - RNA, 22 nt, Human
agauacaaaagauaagauuuag

SEQ ID NO: 167034 - RNA, 22 nt, Human
aauaucagcacuuuugugguau

SEQ ID NO: 167035 - RNA, 23 nt, Human
ugcagggcaaguuagagacccca

SEQ ID NO: 167036 - RNA, 22 nt, Human
agaauaauacugaaaugcugaa

SEQ ID NO: 167037 - RNA, 19 nt, Human
agaaucaggucaggugaca

SEQ ID NO: 167038 - RNA, 22 nt, Human
gccagggaaacugcagaccagc

SEQ ID NO: 167039 - RNA, 22 nt, Human
acacuuuacagaauguuuugau

SEQ ID NO: 167040 - RNA, 21 nt, Human
uccaaaucccauucuguaguc

SEQ ID NO: 167041 - RNA, 22 nt, Human
aggacauguuuguaucuuccuu

SEQ ID NO: 167042 - RNA, 22 nt, Human
ugacagaccacugcaacucugu

SEQ ID NO: 167043 - RNA, 22 nt, Human
gcaggugucaguccccaaggug

SEQ ID NO: 167044 - RNA, 22 nt, Human
gcagggcauagaggcacggagg

SEQ ID NO: 167045 - RNA, 22 nt, Human
aaguguuuacuuaaagucaugg

SEQ ID NO: 167046 - RNA, 22 nt, Human
cuuuuucugauguuccaugauu

SEQ ID NO: 167047 - RNA, 22 nt, Human
ucaauucaauugaacaguuacu

SEQ ID NO: 167048 - RNA, 22 nt, Human
gguuccaccuggcgagggguau

SEQ ID NO: 167049 - RNA, 22 nt, Human
auuauuucucacucacauaaua

SEQ ID NO: 167050 - RNA, 22 nt, Human
agggaccuugauggguuuggga

SEQ ID NO: 167051 - RNA, 22 nt, Human
ccagggcaacgcugucucagag

SEQ ID NO: 167052 - RNA, 22 nt, Human
gcugccacgaucucugcuguag

SEQ ID NO: 167053 - RNA, 22 nt, Human
acagguggagugguuagcaggc

SEQ ID NO: 167054 - RNA, 19 nt, Human
gguccucagcagagcaugc

SEQ ID NO: 167055 - RNA, 22 nt, Human
guuagggagggugcauaugugu

SEQ ID NO: 167056 - RNA, 22 nt, Human
acagcaggcaugaagaaauguu

SEQ ID NO: 167057 - RNA, 22 nt, Human
caaagaagagauuuacagagcu

SEQ ID NO: 167058 - RNA, 22 nt, Human
gaugaaaaaagacgagcauaua

SEQ ID NO: 167059 - RNA, 22 nt, Human
cagacugaguggauuaaacaau

SEQ ID NO: 167060 - RNA, 20 nt, Human
uuuuccagaaaguaucauug

SEQ ID NO: 167061 - RNA, 22 nt, Human
uuguccugugauuucagggccu

SEQ ID NO: 167062 - RNA, 22 nt, Human
uccaggcacgaggcccugugca

SEQ ID NO: 167063 - RNA, 22 nt, Human
ccauguguugagauuccagccu

SEQ ID NO: 167064 - RNA, 22 nt, Human
uacauguggaguuuucuaguca

SEQ ID NO: 167065 - RNA, 22 nt, Human
uaaacaucugucauguguuuau

SEQ ID NO: 167066 - RNA, 22 nt, Human
uuauuucauugauuucuaagac

SEQ ID NO: 167067 - RNA, 22 nt, Human
uuuauauauggcuggucuggau

SEQ ID NO: 167068 - RNA, 22 nt, Human
agucuucacucuucacuacuau

SEQ ID NO: 167069 - RNA, 22 nt, Human
agcugcaagauuucuuuuguau

SEQ ID NO: 167070 - RNA, 22 nt, Human
ucuguugacuccuagcagccau

SEQ ID NO: 167071 - RNA, 22 nt, Human
ugcagggauccuagcugaagag

SEQ ID NO: 167072 - RNA, 22 nt, Human
cuacauaaucuggauuugucug

SEQ ID NO: 167073 - RNA, 22 nt, Human
cagcuuuccagagaccugcccc

SEQ ID NO: 167074 - RNA, 22 nt, Human
ggguggagaggcuaaguccagu

SEQ ID NO: 167075 - RNA, 22 nt, Human
aaugggcuuuggccaguaggag

SEQ ID NO: 167076 - RNA, 22 nt, Human
cuucucucccuggcacucagac

SEQ ID NO: 167077 - RNA, 22 nt, Human
ucauuucuguugugcaucacug

SEQ ID NO: 167078 - RNA, 22 nt, Human
acacuuuaugucuagaucuggg

SEQ ID NO: 167079 - RNA, 22 nt, Human
aaagugguucuuacauccgugg

SEQ ID NO: 167080 - RNA, 18 nt, Human
acagggaugggguaagug

SEQ ID NO: 167081 - RNA, 22 nt, Human
cauuuccagcuccugcaucaug

SEQ ID NO: 167082 - RNA, 22 nt, Human
ugcaugcaugugagcaugcaua

SEQ ID NO: 167083 - RNA, 22 nt, Human
cucuuagauauggagaauuacc

SEQ ID NO: 167084 - RNA, 22 nt, Human
uccuuccugcucuaacauucag

SEQ ID NO: 167085 - RNA, 22 nt, Human
acagguuuuuguggauauaugu

SEQ ID NO: 167086 - RNA, 22 nt, Human
cuguccugaaguuuucaugaga

SEQ ID NO: 167087 - RNA, 22 nt, Human
auggaucacagugccgugggug

SEQ ID NO: 167088 - RNA, 22 nt, Human
acuuugaaacuaaaauucauua

SEQ ID NO: 167089 - RNA, 22 nt, Human
uauugcuggggugggccauguu

SEQ ID NO: 167090 - RNA, 23 nt, Human
cacagguguuucaucuucucagu

SEQ ID NO: 167091 - RNA, 22 nt, Human
uagcagaagaacaacaugaucu

SEQ ID NO: 167092 - RNA, 22 nt, Human
uaauuucacaguucaacgcaca

SEQ ID NO: 167093 - RNA, 22 nt, Human
gaucugaaucaauagaauaacu

SEQ ID NO: 167094 - RNA, 22 nt, Human
uacagacaaagugcuauagggu

SEQ ID NO: 167095 - RNA, 22 nt, Human
agaccugcagggccaggccugc

SEQ ID NO: 167096 - RNA, 22 nt, Human
aaauuugauaagccauuguuac

SEQ ID NO: 167097 - RNA, 22 nt, Human
uagauuuaagacccugaauuug

SEQ ID NO: 167098 - RNA, 22 nt, Human
uuuacuuguucugcugaauucu

SEQ ID NO: 167099 - RNA, 22 nt, Human
caaaugauacuguuuuuagucu

SEQ ID NO: 167100 - RNA, 22 nt, Human
uugcagggcaaauggucagaua

SEQ ID NO: 167101 - RNA, 22 nt, Human
uaagauguuuugguuugauaag

SEQ ID NO: 167102 - RNA, 22 nt, Human
aggcagcaauugaaaucauugu

SEQ ID NO: 167103 - RNA, 22 nt, Human
cauuugaaugagauugcuguaa

SEQ ID NO: 167104 - RNA, 22 nt, Human
uaguauagauugaagcagauca

SEQ ID NO: 167105 - RNA, 22 nt, Human
aaaguccuuuuugccaugcaag

SEQ ID NO: 167106 - RNA, 22 nt, Human
uguuuccuucugucucuuugga

SEQ ID NO: 167107 - RNA, 22 nt, Human
ucagacagucaucagagcuugu

SEQ ID NO: 167108 - RNA, 22 nt, Human
guuucauuuacaucuguaggua

SEQ ID NO: 167109 - RNA, 22 nt, Human
uccugaaauucugguugucacu

SEQ ID NO: 167110 - RNA, 22 nt, Human
uaauacagaaguguauuaaaau

SEQ ID NO: 167111 - RNA, 22 nt, Human
auucuucacaccuguuccuguu

SEQ ID NO: 167112 - RNA, 22 nt, Human
aguugacucucaagauccuguu

SEQ ID NO: 167113 - RNA, 19 nt, Human
ggcaggugugcuuaugcuu

SEQ ID NO: 167114 - RNA, 22 nt, Human
cuggaggaaucacagaaggcuu

SEQ ID NO: 167115 - RNA, 22 nt, Human
gaucugaaauagcuacugcaga

SEQ ID NO: 167116 - RNA, 22 nt, Human
uucagcaagaccaccauguacc

SEQ ID NO: 167117 - RNA, 22 nt, Human
gaaacccaaacuaagacaguag

SEQ ID NO: 167118 - RNA, 22 nt, Human
uggcauuuagaaaacaacaugu

SEQ ID NO: 167119 - RNA, 22 nt, Human
agguuuauguuuggugcaggag

SEQ ID NO: 167120 - RNA, 22 nt, Human
agcacugauuuaaacuggauuu

SEQ ID NO: 167121 - RNA, 22 nt, Human
cuggaggaccacagaagcuggu

SEQ ID NO: 167122 - RNA, 22 nt, Human
uccugucugcucacagagcugg

SEQ ID NO: 167123 - RNA, 17 nt, Human
uuucagauucacuuucu

SEQ ID NO: 167124 - RNA, 22 nt, Human
agugacuggugugaaguuaaau

SEQ ID NO: 167125 - RNA, 22 nt, Human
aaaucucacuguagucaaagug

SEQ ID NO: 167126 - RNA, 22 nt, Human
uuuaggcagcacgggcagcccu

SEQ ID NO: 167127 - RNA, 22 nt, Human
uuuguucaugccuauauucuca

SEQ ID NO: 167128 - RNA, 21 nt, Human
gcaaauguucaggaaaaaaga

SEQ ID NO: 167129 - RNA, 22 nt, Human
guaacauaguuugugcuucauc

SEQ ID NO: 167130 - RNA, 22 nt, Human
gaauuucaacaguccucaaaug

SEQ ID NO: 167131 - RNA, 22 nt, Human
uuucuucauagaccuugucuug

SEQ ID NO: 167132 - RNA, 22 nt, Human
aggugucuucagggugagacag

SEQ ID NO: 167133 - RNA, 23 nt, Human
caggugguagagaaaaauccaga

SEQ ID NO: 167134 - RNA, 22 nt, Human
uuagaaaucugcugccaugcaa

SEQ ID NO: 167135 - RNA, 22 nt, Human
gcagggacaaggcagguguucu

SEQ ID NO: 167136 - RNA, 22 nt, Human
caggugucaaaauacuaagugg

SEQ ID NO: 167137 - RNA, 21 nt, Human
uccuugcuauuuuccucagcu

SEQ ID NO: 167138 - RNA, 22 nt, Human
cccaggcagcggggucuccuug

SEQ ID NO: 167139 - RNA, 22 nt, Human
auugagcuguuuuguaggauaa

SEQ ID NO: 167140 - RNA, 21 nt, Human
aguguccuugaucuugccuug

SEQ ID NO: 167141 - RNA, 22 nt, Human
uuccaaaccucaaauaauuaau

SEQ ID NO: 167142 - RNA, 22 nt, Human
cagacaggaauucuggcguggu

SEQ ID NO: 167143 - RNA, 22 nt, Human
cagagggcucggcggccgcucc

SEQ ID NO: 167144 - RNA, 22 nt, Human
uuacacaacaucuguauuauua

SEQ ID NO: 167145 - RNA, 22 nt, Human
uccuucuccuccuugagugaca

SEQ ID NO: 167146 - RNA, 22 nt, Human
aaaagcagaucuccaaagucua

SEQ ID NO: 167147 - RNA, 22 nt, Human
ccagguguaggacaccaaggga

SEQ ID NO: 167148 - RNA, 17 nt, Human
ucuucucuuccagucuu

SEQ ID NO: 167149 - RNA, 21 nt, Human
ugcuggguuugcccaucaggc

SEQ ID NO: 167150 - RNA, 22 nt, Human
uuagcuuuagagccauuacugg

SEQ ID NO: 167151 - RNA, 22 nt, Human
ggcuuggaaaugguaaugagcu

SEQ ID NO: 167152 - RNA, 22 nt, Human
gcaaggacucccugggucauuc

SEQ ID NO: 167153 - RNA, 22 nt, Human
aaauguacgggaguagaauuag

SEQ ID NO: 167154 - RNA, 22 nt, Human
uauuucaacguaugaaaagcug

SEQ ID NO: 167155 - RNA, 22 nt, Human
cagagcaucgcgcagagagccu

SEQ ID NO: 167156 - RNA, 22 nt, Human
uagcuuuaaaaaucaucaaagc

SEQ ID NO: 167157 - RNA, 22 nt, Human
uccaggcaaaaggaacugcuug

SEQ ID NO: 167158 - RNA, 22 nt, Human
ucaccgucgggggucgcugucu

SEQ ID NO: 167159 - RNA, 22 nt, Human
cacaggugccaucucuucaugg

SEQ ID NO: 167160 - RNA, 22 nt, Human
gcuggaggcaguucagacacca

SEQ ID NO: 167161 - RNA, 22 nt, Human
cugggugaguauaggaaaggga

SEQ ID NO: 167162 - RNA, 22 nt, Human
gacuuuauucguuaacuguuaa

SEQ ID NO: 167163 - RNA, 22 nt, Human
cccaugagguggagguugcagu

SEQ ID NO: 167164 - RNA, 22 nt, Human
aucagagacaaaaccagcacuu

SEQ ID NO: 167165 - RNA, 22 nt, Human
uaauuauucuagucacauagca

SEQ ID NO: 167166 - RNA, 22 nt, Human
uuagggaaggcugcugucagcu

SEQ ID NO: 167167 - RNA, 22 nt, Human
gcauuuaaauuugaacuucaga

SEQ ID NO: 167168 - RNA, 22 nt, Human
cauuuauugaguggccacagug

SEQ ID NO: 167169 - RNA, 22 nt, Human
acagguguagcaggagcaucaa

SEQ ID NO: 167170 - RNA, 22 nt, Human
ucagugugaggucuuccacccg

SEQ ID NO: 167171 - RNA, 22 nt, Human
acaggccugagauuuugcauuu

SEQ ID NO: 167172 - RNA, 22 nt, Human
uuauugagcaacucuggggcuc

SEQ ID NO: 167173 - RNA, 22 nt, Human
uacauagugaacauuuacagag

SEQ ID NO: 167174 - RNA, 22 nt, Human
acagucauuagauacaaugucu

SEQ ID NO: 167175 - RNA, 22 nt, Human
gcaggcaggaaggacuaaguaa

SEQ ID NO: 167176 - RNA, 22 nt, Human
guaaacauuuucaucugugccc

SEQ ID NO: 167177 - RNA, 22 nt, Human
cucccaagauaaauaaggcagu

SEQ ID NO: 167178 - RNA, 22 nt, Human
ucagggcaucaucaugaauaua

SEQ ID NO: 167179 - RNA, 22 nt, Human
aaacagcuaauggccaggaaua

SEQ ID NO: 167180 - RNA, 22 nt, Human
auuucaguagaaaaucuugauu

SEQ ID NO: 167181 - RNA, 22 nt, Human
ggcauuuagauugaauuucugu

SEQ ID NO: 167182 - RNA, 22 nt, Human
gaacuuggaccugguccuuugg

SEQ ID NO: 167183 - RNA, 22 nt, Human
gcaggcagagucaauuugaucc

SEQ ID NO: 167184 - RNA, 22 nt, Human
aaagcugcccuugugaaacaag

SEQ ID NO: 167185 - RNA, 22 nt, Human
cuuuaagagaucaccaaucaca

SEQ ID NO: 167186 - RNA, 22 nt, Human
gugaauaaagggaguuuucaaa

SEQ ID NO: 167187 - RNA, 22 nt, Human
aguuuauuuuugauaagucuug

SEQ ID NO: 167188 - RNA, 22 nt, Human
uaaaaguauacuuucaaaggag

SEQ ID NO: 167189 - RNA, 22 nt, Human
ggcagggcaggaaagucaggaa

SEQ ID NO: 167190 - RNA, 22 nt, Human
auggcuuaagaaugcuuuugug

SEQ ID NO: 167191 - RNA, 22 nt, Human
ccagggcaggggcuggaguuca

SEQ ID NO: 167192 - RNA, 22 nt, Human
cuguccugauggugccacuggu

SEQ ID NO: 167193 - RNA, 22 nt, Human
cuuccaaacccaggguaugggc

SEQ ID NO: 167194 - RNA, 19 nt, Human
cuuuucaucaacagccaau

SEQ ID NO: 167195 - RNA, 23 nt, Human
uugcacauuggagcuggucuucu

SEQ ID NO: 167196 - RNA, 22 nt, Human
ucuggagggguuuagagggaca

SEQ ID NO: 167197 - RNA, 21 nt, Human
aagaaagauaauuaaggaccc

SEQ ID NO: 167198 - RNA, 22 nt, Human
ucuauacaugugcacacacauc

SEQ ID NO: 167199 - RNA, 22 nt, Human
ggauucuaacugaacagaauau

SEQ ID NO: 167200 - RNA, 20 nt, Human
gccugcagguuggaugggau

SEQ ID NO: 167201 - RNA, 22 nt, Human
aggguggcaccuggaagggaug

SEQ ID NO: 167202 - RNA, 22 nt, Human
aaagcucuuauagcagagugug

SEQ ID NO: 167203 - RNA, 22 nt, Human
cguccucagaggccauccgaaa

SEQ ID NO: 167204 - RNA, 22 nt, Human
uguggggccucgugcuagcugg

SEQ ID NO: 167205 - RNA, 22 nt, Human
ugguccugcccacgcccaucug

SEQ ID NO: 167206 - RNA, 22 nt, Human
uucacuuauagggauguuauug

SEQ ID NO: 167207 - RNA, 22 nt, Human
uguggggcugucaggcaacugg

SEQ ID NO: 167208 - RNA, 22 nt, Human
gggaccugggccagaggacagu

SEQ ID NO: 167209 - RNA, 22 nt, Human
aaaauacuguggaguguugaaa

SEQ ID NO: 167210 - RNA, 23 nt, Human
uuaggcacuuaguagggccagag

SEQ ID NO: 167211 - RNA, 22 nt, Human
ucaggaaauggcuucaugguuu

SEQ ID NO: 167212 - RNA, 19 nt, Human
gcaggcagcugggguaucc

SEQ ID NO: 167213 - RNA, 22 nt, Human
uuccugggaggcuguguacuug

SEQ ID NO: 167214 - RNA, 22 nt, Human
auuucuguggcuucauucuccu

SEQ ID NO: 167215 - RNA, 20 nt, Human
ugcagggcucugcuucucuc

SEQ ID NO: 167216 - RNA, 22 nt, Human
caguucuuauuuggccaguguc

SEQ ID NO: 167217 - RNA, 22 nt, Human
cagaugaacucuauccuguggc

SEQ ID NO: 167218 - RNA, 22 nt, Human
ucugaagagucuugcaagaaag

SEQ ID NO: 167219 - RNA, 22 nt, Human
aggaggaagggaagacaaguaa

SEQ ID NO: 167220 - RNA, 22 nt, Human
gagggcagagucuaaugaugca

SEQ ID NO: 167221 - RNA, 18 nt, Human
uggcucugccacucaccg

SEQ ID NO: 167222 - RNA, 22 nt, Human
uaugugucaaaccauucaucug

SEQ ID NO: 167223 - RNA, 22 nt, Human
aucuuucuauuucuaaaaacua

SEQ ID NO: 167224 - RNA, 22 nt, Human
caugugguucaaguacuccaca

SEQ ID NO: 167225 - RNA, 22 nt, Human
aaguguuuggggaucauuuuaa

SEQ ID NO: 167226 - RNA, 22 nt, Human
aacuugguaccaccuucugaag

SEQ ID NO: 167227 - RNA, 22 nt, Human
auauccaagaaacaauuaauuc

SEQ ID NO: 167228 - RNA, 20 nt, Human
ucuuauacagaaaacauuuu

SEQ ID NO: 167229 - RNA, 22 nt, Human
uaacauuugcugucuccuaugu

SEQ ID NO: 167230 - RNA, 22 nt, Human
ugacugaaauggcgacagugaa

SEQ ID NO: 167231 - RNA, 22 nt, Human
ccacagcugaccgcaggugagc

SEQ ID NO: 167232 - RNA, 22 nt, Human
uccaguggcaccuuggcccuca

SEQ ID NO: 167233 - RNA, 20 nt, Human
uguaacaaucuggauguugc

SEQ ID NO: 167234 - RNA, 22 nt, Human
cagggcagagggaaacuccuuu

SEQ ID NO: 167235 - RNA, 22 nt, Human
gcagacaggcccaguggaggga

SEQ ID NO: 167236 - RNA, 22 nt, Human
uccugguaggcuaugucauguc

SEQ ID NO: 167237 - RNA, 17 nt, Human
gccugcaggcccgcaga

SEQ ID NO: 167238 - RNA, 22 nt, Human
gagaaacaacacuugaugccuu

SEQ ID NO: 167239 - RNA, 22 nt, Human
auccuuagaagggagugaggac

SEQ ID NO: 167240 - RNA, 22 nt, Human
uuaaagauucugaggcugauua

SEQ ID NO: 167241 - RNA, 22 nt, Human
ggagcugagguaacagugagug

SEQ ID NO: 167242 - RNA, 16 nt, Human
ucagggcagaauggca

SEQ ID NO: 167243 - RNA, 22 nt, Human
uggcuggagcgcccuccucugc

SEQ ID NO: 167244 - RNA, 22 nt, Human
guguccugggcauuaggcuuag

SEQ ID NO: 167245 - RNA, 22 nt, Human
uaugaaaagguggccaauguag

SEQ ID NO: 167246 - RNA, 23 nt, Human
agaccugcaucugauaggcccug

SEQ ID NO: 167247 - RNA, 22 nt, Human
aaagccauuacaaaauuucaua

SEQ ID NO: 167248 - RNA, 22 nt, Human
aggcuuuaaguggccuacagcu

SEQ ID NO: 167249 - RNA, 22 nt, Human
agagaggcgaguuaccugugcu

SEQ ID NO: 167250 - RNA, 22 nt, Human
ugcuuaauagugcacugguuuc

SEQ ID NO: 167251 - RNA, 22 nt, Human
ugcaggugucuccagggcaggu

SEQ ID NO: 167252 - RNA, 22 nt, Human
auguuaaaugguuuauuauuaa

SEQ ID NO: 167253 - RNA, 22 nt, Human
cuggauuuaggacuaguccaag

SEQ ID NO: 167254 - RNA, 22 nt, Human
caugguuuauuagagcuuauuu

SEQ ID NO: 167255 - RNA, 21 nt, Human
acuguucauuugaugaacugg

SEQ ID NO: 167256 - RNA, 22 nt, Human
ucagacagaaggacuauuugaa

SEQ ID NO: 167257 - RNA, 22 nt, Human
cugggugauuccuguccaggca

SEQ ID NO: 167258 - RNA, 17 nt, Human
gggcugacaguggccuc

SEQ ID NO: 167259 - RNA, 22 nt, Human
gccaggcagccacccucugcga

SEQ ID NO: 167260 - RNA, 22 nt, Human
uggcagggugccaguugcgagu

SEQ ID NO: 167261 - RNA, 22 nt, Human
acagacuggagugagagaaaua

SEQ ID NO: 167262 - RNA, 22 nt, Human
gagguggugguggaggcauagc

SEQ ID NO: 167263 - RNA, 22 nt, Human
aucagagaaauggagggcgcuu

SEQ ID NO: 167264 - RNA, 22 nt, Human
uuauccaaacuggugaaucauu

SEQ ID NO: 167265 - RNA, 22 nt, Human
agugaggggauucaggcaaggu

SEQ ID NO: 167266 - RNA, 22 nt, Human
acaauacaggcuucuggacuua

SEQ ID NO: 167267 - RNA, 20 nt, Human
caugugucaguucucaccca

SEQ ID NO: 167268 - RNA, 22 nt, Human
uuucuucagccacuccaaacug

SEQ ID NO: 167269 - RNA, 22 nt, Human
cuuguauuaggaagaaugcuuu

SEQ ID NO: 167270 - RNA, 22 nt, Human
caaauucacaugauugcuucug

SEQ ID NO: 167271 - RNA, 22 nt, Human
uacagacaguuuuucagauauu

SEQ ID NO: 167272 - RNA, 22 nt, Human
cugcguguuugcacccugucug

SEQ ID NO: 167273 - RNA, 22 nt, Human
acagguggucuuugcuccuuuu

SEQ ID NO: 167274 - RNA, 22 nt, Human
auccuucuccagucguauuuuu

SEQ ID NO: 167275 - RNA, 22 nt, Human
cagagagcuuagugugcugcau

SEQ ID NO: 167276 - RNA, 22 nt, Human
uggagcagggcaucacugugcg

SEQ ID NO: 167277 - RNA, 22 nt, Human
cuuccugcccacuuccugcugg

SEQ ID NO: 167278 - RNA, 22 nt, Human
agauguuuuggagacacuaacc

SEQ ID NO: 167279 - RNA, 22 nt, Human
auuucccagcuuugaucaguuu

SEQ ID NO: 167280 - RNA, 22 nt, Human
uaauuucuggagggagaaagag

SEQ ID NO: 167281 - RNA, 20 nt, Human
cugcagggugagugggcgau

SEQ ID NO: 167282 - RNA, 22 nt, Human
ccuuccuugagaagcaauuccu

SEQ ID NO: 167283 - RNA, 18 nt, Human
ugagaggcuauuuuuugc

SEQ ID NO: 167284 - RNA, 22 nt, Human
uaggugguuaugucagccuaga

SEQ ID NO: 167285 - RNA, 22 nt, Human
cugaauaaagcccucgcgcgcu

SEQ ID NO: 167286 - RNA, 22 nt, Human
uuccuucuuguaaugaucugcc

SEQ ID NO: 167287 - RNA, 22 nt, Human
uucugaaagccaauucauugaa

SEQ ID NO: 167288 - RNA, 22 nt, Human
gagauuuaauuggauuaacuua

SEQ ID NO: 167289 - RNA, 22 nt, Human
acagaauugaaaguauaaucug

SEQ ID NO: 167290 - RNA, 22 nt, Human
gauuuauuuuuaaucagcaggg

SEQ ID NO: 167291 - RNA, 22 nt, Human
gaaucauuuauuuuugacagca

SEQ ID NO: 167292 - RNA, 22 nt, Human
aaugaaauguagcuuauccaua

SEQ ID NO: 167293 - RNA, 22 nt, Human
uuguccuggagguuaauagagu

SEQ ID NO: 167294 - RNA, 19 nt, Human
aagcauggugccucaccuc

SEQ ID NO: 167295 - RNA, 22 nt, Human
uacauguacaugcauagguaga

SEQ ID NO: 167296 - RNA, 23 nt, Human
augguuuaugucacacuuuugau

SEQ ID NO: 167297 - RNA, 22 nt, Human
uuaaauuauuucuagugaggug

SEQ ID NO: 167298 - RNA, 22 nt, Human
gggcaggugugcagagcuguug

SEQ ID NO: 167299 - RNA, 22 nt, Human
uuggaucagaugauaucuuugu

SEQ ID NO: 167300 - RNA, 22 nt, Human
aagguucuaagggaagccaugc

SEQ ID NO: 167301 - RNA, 22 nt, Human
ucuuuauuuuaugcuugugcaa

SEQ ID NO: 167302 - RNA, 22 nt, Human
aaauacugggcucaaaaggguu

SEQ ID NO: 167303 - RNA, 22 nt, Human
uguccucaaggagcuucagucu

SEQ ID NO: 167304 - RNA, 22 nt, Human
auuugcuugugcuaugaaaguu

SEQ ID NO: 167305 - RNA, 22 nt, Human
cauggcuuguaauaaauuuaua

SEQ ID NO: 167306 - RNA, 22 nt, Human
gucuggaaauuuaagguaugag

SEQ ID NO: 167307 - RNA, 22 nt, Human
cgacccuacagacagugcugag

SEQ ID NO: 167308 - RNA, 22 nt, Human
uugugucccuggagcuucugug

SEQ ID NO: 167309 - RNA, 22 nt, Human
aagggcuccaagagguagcugg

SEQ ID NO: 167310 - RNA, 18 nt, Human
gaggauggaaggagaugc

SEQ ID NO: 167311 - RNA, 22 nt, Human
gcaggggcuaaggacacagaga

SEQ ID NO: 167312 - RNA, 22 nt, Human
uguccuuuuucuuaggaaauau

SEQ ID NO: 167313 - RNA, 22 nt, Human
aaagcagaacugagagagcugg

SEQ ID NO: 167314 - RNA, 22 nt, Human
auuucagauucagaaauguagg

SEQ ID NO: 167315 - RNA, 22 nt, Human
aaucaagucaaccaucaugugc

SEQ ID NO: 167316 - RNA, 22 nt, Human
ggcaggcauugcaacauguaca

SEQ ID NO: 167317 - RNA, 22 nt, Human
uucacagaguuauuuuuaugcu

SEQ ID NO: 167318 - RNA, 22 nt, Human
uuauuccauuauuucacuuagg

SEQ ID NO: 167319 - RNA, 22 nt, Human
gauugcugccagcguguccgug

SEQ ID NO: 167320 - RNA, 22 nt, Human
guucuucaaagugacaacuaaa

SEQ ID NO: 167321 - RNA, 22 nt, Human
auguuacacauaggcauaaaug

SEQ ID NO: 167322 - RNA, 22 nt, Human
gagcuuuaggagaaggagguca

SEQ ID NO: 167323 - RNA, 22 nt, Human
aaaaugaugcuguaauuuggca

SEQ ID NO: 167324 - RNA, 22 nt, Human
aggcagggcugggauuagacuc

SEQ ID NO: 167325 - RNA, 22 nt, Human
ccaucagauuagcaaaauccag

SEQ ID NO: 167326 - RNA, 22 nt, Human
uucccucucacuuaaagcuugg

SEQ ID NO: 167327 - RNA, 22 nt, Human
aaagcugcccuacacggaagca

SEQ ID NO: 167328 - RNA, 22 nt, Human
uguccucacaggaaugaacuuu

SEQ ID NO: 167329 - RNA, 22 nt, Human
gcagggaccagggccagaucca

SEQ ID NO: 167330 - RNA, 22 nt, Human
uaacagaagaaaacauauugga

SEQ ID NO: 167331 - RNA, 22 nt, Human
aggauuuauuacaagccauggu

SEQ ID NO: 167332 - RNA, 22 nt, Human
aaguauuucguucugaaaaagu

SEQ ID NO: 167333 - RNA, 18 nt, Human
uuuuaauuucaggggugg

SEQ ID NO: 167334 - RNA, 22 nt, Human
acaugcuuccaaauuauguugg

SEQ ID NO: 167335 - RNA, 22 nt, Human
aauagugaacaggaacaugcuu

SEQ ID NO: 167336 - RNA, 22 nt, Human
guuggcuaugagagcuuuagug

SEQ ID NO: 167337 - RNA, 22 nt, Human
auuuccauacacccauuucuga

SEQ ID NO: 167338 - RNA, 22 nt, Human
ugguggcaauucaaagacagca

SEQ ID NO: 167339 - RNA, 22 nt, Human
ugguggggucaucgucagaugc

SEQ ID NO: 167340 - RNA, 22 nt, Human
ucagaaaagagaaaaucuuaua

SEQ ID NO: 167341 - RNA, 22 nt, Human
uaauuccaaguugagacaugca

SEQ ID NO: 167342 - RNA, 22 nt, Human
uugaaugaggaagagcacuggc

SEQ ID NO: 167343 - RNA, 22 nt, Human
uuguaaaguucuuaggaagcuc

SEQ ID NO: 167344 - RNA, 22 nt, Human
gggcagguuggcaucccgggca

SEQ ID NO: 167345 - RNA, 22 nt, Human
gcacccaggcuugggcagcaac

SEQ ID NO: 167346 - RNA, 22 nt, Human
augguuuuccucugcugcuuaa

SEQ ID NO: 167347 - RNA, 22 nt, Human
ggggugugucugacaaugguau

SEQ ID NO: 167348 - RNA, 22 nt, Human
uucaaacaaaacuguucccaua

SEQ ID NO: 167349 - RNA, 22 nt, Human
aaagugguugcugucagccucu

SEQ ID NO: 167350 - RNA, 22 nt, Human
acaguguucacuuaacaaugga

SEQ ID NO: 167351 - RNA, 22 nt, Human
cagcaaucgggugauaugcaau

SEQ ID NO: 167352 - RNA, 22 nt, Human
gugggugugauaagaccaaggg

SEQ ID NO: 167353 - RNA, 22 nt, Human
gcagaauuuucuguuuucuaga

SEQ ID NO: 167354 - RNA, 22 nt, Human
cagagcauuaaaaccagcucug

SEQ ID NO: 167355 - RNA, 22 nt, Human
uggagcugagagccaggcuggc

SEQ ID NO: 167356 - RNA, 22 nt, Human
gagugaggcuggaaucauggcu

SEQ ID NO: 167357 - RNA, 22 nt, Human
ggcagggcuugucucugugaug

SEQ ID NO: 167358 - RNA, 22 nt, Human
cuugaauccaaaugggagauga

SEQ ID NO: 167359 - RNA, 22 nt, Human
ugaccugcagucaagaggggaa

SEQ ID NO: 167360 - RNA, 22 nt, Human
ggaggauuugucaucugaagau

SEQ ID NO: 167361 - RNA, 16 nt, Human
uuuccaaagggcagcu

SEQ ID NO: 167362 - RNA, 20 nt, Human
uuaagaaaagcacauccugc

SEQ ID NO: 167363 - RNA, 22 nt, Human
auacagggacauccaguuuuuc

SEQ ID NO: 167364 - RNA, 22 nt, Human
guucacaagaguuacagacaga

SEQ ID NO: 167365 - RNA, 22 nt, Human
aaguccuucuuuauaugagagu

SEQ ID NO: 167366 - RNA, 22 nt, Human
caauuucuggaacuaauucuga

SEQ ID NO: 167367 - RNA, 22 nt, Human
ugaaacuaggccaaucaaauua

SEQ ID NO: 167368 - RNA, 22 nt, Human
auuucaacguuagauguaauag

SEQ ID NO: 167369 - RNA, 22 nt, Human
aggaccugccaggugcaaagca

SEQ ID NO: 167370 - RNA, 22 nt, Human
uguagaaauuaguaagaucaac

SEQ ID NO: 167371 - RNA, 22 nt, Human
ucugggaaccagugcggcuggg

SEQ ID NO: 167372 - RNA, 22 nt, Human
ucuaggguccacagggucagcc

SEQ ID NO: 167373 - RNA, 22 nt, Human
cagggcaguuuuacuucucucu

SEQ ID NO: 167374 - RNA, 22 nt, Human
ggagcugaguggguuuauugau

SEQ ID NO: 167375 - RNA, 22 nt, Human
gcguuaauaacauuaauaaugc

SEQ ID NO: 167376 - RNA, 22 nt, Human
aggcagguccccuggaaggcac

SEQ ID NO: 167377 - RNA, 22 nt, Human
uauuucaagaacuucuauccau

SEQ ID NO: 167378 - RNA, 22 nt, Human
gaagaauccaugcuaauuuacc

SEQ ID NO: 167379 - RNA, 22 nt, Human
aauaauaagauacuaagggagu

SEQ ID NO: 167380 - RNA, 22 nt, Human
guuuacuguuuucugauaagug

SEQ ID NO: 167381 - RNA, 22 nt, Human
uacauguggccagaaauuugag

SEQ ID NO: 167382 - RNA, 17 nt, Human
uaaagccagucaaguca

SEQ ID NO: 167383 - RNA, 21 nt, Human
auauuguagguaaagugcagg

SEQ ID NO: 167384 - RNA, 22 nt, Human
gguuucaaauuaaagucuuaag

SEQ ID NO: 167385 - RNA, 22 nt, Human
ccucaugcugcaucucugaggu

SEQ ID NO: 167386 - RNA, 22 nt, Human
acuuaaaaagaaucuuuucacg

SEQ ID NO: 167387 - RNA, 18 nt, Human
aaaaagugcucaggccua

SEQ ID NO: 167388 - RNA, 22 nt, Human
gauuuagagcaggaaugcaugg

SEQ ID NO: 167389 - RNA, 22 nt, Human
auuuauugagacuuaacaaccc

SEQ ID NO: 167390 - RNA, 22 nt, Human
gcugcuuuauaaucucggcaga

SEQ ID NO: 167391 - RNA, 22 nt, Human
ugcauguguuugccacagugag

SEQ ID NO: 167392 - RNA, 22 nt, Human
caugugucaaaugauguagcug

SEQ ID NO: 167393 - RNA, 22 nt, Human
uguccucuuccagugcuccuuc

SEQ ID NO: 167394 - RNA, 22 nt, Human
uuguauuggcaaagaacuugag

SEQ ID NO: 167395 - RNA, 22 nt, Human
gguggggccugcuccagcggcc

SEQ ID NO: 167396 - RNA, 22 nt, Human
augaaacaguguguauagcaaa

SEQ ID NO: 167397 - RNA, 22 nt, Human
uuguucaugguuguaaguuuga

SEQ ID NO: 167398 - RNA, 22 nt, Human
agggccucugacgcccccagcc

SEQ ID NO: 167399 - RNA, 22 nt, Human
caguccuuccuugccccuuggg

SEQ ID NO: 167400 - RNA, 22 nt, Human
ggaccugcauuuuaacaagauc

SEQ ID NO: 167401 - RNA, 22 nt, Human
uguacuuaugagauccuagucg

SEQ ID NO: 167402 - RNA, 22 nt, Human
aucauuacuccuguaaaauugu

SEQ ID NO: 167403 - RNA, 22 nt, Human
uacagauauagagauuuauaga

SEQ ID NO: 167404 - RNA, 22 nt, Human
ggcuccacccugcuuccagaag

SEQ ID NO: 167405 - RNA, 22 nt, Human
aauuaauggaaaguaaggaagg

SEQ ID NO: 167406 - RNA, 19 nt, Human
cgcagguggaaggagccgc

SEQ ID NO: 167407 - RNA, 22 nt, Human
ccguagcacaugcuccuggggc

SEQ ID NO: 167408 - RNA, 21 nt, Human
ugggugggcagagucucuuca

SEQ ID NO: 167409 - RNA, 22 nt, Human
guguccuuaugcauaccagagu

SEQ ID NO: 167410 - RNA, 22 nt, Human
guggaggagaggcgccuugcgg

SEQ ID NO: 167411 - RNA, 22 nt, Human
uuucuuauacuauauugucauc

SEQ ID NO: 167412 - RNA, 22 nt, Human
gaggcaggcacuguuaucagca

SEQ ID NO: 167413 - RNA, 22 nt, Human
cuguccugguacuuugagguuc

SEQ ID NO: 167414 - RNA, 22 nt, Human
uacccaggggcugagcagaggu

SEQ ID NO: 167415 - RNA, 22 nt, Human
auuucucaguguacauuauguu

SEQ ID NO: 167416 - RNA, 22 nt, Human
agagguugggucugaggugaga

SEQ ID NO: 167417 - RNA, 22 nt, Human
aaauggaucuguggaauacauu

SEQ ID NO: 167418 - RNA, 22 nt, Human
uauccuguuuugcacaauuaua

SEQ ID NO: 167419 - RNA, 17 nt, Human
aggcagguaagaguuau

SEQ ID NO: 167420 - RNA, 22 nt, Human
uauauucaaugauuaguaucag

SEQ ID NO: 167421 - RNA, 22 nt, Human
acacagauuuuacauguuaugc

SEQ ID NO: 167422 - RNA, 22 nt, Human
auucugggugacuacgugauca

SEQ ID NO: 167423 - RNA, 22 nt, Human
cagagaaagggugaauuccuuc

SEQ ID NO: 167424 - RNA, 22 nt, Human
cccuuccugggugucccggagu

SEQ ID NO: 167425 - RNA, 22 nt, Human
agugugagcuaauagcagagcc

SEQ ID NO: 167426 - RNA, 22 nt, Human
agcaggugggcaugaaagcuga

SEQ ID NO: 167427 - RNA, 20 nt, Human
gagggcucguggauggauaa

SEQ ID NO: 167428 - RNA, 18 nt, Human
agcagguggauuuauugg

SEQ ID NO: 167429 - RNA, 19 nt, Human
uugaaauuguuugauaugg

SEQ ID NO: 167430 - RNA, 21 nt, Human
agaauuaaauuggauuugugu

SEQ ID NO: 167431 - RNA, 22 nt, Human
auuaaauuggaucugcauaguu

SEQ ID NO: 167432 - RNA, 22 nt, Human
aagaugauguuguguuuucacu

SEQ ID NO: 167433 - RNA, 22 nt, Human
ccuggaucagagccagagaagc

SEQ ID NO: 167434 - RNA, 22 nt, Human
uugauacaggcucuauuucauc

SEQ ID NO: 167435 - RNA, 19 nt, Human
cuucuucuuggcagccaag

SEQ ID NO: 167436 - RNA, 22 nt, Human
uuugaaguguuauuucuaucac

SEQ ID NO: 167437 - RNA, 20 nt, Human
cuuuaguuauuaacagcacu

SEQ ID NO: 167438 - RNA, 22 nt, Human
uuuauugaacacuugcacuggc

SEQ ID NO: 167439 - RNA, 22 nt, Human
gcaggugguuaaggucccaugu

SEQ ID NO: 167440 - RNA, 22 nt, Human
aaauguaguugaaaaguuaagg

SEQ ID NO: 167441 - RNA, 20 nt, Human
gcauccagacacccagcugc

SEQ ID NO: 167442 - RNA, 19 nt, Human
ccuguucaugacucugucc

SEQ ID NO: 167443 - RNA, 22 nt, Human
ggaucugagagcaagcaggacc

SEQ ID NO: 167444 - RNA, 17 nt, Human
ucagcaaagacaaagga

SEQ ID NO: 167445 - RNA, 22 nt, Human
cuuuacuucucaaaauaaagca

SEQ ID NO: 167446 - RNA, 23 nt, Human
ugcuguggauggcagguccuugc

SEQ ID NO: 167447 - RNA, 22 nt, Human
agaggcaugaucuuauaauuua

SEQ ID NO: 167448 - RNA, 22 nt, Human
ugcagggaugcuagagguaaga

SEQ ID NO: 167449 - RNA, 19 nt, Human
cuauacagccucugaggaa

SEQ ID NO: 167450 - RNA, 22 nt, Human
auauugagaugaggauauuaac

SEQ ID NO: 167451 - RNA, 22 nt, Human
uguccuggggcgacuuggggcc

SEQ ID NO: 167452 - RNA, 22 nt, Human
cagaugagaguggccaggguuc

SEQ ID NO: 167453 - RNA, 22 nt, Human
aaguccuuuaauaucacauagu

SEQ ID NO: 167454 - RNA, 22 nt, Human
aagacaggaaaagcuccaggcc

SEQ ID NO: 167455 - RNA, 22 nt, Human
cagggcucgcucgcucgcucgc

SEQ ID NO: 167456 - RNA, 22 nt, Human
auuugcauaauagugauuugua

SEQ ID NO: 167457 - RNA, 21 nt, Human
aauuagggugccucuuauaau

SEQ ID NO: 167458 - RNA, 22 nt, Human
aacuggauuaacuggcucaaau

SEQ ID NO: 167459 - RNA, 22 nt, Human
cagugagguggauggauggccu

SEQ ID NO: 167460 - RNA, 22 nt, Human
aaauccuaauaaugcacuagug

SEQ ID NO: 167461 - RNA, 22 nt, Human
caaacuggcuaugggaaucuug

SEQ ID NO: 167462 - RNA, 22 nt, Human
gcuggcugaguucugucgucug

SEQ ID NO: 167463 - RNA, 22 nt, Human
acauguguacuuuuaaggaugu

SEQ ID NO: 167464 - RNA, 22 nt, Human
ugguggggauucccucccuggc

SEQ ID NO: 167465 - RNA, 22 nt, Human
agaaacauccugcuuuccauuu

SEQ ID NO: 167466 - RNA, 22 nt, Human
uuucuucucacccaggacagag

SEQ ID NO: 167467 - RNA, 22 nt, Human
uuauuuaaaauguagguuggga

SEQ ID NO: 167468 - RNA, 22 nt, Human
uacaugugguagggagggcagu

SEQ ID NO: 167469 - RNA, 22 nt, Human
aagggcaggcagagaucauaua

SEQ ID NO: 167470 - RNA, 22 nt, Human
agaggcucugccgccucaggua

SEQ ID NO: 167471 - RNA, 22 nt, Human
ugaugguuuuauuaauaggacc

SEQ ID NO: 167472 - RNA, 22 nt, Human
ggagagggggcucccugcuugg

SEQ ID NO: 167473 - RNA, 22 nt, Human
uguuucaugauugcugucauuu

SEQ ID NO: 167474 - RNA, 22 nt, Human
uacagagaguacagcauccaca

SEQ ID NO: 167475 - RNA, 22 nt, Human
uaggugucagguauagaauuua

SEQ ID NO: 167476 - RNA, 22 nt, Human
auggcuuuuuagacuuugguac

SEQ ID NO: 167477 - RNA, 22 nt, Human
guauacagauacuuagacgugc

SEQ ID NO: 167478 - RNA, 22 nt, Human
caauuucucgaacucuaaucca

SEQ ID NO: 167479 - RNA, 22 nt, Human
ucagacagaggagcucgugcag

SEQ ID NO: 167480 - RNA, 21 nt, Human
ucagcuuugcaacugcacauc

SEQ ID NO: 167481 - RNA, 22 nt, Human
aguggcagggcuggcugcugca

SEQ ID NO: 167482 - RNA, 22 nt, Human
uccugcagaucaaagccuuuga

SEQ ID NO: 167483 - RNA, 22 nt, Human
cuguccuguggugacagguaca

SEQ ID NO: 167484 - RNA, 21 nt, Human
gaaaagcaagggaguagaaca

SEQ ID NO: 167485 - RNA, 20 nt, Human
cauuugaaucuccauucugc

SEQ ID NO: 167486 - RNA, 22 nt, Human
uuccuaauggcaaaacauguuu

SEQ ID NO: 167487 - RNA, 22 nt, Human
caggaaaggugugucaugaugg

SEQ ID NO: 167488 - RNA, 22 nt, Human
uuaguugauguucuggagguag

SEQ ID NO: 167489 - RNA, 22 nt, Human
auggaagacagauaaggcagaa

SEQ ID NO: 167490 - RNA, 23 nt, Human
ugagcaucacaggagaaccaggc

SEQ ID NO: 167491 - RNA, 22 nt, Human
ucauuauccuaguaucuugaau

SEQ ID NO: 167492 - RNA, 22 nt, Human
cuauaauuaugcucaaaaugua

SEQ ID NO: 167493 - RNA, 22 nt, Human
accugcaggcacaggugugcgc

SEQ ID NO: 167494 - RNA, 22 nt, Human
ugcuuaauacguauuugcugga

SEQ ID NO: 167495 - RNA, 22 nt, Human
ggcagggcagcgcugauuaggg

SEQ ID NO: 167496 - RNA, 21 nt, Human
aaauggauagggcaauggaag

SEQ ID NO: 167497 - RNA, 22 nt, Human
auacagaauacuaauuccugag

SEQ ID NO: 167498 - RNA, 22 nt, Human
ucaggugggaguagaaugcuag

SEQ ID NO: 167499 - RNA, 22 nt, Human
gaucagaaucuucauuuucagu

SEQ ID NO: 167500 - RNA, 22 nt, Human
uagaauaugauuaauuuucuua

SEQ ID NO: 167501 - RNA, 22 nt, Human
uugcuguagcucauuucacucu

SEQ ID NO: 167502 - RNA, 22 nt, Human
ggacaggugugaggcuggcaca

SEQ ID NO: 167503 - RNA, 19 nt, Human
aggcaggugcagagguccc

SEQ ID NO: 167504 - RNA, 22 nt, Human
ccuggacucaggcugugggcac

SEQ ID NO: 167505 - RNA, 22 nt, Human
uuucuuuguuguuaucacauca

SEQ ID NO: 167506 - RNA, 22 nt, Human
ucagcuuucucucgccaucagg

SEQ ID NO: 167507 - RNA, 22 nt, Human
uggacaacauagugagaccuca

SEQ ID NO: 167508 - RNA, 22 nt, Human
aucuaacacuguaaacugucuu

SEQ ID NO: 167509 - RNA, 22 nt, Human
gucccauaaguagugcaacuug

SEQ ID NO: 167510 - RNA, 22 nt, Human
aggcaggugcuuaugacuugcu

SEQ ID NO: 167511 - RNA, 22 nt, Human
gguaggaguauuuugcagcagu

SEQ ID NO: 167512 - RNA, 22 nt, Human
ucacaggcuugugaacauugca

SEQ ID NO: 167513 - RNA, 20 nt, Human
aaguuuucuccaaauacagu

SEQ ID NO: 167514 - RNA, 22 nt, Human
uauuccagguuucuuguuguau

SEQ ID NO: 167515 - RNA, 22 nt, Human
cccagugucugggccugcaggg

SEQ ID NO: 167516 - RNA, 22 nt, Human
acuuggcaaguaucuauaaagu

SEQ ID NO: 167517 - RNA, 22 nt, Human
caguaucugucaguaaucaggu

SEQ ID NO: 167518 - RNA, 22 nt, Human
agcugcaacuguccuugccuug

SEQ ID NO: 167519 - RNA, 22 nt, Human
cuguccucaucugccccaaggg

SEQ ID NO: 167520 - RNA, 22 nt, Human
ggaggggucucuagcgaggaga

SEQ ID NO: 167521 - RNA, 22 nt, Human
uuguauuuggguaguauagaga

SEQ ID NO: 167522 - RNA, 22 nt, Human
acacaaugcauauuuuuccaga

SEQ ID NO: 167523 - RNA, 22 nt, Human
uguccuggagacacaagguggu

SEQ ID NO: 167524 - RNA, 22 nt, Human
guaaucucagcuacuugggagg

SEQ ID NO: 167525 - RNA, 22 nt, Human
ggguuucaugguucucacaaug

SEQ ID NO: 167526 - RNA, 22 nt, Human
ccuugcucaucccccagugccu

SEQ ID NO: 167527 - RNA, 22 nt, Human
ggcaggugcucaaaaauauuug

SEQ ID NO: 167528 - RNA, 22 nt, Human
gauuuacagcuauacccaaugg

SEQ ID NO: 167529 - RNA, 22 nt, Human
gguagggcaaaguagggcaccu

SEQ ID NO: 167530 - RNA, 22 nt, Human
ugaaauagucuaaaaaaccaga

SEQ ID NO: 167531 - RNA, 22 nt, Human
uggcagggaauacagauguuua

SEQ ID NO: 167532 - RNA, 21 nt, Human
uccugcagaaugccuuccuac

SEQ ID NO: 167533 - RNA, 19 nt, Human
cuguuauugucagagcucc

SEQ ID NO: 167534 - RNA, 22 nt, Human
cauuugcagagggugacacucu

SEQ ID NO: 167535 - RNA, 22 nt, Human
uuccuucuucauuguguuacag

SEQ ID NO: 167536 - RNA, 22 nt, Human
uggcuuuaggagcuauauaccu

SEQ ID NO: 167537 - RNA, 22 nt, Human
uuccucagagggcgcuggggaa

SEQ ID NO: 167538 - RNA, 22 nt, Human
auuuuacuuugugaauauugac

SEQ ID NO: 167539 - RNA, 22 nt, Human
auugcuuuuagugaaauuauau

SEQ ID NO: 167540 - RNA, 22 nt, Human
uucauagaucucaauuuugagg

SEQ ID NO: 167541 - RNA, 22 nt, Human
uauuaggguaaauuugacaugc

SEQ ID NO: 167542 - RNA, 22 nt, Human
uucacagagagaacucaaacca

SEQ ID NO: 167543 - RNA, 22 nt, Human
uggcuuuagguugcauguuucu

SEQ ID NO: 167544 - RNA, 19 nt, Human
gcgaggaagucacuguggc

SEQ ID NO: 167545 - RNA, 22 nt, Human
uggagcagugguccuggagaug

SEQ ID NO: 167546 - RNA, 22 nt, Human
aagaugcagcuuuacaauaagg

SEQ ID NO: 167547 - RNA, 22 nt, Human
uucccuuccucacucuacuugu

SEQ ID NO: 167548 - RNA, 22 nt, Human
aaaucauguuggcacaauaaaa

SEQ ID NO: 167549 - RNA, 22 nt, Human
gaggugucugaguggggaccug

SEQ ID NO: 167550 - RNA, 22 nt, Human
uauaaaauucucaguuuggggu

SEQ ID NO: 167551 - RNA, 18 nt, Human
uuugcaaaggaaguaugg

SEQ ID NO: 167552 - RNA, 22 nt, Human
uuggaggauaaggauauugauu

SEQ ID NO: 167553 - RNA, 22 nt, Human
gcagggcagugugucugugggg

SEQ ID NO: 167554 - RNA, 22 nt, Human
ucuuccuugccuugcuucauca

SEQ ID NO: 167555 - RNA, 22 nt, Human
ccaggccuagccccugagggua

SEQ ID NO: 167556 - RNA, 21 nt, Human
uuuagggaccaggucauaggc

SEQ ID NO: 167557 - RNA, 22 nt, Human
aguguuagugaaagguguuuau

SEQ ID NO: 167558 - RNA, 22 nt, Human
caugaaggaauaauuguuuaga

SEQ ID NO: 167559 - RNA, 22 nt, Human
ucuaggguguauaaggaagccu

SEQ ID NO: 167560 - RNA, 22 nt, Human
uucaccacagucucaucuacgc

SEQ ID NO: 167561 - RNA, 22 nt, Human
aguacaauuuaaugaagauagc

SEQ ID NO: 167562 - RNA, 22 nt, Human
aaagcagacugauuugcaucac

SEQ ID NO: 167563 - RNA, 22 nt, Human
ggagcugagcagcgauggcgga

SEQ ID NO: 167564 - RNA, 22 nt, Human
agcuucuugggcuuuacacaaa

SEQ ID NO: 167565 - RNA, 22 nt, Human
ggcauuuagagggcuuuucuga

SEQ ID NO: 167566 - RNA, 22 nt, Human
aagggcagaauagagaagaugg

SEQ ID NO: 167567 - RNA, 22 nt, Human
ggucccaggaaucuguguucua

SEQ ID NO: 167568 - RNA, 22 nt, Human
cauagaaacuugcagcaagcac

SEQ ID NO: 167569 - RNA, 22 nt, Human
ggacauuuuucuuccuacaaug

SEQ ID NO: 167570 - RNA, 22 nt, Human
cuuaaauuggaugaguuaaguu

SEQ ID NO: 167571 - RNA, 22 nt, Human
ccagguguguacagaacagcac

SEQ ID NO: 167572 - RNA, 22 nt, Human
ucuccauuuuauagauaaugaa

SEQ ID NO: 167573 - RNA, 22 nt, Human
gcugguccagggccucuguggg

SEQ ID NO: 167574 - RNA, 22 nt, Human
guuccaaagucucugagcugag

SEQ ID NO: 167575 - RNA, 22 nt, Human
uaucaagugacuaucacagaac

SEQ ID NO: 167576 - RNA, 22 nt, Human
ggaucuucagccagcaggugcc

SEQ ID NO: 167577 - RNA, 22 nt, Human
auuuguagugaagugaaaauaa

SEQ ID NO: 167578 - RNA, 22 nt, Human
cauuuauucucagauccuuguc

SEQ ID NO: 167579 - RNA, 22 nt, Human
aaugguuuucuagaacaugaaa

SEQ ID NO: 167580 - RNA, 22 nt, Human
uuucaacguguaaucuuauuua

SEQ ID NO: 167581 - RNA, 22 nt, Human
ggggcagggagguuaucgccga

SEQ ID NO: 167582 - RNA, 22 nt, Human
ucaagaaacugugcuacagagu

SEQ ID NO: 167583 - RNA, 22 nt, Human
agcugcaauucuggacauaguc

SEQ ID NO: 167584 - RNA, 22 nt, Human
uguggggcugugguguucuucu

SEQ ID NO: 167585 - RNA, 22 nt, Human
ucagcuuucuauguugcuaaac

SEQ ID NO: 167586 - RNA, 17 nt, Human
ccaggugggaggugggg

SEQ ID NO: 167587 - RNA, 22 nt, Human
caggcauagguaggauguuucu

SEQ ID NO: 167588 - RNA, 22 nt, Human
agggcucugagcuggaccaccu

SEQ ID NO: 167589 - RNA, 22 nt, Human
uuuaggcacagggaguugguuu

SEQ ID NO: 167590 - RNA, 22 nt, Human
auccauuugaaagaacagucca

SEQ ID NO: 167591 - RNA, 22 nt, Human
ugcuuuauguggcugauacuca

SEQ ID NO: 167592 - RNA, 22 nt, Human
uugcuuuaaaauggcuaagucu

SEQ ID NO: 167593 - RNA, 22 nt, Human
ucaugugucugcugcagcuguu

SEQ ID NO: 167594 - RNA, 22 nt, Human
ccagauaaggcuuuuuaaaagc

SEQ ID NO: 167595 - RNA, 22 nt, Human
uuggaacauccaggacagauau

SEQ ID NO: 167596 - RNA, 22 nt, Human
uuugucauaucacacaauuuug

SEQ ID NO: 167597 - RNA, 21 nt, Human
ugggaccuagcuuugcacagg

SEQ ID NO: 167598 - RNA, 22 nt, Human
augguuuauugcuuuaaugaaa

SEQ ID NO: 167599 - RNA, 22 nt, Human
gagugcuugcauauuuauuguc

SEQ ID NO: 167600 - RNA, 22 nt, Human
aaauauaguaaaugcauaguuc

SEQ ID NO: 167601 - RNA, 22 nt, Human
ggcaggugccuucugugcuagc

SEQ ID NO: 167602 - RNA, 22 nt, Human
ucuuuauuucugaaucccccau

SEQ ID NO: 167603 - RNA, 22 nt, Human
uagaacauaagucauucauuug

SEQ ID NO: 167604 - RNA, 22 nt, Human
ugcuuuaucugugagaaccuga

SEQ ID NO: 167605 - RNA, 22 nt, Human
uuuauuuaaagucguguguuaa

SEQ ID NO: 167606 - RNA, 22 nt, Human
cauacuuuugcccugacauucu

SEQ ID NO: 167607 - RNA, 22 nt, Human
uaguccuuuaucaaacauuuau

SEQ ID NO: 167608 - RNA, 22 nt, Human
caauuucuuguuaauucucagg

SEQ ID NO: 167609 - RNA, 22 nt, Human
uaaagccacuucauucuagucu

SEQ ID NO: 167610 - RNA, 22 nt, Human
cuuugaagauggcaaauuuaga

SEQ ID NO: 167611 - RNA, 22 nt, Human
auuucuggauuuuggaugcugc

SEQ ID NO: 167612 - RNA, 22 nt, Human
acuuucuucuacuacuuggaga

SEQ ID NO: 167613 - RNA, 22 nt, Human
aggacauguaaauggagaggga

SEQ ID NO: 167614 - RNA, 22 nt, Human
aaaaagguugauccagauuagg

SEQ ID NO: 167615 - RNA, 22 nt, Human
gauaaaauauguggccuuuagu

SEQ ID NO: 167616 - RNA, 22 nt, Human
aaaauccucuaauucuagaaua

SEQ ID NO: 167617 - RNA, 22 nt, Human
ugccuggaaggcccaugggaag

SEQ ID NO: 167618 - RNA, 22 nt, Human
uuuguaaaggccugaauuucag

SEQ ID NO: 167619 - RNA, 22 nt, Human
ucagacagauuuugacacuugc

SEQ ID NO: 167620 - RNA, 22 nt, Human
ugaaagcuuugggacaguguga

SEQ ID NO: 167621 - RNA, 19 nt, Human
ugcuuccucaccaucuccc

SEQ ID NO: 167622 - RNA, 22 nt, Human
uucagcacuguuauggauuugc

SEQ ID NO: 167623 - RNA, 22 nt, Human
uauuuccauguuagaacuaagu

SEQ ID NO: 167624 - RNA, 22 nt, Human
uugcuuuacuuugccauucguu

SEQ ID NO: 167625 - RNA, 22 nt, Human
uccagaccaugugagaggcgca

SEQ ID NO: 167626 - RNA, 22 nt, Human
ugaaaaaccucaguccgcuuua

SEQ ID NO: 167627 - RNA, 22 nt, Human
uauuugaagauucuucugaugu

SEQ ID NO: 167628 - RNA, 22 nt, Human
uguugauuaguguuuagacuua

SEQ ID NO: 167629 - RNA, 22 nt, Human
gcuggaggauggacuggaagaa

SEQ ID NO: 167630 - RNA, 22 nt, Human
uuuuucauauuccccucucugg

SEQ ID NO: 167631 - RNA, 22 nt, Human
agcagggcaaagucaggcuaac

SEQ ID NO: 167632 - RNA, 22 nt, Human
ugcugccagggcucugcccaca

SEQ ID NO: 167633 - RNA, 22 nt, Human
acagguggacacagcagcaguc

SEQ ID NO: 167634 - RNA, 22 nt, Human
ugggucuguagggcuguccaau

SEQ ID NO: 167635 - RNA, 22 nt, Human
guuuaauaauguugaauuacua

SEQ ID NO: 167636 - RNA, 22 nt, Human
ugcagggcauaggguccaguuu

SEQ ID NO: 167637 - RNA, 22 nt, Human
ugcuuuauucagucucugccau

SEQ ID NO: 167638 - RNA, 22 nt, Human
ucacuuuggauuauguaauuuc

SEQ ID NO: 167639 - RNA, 22 nt, Human
ugugucaauuuucauuccuacu

SEQ ID NO: 167640 - RNA, 22 nt, Human
acucauugaaacuuaagaucua

SEQ ID NO: 167641 - RNA, 22 nt, Human
ggauuugaauuguugaaaugau

SEQ ID NO: 167642 - RNA, 19 nt, Human
uucuaccuuacuguaggcu

SEQ ID NO: 167643 - RNA, 22 nt, Human
uggagcugguaaacagugacau

SEQ ID NO: 167644 - RNA, 22 nt, Human
cagaauguagaucaucaucaag

SEQ ID NO: 167645 - RNA, 22 nt, Human
aaaauugagagucuugugcaag

SEQ ID NO: 167646 - RNA, 21 nt, Human
acaugucuggucauuuuuagc

SEQ ID NO: 167647 - RNA, 22 nt, Human
ugcauguuaagaaaauauugag

SEQ ID NO: 167648 - RNA, 22 nt, Human
uauuuguagaauggauuaaggg

SEQ ID NO: 167649 - RNA, 22 nt, Human
uggaaugaaaaguacuucagaa

SEQ ID NO: 167650 - RNA, 22 nt, Human
uugaauaauaugcuucguucuc

SEQ ID NO: 167651 - RNA, 22 nt, Human
agccagagcagggaauuggaca

SEQ ID NO: 167652 - RNA, 22 nt, Human
uaauuuuuccacguacacuggg

SEQ ID NO: 167653 - RNA, 22 nt, Human
auccuuagguggugcaucaggg

SEQ ID NO: 167654 - RNA, 22 nt, Human
gacuuuaucuuguccuuccugc

SEQ ID NO: 167655 - RNA, 22 nt, Human
ugcucauuggcgaucugaggga

SEQ ID NO: 167656 - RNA, 22 nt, Human
cuauugaggacauaaggacucu

SEQ ID NO: 167657 - RNA, 22 nt, Human
uacccagcuccucagaagacca

SEQ ID NO: 167658 - RNA, 22 nt, Human
cagggcaguaacgggaacaucu

SEQ ID NO: 167659 - RNA, 20 nt, Human
uuccuggggaaugauagaag

SEQ ID NO: 167660 - RNA, 22 nt, Human
cagucaccauagaauaaaacau

SEQ ID NO: 167661 - RNA, 22 nt, Human
cagaucuguaguaaaagaucuc

SEQ ID NO: 167662 - RNA, 18 nt, Human
ggugagggagcuggaagc

SEQ ID NO: 167663 - RNA, 22 nt, Human
acaugcuucauauuauaaccaa

SEQ ID NO: 167664 - RNA, 22 nt, Human
cugcugccccugagcucagccu

SEQ ID NO: 167665 - RNA, 22 nt, Human
uaaagcuguucagugcagaaag

SEQ ID NO: 167666 - RNA, 22 nt, Human
aauacugucuuucacagauauu

SEQ ID NO: 167667 - RNA, 22 nt, Human
auuuccuguaggggcuugcgaa

SEQ ID NO: 167668 - RNA, 22 nt, Human
cuguguccauguucuaauuugg

SEQ ID NO: 167669 - RNA, 22 nt, Human
uuuugcuguguccuugagccgg

SEQ ID NO: 167670 - RNA, 22 nt, Human
cugggaaauggcuucgagcuca

SEQ ID NO: 167671 - RNA, 22 nt, Human
aauuuacacuucauuuggaggg

SEQ ID NO: 167672 - RNA, 22 nt, Human
uacuuuuagccuauuugauucu

SEQ ID NO: 167673 - RNA, 22 nt, Human
uacagaaguaaauaccaaaagc

SEQ ID NO: 167674 - RNA, 22 nt, Human
uugcuuuacaaaaauugauggu

SEQ ID NO: 167675 - RNA, 22 nt, Human
aguagcacaauuuugucccuaa

SEQ ID NO: 167676 - RNA, 22 nt, Human
gcagacagccagacugcacugg

SEQ ID NO: 167677 - RNA, 22 nt, Human
aguguccuugauuccuguuguu

SEQ ID NO: 167678 - RNA, 22 nt, Human
guuuauuauucaacuucauguu

SEQ ID NO: 167679 - RNA, 22 nt, Human
cagcuucugucugauuagcaag

SEQ ID NO: 167680 - RNA, 22 nt, Human
auaugagaauuggaaaauauca

SEQ ID NO: 167681 - RNA, 22 nt, Human
cuagaaauucugauucaguagg

SEQ ID NO: 167682 - RNA, 22 nt, Human
ucuguucauacagaguauagua

SEQ ID NO: 167683 - RNA, 22 nt, Human
agcuuuguggcuuugcaagacu

SEQ ID NO: 167684 - RNA, 22 nt, Human
ccagugugauuguugcaagaau

SEQ ID NO: 167685 - RNA, 22 nt, Human
ucugaaaugcaaauuugacuga

SEQ ID NO: 167686 - RNA, 22 nt, Human
ggugggugcagggggcuucuua

SEQ ID NO: 167687 - RNA, 22 nt, Human
agagggugaaugagauagaaaa

SEQ ID NO: 167688 - RNA, 23 nt, Human
gagggcucugagugcuugggcca

SEQ ID NO: 167689 - RNA, 21 nt, Human
gggaggaagcugcuucucucu

SEQ ID NO: 167690 - RNA, 22 nt, Human
uuucucagcucagcaucugggu

SEQ ID NO: 167691 - RNA, 22 nt, Human
uccugcagcugaagcucaugug

SEQ ID NO: 167692 - RNA, 22 nt, Human
ccaaagcaagucacaugaucaa

SEQ ID NO: 167693 - RNA, 22 nt, Human
uggaauaaagugcuuugaucag

SEQ ID NO: 167694 - RNA, 17 nt, Human
uguagcuucuccuucuc

SEQ ID NO: 167695 - RNA, 22 nt, Human
uucacaauaggagcaugcaaau

SEQ ID NO: 167696 - RNA, 22 nt, Human
ugagaaaagguugagaugauaa

SEQ ID NO: 167697 - RNA, 21 nt, Human
ucauguguaacuuuugaccac

SEQ ID NO: 167698 - RNA, 22 nt, Human
aaagcucuuuuccaaguauuga

SEQ ID NO: 167699 - RNA, 22 nt, Human
auuuccagacuuuuuccaggaa

SEQ ID NO: 167700 - RNA, 22 nt, Human
auuucuguuugcuacuauaagu

SEQ ID NO: 167701 - RNA, 20 nt, Human
ccuguucacugcgcaguuuc

SEQ ID NO: 167702 - RNA, 22 nt, Human
agacagacuugaaaauguucuu

SEQ ID NO: 167703 - RNA, 22 nt, Human
ucuagacacuacuaguaaccgg

SEQ ID NO: 167704 - RNA, 22 nt, Human
auagucacugccuuccauuugu

SEQ ID NO: 167705 - RNA, 22 nt, Human
acccagccacagcauugaggga

SEQ ID NO: 167706 - RNA, 22 nt, Human
uuccuagggcagagccgcuggg

SEQ ID NO: 167707 - RNA, 22 nt, Human
aucauucuaguccuuauggucu

SEQ ID NO: 167708 - RNA, 22 nt, Human
acagcaugagagaugaacauuc

SEQ ID NO: 167709 - RNA, 22 nt, Human
uaaauguauaggcacuaaaccu

SEQ ID NO: 167710 - RNA, 22 nt, Human
gaugcgggcccgcuccacugcc

SEQ ID NO: 167711 - RNA, 22 nt, Human
acaguacauaauccugagucug

SEQ ID NO: 167712 - RNA, 22 nt, Human
gcagcuuuguaaaguaugaagc

SEQ ID NO: 167713 - RNA, 22 nt, Human
acacagcaacuugcaguaugga

SEQ ID NO: 167714 - RNA, 22 nt, Human
gaaucauuggaaccacauccaa

SEQ ID NO: 167715 - RNA, 21 nt, Human
auacagaagguggcaaaguac

SEQ ID NO: 167716 - RNA, 22 nt, Human
aguguccuggggcccuaaggcc

SEQ ID NO: 167717 - RNA, 22 nt, Human
acagggcagagggcaguuggua

SEQ ID NO: 167718 - RNA, 22 nt, Human
uuugcugacuggaugcaguugg

SEQ ID NO: 167719 - RNA, 22 nt, Human
auuaggcaauucugggcaucuc

SEQ ID NO: 167720 - RNA, 22 nt, Human
auauucuuccaaaacaucauuu

SEQ ID NO: 167721 - RNA, 22 nt, Human
auucauaacggcaaaugucacc

SEQ ID NO: 167722 - RNA, 22 nt, Human
uuguacuaucaccaugucaugu

SEQ ID NO: 167723 - RNA, 21 nt, Human
aacugguucaauucaacuaga

SEQ ID NO: 167724 - RNA, 23 nt, Human
aguccuuuuuauaaaauugagga

SEQ ID NO: 167725 - RNA, 22 nt, Human
gcagacagggcuacagagguac

SEQ ID NO: 167726 - RNA, 22 nt, Human
ggcaggcagccuccauccacag

SEQ ID NO: 167727 - RNA, 18 nt, Human
uuuauauggauagagacc

SEQ ID NO: 167728 - RNA, 22 nt, Human
caaaggcaggcccccugugcag

SEQ ID NO: 167729 - RNA, 18 nt, Human
aaaggcugaauauagaag

SEQ ID NO: 167730 - RNA, 22 nt, Human
ccaggcagagggaauagcaagu

SEQ ID NO: 167731 - RNA, 22 nt, Human
agacagacuguguuugaauccu

SEQ ID NO: 167732 - RNA, 22 nt, Human
acaugauuuuuaaagagauaau

SEQ ID NO: 167733 - RNA, 22 nt, Human
ggcaggcaggagcgugcuuggg

SEQ ID NO: 167734 - RNA, 22 nt, Human
ccucccucccucuuaugguuua

SEQ ID NO: 167735 - RNA, 22 nt, Human
agcuuuauucaugauuucaggg

SEQ ID NO: 167736 - RNA, 21 nt, Human
cuggcucuguugucacccggc

SEQ ID NO: 167737 - RNA, 22 nt, Human
cagcagagcugugugggaaggg

SEQ ID NO: 167738 - RNA, 22 nt, Human
cuggauuuaauuaacuguugcu

SEQ ID NO: 167739 - RNA, 22 nt, Human
agucccagcuucccccaugcag

SEQ ID NO: 167740 - RNA, 20 nt, Human
uugcuuuaucagacaugaua

SEQ ID NO: 167741 - RNA, 22 nt, Human
uuccuucuuugugguagaaagu

SEQ ID NO: 167742 - RNA, 22 nt, Human
gagcugaagcgcuacagcaucc

SEQ ID NO: 167743 - RNA, 22 nt, Human
uaaaguuuguagcaauugauau

SEQ ID NO: 167744 - RNA, 22 nt, Human
ugacauguccaggugguccugu

SEQ ID NO: 167745 - RNA, 22 nt, Human
guacagaaugcuugguaaggca

SEQ ID NO: 167746 - RNA, 22 nt, Human
acaggugguaaaauggacuguc

SEQ ID NO: 167747 - RNA, 22 nt, Human
ccacccagaccagggaucuggg

SEQ ID NO: 167748 - RNA, 22 nt, Human
ugcuccuucccuucccagugag

SEQ ID NO: 167749 - RNA, 23 nt, Human
uuucaaauuacucugcagaugac

SEQ ID NO: 167750 - RNA, 22 nt, Human
augaauaaguaaacuccuuugg

SEQ ID NO: 167751 - RNA, 22 nt, Human
cauaauuuuuuuaagucagaac

SEQ ID NO: 167752 - RNA, 22 nt, Human
uuuggacaaguuacugguuucc

SEQ ID NO: 167753 - RNA, 22 nt, Human
auuccaaaggcuggccuggagg

SEQ ID NO: 167754 - RNA, 22 nt, Human
uguggggcagcuagccggccug

SEQ ID NO: 167755 - RNA, 22 nt, Human
cauaauuucuguaucagcacca

SEQ ID NO: 167756 - RNA, 22 nt, Human
cuguggaaaauuuguauguaau

SEQ ID NO: 167757 - RNA, 22 nt, Human
gaaugagggagauguuggugca

SEQ ID NO: 167758 - RNA, 22 nt, Human
acauguguggacaugaaucuac

SEQ ID NO: 167759 - RNA, 23 nt, Human
uggcaaggaaugggauggagacu

SEQ ID NO: 167760 - RNA, 22 nt, Human
gcagagaccccgcagugaggcc

SEQ ID NO: 167761 - RNA, 22 nt, Human
ucuucaaagaauuuuaguaauu

SEQ ID NO: 167762 - RNA, 22 nt, Human
auuauuauuguugauguuaggg

SEQ ID NO: 167763 - RNA, 22 nt, Human
cagcuuuaguaacccacugcuc

SEQ ID NO: 167764 - RNA, 21 nt, Human
cacaugugaauuacugaacug

SEQ ID NO: 167765 - RNA, 22 nt, Human
uauuccagugugaucuuuguag

SEQ ID NO: 167766 - RNA, 22 nt, Human
gaauuucaggacaacuggaagg

SEQ ID NO: 167767 - RNA, 22 nt, Human
uccaugaguuugaggaaaagag

SEQ ID NO: 167768 - RNA, 22 nt, Human
cagggcuagugacaccccaguc

SEQ ID NO: 167769 - RNA, 22 nt, Human
cacccaggacaggccagaugug

SEQ ID NO: 167770 - RNA, 23 nt, Human
uucuggguugcugugcuuggaau

SEQ ID NO: 167771 - RNA, 22 nt, Human
uuccaaaguuaguuauuagaaa

SEQ ID NO: 167772 - RNA, 22 nt, Human
ucuggcuguuuuagaugagcuc

SEQ ID NO: 167773 - RNA, 22 nt, Human
auuuacauuuauuugagaaggu

SEQ ID NO: 167774 - RNA, 22 nt, Human
agaagggaacucagagaugauu

SEQ ID NO: 167775 - RNA, 22 nt, Human
uuccuucuuccuuuaguaacca

SEQ ID NO: 167776 - RNA, 22 nt, Human
auguaaaagauuauuuuccugu

SEQ ID NO: 167777 - RNA, 22 nt, Human
uuggaggaagcucaugggggau

SEQ ID NO: 167778 - RNA, 22 nt, Human
agccauccuacuaccucagcau

SEQ ID NO: 167779 - RNA, 22 nt, Human
cauaugaaauaugaguugaaca

SEQ ID NO: 167780 - RNA, 20 nt, Human
agaaaucagaccacacacua

SEQ ID NO: 167781 - RNA, 22 nt, Human
uuccuuaguuauuugguccccu

SEQ ID NO: 167782 - RNA, 22 nt, Human
ggcaggugggaacccuccccac

SEQ ID NO: 167783 - RNA, 22 nt, Human
gcuaggaggaagaaugugaauu

SEQ ID NO: 167784 - RNA, 22 nt, Human
agugugagaugauugaggagca

SEQ ID NO: 167785 - RNA, 22 nt, Human
aauuucaaacucuugcccucag

SEQ ID NO: 167786 - RNA, 22 nt, Human
uauaaaauggcaucagcuccaa

SEQ ID NO: 167787 - RNA, 22 nt, Human
aucagaaaucuaggauucagaa

SEQ ID NO: 167788 - RNA, 22 nt, Human
gaagugaagguuacucuagauu

SEQ ID NO: 167789 - RNA, 22 nt, Human
cagggcucagaagacagaccuc

SEQ ID NO: 167790 - RNA, 22 nt, Human
aguguccucaucuguaaaauga

SEQ ID NO: 167791 - RNA, 22 nt, Human
caucagaauuacuuggggagcu

SEQ ID NO: 167792 - RNA, 22 nt, Human
uuuucauuagaaugacugagaa

SEQ ID NO: 167793 - RNA, 22 nt, Human
auauuucaugggguuccauacu

SEQ ID NO: 167794 - RNA, 22 nt, Human
gugaauaaucacccuucuggau

SEQ ID NO: 167795 - RNA, 22 nt, Human
cagugaggugcccagccugccc

SEQ ID NO: 167796 - RNA, 22 nt, Human
ucuauacugaugggauacuauu

SEQ ID NO: 167797 - RNA, 22 nt, Human
agaucaguuagauagcuugaug

SEQ ID NO: 167798 - RNA, 22 nt, Human
auaugcuugggacugauacagu

SEQ ID NO: 167799 - RNA, 22 nt, Human
gugcaaaaauaauugugguuuu

SEQ ID NO: 167800 - RNA, 22 nt, Human
acagggcagaaauguugcaucu

SEQ ID NO: 167801 - RNA, 22 nt, Human
aaaguccagagggcacacugaa

SEQ ID NO: 167802 - RNA, 22 nt, Human
uuauacauguguuuugagauga

SEQ ID NO: 167803 - RNA, 22 nt, Human
guugcugggagcagggauccug

SEQ ID NO: 167804 - RNA, 23 nt, Human
acauacauggagauaaagugaug

SEQ ID NO: 167805 - RNA, 20 nt, Human
uggcagguggccucaguucc

SEQ ID NO: 167806 - RNA, 22 nt, Human
ucucucuuuuuaaucauguaau

SEQ ID NO: 167807 - RNA, 22 nt, Human
ggacauguuccuuuucaucuuu

SEQ ID NO: 167808 - RNA, 22 nt, Human
auuuauuaccucggaguuucug

SEQ ID NO: 167809 - RNA, 22 nt, Human
ggcuuuaucaaaugagacccug

SEQ ID NO: 167810 - RNA, 22 nt, Human
uucagaaagguuaaucuggauu

SEQ ID NO: 167811 - RNA, 22 nt, Human
acauaauaggugccugaauauu

SEQ ID NO: 167812 - RNA, 22 nt, Human
cacuuuauaaaauuggugugag

SEQ ID NO: 167813 - RNA, 22 nt, Human
ugucuucaucuccaugcacaga

SEQ ID NO: 167814 - RNA, 22 nt, Human
ugcuggguagaaguauuagucu

SEQ ID NO: 167815 - RNA, 22 nt, Human
guauacauagaugaugaacaag

SEQ ID NO: 167816 - RNA, 22 nt, Human
ucuggaugaagacccagaggcu

SEQ ID NO: 167817 - RNA, 22 nt, Human
acagcaggcaugaaugacacug

SEQ ID NO: 167818 - RNA, 22 nt, Human
auaacaugaccugugcuucaca

SEQ ID NO: 167819 - RNA, 22 nt, Human
agaguggcagcaagucagguag

SEQ ID NO: 167820 - RNA, 22 nt, Human
ucugggugacccugggcaaggc

SEQ ID NO: 167821 - RNA, 22 nt, Human
uuagaaaugauuucaccucuuu

SEQ ID NO: 167822 - RNA, 22 nt, Human
ggcucccacccauagggcgagu

SEQ ID NO: 167823 - RNA, 22 nt, Human
augcuuaauacacuguuaaagg

SEQ ID NO: 167824 - RNA, 22 nt, Human
uccuggcugccgucguccugcg

SEQ ID NO: 167825 - RNA, 22 nt, Human
cagugagggcauucagugcugg

SEQ ID NO: 167826 - RNA, 22 nt, Human
guacccagaggcaugaucccag

SEQ ID NO: 167827 - RNA, 22 nt, Human
gcuggaucaaguccuucaccca

SEQ ID NO: 167828 - RNA, 22 nt, Human
auccugaagcaugaaugucaaa

SEQ ID NO: 167829 - RNA, 22 nt, Human
agcuuuauagaaaggaucagug

SEQ ID NO: 167830 - RNA, 22 nt, Human
gccugcagugagugcagaaggu

SEQ ID NO: 167831 - RNA, 22 nt, Human
auauauuuugcggucacguggc

SEQ ID NO: 167832 - RNA, 19 nt, Human
ugggugugaccaucucugc

SEQ ID NO: 167833 - RNA, 22 nt, Human
aauguuuuagauuacugcuggg

SEQ ID NO: 167834 - RNA, 22 nt, Human
caugucacuuuaacaaauuagu

SEQ ID NO: 167835 - RNA, 22 nt, Human
gcaaaaaaugcuuguugcuuag

SEQ ID NO: 167836 - RNA, 22 nt, Human
uuauucuuuaaacauauauguu

SEQ ID NO: 167837 - RNA, 22 nt, Human
cagucaccugaagacuugacca

SEQ ID NO: 167838 - RNA, 22 nt, Human
ucaggugugaacuauuuggaaa

SEQ ID NO: 167839 - RNA, 22 nt, Human
ugucaccacuggcugaaacacc

SEQ ID NO: 167840 - RNA, 22 nt, Human
aguguccuuguuauuacugcuc

SEQ ID NO: 167841 - RNA, 22 nt, Human
agcagggcucuguggagggugg

SEQ ID NO: 167842 - RNA, 22 nt, Human
uuuaauuuuccucuuccuggag

SEQ ID NO: 167843 - RNA, 22 nt, Human
aguguccuggcaaggguuucag

SEQ ID NO: 167844 - RNA, 23 nt, Human
auauggcuguuguguguuaacau

SEQ ID NO: 167845 - RNA, 22 nt, Human
guguuuuaucagacaaaguaua

SEQ ID NO: 167846 - RNA, 22 nt, Human
uccaggcaucuguauuuuuuaa

SEQ ID NO: 167847 - RNA, 20 nt, Human
gaacuugggcaaguggcuua

SEQ ID NO: 167848 - RNA, 22 nt, Human
uuuccuucccuggaugagaagu

SEQ ID NO: 167849 - RNA, 22 nt, Human
ugcacccucaucagucaaaugg

SEQ ID NO: 167850 - RNA, 22 nt, Human
ucuguucagguuucagagaacu

SEQ ID NO: 167851 - RNA, 22 nt, Human
aggaccugagaguuggaaaucc

SEQ ID NO: 167852 - RNA, 22 nt, Human
guggaggacaaaagaagccuuu

SEQ ID NO: 167853 - RNA, 22 nt, Human
uccugcaggccagaggggugag

SEQ ID NO: 167854 - RNA, 21 nt, Human
uucaauacuauuucaauaguc

SEQ ID NO: 167855 - RNA, 22 nt, Human
aauucauauggauaugcuagua

SEQ ID NO: 167856 - RNA, 22 nt, Human
gggaggaaggcuugggugagua

SEQ ID NO: 167857 - RNA, 22 nt, Human
acugaaugaggggugaucuggg

SEQ ID NO: 167858 - RNA, 22 nt, Human
ugccauuuugagauguuaauga

SEQ ID NO: 167859 - RNA, 22 nt, Human
auuccuucuauucucugugggu

SEQ ID NO: 167860 - RNA, 22 nt, Human
aguaaacaguaucuuuaguguc

SEQ ID NO: 167861 - RNA, 22 nt, Human
caggcauaaguaauguuuuaug

SEQ ID NO: 167862 - RNA, 22 nt, Human
cacugagcugauagaauuccag

SEQ ID NO: 167863 - RNA, 22 nt, Human
gcacccagggacuuggcuggcc

SEQ ID NO: 167864 - RNA, 22 nt, Human
ccugcagaaaggguccccagga

SEQ ID NO: 167865 - RNA, 22 nt, Human
accugcagcuaaagauguaggg

SEQ ID NO: 167866 - RNA, 21 nt, Human
uucuucaaagaagaaggcaca

SEQ ID NO: 167867 - RNA, 22 nt, Human
uauguacuacacuagaacauuu

SEQ ID NO: 167868 - RNA, 22 nt, Human
agcugccagcaaguuucaaaca

SEQ ID NO: 167869 - RNA, 22 nt, Human
ggcagguggacgugcuaaagcu

SEQ ID NO: 167870 - RNA, 22 nt, Human
uuuaaauucugucugccgcuua

SEQ ID NO: 167871 - RNA, 22 nt, Human
gcuuuaaugaagucacgcaaag

SEQ ID NO: 167872 - RNA, 21 nt, Human
ccuuuacaauuuugcauuccu

SEQ ID NO: 167873 - RNA, 21 nt, Human
aaaaagcuggggcaugcaugc

SEQ ID NO: 167874 - RNA, 22 nt, Human
acaacuuuucuaucauguggaa

SEQ ID NO: 167875 - RNA, 14 nt, Human
gcaggcagaucauu

SEQ ID NO: 167876 - RNA, 22 nt, Human
uucuuuucccaauauuuugcug

SEQ ID NO: 167877 - RNA, 22 nt, Human
gcagacagaugagggugcuggg

SEQ ID NO: 167878 - RNA, 21 nt, Human
cagacccucuagaggccaccu

SEQ ID NO: 167879 - RNA, 22 nt, Human
ucuguucagcugccucagggua

SEQ ID NO: 167880 - RNA, 22 nt, Human
gcuguucaagacuaggaaauuu

SEQ ID NO: 167881 - RNA, 22 nt, Human
cacuuuauauucuaagacggcc

SEQ ID NO: 167882 - RNA, 21 nt, Human
ccagcuuucccaagucccuuu

SEQ ID NO: 167883 - RNA, 22 nt, Human
aacuugguuguuggcaauuugc

SEQ ID NO: 167884 - RNA, 22 nt, Human
aggcaggugagucaaaacagac

SEQ ID NO: 167885 - RNA, 22 nt, Human
ucuggaugggaugaggcaacaa

SEQ ID NO: 167886 - RNA, 21 nt, Human
uguccuuaaugcaauguccuu

SEQ ID NO: 167887 - RNA, 22 nt, Human
uuuucagugggcaaugauguga

SEQ ID NO: 167888 - RNA, 21 nt, Human
uaaaggcuuuagaauggcaaa

SEQ ID NO: 167889 - RNA, 22 nt, Human
uuccagauguuuaaguucugcu

SEQ ID NO: 167890 - RNA, 22 nt, Human
ugcugaggagguggcugugcuu

SEQ ID NO: 167891 - RNA, 20 nt, Human
gccugcagagaaggucagag

SEQ ID NO: 167892 - RNA, 22 nt, Human
uuauagaaggagcauucacuua

SEQ ID NO: 167893 - RNA, 22 nt, Human
uucacuuaacaucauaucauga

SEQ ID NO: 167894 - RNA, 22 nt, Human
cagacagggcccugugauggua

SEQ ID NO: 167895 - RNA, 22 nt, Human
aaaaaugcugugguagcugugu

SEQ ID NO: 167896 - RNA, 22 nt, Human
auuccaguuggguucuaauaca

SEQ ID NO: 167897 - RNA, 22 nt, Human
cuggaucaugggaaagggauca

SEQ ID NO: 167898 - RNA, 22 nt, Human
agcuuuaucccuugcccaucga

SEQ ID NO: 167899 - RNA, 22 nt, Human
ucuguucauuugccucggcucu

SEQ ID NO: 167900 - RNA, 22 nt, Human
guucuucaggccauccucccag

SEQ ID NO: 167901 - RNA, 22 nt, Human
ucaauuuauguggcuauucauu

SEQ ID NO: 167902 - RNA, 22 nt, Human
cuucagaggggacucaaaguca

SEQ ID NO: 167903 - RNA, 22 nt, Human
aggagguggcaacugucgacag

SEQ ID NO: 167904 - RNA, 22 nt, Human
uuucauaaacaguagaagacua

SEQ ID NO: 167905 - RNA, 22 nt, Human
uaaucauggccucaaauuuuau

SEQ ID NO: 167906 - RNA, 20 nt, Human
uccuucugaggugaggagga

SEQ ID NO: 167907 - RNA, 22 nt, Human
uccuuuaugugaguuguuuccc

SEQ ID NO: 167908 - RNA, 22 nt, Human
ccuggaucagucacuguugcug

SEQ ID NO: 167909 - RNA, 22 nt, Human
uuguuuuuaaacaugugacuga

SEQ ID NO: 167910 - RNA, 22 nt, Human
cagggcaggacagauacauuac

SEQ ID NO: 167911 - RNA, 22 nt, Human
guucucucugcuuccaagaugg

SEQ ID NO: 167912 - RNA, 22 nt, Human
ccagggcagggaccacgugucu

SEQ ID NO: 167913 - RNA, 22 nt, Human
uuucaaagaccauuaacuauca

SEQ ID NO: 167914 - RNA, 22 nt, Human
ugcugggucagugagagcaggg

SEQ ID NO: 167915 - RNA, 22 nt, Human
uuuugagauggugucucgcucc

SEQ ID NO: 167916 - RNA, 19 nt, Human
aaggaauggcuuuaaguag

SEQ ID NO: 167917 - RNA, 22 nt, Human
aaaucucaguguucuaagcauu

SEQ ID NO: 167918 - RNA, 22 nt, Human
aaucaguguguaaaguggcugc

SEQ ID NO: 167919 - RNA, 22 nt, Human
aguguccuugagguuccuagga

SEQ ID NO: 167920 - RNA, 22 nt, Human
gacagacaggaggcauucaggg

SEQ ID NO: 167921 - RNA, 22 nt, Human
aggugggggcuguguccuugac

SEQ ID NO: 167922 - RNA, 22 nt, Human
ucugaagaacugucuagagaac

SEQ ID NO: 167923 - RNA, 22 nt, Human
agacagacauagaaauuaguaa

SEQ ID NO: 167924 - RNA, 22 nt, Human
uacuuuauuguaaaugcugaug

SEQ ID NO: 167925 - RNA, 22 nt, Human
auucucuuuguauaacaucuug

SEQ ID NO: 167926 - RNA, 22 nt, Human
cacagguguuuguuauacucag

SEQ ID NO: 167927 - RNA, 22 nt, Human
aaaguccuagcgauccacagaa

SEQ ID NO: 167928 - RNA, 22 nt, Human
uuuacuguguccaucugugacu

SEQ ID NO: 167929 - RNA, 22 nt, Human
gccagccuucuguggccugcaa

SEQ ID NO: 167930 - RNA, 22 nt, Human
ggauuuacaaguuuaacucuca

SEQ ID NO: 167931 - RNA, 22 nt, Human
ucacacauucuagguauguuga

SEQ ID NO: 167932 - RNA, 22 nt, Human
aaggcauagucuuuaaguucug

SEQ ID NO: 167933 - RNA, 22 nt, Human
ccugcagggugcugccacagau

SEQ ID NO: 167934 - RNA, 22 nt, Human
ucagagagguuaaauaucuugu

SEQ ID NO: 167935 - RNA, 22 nt, Human
auugcugguagucagugucccu

SEQ ID NO: 167936 - RNA, 22 nt, Human
auuucaguguugguuagcaagc

SEQ ID NO: 167937 - RNA, 22 nt, Human
uguaaauugaaggaaauuugug

SEQ ID NO: 167938 - RNA, 22 nt, Human
uucaacuaauguuuauuuuaug

SEQ ID NO: 167939 - RNA, 22 nt, Human
ugugaauaccuugaauucauca

SEQ ID NO: 167940 - RNA, 22 nt, Human
uuuccaugaucguuauagaacu

SEQ ID NO: 167941 - RNA, 21 nt, Human
uaaaucucuguauucuucagu

SEQ ID NO: 167942 - RNA, 22 nt, Human
uuaacagagugccuggcaugua

SEQ ID NO: 167943 - RNA, 22 nt, Human
cuugcacacauguacaugugua

SEQ ID NO: 167944 - RNA, 22 nt, Human
uuucauugucuacauaugacau

SEQ ID NO: 167945 - RNA, 22 nt, Human
uucaacucuucaagaucacauc

SEQ ID NO: 167946 - RNA, 22 nt, Human
agaaauaugcugauuagaugaa

SEQ ID NO: 167947 - RNA, 22 nt, Human
aucacaaaggguuuucucugag

SEQ ID NO: 167948 - RNA, 22 nt, Human
ugucucaucucuuaaccccacu

SEQ ID NO: 167949 - RNA, 23 nt, Human
uauuagggccaggacuggcaaau

SEQ ID NO: 167950 - RNA, 22 nt, Human
caugaaaauaacauuguuguga

SEQ ID NO: 167951 - RNA, 22 nt, Human
gggcagguaggugaaauaauga

SEQ ID NO: 167952 - RNA, 22 nt, Human
uucuucuuucccccugugguac

SEQ ID NO: 167953 - RNA, 22 nt, Human
ucuggaggcucugagggugagu

SEQ ID NO: 167954 - RNA, 22 nt, Human
caaaguccuagaacagugcuug

SEQ ID NO: 167955 - RNA, 22 nt, Human
cuucauuaaccaaaaugcaaua

SEQ ID NO: 167956 - RNA, 22 nt, Human
ccagguguaagacaugguccua

SEQ ID NO: 167957 - RNA, 22 nt, Human
aggcaggucuguaucuagucuc

SEQ ID NO: 167958 - RNA, 22 nt, Human
acccaggguagaaccucagagc

SEQ ID NO: 167959 - RNA, 22 nt, Human
caugcuuuuuucuaguauaaau

SEQ ID NO: 167960 - RNA, 22 nt, Human
auuaauuuuucugacagccaca

SEQ ID NO: 167961 - RNA, 22 nt, Human
auuuagccucauuuuugacaua

SEQ ID NO: 167962 - RNA, 22 nt, Human
uuagaaaugucacagaucugau

SEQ ID NO: 167963 - RNA, 22 nt, Human
ucagaauuuuuguuacccuuga

SEQ ID NO: 167964 - RNA, 22 nt, Human
aaaacauucugugaacucucaa

SEQ ID NO: 167965 - RNA, 22 nt, Human
uacaugaaguugucuaaacugg

SEQ ID NO: 167966 - RNA, 22 nt, Human
agaugaaaagauaagcagcaau

SEQ ID NO: 167967 - RNA, 22 nt, Human
gcuggccuugaggugucuuuau

SEQ ID NO: 167968 - RNA, 22 nt, Human
uuuacagucaccaaacuuugcu

SEQ ID NO: 167969 - RNA, 22 nt, Human
uuguuuuaucuuucuacagacu

SEQ ID NO: 167970 - RNA, 22 nt, Human
ucugggcccuaaaccagcucua

SEQ ID NO: 167971 - RNA, 22 nt, Human
acaauacuauuuucaguauccu

SEQ ID NO: 167972 - RNA, 19 nt, Human
uggcagggagaguuugaag

SEQ ID NO: 167973 - RNA, 22 nt, Human
cuugcuggugucgugccuucac

SEQ ID NO: 167974 - RNA, 22 nt, Human
auguccucaaaacugauugcag

SEQ ID NO: 167975 - RNA, 22 nt, Human
agaauuccuccucugggacacu

SEQ ID NO: 167976 - RNA, 22 nt, Human
aucagaaauugcccagcuguuu

SEQ ID NO: 167977 - RNA, 21 nt, Human
gcaugugugggacuggauccu

SEQ ID NO: 167978 - RNA, 22 nt, Human
auacagaacaagccucaccucc

SEQ ID NO: 167979 - RNA, 22 nt, Human
ccuucucccucugagaggaacc

SEQ ID NO: 167980 - RNA, 22 nt, Human
gggcagguguugucaaucuaau

SEQ ID NO: 167981 - RNA, 22 nt, Human
ugaacaugcuguugauggccug

SEQ ID NO: 167982 - RNA, 22 nt, Human
ucauuucccuccuacaaagagg

SEQ ID NO: 167983 - RNA, 22 nt, Human
uauugauaaggauggcugcaau

SEQ ID NO: 167984 - RNA, 19 nt, Human
ggcauccagaacuaccagu

SEQ ID NO: 167985 - RNA, 22 nt, Human
cugcagggcagaagggcauaga

SEQ ID NO: 167986 - RNA, 22 nt, Human
cagcuucugcuaucgaacaucu

SEQ ID NO: 167987 - RNA, 22 nt, Human
agcuggucuuaaauguguccag

SEQ ID NO: 167988 - RNA, 22 nt, Human
guuagguagaaguuuacuuuga

SEQ ID NO: 167989 - RNA, 19 nt, Human
ugcauaaauuauauacuuu

SEQ ID NO: 167990 - RNA, 22 nt, Human
agcugcaaguguugccuccuac

SEQ ID NO: 167991 - RNA, 22 nt, Human
ccuguucaauauucuuccuugu

SEQ ID NO: 167992 - RNA, 22 nt, Human
aaagcugcugugaaugguuugg

SEQ ID NO: 167993 - RNA, 22 nt, Human
uuccuucuuccaaacccaucau

SEQ ID NO: 167994 - RNA, 22 nt, Human
aaagcagagcagggcacuuaug

SEQ ID NO: 167995 - RNA, 22 nt, Human
gagaugguugcaauaguuuaaa

SEQ ID NO: 167996 - RNA, 22 nt, Human
ucauucuugaucacuaguuagu

SEQ ID NO: 167997 - RNA, 22 nt, Human
uuccuucuauucagcuccaaga

SEQ ID NO: 167998 - RNA, 22 nt, Human
uuauuucauguaaaauuuaugu

SEQ ID NO: 167999 - RNA, 22 nt, Human
ggacuccucuagaaguugaggc

SEQ ID NO: 168000 - RNA, 22 nt, Human
cuuaauuacuguccaauaugca

SEQ ID NO: 168001 - RNA, 22 nt, Human
ggcaggcacuguguuuuguguu

SEQ ID NO: 168002 - RNA, 22 nt, Human
cuagccugggauuugaacuuau

SEQ ID NO: 168003 - RNA, 22 nt, Human
uuccaggaccaggaagagggga

SEQ ID NO: 168004 - RNA, 22 nt, Human
cagggagcuggugccagccgac

SEQ ID NO: 168005 - RNA, 23 nt, Human
uccuggguuugaauucuagucuu

SEQ ID NO: 168006 - RNA, 22 nt, Human
cagaaauucccauuucagauuc

SEQ ID NO: 168007 - RNA, 22 nt, Human
accauuuaaggaaaauguauca

SEQ ID NO: 168008 - RNA, 22 nt, Human
aucuuucuccauauacaucuuu

SEQ ID NO: 168009 - RNA, 22 nt, Human
ugcuggagcccaggcggccuuu

SEQ ID NO: 168010 - RNA, 22 nt, Human
cuguggaaauaaacaaugcuaa

SEQ ID NO: 168011 - RNA, 22 nt, Human
cauuuacacacagaggugugcu

SEQ ID NO: 168012 - RNA, 22 nt, Human
cuuccuuccacaccuucagaau

SEQ ID NO: 168013 - RNA, 22 nt, Human
ggcaguggguuccccaaggcac

SEQ ID NO: 168014 - RNA, 22 nt, Human
gcauagucaguaggauucucaa

SEQ ID NO: 168015 - RNA, 22 nt, Human
aacaggcaggagaauucugccu

SEQ ID NO: 168016 - RNA, 22 nt, Human
uuuuuucagccugucugugcca

SEQ ID NO: 168017 - RNA, 22 nt, Human
aacagacauauuuuuaauaugc

SEQ ID NO: 168018 - RNA, 19 nt, Human
ucugaagaauuagagagca

SEQ ID NO: 168019 - RNA, 22 nt, Human
aaagaaaccuaucagccacaug

SEQ ID NO: 168020 - RNA, 22 nt, Human
aguauacaaauaaauguguaau

SEQ ID NO: 168021 - RNA, 22 nt, Human
uguuucauuaguacugacaaua

SEQ ID NO: 168022 - RNA, 22 nt, Human
gaugagcauuguuucauguguu

SEQ ID NO: 168023 - RNA, 22 nt, Human
uucccagaaugaauggauggag

SEQ ID NO: 168024 - RNA, 22 nt, Human
aaaucaguuggaacacaagcag

SEQ ID NO: 168025 - RNA, 22 nt, Human
agcuuuaccugccuuggggcac

SEQ ID NO: 168026 - RNA, 22 nt, Human
uggaggaaaaaaccaggcagag

SEQ ID NO: 168027 - RNA, 22 nt, Human
gucuauauauugcuugaauaau

SEQ ID NO: 168028 - RNA, 22 nt, Human
uuuacagaucuguugauuuguu

SEQ ID NO: 168029 - RNA, 19 nt, Human
uuuacucuccaaggugagu

SEQ ID NO: 168030 - RNA, 22 nt, Human
ugguuccaaucgcacuggcuca

SEQ ID NO: 168031 - RNA, 22 nt, Human
uugcugauucuguauuuaaggu

SEQ ID NO: 168032 - RNA, 22 nt, Human
uuguguccauuugagucaugug

SEQ ID NO: 168033 - RNA, 22 nt, Human
uagguauaauauuuugaagaaa

SEQ ID NO: 168034 - RNA, 22 nt, Human
gggcagguuauuggaguaggga

SEQ ID NO: 168035 - RNA, 22 nt, Human
caguguggagggagagagccug

SEQ ID NO: 168036 - RNA, 22 nt, Human
uagggacaaagagcugaggccu

SEQ ID NO: 168037 - RNA, 20 nt, Human
acuuuacugagcuguaauuc

SEQ ID NO: 168038 - RNA, 22 nt, Human
ccuuuucuauguaccagcagug

SEQ ID NO: 168039 - RNA, 22 nt, Human
cagggagcuuucccaggacccu

SEQ ID NO: 168040 - RNA, 22 nt, Human
uguaagaaucagucuuuaaugu

SEQ ID NO: 168041 - RNA, 22 nt, Human
uauggcuuuucauuccuaugug

SEQ ID NO: 168042 - RNA, 22 nt, Human
ccccugaagacaauggagaggu

SEQ ID NO: 168043 - RNA, 22 nt, Human
ucccagaagugaaauuucuaga

SEQ ID NO: 168044 - RNA, 22 nt, Human
uuuuagacuuguauguaaagcc

SEQ ID NO: 168045 - RNA, 22 nt, Human
uuuauugagcacccguugugcg

SEQ ID NO: 168046 - RNA, 22 nt, Human
ccaguguucauaauuuuacacu

SEQ ID NO: 168047 - RNA, 22 nt, Human
aauacaguaauuuugaugaguu

SEQ ID NO: 168048 - RNA, 22 nt, Human
uuucacaucagagguagauuag

SEQ ID NO: 168049 - RNA, 22 nt, Human
aacuuucagcaaguaauucugg

SEQ ID NO: 168050 - RNA, 22 nt, Human
ccuggcaggcuggggacagugc

SEQ ID NO: 168051 - RNA, 21 nt, Human
uucuggguuguuaaucugaac

SEQ ID NO: 168052 - RNA, 21 nt, Human
uauuuauuaauuuguaaggcu

SEQ ID NO: 168053 - RNA, 22 nt, Human
ucagcuuugaucucaggcaauc

SEQ ID NO: 168054 - RNA, 22 nt, Human
agcagggccugagugaccuaac

SEQ ID NO: 168055 - RNA, 22 nt, Human
uuugucuuggccucaguuuucu

SEQ ID NO: 168056 - RNA, 22 nt, Human
uuaauauguugaaauuuauuag

SEQ ID NO: 168057 - RNA, 22 nt, Human
uggcauuucaguauuuucauaa

SEQ ID NO: 168058 - RNA, 22 nt, Human
gccaggcaaauuaaggaaugca

SEQ ID NO: 168059 - RNA, 22 nt, Human
ggcuagggaucuagaccaggac

SEQ ID NO: 168060 - RNA, 18 nt, Human
gccaggcaggguggggaa

SEQ ID NO: 168061 - RNA, 22 nt, Human
uagcuuuaggcacguuugaauu

SEQ ID NO: 168062 - RNA, 18 nt, Human
ccuggaggucuucggggu

SEQ ID NO: 168063 - RNA, 22 nt, Human
gaauuguaaguaccagcaugcu

SEQ ID NO: 168064 - RNA, 22 nt, Human
ucaaaauucuagggagaauggu

SEQ ID NO: 168065 - RNA, 22 nt, Human
uguauacaggcauaagagauac

SEQ ID NO: 168066 - RNA, 22 nt, Human
aauaaaaugaacugguagaguu

SEQ ID NO: 168067 - RNA, 22 nt, Human
uccuggguucauguccuggugc

SEQ ID NO: 168068 - RNA, 22 nt, Human
auguccaggaucuauccccaga

SEQ ID NO: 168069 - RNA, 22 nt, Human
gccugcagggcccuuguggguc

SEQ ID NO: 168070 - RNA, 22 nt, Human
ucaggugucaagcagggagcug

SEQ ID NO: 168071 - RNA, 22 nt, Human
uggaaagucucuuuugacugua

SEQ ID NO: 168072 - RNA, 22 nt, Human
ucuaggguggagcugggaaucc

SEQ ID NO: 168073 - RNA, 22 nt, Human
uuuagaaguucacacauuuaaa

SEQ ID NO: 168074 - RNA, 22 nt, Human
agcacauaccagaaccacaggu

SEQ ID NO: 168075 - RNA, 22 nt, Human
cccugcagggaggauucugaag

SEQ ID NO: 168076 - RNA, 22 nt, Human
agccagaggaacuugaugacug

SEQ ID NO: 168077 - RNA, 22 nt, Human
uccaggcaaggauaauaaacau

SEQ ID NO: 168078 - RNA, 22 nt, Human
gcuggauccugauucgucuuug

SEQ ID NO: 168079 - RNA, 22 nt, Human
uaccucaaguuccaggaaagcg

SEQ ID NO: 168080 - RNA, 22 nt, Human
gagggaccccaggcuggcccuu

SEQ ID NO: 168081 - RNA, 22 nt, Human
cagguguauaaacucagugacu

SEQ ID NO: 168082 - RNA, 22 nt, Human
acagguggcuuccauuuucuaa

SEQ ID NO: 168083 - RNA, 23 nt, Human
ggagaggggugugggcaucuuua

SEQ ID NO: 168084 - RNA, 22 nt, Human
cacuuagucucaccaguucagu

SEQ ID NO: 168085 - RNA, 22 nt, Human
cuguacuaauugcuuuacaugu

SEQ ID NO: 168086 - RNA, 22 nt, Human
aucauucuauuguugagcugcc

SEQ ID NO: 168087 - RNA, 22 nt, Human
auuaaauuaaguggcuaauuua

SEQ ID NO: 168088 - RNA, 22 nt, Human
ugaacauugucacauuccuagc

SEQ ID NO: 168089 - RNA, 22 nt, Human
uggauuagguacuaugaauaua

SEQ ID NO: 168090 - RNA, 22 nt, Human
auucuucaucagagaugcacua

SEQ ID NO: 168091 - RNA, 22 nt, Human
uugaagaaagucauauauaaug

SEQ ID NO: 168092 - RNA, 22 nt, Human
uacaugugcacgugugacuuug

SEQ ID NO: 168093 - RNA, 22 nt, Human
ugcagggccaugguggcggcug

SEQ ID NO: 168094 - RNA, 15 nt, Human
gcagguggaucacuu

SEQ ID NO: 168095 - RNA, 19 nt, Human
uuugcugguucaggaaaga

SEQ ID NO: 168096 - RNA, 22 nt, Human
guuaggcaauaccucuuacacc

SEQ ID NO: 168097 - RNA, 22 nt, Human
uucaugaaaguguaucuugugg

SEQ ID NO: 168098 - RNA, 18 nt, Human
caggaauggaugggauuu

SEQ ID NO: 168099 - RNA, 22 nt, Human
uuugaaauuaagauauugucca

SEQ ID NO: 168100 - RNA, 19 nt, Human
uggaccugugcccauggcu

SEQ ID NO: 168101 - RNA, 22 nt, Human
aggcagguuggggaaaagcacu

SEQ ID NO: 168102 - RNA, 22 nt, Human
aagggcagaaagggacgcuuug

SEQ ID NO: 168103 - RNA, 22 nt, Human
ugcagggauuauguagggguug

SEQ ID NO: 168104 - RNA, 22 nt, Human
uuuauuauguacaggcacuaua

SEQ ID NO: 168105 - RNA, 22 nt, Human
auguauuucuauguagugaaga

SEQ ID NO: 168106 - RNA, 22 nt, Human
cccugcagaucuaggguccuuc

SEQ ID NO: 168107 - RNA, 22 nt, Human
gucugcccuuggcucagccaua

SEQ ID NO: 168108 - RNA, 22 nt, Human
cagacaggagacuggaucaugg

SEQ ID NO: 168109 - RNA, 22 nt, Human
ucuuuaauaucugccccagagc

SEQ ID NO: 168110 - RNA, 22 nt, Human
aagacaauuugauacuaguugc

SEQ ID NO: 168111 - RNA, 22 nt, Human
uuugcaaagugacuauuauaug

SEQ ID NO: 168112 - RNA, 22 nt, Human
gaaugaauagguguccagaugg

SEQ ID NO: 168113 - RNA, 22 nt, Human
ucuuuauuuaagucuguuguaa

SEQ ID NO: 168114 - RNA, 22 nt, Human
accacugcccauggugaaaacu

SEQ ID NO: 168115 - RNA, 22 nt, Human
uugauccaguugaaagugauga

SEQ ID NO: 168116 - RNA, 20 nt, Human
ucuggcucuuugcuccuccc

SEQ ID NO: 168117 - RNA, 20 nt, Human
ugggugagaguguuugcucu

SEQ ID NO: 168118 - RNA, 22 nt, Human
agacagaccauggcuauucaga

SEQ ID NO: 168119 - RNA, 22 nt, Human
ugcagggaaaacccaggaugcu

SEQ ID NO: 168120 - RNA, 22 nt, Human
uuugcugaauagauuguaaacu

SEQ ID NO: 168121 - RNA, 22 nt, Human
ucucuuaggagaaauucauaaa

SEQ ID NO: 168122 - RNA, 22 nt, Human
cuuuguugugccugagugcacc

SEQ ID NO: 168123 - RNA, 22 nt, Human
gaguccuugacacauaguaggu

SEQ ID NO: 168124 - RNA, 22 nt, Human
acaugucuuuuaaagucuaaua

SEQ ID NO: 168125 - RNA, 22 nt, Human
cauguaaagaauuucacacaag

SEQ ID NO: 168126 - RNA, 17 nt, Human
ccagguggaaucgugga

SEQ ID NO: 168127 - RNA, 22 nt, Human
cuggauccuucucuguguauuu

SEQ ID NO: 168128 - RNA, 22 nt, Human
caguauuuguucccuaucaaug

SEQ ID NO: 168129 - RNA, 22 nt, Human
auguucuuccaaaucuguaaca

SEQ ID NO: 168130 - RNA, 22 nt, Human
gugcaaaaguaauugugguuuu

SEQ ID NO: 168131 - RNA, 22 nt, Human
cugugggagcacaugacagaua

SEQ ID NO: 168132 - RNA, 20 nt, Human
cuguggugagcaggagagua

SEQ ID NO: 168133 - RNA, 22 nt, Human
uauuuauucauucagcaagcau

SEQ ID NO: 168134 - RNA, 22 nt, Human
ucucuucacaugcuugcuccaa

SEQ ID NO: 168135 - RNA, 16 nt, Human
uggcagguuuuuaucu

SEQ ID NO: 168136 - RNA, 22 nt, Human
uuacaguaauguauuauuuaac

SEQ ID NO: 168137 - RNA, 22 nt, Human
cagacaggcaggugagagcucc

SEQ ID NO: 168138 - RNA, 22 nt, Human
uuuuauugucaaugaagacaga

SEQ ID NO: 168139 - RNA, 20 nt, Human
gcagggcaucuuggccccca

SEQ ID NO: 168140 - RNA, 22 nt, Human
aguauucuggaauucuauguga

SEQ ID NO: 168141 - RNA, 22 nt, Human
aaucuucacagaaaaaugucug

SEQ ID NO: 168142 - RNA, 22 nt, Human
gcagcuuuagaaacaagggcug

SEQ ID NO: 168143 - RNA, 21 nt, Human
acagcauguuuguguguuugc

SEQ ID NO: 168144 - RNA, 22 nt, Human
cacagacagugucccuuuguug

SEQ ID NO: 168145 - RNA, 22 nt, Human
auguguccacaggugugagaga

SEQ ID NO: 168146 - RNA, 22 nt, Human
auucagcauucauuaugcgcca

SEQ ID NO: 168147 - RNA, 22 nt, Human
aacauuuacaaauccuucugca

SEQ ID NO: 168148 - RNA, 22 nt, Human
ucagggcagguuaacuugggug

SEQ ID NO: 168149 - RNA, 22 nt, Human
uaucaucuuguugucaugcagc

SEQ ID NO: 168150 - RNA, 22 nt, Human
uuuaauugcauuuaaagaugga

SEQ ID NO: 168151 - RNA, 22 nt, Human
uucuuacagaguuuacagagcc

SEQ ID NO: 168152 - RNA, 22 nt, Human
cuucccuuucuggugacuucuc

SEQ ID NO: 168153 - RNA, 22 nt, Human
uuccuggggggauagauuucac

SEQ ID NO: 168154 - RNA, 22 nt, Human
ucaauaaaucccucugacccug

SEQ ID NO: 168155 - RNA, 22 nt, Human
aaauguuuugcucccauguggu

SEQ ID NO: 168156 - RNA, 22 nt, Human
uuacagauggaucuagcaaaau

SEQ ID NO: 168157 - RNA, 22 nt, Human
uuugcugaauaaaugugugacu

SEQ ID NO: 168158 - RNA, 22 nt, Human
gaaagccagagagaaagggcuc

SEQ ID NO: 168159 - RNA, 22 nt, Human
cuaacuuuagcuuagauuauca

SEQ ID NO: 168160 - RNA, 22 nt, Human
auucuuauuuaaauagagucug

SEQ ID NO: 168161 - RNA, 22 nt, Human
agucaccaucuguggcagccug

SEQ ID NO: 168162 - RNA, 22 nt, Human
ggagcugaguucuucagccggg

SEQ ID NO: 168163 - RNA, 22 nt, Human
ugauuuccuaggucuggagaag

SEQ ID NO: 168164 - RNA, 22 nt, Human
cuguguccaauggccuuagcag

SEQ ID NO: 168165 - RNA, 22 nt, Human
gaaauagacacuuucuaugaau

SEQ ID NO: 168166 - RNA, 22 nt, Human
auccacagucuuagccaucaaa

SEQ ID NO: 168167 - RNA, 22 nt, Human
aauugcuuaguugcaacuaugc

SEQ ID NO: 168168 - RNA, 22 nt, Human
uggauuagugcugaaaugaugg

SEQ ID NO: 168169 - RNA, 22 nt, Human
aaggcuuucagcuaacuugauu

SEQ ID NO: 168170 - RNA, 22 nt, Human
aaugaggucauuaaugguggga

SEQ ID NO: 168171 - RNA, 22 nt, Human
gcaccugcuggaaucagucugu

SEQ ID NO: 168172 - RNA, 22 nt, Human
aaauguauugcauaggauauuu

SEQ ID NO: 168173 - RNA, 22 nt, Human
ucauguguugcacugaggaccu

SEQ ID NO: 168174 - RNA, 22 nt, Human
uaaacauuuguuauucuuguuu

SEQ ID NO: 168175 - RNA, 22 nt, Human
uuugacuccuuugugaaaagag

SEQ ID NO: 168176 - RNA, 22 nt, Human
aucuauacccaucaugauuuaa

SEQ ID NO: 168177 - RNA, 21 nt, Human
acagauuuuauaucucugcug

SEQ ID NO: 168178 - RNA, 22 nt, Human
ccaggccuggccaggggaugcc

SEQ ID NO: 168179 - RNA, 22 nt, Human
uggagcaggaaacaucuagagg

SEQ ID NO: 168180 - RNA, 22 nt, Human
ccuggaucgaugccgagggaaa

SEQ ID NO: 168181 - RNA, 22 nt, Human
ggcuuuauguuuuucauguggu

SEQ ID NO: 168182 - RNA, 22 nt, Human
ugcuggagaccugcuugcacca

SEQ ID NO: 168183 - RNA, 22 nt, Human
aguguccuuaguuagcuuuggg

SEQ ID NO: 168184 - RNA, 22 nt, Human
ucuguucacugagcaauggcaa

SEQ ID NO: 168185 - RNA, 18 nt, Human
uggaggaaucacaauggc

SEQ ID NO: 168186 - RNA, 22 nt, Human
uguccuuagggauauaaaauau

SEQ ID NO: 168187 - RNA, 22 nt, Human
cugggucuggcuacugcuuccu

SEQ ID NO: 168188 - RNA, 22 nt, Human
cucuuccuuucccuugagggug

SEQ ID NO: 168189 - RNA, 22 nt, Human
uuuccuuccuaaggugaagcaa

SEQ ID NO: 168190 - RNA, 22 nt, Human
aacaugauuuaguauaaugcag

SEQ ID NO: 168191 - RNA, 22 nt, Human
uaauuucaccguugcuagaaau

SEQ ID NO: 168192 - RNA, 22 nt, Human
aucaagaaaagugcuuucggcu

SEQ ID NO: 168193 - RNA, 22 nt, Human
ugccuggauucgguuguuguca

SEQ ID NO: 168194 - RNA, 22 nt, Human
cacccagcauuggcuaagagag

SEQ ID NO: 168195 - RNA, 22 nt, Human
cucagagaaccuaagcggagga

SEQ ID NO: 168196 - RNA, 22 nt, Human
acaggugugcggaaagcuguga

SEQ ID NO: 168197 - RNA, 22 nt, Human
uagggcuccacucccagagauu

SEQ ID NO: 168198 - RNA, 22 nt, Human
uuugaaguggaaaaggauuuaa

SEQ ID NO: 168199 - RNA, 22 nt, Human
gagcaguggugguguguuagag

SEQ ID NO: 168200 - RNA, 19 nt, Human
cugcagggaugugcagagu

SEQ ID NO: 168201 - RNA, 22 nt, Human
uacauguaauuuucauaguaag

SEQ ID NO: 168202 - RNA, 22 nt, Human
caggccucuccuuagucuggca

SEQ ID NO: 168203 - RNA, 20 nt, Human
uuuacauuuugaaacaguga

SEQ ID NO: 168204 - RNA, 22 nt, Human
guuauacauauguguuaacaaa

SEQ ID NO: 168205 - RNA, 22 nt, Human
uccuggguccugggaagcccug

SEQ ID NO: 168206 - RNA, 22 nt, Human
aggauuuauuauaugcccucau

SEQ ID NO: 168207 - RNA, 22 nt, Human
ucuuauugguaaugauggcauu

SEQ ID NO: 168208 - RNA, 20 nt, Human
uggaccugucucuuuaggga

SEQ ID NO: 168209 - RNA, 22 nt, Human
agacauauuggcuugcuuuaau

SEQ ID NO: 168210 - RNA, 22 nt, Human
auugcuuuugagcuagaauuuu

SEQ ID NO: 168211 - RNA, 22 nt, Human
aaaauuauucauggcuuuugga

SEQ ID NO: 168212 - RNA, 22 nt, Human
cuguugcuaaguagugcaggua

SEQ ID NO: 168213 - RNA, 22 nt, Human
uuacauaacgguaugaaaaaug

SEQ ID NO: 168214 - RNA, 22 nt, Human
guuuacauauuuuaauugguga

SEQ ID NO: 168215 - RNA, 20 nt, Human
cugaacacagaauaagcaca

SEQ ID NO: 168216 - RNA, 22 nt, Human
gaguccuuccagcaggcauuua

SEQ ID NO: 168217 - RNA, 22 nt, Human
ucagagagcuggugggcagagg

SEQ ID NO: 168218 - RNA, 22 nt, Human
gauguguccuuuucuccaucca

SEQ ID NO: 168219 - RNA, 22 nt, Human
uccucagagcauagcgcugucu

SEQ ID NO: 168220 - RNA, 22 nt, Human
agagguuguuagaauaguggag

SEQ ID NO: 168221 - RNA, 22 nt, Human
gcaggcagguggcaucuuguga

SEQ ID NO: 168222 - RNA, 19 nt, Human
aaggugucccaacugcguu

SEQ ID NO: 168223 - RNA, 22 nt, Human
ugcauggaggaagaugaaugca

SEQ ID NO: 168224 - RNA, 20 nt, Human
uucuuaaagaccucacuuug

SEQ ID NO: 168225 - RNA, 22 nt, Human
gaagaaucaagcaguaauuugu

SEQ ID NO: 168226 - RNA, 22 nt, Human
gcuggagguuucaccugaguuu

SEQ ID NO: 168227 - RNA, 22 nt, Human
ccaggugucaugcgugugaccc

SEQ ID NO: 168228 - RNA, 22 nt, Human
gcagggcaucccugagcgggug

SEQ ID NO: 168229 - RNA, 22 nt, Human
ucagacaggcuggacagcuugc

SEQ ID NO: 168230 - RNA, 22 nt, Human
uguguccucauguggcagagag

SEQ ID NO: 168231 - RNA, 22 nt, Human
cacuuauuaugggcuaggaacu

SEQ ID NO: 168232 - RNA, 22 nt, Human
auucuucacaaauauauagaag

SEQ ID NO: 168233 - RNA, 22 nt, Human
ggcaggcacaguaauacauguu

SEQ ID NO: 168234 - RNA, 22 nt, Human
gcguccagggaaggcccagcug

SEQ ID NO: 168235 - RNA, 22 nt, Human
ccagguggugaaagugggcccu

SEQ ID NO: 168236 - RNA, 22 nt, Human
uucauaaucaccaaaaacugga

SEQ ID NO: 168237 - RNA, 22 nt, Human
ucaguucugcuagaaaaacagu

SEQ ID NO: 168238 - RNA, 22 nt, Human
uuccagagcaguuuucagauca

SEQ ID NO: 168239 - RNA, 22 nt, Human
acuuucauuuguaauaaacuuc

SEQ ID NO: 168240 - RNA, 22 nt, Human
gaagaauccuguccucuuuagg

SEQ ID NO: 168241 - RNA, 18 nt, Human
aguccuuacgaggcuaua

SEQ ID NO: 168242 - RNA, 22 nt, Human
cagugaggaguccagggcagag

SEQ ID NO: 168243 - RNA, 22 nt, Human
ucagcuuuccugcagcuaaggg

SEQ ID NO: 168244 - RNA, 22 nt, Human
aauuagggaggacaaagguaca

SEQ ID NO: 168245 - RNA, 22 nt, Human
auggcuuugcucaaguuuagcc

SEQ ID NO: 168246 - RNA, 22 nt, Human
gcagcuuucugcaaugucaucc

SEQ ID NO: 168247 - RNA, 22 nt, Human
ggcuuuauuucacuguaccaua

SEQ ID NO: 168248 - RNA, 22 nt, Human
ugcaggugugggcaggggagca

SEQ ID NO: 168249 - RNA, 22 nt, Human
cagggcucugccuugagggaug

SEQ ID NO: 168250 - RNA, 22 nt, Human
caggcagggagcuggaaaggau

SEQ ID NO: 168251 - RNA, 20 nt, Human
ucaggcaguggggaaaggca

SEQ ID NO: 168252 - RNA, 22 nt, Human
ugggaagaguuagagacagcug

SEQ ID NO: 168253 - RNA, 22 nt, Human
gcagggcaaacccagguguuca

SEQ ID NO: 168254 - RNA, 22 nt, Human
gucugcccggccuuccuccacc

SEQ ID NO: 168255 - RNA, 22 nt, Human
ggaacuugaaaaucaagguggu

SEQ ID NO: 168256 - RNA, 22 nt, Human
aaucagaaagaucuugaugaga

SEQ ID NO: 168257 - RNA, 22 nt, Human
uuugcucaguucucuguauuuu

SEQ ID NO: 168258 - RNA, 19 nt, Human
gaacuuggccaggcacagu

SEQ ID NO: 168259 - RNA, 22 nt, Human
uuccaggaggcacugacagagg

SEQ ID NO: 168260 - RNA, 22 nt, Human
agaagcugcguuuauuuaaauc

SEQ ID NO: 168261 - RNA, 22 nt, Human
uaaguccuaacagacugggggc

SEQ ID NO: 168262 - RNA, 17 nt, Human
uuauuuuuugggcugag

SEQ ID NO: 168263 - RNA, 22 nt, Human
uauuugaagggagaaagugcca

SEQ ID NO: 168264 - RNA, 22 nt, Human
aaagaaucguguguaguuugaa

SEQ ID NO: 168265 - RNA, 22 nt, Human
ugacagacacaccuuaggaaag

SEQ ID NO: 168266 - RNA, 22 nt, Human
cucuaacacuguaaugcuuucu

SEQ ID NO: 168267 - RNA, 22 nt, Human
aaaucagugcucauuugaaagg

SEQ ID NO: 168268 - RNA, 22 nt, Human
cauuugaaauucuuagaacaaa

SEQ ID NO: 168269 - RNA, 22 nt, Human
agcugcaaguaagcuugcuccu

SEQ ID NO: 168270 - RNA, 22 nt, Human
ucccagugagaugaaacaggua

SEQ ID NO: 168271 - RNA, 22 nt, Human
uagggcucagaguccaguuucu

SEQ ID NO: 168272 - RNA, 22 nt, Human
caugcuuuucaaucuaucuuaa

SEQ ID NO: 168273 - RNA, 22 nt, Human
gggcagguguuuccaaggugag

SEQ ID NO: 168274 - RNA, 22 nt, Human
aagggcucuucuauuuauggcc

SEQ ID NO: 168275 - RNA, 18 nt, Human
acauuucuccuucugacc

SEQ ID NO: 168276 - RNA, 22 nt, Human
uauacauguuuuacauaaguga

SEQ ID NO: 168277 - RNA, 22 nt, Human
uaaggcauaaggccagaggcua

SEQ ID NO: 168278 - RNA, 22 nt, Human
ucagggacgugagcucagaguc

SEQ ID NO: 168279 - RNA, 22 nt, Human
gauccuguuagaucccauuaga

SEQ ID NO: 168280 - RNA, 20 nt, Human
acaugcaguggucauuucag

SEQ ID NO: 168281 - RNA, 22 nt, Human
uguacaauagcuauuaucucca

SEQ ID NO: 168282 - RNA, 22 nt, Human
agcaggugucacuuucacucca

SEQ ID NO: 168283 - RNA, 21 nt, Human
aagugguuuacauccagcugu

SEQ ID NO: 168284 - RNA, 22 nt, Human
aacuuaaacccacucauguaga

SEQ ID NO: 168285 - RNA, 19 nt, Human
agugcagggagcacccuca

SEQ ID NO: 168286 - RNA, 22 nt, Human
cuuuaagacucugcucuuggug

SEQ ID NO: 168287 - RNA, 22 nt, Human
auggcuuaugguaaauauuucu

SEQ ID NO: 168288 - RNA, 22 nt, Human
ccagggcaauaggaacacuuuu

SEQ ID NO: 168289 - RNA, 22 nt, Human
uggcaauguuagcaaagcauuu

SEQ ID NO: 168290 - RNA, 22 nt, Human
ugguuuaaccugucucuuauua

SEQ ID NO: 168291 - RNA, 22 nt, Human
aagggcagcugacagaugcuua

SEQ ID NO: 168292 - RNA, 22 nt, Human
gaugaaaaauugcugugucaua

SEQ ID NO: 168293 - RNA, 20 nt, Human
aacuuguucuaccuguuuca

SEQ ID NO: 168294 - RNA, 22 nt, Human
uaacagaaaggggacagaaaua

SEQ ID NO: 168295 - RNA, 20 nt, Human
cugcugcccugucagccucu

SEQ ID NO: 168296 - RNA, 22 nt, Human
caugcuuauucauucugcuaac

SEQ ID NO: 168297 - RNA, 22 nt, Human
agacaggcagggcauggaaaaa

SEQ ID NO: 168298 - RNA, 22 nt, Human
uuaauuuuaaccuguuuguguc

SEQ ID NO: 168299 - RNA, 22 nt, Human
acagaauuuaaagcucuagacu

SEQ ID NO: 168300 - RNA, 22 nt, Human
uuuauccagcagcuauucaaaa

SEQ ID NO: 168301 - RNA, 22 nt, Human
augaaauaucuugaagaaauuc

SEQ ID NO: 168302 - RNA, 20 nt, Human
cuucuucauuaacccuacug

SEQ ID NO: 168303 - RNA, 22 nt, Human
guuuuauaggugaaauauuacu

SEQ ID NO: 168304 - RNA, 22 nt, Human
aaaauugaggcucauguuaaau

SEQ ID NO: 168305 - RNA, 22 nt, Human
agcaggugacccaagcaggcug

SEQ ID NO: 168306 - RNA, 23 nt, Human
uggaauaauaagguacauuaaca

SEQ ID NO: 168307 - RNA, 17 nt, Human
uacauguguaucugauu

SEQ ID NO: 168308 - RNA, 22 nt, Human
gcuagaucucucauaaauucca

SEQ ID NO: 168309 - RNA, 22 nt, Human
accugcaguggccacuccuaau

SEQ ID NO: 168310 - RNA, 21 nt, Human
acagacaguccagagaaaaga

SEQ ID NO: 168311 - RNA, 19 nt, Human
ugcagccacgugagagacu

SEQ ID NO: 168312 - RNA, 22 nt, Human
auguguccuuguucccauucca

SEQ ID NO: 168313 - RNA, 21 nt, Human
uuccuuuuuauggcuuagugg

SEQ ID NO: 168314 - RNA, 22 nt, Human
gggccaugagagguucaucaac

SEQ ID NO: 168315 - RNA, 17 nt, Human
aaucagauuucugagga

SEQ ID NO: 168316 - RNA, 22 nt, Human
ucugagguggacgauggagccu

SEQ ID NO: 168317 - RNA, 22 nt, Human
uuucauuggcucccugaugaau

SEQ ID NO: 168318 - RNA, 22 nt, Human
auacuuuggucacuauuauugg

SEQ ID NO: 168319 - RNA, 22 nt, Human
uuaaauauuuucagcaggguca

SEQ ID NO: 168320 - RNA, 22 nt, Human
acaugcuuuucccacaauuaua

SEQ ID NO: 168321 - RNA, 22 nt, Human
ugaagaaucccagggaauuugg

SEQ ID NO: 168322 - RNA, 22 nt, Human
gggagcugagcuggaagagaau

SEQ ID NO: 168323 - RNA, 22 nt, Human
cagcuuugcaggcuggucagug

SEQ ID NO: 168324 - RNA, 22 nt, Human
gcuguucacaucuggaccauuu

SEQ ID NO: 168325 - RNA, 22 nt, Human
aauuuccaaauuucugucacac

SEQ ID NO: 168326 - RNA, 22 nt, Human
uuccaggaagauucaacaaaag

SEQ ID NO: 168327 - RNA, 19 nt, Human
aaaugugaugguacaauuc

SEQ ID NO: 168328 - RNA, 22 nt, Human
cugcaucacagcaggaggcaca

SEQ ID NO: 168329 - RNA, 22 nt, Human
aaauucuaaggucacaauguug

SEQ ID NO: 168330 - RNA, 22 nt, Human
uggcaggggaggugcuugcuua

SEQ ID NO: 168331 - RNA, 22 nt, Human
ccaggugggaggaaagcagaga

SEQ ID NO: 168332 - RNA, 22 nt, Human
ucauuuaauugguuuugcucgu

SEQ ID NO: 168333 - RNA, 22 nt, Human
cugcuuuagacaacugcuggga

SEQ ID NO: 168334 - RNA, 22 nt, Human
ccuguucaugaaacugcuuucc

SEQ ID NO: 168335 - RNA, 22 nt, Human
cuggauguaacgaagguuucac

SEQ ID NO: 168336 - RNA, 22 nt, Human
ucuauaaauuaugcagucucag

SEQ ID NO: 168337 - RNA, 20 nt, Human
uuuaggcauuacucuuuugu

SEQ ID NO: 168338 - RNA, 22 nt, Human
gaaugaaaaccuuggcucaaau

SEQ ID NO: 168339 - RNA, 22 nt, Human
cagcugcaggaacaaaaaugug

SEQ ID NO: 168340 - RNA, 22 nt, Human
aaagcuuuucaguauguucaug

SEQ ID NO: 168341 - RNA, 22 nt, Human
uccagaccauggauggcugcaa

SEQ ID NO: 168342 - RNA, 22 nt, Human
aaaugcuagggagaaacucucc

SEQ ID NO: 168343 - RNA, 22 nt, Human
cagcuuugugcaaugcagucuc

SEQ ID NO: 168344 - RNA, 21 nt, Human
caauuucaugggaagauggga

SEQ ID NO: 168345 - RNA, 22 nt, Human
cauguccuucucauugccucau

SEQ ID NO: 168346 - RNA, 22 nt, Human
cagaggcauacucccagucuug

SEQ ID NO: 168347 - RNA, 20 nt, Human
caugguggaggagcagggcc

SEQ ID NO: 168348 - RNA, 22 nt, Human
auuguuaugaaaauaagauguu

SEQ ID NO: 168349 - RNA, 22 nt, Human
uuucuguaaggacuuaaugcaa

SEQ ID NO: 168350 - RNA, 19 nt, Human
acagggcagcaauaggaua

SEQ ID NO: 168351 - RNA, 19 nt, Human
aauagauuaauuauccucu

SEQ ID NO: 168352 - RNA, 22 nt, Human
gagggaccuuuacacagacauu

SEQ ID NO: 168353 - RNA, 22 nt, Human
acaacuuuagucuggagggaaa

SEQ ID NO: 168354 - RNA, 22 nt, Human
cucuucaauagauuguugaggg

SEQ ID NO: 168355 - RNA, 17 nt, Human
auccuucuguucuuucu

SEQ ID NO: 168356 - RNA, 22 nt, Human
cagaaaucauugugaugacagg

SEQ ID NO: 168357 - RNA, 22 nt, Human
ucuuagauggcagcuagagcuc

SEQ ID NO: 168358 - RNA, 22 nt, Human
guuucuuucuauugacugaaca

SEQ ID NO: 168359 - RNA, 21 nt, Human
aucuggaaauucugccagaga

SEQ ID NO: 168360 - RNA, 21 nt, Human
uaugugucuguggaaaacuag

SEQ ID NO: 168361 - RNA, 21 nt, Human
uggacauuauggagagaguag

SEQ ID NO: 168362 - RNA, 22 nt, Human
cugggguggauggguccaaguu

SEQ ID NO: 168363 - RNA, 22 nt, Human
gguuucaacucagcuaguaagg

SEQ ID NO: 168364 - RNA, 22 nt, Human
aaguuuaacuugaauucuuucu

SEQ ID NO: 168365 - RNA, 22 nt, Human
agguggggcccaccaauuugca

SEQ ID NO: 168366 - RNA, 22 nt, Human
uggguggauuaggauaggguau

SEQ ID NO: 168367 - RNA, 22 nt, Human
gcacaauaacagccaagguuau

SEQ ID NO: 168368 - RNA, 22 nt, Human
aguauuuagcauagugguuagu

SEQ ID NO: 168369 - RNA, 22 nt, Human
cagacccugggccacagaggag

SEQ ID NO: 168370 - RNA, 17 nt, Human
gcauccaguaacaugcc

SEQ ID NO: 168371 - RNA, 22 nt, Human
cugcagggugacguugcccacc

SEQ ID NO: 168372 - RNA, 22 nt, Human
cauuucaaacaguuacagcugc

SEQ ID NO: 168373 - RNA, 22 nt, Human
auuucacaaagaacagaugcag

SEQ ID NO: 168374 - RNA, 22 nt, Human
ucccaggcuggcaggcagcagu

SEQ ID NO: 168375 - RNA, 20 nt, Human
aguuuauuccaggagaacug

SEQ ID NO: 168376 - RNA, 17 nt, Human
uaucagaauguguuuac

SEQ ID NO: 168377 - RNA, 22 nt, Human
ccagcuuuugcacuggacuggg

SEQ ID NO: 168378 - RNA, 23 nt, Human
uagggcagcugggagggacaugc

SEQ ID NO: 168379 - RNA, 22 nt, Human
caaagccauagaguagauaaga

SEQ ID NO: 168380 - RNA, 22 nt, Human
gcauguguggaggagaugugcu

SEQ ID NO: 168381 - RNA, 22 nt, Human
uuccagugacuaagcuucugcu

SEQ ID NO: 168382 - RNA, 22 nt, Human
gauguguccuaguacggguggg

SEQ ID NO: 168383 - RNA, 22 nt, Human
auaaauugugcuuuugacaucu

SEQ ID NO: 168384 - RNA, 19 nt, Human
gcagacagguccagagagg

SEQ ID NO: 168385 - RNA, 22 nt, Human
gagcagugccaaagaauuugcg

SEQ ID NO: 168386 - RNA, 22 nt, Human
aaauggauggaauugacauuua

SEQ ID NO: 168387 - RNA, 22 nt, Human
caugaaugcuggguucauguaa

SEQ ID NO: 168388 - RNA, 22 nt, Human
acucugcuguuuacucucuaua

SEQ ID NO: 168389 - RNA, 22 nt, Human
agugugagcccuggaguggugc

SEQ ID NO: 168390 - RNA, 22 nt, Human
acuauacaagauuagggauuug

SEQ ID NO: 168391 - RNA, 22 nt, Human
uuugggaauaauugcacagauu

SEQ ID NO: 168392 - RNA, 22 nt, Human
ccuguucaccauggucacgugc

SEQ ID NO: 168393 - RNA, 22 nt, Human
uuugcuugacccuugugcugaa

SEQ ID NO: 168394 - RNA, 22 nt, Human
gcagagaggaaugaagccaucc

SEQ ID NO: 168395 - RNA, 22 nt, Human
aggguggcaccacauaucauag

SEQ ID NO: 168396 - RNA, 22 nt, Human
cauaauaucuccgauuacuugc

SEQ ID NO: 168397 - RNA, 22 nt, Human
gguguccuuguccuuugguacc

SEQ ID NO: 168398 - RNA, 22 nt, Human
ccuuuguucauugccuucaguc

SEQ ID NO: 168399 - RNA, 22 nt, Human
auugcuuuucagacaaugaggc

SEQ ID NO: 168400 - RNA, 22 nt, Human
uuguguccuauaugcauguucu

SEQ ID NO: 168401 - RNA, 22 nt, Human
gauuuaaaguagaccuuuguuu

SEQ ID NO: 168402 - RNA, 22 nt, Human
cccaggcacacugaagugacau

SEQ ID NO: 168403 - RNA, 22 nt, Human
uuguuucaggaugguuuguuac

SEQ ID NO: 168404 - RNA, 20 nt, Human
agaaaaaguguggaaauuuc

SEQ ID NO: 168405 - RNA, 22 nt, Human
uuguguccugauuugacacaau

SEQ ID NO: 168406 - RNA, 22 nt, Human
aauguuuuaaaagagauugaga

SEQ ID NO: 168407 - RNA, 22 nt, Human
uaaagccaauauaccuagcaua

SEQ ID NO: 168408 - RNA, 22 nt, Human
aaauccuaccaagaaauucccu

SEQ ID NO: 168409 - RNA, 22 nt, Human
cagaguggugcaagggcagugu

SEQ ID NO: 168410 - RNA, 21 nt, Human
ucagagagucacagugaacug

SEQ ID NO: 168411 - RNA, 22 nt, Human
ucugggaacacacgucacuuca

SEQ ID NO: 168412 - RNA, 22 nt, Human
gguucaguggaauguguugacc

SEQ ID NO: 168413 - RNA, 22 nt, Human
aaaagcagaccacgcuuugugg

SEQ ID NO: 168414 - RNA, 19 nt, Human
ugguggaggccccauguuc

SEQ ID NO: 168415 - RNA, 22 nt, Human
uuucacauucagauauagacuu

SEQ ID NO: 168416 - RNA, 22 nt, Human
aaucucuuuggcucaaggaucc

SEQ ID NO: 168417 - RNA, 21 nt, Human
auuuucauuuccaggggagga

SEQ ID NO: 168418 - RNA, 22 nt, Human
ggacagaggguugacagaguau

SEQ ID NO: 168419 - RNA, 17 nt, Human
ugacagacaucaugagc

SEQ ID NO: 168420 - RNA, 22 nt, Human
aaauugcaaaaguacuuuuagg

SEQ ID NO: 168421 - RNA, 22 nt, Human
augcauaauguauguauugacu

SEQ ID NO: 168422 - RNA, 23 nt, Human
agcagggccagaauacuugcugu

SEQ ID NO: 168423 - RNA, 22 nt, Human
aucagagauuguaguaugugca

SEQ ID NO: 168424 - RNA, 22 nt, Human
gcaugcagaaaaugaacaacga

SEQ ID NO: 168425 - RNA, 22 nt, Human
uuugacucauugauuuucucug

SEQ ID NO: 168426 - RNA, 19 nt, Human
cucuuaaauugucucuugc

SEQ ID NO: 168427 - RNA, 22 nt, Human
cacuggaauucaagauacugag

SEQ ID NO: 168428 - RNA, 22 nt, Human
aguucucaagacaauuaccugu

SEQ ID NO: 168429 - RNA, 22 nt, Human
ucauuuauaaggaugcaauuaa

SEQ ID NO: 168430 - RNA, 21 nt, Human
ugggaccuauuucaacuggau

SEQ ID NO: 168431 - RNA, 22 nt, Human
uuugcuuucuguugaacagagu

SEQ ID NO: 168432 - RNA, 22 nt, Human
ccagggcaaaugagaucauagc

SEQ ID NO: 168433 - RNA, 22 nt, Human
agugucuguugaguuucaaaag

SEQ ID NO: 168434 - RNA, 22 nt, Human
uauugguauaggcauugaaacu

SEQ ID NO: 168435 - RNA, 16 nt, Human
ccuggauccccugugg

SEQ ID NO: 168436 - RNA, 22 nt, Human
ggagggagcauccccuugcuga

SEQ ID NO: 168437 - RNA, 22 nt, Human
caggcauagaagggcaagaaua

SEQ ID NO: 168438 - RNA, 19 nt, Human
agacacacuuacguggaau

SEQ ID NO: 168439 - RNA, 22 nt, Human
guauucauauuaaacauaucaa

SEQ ID NO: 168440 - RNA, 22 nt, Human
guguccugcauuggcucugccc

SEQ ID NO: 168441 - RNA, 22 nt, Human
auuucuguugcuuauaaauuac

SEQ ID NO: 168442 - RNA, 22 nt, Human
ugugugucagagucuccauggu

SEQ ID NO: 168443 - RNA, 22 nt, Human
uaauugcuuuauccuguuagaa

SEQ ID NO: 168444 - RNA, 22 nt, Human
cagauuucagcucauauauuau

SEQ ID NO: 168445 - RNA, 22 nt, Human
cacaauuuccuugcuucacuuu

SEQ ID NO: 168446 - RNA, 22 nt, Human
guccaugauucugugacacccu

SEQ ID NO: 168447 - RNA, 19 nt, Human
ugcugaaguugucagucug

SEQ ID NO: 168448 - RNA, 22 nt, Human
caguaaauuugagggaucuaau

SEQ ID NO: 168449 - RNA, 22 nt, Human
uuccaggacaagauguuucagg

SEQ ID NO: 168450 - RNA, 22 nt, Human
aaggcauacauauuguuauagg

SEQ ID NO: 168451 - RNA, 21 nt, Human
aaugcauuaacauaaagcuga

SEQ ID NO: 168452 - RNA, 22 nt, Human
auaucagacagaaagcauugac

SEQ ID NO: 168453 - RNA, 22 nt, Human
aggaggaauugacacagaagcc

SEQ ID NO: 168454 - RNA, 22 nt, Human
ugcuuuauagacaaggaaguag

SEQ ID NO: 168455 - RNA, 22 nt, Human
uuccuuagugacuucuagcuac

SEQ ID NO: 168456 - RNA, 22 nt, Human
uaccugcaaaguuccuuuugcc

SEQ ID NO: 168457 - RNA, 22 nt, Human
cugcaaaaguaauuggggcuuu

SEQ ID NO: 168458 - RNA, 22 nt, Human
uucagaaacaucaguggaugga

SEQ ID NO: 168459 - RNA, 19 nt, Human
cacuuuauuucuguuuugu

SEQ ID NO: 168460 - RNA, 22 nt, Human
guccuggugcuggucauugucg

SEQ ID NO: 168461 - RNA, 20 nt, Human
uuccuguauacaaagaguuc

SEQ ID NO: 168462 - RNA, 22 nt, Human
ucugcccucauugcugccugga

SEQ ID NO: 168463 - RNA, 22 nt, Human
uuuccagauuaagauaccacuu

SEQ ID NO: 168464 - RNA, 22 nt, Human
cuaaaugacuuccagugguuau

SEQ ID NO: 168465 - RNA, 22 nt, Human
ggaugaggaaaccacagugucc

SEQ ID NO: 168466 - RNA, 22 nt, Human
aauugcuuuaguuaccauagug

SEQ ID NO: 168467 - RNA, 22 nt, Human
accugcaggggugcucucuggg

SEQ ID NO: 168468 - RNA, 22 nt, Human
ucuguucagaauuguaacacuc

SEQ ID NO: 168469 - RNA, 22 nt, Human
uguccucaucuuuuccagaaau

SEQ ID NO: 168470 - RNA, 17 nt, Human
uguccauuugccuggag

SEQ ID NO: 168471 - RNA, 22 nt, Human
aacauacauauuucagugucca

SEQ ID NO: 168472 - RNA, 22 nt, Human
uguacaauguguuuguuggcuu

SEQ ID NO: 168473 - RNA, 22 nt, Human
ggggaccuuuccauuucugaga

SEQ ID NO: 168474 - RNA, 22 nt, Human
aagggcagccugacucacgguc

SEQ ID NO: 168475 - RNA, 23 nt, Human
cacacccaucacuaagagcuccu

SEQ ID NO: 168476 - RNA, 22 nt, Human
uauuugaaggcauacauuuuga

SEQ ID NO: 168477 - RNA, 22 nt, Human
uuuucauuuacauuagggaaga

SEQ ID NO: 168478 - RNA, 22 nt, Human
acuggauuccauugugcaaaga

SEQ ID NO: 168479 - RNA, 22 nt, Human
augcagcugugggcaagaaaug

SEQ ID NO: 168480 - RNA, 22 nt, Human
cccaggcagugcugaucccuca

SEQ ID NO: 168481 - RNA, 22 nt, Human
ggcuacuagguaccauuuagaa

SEQ ID NO: 168482 - RNA, 22 nt, Human
uccuccuuguuuugucucugcu

SEQ ID NO: 168483 - RNA, 22 nt, Human
uuauuaggaacucaggauuuuu

SEQ ID NO: 168484 - RNA, 22 nt, Human
auauuagggucucuaaauucua

SEQ ID NO: 168485 - RNA, 22 nt, Human
cuguugcucccagggagagggu

SEQ ID NO: 168486 - RNA, 22 nt, Human
cccugcagaccaaugccauaga

SEQ ID NO: 168487 - RNA, 22 nt, Human
gcugcagugagccaagaucgug

SEQ ID NO: 168488 - RNA, 22 nt, Human
acagcuggcaggggggcaugaa

SEQ ID NO: 168489 - RNA, 22 nt, Human
ugaggaauguuuugagugccga

SEQ ID NO: 168490 - RNA, 22 nt, Human
agaaaugucaggaaagaagucc

SEQ ID NO: 168491 - RNA, 22 nt, Human
gcuggauccacaaauaacuuug

SEQ ID NO: 168492 - RNA, 21 nt, Human
uauacaugugugcauacgugu

SEQ ID NO: 168493 - RNA, 22 nt, Human
ucagaauuuugguuugguuggu

SEQ ID NO: 168494 - RNA, 22 nt, Human
acagcuuuugaaaaauuacugg

SEQ ID NO: 168495 - RNA, 18 nt, Human
cuggcuuucuuauccauc

SEQ ID NO: 168496 - RNA, 18 nt, Human
cauaauuuucuuucuuua

SEQ ID NO: 168497 - RNA, 23 nt, Human
ggacaugucucuggguauuuuga

SEQ ID NO: 168498 - RNA, 22 nt, Human
cuguccuuacugcuucuggcuu

SEQ ID NO: 168499 - RNA, 22 nt, Human
gcuggcuugauaguuucugcuu

SEQ ID NO: 168500 - RNA, 22 nt, Human
cuggcuuucccuggacaacagc

SEQ ID NO: 168501 - RNA, 22 nt, Human
ugaaaucaauugcaauguuuau

SEQ ID NO: 168502 - RNA, 22 nt, Human
ucucacuuuguugcccagacuu

SEQ ID NO: 168503 - RNA, 22 nt, Human
uccaaaguguugggauuauagg

SEQ ID NO: 168504 - RNA, 19 nt, Human
aggaaggaaccugagucug

SEQ ID NO: 168505 - RNA, 22 nt, Human
ggcauccaaauaccaagaugua

SEQ ID NO: 168506 - RNA, 22 nt, Human
gcauguuuugcaacaagugacc

SEQ ID NO: 168507 - RNA, 22 nt, Human
gggcaggugaccucuuguccug

SEQ ID NO: 168508 - RNA, 21 nt, Human
gcugggucagcagguccucug

SEQ ID NO: 168509 - RNA, 19 nt, Human
aaaguuuuauucucauuug

SEQ ID NO: 168510 - RNA, 22 nt, Human
gguguccuuguugaacgaaaau

SEQ ID NO: 168511 - RNA, 22 nt, Human
uuacuucuuacaaaagaaauau

SEQ ID NO: 168512 - RNA, 22 nt, Human
uauuuccaccuauuauuuucug

SEQ ID NO: 168513 - RNA, 22 nt, Human
uuauuaaugaguacaaguuauu

SEQ ID NO: 168514 - RNA, 22 nt, Human
aaagucaucagaaccuuccaga

SEQ ID NO: 168515 - RNA, 22 nt, Human
caaauguauucucacuucaggg

SEQ ID NO: 168516 - RNA, 22 nt, Human
gaauuucauugcucugcugugu

SEQ ID NO: 168517 - RNA, 22 nt, Human
uggcagguagucagaggcgaca

SEQ ID NO: 168518 - RNA, 22 nt, Human
ggcauuaagaauaucauuaaaa

SEQ ID NO: 168519 - RNA, 22 nt, Human
gugaccauuugacauauccuug

SEQ ID NO: 168520 - RNA, 22 nt, Human
uucauguauuuaucauguaaau

SEQ ID NO: 168521 - RNA, 22 nt, Human
uuuccauguuaucuugcagacu

SEQ ID NO: 168522 - RNA, 22 nt, Human
ucuuuuaagccucuggcauagg

SEQ ID NO: 168523 - RNA, 22 nt, Human
gcagguguuuuaagacauugaa

SEQ ID NO: 168524 - RNA, 22 nt, Human
agaauuuccuaugagagauucc

SEQ ID NO: 168525 - RNA, 22 nt, Human
gauuucaaggaguuuucacagu

SEQ ID NO: 168526 - RNA, 19 nt, Human
auacagauguauccaugau

SEQ ID NO: 168527 - RNA, 22 nt, Human
agcucccauuaucuucugaaac

SEQ ID NO: 168528 - RNA, 22 nt, Human
uuuagcuucaguucuagcuucu

SEQ ID NO: 168529 - RNA, 22 nt, Human
cuugauugcuucuacgugacug

SEQ ID NO: 168530 - RNA, 22 nt, Human
uagggcagccacccaggcugcu

SEQ ID NO: 168531 - RNA, 22 nt, Human
ccuucuucuguguggcccaaga

SEQ ID NO: 168532 - RNA, 22 nt, Human
cauuguuaccaucuuuuaccua

SEQ ID NO: 168533 - RNA, 22 nt, Human
ccuggagguggagguugcagug

SEQ ID NO: 168534 - RNA, 22 nt, Human
cagggcagaaggcacucuacuc

SEQ ID NO: 168535 - RNA, 21 nt, Human
ugucagagcuuguaggacauu

SEQ ID NO: 168536 - RNA, 22 nt, Human
uggcaaaggggaccauguugaa

SEQ ID NO: 168537 - RNA, 22 nt, Human
ccagagagauugcuucuaaaga

SEQ ID NO: 168538 - RNA, 22 nt, Human
uuugacaaaggaaaaaugcaca

SEQ ID NO: 168539 - RNA, 22 nt, Human
ccugggugaugugcugcccucg

SEQ ID NO: 168540 - RNA, 22 nt, Human
auugcuggcaucagugacaaua

SEQ ID NO: 168541 - RNA, 22 nt, Human
auuauuagauucuuaauuguaa

SEQ ID NO: 168542 - RNA, 22 nt, Human
ugggaccucucuugagagagca

SEQ ID NO: 168543 - RNA, 22 nt, Human
guagcuuauuagggauaauagu

SEQ ID NO: 168544 - RNA, 22 nt, Human
gauuguaauucuacuuuccgcu

SEQ ID NO: 168545 - RNA, 22 nt, Human
gccaaaucuugcacacucuugu

SEQ ID NO: 168546 - RNA, 22 nt, Human
aagggcagcuauuaucgucauc

SEQ ID NO: 168547 - RNA, 22 nt, Human
cacccagcuuuugcauccuccg

SEQ ID NO: 168548 - RNA, 22 nt, Human
ucacagaaauaagauaguuauu

SEQ ID NO: 168549 - RNA, 22 nt, Human
cuguuuucccuggaguucagca

SEQ ID NO: 168550 - RNA, 22 nt, Human
ggcaggcagaggcugagacagg

SEQ ID NO: 168551 - RNA, 22 nt, Human
uuuuauuggagugauaccaagc

SEQ ID NO: 168552 - RNA, 16 nt, Human
caggugucagucaccu

SEQ ID NO: 168553 - RNA, 22 nt, Human
uuuccuguugccaucaagaaug

SEQ ID NO: 168554 - RNA, 22 nt, Human
agauggucuaguugaaccauau

SEQ ID NO: 168555 - RNA, 22 nt, Human
ucagacagaaagaugaguaugg

SEQ ID NO: 168556 - RNA, 22 nt, Human
uucuucuugaaacuuuagguug

SEQ ID NO: 168557 - RNA, 22 nt, Human
ugcacuacugugauacacagcc

SEQ ID NO: 168558 - RNA, 22 nt, Human
uuauuugcccauguuuagcaga

SEQ ID NO: 168559 - RNA, 22 nt, Human
uagcuuuaagaugagaugugga

SEQ ID NO: 168560 - RNA, 22 nt, Human
auuuauuaagcaucugcuaugu

SEQ ID NO: 168561 - RNA, 22 nt, Human
gcucuaauugaaaaauacugca

SEQ ID NO: 168562 - RNA, 22 nt, Human
acagcuuuguuuucccugcuga

SEQ ID NO: 168563 - RNA, 22 nt, Human
auuuccaagaaagcuuuaggau

SEQ ID NO: 168564 - RNA, 22 nt, Human
uuucacauuuaggcgugaauug

SEQ ID NO: 168565 - RNA, 22 nt, Human
aaugccaacuuggauauacauu

SEQ ID NO: 168566 - RNA, 22 nt, Human
ucagggcaagucucagaagguu

SEQ ID NO: 168567 - RNA, 20 nt, Human
cagcuuuagaucuuugauua

SEQ ID NO: 168568 - RNA, 22 nt, Human
aacaugauggggaagaacaaga

SEQ ID NO: 168569 - RNA, 22 nt, Human
ccacccagcagaggaggcaaga

SEQ ID NO: 168570 - RNA, 21 nt, Human
aaggcuggagaugcaggucug

SEQ ID NO: 168571 - RNA, 22 nt, Human
guuuauuagaguuuucugucug

SEQ ID NO: 168572 - RNA, 22 nt, Human
caaguccaggucaauuuaaagc

SEQ ID NO: 168573 - RNA, 22 nt, Human
agguggggaguauauguaauug

SEQ ID NO: 168574 - RNA, 22 nt, Human
caggcauaaucucaucuuguuu

SEQ ID NO: 168575 - RNA, 22 nt, Human
uagucaccuguugugugaugcc

SEQ ID NO: 168576 - RNA, 22 nt, Human
uuuuccagagcugucucuugca

SEQ ID NO: 168577 - RNA, 22 nt, Human
ucaaaauuuuauuucucaagga

SEQ ID NO: 168578 - RNA, 22 nt, Human
aauuaaaugacaggggaagaug

SEQ ID NO: 168579 - RNA, 22 nt, Human
gggauuuaguaggauaguauac

SEQ ID NO: 168580 - RNA, 18 nt, Human
ugcuuggagcauuuacca

SEQ ID NO: 168581 - RNA, 22 nt, Human
ucuauacacacaaagaaugcuu

SEQ ID NO: 168582 - RNA, 22 nt, Human
uagaaacaucagcuaaccaaaa

SEQ ID NO: 168583 - RNA, 22 nt, Human
cuuuaguucuaaugcauugaaa

SEQ ID NO: 168584 - RNA, 22 nt, Human
augcaugaaagaauccaagccu

SEQ ID NO: 168585 - RNA, 22 nt, Human
aggacuuagaacauuauguacu

SEQ ID NO: 168586 - RNA, 22 nt, Human
auaauucagguuuucuggcaca

SEQ ID NO: 168587 - RNA, 22 nt, Human
gcuggagguggugagaaaaggu

SEQ ID NO: 168588 - RNA, 22 nt, Human
ggagcugagaguagucccuuuu

SEQ ID NO: 168589 - RNA, 22 nt, Human
gagccucguggcggccacugcg

SEQ ID NO: 168590 - RNA, 21 nt, Human
ucuguucaaggaacuacggau

SEQ ID NO: 168591 - RNA, 22 nt, Human
ucugggaauuuauuggcacuuu

SEQ ID NO: 168592 - RNA, 22 nt, Human
aaagcuaccuuuguguucauag

SEQ ID NO: 168593 - RNA, 21 nt, Human
uaaauaauaaguugcugagau

SEQ ID NO: 168594 - RNA, 22 nt, Human
gaauaucccgcuaugcaaagua

SEQ ID NO: 168595 - RNA, 22 nt, Human
uuauuuauggcccucaccugau

SEQ ID NO: 168596 - RNA, 22 nt, Human
uaacaagucauuuuaaauuaug

SEQ ID NO: 168597 - RNA, 22 nt, Human
uaguuauauccagucuuuaaaa

SEQ ID NO: 168598 - RNA, 22 nt, Human
cuuuucaugccagcccaucaca

SEQ ID NO: 168599 - RNA, 20 nt, Human
auuucaguguuugcaauuuc

SEQ ID NO: 168600 - RNA, 22 nt, Human
gagggcucacugagaaagcagu

SEQ ID NO: 168601 - RNA, 22 nt, Human
cuuguucaguccugacuuccug

SEQ ID NO: 168602 - RNA, 22 nt, Human
caugaaaaugucaaguucugcu

SEQ ID NO: 168603 - RNA, 22 nt, Human
gaaacaugucugacaauuuacc

SEQ ID NO: 168604 - RNA, 22 nt, Human
gggugugucuuuugcuccugga

SEQ ID NO: 168605 - RNA, 22 nt, Human
guucuucagaggggaaagaacc

SEQ ID NO: 168606 - RNA, 21 nt, Human
gggugggaggacacagcaggc

SEQ ID NO: 168607 - RNA, 22 nt, Human
gccaggcaauguguuagaagcg

SEQ ID NO: 168608 - RNA, 22 nt, Human
aucuaucccaguuuaacucauu

SEQ ID NO: 168609 - RNA, 22 nt, Human
uagggcagaguccaggaugggc

SEQ ID NO: 168610 - RNA, 22 nt, Human
uuaagacauucagauauuucua

SEQ ID NO: 168611 - RNA, 22 nt, Human
aaacauguuuucugaauauuuu

SEQ ID NO: 168612 - RNA, 22 nt, Human
aguuguaagagacagauauaaa

SEQ ID NO: 168613 - RNA, 22 nt, Human
uuauuagguuuacauaaagguu

SEQ ID NO: 168614 - RNA, 22 nt, Human
aucuuccuucacuuucucccac

SEQ ID NO: 168615 - RNA, 22 nt, Human
uagcuuuaccauagaagaguau

SEQ ID NO: 168616 - RNA, 22 nt, Human
gccugcagggccugggccuacc

SEQ ID NO: 168617 - RNA, 18 nt, Human
gcuuuauuucuuggggaa

SEQ ID NO: 168618 - RNA, 20 nt, Human
ucuguucaaaucuuaguucc

SEQ ID NO: 168619 - RNA, 22 nt, Human
uauaagaaacaaggcaaauuuu

SEQ ID NO: 168620 - RNA, 22 nt, Human
uagaacacuugaccacugcucc

SEQ ID NO: 168621 - RNA, 21 nt, Human
auuuccaaauaaggucacauu

SEQ ID NO: 168622 - RNA, 22 nt, Human
ucuaugaaaagucuauucauuc

SEQ ID NO: 168623 - RNA, 22 nt, Human
auggagggugguaagacagaga

SEQ ID NO: 168624 - RNA, 22 nt, Human
cagagccucagaauccugugga

SEQ ID NO: 168625 - RNA, 22 nt, Human
agcagggcaugaauaaggguuu

SEQ ID NO: 168626 - RNA, 22 nt, Human
agacagacuuugaucuggaugu

SEQ ID NO: 168627 - RNA, 22 nt, Human
agacuucuuugugagcauuuuc

SEQ ID NO: 168628 - RNA, 22 nt, Human
auuaaaauuccaagguaugcca

SEQ ID NO: 168629 - RNA, 20 nt, Human
ugcagggccuaaaaagggaa

SEQ ID NO: 168630 - RNA, 22 nt, Human
auuguaaauagugccacaauaa

SEQ ID NO: 168631 - RNA, 22 nt, Human
acagagagguaaaauauauagu

SEQ ID NO: 168632 - RNA, 22 nt, Human
uuuaaaaaacuagucugagucu

SEQ ID NO: 168633 - RNA, 22 nt, Human
cagagcauugagggucugccaa

SEQ ID NO: 168634 - RNA, 22 nt, Human
uuagcuuucagccuuucucacc

SEQ ID NO: 168635 - RNA, 22 nt, Human
uggucugggcaaauccuucuga

SEQ ID NO: 168636 - RNA, 22 nt, Human
agaggugggagccuggucacau

SEQ ID NO: 168637 - RNA, 22 nt, Human
ugcuuucuuuagcuccugaguc

SEQ ID NO: 168638 - RNA, 22 nt, Human
caucagaacgugagcuccuugu

SEQ ID NO: 168639 - RNA, 20 nt, Human
cccagagccauagccagaca

SEQ ID NO: 168640 - RNA, 22 nt, Human
uuggaggauugcucucagccca

SEQ ID NO: 168641 - RNA, 22 nt, Human
auugcugggaggauguguguuc

SEQ ID NO: 168642 - RNA, 22 nt, Human
guauuagggccaaaggcaggaa

SEQ ID NO: 168643 - RNA, 22 nt, Human
cagggacccuacuagcucacac

SEQ ID NO: 168644 - RNA, 22 nt, Human
aagggagacaguugugugagga

SEQ ID NO: 168645 - RNA, 23 nt, Human
ugcuggcuuuuaucuggucccua

SEQ ID NO: 168646 - RNA, 22 nt, Human
aaggcucccucuucucgagugu

SEQ ID NO: 168647 - RNA, 22 nt, Human
caaguccuuagaugguucuuug

SEQ ID NO: 168648 - RNA, 22 nt, Human
uuuacaguuaagaaauguuacc

SEQ ID NO: 168649 - RNA, 22 nt, Human
guaaaauucuagcaucugaaag

SEQ ID NO: 168650 - RNA, 22 nt, Human
agcagggcugcagugugucuuu

SEQ ID NO: 168651 - RNA, 22 nt, Human
auuugaagucuucaugauuucu

SEQ ID NO: 168652 - RNA, 22 nt, Human
gaugugucccuuucaacucaga

SEQ ID NO: 168653 - RNA, 22 nt, Human
uuucagaaccgcuaaaauaaau

SEQ ID NO: 168654 - RNA, 22 nt, Human
gugaauaagaccuaaggaugaa

SEQ ID NO: 168655 - RNA, 22 nt, Human
uccaggcauuggagagauaaug

SEQ ID NO: 168656 - RNA, 22 nt, Human
ggguaccaagcugcuugggggc

SEQ ID NO: 168657 - RNA, 22 nt, Human
uaauacuuuugccuuguauuca

SEQ ID NO: 168658 - RNA, 22 nt, Human
uuaauuaugcaaaaggccccau

SEQ ID NO: 168659 - RNA, 22 nt, Human
ugcuguggcaguuuauguauag

SEQ ID NO: 168660 - RNA, 22 nt, Human
ccuguucaaugcccuggcuuca

SEQ ID NO: 168661 - RNA, 22 nt, Human
uaacagaaauuuuaguuagggg

SEQ ID NO: 168662 - RNA, 22 nt, Human
ugacagguucguuagucauguu

SEQ ID NO: 168663 - RNA, 22 nt, Human
cuaaagcucaacaggcacuauu

SEQ ID NO: 168664 - RNA, 22 nt, Human
ccugggugcccggcccuucucu

SEQ ID NO: 168665 - RNA, 22 nt, Human
uacaagucacuuccuuucuaaa

SEQ ID NO: 168666 - RNA, 22 nt, Human
gguguccugggcaggcagcuga

SEQ ID NO: 168667 - RNA, 22 nt, Human
gggacaugaagcaucggaggca

SEQ ID NO: 168668 - RNA, 22 nt, Human
agagggaucacccuguuucugg

SEQ ID NO: 168669 - RNA, 22 nt, Human
ugucuucaucucagacacaguu

SEQ ID NO: 168670 - RNA, 22 nt, Human
agaagcuuccuacauuguucuu

SEQ ID NO: 168671 - RNA, 22 nt, Human
aggggauggagcuggaaggcag

SEQ ID NO: 168672 - RNA, 21 nt, Human
agucccauccgguaagcaagc

SEQ ID NO: 168673 - RNA, 22 nt, Human
cuuuucauuguuuguacaugca

SEQ ID NO: 168674 - RNA, 17 nt, Human
gcuccuucuaacuucca

SEQ ID NO: 168675 - RNA, 22 nt, Human
ucucaagcuaguguuuauagua

SEQ ID NO: 168676 - RNA, 22 nt, Human
accucaaggaaaaucuagacag

SEQ ID NO: 168677 - RNA, 22 nt, Human
guaggcagggcuguggggagaa

SEQ ID NO: 168678 - RNA, 22 nt, Human
cuuaggcagacugcugaugcag

SEQ ID NO: 168679 - RNA, 22 nt, Human
uguccuuuuggcugucuauggu

SEQ ID NO: 168680 - RNA, 18 nt, Human
agacccucuaagggcagu

SEQ ID NO: 168681 - RNA, 22 nt, Human
uuucugcagcagacucagugug

SEQ ID NO: 168682 - RNA, 22 nt, Human
gguuucaacuaaaucaagaagg

SEQ ID NO: 168683 - RNA, 22 nt, Human
uccaugaggaccaaauucguag

SEQ ID NO: 168684 - RNA, 22 nt, Human
agcagggcaguuaaaggguccu

SEQ ID NO: 168685 - RNA, 22 nt, Human
aaggugucauuguuuauggaga

SEQ ID NO: 168686 - RNA, 22 nt, Human
ggcugaggcucaugccaucuug

SEQ ID NO: 168687 - RNA, 22 nt, Human
uuuccaaaguugccauaagcuu

SEQ ID NO: 168688 - RNA, 17 nt, Human
auuuacauugucaccga

SEQ ID NO: 168689 - RNA, 22 nt, Human
aacaugcuuugauaaauaaaag

SEQ ID NO: 168690 - RNA, 22 nt, Human
acaugauuaaaagauuuuaaag

SEQ ID NO: 168691 - RNA, 19 nt, Human
gaggugucuuuccugagua

SEQ ID NO: 168692 - RNA, 22 nt, Human
aggagcugauaaaaggggguca

SEQ ID NO: 168693 - RNA, 22 nt, Human
uauuucagcccuacuacuuggc

SEQ ID NO: 168694 - RNA, 22 nt, Human
ugaaacaaauuuggaaaaucua

SEQ ID NO: 168695 - RNA, 22 nt, Human
aaaacaguuuaggcaucacagu

SEQ ID NO: 168696 - RNA, 22 nt, Human
auuccaaacgccucgcggacuu

SEQ ID NO: 168697 - RNA, 19 nt, Human
ggacagacgcagagaucug

SEQ ID NO: 168698 - RNA, 22 nt, Human
cuggauguuuugcuaaggacuc

SEQ ID NO: 168699 - RNA, 22 nt, Human
ggcaggcagauggcugcaccaa

SEQ ID NO: 168700 - RNA, 22 nt, Human
ugacaugugcucaucuuggcua

SEQ ID NO: 168701 - RNA, 22 nt, Human
auucagcaaacauuuauuaucu

SEQ ID NO: 168702 - RNA, 22 nt, Human
cuggaguuagaguagacacuga

SEQ ID NO: 168703 - RNA, 22 nt, Human
uugcuuuacauguucugguaaa

SEQ ID NO: 168704 - RNA, 22 nt, Human
gagggcaggggucuugcacggu

SEQ ID NO: 168705 - RNA, 22 nt, Human
uggguacuccuauuaguucagu

SEQ ID NO: 168706 - RNA, 22 nt, Human
cuuagggagaaugccucugcag

SEQ ID NO: 168707 - RNA, 22 nt, Human
cccagugucuccaacaucagau

SEQ ID NO: 168708 - RNA, 22 nt, Human
uaagaaucaguagauauagauu

SEQ ID NO: 168709 - RNA, 22 nt, Human
ggcagaggaagcuggaaguggg

SEQ ID NO: 168710 - RNA, 22 nt, Human
agcuuuaugaggagaccuuagu

SEQ ID NO: 168711 - RNA, 22 nt, Human
guaaacaucgacccaacagggg

SEQ ID NO: 168712 - RNA, 22 nt, Human
cuguguccucccgcugcaccca

SEQ ID NO: 168713 - RNA, 22 nt, Human
uaucagaagacuuacaguaucg

SEQ ID NO: 168714 - RNA, 22 nt, Human
uucuaucauacuugaauacauu

SEQ ID NO: 168715 - RNA, 22 nt, Human
gauuuuauauggcauacugugg

SEQ ID NO: 168716 - RNA, 22 nt, Human
gcaugugugucacuuuccugcc

SEQ ID NO: 168717 - RNA, 22 nt, Human
ucauuuguugaacuuuagugcg

SEQ ID NO: 168718 - RNA, 22 nt, Human
uggaggaaguggacaguugugu

SEQ ID NO: 168719 - RNA, 22 nt, Human
uuccuuagcugucccuggaaau

SEQ ID NO: 168720 - RNA, 22 nt, Human
cccugcaggcucagacuggagu

SEQ ID NO: 168721 - RNA, 18 nt, Human
uagggcucuagggaguga

SEQ ID NO: 168722 - RNA, 22 nt, Human
agcucccaauugacuugaacua

SEQ ID NO: 168723 - RNA, 22 nt, Human
aucuuuauuuauugagcacuua

SEQ ID NO: 168724 - RNA, 22 nt, Human
uugaaauaucaaguuauuagug

SEQ ID NO: 168725 - RNA, 22 nt, Human
aacuauguuaauaaguuucauu

SEQ ID NO: 168726 - RNA, 22 nt, Human
cuucuucaauagcaagcgcaua

SEQ ID NO: 168727 - RNA, 22 nt, Human
aacauuguuuucccuauaucca

SEQ ID NO: 168728 - RNA, 22 nt, Human
aucacaaaggcugcuucaugau

SEQ ID NO: 168729 - RNA, 21 nt, Human
cuguggaagggaacuagaggg

SEQ ID NO: 168730 - RNA, 22 nt, Human
cuuagggaaucuuagagcugga

SEQ ID NO: 168731 - RNA, 22 nt, Human
uucuaaaaccaauucugcuucu

SEQ ID NO: 168732 - RNA, 22 nt, Human
auggaguucuuuaaauucacag

SEQ ID NO: 168733 - RNA, 22 nt, Human
gauguguccccagaggauugaa

SEQ ID NO: 168734 - RNA, 23 nt, Human
ucuauacauacugcagccucugg

SEQ ID NO: 168735 - RNA, 22 nt, Human
ugcuggaggccagaagucugag

SEQ ID NO: 168736 - RNA, 22 nt, Human
ggcaaaguuuucaucucauaac

SEQ ID NO: 168737 - RNA, 22 nt, Human
auuauuagugauguuguuacug

SEQ ID NO: 168738 - RNA, 22 nt, Human
gucaacuuuaagaugaucuuuu

SEQ ID NO: 168739 - RNA, 22 nt, Human
guuuccaaccccaccaaagugc

SEQ ID NO: 168740 - RNA, 20 nt, Human
cuucuucaguaguuuguucu

SEQ ID NO: 168741 - RNA, 22 nt, Human
ucagccagcaucagcuaagugc

SEQ ID NO: 168742 - RNA, 22 nt, Human
cuggaggagagucugaaugaca

SEQ ID NO: 168743 - RNA, 22 nt, Human
guccaugauucuguguaguaga

SEQ ID NO: 168744 - RNA, 22 nt, Human
uuucuucagagagagcuuuccc

SEQ ID NO: 168745 - RNA, 22 nt, Human
cuguuauuuuccucugaacucu

SEQ ID NO: 168746 - RNA, 22 nt, Human
agcccccucccuagugacugga

SEQ ID NO: 168747 - RNA, 22 nt, Human
cuauuagguaugugguugcuau

SEQ ID NO: 168748 - RNA, 22 nt, Human
ucuggguggugucuuccaagac

SEQ ID NO: 168749 - RNA, 22 nt, Human
uucuucagacuacugaugauug

SEQ ID NO: 168750 - RNA, 22 nt, Human
auuuacagaagcauguaauagc

SEQ ID NO: 168751 - RNA, 22 nt, Human
gaauuucaaaagccagaacggg

SEQ ID NO: 168752 - RNA, 22 nt, Human
caguccuuucaauggugaccuu

SEQ ID NO: 168753 - RNA, 22 nt, Human
auaauucaugggccuuucaccu

SEQ ID NO: 168754 - RNA, 22 nt, Human
acagaguucccacuccagaagc

SEQ ID NO: 168755 - RNA, 22 nt, Human
ggcugcaaaggaaaagugguga

SEQ ID NO: 168756 - RNA, 22 nt, Human
auuuccauguccaaaaauuagu

SEQ ID NO: 168757 - RNA, 22 nt, Human
auucuucagcaggggacacuau

SEQ ID NO: 168758 - RNA, 22 nt, Human
caaguccuaggucugauugaac

SEQ ID NO: 168759 - RNA, 22 nt, Human
cccagggaagggcuaccugagg

SEQ ID NO: 168760 - RNA, 22 nt, Human
uuuucauuuuuguagaugcaag

SEQ ID NO: 168761 - RNA, 22 nt, Human
auuccaaaaggauguuagaaug

SEQ ID NO: 168762 - RNA, 20 nt, Human
aauaaacuacugagagaugu

SEQ ID NO: 168763 - RNA, 22 nt, Human
caauagugucugcuuguuucua

SEQ ID NO: 168764 - RNA, 22 nt, Human
gcuuucuugguucugcaggggc

SEQ ID NO: 168765 - RNA, 20 nt, Human
agcaggugacggggccugcu

SEQ ID NO: 168766 - RNA, 22 nt, Human
gcugccacuuggucaugucaug

SEQ ID NO: 168767 - RNA, 21 nt, Human
uucauaaaccauucucaugca

SEQ ID NO: 168768 - RNA, 22 nt, Human
caguggugaagagcaggggcuc

SEQ ID NO: 168769 - RNA, 22 nt, Human
guuuacaugcagaaaaucaaug

SEQ ID NO: 168770 - RNA, 22 nt, Human
uagaagcaguaauagaaauagg

SEQ ID NO: 168771 - RNA, 22 nt, Human
gccuggguccacugaucaugcu

SEQ ID NO: 168772 - RNA, 22 nt, Human
cugauuccagagucuguguucu

SEQ ID NO: 168773 - RNA, 22 nt, Human
aaaucagucccucuuggaauuu

SEQ ID NO: 168774 - RNA, 22 nt, Human
cagaagagaugaaauaguauua

SEQ ID NO: 168775 - RNA, 20 nt, Human
ccagcuuucccugcagcauc

SEQ ID NO: 168776 - RNA, 22 nt, Human
uucagaaaggauaauuggaagg

SEQ ID NO: 168777 - RNA, 22 nt, Human
agguauauauucugguccuuau

SEQ ID NO: 168778 - RNA, 22 nt, Human
uuugcuuaaaguucuuucuggu

SEQ ID NO: 168779 - RNA, 22 nt, Human
uuagggacagcucuguagguga

SEQ ID NO: 168780 - RNA, 22 nt, Human
guguguccucaguaguggcaug

SEQ ID NO: 168781 - RNA, 22 nt, Human
ccagguggacuugauuugaaua

SEQ ID NO: 168782 - RNA, 17 nt, Human
uuuagaauacaauguuu

SEQ ID NO: 168783 - RNA, 22 nt, Human
acaagcaugggcuuugacauca

SEQ ID NO: 168784 - RNA, 22 nt, Human
aauuugcaugaugagaacaaua

SEQ ID NO: 168785 - RNA, 19 nt, Human
agugugagacuccaucuca

SEQ ID NO: 168786 - RNA, 22 nt, Human
aucacaaaggucucagagcaca

SEQ ID NO: 168787 - RNA, 22 nt, Human
gcacccaggccggcgacugcag

SEQ ID NO: 168788 - RNA, 22 nt, Human
uucugugaaucuuuuuucccac

SEQ ID NO: 168789 - RNA, 22 nt, Human
acauguguacauauauaugugc

SEQ ID NO: 168790 - RNA, 18 nt, Human
gguccugggccuggcuca

SEQ ID NO: 168791 - RNA, 21 nt, Human
uagggcucucugugucaggug

SEQ ID NO: 168792 - RNA, 22 nt, Human
cuccuucugaggcucuggguuc

SEQ ID NO: 168793 - RNA, 22 nt, Human
aacuuugaggucacugaauucc

SEQ ID NO: 168794 - RNA, 22 nt, Human
uacuagaaccucacaacaaucc

SEQ ID NO: 168795 - RNA, 22 nt, Human
caaggcauuguguaagcacuug

SEQ ID NO: 168796 - RNA, 22 nt, Human
uggacaugagcugagugggugu

SEQ ID NO: 168797 - RNA, 22 nt, Human
ugucaccaguuccaggaaauaa

SEQ ID NO: 168798 - RNA, 22 nt, Human
gagagaaaugugcaguuugggc

SEQ ID NO: 168799 - RNA, 22 nt, Human
cuuauacacccucuucccaggc

SEQ ID NO: 168800 - RNA, 22 nt, Human
uuuccuaagguagugauaauuu

SEQ ID NO: 168801 - RNA, 22 nt, Human
agcagggcccacuaggggagau

SEQ ID NO: 168802 - RNA, 22 nt, Human
cuucucccuggcuucugcacac

SEQ ID NO: 168803 - RNA, 22 nt, Human
acauguguggccgcuguagaca

SEQ ID NO: 168804 - RNA, 22 nt, Human
uaagaaucuauuaggaauaugu

SEQ ID NO: 168805 - RNA, 22 nt, Human
aaggaccuauauugucagagga

SEQ ID NO: 168806 - RNA, 22 nt, Human
uuuaggcaagaacucacugaga

SEQ ID NO: 168807 - RNA, 22 nt, Human
agaugguccaugcacagauaug

SEQ ID NO: 168808 - RNA, 22 nt, Human
gggacauggcuaggauuccaau

SEQ ID NO: 168809 - RNA, 19 nt, Human
ugacagagagcaggguggu

SEQ ID NO: 168810 - RNA, 22 nt, Human
cuucagaauccagaaucagaau

SEQ ID NO: 168811 - RNA, 22 nt, Human
ggaugucugucauuaugcuuuc

SEQ ID NO: 168812 - RNA, 22 nt, Human
uuagaaauauggugcugccgcc

SEQ ID NO: 168813 - RNA, 22 nt, Human
auacagaagccuguauuucugg

SEQ ID NO: 168814 - RNA, 22 nt, Human
uaauauguguuacugacuuuuu

SEQ ID NO: 168815 - RNA, 22 nt, Human
ccuuuucuggccaccaagcgcu

SEQ ID NO: 168816 - RNA, 22 nt, Human
cuagggacugggaccuuaguua

SEQ ID NO: 168817 - RNA, 22 nt, Human
uaucagaaugcagccaugugca

SEQ ID NO: 168818 - RNA, 21 nt, Human
gccugcagaccccaccaggcu

SEQ ID NO: 168819 - RNA, 22 nt, Human
ccagugcauaaucaauacagcc

SEQ ID NO: 168820 - RNA, 22 nt, Human
cccaggcacagauuaucccaau

SEQ ID NO: 168821 - RNA, 22 nt, Human
ccauuguaaagaguauacuuug

SEQ ID NO: 168822 - RNA, 22 nt, Human
aauguuuucucugugaacacau

SEQ ID NO: 168823 - RNA, 22 nt, Human
ugccuacauuccuugcuuaugg

SEQ ID NO: 168824 - RNA, 22 nt, Human
augguuuuucaaguauucagaa

SEQ ID NO: 168825 - RNA, 22 nt, Human
auuuccuguugcuuuugccacu

SEQ ID NO: 168826 - RNA, 22 nt, Human
uaaauuuacccaaggaacaugu

SEQ ID NO: 168827 - RNA, 22 nt, Human
auauaaguuaguggucauguuu

SEQ ID NO: 168828 - RNA, 22 nt, Human
agccuuguuggucugaguuugg

SEQ ID NO: 168829 - RNA, 23 nt, Human
gguuccaggaacacagccugaug

SEQ ID NO: 168830 - RNA, 22 nt, Human
uuucaaaguugggaauuguaau

SEQ ID NO: 168831 - RNA, 22 nt, Human
ccaggugugguggcauacaccu

SEQ ID NO: 168832 - RNA, 22 nt, Human
agccagagaguguuggagaugu

SEQ ID NO: 168833 - RNA, 16 nt, Human
uuuuauugugacagcc

SEQ ID NO: 168834 - RNA, 22 nt, Human
uucuauacaaagauuucucaca

SEQ ID NO: 168835 - RNA, 22 nt, Human
uuuacauguaauguuauacaaa

SEQ ID NO: 168836 - RNA, 22 nt, Human
ccacugaggcaggcaguaucua

SEQ ID NO: 168837 - RNA, 19 nt, Human
uacauacuuauucuaaaag

SEQ ID NO: 168838 - RNA, 22 nt, Human
caggaugggauguagugggccc

SEQ ID NO: 168839 - RNA, 22 nt, Human
cgcagggccgcgagcgggacca

SEQ ID NO: 168840 - RNA, 18 nt, Human
ccauguguuccuuuuggg

SEQ ID NO: 168841 - RNA, 22 nt, Human
guuucauacagauuauucaugg

SEQ ID NO: 168842 - RNA, 22 nt, Human
cagggcucccuugcaaggaggg

SEQ ID NO: 168843 - RNA, 22 nt, Human
cagcuguccuuccuggugggcg

SEQ ID NO: 168844 - RNA, 22 nt, Human
gcaugugucuccccaguggagg

SEQ ID NO: 168845 - RNA, 22 nt, Human
cuggcuugcagcucaucauaaa

SEQ ID NO: 168846 - RNA, 22 nt, Human
uuucacuagaacguucuuguuu

SEQ ID NO: 168847 - RNA, 22 nt, Human
aagggcaggcacccacccucac

SEQ ID NO: 168848 - RNA, 22 nt, Human
aaggugucucucugcuucuugg

SEQ ID NO: 168849 - RNA, 22 nt, Human
aaaaucugcuuccuuuuacaga

SEQ ID NO: 168850 - RNA, 22 nt, Human
cccaggcagugugugcaugcgu

SEQ ID NO: 168851 - RNA, 22 nt, Human
agguaaaauagauaguauuucu

SEQ ID NO: 168852 - RNA, 22 nt, Human
uugggugguggggagaguucag

SEQ ID NO: 168853 - RNA, 22 nt, Human
uuuauugucuucguggugccua

SEQ ID NO: 168854 - RNA, 22 nt, Human
auuucccaugugaaucaauugg

SEQ ID NO: 168855 - RNA, 20 nt, Human
ucccaggcugggcuccagcu

SEQ ID NO: 168856 - RNA, 22 nt, Human
uuauuccagcuaagaguccugg

SEQ ID NO: 168857 - RNA, 22 nt, Human
ugcacaaacuugugucccaggg

SEQ ID NO: 168858 - RNA, 22 nt, Human
uugcuuuagguauagaauccau

SEQ ID NO: 168859 - RNA, 22 nt, Human
uuccauaauaggcuuaagugaa

SEQ ID NO: 168860 - RNA, 22 nt, Human
uuccuucuuccagaggcugccc

SEQ ID NO: 168861 - RNA, 22 nt, Human
caauuucagugcuguggagagg

SEQ ID NO: 168862 - RNA, 22 nt, Human
gacccuguuucuacaaauaauu

SEQ ID NO: 168863 - RNA, 22 nt, Human
ggcaguggaggacccugugucu

SEQ ID NO: 168864 - RNA, 22 nt, Human
cuauuagguuggugcaaaagua

SEQ ID NO: 168865 - RNA, 22 nt, Human
gggcugacaguuuccccugaaa

SEQ ID NO: 168866 - RNA, 22 nt, Human
acauaauagcauuucuaauuug

SEQ ID NO: 168867 - RNA, 19 nt, Human
uccugcagguggcuugcag

SEQ ID NO: 168868 - RNA, 19 nt, Human
gguguccuagagauaagag

SEQ ID NO: 168869 - RNA, 22 nt, Human
gcagcuuucuacuuccuacagc

SEQ ID NO: 168870 - RNA, 22 nt, Human
agcauuuagucuuuauugcagc

SEQ ID NO: 168871 - RNA, 22 nt, Human
uacaaaaguaauuacgguuuuu

SEQ ID NO: 168872 - RNA, 22 nt, Human
auuauaugugggauagaauuua

SEQ ID NO: 168873 - RNA, 23 nt, Human
uuucuucagaagccuugcgaggc

SEQ ID NO: 168874 - RNA, 22 nt, Human
cacaugaugguggaagccauag

SEQ ID NO: 168875 - RNA, 22 nt, Human
augaaacaugcuuuguggauga

SEQ ID NO: 168876 - RNA, 22 nt, Human
agucaccagguuuuagagaccu

SEQ ID NO: 168877 - RNA, 22 nt, Human
ccagacccugcucuggggcucu

SEQ ID NO: 168878 - RNA, 19 nt, Human
uuugaauccagcugguaac

SEQ ID NO: 168879 - RNA, 22 nt, Human
agugauuugggugucagaaagu

SEQ ID NO: 168880 - RNA, 22 nt, Human
gcuuuaaugcaauuucaccuca

SEQ ID NO: 168881 - RNA, 22 nt, Human
guucuucaucauuuuagauagg

SEQ ID NO: 168882 - RNA, 22 nt, Human
uccugcagucugcacucugccu

SEQ ID NO: 168883 - RNA, 20 nt, Human
ucuaauuaaaauugucuagu

SEQ ID NO: 168884 - RNA, 22 nt, Human
gaguccuuggcaucaucaguac

SEQ ID NO: 168885 - RNA, 22 nt, Human
uuguguccucuaaucucaccac

SEQ ID NO: 168886 - RNA, 22 nt, Human
guuaauuuaguagaguccagau

SEQ ID NO: 168887 - RNA, 22 nt, Human
aauguuaauuuacugucuucau

SEQ ID NO: 168888 - RNA, 22 nt, Human
aaagugguuuaugauauuccaa

SEQ ID NO: 168889 - RNA, 22 nt, Human
auggaaugugaacaugauggca

SEQ ID NO: 168890 - RNA, 22 nt, Human
auauacugauagcugcacuucu

SEQ ID NO: 168891 - RNA, 22 nt, Human
cagaugaacuaggcugcacuug

SEQ ID NO: 168892 - RNA, 22 nt, Human
ugucagaggcucagggucucag

SEQ ID NO: 168893 - RNA, 22 nt, Human
auuucauugaaguuaauucuuc

SEQ ID NO: 168894 - RNA, 22 nt, Human
caucagaaagaguccuggacuu

SEQ ID NO: 168895 - RNA, 22 nt, Human
gcagggacaacugugcaccuga

SEQ ID NO: 168896 - RNA, 22 nt, Human
uugaaucuggguacuuguaaua

SEQ ID NO: 168897 - RNA, 22 nt, Human
acuucuaugcacagagcuugga

SEQ ID NO: 168898 - RNA, 22 nt, Human
uaugcccagcuuaaaguacaca

SEQ ID NO: 168899 - RNA, 22 nt, Human
uauuccuaagucccaacuacau

SEQ ID NO: 168900 - RNA, 22 nt, Human
ucagccaggccaggcauucaca

SEQ ID NO: 168901 - RNA, 22 nt, Human
aaaucucaggccucuauuuacu

SEQ ID NO: 168902 - RNA, 22 nt, Human
aauuucagaacccaaauuagcg

SEQ ID NO: 168903 - RNA, 22 nt, Human
ggcaggugcgcauguugcauua

SEQ ID NO: 168904 - RNA, 22 nt, Human
uguguccucaugagguuugcag

SEQ ID NO: 168905 - RNA, 22 nt, Human
aauauuuguuaguguuuuaaug

SEQ ID NO: 168906 - RNA, 22 nt, Human
ucacaugaguauuauuuuccaa

SEQ ID NO: 168907 - RNA, 23 nt, Human
uaauacugcuucagaggcuuaga

SEQ ID NO: 168908 - RNA, 22 nt, Human
gucugcccuuccucuccacgau

SEQ ID NO: 168909 - RNA, 22 nt, Human
uauugcugaugcugaagggaag

SEQ ID NO: 168910 - RNA, 22 nt, Human
agaugguugucgcaaaugaaug

SEQ ID NO: 168911 - RNA, 21 nt, Human
ugacccuucuagcagaacaca

SEQ ID NO: 168912 - RNA, 22 nt, Human
cacugaaauauuaauaucuuau

SEQ ID NO: 168913 - RNA, 22 nt, Human
caguuaaaagguaugcuaccaa

SEQ ID NO: 168914 - RNA, 22 nt, Human
uuuacucuugcuacacaacugu

SEQ ID NO: 168915 - RNA, 20 nt, Human
ucuuauugucuugaggaguu

SEQ ID NO: 168916 - RNA, 22 nt, Human
auggauuuggaugagauuacuu

SEQ ID NO: 168917 - RNA, 22 nt, Human
uucuuaacuggaaaaugucaga

SEQ ID NO: 168918 - RNA, 22 nt, Human
auguucuuucagccagugcauc

SEQ ID NO: 168919 - RNA, 22 nt, Human
cugggugugggucaagcaacca

SEQ ID NO: 168920 - RNA, 19 nt, Human
uccaggaggcugccauuga

SEQ ID NO: 168921 - RNA, 22 nt, Human
gcaacuuuagggccagcaagua

SEQ ID NO: 168922 - RNA, 22 nt, Human
uguccuggagugcuugggggaa

SEQ ID NO: 168923 - RNA, 22 nt, Human
agcaggugcguuacuucacucu

SEQ ID NO: 168924 - RNA, 22 nt, Human
auugcuaggaacagguugcacc

SEQ ID NO: 168925 - RNA, 20 nt, Human
agcuucuucugucuaauuuu

SEQ ID NO: 168926 - RNA, 22 nt, Human
gcagcuuucugggacagaaagg

SEQ ID NO: 168927 - RNA, 20 nt, Human
auucuacaagaauaagcaug

SEQ ID NO: 168928 - RNA, 22 nt, Human
cuguccagucuuuagcaagcug

SEQ ID NO: 168929 - RNA, 22 nt, Human
agggcuccuaugaugcucugcc

SEQ ID NO: 168930 - RNA, 21 nt, Human
uucuucaguuuaauauaaaau

SEQ ID NO: 168931 - RNA, 22 nt, Human
augguuuacaauguuuucaguu

SEQ ID NO: 168932 - RNA, 22 nt, Human
ucagggcauacucuucaagguc

SEQ ID NO: 168933 - RNA, 22 nt, Human
ccuguucacccuccaugcacag

SEQ ID NO: 168934 - RNA, 22 nt, Human
augugcuuuauuaaguaaaaau

SEQ ID NO: 168935 - RNA, 22 nt, Human
uacagcuaggcaaaaaugacau

SEQ ID NO: 168936 - RNA, 20 nt, Human
uuccaacucacaucucuaca

SEQ ID NO: 168937 - RNA, 22 nt, Human
aggcagggugaugauaaugauu

SEQ ID NO: 168938 - RNA, 23 nt, Human
ccacagagcugccaauuccugug

SEQ ID NO: 168939 - RNA, 22 nt, Human
ccuguucaagguauuaauuauc

SEQ ID NO: 168940 - RNA, 23 nt, Human
cuuucauugugguuucacagagc

SEQ ID NO: 168941 - RNA, 22 nt, Human
gcaugugucaucugccuuucgu

SEQ ID NO: 168942 - RNA, 22 nt, Human
auuaggcagacaacguagccgg

SEQ ID NO: 168943 - RNA, 20 nt, Human
ucagacagucgcaguucugg

SEQ ID NO: 168944 - RNA, 22 nt, Human
agcagggcuuuggcuggcuuuc

SEQ ID NO: 168945 - RNA, 22 nt, Human
ucuguucaugucuuuuuaagug

SEQ ID NO: 168946 - RNA, 22 nt, Human
ugaauaauccacagucauucau

SEQ ID NO: 168947 - RNA, 22 nt, Human
uauguguccuguuaccggcagc

SEQ ID NO: 168948 - RNA, 22 nt, Human
ucccugaaacauaauagaugcc

SEQ ID NO: 168949 - RNA, 22 nt, Human
cccugcagacgucuugaugccu

SEQ ID NO: 168950 - RNA, 22 nt, Human
uaaugucuaugggccagauaau

SEQ ID NO: 168951 - RNA, 22 nt, Human
ccccaggcagggccuaacagag

SEQ ID NO: 168952 - RNA, 22 nt, Human
uuaaaauuauggcccauuugga

SEQ ID NO: 168953 - RNA, 22 nt, Human
ggcaaagagacaugcaucgggg

SEQ ID NO: 168954 - RNA, 22 nt, Human
cucuuaaagaauguuccagcug

SEQ ID NO: 168955 - RNA, 22 nt, Human
cuuauaaaguccaucugaacaa

SEQ ID NO: 168956 - RNA, 22 nt, Human
ggcauuuauuugucucauucuu

SEQ ID NO: 168957 - RNA, 22 nt, Human
ucuggaggcaggcugccaggau

SEQ ID NO: 168958 - RNA, 22 nt, Human
ugaaugaacuaaaucauaguuc

SEQ ID NO: 168959 - RNA, 22 nt, Human
uuuuccagauuggacuuagucc

SEQ ID NO: 168960 - RNA, 22 nt, Human
cuuucacagcacaagccugccu

SEQ ID NO: 168961 - RNA, 17 nt, Human
cagugaggccuuuccuc

SEQ ID NO: 168962 - RNA, 22 nt, Human
auuucuuuucaagagggugcuu

SEQ ID NO: 168963 - RNA, 22 nt, Human
acagauuuguucuuuugggcua

SEQ ID NO: 168964 - RNA, 22 nt, Human
uauuucagucacuucuucucug

SEQ ID NO: 168965 - RNA, 22 nt, Human
ucagccaguugccccaguuagu

SEQ ID NO: 168966 - RNA, 22 nt, Human
auagauuauuugcucauuacuu

SEQ ID NO: 168967 - RNA, 18 nt, Human
ucucugaauauuuuaugu

SEQ ID NO: 168968 - RNA, 22 nt, Human
agacauguccacaaagcauuca

SEQ ID NO: 168969 - RNA, 22 nt, Human
cacagguguccaauaccugcuu

SEQ ID NO: 168970 - RNA, 22 nt, Human
cuggaaugccucccugucagag

SEQ ID NO: 168971 - RNA, 22 nt, Human
agugugucugaucacuugugag

SEQ ID NO: 168972 - RNA, 22 nt, Human
gcaggugggagccgcugccuga

SEQ ID NO: 168973 - RNA, 22 nt, Human
uguccucaggaccuggcacagu

SEQ ID NO: 168974 - RNA, 22 nt, Human
uaguucuagccagugaaaugua

SEQ ID NO: 168975 - RNA, 22 nt, Human
uuacagaaaagggguuguccuu

SEQ ID NO: 168976 - RNA, 22 nt, Human
uaauuucacugauaugaaguca

SEQ ID NO: 168977 - RNA, 19 nt, Human
uuccaaaaucaggauuuga

SEQ ID NO: 168978 - RNA, 22 nt, Human
uuuauaugugaagguuugcaga

SEQ ID NO: 168979 - RNA, 17 nt, Human
acaggcagaucaccuga

SEQ ID NO: 168980 - RNA, 22 nt, Human
guguccaucucuguaugcugcu

SEQ ID NO: 168981 - RNA, 22 nt, Human
cuaugaaaugucagauucugca

SEQ ID NO: 168982 - RNA, 22 nt, Human
uagaaacauucaguugcagucc

SEQ ID NO: 168983 - RNA, 22 nt, Human
caguguuugcuuaaguuauaug

SEQ ID NO: 168984 - RNA, 22 nt, Human
cauuuaguuauacuaaaacauu

SEQ ID NO: 168985 - RNA, 22 nt, Human
aaaaucuaaguagcgaguaagg

SEQ ID NO: 168986 - RNA, 21 nt, Human
uagcuuuaauauucccacauu

SEQ ID NO: 168987 - RNA, 22 nt, Human
ucuggcucuccagugcucuuag

SEQ ID NO: 168988 - RNA, 22 nt, Human
agauuuaaauuugcuacaauuc

SEQ ID NO: 168989 - RNA, 22 nt, Human
aguuauaugugaaaacacguau

SEQ ID NO: 168990 - RNA, 21 nt, Human
ucucuccucaagcucgacccc

SEQ ID NO: 168991 - RNA, 22 nt, Human
uuucccagagguaugaauaagu

SEQ ID NO: 168992 - RNA, 22 nt, Human
uuugguccugagcaaaacuaug

SEQ ID NO: 168993 - RNA, 22 nt, Human
auuuacugagcagcuaccaugu

SEQ ID NO: 168994 - RNA, 18 nt, Human
ugcuuuaugcuuauauaa

SEQ ID NO: 168995 - RNA, 22 nt, Human
ucuggauccuaugcacuggacu

SEQ ID NO: 168996 - RNA, 18 nt, Human
ggcggguguuuuauucac

SEQ ID NO: 168997 - RNA, 22 nt, Human
gacauaaaauggaauucuguug

SEQ ID NO: 168998 - RNA, 22 nt, Human
augcuuaacuuccuagucuaua

SEQ ID NO: 168999 - RNA, 22 nt, Human
ggcagguguuuuuauauuaaag

SEQ ID NO: 169000 - RNA, 22 nt, Human
auuugcaugcuucuauugugaa

SEQ ID NO: 169001 - RNA, 22 nt, Human
guuaggcagugugguauagcag

SEQ ID NO: 169002 - RNA, 22 nt, Human
uucagagagaccaaguggcgug

SEQ ID NO: 169003 - RNA, 22 nt, Human
aguggcagagcaggugcuggaa

SEQ ID NO: 169004 - RNA, 22 nt, Human
uucaaauuaccacauuugcuua

SEQ ID NO: 169005 - RNA, 22 nt, Human
guuucacagucugcagaauuuu

SEQ ID NO: 169006 - RNA, 22 nt, Human
uuuucauuguuacuaugagcua

SEQ ID NO: 169007 - RNA, 22 nt, Human
uuuagggaugucagaacaggga

SEQ ID NO: 169008 - RNA, 22 nt, Human
aaggugguuugauuaucccacu

SEQ ID NO: 169009 - RNA, 22 nt, Human
auuaggcagugccauuguacgg

SEQ ID NO: 169010 - RNA, 22 nt, Human
cgcagguguguuuucaggacua

SEQ ID NO: 169011 - RNA, 22 nt, Human
uuauagaacagccuccucuaga

SEQ ID NO: 169012 - RNA, 22 nt, Human
uuccuucuuuuacaccauaaau

SEQ ID NO: 169013 - RNA, 22 nt, Human
guuuauuaacugucaagugauu

SEQ ID NO: 169014 - RNA, 23 nt, Human
agcugcaagacucccugucugag

SEQ ID NO: 169015 - RNA, 22 nt, Human
gcagggcagggcaagaacuggg

SEQ ID NO: 169016 - RNA, 20 nt, Human
uuccuuaggcauuggaagaa

SEQ ID NO: 169017 - RNA, 22 nt, Human
gcugggugucacggggcucgug

SEQ ID NO: 169018 - RNA, 22 nt, Human
ggcauuuaguuuucauauucug

SEQ ID NO: 169019 - RNA, 22 nt, Human
cucuucuugucucugguuagaa

SEQ ID NO: 169020 - RNA, 22 nt, Human
uuucauggcuaggacuagagug

SEQ ID NO: 169021 - RNA, 22 nt, Human
cuugcuggaaacucucucugcc

SEQ ID NO: 169022 - RNA, 22 nt, Human
gcagguguggaguggggugagc

SEQ ID NO: 169023 - RNA, 22 nt, Human
ucagcuuugccaccagcuguaa

SEQ ID NO: 169024 - RNA, 22 nt, Human
ucagggcacaggccuguggguu

SEQ ID NO: 169025 - RNA, 22 nt, Human
uagggcucgggcacaggacagg

SEQ ID NO: 169026 - RNA, 22 nt, Human
aguuaacucauuuuauaaugcc

SEQ ID NO: 169027 - RNA, 22 nt, Human
ucagccagaggcuucuugguuu

SEQ ID NO: 169028 - RNA, 22 nt, Human
uuguacaaaggauuuggaagag

SEQ ID NO: 169029 - RNA, 22 nt, Human
cugagggucaacuugauuguau

SEQ ID NO: 169030 - RNA, 22 nt, Human
aaagccagguugugugcaggaa

SEQ ID NO: 169031 - RNA, 22 nt, Human
uaaguccuauuccaggucucuc

SEQ ID NO: 169032 - RNA, 22 nt, Human
ugcuuaaaaugaugauuauuuu

SEQ ID NO: 169033 - RNA, 22 nt, Human
gguggggccagggcuccaaccu

SEQ ID NO: 169034 - RNA, 22 nt, Human
aggcagguuggugagaagacug

SEQ ID NO: 169035 - RNA, 22 nt, Human
auguccuugagacccuccucgg

SEQ ID NO: 169036 - RNA, 22 nt, Human
uacaacauuguguugcuucaua

SEQ ID NO: 169037 - RNA, 17 nt, Human
aauugcuuguacuccca

SEQ ID NO: 169038 - RNA, 22 nt, Human
acagcaggcacacaaggauaga

SEQ ID NO: 169039 - RNA, 22 nt, Human
aaauuucuggaagugucagagu

SEQ ID NO: 169040 - RNA, 22 nt, Human
uuuauugcuggccaccuguagc

SEQ ID NO: 169041 - RNA, 22 nt, Human
ucagggcaucucuuaaguggug

SEQ ID NO: 169042 - RNA, 22 nt, Human
uugcuuuaucucuuaugccuca

SEQ ID NO: 169043 - RNA, 22 nt, Human
uguagaaagcucuucugaaauc

SEQ ID NO: 169044 - RNA, 22 nt, Human
ugaaagaaacagguauauuggg

SEQ ID NO: 169045 - RNA, 23 nt, Human
aauaucaaggugauguucccaga

SEQ ID NO: 169046 - RNA, 22 nt, Human
uuuguuagagugugggaggcug

SEQ ID NO: 169047 - RNA, 22 nt, Human
uagaaauaaaucugcagcuggg

SEQ ID NO: 169048 - RNA, 22 nt, Human
caaugucaugauuuuccauuag

SEQ ID NO: 169049 - RNA, 21 nt, Human
agggaaaaggcugagugaggg

SEQ ID NO: 169050 - RNA, 22 nt, Human
gauuucaaccuaacaguaugac

SEQ ID NO: 169051 - RNA, 22 nt, Human
accaggcagagcugggccuuaa

SEQ ID NO: 169052 - RNA, 22 nt, Human
cuguaaaacacuguaguaucug

SEQ ID NO: 169053 - RNA, 22 nt, Human
uucugggugacucacgcucccc

SEQ ID NO: 169054 - RNA, 22 nt, Human
guacagaauuaugccaugaggg

SEQ ID NO: 169055 - RNA, 22 nt, Human
cuggcuuucuguuauaaagaca

SEQ ID NO: 169056 - RNA, 22 nt, Human
agaggcaugcacagaugugcug

SEQ ID NO: 169057 - RNA, 17 nt, Human
agacagaccucugcauc

SEQ ID NO: 169058 - RNA, 22 nt, Human
gcauguguuauuucucuguggg

SEQ ID NO: 169059 - RNA, 22 nt, Human
accuuuauaugaaagaugacau

SEQ ID NO: 169060 - RNA, 22 nt, Human
cuuuaguuugugauacgaagau

SEQ ID NO: 169061 - RNA, 22 nt, Human
uuacauguaaucuaaaauaauu

SEQ ID NO: 169062 - RNA, 21 nt, Human
agacaugugaacuaaagguga

SEQ ID NO: 169063 - RNA, 22 nt, Human
uuuacagaauguugaauuuggg

SEQ ID NO: 169064 - RNA, 22 nt, Human
cugcugcccuagacccaguccu

SEQ ID NO: 169065 - RNA, 22 nt, Human
caccugcaaggagcuuucauuu

SEQ ID NO: 169066 - RNA, 21 nt, Human
cauuagggcagaagcaggaag

SEQ ID NO: 169067 - RNA, 22 nt, Human
uuaacauuguccuuagcagauu

SEQ ID NO: 169068 - RNA, 22 nt, Human
ucuucaaaaaauauccaucagu

SEQ ID NO: 169069 - RNA, 17 nt, Human
aaaauucuguaaagagg

SEQ ID NO: 169070 - RNA, 22 nt, Human
aaauuucuaagcagccacuucc

SEQ ID NO: 169071 - RNA, 20 nt, Human
ugcugggugggcagcuguaa

SEQ ID NO: 169072 - RNA, 22 nt, Human
cacccagggcugugccugccca

SEQ ID NO: 169073 - RNA, 22 nt, Human
aauugcuuuugggggcaguuac

SEQ ID NO: 169074 - RNA, 21 nt, Human
uccuccuucaaguccuggccu

SEQ ID NO: 169075 - RNA, 20 nt, Human
gagcaguggaguuuccaggg

SEQ ID NO: 169076 - RNA, 22 nt, Human
uuuuuagaauuggcugagaauu

SEQ ID NO: 169077 - RNA, 20 nt, Human
uuacuugucucagcauggag

SEQ ID NO: 169078 - RNA, 22 nt, Human
uuuuuauaacucuuuugugaca

SEQ ID NO: 169079 - RNA, 22 nt, Human
uuucacauaugguuguugauug

SEQ ID NO: 169080 - RNA, 22 nt, Human
uggcuuaagcgcaacucugucu

SEQ ID NO: 169081 - RNA, 22 nt, Human
gugaauaaaacaccugccaaga

SEQ ID NO: 169082 - RNA, 22 nt, Human
auucauuuagguauucacuuac

SEQ ID NO: 169083 - RNA, 22 nt, Human
caggccuccacuccacgcagac

SEQ ID NO: 169084 - RNA, 18 nt, Human
agcagggcauuuugccau

SEQ ID NO: 169085 - RNA, 22 nt, Human
ucuaaacagccucuuaccaacu

SEQ ID NO: 169086 - RNA, 22 nt, Human
gcauguguaugguaggaauauu

SEQ ID NO: 169087 - RNA, 21 nt, Human
auucagaaagggaauaaacuc

SEQ ID NO: 169088 - RNA, 22 nt, Human
ggguauuaaaaugaaggagaaa

SEQ ID NO: 169089 - RNA, 22 nt, Human
aaauaaguaguuuaguguugug

SEQ ID NO: 169090 - RNA, 22 nt, Human
acuguucauccuuuuugaacaa

SEQ ID NO: 169091 - RNA, 22 nt, Human
ggugggcagcucuuggcaggca

SEQ ID NO: 169092 - RNA, 22 nt, Human
ugaaaaacuuuaauccauaaag

SEQ ID NO: 169093 - RNA, 22 nt, Human
gccaggcagcugggagggugcc

SEQ ID NO: 169094 - RNA, 22 nt, Human
ggcuuggaaauugcaggacaca

SEQ ID NO: 169095 - RNA, 22 nt, Human
uggcauuuucuccuuugaguuu

SEQ ID NO: 169096 - RNA, 22 nt, Human
ucuggcucucauacucgccagu

SEQ ID NO: 169097 - RNA, 22 nt, Human
uuuccuuccagguuccuaaggc

SEQ ID NO: 169098 - RNA, 22 nt, Human
augaaauauuucagagcagagu

SEQ ID NO: 169099 - RNA, 22 nt, Human
aauuagggaaaacauuugcuuu

SEQ ID NO: 169100 - RNA, 22 nt, Human
aggcaaagaggauauuuugggg

SEQ ID NO: 169101 - RNA, 21 nt, Human
guccagagagccggcuccuga

SEQ ID NO: 169102 - RNA, 22 nt, Human
uuccaugaaagugaaauggagc

SEQ ID NO: 169103 - RNA, 22 nt, Human
ugcuggaggggaugccuucacu

SEQ ID NO: 169104 - RNA, 22 nt, Human
uuauugaaauggaagcuauaac

SEQ ID NO: 169105 - RNA, 22 nt, Human
ugcuuuauaucucucuucuuag

SEQ ID NO: 169106 - RNA, 22 nt, Human
cagaauuuuucgaauguacugu

SEQ ID NO: 169107 - RNA, 22 nt, Human
ccugucacgaugacugcacucu

SEQ ID NO: 169108 - RNA, 22 nt, Human
aauuaaauugguuuagagagga

SEQ ID NO: 169109 - RNA, 22 nt, Human
aaauguaagucuuuguuucuua

SEQ ID NO: 169110 - RNA, 22 nt, Human
uacagacagacuucccacccuc

SEQ ID NO: 169111 - RNA, 22 nt, Human
guuucaaauagguuucagcaaa

SEQ ID NO: 169112 - RNA, 22 nt, Human
ugaccuuucuuugagauuccug

SEQ ID NO: 169113 - RNA, 22 nt, Human
caguccuuggcaaguucucagu

SEQ ID NO: 169114 - RNA, 22 nt, Human
aagaucagcucccgagucugag

SEQ ID NO: 169115 - RNA, 22 nt, Human
cacagcuucccaaaguggaccu

SEQ ID NO: 169116 - RNA, 22 nt, Human
aagaaugagcucaaagaucuua

SEQ ID NO: 169117 - RNA, 22 nt, Human
aauauaaugcuguuuuaugcca

SEQ ID NO: 169118 - RNA, 22 nt, Human
cuacagaaggagaaauggguaa

SEQ ID NO: 169119 - RNA, 22 nt, Human
guccuucuuuucaucccugguu

SEQ ID NO: 169120 - RNA, 22 nt, Human
cuagaaaucucuguuuacauca

SEQ ID NO: 169121 - RNA, 22 nt, Human
acaugucuguaauuauuuuagg

SEQ ID NO: 169122 - RNA, 22 nt, Human
cccugcagagagugcuuuugug

SEQ ID NO: 169123 - RNA, 20 nt, Human
gggugugugcagggccuggu

SEQ ID NO: 169124 - RNA, 22 nt, Human
aacuuuauuguuaggggcuaaa

SEQ ID NO: 169125 - RNA, 22 nt, Human
aguccuuagaacagugccuggg

SEQ ID NO: 169126 - RNA, 22 nt, Human
ugguccuggaagguccugaggg

SEQ ID NO: 169127 - RNA, 22 nt, Human
auguccuuuguaucccuaggca

SEQ ID NO: 169128 - RNA, 22 nt, Human
uccugcagugugucuccugcac

SEQ ID NO: 169129 - RNA, 22 nt, Human
aguuuucuguucuacaauuuga

SEQ ID NO: 169130 - RNA, 22 nt, Human
ugccuugcacauaauauacauu

SEQ ID NO: 169131 - RNA, 22 nt, Human
acaugcauacacguacauaccu

SEQ ID NO: 169132 - RNA, 22 nt, Human
ccagguguagcacugcucacag

SEQ ID NO: 169133 - RNA, 23 nt, Human
augaaugaauaaggcaggaaagc

SEQ ID NO: 169134 - RNA, 22 nt, Human
ucauuuguugcuguuaccugag

SEQ ID NO: 169135 - RNA, 22 nt, Human
agcccuaaauuaucuuuauuuu

SEQ ID NO: 169136 - RNA, 22 nt, Human
ugcacuccaggcugggugacag

SEQ ID NO: 169137 - RNA, 20 nt, Human
uauuuguauuugggaaaguu

SEQ ID NO: 169138 - RNA, 22 nt, Human
agacacuguguacagaaaaaga

SEQ ID NO: 169139 - RNA, 22 nt, Human
uuuaagacuuagauuuauuggg

SEQ ID NO: 169140 - RNA, 22 nt, Human
cucagagauauagucccugcuu

SEQ ID NO: 169141 - RNA, 22 nt, Human
ugcaggugagugcaggggcuca

SEQ ID NO: 169142 - RNA, 22 nt, Human
uacaugugauaaauugauuaaa

SEQ ID NO: 169143 - RNA, 22 nt, Human
cuggaggagcauggacuggagu

SEQ ID NO: 169144 - RNA, 22 nt, Human
ucagggcagaauccaaagaauu

SEQ ID NO: 169145 - RNA, 22 nt, Human
ucagaaaauaacuguuaguuug

SEQ ID NO: 169146 - RNA, 22 nt, Human
uauuccaguucaccuuuucauc

SEQ ID NO: 169147 - RNA, 22 nt, Human
uauugcugccauuuuccaaugu

SEQ ID NO: 169148 - RNA, 22 nt, Human
uccaugcagagaacugaaguac

SEQ ID NO: 169149 - RNA, 22 nt, Human
auuuaucucuggaaacuaagca

SEQ ID NO: 169150 - RNA, 22 nt, Human
acagaaaugauguuuggcaaua

SEQ ID NO: 169151 - RNA, 22 nt, Human
uuaugcaacaggugagcagaca

SEQ ID NO: 169152 - RNA, 22 nt, Human
cagcauuuucuuaauguaggug

SEQ ID NO: 169153 - RNA, 18 nt, Human
ccagcaugccagaggcug

SEQ ID NO: 169154 - RNA, 22 nt, Human
ggaugucucccagcaccaaagu

SEQ ID NO: 169155 - RNA, 19 nt, Human
uggauuuauauucuuuauc

SEQ ID NO: 169156 - RNA, 22 nt, Human
gcaggcaggagcccaacugccu

SEQ ID NO: 169157 - RNA, 19 nt, Human
aaaagucuauucaauuaca

SEQ ID NO: 169158 - RNA, 22 nt, Human
cagagcugcuucccaguuugug

SEQ ID NO: 169159 - RNA, 22 nt, Human
acagcaugagaguagcaaaagg

SEQ ID NO: 169160 - RNA, 22 nt, Human
cagaagcagaacacuagauuua

SEQ ID NO: 169161 - RNA, 22 nt, Human
uaguuuacucaucuauaaaaug

SEQ ID NO: 169162 - RNA, 22 nt, Human
cauauucuuuaagcaaugcucu

SEQ ID NO: 169163 - RNA, 19 nt, Human
agcagguggguaagaaaau

SEQ ID NO: 169164 - RNA, 22 nt, Human
ucugggugcccuuugcucuguu

SEQ ID NO: 169165 - RNA, 22 nt, Human
acauuguauaaugauuaucaca

SEQ ID NO: 169166 - RNA, 22 nt, Human
ugcugugggauauauguucaaa

SEQ ID NO: 169167 - RNA, 22 nt, Human
aaacauuguaauuuuagcaugg

SEQ ID NO: 169168 - RNA, 22 nt, Human
guuuucaugucuauugggcaua

SEQ ID NO: 169169 - RNA, 22 nt, Human
uggcagguuucguuaaaaaugg

SEQ ID NO: 169170 - RNA, 22 nt, Human
gugggugugagugacggcgucc

SEQ ID NO: 169171 - RNA, 22 nt, Human
auuaggcauucugaaugagguc

SEQ ID NO: 169172 - RNA, 21 nt, Human
uggcaggcagcuggaagcuug

SEQ ID NO: 169173 - RNA, 22 nt, Human
cuuuccuccacucccuaggcuu

SEQ ID NO: 169174 - RNA, 22 nt, Human
uuagcuuuuaagugugcuacau

SEQ ID NO: 169175 - RNA, 22 nt, Human
auuaaauuagcaaacugugaaa

SEQ ID NO: 169176 - RNA, 19 nt, Human
ccaggccuccugggagguc

SEQ ID NO: 169177 - RNA, 22 nt, Human
ucuggaucaccacuucugccuc

SEQ ID NO: 169178 - RNA, 16 nt, Human
aauugcuucuugcugc

SEQ ID NO: 169179 - RNA, 22 nt, Human
aaaugcuacacaggaauucuca

SEQ ID NO: 169180 - RNA, 21 nt, Human
cuacuuaaguaggggauuagg

SEQ ID NO: 169181 - RNA, 22 nt, Human
gauguacuuuaaaauacuucag

SEQ ID NO: 169182 - RNA, 22 nt, Human
auuauuagacuuauaugguagu

SEQ ID NO: 169183 - RNA, 18 nt, Human
agcagguggcgucugcag

SEQ ID NO: 169184 - RNA, 22 nt, Human
ugguccugagaauccuguccuc

SEQ ID NO: 169185 - RNA, 22 nt, Human
auagauauuugaguuguuucca

SEQ ID NO: 169186 - RNA, 22 nt, Human
gcuuccaaaucuguucaaaaug

SEQ ID NO: 169187 - RNA, 22 nt, Human
acauguguuaaaauucucacca

SEQ ID NO: 169188 - RNA, 23 nt, Human
aagugguuuugaacccggacccu

SEQ ID NO: 169189 - RNA, 22 nt, Human
uuuaggcauugggugcucaagu

SEQ ID NO: 169190 - RNA, 22 nt, Human
uuugacucuugucucuuguuag

SEQ ID NO: 169191 - RNA, 22 nt, Human
auuucaggauagccuaguuuug

SEQ ID NO: 169192 - RNA, 21 nt, Human
uugcuuauggcacugcuuugc

SEQ ID NO: 169193 - RNA, 22 nt, Human
uccaggcaaagugcugggcugc

SEQ ID NO: 169194 - RNA, 22 nt, Human
ggcagguguggaguguuauuuu

SEQ ID NO: 169195 - RNA, 22 nt, Human
uacaguaccagaaaugcuaaga

SEQ ID NO: 169196 - RNA, 22 nt, Human
ucagguguguggcucuggacca

SEQ ID NO: 169197 - RNA, 22 nt, Human
gcuauacacauuucuugguagu

SEQ ID NO: 169198 - RNA, 22 nt, Human
cccaggcacauccacucuguga

SEQ ID NO: 169199 - RNA, 22 nt, Human
ucauuguauacuuuauuuauga

SEQ ID NO: 169200 - RNA, 22 nt, Human
ugcccacauggugccauggcca

SEQ ID NO: 169201 - RNA, 22 nt, Human
gucugcccuggggcaucaguuu

SEQ ID NO: 169202 - RNA, 20 nt, Human
ucagagagagggugccacuu

SEQ ID NO: 169203 - RNA, 22 nt, Human
ucugugccaucagucuccagag

SEQ ID NO: 169204 - RNA, 22 nt, Human
guuaggcaugaguguguauuaa

SEQ ID NO: 169205 - RNA, 22 nt, Human
uguguccuuucuuaagagugag

SEQ ID NO: 169206 - RNA, 19 nt, Human
uacuaaacaugcauauugg

SEQ ID NO: 169207 - RNA, 22 nt, Human
uggucuggaacuccuggcuuca

SEQ ID NO: 169208 - RNA, 22 nt, Human
agagcaauggcauccagcugau

SEQ ID NO: 169209 - RNA, 20 nt, Human
ugcuuuaugcuauacuuugu

SEQ ID NO: 169210 - RNA, 22 nt, Human
gggcugaccccaccccucacuc

SEQ ID NO: 169211 - RNA, 22 nt, Human
ugcauggacucaucagacaaga

SEQ ID NO: 169212 - RNA, 22 nt, Human
ucuucagacuccaaauguuuua

SEQ ID NO: 169213 - RNA, 21 nt, Human
acagcuggugcagggcgggga

SEQ ID NO: 169214 - RNA, 22 nt, Human
aaauugcagaugcuaaaugacu

SEQ ID NO: 169215 - RNA, 22 nt, Human
aaucauaauucaaauaagcuua

SEQ ID NO: 169216 - RNA, 22 nt, Human
uaaaaaacauuacucuguccug

SEQ ID NO: 169217 - RNA, 22 nt, Human
acagauuuuaaaugacacuccc

SEQ ID NO: 169218 - RNA, 22 nt, Human
auuauuauauagggaaaguccc

SEQ ID NO: 169219 - RNA, 22 nt, Human
ucuggcucugacacuacuguua

SEQ ID NO: 169220 - RNA, 22 nt, Human
uccaggagguagugcuuaauuu

SEQ ID NO: 169221 - RNA, 22 nt, Human
cugaaggcuaaaauggacugaa

SEQ ID NO: 169222 - RNA, 22 nt, Human
uuaauucugccuuucauguaac

SEQ ID NO: 169223 - RNA, 22 nt, Human
cucuuuccucagccacagucua

SEQ ID NO: 169224 - RNA, 22 nt, Human
gccagucugcucccacaaguuc

SEQ ID NO: 169225 - RNA, 22 nt, Human
uuacagaacugcccuaguuggc

SEQ ID NO: 169226 - RNA, 22 nt, Human
ucacagaacaauguuuaguucu

SEQ ID NO: 169227 - RNA, 22 nt, Human
aaugcuaaaacacagauuuuug

SEQ ID NO: 169228 - RNA, 22 nt, Human
ugcagggcaguuuguuucggca

SEQ ID NO: 169229 - RNA, 22 nt, Human
ucugggugcuacaaacaguauu

SEQ ID NO: 169230 - RNA, 22 nt, Human
uuuauugaauuguaacccuauu

SEQ ID NO: 169231 - RNA, 21 nt, Human
aggcucccagaaaugggcauc

SEQ ID NO: 169232 - RNA, 22 nt, Human
aggcaggugggagugauuccuu

SEQ ID NO: 169233 - RNA, 22 nt, Human
acaguguguucugggaccucca

SEQ ID NO: 169234 - RNA, 22 nt, Human
auuuccagcagcauauuugucu

SEQ ID NO: 169235 - RNA, 22 nt, Human
uacaaaugaguuguaugaacca

SEQ ID NO: 169236 - RNA, 22 nt, Human
aagucacccacaggcagcagaa

SEQ ID NO: 169237 - RNA, 23 nt, Human
uggagcugggcucagacccuggg

SEQ ID NO: 169238 - RNA, 22 nt, Human
ugggcaggugcuauuuuccaug

SEQ ID NO: 169239 - RNA, 22 nt, Human
gaaacaacuacuauugauuucu

SEQ ID NO: 169240 - RNA, 22 nt, Human
accaggcagcacuuuccuugca

SEQ ID NO: 169241 - RNA, 22 nt, Human
caauguuuuuccuuccuuaaua

SEQ ID NO: 169242 - RNA, 19 nt, Human
uccuccuuacuuccucuug

SEQ ID NO: 169243 - RNA, 22 nt, Human
gcaucuaauccaguccagcauc

SEQ ID NO: 169244 - RNA, 21 nt, Human
cacaggugggucagugaggcc

SEQ ID NO: 169245 - RNA, 18 nt, Human
gacaggugggugagacca

SEQ ID NO: 169246 - RNA, 17 nt, Human
uggucuggaagaacuga

SEQ ID NO: 169247 - RNA, 22 nt, Human
aaacaaacauagguuugaaagu

SEQ ID NO: 169248 - RNA, 20 nt, Human
uuucugugcccaggucuguu

SEQ ID NO: 169249 - RNA, 22 nt, Human
ugcaggguauccuugucucugc

SEQ ID NO: 169250 - RNA, 22 nt, Human
cuggcuuucauuucaagcacgu

SEQ ID NO: 169251 - RNA, 21 nt, Human
aaagaaucauggguaauuuca

SEQ ID NO: 169252 - RNA, 22 nt, Human
uacauaauaaggggcauggugu

SEQ ID NO: 169253 - RNA, 22 nt, Human
uuugaaugcaggacauacagaa

SEQ ID NO: 169254 - RNA, 22 nt, Human
cuacagaaacacuggacaugug

SEQ ID NO: 169255 - RNA, 22 nt, Human
ugguuugacaaugaggacuggu

SEQ ID NO: 169256 - RNA, 22 nt, Human
gacaggugugaugauuuaggcu

SEQ ID NO: 169257 - RNA, 22 nt, Human
uuccaugcaagaaguauggcuc

SEQ ID NO: 169258 - RNA, 22 nt, Human
gucauauacacugcauguaauc

SEQ ID NO: 169259 - RNA, 22 nt, Human
uuucaugaggggcaaaaucuca

SEQ ID NO: 169260 - RNA, 22 nt, Human
gaaagcagcuaagucuuaugau

SEQ ID NO: 169261 - RNA, 16 nt, Human
ugggaccuguggccaa

SEQ ID NO: 169262 - RNA, 22 nt, Human
gcaucuaaauaaacgugggagu

SEQ ID NO: 169263 - RNA, 22 nt, Human
cuacagaaaccuuuuucauaca

SEQ ID NO: 169264 - RNA, 22 nt, Human
aaagcaguauauugguaguugu

SEQ ID NO: 169265 - RNA, 21 nt, Human
uccagaaaagaggucauuagc

SEQ ID NO: 169266 - RNA, 22 nt, Human
uuuauuggauauuuacaagaua

SEQ ID NO: 169267 - RNA, 22 nt, Human
uggcaaagaugguucucaccau

SEQ ID NO: 169268 - RNA, 22 nt, Human
uuuaggcagaacauggacuuug

SEQ ID NO: 169269 - RNA, 22 nt, Human
aaagugguuucccaguucagua

SEQ ID NO: 169270 - RNA, 22 nt, Human
augaacaagagagggaagauuc

SEQ ID NO: 169271 - RNA, 22 nt, Human
caaagagcuguucagugucgcu

SEQ ID NO: 169272 - RNA, 22 nt, Human
uuccacaauguaugaauaagau

SEQ ID NO: 169273 - RNA, 22 nt, Human
aaaauucugucauuaaauugug

SEQ ID NO: 169274 - RNA, 22 nt, Human
agguggcuucuggccaggugug

SEQ ID NO: 169275 - RNA, 22 nt, Human
ccaaaauuauuacauuuguagg

SEQ ID NO: 169276 - RNA, 22 nt, Human
uauguacucaucaacuauugaa

SEQ ID NO: 169277 - RNA, 22 nt, Human
cgcaggugccggcagauggggu

SEQ ID NO: 169278 - RNA, 22 nt, Human
gauaauaagcacagcaggaugu

SEQ ID NO: 169279 - RNA, 22 nt, Human
uagguguccucguccaaagauu

SEQ ID NO: 169280 - RNA, 22 nt, Human
caagauuugccaguggccaacu

SEQ ID NO: 169281 - RNA, 22 nt, Human
aaggcauaggacaaaucaguga

SEQ ID NO: 169282 - RNA, 22 nt, Human
aaucagaaaggcuaaggaagca

SEQ ID NO: 169283 - RNA, 22 nt, Human
cagcuuuguggccuugaccucg

SEQ ID NO: 169284 - RNA, 22 nt, Human
acagcuuuucugauagauccug

SEQ ID NO: 169285 - RNA, 22 nt, Human
acccaggccugagagacaggag

SEQ ID NO: 169286 - RNA, 22 nt, Human
cauuagggucucucagcugaau

SEQ ID NO: 169287 - RNA, 22 nt, Human
aaauccuaaaaguuugacuuaa

SEQ ID NO: 169288 - RNA, 22 nt, Human
ccagagagaguacugggcucug

SEQ ID NO: 169289 - RNA, 22 nt, Human
uguccuuugggagggcacagcu

SEQ ID NO: 169290 - RNA, 22 nt, Human
agagagcaguggaucaccuagc

SEQ ID NO: 169291 - RNA, 22 nt, Human
caaaugcagauucaggaguucu

SEQ ID NO: 169292 - RNA, 22 nt, Human
gaaccauuucugaauaguuugu

SEQ ID NO: 169293 - RNA, 22 nt, Human
gugcagggcuggcaccggaggc

SEQ ID NO: 169294 - RNA, 22 nt, Human
gaggugucccugacccuuugca

SEQ ID NO: 169295 - RNA, 22 nt, Human
aauuucagaccauuugcaauua

SEQ ID NO: 169296 - RNA, 22 nt, Human
auuuccuugcaaguuucuguaa

SEQ ID NO: 169297 - RNA, 22 nt, Human
accuaaauucuggcugauuagg

SEQ ID NO: 169298 - RNA, 21 nt, Human
aguugcauaggccagccaucc

SEQ ID NO: 169299 - RNA, 21 nt, Human
ucugaugguagaugagaugug

SEQ ID NO: 169300 - RNA, 22 nt, Human
auagaaacagaggucaggcauu

SEQ ID NO: 169301 - RNA, 22 nt, Human
uauuccaacugucauagucaua

SEQ ID NO: 169302 - RNA, 22 nt, Human
ugcuguaauacuuaagguuaag

SEQ ID NO: 169303 - RNA, 22 nt, Human
aguuugaauugaaaugcagaug

SEQ ID NO: 169304 - RNA, 22 nt, Human
uauuuaauuagugauuguagag

SEQ ID NO: 169305 - RNA, 22 nt, Human
auaaguaggaaaauuugaauau

SEQ ID NO: 169306 - RNA, 22 nt, Human
cuggauguccuuccccugaagc

SEQ ID NO: 169307 - RNA, 22 nt, Human
aaaagucucucugaguaaaagu

SEQ ID NO: 169308 - RNA, 22 nt, Human
aagggcucugugcuugucccau

SEQ ID NO: 169309 - RNA, 22 nt, Human
uggaggaaucagggcuuaggcu

SEQ ID NO: 169310 - RNA, 21 nt, Human
ccugggugggaccccucuucc

SEQ ID NO: 169311 - RNA, 22 nt, Human
auguccuuuuauuuaaagcagg

SEQ ID NO: 169312 - RNA, 22 nt, Human
aucuguaauuuugaaugcaaau

SEQ ID NO: 169313 - RNA, 22 nt, Human
uacugaaaagccacaaggacca

SEQ ID NO: 169314 - RNA, 22 nt, Human
gggacaugaggccauagugauu

SEQ ID NO: 169315 - RNA, 19 nt, Human
gggaccugacuaauuggca

SEQ ID NO: 169316 - RNA, 20 nt, Human
aggaggaagaaagcacacug

SEQ ID NO: 169317 - RNA, 22 nt, Human
uuagugguaaggaugaaauuuc

SEQ ID NO: 169318 - RNA, 22 nt, Human
ugagcagagucgcuccagagug

SEQ ID NO: 169319 - RNA, 22 nt, Human
ggcagguggccaagugucuaag

SEQ ID NO: 169320 - RNA, 22 nt, Human
acaguguguuggaggagacugu

SEQ ID NO: 169321 - RNA, 21 nt, Human
uuguaaagguuuagaagaaug

SEQ ID NO: 169322 - RNA, 19 nt, Human
ccugggucugcagcauuca

SEQ ID NO: 169323 - RNA, 22 nt, Human
auucuucauacagacaaguccu

SEQ ID NO: 169324 - RNA, 22 nt, Human
uucuucaaccaucuacauaaac

SEQ ID NO: 169325 - RNA, 22 nt, Human
ugcuuaauauugugauguaaua

SEQ ID NO: 169326 - RNA, 18 nt, Human
ucuugccugcacccucuc

SEQ ID NO: 169327 - RNA, 22 nt, Human
caguccuugcucugggaugaug

SEQ ID NO: 169328 - RNA, 22 nt, Human
gugcaggggccuccccuugcug

SEQ ID NO: 169329 - RNA, 22 nt, Human
aagaguuuaugauauaacaugu

SEQ ID NO: 169330 - RNA, 17 nt, Human
cugaagaguccuggcua

SEQ ID NO: 169331 - RNA, 22 nt, Human
gccaggcaggccacgcuguguu

SEQ ID NO: 169332 - RNA, 20 nt, Human
ucauuacagugcuaagaugu

SEQ ID NO: 169333 - RNA, 22 nt, Human
gaggagggagcuggaagcucuu

SEQ ID NO: 169334 - RNA, 22 nt, Human
acuugguuguuuuaacuuggca

SEQ ID NO: 169335 - RNA, 20 nt, Human
gaaguccuguuauauccuuu

SEQ ID NO: 169336 - RNA, 17 nt, Human
ggaggcaacagacaggg

SEQ ID NO: 169337 - RNA, 22 nt, Human
ggacagacuuuacagccccggg

SEQ ID NO: 169338 - RNA, 22 nt, Human
cagcaugaugagugcaguuugg

SEQ ID NO: 169339 - RNA, 22 nt, Human
cccaggcagccugcagggaagg

SEQ ID NO: 169340 - RNA, 22 nt, Human
uggcagguuaacuuacaacugu

SEQ ID NO: 169341 - RNA, 22 nt, Human
acagauuugacugguaccuggc

SEQ ID NO: 169342 - RNA, 22 nt, Human
cuggcacucauaggccaguuca

SEQ ID NO: 169343 - RNA, 22 nt, Human
augcuuaaugaggguauauaug

SEQ ID NO: 169344 - RNA, 22 nt, Human
agcagggcucacauuaguggau

SEQ ID NO: 169345 - RNA, 22 nt, Human
guuauuagaagugaaggauugu

SEQ ID NO: 169346 - RNA, 22 nt, Human
cacccagcacagagggaggcga

SEQ ID NO: 169347 - RNA, 22 nt, Human
caauuucaucuugugcuucaau

SEQ ID NO: 169348 - RNA, 22 nt, Human
aaauaugaaugauaagaguuau

SEQ ID NO: 169349 - RNA, 22 nt, Human
cugcaaaagucauugugguuuu

SEQ ID NO: 169350 - RNA, 22 nt, Human
cagucuggaggucagcuggcuu

SEQ ID NO: 169351 - RNA, 22 nt, Human
guuuaaucagaggaauuauaga

SEQ ID NO: 169352 - RNA, 22 nt, Human
gcugcgguggcuggcgauggga

SEQ ID NO: 169353 - RNA, 20 nt, Human
uuugagaccagucugcccaa

SEQ ID NO: 169354 - RNA, 21 nt, Human
cuguccucagauguggacgag

SEQ ID NO: 169355 - RNA, 22 nt, Human
ccacagagcauuagauuucaga

SEQ ID NO: 169356 - RNA, 22 nt, Human
uaacuuuaggaauagguaaucu

SEQ ID NO: 169357 - RNA, 22 nt, Human
auguuucaccagcaaauuaccu

SEQ ID NO: 169358 - RNA, 22 nt, Human
uugcagggaaauagaaauaaac

SEQ ID NO: 169359 - RNA, 22 nt, Human
aguguccuagcaagccgguccu

SEQ ID NO: 169360 - RNA, 22 nt, Human
uacaaaguaauguauaauaucg

SEQ ID NO: 169361 - RNA, 22 nt, Human
cuuugcaauagaggcacacaug

SEQ ID NO: 169362 - RNA, 22 nt, Human
uggacauguccggccagacaau

SEQ ID NO: 169363 - RNA, 18 nt, Human
aauuuccauaugaauugc

SEQ ID NO: 169364 - RNA, 22 nt, Human
acuauacaguauguacgugcac

SEQ ID NO: 169365 - RNA, 22 nt, Human
uaaagcugaaaugauuaugaca

SEQ ID NO: 169366 - RNA, 22 nt, Human
aguugcugauucugucugugau

SEQ ID NO: 169367 - RNA, 22 nt, Human
gauugcugaagaaagugaguga

SEQ ID NO: 169368 - RNA, 23 nt, Human
agucuucauuguauuuccagacc

SEQ ID NO: 169369 - RNA, 23 nt, Human
ugcugggguaguuuguggcacag

SEQ ID NO: 169370 - RNA, 22 nt, Human
uacuaaacccucgauggaucuu

SEQ ID NO: 169371 - RNA, 22 nt, Human
gcagggcagcucacugugguuc

SEQ ID NO: 169372 - RNA, 22 nt, Human
uccaggcaaagccuuguagacg

SEQ ID NO: 169373 - RNA, 22 nt, Human
gggcuggacaucuaagguagcu

SEQ ID NO: 169374 - RNA, 19 nt, Human
uuagguauuauugcuuucc

SEQ ID NO: 169375 - RNA, 22 nt, Human
caauuucagucucagagaguuc

SEQ ID NO: 169376 - RNA, 22 nt, Human
agcuuuaucagaggagucucua

SEQ ID NO: 169377 - RNA, 22 nt, Human
ugguauuacuucuagacacaag

SEQ ID NO: 169378 - RNA, 22 nt, Human
agacagguguuuuacaacuucg

SEQ ID NO: 169379 - RNA, 22 nt, Human
agcacaauagagcaguuaaaaa

SEQ ID NO: 169380 - RNA, 22 nt, Human
guacagaaaguacccauagaag

SEQ ID NO: 169381 - RNA, 22 nt, Human
ggauuucuuccuuccucagaag

SEQ ID NO: 169382 - RNA, 22 nt, Human
uugcuuuagggcaaauauuuca

SEQ ID NO: 169383 - RNA, 22 nt, Human
cuuaauuuaagccuagaaugca

SEQ ID NO: 169384 - RNA, 22 nt, Human
uagcuuuaaugaguugguaaga

SEQ ID NO: 169385 - RNA, 22 nt, Human
agagcaucuaacacauaagccu

SEQ ID NO: 169386 - RNA, 22 nt, Human
caggagcaaggagcagugggau

SEQ ID NO: 169387 - RNA, 22 nt, Human
gauuuacagaucuaagggucac

SEQ ID NO: 169388 - RNA, 22 nt, Human
acagauuuuugguaaauaauuu

SEQ ID NO: 169389 - RNA, 22 nt, Human
cuucuuaaucccuuauauauuu

SEQ ID NO: 169390 - RNA, 22 nt, Human
ccagguguggccacauggcugg

SEQ ID NO: 169391 - RNA, 22 nt, Human
ccuggguccuggcagccuccug

SEQ ID NO: 169392 - RNA, 22 nt, Human
caaagauuuuagaauuugcaau

SEQ ID NO: 169393 - RNA, 22 nt, Human
ugacaguuaagguauacauuca

SEQ ID NO: 169394 - RNA, 21 nt, Human
uccuggcuuuaugcuaccucu

SEQ ID NO: 169395 - RNA, 22 nt, Human
uucaacuuuggagauuuaauaa

SEQ ID NO: 169396 - RNA, 22 nt, Human
uuuauccaccuuacccuguucc

SEQ ID NO: 169397 - RNA, 22 nt, Human
auuuucaugacuaccuuaaaua

SEQ ID NO: 169398 - RNA, 22 nt, Human
uuucacacaacgugaauauacu

SEQ ID NO: 169399 - RNA, 22 nt, Human
auguaaaucaagcagugcuggu

SEQ ID NO: 169400 - RNA, 22 nt, Human
uggcagggagccaccggucaug

SEQ ID NO: 169401 - RNA, 18 nt, Human
uccuaacuuagauacucc

SEQ ID NO: 169402 - RNA, 22 nt, Human
cccaggcagccccagaagcuug

SEQ ID NO: 169403 - RNA, 22 nt, Human
uacaaagucagaauaacaggug

SEQ ID NO: 169404 - RNA, 22 nt, Human
ccagagaggggaagggcuugcc

SEQ ID NO: 169405 - RNA, 22 nt, Human
uuuaggaaugugguuuuugagc

SEQ ID NO: 169406 - RNA, 22 nt, Human
ggaugagguagaugaacaaggg

SEQ ID NO: 169407 - RNA, 22 nt, Human
agcuggaggggccagcaggugu

SEQ ID NO: 169408 - RNA, 22 nt, Human
uugcuuuauuccuagcccuugu

SEQ ID NO: 169409 - RNA, 22 nt, Human
ucuguucaguugauuagacaga

SEQ ID NO: 169410 - RNA, 22 nt, Human
gagggcucaacuacuacuaggc

SEQ ID NO: 169411 - RNA, 22 nt, Human
gagcugaauugcugccauuugc

SEQ ID NO: 169412 - RNA, 22 nt, Human
uccugugucaauuccucauucu

SEQ ID NO: 169413 - RNA, 22 nt, Human
gucuucuuguuuugaaggaaau

SEQ ID NO: 169414 - RNA, 22 nt, Human
agugcuccuauggaucaguugu

SEQ ID NO: 169415 - RNA, 22 nt, Human
acugccaaugguaguuugaugg

SEQ ID NO: 169416 - RNA, 22 nt, Human
aaucagaaccuugggucauaac

SEQ ID NO: 169417 - RNA, 22 nt, Human
uucagaaaaagaccauugcaau

SEQ ID NO: 169418 - RNA, 21 nt, Human
uccagaccucccucuccuagc

SEQ ID NO: 169419 - RNA, 22 nt, Human
cguccuuugaauugaggucuuu

SEQ ID NO: 169420 - RNA, 22 nt, Human
gcaggcaguuugcuuuucccuc

SEQ ID NO: 169421 - RNA, 22 nt, Human
ucuggaggcaacuaaccuaguu

SEQ ID NO: 169422 - RNA, 22 nt, Human
auuucauacuaaggcucaaaaa

SEQ ID NO: 169423 - RNA, 22 nt, Human
uuuccagggcucuguagaagaa

SEQ ID NO: 169424 - RNA, 22 nt, Human
uucuucuucuggcugcaccugg

SEQ ID NO: 169425 - RNA, 22 nt, Human
uacuaaauaguuuaauuccuca

SEQ ID NO: 169426 - RNA, 22 nt, Human
uauaauuaguaaauggcagauu

SEQ ID NO: 169427 - RNA, 22 nt, Human
aacaaucaaguuucuaaaugac

SEQ ID NO: 169428 - RNA, 22 nt, Human
ugaccauuugaucuacauucca

SEQ ID NO: 169429 - RNA, 22 nt, Human
gcagagaguugggcugcgccag

SEQ ID NO: 169430 - RNA, 22 nt, Human
caggaaagccgagugccauagg

SEQ ID NO: 169431 - RNA, 22 nt, Human
uucuucaaaacaacacuggccu

SEQ ID NO: 169432 - RNA, 22 nt, Human
ugacauguggcuuugacccagg

SEQ ID NO: 169433 - RNA, 22 nt, Human
auacauauaugguacuuccugg

SEQ ID NO: 169434 - RNA, 22 nt, Human
cacaaaugguuguagacauuaa

SEQ ID NO: 169435 - RNA, 19 nt, Human
aggauuuauuaugugcuca

SEQ ID NO: 169436 - RNA, 22 nt, Human
agagggcaugcuugguggccug

SEQ ID NO: 169437 - RNA, 22 nt, Human
uaggugucaggccuccuccagc

SEQ ID NO: 169438 - RNA, 22 nt, Human
acaugacaccucuggcugggug

SEQ ID NO: 169439 - RNA, 22 nt, Human
ucuggguggcuucagaggccac

SEQ ID NO: 169440 - RNA, 22 nt, Human
auugaaaauauaauucuaggag

SEQ ID NO: 169441 - RNA, 22 nt, Human
cugaaugaaaucaaggacugag

SEQ ID NO: 169442 - RNA, 22 nt, Human
augcuuuauuauuuugcaggga

SEQ ID NO: 169443 - RNA, 22 nt, Human
auugcuuuuaagcaccaccuaa

SEQ ID NO: 169444 - RNA, 22 nt, Human
acagacagacagauugcauaug

SEQ ID NO: 169445 - RNA, 22 nt, Human
ucuagggugugcggcagggcua

SEQ ID NO: 169446 - RNA, 22 nt, Human
ucaaaauuaaaccaacguccag

SEQ ID NO: 169447 - RNA, 22 nt, Human
uuuguacauccuaauucugagu

SEQ ID NO: 169448 - RNA, 22 nt, Human
cuuccagguccuucuugagaag

SEQ ID NO: 169449 - RNA, 22 nt, Human
caaauguauaaauguacuuucu

SEQ ID NO: 169450 - RNA, 21 nt, Human
acagcaagccuucacaugagu

SEQ ID NO: 169451 - RNA, 22 nt, Human
ucuauugcagauggaugcccuc

SEQ ID NO: 169452 - RNA, 22 nt, Human
uucuguuuuagaaauaaguagu

SEQ ID NO: 169453 - RNA, 22 nt, Human
ggcagguguggugaccagagau

SEQ ID NO: 169454 - RNA, 22 nt, Human
auacagauguugaauguuauau

SEQ ID NO: 169455 - RNA, 23 nt, Human
acuuuauccuauaucuuuguucu

SEQ ID NO: 169456 - RNA, 22 nt, Human
acuauuagcauaucaugaaugg

SEQ ID NO: 169457 - RNA, 22 nt, Human
aucagaaaguucaucauguuug

SEQ ID NO: 169458 - RNA, 22 nt, Human
guaaacauuacugugcuguaua

SEQ ID NO: 169459 - RNA, 22 nt, Human
ccuggagggcagcccauucugg

SEQ ID NO: 169460 - RNA, 22 nt, Human
accugccagaauccaagccaca

SEQ ID NO: 169461 - RNA, 22 nt, Human
uucagaaaucgaguuucauguc

SEQ ID NO: 169462 - RNA, 22 nt, Human
guaaacaacacaaaucauuuga

SEQ ID NO: 169463 - RNA, 22 nt, Human
ggucucugaacuuccacugcgc

SEQ ID NO: 169464 - RNA, 22 nt, Human
aaggugguugcaauuaccauaa

SEQ ID NO: 169465 - RNA, 22 nt, Human
ugcuuuauuuuaaauaugccau

SEQ ID NO: 169466 - RNA, 22 nt, Human
ucuggaucccaccgccacacac

SEQ ID NO: 169467 - RNA, 22 nt, Human
ggaugucuggucuauuucaagu

SEQ ID NO: 169468 - RNA, 20 nt, Human
aaucagaaagugugagcucu

SEQ ID NO: 169469 - RNA, 22 nt, Human
uagauauaagguccuuagaaca

SEQ ID NO: 169470 - RNA, 22 nt, Human
cuacagaaaaucagccacaggc

SEQ ID NO: 169471 - RNA, 22 nt, Human
uaugcauacaaugagauauucc

SEQ ID NO: 169472 - RNA, 22 nt, Human
ucauaauacaaagaguucugca

SEQ ID NO: 169473 - RNA, 22 nt, Human
agacaucagcuugugugcaggg

SEQ ID NO: 169474 - RNA, 22 nt, Human
gagacugcauagauggccacaa

SEQ ID NO: 169475 - RNA, 22 nt, Human
ggcaggcacugugauagauucu

SEQ ID NO: 169476 - RNA, 22 nt, Human
uaaguucaagucuuggauauaa

SEQ ID NO: 169477 - RNA, 22 nt, Human
cuguugcucugaacaggucuug

SEQ ID NO: 169478 - RNA, 23 nt, Human
uaggugucuaguguccacuaugu

SEQ ID NO: 169479 - RNA, 22 nt, Human
ggaacuugcaaccucuggucac

SEQ ID NO: 169480 - RNA, 22 nt, Human
ucauguacauguaagucagaaa

SEQ ID NO: 169481 - RNA, 22 nt, Human
augguauugcaacaacugucau

SEQ ID NO: 169482 - RNA, 22 nt, Human
gacagaaggcaucuagggcacg

SEQ ID NO: 169483 - RNA, 22 nt, Human
gacaggguccaaaggcagggga

SEQ ID NO: 169484 - RNA, 22 nt, Human
uucauguaggcugcaaugcaca

SEQ ID NO: 169485 - RNA, 19 nt, Human
guugaaaguaggugagggu

SEQ ID NO: 169486 - RNA, 22 nt, Human
acuauacauaaaacauuugggu

SEQ ID NO: 169487 - RNA, 22 nt, Human
ccauguguaaauuagauaacuc

SEQ ID NO: 169488 - RNA, 22 nt, Human
guuucauucggcagcucauaag

SEQ ID NO: 169489 - RNA, 22 nt, Human
ggcuccagguuuaaggguaugu

SEQ ID NO: 169490 - RNA, 22 nt, Human
uuuucauugagcaccugaguaa

SEQ ID NO: 169491 - RNA, 22 nt, Human
ucagccagugccuugaucuugc

SEQ ID NO: 169492 - RNA, 22 nt, Human
auauuaggaguuaaauguauua

SEQ ID NO: 169493 - RNA, 22 nt, Human
aagauguaaaggcaauauaaag

SEQ ID NO: 169494 - RNA, 22 nt, Human
gaaguacaguuuuaucuagcca

SEQ ID NO: 169495 - RNA, 21 nt, Human
auacagaaggcagacucucuc

SEQ ID NO: 169496 - RNA, 22 nt, Human
uguccuuuguguaucuauagua

SEQ ID NO: 169497 - RNA, 22 nt, Human
ugucuuuagccagcagucuucu

SEQ ID NO: 169498 - RNA, 22 nt, Human
ugacagacauggaagccagagu

SEQ ID NO: 169499 - RNA, 22 nt, Human
acacugaauaauugagaguuga

SEQ ID NO: 169500 - RNA, 22 nt, Human
ucagguggcugguugcuggcua

SEQ ID NO: 169501 - RNA, 22 nt, Human
uacaaaguagaaauucaguaaa

SEQ ID NO: 169502 - RNA, 16 nt, Human
gagggcagaggcggaa

SEQ ID NO: 169503 - RNA, 22 nt, Human
ucuucuuccucauuuauacaua

SEQ ID NO: 169504 - RNA, 22 nt, Human
agggcuccaggggaccaucagu

SEQ ID NO: 169505 - RNA, 22 nt, Human
augaaaauucuaugcaggccag

SEQ ID NO: 169506 - RNA, 22 nt, Human
cuucuuucuuuugaucacaggu

SEQ ID NO: 169507 - RNA, 22 nt, Human
ucagcuuuccuugcuuuagauu

SEQ ID NO: 169508 - RNA, 22 nt, Human
uugacacagaucaauauucaac

SEQ ID NO: 169509 - RNA, 22 nt, Human
auguccagggcacacagcagug

SEQ ID NO: 169510 - RNA, 22 nt, Human
cuauuucaaggcccagauauga

SEQ ID NO: 169511 - RNA, 22 nt, Human
cccuccucaacucuggcuucca

SEQ ID NO: 169512 - RNA, 22 nt, Human
acauuccaaaaacuagcagaua

SEQ ID NO: 169513 - RNA, 22 nt, Human
aagaauucacugguagagucaa

SEQ ID NO: 169514 - RNA, 22 nt, Human
aucuaaacagguguucuuuaga

SEQ ID NO: 169515 - RNA, 18 nt, Human
aggcaggugcuaauauuu

SEQ ID NO: 169516 - RNA, 22 nt, Human
gagagggauacugaguuuuggu

SEQ ID NO: 169517 - RNA, 22 nt, Human
acuugguugcaaaugaauuauu

SEQ ID NO: 169518 - RNA, 22 nt, Human
caucagaauguuauggggggcu

SEQ ID NO: 169519 - RNA, 18 nt, Human
gcagcuuuugauucaccc

SEQ ID NO: 169520 - RNA, 20 nt, Human
gcagggcaagggauaugaaa

SEQ ID NO: 169521 - RNA, 21 nt, Human
auacagaacauugauccaaga

SEQ ID NO: 169522 - RNA, 22 nt, Human
uaaguccuaauggcagaagucu

SEQ ID NO: 169523 - RNA, 22 nt, Human
aaucuucacagagaaaauuagg

SEQ ID NO: 169524 - RNA, 23 nt, Human
ucagagagcuguugagagcugcc

SEQ ID NO: 169525 - RNA, 22 nt, Human
ccagggcagugggagaaggugc

SEQ ID NO: 169526 - RNA, 21 nt, Human
caaucaguuggcauuugagca

SEQ ID NO: 169527 - RNA, 22 nt, Human
guuuucauuacugcugugauuu

SEQ ID NO: 169528 - RNA, 22 nt, Human
ucaccagucuuucuuaccauug

SEQ ID NO: 169529 - RNA, 22 nt, Human
auacagaacucucaguuguaua

SEQ ID NO: 169530 - RNA, 22 nt, Human
ccagggcaucacauccaguguu

SEQ ID NO: 169531 - RNA, 22 nt, Human
uucuggguuuacaucugacuuc

SEQ ID NO: 169532 - RNA, 22 nt, Human
uuuaggcacagaguugagggac

SEQ ID NO: 169533 - RNA, 22 nt, Human
uaaguccuagaugauucacaga

SEQ ID NO: 169534 - RNA, 22 nt, Human
uguccuuaucuccaaacaauca

SEQ ID NO: 169535 - RNA, 22 nt, Human
uuugaacuucuccauucugaug

SEQ ID NO: 169536 - RNA, 22 nt, Human
uuccaugaagggcagccucuca

SEQ ID NO: 169537 - RNA, 22 nt, Human
ucuggcccaucuucugccacca

SEQ ID NO: 169538 - RNA, 22 nt, Human
uugcuuuagaaucugcuucugg

SEQ ID NO: 169539 - RNA, 22 nt, Human
ucugggugggcccgagaaaucu

SEQ ID NO: 169540 - RNA, 22 nt, Human
uuugacucaagccuuucuuuag

SEQ ID NO: 169541 - RNA, 22 nt, Human
cuguccuguggaccugaggacg

SEQ ID NO: 169542 - RNA, 22 nt, Human
caguaaaugcagauauagauac

SEQ ID NO: 169543 - RNA, 22 nt, Human
augcagcuucaggauuaugaug

SEQ ID NO: 169544 - RNA, 22 nt, Human
ucaauaaauagcuuggcucagc

SEQ ID NO: 169545 - RNA, 22 nt, Human
gugagggcagaacccccaggcc

SEQ ID NO: 169546 - RNA, 23 nt, Human
agaggcaggaguggcuugcccgg

SEQ ID NO: 169547 - RNA, 22 nt, Human
uugauuccuugaaauauccuug

SEQ ID NO: 169548 - RNA, 22 nt, Human
auuacagaaugcaguuccuuau

SEQ ID NO: 169549 - RNA, 22 nt, Human
aaagcagagaucauggcuugua

SEQ ID NO: 169550 - RNA, 19 nt, Human
guguccauggagcauggag

SEQ ID NO: 169551 - RNA, 22 nt, Human
uuuaaauuuguguuuagagggu

SEQ ID NO: 169552 - RNA, 22 nt, Human
gggguguggacggcugugccag

SEQ ID NO: 169553 - RNA, 22 nt, Human
uuuacagagaauguacauaaag

SEQ ID NO: 169554 - RNA, 22 nt, Human
ucagggcauguauguuucuuua

SEQ ID NO: 169555 - RNA, 22 nt, Human
aaugucaauaacuuuaucccuc

SEQ ID NO: 169556 - RNA, 22 nt, Human
ugaaugauuugggugcauucag

SEQ ID NO: 169557 - RNA, 23 nt, Human
aguacaauaaguauaauucuuuc

SEQ ID NO: 169558 - RNA, 22 nt, Human
augauugaaaaugacauugcca

SEQ ID NO: 169559 - RNA, 22 nt, Human
ugguuccaagauggcugccaca

SEQ ID NO: 169560 - RNA, 22 nt, Human
auccugugcaaugacugcaucu

SEQ ID NO: 169561 - RNA, 22 nt, Human
auccaugaucaauuuauuacua

SEQ ID NO: 169562 - RNA, 22 nt, Human
uaauuacagguccaaaacaauc

SEQ ID NO: 169563 - RNA, 22 nt, Human
acauacagaccugcagggcagc

SEQ ID NO: 169564 - RNA, 22 nt, Human
cuugaagaaauggagacaggau

SEQ ID NO: 169565 - RNA, 22 nt, Human
uggcaggguuggccaccuuacc

SEQ ID NO: 169566 - RNA, 20 nt, Human
cauauauaccuagaagugga

SEQ ID NO: 169567 - RNA, 22 nt, Human
auguguccauuaucaguucugg

SEQ ID NO: 169568 - RNA, 22 nt, Human
acacaauacagggcucaaaaua

SEQ ID NO: 169569 - RNA, 22 nt, Human
agcccggcuuccccgguugcua

SEQ ID NO: 169570 - RNA, 22 nt, Human
ucaggaaagaguuagaugauua

SEQ ID NO: 169571 - RNA, 22 nt, Human
uuugacuccacuccuaacuccu

SEQ ID NO: 169572 - RNA, 22 nt, Human
uaaauuguuuucuagaaguugu

SEQ ID NO: 169573 - RNA, 22 nt, Human
cuacagaauggagggucagaga

SEQ ID NO: 169574 - RNA, 22 nt, Human
acuguucauuuguccuguaucu

SEQ ID NO: 169575 - RNA, 22 nt, Human
aagagcauggaauggagaucca

SEQ ID NO: 169576 - RNA, 22 nt, Human
acacuuuaagcauuucacacug

SEQ ID NO: 169577 - RNA, 22 nt, Human
ucauaaaaugcuccugauauug

SEQ ID NO: 169578 - RNA, 22 nt, Human
cugugucccaguaccuugggua

SEQ ID NO: 169579 - RNA, 22 nt, Human
augguuuugaagggaggucaaa

SEQ ID NO: 169580 - RNA, 22 nt, Human
uaauaacaauuguaggacauga

SEQ ID NO: 169581 - RNA, 22 nt, Human
accaggcacucuuguggcagug

SEQ ID NO: 169582 - RNA, 22 nt, Human
caaguccuaaauguauuuguug

SEQ ID NO: 169583 - RNA, 22 nt, Human
aguucacagccauguucaugug

SEQ ID NO: 169584 - RNA, 18 nt, Human
uuccaugauuccuuucac

SEQ ID NO: 169585 - RNA, 22 nt, Human
accaggcaguauggugcugcaa

SEQ ID NO: 169586 - RNA, 22 nt, Human
caggauggucagaugcauuguc

SEQ ID NO: 169587 - RNA, 22 nt, Human
cccaggcacucuuggucauuuu

SEQ ID NO: 169588 - RNA, 22 nt, Human
uuuagauaaugcucaagcaauu

SEQ ID NO: 169589 - RNA, 22 nt, Human
uuccaugaaggagacugagaag

SEQ ID NO: 169590 - RNA, 22 nt, Human
cugcauuagucaugcuuugcag

SEQ ID NO: 169591 - RNA, 20 nt, Human
gauuacaaaaugaaaugcau

SEQ ID NO: 169592 - RNA, 22 nt, Human
uuacagaagugaaggccuuuaa

SEQ ID NO: 169593 - RNA, 20 nt, Human
uacagaaugcaauaaaaugg

SEQ ID NO: 169594 - RNA, 22 nt, Human
gcccggcagucacacacccagg

SEQ ID NO: 169595 - RNA, 21 nt, Human
gcauguguggugugcuccaca

SEQ ID NO: 169596 - RNA, 22 nt, Human
uauacagauuaacagauuuaaa

SEQ ID NO: 169597 - RNA, 19 nt, Human
uuuagcuuacguuucauug

SEQ ID NO: 169598 - RNA, 22 nt, Human
uuccagagaaaagguuuauuuc

SEQ ID NO: 169599 - RNA, 22 nt, Human
cugaauaauuuucuguuguaug

SEQ ID NO: 169600 - RNA, 22 nt, Human
uuucaaguguccugauuaaugg

SEQ ID NO: 169601 - RNA, 21 nt, Human
aguguccuuuuacugugaaua

SEQ ID NO: 169602 - RNA, 22 nt, Human
aaucuucuuucuuaacaguaca

SEQ ID NO: 169603 - RNA, 22 nt, Human
cuccaugaauuugagcuuugug

SEQ ID NO: 169604 - RNA, 22 nt, Human
aacauuuaugguagucauugca

SEQ ID NO: 169605 - RNA, 19 nt, Human
uccugaaaacuucuggaau

SEQ ID NO: 169606 - RNA, 22 nt, Human
uucugggucacccuucugcuca

SEQ ID NO: 169607 - RNA, 22 nt, Human
accauccugaaaccuucaugcu

SEQ ID NO: 169608 - RNA, 20 nt, Human
auaaaauaacugccacaaga

SEQ ID NO: 169609 - RNA, 19 nt, Human
uggcagguagugagcaguc

SEQ ID NO: 169610 - RNA, 22 nt, Human
uagaaacauauguuugagacau

SEQ ID NO: 169611 - RNA, 22 nt, Human
cccugcagccuugcaugccuuc

SEQ ID NO: 169612 - RNA, 22 nt, Human
uaggugucuuucuguccuuguu

SEQ ID NO: 169613 - RNA, 22 nt, Human
uucuucagucccacuagccaca

SEQ ID NO: 169614 - RNA, 22 nt, Human
auuuccugcaggggcugguggg

SEQ ID NO: 169615 - RNA, 22 nt, Human
auuugcuggugaauguauagcu

SEQ ID NO: 169616 - RNA, 22 nt, Human
aauucaugaguagaaucuauau

SEQ ID NO: 169617 - RNA, 22 nt, Human
uaugcacacauguaugcaugug

SEQ ID NO: 169618 - RNA, 22 nt, Human
gcugauagacugaauguuggga

SEQ ID NO: 169619 - RNA, 22 nt, Human
aauguuuugcauuaguuuucua

SEQ ID NO: 169620 - RNA, 22 nt, Human
ugucaccacauuugucaauauc

SEQ ID NO: 169621 - RNA, 22 nt, Human
ugcagggcaguggagguugagu

SEQ ID NO: 169622 - RNA, 22 nt, Human
aguuguaauaacaauaccaaaa

SEQ ID NO: 169623 - RNA, 22 nt, Human
uagggacacugcucaugaguuc

SEQ ID NO: 169624 - RNA, 22 nt, Human
agcucccagcagagcuggccac

SEQ ID NO: 169625 - RNA, 22 nt, Human
aggcaauccccugaggauacuu

SEQ ID NO: 169626 - RNA, 22 nt, Human
uaaugucaaggugauagauuug

SEQ ID NO: 169627 - RNA, 22 nt, Human
guggaaugaauagauuugcauu

SEQ ID NO: 169628 - RNA, 22 nt, Human
caggauggccccggggcugugc

SEQ ID NO: 169629 - RNA, 22 nt, Human
aaugaucuggcucaggauauca

SEQ ID NO: 169630 - RNA, 18 nt, Human
aagucaccccugcucccu

SEQ ID NO: 169631 - RNA, 22 nt, Human
auguccaguuucuacacacaua

SEQ ID NO: 169632 - RNA, 22 nt, Human
uuaguucuugggugaacuuuug

SEQ ID NO: 169633 - RNA, 22 nt, Human
aaguauaagcuauucuucauga

SEQ ID NO: 169634 - RNA, 19 nt, Human
agugugaguaauuggaguu

SEQ ID NO: 169635 - RNA, 22 nt, Human
uguauguugggucaaaguacau

SEQ ID NO: 169636 - RNA, 22 nt, Human
auucuucacuguuucagaauga

SEQ ID NO: 169637 - RNA, 17 nt, Human
uuucugcaugauuggac

SEQ ID NO: 169638 - RNA, 22 nt, Human
uagacaggaaacauuaggaugg

SEQ ID NO: 169639 - RNA, 19 nt, Human
uccaggcauccuucaggcu

SEQ ID NO: 169640 - RNA, 22 nt, Human
ucugcuucuccuacuucauggg

SEQ ID NO: 169641 - RNA, 22 nt, Human
uguuugcucugacuaucuugcg

SEQ ID NO: 169642 - RNA, 20 nt, Human
auuuggcaugaaguauugau

SEQ ID NO: 169643 - RNA, 22 nt, Human
aaaagcagagacucuggagcua

SEQ ID NO: 169644 - RNA, 22 nt, Human
cuccaggcucguccaagaucga

SEQ ID NO: 169645 - RNA, 22 nt, Human
gguuuaauggagauauuucaga

SEQ ID NO: 169646 - RNA, 22 nt, Human
ugaauaaucuuggguauuaaua

SEQ ID NO: 169647 - RNA, 22 nt, Human
uuccauacgacugaggucucgg

SEQ ID NO: 169648 - RNA, 22 nt, Human
gaaauauacaugaagucggcug

SEQ ID NO: 169649 - RNA, 22 nt, Human
guuagggaucaggaacaagagc

SEQ ID NO: 169650 - RNA, 22 nt, Human
cauuuguauguuccuccuuagg

SEQ ID NO: 169651 - RNA, 22 nt, Human
uggacauguaaaggcucaaggu

SEQ ID NO: 169652 - RNA, 22 nt, Human
uacuauaccauguaagauauga

SEQ ID NO: 169653 - RNA, 21 nt, Human
gaguccuuccaauguccucag

SEQ ID NO: 169654 - RNA, 22 nt, Human
uucagaaugugaccuuauuugg

SEQ ID NO: 169655 - RNA, 22 nt, Human
aguacaauuauauuuagauggu

SEQ ID NO: 169656 - RNA, 22 nt, Human
acuuccagcuagguucugcuaa

SEQ ID NO: 169657 - RNA, 22 nt, Human
ucugaagacauaugauauggug

SEQ ID NO: 169658 - RNA, 22 nt, Human
uaccaugucuucaauaagucua

SEQ ID NO: 169659 - RNA, 22 nt, Human
ugcaugaacggaggguaagcug

SEQ ID NO: 169660 - RNA, 22 nt, Human
caguccuuagauuuuacugcca

SEQ ID NO: 169661 - RNA, 22 nt, Human
uaugcuguggaaaauacaaaga

SEQ ID NO: 169662 - RNA, 22 nt, Human
cguccuuacagagggucacagc

SEQ ID NO: 169663 - RNA, 23 nt, Human
uaauucacauauacauugcuuca

SEQ ID NO: 169664 - RNA, 19 nt, Human
augcuuuauguuauuucuu

SEQ ID NO: 169665 - RNA, 22 nt, Human
gugcaaaaguaaaugugguuuu

SEQ ID NO: 169666 - RNA, 22 nt, Human
ccagggcaggagaaagacucac

SEQ ID NO: 169667 - RNA, 22 nt, Human
gugcaaaagcaguugugguuuu

SEQ ID NO: 169668 - RNA, 22 nt, Human
uucuggguaguaugguuaguuu

SEQ ID NO: 169669 - RNA, 22 nt, Human
uuacauguucucauacacagag

SEQ ID NO: 169670 - RNA, 22 nt, Human
cugggucuaaaaauucucagau

SEQ ID NO: 169671 - RNA, 22 nt, Human
ggcuuuauauuguuugagcaga

SEQ ID NO: 169672 - RNA, 22 nt, Human
uauggcuuuaaacaacuuaggu

SEQ ID NO: 169673 - RNA, 22 nt, Human
ugcaggugccucuugagcuugu

SEQ ID NO: 169674 - RNA, 22 nt, Human
uuacauguacugguuugacuua

SEQ ID NO: 169675 - RNA, 22 nt, Human
uuccucagcucagcgagagaga

SEQ ID NO: 169676 - RNA, 22 nt, Human
cuguuauuucugccaggugagu

SEQ ID NO: 169677 - RNA, 22 nt, Human
aagggcagcuuaaauugguagc

SEQ ID NO: 169678 - RNA, 22 nt, Human
uuugagguuagcuagcagauca

SEQ ID NO: 169679 - RNA, 22 nt, Human
ucaaaauuucagcacuagcccu

SEQ ID NO: 169680 - RNA, 22 nt, Human
gaggugucuagaucuaccagua

SEQ ID NO: 169681 - RNA, 22 nt, Human
agcuuuauauguuguuucucca

SEQ ID NO: 169682 - RNA, 22 nt, Human
ccauggcuuucuuucauuguaa

SEQ ID NO: 169683 - RNA, 17 nt, Human
uccuuucuuuaccuguu

SEQ ID NO: 169684 - RNA, 22 nt, Human
uuccuuagcagaccugguaucc

SEQ ID NO: 169685 - RNA, 22 nt, Human
agcugcaaagaucugucaguca

SEQ ID NO: 169686 - RNA, 22 nt, Human
uuauuauagauuaugcaagauu

SEQ ID NO: 169687 - RNA, 22 nt, Human
gacaggcuuugagucccagaac

SEQ ID NO: 169688 - RNA, 22 nt, Human
ucaaaggcauugccaauaagua

SEQ ID NO: 169689 - RNA, 22 nt, Human
guagaaauguaaccaggagaua

SEQ ID NO: 169690 - RNA, 22 nt, Human
aaucagaaauucuacaucacaa

SEQ ID NO: 169691 - RNA, 22 nt, Human
ucaggugugggcagagaaacca

SEQ ID NO: 169692 - RNA, 22 nt, Human
guguccugguuccuuguggcug

SEQ ID NO: 169693 - RNA, 22 nt, Human
ugguuuuagaugccuuuacugc

SEQ ID NO: 169694 - RNA, 22 nt, Human
aaaacuuucagggauacagaaa

SEQ ID NO: 169695 - RNA, 22 nt, Human
cagcuucuggcguggagccuga

SEQ ID NO: 169696 - RNA, 22 nt, Human
aacagacagaaaaaugugaucu

SEQ ID NO: 169697 - RNA, 22 nt, Human
ugccaaauugcccuauaaauga

SEQ ID NO: 169698 - RNA, 22 nt, Human
aagggcucuguugccauuucag

SEQ ID NO: 169699 - RNA, 22 nt, Human
aguugcuggcaccugugaguau

SEQ ID NO: 169700 - RNA, 22 nt, Human
ugucuuuagagucacaaaacca

SEQ ID NO: 169701 - RNA, 22 nt, Human
uguggcagcugcugcaggagcu

SEQ ID NO: 169702 - RNA, 22 nt, Human
cugggugagcuggccagagggu

SEQ ID NO: 169703 - RNA, 22 nt, Human
acacuuggagcaacacuuaugg

SEQ ID NO: 169704 - RNA, 22 nt, Human
uguacauuuagagcucaauaga

SEQ ID NO: 169705 - RNA, 22 nt, Human
cacagcauuaacugggacagcu

SEQ ID NO: 169706 - RNA, 22 nt, Human
uuuauucaucaucuguucauau

SEQ ID NO: 169707 - RNA, 22 nt, Human
agaagcuauaacaacaauuaua

SEQ ID NO: 169708 - RNA, 22 nt, Human
ucagguguguuguauuuuacca

SEQ ID NO: 169709 - RNA, 22 nt, Human
uuucucauuuagaguggcaggg

SEQ ID NO: 169710 - RNA, 22 nt, Human
uuaguacugauagggucaauca

SEQ ID NO: 169711 - RNA, 18 nt, Human
gccugcaggcacgggggu

SEQ ID NO: 169712 - RNA, 22 nt, Human
gccaggcacaguucuaggugcu

SEQ ID NO: 169713 - RNA, 22 nt, Human
acaggugugagaacaugccuug

SEQ ID NO: 169714 - RNA, 22 nt, Human
agauugaagacugguggagcug

SEQ ID NO: 169715 - RNA, 22 nt, Human
gucaaauauacuaagagguaaa

SEQ ID NO: 169716 - RNA, 20 nt, Human
uauuugaaauggccaagugu

SEQ ID NO: 169717 - RNA, 22 nt, Human
ccagcuuuuggggugacaauuu

SEQ ID NO: 169718 - RNA, 22 nt, Human
aggaaucagaauucuuagaauu

SEQ ID NO: 169719 - RNA, 22 nt, Human
aaugggauaggucuucaggaau

SEQ ID NO: 169720 - RNA, 22 nt, Human
uggcaaaguuuaucaggaauau

SEQ ID NO: 169721 - RNA, 22 nt, Human
agaauuucuggaagauugcaag

SEQ ID NO: 169722 - RNA, 22 nt, Human
auuauuaggacuacugggguug

SEQ ID NO: 169723 - RNA, 22 nt, Human
guaaugaaugaaagaaacuggg

SEQ ID NO: 169724 - RNA, 22 nt, Human
ucuuuaaugugauuguaauuau

SEQ ID NO: 169725 - RNA, 22 nt, Human
aguccugucaccucuacuuucg

SEQ ID NO: 169726 - RNA, 22 nt, Human
ugcagggacaggcucuggggau

SEQ ID NO: 169727 - RNA, 22 nt, Human
gcuuuuauugucuuuacgacga

SEQ ID NO: 169728 - RNA, 22 nt, Human
agauguuuguguuaucuccauu

SEQ ID NO: 169729 - RNA, 22 nt, Human
uuccaugacaccgagggaaguc

SEQ ID NO: 169730 - RNA, 22 nt, Human
uguaaaguuacuuuugaaagga

SEQ ID NO: 169731 - RNA, 22 nt, Human
uggcuuuacaucaaauugagua

SEQ ID NO: 169732 - RNA, 21 nt, Human
uggcagguucaaaggccuauc

SEQ ID NO: 169733 - RNA, 22 nt, Human
aaaugucuguaggggcugcagg

SEQ ID NO: 169734 - RNA, 22 nt, Human
uugaaucuauguauucagugua

SEQ ID NO: 169735 - RNA, 22 nt, Human
auuccaaagguuaaugcccauu

SEQ ID NO: 169736 - RNA, 22 nt, Human
acacauauucauauguacuuac

SEQ ID NO: 169737 - RNA, 22 nt, Human
acagagagaggcccgaggcugc

SEQ ID NO: 169738 - RNA, 22 nt, Human
cuggauccaacagaguuggguu

SEQ ID NO: 169739 - RNA, 22 nt, Human
gacaugugcugucucuuaaauu

SEQ ID NO: 169740 - RNA, 22 nt, Human
acagguguggggcugugguacu

SEQ ID NO: 169741 - RNA, 22 nt, Human
gcaggugguggggcuaugaucu

SEQ ID NO: 169742 - RNA, 22 nt, Human
guggcacaaggcuuacacagca

SEQ ID NO: 169743 - RNA, 22 nt, Human
aaggcuggcaauauauuuguua

SEQ ID NO: 169744 - RNA, 22 nt, Human
agcuuuaucacaauauuggcua

SEQ ID NO: 169745 - RNA, 22 nt, Human
acuuagauuuccuuacugggug

SEQ ID NO: 169746 - RNA, 22 nt, Human
aaucuagucuccuuaagucuuu

SEQ ID NO: 169747 - RNA, 22 nt, Human
ugagaugaauaacuccugcuaa

SEQ ID NO: 169748 - RNA, 22 nt, Human
guuucauuaccugacccaugag

SEQ ID NO: 169749 - RNA, 22 nt, Human
ugguguggggauaagcacucug

SEQ ID NO: 169750 - RNA, 22 nt, Human
caggacagugcagguccauccu

SEQ ID NO: 169751 - RNA, 22 nt, Human
uccugggucucuuccuuaguuc

SEQ ID NO: 169752 - RNA, 22 nt, Human
ccagaucuaaguccaaaguacu

SEQ ID NO: 169753 - RNA, 22 nt, Human
gagggcagugaauuuugaagcu

SEQ ID NO: 169754 - RNA, 22 nt, Human
uauugguagauggagagagaca

SEQ ID NO: 169755 - RNA, 22 nt, Human
guuccaaacaagucauaaagua

SEQ ID NO: 169756 - RNA, 22 nt, Human
uccugcaggccuguucccagua

SEQ ID NO: 169757 - RNA, 22 nt, Human
aauuucaaagcucacuggcaua

SEQ ID NO: 169758 - RNA, 22 nt, Human
ucagaauugucuggggaauguu

SEQ ID NO: 169759 - RNA, 22 nt, Human
uuauugaguuuacagcuuuaga

SEQ ID NO: 169760 - RNA, 22 nt, Human
aucagagauggcuccagugcuc

SEQ ID NO: 169761 - RNA, 22 nt, Human
ugcuagggauacaguggugaau

SEQ ID NO: 169762 - RNA, 22 nt, Human
acagcuuugggcaaugcuauga

SEQ ID NO: 169763 - RNA, 20 nt, Human
uugauucccucuaaacucgc

SEQ ID NO: 169764 - RNA, 22 nt, Human
agacgagggcccccaggacagc

SEQ ID NO: 169765 - RNA, 22 nt, Human
ucuucuucccaucccucaaaug

SEQ ID NO: 169766 - RNA, 22 nt, Human
uggugggggaggcugucuagca

SEQ ID NO: 169767 - RNA, 22 nt, Human
acccagcuggaugcauggaggc

SEQ ID NO: 169768 - RNA, 19 nt, Human
ucagggcaguccggucccc

SEQ ID NO: 169769 - RNA, 22 nt, Human
augcuacuauccuucugcuuaa

SEQ ID NO: 169770 - RNA, 22 nt, Human
ugcuggcuuuuugguccuugcu

SEQ ID NO: 169771 - RNA, 22 nt, Human
aaauuuaaggaggugcucacuu

SEQ ID NO: 169772 - RNA, 22 nt, Human
gcugggucucucccugguccug

SEQ ID NO: 169773 - RNA, 22 nt, Human
cagagcaugaauaaaaguuaca

SEQ ID NO: 169774 - RNA, 22 nt, Human
gagccuccuccuggugugccga

SEQ ID NO: 169775 - RNA, 22 nt, Human
ucuuaaagagcgcaauuugagg

SEQ ID NO: 169776 - RNA, 22 nt, Human
caguaaaagauggaaauagaau

SEQ ID NO: 169777 - RNA, 22 nt, Human
ugcuuuauugcaucaguguggg

SEQ ID NO: 169778 - RNA, 22 nt, Human
acaugcuuugcacuuacaucau

SEQ ID NO: 169779 - RNA, 22 nt, Human
caauguaucaaccagaaaguuc

SEQ ID NO: 169780 - RNA, 22 nt, Human
aagugguuugagcacagugcug

SEQ ID NO: 169781 - RNA, 22 nt, Human
ucagcaaaggaccagcacaggc

SEQ ID NO: 169782 - RNA, 20 nt, Human
aaguuacauuguauuguacc

SEQ ID NO: 169783 - RNA, 22 nt, Human
aagcaauauacugauaugauua

SEQ ID NO: 169784 - RNA, 22 nt, Human
cacaauuuccaagucauguuau

SEQ ID NO: 169785 - RNA, 22 nt, Human
augcuauacauaugacaucaca

SEQ ID NO: 169786 - RNA, 22 nt, Human
uuauugcuauggugagagggau

SEQ ID NO: 169787 - RNA, 22 nt, Human
uacuagaaauuaccuucucacu

SEQ ID NO: 169788 - RNA, 22 nt, Human
ucuguacuuccuuuaaacuuua

SEQ ID NO: 169789 - RNA, 22 nt, Human
agagccaggugcugcuguuuga

SEQ ID NO: 169790 - RNA, 22 nt, Human
uuccuggggcgacuguaucuga

SEQ ID NO: 169791 - RNA, 22 nt, Human
aaggcauaugcauagaagacag

SEQ ID NO: 169792 - RNA, 22 nt, Human
agccagucggggccaugcuggg

SEQ ID NO: 169793 - RNA, 20 nt, Human
uuucuguaaggcauuaaucu

SEQ ID NO: 169794 - RNA, 22 nt, Human
uccagacccaugacccugggga

SEQ ID NO: 169795 - RNA, 22 nt, Human
acagcauugagagcuaaauuua

SEQ ID NO: 169796 - RNA, 22 nt, Human
aaauagcagccuuuaguuaaca

SEQ ID NO: 169797 - RNA, 22 nt, Human
gcuucacacuaaaaauguuaaa

SEQ ID NO: 169798 - RNA, 22 nt, Human
uuuaggcaauagauggcagugu

SEQ ID NO: 169799 - RNA, 22 nt, Human
uguacaauggcuauaauacccu

SEQ ID NO: 169800 - RNA, 21 nt, Human
gcugcaaauucuaacaauuau

SEQ ID NO: 169801 - RNA, 22 nt, Human
agcagggcugugcuccuuccga

SEQ ID NO: 169802 - RNA, 22 nt, Human
ucagguguuagaagaaauuuca

SEQ ID NO: 169803 - RNA, 22 nt, Human
auuuggaaacaauuauauucuu

SEQ ID NO: 169804 - RNA, 22 nt, Human
uccuggauuaauagggagcugu

SEQ ID NO: 169805 - RNA, 22 nt, Human
uccuggaucuacucucaauugg

SEQ ID NO: 169806 - RNA, 22 nt, Human
ugaaugaugcaguauaaugaua

SEQ ID NO: 169807 - RNA, 18 nt, Human
uuggcuuugagaacuggu

SEQ ID NO: 169808 - RNA, 22 nt, Human
cuucauuggcuuccauagaugc

SEQ ID NO: 169809 - RNA, 22 nt, Human
caugaguucaucugcuucucuu

SEQ ID NO: 169810 - RNA, 22 nt, Human
uuucaguuuccagcuuugucau

SEQ ID NO: 169811 - RNA, 22 nt, Human
ugcaggugaaaauuaugaggau

SEQ ID NO: 169812 - RNA, 22 nt, Human
uauggcuugucuuuauaccagg

SEQ ID NO: 169813 - RNA, 22 nt, Human
agaauaaucacugaaguucaaa

SEQ ID NO: 169814 - RNA, 22 nt, Human
gacccaggcccaaggcugccag

SEQ ID NO: 169815 - RNA, 22 nt, Human
ugcuuuauuuauaaaauagcaa

SEQ ID NO: 169816 - RNA, 22 nt, Human
ugggcagguuguuauuugacau

SEQ ID NO: 169817 - RNA, 22 nt, Human
aagagagggacuuauuaaaguc

SEQ ID NO: 169818 - RNA, 22 nt, Human
ucucacagugcaggucugucuc

SEQ ID NO: 169819 - RNA, 22 nt, Human
gcagcuuucuaagcuuuauugc

SEQ ID NO: 169820 - RNA, 22 nt, Human
caggugguuccauguuucauga

SEQ ID NO: 169821 - RNA, 22 nt, Human
cuauuaggcuuccauuucaugc

SEQ ID NO: 169822 - RNA, 22 nt, Human
ugcagggcuuccucuuggaguu

SEQ ID NO: 169823 - RNA, 22 nt, Human
cagagaaagaagcccauucauu

SEQ ID NO: 169824 - RNA, 23 nt, Human
ccaaagucgaagucuaguccaga

SEQ ID NO: 169825 - RNA, 22 nt, Human
uacaugaaccuuuaugugugau

SEQ ID NO: 169826 - RNA, 22 nt, Human
ugacauguguaaucagcuccgu

SEQ ID NO: 169827 - RNA, 22 nt, Human
auucuucaucacuaccuuguga

SEQ ID NO: 169828 - RNA, 22 nt, Human
ucaaggagcccacagucuaaug

SEQ ID NO: 169829 - RNA, 22 nt, Human
uggaggaaguugcuggaaguca

SEQ ID NO: 169830 - RNA, 22 nt, Human
ggauuuccucuugacucuaaag

SEQ ID NO: 169831 - RNA, 22 nt, Human
cauguacaaaaggcaaaugccu

SEQ ID NO: 169832 - RNA, 22 nt, Human
ugcaggugcugugucaagagag

SEQ ID NO: 169833 - RNA, 22 nt, Human
ccugcaggcugcaggccaguuc

SEQ ID NO: 169834 - RNA, 22 nt, Human
gagggcucuaccaaguaacucu

SEQ ID NO: 169835 - RNA, 22 nt, Human
guacagaaggagcuuuggauuc

SEQ ID NO: 169836 - RNA, 22 nt, Human
uugcugaucugaaacguuacug

SEQ ID NO: 169837 - RNA, 22 nt, Human
acagggcauuuccucuaugugu

SEQ ID NO: 169838 - RNA, 22 nt, Human
gacucguucauaguuccaauuu

SEQ ID NO: 169839 - RNA, 22 nt, Human
uuugacucagcaaauucacagg

SEQ ID NO: 169840 - RNA, 22 nt, Human
gggagcauuucccuguguugaa

SEQ ID NO: 169841 - RNA, 22 nt, Human
caucagaauguuagagaaggga

SEQ ID NO: 169842 - RNA, 22 nt, Human
aaucagaacuucucaggguggg

SEQ ID NO: 169843 - RNA, 22 nt, Human
gcagcuuucuuuuugcaugucu

SEQ ID NO: 169844 - RNA, 22 nt, Human
caguguuucugaguuccagcuc

SEQ ID NO: 169845 - RNA, 21 nt, Human
uuuuauugaugaauggccacu

SEQ ID NO: 169846 - RNA, 17 nt, Human
uaggugguugcuggucu

SEQ ID NO: 169847 - RNA, 22 nt, Human
uuuucaguuccaucucugcucu

SEQ ID NO: 169848 - RNA, 22 nt, Human
ugcuuaaacccugaucaugugu

SEQ ID NO: 169849 - RNA, 22 nt, Human
aaaauguaaagcuugaguguag

SEQ ID NO: 169850 - RNA, 22 nt, Human
auauauuugagaauauucauga

SEQ ID NO: 169851 - RNA, 22 nt, Human
uuugaagugcaaugaggauucu

SEQ ID NO: 169852 - RNA, 22 nt, Human
uaguuaggaauagcagcgacuc

SEQ ID NO: 169853 - RNA, 22 nt, Human
gagaggcugaaaucacaggagc

SEQ ID NO: 169854 - RNA, 22 nt, Human
gcuuccuuccuuacauuggugg

SEQ ID NO: 169855 - RNA, 22 nt, Human
uuuccucugucaugacagcuga

SEQ ID NO: 169856 - RNA, 21 nt, Human
agcugcaagagcaacaucuuu

SEQ ID NO: 169857 - RNA, 22 nt, Human
agggcuccuaugccccauggac

SEQ ID NO: 169858 - RNA, 22 nt, Human
acaacauuauacauagaaagcu

SEQ ID NO: 169859 - RNA, 22 nt, Human
ccuuccagaguucagucugccc

SEQ ID NO: 169860 - RNA, 22 nt, Human
gucuggccugccagcucuggug

SEQ ID NO: 169861 - RNA, 22 nt, Human
auuuucagagacaucuggacuu

SEQ ID NO: 169862 - RNA, 22 nt, Human
gauggaaugaauggcagauaca

SEQ ID NO: 169863 - RNA, 16 nt, Human
ccagguggggcuguga

SEQ ID NO: 169864 - RNA, 22 nt, Human
gagggcagaaaauuaugcggug

SEQ ID NO: 169865 - RNA, 22 nt, Human
aaugguauuugucaagcauagu

SEQ ID NO: 169866 - RNA, 22 nt, Human
aagauucagccaaauuguucau

SEQ ID NO: 169867 - RNA, 22 nt, Human
auuuccaugaaguuuaguuaua

SEQ ID NO: 169868 - RNA, 22 nt, Human
cccaggcagucuggcucuaaag

SEQ ID NO: 169869 - RNA, 22 nt, Human
uuggaggaugcaaugagggagu

SEQ ID NO: 169870 - RNA, 22 nt, Human
ugcagggcuauaacuccauucu

SEQ ID NO: 169871 - RNA, 22 nt, Human
cagcaugaauguguucguaggg

SEQ ID NO: 169872 - RNA, 22 nt, Human
cuuugcaaacgauuaccacaug

SEQ ID NO: 169873 - RNA, 22 nt, Human
uggaaauguauuugggcaugcc

SEQ ID NO: 169874 - RNA, 22 nt, Human
cgcaccacugaauuccagccug

SEQ ID NO: 169875 - RNA, 22 nt, Human
gaagggagaagguugggugacg

SEQ ID NO: 169876 - RNA, 22 nt, Human
ucuuuccucugagcuccuguag

SEQ ID NO: 169877 - RNA, 22 nt, Human
gcaugugucccucagucugugc

SEQ ID NO: 169878 - RNA, 20 nt, Human
guauuacaggcuuagaacca

SEQ ID NO: 169879 - RNA, 23 nt, Human
uacuauaacgcugugucagcucc

SEQ ID NO: 169880 - RNA, 22 nt, Human
acauaauagguaccugaauaau

SEQ ID NO: 169881 - RNA, 22 nt, Human
gcaaggauguacugcaauagga

SEQ ID NO: 169882 - RNA, 22 nt, Human
gaucuucuagcagaaguaauuu

SEQ ID NO: 169883 - RNA, 19 nt, Human
gcaggugugaauccguaga

SEQ ID NO: 169884 - RNA, 22 nt, Human
ccagcuuuuagugggcuuauua

SEQ ID NO: 169885 - RNA, 22 nt, Human
uguccuggaaaaauggagaguu

SEQ ID NO: 169886 - RNA, 22 nt, Human
guagggacccacagucuauauu

SEQ ID NO: 169887 - RNA, 22 nt, Human
agaaaguuuugugcuauauaug

SEQ ID NO: 169888 - RNA, 22 nt, Human
aggcucagccugggccuagagc

SEQ ID NO: 169889 - RNA, 22 nt, Human
cauuuccacuucugaaaacugg

SEQ ID NO: 169890 - RNA, 22 nt, Human
agcccuaacucccaguaucuug

SEQ ID NO: 169891 - RNA, 22 nt, Human
ugcuggagugcaguggcuuaac

SEQ ID NO: 169892 - RNA, 22 nt, Human
guuaucaugcuucaucaucacu

SEQ ID NO: 169893 - RNA, 22 nt, Human
uaucauuuaacagaaucauugc

SEQ ID NO: 169894 - RNA, 22 nt, Human
aaugugaaaccgcacagaauaa

SEQ ID NO: 169895 - RNA, 22 nt, Human
acuucacacagcaaauuuaucu

SEQ ID NO: 169896 - RNA, 22 nt, Human
acuggaucuaauugguuauagu

SEQ ID NO: 169897 - RNA, 21 nt, Human
gacaggugauucagagcaggg

SEQ ID NO: 169898 - RNA, 22 nt, Human
uggcaggugccaugggcucaga

SEQ ID NO: 169899 - RNA, 22 nt, Human
auguaccucugcauuccugccu

SEQ ID NO: 169900 - RNA, 22 nt, Human
uuaugggagcaauuggggaggu

SEQ ID NO: 169901 - RNA, 22 nt, Human
gcagguggucacucauccccag

SEQ ID NO: 169902 - RNA, 22 nt, Human
gccaggcauuauuccgaucccu

SEQ ID NO: 169903 - RNA, 22 nt, Human
guuugaaugcaguaugcauuuu

SEQ ID NO: 169904 - RNA, 21 nt, Human
uagggcucuauuuuuauuuca

SEQ ID NO: 169905 - RNA, 22 nt, Human
aaggcauaugcuguguacaguu

SEQ ID NO: 169906 - RNA, 22 nt, Human
cuggcccucggaguccagcugc

SEQ ID NO: 169907 - RNA, 22 nt, Human
cagcaugaaaaguguugcuauc

SEQ ID NO: 169908 - RNA, 22 nt, Human
ugucugggagggacagggcuac

SEQ ID NO: 169909 - RNA, 20 nt, Human
auguccagugacuggaccau

SEQ ID NO: 169910 - RNA, 22 nt, Human
guuucuuuugugaucaccaacc

SEQ ID NO: 169911 - RNA, 22 nt, Human
auuuuacuacuccaauuaauga

SEQ ID NO: 169912 - RNA, 22 nt, Human
uuuuugaaggcugaugugauua

SEQ ID NO: 169913 - RNA, 22 nt, Human
uccugcagcugauaaauacagu

SEQ ID NO: 169914 - RNA, 22 nt, Human
ucuuauugugaugaugaagaac

SEQ ID NO: 169915 - RNA, 22 nt, Human
uaguccuugguaaaauucuaug

SEQ ID NO: 169916 - RNA, 22 nt, Human
ucugugcaggaagucauuauga

SEQ ID NO: 169917 - RNA, 22 nt, Human
aauugcaauuuucuuaaggucu

SEQ ID NO: 169918 - RNA, 23 nt, Human
ugguggcagaaguagcagaugac

SEQ ID NO: 169919 - RNA, 22 nt, Human
cuucuucagcacaauauugaug

SEQ ID NO: 169920 - RNA, 22 nt, Human
uuucuuagcgaugcuugauaaa

SEQ ID NO: 169921 - RNA, 22 nt, Human
ccacaggcugcugcaggucccg

SEQ ID NO: 169922 - RNA, 22 nt, Human
gaggugucaggguagucaugau

SEQ ID NO: 169923 - RNA, 22 nt, Human
cuauuacauuucuggacauuca

SEQ ID NO: 169924 - RNA, 22 nt, Human
ucuaauccuugcuaccugggug

SEQ ID NO: 169925 - RNA, 22 nt, Human
gacuuuaugaagagaugaccaa

SEQ ID NO: 169926 - RNA, 22 nt, Human
gaagucuucauucucucugaga

SEQ ID NO: 169927 - RNA, 21 nt, Human
uuucugaaggcaacaucuauc

SEQ ID NO: 169928 - RNA, 22 nt, Human
ucagggcagccuaaggcaccuc

SEQ ID NO: 169929 - RNA, 22 nt, Human
auaguuugugaaacacagcagu

SEQ ID NO: 169930 - RNA, 22 nt, Human
agggaccucuucuugcagcuga

SEQ ID NO: 169931 - RNA, 22 nt, Human
gagagacagcacacaguguggg

SEQ ID NO: 169932 - RNA, 22 nt, Human
agcagggcagcugaugcgcacg

SEQ ID NO: 169933 - RNA, 22 nt, Human
aguccuuaugugguggagagag

SEQ ID NO: 169934 - RNA, 22 nt, Human
uuuuauguuccucuuuaugcga

SEQ ID NO: 169935 - RNA, 22 nt, Human
caaauaguaugagcaaugauuc

SEQ ID NO: 169936 - RNA, 22 nt, Human
caccugccugcaggggcuccac

SEQ ID NO: 169937 - RNA, 18 nt, Human
uacuuuauucccccucca

SEQ ID NO: 169938 - RNA, 22 nt, Human
uguuucaaagaaagaaaauaua

SEQ ID NO: 169939 - RNA, 22 nt, Human
ggggcaggagcccuucuucagc

SEQ ID NO: 169940 - RNA, 22 nt, Human
uggcuuuaaaucuguauucaua

SEQ ID NO: 169941 - RNA, 20 nt, Human
cuugguggcucugggaagug

SEQ ID NO: 169942 - RNA, 22 nt, Human
ugcagggccuuguugaugugcu

SEQ ID NO: 169943 - RNA, 22 nt, Human
uucuuuucuuuaggcauugugu

SEQ ID NO: 169944 - RNA, 22 nt, Human
aagauuuauuagaugcuuaccu

SEQ ID NO: 169945 - RNA, 20 nt, Human
ugcagguguguccaagcacu

SEQ ID NO: 169946 - RNA, 22 nt, Human
cagcuucuucaguccuggagcu

SEQ ID NO: 169947 - RNA, 22 nt, Human
aggaccugacauuguguuuucu

SEQ ID NO: 169948 - RNA, 22 nt, Human
gaaauuuauuaucuacaucauu

SEQ ID NO: 169949 - RNA, 22 nt, Human
ugcaggugcugauaccuacucc

SEQ ID NO: 169950 - RNA, 22 nt, Human
acaguccuuguguggaacauua

SEQ ID NO: 169951 - RNA, 22 nt, Human
aauauugagaaccagcauguuu

SEQ ID NO: 169952 - RNA, 22 nt, Human
gggcaggugauuuuggcuccau

SEQ ID NO: 169953 - RNA, 22 nt, Human
uugauuucuuacucuuccaagg

SEQ ID NO: 169954 - RNA, 22 nt, Human
aguugcagacgcagagauguug

SEQ ID NO: 169955 - RNA, 23 nt, Human
uugcugccugagccuuccucugg

SEQ ID NO: 169956 - RNA, 22 nt, Human
auuuauuauugugguuacuucu

SEQ ID NO: 169957 - RNA, 22 nt, Human
ccugggucuggucacuaaguca

SEQ ID NO: 169958 - RNA, 22 nt, Human
uugaacauuggcaauuucauau

SEQ ID NO: 169959 - RNA, 22 nt, Human
ucauagaagcaccagaagauau

SEQ ID NO: 169960 - RNA, 23 nt, Human
acaacuuuacagauacauuuugu

SEQ ID NO: 169961 - RNA, 22 nt, Human
uuccuuaggggacagggggaua

SEQ ID NO: 169962 - RNA, 22 nt, Human
uuuacagagagagaacuggacu

SEQ ID NO: 169963 - RNA, 22 nt, Human
gcaaggaccuuugagcgugcca

SEQ ID NO: 169964 - RNA, 22 nt, Human
gcugggaagugcaagaucaagg

SEQ ID NO: 169965 - RNA, 22 nt, Human
auguucuacagauggaaagggg

SEQ ID NO: 169966 - RNA, 22 nt, Human
uuguguccuaacaucuaguuaa

SEQ ID NO: 169967 - RNA, 20 nt, Human
gaaguccuuucacucuuccc

SEQ ID NO: 169968 - RNA, 22 nt, Human
uaaagccaacacuuuacugcuc

SEQ ID NO: 169969 - RNA, 22 nt, Human
gauugcuguucccagggggcug

SEQ ID NO: 169970 - RNA, 22 nt, Human
cuuuauguucaguacaaugcuu

SEQ ID NO: 169971 - RNA, 22 nt, Human
ccagcaugagacgaugaugaag

SEQ ID NO: 169972 - RNA, 22 nt, Human
auuaucuauguagaaugauuuu

SEQ ID NO: 169973 - RNA, 22 nt, Human
agcugcaggauuauggaaugga

SEQ ID NO: 169974 - RNA, 22 nt, Human
cugaaagaauaagauguuuaca

SEQ ID NO: 169975 - RNA, 22 nt, Human
uuaaauauuauguugucugcaa

SEQ ID NO: 169976 - RNA, 22 nt, Human
acuuccuugucaggugcaucau

SEQ ID NO: 169977 - RNA, 22 nt, Human
uggaaugagcuggcuaauaacc

SEQ ID NO: 169978 - RNA, 22 nt, Human
aucauaaagugcuaucugauug

SEQ ID NO: 169979 - RNA, 22 nt, Human
ggcagguggaaguuggcagagc

SEQ ID NO: 169980 - RNA, 22 nt, Human
guucuaauuuggggcuccuuag

SEQ ID NO: 169981 - RNA, 22 nt, Human
cuggggugucucgucugccauu

SEQ ID NO: 169982 - RNA, 22 nt, Human
agcagggcuuugcagacuuggg

SEQ ID NO: 169983 - RNA, 22 nt, Human
aauguaaacagcaagagaaggg

SEQ ID NO: 169984 - RNA, 22 nt, Human
uuccauuuauucuuguccagau

SEQ ID NO: 169985 - RNA, 22 nt, Human
aggaccugacuggcuccugcuu

SEQ ID NO: 169986 - RNA, 22 nt, Human
uaucuaaaggauuuaauuuagu

SEQ ID NO: 169987 - RNA, 22 nt, Human
aagaaaucauaucauuucuugg

SEQ ID NO: 169988 - RNA, 22 nt, Human
aauguucagaggacaauauaaa

SEQ ID NO: 169989 - RNA, 22 nt, Human
aaauguuucuacuugugagcau

SEQ ID NO: 169990 - RNA, 22 nt, Human
uguuccugguuccugcaugaug

SEQ ID NO: 169991 - RNA, 22 nt, Human
cuguuguauuauucaauauuau

SEQ ID NO: 169992 - RNA, 20 nt, Human
ucauguguguccuacagaga

SEQ ID NO: 169993 - RNA, 22 nt, Human
caguuuauagcucuagcagcuu

SEQ ID NO: 169994 - RNA, 22 nt, Human
uggcagguggcacagccuggga

SEQ ID NO: 169995 - RNA, 22 nt, Human
caggacugauguuccuccagcc

SEQ ID NO: 169996 - RNA, 22 nt, Human
uuucuaggcacagugucuuccc

SEQ ID NO: 169997 - RNA, 22 nt, Human
ucaauaauggcaggauaaauuu

SEQ ID NO: 169998 - RNA, 22 nt, Human
acauguaaaaggaacaugcaug

SEQ ID NO: 169999 - RNA, 22 nt, Human
ccuuccuuucagggcuaugccu

SEQ ID NO: 170000 - RNA, 22 nt, Human
aauuccagaggaggacaguccu

SEQ ID NO: 170001 - RNA, 21 nt, Human
ccuguucacagaucuguaacu

SEQ ID NO: 170002 - RNA, 22 nt, Human
cagaauaaagguacaauugagu

SEQ ID NO: 170003 - RNA, 22 nt, Human
ggcaggugcuaagagagguaaa

SEQ ID NO: 170004 - RNA, 22 nt, Human
ucauugccauggcauuugcaga

SEQ ID NO: 170005 - RNA, 22 nt, Human
cccugcagagaccacugaccuu

SEQ ID NO: 170006 - RNA, 22 nt, Human
uguaacaauuucuuacuauugu

SEQ ID NO: 170007 - RNA, 22 nt, Human
ugcuggguguuccgcacuugac

SEQ ID NO: 170008 - RNA, 22 nt, Human
caagaugugccuaaucagaccu

SEQ ID NO: 170009 - RNA, 22 nt, Human
aaacacauuagcccuguggaaa

SEQ ID NO: 170010 - RNA, 18 nt, Human
cccagcuuagcgccccuc

SEQ ID NO: 170011 - RNA, 23 nt, Human
uuuaacuuuccaauaauucauug

SEQ ID NO: 170012 - RNA, 22 nt, Human
uaauuuuacuuccugagcaccu

SEQ ID NO: 170013 - RNA, 22 nt, Human
uuucauugagaauauaagauuu

SEQ ID NO: 170014 - RNA, 22 nt, Human
auggcauuauagcaaugguuug

SEQ ID NO: 170015 - RNA, 22 nt, Human
gguuucaaaguggacaguuagu

SEQ ID NO: 170016 - RNA, 22 nt, Human
cagcaggugucuagcaaggguc

SEQ ID NO: 170017 - RNA, 22 nt, Human
uaaacauguugacaucuuaccu

SEQ ID NO: 170018 - RNA, 23 nt, Human
aaauaggaguaucuggaucauga

SEQ ID NO: 170019 - RNA, 22 nt, Human
agauuuacugagaacugauuac

SEQ ID NO: 170020 - RNA, 22 nt, Human
ugcagguggcagcggggcacca

SEQ ID NO: 170021 - RNA, 22 nt, Human
uuuaauauucugcauucuccuu

SEQ ID NO: 170022 - RNA, 22 nt, Human
uggagcagcucuagcgggcgcc

SEQ ID NO: 170023 - RNA, 22 nt, Human
uaguaucuauuaguaacaagag

SEQ ID NO: 170024 - RNA, 22 nt, Human
ugcacacacucugcauauacuu

SEQ ID NO: 170025 - RNA, 22 nt, Human
uggaccugagccuggcccugcc

SEQ ID NO: 170026 - RNA, 22 nt, Human
uucauacucacuccaauaacug

SEQ ID NO: 170027 - RNA, 22 nt, Human
cagcaugauuggugucugguga

SEQ ID NO: 170028 - RNA, 23 nt, Human
uuuauccaacucuguaaucucuc

SEQ ID NO: 170029 - RNA, 22 nt, Human
aaacuuucauguaucucuuuca

SEQ ID NO: 170030 - RNA, 22 nt, Human
gugguaucugucucccccacug

SEQ ID NO: 170031 - RNA, 22 nt, Human
gcauguguucuugaaaggccac

SEQ ID NO: 170032 - RNA, 22 nt, Human
ugagggaguuggguguauagga

SEQ ID NO: 170033 - RNA, 23 nt, Human
uuguccugccgaucucugagaau

SEQ ID NO: 170034 - RNA, 22 nt, Human
ccagggcauccucacaucgcag

SEQ ID NO: 170035 - RNA, 22 nt, Human
uguaacaaaauaccuuggauug

SEQ ID NO: 170036 - RNA, 22 nt, Human
acagaacugggggcacagauag

SEQ ID NO: 170037 - RNA, 22 nt, Human
aggagcugugaaugggaggggu

SEQ ID NO: 170038 - RNA, 22 nt, Human
cuguggaaggccuguccugaaa

SEQ ID NO: 170039 - RNA, 22 nt, Human
uuucaaacauaucuucauuacu

SEQ ID NO: 170040 - RNA, 23 nt, Human
uguccuuuuugaggccuccuccu

SEQ ID NO: 170041 - RNA, 22 nt, Human
ccuguucagagcuaagcaucau

SEQ ID NO: 170042 - RNA, 22 nt, Human
uaaauuaugucacaugacucug

SEQ ID NO: 170043 - RNA, 22 nt, Human
ggcaggcaaugaggaugggaag

SEQ ID NO: 170044 - RNA, 22 nt, Human
ggucaaagggugagauggcagg

SEQ ID NO: 170045 - RNA, 23 nt, Human
gagauuuagcagacaaagcucuu

SEQ ID NO: 170046 - RNA, 22 nt, Human
agucaccauuuucaccugccuc

SEQ ID NO: 170047 - RNA, 20 nt, Human
aaacauucauguacaaguga

SEQ ID NO: 170048 - RNA, 22 nt, Human
cuuaauuucaaacugcuaguga

SEQ ID NO: 170049 - RNA, 22 nt, Human
uuuaaauuauaguuaaugucug

SEQ ID NO: 170050 - RNA, 22 nt, Human
uuuaauuuucugggcccagcag

SEQ ID NO: 170051 - RNA, 22 nt, Human
aggcuucugcugauauuucauu

SEQ ID NO: 170052 - RNA, 22 nt, Human
aagugguuugauucaguuuaug

SEQ ID NO: 170053 - RNA, 22 nt, Human
agcaucuggcagaaagucagaa

SEQ ID NO: 170054 - RNA, 22 nt, Human
gauagaaagguguugaaaucca

SEQ ID NO: 170055 - RNA, 22 nt, Human
gguacaaugucuuacagaccca

SEQ ID NO: 170056 - RNA, 22 nt, Human
uaauuucaaguuuagggcucua

SEQ ID NO: 170057 - RNA, 22 nt, Human
gcacccagagggcagggucucc

SEQ ID NO: 170058 - RNA, 22 nt, Human
gaggaggaaaggaguugaaaug

SEQ ID NO: 170059 - RNA, 22 nt, Human
ccagcuuuucagaaucugccug

SEQ ID NO: 170060 - RNA, 22 nt, Human
uaguuaggguucugcagagaca

SEQ ID NO: 170061 - RNA, 22 nt, Human
auuaggcauauaugcuuuuaau

SEQ ID NO: 170062 - RNA, 22 nt, Human
aaguuucaugauguaauuauug

SEQ ID NO: 170063 - RNA, 22 nt, Human
uggaauguugauaaacauaggc

SEQ ID NO: 170064 - RNA, 20 nt, Human
agguauaagaaaugugauuu

SEQ ID NO: 170065 - RNA, 22 nt, Human
auaauauaauccuacuucccau

SEQ ID NO: 170066 - RNA, 21 nt, Human
agaugaggauacugaggccua

SEQ ID NO: 170067 - RNA, 22 nt, Human
ucagaagccaccuuuuguuggg

SEQ ID NO: 170068 - RNA, 22 nt, Human
uugguggagucauuggcauaug

SEQ ID NO: 170069 - RNA, 22 nt, Human
uggcaggugaaguuguuaggga

SEQ ID NO: 170070 - RNA, 22 nt, Human
uuccaggacuggguguuugaag

SEQ ID NO: 170071 - RNA, 22 nt, Human
auccuucuaagagggacguaug

SEQ ID NO: 170072 - RNA, 22 nt, Human
ggcaggugguaaggauuucaua

SEQ ID NO: 170073 - RNA, 20 nt, Human
cacaggcuuacaguuuagau

SEQ ID NO: 170074 - RNA, 22 nt, Human
augaacaauaaaauagaucaca

SEQ ID NO: 170075 - RNA, 21 nt, Human
aagaguggcugaggaggugau

SEQ ID NO: 170076 - RNA, 22 nt, Human
aaccccgcucaggcugggugag

SEQ ID NO: 170077 - RNA, 22 nt, Human
acaaagucaaauugcagccgcc

SEQ ID NO: 170078 - RNA, 22 nt, Human
uuucuucaauugcuaacaagga

SEQ ID NO: 170079 - RNA, 23 nt, Human
gggcagguuuuuauaggcuucag

SEQ ID NO: 170080 - RNA, 22 nt, Human
cccagugucauucuaagggagg

SEQ ID NO: 170081 - RNA, 22 nt, Human
ugggccaggggccucuucugau

SEQ ID NO: 170082 - RNA, 22 nt, Human
auuugcugagcucaaagaaaag

SEQ ID NO: 170083 - RNA, 22 nt, Human
cagauuucuauuucaaauacau

SEQ ID NO: 170084 - RNA, 22 nt, Human
uugcagggucccagaggccugg

SEQ ID NO: 170085 - RNA, 22 nt, Human
auguccucggcucugugcugcu

SEQ ID NO: 170086 - RNA, 21 nt, Human
caaguccuuugccaaagugcu

SEQ ID NO: 170087 - RNA, 22 nt, Human
uaaaaugccagaccaguucacg

SEQ ID NO: 170088 - RNA, 22 nt, Human
acuggaggauuccuggaaggcg

SEQ ID NO: 170089 - RNA, 22 nt, Human
aguccuuacaccuggaaccuau

SEQ ID NO: 170090 - RNA, 22 nt, Human
agaggccggccgagcccauggg

SEQ ID NO: 170091 - RNA, 22 nt, Human
uccaauauggauaaaaggggcc

SEQ ID NO: 170092 - RNA, 22 nt, Human
cauaaaauggcuuguucuuuaa

SEQ ID NO: 170093 - RNA, 22 nt, Human
aaggugguaauagugcaggauu

SEQ ID NO: 170094 - RNA, 22 nt, Human
ccagggcaauuauuuggagggu

SEQ ID NO: 170095 - RNA, 22 nt, Human
agggcuccuccccggccuccac

SEQ ID NO: 170096 - RNA, 22 nt, Human
aaauacugucucugagagagcc

SEQ ID NO: 170097 - RNA, 22 nt, Human
cugggucugggccuccuggagu

SEQ ID NO: 170098 - RNA, 22 nt, Human
cuuucuuauaccugucagggcc

SEQ ID NO: 170099 - RNA, 22 nt, Human
aggcagggaccaguuguuuucu

SEQ ID NO: 170100 - RNA, 22 nt, Human
ggcagguggauuuucuacucua

SEQ ID NO: 170101 - RNA, 22 nt, Human
aacuugguaaauugugucagau

SEQ ID NO: 170102 - RNA, 23 nt, Human
cguguccuucagggagagugugg

SEQ ID NO: 170103 - RNA, 22 nt, Human
gccuuaauuuuuuauaaucucu

SEQ ID NO: 170104 - RNA, 19 nt, Human
cuggaauguggcuggugca

SEQ ID NO: 170105 - RNA, 22 nt, Human
aggauuuaucaggaacucucuu

SEQ ID NO: 170106 - RNA, 22 nt, Human
ugacauguaagauggaaaagcg

SEQ ID NO: 170107 - RNA, 20 nt, Human
ucuggccccuuccuguccug

SEQ ID NO: 170108 - RNA, 22 nt, Human
ggagcaguuguugagcaagcca

SEQ ID NO: 170109 - RNA, 22 nt, Human
uuuauccaguguuggaauuuuu

SEQ ID NO: 170110 - RNA, 22 nt, Human
uuggaauucaaguuguagcuua

SEQ ID NO: 170111 - RNA, 22 nt, Human
aaauggauggaaagcaauuuuu

SEQ ID NO: 170112 - RNA, 18 nt, Human
ccauggcucccuccugcc

SEQ ID NO: 170113 - RNA, 22 nt, Human
caaaaguucucacccagacaug

SEQ ID NO: 170114 - RNA, 20 nt, Human
cccaggcagagcuagcggca

SEQ ID NO: 170115 - RNA, 22 nt, Human
aucagagaaguuucacuggcau

SEQ ID NO: 170116 - RNA, 22 nt, Human
ugucuuuagaaagaagcagaca

SEQ ID NO: 170117 - RNA, 22 nt, Human
gacuuuauuuuaacggagauuc

SEQ ID NO: 170118 - RNA, 22 nt, Human
ucaacuuugaaaccauagugaa

SEQ ID NO: 170119 - RNA, 22 nt, Human
uccaugagaacccuuggagaua

SEQ ID NO: 170120 - RNA, 22 nt, Human
uccaugcagaguccaggccuca

SEQ ID NO: 170121 - RNA, 22 nt, Human
uccaugagcuagcuuuccaaag

SEQ ID NO: 170122 - RNA, 22 nt, Human
uggagcagcuaagccucugaga

SEQ ID NO: 170123 - RNA, 22 nt, Human
caggugguuguuuggauucuaa

SEQ ID NO: 170124 - RNA, 22 nt, Human
uguccuuuguucccugucucug

SEQ ID NO: 170125 - RNA, 18 nt, Human
guuaauuuugaaguucau

SEQ ID NO: 170126 - RNA, 22 nt, Human
gaaauuauugcuagagacugca

SEQ ID NO: 170127 - RNA, 22 nt, Human
accaggcagucaccguccagga

SEQ ID NO: 170128 - RNA, 22 nt, Human
gccugcaguucugugcuaggca

SEQ ID NO: 170129 - RNA, 22 nt, Human
cauuggaaugcauuugaagaga

SEQ ID NO: 170130 - RNA, 22 nt, Human
cccaggcagagagcuggugagc

SEQ ID NO: 170131 - RNA, 22 nt, Human
uuucugaagggcagcagacucu

SEQ ID NO: 170132 - RNA, 22 nt, Human
auuugguuacucaguugucuga

SEQ ID NO: 170133 - RNA, 23 nt, Human
aaauuauugcucuucaauugccu

SEQ ID NO: 170134 - RNA, 22 nt, Human
uuauuagguuauucucuguacu

SEQ ID NO: 170135 - RNA, 22 nt, Human
uccaggcacuauauauacuuuu

SEQ ID NO: 170136 - RNA, 22 nt, Human
caaacauucaaguacaagucuu

SEQ ID NO: 170137 - RNA, 22 nt, Human
agcugcaauuaaagacugugaa

SEQ ID NO: 170138 - RNA, 22 nt, Human
aguaaaauuucugcugaggaga

SEQ ID NO: 170139 - RNA, 22 nt, Human
ugcugcauuugcaguccuuuaa

SEQ ID NO: 170140 - RNA, 21 nt, Human
acagcagggcuggcaugacag

SEQ ID NO: 170141 - RNA, 23 nt, Human
acuugauuauuguugauagauuc

SEQ ID NO: 170142 - RNA, 22 nt, Human
aguuauuacucuuuaacauauu

SEQ ID NO: 170143 - RNA, 22 nt, Human
auuucucagugaaaugacaggc

SEQ ID NO: 170144 - RNA, 22 nt, Human
cgcagguguucaguaaauguau

SEQ ID NO: 170145 - RNA, 22 nt, Human
ugggcagggucucuguuaucag

SEQ ID NO: 170146 - RNA, 22 nt, Human
accucaagaauguauaacacag

SEQ ID NO: 170147 - RNA, 22 nt, Human
auguguccucuggcagguuuag

SEQ ID NO: 170148 - RNA, 22 nt, Human
ugcaggugcuacaagaacucac

SEQ ID NO: 170149 - RNA, 22 nt, Human
ucuggagggggaugccucaucc

SEQ ID NO: 170150 - RNA, 22 nt, Human
aucagcaucuuuaacaauuacc

SEQ ID NO: 170151 - RNA, 22 nt, Human
ucagaugagugcuuucagcugc

SEQ ID NO: 170152 - RNA, 22 nt, Human
uuugacuccuguguuucuggaa

SEQ ID NO: 170153 - RNA, 21 nt, Human
uuucagaccuaucuuugaagg

SEQ ID NO: 170154 - RNA, 22 nt, Human
cuggcccuucucuugcuuccug

SEQ ID NO: 170155 - RNA, 22 nt, Human
cuuuauuagauguagacuuucu

SEQ ID NO: 170156 - RNA, 22 nt, Human
gaggugucauuuaguuaaucag

SEQ ID NO: 170157 - RNA, 22 nt, Human
uugcuuuaagguaucuggagaa

SEQ ID NO: 170158 - RNA, 22 nt, Human
uggauuuauuagguuggugaaa

SEQ ID NO: 170159 - RNA, 22 nt, Human
ugcuggcugccagguucccugu

SEQ ID NO: 170160 - RNA, 22 nt, Human
uugguggaccucaucagaaccg

SEQ ID NO: 170161 - RNA, 22 nt, Human
aaggugucacugggacaggaaa

SEQ ID NO: 170162 - RNA, 20 nt, Human
uggucuggagccagugagga

SEQ ID NO: 170163 - RNA, 22 nt, Human
gacccggcuccaggcccagcag

SEQ ID NO: 170164 - RNA, 22 nt, Human
cacaauacuauuuuuaggucuu

SEQ ID NO: 170165 - RNA, 22 nt, Human
ccucugcccuuuuccuguauca

SEQ ID NO: 170166 - RNA, 19 nt, Human
gcgaggaagucacuguggu

SEQ ID NO: 170167 - RNA, 22 nt, Human
aagagcuggauggaaucuggga

SEQ ID NO: 170168 - RNA, 22 nt, Human
cuucuucccagcuucccucacc

SEQ ID NO: 170169 - RNA, 22 nt, Human
ccagguggacaaggcuuucaca

SEQ ID NO: 170170 - RNA, 22 nt, Human
uucuucaguguagcaacuguau

SEQ ID NO: 170171 - RNA, 21 nt, Human
auggauuuaaacaggccacaa

SEQ ID NO: 170172 - RNA, 22 nt, Human
aaaucaguucacguucugaggu

SEQ ID NO: 170173 - RNA, 22 nt, Human
cagaauuuaaguggauuauucu

SEQ ID NO: 170174 - RNA, 22 nt, Human
cacaggcuuccaguccccagcu

SEQ ID NO: 170175 - RNA, 22 nt, Human
uuacagaaaguuucccaugccg

SEQ ID NO: 170176 - RNA, 22 nt, Human
uuucaaagaguuguaaauuacu

SEQ ID NO: 170177 - RNA, 22 nt, Human
uuucaaauaccauaaaccuaau

SEQ ID NO: 170178 - RNA, 22 nt, Human
uucuuuuccuacacagcgauuu

SEQ ID NO: 170179 - RNA, 22 nt, Human
uuaaaauuuccccaccauguau

SEQ ID NO: 170180 - RNA, 22 nt, Human
aucagaaaggugggcaagcaga

SEQ ID NO: 170181 - RNA, 22 nt, Human
agauuugcggcuuuacuuugca

SEQ ID NO: 170182 - RNA, 22 nt, Human
caggugucuaauucucaccccc

SEQ ID NO: 170183 - RNA, 22 nt, Human
uguguacacagauaguaauggc

SEQ ID NO: 170184 - RNA, 22 nt, Human
uguuauugucgcugcacuggga

SEQ ID NO: 170185 - RNA, 22 nt, Human
uacugaaauacuaagaaguuaa

SEQ ID NO: 170186 - RNA, 22 nt, Human
ggcuuuaugcagggauagaaau

SEQ ID NO: 170187 - RNA, 22 nt, Human
uugcuuuauuuggcaugccacu

SEQ ID NO: 170188 - RNA, 22 nt, Human
guccagugacaaguagcuggcc

SEQ ID NO: 170189 - RNA, 22 nt, Human
cuaggguggauuugugcagagu

SEQ ID NO: 170190 - RNA, 22 nt, Human
uauuugaaaguguacaaaaacu

SEQ ID NO: 170191 - RNA, 22 nt, Human
uuuaagaaguuauguuauaaau

SEQ ID NO: 170192 - RNA, 23 nt, Human
gcagacagagcagacuaagacaa

SEQ ID NO: 170193 - RNA, 22 nt, Human
ccugggucccagccaggcuuug

SEQ ID NO: 170194 - RNA, 22 nt, Human
ucaguguauggagugcuggauu

SEQ ID NO: 170195 - RNA, 22 nt, Human
agggccucuaccauccaagguu

SEQ ID NO: 170196 - RNA, 22 nt, Human
uuuccuuugcccaauacauguc

SEQ ID NO: 170197 - RNA, 21 nt, Human
ccaagacucccaucuaguggu

SEQ ID NO: 170198 - RNA, 22 nt, Human
auaguuuacaaaaaugaugcau

SEQ ID NO: 170199 - RNA, 22 nt, Human
uccuggguagagaccugaugaa

SEQ ID NO: 170200 - RNA, 22 nt, Human
uagggcagagcuuguacacgau

SEQ ID NO: 170201 - RNA, 22 nt, Human
ucagcuuuugucagaaauugua

SEQ ID NO: 170202 - RNA, 22 nt, Human
gcauguguuauuuuauguauga

SEQ ID NO: 170203 - RNA, 22 nt, Human
gaccucagugaauggucaugua

SEQ ID NO: 170204 - RNA, 15 nt, Human
aaucagaaguguggc

SEQ ID NO: 170205 - RNA, 23 nt, Human
caauuucauaugauucuaccuaa

SEQ ID NO: 170206 - RNA, 22 nt, Human
gagaggagguggcuaugacagc

SEQ ID NO: 170207 - RNA, 21 nt, Human
ucagggcagugggagguuccu

SEQ ID NO: 170208 - RNA, 22 nt, Human
ucucuucuauuugagacuauuu

SEQ ID NO: 170209 - RNA, 22 nt, Human
gaggaugguaugaggcaagcaa

SEQ ID NO: 170210 - RNA, 22 nt, Human
ugcagggagcucuggggugcag

SEQ ID NO: 170211 - RNA, 22 nt, Human
ucacauuuuuuacuggacuuaa

SEQ ID NO: 170212 - RNA, 22 nt, Human
ggagaaugauauauagcucagu

SEQ ID NO: 170213 - RNA, 22 nt, Human
aaggugguuugcagacagaaua

SEQ ID NO: 170214 - RNA, 21 nt, Human
acagacagggccagugucccc

SEQ ID NO: 170215 - RNA, 19 nt, Human
ucucuacacuacauuucua

SEQ ID NO: 170216 - RNA, 22 nt, Human
aagucacagaguuggaagucag

SEQ ID NO: 170217 - RNA, 22 nt, Human
uccaaauacauuuacuguauuu

SEQ ID NO: 170218 - RNA, 22 nt, Human
uguuuuagcugacacauggagc

SEQ ID NO: 170219 - RNA, 22 nt, Human
gcagggcaggauuugaacccag

SEQ ID NO: 170220 - RNA, 22 nt, Human
ugcaacuuguuuggagagaaag

SEQ ID NO: 170221 - RNA, 22 nt, Human
gauguacuugccuuaucuaucc

SEQ ID NO: 170222 - RNA, 19 nt, Human
acaaaugauguugcacuga

SEQ ID NO: 170223 - RNA, 22 nt, Human
uguuuuucaaauauugcucugu

SEQ ID NO: 170224 - RNA, 22 nt, Human
aaagcagggaugaggcuagagg

SEQ ID NO: 170225 - RNA, 22 nt, Human
acaguaaaucaacagaauaucu

SEQ ID NO: 170226 - RNA, 22 nt, Human
uugaaaaaauugguagaggaug

SEQ ID NO: 170227 - RNA, 22 nt, Human
uugauggcugugauuuacucag

SEQ ID NO: 170228 - RNA, 22 nt, Human
cucuaacaccacagugugguuu

SEQ ID NO: 170229 - RNA, 22 nt, Human
uucuucuucauuucugacgaug

SEQ ID NO: 170230 - RNA, 22 nt, Human
uggcagggaguugcaggauuuc

SEQ ID NO: 170231 - RNA, 22 nt, Human
ggcuccaggcuccuauuucacu

SEQ ID NO: 170232 - RNA, 22 nt, Human
uguccugggucaaauccugguc

SEQ ID NO: 170233 - RNA, 22 nt, Human
ugggugggagcgcccugucugg

SEQ ID NO: 170234 - RNA, 21 nt, Human
agaaaauggcguuuuagauuu

SEQ ID NO: 170235 - RNA, 22 nt, Human
aaagcagguugcaauuacagug

SEQ ID NO: 170236 - RNA, 22 nt, Human
aaaugaaaugagugccuggagg

SEQ ID NO: 170237 - RNA, 22 nt, Human
caaagucauggggaugcagguc

SEQ ID NO: 170238 - RNA, 22 nt, Human
uggcagggccuaccccaauauc

SEQ ID NO: 170239 - RNA, 22 nt, Human
uuugcaaagaaauuauugcugu

SEQ ID NO: 170240 - RNA, 22 nt, Human
agacagacagagaauuuaaaua

SEQ ID NO: 170241 - RNA, 22 nt, Human
gcagagaggauauuauugucca

SEQ ID NO: 170242 - RNA, 22 nt, Human
uuucuucagccuucacaaccug

SEQ ID NO: 170243 - RNA, 22 nt, Human
uuugacucaguggacguacuag

SEQ ID NO: 170244 - RNA, 22 nt, Human
ugagaaugaaucuuuugcuuuc

SEQ ID NO: 170245 - RNA, 22 nt, Human
guauuagguuggugcaaaagua

SEQ ID NO: 170246 - RNA, 22 nt, Human
uaaguaaauuuauaaugugauu

SEQ ID NO: 170247 - RNA, 21 nt, Human
ggcuuuaugcucacccagccu

SEQ ID NO: 170248 - RNA, 22 nt, Human
gugcaaaaggcauugugguuuu

SEQ ID NO: 170249 - RNA, 22 nt, Human
acuguccucgaaguaccugugc

SEQ ID NO: 170250 - RNA, 22 nt, Human
acauuguuugagaauacagaug

SEQ ID NO: 170251 - RNA, 22 nt, Human
caguccuucuccauuaaggcuc

SEQ ID NO: 170252 - RNA, 22 nt, Human
acaacuuuaauggguuucagcu

SEQ ID NO: 170253 - RNA, 22 nt, Human
caagaauccuguucuugaagau

SEQ ID NO: 170254 - RNA, 22 nt, Human
gugcaaaaguaacugugguuuu

SEQ ID NO: 170255 - RNA, 22 nt, Human
accaugaucugcucugguguuu

SEQ ID NO: 170256 - RNA, 22 nt, Human
gggugggaaggcuaagggauug

SEQ ID NO: 170257 - RNA, 22 nt, Human
gggaccugaggcccugcuccac

SEQ ID NO: 170258 - RNA, 22 nt, Human
gaggcugguaggaaaggaaaca

SEQ ID NO: 170259 - RNA, 22 nt, Human
acauuuaaguuaaaaccucagu

SEQ ID NO: 170260 - RNA, 22 nt, Human
acaaagaucuugcuuuccuacu

SEQ ID NO: 170261 - RNA, 22 nt, Human
uguuugcuaggguugguauuua

SEQ ID NO: 170262 - RNA, 22 nt, Human
cacaauguauauguauaucaaa

SEQ ID NO: 170263 - RNA, 22 nt, Human
gggagcuguaagggacagguag

SEQ ID NO: 170264 - RNA, 22 nt, Human
acucuuauaguauugguuauua

SEQ ID NO: 170265 - RNA, 21 nt, Human
uaucagaagagaaagaaugau

SEQ ID NO: 170266 - RNA, 22 nt, Human
aagacuuucaaaccuauguuug

SEQ ID NO: 170267 - RNA, 22 nt, Human
aaggugguuugcuaaucccaac

SEQ ID NO: 170268 - RNA, 22 nt, Human
cuugucuugcacacgguugcca

SEQ ID NO: 170269 - RNA, 22 nt, Human
gugcauuugacgaauacucacu

SEQ ID NO: 170270 - RNA, 22 nt, Human
uggcaaagacgcuagcuaagau

SEQ ID NO: 170271 - RNA, 22 nt, Human
uuuuauugggaguccucuacug

SEQ ID NO: 170272 - RNA, 22 nt, Human
gacaggugaaacagcaagguaa

SEQ ID NO: 170273 - RNA, 23 nt, Human
auaguuuucccugguucuugcca

SEQ ID NO: 170274 - RNA, 22 nt, Human
agagcauccaucggccaggacc

SEQ ID NO: 170275 - RNA, 22 nt, Human
gacauguugaagaauauuugga

SEQ ID NO: 170276 - RNA, 22 nt, Human
uaauuauagccgcuauuuugcu

SEQ ID NO: 170277 - RNA, 22 nt, Human
cagcuauuuucucauuaaggau

SEQ ID NO: 170278 - RNA, 22 nt, Human
uucacagaauggcaaguuaugg

SEQ ID NO: 170279 - RNA, 22 nt, Human
uccugcagcucugagaagcauc

SEQ ID NO: 170280 - RNA, 18 nt, Human
gcaggcuuuuccuggguc

SEQ ID NO: 170281 - RNA, 22 nt, Human
aaaguccuugcaguuuccucuu

SEQ ID NO: 170282 - RNA, 22 nt, Human
uguccauggagaagcucagggc

SEQ ID NO: 170283 - RNA, 22 nt, Human
guuuacuguuaaccaacgaaug

SEQ ID NO: 170284 - RNA, 22 nt, Human
agggugugcuguugggucuuuc

SEQ ID NO: 170285 - RNA, 22 nt, Human
cgcaggugggcccuucauugau

SEQ ID NO: 170286 - RNA, 22 nt, Human
caugcagccugugaacaguguc

SEQ ID NO: 170287 - RNA, 21 nt, Human
ugcaccuguucacugcaguuc

SEQ ID NO: 170288 - RNA, 22 nt, Human
ggguuccuccaguuccuagagc

SEQ ID NO: 170289 - RNA, 22 nt, Human
ucaggaaaguguucucagagga

SEQ ID NO: 170290 - RNA, 22 nt, Human
auuagggcuggaugcaaggaaa

SEQ ID NO: 170291 - RNA, 22 nt, Human
uuugaauagcauaggauuacau

SEQ ID NO: 170292 - RNA, 22 nt, Human
ccaggccuuccaguacgcagaa

SEQ ID NO: 170293 - RNA, 22 nt, Human
aaauuucuugaggcucucuagc

SEQ ID NO: 170294 - RNA, 22 nt, Human
gacauuagacuaauguagcauu

SEQ ID NO: 170295 - RNA, 22 nt, Human
aggccuuaccauagcuguagca

SEQ ID NO: 170296 - RNA, 22 nt, Human
aaggccaucuacuuacggaauu

SEQ ID NO: 170297 - RNA, 22 nt, Human
uucaaguuuugccuccccaucc

SEQ ID NO: 170298 - RNA, 22 nt, Human
uuuuucugagaauaugagagga

SEQ ID NO: 170299 - RNA, 22 nt, Human
ucugggaacagccuggcugugu

SEQ ID NO: 170300 - RNA, 22 nt, Human
ggguggggccaggcaauuugca

SEQ ID NO: 170301 - RNA, 22 nt, Human
aggcaggggagcuggaagggua

SEQ ID NO: 170302 - RNA, 22 nt, Human
uuccaagaguaaauucaaauug

SEQ ID NO: 170303 - RNA, 22 nt, Human
uaaaucuccuguuuuucaucua

SEQ ID NO: 170304 - RNA, 19 nt, Human
ccaggccucuggggccugu

SEQ ID NO: 170305 - RNA, 22 nt, Human
ggauggcagacagugaguggcu

SEQ ID NO: 170306 - RNA, 22 nt, Human
ccagagagaaaauggagggcca

SEQ ID NO: 170307 - RNA, 22 nt, Human
uuuuccuucugauacuccauuu

SEQ ID NO: 170308 - RNA, 22 nt, Human
cacaaauggccguguucaaaga

SEQ ID NO: 170309 - RNA, 22 nt, Human
ucccagggcacucacccucccu

SEQ ID NO: 170310 - RNA, 22 nt, Human
aauuucaagucuugaagaagua

SEQ ID NO: 170311 - RNA, 22 nt, Human
aacaugugucuugcauuucuug

SEQ ID NO: 170312 - RNA, 22 nt, Human
ucugggugagcugccucggguc

SEQ ID NO: 170313 - RNA, 22 nt, Human
cccagugugguucuuuggagaa

SEQ ID NO: 170314 - RNA, 23 nt, Human
aaacaugcagcacaugaaugcua

SEQ ID NO: 170315 - RNA, 22 nt, Human
aauucuaaauguaauuuagaau

SEQ ID NO: 170316 - RNA, 22 nt, Human
cucuuaguaaugccaugaagca

SEQ ID NO: 170317 - RNA, 22 nt, Human
caaagcaccacaaaccagguga

SEQ ID NO: 170318 - RNA, 22 nt, Human
augcaaaauaaggcagaaacau

SEQ ID NO: 170319 - RNA, 22 nt, Human
uauauacuuucuuccuggguag

SEQ ID NO: 170320 - RNA, 22 nt, Human
uccagaauauuugggaaagaug

SEQ ID NO: 170321 - RNA, 22 nt, Human
uucaucaauguguuuaauaaug

SEQ ID NO: 170322 - RNA, 18 nt, Human
ucuguccuuccauucuuc

SEQ ID NO: 170323 - RNA, 22 nt, Human
caucagaagauggcucuggaaa

SEQ ID NO: 170324 - RNA, 22 nt, Human
acagacagaggcuccaugagga

SEQ ID NO: 170325 - RNA, 22 nt, Human
augguuuaagggagaauauuga

SEQ ID NO: 170326 - RNA, 22 nt, Human
cagcaccuguuagcauuaaaua

SEQ ID NO: 170327 - RNA, 22 nt, Human
gcccagcuuuucacuuccacac

SEQ ID NO: 170328 - RNA, 22 nt, Human
acaugauuuuaguaucauaaua

SEQ ID NO: 170329 - RNA, 22 nt, Human
uuucacauaucaacucuauccu

SEQ ID NO: 170330 - RNA, 23 nt, Human
ugguucuaggccuauaauuauau

SEQ ID NO: 170331 - RNA, 22 nt, Human
ggaggcagaauagagugugggu

SEQ ID NO: 170332 - RNA, 22 nt, Human
ccagguguucuuugucccuguu

SEQ ID NO: 170333 - RNA, 22 nt, Human
agaaguuguagguuugcauauu

SEQ ID NO: 170334 - RNA, 22 nt, Human
auuuauugaacacugacuaugu

SEQ ID NO: 170335 - RNA, 22 nt, Human
cauguuuuguguacagaauauu

SEQ ID NO: 170336 - RNA, 22 nt, Human
uuuaucuguuguacauuuaugc

SEQ ID NO: 170337 - RNA, 22 nt, Human
ucugggugaugaaaugcacugu

SEQ ID NO: 170338 - RNA, 22 nt, Human
auuuacugcuugacacauuggu

SEQ ID NO: 170339 - RNA, 22 nt, Human
cucagagaaaaggagcaagggu

SEQ ID NO: 170340 - RNA, 22 nt, Human
ucaggugggcaguggguugagc

SEQ ID NO: 170341 - RNA, 22 nt, Human
guucuucagucacaucacagaa

SEQ ID NO: 170342 - RNA, 22 nt, Human
uuccaggauagcuuucaggaau

SEQ ID NO: 170343 - RNA, 22 nt, Human
uugauaaaaugauaucuucuuu

SEQ ID NO: 170344 - RNA, 22 nt, Human
cauacuuugggauaagagugga

SEQ ID NO: 170345 - RNA, 22 nt, Human
cuagaaauacaggcacgugcca

SEQ ID NO: 170346 - RNA, 22 nt, Human
ccaugcugugacacaguaguua

SEQ ID NO: 170347 - RNA, 22 nt, Human
augauauuugcaaugugcuugc

SEQ ID NO: 170348 - RNA, 14 nt, Human
gcaggcagaucacc

SEQ ID NO: 170349 - RNA, 22 nt, Human
acaggcagagaacucagccaga

SEQ ID NO: 170350 - RNA, 22 nt, Human
auguguccugcugugucacaca

SEQ ID NO: 170351 - RNA, 22 nt, Human
uuuacagaugaggaaacugaga

SEQ ID NO: 170352 - RNA, 22 nt, Human
uuaacacuugaacucuacaugu

SEQ ID NO: 170353 - RNA, 22 nt, Human
cuguccuguagcuccaucaguc

SEQ ID NO: 170354 - RNA, 22 nt, Human
uaaguucauaagcuuauucuua

SEQ ID NO: 170355 - RNA, 22 nt, Human
agcagguggucuguugcugcug

SEQ ID NO: 170356 - RNA, 22 nt, Human
uaaguuuuaagcaaucugauaa

SEQ ID NO: 170357 - RNA, 22 nt, Human
cuuguucaguugccucuccugc

SEQ ID NO: 170358 - RNA, 22 nt, Human
uguauacaggauuacucauagc

SEQ ID NO: 170359 - RNA, 22 nt, Human
ugcagggcccuugggguugaac

SEQ ID NO: 170360 - RNA, 22 nt, Human
uccaggcaugguguaauuuugc

SEQ ID NO: 170361 - RNA, 22 nt, Human
aauucucagguaaaaguuaagu

SEQ ID NO: 170362 - RNA, 22 nt, Human
ccaugagcuucaacugacacag

SEQ ID NO: 170363 - RNA, 22 nt, Human
gacagggaaacauugaaguguc

SEQ ID NO: 170364 - RNA, 22 nt, Human
cuggauggucccaugagcagcu

SEQ ID NO: 170365 - RNA, 22 nt, Human
uauugagaacccucaggaggca

SEQ ID NO: 170366 - RNA, 22 nt, Human
ggcuggcagugugagagaggga

SEQ ID NO: 170367 - RNA, 22 nt, Human
auguuucagauacagaucaaau

SEQ ID NO: 170368 - RNA, 21 nt, Human
auccuuagcacuuagaagagu

SEQ ID NO: 170369 - RNA, 22 nt, Human
aaugcuaacauugguuuauauc

SEQ ID NO: 170370 - RNA, 22 nt, Human
agauauuuguaucuugcuauug

SEQ ID NO: 170371 - RNA, 22 nt, Human
uuguaaaugaccuuuucuaauu

SEQ ID NO: 170372 - RNA, 22 nt, Human
uuauuagcugggcuucagggug

SEQ ID NO: 170373 - RNA, 22 nt, Human
uggauuaguuaagaaauguuag

SEQ ID NO: 170374 - RNA, 22 nt, Human
aggacaguccgggguccuccac

SEQ ID NO: 170375 - RNA, 22 nt, Human
cauggcuucuaagugauaacgu

SEQ ID NO: 170376 - RNA, 22 nt, Human
uuuucuuuaaucugguggggug

SEQ ID NO: 170377 - RNA, 22 nt, Human
gaugauaacagcauuucaacug

SEQ ID NO: 170378 - RNA, 22 nt, Human
cuacauuaaauuggcuuacuua

SEQ ID NO: 170379 - RNA, 22 nt, Human
auaugcauguacgugugcacaa

SEQ ID NO: 170380 - RNA, 22 nt, Human
uauuuaucgagugucuacuaug

SEQ ID NO: 170381 - RNA, 22 nt, Human
uggauuuaguucuucacaggcc

SEQ ID NO: 170382 - RNA, 22 nt, Human
auuagauacacagauuuccacu

SEQ ID NO: 170383 - RNA, 22 nt, Human
uucucuuugacauuauucaggu

SEQ ID NO: 170384 - RNA, 22 nt, Human
ggcaggcaucaucaguugauca

SEQ ID NO: 170385 - RNA, 19 nt, Human
uuccugggguuccauugug

SEQ ID NO: 170386 - RNA, 22 nt, Human
caaguccucugguuucaaauag

SEQ ID NO: 170387 - RNA, 22 nt, Human
ugauucuauggaaggcauaagg

SEQ ID NO: 170388 - RNA, 22 nt, Human
uuuaacacuaguuucuuuaacu

SEQ ID NO: 170389 - RNA, 22 nt, Human
ugggcaggggcccugcuuccgu

SEQ ID NO: 170390 - RNA, 22 nt, Human
ucagagaguuuucacuagggug

SEQ ID NO: 170391 - RNA, 22 nt, Human
acuuucauuugugaagacugua

SEQ ID NO: 170392 - RNA, 22 nt, Human
ucagaaauacaaaacacuuacu

SEQ ID NO: 170393 - RNA, 19 nt, Human
cccagcuugaccaccugcu

SEQ ID NO: 170394 - RNA, 22 nt, Human
uucuccaacacaagcaugaugu

SEQ ID NO: 170395 - RNA, 22 nt, Human
aguguggcugcguagggcucuc

SEQ ID NO: 170396 - RNA, 22 nt, Human
cagggcucaccacugggauccu

SEQ ID NO: 170397 - RNA, 22 nt, Human
gcauguguuagagugugcaugc

SEQ ID NO: 170398 - RNA, 22 nt, Human
acuuucugcaguguuggaaaug

SEQ ID NO: 170399 - RNA, 22 nt, Human
auacagaauuugcccuuuucau

SEQ ID NO: 170400 - RNA, 22 nt, Human
gcacccagcccagggcgugaug

SEQ ID NO: 170401 - RNA, 22 nt, Human
ucagcuuuuaaaaacaagaagu

SEQ ID NO: 170402 - RNA, 22 nt, Human
uccaagcucucuaugccaugau

SEQ ID NO: 170403 - RNA, 22 nt, Human
agcagggcagcuuuuuucagaa

SEQ ID NO: 170404 - RNA, 22 nt, Human
ccagauuugagcgucuuaaacc

SEQ ID NO: 170405 - RNA, 19 nt, Human
agcauuuggaauucuacac

SEQ ID NO: 170406 - RNA, 22 nt, Human
uguaauuaaacugaagacagaa

SEQ ID NO: 170407 - RNA, 22 nt, Human
guauuagguuggugcaaaauug

SEQ ID NO: 170408 - RNA, 22 nt, Human
ugguaugaccguggugcaagca

SEQ ID NO: 170409 - RNA, 22 nt, Human
uuaaagaauagugccccuauug

SEQ ID NO: 170410 - RNA, 22 nt, Human
agaagaaaugaggccguucugc

SEQ ID NO: 170411 - RNA, 22 nt, Human
aaagaaucagaagucucaaaca

SEQ ID NO: 170412 - RNA, 22 nt, Human
ucuugccucuuccccuuuccau

SEQ ID NO: 170413 - RNA, 22 nt, Human
uggguggagaaguggaccugcu

SEQ ID NO: 170414 - RNA, 18 nt, Human
ucugagguggacgaggag

SEQ ID NO: 170415 - RNA, 22 nt, Human
uucuauugggaagugugagagu

SEQ ID NO: 170416 - RNA, 22 nt, Human
guauacaugugguaaaaugcac

SEQ ID NO: 170417 - RNA, 21 nt, Human
cuacagaagcucuccuaucca

SEQ ID NO: 170418 - RNA, 22 nt, Human
aguuuacaaaguuucacuguuc

SEQ ID NO: 170419 - RNA, 22 nt, Human
ccuguucauuuuuugacucugc

SEQ ID NO: 170420 - RNA, 22 nt, Human
ucagagaguuacacaaauuguu

SEQ ID NO: 170421 - RNA, 22 nt, Human
acauucuuaacaguuaaaaacu

SEQ ID NO: 170422 - RNA, 22 nt, Human
ugggaccugcucuuggaaugag

SEQ ID NO: 170423 - RNA, 22 nt, Human
ucuucauuuuacaggcagaccu

SEQ ID NO: 170424 - RNA, 22 nt, Human
agcagggcuguguagguaauga

SEQ ID NO: 170425 - RNA, 22 nt, Human
cuuccuucaauauaauuuuuac

SEQ ID NO: 170426 - RNA, 22 nt, Human
auucugggucugggugugauca

SEQ ID NO: 170427 - RNA, 22 nt, Human
aguccuuagaacacuguaucug

SEQ ID NO: 170428 - RNA, 20 nt, Human
ggcaggugcuguccccuccu

SEQ ID NO: 170429 - RNA, 22 nt, Human
uugaaauacugcauuguucagu

SEQ ID NO: 170430 - RNA, 22 nt, Human
ucugaagauggaggaacuuaga

SEQ ID NO: 170431 - RNA, 22 nt, Human
gcaugugucuuuauagcagcau

SEQ ID NO: 170432 - RNA, 22 nt, Human
uuugaagaccuuaucucuaaau

SEQ ID NO: 170433 - RNA, 22 nt, Human
cggcaggugugcucacucugcc

SEQ ID NO: 170434 - RNA, 22 nt, Human
uuuccuaggagauugaucacau

SEQ ID NO: 170435 - RNA, 19 nt, Human
ucuuauugagcagcugagg

SEQ ID NO: 170436 - RNA, 22 nt, Human
auuauauaggacuugcccuucc

SEQ ID NO: 170437 - RNA, 22 nt, Human
ucauuuguucaucugcucuucu

SEQ ID NO: 170438 - RNA, 22 nt, Human
ucaguaaaugagcaaaaauuuc

SEQ ID NO: 170439 - RNA, 22 nt, Human
aagcugcaugaaguugaguaga

SEQ ID NO: 170440 - RNA, 22 nt, Human
uccugggucugggugucugagg

SEQ ID NO: 170441 - RNA, 22 nt, Human
auauacaaagggcaaccucgcu

SEQ ID NO: 170442 - RNA, 22 nt, Human
aaucauucuuauuucacagcaa

SEQ ID NO: 170443 - RNA, 22 nt, Human
gguggggcccuggcacugguau

SEQ ID NO: 170444 - RNA, 22 nt, Human
gauccugugguuuuccugugca

SEQ ID NO: 170445 - RNA, 23 nt, Human
ugcuggguaucagaaucacugag

SEQ ID NO: 170446 - RNA, 22 nt, Human
auaaaaguucaagagaguacag

SEQ ID NO: 170447 - RNA, 19 nt, Human
uucauucucuuauuguugu

SEQ ID NO: 170448 - RNA, 22 nt, Human
uuccaggagccacacaggggcg

SEQ ID NO: 170449 - RNA, 22 nt, Human
auuuaugauuagccuauuguug

SEQ ID NO: 170450 - RNA, 22 nt, Human
uaaaagcucuucuguugaguua

SEQ ID NO: 170451 - RNA, 22 nt, Human
guugcacaguuccucaagcagg

SEQ ID NO: 170452 - RNA, 21 nt, Human
ucucuuucuggaagcuucccu

SEQ ID NO: 170453 - RNA, 21 nt, Human
uggaggaauaaagcacagaag

SEQ ID NO: 170454 - RNA, 22 nt, Human
ucagagagaaauaguuuuugac

SEQ ID NO: 170455 - RNA, 17 nt, Human
ucuguucaugcauaccu

SEQ ID NO: 170456 - RNA, 22 nt, Human
uguauacauuuaacuagauaga

SEQ ID NO: 170457 - RNA, 20 nt, Human
ccaggccugggccugcucua

SEQ ID NO: 170458 - RNA, 22 nt, Human
uagguggugugcgaagagcgug

SEQ ID NO: 170459 - RNA, 22 nt, Human
auccugaaaacuuacgaagugg

SEQ ID NO: 170460 - RNA, 22 nt, Human
augguuuuagaaucaggaaaaa

SEQ ID NO: 170461 - RNA, 22 nt, Human
ucugucuucaucagcaugugau

SEQ ID NO: 170462 - RNA, 22 nt, Human
aaacucuguagcuaaacauaau

SEQ ID NO: 170463 - RNA, 22 nt, Human
auugaaucugcacuaguauuuu

SEQ ID NO: 170464 - RNA, 22 nt, Human
uuggaggacuaguuaagagacc

SEQ ID NO: 170465 - RNA, 22 nt, Human
cccaggcaggagugugguggcu

SEQ ID NO: 170466 - RNA, 22 nt, Human
ucuugauuacaaauaacaucau

SEQ ID NO: 170467 - RNA, 22 nt, Human
agaugggugccuucuuucuuua

SEQ ID NO: 170468 - RNA, 22 nt, Human
agaggaauaaauuucuguagug

SEQ ID NO: 170469 - RNA, 22 nt, Human
uuccugggcucuggcuggccua

SEQ ID NO: 170470 - RNA, 22 nt, Human
cuuuccaaugcauuuccaaugu

SEQ ID NO: 170471 - RNA, 21 nt, Human
uucuucaggccaaugcucauu

SEQ ID NO: 170472 - RNA, 22 nt, Human
gguguccuacugcuugguugcu

SEQ ID NO: 170473 - RNA, 22 nt, Human
uuuuccuuucaucaggacaaag

SEQ ID NO: 170474 - RNA, 22 nt, Human
aaaaggcauggagguugauagu

SEQ ID NO: 170475 - RNA, 22 nt, Human
cucuuaaagcuuccaguuucaa

SEQ ID NO: 170476 - RNA, 22 nt, Human
ugaaagcagcaccaauaccauu

SEQ ID NO: 170477 - RNA, 22 nt, Human
cagacagaccugcaagggcaca

SEQ ID NO: 170478 - RNA, 22 nt, Human
acagacuggaggagaauaguuu

SEQ ID NO: 170479 - RNA, 22 nt, Human
acaaaugucuccucuuuuguua

SEQ ID NO: 170480 - RNA, 22 nt, Human
auucuucagaauaucuggcacu

SEQ ID NO: 170481 - RNA, 22 nt, Human
ugaucuccugaccuuguaaucc

SEQ ID NO: 170482 - RNA, 18 nt, Human
acugaagaugcaagaccu

SEQ ID NO: 170483 - RNA, 22 nt, Human
gagagcacggucuugggcaugg

SEQ ID NO: 170484 - RNA, 22 nt, Human
aacacagcuaauuucugucaau

SEQ ID NO: 170485 - RNA, 18 nt, Human
uguuuauuuuucucuuac

SEQ ID NO: 170486 - RNA, 22 nt, Human
aaauacuagaauucagaguuga

SEQ ID NO: 170487 - RNA, 22 nt, Human
aagugguugcuugugagucccc

SEQ ID NO: 170488 - RNA, 22 nt, Human
aaacagcuggucucaaauguuc

SEQ ID NO: 170489 - RNA, 22 nt, Human
uuguuuacaaguuacucagucu

SEQ ID NO: 170490 - RNA, 22 nt, Human
cauuguaagcuguugaauccuc

SEQ ID NO: 170491 - RNA, 22 nt, Human
auacuuuuaauuccuucugagu

SEQ ID NO: 170492 - RNA, 22 nt, Human
acaagaaagguaggauucaggu

SEQ ID NO: 170493 - RNA, 22 nt, Human
ugagagaguaauugagugguaa

SEQ ID NO: 170494 - RNA, 22 nt, Human
gccaggcgggucucaaacuccu

SEQ ID NO: 170495 - RNA, 22 nt, Human
uuuauugcccuguaguacagga

SEQ ID NO: 170496 - RNA, 22 nt, Human
accaggcaugauguggagcaca

SEQ ID NO: 170497 - RNA, 22 nt, Human
uuuaugaacuacagauauaacu

SEQ ID NO: 170498 - RNA, 22 nt, Human
gcuggcuggcgggugcguccuc

SEQ ID NO: 170499 - RNA, 22 nt, Human
uauugcugccaggacccuaucc

SEQ ID NO: 170500 - RNA, 22 nt, Human
guuaaagaguuuggcuuucuuc

SEQ ID NO: 170501 - RNA, 22 nt, Human
auggcuuucagauggugaaaga

SEQ ID NO: 170502 - RNA, 22 nt, Human
cagacaggguggguuucugggc

SEQ ID NO: 170503 - RNA, 22 nt, Human
ccagagaggccuuggcaagaca

SEQ ID NO: 170504 - RNA, 22 nt, Human
acauguguaagaugugauauau

SEQ ID NO: 170505 - RNA, 22 nt, Human
aggcagguguuaacccucugag

SEQ ID NO: 170506 - RNA, 22 nt, Human
gcagguggaucaccacgucagg

SEQ ID NO: 170507 - RNA, 22 nt, Human
uucacaauagcuggcaucaucu

SEQ ID NO: 170508 - RNA, 22 nt, Human
uuugcugauauuuugcugauac

SEQ ID NO: 170509 - RNA, 22 nt, Human
cuuccaaauguaaauaaguuuc

SEQ ID NO: 170510 - RNA, 22 nt, Human
caaugauugcuauuuacauaaa

SEQ ID NO: 170511 - RNA, 22 nt, Human
gccaggcagcagcgaggauggu

SEQ ID NO: 170512 - RNA, 22 nt, Human
ucaguucaguauacacuauucu

SEQ ID NO: 170513 - RNA, 22 nt, Human
guguguccaaggccacaauagc

SEQ ID NO: 170514 - RNA, 22 nt, Human
agacagguaaauagagaugcug

SEQ ID NO: 170515 - RNA, 22 nt, Human
ucugaagagaaugcugcugaac

SEQ ID NO: 170516 - RNA, 22 nt, Human
uuccaugacugaagcaggggcg

SEQ ID NO: 170517 - RNA, 22 nt, Human
ucacugggagaugugggaaggg

SEQ ID NO: 170518 - RNA, 21 nt, Human
guuuucaugauagagucugua

SEQ ID NO: 170519 - RNA, 20 nt, Human
cucuuaaauguaaaguaggc

SEQ ID NO: 170520 - RNA, 22 nt, Human
gccaggcaugggcuucugggcg

SEQ ID NO: 170521 - RNA, 22 nt, Human
ucuaaagaagaggguucugcgg

SEQ ID NO: 170522 - RNA, 22 nt, Human
ugcuuuaagagauuguuaguac

SEQ ID NO: 170523 - RNA, 22 nt, Human
ucaagaaagggcuucaccagga

SEQ ID NO: 170524 - RNA, 22 nt, Human
ugaaugauguauaauauugaga

SEQ ID NO: 170525 - RNA, 22 nt, Human
uguacaaugcugagguuugggg

SEQ ID NO: 170526 - RNA, 20 nt, Human
caccagucaugagucaauac

SEQ ID NO: 170527 - RNA, 22 nt, Human
guagaaaugguguguuucuucu

SEQ ID NO: 170528 - RNA, 22 nt, Human
uucagaaaugaauauugguauu

SEQ ID NO: 170529 - RNA, 22 nt, Human
cuaugacacaggccauuauaua

SEQ ID NO: 170530 - RNA, 22 nt, Human
auuguauaagucuauuuacaau

SEQ ID NO: 170531 - RNA, 22 nt, Human
aagcugcagacccccugucuca

SEQ ID NO: 170532 - RNA, 22 nt, Human
cauuuaaagguuguggguaaaa

SEQ ID NO: 170533 - RNA, 22 nt, Human
ucucuuaaaagauuuuaaugac

SEQ ID NO: 170534 - RNA, 22 nt, Human
aggugggguguuggauguuuau

SEQ ID NO: 170535 - RNA, 22 nt, Human
uauaauuuuagaagagauggaa

SEQ ID NO: 170536 - RNA, 21 nt, Human
uucaaagacuugaugcugacc

SEQ ID NO: 170537 - RNA, 22 nt, Human
aaguucuaauuuugcauucagg

SEQ ID NO: 170538 - RNA, 22 nt, Human
ucuucaaaugcuaguaauauca

SEQ ID NO: 170539 - RNA, 21 nt, Human
ccuucuccacagggucuccgg

SEQ ID NO: 170540 - RNA, 20 nt, Human
gcagagugugagagggugaa

SEQ ID NO: 170541 - RNA, 22 nt, Human
gggaggaaaugugcagcgaauu

SEQ ID NO: 170542 - RNA, 22 nt, Human
aucuagaacuuaaagucaguca

SEQ ID NO: 170543 - RNA, 22 nt, Human
augaauaaacaggugccucuuc

SEQ ID NO: 170544 - RNA, 22 nt, Human
gugcaaagugcauggggaaggg

SEQ ID NO: 170545 - RNA, 20 nt, Human
uagggcucauuaugaucucc

SEQ ID NO: 170546 - RNA, 22 nt, Human
uguguccucacuguaugcaagg

SEQ ID NO: 170547 - RNA, 22 nt, Human
ggcaggcaucauguggucauua

SEQ ID NO: 170548 - RNA, 22 nt, Human
guuauugagguggagucucacu

SEQ ID NO: 170549 - RNA, 17 nt, Human
uccauacaauucucucu

SEQ ID NO: 170550 - RNA, 22 nt, Human
caugaggucagggggagccggu

SEQ ID NO: 170551 - RNA, 22 nt, Human
ugaagaaucagauuggccugcg

SEQ ID NO: 170552 - RNA, 22 nt, Human
cccagcuugucugauucagccu

SEQ ID NO: 170553 - RNA, 21 nt, Human
aucauucuggaaaauucaagc

SEQ ID NO: 170554 - RNA, 22 nt, Human
agauauaauaauuuacaagugu

SEQ ID NO: 170555 - RNA, 22 nt, Human
guuauuaguaagacucgcacau

SEQ ID NO: 170556 - RNA, 22 nt, Human
ugcuuuauguuaucagaagggu

SEQ ID NO: 170557 - RNA, 22 nt, Human
agacagacaugcuaguuuucuu

SEQ ID NO: 170558 - RNA, 22 nt, Human
acccaggcugcuucucaguggc

SEQ ID NO: 170559 - RNA, 22 nt, Human
gauuuucugagccuucaaauuu

SEQ ID NO: 170560 - RNA, 22 nt, Human
uccauucuuuuuaccucucaga

SEQ ID NO: 170561 - RNA, 22 nt, Human
ucccaaggccaggcaucuagaa

SEQ ID NO: 170562 - RNA, 22 nt, Human
uucauuaauucauucagugacu

SEQ ID NO: 170563 - RNA, 22 nt, Human
gaguccuugucauaauucagug

SEQ ID NO: 170564 - RNA, 22 nt, Human
cagggcagggagcuuagaauga

SEQ ID NO: 170565 - RNA, 22 nt, Human
cuguccugaguucuuggagguc

SEQ ID NO: 170566 - RNA, 22 nt, Human
cugaggcugggcauggggucca

SEQ ID NO: 170567 - RNA, 22 nt, Human
aguauacauauauuagccuucg

SEQ ID NO: 170568 - RNA, 22 nt, Human
uacugcaugguggaguggagcu

SEQ ID NO: 170569 - RNA, 22 nt, Human
uauuuguauguguguacauaua

SEQ ID NO: 170570 - RNA, 22 nt, Human
aacuuucagaauccuaugcauu

SEQ ID NO: 170571 - RNA, 22 nt, Human
acuugguggcgaacgaggguca

SEQ ID NO: 170572 - RNA, 22 nt, Human
acucugaaugugcauguaaauc

SEQ ID NO: 170573 - RNA, 22 nt, Human
ucuuuaauauaaaggaaugaau

SEQ ID NO: 170574 - RNA, 22 nt, Human
agcagggcuccauuucacugcc

SEQ ID NO: 170575 - RNA, 22 nt, Human
uggcuuuauaaauccacugguu

SEQ ID NO: 170576 - RNA, 21 nt, Human
uuccuggggacuuccguggga

SEQ ID NO: 170577 - RNA, 22 nt, Human
gccugcagccagggaguucucu

SEQ ID NO: 170578 - RNA, 22 nt, Human
gaauuuaaggaccaagcauuuu

SEQ ID NO: 170579 - RNA, 18 nt, Human
ucauuuguuuugcaugaa

SEQ ID NO: 170580 - RNA, 22 nt, Human
uaauuucuagggacuaaggugc

SEQ ID NO: 170581 - RNA, 22 nt, Human
caauuucacuaaugaugugggg

SEQ ID NO: 170582 - RNA, 22 nt, Human
ggacaggugcaaagggcacaug

SEQ ID NO: 170583 - RNA, 22 nt, Human
uuauacaguuuauacuuagaau

SEQ ID NO: 170584 - RNA, 22 nt, Human
gacagguguguguauauuaggg

SEQ ID NO: 170585 - RNA, 18 nt, Human
uggaggaaaaaucucaug

SEQ ID NO: 170586 - RNA, 22 nt, Human
aacccgggaggcagagguugug

SEQ ID NO: 170587 - RNA, 22 nt, Human
uuccuuccuccuccaguucugg

SEQ ID NO: 170588 - RNA, 22 nt, Human
ugaggaauggcuuaauguggga

SEQ ID NO: 170589 - RNA, 22 nt, Human
acaugaaacuguugcauuagaa

SEQ ID NO: 170590 - RNA, 22 nt, Human
auuuccaguccuaaugaucugg

SEQ ID NO: 170591 - RNA, 22 nt, Human
uucagauguggcuuugucaggc

SEQ ID NO: 170592 - RNA, 20 nt, Human
gaguccuuaugggcugaggu

SEQ ID NO: 170593 - RNA, 22 nt, Human
guguaaaaacauacuauuucua

SEQ ID NO: 170594 - RNA, 22 nt, Human
gucuucuuguguugccugucuu

SEQ ID NO: 170595 - RNA, 22 nt, Human
uuuaaaauuuagaccucuccac

SEQ ID NO: 170596 - RNA, 22 nt, Human
caauauauaggaacaacuuagg

SEQ ID NO: 170597 - RNA, 22 nt, Human
cugcagggaccacaagcagguu

SEQ ID NO: 170598 - RNA, 22 nt, Human
ggugggaguggaacguggaaga

SEQ ID NO: 170599 - RNA, 22 nt, Human
ucagcuuugggggucucaggag

SEQ ID NO: 170600 - RNA, 22 nt, Human
ggcuuuugcuguguuuuccaga

SEQ ID NO: 170601 - RNA, 20 nt, Human
uaggugucuuugccagcuuu

SEQ ID NO: 170602 - RNA, 22 nt, Human
gggaccuggggacuccuuguuc

SEQ ID NO: 170603 - RNA, 20 nt, Human
cccugcagccaugggagugg

SEQ ID NO: 170604 - RNA, 22 nt, Human
ugcugggucccuugagagcuca

SEQ ID NO: 170605 - RNA, 22 nt, Human
acagagagggagugauaaaucc

SEQ ID NO: 170606 - RNA, 22 nt, Human
guccugucccccaaggcugugg

SEQ ID NO: 170607 - RNA, 22 nt, Human
uuuuauuaucuuugaaugggac

SEQ ID NO: 170608 - RNA, 22 nt, Human
aaaugucagaagcuuuacuucu

SEQ ID NO: 170609 - RNA, 22 nt, Human
ccuguucaagggaugauugacc

SEQ ID NO: 170610 - RNA, 22 nt, Human
gguccucaaucccaacaaggca

SEQ ID NO: 170611 - RNA, 22 nt, Human
uuuauacuccacucugcaagcg

SEQ ID NO: 170612 - RNA, 22 nt, Human
cuguccugucugcuuuuaauuu

SEQ ID NO: 170613 - RNA, 22 nt, Human
ggaccuggcaauuugcaucucu

SEQ ID NO: 170614 - RNA, 22 nt, Human
aaauauagcaauuaugccuacu

SEQ ID NO: 170615 - RNA, 22 nt, Human
uagaacuacaagcauuaaaagu

SEQ ID NO: 170616 - RNA, 22 nt, Human
acacuaaugagaaaggaauuaa

SEQ ID NO: 170617 - RNA, 22 nt, Human
ugcagggaaagggcacugggcu

SEQ ID NO: 170618 - RNA, 22 nt, Human
ugauguccucaugucaagcucc

SEQ ID NO: 170619 - RNA, 22 nt, Human
gguacaauggaccauaaaagcu

SEQ ID NO: 170620 - RNA, 22 nt, Human
gucacagaguuauuaauugugu

SEQ ID NO: 170621 - RNA, 23 nt, Human
uuuuaauuuggacauaagaagau

SEQ ID NO: 170622 - RNA, 22 nt, Human
ggcuuuauuaacucauccguaa

SEQ ID NO: 170623 - RNA, 20 nt, Human
cugaagaguggccugaucug

SEQ ID NO: 170624 - RNA, 22 nt, Human
gggacagacccaugggccaggu

SEQ ID NO: 170625 - RNA, 22 nt, Human
ugcuggaauaauuucauguuaa

SEQ ID NO: 170626 - RNA, 22 nt, Human
acagaggguguggaggaagacg

SEQ ID NO: 170627 - RNA, 22 nt, Human
auguaauuugcccucaaguuaa

SEQ ID NO: 170628 - RNA, 22 nt, Human
ucagagaggauuuuaauaagug

SEQ ID NO: 170629 - RNA, 22 nt, Human
cagucaccuagacagaacuuac

SEQ ID NO: 170630 - RNA, 22 nt, Human
gacuuuauuauaguggcaauag

SEQ ID NO: 170631 - RNA, 23 nt, Human
agaucugauguuaccaagaauug

SEQ ID NO: 170632 - RNA, 22 nt, Human
cccugcagaucagugagaacuu

SEQ ID NO: 170633 - RNA, 22 nt, Human
uauuuuaaagugaagggucuug

SEQ ID NO: 170634 - RNA, 22 nt, Human
auguccagaguaaagcacauuc

SEQ ID NO: 170635 - RNA, 22 nt, Human
ugcagggcacggugcgcguggg

SEQ ID NO: 170636 - RNA, 22 nt, Human
uucauagugauuguucagauag

SEQ ID NO: 170637 - RNA, 22 nt, Human
gagggaaagguuaauacaugau

SEQ ID NO: 170638 - RNA, 22 nt, Human
uacuacaaggccgaagcucuca

SEQ ID NO: 170639 - RNA, 22 nt, Human
ugaaagaagccucccuuuggag

SEQ ID NO: 170640 - RNA, 22 nt, Human
uucuuaaagaggcaaaacacag

SEQ ID NO: 170641 - RNA, 22 nt, Human
aagauuuagggccaguuuacau

SEQ ID NO: 170642 - RNA, 22 nt, Human
auugcuuuuccuuaacacaugc

SEQ ID NO: 170643 - RNA, 22 nt, Human
auugcugaacuuauaaaugaau

SEQ ID NO: 170644 - RNA, 22 nt, Human
uccaggcaagggaggagcaugg

SEQ ID NO: 170645 - RNA, 22 nt, Human
ccaguguguuaguggauuuccc

SEQ ID NO: 170646 - RNA, 22 nt, Human
uuguccugcaaccucacauggc

SEQ ID NO: 170647 - RNA, 22 nt, Human
ugaaugaauccuaacaaagaca

SEQ ID NO: 170648 - RNA, 22 nt, Human
aaguccaguuucauuugagguc

SEQ ID NO: 170649 - RNA, 23 nt, Human
ucauaaauauuagcacaguagga

SEQ ID NO: 170650 - RNA, 22 nt, Human
cagggcuccaugcagggacucc

SEQ ID NO: 170651 - RNA, 22 nt, Human
ccugcuccugcuauucuucugg

SEQ ID NO: 170652 - RNA, 22 nt, Human
auaacauuuugacaacugguga

SEQ ID NO: 170653 - RNA, 22 nt, Human
guuaaagaagaauaguuccuuu

SEQ ID NO: 170654 - RNA, 22 nt, Human
gacacuuuaggauuuaaaaguc

SEQ ID NO: 170655 - RNA, 22 nt, Human
uggcagaaagaaccaugugcaa

SEQ ID NO: 170656 - RNA, 22 nt, Human
uccucagaaaccccugugaggu

SEQ ID NO: 170657 - RNA, 22 nt, Human
ucauuuggaagccugagagugu

SEQ ID NO: 170658 - RNA, 23 nt, Human
uauuacaauuggucuuauuaaga

SEQ ID NO: 170659 - RNA, 22 nt, Human
gauuuacaaagcucucuagugu

SEQ ID NO: 170660 - RNA, 22 nt, Human
ucaugaaucguggaaugauuua

SEQ ID NO: 170661 - RNA, 21 nt, Human
cauuuacaugacagauugguu

SEQ ID NO: 170662 - RNA, 22 nt, Human
cuguccuggugcuggggauccc

SEQ ID NO: 170663 - RNA, 22 nt, Human
cuuaggcaaccaggucaaugcu

SEQ ID NO: 170664 - RNA, 22 nt, Human
gggcaggggucaguggccccaa

SEQ ID NO: 170665 - RNA, 22 nt, Human
uuguuaaaaauagauuuccagg

SEQ ID NO: 170666 - RNA, 22 nt, Human
uuagcuuuucacuugcauuauc

SEQ ID NO: 170667 - RNA, 22 nt, Human
ccuguucaaguugcagggcugg

SEQ ID NO: 170668 - RNA, 22 nt, Human
gagaagcaaucaguggccaccc

SEQ ID NO: 170669 - RNA, 22 nt, Human
acagguggcauaggcaguuuga

SEQ ID NO: 170670 - RNA, 22 nt, Human
ugcugccaagcccgugcuccug

SEQ ID NO: 170671 - RNA, 22 nt, Human
ucagguggagaccuccuuggcc

SEQ ID NO: 170672 - RNA, 22 nt, Human
cuuccugcuccccugccaauuc

SEQ ID NO: 170673 - RNA, 22 nt, Human
acauaucuuucccucuccugaa

SEQ ID NO: 170674 - RNA, 22 nt, Human
uggaccugcuggaugggcaggu

SEQ ID NO: 170675 - RNA, 23 nt, Human
aggauuuaaaggcaaugcauuuu

SEQ ID NO: 170676 - RNA, 22 nt, Human
agcugcaacaucugcuuguccc

SEQ ID NO: 170677 - RNA, 22 nt, Human
ucuguucaagacugaggugaca

SEQ ID NO: 170678 - RNA, 22 nt, Human
ugaaauaauaucuggaucaauc

SEQ ID NO: 170679 - RNA, 22 nt, Human
agugaggggcagcugagugggc

SEQ ID NO: 170680 - RNA, 22 nt, Human
uuuaggcaaauuucagaugugc

SEQ ID NO: 170681 - RNA, 22 nt, Human
uggcuuaagauuuaugcuuuua

SEQ ID NO: 170682 - RNA, 22 nt, Human
ugaccugcguaggugguuucug

SEQ ID NO: 170683 - RNA, 22 nt, Human
augauugcagcccuacagcugu

SEQ ID NO: 170684 - RNA, 22 nt, Human
aagggcagggaguuugugucua

SEQ ID NO: 170685 - RNA, 22 nt, Human
acagguguccucacagggggug

SEQ ID NO: 170686 - RNA, 22 nt, Human
cuucuuaacuguauauacuaug

SEQ ID NO: 170687 - RNA, 22 nt, Human
cucagagaaaugucacaacaau

SEQ ID NO: 170688 - RNA, 22 nt, Human
aaugauuuggcaaaggaaucca

SEQ ID NO: 170689 - RNA, 22 nt, Human
aguacaaugucugacacaguag

SEQ ID NO: 170690 - RNA, 22 nt, Human
acaggugucugcaaguuacugg

SEQ ID NO: 170691 - RNA, 22 nt, Human
auaucagaaauaguaagcagag

SEQ ID NO: 170692 - RNA, 22 nt, Human
augcauugucugguuucauuuu

SEQ ID NO: 170693 - RNA, 22 nt, Human
uugcuuuaccauuugaucucua

SEQ ID NO: 170694 - RNA, 22 nt, Human
acagugugguuugagcacuggg

SEQ ID NO: 170695 - RNA, 22 nt, Human
uucuucaaagaugucuguugga

SEQ ID NO: 170696 - RNA, 22 nt, Human
ugucaccagcugcuccucagga

SEQ ID NO: 170697 - RNA, 22 nt, Human
uuucccaguucccugcucuaua

SEQ ID NO: 170698 - RNA, 18 nt, Human
auugcuuuuguaccaacc

SEQ ID NO: 170699 - RNA, 23 nt, Human
uucuuucaagaaguucacagugc

SEQ ID NO: 170700 - RNA, 22 nt, Human
agagggugggcacgugauggau

SEQ ID NO: 170701 - RNA, 22 nt, Human
agaucugaaucucauccgagga

SEQ ID NO: 170702 - RNA, 21 nt, Human
caagccagaccaauagcagcc

SEQ ID NO: 170703 - RNA, 22 nt, Human
aauauuaucaaaagcuuuuuca

SEQ ID NO: 170704 - RNA, 22 nt, Human
auguguaugcaugcacuaagau

SEQ ID NO: 170705 - RNA, 22 nt, Human
cuuucaacuacauacaggcgau

SEQ ID NO: 170706 - RNA, 22 nt, Human
gcaaauacauguugagcaccua

SEQ ID NO: 170707 - RNA, 22 nt, Human
gcuuggccagcagccgggaugc

SEQ ID NO: 170708 - RNA, 22 nt, Human
uaagacuucauuaguaauaugg

SEQ ID NO: 170709 - RNA, 22 nt, Human
ugaaugaaugaauuaauagagu

SEQ ID NO: 170710 - RNA, 22 nt, Human
ugucaaaaugacuuuacuacag

SEQ ID NO: 170711 - RNA, 22 nt, Human
uaguccuuacuuacuagaauaa

SEQ ID NO: 170712 - RNA, 22 nt, Human
uuucucagucacaugaaccaau

SEQ ID NO: 170713 - RNA, 22 nt, Human
cuggcugggagcgagcugcuca

SEQ ID NO: 170714 - RNA, 22 nt, Human
uugcuuuauguguaugacuuga

SEQ ID NO: 170715 - RNA, 22 nt, Human
gguuucaacuucaaccucucca

SEQ ID NO: 170716 - RNA, 22 nt, Human
cucuccaggacuuuggcccaau

SEQ ID NO: 170717 - RNA, 22 nt, Human
cauggaauuuucuaggcauaaa

SEQ ID NO: 170718 - RNA, 22 nt, Human
aacacuuugggcauggccuucc

SEQ ID NO: 170719 - RNA, 22 nt, Human
uauuccaguccuauccucuuuu

SEQ ID NO: 170720 - RNA, 22 nt, Human
caaagccaggcuuucuaaugua

SEQ ID NO: 170721 - RNA, 22 nt, Human
acuguucaagcaaaugacauug

SEQ ID NO: 170722 - RNA, 22 nt, Human
cuguguccugucuccuaaggug

SEQ ID NO: 170723 - RNA, 22 nt, Human
uugcuuuaaugagauuuugcca

SEQ ID NO: 170724 - RNA, 22 nt, Human
auuaaagacagcagauggaugg

SEQ ID NO: 170725 - RNA, 22 nt, Human
aguaaaaucaccaucucuuugu

SEQ ID NO: 170726 - RNA, 21 nt, Human
auggcuuuuuuaaagcuugug

SEQ ID NO: 170727 - RNA, 22 nt, Human
acauguguuuuccuacuuauga

SEQ ID NO: 170728 - RNA, 22 nt, Human
aggaccuguagggccugcaucc

SEQ ID NO: 170729 - RNA, 22 nt, Human
caguguggcugagacagaggcu

SEQ ID NO: 170730 - RNA, 22 nt, Human
caauuucagaccuuuccuugga

SEQ ID NO: 170731 - RNA, 22 nt, Human
ugaaaagacugcaagagagcau

SEQ ID NO: 170732 - RNA, 22 nt, Human
augaguugaagcuacaagaggc

SEQ ID NO: 170733 - RNA, 22 nt, Human
cuuaauuuuuguaguagaugga

SEQ ID NO: 170734 - RNA, 15 nt, Human
gggcaggucuggggc

SEQ ID NO: 170735 - RNA, 22 nt, Human
ugcaugaacacaugugcaugua

SEQ ID NO: 170736 - RNA, 22 nt, Human
cuuucucaaugccggaaggcac

SEQ ID NO: 170737 - RNA, 20 nt, Human
aguacaauguaugauucaga

SEQ ID NO: 170738 - RNA, 22 nt, Human
cugcagggaugugaggcccguu

SEQ ID NO: 170739 - RNA, 22 nt, Human
gcuguucauagaaauggucuca

SEQ ID NO: 170740 - RNA, 22 nt, Human
cagcuuuggcccagucgggagg

SEQ ID NO: 170741 - RNA, 23 nt, Human
ucucuuucaagagcuuaaugugc

SEQ ID NO: 170742 - RNA, 22 nt, Human
agagugauucuaguuagggaau

SEQ ID NO: 170743 - RNA, 22 nt, Human
cacgguggcccacaggugcaag

SEQ ID NO: 170744 - RNA, 22 nt, Human
cauuugaauuguucugugggaa

SEQ ID NO: 170745 - RNA, 22 nt, Human
ucaauaaaauuguuuuccuauc

SEQ ID NO: 170746 - RNA, 22 nt, Human
aaauaauguuaggccuuugcuc

SEQ ID NO: 170747 - RNA, 22 nt, Human
gguguccucggauucagggcag

SEQ ID NO: 170748 - RNA, 22 nt, Human
gugaaaauaaggcugguucuug

SEQ ID NO: 170749 - RNA, 22 nt, Human
cuggcuguaacauuuugccaua

SEQ ID NO: 170750 - RNA, 22 nt, Human
aggaccauccuaagguaggcaa

SEQ ID NO: 170751 - RNA, 20 nt, Human
cagggcucugggccuggccu

SEQ ID NO: 170752 - RNA, 22 nt, Human
uaucugagaaagaagcaccaga

SEQ ID NO: 170753 - RNA, 22 nt, Human
aaggcuuuugggaauuuucaac

SEQ ID NO: 170754 - RNA, 22 nt, Human
uacauguuugguaaaugauggc

SEQ ID NO: 170755 - RNA, 19 nt, Human
uuucagacucaucuccagc

SEQ ID NO: 170756 - RNA, 22 nt, Human
cugacagaugcugcuggcagua

SEQ ID NO: 170757 - RNA, 22 nt, Human
uaagaaacauuuuuaugacagu

SEQ ID NO: 170758 - RNA, 22 nt, Human
gcagcuuuggagguggaacucu

SEQ ID NO: 170759 - RNA, 22 nt, Human
ucuguucagaagaggugaaagu

SEQ ID NO: 170760 - RNA, 22 nt, Human
gaggcauaaguagaagagauug

SEQ ID NO: 170761 - RNA, 22 nt, Human
aaguccuuauguggaggggcua

SEQ ID NO: 170762 - RNA, 22 nt, Human
uuucauugucaauaaacuguau

SEQ ID NO: 170763 - RNA, 22 nt, Human
gcaggugugcugaauuacguga

SEQ ID NO: 170764 - RNA, 23 nt, Human
gauugcuguaugcaggagcauuc

SEQ ID NO: 170765 - RNA, 22 nt, Human
auaugauuccacuauuguaugg

SEQ ID NO: 170766 - RNA, 22 nt, Human
acaacuuucuggguuaucugau

SEQ ID NO: 170767 - RNA, 22 nt, Human
uuccaugccucuauuuagaauu

SEQ ID NO: 170768 - RNA, 22 nt, Human
aaucuucuacuugacaguucuc

SEQ ID NO: 170769 - RNA, 22 nt, Human
uccaggcauguugggaagauga

SEQ ID NO: 170770 - RNA, 22 nt, Human
cuuugcaaacugucacacuuuc

SEQ ID NO: 170771 - RNA, 22 nt, Human
auuauuaggugcucucugacaa

SEQ ID NO: 170772 - RNA, 22 nt, Human
uagggcagccuuauagcuccca

SEQ ID NO: 170773 - RNA, 22 nt, Human
ugugauauuugaguauugucaa

SEQ ID NO: 170774 - RNA, 22 nt, Human
ccaggccuggaccaugccaggg

SEQ ID NO: 170775 - RNA, 22 nt, Human
acagguggcacugcuguuacuc

SEQ ID NO: 170776 - RNA, 22 nt, Human
agucaguguucuggguuguaau

SEQ ID NO: 170777 - RNA, 22 nt, Human
uuuuauugucucccaguucugg

SEQ ID NO: 170778 - RNA, 22 nt, Human
ucuggguggcugccaaucugcc

SEQ ID NO: 170779 - RNA, 22 nt, Human
guauagaaacccagaaagauag

SEQ ID NO: 170780 - RNA, 22 nt, Human
gaauauauuggugaaaauaguu

SEQ ID NO: 170781 - RNA, 21 nt, Human
agacaggucagggagagguga

SEQ ID NO: 170782 - RNA, 22 nt, Human
ugcaaaaaggcagacuggugau

SEQ ID NO: 170783 - RNA, 22 nt, Human
uuucacauaaauauuaugccua

SEQ ID NO: 170784 - RNA, 22 nt, Human
cugaauaauauuccauuaugag

SEQ ID NO: 170785 - RNA, 22 nt, Human
agaugaaaauacgugacuuuaa

SEQ ID NO: 170786 - RNA, 22 nt, Human
acuacaguacuauaucuauagg

SEQ ID NO: 170787 - RNA, 22 nt, Human
aucuacccacugaacacaauau

SEQ ID NO: 170788 - RNA, 22 nt, Human
gaucagaauuuacuuauaauug

SEQ ID NO: 170789 - RNA, 22 nt, Human
aaagauuuaagaauaauuugug

SEQ ID NO: 170790 - RNA, 22 nt, Human
ugaguacucggagugcuuugga

SEQ ID NO: 170791 - RNA, 22 nt, Human
augguuuaaagaguaugacuuu

SEQ ID NO: 170792 - RNA, 22 nt, Human
uccuggauaucaaacaaacauu

SEQ ID NO: 170793 - RNA, 22 nt, Human
uucucuuuugugaugugagaug

SEQ ID NO: 170794 - RNA, 20 nt, Human
uccaugaguuagagacuaua

SEQ ID NO: 170795 - RNA, 15 nt, Human
uuggaggauguagua

SEQ ID NO: 170796 - RNA, 22 nt, Human
caguucuuuguggggaguucuc

SEQ ID NO: 170797 - RNA, 19 nt, Human
uccagaugauauggauuac

SEQ ID NO: 170798 - RNA, 22 nt, Human
acauuucucuugaugucucuau

SEQ ID NO: 170799 - RNA, 22 nt, Human
cacaugugcaaauacugaggcu

SEQ ID NO: 170800 - RNA, 22 nt, Human
ggcuggguacagggcagugugc

SEQ ID NO: 170801 - RNA, 18 nt, Human
ucagagagcagcuuuauu

SEQ ID NO: 170802 - RNA, 22 nt, Human
uauuacaauuuacauugcacuu

SEQ ID NO: 170803 - RNA, 22 nt, Human
ccugggucuugguucaugcucu

SEQ ID NO: 170804 - RNA, 22 nt, Human
gaucagaauucuuguguguuuc

SEQ ID NO: 170805 - RNA, 22 nt, Human
uuggauuacaugaaaugcagaa

SEQ ID NO: 170806 - RNA, 22 nt, Human
cagaguggcgacccccucagcu

SEQ ID NO: 170807 - RNA, 22 nt, Human
gacauaauccuccucaccuacu

SEQ ID NO: 170808 - RNA, 22 nt, Human
cucauacauaugccauuccugc

SEQ ID NO: 170809 - RNA, 22 nt, Human
ucuuuaauuguggaagagcagc

SEQ ID NO: 170810 - RNA, 22 nt, Human
ugucuuuauauauuuggaaaau

SEQ ID NO: 170811 - RNA, 22 nt, Human
aucuuucaguuucauaccaauu

SEQ ID NO: 170812 - RNA, 22 nt, Human
gguccuuugaaagggguguguc

SEQ ID NO: 170813 - RNA, 22 nt, Human
ggggcuccagucuucacauuuu

SEQ ID NO: 170814 - RNA, 22 nt, Human
gacagacauuuccugauccaau

SEQ ID NO: 170815 - RNA, 22 nt, Human
cauuuccacucugggagucaga

SEQ ID NO: 170816 - RNA, 21 nt, Human
caugugucuuguguuacugcu

SEQ ID NO: 170817 - RNA, 22 nt, Human
ugcaggugguacuucuuuuucu

SEQ ID NO: 170818 - RNA, 22 nt, Human
uagaaacagaaaacuguaauag

SEQ ID NO: 170819 - RNA, 22 nt, Human
cuccgcagcgggccaauccgga

SEQ ID NO: 170820 - RNA, 16 nt, Human
gcagguggaucaccug

SEQ ID NO: 170821 - RNA, 22 nt, Human
ugcauuuuuaacaaggcuaauu

SEQ ID NO: 170822 - RNA, 22 nt, Human
uugcuuuauauucaagagagga

SEQ ID NO: 170823 - RNA, 22 nt, Human
uccaggcagagcaacaaaauau

SEQ ID NO: 170824 - RNA, 22 nt, Human
ccuauacagccucagcugagau

SEQ ID NO: 170825 - RNA, 22 nt, Human
agcugcaauacccuucuuccuu

SEQ ID NO: 170826 - RNA, 22 nt, Human
uagggaugaagaugguauuucu

SEQ ID NO: 170827 - RNA, 22 nt, Human
ugcuauacggagcaucuucagg

SEQ ID NO: 170828 - RNA, 22 nt, Human
uggcagggccugcucaucaucc

SEQ ID NO: 170829 - RNA, 22 nt, Human
gagggcagagacagugauucac

SEQ ID NO: 170830 - RNA, 17 nt, Human
ccuuccucaucuccuuc

SEQ ID NO: 170831 - RNA, 22 nt, Human
guguguccaggcgggagucaag

SEQ ID NO: 170832 - RNA, 22 nt, Human
gaaggcuguuucugguagugau

SEQ ID NO: 170833 - RNA, 22 nt, Human
agguggucuuaaacugcucugg

SEQ ID NO: 170834 - RNA, 21 nt, Human
guuauugaccuccaggcuggc

SEQ ID NO: 170835 - RNA, 22 nt, Human
aauucuauaggcaagcuauuuu

SEQ ID NO: 170836 - RNA, 22 nt, Human
guauuaggaaauaugaagaaag

SEQ ID NO: 170837 - RNA, 22 nt, Human
ugggcaggagagaagcuaaaga

SEQ ID NO: 170838 - RNA, 22 nt, Human
uucauguaauuccauaagguaa

SEQ ID NO: 170839 - RNA, 22 nt, Human
ucauuacaguguuuauaugucu

SEQ ID NO: 170840 - RNA, 22 nt, Human
acugaugaagaguaccacuguu

SEQ ID NO: 170841 - RNA, 22 nt, Human
agaagcuaggcuagacaaguga

SEQ ID NO: 170842 - RNA, 22 nt, Human
cauguuaaugaauuuuugcagu

SEQ ID NO: 170843 - RNA, 21 nt, Human
aguugcugcugcugcagguga

SEQ ID NO: 170844 - RNA, 22 nt, Human
auugaaaauaaggccagaaaca

SEQ ID NO: 170845 - RNA, 22 nt, Human
cuguguccauuuaucauuguca

SEQ ID NO: 170846 - RNA, 22 nt, Human
auaguguuacccuucuuaaagu

SEQ ID NO: 170847 - RNA, 22 nt, Human
ugucugggauguaauuccugcc

SEQ ID NO: 170848 - RNA, 22 nt, Human
agauaaugaaugccaugacauu

SEQ ID NO: 170849 - RNA, 22 nt, Human
aacauauaaacucuuaaguuca

SEQ ID NO: 170850 - RNA, 22 nt, Human
ugucaauauguaauaacugaau

SEQ ID NO: 170851 - RNA, 22 nt, Human
uaggauuuaggcuuuaacaucu

SEQ ID NO: 170852 - RNA, 22 nt, Human
caaaugauaccuauuacuaggc

SEQ ID NO: 170853 - RNA, 22 nt, Human
aggcucccaagcacugacccca

SEQ ID NO: 170854 - RNA, 22 nt, Human
augaaaauacugugguugauag

SEQ ID NO: 170855 - RNA, 22 nt, Human
uauccaaacauauagucucucu

SEQ ID NO: 170856 - RNA, 22 nt, Human
agcuuuaugcuuccuacaagcu

SEQ ID NO: 170857 - RNA, 22 nt, Human
uccuccuucgggacugcuugac

SEQ ID NO: 170858 - RNA, 22 nt, Human
aguaaacauuucagauuuauuu

SEQ ID NO: 170859 - RNA, 22 nt, Human
uuuauccaaggguuuuaacugu

SEQ ID NO: 170860 - RNA, 22 nt, Human
ccuucuccccucugcagggugu

SEQ ID NO: 170861 - RNA, 22 nt, Human
acuguacuuuagaaaguguagu

SEQ ID NO: 170862 - RNA, 22 nt, Human
cacaggugugugccuuaucaaa

SEQ ID NO: 170863 - RNA, 22 nt, Human
cagcuuuauuaaugauugucuu

SEQ ID NO: 170864 - RNA, 22 nt, Human
gaggccagaaugagcugaaugc

SEQ ID NO: 170865 - RNA, 22 nt, Human
uagaaacauguucuguucuguu

SEQ ID NO: 170866 - RNA, 22 nt, Human
ucagguguaucauggaguugaa

SEQ ID NO: 170867 - RNA, 22 nt, Human
ggcaggcauuagagauucccag

SEQ ID NO: 170868 - RNA, 21 nt, Human
acagugugcuucucucccucc

SEQ ID NO: 170869 - RNA, 22 nt, Human
cauagaaaguauuauggaauuu

SEQ ID NO: 170870 - RNA, 22 nt, Human
uacaguauggaaaauguauagu

SEQ ID NO: 170871 - RNA, 22 nt, Human
uacccagggcuuuucugaugca

SEQ ID NO: 170872 - RNA, 22 nt, Human
uuuagggaagaagcccauggcc

SEQ ID NO: 170873 - RNA, 22 nt, Human
gaaugaauuuuggauggugaag

SEQ ID NO: 170874 - RNA, 22 nt, Human
uuuugcuguuauaugcuauuau

SEQ ID NO: 170875 - RNA, 22 nt, Human
ucccuucuggcagcagugugag

SEQ ID NO: 170876 - RNA, 22 nt, Human
aggcaguggcugagaccagggg

SEQ ID NO: 170877 - RNA, 22 nt, Human
acagcauggauaacaaggcacu

SEQ ID NO: 170878 - RNA, 22 nt, Human
uucauaaugagguccuagaggc

SEQ ID NO: 170879 - RNA, 21 nt, Human
uaucaagauguuaugguugaa

SEQ ID NO: 170880 - RNA, 22 nt, Human
ccacagagacaggguccuugcu

SEQ ID NO: 170881 - RNA, 22 nt, Human
cuggacucugcagagaaaagua

SEQ ID NO: 170882 - RNA, 22 nt, Human
ugugaaaagcaggcuacuuucu

SEQ ID NO: 170883 - RNA, 22 nt, Human
aggauuuagauuuggaggaacu

SEQ ID NO: 170884 - RNA, 22 nt, Human
caaaugcuacuaauaggcaagu

SEQ ID NO: 170885 - RNA, 22 nt, Human
gggacccugggaggcuggcgca

SEQ ID NO: 170886 - RNA, 22 nt, Human
cuuccaaaauuuauauguugaa

SEQ ID NO: 170887 - RNA, 22 nt, Human
cuuuaguuauuuagacuacagu

SEQ ID NO: 170888 - RNA, 22 nt, Human
cguguccuuuuagcuucagguc

SEQ ID NO: 170889 - RNA, 22 nt, Human
acuuggugaagucaggugauua

SEQ ID NO: 170890 - RNA, 20 nt, Human
gccaggcacuguucucaaua

SEQ ID NO: 170891 - RNA, 21 nt, Human
gcugccaccgcgugcuccagg

SEQ ID NO: 170892 - RNA, 22 nt, Human
uugugucccugcggcugaggag

SEQ ID NO: 170893 - RNA, 22 nt, Human
augcuuaacucuguacauaguu

SEQ ID NO: 170894 - RNA, 22 nt, Human
uguccuggugcuucuugggauu

SEQ ID NO: 170895 - RNA, 22 nt, Human
ucugaagauuaccagcuaaaug

SEQ ID NO: 170896 - RNA, 22 nt, Human
uuccuuagcuccucauggccug

SEQ ID NO: 170897 - RNA, 22 nt, Human
ugcagggcuccuggcuccaauc

SEQ ID NO: 170898 - RNA, 20 nt, Human
uuucugugagaaacacuguu

SEQ ID NO: 170899 - RNA, 22 nt, Human
acagggcaaccucugggagacu

SEQ ID NO: 170900 - RNA, 22 nt, Human
ugacaggugaaauguccuuauu

SEQ ID NO: 170901 - RNA, 22 nt, Human
gaauacauuggaaaucagaaua

SEQ ID NO: 170902 - RNA, 22 nt, Human
ugccugggaucugugcccuuug

SEQ ID NO: 170903 - RNA, 22 nt, Human
ccagaauuuggaucaugauuuu

SEQ ID NO: 170904 - RNA, 22 nt, Human
gggacuuaaugcagagagggac

SEQ ID NO: 170905 - RNA, 22 nt, Human
caggcagcugacugucagauau

SEQ ID NO: 170906 - RNA, 22 nt, Human
ggcagugggaaauaagugagaa

SEQ ID NO: 170907 - RNA, 22 nt, Human
ucaaauaccagcuuuuccagaa

SEQ ID NO: 170908 - RNA, 22 nt, Human
aaacaugcauucaagaaaaucu

SEQ ID NO: 170909 - RNA, 22 nt, Human
ucuuucuuuaucaccugauaug

SEQ ID NO: 170910 - RNA, 22 nt, Human
ugcagggcuacaggacuacaac

SEQ ID NO: 170911 - RNA, 22 nt, Human
cugaggaagacagcagcugugu

SEQ ID NO: 170912 - RNA, 22 nt, Human
gcagggcacaaggacgcacagg

SEQ ID NO: 170913 - RNA, 22 nt, Human
guuagggaagcgcuguguucuu

SEQ ID NO: 170914 - RNA, 22 nt, Human
cuagugagucugaaugaguugc

SEQ ID NO: 170915 - RNA, 23 nt, Human
cccagagcacagccuccagaugc

SEQ ID NO: 170916 - RNA, 22 nt, Human
uggauuuauggagaccgaaagu

SEQ ID NO: 170917 - RNA, 19 nt, Human
ugccuggacaaaugugggg

SEQ ID NO: 170918 - RNA, 22 nt, Human
cacagguguucuugcagugaaa

SEQ ID NO: 170919 - RNA, 22 nt, Human
auaaaugccucagaaucauccc

SEQ ID NO: 170920 - RNA, 22 nt, Human
cauuaauauuguucuucuuuag

SEQ ID NO: 170921 - RNA, 22 nt, Human
uuucauugaugggugauagaaa

SEQ ID NO: 170922 - RNA, 18 nt, Human
uccugcagcuucuaugua

SEQ ID NO: 170923 - RNA, 22 nt, Human
caggugucagcagcacuguacu

SEQ ID NO: 170924 - RNA, 22 nt, Human
ccagguggcuucugcccgaugu

SEQ ID NO: 170925 - RNA, 22 nt, Human
aguauacaguaaugacauaucu

SEQ ID NO: 170926 - RNA, 22 nt, Human
auuagagguacaaaccuucacu

SEQ ID NO: 170927 - RNA, 22 nt, Human
aacauaauguggccaaagucac

SEQ ID NO: 170928 - RNA, 22 nt, Human
cacaugugggaaauggugcuua

SEQ ID NO: 170929 - RNA, 22 nt, Human
gcagcuuuguggagaggcccau

SEQ ID NO: 170930 - RNA, 22 nt, Human
aaauuauuaugccccucuauaa

SEQ ID NO: 170931 - RNA, 22 nt, Human
ccaggccuucugaggacacucu

SEQ ID NO: 170932 - RNA, 22 nt, Human
aaugaacagauacacauaggca

SEQ ID NO: 170933 - RNA, 22 nt, Human
gggaauguaaucauggaaugcu

SEQ ID NO: 170934 - RNA, 22 nt, Human
aguguccuuucuguuccagcca

SEQ ID NO: 170935 - RNA, 22 nt, Human
ucucuuaauaaguaaauacuga

SEQ ID NO: 170936 - RNA, 22 nt, Human
guguguccacacauacauacau

SEQ ID NO: 170937 - RNA, 22 nt, Human
cuuaaauuuucaucuacaagaa

SEQ ID NO: 170938 - RNA, 20 nt, Human
uuuaucugugggaguggaga

SEQ ID NO: 170939 - RNA, 22 nt, Human
gcagggcacacaagaaugauaa

SEQ ID NO: 170940 - RNA, 19 nt, Human
ccaggccuggcgucuccgc

SEQ ID NO: 170941 - RNA, 22 nt, Human
ugcuuuauaaccauuucugugg

SEQ ID NO: 170942 - RNA, 22 nt, Human
caaagucagccagcuaguaggu

SEQ ID NO: 170943 - RNA, 22 nt, Human
auuuucaucauggguuuaacau

SEQ ID NO: 170944 - RNA, 22 nt, Human
uauaauuuggggaaaguggugu

SEQ ID NO: 170945 - RNA, 17 nt, Human
cuguuaauucauuuccc

SEQ ID NO: 170946 - RNA, 23 nt, Human
uuccagaguccacaucugccacc

SEQ ID NO: 170947 - RNA, 22 nt, Human
gggucuggcaugcugagaugga

SEQ ID NO: 170948 - RNA, 22 nt, Human
uucugcaucugaauuuaaguac

SEQ ID NO: 170949 - RNA, 22 nt, Human
acacaaauuguaggauaauugc

SEQ ID NO: 170950 - RNA, 22 nt, Human
aaagcagauucugaugcaguag

SEQ ID NO: 170951 - RNA, 21 nt, Human
gauaaaaugggccuugguccu

SEQ ID NO: 170952 - RNA, 22 nt, Human
auguccagccaaccacuggauu

SEQ ID NO: 170953 - RNA, 22 nt, Human
agaaagcaucuccauuguaggu

SEQ ID NO: 170954 - RNA, 22 nt, Human
aaguaguuaguccgccugcucu

SEQ ID NO: 170955 - RNA, 22 nt, Human
auauacugaggagacuuuauau

SEQ ID NO: 170956 - RNA, 23 nt, Human
auauuagggagauuagcccucua

SEQ ID NO: 170957 - RNA, 22 nt, Human
cuuuauuguccuucuuaggugg

SEQ ID NO: 170958 - RNA, 22 nt, Human
uuuuugcugauaagcagaauuc

SEQ ID NO: 170959 - RNA, 22 nt, Human
cuguccugggggugguccuugc

SEQ ID NO: 170960 - RNA, 22 nt, Human
auucuucaccauggauaauuug

SEQ ID NO: 170961 - RNA, 21 nt, Human
aaauacagaaacuuguuuuca

SEQ ID NO: 170962 - RNA, 22 nt, Human
gggcagguacaagaugcuucuu

SEQ ID NO: 170963 - RNA, 16 nt, Human
gcaacuuugggguuga

SEQ ID NO: 170964 - RNA, 22 nt, Human
aaguuucauuguucauguaaca

SEQ ID NO: 170965 - RNA, 22 nt, Human
auuuccaugccuuagcuuaagg

SEQ ID NO: 170966 - RNA, 22 nt, Human
uuauugacugaucagagaggga

SEQ ID NO: 170967 - RNA, 22 nt, Human
aaauuguugaucuacaguaagg

SEQ ID NO: 170968 - RNA, 22 nt, Human
guguguccuguuuuaaaauagu

SEQ ID NO: 170969 - RNA, 22 nt, Human
uuucuaggucuuccauacugcc

SEQ ID NO: 170970 - RNA, 22 nt, Human
aggaggugcuguuuguccugga

SEQ ID NO: 170971 - RNA, 22 nt, Human
cacaauuuggugcuaaagaaag

SEQ ID NO: 170972 - RNA, 22 nt, Human
gucuaacaagcauuaggaaccc

SEQ ID NO: 170973 - RNA, 17 nt, Human
agacagguuauaguuga

SEQ ID NO: 170974 - RNA, 22 nt, Human
gaacuugguauuccuuuuaaca

SEQ ID NO: 170975 - RNA, 22 nt, Human
uauuuccaagcugaauccaaug

SEQ ID NO: 170976 - RNA, 22 nt, Human
ggaucugauuaauaagguggac

SEQ ID NO: 170977 - RNA, 22 nt, Human
aagacauugucauuuuauaauu

SEQ ID NO: 170978 - RNA, 22 nt, Human
aauaauuuuagcucagaguugu

SEQ ID NO: 170979 - RNA, 22 nt, Human
gauaaugaugacaaugacaacc

SEQ ID NO: 170980 - RNA, 22 nt, Human
gaauguaauagucaguagaaca

SEQ ID NO: 170981 - RNA, 22 nt, Human
aagcuuuaaggaauuuuaugga

SEQ ID NO: 170982 - RNA, 22 nt, Human
cagggcagaacauauagauagu

SEQ ID NO: 170983 - RNA, 22 nt, Human
auaaugaggauuugcauauuag

SEQ ID NO: 170984 - RNA, 22 nt, Human
aagggcucugcugucucucccc

SEQ ID NO: 170985 - RNA, 22 nt, Human
agcugccauggccugaauuuac

SEQ ID NO: 170986 - RNA, 22 nt, Human
ccugggugaaugauauucuaaa

SEQ ID NO: 170987 - RNA, 14 nt, Human
gcaggcagaucacu

SEQ ID NO: 170988 - RNA, 22 nt, Human
agcugcaaaggcacacuugggc

SEQ ID NO: 170989 - RNA, 22 nt, Human
cucugcccucgcacaucugcca

SEQ ID NO: 170990 - RNA, 22 nt, Human
gugcaggguagcgacggcagga

SEQ ID NO: 170991 - RNA, 22 nt, Human
auacagaagaccccuccgucau

SEQ ID NO: 170992 - RNA, 22 nt, Human
gguguccuuugggggcuccgag

SEQ ID NO: 170993 - RNA, 22 nt, Human
augaaugggucauuauuugauc

SEQ ID NO: 170994 - RNA, 22 nt, Human
aaagaaucuauauaucaccacc

SEQ ID NO: 170995 - RNA, 22 nt, Human
ggagaggguagggguccugccc

SEQ ID NO: 170996 - RNA, 22 nt, Human
guuagaauaaaaggucagagag

SEQ ID NO: 170997 - RNA, 22 nt, Human
uuugacucuagucauagaagug

SEQ ID NO: 170998 - RNA, 22 nt, Human
ucagguguucuccacucaguuu

SEQ ID NO: 170999 - RNA, 22 nt, Human
gagacaggauuuaaccaaagcu

SEQ ID NO: 171000 - RNA, 22 nt, Human
aggaaacuguccccucauccua

SEQ ID NO: 171001 - RNA, 22 nt, Human
aaguuacacauuuucauuguaa

SEQ ID NO: 171002 - RNA, 22 nt, Human
agacaaaugguaauuaugucua

SEQ ID NO: 171003 - RNA, 22 nt, Human
agaaagcacucugucuuuuacc

SEQ ID NO: 171004 - RNA, 21 nt, Human
auaauguacaaaaacugucuu

SEQ ID NO: 171005 - RNA, 22 nt, Human
gaucuucuauguaaugaagugu

SEQ ID NO: 171006 - RNA, 22 nt, Human
auacaaauuuauagaugcauuu

SEQ ID NO: 171007 - RNA, 22 nt, Human
acaaaaagggagaugagguaga

SEQ ID NO: 171008 - RNA, 22 nt, Human
uguuucuuuguagauauucuuu

SEQ ID NO: 171009 - RNA, 22 nt, Human
uauugguaugguaagaauugaa

SEQ ID NO: 171010 - RNA, 22 nt, Human
ucugaagagcuuuggaaguaug

SEQ ID NO: 171011 - RNA, 22 nt, Human
acacaggacagggauguguuuu

SEQ ID NO: 171012 - RNA, 22 nt, Human
cauccaggcaccacaaccagcu

SEQ ID NO: 171013 - RNA, 22 nt, Human
ggacaggugacugcccagagug

SEQ ID NO: 171014 - RNA, 22 nt, Human
agcagggccuggcacuccuggg

SEQ ID NO: 171015 - RNA, 19 nt, Human
aaggugguuugucucugua

SEQ ID NO: 171016 - RNA, 22 nt, Human
aaagcuaugaggcaugcauuuc

SEQ ID NO: 171017 - RNA, 22 nt, Human
aguaaaaauugaggugcaaaau

SEQ ID NO: 171018 - RNA, 22 nt, Human
uaauuucuucaucucugcagcu

SEQ ID NO: 171019 - RNA, 22 nt, Human
augcuuaagcucaguuauauau

SEQ ID NO: 171020 - RNA, 18 nt, Human
ucagagagaauaguaauu

SEQ ID NO: 171021 - RNA, 22 nt, Human
uugcaggguacauucuuagaau

SEQ ID NO: 171022 - RNA, 22 nt, Human
gcaggcaggcuuccuugaacug

SEQ ID NO: 171023 - RNA, 22 nt, Human
acaggcacugucaagucaugaa

SEQ ID NO: 171024 - RNA, 22 nt, Human
cuucuucauaggcaguccuguu

SEQ ID NO: 171025 - RNA, 20 nt, Human
agacaaaaugacuucaugca

SEQ ID NO: 171026 - RNA, 22 nt, Human
uagguguccauauaugugugua

SEQ ID NO: 171027 - RNA, 22 nt, Human
uuucaguguaucuuccaaaagc

SEQ ID NO: 171028 - RNA, 22 nt, Human
uaucagaaagauauuacugggg

SEQ ID NO: 171029 - RNA, 22 nt, Human
gguuucaacuuuugugaggaau

SEQ ID NO: 171030 - RNA, 22 nt, Human
aggcaguguucuucuaagggca

SEQ ID NO: 171031 - RNA, 22 nt, Human
gagcagugagugaauguugccu

SEQ ID NO: 171032 - RNA, 22 nt, Human
aagcuuuaugacuuggagacag

SEQ ID NO: 171033 - RNA, 22 nt, Human
uggcaaaggaaccuauuuuaaa

SEQ ID NO: 171034 - RNA, 21 nt, Human
agguacuaaugaaaagugauu

SEQ ID NO: 171035 - RNA, 22 nt, Human
cuauuagguaugcagccuauuu

SEQ ID NO: 171036 - RNA, 23 nt, Human
uugauuucaaaugcagagaacac

SEQ ID NO: 171037 - RNA, 22 nt, Human
guagcuauuuaugauacucaug

SEQ ID NO: 171038 - RNA, 17 nt, Human
aggccucccuccaggcc

SEQ ID NO: 171039 - RNA, 22 nt, Human
acgugcaggaucugguuggcga

SEQ ID NO: 171040 - RNA, 19 nt, Human
auuuauuguaugauuccau

SEQ ID NO: 171041 - RNA, 22 nt, Human
uuuuauugucuguauugccuau

SEQ ID NO: 171042 - RNA, 22 nt, Human
uucuucuuaauguccugggaac

SEQ ID NO: 171043 - RNA, 22 nt, Human
cagagcagggguuucccagguu

SEQ ID NO: 171044 - RNA, 22 nt, Human
aaaauuuugcccuauccuucau

SEQ ID NO: 171045 - RNA, 22 nt, Human
uuccaagagcuuuaauuguuga

SEQ ID NO: 171046 - RNA, 22 nt, Human
uagaugcuacaauuuuguacuc

SEQ ID NO: 171047 - RNA, 22 nt, Human
aacuggauuuaggaacagagaa

SEQ ID NO: 171048 - RNA, 18 nt, Human
gggcucacacaggucauc

SEQ ID NO: 171049 - RNA, 22 nt, Human
uacauguauguguuaauaucug

SEQ ID NO: 171050 - RNA, 22 nt, Human
aguucacauaucuguuuuauuu

SEQ ID NO: 171051 - RNA, 22 nt, Human
ggguguggcugcgugccaauaa

SEQ ID NO: 171052 - RNA, 22 nt, Human
uagguauacagagauuucuggg

SEQ ID NO: 171053 - RNA, 22 nt, Human
gugaauaauuuuuuaguauaag

SEQ ID NO: 171054 - RNA, 22 nt, Human
gcuguggucccucuguccucau

SEQ ID NO: 171055 - RNA, 22 nt, Human
cauguguccuagcuauucuccu

SEQ ID NO: 171056 - RNA, 22 nt, Human
ccaugagccaggcugaggaagc

SEQ ID NO: 171057 - RNA, 22 nt, Human
aaguccauucuuccagccagcu

SEQ ID NO: 171058 - RNA, 22 nt, Human
acaaggcuguuggucacaaacc

SEQ ID NO: 171059 - RNA, 22 nt, Human
auucugggcgccuauggcugca

SEQ ID NO: 171060 - RNA, 22 nt, Human
auguguccuuauaagaagaaga

SEQ ID NO: 171061 - RNA, 22 nt, Human
cugcugccggcgagccucccuu

SEQ ID NO: 171062 - RNA, 22 nt, Human
uaaagcaguguugggucggacg

SEQ ID NO: 171063 - RNA, 22 nt, Human
uauuugauagagauaaaugaua

SEQ ID NO: 171064 - RNA, 22 nt, Human
ucagagagguuggugauaagaa

SEQ ID NO: 171065 - RNA, 22 nt, Human
uuuauauguuuguacaauuaag

SEQ ID NO: 171066 - RNA, 22 nt, Human
auccagaacaccuguaucacca

SEQ ID NO: 171067 - RNA, 22 nt, Human
aaaagguuuugaguacaaauau

SEQ ID NO: 171068 - RNA, 22 nt, Human
uuuuucauugcagccucucucc

SEQ ID NO: 171069 - RNA, 22 nt, Human
uuccuuagggaaagggauaagg

SEQ ID NO: 171070 - RNA, 22 nt, Human
gcacccagccagcaucucagag

SEQ ID NO: 171071 - RNA, 22 nt, Human
auggcuuaugaauaacaguagg

SEQ ID NO: 171072 - RNA, 22 nt, Human
auuuccaugaaggcagauuuua

SEQ ID NO: 171073 - RNA, 22 nt, Human
ucuggaucuccagcacuuauca

SEQ ID NO: 171074 - RNA, 22 nt, Human
cacauaauaaauguuccugaug

SEQ ID NO: 171075 - RNA, 22 nt, Human
uaucaauacauguuaucagugu

SEQ ID NO: 171076 - RNA, 22 nt, Human
guuucuuuuaaaauauguagac

SEQ ID NO: 171077 - RNA, 22 nt, Human
cauuuauucauuugcuagggcu

SEQ ID NO: 171078 - RNA, 22 nt, Human
ggcuuaaugguucuuuuucuca

SEQ ID NO: 171079 - RNA, 22 nt, Human
aaagcugcccagcugccuguuu

SEQ ID NO: 171080 - RNA, 22 nt, Human
uguccaggucagcagcagggac

SEQ ID NO: 171081 - RNA, 22 nt, Human
uuuauccagaaucaggauuuuu

SEQ ID NO: 171082 - RNA, 22 nt, Human
ucagaaauagucuuuaaaauga

SEQ ID NO: 171083 - RNA, 22 nt, Human
ggagcugaugguagaagaauga

SEQ ID NO: 171084 - RNA, 22 nt, Human
uaguccuuuaauaguuaaugug

SEQ ID NO: 171085 - RNA, 22 nt, Human
uguuauugagguuacuuauaag

SEQ ID NO: 171086 - RNA, 22 nt, Human
acuguccauucacucauauuca

SEQ ID NO: 171087 - RNA, 22 nt, Human
acagguguugaaugaugucaca

SEQ ID NO: 171088 - RNA, 22 nt, Human
ccucuaggauguggcuggagga

SEQ ID NO: 171089 - RNA, 22 nt, Human
uuuguuuacaaaaauaagcagu

SEQ ID NO: 171090 - RNA, 22 nt, Human
agauuuacuggagucuuuggug

SEQ ID NO: 171091 - RNA, 22 nt, Human
augguuuuguccucuuugguuc

SEQ ID NO: 171092 - RNA, 22 nt, Human
auaugaaaauguuuuagcugua

SEQ ID NO: 171093 - RNA, 22 nt, Human
acagguguagguacauuugcau

SEQ ID NO: 171094 - RNA, 22 nt, Human
uggcagguacccauuggcugua

SEQ ID NO: 171095 - RNA, 22 nt, Human
cacagcauucacagaaagacau

SEQ ID NO: 171096 - RNA, 22 nt, Human
cucuggccgcagcucagcucug

SEQ ID NO: 171097 - RNA, 22 nt, Human
agcuuuauggugccucacuuga

SEQ ID NO: 171098 - RNA, 22 nt, Human
cacaggugcaagaaguugcagu

SEQ ID NO: 171099 - RNA, 22 nt, Human
cagcaugagaaaaugaaucaga

SEQ ID NO: 171100 - RNA, 22 nt, Human
auauaguuggguuucauucuac

SEQ ID NO: 171101 - RNA, 22 nt, Human
ucugggaagcugcgugccuguu

SEQ ID NO: 171102 - RNA, 23 nt, Human
gcugugcacgagccacugccugu

SEQ ID NO: 171103 - RNA, 22 nt, Human
auacagaaguuuuccacuuauu

SEQ ID NO: 171104 - RNA, 22 nt, Human
ccauaauauuaaaugcuuuugu

SEQ ID NO: 171105 - RNA, 22 nt, Human
aaucagcuaaauaaacuaguca

SEQ ID NO: 171106 - RNA, 23 nt, Human
uuacagaaaguaugcuuuuguuu

SEQ ID NO: 171107 - RNA, 22 nt, Human
cugaauaauuuuauaguugcug

SEQ ID NO: 171108 - RNA, 22 nt, Human
cauuuauugguuaggccagcag

SEQ ID NO: 171109 - RNA, 22 nt, Human
uugggacaucuggcauacaguu

SEQ ID NO: 171110 - RNA, 22 nt, Human
acacugaauguuuaagaacuug

SEQ ID NO: 171111 - RNA, 22 nt, Human
uuauugcuuuggaaaacacuca

SEQ ID NO: 171112 - RNA, 22 nt, Human
acaugaaaaauguuugcaguuu

SEQ ID NO: 171113 - RNA, 22 nt, Human
gauggcuucagucuccuugggu

SEQ ID NO: 171114 - RNA, 22 nt, Human
uuacaguuuaguccaagccaga

SEQ ID NO: 171115 - RNA, 20 nt, Human
guaaaauauggucuuugggu

SEQ ID NO: 171116 - RNA, 22 nt, Human
uuuuauugcaauaaagugugua

SEQ ID NO: 171117 - RNA, 22 nt, Human
uagaaauggagaacagauuaau

SEQ ID NO: 171118 - RNA, 22 nt, Human
acacaaguucuaaagauugcgc

SEQ ID NO: 171119 - RNA, 22 nt, Human
augcaacaaaugcuacgaaucg

SEQ ID NO: 171120 - RNA, 22 nt, Human
gggaccuggacaugugugugcu

SEQ ID NO: 171121 - RNA, 22 nt, Human
ugcuuuauucgacaucugguag

SEQ ID NO: 171122 - RNA, 22 nt, Human
gguaaaaaucacaaauacuuua

SEQ ID NO: 171123 - RNA, 22 nt, Human
ucauacacaagagcauguaaca

SEQ ID NO: 171124 - RNA, 22 nt, Human
uuuccauguuggugaaaugagg

SEQ ID NO: 171125 - RNA, 22 nt, Human
cagggcagcuuccuuuguuagg

SEQ ID NO: 171126 - RNA, 22 nt, Human
aaguccuuucucauggaggaau

SEQ ID NO: 171127 - RNA, 22 nt, Human
uccuucuggaggcuguaaagga

SEQ ID NO: 171128 - RNA, 22 nt, Human
uguacuauuaagaggccuaaau

SEQ ID NO: 171129 - RNA, 22 nt, Human
uuuauugucuaugaacugcuug

SEQ ID NO: 171130 - RNA, 22 nt, Human
cauagcuuagggguuaaacuca

SEQ ID NO: 171131 - RNA, 22 nt, Human
caguaaauuaucucaucucugu

SEQ ID NO: 171132 - RNA, 22 nt, Human
aaggaugaacauuaauacauca

SEQ ID NO: 171133 - RNA, 22 nt, Human
acuucauuguaauauuauagca

SEQ ID NO: 171134 - RNA, 22 nt, Human
guucuauuccccuuaucuguga

SEQ ID NO: 171135 - RNA, 22 nt, Human
gugcaaaagucauugugguuuu

SEQ ID NO: 171136 - RNA, 22 nt, Human
ggcaggugaucuagagucaaua

SEQ ID NO: 171137 - RNA, 22 nt, Human
cauuuguauagugcuuagacca

SEQ ID NO: 171138 - RNA, 22 nt, Human
uggcaaggcugugggggcagag

SEQ ID NO: 171139 - RNA, 22 nt, Human
aagaaaucugauauuuguuuca

SEQ ID NO: 171140 - RNA, 22 nt, Human
uuaucacuuaugagcuuuuugc

SEQ ID NO: 171141 - RNA, 22 nt, Human
ugaauagagcugcaguggacau

SEQ ID NO: 171142 - RNA, 22 nt, Human
ugugaauagugccgcaauaaac

SEQ ID NO: 171143 - RNA, 22 nt, Human
cacaggugucucuaguagcguu

SEQ ID NO: 171144 - RNA, 22 nt, Human
uuccugcagcaaggagaagcug

SEQ ID NO: 171145 - RNA, 22 nt, Human
acaugcuuguuuuucacaaccu

SEQ ID NO: 171146 - RNA, 22 nt, Human
auaucaaacgaaguuauuuuaa

SEQ ID NO: 171147 - RNA, 23 nt, Human
ucagagaggcccccugcagagau

SEQ ID NO: 171148 - RNA, 22 nt, Human
uccugcagccauuagaggucaa

SEQ ID NO: 171149 - RNA, 22 nt, Human
cccugcagagccagcccugacc

SEQ ID NO: 171150 - RNA, 22 nt, Human
cacacuuugugcuaaucuauuu

SEQ ID NO: 171151 - RNA, 22 nt, Human
guuugcaaauuguguuaaagcu

SEQ ID NO: 171152 - RNA, 22 nt, Human
uuucagaaagcaucaucaaagu

SEQ ID NO: 171153 - RNA, 22 nt, Human
aaaauuauggaguaucccaaag

SEQ ID NO: 171154 - RNA, 22 nt, Human
ugcugggucaggcaucugcaga

SEQ ID NO: 171155 - RNA, 22 nt, Human
cagcaugaucccaguugauugc

SEQ ID NO: 171156 - RNA, 22 nt, Human
uaauuuuaacugugcuguuugg

SEQ ID NO: 171157 - RNA, 22 nt, Human
cucuuagaaagaaacacacugg

SEQ ID NO: 171158 - RNA, 22 nt, Human
ccuggguccaauucuggcuugu

SEQ ID NO: 171159 - RNA, 22 nt, Human
gguguccuuagaaagcagaccu

SEQ ID NO: 171160 - RNA, 22 nt, Human
ugggaccuguuacauugaguua

SEQ ID NO: 171161 - RNA, 22 nt, Human
uggaggaaaauuacuggggucu

SEQ ID NO: 171162 - RNA, 22 nt, Human
aaauacagauuccagggucuua

SEQ ID NO: 171163 - RNA, 22 nt, Human
uaggugucuugucacuaccguu

SEQ ID NO: 171164 - RNA, 22 nt, Human
aauguaaaguugggcacaaaug

SEQ ID NO: 171165 - RNA, 22 nt, Human
uuuacuuucucaaguauauagg

SEQ ID NO: 171166 - RNA, 20 nt, Human
caauuucaucauuuccugug

SEQ ID NO: 171167 - RNA, 22 nt, Human
cuuacagagaagaaaauguagu

SEQ ID NO: 171168 - RNA, 22 nt, Human
ggcuuuauuugcagccauuguu

SEQ ID NO: 171169 - RNA, 22 nt, Human
gaauuuccucuaaaccccugag

SEQ ID NO: 171170 - RNA, 22 nt, Human
uucagaaaaaacuucaauaagu

SEQ ID NO: 171171 - RNA, 22 nt, Human
agcagguguuuguaucauaagg

SEQ ID NO: 171172 - RNA, 22 nt, Human
uauguuauuuucauacaacaga

SEQ ID NO: 171173 - RNA, 22 nt, Human
agcuuuauuaacucuccaggug

SEQ ID NO: 171174 - RNA, 22 nt, Human
uccucuggggcgugguccugga

SEQ ID NO: 171175 - RNA, 18 nt, Human
agacagacagguuugugc

SEQ ID NO: 171176 - RNA, 22 nt, Human
aggacagugguguucuggagug

SEQ ID NO: 171177 - RNA, 22 nt, Human
aggcaggucacaugcuuggcga

SEQ ID NO: 171178 - RNA, 22 nt, Human
uagcuuuaagacauggugaaug

SEQ ID NO: 171179 - RNA, 22 nt, Human
aaauucaauuaacuuucaugcu

SEQ ID NO: 171180 - RNA, 22 nt, Human
acuguucauuuggauuucucug

SEQ ID NO: 171181 - RNA, 22 nt, Human
uugcagcugcaguaaauguuca

SEQ ID NO: 171182 - RNA, 22 nt, Human
ugacauguccugagaagauggc

SEQ ID NO: 171183 - RNA, 22 nt, Human
cuuauuagugucugucugaguu

SEQ ID NO: 171184 - RNA, 18 nt, Human
agcaugagagaggcugug

SEQ ID NO: 171185 - RNA, 22 nt, Human
gccugcagcugcuuccacacac

SEQ ID NO: 171186 - RNA, 22 nt, Human
gaccuggaggauccucuucuug

SEQ ID NO: 171187 - RNA, 22 nt, Human
cacaucagggcugcuugggggu

SEQ ID NO: 171188 - RNA, 22 nt, Human
uuuccaaacccagcgagcuaca

SEQ ID NO: 171189 - RNA, 22 nt, Human
uagcuuuacaaagugcugcacc

SEQ ID NO: 171190 - RNA, 22 nt, Human
uucuuaaaacuuauggacaggu

SEQ ID NO: 171191 - RNA, 22 nt, Human
augagguuuuacugccauuuuc

SEQ ID NO: 171192 - RNA, 22 nt, Human
acuuuagaccaucuuccacagu

SEQ ID NO: 171193 - RNA, 22 nt, Human
aaaagccaagguccucuucaga

SEQ ID NO: 171194 - RNA, 22 nt, Human
gucugcccugcugaucucaccc

SEQ ID NO: 171195 - RNA, 22 nt, Human
ucugggugugguaucuuagcca

SEQ ID NO: 171196 - RNA, 19 nt, Human
uucacaauuaugaaauuag

SEQ ID NO: 171197 - RNA, 22 nt, Human
cuuuccaagaaugcagauaccu

SEQ ID NO: 171198 - RNA, 22 nt, Human
uuucagaaagcugaacauauga

SEQ ID NO: 171199 - RNA, 22 nt, Human
ugcaggugguccauuugggaac

SEQ ID NO: 171200 - RNA, 22 nt, Human
cuguguccuccccaucacuucu

SEQ ID NO: 171201 - RNA, 22 nt, Human
ucaggagcuugguagugugauu

SEQ ID NO: 171202 - RNA, 22 nt, Human
uuuuauuaguggcuagaugggg

SEQ ID NO: 171203 - RNA, 22 nt, Human
uuggaggaaagaagguugauau

SEQ ID NO: 171204 - RNA, 22 nt, Human
cuccucaaggucucaggaauaa

SEQ ID NO: 171205 - RNA, 22 nt, Human
uauuuaguuaucuuucauaaaa

SEQ ID NO: 171206 - RNA, 22 nt, Human
uguguuuugaacucaucuacug

SEQ ID NO: 171207 - RNA, 22 nt, Human
cauucauuuaugaaauaucuau

SEQ ID NO: 171208 - RNA, 22 nt, Human
uacugaaaguggucaacagugg

SEQ ID NO: 171209 - RNA, 22 nt, Human
ggguguagacacauguucaucu

SEQ ID NO: 171210 - RNA, 18 nt, Human
uacagauuauagauacau

SEQ ID NO: 171211 - RNA, 22 nt, Human
gcuguucaaaagccacaguuac

SEQ ID NO: 171212 - RNA, 22 nt, Human
auguucaaacaaguuaaugcca

SEQ ID NO: 171213 - RNA, 22 nt, Human
aagcugcagguugaauccaggu

SEQ ID NO: 171214 - RNA, 22 nt, Human
cagggcucuucaucacacagua

SEQ ID NO: 171215 - RNA, 22 nt, Human
uguguccugcagacagacucag

SEQ ID NO: 171216 - RNA, 22 nt, Human
ugcuggcugcagugcugucaaa

SEQ ID NO: 171217 - RNA, 22 nt, Human
auuagggaaacugacuugucuc

SEQ ID NO: 171218 - RNA, 22 nt, Human
cagcuuguuaccgagggagggu

SEQ ID NO: 171219 - RNA, 22 nt, Human
uagacaggagucaggcuagaau

SEQ ID NO: 171220 - RNA, 22 nt, Human
uugugucccccuuugagagcca

SEQ ID NO: 171221 - RNA, 22 nt, Human
gaguccuuuucauagcaguggg

SEQ ID NO: 171222 - RNA, 22 nt, Human
gcaggugguccccguggagugg

SEQ ID NO: 171223 - RNA, 22 nt, Human
caugcuuaugauuugcuaagcc

SEQ ID NO: 171224 - RNA, 22 nt, Human
gcaaaucaccaccuagcuggau

SEQ ID NO: 171225 - RNA, 22 nt, Human
cuuucuuucgaagacgugauua

SEQ ID NO: 171226 - RNA, 22 nt, Human
uguccuuauaagaaaaggaaau

SEQ ID NO: 171227 - RNA, 21 nt, Human
uuuucuggaguaugucuccuc

SEQ ID NO: 171228 - RNA, 22 nt, Human
gaauuucuggacccuuugagaa

SEQ ID NO: 171229 - RNA, 17 nt, Human
caauuucauagguuuug

SEQ ID NO: 171230 - RNA, 22 nt, Human
aaagagggacaggcgcagacac

SEQ ID NO: 171231 - RNA, 22 nt, Human
aaaugcauggcuguuuuaaagc

SEQ ID NO: 171232 - RNA, 21 nt, Human
gggcaggucucugaugucaac

SEQ ID NO: 171233 - RNA, 22 nt, Human
acuuuaauuaaugaacuguggc

SEQ ID NO: 171234 - RNA, 22 nt, Human
agauugaauauagagauucuug

SEQ ID NO: 171235 - RNA, 19 nt, Human
aaaauugcguauuuugagg

SEQ ID NO: 171236 - RNA, 22 nt, Human
aagccaaugagagaggccucag

SEQ ID NO: 171237 - RNA, 22 nt, Human
ugaaauagaaaaacaggcuucu

SEQ ID NO: 171238 - RNA, 22 nt, Human
aucugacuucacgcccaugcca

SEQ ID NO: 171239 - RNA, 22 nt, Human
gaguccuucuggcuggcaggau

SEQ ID NO: 171240 - RNA, 22 nt, Human
uucccaauauucugcuuuuaug

SEQ ID NO: 171241 - RNA, 22 nt, Human
guuuauaaggcccaauauuucu

SEQ ID NO: 171242 - RNA, 22 nt, Human
ggucuggccuccgggcaggugg

SEQ ID NO: 171243 - RNA, 23 nt, Human
uauggcuuacagugcuuuaggua

SEQ ID NO: 171244 - RNA, 22 nt, Human
gugaauaauauuguuuauaaaa

SEQ ID NO: 171245 - RNA, 22 nt, Human
ucuggagaggaggauguggaca

SEQ ID NO: 171246 - RNA, 22 nt, Human
guuuuauaggcuguugcuauau

SEQ ID NO: 171247 - RNA, 22 nt, Human
uccuuucccuuuccauccuggc

SEQ ID NO: 171248 - RNA, 22 nt, Human
caucacagggggcuagaagucu

SEQ ID NO: 171249 - RNA, 22 nt, Human
gugagauuugaguggggauaca

SEQ ID NO: 171250 - RNA, 22 nt, Human
uuaagauagaacccaguagucu

SEQ ID NO: 171251 - RNA, 23 nt, Human
ccaggccucucagagggugugcc

SEQ ID NO: 171252 - RNA, 22 nt, Human
aaugauugcaaacauugagaac

SEQ ID NO: 171253 - RNA, 22 nt, Human
ucuucagacccuuagcugugau

SEQ ID NO: 171254 - RNA, 22 nt, Human
gggcugaccaaugccuugcuuu

SEQ ID NO: 171255 - RNA, 22 nt, Human
uuacagaaaauguguuuuaacu

SEQ ID NO: 171256 - RNA, 22 nt, Human
aucuauacuacaaauggcuggu

SEQ ID NO: 171257 - RNA, 22 nt, Human
uuucaaauagaaucuuuccaaa

SEQ ID NO: 171258 - RNA, 22 nt, Human
uuuacagucucuauagucaaaa

SEQ ID NO: 171259 - RNA, 22 nt, Human
uuauuugugaaucauuuaucua

SEQ ID NO: 171260 - RNA, 22 nt, Human
acagggcagcaacuuugugccu

SEQ ID NO: 171261 - RNA, 22 nt, Human
uggcagggugggcuucagcccc

SEQ ID NO: 171262 - RNA, 22 nt, Human
auagacauuuugcauucaagca

SEQ ID NO: 171263 - RNA, 22 nt, Human
acaggcaggcuucggccagagc

SEQ ID NO: 171264 - RNA, 22 nt, Human
ugguccuggggaucugcaguga

SEQ ID NO: 171265 - RNA, 22 nt, Human
uuuauucugugcuacaugaaga

SEQ ID NO: 171266 - RNA, 22 nt, Human
acuguucacccagcacuagcag

SEQ ID NO: 171267 - RNA, 22 nt, Human
gguggcaguggucucugacaga

SEQ ID NO: 171268 - RNA, 22 nt, Human
ugcagguggauaucucaucaga

SEQ ID NO: 171269 - RNA, 22 nt, Human
aauacaaucaaauucacuagca

SEQ ID NO: 171270 - RNA, 22 nt, Human
cagguggucaggcagaugggcu

SEQ ID NO: 171271 - RNA, 22 nt, Human
gacagacaccugggggguugcu

SEQ ID NO: 171272 - RNA, 23 nt, Human
cagcuuucagggcuuuagggaag

SEQ ID NO: 171273 - RNA, 22 nt, Human
gugugucccuuggaaccucagc

SEQ ID NO: 171274 - RNA, 22 nt, Human
auacacuuuagaaaaacgcugc

SEQ ID NO: 171275 - RNA, 21 nt, Human
uggccaaaaccauauuauuaa

SEQ ID NO: 171276 - RNA, 22 nt, Human
ucauuuguggaagugauugugg

SEQ ID NO: 171277 - RNA, 22 nt, Human
caggcugccgugaagcaggccu

SEQ ID NO: 171278 - RNA, 20 nt, Human
agggugugggccuuagccau

SEQ ID NO: 171279 - RNA, 23 nt, Human
aucauucuccaaucuggagcagg

SEQ ID NO: 171280 - RNA, 22 nt, Human
ccagcuuucucagaggcuucua

SEQ ID NO: 171281 - RNA, 22 nt, Human
cccugcaguccuuucuuggcuc

SEQ ID NO: 171282 - RNA, 22 nt, Human
aucaaguuuucuuaguugacug

SEQ ID NO: 171283 - RNA, 19 nt, Human
uagaaagaugauggguggg

SEQ ID NO: 171284 - RNA, 22 nt, Human
uuccagugaaacaugaggugug

SEQ ID NO: 171285 - RNA, 22 nt, Human
uuagcucagaaaauuuaaacuu

SEQ ID NO: 171286 - RNA, 22 nt, Human
ggucuggauuuuaucuacugua

SEQ ID NO: 171287 - RNA, 19 nt, Human
cuggguccuguucuuuuac

SEQ ID NO: 171288 - RNA, 22 nt, Human
ccuucuucaccaguuuaccuga

SEQ ID NO: 171289 - RNA, 22 nt, Human
cuugcuucauuagugucuuagu

SEQ ID NO: 171290 - RNA, 22 nt, Human
ugcaugaaauauuuucuguagg

SEQ ID NO: 171291 - RNA, 22 nt, Human
acuugguuggucucacccuguu

SEQ ID NO: 171292 - RNA, 22 nt, Human
auuucucaucaagugccaacuc

SEQ ID NO: 171293 - RNA, 22 nt, Human
caccugcagggggagucaagag

SEQ ID NO: 171294 - RNA, 22 nt, Human
auuuccaugucgguauuuuaua

SEQ ID NO: 171295 - RNA, 22 nt, Human
cugaauaauacagacuagcuuc

SEQ ID NO: 171296 - RNA, 23 nt, Human
uccaggcacgcauuucuucuagc

SEQ ID NO: 171297 - RNA, 22 nt, Human
acaggugguagaguggaaagag

SEQ ID NO: 171298 - RNA, 22 nt, Human
uuccugcuuccuggccucacaa

SEQ ID NO: 171299 - RNA, 22 nt, Human
uacaugugaucagaaagugaaa

SEQ ID NO: 171300 - RNA, 22 nt, Human
auaucaguaucuauguauuugu

SEQ ID NO: 171301 - RNA, 22 nt, Human
ugcagucuccaccuccugggug

SEQ ID NO: 171302 - RNA, 22 nt, Human
gggaccuggucuagcacugagc

SEQ ID NO: 171303 - RNA, 17 nt, Human
aguggcaggcagauggg

SEQ ID NO: 171304 - RNA, 22 nt, Human
acagguuugucugauguaauga

SEQ ID NO: 171305 - RNA, 22 nt, Human
aagguggugaguacaguuaggu

SEQ ID NO: 171306 - RNA, 22 nt, Human
agacagugauggacaggcagac

SEQ ID NO: 171307 - RNA, 22 nt, Human
ggagcugaaccccaucgugcug

SEQ ID NO: 171308 - RNA, 22 nt, Human
ccuggauccaugaaaaggcuac

SEQ ID NO: 171309 - RNA, 22 nt, Human
gccaggguucgaauccguaugg

SEQ ID NO: 171310 - RNA, 22 nt, Human
cuuccucugccucccgugcuca

SEQ ID NO: 171311 - RNA, 22 nt, Human
cauuuacagcagacugaugaaa

SEQ ID NO: 171312 - RNA, 22 nt, Human
aaguccuuggagaauagaaagg

SEQ ID NO: 171313 - RNA, 22 nt, Human
auacauacauguaugcacauac

SEQ ID NO: 171314 - RNA, 22 nt, Human
aaucagugguucccagcccagg

SEQ ID NO: 171315 - RNA, 22 nt, Human
auuugcuucugugaaaucaagu

SEQ ID NO: 171316 - RNA, 22 nt, Human
aguguccuacagcuccugccug

SEQ ID NO: 171317 - RNA, 22 nt, Human
uuauccuggauuauauauguga

SEQ ID NO: 171318 - RNA, 22 nt, Human
ccagaauucagaaagggcauaa

SEQ ID NO: 171319 - RNA, 22 nt, Human
ccagguggugccucuguucgca

SEQ ID NO: 171320 - RNA, 22 nt, Human
gaagggaaggaaagaaccagca

SEQ ID NO: 171321 - RNA, 21 nt, Human
ugacugaggcuucuucacaca

SEQ ID NO: 171322 - RNA, 22 nt, Human
uagucaccuuuggcaccugcaa

SEQ ID NO: 171323 - RNA, 22 nt, Human
uuguauuuauauugaauagcuu

SEQ ID NO: 171324 - RNA, 22 nt, Human
ugcuuauucuuuccacaauuca

SEQ ID NO: 171325 - RNA, 22 nt, Human
auuccaaacucuuucccugucg

SEQ ID NO: 171326 - RNA, 22 nt, Human
accuugaugccuuuccaagaug

SEQ ID NO: 171327 - RNA, 21 nt, Human
agcaggugcuguuggaggaaa

SEQ ID NO: 171328 - RNA, 22 nt, Human
agucucuuuaaucacagugucu

SEQ ID NO: 171329 - RNA, 22 nt, Human
uacaggugguaaaaauauuguu

SEQ ID NO: 171330 - RNA, 22 nt, Human
uuacagaagaguaacuuggcaa

SEQ ID NO: 171331 - RNA, 22 nt, Human
uucuuguaauuuggagaaauga

SEQ ID NO: 171332 - RNA, 22 nt, Human
agggcacccucucugcaguacc

SEQ ID NO: 171333 - RNA, 22 nt, Human
gcaugcaggauagguugagcuc

SEQ ID NO: 171334 - RNA, 22 nt, Human
acaauuccacauggcaugcagg

SEQ ID NO: 171335 - RNA, 22 nt, Human
gcagggcagccacaggcccccu

SEQ ID NO: 171336 - RNA, 16 nt, Human
guuccuucccacaccu

SEQ ID NO: 171337 - RNA, 22 nt, Human
acaggcagauuaaggguaggca

SEQ ID NO: 171338 - RNA, 22 nt, Human
ggaugaggaagauuacugagaa

SEQ ID NO: 171339 - RNA, 22 nt, Human
cugcggugggcugggcuguccc

SEQ ID NO: 171340 - RNA, 22 nt, Human
augguuuaguuagggcuuuuca

SEQ ID NO: 171341 - RNA, 20 nt, Human
uccugcaguuccuaggaggg

SEQ ID NO: 171342 - RNA, 22 nt, Human
uccucagaauggauggcagggg

SEQ ID NO: 171343 - RNA, 22 nt, Human
cuuaaacugaaagcuacaagau

SEQ ID NO: 171344 - RNA, 22 nt, Human
caauuucucuuuauaucucaca

SEQ ID NO: 171345 - RNA, 22 nt, Human
ugaauaugugacuuugauuuca

SEQ ID NO: 171346 - RNA, 22 nt, Human
uauuaggguuuugaagguuugu

SEQ ID NO: 171347 - RNA, 22 nt, Human
uaaacauggcuguuucaguuau

SEQ ID NO: 171348 - RNA, 18 nt, Human
gcugggguugagcucucc

SEQ ID NO: 171349 - RNA, 22 nt, Human
ucuauuuuauacucaaaucuuc

SEQ ID NO: 171350 - RNA, 22 nt, Human
agcauauaaauggacauauuug

SEQ ID NO: 171351 - RNA, 22 nt, Human
cuuuuccacugagccucacaaa

SEQ ID NO: 171352 - RNA, 22 nt, Human
uuucaacuuguuugcuuccaua

SEQ ID NO: 171353 - RNA, 22 nt, Human
ucauuguagggcauuuagagag

SEQ ID NO: 171354 - RNA, 22 nt, Human
cugccguguuuuucauguuaaa

SEQ ID NO: 171355 - RNA, 22 nt, Human
gacaguuuuuaauccuuucaug

SEQ ID NO: 171356 - RNA, 22 nt, Human
uugaauaaaugagcagugaauu

SEQ ID NO: 171357 - RNA, 22 nt, Human
ugcguacuguuuauacaugugu

SEQ ID NO: 171358 - RNA, 19 nt, Human
ucucaauucuccccacugc

SEQ ID NO: 171359 - RNA, 22 nt, Human
ugggcuccucgucacucgcugu

SEQ ID NO: 171360 - RNA, 22 nt, Human
ugcagugguugagagcccagac

SEQ ID NO: 171361 - RNA, 22 nt, Human
auugaguaccuccagauucaua

SEQ ID NO: 171362 - RNA, 22 nt, Human
uggcaaagauuaccacaucuac

SEQ ID NO: 171363 - RNA, 22 nt, Human
auuguauaacagcauguauuuu

SEQ ID NO: 171364 - RNA, 22 nt, Human
uagggcagauucgguggaguuu

SEQ ID NO: 171365 - RNA, 22 nt, Human
cuugggaaugcuaacagaugac

SEQ ID NO: 171366 - RNA, 22 nt, Human
uccuucuguagucccugucccu

SEQ ID NO: 171367 - RNA, 22 nt, Human
cuccuuagugccucugcacgag

SEQ ID NO: 171368 - RNA, 22 nt, Human
ucauuauuuuggacuggagugu

SEQ ID NO: 171369 - RNA, 22 nt, Human
uuuauauguauugacuuugaug

SEQ ID NO: 171370 - RNA, 22 nt, Human
uuaauuuucucaucugugaaau

SEQ ID NO: 171371 - RNA, 22 nt, Human
gccugcagaacugugaggcaau

SEQ ID NO: 171372 - RNA, 22 nt, Human
auugauggcggccucuccauau

SEQ ID NO: 171373 - RNA, 22 nt, Human
aaucccagcuacucaggaaguu

SEQ ID NO: 171374 - RNA, 22 nt, Human
gcaggugggggagaaguuguga

SEQ ID NO: 171375 - RNA, 22 nt, Human
gagggaaaauaaaauugcagua

SEQ ID NO: 171376 - RNA, 19 nt, Human
uauuucaaagugccgucua

SEQ ID NO: 171377 - RNA, 22 nt, Human
auacaugugggucuaaacauau

SEQ ID NO: 171378 - RNA, 22 nt, Human
guucuaauauuuuaaaagccaa

SEQ ID NO: 171379 - RNA, 21 nt, Human
agccagucuguuuucuagugc

SEQ ID NO: 171380 - RNA, 22 nt, Human
cauggucuacaauuucauuuua

SEQ ID NO: 171381 - RNA, 18 nt, Human
uuaguauaacugccugug

SEQ ID NO: 171382 - RNA, 22 nt, Human
guauuaggagguggagccuuug

SEQ ID NO: 171383 - RNA, 22 nt, Human
gcuggaagaaugagugccucgu

SEQ ID NO: 171384 - RNA, 22 nt, Human
gagucaccacugugauagucga

SEQ ID NO: 171385 - RNA, 22 nt, Human
gagcuuuaccuuagguucuguu

SEQ ID NO: 171386 - RNA, 22 nt, Human
uguuuauucauggcuaaugaaa

SEQ ID NO: 171387 - RNA, 22 nt, Human
auuuauuaugggauuuggcuca

SEQ ID NO: 171388 - RNA, 20 nt, Human
caccacagaauuggggacag

SEQ ID NO: 171389 - RNA, 22 nt, Human
ucuuuaaucauaaccaagaugg

SEQ ID NO: 171390 - RNA, 22 nt, Human
uuucuugagcccaggaggugga

SEQ ID NO: 171391 - RNA, 22 nt, Human
gaggcuccccaugaggccccag

SEQ ID NO: 171392 - RNA, 22 nt, Human
agccagagacugugucuguaau

SEQ ID NO: 171393 - RNA, 22 nt, Human
ucgggcucgcucuccuagcgga

SEQ ID NO: 171394 - RNA, 20 nt, Human
gucugcccaggccaccacgg

SEQ ID NO: 171395 - RNA, 22 nt, Human
gacaggcuuccuaagugccaga

SEQ ID NO: 171396 - RNA, 22 nt, Human
cuggauguuuaugaaggaccca

SEQ ID NO: 171397 - RNA, 22 nt, Human
aacauguugcuuuaauaauauu

SEQ ID NO: 171398 - RNA, 22 nt, Human
gggcuccaccuagggacacugg

SEQ ID NO: 171399 - RNA, 22 nt, Human
uuuugcuuuuguaacacagugu

SEQ ID NO: 171400 - RNA, 22 nt, Human
uuucacauuuguuuuaagaagu

SEQ ID NO: 171401 - RNA, 22 nt, Human
aaguguuuauuuauaacgaucu

SEQ ID NO: 171402 - RNA, 22 nt, Human
ucuucccuaaucaccaucuuca

SEQ ID NO: 171403 - RNA, 22 nt, Human
aaugugaucgcuuuagaagcuu

SEQ ID NO: 171404 - RNA, 22 nt, Human
cagggcucccucuggcucccag

SEQ ID NO: 171405 - RNA, 22 nt, Human
ugcagggaaugcuugcagcaug

SEQ ID NO: 171406 - RNA, 22 nt, Human
cagaagaguagcugaacaaguu

SEQ ID NO: 171407 - RNA, 22 nt, Human
uuaauuacuaagcacaaugcaa

SEQ ID NO: 171408 - RNA, 22 nt, Human
guggaauguccuugaucauaag

SEQ ID NO: 171409 - RNA, 22 nt, Human
uuauccaacaugacuuaugucc

SEQ ID NO: 171410 - RNA, 20 nt, Human
uuucaguugguuaauggcau

SEQ ID NO: 171411 - RNA, 22 nt, Human
uacuuguagcagguggcauuua

SEQ ID NO: 171412 - RNA, 16 nt, Human
agcagguguauagugu

SEQ ID NO: 171413 - RNA, 22 nt, Human
agaagaggggugucccuguggc

SEQ ID NO: 171414 - RNA, 22 nt, Human
cauuguuauagcauuacacacc

SEQ ID NO: 171415 - RNA, 22 nt, Human
gaugugucuauucaacaugaaa

SEQ ID NO: 171416 - RNA, 22 nt, Human
agcagggcuugccgcuuguccu

SEQ ID NO: 171417 - RNA, 22 nt, Human
aaucagucucauuuagcaggga

SEQ ID NO: 171418 - RNA, 22 nt, Human
cuuagggaauugggaggaugcc

SEQ ID NO: 171419 - RNA, 22 nt, Human
cauuucaauacaguuuguaaau

SEQ ID NO: 171420 - RNA, 22 nt, Human
agcugcaagauaaaagugaugu

SEQ ID NO: 171421 - RNA, 22 nt, Human
gcaccugccugggacugaagau

SEQ ID NO: 171422 - RNA, 22 nt, Human
uguacaaucuuggucccuuuau

SEQ ID NO: 171423 - RNA, 22 nt, Human
agacacugaaucagagggacau

SEQ ID NO: 171424 - RNA, 21 nt, Human
aaagugguaaggauuauuuug

SEQ ID NO: 171425 - RNA, 19 nt, Human
uggugcuggccucccaugg

SEQ ID NO: 171426 - RNA, 22 nt, Human
uagggcucuggugggcucuguu

SEQ ID NO: 171427 - RNA, 22 nt, Human
uuguacaaauaggaaccucuga

SEQ ID NO: 171428 - RNA, 22 nt, Human
gggcagguggcaaagccagagg

SEQ ID NO: 171429 - RNA, 22 nt, Human
ggccuuuaagcaauugaaaaga

SEQ ID NO: 171430 - RNA, 22 nt, Human
ucaggugugugguggaaggcag

SEQ ID NO: 171431 - RNA, 22 nt, Human
agcuggagcuucaagcagguaa

SEQ ID NO: 171432 - RNA, 23 nt, Human
gagugcagaauagacaugcagug

SEQ ID NO: 171433 - RNA, 22 nt, Human
acagaauucuaguauguggcuu

SEQ ID NO: 171434 - RNA, 21 nt, Human
cuguccuggucuagaggcaca

SEQ ID NO: 171435 - RNA, 22 nt, Human
acaacuuugacccuuguucuua

SEQ ID NO: 171436 - RNA, 22 nt, Human
ugaauccagagcuauuucgucc

SEQ ID NO: 171437 - RNA, 22 nt, Human
uucauucuuugaaucugaggua

SEQ ID NO: 171438 - RNA, 22 nt, Human
ccacccagccagaugcaggaag

SEQ ID NO: 171439 - RNA, 22 nt, Human
aauguuuuauagcucaagcaau

SEQ ID NO: 171440 - RNA, 22 nt, Human
cuguccagaaagggggcaacaa

SEQ ID NO: 171441 - RNA, 22 nt, Human
ucagacaggcuucuuucucccu

SEQ ID NO: 171442 - RNA, 22 nt, Human
aagggcuccacuugaaucacac

SEQ ID NO: 171443 - RNA, 22 nt, Human
uugauuaaucccaugugaguag

SEQ ID NO: 171444 - RNA, 19 nt, Human
gcugggugggguccacagc

SEQ ID NO: 171445 - RNA, 22 nt, Human
uccuuucugucuuuacucugga

SEQ ID NO: 171446 - RNA, 22 nt, Human
uuguaagaauaugaauacaaau

SEQ ID NO: 171447 - RNA, 22 nt, Human
aguccuuaugagaugcugccuu

SEQ ID NO: 171448 - RNA, 22 nt, Human
aaacggauauaacagcaaacgc

SEQ ID NO: 171449 - RNA, 22 nt, Human
uuuaauuuuccugguaggccug

SEQ ID NO: 171450 - RNA, 22 nt, Human
uauuuagaugcauuuggauugc

SEQ ID NO: 171451 - RNA, 22 nt, Human
gaauuacaugacccugaguaga

SEQ ID NO: 171452 - RNA, 22 nt, Human
caaauuccucagaaucagaaaa

SEQ ID NO: 171453 - RNA, 22 nt, Human
ggaugucuuuacuuugggauuu

SEQ ID NO: 171454 - RNA, 22 nt, Human
gcaaacaaggacauacauccug

SEQ ID NO: 171455 - RNA, 22 nt, Human
auauuaaauggauuuugggagc

SEQ ID NO: 171456 - RNA, 22 nt, Human
uauuauuaaauggcagaauuuu

SEQ ID NO: 171457 - RNA, 22 nt, Human
auguacuaugcagucaacuguu

SEQ ID NO: 171458 - RNA, 22 nt, Human
aaauagauugcugaggcauuac

SEQ ID NO: 171459 - RNA, 22 nt, Human
ugucagagcaaugagguucagc

SEQ ID NO: 171460 - RNA, 16 nt, Human
uccaggcauaucugag

SEQ ID NO: 171461 - RNA, 22 nt, Human
aguauugugacucaaguauucu

SEQ ID NO: 171462 - RNA, 22 nt, Human
gagcaguggucugaucuucuaa

SEQ ID NO: 171463 - RNA, 22 nt, Human
uuuaacauguucaagaaacaua

SEQ ID NO: 171464 - RNA, 22 nt, Human
gaauuucagaucagagaccauu

SEQ ID NO: 171465 - RNA, 22 nt, Human
gcagggacaucuucagaucacu

SEQ ID NO: 171466 - RNA, 22 nt, Human
aaguuugcauagauuaagcauu

SEQ ID NO: 171467 - RNA, 22 nt, Human
accaugaugggaagcucagggc

SEQ ID NO: 171468 - RNA, 22 nt, Human
agauuccagaucccaaaaauga

SEQ ID NO: 171469 - RNA, 22 nt, Human
agacagacaaaauuccugccug

SEQ ID NO: 171470 - RNA, 22 nt, Human
aagggcucucugcauugaaauu

SEQ ID NO: 171471 - RNA, 22 nt, Human
uccaggcaguuuuccagguugu

SEQ ID NO: 171472 - RNA, 22 nt, Human
agcucccaggcagucaugagga

SEQ ID NO: 171473 - RNA, 22 nt, Human
guacacauauauuaaaaauugu

SEQ ID NO: 171474 - RNA, 22 nt, Human
acacuaauuaagcugcuuuacu

SEQ ID NO: 171475 - RNA, 22 nt, Human
uaugaaaauuuagcugaagcau

SEQ ID NO: 171476 - RNA, 22 nt, Human
ucaggaaacuacaguugaacua

SEQ ID NO: 171477 - RNA, 22 nt, Human
ggcuuucucacagcauggcagc

SEQ ID NO: 171478 - RNA, 22 nt, Human
aggcaugacuuuggcugaagaa

SEQ ID NO: 171479 - RNA, 22 nt, Human
aauauguuccacuuaaagcugg

SEQ ID NO: 171480 - RNA, 22 nt, Human
ugcaggugcuccgggggugccc

SEQ ID NO: 171481 - RNA, 22 nt, Human
ugagacaaaauugacagacaaa

SEQ ID NO: 171482 - RNA, 22 nt, Human
agaagggcuacacgggcucucc

SEQ ID NO: 171483 - RNA, 22 nt, Human
uguaauauuguagugacaguac

SEQ ID NO: 171484 - RNA, 22 nt, Human
uuccuuagauccuucaaucacg

SEQ ID NO: 171485 - RNA, 22 nt, Human
auaaacaguaaaugugagcagu

SEQ ID NO: 171486 - RNA, 22 nt, Human
caugugucuuuauggagccaca

SEQ ID NO: 171487 - RNA, 22 nt, Human
cagauauuaggagcucaauaau

SEQ ID NO: 171488 - RNA, 23 nt, Human
cauaaaauauuaguaugguagca

SEQ ID NO: 171489 - RNA, 22 nt, Human
ucuucaauuagauuuaccaauu

SEQ ID NO: 171490 - RNA, 22 nt, Human
acaaaagugagugugucucaga

SEQ ID NO: 171491 - RNA, 19 nt, Human
accaggcuuauggucagug

SEQ ID NO: 171492 - RNA, 20 nt, Human
auccaugagagucuggauuc

SEQ ID NO: 171493 - RNA, 22 nt, Human
uacaucauaauaauacuuagaa

SEQ ID NO: 171494 - RNA, 22 nt, Human
ccuggaggggaccaggaccagg

SEQ ID NO: 171495 - RNA, 22 nt, Human
cugcagagcagccaguccccca

SEQ ID NO: 171496 - RNA, 22 nt, Human
agucaccaggguuugcuggguu

SEQ ID NO: 171497 - RNA, 22 nt, Human
gcagggcucaacaggacacccc

SEQ ID NO: 171498 - RNA, 22 nt, Human
cagcuuuauuucacguguuugu

SEQ ID NO: 171499 - RNA, 22 nt, Human
ucuacccagagcuaugaccuga

SEQ ID NO: 171500 - RNA, 22 nt, Human
cgugagcaaaauggacacuccc

SEQ ID NO: 171501 - RNA, 20 nt, Human
agugacugggagaauggauu

SEQ ID NO: 171502 - RNA, 22 nt, Human
uuaugauuugccacagauuggu

SEQ ID NO: 171503 - RNA, 22 nt, Human
ccagguggcccugcccuacucu

SEQ ID NO: 171504 - RNA, 22 nt, Human
acuuaaaaccagacagcgucau

SEQ ID NO: 171505 - RNA, 22 nt, Human
ugacagacuuuacuucuccuau

SEQ ID NO: 171506 - RNA, 22 nt, Human
uuaaaguguuaacugaagcuua

SEQ ID NO: 171507 - RNA, 22 nt, Human
uaagaaucgauguuuauuuaga

SEQ ID NO: 171508 - RNA, 22 nt, Human
uaagagaauguuguggcuaggu

SEQ ID NO: 171509 - RNA, 22 nt, Human
ccagguggauaagguuucugga

SEQ ID NO: 171510 - RNA, 22 nt, Human
acuuaaaaacagauccagcagg

SEQ ID NO: 171511 - RNA, 23 nt, Human
uguguccuuaacuguauauacua

SEQ ID NO: 171512 - RNA, 18 nt, Human
ucagguguuuucuguaua

SEQ ID NO: 171513 - RNA, 22 nt, Human
agacaugugguauaaucagggg

SEQ ID NO: 171514 - RNA, 22 nt, Human
aaagcugcugccaaucaggcuu

SEQ ID NO: 171515 - RNA, 22 nt, Human
uucuucuucaagugcugcauuc

SEQ ID NO: 171516 - RNA, 23 nt, Human
guguguccauucgcacucuuagg

SEQ ID NO: 171517 - RNA, 22 nt, Human
uuuggacuuagccugcagaauu

SEQ ID NO: 171518 - RNA, 22 nt, Human
gggcagguggccucuuguacua

SEQ ID NO: 171519 - RNA, 22 nt, Human
uuccuucucagcccucgaggau

SEQ ID NO: 171520 - RNA, 17 nt, Human
cagcuuuaugcuacugu

SEQ ID NO: 171521 - RNA, 22 nt, Human
agacagacggcuuuauacacag

SEQ ID NO: 171522 - RNA, 22 nt, Human
uuucagauggagguuuaggaca

SEQ ID NO: 171523 - RNA, 22 nt, Human
ggaugggaacuugguagggcau

SEQ ID NO: 171524 - RNA, 22 nt, Human
auuuaagauugcguauucaugu

SEQ ID NO: 171525 - RNA, 22 nt, Human
uacacacagaggccaugggauu

SEQ ID NO: 171526 - RNA, 22 nt, Human
uccauugugauuauauacaaaa

SEQ ID NO: 171527 - RNA, 22 nt, Human
uauccaaaguuucucagaaacu

SEQ ID NO: 171528 - RNA, 22 nt, Human
gaauuuuucuggaagcaauuau

SEQ ID NO: 171529 - RNA, 22 nt, Human
aaugaaacuguauauagacugu

SEQ ID NO: 171530 - RNA, 22 nt, Human
gcagaauucuacagaugauaaa

SEQ ID NO: 171531 - RNA, 23 nt, Human
uccugcagauaagcugguugaca

SEQ ID NO: 171532 - RNA, 19 nt, Human
ucaaaggcuuuuaggagac

SEQ ID NO: 171533 - RNA, 22 nt, Human
ugcuugaacccaggaaguggag

SEQ ID NO: 171534 - RNA, 19 nt, Human
uguacauauagagcucagu

SEQ ID NO: 171535 - RNA, 22 nt, Human
agaaaauauucauugagaggcu

SEQ ID NO: 171536 - RNA, 22 nt, Human
uuuaggcauugaauuagaauag

SEQ ID NO: 171537 - RNA, 22 nt, Human
gcaggcagagagggguuuccag

SEQ ID NO: 171538 - RNA, 22 nt, Human
ccagguguuacacgaguguuaa

SEQ ID NO: 171539 - RNA, 22 nt, Human
aguguccucuauuaugacuuua

SEQ ID NO: 171540 - RNA, 22 nt, Human
aguuuacaugacguguauuuca

SEQ ID NO: 171541 - RNA, 22 nt, Human
aacaugugagcagguuuuuuau

SEQ ID NO: 171542 - RNA, 22 nt, Human
agugugagccuacaggccaaag

SEQ ID NO: 171543 - RNA, 22 nt, Human
aacaaccaaaaagaugaaugua

SEQ ID NO: 171544 - RNA, 22 nt, Human
uugcugaucugugaaucagcca

SEQ ID NO: 171545 - RNA, 22 nt, Human
ugaugagggagauuugagccca

SEQ ID NO: 171546 - RNA, 22 nt, Human
gcuguucagaugcgauucagga

SEQ ID NO: 171547 - RNA, 22 nt, Human
ccauuucacucuuccugaagga

SEQ ID NO: 171548 - RNA, 22 nt, Human
cuauagaaaauuguaucacacg

SEQ ID NO: 171549 - RNA, 22 nt, Human
caauuucaagauucuguucuuu

SEQ ID NO: 171550 - RNA, 22 nt, Human
aacccagccguguagcugccgc

SEQ ID NO: 171551 - RNA, 16 nt, Human
gcaggcagaucacaug

SEQ ID NO: 171552 - RNA, 22 nt, Human
caugcagcaggaucucauuccc

SEQ ID NO: 171553 - RNA, 22 nt, Human
ucuguccucuuugaagcugcuc

SEQ ID NO: 171554 - RNA, 23 nt, Human
uccaugagaugugggcuucuagu

SEQ ID NO: 171555 - RNA, 22 nt, Human
gcuggguccaugguccucgggu

SEQ ID NO: 171556 - RNA, 22 nt, Human
ugacccauggucugaucauagg

SEQ ID NO: 171557 - RNA, 22 nt, Human
auggcauuccaagucuucuuuu

SEQ ID NO: 171558 - RNA, 22 nt, Human
uuucuguaaguggcaaauaaug

SEQ ID NO: 171559 - RNA, 22 nt, Human
uucauacuguguuuccaaguuu

SEQ ID NO: 171560 - RNA, 22 nt, Human
cuaauuauguuguuauaaucaa

SEQ ID NO: 171561 - RNA, 22 nt, Human
ccuuccuuugcaucauuucuag

SEQ ID NO: 171562 - RNA, 22 nt, Human
caucagaauagcucuguggaua

SEQ ID NO: 171563 - RNA, 16 nt, Human
ugguggggaggacagc

SEQ ID NO: 171564 - RNA, 22 nt, Human
uaguacaguuuaaauauuaaua

SEQ ID NO: 171565 - RNA, 22 nt, Human
gccaggcauuuauugauugaau

SEQ ID NO: 171566 - RNA, 22 nt, Human
agggaagaggaccagagucucu

SEQ ID NO: 171567 - RNA, 22 nt, Human
cauuucaaaagaauugccagaa

SEQ ID NO: 171568 - RNA, 22 nt, Human
gcacaauaauucuuguuuugcu

SEQ ID NO: 171569 - RNA, 22 nt, Human
uguuugcuuacuuguaugcugc

SEQ ID NO: 171570 - RNA, 22 nt, Human
gaugugucuggcuccccugcaa

SEQ ID NO: 171571 - RNA, 22 nt, Human
aggauuuauuggugggaaguua

SEQ ID NO: 171572 - RNA, 22 nt, Human
ugcuuaaaauaguucauuuuug

SEQ ID NO: 171573 - RNA, 22 nt, Human
uucauucugcaguucucagcuc

SEQ ID NO: 171574 - RNA, 22 nt, Human
uccugcaggggcugaggaacca

SEQ ID NO: 171575 - RNA, 22 nt, Human
gugcuggcaccccucuccaguu

SEQ ID NO: 171576 - RNA, 22 nt, Human
uucaacccaaguucuccauuuu

SEQ ID NO: 171577 - RNA, 22 nt, Human
uauaaaacagaaagcacuaccu

SEQ ID NO: 171578 - RNA, 18 nt, Human
aggcaggugcuggaaguc

SEQ ID NO: 171579 - RNA, 22 nt, Human
gcagggcagcugaagcuaggug

SEQ ID NO: 171580 - RNA, 23 nt, Human
uucaaaacuggaaaaucagaugc

SEQ ID NO: 171581 - RNA, 22 nt, Human
auugcuggcccagaugcuuuag

SEQ ID NO: 171582 - RNA, 20 nt, Human
acugugaaugcugaauuagc

SEQ ID NO: 171583 - RNA, 22 nt, Human
aagauuuaccacuuuauucaag

SEQ ID NO: 171584 - RNA, 22 nt, Human
uucuguauauuguaaagacuca

SEQ ID NO: 171585 - RNA, 22 nt, Human
auccucaguguuucugacaucu

SEQ ID NO: 171586 - RNA, 21 nt, Human
ugcuuuaugggaaaaauguca

SEQ ID NO: 171587 - RNA, 21 nt, Human
uuuaauuugcauguaugacgc

SEQ ID NO: 171588 - RNA, 22 nt, Human
uguccugggaaaucccuuaggc

SEQ ID NO: 171589 - RNA, 22 nt, Human
cauuugaaccuggauguucuua

SEQ ID NO: 171590 - RNA, 22 nt, Human
aaagaaucacauccuucagcaa

SEQ ID NO: 171591 - RNA, 22 nt, Human
gacagacacaauugauccauga

SEQ ID NO: 171592 - RNA, 22 nt, Human
aaaaaccuuucauugcaaaugu

SEQ ID NO: 171593 - RNA, 22 nt, Human
uuccaugccuagaacaggauuc

SEQ ID NO: 171594 - RNA, 22 nt, Human
aaaguccugacugcaggggaug

SEQ ID NO: 171595 - RNA, 22 nt, Human
aauuucaaugcacucaugguug

SEQ ID NO: 171596 - RNA, 22 nt, Human
ucuuccucccuacagagcucag

SEQ ID NO: 171597 - RNA, 22 nt, Human
gccaggcagauaugugagcuua

SEQ ID NO: 171598 - RNA, 21 nt, Human
uauuugcugccaucuuugagg

SEQ ID NO: 171599 - RNA, 22 nt, Human
uccaugagagguaacuuuacaa

SEQ ID NO: 171600 - RNA, 22 nt, Human
ucaaguuuaauugagauguuua

SEQ ID NO: 171601 - RNA, 22 nt, Human
aagggcucgguagcaguccuga

SEQ ID NO: 171602 - RNA, 22 nt, Human
ugcuuucauugugauaggaagc

SEQ ID NO: 171603 - RNA, 22 nt, Human
uucagaauauuuguuuuacaug

SEQ ID NO: 171604 - RNA, 22 nt, Human
uuccuucugaagccuuuguguu

SEQ ID NO: 171605 - RNA, 22 nt, Human
uacauguuuacuccaagucagg

SEQ ID NO: 171606 - RNA, 22 nt, Human
gggguuaacaguauugcucaug

SEQ ID NO: 171607 - RNA, 22 nt, Human
guguccugggucucugauucuu

SEQ ID NO: 171608 - RNA, 23 nt, Human
aaucuauacuuaggcugguaaua

SEQ ID NO: 171609 - RNA, 22 nt, Human
caaauucucacccuguuugauu

SEQ ID NO: 171610 - RNA, 22 nt, Human
auaguuuuaaaaccucaggaag

SEQ ID NO: 171611 - RNA, 20 nt, Human
guguuucaugugauacaaug

SEQ ID NO: 171612 - RNA, 22 nt, Human
ccaggccugcaucugcugcgca

SEQ ID NO: 171613 - RNA, 22 nt, Human
cuggcuuuggucaugugaucau

SEQ ID NO: 171614 - RNA, 22 nt, Human
acaccauacucauguugguucc

SEQ ID NO: 171615 - RNA, 22 nt, Human
agaaucugguagaaccaaggau

SEQ ID NO: 171616 - RNA, 22 nt, Human
ugaacaacugcaaaaaucucca

SEQ ID NO: 171617 - RNA, 21 nt, Human
guagggacagagaguugguga

SEQ ID NO: 171618 - RNA, 22 nt, Human
gcaguguuguuaaaagauuaga

SEQ ID NO: 171619 - RNA, 22 nt, Human
acuuucuuaggcuguauaaaug

SEQ ID NO: 171620 - RNA, 22 nt, Human
uuuacuugauauggagcugagg

SEQ ID NO: 171621 - RNA, 22 nt, Human
gauuuccaggucauuaauaaag

SEQ ID NO: 171622 - RNA, 22 nt, Human
cagggcucgcucuugcccuucg

SEQ ID NO: 171623 - RNA, 22 nt, Human
uucagagauggaaggcagaaug

SEQ ID NO: 171624 - RNA, 22 nt, Human
gcagacagacugcagugauuuu

SEQ ID NO: 171625 - RNA, 22 nt, Human
aaccugcauguuucuaaaagca

SEQ ID NO: 171626 - RNA, 22 nt, Human
agcaggugguaggcagucagca

SEQ ID NO: 171627 - RNA, 22 nt, Human
aguccagugaacuguaaauagg

SEQ ID NO: 171628 - RNA, 22 nt, Human
ggcaggugcuugucgaaggccu

SEQ ID NO: 171629 - RNA, 22 nt, Human
uccuucuuugacaaguggcaga

SEQ ID NO: 171630 - RNA, 19 nt, Human
aaucagaaauaucgaggcc

SEQ ID NO: 171631 - RNA, 22 nt, Human
cccagcucugcagaccugcccu

SEQ ID NO: 171632 - RNA, 22 nt, Human
ucagagaguuagugucuuagcu

SEQ ID NO: 171633 - RNA, 22 nt, Human
agaaaucaauaucuauauguug

SEQ ID NO: 171634 - RNA, 22 nt, Human
ggcaggaggugaguggcgggug

SEQ ID NO: 171635 - RNA, 22 nt, Human
uuuauguuugacaaugaucugg

SEQ ID NO: 171636 - RNA, 22 nt, Human
cucuggaagugauggcagguca

SEQ ID NO: 171637 - RNA, 22 nt, Human
cuuccuccgaagaaguugcugg

SEQ ID NO: 171638 - RNA, 22 nt, Human
aaugaacauauaaagagaucuu

SEQ ID NO: 171639 - RNA, 22 nt, Human
uuguacaaguauuaugugaaca

SEQ ID NO: 171640 - RNA, 18 nt, Human
ccagguggugacagagau

SEQ ID NO: 171641 - RNA, 21 nt, Human
aagaaguuuggauuuuguccu

SEQ ID NO: 171642 - RNA, 22 nt, Human
agcuggagaauguggaugaucc

SEQ ID NO: 171643 - RNA, 22 nt, Human
ccaggugugucaccauugccca

SEQ ID NO: 171644 - RNA, 22 nt, Human
uguacaauguggccaguguuaa

SEQ ID NO: 171645 - RNA, 20 nt, Human
uuuauugagcacguacugug

SEQ ID NO: 171646 - RNA, 22 nt, Human
uuccuucuggaagcuucagggg

SEQ ID NO: 171647 - RNA, 22 nt, Human
uuccuuagccugccuuccaggg

SEQ ID NO: 171648 - RNA, 22 nt, Human
aggauuuaggagcuggcuaacg

SEQ ID NO: 171649 - RNA, 18 nt, Human
ugaggcagucagugaugg

SEQ ID NO: 171650 - RNA, 22 nt, Human
auaaagucuaccguauuaaaga

SEQ ID NO: 171651 - RNA, 22 nt, Human
cuguccuccggccaccuacagu

SEQ ID NO: 171652 - RNA, 22 nt, Human
cauuaaaauaucucaugguguu

SEQ ID NO: 171653 - RNA, 22 nt, Human
auuucaggagcaguuucagugg

SEQ ID NO: 171654 - RNA, 22 nt, Human
gugagcaggauuucauggugua

SEQ ID NO: 171655 - RNA, 22 nt, Human
uugcacuccagcccgagcaaca

SEQ ID NO: 171656 - RNA, 22 nt, Human
ccuggaggcucugggagggcag

SEQ ID NO: 171657 - RNA, 19 nt, Human
ucccaguggggagaggugu

SEQ ID NO: 171658 - RNA, 22 nt, Human
uuucuagugguuaagauuuaca

SEQ ID NO: 171659 - RNA, 22 nt, Human
cuuuaacaaaugacucuugucu

SEQ ID NO: 171660 - RNA, 22 nt, Human
uuucagaaaacuuaucaucagu

SEQ ID NO: 171661 - RNA, 22 nt, Human
agggcccuagggaaugagacau

SEQ ID NO: 171662 - RNA, 22 nt, Human
ggcaggugugagaucgaggcca

SEQ ID NO: 171663 - RNA, 22 nt, Human
uggagcaggugggaugucguga

SEQ ID NO: 171664 - RNA, 22 nt, Human
uagacauuuucucaacaucucu

SEQ ID NO: 171665 - RNA, 22 nt, Human
cucuggaauguuuacaugcccu

SEQ ID NO: 171666 - RNA, 22 nt, Human
ccaggugugauuuggcaguguc

SEQ ID NO: 171667 - RNA, 22 nt, Human
ugacagguuguguagguggcca

SEQ ID NO: 171668 - RNA, 22 nt, Human
uuuaggcagucauugaacaagu

SEQ ID NO: 171669 - RNA, 21 nt, Human
agcaggugaaccuccaguaca

SEQ ID NO: 171670 - RNA, 22 nt, Human
guaaaauagaauaacguggcua

SEQ ID NO: 171671 - RNA, 22 nt, Human
auuuuuaugacaaaccauccuc

SEQ ID NO: 171672 - RNA, 22 nt, Human
gauuuuucaguauaaaauauau

SEQ ID NO: 171673 - RNA, 22 nt, Human
gcagggcacagacagugccaag

SEQ ID NO: 171674 - RNA, 22 nt, Human
uagaaaugugauaauagcuuaa

SEQ ID NO: 171675 - RNA, 22 nt, Human
ccagguggacggcgaguacagg

SEQ ID NO: 171676 - RNA, 22 nt, Human
uguccucagauaugucuacucu

SEQ ID NO: 171677 - RNA, 22 nt, Human
cuguuauuugagaguguugaau

SEQ ID NO: 171678 - RNA, 22 nt, Human
augauguugauaaauuacuuua

SEQ ID NO: 171679 - RNA, 22 nt, Human
acuguucaaguuuuaugcugga

SEQ ID NO: 171680 - RNA, 22 nt, Human
gacagacaggugugguaggcac

SEQ ID NO: 171681 - RNA, 22 nt, Human
aacacaaagaagcugcaggauc

SEQ ID NO: 171682 - RNA, 20 nt, Human
gggugggagagucugagggu

SEQ ID NO: 171683 - RNA, 18 nt, Human
gcagguguggagaagggg

SEQ ID NO: 171684 - RNA, 22 nt, Human
uccaugcaaacaguggcuagcu

SEQ ID NO: 171685 - RNA, 22 nt, Human
uuucauaaccucaagcuacagu

SEQ ID NO: 171686 - RNA, 22 nt, Human
uauaucauggagauuaacauuc

SEQ ID NO: 171687 - RNA, 22 nt, Human
agucccuucucaaagugugcgg

SEQ ID NO: 171688 - RNA, 22 nt, Human
gaaagcacaguucugaccaugu

SEQ ID NO: 171689 - RNA, 22 nt, Human
uauuuccagcaguaagaagaca

SEQ ID NO: 171690 - RNA, 22 nt, Human
caaauaguuuuucauguauuau

SEQ ID NO: 171691 - RNA, 22 nt, Human
cauuagggccaccauaacaaaa

SEQ ID NO: 171692 - RNA, 20 nt, Human
cugcaaaaugacauuaggaa

SEQ ID NO: 171693 - RNA, 21 nt, Human
ucuuccuccacagcgugccac

SEQ ID NO: 171694 - RNA, 22 nt, Human
uuacagaaucuacucgugguga

SEQ ID NO: 171695 - RNA, 22 nt, Human
uugguccacugugaaauuggga

SEQ ID NO: 171696 - RNA, 21 nt, Human
aggcugcaugcaugagugugg

SEQ ID NO: 171697 - RNA, 22 nt, Human
ugcagggaggccccgcagcccu

SEQ ID NO: 171698 - RNA, 22 nt, Human
aaguccuugaagaaacaguucu

SEQ ID NO: 171699 - RNA, 22 nt, Human
gcuggccucaucacugacuucu

SEQ ID NO: 171700 - RNA, 22 nt, Human
acuuugaaagccuuggccccgg

SEQ ID NO: 171701 - RNA, 21 nt, Human
ucaguaaaccuaaagauugua

SEQ ID NO: 171702 - RNA, 22 nt, Human
agggcuccaggggcugggugac

SEQ ID NO: 171703 - RNA, 22 nt, Human
uuuacagucugucuagcaaugu

SEQ ID NO: 171704 - RNA, 23 nt, Human
gaaucaguggcuaacaaggaaac

SEQ ID NO: 171705 - RNA, 22 nt, Human
uucuuugcccuuaaugaaauaa

SEQ ID NO: 171706 - RNA, 22 nt, Human
cagcaugacagucugcagcaga

SEQ ID NO: 171707 - RNA, 22 nt, Human
caagcuuguuucuccugggggu

SEQ ID NO: 171708 - RNA, 22 nt, Human
cucuuccuuaagacuauaaaga

SEQ ID NO: 171709 - RNA, 22 nt, Human
uugcauuccaguccccacugug

SEQ ID NO: 171710 - RNA, 22 nt, Human
caguccuuggcuucauccgagu

SEQ ID NO: 171711 - RNA, 22 nt, Human
uccaggcagucauuaaucucua

SEQ ID NO: 171712 - RNA, 22 nt, Human
ccagagagucgaugggggacac

SEQ ID NO: 171713 - RNA, 22 nt, Human
caguccagcccccugcuaaaag

SEQ ID NO: 171714 - RNA, 22 nt, Human
aggcaggugggucacuugaguc

SEQ ID NO: 171715 - RNA, 22 nt, Human
uuauauuaguuagacuugcugu

SEQ ID NO: 171716 - RNA, 22 nt, Human
uugcagcuucgagucuaucugu

SEQ ID NO: 171717 - RNA, 22 nt, Human
uacaggugcucuacagacagga

SEQ ID NO: 171718 - RNA, 22 nt, Human
acagacagauuuugucugaugu

SEQ ID NO: 171719 - RNA, 22 nt, Human
cuguccucaacccauccuucuc

SEQ ID NO: 171720 - RNA, 22 nt, Human
uuuucagaggccuaagagguuu

SEQ ID NO: 171721 - RNA, 22 nt, Human
ugauggucaacaauuuugagug

SEQ ID NO: 171722 - RNA, 22 nt, Human
accaggcagcugggggugaugu

SEQ ID NO: 171723 - RNA, 22 nt, Human
augugucuaauuccaggagcac

SEQ ID NO: 171724 - RNA, 22 nt, Human
uauguacacacacaugcaugua

SEQ ID NO: 171725 - RNA, 22 nt, Human
ggggugggcgugcagggacacc

SEQ ID NO: 171726 - RNA, 22 nt, Human
agugugaguuacaaagugugaa

SEQ ID NO: 171727 - RNA, 22 nt, Human
auagaaauggcagcuggugcua

SEQ ID NO: 171728 - RNA, 22 nt, Human
ugcuuuaaccaucuuguuugga

SEQ ID NO: 171729 - RNA, 21 nt, Human
ugucugauguauuuuuugccu

SEQ ID NO: 171730 - RNA, 22 nt, Human
acauauauuacuaguaaagaca

SEQ ID NO: 171731 - RNA, 20 nt, Human
agguguccuguagcuugagu

SEQ ID NO: 171732 - RNA, 22 nt, Human
ucuggaugauaugugaacuuga

SEQ ID NO: 171733 - RNA, 22 nt, Human
uuucaagaacaacauucauuca

SEQ ID NO: 171734 - RNA, 22 nt, Human
uccugcagccacugcaggcaga

SEQ ID NO: 171735 - RNA, 22 nt, Human
uuuaaauuuagaagaaacacug

SEQ ID NO: 171736 - RNA, 21 nt, Human
uuugacuccucauuuuuauau

SEQ ID NO: 171737 - RNA, 22 nt, Human
accuuauuaaaaugaugaugua

SEQ ID NO: 171738 - RNA, 22 nt, Human
auagaauuugcacuaaaucugc

SEQ ID NO: 171739 - RNA, 22 nt, Human
auuaugcugguuuacacauuuu

SEQ ID NO: 171740 - RNA, 22 nt, Human
uuucauaauacuguacaugaaa

SEQ ID NO: 171741 - RNA, 22 nt, Human
uuuugagauggagucuugcucu

SEQ ID NO: 171742 - RNA, 22 nt, Human
ucugaacagaaaagaugcacaa

SEQ ID NO: 171743 - RNA, 22 nt, Human
uccaugagggacacuggaugcu

SEQ ID NO: 171744 - RNA, 22 nt, Human
cuucagagugcagaagauuggg

SEQ ID NO: 171745 - RNA, 22 nt, Human
auuuagcaaaaaaugaugaagc

SEQ ID NO: 171746 - RNA, 17 nt, Human
aaugaaugaauucuuug

SEQ ID NO: 171747 - RNA, 22 nt, Human
uuauuccauucaguucaacaag

SEQ ID NO: 171748 - RNA, 19 nt, Human
uagguguccgccggaggug

SEQ ID NO: 171749 - RNA, 22 nt, Human
cuuuacauaaggauaaaccugg

SEQ ID NO: 171750 - RNA, 22 nt, Human
ucagacagugugaucagucucu

SEQ ID NO: 171751 - RNA, 22 nt, Human
uauuuaaaauagugcuccagca

SEQ ID NO: 171752 - RNA, 22 nt, Human
aggaggaauacaauccagcagc

SEQ ID NO: 171753 - RNA, 22 nt, Human
ugcagggccuugggucuuucuu

SEQ ID NO: 171754 - RNA, 22 nt, Human
cauuuguaauacugacuugcag

SEQ ID NO: 171755 - RNA, 22 nt, Human
auaaacagaguaguugcuacug

SEQ ID NO: 171756 - RNA, 22 nt, Human
gguuauauaauucagugcuuuc

SEQ ID NO: 171757 - RNA, 22 nt, Human
agguggagaagagaugggcagu

SEQ ID NO: 171758 - RNA, 22 nt, Human
uuugacucuuagcccaggacuc

SEQ ID NO: 171759 - RNA, 16 nt, Human
agcagggcgggaagga

SEQ ID NO: 171760 - RNA, 22 nt, Human
ccugggugaaaucucuccugca

SEQ ID NO: 171761 - RNA, 22 nt, Human
uuuguguuuguacaaugcacua

SEQ ID NO: 171762 - RNA, 22 nt, Human
caguccuuaaggaaacauuugu

SEQ ID NO: 171763 - RNA, 22 nt, Human
uaggccauucuuggagcuuacu

SEQ ID NO: 171764 - RNA, 22 nt, Human
aggaccuggaucacagagaucu

SEQ ID NO: 171765 - RNA, 18 nt, Human
uggcaggggcaguacgcc

SEQ ID NO: 171766 - RNA, 22 nt, Human
cucuuaaaaacuugauauauuu

SEQ ID NO: 171767 - RNA, 22 nt, Human
uuucuauaugaggagcuaaagu

SEQ ID NO: 171768 - RNA, 19 nt, Human
gcaugcagaguaagaaggu

SEQ ID NO: 171769 - RNA, 22 nt, Human
auggcuuuccugggacaugggc

SEQ ID NO: 171770 - RNA, 22 nt, Human
aauaagauccugaagauauguu

SEQ ID NO: 171771 - RNA, 22 nt, Human
agcugcaaguccaaaggaauua

SEQ ID NO: 171772 - RNA, 22 nt, Human
agacaaguucugugggucaccu

SEQ ID NO: 171773 - RNA, 22 nt, Human
guuuuauaauugcuucauaaga

SEQ ID NO: 171774 - RNA, 22 nt, Human
ugcugccaucucaacugcccuu

SEQ ID NO: 171775 - RNA, 22 nt, Human
auuugaagaaaguuuucuagau

SEQ ID NO: 171776 - RNA, 22 nt, Human
gaaggggaguggcuagugugug

SEQ ID NO: 171777 - RNA, 22 nt, Human
aggcucaguauagcuggcaagu

SEQ ID NO: 171778 - RNA, 22 nt, Human
gacagacaaauguuuuuaacuu

SEQ ID NO: 171779 - RNA, 22 nt, Human
uuugaagucaaagauugauucc

SEQ ID NO: 171780 - RNA, 22 nt, Human
guucuucaucauuaacacucug

SEQ ID NO: 171781 - RNA, 22 nt, Human
gcagacaggauuggguuaauag

SEQ ID NO: 171782 - RNA, 22 nt, Human
cagaugaaggccugaaugucua

SEQ ID NO: 171783 - RNA, 22 nt, Human
uuucacaugguacugccuguuu

SEQ ID NO: 171784 - RNA, 22 nt, Human
uuuaggcagcagugaggaugaa

SEQ ID NO: 171785 - RNA, 22 nt, Human
ugggugagccacaggaguuguc

SEQ ID NO: 171786 - RNA, 22 nt, Human
gcuggaggaucacuugagccca

SEQ ID NO: 171787 - RNA, 22 nt, Human
uggcaggguacaccuuaacacc

SEQ ID NO: 171788 - RNA, 22 nt, Human
uuccugggacuggagcagccca

SEQ ID NO: 171789 - RNA, 23 nt, Human
uccaggcaugagcucuggaugga

SEQ ID NO: 171790 - RNA, 22 nt, Human
uccucccuguaccauuccucug

SEQ ID NO: 171791 - RNA, 22 nt, Human
agggcucccgugaggugacugc

SEQ ID NO: 171792 - RNA, 22 nt, Human
aaucagaaagaggucauguugc

SEQ ID NO: 171793 - RNA, 22 nt, Human
uaugaaacauucauacaaauaa

SEQ ID NO: 171794 - RNA, 22 nt, Human
auugcuggaugagcucuuggau

SEQ ID NO: 171795 - RNA, 22 nt, Human
aauugcuucccaagggaggucu

SEQ ID NO: 171796 - RNA, 22 nt, Human
gagguguccuagaaguauucag

SEQ ID NO: 171797 - RNA, 22 nt, Human
aagggcauugaggcugagagac

SEQ ID NO: 171798 - RNA, 21 nt, Human
auagaacaccaggcauauaua

SEQ ID NO: 171799 - RNA, 22 nt, Human
uauacagucuuuugcuauauuc

SEQ ID NO: 171800 - RNA, 22 nt, Human
uuaaggauguugugauuuauua

SEQ ID NO: 171801 - RNA, 22 nt, Human
uaagacugugagcucagagacu

SEQ ID NO: 171802 - RNA, 22 nt, Human
uguauacaauucacacuuccca

SEQ ID NO: 171803 - RNA, 22 nt, Human
uggcuauugagugaucucuaga

SEQ ID NO: 171804 - RNA, 22 nt, Human
agcugcaaccuuagcuauaggc

SEQ ID NO: 171805 - RNA, 22 nt, Human
acauguaaaaauuaagguaaga

SEQ ID NO: 171806 - RNA, 22 nt, Human
gguuuauuaaugugaacuguau

SEQ ID NO: 171807 - RNA, 22 nt, Human
auuuaaaugcuuaagaggguuu

SEQ ID NO: 171808 - RNA, 22 nt, Human
uccaggcauagaaggcacgcac

SEQ ID NO: 171809 - RNA, 22 nt, Human
gccaggcaguucaaguacacca

SEQ ID NO: 171810 - RNA, 22 nt, Human
ccaaggcaggggaucaaaguuu

SEQ ID NO: 171811 - RNA, 22 nt, Human
uuauccaagcagaagcugcaca

SEQ ID NO: 171812 - RNA, 22 nt, Human
uuucuucacaggguauugggug

SEQ ID NO: 171813 - RNA, 22 nt, Human
aagggcucccugccugaggugg

SEQ ID NO: 171814 - RNA, 22 nt, Human
uggcaaaggcgcucacaugccu

SEQ ID NO: 171815 - RNA, 22 nt, Human
ucagguggcuuggagggggacg

SEQ ID NO: 171816 - RNA, 22 nt, Human
aaauuauucucauguguuucuu

SEQ ID NO: 171817 - RNA, 22 nt, Human
agagaugaacauaaaacaagga

SEQ ID NO: 171818 - RNA, 22 nt, Human
caguuuauaugucagagcugua

SEQ ID NO: 171819 - RNA, 22 nt, Human
cauuuacacuucuaaccacaag

SEQ ID NO: 171820 - RNA, 22 nt, Human
ugcugaggcagaugucugugac

SEQ ID NO: 171821 - RNA, 22 nt, Human
guguguccucauaagauggagg

SEQ ID NO: 171822 - RNA, 22 nt, Human
uucucauggugucuuuauacau

SEQ ID NO: 171823 - RNA, 20 nt, Human
gauuucaaagcagaguggcc

SEQ ID NO: 171824 - RNA, 22 nt, Human
ugggcaggcaagugaauaccuu

SEQ ID NO: 171825 - RNA, 22 nt, Human
uuugcuuguucaagauuucugu

SEQ ID NO: 171826 - RNA, 22 nt, Human
uagcaucuguucuuucauuaaa

SEQ ID NO: 171827 - RNA, 22 nt, Human
uaugucaaaguuaagaaauagg

SEQ ID NO: 171828 - RNA, 22 nt, Human
acauaauaccuaggacaguuug

SEQ ID NO: 171829 - RNA, 22 nt, Human
agcagguggugggccagauuug

SEQ ID NO: 171830 - RNA, 21 nt, Human
uaauaauuccacuacagagua

SEQ ID NO: 171831 - RNA, 22 nt, Human
cacuugauggaagagcagaaga

SEQ ID NO: 171832 - RNA, 22 nt, Human
gggcagguggcagggucucugg

SEQ ID NO: 171833 - RNA, 22 nt, Human
caugcaugccgggcugacagag

SEQ ID NO: 171834 - RNA, 22 nt, Human
gaggugguucagguagagccca

SEQ ID NO: 171835 - RNA, 22 nt, Human
acuugguugcuucugaaaugac

SEQ ID NO: 171836 - RNA, 22 nt, Human
gagguguccucagccaacucug

SEQ ID NO: 171837 - RNA, 19 nt, Human
cuguccugguuuggucccu

SEQ ID NO: 171838 - RNA, 22 nt, Human
auauauuuacucuccuguugca

SEQ ID NO: 171839 - RNA, 22 nt, Human
uguguccuuccaguuuuuccug

SEQ ID NO: 171840 - RNA, 22 nt, Human
uuacagaacugucuugaaauuu

SEQ ID NO: 171841 - RNA, 22 nt, Human
auguccucuucugccucaggcc

SEQ ID NO: 171842 - RNA, 19 nt, Human
agcugcaaaagguggaacu

SEQ ID NO: 171843 - RNA, 22 nt, Human
aucuuucagggccauuuguauu

SEQ ID NO: 171844 - RNA, 22 nt, Human
agucaaagaugaccgaguuccu

SEQ ID NO: 171845 - RNA, 22 nt, Human
caguccuugauccaauaguggg

SEQ ID NO: 171846 - RNA, 22 nt, Human
caaucaguaaccggaucauggu

SEQ ID NO: 171847 - RNA, 22 nt, Human
ccaaaugugccuguuucaacaa

SEQ ID NO: 171848 - RNA, 22 nt, Human
cucccaagcugugcugaacugu

SEQ ID NO: 171849 - RNA, 22 nt, Human
agaauuccucuaggaucugccc

SEQ ID NO: 171850 - RNA, 22 nt, Human
ugcaggugucugggggcaacag

SEQ ID NO: 171851 - RNA, 22 nt, Human
aaggacagggaugguugauugu

SEQ ID NO: 171852 - RNA, 22 nt, Human
uuccagauuucuacacaagacc

SEQ ID NO: 171853 - RNA, 22 nt, Human
aaggugguaggcuauaucagua

SEQ ID NO: 171854 - RNA, 22 nt, Human
cuuuauauauucccaggcugcc

SEQ ID NO: 171855 - RNA, 22 nt, Human
gacccagccugguuuuuauagg

SEQ ID NO: 171856 - RNA, 22 nt, Human
ccagguggaaggucugugcucu

SEQ ID NO: 171857 - RNA, 22 nt, Human
gggucuccauguuaacaucacu

SEQ ID NO: 171858 - RNA, 22 nt, Human
cuggguguagcccaguaugagg

SEQ ID NO: 171859 - RNA, 22 nt, Human
agacagugcaagaagagcaggc

SEQ ID NO: 171860 - RNA, 19 nt, Human
ucccaggaagcaaauguca

SEQ ID NO: 171861 - RNA, 22 nt, Human
uccagcauuuuucaauagaauu

SEQ ID NO: 171862 - RNA, 22 nt, Human
ugcagguggcuccagggacugc

SEQ ID NO: 171863 - RNA, 22 nt, Human
gagcugcacuggggguggaaug

SEQ ID NO: 171864 - RNA, 22 nt, Human
gcauuauuaauagcugcaugag

SEQ ID NO: 171865 - RNA, 22 nt, Human
cugaaaauguuacacaggaaga

SEQ ID NO: 171866 - RNA, 22 nt, Human
caaaaaacacagaugucugugu

SEQ ID NO: 171867 - RNA, 22 nt, Human
uugcugggugcuauuaugaaca

SEQ ID NO: 171868 - RNA, 22 nt, Human
gggcaggugccagcucccuguc

SEQ ID NO: 171869 - RNA, 23 nt, Human
ugcuggcuuccagcugcucccuc

SEQ ID NO: 171870 - RNA, 22 nt, Human
cuggauguucuucugcaauuau

SEQ ID NO: 171871 - RNA, 22 nt, Human
cuggaggagaacuugaggaagg

SEQ ID NO: 171872 - RNA, 22 nt, Human
caggugguuugauaggauaacu

SEQ ID NO: 171873 - RNA, 22 nt, Human
gcagacagcauguugggcuauu

SEQ ID NO: 171874 - RNA, 22 nt, Human
uuccuuccauagcaaaacaugc

SEQ ID NO: 171875 - RNA, 22 nt, Human
auguauccuuauacacauuuau

SEQ ID NO: 171876 - RNA, 22 nt, Human
uacagacaaagagcaugcggua

SEQ ID NO: 171877 - RNA, 22 nt, Human
gaauguaagugggcagaagaca

SEQ ID NO: 171878 - RNA, 22 nt, Human
guacagaaggauuucuaguagu

SEQ ID NO: 171879 - RNA, 22 nt, Human
guccuuaguuacuuuucauguc

SEQ ID NO: 171880 - RNA, 22 nt, Human
gagucaccuugggucagcgaua

SEQ ID NO: 171881 - RNA, 22 nt, Human
acuggaucagaaucugauuuuu

SEQ ID NO: 171882 - RNA, 22 nt, Human
ugcagguguaaauuuucaagag

SEQ ID NO: 171883 - RNA, 22 nt, Human
auuguuaaacugaagcauuacu

SEQ ID NO: 171884 - RNA, 22 nt, Human
uucuggguaacaaggcaagaau

SEQ ID NO: 171885 - RNA, 22 nt, Human
gcuggaucauauggugguucua

SEQ ID NO: 171886 - RNA, 22 nt, Human
auccaaaccuggacaugagugg

SEQ ID NO: 171887 - RNA, 22 nt, Human
aaggugucauccaggauggugg

SEQ ID NO: 171888 - RNA, 21 nt, Human
uagggcaggcauuggaagaga

SEQ ID NO: 171889 - RNA, 23 nt, Human
uguaacaauucccagccuuugcc

SEQ ID NO: 171890 - RNA, 22 nt, Human
uccuggguuaauuaugauucac

SEQ ID NO: 171891 - RNA, 22 nt, Human
uuauugaguaucugcuuggugu

SEQ ID NO: 171892 - RNA, 22 nt, Human
uaaacauggauucugaucacag

SEQ ID NO: 171893 - RNA, 22 nt, Human
ucucucuucaacccuuaacuag

SEQ ID NO: 171894 - RNA, 22 nt, Human
uggagcugccuggcaccuacag

SEQ ID NO: 171895 - RNA, 22 nt, Human
gcaggugucuucagcaggauga

SEQ ID NO: 171896 - RNA, 22 nt, Human
agcaggugucggcgagggucuu

SEQ ID NO: 171897 - RNA, 22 nt, Human
aaucagaaucaguugacacagc

SEQ ID NO: 171898 - RNA, 22 nt, Human
cuguccugcccacccugcaggg

SEQ ID NO: 171899 - RNA, 22 nt, Human
aauaauauuugaagcuucaaag

SEQ ID NO: 171900 - RNA, 22 nt, Human
uuccuaaucacgaacauuauuu

SEQ ID NO: 171901 - RNA, 22 nt, Human
aguggcagaucucuggucugga

SEQ ID NO: 171902 - RNA, 22 nt, Human
aaagacuuggcuuaugauuugc

SEQ ID NO: 171903 - RNA, 22 nt, Human
uugcuugacuuuguguaccugu

SEQ ID NO: 171904 - RNA, 22 nt, Human
uuccugaauauaaagacacuag

SEQ ID NO: 171905 - RNA, 15 nt, Human
agacagacaguggga

SEQ ID NO: 171906 - RNA, 22 nt, Human
agccuggaauuaaggaaaugca

SEQ ID NO: 171907 - RNA, 22 nt, Human
ggagcugaggaauagcuuugau

SEQ ID NO: 171908 - RNA, 22 nt, Human
gcagggcaaugaucccgagagg

SEQ ID NO: 171909 - RNA, 22 nt, Human
ggucugcccacuacucuccauu

SEQ ID NO: 171910 - RNA, 22 nt, Human
uucacacacagcuuccuauugu

SEQ ID NO: 171911 - RNA, 22 nt, Human
uggcagguccacucacagaucu

SEQ ID NO: 171912 - RNA, 22 nt, Human
cagagggacaguaugaugaaag

SEQ ID NO: 171913 - RNA, 22 nt, Human
cuuuaguucuagaaagugaaac

SEQ ID NO: 171914 - RNA, 21 nt, Human
uucaaaaugguguguuugucu

SEQ ID NO: 171915 - RNA, 22 nt, Human
uuauuuaaugugaucugaagag

SEQ ID NO: 171916 - RNA, 22 nt, Human
auguucuuggauguuguguaua

SEQ ID NO: 171917 - RNA, 17 nt, Human
uccuggauccauggugg

SEQ ID NO: 171918 - RNA, 22 nt, Human
uuucuagucucgaucucuuaau

SEQ ID NO: 171919 - RNA, 22 nt, Human
ugcuggagcaacauuauugugc

SEQ ID NO: 171920 - RNA, 22 nt, Human
aauauaugugguauugaccagc

SEQ ID NO: 171921 - RNA, 22 nt, Human
aucagaaauugcuaccagugga

SEQ ID NO: 171922 - RNA, 23 nt, Human
ucaggugugcggacugcugaguc

SEQ ID NO: 171923 - RNA, 22 nt, Human
gcaugcaggagagaaagacggc

SEQ ID NO: 171924 - RNA, 22 nt, Human
gaaagccauagcccagcuuuac

SEQ ID NO: 171925 - RNA, 23 nt, Human
uguaacaauuucauauacaugca

SEQ ID NO: 171926 - RNA, 22 nt, Human
aguuauaaucugcuacugauau

SEQ ID NO: 171927 - RNA, 22 nt, Human
ugcaggugauucugaugcaguu

SEQ ID NO: 171928 - RNA, 22 nt, Human
gggcucucgauuagacccuggg

SEQ ID NO: 171929 - RNA, 22 nt, Human
gccugcagaggugcugcuagcu

SEQ ID NO: 171930 - RNA, 17 nt, Human
uaaguccuaguuauuuu

SEQ ID NO: 171931 - RNA, 23 nt, Human
agcuucauugaccuccgcagggg

SEQ ID NO: 171932 - RNA, 22 nt, Human
aaguccuucccaagcauguacc

SEQ ID NO: 171933 - RNA, 22 nt, Human
agguggaaauggcuuuccuagg

SEQ ID NO: 171934 - RNA, 22 nt, Human
cauucuuauauuuacucauuca

SEQ ID NO: 171935 - RNA, 22 nt, Human
cuggauuuuagaaggcuuccua

SEQ ID NO: 171936 - RNA, 22 nt, Human
aacauuggauauuuauuaaaag

SEQ ID NO: 171937 - RNA, 22 nt, Human
uggagcugacucacaccagcua

SEQ ID NO: 171938 - RNA, 22 nt, Human
uucuauugacauucacuguaac

SEQ ID NO: 171939 - RNA, 21 nt, Human
cccugcaggccagggcugagc

SEQ ID NO: 171940 - RNA, 22 nt, Human
auaguuugaaggcuguucuacu

SEQ ID NO: 171941 - RNA, 22 nt, Human
gcauguuauguaucugcccagc

SEQ ID NO: 171942 - RNA, 22 nt, Human
ugaaagcuuguuggaaauguag

SEQ ID NO: 171943 - RNA, 22 nt, Human
aauguuaauguguuugcuuaug

SEQ ID NO: 171944 - RNA, 22 nt, Human
ucugggaaugaauaagaccugu

SEQ ID NO: 171945 - RNA, 22 nt, Human
uugcuuuacggcaaggccccag

SEQ ID NO: 171946 - RNA, 22 nt, Human
auuucccuccagggaaagcuua

SEQ ID NO: 171947 - RNA, 22 nt, Human
uaggugucuuguguaugguaca

SEQ ID NO: 171948 - RNA, 22 nt, Human
uauugcuggugcuguucugaau

SEQ ID NO: 171949 - RNA, 20 nt, Human
aaugaggucccacugaggag

SEQ ID NO: 171950 - RNA, 22 nt, Human
uuuuucaugagacuagaaguca

SEQ ID NO: 171951 - RNA, 22 nt, Human
ggacaugugcaacuucuuugga

SEQ ID NO: 171952 - RNA, 22 nt, Human
cauuucaagcauugacuucuau

SEQ ID NO: 171953 - RNA, 22 nt, Human
uauuugcaacauaaaacucuga

SEQ ID NO: 171954 - RNA, 22 nt, Human
aggccuccuggcuccaggccuu

SEQ ID NO: 171955 - RNA, 22 nt, Human
ugaaucauggauaaauagcuua

SEQ ID NO: 171956 - RNA, 22 nt, Human
uauauuuaaauccagguugaaa

SEQ ID NO: 171957 - RNA, 22 nt, Human
uaagaacuucggacauguuauc

SEQ ID NO: 171958 - RNA, 22 nt, Human
gcagcuuuaaucugaauaagua

SEQ ID NO: 171959 - RNA, 21 nt, Human
caugugucauuggagagcaau

SEQ ID NO: 171960 - RNA, 22 nt, Human
uggaauguaaaccucagguggg

SEQ ID NO: 171961 - RNA, 19 nt, Human
uuugcagugguuccuuugu

SEQ ID NO: 171962 - RNA, 22 nt, Human
guuauauauaguauuucucuga

SEQ ID NO: 171963 - RNA, 20 nt, Human
agacccucuggacugggccc

SEQ ID NO: 171964 - RNA, 20 nt, Human
agcauuugaaauaugacuau

SEQ ID NO: 171965 - RNA, 22 nt, Human
uggguagaguggagggauaaga

SEQ ID NO: 171966 - RNA, 22 nt, Human
uggcaaagugacuccuuggggc

SEQ ID NO: 171967 - RNA, 22 nt, Human
ugcuggguuaccuaagccuaaa

SEQ ID NO: 171968 - RNA, 22 nt, Human
ccagagcccagggucaugcagg

SEQ ID NO: 171969 - RNA, 22 nt, Human
auucuucacauggauaggaucu

SEQ ID NO: 171970 - RNA, 22 nt, Human
uaguuucagcuccuucauccug

SEQ ID NO: 171971 - RNA, 22 nt, Human
aaagcugcuuuaaacaucuaug

SEQ ID NO: 171972 - RNA, 22 nt, Human
uuuccagagggugcucagggcg

SEQ ID NO: 171973 - RNA, 22 nt, Human
gccaggcagcaggaagccagug

SEQ ID NO: 171974 - RNA, 22 nt, Human
uugguacagaugagguauucuc

SEQ ID NO: 171975 - RNA, 22 nt, Human
uuuccauauuuaaucaaaauaa

SEQ ID NO: 171976 - RNA, 21 nt, Human
uuacagaauccaugggaaguc

SEQ ID NO: 171977 - RNA, 22 nt, Human
cccugcagagggaugggggcag

SEQ ID NO: 171978 - RNA, 22 nt, Human
agaugguccaucuauuuucuau

SEQ ID NO: 171979 - RNA, 22 nt, Human
cuuuacauccuguuucccguuu

SEQ ID NO: 171980 - RNA, 22 nt, Human
guuuauugauaaaagcuggaca

SEQ ID NO: 171981 - RNA, 21 nt, Human
ucagggcagcugcucuucaga

SEQ ID NO: 171982 - RNA, 22 nt, Human
ucuuccuugcuccuugucacuu

SEQ ID NO: 171983 - RNA, 22 nt, Human
ugcuuaauguacgugaguguac

SEQ ID NO: 171984 - RNA, 22 nt, Human
gcaaacaagcugccugaagauu

SEQ ID NO: 171985 - RNA, 22 nt, Human
aaaguccuguuugaaggaccug

SEQ ID NO: 171986 - RNA, 22 nt, Human
ucacaaaugaggaaaucgagca

SEQ ID NO: 171987 - RNA, 22 nt, Human
uagggcucagagaaguggggcc

SEQ ID NO: 171988 - RNA, 22 nt, Human
caggcagcugcgacaagagagc

SEQ ID NO: 171989 - RNA, 22 nt, Human
uuacagaaaagggcuuuaagag

SEQ ID NO: 171990 - RNA, 22 nt, Human
cagaaagcuuaggcaaguugga

SEQ ID NO: 171991 - RNA, 22 nt, Human
agugugaguaauucagggaggg

SEQ ID NO: 171992 - RNA, 22 nt, Human
uugggaaguuuaaugacagacu

SEQ ID NO: 171993 - RNA, 22 nt, Human
gucauuccuuauguugauucag

SEQ ID NO: 171994 - RNA, 22 nt, Human
acauguguaaggucucucaguc

SEQ ID NO: 171995 - RNA, 22 nt, Human
acagguguugacucacaggccc

SEQ ID NO: 171996 - RNA, 22 nt, Human
agggaccucauguaaguggauu

SEQ ID NO: 171997 - RNA, 22 nt, Human
gggugggaacaggaugccagga

SEQ ID NO: 171998 - RNA, 22 nt, Human
cuguccugaaagggagauuggg

SEQ ID NO: 171999 - RNA, 22 nt, Human
uaauuucaaauuucuuagcgug

SEQ ID NO: 172000 - RNA, 22 nt, Human
ucaaagagcuauucaguugugg

SEQ ID NO: 172001 - RNA, 21 nt, Human
uucaaaguuugccuaaagauu

SEQ ID NO: 172002 - RNA, 22 nt, Human
gguccugggaagaugcucauga

SEQ ID NO: 172003 - RNA, 22 nt, Human
caguguggugugcacagcuuag

SEQ ID NO: 172004 - RNA, 23 nt, Human
gcaugaagugcuacgucuacagc

SEQ ID NO: 172005 - RNA, 22 nt, Human
ucagacagcuugcagggaggug

SEQ ID NO: 172006 - RNA, 22 nt, Human
uguguccucagggaagcagaga

SEQ ID NO: 172007 - RNA, 22 nt, Human
ugguuuaauuuccauuuccuug

SEQ ID NO: 172008 - RNA, 22 nt, Human
acuagaaacuaauggauuauua

SEQ ID NO: 172009 - RNA, 22 nt, Human
aauugcuuaucuuguugaauag

SEQ ID NO: 172010 - RNA, 15 nt, Human
uccaggcauucauuc

SEQ ID NO: 172011 - RNA, 22 nt, Human
aaacaugagcauuucuguuuaa

SEQ ID NO: 172012 - RNA, 22 nt, Human
uuuccaaagcugaguugagcaa

SEQ ID NO: 172013 - RNA, 22 nt, Human
uugcaggguuaaaguaagguag

SEQ ID NO: 172014 - RNA, 22 nt, Human
ugguccuguguucuuccugccu

SEQ ID NO: 172015 - RNA, 18 nt, Human
caagaaucucuaaagaag

SEQ ID NO: 172016 - RNA, 22 nt, Human
aaaugucagaggaacauauuga

SEQ ID NO: 172017 - RNA, 22 nt, Human
cagaagaggacuggguagcuca

SEQ ID NO: 172018 - RNA, 22 nt, Human
caggugguuaugaggaagguga

SEQ ID NO: 172019 - RNA, 22 nt, Human
gggagcuggagcuggaagacuc

SEQ ID NO: 172020 - RNA, 22 nt, Human
agcucccagaagccagagucgg

SEQ ID NO: 172021 - RNA, 22 nt, Human
aggagugggggcgagaaguuaa

SEQ ID NO: 172022 - RNA, 22 nt, Human
gcuggaggaggaagugugaggg

SEQ ID NO: 172023 - RNA, 22 nt, Human
gcagaauugauggagaacuuaa

SEQ ID NO: 172024 - RNA, 23 nt, Human
acucaaaauuuggcauuugagga

SEQ ID NO: 172025 - RNA, 22 nt, Human
uuuccuuccaaaugcccgggag

SEQ ID NO: 172026 - RNA, 22 nt, Human
gaaguuuauuucaaucuauuca

SEQ ID NO: 172027 - RNA, 22 nt, Human
aggcuucugugagcucauacaa

SEQ ID NO: 172028 - RNA, 22 nt, Human
ggcuuuauuauguggccaugug

SEQ ID NO: 172029 - RNA, 22 nt, Human
aauuccaaguagcaucccauca

SEQ ID NO: 172030 - RNA, 22 nt, Human
uccaggcauaagccuugagugu

SEQ ID NO: 172031 - RNA, 22 nt, Human
augcuuuaaaugucuuuugcuu

SEQ ID NO: 172032 - RNA, 22 nt, Human
aguggcagguguuucguggugc

SEQ ID NO: 172033 - RNA, 22 nt, Human
aauugcuuuuauuuagggccag

SEQ ID NO: 172034 - RNA, 22 nt, Human
cagaaaaggaagagcuauguaa

SEQ ID NO: 172035 - RNA, 22 nt, Human
cucagugugaaugcucaguaaa

SEQ ID NO: 172036 - RNA, 18 nt, Human
uucuggguguuauguuua

SEQ ID NO: 172037 - RNA, 22 nt, Human
uuccuuagacagagguggucau

SEQ ID NO: 172038 - RNA, 22 nt, Human
aggcaccuugagagcaggagcu

SEQ ID NO: 172039 - RNA, 22 nt, Human
ggaaggaagugcagacuuuaaa

SEQ ID NO: 172040 - RNA, 22 nt, Human
cuuugcugagcugguuguucaa

SEQ ID NO: 172041 - RNA, 22 nt, Human
cuuuucaugagucuguuauggg

SEQ ID NO: 172042 - RNA, 22 nt, Human
cccagcuucugagggggccuug

SEQ ID NO: 172043 - RNA, 22 nt, Human
uucucuuagcuguaaagucaau

SEQ ID NO: 172044 - RNA, 22 nt, Human
aucaagaacuuauuuuggaaau

SEQ ID NO: 172045 - RNA, 22 nt, Human
cauuuguagcuauuuacuguau

SEQ ID NO: 172046 - RNA, 19 nt, Human
caugugucaauacuguacc

SEQ ID NO: 172047 - RNA, 22 nt, Human
acauucacuauguccaaacucu

SEQ ID NO: 172048 - RNA, 22 nt, Human
auagaaauguauuuuggacuag

SEQ ID NO: 172049 - RNA, 22 nt, Human
ccaggccucccuuuuccagcca

SEQ ID NO: 172050 - RNA, 22 nt, Human
uccaggcaucccccaggacaga

SEQ ID NO: 172051 - RNA, 22 nt, Human
cugcagggagaggggacagccu

SEQ ID NO: 172052 - RNA, 22 nt, Human
ucuauacaaguuucacuuugac

SEQ ID NO: 172053 - RNA, 22 nt, Human
uuuccaaaggaguaccacgcau

SEQ ID NO: 172054 - RNA, 22 nt, Human
ugucugggucaccccuccuggc

SEQ ID NO: 172055 - RNA, 20 nt, Human
uuuauuggccuuucaggaac

SEQ ID NO: 172056 - RNA, 22 nt, Human
accugcagguguuuccacacuu

SEQ ID NO: 172057 - RNA, 22 nt, Human
cccagugugccccuccugcagc

SEQ ID NO: 172058 - RNA, 22 nt, Human
uuucuguagugugguauguagg

SEQ ID NO: 172059 - RNA, 22 nt, Human
aguuugaaauguuggcaauauu

SEQ ID NO: 172060 - RNA, 22 nt, Human
uuccucaacaacuucccuacag

SEQ ID NO: 172061 - RNA, 22 nt, Human
aaauacagaguugcuuaaaagc

SEQ ID NO: 172062 - RNA, 22 nt, Human
gacagacacuguguccucacuu

SEQ ID NO: 172063 - RNA, 22 nt, Human
auuugcaaagucguaucuguga

SEQ ID NO: 172064 - RNA, 22 nt, Human
agugugaguuugguugagacuu

SEQ ID NO: 172065 - RNA, 19 nt, Human
acagcagguguggggauaa

SEQ ID NO: 172066 - RNA, 22 nt, Human
gaugugucuccguuucaaggca

SEQ ID NO: 172067 - RNA, 19 nt, Human
ugggaaaguaacauacaaa

SEQ ID NO: 172068 - RNA, 20 nt, Human
uacaauauucccacuuugcu

SEQ ID NO: 172069 - RNA, 22 nt, Human
auagaauagcauagaaaauuga

SEQ ID NO: 172070 - RNA, 21 nt, Human
agacagacugccugacccacg

SEQ ID NO: 172071 - RNA, 22 nt, Human
aagauauagauggugguauaaa

SEQ ID NO: 172072 - RNA, 22 nt, Human
cauagaaacugagacaaggauu

SEQ ID NO: 172073 - RNA, 22 nt, Human
uuccaggaagcaguuagcagcc

SEQ ID NO: 172074 - RNA, 22 nt, Human
acuagaaauuacucagaauaaa

SEQ ID NO: 172075 - RNA, 22 nt, Human
acaauauuguacccagaaguuu

SEQ ID NO: 172076 - RNA, 22 nt, Human
uaaguuuucuggaauaacuugg

SEQ ID NO: 172077 - RNA, 22 nt, Human
uucagugucaauuuuuaaauau

SEQ ID NO: 172078 - RNA, 21 nt, Human
uuguguccuucuaaagggcca

SEQ ID NO: 172079 - RNA, 22 nt, Human
uuccuugguagagagaauauuu

SEQ ID NO: 172080 - RNA, 22 nt, Human
uggcuuaauauuucauauuuaa

SEQ ID NO: 172081 - RNA, 22 nt, Human
agguggggugagcugcagacua

SEQ ID NO: 172082 - RNA, 22 nt, Human
gcaaauauucaagacuuuucca

SEQ ID NO: 172083 - RNA, 23 nt, Human
cacaggcugcgcauaagcuucuc

SEQ ID NO: 172084 - RNA, 22 nt, Human
aaacaucauaggcaugcaugau

SEQ ID NO: 172085 - RNA, 22 nt, Human
uuauucuuuucuccagaauccc

SEQ ID NO: 172086 - RNA, 22 nt, Human
uguccauggauagagcugcucg

SEQ ID NO: 172087 - RNA, 22 nt, Human
ggcaggcaggucuucauggccc

SEQ ID NO: 172088 - RNA, 22 nt, Human
cuguccugugcauugucagaug

SEQ ID NO: 172089 - RNA, 22 nt, Human
gggaggaaagagaaguggucca

SEQ ID NO: 172090 - RNA, 22 nt, Human
auuauucuuaugucaucauggc

SEQ ID NO: 172091 - RNA, 22 nt, Human
acaguguuuuagaaaagcuuga

SEQ ID NO: 172092 - RNA, 22 nt, Human
caucagaaugaauguucuggag

SEQ ID NO: 172093 - RNA, 22 nt, Human
cugcccgucccuuugcucucgc

SEQ ID NO: 172094 - RNA, 22 nt, Human
uuuaucugagcugauagauagu

SEQ ID NO: 172095 - RNA, 22 nt, Human
cuggaucaugcauugcuugucc

SEQ ID NO: 172096 - RNA, 22 nt, Human
agcugcaaagaugauuuguugu

SEQ ID NO: 172097 - RNA, 22 nt, Human
uuacuacugcuuuacuacuggg

SEQ ID NO: 172098 - RNA, 22 nt, Human
ugaagcuuuccuguggucagga

SEQ ID NO: 172099 - RNA, 22 nt, Human
acuuuugaagaauuaugcaaaa

SEQ ID NO: 172100 - RNA, 22 nt, Human
aacuuucaggcaaugaauauuu

SEQ ID NO: 172101 - RNA, 22 nt, Human
auuucucacucacaguccaugu

SEQ ID NO: 172102 - RNA, 22 nt, Human
cauauaauguuugaagaugugg

SEQ ID NO: 172103 - RNA, 22 nt, Human
ccaaaauuaagccucuuauguu

SEQ ID NO: 172104 - RNA, 22 nt, Human
guagggacuguucucaccugag

SEQ ID NO: 172105 - RNA, 22 nt, Human
uuuagggaauagaagaucugaa

SEQ ID NO: 172106 - RNA, 22 nt, Human
acccagcaugacaccugcacau

SEQ ID NO: 172107 - RNA, 23 nt, Human
uaucagugugaugaggcugcugc

SEQ ID NO: 172108 - RNA, 22 nt, Human
cuggguguuggguacugaccgu

SEQ ID NO: 172109 - RNA, 22 nt, Human
acauuuaaauaccuauguuucu

SEQ ID NO: 172110 - RNA, 22 nt, Human
acaaaauuaugaagaggccuug

SEQ ID NO: 172111 - RNA, 23 nt, Human
cagaaauaaacugguuuguagau

SEQ ID NO: 172112 - RNA, 22 nt, Human
auacagaauucacuacaguuuc

SEQ ID NO: 172113 - RNA, 22 nt, Human
uguguccugcaggugcugccug

SEQ ID NO: 172114 - RNA, 22 nt, Human
agaagucauuuauguuagauga

SEQ ID NO: 172115 - RNA, 20 nt, Human
uuucaguuaucuugaccuuc

SEQ ID NO: 172116 - RNA, 22 nt, Human
cuuguugcugaauucaggauuc

SEQ ID NO: 172117 - RNA, 22 nt, Human
aauucuuguuguuaguauauuu

SEQ ID NO: 172118 - RNA, 22 nt, Human
auucuacaacccaauaauaauu

SEQ ID NO: 172119 - RNA, 22 nt, Human
uuaauucuaguuuaacacuuag

SEQ ID NO: 172120 - RNA, 22 nt, Human
auagaagaggaaacugagguug

SEQ ID NO: 172121 - RNA, 22 nt, Human
uuggagauaucacaccuucaca

SEQ ID NO: 172122 - RNA, 22 nt, Human
uaauaucuacuucauagaguuu

SEQ ID NO: 172123 - RNA, 23 nt, Human
uggcucuguggaucccucaggag

SEQ ID NO: 172124 - RNA, 22 nt, Human
caacagucugguuuauauaaua

SEQ ID NO: 172125 - RNA, 22 nt, Human
gcacaauaauuuuuuuaagagg

SEQ ID NO: 172126 - RNA, 22 nt, Human
gcuguucacggaggaggauggg

SEQ ID NO: 172127 - RNA, 22 nt, Human
uugcuaggauucauucuauacu

SEQ ID NO: 172128 - RNA, 22 nt, Human
ggcuuuuguuucagcucugcua

SEQ ID NO: 172129 - RNA, 22 nt, Human
gaugugucuccauacaccaccc

SEQ ID NO: 172130 - RNA, 23 nt, Human
agaauuccaguuucuuaugucac

SEQ ID NO: 172131 - RNA, 22 nt, Human
aaagauaauguuuccuuauucu

SEQ ID NO: 172132 - RNA, 22 nt, Human
cuuauuagaguuguguucuguu

SEQ ID NO: 172133 - RNA, 22 nt, Human
acuuuguuuggcuauuagaguc

SEQ ID NO: 172134 - RNA, 20 nt, Human
acaauacagguugugucuga

SEQ ID NO: 172135 - RNA, 19 nt, Human
accugcaguaauaauuccu

SEQ ID NO: 172136 - RNA, 22 nt, Human
caugcauguuuacuacagugac

SEQ ID NO: 172137 - RNA, 20 nt, Human
auggaggaagggcaagagaa

SEQ ID NO: 172138 - RNA, 19 nt, Human
cacaucagcagggcugugg

SEQ ID NO: 172139 - RNA, 22 nt, Human
aaguuucaaauauaaaauuaca

SEQ ID NO: 172140 - RNA, 22 nt, Human
aauugcuugucuucuucccuac

SEQ ID NO: 172141 - RNA, 22 nt, Human
gccugcagggugaugggcugcc

SEQ ID NO: 172142 - RNA, 22 nt, Human
gguuucaaugagaagugcuugu

SEQ ID NO: 172143 - RNA, 19 nt, Human
aucugagauuauaaacaga

SEQ ID NO: 172144 - RNA, 22 nt, Human
cauuucaaugccuucaacauag

SEQ ID NO: 172145 - RNA, 22 nt, Human
uggcaaggccacaggugcaguu

SEQ ID NO: 172146 - RNA, 22 nt, Human
ccaggccucuggcugcuuaguc

SEQ ID NO: 172147 - RNA, 22 nt, Human
gccaggcagcuagcaaccccug

SEQ ID NO: 172148 - RNA, 22 nt, Human
uccuuccugcaggccaaguccu

SEQ ID NO: 172149 - RNA, 19 nt, Human
uccuucuccggccaccccg

SEQ ID NO: 172150 - RNA, 22 nt, Human
ggcaauuucaugugguuuaaac

SEQ ID NO: 172151 - RNA, 22 nt, Human
guuuuucuagaaaucuccuccu

SEQ ID NO: 172152 - RNA, 22 nt, Human
ucuguaguagguuguaguucuu

SEQ ID NO: 172153 - RNA, 22 nt, Human
uguacaaucugaugauguaugg

SEQ ID NO: 172154 - RNA, 22 nt, Human
guauuaggaggaacacaggccu

SEQ ID NO: 172155 - RNA, 22 nt, Human
ugauuuuauugaaacuucacuu

SEQ ID NO: 172156 - RNA, 21 nt, Human
augucaaaugcuuuauuuuau

SEQ ID NO: 172157 - RNA, 22 nt, Human
uggcaaauauuuuguuuuguaa

SEQ ID NO: 172158 - RNA, 22 nt, Human
caauuucugggccucacacaag

SEQ ID NO: 172159 - RNA, 22 nt, Human
uaaucuacuguuuauaugaaau

SEQ ID NO: 172160 - RNA, 22 nt, Human
agauuucucuuucccuggcuga

SEQ ID NO: 172161 - RNA, 22 nt, Human
acagaaguuggaauuagauacu

SEQ ID NO: 172162 - RNA, 22 nt, Human
ugcagggaaucuguggcuggac

SEQ ID NO: 172163 - RNA, 22 nt, Human
gcugcaggcauuuuccugggca

SEQ ID NO: 172164 - RNA, 22 nt, Human
ugucuucagcaaaugccuuucu

SEQ ID NO: 172165 - RNA, 22 nt, Human
auguccagagccggccugcuga

SEQ ID NO: 172166 - RNA, 22 nt, Human
auauaauacaaccugcuaagug

SEQ ID NO: 172167 - RNA, 22 nt, Human
ccaguacugucuccaauauucc

SEQ ID NO: 172168 - RNA, 22 nt, Human
aaacuuugguauguagcaaaac

SEQ ID NO: 172169 - RNA, 22 nt, Human
uuuaggcagcuacauacuaacu

SEQ ID NO: 172170 - RNA, 22 nt, Human
aggugggguucagucucagccg

SEQ ID NO: 172171 - RNA, 22 nt, Human
aauuugauuuucuuaaaccaua

SEQ ID NO: 172172 - RNA, 22 nt, Human
aggugagguuugggagguguca

SEQ ID NO: 172173 - RNA, 22 nt, Human
cuggaggaccccugccuggaag

SEQ ID NO: 172174 - RNA, 22 nt, Human
gccaggcaggugucggagcccu

SEQ ID NO: 172175 - RNA, 22 nt, Human
caugcagcagaauaaugacuau

SEQ ID NO: 172176 - RNA, 23 nt, Human
gaggcagcuccugcagugcccug

SEQ ID NO: 172177 - RNA, 22 nt, Human
uugugucccuguaagacaaagc

SEQ ID NO: 172178 - RNA, 22 nt, Human
gagacaggcagcuaguggguca

SEQ ID NO: 172179 - RNA, 23 nt, Human
auguuauuauuagcagucuugcc

SEQ ID NO: 172180 - RNA, 22 nt, Human
aaguccagcucuaaauaucuga

SEQ ID NO: 172181 - RNA, 22 nt, Human
caggguggaagcuguagagugg

SEQ ID NO: 172182 - RNA, 22 nt, Human
guaugcaucgacucaagucuga

SEQ ID NO: 172183 - RNA, 22 nt, Human
uguuuucauuugauguaacaaa

SEQ ID NO: 172184 - RNA, 22 nt, Human
ucaguaaaguucuuucuugcug

SEQ ID NO: 172185 - RNA, 22 nt, Human
ugucugaugauagugucucucc

SEQ ID NO: 172186 - RNA, 22 nt, Human
guuaggcauuugccuuaauuuu

SEQ ID NO: 172187 - RNA, 22 nt, Human
gccugcagcaugcuaggucuug

SEQ ID NO: 172188 - RNA, 22 nt, Human
gauccugugcauggggugaugg

SEQ ID NO: 172189 - RNA, 22 nt, Human
gcccagcuggcuuccagcacau

SEQ ID NO: 172190 - RNA, 22 nt, Human
ggagcugaugacgucaccaugg

SEQ ID NO: 172191 - RNA, 19 nt, Human
ugacagguuuuauguguuu

SEQ ID NO: 172192 - RNA, 22 nt, Human
ggugggaggacuguuugaggca

SEQ ID NO: 172193 - RNA, 22 nt, Human
uaaauaugcauguauccuuauc

SEQ ID NO: 172194 - RNA, 22 nt, Human
uguuuuaaagccauugccuuuc

SEQ ID NO: 172195 - RNA, 22 nt, Human
gaggugguuuguggugacucau

SEQ ID NO: 172196 - RNA, 22 nt, Human
uuucaaauggagucgugaaaug

SEQ ID NO: 172197 - RNA, 22 nt, Human
ugcagggaagcaaggguggcuc

SEQ ID NO: 172198 - RNA, 22 nt, Human
uuugaaucugauauggcagcau

SEQ ID NO: 172199 - RNA, 22 nt, Human
caacuuuucugugaauuuaagu

SEQ ID NO: 172200 - RNA, 22 nt, Human
agcaggugaucgcgugugcucc

SEQ ID NO: 172201 - RNA, 22 nt, Human
guauuaggugguggaauuguag

SEQ ID NO: 172202 - RNA, 22 nt, Human
cuuaaagaaauugaggagagga

SEQ ID NO: 172203 - RNA, 22 nt, Human
auugcuuuguacaugccuagca

SEQ ID NO: 172204 - RNA, 22 nt, Human
uccuuccuggggucucugcugc

SEQ ID NO: 172205 - RNA, 22 nt, Human
acaacaggguaaggcaggccau

SEQ ID NO: 172206 - RNA, 22 nt, Human
ucauacaucuguccuggagcuc

SEQ ID NO: 172207 - RNA, 22 nt, Human
uuugaagauaaauauggagaaa

SEQ ID NO: 172208 - RNA, 22 nt, Human
ccaggugucauggauaaugggu

SEQ ID NO: 172209 - RNA, 22 nt, Human
gaggugucuguuaggaauaggc

SEQ ID NO: 172210 - RNA, 22 nt, Human
agcuuuauauuuaaugaauucu

SEQ ID NO: 172211 - RNA, 22 nt, Human
uguuuacugcauucuauuugcu

SEQ ID NO: 172212 - RNA, 22 nt, Human
caauuuuuaaacuaugaaguug

SEQ ID NO: 172213 - RNA, 22 nt, Human
aaacaaacaauuaguugugugg

SEQ ID NO: 172214 - RNA, 22 nt, Human
augcacauaggccaaaucauuu

SEQ ID NO: 172215 - RNA, 22 nt, Human
ugcagggcacacgcacgggugu

SEQ ID NO: 172216 - RNA, 22 nt, Human
gacccagcuuaagucacauguu

SEQ ID NO: 172217 - RNA, 20 nt, Human
cuguggaauuuuaccaugcg

SEQ ID NO: 172218 - RNA, 22 nt, Human
gauuuuauuagcccaaacuuug

SEQ ID NO: 172219 - RNA, 22 nt, Human
uauugcugacuuguucaguguu

SEQ ID NO: 172220 - RNA, 22 nt, Human
gcugguccacucccuggaggcu

SEQ ID NO: 172221 - RNA, 22 nt, Human
uguggggcucccuggcagccug

SEQ ID NO: 172222 - RNA, 22 nt, Human
agggcuccgggccaccggccug

SEQ ID NO: 172223 - RNA, 22 nt, Human
ucauguguccuaguucauauaa

SEQ ID NO: 172224 - RNA, 22 nt, Human
uccugcagagccgcccucaggu

SEQ ID NO: 172225 - RNA, 22 nt, Human
gcuguucacauuuugggccaaa

SEQ ID NO: 172226 - RNA, 22 nt, Human
auuaauuuccaggcacugugcu

SEQ ID NO: 172227 - RNA, 18 nt, Human
cuaaacugcaccuaauga

SEQ ID NO: 172228 - RNA, 19 nt, Human
cuccucagucccagagguc

SEQ ID NO: 172229 - RNA, 22 nt, Human
auguuucaucaguaagguuuug

SEQ ID NO: 172230 - RNA, 22 nt, Human
uggcaaagaugaagcauuucgu

SEQ ID NO: 172231 - RNA, 22 nt, Human
gaauguuugacuaaagguagcu

SEQ ID NO: 172232 - RNA, 22 nt, Human
agcaaucaccaccucuauauuu

SEQ ID NO: 172233 - RNA, 22 nt, Human
ugggacacagaaaaggcagguu

SEQ ID NO: 172234 - RNA, 22 nt, Human
uauucaaaguaccuucauugcc

SEQ ID NO: 172235 - RNA, 19 nt, Human
cuuauuagagugagagcuu

SEQ ID NO: 172236 - RNA, 22 nt, Human
aauuaugauuggucuaaaccag

SEQ ID NO: 172237 - RNA, 22 nt, Human
gcauucuuuuuaggagguuccu

SEQ ID NO: 172238 - RNA, 22 nt, Human
auugcuggcugccaucuugccc

SEQ ID NO: 172239 - RNA, 22 nt, Human
uuguuauaaagacuaaauaugu

SEQ ID NO: 172240 - RNA, 22 nt, Human
gccugcagccucagagaauuuu

SEQ ID NO: 172241 - RNA, 22 nt, Human
gacaggugcuaagggaccuggc

SEQ ID NO: 172242 - RNA, 22 nt, Human
uguccuuauauuguggaagggg

SEQ ID NO: 172243 - RNA, 22 nt, Human
aggagaggcucuaacucugugu

SEQ ID NO: 172244 - RNA, 22 nt, Human
ucaggcaggaagggaggacuug

SEQ ID NO: 172245 - RNA, 22 nt, Human
ccagaucuaguguuguaaagcu

SEQ ID NO: 172246 - RNA, 22 nt, Human
gcagcuuugucacggagugucg

SEQ ID NO: 172247 - RNA, 21 nt, Human
uucugggaaaugagcuggggc

SEQ ID NO: 172248 - RNA, 22 nt, Human
gagcuuuagcugagaccugcuu

SEQ ID NO: 172249 - RNA, 20 nt, Human
cuggguggcaagcaaggggg

SEQ ID NO: 172250 - RNA, 22 nt, Human
gucccaggugggcuccaccucu

SEQ ID NO: 172251 - RNA, 22 nt, Human
ucagacagggagucagaaaaua

SEQ ID NO: 172252 - RNA, 22 nt, Human
aucuguaaaugcaaauguagcu

SEQ ID NO: 172253 - RNA, 22 nt, Human
aggcaaagcgauaccagagcua

SEQ ID NO: 172254 - RNA, 22 nt, Human
ccugccuucuaaagcgcccgcc

SEQ ID NO: 172255 - RNA, 22 nt, Human
ccugggugucaugggcagcugg

SEQ ID NO: 172256 - RNA, 17 nt, Human
cuuuuaauuuacuuccc

SEQ ID NO: 172257 - RNA, 22 nt, Human
gacaugugucugcaaguugauc

SEQ ID NO: 172258 - RNA, 22 nt, Human
ccagggcagcagaauuggggca

SEQ ID NO: 172259 - RNA, 22 nt, Human
aagggcaggugggcauuucugg

SEQ ID NO: 172260 - RNA, 19 nt, Human
auuucaagagguuuauugg

SEQ ID NO: 172261 - RNA, 22 nt, Human
uagggcaguuucauguuaucuu

SEQ ID NO: 172262 - RNA, 22 nt, Human
uuccaugagcucugaguucaca

SEQ ID NO: 172263 - RNA, 22 nt, Human
uggucugguuauuucuuaauga

SEQ ID NO: 172264 - RNA, 22 nt, Human
guuccaaagcaaaggaggugag

SEQ ID NO: 172265 - RNA, 22 nt, Human
caaaucuauauguugauauucu

SEQ ID NO: 172266 - RNA, 22 nt, Human
aaacauuugcaacucgguuugg

SEQ ID NO: 172267 - RNA, 22 nt, Human
uuuccaaaggaggaaccaguuu

SEQ ID NO: 172268 - RNA, 22 nt, Human
uggaauguuuuccuaaaucaga

SEQ ID NO: 172269 - RNA, 22 nt, Human
ccagagaggcaaaacuccuucc

SEQ ID NO: 172270 - RNA, 22 nt, Human
ugguuaaguccagaaaggaagc

SEQ ID NO: 172271 - RNA, 22 nt, Human
aguuugaaaguauugacagaag

SEQ ID NO: 172272 - RNA, 22 nt, Human
gaagcuucguggcucuucaaau

SEQ ID NO: 172273 - RNA, 22 nt, Human
auuucuguaacuuaugaaaguu

SEQ ID NO: 172274 - RNA, 18 nt, Human
auggucucauacugggag

SEQ ID NO: 172275 - RNA, 22 nt, Human
cuuucacacacauacauuugga

SEQ ID NO: 172276 - RNA, 22 nt, Human
ccuggagggcgccgcacagucc

SEQ ID NO: 172277 - RNA, 22 nt, Human
cccaggacucuucacugcagcc

SEQ ID NO: 172278 - RNA, 22 nt, Human
ugggcuccguugccuggggcag

SEQ ID NO: 172279 - RNA, 22 nt, Human
acuuccuuguacugacuccauu

SEQ ID NO: 172280 - RNA, 22 nt, Human
ggcaggcagaaaaauagaauau

SEQ ID NO: 172281 - RNA, 22 nt, Human
uuacagaaguauugagagaucc

SEQ ID NO: 172282 - RNA, 22 nt, Human
augcacaagcaagagauaaugg

SEQ ID NO: 172283 - RNA, 22 nt, Human
aaaagccaugcauaccuaagag

SEQ ID NO: 172284 - RNA, 22 nt, Human
ucuggaugaaagggcuauauau

SEQ ID NO: 172285 - RNA, 22 nt, Human
aaauaucauuuauaacuuuuaa

SEQ ID NO: 172286 - RNA, 22 nt, Human
aacaguaacgagauguccuaac

SEQ ID NO: 172287 - RNA, 22 nt, Human
cucuggaauggguguuucuaac

SEQ ID NO: 172288 - RNA, 22 nt, Human
auccaugaagguacuucucagg

SEQ ID NO: 172289 - RNA, 22 nt, Human
augaaacagugaauuagucaag

SEQ ID NO: 172290 - RNA, 22 nt, Human
ucagggcacguuucugcaaugc

SEQ ID NO: 172291 - RNA, 22 nt, Human
gcauaauauacaugcuugaucc

SEQ ID NO: 172292 - RNA, 22 nt, Human
ggggcucaguucggacagccug

SEQ ID NO: 172293 - RNA, 22 nt, Human
aaaagucuacaagcuucaacaa

SEQ ID NO: 172294 - RNA, 22 nt, Human
ugcuuauugcuuucaagacugu

SEQ ID NO: 172295 - RNA, 22 nt, Human
aagugauuucugccugcauguu

SEQ ID NO: 172296 - RNA, 22 nt, Human
aggaccuguguuuuccuugaau

SEQ ID NO: 172297 - RNA, 22 nt, Human
uucacaaaacacuauuuucugg

SEQ ID NO: 172298 - RNA, 22 nt, Human
auuugcuuuaagguauaaaagg

SEQ ID NO: 172299 - RNA, 22 nt, Human
uggcaggugcacuuuugguuuc

SEQ ID NO: 172300 - RNA, 22 nt, Human
uggcaaagacugcaaggacuuu

SEQ ID NO: 172301 - RNA, 22 nt, Human
uguuaauauacuaaaauccacu

SEQ ID NO: 172302 - RNA, 22 nt, Human
acuugguucuaacuaguguaua

SEQ ID NO: 172303 - RNA, 22 nt, Human
uuucacauuagauaugucauuu

SEQ ID NO: 172304 - RNA, 22 nt, Human
aaauacaaaaauuagccaggca

SEQ ID NO: 172305 - RNA, 21 nt, Human
caguguggugaccagggucuc

SEQ ID NO: 172306 - RNA, 22 nt, Human
cauagaaaucaggugagaaucu

SEQ ID NO: 172307 - RNA, 22 nt, Human
cacagguguaugaauaugucca

SEQ ID NO: 172308 - RNA, 22 nt, Human
guacauuuacugaugaaaagua

SEQ ID NO: 172309 - RNA, 22 nt, Human
auugggaugccggcugauaaga

SEQ ID NO: 172310 - RNA, 22 nt, Human
gaguccuuuugugccacaggga

SEQ ID NO: 172311 - RNA, 22 nt, Human
gccuggguuccaugaucuccag

SEQ ID NO: 172312 - RNA, 22 nt, Human
cuuauauuuuaggaacagacaa

SEQ ID NO: 172313 - RNA, 22 nt, Human
auggcuuuguuccaauaaaacu

SEQ ID NO: 172314 - RNA, 22 nt, Human
ggagcugaggcugaggccucac

SEQ ID NO: 172315 - RNA, 22 nt, Human
uuauugcucuauuauggccuaa

SEQ ID NO: 172316 - RNA, 22 nt, Human
ucagagaggcaauacuguuuaa

SEQ ID NO: 172317 - RNA, 22 nt, Human
agucucagcaagcauggcuagu

SEQ ID NO: 172318 - RNA, 17 nt, Human
ucuggaugucauggaag

SEQ ID NO: 172319 - RNA, 22 nt, Human
ucagagagcagaacuuuuuuac

SEQ ID NO: 172320 - RNA, 22 nt, Human
uaaagccauacugaaagccacu

SEQ ID NO: 172321 - RNA, 22 nt, Human
caguuucugagcccugucauuu

SEQ ID NO: 172322 - RNA, 22 nt, Human
agggucaacauuucauugauuc

SEQ ID NO: 172323 - RNA, 22 nt, Human
uugcuuuauucacaucuauauu

SEQ ID NO: 172324 - RNA, 22 nt, Human
aucauuucccuuuagaucacaa

SEQ ID NO: 172325 - RNA, 22 nt, Human
guuaggcaguuuucuucauucu

SEQ ID NO: 172326 - RNA, 22 nt, Human
gguggggcugcaagcaguucgg

SEQ ID NO: 172327 - RNA, 19 nt, Human
ugcagggcugcgccugggg

SEQ ID NO: 172328 - RNA, 18 nt, Human
auagaaaccuuuaaucag

SEQ ID NO: 172329 - RNA, 22 nt, Human
uucauguaguguaaugucuuca

SEQ ID NO: 172330 - RNA, 22 nt, Human
cuucacauguuggaguccuuug

SEQ ID NO: 172331 - RNA, 22 nt, Human
aaauuccagaaacucaguauau

SEQ ID NO: 172332 - RNA, 22 nt, Human
gcccaggccggagagcagugcu

SEQ ID NO: 172333 - RNA, 22 nt, Human
uagaauucauguuacuguuagc

SEQ ID NO: 172334 - RNA, 22 nt, Human
ucuucaaguuccaaagugcagg

SEQ ID NO: 172335 - RNA, 22 nt, Human
aguugacauccagagacauucu

SEQ ID NO: 172336 - RNA, 22 nt, Human
uaguuaggaaaguccagggagc

SEQ ID NO: 172337 - RNA, 22 nt, Human
ggagaggggaacuuguugcuug

SEQ ID NO: 172338 - RNA, 22 nt, Human
gacccaggguggucaccugaaa

SEQ ID NO: 172339 - RNA, 22 nt, Human
cuccucagcugggaggaguccc

SEQ ID NO: 172340 - RNA, 22 nt, Human
ucagggcacauucugcaguggc

SEQ ID NO: 172341 - RNA, 22 nt, Human
uuauacuaaaacgcauugaauu

SEQ ID NO: 172342 - RNA, 22 nt, Human
ggcugcaagacaagguugguuu

SEQ ID NO: 172343 - RNA, 22 nt, Human
cccagugugguugugaauucug

SEQ ID NO: 172344 - RNA, 22 nt, Human
ugcuuuaagacacuaaguuuga

SEQ ID NO: 172345 - RNA, 22 nt, Human
aaacuuuguagagaaugcuggc

SEQ ID NO: 172346 - RNA, 22 nt, Human
ugaaggagaauuaauaggcauu

SEQ ID NO: 172347 - RNA, 22 nt, Human
auuucaacauucucaguuguag

SEQ ID NO: 172348 - RNA, 22 nt, Human
cguggggcggguggacacuugc

SEQ ID NO: 172349 - RNA, 22 nt, Human
agacugaauaacaagcaaauaa

SEQ ID NO: 172350 - RNA, 22 nt, Human
gaagcacauggcuauagcuauu

SEQ ID NO: 172351 - RNA, 23 nt, Human
uggaccugaaccagugccucugu

SEQ ID NO: 172352 - RNA, 23 nt, Human
gcaggugguucgaacagaaguuu

SEQ ID NO: 172353 - RNA, 22 nt, Human
aguccuuugcugaacugucaca

SEQ ID NO: 172354 - RNA, 22 nt, Human
uuaaaauagccagugccccucu

SEQ ID NO: 172355 - RNA, 22 nt, Human
uguuugcuauauccuacuucau

SEQ ID NO: 172356 - RNA, 18 nt, Human
uccucucuuuccccaggg

SEQ ID NO: 172357 - RNA, 22 nt, Human
cagagccuuccuagcagacucu

SEQ ID NO: 172358 - RNA, 22 nt, Human
uguuuuaagagcgcacuuuaua

SEQ ID NO: 172359 - RNA, 22 nt, Human
uggaaugaauuuggcuuccucc

SEQ ID NO: 172360 - RNA, 22 nt, Human
ccucccuuuuggugucugcaua

SEQ ID NO: 172361 - RNA, 22 nt, Human
aaauuauuacaagcuaguuggc

SEQ ID NO: 172362 - RNA, 19 nt, Human
agggauauuuaaaaagcuc

SEQ ID NO: 172363 - RNA, 22 nt, Human
ccuuuucuacaagcaaaugugc

SEQ ID NO: 172364 - RNA, 22 nt, Human
uagggcaggggaggaaucugaa

SEQ ID NO: 172365 - RNA, 22 nt, Human
ggacagguucagcaguuuauaa

SEQ ID NO: 172366 - RNA, 18 nt, Human
uggcaggaaaugcacuuu

SEQ ID NO: 172367 - RNA, 22 nt, Human
uuccucagcuguguccuggcga

SEQ ID NO: 172368 - RNA, 22 nt, Human
gggugggguguaucggauccua

SEQ ID NO: 172369 - RNA, 22 nt, Human
uaucagaacacauguuuugcag

SEQ ID NO: 172370 - RNA, 22 nt, Human
aaucagaacuccuaccacagag

SEQ ID NO: 172371 - RNA, 22 nt, Human
aagugguuauuuugaucuagaa

SEQ ID NO: 172372 - RNA, 22 nt, Human
cccugcagccggccagcucauu

SEQ ID NO: 172373 - RNA, 22 nt, Human
cuuugcuuuacucccacugugu

SEQ ID NO: 172374 - RNA, 22 nt, Human
aagugccccaggcuguuaacau

SEQ ID NO: 172375 - RNA, 22 nt, Human
aaaauccuuagccgagugaggu

SEQ ID NO: 172376 - RNA, 22 nt, Human
ggguggggcccaggaaaucuau

SEQ ID NO: 172377 - RNA, 22 nt, Human
caguccuugcucaaagucuaca

SEQ ID NO: 172378 - RNA, 22 nt, Human
ucagggcaagauugguuaauaa

SEQ ID NO: 172379 - RNA, 22 nt, Human
uucuuauagaagcaaccauugu

SEQ ID NO: 172380 - RNA, 22 nt, Human
ucugggaaguccucugucaugc

SEQ ID NO: 172381 - RNA, 22 nt, Human
gccaaaucacagggccaaaagc

SEQ ID NO: 172382 - RNA, 22 nt, Human
ucuuucuucuuucauaguguga

SEQ ID NO: 172383 - RNA, 22 nt, Human
ccuccuucuggggccuucugcu

SEQ ID NO: 172384 - RNA, 23 nt, Human
uuuggacuugugacucuucuccu

SEQ ID NO: 172385 - RNA, 22 nt, Human
uagcagaaacuguuacagaagg

SEQ ID NO: 172386 - RNA, 22 nt, Human
cccaggcauuuucaacuuuagu

SEQ ID NO: 172387 - RNA, 22 nt, Human
uucaugugaauauauuugucuu

SEQ ID NO: 172388 - RNA, 22 nt, Human
aggauuuagcaugaaaugugaa

SEQ ID NO: 172389 - RNA, 22 nt, Human
cagggcucagggacugcagaaa

SEQ ID NO: 172390 - RNA, 22 nt, Human
guuccuuccuaucccgagagcc

SEQ ID NO: 172391 - RNA, 22 nt, Human
aaugugucauuucccacaggug

SEQ ID NO: 172392 - RNA, 19 nt, Human
ugguggaggugcaccugac

SEQ ID NO: 172393 - RNA, 22 nt, Human
auuugaaguaaguaaugaguau

SEQ ID NO: 172394 - RNA, 22 nt, Human
guccagagauggacgagcagau

SEQ ID NO: 172395 - RNA, 22 nt, Human
uuugcuuugacugucagcaagu

SEQ ID NO: 172396 - RNA, 20 nt, Human
ugaucaugugaaagucaugu

SEQ ID NO: 172397 - RNA, 19 nt, Human
ugggcagguucaguaaugg

SEQ ID NO: 172398 - RNA, 22 nt, Human
aaucaguguggugacuugucug

SEQ ID NO: 172399 - RNA, 21 nt, Human
cucugcccagggccuccugcc

SEQ ID NO: 172400 - RNA, 22 nt, Human
gcugggcucauuugugugucug

SEQ ID NO: 172401 - RNA, 22 nt, Human
ugucauaacuuagugacaaauc

SEQ ID NO: 172402 - RNA, 22 nt, Human
gccucuagggcuguugggaauu

SEQ ID NO: 172403 - RNA, 22 nt, Human
gcacccagaggucagcagugcu

SEQ ID NO: 172404 - RNA, 22 nt, Human
gagguggucgaggagggguacc

SEQ ID NO: 172405 - RNA, 22 nt, Human
agagagcauggcacagaggggu

SEQ ID NO: 172406 - RNA, 22 nt, Human
uuauuaggaaaaggucagaugu

SEQ ID NO: 172407 - RNA, 22 nt, Human
ggcaggcaggagcucugucucc

SEQ ID NO: 172408 - RNA, 22 nt, Human
acagggcagugucuugaaaaau

SEQ ID NO: 172409 - RNA, 22 nt, Human
uucucuuaucuggcauuauugg

SEQ ID NO: 172410 - RNA, 22 nt, Human
cuacccagcaccuaggcugccu

SEQ ID NO: 172411 - RNA, 23 nt, Human
acagaaaucauuuguaagguacc

SEQ ID NO: 172412 - RNA, 22 nt, Human
cagacaggaaguucagaagaaa

SEQ ID NO: 172413 - RNA, 22 nt, Human
aggcagggcucauuucuuaggc

SEQ ID NO: 172414 - RNA, 22 nt, Human
agcucccagaaggcccugcgcc

SEQ ID NO: 172415 - RNA, 22 nt, Human
gcaacuuuagaaaaaucuauaa

SEQ ID NO: 172416 - RNA, 22 nt, Human
auaugcauuuaccuggcauaua

SEQ ID NO: 172417 - RNA, 22 nt, Human
aaagucuuuauuuuguaucuuu

SEQ ID NO: 172418 - RNA, 22 nt, Human
agggcccuaaggaaggcacaca

SEQ ID NO: 172419 - RNA, 21 nt, Human
acuuuaauauacaugaggagg

SEQ ID NO: 172420 - RNA, 22 nt, Human
auaaagauuucuuuuucucuac

SEQ ID NO: 172421 - RNA, 22 nt, Human
uucaguaaaacacugcaauguc

SEQ ID NO: 172422 - RNA, 22 nt, Human
uauuccaaaaucccaaacugcc

SEQ ID NO: 172423 - RNA, 22 nt, Human
uccaggcaaagggacuagcagg

SEQ ID NO: 172424 - RNA, 21 nt, Human
accucaagcaacaaccaaggu

SEQ ID NO: 172425 - RNA, 22 nt, Human
uauugcugaggauugaggcuug

SEQ ID NO: 172426 - RNA, 22 nt, Human
ucuuccucuucugcugagaagu

SEQ ID NO: 172427 - RNA, 20 nt, Human
ggcagggcaucaacagcucu

SEQ ID NO: 172428 - RNA, 22 nt, Human
ccaggcagggcucaaggaaccu

SEQ ID NO: 172429 - RNA, 22 nt, Human
cauucauuagaauagauaugua

SEQ ID NO: 172430 - RNA, 22 nt, Human
gcugccacauuuucaggacuaa

SEQ ID NO: 172431 - RNA, 22 nt, Human
uggaccugaagaauaggaagua

SEQ ID NO: 172432 - RNA, 22 nt, Human
gagacaggccaggugguacuua

SEQ ID NO: 172433 - RNA, 22 nt, Human
caugcagcggcguuugguuuaa

SEQ ID NO: 172434 - RNA, 22 nt, Human
augggugugaaaauggucaucu

SEQ ID NO: 172435 - RNA, 22 nt, Human
gucuucaauagagccucaauuu

SEQ ID NO: 172436 - RNA, 22 nt, Human
uccaggcaugucccaagccgga

SEQ ID NO: 172437 - RNA, 22 nt, Human
ucuguucaugaaauaucuuuuu

SEQ ID NO: 172438 - RNA, 22 nt, Human
aaaaaguauuggccaugguuga

SEQ ID NO: 172439 - RNA, 19 nt, Human
auggaaaaugccagacuga

SEQ ID NO: 172440 - RNA, 22 nt, Human
aguuuacacuuuugauucuuau

SEQ ID NO: 172441 - RNA, 17 nt, Human
ccagagaguaguuagga

SEQ ID NO: 172442 - RNA, 22 nt, Human
ugaaauagacacagugcuauac

SEQ ID NO: 172443 - RNA, 22 nt, Human
uugcugggucagaagccaggag

SEQ ID NO: 172444 - RNA, 22 nt, Human
ucuggcucccagccugcucuca

SEQ ID NO: 172445 - RNA, 22 nt, Human
uugcuggggugugaaaucugau

SEQ ID NO: 172446 - RNA, 22 nt, Human
guuaggcagcccaagaugucag

SEQ ID NO: 172447 - RNA, 22 nt, Human
ugacauguauguuguuggcaug

SEQ ID NO: 172448 - RNA, 23 nt, Human
cagaccuuucuguaucaguuauc

SEQ ID NO: 172449 - RNA, 22 nt, Human
uagggcagcugcaucaggcacu

SEQ ID NO: 172450 - RNA, 22 nt, Human
auucaaauuaaguuaauucagc

SEQ ID NO: 172451 - RNA, 22 nt, Human
gcucagcacuuucuccaaccac

SEQ ID NO: 172452 - RNA, 20 nt, Human
uauuggaucuaagaaauggg

SEQ ID NO: 172453 - RNA, 22 nt, Human
gucuucuuuaaccuacuaaagc

SEQ ID NO: 172454 - RNA, 22 nt, Human
uuuuaugugcuggacuggcagu

SEQ ID NO: 172455 - RNA, 22 nt, Human
gcagggcagaaggugcugagga

SEQ ID NO: 172456 - RNA, 22 nt, Human
cugcgugucucugucucauggc

SEQ ID NO: 172457 - RNA, 22 nt, Human
auuaguaaaacauuguauaugu

SEQ ID NO: 172458 - RNA, 22 nt, Human
agcaugaaaggcgugccaacuu

SEQ ID NO: 172459 - RNA, 21 nt, Human
auucagaguaauucaucuuua

SEQ ID NO: 172460 - RNA, 22 nt, Human
uguuuuccuccugguuucugcc

SEQ ID NO: 172461 - RNA, 22 nt, Human
gauuguaaaacagaucauuauc

SEQ ID NO: 172462 - RNA, 22 nt, Human
caaugaaaauuuaaguugcagc

SEQ ID NO: 172463 - RNA, 22 nt, Human
cuacagaaucuaccucaagcca

SEQ ID NO: 172464 - RNA, 23 nt, Human
ucuguacaauugagaagagaaca

SEQ ID NO: 172465 - RNA, 19 nt, Human
ucaaaacacaaaugguuga

SEQ ID NO: 172466 - RNA, 22 nt, Human
uaaguccuggcugguuugaagc

SEQ ID NO: 172467 - RNA, 22 nt, Human
aaucagaaaauucaguggaauu

SEQ ID NO: 172468 - RNA, 22 nt, Human
uggaaugucauaccauaaaaga

SEQ ID NO: 172469 - RNA, 22 nt, Human
auucagugugagguuuucaagu

SEQ ID NO: 172470 - RNA, 22 nt, Human
agaauucauaggaaguuuccua

SEQ ID NO: 172471 - RNA, 22 nt, Human
cuaaagaagcuagcaaucuaua

SEQ ID NO: 172472 - RNA, 22 nt, Human
agcuuuauauaaaagaguacau

SEQ ID NO: 172473 - RNA, 22 nt, Human
uugcuucaguagcucuuuaaag

SEQ ID NO: 172474 - RNA, 22 nt, Human
acccagcuaacccuacccugga

SEQ ID NO: 172475 - RNA, 22 nt, Human
auuaaagaaacccagcauguga

SEQ ID NO: 172476 - RNA, 21 nt, Human
agaagggauugugguaaagau

SEQ ID NO: 172477 - RNA, 22 nt, Human
uuguguccuaagcaccagaugg

SEQ ID NO: 172478 - RNA, 22 nt, Human
ucugaagaacugaguaaacaug

SEQ ID NO: 172479 - RNA, 22 nt, Human
uuuauugacuucagugagucuu

SEQ ID NO: 172480 - RNA, 22 nt, Human
gaaauauacauugcaggaagag

SEQ ID NO: 172481 - RNA, 22 nt, Human
guagaaauagugguugacagga

SEQ ID NO: 172482 - RNA, 22 nt, Human
uucagagacagcaaccaggaca

SEQ ID NO: 172483 - RNA, 22 nt, Human
cauuugaaauaguucauucuug

SEQ ID NO: 172484 - RNA, 22 nt, Human
ccauggcucuuaccuuguuaua

SEQ ID NO: 172485 - RNA, 22 nt, Human
guuaaauucgaugauggauaaa

SEQ ID NO: 172486 - RNA, 22 nt, Human
ucuuuccuagaggcugaugagu

SEQ ID NO: 172487 - RNA, 22 nt, Human
auuccaaagacagaagcagcug

SEQ ID NO: 172488 - RNA, 22 nt, Human
auuauaaaccuuugaggguggg

SEQ ID NO: 172489 - RNA, 22 nt, Human
auugcugggaauauuuagccca

SEQ ID NO: 172490 - RNA, 22 nt, Human
acaggcagguccugucccagcu

SEQ ID NO: 172491 - RNA, 22 nt, Human
uucuucaugcuguugcugcuug

SEQ ID NO: 172492 - RNA, 22 nt, Human
auuauccagcaccaaugucaga

SEQ ID NO: 172493 - RNA, 22 nt, Human
agagggcugcugcacagugcuc

SEQ ID NO: 172494 - RNA, 22 nt, Human
cagaaaauaaaguuucuacgca

SEQ ID NO: 172495 - RNA, 22 nt, Human
ucccaggccauaaaacucagag

SEQ ID NO: 172496 - RNA, 19 nt, Human
aguguccuagucauuugcc

SEQ ID NO: 172497 - RNA, 22 nt, Human
ggucccagcugcucaagaggcu

SEQ ID NO: 172498 - RNA, 19 nt, Human
gaaguccucuaguaaauuu

SEQ ID NO: 172499 - RNA, 22 nt, Human
auuuauugagccuuuccuaugu

SEQ ID NO: 172500 - RNA, 22 nt, Human
uuuaugagcaaugcugagggga

SEQ ID NO: 172501 - RNA, 22 nt, Human
caaaagucuuccuauucucuua

SEQ ID NO: 172502 - RNA, 22 nt, Human
gguggggcccaggcaucugaug

SEQ ID NO: 172503 - RNA, 21 nt, Human
uuucucaguugugugagcagc

SEQ ID NO: 172504 - RNA, 22 nt, Human
uucagagaagcaaaggcagauu

SEQ ID NO: 172505 - RNA, 22 nt, Human
agugugaguaauugagucuguc

SEQ ID NO: 172506 - RNA, 22 nt, Human
caauuucauuaauagauauaga

SEQ ID NO: 172507 - RNA, 22 nt, Human
agcagggcuucugugccugugc

SEQ ID NO: 172508 - RNA, 22 nt, Human
uuauuggaaaagggcuguaauu

SEQ ID NO: 172509 - RNA, 22 nt, Human
aggauuuaaauccuuaaccacu

SEQ ID NO: 172510 - RNA, 22 nt, Human
cauuuacauaacaguaacgcug

SEQ ID NO: 172511 - RNA, 22 nt, Human
agagugaaguuuuugaaaguga

SEQ ID NO: 172512 - RNA, 22 nt, Human
aguccagugucaaggugccauu

SEQ ID NO: 172513 - RNA, 22 nt, Human
uuauugagcaccuacuaugugu

SEQ ID NO: 172514 - RNA, 22 nt, Human
agaagcacaccugaccucuagc

SEQ ID NO: 172515 - RNA, 22 nt, Human
cggcaggguugguuuucucuga

SEQ ID NO: 172516 - RNA, 22 nt, Human
agcaggagcugugggaagaugg

SEQ ID NO: 172517 - RNA, 22 nt, Human
ucugggaacucugucauuuccc

SEQ ID NO: 172518 - RNA, 22 nt, Human
auuuauugagagggaggggaau

SEQ ID NO: 172519 - RNA, 22 nt, Human
ugaaacacugcgauaaaauccu

SEQ ID NO: 172520 - RNA, 22 nt, Human
uacauguggagauaacugaagc

SEQ ID NO: 172521 - RNA, 22 nt, Human
acaggugggcuuaagagucggc

SEQ ID NO: 172522 - RNA, 18 nt, Human
aaguccuuccuuugcuuu

SEQ ID NO: 172523 - RNA, 22 nt, Human
agcagggcuuugucucugugaa

SEQ ID NO: 172524 - RNA, 22 nt, Human
aucugaagggaaguggaaggca

SEQ ID NO: 172525 - RNA, 23 nt, Human
gggcuccagucucugcucaguug

SEQ ID NO: 172526 - RNA, 22 nt, Human
caauuucacuaauaauauuuac

SEQ ID NO: 172527 - RNA, 22 nt, Human
auagacauagccguaauuuauu

SEQ ID NO: 172528 - RNA, 22 nt, Human
aaagcugcuuugguuucuggaa

SEQ ID NO: 172529 - RNA, 22 nt, Human
uguuccaauaaggaguugaaau

SEQ ID NO: 172530 - RNA, 22 nt, Human
agagucagcuuaugacacaguc

SEQ ID NO: 172531 - RNA, 23 nt, Human
gggaccugguaggaggugauugg

SEQ ID NO: 172532 - RNA, 22 nt, Human
uggcagggccugaaucuuauac

SEQ ID NO: 172533 - RNA, 22 nt, Human
agaguacugccucaguuaugaa

SEQ ID NO: 172534 - RNA, 22 nt, Human
auauauaaccuggauaaggcuu

SEQ ID NO: 172535 - RNA, 22 nt, Human
ugacauguuagggaaaugugau

SEQ ID NO: 172536 - RNA, 22 nt, Human
uaagaaacccaggaauuucuua

SEQ ID NO: 172537 - RNA, 22 nt, Human
uuaggaaaaucaugagagauga

SEQ ID NO: 172538 - RNA, 22 nt, Human
aaaauaacuucuacuauuugca

SEQ ID NO: 172539 - RNA, 18 nt, Human
auauguuaauuagguagg

SEQ ID NO: 172540 - RNA, 18 nt, Human
guguccuggcugcggcgc

SEQ ID NO: 172541 - RNA, 22 nt, Human
agaucugaggguccaagggagg

SEQ ID NO: 172542 - RNA, 22 nt, Human
ugcauacacaagcauacaugua

SEQ ID NO: 172543 - RNA, 22 nt, Human
ucagaauugcagggagggcagg

SEQ ID NO: 172544 - RNA, 21 nt, Human
aaaugaaugugguagugcaag

SEQ ID NO: 172545 - RNA, 22 nt, Human
cucuucuuggcccccaugaggg

SEQ ID NO: 172546 - RNA, 22 nt, Human
gacaggcugugauggccgggag

SEQ ID NO: 172547 - RNA, 22 nt, Human
uuuccuucucagggagcuucaa

SEQ ID NO: 172548 - RNA, 22 nt, Human
caacuuuaauuugggugucaga

SEQ ID NO: 172549 - RNA, 22 nt, Human
agccagaguugaaugugagucu

SEQ ID NO: 172550 - RNA, 22 nt, Human
acuuugaaucucagauaaccaa

SEQ ID NO: 172551 - RNA, 22 nt, Human
aaaguucaugguguuauagaaa

SEQ ID NO: 172552 - RNA, 22 nt, Human
acagguggggaggcugagguuc

SEQ ID NO: 172553 - RNA, 22 nt, Human
gauuucaaguaucuugggcgag

SEQ ID NO: 172554 - RNA, 22 nt, Human
guguguccucuuaacuauuaug

SEQ ID NO: 172555 - RNA, 22 nt, Human
aaucaaaaccuacagagguaau

SEQ ID NO: 172556 - RNA, 22 nt, Human
aacuuucuuggaugucucaaca

SEQ ID NO: 172557 - RNA, 22 nt, Human
acauuuaaugauccuacuguga

SEQ ID NO: 172558 - RNA, 22 nt, Human
aagaaugauuacaaagcaacga

SEQ ID NO: 172559 - RNA, 22 nt, Human
acaggccuuggcaggcauguga

SEQ ID NO: 172560 - RNA, 22 nt, Human
uuauuguagcacuuuggcagug

SEQ ID NO: 172561 - RNA, 22 nt, Human
uuauuguaggccuauuguagaa

SEQ ID NO: 172562 - RNA, 22 nt, Human
cauguuaauaugcauugaguac

SEQ ID NO: 172563 - RNA, 22 nt, Human
ccaggugugcucugcaguggau

SEQ ID NO: 172564 - RNA, 22 nt, Human
cucuucuugccugaugaggcag

SEQ ID NO: 172565 - RNA, 22 nt, Human
cagguggcuuauuagggucagu

SEQ ID NO: 172566 - RNA, 22 nt, Human
acaugcuuuaacuuauuuugau

SEQ ID NO: 172567 - RNA, 22 nt, Human
aaguccuuguauacagaaucaa

SEQ ID NO: 172568 - RNA, 22 nt, Human
aaucauaauuguauacauucau

SEQ ID NO: 172569 - RNA, 22 nt, Human
ucauaaaaauagacucuaaagu

SEQ ID NO: 172570 - RNA, 22 nt, Human
aagcugcaaggaagugugccag

SEQ ID NO: 172571 - RNA, 22 nt, Human
ugcuuuauaacuuaguuuaugg

SEQ ID NO: 172572 - RNA, 22 nt, Human
cuuaaaaucuggcaguuagcua

SEQ ID NO: 172573 - RNA, 22 nt, Human
ucccaggcuaggccucugcguu

SEQ ID NO: 172574 - RNA, 22 nt, Human
acuugccuguuacauuucuagu

SEQ ID NO: 172575 - RNA, 22 nt, Human
aguaaaauuguauuggaaaaca

SEQ ID NO: 172576 - RNA, 22 nt, Human
uaccugcagcgggaauccauua

SEQ ID NO: 172577 - RNA, 21 nt, Human
cuacagaaucgagcauucugg

SEQ ID NO: 172578 - RNA, 22 nt, Human
gaauuucacaaggugaggauaa

SEQ ID NO: 172579 - RNA, 22 nt, Human
uuauuauugugguugcauuauc

SEQ ID NO: 172580 - RNA, 22 nt, Human
cuggaggccacuguacagauug

SEQ ID NO: 172581 - RNA, 22 nt, Human
uaggugucugcucuuauuuaac

SEQ ID NO: 172582 - RNA, 22 nt, Human
uccuggcugaguucccaagucg

SEQ ID NO: 172583 - RNA, 22 nt, Human
uuuaggcaugcaguucuauuua

SEQ ID NO: 172584 - RNA, 22 nt, Human
gcagcuuugaagacuuauuugc

SEQ ID NO: 172585 - RNA, 22 nt, Human
cugggucccaauagcuuuuguu

SEQ ID NO: 172586 - RNA, 22 nt, Human
cuccaguggcaaguccgggcgg

SEQ ID NO: 172587 - RNA, 22 nt, Human
aggcuuuaauuaucuacaggag

SEQ ID NO: 172588 - RNA, 22 nt, Human
aucuuucaaucaggaaaaaucu

SEQ ID NO: 172589 - RNA, 22 nt, Human
ggaagagaauuucucucuuuuu

SEQ ID NO: 172590 - RNA, 22 nt, Human
ugguggcagcugagugucaggu

SEQ ID NO: 172591 - RNA, 22 nt, Human
cccaggcaguagaaagaagagg

SEQ ID NO: 172592 - RNA, 22 nt, Human
ccugcucccgggacgcguucac

SEQ ID NO: 172593 - RNA, 22 nt, Human
uuccaggagacuuccagaaaua

SEQ ID NO: 172594 - RNA, 22 nt, Human
acucacuuuccauucaagcacc

SEQ ID NO: 172595 - RNA, 22 nt, Human
cuauugcuaucauucugguggu

SEQ ID NO: 172596 - RNA, 22 nt, Human
gauucuuacuucuaagcaagcu

SEQ ID NO: 172597 - RNA, 22 nt, Human
auguccuuccugagaucccugu

SEQ ID NO: 172598 - RNA, 22 nt, Human
cuggaugugguaaugacuuuga

SEQ ID NO: 172599 - RNA, 22 nt, Human
augaacaaguauuugcaugagc

SEQ ID NO: 172600 - RNA, 22 nt, Human
aggcagguuacaaaaacuuuau

SEQ ID NO: 172601 - RNA, 22 nt, Human
ggcaggugcccagagagcacga

SEQ ID NO: 172602 - RNA, 22 nt, Human
uccaggcauuccagccauucca

SEQ ID NO: 172603 - RNA, 19 nt, Human
agcaaauacaucaaaauug

SEQ ID NO: 172604 - RNA, 22 nt, Human
acaguuaucuuugaaauagaga

SEQ ID NO: 172605 - RNA, 23 nt, Human
cagaaaucugaaaucuagaaaug

SEQ ID NO: 172606 - RNA, 22 nt, Human
acuuuguucuaauaguaucucu

SEQ ID NO: 172607 - RNA, 22 nt, Human
uuuugcugggguggcuagcuua

SEQ ID NO: 172608 - RNA, 22 nt, Human
uauacuuuccugcaacuuugau

SEQ ID NO: 172609 - RNA, 22 nt, Human
ccauguguugauucucugcaga

SEQ ID NO: 172610 - RNA, 22 nt, Human
ggagcugagacccaguggcuga

SEQ ID NO: 172611 - RNA, 22 nt, Human
uggcaggugccuguaaucucag

SEQ ID NO: 172612 - RNA, 22 nt, Human
uccaggcauaaugcccaguggu

SEQ ID NO: 172613 - RNA, 22 nt, Human
aacacuuucuauuauuaugguu

SEQ ID NO: 172614 - RNA, 22 nt, Human
uaaaggcuucugcagggacuga

SEQ ID NO: 172615 - RNA, 22 nt, Human
caggugguugagagcuguaggc

SEQ ID NO: 172616 - RNA, 22 nt, Human
uguccuagaguacauuccacug

SEQ ID NO: 172617 - RNA, 22 nt, Human
uguaaauaauuccuaggcuuuu

SEQ ID NO: 172618 - RNA, 22 nt, Human
augaaaacggaccagagcuauu

SEQ ID NO: 172619 - RNA, 22 nt, Human
aaugugucagcuugucgaucuu

SEQ ID NO: 172620 - RNA, 22 nt, Human
cuggaaauuggagaugauguuu

SEQ ID NO: 172621 - RNA, 19 nt, Human
ugcucuggagccagcucuc

SEQ ID NO: 172622 - RNA, 22 nt, Human
cagaaacauguauaaaguugua

SEQ ID NO: 172623 - RNA, 22 nt, Human
uauaauuuuaagugguaaauua

SEQ ID NO: 172624 - RNA, 22 nt, Human
aauacauauggaauuccauguu

SEQ ID NO: 172625 - RNA, 20 nt, Human
uccugcagucgcuagcgccc

SEQ ID NO: 172626 - RNA, 22 nt, Human
uucaacuagauuuauacaauuc

SEQ ID NO: 172627 - RNA, 22 nt, Human
gaugguccuccugcugccucuc

SEQ ID NO: 172628 - RNA, 22 nt, Human
uguguccuuuggaggaucagcg

SEQ ID NO: 172629 - RNA, 22 nt, Human
ucagcuuuggucacauugaguu

SEQ ID NO: 172630 - RNA, 22 nt, Human
acaguuugcccugacauucucc

SEQ ID NO: 172631 - RNA, 19 nt, Human
ucuucccuggcugucaguc

SEQ ID NO: 172632 - RNA, 22 nt, Human
aaauuucaagcaaaguagcuau

SEQ ID NO: 172633 - RNA, 22 nt, Human
acccagcaaagauaaacuuaug

SEQ ID NO: 172634 - RNA, 22 nt, Human
uguugcugacaagagaggagca

SEQ ID NO: 172635 - RNA, 22 nt, Human
uccaggaggccucauuuccugu

SEQ ID NO: 172636 - RNA, 22 nt, Human
uuugacucuuaaguggcucaau

SEQ ID NO: 172637 - RNA, 22 nt, Human
aggcaguguauugcuagcggcu

SEQ ID NO: 172638 - RNA, 22 nt, Human
gggcugacaccacccaggcgca

SEQ ID NO: 172639 - RNA, 22 nt, Human
uggaaauggaucugaugagucu

SEQ ID NO: 172640 - RNA, 22 nt, Human
uuaaaaucuaaagcaguugucu

SEQ ID NO: 172641 - RNA, 22 nt, Human
cucuggaauuaaggaagccugu

SEQ ID NO: 172642 - RNA, 22 nt, Human
uaaauuauguuccauguccuuu

SEQ ID NO: 172643 - RNA, 22 nt, Human
guuaauuugcagcuuucgagcu

SEQ ID NO: 172644 - RNA, 22 nt, Human
ucugggaaaugcuguuccuugu

SEQ ID NO: 172645 - RNA, 22 nt, Human
gugggguagaucuuucucagga

SEQ ID NO: 172646 - RNA, 22 nt, Human
uuuuauugguaaugauaaaagu

SEQ ID NO: 172647 - RNA, 22 nt, Human
uugcagcuucuaccacuguuuc

SEQ ID NO: 172648 - RNA, 22 nt, Human
ucugcgcccugucgccugcucc

SEQ ID NO: 172649 - RNA, 22 nt, Human
uuuauuggauggauggauggau

SEQ ID NO: 172650 - RNA, 22 nt, Human
acagaauuaucaggaaauguua

SEQ ID NO: 172651 - RNA, 20 nt, Human
gcuguucacauuauuaguag

SEQ ID NO: 172652 - RNA, 22 nt, Human
uuauuguuagugagacuguaga

SEQ ID NO: 172653 - RNA, 22 nt, Human
uguccugggccggcgacugguc

SEQ ID NO: 172654 - RNA, 22 nt, Human
ugcugggugguugcuccucccg

SEQ ID NO: 172655 - RNA, 22 nt, Human
caauauauaaugaguacuuucc

SEQ ID NO: 172656 - RNA, 22 nt, Human
uccugaggcacaauccuagaau

SEQ ID NO: 172657 - RNA, 22 nt, Human
acaaaauuguguuaaacuuuau

SEQ ID NO: 172658 - RNA, 22 nt, Human
acuuucaugguaguuguauucu

SEQ ID NO: 172659 - RNA, 22 nt, Human
cuggguggagccuggucaucug

SEQ ID NO: 172660 - RNA, 22 nt, Human
cucuggaagaauacacuuagaa

SEQ ID NO: 172661 - RNA, 22 nt, Human
guuuaagaaaauucauguuguu

SEQ ID NO: 172662 - RNA, 22 nt, Human
uucugggugccaccuaagacau

SEQ ID NO: 172663 - RNA, 22 nt, Human
uuccugaaugcuguugugcugu

SEQ ID NO: 172664 - RNA, 22 nt, Human
gcacuuuaaauguucacggaaa

SEQ ID NO: 172665 - RNA, 22 nt, Human
uguguuauugccacugaagacc

SEQ ID NO: 172666 - RNA, 22 nt, Human
auggcauuugaccgcuuugugg

SEQ ID NO: 172667 - RNA, 22 nt, Human
ucagcuuuuuggauugcccaag

SEQ ID NO: 172668 - RNA, 22 nt, Human
uaggugguuauaaauucaaggc

SEQ ID NO: 172669 - RNA, 22 nt, Human
auuaagugacuaaaguaaugcu

SEQ ID NO: 172670 - RNA, 22 nt, Human
guguccucuuauugcucuuggc

SEQ ID NO: 172671 - RNA, 22 nt, Human
uuuaucuuuaggacuuugcaga

SEQ ID NO: 172672 - RNA, 22 nt, Human
cauugaaaaacguugacugagu

SEQ ID NO: 172673 - RNA, 22 nt, Human
auauacaguuuuacaggguuuc

SEQ ID NO: 172674 - RNA, 22 nt, Human
gggcaggugcccagggccagag

SEQ ID NO: 172675 - RNA, 22 nt, Human
uuugacucaagcccucauguua

SEQ ID NO: 172676 - RNA, 22 nt, Human
cacaucagguagaccuacagag

SEQ ID NO: 172677 - RNA, 20 nt, Human
ccuuuauuauuuguaugaug

SEQ ID NO: 172678 - RNA, 17 nt, Human
uaaguuauagcagaaga

SEQ ID NO: 172679 - RNA, 22 nt, Human
uggaagcuguggcauaacugag

SEQ ID NO: 172680 - RNA, 22 nt, Human
auuugcuuucagguauaaaagg

SEQ ID NO: 172681 - RNA, 22 nt, Human
aaaucaguucucccuuucuuca

SEQ ID NO: 172682 - RNA, 22 nt, Human
uccucagaagaaccccuagauu

SEQ ID NO: 172683 - RNA, 22 nt, Human
uguacauagaucuugaaaauua

SEQ ID NO: 172684 - RNA, 22 nt, Human
aagguggugcuucugcuccucu

SEQ ID NO: 172685 - RNA, 22 nt, Human
cagguggugccuccucccuucc

SEQ ID NO: 172686 - RNA, 22 nt, Human
ugcagggccuucuagaccaugg

SEQ ID NO: 172687 - RNA, 22 nt, Human
cucuggccugcuuccucaggua

SEQ ID NO: 172688 - RNA, 22 nt, Human
augaaacacacacgcgcauacu

SEQ ID NO: 172689 - RNA, 22 nt, Human
uggcaaagaccgcaauuacuuu

SEQ ID NO: 172690 - RNA, 22 nt, Human
agauuucagaugcucggcaguu

SEQ ID NO: 172691 - RNA, 22 nt, Human
cucugaccauucccuugauuuu

SEQ ID NO: 172692 - RNA, 22 nt, Human
uacaguaagaugaaauagcaau

SEQ ID NO: 172693 - RNA, 19 nt, Human
gccugcagaaaaggcaggg

SEQ ID NO: 172694 - RNA, 22 nt, Human
ucuguccuguuuccuccugaca

SEQ ID NO: 172695 - RNA, 22 nt, Human
ucuuccuucgcccuugcuguuu

SEQ ID NO: 172696 - RNA, 22 nt, Human
ggucuggauuucugcuucuuuc

SEQ ID NO: 172697 - RNA, 22 nt, Human
uagaaacagauguuuuugaaga

SEQ ID NO: 172698 - RNA, 17 nt, Human
uccaugagacaugaaga

SEQ ID NO: 172699 - RNA, 22 nt, Human
agcagguggaaaauucuuauca

SEQ ID NO: 172700 - RNA, 22 nt, Human
auacaaagacaaaucucaaucu

SEQ ID NO: 172701 - RNA, 17 nt, Human
aaguccagaguugagca

SEQ ID NO: 172702 - RNA, 22 nt, Human
ugggacucacucuuuuggccag

SEQ ID NO: 172703 - RNA, 22 nt, Human
uguccucacacguagggaguaa

SEQ ID NO: 172704 - RNA, 23 nt, Human
acagugugguggacaaggagcag

SEQ ID NO: 172705 - RNA, 17 nt, Human
uccaggcagcaacugag

SEQ ID NO: 172706 - RNA, 22 nt, Human
cauggcuuuguucuguuagaug

SEQ ID NO: 172707 - RNA, 22 nt, Human
guacuaagucaggagaagaauu

SEQ ID NO: 172708 - RNA, 16 nt, Human
auuuccagauuaugca

SEQ ID NO: 172709 - RNA, 23 nt, Human
acuuuauugaccccaggucaguu

SEQ ID NO: 172710 - RNA, 22 nt, Human
guuucgucaggcuuauucuauc

SEQ ID NO: 172711 - RNA, 22 nt, Human
uggacaugaccucgagcgagau

SEQ ID NO: 172712 - RNA, 22 nt, Human
ugcuggaguucgacauugcaaa

SEQ ID NO: 172713 - RNA, 22 nt, Human
guaaaauugcaauuacuuuugc

SEQ ID NO: 172714 - RNA, 22 nt, Human
auucagcagccauggcuucuga

SEQ ID NO: 172715 - RNA, 22 nt, Human
caaauucucaagguuuauccca

SEQ ID NO: 172716 - RNA, 22 nt, Human
gaggcauaaaucacaguguuca

SEQ ID NO: 172717 - RNA, 22 nt, Human
ucuccucccaggcucuuccagg

SEQ ID NO: 172718 - RNA, 22 nt, Human
guagaaauauuuaucucugaga

SEQ ID NO: 172719 - RNA, 22 nt, Human
cagaagucacccucagaauaac

SEQ ID NO: 172720 - RNA, 20 nt, Human
acuguucaagggccuggugg

SEQ ID NO: 172721 - RNA, 22 nt, Human
auuccaaacagugcugcagacu

SEQ ID NO: 172722 - RNA, 22 nt, Human
uacaauacuuaaccuauuuugc

SEQ ID NO: 172723 - RNA, 22 nt, Human
ugugaauaaugccgcaauaaac

SEQ ID NO: 172724 - RNA, 22 nt, Human
aaacuucagugaaugacuuaug

SEQ ID NO: 172725 - RNA, 22 nt, Human
ugcuuagacgucaaguacagcc

SEQ ID NO: 172726 - RNA, 22 nt, Human
uucuuuucuuggcaggaguaga

SEQ ID NO: 172727 - RNA, 22 nt, Human
uggagcagaguucagcggggag

SEQ ID NO: 172728 - RNA, 22 nt, Human
ccaggccugugcaaggagggag

SEQ ID NO: 172729 - RNA, 22 nt, Human
ugcugagcgcauccggcggccg

SEQ ID NO: 172730 - RNA, 22 nt, Human
uugcagggaaacaguuuaggaa

SEQ ID NO: 172731 - RNA, 22 nt, Human
gacagguggguucucguaucug

SEQ ID NO: 172732 - RNA, 21 nt, Human
agcugcaaaaacauacaguuc

SEQ ID NO: 172733 - RNA, 22 nt, Human
gagggcuccucacauucucuau

SEQ ID NO: 172734 - RNA, 22 nt, Human
cacuuuaugggaagcaaaaauu

SEQ ID NO: 172735 - RNA, 22 nt, Human
acagguguaugaauauguucca

SEQ ID NO: 172736 - RNA, 22 nt, Human
ucagggcauggcugcacuuggc

SEQ ID NO: 172737 - RNA, 22 nt, Human
gaggugucugcuguguucaaag

SEQ ID NO: 172738 - RNA, 17 nt, Human
uucagaagcauuuuggc

SEQ ID NO: 172739 - RNA, 22 nt, Human
cacaggcugcccgcagcuggga

SEQ ID NO: 172740 - RNA, 22 nt, Human
cucuggaagaugaccuggguaa

SEQ ID NO: 172741 - RNA, 22 nt, Human
cugugucccagccaggauaaug

SEQ ID NO: 172742 - RNA, 22 nt, Human
cagacaggcuagccagacucac

SEQ ID NO: 172743 - RNA, 22 nt, Human
ugcagggcagauaugacuguag

SEQ ID NO: 172744 - RNA, 22 nt, Human
agccuauuccaggaugagcuca

SEQ ID NO: 172745 - RNA, 22 nt, Human
gcagagcacccugcagugguau

SEQ ID NO: 172746 - RNA, 22 nt, Human
uccuucucugguuuuuacugua

SEQ ID NO: 172747 - RNA, 22 nt, Human
uuuucuuaggugcuccaaguag

SEQ ID NO: 172748 - RNA, 22 nt, Human
gggcugacgaaggccaugugug

SEQ ID NO: 172749 - RNA, 22 nt, Human
auaggcuuauauaaaaacaucu

SEQ ID NO: 172750 - RNA, 22 nt, Human
ucuugcacuucaugaauauguu

SEQ ID NO: 172751 - RNA, 22 nt, Human
uacaugugcuauuuguuuugua

SEQ ID NO: 172752 - RNA, 22 nt, Human
uaucagaacacagccacagcca

SEQ ID NO: 172753 - RNA, 22 nt, Human
agacaacaucacuaaagcugag

SEQ ID NO: 172754 - RNA, 22 nt, Human
uuccaggaacagaugaagguug

SEQ ID NO: 172755 - RNA, 22 nt, Human
auuucucaguuccuacuguuua

SEQ ID NO: 172756 - RNA, 22 nt, Human
gggcagguacuggguggugagc

SEQ ID NO: 172757 - RNA, 22 nt, Human
ccagggcacuuaggcccagccc

SEQ ID NO: 172758 - RNA, 20 nt, Human
ccagagaguagguuagugau

SEQ ID NO: 172759 - RNA, 22 nt, Human
augaauaaaacauuuuaaucag

SEQ ID NO: 172760 - RNA, 16 nt, Human
ucaggugugacuuuuu

SEQ ID NO: 172761 - RNA, 21 nt, Human
cauuucaaagagcuggaaauc

SEQ ID NO: 172762 - RNA, 22 nt, Human
ucaaaggcgguccaggaauaaa

SEQ ID NO: 172763 - RNA, 22 nt, Human
gggugacauuaggaagauagac

SEQ ID NO: 172764 - RNA, 22 nt, Human
acauguguauagccuguauaga

SEQ ID NO: 172765 - RNA, 22 nt, Human
uucuggauaugggagagggagc

SEQ ID NO: 172766 - RNA, 22 nt, Human
agagggcuuugauucucaguuc

SEQ ID NO: 172767 - RNA, 22 nt, Human
agucacccuccaacucuccacu

SEQ ID NO: 172768 - RNA, 22 nt, Human
uguucaaaugaucuucuuaaau

SEQ ID NO: 172769 - RNA, 22 nt, Human
ggaccugcucucccaguucucu

SEQ ID NO: 172770 - RNA, 22 nt, Human
ucuuaguuguuugcugucuaac

SEQ ID NO: 172771 - RNA, 22 nt, Human
uaaagcuguuagaguaguaaga

SEQ ID NO: 172772 - RNA, 22 nt, Human
cgucacuucuuagucuauuuuc

SEQ ID NO: 172773 - RNA, 22 nt, Human
cagugggacaugggcacugggc

SEQ ID NO: 172774 - RNA, 22 nt, Human
aaaagcaguuuauagucaguug

SEQ ID NO: 172775 - RNA, 22 nt, Human
ccuggaucuaaggaagcuggga

SEQ ID NO: 172776 - RNA, 22 nt, Human
auauacaggugguauguguaaa

SEQ ID NO: 172777 - RNA, 22 nt, Human
uauuuaaaauaagccccagugg

SEQ ID NO: 172778 - RNA, 22 nt, Human
gugaacuauuggguaucauaaa

SEQ ID NO: 172779 - RNA, 22 nt, Human
augcuuuagugucaaguuuggg

SEQ ID NO: 172780 - RNA, 22 nt, Human
acagaaauaacuuuuuauguuu

SEQ ID NO: 172781 - RNA, 22 nt, Human
cagggcaguaccgcccucuggc

SEQ ID NO: 172782 - RNA, 22 nt, Human
agugugagggguucuuugauau

SEQ ID NO: 172783 - RNA, 19 nt, Human
guccaguguuuuccaguca

SEQ ID NO: 172784 - RNA, 22 nt, Human
aggcugagcuggcccuugaaau

SEQ ID NO: 172785 - RNA, 22 nt, Human
cucccuucaggagaggcucaca

SEQ ID NO: 172786 - RNA, 22 nt, Human
auaugagagaggaaagauuuua

SEQ ID NO: 172787 - RNA, 22 nt, Human
auacaacagaaaaugauuauuc

SEQ ID NO: 172788 - RNA, 22 nt, Human
uuccaaacugccaauucagaag

SEQ ID NO: 172789 - RNA, 22 nt, Human
agugugagugcucauguccauc

SEQ ID NO: 172790 - RNA, 22 nt, Human
cuuaaagaugucaaggcuguuu

SEQ ID NO: 172791 - RNA, 22 nt, Human
caauuucaaugaggccacaggg

SEQ ID NO: 172792 - RNA, 22 nt, Human
caaauacuggguaaguuaauuu

SEQ ID NO: 172793 - RNA, 22 nt, Human
aaacaucaauugcaucucccaa

SEQ ID NO: 172794 - RNA, 22 nt, Human
cugcaggguuuuucaaggacaa

SEQ ID NO: 172795 - RNA, 22 nt, Human
ucagaauuagagcucuucuuga

SEQ ID NO: 172796 - RNA, 22 nt, Human
auuuggcaacauuaauugaauc

SEQ ID NO: 172797 - RNA, 22 nt, Human
aauguuguuuuucugcaugucu

SEQ ID NO: 172798 - RNA, 15 nt, Human
gcauguguaauaggc

SEQ ID NO: 172799 - RNA, 22 nt, Human
aagcuguucucuaaguuucaug

SEQ ID NO: 172800 - RNA, 22 nt, Human
gagcugcagcggcugacgcaac

SEQ ID NO: 172801 - RNA, 22 nt, Human
gcagacagaagcuaaguagaca

SEQ ID NO: 172802 - RNA, 22 nt, Human
auugguauguauucugaaaacu

SEQ ID NO: 172803 - RNA, 22 nt, Human
cagauuuagaguggggcuugga

SEQ ID NO: 172804 - RNA, 22 nt, Human
uaggugucuguccugggcugug

SEQ ID NO: 172805 - RNA, 22 nt, Human
gauagaaagagugguucuuuuu

SEQ ID NO: 172806 - RNA, 22 nt, Human
ucaaaauuagugaccaaaggca

SEQ ID NO: 172807 - RNA, 22 nt, Human
ucauguguguuucauguaugga

SEQ ID NO: 172808 - RNA, 22 nt, Human
ggucaaagugaggagucagguu

SEQ ID NO: 172809 - RNA, 22 nt, Human
uuucuauugaucuaauaaacau

SEQ ID NO: 172810 - RNA, 22 nt, Human
augagagguuucgucagaggaa

SEQ ID NO: 172811 - RNA, 22 nt, Human
ugaauagauuuuuaacauauaa

SEQ ID NO: 172812 - RNA, 22 nt, Human
uuuauuguguugaaacugaauu

SEQ ID NO: 172813 - RNA, 22 nt, Human
aaucagaacgcucgaucuucgg

SEQ ID NO: 172814 - RNA, 22 nt, Human
caaauucagaaaauugguagag

SEQ ID NO: 172815 - RNA, 22 nt, Human
ugcuggguggacuuggcucuca

SEQ ID NO: 172816 - RNA, 22 nt, Human
uuuagggaaauugaggguuaag

SEQ ID NO: 172817 - RNA, 22 nt, Human
ugcugagggagggguuuuccag

SEQ ID NO: 172818 - RNA, 22 nt, Human
cacaaugugguuugucaucuuu

SEQ ID NO: 172819 - RNA, 20 nt, Human
agaagucagcucagaaguga

SEQ ID NO: 172820 - RNA, 19 nt, Human
uccauaaugaagauagagg

SEQ ID NO: 172821 - RNA, 22 nt, Human
acauguaacauauauguagcau

SEQ ID NO: 172822 - RNA, 22 nt, Human
agcuuuaugggagcuuagauaa

SEQ ID NO: 172823 - RNA, 22 nt, Human
uggcagguggagacagcagagc

SEQ ID NO: 172824 - RNA, 22 nt, Human
ugggcuccaauuuguccuuuca

SEQ ID NO: 172825 - RNA, 19 nt, Human
gcaggcaguggcauucgga

SEQ ID NO: 172826 - RNA, 22 nt, Human
caaaaacugcaauuacuuuuac

SEQ ID NO: 172827 - RNA, 22 nt, Human
uugaaucucuugaaucucuguu

SEQ ID NO: 172828 - RNA, 22 nt, Human
gcaggcagucaucuuucauauu

SEQ ID NO: 172829 - RNA, 22 nt, Human
cuuucuuuguccaccaacaaug

SEQ ID NO: 172830 - RNA, 22 nt, Human
cccagcuugcgggcggcaggag

SEQ ID NO: 172831 - RNA, 22 nt, Human
ucagggcacugucaccugauau

SEQ ID NO: 172832 - RNA, 22 nt, Human
uauuccuauuucuaaacauaug

SEQ ID NO: 172833 - RNA, 22 nt, Human
cagagacuggagugcaguggcg

SEQ ID NO: 172834 - RNA, 22 nt, Human
ccagcuuuaucaagucugagcu

SEQ ID NO: 172835 - RNA, 22 nt, Human
caugaaggaccauuucacgguc

SEQ ID NO: 172836 - RNA, 22 nt, Human
uacagauauuguacaguuauag

SEQ ID NO: 172837 - RNA, 22 nt, Human
uguacaaugccgagacuaacuc

SEQ ID NO: 172838 - RNA, 23 nt, Human
caggacaugggaggaaguauggc

SEQ ID NO: 172839 - RNA, 22 nt, Human
auccuucuccaaaacuggcucc

SEQ ID NO: 172840 - RNA, 22 nt, Human
cuucuucaguugcauguauugg

SEQ ID NO: 172841 - RNA, 22 nt, Human
gugcaguggcagauccuagcuc

SEQ ID NO: 172842 - RNA, 22 nt, Human
aauacaguagguaauaguucau

SEQ ID NO: 172843 - RNA, 22 nt, Human
acaaguaccaaaugcucaagua

SEQ ID NO: 172844 - RNA, 22 nt, Human
uggaauguaaacucugugaggg

SEQ ID NO: 172845 - RNA, 22 nt, Human
uuaagacaguguauuuguuuuc

SEQ ID NO: 172846 - RNA, 21 nt, Human
ucugggugcuaguguuugcuu

SEQ ID NO: 172847 - RNA, 22 nt, Human
aaggugucaaacuagaagaugu

SEQ ID NO: 172848 - RNA, 22 nt, Human
uccugcaguuacaucccagcca

SEQ ID NO: 172849 - RNA, 22 nt, Human
augcuucagugcuaccuucaaa

SEQ ID NO: 172850 - RNA, 22 nt, Human
uacaagaaauuucugcauauau

SEQ ID NO: 172851 - RNA, 22 nt, Human
ucuaaacacuaagucuugaugc

SEQ ID NO: 172852 - RNA, 22 nt, Human
guagggacuuguuuuacuagua

SEQ ID NO: 172853 - RNA, 22 nt, Human
cuguucacacacuuguacucuc

SEQ ID NO: 172854 - RNA, 22 nt, Human
uuuccaaaaguuuguucugugc

SEQ ID NO: 172855 - RNA, 22 nt, Human
ugcuguguaaaaggugauugaa

SEQ ID NO: 172856 - RNA, 22 nt, Human
uaguuuguagaaaucuagaaau

SEQ ID NO: 172857 - RNA, 22 nt, Human
uggaggcaggggauacagguca

SEQ ID NO: 172858 - RNA, 22 nt, Human
caggacauugauccauuggcac

SEQ ID NO: 172859 - RNA, 22 nt, Human
aauuuagauugauaaacaugga

SEQ ID NO: 172860 - RNA, 22 nt, Human
guagaaauuccauuuacuuuga

SEQ ID NO: 172861 - RNA, 22 nt, Human
uucugggacaucuggacaguuu

SEQ ID NO: 172862 - RNA, 22 nt, Human
guacagaaauggggccccaggu

SEQ ID NO: 172863 - RNA, 22 nt, Human
agaaaucaugucuuauuucuau

SEQ ID NO: 172864 - RNA, 22 nt, Human
agacaucauguuacagauuaag

SEQ ID NO: 172865 - RNA, 21 nt, Human
ucuuuucucagcuuugugguu

SEQ ID NO: 172866 - RNA, 22 nt, Human
ugcauaaacuucucugguguga

SEQ ID NO: 172867 - RNA, 22 nt, Human
ucuuuaauucagcaugaugcgg

SEQ ID NO: 172868 - RNA, 22 nt, Human
ggaccugaacauaaaacgaggc

SEQ ID NO: 172869 - RNA, 22 nt, Human
cagguggucaggcaaggacacg

SEQ ID NO: 172870 - RNA, 22 nt, Human
cgcgguggcggccuccagcgcc

SEQ ID NO: 172871 - RNA, 22 nt, Human
ccagcuuuagguugccugccag

SEQ ID NO: 172872 - RNA, 22 nt, Human
agcagguggccuccugucuguc

SEQ ID NO: 172873 - RNA, 22 nt, Human
acaaauauuuacugaauccacu

SEQ ID NO: 172874 - RNA, 22 nt, Human
cacaugugcaguuacaugaauu

SEQ ID NO: 172875 - RNA, 22 nt, Human
uaaaacuuaacuauccagauua

SEQ ID NO: 172876 - RNA, 22 nt, Human
gccagguggcugagcagcugca

SEQ ID NO: 172877 - RNA, 22 nt, Human
auaaagucauuaugaagaucua

SEQ ID NO: 172878 - RNA, 21 nt, Human
ggguguggaaauuacauccug

SEQ ID NO: 172879 - RNA, 22 nt, Human
gcauggcugguguccugaggga

SEQ ID NO: 172880 - RNA, 22 nt, Human
aaaguccuguuaacuguuaaca

SEQ ID NO: 172881 - RNA, 22 nt, Human
uucuuguauauaaaaaucauuu

SEQ ID NO: 172882 - RNA, 22 nt, Human
guucuucaguaaaauuaaaugu

SEQ ID NO: 172883 - RNA, 22 nt, Human
uucuucaauuuuccauauacug

SEQ ID NO: 172884 - RNA, 22 nt, Human
ucagggcaggcgagcagcugcu

SEQ ID NO: 172885 - RNA, 22 nt, Human
aaggcauauauucuaaacagga

SEQ ID NO: 172886 - RNA, 22 nt, Human
auuagggaaggauuuggccuga

SEQ ID NO: 172887 - RNA, 22 nt, Human
gauaaaauucuuauuuuacccg

SEQ ID NO: 172888 - RNA, 22 nt, Human
uaaaauagcaugugcagugaaa

SEQ ID NO: 172889 - RNA, 23 nt, Human
guaggaauuuucacuuccucuug

SEQ ID NO: 172890 - RNA, 22 nt, Human
acaggugugggcugggcucuga

SEQ ID NO: 172891 - RNA, 22 nt, Human
agcagggcugcggccccaccac

SEQ ID NO: 172892 - RNA, 22 nt, Human
agggcuacugccugccuucagg

SEQ ID NO: 172893 - RNA, 22 nt, Human
cuggauguccagguagaaguuu

SEQ ID NO: 172894 - RNA, 22 nt, Human
cgcaggugaaagaggcugggca

SEQ ID NO: 172895 - RNA, 22 nt, Human
agaggaauaugggugcacuaga

SEQ ID NO: 172896 - RNA, 22 nt, Human
aucagagaccggucaagucaug

SEQ ID NO: 172897 - RNA, 22 nt, Human
uuauuagggugguuuauguucu

SEQ ID NO: 172898 - RNA, 23 nt, Human
uugcuugagcccaggaaguggag

SEQ ID NO: 172899 - RNA, 22 nt, Human
uauuuaaaaagaggccagcugg

SEQ ID NO: 172900 - RNA, 22 nt, Human
aucugcuugaaugagcaacagg

SEQ ID NO: 172901 - RNA, 22 nt, Human
cugaggcuuggaggggucuggu

SEQ ID NO: 172902 - RNA, 22 nt, Human
uuggaggauggaguuagcaucu

SEQ ID NO: 172903 - RNA, 22 nt, Human
gacagacagggguucuccugga

SEQ ID NO: 172904 - RNA, 22 nt, Human
acagacagacagagaacuauuc

SEQ ID NO: 172905 - RNA, 22 nt, Human
gugccaaaagcuauaauuuggu

SEQ ID NO: 172906 - RNA, 21 nt, Human
uuugcugaagauuuuaggcug

SEQ ID NO: 172907 - RNA, 22 nt, Human
ucagucuucccuccagugcaac

SEQ ID NO: 172908 - RNA, 18 nt, Human
agaugaaagcaaaugaca

SEQ ID NO: 172909 - RNA, 22 nt, Human
acagcaggaagcuggagggaaa

SEQ ID NO: 172910 - RNA, 22 nt, Human
ggcaggugaccuggccucccag

SEQ ID NO: 172911 - RNA, 22 nt, Human
cacagguggcuccaaguuagag

SEQ ID NO: 172912 - RNA, 21 nt, Human
cagugagguccccagccuagg

SEQ ID NO: 172913 - RNA, 18 nt, Human
ggacaucaucaggugcuu

SEQ ID NO: 172914 - RNA, 22 nt, Human
cuggguccugcucucccuaaga

SEQ ID NO: 172915 - RNA, 22 nt, Human
ucagccaggccaccuucagcuu

SEQ ID NO: 172916 - RNA, 22 nt, Human
gcuggccugggcagccugucgg

SEQ ID NO: 172917 - RNA, 22 nt, Human
uggauuuaccacagggccacag

SEQ ID NO: 172918 - RNA, 22 nt, Human
uugggcagggaaaggacaggca

SEQ ID NO: 172919 - RNA, 22 nt, Human
caagaaucaacauuauuuagug

SEQ ID NO: 172920 - RNA, 22 nt, Human
ucuggagaacuugcaagaggau

SEQ ID NO: 172921 - RNA, 22 nt, Human
uuaauuuuuauguauagugugu

SEQ ID NO: 172922 - RNA, 22 nt, Human
cagauacuguaaaauuucagua

SEQ ID NO: 172923 - RNA, 22 nt, Human
gagagcugggcuuugggugaag

SEQ ID NO: 172924 - RNA, 22 nt, Human
aaggugguuguaggcuggucug

SEQ ID NO: 172925 - RNA, 22 nt, Human
uuccuuaguugacugucuuagu

SEQ ID NO: 172926 - RNA, 22 nt, Human
cuggaggaauaauggcaucuug

SEQ ID NO: 172927 - RNA, 22 nt, Human
uuuccauguguacuggccagaa

SEQ ID NO: 172928 - RNA, 22 nt, Human
augcugaauugaugcgagggag

SEQ ID NO: 172929 - RNA, 22 nt, Human
uauauguagucagucagaguaa

SEQ ID NO: 172930 - RNA, 22 nt, Human
uuucugcauuguccucuugguu

SEQ ID NO: 172931 - RNA, 22 nt, Human
cagacagggguaaccuuccuca

SEQ ID NO: 172932 - RNA, 23 nt, Human
uugggaaauaguuaagacaugag

SEQ ID NO: 172933 - RNA, 22 nt, Human
ugauguucuguauaucauauag

SEQ ID NO: 172934 - RNA, 22 nt, Human
ucuuuauugcuacugguuuguc

SEQ ID NO: 172935 - RNA, 22 nt, Human
ccuuuaauuuacaauguuaauu

SEQ ID NO: 172936 - RNA, 22 nt, Human
uauguauagagucuuuuaaauu

SEQ ID NO: 172937 - RNA, 22 nt, Human
uagggcucugcucaucaguugu

SEQ ID NO: 172938 - RNA, 22 nt, Human
uccaggcagcccuuccugacuc

SEQ ID NO: 172939 - RNA, 22 nt, Human
aaaagucugcuuucuauuauca

SEQ ID NO: 172940 - RNA, 22 nt, Human
aagauuauuuaagacaggaacc

SEQ ID NO: 172941 - RNA, 22 nt, Human
ucuguucaucaucuggacacau

SEQ ID NO: 172942 - RNA, 19 nt, Human
ccauuguaaagaaaaaugu

SEQ ID NO: 172943 - RNA, 22 nt, Human
acagguggcagaagcauuuacu

SEQ ID NO: 172944 - RNA, 22 nt, Human
gacagacaggagcucacaggca

SEQ ID NO: 172945 - RNA, 20 nt, Human
ucccaggcuccacccuagac

SEQ ID NO: 172946 - RNA, 22 nt, Human
uagggcaguuauaacauuagug

SEQ ID NO: 172947 - RNA, 22 nt, Human
acacauuucucuuuuuguaagu

SEQ ID NO: 172948 - RNA, 22 nt, Human
gcaggugggggucggugcaucu

SEQ ID NO: 172949 - RNA, 22 nt, Human
uaauauauuucugcuaagcuca

SEQ ID NO: 172950 - RNA, 22 nt, Human
ucuggcuccugaguccaugcuc

SEQ ID NO: 172951 - RNA, 22 nt, Human
aaugaaugaaccacauauaaca

SEQ ID NO: 172952 - RNA, 22 nt, Human
agcaggugccagguguacccgc

SEQ ID NO: 172953 - RNA, 22 nt, Human
agguacaaaagaguauaugaga

SEQ ID NO: 172954 - RNA, 22 nt, Human
uucagagagaaaccagugggaa

SEQ ID NO: 172955 - RNA, 22 nt, Human
agcagggcagugcuucagcucu

SEQ ID NO: 172956 - RNA, 22 nt, Human
acuguucauauucuuagaaauu

SEQ ID NO: 172957 - RNA, 22 nt, Human
ccauguguucaauaagggaguu

SEQ ID NO: 172958 - RNA, 22 nt, Human
gccgugcgugcgcaggugcugu

SEQ ID NO: 172959 - RNA, 21 nt, Human
agaauaaugguaucauuugcu

SEQ ID NO: 172960 - RNA, 22 nt, Human
auucuucaaagagugucaaagu

SEQ ID NO: 172961 - RNA, 22 nt, Human
agauggucuucauaaguuuuaa

SEQ ID NO: 172962 - RNA, 19 nt, Human
uccugcagaccagaccugu

SEQ ID NO: 172963 - RNA, 22 nt, Human
gccuuaauuuaugucuaacaua

SEQ ID NO: 172964 - RNA, 22 nt, Human
cuguccugcaguugggggcagg

SEQ ID NO: 172965 - RNA, 22 nt, Human
auccaaacauguaccacacuaa

SEQ ID NO: 172966 - RNA, 22 nt, Human
auagcuuucuuaaauauauaaa

SEQ ID NO: 172967 - RNA, 22 nt, Human
guguccauguuguucaggguga

SEQ ID NO: 172968 - RNA, 22 nt, Human
uacagguggaucacuaguauag

SEQ ID NO: 172969 - RNA, 22 nt, Human
agaugaaagauuuuuauagaga

SEQ ID NO: 172970 - RNA, 22 nt, Human
agucugcuuccuggagaacuca

SEQ ID NO: 172971 - RNA, 21 nt, Human
caaagccaggcaacucucucc

SEQ ID NO: 172972 - RNA, 22 nt, Human
gaguccuuaauacacuggugga

SEQ ID NO: 172973 - RNA, 22 nt, Human
cucagcaacccuagaacauuug

SEQ ID NO: 172974 - RNA, 22 nt, Human
uauuucagggagaauaaauuug

SEQ ID NO: 172975 - RNA, 22 nt, Human
uuucacaacugcuuauuugaga

SEQ ID NO: 172976 - RNA, 22 nt, Human
ugggcuccuugggagcaaguga

SEQ ID NO: 172977 - RNA, 21 nt, Human
uccaaaaaggagcguccuucu

SEQ ID NO: 172978 - RNA, 22 nt, Human
ggaccugcccuggcucagaugc

SEQ ID NO: 172979 - RNA, 22 nt, Human
cauggaaugguugaaugacgaa

SEQ ID NO: 172980 - RNA, 22 nt, Human
ugguggggcuuuccuucugcuu

SEQ ID NO: 172981 - RNA, 22 nt, Human
uuccagaauugggagccuugag

SEQ ID NO: 172982 - RNA, 17 nt, Human
cacaggugugguuugag

SEQ ID NO: 172983 - RNA, 20 nt, Human
gcaggcagggaaugggggug

SEQ ID NO: 172984 - RNA, 22 nt, Human
cccugcagcauucucuaacugg

SEQ ID NO: 172985 - RNA, 17 nt, Human
ugaaacaccaagacugu

SEQ ID NO: 172986 - RNA, 21 nt, Human
ucuauucauuacaguuauuug

SEQ ID NO: 172987 - RNA, 22 nt, Human
uugauacauuuuuaggauaaac

SEQ ID NO: 172988 - RNA, 22 nt, Human
ucuuccaagguugcacacuauc

SEQ ID NO: 172989 - RNA, 22 nt, Human
agucauaugacccuucacaaac

SEQ ID NO: 172990 - RNA, 22 nt, Human
auaguuuucuaugcacuguuau

SEQ ID NO: 172991 - RNA, 23 nt, Human
uuuauauuccuaaugucuugagc

SEQ ID NO: 172992 - RNA, 22 nt, Human
aauugcuugaugacuaguaauu

SEQ ID NO: 172993 - RNA, 22 nt, Human
auugugcaaauauuaucuguag

SEQ ID NO: 172994 - RNA, 22 nt, Human
agcuuguuagaaauguagacuc

SEQ ID NO: 172995 - RNA, 22 nt, Human
gccaggcauucuagaaguagug

SEQ ID NO: 172996 - RNA, 22 nt, Human
ucagcuuucucagaggccuaac

SEQ ID NO: 172997 - RNA, 22 nt, Human
gccucaagacauuuuuaauugc

SEQ ID NO: 172998 - RNA, 22 nt, Human
gagcuuuaagggauaaaaugau

SEQ ID NO: 172999 - RNA, 22 nt, Human
agacaugucaccaauucuuacu

SEQ ID NO: 173000 - RNA, 22 nt, Human
uuuuugcuaauccccagccacu

SEQ ID NO: 173001 - RNA, 21 nt, Human
gggcuuuuuauuuagcacugu

SEQ ID NO: 173002 - RNA, 22 nt, Human
agucacaguuccuacccaguaa

SEQ ID NO: 173003 - RNA, 22 nt, Human
gagauggagucuuuuucuguca

SEQ ID NO: 173004 - RNA, 22 nt, Human
ugucaacacaccuaucucaauu

SEQ ID NO: 173005 - RNA, 22 nt, Human
gaauuucagagguaacaucauc

SEQ ID NO: 173006 - RNA, 22 nt, Human
uguauacaugucugugugcaca

SEQ ID NO: 173007 - RNA, 23 nt, Human
agcuuugugaaagcagacauggg

SEQ ID NO: 173008 - RNA, 22 nt, Human
aaccugcaguuuuuauucugag

SEQ ID NO: 173009 - RNA, 22 nt, Human
ccagagagaaauggauuugagu

SEQ ID NO: 173010 - RNA, 22 nt, Human
uguuuagcauaaagauuuucca

SEQ ID NO: 173011 - RNA, 22 nt, Human
ugguggagccuaggcuaagucu

SEQ ID NO: 173012 - RNA, 22 nt, Human
gaugagguaagaauguaacacc

SEQ ID NO: 173013 - RNA, 22 nt, Human
auguucuuguucaaaugucagu

SEQ ID NO: 173014 - RNA, 22 nt, Human
ucauagaaugaguuaaugaacu

SEQ ID NO: 173015 - RNA, 22 nt, Human
aaauuagucgguuuaggaauuu

SEQ ID NO: 173016 - RNA, 22 nt, Human
ucagacagagaaguacaaugag

SEQ ID NO: 173017 - RNA, 22 nt, Human
uaggugucuaacaauaagugua

SEQ ID NO: 173018 - RNA, 14 nt, Human
gcaggcagaccacc

SEQ ID NO: 173019 - RNA, 23 nt, Human
auguauuuaaauuucagugauga

SEQ ID NO: 173020 - RNA, 22 nt, Human
uaaagccacgcuggaaaucagg

SEQ ID NO: 173021 - RNA, 22 nt, Human
cagugagggaagaucucagcac

SEQ ID NO: 173022 - RNA, 22 nt, Human
ugggccaggucugugucagcug

SEQ ID NO: 173023 - RNA, 22 nt, Human
cuggaggaaaacaacugcagac

SEQ ID NO: 173024 - RNA, 22 nt, Human
uuaguuguaaaauggaauuugu

SEQ ID NO: 173025 - RNA, 20 nt, Human
augugucuguaaacaacucu

SEQ ID NO: 173026 - RNA, 22 nt, Human
aguuuucacacucaccaaaagg

SEQ ID NO: 173027 - RNA, 19 nt, Human
ggcauccacgaaugcagag

SEQ ID NO: 173028 - RNA, 22 nt, Human
uuugacuccagagcccauuuuu

SEQ ID NO: 173029 - RNA, 22 nt, Human
acuauacagaagaggauaggaa

SEQ ID NO: 173030 - RNA, 22 nt, Human
acuuccuuuugggaaacuguuu

SEQ ID NO: 173031 - RNA, 20 nt, Human
gacaggugcuaaagaggggc

SEQ ID NO: 173032 - RNA, 19 nt, Human
ggaagagaggaaaggugga

SEQ ID NO: 173033 - RNA, 22 nt, Human
uguugcuguaugaauaggaagg

SEQ ID NO: 173034 - RNA, 18 nt, Human
ugaaacaagaauggugca

SEQ ID NO: 173035 - RNA, 22 nt, Human
uacauguguucuguuucaaguu

SEQ ID NO: 173036 - RNA, 22 nt, Human
cgcaggugaacuguucugcagu

SEQ ID NO: 173037 - RNA, 22 nt, Human
uaauuucuaauucauuuucagu

SEQ ID NO: 173038 - RNA, 22 nt, Human
aagagcaucaaugacucgcagu

SEQ ID NO: 173039 - RNA, 22 nt, Human
ucuguucagaaauggaagugcc

SEQ ID NO: 173040 - RNA, 22 nt, Human
caguguuuguauagaauaugca

SEQ ID NO: 173041 - RNA, 20 nt, Human
ugcagguguuggagaaggua

SEQ ID NO: 173042 - RNA, 22 nt, Human
gguguccucacuauagcaaguc

SEQ ID NO: 173043 - RNA, 22 nt, Human
ccagagagggcgccaccuggag

SEQ ID NO: 173044 - RNA, 22 nt, Human
gcuuccucccugcugcucacua

SEQ ID NO: 173045 - RNA, 17 nt, Human
cccaugagcccacuccc

SEQ ID NO: 173046 - RNA, 22 nt, Human
uaaaugucuguuaacaugaaug

SEQ ID NO: 173047 - RNA, 22 nt, Human
gcaggcagccacgauucccuug

SEQ ID NO: 173048 - RNA, 22 nt, Human
cuggaugucuuggggacuccug

SEQ ID NO: 173049 - RNA, 22 nt, Human
uuccugggauuauugucaagca

SEQ ID NO: 173050 - RNA, 22 nt, Human
ugcauaauacguuuccuauaac

SEQ ID NO: 173051 - RNA, 22 nt, Human
cuguccuggccgcccuugugag

SEQ ID NO: 173052 - RNA, 22 nt, Human
gugcauuuaggucacaugaugu

SEQ ID NO: 173053 - RNA, 22 nt, Human
acagcuuuucaauucugcugag

SEQ ID NO: 173054 - RNA, 22 nt, Human
ggcauuuaucuaauauaguuua

SEQ ID NO: 173055 - RNA, 22 nt, Human
caguguuuaaucauugugaauu

SEQ ID NO: 173056 - RNA, 22 nt, Human
acuuccagugucugcugcuagc

SEQ ID NO: 173057 - RNA, 22 nt, Human
uucauacuaaaguguaagaugu

SEQ ID NO: 173058 - RNA, 21 nt, Human
ugacagguauuuaucuggaaa

SEQ ID NO: 173059 - RNA, 22 nt, Human
aggcagguagaaggaucuuuau

SEQ ID NO: 173060 - RNA, 22 nt, Human
ggucucuguugccuccaucaag

SEQ ID NO: 173061 - RNA, 22 nt, Human
aucagaaaaacauaauguuauu

SEQ ID NO: 173062 - RNA, 22 nt, Human
caguccuucauuccuccuuuga

SEQ ID NO: 173063 - RNA, 22 nt, Human
uuccuggguugugcauuguaca

SEQ ID NO: 173064 - RNA, 22 nt, Human
ugcacuuuaaaaaauggugaug

SEQ ID NO: 173065 - RNA, 22 nt, Human
guccuucaagaguccccuacug

SEQ ID NO: 173066 - RNA, 22 nt, Human
gaguccuuuucucuguccacug

SEQ ID NO: 173067 - RNA, 22 nt, Human
agggaagaaucacugggauguu

SEQ ID NO: 173068 - RNA, 22 nt, Human
aggcagguguuaccucugguuu

SEQ ID NO: 173069 - RNA, 22 nt, Human
auaaaacuuggguaugaucccu

SEQ ID NO: 173070 - RNA, 22 nt, Human
gcuucuauuauuuggagcugag

SEQ ID NO: 173071 - RNA, 22 nt, Human
ugcugccaauuucuggucuuga

SEQ ID NO: 173072 - RNA, 22 nt, Human
uugaaguuguaguucagugaag

SEQ ID NO: 173073 - RNA, 22 nt, Human
uucaugugauaaaugugugacu

SEQ ID NO: 173074 - RNA, 22 nt, Human
aaaucucaauuugaauuguagc

SEQ ID NO: 173075 - RNA, 20 nt, Human
cuguccugaucuuuucagaa

SEQ ID NO: 173076 - RNA, 19 nt, Human
uuugacuccucauuuuuau

SEQ ID NO: 173077 - RNA, 22 nt, Human
cagggcucccugcagccucugu

SEQ ID NO: 173078 - RNA, 17 nt, Human
gagccacccugugcgag

SEQ ID NO: 173079 - RNA, 21 nt, Human
uccugcaggaggccugagagg

SEQ ID NO: 173080 - RNA, 22 nt, Human
uuggaucauggaaugucugcuu

SEQ ID NO: 173081 - RNA, 22 nt, Human
accagcugcugauugcuaaaug

SEQ ID NO: 173082 - RNA, 22 nt, Human
uauugauaugcagaacugacuu

SEQ ID NO: 173083 - RNA, 22 nt, Human
cugcaaaauuguucuuugcucc

SEQ ID NO: 173084 - RNA, 22 nt, Human
caaguccuuuucuuggcucagg

SEQ ID NO: 173085 - RNA, 22 nt, Human
uuucagacaggacuucauaugu

SEQ ID NO: 173086 - RNA, 22 nt, Human
ggcaggugaguucauuaucugc

SEQ ID NO: 173087 - RNA, 21 nt, Human
agcaacucugacuagaugagg

SEQ ID NO: 173088 - RNA, 22 nt, Human
uuucuagggcucuugucuucug

SEQ ID NO: 173089 - RNA, 22 nt, Human
ccugcagggaaucgaggcagaa

SEQ ID NO: 173090 - RNA, 22 nt, Human
cacauaauacauguuccacuua

SEQ ID NO: 173091 - RNA, 22 nt, Human
aacaaagucguugccuagaaga

SEQ ID NO: 173092 - RNA, 22 nt, Human
cuuaauuuaaaauaguucaggc

SEQ ID NO: 173093 - RNA, 22 nt, Human
uggagaauuuugucaccagaca

SEQ ID NO: 173094 - RNA, 22 nt, Human
caauuucaauacaaaauacauu

SEQ ID NO: 173095 - RNA, 22 nt, Human
auucuucacauaagugcuguac

SEQ ID NO: 173096 - RNA, 22 nt, Human
ucaggaaagaguaauguauaca

SEQ ID NO: 173097 - RNA, 22 nt, Human
cucuacucuuaacacagcuagg

SEQ ID NO: 173098 - RNA, 22 nt, Human
agaucuauuagcaaacugccau

SEQ ID NO: 173099 - RNA, 17 nt, Human
acagcagggaaguguug

SEQ ID NO: 173100 - RNA, 22 nt, Human
ugugaauacagcaugugcuucu

SEQ ID NO: 173101 - RNA, 17 nt, Human
aaggaaugucagaaguu

SEQ ID NO: 173102 - RNA, 19 nt, Human
uggcucuguuucucuggag

SEQ ID NO: 173103 - RNA, 22 nt, Human
ugggcuccggcggccucaggcu

SEQ ID NO: 173104 - RNA, 22 nt, Human
uugacacaguuuucucauuaag

SEQ ID NO: 173105 - RNA, 22 nt, Human
uaguuuacuguucacuuugccc

SEQ ID NO: 173106 - RNA, 21 nt, Human
uccuuccuugagguccuuucc

SEQ ID NO: 173107 - RNA, 22 nt, Human
aaaguggucaccuucucauuuc

SEQ ID NO: 173108 - RNA, 22 nt, Human
ccacagaaaauaaagcacgauu

SEQ ID NO: 173109 - RNA, 20 nt, Human
uggccuuuaaauaguauucc

SEQ ID NO: 173110 - RNA, 22 nt, Human
ggguggcacugauaaugagacg

SEQ ID NO: 173111 - RNA, 22 nt, Human
uuauuuuaccuuccucugagcu

SEQ ID NO: 173112 - RNA, 22 nt, Human
ugcagguggacacgggagacgg

SEQ ID NO: 173113 - RNA, 22 nt, Human
cagaguguuucuuugggugggu

SEQ ID NO: 173114 - RNA, 21 nt, Human
gggugggguuccagccuuuuc

SEQ ID NO: 173115 - RNA, 23 nt, Human
uuuuccagaaucgacucuguaga

SEQ ID NO: 173116 - RNA, 22 nt, Human
ucagggcaaaagggaaaccauu

SEQ ID NO: 173117 - RNA, 20 nt, Human
ggggcagguuuuuauggcua

SEQ ID NO: 173118 - RNA, 21 nt, Human
acuguucaucuguucagaagc

SEQ ID NO: 173119 - RNA, 22 nt, Human
aggcaggcccucuggaaaggua

SEQ ID NO: 173120 - RNA, 22 nt, Human
auucuuaauugccaugcuguau

SEQ ID NO: 173121 - RNA, 22 nt, Human
uggcuggagagggucccaugag

SEQ ID NO: 173122 - RNA, 22 nt, Human
ggggugugaguagagcugggga

SEQ ID NO: 173123 - RNA, 22 nt, Human
aacaguaaagacagaauuuauc

SEQ ID NO: 173124 - RNA, 22 nt, Human
uucauauaaauggaaucagaau

SEQ ID NO: 173125 - RNA, 22 nt, Human
cugggugaauuugaaggaaagg

SEQ ID NO: 173126 - RNA, 22 nt, Human
cugcaucaguggauaugauggu

SEQ ID NO: 173127 - RNA, 22 nt, Human
ucagagaguccuggucauuugc

SEQ ID NO: 173128 - RNA, 22 nt, Human
ucagacagggcuucucaaacuu

SEQ ID NO: 173129 - RNA, 22 nt, Human
auguguuuguaccuuuaaauau

SEQ ID NO: 173130 - RNA, 22 nt, Human
uugcuguaaguaucuuucuacc

SEQ ID NO: 173131 - RNA, 22 nt, Human
uucuucuugucugcccucacau

SEQ ID NO: 173132 - RNA, 23 nt, Human
uguuuuucauucacaugggcugu

SEQ ID NO: 173133 - RNA, 22 nt, Human
aaugaaaauuggacccuagaac

SEQ ID NO: 173134 - RNA, 21 nt, Human
agguggucugcagcagcugaa

SEQ ID NO: 173135 - RNA, 22 nt, Human
uauagacaagcguaacaagaag

SEQ ID NO: 173136 - RNA, 22 nt, Human
caaauagugucacauugugagg

SEQ ID NO: 173137 - RNA, 22 nt, Human
cagaaucagcccuugcuauuaa

SEQ ID NO: 173138 - RNA, 22 nt, Human
cagauaaaggcuuacuaguagu

SEQ ID NO: 173139 - RNA, 22 nt, Human
uuauucagucugucuagggagu

SEQ ID NO: 173140 - RNA, 22 nt, Human
uucugggugcaacucuguucug

SEQ ID NO: 173141 - RNA, 22 nt, Human
aguaccaugcuuccugacuggu

SEQ ID NO: 173142 - RNA, 22 nt, Human
cuguccuggagggcauaggacg

SEQ ID NO: 173143 - RNA, 22 nt, Human
caacuuugugugaccuagauag

SEQ ID NO: 173144 - RNA, 22 nt, Human
uuggaggaaauugcuuuugugg

SEQ ID NO: 173145 - RNA, 22 nt, Human
agauggucugguuauuuuuagu

SEQ ID NO: 173146 - RNA, 22 nt, Human
aaucuucauuuugacaagauuc

SEQ ID NO: 173147 - RNA, 22 nt, Human
uguucagagacagaaauucuaa

SEQ ID NO: 173148 - RNA, 18 nt, Human
ugaccugcgcuucacggu

SEQ ID NO: 173149 - RNA, 22 nt, Human
uucugugauugacauguggcuu

SEQ ID NO: 173150 - RNA, 22 nt, Human
ggacauuugcaccuaccucagc

SEQ ID NO: 173151 - RNA, 22 nt, Human
uggcaggguggcaacuuuuggu

SEQ ID NO: 173152 - RNA, 22 nt, Human
auguaacacccacuuuuauagc

SEQ ID NO: 173153 - RNA, 22 nt, Human
uacauguauguguacgugcaug

SEQ ID NO: 173154 - RNA, 22 nt, Human
cucuucuugcuagacugagugc

SEQ ID NO: 173155 - RNA, 22 nt, Human
aagaacuuccuaauauauuuuc

SEQ ID NO: 173156 - RNA, 19 nt, Human
guucaaacacugauucagc

SEQ ID NO: 173157 - RNA, 17 nt, Human
gaauuucuuggucaaaa

SEQ ID NO: 173158 - RNA, 22 nt, Human
ugucccuggagcuucugucccc

SEQ ID NO: 173159 - RNA, 22 nt, Human
gguguccuacagggccgcaggc

SEQ ID NO: 173160 - RNA, 20 nt, Human
gagggcaggcacccauuuca

SEQ ID NO: 173161 - RNA, 22 nt, Human
cagaggcugccagccaugugca

SEQ ID NO: 173162 - RNA, 22 nt, Human
cuccuucuccucgggaggccag

SEQ ID NO: 173163 - RNA, 23 nt, Human
uuaagacuggcugaacuuaguag

SEQ ID NO: 173164 - RNA, 18 nt, Human
gaaagccaugcagcagug

SEQ ID NO: 173165 - RNA, 22 nt, Human
ucuuaaaccacaaaauucagag

SEQ ID NO: 173166 - RNA, 22 nt, Human
augcuuuaaacuauaaauccac

SEQ ID NO: 173167 - RNA, 17 nt, Human
ggcaggugcggggccgc

SEQ ID NO: 173168 - RNA, 22 nt, Human
gaagccucaacaucucugcguc

SEQ ID NO: 173169 - RNA, 21 nt, Human
agcuuacauuaccauuguugc

SEQ ID NO: 173170 - RNA, 22 nt, Human
uaaucugaagaaacaggacuug

SEQ ID NO: 173171 - RNA, 22 nt, Human
acuguucacuagugaggguuga

SEQ ID NO: 173172 - RNA, 22 nt, Human
caggaaagaaaugagaacacca

SEQ ID NO: 173173 - RNA, 22 nt, Human
cagcuuauucaguaagcacaua

SEQ ID NO: 173174 - RNA, 22 nt, Human
cagggccagcgcccaggcccag

SEQ ID NO: 173175 - RNA, 22 nt, Human
aaugggauaauuguucauggga

SEQ ID NO: 173176 - RNA, 22 nt, Human
gcaggcaguuauuuaguagaau

SEQ ID NO: 173177 - RNA, 20 nt, Human
uccaggcagacagcuauggg

SEQ ID NO: 173178 - RNA, 22 nt, Human
gggaccugcgccacucacuguc

SEQ ID NO: 173179 - RNA, 22 nt, Human
aaguguauauaugacuuauaaa

SEQ ID NO: 173180 - RNA, 22 nt, Human
cuugaaucuucugaguauuugc

SEQ ID NO: 173181 - RNA, 22 nt, Human
gcagguguggguggcugccagg

SEQ ID NO: 173182 - RNA, 22 nt, Human
uccuguuuaucugugugacucg

SEQ ID NO: 173183 - RNA, 22 nt, Human
cugcaaaaguaauugcagguuu

SEQ ID NO: 173184 - RNA, 22 nt, Human
aggauuuauuccagaaaugcaa

SEQ ID NO: 173185 - RNA, 22 nt, Human
acagccaggaggaacucaguga

SEQ ID NO: 173186 - RNA, 22 nt, Human
acugugagugauuuccuucugg

SEQ ID NO: 173187 - RNA, 22 nt, Human
aggaggaaaaaggccacagcaa

SEQ ID NO: 173188 - RNA, 22 nt, Human
ccaggugucuguggccagcccu

SEQ ID NO: 173189 - RNA, 22 nt, Human
uucauaguguuuccuuccagug

SEQ ID NO: 173190 - RNA, 22 nt, Human
ucuucacaggagccugccugcc

SEQ ID NO: 173191 - RNA, 22 nt, Human
cuggguguucacccgaggcgcu

SEQ ID NO: 173192 - RNA, 22 nt, Human
gauugcugugcgccccaggugu

SEQ ID NO: 173193 - RNA, 22 nt, Human
uuugcaaauauguguuucuauu

SEQ ID NO: 173194 - RNA, 22 nt, Human
acuguccuggagcucacacucu

SEQ ID NO: 173195 - RNA, 22 nt, Human
aaguaaauaucuguuuauagca

SEQ ID NO: 173196 - RNA, 22 nt, Human
ugucuggggaacugugcaucca

SEQ ID NO: 173197 - RNA, 22 nt, Human
acuugguugaugucauaagguu

SEQ ID NO: 173198 - RNA, 18 nt, Human
cuuuaugugcagagcuuu

SEQ ID NO: 173199 - RNA, 22 nt, Human
accaugaugcauccuuaaggaa

SEQ ID NO: 173200 - RNA, 22 nt, Human
auacacauguguaugugcaugc

SEQ ID NO: 173201 - RNA, 22 nt, Human
cagcuuuagagaaaacauauuu

SEQ ID NO: 173202 - RNA, 22 nt, Human
acaacaaagacacuugaaauga

SEQ ID NO: 173203 - RNA, 22 nt, Human
cagggcaggaugcugugauuau

SEQ ID NO: 173204 - RNA, 22 nt, Human
gaaaacuaacggaaaaguuagg

SEQ ID NO: 173205 - RNA, 22 nt, Human
agaauuucaaauggaaguuuua

SEQ ID NO: 173206 - RNA, 22 nt, Human
aggcagguuuacucuuauuugg

SEQ ID NO: 173207 - RNA, 22 nt, Human
ccauggcuuuugagucucaaga

SEQ ID NO: 173208 - RNA, 22 nt, Human
ugcaguggaaagacucagacuu

SEQ ID NO: 173209 - RNA, 21 nt, Human
uuauugagacauuuguggaaa

SEQ ID NO: 173210 - RNA, 22 nt, Human
acagugugugcuuucccuuacg

SEQ ID NO: 173211 - RNA, 22 nt, Human
aaauugaaugauuaagugguga

SEQ ID NO: 173212 - RNA, 23 nt, Human
ugacagaccuucccagacaguca

SEQ ID NO: 173213 - RNA, 22 nt, Human
agccauucauugugcucucaga

SEQ ID NO: 173214 - RNA, 22 nt, Human
gcaugcaguaaaauucagcaac

SEQ ID NO: 173215 - RNA, 22 nt, Human
uacauaauugucuuuguccuca

SEQ ID NO: 173216 - RNA, 17 nt, Human
ugcuuaauuuugacugg

SEQ ID NO: 173217 - RNA, 22 nt, Human
uggcauuugggcuggcuuuucu

SEQ ID NO: 173218 - RNA, 18 nt, Human
uggcagguccagcugugg

SEQ ID NO: 173219 - RNA, 22 nt, Human
gccuaauaacuagcuguguaac

SEQ ID NO: 173220 - RNA, 22 nt, Human
gugugucccuccucuccugagu

SEQ ID NO: 173221 - RNA, 22 nt, Human
accaggcacuccugaggucuga

SEQ ID NO: 173222 - RNA, 22 nt, Human
aacauuucagcaaauaagaaca

SEQ ID NO: 173223 - RNA, 22 nt, Human
cugugucccccucagccaggug

SEQ ID NO: 173224 - RNA, 22 nt, Human
guuccaaauuuggaucuuuagg

SEQ ID NO: 173225 - RNA, 20 nt, Human
cugaagagacuggaggggca

SEQ ID NO: 173226 - RNA, 22 nt, Human
uguuucugucuguuuucuacau

SEQ ID NO: 173227 - RNA, 22 nt, Human
uuaacauacaucaugaacaaug

SEQ ID NO: 173228 - RNA, 22 nt, Human
uguccuuuacugauugcuucug

SEQ ID NO: 173229 - RNA, 20 nt, Human
uuugcgaggccaaggcgggc

SEQ ID NO: 173230 - RNA, 22 nt, Human
auucagcaaugagcuuggauuu

SEQ ID NO: 173231 - RNA, 20 nt, Human
ccuucuccagcuuguucuug

SEQ ID NO: 173232 - RNA, 22 nt, Human
aguuacagugaccauuuauuua

SEQ ID NO: 173233 - RNA, 22 nt, Human
ccacaagaugcaaacucuaaca

SEQ ID NO: 173234 - RNA, 22 nt, Human
aaagcagucacuccagugugau

SEQ ID NO: 173235 - RNA, 21 nt, Human
agccugcaauguagguaccgg

SEQ ID NO: 173236 - RNA, 22 nt, Human
uuguaaagcugauuagaaagcc

SEQ ID NO: 173237 - RNA, 22 nt, Human
gucacuuuacacuccuacuaaa

SEQ ID NO: 173238 - RNA, 22 nt, Human
ucucuucauagugacacccauc

SEQ ID NO: 173239 - RNA, 22 nt, Human
aaacuuuguucgucugaugugg

SEQ ID NO: 173240 - RNA, 22 nt, Human
cagagcauaauugacaugaggu

SEQ ID NO: 173241 - RNA, 22 nt, Human
agagggcugccucagucagcua

SEQ ID NO: 173242 - RNA, 22 nt, Human
cagaacagacuuaacagggcug

SEQ ID NO: 173243 - RNA, 22 nt, Human
gagggcuccacacgggcccagc

SEQ ID NO: 173244 - RNA, 22 nt, Human
uagucaccucuuuaaauguccu

SEQ ID NO: 173245 - RNA, 22 nt, Human
ccagcuuucugggugguuucug

SEQ ID NO: 173246 - RNA, 22 nt, Human
acauuuuaauaugcuuagugug

SEQ ID NO: 173247 - RNA, 22 nt, Human
uuccuuucccucacagccucgg

SEQ ID NO: 173248 - RNA, 22 nt, Human
aacuuuguguguuuaauauggc

SEQ ID NO: 173249 - RNA, 22 nt, Human
cccaguuucaacuuuccagugg

SEQ ID NO: 173250 - RNA, 22 nt, Human
ucacagaagaugcuggauguug

SEQ ID NO: 173251 - RNA, 22 nt, Human
auuaauauacacuguuagcaug

SEQ ID NO: 173252 - RNA, 18 nt, Human
uuucacaaccuccagagg

SEQ ID NO: 173253 - RNA, 17 nt, Human
ggcaggugacagacacc

SEQ ID NO: 173254 - RNA, 21 nt, Human
auacacauacacauaaaugug

SEQ ID NO: 173255 - RNA, 22 nt, Human
ugagcauuggaucaaaugacuu

SEQ ID NO: 173256 - RNA, 21 nt, Human
gcuauacagaauggccagagg

SEQ ID NO: 173257 - RNA, 22 nt, Human
agaaggaagccaggagggugca

SEQ ID NO: 173258 - RNA, 22 nt, Human
uuuuaccugaaccacacaguau

SEQ ID NO: 173259 - RNA, 22 nt, Human
ucagaauucagagggagugggg

SEQ ID NO: 173260 - RNA, 22 nt, Human
accaggcaacugugaaugggcu

SEQ ID NO: 173261 - RNA, 22 nt, Human
ugcuggcuggagugccucugga

SEQ ID NO: 173262 - RNA, 22 nt, Human
aaggcuuuaugugaccaaaaga

SEQ ID NO: 173263 - RNA, 22 nt, Human
uauuagggaacugcaagacuaa

SEQ ID NO: 173264 - RNA, 22 nt, Human
uuaaauuuuagaaacagacucu

SEQ ID NO: 173265 - RNA, 22 nt, Human
aguguccucaggcuuuguuccu

SEQ ID NO: 173266 - RNA, 22 nt, Human
gauuguaauuuucaagagguaa

SEQ ID NO: 173267 - RNA, 22 nt, Human
ugcuggagaucauuaauguuca

SEQ ID NO: 173268 - RNA, 22 nt, Human
auguaauaggguaacauaacau

SEQ ID NO: 173269 - RNA, 22 nt, Human
aaaucaguuaagaugaggccau

SEQ ID NO: 173270 - RNA, 22 nt, Human
ugguaucguguuggcacucagu

SEQ ID NO: 173271 - RNA, 22 nt, Human
ucuguucauaguaguguauaug

SEQ ID NO: 173272 - RNA, 22 nt, Human
uugcugaugguauuaugcuagu

SEQ ID NO: 173273 - RNA, 22 nt, Human
cacccaggcagguggcugagaa

SEQ ID NO: 173274 - RNA, 22 nt, Human
caggugucggucaggcgguuuu

SEQ ID NO: 173275 - RNA, 22 nt, Human
uuccuucuccagaacuucuagg

SEQ ID NO: 173276 - RNA, 22 nt, Human
uacccagcccaugccuaccuca

SEQ ID NO: 173277 - RNA, 22 nt, Human
gagucaccuuggccgcuguccc

SEQ ID NO: 173278 - RNA, 22 nt, Human
gaggcuggcagaaaagcacagg

SEQ ID NO: 173279 - RNA, 22 nt, Human
auaugaaaagaagucaccauug

SEQ ID NO: 173280 - RNA, 22 nt, Human
ucuggcuccacaccucacugca

SEQ ID NO: 173281 - RNA, 22 nt, Human
uaguccuugcugggcacagagu

SEQ ID NO: 173282 - RNA, 22 nt, Human
gcugggucucuggguguaacaa

SEQ ID NO: 173283 - RNA, 22 nt, Human
guuuucugauuagcaaaucuga

SEQ ID NO: 173284 - RNA, 22 nt, Human
agaccuggauuccaauccuacc

SEQ ID NO: 173285 - RNA, 22 nt, Human
aaugguuugauggacaaaauga

SEQ ID NO: 173286 - RNA, 20 nt, Human
gauguguccucagcaguggu

SEQ ID NO: 173287 - RNA, 22 nt, Human
agaauuguucuguagcuuggcu

SEQ ID NO: 173288 - RNA, 22 nt, Human
cagacagggaccucgcuccaga

SEQ ID NO: 173289 - RNA, 22 nt, Human
uuacagaaagguugugggauag

SEQ ID NO: 173290 - RNA, 22 nt, Human
uugaaagacuucuccugugaaa

SEQ ID NO: 173291 - RNA, 23 nt, Human
cauuucaacgaauuuuccuucug

SEQ ID NO: 173292 - RNA, 22 nt, Human
cagggcucaggaaaucagacgu

SEQ ID NO: 173293 - RNA, 22 nt, Human
ugguggggccagacuucagcuc

SEQ ID NO: 173294 - RNA, 22 nt, Human
guccugguuuucacagaccuuu

SEQ ID NO: 173295 - RNA, 22 nt, Human
uuuccaagacuccaguucuccc

SEQ ID NO: 173296 - RNA, 22 nt, Human
uaucagaaggcacauggagucu

SEQ ID NO: 173297 - RNA, 22 nt, Human
agauuuccuaugguaauuauag

SEQ ID NO: 173298 - RNA, 22 nt, Human
gacauaauaaucugaccuagau

SEQ ID NO: 173299 - RNA, 22 nt, Human
uguuuaauaauucuaugauagu

SEQ ID NO: 173300 - RNA, 22 nt, Human
cuacauaaauauuuaugugucu

SEQ ID NO: 173301 - RNA, 22 nt, Human
gguuacauggaagaaauauaau

SEQ ID NO: 173302 - RNA, 22 nt, Human
uucagaaagguaaauggauuuc

SEQ ID NO: 173303 - RNA, 22 nt, Human
cacccagcagcacuuaagacua

SEQ ID NO: 173304 - RNA, 22 nt, Human
aaacuuuggauugugauugugc

SEQ ID NO: 173305 - RNA, 22 nt, Human
uagguggugggauaugagcauc

SEQ ID NO: 173306 - RNA, 22 nt, Human
gauuucaaagguucugcaugcc

SEQ ID NO: 173307 - RNA, 22 nt, Human
acaaauguggacauggauaaug

SEQ ID NO: 173308 - RNA, 22 nt, Human
acagaugauuuuuaugaaaaca

SEQ ID NO: 173309 - RNA, 20 nt, Human
uuucacagucccuguuuccu

SEQ ID NO: 173310 - RNA, 22 nt, Human
aauggcuggguuucauuuugua

SEQ ID NO: 173311 - RNA, 22 nt, Human
ucagggacugcagagggaagcu

SEQ ID NO: 173312 - RNA, 22 nt, Human
gauaucauaucagacaaccucu

SEQ ID NO: 173313 - RNA, 22 nt, Human
guccaaauuuuucacauguaga

SEQ ID NO: 173314 - RNA, 22 nt, Human
aaauccuaaugacaaguuuagu

SEQ ID NO: 173315 - RNA, 22 nt, Human
ggagagguguauucaguggguc

SEQ ID NO: 173316 - RNA, 22 nt, Human
uuguuucaaauauuucagaaua

SEQ ID NO: 173317 - RNA, 22 nt, Human
uaaaguuuggcagacaauaaca

SEQ ID NO: 173318 - RNA, 19 nt, Human
gcaucagagcagaaggggu

SEQ ID NO: 173319 - RNA, 22 nt, Human
cauacuuucuuuuucacgcaua

SEQ ID NO: 173320 - RNA, 22 nt, Human
auuucacaucuaucucagauuu

SEQ ID NO: 173321 - RNA, 21 nt, Human
ucauuugugaucugauuucca

SEQ ID NO: 173322 - RNA, 22 nt, Human
agucaaaugaguaaauauauaa

SEQ ID NO: 173323 - RNA, 22 nt, Human
uuauuauuccccaagucauuau

SEQ ID NO: 173324 - RNA, 22 nt, Human
uuagacaagggcuccuuaaaag

SEQ ID NO: 173325 - RNA, 22 nt, Human
ucagguguggaccgaggucaga

SEQ ID NO: 173326 - RNA, 22 nt, Human
ccuguucacgguguguuguuag

SEQ ID NO: 173327 - RNA, 22 nt, Human
cauuucaauuauuugcucuucu

SEQ ID NO: 173328 - RNA, 22 nt, Human
aguuauuucaguaacauaauag

SEQ ID NO: 173329 - RNA, 22 nt, Human
ucccugggcuucuccagacuug

SEQ ID NO: 173330 - RNA, 22 nt, Human
agguguccaauccugguuggau

SEQ ID NO: 173331 - RNA, 22 nt, Human
ggggcaggagguguucucuuuu

SEQ ID NO: 173332 - RNA, 22 nt, Human
ggagcugaaggggugggcucag

SEQ ID NO: 173333 - RNA, 22 nt, Human
uuccuucuagcccaaguauugg

SEQ ID NO: 173334 - RNA, 20 nt, Human
cguguccuuggcgggagagc

SEQ ID NO: 173335 - RNA, 22 nt, Human
uagcuuuaauaagcugcugaau

SEQ ID NO: 173336 - RNA, 22 nt, Human
ucucccucauuccugcuuccau

SEQ ID NO: 173337 - RNA, 22 nt, Human
gcagguggggcugcuaccagaa

SEQ ID NO: 173338 - RNA, 22 nt, Human
ugaucugagagcagaucaccau

SEQ ID NO: 173339 - RNA, 22 nt, Human
auuugaauggcuuaacacaacg

SEQ ID NO: 173340 - RNA, 22 nt, Human
ugcauaaagugccauaguauua

SEQ ID NO: 173341 - RNA, 22 nt, Human
gcagguggugggggagccguuc

SEQ ID NO: 173342 - RNA, 22 nt, Human
uuucagauuaucucaacuuugg

SEQ ID NO: 173343 - RNA, 22 nt, Human
aaagaaggaugggagaaauccu

SEQ ID NO: 173344 - RNA, 22 nt, Human
ucagguguuuaaggauagugau

SEQ ID NO: 173345 - RNA, 22 nt, Human
ucuuuucuccagaccugggauc

SEQ ID NO: 173346 - RNA, 22 nt, Human
aaaacauguccauacagaaacu

SEQ ID NO: 173347 - RNA, 18 nt, Human
ucauagaagugaaucaga

SEQ ID NO: 173348 - RNA, 17 nt, Human
ugguggcuggagucagg

SEQ ID NO: 173349 - RNA, 22 nt, Human
uuacauuuugggguaaggauaa

SEQ ID NO: 173350 - RNA, 22 nt, Human
cagaucaagcuguauggucaga

SEQ ID NO: 173351 - RNA, 22 nt, Human
uuuauuagugcuuguaucacug

SEQ ID NO: 173352 - RNA, 22 nt, Human
cacauaauugaacgugaugagu

SEQ ID NO: 173353 - RNA, 22 nt, Human
ugggcaggauaauaucucaugu

SEQ ID NO: 173354 - RNA, 22 nt, Human
uaguuaacucuugguaauaggu

SEQ ID NO: 173355 - RNA, 22 nt, Human
ggcaggcacugugcuaggcgcu

SEQ ID NO: 173356 - RNA, 22 nt, Human
agacaaauggaguaugagcaac

SEQ ID NO: 173357 - RNA, 22 nt, Human
gacuaugugaagugugaauagg

SEQ ID NO: 173358 - RNA, 21 nt, Human
gcaaguacuaucaucauuauc

SEQ ID NO: 173359 - RNA, 22 nt, Human
ucagccaguuuguuuauuccgg

SEQ ID NO: 173360 - RNA, 22 nt, Human
cccugcaggggaccugcagccu

SEQ ID NO: 173361 - RNA, 22 nt, Human
aaaaauugcugagaacggaauu

SEQ ID NO: 173362 - RNA, 22 nt, Human
gacaggugagaugaggaacacc

SEQ ID NO: 173363 - RNA, 22 nt, Human
accucaagugauccacucaccu

SEQ ID NO: 173364 - RNA, 22 nt, Human
ucuucuccaguucauccuacca

SEQ ID NO: 173365 - RNA, 21 nt, Human
gccugcaguuuugaagcccuu

SEQ ID NO: 173366 - RNA, 22 nt, Human
aggcagugagaaauagcaagau

SEQ ID NO: 173367 - RNA, 22 nt, Human
gccugcagauauauaggauggu

SEQ ID NO: 173368 - RNA, 22 nt, Human
cauuauugccagccauacugaa

SEQ ID NO: 173369 - RNA, 22 nt, Human
ucucugaagauauuuauuauua

SEQ ID NO: 173370 - RNA, 22 nt, Human
uuaguuauacuacugaauggag

SEQ ID NO: 173371 - RNA, 22 nt, Human
uuugcaguagacaucuuauuuu

SEQ ID NO: 173372 - RNA, 22 nt, Human
ugucccugccugcccacucugu

SEQ ID NO: 173373 - RNA, 22 nt, Human
uguguccucuuaccucugaccc

SEQ ID NO: 173374 - RNA, 22 nt, Human
acagucuacuugagcuuguaua

SEQ ID NO: 173375 - RNA, 22 nt, Human
auuacaguaacagcuacaaugc

SEQ ID NO: 173376 - RNA, 22 nt, Human
auauaauuguucugaaguguuu

SEQ ID NO: 173377 - RNA, 22 nt, Human
ggcuacuagacuuugauacuag

SEQ ID NO: 173378 - RNA, 22 nt, Human
aagcuuuaugaucucucagcua

SEQ ID NO: 173379 - RNA, 20 nt, Human
ccagcauguacacaugugga

SEQ ID NO: 173380 - RNA, 22 nt, Human
auucagcaguuccugcuucagu

SEQ ID NO: 173381 - RNA, 22 nt, Human
gcuuuauuuugugagggauuac

SEQ ID NO: 173382 - RNA, 22 nt, Human
guggaggaagggauucagacca

SEQ ID NO: 173383 - RNA, 22 nt, Human
auuccuucuuugagaauaagca

SEQ ID NO: 173384 - RNA, 22 nt, Human
uggcauuugcucccuuguguuc

SEQ ID NO: 173385 - RNA, 22 nt, Human
gauuuauugucccuguccugcu

SEQ ID NO: 173386 - RNA, 22 nt, Human
ugacaggugauugugaacuaag

SEQ ID NO: 173387 - RNA, 22 nt, Human
gcaccugcuggggcugaugaga

SEQ ID NO: 173388 - RNA, 22 nt, Human
ugacagacuacugccucuauug

SEQ ID NO: 173389 - RNA, 22 nt, Human
acagggcagagaggcaggcuug

SEQ ID NO: 173390 - RNA, 22 nt, Human
uacuaucucuucuaacuucaga

SEQ ID NO: 173391 - RNA, 22 nt, Human
uaauguaaacacagagacagaa

SEQ ID NO: 173392 - RNA, 22 nt, Human
uuauucugcacuuuuaaaauau

SEQ ID NO: 173393 - RNA, 22 nt, Human
gaaugaauucagcacauggaau

SEQ ID NO: 173394 - RNA, 22 nt, Human
ugacagacagcuucucauuuua

SEQ ID NO: 173395 - RNA, 22 nt, Human
cuuucccuuagccccauucuau

SEQ ID NO: 173396 - RNA, 22 nt, Human
augguuuacugaucuuuuuggu

SEQ ID NO: 173397 - RNA, 22 nt, Human
cauuuacauuuaagguuaauau

SEQ ID NO: 173398 - RNA, 22 nt, Human
cuucucccugggggcucuuuau

SEQ ID NO: 173399 - RNA, 19 nt, Human
gcagagugggguggagggu

SEQ ID NO: 173400 - RNA, 22 nt, Human
ugcuggaggauuaaacaaguca

SEQ ID NO: 173401 - RNA, 22 nt, Human
aguccuuugggaaaaaugacua

SEQ ID NO: 173402 - RNA, 22 nt, Human
ccagggcagccaacccagaugc

SEQ ID NO: 173403 - RNA, 22 nt, Human
uuugaauaaucacugggcauua

SEQ ID NO: 173404 - RNA, 22 nt, Human
gcaggugucuucauggaacucu

SEQ ID NO: 173405 - RNA, 22 nt, Human
gagggcucugucuggaagggaa

SEQ ID NO: 173406 - RNA, 23 nt, Human
cccugcagucagggugagauggu

SEQ ID NO: 173407 - RNA, 22 nt, Human
acugaagaacgcaucagugguu

SEQ ID NO: 173408 - RNA, 21 nt, Human
ucagguggcagaguguuuaug

SEQ ID NO: 173409 - RNA, 22 nt, Human
gcuuuaaugcuucguggggcca

SEQ ID NO: 173410 - RNA, 22 nt, Human
uuccaggaaaacaguuggaagu

SEQ ID NO: 173411 - RNA, 22 nt, Human
cagugagggcccccuuccaggu

SEQ ID NO: 173412 - RNA, 22 nt, Human
gguguccuugcagaaggcggcg

SEQ ID NO: 173413 - RNA, 22 nt, Human
acagcuuuuaugggaccagcca

SEQ ID NO: 173414 - RNA, 22 nt, Human
uggcaaaguaauuggguuucuc

SEQ ID NO: 173415 - RNA, 22 nt, Human
gaaugaaagauuugcauucuau

SEQ ID NO: 173416 - RNA, 21 nt, Human
aagugguuuagguuaccgggg

SEQ ID NO: 173417 - RNA, 22 nt, Human
ugcagggaauccagucuagggu

SEQ ID NO: 173418 - RNA, 22 nt, Human
aaagugguuuuucagacuuuga

SEQ ID NO: 173419 - RNA, 22 nt, Human
auauugagauaagaacugacau

SEQ ID NO: 173420 - RNA, 22 nt, Human
uaaguccuagcuuugguaggaa

SEQ ID NO: 173421 - RNA, 22 nt, Human
ucuuagcacagcuauauaaguu

SEQ ID NO: 173422 - RNA, 22 nt, Human
ucaggugggcguuccggugcgg

SEQ ID NO: 173423 - RNA, 22 nt, Human
uugcugggcucuucaacacaca

SEQ ID NO: 173424 - RNA, 22 nt, Human
gggugggaucuguggagccuca

SEQ ID NO: 173425 - RNA, 22 nt, Human
gcuuuuggccagauggggaaac

SEQ ID NO: 173426 - RNA, 22 nt, Human
uuugcaauuugugcugcaaaug

SEQ ID NO: 173427 - RNA, 22 nt, Human
ggaccugccagaacucaggcua

SEQ ID NO: 173428 - RNA, 20 nt, Human
uugaagaggauauaucgcuc

SEQ ID NO: 173429 - RNA, 22 nt, Human
acagaaagauaggcacaagguc

SEQ ID NO: 173430 - RNA, 22 nt, Human
acuggaggggaaaaugguagua

SEQ ID NO: 173431 - RNA, 22 nt, Human
uuuaggcagaagcccugcugau

SEQ ID NO: 173432 - RNA, 22 nt, Human
aagagcauauuaauaguggaga

SEQ ID NO: 173433 - RNA, 22 nt, Human
uguccuuuaugaaaugguguuu

SEQ ID NO: 173434 - RNA, 22 nt, Human
cuaaaauuaucaagauaauucc

SEQ ID NO: 173435 - RNA, 22 nt, Human
cugcaggggcuggaguuggcuu

SEQ ID NO: 173436 - RNA, 22 nt, Human
uuuauugacccaaagcgagagu

SEQ ID NO: 173437 - RNA, 22 nt, Human
gaauuucagggucugguaggaa

SEQ ID NO: 173438 - RNA, 22 nt, Human
auucacuggcagacagaacuca

SEQ ID NO: 173439 - RNA, 22 nt, Human
cucagcaagauuaagcagcuug

SEQ ID NO: 173440 - RNA, 22 nt, Human
cagaucuagagcuuuuccaucu

SEQ ID NO: 173441 - RNA, 22 nt, Human
uaacaauaguguuugcuaguca

SEQ ID NO: 173442 - RNA, 22 nt, Human
cauuuguaguaucuguuuauau

SEQ ID NO: 173443 - RNA, 22 nt, Human
ucaggagcugcacugggcccac

SEQ ID NO: 173444 - RNA, 22 nt, Human
aggcaacuguuugauaauguug

SEQ ID NO: 173445 - RNA, 22 nt, Human
gccaggcauguccucugcagaa

SEQ ID NO: 173446 - RNA, 22 nt, Human
acaugcauaggagaagucuuua

SEQ ID NO: 173447 - RNA, 22 nt, Human
ucaucaguuuagaaaaaauaug

SEQ ID NO: 173448 - RNA, 22 nt, Human
ucagaauucuacaauagaucag

SEQ ID NO: 173449 - RNA, 21 nt, Human
cagcuucuucugugaccuggu

SEQ ID NO: 173450 - RNA, 22 nt, Human
aucuaacagcaacaccagaaua

SEQ ID NO: 173451 - RNA, 22 nt, Human
auuaaacugagcaaauuaacau

SEQ ID NO: 173452 - RNA, 22 nt, Human
uauaauuuaucaugucacaguu

SEQ ID NO: 173453 - RNA, 22 nt, Human
acuguacugaaaaguaagcaag

SEQ ID NO: 173454 - RNA, 22 nt, Human
aguaaaauuaauggaucagaag

SEQ ID NO: 173455 - RNA, 22 nt, Human
cuguucauggaaaaauaguugg

SEQ ID NO: 173456 - RNA, 22 nt, Human
aaucaagaaaaugaggauucuu

SEQ ID NO: 173457 - RNA, 18 nt, Human
ucccuucucccuugccuc

SEQ ID NO: 173458 - RNA, 20 nt, Human
aggguggcaaguuagugaca

SEQ ID NO: 173459 - RNA, 22 nt, Human
aagcagacagagaauggguuug

SEQ ID NO: 173460 - RNA, 22 nt, Human
cagggcucaucugugugaccag

SEQ ID NO: 173461 - RNA, 22 nt, Human
aauucuugguccuaguguauaa

SEQ ID NO: 173462 - RNA, 22 nt, Human
auuuauuaugggauuuggcaca

SEQ ID NO: 173463 - RNA, 22 nt, Human
cuggaggcaguugccccaguca

SEQ ID NO: 173464 - RNA, 22 nt, Human
acuuucaugcucugagcacugg

SEQ ID NO: 173465 - RNA, 22 nt, Human
ugcaaaaagagcgaggagcccu

SEQ ID NO: 173466 - RNA, 22 nt, Human
ggcaggcaguguggugugaaac

SEQ ID NO: 173467 - RNA, 22 nt, Human
ugcuuuaaauaugaauuagcau

SEQ ID NO: 173468 - RNA, 22 nt, Human
uaucagaaacucuggggcaggg

SEQ ID NO: 173469 - RNA, 22 nt, Human
uuucacauguggaaugccaggu

SEQ ID NO: 173470 - RNA, 22 nt, Human
ucucaguguguuuucucucaga

SEQ ID NO: 173471 - RNA, 21 nt, Human
aggaggaacccguggcugggc

SEQ ID NO: 173472 - RNA, 22 nt, Human
ucagggcaaagggcagaguuug

SEQ ID NO: 173473 - RNA, 22 nt, Human
ucuuucaaugagcauucuuucc

SEQ ID NO: 173474 - RNA, 21 nt, Human
agaagcuagucacuaaaucca

SEQ ID NO: 173475 - RNA, 22 nt, Human
cucuaauccuuugucccugggu

SEQ ID NO: 173476 - RNA, 22 nt, Human
cagggcaguuugugccuaugag

SEQ ID NO: 173477 - RNA, 22 nt, Human
uacuuugaagacaauaucugga

SEQ ID NO: 173478 - RNA, 22 nt, Human
ugcauugauagaaaaacaugga

SEQ ID NO: 173479 - RNA, 22 nt, Human
ugaagaauaaaugguugagacu

SEQ ID NO: 173480 - RNA, 14 nt, Human
gcagguggaucacu

SEQ ID NO: 173481 - RNA, 22 nt, Human
ggcaggugagagcucuuugaaa

SEQ ID NO: 173482 - RNA, 22 nt, Human
guucuucaggcugugcucuaga

SEQ ID NO: 173483 - RNA, 22 nt, Human
uuaauuacaaaacacauagguu

SEQ ID NO: 173484 - RNA, 22 nt, Human
ucagguguauugaugucuguga

SEQ ID NO: 173485 - RNA, 22 nt, Human
caggauggagggagggcuguua

SEQ ID NO: 173486 - RNA, 22 nt, Human
ugcagggcccucauuccugucc

SEQ ID NO: 173487 - RNA, 22 nt, Human
ucugggaacugagcuccccuag

SEQ ID NO: 173488 - RNA, 21 nt, Human
aagagcuggaucaaggauaag

SEQ ID NO: 173489 - RNA, 22 nt, Human
aucuuguuaaaaugcagaaacu

SEQ ID NO: 173490 - RNA, 22 nt, Human
uacagagauacucuagaucaaa

SEQ ID NO: 173491 - RNA, 22 nt, Human
cauuuauucaugaucuguagcu

SEQ ID NO: 173492 - RNA, 22 nt, Human
uaucacaucaauguuuuaaaau

SEQ ID NO: 173493 - RNA, 23 nt, Human
agagcaucaugaugcuaagucug

SEQ ID NO: 173494 - RNA, 22 nt, Human
uuucuacagcuggugcaacuuu

SEQ ID NO: 173495 - RNA, 22 nt, Human
cauguuaaaauauacauucuga

SEQ ID NO: 173496 - RNA, 22 nt, Human
uuaagucaauaucaaucucagc

SEQ ID NO: 173497 - RNA, 22 nt, Human
uccuggcucugcugccuccuag

SEQ ID NO: 173498 - RNA, 20 nt, Human
uguaggaaggacccugucug

SEQ ID NO: 173499 - RNA, 22 nt, Human
uaauuauuaugacaacaauugc

SEQ ID NO: 173500 - RNA, 22 nt, Human
uuacagaaggaacacuacucag

SEQ ID NO: 173501 - RNA, 22 nt, Human
ggcaggcaagucugcucuguga

SEQ ID NO: 173502 - RNA, 22 nt, Human
ucuuuaauguacuuucuuucac

SEQ ID NO: 173503 - RNA, 22 nt, Human
cccaggcaucccauuaaggagc

SEQ ID NO: 173504 - RNA, 22 nt, Human
caugcaggaggaaaaagcagcu

SEQ ID NO: 173505 - RNA, 22 nt, Human
cagggcucuuccggagcaggga

SEQ ID NO: 173506 - RNA, 22 nt, Human
aucauguguaauuucaagcuac

SEQ ID NO: 173507 - RNA, 22 nt, Human
uuugaacaggaguaucuauagu

SEQ ID NO: 173508 - RNA, 22 nt, Human
auguuauuaaaguacagauucu

SEQ ID NO: 173509 - RNA, 22 nt, Human
caggauggucuucauuuggcuc

SEQ ID NO: 173510 - RNA, 22 nt, Human
agaagugagugugacucagcag

SEQ ID NO: 173511 - RNA, 22 nt, Human
gggaacagagugccagacugac

SEQ ID NO: 173512 - RNA, 22 nt, Human
ccuguucauuuguauuugucuu

SEQ ID NO: 173513 - RNA, 22 nt, Human
uuccuuaguguuagauucugug

SEQ ID NO: 173514 - RNA, 22 nt, Human
uuugacucuugcccaguuuggc

SEQ ID NO: 173515 - RNA, 22 nt, Human
aagugcuguuucugaugaaugc

SEQ ID NO: 173516 - RNA, 22 nt, Human
gguggggcuaggaccucaggau

SEQ ID NO: 173517 - RNA, 22 nt, Human
ggcaggugaggcaugugccugg

SEQ ID NO: 173518 - RNA, 22 nt, Human
aauuuacaggugcacucgccau

SEQ ID NO: 173519 - RNA, 22 nt, Human
gaauugcuaauccaagugacug

SEQ ID NO: 173520 - RNA, 22 nt, Human
caguauuuauggcuugaguauu

SEQ ID NO: 173521 - RNA, 22 nt, Human
uuaaugauaccuauguuaauuu

SEQ ID NO: 173522 - RNA, 22 nt, Human
ccagacaggaacacacaucucc

SEQ ID NO: 173523 - RNA, 22 nt, Human
gaagaaucugaggacagucauu

SEQ ID NO: 173524 - RNA, 22 nt, Human
ugucagagcaaggccaggccag

SEQ ID NO: 173525 - RNA, 18 nt, Human
aucuuuccauagcauguu

SEQ ID NO: 173526 - RNA, 22 nt, Human
uuuguacauauauaaaaucugu

SEQ ID NO: 173527 - RNA, 22 nt, Human
uauaaaugcacuuuugaaauau

SEQ ID NO: 173528 - RNA, 21 nt, Human
ugaaagaaggugcagucugaa

SEQ ID NO: 173529 - RNA, 20 nt, Human
ccagguggugccuggagagg

SEQ ID NO: 173530 - RNA, 22 nt, Human
ugcuuuauggauuuguguccug

SEQ ID NO: 173531 - RNA, 22 nt, Human
uccaggcaaaaaccaacuacag

SEQ ID NO: 173532 - RNA, 22 nt, Human
guucuucacauuucauugagga

SEQ ID NO: 173533 - RNA, 22 nt, Human
cugcccucgggcccucccauag

SEQ ID NO: 173534 - RNA, 22 nt, Human
uucauucuuauuugugaucugg

SEQ ID NO: 173535 - RNA, 22 nt, Human
ugcugauuuugccuacugaucc

SEQ ID NO: 173536 - RNA, 22 nt, Human
uuugacucccaaacugugauuu

SEQ ID NO: 173537 - RNA, 22 nt, Human
acugcacuucacccugggugac

SEQ ID NO: 173538 - RNA, 22 nt, Human
aguaaacauuuucauauuuucu

SEQ ID NO: 173539 - RNA, 23 nt, Human
acagggcauugcuggccucgagg

SEQ ID NO: 173540 - RNA, 22 nt, Human
gaagcacauggcugugagcaac

SEQ ID NO: 173541 - RNA, 22 nt, Human
aacagacaacuccuguggcuca

SEQ ID NO: 173542 - RNA, 22 nt, Human
cuucuuccugcugcagccucca

SEQ ID NO: 173543 - RNA, 18 nt, Human
gcacuucacccagcuagu

SEQ ID NO: 173544 - RNA, 22 nt, Human
ugaucauuaucaaacuggucau

SEQ ID NO: 173545 - RNA, 22 nt, Human
ugacuucaagguucagcaccuu

SEQ ID NO: 173546 - RNA, 22 nt, Human
uucauuccuucccuaagcaacu

SEQ ID NO: 173547 - RNA, 22 nt, Human
uucccaguuagucauuuuuaca

SEQ ID NO: 173548 - RNA, 21 nt, Human
acucaggagacuaacuauguc

SEQ ID NO: 173549 - RNA, 22 nt, Human
cccaugagaccugguuuaaggc

SEQ ID NO: 173550 - RNA, 22 nt, Human
gucugcccucacaugcacucuu

SEQ ID NO: 173551 - RNA, 22 nt, Human
ggcuuuaugcacagcagauggu

SEQ ID NO: 173552 - RNA, 22 nt, Human
gggcagggguagcauuccaagu

SEQ ID NO: 173553 - RNA, 22 nt, Human
aguuggagugaacaugagauug

SEQ ID NO: 173554 - RNA, 22 nt, Human
ggcaggcaaggcagccugguga

SEQ ID NO: 173555 - RNA, 22 nt, Human
uggauuuaauggaugaggggca

SEQ ID NO: 173556 - RNA, 22 nt, Human
ugcuggaggaguuuacuguggc

SEQ ID NO: 173557 - RNA, 22 nt, Human
cacauacuuguguguacauaug

SEQ ID NO: 173558 - RNA, 22 nt, Human
uauacagauggaaagauacaca

SEQ ID NO: 173559 - RNA, 22 nt, Human
auacacauauguguguauaugu

SEQ ID NO: 173560 - RNA, 22 nt, Human
gaaggcaucacagaggcugugg

SEQ ID NO: 173561 - RNA, 22 nt, Human
cuuccuucugaagcauagaagc

SEQ ID NO: 173562 - RNA, 22 nt, Human
aauugcuuugaagaagggagcg

SEQ ID NO: 173563 - RNA, 22 nt, Human
accuuauuuugaaauagauugu

SEQ ID NO: 173564 - RNA, 22 nt, Human
guucuuaagaccacaauaaaaa

SEQ ID NO: 173565 - RNA, 22 nt, Human
ucuuccucaugaauucucguau

SEQ ID NO: 173566 - RNA, 22 nt, Human
ucccacaggagccugaguccca

SEQ ID NO: 173567 - RNA, 22 nt, Human
uuggaggaugucggcauauuua

SEQ ID NO: 173568 - RNA, 20 nt, Human
cugcaggguuagaggcucca

SEQ ID NO: 173569 - RNA, 22 nt, Human
cauauaaauacaacauguguua

SEQ ID NO: 173570 - RNA, 22 nt, Human
acuuagauaacaaaccuguggu

SEQ ID NO: 173571 - RNA, 22 nt, Human
uuccuuucccuugcuucugugc

SEQ ID NO: 173572 - RNA, 22 nt, Human
ugcaggugacaccacucuuccu

SEQ ID NO: 173573 - RNA, 22 nt, Human
cucagcaacccacacacggucu

SEQ ID NO: 173574 - RNA, 22 nt, Human
cagaaagaccugauuggcaguu

SEQ ID NO: 173575 - RNA, 22 nt, Human
aaguccuuaggaagcagucguu

SEQ ID NO: 173576 - RNA, 22 nt, Human
agggacuugaugucagggagau

SEQ ID NO: 173577 - RNA, 22 nt, Human
augacaggaggcagcugggcag

SEQ ID NO: 173578 - RNA, 22 nt, Human
uuccuucuggaggcuccagggg

SEQ ID NO: 173579 - RNA, 22 nt, Human
ggcaggugacggggaugaguau

SEQ ID NO: 173580 - RNA, 22 nt, Human
uauugguaggacucagcugaga

SEQ ID NO: 173581 - RNA, 22 nt, Human
guuauugagacauagaguuaug

SEQ ID NO: 173582 - RNA, 22 nt, Human
ggcagggaguggagacucccua

SEQ ID NO: 173583 - RNA, 19 nt, Human
agcugcagaccagaagugc

SEQ ID NO: 173584 - RNA, 22 nt, Human
uuuaauuuguauuucuagaggg

SEQ ID NO: 173585 - RNA, 22 nt, Human
gagauuuagagagacuuaaaca

SEQ ID NO: 173586 - RNA, 22 nt, Human
aauuccaaauguuuucaaucca

SEQ ID NO: 173587 - RNA, 22 nt, Human
aauuuccagaccccauccacag

SEQ ID NO: 173588 - RNA, 22 nt, Human
cagcuugugcaaagguccuggg

SEQ ID NO: 173589 - RNA, 22 nt, Human
ucuguucagacacuuuacaugu

SEQ ID NO: 173590 - RNA, 22 nt, Human
cagcuuuaccaauauuuggaaa

SEQ ID NO: 173591 - RNA, 22 nt, Human
accugcagcugagaaaaugacu

SEQ ID NO: 173592 - RNA, 22 nt, Human
gauuuucauuugcacucuagaa

SEQ ID NO: 173593 - RNA, 22 nt, Human
cacauguguauaugugaggggg

SEQ ID NO: 173594 - RNA, 22 nt, Human
ccugggugacagagugagaccu

SEQ ID NO: 173595 - RNA, 22 nt, Human
gguccuuugccaucucuccacc

SEQ ID NO: 173596 - RNA, 22 nt, Human
aacaucuacuaagugccaggca

SEQ ID NO: 173597 - RNA, 22 nt, Human
aauuucaaguggcaucuuugau

SEQ ID NO: 173598 - RNA, 22 nt, Human
ucugucccugagagcucaggag

SEQ ID NO: 173599 - RNA, 22 nt, Human
ccagggcagcgccccuccacgc

SEQ ID NO: 173600 - RNA, 22 nt, Human
uuuccaaauaaggucacacuca

SEQ ID NO: 173601 - RNA, 22 nt, Human
aagauauagauaaaacuaugca

SEQ ID NO: 173602 - RNA, 22 nt, Human
aaucagaauuuauugaaucuuu

SEQ ID NO: 173603 - RNA, 22 nt, Human
aaaggcuggggacugaggaagg

SEQ ID NO: 173604 - RNA, 22 nt, Human
auuaguaguaguuagcagccuc

SEQ ID NO: 173605 - RNA, 22 nt, Human
caggcauaucuacauuauccaa

SEQ ID NO: 173606 - RNA, 22 nt, Human
aaagcaugauuagauagaugau

SEQ ID NO: 173607 - RNA, 22 nt, Human
ucuucuccagugcuucugcaca

SEQ ID NO: 173608 - RNA, 22 nt, Human
ugggaccugcuccuggaaugag

SEQ ID NO: 173609 - RNA, 20 nt, Human
uauuuacaacuuagagccuc

SEQ ID NO: 173610 - RNA, 22 nt, Human
uugcuuauagagaguuucauac

SEQ ID NO: 173611 - RNA, 20 nt, Human
ugcugagguugacaugccca

SEQ ID NO: 173612 - RNA, 22 nt, Human
auaaaauuugcuacuguuaaau

SEQ ID NO: 173613 - RNA, 22 nt, Human
uucagcaaauggacuguucagg

SEQ ID NO: 173614 - RNA, 22 nt, Human
uggcagguuggccuuugguuca

SEQ ID NO: 173615 - RNA, 22 nt, Human
cagggcucgcugccagcuucag

SEQ ID NO: 173616 - RNA, 22 nt, Human
cagcaaagguagaagcacagga

SEQ ID NO: 173617 - RNA, 22 nt, Human
cccagcuugcaaauggguugcu

SEQ ID NO: 173618 - RNA, 22 nt, Human
agcagggcacuggaaggcacug

SEQ ID NO: 173619 - RNA, 22 nt, Human
cuuucauucuuagauauuagug

SEQ ID NO: 173620 - RNA, 22 nt, Human
aaugcauauguaggcaagcagu

SEQ ID NO: 173621 - RNA, 22 nt, Human
uuccucucaacaugccugccgg

SEQ ID NO: 173622 - RNA, 22 nt, Human
uugcugauuuccccuugagugu

SEQ ID NO: 173623 - RNA, 22 nt, Human
agagcacggccaccauuuacaa

SEQ ID NO: 173624 - RNA, 22 nt, Human
ugggaaagacucaggacaggag

SEQ ID NO: 173625 - RNA, 22 nt, Human
cugggcugauuuagucacguuu

SEQ ID NO: 173626 - RNA, 22 nt, Human
auagauacuggguauggagaug

SEQ ID NO: 173627 - RNA, 23 nt, Human
uccuccuuuugcuugugcuuccc

SEQ ID NO: 173628 - RNA, 22 nt, Human
acagaauuugcuugggcaaugg

SEQ ID NO: 173629 - RNA, 22 nt, Human
acagcuuuaucucagggaucag

SEQ ID NO: 173630 - RNA, 22 nt, Human
ucuuccuucuuugaugacaagg

SEQ ID NO: 173631 - RNA, 22 nt, Human
caacuuuaugauugguuuguca

SEQ ID NO: 173632 - RNA, 22 nt, Human
auccuucuucugcuagugucua

SEQ ID NO: 173633 - RNA, 22 nt, Human
ugcuuaaacauacuauuuauau

SEQ ID NO: 173634 - RNA, 22 nt, Human
ugcagggcuaagucagagccug

SEQ ID NO: 173635 - RNA, 23 nt, Human
uccuuugucuuugcauagauggu

SEQ ID NO: 173636 - RNA, 22 nt, Human
aauaucaguauauuguaucagu

SEQ ID NO: 173637 - RNA, 22 nt, Human
aauuucuccaagaaugcuuaga

SEQ ID NO: 173638 - RNA, 22 nt, Human
gaugugucauuuggucaucugc

SEQ ID NO: 173639 - RNA, 23 nt, Human
uuaaacuucagugcagaacacuc

SEQ ID NO: 173640 - RNA, 22 nt, Human
uuuacagauguggaaagugagc

SEQ ID NO: 173641 - RNA, 20 nt, Human
uugcugggaccuuuuucaac

SEQ ID NO: 173642 - RNA, 22 nt, Human
ccagcuuucauaucaugaggua

SEQ ID NO: 173643 - RNA, 22 nt, Human
cuucuauucacuggucacaguu

SEQ ID NO: 173644 - RNA, 22 nt, Human
gaucuucucuuuaguagaaaca

SEQ ID NO: 173645 - RNA, 22 nt, Human
guagggacaauauguuauuaga

SEQ ID NO: 173646 - RNA, 22 nt, Human
aguggggccggugaggccgagg

SEQ ID NO: 173647 - RNA, 22 nt, Human
auccuucuaccuaggacuauuu

SEQ ID NO: 173648 - RNA, 22 nt, Human
caucagaacaaaucgguuaaga

SEQ ID NO: 173649 - RNA, 22 nt, Human
cuccagugagcgcggggcaugg

SEQ ID NO: 173650 - RNA, 22 nt, Human
acuucaugcagaagagagcugu

SEQ ID NO: 173651 - RNA, 22 nt, Human
ucuggguguagggccuggcaac

SEQ ID NO: 173652 - RNA, 22 nt, Human
aaugauuuccccuacacagaag

SEQ ID NO: 173653 - RNA, 22 nt, Human
aaggugguucgcugguacccag

SEQ ID NO: 173654 - RNA, 22 nt, Human
cacaaaugugcagaaaugugag

SEQ ID NO: 173655 - RNA, 22 nt, Human
ggguaggaugguagaagggacc

SEQ ID NO: 173656 - RNA, 20 nt, Human
uuucuggguacucucccucu

SEQ ID NO: 173657 - RNA, 22 nt, Human
gaauugcuaaccaauucaaaau

SEQ ID NO: 173658 - RNA, 22 nt, Human
aauuaugagguagauaucacau

SEQ ID NO: 173659 - RNA, 22 nt, Human
agacccucuccaugcccacugc

SEQ ID NO: 173660 - RNA, 22 nt, Human
aaauacuguagauaauagaguu

SEQ ID NO: 173661 - RNA, 22 nt, Human
cuacagaauucaacaaaugguu

SEQ ID NO: 173662 - RNA, 22 nt, Human
aucaguuaguuacugcuaagau

SEQ ID NO: 173663 - RNA, 22 nt, Human
uaguauaauuguucuggaauca

SEQ ID NO: 173664 - RNA, 22 nt, Human
uucuucuuuccuauaauuaauu

SEQ ID NO: 173665 - RNA, 22 nt, Human
gggaccuggcaccuuugcucug

SEQ ID NO: 173666 - RNA, 22 nt, Human
uguccuuacaaggucccuuucg

SEQ ID NO: 173667 - RNA, 22 nt, Human
uauuucuaagagauaucuguac

SEQ ID NO: 173668 - RNA, 22 nt, Human
auucuucauaccuacugagguu

SEQ ID NO: 173669 - RNA, 22 nt, Human
uggcucugugucucccagcagc

SEQ ID NO: 173670 - RNA, 22 nt, Human
agauggucuuuugaguaaugaa

SEQ ID NO: 173671 - RNA, 22 nt, Human
aagaaacaaccacugcucuccu

SEQ ID NO: 173672 - RNA, 22 nt, Human
uccaggaggguuuucugccuuc

SEQ ID NO: 173673 - RNA, 20 nt, Human
agguggcucuuccugggcuu

SEQ ID NO: 173674 - RNA, 20 nt, Human
ggcaggcaggagguuuccag

SEQ ID NO: 173675 - RNA, 22 nt, Human
gccugcaggcuguaguuuguga

SEQ ID NO: 173676 - RNA, 22 nt, Human
cauuguuaauugguaucuuaca

SEQ ID NO: 173677 - RNA, 22 nt, Human
gucauaaagcuuguugcauuua

SEQ ID NO: 173678 - RNA, 22 nt, Human
uuauagugggcccaacauggcg

SEQ ID NO: 173679 - RNA, 22 nt, Human
cacaggugcuccucggggagcu

SEQ ID NO: 173680 - RNA, 20 nt, Human
aggauuuacuacuaccugcu

SEQ ID NO: 173681 - RNA, 22 nt, Human
auuaaauuggacgcugggggaa

SEQ ID NO: 173682 - RNA, 17 nt, Human
uguuuucauucauugcu

SEQ ID NO: 173683 - RNA, 21 nt, Human
agaauucuuaaguauucuaau

SEQ ID NO: 173684 - RNA, 22 nt, Human
ucugauaacucuggccccaggc

SEQ ID NO: 173685 - RNA, 22 nt, Human
cucagccaugggguggaucagc

SEQ ID NO: 173686 - RNA, 22 nt, Human
cuccagauguauacuuuccaag

SEQ ID NO: 173687 - RNA, 22 nt, Human
cauuuaagagaaauauuuaguu

SEQ ID NO: 173688 - RNA, 22 nt, Human
gcuucuaucccuccacugcacu

SEQ ID NO: 173689 - RNA, 22 nt, Human
uguccuuuuccccaaauucacu

SEQ ID NO: 173690 - RNA, 22 nt, Human
ugcuuuauuggaaccucauccu

SEQ ID NO: 173691 - RNA, 22 nt, Human
uucugggagagaaagggccuug

SEQ ID NO: 173692 - RNA, 22 nt, Human
uccaaaaaacguuugaauaguu

SEQ ID NO: 173693 - RNA, 22 nt, Human
ccagggcacguugggacaguac

SEQ ID NO: 173694 - RNA, 22 nt, Human
cugcaggggccucgagcacagg

SEQ ID NO: 173695 - RNA, 22 nt, Human
agcagguguuagggauccaaug

SEQ ID NO: 173696 - RNA, 22 nt, Human
aguuuguaaguucauuaugagu

SEQ ID NO: 173697 - RNA, 22 nt, Human
uggcuuuacugucauucuuaug

SEQ ID NO: 173698 - RNA, 22 nt, Human
aauugcuuguuuucggucauaa

SEQ ID NO: 173699 - RNA, 22 nt, Human
uccuggguagccuguccaagau

SEQ ID NO: 173700 - RNA, 22 nt, Human
guuuauuggguauuguggagcc

SEQ ID NO: 173701 - RNA, 22 nt, Human
uuauuccauagaagucaaggaa

SEQ ID NO: 173702 - RNA, 22 nt, Human
uuucuuuuccaauaucccuacu

SEQ ID NO: 173703 - RNA, 22 nt, Human
ccaauacacuuuauagaagaaa

SEQ ID NO: 173704 - RNA, 22 nt, Human
ugagggagcacacacugaagug

SEQ ID NO: 173705 - RNA, 22 nt, Human
ucugcaugaugaacaaaugagc

SEQ ID NO: 173706 - RNA, 22 nt, Human
agccaacuaauuaaacaacuuu

SEQ ID NO: 173707 - RNA, 19 nt, Human
guagggacagugguucuga

SEQ ID NO: 173708 - RNA, 22 nt, Human
acaguuaaauauuucuacuggg

SEQ ID NO: 173709 - RNA, 22 nt, Human
cagacagguagggacagaacau

SEQ ID NO: 173710 - RNA, 21 nt, Human
cuggaggcagguggugccagg

SEQ ID NO: 173711 - RNA, 22 nt, Human
gccugcagacguguuuuccuca

SEQ ID NO: 173712 - RNA, 21 nt, Human
gauuugcagaaacuagacagg

SEQ ID NO: 173713 - RNA, 22 nt, Human
ggcaggugcaccugagccaucu

SEQ ID NO: 173714 - RNA, 22 nt, Human
cauggauugaauauaaauuaga

SEQ ID NO: 173715 - RNA, 22 nt, Human
gcuuccagacgaucauguaaga

SEQ ID NO: 173716 - RNA, 22 nt, Human
uaugugucucaguugugauuga

SEQ ID NO: 173717 - RNA, 22 nt, Human
uccugcagcauccgucgucugu

SEQ ID NO: 173718 - RNA, 22 nt, Human
cagagacauucaguaaauuauc

SEQ ID NO: 173719 - RNA, 22 nt, Human
aauaauuuccagccaacuggaa

SEQ ID NO: 173720 - RNA, 22 nt, Human
augagguuuugauuggcacagg

SEQ ID NO: 173721 - RNA, 22 nt, Human
uuuaagagcuaguaugucauuu

SEQ ID NO: 173722 - RNA, 17 nt, Human
uguuuucugcuaccuuu

SEQ ID NO: 173723 - RNA, 22 nt, Human
uccugcagguggaugauucucu

SEQ ID NO: 173724 - RNA, 22 nt, Human
uuauacauguuuauaagguuga

SEQ ID NO: 173725 - RNA, 22 nt, Human
acuuuguuuucaugaaacagcu

SEQ ID NO: 173726 - RNA, 22 nt, Human
uuuccuuccauguugggcaaaa

SEQ ID NO: 173727 - RNA, 22 nt, Human
gacugaaggucucagcauguga

SEQ ID NO: 173728 - RNA, 22 nt, Human
ucagcauguucuuaggucacag

SEQ ID NO: 173729 - RNA, 22 nt, Human
gcuguucagggcacucaugggc

SEQ ID NO: 173730 - RNA, 22 nt, Human
uucucagugaaguuuagaacau

SEQ ID NO: 173731 - RNA, 22 nt, Human
aaagcugccaaggagaauacua

SEQ ID NO: 173732 - RNA, 22 nt, Human
gcagggcagcuuagucccuguc

SEQ ID NO: 173733 - RNA, 22 nt, Human
cucccagguuccgacgccucuu

SEQ ID NO: 173734 - RNA, 22 nt, Human
uggcaauuuuaggugguuuagu

SEQ ID NO: 173735 - RNA, 22 nt, Human
gggucccuggaauuacuugaca

SEQ ID NO: 173736 - RNA, 22 nt, Human
gcagggcaugggcccugucugc

SEQ ID NO: 173737 - RNA, 22 nt, Human
caucagaaccaguggggacauu

SEQ ID NO: 173738 - RNA, 22 nt, Human
aauucuauguucuugaguaaga

SEQ ID NO: 173739 - RNA, 22 nt, Human
aaaguucauugaugacugaggu

SEQ ID NO: 173740 - RNA, 22 nt, Human
aggcugcagaacagucaggugc

SEQ ID NO: 173741 - RNA, 22 nt, Human
uugcuuuaacuaguaaaugggg

SEQ ID NO: 173742 - RNA, 22 nt, Human
uauugaggaucuccugcuaauu

SEQ ID NO: 173743 - RNA, 22 nt, Human
auauaggcuaacaacuauugag

SEQ ID NO: 173744 - RNA, 20 nt, Human
uugaagagucagguagggcc

SEQ ID NO: 173745 - RNA, 22 nt, Human
cuuuacagaauaagaauacugg

SEQ ID NO: 173746 - RNA, 22 nt, Human
uuuccucuuugugacacagcug

SEQ ID NO: 173747 - RNA, 22 nt, Human
ucugggaagcugguccuguucu

SEQ ID NO: 173748 - RNA, 22 nt, Human
ucacauaaauuauacaauuuca

SEQ ID NO: 173749 - RNA, 22 nt, Human
gggaccugaggagggguuucag

SEQ ID NO: 173750 - RNA, 17 nt, Human
uuauugcuauaagcuga

SEQ ID NO: 173751 - RNA, 22 nt, Human
aaagccuuugucucaggcucug

SEQ ID NO: 173752 - RNA, 22 nt, Human
cagggcacggagaagucacccc

SEQ ID NO: 173753 - RNA, 22 nt, Human
uuugaagacauauuguuacaua

SEQ ID NO: 173754 - RNA, 22 nt, Human
ccagguguuuggccugcaugau

SEQ ID NO: 173755 - RNA, 22 nt, Human
ucgcuugaacccaggaagugga

SEQ ID NO: 173756 - RNA, 22 nt, Human
acagugugaugggccugccuga

SEQ ID NO: 173757 - RNA, 22 nt, Human
gcuauacagcaggagaauggaa

SEQ ID NO: 173758 - RNA, 22 nt, Human
ugcuggcuacauuauugcuguc

SEQ ID NO: 173759 - RNA, 22 nt, Human
gugauuuagauguugaaaguga

SEQ ID NO: 173760 - RNA, 22 nt, Human
uguguccugugcaaggggauga

SEQ ID NO: 173761 - RNA, 22 nt, Human
cuguacaaguccuucaucaggg

SEQ ID NO: 173762 - RNA, 22 nt, Human
cuaaucaucuuucucuuaaagc

SEQ ID NO: 173763 - RNA, 22 nt, Human
auuugcuuaucuccacaguugu

SEQ ID NO: 173764 - RNA, 22 nt, Human
uauuaaagggaaguuaugcaug

SEQ ID NO: 173765 - RNA, 22 nt, Human
uguuuacuuaaauguuuucaua

SEQ ID NO: 173766 - RNA, 22 nt, Human
cagacaggguccuguccgucac

SEQ ID NO: 173767 - RNA, 22 nt, Human
cugaaugagggauucugagggc

SEQ ID NO: 173768 - RNA, 22 nt, Human
uccuccuuguuuuccuguuuac

SEQ ID NO: 173769 - RNA, 20 nt, Human
aagggcagagggaacagacu

SEQ ID NO: 173770 - RNA, 22 nt, Human
cagcaggauuugaaaggaagag

SEQ ID NO: 173771 - RNA, 22 nt, Human
ucuaaacaguuucacucuuaau

SEQ ID NO: 173772 - RNA, 22 nt, Human
aaugauuggcacuagauacaca

SEQ ID NO: 173773 - RNA, 22 nt, Human
ucuggcccuauggcauguaccu

SEQ ID NO: 173774 - RNA, 22 nt, Human
uaauuauuugaagacauuagag

SEQ ID NO: 173775 - RNA, 16 nt, Human
aaggaaugucauucug

SEQ ID NO: 173776 - RNA, 22 nt, Human
aggaccugcuaaugugccaagu

SEQ ID NO: 173777 - RNA, 22 nt, Human
uauucugugugauauguaaaug

SEQ ID NO: 173778 - RNA, 22 nt, Human
ccagacaggggcuguuccugcu

SEQ ID NO: 173779 - RNA, 22 nt, Human
uuucaaagucaauaucauuacc

SEQ ID NO: 173780 - RNA, 22 nt, Human
ccauggcucuagagauugaaaa

SEQ ID NO: 173781 - RNA, 22 nt, Human
aaaaaucuaugacugcuucucc

SEQ ID NO: 173782 - RNA, 22 nt, Human
uuccuuagggucagccagaucu

SEQ ID NO: 173783 - RNA, 22 nt, Human
cuguguccuuuaaaaaagacac

SEQ ID NO: 173784 - RNA, 22 nt, Human
ugaaguaacuguccaggaucca

SEQ ID NO: 173785 - RNA, 22 nt, Human
uucuuuuggacucaaagagaac

SEQ ID NO: 173786 - RNA, 22 nt, Human
caaauguaaauucuuuugaagc

SEQ ID NO: 173787 - RNA, 22 nt, Human
ucagcuuugcaaguuagaaaau

SEQ ID NO: 173788 - RNA, 18 nt, Human
aaauuagauggaccugug

SEQ ID NO: 173789 - RNA, 19 nt, Human
uccuucagucagaucuggg

SEQ ID NO: 173790 - RNA, 22 nt, Human
agugugagauuaaaccgaauca

SEQ ID NO: 173791 - RNA, 22 nt, Human
aaaguggucugcaucccuucug

SEQ ID NO: 173792 - RNA, 22 nt, Human
gaggugucaucaggcagcucug

SEQ ID NO: 173793 - RNA, 22 nt, Human
cuggaagcuuguuugccagucu

SEQ ID NO: 173794 - RNA, 19 nt, Human
aucugccuguuaucacaua

SEQ ID NO: 173795 - RNA, 22 nt, Human
cccugcagaaccacagacaaac

SEQ ID NO: 173796 - RNA, 22 nt, Human
uuccucagcacaaagccaagau

SEQ ID NO: 173797 - RNA, 22 nt, Human
auuucuuucuggccacgguuuu

SEQ ID NO: 173798 - RNA, 22 nt, Human
uugcaacaucugaacauuuauc

SEQ ID NO: 173799 - RNA, 22 nt, Human
agcugcaagaagaggucccuga

SEQ ID NO: 173800 - RNA, 22 nt, Human
uuauuuaggagaaggaacccug

SEQ ID NO: 173801 - RNA, 22 nt, Human
guguccugagugaggccuggcc

SEQ ID NO: 173802 - RNA, 22 nt, Human
caguccuuucugaaauccuaua

SEQ ID NO: 173803 - RNA, 22 nt, Human
uugggcucaggaguuugagacc

SEQ ID NO: 173804 - RNA, 22 nt, Human
auugaaaaaugacuauugcuua

SEQ ID NO: 173805 - RNA, 22 nt, Human
uccagaccuagggcaccccagu

SEQ ID NO: 173806 - RNA, 22 nt, Human
gugcauuugugcaugcacaugu

SEQ ID NO: 173807 - RNA, 22 nt, Human
agaugguuuugucuuuaugauu

SEQ ID NO: 173808 - RNA, 22 nt, Human
acaaugaacacacaaggaauuc

SEQ ID NO: 173809 - RNA, 19 nt, Human
cuguugcuggggcucucuu

SEQ ID NO: 173810 - RNA, 22 nt, Human
cuuuaugguaaguauagaugac

SEQ ID NO: 173811 - RNA, 22 nt, Human
auggcauuugaaucugucuuuu

SEQ ID NO: 173812 - RNA, 20 nt, Human
auguccucagccacugcccu

SEQ ID NO: 173813 - RNA, 22 nt, Human
cuggcuuuaacccuacaaaccu

SEQ ID NO: 173814 - RNA, 22 nt, Human
acagauuuauugaagcugcugc

SEQ ID NO: 173815 - RNA, 22 nt, Human
caauuucagguggauagguuuu

SEQ ID NO: 173816 - RNA, 22 nt, Human
guucuucagauuccauuucagu

SEQ ID NO: 173817 - RNA, 22 nt, Human
aagaauuaucugaaagcugugu

SEQ ID NO: 173818 - RNA, 22 nt, Human
ccaggccucaccugcccaccua

SEQ ID NO: 173819 - RNA, 22 nt, Human
uuuaacuuaaucugcuugauga

SEQ ID NO: 173820 - RNA, 22 nt, Human
ccagacaguuccuugagguuca

SEQ ID NO: 173821 - RNA, 19 nt, Human
auucagcauucugcacuuc

SEQ ID NO: 173822 - RNA, 22 nt, Human
uaugugucugucgugcauaaau

SEQ ID NO: 173823 - RNA, 22 nt, Human
uuucaguuuaugucuugaauua

SEQ ID NO: 173824 - RNA, 22 nt, Human
ugauugacuuuagaauagcacu

SEQ ID NO: 173825 - RNA, 22 nt, Human
uccucuccauauuuucugauuu

SEQ ID NO: 173826 - RNA, 22 nt, Human
ugguuccacuaaccugagagcc

SEQ ID NO: 173827 - RNA, 22 nt, Human
aaucagaauuuguccccugagu

SEQ ID NO: 173828 - RNA, 22 nt, Human
cuucuucauguauugauagucu

SEQ ID NO: 173829 - RNA, 22 nt, Human
agcauaaaggcacuagaaagag

SEQ ID NO: 173830 - RNA, 22 nt, Human
guagggacaugccauuaucuca

SEQ ID NO: 173831 - RNA, 20 nt, Human
aaaggaauauaugaaguaua

SEQ ID NO: 173832 - RNA, 22 nt, Human
uccuggguggcucugcccggcu

SEQ ID NO: 173833 - RNA, 22 nt, Human
aggaccuguaccucagcaucua

SEQ ID NO: 173834 - RNA, 21 nt, Human
agcagguguaaaggaggaaau

SEQ ID NO: 173835 - RNA, 22 nt, Human
aauuucaauuacuuuugcacca

SEQ ID NO: 173836 - RNA, 22 nt, Human
cuuccagagauccaugaauacc

SEQ ID NO: 173837 - RNA, 22 nt, Human
uauacagaaagaauucaagucu

SEQ ID NO: 173838 - RNA, 22 nt, Human
aauucacaaaaguuagauccau

SEQ ID NO: 173839 - RNA, 22 nt, Human
auuaaauuuucacuaggcuccc

SEQ ID NO: 173840 - RNA, 22 nt, Human
uuugaauaucacaaacuuucaa

SEQ ID NO: 173841 - RNA, 22 nt, Human
ucucugaaggggagcuguuuaa

SEQ ID NO: 173842 - RNA, 22 nt, Human
ugacccuuagugaacauuagaa

SEQ ID NO: 173843 - RNA, 22 nt, Human
ugcuacuacuugucaacgguca

SEQ ID NO: 173844 - RNA, 22 nt, Human
uuacagaaaggaaggacugacu

SEQ ID NO: 173845 - RNA, 14 nt, Human
agcugcaagcaucc

SEQ ID NO: 173846 - RNA, 22 nt, Human
cuauacagagcauccuuaacuu

SEQ ID NO: 173847 - RNA, 22 nt, Human
agaaauguugaauacacaaaau

SEQ ID NO: 173848 - RNA, 15 nt, Human
cuccaugauuuugca

SEQ ID NO: 173849 - RNA, 20 nt, Human
ggcaggaccccaguggcauc

SEQ ID NO: 173850 - RNA, 22 nt, Human
uccugcagagucccacugauuu

SEQ ID NO: 173851 - RNA, 22 nt, Human
cuacauaaauuuaucacagacu

SEQ ID NO: 173852 - RNA, 22 nt, Human
uuucaaaccuacuuguauguuu

SEQ ID NO: 173853 - RNA, 22 nt, Human
gccugggugagggucuccuuca

SEQ ID NO: 173854 - RNA, 22 nt, Human
aaacuucauggauaauauaaag

SEQ ID NO: 173855 - RNA, 22 nt, Human
aggcagguguugggagacacca

SEQ ID NO: 173856 - RNA, 22 nt, Human
aauuucagagguagagauucua

SEQ ID NO: 173857 - RNA, 22 nt, Human
gcaggugguggcgcgcgcccug

SEQ ID NO: 173858 - RNA, 22 nt, Human
uauuauugcaaguauauaaagu

SEQ ID NO: 173859 - RNA, 23 nt, Human
ugcugcccacucuuccagcccuc

SEQ ID NO: 173860 - RNA, 22 nt, Human
ucuucacaugaccuucaugucu

SEQ ID NO: 173861 - RNA, 22 nt, Human
uuugacauggaauaacucauuu

SEQ ID NO: 173862 - RNA, 22 nt, Human
aggcagaccaugaaucaugacc

SEQ ID NO: 173863 - RNA, 22 nt, Human
auugcagauucuucucagggag

SEQ ID NO: 173864 - RNA, 22 nt, Human
ugauagagcacuaaguagugua

SEQ ID NO: 173865 - RNA, 22 nt, Human
ucaucaguguccuuaucacuua

SEQ ID NO: 173866 - RNA, 21 nt, Human
ucuuccugcuccacacucccc

SEQ ID NO: 173867 - RNA, 22 nt, Human
uagggcucugagaguucagccu

SEQ ID NO: 173868 - RNA, 22 nt, Human
ugaaugauacagaauuauguag

SEQ ID NO: 173869 - RNA, 22 nt, Human
auauaugcauguguacuuaugu

SEQ ID NO: 173870 - RNA, 22 nt, Human
gcuggaucccugugggaguggu

SEQ ID NO: 173871 - RNA, 22 nt, Human
agcuuguuaaggaugcauauua

SEQ ID NO: 173872 - RNA, 22 nt, Human
gcagggcaguaagagcuagagu

SEQ ID NO: 173873 - RNA, 22 nt, Human
gcacccaguuugucucaggguu

SEQ ID NO: 173874 - RNA, 22 nt, Human
cccuuccuccucgccugucaga

SEQ ID NO: 173875 - RNA, 22 nt, Human
uaggugguugucugcuuuccua

SEQ ID NO: 173876 - RNA, 22 nt, Human
acagguguagaaaacagauuau

SEQ ID NO: 173877 - RNA, 22 nt, Human
uuuacuucugcauuuccccuag

SEQ ID NO: 173878 - RNA, 22 nt, Human
uauugcugaaaugcugaguuca

SEQ ID NO: 173879 - RNA, 22 nt, Human
acauuuauauaacucacuagga

SEQ ID NO: 173880 - RNA, 22 nt, Human
acagggcagagugaaaugcuau

SEQ ID NO: 173881 - RNA, 22 nt, Human
auucagcaaacauuuauugugu

SEQ ID NO: 173882 - RNA, 22 nt, Human
gaucauuugcaggaaacauuaa

SEQ ID NO: 173883 - RNA, 22 nt, Human
uuagaaaugcacccaagaccua

SEQ ID NO: 173884 - RNA, 22 nt, Human
ugggcagggagcuggaaccaca

SEQ ID NO: 173885 - RNA, 22 nt, Human
gcugccacucugagcuugcuuc

SEQ ID NO: 173886 - RNA, 22 nt, Human
gaacuguaguuaauacuacaca

SEQ ID NO: 173887 - RNA, 22 nt, Human
uuaccuaaaauagcucaauuua

SEQ ID NO: 173888 - RNA, 22 nt, Human
gaggggaugcagagaggcuuau

SEQ ID NO: 173889 - RNA, 22 nt, Human
cacccagccuucacacaggagu

SEQ ID NO: 173890 - RNA, 22 nt, Human
uuguaaauaguaguaagaugcc

SEQ ID NO: 173891 - RNA, 22 nt, Human
uagcuuuagaaauauucucaga

SEQ ID NO: 173892 - RNA, 22 nt, Human
agcucugacauugauucucagc

SEQ ID NO: 173893 - RNA, 22 nt, Human
aaagcugcuaugaacauucuau

SEQ ID NO: 173894 - RNA, 20 nt, Human
aaaaucucccagaaacuuau

SEQ ID NO: 173895 - RNA, 20 nt, Human
aggaggaaaaaaugacgagc

SEQ ID NO: 173896 - RNA, 22 nt, Human
gcaugcagucaaccaguaaggg

SEQ ID NO: 173897 - RNA, 22 nt, Human
uccugcaggcuugaguccucag

SEQ ID NO: 173898 - RNA, 22 nt, Human
ggggaccuaggcucugucucuu

SEQ ID NO: 173899 - RNA, 22 nt, Human
ucucucagggggaaggcugaag

SEQ ID NO: 173900 - RNA, 22 nt, Human
agacagacguagugugagagua

SEQ ID NO: 173901 - RNA, 19 nt, Human
aauacaguguuauagaauu

SEQ ID NO: 173902 - RNA, 22 nt, Human
gacagaggagaagaugcugugg

SEQ ID NO: 173903 - RNA, 22 nt, Human
uacacacaugcauuugccuuau

SEQ ID NO: 173904 - RNA, 22 nt, Human
ucaauguaauaaaauacucuau

SEQ ID NO: 173905 - RNA, 22 nt, Human
ccugggucuccuccugcuggcu

SEQ ID NO: 173906 - RNA, 22 nt, Human
aagggcucugggcuacgcacug

SEQ ID NO: 173907 - RNA, 22 nt, Human
acagcuuuguguuaaugggaag

SEQ ID NO: 173908 - RNA, 22 nt, Human
acuuagauuccugguaccuccg

SEQ ID NO: 173909 - RNA, 22 nt, Human
uuauucagauuggcuacaggau

SEQ ID NO: 173910 - RNA, 22 nt, Human
uguacauagaaaggauacagcu

SEQ ID NO: 173911 - RNA, 22 nt, Human
ucuggcuggcagugauggugug

SEQ ID NO: 173912 - RNA, 22 nt, Human
gaauaaucaugaaauucaguga

SEQ ID NO: 173913 - RNA, 22 nt, Human
cagaucuguuugccagaucagc

SEQ ID NO: 173914 - RNA, 22 nt, Human
acagcaugucuaguuaaauacu

SEQ ID NO: 173915 - RNA, 22 nt, Human
auccuuaguuaagaacaggagu

SEQ ID NO: 173916 - RNA, 22 nt, Human
gaauacaugauacaugaacugc

SEQ ID NO: 173917 - RNA, 22 nt, Human
ccuacaggaaauuguaucaaaa

SEQ ID NO: 173918 - RNA, 20 nt, Human
uacuggauuagggcucaccc

SEQ ID NO: 173919 - RNA, 22 nt, Human
uuuagggacaagggucuggggu

SEQ ID NO: 173920 - RNA, 22 nt, Human
agaaaugcucaggucaacuuaa

SEQ ID NO: 173921 - RNA, 22 nt, Human
aagagcaucuauuucacagugg

SEQ ID NO: 173922 - RNA, 22 nt, Human
uguacaaugccagggaacacca

SEQ ID NO: 173923 - RNA, 22 nt, Human
ugcugagaucugccaguagaug

SEQ ID NO: 173924 - RNA, 22 nt, Human
uggcaagggauuguggagaacu

SEQ ID NO: 173925 - RNA, 19 nt, Human
guuaggcaggguggggagu

SEQ ID NO: 173926 - RNA, 22 nt, Human
agugucugccuauuuuucaagc

SEQ ID NO: 173927 - RNA, 22 nt, Human
cuguugcugagguucaaggguc

SEQ ID NO: 173928 - RNA, 22 nt, Human
uucacauuucauaccacagcuu

SEQ ID NO: 173929 - RNA, 22 nt, Human
guuacucuugagaggcugaggu

SEQ ID NO: 173930 - RNA, 22 nt, Human
cuuccucccggcccaugcucug

SEQ ID NO: 173931 - RNA, 20 nt, Human
gagucacagaagaagcugaa

SEQ ID NO: 173932 - RNA, 22 nt, Human
aggaggaaggcuucauuagguu

SEQ ID NO: 173933 - RNA, 22 nt, Human
acauguggaggaggcgagggua

SEQ ID NO: 173934 - RNA, 22 nt, Human
cuggauguaaagggugaagaaa

SEQ ID NO: 173935 - RNA, 22 nt, Human
cuuuaauuaggaaguauaauga

SEQ ID NO: 173936 - RNA, 22 nt, Human
ugaggccagugacauauauuaa

SEQ ID NO: 173937 - RNA, 22 nt, Human
ugaaauaggaaacagauguuuc

SEQ ID NO: 173938 - RNA, 22 nt, Human
ugaaacaagauccacagacuug

SEQ ID NO: 173939 - RNA, 22 nt, Human
cagcuuuaggacucauaauaaa

SEQ ID NO: 173940 - RNA, 22 nt, Human
uucacaguggcugugccauuug

SEQ ID NO: 173941 - RNA, 22 nt, Human
ugcuuccugaggccgucuucuc

SEQ ID NO: 173942 - RNA, 22 nt, Human
ugcagggccuugggaugugucc

SEQ ID NO: 173943 - RNA, 22 nt, Human
uuccuucucuguggggaaggca

SEQ ID NO: 173944 - RNA, 22 nt, Human
ugugcauguauugauuuguacc

SEQ ID NO: 173945 - RNA, 22 nt, Human
auuucaaggcuauuaauauaaa

SEQ ID NO: 173946 - RNA, 22 nt, Human
gcugggucagaaucucccugug

SEQ ID NO: 173947 - RNA, 22 nt, Human
uugaagaaauuauuuuauauag

SEQ ID NO: 173948 - RNA, 23 nt, Human
uuucaacuccugccauuauuucu

SEQ ID NO: 173949 - RNA, 22 nt, Human
auuugcuggugaaauagugaca

SEQ ID NO: 173950 - RNA, 22 nt, Human
auuacaagaugcauccauauuu

SEQ ID NO: 173951 - RNA, 22 nt, Human
uccuucugaaaaaugcacacga

SEQ ID NO: 173952 - RNA, 22 nt, Human
auugcugaaaguauuuuaugac

SEQ ID NO: 173953 - RNA, 22 nt, Human
aaagcagagguugcagugagcu

SEQ ID NO: 173954 - RNA, 22 nt, Human
cagugaggcucugcugagcggu

SEQ ID NO: 173955 - RNA, 22 nt, Human
auuccuucuaaaacgcugcccu

SEQ ID NO: 173956 - RNA, 22 nt, Human
cccagugucaccaacaggacac

SEQ ID NO: 173957 - RNA, 22 nt, Human
gacaggcuucaugauggcagga

SEQ ID NO: 173958 - RNA, 22 nt, Human
uguucuucuagauugccuuuua

SEQ ID NO: 173959 - RNA, 22 nt, Human
cagaggcucagauggcccuggc

SEQ ID NO: 173960 - RNA, 22 nt, Human
ccuuccuuuuacugucuccgga

SEQ ID NO: 173961 - RNA, 20 nt, Human
cccaguguccagccuugcca

SEQ ID NO: 173962 - RNA, 22 nt, Human
ccaggugugccagcagggacug

SEQ ID NO: 173963 - RNA, 22 nt, Human
aguacaacauuagaguaucuua

SEQ ID NO: 173964 - RNA, 22 nt, Human
uuguuucauggggauguuuauu

SEQ ID NO: 173965 - RNA, 22 nt, Human
cagaagcaaguagugauucuuu

SEQ ID NO: 173966 - RNA, 22 nt, Human
ucagggaccccucugaguggag

SEQ ID NO: 173967 - RNA, 22 nt, Human
acaacauucuuaaauacacuga

SEQ ID NO: 173968 - RNA, 22 nt, Human
gauggcuucacuuacauggcug

SEQ ID NO: 173969 - RNA, 22 nt, Human
acuugaauuauauuucuagaga

SEQ ID NO: 173970 - RNA, 22 nt, Human
aauacuuaugugaccucauuuu

SEQ ID NO: 173971 - RNA, 22 nt, Human
ugggccaggcaugugaucagca

SEQ ID NO: 173972 - RNA, 22 nt, Human
ugggcuccagcaccugugcucu

SEQ ID NO: 173973 - RNA, 22 nt, Human
aaaucaguuguuauauuaaaga

SEQ ID NO: 173974 - RNA, 22 nt, Human
aucuagauuagguauaagagcu

SEQ ID NO: 173975 - RNA, 22 nt, Human
cagaaauaaacuucucacaucg

SEQ ID NO: 173976 - RNA, 22 nt, Human
uuuauuuggcauccagggagaa

SEQ ID NO: 173977 - RNA, 22 nt, Human
uaaaggcuuuuacaggagugca

SEQ ID NO: 173978 - RNA, 22 nt, Human
caaaugauagagccgauuauca

SEQ ID NO: 173979 - RNA, 22 nt, Human
uccaggcaggguuaaggguccu

SEQ ID NO: 173980 - RNA, 22 nt, Human
ccauucuuucagugucucaugu

SEQ ID NO: 173981 - RNA, 22 nt, Human
ugcaaaaauugcuggaaucuuu

SEQ ID NO: 173982 - RNA, 22 nt, Human
cuggguguagauggaaguuugg

SEQ ID NO: 173983 - RNA, 22 nt, Human
acuuuacucuucauaugugaca

SEQ ID NO: 173984 - RNA, 22 nt, Human
ugcaggugguccuuccucugcu

SEQ ID NO: 173985 - RNA, 22 nt, Human
ucuguucaguuguaccuucccc

SEQ ID NO: 173986 - RNA, 22 nt, Human
ugcuuuaaaauggacuguuuug

SEQ ID NO: 173987 - RNA, 22 nt, Human
caauuuuuguacuuauaguacu

SEQ ID NO: 173988 - RNA, 22 nt, Human
gaacuugggagaagggagugug

SEQ ID NO: 173989 - RNA, 22 nt, Human
uuuaaugauagcuguuucacau

SEQ ID NO: 173990 - RNA, 22 nt, Human
uacuuucuuucccaagaggugg

SEQ ID NO: 173991 - RNA, 19 nt, Human
gacaggacgaagggaaguu

SEQ ID NO: 173992 - RNA, 22 nt, Human
uuuccaaagguggcaggaacaa

SEQ ID NO: 173993 - RNA, 22 nt, Human
uuuccaaaaugaaucuaaugca

SEQ ID NO: 173994 - RNA, 22 nt, Human
agcaggugagcacagccaggcu

SEQ ID NO: 173995 - RNA, 22 nt, Human
ucagguggccaaaugggagcgc

SEQ ID NO: 173996 - RNA, 22 nt, Human
agcucccagcuccuuugagaga

SEQ ID NO: 173997 - RNA, 22 nt, Human
uuauugagaccguaagucaggu

SEQ ID NO: 173998 - RNA, 22 nt, Human
gaauuucauuuguuuccuacca

SEQ ID NO: 173999 - RNA, 22 nt, Human
cuucuucaucuguaaaacuugg

SEQ ID NO: 174000 - RNA, 22 nt, Human
aucugaagaggucauggcugac

SEQ ID NO: 174001 - RNA, 22 nt, Human
ccuggaggcagaaauaggacuu

SEQ ID NO: 174002 - RNA, 22 nt, Human
aggauuuacuagcaaggauucu

SEQ ID NO: 174003 - RNA, 22 nt, Human
ucagagaguuggaaagaauuaa

SEQ ID NO: 174004 - RNA, 22 nt, Human
uguuugaacugaauaacauagu

SEQ ID NO: 174005 - RNA, 22 nt, Human
gcagcuuuuuggaugucaguua

SEQ ID NO: 174006 - RNA, 22 nt, Human
ggcaggcauggccacucccuag

SEQ ID NO: 174007 - RNA, 20 nt, Human
auuugcaucugaauaacuua

SEQ ID NO: 174008 - RNA, 22 nt, Human
uucuuuucaagaggggcaagga

SEQ ID NO: 174009 - RNA, 22 nt, Human
ugcauacacaugugcacauacg

SEQ ID NO: 174010 - RNA, 20 nt, Human
guaaugaauguaaacaguaa

SEQ ID NO: 174011 - RNA, 22 nt, Human
ccauggcaauggucagucuauu

SEQ ID NO: 174012 - RNA, 22 nt, Human
uauaaauuauuaggcugcuaaa

SEQ ID NO: 174013 - RNA, 21 nt, Human
auuauuauaaagaccacaggg

SEQ ID NO: 174014 - RNA, 20 nt, Human
acuggaucuggcuggagcug

SEQ ID NO: 174015 - RNA, 22 nt, Human
ccuauacaggcuucuuuacaug

SEQ ID NO: 174016 - RNA, 22 nt, Human
uccaugagcuagggauucauca

SEQ ID NO: 174017 - RNA, 22 nt, Human
cccugcagcuuuugcauaguca

SEQ ID NO: 174018 - RNA, 22 nt, Human
uuucugaauaacucuaugauau

SEQ ID NO: 174019 - RNA, 22 nt, Human
aaucuuucccuauuaaaugugg

SEQ ID NO: 174020 - RNA, 18 nt, Human
gacccagcagaugggcuu

SEQ ID NO: 174021 - RNA, 22 nt, Human
gggcaaguccggugcccagagc

SEQ ID NO: 174022 - RNA, 17 nt, Human
cagacaggcugucaccc

SEQ ID NO: 174023 - RNA, 22 nt, Human
acauguguguauacguauuuau

SEQ ID NO: 174024 - RNA, 20 nt, Human
ucagauuuuucuaacuuuga

SEQ ID NO: 174025 - RNA, 22 nt, Human
gccaaaucuggauuuagcaaga

SEQ ID NO: 174026 - RNA, 22 nt, Human
ucccaggcugggggccugaagu

SEQ ID NO: 174027 - RNA, 22 nt, Human
ccuugguuuccaggaugaggcu

SEQ ID NO: 174028 - RNA, 22 nt, Human
gauggcuuugugcaccaugauu

SEQ ID NO: 174029 - RNA, 22 nt, Human
aaggcuuuuguuccuauuuagu

SEQ ID NO: 174030 - RNA, 21 nt, Human
aggauuuacuauuaacugugu

SEQ ID NO: 174031 - RNA, 22 nt, Human
uccuucuuucccccuagucauu

SEQ ID NO: 174032 - RNA, 18 nt, Human
uguaaacacuuucauucu

SEQ ID NO: 174033 - RNA, 22 nt, Human
ugggaccugcccuggccccauc

SEQ ID NO: 174034 - RNA, 22 nt, Human
uaagaaacaugauacuuuuccu

SEQ ID NO: 174035 - RNA, 22 nt, Human
caguccuuagucuggauggcuu

SEQ ID NO: 174036 - RNA, 19 nt, Human
aacuguaauuaauacccua

SEQ ID NO: 174037 - RNA, 22 nt, Human
ccaugcacaccagcaggcagac

SEQ ID NO: 174038 - RNA, 16 nt, Human
ucuuaguuguguggua

SEQ ID NO: 174039 - RNA, 17 nt, Human
ggcuggaggggacccgg

SEQ ID NO: 174040 - RNA, 22 nt, Human
gaauuguauugauuuuucagag

SEQ ID NO: 174041 - RNA, 22 nt, Human
uacacaugaucauuuaguagca

SEQ ID NO: 174042 - RNA, 22 nt, Human
uucauacaguggcugcacucca

SEQ ID NO: 174043 - RNA, 22 nt, Human
uuuacauugcauuagguauuau

SEQ ID NO: 174044 - RNA, 22 nt, Human
uuagaaaucaccucugaagauc

SEQ ID NO: 174045 - RNA, 22 nt, Human
acaacaaaaucacuagucuucc

SEQ ID NO: 174046 - RNA, 22 nt, Human
auuuugaugcuaucuaaugaau

SEQ ID NO: 174047 - RNA, 22 nt, Human
gcacaauuauuuaugcaguaug

SEQ ID NO: 174048 - RNA, 22 nt, Human
cucuucuugaaagaggaauuca

SEQ ID NO: 174049 - RNA, 22 nt, Human
ucugcagguaagcguucuugga

SEQ ID NO: 174050 - RNA, 22 nt, Human
gacaguccuugcccaguaucua

SEQ ID NO: 174051 - RNA, 22 nt, Human
guuuuauaugucucugcugaca

SEQ ID NO: 174052 - RNA, 22 nt, Human
cuccagugagugagcaggcgac

SEQ ID NO: 174053 - RNA, 22 nt, Human
guuuucuggcaguuauuccuua

SEQ ID NO: 174054 - RNA, 22 nt, Human
gcagggcagagggagaaucucu

SEQ ID NO: 174055 - RNA, 21 nt, Human
agguggggcugcaccucugcu

SEQ ID NO: 174056 - RNA, 22 nt, Human
gcuuggaaguaggauugggaga

SEQ ID NO: 174057 - RNA, 22 nt, Human
uauugcugacugucuucugagu

SEQ ID NO: 174058 - RNA, 22 nt, Human
cuacagaaguuucccuugcuua

SEQ ID NO: 174059 - RNA, 22 nt, Human
acaugugugacaacagagguga

SEQ ID NO: 174060 - RNA, 22 nt, Human
agcugcaaaccaggccggcgcg

SEQ ID NO: 174061 - RNA, 22 nt, Human
gaacaucaugaagaaaacauau

SEQ ID NO: 174062 - RNA, 22 nt, Human
uguccucacaugguggggagag

SEQ ID NO: 174063 - RNA, 22 nt, Human
uacauaauuaaucuuuaaguuc

SEQ ID NO: 174064 - RNA, 22 nt, Human
aguccagucucacucuuggcag

SEQ ID NO: 174065 - RNA, 17 nt, Human
ucuguucaagugagagg

SEQ ID NO: 174066 - RNA, 22 nt, Human
caaguccucgcuucuagcugug

SEQ ID NO: 174067 - RNA, 22 nt, Human
uugcuaauuuaacuaccuuguu

SEQ ID NO: 174068 - RNA, 22 nt, Human
uguuuauugagugccuacuaua

SEQ ID NO: 174069 - RNA, 22 nt, Human
augacaaaagaagacaugaggu

SEQ ID NO: 174070 - RNA, 21 nt, Human
uuccagagauuguuucaccug

SEQ ID NO: 174071 - RNA, 22 nt, Human
acuaucaacaucauugcucuag

SEQ ID NO: 174072 - RNA, 22 nt, Human
gaaggcugcgaggggagugccg

SEQ ID NO: 174073 - RNA, 22 nt, Human
auucugggaacuuugucucuca

SEQ ID NO: 174074 - RNA, 22 nt, Human
auucagagcacuggguagaauu

SEQ ID NO: 174075 - RNA, 22 nt, Human
uaaaauugcggugaauauuucc

SEQ ID NO: 174076 - RNA, 22 nt, Human
cuuaaauucuuaaugcccucau

SEQ ID NO: 174077 - RNA, 22 nt, Human
uaugugucuuuaucuggcucuu

SEQ ID NO: 174078 - RNA, 22 nt, Human
ggagcugaggacacuacauuuu

SEQ ID NO: 174079 - RNA, 22 nt, Human
ugggcagggaucucuuuugcaa

SEQ ID NO: 174080 - RNA, 22 nt, Human
uuugucaucccuuuugaaacug

SEQ ID NO: 174081 - RNA, 22 nt, Human
uaugacaagguggaguaugagu

SEQ ID NO: 174082 - RNA, 22 nt, Human
ugcuuuauaggggauugcaggc

SEQ ID NO: 174083 - RNA, 22 nt, Human
cugugucccacacgagguguau

SEQ ID NO: 174084 - RNA, 22 nt, Human
aaauuucuguuguuuugagcca

SEQ ID NO: 174085 - RNA, 22 nt, Human
auugcuuuagaaagaaaaauau

SEQ ID NO: 174086 - RNA, 22 nt, Human
gggcuggaggagauccagaggc

SEQ ID NO: 174087 - RNA, 22 nt, Human
auaugcaagcacauagaauacu

SEQ ID NO: 174088 - RNA, 22 nt, Human
uaagaaguacaaaaauuuucug

SEQ ID NO: 174089 - RNA, 23 nt, Human
uuauugaggguguagauuggugu

SEQ ID NO: 174090 - RNA, 23 nt, Human
aaggugucauugaugggauucua

SEQ ID NO: 174091 - RNA, 22 nt, Human
acacaaacugcuagaaaauugg

SEQ ID NO: 174092 - RNA, 22 nt, Human
auucuucauuguugauucaugu

SEQ ID NO: 174093 - RNA, 18 nt, Human
uuggaggauguccaugaa

SEQ ID NO: 174094 - RNA, 22 nt, Human
ucuucacagaugcauauacuuc

SEQ ID NO: 174095 - RNA, 21 nt, Human
auuucagagcacacaaguaaa

SEQ ID NO: 174096 - RNA, 22 nt, Human
ucagggcauccauugccuguug

SEQ ID NO: 174097 - RNA, 22 nt, Human
agguauuauuagcaucucuauu

SEQ ID NO: 174098 - RNA, 19 nt, Human
gcugggugaggucguugga

SEQ ID NO: 174099 - RNA, 20 nt, Human
ggcaggugcucgcuuggucu

SEQ ID NO: 174100 - RNA, 21 nt, Human
gcaggugugguaucagcuucc

SEQ ID NO: 174101 - RNA, 17 nt, Human
gugaagagucauugaau

SEQ ID NO: 174102 - RNA, 21 nt, Human
ccuucuccauuacaguaagcu

SEQ ID NO: 174103 - RNA, 22 nt, Human
ccuggaucccgauggcugugag

SEQ ID NO: 174104 - RNA, 22 nt, Human
gcaaagaaaugucagugagagg

SEQ ID NO: 174105 - RNA, 22 nt, Human
cugucucagcaggaagucauca

SEQ ID NO: 174106 - RNA, 22 nt, Human
gguguccugucagcuagaguga

SEQ ID NO: 174107 - RNA, 22 nt, Human
ugcagggcagcuagggagcuuu

SEQ ID NO: 174108 - RNA, 20 nt, Human
uauggcuuggcaaagcuuca

SEQ ID NO: 174109 - RNA, 22 nt, Human
uugcuuuaggauuuaaguggca

SEQ ID NO: 174110 - RNA, 22 nt, Human
uuucuucuugaguaaccagauu

SEQ ID NO: 174111 - RNA, 22 nt, Human
cuacagaagccguggucaggaa

SEQ ID NO: 174112 - RNA, 22 nt, Human
aagguggucuuacugaugguau

SEQ ID NO: 174113 - RNA, 22 nt, Human
cuuuuucuucuaggugugccug

SEQ ID NO: 174114 - RNA, 22 nt, Human
auuagauauuugcuguuggauu

SEQ ID NO: 174115 - RNA, 22 nt, Human
agacagguagcaggacagauau

SEQ ID NO: 174116 - RNA, 22 nt, Human
auauuccauugguuucccuucu

SEQ ID NO: 174117 - RNA, 22 nt, Human
gcagaauuggauaguugugaua

SEQ ID NO: 174118 - RNA, 22 nt, Human
uucuaaaauaaguuuaucuggu

SEQ ID NO: 174119 - RNA, 22 nt, Human
agcagguggccacgaggaggag

SEQ ID NO: 174120 - RNA, 19 nt, Human
uggaggaaguauauuucau

SEQ ID NO: 174121 - RNA, 22 nt, Human
agcauguucaucuucuguuggu

SEQ ID NO: 174122 - RNA, 22 nt, Human
ucaggugggaccugcuaggaca

SEQ ID NO: 174123 - RNA, 22 nt, Human
gacaauacagaaagggacaugc

SEQ ID NO: 174124 - RNA, 22 nt, Human
uggcagggucuugcuguguugc

SEQ ID NO: 174125 - RNA, 22 nt, Human
cagaauuuagcacaauguaugg

SEQ ID NO: 174126 - RNA, 22 nt, Human
ccagcuuuuccucucauugcuu

SEQ ID NO: 174127 - RNA, 22 nt, Human
gauugcuggggcaggcuguagc

SEQ ID NO: 174128 - RNA, 22 nt, Human
caggauggcagagaaaagggug

SEQ ID NO: 174129 - RNA, 22 nt, Human
uuuauccauaucauuaaaaucu

SEQ ID NO: 174130 - RNA, 22 nt, Human
ccaggugggcgugucuucaccu

SEQ ID NO: 174131 - RNA, 22 nt, Human
ucagugauuucuggggugaggg

SEQ ID NO: 174132 - RNA, 22 nt, Human
cacuuuauuauaaauuugagag

SEQ ID NO: 174133 - RNA, 22 nt, Human
uucucuuuucaccaguugcuaa

SEQ ID NO: 174134 - RNA, 22 nt, Human
agggcuccgggcaggcgaugga

SEQ ID NO: 174135 - RNA, 22 nt, Human
ccagggcaugggaagaacugaa

SEQ ID NO: 174136 - RNA, 22 nt, Human
uguccuuagaagaagugaaaga

SEQ ID NO: 174137 - RNA, 22 nt, Human
uucuucaaugugcccuguuuuc

SEQ ID NO: 174138 - RNA, 22 nt, Human
uauuuccaaaagccuauuauga

SEQ ID NO: 174139 - RNA, 22 nt, Human
agguggggccaaaugcuacagu

SEQ ID NO: 174140 - RNA, 22 nt, Human
caagaucagggugccagaaugg

SEQ ID NO: 174141 - RNA, 22 nt, Human
uuggcuuuuaugcagcuuaggu

SEQ ID NO: 174142 - RNA, 22 nt, Human
ucagcuuucucuucuaucgaua

SEQ ID NO: 174143 - RNA, 15 nt, Human
ggcagguggaucacu

SEQ ID NO: 174144 - RNA, 22 nt, Human
uacagguaaaauuaucagaaac

SEQ ID NO: 174145 - RNA, 22 nt, Human
ccaggugugucuggccccgaag

SEQ ID NO: 174146 - RNA, 22 nt, Human
uaagaaacuaaugcaauaagag

SEQ ID NO: 174147 - RNA, 22 nt, Human
ugggugggagcacccugucugg

SEQ ID NO: 174148 - RNA, 22 nt, Human
ccagcauggcaccugagaugag

SEQ ID NO: 174149 - RNA, 22 nt, Human
auuucaacacuuuuggaauuag

SEQ ID NO: 174150 - RNA, 22 nt, Human
agaaagaggaugcagaucucau

SEQ ID NO: 174151 - RNA, 22 nt, Human
uuggaucacucugaagccuuac

SEQ ID NO: 174152 - RNA, 22 nt, Human
acagggcaccugagguaggaag

SEQ ID NO: 174153 - RNA, 22 nt, Human
agucaccaacaugguucccagg

SEQ ID NO: 174154 - RNA, 17 nt, Human
ugaaaucagcacccagg

SEQ ID NO: 174155 - RNA, 22 nt, Human
ugcuucaaguugaaauauucuu

SEQ ID NO: 174156 - RNA, 22 nt, Human
gaggcugggaaguccaagacca

SEQ ID NO: 174157 - RNA, 23 nt, Human
aaauucaguccuucaacucugag

SEQ ID NO: 174158 - RNA, 22 nt, Human
gugaauaacuuucuauguuaau

SEQ ID NO: 174159 - RNA, 22 nt, Human
uacuuuaucagcgucaaaggua

SEQ ID NO: 174160 - RNA, 21 nt, Human
uuacaaagcaagugcuguguc

SEQ ID NO: 174161 - RNA, 22 nt, Human
cucuuccuacagucugcuaugc

SEQ ID NO: 174162 - RNA, 22 nt, Human
guucuucaucuuaaccaucugu

SEQ ID NO: 174163 - RNA, 22 nt, Human
ucaguucuuuauuucacaguga

SEQ ID NO: 174164 - RNA, 22 nt, Human
aaauccuaaggagaauaugauu

SEQ ID NO: 174165 - RNA, 22 nt, Human
uuuauacauggagaauuuuugc

SEQ ID NO: 174166 - RNA, 22 nt, Human
ggucuggcaggugaggacucag

SEQ ID NO: 174167 - RNA, 22 nt, Human
agaaauguggaucguuuuaaaa

SEQ ID NO: 174168 - RNA, 22 nt, Human
guacuacaguuucucauuaaau

SEQ ID NO: 174169 - RNA, 22 nt, Human
aagagcaucgguggagccccca

SEQ ID NO: 174170 - RNA, 22 nt, Human
acagguguccaacauuuaccuu

SEQ ID NO: 174171 - RNA, 22 nt, Human
ggucaaaguugaagaagggcau

SEQ ID NO: 174172 - RNA, 22 nt, Human
aaguccuuuccaguccugugau

SEQ ID NO: 174173 - RNA, 22 nt, Human
guuaggcaaauaacuguggagc

SEQ ID NO: 174174 - RNA, 22 nt, Human
acauuguaguuguucugcagca

SEQ ID NO: 174175 - RNA, 23 nt, Human
auuucuaggggauuuucuggugc

SEQ ID NO: 174176 - RNA, 19 nt, Human
agauuuaccucauauaguu

SEQ ID NO: 174177 - RNA, 22 nt, Human
uuuccagagcaugucugcucag

SEQ ID NO: 174178 - RNA, 22 nt, Human
uucacagauuucccugcacaug

SEQ ID NO: 174179 - RNA, 22 nt, Human
auuuccaucaucauuaggccua

SEQ ID NO: 174180 - RNA, 22 nt, Human
uagggcaggugaagaaaagcua

SEQ ID NO: 174181 - RNA, 22 nt, Human
ugcuuuauggagcccaucucau

SEQ ID NO: 174182 - RNA, 22 nt, Human
agcuugauuucucugcagugug

SEQ ID NO: 174183 - RNA, 22 nt, Human
gagggcuccauuccccgugccc

SEQ ID NO: 174184 - RNA, 22 nt, Human
cuuuauguacuguguauuugaa

SEQ ID NO: 174185 - RNA, 22 nt, Human
uuauauuguguaauaagugaag

SEQ ID NO: 174186 - RNA, 22 nt, Human
cugaggcucccucgggucugcu

SEQ ID NO: 174187 - RNA, 22 nt, Human
aacaaacaaacauuuugucauc

SEQ ID NO: 174188 - RNA, 22 nt, Human
gacuuuggcaucuagacauugu

SEQ ID NO: 174189 - RNA, 22 nt, Human
gcucuggccagacccucagugg

SEQ ID NO: 174190 - RNA, 22 nt, Human
ccugggugaaauaguccucaag

SEQ ID NO: 174191 - RNA, 22 nt, Human
auucuucaccugagucagucua

SEQ ID NO: 174192 - RNA, 22 nt, Human
ggguugaggcggaugucggcgg

SEQ ID NO: 174193 - RNA, 19 nt, Human
gagggcucauuugaacaau

SEQ ID NO: 174194 - RNA, 22 nt, Human
auuuguaauuucuuaucugugu

SEQ ID NO: 174195 - RNA, 22 nt, Human
uugaaaacuuucuagaccaaga

SEQ ID NO: 174196 - RNA, 22 nt, Human
uuaacugugacaguuucucaga

SEQ ID NO: 174197 - RNA, 23 nt, Human
cgcccagccucagugaccugggc

SEQ ID NO: 174198 - RNA, 22 nt, Human
ccuugcucucccaagcccgcag

SEQ ID NO: 174199 - RNA, 22 nt, Human
uucaaaauuguucuaagcucug

SEQ ID NO: 174200 - RNA, 22 nt, Human
agggacuauuuacccaucucac

SEQ ID NO: 174201 - RNA, 22 nt, Human
cccaguguuccuugaggggcug

SEQ ID NO: 174202 - RNA, 22 nt, Human
ugcuagugugugagauguucaa

SEQ ID NO: 174203 - RNA, 22 nt, Human
uuugaacaugcugcaugauaau

SEQ ID NO: 174204 - RNA, 22 nt, Human
uagauauaucugucauacuggu

SEQ ID NO: 174205 - RNA, 22 nt, Human
ucagcugcucaaauuuauguca

SEQ ID NO: 174206 - RNA, 22 nt, Human
cagagauuauuauaacuaauua

SEQ ID NO: 174207 - RNA, 19 nt, Human
uagcugauagcuacuuuau

SEQ ID NO: 174208 - RNA, 22 nt, Human
gcaggcuccaaggccugggaga

SEQ ID NO: 174209 - RNA, 22 nt, Human
ggauucagugucuguuaauagu

SEQ ID NO: 174210 - RNA, 20 nt, Human
uuucaagucagcaauucuca

SEQ ID NO: 174211 - RNA, 22 nt, Human
ccuguucacugcacaguuuccg

SEQ ID NO: 174212 - RNA, 22 nt, Human
ucuggccccuggcaguccugga

SEQ ID NO: 174213 - RNA, 22 nt, Human
cuuaggcaguuuaggaaagaga

SEQ ID NO: 174214 - RNA, 22 nt, Human
ggcuuuauaggguagaggauca

SEQ ID NO: 174215 - RNA, 22 nt, Human
ucagggcaaugucccucagaag

SEQ ID NO: 174216 - RNA, 22 nt, Human
auuuaaugucgagcuauuguag

SEQ ID NO: 174217 - RNA, 21 nt, Human
uacuacagucucuuuaucagu

SEQ ID NO: 174218 - RNA, 22 nt, Human
aaauucaguuuuaauaaucacu

SEQ ID NO: 174219 - RNA, 22 nt, Human
acaggcaggcgggacagcccga

SEQ ID NO: 174220 - RNA, 22 nt, Human
gcuggaggcuggagugcagugg

SEQ ID NO: 174221 - RNA, 22 nt, Human
uuuucauuguaaaucaggaaac

SEQ ID NO: 174222 - RNA, 22 nt, Human
uggcuggagcauuccuugucuu

SEQ ID NO: 174223 - RNA, 22 nt, Human
ugucaccaugcgaggcuaauuu

SEQ ID NO: 174224 - RNA, 22 nt, Human
gacagacaggaggccaccugcu

SEQ ID NO: 174225 - RNA, 22 nt, Human
ccuggagggacccuggcccugu

SEQ ID NO: 174226 - RNA, 23 nt, Human
ugguggggucuuggagacagcac

SEQ ID NO: 174227 - RNA, 22 nt, Human
uucuaaauuuuggaagaugcag

SEQ ID NO: 174228 - RNA, 15 nt, Human
gcaggcagaucaccg

SEQ ID NO: 174229 - RNA, 22 nt, Human
ggucuggauaauuccaguaccu

SEQ ID NO: 174230 - RNA, 22 nt, Human
gcuauacaaguguagaauagag

SEQ ID NO: 174231 - RNA, 22 nt, Human
cauauuuauagaucuggcauuu

SEQ ID NO: 174232 - RNA, 22 nt, Human
cuuccuucuguaagaccaguug

SEQ ID NO: 174233 - RNA, 22 nt, Human
agggaagaaaauccaucgcugc

SEQ ID NO: 174234 - RNA, 22 nt, Human
ucagccaguuugauucuauuug

SEQ ID NO: 174235 - RNA, 22 nt, Human
aaugugucuaugugguucacag

SEQ ID NO: 174236 - RNA, 19 nt, Human
ccagagagcuagguacaga

SEQ ID NO: 174237 - RNA, 22 nt, Human
aagggcucacccaacucacuuc

SEQ ID NO: 174238 - RNA, 22 nt, Human
gagccaccuucaacucaggaau

SEQ ID NO: 174239 - RNA, 22 nt, Human
cauuaggguaauugaacacuua

SEQ ID NO: 174240 - RNA, 22 nt, Human
cccaggcagggacgugcucugg

SEQ ID NO: 174241 - RNA, 22 nt, Human
acaucugaccauuacaagacau

SEQ ID NO: 174242 - RNA, 22 nt, Human
uccuaguucucugccagucgcu

SEQ ID NO: 174243 - RNA, 22 nt, Human
aagcgccaugguuccugcgcag

SEQ ID NO: 174244 - RNA, 22 nt, Human
ucucucuugucaccccaucugc

SEQ ID NO: 174245 - RNA, 22 nt, Human
ucagcacugaaauucuucacau

SEQ ID NO: 174246 - RNA, 22 nt, Human
cccugcagugugaccucaccua

SEQ ID NO: 174247 - RNA, 22 nt, Human
gugagcauauauguaaucguuu

SEQ ID NO: 174248 - RNA, 22 nt, Human
ucagguguggucaccacagggu

SEQ ID NO: 174249 - RNA, 22 nt, Human
cauagaaaagaguagguaaugu

SEQ ID NO: 174250 - RNA, 22 nt, Human
uucauucuugucuuuguauagu

SEQ ID NO: 174251 - RNA, 22 nt, Human
aguaaacacugucuuuauauau

SEQ ID NO: 174252 - RNA, 22 nt, Human
aaauucuaugucaauguuuauu

SEQ ID NO: 174253 - RNA, 22 nt, Human
ggacagacagugugagugaggc

SEQ ID NO: 174254 - RNA, 22 nt, Human
uguacauacauagauauacaca

SEQ ID NO: 174255 - RNA, 22 nt, Human
uacacauguauuuauguguaca

SEQ ID NO: 174256 - RNA, 18 nt, Human
uuucacagauucaugacu

SEQ ID NO: 174257 - RNA, 22 nt, Human
caucagaaucugagucucugcc

SEQ ID NO: 174258 - RNA, 22 nt, Human
ggcuccacugcugaccacucca

SEQ ID NO: 174259 - RNA, 22 nt, Human
ugcuuauuuauagucaauagag

SEQ ID NO: 174260 - RNA, 22 nt, Human
ucagcuuuuuacaugugaaaua

SEQ ID NO: 174261 - RNA, 22 nt, Human
ucccaggcaaaggcagcucauu

SEQ ID NO: 174262 - RNA, 22 nt, Human
aauggaauaccuagguggccca

SEQ ID NO: 174263 - RNA, 22 nt, Human
auggcuuucagauuucuauguu

SEQ ID NO: 174264 - RNA, 22 nt, Human
aguguuugucccguuagaaaug

SEQ ID NO: 174265 - RNA, 22 nt, Human
ugcagggaaaguguuggcagca

SEQ ID NO: 174266 - RNA, 22 nt, Human
cuuugaauuccaguacaauaac

SEQ ID NO: 174267 - RNA, 22 nt, Human
acauuaaacuugcuuggcugua

SEQ ID NO: 174268 - RNA, 22 nt, Human
uuuagaaugugacuguauuuga

SEQ ID NO: 174269 - RNA, 22 nt, Human
guaggcagugguuggaagagaa

SEQ ID NO: 174270 - RNA, 18 nt, Human
uggcagggaggaaauaua

SEQ ID NO: 174271 - RNA, 22 nt, Human
aagcugcacuacuugagggacc

SEQ ID NO: 174272 - RNA, 22 nt, Human
uacccagcuucaagucaggacu

SEQ ID NO: 174273 - RNA, 22 nt, Human
uuugacucugggugcuuuuucg

SEQ ID NO: 174274 - RNA, 22 nt, Human
aguauaauuagauaucaaaagu

SEQ ID NO: 174275 - RNA, 22 nt, Human
cauuuguacagaacagcuuuau

SEQ ID NO: 174276 - RNA, 22 nt, Human
agagacaaugccaaugcacacg

SEQ ID NO: 174277 - RNA, 22 nt, Human
ucugggauuuuauagacaugcu

SEQ ID NO: 174278 - RNA, 22 nt, Human
cuucuucaaccugaaaguuuca

SEQ ID NO: 174279 - RNA, 22 nt, Human
agugugagaacggacuaauaaa

SEQ ID NO: 174280 - RNA, 22 nt, Human
uuucaguuacugcuauaucauu

SEQ ID NO: 174281 - RNA, 22 nt, Human
ccagagacgucggucagggcgc

SEQ ID NO: 174282 - RNA, 22 nt, Human
uauucauaguaaacaaaagugg

SEQ ID NO: 174283 - RNA, 22 nt, Human
uuuccuuccuugcuagccugag

SEQ ID NO: 174284 - RNA, 22 nt, Human
aagggcucugugugccucccca

SEQ ID NO: 174285 - RNA, 22 nt, Human
ucuagggaacaugggucaagcu

SEQ ID NO: 174286 - RNA, 22 nt, Human
gacaauaaaaugaucuuacagu

SEQ ID NO: 174287 - RNA, 22 nt, Human
uuggaggaggcauuggaggauu

SEQ ID NO: 174288 - RNA, 22 nt, Human
aggauuuacaaugauucuaggu

SEQ ID NO: 174289 - RNA, 22 nt, Human
auugauaucaguuugcugauug

SEQ ID NO: 174290 - RNA, 22 nt, Human
aguccggggucuggacaccugg

SEQ ID NO: 174291 - RNA, 22 nt, Human
gccaggcagagccccgugcagc

SEQ ID NO: 174292 - RNA, 22 nt, Human
uuugacuccugccuucuccugu

SEQ ID NO: 174293 - RNA, 20 nt, Human
agcugcaacagacuguaugg

SEQ ID NO: 174294 - RNA, 22 nt, Human
ucuucagagugaaagucuguga

SEQ ID NO: 174295 - RNA, 22 nt, Human
uauuccagaugaaaucauucag

SEQ ID NO: 174296 - RNA, 22 nt, Human
ugagcagaacacgggauccaug

SEQ ID NO: 174297 - RNA, 22 nt, Human
aauuuacaguugcugaugguac

SEQ ID NO: 174298 - RNA, 22 nt, Human
ugcagggccgcuggaggucaug

SEQ ID NO: 174299 - RNA, 22 nt, Human
uucuuguauguaugcaaaauca

SEQ ID NO: 174300 - RNA, 22 nt, Human
uaggcuaggcugaagguuuugg

SEQ ID NO: 174301 - RNA, 22 nt, Human
aaacaccagucccaguauacac

SEQ ID NO: 174302 - RNA, 22 nt, Human
ccagugugguagguccacaggu

SEQ ID NO: 174303 - RNA, 22 nt, Human
uccuggauuuaacccuggcucu

SEQ ID NO: 174304 - RNA, 22 nt, Human
caggccucuauggucagcugag

SEQ ID NO: 174305 - RNA, 22 nt, Human
ccagccuuacugcccuucagug

SEQ ID NO: 174306 - RNA, 22 nt, Human
gcugcaaaccugccaccuggug

SEQ ID NO: 174307 - RNA, 19 nt, Human
uguguccuagcagccaguc

SEQ ID NO: 174308 - RNA, 22 nt, Human
ucagguguagguuguucaguuu

SEQ ID NO: 174309 - RNA, 22 nt, Human
cagggcucacucggcuggcguc

SEQ ID NO: 174310 - RNA, 22 nt, Human
uguguccuucugggagucccag

SEQ ID NO: 174311 - RNA, 22 nt, Human
cuugaagaaaguauguugggau

SEQ ID NO: 174312 - RNA, 22 nt, Human
ugguuuaccccuguccuauauc

SEQ ID NO: 174313 - RNA, 22 nt, Human
agagcugaauuuggguggugga

SEQ ID NO: 174314 - RNA, 22 nt, Human
uccaggagaggccugaccaggu

SEQ ID NO: 174315 - RNA, 22 nt, Human
uucacauaaugauacaaagcuu

SEQ ID NO: 174316 - RNA, 22 nt, Human
cauuuguaucauauguaucuua

SEQ ID NO: 174317 - RNA, 22 nt, Human
auucaagagcccauguuuccug

SEQ ID NO: 174318 - RNA, 22 nt, Human
uuuccucacacagaagaucuug

SEQ ID NO: 174319 - RNA, 22 nt, Human
cagagcagugaggaguugugua

SEQ ID NO: 174320 - RNA, 22 nt, Human
uccaggaggugaggggaccaaa

SEQ ID NO: 174321 - RNA, 20 nt, Human
acagaugaggaaaaugaagu

SEQ ID NO: 174322 - RNA, 22 nt, Human
gcagguguggauuugcauccag

SEQ ID NO: 174323 - RNA, 22 nt, Human
ucuuccugaaacccuguuccag

SEQ ID NO: 174324 - RNA, 22 nt, Human
gaugagguguguggccacuaga

SEQ ID NO: 174325 - RNA, 22 nt, Human
gcuguucauuagaaauagaaug

SEQ ID NO: 174326 - RNA, 22 nt, Human
auauuagguuggugcaaaagua

SEQ ID NO: 174327 - RNA, 22 nt, Human
uauacagaacugcacgugcacg

SEQ ID NO: 174328 - RNA, 22 nt, Human
aaucagaaauugagggucuggu

SEQ ID NO: 174329 - RNA, 22 nt, Human
uuccugggugguccugguagag

SEQ ID NO: 174330 - RNA, 22 nt, Human
aaauuaguacauugcaaagucc

SEQ ID NO: 174331 - RNA, 22 nt, Human
acccagccuacaaagcucaccu

SEQ ID NO: 174332 - RNA, 22 nt, Human
ugaucugaaggacaugggaccc

SEQ ID NO: 174333 - RNA, 22 nt, Human
uuguugcucuuguugccacaug

SEQ ID NO: 174334 - RNA, 22 nt, Human
cagucaccaccagguggcagua

SEQ ID NO: 174335 - RNA, 22 nt, Human
gggacagaaggaagugagcaca

SEQ ID NO: 174336 - RNA, 22 nt, Human
gagggcaguagccucguacccu

SEQ ID NO: 174337 - RNA, 19 nt, Human
aguuuauuauaggugauuc

SEQ ID NO: 174338 - RNA, 22 nt, Human
uggagcaggaagucuauggcug

SEQ ID NO: 174339 - RNA, 22 nt, Human
uuguccaaaguaacacaucuag

SEQ ID NO: 174340 - RNA, 22 nt, Human
uaauuccaccuuuuuccaacuu

SEQ ID NO: 174341 - RNA, 23 nt, Human
ugcuggguaaauagcugaguaac

SEQ ID NO: 174342 - RNA, 22 nt, Human
aaagauucgagcgauguauaaa

SEQ ID NO: 174343 - RNA, 22 nt, Human
gaugaggucuacauuguuaaaa

SEQ ID NO: 174344 - RNA, 21 nt, Human
ccagagagagggaaguggguu

SEQ ID NO: 174345 - RNA, 22 nt, Human
gcagguggauauugcuacuuga

SEQ ID NO: 174346 - RNA, 22 nt, Human
uuuccagguauuaauacuguau

SEQ ID NO: 174347 - RNA, 18 nt, Human
cuucucccaucuuggcca

SEQ ID NO: 174348 - RNA, 22 nt, Human
gcagguguccugggcuggcagu

SEQ ID NO: 174349 - RNA, 22 nt, Human
aagcagacaucccauacuuuug

SEQ ID NO: 174350 - RNA, 22 nt, Human
ucuguggauuuuaguguucaug

SEQ ID NO: 174351 - RNA, 22 nt, Human
aauuccaggaugcaggaggugc

SEQ ID NO: 174352 - RNA, 22 nt, Human
cagggcagggauguugcggcag

SEQ ID NO: 174353 - RNA, 22 nt, Human
uaugcacauucacacaaaaaug

SEQ ID NO: 174354 - RNA, 22 nt, Human
acagauuuaggacuguagcgau

SEQ ID NO: 174355 - RNA, 22 nt, Human
gguacaauccacuguggguuag

SEQ ID NO: 174356 - RNA, 22 nt, Human
ccagucacucugugagagcuac

SEQ ID NO: 174357 - RNA, 22 nt, Human
cagggcagagccaggauuucaa

SEQ ID NO: 174358 - RNA, 22 nt, Human
aucuucaaagggauguccaugg

SEQ ID NO: 174359 - RNA, 19 nt, Human
ugcugggucauauggaaac

SEQ ID NO: 174360 - RNA, 22 nt, Human
ggaguugauuuuggauauauua

SEQ ID NO: 174361 - RNA, 23 nt, Human
ucuaauacaugaaaccuagaugu

SEQ ID NO: 174362 - RNA, 22 nt, Human
uuuacagaugaggauacugagg

SEQ ID NO: 174363 - RNA, 22 nt, Human
uuuaaaaucagaugggaguugg

SEQ ID NO: 174364 - RNA, 22 nt, Human
ucuuuccauggccacacagucu

SEQ ID NO: 174365 - RNA, 22 nt, Human
ccagagagguagcuuacccucu

SEQ ID NO: 174366 - RNA, 22 nt, Human
uaauucagggccagaaucccca

SEQ ID NO: 174367 - RNA, 22 nt, Human
aacauucuauuuugcuaaaaca

SEQ ID NO: 174368 - RNA, 22 nt, Human
ugucauaaucaguuuugcaugu

SEQ ID NO: 174369 - RNA, 22 nt, Human
cuggaggagcaauaugguuagg

SEQ ID NO: 174370 - RNA, 22 nt, Human
ucccaguggugggugcacauuu

SEQ ID NO: 174371 - RNA, 22 nt, Human
uuauugagcacauaguaugugg

SEQ ID NO: 174372 - RNA, 22 nt, Human
cuuauugaaagccccugugccu

SEQ ID NO: 174373 - RNA, 22 nt, Human
aaaacuaaauacgcuuugccuc

SEQ ID NO: 174374 - RNA, 22 nt, Human
cuuacaaaggagaggagauagg

SEQ ID NO: 174375 - RNA, 22 nt, Human
uuacauguuuacggauacacuu

SEQ ID NO: 174376 - RNA, 16 nt, Human
cuacccagugagaagg

SEQ ID NO: 174377 - RNA, 22 nt, Human
ucaaucacguguuccauguucu

SEQ ID NO: 174378 - RNA, 22 nt, Human
acagcuuuaguguggguggugc

SEQ ID NO: 174379 - RNA, 22 nt, Human
uaacuuuaguguaugagguaag

SEQ ID NO: 174380 - RNA, 22 nt, Human
uguuaggguccugugcaggggc

SEQ ID NO: 174381 - RNA, 22 nt, Human
gucugcccucacgccagcuggg

SEQ ID NO: 174382 - RNA, 22 nt, Human
acagcagguuauuguuauggca

SEQ ID NO: 174383 - RNA, 22 nt, Human
caaagucagcugccagucccaa

SEQ ID NO: 174384 - RNA, 23 nt, Human
ugggaccuguuugcccacagaug

SEQ ID NO: 174385 - RNA, 22 nt, Human
ucaggugucuugugggauuuua

SEQ ID NO: 174386 - RNA, 22 nt, Human
auuaggcauuauggggauaagg

SEQ ID NO: 174387 - RNA, 22 nt, Human
gaauuucaaagagguuaagagg

SEQ ID NO: 174388 - RNA, 22 nt, Human
ucguccugugcaccugccugca

SEQ ID NO: 174389 - RNA, 22 nt, Human
cuguccuguacuuugaggcccu

SEQ ID NO: 174390 - RNA, 22 nt, Human
gcugggucuggcugugagccgg

SEQ ID NO: 174391 - RNA, 22 nt, Human
acaugaaguggucagaucaaac

SEQ ID NO: 174392 - RNA, 22 nt, Human
ggcaggugccaguuggcuuggg

SEQ ID NO: 174393 - RNA, 22 nt, Human
ucagugugaguaccaugcucag

SEQ ID NO: 174394 - RNA, 22 nt, Human
cuuccagaggaacucugcagug

SEQ ID NO: 174395 - RNA, 22 nt, Human
acagcauugcuccaucucaaga

SEQ ID NO: 174396 - RNA, 22 nt, Human
caguagacacauuaauauggaa

SEQ ID NO: 174397 - RNA, 22 nt, Human
augugcaaauccaaugugaaug

SEQ ID NO: 174398 - RNA, 23 nt, Human
ugcaggugauuaauccaguuuca

SEQ ID NO: 174399 - RNA, 22 nt, Human
uuccagugaugggcaauuuggu

SEQ ID NO: 174400 - RNA, 22 nt, Human
cuacagaagaaacuaucacuau

SEQ ID NO: 174401 - RNA, 21 nt, Human
uccugcagggcagcagagugg

SEQ ID NO: 174402 - RNA, 22 nt, Human
cacagguguguccuggucuugu

SEQ ID NO: 174403 - RNA, 22 nt, Human
auuauccucagaaaacauguga

SEQ ID NO: 174404 - RNA, 21 nt, Human
uggcagggguaguaguacagc

SEQ ID NO: 174405 - RNA, 22 nt, Human
uccugcagaccucagucagguc

SEQ ID NO: 174406 - RNA, 22 nt, Human
ucacaaauauuuuaacaguagg

SEQ ID NO: 174407 - RNA, 22 nt, Human
uucuacaauaugaauaaugaag

SEQ ID NO: 174408 - RNA, 22 nt, Human
uccauucuaugcuuacauuuau

SEQ ID NO: 174409 - RNA, 22 nt, Human
gggcagguauuuaucuucuauu

SEQ ID NO: 174410 - RNA, 22 nt, Human
auccaugauuaguaggauaaag

SEQ ID NO: 174411 - RNA, 22 nt, Human
cuucaguucuaaaguagaaugu

SEQ ID NO: 174412 - RNA, 22 nt, Human
gcagggcagaccuccagccuau

SEQ ID NO: 174413 - RNA, 22 nt, Human
aagaaaucagaaaagcauucgu

SEQ ID NO: 174414 - RNA, 22 nt, Human
gacuuuauccugccugaccacg

SEQ ID NO: 174415 - RNA, 22 nt, Human
gguacaauucugggguaugcuc

SEQ ID NO: 174416 - RNA, 21 nt, Human
uggaccuguccuucucgcugu

SEQ ID NO: 174417 - RNA, 20 nt, Human
uuccagagaucugcauuuua

SEQ ID NO: 174418 - RNA, 22 nt, Human
uuuaucuguuccucuuggaggc

SEQ ID NO: 174419 - RNA, 22 nt, Human
cagauucucacuguauucaggu

SEQ ID NO: 174420 - RNA, 22 nt, Human
acaaauuuauugaagggcauau

SEQ ID NO: 174421 - RNA, 22 nt, Human
caagaaucagaccugucagggu

SEQ ID NO: 174422 - RNA, 22 nt, Human
ucuggccugaaaguccaugcuu

SEQ ID NO: 174423 - RNA, 22 nt, Human
auacuaaaguauagaacuuagu

SEQ ID NO: 174424 - RNA, 22 nt, Human
acccagcuguuucccgugucau

SEQ ID NO: 174425 - RNA, 23 nt, Human
gccaggcacaugguggacacgca

SEQ ID NO: 174426 - RNA, 22 nt, Human
uuucacaaaugucuuuaacuug

SEQ ID NO: 174427 - RNA, 22 nt, Human
gcaguguuaggaauaaaaauga

SEQ ID NO: 174428 - RNA, 22 nt, Human
ugaauaaucauguccauagugu

SEQ ID NO: 174429 - RNA, 22 nt, Human
agcagguguagggcucuuugua

SEQ ID NO: 174430 - RNA, 22 nt, Human
uuaaauuccagccucauaauag

SEQ ID NO: 174431 - RNA, 20 nt, Human
auuccucagccccagccuca

SEQ ID NO: 174432 - RNA, 22 nt, Human
auuaggcagggcaugguggcuc

SEQ ID NO: 174433 - RNA, 22 nt, Human
gaaguucaaaagacagauuuga

SEQ ID NO: 174434 - RNA, 18 nt, Human
uuccuucugauguauaug

SEQ ID NO: 174435 - RNA, 22 nt, Human
cauuuguaguuaaaaaugucuc

SEQ ID NO: 174436 - RNA, 22 nt, Human
augugucuuugagacucugcua

SEQ ID NO: 174437 - RNA, 22 nt, Human
guccugguccugccuccccaug

SEQ ID NO: 174438 - RNA, 22 nt, Human
uaucagaaaucaacacacagug

SEQ ID NO: 174439 - RNA, 22 nt, Human
acaagccaauuacugugccagg

SEQ ID NO: 174440 - RNA, 22 nt, Human
gaaucauuuagcucugcaugga

SEQ ID NO: 174441 - RNA, 22 nt, Human
gcagggcaaauguggaaaggag

SEQ ID NO: 174442 - RNA, 22 nt, Human
ccagccacugggccacugccag

SEQ ID NO: 174443 - RNA, 22 nt, Human
cagggcucccaaauaucucuuc

SEQ ID NO: 174444 - RNA, 22 nt, Human
aaggugucaggcuugggaaagu

SEQ ID NO: 174445 - RNA, 22 nt, Human
agcagggccucuggcacugguc

SEQ ID NO: 174446 - RNA, 22 nt, Human
auuguauaauuguauugccaaa

SEQ ID NO: 174447 - RNA, 22 nt, Human
augaaaauguacauguguauaa

SEQ ID NO: 174448 - RNA, 22 nt, Human
uguggggcuuacaaaggcagau

SEQ ID NO: 174449 - RNA, 22 nt, Human
acagaaauugggcaaauggaag

SEQ ID NO: 174450 - RNA, 22 nt, Human
cauuuucagcacccaucugaaa

SEQ ID NO: 174451 - RNA, 22 nt, Human
uccuucuggaggcucuaagggg

SEQ ID NO: 174452 - RNA, 22 nt, Human
uuauuguuuacuaguuugcaga

SEQ ID NO: 174453 - RNA, 22 nt, Human
ucagaauaugcuaaugacauuu

SEQ ID NO: 174454 - RNA, 22 nt, Human
aaauuauaggugccaccuugga

SEQ ID NO: 174455 - RNA, 22 nt, Human
agucaaagaagaugguuccaaa

SEQ ID NO: 174456 - RNA, 22 nt, Human
acaguaaaaagccuuagaauuu

SEQ ID NO: 174457 - RNA, 22 nt, Human
uuuauuaugauggacaccuucg

SEQ ID NO: 174458 - RNA, 22 nt, Human
caguccuugcuaugacccugag

SEQ ID NO: 174459 - RNA, 22 nt, Human
gguacaaugguucauuuuaugu

SEQ ID NO: 174460 - RNA, 22 nt, Human
uccuggguaaacacugaccuuu

SEQ ID NO: 174461 - RNA, 22 nt, Human
agcaggugacagggcuguggug

SEQ ID NO: 174462 - RNA, 22 nt, Human
ccagcuauugcuguguaacagu

SEQ ID NO: 174463 - RNA, 22 nt, Human
caauuucaugccauguauugcu

SEQ ID NO: 174464 - RNA, 22 nt, Human
uccugcagagacagaggccuca

SEQ ID NO: 174465 - RNA, 22 nt, Human
uguuucaggaccuaucuuuuag

SEQ ID NO: 174466 - RNA, 22 nt, Human
cuaugaaaggauuuggaguugu

SEQ ID NO: 174467 - RNA, 22 nt, Human
uuagggacaaauuugcagaacc

SEQ ID NO: 174468 - RNA, 22 nt, Human
ucauuguauuaaaauauugguu

SEQ ID NO: 174469 - RNA, 22 nt, Human
uggguuuaaacucaacucuaaa

SEQ ID NO: 174470 - RNA, 22 nt, Human
ucaugugucugccaguguuuau

SEQ ID NO: 174471 - RNA, 22 nt, Human
cuaauacacccuauugcuuguu

SEQ ID NO: 174472 - RNA, 22 nt, Human
aauuucaaacuaauaggaacca

SEQ ID NO: 174473 - RNA, 22 nt, Human
uaggcaacaugucgaauacugu

SEQ ID NO: 174474 - RNA, 22 nt, Human
uuucuucuugauuuaaacaggg

SEQ ID NO: 174475 - RNA, 22 nt, Human
caugugucacagccuuuuauug

SEQ ID NO: 174476 - RNA, 22 nt, Human
agucaaaggguauuuggauuga

SEQ ID NO: 174477 - RNA, 22 nt, Human
aacauucugguucuaaaaaccu

SEQ ID NO: 174478 - RNA, 22 nt, Human
cauucuuacacaauauuuuaau

SEQ ID NO: 174479 - RNA, 22 nt, Human
ugaaagcacaaguucuaacagg

SEQ ID NO: 174480 - RNA, 22 nt, Human
ugacauguaguuagaaaauagg

SEQ ID NO: 174481 - RNA, 22 nt, Human
ucuggagggcccacauccacaa

SEQ ID NO: 174482 - RNA, 22 nt, Human
cucugaauggacacuccagugu

SEQ ID NO: 174483 - RNA, 23 nt, Human
cuuuucauugccuuagcgcagag

SEQ ID NO: 174484 - RNA, 22 nt, Human
uguggcagaggaggcagcgucc

SEQ ID NO: 174485 - RNA, 22 nt, Human
auuuaagacugacuucaccagu

SEQ ID NO: 174486 - RNA, 22 nt, Human
gugggggacccaggugcugucc

SEQ ID NO: 174487 - RNA, 22 nt, Human
uuucaacauauaccauaaugcc

SEQ ID NO: 174488 - RNA, 22 nt, Human
ucaacuuuaguguagcuauuua

SEQ ID NO: 174489 - RNA, 22 nt, Human
uuuauuuauccuucuggauugc

SEQ ID NO: 174490 - RNA, 22 nt, Human
gucugcccugagcucccagugc

SEQ ID NO: 174491 - RNA, 22 nt, Human
ucacagaagagauauugacaga

SEQ ID NO: 174492 - RNA, 22 nt, Human
aagucaccccacacucuuggga

SEQ ID NO: 174493 - RNA, 22 nt, Human
aagcuuuaagugucagucagcc

SEQ ID NO: 174494 - RNA, 22 nt, Human
aaggugucggguuagcucagcc

SEQ ID NO: 174495 - RNA, 22 nt, Human
uuuaggcacaacuacucagcua

SEQ ID NO: 174496 - RNA, 22 nt, Human
ugacaugugucuccuuccgucu

SEQ ID NO: 174497 - RNA, 22 nt, Human
cagaggcagacccuccagggcg

SEQ ID NO: 174498 - RNA, 22 nt, Human
acaggugucuaaggcagacagc

SEQ ID NO: 174499 - RNA, 22 nt, Human
uccagcauauauagagaaugag

SEQ ID NO: 174500 - RNA, 22 nt, Human
acaggacauguaccaggugguc

SEQ ID NO: 174501 - RNA, 21 nt, Human
uuucuucacuuugccccaugu

SEQ ID NO: 174502 - RNA, 22 nt, Human
augagacuaccuguaauguggc

SEQ ID NO: 174503 - RNA, 22 nt, Human
ucuucagauaaagggagaguau

SEQ ID NO: 174504 - RNA, 22 nt, Human
ugucaccaccggaagaaacugc

SEQ ID NO: 174505 - RNA, 22 nt, Human
uguguccuaugaaagaggguua

SEQ ID NO: 174506 - RNA, 22 nt, Human
cuuucuucaucaagugccacgu

SEQ ID NO: 174507 - RNA, 22 nt, Human
aguugaauaauuagacauaucu

SEQ ID NO: 174508 - RNA, 22 nt, Human
uguccugggucccugcuagaag

SEQ ID NO: 174509 - RNA, 22 nt, Human
auggaggaugugcagcaugggc

SEQ ID NO: 174510 - RNA, 22 nt, Human
ugcaaaauaaugaacgauuuuu

SEQ ID NO: 174511 - RNA, 22 nt, Human
agacagacugguuugaauuggu

SEQ ID NO: 174512 - RNA, 22 nt, Human
guccaugacugugacucacaug

SEQ ID NO: 174513 - RNA, 19 nt, Human
uuagggacaugaauucuag

SEQ ID NO: 174514 - RNA, 22 nt, Human
ccagggcauguccaagacuuag

SEQ ID NO: 174515 - RNA, 22 nt, Human
ugcaggugguuuggacacugcu

SEQ ID NO: 174516 - RNA, 22 nt, Human
acuuuauuuccuauugcaucca

SEQ ID NO: 174517 - RNA, 22 nt, Human
cagacaggcaggugcugcuuug

SEQ ID NO: 174518 - RNA, 23 nt, Human
ugcaggugugcagagggcucuug

SEQ ID NO: 174519 - RNA, 22 nt, Human
aguguguccagaaaucuguauu

SEQ ID NO: 174520 - RNA, 22 nt, Human
acagacaguaaauaguguggcu

SEQ ID NO: 174521 - RNA, 22 nt, Human
uuacuuuugcaccaaacuaaua

SEQ ID NO: 174522 - RNA, 22 nt, Human
aaaugcuaacaaggaaugcugc

SEQ ID NO: 174523 - RNA, 22 nt, Human
accaggcagcaccaaagccggu

SEQ ID NO: 174524 - RNA, 22 nt, Human
agauaaaaugguucaaaggcua

SEQ ID NO: 174525 - RNA, 22 nt, Human
ucucuuucuauaugugagucuu

SEQ ID NO: 174526 - RNA, 22 nt, Human
agggaccugucaaugacaguua

SEQ ID NO: 174527 - RNA, 22 nt, Human
uggacaugucuucuccaagaaa

SEQ ID NO: 174528 - RNA, 22 nt, Human
gcagagugaagggagaggugug

SEQ ID NO: 174529 - RNA, 22 nt, Human
ggcagggaagcuggcaucacgg

SEQ ID NO: 174530 - RNA, 22 nt, Human
cagcuuuaccuuuaggaguaac

SEQ ID NO: 174531 - RNA, 22 nt, Human
aagggacccuggaucaaaugga

SEQ ID NO: 174532 - RNA, 22 nt, Human
ugcaaaaacagccuugaggccu

SEQ ID NO: 174533 - RNA, 22 nt, Human
auuuacugagguaaauaaacug

SEQ ID NO: 174534 - RNA, 22 nt, Human
uguguccugguguuaauuuuau

SEQ ID NO: 174535 - RNA, 22 nt, Human
cuuaauuacccaaugugguagg

SEQ ID NO: 174536 - RNA, 22 nt, Human
gacccagaaggagugcccuaga

SEQ ID NO: 174537 - RNA, 22 nt, Human
uacauguuauuucacuauuggu

SEQ ID NO: 174538 - RNA, 22 nt, Human
aauuaguaaccuaauuccaucu

SEQ ID NO: 174539 - RNA, 22 nt, Human
ucauuguuucugcuuuucauga

SEQ ID NO: 174540 - RNA, 21 nt, Human
ugacagguuuaggauuaaaau

SEQ ID NO: 174541 - RNA, 22 nt, Human
acagcuuuuuacuaauagauug

SEQ ID NO: 174542 - RNA, 22 nt, Human
auuuucauuuugcagggugaga

SEQ ID NO: 174543 - RNA, 22 nt, Human
cuuaggcauccaggguucuucc

SEQ ID NO: 174544 - RNA, 22 nt, Human
aauaauuagugggacagagaac

SEQ ID NO: 174545 - RNA, 22 nt, Human
gggcaaagugguggaggcaguu

SEQ ID NO: 174546 - RNA, 22 nt, Human
gaagugaagagauuagaaauca

SEQ ID NO: 174547 - RNA, 22 nt, Human
uuuguaaauagcaguacucaug

SEQ ID NO: 174548 - RNA, 22 nt, Human
ugggaccagauaaagggagguc

SEQ ID NO: 174549 - RNA, 22 nt, Human
uaugauguguaccuaagucacc

SEQ ID NO: 174550 - RNA, 22 nt, Human
uuugugcagauguauauuugug

SEQ ID NO: 174551 - RNA, 22 nt, Human
uggccucaaucuguccuccagc

SEQ ID NO: 174552 - RNA, 22 nt, Human
agggacccauagagagaccagu

SEQ ID NO: 174553 - RNA, 22 nt, Human
auuuacuggaaaaacuaugagc

SEQ ID NO: 174554 - RNA, 22 nt, Human
ccagcuuuccaggguugacugg

SEQ ID NO: 174555 - RNA, 22 nt, Human
agacagacacaugguaacagau

SEQ ID NO: 174556 - RNA, 22 nt, Human
cuaaaauuaccuaccaguuuag

SEQ ID NO: 174557 - RNA, 22 nt, Human
cagcaugaugcucacacaaaac

SEQ ID NO: 174558 - RNA, 22 nt, Human
ucacaaauagcuauauuaagga

SEQ ID NO: 174559 - RNA, 22 nt, Human
cagguggugccuccaggcuggu

SEQ ID NO: 174560 - RNA, 23 nt, Human
aaugggugcaacuauccaugaca

SEQ ID NO: 174561 - RNA, 22 nt, Human
uauuccagguauucuucaagag

SEQ ID NO: 174562 - RNA, 22 nt, Human
acaacuuuguagcaauuccacg

SEQ ID NO: 174563 - RNA, 22 nt, Human
augaaauggugguuuuccauuu

SEQ ID NO: 174564 - RNA, 22 nt, Human
uucuucaguuugguaaauguaa

SEQ ID NO: 174565 - RNA, 22 nt, Human
cuggaggaauaaucuccuaccc

SEQ ID NO: 174566 - RNA, 22 nt, Human
acagaauuuacacaucucuaaa

SEQ ID NO: 174567 - RNA, 22 nt, Human
auguguccaaggccacaauagc

SEQ ID NO: 174568 - RNA, 22 nt, Human
ccuggguggcugccugccuuuc

SEQ ID NO: 174569 - RNA, 22 nt, Human
ucaggcaggcucagaggaaaac

SEQ ID NO: 174570 - RNA, 22 nt, Human
ugggaccugaagcagguuggca

SEQ ID NO: 174571 - RNA, 20 nt, Human
acccagcucugugcccuggg

SEQ ID NO: 174572 - RNA, 22 nt, Human
uccaugaggcagggaggcuggc

SEQ ID NO: 174573 - RNA, 20 nt, Human
uauuccaaggguagagaaaa

SEQ ID NO: 174574 - RNA, 22 nt, Human
caacuuucuguuaaauguuagu

SEQ ID NO: 174575 - RNA, 22 nt, Human
uuagcuuucaugaaccuggucg

SEQ ID NO: 174576 - RNA, 22 nt, Human
ucaugaauauugaaugcuucau

SEQ ID NO: 174577 - RNA, 23 nt, Human
ggauuuaguggaugagcugagug

SEQ ID NO: 174578 - RNA, 22 nt, Human
ugacaggugcugggggcagugu

SEQ ID NO: 174579 - RNA, 22 nt, Human
aagccggcugggccgaggcugc

SEQ ID NO: 174580 - RNA, 22 nt, Human
aaagcugcaagcuccugaggaa

SEQ ID NO: 174581 - RNA, 22 nt, Human
aguucaguaguccuucauugua

SEQ ID NO: 174582 - RNA, 22 nt, Human
cccaggaguaagugacauuguu

SEQ ID NO: 174583 - RNA, 22 nt, Human
uagucaccugugagcugcguag

SEQ ID NO: 174584 - RNA, 22 nt, Human
aagguggugaucaucuugaagg

SEQ ID NO: 174585 - RNA, 22 nt, Human
ccagagagcuacaaggcauaaa

SEQ ID NO: 174586 - RNA, 22 nt, Human
uggaauguuuccccagccugca

SEQ ID NO: 174587 - RNA, 22 nt, Human
uugcugggcaugucuuaauucu

SEQ ID NO: 174588 - RNA, 22 nt, Human
guuuauuauacaacaaaagcua

SEQ ID NO: 174589 - RNA, 22 nt, Human
ggcucugccucugacccucugg

SEQ ID NO: 174590 - RNA, 22 nt, Human
ggaaggaaguaaaugaugcuau

SEQ ID NO: 174591 - RNA, 18 nt, Human
caauuucaauggucugaa

SEQ ID NO: 174592 - RNA, 22 nt, Human
ucuucagauggccaguuguccc

SEQ ID NO: 174593 - RNA, 23 nt, Human
ucuguucaaggcuuucuccuuga

SEQ ID NO: 174594 - RNA, 22 nt, Human
cagacagguugcaaaacuucaa

SEQ ID NO: 174595 - RNA, 22 nt, Human
cuguuaauugugaauuuuacau

SEQ ID NO: 174596 - RNA, 22 nt, Human
cugugucccuugucccagagcc

SEQ ID NO: 174597 - RNA, 22 nt, Human
acaggauuagcaaguaaucagg

SEQ ID NO: 174598 - RNA, 22 nt, Human
gguguccuucguccgcuggcau

SEQ ID NO: 174599 - RNA, 22 nt, Human
ugcuggagucucuugacccugg

SEQ ID NO: 174600 - RNA, 22 nt, Human
uuugguauugcacacugucuuc

SEQ ID NO: 174601 - RNA, 22 nt, Human
aucuaaaaggagcucuuuaucu

SEQ ID NO: 174602 - RNA, 22 nt, Human
uggaugucauaguuggauauac

SEQ ID NO: 174603 - RNA, 22 nt, Human
cugucccuucauuauucacuac

SEQ ID NO: 174604 - RNA, 16 nt, Human
gcagguggggcgcgca

SEQ ID NO: 174605 - RNA, 20 nt, Human
uccaggcagcucagaguguc

SEQ ID NO: 174606 - RNA, 22 nt, Human
gaggauggaggcaguuagggcc

SEQ ID NO: 174607 - RNA, 22 nt, Human
ucagacagcuugggauaacuga

SEQ ID NO: 174608 - RNA, 22 nt, Human
uugguuuguucaccaucaagca

SEQ ID NO: 174609 - RNA, 22 nt, Human
uaguuuuacuugcgaugauaau

SEQ ID NO: 174610 - RNA, 22 nt, Human
gcucucuuuuuccagugguggu

SEQ ID NO: 174611 - RNA, 22 nt, Human
gagcaggucuuucauggugcau

SEQ ID NO: 174612 - RNA, 22 nt, Human
acucuuauuuugaaguaauaau

SEQ ID NO: 174613 - RNA, 22 nt, Human
gauuucaaggauguuagaggug

SEQ ID NO: 174614 - RNA, 22 nt, Human
uuccaugaaauguguuaugcuu

SEQ ID NO: 174615 - RNA, 22 nt, Human
cauauuugguauaacuuaagca

SEQ ID NO: 174616 - RNA, 22 nt, Human
uguguccuccagggagauguaa

SEQ ID NO: 174617 - RNA, 22 nt, Human
gcaguguuuacauauuagaaac

SEQ ID NO: 174618 - RNA, 22 nt, Human
uugagggucuggaucugcugcu

SEQ ID NO: 174619 - RNA, 22 nt, Human
cuuuauguccaccagacugcaa

SEQ ID NO: 174620 - RNA, 22 nt, Human
uucaacuuuaugcauauguauu

SEQ ID NO: 174621 - RNA, 22 nt, Human
uuuccaaauaaggucacauucu

SEQ ID NO: 174622 - RNA, 22 nt, Human
uuugcagugauucuugcaguga

SEQ ID NO: 174623 - RNA, 22 nt, Human
uuuccuaguucuaagaaaugua

SEQ ID NO: 174624 - RNA, 22 nt, Human
gcagggaccucacuacccccag

SEQ ID NO: 174625 - RNA, 22 nt, Human
gggaacuucagaaagucgcugc

SEQ ID NO: 174626 - RNA, 22 nt, Human
acuggaggccccucccagugaa

SEQ ID NO: 174627 - RNA, 22 nt, Human
uauuucagcaagaagaaugugg

SEQ ID NO: 174628 - RNA, 22 nt, Human
gacuuuauuacuaacccuguga

SEQ ID NO: 174629 - RNA, 22 nt, Human
uugguacaaaaguaacuguggu

SEQ ID NO: 174630 - RNA, 22 nt, Human
ugaauaauuccuuuuugucaag

SEQ ID NO: 174631 - RNA, 22 nt, Human
auuaauuuuaccuuuguaaaca

SEQ ID NO: 174632 - RNA, 22 nt, Human
gcuggagguagggagguccugu

SEQ ID NO: 174633 - RNA, 22 nt, Human
aaaguggugggcgaacucauca

SEQ ID NO: 174634 - RNA, 16 nt, Human
cagcuuuaugucagug

SEQ ID NO: 174635 - RNA, 22 nt, Human
gcagaagucagaccaucugaau

SEQ ID NO: 174636 - RNA, 22 nt, Human
caugugucuaaucuacuaauau

SEQ ID NO: 174637 - RNA, 22 nt, Human
auagaauucuuugaaauuuaug

SEQ ID NO: 174638 - RNA, 22 nt, Human
acagguguuuuggaggaugauu

SEQ ID NO: 174639 - RNA, 22 nt, Human
aaauuucaguuggaaugagcuc

SEQ ID NO: 174640 - RNA, 22 nt, Human
cagcuuugccaaguaaggucuu

SEQ ID NO: 174641 - RNA, 19 nt, Human
ggaacuuggccuuuaccca

SEQ ID NO: 174642 - RNA, 21 nt, Human
ugacagcauagagcagggagg

SEQ ID NO: 174643 - RNA, 22 nt, Human
gcaguccaaaguggcucucacc

SEQ ID NO: 174644 - RNA, 20 nt, Human
uuugacucaggccuuuagcc

SEQ ID NO: 174645 - RNA, 22 nt, Human
aaguccaugaucaagauguggc

SEQ ID NO: 174646 - RNA, 22 nt, Human
uauuccaaaauaguuaagcacu

SEQ ID NO: 174647 - RNA, 22 nt, Human
agauggucaaggauacuguuca

SEQ ID NO: 174648 - RNA, 22 nt, Human
auaaagauuuuuaggcauuucu

SEQ ID NO: 174649 - RNA, 22 nt, Human
cuguccucaccuuggcaggggg

SEQ ID NO: 174650 - RNA, 22 nt, Human
aaugcaaagcaagcagagauuu

SEQ ID NO: 174651 - RNA, 22 nt, Human
aagacaggaacauagcaaaucc

SEQ ID NO: 174652 - RNA, 22 nt, Human
ggcagaccucuccagccccaca

SEQ ID NO: 174653 - RNA, 22 nt, Human
auuguauuagcacaauacaauu

SEQ ID NO: 174654 - RNA, 22 nt, Human
aguagaauagauggauacuauu

SEQ ID NO: 174655 - RNA, 22 nt, Human
cuguccugaggcagguggccug

SEQ ID NO: 174656 - RNA, 22 nt, Human
uuaugcaaaggggccucuuccu

SEQ ID NO: 174657 - RNA, 22 nt, Human
aacuuuaucggaacagguacuc

SEQ ID NO: 174658 - RNA, 22 nt, Human
ucagagagccucaggcacugcc

SEQ ID NO: 174659 - RNA, 22 nt, Human
uggcaaaggaaaugauuuaaga

SEQ ID NO: 174660 - RNA, 22 nt, Human
uagggcucacugagaugaauau

SEQ ID NO: 174661 - RNA, 22 nt, Human
ugggugugcccagauggugucc

SEQ ID NO: 174662 - RNA, 18 nt, Human
agcaggugcuguuucuuu

SEQ ID NO: 174663 - RNA, 21 nt, Human
acaggcucacgauccauuucu

SEQ ID NO: 174664 - RNA, 22 nt, Human
gacccugccaugagugacaggg

SEQ ID NO: 174665 - RNA, 20 nt, Human
aacacagauaccaaagguug

SEQ ID NO: 174666 - RNA, 22 nt, Human
aaaggcuaugagauagaagaua

SEQ ID NO: 174667 - RNA, 22 nt, Human
gggaggaaugcaacuuauuuag

SEQ ID NO: 174668 - RNA, 22 nt, Human
acauucacgcucucaaagcuga

SEQ ID NO: 174669 - RNA, 22 nt, Human
acauaauaaaaauaacagcuca

SEQ ID NO: 174670 - RNA, 21 nt, Human
uccuucucuaugauugucuga

SEQ ID NO: 174671 - RNA, 22 nt, Human
caacuuuagcaauguuaguaua

SEQ ID NO: 174672 - RNA, 22 nt, Human
ucagaauuugauuccugggaua

SEQ ID NO: 174673 - RNA, 22 nt, Human
auucuuauuauaguaaaacagu

SEQ ID NO: 174674 - RNA, 22 nt, Human
cuuauuagaaagaaaagacaug

SEQ ID NO: 174675 - RNA, 22 nt, Human
augcuuaaccuugguguacaau

SEQ ID NO: 174676 - RNA, 22 nt, Human
ccaggcaggcgauggugcagug

SEQ ID NO: 174677 - RNA, 22 nt, Human
aggcuucuucuuccuauuuagu

SEQ ID NO: 174678 - RNA, 22 nt, Human
uggcaggucaugaguggccacc

SEQ ID NO: 174679 - RNA, 19 nt, Human
aauuagggagucgguuaag

SEQ ID NO: 174680 - RNA, 22 nt, Human
auuuccaauuucauccaugucc

SEQ ID NO: 174681 - RNA, 22 nt, Human
auuucauagauuguaaaucccu

SEQ ID NO: 174682 - RNA, 22 nt, Human
uugcagcuuagugauguuaucu

SEQ ID NO: 174683 - RNA, 22 nt, Human
cuuuacugaagugaagaccugg

SEQ ID NO: 174684 - RNA, 22 nt, Human
uuucuaguaaucaauauaaagu

SEQ ID NO: 174685 - RNA, 22 nt, Human
cucuuccucucaugcggucaua

SEQ ID NO: 174686 - RNA, 22 nt, Human
caauuucacugacacccuggaa

SEQ ID NO: 174687 - RNA, 22 nt, Human
gaguccuuuguuccuugccaca

SEQ ID NO: 174688 - RNA, 22 nt, Human
cucuggaaaauugugugggggu

SEQ ID NO: 174689 - RNA, 22 nt, Human
agggcuccaaggaaguguagcu

SEQ ID NO: 174690 - RNA, 22 nt, Human
ugucuucaguaaaauacacuau

SEQ ID NO: 174691 - RNA, 22 nt, Human
auucucaguucacuaguuucuu

SEQ ID NO: 174692 - RNA, 22 nt, Human
cguauacaugaagacauugcug

SEQ ID NO: 174693 - RNA, 22 nt, Human
uuccaggaggagguacuagagg

SEQ ID NO: 174694 - RNA, 22 nt, Human
aagauauacuauuaaguaccau

SEQ ID NO: 174695 - RNA, 22 nt, Human
auguuucaaauauauagaguug

SEQ ID NO: 174696 - RNA, 22 nt, Human
aagggcaggaaaagauggaugu

SEQ ID NO: 174697 - RNA, 22 nt, Human
uuccggaagguucucuagaauu

SEQ ID NO: 174698 - RNA, 22 nt, Human
aguccuuacucgggggcccaga

SEQ ID NO: 174699 - RNA, 22 nt, Human
aaauggaauguguuuauaauuc

SEQ ID NO: 174700 - RNA, 22 nt, Human
uuugaaaauuagacacaggcua

SEQ ID NO: 174701 - RNA, 22 nt, Human
gggaccugccaaggccacccag

SEQ ID NO: 174702 - RNA, 20 nt, Human
aggcucagcugagcucuugg

SEQ ID NO: 174703 - RNA, 18 nt, Human
caauuucauccuuaagcc

SEQ ID NO: 174704 - RNA, 22 nt, Human
uucuucaacaaggacacuguua

SEQ ID NO: 174705 - RNA, 22 nt, Human
guaaacaugcuguguacucagc

SEQ ID NO: 174706 - RNA, 22 nt, Human
cagggcagggccacacccccug

SEQ ID NO: 174707 - RNA, 22 nt, Human
uagaaucuaguucauucauuug

SEQ ID NO: 174708 - RNA, 22 nt, Human
aacaguaaaaaucauuuaguug

SEQ ID NO: 174709 - RNA, 22 nt, Human
ucaggugucugccucuuugagu

SEQ ID NO: 174710 - RNA, 22 nt, Human
uccucagauauaaaugagggug

SEQ ID NO: 174711 - RNA, 22 nt, Human
cuuguccccagcagguugguuu

SEQ ID NO: 174712 - RNA, 22 nt, Human
uuacaaaguguuaugauaaaca

SEQ ID NO: 174713 - RNA, 22 nt, Human
uuucauaaggguuucuagacuu

SEQ ID NO: 174714 - RNA, 22 nt, Human
cuaaaugucauggaguuguaga

SEQ ID NO: 174715 - RNA, 22 nt, Human
uggaccugggguggccuccucu

SEQ ID NO: 174716 - RNA, 22 nt, Human
ugcuagggauauaguggcgagu

SEQ ID NO: 174717 - RNA, 22 nt, Human
aaagcagaggugauaugacuua

SEQ ID NO: 174718 - RNA, 19 nt, Human
ccagguggaacugagguag

SEQ ID NO: 174719 - RNA, 22 nt, Human
cauguaaagcauccuucuaggg

SEQ ID NO: 174720 - RNA, 22 nt, Human
uugcagggcaucuaugucuggu

SEQ ID NO: 174721 - RNA, 22 nt, Human
uguccuggccaaggccuugcuu

SEQ ID NO: 174722 - RNA, 22 nt, Human
uauccaaaggaacaaucacagc

SEQ ID NO: 174723 - RNA, 22 nt, Human
aaguccuuuauccuaaaagguc

SEQ ID NO: 174724 - RNA, 22 nt, Human
auacagaaaaugaugcagaguu

SEQ ID NO: 174725 - RNA, 22 nt, Human
caauuucauggauaaaagaugu

SEQ ID NO: 174726 - RNA, 22 nt, Human
auucacaaaaugauauagauac

SEQ ID NO: 174727 - RNA, 22 nt, Human
gaaguccugguccucucauuca

SEQ ID NO: 174728 - RNA, 22 nt, Human
aaagacagacggaaaccugagg

SEQ ID NO: 174729 - RNA, 22 nt, Human
uugcaggggaaggagcagagcu

SEQ ID NO: 174730 - RNA, 22 nt, Human
ggggaccuggccacccauccuu

SEQ ID NO: 174731 - RNA, 21 nt, Human
gguguccugagggauagguag

SEQ ID NO: 174732 - RNA, 22 nt, Human
gggcaggucugggucagccuga

SEQ ID NO: 174733 - RNA, 22 nt, Human
agauucuacucuagauccaugg

SEQ ID NO: 174734 - RNA, 17 nt, Human
acagggcagaaacagcu

SEQ ID NO: 174735 - RNA, 22 nt, Human
caguuucuuuccauuguuaccu

SEQ ID NO: 174736 - RNA, 17 nt, Human
accaggcaacacgccca

SEQ ID NO: 174737 - RNA, 22 nt, Human
aagcugcaaaaaauuucugucu

SEQ ID NO: 174738 - RNA, 22 nt, Human
caacauuugaguaaagaaaugg

SEQ ID NO: 174739 - RNA, 22 nt, Human
uuccucuagcuucucacuaaca

SEQ ID NO: 174740 - RNA, 22 nt, Human
ugcagggccagacuggguugga

SEQ ID NO: 174741 - RNA, 22 nt, Human
gaaggcaucacagaggcuguga

SEQ ID NO: 174742 - RNA, 22 nt, Human
ugauuucuuccuugucauuaga

SEQ ID NO: 174743 - RNA, 22 nt, Human
cugcagggaacugaggcccaga

SEQ ID NO: 174744 - RNA, 22 nt, Human
uugaauucauuucucauugagu

SEQ ID NO: 174745 - RNA, 22 nt, Human
gcaggcaguugcaguuuucuag

SEQ ID NO: 174746 - RNA, 22 nt, Human
auuaggcauucaugcagcuccu

SEQ ID NO: 174747 - RNA, 22 nt, Human
uuccauaauaaccugagagaaa

SEQ ID NO: 174748 - RNA, 22 nt, Human
uuugcugucagccgcuauuuuc

SEQ ID NO: 174749 - RNA, 22 nt, Human
aagggcucccaacucaucuuuu

SEQ ID NO: 174750 - RNA, 22 nt, Human
aucagaaauagucauguuacuu

SEQ ID NO: 174751 - RNA, 22 nt, Human
uaauuucagugcaagcucacgg

SEQ ID NO: 174752 - RNA, 22 nt, Human
agggcuccugaggcccuucugg

SEQ ID NO: 174753 - RNA, 21 nt, Human
acagggcaugcagcuggcugu

SEQ ID NO: 174754 - RNA, 22 nt, Human
agaggcacaacagucccauugu

SEQ ID NO: 174755 - RNA, 22 nt, Human
gacagguggguaccuuuaugga

SEQ ID NO: 174756 - RNA, 22 nt, Human
uuccaaagugcuggaauuacau

SEQ ID NO: 174757 - RNA, 22 nt, Human
ugcuccagugagcuggccaucc

SEQ ID NO: 174758 - RNA, 18 nt, Human
aaugugaauauuuacuuc

SEQ ID NO: 174759 - RNA, 20 nt, Human
guauuaggagguaaauguaa

SEQ ID NO: 174760 - RNA, 22 nt, Human
uacccaggaggaaacugaggcu

SEQ ID NO: 174761 - RNA, 20 nt, Human
ugugccuggcuuuguccuga

SEQ ID NO: 174762 - RNA, 22 nt, Human
uguguccuacugaggagcuccu

SEQ ID NO: 174763 - RNA, 22 nt, Human
aaugugucccuuauuucacagg

SEQ ID NO: 174764 - RNA, 22 nt, Human
auacagaaaaguggauagccag

SEQ ID NO: 174765 - RNA, 22 nt, Human
ugcuauacauguacauauuagu

SEQ ID NO: 174766 - RNA, 18 nt, Human
uuauuggugcugcuguuc

SEQ ID NO: 174767 - RNA, 22 nt, Human
acacacagguaaaggagccugg

SEQ ID NO: 174768 - RNA, 22 nt, Human
ucauguuauugacucauaauau

SEQ ID NO: 174769 - RNA, 22 nt, Human
cuggaggacagaggccaugucu

SEQ ID NO: 174770 - RNA, 22 nt, Human
ggcauccaguucugaucaacaa

SEQ ID NO: 174771 - RNA, 20 nt, Human
auguucuucauuuaauguuc

SEQ ID NO: 174772 - RNA, 22 nt, Human
ucuggaucggguuccucagguc

SEQ ID NO: 174773 - RNA, 22 nt, Human
gggcugacucugcacugagcca

SEQ ID NO: 174774 - RNA, 22 nt, Human
caagaaucuugcagcuuagacu

SEQ ID NO: 174775 - RNA, 22 nt, Human
acacauaagccuaaucaucucc

SEQ ID NO: 174776 - RNA, 22 nt, Human
uccgccaggacugagggcccau

SEQ ID NO: 174777 - RNA, 22 nt, Human
cuucucccgaagccgguucugc

SEQ ID NO: 174778 - RNA, 22 nt, Human
cacuuuauaugcauuaccucau

SEQ ID NO: 174779 - RNA, 22 nt, Human
ugggacacaaaccagaccagga

SEQ ID NO: 174780 - RNA, 22 nt, Human
uaaagaucuuaggaagauuuuc

SEQ ID NO: 174781 - RNA, 22 nt, Human
uuaguuagucccugguaccuuu

SEQ ID NO: 174782 - RNA, 22 nt, Human
ugggugcucugcuucccugcac

SEQ ID NO: 174783 - RNA, 22 nt, Human
auuuccaggagaaaggauuuua

SEQ ID NO: 174784 - RNA, 21 nt, Human
uggccaaacuggagcauuuga

SEQ ID NO: 174785 - RNA, 22 nt, Human
auuucuguauccugcugucaga

SEQ ID NO: 174786 - RNA, 22 nt, Human
acuucuucuucagcugggggau

SEQ ID NO: 174787 - RNA, 22 nt, Human
cagagcauuuggaagccacgug

SEQ ID NO: 174788 - RNA, 22 nt, Human
cagguugaaaguggaggagcua

SEQ ID NO: 174789 - RNA, 20 nt, Human
gaggccucagccucagcucc

SEQ ID NO: 174790 - RNA, 23 nt, Human
acagacuguauucaaaguaggac

SEQ ID NO: 174791 - RNA, 22 nt, Human
aauuccagcuaggaaaagcuuc

SEQ ID NO: 174792 - RNA, 22 nt, Human
ucagggcaccaaaaaagaugcc

SEQ ID NO: 174793 - RNA, 20 nt, Human
gcauguguauggaaggggga

SEQ ID NO: 174794 - RNA, 22 nt, Human
auuuucauggcuucugcucagu

SEQ ID NO: 174795 - RNA, 18 nt, Human
uaugugucuguuacaacu

SEQ ID NO: 174796 - RNA, 22 nt, Human
acaaaauuaccuaguuauuuuc

SEQ ID NO: 174797 - RNA, 22 nt, Human
cuuuccaaugucacuaugaauc

SEQ ID NO: 174798 - RNA, 22 nt, Human
cuguguccugcgucaagccaau

SEQ ID NO: 174799 - RNA, 22 nt, Human
aagguuaaauagguauuuucca

SEQ ID NO: 174800 - RNA, 22 nt, Human
caucuucagguucauggucaua

SEQ ID NO: 174801 - RNA, 22 nt, Human
auacagaagaacuauagccacu

SEQ ID NO: 174802 - RNA, 22 nt, Human
aaaauccugcugacucgagaug

SEQ ID NO: 174803 - RNA, 22 nt, Human
uggguccuuuuuggacuucuuc

SEQ ID NO: 174804 - RNA, 22 nt, Human
gaggcagcgggucaggaccgug

SEQ ID NO: 174805 - RNA, 22 nt, Human
uuucaugagauuccuccacauc

SEQ ID NO: 174806 - RNA, 22 nt, Human
cagguggcuucucccuaggcca

SEQ ID NO: 174807 - RNA, 22 nt, Human
ucuucacauggaacaugaagcu

SEQ ID NO: 174808 - RNA, 22 nt, Human
cugaggcucaagggcagguggg

SEQ ID NO: 174809 - RNA, 22 nt, Human
uacagacauucaauuuugaccc

SEQ ID NO: 174810 - RNA, 22 nt, Human
agaagggccagcuggacaccug

SEQ ID NO: 174811 - RNA, 22 nt, Human
gacagacaugggacuucauacu

SEQ ID NO: 174812 - RNA, 22 nt, Human
cucuggaauugaccugggaggg

SEQ ID NO: 174813 - RNA, 22 nt, Human
uuugaagacagaucaauauaag

SEQ ID NO: 174814 - RNA, 22 nt, Human
cagcacaguacaaggcacggau

SEQ ID NO: 174815 - RNA, 22 nt, Human
uaugugucccugcuacucaaca

SEQ ID NO: 174816 - RNA, 22 nt, Human
ugacuuccagcaacuuccucca

SEQ ID NO: 174817 - RNA, 19 nt, Human
gggcaaagugaucguccug

SEQ ID NO: 174818 - RNA, 22 nt, Human
uuucaaagcaacugaaaaggaa

SEQ ID NO: 174819 - RNA, 22 nt, Human
aggauuuaccgucauuuagucu

SEQ ID NO: 174820 - RNA, 22 nt, Human
uugacaauguccuuugaauuuc

SEQ ID NO: 174821 - RNA, 22 nt, Human
uucuggaucugagggggaagau

SEQ ID NO: 174822 - RNA, 22 nt, Human
acagaauuaaugaaaauuacaa

SEQ ID NO: 174823 - RNA, 22 nt, Human
uggcagguuaugcgggccacau

SEQ ID NO: 174824 - RNA, 22 nt, Human
ccagagaguaggaggcauuauu

SEQ ID NO: 174825 - RNA, 22 nt, Human
auauaacauacauacagaaaag

SEQ ID NO: 174826 - RNA, 22 nt, Human
uacaguauguucuugaauuugg

SEQ ID NO: 174827 - RNA, 21 nt, Human
aaucauacaaaacaugucagg

SEQ ID NO: 174828 - RNA, 20 nt, Human
guauuagguguuccucuuuc

SEQ ID NO: 174829 - RNA, 22 nt, Human
gcaguggcaugaugugggcuca

SEQ ID NO: 174830 - RNA, 22 nt, Human
auuuccugggucucacuccaga

SEQ ID NO: 174831 - RNA, 23 nt, Human
uuugaaguugacugccuuccaga

SEQ ID NO: 174832 - RNA, 22 nt, Human
accugcagccacuucucuccuu

SEQ ID NO: 174833 - RNA, 22 nt, Human
cuagaaauauuuuacagucaag

SEQ ID NO: 174834 - RNA, 22 nt, Human
uguguccugugaucucuagggu

SEQ ID NO: 174835 - RNA, 22 nt, Human
aaauauagugacacuuauaguc

SEQ ID NO: 174836 - RNA, 22 nt, Human
uacuuuauauuguggcuggcca

SEQ ID NO: 174837 - RNA, 22 nt, Human
cagggcuccccagagagccucu

SEQ ID NO: 174838 - RNA, 22 nt, Human
agguuuaugccuuggagcuggg

SEQ ID NO: 174839 - RNA, 20 nt, Human
ugcaggugggcccuucuggg

SEQ ID NO: 174840 - RNA, 20 nt, Human
uugauucaagggcugaugga

SEQ ID NO: 174841 - RNA, 22 nt, Human
acacuuuagaaaaaagaauggu

SEQ ID NO: 174842 - RNA, 22 nt, Human
ucaggugggucuacaauuaguu

SEQ ID NO: 174843 - RNA, 22 nt, Human
aguggggcggacaggaccagga

SEQ ID NO: 174844 - RNA, 22 nt, Human
uccagaauacucugaaaucauu

SEQ ID NO: 174845 - RNA, 22 nt, Human
ccauuguaguaucuguuuuagu

SEQ ID NO: 174846 - RNA, 22 nt, Human
cacuguauuauuaggaaugaca

SEQ ID NO: 174847 - RNA, 22 nt, Human
cuguaaauaugaagaauauaug

SEQ ID NO: 174848 - RNA, 22 nt, Human
ugaaacaaugugaaguugcuga

SEQ ID NO: 174849 - RNA, 21 nt, Human
ucuucccucaggauguccugc

SEQ ID NO: 174850 - RNA, 22 nt, Human
ucaguaaaugaaugaauauaug

SEQ ID NO: 174851 - RNA, 22 nt, Human
gcugggcuugguuucccugcuu

SEQ ID NO: 174852 - RNA, 22 nt, Human
uuacagaauguucuuccaacag

SEQ ID NO: 174853 - RNA, 22 nt, Human
aauaaaauggucaguuuucuca

SEQ ID NO: 174854 - RNA, 22 nt, Human
uuguguccaaggcuauggugau

SEQ ID NO: 174855 - RNA, 22 nt, Human
ucuaaccuuugaaacugcuuuc

SEQ ID NO: 174856 - RNA, 22 nt, Human
uccaggcauguggccaguacuc

SEQ ID NO: 174857 - RNA, 23 nt, Human
uuccacaaugaaaauaaagcagg

SEQ ID NO: 174858 - RNA, 22 nt, Human
auggccuuagugaugauuaaua

SEQ ID NO: 174859 - RNA, 22 nt, Human
uugcugauucaugauuugagaa

SEQ ID NO: 174860 - RNA, 22 nt, Human
auugcuuucuuuggggaacugu

SEQ ID NO: 174861 - RNA, 22 nt, Human
uggucuggggaccgaggguuac

SEQ ID NO: 174862 - RNA, 22 nt, Human
gucuggaagaacuagggauguu

SEQ ID NO: 174863 - RNA, 22 nt, Human
uccaaauucuagggccuugguu

SEQ ID NO: 174864 - RNA, 22 nt, Human
aaagaaggggucuacauccaau

SEQ ID NO: 174865 - RNA, 18 nt, Human
ucuggagggaagcuuuga

SEQ ID NO: 174866 - RNA, 22 nt, Human
auuuccauuaucaugacaaauu

SEQ ID NO: 174867 - RNA, 22 nt, Human
uuucuggguuuaugucacagcu

SEQ ID NO: 174868 - RNA, 22 nt, Human
ccuggaucuuuguuguaaauau

SEQ ID NO: 174869 - RNA, 22 nt, Human
aucuguucuucaaaauauuaca

SEQ ID NO: 174870 - RNA, 22 nt, Human
aaauucagcagugaaaugcccc

SEQ ID NO: 174871 - RNA, 22 nt, Human
caucagaaaccuugaggaaacu

SEQ ID NO: 174872 - RNA, 22 nt, Human
uuugcacuagcauuuguccaug

SEQ ID NO: 174873 - RNA, 22 nt, Human
auacauaauuacuuccgauguu

SEQ ID NO: 174874 - RNA, 22 nt, Human
ucaggugguccuaagugccauc

SEQ ID NO: 174875 - RNA, 22 nt, Human
acagguggggcacuuggagccu

SEQ ID NO: 174876 - RNA, 22 nt, Human
caaauucaaauuucaucagugu

SEQ ID NO: 174877 - RNA, 21 nt, Human
uugcugcccucccuuuccuca

SEQ ID NO: 174878 - RNA, 22 nt, Human
ucaaauaaugccauucaucauc

SEQ ID NO: 174879 - RNA, 22 nt, Human
ucaaguuucucucagauuaugg

SEQ ID NO: 174880 - RNA, 22 nt, Human
cuugcaugcauuugaagaucau

SEQ ID NO: 174881 - RNA, 22 nt, Human
aauuagggaaguauuuaguagu

SEQ ID NO: 174882 - RNA, 22 nt, Human
ucauuugugugagugauuugac

SEQ ID NO: 174883 - RNA, 22 nt, Human
gcagggaccuugcccacccucc

SEQ ID NO: 174884 - RNA, 22 nt, Human
auaaauaucacuguugucccuc

SEQ ID NO: 174885 - RNA, 22 nt, Human
acuguucacagauuagucgaug

SEQ ID NO: 174886 - RNA, 22 nt, Human
uuagcuucuuacauuucauccu

SEQ ID NO: 174887 - RNA, 22 nt, Human
caguucacacugugcuaucugc

SEQ ID NO: 174888 - RNA, 23 nt, Human
ucuguacacaucagcaucuccca

SEQ ID NO: 174889 - RNA, 22 nt, Human
ucaccagggcuccagccagccu

SEQ ID NO: 174890 - RNA, 22 nt, Human
auacuuucugaccaauuaauug

SEQ ID NO: 174891 - RNA, 22 nt, Human
auuucagaugaccaaauggaaa

SEQ ID NO: 174892 - RNA, 22 nt, Human
gacaugugagagcucgguuuuc

SEQ ID NO: 174893 - RNA, 22 nt, Human
gcagguggaagcagcagacuca

SEQ ID NO: 174894 - RNA, 22 nt, Human
ccuggaucuuucugacugacaa

SEQ ID NO: 174895 - RNA, 22 nt, Human
aucaagaauugggagcuauuga

SEQ ID NO: 174896 - RNA, 22 nt, Human
ucuucagaggaagucagucuuu

SEQ ID NO: 174897 - RNA, 22 nt, Human
uugcuuuauuggguuuacugcc

SEQ ID NO: 174898 - RNA, 22 nt, Human
auuuaguguauucuaauaugug

SEQ ID NO: 174899 - RNA, 20 nt, Human
uucuauacauaucacugaaa

SEQ ID NO: 174900 - RNA, 22 nt, Human
agcagcauuaugauauaucuua

SEQ ID NO: 174901 - RNA, 22 nt, Human
aauguugagcuugaaaguaggu

SEQ ID NO: 174902 - RNA, 22 nt, Human
caugaguuuuuuaguucaugca

SEQ ID NO: 174903 - RNA, 22 nt, Human
cuuaaagaguauuuaauauaau

SEQ ID NO: 174904 - RNA, 22 nt, Human
uccagauggauuuaagaccuaa

SEQ ID NO: 174905 - RNA, 22 nt, Human
gagcagugacuggagcaugaga

SEQ ID NO: 174906 - RNA, 22 nt, Human
gcugggugauucauuuccauaa

SEQ ID NO: 174907 - RNA, 22 nt, Human
agacagcuagggcugcagggac

SEQ ID NO: 174908 - RNA, 21 nt, Human
uuuagggaggauauuuaacuu

SEQ ID NO: 174909 - RNA, 20 nt, Human
uacaauacacaugcauauga

SEQ ID NO: 174910 - RNA, 19 nt, Human
gcagguggauguggucagc

SEQ ID NO: 174911 - RNA, 22 nt, Human
gcaugcagggagggucuggcug

SEQ ID NO: 174912 - RNA, 22 nt, Human
uaaauucagugaguaauuucug

SEQ ID NO: 174913 - RNA, 22 nt, Human
ucagacaguuugcagugugccu

SEQ ID NO: 174914 - RNA, 22 nt, Human
uuaagcaacacacauuaauuau

SEQ ID NO: 174915 - RNA, 22 nt, Human
acagaauugauggaaaucucag

SEQ ID NO: 174916 - RNA, 22 nt, Human
aaaccaucagauaauucauacu

SEQ ID NO: 174917 - RNA, 22 nt, Human
ugaaacauuugaugaucuuugg

SEQ ID NO: 174918 - RNA, 22 nt, Human
cuucuuucccaggcauguuuua

SEQ ID NO: 174919 - RNA, 19 nt, Human
agacaaguuuccagaagcc

SEQ ID NO: 174920 - RNA, 22 nt, Human
gggugggguucaggaaucuuca

SEQ ID NO: 174921 - RNA, 22 nt, Human
uuaagcauggaagugaaauaau

SEQ ID NO: 174922 - RNA, 22 nt, Human
cagagaaaaaauccugcucuca

SEQ ID NO: 174923 - RNA, 22 nt, Human
gacccagcuaaccaggugggga

SEQ ID NO: 174924 - RNA, 22 nt, Human
acagguggaaacaugguguugg

SEQ ID NO: 174925 - RNA, 22 nt, Human
gaaagaggaaggagauguauua

SEQ ID NO: 174926 - RNA, 22 nt, Human
aauauaugagggagcuauuuga

SEQ ID NO: 174927 - RNA, 22 nt, Human
cuuccuuccuuccccgaaaugc

SEQ ID NO: 174928 - RNA, 22 nt, Human
aaaaucuggcaacacuaaguuu

SEQ ID NO: 174929 - RNA, 22 nt, Human
ugcagguggccaucuucguucu

SEQ ID NO: 174930 - RNA, 22 nt, Human
uuccuuagugccucuuccgcug

SEQ ID NO: 174931 - RNA, 22 nt, Human
gacagguggggaaacuaaggua

SEQ ID NO: 174932 - RNA, 22 nt, Human
aagacuuucaaguaugcaugca

SEQ ID NO: 174933 - RNA, 22 nt, Human
cuggcucugagcccaccuccag

SEQ ID NO: 174934 - RNA, 22 nt, Human
ggucuggaauaagguccaggaa

SEQ ID NO: 174935 - RNA, 22 nt, Human
aacagaauaguugauguacagu

SEQ ID NO: 174936 - RNA, 22 nt, Human
gauaaaauaacuauggaauacu

SEQ ID NO: 174937 - RNA, 22 nt, Human
agaggugacauaggagaggcuc

SEQ ID NO: 174938 - RNA, 22 nt, Human
ucugggugucacuccugccugc

SEQ ID NO: 174939 - RNA, 22 nt, Human
aauuauccuuaaugcaguaagc

SEQ ID NO: 174940 - RNA, 22 nt, Human
uuuaggcaagggcaagauuauc

SEQ ID NO: 174941 - RNA, 22 nt, Human
uguuuugcuucucuguuuccca

SEQ ID NO: 174942 - RNA, 21 nt, Human
uuucacaaaaguaugugacaa

SEQ ID NO: 174943 - RNA, 22 nt, Human
uuucuacauucaaaaacuacca

SEQ ID NO: 174944 - RNA, 22 nt, Human
uccugcagccaagggucaucga

SEQ ID NO: 174945 - RNA, 22 nt, Human
uacagagacuuuauggcacaaa

SEQ ID NO: 174946 - RNA, 19 nt, Human
cucagagaggggcagugcc

SEQ ID NO: 174947 - RNA, 22 nt, Human
uuucaguucaguuuauuauauc

SEQ ID NO: 174948 - RNA, 22 nt, Human
uuaauaaaguaugaauuggaaa

SEQ ID NO: 174949 - RNA, 22 nt, Human
ccaugugucuccccuggaagua

SEQ ID NO: 174950 - RNA, 22 nt, Human
ggcauuuacauaaucuuauuua

SEQ ID NO: 174951 - RNA, 22 nt, Human
cuagaaaugcucaagagaaagu

SEQ ID NO: 174952 - RNA, 22 nt, Human
cuauugcuuuugugugcuccca

SEQ ID NO: 174953 - RNA, 22 nt, Human
uauuucccagggagcaacaagc

SEQ ID NO: 174954 - RNA, 22 nt, Human
gguaaaaugcagauucuuagcc

SEQ ID NO: 174955 - RNA, 22 nt, Human
aauaauuacccaucuuuuugua

SEQ ID NO: 174956 - RNA, 22 nt, Human
uuccuucuaauauucugccugu

SEQ ID NO: 174957 - RNA, 17 nt, Human
ugauaguucauuuuaag

SEQ ID NO: 174958 - RNA, 22 nt, Human
gaaaaaggauaaauacaguguu

SEQ ID NO: 174959 - RNA, 22 nt, Human
acacauaagaaacuacaaagag

SEQ ID NO: 174960 - RNA, 22 nt, Human
ugcaggugugugcaagggaggg

SEQ ID NO: 174961 - RNA, 22 nt, Human
agggaccugcucacugccuggc

SEQ ID NO: 174962 - RNA, 22 nt, Human
uccugucuaaagaccugcaggc

SEQ ID NO: 174963 - RNA, 22 nt, Human
cuggaggaggaagucuacaaug

SEQ ID NO: 174964 - RNA, 22 nt, Human
gaggaggaaguucucuguaggc

SEQ ID NO: 174965 - RNA, 22 nt, Human
cuguccuccagacgacaguccc

SEQ ID NO: 174966 - RNA, 22 nt, Human
ggauguugauugaauggccauu

SEQ ID NO: 174967 - RNA, 22 nt, Human
agagggugcuggagagacauug

SEQ ID NO: 174968 - RNA, 22 nt, Human
uuuaaauguuuaaaacucguga

SEQ ID NO: 174969 - RNA, 22 nt, Human
ggcagggcccugauuccugggg

SEQ ID NO: 174970 - RNA, 22 nt, Human
auuauaaagaacaugugugugg

SEQ ID NO: 174971 - RNA, 21 nt, Human
auacauucuauuaagcauuua

SEQ ID NO: 174972 - RNA, 22 nt, Human
uucaacuauuaugaauaaaauu

SEQ ID NO: 174973 - RNA, 22 nt, Human
cagcuuuauugagguauaauug

SEQ ID NO: 174974 - RNA, 22 nt, Human
aacaaugugaagugcuguucag

SEQ ID NO: 174975 - RNA, 22 nt, Human
auugcuggcagcuggaucugca

SEQ ID NO: 174976 - RNA, 22 nt, Human
uaguuuaccaaauugaucuucc

SEQ ID NO: 174977 - RNA, 22 nt, Human
uugcuuuaccugugguauauuu

SEQ ID NO: 174978 - RNA, 22 nt, Human
ccugggucuucagucugcuggu

SEQ ID NO: 174979 - RNA, 22 nt, Human
ucauuuguucucauucucuacu

SEQ ID NO: 174980 - RNA, 22 nt, Human
uucuuaacucaaauauauaucc

SEQ ID NO: 174981 - RNA, 22 nt, Human
ccuggaucuccucuauucauau

SEQ ID NO: 174982 - RNA, 22 nt, Human
ugaauagacuggggcugugaag

SEQ ID NO: 174983 - RNA, 21 nt, Human
gagauuuagaaggaucaauuu

SEQ ID NO: 174984 - RNA, 22 nt, Human
guacccaggcacgccuugcuga

SEQ ID NO: 174985 - RNA, 22 nt, Human
acagggcaugugcaagagacau

SEQ ID NO: 174986 - RNA, 22 nt, Human
auacaacuuuacaugcaauucc

SEQ ID NO: 174987 - RNA, 22 nt, Human
cauuuacaauguacagguugug

SEQ ID NO: 174988 - RNA, 22 nt, Human
cucuggccuggggccugcuccc

SEQ ID NO: 174989 - RNA, 23 nt, Human
guuccuucauguggucauugguu

SEQ ID NO: 174990 - RNA, 22 nt, Human
ugucaaaaauaagagagauugu

SEQ ID NO: 174991 - RNA, 22 nt, Human
agcuuuauuugucauucacggc

SEQ ID NO: 174992 - RNA, 22 nt, Human
gggaccugccauugcucacagg

SEQ ID NO: 174993 - RNA, 20 nt, Human
cuggaguguagcaguggcug

SEQ ID NO: 174994 - RNA, 22 nt, Human
ugcagggagggcccagcaaucu

SEQ ID NO: 174995 - RNA, 19 nt, Human
uauugguaugugugaggca

SEQ ID NO: 174996 - RNA, 22 nt, Human
aggaucugugagugcugcagac

SEQ ID NO: 174997 - RNA, 22 nt, Human
uugcuaauaaaguuuuuaugug

SEQ ID NO: 174998 - RNA, 22 nt, Human
aauuguaacuacauugagaaca

SEQ ID NO: 174999 - RNA, 22 nt, Human
ugagcaucuuuuuacagguuua

SEQ ID NO: 175000 - RNA, 22 nt, Human
acauguaagacuagcuuaaagu

SEQ ID NO: 175001 - RNA, 20 nt, Human
acaaaauagguacuggguag

SEQ ID NO: 175002 - RNA, 22 nt, Human
aauuuccagaucagaugacuca

SEQ ID NO: 175003 - RNA, 22 nt, Human
uauuuagaaugcguguacgugu

SEQ ID NO: 175004 - RNA, 19 nt, Human
cacacccaugcuugccaag

SEQ ID NO: 175005 - RNA, 22 nt, Human
uuucucauagucaugccucuua

SEQ ID NO: 175006 - RNA, 22 nt, Human
uggcaaaguaucugucccagcu

SEQ ID NO: 175007 - RNA, 22 nt, Human
aucauucuagcuguuguguuga

SEQ ID NO: 175008 - RNA, 22 nt, Human
uaaagucaucuuuacaucuuug

SEQ ID NO: 175009 - RNA, 22 nt, Human
cuuucauuugauaagaaugcca

SEQ ID NO: 175010 - RNA, 22 nt, Human
ugacauguauaucuuacgcuau

SEQ ID NO: 175011 - RNA, 22 nt, Human
uaaaaugaucucucauguucuu

SEQ ID NO: 175012 - RNA, 19 nt, Human
gauuuaaacguggcucuau

SEQ ID NO: 175013 - RNA, 22 nt, Human
acaaauaugguacucggagaaa

SEQ ID NO: 175014 - RNA, 22 nt, Human
acuucacagaaauuuuaugagg

SEQ ID NO: 175015 - RNA, 22 nt, Human
uggcagguggcucuggcauucu

SEQ ID NO: 175016 - RNA, 22 nt, Human
ucaggugucuaucuaaccuggu

SEQ ID NO: 175017 - RNA, 22 nt, Human
cuugaaguugcaaaacauuaau

SEQ ID NO: 175018 - RNA, 19 nt, Human
uccugcugugugaagggga

SEQ ID NO: 175019 - RNA, 22 nt, Human
gggacaugccccucagugggug

SEQ ID NO: 175020 - RNA, 22 nt, Human
uacuuuauucaggaaggcuggu

SEQ ID NO: 175021 - RNA, 22 nt, Human
aacauuguuuugcacaacucuu

SEQ ID NO: 175022 - RNA, 22 nt, Human
ggacagacaaaaauaguaagca

SEQ ID NO: 175023 - RNA, 22 nt, Human
uagucaccagcuacaggacagc

SEQ ID NO: 175024 - RNA, 22 nt, Human
ucauuucaaugauacuacuaag

SEQ ID NO: 175025 - RNA, 22 nt, Human
aaauccuaagcagaggaauuua

SEQ ID NO: 175026 - RNA, 22 nt, Human
cugucuuuaguacaaaaaaugu

SEQ ID NO: 175027 - RNA, 22 nt, Human
gaucugaagauaugaaauauuu

SEQ ID NO: 175028 - RNA, 22 nt, Human
aauuauauuguggugugaaugu

SEQ ID NO: 175029 - RNA, 22 nt, Human
uacccagcaaucccuagagguu

SEQ ID NO: 175030 - RNA, 21 nt, Human
uucuucuuggacuguuuuggc

SEQ ID NO: 175031 - RNA, 22 nt, Human
cagguaguccacagugagggag

SEQ ID NO: 175032 - RNA, 22 nt, Human
uuuaaagaaauuccucaucuuu

SEQ ID NO: 175033 - RNA, 22 nt, Human
cuccauugaacauccucucaga

SEQ ID NO: 175034 - RNA, 22 nt, Human
aguucgagaucugcugaugaga

SEQ ID NO: 175035 - RNA, 22 nt, Human
uauguguccuaagcaaucaucc

SEQ ID NO: 175036 - RNA, 22 nt, Human
aagauuauggcagauaacaauu

SEQ ID NO: 175037 - RNA, 19 nt, Human
uuucuuuuccccucagcac

SEQ ID NO: 175038 - RNA, 22 nt, Human
cucuggaaauggccauagucau

SEQ ID NO: 175039 - RNA, 22 nt, Human
ggggaccugggcuucaaggguu

SEQ ID NO: 175040 - RNA, 22 nt, Human
acagagagaauuggguuuacag

SEQ ID NO: 175041 - RNA, 22 nt, Human
agguguccaggaagaugcuggc

SEQ ID NO: 175042 - RNA, 22 nt, Human
agaaacucauccuggagaugac

SEQ ID NO: 175043 - RNA, 22 nt, Human
uugcuuuaucuaagcauggcca

SEQ ID NO: 175044 - RNA, 22 nt, Human
aagugguuuuaagagguuccuu

SEQ ID NO: 175045 - RNA, 22 nt, Human
guguccugccacccugggcuuu

SEQ ID NO: 175046 - RNA, 22 nt, Human
uuuagccaacuauaugacuagu

SEQ ID NO: 175047 - RNA, 22 nt, Human
cacaccagagguuaccugcaaa

SEQ ID NO: 175048 - RNA, 19 nt, Human
ccaggccugcgggcguugg

SEQ ID NO: 175049 - RNA, 19 nt, Human
uucauucuuucuacuuacc

SEQ ID NO: 175050 - RNA, 22 nt, Human
acucuacuguaguaugggcacu

SEQ ID NO: 175051 - RNA, 22 nt, Human
gggugggacucuuuggccugag

SEQ ID NO: 175052 - RNA, 22 nt, Human
aauugcuuuacaagccguuuaa

SEQ ID NO: 175053 - RNA, 22 nt, Human
auuaaauguuccuuaaauuaua

SEQ ID NO: 175054 - RNA, 22 nt, Human
gaucugaagagcaaugaaauau

SEQ ID NO: 175055 - RNA, 22 nt, Human
agcaugaaaacaugaaacagca

SEQ ID NO: 175056 - RNA, 22 nt, Human
ggcgcacaaugugcagguuugu

SEQ ID NO: 175057 - RNA, 22 nt, Human
ugggaagauggagugacaggca

SEQ ID NO: 175058 - RNA, 22 nt, Human
caggcagcccugcaccaagugu

SEQ ID NO: 175059 - RNA, 22 nt, Human
ugucaccaugccagcuucugcc

SEQ ID NO: 175060 - RNA, 22 nt, Human
auauuaggcaaggagauuauuu

SEQ ID NO: 175061 - RNA, 22 nt, Human
ggcuuucuaugaacucaaaggc

SEQ ID NO: 175062 - RNA, 22 nt, Human
acagacaguaugguggggcuga

SEQ ID NO: 175063 - RNA, 22 nt, Human
cuggguguucaggagcugggcu

SEQ ID NO: 175064 - RNA, 22 nt, Human
auaauaaaccaggaugggucug

SEQ ID NO: 175065 - RNA, 22 nt, Human
cuggguaaguuccuaaggcuca

SEQ ID NO: 175066 - RNA, 22 nt, Human
cagcacagggacaauagcagau

SEQ ID NO: 175067 - RNA, 20 nt, Human
cucuggaagaguuuaaaugg

SEQ ID NO: 175068 - RNA, 22 nt, Human
uuccuccuacgcuuaucacuuu

SEQ ID NO: 175069 - RNA, 22 nt, Human
agucacauggacucaggaugac

SEQ ID NO: 175070 - RNA, 20 nt, Human
auacuuguuuucaggcuuuu

SEQ ID NO: 175071 - RNA, 22 nt, Human
guuucacagaugguguucauau

SEQ ID NO: 175072 - RNA, 22 nt, Human
cagcuugaaauauuaggagaug

SEQ ID NO: 175073 - RNA, 22 nt, Human
acagagagaaacaaucagcagc

SEQ ID NO: 175074 - RNA, 22 nt, Human
uugcaggguugacacugccugc

SEQ ID NO: 175075 - RNA, 22 nt, Human
auggcuuucucuaaugugguau

SEQ ID NO: 175076 - RNA, 22 nt, Human
aauaaugucuuuggcuugacca

SEQ ID NO: 175077 - RNA, 19 nt, Human
guuccaaaggccagaccuu

SEQ ID NO: 175078 - RNA, 22 nt, Human
uggaugcugcugucagggaugg

SEQ ID NO: 175079 - RNA, 22 nt, Human
cagguacauucguagacccauu

SEQ ID NO: 175080 - RNA, 22 nt, Human
gccugcagccucaagggcugag

SEQ ID NO: 175081 - RNA, 22 nt, Human
ccagacagcaguuaaaggacau

SEQ ID NO: 175082 - RNA, 22 nt, Human
uauuuccaggccccacucuaga

SEQ ID NO: 175083 - RNA, 22 nt, Human
agcuggagaauaggaauuagug

SEQ ID NO: 175084 - RNA, 22 nt, Human
gcauacagagaggauguggcau

SEQ ID NO: 175085 - RNA, 22 nt, Human
acuuauuagcugugugaccuug

SEQ ID NO: 175086 - RNA, 22 nt, Human
ggcauuuaauccaucugauuga

SEQ ID NO: 175087 - RNA, 22 nt, Human
caguucuuaauaccaugugguu

SEQ ID NO: 175088 - RNA, 16 nt, Human
uaugugucucaucuac

SEQ ID NO: 175089 - RNA, 22 nt, Human
uuauacuuuauacuacaucauu

SEQ ID NO: 175090 - RNA, 23 nt, Human
agggcuccuuguugauuagcauu

SEQ ID NO: 175091 - RNA, 22 nt, Human
aaucaugugggauagucugcuc

SEQ ID NO: 175092 - RNA, 23 nt, Human
accaugaugggagugcaaauaag

SEQ ID NO: 175093 - RNA, 22 nt, Human
caaguccucaaagggcucugcu

SEQ ID NO: 175094 - RNA, 22 nt, Human
uuaguuuucucaucuaucucac

SEQ ID NO: 175095 - RNA, 22 nt, Human
caaucaguuucuguuguauaau

SEQ ID NO: 175096 - RNA, 22 nt, Human
uaauuauaacaguuacaucuua

SEQ ID NO: 175097 - RNA, 22 nt, Human
acuguccaagcaugccuggcuu

SEQ ID NO: 175098 - RNA, 22 nt, Human
aaauauaauuucugccucaaua

SEQ ID NO: 175099 - RNA, 22 nt, Human
uuauuuacaacucuucucuucc

SEQ ID NO: 175100 - RNA, 22 nt, Human
ccagagaguaaacauuuuccgg

SEQ ID NO: 175101 - RNA, 22 nt, Human
auacaugugugugcauacaugu

SEQ ID NO: 175102 - RNA, 22 nt, Human
uuggcaaaauuuaaagaaguga

SEQ ID NO: 175103 - RNA, 22 nt, Human
cagcuuguuuuauuuggggacc

SEQ ID NO: 175104 - RNA, 16 nt, Human
ccuggaggucacuuca

SEQ ID NO: 175105 - RNA, 22 nt, Human
uaacauguuaagaaauuagaua

SEQ ID NO: 175106 - RNA, 22 nt, Human
ucuggaugcucugagcccaagg

SEQ ID NO: 175107 - RNA, 22 nt, Human
uuuaaagagaaugugaaggagu

SEQ ID NO: 175108 - RNA, 22 nt, Human
uggcagggaguucguucacaac

SEQ ID NO: 175109 - RNA, 22 nt, Human
uaccugcacagccagccaugug

SEQ ID NO: 175110 - RNA, 22 nt, Human
ccaggugucugucucuuuuuca

SEQ ID NO: 175111 - RNA, 22 nt, Human
cagaauaaaagucccaaggcau

SEQ ID NO: 175112 - RNA, 22 nt, Human
uuccagaagccuccauauuacu

SEQ ID NO: 175113 - RNA, 22 nt, Human
uagaaaucagcaggcauaugua

SEQ ID NO: 175114 - RNA, 22 nt, Human
acagguggcuuauuggcugauu

SEQ ID NO: 175115 - RNA, 22 nt, Human
auuuggaaaugcaucucuugag

SEQ ID NO: 175116 - RNA, 22 nt, Human
guacacauuaugcuucucuaaa

SEQ ID NO: 175117 - RNA, 22 nt, Human
gaauuugaaaagugaugggaau

SEQ ID NO: 175118 - RNA, 22 nt, Human
ggcaggcauggggucugccauu

SEQ ID NO: 175119 - RNA, 22 nt, Human
uuugacucuugcuuugguggcu

SEQ ID NO: 175120 - RNA, 22 nt, Human
cagggacccgcacagguagcau

SEQ ID NO: 175121 - RNA, 22 nt, Human
uacacauguuuggcaaguaugu

SEQ ID NO: 175122 - RNA, 22 nt, Human
ccacuucaucagugcuccauuu

SEQ ID NO: 175123 - RNA, 22 nt, Human
ugcaggugucucugucuagcgu

SEQ ID NO: 175124 - RNA, 22 nt, Human
cauaauauacuacauugaugaa

SEQ ID NO: 175125 - RNA, 22 nt, Human
ucagagagugcaaaauauagcu

SEQ ID NO: 175126 - RNA, 22 nt, Human
uuccuucuaauuuuacaccuga

SEQ ID NO: 175127 - RNA, 22 nt, Human
uuuucauuguuccucgagcauu

SEQ ID NO: 175128 - RNA, 22 nt, Human
uagaaaugaauguuuaaaaguc

SEQ ID NO: 175129 - RNA, 22 nt, Human
auuuccuucggacaguuugggu

SEQ ID NO: 175130 - RNA, 19 nt, Human
caggaaugagguaauggcu

SEQ ID NO: 175131 - RNA, 22 nt, Human
aaguuuuccuguguccaagaug

SEQ ID NO: 175132 - RNA, 21 nt, Human
ggcaggugggucucuguugcu

SEQ ID NO: 175133 - RNA, 22 nt, Human
agacaggugcucgcccaagucc

SEQ ID NO: 175134 - RNA, 22 nt, Human
cacaggccugucucuuucuaac

SEQ ID NO: 175135 - RNA, 22 nt, Human
uuaacacuaucugucauaauua

SEQ ID NO: 175136 - RNA, 22 nt, Human
acaugcuuugauguauuuugca

SEQ ID NO: 175137 - RNA, 22 nt, Human
gcuguucacagacucugcucug

SEQ ID NO: 175138 - RNA, 22 nt, Human
gugaccauccugguaaugaauc

SEQ ID NO: 175139 - RNA, 22 nt, Human
ucagcuuucucaaagaagcugg

SEQ ID NO: 175140 - RNA, 22 nt, Human
aagcaauagcaacaacuuuaca

SEQ ID NO: 175141 - RNA, 22 nt, Human
ugggguggauagaaagugaugu

SEQ ID NO: 175142 - RNA, 22 nt, Human
uacaacauguaaagugguuuaa

SEQ ID NO: 175143 - RNA, 22 nt, Human
cugagaucuuuauacgaggcac

SEQ ID NO: 175144 - RNA, 19 nt, Human
gcuaggguugguggcgugc

SEQ ID NO: 175145 - RNA, 22 nt, Human
gacugccagaaugugaggccug

SEQ ID NO: 175146 - RNA, 22 nt, Human
cagggcucaggcucugggauuc

SEQ ID NO: 175147 - RNA, 22 nt, Human
cccagcuugcccaggacugagg

SEQ ID NO: 175148 - RNA, 22 nt, Human
ggaugucuaggguuuaugugcc

SEQ ID NO: 175149 - RNA, 22 nt, Human
uauuuauuggacaguguugcug

SEQ ID NO: 175150 - RNA, 22 nt, Human
ucacaauuuggauacagcuaug

SEQ ID NO: 175151 - RNA, 23 nt, Human
guaaaauacgcagugcaguguga

SEQ ID NO: 175152 - RNA, 22 nt, Human
aagcugcagcacagagaggugg

SEQ ID NO: 175153 - RNA, 22 nt, Human
agauaucaccaguuuuacauac

SEQ ID NO: 175154 - RNA, 22 nt, Human
uauugcuguucuuuaaaugaag

SEQ ID NO: 175155 - RNA, 22 nt, Human
ugggugugccauauuccauuuc

SEQ ID NO: 175156 - RNA, 22 nt, Human
cauuuguaggaugcuucuuguu

SEQ ID NO: 175157 - RNA, 22 nt, Human
ugagauguaagguaugcuuacu

SEQ ID NO: 175158 - RNA, 22 nt, Human
auuuacagugugccuacuauau

SEQ ID NO: 175159 - RNA, 22 nt, Human
uggcauuucuggccauuugugu

SEQ ID NO: 175160 - RNA, 22 nt, Human
uuuuaauugcaauuaugguccc

SEQ ID NO: 175161 - RNA, 22 nt, Human
uaaauucugaucaaguuccuuc

SEQ ID NO: 175162 - RNA, 23 nt, Human
ucuggaggggacacugcagaugc

SEQ ID NO: 175163 - RNA, 22 nt, Human
gaaaauagcagauagaccaaug

SEQ ID NO: 175164 - RNA, 22 nt, Human
augaaaauugacagcggaagua

SEQ ID NO: 175165 - RNA, 22 nt, Human
guuagggagucagguggcucuu

SEQ ID NO: 175166 - RNA, 19 nt, Human
ugcuuaauuccuaguaggu

SEQ ID NO: 175167 - RNA, 22 nt, Human
ugcuuuaucugacuuggcgcug

SEQ ID NO: 175168 - RNA, 22 nt, Human
ugcaggugugguuccucagcca

SEQ ID NO: 175169 - RNA, 22 nt, Human
ugacauguauguauuuguuuau

SEQ ID NO: 175170 - RNA, 22 nt, Human
acuuugaaggggaacauuuuaa

SEQ ID NO: 175171 - RNA, 22 nt, Human
ggugcaggagcggggugcucgg

SEQ ID NO: 175172 - RNA, 22 nt, Human
gccaggcauuuguuaggugcug

SEQ ID NO: 175173 - RNA, 23 nt, Human
uacuuaggguuuagaucugacug

SEQ ID NO: 175174 - RNA, 22 nt, Human
auguccagaguguccuggaaag

SEQ ID NO: 175175 - RNA, 22 nt, Human
uuucaacuagccccuaaguccu

SEQ ID NO: 175176 - RNA, 22 nt, Human
augaaaaguucgaucuagaagg

SEQ ID NO: 175177 - RNA, 20 nt, Human
auguaaaauuauaaggcuga

SEQ ID NO: 175178 - RNA, 22 nt, Human
auggcuuuucacagaggguucu

SEQ ID NO: 175179 - RNA, 22 nt, Human
uuuauuagauuaucaaagaggu

SEQ ID NO: 175180 - RNA, 22 nt, Human
caucauaaaauugagauaacug

SEQ ID NO: 175181 - RNA, 20 nt, Human
caucagaaauccugacccac

SEQ ID NO: 175182 - RNA, 22 nt, Human
aauuugauucccugcaccuguu

SEQ ID NO: 175183 - RNA, 19 nt, Human
uuccuuagaggaggcggug

SEQ ID NO: 175184 - RNA, 22 nt, Human
agguggggcugggaaagauucc

SEQ ID NO: 175185 - RNA, 22 nt, Human
cacagaaaaaggcuugaaaauc

SEQ ID NO: 175186 - RNA, 22 nt, Human
aagaaaagauguuugguuuuca

SEQ ID NO: 175187 - RNA, 22 nt, Human
ucauuguauucagaacugaaga

SEQ ID NO: 175188 - RNA, 23 nt, Human
uuuugacaggaggaagguguuga

SEQ ID NO: 175189 - RNA, 22 nt, Human
agcaggugaauuccuggaugug

SEQ ID NO: 175190 - RNA, 22 nt, Human
ucuucaaauccuacagugucug

SEQ ID NO: 175191 - RNA, 22 nt, Human
uggcucugagucugcccuuggc

SEQ ID NO: 175192 - RNA, 22 nt, Human
aacaugucuggguauucacaag

SEQ ID NO: 175193 - RNA, 22 nt, Human
cagggcagccaggccccguggg

SEQ ID NO: 175194 - RNA, 22 nt, Human
cucuggaaaaccacuagcagga

SEQ ID NO: 175195 - RNA, 22 nt, Human
guuuaagaggguuucauuccca

SEQ ID NO: 175196 - RNA, 22 nt, Human
caaauucaaugaacauguuuaa

SEQ ID NO: 175197 - RNA, 22 nt, Human
gaggugucaugagggccugcuc

SEQ ID NO: 175198 - RNA, 22 nt, Human
acauguguaaaaguggauaaaa

SEQ ID NO: 175199 - RNA, 22 nt, Human
aaagauuauggcauugaaauac

SEQ ID NO: 175200 - RNA, 22 nt, Human
acagguguaauuugcccgaggu

SEQ ID NO: 175201 - RNA, 22 nt, Human
aauggcuucugaagcacacuuu

SEQ ID NO: 175202 - RNA, 22 nt, Human
ggauuaagaccugucaguacac

SEQ ID NO: 175203 - RNA, 22 nt, Human
aacaugugucuggcuagauugu

SEQ ID NO: 175204 - RNA, 22 nt, Human
uuucagaugugugucucugaag

SEQ ID NO: 175205 - RNA, 22 nt, Human
uucuuccucacacucucaccca

SEQ ID NO: 175206 - RNA, 22 nt, Human
aguucuucauaaccuuacugug

SEQ ID NO: 175207 - RNA, 22 nt, Human
agcagguguuggcugggccauc

SEQ ID NO: 175208 - RNA, 22 nt, Human
cccaugagauucugaauuuggc

SEQ ID NO: 175209 - RNA, 22 nt, Human
gucuggaaggaggagauggagc

SEQ ID NO: 175210 - RNA, 22 nt, Human
auuuaauuuacauuugacagag

SEQ ID NO: 175211 - RNA, 22 nt, Human
uuugacauuggcuuauucuguu

SEQ ID NO: 175212 - RNA, 22 nt, Human
uacagauaacugaaugcagacu

SEQ ID NO: 175213 - RNA, 22 nt, Human
ucuuauugucuagauugagaug

SEQ ID NO: 175214 - RNA, 22 nt, Human
gagcuuuacuucugacuggugc

SEQ ID NO: 175215 - RNA, 19 nt, Human
ccuggaggugaagguucuc

SEQ ID NO: 175216 - RNA, 22 nt, Human
gccccagcguggcuguguuagg

SEQ ID NO: 175217 - RNA, 22 nt, Human
gauuuccauuuucaacuccugc

SEQ ID NO: 175218 - RNA, 22 nt, Human
aaggugucacuguuucuggccu

SEQ ID NO: 175219 - RNA, 22 nt, Human
gucugccccacaggcucaguug

SEQ ID NO: 175220 - RNA, 22 nt, Human
ucauguguuaaacuccaagaua

SEQ ID NO: 175221 - RNA, 22 nt, Human
uauuugagcgaagcaguguuuu

SEQ ID NO: 175222 - RNA, 22 nt, Human
uuuauuauccaguguugucaug

SEQ ID NO: 175223 - RNA, 22 nt, Human
uuucuuuugaauaguguguggu

SEQ ID NO: 175224 - RNA, 22 nt, Human
uccaugagacagauacuguaag

SEQ ID NO: 175225 - RNA, 22 nt, Human
gagauuuagcugcuuaacuccu

SEQ ID NO: 175226 - RNA, 22 nt, Human
uuccucaguuagugccugaggc

SEQ ID NO: 175227 - RNA, 20 nt, Human
cuucuucagccuaugcuuca

SEQ ID NO: 175228 - RNA, 22 nt, Human
acagauguacacucauauauaa

SEQ ID NO: 175229 - RNA, 22 nt, Human
auauuugucaauucacuguuca

SEQ ID NO: 175230 - RNA, 22 nt, Human
uacaucuaucuagaugcucaga

SEQ ID NO: 175231 - RNA, 22 nt, Human
uuuccaagagcuuauuucugaa

SEQ ID NO: 175232 - RNA, 20 nt, Human
aagauucauuguaauuaggg

SEQ ID NO: 175233 - RNA, 22 nt, Human
agcuuuaucuucaccugggaau

SEQ ID NO: 175234 - RNA, 22 nt, Human
gcaucuaaacuugcaucauugu

SEQ ID NO: 175235 - RNA, 22 nt, Human
uguguccuuucuaaugcccaga

SEQ ID NO: 175236 - RNA, 22 nt, Human
auccuucuucaaagagggaaaa

SEQ ID NO: 175237 - RNA, 22 nt, Human
ugcuuuauucaggguuuacccc

SEQ ID NO: 175238 - RNA, 22 nt, Human
cguuuauuuugaagauuccacu

SEQ ID NO: 175239 - RNA, 22 nt, Human
uggcauuuuguucaguauaugg

SEQ ID NO: 175240 - RNA, 22 nt, Human
ggcaggcaacggaccacuaguc

SEQ ID NO: 175241 - RNA, 22 nt, Human
cuuuauuccuacaagauuuucu

SEQ ID NO: 175242 - RNA, 22 nt, Human
uuuauugaguaucuacuaugug

SEQ ID NO: 175243 - RNA, 22 nt, Human
cuguccugugucagccugaaau

SEQ ID NO: 175244 - RNA, 22 nt, Human
uuacagaagagaaagaauucag

SEQ ID NO: 175245 - RNA, 22 nt, Human
acugguuuuccagguuacuucu

SEQ ID NO: 175246 - RNA, 22 nt, Human
auggguuucccucugaaauuau

SEQ ID NO: 175247 - RNA, 22 nt, Human
uagaauucaagauucaacaggc

SEQ ID NO: 175248 - RNA, 22 nt, Human
ccagaucuucuuuucagugucu

SEQ ID NO: 175249 - RNA, 23 nt, Human
gacagagugagaccuugucuuac

SEQ ID NO: 175250 - RNA, 22 nt, Human
aaaugcuacauacacaucaggg

SEQ ID NO: 175251 - RNA, 22 nt, Human
gugaccaucagagaauaacaaa

SEQ ID NO: 175252 - RNA, 22 nt, Human
auguacaaaauguuuugaaaug

SEQ ID NO: 175253 - RNA, 22 nt, Human
auugcugacaccaaguaguagc

SEQ ID NO: 175254 - RNA, 22 nt, Human
auuaggcacuagaaugucaauu

SEQ ID NO: 175255 - RNA, 22 nt, Human
aaaauuauagaucuagugccug

SEQ ID NO: 175256 - RNA, 22 nt, Human
ggcuuggaccagucacaguggu

SEQ ID NO: 175257 - RNA, 22 nt, Human
uccagcaugaaggggcuuuuau

SEQ ID NO: 175258 - RNA, 22 nt, Human
agcagguguauauaaggcugag

SEQ ID NO: 175259 - RNA, 22 nt, Human
gaugggauuuuuuauguguuca

SEQ ID NO: 175260 - RNA, 22 nt, Human
ucugaaagaagggcagucuuuu

SEQ ID NO: 175261 - RNA, 20 nt, Human
uuacagaaaugauguuauuu

SEQ ID NO: 175262 - RNA, 22 nt, Human
cuagggacagaaagaggguaga

SEQ ID NO: 175263 - RNA, 22 nt, Human
gaugaugaggccaugaggcagg

SEQ ID NO: 175264 - RNA, 22 nt, Human
cacuggaauauggcguugaacc

SEQ ID NO: 175265 - RNA, 22 nt, Human
gggacauggaggcgcgcaggca

SEQ ID NO: 175266 - RNA, 22 nt, Human
agguggggaaaccagcgauccc

SEQ ID NO: 175267 - RNA, 22 nt, Human
aaaagucugcucucauuucaga

SEQ ID NO: 175268 - RNA, 22 nt, Human
uuuauuuauaagccacuugcug

SEQ ID NO: 175269 - RNA, 22 nt, Human
aucauucugauggucaaugcua

SEQ ID NO: 175270 - RNA, 22 nt, Human
acagguggaggcuuuaggaggu

SEQ ID NO: 175271 - RNA, 22 nt, Human
uucagaaguagcuaagcaguca

SEQ ID NO: 175272 - RNA, 22 nt, Human
uaaaauguuugcaagagaccag

SEQ ID NO: 175273 - RNA, 22 nt, Human
agcagguggauuuagacgggag

SEQ ID NO: 175274 - RNA, 22 nt, Human
aguccaugguucugacucaucu

SEQ ID NO: 175275 - RNA, 22 nt, Human
cggcagggcuccaugcauuucu

SEQ ID NO: 175276 - RNA, 22 nt, Human
agcaguccaacugagguggcau

SEQ ID NO: 175277 - RNA, 16 nt, Human
gcuggagggagggguu

SEQ ID NO: 175278 - RNA, 22 nt, Human
ugcaggugcguuuucaagccuc

SEQ ID NO: 175279 - RNA, 22 nt, Human
uauguuaagugggauaaucaaa

SEQ ID NO: 175280 - RNA, 22 nt, Human
ucagguggaauuaauuaagaga

SEQ ID NO: 175281 - RNA, 22 nt, Human
aagcuuuagagaugaguuccuu

SEQ ID NO: 175282 - RNA, 22 nt, Human
uuagaaauacaagugagguuga

SEQ ID NO: 175283 - RNA, 22 nt, Human
uggaggaaguggcuggccagaa

SEQ ID NO: 175284 - RNA, 22 nt, Human
ccuugguccaacccugcacagc

SEQ ID NO: 175285 - RNA, 22 nt, Human
aauguauuccucaugcaagagu

SEQ ID NO: 175286 - RNA, 22 nt, Human
aguuauccgaaggcacugagau

SEQ ID NO: 175287 - RNA, 22 nt, Human
guuauaaaaugcacaguuguuu

SEQ ID NO: 175288 - RNA, 21 nt, Human
cacuccacuuagaacaggguu

SEQ ID NO: 175289 - RNA, 22 nt, Human
auggcuggauaguugaagcucu

SEQ ID NO: 175290 - RNA, 22 nt, Human
uaauuguagcuuuguaaucagc

SEQ ID NO: 175291 - RNA, 22 nt, Human
uuacagaaguuucagcguuuua

SEQ ID NO: 175292 - RNA, 22 nt, Human
acagagagcugugauugaguua

SEQ ID NO: 175293 - RNA, 22 nt, Human
gcaguggccacauggaggagga

SEQ ID NO: 175294 - RNA, 22 nt, Human
uucagaaacccauugggucucu

SEQ ID NO: 175295 - RNA, 19 nt, Human
ccucaucuuggugugugca

SEQ ID NO: 175296 - RNA, 22 nt, Human
uuucaguuguccuguuaauagc

SEQ ID NO: 175297 - RNA, 22 nt, Human
caguaaauacauaucagagaag

SEQ ID NO: 175298 - RNA, 22 nt, Human
guucuucagcauuagaagucau

SEQ ID NO: 175299 - RNA, 22 nt, Human
cacgcauguggaucagaugaag

SEQ ID NO: 175300 - RNA, 22 nt, Human
ccagcuuuucuuaucauuauaa

SEQ ID NO: 175301 - RNA, 22 nt, Human
gucauuccuauccauuugauac

SEQ ID NO: 175302 - RNA, 22 nt, Human
uaugugucccuugguguagcaa

SEQ ID NO: 175303 - RNA, 22 nt, Human
agggaagaagcugguaguaggu

SEQ ID NO: 175304 - RNA, 22 nt, Human
uuuccaaaggcuaaacucaguu

SEQ ID NO: 175305 - RNA, 22 nt, Human
auuuauugguuugcauggugaa

SEQ ID NO: 175306 - RNA, 22 nt, Human
gucuucaacaauaacuaccacu

SEQ ID NO: 175307 - RNA, 20 nt, Human
uacagacaugacaauaaugg

SEQ ID NO: 175308 - RNA, 22 nt, Human
uuaguuaguggggcugucaguc

SEQ ID NO: 175309 - RNA, 22 nt, Human
auuacacuuguucaucaucacc

SEQ ID NO: 175310 - RNA, 22 nt, Human
gggcucucaaggcagggcccca

SEQ ID NO: 175311 - RNA, 22 nt, Human
ugggcaggaugcguugauucuu

SEQ ID NO: 175312 - RNA, 22 nt, Human
auggcuuugaaguaauguaauu

SEQ ID NO: 175313 - RNA, 19 nt, Human
uggcagggagugauauuag

SEQ ID NO: 175314 - RNA, 22 nt, Human
cuuccaaagcacuuuauggacc

SEQ ID NO: 175315 - RNA, 22 nt, Human
auuucuacaguacacaugcauu

SEQ ID NO: 175316 - RNA, 22 nt, Human
cuguccucuguccucagcagga

SEQ ID NO: 175317 - RNA, 22 nt, Human
caguuuauuuccaagaugacaa

SEQ ID NO: 175318 - RNA, 22 nt, Human
ucauucuuuaccaaguugucac

SEQ ID NO: 175319 - RNA, 20 nt, Human
agauuauuccuaagauuucu

SEQ ID NO: 175320 - RNA, 22 nt, Human
gcagcuuuaaacauuggaaaua

SEQ ID NO: 175321 - RNA, 22 nt, Human
gguggcagagaggagguaguuu

SEQ ID NO: 175322 - RNA, 22 nt, Human
uuugaaauaugaggcauuauga

SEQ ID NO: 175323 - RNA, 22 nt, Human
accuuuauagcugauuaugaca

SEQ ID NO: 175324 - RNA, 22 nt, Human
agaaaucauugaauuauuugcu

SEQ ID NO: 175325 - RNA, 22 nt, Human
ugucagagagcaggcaguagaa

SEQ ID NO: 175326 - RNA, 22 nt, Human
cccaggcagcccuucugacgca

SEQ ID NO: 175327 - RNA, 22 nt, Human
uucugugcccauuuuaaaaugg

SEQ ID NO: 175328 - RNA, 22 nt, Human
guuauugacauguauuaagcac

SEQ ID NO: 175329 - RNA, 22 nt, Human
aguggcagagcugugucuugaa

SEQ ID NO: 175330 - RNA, 22 nt, Human
cuagggaccucagcuccuggag

SEQ ID NO: 175331 - RNA, 22 nt, Human
agaugaagaugccacuaagacc

SEQ ID NO: 175332 - RNA, 22 nt, Human
auuucucaucuuugugaauggu

SEQ ID NO: 175333 - RNA, 22 nt, Human
uuuaggcaaacucauugucaga

SEQ ID NO: 175334 - RNA, 22 nt, Human
gcagggacgcagcacucuccgu

SEQ ID NO: 175335 - RNA, 22 nt, Human
ccauaaucuggcuuugagagag

SEQ ID NO: 175336 - RNA, 22 nt, Human
gagcacccuuugcacaucaguc

SEQ ID NO: 175337 - RNA, 22 nt, Human
acuauacaccaaaauauuaagg

SEQ ID NO: 175338 - RNA, 22 nt, Human
agcaggugcauggcgagcgcgg

SEQ ID NO: 175339 - RNA, 22 nt, Human
uuuuaagaugcuaguauuucag

SEQ ID NO: 175340 - RNA, 22 nt, Human
uuccuucuagagcuuguuuagg

SEQ ID NO: 175341 - RNA, 22 nt, Human
aauguuuuguaugccucugagc

SEQ ID NO: 175342 - RNA, 22 nt, Human
ugaaaauggccugaagaagcaa

SEQ ID NO: 175343 - RNA, 22 nt, Human
ugcagggauuagaggccgggga

SEQ ID NO: 175344 - RNA, 22 nt, Human
aagcugcagaugugccugugga

SEQ ID NO: 175345 - RNA, 22 nt, Human
uaguaguaauuguuaucuuauu

SEQ ID NO: 175346 - RNA, 22 nt, Human
uacuucaaccuucucuauuaga

SEQ ID NO: 175347 - RNA, 22 nt, Human
uucauucugggcucuaaggaac

SEQ ID NO: 175348 - RNA, 22 nt, Human
cuucucccaaguaugcaguuug

SEQ ID NO: 175349 - RNA, 22 nt, Human
cauuucaauacuaucugagaau

SEQ ID NO: 175350 - RNA, 22 nt, Human
cuguuauuuagaacauggaauc

SEQ ID NO: 175351 - RNA, 22 nt, Human
uccaugcagaggagcugguggc

SEQ ID NO: 175352 - RNA, 22 nt, Human
gcaggugugaaugugaauuaag

SEQ ID NO: 175353 - RNA, 22 nt, Human
uaucuaaauggaauauuccaga

SEQ ID NO: 175354 - RNA, 21 nt, Human
ugaaacaaucagacagagucu

SEQ ID NO: 175355 - RNA, 22 nt, Human
cccaggcagaauuaguguuuca

SEQ ID NO: 175356 - RNA, 22 nt, Human
uaggugguagagccuggcuugc

SEQ ID NO: 175357 - RNA, 22 nt, Human
uucaaacaguguagaauauaug

SEQ ID NO: 175358 - RNA, 22 nt, Human
uuuacagaaugucaauuucuau

SEQ ID NO: 175359 - RNA, 22 nt, Human
acagccagguaaaggcauggca

SEQ ID NO: 175360 - RNA, 22 nt, Human
gaggugucguagauuauucuca

SEQ ID NO: 175361 - RNA, 22 nt, Human
uugaauaauauguucaggagga

SEQ ID NO: 175362 - RNA, 22 nt, Human
cugggugucaggagacaugaug

SEQ ID NO: 175363 - RNA, 22 nt, Human
uaacauuagguagacauaagcc

SEQ ID NO: 175364 - RNA, 22 nt, Human
uccugcagacauuuacaccuuu

SEQ ID NO: 175365 - RNA, 22 nt, Human
gagcuuuaagggcacuggucuu

SEQ ID NO: 175366 - RNA, 22 nt, Human
aaaagcagguacucagcuuggg

SEQ ID NO: 175367 - RNA, 18 nt, Human
uguggcugguccacacug

SEQ ID NO: 175368 - RNA, 22 nt, Human
guggaggaaaagaaguugggug

SEQ ID NO: 175369 - RNA, 22 nt, Human
uggcaaagcuagacauucccuc

SEQ ID NO: 175370 - RNA, 22 nt, Human
aguccuuuuguuuugagaugag

SEQ ID NO: 175371 - RNA, 22 nt, Human
uuuuauguaauccuuacugucg

SEQ ID NO: 175372 - RNA, 22 nt, Human
ugcuuaauaggaguugaacauu

SEQ ID NO: 175373 - RNA, 20 nt, Human
cagagaccaggccagguguc

SEQ ID NO: 175374 - RNA, 17 nt, Human
ggcaguggaggaagaga

SEQ ID NO: 175375 - RNA, 20 nt, Human
agaaccuaaguuaaaacaca

SEQ ID NO: 175376 - RNA, 22 nt, Human
acaaaauuuuuagacaaggcuu

SEQ ID NO: 175377 - RNA, 22 nt, Human
aggacaugaagaaagggcaagg

SEQ ID NO: 175378 - RNA, 22 nt, Human
aggguggccaccaaguauguca

SEQ ID NO: 175379 - RNA, 22 nt, Human
ucugaacauccagcaaugcaca

SEQ ID NO: 175380 - RNA, 22 nt, Human
gucauucuuaacaacucaguag

SEQ ID NO: 175381 - RNA, 22 nt, Human
uccucagcauggaaucuggacu

SEQ ID NO: 175382 - RNA, 22 nt, Human
ucagacaggccucuccagccuc

SEQ ID NO: 175383 - RNA, 22 nt, Human
gcaguucuacuuauccauagac

SEQ ID NO: 175384 - RNA, 22 nt, Human
uuaaauuagucaagcuucucug

SEQ ID NO: 175385 - RNA, 22 nt, Human
uccuucaagaugccacagcuuu

SEQ ID NO: 175386 - RNA, 22 nt, Human
acauaaguuauggauaaaaugu

SEQ ID NO: 175387 - RNA, 22 nt, Human
agagcggggauaguuaauauuc

SEQ ID NO: 175388 - RNA, 22 nt, Human
uaacagaagaugaaacuucuuu

SEQ ID NO: 175389 - RNA, 22 nt, Human
cuagaugccaauuuuuauggau

SEQ ID NO: 175390 - RNA, 22 nt, Human
aauugcuuacuguuuuucaccu

SEQ ID NO: 175391 - RNA, 22 nt, Human
cacaauuuguuuuaucaguauu

SEQ ID NO: 175392 - RNA, 18 nt, Human
uaaauauauuucccccuu

SEQ ID NO: 175393 - RNA, 23 nt, Human
uacagaaggaguagucacuaaga

SEQ ID NO: 175394 - RNA, 22 nt, Human
cucuucuuuaguccagaccauc

SEQ ID NO: 175395 - RNA, 22 nt, Human
uauuagguaaaggacuugcagg

SEQ ID NO: 175396 - RNA, 22 nt, Human
acacacucaauugcauaagcac

SEQ ID NO: 175397 - RNA, 22 nt, Human
auucuucaguauguguggauug

SEQ ID NO: 175398 - RNA, 22 nt, Human
uuauuccaauuucuccuacaaa

SEQ ID NO: 175399 - RNA, 23 nt, Human
cuguccugccauccacagcggcc

SEQ ID NO: 175400 - RNA, 22 nt, Human
augugcuuguaauguuaaaugu

SEQ ID NO: 175401 - RNA, 22 nt, Human
ggcaggugugagcuguaaagga

SEQ ID NO: 175402 - RNA, 22 nt, Human
uaacuugguuggugggcaggag

SEQ ID NO: 175403 - RNA, 22 nt, Human
ccuagaugggauggcggccggg

SEQ ID NO: 175404 - RNA, 22 nt, Human
uagacaggguggcuuagaaaca

SEQ ID NO: 175405 - RNA, 22 nt, Human
uuacagaaugugccauuugguc

SEQ ID NO: 175406 - RNA, 22 nt, Human
cauggcuuuuuagcauauucaa

SEQ ID NO: 175407 - RNA, 22 nt, Human
aguacauauaguaauuuagcca

SEQ ID NO: 175408 - RNA, 22 nt, Human
auucuucauuuacuguuacuug

SEQ ID NO: 175409 - RNA, 22 nt, Human
uuaaagaugcagcuuuagagaa

SEQ ID NO: 175410 - RNA, 22 nt, Human
aucagaaaauacccaguguuua

SEQ ID NO: 175411 - RNA, 22 nt, Human
auguucaaacuuuuuacacacc

SEQ ID NO: 175412 - RNA, 22 nt, Human
augcaugcagggaagacaguag

SEQ ID NO: 175413 - RNA, 22 nt, Human
ucagggcaggacaguguaggcc

SEQ ID NO: 175414 - RNA, 22 nt, Human
ccuuuauucaauuaguccuaau

SEQ ID NO: 175415 - RNA, 22 nt, Human
uaauuuacuugcaaauaacaau

SEQ ID NO: 175416 - RNA, 22 nt, Human
ucacaaaagcuuuugaauuugg

SEQ ID NO: 175417 - RNA, 22 nt, Human
uugcagggaaaucagugaggau

SEQ ID NO: 175418 - RNA, 22 nt, Human
uguggggccaaagcccagccac

SEQ ID NO: 175419 - RNA, 22 nt, Human
ccagagaggccaaggucguggu

SEQ ID NO: 175420 - RNA, 22 nt, Human
uuucaacuugaagaauugauac

SEQ ID NO: 175421 - RNA, 22 nt, Human
uaaucuaccacuauugcaauau

SEQ ID NO: 175422 - RNA, 22 nt, Human
aaagaguucuaugaucuuucca

SEQ ID NO: 175423 - RNA, 22 nt, Human
uagggcucagcucuagcuccug

SEQ ID NO: 175424 - RNA, 22 nt, Human
gaggugucacuauuuugcuuau

SEQ ID NO: 175425 - RNA, 22 nt, Human
aauugcuuagagaauccaggua

SEQ ID NO: 175426 - RNA, 22 nt, Human
cuuugaauugccguuucaucug

SEQ ID NO: 175427 - RNA, 22 nt, Human
ugcaggugcagcgauacuguga

SEQ ID NO: 175428 - RNA, 22 nt, Human
guccaggucuggacccugagcc

SEQ ID NO: 175429 - RNA, 22 nt, Human
ucuucaaacugaaaauuuagaa

SEQ ID NO: 175430 - RNA, 22 nt, Human
ccaaacaaauccccauucuuag

SEQ ID NO: 175431 - RNA, 22 nt, Human
agacaaagacagcaucucaggu

SEQ ID NO: 175432 - RNA, 22 nt, Human
aguggaggcacuaauuggauuu

SEQ ID NO: 175433 - RNA, 22 nt, Human
cuguccagcuuggcuccugggg

SEQ ID NO: 175434 - RNA, 22 nt, Human
gacagacacuauugguaugccu

SEQ ID NO: 175435 - RNA, 22 nt, Human
uuccuucuggagcccggggagc

SEQ ID NO: 175436 - RNA, 22 nt, Human
gaugaggucauguuuuacauau

SEQ ID NO: 175437 - RNA, 22 nt, Human
guccuucucaaauccuguguuu

SEQ ID NO: 175438 - RNA, 22 nt, Human
aauagaaaggaggggcucuugu

SEQ ID NO: 175439 - RNA, 22 nt, Human
ucagaaauguaagcugaugacu

SEQ ID NO: 175440 - RNA, 22 nt, Human
aauugcuuaugccaggugagag

SEQ ID NO: 175441 - RNA, 22 nt, Human
gggucugggcaggcgcuuccuc

SEQ ID NO: 175442 - RNA, 22 nt, Human
accauuugacucucuaaggaua

SEQ ID NO: 175443 - RNA, 22 nt, Human
uauuggauagcuugugcagaau

SEQ ID NO: 175444 - RNA, 22 nt, Human
acuguauuuggauauaagaucu

SEQ ID NO: 175445 - RNA, 22 nt, Human
uuuccuucaucaucugagagcu

SEQ ID NO: 175446 - RNA, 22 nt, Human
ucuguucaguugauguaguuuu

SEQ ID NO: 175447 - RNA, 22 nt, Human
agacagacauucuagagccacc

SEQ ID NO: 175448 - RNA, 22 nt, Human
auaguuuuauagauauugugua

SEQ ID NO: 175449 - RNA, 22 nt, Human
uuucuuucaauucuccuaaugc

SEQ ID NO: 175450 - RNA, 22 nt, Human
cuuaagcaaaauauucuuucac

SEQ ID NO: 175451 - RNA, 22 nt, Human
aaauuucaguuaccuuuacguu

SEQ ID NO: 175452 - RNA, 22 nt, Human
ugcaggugccaucgcugcucau

SEQ ID NO: 175453 - RNA, 22 nt, Human
uauugcuggaaaauggugugau

SEQ ID NO: 175454 - RNA, 22 nt, Human
acaaagucacaauaauuaaccu

SEQ ID NO: 175455 - RNA, 22 nt, Human
uuguguccccuguucuaccugu

SEQ ID NO: 175456 - RNA, 22 nt, Human
gaugggcguggcgcguuuggug

SEQ ID NO: 175457 - RNA, 20 nt, Human
uuucacaucugucccuuuaa

SEQ ID NO: 175458 - RNA, 22 nt, Human
uccuuguugcugcagucaccug

SEQ ID NO: 175459 - RNA, 22 nt, Human
uuaguuuauaauucauuucugu

SEQ ID NO: 175460 - RNA, 22 nt, Human
gcaaauucuuaacuggacugug

SEQ ID NO: 175461 - RNA, 22 nt, Human
acacacaauuaguuuuaugcuu

SEQ ID NO: 175462 - RNA, 22 nt, Human
auacaacuuuaucuguaaugag

SEQ ID NO: 175463 - RNA, 22 nt, Human
ccagaugagaccacacugcugg

SEQ ID NO: 175464 - RNA, 22 nt, Human
agaaauguauucuguauguuuu

SEQ ID NO: 175465 - RNA, 22 nt, Human
ggcucccugccuguccucaguc

SEQ ID NO: 175466 - RNA, 22 nt, Human
cuauuagacacaauuagugauu

SEQ ID NO: 175467 - RNA, 22 nt, Human
guguguccuugggccucugcag

SEQ ID NO: 175468 - RNA, 22 nt, Human
cacagcauaaugaaauauacuu

SEQ ID NO: 175469 - RNA, 22 nt, Human
gagugcaggccugagcaccauc

SEQ ID NO: 175470 - RNA, 21 nt, Human
ucauucacaggguauuguaua

SEQ ID NO: 175471 - RNA, 22 nt, Human
ucacugugaauguuaucaucuu

SEQ ID NO: 175472 - RNA, 22 nt, Human
uaauuuuaugacaguguauuuu

SEQ ID NO: 175473 - RNA, 22 nt, Human
aaaacugaaauacgauccaaug

SEQ ID NO: 175474 - RNA, 22 nt, Human
ucaguaaacagguuuaaguccu

SEQ ID NO: 175475 - RNA, 22 nt, Human
uuccuuagaguuuccagaaagc

SEQ ID NO: 175476 - RNA, 22 nt, Human
ucugggugccacugucuguaca

SEQ ID NO: 175477 - RNA, 18 nt, Human
cucagagaugcccuuauu

SEQ ID NO: 175478 - RNA, 22 nt, Human
agcagguggacagaggaagaaa

SEQ ID NO: 175479 - RNA, 22 nt, Human
aaacaucaccauuuuaccuaau

SEQ ID NO: 175480 - RNA, 22 nt, Human
gagggcucuacucaccacccug

SEQ ID NO: 175481 - RNA, 23 nt, Human
aagucaccaagaggaaggcggag

SEQ ID NO: 175482 - RNA, 22 nt, Human
augcuuuuccaggagaaauaua

SEQ ID NO: 175483 - RNA, 22 nt, Human
ucagguguuucuggagaaguaa

SEQ ID NO: 175484 - RNA, 22 nt, Human
augccaaagcccaaguucauca

SEQ ID NO: 175485 - RNA, 22 nt, Human
aagcuuucagagcagaauguga

SEQ ID NO: 175486 - RNA, 22 nt, Human
auuuauugaagcuuauuacguu

SEQ ID NO: 175487 - RNA, 22 nt, Human
uuucauugagacuauagacauc

SEQ ID NO: 175488 - RNA, 14 nt, Human
gcagguggaucacc

SEQ ID NO: 175489 - RNA, 23 nt, Human
acuauaaaguuguucugauuuac

SEQ ID NO: 175490 - RNA, 22 nt, Human
caucagaaccagcugggugagg

SEQ ID NO: 175491 - RNA, 22 nt, Human
guacaauaacuagucuuauagu

SEQ ID NO: 175492 - RNA, 22 nt, Human
auaagcauguuagaauauuuga

SEQ ID NO: 175493 - RNA, 22 nt, Human
gaaaacacuuugaucugaaagu

SEQ ID NO: 175494 - RNA, 22 nt, Human
auaacaugagccagauugaaag

SEQ ID NO: 175495 - RNA, 22 nt, Human
ucucccucuuugucugcuuugg

SEQ ID NO: 175496 - RNA, 22 nt, Human
acuguucaucucuuagaaagua

SEQ ID NO: 175497 - RNA, 22 nt, Human
guaggcagguggaggagugaag

SEQ ID NO: 175498 - RNA, 22 nt, Human
uacaggaaguaaguaaugaaau

SEQ ID NO: 175499 - RNA, 22 nt, Human
aggaggaacucagaaagaaggu

SEQ ID NO: 175500 - RNA, 22 nt, Human
gcaggugucugacugccuucuu

SEQ ID NO: 175501 - RNA, 22 nt, Human
caucuaaauuugacuccaagga

SEQ ID NO: 175502 - RNA, 22 nt, Human
guaaacaucagccacucuauuu

SEQ ID NO: 175503 - RNA, 22 nt, Human
ccaggugugauuucaucugagg

SEQ ID NO: 175504 - RNA, 19 nt, Human
aaaaacuuaguccagaaag

SEQ ID NO: 175505 - RNA, 22 nt, Human
guccaguguguuuaucuuggau

SEQ ID NO: 175506 - RNA, 22 nt, Human
ucaguaaaugguugcuguuauu

SEQ ID NO: 175507 - RNA, 22 nt, Human
aauuccaggcagaaaugugagu

SEQ ID NO: 175508 - RNA, 22 nt, Human
auuucuguaguccacauucuuu

SEQ ID NO: 175509 - RNA, 22 nt, Human
gucaacuugcaagaugcugggc

SEQ ID NO: 175510 - RNA, 22 nt, Human
ccagcuuuauagcuucaaagga

SEQ ID NO: 175511 - RNA, 22 nt, Human
auauuaggugcucaauacaugc

SEQ ID NO: 175512 - RNA, 22 nt, Human
aguccaguguguucuggcagca

SEQ ID NO: 175513 - RNA, 22 nt, Human
caugggggucuggacaacaggc

SEQ ID NO: 175514 - RNA, 20 nt, Human
uguuccaagcuaaugaauga

SEQ ID NO: 175515 - RNA, 22 nt, Human
auuauuguacuuucaauaaggu

SEQ ID NO: 175516 - RNA, 22 nt, Human
agcugcaagucuguguggggag

SEQ ID NO: 175517 - RNA, 22 nt, Human
uuuugcuugagugcacaaaaug

SEQ ID NO: 175518 - RNA, 20 nt, Human
ucuaaaguacaguuugugug

SEQ ID NO: 175519 - RNA, 22 nt, Human
cauaauuacugauaugcugauu

SEQ ID NO: 175520 - RNA, 22 nt, Human
cuuuauggaaucaaagacugga

SEQ ID NO: 175521 - RNA, 22 nt, Human
aagucacccuagggccuggacu

SEQ ID NO: 175522 - RNA, 22 nt, Human
auuuauuggaugcuuacuuggg

SEQ ID NO: 175523 - RNA, 22 nt, Human
gcagcuuuaaaggaggcucuga

SEQ ID NO: 175524 - RNA, 22 nt, Human
aauugcuuguuucuuuaacuga

SEQ ID NO: 175525 - RNA, 22 nt, Human
caugguuuugagccuauuaugc

SEQ ID NO: 175526 - RNA, 22 nt, Human
uccaggcaugucugaguccuuc

SEQ ID NO: 175527 - RNA, 22 nt, Human
ccagguguccccgucacugcag

SEQ ID NO: 175528 - RNA, 22 nt, Human
gacagacacagggccaugauug

SEQ ID NO: 175529 - RNA, 22 nt, Human
uggcauuuggcuuacuuauguu

SEQ ID NO: 175530 - RNA, 17 nt, Human
gggcagggacuccuggg

SEQ ID NO: 175531 - RNA, 23 nt, Human
ucagggacaugaugugucauauc

SEQ ID NO: 175532 - RNA, 22 nt, Human
ccagguggaggugugagguccu

SEQ ID NO: 175533 - RNA, 22 nt, Human
aggauuuaccuccagcuaggcu

SEQ ID NO: 175534 - RNA, 22 nt, Human
aaucucuugggaggaaugaauu

SEQ ID NO: 175535 - RNA, 22 nt, Human
aguugacauccauaacaggaag

SEQ ID NO: 175536 - RNA, 21 nt, Human
cuguccaguaauuccuggcac

SEQ ID NO: 175537 - RNA, 22 nt, Human
agcugaaucucaggcauccuuu

SEQ ID NO: 175538 - RNA, 22 nt, Human
cuggagugacuuuguuccuuuu

SEQ ID NO: 175539 - RNA, 22 nt, Human
uuuuauagcugaauaguauucc

SEQ ID NO: 175540 - RNA, 22 nt, Human
acagaaugggauuugaauauuu

SEQ ID NO: 175541 - RNA, 22 nt, Human
uuuuuugucuugaagaaauggu

SEQ ID NO: 175542 - RNA, 22 nt, Human
ugcauaaacagauacuucaugu

SEQ ID NO: 175543 - RNA, 22 nt, Human
gcugccagucuaaugggaaaca

SEQ ID NO: 175544 - RNA, 22 nt, Human
uugaucaaaucagcuacugagg

SEQ ID NO: 175545 - RNA, 22 nt, Human
uuuaucuggacugugauauaaa

SEQ ID NO: 175546 - RNA, 22 nt, Human
cuuaggcagggcuggaagaucu

SEQ ID NO: 175547 - RNA, 22 nt, Human
aaaacaggugucagcaaacuau

SEQ ID NO: 175548 - RNA, 22 nt, Human
gaguucuaaaggcagaacauaa

SEQ ID NO: 175549 - RNA, 22 nt, Human
auggaucagaaucccgggaggg

SEQ ID NO: 175550 - RNA, 22 nt, Human
agccauuuuccugaaauauaac

SEQ ID NO: 175551 - RNA, 22 nt, Human
ggaaguuguaugaucggggaau

SEQ ID NO: 175552 - RNA, 22 nt, Human
gcagguggauuaucagaagugc

SEQ ID NO: 175553 - RNA, 22 nt, Human
ugcagggcaucuuugaagugug

SEQ ID NO: 175554 - RNA, 22 nt, Human
uguccuuaaggagcuuaauguc

SEQ ID NO: 175555 - RNA, 22 nt, Human
uuuaaugaauaauucaaaucug

SEQ ID NO: 175556 - RNA, 22 nt, Human
cauuuauuggcauguaguaggu

SEQ ID NO: 175557 - RNA, 22 nt, Human
gugggugucaguaucuuuaacg

SEQ ID NO: 175558 - RNA, 22 nt, Human
ggcucugggccuccaaggucug

SEQ ID NO: 175559 - RNA, 22 nt, Human
ucaagagaaggggaaauagacu

SEQ ID NO: 175560 - RNA, 22 nt, Human
uacauauacugagugauuugcu

SEQ ID NO: 175561 - RNA, 22 nt, Human
auguaaauuguacugacacacg

SEQ ID NO: 175562 - RNA, 22 nt, Human
gcaggcagagguggaggagaca

SEQ ID NO: 175563 - RNA, 22 nt, Human
agcagggccaacaguaaacacc

SEQ ID NO: 175564 - RNA, 22 nt, Human
aggacaugugccuccagggcag

SEQ ID NO: 175565 - RNA, 22 nt, Human
uacauguggguuaaaaacacuc

SEQ ID NO: 175566 - RNA, 22 nt, Human
ggaggcaggaaagacagguuca

SEQ ID NO: 175567 - RNA, 22 nt, Human
gauugcugggucccacucccag

SEQ ID NO: 175568 - RNA, 22 nt, Human
ugucuuuaaaauuaaacacauc

SEQ ID NO: 175569 - RNA, 22 nt, Human
uccaggcagggcagccaucaag

SEQ ID NO: 175570 - RNA, 22 nt, Human
uuucaaagucaagaaggauacu

SEQ ID NO: 175571 - RNA, 22 nt, Human
gcaguggcuaagcucgcaugca

SEQ ID NO: 175572 - RNA, 22 nt, Human
acacuuuacucuuacaccauug

SEQ ID NO: 175573 - RNA, 22 nt, Human
uaugcugugcuagauacaauau

SEQ ID NO: 175574 - RNA, 22 nt, Human
acagcaggauuuggcgauguug

SEQ ID NO: 175575 - RNA, 22 nt, Human
gggugggagaaaugaguaucua

SEQ ID NO: 175576 - RNA, 22 nt, Human
cuuucuuugcagugagccagag

SEQ ID NO: 175577 - RNA, 22 nt, Human
ugucaccaaguugaugaaugca

SEQ ID NO: 175578 - RNA, 22 nt, Human
aucuguaaagauaaucauaugu

SEQ ID NO: 175579 - RNA, 22 nt, Human
auucaacggguagaagggucuu

SEQ ID NO: 175580 - RNA, 20 nt, Human
ucccaaggaugccugggugu

SEQ ID NO: 175581 - RNA, 22 nt, Human
ccuucuccugccuuggguucau

SEQ ID NO: 175582 - RNA, 21 nt, Human
acauguaagagaguuucaaga

SEQ ID NO: 175583 - RNA, 22 nt, Human
ucaagagauugaauaauaacug

SEQ ID NO: 175584 - RNA, 22 nt, Human
cccaaggccuucaagccagcuc

SEQ ID NO: 175585 - RNA, 19 nt, Human
ccagagacauuggcaucuu

SEQ ID NO: 175586 - RNA, 22 nt, Human
uugaauaauuaauuacacucag

SEQ ID NO: 175587 - RNA, 21 nt, Human
aauuacagauggaauuacaga

SEQ ID NO: 175588 - RNA, 22 nt, Human
cagauuuaccuaacuccaaguu

SEQ ID NO: 175589 - RNA, 22 nt, Human
acaaaguccugguguauggcca

SEQ ID NO: 175590 - RNA, 22 nt, Human
uccugcagcugcagaccugggg

SEQ ID NO: 175591 - RNA, 22 nt, Human
aauauucaaguuauucuuucuu

SEQ ID NO: 175592 - RNA, 22 nt, Human
ggggaccuucccagagcaguug

SEQ ID NO: 175593 - RNA, 22 nt, Human
cuugggugcuggaggcugccgc

SEQ ID NO: 175594 - RNA, 21 nt, Human
cagaggcaggcucugugugug

SEQ ID NO: 175595 - RNA, 22 nt, Human
cgggcuccgggucuuugcaguc

SEQ ID NO: 175596 - RNA, 20 nt, Human
ugcagggcugccucccagcu

SEQ ID NO: 175597 - RNA, 22 nt, Human
cauuuacagugagaguuuuuac

SEQ ID NO: 175598 - RNA, 22 nt, Human
ccuggaggagcgcugaccagcu

SEQ ID NO: 175599 - RNA, 22 nt, Human
uguccuuuucuuuagugcagcu

SEQ ID NO: 175600 - RNA, 22 nt, Human
ucccaaggugcucggcaacagg

SEQ ID NO: 175601 - RNA, 22 nt, Human
uggcuuuacacauccacugccu

SEQ ID NO: 175602 - RNA, 22 nt, Human
cuauacaguaaccacagugauu

SEQ ID NO: 175603 - RNA, 22 nt, Human
acagguggccccgagggagugg

SEQ ID NO: 175604 - RNA, 22 nt, Human
gggcagguggagggcccagcca

SEQ ID NO: 175605 - RNA, 22 nt, Human
uccugcagccuugggcuggagc

SEQ ID NO: 175606 - RNA, 22 nt, Human
ucaaauaccagcaauuucaugu

SEQ ID NO: 175607 - RNA, 22 nt, Human
aggacaguguggaagagggugc

SEQ ID NO: 175608 - RNA, 19 nt, Human
cauguuaugcuguaguauc

SEQ ID NO: 175609 - RNA, 22 nt, Human
uuuuucaucugauugauaacuc

SEQ ID NO: 175610 - RNA, 22 nt, Human
gcaaaauuuacacuccuucuuc

SEQ ID NO: 175611 - RNA, 22 nt, Human
ccagccacagcuuccagcuccu

SEQ ID NO: 175612 - RNA, 22 nt, Human
caggugguacuuaaagucagaa

SEQ ID NO: 175613 - RNA, 22 nt, Human
cuucauuaaugucuauaaguuu

SEQ ID NO: 175614 - RNA, 22 nt, Human
guuggcaaguguuccuuccucu

SEQ ID NO: 175615 - RNA, 22 nt, Human
gcauguguugguuuaugcaugu

SEQ ID NO: 175616 - RNA, 22 nt, Human
guacagaaaugugaugacgcaa

SEQ ID NO: 175617 - RNA, 22 nt, Human
caugauaauuguuaacaaagua

SEQ ID NO: 175618 - RNA, 22 nt, Human
ccaugagcuuccuauauagggu

SEQ ID NO: 175619 - RNA, 22 nt, Human
uagcugaugaauaauuauucuu

SEQ ID NO: 175620 - RNA, 22 nt, Human
acauuuuuauucaucaaagcag

SEQ ID NO: 175621 - RNA, 22 nt, Human
aagccagauuucacucuuaauu

SEQ ID NO: 175622 - RNA, 22 nt, Human
acaggacaggcugggcuagacu

SEQ ID NO: 175623 - RNA, 22 nt, Human
ugaagaauaagauagauggagc

SEQ ID NO: 175624 - RNA, 22 nt, Human
ucucuuaauuuuggaauagugu

SEQ ID NO: 175625 - RNA, 22 nt, Human
guauuacaaauaaauguuacug

SEQ ID NO: 175626 - RNA, 22 nt, Human
gggugguggccagcagugggca

SEQ ID NO: 175627 - RNA, 22 nt, Human
agaaaauuagauuuuacugugu

SEQ ID NO: 175628 - RNA, 22 nt, Human
ugcagggauuguuggcauccau

SEQ ID NO: 175629 - RNA, 22 nt, Human
uguaaaaccaaaucaaucuagu

SEQ ID NO: 175630 - RNA, 22 nt, Human
cauguguccacccuugaacaca

SEQ ID NO: 175631 - RNA, 22 nt, Human
uugcucauauuugcauguguuu

SEQ ID NO: 175632 - RNA, 22 nt, Human
uuucuuuugcccuguggguuag

SEQ ID NO: 175633 - RNA, 22 nt, Human
acauuguaaauaccuuuaucac

SEQ ID NO: 175634 - RNA, 22 nt, Human
gaacuuggaacuggggcuacug

SEQ ID NO: 175635 - RNA, 22 nt, Human
ugugugcuaauguaugcucuaa

SEQ ID NO: 175636 - RNA, 22 nt, Human
caucagaaggaaggacgauuau

SEQ ID NO: 175637 - RNA, 22 nt, Human
ccugcagguugcagaggcggaa

SEQ ID NO: 175638 - RNA, 21 nt, Human
uguuuuccaccuugaggcaag

SEQ ID NO: 175639 - RNA, 21 nt, Human
uuuaaagaauaggaagggagg

SEQ ID NO: 175640 - RNA, 22 nt, Human
acuggguguauuagugguguuu

SEQ ID NO: 175641 - RNA, 22 nt, Human
augugguugaagaauuacaucu

SEQ ID NO: 175642 - RNA, 22 nt, Human
uuugcaaauaccaugaaacuug

SEQ ID NO: 175643 - RNA, 22 nt, Human
ugggccagcacugggugcucau

SEQ ID NO: 175644 - RNA, 21 nt, Human
aagaugauauuuuaucuguag

SEQ ID NO: 175645 - RNA, 22 nt, Human
gacccaggguauccagagcugc

SEQ ID NO: 175646 - RNA, 22 nt, Human
aauacugagaucccacaaagca

SEQ ID NO: 175647 - RNA, 22 nt, Human
uuuuagcacuaagugauaugcu

SEQ ID NO: 175648 - RNA, 22 nt, Human
uucaaauacauucuuugccacu

SEQ ID NO: 175649 - RNA, 22 nt, Human
cuacugaguccuucagcugcca

SEQ ID NO: 175650 - RNA, 22 nt, Human
uccaugguuucagucuggcugg

SEQ ID NO: 175651 - RNA, 22 nt, Human
auuccaaagcacaucagaacua

SEQ ID NO: 175652 - RNA, 23 nt, Human
uggaauguuucuuguacugaaug

SEQ ID NO: 175653 - RNA, 22 nt, Human
gcccaggcuggagugcaguagc

SEQ ID NO: 175654 - RNA, 22 nt, Human
auuaagggccaauccuccagcc

SEQ ID NO: 175655 - RNA, 22 nt, Human
auuucaguguuuuaagaguuca

SEQ ID NO: 175656 - RNA, 22 nt, Human
agcagggcagugaucagaaagg

SEQ ID NO: 175657 - RNA, 22 nt, Human
ugagauuuguuuuauaaaauag

SEQ ID NO: 175658 - RNA, 22 nt, Human
uuuaauuugaaaugaguaaccc

SEQ ID NO: 175659 - RNA, 22 nt, Human
auagaauucguguuuguaauuc

SEQ ID NO: 175660 - RNA, 21 nt, Human
ugaucauuuguguaaaggaga

SEQ ID NO: 175661 - RNA, 21 nt, Human
uguaaguuucaucugaauugg

SEQ ID NO: 175662 - RNA, 22 nt, Human
uuugaacugauaaucuucuguu

SEQ ID NO: 175663 - RNA, 22 nt, Human
acauacauauguuuaaaugcau

SEQ ID NO: 175664 - RNA, 22 nt, Human
cuucguuuuuaguagcaauguu

SEQ ID NO: 175665 - RNA, 22 nt, Human
ucagggcauucaagaggccugg

SEQ ID NO: 175666 - RNA, 22 nt, Human
aaggcauaccugaauguuugug

SEQ ID NO: 175667 - RNA, 22 nt, Human
uuauuuaaaagugguaagauuc

SEQ ID NO: 175668 - RNA, 22 nt, Human
ggcaccagccaccuauuucuag

SEQ ID NO: 175669 - RNA, 22 nt, Human
cauaaguuggguaauauaauga

SEQ ID NO: 175670 - RNA, 22 nt, Human
guacauaaaggaggcucuuugc

SEQ ID NO: 175671 - RNA, 22 nt, Human
uuuaauauuucuuuccugaagc

SEQ ID NO: 175672 - RNA, 23 nt, Human
aaugauuucaugaugauagcagc

SEQ ID NO: 175673 - RNA, 22 nt, Human
ggaacaggaaaggagggaugcu

SEQ ID NO: 175674 - RNA, 22 nt, Human
auguuauaguuauaaaaugagg

SEQ ID NO: 175675 - RNA, 22 nt, Human
aagaguggagcuggaaaguggg

SEQ ID NO: 175676 - RNA, 22 nt, Human
aauugcuucauuaacauuuagg

SEQ ID NO: 175677 - RNA, 22 nt, Human
cccagugucucuugugccuuuc

SEQ ID NO: 175678 - RNA, 22 nt, Human
agcuucuuggcucagcacuugg

SEQ ID NO: 175679 - RNA, 22 nt, Human
auuuccauuuucagccauuacu

SEQ ID NO: 175680 - RNA, 22 nt, Human
uggaccugcguaggugcugggc

SEQ ID NO: 175681 - RNA, 22 nt, Human
uggcagguagaguucugagaug

SEQ ID NO: 175682 - RNA, 22 nt, Human
gcagguggagcaguagucuggu

SEQ ID NO: 175683 - RNA, 22 nt, Human
cuccagggaugagacagaguag

SEQ ID NO: 175684 - RNA, 22 nt, Human
uggcagugggaagcuggaaguc

SEQ ID NO: 175685 - RNA, 22 nt, Human
auucugauaucuuauucuagcu

SEQ ID NO: 175686 - RNA, 22 nt, Human
uucuaccuacccucugcauaca

SEQ ID NO: 175687 - RNA, 22 nt, Human
cugaauaauguucucuuguaug

SEQ ID NO: 175688 - RNA, 22 nt, Human
uuaguucucaugaauuuuaagu

SEQ ID NO: 175689 - RNA, 22 nt, Human
agcagggcuggggcacgagcca

SEQ ID NO: 175690 - RNA, 22 nt, Human
uagaugcuguagaaauacuuau

SEQ ID NO: 175691 - RNA, 22 nt, Human
uuauuuuuaaaaguucacacag

SEQ ID NO: 175692 - RNA, 22 nt, Human
aaaucaguuagugguaggauug

SEQ ID NO: 175693 - RNA, 22 nt, Human
aauaauuauuugagagcagacc

SEQ ID NO: 175694 - RNA, 22 nt, Human
cuucuucaagagaaugggagac

SEQ ID NO: 175695 - RNA, 22 nt, Human
ucagucuuugcuuaugacaaua

SEQ ID NO: 175696 - RNA, 22 nt, Human
aauuagggaaaauuuacuugua

SEQ ID NO: 175697 - RNA, 22 nt, Human
uuucagacagauucuucucagu

SEQ ID NO: 175698 - RNA, 22 nt, Human
uggaauuuaguuaauuccauuu

SEQ ID NO: 175699 - RNA, 19 nt, Human
aaagcagaggagcaucuga

SEQ ID NO: 175700 - RNA, 22 nt, Human
uaguccuuuccggcugcuauaa

SEQ ID NO: 175701 - RNA, 21 nt, Human
uacagaaugcgcuucagucug

SEQ ID NO: 175702 - RNA, 22 nt, Human
uaucagaaggaagugccuuuaa

SEQ ID NO: 175703 - RNA, 22 nt, Human
uuggaucaaauuucaugcuguc

SEQ ID NO: 175704 - RNA, 22 nt, Human
uaagagaacuggauagauagga

SEQ ID NO: 175705 - RNA, 22 nt, Human
aauauccacacugugucccugc

SEQ ID NO: 175706 - RNA, 22 nt, Human
ucagggacagggugcugcugcg

SEQ ID NO: 175707 - RNA, 22 nt, Human
gucucuaucauagcugaacccu

SEQ ID NO: 175708 - RNA, 18 nt, Human
ucuuccaacacugacacc

SEQ ID NO: 175709 - RNA, 22 nt, Human
ccaaguacucucaccaaagcuu

SEQ ID NO: 175710 - RNA, 22 nt, Human
cucugcccucacuuggggccug

SEQ ID NO: 175711 - RNA, 22 nt, Human
uuauucuucuucucuugccagg

SEQ ID NO: 175712 - RNA, 22 nt, Human
ugucaaagacagaaggaaaugg

SEQ ID NO: 175713 - RNA, 22 nt, Human
ugcuggagaugaaagggcccug

SEQ ID NO: 175714 - RNA, 22 nt, Human
uacauaaugagcuaguuaaguu

SEQ ID NO: 175715 - RNA, 22 nt, Human
agaucauaugaaaaauuucaag

SEQ ID NO: 175716 - RNA, 22 nt, Human
gggaacuugccccagaggaauu

SEQ ID NO: 175717 - RNA, 22 nt, Human
augcuuuuaugucacaugguca

SEQ ID NO: 175718 - RNA, 22 nt, Human
uguuuucuuccuaauugcucau

SEQ ID NO: 175719 - RNA, 22 nt, Human
aggcagguuucccggcugucaa

SEQ ID NO: 175720 - RNA, 22 nt, Human
uaagaauuaucucauggauaau

SEQ ID NO: 175721 - RNA, 22 nt, Human
ucuccgaucacagguuuucaau

SEQ ID NO: 175722 - RNA, 22 nt, Human
uacaaaaaauugauacugacga

SEQ ID NO: 175723 - RNA, 22 nt, Human
uauugcugcuauugucaguuca

SEQ ID NO: 175724 - RNA, 22 nt, Human
uuuguagauucauugaacuuuu

SEQ ID NO: 175725 - RNA, 21 nt, Human
ucagaacuggugcagaugaau

SEQ ID NO: 175726 - RNA, 22 nt, Human
cagaugaaguaggugacgagca

SEQ ID NO: 175727 - RNA, 22 nt, Human
ugacaggucauauaagcuugca

SEQ ID NO: 175728 - RNA, 22 nt, Human
cuggcacugaguggcuuaugac

SEQ ID NO: 175729 - RNA, 22 nt, Human
cugggugaguugaugaaggaga

SEQ ID NO: 175730 - RNA, 22 nt, Human
uuucauaauagugcaguuuguu

SEQ ID NO: 175731 - RNA, 22 nt, Human
gccugggugaauuugauccuaa

SEQ ID NO: 175732 - RNA, 22 nt, Human
uuugcagugucagcuucugugu

SEQ ID NO: 175733 - RNA, 22 nt, Human
gguggggcucagcaaucugugu

SEQ ID NO: 175734 - RNA, 22 nt, Human
gcagacaggggcuuaggaaagg

SEQ ID NO: 175735 - RNA, 22 nt, Human
gguguccucaugauuuucuaga

SEQ ID NO: 175736 - RNA, 22 nt, Human
ugacugaaggacuagauugauu

SEQ ID NO: 175737 - RNA, 22 nt, Human
guucuguacuccaagcucuucc

SEQ ID NO: 175738 - RNA, 20 nt, Human
uugagcuuuuaguacagaca

SEQ ID NO: 175739 - RNA, 22 nt, Human
aaacaugaauagauauuaaaca

SEQ ID NO: 175740 - RNA, 22 nt, Human
acaugauauuaaugucuuauuu

SEQ ID NO: 175741 - RNA, 22 nt, Human
uuaauaaacaggugcagcugaa

SEQ ID NO: 175742 - RNA, 22 nt, Human
uguuccaagcugcuggauaagc

SEQ ID NO: 175743 - RNA, 22 nt, Human
cucugcccccagcuggugcuug

SEQ ID NO: 175744 - RNA, 22 nt, Human
accaggcaaaaccacaggagca

SEQ ID NO: 175745 - RNA, 22 nt, Human
gugaauaaccuacuccaggccu

SEQ ID NO: 175746 - RNA, 22 nt, Human
gcaaguacaaacgcaucggcug

SEQ ID NO: 175747 - RNA, 22 nt, Human
aggaccugaaauucuugcuuuu

SEQ ID NO: 175748 - RNA, 22 nt, Human
ucuuuccaaggacucuguagca

SEQ ID NO: 175749 - RNA, 22 nt, Human
auucuaacacaugcucuaagaa

SEQ ID NO: 175750 - RNA, 22 nt, Human
gaucagaaugggacauauccug

SEQ ID NO: 175751 - RNA, 22 nt, Human
gaaagccaucuggcugcuggga

SEQ ID NO: 175752 - RNA, 22 nt, Human
caugaggugauaaagcugggau

SEQ ID NO: 175753 - RNA, 22 nt, Human
auugcugaaaugaaaggauaug

SEQ ID NO: 175754 - RNA, 22 nt, Human
uucuggguggccaguauuuaga

SEQ ID NO: 175755 - RNA, 22 nt, Human
uguccuauuucucugugcauga

SEQ ID NO: 175756 - RNA, 22 nt, Human
aauguugaggauaucagaaaau

SEQ ID NO: 175757 - RNA, 22 nt, Human
ucagaaaugaucguuauucauu

SEQ ID NO: 175758 - RNA, 21 nt, Human
aaauuucugcaagccucaacu

SEQ ID NO: 175759 - RNA, 22 nt, Human
uacaugugcuggguucuuggcc

SEQ ID NO: 175760 - RNA, 22 nt, Human
aauugcuuuucaaggguacagc

SEQ ID NO: 175761 - RNA, 22 nt, Human
aauuagggagccaucauaaggu

SEQ ID NO: 175762 - RNA, 22 nt, Human
acagggcagguggcuacugguc

SEQ ID NO: 175763 - RNA, 22 nt, Human
caauuuuuuccaugcucuuaca

SEQ ID NO: 175764 - RNA, 22 nt, Human
aagggcuccauccuuauaaaug

SEQ ID NO: 175765 - RNA, 22 nt, Human
gagggcucugaaaggaggucac

SEQ ID NO: 175766 - RNA, 22 nt, Human
cgaggcagggaagcugcaaaag

SEQ ID NO: 175767 - RNA, 22 nt, Human
agcagguguaucggucaccuac

SEQ ID NO: 175768 - RNA, 22 nt, Human
gcucucuugguggcuguccugg

SEQ ID NO: 175769 - RNA, 22 nt, Human
ccagcugucagugugaaaauaa

SEQ ID NO: 175770 - RNA, 23 nt, Human
cuguccuguaguucacguuggcc

SEQ ID NO: 175771 - RNA, 22 nt, Human
cugauagacaaucaccauggga

SEQ ID NO: 175772 - RNA, 22 nt, Human
gugaccauaauagauuaugagu

SEQ ID NO: 175773 - RNA, 22 nt, Human
uuugacucauuaaagucuccgu

SEQ ID NO: 175774 - RNA, 22 nt, Human
cuucuucacacuggucugaagc

SEQ ID NO: 175775 - RNA, 22 nt, Human
uugugcaauuuaaaaucuuccu

SEQ ID NO: 175776 - RNA, 22 nt, Human
aagggcaggagaagacggauau

SEQ ID NO: 175777 - RNA, 22 nt, Human
cuguguccuuuuaguugcugug

SEQ ID NO: 175778 - RNA, 22 nt, Human
gugguggaugucuguaaucuca

SEQ ID NO: 175779 - RNA, 22 nt, Human
uuuucaguaaugucuacauaau

SEQ ID NO: 175780 - RNA, 22 nt, Human
uuccagaaaucuuucagcucaa

SEQ ID NO: 175781 - RNA, 22 nt, Human
cuuaggcaagcagagcccaucc

SEQ ID NO: 175782 - RNA, 22 nt, Human
augacagaggagugcaggugau

SEQ ID NO: 175783 - RNA, 22 nt, Human
cugauacauaguagcaugucau

SEQ ID NO: 175784 - RNA, 22 nt, Human
aggaggaaagaaggcccccagc

SEQ ID NO: 175785 - RNA, 22 nt, Human
uuucuucauucaccuucacccc

SEQ ID NO: 175786 - RNA, 22 nt, Human
ccagggcagaaaaagagggaau

SEQ ID NO: 175787 - RNA, 22 nt, Human
caccagacagguguaugcauau

SEQ ID NO: 175788 - RNA, 22 nt, Human
acaaaugugucuaauugugccu

SEQ ID NO: 175789 - RNA, 19 nt, Human
uuugugaagaaaaugaugc

SEQ ID NO: 175790 - RNA, 22 nt, Human
uguguccuuaugaaaauacugu

SEQ ID NO: 175791 - RNA, 22 nt, Human
ccaaguacagauuccuccacug

SEQ ID NO: 175792 - RNA, 22 nt, Human
auagcuuuacagaagaguuuag

SEQ ID NO: 175793 - RNA, 22 nt, Human
uuucaaaauuuugcagugguaa

SEQ ID NO: 175794 - RNA, 22 nt, Human
uagaaacagcauauauuagccc

SEQ ID NO: 175795 - RNA, 22 nt, Human
ugcuuuauuaagagagaaauuu

SEQ ID NO: 175796 - RNA, 20 nt, Human
agaaucugacccagagagac

SEQ ID NO: 175797 - RNA, 22 nt, Human
gcaugcagacagucugagacca

SEQ ID NO: 175798 - RNA, 22 nt, Human
uccaguuuacaggguugcuuuu

SEQ ID NO: 175799 - RNA, 22 nt, Human
gaauguaaaauugccuacaaga

SEQ ID NO: 175800 - RNA, 22 nt, Human
ucuguucaucucaugggagaau

SEQ ID NO: 175801 - RNA, 22 nt, Human
gcaggcagaucaccugucagga

SEQ ID NO: 175802 - RNA, 22 nt, Human
uauggcuuuuaacugucguaug

SEQ ID NO: 175803 - RNA, 22 nt, Human
cagggcaggaauuugacauugc

SEQ ID NO: 175804 - RNA, 22 nt, Human
uaauuucagugggcucugggcu

SEQ ID NO: 175805 - RNA, 22 nt, Human
cuccagugcacccagaggauuu

SEQ ID NO: 175806 - RNA, 22 nt, Human
gagcaguaggagaacccugagc

SEQ ID NO: 175807 - RNA, 22 nt, Human
cugaaggagaaggccacuguuc

SEQ ID NO: 175808 - RNA, 22 nt, Human
acagauuuuauuauucagguau

SEQ ID NO: 175809 - RNA, 22 nt, Human
cauuuguaucugggcugcugug

SEQ ID NO: 175810 - RNA, 22 nt, Human
agccaacuaggagauuaaggua

SEQ ID NO: 175811 - RNA, 22 nt, Human
cacacacaguuuuguauucugu

SEQ ID NO: 175812 - RNA, 22 nt, Human
cauuuugugcuagacacuaugg

SEQ ID NO: 175813 - RNA, 22 nt, Human
gcaugugugagaccuuuuagca

SEQ ID NO: 175814 - RNA, 22 nt, Human
cagggcuccccgcaccgcagcc

SEQ ID NO: 175815 - RNA, 22 nt, Human
gaauuucaagcagugcaauguu

SEQ ID NO: 175816 - RNA, 22 nt, Human
acaauaguaagguauauuguca

SEQ ID NO: 175817 - RNA, 22 nt, Human
gacaugugagcaagcgugcggc

SEQ ID NO: 175818 - RNA, 22 nt, Human
auagaauuauggaaagcaucuu

SEQ ID NO: 175819 - RNA, 21 nt, Human
auaagcaugcugauuacauuu

SEQ ID NO: 175820 - RNA, 23 nt, Human
ccagugauugccuggaaggaggu

SEQ ID NO: 175821 - RNA, 22 nt, Human
ccucuuccagcuguugcuucca

SEQ ID NO: 175822 - RNA, 22 nt, Human
ggcuuuugaauuccaaggcauu

SEQ ID NO: 175823 - RNA, 18 nt, Human
gcucuggcucaccuccag

SEQ ID NO: 175824 - RNA, 22 nt, Human
uccaggcacagaguuggucagu

SEQ ID NO: 175825 - RNA, 22 nt, Human
gcuggagggguaauaggauggg

SEQ ID NO: 175826 - RNA, 22 nt, Human
cacagguggcuucuuucaucuu

SEQ ID NO: 175827 - RNA, 22 nt, Human
aagucacauucugagguauugg

SEQ ID NO: 175828 - RNA, 22 nt, Human
aggcucagaggugagcaucugc

SEQ ID NO: 175829 - RNA, 22 nt, Human
cagcuuuuuagaaucuagggca

SEQ ID NO: 175830 - RNA, 22 nt, Human
agacaggcuuugcuguauauca

SEQ ID NO: 175831 - RNA, 22 nt, Human
uccucuggcucuuucccuagga

SEQ ID NO: 175832 - RNA, 22 nt, Human
uucuucagagaguagaagcaag

SEQ ID NO: 175833 - RNA, 16 nt, Human
uuauugaggccaagga

SEQ ID NO: 175834 - RNA, 22 nt, Human
acuauacauugaauguuaaggu

SEQ ID NO: 175835 - RNA, 22 nt, Human
ccagagagagaggucaauggca

SEQ ID NO: 175836 - RNA, 22 nt, Human
cugccugcaugcugccauagcu

SEQ ID NO: 175837 - RNA, 22 nt, Human
aaacacaccuuuggaacuguga

SEQ ID NO: 175838 - RNA, 22 nt, Human
aauuguaagugcugaguuaagg

SEQ ID NO: 175839 - RNA, 22 nt, Human
ugcuuuaacauaagauaucuuu

SEQ ID NO: 175840 - RNA, 22 nt, Human
cccaggcacaccccgaacggaa

SEQ ID NO: 175841 - RNA, 22 nt, Human
gugauuuaguguuaaguauguu

SEQ ID NO: 175842 - RNA, 22 nt, Human
cagcuucuccggccuggugcgg

SEQ ID NO: 175843 - RNA, 22 nt, Human
ugugaaaagggcuuuguacaaa

SEQ ID NO: 175844 - RNA, 22 nt, Human
uaucuauuauguucuauguguc

SEQ ID NO: 175845 - RNA, 22 nt, Human
aagucacaagcauauaugcauu

SEQ ID NO: 175846 - RNA, 22 nt, Human
gucugcccagaagacauccccu

SEQ ID NO: 175847 - RNA, 22 nt, Human
ucuggaucucccucauccuggg

SEQ ID NO: 175848 - RNA, 22 nt, Human
uagggacccucccugcucuaac

SEQ ID NO: 175849 - RNA, 22 nt, Human
uuucugauauacuguagaaucc

SEQ ID NO: 175850 - RNA, 22 nt, Human
caguccuuauuccuauauuccu

SEQ ID NO: 175851 - RNA, 22 nt, Human
cugugcagcuggcuuccuggaa

SEQ ID NO: 175852 - RNA, 19 nt, Human
ucuguucacauuguuucgc

SEQ ID NO: 175853 - RNA, 18 nt, Human
cuguucuagaacuccugu

SEQ ID NO: 175854 - RNA, 22 nt, Human
uaagaaucugcauuuuaacaag

SEQ ID NO: 175855 - RNA, 22 nt, Human
uaggcagaauuguugaaugaag

SEQ ID NO: 175856 - RNA, 22 nt, Human
uguguccuguccccuugcugcu

SEQ ID NO: 175857 - RNA, 22 nt, Human
uaaugucagcauaguuuauuuu

SEQ ID NO: 175858 - RNA, 22 nt, Human
gauaccagacagggagggagaa

SEQ ID NO: 175859 - RNA, 17 nt, Human
cucuggaauuggugaag

SEQ ID NO: 175860 - RNA, 22 nt, Human
auugcuugaauuaccauguaau

SEQ ID NO: 175861 - RNA, 22 nt, Human
ccugcaguuuguugugaccccg

SEQ ID NO: 175862 - RNA, 22 nt, Human
gucaggccaauacucuccagca

SEQ ID NO: 175863 - RNA, 18 nt, Human
acuguuaucugauaaggc

SEQ ID NO: 175864 - RNA, 22 nt, Human
ucucuucuuguguuuuccugcc

SEQ ID NO: 175865 - RNA, 21 nt, Human
aguaguuuagcacaggguuug

SEQ ID NO: 175866 - RNA, 21 nt, Human
agaaaaacacgauauaagccc

SEQ ID NO: 175867 - RNA, 22 nt, Human
caguguggugagauuccaggug

SEQ ID NO: 175868 - RNA, 22 nt, Human
uuuccuucuuagcgguguucuu

SEQ ID NO: 175869 - RNA, 22 nt, Human
aagcagggcuuuaagcgguuuu

SEQ ID NO: 175870 - RNA, 18 nt, Human
cagagcagagguggagcg

SEQ ID NO: 175871 - RNA, 22 nt, Human
guuucuuagguaaauucuuuga

SEQ ID NO: 175872 - RNA, 22 nt, Human
uauuccaagcacagcaacccag

SEQ ID NO: 175873 - RNA, 22 nt, Human
caggcagcugcuggguucagcc

SEQ ID NO: 175874 - RNA, 22 nt, Human
agcagggcuccugaaagccgcg

SEQ ID NO: 175875 - RNA, 22 nt, Human
uucuauugggcagcauugcuuc

SEQ ID NO: 175876 - RNA, 22 nt, Human
guuccaaaguuagaguguauug

SEQ ID NO: 175877 - RNA, 21 nt, Human
ugcauaaagaaauacaaauac

SEQ ID NO: 175878 - RNA, 22 nt, Human
uuauugagagcuguuuuauggc

SEQ ID NO: 175879 - RNA, 22 nt, Human
caaauacuaaacauaagauuuu

SEQ ID NO: 175880 - RNA, 22 nt, Human
ucaaaaauguuuuauauuggua

SEQ ID NO: 175881 - RNA, 22 nt, Human
uaauaaacugcuacgcuuaguu

SEQ ID NO: 175882 - RNA, 22 nt, Human
ggcaggcacauuugggggccgu

SEQ ID NO: 175883 - RNA, 22 nt, Human
uuccuuaggcuguuugcagugc

SEQ ID NO: 175884 - RNA, 22 nt, Human
gucacuguauccagguuccagc

SEQ ID NO: 175885 - RNA, 22 nt, Human
aauauuucugcagaaugguuuu

SEQ ID NO: 175886 - RNA, 22 nt, Human
acagguguguucccggaaagcc

SEQ ID NO: 175887 - RNA, 22 nt, Human
cucagagagggcaccagggcca

SEQ ID NO: 175888 - RNA, 22 nt, Human
aguaaacauagaauguucuucc

SEQ ID NO: 175889 - RNA, 18 nt, Human
cuguccaguagacucugc

SEQ ID NO: 175890 - RNA, 22 nt, Human
cuggcucuaucuccaaggcugg

SEQ ID NO: 175891 - RNA, 22 nt, Human
cauuagggacugaggaauaagg

SEQ ID NO: 175892 - RNA, 22 nt, Human
gggaaugugaaacaguaaggga

SEQ ID NO: 175893 - RNA, 22 nt, Human
gcuggguggaucggaggcucug

SEQ ID NO: 175894 - RNA, 22 nt, Human
ugagggagucaugauuaaggaa

SEQ ID NO: 175895 - RNA, 22 nt, Human
cuguccugagauaaagaugagg

SEQ ID NO: 175896 - RNA, 22 nt, Human
ucuggaggccauagggaaggau

SEQ ID NO: 175897 - RNA, 17 nt, Human
uccaggcauaucuccua

SEQ ID NO: 175898 - RNA, 22 nt, Human
ucgagcucuggagccaaggaug

SEQ ID NO: 175899 - RNA, 22 nt, Human
cuuuaguuuaagaacaugauga

SEQ ID NO: 175900 - RNA, 22 nt, Human
gggucuggagggcagcccuucu

SEQ ID NO: 175901 - RNA, 22 nt, Human
uuucugcauauguauguaugga

SEQ ID NO: 175902 - RNA, 22 nt, Human
cagagagcaugggaggcccgag

SEQ ID NO: 175903 - RNA, 22 nt, Human
gcagguguggagaguggucggg

SEQ ID NO: 175904 - RNA, 22 nt, Human
uuaaacauuuauggaggcagca

SEQ ID NO: 175905 - RNA, 22 nt, Human
cagggccagagagggcuggcug

SEQ ID NO: 175906 - RNA, 22 nt, Human
cuucugugcuucacaguugcca

SEQ ID NO: 175907 - RNA, 22 nt, Human
acaagaauuuacauguagugga

SEQ ID NO: 175908 - RNA, 22 nt, Human
gcaaaauuaaacuuagcaucau

SEQ ID NO: 175909 - RNA, 22 nt, Human
gcaggcagagaaggaacauuua

SEQ ID NO: 175910 - RNA, 22 nt, Human
uuauuacacugaaagaauugcg

SEQ ID NO: 175911 - RNA, 22 nt, Human
uagaauaaguugaugauauaug

SEQ ID NO: 175912 - RNA, 21 nt, Human
uuucuggguggcugcauagug

SEQ ID NO: 175913 - RNA, 22 nt, Human
agacaucaaugaucagagguag

SEQ ID NO: 175914 - RNA, 22 nt, Human
auuuaaauuuucugauggagag

SEQ ID NO: 175915 - RNA, 22 nt, Human
cagggcagugaagaacacacgu

SEQ ID NO: 175916 - RNA, 22 nt, Human
uccugcugccauuucaagugcu

SEQ ID NO: 175917 - RNA, 22 nt, Human
aagauaaacucuugauuucuga

SEQ ID NO: 175918 - RNA, 22 nt, Human
guuauugacucucuuguggcuu

SEQ ID NO: 175919 - RNA, 20 nt, Human
aggagcugaauuagaggguu

SEQ ID NO: 175920 - RNA, 22 nt, Human
ccagcuuuggaguguuguugcu

SEQ ID NO: 175921 - RNA, 22 nt, Human
auuccaaagccugaauaaugga

SEQ ID NO: 175922 - RNA, 22 nt, Human
aagggcagagggaaucccacau

SEQ ID NO: 175923 - RNA, 22 nt, Human
acagguguacaaugcaugacag

SEQ ID NO: 175924 - RNA, 22 nt, Human
ucuuagauguuagcucugugug

SEQ ID NO: 175925 - RNA, 22 nt, Human
uuugauuuacuggauauucuca

SEQ ID NO: 175926 - RNA, 22 nt, Human
uauuccuauggccacugcuacu

SEQ ID NO: 175927 - RNA, 22 nt, Human
guuuacauguacucauuauacu

SEQ ID NO: 175928 - RNA, 18 nt, Human
uggcagguagacucaggu

SEQ ID NO: 175929 - RNA, 22 nt, Human
agagauggagagcacuggggcu

SEQ ID NO: 175930 - RNA, 19 nt, Human
uguccucacagagcauaac

SEQ ID NO: 175931 - RNA, 22 nt, Human
caggacagagcccagacugugu

SEQ ID NO: 175932 - RNA, 22 nt, Human
gccuggagggauagaaugcaag

SEQ ID NO: 175933 - RNA, 22 nt, Human
gaaguccuccuaucuugcucuu

SEQ ID NO: 175934 - RNA, 22 nt, Human
uaugccuggaaccuuucucuuu

SEQ ID NO: 175935 - RNA, 22 nt, Human
uggcauuucuguuagacucuca

SEQ ID NO: 175936 - RNA, 22 nt, Human
ggguggaagccagagaggucau

SEQ ID NO: 175937 - RNA, 22 nt, Human
ggagaggggcaaguuuaucuag

SEQ ID NO: 175938 - RNA, 22 nt, Human
ccuguucacuuugacuucucca

SEQ ID NO: 175939 - RNA, 22 nt, Human
uucagaaacagagugagugagu

SEQ ID NO: 175940 - RNA, 22 nt, Human
gugagacacgugugugaccugg

SEQ ID NO: 175941 - RNA, 22 nt, Human
uagcaucuggagaaacaagucc

SEQ ID NO: 175942 - RNA, 22 nt, Human
agcaggugaugugagucuggaa

SEQ ID NO: 175943 - RNA, 15 nt, Human
uugcuuuaagacaug

SEQ ID NO: 175944 - RNA, 22 nt, Human
uuuaucuguuguaccugcauug

SEQ ID NO: 175945 - RNA, 22 nt, Human
uauugguaucugagacagaguu

SEQ ID NO: 175946 - RNA, 22 nt, Human
gaaguccucaaugcauugucuu

SEQ ID NO: 175947 - RNA, 22 nt, Human
aaggugucggcagagccgcuuc

SEQ ID NO: 175948 - RNA, 22 nt, Human
uaagaaucggucgcaacagagg

SEQ ID NO: 175949 - RNA, 21 nt, Human
auuuucauuaauucagugugg

SEQ ID NO: 175950 - RNA, 22 nt, Human
acaguguagaauccuguacuua

SEQ ID NO: 175951 - RNA, 22 nt, Human
ccaggugugagcauucugucuu

SEQ ID NO: 175952 - RNA, 22 nt, Human
agccauccucccaccucagccu

SEQ ID NO: 175953 - RNA, 19 nt, Human
caguccuuuccgcuuucuc

SEQ ID NO: 175954 - RNA, 22 nt, Human
uuggagguuugaaaauaugugu

SEQ ID NO: 175955 - RNA, 22 nt, Human
acuaaagaagccaaaguuuucu

SEQ ID NO: 175956 - RNA, 22 nt, Human
gcagguggcagaggugggaucu

SEQ ID NO: 175957 - RNA, 22 nt, Human
gacuuuauuuccuuauuuguga

SEQ ID NO: 175958 - RNA, 22 nt, Human
aauuaggggaggacguaucaua

SEQ ID NO: 175959 - RNA, 22 nt, Human
uaguacuacguuuucuacuauc

SEQ ID NO: 175960 - RNA, 22 nt, Human
gaggcuggaggucaaagaugaa

SEQ ID NO: 175961 - RNA, 22 nt, Human
acaugauucuugauaggcauug

SEQ ID NO: 175962 - RNA, 22 nt, Human
gaugagguuuuugaaaugugga

SEQ ID NO: 175963 - RNA, 22 nt, Human
auagcuuuuugucauagagucu

SEQ ID NO: 175964 - RNA, 19 nt, Human
cagaaauagcgaaguguaa

SEQ ID NO: 175965 - RNA, 22 nt, Human
uucauuccuucuguaccuugcc

SEQ ID NO: 175966 - RNA, 22 nt, Human
aguguccugugucccagacugu

SEQ ID NO: 175967 - RNA, 22 nt, Human
ccugggucuauagacuucaaga

SEQ ID NO: 175968 - RNA, 22 nt, Human
uuugaaguaccugguucugacu

SEQ ID NO: 175969 - RNA, 22 nt, Human
guacaauagucccuguuuggau

SEQ ID NO: 175970 - RNA, 22 nt, Human
cuauuauuauguuaacuggacu

SEQ ID NO: 175971 - RNA, 22 nt, Human
uacuacaagggcccuaaaaggu

SEQ ID NO: 175972 - RNA, 22 nt, Human
cugggcugcaguuccugguccu

SEQ ID NO: 175973 - RNA, 22 nt, Human
agggcgacaauggagagcguuu

SEQ ID NO: 175974 - RNA, 22 nt, Human
uccaguaugacugauguccuuc

SEQ ID NO: 175975 - RNA, 22 nt, Human
guaguucugcagugucaccuga

SEQ ID NO: 175976 - RNA, 22 nt, Human
ugucccucugaggcuucccugg

SEQ ID NO: 175977 - RNA, 19 nt, Human
ugguggcaaugucagcuaa

SEQ ID NO: 175978 - RNA, 22 nt, Human
agccggccauguggucuugugc

SEQ ID NO: 175979 - RNA, 22 nt, Human
uuaacacuccuaacuacagucu

SEQ ID NO: 175980 - RNA, 22 nt, Human
ccaugugucgggccugcagugg

SEQ ID NO: 175981 - RNA, 19 nt, Human
guuucauuaagauaggaaa

SEQ ID NO: 175982 - RNA, 22 nt, Human
uaggugucuggacaacuuugua

SEQ ID NO: 175983 - RNA, 22 nt, Human
caaguccuccaugugacuaggu

SEQ ID NO: 175984 - RNA, 22 nt, Human
ggcagguggcacugcugcuccc

SEQ ID NO: 175985 - RNA, 22 nt, Human
uuaguuuucccaucuuuauggu

SEQ ID NO: 175986 - RNA, 22 nt, Human
uucuucaaacaaaaguggcaug

SEQ ID NO: 175987 - RNA, 23 nt, Human
auucuucauuaucuucuagaaaa

SEQ ID NO: 175988 - RNA, 22 nt, Human
ugagacaaccuaauuaaacacc

SEQ ID NO: 175989 - RNA, 22 nt, Human
acuuguucauugaguacauaug

SEQ ID NO: 175990 - RNA, 22 nt, Human
ugcaaaaacugcaauugcuuuu

SEQ ID NO: 175991 - RNA, 22 nt, Human
ggcugaguugagaggauuacuu

SEQ ID NO: 175992 - RNA, 22 nt, Human
caaguccaucagauaagcaaga

SEQ ID NO: 175993 - RNA, 22 nt, Human
caucagaagaaagacaaaugau

SEQ ID NO: 175994 - RNA, 22 nt, Human
uuuaauugauucacagucugua

SEQ ID NO: 175995 - RNA, 17 nt, Human
acaggccugcuugcacu

SEQ ID NO: 175996 - RNA, 22 nt, Human
acagacagggcaccugccuccu

SEQ ID NO: 175997 - RNA, 22 nt, Human
uucuaacaaguggcuuguuagu

SEQ ID NO: 175998 - RNA, 22 nt, Human
agggcucccgcgguguccggga

SEQ ID NO: 175999 - RNA, 22 nt, Human
cauguugaauggccuugauuuu

SEQ ID NO: 176000 - RNA, 22 nt, Human
ucacugugcucucuagauaggc

SEQ ID NO: 176001 - RNA, 20 nt, Human
ccagacagcaccugccuggu

SEQ ID NO: 176002 - RNA, 22 nt, Human
ucaggaaagccuagaagagaac

SEQ ID NO: 176003 - RNA, 22 nt, Human
uuauuccaguaaucucuguaau

SEQ ID NO: 176004 - RNA, 22 nt, Human
ucuggcucauacaagccugcaa

SEQ ID NO: 176005 - RNA, 22 nt, Human
agaaaagaggcuuucuaagcau

SEQ ID NO: 176006 - RNA, 22 nt, Human
agagauucauguuuacuguagg

SEQ ID NO: 176007 - RNA, 22 nt, Human
gauuucaaaaguagauccauca

SEQ ID NO: 176008 - RNA, 22 nt, Human
ucagguggcuucggggaguggc

SEQ ID NO: 176009 - RNA, 22 nt, Human
uugauacuauuaagcacugggc

SEQ ID NO: 176010 - RNA, 22 nt, Human
uauuuauucuuuguacugccuu

SEQ ID NO: 176011 - RNA, 23 nt, Human
ccacuagcaccuguucaacuucu

SEQ ID NO: 176012 - RNA, 22 nt, Human
caggcauggugagaacucagcc

SEQ ID NO: 176013 - RNA, 18 nt, Human
uuuuacucauagcaggcc

SEQ ID NO: 176014 - RNA, 22 nt, Human
caaugaaagcaacugccuauaa

SEQ ID NO: 176015 - RNA, 21 nt, Human
auggugagauacugggugugg

SEQ ID NO: 176016 - RNA, 22 nt, Human
augugcuucauucuacaugaca

SEQ ID NO: 176017 - RNA, 22 nt, Human
auaaacucaugccaagaaauga

SEQ ID NO: 176018 - RNA, 22 nt, Human
gaauccaggguuguuugagcua

SEQ ID NO: 176019 - RNA, 22 nt, Human
acauccagaucucagcauggcu

SEQ ID NO: 176020 - RNA, 22 nt, Human
uaaauuauggcuggcagagcag

SEQ ID NO: 176021 - RNA, 22 nt, Human
guuuuuaucuaauagcaguuau

SEQ ID NO: 176022 - RNA, 23 nt, Human
uggcaggugguuagauguuuugu

SEQ ID NO: 176023 - RNA, 22 nt, Human
cuuguugcuaacauaugcuucu

SEQ ID NO: 176024 - RNA, 22 nt, Human
aauaucaacaguguccuucuaa

SEQ ID NO: 176025 - RNA, 22 nt, Human
gugucccaggccucuggaauua

SEQ ID NO: 176026 - RNA, 22 nt, Human
ccaggugguucaggucaccaua

SEQ ID NO: 176027 - RNA, 22 nt, Human
gcaacuuucaagcaccaugggg

SEQ ID NO: 176028 - RNA, 22 nt, Human
agcaggugggaucaagcuggca

SEQ ID NO: 176029 - RNA, 17 nt, Human
uucugggucccagggcc

SEQ ID NO: 176030 - RNA, 22 nt, Human
ugggccaguccagccccaggga

SEQ ID NO: 176031 - RNA, 22 nt, Human
guauauaugugugaacauguau

SEQ ID NO: 176032 - RNA, 22 nt, Human
aauuagggagagguagcuaggu

SEQ ID NO: 176033 - RNA, 22 nt, Human
ucaacaaauacuuaaagcagag

SEQ ID NO: 176034 - RNA, 22 nt, Human
ggcugccacgucgaggguccaa

SEQ ID NO: 176035 - RNA, 22 nt, Human
cuagaaauguagauucuuagug

SEQ ID NO: 176036 - RNA, 22 nt, Human
aaugaucuacucucauuaucuc

SEQ ID NO: 176037 - RNA, 22 nt, Human
ccaggcaggcuagaauguaaau

SEQ ID NO: 176038 - RNA, 22 nt, Human
uguuccuguuuaaugugcucau

SEQ ID NO: 176039 - RNA, 22 nt, Human
uguuccugaaugccuggcuggc

SEQ ID NO: 176040 - RNA, 22 nt, Human
cuucucaaaguugugaaucagg

SEQ ID NO: 176041 - RNA, 22 nt, Human
auggauuugcuuauacacaugu

SEQ ID NO: 176042 - RNA, 22 nt, Human
guucuaauaggagaaaagacag

SEQ ID NO: 176043 - RNA, 22 nt, Human
cuguggaauugaugcuuagugu

SEQ ID NO: 176044 - RNA, 22 nt, Human
auuucaacagaguuugaaggca

SEQ ID NO: 176045 - RNA, 22 nt, Human
gauuucaauccagcuuucuucu

SEQ ID NO: 176046 - RNA, 22 nt, Human
uauggcuuuuuauucaucuuac

SEQ ID NO: 176047 - RNA, 22 nt, Human
auugaaaaauucacaauucugg

SEQ ID NO: 176048 - RNA, 22 nt, Human
caucagaaggccagaggguagc

SEQ ID NO: 176049 - RNA, 22 nt, Human
gugugucccuacaacagcuuca

SEQ ID NO: 176050 - RNA, 22 nt, Human
uuacaagauaaccugaugcugu

SEQ ID NO: 176051 - RNA, 22 nt, Human
ugcuuuaucaaagcuauaguga

SEQ ID NO: 176052 - RNA, 22 nt, Human
cauggcuuuguucauauaauuu

SEQ ID NO: 176053 - RNA, 22 nt, Human
aauaacuggcacauaucacaua

SEQ ID NO: 176054 - RNA, 22 nt, Human
uuuuucagccaugaauuacacu

SEQ ID NO: 176055 - RNA, 22 nt, Human
auguuucaugacugagcaaaau

SEQ ID NO: 176056 - RNA, 22 nt, Human
auuucugugcaguaaaugguga

SEQ ID NO: 176057 - RNA, 22 nt, Human
caucagucuagauucuaguacc

SEQ ID NO: 176058 - RNA, 22 nt, Human
ccaaagucagugcucagucguc

SEQ ID NO: 176059 - RNA, 22 nt, Human
gaggugucccgcaguccccaag

SEQ ID NO: 176060 - RNA, 23 nt, Human
ucuuuccuaaugaaacagugaaa

SEQ ID NO: 176061 - RNA, 22 nt, Human
uugucuggucaaaucacuugua

SEQ ID NO: 176062 - RNA, 22 nt, Human
uagcuuuuaguacuuaauggcu

SEQ ID NO: 176063 - RNA, 21 nt, Human
ucuggguguaaaucuuauuug

SEQ ID NO: 176064 - RNA, 22 nt, Human
cuuagauacaguagaaagacuc

SEQ ID NO: 176065 - RNA, 22 nt, Human
cuggauuugccuauggugcuuu

SEQ ID NO: 176066 - RNA, 22 nt, Human
cucccaguguuguuuucugaug

SEQ ID NO: 176067 - RNA, 22 nt, Human
uuugcugaccccauucugaguc

SEQ ID NO: 176068 - RNA, 18 nt, Human
ucagcuuuugaaaaccaa

SEQ ID NO: 176069 - RNA, 15 nt, Human
gcaggcaggucaccu

SEQ ID NO: 176070 - RNA, 19 nt, Human
agaaauagccuuccuuguc

SEQ ID NO: 176071 - RNA, 22 nt, Human
uaaugucuccaggguugaccua

SEQ ID NO: 176072 - RNA, 22 nt, Human
uuccaggauggcaauaaugaau

SEQ ID NO: 176073 - RNA, 22 nt, Human
ucuguucauguugggcuuuucc

SEQ ID NO: 176074 - RNA, 22 nt, Human
ucugcccuggggucagccucca

SEQ ID NO: 176075 - RNA, 22 nt, Human
cuguuuucuagggcugagguga

SEQ ID NO: 176076 - RNA, 22 nt, Human
guggauggagcuggaagccauu

SEQ ID NO: 176077 - RNA, 22 nt, Human
guggauuacaagacaguugaga

SEQ ID NO: 176078 - RNA, 22 nt, Human
agaauucugacaauagaauugg

SEQ ID NO: 176079 - RNA, 23 nt, Human
uuuuauugauauguagcuguugu

SEQ ID NO: 176080 - RNA, 22 nt, Human
cuccuccuaaaugauucuuccu

SEQ ID NO: 176081 - RNA, 22 nt, Human
gauagaaagaauauagauucca

SEQ ID NO: 176082 - RNA, 22 nt, Human
agaucugaccuaaccccaccac

SEQ ID NO: 176083 - RNA, 23 nt, Human
uagaauucaaucuguuccacauc

SEQ ID NO: 176084 - RNA, 22 nt, Human
cauuguaagaggcuuugcagca

SEQ ID NO: 176085 - RNA, 22 nt, Human
acuuuaucaggaaucacacagc

SEQ ID NO: 176086 - RNA, 22 nt, Human
auuucucagcacuuccuaucuc

SEQ ID NO: 176087 - RNA, 22 nt, Human
uuucaguuuuugcucgauguau

SEQ ID NO: 176088 - RNA, 22 nt, Human
uugguacaaugugcuagguagg

SEQ ID NO: 176089 - RNA, 22 nt, Human
ggcaggugcucugugggccugg

SEQ ID NO: 176090 - RNA, 22 nt, Human
agcagggcucugccaugggccc

SEQ ID NO: 176091 - RNA, 22 nt, Human
aguuguaagaggcacaaggaag

SEQ ID NO: 176092 - RNA, 22 nt, Human
uagcuuuaggaugguucucuug

SEQ ID NO: 176093 - RNA, 22 nt, Human
uuuuccaaaguaccaugucccu

SEQ ID NO: 176094 - RNA, 22 nt, Human
caaugaaauugagauccagaga

SEQ ID NO: 176095 - RNA, 22 nt, Human
aaaucaguaaauguucauuaac

SEQ ID NO: 176096 - RNA, 22 nt, Human
caauacuuccuuguuagaggca

SEQ ID NO: 176097 - RNA, 22 nt, Human
aagaaagggagaaggauggugu

SEQ ID NO: 176098 - RNA, 20 nt, Human
ucagggcaugggacagcccc

SEQ ID NO: 176099 - RNA, 23 nt, Human
uuuauuuauuuaggcugagggau

SEQ ID NO: 176100 - RNA, 22 nt, Human
gacuacucaaacuuucucuaua

SEQ ID NO: 176101 - RNA, 22 nt, Human
uauugcugccucguccaggcug

SEQ ID NO: 176102 - RNA, 20 nt, Human
ccugucuccucuuaccuggc

SEQ ID NO: 176103 - RNA, 22 nt, Human
agggaauucacuggaacgcccu

SEQ ID NO: 176104 - RNA, 22 nt, Human
uccuccuuguucuuuugccuac

SEQ ID NO: 176105 - RNA, 22 nt, Human
ucagaauucugaccuuggguca

SEQ ID NO: 176106 - RNA, 22 nt, Human
aauacauguuuucuacuauucu

SEQ ID NO: 176107 - RNA, 22 nt, Human
uuuguuuucaaugugucauuca

SEQ ID NO: 176108 - RNA, 22 nt, Human
aaggugucaccagauuggcagg

SEQ ID NO: 176109 - RNA, 22 nt, Human
gcuucacaggcaaguuaagccu

SEQ ID NO: 176110 - RNA, 22 nt, Human
uccauguguuuuccuguccaca

SEQ ID NO: 176111 - RNA, 22 nt, Human
uucuucaaauagcagggaguca

SEQ ID NO: 176112 - RNA, 22 nt, Human
ugauaauauuuugaaucauaag

SEQ ID NO: 176113 - RNA, 17 nt, Human
cccguucucuucgcugg

SEQ ID NO: 176114 - RNA, 22 nt, Human
guaaauuauuucaagaucaucu

SEQ ID NO: 176115 - RNA, 22 nt, Human
cacauaaucaccaaguccuuuc

SEQ ID NO: 176116 - RNA, 22 nt, Human
aauucuagcauugugaaaauau

SEQ ID NO: 176117 - RNA, 22 nt, Human
auuuguuccacacauauuuacu

SEQ ID NO: 176118 - RNA, 21 nt, Human
acagagcauaaugguguggca

SEQ ID NO: 176119 - RNA, 18 nt, Human
ugcuggguaacuguaugg

SEQ ID NO: 176120 - RNA, 22 nt, Human
uaucauaaguuaauuaaacagu

SEQ ID NO: 176121 - RNA, 22 nt, Human
uuugacucuucuagcaagugug

SEQ ID NO: 176122 - RNA, 22 nt, Human
uuaagcauaauuaaagugaaau

SEQ ID NO: 176123 - RNA, 19 nt, Human
caggugguaaucugagccu

SEQ ID NO: 176124 - RNA, 22 nt, Human
uuugaagauuaugccagaguga

SEQ ID NO: 176125 - RNA, 22 nt, Human
cauuucaaggaccacccuggga

SEQ ID NO: 176126 - RNA, 22 nt, Human
guguguccaaggcacggaugac

SEQ ID NO: 176127 - RNA, 22 nt, Human
ccuuccucauccauuucucuug

SEQ ID NO: 176128 - RNA, 22 nt, Human
guuuuuacuaagguugcuaagu

SEQ ID NO: 176129 - RNA, 22 nt, Human
gaggugucuggccuuuguagga

SEQ ID NO: 176130 - RNA, 22 nt, Human
cagcaugaaacaauugagccca

SEQ ID NO: 176131 - RNA, 22 nt, Human
aguggggccgcgguccugcccu

SEQ ID NO: 176132 - RNA, 22 nt, Human
guuaauauuuaccugucaagaa

SEQ ID NO: 176133 - RNA, 22 nt, Human
acaauguguuuuuauacauuug

SEQ ID NO: 176134 - RNA, 22 nt, Human
acagguguaaaacccaggaugg

SEQ ID NO: 176135 - RNA, 22 nt, Human
gcagcuuucuugcccuaaucuu

SEQ ID NO: 176136 - RNA, 22 nt, Human
agucagguacuccgagggcaug

SEQ ID NO: 176137 - RNA, 22 nt, Human
gcaggacaggcguugguccagu

SEQ ID NO: 176138 - RNA, 22 nt, Human
ugcagguggauucaauguggga

SEQ ID NO: 176139 - RNA, 22 nt, Human
uucuuuuacauuaagauuucag

SEQ ID NO: 176140 - RNA, 22 nt, Human
uucagcaaacacgaugcuuguu

SEQ ID NO: 176141 - RNA, 22 nt, Human
agaauaucguagcauauuaucu

SEQ ID NO: 176142 - RNA, 22 nt, Human
aguuuccaaagcauguucacac

SEQ ID NO: 176143 - RNA, 22 nt, Human
cuggcuuucuauuuggugcuau

SEQ ID NO: 176144 - RNA, 22 nt, Human
cugguccuaaagcccuacucca

SEQ ID NO: 176145 - RNA, 22 nt, Human
aucuauacucagaguuaauauc

SEQ ID NO: 176146 - RNA, 22 nt, Human
auuucacaaaccauccugauuu

SEQ ID NO: 176147 - RNA, 22 nt, Human
ggcaggugcugggagcaucuca

SEQ ID NO: 176148 - RNA, 22 nt, Human
agcagggcuggauuuggcaaga

SEQ ID NO: 176149 - RNA, 22 nt, Human
ugcagguguagaguugggcucc

SEQ ID NO: 176150 - RNA, 22 nt, Human
ucaggaaagaagaugcucagug

SEQ ID NO: 176151 - RNA, 22 nt, Human
gaaccauuguugaaaagaauag

SEQ ID NO: 176152 - RNA, 22 nt, Human
aggcagggucuugcuauguugc

SEQ ID NO: 176153 - RNA, 23 nt, Human
agguggucuuguggaugcugcaa

SEQ ID NO: 176154 - RNA, 22 nt, Human
ucagcauaucuugagcuucaug

SEQ ID NO: 176155 - RNA, 22 nt, Human
cucuuaaauaacaucauugcuu

SEQ ID NO: 176156 - RNA, 22 nt, Human
gguguccuugcuccuucagcuu

SEQ ID NO: 176157 - RNA, 21 nt, Human
uguguaauauguauaagaaua

SEQ ID NO: 176158 - RNA, 22 nt, Human
acuggacagaggaaauauggag

SEQ ID NO: 176159 - RNA, 22 nt, Human
uacuaaacaucuggcauuaaau

SEQ ID NO: 176160 - RNA, 22 nt, Human
agguggggaggagugucucuuu

SEQ ID NO: 176161 - RNA, 22 nt, Human
auucauaaguaaaugauuaccu

SEQ ID NO: 176162 - RNA, 22 nt, Human
ugcuuuauucccuucugaugug

SEQ ID NO: 176163 - RNA, 22 nt, Human
uugaauaauguguauguuguua

SEQ ID NO: 176164 - RNA, 22 nt, Human
gaugaaaaucuugagaugucga

SEQ ID NO: 176165 - RNA, 22 nt, Human
uggaggaauaacagcaaccuua

SEQ ID NO: 176166 - RNA, 22 nt, Human
cugggugacagagugagauggu

SEQ ID NO: 176167 - RNA, 23 nt, Human
aaacuugcuauggcugaaaucau

SEQ ID NO: 176168 - RNA, 22 nt, Human
gccugcagccccucugcaguag

SEQ ID NO: 176169 - RNA, 22 nt, Human
cucuucuuauggccguggcuga

SEQ ID NO: 176170 - RNA, 22 nt, Human
aucagaauaauuagauuucaga

SEQ ID NO: 176171 - RNA, 22 nt, Human
gacagacagagaaugggcuuga

SEQ ID NO: 176172 - RNA, 22 nt, Human
ugcagggccccucugcaugagu

SEQ ID NO: 176173 - RNA, 23 nt, Human
uuggcaaagccuaugaaguccuc

SEQ ID NO: 176174 - RNA, 22 nt, Human
aguaaaaucaccaucucuuugu

SEQ ID NO: 176175 - RNA, 22 nt, Human
aaugaaacuaguagaaucuuug

SEQ ID NO: 176176 - RNA, 22 nt, Human
cucagcaacagcgacuuaaggg

SEQ ID NO: 176177 - RNA, 22 nt, Human
uuaaaagaauccuguuauccuc

SEQ ID NO: 176178 - RNA, 22 nt, Human
aaugaaacuauauuuagagagg

SEQ ID NO: 176179 - RNA, 20 nt, Human
uuacagaaaugauguuauuu

SEQ ID NO: 176180 - RNA, 22 nt, Human
aauguuaaguuuagauuauaac

SEQ ID NO: 176181 - RNA, 22 nt, Human
ucugaaauuuuaguuauagaaa

SEQ ID NO: 176182 - RNA, 18 nt, Human
cagaaaguuauuuacucu

SEQ ID NO: 176183 - RNA, 20 nt, Human
uuucacuggcuugauaaggu

SEQ ID NO: 176184 - RNA, 22 nt, Human
uucuaagaaauggaaaacgauu

SEQ ID NO: 176185 - RNA, 22 nt, Human
uaagaaacauuuuuaugacagu

SEQ ID NO: 176186 - RNA, 22 nt, Human
auuuacugagguaaauaaacug

SEQ ID NO: 176187 - RNA, 20 nt, Human
uaugauaauuacaaaauagu

SEQ ID NO: 176188 - RNA, 22 nt, Human
ucaguaaaugagcaaaaauuuc

SEQ ID NO: 176189 - RNA, 22 nt, Human
cucaaaauccauaaaaucaggu

SEQ ID NO: 176190 - RNA, 22 nt, Human
uucagaaaggcugugccagcca

SEQ ID NO: 176191 - RNA, 22 nt, Human
uuuaggaagaguugaguaaauu

SEQ ID NO: 176192 - RNA, 22 nt, Human
ucagaacauccugguuuaaaau

SEQ ID NO: 176193 - RNA, 22 nt, Human
uuuacagagaauguacauaaag

SEQ ID NO: 176194 - RNA, 22 nt, Human
aggaauuugggguuacaugaug

SEQ ID NO: 176195 - RNA, 22 nt, Human
auuuccuggaggaauggaagca

SEQ ID NO: 176196 - RNA, 22 nt, Human
uagaagaacaugucaaacuaua

SEQ ID NO: 176197 - RNA, 22 nt, Human
auuuuagagaaacaaacguagg

SEQ ID NO: 176198 - RNA, 22 nt, Human
cucaggaaaauauugaagaagu

SEQ ID NO: 176199 - RNA, 22 nt, Human
auuacugaggcaaaguaguuuu

SEQ ID NO: 176200 - RNA, 18 nt, Human
ucagacaaguuagacagg

SEQ ID NO: 176201 - RNA, 22 nt, Human
uuuuuaagagucuggaaauagu

SEQ ID NO: 176202 - RNA, 18 nt, Human
uauaaacacacuuagguu

SEQ ID NO: 176203 - RNA, 22 nt, Human
uuagaaaucaccucugaagauc

SEQ ID NO: 176204 - RNA, 22 nt, Human
auccucagagaacgaacacaau

SEQ ID NO: 176205 - RNA, 22 nt, Human
ucucagaaaugacaggagguac

SEQ ID NO: 176206 - RNA, 22 nt, Hepatitis B virus
gguggcuuuggggcauggacau

SEQ ID NO: 176207 - RNA, 22 nt, Hepatitis B virus
gaugaugugguauugggggcca

SEQ ID NO: 176208 - RNA, 22 nt, Hepatitis B virus
cauguccuacuguucaagccuc

SEQ ID NO: 176209 - RNA, 22 nt, Hepatitis B virus
ugagucccuuuuuaccucuauu

SEQ ID NO: 176210 - RNA, 22 nt, Human
gcagagauccuugcuggaugac

SEQ ID NO: 176211 - RNA, 22 nt, Human
ucccaggaucugagggcagaga

SEQ ID NO: 176212 - RNA, 22 nt, Human
agcugaaauucacaaggaucca

SEQ ID NO: 176213 - RNA, 22 nt, Human
agaggccuccgaaaggugggcu

SEQ ID NO: 176214 - RNA, 22 nt, Human
uaggcaugcaaauaaaugugca

SEQ ID NO: 176215 - RNA, 22 nt, Human
uuucucaacuguauuaugcaga

SEQ ID NO: 176216 - RNA, 22 nt, Human
ggaagaaaaugggcaacaggug

SEQ ID NO: 176217 - RNA, 22 nt, Human
ugagcagucagacaagcaucac

SEQ ID NO: 176218 - RNA, 22 nt, Human
aucaauucuuaggaaaauagcu

SEQ ID NO: 176219 - RNA, 22 nt, Human
agcccaugcaacaggccuagcg

SEQ ID NO: 176220 - RNA, 22 nt, Human
ucacaucucccuggaggacaca

SEQ ID NO: 176221 - RNA, 18 nt, Human
aaacagugccuaaguguc

SEQ ID NO: 176222 - RNA, 22 nt, Human
gaggaaccaaucugugauauuc

SEQ ID NO: 176223 - RNA, 22 nt, Human
uuguuucuuugaaguuucuaga

SEQ ID NO: 176224 - RNA, 22 nt, Human
ucuauagaucaguaaauaucuc

SEQ ID NO: 176225 - RNA, 22 nt, Human
augguggaaucggcgugaaugg

SEQ ID NO: 176226 - RNA, 20 nt, Human
gcauggcuaaucuguacuga

SEQ ID NO: 176227 - RNA, 22 nt, Human
ucaaacagcaggucuuucauag

SEQ ID NO: 176228 - RNA, 21 nt, Human
cgguggcucccgggauggcuc

SEQ ID NO: 176229 - RNA, 22 nt, Human
cugggagcgcagcaggcacaac

SEQ ID NO: 176230 - RNA, 22 nt, Human
uccuuucuaucuuggguaucua

SEQ ID NO: 176231 - RNA, 22 nt, Human
uuacuuuguucucaagauaugu

SEQ ID NO: 176232 - RNA, 22 nt, Human
ggagugauggaaagugcuuggc

SEQ ID NO: 176233 - RNA, 22 nt, Human
aaacaagagcuuacauggcugc

SEQ ID NO: 176234 - RNA, 22 nt, Human
gagcacugaggaaagcugguua

SEQ ID NO: 176235 - RNA, 22 nt, Human
cuggaggcacccuuagagaggc

SEQ ID NO: 176236 - RNA, 22 nt, Human
uguauuaacauuaauaaaaugg

SEQ ID NO: 176237 - RNA, 22 nt, Human
ggccacugccuccgccauggcu

SEQ ID NO: 176238 - RNA, 22 nt, Human
cagaguggagauguguguggaa

SEQ ID NO: 176239 - RNA, 22 nt, Human
cagggggugguccaggcugcgc

SEQ ID NO: 176240 - RNA, 22 nt, Human
agcccagagccucuccuaaagg

SEQ ID NO: 176241 - RNA, 23 nt, Human
uuucagaagugguccuaggaagc

SEQ ID NO: 176242 - RNA, 22 nt, Human
ugucccuggaacuauggcucca

SEQ ID NO: 176243 - RNA, 22 nt, Human
ucaugcagauaagaauaaguaa

SEQ ID NO: 176244 - RNA, 22 nt, Human
agugacauuugcaccagcugcu

SEQ ID NO: 176245 - RNA, 21 nt, Human
auaaagacaaacacuauuugg

SEQ ID NO: 176246 - RNA, 22 nt, Human
ugggggcagccaggcugucaag

SEQ ID NO: 176247 - RNA, 22 nt, Human
cagaacugggcagggagcagag

SEQ ID NO: 176248 - RNA, 22 nt, Human
ugcagggaacuuggacagcuag

SEQ ID NO: 176249 - RNA, 22 nt, Human
guuuauuagaguuuucugucug

SEQ ID NO: 176250 - RNA, 22 nt, Human
uucuuugcccuuaaugaaauaa

SEQ ID NO: 176251 - RNA, 22 nt, Human
ucugccucuuucaggccuggca

SEQ ID NO: 176252 - RNA, 22 nt, Human
caggcagcuagauuuauaacaa

SEQ ID NO: 176253 - RNA, 22 nt, Human
aaaggcuauuucagggucagua

SEQ ID NO: 176254 - RNA, 22 nt, Human
uggaacuaagguagaaacuauu

SEQ ID NO: 176255 - RNA, 19 nt, Human
cgcaggagccgaggugacc

SEQ ID NO: 176256 - RNA, 22 nt, Human
auuucugugcaguaaaugguga

SEQ ID NO: 176257 - RNA, 22 nt, Human
gcaggccucuguugagggccuu

SEQ ID NO: 176258 - RNA, 22 nt, Human
uccugagccugacaaucaccau

SEQ ID NO: 176259 - RNA, 22 nt, Human
ccacuggcauccagcugccauc

SEQ ID NO: 176260 - RNA, 20 nt, Human
ccucucugaagaggucaucu

SEQ ID NO: 176261 - RNA, 22 nt, Human
uugauucauauagauaugcgug

SEQ ID NO: 176262 - RNA, 22 nt, Human
gcaccucauuuugcagguagaa

SEQ ID NO: 176263 - RNA, 21 nt, Human
uuucuuaucuguaaaguggga

SEQ ID NO: 176264 - RNA, 22 nt, Human
cauaauuucuguaucagcacca

SEQ ID NO: 176265 - RNA, 22 nt, Human
aggccucuguuccccauguuuu

SEQ ID NO: 176266 - RNA, 22 nt, Human
aaguguguuuucaguguacuua

SEQ ID NO: 176267 - RNA, 22 nt, Human
aaugcuaacauugguuuauauc

SEQ ID NO: 176268 - RNA, 22 nt, Human
cuguguagccucaugugggcuu

SEQ ID NO: 176269 - RNA, 19 nt, Human
gcugcucugggucucaucu

SEQ ID NO: 176270 - RNA, 22 nt, Human
agggcucaccacugugcacucc

SEQ ID NO: 176271 - RNA, 22 nt, Human
cagggagcuggcuggcgugagu

SEQ ID NO: 176272 - RNA, 19 nt, Human
ggagucugagcccagguau

SEQ ID NO: 176273 - RNA, 22 nt, Human
acaggcugauagaccauaaaua

SEQ ID NO: 176274 - RNA, 22 nt, Human
acacugugcaugcauauacaca

SEQ ID NO: 176275 - RNA, 22 nt, Human
ggcagugccacuaagcucugcu

SEQ ID NO: 176276 - RNA, 22 nt, Human
cagccagaucagggcagggguu
